United States Patent Application Publication US 2026/0373308 A1, published November 26, 2026 (application 19/712,177).

The application's sequence listing, which the Patent Office published only in electronic form, follows.

SEQUENCE LISTING (43928 sequences)

SEQ ID NO: 1 - DNA, 21 bp, synthetic construct
  source 1..21: mol_type = other DNA
tattccaaatccaataataat

SEQ ID NO: 2 - DNA, 21 bp, synthetic construct
  source 1..21: mol_type = other DNA
gatcacgggataaataaatgg

SEQ ID NO: 3 - DNA, 21 bp, synthetic construct
  source 1..21: mol_type = other DNA
tccacgggggtgaataaatgg

SEQ ID NO: 4 - DNA, 21 bp, synthetic construct
  source 1..21: mol_type = other DNA
tatgcgaaagggaatataaat

SEQ ID NO: 5 - DNA, 21 bp, synthetic construct
  source 1..21: mol_type = other DNA
ttgcacaggcagaatatagat

SEQ ID NO: 6 - DNA, 21 bp, synthetic construct
  source 1..21: mol_type = other DNA
cactccaaagtgaatataaat

SEQ ID NO: 7 - DNA, 21 bp, synthetic construct
  source 1..21: mol_type = other DNA
tatgcgaaattgaatataaat

SEQ ID NO: 8 - DNA, 21 bp, synthetic construct
  source 1..21: mol_type = other DNA
tattccaaagtgaatataaat

SEQ ID NO: 9 - DNA, 21 bp, synthetic construct
  source 1..21: mol_type = other DNA
tatgcgaaagcgaattataat

SEQ ID NO: 10 - DNA, 21 bp, synthetic construct
  source 1..21: mol_type = other DNA
ttctccaaacagaattataat

SEQ ID NO: 11 - DNA, 21 bp, synthetic construct
  source 1..21: mol_type = other DNA
tatgcgaaatccaataataat

SEQ ID NO: 12 - DNA, 21 bp, synthetic construct
  source 1..21: mol_type = other DNA
tattccaaatccaatataaat

SEQ ID NO: 13 - DNA, 21 bp, synthetic construct
  source 1..21: mol_type = other DNA
atcgacgaatggcatcatttt

SEQ ID NO: 14 - DNA, 21 bp, synthetic construct
  source 1..21: mol_type = other DNA
tatgcgaaagcgaatataaat

SEQ ID NO: 15 - DNA, 21 bp, synthetic construct
  source 1..21: mol_type = other DNA
tattccaaagcgaattgtaat

SEQ ID NO: 16 - DNA, 21 bp, synthetic construct
  source 1..21: mol_type = other DNA
ttctccaggatgaatgataat

SEQ ID NO: 17 - DNA, 21 bp, synthetic construct
  source 1..21: mol_type = other DNA
tatgcgaaaatagggtataat

SEQ ID NO: 18 - DNA, 21 bp, synthetic construct
  source 1..21: mol_type = other DNA
gggaatgattatcagtcctat

SEQ ID NO: 19 - DNA, 21 bp, synthetic construct
  source 1..21: mol_type = other DNA
tatgcgaaatccaatataaat

SEQ ID NO: 20 - DNA, 21 bp, synthetic construct
  source 1..21: mol_type = other DNA
ttctccaaagcgaatataaat

SEQ ID NO: 21 - DNA, 21 bp, synthetic construct
  source 1..21: mol_type = other DNA
tattccagggagaattataat

SEQ ID NO: 22 - DNA, 21 bp, synthetic construct
  source 1..21: mol_type = other DNA
tatgcgaggttgaatatgaat

SEQ ID NO: 23 - DNA, 21 bp, synthetic construct
  source 1..21: mol_type = other DNA
tatgcgaaagggaataataat

SEQ ID NO: 24 - DNA, 21 bp, synthetic construct
  source 1..21: mol_type = other DNA
acggaggagacgtattataaa

SEQ ID NO: 25 - DNA, 21 bp, synthetic construct
  source 1..21: mol_type = other DNA
ttcgcgaaagggaatataaat

SEQ ID NO: 26 - DNA, 21 bp, synthetic construct
  source 1..21: mol_type = other DNA
tatgcgaaacaggggaataat

SEQ ID NO: 27 - DNA, 21 bp, synthetic construct
  source 1..21: mol_type = other DNA
ttctccaaattggggtataat

SEQ ID NO: 28 - DNA, 21 bp, synthetic construct
  source 1..21: mol_type = other DNA
ttcgcgaaagcggggtataat

SEQ ID NO: 29 - DNA, 21 bp, synthetic construct
  source 1..21: mol_type = other DNA
tattccaggttcaatgataat

SEQ ID NO: 30 - DNA, 21 bp, synthetic construct
  source 1..21: mol_type = other DNA
tactcaaaggccggctgcaac

SEQ ID NO: 31 - DNA, 21 bp, synthetic construct
  source 1..21: mol_type = other DNA
tatgcgaaacagaatataaat

SEQ ID NO: 32 - DNA, 21 bp, synthetic construct
  source 1..21: mol_type = other DNA
gataatcactccaataaatgg

SEQ ID NO: 33 - DNA, 21 bp, synthetic construct
  source 1..21: mol_type = other DNA
tatgcgaaacacgggtataat

SEQ ID NO: 34 - DNA, 21 bp, synthetic construct
  source 1..21: mol_type = other DNA
gatgggttgtccaataaatgg

SEQ ID NO: 35 - DNA, 21 bp, synthetic construct
  source 1..21: mol_type = other DNA
ttcgcgaaaacggggtataat

SEQ ID NO: 36 - DNA, 21 bp, synthetic construct
  source 1..21: mol_type = other DNA
tccaatgatacggtgtatagg

SEQ ID NO: 37 - DNA, 21 bp, synthetic construct
  source 1..21: mol_type = other DNA
aatgggacgtcctattcctgg

SEQ ID NO: 38 - DNA, 21 bp, synthetic construct
  source 1..21: mol_type = other DNA
ttttcacgcatgaaccataac

SEQ ID NO: 39 - DNA, 21 bp, synthetic construct
  source 1..21: mol_type = other DNA
tattccaaacaggggataaat

SEQ ID NO: 40 - DNA, 21 bp, synthetic construct
  source 1..21: mol_type = other DNA
acgaataatacggtgtataaa

SEQ ID NO: 41 - DNA, 21 bp, synthetic construct
  source 1..21: mol_type = other DNA
gatgtgaatgggaattatgcg

SEQ ID NO: 42 - DNA, 21 bp, synthetic construct
  source 1..21: mol_type = other DNA
tattccaggcacaatgataat

SEQ ID NO: 43 - DNA, 21 bp, synthetic construct
  source 1..21: mol_type = other DNA
tacgccaaggccaactgcaac

SEQ ID NO: 44 - DNA, 21 bp, synthetic construct
  source 1..21: mol_type = other DNA
ttgtccaggacgtccgataat

SEQ ID NO: 45 - DNA, 21 bp, synthetic construct
  source 1..21: mol_type = other DNA
tactcacgctacggcgacaac

SEQ ID NO: 46 - DNA, 21 bp, synthetic construct
  source 1..21: mol_type = other DNA
tatgcgaaaccggggtataat

SEQ ID NO: 47 - DNA, 21 bp, synthetic construct
  source 1..21: mol_type = other DNA
tatgcgaaagcggggaataat

SEQ ID NO: 48 - DNA, 21 bp, synthetic construct
  source 1..21: mol_type = other DNA
tatgcgaaagcgaataataat

SEQ ID NO: 49 - DNA, 21 bp, synthetic construct
  source 1..21: mol_type = other DNA
tattccaaacagaatatgaat

SEQ ID NO: 50 - DNA, 21 bp, synthetic construct
  source 1..21: mol_type = other DNA
tatgcgaaacagaatatgaat

SEQ ID NO: 51 - DNA, 21 bp, synthetic construct
  source 1..21: mol_type = other DNA
atagtgtccacgaatggggtg

SEQ ID NO: 52 - DNA, 21 bp, synthetic construct
  source 1..21: mol_type = other DNA
ttggcgaaaacggggataaat

SEQ ID NO: 53 - DNA, 21 bp, synthetic construct
  source 1..21: mol_type = other DNA
tatgcgaaagcggggataaat

SEQ ID NO: 54 - DNA, 21 bp, synthetic construct
  source 1..21: mol_type = other DNA
ttgtccaggttgaatataata

SEQ ID NO: 55 - DNA, 21 bp, synthetic construct
  source 1..21: mol_type = other DNA
ttcgcgaaatccgggataaat

SEQ ID NO: 56 - DNA, 21 bp, synthetic construct
  source 1..21: mol_type = other DNA
gacgacgtatcacgcaagtgg

SEQ ID NO: 57 - DNA, 21 bp, synthetic construct
  source 1..21: mol_type = other DNA
tatgtgaaatccgataatggg

SEQ ID NO: 58 - DNA, 21 bp, synthetic construct
  source 1..21: mol_type = other DNA
gtggcgcacgcggggataggg

SEQ ID NO: 59 - DNA, 21 bp, synthetic construct
  source 1..21: mol_type = other DNA
ttttcaaagctgggctttaac

SEQ ID NO: 60 - DNA, 21 bp, synthetic construct
  source 1..21: mol_type = other DNA
tatgcgaaatccgggataaat

SEQ ID NO: 61 - DNA, 21 bp, synthetic construct
  source 1..21: mol_type = other DNA
tatgcgaaattggggaataat

SEQ ID NO: 62 - DNA, 21 bp, synthetic construct
  source 1..21: mol_type = other DNA
tattccaaaacgaatataaat

SEQ ID NO: 63 - DNA, 21 bp, synthetic construct
  source 1..21: mol_type = other DNA
ttctccaggttgtccgataat

SEQ ID NO: 64 - DNA, 21 bp, synthetic construct
  source 1..21: mol_type = other DNA
ttgtccaaattgaatgataat

SEQ ID NO: 65 - DNA, 21 bp, synthetic construct
  source 1..21: mol_type = other DNA
tatgcgaggacggggtcctcc

SEQ ID NO: 66 - DNA, 21 bp, synthetic construct
  source 1..21: mol_type = other DNA
tattccaaagcggggataaat

SEQ ID NO: 67 - DNA, 21 bp, synthetic construct
  source 1..21: mol_type = other DNA
ttgcacaaattgtccaatcag

SEQ ID NO: 68 - DNA, 21 bp, synthetic construct
  source 1..21: mol_type = other DNA
tatcacaaattgaatttggtg

SEQ ID NO: 69 - DNA, 21 bp, synthetic construct
  source 1..21: mol_type = other DNA
tattccaggttggatagggat

SEQ ID NO: 70 - DNA, 21 bp, synthetic construct
  source 1..21: mol_type = other DNA
tatgcgaggataggggataat

SEQ ID NO: 71 - DNA, 21 bp, synthetic construct
  source 1..21: mol_type = other DNA
gtggagtcctcctccaaatgg

SEQ ID NO: 72 - DNA, 21 bp, synthetic construct
  source 1..21: mol_type = other DNA
tatgcgaggccggggtataat

SEQ ID NO: 73 - DNA, 21 bp, synthetic construct
  source 1..21: mol_type = other DNA
ttggcgaaattggggccgaat

SEQ ID NO: 74 - DNA, 21 bp, synthetic construct
  source 1..21: mol_type = other DNA
tattccaaacacaatatgaat

SEQ ID NO: 75 - DNA, 21 bp, synthetic construct
  source 1..21: mol_type = other DNA
tatgcgaaaacggggataaat

SEQ ID NO: 76 - DNA, 21 bp, synthetic construct
  source 1..21: mol_type = other DNA
tatgcgaaaaatgggataaat

SEQ ID NO: 77 - DNA, 21 bp, synthetic construct
  source 1..21: mol_type = other DNA
ttgtccaggacgggggataat

SEQ ID NO: 78 - DNA, 21 bp, synthetic construct
  source 1..21: mol_type = other DNA
aatgatggggagtcccagtgg

SEQ ID NO: 79 - DNA, 21 bp, synthetic construct
  source 1..21: mol_type = other DNA
tatcacgcgtcctcctataat

SEQ ID NO: 80 - DNA, 21 bp, synthetic construct
  source 1..21: mol_type = other DNA
gaggcgtattccgatagggat

SEQ ID NO: 81 - DNA, 21 bp, synthetic construct
  source 1..21: mol_type = other DNA
tactcaaagaccaactgcaac

SEQ ID NO: 82 - DNA, 21 bp, synthetic construct
  source 1..21: mol_type = other DNA
tattccaaatccgggcagaat

SEQ ID NO: 83 - DNA, 21 bp, synthetic construct
  source 1..21: mol_type = other DNA
ttggcgaggggggcggataat

SEQ ID NO: 84 - DNA, 21 bp, synthetic construct
  source 1..21: mol_type = other DNA
tatgcgaggttggggcagaat

SEQ ID NO: 85 - DNA, 21 bp, synthetic construct
  source 1..21: mol_type = other DNA
tatttcgcggggaaatatgat

SEQ ID NO: 86 - DNA, 21 bp, synthetic construct
  source 1..21: mol_type = other DNA
ttgtccaaaacggggaataat

SEQ ID NO: 87 - DNA, 21 bp, synthetic construct
  source 1..21: mol_type = other DNA
ttgtccaggtcctccatagat

SEQ ID NO: 88 - DNA, 21 bp, synthetic construct
  source 1..21: mol_type = other DNA
ggccgcttttactcagacggc

SEQ ID NO: 89 - DNA, 21 bp, synthetic construct
  source 1..21: mol_type = other DNA
tactcacgccataaccataac

SEQ ID NO: 90 - DNA, 21 bp, synthetic construct
  source 1..21: mol_type = other DNA
gataaattcgataattatgcg

SEQ ID NO: 91 - DNA, 21 bp, synthetic construct
  source 1..21: mol_type = other DNA
tatgcgaaagagaataggaat

SEQ ID NO: 92 - DNA, 21 bp, synthetic construct
  source 1..21: mol_type = other DNA
ttgtccaaattgaattccaat

SEQ ID NO: 93 - DNA, 21 bp, synthetic construct
  source 1..21: mol_type = other DNA
ttggcgaaagcggggataaat

SEQ ID NO: 94 - DNA, 21 bp, synthetic construct
  source 1..21: mol_type = other DNA
ctggccaagaacggcatcaac

SEQ ID NO: 95 - DNA, 21 bp, synthetic construct
  source 1..21: mol_type = other DNA
gcctcaggctcatcatcatgg

SEQ ID NO: 96 - DNA, 21 bp, synthetic construct
  source 1..21: mol_type = other DNA
tacgcccgcctgggctcaaac

SEQ ID NO: 97 - DNA, 21 bp, synthetic construct
  source 1..21: mol_type = other DNA
ctgtcacgcatgaactttaac

SEQ ID NO: 98 - DNA, 21 bp, synthetic construct
  source 1..21: mol_type = other DNA
ttgtccaggtccggggataat

SEQ ID NO: 99 - DNA, 21 bp, synthetic construct
  source 1..21: mol_type = other DNA
atgacgaggatagagaataat

SEQ ID NO: 100 - DNA, 21 bp, synthetic construct
  source 1..21: mol_type = other DNA
cgcatcacccatccctactca

SEQ ID NO: 101 - DNA, 21 bp, synthetic construct
  source 1..21: mol_type = other DNA
acctcagactacatgtcattt

SEQ ID NO: 102 - DNA, 21 bp, synthetic construct
  source 1..21: mol_type = other DNA
tacgccaagaccggctgcaac

SEQ ID NO: 103 - DNA, 21 bp, synthetic construct
  source 1..21: mol_type = other DNA
tattccaaagtgaatatgaat

SEQ ID NO: 104 - DNA, 21 bp, synthetic construct
  source 1..21: mol_type = other DNA
gagcacgcgacgtccaattgg

SEQ ID NO: 105 - DNA, 21 bp, synthetic construct
  source 1..21: mol_type = other DNA
atgatatccacgaatgggagg

SEQ ID NO: 106 - DNA, 21 bp, synthetic construct
  source 1..21: mol_type = other DNA
ttgtccagggcgggggataat

SEQ ID NO: 107 - DNA, 21 bp, synthetic construct
  source 1..21: mol_type = other DNA
ttctccaaaataaattataat

SEQ ID NO: 108 - DNA, 21 bp, synthetic construct
  source 1..21: mol_type = other DNA
tatgcgagggtgggggataat

SEQ ID NO: 109 - DNA, 21 bp, synthetic construct
  source 1..21: mol_type = other DNA
ttctccaggataggggataat

SEQ ID NO: 110 - DNA, 21 bp, synthetic construct
  source 1..21: mol_type = other DNA
ttctccaaagcggggaataat

SEQ ID NO: 111 - DNA, 21 bp, synthetic construct
  source 1..21: mol_type = other DNA
catgaaggccattcacattgg

SEQ ID NO: 112 - DNA, 21 bp, synthetic construct
  source 1..21: mol_type = other DNA
acggtgtccacgaatgggata

SEQ ID NO: 113 - DNA, 21 bp, synthetic construct
  source 1..21: mol_type = other DNA
aggtccgatacggtgtatata

SEQ ID NO: 114 - DNA, 21 bp, synthetic construct
  source 1..21: mol_type = other DNA
tattccaaagcgaatgataat

SEQ ID NO: 115 - DNA, 21 bp, synthetic construct
  source 1..21: mol_type = other DNA
tactcaaagaacaactacaac

SEQ ID NO: 116 - DNA, 21 bp, synthetic construct
  source 1..21: mol_type = other DNA
tattccgcgaggaatgataat

SEQ ID NO: 117 - DNA, 21 bp, synthetic construct
  source 1..21: mol_type = other DNA
gtaccctcatcacaagtatgg

SEQ ID NO: 118 - DNA, 21 bp, synthetic construct
  source 1..21: mol_type = other DNA
ttcgcgtatgagaataggaat

SEQ ID NO: 119 - DNA, 21 bp, synthetic construct
  source 1..21: mol_type = other DNA
ttttcaaagctgaaccccaac

SEQ ID NO: 120 - DNA, 21 bp, synthetic construct
  source 1..21: mol_type = other DNA
tattccaggaatggggataat

SEQ ID NO: 121 - DNA, 21 bp, synthetic construct
  source 1..21: mol_type = other DNA
tattccagggcgtccgatcag

SEQ ID NO: 122 - DNA, 21 bp, synthetic construct
  source 1..21: mol_type = other DNA
tatttgaaatccacgaataat

SEQ ID NO: 123 - DNA, 21 bp, synthetic construct
  source 1..21: mol_type = other DNA
ttctccaaattgaatcagaat

SEQ ID NO: 124 - DNA, 21 bp, synthetic construct
  source 1..21: mol_type = other DNA
cagcacaaattgcagccgttg

SEQ ID NO: 125 - DNA, 21 bp, synthetic construct
  source 1..21: mol_type = other DNA
aatgcggattataataggaat

SEQ ID NO: 126 - DNA, 21 bp, synthetic construct
  source 1..21: mol_type = other DNA
ttgtccaggataggggataat

SEQ ID NO: 127 - DNA, 21 bp, synthetic construct
  source 1..21: mol_type = other DNA
tacgccaagctgggccccaac

SEQ ID NO: 128 - DNA, 21 bp, synthetic construct
  source 1..21: mol_type = other DNA
ttgtccaggttgggggataat

SEQ ID NO: 129 - DNA, 21 bp, synthetic construct
  source 1..21: mol_type = other DNA
tatgcgagggaggggtataat

SEQ ID NO: 130 - DNA, 21 bp, synthetic construct
  source 1..21: mol_type = other DNA
cacccgccggcgtattcctcc

SEQ ID NO: 131 - DNA, 21 bp, synthetic construct
  source 1..21: mol_type = other DNA
tattccaggacgaatgataat

SEQ ID NO: 132 - DNA, 21 bp, synthetic construct
  source 1..21: mol_type = other DNA
tatgcgaggttgggggataat

SEQ ID NO: 133 - DNA, 21 bp, synthetic construct
  source 1..21: mol_type = other DNA
tttgccaagtcaggctttaac

SEQ ID NO: 134 - DNA, 21 bp, synthetic construct
  source 1..21: mol_type = other DNA
tatgcgaggatggggcagaat

SEQ ID NO: 135 - DNA, 21 bp, synthetic construct
  source 1..21: mol_type = other DNA
ttcgcgaggacgtccgataat

SEQ ID NO: 136 - DNA, 21 bp, synthetic construct
  source 1..21: mol_type = other DNA
ttgtccaaaatagggttgaat

SEQ ID NO: 137 - DNA, 21 bp, synthetic construct
  source 1..21: mol_type = other DNA
ttcacgtcctccaatggggtg

SEQ ID NO: 138 - DNA, 21 bp, synthetic construct
  source 1..21: mol_type = other DNA
tatgcgagggcgaatttgaat

SEQ ID NO: 139 - DNA, 21 bp, synthetic construct
  source 1..21: mol_type = other DNA
ttgtccaaaatagggcagaat

SEQ ID NO: 140 - DNA, 21 bp, synthetic construct
  source 1..21: mol_type = other DNA
ttcgcgaggacgggggataat

SEQ ID NO: 141 - DNA, 21 bp, synthetic construct
  source 1..21: mol_type = other DNA
ttcgcgaaaacggggaataat

SEQ ID NO: 142 - DNA, 21 bp, synthetic construct
  source 1..21: mol_type = other DNA
ttctccaggataaatttgaat

SEQ ID NO: 143 - DNA, 21 bp, synthetic construct
  source 1..21: mol_type = other DNA
gcgtccgagttcatgacgttc

SEQ ID NO: 144 - DNA, 21 bp, synthetic construct
  source 1..21: mol_type = other DNA
ttctccagggcgggggataat

SEQ ID NO: 145 - DNA, 21 bp, synthetic construct
  source 1..21: mol_type = other DNA
tattccaaagcggggcagaat

SEQ ID NO: 146 - DNA, 21 bp, synthetic construct
  source 1..21: mol_type = other DNA
ttctccagggcggggttcaat

SEQ ID NO: 147 - DNA, 21 bp, synthetic construct
  source 1..21: mol_type = other DNA
ttttcacgctacggctcaaac

SEQ ID NO: 148 - DNA, 21 bp, synthetic construct
  source 1..21: mol_type = other DNA
tatgcgaggcagaatacgaat

SEQ ID NO: 149 - DNA, 21 bp, synthetic construct
  source 1..21: mol_type = other DNA
atggtgtccacgaatggggtg

SEQ ID NO: 150 - DNA, 21 bp, synthetic construct
  source 1..21: mol_type = other DNA
gccaagtcaaccaacggcatc

SEQ ID NO: 151 - DNA, 21 bp, synthetic construct
  source 1..21: mol_type = other DNA
gtaggctcagcccataactgg

SEQ ID NO: 152 - DNA, 21 bp, synthetic construct
  source 1..21: mol_type = other DNA
tattccaaacagaatacgaat

SEQ ID NO: 153 - DNA, 21 bp, synthetic construct
  source 1..21: mol_type = other DNA
ttggcgaggtccggggataat

SEQ ID NO: 154 - DNA, 21 bp, synthetic construct
  source 1..21: mol_type = other DNA
atattgtccacgaatgggata

SEQ ID NO: 155 - DNA, 21 bp, synthetic construct
  source 1..21: mol_type = other DNA
gtattttcaaccaacggcatc

SEQ ID NO: 156 - DNA, 21 bp, synthetic construct
  source 1..21: mol_type = other DNA
ttgttgtccacgaatgggagg

SEQ ID NO: 157 - DNA, 21 bp, synthetic construct
  source 1..21: mol_type = other DNA
tatgcgaggcaggggcagaat

SEQ ID NO: 158 - DNA, 21 bp, synthetic construct
  source 1..21: mol_type = other DNA
tactcacgctcaggcatcaac

SEQ ID NO: 159 - DNA, 21 bp, synthetic construct
  source 1..21: mol_type = other DNA
ttgtccaaagtgggggataat

SEQ ID NO: 160 - DNA, 21 bp, synthetic construct
  source 1..21: mol_type = other DNA
tattccaaagcgaatacgaat

SEQ ID NO: 161 - DNA, 21 bp, synthetic construct
  source 1..21: mol_type = other DNA
ggcgaatcagaccgcaagtgg

SEQ ID NO: 162 - DNA, 21 bp, synthetic construct
  source 1..21: mol_type = other DNA
ctgtcaaagatcggcgtaaac

SEQ ID NO: 163 - DNA, 21 bp, synthetic construct
  source 1..21: mol_type = other DNA
ttggcgaaatccgggcagaat

SEQ ID NO: 164 - DNA, 21 bp, synthetic construct
  source 1..21: mol_type = other DNA
tatgcgaaatccgggcagaat

SEQ ID NO: 165 - DNA, 21 bp, synthetic construct
  source 1..21: mol_type = other DNA
ttctccaaattggggcacaat

SEQ ID NO: 166 - DNA, 21 bp, synthetic construct
  source 1..21: mol_type = other DNA
tattccagggtgaatgagaat

SEQ ID NO: 167 - DNA, 21 bp, synthetic construct
  source 1..21: mol_type = other DNA
tactcaaagaacaaccataac

SEQ ID NO: 168 - DNA, 21 bp, synthetic construct
  source 1..21: mol_type = other DNA
ttgtattccacgaatgggata

SEQ ID NO: 169 - DNA, 21 bp, synthetic construct
  source 1..21: mol_type = other DNA
tatgcgaggcaggggatgaat

SEQ ID NO: 170 - DNA, 21 bp, synthetic construct
  source 1..21: mol_type = other DNA
ttgtccaaagtggggtccaat

SEQ ID NO: 171 - DNA, 21 bp, synthetic construct
  source 1..21: mol_type = other DNA
gaaatgggcggcggctcatgg

SEQ ID NO: 172 - DNA, 21 bp, synthetic construct
  source 1..21: mol_type = other DNA
ttcgcgaaatccgggcacaat

SEQ ID NO: 173 - DNA, 21 bp, synthetic construct
  source 1..21: mol_type = other DNA
tatgcgaaatccaatatgaat

SEQ ID NO: 174 - DNA, 21 bp, synthetic construct
  source 1..21: mol_type = other DNA
tatgcgaaagcgaatatgaat

SEQ ID NO: 175 - DNA, 21 bp, synthetic construct
  source 1..21: mol_type = other DNA
gacctgtcacatgccaagtgg

SEQ ID NO: 176 - DNA, 21 bp, synthetic construct
  source 1..21: mol_type = other DNA
ggggaggggatagtgaggtgg

SEQ ID NO: 177 - DNA, 21 bp, synthetic construct
  source 1..21: mol_type = other DNA
tattccaaagggaatgataat

SEQ ID NO: 178 - DNA, 21 bp, synthetic construct
  source 1..21: mol_type = other DNA
tatgcgagggtggggcagaat

SEQ ID NO: 179 - DNA, 21 bp, synthetic construct
  source 1..21: mol_type = other DNA
ttggcgaggacgggggataat

SEQ ID NO: 180 - DNA, 21 bp, synthetic construct
  source 1..21: mol_type = other DNA
ttgtccaggtccaatgataat

SEQ ID NO: 181 - DNA, 21 bp, synthetic construct
  source 1..21: mol_type = other DNA
tccgtgtccacgaatgggagg

SEQ ID NO: 182 - DNA, 21 bp, synthetic construct
  source 1..21: mol_type = other DNA
tattccaaacacaatgtgaat

SEQ ID NO: 183 - DNA, 21 bp, synthetic construct
  source 1..21: mol_type = other DNA
tatgcgagggcgaatgtgaat

SEQ ID NO: 184 - DNA, 21 bp, synthetic construct
  source 1..21: mol_type = other DNA
ttggcgaaaaatgggaataat

SEQ ID NO: 185 - DNA, 21 bp, synthetic construct
  source 1..21: mol_type = other DNA
ttgcacaaattgacggtgtcc

SEQ ID NO: 186 - DNA, 21 bp, synthetic construct
  source 1..21: mol_type = other DNA
ttggcgaaacaggggttcaat

SEQ ID NO: 187 - DNA, 21 bp, synthetic construct
  source 1..21: mol_type = other DNA
gggaatgatatgtccacgtgg

SEQ ID NO: 188 - DNA, 21 bp, synthetic construct
  source 1..21: mol_type = other DNA
tttgtatcaaccaacggcatc

SEQ ID NO: 189 - DNA, 21 bp, synthetic construct
  source 1..21: mol_type = other DNA
ttctccaggataaatgataat

SEQ ID NO: 190 - DNA, 21 bp, synthetic construct
  source 1..21: mol_type = other DNA
tttgcccgcgccggcatgaac

SEQ ID NO: 191 - DNA, 21 bp, synthetic construct
  source 1..21: mol_type = other DNA
gggtccgggatacagaattgg

SEQ ID NO: 192 - DNA, 21 bp, synthetic construct
  source 1..21: mol_type = other DNA
tatgtgtccacgaatggggtg

SEQ ID NO: 193 - DNA, 21 bp, synthetic construct
  source 1..21: mol_type = other DNA
ttgtccaaagcggggttcaat

SEQ ID NO: 194 - DNA, 21 bp, synthetic construct
  source 1..21: mol_type = other DNA
tactcaaagggcaacatgaac

SEQ ID NO: 195 - DNA, 21 bp, synthetic construct
  source 1..21: mol_type = other DNA
tatgcgaggcagggggataat

SEQ ID NO: 196 - DNA, 21 bp, synthetic construct
  source 1..21: mol_type = other DNA
tatgcgaaaacggggcagaat

SEQ ID NO: 197 - DNA, 21 bp, synthetic construct
  source 1..21: mol_type = other DNA
acgaggaatgggaatatagcg

SEQ ID NO: 198 - DNA, 21 bp, synthetic construct
  source 1..21: mol_type = other DNA
caggtgtccacgaatggggtg

SEQ ID NO: 199 - DNA, 21 bp, synthetic construct
  source 1..21: mol_type = other DNA
tttcattcaaccaacggcatc

SEQ ID NO: 200 - DNA, 21 bp, synthetic construct
  source 1..21: mol_type = other DNA
acgaggatagggaataatgcg

SEQ ID NO: 201 - DNA, 21 bp, synthetic construct
  source 1..21: mol_type = other DNA
tttgtacgctcagacatcaag

SEQ ID NO: 202 - DNA, 21 bp, synthetic construct
  source 1..21: mol_type = other DNA
ttctccaaaacggggccgaat

SEQ ID NO: 203 - DNA, 21 bp, synthetic construct
  source 1..21: mol_type = other DNA
ttgtccaaattggggccgaat

SEQ ID NO: 204 - DNA, 21 bp, synthetic construct
  source 1..21: mol_type = other DNA
gtgaaatccatgaatggggtg

SEQ ID NO: 205 - DNA, 21 bp, synthetic construct
  source 1..21: mol_type = other DNA
ttgttctccacgaatggggtg

SEQ ID NO: 206 - DNA, 21 bp, synthetic construct
  source 1..21: mol_type = other DNA
tatgcgaggtccggggataat

SEQ ID NO: 207 - DNA, 21 bp, synthetic construct
  source 1..21: mol_type = other DNA
tactcaaagcaaggctcaaac

SEQ ID NO: 208 - DNA, 21 bp, synthetic construct
  source 1..21: mol_type = other DNA
tatgcgaaattgaatttcaat

SEQ ID NO: 209 - DNA, 21 bp, synthetic construct
  source 1..21: mol_type = other DNA
atagagtccacgaatggggtg

SEQ ID NO: 210 - DNA, 21 bp, synthetic construct
  source 1..21: mol_type = other DNA
ttgcacagggcgacgtatgat

SEQ ID NO: 211 - DNA, 21 bp, synthetic construct
  source 1..21: mol_type = other DNA
ttcgtgtccacgaatggggtg

SEQ ID NO: 212 - DNA, 21 bp, synthetic construct
  source 1..21: mol_type = other DNA
tatgcgaaagataattggaat

SEQ ID NO: 213 - DNA, 21 bp, synthetic construct
  source 1..21: mol_type = other DNA
ccgcagtccacgaatggggtg

SEQ ID NO: 214 - DNA, 21 bp, synthetic construct
  source 1..21: mol_type = other DNA
tattccaaatggaatgataat

SEQ ID NO: 215 - DNA, 21 bp, synthetic construct
  source 1..21: mol_type = other DNA
ctggccaagcaaggccataac

SEQ ID NO: 216 - DNA, 21 bp, synthetic construct
  source 1..21: mol_type = other DNA
tccatatccacgaatgggagg

SEQ ID NO: 217 - DNA, 21 bp, synthetic construct
  source 1..21: mol_type = other DNA
tatgcgaaattggggttcaat

SEQ ID NO: 218 - DNA, 21 bp, synthetic construct
  source 1..21: mol_type = other DNA
ttgcacaaagcgtccccgacg

SEQ ID NO: 219 - DNA, 21 bp, synthetic construct
  source 1..21: mol_type = other DNA
tattcctccttgaatccgaaa

SEQ ID NO: 220 - DNA, 21 bp, synthetic construct
  source 1..21: mol_type = other DNA
tatgcgaggacgaatgataat

SEQ ID NO: 221 - DNA, 21 bp, synthetic construct
  source 1..21: mol_type = other DNA
ttggcgaaaaatgggttcaat

SEQ ID NO: 222 - DNA, 21 bp, synthetic construct
  source 1..21: mol_type = other DNA
ttggcgaaatccgggatgaat

SEQ ID NO: 223 - DNA, 21 bp, synthetic construct
  source 1..21: mol_type = other DNA
ttctccaaagcggggataaat

SEQ ID NO: 224 - DNA, 21 bp, synthetic construct
  source 1..21: mol_type = other DNA
ttgtccaaacaggggaataat

SEQ ID NO: 225 - DNA, 21 bp, synthetic construct
  source 1..21: mol_type = other DNA
ttctccaaaacggggttcaat

SEQ ID NO: 226 - DNA, 21 bp, synthetic construct
  source 1..21: mol_type = other DNA
tattccaaacaggggatgaat

SEQ ID NO: 227 - DNA, 21 bp, synthetic construct
  source 1..21: mol_type = other DNA
ttgtccaaaatggggccgaat

SEQ ID NO: 228 - DNA, 21 bp, synthetic construct
  source 1..21: mol_type = other DNA
tatgcgaggttgaatgataat

SEQ ID NO: 229 - DNA, 21 bp, synthetic construct
  source 1..21: mol_type = other DNA
tattccaggatgggggataat

SEQ ID NO: 230 - DNA, 21 bp, synthetic construct
  source 1..21: mol_type = other DNA
cgcaacgaaggctcatcatgg

SEQ ID NO: 231 - DNA, 21 bp, synthetic construct
  source 1..21: mol_type = other DNA
tactcaaagtcaggctacaac

SEQ ID NO: 232 - DNA, 21 bp, synthetic construct
  source 1..21: mol_type = other DNA
ttggcgaaacaggggttgaat

SEQ ID NO: 233 - DNA, 21 bp, synthetic construct
  source 1..21: mol_type = other DNA
cacaaatccacgaatgggtat

SEQ ID NO: 234 - DNA, 21 bp, synthetic construct
  source 1..21: mol_type = other DNA
ttgtccaaattggggttgaat

SEQ ID NO: 235 - DNA, 21 bp, synthetic construct
  source 1..21: mol_type = other DNA
caggatgggaattccaggtat

SEQ ID NO: 236 - DNA, 21 bp, synthetic construct
  source 1..21: mol_type = other DNA
ttgtccaggatgaatgataat

SEQ ID NO: 237 - DNA, 21 bp, synthetic construct
  source 1..21: mol_type = other DNA
ctggccaagggcggctttaac

SEQ ID NO: 238 - DNA, 21 bp, synthetic construct
  source 1..21: mol_type = other DNA
ttgtccaaatccgggccgaat

SEQ ID NO: 239 - DNA, 21 bp, synthetic construct
  source 1..21: mol_type = other DNA
ttcatgtccacgaatggggtg

SEQ ID NO: 240 - DNA, 21 bp, synthetic construct
  source 1..21: mol_type = other DNA
tatgggtccacgaatggggtg

SEQ ID NO: 241 - DNA, 21 bp, synthetic construct
  source 1..21: mol_type = other DNA
atgtccaaattgaatgcgaat

SEQ ID NO: 242 - DNA, 21 bp, synthetic construct
  source 1..21: mol_type = other DNA
aaattgccggattatgggaat

SEQ ID NO: 243 - DNA, 21 bp, synthetic construct
  source 1..21: mol_type = other DNA
tatgcgaaacaggggttcaat

SEQ ID NO: 244 - DNA, 21 bp, synthetic construct
  source 1..21: mol_type = other DNA
acgcactccgggaaatccgcg

SEQ ID NO: 245 - DNA, 21 bp, synthetic construct
  source 1..21: mol_type = other DNA
ttctccaggacgggggataat

SEQ ID NO: 246 - DNA, 21 bp, synthetic construct
  source 1..21: mol_type = other DNA
ttggcgaaatccgggttgaat

SEQ ID NO: 247 - DNA, 21 bp, synthetic construct
  source 1..21: mol_type = other DNA
tttgcccgcgccggccccaac

SEQ ID NO: 248 - DNA, 21 bp, synthetic construct
  source 1..21: mol_type = other DNA
tactcaaagatgaacaccaac

SEQ ID NO: 249 - DNA, 21 bp, synthetic construct
  source 1..21: mol_type = other DNA
ttgcagtccacgaatgggata

SEQ ID NO: 250 - DNA, 21 bp, synthetic construct
  source 1..21: mol_type = other DNA
atgacgtccacgaatggggtg

SEQ ID NO: 251 - DNA, 21 bp, synthetic construct
  source 1..21: mol_type = other DNA
tatgcgaggccggggataaat

SEQ ID NO: 252 - DNA, 21 bp, synthetic construct
  source 1..21: mol_type = other DNA
tatgcgaaaacggggttcaat

SEQ ID NO: 253 - DNA, 21 bp, synthetic construct
  source 1..21: mol_type = other DNA
tatgcgaaaaatgggcacaat

SEQ ID NO: 254 - DNA, 21 bp, synthetic construct
  source 1..21: mol_type = other DNA
ttctccaaagtggggatgaat

SEQ ID NO: 255 - DNA, 21 bp, synthetic construct
  source 1..21: mol_type = other DNA
ttggcgaaaacggggatgaat

SEQ ID NO: 256 - DNA, 21 bp, synthetic construct
  source 1..21: mol_type = other DNA
ttgtccaaaacggggccgaat

SEQ ID NO: 257 - DNA, 21 bp, synthetic construct
  source 1..21: mol_type = other DNA
atgtcctccacgaatggggtg

SEQ ID NO: 258 - DNA, 21 bp, synthetic construct
  source 1..21: mol_type = other DNA
ttgtccaggcagaatgataat

SEQ ID NO: 259 - DNA, 21 bp, synthetic construct
  source 1..21: mol_type = other DNA
tatgcgaaatccggggggaat

SEQ ID NO: 260 - DNA, 21 bp, synthetic construct
  source 1..21: mol_type = other DNA
ttggcgaaagcggggcacaat

SEQ ID NO: 261 - DNA, 21 bp, synthetic construct
  source 1..21: mol_type = other DNA
tattccaaaacggggcacaat

SEQ ID NO: 262 - DNA, 21 bp, synthetic construct
  source 1..21: mol_type = other DNA
tgggcgtccacgaatggggtg

SEQ ID NO: 263 - DNA, 21 bp, synthetic construct
  source 1..21: mol_type = other DNA
atagtgtccacgaatgggata

SEQ ID NO: 264 - DNA, 21 bp, synthetic construct
  source 1..21: mol_type = other DNA
tatgcgaaaggggggcagaat

SEQ ID NO: 265 - DNA, 21 bp, synthetic construct
  source 1..21: mol_type = other DNA
ttcgcgaaaacggggcacaat

SEQ ID NO: 266 - DNA, 21 bp, synthetic construct
  source 1..21: mol_type = other DNA
ttcgcgaaaggggggataaat

SEQ ID NO: 267 - DNA, 21 bp, synthetic construct
  source 1..21: mol_type = other DNA
tattccaaacacaatgataat

SEQ ID NO: 268 - DNA, 21 bp, synthetic construct
  source 1..21: mol_type = other DNA
ttctccaaagtgggggcgaat

SEQ ID NO: 269 - DNA, 21 bp, synthetic construct
  source 1..21: mol_type = other DNA
tacgccaagaacggctacaac

SEQ ID NO: 270 - DNA, 21 bp, synthetic construct
  source 1..21: mol_type = other DNA
ttctccaaaatagggccgaat

SEQ ID NO: 271 - DNA, 21 bp, synthetic construct
  source 1..21: mol_type = other DNA
tttgccaagtcaggcaacaac

SEQ ID NO: 272 - DNA, 21 bp, synthetic construct
  source 1..21: mol_type = other DNA
tattccaggcaggggacgaat

SEQ ID NO: 273 - DNA, 21 bp, synthetic construct
  source 1..21: mol_type = other DNA
cacatatccacgaatggggtg

SEQ ID NO: 274 - DNA, 21 bp, synthetic construct
  source 1..21: mol_type = other DNA
tatgcgagggcggggcagaat

SEQ ID NO: 275 - DNA, 21 bp, synthetic construct
  source 1..21: mol_type = other DNA
tactcaaagatgggcatgaac

SEQ ID NO: 276 - DNA, 21 bp, synthetic construct
  source 1..21: mol_type = other DNA
ttggcgaaaacggggcacaat

SEQ ID NO: 277 - DNA, 21 bp, synthetic construct
  source 1..21: mol_type = other DNA
tattccaaacagaatccgaat

SEQ ID NO: 278 - DNA, 21 bp, synthetic construct
  source 1..21: mol_type = other DNA
tacgcccgcgccggcaaggac

SEQ ID NO: 279 - DNA, 21 bp, synthetic construct
  source 1..21: mol_type = other DNA
tattccaaagtgggggataat

SEQ ID NO: 280 - DNA, 21 bp, synthetic construct
  source 1..21: mol_type = other DNA
tttatctcaaccaacggcatc

SEQ ID NO: 281 - DNA, 21 bp, synthetic construct
  source 1..21: mol_type = other DNA
ttcgcgtccacgaatgggata

SEQ ID NO: 282 - DNA, 21 bp, synthetic construct
  source 1..21: mol_type = other DNA
ttctggtccggggaggtgtcc

SEQ ID NO: 283 - DNA, 21 bp, synthetic construct
  source 1..21: mol_type = other DNA
tgctcaggccgcccccaagaa

SEQ ID NO: 284 - DNA, 21 bp, synthetic construct
  source 1..21: mol_type = other DNA
tttgcctcaaccaacggcgta

SEQ ID NO: 285 - DNA, 21 bp, synthetic construct
  source 1..21: mol_type = other DNA
ttgtccaaatcctccgtgaat

SEQ ID NO: 286 - DNA, 21 bp, synthetic construct
  source 1..21: mol_type = other DNA
tttgccaagggcggctggaac

SEQ ID NO: 287 - DNA, 21 bp, synthetic construct
  source 1..21: mol_type = other DNA
tactcaaagctgggcatcaac

SEQ ID NO: 288 - DNA, 21 bp, synthetic construct
  source 1..21: mol_type = other DNA
ttgtccaaagtggggatgaat

SEQ ID NO: 289 - DNA, 21 bp, synthetic construct
  source 1..21: mol_type = other DNA
acgtattccgggaataatgcg

SEQ ID NO: 290 - DNA, 21 bp, synthetic construct
  source 1..21: mol_type = other DNA
aggtccccggtgacgttcccg

SEQ ID NO: 291 - DNA, 21 bp, synthetic construct
  source 1..21: mol_type = other DNA
ttggcgaggccggggccgaat

SEQ ID NO: 292 - DNA, 21 bp, synthetic construct
  source 1..21: mol_type = other DNA
ctggccaagggcggcatcaac

SEQ ID NO: 293 - DNA, 21 bp, synthetic construct
  source 1..21: mol_type = other DNA
atagtgtccacgaatgggagg

SEQ ID NO: 294 - DNA, 21 bp, synthetic construct
  source 1..21: mol_type = other DNA
tgggagtccacgaatggggtg

SEQ ID NO: 295 - DNA, 21 bp, synthetic construct
  source 1..21: mol_type = other DNA
tacgccaagaacggcgtaaac

SEQ ID NO: 296 - DNA, 21 bp, synthetic construct
  source 1..21: mol_type = other DNA
ttgtccaggacgggggagaat

SEQ ID NO: 297 - DNA, 21 bp, synthetic construct
  source 1..21: mol_type = other DNA
acgaaattgggggataatgcg

SEQ ID NO: 298 - DNA, 21 bp, synthetic construct
  source 1..21: mol_type = other DNA
ttctccaaacaggggtataat

SEQ ID NO: 299 - DNA, 21 bp, synthetic construct
  source 1..21: mol_type = other DNA
ttcgattccacgaatgggata

SEQ ID NO: 300 - DNA, 21 bp, synthetic construct
  source 1..21: mol_type = other DNA
tatgcgaggaatggggataat

SEQ ID NO: 301 - DNA, 21 bp, synthetic construct
  source 1..21: mol_type = other DNA
ttgtccaaagtgggggagaat

SEQ ID NO: 302 - DNA, 21 bp, synthetic construct
  source 1..21: mol_type = other DNA
ctgtcaaagctgggcatcaac

SEQ ID NO: 303 - DNA, 21 bp, synthetic construct
  source 1..21: mol_type = other DNA
tatgcgaggcagggggagaat

SEQ ID NO: 304 - DNA, 21 bp, synthetic construct
  source 1..21: mol_type = other DNA
tacgtatcaaccaacggcatc

SEQ ID NO: 305 - DNA, 21 bp, synthetic construct
  source 1..21: mol_type = other DNA
caggagtccacgaatggggtg

SEQ ID NO: 306 - DNA, 21 bp, synthetic construct
  source 1..21: mol_type = other DNA
ttgcacgcgagggggttggat

SEQ ID NO: 307 - DNA, 21 bp, synthetic construct
  source 1..21: mol_type = other DNA
tatgcgaggttgaatgtgaat

SEQ ID NO: 308 - DNA, 21 bp, synthetic construct
  source 1..21: mol_type = other DNA
ccgtatgcggtgtccatgaaa

SEQ ID NO: 309 - DNA, 21 bp, synthetic construct
  source 1..21: mol_type = other DNA
tattccaaagtgaatttcaat

SEQ ID NO: 310 - DNA, 21 bp, synthetic construct
  source 1..21: mol_type = other DNA
ctgtcaaagaccggccataac

SEQ ID NO: 311 - DNA, 21 bp, synthetic construct
  source 1..21: mol_type = other DNA
gtgatgtccacgaatgggata

SEQ ID NO: 312 - DNA, 21 bp, synthetic construct
  source 1..21: mol_type = other DNA
ttggcgaaaacggggcagaat

SEQ ID NO: 313 - DNA, 21 bp, synthetic construct
  source 1..21: mol_type = other DNA
tatgcgaaaggggggttcaat

SEQ ID NO: 314 - DNA, 21 bp, synthetic construct
  source 1..21: mol_type = other DNA
ttgtccaaagcggggccgaat

SEQ ID NO: 315 - DNA, 21 bp, synthetic construct
  source 1..21: mol_type = other DNA
tttgccaagaccggcatgaac

SEQ ID NO: 316 - DNA, 21 bp, synthetic construct
  source 1..21: mol_type = other DNA
ttgtccaaagcggggatgaat

SEQ ID NO: 317 - DNA, 21 bp, synthetic construct
  source 1..21: mol_type = other DNA
tattccaaacagggggataat

SEQ ID NO: 318 - DNA, 21 bp, synthetic construct
  source 1..21: mol_type = other DNA
tatgcgagggatgggtataat

SEQ ID NO: 319 - DNA, 21 bp, synthetic construct
  source 1..21: mol_type = other DNA
tattccaggcaggggatgaat

SEQ ID NO: 320 - DNA, 21 bp, synthetic construct
  source 1..21: mol_type = other DNA
ttggcgaaaacggggttcaat

SEQ ID NO: 321 - DNA, 21 bp, synthetic construct
  source 1..21: mol_type = other DNA
acgttgtccacgaatgggata

SEQ ID NO: 322 - DNA, 21 bp, synthetic construct
  source 1..21: mol_type = other DNA
gcgatatccacgaatgggagg

SEQ ID NO: 323 - DNA, 21 bp, synthetic construct
  source 1..21: mol_type = other DNA
tatgcgaggaatgggcagaat

SEQ ID NO: 324 - DNA, 21 bp, synthetic construct
  source 1..21: mol_type = other DNA
tatgcgaaaccggggaataat

SEQ ID NO: 325 - DNA, 21 bp, synthetic construct
  source 1..21: mol_type = other DNA
ttctccaaattgaatacgaat

SEQ ID NO: 326 - DNA, 21 bp, synthetic construct
  source 1..21: mol_type = other DNA
ataaaatccacgaatggggtg

SEQ ID NO: 327 - DNA, 21 bp, synthetic construct
  source 1..21: mol_type = other DNA
acgttgtccgcgaatgggagg

SEQ ID NO: 328 - DNA, 21 bp, synthetic construct
  source 1..21: mol_type = other DNA
agggagtccacgaatggggtg

SEQ ID NO: 329 - DNA, 21 bp, synthetic construct
  source 1..21: mol_type = other DNA
tacgccaagcccggctttaac

SEQ ID NO: 330 - DNA, 21 bp, synthetic construct
  source 1..21: mol_type = other DNA
tacgcccgcgccggcatcaac

SEQ ID NO: 331 - DNA, 21 bp, synthetic construct
  source 1..21: mol_type = other DNA
gcgaaatccacgaatggggtg

SEQ ID NO: 332 - DNA, 21 bp, synthetic construct
  source 1..21: mol_type = other DNA
gtgaaatatgattggtccgat

SEQ ID NO: 333 - DNA, 21 bp, synthetic construct
  source 1..21: mol_type = other DNA
tatcacaaaacgtccttgaat

SEQ ID NO: 334 - DNA, 21 bp, synthetic construct
  source 1..21: mol_type = other DNA
tatgcgaaagggaatccgaat

SEQ ID NO: 335 - DNA, 21 bp, synthetic construct
  source 1..21: mol_type = other DNA
gagtggtccacgaatgggagg

SEQ ID NO: 336 - DNA, 21 bp, synthetic construct
  source 1..21: mol_type = other DNA
ttgaaatccacgaatgggata

SEQ ID NO: 337 - DNA, 21 bp, synthetic construct
  source 1..21: mol_type = other DNA
gtggggtccacgaatgggata

SEQ ID NO: 338 - DNA, 21 bp, synthetic construct
  source 1..21: mol_type = other DNA
agggatgagacgaggttgtgg

SEQ ID NO: 339 - DNA, 21 bp, synthetic construct
  source 1..21: mol_type = other DNA
ctggccaagcaaggcatcaac

SEQ ID NO: 340 - DNA, 21 bp, synthetic construct
  source 1..21: mol_type = other DNA
tattccaggatgggggagaat

SEQ ID NO: 341 - DNA, 21 bp, synthetic construct
  source 1..21: mol_type = other DNA
gtgcagtccacgaatgggata

SEQ ID NO: 342 - DNA, 21 bp, synthetic construct
  source 1..21: mol_type = other DNA
tattccaaaacggggttgaat

SEQ ID NO: 343 - DNA, 21 bp, synthetic construct
  source 1..21: mol_type = other DNA
tactcaaagcaaggcgtaaac

SEQ ID NO: 344 - DNA, 21 bp, synthetic construct
  source 1..21: mol_type = other DNA
ttctccaaattgaatttgaat

SEQ ID NO: 345 - DNA, 21 bp, synthetic construct
  source 1..21: mol_type = other DNA
tacgccaagtcaggcctgaac

SEQ ID NO: 346 - DNA, 21 bp, synthetic construct
  source 1..21: mol_type = other DNA
tcagaaacctcatcacgctgg

SEQ ID NO: 347 - DNA, 21 bp, synthetic construct
  source 1..21: mol_type = other DNA
ataccgcagacgaattatgcg

SEQ ID NO: 348 - DNA, 21 bp, synthetic construct
  source 1..21: mol_type = other DNA
ggcaacatgaaccgctacgac

SEQ ID NO: 349 - DNA, 21 bp, synthetic construct
  source 1..21: mol_type = other DNA
ttgttgtccacgaatgggata

SEQ ID NO: 350 - DNA, 21 bp, synthetic construct
  source 1..21: mol_type = other DNA
cacgggggggcgtccgcgtat

SEQ ID NO: 351 - DNA, 21 bp, synthetic construct
  source 1..21: mol_type = other DNA
gagaaatccacgaatgggagg

SEQ ID NO: 352 - DNA, 21 bp, synthetic construct
  source 1..21: mol_type = other DNA
ttgtccaggatgggggataat

SEQ ID NO: 353 - DNA, 21 bp, synthetic construct
  source 1..21: mol_type = other DNA
gggaatgatgggtccaaatat

SEQ ID NO: 354 - DNA, 21 bp, synthetic construct
  source 1..21: mol_type = other DNA
tattccaaagggaatacgaat

SEQ ID NO: 355 - DNA, 21 bp, synthetic construct
  source 1..21: mol_type = other DNA
ttcgcgaaaacggggccgaat

SEQ ID NO: 356 - DNA, 21 bp, synthetic construct
  source 1..21: mol_type = other DNA
tatgcgaggttgggggtgaat

SEQ ID NO: 357 - DNA, 21 bp, synthetic construct
  source 1..21: mol_type = other DNA
tattccaaagggaatgtgaat

SEQ ID NO: 358 - DNA, 21 bp, synthetic construct
  source 1..21: mol_type = other DNA
tacatgtcaaccaacggcatc

SEQ ID NO: 359 - DNA, 21 bp, synthetic construct
  source 1..21: mol_type = other DNA
tcctattccacgaatgggata

SEQ ID NO: 360 - DNA, 21 bp, synthetic construct
  source 1..21: mol_type = other DNA
tactcaaagtcaaacgtaaac

SEQ ID NO: 361 - DNA, 21 bp, synthetic construct
  source 1..21: mol_type = other DNA
tccttgtccacgaatgggagg

SEQ ID NO: 362 - DNA, 21 bp, synthetic construct
  source 1..21: mol_type = other DNA
tactcacgccatggcaccaac

SEQ ID NO: 363 - DNA, 21 bp, synthetic construct
  source 1..21: mol_type = other DNA
tattccaaaacgggggggaat

SEQ ID NO: 364 - DNA, 21 bp, synthetic construct
  source 1..21: mol_type = other DNA
tattccaaagcgaatgcgaat

SEQ ID NO: 365 - DNA, 21 bp, synthetic construct
  source 1..21: mol_type = other DNA
ctggccaagtcaggcatcaac

SEQ ID NO: 366 - DNA, 21 bp, synthetic construct
  source 1..21: mol_type = other DNA
ctggccaagggcggccaaaac

SEQ ID NO: 367 - DNA, 21 bp, synthetic construct
  source 1..21: mol_type = other DNA
tactcaaagggcaaccaaaac

SEQ ID NO: 368 - DNA, 21 bp, synthetic construct
  source 1..21: mol_type = other DNA
ttgtccaaagcggggcagaat

SEQ ID NO: 369 - DNA, 21 bp, synthetic construct
  source 1..21: mol_type = other DNA
tgggattcctccaatggggtg

SEQ ID NO: 370 - DNA, 21 bp, synthetic construct
  source 1..21: mol_type = other DNA
ttggcgaaatccgggtccaat

SEQ ID NO: 371 - DNA, 21 bp, synthetic construct
  source 1..21: mol_type = other DNA
tactcaaagtacggccccaac

SEQ ID NO: 372 - DNA, 21 bp, synthetic construct
  source 1..21: mol_type = other DNA
ttgtccaaagcggggcacaat

SEQ ID NO: 373 - DNA, 21 bp, synthetic construct
  source 1..21: mol_type = other DNA
ttgtccaaaatgaatttgaat

SEQ ID NO: 374 - DNA, 21 bp, synthetic construct
  source 1..21: mol_type = other DNA
ttggcgaaaggggggttgaat

SEQ ID NO: 375 - DNA, 21 bp, synthetic construct
  source 1..21: mol_type = other DNA
ctgtcaaaggtaggcctgaac

SEQ ID NO: 376 - DNA, 21 bp, synthetic construct
  source 1..21: mol_type = other DNA
tttgccaagggcggccataac

SEQ ID NO: 377 - DNA, 21 bp, synthetic construct
  source 1..21: mol_type = other DNA
gagcagtccacgaatgggagg

SEQ ID NO: 378 - DNA, 21 bp, synthetic construct
  source 1..21: mol_type = other DNA
ggggaggtgaatgtgaggtgg

SEQ ID NO: 379 - DNA, 21 bp, synthetic construct
  source 1..21: mol_type = other DNA
ccgatgtccacgaatgggagg

SEQ ID NO: 380 - DNA, 21 bp, synthetic construct
  source 1..21: mol_type = other DNA
aatgtgtccacgaatgggagg

SEQ ID NO: 381 - DNA, 21 bp, synthetic construct
  source 1..21: mol_type = other DNA
tatgcgaggttgaatgcgaat

SEQ ID NO: 382 - DNA, 21 bp, synthetic construct
  source 1..21: mol_type = other DNA
ttggcgaaaaatgggcacaat

SEQ ID NO: 383 - DNA, 21 bp, synthetic construct
  source 1..21: mol_type = other DNA
aatacgtccacgaatggggtg

SEQ ID NO: 384 - DNA, 21 bp, synthetic construct
  source 1..21: mol_type = other DNA
ttggcgaggaatggggataat

SEQ ID NO: 385 - DNA, 21 bp, synthetic construct
  source 1..21: mol_type = other DNA
tacgccaagatcggcctgaac

SEQ ID NO: 386 - DNA, 21 bp, synthetic construct
  source 1..21: mol_type = other DNA
tattccaaaacgggggataat

SEQ ID NO: 387 - DNA, 21 bp, synthetic construct
  source 1..21: mol_type = other DNA
atcacctcaaccaacggcatc

SEQ ID NO: 388 - DNA, 21 bp, synthetic construct
  source 1..21: mol_type = other DNA
tactcaaagaacaactttaac

SEQ ID NO: 389 - DNA, 21 bp, synthetic construct
  source 1..21: mol_type = other DNA
acgtattccacgaatgggata

SEQ ID NO: 390 - DNA, 21 bp, synthetic construct
  source 1..21: mol_type = other DNA
gggatggatgggaataaatat

SEQ ID NO: 391 - DNA, 21 bp, synthetic construct
  source 1..21: mol_type = other DNA
ttgatgtccacgaatgggata

SEQ ID NO: 392 - DNA, 21 bp, synthetic construct
  source 1..21: mol_type = other DNA
atgcagtccacgaatggggtg

SEQ ID NO: 393 - DNA, 21 bp, synthetic construct
  source 1..21: mol_type = other DNA
tatgcgaaagcgggggcgaat

SEQ ID NO: 394 - DNA, 21 bp, synthetic construct
  source 1..21: mol_type = other DNA
ttggcgaaaacggggtccaat

SEQ ID NO: 395 - DNA, 21 bp, synthetic construct
  source 1..21: mol_type = other DNA
ctgtcaaagatcggcatgaac

SEQ ID NO: 396 - DNA, 21 bp, synthetic construct
  source 1..21: mol_type = other DNA
ttctccaaaacggggaataat

SEQ ID NO: 397 - DNA, 21 bp, synthetic construct
  source 1..21: mol_type = other DNA
tattccaaaacgggggcgaat

SEQ ID NO: 398 - DNA, 21 bp, synthetic construct
  source 1..21: mol_type = other DNA
gcgaatgggaggtccttgtat

SEQ ID NO: 399 - DNA, 21 bp, synthetic construct
  source 1..21: mol_type = other DNA
tatgcgaaatccggggtgaat

SEQ ID NO: 400 - DNA, 21 bp, synthetic construct
  source 1..21: mol_type = other DNA
tactcacgcatcaacatcaac

SEQ ID NO: 401 - DNA, 21 bp, synthetic construct
  source 1..21: mol_type = other DNA
tattccaaaataggggagaat

SEQ ID NO: 402 - DNA, 21 bp, synthetic construct
  source 1..21: mol_type = other DNA
cacatgtccacgaatggggtg

SEQ ID NO: 403 - DNA, 21 bp, synthetic construct
  source 1..21: mol_type = other DNA
gcgcagtccacgaatggggtg

SEQ ID NO: 404 - DNA, 21 bp, synthetic construct
  source 1..21: mol_type = other DNA
ctggccaagtcaggccataac

SEQ ID NO: 405 - DNA, 21 bp, synthetic construct
  source 1..21: mol_type = other DNA
ttggcgaaaatggggttcaat

SEQ ID NO: 406 - DNA, 21 bp, synthetic construct
  source 1..21: mol_type = other DNA
aggtccgagacggtgtatcag

SEQ ID NO: 407 - DNA, 21 bp, synthetic construct
  source 1..21: mol_type = other DNA
tattccaaatccgggacgaat

SEQ ID NO: 408 - DNA, 21 bp, synthetic construct
  source 1..21: mol_type = other DNA
tactcaaagggcaacgccaac

SEQ ID NO: 409 - DNA, 21 bp, synthetic construct
  source 1..21: mol_type = other DNA
ggggggtccaattcctcctgg

SEQ ID NO: 410 - DNA, 21 bp, synthetic construct
  source 1..21: mol_type = other DNA
gcgcactccacgaatggggtg

SEQ ID NO: 411 - DNA, 21 bp, synthetic construct
  source 1..21: mol_type = other DNA
ttgtccaaagcgggggtgaat

SEQ ID NO: 412 - DNA, 21 bp, synthetic construct
  source 1..21: mol_type = other DNA
atagcgtccacgaatgggata

SEQ ID NO: 413 - DNA, 21 bp, synthetic construct
  source 1..21: mol_type = other DNA
agggagccgaatgtgcagtgg

SEQ ID NO: 414 - DNA, 21 bp, synthetic construct
  source 1..21: mol_type = other DNA
tatgcgtcctccgggtataat

SEQ ID NO: 415 - DNA, 21 bp, synthetic construct
  source 1..21: mol_type = other DNA
gtgtcctcctccaatggggtg

SEQ ID NO: 416 - DNA, 21 bp, synthetic construct
  source 1..21: mol_type = other DNA
tttgcccgctcaggcgtaaac

SEQ ID NO: 417 - DNA, 21 bp, synthetic construct
  source 1..21: mol_type = other DNA
tatgcgaaaacggggttgaat

SEQ ID NO: 418 - DNA, 21 bp, synthetic construct
  source 1..21: mol_type = other DNA
tatgcgaggtccaatgataat

SEQ ID NO: 419 - DNA, 21 bp, synthetic construct
  source 1..21: mol_type = other DNA
ttcgcgaggaatgggcagaat

SEQ ID NO: 420 - DNA, 21 bp, synthetic construct
  source 1..21: mol_type = other DNA
ttggcgaaacaggggccgaat

SEQ ID NO: 421 - DNA, 21 bp, synthetic construct
  source 1..21: mol_type = other DNA
aatcaggcggatttgaggtgg

SEQ ID NO: 422 - DNA, 21 bp, synthetic construct
  source 1..21: mol_type = other DNA
gatccgtccgataaaaggtgg

SEQ ID NO: 423 - DNA, 21 bp, synthetic construct
  source 1..21: mol_type = other DNA
ttgtcctccacgaatgggata

SEQ ID NO: 424 - DNA, 21 bp, synthetic construct
  source 1..21: mol_type = other DNA
cacaaatccacgaatgggata

SEQ ID NO: 425 - DNA, 21 bp, synthetic construct
  source 1..21: mol_type = other DNA
tatgcgaaaacgggggataat

SEQ ID NO: 426 - DNA, 21 bp, synthetic construct
  source 1..21: mol_type = other DNA
tactcaaagaacggcctgaac

SEQ ID NO: 427 - DNA, 21 bp, synthetic construct
  source 1..21: mol_type = other DNA
ttcgcgaggaatgggatgaat

SEQ ID NO: 428 - DNA, 21 bp, synthetic construct
  source 1..21: mol_type = other DNA
gaaaagtcaaccaacggcatc

SEQ ID NO: 429 - DNA, 21 bp, synthetic construct
  source 1..21: mol_type = other DNA
ataggggggacgtccaattat

SEQ ID NO: 430 - DNA, 21 bp, synthetic construct
  source 1..21: mol_type = other DNA
tactcacgcgccaacaacaac

SEQ ID NO: 431 - DNA, 21 bp, synthetic construct
  source 1..21: mol_type = other DNA
ctgtcaaagcaaggctacaac

SEQ ID NO: 432 - DNA, 21 bp, synthetic construct
  source 1..21: mol_type = other DNA
ttggcgaaaacgggggtgaat

SEQ ID NO: 433 - DNA, 21 bp, synthetic construct
  source 1..21: mol_type = other DNA
tattccaaaatagggacgaat

SEQ ID NO: 434 - DNA, 21 bp, synthetic construct
  source 1..21: mol_type = other DNA
tattccaggttggggttcaat

SEQ ID NO: 435 - DNA, 21 bp, synthetic construct
  source 1..21: mol_type = other DNA
atacactcctccaatggggtg

SEQ ID NO: 436 - DNA, 21 bp, synthetic construct
  source 1..21: mol_type = other DNA
atgtcagaatcatcacgctgg

SEQ ID NO: 437 - DNA, 21 bp, synthetic construct
  source 1..21: mol_type = other DNA
tattccaggaatgggttgaat

SEQ ID NO: 438 - DNA, 21 bp, synthetic construct
  source 1..21: mol_type = other DNA
ttggcgaaaacgggggcgaat

SEQ ID NO: 439 - DNA, 21 bp, synthetic construct
  source 1..21: mol_type = other DNA
ttggcgagggggggggataat

SEQ ID NO: 440 - DNA, 21 bp, synthetic construct
  source 1..21: mol_type = other DNA
ttttcaaagctgaacatgaac

SEQ ID NO: 441 - DNA, 21 bp, synthetic construct
  source 1..21: mol_type = other DNA
acgaggtccgggtcctccgcg

SEQ ID NO: 442 - DNA, 21 bp, synthetic construct
  source 1..21: mol_type = other DNA
tatgcgaaagcgaatttgaat

SEQ ID NO: 443 - DNA, 21 bp, synthetic construct
  source 1..21: mol_type = other DNA
tacgccaagcatggctttaac

SEQ ID NO: 444 - DNA, 21 bp, synthetic construct
  source 1..21: mol_type = other DNA
tccgtgtccacgaatgggata

SEQ ID NO: 445 - DNA, 21 bp, synthetic construct
  source 1..21: mol_type = other DNA
atagggtccacgaatgggata

SEQ ID NO: 446 - DNA, 21 bp, synthetic construct
  source 1..21: mol_type = other DNA
ttgtccaaattgaatccgaat

SEQ ID NO: 447 - DNA, 21 bp, synthetic construct
  source 1..21: mol_type = other DNA
tactcaaagaccggcaacaac

SEQ ID NO: 448 - DNA, 21 bp, synthetic construct
  source 1..21: mol_type = other DNA
tattccaaacacaattccaat

SEQ ID NO: 449 - DNA, 21 bp, synthetic construct
  source 1..21: mol_type = other DNA
ttcgtgtccacgaatgggagg

SEQ ID NO: 450 - DNA, 21 bp, synthetic construct
  source 1..21: mol_type = other DNA
tatgcgaaagcgaatgtgaat

SEQ ID NO: 451 - DNA, 21 bp, synthetic construct
  source 1..21: mol_type = other DNA
acgaattccacgcacgggata

SEQ ID NO: 452 - DNA, 21 bp, synthetic construct
  source 1..21: mol_type = other DNA
ttgtccaaatccgggttgaat

SEQ ID NO: 453 - DNA, 21 bp, synthetic construct
  source 1..21: mol_type = other DNA
agggatgagttcagggcgtat

SEQ ID NO: 454 - DNA, 21 bp, synthetic construct
  source 1..21: mol_type = other DNA
ttggggtccacgaatgggagg

SEQ ID NO: 455 - DNA, 21 bp, synthetic construct
  source 1..21: mol_type = other DNA
cagaaatccacgaatggggtg

SEQ ID NO: 456 - DNA, 21 bp, synthetic construct
  source 1..21: mol_type = other DNA
tactcaaaggccggcggcaac

SEQ ID NO: 457 - DNA, 21 bp, synthetic construct
  source 1..21: mol_type = other DNA
gtggtgtccacgaatggggtg

SEQ ID NO: 458 - DNA, 21 bp, synthetic construct
  source 1..21: mol_type = other DNA
ccgaaatccacgaatggggtg

SEQ ID NO: 459 - DNA, 21 bp, synthetic construct
  source 1..21: mol_type = other DNA
tccgattcctccaatgggagg

SEQ ID NO: 460 - DNA, 21 bp, synthetic construct
  source 1..21: mol_type = other DNA
tattccaaagcgaattccaat

SEQ ID NO: 461 - DNA, 21 bp, synthetic construct
  source 1..21: mol_type = other DNA
ctgtcaaagtcaggctttaac

SEQ ID NO: 462 - DNA, 21 bp, synthetic construct
  source 1..21: mol_type = other DNA
gcgacgtccacgaatggggtg

SEQ ID NO: 463 - DNA, 21 bp, synthetic construct
  source 1..21: mol_type = other DNA
agggaggggacgtcctattat

SEQ ID NO: 464 - DNA, 21 bp, synthetic construct
  source 1..21: mol_type = other DNA
ttctcctccacgaatgggata

SEQ ID NO: 465 - DNA, 21 bp, synthetic construct
  source 1..21: mol_type = other DNA
tatcagtccacgaatgggata

SEQ ID NO: 466 - DNA, 21 bp, synthetic construct
  source 1..21: mol_type = other DNA
tatgcgaggtccaatgagaat

SEQ ID NO: 467 - DNA, 21 bp, synthetic construct
  source 1..21: mol_type = other DNA
cacgagtccacgaatggggtg

SEQ ID NO: 468 - DNA, 21 bp, synthetic construct
  source 1..21: mol_type = other DNA
tccacgtccacgaatgggata

SEQ ID NO: 469 - DNA, 21 bp, synthetic construct
  source 1..21: mol_type = other DNA
gtgtattcctccaatggggtg

SEQ ID NO: 470 - DNA, 21 bp, synthetic construct
  source 1..21: mol_type = other DNA
gagtcctccacgaatgggagg

SEQ ID NO: 471 - DNA, 21 bp, synthetic construct
  source 1..21: mol_type = other DNA
ctggccaagatgggcatgaac

SEQ ID NO: 472 - DNA, 21 bp, synthetic construct
  source 1..21: mol_type = other DNA
acgaaatccacgaatggggtg

SEQ ID NO: 473 - DNA, 21 bp, synthetic construct
  source 1..21: mol_type = other DNA
tatgcgaaagtggggccgaat

SEQ ID NO: 474 - DNA, 21 bp, synthetic construct
  source 1..21: mol_type = other DNA
aatgcgtccacgaatgggagg

SEQ ID NO: 475 - DNA, 21 bp, synthetic construct
  source 1..21: mol_type = other DNA
tacgcccgcctgggctttaac

SEQ ID NO: 476 - DNA, 21 bp, synthetic construct
  source 1..21: mol_type = other DNA
atgtccgaggcgtccacgtgg

SEQ ID NO: 477 - DNA, 21 bp, synthetic construct
  source 1..21: mol_type = other DNA
ttggcgaaaatagggccgaat

SEQ ID NO: 478 - DNA, 21 bp, synthetic construct
  source 1..21: mol_type = other DNA
aattccgggacggcgaaatat

SEQ ID NO: 479 - DNA, 21 bp, synthetic construct
  source 1..21: mol_type = other DNA
ttctccaaagcggggccgaat

SEQ ID NO: 480 - DNA, 21 bp, synthetic construct
  source 1..21: mol_type = other DNA
tatgcgaaagggggggataat

SEQ ID NO: 481 - DNA, 21 bp, synthetic construct
  source 1..21: mol_type = other DNA
ttggcgaaatccgggacgaat

SEQ ID NO: 482 - DNA, 21 bp, synthetic construct
  source 1..21: mol_type = other DNA
ctgtcaaagatgggccataac

SEQ ID NO: 483 - DNA, 21 bp, synthetic construct
  source 1..21: mol_type = other DNA
acgacgtcccagaatgggagg

SEQ ID NO: 484 - DNA, 21 bp, synthetic construct
  source 1..21: mol_type = other DNA
tactcacgcatcaactttaac

SEQ ID NO: 485 - DNA, 21 bp, synthetic construct
  source 1..21: mol_type = other DNA
tacgccaagggcggcaacaac

SEQ ID NO: 486 - DNA, 21 bp, synthetic construct
  source 1..21: mol_type = other DNA
ttctccaggcagaatgataat

SEQ ID NO: 487 - DNA, 21 bp, synthetic construct
  source 1..21: mol_type = other DNA
acgtattccacgaatggggtg

SEQ ID NO: 488 - DNA, 21 bp, synthetic construct
  source 1..21: mol_type = other DNA
ttcgcgaaaacggggttcaat

SEQ ID NO: 489 - DNA, 21 bp, synthetic construct
  source 1..21: mol_type = other DNA
gacggcggcacctcacgctac

SEQ ID NO: 490 - DNA, 21 bp, synthetic construct
  source 1..21: mol_type = other DNA
ctgtcaaagggcaactacaac

SEQ ID NO: 491 - DNA, 21 bp, synthetic construct
  source 1..21: mol_type = other DNA
cacgattcctccaatggggtg

SEQ ID NO: 492 - DNA, 21 bp, synthetic construct
  source 1..21: mol_type = other DNA
ttgaaaaatgggcagtccgcg

SEQ ID NO: 493 - DNA, 21 bp, synthetic construct
  source 1..21: mol_type = other DNA
caggatacgtcctccaggtgg

SEQ ID NO: 494 - DNA, 21 bp, synthetic construct
  source 1..21: mol_type = other DNA
tatgcgaaagcggggttgaat

SEQ ID NO: 495 - DNA, 21 bp, synthetic construct
  source 1..21: mol_type = other DNA
ctgtcaaagcaaaacatcaac

SEQ ID NO: 496 - DNA, 21 bp, synthetic construct
  source 1..21: mol_type = other DNA
ttgcactccacgaatggggtg

SEQ ID NO: 497 - DNA, 21 bp, synthetic construct
  source 1..21: mol_type = other DNA
tatgagtcctccaatggggtg

SEQ ID NO: 498 - DNA, 21 bp, synthetic construct
  source 1..21: mol_type = other DNA
tatgcgaaatccaatttcaat

SEQ ID NO: 499 - DNA, 21 bp, synthetic construct
  source 1..21: mol_type = other DNA
acggggtccacgaatgggata

SEQ ID NO: 500 - DNA, 21 bp, synthetic construct
  source 1..21: mol_type = other DNA
acgcagtccacgaatggggtg

SEQ ID NO: 501 - DNA, 21 bp, synthetic construct
  source 1..21: mol_type = other DNA
tatgagtccacgaatgggata

SEQ ID NO: 502 - DNA, 21 bp, synthetic construct
  source 1..21: mol_type = other DNA
atgaaatccacgaatggggtg

SEQ ID NO: 503 - DNA, 21 bp, synthetic construct
  source 1..21: mol_type = other DNA
tattccaaagataattggaat

SEQ ID NO: 504 - DNA, 21 bp, synthetic construct
  source 1..21: mol_type = other DNA
cacgtgtccacgaatggggtg

SEQ ID NO: 505 - DNA, 21 bp, synthetic construct
  source 1..21: mol_type = other DNA
ttggtgtccacgaatggggtg

SEQ ID NO: 506 - DNA, 21 bp, synthetic construct
  source 1..21: mol_type = other DNA
ttctccaaagtggggacgaat

SEQ ID NO: 507 - DNA, 21 bp, synthetic construct
  source 1..21: mol_type = other DNA
tactcaaaggccggcgtaaac

SEQ ID NO: 508 - DNA, 21 bp, synthetic construct
  source 1..21: mol_type = other DNA
ttcgggtccacgaatggggtg

SEQ ID NO: 509 - DNA, 21 bp, synthetic construct
  source 1..21: mol_type = other DNA
ttggcgaaaggggggcacaat

SEQ ID NO: 510 - DNA, 21 bp, synthetic construct
  source 1..21: mol_type = other DNA
gtggcgtcctccaatggggtg

SEQ ID NO: 511 - DNA, 21 bp, synthetic construct
  source 1..21: mol_type = other DNA
atcaagtcaaccaacggcatc

SEQ ID NO: 512 - DNA, 21 bp, synthetic construct
  source 1..21: mol_type = other DNA
acgaggtccggggatatagcg

SEQ ID NO: 513 - DNA, 21 bp, synthetic construct
  source 1..21: mol_type = other DNA
tactcaaagggcaacctgaac

SEQ ID NO: 514 - DNA, 21 bp, synthetic construct
  source 1..21: mol_type = other DNA
tttgccaagcaaggctggaac

SEQ ID NO: 515 - DNA, 21 bp, synthetic construct
  source 1..21: mol_type = other DNA
ttgtccaaagcggggttgaat

SEQ ID NO: 516 - DNA, 21 bp, synthetic construct
  source 1..21: mol_type = other DNA
tcattttcaaccaacggcatc

SEQ ID NO: 517 - DNA, 21 bp, synthetic construct
  source 1..21: mol_type = other DNA
tactcacgccccggccataac

SEQ ID NO: 518 - DNA, 21 bp, synthetic construct
  source 1..21: mol_type = other DNA
acgagggatacgaatgggagg

SEQ ID NO: 519 - DNA, 21 bp, synthetic construct
  source 1..21: mol_type = other DNA
tatgcgaaaacgggggggaat

SEQ ID NO: 520 - DNA, 21 bp, synthetic construct
  source 1..21: mol_type = other DNA
tatgcgagggggaatgataat

SEQ ID NO: 521 - DNA, 21 bp, synthetic construct
  source 1..21: mol_type = other DNA
gtggcgtccacgaatgggata

SEQ ID NO: 522 - DNA, 21 bp, synthetic construct
  source 1..21: mol_type = other DNA
gcgcagtccacgaatgggata

SEQ ID NO: 523 - DNA, 21 bp, synthetic construct
  source 1..21: mol_type = other DNA
ttcgcgaaaacggggataaat

SEQ ID NO: 524 - DNA, 21 bp, synthetic construct
  source 1..21: mol_type = other DNA
agggcgtccgatgtgtatccg

SEQ ID NO: 525 - DNA, 21 bp, synthetic construct
  source 1..21: mol_type = other DNA
cgcggctcagacgtatttccc

SEQ ID NO: 526 - DNA, 21 bp, synthetic construct
  source 1..21: mol_type = other DNA
ttggcgaaaggggggccgaat

SEQ ID NO: 527 - DNA, 21 bp, synthetic construct
  source 1..21: mol_type = other DNA
ttgtccaaagcgggggcgaat

SEQ ID NO: 528 - DNA, 21 bp, synthetic construct
  source 1..21: mol_type = other DNA
tacgccaagggcaactttaac

SEQ ID NO: 529 - DNA, 21 bp, synthetic construct
  source 1..21: mol_type = other DNA
gcggattccacgaatgggagg

SEQ ID NO: 530 - DNA, 21 bp, synthetic construct
  source 1..21: mol_type = other DNA
ctggccaaggccggctacaac

SEQ ID NO: 531 - DNA, 21 bp, synthetic construct
  source 1..21: mol_type = other DNA
ctgtcaaaggtaggcgtaaac

SEQ ID NO: 532 - DNA, 21 bp, synthetic construct
  source 1..21: mol_type = other DNA
tactcaaagggcaacatcaac

SEQ ID NO: 533 - DNA, 21 bp, synthetic construct
  source 1..21: mol_type = other DNA
tggtcctcctccaatggggtg

SEQ ID NO: 534 - DNA, 21 bp, synthetic construct
  source 1..21: mol_type = other DNA
gcggtgtccacgaatgggagg

SEQ ID NO: 535 - DNA, 21 bp, synthetic construct
  source 1..21: mol_type = other DNA
ctgtcaaagatcggcaacaac

SEQ ID NO: 536 - DNA, 21 bp, synthetic construct
  source 1..21: mol_type = other DNA
atagattccacgaatggggtg

SEQ ID NO: 537 - DNA, 21 bp, synthetic construct
  source 1..21: mol_type = other DNA
tcatcagactacaagatctac

SEQ ID NO: 538 - DNA, 21 bp, synthetic construct
  source 1..21: mol_type = other DNA
ttctccaaagcggggttcaat

SEQ ID NO: 539 - DNA, 21 bp, synthetic construct
  source 1..21: mol_type = other DNA
ttcgagtccacgaatggggtg

SEQ ID NO: 540 - DNA, 21 bp, synthetic construct
  source 1..21: mol_type = other DNA
tcaaactcacgcgaaggcatc

SEQ ID NO: 541 - DNA, 21 bp, synthetic construct
  source 1..21: mol_type = other DNA
tattccaaagcgaatgtgaat

SEQ ID NO: 542 - DNA, 21 bp, synthetic construct
  source 1..21: mol_type = other DNA
tcccactccacgaatggggtg

SEQ ID NO: 543 - DNA, 21 bp, synthetic construct
  source 1..21: mol_type = other DNA
tattccagggggaatgagaat

SEQ ID NO: 544 - DNA, 21 bp, synthetic construct
  source 1..21: mol_type = other DNA
ctgtcaaagaccggcatcaac

SEQ ID NO: 545 - DNA, 21 bp, synthetic construct
  source 1..21: mol_type = other DNA
tattccaaatccaatgataat

SEQ ID NO: 546 - DNA, 21 bp, synthetic construct
  source 1..21: mol_type = other DNA
tattccaggcacgggttcaat

SEQ ID NO: 547 - DNA, 21 bp, synthetic construct
  source 1..21: mol_type = other DNA
tatgcgaggtatggggataat

SEQ ID NO: 548 - DNA, 21 bp, synthetic construct
  source 1..21: mol_type = other DNA
tattccaggcagaatgataat

SEQ ID NO: 549 - DNA, 21 bp, synthetic construct
  source 1..21: mol_type = other DNA
ttgtccaaagggaatttcaat

SEQ ID NO: 550 - DNA, 21 bp, synthetic construct
  source 1..21: mol_type = other DNA
cagaaatccacgaatgggata

SEQ ID NO: 551 - DNA, 21 bp, synthetic construct
  source 1..21: mol_type = other DNA
ttcgcgaggaatggggcgaat

SEQ ID NO: 552 - DNA, 21 bp, synthetic construct
  source 1..21: mol_type = other DNA
ttcatatccacgaatggggtg

SEQ ID NO: 553 - DNA, 21 bp, synthetic construct
  source 1..21: mol_type = other DNA
tacgccaagcaaggcctgaac

SEQ ID NO: 554 - DNA, 21 bp, synthetic construct
  source 1..21: mol_type = other DNA
gattatacggggaggatagcg

SEQ ID NO: 555 - DNA, 21 bp, synthetic construct
  source 1..21: mol_type = other DNA
acgtattcctccaatggggtg

SEQ ID NO: 556 - DNA, 21 bp, synthetic construct
  source 1..21: mol_type = other DNA
tccaggtccacgaatggggcg

SEQ ID NO: 557 - DNA, 21 bp, synthetic construct
  source 1..21: mol_type = other DNA
tactcaaagcataacgccaac

SEQ ID NO: 558 - DNA, 21 bp, synthetic construct
  source 1..21: mol_type = other DNA
ttggcgaggccggggataaat

SEQ ID NO: 559 - DNA, 21 bp, synthetic construct
  source 1..21: mol_type = other DNA
gtgccgtatacgtcctccaat

SEQ ID NO: 560 - DNA, 21 bp, synthetic construct
  source 1..21: mol_type = other DNA
tatcactcctccaatggggtg

SEQ ID NO: 561 - DNA, 21 bp, synthetic construct
  source 1..21: mol_type = other DNA
taccataagaacggctacaac

SEQ ID NO: 562 - DNA, 21 bp, synthetic construct
  source 1..21: mol_type = other DNA
atattctccacgaatggggtg

SEQ ID NO: 563 - DNA, 21 bp, synthetic construct
  source 1..21: mol_type = other DNA
ttctccaaagcgaatgtgaat

SEQ ID NO: 564 - DNA, 21 bp, synthetic construct
  source 1..21: mol_type = other DNA
tatgcgaaaaatgggtccaat

SEQ ID NO: 565 - DNA, 21 bp, synthetic construct
  source 1..21: mol_type = other DNA
gcggagtccacgaatgggagg

SEQ ID NO: 566 - DNA, 21 bp, synthetic construct
  source 1..21: mol_type = other DNA
tatgcgaaagcggggacgaat

SEQ ID NO: 567 - DNA, 21 bp, synthetic construct
  source 1..21: mol_type = other DNA
catatctcaaccaacggcatc

SEQ ID NO: 568 - DNA, 21 bp, synthetic construct
  source 1..21: mol_type = other DNA
tatgcgaaagcgggggtgaat

SEQ ID NO: 569 - DNA, 21 bp, synthetic construct
  source 1..21: mol_type = other DNA
ttttcaaagaccggctacaac

SEQ ID NO: 570 - DNA, 21 bp, synthetic construct
  source 1..21: mol_type = other DNA
tatgcgagggggggggataat

SEQ ID NO: 571 - DNA, 21 bp, synthetic construct
  source 1..21: mol_type = other DNA
gtggagtccacgaatggggtg

SEQ ID NO: 572 - DNA, 21 bp, synthetic construct
  source 1..21: mol_type = other DNA
ttccagtcctccaatggggtg

SEQ ID NO: 573 - DNA, 21 bp, synthetic construct
  source 1..21: mol_type = other DNA
tcacattcatcaaacggcgta

SEQ ID NO: 574 - DNA, 21 bp, synthetic construct
  source 1..21: mol_type = other DNA
tatgcgaaatccaatcacaat

SEQ ID NO: 575 - DNA, 21 bp, synthetic construct
  source 1..21: mol_type = other DNA
ttggcgaggttgggggataat

SEQ ID NO: 576 - DNA, 21 bp, synthetic construct
  source 1..21: mol_type = other DNA
ttgcagtccacgaatggggtg

SEQ ID NO: 577 - DNA, 21 bp, synthetic construct
  source 1..21: mol_type = other DNA
tactcaaaggccaacatcaac

SEQ ID NO: 578 - DNA, 21 bp, synthetic construct
  source 1..21: mol_type = other DNA
cacaattcctccaatggggtg

SEQ ID NO: 579 - DNA, 21 bp, synthetic construct
  source 1..21: mol_type = other DNA
ttgtccaaacaggggccgaat

SEQ ID NO: 580 - DNA, 21 bp, synthetic construct
  source 1..21: mol_type = other DNA
gtaatctcaaccaacggcatc

SEQ ID NO: 581 - DNA, 21 bp, synthetic construct
  source 1..21: mol_type = other DNA
tttgccaagtcaggcctgaac

SEQ ID NO: 582 - DNA, 21 bp, synthetic construct
  source 1..21: mol_type = other DNA
tatgcgaaagtgggggcgaat

SEQ ID NO: 583 - DNA, 21 bp, synthetic construct
  source 1..21: mol_type = other DNA
ttgtcctccacgaatggggtg

SEQ ID NO: 584 - DNA, 21 bp, synthetic construct
  source 1..21: mol_type = other DNA
tatgcgaaaggggggtccaat

SEQ ID NO: 585 - DNA, 21 bp, synthetic construct
  source 1..21: mol_type = other DNA
ttctccaaagcgaatcacaat

SEQ ID NO: 586 - DNA, 21 bp, synthetic construct
  source 1..21: mol_type = other DNA
tttatctcaaccaacggccgc

SEQ ID NO: 587 - DNA, 21 bp, synthetic construct
  source 1..21: mol_type = other DNA
ttgtccaggttgtccgagacg

SEQ ID NO: 588 - DNA, 21 bp, synthetic construct
  source 1..21: mol_type = other DNA
tggcagtcctccaatgggata

SEQ ID NO: 589 - DNA, 21 bp, synthetic construct
  source 1..21: mol_type = other DNA
tactactcaaccaacggcgta

SEQ ID NO: 590 - DNA, 21 bp, synthetic construct
  source 1..21: mol_type = other DNA
aattggtccacgaatggggtg

SEQ ID NO: 591 - DNA, 21 bp, synthetic construct
  source 1..21: mol_type = other DNA
tactcaaagaccggcatgaac

SEQ ID NO: 592 - DNA, 21 bp, synthetic construct
  source 1..21: mol_type = other DNA
ttgtccaaagtggggacgaat

SEQ ID NO: 593 - DNA, 21 bp, synthetic construct
  source 1..21: mol_type = other DNA
acgcactatgataatgggagg

SEQ ID NO: 594 - DNA, 21 bp, synthetic construct
  source 1..21: mol_type = other DNA
tataggtcctccaatggggtg

SEQ ID NO: 595 - DNA, 21 bp, synthetic construct
  source 1..21: mol_type = other DNA
agggagtccgatttgaaatgg

SEQ ID NO: 596 - DNA, 21 bp, synthetic construct
  source 1..21: mol_type = other DNA
tacgccaagtcaggctcaaac

SEQ ID NO: 597 - DNA, 21 bp, synthetic construct
  source 1..21: mol_type = other DNA
tacgccaagggcaacctgaac

SEQ ID NO: 598 - DNA, 21 bp, synthetic construct
  source 1..21: mol_type = other DNA
tatgcgaaatccgggacgaat

SEQ ID NO: 599 - DNA, 21 bp, synthetic construct
  source 1..21: mol_type = other DNA
tacatctcaaccaacggcatc

SEQ ID NO: 600 - DNA, 21 bp, synthetic construct
  source 1..21: mol_type = other DNA
gaggatgggtccccgaggtgg

SEQ ID NO: 601 - DNA, 21 bp, synthetic construct
  source 1..21: mol_type = other DNA
ttgtccaggcagggggataat

SEQ ID NO: 602 - DNA, 21 bp, synthetic construct
  source 1..21: mol_type = other DNA
ctgtcaaaggtaggcatcaac

SEQ ID NO: 603 - DNA, 21 bp, synthetic construct
  source 1..21: mol_type = other DNA
tgggggtccacgaatggggtg

SEQ ID NO: 604 - DNA, 21 bp, synthetic construct
  source 1..21: mol_type = other DNA
ctgtcaaagctgggcaacaac

SEQ ID NO: 605 - DNA, 21 bp, synthetic construct
  source 1..21: mol_type = other DNA
tatgcgtccacgaatggggtg

SEQ ID NO: 606 - DNA, 21 bp, synthetic construct
  source 1..21: mol_type = other DNA
tactcaaagatcggcgtaaac

SEQ ID NO: 607 - DNA, 21 bp, synthetic construct
  source 1..21: mol_type = other DNA
tactcacgcaacggcgtaaac

SEQ ID NO: 608 - DNA, 21 bp, synthetic construct
  source 1..21: mol_type = other DNA
tactcaaaggtaggcatcaac

SEQ ID NO: 609 - DNA, 21 bp, synthetic construct
  source 1..21: mol_type = other DNA
tactcacgcatcaacgacaac

SEQ ID NO: 610 - DNA, 21 bp, synthetic construct
  source 1..21: mol_type = other DNA
ctgtcaaagatcggcatcaac

SEQ ID NO: 611 - DNA, 21 bp, synthetic construct
  source 1..21: mol_type = other DNA
gtggggtcctccaatggggtg

SEQ ID NO: 612 - DNA, 21 bp, synthetic construct
  source 1..21: mol_type = other DNA
acgatatccacgaatgggata

SEQ ID NO: 613 - DNA, 21 bp, synthetic construct
  source 1..21: mol_type = other DNA
tactcaaagaagaacgaaaac

SEQ ID NO: 614 - DNA, 21 bp, synthetic construct
  source 1..21: mol_type = other DNA
ttggcgaggtccggggagaat

SEQ ID NO: 615 - DNA, 21 bp, synthetic construct
  source 1..21: mol_type = other DNA
gtgaggtccacgaatggggag

SEQ ID NO: 616 - DNA, 21 bp, synthetic construct
  source 1..21: mol_type = other DNA
tatgcgaaagggaatacgaat

SEQ ID NO: 617 - DNA, 21 bp, synthetic construct
  source 1..21: mol_type = other DNA
caggggtccacgaatgggagg

SEQ ID NO: 618 - DNA, 21 bp, synthetic construct
  source 1..21: mol_type = other DNA
ttctccaaagtggggttgaat

SEQ ID NO: 619 - DNA, 21 bp, synthetic construct
  source 1..21: mol_type = other DNA
ctggccaagggcggcatgaac

SEQ ID NO: 620 - DNA, 21 bp, synthetic construct
  source 1..21: mol_type = other DNA
ttggtgtccacgaatgggagg

SEQ ID NO: 621 - DNA, 21 bp, synthetic construct
  source 1..21: mol_type = other DNA
ttggcgaaatccggggtgaat

SEQ ID NO: 622 - DNA, 21 bp, synthetic construct
  source 1..21: mol_type = other DNA
tactcaaagcccggccccaac

SEQ ID NO: 623 - DNA, 21 bp, synthetic construct
  source 1..21: mol_type = other DNA
tattccaaaacggggacgaat

SEQ ID NO: 624 - DNA, 21 bp, synthetic construct
  source 1..21: mol_type = other DNA
cgcaaggacggcaccgcctca

SEQ ID NO: 625 - DNA, 21 bp, synthetic construct
  source 1..21: mol_type = other DNA
acgcagtcctccaatggggtg

SEQ ID NO: 626 - DNA, 21 bp, synthetic construct
  source 1..21: mol_type = other DNA
tactcaaagcataacaacaac

SEQ ID NO: 627 - DNA, 21 bp, synthetic construct
  source 1..21: mol_type = other DNA
tactcaaaggtaaactacaac

SEQ ID NO: 628 - DNA, 21 bp, synthetic construct
  source 1..21: mol_type = other DNA
ctgtcaaagctgaaccaaaac

SEQ ID NO: 629 - DNA, 21 bp, synthetic construct
  source 1..21: mol_type = other DNA
ctggccaagctgggcatcaac

SEQ ID NO: 630 - DNA, 21 bp, synthetic construct
  source 1..21: mol_type = other DNA
tatgcgagggtggggttcaat

SEQ ID NO: 631 - DNA, 21 bp, synthetic construct
  source 1..21: mol_type = other DNA
caaaacggccattcatcatgg

SEQ ID NO: 632 - DNA, 21 bp, synthetic construct
  source 1..21: mol_type = other DNA
tactcaaagtcaggcgtaaac

SEQ ID NO: 633 - DNA, 21 bp, synthetic construct
  source 1..21: mol_type = other DNA
ggcggcgacggcaacgcctac

SEQ ID NO: 634 - DNA, 21 bp, synthetic construct
  source 1..21: mol_type = other DNA
tatgcgagggcgaatgataat

SEQ ID NO: 635 - DNA, 21 bp, synthetic construct
  source 1..21: mol_type = other DNA
gtgttgtccacgaatggggtg

SEQ ID NO: 636 - DNA, 21 bp, synthetic construct
  source 1..21: mol_type = other DNA
acggatgagacggtgtattcc

SEQ ID NO: 637 - DNA, 21 bp, synthetic construct
  source 1..21: mol_type = other DNA
ataacgtcctccaatggggtg

SEQ ID NO: 638 - DNA, 21 bp, synthetic construct
  source 1..21: mol_type = other DNA
atgatgtccacgaatggggtg

SEQ ID NO: 639 - DNA, 21 bp, synthetic construct
  source 1..21: mol_type = other DNA
ttgtccaaaatagggacgaat

SEQ ID NO: 640 - DNA, 21 bp, synthetic construct
  source 1..21: mol_type = other DNA
aggtccgatacgtccatatgg

SEQ ID NO: 641 - DNA, 21 bp, synthetic construct
  source 1..21: mol_type = other DNA
tccttctccacgaatggggtg

SEQ ID NO: 642 - DNA, 21 bp, synthetic construct
  source 1..21: mol_type = other DNA
ttctccaaattgggggcgaat

SEQ ID NO: 643 - DNA, 21 bp, synthetic construct
  source 1..21: mol_type = other DNA
tcagaatcaaccaacggcatc

SEQ ID NO: 644 - DNA, 21 bp, synthetic construct
  source 1..21: mol_type = other DNA
tatgcgaaagcggggtccaat

SEQ ID NO: 645 - DNA, 21 bp, synthetic construct
  source 1..21: mol_type = other DNA
atcgaatcaaccaacggcatc

SEQ ID NO: 646 - DNA, 21 bp, synthetic construct
  source 1..21: mol_type = other DNA
cagtcctccacgaatggggtg

SEQ ID NO: 647 - DNA, 21 bp, synthetic construct
  source 1..21: mol_type = other DNA
ttttcatcatcaaacggcgta

SEQ ID NO: 648 - DNA, 21 bp, synthetic construct
  source 1..21: mol_type = other DNA
tatgcgaaaggggggatgaat

SEQ ID NO: 649 - DNA, 21 bp, synthetic construct
  source 1..21: mol_type = other DNA
tacgcccgcgccaacatgaac

SEQ ID NO: 650 - DNA, 21 bp, synthetic construct
  source 1..21: mol_type = other DNA
tatgcgaaagggggggcgaat

SEQ ID NO: 651 - DNA, 21 bp, synthetic construct
  source 1..21: mol_type = other DNA
tatgcgaaaaatgggcagaat

SEQ ID NO: 652 - DNA, 21 bp, synthetic construct
  source 1..21: mol_type = other DNA
gggacgtccacgaatgggagg

SEQ ID NO: 653 - DNA, 21 bp, synthetic construct
  source 1..21: mol_type = other DNA
tacgccaagaccaactacaac

SEQ ID NO: 654 - DNA, 21 bp, synthetic construct
  source 1..21: mol_type = other DNA
agggcggagtccaaaacgtgg

SEQ ID NO: 655 - DNA, 21 bp, synthetic construct
  source 1..21: mol_type = other DNA
tccacgtcccagaatgggagg

SEQ ID NO: 656 - DNA, 21 bp, synthetic construct
  source 1..21: mol_type = other DNA
ccgaattccacgaatggggtg

SEQ ID NO: 657 - DNA, 21 bp, synthetic construct
  source 1..21: mol_type = other DNA
ttcgcgaggaatgggacgaat

SEQ ID NO: 658 - DNA, 21 bp, synthetic construct
  source 1..21: mol_type = other DNA
ctgtcaaaggtaggcaacaac

SEQ ID NO: 659 - DNA, 21 bp, synthetic construct
  source 1..21: mol_type = other DNA
tttgcccgcaacggcgtaaac

SEQ ID NO: 660 - DNA, 21 bp, synthetic construct
  source 1..21: mol_type = other DNA
ttttcacgcgtaggcgacaac

SEQ ID NO: 661 - DNA, 21 bp, synthetic construct
  source 1..21: mol_type = other DNA
tatgcgaaaataggggcgaat

SEQ ID NO: 662 - DNA, 21 bp, synthetic construct
  source 1..21: mol_type = other DNA
aatgaggatttcgtgaggtat

SEQ ID NO: 663 - DNA, 21 bp, synthetic construct
  source 1..21: mol_type = other DNA
gtggatgagttcaggacgtat

SEQ ID NO: 664 - DNA, 21 bp, synthetic construct
  source 1..21: mol_type = other DNA
acggattccacgaatgggata

SEQ ID NO: 665 - DNA, 21 bp, synthetic construct
  source 1..21: mol_type = other DNA
aggcacgatcaggtgtatccg

SEQ ID NO: 666 - DNA, 21 bp, synthetic construct
  source 1..21: mol_type = other DNA
tataggtccacgaatgggtat

SEQ ID NO: 667 - DNA, 21 bp, synthetic construct
  source 1..21: mol_type = other DNA
cattcacgcctgaacgtagaa

SEQ ID NO: 668 - DNA, 21 bp, synthetic construct
  source 1..21: mol_type = other DNA
gagaggtccacgaatggggtg

SEQ ID NO: 669 - DNA, 21 bp, synthetic construct
  source 1..21: mol_type = other DNA
ctgtcaaagtcaggccataac

SEQ ID NO: 670 - DNA, 21 bp, synthetic construct
  source 1..21: mol_type = other DNA
ttttcacgcaccggcgaaaac

SEQ ID NO: 671 - DNA, 21 bp, synthetic construct
  source 1..21: mol_type = other DNA
ggctcatcaaccaacggccgc

SEQ ID NO: 672 - DNA, 21 bp, synthetic construct
  source 1..21: mol_type = other DNA
tactcacgcaacggcatgaac

SEQ ID NO: 673 - DNA, 21 bp, synthetic construct
  source 1..21: mol_type = other DNA
ttgtccaaagcgaatttcaat

SEQ ID NO: 674 - DNA, 21 bp, synthetic construct
  source 1..21: mol_type = other DNA
tgggagtcctccaatggggtg

SEQ ID NO: 675 - DNA, 21 bp, synthetic construct
  source 1..21: mol_type = other DNA
atagagtcctccaatggggtg

SEQ ID NO: 676 - DNA, 21 bp, synthetic construct
  source 1..21: mol_type = other DNA
ttcgcgaggaatgggttcaat

SEQ ID NO: 677 - DNA, 21 bp, synthetic construct
  source 1..21: mol_type = other DNA
gtgatgtcctccaatggggtg

SEQ ID NO: 678 - DNA, 21 bp, synthetic construct
  source 1..21: mol_type = other DNA
tactcaaagcataactttaac

SEQ ID NO: 679 - DNA, 21 bp, synthetic construct
  source 1..21: mol_type = other DNA
tactcaaagaacggctttaac

SEQ ID NO: 680 - DNA, 21 bp, synthetic construct
  source 1..21: mol_type = other DNA
tatgcgaaagaggggaggaat

SEQ ID NO: 681 - DNA, 21 bp, synthetic construct
  source 1..21: mol_type = other DNA
tattccaaaaatgggtccaat

SEQ ID NO: 682 - DNA, 21 bp, synthetic construct
  source 1..21: mol_type = other DNA
gcgtcctccacgaatggggtg

SEQ ID NO: 683 - DNA, 21 bp, synthetic construct
  source 1..21: mol_type = other DNA
tacgccaagctgggcatgaac

SEQ ID NO: 684 - DNA, 21 bp, synthetic construct
  source 1..21: mol_type = other DNA
tcctggtcctccaatggggtg

SEQ ID NO: 685 - DNA, 21 bp, synthetic construct
  source 1..21: mol_type = other DNA
aggaatttggatgtgacgtgg

SEQ ID NO: 686 - DNA, 21 bp, synthetic construct
  source 1..21: mol_type = other DNA
ccgcagtcctccaatggggtg

SEQ ID NO: 687 - DNA, 21 bp, synthetic construct
  source 1..21: mol_type = other DNA
tactttaccggcacctcatca

SEQ ID NO: 688 - DNA, 21 bp, synthetic construct
  source 1..21: mol_type = other DNA
ttgatgtccacgaatggggtg

SEQ ID NO: 689 - DNA, 21 bp, synthetic construct
  source 1..21: mol_type = other DNA
tactcaaagtcaggcaacaac

SEQ ID NO: 690 - DNA, 21 bp, synthetic construct
  source 1..21: mol_type = other DNA
gggtggtccacgaatggggtg

SEQ ID NO: 691 - DNA, 21 bp, synthetic construct
  source 1..21: mol_type = other DNA
acgaaatccgggatgaatgcg

SEQ ID NO: 692 - DNA, 21 bp, synthetic construct
  source 1..21: mol_type = other DNA
tactcacgccaaggcaacaac

SEQ ID NO: 693 - DNA, 21 bp, synthetic construct
  source 1..21: mol_type = other DNA
accgaatcaaccaacggcatc

SEQ ID NO: 694 - DNA, 21 bp, synthetic construct
  source 1..21: mol_type = other DNA
gtgccgtatacggggtatgat

SEQ ID NO: 695 - DNA, 21 bp, synthetic construct
  source 1..21: mol_type = other DNA
ttgtccgcgaggtccgataat

SEQ ID NO: 696 - DNA, 21 bp, synthetic construct
  source 1..21: mol_type = other DNA
caggattccacgaatgggata

SEQ ID NO: 697 - DNA, 21 bp, synthetic construct
  source 1..21: mol_type = other DNA
tactcaaagtcaggcatgaac

SEQ ID NO: 698 - DNA, 21 bp, synthetic construct
  source 1..21: mol_type = other DNA
acccaatcatcatcaggccgc

SEQ ID NO: 699 - DNA, 21 bp, synthetic construct
  source 1..21: mol_type = other DNA
ttgtccaggaataatgataat

SEQ ID NO: 700 - DNA, 21 bp, synthetic construct
  source 1..21: mol_type = other DNA
tatgcgaggtccggggagaat

SEQ ID NO: 701 - DNA, 21 bp, synthetic construct
  source 1..21: mol_type = other DNA
caggtgtccacgaatgggagg

SEQ ID NO: 702 - DNA, 21 bp, synthetic construct
  source 1..21: mol_type = other DNA
ttgtccaaattggggacgaat

SEQ ID NO: 703 - DNA, 21 bp, synthetic construct
  source 1..21: mol_type = other DNA
tactcacgcaacaacaacaac

SEQ ID NO: 704 - DNA, 21 bp, synthetic construct
  source 1..21: mol_type = other DNA
ttgtccaaagcggggtccaat

SEQ ID NO: 705 - DNA, 21 bp, synthetic construct
  source 1..21: mol_type = other DNA
ttgcacgtgcaggggccgaat

SEQ ID NO: 706 - DNA, 21 bp, synthetic construct
  source 1..21: mol_type = other DNA
cacttctcctccaatggggtg

SEQ ID NO: 707 - DNA, 21 bp, synthetic construct
  source 1..21: mol_type = other DNA
tactcaaagtcaaaccataac

SEQ ID NO: 708 - DNA, 21 bp, synthetic construct
  source 1..21: mol_type = other DNA
acgttctcctccaatggggtg

SEQ ID NO: 709 - DNA, 21 bp, synthetic construct
  source 1..21: mol_type = other DNA
tactcaaagatgggcctgaac

SEQ ID NO: 710 - DNA, 21 bp, synthetic construct
  source 1..21: mol_type = other DNA
tactcaaaggtaggcggcaac

SEQ ID NO: 711 - DNA, 21 bp, synthetic construct
  source 1..21: mol_type = other DNA
ttgtccaaaataggggataat

SEQ ID NO: 712 - DNA, 21 bp, synthetic construct
  source 1..21: mol_type = other DNA
gtggcgtccacgaatggggtg

SEQ ID NO: 713 - DNA, 21 bp, synthetic construct
  source 1..21: mol_type = other DNA
tccgattccacgaatggggtg

SEQ ID NO: 714 - DNA, 21 bp, synthetic construct
  source 1..21: mol_type = other DNA
ttgatatccacgaatggggtg

SEQ ID NO: 715 - DNA, 21 bp, synthetic construct
  source 1..21: mol_type = other DNA
tactcaaagtcaggcggcaac

SEQ ID NO: 716 - DNA, 21 bp, synthetic construct
  source 1..21: mol_type = other DNA
tactcaaagaccggctcaaac

SEQ ID NO: 717 - DNA, 21 bp, synthetic construct
  source 1..21: mol_type = other DNA
ttggcgaggaatgggtggaat

SEQ ID NO: 718 - DNA, 21 bp, synthetic construct
  source 1..21: mol_type = other DNA
atggcgtccacgaatggggtg

SEQ ID NO: 719 - DNA, 21 bp, synthetic construct
  source 1..21: mol_type = other DNA
ttctccaggcagaatgtgaat

SEQ ID NO: 720 - DNA, 21 bp, synthetic construct
  source 1..21: mol_type = other DNA
gtgaaatcctccaatggggtg

SEQ ID NO: 721 - DNA, 21 bp, synthetic construct
  source 1..21: mol_type = other DNA
tatgcgaggtccaatttcaat

SEQ ID NO: 722 - DNA, 21 bp, synthetic construct
  source 1..21: mol_type = other DNA
ttggcgaaagggggggcgaat

SEQ ID NO: 723 - DNA, 21 bp, synthetic construct
  source 1..21: mol_type = other DNA
tttgccaagaacggctacaac

SEQ ID NO: 724 - DNA, 21 bp, synthetic construct
  source 1..21: mol_type = other DNA
ttcgattccacgaatggggtg

SEQ ID NO: 725 - DNA, 21 bp, synthetic construct
  source 1..21: mol_type = other DNA
ttgtccaaatccggggcgaat

SEQ ID NO: 726 - DNA, 21 bp, synthetic construct
  source 1..21: mol_type = other DNA
tatgcgaaagcggggatgaat

SEQ ID NO: 727 - DNA, 21 bp, synthetic construct
  source 1..21: mol_type = other DNA
ttctccaaacaggggccgaat

SEQ ID NO: 728 - DNA, 21 bp, synthetic construct
  source 1..21: mol_type = other DNA
atggtgtccacgaatgggagg

SEQ ID NO: 729 - DNA, 21 bp, synthetic construct
  source 1..21: mol_type = other DNA
gtgatatcctccaatggggtg

SEQ ID NO: 730 - DNA, 21 bp, synthetic construct
  source 1..21: mol_type = other DNA
ttctccaggatgaatgagaat

SEQ ID NO: 731 - DNA, 21 bp, synthetic construct
  source 1..21: mol_type = other DNA
tatgcgaggatgggggataat

SEQ ID NO: 732 - DNA, 21 bp, synthetic construct
  source 1..21: mol_type = other DNA
tactcaaagcaaaacgccaac

SEQ ID NO: 733 - DNA, 21 bp, synthetic construct
  source 1..21: mol_type = other DNA
cgcgaatcaaccaacggcatc

SEQ ID NO: 734 - DNA, 21 bp, synthetic construct
  source 1..21: mol_type = other DNA
ttgtccaaagggaatgtgaat

SEQ ID NO: 735 - DNA, 21 bp, synthetic construct
  source 1..21: mol_type = other DNA
ttgtccaaattggggtccaat

SEQ ID NO: 736 - DNA, 21 bp, synthetic construct
  source 1..21: mol_type = other DNA
tatgcgaaattggggttgaat

SEQ ID NO: 737 - DNA, 21 bp, synthetic construct
  source 1..21: mol_type = other DNA
tactcaaagcaaaacctgaac

SEQ ID NO: 738 - DNA, 21 bp, synthetic construct
  source 1..21: mol_type = other DNA
ttgtccaaagcgaatcacaat

SEQ ID NO: 739 - DNA, 21 bp, synthetic construct
  source 1..21: mol_type = other DNA
gtactgtcaaccaacggcatc

SEQ ID NO: 740 - DNA, 21 bp, synthetic construct
  source 1..21: mol_type = other DNA
catcgctcaaccaacggccaa

SEQ ID NO: 741 - DNA, 21 bp, synthetic construct
  source 1..21: mol_type = other DNA
acgacgtccacgaatggggtg

SEQ ID NO: 742 - DNA, 21 bp, synthetic construct
  source 1..21: mol_type = other DNA
ttctccaaaatgaatgtgaat

SEQ ID NO: 743 - DNA, 21 bp, synthetic construct
  source 1..21: mol_type = other DNA
ggggcggatgggtccaggtgg

SEQ ID NO: 744 - DNA, 21 bp, synthetic construct
  source 1..21: mol_type = other DNA
gcggcgtccacgaatgggata

SEQ ID NO: 745 - DNA, 21 bp, synthetic construct
  source 1..21: mol_type = other DNA
ttggcgaaagggggggtgaat

SEQ ID NO: 746 - DNA, 21 bp, synthetic construct
  source 1..21: mol_type = other DNA
ggcatgaagaacgtaatgttt

SEQ ID NO: 747 - DNA, 21 bp, synthetic construct
  source 1..21: mol_type = other DNA
catgaatcaaccaacggcatc

SEQ ID NO: 748 - DNA, 21 bp, synthetic construct
  source 1..21: mol_type = other DNA
tactcaaagatgggctcaaac

SEQ ID NO: 749 - DNA, 21 bp, synthetic construct
  source 1..21: mol_type = other DNA
aataatggggggtccttgtgg

SEQ ID NO: 750 - DNA, 21 bp, synthetic construct
  source 1..21: mol_type = other DNA
ctgatgtcaaccaacggccgc

SEQ ID NO: 751 - DNA, 21 bp, synthetic construct
  source 1..21: mol_type = other DNA
gcggtgtccacgaatggggtg

SEQ ID NO: 752 - DNA, 21 bp, synthetic construct
  source 1..21: mol_type = other DNA
tattccaggcagaatacgaat

SEQ ID NO: 753 - DNA, 21 bp, synthetic construct
  source 1..21: mol_type = other DNA
ttctccaaagtggggcacaat

SEQ ID NO: 754 - DNA, 21 bp, synthetic construct
  source 1..21: mol_type = other DNA
tatcacaggcaggggggggat

SEQ ID NO: 755 - DNA, 21 bp, synthetic construct
  source 1..21: mol_type = other DNA
ttcgcgaggacgggggagaat

SEQ ID NO: 756 - DNA, 21 bp, synthetic construct
  source 1..21: mol_type = other DNA
agggcgttggagggggcggat

SEQ ID NO: 757 - DNA, 21 bp, synthetic construct
  source 1..21: mol_type = other DNA
tatgcgaaatccaatgataat

SEQ ID NO: 758 - DNA, 21 bp, synthetic construct
  source 1..21: mol_type = other DNA
ttgaggaatgggaattccgcg

SEQ ID NO: 759 - DNA, 21 bp, synthetic construct
  source 1..21: mol_type = other DNA
ttgttgtccacgaatggggtg

SEQ ID NO: 760 - DNA, 21 bp, synthetic construct
  source 1..21: mol_type = other DNA
ttggcgaaatccggggagaat

SEQ ID NO: 761 - DNA, 21 bp, synthetic construct
  source 1..21: mol_type = other DNA
tatgcgaaaacgaatatgaat

SEQ ID NO: 762 - DNA, 21 bp, synthetic construct
  source 1..21: mol_type = other DNA
cgccgcgacggcaccgcctac

SEQ ID NO: 763 - DNA, 21 bp, synthetic construct
  source 1..21: mol_type = other DNA
tccacgtccacgaatggggtg

SEQ ID NO: 764 - DNA, 21 bp, synthetic construct
  source 1..21: mol_type = other DNA
tactcaaagtacaacctgaac

SEQ ID NO: 765 - DNA, 21 bp, synthetic construct
  source 1..21: mol_type = other DNA
gatggggggacgtcccactat

SEQ ID NO: 766 - DNA, 21 bp, synthetic construct
  source 1..21: mol_type = other DNA
atggagtccacgaatgggagg

SEQ ID NO: 767 - DNA, 21 bp, synthetic construct
  source 1..21: mol_type = other DNA
catcaatcaaccaacggcatc

SEQ ID NO: 768 - DNA, 21 bp, synthetic construct
  source 1..21: mol_type = other DNA
ctggccaagggcggcaacaac

SEQ ID NO: 769 - DNA, 21 bp, synthetic construct
  source 1..21: mol_type = other DNA
tccgagtccacgaatgggagg

SEQ ID NO: 770 - DNA, 21 bp, synthetic construct
  source 1..21: mol_type = other DNA
tactcaaagcatggcaacaac

SEQ ID NO: 771 - DNA, 21 bp, synthetic construct
  source 1..21: mol_type = other DNA
ttgccgagggaggtgtatgcg

SEQ ID NO: 772 - DNA, 21 bp, synthetic construct
  source 1..21: mol_type = other DNA
caaatgtcaaccaacggccgc

SEQ ID NO: 773 - DNA, 21 bp, synthetic construct
  source 1..21: mol_type = other DNA
tattccaaacagaatgtgaat

SEQ ID NO: 774 - DNA, 21 bp, synthetic construct
  source 1..21: mol_type = other DNA
tatgcgagggaggggccgaat

SEQ ID NO: 775 - DNA, 21 bp, synthetic construct
  source 1..21: mol_type = other DNA
aaggacggcgaatcatcatgg

SEQ ID NO: 776 - DNA, 21 bp, synthetic construct
  source 1..21: mol_type = other DNA
tatgcgagggcgggggataat

SEQ ID NO: 777 - DNA, 21 bp, synthetic construct
  source 1..21: mol_type = other DNA
ttctccaaagtgggggataat

SEQ ID NO: 778 - DNA, 21 bp, synthetic construct
  source 1..21: mol_type = other DNA
gcggcgtccacgaatggggtg

SEQ ID NO: 779 - DNA, 21 bp, synthetic construct
  source 1..21: mol_type = other DNA
ctgtcaaagatgggctttaac

SEQ ID NO: 780 - DNA, 21 bp, synthetic construct
  source 1..21: mol_type = other DNA
caacgctacgacgcctacgaa

SEQ ID NO: 781 - DNA, 21 bp, synthetic construct
  source 1..21: mol_type = other DNA
acgatatccacgaatggggtg

SEQ ID NO: 782 - DNA, 21 bp, synthetic construct
  source 1..21: mol_type = other DNA
gaggggtccacgaatgggagg

SEQ ID NO: 783 - DNA, 21 bp, synthetic construct
  source 1..21: mol_type = other DNA
tatgcgaaatccggggagaat

SEQ ID NO: 784 - DNA, 21 bp, synthetic construct
  source 1..21: mol_type = other DNA
ctggccaagaccggcaacaac

SEQ ID NO: 785 - DNA, 21 bp, synthetic construct
  source 1..21: mol_type = other DNA
aacttttcaaccaacggcatc

SEQ ID NO: 786 - DNA, 21 bp, synthetic construct
  source 1..21: mol_type = other DNA
ctggccaaggtaggctacaac

SEQ ID NO: 787 - DNA, 21 bp, synthetic construct
  source 1..21: mol_type = other DNA
atagcgtccacgaatggggtg

SEQ ID NO: 788 - DNA, 21 bp, synthetic construct
  source 1..21: mol_type = other DNA
cgcggcgccgacgtacattgg

SEQ ID NO: 789 - DNA, 21 bp, synthetic construct
  source 1..21: mol_type = other DNA
ttttcaaagctgaacgaaaac

SEQ ID NO: 790 - DNA, 21 bp, synthetic construct
  source 1..21: mol_type = other DNA
tatttctccgggacgacggat

SEQ ID NO: 791 - DNA, 21 bp, synthetic construct
  source 1..21: mol_type = other DNA
ttggcgaaaatggggccgaat

SEQ ID NO: 792 - DNA, 21 bp, synthetic construct
  source 1..21: mol_type = other DNA
tactcaaagatcaaccataac

SEQ ID NO: 793 - DNA, 21 bp, synthetic construct
  source 1..21: mol_type = other DNA
gtggagttcgagtggtccgat

SEQ ID NO: 794 - DNA, 21 bp, synthetic construct
  source 1..21: mol_type = other DNA
tacgcccgcctgaactttaac

SEQ ID NO: 795 - DNA, 21 bp, synthetic construct
  source 1..21: mol_type = other DNA
tactcaaagcataacatcaac

SEQ ID NO: 796 - DNA, 21 bp, synthetic construct
  source 1..21: mol_type = other DNA
gcgatgtccacgaatggggtg

SEQ ID NO: 797 - DNA, 21 bp, synthetic construct
  source 1..21: mol_type = other DNA
ttggcgaaattggggttgaat

SEQ ID NO: 798 - DNA, 21 bp, synthetic construct
  source 1..21: mol_type = other DNA
ctggccaagtcaggcaacaac

SEQ ID NO: 799 - DNA, 21 bp, synthetic construct
  source 1..21: mol_type = other DNA
cacttctccacgaatgggata

SEQ ID NO: 800 - DNA, 21 bp, synthetic construct
  source 1..21: mol_type = other DNA
cacgcgtcctccaatggggtg

SEQ ID NO: 801 - DNA, 21 bp, synthetic construct
  source 1..21: mol_type = other DNA
caacaatcaaccaacggcatc

SEQ ID NO: 802 - DNA, 21 bp, synthetic construct
  source 1..21: mol_type = other DNA
tactcacgctcaaacatcaac

SEQ ID NO: 803 - DNA, 21 bp, synthetic construct
  source 1..21: mol_type = other DNA
tccaatgagtcctccacgtgg

SEQ ID NO: 804 - DNA, 21 bp, synthetic construct
  source 1..21: mol_type = other DNA
tatgcgaaacagggggcgaat

SEQ ID NO: 805 - DNA, 21 bp, synthetic construct
  source 1..21: mol_type = other DNA
ccggcgtccacgaatgggagg

SEQ ID NO: 806 - DNA, 21 bp, synthetic construct
  source 1..21: mol_type = other DNA
gtgttctccacgaatggggtg

SEQ ID NO: 807 - DNA, 21 bp, synthetic construct
  source 1..21: mol_type = other DNA
tattccaaaatgggggataat

SEQ ID NO: 808 - DNA, 21 bp, synthetic construct
  source 1..21: mol_type = other DNA
tactcaaagtggggcgccaac

SEQ ID NO: 809 - DNA, 21 bp, synthetic construct
  source 1..21: mol_type = other DNA
tactcaaagaccggcgtaaac

SEQ ID NO: 810 - DNA, 21 bp, synthetic construct
  source 1..21: mol_type = other DNA
ttggcgaaagcgggggtgaat

SEQ ID NO: 811 - DNA, 21 bp, synthetic construct
  source 1..21: mol_type = other DNA
ttgtccaggataggggagaat

SEQ ID NO: 812 - DNA, 21 bp, synthetic construct
  source 1..21: mol_type = other DNA
tactcaaagtcaaacctgaac

SEQ ID NO: 813 - DNA, 21 bp, synthetic construct
  source 1..21: mol_type = other DNA
tattccaggacgaatgagaat

SEQ ID NO: 814 - DNA, 21 bp, synthetic construct
  source 1..21: mol_type = other DNA
gtggggtccacgaatggggtg

SEQ ID NO: 815 - DNA, 21 bp, synthetic construct
  source 1..21: mol_type = other DNA
tatgcgaaaacgggggcgaat

SEQ ID NO: 816 - DNA, 21 bp, synthetic construct
  source 1..21: mol_type = other DNA
gggtccgagaggtcctcctgg

SEQ ID NO: 817 - DNA, 21 bp, synthetic construct
  source 1..21: mol_type = other DNA
ttgtccaaaatgaatgataat

SEQ ID NO: 818 - DNA, 21 bp, synthetic construct
  source 1..21: mol_type = other DNA
cagcagtccacgaatggggtg

SEQ ID NO: 819 - DNA, 21 bp, synthetic construct
  source 1..21: mol_type = other DNA
tatgcgaggcagaatgataat

SEQ ID NO: 820 - DNA, 21 bp, synthetic construct
  source 1..21: mol_type = other DNA
cacaattccacgaatgggata

SEQ ID NO: 821 - DNA, 21 bp, synthetic construct
  source 1..21: mol_type = other DNA
ttttcacgcaccggccaaaac

SEQ ID NO: 822 - DNA, 21 bp, synthetic construct
  source 1..21: mol_type = other DNA
ccgcagtccacgaatgggata

SEQ ID NO: 823 - DNA, 21 bp, synthetic construct
  source 1..21: mol_type = other DNA
tcccagtccacgaatggggtg

SEQ ID NO: 824 - DNA, 21 bp, synthetic construct
  source 1..21: mol_type = other DNA
ccgtggtcctccaatggggtg

SEQ ID NO: 825 - DNA, 21 bp, synthetic construct
  source 1..21: mol_type = other DNA
ataatgtccacgaatggggtg

SEQ ID NO: 826 - DNA, 21 bp, synthetic construct
  source 1..21: mol_type = other DNA
tccaaatccacgaatgggata

SEQ ID NO: 827 - DNA, 21 bp, synthetic construct
  source 1..21: mol_type = other DNA
tggaattcctccaatggggtg

SEQ ID NO: 828 - DNA, 21 bp, synthetic construct
  source 1..21: mol_type = other DNA
tatgcgaggataggggagaat

SEQ ID NO: 829 - DNA, 21 bp, synthetic construct
  source 1..21: mol_type = other DNA
ttgtccggggagtccaggtat

SEQ ID NO: 830 - DNA, 21 bp, synthetic construct
  source 1..21: mol_type = other DNA
tatgcgaggaatggggggaat

SEQ ID NO: 831 - DNA, 21 bp, synthetic construct
  source 1..21: mol_type = other DNA
gataatagggggaataatgcg

SEQ ID NO: 832 - DNA, 21 bp, synthetic construct
  source 1..21: mol_type = other DNA
ttggagtccacgaatgggagg

SEQ ID NO: 833 - DNA, 21 bp, synthetic construct
  source 1..21: mol_type = other DNA
ttggcgaaacaggggatgaat

SEQ ID NO: 834 - DNA, 21 bp, synthetic construct
  source 1..21: mol_type = other DNA
ttcacgtccacgaatggggtg

SEQ ID NO: 835 - DNA, 21 bp, synthetic construct
  source 1..21: mol_type = other DNA
aatgagtccacgaatggggtg

SEQ ID NO: 836 - DNA, 21 bp, synthetic construct
  source 1..21: mol_type = other DNA
acgcactccacgaatgggata

SEQ ID NO: 837 - DNA, 21 bp, synthetic construct
  source 1..21: mol_type = other DNA
tacgtacattcacaaaactac

SEQ ID NO: 838 - DNA, 21 bp, synthetic construct
  source 1..21: mol_type = other DNA
aatgatgggaggtccaattat

SEQ ID NO: 839 - DNA, 21 bp, synthetic construct
  source 1..21: mol_type = other DNA
tatgcgaaagtggggatgaat

SEQ ID NO: 840 - DNA, 21 bp, synthetic construct
  source 1..21: mol_type = other DNA
ttggcgaaatccggggcgaat

SEQ ID NO: 841 - DNA, 21 bp, synthetic construct
  source 1..21: mol_type = other DNA
tattccaggcacaatgagaat

SEQ ID NO: 842 - DNA, 21 bp, synthetic construct
  source 1..21: mol_type = other DNA
tatgcgaaagcgaatccgaat

SEQ ID NO: 843 - DNA, 21 bp, synthetic construct
  source 1..21: mol_type = other DNA
aggtccgaggcgacgtatccg

SEQ ID NO: 844 - DNA, 21 bp, synthetic construct
  source 1..21: mol_type = other DNA
ttgtccaggtccggggagaat

SEQ ID NO: 845 - DNA, 21 bp, synthetic construct
  source 1..21: mol_type = other DNA
tactcaaagatgaacctgaac

SEQ ID NO: 846 - DNA, 21 bp, synthetic construct
  source 1..21: mol_type = other DNA
tatgcgaaaaatgggatgaat

SEQ ID NO: 847 - DNA, 21 bp, synthetic construct
  source 1..21: mol_type = other DNA
ttccactcctccaatggggtg

SEQ ID NO: 848 - DNA, 21 bp, synthetic construct
  source 1..21: mol_type = other DNA
ttgtccagggcgggggagaat

SEQ ID NO: 849 - DNA, 21 bp, synthetic construct
  source 1..21: mol_type = other DNA
ttggggtccacgaatgggata

SEQ ID NO: 850 - DNA, 21 bp, synthetic construct
  source 1..21: mol_type = other DNA
tattcctcctccaatggggtg

SEQ ID NO: 851 - DNA, 21 bp, synthetic construct
  source 1..21: mol_type = other DNA
ttggcgaaacagggggtgaat

SEQ ID NO: 852 - DNA, 21 bp, synthetic construct
  source 1..21: mol_type = other DNA
ttctccaggcaggggatgaat

SEQ ID NO: 853 - DNA, 21 bp, synthetic construct
  source 1..21: mol_type = other DNA
tcagcctcaaccaacggcatc

SEQ ID NO: 854 - DNA, 21 bp, synthetic construct
  source 1..21: mol_type = other DNA
cagatgtccacgaatggggtg

SEQ ID NO: 855 - DNA, 21 bp, synthetic construct
  source 1..21: mol_type = other DNA
ttgtccaaaaataatgtgaat

SEQ ID NO: 856 - DNA, 21 bp, synthetic construct
  source 1..21: mol_type = other DNA
cacgcgtccacgaatgggata

SEQ ID NO: 857 - DNA, 21 bp, synthetic construct
  source 1..21: mol_type = other DNA
acgccggatcacgtgcagtgg

SEQ ID NO: 858 - DNA, 21 bp, synthetic construct
  source 1..21: mol_type = other DNA
aggttggagacgcacgattgg

SEQ ID NO: 859 - DNA, 21 bp, synthetic construct
  source 1..21: mol_type = other DNA
ggcacctcaaccgcctcatgg

SEQ ID NO: 860 - DNA, 21 bp, synthetic construct
  source 1..21: mol_type = other DNA
tactcaaagaacggccataac

SEQ ID NO: 861 - DNA, 21 bp, synthetic construct
  source 1..21: mol_type = other DNA
tattccaaacacaatacgaat

SEQ ID NO: 862 - DNA, 21 bp, synthetic construct
  source 1..21: mol_type = other DNA
tattccaggcacggggagaat

SEQ ID NO: 863 - DNA, 21 bp, synthetic construct
  source 1..21: mol_type = other DNA
ttggcgaggcagggggataat

SEQ ID NO: 864 - DNA, 21 bp, synthetic construct
  source 1..21: mol_type = other DNA
ttttcaaagatcggcatcaac

SEQ ID NO: 865 - DNA, 21 bp, synthetic construct
  source 1..21: mol_type = other DNA
tactcaaagctgggcgacaac

SEQ ID NO: 866 - DNA, 21 bp, synthetic construct
  source 1..21: mol_type = other DNA
tactcaaagctgaacggcaac

SEQ ID NO: 867 - DNA, 21 bp, synthetic construct
  source 1..21: mol_type = other DNA
tactcacgcaacggccaaaac

SEQ ID NO: 868 - DNA, 21 bp, synthetic construct
  source 1..21: mol_type = other DNA
atatcctccacgaatggggtg

SEQ ID NO: 869 - DNA, 21 bp, synthetic construct
  source 1..21: mol_type = other DNA
tacgccctgtcaggctttaac

SEQ ID NO: 870 - DNA, 21 bp, synthetic construct
  source 1..21: mol_type = other DNA
ccgatatccacgaatgggagg

SEQ ID NO: 871 - DNA, 21 bp, synthetic construct
  source 1..21: mol_type = other DNA
atgttttcaaccaacggcatc

SEQ ID NO: 872 - DNA, 21 bp, synthetic construct
  source 1..21: mol_type = other DNA
ctgtcaaagatgaaccataac

SEQ ID NO: 873 - DNA, 21 bp, synthetic construct
  source 1..21: mol_type = other DNA
accgacggccaatcaggctgg

SEQ ID NO: 874 - DNA, 21 bp, synthetic construct
  source 1..21: mol_type = other DNA
gcgatatccacgaatggggtg

SEQ ID NO: 875 - DNA, 21 bp, synthetic construct
  source 1..21: mol_type = other DNA
gtgacgtccacgaatgggata

SEQ ID NO: 876 - DNA, 21 bp, synthetic construct
  source 1..21: mol_type = other DNA
ttggcgaaaacgggggataat

SEQ ID NO: 877 - DNA, 21 bp, synthetic construct
  source 1..21: mol_type = other DNA
tactcaaagggcggctttaac

SEQ ID NO: 878 - DNA, 21 bp, synthetic construct
  source 1..21: mol_type = other DNA
ctgtcaaagctgaacatgaac

SEQ ID NO: 879 - DNA, 21 bp, synthetic construct
  source 1..21: mol_type = other DNA
taccaatcatcaaacggcgta

SEQ ID NO: 880 - DNA, 21 bp, synthetic construct
  source 1..21: mol_type = other DNA
ttgacgtccacgaatggggtg

SEQ ID NO: 881 - DNA, 21 bp, synthetic construct
  source 1..21: mol_type = other DNA
ctgtcaaagcaaaacgtaaac

SEQ ID NO: 882 - DNA, 21 bp, synthetic construct
  source 1..21: mol_type = other DNA
ctgtcaaagcaaggccataac

SEQ ID NO: 883 - DNA, 21 bp, synthetic construct
  source 1..21: mol_type = other DNA
gatgcgttgcacgggaggaat

SEQ ID NO: 884 - DNA, 21 bp, synthetic construct
  source 1..21: mol_type = other DNA
tattccaaagtgaattccaat

SEQ ID NO: 885 - DNA, 21 bp, synthetic construct
  source 1..21: mol_type = other DNA
ttcgagtcctccaatggggtg

SEQ ID NO: 886 - DNA, 21 bp, synthetic construct
  source 1..21: mol_type = other DNA
tattccaaagtgaatgtgaat

SEQ ID NO: 887 - DNA, 21 bp, synthetic construct
  source 1..21: mol_type = other DNA
ttctccaaagtgggggtgaat

SEQ ID NO: 888 - DNA, 21 bp, synthetic construct
  source 1..21: mol_type = other DNA
acgtccgggtcctcctcctgg

SEQ ID NO: 889 - DNA, 21 bp, synthetic construct
  source 1..21: mol_type = other DNA
acgatgtccacgaatggggtg

SEQ ID NO: 890 - DNA, 21 bp, synthetic construct
  source 1..21: mol_type = other DNA
cacaattccacgaatggggtg

SEQ ID NO: 891 - DNA, 21 bp, synthetic construct
  source 1..21: mol_type = other DNA
atgcactccacgaatgggata

SEQ ID NO: 892 - DNA, 21 bp, synthetic construct
  source 1..21: mol_type = other DNA
tatgcgaaagggaatcagaat

SEQ ID NO: 893 - DNA, 21 bp, synthetic construct
  source 1..21: mol_type = other DNA
tcaaactcaaccaacggcatc

SEQ ID NO: 894 - DNA, 21 bp, synthetic construct
  source 1..21: mol_type = other DNA
tactcaaaggccggcaccaac

SEQ ID NO: 895 - DNA, 21 bp, synthetic construct
  source 1..21: mol_type = other DNA
acggagtccacgaatggggtg

SEQ ID NO: 896 - DNA, 21 bp, synthetic construct
  source 1..21: mol_type = other DNA
aatgtggatcacgtgtcctgg

SEQ ID NO: 897 - DNA, 21 bp, synthetic construct
  source 1..21: mol_type = other DNA
acggattccacgaatggggtg

SEQ ID NO: 898 - DNA, 21 bp, synthetic construct
  source 1..21: mol_type = other DNA
ttttcaaagtcaggccataac

SEQ ID NO: 899 - DNA, 21 bp, synthetic construct
  source 1..21: mol_type = other DNA
tcaatctcaaccaacggcatc

SEQ ID NO: 900 - DNA, 21 bp, synthetic construct
  source 1..21: mol_type = other DNA
tccatgtccacgaatgggata

SEQ ID NO: 901 - DNA, 21 bp, synthetic construct
  source 1..21: mol_type = other DNA
tccatgtccacgaatggggtg

SEQ ID NO: 902 - DNA, 21 bp, synthetic construct
  source 1..21: mol_type = other DNA
caccagtccacgaatggggtg

SEQ ID NO: 903 - DNA, 21 bp, synthetic construct
  source 1..21: mol_type = other DNA
caggcgtccacgaatggggtg

SEQ ID NO: 904 - DNA, 21 bp, synthetic construct
  source 1..21: mol_type = other DNA
ccgcactccacgaatggggtg

SEQ ID NO: 905 - DNA, 21 bp, synthetic construct
  source 1..21: mol_type = other DNA
aggttgtccgagtccaattgg

SEQ ID NO: 906 - DNA, 21 bp, synthetic construct
  source 1..21: mol_type = other DNA
gagcactccacgaatgggagg

SEQ ID NO: 907 - DNA, 21 bp, synthetic construct
  source 1..21: mol_type = other DNA
atgcactccacgaatggggtg

SEQ ID NO: 908 - DNA, 21 bp, synthetic construct
  source 1..21: mol_type = other DNA
gtgacgtcctccatggggagg

SEQ ID NO: 909 - DNA, 21 bp, synthetic construct
  source 1..21: mol_type = other DNA
tactcaaagtcaggcatcaac

SEQ ID NO: 910 - DNA, 21 bp, synthetic construct
  source 1..21: mol_type = other DNA
ttttcaaaggacaactttaac

SEQ ID NO: 911 - DNA, 21 bp, synthetic construct
  source 1..21: mol_type = other DNA
tactcaaagggcaacaacaac

SEQ ID NO: 912 - DNA, 21 bp, synthetic construct
  source 1..21: mol_type = other DNA
acgaaatcctccaatggggtg

SEQ ID NO: 913 - DNA, 21 bp, synthetic construct
  source 1..21: mol_type = other DNA
acggcgtccacgaatgggata

SEQ ID NO: 914 - DNA, 21 bp, synthetic construct
  source 1..21: mol_type = other DNA
tactcaaagatcggccaaaac

SEQ ID NO: 915 - DNA, 21 bp, synthetic construct
  source 1..21: mol_type = other DNA
cacacgtccacgaatgggata

SEQ ID NO: 916 - DNA, 21 bp, synthetic construct
  source 1..21: mol_type = other DNA
tccgattccacgaatgggata

SEQ ID NO: 917 - DNA, 21 bp, synthetic construct
  source 1..21: mol_type = other DNA
ttggcgaaacacggggcgaat

SEQ ID NO: 918 - DNA, 21 bp, synthetic construct
  source 1..21: mol_type = other DNA
gcggagtccacgaatggggtg

SEQ ID NO: 919 - DNA, 21 bp, synthetic construct
  source 1..21: mol_type = other DNA
tacctgtcaaccaacggcgta

SEQ ID NO: 920 - DNA, 21 bp, synthetic construct
  source 1..21: mol_type = other DNA
ttggcgaaaatgggggtgaat

SEQ ID NO: 921 - DNA, 21 bp, synthetic construct
  source 1..21: mol_type = other DNA
tccgcgtcctccaatggggtg

SEQ ID NO: 922 - DNA, 21 bp, synthetic construct
  source 1..21: mol_type = other DNA
gtagtatcatcaaacggcgta

SEQ ID NO: 923 - DNA, 21 bp, synthetic construct
  source 1..21: mol_type = other DNA
gcgatatccacgaatgggata

SEQ ID NO: 924 - DNA, 21 bp, synthetic construct
  source 1..21: mol_type = other DNA
cacacgtccacgaatggggtg

SEQ ID NO: 925 - DNA, 21 bp, synthetic construct
  source 1..21: mol_type = other DNA
tttgccaagggcggcatgaac

SEQ ID NO: 926 - DNA, 21 bp, synthetic construct
  source 1..21: mol_type = other DNA
gggggggggacgaatgcgtgg

SEQ ID NO: 927 - DNA, 21 bp, synthetic construct
  source 1..21: mol_type = other DNA
acgaattccacgaatggggtg

SEQ ID NO: 928 - DNA, 21 bp, synthetic construct
  source 1..21: mol_type = other DNA
tatgcgaaaaatgggttgaat

SEQ ID NO: 929 - DNA, 21 bp, synthetic construct
  source 1..21: mol_type = other DNA
tactcaaaggccaaccaaaac

SEQ ID NO: 930 - DNA, 21 bp, synthetic construct
  source 1..21: mol_type = other DNA
gtggagtatgggcagaggaat

SEQ ID NO: 931 - DNA, 21 bp, synthetic construct
  source 1..21: mol_type = other DNA
gcgtcctccacgaatgggata

SEQ ID NO: 932 - DNA, 21 bp, synthetic construct
  source 1..21: mol_type = other DNA
ctgtcaaagatgggcaacaac

SEQ ID NO: 933 - DNA, 21 bp, synthetic construct
  source 1..21: mol_type = other DNA
tatgcgaaacagggggtgaat

SEQ ID NO: 934 - DNA, 21 bp, synthetic construct
  source 1..21: mol_type = other DNA
ccggagtccacgaatggggtg

SEQ ID NO: 935 - DNA, 21 bp, synthetic construct
  source 1..21: mol_type = other DNA
cattactcaaccaacggcatc

SEQ ID NO: 936 - DNA, 21 bp, synthetic construct
  source 1..21: mol_type = other DNA
ctgtcaaaggtaggccccaac

SEQ ID NO: 937 - DNA, 21 bp, synthetic construct
  source 1..21: mol_type = other DNA
acggcgtcctccaatggggtg

SEQ ID NO: 938 - DNA, 21 bp, synthetic construct
  source 1..21: mol_type = other DNA
ataaattccacgaatgggata

SEQ ID NO: 939 - DNA, 21 bp, synthetic construct
  source 1..21: mol_type = other DNA
tatgcgagggatgggccgaat

SEQ ID NO: 940 - DNA, 21 bp, synthetic construct
  source 1..21: mol_type = other DNA
tactcaaagatgaacatcaac

SEQ ID NO: 941 - DNA, 21 bp, synthetic construct
  source 1..21: mol_type = other DNA
ttgaattccacgaatggggtg

SEQ ID NO: 942 - DNA, 21 bp, synthetic construct
  source 1..21: mol_type = other DNA
tattccaaacagaatgagaat

SEQ ID NO: 943 - DNA, 21 bp, synthetic construct
  source 1..21: mol_type = other DNA
tatgcgaaagggaatcacaat

SEQ ID NO: 944 - DNA, 21 bp, synthetic construct
  source 1..21: mol_type = other DNA
gaggtgtccacgaatgggagg

SEQ ID NO: 945 - DNA, 21 bp, synthetic construct
  source 1..21: mol_type = other DNA
tatgcgaaagggaatgataat

SEQ ID NO: 946 - DNA, 21 bp, synthetic construct
  source 1..21: mol_type = other DNA
tcagacggctcatcactgtgg

SEQ ID NO: 947 - DNA, 21 bp, synthetic construct
  source 1..21: mol_type = other DNA
acgttctccacgaatggggtg

SEQ ID NO: 948 - DNA, 21 bp, synthetic construct
  source 1..21: mol_type = other DNA
ctgtcaaagaccggcgtaaac

SEQ ID NO: 949 - DNA, 21 bp, synthetic construct
  source 1..21: mol_type = other DNA
tactcacgcaacggctacaac

SEQ ID NO: 950 - DNA, 21 bp, synthetic construct
  source 1..21: mol_type = other DNA
tatgcgaggacgtccacggat

SEQ ID NO: 951 - DNA, 21 bp, synthetic construct
  source 1..21: mol_type = other DNA
ttgtccaaagcggggacgaat

SEQ ID NO: 952 - DNA, 21 bp, synthetic construct
  source 1..21: mol_type = other DNA
tattccaaacagggggagaat

SEQ ID NO: 953 - DNA, 21 bp, synthetic construct
  source 1..21: mol_type = other DNA
ttcgcgaaatccggggcgaat

SEQ ID NO: 954 - DNA, 21 bp, synthetic construct
  source 1..21: mol_type = other DNA
ttggcgaggcagggggagaat

SEQ ID NO: 955 - DNA, 21 bp, synthetic construct
  source 1..21: mol_type = other DNA
cagacgtccacgaatggggtg

SEQ ID NO: 956 - DNA, 21 bp, synthetic construct
  source 1..21: mol_type = other DNA
ttgtccaaagcgaatatgaat

SEQ ID NO: 957 - DNA, 21 bp, synthetic construct
  source 1..21: mol_type = other DNA
tatgagtccacgaatggggtg

SEQ ID NO: 958 - DNA, 21 bp, synthetic construct
  source 1..21: mol_type = other DNA
ttgtccaaagcgggggataat

SEQ ID NO: 959 - DNA, 21 bp, synthetic construct
  source 1..21: mol_type = other DNA
tactcaaagatgggcaacaac

SEQ ID NO: 960 - DNA, 21 bp, synthetic construct
  source 1..21: mol_type = other DNA
tattccagggcgaatgagaat

SEQ ID NO: 961 - DNA, 21 bp, synthetic construct
  source 1..21: mol_type = other DNA
acgaggaatggggcgaatgcg

SEQ ID NO: 962 - DNA, 21 bp, synthetic construct
  source 1..21: mol_type = other DNA
gagacgtccacgaatgggagg

SEQ ID NO: 963 - DNA, 21 bp, synthetic construct
  source 1..21: mol_type = other DNA
tggcaggagacgaatgggaaa

SEQ ID NO: 964 - DNA, 21 bp, synthetic construct
  source 1..21: mol_type = other DNA
ataacgtccacgaatggggtg

SEQ ID NO: 965 - DNA, 21 bp, synthetic construct
  source 1..21: mol_type = other DNA
tccgggtccacgaatggggtg

SEQ ID NO: 966 - DNA, 21 bp, synthetic construct
  source 1..21: mol_type = other DNA
ttcaattcctccaatggggtg

SEQ ID NO: 967 - DNA, 21 bp, synthetic construct
  source 1..21: mol_type = other DNA
ttctccagggcggggacgaat

SEQ ID NO: 968 - DNA, 21 bp, synthetic construct
  source 1..21: mol_type = other DNA
cagacgtcctccaatggggtg

SEQ ID NO: 969 - DNA, 21 bp, synthetic construct
  source 1..21: mol_type = other DNA
ccggagtccacgaatgggagg

SEQ ID NO: 970 - DNA, 21 bp, synthetic construct
  source 1..21: mol_type = other DNA
atcatgtcaaccaacggcatc

SEQ ID NO: 971 - DNA, 21 bp, synthetic construct
  source 1..21: mol_type = other DNA
gagaattccacgaatgggagg

SEQ ID NO: 972 - DNA, 21 bp, synthetic construct
  source 1..21: mol_type = other DNA
cgccccaacggccattcagcc

SEQ ID NO: 973 - DNA, 21 bp, synthetic construct
  source 1..21: mol_type = other DNA
atacactccacgaatgggata

SEQ ID NO: 974 - DNA, 21 bp, synthetic construct
  source 1..21: mol_type = other DNA
ccgaggtcctccaatggggtg

SEQ ID NO: 975 - DNA, 21 bp, synthetic construct
  source 1..21: mol_type = other DNA
ttgcagtcctccaatggggtg

SEQ ID NO: 976 - DNA, 21 bp, synthetic construct
  source 1..21: mol_type = other DNA
tactcaaaggtaggcgtaaac

SEQ ID NO: 977 - DNA, 21 bp, synthetic construct
  source 1..21: mol_type = other DNA
tactcaaagcaaaaccataac

SEQ ID NO: 978 - DNA, 21 bp, synthetic construct
  source 1..21: mol_type = other DNA
ttgtccaaaggggggccgaat

SEQ ID NO: 979 - DNA, 21 bp, synthetic construct
  source 1..21: mol_type = other DNA
atccaatcaaccaacggcatc

SEQ ID NO: 980 - DNA, 21 bp, synthetic construct
  source 1..21: mol_type = other DNA
acgaatagggtgccgcactcc

SEQ ID NO: 981 - DNA, 21 bp, synthetic construct
  source 1..21: mol_type = other DNA
catcatggcgtatcagcctac

SEQ ID NO: 982 - DNA, 21 bp, synthetic construct
  source 1..21: mol_type = other DNA
gtatggtcatcaaacggcgta

SEQ ID NO: 983 - DNA, 21 bp, synthetic construct
  source 1..21: mol_type = other DNA
tattccaaacaggggacgaat

SEQ ID NO: 984 - DNA, 21 bp, synthetic construct
  source 1..21: mol_type = other DNA
gcggattccacgaatggggtg

SEQ ID NO: 985 - DNA, 21 bp, synthetic construct
  source 1..21: mol_type = other DNA
ggggaggggtattccacgtgg

SEQ ID NO: 986 - DNA, 21 bp, synthetic construct
  source 1..21: mol_type = other DNA
ctgtcacgcatcaactttaac

SEQ ID NO: 987 - DNA, 21 bp, synthetic construct
  source 1..21: mol_type = other DNA
cacatgtccacgaatgggata

SEQ ID NO: 988 - DNA, 21 bp, synthetic construct
  source 1..21: mol_type = other DNA
tatgcgaaagcgaatgataat

SEQ ID NO: 989 - DNA, 21 bp, synthetic construct
  source 1..21: mol_type = other DNA
ataatatccacgaatgggata

SEQ ID NO: 990 - DNA, 21 bp, synthetic construct
  source 1..21: mol_type = other DNA
cactattccacgaatggggtg

SEQ ID NO: 991 - DNA, 21 bp, synthetic construct
  source 1..21: mol_type = other DNA
atcatctcaaccaacggccgc

SEQ ID NO: 992 - DNA, 21 bp, synthetic construct
  source 1..21: mol_type = other DNA
tatgcgaggtataatgataat

SEQ ID NO: 993 - DNA, 21 bp, synthetic construct
  source 1..21: mol_type = other DNA
ttgatatccacgaatgggata

SEQ ID NO: 994 - DNA, 21 bp, synthetic construct
  source 1..21: mol_type = other DNA
tactcaaagtcaggcctgaac

SEQ ID NO: 995 - DNA, 21 bp, synthetic construct
  source 1..21: mol_type = other DNA
cattggtcaaccaacggcatc

SEQ ID NO: 996 - DNA, 21 bp, synthetic construct
  source 1..21: mol_type = other DNA
ctgtcaaagctgaacctgaac

SEQ ID NO: 997 - DNA, 21 bp, synthetic construct
  source 1..21: mol_type = other DNA
tattccaaatccaatccgaat

SEQ ID NO: 998 - DNA, 21 bp, synthetic construct
  source 1..21: mol_type = other DNA
tattccaggaatgggacgaat

SEQ ID NO: 999 - DNA, 21 bp, synthetic construct
  source 1..21: mol_type = other DNA
tatgcgaaaatagggatgaat

SEQ ID NO: 1000 - DNA, 21 bp, synthetic construct
  source 1..21: mol_type = other DNA
ttgacgtccacgaatgggata

SEQ ID NO: 1001 - DNA, 21 bp, synthetic construct
  source 1..21: mol_type = other DNA
tcagtatcaaccaacggcgta

SEQ ID NO: 1002 - DNA, 21 bp, synthetic construct
  source 1..21: mol_type = other DNA
atggagtcctccaatggggtg

SEQ ID NO: 1003 - DNA, 21 bp, synthetic construct
  source 1..21: mol_type = other DNA
tccaattcctccaatggggtg

SEQ ID NO: 1004 - DNA, 21 bp, synthetic construct
  source 1..21: mol_type = other DNA
gtgtattccacgaatggggtg

SEQ ID NO: 1005 - DNA, 21 bp, synthetic construct
  source 1..21: mol_type = other DNA
tcacattcaaccaacggcatc

SEQ ID NO: 1006 - DNA, 21 bp, synthetic construct
  source 1..21: mol_type = other DNA
cagcactccacgaatggggtg

SEQ ID NO: 1007 - DNA, 21 bp, synthetic construct
  source 1..21: mol_type = other DNA
ttgtccaaaacggggatgaat

SEQ ID NO: 1008 - DNA, 21 bp, synthetic construct
  source 1..21: mol_type = other DNA
ttgtccaaacaggggatgaat

SEQ ID NO: 1009 - DNA, 21 bp, synthetic construct
  source 1..21: mol_type = other DNA
ctgtcaaagtcatcaaacaac

SEQ ID NO: 1010 - DNA, 21 bp, synthetic construct
  source 1..21: mol_type = other DNA
ttcgggtccacgaatgggata

SEQ ID NO: 1011 - DNA, 21 bp, synthetic construct
  source 1..21: mol_type = other DNA
tatgcgagggtgggggagaat

SEQ ID NO: 1012 - DNA, 21 bp, synthetic construct
  source 1..21: mol_type = other DNA
ttctccaaagcggggcagaat

SEQ ID NO: 1013 - DNA, 21 bp, synthetic construct
  source 1..21: mol_type = other DNA
cacacgtcctccaatggggtg

SEQ ID NO: 1014 - DNA, 21 bp, synthetic construct
  source 1..21: mol_type = other DNA
tattccaaaacgggggagaat

SEQ ID NO: 1015 - DNA, 21 bp, synthetic construct
  source 1..21: mol_type = other DNA
tacttttcacatgtagtagaa

SEQ ID NO: 1016 - DNA, 21 bp, synthetic construct
  source 1..21: mol_type = other DNA
ctggccaagaacggccccaac

SEQ ID NO: 1017 - DNA, 21 bp, synthetic construct
  source 1..21: mol_type = other DNA
atatccgagtcctccaggtgg

SEQ ID NO: 1018 - DNA, 21 bp, synthetic construct
  source 1..21: mol_type = other DNA
ctgtcacgctacaacgaaaac

SEQ ID NO: 1019 - DNA, 21 bp, synthetic construct
  source 1..21: mol_type = other DNA
ttgtccaggttgtccgatacg

SEQ ID NO: 1020 - DNA, 21 bp, synthetic construct
  source 1..21: mol_type = other DNA
ctggcctcaaccaacggccgc

SEQ ID NO: 1021 - DNA, 21 bp, synthetic construct
  source 1..21: mol_type = other DNA
tatgcgaaagcgggggataat

SEQ ID NO: 1022 - DNA, 21 bp, synthetic construct
  source 1..21: mol_type = other DNA
cacgggtccacgaatggggtg

SEQ ID NO: 1023 - DNA, 21 bp, synthetic construct
  source 1..21: mol_type = other DNA
gtgtcctccacgaatgggata

SEQ ID NO: 1024 - DNA, 21 bp, synthetic construct
  source 1..21: mol_type = other DNA
ttctccaaatccgggccgaat

SEQ ID NO: 1025 - DNA, 21 bp, synthetic construct
  source 1..21: mol_type = other DNA
gcgtggtccacgaatggggtg

SEQ ID NO: 1026 - DNA, 21 bp, synthetic construct
  source 1..21: mol_type = other DNA
ctgtcaaagatgggcatcaac

SEQ ID NO: 1027 - DNA, 21 bp, synthetic construct
  source 1..21: mol_type = other DNA
ttggcgaaagcggggttgaat

SEQ ID NO: 1028 - DNA, 21 bp, synthetic construct
  source 1..21: mol_type = other DNA
gtgacgtcctccaatggggtg

SEQ ID NO: 1029 - DNA, 21 bp, synthetic construct
  source 1..21: mol_type = other DNA
tattccaaagcgaatccgaat

SEQ ID NO: 1030 - DNA, 21 bp, synthetic construct
  source 1..21: mol_type = other DNA
ttgtccaaagggaatcacaat

SEQ ID NO: 1031 - DNA, 21 bp, synthetic construct
  source 1..21: mol_type = other DNA
acggcggcgcacgtgacgtgg

SEQ ID NO: 1032 - DNA, 21 bp, synthetic construct
  source 1..21: mol_type = other DNA
caggagtccacgaatgggagg

SEQ ID NO: 1033 - DNA, 21 bp, synthetic construct
  source 1..21: mol_type = other DNA
ttgtccaaaatggggttgaat

SEQ ID NO: 1034 - DNA, 21 bp, synthetic construct
  source 1..21: mol_type = other DNA
atatcctcctccaatgggatg

SEQ ID NO: 1035 - DNA, 21 bp, synthetic construct
  source 1..21: mol_type = other DNA
ctgcattcaaccaacggcatc

SEQ ID NO: 1036 - DNA, 21 bp, synthetic construct
  source 1..21: mol_type = other DNA
ttggcgaaaaatgggatgaat

SEQ ID NO: 1037 - DNA, 21 bp, synthetic construct
  source 1..21: mol_type = other DNA
tattccaaatccaatgcgaat

SEQ ID NO: 1038 - DNA, 21 bp, synthetic construct
  source 1..21: mol_type = other DNA
ttggcgaaaacggggacgaat

SEQ ID NO: 1039 - DNA, 21 bp, synthetic construct
  source 1..21: mol_type = other DNA
atgatgtccacgaatgggata

SEQ ID NO: 1040 - DNA, 21 bp, synthetic construct
  source 1..21: mol_type = other DNA
tattccagggatgggtataat

SEQ ID NO: 1041 - DNA, 21 bp, synthetic construct
  source 1..21: mol_type = other DNA
tatacgtcctccaatggggtg

SEQ ID NO: 1042 - DNA, 21 bp, synthetic construct
  source 1..21: mol_type = other DNA
gaggcgtccacgaatgggagg

SEQ ID NO: 1043 - DNA, 21 bp, synthetic construct
  source 1..21: mol_type = other DNA
aattcctccacgtccacgtgg

SEQ ID NO: 1044 - DNA, 21 bp, synthetic construct
  source 1..21: mol_type = other DNA
tactcaaaggccaacaacaac

SEQ ID NO: 1045 - DNA, 21 bp, synthetic construct
  source 1..21: mol_type = other DNA
acgtcctccacgaatggggtg

SEQ ID NO: 1046 - DNA, 21 bp, synthetic construct
  source 1..21: mol_type = other DNA
ccgtatgcggcgtccagggat

SEQ ID NO: 1047 - DNA, 21 bp, synthetic construct
  source 1..21: mol_type = other DNA
gcgaatgggtcctccaaatat

SEQ ID NO: 1048 - DNA, 21 bp, synthetic construct
  source 1..21: mol_type = other DNA
aatcactccacgaatgggagg

SEQ ID NO: 1049 - DNA, 21 bp, synthetic construct
  source 1..21: mol_type = other DNA
tattccaggcagaatccgaat

SEQ ID NO: 1050 - DNA, 21 bp, synthetic construct
  source 1..21: mol_type = other DNA
tacgccaagtcacaaatgaac

SEQ ID NO: 1051 - DNA, 21 bp, synthetic construct
  source 1..21: mol_type = other DNA
cagatatccacgaatgggata

SEQ ID NO: 1052 - DNA, 21 bp, synthetic construct
  source 1..21: mol_type = other DNA
tatcacgtgcacggggataat

SEQ ID NO: 1053 - DNA, 21 bp, synthetic construct
  source 1..21: mol_type = other DNA
tatgcgaaaccgggggcgaat

SEQ ID NO: 1054 - DNA, 21 bp, synthetic construct
  source 1..21: mol_type = other DNA
tactcaaagtcaggctcaaac

SEQ ID NO: 1055 - DNA, 21 bp, synthetic construct
  source 1..21: mol_type = other DNA
tacgccaagtcaggcgccaac

SEQ ID NO: 1056 - DNA, 21 bp, synthetic construct
  source 1..21: mol_type = other DNA
tacaactcatcaaacggcgta

SEQ ID NO: 1057 - DNA, 21 bp, synthetic construct
  source 1..21: mol_type = other DNA
taccgcaccgacggcttttca

SEQ ID NO: 1058 - DNA, 21 bp, synthetic construct
  source 1..21: mol_type = other DNA
tcctcctccacgaatgggata

SEQ ID NO: 1059 - DNA, 21 bp, synthetic construct
  source 1..21: mol_type = other DNA
tacgccaagatgggcctgaac

SEQ ID NO: 1060 - DNA, 21 bp, synthetic construct
  source 1..21: mol_type = other DNA
tactcagcctcaggccccaac

SEQ ID NO: 1061 - DNA, 21 bp, synthetic construct
  source 1..21: mol_type = other DNA
ctgtcaaagcaaggctttaac

SEQ ID NO: 1062 - DNA, 21 bp, synthetic construct
  source 1..21: mol_type = other DNA
cacgattccacgaatggggtg

SEQ ID NO: 1063 - DNA, 21 bp, synthetic construct
  source 1..21: mol_type = other DNA
gtgtcctcccagaatggggtg

SEQ ID NO: 1064 - DNA, 21 bp, synthetic construct
  source 1..21: mol_type = other DNA
tactcaaagatgggccaaaac

SEQ ID NO: 1065 - DNA, 21 bp, synthetic construct
  source 1..21: mol_type = other DNA
aacttttcaaccaacggccgc

SEQ ID NO: 1066 - DNA, 21 bp, synthetic construct
  source 1..21: mol_type = other DNA
tactcacgcggcaacgacaac

SEQ ID NO: 1067 - DNA, 21 bp, synthetic construct
  source 1..21: mol_type = other DNA
gcgtccgatacgaatgggagg

SEQ ID NO: 1068 - DNA, 21 bp, synthetic construct
  source 1..21: mol_type = other DNA
acgcagtccttgaatgggagg

SEQ ID NO: 1069 - DNA, 21 bp, synthetic construct
  source 1..21: mol_type = other DNA
ccgtcctccacgaatggggtg

SEQ ID NO: 1070 - DNA, 21 bp, synthetic construct
  source 1..21: mol_type = other DNA
aaggacggcaactcatcatgg

SEQ ID NO: 1071 - DNA, 21 bp, synthetic construct
  source 1..21: mol_type = other DNA
ttcgcgaaagcggggtggaat

SEQ ID NO: 1072 - DNA, 21 bp, synthetic construct
  source 1..21: mol_type = other DNA
tactactcaggcaagatcgac

SEQ ID NO: 1073 - DNA, 21 bp, synthetic construct
  source 1..21: mol_type = other DNA
ttgtccaggataaatgataat

SEQ ID NO: 1074 - DNA, 21 bp, synthetic construct
  source 1..21: mol_type = other DNA
acgacgtccacgaatgggata

SEQ ID NO: 1075 - DNA, 21 bp, synthetic construct
  source 1..21: mol_type = other DNA
gaagcctcaaccaacggcatc

SEQ ID NO: 1076 - DNA, 21 bp, synthetic construct
  source 1..21: mol_type = other DNA
ttctcctccacgaatggggtg

SEQ ID NO: 1077 - DNA, 21 bp, synthetic construct
  source 1..21: mol_type = other DNA
ttcgcgaaagcggggttcaat

SEQ ID NO: 1078 - DNA, 21 bp, synthetic construct
  source 1..21: mol_type = other DNA
ttggcgagggggggggagaat

SEQ ID NO: 1079 - DNA, 21 bp, synthetic construct
  source 1..21: mol_type = other DNA
gtggagtcctccaatggggtg

SEQ ID NO: 1080 - DNA, 21 bp, synthetic construct
  source 1..21: mol_type = other DNA
tatgcgaaaaatggggggaat

SEQ ID NO: 1081 - DNA, 21 bp, synthetic construct
  source 1..21: mol_type = other DNA
tccgggtccacgaatgggata

SEQ ID NO: 1082 - DNA, 21 bp, synthetic construct
  source 1..21: mol_type = other DNA
tatgcgaaaaatgggacgaat

SEQ ID NO: 1083 - DNA, 21 bp, synthetic construct
  source 1..21: mol_type = other DNA
ttgcacaaaaatacggagaat

SEQ ID NO: 1084 - DNA, 21 bp, synthetic construct
  source 1..21: mol_type = other DNA
ttcaggtcctccaatggggtg

SEQ ID NO: 1085 - DNA, 21 bp, synthetic construct
  source 1..21: mol_type = other DNA
aaaggggcggatcactcctgg

SEQ ID NO: 1086 - DNA, 21 bp, synthetic construct
  source 1..21: mol_type = other DNA
gtgaattccacgaatggggtg

SEQ ID NO: 1087 - DNA, 21 bp, synthetic construct
  source 1..21: mol_type = other DNA
gtaaactcaaccaacggcatc

SEQ ID NO: 1088 - DNA, 21 bp, synthetic construct
  source 1..21: mol_type = other DNA
aaccatgcctcacatgcctgg

SEQ ID NO: 1089 - DNA, 21 bp, synthetic construct
  source 1..21: mol_type = other DNA
ttggcgaaaatggggttgaat

SEQ ID NO: 1090 - DNA, 21 bp, synthetic construct
  source 1..21: mol_type = other DNA
tactcaaagtacaacatcaac

SEQ ID NO: 1091 - DNA, 21 bp, synthetic construct
  source 1..21: mol_type = other DNA
tatttcacgcaccagtccgag

SEQ ID NO: 1092 - DNA, 21 bp, synthetic construct
  source 1..21: mol_type = other DNA
tacgccaagaccggcaacaac

SEQ ID NO: 1093 - DNA, 21 bp, synthetic construct
  source 1..21: mol_type = other DNA
ttgatatccacgaatgggagg

SEQ ID NO: 1094 - DNA, 21 bp, synthetic construct
  source 1..21: mol_type = other DNA
tcacgctcatcaaacggcgta

SEQ ID NO: 1095 - DNA, 21 bp, synthetic construct
  source 1..21: mol_type = other DNA
ttggcgtccacgaatgggata

SEQ ID NO: 1096 - DNA, 21 bp, synthetic construct
  source 1..21: mol_type = other DNA
gcggggtccacgaatggggtg

SEQ ID NO: 1097 - DNA, 21 bp, synthetic construct
  source 1..21: mol_type = other DNA
aggacgtcctccaatgggcag

SEQ ID NO: 1098 - DNA, 21 bp, synthetic construct
  source 1..21: mol_type = other DNA
gaacgctcaaccaacggcatc

SEQ ID NO: 1099 - DNA, 21 bp, synthetic construct
  source 1..21: mol_type = other DNA
ccggggtccacgaatggggtg

SEQ ID NO: 1100 - DNA, 21 bp, synthetic construct
  source 1..21: mol_type = other DNA
ttggcgaggaatggggagaat

SEQ ID NO: 1101 - DNA, 21 bp, synthetic construct
  source 1..21: mol_type = other DNA
tcacaatcaaccaacggcatc

SEQ ID NO: 1102 - DNA, 21 bp, synthetic construct
  source 1..21: mol_type = other DNA
tatgcgaaaatggggcagaat

SEQ ID NO: 1103 - DNA, 21 bp, synthetic construct
  source 1..21: mol_type = other DNA
aagtttccctcacatgactgg

SEQ ID NO: 1104 - DNA, 21 bp, synthetic construct
  source 1..21: mol_type = other DNA
gtagaatcaaccaacggcatc

SEQ ID NO: 1105 - DNA, 21 bp, synthetic construct
  source 1..21: mol_type = other DNA
ctgtcaaagatgaacatcaac

SEQ ID NO: 1106 - DNA, 21 bp, synthetic construct
  source 1..21: mol_type = other DNA
aggaatgagggggtggcgtgg

SEQ ID NO: 1107 - DNA, 21 bp, synthetic construct
  source 1..21: mol_type = other DNA
tatgcgaaagggggggtgaat

SEQ ID NO: 1108 - DNA, 21 bp, synthetic construct
  source 1..21: mol_type = other DNA
tactcaaagatgggcggcaac

SEQ ID NO: 1109 - DNA, 21 bp, synthetic construct
  source 1..21: mol_type = other DNA
ttcatatcctccaatggggtg

SEQ ID NO: 1110 - DNA, 21 bp, synthetic construct
  source 1..21: mol_type = other DNA
tactcaaagggcaaccccaac

SEQ ID NO: 1111 - DNA, 21 bp, synthetic construct
  source 1..21: mol_type = other DNA
gcgttgtccacgaatgggagg

SEQ ID NO: 1112 - DNA, 21 bp, synthetic construct
  source 1..21: mol_type = other DNA
aaagagtcctcctatgcgtgg

SEQ ID NO: 1113 - DNA, 21 bp, synthetic construct
  source 1..21: mol_type = other DNA
acggggtccacgaatggggtg

SEQ ID NO: 1114 - DNA, 21 bp, synthetic construct
  source 1..21: mol_type = other DNA
ttgtccaaaacgggggcgaat

SEQ ID NO: 1115 - DNA, 21 bp, synthetic construct
  source 1..21: mol_type = other DNA
agggagtcctccaatgggtat

SEQ ID NO: 1116 - DNA, 21 bp, synthetic construct
  source 1..21: mol_type = other DNA
ttggcgaaaggggggtccaat

SEQ ID NO: 1117 - DNA, 21 bp, synthetic construct
  source 1..21: mol_type = other DNA
gggacggggaaacagcagtgg

SEQ ID NO: 1118 - DNA, 21 bp, synthetic construct
  source 1..21: mol_type = other DNA
tcctcctccacgaatggggtg

SEQ ID NO: 1119 - DNA, 21 bp, synthetic construct
  source 1..21: mol_type = other DNA
agggattccacgaatgggata

SEQ ID NO: 1120 - DNA, 21 bp, synthetic construct
  source 1..21: mol_type = other DNA
ttgaaagatgggacggcgtcc

SEQ ID NO: 1121 - DNA, 21 bp, synthetic construct
  source 1..21: mol_type = other DNA
atggattccacgaatgggagg

SEQ ID NO: 1122 - DNA, 21 bp, synthetic construct
  source 1..21: mol_type = other DNA
catgcctcaaccaacggcgta

SEQ ID NO: 1123 - DNA, 21 bp, synthetic construct
  source 1..21: mol_type = other DNA
caatgggacggctcaccctca

SEQ ID NO: 1124 - DNA, 21 bp, synthetic construct
  source 1..21: mol_type = other DNA
atggggtccacgaatggggtg

SEQ ID NO: 1125 - DNA, 21 bp, synthetic construct
  source 1..21: mol_type = other DNA
aatgattccacgaatgggagg

SEQ ID NO: 1126 - DNA, 21 bp, synthetic construct
  source 1..21: mol_type = other DNA
acgccggagccggtgaggtgg

SEQ ID NO: 1127 - DNA, 21 bp, synthetic construct
  source 1..21: mol_type = other DNA
acgacgtcctccaatggggtg

SEQ ID NO: 1128 - DNA, 21 bp, synthetic construct
  source 1..21: mol_type = other DNA
aatttctccacgaatggggtg

SEQ ID NO: 1129 - DNA, 21 bp, synthetic construct
  source 1..21: mol_type = other DNA
ctggcccgcaacggcggcaac

SEQ ID NO: 1130 - DNA, 21 bp, synthetic construct
  source 1..21: mol_type = other DNA
acggggtcctccaatggggtg

SEQ ID NO: 1131 - DNA, 21 bp, synthetic construct
  source 1..21: mol_type = other DNA
tacgccaagcccggccataac

SEQ ID NO: 1132 - DNA, 21 bp, synthetic construct
  source 1..21: mol_type = other DNA
tatgcgaaacacggggcgaat

SEQ ID NO: 1133 - DNA, 21 bp, synthetic construct
  source 1..21: mol_type = other DNA
gcccgctcatcaaacggcgta

SEQ ID NO: 1134 - DNA, 21 bp, synthetic construct
  source 1..21: mol_type = other DNA
tactcaaagaccaactacaac

SEQ ID NO: 1135 - DNA, 21 bp, synthetic construct
  source 1..21: mol_type = other DNA
tcctcctccacgaatgggttg

SEQ ID NO: 1136 - DNA, 21 bp, synthetic construct
  source 1..21: mol_type = other DNA
tttcaatcaaccaacggcatc

SEQ ID NO: 1137 - DNA, 21 bp, synthetic construct
  source 1..21: mol_type = other DNA
atagggtccacgaatggggtg

SEQ ID NO: 1138 - DNA, 21 bp, synthetic construct
  source 1..21: mol_type = other DNA
aatgagtccacgaatgggagg

SEQ ID NO: 1139 - DNA, 21 bp, synthetic construct
  source 1..21: mol_type = other DNA
ccgttgtccacgaatgggagg

SEQ ID NO: 1140 - DNA, 21 bp, synthetic construct
  source 1..21: mol_type = other DNA
tactcaaagggcaactcaaac

SEQ ID NO: 1141 - DNA, 21 bp, synthetic construct
  source 1..21: mol_type = other DNA
ttgtccaaagcgggggagaat

SEQ ID NO: 1142 - DNA, 21 bp, synthetic construct
  source 1..21: mol_type = other DNA
aaaaaagatgggacgaatgcg

SEQ ID NO: 1143 - DNA, 21 bp, synthetic construct
  source 1..21: mol_type = other DNA
tactcacgctcaggcgaaaac

SEQ ID NO: 1144 - DNA, 21 bp, synthetic construct
  source 1..21: mol_type = other DNA
tatgcgaggtataatccgaat

SEQ ID NO: 1145 - DNA, 21 bp, synthetic construct
  source 1..21: mol_type = other DNA
gtgaatgagacgaatggggtg

SEQ ID NO: 1146 - DNA, 21 bp, synthetic construct
  source 1..21: mol_type = other DNA
acgatgtccacgaatgggata

SEQ ID NO: 1147 - DNA, 21 bp, synthetic construct
  source 1..21: mol_type = other DNA
agggattccacgaatggggtg

SEQ ID NO: 1148 - DNA, 21 bp, synthetic construct
  source 1..21: mol_type = other DNA
tattattccacgaatgggata

SEQ ID NO: 1149 - DNA, 21 bp, synthetic construct
  source 1..21: mol_type = other DNA
gtacattcatcaaacggcgta

SEQ ID NO: 1150 - DNA, 21 bp, synthetic construct
  source 1..21: mol_type = other DNA
tactcaaagatgggcgccaac

SEQ ID NO: 1151 - DNA, 21 bp, synthetic construct
  source 1..21: mol_type = other DNA
ttgtccaaatccaatgtgaat

SEQ ID NO: 1152 - DNA, 21 bp, synthetic construct
  source 1..21: mol_type = other DNA
tacaacaacggctcacgctac

SEQ ID NO: 1153 - DNA, 21 bp, synthetic construct
  source 1..21: mol_type = other DNA
tggatatccacgaatggggtg

SEQ ID NO: 1154 - DNA, 21 bp, synthetic construct
  source 1..21: mol_type = other DNA
cacgggtccacgaatgggata

SEQ ID NO: 1155 - DNA, 21 bp, synthetic construct
  source 1..21: mol_type = other DNA
tacgcccgcggcggcggcaac

SEQ ID NO: 1156 - DNA, 21 bp, synthetic construct
  source 1..21: mol_type = other DNA
ttggattccacgaatgggata

SEQ ID NO: 1157 - DNA, 21 bp, synthetic construct
  source 1..21: mol_type = other DNA
tattccagggaggggccgaat

SEQ ID NO: 1158 - DNA, 21 bp, synthetic construct
  source 1..21: mol_type = other DNA
ctgtcaaagatgaactacaac

SEQ ID NO: 1159 - DNA, 21 bp, synthetic construct
  source 1..21: mol_type = other DNA
tactcacgctcaaacgaaaac

SEQ ID NO: 1160 - DNA, 21 bp, synthetic construct
  source 1..21: mol_type = other DNA
tatgcgaggccggggttgaat

SEQ ID NO: 1161 - DNA, 21 bp, synthetic construct
  source 1..21: mol_type = other DNA
ctggccaaggccggcaacaac

SEQ ID NO: 1162 - DNA, 21 bp, synthetic construct
  source 1..21: mol_type = other DNA
tccgattccacgaatgggagg

SEQ ID NO: 1163 - DNA, 21 bp, synthetic construct
  source 1..21: mol_type = other DNA
tactcaaagaccaactttaac

SEQ ID NO: 1164 - DNA, 21 bp, synthetic construct
  source 1..21: mol_type = other DNA
ttggcgagggcggggacgaat

SEQ ID NO: 1165 - DNA, 21 bp, synthetic construct
  source 1..21: mol_type = other DNA
aggtatgatgggtcctccgcg

SEQ ID NO: 1166 - DNA, 21 bp, synthetic construct
  source 1..21: mol_type = other DNA
acgaattcctccaatggggtg

SEQ ID NO: 1167 - DNA, 21 bp, synthetic construct
  source 1..21: mol_type = other DNA
cagaattccacgaatgggata

SEQ ID NO: 1168 - DNA, 21 bp, synthetic construct
  source 1..21: mol_type = other DNA
tactcaaagaacggcatcaac

SEQ ID NO: 1169 - DNA, 21 bp, synthetic construct
  source 1..21: mol_type = other DNA
ttcacgtccacgaatgggata

SEQ ID NO: 1170 - DNA, 21 bp, synthetic construct
  source 1..21: mol_type = other DNA
accgccgacaactacaccgta

SEQ ID NO: 1171 - DNA, 21 bp, synthetic construct
  source 1..21: mol_type = other DNA
tccatatccacgaatggggtg

SEQ ID NO: 1172 - DNA, 21 bp, synthetic construct
  source 1..21: mol_type = other DNA
gggaataatgggaatgtgtgg

SEQ ID NO: 1173 - DNA, 21 bp, synthetic construct
  source 1..21: mol_type = other DNA
tccttgtccacgaatggggtg

SEQ ID NO: 1174 - DNA, 21 bp, synthetic construct
  source 1..21: mol_type = other DNA
tattccaaatccgggtgtaat

SEQ ID NO: 1175 - DNA, 21 bp, synthetic construct
  source 1..21: mol_type = other DNA
gagtcctccacgaatgggata

SEQ ID NO: 1176 - DNA, 21 bp, synthetic construct
  source 1..21: mol_type = other DNA
ctgtcaaagggcaacatcaac

SEQ ID NO: 1177 - DNA, 21 bp, synthetic construct
  source 1..21: mol_type = other DNA
acctggtcaaccaacggcatc

SEQ ID NO: 1178 - DNA, 21 bp, synthetic construct
  source 1..21: mol_type = other DNA
cagaattccacgaatggggtg

SEQ ID NO: 1179 - DNA, 21 bp, synthetic construct
  source 1..21: mol_type = other DNA
gaaaactcaaccaacggcaag

SEQ ID NO: 1180 - DNA, 21 bp, synthetic construct
  source 1..21: mol_type = other DNA
ttggtgtccacgaatgggata

SEQ ID NO: 1181 - DNA, 21 bp, synthetic construct
  source 1..21: mol_type = other DNA
ttctattccacgaatggggtg

SEQ ID NO: 1182 - DNA, 21 bp, synthetic construct
  source 1..21: mol_type = other DNA
atgaactcaaccaacggcatc

SEQ ID NO: 1183 - DNA, 21 bp, synthetic construct
  source 1..21: mol_type = other DNA
ccggattccacgaatgggagg

SEQ ID NO: 1184 - DNA, 21 bp, synthetic construct
  source 1..21: mol_type = other DNA
tatgcgaaagcggggtgtaat

SEQ ID NO: 1185 - DNA, 21 bp, synthetic construct
  source 1..21: mol_type = other DNA
tattccaaacagaatcagaat

SEQ ID NO: 1186 - DNA, 21 bp, synthetic construct
  source 1..21: mol_type = other DNA
ttgaggtcctccaatggggtg

SEQ ID NO: 1187 - DNA, 21 bp, synthetic construct
  source 1..21: mol_type = other DNA
tattccaaagtgaatgataat

SEQ ID NO: 1188 - DNA, 21 bp, synthetic construct
  source 1..21: mol_type = other DNA
agggatgggaattccacgtat

SEQ ID NO: 1189 - DNA, 21 bp, synthetic construct
  source 1..21: mol_type = other DNA
tcatcaggctcatcatcatgg

SEQ ID NO: 1190 - DNA, 21 bp, synthetic construct
  source 1..21: mol_type = other DNA
atggaatcaaccaacggcatc

SEQ ID NO: 1191 - DNA, 21 bp, synthetic construct
  source 1..21: mol_type = other DNA
tactcacgccaaggcgacaac

SEQ ID NO: 1192 - DNA, 21 bp, synthetic construct
  source 1..21: mol_type = other DNA
tatgcgaggacgaatgagaat

SEQ ID NO: 1193 - DNA, 21 bp, synthetic construct
  source 1..21: mol_type = other DNA
acggcgtccacgaatggggtg

SEQ ID NO: 1194 - DNA, 21 bp, synthetic construct
  source 1..21: mol_type = other DNA
atcctgtcaaccaacggcgta

SEQ ID NO: 1195 - DNA, 21 bp, synthetic construct
  source 1..21: mol_type = other DNA
ttgtccaggttgggggagaat

SEQ ID NO: 1196 - DNA, 21 bp, synthetic construct
  source 1..21: mol_type = other DNA
ttggcgtccacgaatggggtg

SEQ ID NO: 1197 - DNA, 21 bp, synthetic construct
  source 1..21: mol_type = other DNA
tattccaaagtgggggagaat

SEQ ID NO: 1198 - DNA, 21 bp, synthetic construct
  source 1..21: mol_type = other DNA
tacgcccgctcaaaccaaaac

SEQ ID NO: 1199 - DNA, 21 bp, synthetic construct
  source 1..21: mol_type = other DNA
aaccaatcaaccaacggccgc

SEQ ID NO: 1200 - DNA, 21 bp, synthetic construct
  source 1..21: mol_type = other DNA
tacgcccgcggcggcgaaaac

SEQ ID NO: 1201 - DNA, 21 bp, synthetic construct
  source 1..21: mol_type = other DNA
tactcaaagcataacctgaac

SEQ ID NO: 1202 - DNA, 21 bp, synthetic construct
  source 1..21: mol_type = other DNA
cataagtcatcaaacggcgta

SEQ ID NO: 1203 - DNA, 21 bp, synthetic construct
  source 1..21: mol_type = other DNA
ctggccaagatgggcatcaac

SEQ ID NO: 1204 - DNA, 21 bp, synthetic construct
  source 1..21: mol_type = other DNA
gggcaggggaattccgcgtgg

SEQ ID NO: 1205 - DNA, 21 bp, synthetic construct
  source 1..21: mol_type = other DNA
tatgcgaaagatgggccgaat

SEQ ID NO: 1206 - DNA, 21 bp, synthetic construct
  source 1..21: mol_type = other DNA
aacaagtacggctcagacgta

SEQ ID NO: 1207 - DNA, 21 bp, synthetic construct
  source 1..21: mol_type = other DNA
tatgcgagggggaatgagaat

SEQ ID NO: 1208 - DNA, 21 bp, synthetic construct
  source 1..21: mol_type = other DNA
gggcagtccacgaatgggagg

SEQ ID NO: 1209 - DNA, 21 bp, synthetic construct
  source 1..21: mol_type = other DNA
cacttctccacgaatggggtg

SEQ ID NO: 1210 - DNA, 21 bp, synthetic construct
  source 1..21: mol_type = other DNA
aatgcgtccacgaatggggtg

SEQ ID NO: 1211 - DNA, 21 bp, synthetic construct
  source 1..21: mol_type = other DNA
tcagcctcaaccaacggccgc

SEQ ID NO: 1212 - DNA, 21 bp, synthetic construct
  source 1..21: mol_type = other DNA
agggagaataatgtgacgtgg

SEQ ID NO: 1213 - DNA, 21 bp, synthetic construct
  source 1..21: mol_type = other DNA
cagcactccacgaatgggata

SEQ ID NO: 1214 - DNA, 21 bp, synthetic construct
  source 1..21: mol_type = other DNA
ctgtcaaagatcggccccaac

SEQ ID NO: 1215 - DNA, 21 bp, synthetic construct
  source 1..21: mol_type = other DNA
ccgatgtccacgaatggggtg

SEQ ID NO: 1216 - DNA, 21 bp, synthetic construct
  source 1..21: mol_type = other DNA
ttgtccagggcgaatgagaat

SEQ ID NO: 1217 - DNA, 21 bp, synthetic construct
  source 1..21: mol_type = other DNA
tattccaaaataaatgataat

SEQ ID NO: 1218 - DNA, 21 bp, synthetic construct
  source 1..21: mol_type = other DNA
ttggcgaaaaatggggcgaat

SEQ ID NO: 1219 - DNA, 21 bp, synthetic construct
  source 1..21: mol_type = other DNA
tattccaaaaatggggcgaat

SEQ ID NO: 1220 - DNA, 21 bp, synthetic construct
  source 1..21: mol_type = other DNA
gcgtattccacgaatggggtg

SEQ ID NO: 1221 - DNA, 21 bp, synthetic construct
  source 1..21: mol_type = other DNA
tactcaaagcaaaacaacaac

SEQ ID NO: 1222 - DNA, 21 bp, synthetic construct
  source 1..21: mol_type = other DNA
tataattccacgaatgggata

SEQ ID NO: 1223 - DNA, 21 bp, synthetic construct
  source 1..21: mol_type = other DNA
ttggcgaaagcggggcagaat

SEQ ID NO: 1224 - DNA, 21 bp, synthetic construct
  source 1..21: mol_type = other DNA
ttgtccaaagagaattataat

SEQ ID NO: 1225 - DNA, 21 bp, synthetic construct
  source 1..21: mol_type = other DNA
acctcatcaaccaacggcatc

SEQ ID NO: 1226 - DNA, 21 bp, synthetic construct
  source 1..21: mol_type = other DNA
ttctccaaaatacagacggag

SEQ ID NO: 1227 - DNA, 21 bp, synthetic construct
  source 1..21: mol_type = other DNA
gaggattccacgaatgggagg

SEQ ID NO: 1228 - DNA, 21 bp, synthetic construct
  source 1..21: mol_type = other DNA
tccaattccacgaatggggtg

SEQ ID NO: 1229 - DNA, 21 bp, synthetic construct
  source 1..21: mol_type = other DNA
agggattccaatgtgtatccg

SEQ ID NO: 1230 - DNA, 21 bp, synthetic construct
  source 1..21: mol_type = other DNA
aggccggatgggacgccgtcc

SEQ ID NO: 1231 - DNA, 21 bp, synthetic construct
  source 1..21: mol_type = other DNA
tatgcgaaacagaatccgaat

SEQ ID NO: 1232 - DNA, 21 bp, synthetic construct
  source 1..21: mol_type = other DNA
ttggcgaaaggggggacgaat

SEQ ID NO: 1233 - DNA, 21 bp, synthetic construct
  source 1..21: mol_type = other DNA
ctgtcaaagaacaactacaac

SEQ ID NO: 1234 - DNA, 21 bp, synthetic construct
  source 1..21: mol_type = other DNA
ttcaattccacgaatggggtg

SEQ ID NO: 1235 - DNA, 21 bp, synthetic construct
  source 1..21: mol_type = other DNA
aacaactcaaccaacggcgta

SEQ ID NO: 1236 - DNA, 21 bp, synthetic construct
  source 1..21: mol_type = other DNA
gggtcctccacgaatggggtg

SEQ ID NO: 1237 - DNA, 21 bp, synthetic construct
  source 1..21: mol_type = other DNA
gaggagtccacgaatgggagg

SEQ ID NO: 1238 - DNA, 21 bp, synthetic construct
  source 1..21: mol_type = other DNA
tactcaaagaacggcaacaac

SEQ ID NO: 1239 - DNA, 21 bp, synthetic construct
  source 1..21: mol_type = other DNA
gtgacgtccacgaatggggtg

SEQ ID NO: 1240 - DNA, 21 bp, synthetic construct
  source 1..21: mol_type = other DNA
ttggcgaaaaatgggacgaat

SEQ ID NO: 1241 - DNA, 21 bp, synthetic construct
  source 1..21: mol_type = other DNA
ttgtattccacgaatggggtg

SEQ ID NO: 1242 - DNA, 21 bp, synthetic construct
  source 1..21: mol_type = other DNA
aattataggggggataatgcg

SEQ ID NO: 1243 - DNA, 21 bp, synthetic construct
  source 1..21: mol_type = other DNA
atctcatacgactacggcaac

SEQ ID NO: 1244 - DNA, 21 bp, synthetic construct
  source 1..21: mol_type = other DNA
ttggcgaaaaatggggtgaat

SEQ ID NO: 1245 - DNA, 21 bp, synthetic construct
  source 1..21: mol_type = other DNA
ttgcacgcgtcctccatgaat

SEQ ID NO: 1246 - DNA, 21 bp, synthetic construct
  source 1..21: mol_type = other DNA
cagatatccacgaatggggtg

SEQ ID NO: 1247 - DNA, 21 bp, synthetic construct
  source 1..21: mol_type = other DNA
gtgcacaaacagttgccgaat

SEQ ID NO: 1248 - DNA, 21 bp, synthetic construct
  source 1..21: mol_type = other DNA
tatgagtccataaatgggagg

SEQ ID NO: 1249 - DNA, 21 bp, synthetic construct
  source 1..21: mol_type = other DNA
ggcatgaagaacaagtttgac

SEQ ID NO: 1250 - DNA, 21 bp, synthetic construct
  source 1..21: mol_type = other DNA
aatcagtccacgaatggggtg

SEQ ID NO: 1251 - DNA, 21 bp, synthetic construct
  source 1..21: mol_type = other DNA
caggattccacgaatgggagg

SEQ ID NO: 1252 - DNA, 21 bp, synthetic construct
  source 1..21: mol_type = other DNA
ttttcacgccaaggcaacaac

SEQ ID NO: 1253 - DNA, 21 bp, synthetic construct
  source 1..21: mol_type = other DNA
ttggcgaaacagggggcgaat

SEQ ID NO: 1254 - DNA, 21 bp, synthetic construct
  source 1..21: mol_type = other DNA
tttcaatcaaccaacggcgta

SEQ ID NO: 1255 - DNA, 21 bp, synthetic construct
  source 1..21: mol_type = other DNA
gtggattccacgaatggggtg

SEQ ID NO: 1256 - DNA, 21 bp, synthetic construct
  source 1..21: mol_type = other DNA
ctggccaagcaaggcaacaac

SEQ ID NO: 1257 - DNA, 21 bp, synthetic construct
  source 1..21: mol_type = other DNA
aaggacggcgtatcagtatgg

SEQ ID NO: 1258 - DNA, 21 bp, synthetic construct
  source 1..21: mol_type = other DNA
ggcgaatcaaccaacggccgc

SEQ ID NO: 1259 - DNA, 21 bp, synthetic construct
  source 1..21: mol_type = other DNA
tgggtgtccacgaatggggtg

SEQ ID NO: 1260 - DNA, 21 bp, synthetic construct
  source 1..21: mol_type = other DNA
ttgtccaaatccgggcagaat

SEQ ID NO: 1261 - DNA, 21 bp, synthetic construct
  source 1..21: mol_type = other DNA
acggggggggagtccaggtgg

SEQ ID NO: 1262 - DNA, 21 bp, synthetic construct
  source 1..21: mol_type = other DNA
ttcgcgaggtccggggagaat

SEQ ID NO: 1263 - DNA, 21 bp, synthetic construct
  source 1..21: mol_type = other DNA
cgcctgtcaaccaacggcgta

SEQ ID NO: 1264 - DNA, 21 bp, synthetic construct
  source 1..21: mol_type = other DNA
acgtggtcctccaatggggtg

SEQ ID NO: 1265 - DNA, 21 bp, synthetic construct
  source 1..21: mol_type = other DNA
atgaactcaaccaacggcgta

SEQ ID NO: 1266 - DNA, 21 bp, synthetic construct
  source 1..21: mol_type = other DNA
aagacctcacgcgaaggcgta

SEQ ID NO: 1267 - DNA, 21 bp, synthetic construct
  source 1..21: mol_type = other DNA
atgttctccacgaatggggtg

SEQ ID NO: 1268 - DNA, 21 bp, synthetic construct
  source 1..21: mol_type = other DNA
ttggcgaaaccggggccgaat

SEQ ID NO: 1269 - DNA, 21 bp, synthetic construct
  source 1..21: mol_type = other DNA
tactcaaagctgcaagacaac

SEQ ID NO: 1270 - DNA, 21 bp, synthetic construct
  source 1..21: mol_type = other DNA
gacctggactcaaccaagtgg

SEQ ID NO: 1271 - DNA, 21 bp, synthetic construct
  source 1..21: mol_type = other DNA
catgaatcatcaaacggcgta

SEQ ID NO: 1272 - DNA, 21 bp, synthetic construct
  source 1..21: mol_type = other DNA
tccgggtcctccaatgggagg

SEQ ID NO: 1273 - DNA, 21 bp, synthetic construct
  source 1..21: mol_type = other DNA
tatgcgaaaacgggggagaat

SEQ ID NO: 1274 - DNA, 21 bp, synthetic construct
  source 1..21: mol_type = other DNA
tatgcgaaacaggggacgaat

SEQ ID NO: 1275 - DNA, 21 bp, synthetic construct
  source 1..21: mol_type = other DNA
tatacgaggtccgatacgtcc

SEQ ID NO: 1276 - DNA, 21 bp, synthetic construct
  source 1..21: mol_type = other DNA
ctgtcaaaggccggcatcaac

SEQ ID NO: 1277 - DNA, 21 bp, synthetic construct
  source 1..21: mol_type = other DNA
ccgcactccacgaatgggata

SEQ ID NO: 1278 - DNA, 21 bp, synthetic construct
  source 1..21: mol_type = other DNA
atctcatcaaccaacggcatc

SEQ ID NO: 1279 - DNA, 21 bp, synthetic construct
  source 1..21: mol_type = other DNA
aaacagtccgatttgacgtgg

SEQ ID NO: 1280 - DNA, 21 bp, synthetic construct
  source 1..21: mol_type = other DNA
ctgtcaaagcaaggcatcaac

SEQ ID NO: 1281 - DNA, 21 bp, synthetic construct
  source 1..21: mol_type = other DNA
ttggagtcctccaatggggtg

SEQ ID NO: 1282 - DNA, 21 bp, synthetic construct
  source 1..21: mol_type = other DNA
cattggtcatcaaacggcgta

SEQ ID NO: 1283 - DNA, 21 bp, synthetic construct
  source 1..21: mol_type = other DNA
agggagggggcggggtcctgg

SEQ ID NO: 1284 - DNA, 21 bp, synthetic construct
  source 1..21: mol_type = other DNA
aggttggattccaatgggtgg

SEQ ID NO: 1285 - DNA, 21 bp, synthetic construct
  source 1..21: mol_type = other DNA
tatgcgaggccggggacgaat

SEQ ID NO: 1286 - DNA, 21 bp, synthetic construct
  source 1..21: mol_type = other DNA
aactacaacaacgtatactca

SEQ ID NO: 1287 - DNA, 21 bp, synthetic construct
  source 1..21: mol_type = other DNA
ctgtcaaaggtaggcggcaac

SEQ ID NO: 1288 - DNA, 21 bp, synthetic construct
  source 1..21: mol_type = other DNA
cactcctccacgaatggggtg

SEQ ID NO: 1289 - DNA, 21 bp, synthetic construct
  source 1..21: mol_type = other DNA
ttgtccaaaatgaatacgaat

SEQ ID NO: 1290 - DNA, 21 bp, synthetic construct
  source 1..21: mol_type = other DNA
ttgtccaaatccgggacgaat

SEQ ID NO: 1291 - DNA, 21 bp, synthetic construct
  source 1..21: mol_type = other DNA
acgatatcctccaatggggtg

SEQ ID NO: 1292 - DNA, 21 bp, synthetic construct
  source 1..21: mol_type = other DNA
cccgtatcaaccaacggcgta

SEQ ID NO: 1293 - DNA, 21 bp, synthetic construct
  source 1..21: mol_type = other DNA
tactcaaagatgggcgaaaac

SEQ ID NO: 1294 - DNA, 21 bp, synthetic construct
  source 1..21: mol_type = other DNA
aggggggagaatcacgcgtgg

SEQ ID NO: 1295 - DNA, 21 bp, synthetic construct
  source 1..21: mol_type = other DNA
aattcctccacgaatggggtg

SEQ ID NO: 1296 - DNA, 21 bp, synthetic construct
  source 1..21: mol_type = other DNA
gtggattccagggaggggagg

SEQ ID NO: 1297 - DNA, 21 bp, synthetic construct
  source 1..21: mol_type = other DNA
ttctccagggcgaatgagaat

SEQ ID NO: 1298 - DNA, 21 bp, synthetic construct
  source 1..21: mol_type = other DNA
caaggctcaggcctgtttatc

SEQ ID NO: 1299 - DNA, 21 bp, synthetic construct
  source 1..21: mol_type = other DNA
ctgtcaaagtcagccaacaac

SEQ ID NO: 1300 - DNA, 21 bp, synthetic construct
  source 1..21: mol_type = other DNA
tggacctcatcaaacggcgta

SEQ ID NO: 1301 - DNA, 21 bp, synthetic construct
  source 1..21: mol_type = other DNA
ttgcactcctccaatggggtg

SEQ ID NO: 1302 - DNA, 21 bp, synthetic construct
  source 1..21: mol_type = other DNA
tattccaaagtgaatgagaat

SEQ ID NO: 1303 - DNA, 21 bp, synthetic construct
  source 1..21: mol_type = other DNA
acgatgtcctccaatggggtg

SEQ ID NO: 1304 - DNA, 21 bp, synthetic construct
  source 1..21: mol_type = other DNA
catgactcaaccaacggccgc

SEQ ID NO: 1305 - DNA, 21 bp, synthetic construct
  source 1..21: mol_type = other DNA
ttggcgaaacaggggcagaat

SEQ ID NO: 1306 - DNA, 21 bp, synthetic construct
  source 1..21: mol_type = other DNA
gagaaatccacgaatggggtg

SEQ ID NO: 1307 - DNA, 21 bp, synthetic construct
  source 1..21: mol_type = other DNA
ttgtccaggatgggggagaat

SEQ ID NO: 1308 - DNA, 21 bp, synthetic construct
  source 1..21: mol_type = other DNA
ttcgcgaaaatggggccgaat

SEQ ID NO: 1309 - DNA, 21 bp, synthetic construct
  source 1..21: mol_type = other DNA
ccgtattccacgaatggggtg

SEQ ID NO: 1310 - DNA, 21 bp, synthetic construct
  source 1..21: mol_type = other DNA
tggcattcatcaaacggcgta

SEQ ID NO: 1311 - DNA, 21 bp, synthetic construct
  source 1..21: mol_type = other DNA
aatgagtccacgaatgggata

SEQ ID NO: 1312 - DNA, 21 bp, synthetic construct
  source 1..21: mol_type = other DNA
tcaaacgcctcatcaaactgg

SEQ ID NO: 1313 - DNA, 21 bp, synthetic construct
  source 1..21: mol_type = other DNA
tactcaaagtcaaacatgaac

SEQ ID NO: 1314 - DNA, 21 bp, synthetic construct
  source 1..21: mol_type = other DNA
ttgcacaaaaatttgccggat

SEQ ID NO: 1315 - DNA, 21 bp, synthetic construct
  source 1..21: mol_type = other DNA
gcgcagtcctccaatggggtg

SEQ ID NO: 1316 - DNA, 21 bp, synthetic construct
  source 1..21: mol_type = other DNA
aaccattcaggccgctcagcc

SEQ ID NO: 1317 - DNA, 21 bp, synthetic construct
  source 1..21: mol_type = other DNA
ttttcaaagtttaaccccaac

SEQ ID NO: 1318 - DNA, 21 bp, synthetic construct
  source 1..21: mol_type = other DNA
aatacgtccacgaatgggata

SEQ ID NO: 1319 - DNA, 21 bp, synthetic construct
  source 1..21: mol_type = other DNA
aggcaggatcacgtgatgtat

SEQ ID NO: 1320 - DNA, 21 bp, synthetic construct
  source 1..21: mol_type = other DNA
aacaccggcaactcacattgg

SEQ ID NO: 1321 - DNA, 21 bp, synthetic construct
  source 1..21: mol_type = other DNA
ccgtgggagggggggccgagg

SEQ ID NO: 1322 - DNA, 21 bp, synthetic construct
  source 1..21: mol_type = other DNA
atacagtcctccaatggggtg

SEQ ID NO: 1323 - DNA, 21 bp, synthetic construct
  source 1..21: mol_type = other DNA
ttgtccaggcacaatgagaat

SEQ ID NO: 1324 - DNA, 21 bp, synthetic construct
  source 1..21: mol_type = other DNA
atgtcagacaacaagcattgg

SEQ ID NO: 1325 - DNA, 21 bp, synthetic construct
  source 1..21: mol_type = other DNA
ctgtcaaagtcaaacatcaac

SEQ ID NO: 1326 - DNA, 21 bp, synthetic construct
  source 1..21: mol_type = other DNA
tactcacgccaaggcgaaaac

SEQ ID NO: 1327 - DNA, 21 bp, synthetic construct
  source 1..21: mol_type = other DNA
tacgcccgcctgaacatcaac

SEQ ID NO: 1328 - DNA, 21 bp, synthetic construct
  source 1..21: mol_type = other DNA
atagatgggaattccccgtat

SEQ ID NO: 1329 - DNA, 21 bp, synthetic construct
  source 1..21: mol_type = other DNA
atggattccacgaatggggtg

SEQ ID NO: 1330 - DNA, 21 bp, synthetic construct
  source 1..21: mol_type = other DNA
ttgtccaaatccgggtccaat

SEQ ID NO: 1331 - DNA, 21 bp, synthetic construct
  source 1..21: mol_type = other DNA
gcgtcctcctccaatggggtg

SEQ ID NO: 1332 - DNA, 21 bp, synthetic construct
  source 1..21: mol_type = other DNA
atgttgtccacgaatggggtg

SEQ ID NO: 1333 - DNA, 21 bp, synthetic construct
  source 1..21: mol_type = other DNA
ttctccaggacgaatgtgaat

SEQ ID NO: 1334 - DNA, 21 bp, synthetic construct
  source 1..21: mol_type = other DNA
ttggattccacgaatggggtg

SEQ ID NO: 1335 - DNA, 21 bp, synthetic construct
  source 1..21: mol_type = other DNA
tactcacgcatcaacatgaac

SEQ ID NO: 1336 - DNA, 21 bp, synthetic construct
  source 1..21: mol_type = other DNA
ttctccaggttgggggagaat

SEQ ID NO: 1337 - DNA, 21 bp, synthetic construct
  source 1..21: mol_type = other DNA
tactacaccggcatcaacgac

SEQ ID NO: 1338 - DNA, 21 bp, synthetic construct
  source 1..21: mol_type = other DNA
cactcctccacgaatgggata

SEQ ID NO: 1339 - DNA, 21 bp, synthetic construct
  source 1..21: mol_type = other DNA
atgacctcaaccaacggcatc

SEQ ID NO: 1340 - DNA, 21 bp, synthetic construct
  source 1..21: mol_type = other DNA
cccggctcaaccaacggccgc

SEQ ID NO: 1341 - DNA, 21 bp, synthetic construct
  source 1..21: mol_type = other DNA
tatgcgtcctccaatggggtg

SEQ ID NO: 1342 - DNA, 21 bp, synthetic construct
  source 1..21: mol_type = other DNA
atggtgtccacgaatgggata

SEQ ID NO: 1343 - DNA, 21 bp, synthetic construct
  source 1..21: mol_type = other DNA
ctggaatcaaccaacggcatc

SEQ ID NO: 1344 - DNA, 21 bp, synthetic construct
  source 1..21: mol_type = other DNA
atatcctcctccaatggggtg

SEQ ID NO: 1345 - DNA, 21 bp, synthetic construct
  source 1..21: mol_type = other DNA
tattccaaaaatggggtgaat

SEQ ID NO: 1346 - DNA, 21 bp, synthetic construct
  source 1..21: mol_type = other DNA
tggcagtcctccaatggggtg

SEQ ID NO: 1347 - DNA, 21 bp, synthetic construct
  source 1..21: mol_type = other DNA
ttttcaaagctgggcctgaac

SEQ ID NO: 1348 - DNA, 21 bp, synthetic construct
  source 1..21: mol_type = other DNA
aataaatccacgaatggggtg

SEQ ID NO: 1349 - DNA, 21 bp, synthetic construct
  source 1..21: mol_type = other DNA
tatttcacggggacgaataat

SEQ ID NO: 1350 - DNA, 21 bp, synthetic construct
  source 1..21: mol_type = other DNA
ccgaaatccacgaatgggata

SEQ ID NO: 1351 - DNA, 21 bp, synthetic construct
  source 1..21: mol_type = other DNA
tgggcgtccacgaatgggata

SEQ ID NO: 1352 - DNA, 21 bp, synthetic construct
  source 1..21: mol_type = other DNA
atgggggggtcctccaattgg

SEQ ID NO: 1353 - DNA, 21 bp, synthetic construct
  source 1..21: mol_type = other DNA
gcgacggattatatggcgtat

SEQ ID NO: 1354 - DNA, 21 bp, synthetic construct
  source 1..21: mol_type = other DNA
ttctccagggcgggggagaat

SEQ ID NO: 1355 - DNA, 21 bp, synthetic construct
  source 1..21: mol_type = other DNA
aggaatgatgggacgtcctgg

SEQ ID NO: 1356 - DNA, 21 bp, synthetic construct
  source 1..21: mol_type = other DNA
ttgtccaaaacggggcagaat

SEQ ID NO: 1357 - DNA, 21 bp, synthetic construct
  source 1..21: mol_type = other DNA
tatgcgaaacagaatcacaat

SEQ ID NO: 1358 - DNA, 21 bp, synthetic construct
  source 1..21: mol_type = other DNA
ttctattccacgaatgggata

SEQ ID NO: 1359 - DNA, 21 bp, synthetic construct
  source 1..21: mol_type = other DNA
tgggcgtcctccaatggggtg

SEQ ID NO: 1360 - DNA, 21 bp, synthetic construct
  source 1..21: mol_type = other DNA
acggtgtcctccaatggggtg

SEQ ID NO: 1361 - DNA, 21 bp, synthetic construct
  source 1..21: mol_type = other DNA
gtggattccacgaatgggata

SEQ ID NO: 1362 - DNA, 21 bp, synthetic construct
  source 1..21: mol_type = other DNA
ttggcgaaaatagggttcaat

SEQ ID NO: 1363 - DNA, 21 bp, synthetic construct
  source 1..21: mol_type = other DNA
aggtccggggagtccgcgtgg

SEQ ID NO: 1364 - DNA, 21 bp, synthetic construct
  source 1..21: mol_type = other DNA
atgaggacggggatggggccg

SEQ ID NO: 1365 - DNA, 21 bp, synthetic construct
  source 1..21: mol_type = other DNA
tttatgtcaaccaacggcatc

SEQ ID NO: 1366 - DNA, 21 bp, synthetic construct
  source 1..21: mol_type = other DNA
tatgcgaaagggaattccaat

SEQ ID NO: 1367 - DNA, 21 bp, synthetic construct
  source 1..21: mol_type = other DNA
cacgtgtcctccaatggggtg

SEQ ID NO: 1368 - DNA, 21 bp, synthetic construct
  source 1..21: mol_type = other DNA
aatttgaaagggacgggggcg

SEQ ID NO: 1369 - DNA, 21 bp, synthetic construct
  source 1..21: mol_type = other DNA
gggcacgcggggtccacgtgg

SEQ ID NO: 1370 - DNA, 21 bp, synthetic construct
  source 1..21: mol_type = other DNA
gtggcggggagggggtatgat

SEQ ID NO: 1371 - DNA, 21 bp, synthetic construct
  source 1..21: mol_type = other DNA
aatcactccacgaatgggata

SEQ ID NO: 1372 - DNA, 21 bp, synthetic construct
  source 1..21: mol_type = other DNA
tactcacgctacaacgaaaac

SEQ ID NO: 1373 - DNA, 21 bp, synthetic construct
  source 1..21: mol_type = other DNA
aatcagtccacgaatgggata

SEQ ID NO: 1374 - DNA, 21 bp, synthetic construct
  source 1..21: mol_type = other DNA
acgtccgattatgagtcctat

SEQ ID NO: 1375 - DNA, 21 bp, synthetic construct
  source 1..21: mol_type = other DNA
tactcaaagcaaggcggcaac

SEQ ID NO: 1376 - DNA, 21 bp, synthetic construct
  source 1..21: mol_type = other DNA
ttggcgaaatccgggtgtaat

SEQ ID NO: 1377 - DNA, 21 bp, synthetic construct
  source 1..21: mol_type = other DNA
cactcctccacgcacgggcag

SEQ ID NO: 1378 - DNA, 21 bp, synthetic construct
  source 1..21: mol_type = other DNA
tccttctcctccaatggggtg

SEQ ID NO: 1379 - DNA, 21 bp, synthetic construct
  source 1..21: mol_type = other DNA
tattatacggggacgacgatg

SEQ ID NO: 1380 - DNA, 21 bp, synthetic construct
  source 1..21: mol_type = other DNA
gcgttctccacgaatggggtg

SEQ ID NO: 1381 - DNA, 21 bp, synthetic construct
  source 1..21: mol_type = other DNA
atcatctcatcaaacggcgta

SEQ ID NO: 1382 - DNA, 21 bp, synthetic construct
  source 1..21: mol_type = other DNA
gtatcatcaaccaacggcgta

SEQ ID NO: 1383 - DNA, 21 bp, synthetic construct
  source 1..21: mol_type = other DNA
ttgtccaaaatgaatgcgaat

SEQ ID NO: 1384 - DNA, 21 bp, synthetic construct
  source 1..21: mol_type = other DNA
agggcgaatggggataatgcg

SEQ ID NO: 1385 - DNA, 21 bp, synthetic construct
  source 1..21: mol_type = other DNA
tactcaaagcatggctcaaac

SEQ ID NO: 1386 - DNA, 21 bp, synthetic construct
  source 1..21: mol_type = other DNA
ttgtccaaacacaatgataat

SEQ ID NO: 1387 - DNA, 21 bp, synthetic construct
  source 1..21: mol_type = other DNA
gcggatgggatatccacgtat

SEQ ID NO: 1388 - DNA, 21 bp, synthetic construct
  source 1..21: mol_type = other DNA
tattccaaaaatggggataat

SEQ ID NO: 1389 - DNA, 21 bp, synthetic construct
  source 1..21: mol_type = other DNA
tccacgtcctccaatggggtg

SEQ ID NO: 1390 - DNA, 21 bp, synthetic construct
  source 1..21: mol_type = other DNA
ctggccaagggcaactacaac

SEQ ID NO: 1391 - DNA, 21 bp, synthetic construct
  source 1..21: mol_type = other DNA
gtaaactcatcaaacggcgta

SEQ ID NO: 1392 - DNA, 21 bp, synthetic construct
  source 1..21: mol_type = other DNA
atctactcaaccaacggcgta

SEQ ID NO: 1393 - DNA, 21 bp, synthetic construct
  source 1..21: mol_type = other DNA
tattccgatttcaatgggagg

SEQ ID NO: 1394 - DNA, 21 bp, synthetic construct
  source 1..21: mol_type = other DNA
cacgattccacgaatgggata

SEQ ID NO: 1395 - DNA, 21 bp, synthetic construct
  source 1..21: mol_type = other DNA
tatgcgaaacacgggttgaat

SEQ ID NO: 1396 - DNA, 21 bp, synthetic construct
  source 1..21: mol_type = other DNA
tatgcgaaattgggggtgaat

SEQ ID NO: 1397 - DNA, 21 bp, synthetic construct
  source 1..21: mol_type = other DNA
aagaacgacggcaacccctgg

SEQ ID NO: 1398 - DNA, 21 bp, synthetic construct
  source 1..21: mol_type = other DNA
ctggccaagaacggccaaaac

SEQ ID NO: 1399 - DNA, 21 bp, synthetic construct
  source 1..21: mol_type = other DNA
gcccattcaaccaacggcatc

SEQ ID NO: 1400 - DNA, 21 bp, synthetic construct
  source 1..21: mol_type = other DNA
aatacggatgggtggagggat

SEQ ID NO: 1401 - DNA, 21 bp, synthetic construct
  source 1..21: mol_type = other DNA
agggatggggcgtccgtgtat

SEQ ID NO: 1402 - DNA, 21 bp, synthetic construct
  source 1..21: mol_type = other DNA
tggatctcatcaaacggcgta

SEQ ID NO: 1403 - DNA, 21 bp, synthetic construct
  source 1..21: mol_type = other DNA
agggattcctccaatggggtg

SEQ ID NO: 1404 - DNA, 21 bp, synthetic construct
  source 1..21: mol_type = other DNA
tacgccaagcccggcgtaaac

SEQ ID NO: 1405 - DNA, 21 bp, synthetic construct
  source 1..21: mol_type = other DNA
tcccagtcctccaatggggtg

SEQ ID NO: 1406 - DNA, 21 bp, synthetic construct
  source 1..21: mol_type = other DNA
gcgtggtccacgaatgggata

SEQ ID NO: 1407 - DNA, 21 bp, synthetic construct
  source 1..21: mol_type = other DNA
gccaactcaaccaacggcatc

SEQ ID NO: 1408 - DNA, 21 bp, synthetic construct
  source 1..21: mol_type = other DNA
ccgacgtccacgaatgggata

SEQ ID NO: 1409 - DNA, 21 bp, synthetic construct
  source 1..21: mol_type = other DNA
atctactcaaccaacggcatc

SEQ ID NO: 1410 - DNA, 21 bp, synthetic construct
  source 1..21: mol_type = other DNA
tttgaatcaaccaacggccgc

SEQ ID NO: 1411 - DNA, 21 bp, synthetic construct
  source 1..21: mol_type = other DNA
ttgatgtcctccaatggggtg

SEQ ID NO: 1412 - DNA, 21 bp, synthetic construct
  source 1..21: mol_type = other DNA
caaatgtcaaccaacggcatc

SEQ ID NO: 1413 - DNA, 21 bp, synthetic construct
  source 1..21: mol_type = other DNA
ttctccaaaatagggcagaat

SEQ ID NO: 1414 - DNA, 21 bp, synthetic construct
  source 1..21: mol_type = other DNA
tactcaaagaacggccaaaac

SEQ ID NO: 1415 - DNA, 21 bp, synthetic construct
  source 1..21: mol_type = other DNA
tactcaaagggcggcaacaac

SEQ ID NO: 1416 - DNA, 21 bp, synthetic construct
  source 1..21: mol_type = other DNA
acccattcaggctttggcccc

SEQ ID NO: 1417 - DNA, 21 bp, synthetic construct
  source 1..21: mol_type = other DNA
aatgcgtcccaggggtgggat

SEQ ID NO: 1418 - DNA, 21 bp, synthetic construct
  source 1..21: mol_type = other DNA
gcggggggggcgaatgtgtgg

SEQ ID NO: 1419 - DNA, 21 bp, synthetic construct
  source 1..21: mol_type = other DNA
tattccaaaataaatttcaat

SEQ ID NO: 1420 - DNA, 21 bp, synthetic construct
  source 1..21: mol_type = other DNA
gaatggtcaaccaacggcgta

SEQ ID NO: 1421 - DNA, 21 bp, synthetic construct
  source 1..21: mol_type = other DNA
aatgtgtccacgaatggggtg

SEQ ID NO: 1422 - DNA, 21 bp, synthetic construct
  source 1..21: mol_type = other DNA
tactcacgcaacggcgaaaac

SEQ ID NO: 1423 - DNA, 21 bp, synthetic construct
  source 1..21: mol_type = other DNA
tgggtgtcctccaatggggtg

SEQ ID NO: 1424 - DNA, 21 bp, synthetic construct
  source 1..21: mol_type = other DNA
atgtacgacggcacccgctca

SEQ ID NO: 1425 - DNA, 21 bp, synthetic construct
  source 1..21: mol_type = other DNA
ttttcaaagggcaacatcaac

SEQ ID NO: 1426 - DNA, 21 bp, synthetic construct
  source 1..21: mol_type = other DNA
ggggattccacgaatgggagg

SEQ ID NO: 1427 - DNA, 21 bp, synthetic construct
  source 1..21: mol_type = other DNA
tactcaaagatcaacgtaaac

SEQ ID NO: 1428 - DNA, 21 bp, synthetic construct
  source 1..21: mol_type = other DNA
tattccaaagcgggggagaat

SEQ ID NO: 1429 - DNA, 21 bp, synthetic construct
  source 1..21: mol_type = other DNA
tttcattcaaccaacggcgta

SEQ ID NO: 1430 - DNA, 21 bp, synthetic construct
  source 1..21: mol_type = other DNA
tcagaatcaaccaacggcgta

SEQ ID NO: 1431 - DNA, 21 bp, synthetic construct
  source 1..21: mol_type = other DNA
ttgtccaaaaatgggcacaat

SEQ ID NO: 1432 - DNA, 21 bp, synthetic construct
  source 1..21: mol_type = other DNA
atggactcaaccaacggcatc

SEQ ID NO: 1433 - DNA, 21 bp, synthetic construct
  source 1..21: mol_type = other DNA
tatgcgaaaatggggtccaat

SEQ ID NO: 1434 - DNA, 21 bp, synthetic construct
  source 1..21: mol_type = other DNA
tactcacgccaaaacgaaaac

SEQ ID NO: 1435 - DNA, 21 bp, synthetic construct
  source 1..21: mol_type = other DNA
gattcctccacgtggagggat

SEQ ID NO: 1436 - DNA, 21 bp, synthetic construct
  source 1..21: mol_type = other DNA
tactcacgctcaggcgacaac

SEQ ID NO: 1437 - DNA, 21 bp, synthetic construct
  source 1..21: mol_type = other DNA
tgggaatcaaccaacggcatc

SEQ ID NO: 1438 - DNA, 21 bp, synthetic construct
  source 1..21: mol_type = other DNA
aattcctcctccaatggggtg

SEQ ID NO: 1439 - DNA, 21 bp, synthetic construct
  source 1..21: mol_type = other DNA
ttgtccaaacagggggtgaat

SEQ ID NO: 1440 - DNA, 21 bp, synthetic construct
  source 1..21: mol_type = other DNA
atagattccacgaatgggagg

SEQ ID NO: 1441 - DNA, 21 bp, synthetic construct
  source 1..21: mol_type = other DNA
acctcatcatcaaacggcgta

SEQ ID NO: 1442 - DNA, 21 bp, synthetic construct
  source 1..21: mol_type = other DNA
tgggattccacgaatgggata

SEQ ID NO: 1443 - DNA, 21 bp, synthetic construct
  source 1..21: mol_type = other DNA
caggagtccacgaatgggata

SEQ ID NO: 1444 - DNA, 21 bp, synthetic construct
  source 1..21: mol_type = other DNA
tacgccaagatgggcgtaaac

SEQ ID NO: 1445 - DNA, 21 bp, synthetic construct
  source 1..21: mol_type = other DNA
ctgtcatcatcaaacggcgta

SEQ ID NO: 1446 - DNA, 21 bp, synthetic construct
  source 1..21: mol_type = other DNA
ctgtcaaagtcaggcaacaac

SEQ ID NO: 1447 - DNA, 21 bp, synthetic construct
  source 1..21: mol_type = other DNA
aggacgaatacgaatgggata

SEQ ID NO: 1448 - DNA, 21 bp, synthetic construct
  source 1..21: mol_type = other DNA
tggaactcaaccaacggcatc

SEQ ID NO: 1449 - DNA, 21 bp, synthetic construct
  source 1..21: mol_type = other DNA
gatacgaatgcgatgaaatat

SEQ ID NO: 1450 - DNA, 21 bp, synthetic construct
  source 1..21: mol_type = other DNA
gcggtgtccacgaatgggata

SEQ ID NO: 1451 - DNA, 21 bp, synthetic construct
  source 1..21: mol_type = other DNA
tccgggtcctccaatccgtgg

SEQ ID NO: 1452 - DNA, 21 bp, synthetic construct
  source 1..21: mol_type = other DNA
atagcgtcctccaatggggtg

SEQ ID NO: 1453 - DNA, 21 bp, synthetic construct
  source 1..21: mol_type = other DNA
aagaacggcggctcagcctgg

SEQ ID NO: 1454 - DNA, 21 bp, synthetic construct
  source 1..21: mol_type = other DNA
cagtggtcctccaatggggtg

SEQ ID NO: 1455 - DNA, 21 bp, synthetic construct
  source 1..21: mol_type = other DNA
tactcaaagtcaggcgaaaac

SEQ ID NO: 1456 - DNA, 21 bp, synthetic construct
  source 1..21: mol_type = other DNA
atagtgtcctccaatggggtg

SEQ ID NO: 1457 - DNA, 21 bp, synthetic construct
  source 1..21: mol_type = other DNA
cacttgtccacgaatggggtg

SEQ ID NO: 1458 - DNA, 21 bp, synthetic construct
  source 1..21: mol_type = other DNA
ttcgcgaaaggggggttgaat

SEQ ID NO: 1459 - DNA, 21 bp, synthetic construct
  source 1..21: mol_type = other DNA
tactcaaagaacggcaccaac

SEQ ID NO: 1460 - DNA, 21 bp, synthetic construct
  source 1..21: mol_type = other DNA
caccactccacgaatgggata

SEQ ID NO: 1461 - DNA, 21 bp, synthetic construct
  source 1..21: mol_type = other DNA
aaattgccggagtatgggcac

SEQ ID NO: 1462 - DNA, 21 bp, synthetic construct
  source 1..21: mol_type = other DNA
aattccaaagggacgggggcg

SEQ ID NO: 1463 - DNA, 21 bp, synthetic construct
  source 1..21: mol_type = other DNA
acggattccacgtccgggagg

SEQ ID NO: 1464 - DNA, 21 bp, synthetic construct
  source 1..21: mol_type = other DNA
tacggctcaaccaacggcatc

SEQ ID NO: 1465 - DNA, 21 bp, synthetic construct
  source 1..21: mol_type = other DNA
ttggggggggcgtccttgtat

SEQ ID NO: 1466 - DNA, 21 bp, synthetic construct
  source 1..21: mol_type = other DNA
ctgaactcaaccaacggcatc

SEQ ID NO: 1467 - DNA, 21 bp, synthetic construct
  source 1..21: mol_type = other DNA
ttgtccaggcagggggagaat

SEQ ID NO: 1468 - DNA, 21 bp, synthetic construct
  source 1..21: mol_type = other DNA
tatgcgaaattgaatccgaat

SEQ ID NO: 1469 - DNA, 21 bp, synthetic construct
  source 1..21: mol_type = other DNA
caagcctcaaccaacggcatc

SEQ ID NO: 1470 - DNA, 21 bp, synthetic construct
  source 1..21: mol_type = other DNA
ggggtgaaagggacgatgttc

SEQ ID NO: 1471 - DNA, 21 bp, synthetic construct
  source 1..21: mol_type = other DNA
tatgcgaaacagaatgtgaat

SEQ ID NO: 1472 - DNA, 21 bp, synthetic construct
  source 1..21: mol_type = other DNA
tcctcctccacgacggggagg

SEQ ID NO: 1473 - DNA, 21 bp, synthetic construct
  source 1..21: mol_type = other DNA
catggcggcaactcacattac

SEQ ID NO: 1474 - DNA, 21 bp, synthetic construct
  source 1..21: mol_type = other DNA
agggatgagaggacgacgtat

SEQ ID NO: 1475 - DNA, 21 bp, synthetic construct
  source 1..21: mol_type = other DNA
aggttgtccgatgcgtatccg

SEQ ID NO: 1476 - DNA, 21 bp, synthetic construct
  source 1..21: mol_type = other DNA
atagcgaggacggggcacgat

SEQ ID NO: 1477 - DNA, 21 bp, synthetic construct
  source 1..21: mol_type = other DNA
tccgattcctccaatggggtg

SEQ ID NO: 1478 - DNA, 21 bp, synthetic construct
  source 1..21: mol_type = other DNA
aatgattccacgaatggggtg

SEQ ID NO: 1479 - DNA, 21 bp, synthetic construct
  source 1..21: mol_type = other DNA
aggtccaatgagacgttcccg

SEQ ID NO: 1480 - DNA, 21 bp, synthetic construct
  source 1..21: mol_type = other DNA
tcactgtcaaccaacggcatc

SEQ ID NO: 1481 - DNA, 21 bp, synthetic construct
  source 1..21: mol_type = other DNA
agggattccacgccgcactgg

SEQ ID NO: 1482 - DNA, 21 bp, synthetic construct
  source 1..21: mol_type = other DNA
gtgaatgcgacgaatggggtg

SEQ ID NO: 1483 - DNA, 21 bp, synthetic construct
  source 1..21: mol_type = other DNA
gtagtatcaaccaacggcatc

SEQ ID NO: 1484 - DNA, 21 bp, synthetic construct
  source 1..21: mol_type = other DNA
tatgcgaaaacgaatgtgaat

SEQ ID NO: 1485 - DNA, 21 bp, synthetic construct
  source 1..21: mol_type = other DNA
cacatatcctccaatggggtg

SEQ ID NO: 1486 - DNA, 21 bp, synthetic construct
  source 1..21: mol_type = other DNA
ggcaactcaaccaacggcatc

SEQ ID NO: 1487 - DNA, 21 bp, synthetic construct
  source 1..21: mol_type = other DNA
tatgcgaggaatggggagaat

SEQ ID NO: 1488 - DNA, 21 bp, synthetic construct
  source 1..21: mol_type = other DNA
tattccaaaaataatccgaat

SEQ ID NO: 1489 - DNA, 21 bp, synthetic construct
  source 1..21: mol_type = other DNA
aaaaatgggcagtccacgtat

SEQ ID NO: 1490 - DNA, 21 bp, synthetic construct
  source 1..21: mol_type = other DNA
gtagtatcaaccaacggccgc

SEQ ID NO: 1491 - DNA, 21 bp, synthetic construct
  source 1..21: mol_type = other DNA
ttggcgaaatccggggataat

SEQ ID NO: 1492 - DNA, 21 bp, synthetic construct
  source 1..21: mol_type = other DNA
ttggcgaaattgggggcgaat

SEQ ID NO: 1493 - DNA, 21 bp, synthetic construct
  source 1..21: mol_type = other DNA
ctgttttcaaccaacggcatc

SEQ ID NO: 1494 - DNA, 21 bp, synthetic construct
  source 1..21: mol_type = other DNA
gatacgtccacgaatgggagg

SEQ ID NO: 1495 - DNA, 21 bp, synthetic construct
  source 1..21: mol_type = other DNA
ttggggtccacgaatggggtg

SEQ ID NO: 1496 - DNA, 21 bp, synthetic construct
  source 1..21: mol_type = other DNA
atgatatccacgaatggggtg

SEQ ID NO: 1497 - DNA, 21 bp, synthetic construct
  source 1..21: mol_type = other DNA
tactcaaagaccaacaacaac

SEQ ID NO: 1498 - DNA, 21 bp, synthetic construct
  source 1..21: mol_type = other DNA
gagttgaatgatgtgaaatgg

SEQ ID NO: 1499 - DNA, 21 bp, synthetic construct
  source 1..21: mol_type = other DNA
gcggagtccacgaatgggata

SEQ ID NO: 1500 - DNA, 21 bp, synthetic construct
  source 1..21: mol_type = other DNA
aggggggcgacgataatgccg

SEQ ID NO: 1501 - DNA, 21 bp, synthetic construct
  source 1..21: mol_type = other DNA
gtgagggatacgaatgggatg

SEQ ID NO: 1502 - DNA, 21 bp, synthetic construct
  source 1..21: mol_type = other DNA
ctgcgctcaggcgccgccccc

SEQ ID NO: 1503 - DNA, 21 bp, synthetic construct
  source 1..21: mol_type = other DNA
tggaattccacgaatggggtg

SEQ ID NO: 1504 - DNA, 21 bp, synthetic construct
  source 1..21: mol_type = other DNA
gagtggtccacgaatgggata

SEQ ID NO: 1505 - DNA, 21 bp, synthetic construct
  source 1..21: mol_type = other DNA
tggcagaggggggagataaat

SEQ ID NO: 1506 - DNA, 21 bp, synthetic construct
  source 1..21: mol_type = other DNA
ttggcgagggggaatgtgaat

SEQ ID NO: 1507 - DNA, 21 bp, synthetic construct
  source 1..21: mol_type = other DNA
tcatggtcaaccaacggcgta

SEQ ID NO: 1508 - DNA, 21 bp, synthetic construct
  source 1..21: mol_type = other DNA
ttcatgtcctccaatggggtg

SEQ ID NO: 1509 - DNA, 21 bp, synthetic construct
  source 1..21: mol_type = other DNA
ccgatatccacgaatggggtg

SEQ ID NO: 1510 - DNA, 21 bp, synthetic construct
  source 1..21: mol_type = other DNA
tcacgctttggcgactcagcc

SEQ ID NO: 1511 - DNA, 21 bp, synthetic construct
  source 1..21: mol_type = other DNA
tccggggatgggtccaggtat

SEQ ID NO: 1512 - DNA, 21 bp, synthetic construct
  source 1..21: mol_type = other DNA
tattccaaatatggggataat

SEQ ID NO: 1513 - DNA, 21 bp, synthetic construct
  source 1..21: mol_type = other DNA
ttgtccaaaaatgggataaat

SEQ ID NO: 1514 - DNA, 21 bp, synthetic construct
  source 1..21: mol_type = other DNA
tccgggtcctccaatggggtg

SEQ ID NO: 1515 - DNA, 21 bp, synthetic construct
  source 1..21: mol_type = other DNA
aatatatccacgaatggggtg

SEQ ID NO: 1516 - DNA, 21 bp, synthetic construct
  source 1..21: mol_type = other DNA
aatgcggggacgtccaattgg

SEQ ID NO: 1517 - DNA, 21 bp, synthetic construct
  source 1..21: mol_type = other DNA
aggagggaggattcctattcc

SEQ ID NO: 1518 - DNA, 21 bp, synthetic construct
  source 1..21: mol_type = other DNA
aacaagtcaaccaacggcatc

SEQ ID NO: 1519 - DNA, 21 bp, synthetic construct
  source 1..21: mol_type = other DNA
ttgtccagggtgaatgagaat

SEQ ID NO: 1520 - DNA, 21 bp, synthetic construct
  source 1..21: mol_type = other DNA
cgcatctcatcaaacggcgta

SEQ ID NO: 1521 - DNA, 21 bp, synthetic construct
  source 1..21: mol_type = other DNA
acgcactcctccaatggggtg

SEQ ID NO: 1522 - DNA, 21 bp, synthetic construct
  source 1..21: mol_type = other DNA
tatatatccacgaatggggtg

SEQ ID NO: 1523 - DNA, 21 bp, synthetic construct
  source 1..21: mol_type = other DNA
ttggcgaggatgggggataat

SEQ ID NO: 1524 - DNA, 21 bp, synthetic construct
  source 1..21: mol_type = other DNA
acggcgtatgggcagaatgcg

SEQ ID NO: 1525 - DNA, 21 bp, synthetic construct
  source 1..21: mol_type = other DNA
tattccaggccggggttgaat

SEQ ID NO: 1526 - DNA, 21 bp, synthetic construct
  source 1..21: mol_type = other DNA
atgatctcaaccaacggcatc

SEQ ID NO: 1527 - DNA, 21 bp, synthetic construct
  source 1..21: mol_type = other DNA
ttttcaaagaacggccccaac

SEQ ID NO: 1528 - DNA, 21 bp, synthetic construct
  source 1..21: mol_type = other DNA
ttgtccaaagcgaatacgaat

SEQ ID NO: 1529 - DNA, 21 bp, synthetic construct
  source 1..21: mol_type = other DNA
ctggccaagggcaactttaac

SEQ ID NO: 1530 - DNA, 21 bp, synthetic construct
  source 1..21: mol_type = other DNA
gtacaatcatcaaacggcgta

SEQ ID NO: 1531 - DNA, 21 bp, synthetic construct
  source 1..21: mol_type = other DNA
tattccaaagcgaatgagaat

SEQ ID NO: 1532 - DNA, 21 bp, synthetic construct
  source 1..21: mol_type = other DNA
tatgcgagggcgggggagaat

SEQ ID NO: 1533 - DNA, 21 bp, synthetic construct
  source 1..21: mol_type = other DNA
ctgaactcatcaaacggcgta

SEQ ID NO: 1534 - DNA, 21 bp, synthetic construct
  source 1..21: mol_type = other DNA
tacatctcaaccaacggccgc

SEQ ID NO: 1535 - DNA, 21 bp, synthetic construct
  source 1..21: mol_type = other DNA
atcaactcatcaaacggcgta

SEQ ID NO: 1536 - DNA, 21 bp, synthetic construct
  source 1..21: mol_type = other DNA
tactcaaagaacaacaacaac

SEQ ID NO: 1537 - DNA, 21 bp, synthetic construct
  source 1..21: mol_type = other DNA
ggggggcacatgtccacgtat

SEQ ID NO: 1538 - DNA, 21 bp, synthetic construct
  source 1..21: mol_type = other DNA
ccgtggtccacgaatggggtg

SEQ ID NO: 1539 - DNA, 21 bp, synthetic construct
  source 1..21: mol_type = other DNA
caggagtcctccaatggggtg

SEQ ID NO: 1540 - DNA, 21 bp, synthetic construct
  source 1..21: mol_type = other DNA
ttgagggatgggacggggtcc

SEQ ID NO: 1541 - DNA, 21 bp, synthetic construct
  source 1..21: mol_type = other DNA
atcaagtcatcaaacggcgta

SEQ ID NO: 1542 - DNA, 21 bp, synthetic construct
  source 1..21: mol_type = other DNA
ataaaatgggagtccggggat

SEQ ID NO: 1543 - DNA, 21 bp, synthetic construct
  source 1..21: mol_type = other DNA
tactcaaagaacaacgccaac

SEQ ID NO: 1544 - DNA, 21 bp, synthetic construct
  source 1..21: mol_type = other DNA
ccgaattcctccaatggggtg

SEQ ID NO: 1545 - DNA, 21 bp, synthetic construct
  source 1..21: mol_type = other DNA
ttgtccaggcagaatgagaat

SEQ ID NO: 1546 - DNA, 21 bp, synthetic construct
  source 1..21: mol_type = other DNA
tatgcgaggatgggggggaat

SEQ ID NO: 1547 - DNA, 21 bp, synthetic construct
  source 1..21: mol_type = other DNA
caaaactcaaccaacggccgc

SEQ ID NO: 1548 - DNA, 21 bp, synthetic construct
  source 1..21: mol_type = other DNA
aaaaatgagtccacgttgtgg

SEQ ID NO: 1549 - DNA, 21 bp, synthetic construct
  source 1..21: mol_type = other DNA
taccataagtcagactttaac

SEQ ID NO: 1550 - DNA, 21 bp, synthetic construct
  source 1..21: mol_type = other DNA
atagattccacgaatgggata

SEQ ID NO: 1551 - DNA, 21 bp, synthetic construct
  source 1..21: mol_type = other DNA
tttgaatcaaccaacggcatc

SEQ ID NO: 1552 - DNA, 21 bp, synthetic construct
  source 1..21: mol_type = other DNA
tactcaaagatgaactcaaac

SEQ ID NO: 1553 - DNA, 21 bp, synthetic construct
  source 1..21: mol_type = other DNA
gtgccgtccacgaatgggagg

SEQ ID NO: 1554 - DNA, 21 bp, synthetic construct
  source 1..21: mol_type = other DNA
ttggcgaaaacgggggagaat

SEQ ID NO: 1555 - DNA, 21 bp, synthetic construct
  source 1..21: mol_type = other DNA
cataacaactcatcatcatgg

SEQ ID NO: 1556 - DNA, 21 bp, synthetic construct
  source 1..21: mol_type = other DNA
ttgacgtcctccaatggggtg

SEQ ID NO: 1557 - DNA, 21 bp, synthetic construct
  source 1..21: mol_type = other DNA
tacgccaagggcaactgcaac

SEQ ID NO: 1558 - DNA, 21 bp, synthetic construct
  source 1..21: mol_type = other DNA
gcggggggggggtccacgtat

SEQ ID NO: 1559 - DNA, 21 bp, synthetic construct
  source 1..21: mol_type = other DNA
ttcttgtccacgaatggggtg

SEQ ID NO: 1560 - DNA, 21 bp, synthetic construct
  source 1..21: mol_type = other DNA
acggagtcctccgaggggagg

SEQ ID NO: 1561 - DNA, 21 bp, synthetic construct
  source 1..21: mol_type = other DNA
gcgacggagacggggccgaaa

SEQ ID NO: 1562 - DNA, 21 bp, synthetic construct
  source 1..21: mol_type = other DNA
gtggattcctccaatggggtg

SEQ ID NO: 1563 - DNA, 21 bp, synthetic construct
  source 1..21: mol_type = other DNA
tatgcgagggcgaatgagaat

SEQ ID NO: 1564 - DNA, 21 bp, synthetic construct
  source 1..21: mol_type = other DNA
tactcacgcggcggcgacaac

SEQ ID NO: 1565 - DNA, 21 bp, synthetic construct
  source 1..21: mol_type = other DNA
cagtcctccacgaatgggata

SEQ ID NO: 1566 - DNA, 21 bp, synthetic construct
  source 1..21: mol_type = other DNA
tactcaaagatgaacgaaaac

SEQ ID NO: 1567 - DNA, 21 bp, synthetic construct
  source 1..21: mol_type = other DNA
tactcacgccatggccccaac

SEQ ID NO: 1568 - DNA, 21 bp, synthetic construct
  source 1..21: mol_type = other DNA
ccctcatcatcaaacggcgta

SEQ ID NO: 1569 - DNA, 21 bp, synthetic construct
  source 1..21: mol_type = other DNA
gagaattccacgaatggggtg

SEQ ID NO: 1570 - DNA, 21 bp, synthetic construct
  source 1..21: mol_type = other DNA
gcgaattccacgaatggggtg

SEQ ID NO: 1571 - DNA, 21 bp, synthetic construct
  source 1..21: mol_type = other DNA
gacaacggcctgtcaaagtac

SEQ ID NO: 1572 - DNA, 21 bp, synthetic construct
  source 1..21: mol_type = other DNA
catgaatcaaccaacggccgc

SEQ ID NO: 1573 - DNA, 21 bp, synthetic construct
  source 1..21: mol_type = other DNA
cagacgtccagggaggggata

SEQ ID NO: 1574 - DNA, 21 bp, synthetic construct
  source 1..21: mol_type = other DNA
ttttacaccggccatgccgac

SEQ ID NO: 1575 - DNA, 21 bp, synthetic construct
  source 1..21: mol_type = other DNA
cgcaacgacctgacctttccc

SEQ ID NO: 1576 - DNA, 21 bp, synthetic construct
  source 1..21: mol_type = other DNA
gatacggggacgtccaggtat

SEQ ID NO: 1577 - DNA, 21 bp, synthetic construct
  source 1..21: mol_type = other DNA
atggcctcaaccaacggcatc

SEQ ID NO: 1578 - DNA, 21 bp, synthetic construct
  source 1..21: mol_type = other DNA
tattccaaagtgaatccgaat

SEQ ID NO: 1579 - DNA, 21 bp, synthetic construct
  source 1..21: mol_type = other DNA
tattccaaagagaattataat

SEQ ID NO: 1580 - DNA, 21 bp, synthetic construct
  source 1..21: mol_type = other DNA
gtagcctacacctcatcagac

SEQ ID NO: 1581 - DNA, 21 bp, synthetic construct
  source 1..21: mol_type = other DNA
tactcaaagcatggcgacaac

SEQ ID NO: 1582 - DNA, 21 bp, synthetic construct
  source 1..21: mol_type = other DNA
cagacgtccacgaatgggata

SEQ ID NO: 1583 - DNA, 21 bp, synthetic construct
  source 1..21: mol_type = other DNA
tactcaaagcataaccaaaac

SEQ ID NO: 1584 - DNA, 21 bp, synthetic construct
  source 1..21: mol_type = other DNA
atccgctcatcaaacggcgta

SEQ ID NO: 1585 - DNA, 21 bp, synthetic construct
  source 1..21: mol_type = other DNA
tattccaaatccaatgagaat

SEQ ID NO: 1586 - DNA, 21 bp, synthetic construct
  source 1..21: mol_type = other DNA
agggtgacggagaattggttg

SEQ ID NO: 1587 - DNA, 21 bp, synthetic construct
  source 1..21: mol_type = other DNA
aaggaatcaacctcaaagtgg

SEQ ID NO: 1588 - DNA, 21 bp, synthetic construct
  source 1..21: mol_type = other DNA
tatgattccacgaatgggata

SEQ ID NO: 1589 - DNA, 21 bp, synthetic construct
  source 1..21: mol_type = other DNA
tacgccaagcatggcgtaaac

SEQ ID NO: 1590 - DNA, 21 bp, synthetic construct
  source 1..21: mol_type = other DNA
gtgaatgagtccgtggcgtgg

SEQ ID NO: 1591 - DNA, 21 bp, synthetic construct
  source 1..21: mol_type = other DNA
ttttcaaagcaaaacatcaac

SEQ ID NO: 1592 - DNA, 21 bp, synthetic construct
  source 1..21: mol_type = other DNA
tactcaaagcaaaacgacaac

SEQ ID NO: 1593 - DNA, 21 bp, synthetic construct
  source 1..21: mol_type = other DNA
atgcgctcatcaaacggcgta

SEQ ID NO: 1594 - DNA, 21 bp, synthetic construct
  source 1..21: mol_type = other DNA
gtgccgcacaaagggtccggg

SEQ ID NO: 1595 - DNA, 21 bp, synthetic construct
  source 1..21: mol_type = other DNA
accttttcaggcaccatggcc

SEQ ID NO: 1596 - DNA, 21 bp, synthetic construct
  source 1..21: mol_type = other DNA
tacgactcatcaaacggcgta

SEQ ID NO: 1597 - DNA, 21 bp, synthetic construct
  source 1..21: mol_type = other DNA
ttctccaaacaggggcacaat

SEQ ID NO: 1598 - DNA, 21 bp, synthetic construct
  source 1..21: mol_type = other DNA
atgaaagatgggacggcgtcc

SEQ ID NO: 1599 - DNA, 21 bp, synthetic construct
  source 1..21: mol_type = other DNA
gcgtggtcctccaatggggtg

SEQ ID NO: 1600 - DNA, 21 bp, synthetic construct
  source 1..21: mol_type = other DNA
ttgtccaaacagggggcgaat

SEQ ID NO: 1601 - DNA, 21 bp, synthetic construct
  source 1..21: mol_type = other DNA
tattccagggtgaatgggaat

SEQ ID NO: 1602 - DNA, 21 bp, synthetic construct
  source 1..21: mol_type = other DNA
ctggcccgcatgggctacaac

SEQ ID NO: 1603 - DNA, 21 bp, synthetic construct
  source 1..21: mol_type = other DNA
tatgtgtcctccaatggggtg

SEQ ID NO: 1604 - DNA, 21 bp, synthetic construct
  source 1..21: mol_type = other DNA
ttggcgaggttgggggagaat

SEQ ID NO: 1605 - DNA, 21 bp, synthetic construct
  source 1..21: mol_type = other DNA
ttggcgaaaatggggcagaat

SEQ ID NO: 1606 - DNA, 21 bp, synthetic construct
  source 1..21: mol_type = other DNA
ctgtcaaagatgaacaacaac

SEQ ID NO: 1607 - DNA, 21 bp, synthetic construct
  source 1..21: mol_type = other DNA
ttcgcgtcctccaatggggtg

SEQ ID NO: 1608 - DNA, 21 bp, synthetic construct
  source 1..21: mol_type = other DNA
ttttcacgccaaggctttaac

SEQ ID NO: 1609 - DNA, 21 bp, synthetic construct
  source 1..21: mol_type = other DNA
aatcagtcctccgtgacgtgg

SEQ ID NO: 1610 - DNA, 21 bp, synthetic construct
  source 1..21: mol_type = other DNA
gagatgtccacgaatgggagg

SEQ ID NO: 1611 - DNA, 21 bp, synthetic construct
  source 1..21: mol_type = other DNA
ttgatatcctccaatggggtg

SEQ ID NO: 1612 - DNA, 21 bp, synthetic construct
  source 1..21: mol_type = other DNA
tattccaaagtgaatcagaat

SEQ ID NO: 1613 - DNA, 21 bp, synthetic construct
  source 1..21: mol_type = other DNA
ttggcgaaacacgggttgaat

SEQ ID NO: 1614 - DNA, 21 bp, synthetic construct
  source 1..21: mol_type = other DNA
ctggccaagtcaggcggcaac

SEQ ID NO: 1615 - DNA, 21 bp, synthetic construct
  source 1..21: mol_type = other DNA
tatgcgaggatgaatgataat

SEQ ID NO: 1616 - DNA, 21 bp, synthetic construct
  source 1..21: mol_type = other DNA
tacacccatggcaccaaccat

SEQ ID NO: 1617 - DNA, 21 bp, synthetic construct
  source 1..21: mol_type = other DNA
gtggagaggtccgggtgggat

SEQ ID NO: 1618 - DNA, 21 bp, synthetic construct
  source 1..21: mol_type = other DNA
gaatcatacaacggccgcaac

SEQ ID NO: 1619 - DNA, 21 bp, synthetic construct
  source 1..21: mol_type = other DNA
tactcatcaaccaacggcgta

SEQ ID NO: 1620 - DNA, 21 bp, synthetic construct
  source 1..21: mol_type = other DNA
tactcaaagaacaacatcaac

SEQ ID NO: 1621 - DNA, 21 bp, synthetic construct
  source 1..21: mol_type = other DNA
ctgtcaaagaacaacatcaac

SEQ ID NO: 1622 - DNA, 21 bp, synthetic construct
  source 1..21: mol_type = other DNA
gaaatggcccataagaactgg

SEQ ID NO: 1623 - DNA, 21 bp, synthetic construct
  source 1..21: mol_type = other DNA
tatgcgaaatataatccgaat

SEQ ID NO: 1624 - DNA, 21 bp, synthetic construct
  source 1..21: mol_type = other DNA
tcatcatcatcaaacggcgta

SEQ ID NO: 1625 - DNA, 21 bp, synthetic construct
  source 1..21: mol_type = other DNA
ttcgcgaggaatggggataat

SEQ ID NO: 1626 - DNA, 21 bp, synthetic construct
  source 1..21: mol_type = other DNA
tacgactcaaccaacggcgta

SEQ ID NO: 1627 - DNA, 21 bp, synthetic construct
  source 1..21: mol_type = other DNA
acggggtcctcccacgggtgg

SEQ ID NO: 1628 - DNA, 21 bp, synthetic construct
  source 1..21: mol_type = other DNA
ttctccagggtgaatgataat

SEQ ID NO: 1629 - DNA, 21 bp, synthetic construct
  source 1..21: mol_type = other DNA
acgtattccggggatccggcg

SEQ ID NO: 1630 - DNA, 21 bp, synthetic construct
  source 1..21: mol_type = other DNA
ggcgacatggtagtacgctac

SEQ ID NO: 1631 - DNA, 21 bp, synthetic construct
  source 1..21: mol_type = other DNA
ttcgcgaaatccgggacgaat

SEQ ID NO: 1632 - DNA, 21 bp, synthetic construct
  source 1..21: mol_type = other DNA
aattccggggtgtccatatat

SEQ ID NO: 1633 - DNA, 21 bp, synthetic construct
  source 1..21: mol_type = other DNA
gatggggggcactcccactat

SEQ ID NO: 1634 - DNA, 21 bp, synthetic construct
  source 1..21: mol_type = other DNA
tggacggatacgaatggggcg

SEQ ID NO: 1635 - DNA, 21 bp, synthetic construct
  source 1..21: mol_type = other DNA
ttgtccaggtccgggaatgat

SEQ ID NO: 1636 - DNA, 21 bp, synthetic construct
  source 1..21: mol_type = other DNA
ttggcgaaacaggggacgaat

SEQ ID NO: 1637 - DNA, 21 bp, synthetic construct
  source 1..21: mol_type = other DNA
ggcgacgactttaccaagttt

SEQ ID NO: 1638 - DNA, 21 bp, synthetic construct
  source 1..21: mol_type = other DNA
ggccattcaaccaacggcatc

SEQ ID NO: 1639 - DNA, 21 bp, synthetic construct
  source 1..21: mol_type = other DNA
tactttcaaggcgtaatcaac

SEQ ID NO: 1640 - DNA, 21 bp, synthetic construct
  source 1..21: mol_type = other DNA
caggggtccacgaatgggata

SEQ ID NO: 1641 - DNA, 21 bp, synthetic construct
  source 1..21: mol_type = other DNA
gcggggtccacgaatgggata

SEQ ID NO: 1642 - DNA, 21 bp, synthetic construct
  source 1..21: mol_type = other DNA
tttgccaagggcaacgtaaac

SEQ ID NO: 1643 - DNA, 21 bp, synthetic construct
  source 1..21: mol_type = other DNA
ttgtccaaagggaatttgaat

SEQ ID NO: 1644 - DNA, 21 bp, synthetic construct
  source 1..21: mol_type = other DNA
ggcgactaccccgtaaagtac

SEQ ID NO: 1645 - DNA, 21 bp, synthetic construct
  source 1..21: mol_type = other DNA
atggagtccacgaatggggtg

SEQ ID NO: 1646 - DNA, 21 bp, synthetic construct
  source 1..21: mol_type = other DNA
atgtcatcaaccaacggcatc

SEQ ID NO: 1647 - DNA, 21 bp, synthetic construct
  source 1..21: mol_type = other DNA
aacctgggctcaaacacctgg

SEQ ID NO: 1648 - DNA, 21 bp, synthetic construct
  source 1..21: mol_type = other DNA
cactccagggcgaatacggat

SEQ ID NO: 1649 - DNA, 21 bp, synthetic construct
  source 1..21: mol_type = other DNA
gggaggaatgggaatccggcg

SEQ ID NO: 1650 - DNA, 21 bp, synthetic construct
  source 1..21: mol_type = other DNA
tactcaaagcatggccaaaac

SEQ ID NO: 1651 - DNA, 21 bp, synthetic construct
  source 1..21: mol_type = other DNA
tattccaaaatggggacgaat

SEQ ID NO: 1652 - DNA, 21 bp, synthetic construct
  source 1..21: mol_type = other DNA
ttggattccacgaatgggagg

SEQ ID NO: 1653 - DNA, 21 bp, synthetic construct
  source 1..21: mol_type = other DNA
gataggtatgggaggtccccg

SEQ ID NO: 1654 - DNA, 21 bp, synthetic construct
  source 1..21: mol_type = other DNA
aattcctccacgaatgggata

SEQ ID NO: 1655 - DNA, 21 bp, synthetic construct
  source 1..21: mol_type = other DNA
ttctccaaaatgaatacgaat

SEQ ID NO: 1656 - DNA, 21 bp, synthetic construct
  source 1..21: mol_type = other DNA
tattccaggttcaatgagaat

SEQ ID NO: 1657 - DNA, 21 bp, synthetic construct
  source 1..21: mol_type = other DNA
ggggggtccgggacgacgtgg

SEQ ID NO: 1658 - DNA, 21 bp, synthetic construct
  source 1..21: mol_type = other DNA
accgtaggctactcaacctac

SEQ ID NO: 1659 - DNA, 21 bp, synthetic construct
  source 1..21: mol_type = other DNA
tcagaatcatcaaacggcgta

SEQ ID NO: 1660 - DNA, 21 bp, synthetic construct
  source 1..21: mol_type = other DNA
cgcggccccgccgaatacccc

SEQ ID NO: 1661 - DNA, 21 bp, synthetic construct
  source 1..21: mol_type = other DNA
tatgcgaaaacgaatccgaat

SEQ ID NO: 1662 - DNA, 21 bp, synthetic construct
  source 1..21: mol_type = other DNA
aaccattcaaccaacggcgta

SEQ ID NO: 1663 - DNA, 21 bp, synthetic construct
  source 1..21: mol_type = other DNA
ttgtattcctccaatggggtg

SEQ ID NO: 1664 - DNA, 21 bp, synthetic construct
  source 1..21: mol_type = other DNA
cagaatcagtcccacacgtgg

SEQ ID NO: 1665 - DNA, 21 bp, synthetic construct
  source 1..21: mol_type = other DNA
tactcaaagcccggcctgaac

SEQ ID NO: 1666 - DNA, 21 bp, synthetic construct
  source 1..21: mol_type = other DNA
ttggcgagggcgggggataat

SEQ ID NO: 1667 - DNA, 21 bp, synthetic construct
  source 1..21: mol_type = other DNA
tcaaactcatcacatggctgg

SEQ ID NO: 1668 - DNA, 21 bp, synthetic construct
  source 1..21: mol_type = other DNA
tattccaaaacgaatgataat

SEQ ID NO: 1669 - DNA, 21 bp, synthetic construct
  source 1..21: mol_type = other DNA
aatatgtccacgaatgggagg

SEQ ID NO: 1670 - DNA, 21 bp, synthetic construct
  source 1..21: mol_type = other DNA
tatgcgaaaatagggacgaat

SEQ ID NO: 1671 - DNA, 21 bp, synthetic construct
  source 1..21: mol_type = other DNA
tactcaaagaccaaccataac

SEQ ID NO: 1672 - DNA, 21 bp, synthetic construct
  source 1..21: mol_type = other DNA
tatgcgaaattgggggataat

SEQ ID NO: 1673 - DNA, 21 bp, synthetic construct
  source 1..21: mol_type = other DNA
tacaccaagtcaggctcaaac

SEQ ID NO: 1674 - DNA, 21 bp, synthetic construct
  source 1..21: mol_type = other DNA
ttgtccaaaatgaatgagaat

SEQ ID NO: 1675 - DNA, 21 bp, synthetic construct
  source 1..21: mol_type = other DNA
tcatactcaaccaacggcgta

SEQ ID NO: 1676 - DNA, 21 bp, synthetic construct
  source 1..21: mol_type = other DNA
gattcccactcccacacgtgg

SEQ ID NO: 1677 - DNA, 21 bp, synthetic construct
  source 1..21: mol_type = other DNA
ttgacgaggtcctcctatgat

SEQ ID NO: 1678 - DNA, 21 bp, synthetic construct
  source 1..21: mol_type = other DNA
ttctccaaaacggggttgaat

SEQ ID NO: 1679 - DNA, 21 bp, synthetic construct
  source 1..21: mol_type = other DNA
cacgggtcctccaatggggtg

SEQ ID NO: 1680 - DNA, 21 bp, synthetic construct
  source 1..21: mol_type = other DNA
ctggccaagctgggcaacaac

SEQ ID NO: 1681 - DNA, 21 bp, synthetic construct
  source 1..21: mol_type = other DNA
tatgcgaaaacgaatcacaat

SEQ ID NO: 1682 - DNA, 21 bp, synthetic construct
  source 1..21: mol_type = other DNA
caggagcacacggtgtatagg

SEQ ID NO: 1683 - DNA, 21 bp, synthetic construct
  source 1..21: mol_type = other DNA
gcgaattcctccaatggggtg

SEQ ID NO: 1684 - DNA, 21 bp, synthetic construct
  source 1..21: mol_type = other DNA
tttgaatcaaaggtagcctac

SEQ ID NO: 1685 - DNA, 21 bp, synthetic construct
  source 1..21: mol_type = other DNA
tccgcgtcctccaatgggata

SEQ ID NO: 1686 - DNA, 21 bp, synthetic construct
  source 1..21: mol_type = other DNA
tattccaaagatgggccgaat

SEQ ID NO: 1687 - DNA, 21 bp, synthetic construct
  source 1..21: mol_type = other DNA
ggccaaggctcatcaacctgg

SEQ ID NO: 1688 - DNA, 21 bp, synthetic construct
  source 1..21: mol_type = other DNA
caacaatcaaccaacggccgc

SEQ ID NO: 1689 - DNA, 21 bp, synthetic construct
  source 1..21: mol_type = other DNA
cgcaacgactcaaacggcgta

SEQ ID NO: 1690 - DNA, 21 bp, synthetic construct
  source 1..21: mol_type = other DNA
tattccaggcacggggataat

SEQ ID NO: 1691 - DNA, 21 bp, synthetic construct
  source 1..21: mol_type = other DNA
tacttttcatcaaacggcgta

SEQ ID NO: 1692 - DNA, 21 bp, synthetic construct
  source 1..21: mol_type = other DNA
cacatgtcctccaatggggtg

SEQ ID NO: 1693 - DNA, 21 bp, synthetic construct
  source 1..21: mol_type = other DNA
ttgtccaaaatggggtccaat

SEQ ID NO: 1694 - DNA, 21 bp, synthetic construct
  source 1..21: mol_type = other DNA
aacaactcatcaaacggcgta

SEQ ID NO: 1695 - DNA, 21 bp, synthetic construct
  source 1..21: mol_type = other DNA
ttggcgtcctccaatggggtg

SEQ ID NO: 1696 - DNA, 21 bp, synthetic construct
  source 1..21: mol_type = other DNA
caacattcacgcgaaggcgta

SEQ ID NO: 1697 - DNA, 21 bp, synthetic construct
  source 1..21: mol_type = other DNA
ttgtccaaaatggggacgaat

SEQ ID NO: 1698 - DNA, 21 bp, synthetic construct
  source 1..21: mol_type = other DNA
tttgacggcaagtcaccctac

SEQ ID NO: 1699 - DNA, 21 bp, synthetic construct
  source 1..21: mol_type = other DNA
tattccgtgaaaaatacgaat

SEQ ID NO: 1700 - DNA, 21 bp, synthetic construct
  source 1..21: mol_type = other DNA
ttgtccaaacagaatttgaat

SEQ ID NO: 1701 - DNA, 21 bp, synthetic construct
  source 1..21: mol_type = other DNA
ggggcgaatcagtcctcctgg

SEQ ID NO: 1702 - DNA, 21 bp, synthetic construct
  source 1..21: mol_type = other DNA
ttggcgagggatgggccgaat

SEQ ID NO: 1703 - DNA, 21 bp, synthetic construct
  source 1..21: mol_type = other DNA
ataacgtccgataatgggagg

SEQ ID NO: 1704 - DNA, 21 bp, synthetic construct
  source 1..21: mol_type = other DNA
atgcactcctccaatggggtg

SEQ ID NO: 1705 - DNA, 21 bp, synthetic construct
  source 1..21: mol_type = other DNA
tatgcgaaacagaatttgaat

SEQ ID NO: 1706 - DNA, 21 bp, synthetic construct
  source 1..21: mol_type = other DNA
acgaggaatgggacgccggcg

SEQ ID NO: 1707 - DNA, 21 bp, synthetic construct
  source 1..21: mol_type = other DNA
tactcaaagggcggcatcaac

SEQ ID NO: 1708 - DNA, 21 bp, synthetic construct
  source 1..21: mol_type = other DNA
accaacgacgccgtaaagtgg

SEQ ID NO: 1709 - DNA, 21 bp, synthetic construct
  source 1..21: mol_type = other DNA
acgaaatccggggatttgccg

SEQ ID NO: 1710 - DNA, 21 bp, synthetic construct
  source 1..21: mol_type = other DNA
tactcacgcaacaaccaaaac

SEQ ID NO: 1711 - DNA, 21 bp, synthetic construct
  source 1..21: mol_type = other DNA
gggcagtccacgaatggggtg

SEQ ID NO: 1712 - DNA, 21 bp, synthetic construct
  source 1..21: mol_type = other DNA
gactcatactcaggccaagac

SEQ ID NO: 1713 - DNA, 21 bp, synthetic construct
  source 1..21: mol_type = other DNA
ttctccaaagcgaatacgaat

SEQ ID NO: 1714 - DNA, 21 bp, synthetic construct
  source 1..21: mol_type = other DNA
accctgtcatcaaacggcgta

SEQ ID NO: 1715 - DNA, 21 bp, synthetic construct
  source 1..21: mol_type = other DNA
tattccagggaggggttcaat

SEQ ID NO: 1716 - DNA, 21 bp, synthetic construct
  source 1..21: mol_type = other DNA
tacctgaagtcacaaaccgta

SEQ ID NO: 1717 - DNA, 21 bp, synthetic construct
  source 1..21: mol_type = other DNA
ttcgattcctccaatggggtg

SEQ ID NO: 1718 - DNA, 21 bp, synthetic construct
  source 1..21: mol_type = other DNA
caggagtcccagaatgggagg

SEQ ID NO: 1719 - DNA, 21 bp, synthetic construct
  source 1..21: mol_type = other DNA
atgacgtcctccaatggggtg

SEQ ID NO: 1720 - DNA, 21 bp, synthetic construct
  source 1..21: mol_type = other DNA
agggggaatgagtccgggtgg

SEQ ID NO: 1721 - DNA, 21 bp, synthetic construct
  source 1..21: mol_type = other DNA
tatgcgaaagaggggtataat

SEQ ID NO: 1722 - DNA, 21 bp, synthetic construct
  source 1..21: mol_type = other DNA
tacgccaagtcaaaccaaaac

SEQ ID NO: 1723 - DNA, 21 bp, synthetic construct
  source 1..21: mol_type = other DNA
gcgatgtccacgaatgggata

SEQ ID NO: 1724 - DNA, 21 bp, synthetic construct
  source 1..21: mol_type = other DNA
tacgcccgctacggcgaaaac

SEQ ID NO: 1725 - DNA, 21 bp, synthetic construct
  source 1..21: mol_type = other DNA
gtggcgtcctccggggcgggg

SEQ ID NO: 1726 - DNA, 21 bp, synthetic construct
  source 1..21: mol_type = other DNA
aacatctcaaccaacggcatc

SEQ ID NO: 1727 - DNA, 21 bp, synthetic construct
  source 1..21: mol_type = other DNA
ttctccagggtgaatgagaat

SEQ ID NO: 1728 - DNA, 21 bp, synthetic construct
  source 1..21: mol_type = other DNA
ttgtccaaattgggggagaat

SEQ ID NO: 1729 - DNA, 21 bp, synthetic construct
  source 1..21: mol_type = other DNA
gatcacaaagggcagatagcg

SEQ ID NO: 1730 - DNA, 21 bp, synthetic construct
  source 1..21: mol_type = other DNA
tatgcgaaattgaatgcgaat

SEQ ID NO: 1731 - DNA, 21 bp, synthetic construct
  source 1..21: mol_type = other DNA
tatgcgaaagcgaatcagaat

SEQ ID NO: 1732 - DNA, 21 bp, synthetic construct
  source 1..21: mol_type = other DNA
ggggagtccacgaatggggtg

SEQ ID NO: 1733 - DNA, 21 bp, synthetic construct
  source 1..21: mol_type = other DNA
tatgcgaaacagaatacgaat

SEQ ID NO: 1734 - DNA, 21 bp, synthetic construct
  source 1..21: mol_type = other DNA
tactcaaaggccaacggcaac

SEQ ID NO: 1735 - DNA, 21 bp, synthetic construct
  source 1..21: mol_type = other DNA
atcgactcatcaaacggcgta

SEQ ID NO: 1736 - DNA, 21 bp, synthetic construct
  source 1..21: mol_type = other DNA
ttcttctccacgaatgggata

SEQ ID NO: 1737 - DNA, 21 bp, synthetic construct
  source 1..21: mol_type = other DNA
tactcaaagatcaacaccaac

SEQ ID NO: 1738 - DNA, 21 bp, synthetic construct
  source 1..21: mol_type = other DNA
gataattccacgaatgggagg

SEQ ID NO: 1739 - DNA, 21 bp, synthetic construct
  source 1..21: mol_type = other DNA
gtggagtattccttcggggat

SEQ ID NO: 1740 - DNA, 21 bp, synthetic construct
  source 1..21: mol_type = other DNA
ttcgcgaaaacgggggtgaat

SEQ ID NO: 1741 - DNA, 21 bp, synthetic construct
  source 1..21: mol_type = other DNA
accgaatcatcaaacggcgta

SEQ ID NO: 1742 - DNA, 21 bp, synthetic construct
  source 1..21: mol_type = other DNA
aactactcaaccaacggcatc

SEQ ID NO: 1743 - DNA, 21 bp, synthetic construct
  source 1..21: mol_type = other DNA
ataatgtcctccaatggggtg

SEQ ID NO: 1744 - DNA, 21 bp, synthetic construct
  source 1..21: mol_type = other DNA
ctggcccgcatcggctcaaac

SEQ ID NO: 1745 - DNA, 21 bp, synthetic construct
  source 1..21: mol_type = other DNA
aatgattccacgaatgggata

SEQ ID NO: 1746 - DNA, 21 bp, synthetic construct
  source 1..21: mol_type = other DNA
ttttcaaaggtaggcgaaaac

SEQ ID NO: 1747 - DNA, 21 bp, synthetic construct
  source 1..21: mol_type = other DNA
ttgtccaaattgggggataat

SEQ ID NO: 1748 - DNA, 21 bp, synthetic construct
  source 1..21: mol_type = other DNA
gtaaccgactttaacggcaag

SEQ ID NO: 1749 - DNA, 21 bp, synthetic construct
  source 1..21: mol_type = other DNA
tattccaaaccgaatttcaat

SEQ ID NO: 1750 - DNA, 21 bp, synthetic construct
  source 1..21: mol_type = other DNA
caggggtccacgaatggggtg

SEQ ID NO: 1751 - DNA, 21 bp, synthetic construct
  source 1..21: mol_type = other DNA
ttttcaaagatgggccataac

SEQ ID NO: 1752 - DNA, 21 bp, synthetic construct
  source 1..21: mol_type = other DNA
gatttcagggggaatgatgcg

SEQ ID NO: 1753 - DNA, 21 bp, synthetic construct
  source 1..21: mol_type = other DNA
ttcgcgaaaaatgggttgaat

SEQ ID NO: 1754 - DNA, 21 bp, synthetic construct
  source 1..21: mol_type = other DNA
tactcaaagggcaacgaaaac

SEQ ID NO: 1755 - DNA, 21 bp, synthetic construct
  source 1..21: mol_type = other DNA
tattccaaaacgaatgtgaat

SEQ ID NO: 1756 - DNA, 21 bp, synthetic construct
  source 1..21: mol_type = other DNA
gtagactcaaccaacggccgc

SEQ ID NO: 1757 - DNA, 21 bp, synthetic construct
  source 1..21: mol_type = other DNA
cgcggcggctacgaaaccttt

SEQ ID NO: 1758 - DNA, 21 bp, synthetic construct
  source 1..21: mol_type = other DNA
gtaccccaacgcggcgacttt

SEQ ID NO: 1759 - DNA, 21 bp, synthetic construct
  source 1..21: mol_type = other DNA
ccgtggtccacgaatgggata

SEQ ID NO: 1760 - DNA, 21 bp, synthetic construct
  source 1..21: mol_type = other DNA
cacgcgaatacgtccaattgg

SEQ ID NO: 1761 - DNA, 21 bp, synthetic construct
  source 1..21: mol_type = other DNA
gcgttctccacgaatgggata

SEQ ID NO: 1762 - DNA, 21 bp, synthetic construct
  source 1..21: mol_type = other DNA
atgctgtcaaccaacggcatc

SEQ ID NO: 1763 - DNA, 21 bp, synthetic construct
  source 1..21: mol_type = other DNA
gaacaatcaaccaacggcatc

SEQ ID NO: 1764 - DNA, 21 bp, synthetic construct
  source 1..21: mol_type = other DNA
tcaaagtcatcaaacggcgta

SEQ ID NO: 1765 - DNA, 21 bp, synthetic construct
  source 1..21: mol_type = other DNA
tacgccaagctgaacaacaac

SEQ ID NO: 1766 - DNA, 21 bp, synthetic construct
  source 1..21: mol_type = other DNA
tactcaaagaacaacatgaac

SEQ ID NO: 1767 - DNA, 21 bp, synthetic construct
  source 1..21: mol_type = other DNA
tatgcgcacgcggggataggg

SEQ ID NO: 1768 - DNA, 21 bp, synthetic construct
  source 1..21: mol_type = other DNA
gggccgcagtcctccacgtgg

SEQ ID NO: 1769 - DNA, 21 bp, synthetic construct
  source 1..21: mol_type = other DNA
aaccaagactacgtaaagtac

SEQ ID NO: 1770 - DNA, 21 bp, synthetic construct
  source 1..21: mol_type = other DNA
tactttgacggcaaggtatca

SEQ ID NO: 1771 - DNA, 21 bp, synthetic construct
  source 1..21: mol_type = other DNA
ttcgcgaggttcgggccgaat

SEQ ID NO: 1772 - DNA, 21 bp, synthetic construct
  source 1..21: mol_type = other DNA
tccaatgggaattcctcctat

SEQ ID NO: 1773 - DNA, 21 bp, synthetic construct
  source 1..21: mol_type = other DNA
gggaattccacgaatggggtg

SEQ ID NO: 1774 - DNA, 21 bp, synthetic construct
  source 1..21: mol_type = other DNA
gataatagggggagggcggcg

SEQ ID NO: 1775 - DNA, 21 bp, synthetic construct
  source 1..21: mol_type = other DNA
tactcaaagtcaaactcaaac

SEQ ID NO: 1776 - DNA, 21 bp, synthetic construct
  source 1..21: mol_type = other DNA
ttggcgagggcggggtccaat

SEQ ID NO: 1777 - DNA, 21 bp, synthetic construct
  source 1..21: mol_type = other DNA
tatgcgaaattcgggttcaat

SEQ ID NO: 1778 - DNA, 21 bp, synthetic construct
  source 1..21: mol_type = other DNA
tatgcgaggccggggatgaat

SEQ ID NO: 1779 - DNA, 21 bp, synthetic construct
  source 1..21: mol_type = other DNA
tatgcgaaagcgggggggaat

SEQ ID NO: 1780 - DNA, 21 bp, synthetic construct
  source 1..21: mol_type = other DNA
cagaattcctccaatggggtg

SEQ ID NO: 1781 - DNA, 21 bp, synthetic construct
  source 1..21: mol_type = other DNA
acggattcctccaatggggtg

SEQ ID NO: 1782 - DNA, 21 bp, synthetic construct
  source 1..21: mol_type = other DNA
ttttcacgctcaggccaaaac

SEQ ID NO: 1783 - DNA, 21 bp, synthetic construct
  source 1..21: mol_type = other DNA
tatgcgaaagggaatgagaat

SEQ ID NO: 1784 - DNA, 21 bp, synthetic construct
  source 1..21: mol_type = other DNA
tattccagggataatttcaat

SEQ ID NO: 1785 - DNA, 21 bp, synthetic construct
  source 1..21: mol_type = other DNA
tattccgcggcgaatgcgaat

SEQ ID NO: 1786 - DNA, 21 bp, synthetic construct
  source 1..21: mol_type = other DNA
atcgaatcaaccaacggccgc

SEQ ID NO: 1787 - DNA, 21 bp, synthetic construct
  source 1..21: mol_type = other DNA
aatgatggggggtccgcgtgg

SEQ ID NO: 1788 - DNA, 21 bp, synthetic construct
  source 1..21: mol_type = other DNA
tactcaaagtacggcgaaaac

SEQ ID NO: 1789 - DNA, 21 bp, synthetic construct
  source 1..21: mol_type = other DNA
tacgccaagcaaggcgaaaac

SEQ ID NO: 1790 - DNA, 21 bp, synthetic construct
  source 1..21: mol_type = other DNA
ctgtcaaagaacggcgtaaac

SEQ ID NO: 1791 - DNA, 21 bp, synthetic construct
  source 1..21: mol_type = other DNA
ttggcgaaagcggggacgaat

SEQ ID NO: 1792 - DNA, 21 bp, synthetic construct
  source 1..21: mol_type = other DNA
aatgcgtccacgaatgggata

SEQ ID NO: 1793 - DNA, 21 bp, synthetic construct
  source 1..21: mol_type = other DNA
tatgcgaaaacgaatacgaat

SEQ ID NO: 1794 - DNA, 21 bp, synthetic construct
  source 1..21: mol_type = other DNA
ttgtccaaagcgaatcagaat

SEQ ID NO: 1795 - DNA, 21 bp, synthetic construct
  source 1..21: mol_type = other DNA
gaggtgtccacgaatggggtg

SEQ ID NO: 1796 - DNA, 21 bp, synthetic construct
  source 1..21: mol_type = other DNA
ttggcgaaagtggggccgaat

SEQ ID NO: 1797 - DNA, 21 bp, synthetic construct
  source 1..21: mol_type = other DNA
tcacgcgacaccaacggccgc

SEQ ID NO: 1798 - DNA, 21 bp, synthetic construct
  source 1..21: mol_type = other DNA
tattccaaagggggggtgaat

SEQ ID NO: 1799 - DNA, 21 bp, synthetic construct
  source 1..21: mol_type = other DNA
tacgccaagctgaacgtaaac

SEQ ID NO: 1800 - DNA, 21 bp, synthetic construct
  source 1..21: mol_type = other DNA
acgtattccggggattccgcg

SEQ ID NO: 1801 - DNA, 21 bp, synthetic construct
  source 1..21: mol_type = other DNA
ctgtcacgctacaacgacaac

SEQ ID NO: 1802 - DNA, 21 bp, synthetic construct
  source 1..21: mol_type = other DNA
ccgaatgggaggtccgcgtat

SEQ ID NO: 1803 - DNA, 21 bp, synthetic construct
  source 1..21: mol_type = other DNA
tattccagggagaatttcaat

SEQ ID NO: 1804 - DNA, 21 bp, synthetic construct
  source 1..21: mol_type = other DNA
gggtggaggggggagccgtcc

SEQ ID NO: 1805 - DNA, 21 bp, synthetic construct
  source 1..21: mol_type = other DNA
tatgcgaaatccaatgcgaat

SEQ ID NO: 1806 - DNA, 21 bp, synthetic construct
  source 1..21: mol_type = other DNA
ctgtcacgctttaacgacaac

SEQ ID NO: 1807 - DNA, 21 bp, synthetic construct
  source 1..21: mol_type = other DNA
cgcggcgaccgcacctttccc

SEQ ID NO: 1808 - DNA, 21 bp, synthetic construct
  source 1..21: mol_type = other DNA
gcgtattccacgaatgggata

SEQ ID NO: 1809 - DNA, 21 bp, synthetic construct
  source 1..21: mol_type = other DNA
tcatcaggcgcctcaacctgg

SEQ ID NO: 1810 - DNA, 21 bp, synthetic construct
  source 1..21: mol_type = other DNA
tatgcgaaacagaatgcgaat

SEQ ID NO: 1811 - DNA, 21 bp, synthetic construct
  source 1..21: mol_type = other DNA
gatgggaatgggtcccactgg

SEQ ID NO: 1812 - DNA, 21 bp, synthetic construct
  source 1..21: mol_type = other DNA
ttttcacgcaacggcatgaac

SEQ ID NO: 1813 - DNA, 21 bp, synthetic construct
  source 1..21: mol_type = other DNA
gcggattccacgaatgggata

SEQ ID NO: 1814 - DNA, 21 bp, synthetic construct
  source 1..21: mol_type = other DNA
gggacgggggcgaatccgtgg

SEQ ID NO: 1815 - DNA, 21 bp, synthetic construct
  source 1..21: mol_type = other DNA
acgaaaaatgggaattccgcg

SEQ ID NO: 1816 - DNA, 21 bp, synthetic construct
  source 1..21: mol_type = other DNA
ttctccaaagcgggggataat

SEQ ID NO: 1817 - DNA, 21 bp, synthetic construct
  source 1..21: mol_type = other DNA
gggcagaaagggataccgtat

SEQ ID NO: 1818 - DNA, 21 bp, synthetic construct
  source 1..21: mol_type = other DNA
gccacctcatcaaacggcgta

SEQ ID NO: 1819 - DNA, 21 bp, synthetic construct
  source 1..21: mol_type = other DNA
aggccggatacggtgcagtgg

SEQ ID NO: 1820 - DNA, 21 bp, synthetic construct
  source 1..21: mol_type = other DNA
ccggattccacgaatggggtg

SEQ ID NO: 1821 - DNA, 21 bp, synthetic construct
  source 1..21: mol_type = other DNA
ttggcgaggataggggagaat

SEQ ID NO: 1822 - DNA, 21 bp, synthetic construct
  source 1..21: mol_type = other DNA
ttggattcctccaatggggtg

SEQ ID NO: 1823 - DNA, 21 bp, synthetic construct
  source 1..21: mol_type = other DNA
ggctcatcaaccaacggcatc

SEQ ID NO: 1824 - DNA, 21 bp, synthetic construct
  source 1..21: mol_type = other DNA
tatgcgaaagggggggcgggg

SEQ ID NO: 1825 - DNA, 21 bp, synthetic construct
  source 1..21: mol_type = other DNA
ttctccaggtccaatgataat

SEQ ID NO: 1826 - DNA, 21 bp, synthetic construct
  source 1..21: mol_type = other DNA
tatgcgaaagcgggggagaat

SEQ ID NO: 1827 - DNA, 21 bp, synthetic construct
  source 1..21: mol_type = other DNA
tatgcgagggatgggtggaat

SEQ ID NO: 1828 - DNA, 21 bp, synthetic construct
  source 1..21: mol_type = other DNA
tactcaaaggtaggcggcgac

SEQ ID NO: 1829 - DNA, 21 bp, synthetic construct
  source 1..21: mol_type = other DNA
aatgataggaaaacgggggag

SEQ ID NO: 1830 - DNA, 21 bp, synthetic construct
  source 1..21: mol_type = other DNA
gccccctcaacccatacctgg

SEQ ID NO: 1831 - DNA, 21 bp, synthetic construct
  source 1..21: mol_type = other DNA
aacgtatcaaccaacggcatc

SEQ ID NO: 1832 - DNA, 21 bp, synthetic construct
  source 1..21: mol_type = other DNA
ccgacgtcctccaatggggtg

SEQ ID NO: 1833 - DNA, 21 bp, synthetic construct
  source 1..21: mol_type = other DNA
ttcgtgtcctccaatggggtg

SEQ ID NO: 1834 - DNA, 21 bp, synthetic construct
  source 1..21: mol_type = other DNA
ttttcaaagatgaacgacaac

SEQ ID NO: 1835 - DNA, 21 bp, synthetic construct
  source 1..21: mol_type = other DNA
cagtccgggtcctccccgtat

SEQ ID NO: 1836 - DNA, 21 bp, synthetic construct
  source 1..21: mol_type = other DNA
ttggcgaaagggggggagaat

SEQ ID NO: 1837 - DNA, 21 bp, synthetic construct
  source 1..21: mol_type = other DNA
ttcgcgagggggggggataat

SEQ ID NO: 1838 - DNA, 21 bp, synthetic construct
  source 1..21: mol_type = other DNA
ctggcccgcgaaggccccaac

SEQ ID NO: 1839 - DNA, 21 bp, synthetic construct
  source 1..21: mol_type = other DNA
gcctcaggcaactcaatgtgg

SEQ ID NO: 1840 - DNA, 21 bp, synthetic construct
  source 1..21: mol_type = other DNA
ggccatgccgaccaaaagtgg

SEQ ID NO: 1841 - DNA, 21 bp, synthetic construct
  source 1..21: mol_type = other DNA
atagattccgtgaatgggagg

SEQ ID NO: 1842 - DNA, 21 bp, synthetic construct
  source 1..21: mol_type = other DNA
ttggcgaaagtggggcacaat

SEQ ID NO: 1843 - DNA, 21 bp, synthetic construct
  source 1..21: mol_type = other DNA
ttctccaggtataatgagaat

SEQ ID NO: 1844 - DNA, 21 bp, synthetic construct
  source 1..21: mol_type = other DNA
tactcacgccatggctacaac

SEQ ID NO: 1845 - DNA, 21 bp, synthetic construct
  source 1..21: mol_type = other DNA
tttgactcaaccaacggccgc

SEQ ID NO: 1846 - DNA, 21 bp, synthetic construct
  source 1..21: mol_type = other DNA
ggcggctcatcaaccgtatgg

SEQ ID NO: 1847 - DNA, 21 bp, synthetic construct
  source 1..21: mol_type = other DNA
tacctgtcaaccaacggcatc

SEQ ID NO: 1848 - DNA, 21 bp, synthetic construct
  source 1..21: mol_type = other DNA
ttctccaggcagaatgagaat

SEQ ID NO: 1849 - DNA, 21 bp, synthetic construct
  source 1..21: mol_type = other DNA
tatgcgaggccgaatttcaat

SEQ ID NO: 1850 - DNA, 21 bp, synthetic construct
  source 1..21: mol_type = other DNA
tactcaaagatcaacctgaac

SEQ ID NO: 1851 - DNA, 21 bp, synthetic construct
  source 1..21: mol_type = other DNA
tatgcgaaagggggggagaat

SEQ ID NO: 1852 - DNA, 21 bp, synthetic construct
  source 1..21: mol_type = other DNA
ttggcgagggcgggggagaat

SEQ ID NO: 1853 - DNA, 21 bp, synthetic construct
  source 1..21: mol_type = other DNA
gtgacggatgggatgaggtat

SEQ ID NO: 1854 - DNA, 21 bp, synthetic construct
  source 1..21: mol_type = other DNA
caatcatcatcaaacggcgta

SEQ ID NO: 1855 - DNA, 21 bp, synthetic construct
  source 1..21: mol_type = other DNA
gacggcggctcagcctcatgg

SEQ ID NO: 1856 - DNA, 21 bp, synthetic construct
  source 1..21: mol_type = other DNA
ctggccaagatcggcatcaac

SEQ ID NO: 1857 - DNA, 21 bp, synthetic construct
  source 1..21: mol_type = other DNA
cagcagtcctccaatggggtg

SEQ ID NO: 1858 - DNA, 21 bp, synthetic construct
  source 1..21: mol_type = other DNA
gggaatgggaaatcctcctat

SEQ ID NO: 1859 - DNA, 21 bp, synthetic construct
  source 1..21: mol_type = other DNA
ttggcgaaagtggggataaat

SEQ ID NO: 1860 - DNA, 21 bp, synthetic construct
  source 1..21: mol_type = other DNA
ggcgtacccggcaccatgttt

SEQ ID NO: 1861 - DNA, 21 bp, synthetic construct
  source 1..21: mol_type = other DNA
ttgtccaggtcctcccaggat

SEQ ID NO: 1862 - DNA, 21 bp, synthetic construct
  source 1..21: mol_type = other DNA
tactcaaagatcaacgaaaac

SEQ ID NO: 1863 - DNA, 21 bp, synthetic construct
  source 1..21: mol_type = other DNA
ggctactcaaccaacggccgc

SEQ ID NO: 1864 - DNA, 21 bp, synthetic construct
  source 1..21: mol_type = other DNA
atccgctcaggctcagccggc

SEQ ID NO: 1865 - DNA, 21 bp, synthetic construct
  source 1..21: mol_type = other DNA
tatgcgaggcacggggagaat

SEQ ID NO: 1866 - DNA, 21 bp, synthetic construct
  source 1..21: mol_type = other DNA
ttgtccaggtccaatgagaat

SEQ ID NO: 1867 - DNA, 21 bp, synthetic construct
  source 1..21: mol_type = other DNA
acggatgcgcagtccaggtat

SEQ ID NO: 1868 - DNA, 21 bp, synthetic construct
  source 1..21: mol_type = other DNA
tactcaaagaacaacaccaac

SEQ ID NO: 1869 - DNA, 21 bp, synthetic construct
  source 1..21: mol_type = other DNA
aaaaatggggagtccaattgg

SEQ ID NO: 1870 - DNA, 21 bp, synthetic construct
  source 1..21: mol_type = other DNA
ttggcgaggataggggataat

SEQ ID NO: 1871 - DNA, 21 bp, synthetic construct
  source 1..21: mol_type = other DNA
ggccattcaaccaacggcgta

SEQ ID NO: 1872 - DNA, 21 bp, synthetic construct
  source 1..21: mol_type = other DNA
tactcaaagatgaacggcaac

SEQ ID NO: 1873 - DNA, 21 bp, synthetic construct
  source 1..21: mol_type = other DNA
ttttcaaagtcaggcctgaac

SEQ ID NO: 1874 - DNA, 21 bp, synthetic construct
  source 1..21: mol_type = other DNA
cgcgaaaccaacgtaggctgg

SEQ ID NO: 1875 - DNA, 21 bp, synthetic construct
  source 1..21: mol_type = other DNA
ggggcgtccacgaatgggagg

SEQ ID NO: 1876 - DNA, 21 bp, synthetic construct
  source 1..21: mol_type = other DNA
tactcaaagaccggctgcaac

SEQ ID NO: 1877 - DNA, 21 bp, synthetic construct
  source 1..21: mol_type = other DNA
tttgcccgcggcggcgaaaac

SEQ ID NO: 1878 - DNA, 21 bp, synthetic construct
  source 1..21: mol_type = other DNA
tacgccaagctgggcatcaac

SEQ ID NO: 1879 - DNA, 21 bp, synthetic construct
  source 1..21: mol_type = other DNA
gactcaaccggcatgaagtac

SEQ ID NO: 1880 - DNA, 21 bp, synthetic construct
  source 1..21: mol_type = other DNA
atgaattcctccaatggggtg

SEQ ID NO: 1881 - DNA, 21 bp, synthetic construct
  source 1..21: mol_type = other DNA
ttctccaaaacggggatgaat

SEQ ID NO: 1882 - DNA, 21 bp, synthetic construct
  source 1..21: mol_type = other DNA
ttcgcgaggaatggggagaat

SEQ ID NO: 1883 - DNA, 21 bp, synthetic construct
  source 1..21: mol_type = other DNA
acgtggacgggggtggggccg

SEQ ID NO: 1884 - DNA, 21 bp, synthetic construct
  source 1..21: mol_type = other DNA
tcacatggcgcctcaacctgg

SEQ ID NO: 1885 - DNA, 21 bp, synthetic construct
  source 1..21: mol_type = other DNA
tccatatcctccaatggggtg

SEQ ID NO: 1886 - DNA, 21 bp, synthetic construct
  source 1..21: mol_type = other DNA
aagaacgactcaatcctgtgg

SEQ ID NO: 1887 - DNA, 21 bp, synthetic construct
  source 1..21: mol_type = other DNA
tatgcgaaagaggggtggaat

SEQ ID NO: 1888 - DNA, 21 bp, synthetic construct
  source 1..21: mol_type = other DNA
aagtcatcaaccaacggcgta

SEQ ID NO: 1889 - DNA, 21 bp, synthetic construct
  source 1..21: mol_type = other DNA
ttcgcgaaaacggggcagaat

SEQ ID NO: 1890 - DNA, 21 bp, synthetic construct
  source 1..21: mol_type = other DNA
tattccaaagaggggccgaat

SEQ ID NO: 1891 - DNA, 21 bp, synthetic construct
  source 1..21: mol_type = other DNA
ggctggtcaaccaacggcatc

SEQ ID NO: 1892 - DNA, 21 bp, synthetic construct
  source 1..21: mol_type = other DNA
aacccctcatcatcagcctgg

SEQ ID NO: 1893 - DNA, 21 bp, synthetic construct
  source 1..21: mol_type = other DNA
gcgttgtccacgaatggggtg

SEQ ID NO: 1894 - DNA, 21 bp, synthetic construct
  source 1..21: mol_type = other DNA
tatttcgcgggggtgccggcg

SEQ ID NO: 1895 - DNA, 21 bp, synthetic construct
  source 1..21: mol_type = other DNA
tatcacgcgtccacgccgaat

SEQ ID NO: 1896 - DNA, 21 bp, synthetic construct
  source 1..21: mol_type = other DNA
tactcaaagaacaacgacaac

SEQ ID NO: 1897 - DNA, 21 bp, synthetic construct
  source 1..21: mol_type = other DNA
ttttactcatcaaacggcgta

SEQ ID NO: 1898 - DNA, 21 bp, synthetic construct
  source 1..21: mol_type = other DNA
tatgcgaaagaggggccgaat

SEQ ID NO: 1899 - DNA, 21 bp, synthetic construct
  source 1..21: mol_type = other DNA
tatttctccgggtccatgacg

SEQ ID NO: 1900 - DNA, 21 bp, synthetic construct
  source 1..21: mol_type = other DNA
acggaggggcagtccaaatgg

SEQ ID NO: 1901 - DNA, 21 bp, synthetic construct
  source 1..21: mol_type = other DNA
ctggccaagatcggcctgaac

SEQ ID NO: 1902 - DNA, 21 bp, synthetic construct
  source 1..21: mol_type = other DNA
ttgtccaaacagaatgcgaat

SEQ ID NO: 1903 - DNA, 21 bp, synthetic construct
  source 1..21: mol_type = other DNA
tttgccaagaacggcatgaac

SEQ ID NO: 1904 - DNA, 21 bp, synthetic construct
  source 1..21: mol_type = other DNA
gaatcatcaaccaacggcgta

SEQ ID NO: 1905 - DNA, 21 bp, synthetic construct
  source 1..21: mol_type = other DNA
tccaatgcgacgacggggtgg

SEQ ID NO: 1906 - DNA, 21 bp, synthetic construct
  source 1..21: mol_type = other DNA
ctgcgcaacggcgtaaacgcc

SEQ ID NO: 1907 - DNA, 21 bp, synthetic construct
  source 1..21: mol_type = other DNA
ttgtccaggacgaatgagaat

SEQ ID NO: 1908 - DNA, 21 bp, synthetic construct
  source 1..21: mol_type = other DNA
tggatgtcctccaatggggtg

SEQ ID NO: 1909 - DNA, 21 bp, synthetic construct
  source 1..21: mol_type = other DNA
ccgcactcctccaatggggtg

SEQ ID NO: 1910 - DNA, 21 bp, synthetic construct
  source 1..21: mol_type = other DNA
ttctccagggataattataat

SEQ ID NO: 1911 - DNA, 21 bp, synthetic construct
  source 1..21: mol_type = other DNA
ccgtattccacgaatgggata

SEQ ID NO: 1912 - DNA, 21 bp, synthetic construct
  source 1..21: mol_type = other DNA
tacgccaagggcggcggcaac

SEQ ID NO: 1913 - DNA, 21 bp, synthetic construct
  source 1..21: mol_type = other DNA
ttggcgttgagggggatggat

SEQ ID NO: 1914 - DNA, 21 bp, synthetic construct
  source 1..21: mol_type = other DNA
ctgtcaaaggccaacaacaac

SEQ ID NO: 1915 - DNA, 21 bp, synthetic construct
  source 1..21: mol_type = other DNA
tactcaaagatcaacatgaac

SEQ ID NO: 1916 - DNA, 21 bp, synthetic construct
  source 1..21: mol_type = other DNA
atggggtccacgaatgggata

SEQ ID NO: 1917 - DNA, 21 bp, synthetic construct
  source 1..21: mol_type = other DNA
caaacctcaaccaacggccgc

SEQ ID NO: 1918 - DNA, 21 bp, synthetic construct
  source 1..21: mol_type = other DNA
tatgcgaggccggggttcaat

SEQ ID NO: 1919 - DNA, 21 bp, synthetic construct
  source 1..21: mol_type = other DNA
gtacccccctaccatcattca

SEQ ID NO: 1920 - DNA, 21 bp, synthetic construct
  source 1..21: mol_type = other DNA
tatgcgaaattgaatacgaat

SEQ ID NO: 1921 - DNA, 21 bp, synthetic construct
  source 1..21: mol_type = other DNA
aaagattcccacgtggcgtgg

SEQ ID NO: 1922 - DNA, 21 bp, synthetic construct
  source 1..21: mol_type = other DNA
atgtattccacgaatgggata

SEQ ID NO: 1923 - DNA, 21 bp, synthetic construct
  source 1..21: mol_type = other DNA
ggcggcgccggcgtaggctgg

SEQ ID NO: 1924 - DNA, 21 bp, synthetic construct
  source 1..21: mol_type = other DNA
acgggggggacgtccgcgtat

SEQ ID NO: 1925 - DNA, 21 bp, synthetic construct
  source 1..21: mol_type = other DNA
ttctccaggtccggggataat

SEQ ID NO: 1926 - DNA, 21 bp, synthetic construct
  source 1..21: mol_type = other DNA
aaaaggtccggggagaatgcg

SEQ ID NO: 1927 - DNA, 21 bp, synthetic construct
  source 1..21: mol_type = other DNA
ttgaatgggagggggtatgat

SEQ ID NO: 1928 - DNA, 21 bp, synthetic construct
  source 1..21: mol_type = other DNA
gcggggtccgggaatgcgtgg

SEQ ID NO: 1929 - DNA, 21 bp, synthetic construct
  source 1..21: mol_type = other DNA
ccgttctccacgaatgggata

SEQ ID NO: 1930 - DNA, 21 bp, synthetic construct
  source 1..21: mol_type = other DNA
ctggccaagatcggcgtaaac

SEQ ID NO: 1931 - DNA, 21 bp, synthetic construct
  source 1..21: mol_type = other DNA
ttggcgaggcacggggagaat

SEQ ID NO: 1932 - DNA, 21 bp, synthetic construct
  source 1..21: mol_type = other DNA
atagggttgtccgggttcgat

SEQ ID NO: 1933 - DNA, 21 bp, synthetic construct
  source 1..21: mol_type = other DNA
ttgtccaaagcgaatgataat

SEQ ID NO: 1934 - DNA, 21 bp, synthetic construct
  source 1..21: mol_type = other DNA
ctgaagctgaaccccaactca

SEQ ID NO: 1935 - DNA, 21 bp, synthetic construct
  source 1..21: mol_type = other DNA
ttggcgagggtgggggagaat

SEQ ID NO: 1936 - DNA, 21 bp, synthetic construct
  source 1..21: mol_type = other DNA
ttcgcgaggccggggccgaat

SEQ ID NO: 1937 - DNA, 21 bp, synthetic construct
  source 1..21: mol_type = other DNA
tacgccaagcaaggcggcaac

SEQ ID NO: 1938 - DNA, 21 bp, synthetic construct
  source 1..21: mol_type = other DNA
tatgcgaaagatgggtggaat

SEQ ID NO: 1939 - DNA, 21 bp, synthetic construct
  source 1..21: mol_type = other DNA
tactactcaggccatgtaacc

SEQ ID NO: 1940 - DNA, 21 bp, synthetic construct
  source 1..21: mol_type = other DNA
atggaatcaaacgtacgctgg

SEQ ID NO: 1941 - DNA, 21 bp, synthetic construct
  source 1..21: mol_type = other DNA
tacgccaaggtaggccaaaac

SEQ ID NO: 1942 - DNA, 21 bp, synthetic construct
  source 1..21: mol_type = other DNA
ttggcgaaacacgggatgaat

SEQ ID NO: 1943 - DNA, 21 bp, synthetic construct
  source 1..21: mol_type = other DNA
gggacgtccacgaatggggtg

SEQ ID NO: 1944 - DNA, 21 bp, synthetic construct
  source 1..21: mol_type = other DNA
aataatagggggagggatgcg

SEQ ID NO: 1945 - DNA, 21 bp, synthetic construct
  source 1..21: mol_type = other DNA
tccacgtccacggatgggagg

SEQ ID NO: 1946 - DNA, 21 bp, synthetic construct
  source 1..21: mol_type = other DNA
tatgcgaaacacggggataat

SEQ ID NO: 1947 - DNA, 21 bp, synthetic construct
  source 1..21: mol_type = other DNA
atgtcctcctccaatggggtg

SEQ ID NO: 1948 - DNA, 21 bp, synthetic construct
  source 1..21: mol_type = other DNA
gagttctccacgaatgggagg

SEQ ID NO: 1949 - DNA, 21 bp, synthetic construct
  source 1..21: mol_type = other DNA
tccgtgtcctccaatggggtg

SEQ ID NO: 1950 - DNA, 21 bp, synthetic construct
  source 1..21: mol_type = other DNA
ttggcgaaaacgggggggaat

SEQ ID NO: 1951 - DNA, 21 bp, synthetic construct
  source 1..21: mol_type = other DNA
ccggattccacgaatgggata

SEQ ID NO: 1952 - DNA, 21 bp, synthetic construct
  source 1..21: mol_type = other DNA
ttcgcgaaaaatggggtgaat

SEQ ID NO: 1953 - DNA, 21 bp, synthetic construct
  source 1..21: mol_type = other DNA
ttggcgaggccgggggtgaat

SEQ ID NO: 1954 - DNA, 21 bp, synthetic construct
  source 1..21: mol_type = other DNA
gggtccgtgcaggtgaaatat

SEQ ID NO: 1955 - DNA, 21 bp, synthetic construct
  source 1..21: mol_type = other DNA
tattccagggaggggtggaat

SEQ ID NO: 1956 - DNA, 21 bp, synthetic construct
  source 1..21: mol_type = other DNA
gggaatacggtggtgtcctgg

SEQ ID NO: 1957 - DNA, 21 bp, synthetic construct
  source 1..21: mol_type = other DNA
gagtattccacgaatgggagg

SEQ ID NO: 1958 - DNA, 21 bp, synthetic construct
  source 1..21: mol_type = other DNA
ttgtccaggttcaatgagaat

SEQ ID NO: 1959 - DNA, 21 bp, synthetic construct
  source 1..21: mol_type = other DNA
tactggaacaacaacgaatca

SEQ ID NO: 1960 - DNA, 21 bp, synthetic construct
  source 1..21: mol_type = other DNA
ttttcaaagtcaggcatgaac

SEQ ID NO: 1961 - DNA, 21 bp, synthetic construct
  source 1..21: mol_type = other DNA
ttggcgagggaggggtataat

SEQ ID NO: 1962 - DNA, 21 bp, synthetic construct
  source 1..21: mol_type = other DNA
ctggaatcaaccaacggcgta

SEQ ID NO: 1963 - DNA, 21 bp, synthetic construct
  source 1..21: mol_type = other DNA
tactcacgccccggcatcaac

SEQ ID NO: 1964 - DNA, 21 bp, synthetic construct
  source 1..21: mol_type = other DNA
ttctccaggataaatgagaat

SEQ ID NO: 1965 - DNA, 21 bp, synthetic construct
  source 1..21: mol_type = other DNA
aacatctcaaccaacggccgc

SEQ ID NO: 1966 - DNA, 21 bp, synthetic construct
  source 1..21: mol_type = other DNA
ttggtgaggtccgtgaatgag

SEQ ID NO: 1967 - DNA, 21 bp, synthetic construct
  source 1..21: mol_type = other DNA
tactcacgctttggctcaaac

SEQ ID NO: 1968 - DNA, 21 bp, synthetic construct
  source 1..21: mol_type = other DNA
ttctccaggttggggtataat

SEQ ID NO: 1969 - DNA, 21 bp, synthetic construct
  source 1..21: mol_type = other DNA
tattccaggtatgggatgaat

SEQ ID NO: 1970 - DNA, 21 bp, synthetic construct
  source 1..21: mol_type = other DNA
tactcaaagtacaacgaaaac

SEQ ID NO: 1971 - DNA, 21 bp, synthetic construct
  source 1..21: mol_type = other DNA
ttcttctccggggagacgttg

SEQ ID NO: 1972 - DNA, 21 bp, synthetic construct
  source 1..21: mol_type = other DNA
ttctccaaaatggggttgaat

SEQ ID NO: 1973 - DNA, 21 bp, synthetic construct
  source 1..21: mol_type = other DNA
gataatcacgggaataggtat

SEQ ID NO: 1974 - DNA, 21 bp, synthetic construct
  source 1..21: mol_type = other DNA
tacgccaagatgggcgacaac

SEQ ID NO: 1975 - DNA, 21 bp, synthetic construct
  source 1..21: mol_type = other DNA
gtacccaacaagggcgacttt

SEQ ID NO: 1976 - DNA, 21 bp, synthetic construct
  source 1..21: mol_type = other DNA
tcaaccggctcatcaaactgg

SEQ ID NO: 1977 - DNA, 21 bp, synthetic construct
  source 1..21: mol_type = other DNA
tactcacgcggcggcgaaaac

SEQ ID NO: 1978 - DNA, 21 bp, synthetic construct
  source 1..21: mol_type = other DNA
tactcaaagaacggcgaaaac

SEQ ID NO: 1979 - DNA, 21 bp, synthetic construct
  source 1..21: mol_type = other DNA
ttctccaggcagggggataat

SEQ ID NO: 1980 - DNA, 21 bp, synthetic construct
  source 1..21: mol_type = other DNA
ttggtgtcctccaatggggtg

SEQ ID NO: 1981 - DNA, 21 bp, synthetic construct
  source 1..21: mol_type = other DNA
aactcatcaggccgctcagcc

SEQ ID NO: 1982 - DNA, 21 bp, synthetic construct
  source 1..21: mol_type = other DNA
aatccgaaagggtccggggag

SEQ ID NO: 1983 - DNA, 21 bp, synthetic construct
  source 1..21: mol_type = other DNA
ttcgcgaaagggggggtgaat

SEQ ID NO: 1984 - DNA, 21 bp, synthetic construct
  source 1..21: mol_type = other DNA
tacgccaagctgggcgaaaac

SEQ ID NO: 1985 - DNA, 21 bp, synthetic construct
  source 1..21: mol_type = other DNA
tactcaaagcatggcgaaaac

SEQ ID NO: 1986 - DNA, 21 bp, synthetic construct
  source 1..21: mol_type = other DNA
aatgagaaaaggatgtatgag

SEQ ID NO: 1987 - DNA, 21 bp, synthetic construct
  source 1..21: mol_type = other DNA
ttggcgaaagaggggaggaat

SEQ ID NO: 1988 - DNA, 21 bp, synthetic construct
  source 1..21: mol_type = other DNA
tatgagtatgggtatgggaat

SEQ ID NO: 1989 - DNA, 21 bp, synthetic construct
  source 1..21: mol_type = other DNA
ttggcgaggtatggggagaat

SEQ ID NO: 1990 - DNA, 21 bp, synthetic construct
  source 1..21: mol_type = other DNA
ttcacgaggttggatgatagg

SEQ ID NO: 1991 - DNA, 21 bp, synthetic construct
  source 1..21: mol_type = other DNA
tataataggttggggtatgat

SEQ ID NO: 1992 - DNA, 21 bp, synthetic construct
  source 1..21: mol_type = other DNA
acgagggagggggatgtgccg

SEQ ID NO: 1993 - DNA, 21 bp, synthetic construct
  source 1..21: mol_type = other DNA
gaggcgtccacgaatggggtg

SEQ ID NO: 1994 - DNA, 21 bp, synthetic construct
  source 1..21: mol_type = other DNA
cacaatgcgatgtcctcctat

SEQ ID NO: 1995 - DNA, 21 bp, synthetic construct
  source 1..21: mol_type = other DNA
ttgcacaaagtgttgtatgat

SEQ ID NO: 1996 - DNA, 21 bp, synthetic construct
  source 1..21: mol_type = other DNA
ttttcaaaggccaacaacaac

SEQ ID NO: 1997 - DNA, 21 bp, synthetic construct
  source 1..21: mol_type = other DNA
atgtccgagacgtccgggtgg

SEQ ID NO: 1998 - DNA, 21 bp, synthetic construct
  source 1..21: mol_type = other DNA
acgtggaatgggcagaatgcg

SEQ ID NO: 1999 - DNA, 21 bp, synthetic construct
  source 1..21: mol_type = other DNA
ctggccaagcatggctcaaac

SEQ ID NO: 2000 - DNA, 21 bp, synthetic construct
  source 1..21: mol_type = other DNA
ccggggtcctccaatggggtg

SEQ ID NO: 2001 - DNA, 21 bp, synthetic construct
  source 1..21: mol_type = other DNA
ttctccaaaacgggggcgaat

SEQ ID NO: 2002 - DNA, 21 bp, synthetic construct
  source 1..21: mol_type = other DNA
aatgggatgaatgggagggat

SEQ ID NO: 2003 - DNA, 21 bp, synthetic construct
  source 1..21: mol_type = other DNA
gatgcgaggacggataggaat

SEQ ID NO: 2004 - DNA, 21 bp, synthetic construct
  source 1..21: mol_type = other DNA
tcatcatcatcaaacggcatg

SEQ ID NO: 2005 - DNA, 21 bp, synthetic construct
  source 1..21: mol_type = other DNA
cagcactcctccaatggggtg

SEQ ID NO: 2006 - DNA, 21 bp, synthetic construct
  source 1..21: mol_type = other DNA
ttctccaaaataggggataat

SEQ ID NO: 2007 - DNA, 21 bp, synthetic construct
  source 1..21: mol_type = other DNA
ttctccaaatccggggtgaat

SEQ ID NO: 2008 - DNA, 21 bp, synthetic construct
  source 1..21: mol_type = other DNA
gagacgtccacgaatgggata

SEQ ID NO: 2009 - DNA, 21 bp, synthetic construct
  source 1..21: mol_type = other DNA
gagtcctcctccaatggggtg

SEQ ID NO: 2010 - DNA, 21 bp, synthetic construct
  source 1..21: mol_type = other DNA
aataaatatgggatggatacg

SEQ ID NO: 2011 - DNA, 21 bp, synthetic construct
  source 1..21: mol_type = other DNA
tatgcgaaaataggggataat

SEQ ID NO: 2012 - DNA, 21 bp, synthetic construct
  source 1..21: mol_type = other DNA
tccaatgggaggaatccgtat

SEQ ID NO: 2013 - DNA, 21 bp, synthetic construct
  source 1..21: mol_type = other DNA
ctggccaagggcggcgacaac

SEQ ID NO: 2014 - DNA, 21 bp, synthetic construct
  source 1..21: mol_type = other DNA
acgccgtccacgaatgggagg

SEQ ID NO: 2015 - DNA, 21 bp, synthetic construct
  source 1..21: mol_type = other DNA
ggcgaaggcatccataagtgg

SEQ ID NO: 2016 - DNA, 21 bp, synthetic construct
  source 1..21: mol_type = other DNA
aatcacaggttggcggagaat

SEQ ID NO: 2017 - DNA, 21 bp, synthetic construct
  source 1..21: mol_type = other DNA
ctgtcacgcggcaacgacaac

SEQ ID NO: 2018 - DNA, 21 bp, synthetic construct
  source 1..21: mol_type = other DNA
tacgtacgcaccgacacctca

SEQ ID NO: 2019 - DNA, 21 bp, synthetic construct
  source 1..21: mol_type = other DNA
tacgccaagtcaaactcaaac

SEQ ID NO: 2020 - DNA, 21 bp, synthetic construct
  source 1..21: mol_type = other DNA
ttggcgagggggtccaatgat

SEQ ID NO: 2021 - DNA, 21 bp, synthetic construct
  source 1..21: mol_type = other DNA
ccgttctcctccaatggggtg

SEQ ID NO: 2022 - DNA, 21 bp, synthetic construct
  source 1..21: mol_type = other DNA
tattccagggatgggccgaat

SEQ ID NO: 2023 - DNA, 21 bp, synthetic construct
  source 1..21: mol_type = other DNA
ttggcgaaagggaatccgaat

SEQ ID NO: 2024 - DNA, 21 bp, synthetic construct
  source 1..21: mol_type = other DNA
tacgccaaggtaggcgtaaac

SEQ ID NO: 2025 - DNA, 21 bp, synthetic construct
  source 1..21: mol_type = other DNA
gactcatcaaccaacggccgc

SEQ ID NO: 2026 - DNA, 21 bp, synthetic construct
  source 1..21: mol_type = other DNA
gcgaaatcctccaatggggtg

SEQ ID NO: 2027 - DNA, 21 bp, synthetic construct
  source 1..21: mol_type = other DNA
gagaaagggtataatgtgtat

SEQ ID NO: 2028 - DNA, 21 bp, synthetic construct
  source 1..21: mol_type = other DNA
gaggcgccggatataaggtat

SEQ ID NO: 2029 - DNA, 21 bp, synthetic construct
  source 1..21: mol_type = other DNA
cattcagccacctcaaagtac

SEQ ID NO: 2030 - DNA, 21 bp, synthetic construct
  source 1..21: mol_type = other DNA
ctgtcacgcaacggcgaaaac

SEQ ID NO: 2031 - DNA, 21 bp, synthetic construct
  source 1..21: mol_type = other DNA
ttcgcgaaaacgggggataat

SEQ ID NO: 2032 - DNA, 21 bp, synthetic construct
  source 1..21: mol_type = other DNA
gggccgacggaggtgaggtat

SEQ ID NO: 2033 - DNA, 21 bp, synthetic construct
  source 1..21: mol_type = other DNA
ttggcgaaattggggcagaat

SEQ ID NO: 2034 - DNA, 21 bp, synthetic construct
  source 1..21: mol_type = other DNA
acgcagtccacgcacgggaat

SEQ ID NO: 2035 - DNA, 21 bp, synthetic construct
  source 1..21: mol_type = other DNA
aatgggtccacgaatggggtg

SEQ ID NO: 2036 - DNA, 21 bp, synthetic construct
  source 1..21: mol_type = other DNA
ctgtcacgccatggcgacaac

SEQ ID NO: 2037 - DNA, 21 bp, synthetic construct
  source 1..21: mol_type = other DNA
gaaggctcaaccaacggcgta

SEQ ID NO: 2038 - DNA, 21 bp, synthetic construct
  source 1..21: mol_type = other DNA
gaggaggcgagggggaggttg

SEQ ID NO: 2039 - DNA, 21 bp, synthetic construct
  source 1..21: mol_type = other DNA
ttctccaggcacaatgataat

SEQ ID NO: 2040 - DNA, 21 bp, synthetic construct
  source 1..21: mol_type = other DNA
aggcagtcctccaatggggag

SEQ ID NO: 2041 - DNA, 21 bp, synthetic construct
  source 1..21: mol_type = other DNA
aatgcgaggacggggcacgat

SEQ ID NO: 2042 - DNA, 21 bp, synthetic construct
  source 1..21: mol_type = other DNA
tattccagggaggggcacaat

SEQ ID NO: 2043 - DNA, 21 bp, synthetic construct
  source 1..21: mol_type = other DNA
acgtcctccacggtggggagg

SEQ ID NO: 2044 - DNA, 21 bp, synthetic construct
  source 1..21: mol_type = other DNA
tacgccaaggaaaactggaac

SEQ ID NO: 2045 - DNA, 21 bp, synthetic construct
  source 1..21: mol_type = other DNA
tccacgaatgggatgtcctat

SEQ ID NO: 2046 - DNA, 21 bp, synthetic construct
  source 1..21: mol_type = other DNA
cccaacgccggcgtatcatgg

SEQ ID NO: 2047 - DNA, 21 bp, synthetic construct
  source 1..21: mol_type = other DNA
gagaatgggaaagggatgaat

SEQ ID NO: 2048 - DNA, 21 bp, synthetic construct
  source 1..21: mol_type = other DNA
tacgccgccgcctcactgtac

SEQ ID NO: 2049 - DNA, 21 bp, synthetic construct
  source 1..21: mol_type = other DNA
ggcgtatcaggctcatcatgg

SEQ ID NO: 2050 - DNA, 21 bp, synthetic construct
  source 1..21: mol_type = other DNA
ctgtcaaagatgggccaaaac

SEQ ID NO: 2051 - DNA, 21 bp, synthetic construct
  source 1..21: mol_type = other DNA
aaggaatcaaccaacggcgta

SEQ ID NO: 2052 - DNA, 21 bp, synthetic construct
  source 1..21: mol_type = other DNA
aatatgtccacgaatggggtg

SEQ ID NO: 2053 - DNA, 21 bp, synthetic construct
  source 1..21: mol_type = other DNA
ttttcaaagtcaggcgccaac

SEQ ID NO: 2054 - DNA, 21 bp, synthetic construct
  source 1..21: mol_type = other DNA
tactcaaagaacaaccaaaac

SEQ ID NO: 2055 - DNA, 21 bp, synthetic construct
  source 1..21: mol_type = other DNA
tactcaaagaacaacgaaaac

SEQ ID NO: 2056 - DNA, 21 bp, synthetic construct
  source 1..21: mol_type = other DNA
tacgccaagctgaacatgaac

SEQ ID NO: 2057 - DNA, 21 bp, synthetic construct
  source 1..21: mol_type = other DNA
tccgggacgacggggtgggat

SEQ ID NO: 2058 - DNA, 21 bp, synthetic construct
  source 1..21: mol_type = other DNA
cagtattccacgaatggggtg

SEQ ID NO: 2059 - DNA, 21 bp, synthetic construct
  source 1..21: mol_type = other DNA
ttctccaaagcgaatgataat

SEQ ID NO: 2060 - DNA, 21 bp, synthetic construct
  source 1..21: mol_type = other DNA
tacgcccgccataaccccaac

SEQ ID NO: 2061 - DNA, 21 bp, synthetic construct
  source 1..21: mol_type = other DNA
tattccaggaggggggataat

SEQ ID NO: 2062 - DNA, 21 bp, synthetic construct
  source 1..21: mol_type = other DNA
ctgtcaaagatgaactcaaac

SEQ ID NO: 2063 - DNA, 21 bp, synthetic construct
  source 1..21: mol_type = other DNA
ttctccaggacgaatgataat

SEQ ID NO: 2064 - DNA, 21 bp, synthetic construct
  source 1..21: mol_type = other DNA
aatcacacggggaaaatggcg

SEQ ID NO: 2065 - DNA, 21 bp, synthetic construct
  source 1..21: mol_type = other DNA
gtaccctacaagggcgacttt

SEQ ID NO: 2066 - DNA, 21 bp, synthetic construct
  source 1..21: mol_type = other DNA
ctgttttcatcaaacggcgta

SEQ ID NO: 2067 - DNA, 21 bp, synthetic construct
  source 1..21: mol_type = other DNA
gtaaactcaaactcatcatgg

SEQ ID NO: 2068 - DNA, 21 bp, synthetic construct
  source 1..21: mol_type = other DNA
ccggtgtccacgaatgggagg

SEQ ID NO: 2069 - DNA, 21 bp, synthetic construct
  source 1..21: mol_type = other DNA
ctgcatgcctcaaccgtaaac

SEQ ID NO: 2070 - DNA, 21 bp, synthetic construct
  source 1..21: mol_type = other DNA
ttgtccaggaatggggataat

SEQ ID NO: 2071 - DNA, 21 bp, synthetic construct
  source 1..21: mol_type = other DNA
ttctccaggatggggttcaat

SEQ ID NO: 2072 - DNA, 21 bp, synthetic construct
  source 1..21: mol_type = other DNA
acgtccccgaatttgtcctgg

SEQ ID NO: 2073 - DNA, 21 bp, synthetic construct
  source 1..21: mol_type = other DNA
gacgcctaccgcggctcagac

SEQ ID NO: 2074 - DNA, 21 bp, synthetic construct
  source 1..21: mol_type = other DNA
tccgggcagtccacggggtgg

SEQ ID NO: 2075 - DNA, 21 bp, synthetic construct
  source 1..21: mol_type = other DNA
ttgtccaaacaggggacgaat

SEQ ID NO: 2076 - DNA, 21 bp, synthetic construct
  source 1..21: mol_type = other DNA
tacgccaagcccggcaccaac

SEQ ID NO: 2077 - DNA, 21 bp, synthetic construct
  source 1..21: mol_type = other DNA
tcctcctcctccgcgacgtgg

SEQ ID NO: 2078 - DNA, 21 bp, synthetic construct
  source 1..21: mol_type = other DNA
cccgcctcaaccaacggcatc

SEQ ID NO: 2079 - DNA, 21 bp, synthetic construct
  source 1..21: mol_type = other DNA
cagttctccacgaatggggtg

SEQ ID NO: 2080 - DNA, 21 bp, synthetic construct
  source 1..21: mol_type = other DNA
ctgtcaaaggcctcaggcaac

SEQ ID NO: 2081 - DNA, 21 bp, synthetic construct
  source 1..21: mol_type = other DNA
ttggatgggaattccatgtat

SEQ ID NO: 2082 - DNA, 21 bp, synthetic construct
  source 1..21: mol_type = other DNA
tacgccaagatgggcgaaaac

SEQ ID NO: 2083 - DNA, 21 bp, synthetic construct
  source 1..21: mol_type = other DNA
tccatgtcctccaatggggtg

SEQ ID NO: 2084 - DNA, 21 bp, synthetic construct
  source 1..21: mol_type = other DNA
tggtcatcagcctaccccgta

SEQ ID NO: 2085 - DNA, 21 bp, synthetic construct
  source 1..21: mol_type = other DNA
tactcacgccataactcaaac

SEQ ID NO: 2086 - DNA, 21 bp, synthetic construct
  source 1..21: mol_type = other DNA
ttggcgaaaataggggcgaat

SEQ ID NO: 2087 - DNA, 21 bp, synthetic construct
  source 1..21: mol_type = other DNA
accggccaaaccacctcatgg

SEQ ID NO: 2088 - DNA, 21 bp, synthetic construct
  source 1..21: mol_type = other DNA
gatcactccacgaatgggagg

SEQ ID NO: 2089 - DNA, 21 bp, synthetic construct
  source 1..21: mol_type = other DNA
ggggattccacgaatggggtg

SEQ ID NO: 2090 - DNA, 21 bp, synthetic construct
  source 1..21: mol_type = other DNA
gagaggtcctccaatggggtg

SEQ ID NO: 2091 - DNA, 21 bp, synthetic construct
  source 1..21: mol_type = other DNA
tactcaaagaccaacctgaac

SEQ ID NO: 2092 - DNA, 21 bp, synthetic construct
  source 1..21: mol_type = other DNA
tcaaacggcgcctcatcatac

SEQ ID NO: 2093 - DNA, 21 bp, synthetic construct
  source 1..21: mol_type = other DNA
tacgccaagctgaacctgaac

SEQ ID NO: 2094 - DNA, 21 bp, synthetic construct
  source 1..21: mol_type = other DNA
ttgtccaaaaatgggttgaat

SEQ ID NO: 2095 - DNA, 21 bp, synthetic construct
  source 1..21: mol_type = other DNA
gaaggcggcggcggccgctac

SEQ ID NO: 2096 - DNA, 21 bp, synthetic construct
  source 1..21: mol_type = other DNA
tggaggtccgatgggtatgcg

SEQ ID NO: 2097 - DNA, 21 bp, synthetic construct
  source 1..21: mol_type = other DNA
tattccaaattcaatgagaat

SEQ ID NO: 2098 - DNA, 21 bp, synthetic construct
  source 1..21: mol_type = other DNA
tcatcaaccggcatgtcattt

SEQ ID NO: 2099 - DNA, 21 bp, synthetic construct
  source 1..21: mol_type = other DNA
atgacggatgggacgaaatat

SEQ ID NO: 2100 - DNA, 21 bp, synthetic construct
  source 1..21: mol_type = other DNA
gtgcaggattatgataggaat

SEQ ID NO: 2101 - DNA, 21 bp, synthetic construct
  source 1..21: mol_type = other DNA
aatcaggatgggtatatggtg

SEQ ID NO: 2102 - DNA, 21 bp, synthetic construct
  source 1..21: mol_type = other DNA
aatacggcgacgaatgggagg

SEQ ID NO: 2103 - DNA, 21 bp, synthetic construct
  source 1..21: mol_type = other DNA
ctgtcaaagtcaaacctgaac

SEQ ID NO: 2104 - DNA, 21 bp, synthetic construct
  source 1..21: mol_type = other DNA
gtgccgtccacgaatggggtg

SEQ ID NO: 2105 - DNA, 21 bp, synthetic construct
  source 1..21: mol_type = other DNA
aactttcaaggctacggccaa

SEQ ID NO: 2106 - DNA, 21 bp, synthetic construct
  source 1..21: mol_type = other DNA
aatgcgtatgaggcgaggaat

SEQ ID NO: 2107 - DNA, 21 bp, synthetic construct
  source 1..21: mol_type = other DNA
aaagagtcctccaatggggtg

SEQ ID NO: 2108 - DNA, 21 bp, synthetic construct
  source 1..21: mol_type = other DNA
gatagggggaattccacgtat

SEQ ID NO: 2109 - DNA, 21 bp, synthetic construct
  source 1..21: mol_type = other DNA
tatgcgaaagcgaatgagaat

SEQ ID NO: 2110 - DNA, 21 bp, synthetic construct
  source 1..21: mol_type = other DNA
gatttgagggggacgggggcg

SEQ ID NO: 2111 - DNA, 21 bp, synthetic construct
  source 1..21: mol_type = other DNA
tacgcccgccccaacgaaaac

SEQ ID NO: 2112 - DNA, 21 bp, synthetic construct
  source 1..21: mol_type = other DNA
tactcaaagtggggcgacaac

SEQ ID NO: 2113 - DNA, 21 bp, synthetic construct
  source 1..21: mol_type = other DNA
tactcacgctttaaccccaac

SEQ ID NO: 2114 - DNA, 21 bp, synthetic construct
  source 1..21: mol_type = other DNA
ctggccaaggccggcgaaaac

SEQ ID NO: 2115 - DNA, 21 bp, synthetic construct
  source 1..21: mol_type = other DNA
catctgtcaaccaacggccgc

SEQ ID NO: 2116 - DNA, 21 bp, synthetic construct
  source 1..21: mol_type = other DNA
aatcactcctccaatggggtg

SEQ ID NO: 2117 - DNA, 21 bp, synthetic construct
  source 1..21: mol_type = other DNA
ggcccccccgactttatgcgc

SEQ ID NO: 2118 - DNA, 21 bp, synthetic construct
  source 1..21: mol_type = other DNA
accggctcatcacatgactgg

SEQ ID NO: 2119 - DNA, 21 bp, synthetic construct
  source 1..21: mol_type = other DNA
gagatatccacgaatgggagg

SEQ ID NO: 2120 - DNA, 21 bp, synthetic construct
  source 1..21: mol_type = other DNA
ttctccaggtccggggagaat

SEQ ID NO: 2121 - DNA, 21 bp, synthetic construct
  source 1..21: mol_type = other DNA
ctgtcaaagcaaaacaccaac

SEQ ID NO: 2122 - DNA, 21 bp, synthetic construct
  source 1..21: mol_type = other DNA
tattccagggatgggcacaat

SEQ ID NO: 2123 - DNA, 21 bp, synthetic construct
  source 1..21: mol_type = other DNA
ttgtccagggggaatgagaat

SEQ ID NO: 2124 - DNA, 21 bp, synthetic construct
  source 1..21: mol_type = other DNA
gggtccggggaggtgaggtat

SEQ ID NO: 2125 - DNA, 21 bp, synthetic construct
  source 1..21: mol_type = other DNA
ccgtattcctccaatggggtg

SEQ ID NO: 2126 - DNA, 21 bp, synthetic construct
  source 1..21: mol_type = other DNA
tactcacgccccggcgtaaac

SEQ ID NO: 2127 - DNA, 21 bp, synthetic construct
  source 1..21: mol_type = other DNA
ggcctgggctcagtaacctgg

SEQ ID NO: 2128 - DNA, 21 bp, synthetic construct
  source 1..21: mol_type = other DNA
cgccaatcagactcatttgaa

SEQ ID NO: 2129 - DNA, 21 bp, synthetic construct
  source 1..21: mol_type = other DNA
tacttttcaggcgccaacgta

SEQ ID NO: 2130 - DNA, 21 bp, synthetic construct
  source 1..21: mol_type = other DNA
gattccgaggggacgaggaat

SEQ ID NO: 2131 - DNA, 21 bp, synthetic construct
  source 1..21: mol_type = other DNA
tcaggctcacccaaccgctac

SEQ ID NO: 2132 - DNA, 21 bp, synthetic construct
  source 1..21: mol_type = other DNA
cgcgaatcagtaaacggctgg

SEQ ID NO: 2133 - DNA, 21 bp, synthetic construct
  source 1..21: mol_type = other DNA
ttggcgaaattggggacgaat

SEQ ID NO: 2134 - DNA, 21 bp, synthetic construct
  source 1..21: mol_type = other DNA
atgatgtcctccaatggggtg

SEQ ID NO: 2135 - DNA, 21 bp, synthetic construct
  source 1..21: mol_type = other DNA
ggggggccgcaggtgttgtat

SEQ ID NO: 2136 - DNA, 21 bp, synthetic construct
  source 1..21: mol_type = other DNA
tatttcgcgtcccagagggag

SEQ ID NO: 2137 - DNA, 21 bp, synthetic construct
  source 1..21: mol_type = other DNA
gggaggggggagaatcactat

SEQ ID NO: 2138 - DNA, 21 bp, synthetic construct
  source 1..21: mol_type = other DNA
tactcacgcgaaggcaagaac

SEQ ID NO: 2139 - DNA, 21 bp, synthetic construct
  source 1..21: mol_type = other DNA
gaaggcctgatcggcaaggac

SEQ ID NO: 2140 - DNA, 21 bp, synthetic construct
  source 1..21: mol_type = other DNA
ctgtcaaaggccggcggcaac

SEQ ID NO: 2141 - DNA, 21 bp, synthetic construct
  source 1..21: mol_type = other DNA
cccgaatcaaccaacggcatc

SEQ ID NO: 2142 - DNA, 21 bp, synthetic construct
  source 1..21: mol_type = other DNA
tactcacgcgaaggcgccaac

SEQ ID NO: 2143 - DNA, 21 bp, synthetic construct
  source 1..21: mol_type = other DNA
ggcatcggcaactcagcctgg

SEQ ID NO: 2144 - DNA, 21 bp, synthetic construct
  source 1..21: mol_type = other DNA
tatgcgaaagtgggggataat

SEQ ID NO: 2145 - DNA, 21 bp, synthetic construct
  source 1..21: mol_type = other DNA
ccgatgtccacgaatgggata

SEQ ID NO: 2146 - DNA, 21 bp, synthetic construct
  source 1..21: mol_type = other DNA
gggaatgagatggagtcctgg

SEQ ID NO: 2147 - DNA, 21 bp, synthetic construct
  source 1..21: mol_type = other DNA
cccgaatcatcaaacggcgta

SEQ ID NO: 2148 - DNA, 21 bp, synthetic construct
  source 1..21: mol_type = other DNA
cgcacctcatcaaccggcgta

SEQ ID NO: 2149 - DNA, 21 bp, synthetic construct
  source 1..21: mol_type = other DNA
ataaaatatacgtcctccgat

SEQ ID NO: 2150 - DNA, 21 bp, synthetic construct
  source 1..21: mol_type = other DNA
acgaggtccgatccgaattcc

SEQ ID NO: 2151 - DNA, 21 bp, synthetic construct
  source 1..21: mol_type = other DNA
tcagacggcatctcaccctac

SEQ ID NO: 2152 - DNA, 21 bp, synthetic construct
  source 1..21: mol_type = other DNA
tactcacgcaccaacggcaac

SEQ ID NO: 2153 - DNA, 21 bp, synthetic construct
  source 1..21: mol_type = other DNA
tactcaaagaccaacatgaac

SEQ ID NO: 2154 - DNA, 21 bp, synthetic construct
  source 1..21: mol_type = other DNA
tgctcagtaccctcactgccc

SEQ ID NO: 2155 - DNA, 21 bp, synthetic construct
  source 1..21: mol_type = other DNA
tacgccaagtcaaacgaaaac

SEQ ID NO: 2156 - DNA, 21 bp, synthetic construct
  source 1..21: mol_type = other DNA
accggcggccattcaacctgg

SEQ ID NO: 2157 - DNA, 21 bp, synthetic construct
  source 1..21: mol_type = other DNA
tacggcggccataccatgtac

SEQ ID NO: 2158 - DNA, 21 bp, synthetic construct
  source 1..21: mol_type = other DNA
ttttcaaagatgaacgaaaac

SEQ ID NO: 2159 - DNA, 21 bp, synthetic construct
  source 1..21: mol_type = other DNA
ttctccaaattgggggataat

SEQ ID NO: 2160 - DNA, 21 bp, synthetic construct
  source 1..21: mol_type = other DNA
accccccgcggcgccgccgcc

SEQ ID NO: 2161 - DNA, 21 bp, synthetic construct
  source 1..21: mol_type = other DNA
catcatgaacatggcccccgc

SEQ ID NO: 2162 - DNA, 21 bp, synthetic construct
  source 1..21: mol_type = other DNA
tattccagggaggggatgaat

SEQ ID NO: 2163 - DNA, 21 bp, synthetic construct
  source 1..21: mol_type = other DNA
gactaccgcggcaccctgccc

SEQ ID NO: 2164 - DNA, 21 bp, synthetic construct
  source 1..21: mol_type = other DNA
tatgcgaaaccggggatgaat

SEQ ID NO: 2165 - DNA, 21 bp, synthetic construct
  source 1..21: mol_type = other DNA
ataggggggtcctccacgtat

SEQ ID NO: 2166 - DNA, 21 bp, synthetic construct
  source 1..21: mol_type = other DNA
gaccatgccaactcacgctac

SEQ ID NO: 2167 - DNA, 21 bp, synthetic construct
  source 1..21: mol_type = other DNA
tacgcccgcgacggcatgaac

SEQ ID NO: 2168 - DNA, 21 bp, synthetic construct
  source 1..21: mol_type = other DNA
tacgcccgcgaaggccataac

SEQ ID NO: 2169 - DNA, 21 bp, synthetic construct
  source 1..21: mol_type = other DNA
tttaacggccgcacctcatac

SEQ ID NO: 2170 - DNA, 21 bp, synthetic construct
  source 1..21: mol_type = other DNA
tataataggttgtccgataat

SEQ ID NO: 2171 - DNA, 21 bp, synthetic construct
  source 1..21: mol_type = other DNA
ttcgcgaaaggggggacgaat

SEQ ID NO: 2172 - DNA, 21 bp, synthetic construct
  source 1..21: mol_type = other DNA
gcctcaggcacctcaccctgg

SEQ ID NO: 2173 - DNA, 21 bp, synthetic construct
  source 1..21: mol_type = other DNA
ttttcacgctcaaacgaaaac

SEQ ID NO: 2174 - DNA, 21 bp, synthetic construct
  source 1..21: mol_type = other DNA
gggaggtccgggaatgcggcg

SEQ ID NO: 2175 - DNA, 21 bp, synthetic construct
  source 1..21: mol_type = other DNA
ttttcacgccatggctttaac

SEQ ID NO: 2176 - DNA, 21 bp, synthetic construct
  source 1..21: mol_type = other DNA
tacaactcaaccgaaggccgc

SEQ ID NO: 2177 - DNA, 21 bp, synthetic construct
  source 1..21: mol_type = other DNA
cagcagccgtcccacttgtgg

SEQ ID NO: 2178 - DNA, 21 bp, synthetic construct
  source 1..21: mol_type = other DNA
gatggggataggggggggtgg

SEQ ID NO: 2179 - DNA, 21 bp, synthetic construct
  source 1..21: mol_type = other DNA
ttcgcgaaatccggggataat

SEQ ID NO: 2180 - DNA, 21 bp, synthetic construct
  source 1..21: mol_type = other DNA
tacgccaaggaaggctgcaac

SEQ ID NO: 2181 - DNA, 21 bp, synthetic construct
  source 1..21: mol_type = other DNA
atgaggaatgatgggtatggg

SEQ ID NO: 2182 - DNA, 21 bp, synthetic construct
  source 1..21: mol_type = other DNA
gtgaatggggggtccaaatat

SEQ ID NO: 2183 - DNA, 21 bp, synthetic construct
  source 1..21: mol_type = other DNA
ataacggaggggttgaaatgg

SEQ ID NO: 2184 - DNA, 21 bp, synthetic construct
  source 1..21: mol_type = other DNA
tggttggcggggccgtccgcg

SEQ ID NO: 2185 - DNA, 21 bp, synthetic construct
  source 1..21: mol_type = other DNA
aatgggcaggggtccacgtgg

SEQ ID NO: 2186 - DNA, 21 bp, synthetic construct
  source 1..21: mol_type = other DNA
ttcgcgaggacgaatgataat

SEQ ID NO: 2187 - DNA, 21 bp, synthetic construct
  source 1..21: mol_type = other DNA
aggtatcacgattcctatgcg

SEQ ID NO: 2188 - DNA, 21 bp, synthetic construct
  source 1..21: mol_type = other DNA
aggcagtccataaatgggtat

SEQ ID NO: 2189 - DNA, 21 bp, synthetic construct
  source 1..21: mol_type = other DNA
caggcggagagggggtatgat

SEQ ID NO: 2190 - DNA, 21 bp, synthetic construct
  source 1..21: mol_type = other DNA
ttcgcgaggttcggggcgaat

SEQ ID NO: 2191 - DNA, 21 bp, synthetic construct
  source 1..21: mol_type = other DNA
acccgccaaggcatctcagcc

SEQ ID NO: 2192 - DNA, 21 bp, synthetic construct
  source 1..21: mol_type = other DNA
tatgtgaggaatgatcactcc

SEQ ID NO: 2193 - DNA, 21 bp, synthetic construct
  source 1..21: mol_type = other DNA
gacatgaacaacaacaagtgg

SEQ ID NO: 2194 - DNA, 21 bp, synthetic construct
  source 1..21: mol_type = other DNA
ttcgtgaggtccgattccaat

SEQ ID NO: 2195 - DNA, 21 bp, synthetic construct
  source 1..21: mol_type = other DNA
tactcacgcgacggctttaac

SEQ ID NO: 2196 - DNA, 21 bp, synthetic construct
  source 1..21: mol_type = other DNA
tacgcccgcgacggccataac

SEQ ID NO: 2197 - DNA, 21 bp, synthetic construct
  source 1..21: mol_type = other DNA
ttttcaaaggccggcgaaaac

SEQ ID NO: 2198 - DNA, 21 bp, synthetic construct
  source 1..21: mol_type = other DNA
gggaatgaggggtattgggat

SEQ ID NO: 2199 - DNA, 21 bp, synthetic construct
  source 1..21: mol_type = other DNA
aattccttggggacgggggcg

SEQ ID NO: 2200 - DNA, 21 bp, synthetic construct
  source 1..21: mol_type = other DNA
tacgccaagcatggcgaaaac

SEQ ID NO: 2201 - DNA, 21 bp, synthetic construct
  source 1..21: mol_type = other DNA
tgggggtcctcctcctcctat

SEQ ID NO: 2202 - DNA, 21 bp, synthetic construct
  source 1..21: mol_type = other DNA
tattccagggaggggttgaat

SEQ ID NO: 2203 - DNA, 21 bp, synthetic construct
  source 1..21: mol_type = other DNA
tattccagggagaattggaat

SEQ ID NO: 2204 - DNA, 21 bp, synthetic construct
  source 1..21: mol_type = other DNA
ttgacgtccacgcacgggatg

SEQ ID NO: 2205 - DNA, 21 bp, synthetic construct
  source 1..21: mol_type = other DNA
aatacggggacgtcctcctat

SEQ ID NO: 2206 - DNA, 21 bp, synthetic construct
  source 1..21: mol_type = other DNA
tacgccaaggacggctttaac

SEQ ID NO: 2207 - DNA, 21 bp, synthetic construct
  source 1..21: mol_type = other DNA
cagccgttgggggggtatgat

SEQ ID NO: 2208 - DNA, 21 bp, synthetic construct
  source 1..21: mol_type = other DNA
gagtatgggggggggaaatat

SEQ ID NO: 2209 - DNA, 21 bp, synthetic construct
  source 1..21: mol_type = other DNA
ttctccaggcagggggagaat

SEQ ID NO: 2210 - DNA, 21 bp, synthetic construct
  source 1..21: mol_type = other DNA
ctgtggaacgccaccgccccc

SEQ ID NO: 2211 - DNA, 21 bp, synthetic construct
  source 1..21: mol_type = other DNA
tatgcgaaacagaatgagaat

SEQ ID NO: 2212 - DNA, 21 bp, synthetic construct
  source 1..21: mol_type = other DNA
aatttctccgggcagaatgcg

SEQ ID NO: 2213 - DNA, 21 bp, synthetic construct
  source 1..21: mol_type = other DNA
aataatgggcacatggcgtat

SEQ ID NO: 2214 - DNA, 21 bp, synthetic construct
  source 1..21: mol_type = other DNA
ttctccaaaataggggagaat

SEQ ID NO: 2215 - DNA, 21 bp, synthetic construct
  source 1..21: mol_type = other DNA
ttttcaaagatcaaccccaac

SEQ ID NO: 2216 - DNA, 21 bp, synthetic construct
  source 1..21: mol_type = other DNA
gggggggggacgtccccgtat

SEQ ID NO: 2217 - DNA, 21 bp, synthetic construct
  source 1..21: mol_type = other DNA
ggcaacggcggcacccattgg

SEQ ID NO: 2218 - DNA, 21 bp, synthetic construct
  source 1..21: mol_type = other DNA
tactcacgcgacaactggaac

SEQ ID NO: 2219 - DNA, 21 bp, synthetic construct
  source 1..21: mol_type = other DNA
atagggtccgcgaatggggtg

SEQ ID NO: 2220 - DNA, 21 bp, synthetic construct
  source 1..21: mol_type = other DNA
tggtcacgcctggaaaacaac

SEQ ID NO: 2221 - DNA, 21 bp, synthetic construct
  source 1..21: mol_type = other DNA
gggtcctccaatgagaaatgg

SEQ ID NO: 2222 - DNA, 21 bp, synthetic construct
  source 1..21: mol_type = other DNA
tactcacgcgaaaaccataac

SEQ ID NO: 2223 - DNA, 21 bp, synthetic construct
  source 1..21: mol_type = other DNA
tatgcgaggccggggcagaat

SEQ ID NO: 2224 - DNA, 21 bp, synthetic construct
  source 1..21: mol_type = other DNA
aacgaaggccgcggctacgcc

SEQ ID NO: 2225 - DNA, 21 bp, synthetic construct
  source 1..21: mol_type = other DNA
ttgtccaaatcctccttggat

SEQ ID NO: 2226 - DNA, 21 bp, synthetic construct
  source 1..21: mol_type = other DNA
tattccaaagaggggtggaat

SEQ ID NO: 2227 - DNA, 21 bp, synthetic construct
  source 1..21: mol_type = other DNA
gagtcctccgggtcctcctgg

SEQ ID NO: 2228 - DNA, 21 bp, synthetic construct
  source 1..21: mol_type = other DNA
tacgcccgcgacggcgccaac

SEQ ID NO: 2229 - DNA, 21 bp, synthetic construct
  source 1..21: mol_type = other DNA
ttcgcgaaagaggggtggaat

SEQ ID NO: 2230 - DNA, 21 bp, synthetic construct
  source 1..21: mol_type = other DNA
tactcacgcctgggcgaaaac

SEQ ID NO: 2231 - DNA, 21 bp, synthetic construct
  source 1..21: mol_type = other DNA
tttgcccgcgaaggctttaac

SEQ ID NO: 2232 - DNA, 21 bp, synthetic construct
  source 1..21: mol_type = other DNA
ggcatctacgacaccatgccc

SEQ ID NO: 2233 - DNA, 21 bp, synthetic construct
  source 1..21: mol_type = other DNA
gaggcgttgtccgataggggg

SEQ ID NO: 2234 - DNA, 21 bp, synthetic construct
  source 1..21: mol_type = other DNA
tactttgaactgcgctcaaac

SEQ ID NO: 2235 - DNA, 21 bp, synthetic construct
  source 1..21: mol_type = other DNA
catggcaccggcacccatttt

SEQ ID NO: 2236 - DNA, 21 bp, synthetic construct
  source 1..21: mol_type = other DNA
atccaaggcaccacctacgcc

SEQ ID NO: 2237 - DNA, 21 bp, synthetic construct
  source 1..21: mol_type = other DNA
ttttcaaagcataacgacaac

SEQ ID NO: 2238 - DNA, 21 bp, synthetic construct
  source 1..21: mol_type = other DNA
ggctcagcctcaacccaatgg

SEQ ID NO: 2239 - DNA, 21 bp, synthetic construct
  source 1..21: mol_type = other DNA
tactcaaagaccaacgaaaac

SEQ ID NO: 2240 - DNA, 21 bp, synthetic construct
  source 1..21: mol_type = other DNA
atgccctcacccaactttggc

SEQ ID NO: 2241 - DNA, 21 bp, synthetic construct
  source 1..21: mol_type = other DNA
tataaaacggggacgatgtat

SEQ ID NO: 2242 - DNA, 21 bp, synthetic construct
  source 1..21: mol_type = other DNA
ttctccaaattgggggagaat

SEQ ID NO: 2243 - DNA, 21 bp, synthetic construct
  source 1..21: mol_type = other DNA
gtatcaggcacccatggcgta

SEQ ID NO: 2244 - DNA, 21 bp, synthetic construct
  source 1..21: mol_type = other DNA
tatgtgcactccaattccaat

SEQ ID NO: 2245 - DNA, 21 bp, synthetic construct
  source 1..21: mol_type = other DNA
tattccaggttggatgagacg

SEQ ID NO: 2246 - DNA, 21 bp, synthetic construct
  source 1..21: mol_type = other DNA
tatgcgaaattggggacgaat

SEQ ID NO: 2247 - DNA, 21 bp, synthetic construct
  source 1..21: mol_type = other DNA
aacatgaacggctacggccaa

SEQ ID NO: 2248 - DNA, 21 bp, synthetic construct
  source 1..21: mol_type = other DNA
tacgcccgcatgggcaccaac

SEQ ID NO: 2249 - DNA, 21 bp, synthetic construct
  source 1..21: mol_type = other DNA
tacgcccgcgacggcaacaac

SEQ ID NO: 2250 - DNA, 21 bp, synthetic construct
  source 1..21: mol_type = other DNA
ggcgaagaacgctcaaagtgg

SEQ ID NO: 2251 - DNA, 21 bp, synthetic construct
  source 1..21: mol_type = other DNA
atggcgaatcacgtgacgtat

SEQ ID NO: 2252 - DNA, 21 bp, synthetic construct
  source 1..21: mol_type = other DNA
tatgcgtccgggtccaatggg

SEQ ID NO: 2253 - DNA, 21 bp, synthetic construct
  source 1..21: mol_type = other DNA
agggatcacacgtccacgtat

SEQ ID NO: 2254 - DNA, 21 bp, synthetic construct
  source 1..21: mol_type = other DNA
gtaggcggcaactcaacctac

SEQ ID NO: 2255 - DNA, 21 bp, synthetic construct
  source 1..21: mol_type = other DNA
tacgcccgcgaaggcatgaac

SEQ ID NO: 2256 - DNA, 21 bp, synthetic construct
  source 1..21: mol_type = other DNA
aattccgggaattcctcctat

SEQ ID NO: 2257 - DNA, 21 bp, synthetic construct
  source 1..21: mol_type = other DNA
gtatcaaacaagtcagccggc

SEQ ID NO: 2258 - DNA, 21 bp, synthetic construct
  source 1..21: mol_type = other DNA
atcaacggcgtacatatggta

SEQ ID NO: 2259 - DNA, 21 bp, synthetic construct
  source 1..21: mol_type = other DNA
taccatggcggcgcccccgta

SEQ ID NO: 2260 - DNA, 21 bp, synthetic construct
  source 1..21: mol_type = other DNA
tatcacaggtccttcgatccg

SEQ ID NO: 2261 - DNA, 21 bp, synthetic construct
  source 1..21: mol_type = other DNA
tactacaccggcctgcaagcc

SEQ ID NO: 2262 - DNA, 21 bp, synthetic construct
  source 1..21: mol_type = other DNA
tttgacggcacccgcccctac

SEQ ID NO: 2263 - DNA, 21 bp, synthetic construct
  source 1..21: mol_type = other DNA
aaatccgagtattattccgat

SEQ ID NO: 2264 - DNA, 21 bp, synthetic construct
  source 1..21: mol_type = other DNA
aacgtagactacgcccgcaac

SEQ ID NO: 2265 - DNA, 21 bp, synthetic construct
  source 1..21: mol_type = other DNA
aacgccatcggcgtaacctgg

SEQ ID NO: 2266 - DNA, 21 bp, synthetic construct
  source 1..21: mol_type = other DNA
ataaatgggcactccaattat

SEQ ID NO: 2267 - DNA, 21 bp, synthetic construct
  source 1..21: mol_type = other DNA
atcaccggctacgcccaattt

SEQ ID NO: 2268 - DNA, 21 bp, synthetic construct
  source 1..21: mol_type = other DNA
ttctccaggtataatgataat

SEQ ID NO: 2269 - DNA, 21 bp, synthetic construct
  source 1..21: mol_type = other DNA
tttgccaagtttggcaccaac

SEQ ID NO: 2270 - DNA, 21 bp, synthetic construct
  source 1..21: mol_type = other DNA
tattccaggttcgggccgaat

SEQ ID NO: 2271 - DNA, 21 bp, synthetic construct
  source 1..21: mol_type = other DNA
tactcacgctacaaccccaac

SEQ ID NO: 2272 - DNA, 21 bp, synthetic construct
  source 1..21: mol_type = other DNA
tttgcccgctacggccccaac

SEQ ID NO: 2273 - DNA, 21 bp, synthetic construct
  source 1..21: mol_type = other DNA
tatgcgaggttcgggatgaat

SEQ ID NO: 2274 - DNA, 21 bp, synthetic construct
  source 1..21: mol_type = other DNA
ggctcatacaacaccacctac

SEQ ID NO: 2275 - DNA, 21 bp, synthetic construct
  source 1..21: mol_type = other DNA
ctggcccaatcaggccccaac

SEQ ID NO: 2276 - DNA, 21 bp, synthetic construct
  source 1..21: mol_type = other DNA
acgtccgggaattccacgtat

SEQ ID NO: 2277 - DNA, 21 bp, synthetic construct
  source 1..21: mol_type = other DNA
cgcgaaaacaacggctcatgg

SEQ ID NO: 2278 - DNA, 21 bp, synthetic construct
  source 1..21: mol_type = other DNA
atgcaatacgactcaggcgac

SEQ ID NO: 2279 - DNA, 21 bp, synthetic construct
  source 1..21: mol_type = other DNA
tacgccaagtacggcgaaaac

SEQ ID NO: 2280 - DNA, 21 bp, synthetic construct
  source 1..21: mol_type = other DNA
atcgacggccgcaactacgcc

SEQ ID NO: 2281 - DNA, 21 bp, synthetic construct
  source 1..21: mol_type = other DNA
ctgtggaacggcgaacaagcc

SEQ ID NO: 2282 - DNA, 21 bp, synthetic construct
  source 1..21: mol_type = other DNA
caggagggggggtccaggtat

SEQ ID NO: 2283 - DNA, 21 bp, synthetic construct
  source 1..21: mol_type = other DNA
tactttacccataccggcgaa

SEQ ID NO: 2284 - DNA, 21 bp, synthetic construct
  source 1..21: mol_type = other DNA
ttctccaggatgggggagaat

SEQ ID NO: 2285 - DNA, 21 bp, synthetic construct
  source 1..21: mol_type = other DNA
cacgataatcagtccaaatat

SEQ ID NO: 2286 - DNA, 21 bp, synthetic construct
  source 1..21: mol_type = other DNA
tacgtatcaggcaccatgaac

SEQ ID NO: 2287 - DNA, 21 bp, synthetic construct
  source 1..21: mol_type = other DNA
tggtacgccggcacccatgaa

SEQ ID NO: 2288 - DNA, 21 bp, synthetic construct
  source 1..21: mol_type = other DNA
gcggggtcctccgtggggtgg

SEQ ID NO: 2289 - DNA, 21 bp, synthetic construct
  source 1..21: mol_type = other DNA
ctgccccgcgccggcgacttt

SEQ ID NO: 2290 - DNA, 21 bp, synthetic construct
  source 1..21: mol_type = other DNA
gaagcccaaggcatgcgcaac

SEQ ID NO: 2291 - DNA, 21 bp, synthetic construct
  source 1..21: mol_type = other DNA
gaggggtccatgacgaaatgg

SEQ ID NO: 2292 - DNA, 21 bp, synthetic construct
  source 1..21: mol_type = other DNA
tacgccaagaccaacgaaaac

SEQ ID NO: 2293 - DNA, 21 bp, synthetic construct
  source 1..21: mol_type = other DNA
tacgcccgcgaaggcctgaac

SEQ ID NO: 2294 - DNA, 21 bp, synthetic construct
  source 1..21: mol_type = other DNA
tcccaggggaatacgaattgg

SEQ ID NO: 2295 - DNA, 21 bp, synthetic construct
  source 1..21: mol_type = other DNA
ttggattcctccgtgaggtat

SEQ ID NO: 2296 - DNA, 21 bp, synthetic construct
  source 1..21: mol_type = other DNA
tttgcccgcctgggctacaac

SEQ ID NO: 2297 - DNA, 21 bp, synthetic construct
  source 1..21: mol_type = other DNA
aatataaaatgggatccgcac

SEQ ID NO: 2298 - DNA, 21 bp, synthetic construct
  source 1..21: mol_type = other DNA
gaaggcaacggcacccgcaac

SEQ ID NO: 2299 - DNA, 21 bp, synthetic construct
  source 1..21: mol_type = other DNA
aatataccggggttgatatat

SEQ ID NO: 2300 - DNA, 21 bp, synthetic construct
  source 1..21: mol_type = other DNA
tacgcccgcatgaacgaaaac

SEQ ID NO: 2301 - DNA, 21 bp, synthetic construct
  source 1..21: mol_type = other DNA
gccgacgcctacaagacctac

SEQ ID NO: 2302 - DNA, 21 bp, synthetic construct
  source 1..21: mol_type = other DNA
ttctccaaaaatgggtggaat

SEQ ID NO: 2303 - DNA, 21 bp, synthetic construct
  source 1..21: mol_type = other DNA
ggcatctcaaccaacggccgc

SEQ ID NO: 2304 - DNA, 21 bp, synthetic construct
  source 1..21: mol_type = other DNA
tactcacgctttggcgacaac

SEQ ID NO: 2305 - DNA, 21 bp, synthetic construct
  source 1..21: mol_type = other DNA
tactcacgctttggcggcaac

SEQ ID NO: 2306 - DNA, 21 bp, synthetic construct
  source 1..21: mol_type = other DNA
ttttcaaagaacaactggaac

SEQ ID NO: 2307 - DNA, 21 bp, synthetic construct
  source 1..21: mol_type = other DNA
tattccaaattcgggtataat

SEQ ID NO: 2308 - DNA, 21 bp, synthetic construct
  source 1..21: mol_type = other DNA
tacgcccgctggggcgaaaac

SEQ ID NO: 2309 - DNA, 21 bp, synthetic construct
  source 1..21: mol_type = other DNA
tttgcccgctttggctcaaac

SEQ ID NO: 2310 - DNA, 21 bp, synthetic construct
  source 1..21: mol_type = other DNA
cagacggggacgtccccgtat

SEQ ID NO: 2311 - DNA, 21 bp, synthetic construct
  source 1..21: mol_type = other DNA
aataatatagatgtgaggtgg

SEQ ID NO: 2312 - DNA, 21 bp, synthetic construct
  source 1..21: mol_type = other DNA
tactcacgcgaaaacatcaac

SEQ ID NO: 2313 - DNA, 21 bp, synthetic construct
  source 1..21: mol_type = other DNA
cagaataatgggtccccgtat

SEQ ID NO: 2314 - DNA, 21 bp, synthetic construct
  source 1..21: mol_type = other DNA
ctgaactcactggccgcctac

SEQ ID NO: 2315 - DNA, 21 bp, synthetic construct
  source 1..21: mol_type = other DNA
tcaaacggcggcaccacctgg

SEQ ID NO: 2316 - DNA, 21 bp, synthetic construct
  source 1..21: mol_type = other DNA
tattccaatatagggccgaat

SEQ ID NO: 2317 - DNA, 21 bp, synthetic construct
  source 1..21: mol_type = other DNA
tcaggcggcaccgccctgtac

SEQ ID NO: 2318 - DNA, 21 bp, synthetic construct
  source 1..21: mol_type = other DNA
cgcgccggcatgcccggcgcc

SEQ ID NO: 2319 - DNA, 21 bp, synthetic construct
  source 1..21: mol_type = other DNA
tactcaaaggaaaactggaac

SEQ ID NO: 2320 - DNA, 21 bp, synthetic construct
  source 1..21: mol_type = other DNA
acccgcgccggcaacggcgcc

SEQ ID NO: 2321 - DNA, 21 bp, synthetic construct
  source 1..21: mol_type = other DNA
aaccaaggcaacaacacctgg

SEQ ID NO: 2322 - DNA, 21 bp, synthetic construct
  source 1..21: mol_type = other DNA
atagagtatcactccgggaat

SEQ ID NO: 2323 - DNA, 21 bp, synthetic construct
  source 1..21: mol_type = other DNA
gtatcaggctcatcagcctac

SEQ ID NO: 2324 - DNA, 21 bp, synthetic construct
  source 1..21: mol_type = other DNA
tacgcccgcgaaaactacaac

SEQ ID NO: 2325 - DNA, 21 bp, synthetic construct
  source 1..21: mol_type = other DNA
aggcaggcggatacgtatccg

SEQ ID NO: 2326 - DNA, 21 bp, synthetic construct
  source 1..21: mol_type = other DNA
gactcatcaggccaacgctac

SEQ ID NO: 2327 - DNA, 21 bp, synthetic construct
  source 1..21: mol_type = other DNA
ggcatccaaaaccaatcatgg

SEQ ID NO: 2328 - DNA, 21 bp, synthetic construct
  source 1..21: mol_type = other DNA
gtaggcggcaactcaggctac

SEQ ID NO: 2329 - DNA, 21 bp, synthetic construct
  source 1..21: mol_type = other DNA
gtggggaatgggtccttgtat

SEQ ID NO: 2330 - DNA, 21 bp, synthetic construct
  source 1..21: mol_type = other DNA
ggcggcggcgtagcccattac

SEQ ID NO: 2331 - DNA, 21 bp, synthetic construct
  source 1..21: mol_type = other DNA
accggctcatcaacctcatgg

SEQ ID NO: 2332 - DNA, 21 bp, synthetic construct
  source 1..21: mol_type = other DNA
tattccagggataatcacaat

SEQ ID NO: 2333 - DNA, 21 bp, synthetic construct
  source 1..21: mol_type = other DNA
gtgcagtatgagtccagggat

SEQ ID NO: 2334 - DNA, 21 bp, synthetic construct
  source 1..21: mol_type = other DNA
tccgggaatgggtccttcata

SEQ ID NO: 2335 - DNA, 21 bp, synthetic construct
  source 1..21: mol_type = other DNA
tacacctcaaacaccaagtac

SEQ ID NO: 2336 - DNA, 21 bp, synthetic construct
  source 1..21: mol_type = other DNA
tactcaaagggcggcgacaac

SEQ ID NO: 2337 - DNA, 21 bp, synthetic construct
  source 1..21: mol_type = other DNA
taccatgacaacggccgcaac

SEQ ID NO: 2338 - DNA, 21 bp, synthetic construct
  source 1..21: mol_type = other DNA
tcagccggcaactcaacctac

SEQ ID NO: 2339 - DNA, 21 bp, synthetic construct
  source 1..21: mol_type = other DNA
tcaggcaccggcaacggctgg

SEQ ID NO: 2340 - DNA, 21 bp, synthetic construct
  source 1..21: mol_type = other DNA
tactcacgccccaacgaaaac

SEQ ID NO: 2341 - DNA, 21 bp, synthetic construct
  source 1..21: mol_type = other DNA
accaacgaatggggcggccat

SEQ ID NO: 2342 - DNA, 21 bp, synthetic construct
  source 1..21: mol_type = other DNA
aggccgccggagtataattcc

SEQ ID NO: 2343 - DNA, 21 bp, synthetic construct
  source 1..21: mol_type = other DNA
ataacgaattatcaccacgag

SEQ ID NO: 2344 - DNA, 21 bp, synthetic construct
  source 1..21: mol_type = other DNA
aacggcacctcatcaggctgg

SEQ ID NO: 2345 - DNA, 21 bp, synthetic construct
  source 1..21: mol_type = other DNA
accatgtcaaacacctactca

SEQ ID NO: 2346 - DNA, 21 bp, synthetic construct
  source 1..21: mol_type = other DNA
tattccgggtcccagcactat

SEQ ID NO: 2347 - DNA, 21 bp, synthetic construct
  source 1..21: mol_type = other DNA
tactcacgcgaaggcatcaac

SEQ ID NO: 2348 - DNA, 21 bp, synthetic construct
  source 1..21: mol_type = other DNA
cgcaacgaaacctcagcctac

SEQ ID NO: 2349 - DNA, 21 bp, synthetic construct
  source 1..21: mol_type = other DNA
agggatgggtataatgggttc

SEQ ID NO: 2350 - DNA, 21 bp, synthetic construct
  source 1..21: mol_type = other DNA
tacgcccgcgaaggcatcaac

SEQ ID NO: 2351 - DNA, 21 bp, synthetic construct
  source 1..21: mol_type = other DNA
ggcctgggcggcaacccctac

SEQ ID NO: 2352 - DNA, 21 bp, synthetic construct
  source 1..21: mol_type = other DNA
gtgaatataaatacggcgtgg

SEQ ID NO: 2353 - DNA, 21 bp, synthetic construct
  source 1..21: mol_type = other DNA
tactgggactcaacccattca

SEQ ID NO: 2354 - DNA, 21 bp, synthetic construct
  source 1..21: mol_type = other DNA
tattccaaagataatatgaat

SEQ ID NO: 2355 - DNA, 21 bp, synthetic construct
  source 1..21: mol_type = other DNA
gacaagaacacctcaaactgg

SEQ ID NO: 2356 - DNA, 21 bp, synthetic construct
  source 1..21: mol_type = other DNA
ttctccaaacacaatgagaat

SEQ ID NO: 2357 - DNA, 21 bp, synthetic construct
  source 1..21: mol_type = other DNA
ttttcatcaaccaacggcacc

SEQ ID NO: 2358 - DNA, 21 bp, synthetic construct
  source 1..21: mol_type = other DNA
tacgccaaggtaggcgaaaac

SEQ ID NO: 2359 - DNA, 21 bp, synthetic construct
  source 1..21: mol_type = other DNA
ttttcacgcctgggcgccaac

SEQ ID NO: 2360 - DNA, 21 bp, synthetic construct
  source 1..21: mol_type = other DNA
tcaaccggcatctcatcatac

SEQ ID NO: 2361 - DNA, 21 bp, synthetic construct
  source 1..21: mol_type = other DNA
tattccaaagagaattgtaat

SEQ ID NO: 2362 - DNA, 21 bp, synthetic construct
  source 1..21: mol_type = other DNA
aactcaggcgccgcctcatgg

SEQ ID NO: 2363 - DNA, 21 bp, synthetic construct
  source 1..21: mol_type = other DNA
tacgcccgcgacggcctgaac

SEQ ID NO: 2364 - DNA, 21 bp, synthetic construct
  source 1..21: mol_type = other DNA
ttgttgtccaatcagacgtgg

SEQ ID NO: 2365 - DNA, 21 bp, synthetic construct
  source 1..21: mol_type = other DNA
tactcacgcgacggcaacaac

SEQ ID NO: 2366 - DNA, 21 bp, synthetic construct
  source 1..21: mol_type = other DNA
tactcaaaggaaggctttaac

SEQ ID NO: 2367 - DNA, 21 bp, synthetic construct
  source 1..21: mol_type = other DNA
tatgcgaaagaggggttcaat

SEQ ID NO: 2368 - DNA, 21 bp, synthetic construct
  source 1..21: mol_type = other DNA
tactcacgcaccaactcagac

SEQ ID NO: 2369 - DNA, 21 bp, synthetic construct
  source 1..21: mol_type = other DNA
gtggcgtccgatcacgggagg

SEQ ID NO: 2370 - DNA, 21 bp, synthetic construct
  source 1..21: mol_type = other DNA
accaacgaaggctcagcctgg

SEQ ID NO: 2371 - DNA, 21 bp, synthetic construct
  source 1..21: mol_type = other DNA
aatgataaagggtatgggtcc

SEQ ID NO: 2372 - DNA, 21 bp, synthetic construct
  source 1..21: mol_type = other DNA
aataattatgggacgccgttc

SEQ ID NO: 2373 - DNA, 21 bp, synthetic construct
  source 1..21: mol_type = other DNA
gagatatccagggggcacatg

SEQ ID NO: 2374 - DNA, 21 bp, synthetic construct
  source 1..21: mol_type = other DNA
gaagaatttggccaacgcaac

SEQ ID NO: 2375 - DNA, 21 bp, synthetic construct
  source 1..21: mol_type = other DNA
accatgaccggctttggcgcc

SEQ ID NO: 2376 - DNA, 21 bp, synthetic construct
  source 1..21: mol_type = other DNA
aacatcaacggcaccggccgc

SEQ ID NO: 2377 - DNA, 21 bp, synthetic construct
  source 1..21: mol_type = other DNA
ggcgccggctcatcatcatac

SEQ ID NO: 2378 - DNA, 21 bp, synthetic construct
  source 1..21: mol_type = other DNA
cgcaacgacgaagccaagtgg

SEQ ID NO: 2379 - DNA, 21 bp, synthetic construct
  source 1..21: mol_type = other DNA
ctgcatgccacccaacccaac

SEQ ID NO: 2380 - DNA, 21 bp, synthetic construct
  source 1..21: mol_type = other DNA
tggaacaccggcgtacattac

SEQ ID NO: 2381 - DNA, 21 bp, synthetic construct
  source 1..21: mol_type = other DNA
tcagccggcacctcatcatac

SEQ ID NO: 2382 - DNA, 21 bp, synthetic construct
  source 1..21: mol_type = other DNA
accggcgaagccccccgcaac

SEQ ID NO: 2383 - DNA, 21 bp, synthetic construct
  source 1..21: mol_type = other DNA
gactaccaaggcaccaacccc

SEQ ID NO: 2384 - DNA, 21 bp, synthetic construct
  source 1..21: mol_type = other DNA
gggatatccatgataatgccg

SEQ ID NO: 2385 - DNA, 21 bp, synthetic construct
  source 1..21: mol_type = other DNA
gagaaaaatacggggtgggat

SEQ ID NO: 2386 - DNA, 21 bp, synthetic construct
  source 1..21: mol_type = other DNA
tattccaaattcgggaataat

SEQ ID NO: 2387 - DNA, 21 bp, synthetic construct
  source 1..21: mol_type = other DNA
tattccagggagaatgtgaat

SEQ ID NO: 2388 - DNA, 21 bp, synthetic construct
  source 1..21: mol_type = other DNA
tcatcagaaggcacccgctac

SEQ ID NO: 2389 - DNA, 21 bp, synthetic construct
  source 1..21: mol_type = other DNA
acccccaagtcaaactacgcc

SEQ ID NO: 2390 - DNA, 21 bp, synthetic construct
  source 1..21: mol_type = other DNA
gataatagggggacggggtcc

SEQ ID NO: 2391 - DNA, 21 bp, synthetic construct
  source 1..21: mol_type = other DNA
ttggcgaattcccactgggat

SEQ ID NO: 2392 - DNA, 21 bp, synthetic construct
  source 1..21: mol_type = other DNA
gaaggcggcaagtcaccctac

SEQ ID NO: 2393 - DNA, 21 bp, synthetic construct
  source 1..21: mol_type = other DNA
catggcgaatcagccggctgg

SEQ ID NO: 2394 - DNA, 21 bp, synthetic construct
  source 1..21: mol_type = other DNA
atctcacaagaacgctacggc

SEQ ID NO: 2395 - DNA, 21 bp, synthetic construct
  source 1..21: mol_type = other DNA
tattccaaagataattataat

SEQ ID NO: 2396 - DNA, 21 bp, synthetic construct
  source 1..21: mol_type = other DNA
ttctccagggataatccgaat

SEQ ID NO: 2397 - DNA, 21 bp, synthetic construct
  source 1..21: mol_type = other DNA
tttgcccgcgacaactttaac

SEQ ID NO: 2398 - DNA, 21 bp, synthetic construct
  source 1..21: mol_type = other DNA
tttgccaagtttggcgccaac

SEQ ID NO: 2399 - DNA, 21 bp, synthetic construct
  source 1..21: mol_type = other DNA
aacatgtaccccacccccggc

SEQ ID NO: 2400 - DNA, 21 bp, synthetic construct
  source 1..21: mol_type = other DNA
tactcacgctttggcgccaac

SEQ ID NO: 2401 - DNA, 21 bp, synthetic construct
  source 1..21: mol_type = other DNA
ttctccaggttcgggaataat

SEQ ID NO: 2402 - DNA, 21 bp, synthetic construct
  source 1..21: mol_type = other DNA
tattccaaatgggggacgaat

SEQ ID NO: 2403 - DNA, 21 bp, synthetic construct
  source 1..21: mol_type = other DNA
tattccaggtggggggagaat

SEQ ID NO: 2404 - DNA, 21 bp, synthetic construct
  source 1..21: mol_type = other DNA
tttgccaagtggggccaaaac

SEQ ID NO: 2405 - DNA, 21 bp, synthetic construct
  source 1..21: mol_type = other DNA
aaccaatcacccatccccgta

SEQ ID NO: 2406 - DNA, 21 bp, synthetic construct
  source 1..21: mol_type = other DNA
ggcggcaacacctcaacctac

SEQ ID NO: 2407 - DNA, 21 bp, synthetic construct
  source 1..21: mol_type = other DNA
agggcggtggatgcgtattcc

SEQ ID NO: 2408 - DNA, 21 bp, synthetic construct
  source 1..21: mol_type = other DNA
accatgggcaccaacccctac

SEQ ID NO: 2409 - DNA, 21 bp, synthetic construct
  source 1..21: mol_type = other DNA
gacaaccgcaacgtagcctgg

SEQ ID NO: 2410 - DNA, 21 bp, synthetic construct
  source 1..21: mol_type = other DNA
aagtcagtagactacggctca

SEQ ID NO: 2411 - DNA, 21 bp, synthetic construct
  source 1..21: mol_type = other DNA
ggcaactcaggcgccaactgg

SEQ ID NO: 2412 - DNA, 21 bp, synthetic construct
  source 1..21: mol_type = other DNA
tacgaacaaggctggcgcgac

SEQ ID NO: 2413 - DNA, 21 bp, synthetic construct
  source 1..21: mol_type = other DNA
gataatgggaatgcgaggtat

SEQ ID NO: 2414 - DNA, 21 bp, synthetic construct
  source 1..21: mol_type = other DNA
tacatgggcggcgaaatggta

SEQ ID NO: 2415 - DNA, 21 bp, synthetic construct
  source 1..21: mol_type = other DNA
gactttggctcaaacggccgc

SEQ ID NO: 2416 - DNA, 21 bp, synthetic construct
  source 1..21: mol_type = other DNA
ggccaagactactcaacctac

SEQ ID NO: 2417 - DNA, 21 bp, synthetic construct
  source 1..21: mol_type = other DNA
aacgcctacggcgtaccccgc

SEQ ID NO: 2418 - DNA, 21 bp, synthetic construct
  source 1..21: mol_type = other DNA
tcagccgaatcataccgcaac

SEQ ID NO: 2419 - DNA, 21 bp, synthetic construct
  source 1..21: mol_type = other DNA
tatacgcacttcgagttcgat

SEQ ID NO: 2420 - DNA, 21 bp, synthetic construct
  source 1..21: mol_type = other DNA
cgctcacaagacaccgcctgg

SEQ ID NO: 2421 - DNA, 21 bp, synthetic construct
  source 1..21: mol_type = other DNA
atctcaggcgccaccgccggc

SEQ ID NO: 2422 - DNA, 21 bp, synthetic construct
  source 1..21: mol_type = other DNA
tactcacgcgacggcgccaac

SEQ ID NO: 2423 - DNA, 21 bp, synthetic construct
  source 1..21: mol_type = other DNA
tacgccaagtggggccaaaac

SEQ ID NO: 2424 - DNA, 21 bp, synthetic construct
  source 1..21: mol_type = other DNA
ggggggggggcgacggcgtat

SEQ ID NO: 2425 - DNA, 21 bp, synthetic construct
  source 1..21: mol_type = other DNA
ttttcacgcgaaaaccccaac

SEQ ID NO: 2426 - DNA, 21 bp, synthetic construct
  source 1..21: mol_type = other DNA
ctgaagtacgaacatgccgac

SEQ ID NO: 2427 - DNA, 21 bp, synthetic construct
  source 1..21: mol_type = other DNA
aacgtatcagaactgcgctgg

SEQ ID NO: 2428 - DNA, 21 bp, synthetic construct
  source 1..21: mol_type = other DNA
taccaatcaggcgaaatgaac

SEQ ID NO: 2429 - DNA, 21 bp, synthetic construct
  source 1..21: mol_type = other DNA
tactcacgcgaaaacgacaac

SEQ ID NO: 2430 - DNA, 21 bp, synthetic construct
  source 1..21: mol_type = other DNA
acccgcaccggcgacggcgcc

SEQ ID NO: 2431 - DNA, 21 bp, synthetic construct
  source 1..21: mol_type = other DNA
tggcgccaaggcgaaatggaa

SEQ ID NO: 2432 - DNA, 21 bp, synthetic construct
  source 1..21: mol_type = other DNA
gtaggcaccatcggccgcgac

SEQ ID NO: 2433 - DNA, 21 bp, synthetic construct
  source 1..21: mol_type = other DNA
tcatcaaccggcaacggctgg

SEQ ID NO: 2434 - DNA, 21 bp, synthetic construct
  source 1..21: mol_type = other DNA
cgcggcgaaacctcaacctac

SEQ ID NO: 2435 - DNA, 21 bp, synthetic construct
  source 1..21: mol_type = other DNA
tattccaaatggggggagaat

SEQ ID NO: 2436 - DNA, 21 bp, synthetic construct
  source 1..21: mol_type = other DNA
cacgatgcgaaatccatgtat

SEQ ID NO: 2437 - DNA, 21 bp, synthetic construct
  source 1..21: mol_type = other DNA
gacaccgaccatatgcgcttt

SEQ ID NO: 2438 - DNA, 21 bp, synthetic construct
  source 1..21: mol_type = other DNA
cgctcagacggcggctacggc

SEQ ID NO: 2439 - DNA, 21 bp, synthetic construct
  source 1..21: mol_type = other DNA
ttttcacgcgacggccccaac

SEQ ID NO: 2440 - DNA, 21 bp, synthetic construct
  source 1..21: mol_type = other DNA
accaccggctcaaaccccttt

SEQ ID NO: 2441 - DNA, 21 bp, synthetic construct
  source 1..21: mol_type = other DNA
tttgcccgcgccggcgaaaac

SEQ ID NO: 2442 - DNA, 21 bp, synthetic construct
  source 1..21: mol_type = other DNA
cattcaaagaacaacgacaac

SEQ ID NO: 2443 - DNA, 21 bp, synthetic construct
  source 1..21: mol_type = other DNA
tacatccgccatgaaacccaa

SEQ ID NO: 2444 - DNA, 21 bp, synthetic construct
  source 1..21: mol_type = other DNA
aacggctcacaatcatcatac

SEQ ID NO: 2445 - DNA, 21 bp, synthetic construct
  source 1..21: mol_type = other DNA
tactcaggcggcggcatgccc

SEQ ID NO: 2446 - DNA, 21 bp, synthetic construct
  source 1..21: mol_type = other DNA
atgggctcatcaaacgcctgg

SEQ ID NO: 2447 - DNA, 21 bp, synthetic construct
  source 1..21: mol_type = other DNA
aacctgcaagcctcatcatgg

SEQ ID NO: 2448 - DNA, 21 bp, synthetic construct
  source 1..21: mol_type = other DNA
ttctccaggtataatgcgaat

SEQ ID NO: 2449 - DNA, 21 bp, synthetic construct
  source 1..21: mol_type = other DNA
aagggcgccgacgtatacccc

SEQ ID NO: 2450 - DNA, 21 bp, synthetic construct
  source 1..21: mol_type = other DNA
gtagactcaacctcaggccgc

SEQ ID NO: 2451 - DNA, 21 bp, synthetic construct
  source 1..21: mol_type = other DNA
aacatgcatggcatccccatg

SEQ ID NO: 2452 - DNA, 21 bp, synthetic construct
  source 1..21: mol_type = other DNA
ttggcgacgacgacgaattgg

SEQ ID NO: 2453 - DNA, 21 bp, synthetic construct
  source 1..21: mol_type = other DNA
tacgtaatggaaaaccgcaac

SEQ ID NO: 2454 - DNA, 21 bp, synthetic construct
  source 1..21: mol_type = other DNA
tactcacgcgacggctggaac

SEQ ID NO: 2455 - DNA, 21 bp, synthetic construct
  source 1..21: mol_type = other DNA
tactcacgcgacggcgacaac

SEQ ID NO: 2456 - DNA, 21 bp, synthetic construct
  source 1..21: mol_type = other DNA
gtacatgactcaggcggccgc

SEQ ID NO: 2457 - DNA, 21 bp, synthetic construct
  source 1..21: mol_type = other DNA
ttcgcgagggatgggccgaat

SEQ ID NO: 2458 - DNA, 21 bp, synthetic construct
  source 1..21: mol_type = other DNA
ttttcacgcgaaaacatcaac

SEQ ID NO: 2459 - DNA, 21 bp, synthetic construct
  source 1..21: mol_type = other DNA
ggcctgaagaactaccccgcc

SEQ ID NO: 2460 - DNA, 21 bp, synthetic construct
  source 1..21: mol_type = other DNA
tactcacgcgaaggcaccaac

SEQ ID NO: 2461 - DNA, 21 bp, synthetic construct
  source 1..21: mol_type = other DNA
gtgtccccgtcctccgtgtgg

SEQ ID NO: 2462 - DNA, 21 bp, synthetic construct
  source 1..21: mol_type = other DNA
ggcatccccaacatcgcctac

SEQ ID NO: 2463 - DNA, 21 bp, synthetic construct
  source 1..21: mol_type = other DNA
gaaggccataacggccgcgac

SEQ ID NO: 2464 - DNA, 21 bp, synthetic construct
  source 1..21: mol_type = other DNA
gactcaacctcagtaacctgg

SEQ ID NO: 2465 - DNA, 21 bp, synthetic construct
  source 1..21: mol_type = other DNA
ggctcaggcctggtagcctac

SEQ ID NO: 2466 - DNA, 21 bp, synthetic construct
  source 1..21: mol_type = other DNA
atgtcaggccaaggcgccggc

SEQ ID NO: 2467 - DNA, 21 bp, synthetic construct
  source 1..21: mol_type = other DNA
atgaaaaatggggatgcgtcc

SEQ ID NO: 2468 - DNA, 21 bp, synthetic construct
  source 1..21: mol_type = other DNA
agggatgatgtgtccgcgtat

SEQ ID NO: 2469 - DNA, 21 bp, synthetic construct
  source 1..21: mol_type = other DNA
cactgggcgtccaatgggatg

SEQ ID NO: 2470 - DNA, 21 bp, synthetic construct
  source 1..21: mol_type = other DNA
tacgccgtatcaggcgccggc

SEQ ID NO: 2471 - DNA, 21 bp, synthetic construct
  source 1..21: mol_type = other DNA
ctggacggcttttcagcccgc

SEQ ID NO: 2472 - DNA, 21 bp, synthetic construct
  source 1..21: mol_type = other DNA
gaacaatggggcaacggcgac

SEQ ID NO: 2473 - DNA, 21 bp, synthetic construct
  source 1..21: mol_type = other DNA
tacgccaagtttggccataac

SEQ ID NO: 2474 - DNA, 21 bp, synthetic construct
  source 1..21: mol_type = other DNA
aatgtggatgggatggcgtgg

SEQ ID NO: 2475 - DNA, 21 bp, synthetic construct
  source 1..21: mol_type = other DNA
tcaaaccccggctcagtatac

SEQ ID NO: 2476 - DNA, 21 bp, synthetic construct
  source 1..21: mol_type = other DNA
tactcaaacctgtcaatgccc

SEQ ID NO: 2477 - DNA, 21 bp, synthetic construct
  source 1..21: mol_type = other DNA
cgccaagtagacgtatacgcc

SEQ ID NO: 2478 - DNA, 21 bp, synthetic construct
  source 1..21: mol_type = other DNA
atagatgggacgaatgggagg

SEQ ID NO: 2479 - DNA, 21 bp, synthetic construct
  source 1..21: mol_type = other DNA
ttgcacggggggccggcgccg

SEQ ID NO: 2480 - DNA, 21 bp, synthetic construct
  source 1..21: mol_type = other DNA
tacgccaaggacggcatgaac

SEQ ID NO: 2481 - DNA, 21 bp, synthetic construct
  source 1..21: mol_type = other DNA
tcctccggggagtccttgtat

SEQ ID NO: 2482 - DNA, 21 bp, synthetic construct
  source 1..21: mol_type = other DNA
cgcgaccccggctacgtagta

SEQ ID NO: 2483 - DNA, 21 bp, synthetic construct
  source 1..21: mol_type = other DNA
cagggggggacgacgtcctat

SEQ ID NO: 2484 - DNA, 21 bp, synthetic construct
  source 1..21: mol_type = other DNA
ttttcacgcgaaggctggaac

SEQ ID NO: 2485 - DNA, 21 bp, synthetic construct
  source 1..21: mol_type = other DNA
tatgcgaggttcggggcgaat

SEQ ID NO: 2486 - DNA, 21 bp, synthetic construct
  source 1..21: mol_type = other DNA
acctcagcctcaaacggcgta

SEQ ID NO: 2487 - DNA, 21 bp, synthetic construct
  source 1..21: mol_type = other DNA
acgaatccgaatgtggcgtgg

SEQ ID NO: 2488 - DNA, 21 bp, synthetic construct
  source 1..21: mol_type = other DNA
tacgcccgcgacaactacaac

SEQ ID NO: 2489 - DNA, 21 bp, synthetic construct
  source 1..21: mol_type = other DNA
ttctccaggttcgggcagaat

SEQ ID NO: 2490 - DNA, 21 bp, synthetic construct
  source 1..21: mol_type = other DNA
ggcgaacgcctggtaacctac

SEQ ID NO: 2491 - DNA, 21 bp, synthetic construct
  source 1..21: mol_type = other DNA
acgccgttgtccccgtcctgg

SEQ ID NO: 2492 - DNA, 21 bp, synthetic construct
  source 1..21: mol_type = other DNA
ttctccaggtatggggagaat

SEQ ID NO: 2493 - DNA, 21 bp, synthetic construct
  source 1..21: mol_type = other DNA
tttgcccgcctgggcgacaac

SEQ ID NO: 2494 - DNA, 21 bp, synthetic construct
  source 1..21: mol_type = other DNA
tattccagggagaatgagaat

SEQ ID NO: 2495 - DNA, 21 bp, synthetic construct
  source 1..21: mol_type = other DNA
tttgcccgcgacaacatgaac

SEQ ID NO: 2496 - DNA, 21 bp, synthetic construct
  source 1..21: mol_type = other DNA
gtaggcgaagccggctacttt

SEQ ID NO: 2497 - DNA, 21 bp, synthetic construct
  source 1..21: mol_type = other DNA
tatgcgaggttcgggcagaat

SEQ ID NO: 2498 - DNA, 21 bp, synthetic construct
  source 1..21: mol_type = other DNA
ttttcacgctttggcgaaaac

SEQ ID NO: 2499 - DNA, 21 bp, synthetic construct
  source 1..21: mol_type = other DNA
ttgaaagatgggaggtccgcg

SEQ ID NO: 2500 - DNA, 21 bp, synthetic construct
  source 1..21: mol_type = other DNA
atcgccacccgcggcatcgac

SEQ ID NO: 2501 - DNA, 21 bp, synthetic construct
  source 1..21: mol_type = other DNA
gcggattccgcgtcctcctgg

SEQ ID NO: 2502 - DNA, 21 bp, synthetic construct
  source 1..21: mol_type = other DNA
aaccaacccggctcacatatg

SEQ ID NO: 2503 - DNA, 21 bp, synthetic construct
  source 1..21: mol_type = other DNA
tttgcccgccccggccataac

SEQ ID NO: 2504 - DNA, 21 bp, synthetic construct
  source 1..21: mol_type = other DNA
ttttcacgctacggcgacaac

SEQ ID NO: 2505 - DNA, 21 bp, synthetic construct
  source 1..21: mol_type = other DNA
tacgcccgcgacggcggcaac

SEQ ID NO: 2506 - DNA, 21 bp, synthetic construct
  source 1..21: mol_type = other DNA
tcaggctcatcaaccggctac

SEQ ID NO: 2507 - DNA, 21 bp, synthetic construct
  source 1..21: mol_type = other DNA
ggcaacggcgccggctactca

SEQ ID NO: 2508 - DNA, 21 bp, synthetic construct
  source 1..21: mol_type = other DNA
aaccattcaggcgacccctca

SEQ ID NO: 2509 - DNA, 21 bp, synthetic construct
  source 1..21: mol_type = other DNA
gaggatgggaaaggggggtgg

SEQ ID NO: 2510 - DNA, 21 bp, synthetic construct
  source 1..21: mol_type = other DNA
tattccaaagataatgggaat

SEQ ID NO: 2511 - DNA, 21 bp, synthetic construct
  source 1..21: mol_type = other DNA
tactcacgctttggcgtaaac

SEQ ID NO: 2512 - DNA, 21 bp, synthetic construct
  source 1..21: mol_type = other DNA
aacacctacggcaccggcgaa

SEQ ID NO: 2513 - DNA, 21 bp, synthetic construct
  source 1..21: mol_type = other DNA
ttctccccgaatgtggtgttc

SEQ ID NO: 2514 - DNA, 21 bp, synthetic construct
  source 1..21: mol_type = other DNA
tactcaaaggaaggcatgaac

SEQ ID NO: 2515 - DNA, 21 bp, synthetic construct
  source 1..21: mol_type = other DNA
aacggcgaagccggccgctac

SEQ ID NO: 2516 - DNA, 21 bp, synthetic construct
  source 1..21: mol_type = other DNA
ttggaggggcagtatgggaat

SEQ ID NO: 2517 - DNA, 21 bp, synthetic construct
  source 1..21: mol_type = other DNA
ttttcaaaggaaaacggcaac

SEQ ID NO: 2518 - DNA, 21 bp, synthetic construct
  source 1..21: mol_type = other DNA
gcgttggaggggcactcctgg

SEQ ID NO: 2519 - DNA, 21 bp, synthetic construct
  source 1..21: mol_type = other DNA
tacgccaaggaaaaccccaac

SEQ ID NO: 2520 - DNA, 21 bp, synthetic construct
  source 1..21: mol_type = other DNA
tacgccaagtttggcgccaac

SEQ ID NO: 2521 - DNA, 21 bp, synthetic construct
  source 1..21: mol_type = other DNA
ttctccaaagataatgcgaat

SEQ ID NO: 2522 - DNA, 21 bp, synthetic construct
  source 1..21: mol_type = other DNA
gccaaccatgacgtaggctgg

SEQ ID NO: 2523 - DNA, 21 bp, synthetic construct
  source 1..21: mol_type = other DNA
gaacccccctcactgcgctac

SEQ ID NO: 2524 - DNA, 21 bp, synthetic construct
  source 1..21: mol_type = other DNA
ggctcaaacgactcacgctac

SEQ ID NO: 2525 - DNA, 21 bp, synthetic construct
  source 1..21: mol_type = other DNA
ttctccaaattcgggtccaat

SEQ ID NO: 2526 - DNA, 21 bp, synthetic construct
  source 1..21: mol_type = other DNA
ggcctgaaggactcagcctgg

SEQ ID NO: 2527 - DNA, 21 bp, synthetic construct
  source 1..21: mol_type = other DNA
tcaaaggaacatggctacgcc

SEQ ID NO: 2528 - DNA, 21 bp, synthetic construct
  source 1..21: mol_type = other DNA
tattccagggataatttgaat

SEQ ID NO: 2529 - DNA, 21 bp, synthetic construct
  source 1..21: mol_type = other DNA
ttttcaaagtttggcctgaac

SEQ ID NO: 2530 - DNA, 21 bp, synthetic construct
  source 1..21: mol_type = other DNA
atccaatacgaaaacggcggc

SEQ ID NO: 2531 - DNA, 21 bp, synthetic construct
  source 1..21: mol_type = other DNA
ggctacaactactcaggcgcc

SEQ ID NO: 2532 - DNA, 21 bp, synthetic construct
  source 1..21: mol_type = other DNA
atcatgtcagccgacgcctgg

SEQ ID NO: 2533 - DNA, 21 bp, synthetic construct
  source 1..21: mol_type = other DNA
tactcacgctttggcgaaaac

SEQ ID NO: 2534 - DNA, 21 bp, synthetic construct
  source 1..21: mol_type = other DNA
gatatgaaagggaatgtggcg

SEQ ID NO: 2535 - DNA, 21 bp, synthetic construct
  source 1..21: mol_type = other DNA
tttgccaagtttggctcaaac

SEQ ID NO: 2536 - DNA, 21 bp, synthetic construct
  source 1..21: mol_type = other DNA
acctcagaccgcgacggccgc

SEQ ID NO: 2537 - DNA, 21 bp, synthetic construct
  source 1..21: mol_type = other DNA
aaccatgccggcaacggcgcc

SEQ ID NO: 2538 - DNA, 21 bp, synthetic construct
  source 1..21: mol_type = other DNA
aacgaagcctcaggcggctgg

SEQ ID NO: 2539 - DNA, 21 bp, synthetic construct
  source 1..21: mol_type = other DNA
ttttcaaagtttggccaaaac

SEQ ID NO: 2540 - DNA, 21 bp, synthetic construct
  source 1..21: mol_type = other DNA
aacatgaccggcaacggcgcc

SEQ ID NO: 2541 - DNA, 21 bp, synthetic construct
  source 1..21: mol_type = other DNA
aacggcaccggcgccacctac

SEQ ID NO: 2542 - DNA, 21 bp, synthetic construct
  source 1..21: mol_type = other DNA
tattccaaattcgggacgaat

SEQ ID NO: 2543 - DNA, 21 bp, synthetic construct
  source 1..21: mol_type = other DNA
gcctcaatcgacggccccaag

SEQ ID NO: 2544 - DNA, 21 bp, synthetic construct
  source 1..21: mol_type = other DNA
tcagaccgcggctcaggcgcc

SEQ ID NO: 2545 - DNA, 21 bp, synthetic construct
  source 1..21: mol_type = other DNA
tattccaaattcggggagaat

SEQ ID NO: 2546 - DNA, 21 bp, synthetic construct
  source 1..21: mol_type = other DNA
tttatgtcatcaaacggcgcc

SEQ ID NO: 2547 - DNA, 21 bp, synthetic construct
  source 1..21: mol_type = other DNA
ttttcaaaggaaaactacaac

SEQ ID NO: 2548 - DNA, 21 bp, synthetic construct
  source 1..21: mol_type = other DNA
tacaccaactacaacggcgcc

SEQ ID NO: 2549 - DNA, 21 bp, synthetic construct
  source 1..21: mol_type = other DNA
tggcgcgactcaaacggcgcc

SEQ ID NO: 2550 - DNA, 21 bp, synthetic construct
  source 1..21: mol_type = other DNA
tacgccaagtggggcaccaac

SEQ ID NO: 2551 - DNA, 21 bp, synthetic construct
  source 1..21: mol_type = other DNA
tttgccaagtggggcgaaaac

SEQ ID NO: 2552 - DNA, 21 bp, synthetic construct
  source 1..21: mol_type = other DNA
tatttcagggatcacgcgccg

SEQ ID NO: 2553 - DNA, 21 bp, synthetic construct
  source 1..21: mol_type = other DNA
tacgcccgctttggcgacaac

SEQ ID NO: 2554 - DNA, 21 bp, synthetic construct
  source 1..21: mol_type = other DNA
accgcctacggcgacggcgcc

SEQ ID NO: 2555 - DNA, 21 bp, synthetic construct
  source 1..21: mol_type = other DNA
tattccaggcagaattataat

SEQ ID NO: 2556 - DNA, 21 bp, synthetic construct
  source 1..21: mol_type = other DNA
tatgcgaggatggggtataat

SEQ ID NO: 2557 - DNA, 21 bp, synthetic construct
  source 1..21: mol_type = other DNA
tatgcgagggggaattataat

SEQ ID NO: 2558 - DNA, 21 bp, synthetic construct
  source 1..21: mol_type = other DNA
tattccaggtccaattataat

SEQ ID NO: 2559 - DNA, 21 bp, synthetic construct
  source 1..21: mol_type = other DNA
tattccaggttgaattataat

SEQ ID NO: 2560 - DNA, 21 bp, synthetic construct
  source 1..21: mol_type = other DNA
ttctccagggtgaatataaat

SEQ ID NO: 2561 - DNA, 21 bp, synthetic construct
  source 1..21: mol_type = other DNA
tattccaggcacgggcagaat

SEQ ID NO: 2562 - DNA, 21 bp, synthetic construct
  source 1..21: mol_type = other DNA
tattccaggcaggggtataat

SEQ ID NO: 2563 - DNA, 21 bp, synthetic construct
  source 1..21: mol_type = other DNA
ttctccaggttggggataaat

SEQ ID NO: 2564 - DNA, 21 bp, synthetic construct
  source 1..21: mol_type = other DNA
tatgcgaggatgaatataaat

SEQ ID NO: 2565 - DNA, 21 bp, synthetic construct
  source 1..21: mol_type = other DNA
tattccagggcgaattataat

SEQ ID NO: 2566 - DNA, 21 bp, synthetic construct
  source 1..21: mol_type = other DNA
tattccaggttgaatataaat

SEQ ID NO: 2567 - DNA, 21 bp, synthetic construct
  source 1..21: mol_type = other DNA
ttcgcgaggggggggtataat

SEQ ID NO: 2568 - DNA, 21 bp, synthetic construct
  source 1..21: mol_type = other DNA
ttttcacgcgccaaccataac

SEQ ID NO: 2569 - DNA, 21 bp, synthetic construct
  source 1..21: mol_type = other DNA
ttctccagggcggggtataat

SEQ ID NO: 2570 - DNA, 21 bp, synthetic construct
  source 1..21: mol_type = other DNA
ttttcaaagatgaactacaac

SEQ ID NO: 2571 - DNA, 21 bp, synthetic construct
  source 1..21: mol_type = other DNA
ttcgcgaggttgaatataaat

SEQ ID NO: 2572 - DNA, 21 bp, synthetic construct
  source 1..21: mol_type = other DNA
tattccaaacagaatataaat

SEQ ID NO: 2573 - DNA, 21 bp, synthetic construct
  source 1..21: mol_type = other DNA
ttcgcgaggacgaattataat

SEQ ID NO: 2574 - DNA, 21 bp, synthetic construct
  source 1..21: mol_type = other DNA
tatgcgaggatagggtataat

SEQ ID NO: 2575 - DNA, 21 bp, synthetic construct
  source 1..21: mol_type = other DNA
tattccaaattgaataataat

SEQ ID NO: 2576 - DNA, 21 bp, synthetic construct
  source 1..21: mol_type = other DNA
tatgcgaaattcaattataat

SEQ ID NO: 2577 - DNA, 21 bp, synthetic construct
  source 1..21: mol_type = other DNA
tatgcgaggcagaattataat

SEQ ID NO: 2578 - DNA, 21 bp, synthetic construct
  source 1..21: mol_type = other DNA
ttctccagggcgaattataat

SEQ ID NO: 2579 - DNA, 21 bp, synthetic construct
  source 1..21: mol_type = other DNA
tatgcgaaagcggggtataat

SEQ ID NO: 2580 - DNA, 21 bp, synthetic construct
  source 1..21: mol_type = other DNA
tattccaggacgaatataaat

SEQ ID NO: 2581 - DNA, 21 bp, synthetic construct
  source 1..21: mol_type = other DNA
tattccaaaatggggtataat

SEQ ID NO: 2582 - DNA, 21 bp, synthetic construct
  source 1..21: mol_type = other DNA
ttctccaggataaataataat

SEQ ID NO: 2583 - DNA, 21 bp, synthetic construct
  source 1..21: mol_type = other DNA
ttctccagggcgaatataaat

SEQ ID NO: 2584 - DNA, 21 bp, synthetic construct
  source 1..21: mol_type = other DNA
tattccaggttgaataataat

SEQ ID NO: 2585 - DNA, 21 bp, synthetic construct
  source 1..21: mol_type = other DNA
tatgcgagggcggggaataat

SEQ ID NO: 2586 - DNA, 21 bp, synthetic construct
  source 1..21: mol_type = other DNA
tattccaaattgaatataaat

SEQ ID NO: 2587 - DNA, 21 bp, synthetic construct
  source 1..21: mol_type = other DNA
ttttcacgcctgaaccataac

SEQ ID NO: 2588 - DNA, 21 bp, synthetic construct
  source 1..21: mol_type = other DNA
tattccaggcagaataataat

SEQ ID NO: 2589 - DNA, 21 bp, synthetic construct
  source 1..21: mol_type = other DNA
ttcgcgaggatagggccgaat

SEQ ID NO: 2590 - DNA, 21 bp, synthetic construct
  source 1..21: mol_type = other DNA
tattccagggggaattataat

SEQ ID NO: 2591 - DNA, 21 bp, synthetic construct
  source 1..21: mol_type = other DNA
tacgcccgctacggcgtaaac

SEQ ID NO: 2592 - DNA, 21 bp, synthetic construct
  source 1..21: mol_type = other DNA
tactcacgcctgaactttaac

SEQ ID NO: 2593 - DNA, 21 bp, synthetic construct
  source 1..21: mol_type = other DNA
tatgcgaaatatgggtataat

SEQ ID NO: 2594 - DNA, 21 bp, synthetic construct
  source 1..21: mol_type = other DNA
tacgcccgcatgggctttaac

SEQ ID NO: 2595 - DNA, 21 bp, synthetic construct
  source 1..21: mol_type = other DNA
tattccaaagcgaatatgaat

SEQ ID NO: 2596 - DNA, 21 bp, synthetic construct
  source 1..21: mol_type = other DNA
ttctccaaaataaatataaat

SEQ ID NO: 2597 - DNA, 21 bp, synthetic construct
  source 1..21: mol_type = other DNA
tactcacgctacaacgccaac

SEQ ID NO: 2598 - DNA, 21 bp, synthetic construct
  source 1..21: mol_type = other DNA
tatgcgagggcggggtataat

SEQ ID NO: 2599 - DNA, 21 bp, synthetic construct
  source 1..21: mol_type = other DNA
ttctccagggcggggaataat

SEQ ID NO: 2600 - DNA, 21 bp, synthetic construct
  source 1..21: mol_type = other DNA
ttctccaaaatagggtataat

SEQ ID NO: 2601 - DNA, 21 bp, synthetic construct
  source 1..21: mol_type = other DNA
tattccaaacacaattataat

SEQ ID NO: 2602 - DNA, 21 bp, synthetic construct
  source 1..21: mol_type = other DNA
tatgcgaggacggggtataat

SEQ ID NO: 2603 - DNA, 21 bp, synthetic construct
  source 1..21: mol_type = other DNA
tattccaggaatgggaataat

SEQ ID NO: 2604 - DNA, 21 bp, synthetic construct
  source 1..21: mol_type = other DNA
tacgcccgcggcggctacaac

SEQ ID NO: 2605 - DNA, 21 bp, synthetic construct
  source 1..21: mol_type = other DNA
tattccagggcggggtataat

SEQ ID NO: 2606 - DNA, 21 bp, synthetic construct
  source 1..21: mol_type = other DNA
tatgcgaaaacggggtataat

SEQ ID NO: 2607 - DNA, 21 bp, synthetic construct
  source 1..21: mol_type = other DNA
tattccaaagggaattgtaat

SEQ ID NO: 2608 - DNA, 21 bp, synthetic construct
  source 1..21: mol_type = other DNA
tatgcgaaaatggggtataat

SEQ ID NO: 2609 - DNA, 21 bp, synthetic construct
  source 1..21: mol_type = other DNA
ttcgcgaggaatgggtataat

SEQ ID NO: 2610 - DNA, 21 bp, synthetic construct
  source 1..21: mol_type = other DNA
ttctccaggaataatatgaat

SEQ ID NO: 2611 - DNA, 21 bp, synthetic construct
  source 1..21: mol_type = other DNA
tattccaggcagaatatgaat

SEQ ID NO: 2612 - DNA, 21 bp, synthetic construct
  source 1..21: mol_type = other DNA
tattccaggaataatatgaat

SEQ ID NO: 2613 - DNA, 21 bp, synthetic construct
  source 1..21: mol_type = other DNA
tattccaaaaggaatgagaat

SEQ ID NO: 2614 - DNA, 21 bp, synthetic construct
  source 1..21: mol_type = other DNA
tattccaaagcggggtggaat

SEQ ID NO: 2615 - DNA, 21 bp, synthetic construct
  source 1..21: mol_type = other DNA
tatgcgaggcacaatttcaat

SEQ ID NO: 2616 - DNA, 21 bp, synthetic construct
  source 1..21: mol_type = other DNA
tatgcgagggcgaattataat

SEQ ID NO: 2617 - DNA, 21 bp, synthetic construct
  source 1..21: mol_type = other DNA
tatgcgaggtatgggccgaat

SEQ ID NO: 2618 - DNA, 21 bp, synthetic construct
  source 1..21: mol_type = other DNA
ttttcacgctcaggccataac

SEQ ID NO: 2619 - DNA, 21 bp, synthetic construct
  source 1..21: mol_type = other DNA
tacgccaaggtaggcaagaac

SEQ ID NO: 2620 - DNA, 21 bp, synthetic construct
  source 1..21: mol_type = other DNA
tactcacgccaaaaccataac

SEQ ID NO: 2621 - DNA, 21 bp, synthetic construct
  source 1..21: mol_type = other DNA
ttctccaggatgaatttgaat

SEQ ID NO: 2622 - DNA, 21 bp, synthetic construct
  source 1..21: mol_type = other DNA
ttcgcgaggtccgggtataat

SEQ ID NO: 2623 - DNA, 21 bp, synthetic construct
  source 1..21: mol_type = other DNA
tacgccaagcatggccataac

SEQ ID NO: 2624 - DNA, 21 bp, synthetic construct
  source 1..21: mol_type = other DNA
tatgcgaggggggggataaat

SEQ ID NO: 2625 - DNA, 21 bp, synthetic construct
  source 1..21: mol_type = other DNA
ttctccaaagtggggtataat

SEQ ID NO: 2626 - DNA, 21 bp, synthetic construct
  source 1..21: mol_type = other DNA
tatgcgaggcaggggtataat

SEQ ID NO: 2627 - DNA, 21 bp, synthetic construct
  source 1..21: mol_type = other DNA
tacgccaagtacggccccaac

SEQ ID NO: 2628 - DNA, 21 bp, synthetic construct
  source 1..21: mol_type = other DNA
tattccaggcacaatccgaat

SEQ ID NO: 2629 - DNA, 21 bp, synthetic construct
  source 1..21: mol_type = other DNA
tattccagggtggggataaat

SEQ ID NO: 2630 - DNA, 21 bp, synthetic construct
  source 1..21: mol_type = other DNA
tccgggtcctatacgaattat

SEQ ID NO: 2631 - DNA, 21 bp, synthetic construct
  source 1..21: mol_type = other DNA
tatgcgagggggaataataat

SEQ ID NO: 2632 - DNA, 21 bp, synthetic construct
  source 1..21: mol_type = other DNA
tatgcgagggtggggaataat

SEQ ID NO: 2633 - DNA, 21 bp, synthetic construct
  source 1..21: mol_type = other DNA
ttctccaaatccgggtataat

SEQ ID NO: 2634 - DNA, 21 bp, synthetic construct
  source 1..21: mol_type = other DNA
tatgcgaaagtggggtataat

SEQ ID NO: 2635 - DNA, 21 bp, synthetic construct
  source 1..21: mol_type = other DNA
ttctccaggttggggcacaat

SEQ ID NO: 2636 - DNA, 21 bp, synthetic construct
  source 1..21: mol_type = other DNA
tgtgcgccggcggggagggat

SEQ ID NO: 2637 - DNA, 21 bp, synthetic construct
  source 1..21: mol_type = other DNA
tattccaggtccgggttcaat

SEQ ID NO: 2638 - DNA, 21 bp, synthetic construct
  source 1..21: mol_type = other DNA
ttttcacgcgtaggccccaac

SEQ ID NO: 2639 - DNA, 21 bp, synthetic construct
  source 1..21: mol_type = other DNA
ttttcaaagtttggccccaac

SEQ ID NO: 2640 - DNA, 21 bp, synthetic construct
  source 1..21: mol_type = other DNA
tattccaggcacaatttcaat

SEQ ID NO: 2641 - DNA, 21 bp, synthetic construct
  source 1..21: mol_type = other DNA
tatgcgaggcaggggataaat

SEQ ID NO: 2642 - DNA, 21 bp, synthetic construct
  source 1..21: mol_type = other DNA
tattccaaaacggggtataat

SEQ ID NO: 2643 - DNA, 21 bp, synthetic construct
  source 1..21: mol_type = other DNA
tattccaggtccgggcacaat

SEQ ID NO: 2644 - DNA, 21 bp, synthetic construct
  source 1..21: mol_type = other DNA
ttctccaggatagggcacaat

SEQ ID NO: 2645 - DNA, 21 bp, synthetic construct
  source 1..21: mol_type = other DNA
tactcacgcaagaacgacaac

SEQ ID NO: 2646 - DNA, 21 bp, synthetic construct
  source 1..21: mol_type = other DNA
tatgcgaggaatgggtataat

SEQ ID NO: 2647 - DNA, 21 bp, synthetic construct
  source 1..21: mol_type = other DNA
aggggggatgggcactataat

SEQ ID NO: 2648 - DNA, 21 bp, synthetic construct
  source 1..21: mol_type = other DNA
tattccaggacggggtataat

SEQ ID NO: 2649 - DNA, 21 bp, synthetic construct
  source 1..21: mol_type = other DNA
tattccaggcacgggataaat

SEQ ID NO: 2650 - DNA, 21 bp, synthetic construct
  source 1..21: mol_type = other DNA
tattccagggcgaatccgaat

SEQ ID NO: 2651 - DNA, 21 bp, synthetic construct
  source 1..21: mol_type = other DNA
tattccaggacgaatatgaat

SEQ ID NO: 2652 - DNA, 21 bp, synthetic construct
  source 1..21: mol_type = other DNA
tatgcgaggtccgggataaat

SEQ ID NO: 2653 - DNA, 21 bp, synthetic construct
  source 1..21: mol_type = other DNA
ttctccaggttggggaataat

SEQ ID NO: 2654 - DNA, 21 bp, synthetic construct
  source 1..21: mol_type = other DNA
tatcacaggttggggatagat

SEQ ID NO: 2655 - DNA, 21 bp, synthetic construct
  source 1..21: mol_type = other DNA
tattccaggaatgggataaat

SEQ ID NO: 2656 - DNA, 21 bp, synthetic construct
  source 1..21: mol_type = other DNA
tatgcgaggttgaataataat

SEQ ID NO: 2657 - DNA, 21 bp, synthetic construct
  source 1..21: mol_type = other DNA
ttctccagggcgaatatgaat

SEQ ID NO: 2658 - DNA, 21 bp, synthetic construct
  source 1..21: mol_type = other DNA
tatgcgagggggaatatgaat

SEQ ID NO: 2659 - DNA, 21 bp, synthetic construct
  source 1..21: mol_type = other DNA
tacgcccgctcaaaccccaac

SEQ ID NO: 2660 - DNA, 21 bp, synthetic construct
  source 1..21: mol_type = other DNA
tacgcccgctacggcaacaac

SEQ ID NO: 2661 - DNA, 21 bp, synthetic construct
  source 1..21: mol_type = other DNA
tattccaaacacgggtataat

SEQ ID NO: 2662 - DNA, 21 bp, synthetic construct
  source 1..21: mol_type = other DNA
ttcgcgaggcaggggaataat

SEQ ID NO: 2663 - DNA, 21 bp, synthetic construct
  source 1..21: mol_type = other DNA
ctgcataagctgctggtaggc

SEQ ID NO: 2664 - DNA, 21 bp, synthetic construct
  source 1..21: mol_type = other DNA
ttcgcgaggacggggataaat

SEQ ID NO: 2665 - DNA, 21 bp, synthetic construct
  source 1..21: mol_type = other DNA
ttcgcgagggcggggtataat

SEQ ID NO: 2666 - DNA, 21 bp, synthetic construct
  source 1..21: mol_type = other DNA
tttgcccgccaaggccccaac

SEQ ID NO: 2667 - DNA, 21 bp, synthetic construct
  source 1..21: mol_type = other DNA
ttcgcgaggggggggataaat

SEQ ID NO: 2668 - DNA, 21 bp, synthetic construct
  source 1..21: mol_type = other DNA
ttctccaggaaaaatgagaat

SEQ ID NO: 2669 - DNA, 21 bp, synthetic construct
  source 1..21: mol_type = other DNA
tatgcgaggttggggaataat

SEQ ID NO: 2670 - DNA, 21 bp, synthetic construct
  source 1..21: mol_type = other DNA
ttcgcgaggcaggggataaat

SEQ ID NO: 2671 - DNA, 21 bp, synthetic construct
  source 1..21: mol_type = other DNA
tattccaaattcaataataat

SEQ ID NO: 2672 - DNA, 21 bp, synthetic construct
  source 1..21: mol_type = other DNA
ttctccaggatagggccgaat

SEQ ID NO: 2673 - DNA, 21 bp, synthetic construct
  source 1..21: mol_type = other DNA
tattccaggggggggccgaat

SEQ ID NO: 2674 - DNA, 21 bp, synthetic construct
  source 1..21: mol_type = other DNA
tatgcgaggttcgggccgaat

SEQ ID NO: 2675 - DNA, 21 bp, synthetic construct
  source 1..21: mol_type = other DNA
ttctccaaaatggggtataat

SEQ ID NO: 2676 - DNA, 21 bp, synthetic construct
  source 1..21: mol_type = other DNA
tattccaggtccaatcacaat

SEQ ID NO: 2677 - DNA, 21 bp, synthetic construct
  source 1..21: mol_type = other DNA
tatgcgaggcacaattataat

SEQ ID NO: 2678 - DNA, 21 bp, synthetic construct
  source 1..21: mol_type = other DNA
tattccaaacacgggccgaat

SEQ ID NO: 2679 - DNA, 21 bp, synthetic construct
  source 1..21: mol_type = other DNA
ttcgcgagggtggggtataat

SEQ ID NO: 2680 - DNA, 21 bp, synthetic construct
  source 1..21: mol_type = other DNA
tatgcgaggtatgggataaat

SEQ ID NO: 2681 - DNA, 21 bp, synthetic construct
  source 1..21: mol_type = other DNA
tattccaggatggggcacaat

SEQ ID NO: 2682 - DNA, 21 bp, synthetic construct
  source 1..21: mol_type = other DNA
tattccagggggaatgcgaat

SEQ ID NO: 2683 - DNA, 21 bp, synthetic construct
  source 1..21: mol_type = other DNA
tttgccaagtacggccccaac

SEQ ID NO: 2684 - DNA, 21 bp, synthetic construct
  source 1..21: mol_type = other DNA
tattccagggcggggataaat

SEQ ID NO: 2685 - DNA, 21 bp, synthetic construct
  source 1..21: mol_type = other DNA
tatgcgaggacggggataaat

SEQ ID NO: 2686 - DNA, 21 bp, synthetic construct
  source 1..21: mol_type = other DNA
ttttcacgcaccggctacaac

SEQ ID NO: 2687 - DNA, 21 bp, synthetic construct
  source 1..21: mol_type = other DNA
tactcacgcgccggctttaac

SEQ ID NO: 2688 - DNA, 21 bp, synthetic construct
  source 1..21: mol_type = other DNA
ttttcacgcgccaacaccaac

SEQ ID NO: 2689 - DNA, 21 bp, synthetic construct
  source 1..21: mol_type = other DNA
tattccaggatagggtataat

SEQ ID NO: 2690 - DNA, 21 bp, synthetic construct
  source 1..21: mol_type = other DNA
tatgcgaggatgaataataat

SEQ ID NO: 2691 - DNA, 21 bp, synthetic construct
  source 1..21: mol_type = other DNA
tattccaaaaggaatgataat

SEQ ID NO: 2692 - DNA, 21 bp, synthetic construct
  source 1..21: mol_type = other DNA
tatgcgaaagtggggtggaat

SEQ ID NO: 2693 - DNA, 21 bp, synthetic construct
  source 1..21: mol_type = other DNA
tatgcgaggaatgcgaataat

SEQ ID NO: 2694 - DNA, 21 bp, synthetic construct
  source 1..21: mol_type = other DNA
tacgcccgcgccggcatgaac

SEQ ID NO: 2695 - DNA, 21 bp, synthetic construct
  source 1..21: mol_type = other DNA
tatgcgaaattgaattataat

SEQ ID NO: 2696 - DNA, 21 bp, synthetic construct
  source 1..21: mol_type = other DNA
tattccaggtatgggacgaat

SEQ ID NO: 2697 - DNA, 21 bp, synthetic construct
  source 1..21: mol_type = other DNA
tttgcccgcggcggccataac

SEQ ID NO: 2698 - DNA, 21 bp, synthetic construct
  source 1..21: mol_type = other DNA
tattccagggtgaattataat

SEQ ID NO: 2699 - DNA, 21 bp, synthetic construct
  source 1..21: mol_type = other DNA
ttttcacgccatggctcaaac

SEQ ID NO: 2700 - DNA, 21 bp, synthetic construct
  source 1..21: mol_type = other DNA
tatataaaatccgataaaatg

SEQ ID NO: 2701 - DNA, 21 bp, synthetic construct
  source 1..21: mol_type = other DNA
ttcgcgaggtccgggaataat

SEQ ID NO: 2702 - DNA, 21 bp, synthetic construct
  source 1..21: mol_type = other DNA
ttcgcgaggtccgggataaat

SEQ ID NO: 2703 - DNA, 21 bp, synthetic construct
  source 1..21: mol_type = other DNA
tactcacgcaccaactttaac

SEQ ID NO: 2704 - DNA, 21 bp, synthetic construct
  source 1..21: mol_type = other DNA
tatgcgaggatagggtccaat

SEQ ID NO: 2705 - DNA, 21 bp, synthetic construct
  source 1..21: mol_type = other DNA
ttctccaaagggaattataat

SEQ ID NO: 2706 - DNA, 21 bp, synthetic construct
  source 1..21: mol_type = other DNA
tattccaaagcgggggataat

SEQ ID NO: 2707 - DNA, 21 bp, synthetic construct
  source 1..21: mol_type = other DNA
accgtagaccatgtaaagtgg

SEQ ID NO: 2708 - DNA, 21 bp, synthetic construct
  source 1..21: mol_type = other DNA
tattccaggatggggataaat

SEQ ID NO: 2709 - DNA, 21 bp, synthetic construct
  source 1..21: mol_type = other DNA
tattccaaaggggggtggaat

SEQ ID NO: 2710 - DNA, 21 bp, synthetic construct
  source 1..21: mol_type = other DNA
tatgcgaggggggcgaataat

SEQ ID NO: 2711 - DNA, 21 bp, synthetic construct
  source 1..21: mol_type = other DNA
tattccagggtgaatatgaat

SEQ ID NO: 2712 - DNA, 21 bp, synthetic construct
  source 1..21: mol_type = other DNA
tttgcccgccaaggccataac

SEQ ID NO: 2713 - DNA, 21 bp, synthetic construct
  source 1..21: mol_type = other DNA
tattccaggatagggataaat

SEQ ID NO: 2714 - DNA, 21 bp, synthetic construct
  source 1..21: mol_type = other DNA
tattccaaacacgggataaat

SEQ ID NO: 2715 - DNA, 21 bp, synthetic construct
  source 1..21: mol_type = other DNA
tacgcccgcggcaaccataac

SEQ ID NO: 2716 - DNA, 21 bp, synthetic construct
  source 1..21: mol_type = other DNA
tattccaggatgaattataat

SEQ ID NO: 2717 - DNA, 21 bp, synthetic construct
  source 1..21: mol_type = other DNA
tactcacgccataacatgaac

SEQ ID NO: 2718 - DNA, 21 bp, synthetic construct
  source 1..21: mol_type = other DNA
tatgcgaggcacgggataaat

SEQ ID NO: 2719 - DNA, 21 bp, synthetic construct
  source 1..21: mol_type = other DNA
tattccaggatggggtccaat

SEQ ID NO: 2720 - DNA, 21 bp, synthetic construct
  source 1..21: mol_type = other DNA
tattccaggataaataataat

SEQ ID NO: 2721 - DNA, 21 bp, synthetic construct
  source 1..21: mol_type = other DNA
ttctccaaagtggggaataat

SEQ ID NO: 2722 - DNA, 21 bp, synthetic construct
  source 1..21: mol_type = other DNA
tattccaaacacgggttgaat

SEQ ID NO: 2723 - DNA, 21 bp, synthetic construct
  source 1..21: mol_type = other DNA
tattccaggatggggttcaat

SEQ ID NO: 2724 - DNA, 21 bp, synthetic construct
  source 1..21: mol_type = other DNA
tattccaggaataatgtgaat

SEQ ID NO: 2725 - DNA, 21 bp, synthetic construct
  source 1..21: mol_type = other DNA
tattccaggaataatataaat

SEQ ID NO: 2726 - DNA, 21 bp, synthetic construct
  source 1..21: mol_type = other DNA
tactcacgctacggcgtaaac

SEQ ID NO: 2727 - DNA, 21 bp, synthetic construct
  source 1..21: mol_type = other DNA
ttcgcgaggcacaatataaat

SEQ ID NO: 2728 - DNA, 21 bp, synthetic construct
  source 1..21: mol_type = other DNA
tattccaggcacgggtccaat

SEQ ID NO: 2729 - DNA, 21 bp, synthetic construct
  source 1..21: mol_type = other DNA
ttctccaaacacaataataat

SEQ ID NO: 2730 - DNA, 21 bp, synthetic construct
  source 1..21: mol_type = other DNA
tatgcgaggatagggataaat

SEQ ID NO: 2731 - DNA, 21 bp, synthetic construct
  source 1..21: mol_type = other DNA
tacgcccgccatggccataac

SEQ ID NO: 2732 - DNA, 21 bp, synthetic construct
  source 1..21: mol_type = other DNA
ttctccaggcagaataataat

SEQ ID NO: 2733 - DNA, 21 bp, synthetic construct
  source 1..21: mol_type = other DNA
tattccaggcacaatgtgaat

SEQ ID NO: 2734 - DNA, 21 bp, synthetic construct
  source 1..21: mol_type = other DNA
ttcgcgagggggaataataat

SEQ ID NO: 2735 - DNA, 21 bp, synthetic construct
  source 1..21: mol_type = other DNA
ttcgcgaaaggggggtataat

SEQ ID NO: 2736 - DNA, 21 bp, synthetic construct
  source 1..21: mol_type = other DNA
ttcgcgaggcagaatataaat

SEQ ID NO: 2737 - DNA, 21 bp, synthetic construct
  source 1..21: mol_type = other DNA
ttctccaggttgaatgtgaat

SEQ ID NO: 2738 - DNA, 21 bp, synthetic construct
  source 1..21: mol_type = other DNA
tattccaggacgaatccgaat

SEQ ID NO: 2739 - DNA, 21 bp, synthetic construct
  source 1..21: mol_type = other DNA
ttctccagggcggggataaat

SEQ ID NO: 2740 - DNA, 21 bp, synthetic construct
  source 1..21: mol_type = other DNA
tattccaggataaatcacaat

SEQ ID NO: 2741 - DNA, 21 bp, synthetic construct
  source 1..21: mol_type = other DNA
tatgcggcgtccgggaggaat

SEQ ID NO: 2742 - DNA, 21 bp, synthetic construct
  source 1..21: mol_type = other DNA
ttctccaggcagaattataat

SEQ ID NO: 2743 - DNA, 21 bp, synthetic construct
  source 1..21: mol_type = other DNA
ttctccaggatgaatgtgaat

SEQ ID NO: 2744 - DNA, 21 bp, synthetic construct
  source 1..21: mol_type = other DNA
ttcgcgaggtatgggcagaat

SEQ ID NO: 2745 - DNA, 21 bp, synthetic construct
  source 1..21: mol_type = other DNA
ttctccaggttgaattccaat

SEQ ID NO: 2746 - DNA, 21 bp, synthetic construct
  source 1..21: mol_type = other DNA
tattccaaagtgaattggaat

SEQ ID NO: 2747 - DNA, 21 bp, synthetic construct
  source 1..21: mol_type = other DNA
tatgcgaaattcgggccgaat

SEQ ID NO: 2748 - DNA, 21 bp, synthetic construct
  source 1..21: mol_type = other DNA
tatgcgagggggaatttgaat

SEQ ID NO: 2749 - DNA, 21 bp, synthetic construct
  source 1..21: mol_type = other DNA
ttctccaggacgaataataat

SEQ ID NO: 2750 - DNA, 21 bp, synthetic construct
  source 1..21: mol_type = other DNA
ttttcacgctcaggctacaac

SEQ ID NO: 2751 - DNA, 21 bp, synthetic construct
  source 1..21: mol_type = other DNA
ttgcacagggcggcggggaat

SEQ ID NO: 2752 - DNA, 21 bp, synthetic construct
  source 1..21: mol_type = other DNA
ttcgcgaggcacgggccgaat

SEQ ID NO: 2753 - DNA, 21 bp, synthetic construct
  source 1..21: mol_type = other DNA
tatgcgaaattcaataataat

SEQ ID NO: 2754 - DNA, 21 bp, synthetic construct
  source 1..21: mol_type = other DNA
aacgtagccgaacgcaagtgg

SEQ ID NO: 2755 - DNA, 21 bp, synthetic construct
  source 1..21: mol_type = other DNA
ttcgcgagggcgaataataat

SEQ ID NO: 2756 - DNA, 21 bp, synthetic construct
  source 1..21: mol_type = other DNA
ttctccaaaatagggaataat

SEQ ID NO: 2757 - DNA, 21 bp, synthetic construct
  source 1..21: mol_type = other DNA
tatgcgagggcggggtccaat

SEQ ID NO: 2758 - DNA, 21 bp, synthetic construct
  source 1..21: mol_type = other DNA
tattccaggcaggggcacaat

SEQ ID NO: 2759 - DNA, 21 bp, synthetic construct
  source 1..21: mol_type = other DNA
ttttcacgcgccaactcaaac

SEQ ID NO: 2760 - DNA, 21 bp, synthetic construct
  source 1..21: mol_type = other DNA
ttcgcgaggtccgcgaataat

SEQ ID NO: 2761 - DNA, 21 bp, synthetic construct
  source 1..21: mol_type = other DNA
tattccaggcagaatttgaat

SEQ ID NO: 2762 - DNA, 21 bp, synthetic construct
  source 1..21: mol_type = other DNA
tatgcgaaaggggggataaat

SEQ ID NO: 2763 - DNA, 21 bp, synthetic construct
  source 1..21: mol_type = other DNA
tatgcgagggcgaatcacaat

SEQ ID NO: 2764 - DNA, 21 bp, synthetic construct
  source 1..21: mol_type = other DNA
tattccaggttgaatcacaat

SEQ ID NO: 2765 - DNA, 21 bp, synthetic construct
  source 1..21: mol_type = other DNA
tactcacgcgccaaccataac

SEQ ID NO: 2766 - DNA, 21 bp, synthetic construct
  source 1..21: mol_type = other DNA
tacgcccgccatggctcaaac

SEQ ID NO: 2767 - DNA, 21 bp, synthetic construct
  source 1..21: mol_type = other DNA
tacgcccgcatcggcgtaaac

SEQ ID NO: 2768 - DNA, 21 bp, synthetic construct
  source 1..21: mol_type = other DNA
tactcacgcgccaactttaac

SEQ ID NO: 2769 - DNA, 21 bp, synthetic construct
  source 1..21: mol_type = other DNA
ttttcacgcctgaacatgaac

SEQ ID NO: 2770 - DNA, 21 bp, synthetic construct
  source 1..21: mol_type = other DNA
tattccaggtccaatacgaat

SEQ ID NO: 2771 - DNA, 21 bp, synthetic construct
  source 1..21: mol_type = other DNA
tatgcgaggatagggcagaat

SEQ ID NO: 2772 - DNA, 21 bp, synthetic construct
  source 1..21: mol_type = other DNA
tattccaggtccgggatgaat

SEQ ID NO: 2773 - DNA, 21 bp, synthetic construct
  source 1..21: mol_type = other DNA
tatgcgaggcacgggtataat

SEQ ID NO: 2774 - DNA, 21 bp, synthetic construct
  source 1..21: mol_type = other DNA
tatgcgaaacacgggataaat

SEQ ID NO: 2775 - DNA, 21 bp, synthetic construct
  source 1..21: mol_type = other DNA
tatgcgaggttggggtataat

SEQ ID NO: 2776 - DNA, 21 bp, synthetic construct
  source 1..21: mol_type = other DNA
tttgcccgccatggctttaac

SEQ ID NO: 2777 - DNA, 21 bp, synthetic construct
  source 1..21: mol_type = other DNA
tattccaggtccgggcagaat

SEQ ID NO: 2778 - DNA, 21 bp, synthetic construct
  source 1..21: mol_type = other DNA
tattccaggaatgggcacaat

SEQ ID NO: 2779 - DNA, 21 bp, synthetic construct
  source 1..21: mol_type = other DNA
tattccaggatgggggtgaat

SEQ ID NO: 2780 - DNA, 21 bp, synthetic construct
  source 1..21: mol_type = other DNA
tacgccaagtcaggctggaac

SEQ ID NO: 2781 - DNA, 21 bp, synthetic construct
  source 1..21: mol_type = other DNA
ttctccagggtggggacgaat

SEQ ID NO: 2782 - DNA, 21 bp, synthetic construct
  source 1..21: mol_type = other DNA
ttcgcgaggttggggataaat

SEQ ID NO: 2783 - DNA, 21 bp, synthetic construct
  source 1..21: mol_type = other DNA
ttctccaaattggggccgaat

SEQ ID NO: 2784 - DNA, 21 bp, synthetic construct
  source 1..21: mol_type = other DNA
ttctccaggaataatcacaat

SEQ ID NO: 2785 - DNA, 21 bp, synthetic construct
  source 1..21: mol_type = other DNA
tatgcgaggaataattataat

SEQ ID NO: 2786 - DNA, 21 bp, synthetic construct
  source 1..21: mol_type = other DNA
ttttcacgcatcggcatcaac

SEQ ID NO: 2787 - DNA, 21 bp, synthetic construct
  source 1..21: mol_type = other DNA
ttttcacgcctgaaccaaaac

SEQ ID NO: 2788 - DNA, 21 bp, synthetic construct
  source 1..21: mol_type = other DNA
tactcacgcatcggcatgaac

SEQ ID NO: 2789 - DNA, 21 bp, synthetic construct
  source 1..21: mol_type = other DNA
tactcacgcaacggctttaac

SEQ ID NO: 2790 - DNA, 21 bp, synthetic construct
  source 1..21: mol_type = other DNA
tatgcgaggttgaatcacaat

SEQ ID NO: 2791 - DNA, 21 bp, synthetic construct
  source 1..21: mol_type = other DNA
tatgcgaggcaggggtccaat

SEQ ID NO: 2792 - DNA, 21 bp, synthetic construct
  source 1..21: mol_type = other DNA
tattccaaatggaatacgaat

SEQ ID NO: 2793 - DNA, 21 bp, synthetic construct
  source 1..21: mol_type = other DNA
ttcgcgaggtccaatatgaat

SEQ ID NO: 2794 - DNA, 21 bp, synthetic construct
  source 1..21: mol_type = other DNA
tactcacgcgtaggctacaac

SEQ ID NO: 2795 - DNA, 21 bp, synthetic construct
  source 1..21: mol_type = other DNA
tacgtacgctcacaaaacctg

SEQ ID NO: 2796 - DNA, 21 bp, synthetic construct
  source 1..21: mol_type = other DNA
ttctccaggataaatatgaat

SEQ ID NO: 2797 - DNA, 21 bp, synthetic construct
  source 1..21: mol_type = other DNA
tattccaaaatgaatccgaat

SEQ ID NO: 2798 - DNA, 21 bp, synthetic construct
  source 1..21: mol_type = other DNA
tattccagggggaatatgaat

SEQ ID NO: 2799 - DNA, 21 bp, synthetic construct
  source 1..21: mol_type = other DNA
ttctccaaatataatataaat

SEQ ID NO: 2800 - DNA, 21 bp, synthetic construct
  source 1..21: mol_type = other DNA
tattccagggtggggaataat

SEQ ID NO: 2801 - DNA, 21 bp, synthetic construct
  source 1..21: mol_type = other DNA
tttgccaagtcaggccccaac

SEQ ID NO: 2802 - DNA, 21 bp, synthetic construct
  source 1..21: mol_type = other DNA
ttcgcgaggtccgggttcaat

SEQ ID NO: 2803 - DNA, 21 bp, synthetic construct
  source 1..21: mol_type = other DNA
tattccaggatgaatcagaat

SEQ ID NO: 2804 - DNA, 21 bp, synthetic construct
  source 1..21: mol_type = other DNA
tatgcgaggatggggaataat

SEQ ID NO: 2805 - DNA, 21 bp, synthetic construct
  source 1..21: mol_type = other DNA
ttctccaggggggggataaat

SEQ ID NO: 2806 - DNA, 21 bp, synthetic construct
  source 1..21: mol_type = other DNA
tattccaggtccgggaataat

SEQ ID NO: 2807 - DNA, 21 bp, synthetic construct
  source 1..21: mol_type = other DNA
tattccaggtccaatgcgaat

SEQ ID NO: 2808 - DNA, 21 bp, synthetic construct
  source 1..21: mol_type = other DNA
tactcacgcggcaaccccaac

SEQ ID NO: 2809 - DNA, 21 bp, synthetic construct
  source 1..21: mol_type = other DNA
ttttcacgcgccggcctgaac

SEQ ID NO: 2810 - DNA, 21 bp, synthetic construct
  source 1..21: mol_type = other DNA
tacgcccgcggcggcatgaac

SEQ ID NO: 2811 - DNA, 21 bp, synthetic construct
  source 1..21: mol_type = other DNA
ttttcaaagctgaactacaac

SEQ ID NO: 2812 - DNA, 21 bp, synthetic construct
  source 1..21: mol_type = other DNA
ttttcacgcatcggccaaaac

SEQ ID NO: 2813 - DNA, 21 bp, synthetic construct
  source 1..21: mol_type = other DNA
tacgcccgctcaggcctgaac

SEQ ID NO: 2814 - DNA, 21 bp, synthetic construct
  source 1..21: mol_type = other DNA
tacgcccgccaaaaccataac

SEQ ID NO: 2815 - DNA, 21 bp, synthetic construct
  source 1..21: mol_type = other DNA
tactcacgcggcaaccataac

SEQ ID NO: 2816 - DNA, 21 bp, synthetic construct
  source 1..21: mol_type = other DNA
ttttcacgcgtaggcatcaac

SEQ ID NO: 2817 - DNA, 21 bp, synthetic construct
  source 1..21: mol_type = other DNA
tattccagggtgaatcacaat

SEQ ID NO: 2818 - DNA, 21 bp, synthetic construct
  source 1..21: mol_type = other DNA
ttctccaggatggggccgaat

SEQ ID NO: 2819 - DNA, 21 bp, synthetic construct
  source 1..21: mol_type = other DNA
tattccaaagtggggtggaat

SEQ ID NO: 2820 - DNA, 21 bp, synthetic construct
  source 1..21: mol_type = other DNA
tattccaggcaggggttcaat

SEQ ID NO: 2821 - DNA, 21 bp, synthetic construct
  source 1..21: mol_type = other DNA
tattccaggcaggggccgaat

SEQ ID NO: 2822 - DNA, 21 bp, synthetic construct
  source 1..21: mol_type = other DNA
ttctccaggttggggttgaat

SEQ ID NO: 2823 - DNA, 21 bp, synthetic construct
  source 1..21: mol_type = other DNA
ttctccaggacggggcacaat

SEQ ID NO: 2824 - DNA, 21 bp, synthetic construct
  source 1..21: mol_type = other DNA
tactcaaagtggaacgccaac

SEQ ID NO: 2825 - DNA, 21 bp, synthetic construct
  source 1..21: mol_type = other DNA
ttcgcgaggacggggttgaat

SEQ ID NO: 2826 - DNA, 21 bp, synthetic construct
  source 1..21: mol_type = other DNA
tatgcgaaaatagggccgaat

SEQ ID NO: 2827 - DNA, 21 bp, synthetic construct
  source 1..21: mol_type = other DNA
ttctccaggatagggttgaat

SEQ ID NO: 2828 - DNA, 21 bp, synthetic construct
  source 1..21: mol_type = other DNA
tatgcgaaaatagggttcaat

SEQ ID NO: 2829 - DNA, 21 bp, synthetic construct
  source 1..21: mol_type = other DNA
tattccaaaataggggataat

SEQ ID NO: 2830 - DNA, 21 bp, synthetic construct
  source 1..21: mol_type = other DNA
ttcgcgaggttcaatacgaat

SEQ ID NO: 2831 - DNA, 21 bp, synthetic construct
  source 1..21: mol_type = other DNA
tattccagggtgaatttcaat

SEQ ID NO: 2832 - DNA, 21 bp, synthetic construct
  source 1..21: mol_type = other DNA
tatgcgaggacgaatacgaat

SEQ ID NO: 2833 - DNA, 21 bp, synthetic construct
  source 1..21: mol_type = other DNA
tttgcccgcaacggcctgaac

SEQ ID NO: 2834 - DNA, 21 bp, synthetic construct
  source 1..21: mol_type = other DNA
tatgcgaaatatgggataaat

SEQ ID NO: 2835 - DNA, 21 bp, synthetic construct
  source 1..21: mol_type = other DNA
tatgcgaggcacgggatgaat

SEQ ID NO: 2836 - DNA, 21 bp, synthetic construct
  source 1..21: mol_type = other DNA
tacgcccgcggcaactttaac

SEQ ID NO: 2837 - DNA, 21 bp, synthetic construct
  source 1..21: mol_type = other DNA
ttctccaaattgaattccaat

SEQ ID NO: 2838 - DNA, 21 bp, synthetic construct
  source 1..21: mol_type = other DNA
tatgcgagggtggggcacaat

SEQ ID NO: 2839 - DNA, 21 bp, synthetic construct
  source 1..21: mol_type = other DNA
accaacgccacctcaaagtgg

SEQ ID NO: 2840 - DNA, 21 bp, synthetic construct
  source 1..21: mol_type = other DNA
tattccagggcgaatgtgaat

SEQ ID NO: 2841 - DNA, 21 bp, synthetic construct
  source 1..21: mol_type = other DNA
tattccagggcgggggggaat

SEQ ID NO: 2842 - DNA, 21 bp, synthetic construct
  source 1..21: mol_type = other DNA
tattccaggaaaggggagaat

SEQ ID NO: 2843 - DNA, 21 bp, synthetic construct
  source 1..21: mol_type = other DNA
ttcgcgaggttggggcacaat

SEQ ID NO: 2844 - DNA, 21 bp, synthetic construct
  source 1..21: mol_type = other DNA
cgcgacgactttaccgcctac

SEQ ID NO: 2845 - DNA, 21 bp, synthetic construct
  source 1..21: mol_type = other DNA
tttgcccgctcaggccccaac

SEQ ID NO: 2846 - DNA, 21 bp, synthetic construct
  source 1..21: mol_type = other DNA
ttctccaaattggggaataat

SEQ ID NO: 2847 - DNA, 21 bp, synthetic construct
  source 1..21: mol_type = other DNA
tacgcccgcaccaacatcaac

SEQ ID NO: 2848 - DNA, 21 bp, synthetic construct
  source 1..21: mol_type = other DNA
ttctccaggttgggggtgaat

SEQ ID NO: 2849 - DNA, 21 bp, synthetic construct
  source 1..21: mol_type = other DNA
tatgcgaaatccgggtgtaat

SEQ ID NO: 2850 - DNA, 21 bp, synthetic construct
  source 1..21: mol_type = other DNA
tattccaggtataatcagaat

SEQ ID NO: 2851 - DNA, 21 bp, synthetic construct
  source 1..21: mol_type = other DNA
tattccaggatagggcagaat

SEQ ID NO: 2852 - DNA, 21 bp, synthetic construct
  source 1..21: mol_type = other DNA
tattccaggatgaattccaat

SEQ ID NO: 2853 - DNA, 21 bp, synthetic construct
  source 1..21: mol_type = other DNA
tattccaggtccggggtgaat

SEQ ID NO: 2854 - DNA, 21 bp, synthetic construct
  source 1..21: mol_type = other DNA
tatgcgagggcgggggtgaat

SEQ ID NO: 2855 - DNA, 21 bp, synthetic construct
  source 1..21: mol_type = other DNA
ttctccaaagtggggccgaat

SEQ ID NO: 2856 - DNA, 21 bp, synthetic construct
  source 1..21: mol_type = other DNA
ctgtcaaagctgggccataac

SEQ ID NO: 2857 - DNA, 21 bp, synthetic construct
  source 1..21: mol_type = other DNA
tacgcccgccatggccaaaac

SEQ ID NO: 2858 - DNA, 21 bp, synthetic construct
  source 1..21: mol_type = other DNA
tatgcgaggacgaatttgaat

SEQ ID NO: 2859 - DNA, 21 bp, synthetic construct
  source 1..21: mol_type = other DNA
tattccaggcacaatacgaat

SEQ ID NO: 2860 - DNA, 21 bp, synthetic construct
  source 1..21: mol_type = other DNA
aggtccgggaattcctcctat

SEQ ID NO: 2861 - DNA, 21 bp, synthetic construct
  source 1..21: mol_type = other DNA
tatgcgaggacgaatgtgaat

SEQ ID NO: 2862 - DNA, 21 bp, synthetic construct
  source 1..21: mol_type = other DNA
ttcgcgaggtccgggttgaat

SEQ ID NO: 2863 - DNA, 21 bp, synthetic construct
  source 1..21: mol_type = other DNA
tattccaaagcgaatttcaat

SEQ ID NO: 2864 - DNA, 21 bp, synthetic construct
  source 1..21: mol_type = other DNA
tattccaaacacaatcacaat

SEQ ID NO: 2865 - DNA, 21 bp, synthetic construct
  source 1..21: mol_type = other DNA
tattccaggttgaatccgaat

SEQ ID NO: 2866 - DNA, 21 bp, synthetic construct
  source 1..21: mol_type = other DNA
tactcacgccaaaacgtaaac

SEQ ID NO: 2867 - DNA, 21 bp, synthetic construct
  source 1..21: mol_type = other DNA
tattccaggttgaatgtgaat

SEQ ID NO: 2868 - DNA, 21 bp, synthetic construct
  source 1..21: mol_type = other DNA
tttgcccgcgccggcgccaac

SEQ ID NO: 2869 - DNA, 21 bp, synthetic construct
  source 1..21: mol_type = other DNA
tattccaggacgaatcacaat

SEQ ID NO: 2870 - DNA, 21 bp, synthetic construct
  source 1..21: mol_type = other DNA
tatgcgaggcagaatgtgaat

SEQ ID NO: 2871 - DNA, 21 bp, synthetic construct
  source 1..21: mol_type = other DNA
tatgcgaggcaggggcacaat

SEQ ID NO: 2872 - DNA, 21 bp, synthetic construct
  source 1..21: mol_type = other DNA
tacgccaagtacaaccataac

SEQ ID NO: 2873 - DNA, 21 bp, synthetic construct
  source 1..21: mol_type = other DNA
ttctccagggtggggtccaat

SEQ ID NO: 2874 - DNA, 21 bp, synthetic construct
  source 1..21: mol_type = other DNA
tattccaggcagaatcagaat

SEQ ID NO: 2875 - DNA, 21 bp, synthetic construct
  source 1..21: mol_type = other DNA
tatgcgagggtggggttgaat

SEQ ID NO: 2876 - DNA, 21 bp, synthetic construct
  source 1..21: mol_type = other DNA
ttcgcgaggacgggggtgaat

SEQ ID NO: 2877 - DNA, 21 bp, synthetic construct
  source 1..21: mol_type = other DNA
tacgcccgctcaggctacaac

SEQ ID NO: 2878 - DNA, 21 bp, synthetic construct
  source 1..21: mol_type = other DNA
tactcaaagtacggcaacaac

SEQ ID NO: 2879 - DNA, 21 bp, synthetic construct
  source 1..21: mol_type = other DNA
tattccagggtggggcacaat

SEQ ID NO: 2880 - DNA, 21 bp, synthetic construct
  source 1..21: mol_type = other DNA
ttcgcgaaaatggggtataat

SEQ ID NO: 2881 - DNA, 21 bp, synthetic construct
  source 1..21: mol_type = other DNA
tacgccaagtacggccataac

SEQ ID NO: 2882 - DNA, 21 bp, synthetic construct
  source 1..21: mol_type = other DNA
tactcaaagtcaggccataac

SEQ ID NO: 2883 - DNA, 21 bp, synthetic construct
  source 1..21: mol_type = other DNA
tatgcgaggatagggatgaat

SEQ ID NO: 2884 - DNA, 21 bp, synthetic construct
  source 1..21: mol_type = other DNA
tactcacgcatcaacctgaac

SEQ ID NO: 2885 - DNA, 21 bp, synthetic construct
  source 1..21: mol_type = other DNA
tacgcccgcatgaactttaac

SEQ ID NO: 2886 - DNA, 21 bp, synthetic construct
  source 1..21: mol_type = other DNA
tattccaaagtggggttcaat

SEQ ID NO: 2887 - DNA, 21 bp, synthetic construct
  source 1..21: mol_type = other DNA
ttttcacgcatgggcaacaac

SEQ ID NO: 2888 - DNA, 21 bp, synthetic construct
  source 1..21: mol_type = other DNA
tattccaggaataatcacaat

SEQ ID NO: 2889 - DNA, 21 bp, synthetic construct
  source 1..21: mol_type = other DNA
ttctccagggggaatataaat

SEQ ID NO: 2890 - DNA, 21 bp, synthetic construct
  source 1..21: mol_type = other DNA
ttgcacaggatgacgccgaat

SEQ ID NO: 2891 - DNA, 21 bp, synthetic construct
  source 1..21: mol_type = other DNA
tattccaggtccaatcagaat

SEQ ID NO: 2892 - DNA, 21 bp, synthetic construct
  source 1..21: mol_type = other DNA
ctgtcaaagctgggctttaac

SEQ ID NO: 2893 - DNA, 21 bp, synthetic construct
  source 1..21: mol_type = other DNA
tattccaggttgaatacgaat

SEQ ID NO: 2894 - DNA, 21 bp, synthetic construct
  source 1..21: mol_type = other DNA
tacgcccgcggcaactcaaac

SEQ ID NO: 2895 - DNA, 21 bp, synthetic construct
  source 1..21: mol_type = other DNA
tatgcgagggcgaatttcaat

SEQ ID NO: 2896 - DNA, 21 bp, synthetic construct
  source 1..21: mol_type = other DNA
tattccaggtccaatgtgaat

SEQ ID NO: 2897 - DNA, 21 bp, synthetic construct
  source 1..21: mol_type = other DNA
tactcacgcctgaacctgaac

SEQ ID NO: 2898 - DNA, 21 bp, synthetic construct
  source 1..21: mol_type = other DNA
tacgcccgcatgggccataac

SEQ ID NO: 2899 - DNA, 21 bp, synthetic construct
  source 1..21: mol_type = other DNA
tattccagggcgaatgataat

SEQ ID NO: 2900 - DNA, 21 bp, synthetic construct
  source 1..21: mol_type = other DNA
tatgcgaggacggggttcaat

SEQ ID NO: 2901 - DNA, 21 bp, synthetic construct
  source 1..21: mol_type = other DNA
ttcgcgaggtccgggcagaat

SEQ ID NO: 2902 - DNA, 21 bp, synthetic construct
  source 1..21: mol_type = other DNA
ttctccagggcgaatgtgaat

SEQ ID NO: 2903 - DNA, 21 bp, synthetic construct
  source 1..21: mol_type = other DNA
tactcacgcatgaacgtaaac

SEQ ID NO: 2904 - DNA, 21 bp, synthetic construct
  source 1..21: mol_type = other DNA
tatgcgaaagcggggcagaat

SEQ ID NO: 2905 - DNA, 21 bp, synthetic construct
  source 1..21: mol_type = other DNA
tactcacgcaccggccataac

SEQ ID NO: 2906 - DNA, 21 bp, synthetic construct
  source 1..21: mol_type = other DNA
tatgcgaggtccgggttcaat

SEQ ID NO: 2907 - DNA, 21 bp, synthetic construct
  source 1..21: mol_type = other DNA
tatgcgaggacggggtccaat

SEQ ID NO: 2908 - DNA, 21 bp, synthetic construct
  source 1..21: mol_type = other DNA
tatgcgaaacaggggtggaat

SEQ ID NO: 2909 - DNA, 21 bp, synthetic construct
  source 1..21: mol_type = other DNA
ttcgcgaggacggggttcaat

SEQ ID NO: 2910 - DNA, 21 bp, synthetic construct
  source 1..21: mol_type = other DNA
ttctccaaagcgaatttcaat

SEQ ID NO: 2911 - DNA, 21 bp, synthetic construct
  source 1..21: mol_type = other DNA
tactcacgcctgaacggcaac

SEQ ID NO: 2912 - DNA, 21 bp, synthetic construct
  source 1..21: mol_type = other DNA
tattccaggttggggaaagat

SEQ ID NO: 2913 - DNA, 21 bp, synthetic construct
  source 1..21: mol_type = other DNA
tatgcgaggtccgggccgaat

SEQ ID NO: 2914 - DNA, 21 bp, synthetic construct
  source 1..21: mol_type = other DNA
tattccaggataaatcagaat

SEQ ID NO: 2915 - DNA, 21 bp, synthetic construct
  source 1..21: mol_type = other DNA
tttgccaagcaaggctacaac

SEQ ID NO: 2916 - DNA, 21 bp, synthetic construct
  source 1..21: mol_type = other DNA
ttctccaggacggggacgaat

SEQ ID NO: 2917 - DNA, 21 bp, synthetic construct
  source 1..21: mol_type = other DNA
tatgcgaaaatagggcacaat

SEQ ID NO: 2918 - DNA, 21 bp, synthetic construct
  source 1..21: mol_type = other DNA
ctgtcacgcatgaactacaac

SEQ ID NO: 2919 - DNA, 21 bp, synthetic construct
  source 1..21: mol_type = other DNA
ttttcacgcatgaacaccaac

SEQ ID NO: 2920 - DNA, 21 bp, synthetic construct
  source 1..21: mol_type = other DNA
tattccagggggaatcagaat

SEQ ID NO: 2921 - DNA, 21 bp, synthetic construct
  source 1..21: mol_type = other DNA
tactcacgcatgaaccccaac

SEQ ID NO: 2922 - DNA, 21 bp, synthetic construct
  source 1..21: mol_type = other DNA
tatgcgaggcagaatccgaat

SEQ ID NO: 2923 - DNA, 21 bp, synthetic construct
  source 1..21: mol_type = other DNA
tattccaggttggggttgaat

SEQ ID NO: 2924 - DNA, 21 bp, synthetic construct
  source 1..21: mol_type = other DNA
tatgcgagggcggggttgaat

SEQ ID NO: 2925 - DNA, 21 bp, synthetic construct
  source 1..21: mol_type = other DNA
tatgcgagggggaatcagaat

SEQ ID NO: 2926 - DNA, 21 bp, synthetic construct
  source 1..21: mol_type = other DNA
tactcaaagatgggctttaac

SEQ ID NO: 2927 - DNA, 21 bp, synthetic construct
  source 1..21: mol_type = other DNA
tacgcccgcgtaggctacaac

SEQ ID NO: 2928 - DNA, 21 bp, synthetic construct
  source 1..21: mol_type = other DNA
ttctccagggcggggcagaat

SEQ ID NO: 2929 - DNA, 21 bp, synthetic construct
  source 1..21: mol_type = other DNA
ctggccaagctgggccataac

SEQ ID NO: 2930 - DNA, 21 bp, synthetic construct
  source 1..21: mol_type = other DNA
ataaggtccatgaatggggtg

SEQ ID NO: 2931 - DNA, 21 bp, synthetic construct
  source 1..21: mol_type = other DNA
tatgcgaaagcggggccgaat

SEQ ID NO: 2932 - DNA, 21 bp, synthetic construct
  source 1..21: mol_type = other DNA
tactcaaagggcaactggaac

SEQ ID NO: 2933 - DNA, 21 bp, synthetic construct
  source 1..21: mol_type = other DNA
accaactcaaccaacggcatc

SEQ ID NO: 2934 - DNA, 21 bp, synthetic construct
  source 1..21: mol_type = other DNA
tattccagggtgaatacgaat

SEQ ID NO: 2935 - DNA, 21 bp, synthetic construct
  source 1..21: mol_type = other DNA
ttccacaaattggggtccaat

SEQ ID NO: 2936 - DNA, 21 bp, synthetic construct
  source 1..21: mol_type = other DNA
tattccaggacggggcagaat

SEQ ID NO: 2937 - DNA, 21 bp, synthetic construct
  source 1..21: mol_type = other DNA
tattccaggtccgggtccaat

SEQ ID NO: 2938 - DNA, 21 bp, synthetic construct
  source 1..21: mol_type = other DNA
ttctccagggcgaatttcaat

SEQ ID NO: 2939 - DNA, 21 bp, synthetic construct
  source 1..21: mol_type = other DNA
tatgcgaggatggggtccaat

SEQ ID NO: 2940 - DNA, 21 bp, synthetic construct
  source 1..21: mol_type = other DNA
tttgcccgcgtaggcatcaac

SEQ ID NO: 2941 - DNA, 21 bp, synthetic construct
  source 1..21: mol_type = other DNA
tacgcccgcaccggcatgaac

SEQ ID NO: 2942 - DNA, 21 bp, synthetic construct
  source 1..21: mol_type = other DNA
ttcgcgaggacggggcagaat

SEQ ID NO: 2943 - DNA, 21 bp, synthetic construct
  source 1..21: mol_type = other DNA
ttttcacgcgtaggccataac

SEQ ID NO: 2944 - DNA, 21 bp, synthetic construct
  source 1..21: mol_type = other DNA
tatgcgaaaatgaatataaat

SEQ ID NO: 2945 - DNA, 21 bp, synthetic construct
  source 1..21: mol_type = other DNA
tatgcgaggatgggggcgaat

SEQ ID NO: 2946 - DNA, 21 bp, synthetic construct
  source 1..21: mol_type = other DNA
tatgcgaggatagggttcaat

SEQ ID NO: 2947 - DNA, 21 bp, synthetic construct
  source 1..21: mol_type = other DNA
tattccaggttgaatcagaat

SEQ ID NO: 2948 - DNA, 21 bp, synthetic construct
  source 1..21: mol_type = other DNA
tactcaaagatgaactacaac

SEQ ID NO: 2949 - DNA, 21 bp, synthetic construct
  source 1..21: mol_type = other DNA
tactcacgccaaggcgccaac

SEQ ID NO: 2950 - DNA, 21 bp, synthetic construct
  source 1..21: mol_type = other DNA
tattccagggtggggatgaat

SEQ ID NO: 2951 - DNA, 21 bp, synthetic construct
  source 1..21: mol_type = other DNA
ttctccaggacggggttcaat

SEQ ID NO: 2952 - DNA, 21 bp, synthetic construct
  source 1..21: mol_type = other DNA
tactcacgcatgaactttaac

SEQ ID NO: 2953 - DNA, 21 bp, synthetic construct
  source 1..21: mol_type = other DNA
tactcaaagatcggcaacaac

SEQ ID NO: 2954 - DNA, 21 bp, synthetic construct
  source 1..21: mol_type = other DNA
tacgcccgcgtaggcatgaac

SEQ ID NO: 2955 - DNA, 21 bp, synthetic construct
  source 1..21: mol_type = other DNA
tatgcgaggaaaggggagaat

SEQ ID NO: 2956 - DNA, 21 bp, synthetic construct
  source 1..21: mol_type = other DNA
ttctccaggatgaattccaat

SEQ ID NO: 2957 - DNA, 21 bp, synthetic construct
  source 1..21: mol_type = other DNA
tattccaaatccgggtggaat

SEQ ID NO: 2958 - DNA, 21 bp, synthetic construct
  source 1..21: mol_type = other DNA
tacgccaagctgggctacaac

SEQ ID NO: 2959 - DNA, 21 bp, synthetic construct
  source 1..21: mol_type = other DNA
tttgcccgcatgggcctgaac

SEQ ID NO: 2960 - DNA, 21 bp, synthetic construct
  source 1..21: mol_type = other DNA
ttctccaggttggggtccaat

SEQ ID NO: 2961 - DNA, 21 bp, synthetic construct
  source 1..21: mol_type = other DNA
tattccagggtgaatgcgaat

SEQ ID NO: 2962 - DNA, 21 bp, synthetic construct
  source 1..21: mol_type = other DNA
tactcaaaggccggctttaac

SEQ ID NO: 2963 - DNA, 21 bp, synthetic construct
  source 1..21: mol_type = other DNA
tatgcgaggggggggtccaat

SEQ ID NO: 2964 - DNA, 21 bp, synthetic construct
  source 1..21: mol_type = other DNA
tatgcgaaatccaattggaat

SEQ ID NO: 2965 - DNA, 21 bp, synthetic construct
  source 1..21: mol_type = other DNA
tacgccaagatgggctttaac

SEQ ID NO: 2966 - DNA, 21 bp, synthetic construct
  source 1..21: mol_type = other DNA
ttctccaggttggggatgaat

SEQ ID NO: 2967 - DNA, 21 bp, synthetic construct
  source 1..21: mol_type = other DNA
tactcacgcgccaacatgaac

SEQ ID NO: 2968 - DNA, 21 bp, synthetic construct
  source 1..21: mol_type = other DNA
tacgccaagcaaaactacaac

SEQ ID NO: 2969 - DNA, 21 bp, synthetic construct
  source 1..21: mol_type = other DNA
tattccaggcaggggcagaat

SEQ ID NO: 2970 - DNA, 21 bp, synthetic construct
  source 1..21: mol_type = other DNA
ttcgcgaggatggggccgaat

SEQ ID NO: 2971 - DNA, 21 bp, synthetic construct
  source 1..21: mol_type = other DNA
tactcacgcggcaacctgaac

SEQ ID NO: 2972 - DNA, 21 bp, synthetic construct
  source 1..21: mol_type = other DNA
tattccaggacggggttcaat

SEQ ID NO: 2973 - DNA, 21 bp, synthetic construct
  source 1..21: mol_type = other DNA
tttgccaagaacggccccaac

SEQ ID NO: 2974 - DNA, 21 bp, synthetic construct
  source 1..21: mol_type = other DNA
ttcgcgaggcacgggtataat

SEQ ID NO: 2975 - DNA, 21 bp, synthetic construct
  source 1..21: mol_type = other DNA
ttcgcgaggttcaatcagaat

SEQ ID NO: 2976 - DNA, 21 bp, synthetic construct
  source 1..21: mol_type = other DNA
ttcgcgaggtccggggcgaat

SEQ ID NO: 2977 - DNA, 21 bp, synthetic construct
  source 1..21: mol_type = other DNA
tatgcgaggatagggccgaat

SEQ ID NO: 2978 - DNA, 21 bp, synthetic construct
  source 1..21: mol_type = other DNA
ttgtccaggcacaatgataat

SEQ ID NO: 2979 - DNA, 21 bp, synthetic construct
  source 1..21: mol_type = other DNA
tatgcgaggacggggttgaat

SEQ ID NO: 2980 - DNA, 21 bp, synthetic construct
  source 1..21: mol_type = other DNA
tactcaaagcatggccataac

SEQ ID NO: 2981 - DNA, 21 bp, synthetic construct
  source 1..21: mol_type = other DNA
ttttcacgccaaggctacaac

SEQ ID NO: 2982 - DNA, 21 bp, synthetic construct
  source 1..21: mol_type = other DNA
tatgcgaggggggggaataat

SEQ ID NO: 2983 - DNA, 21 bp, synthetic construct
  source 1..21: mol_type = other DNA
ttcgcgaggacggggccgaat

SEQ ID NO: 2984 - DNA, 21 bp, synthetic construct
  source 1..21: mol_type = other DNA
tattccagggtgaattccaat

SEQ ID NO: 2985 - DNA, 21 bp, synthetic construct
  source 1..21: mol_type = other DNA
ttctccaggttgaatgggaat

SEQ ID NO: 2986 - DNA, 21 bp, synthetic construct
  source 1..21: mol_type = other DNA
tactcacgcatgaacatcaac

SEQ ID NO: 2987 - DNA, 21 bp, synthetic construct
  source 1..21: mol_type = other DNA
tattccaaaatggggccgaat

SEQ ID NO: 2988 - DNA, 21 bp, synthetic construct
  source 1..21: mol_type = other DNA
tattccaggatagggacgaat

SEQ ID NO: 2989 - DNA, 21 bp, synthetic construct
  source 1..21: mol_type = other DNA
tatgcgaggatgggggtgaat

SEQ ID NO: 2990 - DNA, 21 bp, synthetic construct
  source 1..21: mol_type = other DNA
gtgtccgggaggtccgcgtat

SEQ ID NO: 2991 - DNA, 21 bp, synthetic construct
  source 1..21: mol_type = other DNA
tattccaggacgaatacgaat

SEQ ID NO: 2992 - DNA, 21 bp, synthetic construct
  source 1..21: mol_type = other DNA
tattccagggtggggacgaat

SEQ ID NO: 2993 - DNA, 21 bp, synthetic construct
  source 1..21: mol_type = other DNA
tactcacgctcaggctacaac

SEQ ID NO: 2994 - DNA, 21 bp, synthetic construct
  source 1..21: mol_type = other DNA
tatgcgaaagcggggtggaat

SEQ ID NO: 2995 - DNA, 21 bp, synthetic construct
  source 1..21: mol_type = other DNA
tactcacgcaccggcctgaac

SEQ ID NO: 2996 - DNA, 21 bp, synthetic construct
  source 1..21: mol_type = other DNA
ttcgcgaggacgggggcgaat

SEQ ID NO: 2997 - DNA, 21 bp, synthetic construct
  source 1..21: mol_type = other DNA
ttctccaggttgaatgcgaat

SEQ ID NO: 2998 - DNA, 21 bp, synthetic construct
  source 1..21: mol_type = other DNA
tattccaggataggggtgaat

SEQ ID NO: 2999 - DNA, 21 bp, synthetic construct
  source 1..21: mol_type = other DNA
ttctccaggataggggtgaat

SEQ ID NO: 3000 - DNA, 21 bp, synthetic construct
  source 1..21: mol_type = other DNA
tacgccaagggcggctgcaac

SEQ ID NO: 3001 - DNA, 21 bp, synthetic construct
  source 1..21: mol_type = other DNA
tatgcgaaatccgggatgaat

SEQ ID NO: 3002 - DNA, 21 bp, synthetic construct
  source 1..21: mol_type = other DNA
tatgcgaggttgaattccaat

SEQ ID NO: 3003 - DNA, 21 bp, synthetic construct
  source 1..21: mol_type = other DNA
tattccagggtgaatgtgaat

SEQ ID NO: 3004 - DNA, 21 bp, synthetic construct
  source 1..21: mol_type = other DNA
tattccaggaataatccgaat

SEQ ID NO: 3005 - DNA, 21 bp, synthetic construct
  source 1..21: mol_type = other DNA
tattccaggatgaatgcgaat

SEQ ID NO: 3006 - DNA, 21 bp, synthetic construct
  source 1..21: mol_type = other DNA
tatgcgaaaggggggcacaat

SEQ ID NO: 3007 - DNA, 21 bp, synthetic construct
  source 1..21: mol_type = other DNA
ttcgcgaggggggggtccaat

SEQ ID NO: 3008 - DNA, 21 bp, synthetic construct
  source 1..21: mol_type = other DNA
tactcaaagcatggctttaac

SEQ ID NO: 3009 - DNA, 21 bp, synthetic construct
  source 1..21: mol_type = other DNA
tatgcgaggtccgggatgaat

SEQ ID NO: 3010 - DNA, 21 bp, synthetic construct
  source 1..21: mol_type = other DNA
ttttcacgcgtaggccaaaac

SEQ ID NO: 3011 - DNA, 21 bp, synthetic construct
  source 1..21: mol_type = other DNA
ttctccagggcggggcacaat

SEQ ID NO: 3012 - DNA, 21 bp, synthetic construct
  source 1..21: mol_type = other DNA
tatgcgaggatgaattataat

SEQ ID NO: 3013 - DNA, 21 bp, synthetic construct
  source 1..21: mol_type = other DNA
tattccaggtccggggcgaat

SEQ ID NO: 3014 - DNA, 21 bp, synthetic construct
  source 1..21: mol_type = other DNA
tatgcgaggcagggggggaat

SEQ ID NO: 3015 - DNA, 21 bp, synthetic construct
  source 1..21: mol_type = other DNA
ttttcacgcatcggctcaaac

SEQ ID NO: 3016 - DNA, 21 bp, synthetic construct
  source 1..21: mol_type = other DNA
tactcacgcgccaacaccaac

SEQ ID NO: 3017 - DNA, 21 bp, synthetic construct
  source 1..21: mol_type = other DNA
tatgcgagggcggggacgaat

SEQ ID NO: 3018 - DNA, 21 bp, synthetic construct
  source 1..21: mol_type = other DNA
tatgcgaggatgaatcacaat

SEQ ID NO: 3019 - DNA, 21 bp, synthetic construct
  source 1..21: mol_type = other DNA
ttctccaggttggggcagaat

SEQ ID NO: 3020 - DNA, 21 bp, synthetic construct
  source 1..21: mol_type = other DNA
ttctccaaaatagggcacaat

SEQ ID NO: 3021 - DNA, 21 bp, synthetic construct
  source 1..21: mol_type = other DNA
tactcacgcatcggccataac

SEQ ID NO: 3022 - DNA, 21 bp, synthetic construct
  source 1..21: mol_type = other DNA
tatgcgaggaatgggttcaat

SEQ ID NO: 3023 - DNA, 21 bp, synthetic construct
  source 1..21: mol_type = other DNA
tatgcgaggttgaatacgaat

SEQ ID NO: 3024 - DNA, 21 bp, synthetic construct
  source 1..21: mol_type = other DNA
tatgcgaggaatgggatgaat

SEQ ID NO: 3025 - DNA, 21 bp, synthetic construct
  source 1..21: mol_type = other DNA
tactcacgcgccaacatcaac

SEQ ID NO: 3026 - DNA, 21 bp, synthetic construct
  source 1..21: mol_type = other DNA
ttcgcgagggtggggccgaat

SEQ ID NO: 3027 - DNA, 21 bp, synthetic construct
  source 1..21: mol_type = other DNA
ctgtcaaagctgaacgccaac

SEQ ID NO: 3028 - DNA, 21 bp, synthetic construct
  source 1..21: mol_type = other DNA
ctggccaagatcggctacaac

SEQ ID NO: 3029 - DNA, 21 bp, synthetic construct
  source 1..21: mol_type = other DNA
tattccaggataaatgcgaat

SEQ ID NO: 3030 - DNA, 21 bp, synthetic construct
  source 1..21: mol_type = other DNA
tactcaaagatcggcctgaac

SEQ ID NO: 3031 - DNA, 21 bp, synthetic construct
  source 1..21: mol_type = other DNA
ttctccaggttgaatccgaat

SEQ ID NO: 3032 - DNA, 21 bp, synthetic construct
  source 1..21: mol_type = other DNA
tatgcgaaaacggggcacaat

SEQ ID NO: 3033 - DNA, 21 bp, synthetic construct
  source 1..21: mol_type = other DNA
tactcacgcatgggcatgaac

SEQ ID NO: 3034 - DNA, 21 bp, synthetic construct
  source 1..21: mol_type = other DNA
tactcaaagcaaggctacaac

SEQ ID NO: 3035 - DNA, 21 bp, synthetic construct
  source 1..21: mol_type = other DNA
ttcgcgaaagcggggccgaat

SEQ ID NO: 3036 - DNA, 21 bp, synthetic construct
  source 1..21: mol_type = other DNA
tactcacgcgccaacggcaac

SEQ ID NO: 3037 - DNA, 21 bp, synthetic construct
  source 1..21: mol_type = other DNA
ttcgcgaaaacggggtggaat

SEQ ID NO: 3038 - DNA, 21 bp, synthetic construct
  source 1..21: mol_type = other DNA
tatgcgagggtgggggcgaat

SEQ ID NO: 3039 - DNA, 21 bp, synthetic construct
  source 1..21: mol_type = other DNA
tatgcgaggcaggggccgaat

SEQ ID NO: 3040 - DNA, 21 bp, synthetic construct
  source 1..21: mol_type = other DNA
tattccaaagtgggggcgaat

SEQ ID NO: 3041 - DNA, 21 bp, synthetic construct
  source 1..21: mol_type = other DNA
tattccagggcgggggcgaat

SEQ ID NO: 3042 - DNA, 21 bp, synthetic construct
  source 1..21: mol_type = other DNA
ttttcacgccatggcaacaac

SEQ ID NO: 3043 - DNA, 21 bp, synthetic construct
  source 1..21: mol_type = other DNA
tttgcccgctacggctcaaac

SEQ ID NO: 3044 - DNA, 21 bp, synthetic construct
  source 1..21: mol_type = other DNA
ttctccaggttgaatgataat

SEQ ID NO: 3045 - DNA, 21 bp, synthetic construct
  source 1..21: mol_type = other DNA
gtgttctcctccaatggggtg

SEQ ID NO: 3046 - DNA, 21 bp, synthetic construct
  source 1..21: mol_type = other DNA
tactcacgcgccaacgccaac

SEQ ID NO: 3047 - DNA, 21 bp, synthetic construct
  source 1..21: mol_type = other DNA
tactcaaagatgaacatgaac

SEQ ID NO: 3048 - DNA, 21 bp, synthetic construct
  source 1..21: mol_type = other DNA
tattccaaagggaatttcaat

SEQ ID NO: 3049 - DNA, 21 bp, synthetic construct
  source 1..21: mol_type = other DNA
ttttcacgcgccggctcaaac

SEQ ID NO: 3050 - DNA, 21 bp, synthetic construct
  source 1..21: mol_type = other DNA
tattccagggcggggcagaat

SEQ ID NO: 3051 - DNA, 21 bp, synthetic construct
  source 1..21: mol_type = other DNA
tattccaggtccgcgacgaat

SEQ ID NO: 3052 - DNA, 21 bp, synthetic construct
  source 1..21: mol_type = other DNA
tatgcgaggggggggttgaat

SEQ ID NO: 3053 - DNA, 21 bp, synthetic construct
  source 1..21: mol_type = other DNA
tacgccaagaccggcgtaaac

SEQ ID NO: 3054 - DNA, 21 bp, synthetic construct
  source 1..21: mol_type = other DNA
tattccaaattggggccgaat

SEQ ID NO: 3055 - DNA, 21 bp, synthetic construct
  source 1..21: mol_type = other DNA
tatgcgaggcagggggtgaat

SEQ ID NO: 3056 - DNA, 21 bp, synthetic construct
  source 1..21: mol_type = other DNA
tactcaaaggtaggctgcaac

SEQ ID NO: 3057 - DNA, 21 bp, synthetic construct
  source 1..21: mol_type = other DNA
ttgtccaggtccgggacgaat

SEQ ID NO: 3058 - DNA, 21 bp, synthetic construct
  source 1..21: mol_type = other DNA
tttgcccgccaaggcctgaac

SEQ ID NO: 3059 - DNA, 21 bp, synthetic construct
  source 1..21: mol_type = other DNA
tactcacgcgtaggcctgaac

SEQ ID NO: 3060 - DNA, 21 bp, synthetic construct
  source 1..21: mol_type = other DNA
tatgcgaggatggggatgaat

SEQ ID NO: 3061 - DNA, 21 bp, synthetic construct
  source 1..21: mol_type = other DNA
ttcgcgagggggggggtgaat

SEQ ID NO: 3062 - DNA, 21 bp, synthetic construct
  source 1..21: mol_type = other DNA
tacgccaaggccggctttaac

SEQ ID NO: 3063 - DNA, 21 bp, synthetic construct
  source 1..21: mol_type = other DNA
ttcaggtccacgaatgggata

SEQ ID NO: 3064 - DNA, 21 bp, synthetic construct
  source 1..21: mol_type = other DNA
ttttcacgcgccaacaacaac

SEQ ID NO: 3065 - DNA, 21 bp, synthetic construct
  source 1..21: mol_type = other DNA
ataaggtccacgaatgggata

SEQ ID NO: 3066 - DNA, 21 bp, synthetic construct
  source 1..21: mol_type = other DNA
ttctccaaaatggggaataat

SEQ ID NO: 3067 - DNA, 21 bp, synthetic construct
  source 1..21: mol_type = other DNA
ttttcaaagctgaacgtaaac

SEQ ID NO: 3068 - DNA, 21 bp, synthetic construct
  source 1..21: mol_type = other DNA
tactcacgctcaggcggcaac

SEQ ID NO: 3069 - DNA, 21 bp, synthetic construct
  source 1..21: mol_type = other DNA
tatgcgagggggaatccgaat

SEQ ID NO: 3070 - DNA, 21 bp, synthetic construct
  source 1..21: mol_type = other DNA
ttctccaggccgaataataat

SEQ ID NO: 3071 - DNA, 21 bp, synthetic construct
  source 1..21: mol_type = other DNA
ttcgcgaggacggggtccaat

SEQ ID NO: 3072 - DNA, 21 bp, synthetic construct
  source 1..21: mol_type = other DNA
tatgcgagggtggggccgaat

SEQ ID NO: 3073 - DNA, 21 bp, synthetic construct
  source 1..21: mol_type = other DNA
tattccaggaaaaatgagaat

SEQ ID NO: 3074 - DNA, 21 bp, synthetic construct
  source 1..21: mol_type = other DNA
tatgcgagggggggggcgaat

SEQ ID NO: 3075 - DNA, 21 bp, synthetic construct
  source 1..21: mol_type = other DNA
tactcaaagatgaactttaac

SEQ ID NO: 3076 - DNA, 21 bp, synthetic construct
  source 1..21: mol_type = other DNA
ctgtcaaagcaaaactttaac

SEQ ID NO: 3077 - DNA, 21 bp, synthetic construct
  source 1..21: mol_type = other DNA
accaagtcaaccaacggcatc

SEQ ID NO: 3078 - DNA, 21 bp, synthetic construct
  source 1..21: mol_type = other DNA
tactcacgccataacatcaac

SEQ ID NO: 3079 - DNA, 21 bp, synthetic construct
  source 1..21: mol_type = other DNA
tttgcccgcaccggctacaac

SEQ ID NO: 3080 - DNA, 21 bp, synthetic construct
  source 1..21: mol_type = other DNA
ttctccaggataaatgtgaat

SEQ ID NO: 3081 - DNA, 21 bp, synthetic construct
  source 1..21: mol_type = other DNA
tatgcgagggcggggcacaat

SEQ ID NO: 3082 - DNA, 21 bp, synthetic construct
  source 1..21: mol_type = other DNA
tactcacgccaaggcctgaac

SEQ ID NO: 3083 - DNA, 21 bp, synthetic construct
  source 1..21: mol_type = other DNA
tattccaggttggggcacaat

SEQ ID NO: 3084 - DNA, 21 bp, synthetic construct
  source 1..21: mol_type = other DNA
ttttcaaagctgaacaacaac

SEQ ID NO: 3085 - DNA, 21 bp, synthetic construct
  source 1..21: mol_type = other DNA
tattccaaattgaatccgaat

SEQ ID NO: 3086 - DNA, 21 bp, synthetic construct
  source 1..21: mol_type = other DNA
tattccaggacgaattccaat

SEQ ID NO: 3087 - DNA, 21 bp, synthetic construct
  source 1..21: mol_type = other DNA
tactcacgcgccggcaccaac

SEQ ID NO: 3088 - DNA, 21 bp, synthetic construct
  source 1..21: mol_type = other DNA
ataacggggatgtccaaatat

SEQ ID NO: 3089 - DNA, 21 bp, synthetic construct
  source 1..21: mol_type = other DNA
tattccaaagtggggccgaat

SEQ ID NO: 3090 - DNA, 21 bp, synthetic construct
  source 1..21: mol_type = other DNA
tatgcgagggggaatgtgaat

SEQ ID NO: 3091 - DNA, 21 bp, synthetic construct
  source 1..21: mol_type = other DNA
tacgcccgcaccggcggcaac

SEQ ID NO: 3092 - DNA, 21 bp, synthetic construct
  source 1..21: mol_type = other DNA
tattccaggatgaatcacaat

SEQ ID NO: 3093 - DNA, 21 bp, synthetic construct
  source 1..21: mol_type = other DNA
tttgcccgcaacggcatcaac

SEQ ID NO: 3094 - DNA, 21 bp, synthetic construct
  source 1..21: mol_type = other DNA
tattccaaacaggggtgtaat

SEQ ID NO: 3095 - DNA, 21 bp, synthetic construct
  source 1..21: mol_type = other DNA
tattccaggttggggatgaat

SEQ ID NO: 3096 - DNA, 21 bp, synthetic construct
  source 1..21: mol_type = other DNA
ttctccagggcggggatgaat

SEQ ID NO: 3097 - DNA, 21 bp, synthetic construct
  source 1..21: mol_type = other DNA
tatgcgaggaatgggccgaat

SEQ ID NO: 3098 - DNA, 21 bp, synthetic construct
  source 1..21: mol_type = other DNA
ttctccaggataggggggaat

SEQ ID NO: 3099 - DNA, 21 bp, synthetic construct
  source 1..21: mol_type = other DNA
tattccaaattgaatgcgaat

SEQ ID NO: 3100 - DNA, 21 bp, synthetic construct
  source 1..21: mol_type = other DNA
ttcgcgaggggggggttcaat

SEQ ID NO: 3101 - DNA, 21 bp, synthetic construct
  source 1..21: mol_type = other DNA
tactcaaagcatggcgccaac

SEQ ID NO: 3102 - DNA, 21 bp, synthetic construct
  source 1..21: mol_type = other DNA
tacgcccgctcaggccaaaac

SEQ ID NO: 3103 - DNA, 21 bp, synthetic construct
  source 1..21: mol_type = other DNA
ctggccaagaccggccccaac

SEQ ID NO: 3104 - DNA, 21 bp, synthetic construct
  source 1..21: mol_type = other DNA
tatgcgaaatatgggatgaat

SEQ ID NO: 3105 - DNA, 21 bp, synthetic construct
  source 1..21: mol_type = other DNA
tactcacgcatgaacaacaac

SEQ ID NO: 3106 - DNA, 21 bp, synthetic construct
  source 1..21: mol_type = other DNA
ttgcacaaaacgacgcacaat

SEQ ID NO: 3107 - DNA, 21 bp, synthetic construct
  source 1..21: mol_type = other DNA
ttctccagggtggggatgaat

SEQ ID NO: 3108 - DNA, 21 bp, synthetic construct
  source 1..21: mol_type = other DNA
tattccagggtggggccgaat

SEQ ID NO: 3109 - DNA, 21 bp, synthetic construct
  source 1..21: mol_type = other DNA
ttgcacgcggcgttgccgaat

SEQ ID NO: 3110 - DNA, 21 bp, synthetic construct
  source 1..21: mol_type = other DNA
tactcacgcgccggccataac

SEQ ID NO: 3111 - DNA, 21 bp, synthetic construct
  source 1..21: mol_type = other DNA
tatgcgaggacgaatccgaat

SEQ ID NO: 3112 - DNA, 21 bp, synthetic construct
  source 1..21: mol_type = other DNA
ttttcaaagatgaactttaac

SEQ ID NO: 3113 - DNA, 21 bp, synthetic construct
  source 1..21: mol_type = other DNA
tttgcccgcaacggccataac

SEQ ID NO: 3114 - DNA, 21 bp, synthetic construct
  source 1..21: mol_type = other DNA
tactcacgcatcaaccccaac

SEQ ID NO: 3115 - DNA, 21 bp, synthetic construct
  source 1..21: mol_type = other DNA
ttctccaaattgaatcacaat

SEQ ID NO: 3116 - DNA, 21 bp, synthetic construct
  source 1..21: mol_type = other DNA
tatgcgaggacgaatcagaat

SEQ ID NO: 3117 - DNA, 21 bp, synthetic construct
  source 1..21: mol_type = other DNA
tatgcgaggcagaatcagaat

SEQ ID NO: 3118 - DNA, 21 bp, synthetic construct
  source 1..21: mol_type = other DNA
tatgcgaggatagggcacaat

SEQ ID NO: 3119 - DNA, 21 bp, synthetic construct
  source 1..21: mol_type = other DNA
tactcacgccccaactacaac

SEQ ID NO: 3120 - DNA, 21 bp, synthetic construct
  source 1..21: mol_type = other DNA
tattccaaatggaataataat

SEQ ID NO: 3121 - DNA, 21 bp, synthetic construct
  source 1..21: mol_type = other DNA
ttcgcgagggggggggcgaat

SEQ ID NO: 3122 - DNA, 21 bp, synthetic construct
  source 1..21: mol_type = other DNA
ttctccaggacggggttgaat

SEQ ID NO: 3123 - DNA, 21 bp, synthetic construct
  source 1..21: mol_type = other DNA
tactcacgcatcggcggcaac

SEQ ID NO: 3124 - DNA, 21 bp, synthetic construct
  source 1..21: mol_type = other DNA
tactcaaagatcggcatcaac

SEQ ID NO: 3125 - DNA, 21 bp, synthetic construct
  source 1..21: mol_type = other DNA
tatgcgaggccgggggcgaat

SEQ ID NO: 3126 - DNA, 21 bp, synthetic construct
  source 1..21: mol_type = other DNA
ttcgcgaggacggggatgaat

SEQ ID NO: 3127 - DNA, 21 bp, synthetic construct
  source 1..21: mol_type = other DNA
tactcacgctcaaacatgaac

SEQ ID NO: 3128 - DNA, 21 bp, synthetic construct
  source 1..21: mol_type = other DNA
tactcaaagctgaaccaaaac

SEQ ID NO: 3129 - DNA, 21 bp, synthetic construct
  source 1..21: mol_type = other DNA
tacgccaagggcaactggaac

SEQ ID NO: 3130 - DNA, 21 bp, synthetic construct
  source 1..21: mol_type = other DNA
ctgtcaaagatcggccataac

SEQ ID NO: 3131 - DNA, 21 bp, synthetic construct
  source 1..21: mol_type = other DNA
tactcaaaggccaactacaac

SEQ ID NO: 3132 - DNA, 21 bp, synthetic construct
  source 1..21: mol_type = other DNA
tattccagggtgggggtgaat

SEQ ID NO: 3133 - DNA, 21 bp, synthetic construct
  source 1..21: mol_type = other DNA
tttgcccgcggcggccccaac

SEQ ID NO: 3134 - DNA, 21 bp, synthetic construct
  source 1..21: mol_type = other DNA
tactcaaaggtaggccataac

SEQ ID NO: 3135 - DNA, 21 bp, synthetic construct
  source 1..21: mol_type = other DNA
tatgcgaaacaggggtccaat

SEQ ID NO: 3136 - DNA, 21 bp, synthetic construct
  source 1..21: mol_type = other DNA
tacgcccgctcaggcaccaac

SEQ ID NO: 3137 - DNA, 21 bp, synthetic construct
  source 1..21: mol_type = other DNA
ttctccaggcaggggccgaat

SEQ ID NO: 3138 - DNA, 21 bp, synthetic construct
  source 1..21: mol_type = other DNA
tatgcgaggaatgggcacaat

SEQ ID NO: 3139 - DNA, 21 bp, synthetic construct
  source 1..21: mol_type = other DNA
tatgcgaggcaggggacgaat

SEQ ID NO: 3140 - DNA, 21 bp, synthetic construct
  source 1..21: mol_type = other DNA
tactcacgcggcggcatgaac

SEQ ID NO: 3141 - DNA, 21 bp, synthetic construct
  source 1..21: mol_type = other DNA
ttttcacgcgtaggcgccaac

SEQ ID NO: 3142 - DNA, 21 bp, synthetic construct
  source 1..21: mol_type = other DNA
tattccaaaatgggggtgaat

SEQ ID NO: 3143 - DNA, 21 bp, synthetic construct
  source 1..21: mol_type = other DNA
tactcaaaggtaggctcaaac

SEQ ID NO: 3144 - DNA, 21 bp, synthetic construct
  source 1..21: mol_type = other DNA
tacgcccgcgccaaccccaac

SEQ ID NO: 3145 - DNA, 21 bp, synthetic construct
  source 1..21: mol_type = other DNA
tttgcccgcggcaacatcaac

SEQ ID NO: 3146 - DNA, 21 bp, synthetic construct
  source 1..21: mol_type = other DNA
tattccaaattgaatcacaat

SEQ ID NO: 3147 - DNA, 21 bp, synthetic construct
  source 1..21: mol_type = other DNA
tactcacgcgtaggctttaac

SEQ ID NO: 3148 - DNA, 21 bp, synthetic construct
  source 1..21: mol_type = other DNA
tactcacgcatgaacatgaac

SEQ ID NO: 3149 - DNA, 21 bp, synthetic construct
  source 1..21: mol_type = other DNA
tatgcgaggcacaattccaat

SEQ ID NO: 3150 - DNA, 21 bp, synthetic construct
  source 1..21: mol_type = other DNA
tatgcgaggggggggacgaat

SEQ ID NO: 3151 - DNA, 21 bp, synthetic construct
  source 1..21: mol_type = other DNA
ttgtccaggcaggggccgaat

SEQ ID NO: 3152 - DNA, 21 bp, synthetic construct
  source 1..21: mol_type = other DNA
tactcacgcgccggcctgaac

SEQ ID NO: 3153 - DNA, 21 bp, synthetic construct
  source 1..21: mol_type = other DNA
tactcaaagaccggctttaac

SEQ ID NO: 3154 - DNA, 21 bp, synthetic construct
  source 1..21: mol_type = other DNA
tacgcccgctcaggcggcaac

SEQ ID NO: 3155 - DNA, 21 bp, synthetic construct
  source 1..21: mol_type = other DNA
tactcacgcggcaacatcaac

SEQ ID NO: 3156 - DNA, 21 bp, synthetic construct
  source 1..21: mol_type = other DNA
tacgcccgcggcggctttaac

SEQ ID NO: 3157 - DNA, 21 bp, synthetic construct
  source 1..21: mol_type = other DNA
ttgaggtccacgaatggggtg

SEQ ID NO: 3158 - DNA, 21 bp, synthetic construct
  source 1..21: mol_type = other DNA
tatgcgaggtccggggtgaat

SEQ ID NO: 3159 - DNA, 21 bp, synthetic construct
  source 1..21: mol_type = other DNA
tattccaggttcaatatgaat

SEQ ID NO: 3160 - DNA, 21 bp, synthetic construct
  source 1..21: mol_type = other DNA
tacgtaaagtcaaacaacaac

SEQ ID NO: 3161 - DNA, 21 bp, synthetic construct
  source 1..21: mol_type = other DNA
tacgccaagctgggccataac

SEQ ID NO: 3162 - DNA, 21 bp, synthetic construct
  source 1..21: mol_type = other DNA
tatgcgaggcacgggttgaat

SEQ ID NO: 3163 - DNA, 21 bp, synthetic construct
  source 1..21: mol_type = other DNA
tatgcgaggataggggggaat

SEQ ID NO: 3164 - DNA, 21 bp, synthetic construct
  source 1..21: mol_type = other DNA
tattccagggtggggtccaat

SEQ ID NO: 3165 - DNA, 21 bp, synthetic construct
  source 1..21: mol_type = other DNA
tattccaggcagggggtgaat

SEQ ID NO: 3166 - DNA, 21 bp, synthetic construct
  source 1..21: mol_type = other DNA
ttcgcgaaatataatccgaat

SEQ ID NO: 3167 - DNA, 21 bp, synthetic construct
  source 1..21: mol_type = other DNA
tattccaaatggaatcagaat

SEQ ID NO: 3168 - DNA, 21 bp, synthetic construct
  source 1..21: mol_type = other DNA
ttctccaggatgggggcgaat

SEQ ID NO: 3169 - DNA, 21 bp, synthetic construct
  source 1..21: mol_type = other DNA
ttctccaggtccgggttgaat

SEQ ID NO: 3170 - DNA, 21 bp, synthetic construct
  source 1..21: mol_type = other DNA
tattccaaatccgggttcaat

SEQ ID NO: 3171 - DNA, 21 bp, synthetic construct
  source 1..21: mol_type = other DNA
tatgcgaggacgggggtgaat

SEQ ID NO: 3172 - DNA, 21 bp, synthetic construct
  source 1..21: mol_type = other DNA
tactcaaagaacggctgcaac

SEQ ID NO: 3173 - DNA, 21 bp, synthetic construct
  source 1..21: mol_type = other DNA
tatgcgaaagtggggcacaat

SEQ ID NO: 3174 - DNA, 21 bp, synthetic construct
  source 1..21: mol_type = other DNA
atcttttcaaccaacggcatc

SEQ ID NO: 3175 - DNA, 21 bp, synthetic construct
  source 1..21: mol_type = other DNA
tactcacgcatcggctttaac

SEQ ID NO: 3176 - DNA, 21 bp, synthetic construct
  source 1..21: mol_type = other DNA
tattccaaatatgggttgaat

SEQ ID NO: 3177 - DNA, 21 bp, synthetic construct
  source 1..21: mol_type = other DNA
tacgccaagaccaactggaac

SEQ ID NO: 3178 - DNA, 21 bp, synthetic construct
  source 1..21: mol_type = other DNA
cattcacgcaccggctcaaac

SEQ ID NO: 3179 - DNA, 21 bp, synthetic construct
  source 1..21: mol_type = other DNA
tactcacgcatgaacctgaac

SEQ ID NO: 3180 - DNA, 21 bp, synthetic construct
  source 1..21: mol_type = other DNA
ttcgcgaggggggggacgaat

SEQ ID NO: 3181 - DNA, 21 bp, synthetic construct
  source 1..21: mol_type = other DNA
tactcacgcatcaacgtaaac

SEQ ID NO: 3182 - DNA, 21 bp, synthetic construct
  source 1..21: mol_type = other DNA
tatacgaggttgaatcagaat

SEQ ID NO: 3183 - DNA, 21 bp, synthetic construct
  source 1..21: mol_type = other DNA
ccgaggtccacgaatgggata

SEQ ID NO: 3184 - DNA, 21 bp, synthetic construct
  source 1..21: mol_type = other DNA
ttcgcgaggatagggaataat

SEQ ID NO: 3185 - DNA, 21 bp, synthetic construct
  source 1..21: mol_type = other DNA
tattccaggttgggggcgaat

SEQ ID NO: 3186 - DNA, 21 bp, synthetic construct
  source 1..21: mol_type = other DNA
tactcacgcgccggcgtaaac

SEQ ID NO: 3187 - DNA, 21 bp, synthetic construct
  source 1..21: mol_type = other DNA
ctgtcaaagctgggcgtaaac

SEQ ID NO: 3188 - DNA, 21 bp, synthetic construct
  source 1..21: mol_type = other DNA
tacgccaagcaaggctacaac

SEQ ID NO: 3189 - DNA, 21 bp, synthetic construct
  source 1..21: mol_type = other DNA
tacgcccgctcaggctcaaac

SEQ ID NO: 3190 - DNA, 21 bp, synthetic construct
  source 1..21: mol_type = other DNA
tattccaggacgaatgtgaat

SEQ ID NO: 3191 - DNA, 21 bp, synthetic construct
  source 1..21: mol_type = other DNA
tattccagggcgaattccaat

SEQ ID NO: 3192 - DNA, 21 bp, synthetic construct
  source 1..21: mol_type = other DNA
tactcacgcggcggctttaac

SEQ ID NO: 3193 - DNA, 21 bp, synthetic construct
  source 1..21: mol_type = other DNA
tactcacgcggcggctacaac

SEQ ID NO: 3194 - DNA, 21 bp, synthetic construct
  source 1..21: mol_type = other DNA
tatgcgaggacggggacgaat

SEQ ID NO: 3195 - DNA, 21 bp, synthetic construct
  source 1..21: mol_type = other DNA
tatgcgaggttggggcacaat

SEQ ID NO: 3196 - DNA, 21 bp, synthetic construct
  source 1..21: mol_type = other DNA
tatgcgaggacgaatgcgaat

SEQ ID NO: 3197 - DNA, 21 bp, synthetic construct
  source 1..21: mol_type = other DNA
tactcacgcaccaacaacaac

SEQ ID NO: 3198 - DNA, 21 bp, synthetic construct
  source 1..21: mol_type = other DNA
tactcacgctcaggcctgaac

SEQ ID NO: 3199 - DNA, 21 bp, synthetic construct
  source 1..21: mol_type = other DNA
tattccaaacaggggttcaat

SEQ ID NO: 3200 - DNA, 21 bp, synthetic construct
  source 1..21: mol_type = other DNA
tacgcccgcgtaggcaccaac

SEQ ID NO: 3201 - DNA, 21 bp, synthetic construct
  source 1..21: mol_type = other DNA
tactcacgccccaaccataac

SEQ ID NO: 3202 - DNA, 21 bp, synthetic construct
  source 1..21: mol_type = other DNA
ctggccaaggccggcatgaac

SEQ ID NO: 3203 - DNA, 21 bp, synthetic construct
  source 1..21: mol_type = other DNA
tatgcgaggcacggggataat

SEQ ID NO: 3204 - DNA, 21 bp, synthetic construct
  source 1..21: mol_type = other DNA
ttctccaggataaatataaat

SEQ ID NO: 3205 - DNA, 21 bp, synthetic construct
  source 1..21: mol_type = other DNA
tattccaggggggggaataat

SEQ ID NO: 3206 - DNA, 21 bp, synthetic construct
  source 1..21: mol_type = other DNA
tatgcgaggatggggttgaat

SEQ ID NO: 3207 - DNA, 21 bp, synthetic construct
  source 1..21: mol_type = other DNA
tacgccaagggcaacgtaaac

SEQ ID NO: 3208 - DNA, 21 bp, synthetic construct
  source 1..21: mol_type = other DNA
tacgccaagaccggcatgaac

SEQ ID NO: 3209 - DNA, 21 bp, synthetic construct
  source 1..21: mol_type = other DNA
tattccaggtggaatgagaat

SEQ ID NO: 3210 - DNA, 21 bp, synthetic construct
  source 1..21: mol_type = other DNA
atagatgcgtcctccaggtgg

SEQ ID NO: 3211 - DNA, 21 bp, synthetic construct
  source 1..21: mol_type = other DNA
tatgcgaggcagaatttgaat

SEQ ID NO: 3212 - DNA, 21 bp, synthetic construct
  source 1..21: mol_type = other DNA
ttcgcgaggggggggttgaat

SEQ ID NO: 3213 - DNA, 21 bp, synthetic construct
  source 1..21: mol_type = other DNA
ttctccaaatatgggcacaat

SEQ ID NO: 3214 - DNA, 21 bp, synthetic construct
  source 1..21: mol_type = other DNA
tttgccaagtacggctacaac

SEQ ID NO: 3215 - DNA, 21 bp, synthetic construct
  source 1..21: mol_type = other DNA
tatgcgaggtatgggtccaat

SEQ ID NO: 3216 - DNA, 21 bp, synthetic construct
  source 1..21: mol_type = other DNA
ttttcacgcgtaggcaacaac

SEQ ID NO: 3217 - DNA, 21 bp, synthetic construct
  source 1..21: mol_type = other DNA
tactcacgcgtaaacatcaac

SEQ ID NO: 3218 - DNA, 21 bp, synthetic construct
  source 1..21: mol_type = other DNA
ctgtcaaagatgaacgtaaac

SEQ ID NO: 3219 - DNA, 21 bp, synthetic construct
  source 1..21: mol_type = other DNA
tatgcgaggcaggggttcaat

SEQ ID NO: 3220 - DNA, 21 bp, synthetic construct
  source 1..21: mol_type = other DNA
ttctccagggcgaatcagaat

SEQ ID NO: 3221 - DNA, 21 bp, synthetic construct
  source 1..21: mol_type = other DNA
tatgcgaggttcaatgggaat

SEQ ID NO: 3222 - DNA, 21 bp, synthetic construct
  source 1..21: mol_type = other DNA
tatgcgaaaaggggggagaat

SEQ ID NO: 3223 - DNA, 21 bp, synthetic construct
  source 1..21: mol_type = other DNA
tattccaaattgggggcgaat

SEQ ID NO: 3224 - DNA, 21 bp, synthetic construct
  source 1..21: mol_type = other DNA
tactcacgcgccggcatgaac

SEQ ID NO: 3225 - DNA, 21 bp, synthetic construct
  source 1..21: mol_type = other DNA
tattccaaaatagggccgaat

SEQ ID NO: 3226 - DNA, 21 bp, synthetic construct
  source 1..21: mol_type = other DNA
tttgcccgcggcggcaacaac

SEQ ID NO: 3227 - DNA, 21 bp, synthetic construct
  source 1..21: mol_type = other DNA
tactcacgcatgggcctgaac

SEQ ID NO: 3228 - DNA, 21 bp, synthetic construct
  source 1..21: mol_type = other DNA
ttctccagggtgggggtgaat

SEQ ID NO: 3229 - DNA, 21 bp, synthetic construct
  source 1..21: mol_type = other DNA
tatgcgaaaatagggataaat

SEQ ID NO: 3230 - DNA, 21 bp, synthetic construct
  source 1..21: mol_type = other DNA
tactcaaagatgaacgtaaac

SEQ ID NO: 3231 - DNA, 21 bp, synthetic construct
  source 1..21: mol_type = other DNA
tatgcgaaaatggggcacaat

SEQ ID NO: 3232 - DNA, 21 bp, synthetic construct
  source 1..21: mol_type = other DNA
tactcacgcgccggcaacaac

SEQ ID NO: 3233 - DNA, 21 bp, synthetic construct
  source 1..21: mol_type = other DNA
tactcacgccccaactttaac

SEQ ID NO: 3234 - DNA, 21 bp, synthetic construct
  source 1..21: mol_type = other DNA
tatgcgaaaacggggtggaat

SEQ ID NO: 3235 - DNA, 21 bp, synthetic construct
  source 1..21: mol_type = other DNA
tatgtgaggtccggggggaat

SEQ ID NO: 3236 - DNA, 21 bp, synthetic construct
  source 1..21: mol_type = other DNA
tatgcgaggttgggggcgaat

SEQ ID NO: 3237 - DNA, 21 bp, synthetic construct
  source 1..21: mol_type = other DNA
tattccaaattcaatatgaat

SEQ ID NO: 3238 - DNA, 21 bp, synthetic construct
  source 1..21: mol_type = other DNA
cagggggaggagaggaaatgg

SEQ ID NO: 3239 - DNA, 21 bp, synthetic construct
  source 1..21: mol_type = other DNA
tattccagggcggggccgaat

SEQ ID NO: 3240 - DNA, 21 bp, synthetic construct
  source 1..21: mol_type = other DNA
tacgcccgcaccggccataac

SEQ ID NO: 3241 - DNA, 21 bp, synthetic construct
  source 1..21: mol_type = other DNA
ttttcacgcctgaacatcaac

SEQ ID NO: 3242 - DNA, 21 bp, synthetic construct
  source 1..21: mol_type = other DNA
tatgcgagggggaatacgaat

SEQ ID NO: 3243 - DNA, 21 bp, synthetic construct
  source 1..21: mol_type = other DNA
tactcacgccatggcctgaac

SEQ ID NO: 3244 - DNA, 21 bp, synthetic construct
  source 1..21: mol_type = other DNA
tatgcgaggttgaatcagaat

SEQ ID NO: 3245 - DNA, 21 bp, synthetic construct
  source 1..21: mol_type = other DNA
tattccaggatgggggcgaat

SEQ ID NO: 3246 - DNA, 21 bp, synthetic construct
  source 1..21: mol_type = other DNA
tacgcccgcaccaactacaac

SEQ ID NO: 3247 - DNA, 21 bp, synthetic construct
  source 1..21: mol_type = other DNA
tatgcgaaaaatgggccgaat

SEQ ID NO: 3248 - DNA, 21 bp, synthetic construct
  source 1..21: mol_type = other DNA
tacgccggccgcggccccaac

SEQ ID NO: 3249 - DNA, 21 bp, synthetic construct
  source 1..21: mol_type = other DNA
tactcaaagctgaactttaac

SEQ ID NO: 3250 - DNA, 21 bp, synthetic construct
  source 1..21: mol_type = other DNA
ttttcacgctcaggcgtaaac

SEQ ID NO: 3251 - DNA, 21 bp, synthetic construct
  source 1..21: mol_type = other DNA
ttctccaaaaataattataat

SEQ ID NO: 3252 - DNA, 21 bp, synthetic construct
  source 1..21: mol_type = other DNA
tactcacgccaaaacgccaac

SEQ ID NO: 3253 - DNA, 21 bp, synthetic construct
  source 1..21: mol_type = other DNA
ttctccaggatagggacgaat

SEQ ID NO: 3254 - DNA, 21 bp, synthetic construct
  source 1..21: mol_type = other DNA
ctggccaagctgggctttaac

SEQ ID NO: 3255 - DNA, 21 bp, synthetic construct
  source 1..21: mol_type = other DNA
tactcacgccaaggcatcaac

SEQ ID NO: 3256 - DNA, 21 bp, synthetic construct
  source 1..21: mol_type = other DNA
tattccaaattgaatacgaat

SEQ ID NO: 3257 - DNA, 21 bp, synthetic construct
  source 1..21: mol_type = other DNA
tactcaaagatgaacaacaac

SEQ ID NO: 3258 - DNA, 21 bp, synthetic construct
  source 1..21: mol_type = other DNA
ttctccaggcagaatgcgaat

SEQ ID NO: 3259 - DNA, 21 bp, synthetic construct
  source 1..21: mol_type = other DNA
ttcgcgaaatccgggtggaat

SEQ ID NO: 3260 - DNA, 21 bp, synthetic construct
  source 1..21: mol_type = other DNA
tactcacgcaccggctcaaac

SEQ ID NO: 3261 - DNA, 21 bp, synthetic construct
  source 1..21: mol_type = other DNA
aattggtcctccaatggggtg

SEQ ID NO: 3262 - DNA, 21 bp, synthetic construct
  source 1..21: mol_type = other DNA
tttgcccgcatgggcaccaac

SEQ ID NO: 3263 - DNA, 21 bp, synthetic construct
  source 1..21: mol_type = other DNA
ttcgcgaaacacaattataat

SEQ ID NO: 3264 - DNA, 21 bp, synthetic construct
  source 1..21: mol_type = other DNA
ttcgcgaggatggggcacaat

SEQ ID NO: 3265 - DNA, 21 bp, synthetic construct
  source 1..21: mol_type = other DNA
tatgcgaggtccggggcgaat

SEQ ID NO: 3266 - DNA, 21 bp, synthetic construct
  source 1..21: mol_type = other DNA
tatgcgaggggggggcacaat

SEQ ID NO: 3267 - DNA, 21 bp, synthetic construct
  source 1..21: mol_type = other DNA
tactcacgcaccggcatcaac

SEQ ID NO: 3268 - DNA, 21 bp, synthetic construct
  source 1..21: mol_type = other DNA
tatgcgaggttggggccgaat

SEQ ID NO: 3269 - DNA, 21 bp, synthetic construct
  source 1..21: mol_type = other DNA
atgaagtcaaccaacggcatc

SEQ ID NO: 3270 - DNA, 21 bp, synthetic construct
  source 1..21: mol_type = other DNA
tactcaaagtacggcgtaaac

SEQ ID NO: 3271 - DNA, 21 bp, synthetic construct
  source 1..21: mol_type = other DNA
tattccaaatccgggccgaat

SEQ ID NO: 3272 - DNA, 21 bp, synthetic construct
  source 1..21: mol_type = other DNA
ttctccaggcaggggttgaat

SEQ ID NO: 3273 - DNA, 21 bp, synthetic construct
  source 1..21: mol_type = other DNA
tactcaaagatcggctacaac

SEQ ID NO: 3274 - DNA, 21 bp, synthetic construct
  source 1..21: mol_type = other DNA
tacgcccgcatcggcaacaac

SEQ ID NO: 3275 - DNA, 21 bp, synthetic construct
  source 1..21: mol_type = other DNA
ttttcaaagctgaacgccaac

SEQ ID NO: 3276 - DNA, 21 bp, synthetic construct
  source 1..21: mol_type = other DNA
ctggccaaggccggccccaac

SEQ ID NO: 3277 - DNA, 21 bp, synthetic construct
  source 1..21: mol_type = other DNA
tttgccaagaacggctttaac

SEQ ID NO: 3278 - DNA, 21 bp, synthetic construct
  source 1..21: mol_type = other DNA
tactcaaagctgggcgtaaac

SEQ ID NO: 3279 - DNA, 21 bp, synthetic construct
  source 1..21: mol_type = other DNA
ctggccaagaccggcctgaac

SEQ ID NO: 3280 - DNA, 21 bp, synthetic construct
  source 1..21: mol_type = other DNA
ttctccaggatagggatgaat

SEQ ID NO: 3281 - DNA, 21 bp, synthetic construct
  source 1..21: mol_type = other DNA
tacgcccgcgccaacgccaac

SEQ ID NO: 3282 - DNA, 21 bp, synthetic construct
  source 1..21: mol_type = other DNA
tactcacgcggcggcatcaac

SEQ ID NO: 3283 - DNA, 21 bp, synthetic construct
  source 1..21: mol_type = other DNA
tactcaaagctgggcatgaac

SEQ ID NO: 3284 - DNA, 21 bp, synthetic construct
  source 1..21: mol_type = other DNA
ttcgcgaaatccgggatgaat

SEQ ID NO: 3285 - DNA, 21 bp, synthetic construct
  source 1..21: mol_type = other DNA
tacgcccgctcaaacaccaac

SEQ ID NO: 3286 - DNA, 21 bp, synthetic construct
  source 1..21: mol_type = other DNA
tattccaggacgaatttgaat

SEQ ID NO: 3287 - DNA, 21 bp, synthetic construct
  source 1..21: mol_type = other DNA
tactcaaagctgggctcaaac

SEQ ID NO: 3288 - DNA, 21 bp, synthetic construct
  source 1..21: mol_type = other DNA
ttcgcgagggggaatgtgaat

SEQ ID NO: 3289 - DNA, 21 bp, synthetic construct
  source 1..21: mol_type = other DNA
tgtggggggatagggaggtcc

SEQ ID NO: 3290 - DNA, 21 bp, synthetic construct
  source 1..21: mol_type = other DNA
tggatgtcaaccaacggcgta

SEQ ID NO: 3291 - DNA, 21 bp, synthetic construct
  source 1..21: mol_type = other DNA
tattccaaaatggggcacaat

SEQ ID NO: 3292 - DNA, 21 bp, synthetic construct
  source 1..21: mol_type = other DNA
tactcacgcctgaactcaaac

SEQ ID NO: 3293 - DNA, 21 bp, synthetic construct
  source 1..21: mol_type = other DNA
gagatggataatgtgaggtgg

SEQ ID NO: 3294 - DNA, 21 bp, synthetic construct
  source 1..21: mol_type = other DNA
ttctccaggcagaatttgaat

SEQ ID NO: 3295 - DNA, 21 bp, synthetic construct
  source 1..21: mol_type = other DNA
cagtatgggaaagtgtatata

SEQ ID NO: 3296 - DNA, 21 bp, synthetic construct
  source 1..21: mol_type = other DNA
tactcaaagcaaggcctgaac

SEQ ID NO: 3297 - DNA, 21 bp, synthetic construct
  source 1..21: mol_type = other DNA
tacgtacgctcatcacaaaac

SEQ ID NO: 3298 - DNA, 21 bp, synthetic construct
  source 1..21: mol_type = other DNA
tactcacgcatgaacaccaac

SEQ ID NO: 3299 - DNA, 21 bp, synthetic construct
  source 1..21: mol_type = other DNA
tactcacgctacggcgaaaac

SEQ ID NO: 3300 - DNA, 21 bp, synthetic construct
  source 1..21: mol_type = other DNA
ttctccaggatgaatcagaat

SEQ ID NO: 3301 - DNA, 21 bp, synthetic construct
  source 1..21: mol_type = other DNA
tattccaaatatggggcgaat

SEQ ID NO: 3302 - DNA, 21 bp, synthetic construct
  source 1..21: mol_type = other DNA
tattccaaaacggggtggaat

SEQ ID NO: 3303 - DNA, 21 bp, synthetic construct
  source 1..21: mol_type = other DNA
ttctccaggtccaattataat

SEQ ID NO: 3304 - DNA, 21 bp, synthetic construct
  source 1..21: mol_type = other DNA
cgcggcggctcatcaccctac

SEQ ID NO: 3305 - DNA, 21 bp, synthetic construct
  source 1..21: mol_type = other DNA
ctgtcaaagatgaactttaac

SEQ ID NO: 3306 - DNA, 21 bp, synthetic construct
  source 1..21: mol_type = other DNA
ttttcaaaggtaaactacaac

SEQ ID NO: 3307 - DNA, 21 bp, synthetic construct
  source 1..21: mol_type = other DNA
ttttcacgccaaaacatcaac

SEQ ID NO: 3308 - DNA, 21 bp, synthetic construct
  source 1..21: mol_type = other DNA
tactcaaagctgaacgtaaac

SEQ ID NO: 3309 - DNA, 21 bp, synthetic construct
  source 1..21: mol_type = other DNA
tattccagggtgaatcagaat

SEQ ID NO: 3310 - DNA, 21 bp, synthetic construct
  source 1..21: mol_type = other DNA
tattccaggtccgggacgaat

SEQ ID NO: 3311 - DNA, 21 bp, synthetic construct
  source 1..21: mol_type = other DNA
tactcacgcatcggcgccaac

SEQ ID NO: 3312 - DNA, 21 bp, synthetic construct
  source 1..21: mol_type = other DNA
tattccaggacgggggggaat

SEQ ID NO: 3313 - DNA, 21 bp, synthetic construct
  source 1..21: mol_type = other DNA
tatgcgaggacgggggcgaat

SEQ ID NO: 3314 - DNA, 21 bp, synthetic construct
  source 1..21: mol_type = other DNA
tatgcgaggtccgggcacaat

SEQ ID NO: 3315 - DNA, 21 bp, synthetic construct
  source 1..21: mol_type = other DNA
ctgtcaaagatgggcgtaaac

SEQ ID NO: 3316 - DNA, 21 bp, synthetic construct
  source 1..21: mol_type = other DNA
tattccaggacggggatgaat

SEQ ID NO: 3317 - DNA, 21 bp, synthetic construct
  source 1..21: mol_type = other DNA
ttttcaaagatgggccccaac

SEQ ID NO: 3318 - DNA, 21 bp, synthetic construct
  source 1..21: mol_type = other DNA
tatgcgaggacggggccgaat

SEQ ID NO: 3319 - DNA, 21 bp, synthetic construct
  source 1..21: mol_type = other DNA
tacgccaagggcggctacaac

SEQ ID NO: 3320 - DNA, 21 bp, synthetic construct
  source 1..21: mol_type = other DNA
ttcgcgagggcgaattataat

SEQ ID NO: 3321 - DNA, 21 bp, synthetic construct
  source 1..21: mol_type = other DNA
tatgcgaaaacgaatttcaat

SEQ ID NO: 3322 - DNA, 21 bp, synthetic construct
  source 1..21: mol_type = other DNA
tatgcgaggatggggccgaat

SEQ ID NO: 3323 - DNA, 21 bp, synthetic construct
  source 1..21: mol_type = other DNA
tatgcgaaaacggggccgaat

SEQ ID NO: 3324 - DNA, 21 bp, synthetic construct
  source 1..21: mol_type = other DNA
tacgtacgcaccggcgtaaac

SEQ ID NO: 3325 - DNA, 21 bp, synthetic construct
  source 1..21: mol_type = other DNA
tacgcccgcacctcaggcaac

SEQ ID NO: 3326 - DNA, 21 bp, synthetic construct
  source 1..21: mol_type = other DNA
tatgcgaggaaaggggataat

SEQ ID NO: 3327 - DNA, 21 bp, synthetic construct
  source 1..21: mol_type = other DNA
atgcacaatgggacgaatgcg

SEQ ID NO: 3328 - DNA, 21 bp, synthetic construct
  source 1..21: mol_type = other DNA
tatgcgagggggaatgcgaat

SEQ ID NO: 3329 - DNA, 21 bp, synthetic construct
  source 1..21: mol_type = other DNA
tatgcgaaaatgggggcgaat

SEQ ID NO: 3330 - DNA, 21 bp, synthetic construct
  source 1..21: mol_type = other DNA
ctggcccgcaccggcgaaaac

SEQ ID NO: 3331 - DNA, 21 bp, synthetic construct
  source 1..21: mol_type = other DNA
ttttcacgcctgaacaccaac

SEQ ID NO: 3332 - DNA, 21 bp, synthetic construct
  source 1..21: mol_type = other DNA
tattccaggaataattccaat

SEQ ID NO: 3333 - DNA, 21 bp, synthetic construct
  source 1..21: mol_type = other DNA
ctgaagtcaaccaacggcgta

SEQ ID NO: 3334 - DNA, 21 bp, synthetic construct
  source 1..21: mol_type = other DNA
tacgtacgctcaaacgtaggc

SEQ ID NO: 3335 - DNA, 21 bp, synthetic construct
  source 1..21: mol_type = other DNA
tacacctcaaccaacggcatc

SEQ ID NO: 3336 - DNA, 21 bp, synthetic construct
  source 1..21: mol_type = other DNA
tattccaaaatgaatcacaat

SEQ ID NO: 3337 - DNA, 21 bp, synthetic construct
  source 1..21: mol_type = other DNA
tattccaggtccaatttgaat

SEQ ID NO: 3338 - DNA, 21 bp, synthetic construct
  source 1..21: mol_type = other DNA
tactcaaagctgaacatgaac

SEQ ID NO: 3339 - DNA, 21 bp, synthetic construct
  source 1..21: mol_type = other DNA
tactcaaaggtaggctacaac

SEQ ID NO: 3340 - DNA, 21 bp, synthetic construct
  source 1..21: mol_type = other DNA
tactcaaagctgggcaccaac

SEQ ID NO: 3341 - DNA, 21 bp, synthetic construct
  source 1..21: mol_type = other DNA
tactcaaagcgcggcgacaac

SEQ ID NO: 3342 - DNA, 21 bp, synthetic construct
  source 1..21: mol_type = other DNA
tactcacgcaccggcaacaac

SEQ ID NO: 3343 - DNA, 21 bp, synthetic construct
  source 1..21: mol_type = other DNA
ttctccagggtgaatgtgaat

SEQ ID NO: 3344 - DNA, 21 bp, synthetic construct
  source 1..21: mol_type = other DNA
tatttcacggggaggacgtcc

SEQ ID NO: 3345 - DNA, 21 bp, synthetic construct
  source 1..21: mol_type = other DNA
ttcgcgaggttgaataataat

SEQ ID NO: 3346 - DNA, 21 bp, synthetic construct
  source 1..21: mol_type = other DNA
ttcgcgaaaatagggttcaat

SEQ ID NO: 3347 - DNA, 21 bp, synthetic construct
  source 1..21: mol_type = other DNA
tattccaggatagggtccaat

SEQ ID NO: 3348 - DNA, 21 bp, synthetic construct
  source 1..21: mol_type = other DNA
ttcgcgaggatggggaataat

SEQ ID NO: 3349 - DNA, 21 bp, synthetic construct
  source 1..21: mol_type = other DNA
tattccagggggaatttcaat

SEQ ID NO: 3350 - DNA, 21 bp, synthetic construct
  source 1..21: mol_type = other DNA
tactcacgcctgaacatgaac

SEQ ID NO: 3351 - DNA, 21 bp, synthetic construct
  source 1..21: mol_type = other DNA
tatacgtccgcgtatccgagg

SEQ ID NO: 3352 - DNA, 21 bp, synthetic construct
  source 1..21: mol_type = other DNA
tattccaggttgaatgagaat

SEQ ID NO: 3353 - DNA, 21 bp, synthetic construct
  source 1..21: mol_type = other DNA
tactcaaagatcggctcaaac

SEQ ID NO: 3354 - DNA, 21 bp, synthetic construct
  source 1..21: mol_type = other DNA
ttttcacgcgtaggctacaac

SEQ ID NO: 3355 - DNA, 21 bp, synthetic construct
  source 1..21: mol_type = other DNA
tacgcccgccatggcgtaaac

SEQ ID NO: 3356 - DNA, 21 bp, synthetic construct
  source 1..21: mol_type = other DNA
tactcacgcatcaactcaaac

SEQ ID NO: 3357 - DNA, 21 bp, synthetic construct
  source 1..21: mol_type = other DNA
tactcacgcaacggcgccaac

SEQ ID NO: 3358 - DNA, 21 bp, synthetic construct
  source 1..21: mol_type = other DNA
tacgcccgcaccaacatgaac

SEQ ID NO: 3359 - DNA, 21 bp, synthetic construct
  source 1..21: mol_type = other DNA
tactcacgccccaacgtaaac

SEQ ID NO: 3360 - DNA, 21 bp, synthetic construct
  source 1..21: mol_type = other DNA
ttcgcgaggcaggggatgaat

SEQ ID NO: 3361 - DNA, 21 bp, synthetic construct
  source 1..21: mol_type = other DNA
tactcacgcaccaacgccaac

SEQ ID NO: 3362 - DNA, 21 bp, synthetic construct
  source 1..21: mol_type = other DNA
tattccaaacacgggacgaat

SEQ ID NO: 3363 - DNA, 21 bp, synthetic construct
  source 1..21: mol_type = other DNA
ctggccaagctgggctacaac

SEQ ID NO: 3364 - DNA, 21 bp, synthetic construct
  source 1..21: mol_type = other DNA
ttctccagggcgaatgcgaat

SEQ ID NO: 3365 - DNA, 21 bp, synthetic construct
  source 1..21: mol_type = other DNA
tactcacgcatcaactacaac

SEQ ID NO: 3366 - DNA, 21 bp, synthetic construct
  source 1..21: mol_type = other DNA
ctggccaagatgggccataac

SEQ ID NO: 3367 - DNA, 21 bp, synthetic construct
  source 1..21: mol_type = other DNA
ctgtcaaagctgggcatgaac

SEQ ID NO: 3368 - DNA, 21 bp, synthetic construct
  source 1..21: mol_type = other DNA
ctggccaagcatggcatcaac

SEQ ID NO: 3369 - DNA, 21 bp, synthetic construct
  source 1..21: mol_type = other DNA
tattccaaaaaaggggataat

SEQ ID NO: 3370 - DNA, 21 bp, synthetic construct
  source 1..21: mol_type = other DNA
ttttcacgcctgaacaacaac

SEQ ID NO: 3371 - DNA, 21 bp, synthetic construct
  source 1..21: mol_type = other DNA
ttttcacgccataaccaaaac

SEQ ID NO: 3372 - DNA, 21 bp, synthetic construct
  source 1..21: mol_type = other DNA
ttttcacgcgtaggcggcaac

SEQ ID NO: 3373 - DNA, 21 bp, synthetic construct
  source 1..21: mol_type = other DNA
tactcacgcgtaaaccccaac

SEQ ID NO: 3374 - DNA, 21 bp, synthetic construct
  source 1..21: mol_type = other DNA
tactcacgcaccggcgtaaac

SEQ ID NO: 3375 - DNA, 21 bp, synthetic construct
  source 1..21: mol_type = other DNA
tcctggtccacgaatgggata

SEQ ID NO: 3376 - DNA, 21 bp, synthetic construct
  source 1..21: mol_type = other DNA
ctgtcacgcctgaacgacaac

SEQ ID NO: 3377 - DNA, 21 bp, synthetic construct
  source 1..21: mol_type = other DNA
tactcacgcatcaacaccaac

SEQ ID NO: 3378 - DNA, 21 bp, synthetic construct
  source 1..21: mol_type = other DNA
ttgaatacgtccgtgaaatgg

SEQ ID NO: 3379 - DNA, 21 bp, synthetic construct
  source 1..21: mol_type = other DNA
tactcaaagaacggctacaac

SEQ ID NO: 3380 - DNA, 21 bp, synthetic construct
  source 1..21: mol_type = other DNA
tacacccattcaaacaagcaa

SEQ ID NO: 3381 - DNA, 21 bp, synthetic construct
  source 1..21: mol_type = other DNA
ttcgcgaggtccgggatgaat

SEQ ID NO: 3382 - DNA, 21 bp, synthetic construct
  source 1..21: mol_type = other DNA
tactcaaagatcaactacaac

SEQ ID NO: 3383 - DNA, 21 bp, synthetic construct
  source 1..21: mol_type = other DNA
tttgcccgcaccggcggcaac

SEQ ID NO: 3384 - DNA, 21 bp, synthetic construct
  source 1..21: mol_type = other DNA
ttctccaaaatagggatgaat

SEQ ID NO: 3385 - DNA, 21 bp, synthetic construct
  source 1..21: mol_type = other DNA
tattccaggacgaatcagaat

SEQ ID NO: 3386 - DNA, 21 bp, synthetic construct
  source 1..21: mol_type = other DNA
ttctccaaagggaatttcaat

SEQ ID NO: 3387 - DNA, 21 bp, synthetic construct
  source 1..21: mol_type = other DNA
tatgcgaggaatgggacgaat

SEQ ID NO: 3388 - DNA, 21 bp, synthetic construct
  source 1..21: mol_type = other DNA
tatgcgagggaggggaggaat

SEQ ID NO: 3389 - DNA, 21 bp, synthetic construct
  source 1..21: mol_type = other DNA
tactcacgcaccaactacaac

SEQ ID NO: 3390 - DNA, 21 bp, synthetic construct
  source 1..21: mol_type = other DNA
atattgtcctccaatggggtg

SEQ ID NO: 3391 - DNA, 21 bp, synthetic construct
  source 1..21: mol_type = other DNA
tactcaaagctgggctacaac

SEQ ID NO: 3392 - DNA, 21 bp, synthetic construct
  source 1..21: mol_type = other DNA
tactcaaagctgaactcaaac

SEQ ID NO: 3393 - DNA, 21 bp, synthetic construct
  source 1..21: mol_type = other DNA
tactcacgcgtaggccaaaac

SEQ ID NO: 3394 - DNA, 21 bp, synthetic construct
  source 1..21: mol_type = other DNA
ttgtccaggcagaatttcaat

SEQ ID NO: 3395 - DNA, 21 bp, synthetic construct
  source 1..21: mol_type = other DNA
tattccaggacgggggcgaat

SEQ ID NO: 3396 - DNA, 21 bp, synthetic construct
  source 1..21: mol_type = other DNA
tactcacgcatgggcaacaac

SEQ ID NO: 3397 - DNA, 21 bp, synthetic construct
  source 1..21: mol_type = other DNA
cgcgaatcaggcctggcctgg

SEQ ID NO: 3398 - DNA, 21 bp, synthetic construct
  source 1..21: mol_type = other DNA
ttcgcgaggaatgggtccaat

SEQ ID NO: 3399 - DNA, 21 bp, synthetic construct
  source 1..21: mol_type = other DNA
tactcacgcctgaacgccaac

SEQ ID NO: 3400 - DNA, 21 bp, synthetic construct
  source 1..21: mol_type = other DNA
ttctccaaaataggggcgaat

SEQ ID NO: 3401 - DNA, 21 bp, synthetic construct
  source 1..21: mol_type = other DNA
ttcgcgagggggaattataat

SEQ ID NO: 3402 - DNA, 21 bp, synthetic construct
  source 1..21: mol_type = other DNA
tttgcccgcgtaggcctgaac

SEQ ID NO: 3403 - DNA, 21 bp, synthetic construct
  source 1..21: mol_type = other DNA
tattccaaacacaatccgaat

SEQ ID NO: 3404 - DNA, 21 bp, synthetic construct
  source 1..21: mol_type = other DNA
tacgcccgcaccaactttaac

SEQ ID NO: 3405 - DNA, 21 bp, synthetic construct
  source 1..21: mol_type = other DNA
ttggcgagggtggggttgaat

SEQ ID NO: 3406 - DNA, 21 bp, synthetic construct
  source 1..21: mol_type = other DNA
aaccaacgcggctacggcaac

SEQ ID NO: 3407 - DNA, 21 bp, synthetic construct
  source 1..21: mol_type = other DNA
tactcaaagtcaaacaccaac

SEQ ID NO: 3408 - DNA, 21 bp, synthetic construct
  source 1..21: mol_type = other DNA
tactcaaaggccggccataac

SEQ ID NO: 3409 - DNA, 21 bp, synthetic construct
  source 1..21: mol_type = other DNA
tactcacgccaaaacatcaac

SEQ ID NO: 3410 - DNA, 21 bp, synthetic construct
  source 1..21: mol_type = other DNA
cactattcctccaatggggtg

SEQ ID NO: 3411 - DNA, 21 bp, synthetic construct
  source 1..21: mol_type = other DNA
tatgcgagggcgggggggaat

SEQ ID NO: 3412 - DNA, 21 bp, synthetic construct
  source 1..21: mol_type = other DNA
tttgcccgctcaggcaccaac

SEQ ID NO: 3413 - DNA, 21 bp, synthetic construct
  source 1..21: mol_type = other DNA
ttcgcgaaagtggggtataat

SEQ ID NO: 3414 - DNA, 21 bp, synthetic construct
  source 1..21: mol_type = other DNA
tattccaggtatgggataaat

SEQ ID NO: 3415 - DNA, 21 bp, synthetic construct
  source 1..21: mol_type = other DNA
ttttcacgcctgaacctgaac

SEQ ID NO: 3416 - DNA, 21 bp, synthetic construct
  source 1..21: mol_type = other DNA
ttctccaggttggggccgaat

SEQ ID NO: 3417 - DNA, 21 bp, synthetic construct
  source 1..21: mol_type = other DNA
tatgcgaaaaataattggaat

SEQ ID NO: 3418 - DNA, 21 bp, synthetic construct
  source 1..21: mol_type = other DNA
tatttcgtggggtccagggcg

SEQ ID NO: 3419 - DNA, 21 bp, synthetic construct
  source 1..21: mol_type = other DNA
tactcaaagctgggctttaac

SEQ ID NO: 3420 - DNA, 21 bp, synthetic construct
  source 1..21: mol_type = other DNA
ttttcaaaggccggctacaac

SEQ ID NO: 3421 - DNA, 21 bp, synthetic construct
  source 1..21: mol_type = other DNA
tatgcgaggaaaaatgataat

SEQ ID NO: 3422 - DNA, 21 bp, synthetic construct
  source 1..21: mol_type = other DNA
tacgcccgctcaaacatcaac

SEQ ID NO: 3423 - DNA, 21 bp, synthetic construct
  source 1..21: mol_type = other DNA
tactcacgcgtaggcggcaac

SEQ ID NO: 3424 - DNA, 21 bp, synthetic construct
  source 1..21: mol_type = other DNA
ttttcacgcggcaacgtaaac

SEQ ID NO: 3425 - DNA, 21 bp, synthetic construct
  source 1..21: mol_type = other DNA
atgtgggacggcacctcaccc

SEQ ID NO: 3426 - DNA, 21 bp, synthetic construct
  source 1..21: mol_type = other DNA
ttttcacgccaaggcgccaac

SEQ ID NO: 3427 - DNA, 21 bp, synthetic construct
  source 1..21: mol_type = other DNA
tattccagggtgggggcgaat

SEQ ID NO: 3428 - DNA, 21 bp, synthetic construct
  source 1..21: mol_type = other DNA
tactcaaaggccggccccaac

SEQ ID NO: 3429 - DNA, 21 bp, synthetic construct
  source 1..21: mol_type = other DNA
tacgccaagatgggcatcaac

SEQ ID NO: 3430 - DNA, 21 bp, synthetic construct
  source 1..21: mol_type = other DNA
ttttcaaagatgaaccataac

SEQ ID NO: 3431 - DNA, 21 bp, synthetic construct
  source 1..21: mol_type = other DNA
ttttcacgcatgggcatcaac

SEQ ID NO: 3432 - DNA, 21 bp, synthetic construct
  source 1..21: mol_type = other DNA
tacgccaaggtaggctttaac

SEQ ID NO: 3433 - DNA, 21 bp, synthetic construct
  source 1..21: mol_type = other DNA
tactcacgcctgggctcaaac

SEQ ID NO: 3434 - DNA, 21 bp, synthetic construct
  source 1..21: mol_type = other DNA
aggtccgggtatggggcgggg

SEQ ID NO: 3435 - DNA, 21 bp, synthetic construct
  source 1..21: mol_type = other DNA
tacgccaagggcaacatgaac

SEQ ID NO: 3436 - DNA, 21 bp, synthetic construct
  source 1..21: mol_type = other DNA
tactcacgccataacgccaac

SEQ ID NO: 3437 - DNA, 21 bp, synthetic construct
  source 1..21: mol_type = other DNA
tactcaaagctgaacctgaac

SEQ ID NO: 3438 - DNA, 21 bp, synthetic construct
  source 1..21: mol_type = other DNA
ttctccaggttggggacgaat

SEQ ID NO: 3439 - DNA, 21 bp, synthetic construct
  source 1..21: mol_type = other DNA
ttttcacgcaccaactacaac

SEQ ID NO: 3440 - DNA, 21 bp, synthetic construct
  source 1..21: mol_type = other DNA
ttttcacgcgtaggcctgaac

SEQ ID NO: 3441 - DNA, 21 bp, synthetic construct
  source 1..21: mol_type = other DNA
atacactccacgaatggggtg

SEQ ID NO: 3442 - DNA, 21 bp, synthetic construct
  source 1..21: mol_type = other DNA
tactcaaagaccggccaaaac

SEQ ID NO: 3443 - DNA, 21 bp, synthetic construct
  source 1..21: mol_type = other DNA
ataaattccacgaatggggtg

SEQ ID NO: 3444 - DNA, 21 bp, synthetic construct
  source 1..21: mol_type = other DNA
tactcacgcatgaacggcaac

SEQ ID NO: 3445 - DNA, 21 bp, synthetic construct
  source 1..21: mol_type = other DNA
tactcacgcggcggcgccaac

SEQ ID NO: 3446 - DNA, 21 bp, synthetic construct
  source 1..21: mol_type = other DNA
tacgcccgccatggctttaac

SEQ ID NO: 3447 - DNA, 21 bp, synthetic construct
  source 1..21: mol_type = other DNA
tactcacgccataacggcaac

SEQ ID NO: 3448 - DNA, 21 bp, synthetic construct
  source 1..21: mol_type = other DNA
tacgcccgcaccggcaacaac

SEQ ID NO: 3449 - DNA, 21 bp, synthetic construct
  source 1..21: mol_type = other DNA
tactcaaagcaaaactggaac

SEQ ID NO: 3450 - DNA, 21 bp, synthetic construct
  source 1..21: mol_type = other DNA
tattccaggggggggttgaat

SEQ ID NO: 3451 - DNA, 21 bp, synthetic construct
  source 1..21: mol_type = other DNA
agggggcacgatgtgtcctgg

SEQ ID NO: 3452 - DNA, 21 bp, synthetic construct
  source 1..21: mol_type = other DNA
tactcacgcaacaacaccaac

SEQ ID NO: 3453 - DNA, 21 bp, synthetic construct
  source 1..21: mol_type = other DNA
tactcacgctcaaacaacaac

SEQ ID NO: 3454 - DNA, 21 bp, synthetic construct
  source 1..21: mol_type = other DNA
tacgcccgcatcggcgccaac

SEQ ID NO: 3455 - DNA, 21 bp, synthetic construct
  source 1..21: mol_type = other DNA
ttttcacgcaacggcctgaac

SEQ ID NO: 3456 - DNA, 21 bp, synthetic construct
  source 1..21: mol_type = other DNA
tactcacgcaacaactttaac

SEQ ID NO: 3457 - DNA, 21 bp, synthetic construct
  source 1..21: mol_type = other DNA
tactcacgcggcggccaaaac

SEQ ID NO: 3458 - DNA, 21 bp, synthetic construct
  source 1..21: mol_type = other DNA
tactcacgcggcaacaacaac

SEQ ID NO: 3459 - DNA, 21 bp, synthetic construct
  source 1..21: mol_type = other DNA
tactcacgcatgggccaaaac

SEQ ID NO: 3460 - DNA, 21 bp, synthetic construct
  source 1..21: mol_type = other DNA
ctgtcaaagatcggcgaaaac

SEQ ID NO: 3461 - DNA, 21 bp, synthetic construct
  source 1..21: mol_type = other DNA
ctgtcacgcgccaactttaac

SEQ ID NO: 3462 - DNA, 21 bp, synthetic construct
  source 1..21: mol_type = other DNA
tttgcccgcgtaggcgccaac

SEQ ID NO: 3463 - DNA, 21 bp, synthetic construct
  source 1..21: mol_type = other DNA
tactcaaagtacggccataac

SEQ ID NO: 3464 - DNA, 21 bp, synthetic construct
  source 1..21: mol_type = other DNA
aaagcggcgtcccacgggtgg

SEQ ID NO: 3465 - DNA, 21 bp, synthetic construct
  source 1..21: mol_type = other DNA
tattccaaaatagggcacaat

SEQ ID NO: 3466 - DNA, 21 bp, synthetic construct
  source 1..21: mol_type = other DNA
tactcacgccatggcgtaaac

SEQ ID NO: 3467 - DNA, 21 bp, synthetic construct
  source 1..21: mol_type = other DNA
tactcaaagcaaaactttaac

SEQ ID NO: 3468 - DNA, 21 bp, synthetic construct
  source 1..21: mol_type = other DNA
tatgcgagggggggggtgaat

SEQ ID NO: 3469 - DNA, 21 bp, synthetic construct
  source 1..21: mol_type = other DNA
ttttcacgcaccaacatcaac

SEQ ID NO: 3470 - DNA, 21 bp, synthetic construct
  source 1..21: mol_type = other DNA
tacgcccgccaaaacaacaac

SEQ ID NO: 3471 - DNA, 21 bp, synthetic construct
  source 1..21: mol_type = other DNA
tatgcgaggtatgggatgaat

SEQ ID NO: 3472 - DNA, 21 bp, synthetic construct
  source 1..21: mol_type = other DNA
ccgtatgcgaaatccgtggat

SEQ ID NO: 3473 - DNA, 21 bp, synthetic construct
  source 1..21: mol_type = other DNA
tacgcccgcgccaactcaaac

SEQ ID NO: 3474 - DNA, 21 bp, synthetic construct
  source 1..21: mol_type = other DNA
ttcgcgaggatgaataataat

SEQ ID NO: 3475 - DNA, 21 bp, synthetic construct
  source 1..21: mol_type = other DNA
tttgcccgctcaggccataac

SEQ ID NO: 3476 - DNA, 21 bp, synthetic construct
  source 1..21: mol_type = other DNA
tatgcgaaatgggggccgaat

SEQ ID NO: 3477 - DNA, 21 bp, synthetic construct
  source 1..21: mol_type = other DNA
tatacgcacacgcagaggaat

SEQ ID NO: 3478 - DNA, 21 bp, synthetic construct
  source 1..21: mol_type = other DNA
tatgcgaaatccaatccgaat

SEQ ID NO: 3479 - DNA, 21 bp, synthetic construct
  source 1..21: mol_type = other DNA
aattggtccacgaatgggata

SEQ ID NO: 3480 - DNA, 21 bp, synthetic construct
  source 1..21: mol_type = other DNA
tacgcccgccaaaacatgaac

SEQ ID NO: 3481 - DNA, 21 bp, synthetic construct
  source 1..21: mol_type = other DNA
tacgcccgccaaaacatcaac

SEQ ID NO: 3482 - DNA, 21 bp, synthetic construct
  source 1..21: mol_type = other DNA
tacgcccgcgccggctttaac

SEQ ID NO: 3483 - DNA, 21 bp, synthetic construct
  source 1..21: mol_type = other DNA
tactcaaagtacggccaaaac

SEQ ID NO: 3484 - DNA, 21 bp, synthetic construct
  source 1..21: mol_type = other DNA
tacgccaagatcggcaagaac

SEQ ID NO: 3485 - DNA, 21 bp, synthetic construct
  source 1..21: mol_type = other DNA
ttttcaaagatcggcgtaaac

SEQ ID NO: 3486 - DNA, 21 bp, synthetic construct
  source 1..21: mol_type = other DNA
ttgtccagggtgaatgataat

SEQ ID NO: 3487 - DNA, 21 bp, synthetic construct
  source 1..21: mol_type = other DNA
tttgcccgcgaaggccgcaac

SEQ ID NO: 3488 - DNA, 21 bp, synthetic construct
  source 1..21: mol_type = other DNA
acggcgaggggggatagggcg

SEQ ID NO: 3489 - DNA, 21 bp, synthetic construct
  source 1..21: mol_type = other DNA
ttttcacgcatgaacatcaac

SEQ ID NO: 3490 - DNA, 21 bp, synthetic construct
  source 1..21: mol_type = other DNA
tacgccaagtcaggccccaac

SEQ ID NO: 3491 - DNA, 21 bp, synthetic construct
  source 1..21: mol_type = other DNA
ttttcaaagctgggcatcaac

SEQ ID NO: 3492 - DNA, 21 bp, synthetic construct
  source 1..21: mol_type = other DNA
tactcacgcatcggcctgaac

SEQ ID NO: 3493 - DNA, 21 bp, synthetic construct
  source 1..21: mol_type = other DNA
tacgcccgctcaggcaacaac

SEQ ID NO: 3494 - DNA, 21 bp, synthetic construct
  source 1..21: mol_type = other DNA
tacgcccgcaccggccaaaac

SEQ ID NO: 3495 - DNA, 21 bp, synthetic construct
  source 1..21: mol_type = other DNA
gtgaggtccgggtccataggg

SEQ ID NO: 3496 - DNA, 21 bp, synthetic construct
  source 1..21: mol_type = other DNA
tactcacgcgccggctcaaac

SEQ ID NO: 3497 - DNA, 21 bp, synthetic construct
  source 1..21: mol_type = other DNA
tactcaaagtacggcaccaac

SEQ ID NO: 3498 - DNA, 21 bp, synthetic construct
  source 1..21: mol_type = other DNA
tatgcgaggcagaatgagaat

SEQ ID NO: 3499 - DNA, 21 bp, synthetic construct
  source 1..21: mol_type = other DNA
tattccaaatataatgtgaat

SEQ ID NO: 3500 - DNA, 21 bp, synthetic construct
  source 1..21: mol_type = other DNA
tattccaggcacaatttgaat

SEQ ID NO: 3501 - DNA, 21 bp, synthetic construct
  source 1..21: mol_type = other DNA
tattccaaaatagggttcaat

SEQ ID NO: 3502 - DNA, 21 bp, synthetic construct
  source 1..21: mol_type = other DNA
ttgtccagggtgggggcgtcc

SEQ ID NO: 3503 - DNA, 21 bp, synthetic construct
  source 1..21: mol_type = other DNA
ttctccaggtccaatgtgaat

SEQ ID NO: 3504 - DNA, 21 bp, synthetic construct
  source 1..21: mol_type = other DNA
tattccaggttcaataataat

SEQ ID NO: 3505 - DNA, 21 bp, synthetic construct
  source 1..21: mol_type = other DNA
tttgccaagcaaggctttaac

SEQ ID NO: 3506 - DNA, 21 bp, synthetic construct
  source 1..21: mol_type = other DNA
ttctccaaacacaatttcaat

SEQ ID NO: 3507 - DNA, 21 bp, synthetic construct
  source 1..21: mol_type = other DNA
tacgcccgccccggccataac

SEQ ID NO: 3508 - DNA, 21 bp, synthetic construct
  source 1..21: mol_type = other DNA
aaccgctcaaccaacggcgta

SEQ ID NO: 3509 - DNA, 21 bp, synthetic construct
  source 1..21: mol_type = other DNA
tggatgtccacgaatgggata

SEQ ID NO: 3510 - DNA, 21 bp, synthetic construct
  source 1..21: mol_type = other DNA
tactcaaagctgaactacaac

SEQ ID NO: 3511 - DNA, 21 bp, synthetic construct
  source 1..21: mol_type = other DNA
ttgagggggaaagggtatgat

SEQ ID NO: 3512 - DNA, 21 bp, synthetic construct
  source 1..21: mol_type = other DNA
tactcaaagtacggctcaaac

SEQ ID NO: 3513 - DNA, 21 bp, synthetic construct
  source 1..21: mol_type = other DNA
ttttcacgcgccggccccaac

SEQ ID NO: 3514 - DNA, 21 bp, synthetic construct
  source 1..21: mol_type = other DNA
aaggacaacaccccctactgg

SEQ ID NO: 3515 - DNA, 21 bp, synthetic construct
  source 1..21: mol_type = other DNA
ttcgcgagggggggggggaat

SEQ ID NO: 3516 - DNA, 21 bp, synthetic construct
  source 1..21: mol_type = other DNA
ctgtcaaagaccggcctgaac

SEQ ID NO: 3517 - DNA, 21 bp, synthetic construct
  source 1..21: mol_type = other DNA
tactcacgctcaaacgacaac

SEQ ID NO: 3518 - DNA, 21 bp, synthetic construct
  source 1..21: mol_type = other DNA
tactcacgccccaacatcaac

SEQ ID NO: 3519 - DNA, 21 bp, synthetic construct
  source 1..21: mol_type = other DNA
tacgccaagctgaaccataac

SEQ ID NO: 3520 - DNA, 21 bp, synthetic construct
  source 1..21: mol_type = other DNA
tatacgaggatgcaccagaat

SEQ ID NO: 3521 - DNA, 21 bp, synthetic construct
  source 1..21: mol_type = other DNA
ttctccaggtccgggttcaat

SEQ ID NO: 3522 - DNA, 21 bp, synthetic construct
  source 1..21: mol_type = other DNA
tttgcccgcaacggccccaac

SEQ ID NO: 3523 - DNA, 21 bp, synthetic construct
  source 1..21: mol_type = other DNA
tattccaaaaataatgtgaat

SEQ ID NO: 3524 - DNA, 21 bp, synthetic construct
  source 1..21: mol_type = other DNA
cgcggctcacaaacctcatac

SEQ ID NO: 3525 - DNA, 21 bp, synthetic construct
  source 1..21: mol_type = other DNA
tacgcccgcgtaggcggcaac

SEQ ID NO: 3526 - DNA, 21 bp, synthetic construct
  source 1..21: mol_type = other DNA
tattccaggataaatgggaat

SEQ ID NO: 3527 - DNA, 21 bp, synthetic construct
  source 1..21: mol_type = other DNA
tactcaaagtggaacgaaaac

SEQ ID NO: 3528 - DNA, 21 bp, synthetic construct
  source 1..21: mol_type = other DNA
tactcacgcatcggcaacaac

SEQ ID NO: 3529 - DNA, 21 bp, synthetic construct
  source 1..21: mol_type = other DNA
tacgccaagtacggctcaaac

SEQ ID NO: 3530 - DNA, 21 bp, synthetic construct
  source 1..21: mol_type = other DNA
ccgacgtccacgaatggggtg

SEQ ID NO: 3531 - DNA, 21 bp, synthetic construct
  source 1..21: mol_type = other DNA
ttcgcgagggcggggcacaat

SEQ ID NO: 3532 - DNA, 21 bp, synthetic construct
  source 1..21: mol_type = other DNA
ctgtcaaaggtaggcgccaac

SEQ ID NO: 3533 - DNA, 21 bp, synthetic construct
  source 1..21: mol_type = other DNA
tactcacgccccggcatgaac

SEQ ID NO: 3534 - DNA, 21 bp, synthetic construct
  source 1..21: mol_type = other DNA
tacgccaagcatggctcaaac

SEQ ID NO: 3535 - DNA, 21 bp, synthetic construct
  source 1..21: mol_type = other DNA
ttcgcgaggtataatgggaat

SEQ ID NO: 3536 - DNA, 21 bp, synthetic construct
  source 1..21: mol_type = other DNA
tatgcgaggataaataataat

SEQ ID NO: 3537 - DNA, 21 bp, synthetic construct
  source 1..21: mol_type = other DNA
aaattggataggtccaattgg

SEQ ID NO: 3538 - DNA, 21 bp, synthetic construct
  source 1..21: mol_type = other DNA
ttgcacagggcggggatatcc

SEQ ID NO: 3539 - DNA, 21 bp, synthetic construct
  source 1..21: mol_type = other DNA
ttttcacgcgccggcgtaaac

SEQ ID NO: 3540 - DNA, 21 bp, synthetic construct
  source 1..21: mol_type = other DNA
ttctccaggatgaatgcgaat

SEQ ID NO: 3541 - DNA, 21 bp, synthetic construct
  source 1..21: mol_type = other DNA
ttttcacgcatgaacatgaac

SEQ ID NO: 3542 - DNA, 21 bp, synthetic construct
  source 1..21: mol_type = other DNA
ttctccagggtgaatacgaat

SEQ ID NO: 3543 - DNA, 21 bp, synthetic construct
  source 1..21: mol_type = other DNA
tataattccacgaatggggtg

SEQ ID NO: 3544 - DNA, 21 bp, synthetic construct
  source 1..21: mol_type = other DNA
cgcctgtacgacgcctacgaa

SEQ ID NO: 3545 - DNA, 21 bp, synthetic construct
  source 1..21: mol_type = other DNA
tacgcccgcatcggcaccaac

SEQ ID NO: 3546 - DNA, 21 bp, synthetic construct
  source 1..21: mol_type = other DNA
tactcaaagggcggcatgaac

SEQ ID NO: 3547 - DNA, 21 bp, synthetic construct
  source 1..21: mol_type = other DNA
ctggccaagatgggcaacaac

SEQ ID NO: 3548 - DNA, 21 bp, synthetic construct
  source 1..21: mol_type = other DNA
gtgatatccacgaatggggtg

SEQ ID NO: 3549 - DNA, 21 bp, synthetic construct
  source 1..21: mol_type = other DNA
tatgcgaaacacgggtggaat

SEQ ID NO: 3550 - DNA, 21 bp, synthetic construct
  source 1..21: mol_type = other DNA
tacgcccgcggcaacatcaac

SEQ ID NO: 3551 - DNA, 21 bp, synthetic construct
  source 1..21: mol_type = other DNA
gtatggtcaaccaacggcatc

SEQ ID NO: 3552 - DNA, 21 bp, synthetic construct
  source 1..21: mol_type = other DNA
tactcaaagatcggcgccaac

SEQ ID NO: 3553 - DNA, 21 bp, synthetic construct
  source 1..21: mol_type = other DNA
tactcacgctcaaaccccaac

SEQ ID NO: 3554 - DNA, 21 bp, synthetic construct
  source 1..21: mol_type = other DNA
tactcacgccaaaactttaac

SEQ ID NO: 3555 - DNA, 21 bp, synthetic construct
  source 1..21: mol_type = other DNA
tggggctcaaccaacggcatc

SEQ ID NO: 3556 - DNA, 21 bp, synthetic construct
  source 1..21: mol_type = other DNA
tacgcccgcctgggcatgaac

SEQ ID NO: 3557 - DNA, 21 bp, synthetic construct
  source 1..21: mol_type = other DNA
ttctccaaagcgggggcgaat

SEQ ID NO: 3558 - DNA, 21 bp, synthetic construct
  source 1..21: mol_type = other DNA
ttttcaaagtcaaactggaac

SEQ ID NO: 3559 - DNA, 21 bp, synthetic construct
  source 1..21: mol_type = other DNA
ttgtccaaaaataatcacaat

SEQ ID NO: 3560 - DNA, 21 bp, synthetic construct
  source 1..21: mol_type = other DNA
tacgccaagtcaaacctgaac

SEQ ID NO: 3561 - DNA, 21 bp, synthetic construct
  source 1..21: mol_type = other DNA
tatgcgaggaataatccgaat

SEQ ID NO: 3562 - DNA, 21 bp, synthetic construct
  source 1..21: mol_type = other DNA
ttttcaaaggccggcctgaac

SEQ ID NO: 3563 - DNA, 21 bp, synthetic construct
  source 1..21: mol_type = other DNA
tactcacgcgtaaacaacaac

SEQ ID NO: 3564 - DNA, 21 bp, synthetic construct
  source 1..21: mol_type = other DNA
ttctccaggacgggggcgaat

SEQ ID NO: 3565 - DNA, 21 bp, synthetic construct
  source 1..21: mol_type = other DNA
ttcgcgaggacgaatatgaat

SEQ ID NO: 3566 - DNA, 21 bp, synthetic construct
  source 1..21: mol_type = other DNA
aatacgtccatgaatgggagg

SEQ ID NO: 3567 - DNA, 21 bp, synthetic construct
  source 1..21: mol_type = other DNA
tactcaaagaacggctggaac

SEQ ID NO: 3568 - DNA, 21 bp, synthetic construct
  source 1..21: mol_type = other DNA
ttctccaggtccaatatgaat

SEQ ID NO: 3569 - DNA, 21 bp, synthetic construct
  source 1..21: mol_type = other DNA
ttttcaaagtcaggctttaac

SEQ ID NO: 3570 - DNA, 21 bp, synthetic construct
  source 1..21: mol_type = other DNA
ttttcaaagctgaacatcaac

SEQ ID NO: 3571 - DNA, 21 bp, synthetic construct
  source 1..21: mol_type = other DNA
ttcgcgagggcggggttgaat

SEQ ID NO: 3572 - DNA, 21 bp, synthetic construct
  source 1..21: mol_type = other DNA
ctgaacgccacctcatcatgg

SEQ ID NO: 3573 - DNA, 21 bp, synthetic construct
  source 1..21: mol_type = other DNA
tactcaaagtacaacatgaac

SEQ ID NO: 3574 - DNA, 21 bp, synthetic construct
  source 1..21: mol_type = other DNA
acgcacaaattgtccgtgaat

SEQ ID NO: 3575 - DNA, 21 bp, synthetic construct
  source 1..21: mol_type = other DNA
tacgcccgctcaaacgtaaac

SEQ ID NO: 3576 - DNA, 21 bp, synthetic construct
  source 1..21: mol_type = other DNA
tacgcccgcaacggcatcaac

SEQ ID NO: 3577 - DNA, 21 bp, synthetic construct
  source 1..21: mol_type = other DNA
ttcgcgaaatccggggtgaat

SEQ ID NO: 3578 - DNA, 21 bp, synthetic construct
  source 1..21: mol_type = other DNA
tacgcccgcaacggcctgaac

SEQ ID NO: 3579 - DNA, 21 bp, synthetic construct
  source 1..21: mol_type = other DNA
tacgcccgccatggcgccaac

SEQ ID NO: 3580 - DNA, 21 bp, synthetic construct
  source 1..21: mol_type = other DNA
tattccaggaatgggccgaat

SEQ ID NO: 3581 - DNA, 21 bp, synthetic construct
  source 1..21: mol_type = other DNA
tacgcccgcctgaaccccaac

SEQ ID NO: 3582 - DNA, 21 bp, synthetic construct
  source 1..21: mol_type = other DNA
tacgccaagaacggctggaac

SEQ ID NO: 3583 - DNA, 21 bp, synthetic construct
  source 1..21: mol_type = other DNA
cgcggcggctcatcaaactac

SEQ ID NO: 3584 - DNA, 21 bp, synthetic construct
  source 1..21: mol_type = other DNA
tatgcgaaacacgggcagaat

SEQ ID NO: 3585 - DNA, 21 bp, synthetic construct
  source 1..21: mol_type = other DNA
tatgcgaggtatgggcagaat

SEQ ID NO: 3586 - DNA, 21 bp, synthetic construct
  source 1..21: mol_type = other DNA
ttctccaaacagaatttcaat

SEQ ID NO: 3587 - DNA, 21 bp, synthetic construct
  source 1..21: mol_type = other DNA
tttgcccgcatcggcatcaac

SEQ ID NO: 3588 - DNA, 21 bp, synthetic construct
  source 1..21: mol_type = other DNA
tattccaaaggggggttgaat

SEQ ID NO: 3589 - DNA, 21 bp, synthetic construct
  source 1..21: mol_type = other DNA
ctgtcaaagatcggcgccaac

SEQ ID NO: 3590 - DNA, 21 bp, synthetic construct
  source 1..21: mol_type = other DNA
tattccaaaaataattccaat

SEQ ID NO: 3591 - DNA, 21 bp, synthetic construct
  source 1..21: mol_type = other DNA
tacgcccgcctgggcctgaac

SEQ ID NO: 3592 - DNA, 21 bp, synthetic construct
  source 1..21: mol_type = other DNA
ttttcacgcgccaacctgaac

SEQ ID NO: 3593 - DNA, 21 bp, synthetic construct
  source 1..21: mol_type = other DNA
tatgcgaaattggggtccaat

SEQ ID NO: 3594 - DNA, 21 bp, synthetic construct
  source 1..21: mol_type = other DNA
tactcacgcgtatcagacacc

SEQ ID NO: 3595 - DNA, 21 bp, synthetic construct
  source 1..21: mol_type = other DNA
ttcacggcggggacgaggaat

SEQ ID NO: 3596 - DNA, 21 bp, synthetic construct
  source 1..21: mol_type = other DNA
tactcacgcaacggctcaaac

SEQ ID NO: 3597 - DNA, 21 bp, synthetic construct
  source 1..21: mol_type = other DNA
ttggcgaaattgggggtgaat

SEQ ID NO: 3598 - DNA, 21 bp, synthetic construct
  source 1..21: mol_type = other DNA
tattccaaaaaaaatgataat

SEQ ID NO: 3599 - DNA, 21 bp, synthetic construct
  source 1..21: mol_type = other DNA
ttctccaggacgaatacgaat

SEQ ID NO: 3600 - DNA, 21 bp, synthetic construct
  source 1..21: mol_type = other DNA
atgtcagcccatgtaaagtac

SEQ ID NO: 3601 - DNA, 21 bp, synthetic construct
  source 1..21: mol_type = other DNA
tactcaaaggccggctacaac

SEQ ID NO: 3602 - DNA, 21 bp, synthetic construct
  source 1..21: mol_type = other DNA
ttctccaaaaggaatgataat

SEQ ID NO: 3603 - DNA, 21 bp, synthetic construct
  source 1..21: mol_type = other DNA
tattccaaaaaaggggagaat

SEQ ID NO: 3604 - DNA, 21 bp, synthetic construct
  source 1..21: mol_type = other DNA
tttgcccgcgtaggcatgaac

SEQ ID NO: 3605 - DNA, 21 bp, synthetic construct
  source 1..21: mol_type = other DNA
tactcacgcctgggctacaac

SEQ ID NO: 3606 - DNA, 21 bp, synthetic construct
  source 1..21: mol_type = other DNA
ttctccaaaacggggtggaat

SEQ ID NO: 3607 - DNA, 21 bp, synthetic construct
  source 1..21: mol_type = other DNA
tactcacgctacaacgacaac

SEQ ID NO: 3608 - DNA, 21 bp, synthetic construct
  source 1..21: mol_type = other DNA
tttgccaagaacggcatcaac

SEQ ID NO: 3609 - DNA, 21 bp, synthetic construct
  source 1..21: mol_type = other DNA
ttcgcgaaacacgggccgaat

SEQ ID NO: 3610 - DNA, 21 bp, synthetic construct
  source 1..21: mol_type = other DNA
atcgccctgcgcggcgccggc

SEQ ID NO: 3611 - DNA, 21 bp, synthetic construct
  source 1..21: mol_type = other DNA
ttttcacgcggcggctacaac

SEQ ID NO: 3612 - DNA, 21 bp, synthetic construct
  source 1..21: mol_type = other DNA
ttctccaggatggggcacaat

SEQ ID NO: 3613 - DNA, 21 bp, synthetic construct
  source 1..21: mol_type = other DNA
tacgccaagaacggcgaaaac

SEQ ID NO: 3614 - DNA, 21 bp, synthetic construct
  source 1..21: mol_type = other DNA
tacgcccgccccggcgtaaac

SEQ ID NO: 3615 - DNA, 21 bp, synthetic construct
  source 1..21: mol_type = other DNA
tatgcgaggtataatgtgaat

SEQ ID NO: 3616 - DNA, 21 bp, synthetic construct
  source 1..21: mol_type = other DNA
tactcaaaggtaaacgccaac

SEQ ID NO: 3617 - DNA, 21 bp, synthetic construct
  source 1..21: mol_type = other DNA
tactcaaagtacggcatcaac

SEQ ID NO: 3618 - DNA, 21 bp, synthetic construct
  source 1..21: mol_type = other DNA
tattccaggggggggtccaat

SEQ ID NO: 3619 - DNA, 21 bp, synthetic construct
  source 1..21: mol_type = other DNA
ttctccaaatataatgcgaat

SEQ ID NO: 3620 - DNA, 21 bp, synthetic construct
  source 1..21: mol_type = other DNA
ttttcacgccaaggcatcaac

SEQ ID NO: 3621 - DNA, 21 bp, synthetic construct
  source 1..21: mol_type = other DNA
tatcacaaattgaatccggcg

SEQ ID NO: 3622 - DNA, 21 bp, synthetic construct
  source 1..21: mol_type = other DNA
ttggcgaggatgggggagaat

SEQ ID NO: 3623 - DNA, 21 bp, synthetic construct
  source 1..21: mol_type = other DNA
tattccaggttggggccgaat

SEQ ID NO: 3624 - DNA, 21 bp, synthetic construct
  source 1..21: mol_type = other DNA
tacgcccgcatgggcatcaac

SEQ ID NO: 3625 - DNA, 21 bp, synthetic construct
  source 1..21: mol_type = other DNA
tactcacgcatcggcgacaac

SEQ ID NO: 3626 - DNA, 21 bp, synthetic construct
  source 1..21: mol_type = other DNA
ctgtcaaagctgggcgccaac

SEQ ID NO: 3627 - DNA, 21 bp, synthetic construct
  source 1..21: mol_type = other DNA
tacgccaaggccaaccataac

SEQ ID NO: 3628 - DNA, 21 bp, synthetic construct
  source 1..21: mol_type = other DNA
ttttcaaaggtaaactttaac

SEQ ID NO: 3629 - DNA, 21 bp, synthetic construct
  source 1..21: mol_type = other DNA
tatgcgaggtccaatcacaat

SEQ ID NO: 3630 - DNA, 21 bp, synthetic construct
  source 1..21: mol_type = other DNA
tactcaaagctgaacgacaac

SEQ ID NO: 3631 - DNA, 21 bp, synthetic construct
  source 1..21: mol_type = other DNA
tacgccaagggcggctggaac

SEQ ID NO: 3632 - DNA, 21 bp, synthetic construct
  source 1..21: mol_type = other DNA
ttgtccagggcgtccgtgata

SEQ ID NO: 3633 - DNA, 21 bp, synthetic construct
  source 1..21: mol_type = other DNA
tttaactcaaccaacggcatc

SEQ ID NO: 3634 - DNA, 21 bp, synthetic construct
  source 1..21: mol_type = other DNA
tactcacgcctgggcaacaac

SEQ ID NO: 3635 - DNA, 21 bp, synthetic construct
  source 1..21: mol_type = other DNA
tactcaaagtacaacaccaac

SEQ ID NO: 3636 - DNA, 21 bp, synthetic construct
  source 1..21: mol_type = other DNA
tactcaaagatcaacgccaac

SEQ ID NO: 3637 - DNA, 21 bp, synthetic construct
  source 1..21: mol_type = other DNA
cactggtccacgaatggggtg

SEQ ID NO: 3638 - DNA, 21 bp, synthetic construct
  source 1..21: mol_type = other DNA
tactcacgcggcaactcaaac

SEQ ID NO: 3639 - DNA, 21 bp, synthetic construct
  source 1..21: mol_type = other DNA
ttctccaggacggggatgaat

SEQ ID NO: 3640 - DNA, 21 bp, synthetic construct
  source 1..21: mol_type = other DNA
gtacgctacgaatcaggcaac

SEQ ID NO: 3641 - DNA, 21 bp, synthetic construct
  source 1..21: mol_type = other DNA
ttcgcgaggcacgggaataat

SEQ ID NO: 3642 - DNA, 21 bp, synthetic construct
  source 1..21: mol_type = other DNA
tattccaggtccgggccgaat

SEQ ID NO: 3643 - DNA, 21 bp, synthetic construct
  source 1..21: mol_type = other DNA
ttcgcgaggataggggtgaat

SEQ ID NO: 3644 - DNA, 21 bp, synthetic construct
  source 1..21: mol_type = other DNA
ttttcaaaggccggcgtaaac

SEQ ID NO: 3645 - DNA, 21 bp, synthetic construct
  source 1..21: mol_type = other DNA
ttggcgaaaaatgggtccaat

SEQ ID NO: 3646 - DNA, 21 bp, synthetic construct
  source 1..21: mol_type = other DNA
ttttcacgcatgaacaacaac

SEQ ID NO: 3647 - DNA, 21 bp, synthetic construct
  source 1..21: mol_type = other DNA
ttctccaaagcggggtccaat

SEQ ID NO: 3648 - DNA, 21 bp, synthetic construct
  source 1..21: mol_type = other DNA
tactcacgcggcggcaccaac

SEQ ID NO: 3649 - DNA, 21 bp, synthetic construct
  source 1..21: mol_type = other DNA
atccaatcaaccaacggcgta

SEQ ID NO: 3650 - DNA, 21 bp, synthetic construct
  source 1..21: mol_type = other DNA
tatgcgaggtatggggcgaat

SEQ ID NO: 3651 - DNA, 21 bp, synthetic construct
  source 1..21: mol_type = other DNA
tacgccaagcaaggccccaac

SEQ ID NO: 3652 - DNA, 21 bp, synthetic construct
  source 1..21: mol_type = other DNA
tttgcccgcatgggcatgaac

SEQ ID NO: 3653 - DNA, 21 bp, synthetic construct
  source 1..21: mol_type = other DNA
tactcaaagatcaacaacaac

SEQ ID NO: 3654 - DNA, 21 bp, synthetic construct
  source 1..21: mol_type = other DNA
ttttcacgctcaggcaacaac

SEQ ID NO: 3655 - DNA, 21 bp, synthetic construct
  source 1..21: mol_type = other DNA
taccaacccaactcatacggc

SEQ ID NO: 3656 - DNA, 21 bp, synthetic construct
  source 1..21: mol_type = other DNA
tactcacgcgccggcgacaac

SEQ ID NO: 3657 - DNA, 21 bp, synthetic construct
  source 1..21: mol_type = other DNA
tacgcccgccgcaacgacaac

SEQ ID NO: 3658 - DNA, 21 bp, synthetic construct
  source 1..21: mol_type = other DNA
ttttcacgctcaggcatcaac

SEQ ID NO: 3659 - DNA, 21 bp, synthetic construct
  source 1..21: mol_type = other DNA
ttcgcgaggttggggtccaat

SEQ ID NO: 3660 - DNA, 21 bp, synthetic construct
  source 1..21: mol_type = other DNA
tttgcccgcaccaacaccaac

SEQ ID NO: 3661 - DNA, 21 bp, synthetic construct
  source 1..21: mol_type = other DNA
ttttcaaagatgggctttaac

SEQ ID NO: 3662 - DNA, 21 bp, synthetic construct
  source 1..21: mol_type = other DNA
tacatccgcacccaaatcaac

SEQ ID NO: 3663 - DNA, 21 bp, synthetic construct
  source 1..21: mol_type = other DNA
tactcacgcaccggcaccaac

SEQ ID NO: 3664 - DNA, 21 bp, synthetic construct
  source 1..21: mol_type = other DNA
ttctccaaagcggggtggaat

SEQ ID NO: 3665 - DNA, 21 bp, synthetic construct
  source 1..21: mol_type = other DNA
tttgcccgcgccggctttaac

SEQ ID NO: 3666 - DNA, 21 bp, synthetic construct
  source 1..21: mol_type = other DNA
tactcacgccatggcggcaac

SEQ ID NO: 3667 - DNA, 21 bp, synthetic construct
  source 1..21: mol_type = other DNA
tactcaaaggtaggcaagaac

SEQ ID NO: 3668 - DNA, 21 bp, synthetic construct
  source 1..21: mol_type = other DNA
tactcaaaggccggcgccaac

SEQ ID NO: 3669 - DNA, 21 bp, synthetic construct
  source 1..21: mol_type = other DNA
tattccaggatggggccgaat

SEQ ID NO: 3670 - DNA, 21 bp, synthetic construct
  source 1..21: mol_type = other DNA
ttctccaggcagaatttcaat

SEQ ID NO: 3671 - DNA, 21 bp, synthetic construct
  source 1..21: mol_type = other DNA
tttgcccgccaaggcgtaaac

SEQ ID NO: 3672 - DNA, 21 bp, synthetic construct
  source 1..21: mol_type = other DNA
tacgccaagatcggcaacaac

SEQ ID NO: 3673 - DNA, 21 bp, synthetic construct
  source 1..21: mol_type = other DNA
tttgcccgccaaggcgccaac

SEQ ID NO: 3674 - DNA, 21 bp, synthetic construct
  source 1..21: mol_type = other DNA
ttgtccaaagcgaatgcgaat

SEQ ID NO: 3675 - DNA, 21 bp, synthetic construct
  source 1..21: mol_type = other DNA
ccggggtccacgaatgggata

SEQ ID NO: 3676 - DNA, 21 bp, synthetic construct
  source 1..21: mol_type = other DNA
tatgcgaggaataatttgaat

SEQ ID NO: 3677 - DNA, 21 bp, synthetic construct
  source 1..21: mol_type = other DNA
tactcacgcctgaacgacaac

SEQ ID NO: 3678 - DNA, 21 bp, synthetic construct
  source 1..21: mol_type = other DNA
ttcgcgagggtggggcacaat

SEQ ID NO: 3679 - DNA, 21 bp, synthetic construct
  source 1..21: mol_type = other DNA
ttctccaaaatgaatgcgaat

SEQ ID NO: 3680 - DNA, 21 bp, synthetic construct
  source 1..21: mol_type = other DNA
ctgtcaaagatgggcgccaac

SEQ ID NO: 3681 - DNA, 21 bp, synthetic construct
  source 1..21: mol_type = other DNA
tactcacgcatcggccccaac

SEQ ID NO: 3682 - DNA, 21 bp, synthetic construct
  source 1..21: mol_type = other DNA
ttctccaggcagaatcagaat

SEQ ID NO: 3683 - DNA, 21 bp, synthetic construct
  source 1..21: mol_type = other DNA
ttttcacgctcaggctcaaac

SEQ ID NO: 3684 - DNA, 21 bp, synthetic construct
  source 1..21: mol_type = other DNA
tattccaggttgggggggaat

SEQ ID NO: 3685 - DNA, 21 bp, synthetic construct
  source 1..21: mol_type = other DNA
aggttcaatgggttgaatgcg

SEQ ID NO: 3686 - DNA, 21 bp, synthetic construct
  source 1..21: mol_type = other DNA
tatgcgaggtataatatgaat

SEQ ID NO: 3687 - DNA, 21 bp, synthetic construct
  source 1..21: mol_type = other DNA
tactcacgcaacaactacaac

SEQ ID NO: 3688 - DNA, 21 bp, synthetic construct
  source 1..21: mol_type = other DNA
cccttttcaaccaacggcgta

SEQ ID NO: 3689 - DNA, 21 bp, synthetic construct
  source 1..21: mol_type = other DNA
tgggtaaagtcatcacccggc

SEQ ID NO: 3690 - DNA, 21 bp, synthetic construct
  source 1..21: mol_type = other DNA
tttgccaaggaaggccgcaac

SEQ ID NO: 3691 - DNA, 21 bp, synthetic construct
  source 1..21: mol_type = other DNA
tactcacgctttaacgccaac

SEQ ID NO: 3692 - DNA, 21 bp, synthetic construct
  source 1..21: mol_type = other DNA
gaatcatacgtaggccgcaac

SEQ ID NO: 3693 - DNA, 21 bp, synthetic construct
  source 1..21: mol_type = other DNA
tacgccaagtacggccaaaac

SEQ ID NO: 3694 - DNA, 21 bp, synthetic construct
  source 1..21: mol_type = other DNA
tttgcccgcatcggcctgaac

SEQ ID NO: 3695 - DNA, 21 bp, synthetic construct
  source 1..21: mol_type = other DNA
ccgaattccacgaatgggata

SEQ ID NO: 3696 - DNA, 21 bp, synthetic construct
  source 1..21: mol_type = other DNA
tactcacgccaaaactcaaac

SEQ ID NO: 3697 - DNA, 21 bp, synthetic construct
  source 1..21: mol_type = other DNA
ttcgcgaaaatggggttcaat

SEQ ID NO: 3698 - DNA, 21 bp, synthetic construct
  source 1..21: mol_type = other DNA
ttttcacgcaacaacgccaac

SEQ ID NO: 3699 - DNA, 21 bp, synthetic construct
  source 1..21: mol_type = other DNA
ttctccaggcaggggcacaat

SEQ ID NO: 3700 - DNA, 21 bp, synthetic construct
  source 1..21: mol_type = other DNA
tggtcaaagctgcatgccaac

SEQ ID NO: 3701 - DNA, 21 bp, synthetic construct
  source 1..21: mol_type = other DNA
aattattccacgaatggggtg

SEQ ID NO: 3702 - DNA, 21 bp, synthetic construct
  source 1..21: mol_type = other DNA
tactcaaagtacaacgccaac

SEQ ID NO: 3703 - DNA, 21 bp, synthetic construct
  source 1..21: mol_type = other DNA
tactcacgcaacaacgccaac

SEQ ID NO: 3704 - DNA, 21 bp, synthetic construct
  source 1..21: mol_type = other DNA
tactcaaagcataacgaaaac

SEQ ID NO: 3705 - DNA, 21 bp, synthetic construct
  source 1..21: mol_type = other DNA
ttttcacgccaaaacatgaac

SEQ ID NO: 3706 - DNA, 21 bp, synthetic construct
  source 1..21: mol_type = other DNA
tacgccaagatcggcgtaaac

SEQ ID NO: 3707 - DNA, 21 bp, synthetic construct
  source 1..21: mol_type = other DNA
catcattcatcaaacggcgta

SEQ ID NO: 3708 - DNA, 21 bp, synthetic construct
  source 1..21: mol_type = other DNA
tactcacgctacaacgtaaac

SEQ ID NO: 3709 - DNA, 21 bp, synthetic construct
  source 1..21: mol_type = other DNA
ttttcacgcggcggccccaac

SEQ ID NO: 3710 - DNA, 21 bp, synthetic construct
  source 1..21: mol_type = other DNA
ttttcaaaggccaaccccaac

SEQ ID NO: 3711 - DNA, 21 bp, synthetic construct
  source 1..21: mol_type = other DNA
taccattcaaccaacggcatc

SEQ ID NO: 3712 - DNA, 21 bp, synthetic construct
  source 1..21: mol_type = other DNA
acccgcaccggcgtatcagcc

SEQ ID NO: 3713 - DNA, 21 bp, synthetic construct
  source 1..21: mol_type = other DNA
tactcacgctcaaactttaac

SEQ ID NO: 3714 - DNA, 21 bp, synthetic construct
  source 1..21: mol_type = other DNA
tattccaaacacggggggaat

SEQ ID NO: 3715 - DNA, 21 bp, synthetic construct
  source 1..21: mol_type = other DNA
tattccaggtatgggcagaat

SEQ ID NO: 3716 - DNA, 21 bp, synthetic construct
  source 1..21: mol_type = other DNA
ttcgcgaggcacgggatgaat

SEQ ID NO: 3717 - DNA, 21 bp, synthetic construct
  source 1..21: mol_type = other DNA
ttttcacgctcaaacatcaac

SEQ ID NO: 3718 - DNA, 21 bp, synthetic construct
  source 1..21: mol_type = other DNA
tttgcccgccaaggcaccaac

SEQ ID NO: 3719 - DNA, 21 bp, synthetic construct
  source 1..21: mol_type = other DNA
tatgcgaggttggggacgaat

SEQ ID NO: 3720 - DNA, 21 bp, synthetic construct
  source 1..21: mol_type = other DNA
tactcaaagaacaactggaac

SEQ ID NO: 3721 - DNA, 21 bp, synthetic construct
  source 1..21: mol_type = other DNA
tttgcccgcggcaacctgaac

SEQ ID NO: 3722 - DNA, 21 bp, synthetic construct
  source 1..21: mol_type = other DNA
ttttcaaagctgaacgacaac

SEQ ID NO: 3723 - DNA, 21 bp, synthetic construct
  source 1..21: mol_type = other DNA
tactcacgcatcaacgaaaac

SEQ ID NO: 3724 - DNA, 21 bp, synthetic construct
  source 1..21: mol_type = other DNA
ttttcacgccataacgaaaac

SEQ ID NO: 3725 - DNA, 21 bp, synthetic construct
  source 1..21: mol_type = other DNA
ttttcaaaggtaggccaaaac

SEQ ID NO: 3726 - DNA, 21 bp, synthetic construct
  source 1..21: mol_type = other DNA
ttcgcgaggcacaataataat

SEQ ID NO: 3727 - DNA, 21 bp, synthetic construct
  source 1..21: mol_type = other DNA
tactcacgctacaacatgaac

SEQ ID NO: 3728 - DNA, 21 bp, synthetic construct
  source 1..21: mol_type = other DNA
tacgccaagtacggcgccaac

SEQ ID NO: 3729 - DNA, 21 bp, synthetic construct
  source 1..21: mol_type = other DNA
tttgccaagcatggctacaac

SEQ ID NO: 3730 - DNA, 21 bp, synthetic construct
  source 1..21: mol_type = other DNA
tacgcccgcaacggcgccaac

SEQ ID NO: 3731 - DNA, 21 bp, synthetic construct
  source 1..21: mol_type = other DNA
ttttcaaaggccaacctgaac

SEQ ID NO: 3732 - DNA, 21 bp, synthetic construct
  source 1..21: mol_type = other DNA
ggcggcgcctcaaagggctgg

SEQ ID NO: 3733 - DNA, 21 bp, synthetic construct
  source 1..21: mol_type = other DNA
ttttcacgcgtaaaccataac

SEQ ID NO: 3734 - DNA, 21 bp, synthetic construct
  source 1..21: mol_type = other DNA
tacgcccgcaccaaccataac

SEQ ID NO: 3735 - DNA, 21 bp, synthetic construct
  source 1..21: mol_type = other DNA
tattccaggccgaatttgaat

SEQ ID NO: 3736 - DNA, 21 bp, synthetic construct
  source 1..21: mol_type = other DNA
ccctcatcaaccaacggcatc

SEQ ID NO: 3737 - DNA, 21 bp, synthetic construct
  source 1..21: mol_type = other DNA
ctggcccgcgtaggccaaaac

SEQ ID NO: 3738 - DNA, 21 bp, synthetic construct
  source 1..21: mol_type = other DNA
taccataagatgtcactgggc

SEQ ID NO: 3739 - DNA, 21 bp, synthetic construct
  source 1..21: mol_type = other DNA
ttttcacgcggcaactacaac

SEQ ID NO: 3740 - DNA, 21 bp, synthetic construct
  source 1..21: mol_type = other DNA
tactcacgctcaaactcaaac

SEQ ID NO: 3741 - DNA, 21 bp, synthetic construct
  source 1..21: mol_type = other DNA
ttgtccaggtccgggtggaat

SEQ ID NO: 3742 - DNA, 21 bp, synthetic construct
  source 1..21: mol_type = other DNA
tacgcccgcatgggcgaaaac

SEQ ID NO: 3743 - DNA, 21 bp, synthetic construct
  source 1..21: mol_type = other DNA
tactcaaagtacaaccaaaac

SEQ ID NO: 3744 - DNA, 21 bp, synthetic construct
  source 1..21: mol_type = other DNA
tacgcccgcctgggcatcaac

SEQ ID NO: 3745 - DNA, 21 bp, synthetic construct
  source 1..21: mol_type = other DNA
tactcaaagtttaacatcaac

SEQ ID NO: 3746 - DNA, 21 bp, synthetic construct
  source 1..21: mol_type = other DNA
tatgcgaggaataatcacaat

SEQ ID NO: 3747 - DNA, 21 bp, synthetic construct
  source 1..21: mol_type = other DNA
ttttcacgcgccaacgacaac

SEQ ID NO: 3748 - DNA, 21 bp, synthetic construct
  source 1..21: mol_type = other DNA
ttttcacgccataacatcaac

SEQ ID NO: 3749 - DNA, 21 bp, synthetic construct
  source 1..21: mol_type = other DNA
tacgccaagggcggcaccaac

SEQ ID NO: 3750 - DNA, 21 bp, synthetic construct
  source 1..21: mol_type = other DNA
tattccaggcagaatgggaat

SEQ ID NO: 3751 - DNA, 21 bp, synthetic construct
  source 1..21: mol_type = other DNA
gagacgtccacgaatggggtg

SEQ ID NO: 3752 - DNA, 21 bp, synthetic construct
  source 1..21: mol_type = other DNA
cgcgaccgctactcagccggc

SEQ ID NO: 3753 - DNA, 21 bp, synthetic construct
  source 1..21: mol_type = other DNA
tactcacgcctgggccaaaac

SEQ ID NO: 3754 - DNA, 21 bp, synthetic construct
  source 1..21: mol_type = other DNA
tacgcccgcgccaaccaaaac

SEQ ID NO: 3755 - DNA, 21 bp, synthetic construct
  source 1..21: mol_type = other DNA
atgcaatcatcaaacggcgta

SEQ ID NO: 3756 - DNA, 21 bp, synthetic construct
  source 1..21: mol_type = other DNA
ctgtcaaagcataacctgaac

SEQ ID NO: 3757 - DNA, 21 bp, synthetic construct
  source 1..21: mol_type = other DNA
atgtcacgcgtatcagtactg

SEQ ID NO: 3758 - DNA, 21 bp, synthetic construct
  source 1..21: mol_type = other DNA
ctgtcaaagcataacaccaac

SEQ ID NO: 3759 - DNA, 21 bp, synthetic construct
  source 1..21: mol_type = other DNA
cgcggccccaactcatacccc

SEQ ID NO: 3760 - DNA, 21 bp, synthetic construct
  source 1..21: mol_type = other DNA
ttcgcgaaagcggggcacaat

SEQ ID NO: 3761 - DNA, 21 bp, synthetic construct
  source 1..21: mol_type = other DNA
ttctccaggatggggttgaat

SEQ ID NO: 3762 - DNA, 21 bp, synthetic construct
  source 1..21: mol_type = other DNA
ttctccaaacacgggaataat

SEQ ID NO: 3763 - DNA, 21 bp, synthetic construct
  source 1..21: mol_type = other DNA
tatcacaaattgcagaatggg

SEQ ID NO: 3764 - DNA, 21 bp, synthetic construct
  source 1..21: mol_type = other DNA
ttctccaggtatgggacgaat

SEQ ID NO: 3765 - DNA, 21 bp, synthetic construct
  source 1..21: mol_type = other DNA
gataaatatgataggtatacg

SEQ ID NO: 3766 - DNA, 21 bp, synthetic construct
  source 1..21: mol_type = other DNA
tattccaaattcaatgtgaat

SEQ ID NO: 3767 - DNA, 21 bp, synthetic construct
  source 1..21: mol_type = other DNA
ctgtcaaagatgaaccaaaac

SEQ ID NO: 3768 - DNA, 21 bp, synthetic construct
  source 1..21: mol_type = other DNA
tactcaaagtttaactacaac

SEQ ID NO: 3769 - DNA, 21 bp, synthetic construct
  source 1..21: mol_type = other DNA
ttttcaaaggccaacgccaac

SEQ ID NO: 3770 - DNA, 21 bp, synthetic construct
  source 1..21: mol_type = other DNA
tacgcccgcgtaggcgtaaac

SEQ ID NO: 3771 - DNA, 21 bp, synthetic construct
  source 1..21: mol_type = other DNA
tactcacgctacaacaccaac

SEQ ID NO: 3772 - DNA, 21 bp, synthetic construct
  source 1..21: mol_type = other DNA
tttgcccgcgaaggctggaac

SEQ ID NO: 3773 - DNA, 21 bp, synthetic construct
  source 1..21: mol_type = other DNA
atgtattccacgaatggggtg

SEQ ID NO: 3774 - DNA, 21 bp, synthetic construct
  source 1..21: mol_type = other DNA
aactactcaaccaacggccgc

SEQ ID NO: 3775 - DNA, 21 bp, synthetic construct
  source 1..21: mol_type = other DNA
tatgcgaaagcgaatacgaat

SEQ ID NO: 3776 - DNA, 21 bp, synthetic construct
  source 1..21: mol_type = other DNA
tatgcgagggtgaattataat

SEQ ID NO: 3777 - DNA, 21 bp, synthetic construct
  source 1..21: mol_type = other DNA
tattccaaatataatcacaat

SEQ ID NO: 3778 - DNA, 21 bp, synthetic construct
  source 1..21: mol_type = other DNA
tactcacgcaacaacgacaac

SEQ ID NO: 3779 - DNA, 21 bp, synthetic construct
  source 1..21: mol_type = other DNA
caagactcaaccaacggcgta

SEQ ID NO: 3780 - DNA, 21 bp, synthetic construct
  source 1..21: mol_type = other DNA
tacgcccgcaacaacgtaaac

SEQ ID NO: 3781 - DNA, 21 bp, synthetic construct
  source 1..21: mol_type = other DNA
ttcgcgaggcacggggcgaat

SEQ ID NO: 3782 - DNA, 21 bp, synthetic construct
  source 1..21: mol_type = other DNA
ttcgtgaaatccaattccggg

SEQ ID NO: 3783 - DNA, 21 bp, synthetic construct
  source 1..21: mol_type = other DNA
ttttcaaagcaaaactggaac

SEQ ID NO: 3784 - DNA, 21 bp, synthetic construct
  source 1..21: mol_type = other DNA
tacgccaagcccaactggaac

SEQ ID NO: 3785 - DNA, 21 bp, synthetic construct
  source 1..21: mol_type = other DNA
ttctccaaagggaattggaat

SEQ ID NO: 3786 - DNA, 21 bp, synthetic construct
  source 1..21: mol_type = other DNA
tattccaggtatgggtccaat

SEQ ID NO: 3787 - DNA, 21 bp, synthetic construct
  source 1..21: mol_type = other DNA
tatgcgaaatccaatacgaat

SEQ ID NO: 3788 - DNA, 21 bp, synthetic construct
  source 1..21: mol_type = other DNA
gtggcgtatacgaatgggtat

SEQ ID NO: 3789 - DNA, 21 bp, synthetic construct
  source 1..21: mol_type = other DNA
tactcaaagtggaactcaaac

SEQ ID NO: 3790 - DNA, 21 bp, synthetic construct
  source 1..21: mol_type = other DNA
ttttcaaagcatggccccaac

SEQ ID NO: 3791 - DNA, 21 bp, synthetic construct
  source 1..21: mol_type = other DNA
ggcgccaacgaatggcgcgac

SEQ ID NO: 3792 - DNA, 21 bp, synthetic construct
  source 1..21: mol_type = other DNA
tacgcccgccccggccccaac

SEQ ID NO: 3793 - DNA, 21 bp, synthetic construct
  source 1..21: mol_type = other DNA
tacgccaagcgcggcgacaac

SEQ ID NO: 3794 - DNA, 21 bp, synthetic construct
  source 1..21: mol_type = other DNA
ttgccgaatcagtggagggat

SEQ ID NO: 3795 - DNA, 21 bp, synthetic construct
  source 1..21: mol_type = other DNA
tatttctcccagaggacggag

SEQ ID NO: 3796 - DNA, 21 bp, synthetic construct
  source 1..21: mol_type = other DNA
ttcgcgaggacgaatttcaat

SEQ ID NO: 3797 - DNA, 21 bp, synthetic construct
  source 1..21: mol_type = other DNA
gcgacgtccacgaatgggata

SEQ ID NO: 3798 - DNA, 21 bp, synthetic construct
  source 1..21: mol_type = other DNA
aacacctcatcaaacggcgta

SEQ ID NO: 3799 - DNA, 21 bp, synthetic construct
  source 1..21: mol_type = other DNA
tacggccgcgtaacctcaaac

SEQ ID NO: 3800 - DNA, 21 bp, synthetic construct
  source 1..21: mol_type = other DNA
tacgccaagctgggccaaaac

SEQ ID NO: 3801 - DNA, 21 bp, synthetic construct
  source 1..21: mol_type = other DNA
ttctccaaaggggggttcaat

SEQ ID NO: 3802 - DNA, 21 bp, synthetic construct
  source 1..21: mol_type = other DNA
ctggccaagctgggcatgaac

SEQ ID NO: 3803 - DNA, 21 bp, synthetic construct
  source 1..21: mol_type = other DNA
ttctccaggcaggggacgaat

SEQ ID NO: 3804 - DNA, 21 bp, synthetic construct
  source 1..21: mol_type = other DNA
tttgcccgctcaaacaccaac

SEQ ID NO: 3805 - DNA, 21 bp, synthetic construct
  source 1..21: mol_type = other DNA
ttttcacgcatgggctcaaac

SEQ ID NO: 3806 - DNA, 21 bp, synthetic construct
  source 1..21: mol_type = other DNA
ctggcccgcgtaggcaacaac

SEQ ID NO: 3807 - DNA, 21 bp, synthetic construct
  source 1..21: mol_type = other DNA
tttgcccgcctgggcaacaac

SEQ ID NO: 3808 - DNA, 21 bp, synthetic construct
  source 1..21: mol_type = other DNA
tactcacgctcaaacggcaac

SEQ ID NO: 3809 - DNA, 21 bp, synthetic construct
  source 1..21: mol_type = other DNA
ttctccaggcagaattccaat

SEQ ID NO: 3810 - DNA, 21 bp, synthetic construct
  source 1..21: mol_type = other DNA
tatgcgagggatgggaggaat

SEQ ID NO: 3811 - DNA, 21 bp, synthetic construct
  source 1..21: mol_type = other DNA
tatgcgaaatatggggggaat

SEQ ID NO: 3812 - DNA, 21 bp, synthetic construct
  source 1..21: mol_type = other DNA
tactcacgcaacaacctgaac

SEQ ID NO: 3813 - DNA, 21 bp, synthetic construct
  source 1..21: mol_type = other DNA
ttctccaaagcggggacgaat

SEQ ID NO: 3814 - DNA, 21 bp, synthetic construct
  source 1..21: mol_type = other DNA
tactcacgccataaccaaaac

SEQ ID NO: 3815 - DNA, 21 bp, synthetic construct
  source 1..21: mol_type = other DNA
tttgccaagcatggccataac

SEQ ID NO: 3816 - DNA, 21 bp, synthetic construct
  source 1..21: mol_type = other DNA
tggaagcatctgtcaatgggc

SEQ ID NO: 3817 - DNA, 21 bp, synthetic construct
  source 1..21: mol_type = other DNA
tacgcccgcgccggcgccaac

SEQ ID NO: 3818 - DNA, 21 bp, synthetic construct
  source 1..21: mol_type = other DNA
gaacgcaacatcggccgcctg

SEQ ID NO: 3819 - DNA, 21 bp, synthetic construct
  source 1..21: mol_type = other DNA
tgcaagggcggctgcatggta

SEQ ID NO: 3820 - DNA, 21 bp, synthetic construct
  source 1..21: mol_type = other DNA
tacgccaagcaaggcgacaac

SEQ ID NO: 3821 - DNA, 21 bp, synthetic construct
  source 1..21: mol_type = other DNA
tggttctccgggacgacgaat

SEQ ID NO: 3822 - DNA, 21 bp, synthetic construct
  source 1..21: mol_type = other DNA
ttttcaaagcgcaacgaaaac

SEQ ID NO: 3823 - DNA, 21 bp, synthetic construct
  source 1..21: mol_type = other DNA
ttttcacgcggcaacgccaac

SEQ ID NO: 3824 - DNA, 21 bp, synthetic construct
  source 1..21: mol_type = other DNA
ctggcccgcgtaggcatcaac

SEQ ID NO: 3825 - DNA, 21 bp, synthetic construct
  source 1..21: mol_type = other DNA
tactcacgcctgggcaccaac

SEQ ID NO: 3826 - DNA, 21 bp, synthetic construct
  source 1..21: mol_type = other DNA
ttctccagggtgaatgcgaat

SEQ ID NO: 3827 - DNA, 21 bp, synthetic construct
  source 1..21: mol_type = other DNA
ttttcacgcaacggctttaac

SEQ ID NO: 3828 - DNA, 21 bp, synthetic construct
  source 1..21: mol_type = other DNA
tatgcgaggccggggtccaat

SEQ ID NO: 3829 - DNA, 21 bp, synthetic construct
  source 1..21: mol_type = other DNA
tactcaaagaacaactgcaac

SEQ ID NO: 3830 - DNA, 21 bp, synthetic construct
  source 1..21: mol_type = other DNA
tacgcccgccaaaactcaaac

SEQ ID NO: 3831 - DNA, 21 bp, synthetic construct
  source 1..21: mol_type = other DNA
tacgccaagatcggctcaaac

SEQ ID NO: 3832 - DNA, 21 bp, synthetic construct
  source 1..21: mol_type = other DNA
ttttcaaagatcggcaccaac

SEQ ID NO: 3833 - DNA, 21 bp, synthetic construct
  source 1..21: mol_type = other DNA
ttttcacgcgtaaactacaac

SEQ ID NO: 3834 - DNA, 21 bp, synthetic construct
  source 1..21: mol_type = other DNA
ttcgcgagggggaatttcaat

SEQ ID NO: 3835 - DNA, 21 bp, synthetic construct
  source 1..21: mol_type = other DNA
ttcgcgaggacgaatcacaat

SEQ ID NO: 3836 - DNA, 21 bp, synthetic construct
  source 1..21: mol_type = other DNA
gatgcggcgtatgtgaaatat

SEQ ID NO: 3837 - DNA, 21 bp, synthetic construct
  source 1..21: mol_type = other DNA
tactcaaagtacaacgacaac

SEQ ID NO: 3838 - DNA, 21 bp, synthetic construct
  source 1..21: mol_type = other DNA
ttcgcgaggcagaatatgaat

SEQ ID NO: 3839 - DNA, 21 bp, synthetic construct
  source 1..21: mol_type = other DNA
aggttgacggatataacgtgg

SEQ ID NO: 3840 - DNA, 21 bp, synthetic construct
  source 1..21: mol_type = other DNA
tatgcgaggtatgggacgaat

SEQ ID NO: 3841 - DNA, 21 bp, synthetic construct
  source 1..21: mol_type = other DNA
ttcaatgggtccaataggtat

SEQ ID NO: 3842 - DNA, 21 bp, synthetic construct
  source 1..21: mol_type = other DNA
acgaattggggggggccggcg

SEQ ID NO: 3843 - DNA, 21 bp, synthetic construct
  source 1..21: mol_type = other DNA
tttgcccgcgccggcggcaac

SEQ ID NO: 3844 - DNA, 21 bp, synthetic construct
  source 1..21: mol_type = other DNA
tattccaaatataattccaat

SEQ ID NO: 3845 - DNA, 21 bp, synthetic construct
  source 1..21: mol_type = other DNA
tttgccaaggtaggctttaac

SEQ ID NO: 3846 - DNA, 21 bp, synthetic construct
  source 1..21: mol_type = other DNA
ttttcacgcaacggcatcaac

SEQ ID NO: 3847 - DNA, 21 bp, synthetic construct
  source 1..21: mol_type = other DNA
ttttcaaaggccggccataac

SEQ ID NO: 3848 - DNA, 21 bp, synthetic construct
  source 1..21: mol_type = other DNA
ttggcgaaaaatgggtgtaat

SEQ ID NO: 3849 - DNA, 21 bp, synthetic construct
  source 1..21: mol_type = other DNA
tatgcgaaatataatatgaat

SEQ ID NO: 3850 - DNA, 21 bp, synthetic construct
  source 1..21: mol_type = other DNA
gggggggggtccgtgaggtat

SEQ ID NO: 3851 - DNA, 21 bp, synthetic construct
  source 1..21: mol_type = other DNA
ttctccaggcagaatcacaat

SEQ ID NO: 3852 - DNA, 21 bp, synthetic construct
  source 1..21: mol_type = other DNA
cagcactataatgggttgggg

SEQ ID NO: 3853 - DNA, 21 bp, synthetic construct
  source 1..21: mol_type = other DNA
tacgccaaggccaactggaac

SEQ ID NO: 3854 - DNA, 21 bp, synthetic construct
  source 1..21: mol_type = other DNA
tatgcgaggcacgggacgaat

SEQ ID NO: 3855 - DNA, 21 bp, synthetic construct
  source 1..21: mol_type = other DNA
tttgcccgccatggcctgaac

SEQ ID NO: 3856 - DNA, 21 bp, synthetic construct
  source 1..21: mol_type = other DNA
tactcaaagcaaggccccaac

SEQ ID NO: 3857 - DNA, 21 bp, synthetic construct
  source 1..21: mol_type = other DNA
ttcgcgaggtccggggggaat

SEQ ID NO: 3858 - DNA, 21 bp, synthetic construct
  source 1..21: mol_type = other DNA
ttctccaggaataatgtgaat

SEQ ID NO: 3859 - DNA, 21 bp, synthetic construct
  source 1..21: mol_type = other DNA
ttctccaggttgggggggaat

SEQ ID NO: 3860 - DNA, 21 bp, synthetic construct
  source 1..21: mol_type = other DNA
tatgcgaggatgaatacgaat

SEQ ID NO: 3861 - DNA, 21 bp, synthetic construct
  source 1..21: mol_type = other DNA
gagcagtccacgaatggggtg

SEQ ID NO: 3862 - DNA, 21 bp, synthetic construct
  source 1..21: mol_type = other DNA
cgcgccgccgaagtatacccc

SEQ ID NO: 3863 - DNA, 21 bp, synthetic construct
  source 1..21: mol_type = other DNA
ctgtcaaagggcggctttaac

SEQ ID NO: 3864 - DNA, 21 bp, synthetic construct
  source 1..21: mol_type = other DNA
aacaagtggggcatgtcaccc

SEQ ID NO: 3865 - DNA, 21 bp, synthetic construct
  source 1..21: mol_type = other DNA
tatgcgaggttcaatccgaat

SEQ ID NO: 3866 - DNA, 21 bp, synthetic construct
  source 1..21: mol_type = other DNA
tatgcgaggtcctcccagtcc

SEQ ID NO: 3867 - DNA, 21 bp, synthetic construct
  source 1..21: mol_type = other DNA
tacgccaagaccaacaacaac

SEQ ID NO: 3868 - DNA, 21 bp, synthetic construct
  source 1..21: mol_type = other DNA
tattatcaggggacgtccgcg

SEQ ID NO: 3869 - DNA, 21 bp, synthetic construct
  source 1..21: mol_type = other DNA
ttttcacgccatggcatcaac

SEQ ID NO: 3870 - DNA, 21 bp, synthetic construct
  source 1..21: mol_type = other DNA
ttttcacgcgtaaacctgaac

SEQ ID NO: 3871 - DNA, 21 bp, synthetic construct
  source 1..21: mol_type = other DNA
tactcaaagtttaacgccaac

SEQ ID NO: 3872 - DNA, 21 bp, synthetic construct
  source 1..21: mol_type = other DNA
tacgcccgcatgaaccccaac

SEQ ID NO: 3873 - DNA, 21 bp, synthetic construct
  source 1..21: mol_type = other DNA
tatgcgaggtcctcccagata

SEQ ID NO: 3874 - DNA, 21 bp, synthetic construct
  source 1..21: mol_type = other DNA
tttgccaagggcggcgccaac

SEQ ID NO: 3875 - DNA, 21 bp, synthetic construct
  source 1..21: mol_type = other DNA
tattccaggtataattccaat

SEQ ID NO: 3876 - DNA, 21 bp, synthetic construct
  source 1..21: mol_type = other DNA
ttcgcgaggatgggggtgaat

SEQ ID NO: 3877 - DNA, 21 bp, synthetic construct
  source 1..21: mol_type = other DNA
tttgcccgctcaaacctgaac

SEQ ID NO: 3878 - DNA, 21 bp, synthetic construct
  source 1..21: mol_type = other DNA
tttgcccgccaaggctacaac

SEQ ID NO: 3879 - DNA, 21 bp, synthetic construct
  source 1..21: mol_type = other DNA
tatgcgaaaacgaatttgaat

SEQ ID NO: 3880 - DNA, 21 bp, synthetic construct
  source 1..21: mol_type = other DNA
ttttcacgctcaaactttaac

SEQ ID NO: 3881 - DNA, 21 bp, synthetic construct
  source 1..21: mol_type = other DNA
tttgccaagaacggcaacaac

SEQ ID NO: 3882 - DNA, 21 bp, synthetic construct
  source 1..21: mol_type = other DNA
tacgccaagcccggcctgaac

SEQ ID NO: 3883 - DNA, 21 bp, synthetic construct
  source 1..21: mol_type = other DNA
atcttttcatcaaacggcgta

SEQ ID NO: 3884 - DNA, 21 bp, synthetic construct
  source 1..21: mol_type = other DNA
ttctccaggtccaatcacaat

SEQ ID NO: 3885 - DNA, 21 bp, synthetic construct
  source 1..21: mol_type = other DNA
tttgcccgctcaggcgacaac

SEQ ID NO: 3886 - DNA, 21 bp, synthetic construct
  source 1..21: mol_type = other DNA
tatgcgagggagaataaaaat

SEQ ID NO: 3887 - DNA, 21 bp, synthetic construct
  source 1..21: mol_type = other DNA
tatgcgaaatatgggacgaat

SEQ ID NO: 3888 - DNA, 21 bp, synthetic construct
  source 1..21: mol_type = other DNA
ttttcacgctcaaacctgaac

SEQ ID NO: 3889 - DNA, 21 bp, synthetic construct
  source 1..21: mol_type = other DNA
cgcgaagtatcacgctcatac

SEQ ID NO: 3890 - DNA, 21 bp, synthetic construct
  source 1..21: mol_type = other DNA
atgaactcatcatcaggctgg

SEQ ID NO: 3891 - DNA, 21 bp, synthetic construct
  source 1..21: mol_type = other DNA
tattccaggatgggggggaat

SEQ ID NO: 3892 - DNA, 21 bp, synthetic construct
  source 1..21: mol_type = other DNA
ttctccaggcaggggcagaat

SEQ ID NO: 3893 - DNA, 21 bp, synthetic construct
  source 1..21: mol_type = other DNA
ttcgcgaggatagggcagaat

SEQ ID NO: 3894 - DNA, 21 bp, synthetic construct
  source 1..21: mol_type = other DNA
tatgcgaaatatggggtgaat

SEQ ID NO: 3895 - DNA, 21 bp, synthetic construct
  source 1..21: mol_type = other DNA
tactcacgccccaacaacaac

SEQ ID NO: 3896 - DNA, 21 bp, synthetic construct
  source 1..21: mol_type = other DNA
tactcaaagatcaaccccaac

SEQ ID NO: 3897 - DNA, 21 bp, synthetic construct
  source 1..21: mol_type = other DNA
atagggtcctccaatggggtg

SEQ ID NO: 3898 - DNA, 21 bp, synthetic construct
  source 1..21: mol_type = other DNA
ttctccaaacaggggttcaat

SEQ ID NO: 3899 - DNA, 21 bp, synthetic construct
  source 1..21: mol_type = other DNA
tactcaaagtcaaactggaac

SEQ ID NO: 3900 - DNA, 21 bp, synthetic construct
  source 1..21: mol_type = other DNA
ctggccaagcatggcaccaac

SEQ ID NO: 3901 - DNA, 21 bp, synthetic construct
  source 1..21: mol_type = other DNA
ttctccaggatggggatgaat

SEQ ID NO: 3902 - DNA, 21 bp, synthetic construct
  source 1..21: mol_type = other DNA
tttgcccgcatgggcatcaac

SEQ ID NO: 3903 - DNA, 21 bp, synthetic construct
  source 1..21: mol_type = other DNA
ttgtccaggcaggggtggaat

SEQ ID NO: 3904 - DNA, 21 bp, synthetic construct
  source 1..21: mol_type = other DNA
ttttcacgcaccaacctgaac

SEQ ID NO: 3905 - DNA, 21 bp, synthetic construct
  source 1..21: mol_type = other DNA
tatgcgaggatgaatgcgaat

SEQ ID NO: 3906 - DNA, 21 bp, synthetic construct
  source 1..21: mol_type = other DNA
ttgtccaaacacgggtataat

SEQ ID NO: 3907 - DNA, 21 bp, synthetic construct
  source 1..21: mol_type = other DNA
tacgcccgcgccggccccaac

SEQ ID NO: 3908 - DNA, 21 bp, synthetic construct
  source 1..21: mol_type = other DNA
gcgcaggcggcgaaaaattgg

SEQ ID NO: 3909 - DNA, 21 bp, synthetic construct
  source 1..21: mol_type = other DNA
ttgtccaggacgtccacgaat

SEQ ID NO: 3910 - DNA, 21 bp, synthetic construct
  source 1..21: mol_type = other DNA
tactcacgcctgggcgtaaac

SEQ ID NO: 3911 - DNA, 21 bp, synthetic construct
  source 1..21: mol_type = other DNA
tattccaaatataatttcaat

SEQ ID NO: 3912 - DNA, 21 bp, synthetic construct
  source 1..21: mol_type = other DNA
tatacgcactccacgtatggg

SEQ ID NO: 3913 - DNA, 21 bp, synthetic construct
  source 1..21: mol_type = other DNA
tatgcgagggtgaatcacaat

SEQ ID NO: 3914 - DNA, 21 bp, synthetic construct
  source 1..21: mol_type = other DNA
tactcacgccccggcaacaac

SEQ ID NO: 3915 - DNA, 21 bp, synthetic construct
  source 1..21: mol_type = other DNA
tacgccaaggtaggcctgaac

SEQ ID NO: 3916 - DNA, 21 bp, synthetic construct
  source 1..21: mol_type = other DNA
tactcacgccatggcatgaac

SEQ ID NO: 3917 - DNA, 21 bp, synthetic construct
  source 1..21: mol_type = other DNA
tatcacaaattgttgtccggg

SEQ ID NO: 3918 - DNA, 21 bp, synthetic construct
  source 1..21: mol_type = other DNA
ttcgcgaggcaggggcagaat

SEQ ID NO: 3919 - DNA, 21 bp, synthetic construct
  source 1..21: mol_type = other DNA
tatgcgaggcacggggggaat

SEQ ID NO: 3920 - DNA, 21 bp, synthetic construct
  source 1..21: mol_type = other DNA
ctggcccgcctgggctcaaac

SEQ ID NO: 3921 - DNA, 21 bp, synthetic construct
  source 1..21: mol_type = other DNA
ttctccaaatataataataat

SEQ ID NO: 3922 - DNA, 21 bp, synthetic construct
  source 1..21: mol_type = other DNA
tactcaaagctgaacaagaac

SEQ ID NO: 3923 - DNA, 21 bp, synthetic construct
  source 1..21: mol_type = other DNA
ttttcacgcggcggcgccaac

SEQ ID NO: 3924 - DNA, 21 bp, synthetic construct
  source 1..21: mol_type = other DNA
ttcgcgaggatgggggcgaat

SEQ ID NO: 3925 - DNA, 21 bp, synthetic construct
  source 1..21: mol_type = other DNA
gaaaaccgccccgaacgcaag

SEQ ID NO: 3926 - DNA, 21 bp, synthetic construct
  source 1..21: mol_type = other DNA
ttttcacgcaacggctacaac

SEQ ID NO: 3927 - DNA, 21 bp, synthetic construct
  source 1..21: mol_type = other DNA
ttcgcgaggttgggggtgaat

SEQ ID NO: 3928 - DNA, 21 bp, synthetic construct
  source 1..21: mol_type = other DNA
cgcaacgaatcatcatttccc

SEQ ID NO: 3929 - DNA, 21 bp, synthetic construct
  source 1..21: mol_type = other DNA
ttctccaggcacaatgtgaat

SEQ ID NO: 3930 - DNA, 21 bp, synthetic construct
  source 1..21: mol_type = other DNA
tactttgcccatgtacaagaa

SEQ ID NO: 3931 - DNA, 21 bp, synthetic construct
  source 1..21: mol_type = other DNA
ttggcgaggggggggtcctat

SEQ ID NO: 3932 - DNA, 21 bp, synthetic construct
  source 1..21: mol_type = other DNA
ttctccaaacacaatacgaat

SEQ ID NO: 3933 - DNA, 21 bp, synthetic construct
  source 1..21: mol_type = other DNA
atcgacggccattcatactac

SEQ ID NO: 3934 - DNA, 21 bp, synthetic construct
  source 1..21: mol_type = other DNA
tattccaaattcaattccaat

SEQ ID NO: 3935 - DNA, 21 bp, synthetic construct
  source 1..21: mol_type = other DNA
tatgcgaaatataatataaat

SEQ ID NO: 3936 - DNA, 21 bp, synthetic construct
  source 1..21: mol_type = other DNA
tactcaaagtacaacaacaac

SEQ ID NO: 3937 - DNA, 21 bp, synthetic construct
  source 1..21: mol_type = other DNA
tacgcccgcaccaacggcaac

SEQ ID NO: 3938 - DNA, 21 bp, synthetic construct
  source 1..21: mol_type = other DNA
ttgaattccatgtccaaatat

SEQ ID NO: 3939 - DNA, 21 bp, synthetic construct
  source 1..21: mol_type = other DNA
accggcggcacctcatactac

SEQ ID NO: 3940 - DNA, 21 bp, synthetic construct
  source 1..21: mol_type = other DNA
tacgcccgcaacaacatgaac

SEQ ID NO: 3941 - DNA, 21 bp, synthetic construct
  source 1..21: mol_type = other DNA
tatgcgaaacacggggggaat

SEQ ID NO: 3942 - DNA, 21 bp, synthetic construct
  source 1..21: mol_type = other DNA
agggcgaatgcgggggcgggg

SEQ ID NO: 3943 - DNA, 21 bp, synthetic construct
  source 1..21: mol_type = other DNA
ttttcacgcaccaacgccaac

SEQ ID NO: 3944 - DNA, 21 bp, synthetic construct
  source 1..21: mol_type = other DNA
ttctccagggtgaatatgaat

SEQ ID NO: 3945 - DNA, 21 bp, synthetic construct
  source 1..21: mol_type = other DNA
tttgccaagcatggctttaac

SEQ ID NO: 3946 - DNA, 21 bp, synthetic construct
  source 1..21: mol_type = other DNA
tacgcccgcgccaacatcaac

SEQ ID NO: 3947 - DNA, 21 bp, synthetic construct
  source 1..21: mol_type = other DNA
aatcagtatgggtccgggagg

SEQ ID NO: 3948 - DNA, 21 bp, synthetic construct
  source 1..21: mol_type = other DNA
ttctccagggtgaatcagaat

SEQ ID NO: 3949 - DNA, 21 bp, synthetic construct
  source 1..21: mol_type = other DNA
tttgcccgcgtaggcaacaac

SEQ ID NO: 3950 - DNA, 21 bp, synthetic construct
  source 1..21: mol_type = other DNA
ttctccaggtccaatgcgaat

SEQ ID NO: 3951 - DNA, 21 bp, synthetic construct
  source 1..21: mol_type = other DNA
tacgccaagaagggcgacaac

SEQ ID NO: 3952 - DNA, 21 bp, synthetic construct
  source 1..21: mol_type = other DNA
ttctccaggataaattccaat

SEQ ID NO: 3953 - DNA, 21 bp, synthetic construct
  source 1..21: mol_type = other DNA
tattccaggttcaatacgaat

SEQ ID NO: 3954 - DNA, 21 bp, synthetic construct
  source 1..21: mol_type = other DNA
ttcgcgaggtccaattataat

SEQ ID NO: 3955 - DNA, 21 bp, synthetic construct
  source 1..21: mol_type = other DNA
ctgtcacgcatcaacgaaaac

SEQ ID NO: 3956 - DNA, 21 bp, synthetic construct
  source 1..21: mol_type = other DNA
gggaatacgtccaaatcctgg

SEQ ID NO: 3957 - DNA, 21 bp, synthetic construct
  source 1..21: mol_type = other DNA
ttcgcgaggcagaataataat

SEQ ID NO: 3958 - DNA, 21 bp, synthetic construct
  source 1..21: mol_type = other DNA
ttgtccaaaccggggccgaat

SEQ ID NO: 3959 - DNA, 21 bp, synthetic construct
  source 1..21: mol_type = other DNA
tatgcgaggaataatttcaat

SEQ ID NO: 3960 - DNA, 21 bp, synthetic construct
  source 1..21: mol_type = other DNA
ttcgcgagggtgaataataat

SEQ ID NO: 3961 - DNA, 21 bp, synthetic construct
  source 1..21: mol_type = other DNA
tttgcccgcaccaacgtaaac

SEQ ID NO: 3962 - DNA, 21 bp, synthetic construct
  source 1..21: mol_type = other DNA
gtagacggccgctcaatgtac

SEQ ID NO: 3963 - DNA, 21 bp, synthetic construct
  source 1..21: mol_type = other DNA
ttttcacgcaccaaccataac

SEQ ID NO: 3964 - DNA, 21 bp, synthetic construct
  source 1..21: mol_type = other DNA
tactcaaagatcaactcaaac

SEQ ID NO: 3965 - DNA, 21 bp, synthetic construct
  source 1..21: mol_type = other DNA
gtacaaggccgctcatcatac

SEQ ID NO: 3966 - DNA, 21 bp, synthetic construct
  source 1..21: mol_type = other DNA
ttcgcgaaaaggaatgataat

SEQ ID NO: 3967 - DNA, 21 bp, synthetic construct
  source 1..21: mol_type = other DNA
ttcgcgaggttggggacgaat

SEQ ID NO: 3968 - DNA, 21 bp, synthetic construct
  source 1..21: mol_type = other DNA
tattccaaattcaatccgaat

SEQ ID NO: 3969 - DNA, 21 bp, synthetic construct
  source 1..21: mol_type = other DNA
tttgccaagcaaggcatgaac

SEQ ID NO: 3970 - DNA, 21 bp, synthetic construct
  source 1..21: mol_type = other DNA
tttgccaagctgggccccaac

SEQ ID NO: 3971 - DNA, 21 bp, synthetic construct
  source 1..21: mol_type = other DNA
tattccaaaataaatcagaat

SEQ ID NO: 3972 - DNA, 21 bp, synthetic construct
  source 1..21: mol_type = other DNA
ttcgcgaaaatggggcacaat

SEQ ID NO: 3973 - DNA, 21 bp, synthetic construct
  source 1..21: mol_type = other DNA
tattccaaaatggggaaaaat

SEQ ID NO: 3974 - DNA, 21 bp, synthetic construct
  source 1..21: mol_type = other DNA
ttctccaggacggggccgaat

SEQ ID NO: 3975 - DNA, 21 bp, synthetic construct
  source 1..21: mol_type = other DNA
aatgcgagggggatggggaat

SEQ ID NO: 3976 - DNA, 21 bp, synthetic construct
  source 1..21: mol_type = other DNA
tattatcagtataaaacggcg

SEQ ID NO: 3977 - DNA, 21 bp, synthetic construct
  source 1..21: mol_type = other DNA
ttctccaaagggaataataat

SEQ ID NO: 3978 - DNA, 21 bp, synthetic construct
  source 1..21: mol_type = other DNA
tacgccaagtacaactttaac

SEQ ID NO: 3979 - DNA, 21 bp, synthetic construct
  source 1..21: mol_type = other DNA
ctggccaagcaaggctcaaac

SEQ ID NO: 3980 - DNA, 21 bp, synthetic construct
  source 1..21: mol_type = other DNA
tactcaaagcccaactggaac

SEQ ID NO: 3981 - DNA, 21 bp, synthetic construct
  source 1..21: mol_type = other DNA
tacgccaagcccaactacaac

SEQ ID NO: 3982 - DNA, 21 bp, synthetic construct
  source 1..21: mol_type = other DNA
tactcaaagtttaaccataac

SEQ ID NO: 3983 - DNA, 21 bp, synthetic construct
  source 1..21: mol_type = other DNA
ttctccaggtccaatccgaat

SEQ ID NO: 3984 - DNA, 21 bp, synthetic construct
  source 1..21: mol_type = other DNA
ttctccaggccgaatcacaat

SEQ ID NO: 3985 - DNA, 21 bp, synthetic construct
  source 1..21: mol_type = other DNA
aaccaactgcccacccccaag

SEQ ID NO: 3986 - DNA, 21 bp, synthetic construct
  source 1..21: mol_type = other DNA
atgccgaggtccacgtatggg

SEQ ID NO: 3987 - DNA, 21 bp, synthetic construct
  source 1..21: mol_type = other DNA
ttcgcgaaatataataataat

SEQ ID NO: 3988 - DNA, 21 bp, synthetic construct
  source 1..21: mol_type = other DNA
ttttcacgctttaacaccaac

SEQ ID NO: 3989 - DNA, 21 bp, synthetic construct
  source 1..21: mol_type = other DNA
tatgcgaaatataattataat

SEQ ID NO: 3990 - DNA, 21 bp, synthetic construct
  source 1..21: mol_type = other DNA
tattccaggggggggcacaat

SEQ ID NO: 3991 - DNA, 21 bp, synthetic construct
  source 1..21: mol_type = other DNA
tatgcgaggccgaatccgaat

SEQ ID NO: 3992 - DNA, 21 bp, synthetic construct
  source 1..21: mol_type = other DNA
tactcaaagggcggcaccaac

SEQ ID NO: 3993 - DNA, 21 bp, synthetic construct
  source 1..21: mol_type = other DNA
tttgcccgccatggcatcaac

SEQ ID NO: 3994 - DNA, 21 bp, synthetic construct
  source 1..21: mol_type = other DNA
ttcgcgagggcggggcagaat

SEQ ID NO: 3995 - DNA, 21 bp, synthetic construct
  source 1..21: mol_type = other DNA
ttttcaaagatcggctcaaac

SEQ ID NO: 3996 - DNA, 21 bp, synthetic construct
  source 1..21: mol_type = other DNA
cgcaacacctcaaccaactgg

SEQ ID NO: 3997 - DNA, 21 bp, synthetic construct
  source 1..21: mol_type = other DNA
ttcgcgaggatggggtccaat

SEQ ID NO: 3998 - DNA, 21 bp, synthetic construct
  source 1..21: mol_type = other DNA
ctgtcaaagtggaacgaaaac

SEQ ID NO: 3999 - DNA, 21 bp, synthetic construct
  source 1..21: mol_type = other DNA
ttctccaggccgaattataat

SEQ ID NO: 4000 - DNA, 21 bp, synthetic construct
  source 1..21: mol_type = other DNA
tacgccaagaccaacgacaac

SEQ ID NO: 4001 - DNA, 21 bp, synthetic construct
  source 1..21: mol_type = other DNA
ttttcacgcggcaacaacaac

SEQ ID NO: 4002 - DNA, 21 bp, synthetic construct
  source 1..21: mol_type = other DNA
ctgtcaaagaacaacctgaac

SEQ ID NO: 4003 - DNA, 21 bp, synthetic construct
  source 1..21: mol_type = other DNA
cgcacctcatcatacggcgta

SEQ ID NO: 4004 - DNA, 21 bp, synthetic construct
  source 1..21: mol_type = other DNA
ctggccaagatcggcatgaac

SEQ ID NO: 4005 - DNA, 21 bp, synthetic construct
  source 1..21: mol_type = other DNA
tttgcccgcgccggcgtaaac

SEQ ID NO: 4006 - DNA, 21 bp, synthetic construct
  source 1..21: mol_type = other DNA
ttcgcgaaaccgaatataaat

SEQ ID NO: 4007 - DNA, 21 bp, synthetic construct
  source 1..21: mol_type = other DNA
tattccaggacggggccgaat

SEQ ID NO: 4008 - DNA, 21 bp, synthetic construct
  source 1..21: mol_type = other DNA
tatgcgagggaggggtggaat

SEQ ID NO: 4009 - DNA, 21 bp, synthetic construct
  source 1..21: mol_type = other DNA
tataggccgagggtgccggat

SEQ ID NO: 4010 - DNA, 21 bp, synthetic construct
  source 1..21: mol_type = other DNA
ttggcgaaagggcactatggg

SEQ ID NO: 4011 - DNA, 21 bp, synthetic construct
  source 1..21: mol_type = other DNA
gccggcaactcacgcgactgg

SEQ ID NO: 4012 - DNA, 21 bp, synthetic construct
  source 1..21: mol_type = other DNA
tatgcgaggccgaatatgaat

SEQ ID NO: 4013 - DNA, 21 bp, synthetic construct
  source 1..21: mol_type = other DNA
tatgcgagggaggggttcaat

SEQ ID NO: 4014 - DNA, 21 bp, synthetic construct
  source 1..21: mol_type = other DNA
tatgcgaaacagaatcagaat

SEQ ID NO: 4015 - DNA, 21 bp, synthetic construct
  source 1..21: mol_type = other DNA
ctgtcacgcatgggcggcaac

SEQ ID NO: 4016 - DNA, 21 bp, synthetic construct
  source 1..21: mol_type = other DNA
ctgtcaaagtggaacgacaac

SEQ ID NO: 4017 - DNA, 21 bp, synthetic construct
  source 1..21: mol_type = other DNA
ttttcaaagcgcggcgacaac

SEQ ID NO: 4018 - DNA, 21 bp, synthetic construct
  source 1..21: mol_type = other DNA
tactcacgcaagggcgacaac

SEQ ID NO: 4019 - DNA, 21 bp, synthetic construct
  source 1..21: mol_type = other DNA
ttttcaaagcatggctttaac

SEQ ID NO: 4020 - DNA, 21 bp, synthetic construct
  source 1..21: mol_type = other DNA
ttcgcgaggacgaatcagaat

SEQ ID NO: 4021 - DNA, 21 bp, synthetic construct
  source 1..21: mol_type = other DNA
tttgcccgctcaaacgtaaac

SEQ ID NO: 4022 - DNA, 21 bp, synthetic construct
  source 1..21: mol_type = other DNA
tttgccaagatcggccccaac

SEQ ID NO: 4023 - DNA, 21 bp, synthetic construct
  source 1..21: mol_type = other DNA
ttttcacgctcaaactcaaac

SEQ ID NO: 4024 - DNA, 21 bp, synthetic construct
  source 1..21: mol_type = other DNA
tatgcgaaattgggggggaat

SEQ ID NO: 4025 - DNA, 21 bp, synthetic construct
  source 1..21: mol_type = other DNA
ttttcaaagctgggccaaaac

SEQ ID NO: 4026 - DNA, 21 bp, synthetic construct
  source 1..21: mol_type = other DNA
ttcgcgaggcacaatgcgaat

SEQ ID NO: 4027 - DNA, 21 bp, synthetic construct
  source 1..21: mol_type = other DNA
ttcgcgaggtccaatcacaat

SEQ ID NO: 4028 - DNA, 21 bp, synthetic construct
  source 1..21: mol_type = other DNA
ttcgcgaggatggggtataat

SEQ ID NO: 4029 - DNA, 21 bp, synthetic construct
  source 1..21: mol_type = other DNA
tttgccaagaacggctggaac

SEQ ID NO: 4030 - DNA, 21 bp, synthetic construct
  source 1..21: mol_type = other DNA
ttcgcgaaattcgggccgaat

SEQ ID NO: 4031 - DNA, 21 bp, synthetic construct
  source 1..21: mol_type = other DNA
ttctccaggacgaattccaat

SEQ ID NO: 4032 - DNA, 21 bp, synthetic construct
  source 1..21: mol_type = other DNA
tttgcccgcgccaacgccaac

SEQ ID NO: 4033 - DNA, 21 bp, synthetic construct
  source 1..21: mol_type = other DNA
tactcaaagaccaacgccaac

SEQ ID NO: 4034 - DNA, 21 bp, synthetic construct
  source 1..21: mol_type = other DNA
tactcaaagtttaacctgaac

SEQ ID NO: 4035 - DNA, 21 bp, synthetic construct
  source 1..21: mol_type = other DNA
tatgcgaggaaaaatgagaat

SEQ ID NO: 4036 - DNA, 21 bp, synthetic construct
  source 1..21: mol_type = other DNA
aactacggcaacatgaagaac

SEQ ID NO: 4037 - DNA, 21 bp, synthetic construct
  source 1..21: mol_type = other DNA
tactcaaagtttaacaccaac

SEQ ID NO: 4038 - DNA, 21 bp, synthetic construct
  source 1..21: mol_type = other DNA
accaagtttggcctgtcagcc

SEQ ID NO: 4039 - DNA, 21 bp, synthetic construct
  source 1..21: mol_type = other DNA
tacgcccgcgaaggcaagaac

SEQ ID NO: 4040 - DNA, 21 bp, synthetic construct
  source 1..21: mol_type = other DNA
ttcgcgaggatgaatcacaat

SEQ ID NO: 4041 - DNA, 21 bp, synthetic construct
  source 1..21: mol_type = other DNA
ttcgcgaaaggggggcagaat

SEQ ID NO: 4042 - DNA, 21 bp, synthetic construct
  source 1..21: mol_type = other DNA
tactcacgcaacaacggcaac

SEQ ID NO: 4043 - DNA, 21 bp, synthetic construct
  source 1..21: mol_type = other DNA
ttcgcgaggtccaattccaat

SEQ ID NO: 4044 - DNA, 21 bp, synthetic construct
  source 1..21: mol_type = other DNA
tactcacgcgaaggccgcaac

SEQ ID NO: 4045 - DNA, 21 bp, synthetic construct
  source 1..21: mol_type = other DNA
ttcgcgaggcacggggtgaat

SEQ ID NO: 4046 - DNA, 21 bp, synthetic construct
  source 1..21: mol_type = other DNA
tttgcccgcatcggcgccaac

SEQ ID NO: 4047 - DNA, 21 bp, synthetic construct
  source 1..21: mol_type = other DNA
tattccaaaacgaattggaat

SEQ ID NO: 4048 - DNA, 21 bp, synthetic construct
  source 1..21: mol_type = other DNA
atgtggtcatcaaacggcgta

SEQ ID NO: 4049 - DNA, 21 bp, synthetic construct
  source 1..21: mol_type = other DNA
tattccaaatatgggatgaat

SEQ ID NO: 4050 - DNA, 21 bp, synthetic construct
  source 1..21: mol_type = other DNA
ttttcacgcggcaaccccaac

SEQ ID NO: 4051 - DNA, 21 bp, synthetic construct
  source 1..21: mol_type = other DNA
ttttcaaagatgggcgccaac

SEQ ID NO: 4052 - DNA, 21 bp, synthetic construct
  source 1..21: mol_type = other DNA
ttcgcgaggtccaatttcaat

SEQ ID NO: 4053 - DNA, 21 bp, synthetic construct
  source 1..21: mol_type = other DNA
tatgcgaaatggaatgcgaat

SEQ ID NO: 4054 - DNA, 21 bp, synthetic construct
  source 1..21: mol_type = other DNA
ctgtcaaagatcaactttaac

SEQ ID NO: 4055 - DNA, 21 bp, synthetic construct
  source 1..21: mol_type = other DNA
tacgccaagatcggcggcaac

SEQ ID NO: 4056 - DNA, 21 bp, synthetic construct
  source 1..21: mol_type = other DNA
atgggcacctcacgcggctgg

SEQ ID NO: 4057 - DNA, 21 bp, synthetic construct
  source 1..21: mol_type = other DNA
tatttcggggggaaacaggcg

SEQ ID NO: 4058 - DNA, 21 bp, synthetic construct
  source 1..21: mol_type = other DNA
tacgcccgctcatcacaagac

SEQ ID NO: 4059 - DNA, 21 bp, synthetic construct
  source 1..21: mol_type = other DNA
tggctgaagtcacaagcctca

SEQ ID NO: 4060 - DNA, 21 bp, synthetic construct
  source 1..21: mol_type = other DNA
ttttcacgcaacaacaacaac

SEQ ID NO: 4061 - DNA, 21 bp, synthetic construct
  source 1..21: mol_type = other DNA
cgctcaaactcagcctacccc

SEQ ID NO: 4062 - DNA, 21 bp, synthetic construct
  source 1..21: mol_type = other DNA
ggcaactcaacctcaaagttt

SEQ ID NO: 4063 - DNA, 21 bp, synthetic construct
  source 1..21: mol_type = other DNA
tttgccaagcaaggcatcaac

SEQ ID NO: 4064 - DNA, 21 bp, synthetic construct
  source 1..21: mol_type = other DNA
ctgtcacgctacggcgacaac

SEQ ID NO: 4065 - DNA, 21 bp, synthetic construct
  source 1..21: mol_type = other DNA
ttttcacgcatcaacgccaac

SEQ ID NO: 4066 - DNA, 21 bp, synthetic construct
  source 1..21: mol_type = other DNA
tcaaagggcacctcatactac

SEQ ID NO: 4067 - DNA, 21 bp, synthetic construct
  source 1..21: mol_type = other DNA
tttgccaagggcaaccccaac

SEQ ID NO: 4068 - DNA, 21 bp, synthetic construct
  source 1..21: mol_type = other DNA
ttctccagggggaatacgaat

SEQ ID NO: 4069 - DNA, 21 bp, synthetic construct
  source 1..21: mol_type = other DNA
ctgaagtcatcaaacggcgta

SEQ ID NO: 4070 - DNA, 21 bp, synthetic construct
  source 1..21: mol_type = other DNA
aaacactccacgaatggggtg

SEQ ID NO: 4071 - DNA, 21 bp, synthetic construct
  source 1..21: mol_type = other DNA
ttctccaaaccgaattataat

SEQ ID NO: 4072 - DNA, 21 bp, synthetic construct
  source 1..21: mol_type = other DNA
aataggtataaatccggggag

SEQ ID NO: 4073 - DNA, 21 bp, synthetic construct
  source 1..21: mol_type = other DNA
ttctccaggaataatttgaat

SEQ ID NO: 4074 - DNA, 21 bp, synthetic construct
  source 1..21: mol_type = other DNA
tatccggggaaatcctccttc

SEQ ID NO: 4075 - DNA, 21 bp, synthetic construct
  source 1..21: mol_type = other DNA
tattccaaatataattataat

SEQ ID NO: 4076 - DNA, 21 bp, synthetic construct
  source 1..21: mol_type = other DNA
tacgccaagtggaaccccaac

SEQ ID NO: 4077 - DNA, 21 bp, synthetic construct
  source 1..21: mol_type = other DNA
tatgcgaggcacaatcacaat

SEQ ID NO: 4078 - DNA, 21 bp, synthetic construct
  source 1..21: mol_type = other DNA
tttgccaagggcaacgccaac

SEQ ID NO: 4079 - DNA, 21 bp, synthetic construct
  source 1..21: mol_type = other DNA
gggaggttgaaatccgatcag

SEQ ID NO: 4080 - DNA, 21 bp, synthetic construct
  source 1..21: mol_type = other DNA
ttcgcgaggacgaatgcgaat

SEQ ID NO: 4081 - DNA, 21 bp, synthetic construct
  source 1..21: mol_type = other DNA
tatgcgaaattcaatccgaat

SEQ ID NO: 4082 - DNA, 21 bp, synthetic construct
  source 1..21: mol_type = other DNA
ttttcacgcgtaaactcaaac

SEQ ID NO: 4083 - DNA, 21 bp, synthetic construct
  source 1..21: mol_type = other DNA
cgcaacaacaccgtatacatg

SEQ ID NO: 4084 - DNA, 21 bp, synthetic construct
  source 1..21: mol_type = other DNA
ttctccaaacacgggcacaat

SEQ ID NO: 4085 - DNA, 21 bp, synthetic construct
  source 1..21: mol_type = other DNA
ctgtcaaagtttaactacaac

SEQ ID NO: 4086 - DNA, 21 bp, synthetic construct
  source 1..21: mol_type = other DNA
ttttcaaagcatggcctgaac

SEQ ID NO: 4087 - DNA, 21 bp, synthetic construct
  source 1..21: mol_type = other DNA
tccaggtatggggatgcggcg

SEQ ID NO: 4088 - DNA, 21 bp, synthetic construct
  source 1..21: mol_type = other DNA
aacaagtcatcatcatcatgg

SEQ ID NO: 4089 - DNA, 21 bp, synthetic construct
  source 1..21: mol_type = other DNA
ttttcacgcggcggcgtaaac

SEQ ID NO: 4090 - DNA, 21 bp, synthetic construct
  source 1..21: mol_type = other DNA
tacgcccgctcaaactacaac

SEQ ID NO: 4091 - DNA, 21 bp, synthetic construct
  source 1..21: mol_type = other DNA
accccctacggcaagatggcc

SEQ ID NO: 4092 - DNA, 21 bp, synthetic construct
  source 1..21: mol_type = other DNA
ttttcaaagaagaacgacaac

SEQ ID NO: 4093 - DNA, 21 bp, synthetic construct
  source 1..21: mol_type = other DNA
ttttcacgcaacaactcaaac

SEQ ID NO: 4094 - DNA, 21 bp, synthetic construct
  source 1..21: mol_type = other DNA
tttgcccgcaccaacctgaac

SEQ ID NO: 4095 - DNA, 21 bp, synthetic construct
  source 1..21: mol_type = other DNA
ttttcaaagtcaaactacaac

SEQ ID NO: 4096 - DNA, 21 bp, synthetic construct
  source 1..21: mol_type = other DNA
ttctccaaatccgggtggaat

SEQ ID NO: 4097 - DNA, 21 bp, synthetic construct
  source 1..21: mol_type = other DNA
tacgccaagcccaactttaac

SEQ ID NO: 4098 - DNA, 21 bp, synthetic construct
  source 1..21: mol_type = other DNA
tttgcccgcggcaaccccaac

SEQ ID NO: 4099 - DNA, 21 bp, synthetic construct
  source 1..21: mol_type = other DNA
tacgcccgccccaacatcaac

SEQ ID NO: 4100 - DNA, 21 bp, synthetic construct
  source 1..21: mol_type = other DNA
tgtgtgaaaacggataggaat

SEQ ID NO: 4101 - DNA, 21 bp, synthetic construct
  source 1..21: mol_type = other DNA
ttcgcgaggcagaatacgaat

SEQ ID NO: 4102 - DNA, 21 bp, synthetic construct
  source 1..21: mol_type = other DNA
tacgcccgctttaacatgaac

SEQ ID NO: 4103 - DNA, 21 bp, synthetic construct
  source 1..21: mol_type = other DNA
ttctccaaacagaatgcgaat

SEQ ID NO: 4104 - DNA, 21 bp, synthetic construct
  source 1..21: mol_type = other DNA
ttctccagggtgaatttcaat

SEQ ID NO: 4105 - DNA, 21 bp, synthetic construct
  source 1..21: mol_type = other DNA
ttctccaggaaaggggagaat

SEQ ID NO: 4106 - DNA, 21 bp, synthetic construct
  source 1..21: mol_type = other DNA
tatgcgaaagatgggaggaat

SEQ ID NO: 4107 - DNA, 21 bp, synthetic construct
  source 1..21: mol_type = other DNA
ttctccaggcacaatacgaat

SEQ ID NO: 4108 - DNA, 21 bp, synthetic construct
  source 1..21: mol_type = other DNA
ctgtcaaagcaaggctcaaac

SEQ ID NO: 4109 - DNA, 21 bp, synthetic construct
  source 1..21: mol_type = other DNA
tatgcgaggaggaatgagaat

SEQ ID NO: 4110 - DNA, 21 bp, synthetic construct
  source 1..21: mol_type = other DNA
ctgcgcggcggcgccgaccgc

SEQ ID NO: 4111 - DNA, 21 bp, synthetic construct
  source 1..21: mol_type = other DNA
tattccaggtataataataat

SEQ ID NO: 4112 - DNA, 21 bp, synthetic construct
  source 1..21: mol_type = other DNA
ttttcacgcggcaaccataac

SEQ ID NO: 4113 - DNA, 21 bp, synthetic construct
  source 1..21: mol_type = other DNA
tttgcccgcgtaggccaaaac

SEQ ID NO: 4114 - DNA, 21 bp, synthetic construct
  source 1..21: mol_type = other DNA
acctcaaacaacgtataccat

SEQ ID NO: 4115 - DNA, 21 bp, synthetic construct
  source 1..21: mol_type = other DNA
tactcaaagcccggctacaac

SEQ ID NO: 4116 - DNA, 21 bp, synthetic construct
  source 1..21: mol_type = other DNA
tttgcccgcgccaaccataac

SEQ ID NO: 4117 - DNA, 21 bp, synthetic construct
  source 1..21: mol_type = other DNA
ttcgcgaggtataatcagaat

SEQ ID NO: 4118 - DNA, 21 bp, synthetic construct
  source 1..21: mol_type = other DNA
tacgccaagatgggcaagaac

SEQ ID NO: 4119 - DNA, 21 bp, synthetic construct
  source 1..21: mol_type = other DNA
tacgccaagatgaactacaac

SEQ ID NO: 4120 - DNA, 21 bp, synthetic construct
  source 1..21: mol_type = other DNA
tttgcccgctcaaacgccaac

SEQ ID NO: 4121 - DNA, 21 bp, synthetic construct
  source 1..21: mol_type = other DNA
ttttcaaagatgaactcaaac

SEQ ID NO: 4122 - DNA, 21 bp, synthetic construct
  source 1..21: mol_type = other DNA
ttttcacgccccggccccaac

SEQ ID NO: 4123 - DNA, 21 bp, synthetic construct
  source 1..21: mol_type = other DNA
ctggcccgccatggcgacaac

SEQ ID NO: 4124 - DNA, 21 bp, synthetic construct
  source 1..21: mol_type = other DNA
ctgtcaaagtacaacgacaac

SEQ ID NO: 4125 - DNA, 21 bp, synthetic construct
  source 1..21: mol_type = other DNA
acgaatgcgaggtcctcctat

SEQ ID NO: 4126 - DNA, 21 bp, synthetic construct
  source 1..21: mol_type = other DNA
tatgcgaggtataatgcgaat

SEQ ID NO: 4127 - DNA, 21 bp, synthetic construct
  source 1..21: mol_type = other DNA
tactcacgcggcggcggcaac

SEQ ID NO: 4128 - DNA, 21 bp, synthetic construct
  source 1..21: mol_type = other DNA
cgctacaccggcacccccgcc

SEQ ID NO: 4129 - DNA, 21 bp, synthetic construct
  source 1..21: mol_type = other DNA
tattccagggataataggaat

SEQ ID NO: 4130 - DNA, 21 bp, synthetic construct
  source 1..21: mol_type = other DNA
ttcgcgaaattgaatatgaat

SEQ ID NO: 4131 - DNA, 21 bp, synthetic construct
  source 1..21: mol_type = other DNA
tatgcgaggttcaataataat

SEQ ID NO: 4132 - DNA, 21 bp, synthetic construct
  source 1..21: mol_type = other DNA
aacatcccctactcaatgccc

SEQ ID NO: 4133 - DNA, 21 bp, synthetic construct
  source 1..21: mol_type = other DNA
ttttcaaagcatggctacaac

SEQ ID NO: 4134 - DNA, 21 bp, synthetic construct
  source 1..21: mol_type = other DNA
tttgccaagaacggcgccaac

SEQ ID NO: 4135 - DNA, 21 bp, synthetic construct
  source 1..21: mol_type = other DNA
ttctccaaaatgggggtgaat

SEQ ID NO: 4136 - DNA, 21 bp, synthetic construct
  source 1..21: mol_type = other DNA
tacgcccgcatcaactcaaac

SEQ ID NO: 4137 - DNA, 21 bp, synthetic construct
  source 1..21: mol_type = other DNA
ttttcaaagcatggcatcaac

SEQ ID NO: 4138 - DNA, 21 bp, synthetic construct
  source 1..21: mol_type = other DNA
tccgagtccacgcacgggatg

SEQ ID NO: 4139 - DNA, 21 bp, synthetic construct
  source 1..21: mol_type = other DNA
ggggcgtccgggtccatatat

SEQ ID NO: 4140 - DNA, 21 bp, synthetic construct
  source 1..21: mol_type = other DNA
tacgcccgcatcaacctgaac

SEQ ID NO: 4141 - DNA, 21 bp, synthetic construct
  source 1..21: mol_type = other DNA
ctgtcaaagatcggcggcaac

SEQ ID NO: 4142 - DNA, 21 bp, synthetic construct
  source 1..21: mol_type = other DNA
ttttcaaagtacggcatgaac

SEQ ID NO: 4143 - DNA, 21 bp, synthetic construct
  source 1..21: mol_type = other DNA
ttttcacgctcaaaccaaaac

SEQ ID NO: 4144 - DNA, 21 bp, synthetic construct
  source 1..21: mol_type = other DNA
gtgaggtccacgtccgggata

SEQ ID NO: 4145 - DNA, 21 bp, synthetic construct
  source 1..21: mol_type = other DNA
ttttcacgcggcaactcaaac

SEQ ID NO: 4146 - DNA, 21 bp, synthetic construct
  source 1..21: mol_type = other DNA
tttgcccgcatcggcaccaac

SEQ ID NO: 4147 - DNA, 21 bp, synthetic construct
  source 1..21: mol_type = other DNA
tactcaaagcgcggcgaaaac

SEQ ID NO: 4148 - DNA, 21 bp, synthetic construct
  source 1..21: mol_type = other DNA
tacgccaagcatggcaccaac

SEQ ID NO: 4149 - DNA, 21 bp, synthetic construct
  source 1..21: mol_type = other DNA
ttcgcgaggcagaatgcgaat

SEQ ID NO: 4150 - DNA, 21 bp, synthetic construct
  source 1..21: mol_type = other DNA
tataggaatgcggtgataggg

SEQ ID NO: 4151 - DNA, 21 bp, synthetic construct
  source 1..21: mol_type = other DNA
tactcaaagcccggcaacaac

SEQ ID NO: 4152 - DNA, 21 bp, synthetic construct
  source 1..21: mol_type = other DNA
tttgccaagtcaaactttaac

SEQ ID NO: 4153 - DNA, 21 bp, synthetic construct
  source 1..21: mol_type = other DNA
ttcgcgaggcacgggcagaat

SEQ ID NO: 4154 - DNA, 21 bp, synthetic construct
  source 1..21: mol_type = other DNA
ttcgcgagggcggggtccaat

SEQ ID NO: 4155 - DNA, 21 bp, synthetic construct
  source 1..21: mol_type = other DNA
ttcgcgagggtggggtccaat

SEQ ID NO: 4156 - DNA, 21 bp, synthetic construct
  source 1..21: mol_type = other DNA
ttctccaaaacggggcagaat

SEQ ID NO: 4157 - DNA, 21 bp, synthetic construct
  source 1..21: mol_type = other DNA
ttttcacgcaccaacatgaac

SEQ ID NO: 4158 - DNA, 21 bp, synthetic construct
  source 1..21: mol_type = other DNA
tatacgtatgggataaaagcg

SEQ ID NO: 4159 - DNA, 21 bp, synthetic construct
  source 1..21: mol_type = other DNA
tatgcgaggatgaattccaat

SEQ ID NO: 4160 - DNA, 21 bp, synthetic construct
  source 1..21: mol_type = other DNA
ttcgcgaggatgaatttgaat

SEQ ID NO: 4161 - DNA, 21 bp, synthetic construct
  source 1..21: mol_type = other DNA
atgaccggccattcactgtac

SEQ ID NO: 4162 - DNA, 21 bp, synthetic construct
  source 1..21: mol_type = other DNA
ttctccaggataaatccgaat

SEQ ID NO: 4163 - DNA, 21 bp, synthetic construct
  source 1..21: mol_type = other DNA
ttttcaaagtacaacgtaaac

SEQ ID NO: 4164 - DNA, 21 bp, synthetic construct
  source 1..21: mol_type = other DNA
tatgcgaggttgaatgggaat

SEQ ID NO: 4165 - DNA, 21 bp, synthetic construct
  source 1..21: mol_type = other DNA
ggcatcgtaaccgtacgccat

SEQ ID NO: 4166 - DNA, 21 bp, synthetic construct
  source 1..21: mol_type = other DNA
tttgccaaggccggcgccaac

SEQ ID NO: 4167 - DNA, 21 bp, synthetic construct
  source 1..21: mol_type = other DNA
tacgccaagcaaaacgacaac

SEQ ID NO: 4168 - DNA, 21 bp, synthetic construct
  source 1..21: mol_type = other DNA
ttcgcgaggcagaatcacaat

SEQ ID NO: 4169 - DNA, 21 bp, synthetic construct
  source 1..21: mol_type = other DNA
ttcgcgaggataaataataat

SEQ ID NO: 4170 - DNA, 21 bp, synthetic construct
  source 1..21: mol_type = other DNA
ttcgcgagggtggggacgaat

SEQ ID NO: 4171 - DNA, 21 bp, synthetic construct
  source 1..21: mol_type = other DNA
ttcgcgaggtatgggaataat

SEQ ID NO: 4172 - DNA, 21 bp, synthetic construct
  source 1..21: mol_type = other DNA
tatgcgaaaataaataataat

SEQ ID NO: 4173 - DNA, 21 bp, synthetic construct
  source 1..21: mol_type = other DNA
ttttcaaagcaaaacgtaaac

SEQ ID NO: 4174 - DNA, 21 bp, synthetic construct
  source 1..21: mol_type = other DNA
ttcgcgaaaaggggggagaat

SEQ ID NO: 4175 - DNA, 21 bp, synthetic construct
  source 1..21: mol_type = other DNA
tatgcgaaatataataataat

SEQ ID NO: 4176 - DNA, 21 bp, synthetic construct
  source 1..21: mol_type = other DNA
ttctccaaattcaatcacaat

SEQ ID NO: 4177 - DNA, 21 bp, synthetic construct
  source 1..21: mol_type = other DNA
tttgccaagcaaaactggaac

SEQ ID NO: 4178 - DNA, 21 bp, synthetic construct
  source 1..21: mol_type = other DNA
ttctccaaatccgggacgaat

SEQ ID NO: 4179 - DNA, 21 bp, synthetic construct
  source 1..21: mol_type = other DNA
tcacgcaccggcctgaacgcc

SEQ ID NO: 4180 - DNA, 21 bp, synthetic construct
  source 1..21: mol_type = other DNA
tattccaggttcaatgtgaat

SEQ ID NO: 4181 - DNA, 21 bp, synthetic construct
  source 1..21: mol_type = other DNA
ttttcacgccatggcctgaac

SEQ ID NO: 4182 - DNA, 21 bp, synthetic construct
  source 1..21: mol_type = other DNA
tacgcccgctcaaacggcaac

SEQ ID NO: 4183 - DNA, 21 bp, synthetic construct
  source 1..21: mol_type = other DNA
tatgcgaggataaatgcgaat

SEQ ID NO: 4184 - DNA, 21 bp, synthetic construct
  source 1..21: mol_type = other DNA
tttgcccgcctgggccaaaac

SEQ ID NO: 4185 - DNA, 21 bp, synthetic construct
  source 1..21: mol_type = other DNA
ttttcacgcggcggctcaaac

SEQ ID NO: 4186 - DNA, 21 bp, synthetic construct
  source 1..21: mol_type = other DNA
ttttcacgctacggcgtaaac

SEQ ID NO: 4187 - DNA, 21 bp, synthetic construct
  source 1..21: mol_type = other DNA
tactcaaagatcaacaagaac

SEQ ID NO: 4188 - DNA, 21 bp, synthetic construct
  source 1..21: mol_type = other DNA
tttgcccgctacggcgtaaac

SEQ ID NO: 4189 - DNA, 21 bp, synthetic construct
  source 1..21: mol_type = other DNA
tatgcgaggataaatgtgaat

SEQ ID NO: 4190 - DNA, 21 bp, synthetic construct
  source 1..21: mol_type = other DNA
tacgccaagtggaactcaaac

SEQ ID NO: 4191 - DNA, 21 bp, synthetic construct
  source 1..21: mol_type = other DNA
gtatacgaccgcaagggcacc

SEQ ID NO: 4192 - DNA, 21 bp, synthetic construct
  source 1..21: mol_type = other DNA
ttttcacgcggcaacatgaac

SEQ ID NO: 4193 - DNA, 21 bp, synthetic construct
  source 1..21: mol_type = other DNA
ttcgcgaggcagaatcagaat

SEQ ID NO: 4194 - DNA, 21 bp, synthetic construct
  source 1..21: mol_type = other DNA
ttttcaaagtacaactcaaac

SEQ ID NO: 4195 - DNA, 21 bp, synthetic construct
  source 1..21: mol_type = other DNA
tatgcgagggtgaatccgaat

SEQ ID NO: 4196 - DNA, 21 bp, synthetic construct
  source 1..21: mol_type = other DNA
tacgcccgccatggcaacaac

SEQ ID NO: 4197 - DNA, 21 bp, synthetic construct
  source 1..21: mol_type = other DNA
tactcacgctacggcggcaac

SEQ ID NO: 4198 - DNA, 21 bp, synthetic construct
  source 1..21: mol_type = other DNA
tatgcgaaaatgaataaaaat

SEQ ID NO: 4199 - DNA, 21 bp, synthetic construct
  source 1..21: mol_type = other DNA
ttttcacgcaccaactttaac

SEQ ID NO: 4200 - DNA, 21 bp, synthetic construct
  source 1..21: mol_type = other DNA
gtaggccgctggggctcagac

SEQ ID NO: 4201 - DNA, 21 bp, synthetic construct
  source 1..21: mol_type = other DNA
ttctccaaatataatgggaat

SEQ ID NO: 4202 - DNA, 21 bp, synthetic construct
  source 1..21: mol_type = other DNA
cagtatgggacggcgaaattc

SEQ ID NO: 4203 - DNA, 21 bp, synthetic construct
  source 1..21: mol_type = other DNA
ttcgcgaaatataatcacaat

SEQ ID NO: 4204 - DNA, 21 bp, synthetic construct
  source 1..21: mol_type = other DNA
tataaatccaattccaattat

SEQ ID NO: 4205 - DNA, 21 bp, synthetic construct
  source 1..21: mol_type = other DNA
tttgccaagtcaggcgaaaac

SEQ ID NO: 4206 - DNA, 21 bp, synthetic construct
  source 1..21: mol_type = other DNA
tttgccaagcatggcctgaac

SEQ ID NO: 4207 - DNA, 21 bp, synthetic construct
  source 1..21: mol_type = other DNA
tatgcgagggtgaatttgaat

SEQ ID NO: 4208 - DNA, 21 bp, synthetic construct
  source 1..21: mol_type = other DNA
tgcaagtcaggcggccaaacc

SEQ ID NO: 4209 - DNA, 21 bp, synthetic construct
  source 1..21: mol_type = other DNA
acccgcaccggcgtaatggcc

SEQ ID NO: 4210 - DNA, 21 bp, synthetic construct
  source 1..21: mol_type = other DNA
ttcgcgaggcacaatcagaat

SEQ ID NO: 4211 - DNA, 21 bp, synthetic construct
  source 1..21: mol_type = other DNA
tatgcgaggcacaatgcgaat

SEQ ID NO: 4212 - DNA, 21 bp, synthetic construct
  source 1..21: mol_type = other DNA
tattccaaattggcgacgaat

SEQ ID NO: 4213 - DNA, 21 bp, synthetic construct
  source 1..21: mol_type = other DNA
tttgcccgcggcaaccaaaac

SEQ ID NO: 4214 - DNA, 21 bp, synthetic construct
  source 1..21: mol_type = other DNA
ttctccaggggggggaataat

SEQ ID NO: 4215 - DNA, 21 bp, synthetic construct
  source 1..21: mol_type = other DNA
ttctccaaagtgggggggaat

SEQ ID NO: 4216 - DNA, 21 bp, synthetic construct
  source 1..21: mol_type = other DNA
tacgccaagatgaaccccaac

SEQ ID NO: 4217 - DNA, 21 bp, synthetic construct
  source 1..21: mol_type = other DNA
ttctccagggataataggaat

SEQ ID NO: 4218 - DNA, 21 bp, synthetic construct
  source 1..21: mol_type = other DNA
tacgcccgcgacaaccgcaac

SEQ ID NO: 4219 - DNA, 21 bp, synthetic construct
  source 1..21: mol_type = other DNA
ttcgcgaggataaatcacaat

SEQ ID NO: 4220 - DNA, 21 bp, synthetic construct
  source 1..21: mol_type = other DNA
gtaaagtacaccggctcaaac

SEQ ID NO: 4221 - DNA, 21 bp, synthetic construct
  source 1..21: mol_type = other DNA
acccaatacaacacctaccat

SEQ ID NO: 4222 - DNA, 21 bp, synthetic construct
  source 1..21: mol_type = other DNA
tatgcgaggccgggggggaat

SEQ ID NO: 4223 - DNA, 21 bp, synthetic construct
  source 1..21: mol_type = other DNA
gtacgccaactgtcagccggc

SEQ ID NO: 4224 - DNA, 21 bp, synthetic construct
  source 1..21: mol_type = other DNA
aatgtgaggaggaatggggag

SEQ ID NO: 4225 - DNA, 21 bp, synthetic construct
  source 1..21: mol_type = other DNA
ttttcacgctcaaacaacaac

SEQ ID NO: 4226 - DNA, 21 bp, synthetic construct
  source 1..21: mol_type = other DNA
ttcgcgaggcacgggcacaat

SEQ ID NO: 4227 - DNA, 21 bp, synthetic construct
  source 1..21: mol_type = other DNA
ttctccaaatatggggtgaat

SEQ ID NO: 4228 - DNA, 21 bp, synthetic construct
  source 1..21: mol_type = other DNA
ttttcaaagcatggcgccaac

SEQ ID NO: 4229 - DNA, 21 bp, synthetic construct
  source 1..21: mol_type = other DNA
tacgccaagtggaacaccaac

SEQ ID NO: 4230 - DNA, 21 bp, synthetic construct
  source 1..21: mol_type = other DNA
ttcgcgaaagcgaatcacaat

SEQ ID NO: 4231 - DNA, 21 bp, synthetic construct
  source 1..21: mol_type = other DNA
tttgcccgcctgaactcaaac

SEQ ID NO: 4232 - DNA, 21 bp, synthetic construct
  source 1..21: mol_type = other DNA
tatgcgaaatgggggtccaat

SEQ ID NO: 4233 - DNA, 21 bp, synthetic construct
  source 1..21: mol_type = other DNA
ttctccaaacacaatccgaat

SEQ ID NO: 4234 - DNA, 21 bp, synthetic construct
  source 1..21: mol_type = other DNA
atgcataagctgcaagtagcc

SEQ ID NO: 4235 - DNA, 21 bp, synthetic construct
  source 1..21: mol_type = other DNA
ttctccaaaggggggcacaat

SEQ ID NO: 4236 - DNA, 21 bp, synthetic construct
  source 1..21: mol_type = other DNA
ttttcacgctttaacgccaac

SEQ ID NO: 4237 - DNA, 21 bp, synthetic construct
  source 1..21: mol_type = other DNA
atcccctcaaagtcagccggc

SEQ ID NO: 4238 - DNA, 21 bp, synthetic construct
  source 1..21: mol_type = other DNA
tatgcgaaatggaataataat

SEQ ID NO: 4239 - DNA, 21 bp, synthetic construct
  source 1..21: mol_type = other DNA
gtatcagcctcaaccaagtgg

SEQ ID NO: 4240 - DNA, 21 bp, synthetic construct
  source 1..21: mol_type = other DNA
tactcacgcgaaggcaacaac

SEQ ID NO: 4241 - DNA, 21 bp, synthetic construct
  source 1..21: mol_type = other DNA
ttcgcgaggcagaatttcaat

SEQ ID NO: 4242 - DNA, 21 bp, synthetic construct
  source 1..21: mol_type = other DNA
ttcgcgaaacagaatatgaat

SEQ ID NO: 4243 - DNA, 21 bp, synthetic construct
  source 1..21: mol_type = other DNA
agggcgtccggggtgtcctat

SEQ ID NO: 4244 - DNA, 21 bp, synthetic construct
  source 1..21: mol_type = other DNA
ttttcaaagggcggctggaac

SEQ ID NO: 4245 - DNA, 21 bp, synthetic construct
  source 1..21: mol_type = other DNA
acgaggcacggggggtccccg

SEQ ID NO: 4246 - DNA, 21 bp, synthetic construct
  source 1..21: mol_type = other DNA
cgcgaccgccaatcaacctac

SEQ ID NO: 4247 - DNA, 21 bp, synthetic construct
  source 1..21: mol_type = other DNA
tacgcccgcgtaaacgtaaac

SEQ ID NO: 4248 - DNA, 21 bp, synthetic construct
  source 1..21: mol_type = other DNA
atgaatgcgaaatcccactat

SEQ ID NO: 4249 - DNA, 21 bp, synthetic construct
  source 1..21: mol_type = other DNA
ttctccaaaataaataataat

SEQ ID NO: 4250 - DNA, 21 bp, synthetic construct
  source 1..21: mol_type = other DNA
ttttcaaagaacggctacaac

SEQ ID NO: 4251 - DNA, 21 bp, synthetic construct
  source 1..21: mol_type = other DNA
tttgccaaggccaactttaac

SEQ ID NO: 4252 - DNA, 21 bp, synthetic construct
  source 1..21: mol_type = other DNA
catgccggcgaccgctggatc

SEQ ID NO: 4253 - DNA, 21 bp, synthetic construct
  source 1..21: mol_type = other DNA
ttctccaggatagggtataat

SEQ ID NO: 4254 - DNA, 21 bp, synthetic construct
  source 1..21: mol_type = other DNA
tttgccaagtacaacgccaac

SEQ ID NO: 4255 - DNA, 21 bp, synthetic construct
  source 1..21: mol_type = other DNA
ttttcacgcatcaaccaaaac

SEQ ID NO: 4256 - DNA, 21 bp, synthetic construct
  source 1..21: mol_type = other DNA
tatgcgagggtgaatgcgaat

SEQ ID NO: 4257 - DNA, 21 bp, synthetic construct
  source 1..21: mol_type = other DNA
tactcacgccccggctttaac

SEQ ID NO: 4258 - DNA, 21 bp, synthetic construct
  source 1..21: mol_type = other DNA
tccagggggtccgggtatgcg

SEQ ID NO: 4259 - DNA, 21 bp, synthetic construct
  source 1..21: mol_type = other DNA
aacctgcgcggcaacggcggc

SEQ ID NO: 4260 - DNA, 21 bp, synthetic construct
  source 1..21: mol_type = other DNA
ttcgcgaaatatggggcgaat

SEQ ID NO: 4261 - DNA, 21 bp, synthetic construct
  source 1..21: mol_type = other DNA
ttttcaaagtttaacatgaac

SEQ ID NO: 4262 - DNA, 21 bp, synthetic construct
  source 1..21: mol_type = other DNA
ttttcacgccatggcgtaaac

SEQ ID NO: 4263 - DNA, 21 bp, synthetic construct
  source 1..21: mol_type = other DNA
ttttcaaagaccaactttaac

SEQ ID NO: 4264 - DNA, 21 bp, synthetic construct
  source 1..21: mol_type = other DNA
tattccaaatataatccgaat

SEQ ID NO: 4265 - DNA, 21 bp, synthetic construct
  source 1..21: mol_type = other DNA
ttttcaaagctgggcaccaac

SEQ ID NO: 4266 - DNA, 21 bp, synthetic construct
  source 1..21: mol_type = other DNA
ttcgcgaggataaatacgaat

SEQ ID NO: 4267 - DNA, 21 bp, synthetic construct
  source 1..21: mol_type = other DNA
tacgcccgccataacgtaaac

SEQ ID NO: 4268 - DNA, 21 bp, synthetic construct
  source 1..21: mol_type = other DNA
ttttcacgcggcggcatgaac

SEQ ID NO: 4269 - DNA, 21 bp, synthetic construct
  source 1..21: mol_type = other DNA
tacgtacgcaacatcgcctca

SEQ ID NO: 4270 - DNA, 21 bp, synthetic construct
  source 1..21: mol_type = other DNA
acgaggtccggggcgtcctcc

SEQ ID NO: 4271 - DNA, 21 bp, synthetic construct
  source 1..21: mol_type = other DNA
tttgcccgccaaaacctgaac

SEQ ID NO: 4272 - DNA, 21 bp, synthetic construct
  source 1..21: mol_type = other DNA
ttttcaaagtcaaacatgaac

SEQ ID NO: 4273 - DNA, 21 bp, synthetic construct
  source 1..21: mol_type = other DNA
tcaggctcacccaccaagtgg

SEQ ID NO: 4274 - DNA, 21 bp, synthetic construct
  source 1..21: mol_type = other DNA
tttgcccgcctgggcgccaac

SEQ ID NO: 4275 - DNA, 21 bp, synthetic construct
  source 1..21: mol_type = other DNA
aactcatcaggcgcccgctac

SEQ ID NO: 4276 - DNA, 21 bp, synthetic construct
  source 1..21: mol_type = other DNA
ttttcaaagatcaaccataac

SEQ ID NO: 4277 - DNA, 21 bp, synthetic construct
  source 1..21: mol_type = other DNA
tttgcccgctcaaacaacaac

SEQ ID NO: 4278 - DNA, 21 bp, synthetic construct
  source 1..21: mol_type = other DNA
ttttcaaagatgggcatcaac

SEQ ID NO: 4279 - DNA, 21 bp, synthetic construct
  source 1..21: mol_type = other DNA
ttctccaaattcaattccaat

SEQ ID NO: 4280 - DNA, 21 bp, synthetic construct
  source 1..21: mol_type = other DNA
tatatgagggggtccttgaat

SEQ ID NO: 4281 - DNA, 21 bp, synthetic construct
  source 1..21: mol_type = other DNA
ttctccaaacacaattccaat

SEQ ID NO: 4282 - DNA, 21 bp, synthetic construct
  source 1..21: mol_type = other DNA
tatgcgaggttcaatgcgaat

SEQ ID NO: 4283 - DNA, 21 bp, synthetic construct
  source 1..21: mol_type = other DNA
tattccagggtgtccgggttg

SEQ ID NO: 4284 - DNA, 21 bp, synthetic construct
  source 1..21: mol_type = other DNA
ttttcacgcggcggccataac

SEQ ID NO: 4285 - DNA, 21 bp, synthetic construct
  source 1..21: mol_type = other DNA
ttcgcgaaatatgggatgaat

SEQ ID NO: 4286 - DNA, 21 bp, synthetic construct
  source 1..21: mol_type = other DNA
ttcgcgaaacacggggtgaat

SEQ ID NO: 4287 - DNA, 21 bp, synthetic construct
  source 1..21: mol_type = other DNA
ttcaggatggggggggcgggg

SEQ ID NO: 4288 - DNA, 21 bp, synthetic construct
  source 1..21: mol_type = other DNA
caggcgttgtccgggaaaaat

SEQ ID NO: 4289 - DNA, 21 bp, synthetic construct
  source 1..21: mol_type = other DNA
atatccaatgcggtgaaatat

SEQ ID NO: 4290 - DNA, 21 bp, synthetic construct
  source 1..21: mol_type = other DNA
tttgccaagtacggcaccaac

SEQ ID NO: 4291 - DNA, 21 bp, synthetic construct
  source 1..21: mol_type = other DNA
tttgcccgcaacaaccataac

SEQ ID NO: 4292 - DNA, 21 bp, synthetic construct
  source 1..21: mol_type = other DNA
ttttcacgcgccaacggcaac

SEQ ID NO: 4293 - DNA, 21 bp, synthetic construct
  source 1..21: mol_type = other DNA
acgaaagggatgtcctcctat

SEQ ID NO: 4294 - DNA, 21 bp, synthetic construct
  source 1..21: mol_type = other DNA
tacgccaagcataaccataac

SEQ ID NO: 4295 - DNA, 21 bp, synthetic construct
  source 1..21: mol_type = other DNA
tttgccaagcaaggcaccaac

SEQ ID NO: 4296 - DNA, 21 bp, synthetic construct
  source 1..21: mol_type = other DNA
ttcgcgaggatggggcagaat

SEQ ID NO: 4297 - DNA, 21 bp, synthetic construct
  source 1..21: mol_type = other DNA
ttgccgaaagggaattatggg

SEQ ID NO: 4298 - DNA, 21 bp, synthetic construct
  source 1..21: mol_type = other DNA
ttttcaaagtacggcgccaac

SEQ ID NO: 4299 - DNA, 21 bp, synthetic construct
  source 1..21: mol_type = other DNA
tacgtaaagtcagccatgtca

SEQ ID NO: 4300 - DNA, 21 bp, synthetic construct
  source 1..21: mol_type = other DNA
tttgccaagcatggcaacaac

SEQ ID NO: 4301 - DNA, 21 bp, synthetic construct
  source 1..21: mol_type = other DNA
acctcaaccggccgcatggcc

SEQ ID NO: 4302 - DNA, 21 bp, synthetic construct
  source 1..21: mol_type = other DNA
tacgcccgccccaacctgaac

SEQ ID NO: 4303 - DNA, 21 bp, synthetic construct
  source 1..21: mol_type = other DNA
ttggcgagggtggcgaaagat

SEQ ID NO: 4304 - DNA, 21 bp, synthetic construct
  source 1..21: mol_type = other DNA
tttgccaagtggaaccaaaac

SEQ ID NO: 4305 - DNA, 21 bp, synthetic construct
  source 1..21: mol_type = other DNA
ttttcaaagtacaacatgaac

SEQ ID NO: 4306 - DNA, 21 bp, synthetic construct
  source 1..21: mol_type = other DNA
tttgcccgcgccaacatcaac

SEQ ID NO: 4307 - DNA, 21 bp, synthetic construct
  source 1..21: mol_type = other DNA
ttgccgaggtccgggaatgtg

SEQ ID NO: 4308 - DNA, 21 bp, synthetic construct
  source 1..21: mol_type = other DNA
ttcgcgagggtgaatcacaat

SEQ ID NO: 4309 - DNA, 21 bp, synthetic construct
  source 1..21: mol_type = other DNA
tacgtacgcaacggccaaggc

SEQ ID NO: 4310 - DNA, 21 bp, synthetic construct
  source 1..21: mol_type = other DNA
ttttcacgccataacgccaac

SEQ ID NO: 4311 - DNA, 21 bp, synthetic construct
  source 1..21: mol_type = other DNA
ttttcacgctttggcggcaac

SEQ ID NO: 4312 - DNA, 21 bp, synthetic construct
  source 1..21: mol_type = other DNA
ttcgcgaggaataatgcgaat

SEQ ID NO: 4313 - DNA, 21 bp, synthetic construct
  source 1..21: mol_type = other DNA
aggaatgggacgaatgggtat

SEQ ID NO: 4314 - DNA, 21 bp, synthetic construct
  source 1..21: mol_type = other DNA
ttctccaaacacggggtgaat

SEQ ID NO: 4315 - DNA, 21 bp, synthetic construct
  source 1..21: mol_type = other DNA
tttgcccgcctgaacggcaac

SEQ ID NO: 4316 - DNA, 21 bp, synthetic construct
  source 1..21: mol_type = other DNA
ttcgcgaaatatgggcacaat

SEQ ID NO: 4317 - DNA, 21 bp, synthetic construct
  source 1..21: mol_type = other DNA
accaagtacggccataccgcc

SEQ ID NO: 4318 - DNA, 21 bp, synthetic construct
  source 1..21: mol_type = other DNA
ttcgcgaaaaggggggataat

SEQ ID NO: 4319 - DNA, 21 bp, synthetic construct
  source 1..21: mol_type = other DNA
cgctcacataacaccgtagta

SEQ ID NO: 4320 - DNA, 21 bp, synthetic construct
  source 1..21: mol_type = other DNA
ttcgcgaaaatgaataataat

SEQ ID NO: 4321 - DNA, 21 bp, synthetic construct
  source 1..21: mol_type = other DNA
tacgcccgcctgggcggcaac

SEQ ID NO: 4322 - DNA, 21 bp, synthetic construct
  source 1..21: mol_type = other DNA
ataataatggtgaaaaatgcg

SEQ ID NO: 4323 - DNA, 21 bp, synthetic construct
  source 1..21: mol_type = other DNA
tacgcccgccataaccaaaac

SEQ ID NO: 4324 - DNA, 21 bp, synthetic construct
  source 1..21: mol_type = other DNA
ctgcatacccgcacctacgac

SEQ ID NO: 4325 - DNA, 21 bp, synthetic construct
  source 1..21: mol_type = other DNA
tttgccaagcatggcgccaac

SEQ ID NO: 4326 - DNA, 21 bp, synthetic construct
  source 1..21: mol_type = other DNA
tataaaccgttcacgacgaat

SEQ ID NO: 4327 - DNA, 21 bp, synthetic construct
  source 1..21: mol_type = other DNA
ttttcacgcatgggccaaaac

SEQ ID NO: 4328 - DNA, 21 bp, synthetic construct
  source 1..21: mol_type = other DNA
tacgccaagtacaacaccaac

SEQ ID NO: 4329 - DNA, 21 bp, synthetic construct
  source 1..21: mol_type = other DNA
ttttcaaagcaaggcatcaac

SEQ ID NO: 4330 - DNA, 21 bp, synthetic construct
  source 1..21: mol_type = other DNA
tatgcgaaatggaatcagaat

SEQ ID NO: 4331 - DNA, 21 bp, synthetic construct
  source 1..21: mol_type = other DNA
ttttcacgccccggctacaac

SEQ ID NO: 4332 - DNA, 21 bp, synthetic construct
  source 1..21: mol_type = other DNA
ttttcacgcggcaactttaac

SEQ ID NO: 4333 - DNA, 21 bp, synthetic construct
  source 1..21: mol_type = other DNA
gtaaacatggcccgcgccctg

SEQ ID NO: 4334 - DNA, 21 bp, synthetic construct
  source 1..21: mol_type = other DNA
ttttcacgctcaggcggcaac

SEQ ID NO: 4335 - DNA, 21 bp, synthetic construct
  source 1..21: mol_type = other DNA
accggcgccggcatgaagtac

SEQ ID NO: 4336 - DNA, 21 bp, synthetic construct
  source 1..21: mol_type = other DNA
ttcgcgaggcacaattccaat

SEQ ID NO: 4337 - DNA, 21 bp, synthetic construct
  source 1..21: mol_type = other DNA
ttcgcgaggccgaatataaat

SEQ ID NO: 4338 - DNA, 21 bp, synthetic construct
  source 1..21: mol_type = other DNA
ttcgcgaaaccgaataataat

SEQ ID NO: 4339 - DNA, 21 bp, synthetic construct
  source 1..21: mol_type = other DNA
cgccaaatggacacctacggc

SEQ ID NO: 4340 - DNA, 21 bp, synthetic construct
  source 1..21: mol_type = other DNA
accgcccgcggcgtatcagcc

SEQ ID NO: 4341 - DNA, 21 bp, synthetic construct
  source 1..21: mol_type = other DNA
tttgtacgcaccatcaacaac

SEQ ID NO: 4342 - DNA, 21 bp, synthetic construct
  source 1..21: mol_type = other DNA
ttcgcgaggataggggggaat

SEQ ID NO: 4343 - DNA, 21 bp, synthetic construct
  source 1..21: mol_type = other DNA
ttttcaaagcaaggcgtaaac

SEQ ID NO: 4344 - DNA, 21 bp, synthetic construct
  source 1..21: mol_type = other DNA
tttgcccgcgccaactttaac

SEQ ID NO: 4345 - DNA, 21 bp, synthetic construct
  source 1..21: mol_type = other DNA
agggcgaatcactccgggggg

SEQ ID NO: 4346 - DNA, 21 bp, synthetic construct
  source 1..21: mol_type = other DNA
tttgcccgcggcaacgacaac

SEQ ID NO: 4347 - DNA, 21 bp, synthetic construct
  source 1..21: mol_type = other DNA
tttgcccgctacggcgccaac

SEQ ID NO: 4348 - DNA, 21 bp, synthetic construct
  source 1..21: mol_type = other DNA
tacgccaagtggaacggcaac

SEQ ID NO: 4349 - DNA, 21 bp, synthetic construct
  source 1..21: mol_type = other DNA
tttgcccgcctgaaccataac

SEQ ID NO: 4350 - DNA, 21 bp, synthetic construct
  source 1..21: mol_type = other DNA
tttgcccgcctgggcctgaac

SEQ ID NO: 4351 - DNA, 21 bp, synthetic construct
  source 1..21: mol_type = other DNA
tacgccaagtggggcgccaac

SEQ ID NO: 4352 - DNA, 21 bp, synthetic construct
  source 1..21: mol_type = other DNA
ttctccaggcacgggcagaat

SEQ ID NO: 4353 - DNA, 21 bp, synthetic construct
  source 1..21: mol_type = other DNA
ttctccaggcacggggcgaat

SEQ ID NO: 4354 - DNA, 21 bp, synthetic construct
  source 1..21: mol_type = other DNA
tactcacgcgaaaaccgcaac

SEQ ID NO: 4355 - DNA, 21 bp, synthetic construct
  source 1..21: mol_type = other DNA
ttcgcgaaacagggggcgaat

SEQ ID NO: 4356 - DNA, 21 bp, synthetic construct
  source 1..21: mol_type = other DNA
ttctccaaaaggggggagaat

SEQ ID NO: 4357 - DNA, 21 bp, synthetic construct
  source 1..21: mol_type = other DNA
tatgcgagggagggggcgaat

SEQ ID NO: 4358 - DNA, 21 bp, synthetic construct
  source 1..21: mol_type = other DNA
ttctccaaattcaatgcgaat

SEQ ID NO: 4359 - DNA, 21 bp, synthetic construct
  source 1..21: mol_type = other DNA
ttcgcgaggaaaggggagaat

SEQ ID NO: 4360 - DNA, 21 bp, synthetic construct
  source 1..21: mol_type = other DNA
aacgtaccctcatcaatgtac

SEQ ID NO: 4361 - DNA, 21 bp, synthetic construct
  source 1..21: mol_type = other DNA
ggcctgaagtacaccccccat

SEQ ID NO: 4362 - DNA, 21 bp, synthetic construct
  source 1..21: mol_type = other DNA
ttctccaggcagggggggaat

SEQ ID NO: 4363 - DNA, 21 bp, synthetic construct
  source 1..21: mol_type = other DNA
ttttcaaagtacggcctgaac

SEQ ID NO: 4364 - DNA, 21 bp, synthetic construct
  source 1..21: mol_type = other DNA
ttttcacgccatggcatgaac

SEQ ID NO: 4365 - DNA, 21 bp, synthetic construct
  source 1..21: mol_type = other DNA
ttcgcgaggttgggggggaat

SEQ ID NO: 4366 - DNA, 21 bp, synthetic construct
  source 1..21: mol_type = other DNA
ttcgcgaaatatgggtccaat

SEQ ID NO: 4367 - DNA, 21 bp, synthetic construct
  source 1..21: mol_type = other DNA
tggtccaaattgaatgcgata

SEQ ID NO: 4368 - DNA, 21 bp, synthetic construct
  source 1..21: mol_type = other DNA
ttttcaaagaacggcatgaac

SEQ ID NO: 4369 - DNA, 21 bp, synthetic construct
  source 1..21: mol_type = other DNA
ttcgcgaggataaatgcgaat

SEQ ID NO: 4370 - DNA, 21 bp, synthetic construct
  source 1..21: mol_type = other DNA
tcaggcaacggctacgtacgc

SEQ ID NO: 4371 - DNA, 21 bp, synthetic construct
  source 1..21: mol_type = other DNA
tttgccaagtacggcatcaac

SEQ ID NO: 4372 - DNA, 21 bp, synthetic construct
  source 1..21: mol_type = other DNA
ttcgcgaggatgaatatgaat

SEQ ID NO: 4373 - DNA, 21 bp, synthetic construct
  source 1..21: mol_type = other DNA
ttcgcgaggaaaggggataat

SEQ ID NO: 4374 - DNA, 21 bp, synthetic construct
  source 1..21: mol_type = other DNA
cgcaactcatcatcaacctac

SEQ ID NO: 4375 - DNA, 21 bp, synthetic construct
  source 1..21: mol_type = other DNA
tattccaaatatggggggaat

SEQ ID NO: 4376 - DNA, 21 bp, synthetic construct
  source 1..21: mol_type = other DNA
ttcgcgaggataaattccaat

SEQ ID NO: 4377 - DNA, 21 bp, synthetic construct
  source 1..21: mol_type = other DNA
ttctccaaatataatacgaat

SEQ ID NO: 4378 - DNA, 21 bp, synthetic construct
  source 1..21: mol_type = other DNA
tacgccaagtacaactcaaac

SEQ ID NO: 4379 - DNA, 21 bp, synthetic construct
  source 1..21: mol_type = other DNA
aggagggcggattccgggggg

SEQ ID NO: 4380 - DNA, 21 bp, synthetic construct
  source 1..21: mol_type = other DNA
ttcgcgaggcagaattccaat

SEQ ID NO: 4381 - DNA, 21 bp, synthetic construct
  source 1..21: mol_type = other DNA
tactcaaagggcggcggcaac

SEQ ID NO: 4382 - DNA, 21 bp, synthetic construct
  source 1..21: mol_type = other DNA
tacgcccgcgacggctttaac

SEQ ID NO: 4383 - DNA, 21 bp, synthetic construct
  source 1..21: mol_type = other DNA
ttcgcgaggccggggaataat

SEQ ID NO: 4384 - DNA, 21 bp, synthetic construct
  source 1..21: mol_type = other DNA
tacgcccgcatcaaccataac

SEQ ID NO: 4385 - DNA, 21 bp, synthetic construct
  source 1..21: mol_type = other DNA
tttgcccgcgaaggcaagaac

SEQ ID NO: 4386 - DNA, 21 bp, synthetic construct
  source 1..21: mol_type = other DNA
ttcaggaatgggacgggggcg

SEQ ID NO: 4387 - DNA, 21 bp, synthetic construct
  source 1..21: mol_type = other DNA
agggggtccaatttgtatccg

SEQ ID NO: 4388 - DNA, 21 bp, synthetic construct
  source 1..21: mol_type = other DNA
tatgcgagggtgaatacgaat

SEQ ID NO: 4389 - DNA, 21 bp, synthetic construct
  source 1..21: mol_type = other DNA
gggaatcagacgtccaggaat

SEQ ID NO: 4390 - DNA, 21 bp, synthetic construct
  source 1..21: mol_type = other DNA
ttttcacgcggcaaccaaaac

SEQ ID NO: 4391 - DNA, 21 bp, synthetic construct
  source 1..21: mol_type = other DNA
tactcaaagcccggcgccaac

SEQ ID NO: 4392 - DNA, 21 bp, synthetic construct
  source 1..21: mol_type = other DNA
ttttcaaagtacggccaaaac

SEQ ID NO: 4393 - DNA, 21 bp, synthetic construct
  source 1..21: mol_type = other DNA
tactcaaagcccggcatcaac

SEQ ID NO: 4394 - DNA, 21 bp, synthetic construct
  source 1..21: mol_type = other DNA
tacgccaagcccaaccataac

SEQ ID NO: 4395 - DNA, 21 bp, synthetic construct
  source 1..21: mol_type = other DNA
acccgcacccatgacaagctg

SEQ ID NO: 4396 - DNA, 21 bp, synthetic construct
  source 1..21: mol_type = other DNA
tttgcccgccgcaacgaaaac

SEQ ID NO: 4397 - DNA, 21 bp, synthetic construct
  source 1..21: mol_type = other DNA
ttctccaggaggaatgagaat

SEQ ID NO: 4398 - DNA, 21 bp, synthetic construct
  source 1..21: mol_type = other DNA
tattccaggtatgggaataat

SEQ ID NO: 4399 - DNA, 21 bp, synthetic construct
  source 1..21: mol_type = other DNA
ttcgcgaaagcgaattggaat

SEQ ID NO: 4400 - DNA, 21 bp, synthetic construct
  source 1..21: mol_type = other DNA
tatgcgaaaataaataaaaat

SEQ ID NO: 4401 - DNA, 21 bp, synthetic construct
  source 1..21: mol_type = other DNA
tattccaaaatagggaaaaat

SEQ ID NO: 4402 - DNA, 21 bp, synthetic construct
  source 1..21: mol_type = other DNA
tacgccaagtggggcggcaac

SEQ ID NO: 4403 - DNA, 21 bp, synthetic construct
  source 1..21: mol_type = other DNA
tattccaaatgggggaataat

SEQ ID NO: 4404 - DNA, 21 bp, synthetic construct
  source 1..21: mol_type = other DNA
tacgccaagtacaacgccaac

SEQ ID NO: 4405 - DNA, 21 bp, synthetic construct
  source 1..21: mol_type = other DNA
aagtcaggcctgtcatcatac

SEQ ID NO: 4406 - DNA, 21 bp, synthetic construct
  source 1..21: mol_type = other DNA
tttgcccgcatgaaccaaaac

SEQ ID NO: 4407 - DNA, 21 bp, synthetic construct
  source 1..21: mol_type = other DNA
tttgccaagaacggctcaaac

SEQ ID NO: 4408 - DNA, 21 bp, synthetic construct
  source 1..21: mol_type = other DNA
atccccaccatgaagtacgcc

SEQ ID NO: 4409 - DNA, 21 bp, synthetic construct
  source 1..21: mol_type = other DNA
tccaggacggggagggaggcg

SEQ ID NO: 4410 - DNA, 21 bp, synthetic construct
  source 1..21: mol_type = other DNA
ttcgcgaggaataatgtgaat

SEQ ID NO: 4411 - DNA, 21 bp, synthetic construct
  source 1..21: mol_type = other DNA
tacgcccgccaaaacgccatg

SEQ ID NO: 4412 - DNA, 21 bp, synthetic construct
  source 1..21: mol_type = other DNA
tattccaaattcaatgggaat

SEQ ID NO: 4413 - DNA, 21 bp, synthetic construct
  source 1..21: mol_type = other DNA
atctcaggctacggcggcggc

SEQ ID NO: 4414 - DNA, 21 bp, synthetic construct
  source 1..21: mol_type = other DNA
ttcgcgaaattcaatccgaat

SEQ ID NO: 4415 - DNA, 21 bp, synthetic construct
  source 1..21: mol_type = other DNA
aaatccgagtatgggccgttc

SEQ ID NO: 4416 - DNA, 21 bp, synthetic construct
  source 1..21: mol_type = other DNA
tacgcccgcgccaacggcaac

SEQ ID NO: 4417 - DNA, 21 bp, synthetic construct
  source 1..21: mol_type = other DNA
ctgtcatactcaggccgcgac

SEQ ID NO: 4418 - DNA, 21 bp, synthetic construct
  source 1..21: mol_type = other DNA
tattccaggccgaatcagaat

SEQ ID NO: 4419 - DNA, 21 bp, synthetic construct
  source 1..21: mol_type = other DNA
tattattccaatacgaaagtg

SEQ ID NO: 4420 - DNA, 21 bp, synthetic construct
  source 1..21: mol_type = other DNA
ttcgcgaaatccaattggaat

SEQ ID NO: 4421 - DNA, 21 bp, synthetic construct
  source 1..21: mol_type = other DNA
tttgcccgctcaaaccccaac

SEQ ID NO: 4422 - DNA, 21 bp, synthetic construct
  source 1..21: mol_type = other DNA
tactcacgctcaaacatccaa

SEQ ID NO: 4423 - DNA, 21 bp, synthetic construct
  source 1..21: mol_type = other DNA
gagataaggacggggcacttg

SEQ ID NO: 4424 - DNA, 21 bp, synthetic construct
  source 1..21: mol_type = other DNA
gaaaagggcatgggccgcctg

SEQ ID NO: 4425 - DNA, 21 bp, synthetic construct
  source 1..21: mol_type = other DNA
ttgtccagggcggcggggata

SEQ ID NO: 4426 - DNA, 21 bp, synthetic construct
  source 1..21: mol_type = other DNA
gtagacaagaagtactacgcc

SEQ ID NO: 4427 - DNA, 21 bp, synthetic construct
  source 1..21: mol_type = other DNA
cgcaacctgcccatgctgaac

SEQ ID NO: 4428 - DNA, 21 bp, synthetic construct
  source 1..21: mol_type = other DNA
tatgcgaaaccggggcagaat

SEQ ID NO: 4429 - DNA, 21 bp, synthetic construct
  source 1..21: mol_type = other DNA
ttcgcgagggcgaatacgaat

SEQ ID NO: 4430 - DNA, 21 bp, synthetic construct
  source 1..21: mol_type = other DNA
ttgaggaatgggttctccccg

SEQ ID NO: 4431 - DNA, 21 bp, synthetic construct
  source 1..21: mol_type = other DNA
ttcgcgaggaataatacgaat

SEQ ID NO: 4432 - DNA, 21 bp, synthetic construct
  source 1..21: mol_type = other DNA
ctggccggcacctcacgcttt

SEQ ID NO: 4433 - DNA, 21 bp, synthetic construct
  source 1..21: mol_type = other DNA
tttgcccgcatcaacgtaaac

SEQ ID NO: 4434 - DNA, 21 bp, synthetic construct
  source 1..21: mol_type = other DNA
gtgttggggaggggggtgaat

SEQ ID NO: 4435 - DNA, 21 bp, synthetic construct
  source 1..21: mol_type = other DNA
ctgcgcggcgacggctacggc

SEQ ID NO: 4436 - DNA, 21 bp, synthetic construct
  source 1..21: mol_type = other DNA
ttcgcgagggcgaatatgaat

SEQ ID NO: 4437 - DNA, 21 bp, synthetic construct
  source 1..21: mol_type = other DNA
ttctccaggcacggggggaat

SEQ ID NO: 4438 - DNA, 21 bp, synthetic construct
  source 1..21: mol_type = other DNA
aggggggagtggtcctccccg

SEQ ID NO: 4439 - DNA, 21 bp, synthetic construct
  source 1..21: mol_type = other DNA
ttctccaaagcgaatgagaat

SEQ ID NO: 4440 - DNA, 21 bp, synthetic construct
  source 1..21: mol_type = other DNA
caacccatgcgcggcggcggc

SEQ ID NO: 4441 - DNA, 21 bp, synthetic construct
  source 1..21: mol_type = other DNA
tatgggccgcagccgaaattg

SEQ ID NO: 4442 - DNA, 21 bp, synthetic construct
  source 1..21: mol_type = other DNA
ttttcacgccatggcaccaac

SEQ ID NO: 4443 - DNA, 21 bp, synthetic construct
  source 1..21: mol_type = other DNA
tactcaaaggacggctggaac

SEQ ID NO: 4444 - DNA, 21 bp, synthetic construct
  source 1..21: mol_type = other DNA
tactcaaagtacggctttaac

SEQ ID NO: 4445 - DNA, 21 bp, synthetic construct
  source 1..21: mol_type = other DNA
tttgccaagtacaactcaaac

SEQ ID NO: 4446 - DNA, 21 bp, synthetic construct
  source 1..21: mol_type = other DNA
tttgccaagtacaacatgaac

SEQ ID NO: 4447 - DNA, 21 bp, synthetic construct
  source 1..21: mol_type = other DNA
gatgtgaggttgagggggcag

SEQ ID NO: 4448 - DNA, 21 bp, synthetic construct
  source 1..21: mol_type = other DNA
ttctccaaatatgggtccaat

SEQ ID NO: 4449 - DNA, 21 bp, synthetic construct
  source 1..21: mol_type = other DNA
tggttgaaatccacgccgaat

SEQ ID NO: 4450 - DNA, 21 bp, synthetic construct
  source 1..21: mol_type = other DNA
aatatgttcgggtccgggatg

SEQ ID NO: 4451 - DNA, 21 bp, synthetic construct
  source 1..21: mol_type = other DNA
aatcacgggtatatgagggat

SEQ ID NO: 4452 - DNA, 21 bp, synthetic construct
  source 1..21: mol_type = other DNA
tttgccaagtacaacctgaac

SEQ ID NO: 4453 - DNA, 21 bp, synthetic construct
  source 1..21: mol_type = other DNA
tacgccaagaagaacgacaac

SEQ ID NO: 4454 - DNA, 21 bp, synthetic construct
  source 1..21: mol_type = other DNA
tatgcgaaatataatcagaat

SEQ ID NO: 4455 - DNA, 21 bp, synthetic construct
  source 1..21: mol_type = other DNA
ttttcacgcgccaaccccaac

SEQ ID NO: 4456 - DNA, 21 bp, synthetic construct
  source 1..21: mol_type = other DNA
cgcggctcaaactcaatgccc

SEQ ID NO: 4457 - DNA, 21 bp, synthetic construct
  source 1..21: mol_type = other DNA
tacaaggtatcatcaacctac

SEQ ID NO: 4458 - DNA, 21 bp, synthetic construct
  source 1..21: mol_type = other DNA
aactcatcatcaggcccccgc

SEQ ID NO: 4459 - DNA, 21 bp, synthetic construct
  source 1..21: mol_type = other DNA
tttgcccgcatgaacgtaaac

SEQ ID NO: 4460 - DNA, 21 bp, synthetic construct
  source 1..21: mol_type = other DNA
ttgtccaggtccgggacggat

SEQ ID NO: 4461 - DNA, 21 bp, synthetic construct
  source 1..21: mol_type = other DNA
tttgcccgctacaacgccaac

SEQ ID NO: 4462 - DNA, 21 bp, synthetic construct
  source 1..21: mol_type = other DNA
tatgcgaaattcaatcagaat

SEQ ID NO: 4463 - DNA, 21 bp, synthetic construct
  source 1..21: mol_type = other DNA
atgaaaaatgggggggcggcg

SEQ ID NO: 4464 - DNA, 21 bp, synthetic construct
  source 1..21: mol_type = other DNA
atggattatgggtggtccgat

SEQ ID NO: 4465 - DNA, 21 bp, synthetic construct
  source 1..21: mol_type = other DNA
ttttcacgcggcggcaccaac

SEQ ID NO: 4466 - DNA, 21 bp, synthetic construct
  source 1..21: mol_type = other DNA
ttcgcgaggcacggggggaat

SEQ ID NO: 4467 - DNA, 21 bp, synthetic construct
  source 1..21: mol_type = other DNA
ttcgcgaggataggggataat

SEQ ID NO: 4468 - DNA, 21 bp, synthetic construct
  source 1..21: mol_type = other DNA
tattccgcggggaaaataaat

SEQ ID NO: 4469 - DNA, 21 bp, synthetic construct
  source 1..21: mol_type = other DNA
tatgcgaggttcaatacgaat

SEQ ID NO: 4470 - DNA, 21 bp, synthetic construct
  source 1..21: mol_type = other DNA
tacgcccgctacaacaccaac

SEQ ID NO: 4471 - DNA, 21 bp, synthetic construct
  source 1..21: mol_type = other DNA
ttctccaggccggggcacaat

SEQ ID NO: 4472 - DNA, 21 bp, synthetic construct
  source 1..21: mol_type = other DNA
tcctatgcggtgtccagggat

SEQ ID NO: 4473 - DNA, 21 bp, synthetic construct
  source 1..21: mol_type = other DNA
tacgcccgctacaacaacaac

SEQ ID NO: 4474 - DNA, 21 bp, synthetic construct
  source 1..21: mol_type = other DNA
tattccaggttcaatgggaat

SEQ ID NO: 4475 - DNA, 21 bp, synthetic construct
  source 1..21: mol_type = other DNA
agggggacgacgggggcgggg

SEQ ID NO: 4476 - DNA, 21 bp, synthetic construct
  source 1..21: mol_type = other DNA
aggtcccacgcgtccgcgggg

SEQ ID NO: 4477 - DNA, 21 bp, synthetic construct
  source 1..21: mol_type = other DNA
ttcgcgaaatatggggtgaat

SEQ ID NO: 4478 - DNA, 21 bp, synthetic construct
  source 1..21: mol_type = other DNA
ggcatgggctcaaccaagtac

SEQ ID NO: 4479 - DNA, 21 bp, synthetic construct
  source 1..21: mol_type = other DNA
tacgccaagtttaacgtaaac

SEQ ID NO: 4480 - DNA, 21 bp, synthetic construct
  source 1..21: mol_type = other DNA
tacatgaagtcaggccccaac

SEQ ID NO: 4481 - DNA, 21 bp, synthetic construct
  source 1..21: mol_type = other DNA
aggaattccgggtccgtgttc

SEQ ID NO: 4482 - DNA, 21 bp, synthetic construct
  source 1..21: mol_type = other DNA
acggagaatacggtgaggaaa

SEQ ID NO: 4483 - DNA, 21 bp, synthetic construct
  source 1..21: mol_type = other DNA
tacgcccgctttaacgtaaac

SEQ ID NO: 4484 - DNA, 21 bp, synthetic construct
  source 1..21: mol_type = other DNA
tatgcgaggccgaatgcgaat

SEQ ID NO: 4485 - DNA, 21 bp, synthetic construct
  source 1..21: mol_type = other DNA
aactacaaccgcggcgccggc

SEQ ID NO: 4486 - DNA, 21 bp, synthetic construct
  source 1..21: mol_type = other DNA
tatatgaaacactccccgaat

SEQ ID NO: 4487 - DNA, 21 bp, synthetic construct
  source 1..21: mol_type = other DNA
ttcgcgaaaataggggcgaat

SEQ ID NO: 4488 - DNA, 21 bp, synthetic construct
  source 1..21: mol_type = other DNA
ttcgcgaggccgaataataat

SEQ ID NO: 4489 - DNA, 21 bp, synthetic construct
  source 1..21: mol_type = other DNA
tacgcccgcatcaaccaaaac

SEQ ID NO: 4490 - DNA, 21 bp, synthetic construct
  source 1..21: mol_type = other DNA
tttgcccgcaacaactcaaac

SEQ ID NO: 4491 - DNA, 21 bp, synthetic construct
  source 1..21: mol_type = other DNA
tggaagggcggcacctcaaac

SEQ ID NO: 4492 - DNA, 21 bp, synthetic construct
  source 1..21: mol_type = other DNA
tacgccaagcgcaacgacaac

SEQ ID NO: 4493 - DNA, 21 bp, synthetic construct
  source 1..21: mol_type = other DNA
ttctccaggatgaatccgaat

SEQ ID NO: 4494 - DNA, 21 bp, synthetic construct
  source 1..21: mol_type = other DNA
aactcatcagacggcccccgc

SEQ ID NO: 4495 - DNA, 21 bp, synthetic construct
  source 1..21: mol_type = other DNA
tacgccaagtggggcaacaac

SEQ ID NO: 4496 - DNA, 21 bp, synthetic construct
  source 1..21: mol_type = other DNA
tttgccaagtttaaccataac

SEQ ID NO: 4497 - DNA, 21 bp, synthetic construct
  source 1..21: mol_type = other DNA
ttctccaggatgggggggaat

SEQ ID NO: 4498 - DNA, 21 bp, synthetic construct
  source 1..21: mol_type = other DNA
ttcgcgaggatgaatgcgaat

SEQ ID NO: 4499 - DNA, 21 bp, synthetic construct
  source 1..21: mol_type = other DNA
tattatgcgaaagtgttgccg

SEQ ID NO: 4500 - DNA, 21 bp, synthetic construct
  source 1..21: mol_type = other DNA
ttctccaaattcaatcagaat

SEQ ID NO: 4501 - DNA, 21 bp, synthetic construct
  source 1..21: mol_type = other DNA
tttgcccgcctgaacgccaac

SEQ ID NO: 4502 - DNA, 21 bp, synthetic construct
  source 1..21: mol_type = other DNA
ttcgcgagggtgggggggaat

SEQ ID NO: 4503 - DNA, 21 bp, synthetic construct
  source 1..21: mol_type = other DNA
tacgccaagtttaactcaaac

SEQ ID NO: 4504 - DNA, 21 bp, synthetic construct
  source 1..21: mol_type = other DNA
acccgcggcggcggctcaggc

SEQ ID NO: 4505 - DNA, 21 bp, synthetic construct
  source 1..21: mol_type = other DNA
ttcgcgaggaataatttcaat

SEQ ID NO: 4506 - DNA, 21 bp, synthetic construct
  source 1..21: mol_type = other DNA
tccgcgccgccgacgaaattc

SEQ ID NO: 4507 - DNA, 21 bp, synthetic construct
  source 1..21: mol_type = other DNA
tggaatcagttcacggggaat

SEQ ID NO: 4508 - DNA, 21 bp, synthetic construct
  source 1..21: mol_type = other DNA
gatgcgaatcacaataggaat

SEQ ID NO: 4509 - DNA, 21 bp, synthetic construct
  source 1..21: mol_type = other DNA
ttttcacgcctgggcgacaac

SEQ ID NO: 4510 - DNA, 21 bp, synthetic construct
  source 1..21: mol_type = other DNA
tatacgaaagggacggtgaat

SEQ ID NO: 4511 - DNA, 21 bp, synthetic construct
  source 1..21: mol_type = other DNA
tacgccaagatgggcaccaac

SEQ ID NO: 4512 - DNA, 21 bp, synthetic construct
  source 1..21: mol_type = other DNA
ttcgcgaggcacaatgggaat

SEQ ID NO: 4513 - DNA, 21 bp, synthetic construct
  source 1..21: mol_type = other DNA
ttcgcgagggtgaatcagaat

SEQ ID NO: 4514 - DNA, 21 bp, synthetic construct
  source 1..21: mol_type = other DNA
acgcacgcgttggtgaatgcg

SEQ ID NO: 4515 - DNA, 21 bp, synthetic construct
  source 1..21: mol_type = other DNA
tttgccaagtttaacgtaaac

SEQ ID NO: 4516 - DNA, 21 bp, synthetic construct
  source 1..21: mol_type = other DNA
tacatgaagcgcgaaatctca

SEQ ID NO: 4517 - DNA, 21 bp, synthetic construct
  source 1..21: mol_type = other DNA
acgccgccgacgttcaaagtg

SEQ ID NO: 4518 - DNA, 21 bp, synthetic construct
  source 1..21: mol_type = other DNA
tttgccaagtacggcaacaac

SEQ ID NO: 4519 - DNA, 21 bp, synthetic construct
  source 1..21: mol_type = other DNA
tatacgaggtatgggttggat

SEQ ID NO: 4520 - DNA, 21 bp, synthetic construct
  source 1..21: mol_type = other DNA
tacgcccgcgtaaacaacaac

SEQ ID NO: 4521 - DNA, 21 bp, synthetic construct
  source 1..21: mol_type = other DNA
acccccaccggccgccccgcc

SEQ ID NO: 4522 - DNA, 21 bp, synthetic construct
  source 1..21: mol_type = other DNA
ttctccaaatatgggaataat

SEQ ID NO: 4523 - DNA, 21 bp, synthetic construct
  source 1..21: mol_type = other DNA
ttcgcgaaacacgggcagaat

SEQ ID NO: 4524 - DNA, 21 bp, synthetic construct
  source 1..21: mol_type = other DNA
tggagggggaatggggtgaat

SEQ ID NO: 4525 - DNA, 21 bp, synthetic construct
  source 1..21: mol_type = other DNA
tatgcgaaattcaatcacaat

SEQ ID NO: 4526 - DNA, 21 bp, synthetic construct
  source 1..21: mol_type = other DNA
ttttcaaagcaaggctggaac

SEQ ID NO: 4527 - DNA, 21 bp, synthetic construct
  source 1..21: mol_type = other DNA
ttctccaaattcaatgtgaat

SEQ ID NO: 4528 - DNA, 21 bp, synthetic construct
  source 1..21: mol_type = other DNA
ttttcaaagtacggcggcaac

SEQ ID NO: 4529 - DNA, 21 bp, synthetic construct
  source 1..21: mol_type = other DNA
tactcaaagtttggccccaac

SEQ ID NO: 4530 - DNA, 21 bp, synthetic construct
  source 1..21: mol_type = other DNA
ttctccaaatataatttgaat

SEQ ID NO: 4531 - DNA, 21 bp, synthetic construct
  source 1..21: mol_type = other DNA
ttcgcgaaatataatacgaat

SEQ ID NO: 4532 - DNA, 21 bp, synthetic construct
  source 1..21: mol_type = other DNA
gggaataggaattattccgag

SEQ ID NO: 4533 - DNA, 21 bp, synthetic construct
  source 1..21: mol_type = other DNA
ttcgcgaggatgaatccgaat

SEQ ID NO: 4534 - DNA, 21 bp, synthetic construct
  source 1..21: mol_type = other DNA
tacgccaaggtatcatcaaac

SEQ ID NO: 4535 - DNA, 21 bp, synthetic construct
  source 1..21: mol_type = other DNA
ttctccaaaggggggtccaat

SEQ ID NO: 4536 - DNA, 21 bp, synthetic construct
  source 1..21: mol_type = other DNA
tttgccaagtacggcctgaac

SEQ ID NO: 4537 - DNA, 21 bp, synthetic construct
  source 1..21: mol_type = other DNA
ttcgcgaggatgaatacgaat

SEQ ID NO: 4538 - DNA, 21 bp, synthetic construct
  source 1..21: mol_type = other DNA
ttcgcgaaagcggggtccaat

SEQ ID NO: 4539 - DNA, 21 bp, synthetic construct
  source 1..21: mol_type = other DNA
tacgcccgcgtaaactcaaac

SEQ ID NO: 4540 - DNA, 21 bp, synthetic construct
  source 1..21: mol_type = other DNA
tacgcccgccatggccccaac

SEQ ID NO: 4541 - DNA, 21 bp, synthetic construct
  source 1..21: mol_type = other DNA
atcgtacatctgaagaactca

SEQ ID NO: 4542 - DNA, 21 bp, synthetic construct
  source 1..21: mol_type = other DNA
gggagggcgaatcactccggg

SEQ ID NO: 4543 - DNA, 21 bp, synthetic construct
  source 1..21: mol_type = other DNA
ttttcaaagaacaactttaac

SEQ ID NO: 4544 - DNA, 21 bp, synthetic construct
  source 1..21: mol_type = other DNA
tatgcgaaatataatgtgaat

SEQ ID NO: 4545 - DNA, 21 bp, synthetic construct
  source 1..21: mol_type = other DNA
tttgcccgcgtaggcgacaac

SEQ ID NO: 4546 - DNA, 21 bp, synthetic construct
  source 1..21: mol_type = other DNA
ttctccaggccgaatccgaat

SEQ ID NO: 4547 - DNA, 21 bp, synthetic construct
  source 1..21: mol_type = other DNA
tttgccaagtacaacgtaaac

SEQ ID NO: 4548 - DNA, 21 bp, synthetic construct
  source 1..21: mol_type = other DNA
aacaaccgcggcacctcagaa

SEQ ID NO: 4549 - DNA, 21 bp, synthetic construct
  source 1..21: mol_type = other DNA
catcgctcaggcggctacgac

SEQ ID NO: 4550 - DNA, 21 bp, synthetic construct
  source 1..21: mol_type = other DNA
ttcgcgaggcacaatgtgaat

SEQ ID NO: 4551 - DNA, 21 bp, synthetic construct
  source 1..21: mol_type = other DNA
tacgcccgccataacgacaac

SEQ ID NO: 4552 - DNA, 21 bp, synthetic construct
  source 1..21: mol_type = other DNA
accctgaccggccgcaactca

SEQ ID NO: 4553 - DNA, 21 bp, synthetic construct
  source 1..21: mol_type = other DNA
ttcgcgaaaatggggtccaat

SEQ ID NO: 4554 - DNA, 21 bp, synthetic construct
  source 1..21: mol_type = other DNA
ttcgcgagggtgaattccaat

SEQ ID NO: 4555 - DNA, 21 bp, synthetic construct
  source 1..21: mol_type = other DNA
gtgtataggccggtgacgaat

SEQ ID NO: 4556 - DNA, 21 bp, synthetic construct
  source 1..21: mol_type = other DNA
ttttcacgcaacaaccaaaac

SEQ ID NO: 4557 - DNA, 21 bp, synthetic construct
  source 1..21: mol_type = other DNA
atgaagtcatacggcgtaggc

SEQ ID NO: 4558 - DNA, 21 bp, synthetic construct
  source 1..21: mol_type = other DNA
ttttcaaagtacggcatcaac

SEQ ID NO: 4559 - DNA, 21 bp, synthetic construct
  source 1..21: mol_type = other DNA
tttgcccgcgccaaccaaaac

SEQ ID NO: 4560 - DNA, 21 bp, synthetic construct
  source 1..21: mol_type = other DNA
tttgcccgccatggctcaaac

SEQ ID NO: 4561 - DNA, 21 bp, synthetic construct
  source 1..21: mol_type = other DNA
aggtccaatgggtccgggccg

SEQ ID NO: 4562 - DNA, 21 bp, synthetic construct
  source 1..21: mol_type = other DNA
aacaactcacgcggctcatac

SEQ ID NO: 4563 - DNA, 21 bp, synthetic construct
  source 1..21: mol_type = other DNA
tacaccaagctgaccggcaac

SEQ ID NO: 4564 - DNA, 21 bp, synthetic construct
  source 1..21: mol_type = other DNA
ttcgcgaaacacaatcagaat

SEQ ID NO: 4565 - DNA, 21 bp, synthetic construct
  source 1..21: mol_type = other DNA
tactcacgctttaactcaaac

SEQ ID NO: 4566 - DNA, 21 bp, synthetic construct
  source 1..21: mol_type = other DNA
ttctccaaaaaaggggataat

SEQ ID NO: 4567 - DNA, 21 bp, synthetic construct
  source 1..21: mol_type = other DNA
tatgcgaggccgaatcagaat

SEQ ID NO: 4568 - DNA, 21 bp, synthetic construct
  source 1..21: mol_type = other DNA
tttgcccgcgtaaactacaac

SEQ ID NO: 4569 - DNA, 21 bp, synthetic construct
  source 1..21: mol_type = other DNA
cgcaccgaataccaagtaggc

SEQ ID NO: 4570 - DNA, 21 bp, synthetic construct
  source 1..21: mol_type = other DNA
ttcgcgaggtataataataat

SEQ ID NO: 4571 - DNA, 21 bp, synthetic construct
  source 1..21: mol_type = other DNA
ttctccaggtataatgggaat

SEQ ID NO: 4572 - DNA, 21 bp, synthetic construct
  source 1..21: mol_type = other DNA
ttcgcgaggttcggggggaat

SEQ ID NO: 4573 - DNA, 21 bp, synthetic construct
  source 1..21: mol_type = other DNA
ttttcaaaggaaaactgcaac

SEQ ID NO: 4574 - DNA, 21 bp, synthetic construct
  source 1..21: mol_type = other DNA
gactcaggctacaaccgcaac

SEQ ID NO: 4575 - DNA, 21 bp, synthetic construct
  source 1..21: mol_type = other DNA
ttcgcgaaaataggggtgaat

SEQ ID NO: 4576 - DNA, 21 bp, synthetic construct
  source 1..21: mol_type = other DNA
tatgcgaggccgaatgggaat

SEQ ID NO: 4577 - DNA, 21 bp, synthetic construct
  source 1..21: mol_type = other DNA
aaccgctcaggcacctcagcc

SEQ ID NO: 4578 - DNA, 21 bp, synthetic construct
  source 1..21: mol_type = other DNA
tttgccaagtacaacatcaac

SEQ ID NO: 4579 - DNA, 21 bp, synthetic construct
  source 1..21: mol_type = other DNA
ttcgcgaaattggggatgaat

SEQ ID NO: 4580 - DNA, 21 bp, synthetic construct
  source 1..21: mol_type = other DNA
tatgcgaggttcaattccaat

SEQ ID NO: 4581 - DNA, 21 bp, synthetic construct
  source 1..21: mol_type = other DNA
tttgccaagaagggcgaaaac

SEQ ID NO: 4582 - DNA, 21 bp, synthetic construct
  source 1..21: mol_type = other DNA
tttgccaagctgggcctgaac

SEQ ID NO: 4583 - DNA, 21 bp, synthetic construct
  source 1..21: mol_type = other DNA
tttgccaaggtaggccccaac

SEQ ID NO: 4584 - DNA, 21 bp, synthetic construct
  source 1..21: mol_type = other DNA
cgcggctcatcacgcgactca

SEQ ID NO: 4585 - DNA, 21 bp, synthetic construct
  source 1..21: mol_type = other DNA
tttgcccgcgtaaacgtaaac

SEQ ID NO: 4586 - DNA, 21 bp, synthetic construct
  source 1..21: mol_type = other DNA
tccgggtatgggatgatgaat

SEQ ID NO: 4587 - DNA, 21 bp, synthetic construct
  source 1..21: mol_type = other DNA
ttcgcgaaattgggggcgaat

SEQ ID NO: 4588 - DNA, 21 bp, synthetic construct
  source 1..21: mol_type = other DNA
gaccgcaacacccgcatggta

SEQ ID NO: 4589 - DNA, 21 bp, synthetic construct
  source 1..21: mol_type = other DNA
gcccaaaaggacaccatgtac

SEQ ID NO: 4590 - DNA, 21 bp, synthetic construct
  source 1..21: mol_type = other DNA
tattccaggttcaatcagaat

SEQ ID NO: 4591 - DNA, 21 bp, synthetic construct
  source 1..21: mol_type = other DNA
ttctccaaatatgggacgaat

SEQ ID NO: 4592 - DNA, 21 bp, synthetic construct
  source 1..21: mol_type = other DNA
tatgcgaggccgaatacgaat

SEQ ID NO: 4593 - DNA, 21 bp, synthetic construct
  source 1..21: mol_type = other DNA
ttcaaagggacgacgccgtat

SEQ ID NO: 4594 - DNA, 21 bp, synthetic construct
  source 1..21: mol_type = other DNA
cgctgggccaaggaagtaggc

SEQ ID NO: 4595 - DNA, 21 bp, synthetic construct
  source 1..21: mol_type = other DNA
tggtaccaaaaccaaaaggac

SEQ ID NO: 4596 - DNA, 21 bp, synthetic construct
  source 1..21: mol_type = other DNA
accatgctgggcgcccgcaac

SEQ ID NO: 4597 - DNA, 21 bp, synthetic construct
  source 1..21: mol_type = other DNA
tttgccaagtacggccaaaac

SEQ ID NO: 4598 - DNA, 21 bp, synthetic construct
  source 1..21: mol_type = other DNA
gataggggggataggttctcc

SEQ ID NO: 4599 - DNA, 21 bp, synthetic construct
  source 1..21: mol_type = other DNA
tatgcgaaattcaatacgaat

SEQ ID NO: 4600 - DNA, 21 bp, synthetic construct
  source 1..21: mol_type = other DNA
ttttcaaagggcggcgccaac

SEQ ID NO: 4601 - DNA, 21 bp, synthetic construct
  source 1..21: mol_type = other DNA
tttgcccgcaagaacgacaac

SEQ ID NO: 4602 - DNA, 21 bp, synthetic construct
  source 1..21: mol_type = other DNA
ttcgcgagggtgaatttgaat

SEQ ID NO: 4603 - DNA, 21 bp, synthetic construct
  source 1..21: mol_type = other DNA
gggccgccggcgttcaaagcg

SEQ ID NO: 4604 - DNA, 21 bp, synthetic construct
  source 1..21: mol_type = other DNA
cagccgaggaggatagaggtg

SEQ ID NO: 4605 - DNA, 21 bp, synthetic construct
  source 1..21: mol_type = other DNA
aggtccaggaatgagtccggg

SEQ ID NO: 4606 - DNA, 21 bp, synthetic construct
  source 1..21: mol_type = other DNA
ctgcgcaccgccggcgccggc

SEQ ID NO: 4607 - DNA, 21 bp, synthetic construct
  source 1..21: mol_type = other DNA
tttgcccgcgtaaacatgaac

SEQ ID NO: 4608 - DNA, 21 bp, synthetic construct
  source 1..21: mol_type = other DNA
tttgccaagcgcaacgaaaac

SEQ ID NO: 4609 - DNA, 21 bp, synthetic construct
  source 1..21: mol_type = other DNA
ttcgcgaaacacggggggaat

SEQ ID NO: 4610 - DNA, 21 bp, synthetic construct
  source 1..21: mol_type = other DNA
tcctggacgggggcgacggcg

SEQ ID NO: 4611 - DNA, 21 bp, synthetic construct
  source 1..21: mol_type = other DNA
ttctccaaatataatcagaat

SEQ ID NO: 4612 - DNA, 21 bp, synthetic construct
  source 1..21: mol_type = other DNA
ttcgcgagggtgaatgcgaat

SEQ ID NO: 4613 - DNA, 21 bp, synthetic construct
  source 1..21: mol_type = other DNA
tacgccaagatcaacaccaac

SEQ ID NO: 4614 - DNA, 21 bp, synthetic construct
  source 1..21: mol_type = other DNA
tttgccaagaccaacgccaac

SEQ ID NO: 4615 - DNA, 21 bp, synthetic construct
  source 1..21: mol_type = other DNA
acgaggacggggatagcgtcc

SEQ ID NO: 4616 - DNA, 21 bp, synthetic construct
  source 1..21: mol_type = other DNA
ttcgcgaaagcgaatccgaat

SEQ ID NO: 4617 - DNA, 21 bp, synthetic construct
  source 1..21: mol_type = other DNA
tacatgaagcgcggcgtagac

SEQ ID NO: 4618 - DNA, 21 bp, synthetic construct
  source 1..21: mol_type = other DNA
ttcgcgaggaggaatgataat

SEQ ID NO: 4619 - DNA, 21 bp, synthetic construct
  source 1..21: mol_type = other DNA
atcaacctgtcaaagctgcaa

SEQ ID NO: 4620 - DNA, 21 bp, synthetic construct
  source 1..21: mol_type = other DNA
ttctccaggtatgggcagaat

SEQ ID NO: 4621 - DNA, 21 bp, synthetic construct
  source 1..21: mol_type = other DNA
ctgtggaagaacgccatggac

SEQ ID NO: 4622 - DNA, 21 bp, synthetic construct
  source 1..21: mol_type = other DNA
ttcgcgaggaataatttgaat

SEQ ID NO: 4623 - DNA, 21 bp, synthetic construct
  source 1..21: mol_type = other DNA
tttgccaagcataaccataac

SEQ ID NO: 4624 - DNA, 21 bp, synthetic construct
  source 1..21: mol_type = other DNA
tatgcgaaaaataattccaat

SEQ ID NO: 4625 - DNA, 21 bp, synthetic construct
  source 1..21: mol_type = other DNA
tggcattcacccaacggcatc

SEQ ID NO: 4626 - DNA, 21 bp, synthetic construct
  source 1..21: mol_type = other DNA
tatgcgaggccgggggagaat

SEQ ID NO: 4627 - DNA, 21 bp, synthetic construct
  source 1..21: mol_type = other DNA
gagaaatataaagggcacatg

SEQ ID NO: 4628 - DNA, 21 bp, synthetic construct
  source 1..21: mol_type = other DNA
tatcagaggaataatatggtg

SEQ ID NO: 4629 - DNA, 21 bp, synthetic construct
  source 1..21: mol_type = other DNA
ttttcaaagatcggcggcaac

SEQ ID NO: 4630 - DNA, 21 bp, synthetic construct
  source 1..21: mol_type = other DNA
ttcgcgaggatgaattccaat

SEQ ID NO: 4631 - DNA, 21 bp, synthetic construct
  source 1..21: mol_type = other DNA
ttcgcgaaaatagggtccaat

SEQ ID NO: 4632 - DNA, 21 bp, synthetic construct
  source 1..21: mol_type = other DNA
aggtcctccaattccgcgtat

SEQ ID NO: 4633 - DNA, 21 bp, synthetic construct
  source 1..21: mol_type = other DNA
ttcgcgaaatccaattccaat

SEQ ID NO: 4634 - DNA, 21 bp, synthetic construct
  source 1..21: mol_type = other DNA
ttttcaaagcaaaaccaaaac

SEQ ID NO: 4635 - DNA, 21 bp, synthetic construct
  source 1..21: mol_type = other DNA
tacgccaagaactcaaacatc

SEQ ID NO: 4636 - DNA, 21 bp, synthetic construct
  source 1..21: mol_type = other DNA
cgctcaggcaccatctacccc

SEQ ID NO: 4637 - DNA, 21 bp, synthetic construct
  source 1..21: mol_type = other DNA
tttgcccgcatcaaccaaaac

SEQ ID NO: 4638 - DNA, 21 bp, synthetic construct
  source 1..21: mol_type = other DNA
acctcacatggccgctcagcc

SEQ ID NO: 4639 - DNA, 21 bp, synthetic construct
  source 1..21: mol_type = other DNA
ttcgcgaggtataattccaat

SEQ ID NO: 4640 - DNA, 21 bp, synthetic construct
  source 1..21: mol_type = other DNA
aataatagggggacgcaggcg

SEQ ID NO: 4641 - DNA, 21 bp, synthetic construct
  source 1..21: mol_type = other DNA
ttcgcgaggatgggggggaat

SEQ ID NO: 4642 - DNA, 21 bp, synthetic construct
  source 1..21: mol_type = other DNA
tttgcccgcgccaactcaaac

SEQ ID NO: 4643 - DNA, 21 bp, synthetic construct
  source 1..21: mol_type = other DNA
ttcgcgagggagaataaaaat

SEQ ID NO: 4644 - DNA, 21 bp, synthetic construct
  source 1..21: mol_type = other DNA
ttctccaggggggggcagaat

SEQ ID NO: 4645 - DNA, 21 bp, synthetic construct
  source 1..21: mol_type = other DNA
ttctccaggtccaatgggaat

SEQ ID NO: 4646 - DNA, 21 bp, synthetic construct
  source 1..21: mol_type = other DNA
ttttcacgcggcaacggcaac

SEQ ID NO: 4647 - DNA, 21 bp, synthetic construct
  source 1..21: mol_type = other DNA
tacgcccgcatgaacggcaac

SEQ ID NO: 4648 - DNA, 21 bp, synthetic construct
  source 1..21: mol_type = other DNA
gggataataaggtccccggtg

SEQ ID NO: 4649 - DNA, 21 bp, synthetic construct
  source 1..21: mol_type = other DNA
tggaaagagcacgcgaaaaat

SEQ ID NO: 4650 - DNA, 21 bp, synthetic construct
  source 1..21: mol_type = other DNA
tattccaaaccgaatacgaat

SEQ ID NO: 4651 - DNA, 21 bp, synthetic construct
  source 1..21: mol_type = other DNA
tacgccaagcccaacatcaac

SEQ ID NO: 4652 - DNA, 21 bp, synthetic construct
  source 1..21: mol_type = other DNA
ttcgcgaaattggggtccaat

SEQ ID NO: 4653 - DNA, 21 bp, synthetic construct
  source 1..21: mol_type = other DNA
ggcaagggcaacaccctgtac

SEQ ID NO: 4654 - DNA, 21 bp, synthetic construct
  source 1..21: mol_type = other DNA
ttttcacgccccggcaccaac

SEQ ID NO: 4655 - DNA, 21 bp, synthetic construct
  source 1..21: mol_type = other DNA
tttgccaaggccaacatgaac

SEQ ID NO: 4656 - DNA, 21 bp, synthetic construct
  source 1..21: mol_type = other DNA
ttctccagggcggggaatgag

SEQ ID NO: 4657 - DNA, 21 bp, synthetic construct
  source 1..21: mol_type = other DNA
tttaacggccgcggcatcaac

SEQ ID NO: 4658 - DNA, 21 bp, synthetic construct
  source 1..21: mol_type = other DNA
acgcagtattcctccgggtat

SEQ ID NO: 4659 - DNA, 21 bp, synthetic construct
  source 1..21: mol_type = other DNA
aatttgaggtccaggggggag

SEQ ID NO: 4660 - DNA, 21 bp, synthetic construct
  source 1..21: mol_type = other DNA
ctgcatcgcaacatgaccgac

SEQ ID NO: 4661 - DNA, 21 bp, synthetic construct
  source 1..21: mol_type = other DNA
gggataaggaggcaggtggat

SEQ ID NO: 4662 - DNA, 21 bp, synthetic construct
  source 1..21: mol_type = other DNA
ttcgcgaaatatggggggaat

SEQ ID NO: 4663 - DNA, 21 bp, synthetic construct
  source 1..21: mol_type = other DNA
gcggggtccacgtccagggcg

SEQ ID NO: 4664 - DNA, 21 bp, synthetic construct
  source 1..21: mol_type = other DNA
aaaaggtccgcggggttggat

SEQ ID NO: 4665 - DNA, 21 bp, synthetic construct
  source 1..21: mol_type = other DNA
ttttcaaagtttaacaccaac

SEQ ID NO: 4666 - DNA, 21 bp, synthetic construct
  source 1..21: mol_type = other DNA
cacaaaaatgggtccgggcag

SEQ ID NO: 4667 - DNA, 21 bp, synthetic construct
  source 1..21: mol_type = other DNA
tatgcgaaaataaatccgaat

SEQ ID NO: 4668 - DNA, 21 bp, synthetic construct
  source 1..21: mol_type = other DNA
aacccccgcaagaacgaaatg

SEQ ID NO: 4669 - DNA, 21 bp, synthetic construct
  source 1..21: mol_type = other DNA
tttgccaagctgaacatcaac

SEQ ID NO: 4670 - DNA, 21 bp, synthetic construct
  source 1..21: mol_type = other DNA
caagacaccaacaagtactgg

SEQ ID NO: 4671 - DNA, 21 bp, synthetic construct
  source 1..21: mol_type = other DNA
cattcaatgaaggtatcatac

SEQ ID NO: 4672 - DNA, 21 bp, synthetic construct
  source 1..21: mol_type = other DNA
tggtccccggggaggccgaat

SEQ ID NO: 4673 - DNA, 21 bp, synthetic construct
  source 1..21: mol_type = other DNA
ttttcaaagaagggcgaaaac

SEQ ID NO: 4674 - DNA, 21 bp, synthetic construct
  source 1..21: mol_type = other DNA
ttctccaaagtgaattccaat

SEQ ID NO: 4675 - DNA, 21 bp, synthetic construct
  source 1..21: mol_type = other DNA
acctacatcggcaacaaggcc

SEQ ID NO: 4676 - DNA, 21 bp, synthetic construct
  source 1..21: mol_type = other DNA
gaggggtcctcctggaaaaat

SEQ ID NO: 4677 - DNA, 21 bp, synthetic construct
  source 1..21: mol_type = other DNA
tacgcccgccataacaacaac

SEQ ID NO: 4678 - DNA, 21 bp, synthetic construct
  source 1..21: mol_type = other DNA
aactcaggcaagaccatgtac

SEQ ID NO: 4679 - DNA, 21 bp, synthetic construct
  source 1..21: mol_type = other DNA
ttcgcgaaattgaatcacaat

SEQ ID NO: 4680 - DNA, 21 bp, synthetic construct
  source 1..21: mol_type = other DNA
tacgccaagtttaacctgaac

SEQ ID NO: 4681 - DNA, 21 bp, synthetic construct
  source 1..21: mol_type = other DNA
ttttcacgcgaaaaccgcaac

SEQ ID NO: 4682 - DNA, 21 bp, synthetic construct
  source 1..21: mol_type = other DNA
atggggcacttgtcctcctat

SEQ ID NO: 4683 - DNA, 21 bp, synthetic construct
  source 1..21: mol_type = other DNA
cgcggcggcatgtacaccggc

SEQ ID NO: 4684 - DNA, 21 bp, synthetic construct
  source 1..21: mol_type = other DNA
tatgcgaaagtgaatgtgaat

SEQ ID NO: 4685 - DNA, 21 bp, synthetic construct
  source 1..21: mol_type = other DNA
acccgcgacggccgcgtagcc

SEQ ID NO: 4686 - DNA, 21 bp, synthetic construct
  source 1..21: mol_type = other DNA
gcgaggcaggtgaaagagttg

SEQ ID NO: 4687 - DNA, 21 bp, synthetic construct
  source 1..21: mol_type = other DNA
tttgccaagtttaacaacaac

SEQ ID NO: 4688 - DNA, 21 bp, synthetic construct
  source 1..21: mol_type = other DNA
accaacggccatggccgcaac

SEQ ID NO: 4689 - DNA, 21 bp, synthetic construct
  source 1..21: mol_type = other DNA
tttgccaagtacaaccaaaac

SEQ ID NO: 4690 - DNA, 21 bp, synthetic construct
  source 1..21: mol_type = other DNA
tatgcgaggttcggggggaat

SEQ ID NO: 4691 - DNA, 21 bp, synthetic construct
  source 1..21: mol_type = other DNA
tacgccaagtttggcggcaac

SEQ ID NO: 4692 - DNA, 21 bp, synthetic construct
  source 1..21: mol_type = other DNA
ttttcaaagatcaacctgaac

SEQ ID NO: 4693 - DNA, 21 bp, synthetic construct
  source 1..21: mol_type = other DNA
tacgcccgccataacaccaac

SEQ ID NO: 4694 - DNA, 21 bp, synthetic construct
  source 1..21: mol_type = other DNA
ttcgcgaggccgaatgcgaat

SEQ ID NO: 4695 - DNA, 21 bp, synthetic construct
  source 1..21: mol_type = other DNA
tatgcgaggcacaatgggaat

SEQ ID NO: 4696 - DNA, 21 bp, synthetic construct
  source 1..21: mol_type = other DNA
ttcgcgaaagaggggtgtaat

SEQ ID NO: 4697 - DNA, 21 bp, synthetic construct
  source 1..21: mol_type = other DNA
tttgccaagcataacaacaac

SEQ ID NO: 4698 - DNA, 21 bp, synthetic construct
  source 1..21: mol_type = other DNA
tttgccaagcataacctgaac

SEQ ID NO: 4699 - DNA, 21 bp, synthetic construct
  source 1..21: mol_type = other DNA
tacaacaagggcatcccctac

SEQ ID NO: 4700 - DNA, 21 bp, synthetic construct
  source 1..21: mol_type = other DNA
ttttcaaagtttaacaacaac

SEQ ID NO: 4701 - DNA, 21 bp, synthetic construct
  source 1..21: mol_type = other DNA
accgacaagtactcaaccttt

SEQ ID NO: 4702 - DNA, 21 bp, synthetic construct
  source 1..21: mol_type = other DNA
tttgcccgcgtaaacatcaac

SEQ ID NO: 4703 - DNA, 21 bp, synthetic construct
  source 1..21: mol_type = other DNA
tatatgtccgagacgtggtcc

SEQ ID NO: 4704 - DNA, 21 bp, synthetic construct
  source 1..21: mol_type = other DNA
tatataaaaaatcagagggat

SEQ ID NO: 4705 - DNA, 21 bp, synthetic construct
  source 1..21: mol_type = other DNA
aaccaaggcaccgtacgcttt

SEQ ID NO: 4706 - DNA, 21 bp, synthetic construct
  source 1..21: mol_type = other DNA
tttgcccgccccaacggcaac

SEQ ID NO: 4707 - DNA, 21 bp, synthetic construct
  source 1..21: mol_type = other DNA
tggcaggcgaaagtgatgtcc

SEQ ID NO: 4708 - DNA, 21 bp, synthetic construct
  source 1..21: mol_type = other DNA
atccatgccaagcaactgaac

SEQ ID NO: 4709 - DNA, 21 bp, synthetic construct
  source 1..21: mol_type = other DNA
gtatcagccacccgctttggc

SEQ ID NO: 4710 - DNA, 21 bp, synthetic construct
  source 1..21: mol_type = other DNA
tatttgaaaaaagatttgtcc

SEQ ID NO: 4711 - DNA, 21 bp, synthetic construct
  source 1..21: mol_type = other DNA
gtgcacccggagtatcacgcg

SEQ ID NO: 4712 - DNA, 21 bp, synthetic construct
  source 1..21: mol_type = other DNA
aagggcggcggccatcccttt

SEQ ID NO: 4713 - DNA, 21 bp, synthetic construct
  source 1..21: mol_type = other DNA
ttcgcgaaacagggggggaat

SEQ ID NO: 4714 - DNA, 21 bp, synthetic construct
  source 1..21: mol_type = other DNA
ttttcaaagatcaacgccaac

SEQ ID NO: 4715 - DNA, 21 bp, synthetic construct
  source 1..21: mol_type = other DNA
atgagggggccggtgtccccg

SEQ ID NO: 4716 - DNA, 21 bp, synthetic construct
  source 1..21: mol_type = other DNA
tttgcccgcatcaaccccaac

SEQ ID NO: 4717 - DNA, 21 bp, synthetic construct
  source 1..21: mol_type = other DNA
tttgccaagtttaacaccaac

SEQ ID NO: 4718 - DNA, 21 bp, synthetic construct
  source 1..21: mol_type = other DNA
tccatgaggtccccgaattcc

SEQ ID NO: 4719 - DNA, 21 bp, synthetic construct
  source 1..21: mol_type = other DNA
tttgcccgcatgggcgaaaac

SEQ ID NO: 4720 - DNA, 21 bp, synthetic construct
  source 1..21: mol_type = other DNA
tatacgaaaacgtccccgtcc

SEQ ID NO: 4721 - DNA, 21 bp, synthetic construct
  source 1..21: mol_type = other DNA
ttcttgaaatccaatacgggg

SEQ ID NO: 4722 - DNA, 21 bp, synthetic construct
  source 1..21: mol_type = other DNA
aaggccaacggctcatacgcc

SEQ ID NO: 4723 - DNA, 21 bp, synthetic construct
  source 1..21: mol_type = other DNA
ttcgcgaaagataattataat

SEQ ID NO: 4724 - DNA, 21 bp, synthetic construct
  source 1..21: mol_type = other DNA
aagggcgaccccccctggggc

SEQ ID NO: 4725 - DNA, 21 bp, synthetic construct
  source 1..21: mol_type = other DNA
tttgcccgcaacaacatgaac

SEQ ID NO: 4726 - DNA, 21 bp, synthetic construct
  source 1..21: mol_type = other DNA
tacgccgccaagtcaaacaac

SEQ ID NO: 4727 - DNA, 21 bp, synthetic construct
  source 1..21: mol_type = other DNA
tataggccggggaaaaatgag

SEQ ID NO: 4728 - DNA, 21 bp, synthetic construct
  source 1..21: mol_type = other DNA
tttgcccgcatgaacggcaac

SEQ ID NO: 4729 - DNA, 21 bp, synthetic construct
  source 1..21: mol_type = other DNA
tttgccaaggtaggcggcaac

SEQ ID NO: 4730 - DNA, 21 bp, synthetic construct
  source 1..21: mol_type = other DNA
tttgccaagatgaacgccaac

SEQ ID NO: 4731 - DNA, 21 bp, synthetic construct
  source 1..21: mol_type = other DNA
tacgccaagtacaacgacaac

SEQ ID NO: 4732 - DNA, 21 bp, synthetic construct
  source 1..21: mol_type = other DNA
tttgccaagtttggcggcaac

SEQ ID NO: 4733 - DNA, 21 bp, synthetic construct
  source 1..21: mol_type = other DNA
ttttcaaagcatggcggcaac

SEQ ID NO: 4734 - DNA, 21 bp, synthetic construct
  source 1..21: mol_type = other DNA
aagccctaccataacgacatc

SEQ ID NO: 4735 - DNA, 21 bp, synthetic construct
  source 1..21: mol_type = other DNA
gtacaaggcgtaggcaagaac

SEQ ID NO: 4736 - DNA, 21 bp, synthetic construct
  source 1..21: mol_type = other DNA
tttgcccgcgtaaactttaac

SEQ ID NO: 4737 - DNA, 21 bp, synthetic construct
  source 1..21: mol_type = other DNA
ttcgcgaaattgggggggaat

SEQ ID NO: 4738 - DNA, 21 bp, synthetic construct
  source 1..21: mol_type = other DNA
ttcgcgaaatataatgggaat

SEQ ID NO: 4739 - DNA, 21 bp, synthetic construct
  source 1..21: mol_type = other DNA
cagaaacagagggagataggg

SEQ ID NO: 4740 - DNA, 21 bp, synthetic construct
  source 1..21: mol_type = other DNA
ttcgcgaaaatagggacgaat

SEQ ID NO: 4741 - DNA, 21 bp, synthetic construct
  source 1..21: mol_type = other DNA
tttgccaaggccaacgtaaac

SEQ ID NO: 4742 - DNA, 21 bp, synthetic construct
  source 1..21: mol_type = other DNA
tttgcccgccaaaaccccaac

SEQ ID NO: 4743 - DNA, 21 bp, synthetic construct
  source 1..21: mol_type = other DNA
accaaccgcaacgacatccgc

SEQ ID NO: 4744 - DNA, 21 bp, synthetic construct
  source 1..21: mol_type = other DNA
tataaacacgggccgttggcg

SEQ ID NO: 4745 - DNA, 21 bp, synthetic construct
  source 1..21: mol_type = other DNA
acctcagtaggcacccgcaac

SEQ ID NO: 4746 - DNA, 21 bp, synthetic construct
  source 1..21: mol_type = other DNA
tttgcccgcgtaaacaccaac

SEQ ID NO: 4747 - DNA, 21 bp, synthetic construct
  source 1..21: mol_type = other DNA
gtagccaactacggccgcgac

SEQ ID NO: 4748 - DNA, 21 bp, synthetic construct
  source 1..21: mol_type = other DNA
cactccaaagggacgagggat

SEQ ID NO: 4749 - DNA, 21 bp, synthetic construct
  source 1..21: mol_type = other DNA
ttttcacgcgtaaaccccaac

SEQ ID NO: 4750 - DNA, 21 bp, synthetic construct
  source 1..21: mol_type = other DNA
tttgccaagaccaacgtaaac

SEQ ID NO: 4751 - DNA, 21 bp, synthetic construct
  source 1..21: mol_type = other DNA
cgcgacgccaccaactacccc

SEQ ID NO: 4752 - DNA, 21 bp, synthetic construct
  source 1..21: mol_type = other DNA
aaatccgggggggtggggtat

SEQ ID NO: 4753 - DNA, 21 bp, synthetic construct
  source 1..21: mol_type = other DNA
tttgcccgcatcaacggcaac

SEQ ID NO: 4754 - DNA, 21 bp, synthetic construct
  source 1..21: mol_type = other DNA
tttgccaagtttaacggcaac

SEQ ID NO: 4755 - DNA, 21 bp, synthetic construct
  source 1..21: mol_type = other DNA
tggaacaagaacatccattca

SEQ ID NO: 4756 - DNA, 21 bp, synthetic construct
  source 1..21: mol_type = other DNA
tttgcccgccccggcggcaac

SEQ ID NO: 4757 - DNA, 21 bp, synthetic construct
  source 1..21: mol_type = other DNA
ttcgcgaaaataaatcacaat

SEQ ID NO: 4758 - DNA, 21 bp, synthetic construct
  source 1..21: mol_type = other DNA
gggttcacgaattccgtgtat

SEQ ID NO: 4759 - DNA, 21 bp, synthetic construct
  source 1..21: mol_type = other DNA
ttttcacgccataactcaaac

SEQ ID NO: 4760 - DNA, 21 bp, synthetic construct
  source 1..21: mol_type = other DNA
tttgccaagtttaacatcaac

SEQ ID NO: 4761 - DNA, 21 bp, synthetic construct
  source 1..21: mol_type = other DNA
tacaagggctggaccgccgcc

SEQ ID NO: 4762 - DNA, 21 bp, synthetic construct
  source 1..21: mol_type = other DNA
aggccgtatacggatatggat

SEQ ID NO: 4763 - DNA, 21 bp, synthetic construct
  source 1..21: mol_type = other DNA
tacgccaagatcaactcaaac

SEQ ID NO: 4764 - DNA, 21 bp, synthetic construct
  source 1..21: mol_type = other DNA
tttgccaagatcaacatgaac

SEQ ID NO: 4765 - DNA, 21 bp, synthetic construct
  source 1..21: mol_type = other DNA
ttcgcgaggccggggtccaat

SEQ ID NO: 4766 - DNA, 21 bp, synthetic construct
  source 1..21: mol_type = other DNA
tacgccaagatcaaccataac

SEQ ID NO: 4767 - DNA, 21 bp, synthetic construct
  source 1..21: mol_type = other DNA
aacggcgacggcggctcatac

SEQ ID NO: 4768 - DNA, 21 bp, synthetic construct
  source 1..21: mol_type = other DNA
ttcgcgaggcacaatccgaat

SEQ ID NO: 4769 - DNA, 21 bp, synthetic construct
  source 1..21: mol_type = other DNA
ttttcaaagggcggccaaaac

SEQ ID NO: 4770 - DNA, 21 bp, synthetic construct
  source 1..21: mol_type = other DNA
cgcgccggcggcgcctcaggc

SEQ ID NO: 4771 - DNA, 21 bp, synthetic construct
  source 1..21: mol_type = other DNA
ccgataaaatcccagtccggg

SEQ ID NO: 4772 - DNA, 21 bp, synthetic construct
  source 1..21: mol_type = other DNA
ttcgcgaggtatggggggaat

SEQ ID NO: 4773 - DNA, 21 bp, synthetic construct
  source 1..21: mol_type = other DNA
ttttcaaagcccggctttaac

SEQ ID NO: 4774 - DNA, 21 bp, synthetic construct
  source 1..21: mol_type = other DNA
cactggtccggggcgaatccg

SEQ ID NO: 4775 - DNA, 21 bp, synthetic construct
  source 1..21: mol_type = other DNA
ttttcaaagtttaacatcaac

SEQ ID NO: 4776 - DNA, 21 bp, synthetic construct
  source 1..21: mol_type = other DNA
aattgggggaataaatccgat

SEQ ID NO: 4777 - DNA, 21 bp, synthetic construct
  source 1..21: mol_type = other DNA
tttgcccgctttaactcaaac

SEQ ID NO: 4778 - DNA, 21 bp, synthetic construct
  source 1..21: mol_type = other DNA
taccaagcctcaatggccaac

SEQ ID NO: 4779 - DNA, 21 bp, synthetic construct
  source 1..21: mol_type = other DNA
tttgccaagatcaactttaac

SEQ ID NO: 4780 - DNA, 21 bp, synthetic construct
  source 1..21: mol_type = other DNA
tactcacgccccaacggcaac

SEQ ID NO: 4781 - DNA, 21 bp, synthetic construct
  source 1..21: mol_type = other DNA
ataaaagggtatgggttggat

SEQ ID NO: 4782 - DNA, 21 bp, synthetic construct
  source 1..21: mol_type = other DNA
ttttcaaagctgtcacaacaa

SEQ ID NO: 4783 - DNA, 21 bp, synthetic construct
  source 1..21: mol_type = other DNA
ttcgcgaaaataggggataat

SEQ ID NO: 4784 - DNA, 21 bp, synthetic construct
  source 1..21: mol_type = other DNA
ttcgcgaggcacaatttcaat

SEQ ID NO: 4785 - DNA, 21 bp, synthetic construct
  source 1..21: mol_type = other DNA
ttctccaaaataaattccaat

SEQ ID NO: 4786 - DNA, 21 bp, synthetic construct
  source 1..21: mol_type = other DNA
ttcgcgaaaccggggataaat

SEQ ID NO: 4787 - DNA, 21 bp, synthetic construct
  source 1..21: mol_type = other DNA
tattccaaatggaatccgaat

SEQ ID NO: 4788 - DNA, 21 bp, synthetic construct
  source 1..21: mol_type = other DNA
ttttcaaagtggaaccaaaac

SEQ ID NO: 4789 - DNA, 21 bp, synthetic construct
  source 1..21: mol_type = other DNA
tggacgccgtccgcgtattcc

SEQ ID NO: 4790 - DNA, 21 bp, synthetic construct
  source 1..21: mol_type = other DNA
gacccccgctcacgcgcctca

SEQ ID NO: 4791 - DNA, 21 bp, synthetic construct
  source 1..21: mol_type = other DNA
ttcgcgaggaaaaatgagaat

SEQ ID NO: 4792 - DNA, 21 bp, synthetic construct
  source 1..21: mol_type = other DNA
tacatggtacgcaccggcggc

SEQ ID NO: 4793 - DNA, 21 bp, synthetic construct
  source 1..21: mol_type = other DNA
tttgccaagtttaaccaaaac

SEQ ID NO: 4794 - DNA, 21 bp, synthetic construct
  source 1..21: mol_type = other DNA
ggctacaagggcaccatgccc

SEQ ID NO: 4795 - DNA, 21 bp, synthetic construct
  source 1..21: mol_type = other DNA
tttgtaggcggccccatgacc

SEQ ID NO: 4796 - DNA, 21 bp, synthetic construct
  source 1..21: mol_type = other DNA
caatcactgaagggcgccggc

SEQ ID NO: 4797 - DNA, 21 bp, synthetic construct
  source 1..21: mol_type = other DNA
ctgctgcgcgaaggcgactgg

SEQ ID NO: 4798 - DNA, 21 bp, synthetic construct
  source 1..21: mol_type = other DNA
ttcgcgaggccgaattccaat

SEQ ID NO: 4799 - DNA, 21 bp, synthetic construct
  source 1..21: mol_type = other DNA
tacaagtcagcctcacccaac

SEQ ID NO: 4800 - DNA, 21 bp, synthetic construct
  source 1..21: mol_type = other DNA
ttttcaaagcccaacgccaac

SEQ ID NO: 4801 - DNA, 21 bp, synthetic construct
  source 1..21: mol_type = other DNA
gaacatggccgcggccatgac

SEQ ID NO: 4802 - DNA, 21 bp, synthetic construct
  source 1..21: mol_type = other DNA
ggccaagtacgcacccccacc

SEQ ID NO: 4803 - DNA, 21 bp, synthetic construct
  source 1..21: mol_type = other DNA
tatatagcggggccggtgaaa

SEQ ID NO: 4804 - DNA, 21 bp, synthetic construct
  source 1..21: mol_type = other DNA
tggcatacctcaatccccaac

SEQ ID NO: 4805 - DNA, 21 bp, synthetic construct
  source 1..21: mol_type = other DNA
gataaagggaaagggatgtat

SEQ ID NO: 4806 - DNA, 21 bp, synthetic construct
  source 1..21: mol_type = other DNA
catcgctcatggggcgacgcc

SEQ ID NO: 4807 - DNA, 21 bp, synthetic construct
  source 1..21: mol_type = other DNA
ttcgcgaaaaataatttgaat

SEQ ID NO: 4808 - DNA, 21 bp, synthetic construct
  source 1..21: mol_type = other DNA
ttctccaggaaaggggataat

SEQ ID NO: 4809 - DNA, 21 bp, synthetic construct
  source 1..21: mol_type = other DNA
tggcgcaacggcgaagccaac

SEQ ID NO: 4810 - DNA, 21 bp, synthetic construct
  source 1..21: mol_type = other DNA
cacgggcacgggacgtatacg

SEQ ID NO: 4811 - DNA, 21 bp, synthetic construct
  source 1..21: mol_type = other DNA
aattccaaagtggggagggat

SEQ ID NO: 4812 - DNA, 21 bp, synthetic construct
  source 1..21: mol_type = other DNA
tttgccaagcataacgccaac

SEQ ID NO: 4813 - DNA, 21 bp, synthetic construct
  source 1..21: mol_type = other DNA
tttgcccgccccaacaccaac

SEQ ID NO: 4814 - DNA, 21 bp, synthetic construct
  source 1..21: mol_type = other DNA
cgctcaaccggcggcgccggc

SEQ ID NO: 4815 - DNA, 21 bp, synthetic construct
  source 1..21: mol_type = other DNA
tatgggtccgggacgcagtat

SEQ ID NO: 4816 - DNA, 21 bp, synthetic construct
  source 1..21: mol_type = other DNA
caggggtccacgaattcctat

SEQ ID NO: 4817 - DNA, 21 bp, synthetic construct
  source 1..21: mol_type = other DNA
tacaacaacacctcaatgcgc

SEQ ID NO: 4818 - DNA, 21 bp, synthetic construct
  source 1..21: mol_type = other DNA
aataattatgggtccccgggg

SEQ ID NO: 4819 - DNA, 21 bp, synthetic construct
  source 1..21: mol_type = other DNA
ttcgcgaaaaataatgggaat

SEQ ID NO: 4820 - DNA, 21 bp, synthetic construct
  source 1..21: mol_type = other DNA
tacgtatcataccaagtaaac

SEQ ID NO: 4821 - DNA, 21 bp, synthetic construct
  source 1..21: mol_type = other DNA
gagatgaaacacgggcacatg

SEQ ID NO: 4822 - DNA, 21 bp, synthetic construct
  source 1..21: mol_type = other DNA
gtgagggcgaatcacacgaat

SEQ ID NO: 4823 - DNA, 21 bp, synthetic construct
  source 1..21: mol_type = other DNA
tataggccgggggcgcacgcg

SEQ ID NO: 4824 - DNA, 21 bp, synthetic construct
  source 1..21: mol_type = other DNA
ttcgcgaggaataatgataat

SEQ ID NO: 4825 - DNA, 21 bp, synthetic construct
  source 1..21: mol_type = other DNA
taccaacgcgacgtaatgcaa

SEQ ID NO: 4826 - DNA, 21 bp, synthetic construct
  source 1..21: mol_type = other DNA
tggcgctcagccgccgtaccc

SEQ ID NO: 4827 - DNA, 21 bp, synthetic construct
  source 1..21: mol_type = other DNA
tttgccaagtacggcgacaac

SEQ ID NO: 4828 - DNA, 21 bp, synthetic construct
  source 1..21: mol_type = other DNA
tatgcgagggagaatttcaat

SEQ ID NO: 4829 - DNA, 21 bp, synthetic construct
  source 1..21: mol_type = other DNA
tgtaaaaatgtgacggcggag

SEQ ID NO: 4830 - DNA, 21 bp, synthetic construct
  source 1..21: mol_type = other DNA
ctgaagtcacgcatcatcgaa

SEQ ID NO: 4831 - DNA, 21 bp, synthetic construct
  source 1..21: mol_type = other DNA
ttctccaaattcaatgataat

SEQ ID NO: 4832 - DNA, 21 bp, synthetic construct
  source 1..21: mol_type = other DNA
atgcaaccctacggctcaggc

SEQ ID NO: 4833 - DNA, 21 bp, synthetic construct
  source 1..21: mol_type = other DNA
ttcgcgaggccgaatttgaat

SEQ ID NO: 4834 - DNA, 21 bp, synthetic construct
  source 1..21: mol_type = other DNA
tactcacgccccggcgacaac

SEQ ID NO: 4835 - DNA, 21 bp, synthetic construct
  source 1..21: mol_type = other DNA
ttctccaaaccggggaataat

SEQ ID NO: 4836 - DNA, 21 bp, synthetic construct
  source 1..21: mol_type = other DNA
tataataaaacgggggcgaat

SEQ ID NO: 4837 - DNA, 21 bp, synthetic construct
  source 1..21: mol_type = other DNA
ttcgcgaaatatggggagaat

SEQ ID NO: 4838 - DNA, 21 bp, synthetic construct
  source 1..21: mol_type = other DNA
tttgccaagcataactttaac

SEQ ID NO: 4839 - DNA, 21 bp, synthetic construct
  source 1..21: mol_type = other DNA
tttgcccgccccggcatcaac

SEQ ID NO: 4840 - DNA, 21 bp, synthetic construct
  source 1..21: mol_type = other DNA
ttctccagggggggggagaat

SEQ ID NO: 4841 - DNA, 21 bp, synthetic construct
  source 1..21: mol_type = other DNA
ccggatataaataaaaggtcc

SEQ ID NO: 4842 - DNA, 21 bp, synthetic construct
  source 1..21: mol_type = other DNA
aatgcgaaatattccggggag

SEQ ID NO: 4843 - DNA, 21 bp, synthetic construct
  source 1..21: mol_type = other DNA
ttttcacgccccaacgtaaac

SEQ ID NO: 4844 - DNA, 21 bp, synthetic construct
  source 1..21: mol_type = other DNA
tatgcgaaagtgaatttgaat

SEQ ID NO: 4845 - DNA, 21 bp, synthetic construct
  source 1..21: mol_type = other DNA
cgcggcgacgtacaagcctgg

SEQ ID NO: 4846 - DNA, 21 bp, synthetic construct
  source 1..21: mol_type = other DNA
tttgccaagatcaacaacaac

SEQ ID NO: 4847 - DNA, 21 bp, synthetic construct
  source 1..21: mol_type = other DNA
ttcgcgaaaaatggggagaat

SEQ ID NO: 4848 - DNA, 21 bp, synthetic construct
  source 1..21: mol_type = other DNA
tactcaaagaccaacggcaac

SEQ ID NO: 4849 - DNA, 21 bp, synthetic construct
  source 1..21: mol_type = other DNA
ctgaacatcaactttcatggc

SEQ ID NO: 4850 - DNA, 21 bp, synthetic construct
  source 1..21: mol_type = other DNA
tcctatcacgatatgagggat

SEQ ID NO: 4851 - DNA, 21 bp, synthetic construct
  source 1..21: mol_type = other DNA
ttttcaaagcccaacgtaaac

SEQ ID NO: 4852 - DNA, 21 bp, synthetic construct
  source 1..21: mol_type = other DNA
tttgccaagaacaacatgaac

SEQ ID NO: 4853 - DNA, 21 bp, synthetic construct
  source 1..21: mol_type = other DNA
tttgccaagtggaacgaaaac

SEQ ID NO: 4854 - DNA, 21 bp, synthetic construct
  source 1..21: mol_type = other DNA
aacgtaaagggcaccacctac

SEQ ID NO: 4855 - DNA, 21 bp, synthetic construct
  source 1..21: mol_type = other DNA
ttgacgtatggggataggtcc

SEQ ID NO: 4856 - DNA, 21 bp, synthetic construct
  source 1..21: mol_type = other DNA
aaatcctcctccatgggggtg

SEQ ID NO: 4857 - DNA, 21 bp, synthetic construct
  source 1..21: mol_type = other DNA
tcagtatacggcggcgccggc

SEQ ID NO: 4858 - DNA, 21 bp, synthetic construct
  source 1..21: mol_type = other DNA
ttcgcgaaagtgaatccgaat

SEQ ID NO: 4859 - DNA, 21 bp, synthetic construct
  source 1..21: mol_type = other DNA
ttttcacgcgacaacgccaac

SEQ ID NO: 4860 - DNA, 21 bp, synthetic construct
  source 1..21: mol_type = other DNA
ttcgcgaggccggggtataat

SEQ ID NO: 4861 - DNA, 21 bp, synthetic construct
  source 1..21: mol_type = other DNA
tatgcgagggagaatccgaat

SEQ ID NO: 4862 - DNA, 21 bp, synthetic construct
  source 1..21: mol_type = other DNA
aacatgaacaactcatactca

SEQ ID NO: 4863 - DNA, 21 bp, synthetic construct
  source 1..21: mol_type = other DNA
acctcatacggccaaggctca

SEQ ID NO: 4864 - DNA, 21 bp, synthetic construct
  source 1..21: mol_type = other DNA
tttgcccgccatggcaccaac

SEQ ID NO: 4865 - DNA, 21 bp, synthetic construct
  source 1..21: mol_type = other DNA
ttctccaaaccgaattggaat

SEQ ID NO: 4866 - DNA, 21 bp, synthetic construct
  source 1..21: mol_type = other DNA
tcacgcgacaaccaacattgg

SEQ ID NO: 4867 - DNA, 21 bp, synthetic construct
  source 1..21: mol_type = other DNA
tattccaatttctcccactcc

SEQ ID NO: 4868 - DNA, 21 bp, synthetic construct
  source 1..21: mol_type = other DNA
accaagtcaggcgacaaggcc

SEQ ID NO: 4869 - DNA, 21 bp, synthetic construct
  source 1..21: mol_type = other DNA
cgcgacggccgcgactcagta

SEQ ID NO: 4870 - DNA, 21 bp, synthetic construct
  source 1..21: mol_type = other DNA
cgctcacatgccggctcagac

SEQ ID NO: 4871 - DNA, 21 bp, synthetic construct
  source 1..21: mol_type = other DNA
tacctgctgaactcacattca

SEQ ID NO: 4872 - DNA, 21 bp, synthetic construct
  source 1..21: mol_type = other DNA
aatgtgttgggggtgccggtg

SEQ ID NO: 4873 - DNA, 21 bp, synthetic construct
  source 1..21: mol_type = other DNA
tttgccaagatgaaccaaaac

SEQ ID NO: 4874 - DNA, 21 bp, synthetic construct
  source 1..21: mol_type = other DNA
tacgccaagaacaacgacaac

SEQ ID NO: 4875 - DNA, 21 bp, synthetic construct
  source 1..21: mol_type = other DNA
tttgccaagcataacaccaac

SEQ ID NO: 4876 - DNA, 21 bp, synthetic construct
  source 1..21: mol_type = other DNA
ttctccaggttcaatgggaat

SEQ ID NO: 4877 - DNA, 21 bp, synthetic construct
  source 1..21: mol_type = other DNA
tacgccaagatcaaccaaaac

SEQ ID NO: 4878 - DNA, 21 bp, synthetic construct
  source 1..21: mol_type = other DNA
tttgccaagaccaacgacaac

SEQ ID NO: 4879 - DNA, 21 bp, synthetic construct
  source 1..21: mol_type = other DNA
catggcaagacctcacgcgaa

SEQ ID NO: 4880 - DNA, 21 bp, synthetic construct
  source 1..21: mol_type = other DNA
tactcaaagcccaactcaaac

SEQ ID NO: 4881 - DNA, 21 bp, synthetic construct
  source 1..21: mol_type = other DNA
acccccatgtcaacccatttt

SEQ ID NO: 4882 - DNA, 21 bp, synthetic construct
  source 1..21: mol_type = other DNA
ctgtcacaaaccgtatcatac

SEQ ID NO: 4883 - DNA, 21 bp, synthetic construct
  source 1..21: mol_type = other DNA
cgccgcgccgaaccccaatca

SEQ ID NO: 4884 - DNA, 21 bp, synthetic construct
  source 1..21: mol_type = other DNA
tactcaaagcccggctggaac

SEQ ID NO: 4885 - DNA, 21 bp, synthetic construct
  source 1..21: mol_type = other DNA
tacgccaagtttggcaacaac

SEQ ID NO: 4886 - DNA, 21 bp, synthetic construct
  source 1..21: mol_type = other DNA
ttcgcgaaaccggggttgaat

SEQ ID NO: 4887 - DNA, 21 bp, synthetic construct
  source 1..21: mol_type = other DNA
tccaaaacgacgacgcagtat

SEQ ID NO: 4888 - DNA, 21 bp, synthetic construct
  source 1..21: mol_type = other DNA
atgaaaaatgtgtccaatttc

SEQ ID NO: 4889 - DNA, 21 bp, synthetic construct
  source 1..21: mol_type = other DNA
tatcacaggtcccacgagttg

SEQ ID NO: 4890 - DNA, 21 bp, synthetic construct
  source 1..21: mol_type = other DNA
cgcatcaccggctcatcaacc

SEQ ID NO: 4891 - DNA, 21 bp, synthetic construct
  source 1..21: mol_type = other DNA
ttttcacgccccggctcaaac

SEQ ID NO: 4892 - DNA, 21 bp, synthetic construct
  source 1..21: mol_type = other DNA
ctggcctcaaacggcgtaaac

SEQ ID NO: 4893 - DNA, 21 bp, synthetic construct
  source 1..21: mol_type = other DNA
tttgccaagatcaaccaaaac

SEQ ID NO: 4894 - DNA, 21 bp, synthetic construct
  source 1..21: mol_type = other DNA
ttcgcgagggaggggacgaat

SEQ ID NO: 4895 - DNA, 21 bp, synthetic construct
  source 1..21: mol_type = other DNA
gtgatgacgaggaatgagtgg

SEQ ID NO: 4896 - DNA, 21 bp, synthetic construct
  source 1..21: mol_type = other DNA
tttgccaaggtaaacatcaac

SEQ ID NO: 4897 - DNA, 21 bp, synthetic construct
  source 1..21: mol_type = other DNA
tttgccaagaagaacgacaac

SEQ ID NO: 4898 - DNA, 21 bp, synthetic construct
  source 1..21: mol_type = other DNA
ttctccaggatggggacgaat

SEQ ID NO: 4899 - DNA, 21 bp, synthetic construct
  source 1..21: mol_type = other DNA
tacgccaagtttggcatcaac

SEQ ID NO: 4900 - DNA, 21 bp, synthetic construct
  source 1..21: mol_type = other DNA
aacaccgactacggctacgcc

SEQ ID NO: 4901 - DNA, 21 bp, synthetic construct
  source 1..21: mol_type = other DNA
aagcatgccaacatcatcggc

SEQ ID NO: 4902 - DNA, 21 bp, synthetic construct
  source 1..21: mol_type = other DNA
aacacccgcatgaccggcgcc

SEQ ID NO: 4903 - DNA, 21 bp, synthetic construct
  source 1..21: mol_type = other DNA
tttgccaagaagaacgaaaac

SEQ ID NO: 4904 - DNA, 21 bp, synthetic construct
  source 1..21: mol_type = other DNA
cactccaggaattatacggat

SEQ ID NO: 4905 - DNA, 21 bp, synthetic construct
  source 1..21: mol_type = other DNA
ttcgcgaaacacgggacgaat

SEQ ID NO: 4906 - DNA, 21 bp, synthetic construct
  source 1..21: mol_type = other DNA
tttgccaagatcaacgccaac

SEQ ID NO: 4907 - DNA, 21 bp, synthetic construct
  source 1..21: mol_type = other DNA
tacgccaaggacggcctgaac

SEQ ID NO: 4908 - DNA, 21 bp, synthetic construct
  source 1..21: mol_type = other DNA
tttgccaagatcaaccccaac

SEQ ID NO: 4909 - DNA, 21 bp, synthetic construct
  source 1..21: mol_type = other DNA
ggccgcatggaaaagtcaacc

SEQ ID NO: 4910 - DNA, 21 bp, synthetic construct
  source 1..21: mol_type = other DNA
tatgcgaaagatgggacgaat

SEQ ID NO: 4911 - DNA, 21 bp, synthetic construct
  source 1..21: mol_type = other DNA
tttgccaagcccggcggcaac

SEQ ID NO: 4912 - DNA, 21 bp, synthetic construct
  source 1..21: mol_type = other DNA
tggaccaagtcaaacaccgcc

SEQ ID NO: 4913 - DNA, 21 bp, synthetic construct
  source 1..21: mol_type = other DNA
ataaggaatataacgggggag

SEQ ID NO: 4914 - DNA, 21 bp, synthetic construct
  source 1..21: mol_type = other DNA
tggacgaaagcgaatgatcac

SEQ ID NO: 4915 - DNA, 21 bp, synthetic construct
  source 1..21: mol_type = other DNA
tatgcgaaagataatccgaat

SEQ ID NO: 4916 - DNA, 21 bp, synthetic construct
  source 1..21: mol_type = other DNA
tttgcccgcgacaaccataac

SEQ ID NO: 4917 - DNA, 21 bp, synthetic construct
  source 1..21: mol_type = other DNA
tcacccaccggccgcgccgcc

SEQ ID NO: 4918 - DNA, 21 bp, synthetic construct
  source 1..21: mol_type = other DNA
ggggtgtccaatatgatggtg

SEQ ID NO: 4919 - DNA, 21 bp, synthetic construct
  source 1..21: mol_type = other DNA
ggcgacaacaagcccaactgg

SEQ ID NO: 4920 - DNA, 21 bp, synthetic construct
  source 1..21: mol_type = other DNA
atcatggtacgcgacaccaag

SEQ ID NO: 4921 - DNA, 21 bp, synthetic construct
  source 1..21: mol_type = other DNA
ttggagtcctccagggggtat

SEQ ID NO: 4922 - DNA, 21 bp, synthetic construct
  source 1..21: mol_type = other DNA
ttctccaaaccggggcagaat

SEQ ID NO: 4923 - DNA, 21 bp, synthetic construct
  source 1..21: mol_type = other DNA
tccagggggttgaatccgtcc

SEQ ID NO: 4924 - DNA, 21 bp, synthetic construct
  source 1..21: mol_type = other DNA
atcgccggcctgaacaaggcc

SEQ ID NO: 4925 - DNA, 21 bp, synthetic construct
  source 1..21: mol_type = other DNA
aaggtaaacggcggctcaggc

SEQ ID NO: 4926 - DNA, 21 bp, synthetic construct
  source 1..21: mol_type = other DNA
gtatcaaacaacatccgcggc

SEQ ID NO: 4927 - DNA, 21 bp, synthetic construct
  source 1..21: mol_type = other DNA
tcatcaaagggcaccaacgcc

SEQ ID NO: 4928 - DNA, 21 bp, synthetic construct
  source 1..21: mol_type = other DNA
ttttcacgcgacggcgtaaac

SEQ ID NO: 4929 - DNA, 21 bp, synthetic construct
  source 1..21: mol_type = other DNA
ttttcaaagcccaacatgaac

SEQ ID NO: 4930 - DNA, 21 bp, synthetic construct
  source 1..21: mol_type = other DNA
ttcgcgaaagataatataaat

SEQ ID NO: 4931 - DNA, 21 bp, synthetic construct
  source 1..21: mol_type = other DNA
accaagcatggcgccgacgta

SEQ ID NO: 4932 - DNA, 21 bp, synthetic construct
  source 1..21: mol_type = other DNA
gatcagaataaaaatacgtgg

SEQ ID NO: 4933 - DNA, 21 bp, synthetic construct
  source 1..21: mol_type = other DNA
tactcaaaggaaaacgtaaac

SEQ ID NO: 4934 - DNA, 21 bp, synthetic construct
  source 1..21: mol_type = other DNA
catggccccaactcatacggc

SEQ ID NO: 4935 - DNA, 21 bp, synthetic construct
  source 1..21: mol_type = other DNA
ggcaactcaaacaccgcccat

SEQ ID NO: 4936 - DNA, 21 bp, synthetic construct
  source 1..21: mol_type = other DNA
cattacggcgacaagtaccaa

SEQ ID NO: 4937 - DNA, 21 bp, synthetic construct
  source 1..21: mol_type = other DNA
tataggtccacggtggcggat

SEQ ID NO: 4938 - DNA, 21 bp, synthetic construct
  source 1..21: mol_type = other DNA
ttctccaggaataatccgaat

SEQ ID NO: 4939 - DNA, 21 bp, synthetic construct
  source 1..21: mol_type = other DNA
taccgccccggctcaggcgac

SEQ ID NO: 4940 - DNA, 21 bp, synthetic construct
  source 1..21: mol_type = other DNA
aacaagacctggggcgacgcc

SEQ ID NO: 4941 - DNA, 21 bp, synthetic construct
  source 1..21: mol_type = other DNA
accggcaccaacaccacctac

SEQ ID NO: 4942 - DNA, 21 bp, synthetic construct
  source 1..21: mol_type = other DNA
gaagcccccgccaaccgcaac

SEQ ID NO: 4943 - DNA, 21 bp, synthetic construct
  source 1..21: mol_type = other DNA
ttctccaaagaggggatgaat

SEQ ID NO: 4944 - DNA, 21 bp, synthetic construct
  source 1..21: mol_type = other DNA
ggggatgagtccaggtattat

SEQ ID NO: 4945 - DNA, 21 bp, synthetic construct
  source 1..21: mol_type = other DNA
ttttcacgccataacatgaac

SEQ ID NO: 4946 - DNA, 21 bp, synthetic construct
  source 1..21: mol_type = other DNA
tacctgaacaagtcatacgac

SEQ ID NO: 4947 - DNA, 21 bp, synthetic construct
  source 1..21: mol_type = other DNA
ttctccaaaccggggacgaat

SEQ ID NO: 4948 - DNA, 21 bp, synthetic construct
  source 1..21: mol_type = other DNA
tttgccaagtttaacgaaaac

SEQ ID NO: 4949 - DNA, 21 bp, synthetic construct
  source 1..21: mol_type = other DNA
ttttcaaagcccaacaacaac

SEQ ID NO: 4950 - DNA, 21 bp, synthetic construct
  source 1..21: mol_type = other DNA
ggctttcgcggcgacggcgcc

SEQ ID NO: 4951 - DNA, 21 bp, synthetic construct
  source 1..21: mol_type = other DNA
tttgcccgccataacatgaac

SEQ ID NO: 4952 - DNA, 21 bp, synthetic construct
  source 1..21: mol_type = other DNA
tactcaggctcatcatacgcc

SEQ ID NO: 4953 - DNA, 21 bp, synthetic construct
  source 1..21: mol_type = other DNA
tggttgaaacacgaggcgtcc

SEQ ID NO: 4954 - DNA, 21 bp, synthetic construct
  source 1..21: mol_type = other DNA
tttgccaagcccggcatgaac

SEQ ID NO: 4955 - DNA, 21 bp, synthetic construct
  source 1..21: mol_type = other DNA
aaaacggagtccgataatagg

SEQ ID NO: 4956 - DNA, 21 bp, synthetic construct
  source 1..21: mol_type = other DNA
gtgaaaaggtccgagccgata

SEQ ID NO: 4957 - DNA, 21 bp, synthetic construct
  source 1..21: mol_type = other DNA
ttttcacgcgacaaccaaaac

SEQ ID NO: 4958 - DNA, 21 bp, synthetic construct
  source 1..21: mol_type = other DNA
ttttcacgccccggccaaaac

SEQ ID NO: 4959 - DNA, 21 bp, synthetic construct
  source 1..21: mol_type = other DNA
tttgcccgcgacaacgccaac

SEQ ID NO: 4960 - DNA, 21 bp, synthetic construct
  source 1..21: mol_type = other DNA
tattataaaaatggggcggcg

SEQ ID NO: 4961 - DNA, 21 bp, synthetic construct
  source 1..21: mol_type = other DNA
ttcgcgagggagaattggaat

SEQ ID NO: 4962 - DNA, 21 bp, synthetic construct
  source 1..21: mol_type = other DNA
ttctccaaaccggggtggaat

SEQ ID NO: 4963 - DNA, 21 bp, synthetic construct
  source 1..21: mol_type = other DNA
tttgccaaggacaacgccaac

SEQ ID NO: 4964 - DNA, 21 bp, synthetic construct
  source 1..21: mol_type = other DNA
aagcccaacggctaccccgcc

SEQ ID NO: 4965 - DNA, 21 bp, synthetic construct
  source 1..21: mol_type = other DNA
ttcgcgaaattgggggagaat

SEQ ID NO: 4966 - DNA, 21 bp, synthetic construct
  source 1..21: mol_type = other DNA
ttcgcgaaagatggggagaat

SEQ ID NO: 4967 - DNA, 21 bp, synthetic construct
  source 1..21: mol_type = other DNA
ttcgcgagggagaatgataat

SEQ ID NO: 4968 - DNA, 21 bp, synthetic construct
  source 1..21: mol_type = other DNA
cgcaagtcagaaaccggcggc

SEQ ID NO: 4969 - DNA, 21 bp, synthetic construct
  source 1..21: mol_type = other DNA
cgcaacgaaggcgccgccggc

SEQ ID NO: 4970 - DNA, 21 bp, synthetic construct
  source 1..21: mol_type = other DNA
ttcgcgaaagatgggtccaat

SEQ ID NO: 4971 - DNA, 21 bp, synthetic construct
  source 1..21: mol_type = other DNA
tgggaaaacaagcaagcctgg

SEQ ID NO: 4972 - DNA, 21 bp, synthetic construct
  source 1..21: mol_type = other DNA
ttctccaaagataatcagaat

SEQ ID NO: 4973 - DNA, 21 bp, synthetic construct
  source 1..21: mol_type = other DNA
gacggcggccgcggccgcgac

SEQ ID NO: 4974 - DNA, 21 bp, synthetic construct
  source 1..21: mol_type = other DNA
ttttcaaagtacaaccccaac

SEQ ID NO: 4975 - DNA, 21 bp, synthetic construct
  source 1..21: mol_type = other DNA
ttttcacgccgcggcgacaac

SEQ ID NO: 4976 - DNA, 21 bp, synthetic construct
  source 1..21: mol_type = other DNA
ttctccaaattcgggcacaat

SEQ ID NO: 4977 - DNA, 21 bp, synthetic construct
  source 1..21: mol_type = other DNA
tattccaggtatgggccgaat

SEQ ID NO: 4978 - DNA, 21 bp, synthetic construct
  source 1..21: mol_type = other DNA
ttcgcgaggttcaataataat

SEQ ID NO: 4979 - DNA, 21 bp, synthetic construct
  source 1..21: mol_type = other DNA
tttgcccgctttaacgccaac

SEQ ID NO: 4980 - DNA, 21 bp, synthetic construct
  source 1..21: mol_type = other DNA
tattccaaatgggggcagaat

SEQ ID NO: 4981 - DNA, 21 bp, synthetic construct
  source 1..21: mol_type = other DNA
tattccaaatggaatgggaat

SEQ ID NO: 4982 - DNA, 21 bp, synthetic construct
  source 1..21: mol_type = other DNA
ttttcacgctacaaccaaaac

SEQ ID NO: 4983 - DNA, 21 bp, synthetic construct
  source 1..21: mol_type = other DNA
tacgcccgccccaactacaac

SEQ ID NO: 4984 - DNA, 21 bp, synthetic construct
  source 1..21: mol_type = other DNA
tattccaggaggaatgagaat

SEQ ID NO: 4985 - DNA, 21 bp, synthetic construct
  source 1..21: mol_type = other DNA
ttttcaaaggccaactggaac

SEQ ID NO: 4986 - DNA, 21 bp, synthetic construct
  source 1..21: mol_type = other DNA
ttcgcgagggagaattataat

SEQ ID NO: 4987 - DNA, 21 bp, synthetic construct
  source 1..21: mol_type = other DNA
tacgcccgctttggcaacaac

SEQ ID NO: 4988 - DNA, 21 bp, synthetic construct
  source 1..21: mol_type = other DNA
ttttcacgccccggctttaac

SEQ ID NO: 4989 - DNA, 21 bp, synthetic construct
  source 1..21: mol_type = other DNA
ttctccaaagcgaattataat

SEQ ID NO: 4990 - DNA, 21 bp, synthetic construct
  source 1..21: mol_type = other DNA
tattccaaaataaatataaat

SEQ ID NO: 4991 - DNA, 21 bp, synthetic construct
  source 1..21: mol_type = other DNA
tatgcgaaatccaattataat

SEQ ID NO: 4992 - DNA, 21 bp, synthetic construct
  source 1..21: mol_type = other DNA
ttgcacgcgaggaatataaat

SEQ ID NO: 4993 - DNA, 21 bp, synthetic construct
  source 1..21: mol_type = other DNA
tatgcgaaaacgaatataaat

SEQ ID NO: 4994 - DNA, 21 bp, synthetic construct
  source 1..21: mol_type = other DNA
tatgcgaaatccgggtataat

SEQ ID NO: 4995 - DNA, 21 bp, synthetic construct
  source 1..21: mol_type = other DNA
ttctccaaagtggggataaat

SEQ ID NO: 4996 - DNA, 21 bp, synthetic construct
  source 1..21: mol_type = other DNA
tatgcgaaaaatgggaataat

SEQ ID NO: 4997 - DNA, 21 bp, synthetic construct
  source 1..21: mol_type = other DNA
tatgcgaggccggggaataat

SEQ ID NO: 4998 - DNA, 21 bp, synthetic construct
  source 1..21: mol_type = other DNA
tatgcgaaaccggggataaat

SEQ ID NO: 4999 - DNA, 21 bp, synthetic construct
  source 1..21: mol_type = other DNA
tattccaggcacggggcgaat

SEQ ID NO: 5000 - DNA, 21 bp, synthetic construct
  source 1..21: mol_type = other DNA
tatgcgaaaatggggaataat

SEQ ID NO: 5001 - DNA, 21 bp, synthetic construct
  source 1..21: mol_type = other DNA
ttcgcgaggaatgggaataat

SEQ ID NO: 5002 - DNA, 21 bp, synthetic construct
  source 1..21: mol_type = other DNA
tttgccaagggcggccccaac

SEQ ID NO: 5003 - DNA, 21 bp, synthetic construct
  source 1..21: mol_type = other DNA
tattccaaaacggggataaat

SEQ ID NO: 5004 - DNA, 21 bp, synthetic construct
  source 1..21: mol_type = other DNA
tatgcgaaagtggggaataat

SEQ ID NO: 5005 - DNA, 21 bp, synthetic construct
  source 1..21: mol_type = other DNA
tattccaaagcggggtccaat

SEQ ID NO: 5006 - DNA, 21 bp, synthetic construct
  source 1..21: mol_type = other DNA
tattccagggcgaatttgaat

SEQ ID NO: 5007 - DNA, 21 bp, synthetic construct
  source 1..21: mol_type = other DNA
tattccaggccggggccgaat

SEQ ID NO: 5008 - DNA, 21 bp, synthetic construct
  source 1..21: mol_type = other DNA
ttcgcgaggacggggcacaat

SEQ ID NO: 5009 - DNA, 21 bp, synthetic construct
  source 1..21: mol_type = other DNA
gtggcgatgagggggataggg

SEQ ID NO: 5010 - DNA, 21 bp, synthetic construct
  source 1..21: mol_type = other DNA
ttgtccaaagtggggcagaat

SEQ ID NO: 5011 - DNA, 21 bp, synthetic construct
  source 1..21: mol_type = other DNA
accaactacggccgcccctca

SEQ ID NO: 5012 - DNA, 21 bp, synthetic construct
  source 1..21: mol_type = other DNA
tacgcccgccaaaactttaac

SEQ ID NO: 5013 - DNA, 21 bp, synthetic construct
  source 1..21: mol_type = other DNA
tatgcgaggcagggggcgaat

SEQ ID NO: 5014 - DNA, 21 bp, synthetic construct
  source 1..21: mol_type = other DNA
tatgcgaggataaattataat

SEQ ID NO: 5015 - DNA, 21 bp, synthetic construct
  source 1..21: mol_type = other DNA
tacgccaagcaaggccataac

SEQ ID NO: 5016 - DNA, 21 bp, synthetic construct
  source 1..21: mol_type = other DNA
ctgcataagtcaggcatgaac

SEQ ID NO: 5017 - DNA, 21 bp, synthetic construct
  source 1..21: mol_type = other DNA
tccacgtcctcctccgggagg

SEQ ID NO: 5018 - DNA, 21 bp, synthetic construct
  source 1..21: mol_type = other DNA
tatgcgagggagaataggaat

SEQ ID NO: 5019 - DNA, 21 bp, synthetic construct
  source 1..21: mol_type = other DNA
ttctccagggtggggttcaat

SEQ ID NO: 5020 - DNA, 21 bp, synthetic construct
  source 1..21: mol_type = other DNA
ttttcaaagatcggctttaac

SEQ ID NO: 5021 - DNA, 21 bp, synthetic construct
  source 1..21: mol_type = other DNA
ttctccaggataggggcgaat

SEQ ID NO: 5022 - DNA, 21 bp, synthetic construct
  source 1..21: mol_type = other DNA
tacgccaagatgggccccaac

SEQ ID NO: 5023 - DNA, 21 bp, synthetic construct
  source 1..21: mol_type = other DNA
tactcaaagctgggccaaaac

SEQ ID NO: 5024 - DNA, 21 bp, synthetic construct
  source 1..21: mol_type = other DNA
ttgtccaaagcgaatgtgaat

SEQ ID NO: 5025 - DNA, 21 bp, synthetic construct
  source 1..21: mol_type = other DNA
tattccaaacaggggaataat

SEQ ID NO: 5026 - DNA, 21 bp, synthetic construct
  source 1..21: mol_type = other DNA
tactcaaaggccaacctgaac

SEQ ID NO: 5027 - DNA, 21 bp, synthetic construct
  source 1..21: mol_type = other DNA
caccagtcctccaatggggtg

SEQ ID NO: 5028 - DNA, 21 bp, synthetic construct
  source 1..21: mol_type = other DNA
ttcgcgaaagggaatttcaat

SEQ ID NO: 5029 - DNA, 21 bp, synthetic construct
  source 1..21: mol_type = other DNA
ttctccaaattgaatttcaat

SEQ ID NO: 5030 - DNA, 21 bp, synthetic construct
  source 1..21: mol_type = other DNA
tattccagggggaatacgaat

SEQ ID NO: 5031 - DNA, 21 bp, synthetic construct
  source 1..21: mol_type = other DNA
ttcgcgaaaggggggttcaat

SEQ ID NO: 5032 - DNA, 21 bp, synthetic construct
  source 1..21: mol_type = other DNA
tatgcgaggtccaattccaat

SEQ ID NO: 5033 - DNA, 21 bp, synthetic construct
  source 1..21: mol_type = other DNA
ctgtcaaagatcggctcaaac

SEQ ID NO: 5034 - DNA, 21 bp, synthetic construct
  source 1..21: mol_type = other DNA
gggtcctccacgtccatatgg

SEQ ID NO: 5035 - DNA, 21 bp, synthetic construct
  source 1..21: mol_type = other DNA
tattccaaacaggggcagaat

SEQ ID NO: 5036 - DNA, 21 bp, synthetic construct
  source 1..21: mol_type = other DNA
ttttcacgctcaggcatgaac

SEQ ID NO: 5037 - DNA, 21 bp, synthetic construct
  source 1..21: mol_type = other DNA
tacgccaagctgggcgccaac

SEQ ID NO: 5038 - DNA, 21 bp, synthetic construct
  source 1..21: mol_type = other DNA
tacgcccgcatgaacctgaac

SEQ ID NO: 5039 - DNA, 21 bp, synthetic construct
  source 1..21: mol_type = other DNA
ttcgcgaggtccgggtccaat

SEQ ID NO: 5040 - DNA, 21 bp, synthetic construct
  source 1..21: mol_type = other DNA
tatgcgaaatatgggaataat

SEQ ID NO: 5041 - DNA, 21 bp, synthetic construct
  source 1..21: mol_type = other DNA
tactcaaagatgggcatcaac

SEQ ID NO: 5042 - DNA, 21 bp, synthetic construct
  source 1..21: mol_type = other DNA
ttcgcgagggagaataggaat

SEQ ID NO: 5043 - DNA, 21 bp, synthetic construct
  source 1..21: mol_type = other DNA
tattccaggacgggggagaat

SEQ ID NO: 5044 - DNA, 21 bp, synthetic construct
  source 1..21: mol_type = other DNA
tactcaaagggcaactacaac

SEQ ID NO: 5045 - DNA, 21 bp, synthetic construct
  source 1..21: mol_type = other DNA
tactcaaaggtaggccaaaac

SEQ ID NO: 5046 - DNA, 21 bp, synthetic construct
  source 1..21: mol_type = other DNA
ttgtccaaaaatgggccgaat

SEQ ID NO: 5047 - DNA, 21 bp, synthetic construct
  source 1..21: mol_type = other DNA
tatgcgagggcgaatacgaat

SEQ ID NO: 5048 - DNA, 21 bp, synthetic construct
  source 1..21: mol_type = other DNA
tatgcgaggcagaatgcgaat

SEQ ID NO: 5049 - DNA, 21 bp, synthetic construct
  source 1..21: mol_type = other DNA
gcgatgtccacgaatgggagg

SEQ ID NO: 5050 - DNA, 21 bp, synthetic construct
  source 1..21: mol_type = other DNA
ctggccaagatgggcgccaac

SEQ ID NO: 5051 - DNA, 21 bp, synthetic construct
  source 1..21: mol_type = other DNA
ccctacgccaagtcagaactg

SEQ ID NO: 5052 - DNA, 21 bp, synthetic construct
  source 1..21: mol_type = other DNA
tacgccaaggccaactttaac

SEQ ID NO: 5053 - DNA, 21 bp, synthetic construct
  source 1..21: mol_type = other DNA
acccaatcaaccaacggcatc

SEQ ID NO: 5054 - DNA, 21 bp, synthetic construct
  source 1..21: mol_type = other DNA
tatgcgaggatagggttgaat

SEQ ID NO: 5055 - DNA, 21 bp, synthetic construct
  source 1..21: mol_type = other DNA
tatgcgaggttgggggagaat

SEQ ID NO: 5056 - DNA, 21 bp, synthetic construct
  source 1..21: mol_type = other DNA
tactcacgcgccaaccaaaac

SEQ ID NO: 5057 - DNA, 21 bp, synthetic construct
  source 1..21: mol_type = other DNA
tatgcgaaaccggggccgaat

SEQ ID NO: 5058 - DNA, 21 bp, synthetic construct
  source 1..21: mol_type = other DNA
tacgccaaggccggccataac

SEQ ID NO: 5059 - DNA, 21 bp, synthetic construct
  source 1..21: mol_type = other DNA
ttcgcgaaaggggggaataat

SEQ ID NO: 5060 - DNA, 21 bp, synthetic construct
  source 1..21: mol_type = other DNA
ccggcgtccacgaatggggtg

SEQ ID NO: 5061 - DNA, 21 bp, synthetic construct
  source 1..21: mol_type = other DNA
gtactgtcatcaaacggcgta

SEQ ID NO: 5062 - DNA, 21 bp, synthetic construct
  source 1..21: mol_type = other DNA
tattccaaaacggggccgaat

SEQ ID NO: 5063 - DNA, 21 bp, synthetic construct
  source 1..21: mol_type = other DNA
tattccaaaatgaatgataat

SEQ ID NO: 5064 - DNA, 21 bp, synthetic construct
  source 1..21: mol_type = other DNA
tatgcgaggtccaatgcgaat

SEQ ID NO: 5065 - DNA, 21 bp, synthetic construct
  source 1..21: mol_type = other DNA
tattccaggttgggggataat

SEQ ID NO: 5066 - DNA, 21 bp, synthetic construct
  source 1..21: mol_type = other DNA
tatgcgaaaggggggccgaat

SEQ ID NO: 5067 - DNA, 21 bp, synthetic construct
  source 1..21: mol_type = other DNA
tattccaaaaatgggccgaat

SEQ ID NO: 5068 - DNA, 21 bp, synthetic construct
  source 1..21: mol_type = other DNA
tattccaaacagggggcgaat

SEQ ID NO: 5069 - DNA, 21 bp, synthetic construct
  source 1..21: mol_type = other DNA
ctgtcaaaggccaacatcaac

SEQ ID NO: 5070 - DNA, 21 bp, synthetic construct
  source 1..21: mol_type = other DNA
caggtgtccacgaatgggata

SEQ ID NO: 5071 - DNA, 21 bp, synthetic construct
  source 1..21: mol_type = other DNA
tactcaaagaacggcatgaac

SEQ ID NO: 5072 - DNA, 21 bp, synthetic construct
  source 1..21: mol_type = other DNA
tattccaaaatgaatgcgaat

SEQ ID NO: 5073 - DNA, 21 bp, synthetic construct
  source 1..21: mol_type = other DNA
ttctccaaaatagggttgaat

SEQ ID NO: 5074 - DNA, 21 bp, synthetic construct
  source 1..21: mol_type = other DNA
tattccaaagtggggttgaat

SEQ ID NO: 5075 - DNA, 21 bp, synthetic construct
  source 1..21: mol_type = other DNA
tatgcgaaacaggggatgaat

SEQ ID NO: 5076 - DNA, 21 bp, synthetic construct
  source 1..21: mol_type = other DNA
acggtgtccacgaatggggtg

SEQ ID NO: 5077 - DNA, 21 bp, synthetic construct
  source 1..21: mol_type = other DNA
ctggccaaggccggcgccaac

SEQ ID NO: 5078 - DNA, 21 bp, synthetic construct
  source 1..21: mol_type = other DNA
tattccaaacaggggcacaat

SEQ ID NO: 5079 - DNA, 21 bp, synthetic construct
  source 1..21: mol_type = other DNA
tatgcgaaatccggggataat

SEQ ID NO: 5080 - DNA, 21 bp, synthetic construct
  source 1..21: mol_type = other DNA
ctgtcaaaggccggcaacaac

SEQ ID NO: 5081 - DNA, 21 bp, synthetic construct
  source 1..21: mol_type = other DNA
tccaaatccacgaatggggtg

SEQ ID NO: 5082 - DNA, 21 bp, synthetic construct
  source 1..21: mol_type = other DNA
ttttcaaaggtaggctttaac

SEQ ID NO: 5083 - DNA, 21 bp, synthetic construct
  source 1..21: mol_type = other DNA
ttctccaggataggggagaat

SEQ ID NO: 5084 - DNA, 21 bp, synthetic construct
  source 1..21: mol_type = other DNA
tactcacgcgtaaacctgaac

SEQ ID NO: 5085 - DNA, 21 bp, synthetic construct
  source 1..21: mol_type = other DNA
tatgcgaaaatggggatgaat

SEQ ID NO: 5086 - DNA, 21 bp, synthetic construct
  source 1..21: mol_type = other DNA
tttgccaagtcaggctacaac

SEQ ID NO: 5087 - DNA, 21 bp, synthetic construct
  source 1..21: mol_type = other DNA
tacgccaagaacggctttaac

SEQ ID NO: 5088 - DNA, 21 bp, synthetic construct
  source 1..21: mol_type = other DNA
ttcgcgaaatccgggcagaat

SEQ ID NO: 5089 - DNA, 21 bp, synthetic construct
  source 1..21: mol_type = other DNA
ctgtcaaagctgaacaccaac

SEQ ID NO: 5090 - DNA, 21 bp, synthetic construct
  source 1..21: mol_type = other DNA
ttggcgaaagcggggttcaat

SEQ ID NO: 5091 - DNA, 21 bp, synthetic construct
  source 1..21: mol_type = other DNA
tatatgtccacgaatggggtg

SEQ ID NO: 5092 - DNA, 21 bp, synthetic construct
  source 1..21: mol_type = other DNA
ctgtcacgcaccggccaaaac

SEQ ID NO: 5093 - DNA, 21 bp, synthetic construct
  source 1..21: mol_type = other DNA
atgcgcaacggcaccatgtca

SEQ ID NO: 5094 - DNA, 21 bp, synthetic construct
  source 1..21: mol_type = other DNA
tacgccaagtcaggctttaac

SEQ ID NO: 5095 - DNA, 21 bp, synthetic construct
  source 1..21: mol_type = other DNA
tactcaaagatcggcggcaac

SEQ ID NO: 5096 - DNA, 21 bp, synthetic construct
  source 1..21: mol_type = other DNA
tacgccaagggcggcctgaac

SEQ ID NO: 5097 - DNA, 21 bp, synthetic construct
  source 1..21: mol_type = other DNA
ctgtcaaagtcaggcgtaaac

SEQ ID NO: 5098 - DNA, 21 bp, synthetic construct
  source 1..21: mol_type = other DNA
catgtatcaaccaacggcatc

SEQ ID NO: 5099 - DNA, 21 bp, synthetic construct
  source 1..21: mol_type = other DNA
ttgtccaaagtggcggtgaat

SEQ ID NO: 5100 - DNA, 21 bp, synthetic construct
  source 1..21: mol_type = other DNA
ttggcgagggtgggggcgaat

SEQ ID NO: 5101 - DNA, 21 bp, synthetic construct
  source 1..21: mol_type = other DNA
ttgtccagggcggggccgttg

SEQ ID NO: 5102 - DNA, 21 bp, synthetic construct
  source 1..21: mol_type = other DNA
ttctccaaacagaatcacaat

SEQ ID NO: 5103 - DNA, 21 bp, synthetic construct
  source 1..21: mol_type = other DNA
atcatctcaaccaacggcgta

SEQ ID NO: 5104 - DNA, 21 bp, synthetic construct
  source 1..21: mol_type = other DNA
tactcacgccaaggcggcaac

SEQ ID NO: 5105 - DNA, 21 bp, synthetic construct
  source 1..21: mol_type = other DNA
acgttgtccacgaatggggtg

SEQ ID NO: 5106 - DNA, 21 bp, synthetic construct
  source 1..21: mol_type = other DNA
tattccaaatccaatttcaat

SEQ ID NO: 5107 - DNA, 21 bp, synthetic construct
  source 1..21: mol_type = other DNA
tatgcgaaaacggggacgaat

SEQ ID NO: 5108 - DNA, 21 bp, synthetic construct
  source 1..21: mol_type = other DNA
gtgtattccacgaatgggata

SEQ ID NO: 5109 - DNA, 21 bp, synthetic construct
  source 1..21: mol_type = other DNA
ttttcaaaggtaggctcaaac

SEQ ID NO: 5110 - DNA, 21 bp, synthetic construct
  source 1..21: mol_type = other DNA
tatatgtcctccaatggggtg

SEQ ID NO: 5111 - DNA, 21 bp, synthetic construct
  source 1..21: mol_type = other DNA
ttgtccaaacacaatttcaat

SEQ ID NO: 5112 - DNA, 21 bp, synthetic construct
  source 1..21: mol_type = other DNA
ttctccaaattggggatgaat

SEQ ID NO: 5113 - DNA, 21 bp, synthetic construct
  source 1..21: mol_type = other DNA
ttttcacgcctgaacgaaaac

SEQ ID NO: 5114 - DNA, 21 bp, synthetic construct
  source 1..21: mol_type = other DNA
tatgcgaaacagaatttcaat

SEQ ID NO: 5115 - DNA, 21 bp, synthetic construct
  source 1..21: mol_type = other DNA
ctgtcaaaggccaacctgaac

SEQ ID NO: 5116 - DNA, 21 bp, synthetic construct
  source 1..21: mol_type = other DNA
cagatatccacgaatgggagg

SEQ ID NO: 5117 - DNA, 21 bp, synthetic construct
  source 1..21: mol_type = other DNA
tatgcgaaagggaatgcgaat

SEQ ID NO: 5118 - DNA, 21 bp, synthetic construct
  source 1..21: mol_type = other DNA
ctggccaaggtaggctttaac

SEQ ID NO: 5119 - DNA, 21 bp, synthetic construct
  source 1..21: mol_type = other DNA
ttcaggtccacgaatggggtg

SEQ ID NO: 5120 - DNA, 21 bp, synthetic construct
  source 1..21: mol_type = other DNA
tattccagggcgggggagaat

SEQ ID NO: 5121 - DNA, 21 bp, synthetic construct
  source 1..21: mol_type = other DNA
ctgtcaaagaccggcaccaac

SEQ ID NO: 5122 - DNA, 21 bp, synthetic construct
  source 1..21: mol_type = other DNA
acgaggtccgggttgaatgcg

SEQ ID NO: 5123 - DNA, 21 bp, synthetic construct
  source 1..21: mol_type = other DNA
tactcaaagctgggcctgaac

SEQ ID NO: 5124 - DNA, 21 bp, synthetic construct
  source 1..21: mol_type = other DNA
tattccaaagtgaatacgaat

SEQ ID NO: 5125 - DNA, 21 bp, synthetic construct
  source 1..21: mol_type = other DNA
tactcaaagctggcccccaac

SEQ ID NO: 5126 - DNA, 21 bp, synthetic construct
  source 1..21: mol_type = other DNA
tattccaggatgaatgagaat

SEQ ID NO: 5127 - DNA, 21 bp, synthetic construct
  source 1..21: mol_type = other DNA
ctgtcaaagtcaggcatcaac

SEQ ID NO: 5128 - DNA, 21 bp, synthetic construct
  source 1..21: mol_type = other DNA
acgttctccacgaatgggata

SEQ ID NO: 5129 - DNA, 21 bp, synthetic construct
  source 1..21: mol_type = other DNA
tatgcgaaaacggggtccaat

SEQ ID NO: 5130 - DNA, 21 bp, synthetic construct
  source 1..21: mol_type = other DNA
tattccaaattcaatgataat

SEQ ID NO: 5131 - DNA, 21 bp, synthetic construct
  source 1..21: mol_type = other DNA
tattcctccacgaatgggata

SEQ ID NO: 5132 - DNA, 21 bp, synthetic construct
  source 1..21: mol_type = other DNA
tattccaggaatggggggaat

SEQ ID NO: 5133 - DNA, 21 bp, synthetic construct
  source 1..21: mol_type = other DNA
tttgcccgcggcaacaccaac

SEQ ID NO: 5134 - DNA, 21 bp, synthetic construct
  source 1..21: mol_type = other DNA
tacgccaagcatggcaacaac

SEQ ID NO: 5135 - DNA, 21 bp, synthetic construct
  source 1..21: mol_type = other DNA
ctgtcacgcatgaacatgaac

SEQ ID NO: 5136 - DNA, 21 bp, synthetic construct
  source 1..21: mol_type = other DNA
tactcaaagctgggcggcaac

SEQ ID NO: 5137 - DNA, 21 bp, synthetic construct
  source 1..21: mol_type = other DNA
ttctccagggtgggggagaat

SEQ ID NO: 5138 - DNA, 21 bp, synthetic construct
  source 1..21: mol_type = other DNA
ctggccaagcatggcgtaaac

SEQ ID NO: 5139 - DNA, 21 bp, synthetic construct
  source 1..21: mol_type = other DNA
ttgtccaaattgaatgagaat

SEQ ID NO: 5140 - DNA, 21 bp, synthetic construct
  source 1..21: mol_type = other DNA
ttcgcgaaacaggggccgaat

SEQ ID NO: 5141 - DNA, 21 bp, synthetic construct
  source 1..21: mol_type = other DNA
cactcctcctccaatggggtg

SEQ ID NO: 5142 - DNA, 21 bp, synthetic construct
  source 1..21: mol_type = other DNA
ttgtccagggcgaatgataat

SEQ ID NO: 5143 - DNA, 21 bp, synthetic construct
  source 1..21: mol_type = other DNA
ttcgcgagggataataggaat

SEQ ID NO: 5144 - DNA, 21 bp, synthetic construct
  source 1..21: mol_type = other DNA
ttgtccaggacgaatgataat

SEQ ID NO: 5145 - DNA, 21 bp, synthetic construct
  source 1..21: mol_type = other DNA
atgcagtccacgaatgggata

SEQ ID NO: 5146 - DNA, 21 bp, synthetic construct
  source 1..21: mol_type = other DNA
tactcaaagatgaaccaaaac

SEQ ID NO: 5147 - DNA, 21 bp, synthetic construct
  source 1..21: mol_type = other DNA
ttttcacgcaacggcgtaaac

SEQ ID NO: 5148 - DNA, 21 bp, synthetic construct
  source 1..21: mol_type = other DNA
tatgcgaaaaatggggataat

SEQ ID NO: 5149 - DNA, 21 bp, synthetic construct
  source 1..21: mol_type = other DNA
tactcaaaggtacaaaccaac

SEQ ID NO: 5150 - DNA, 21 bp, synthetic construct
  source 1..21: mol_type = other DNA
ctggcccgccaaggctcaaac

SEQ ID NO: 5151 - DNA, 21 bp, synthetic construct
  source 1..21: mol_type = other DNA
tacgccaagcaaggcatcaac

SEQ ID NO: 5152 - DNA, 21 bp, synthetic construct
  source 1..21: mol_type = other DNA
tacgcccgcggcggccaaaac

SEQ ID NO: 5153 - DNA, 21 bp, synthetic construct
  source 1..21: mol_type = other DNA
tatgcgtccacgaatgggata

SEQ ID NO: 5154 - DNA, 21 bp, synthetic construct
  source 1..21: mol_type = other DNA
ttctccaaattgggggtgaat

SEQ ID NO: 5155 - DNA, 21 bp, synthetic construct
  source 1..21: mol_type = other DNA
tactcaaagcaaggctggaac

SEQ ID NO: 5156 - DNA, 21 bp, synthetic construct
  source 1..21: mol_type = other DNA
acctggtcaaccaacggcgta

SEQ ID NO: 5157 - DNA, 21 bp, synthetic construct
  source 1..21: mol_type = other DNA
tatgcgaaaaatggggcgaat

SEQ ID NO: 5158 - DNA, 21 bp, synthetic construct
  source 1..21: mol_type = other DNA
ttttcaaagatgaacatcaac

SEQ ID NO: 5159 - DNA, 21 bp, synthetic construct
  source 1..21: mol_type = other DNA
tactcaaagaacaacctgaac

SEQ ID NO: 5160 - DNA, 21 bp, synthetic construct
  source 1..21: mol_type = other DNA
tattccaaacacgggatgaat

SEQ ID NO: 5161 - DNA, 21 bp, synthetic construct
  source 1..21: mol_type = other DNA
gtacaatcaaccaacggccgc

SEQ ID NO: 5162 - DNA, 21 bp, synthetic construct
  source 1..21: mol_type = other DNA
acgcactccacgaatggggtg

SEQ ID NO: 5163 - DNA, 21 bp, synthetic construct
  source 1..21: mol_type = other DNA
ttcgcgaaacagaattataat

SEQ ID NO: 5164 - DNA, 21 bp, synthetic construct
  source 1..21: mol_type = other DNA
atgttgtccacgaatgggagg

SEQ ID NO: 5165 - DNA, 21 bp, synthetic construct
  source 1..21: mol_type = other DNA
tactcaaagtcaggcgccaac

SEQ ID NO: 5166 - DNA, 21 bp, synthetic construct
  source 1..21: mol_type = other DNA
ttttcaaaggccaacatgaac

SEQ ID NO: 5167 - DNA, 21 bp, synthetic construct
  source 1..21: mol_type = other DNA
tactcaaagcatggcgtaaac

SEQ ID NO: 5168 - DNA, 21 bp, synthetic construct
  source 1..21: mol_type = other DNA
ttctccaaagcggggatgaat

SEQ ID NO: 5169 - DNA, 21 bp, synthetic construct
  source 1..21: mol_type = other DNA
ttcgcgaggcaggggttcaat

SEQ ID NO: 5170 - DNA, 21 bp, synthetic construct
  source 1..21: mol_type = other DNA
tattccaaattgggggagaat

SEQ ID NO: 5171 - DNA, 21 bp, synthetic construct
  source 1..21: mol_type = other DNA
ctgtcaaagtcaggcatgaac

SEQ ID NO: 5172 - DNA, 21 bp, synthetic construct
  source 1..21: mol_type = other DNA
tataaatcctccaatggggtg

SEQ ID NO: 5173 - DNA, 21 bp, synthetic construct
  source 1..21: mol_type = other DNA
caatggtcaaccaacggcgta

SEQ ID NO: 5174 - DNA, 21 bp, synthetic construct
  source 1..21: mol_type = other DNA
tatgcgaaacaggggcagaat

SEQ ID NO: 5175 - DNA, 21 bp, synthetic construct
  source 1..21: mol_type = other DNA
tatgcgaaatatgggttgaat

SEQ ID NO: 5176 - DNA, 21 bp, synthetic construct
  source 1..21: mol_type = other DNA
tccgcgtccacgaatggggtg

SEQ ID NO: 5177 - DNA, 21 bp, synthetic construct
  source 1..21: mol_type = other DNA
ttgtccaggatgaatgagaat

SEQ ID NO: 5178 - DNA, 21 bp, synthetic construct
  source 1..21: mol_type = other DNA
ttctccaggtccggggcgaat

SEQ ID NO: 5179 - DNA, 21 bp, synthetic construct
  source 1..21: mol_type = other DNA
tgggtgaaatcctccccgaat

SEQ ID NO: 5180 - DNA, 21 bp, synthetic construct
  source 1..21: mol_type = other DNA
tatgcgaggttgaatgagaat

SEQ ID NO: 5181 - DNA, 21 bp, synthetic construct
  source 1..21: mol_type = other DNA
tataggtccacgaatgggata

SEQ ID NO: 5182 - DNA, 21 bp, synthetic construct
  source 1..21: mol_type = other DNA
ttggcgaaaaatgggttgaat

SEQ ID NO: 5183 - DNA, 21 bp, synthetic construct
  source 1..21: mol_type = other DNA
gtacattcaaccaacggcatc

SEQ ID NO: 5184 - DNA, 21 bp, synthetic construct
  source 1..21: mol_type = other DNA
gactacaccggcaagtcagcc

SEQ ID NO: 5185 - DNA, 21 bp, synthetic construct
  source 1..21: mol_type = other DNA
tactcaaagtcaggcgacaac

SEQ ID NO: 5186 - DNA, 21 bp, synthetic construct
  source 1..21: mol_type = other DNA
tactcacgcgtaaacgacaac

SEQ ID NO: 5187 - DNA, 21 bp, synthetic construct
  source 1..21: mol_type = other DNA
tactcaaagcaaaactcaaac

SEQ ID NO: 5188 - DNA, 21 bp, synthetic construct
  source 1..21: mol_type = other DNA
ttgtccaaaatggggatgaat

SEQ ID NO: 5189 - DNA, 21 bp, synthetic construct
  source 1..21: mol_type = other DNA
ttcgcgaaaacggggttgaat

SEQ ID NO: 5190 - DNA, 21 bp, synthetic construct
  source 1..21: mol_type = other DNA
gacaagtacaacgactacaag

SEQ ID NO: 5191 - DNA, 21 bp, synthetic construct
  source 1..21: mol_type = other DNA
tattccaaagggggggcgaat

SEQ ID NO: 5192 - DNA, 21 bp, synthetic construct
  source 1..21: mol_type = other DNA
tacgccaagcatggcatgaac

SEQ ID NO: 5193 - DNA, 21 bp, synthetic construct
  source 1..21: mol_type = other DNA
ttcaaatcctccaatggggtg

SEQ ID NO: 5194 - DNA, 21 bp, synthetic construct
  source 1..21: mol_type = other DNA
tattccaggttgaatgatgcg

SEQ ID NO: 5195 - DNA, 21 bp, synthetic construct
  source 1..21: mol_type = other DNA
ttcgcgaaattcaatatgaat

SEQ ID NO: 5196 - DNA, 21 bp, synthetic construct
  source 1..21: mol_type = other DNA
tattccaaaggggggcagaat

SEQ ID NO: 5197 - DNA, 21 bp, synthetic construct
  source 1..21: mol_type = other DNA
ctgtcaaagaccggctcaaac

SEQ ID NO: 5198 - DNA, 21 bp, synthetic construct
  source 1..21: mol_type = other DNA
tatttcacggggatacacggg

SEQ ID NO: 5199 - DNA, 21 bp, synthetic construct
  source 1..21: mol_type = other DNA
tacgccaaggccaacgccaac

SEQ ID NO: 5200 - DNA, 21 bp, synthetic construct
  source 1..21: mol_type = other DNA
tatacgaaatccaatacgcac

SEQ ID NO: 5201 - DNA, 21 bp, synthetic construct
  source 1..21: mol_type = other DNA
ttttcaaagaccggccataac

SEQ ID NO: 5202 - DNA, 21 bp, synthetic construct
  source 1..21: mol_type = other DNA
ttcgcgaggatagggatgaat

SEQ ID NO: 5203 - DNA, 21 bp, synthetic construct
  source 1..21: mol_type = other DNA
tacgccaagtcaaacgtaaac

SEQ ID NO: 5204 - DNA, 21 bp, synthetic construct
  source 1..21: mol_type = other DNA
ttctccaggcagggggtgaat

SEQ ID NO: 5205 - DNA, 21 bp, synthetic construct
  source 1..21: mol_type = other DNA
tttgccaagtcaggctcaaac

SEQ ID NO: 5206 - DNA, 21 bp, synthetic construct
  source 1..21: mol_type = other DNA
tattccaggatggggacgaat

SEQ ID NO: 5207 - DNA, 21 bp, synthetic construct
  source 1..21: mol_type = other DNA
gtgatgtccacgaatggggtg

SEQ ID NO: 5208 - DNA, 21 bp, synthetic construct
  source 1..21: mol_type = other DNA
aataattccacgaatgggata

SEQ ID NO: 5209 - DNA, 21 bp, synthetic construct
  source 1..21: mol_type = other DNA
tattccaggccgggggcgaat

SEQ ID NO: 5210 - DNA, 21 bp, synthetic construct
  source 1..21: mol_type = other DNA
tacgccaagatcggccaaaac

SEQ ID NO: 5211 - DNA, 21 bp, synthetic construct
  source 1..21: mol_type = other DNA
tatgcgaaatatgggttcaat

SEQ ID NO: 5212 - DNA, 21 bp, synthetic construct
  source 1..21: mol_type = other DNA
ttgtccaaagtgaatttcaat

SEQ ID NO: 5213 - DNA, 21 bp, synthetic construct
  source 1..21: mol_type = other DNA
tactcaaagtcaaaccaaaac

SEQ ID NO: 5214 - DNA, 21 bp, synthetic construct
  source 1..21: mol_type = other DNA
tatatatcctccaatggggtg

SEQ ID NO: 5215 - DNA, 21 bp, synthetic construct
  source 1..21: mol_type = other DNA
ttcgcgaaagcgaattataat

SEQ ID NO: 5216 - DNA, 21 bp, synthetic construct
  source 1..21: mol_type = other DNA
ggggggtccgggatgaaatat

SEQ ID NO: 5217 - DNA, 21 bp, synthetic construct
  source 1..21: mol_type = other DNA
tcaaacaccggccgcaacgcc

SEQ ID NO: 5218 - DNA, 21 bp, synthetic construct
  source 1..21: mol_type = other DNA
tatgcgaggatgaatgtgaat

SEQ ID NO: 5219 - DNA, 21 bp, synthetic construct
  source 1..21: mol_type = other DNA
aaacagtccacgaatggggtg

SEQ ID NO: 5220 - DNA, 21 bp, synthetic construct
  source 1..21: mol_type = other DNA
tatgagtccgggccgatgagg

SEQ ID NO: 5221 - DNA, 21 bp, synthetic construct
  source 1..21: mol_type = other DNA
aaaggggaggcgacgacgtgg

SEQ ID NO: 5222 - DNA, 21 bp, synthetic construct
  source 1..21: mol_type = other DNA
ttcgcgaaaacgggggcgaat

SEQ ID NO: 5223 - DNA, 21 bp, synthetic construct
  source 1..21: mol_type = other DNA
tttgccaagggcaactggaac

SEQ ID NO: 5224 - DNA, 21 bp, synthetic construct
  source 1..21: mol_type = other DNA
tattccaaagtgaatcacaat

SEQ ID NO: 5225 - DNA, 21 bp, synthetic construct
  source 1..21: mol_type = other DNA
ttctccaaatccgggataaat

SEQ ID NO: 5226 - DNA, 21 bp, synthetic construct
  source 1..21: mol_type = other DNA
tatgcgaaaacgaatgcgaat

SEQ ID NO: 5227 - DNA, 21 bp, synthetic construct
  source 1..21: mol_type = other DNA
tactcacgcaacaacgaaaac

SEQ ID NO: 5228 - DNA, 21 bp, synthetic construct
  source 1..21: mol_type = other DNA
ttttcaaagatgaacctgaac

SEQ ID NO: 5229 - DNA, 21 bp, synthetic construct
  source 1..21: mol_type = other DNA
cgcgaatcatcaaacggcgta

SEQ ID NO: 5230 - DNA, 21 bp, synthetic construct
  source 1..21: mol_type = other DNA
ttgtccaaacacaatgagaat

SEQ ID NO: 5231 - DNA, 21 bp, synthetic construct
  source 1..21: mol_type = other DNA
caattttcaaccaacggcatc

SEQ ID NO: 5232 - DNA, 21 bp, synthetic construct
  source 1..21: mol_type = other DNA
ttcgcgagggtggggttcaat

SEQ ID NO: 5233 - DNA, 21 bp, synthetic construct
  source 1..21: mol_type = other DNA
ttcgcgaaaaatgggcacaat

SEQ ID NO: 5234 - DNA, 21 bp, synthetic construct
  source 1..21: mol_type = other DNA
ttctccaggatgggggtgaat

SEQ ID NO: 5235 - DNA, 21 bp, synthetic construct
  source 1..21: mol_type = other DNA
catcattcaaccaacggcgta

SEQ ID NO: 5236 - DNA, 21 bp, synthetic construct
  source 1..21: mol_type = other DNA
ctgtcaaagaacggctttaac

SEQ ID NO: 5237 - DNA, 21 bp, synthetic construct
  source 1..21: mol_type = other DNA
tattccaggccgaatgcgaat

SEQ ID NO: 5238 - DNA, 21 bp, synthetic construct
  source 1..21: mol_type = other DNA
tatgcgaaacagaattggaat

SEQ ID NO: 5239 - DNA, 21 bp, synthetic construct
  source 1..21: mol_type = other DNA
tactcaaaggtaaacaacaac

SEQ ID NO: 5240 - DNA, 21 bp, synthetic construct
  source 1..21: mol_type = other DNA
ttggcgaaaatagggcacaat

SEQ ID NO: 5241 - DNA, 21 bp, synthetic construct
  source 1..21: mol_type = other DNA
accaccgactttaacggcttt

SEQ ID NO: 5242 - DNA, 21 bp, synthetic construct
  source 1..21: mol_type = other DNA
atctactcatcaaacggcgta

SEQ ID NO: 5243 - DNA, 21 bp, synthetic construct
  source 1..21: mol_type = other DNA
cgcgactcacaaaccacctgg

SEQ ID NO: 5244 - DNA, 21 bp, synthetic construct
  source 1..21: mol_type = other DNA
cgcgtatcatcaaacggcgta

SEQ ID NO: 5245 - DNA, 21 bp, synthetic construct
  source 1..21: mol_type = other DNA
ttcgcgaaagggaataataat

SEQ ID NO: 5246 - DNA, 21 bp, synthetic construct
  source 1..21: mol_type = other DNA
ttctccaggatgggggataat

SEQ ID NO: 5247 - DNA, 21 bp, synthetic construct
  source 1..21: mol_type = other DNA
atgcatgtaaagtcacccaac

SEQ ID NO: 5248 - DNA, 21 bp, synthetic construct
  source 1..21: mol_type = other DNA
gtaggctcaatcaacggcatc

SEQ ID NO: 5249 - DNA, 21 bp, synthetic construct
  source 1..21: mol_type = other DNA
tactcaaaggtaaacctgaac

SEQ ID NO: 5250 - DNA, 21 bp, synthetic construct
  source 1..21: mol_type = other DNA
acggggtccgcggtgaaatgg

SEQ ID NO: 5251 - DNA, 21 bp, synthetic construct
  source 1..21: mol_type = other DNA
tactacaccaaggtacccacc

SEQ ID NO: 5252 - DNA, 21 bp, synthetic construct
  source 1..21: mol_type = other DNA
tattccaaaaatggggggaat

SEQ ID NO: 5253 - DNA, 21 bp, synthetic construct
  source 1..21: mol_type = other DNA
atgtacggcggcgtaaacccc

SEQ ID NO: 5254 - DNA, 21 bp, synthetic construct
  source 1..21: mol_type = other DNA
cgccccaacaccgccaacttt

SEQ ID NO: 5255 - DNA, 21 bp, synthetic construct
  source 1..21: mol_type = other DNA
tactactcatcaaacggcgta

SEQ ID NO: 5256 - DNA, 21 bp, synthetic construct
  source 1..21: mol_type = other DNA
ttcgcgaaacaggggcacaat

SEQ ID NO: 5257 - DNA, 21 bp, synthetic construct
  source 1..21: mol_type = other DNA
aatgggtccacgaatgggagg

SEQ ID NO: 5258 - DNA, 21 bp, synthetic construct
  source 1..21: mol_type = other DNA
ctgtcaaagcataaccaaaac

SEQ ID NO: 5259 - DNA, 21 bp, synthetic construct
  source 1..21: mol_type = other DNA
tacgcccgcatgaacatgaac

SEQ ID NO: 5260 - DNA, 21 bp, synthetic construct
  source 1..21: mol_type = other DNA
ctgtcaaagtcaaaccataac

SEQ ID NO: 5261 - DNA, 21 bp, synthetic construct
  source 1..21: mol_type = other DNA
tatgcgaggaataatgataat

SEQ ID NO: 5262 - DNA, 21 bp, synthetic construct
  source 1..21: mol_type = other DNA
atcgaacgcgaacgctacgcc

SEQ ID NO: 5263 - DNA, 21 bp, synthetic construct
  source 1..21: mol_type = other DNA
tcaatgaccggcacctcatac

SEQ ID NO: 5264 - DNA, 21 bp, synthetic construct
  source 1..21: mol_type = other DNA
ttttcaaagaccggcatcaac

SEQ ID NO: 5265 - DNA, 21 bp, synthetic construct
  source 1..21: mol_type = other DNA
tactcacgcgaaggctacaac

SEQ ID NO: 5266 - DNA, 21 bp, synthetic construct
  source 1..21: mol_type = other DNA
tatacgaaatcccagacggat

SEQ ID NO: 5267 - DNA, 21 bp, synthetic construct
  source 1..21: mol_type = other DNA
ttgaataggttggggccgacg

SEQ ID NO: 5268 - DNA, 21 bp, synthetic construct
  source 1..21: mol_type = other DNA
aggtattccacgaatggggtg

SEQ ID NO: 5269 - DNA, 21 bp, synthetic construct
  source 1..21: mol_type = other DNA
ttcgcgaaattggggttcaat

SEQ ID NO: 5270 - DNA, 21 bp, synthetic construct
  source 1..21: mol_type = other DNA
ttgtccaaaacgaatttcaat

SEQ ID NO: 5271 - DNA, 21 bp, synthetic construct
  source 1..21: mol_type = other DNA
tacgccaagaacaactacaac

SEQ ID NO: 5272 - DNA, 21 bp, synthetic construct
  source 1..21: mol_type = other DNA
tcagacggcaactcatcatac

SEQ ID NO: 5273 - DNA, 21 bp, synthetic construct
  source 1..21: mol_type = other DNA
agggggtccccgacgttgtat

SEQ ID NO: 5274 - DNA, 21 bp, synthetic construct
  source 1..21: mol_type = other DNA
ttcgcgaaaacggggacgaat

SEQ ID NO: 5275 - DNA, 21 bp, synthetic construct
  source 1..21: mol_type = other DNA
ttttcaaagcataacctgaac

SEQ ID NO: 5276 - DNA, 21 bp, synthetic construct
  source 1..21: mol_type = other DNA
ttttcaaagatgaacatgaac

SEQ ID NO: 5277 - DNA, 21 bp, synthetic construct
  source 1..21: mol_type = other DNA
ttcgcgaggatagggtccaat

SEQ ID NO: 5278 - DNA, 21 bp, synthetic construct
  source 1..21: mol_type = other DNA
aatccggggaggtcctcctat

SEQ ID NO: 5279 - DNA, 21 bp, synthetic construct
  source 1..21: mol_type = other DNA
aatatgacggggaaatccgcg

SEQ ID NO: 5280 - DNA, 21 bp, synthetic construct
  source 1..21: mol_type = other DNA
ttggcgaaaatggggacgaat

SEQ ID NO: 5281 - DNA, 21 bp, synthetic construct
  source 1..21: mol_type = other DNA
gagaggaaaccggggaatata

SEQ ID NO: 5282 - DNA, 21 bp, synthetic construct
  source 1..21: mol_type = other DNA
ccgttgtccacgaatggggtg

SEQ ID NO: 5283 - DNA, 21 bp, synthetic construct
  source 1..21: mol_type = other DNA
tcctattcctccaatggggtg

SEQ ID NO: 5284 - DNA, 21 bp, synthetic construct
  source 1..21: mol_type = other DNA
ctgtcaaagcaaggcctgaac

SEQ ID NO: 5285 - DNA, 21 bp, synthetic construct
  source 1..21: mol_type = other DNA
tactcacgccccggctcaaac

SEQ ID NO: 5286 - DNA, 21 bp, synthetic construct
  source 1..21: mol_type = other DNA
ctgtcacgcaacaacgaaaac

SEQ ID NO: 5287 - DNA, 21 bp, synthetic construct
  source 1..21: mol_type = other DNA
ttttcaaagatgaaccaaaac

SEQ ID NO: 5288 - DNA, 21 bp, synthetic construct
  source 1..21: mol_type = other DNA
acgccggggaggtccgggttc

SEQ ID NO: 5289 - DNA, 21 bp, synthetic construct
  source 1..21: mol_type = other DNA
gcgcactcctccaatggggtg

SEQ ID NO: 5290 - DNA, 21 bp, synthetic construct
  source 1..21: mol_type = other DNA
cgcggcgaccaatcaacctgg

SEQ ID NO: 5291 - DNA, 21 bp, synthetic construct
  source 1..21: mol_type = other DNA
ttctccaaaatggggatgaat

SEQ ID NO: 5292 - DNA, 21 bp, synthetic construct
  source 1..21: mol_type = other DNA
aggggggatcacgcggggttc

SEQ ID NO: 5293 - DNA, 21 bp, synthetic construct
  source 1..21: mol_type = other DNA
tttgccaaggaaaaccgcaac

SEQ ID NO: 5294 - DNA, 21 bp, synthetic construct
  source 1..21: mol_type = other DNA
ttctccaaagggaatgtgaat

SEQ ID NO: 5295 - DNA, 21 bp, synthetic construct
  source 1..21: mol_type = other DNA
tacgccaagctgaacgacaac

SEQ ID NO: 5296 - DNA, 21 bp, synthetic construct
  source 1..21: mol_type = other DNA
aataatagggggacgccggcg

SEQ ID NO: 5297 - DNA, 21 bp, synthetic construct
  source 1..21: mol_type = other DNA
tattccaggccgaatccgaat

SEQ ID NO: 5298 - DNA, 21 bp, synthetic construct
  source 1..21: mol_type = other DNA
tttgccaagcatggcatgaac

SEQ ID NO: 5299 - DNA, 21 bp, synthetic construct
  source 1..21: mol_type = other DNA
tacgcccgccccaaccataac

SEQ ID NO: 5300 - DNA, 21 bp, synthetic construct
  source 1..21: mol_type = other DNA
ttcgcgaaaccgaattggaat

SEQ ID NO: 5301 - DNA, 21 bp, synthetic construct
  source 1..21: mol_type = other DNA
ttctccaggaatgggcagaat

SEQ ID NO: 5302 - DNA, 21 bp, synthetic construct
  source 1..21: mol_type = other DNA
aagtcaggcggctacccctac

SEQ ID NO: 5303 - DNA, 21 bp, synthetic construct
  source 1..21: mol_type = other DNA
tacgcccgctcatcagactca

SEQ ID NO: 5304 - DNA, 21 bp, synthetic construct
  source 1..21: mol_type = other DNA
ctgtcacgcgtaaacatgaac

SEQ ID NO: 5305 - DNA, 21 bp, synthetic construct
  source 1..21: mol_type = other DNA
aaatccgggaattcctcctat

SEQ ID NO: 5306 - DNA, 21 bp, synthetic construct
  source 1..21: mol_type = other DNA
tattccaggccggggacgaat

SEQ ID NO: 5307 - DNA, 21 bp, synthetic construct
  source 1..21: mol_type = other DNA
atgtcacgcctgaacgccacc

SEQ ID NO: 5308 - DNA, 21 bp, synthetic construct
  source 1..21: mol_type = other DNA
tacgccaagaagggcgaaaac

SEQ ID NO: 5309 - DNA, 21 bp, synthetic construct
  source 1..21: mol_type = other DNA
tatgcgaaagtggggacgaat

SEQ ID NO: 5310 - DNA, 21 bp, synthetic construct
  source 1..21: mol_type = other DNA
ttctccaggataaatcacaat

SEQ ID NO: 5311 - DNA, 21 bp, synthetic construct
  source 1..21: mol_type = other DNA
tacacccgctcacaagaaatg

SEQ ID NO: 5312 - DNA, 21 bp, synthetic construct
  source 1..21: mol_type = other DNA
ctgtcaaagctgaacggcaac

SEQ ID NO: 5313 - DNA, 21 bp, synthetic construct
  source 1..21: mol_type = other DNA
tatgcgaggatgaatcagaat

SEQ ID NO: 5314 - DNA, 21 bp, synthetic construct
  source 1..21: mol_type = other DNA
tataatgcggtgataatgaaa

SEQ ID NO: 5315 - DNA, 21 bp, synthetic construct
  source 1..21: mol_type = other DNA
tacgcccgccccaacgtaaac

SEQ ID NO: 5316 - DNA, 21 bp, synthetic construct
  source 1..21: mol_type = other DNA
ctggcccgccccggcaacaac

SEQ ID NO: 5317 - DNA, 21 bp, synthetic construct
  source 1..21: mol_type = other DNA
tttgcccgcctgaacaccaac

SEQ ID NO: 5318 - DNA, 21 bp, synthetic construct
  source 1..21: mol_type = other DNA
aggaattcccagtccgtgttc

SEQ ID NO: 5319 - DNA, 21 bp, synthetic construct
  source 1..21: mol_type = other DNA
ctgtggcgcaacgccgaaaac

SEQ ID NO: 5320 - DNA, 21 bp, synthetic construct
  source 1..21: mol_type = other DNA
tttgccaagaccggctcaaac

SEQ ID NO: 5321 - DNA, 21 bp, synthetic construct
  source 1..21: mol_type = other DNA
agggggacgtcctccaattat

SEQ ID NO: 5322 - DNA, 21 bp, synthetic construct
  source 1..21: mol_type = other DNA
ttgtccagggcgcagtccata

SEQ ID NO: 5323 - DNA, 21 bp, synthetic construct
  source 1..21: mol_type = other DNA
gggccggtgcacgtgaattat

SEQ ID NO: 5324 - DNA, 21 bp, synthetic construct
  source 1..21: mol_type = other DNA
tattccgtgaggcacccgaat

SEQ ID NO: 5325 - DNA, 21 bp, synthetic construct
  source 1..21: mol_type = other DNA
ttcgcgaaagataataggaat

SEQ ID NO: 5326 - DNA, 21 bp, synthetic construct
  source 1..21: mol_type = other DNA
tcacgcaacggcggcaacgcc

SEQ ID NO: 5327 - DNA, 21 bp, synthetic construct
  source 1..21: mol_type = other DNA
tgggcgaaattgtccttgaat

SEQ ID NO: 5328 - DNA, 21 bp, synthetic construct
  source 1..21: mol_type = other DNA
tttgccaagcaaggcaacaac

SEQ ID NO: 5329 - DNA, 21 bp, synthetic construct
  source 1..21: mol_type = other DNA
tacgccaagatcggcgaaaac

SEQ ID NO: 5330 - DNA, 21 bp, synthetic construct
  source 1..21: mol_type = other DNA
ttttcacgccaaaacaccaac

SEQ ID NO: 5331 - DNA, 21 bp, synthetic construct
  source 1..21: mol_type = other DNA
ttttcaaagtcaaaccataac

SEQ ID NO: 5332 - DNA, 21 bp, synthetic construct
  source 1..21: mol_type = other DNA
tacgcccgcgtaaacatcaac

SEQ ID NO: 5333 - DNA, 21 bp, synthetic construct
  source 1..21: mol_type = other DNA
tacgcccgcatcaacatgaac

SEQ ID NO: 5334 - DNA, 21 bp, synthetic construct
  source 1..21: mol_type = other DNA
ttttcaaagtcaggctcaaac

SEQ ID NO: 5335 - DNA, 21 bp, synthetic construct
  source 1..21: mol_type = other DNA
aatgtgaggaatcagatggcg

SEQ ID NO: 5336 - DNA, 21 bp, synthetic construct
  source 1..21: mol_type = other DNA
tactcaaagcccggctttaac

SEQ ID NO: 5337 - DNA, 21 bp, synthetic construct
  source 1..21: mol_type = other DNA
ttcgcgagggcgaatttgaat

SEQ ID NO: 5338 - DNA, 21 bp, synthetic construct
  source 1..21: mol_type = other DNA
tacgccaaggacggctacaac

SEQ ID NO: 5339 - DNA, 21 bp, synthetic construct
  source 1..21: mol_type = other DNA
tatgcgaggccgggggataat

SEQ ID NO: 5340 - DNA, 21 bp, synthetic construct
  source 1..21: mol_type = other DNA
ggcgacaaggtaatccgctac

SEQ ID NO: 5341 - DNA, 21 bp, synthetic construct
  source 1..21: mol_type = other DNA
tatgcgaaatataatttgaat

SEQ ID NO: 5342 - DNA, 21 bp, synthetic construct
  source 1..21: mol_type = other DNA
ttcgcgaaaatgaatataaat

SEQ ID NO: 5343 - DNA, 21 bp, synthetic construct
  source 1..21: mol_type = other DNA
ttctccaaaatggggtccaat

SEQ ID NO: 5344 - DNA, 21 bp, synthetic construct
  source 1..21: mol_type = other DNA
aactcacgcctgaacgacaac

SEQ ID NO: 5345 - DNA, 21 bp, synthetic construct
  source 1..21: mol_type = other DNA
gtatcaaacaagggcgccggc

SEQ ID NO: 5346 - DNA, 21 bp, synthetic construct
  source 1..21: mol_type = other DNA
aggggggagcacaatgcgtgg

SEQ ID NO: 5347 - DNA, 21 bp, synthetic construct
  source 1..21: mol_type = other DNA
tatgagaggttcataccgaat

SEQ ID NO: 5348 - DNA, 21 bp, synthetic construct
  source 1..21: mol_type = other DNA
acgaaatccgggacgaatgcg

SEQ ID NO: 5349 - DNA, 21 bp, synthetic construct
  source 1..21: mol_type = other DNA
tatgcgttgaaagggatgaat

SEQ ID NO: 5350 - DNA, 21 bp, synthetic construct
  source 1..21: mol_type = other DNA
tttgccaagtcaggcggcaac

SEQ ID NO: 5351 - DNA, 21 bp, synthetic construct
  source 1..21: mol_type = other DNA
tttgcccgctcaaaccaaaac

SEQ ID NO: 5352 - DNA, 21 bp, synthetic construct
  source 1..21: mol_type = other DNA
ttcgcgaaaatagggaataat

SEQ ID NO: 5353 - DNA, 21 bp, synthetic construct
  source 1..21: mol_type = other DNA
tcctccgggtccaatcactgg

SEQ ID NO: 5354 - DNA, 21 bp, synthetic construct
  source 1..21: mol_type = other DNA
atgacggggacgtcctcctat

SEQ ID NO: 5355 - DNA, 21 bp, synthetic construct
  source 1..21: mol_type = other DNA
tactcacgccccggccaaaac

SEQ ID NO: 5356 - DNA, 21 bp, synthetic construct
  source 1..21: mol_type = other DNA
ttttcaaagggcaacaccaac

SEQ ID NO: 5357 - DNA, 21 bp, synthetic construct
  source 1..21: mol_type = other DNA
cgccgcgacggcgtaaacgcc

SEQ ID NO: 5358 - DNA, 21 bp, synthetic construct
  source 1..21: mol_type = other DNA
tatcacaaatattccacggat

SEQ ID NO: 5359 - DNA, 21 bp, synthetic construct
  source 1..21: mol_type = other DNA
tactcaaagcccaacaacaac

SEQ ID NO: 5360 - DNA, 21 bp, synthetic construct
  source 1..21: mol_type = other DNA
ttcgcgaaaatggggataaat

SEQ ID NO: 5361 - DNA, 21 bp, synthetic construct
  source 1..21: mol_type = other DNA
ttcgcgaaacacaatataaat

SEQ ID NO: 5362 - DNA, 21 bp, synthetic construct
  source 1..21: mol_type = other DNA
acccgctcaggcggcgtagcc

SEQ ID NO: 5363 - DNA, 21 bp, synthetic construct
  source 1..21: mol_type = other DNA
aaccgctcaggcatggccgcc

SEQ ID NO: 5364 - DNA, 21 bp, synthetic construct
  source 1..21: mol_type = other DNA
tataggcaggggttgtccaat

SEQ ID NO: 5365 - DNA, 21 bp, synthetic construct
  source 1..21: mol_type = other DNA
ttcgcgaggataaatatgaat

SEQ ID NO: 5366 - DNA, 21 bp, synthetic construct
  source 1..21: mol_type = other DNA
ttcgcgaaattggggcacaat

SEQ ID NO: 5367 - DNA, 21 bp, synthetic construct
  source 1..21: mol_type = other DNA
ttcgcgaaacagaataataat

SEQ ID NO: 5368 - DNA, 21 bp, synthetic construct
  source 1..21: mol_type = other DNA
tttgccaagcatggctcaaac

SEQ ID NO: 5369 - DNA, 21 bp, synthetic construct
  source 1..21: mol_type = other DNA
ttctccaaacaggggcagaat

SEQ ID NO: 5370 - DNA, 21 bp, synthetic construct
  source 1..21: mol_type = other DNA
gatatgaggaggatgggggag

SEQ ID NO: 5371 - DNA, 21 bp, synthetic construct
  source 1..21: mol_type = other DNA
ggccccggcatctcaaagtac

SEQ ID NO: 5372 - DNA, 21 bp, synthetic construct
  source 1..21: mol_type = other DNA
aacaccgtaaacaccatgcgc

SEQ ID NO: 5373 - DNA, 21 bp, synthetic construct
  source 1..21: mol_type = other DNA
ttctccaaagtgaatcagaat

SEQ ID NO: 5374 - DNA, 21 bp, synthetic construct
  source 1..21: mol_type = other DNA
tactcaaagaccaaccaaaac

SEQ ID NO: 5375 - DNA, 21 bp, synthetic construct
  source 1..21: mol_type = other DNA
tacgccaagtttaacgccaac

SEQ ID NO: 5376 - DNA, 21 bp, synthetic construct
  source 1..21: mol_type = other DNA
ctggccaagtcatcacccatc

SEQ ID NO: 5377 - DNA, 21 bp, synthetic construct
  source 1..21: mol_type = other DNA
acccgctcaggcggctcaccc

SEQ ID NO: 5378 - DNA, 21 bp, synthetic construct
  source 1..21: mol_type = other DNA
tacgccaagggcaacggcaac

SEQ ID NO: 5379 - DNA, 21 bp, synthetic construct
  source 1..21: mol_type = other DNA
tttgccaagcaaggctcaaac

SEQ ID NO: 5380 - DNA, 21 bp, synthetic construct
  source 1..21: mol_type = other DNA
ttctccaaaaataattccaat

SEQ ID NO: 5381 - DNA, 21 bp, synthetic construct
  source 1..21: mol_type = other DNA
ttttcaaaggtaaaccccaac

SEQ ID NO: 5382 - DNA, 21 bp, synthetic construct
  source 1..21: mol_type = other DNA
tatggggcgatagggaggaat

SEQ ID NO: 5383 - DNA, 21 bp, synthetic construct
  source 1..21: mol_type = other DNA
ttttcaaagtcaaacaacaac

SEQ ID NO: 5384 - DNA, 21 bp, synthetic construct
  source 1..21: mol_type = other DNA
ttcgcgaggttgaatcagaat

SEQ ID NO: 5385 - DNA, 21 bp, synthetic construct
  source 1..21: mol_type = other DNA
atgaggaatcagccgaatgcg

SEQ ID NO: 5386 - DNA, 21 bp, synthetic construct
  source 1..21: mol_type = other DNA
tatacgagggtggattccaat

SEQ ID NO: 5387 - DNA, 21 bp, synthetic construct
  source 1..21: mol_type = other DNA
tactcacgccccggcggcaac

SEQ ID NO: 5388 - DNA, 21 bp, synthetic construct
  source 1..21: mol_type = other DNA
cactccaggttgacggataat

SEQ ID NO: 5389 - DNA, 21 bp, synthetic construct
  source 1..21: mol_type = other DNA
gtaggctcaaaccattcatgg

SEQ ID NO: 5390 - DNA, 21 bp, synthetic construct
  source 1..21: mol_type = other DNA
ttgcacgattccaggacgtat

SEQ ID NO: 5391 - DNA, 21 bp, synthetic construct
  source 1..21: mol_type = other DNA
tacgccaagtacaacggcaac

SEQ ID NO: 5392 - DNA, 21 bp, synthetic construct
  source 1..21: mol_type = other DNA
acgtattccaaaccgaattcc

SEQ ID NO: 5393 - DNA, 21 bp, synthetic construct
  source 1..21: mol_type = other DNA
tattccagggagaatgcgaat

SEQ ID NO: 5394 - DNA, 21 bp, synthetic construct
  source 1..21: mol_type = other DNA
aaagcggagtatggggcgggg

SEQ ID NO: 5395 - DNA, 21 bp, synthetic construct
  source 1..21: mol_type = other DNA
tttgccaaggtaggcaacaac

SEQ ID NO: 5396 - DNA, 21 bp, synthetic construct
  source 1..21: mol_type = other DNA
gggacgtcctccgcggcgtgg

SEQ ID NO: 5397 - DNA, 21 bp, synthetic construct
  source 1..21: mol_type = other DNA
ttttcaaagcatggctcaaac

SEQ ID NO: 5398 - DNA, 21 bp, synthetic construct
  source 1..21: mol_type = other DNA
tatgcgagggggtccgatttg

SEQ ID NO: 5399 - DNA, 21 bp, synthetic construct
  source 1..21: mol_type = other DNA
ttctccaggccgaatataaat

SEQ ID NO: 5400 - DNA, 21 bp, synthetic construct
  source 1..21: mol_type = other DNA
tttgccaagatgggcgccaac

SEQ ID NO: 5401 - DNA, 21 bp, synthetic construct
  source 1..21: mol_type = other DNA
ttctccaaaacgaatcacaat

SEQ ID NO: 5402 - DNA, 21 bp, synthetic construct
  source 1..21: mol_type = other DNA
aggttctccggggagccgtcc

SEQ ID NO: 5403 - DNA, 21 bp, synthetic construct
  source 1..21: mol_type = other DNA
aaatccgatgggtccacgtgg

SEQ ID NO: 5404 - DNA, 21 bp, synthetic construct
  source 1..21: mol_type = other DNA
ataacgaatgtgaattatggg

SEQ ID NO: 5405 - DNA, 21 bp, synthetic construct
  source 1..21: mol_type = other DNA
tatgtgcagaataggccgaat

SEQ ID NO: 5406 - DNA, 21 bp, synthetic construct
  source 1..21: mol_type = other DNA
tacctgcccggccatatgaac

SEQ ID NO: 5407 - DNA, 21 bp, synthetic construct
  source 1..21: mol_type = other DNA
tatataagggggaatacgaat

SEQ ID NO: 5408 - DNA, 21 bp, synthetic construct
  source 1..21: mol_type = other DNA
ttctccaggcacaatgggaat

SEQ ID NO: 5409 - DNA, 21 bp, synthetic construct
  source 1..21: mol_type = other DNA
cgcggcggcaacaccatgccc

SEQ ID NO: 5410 - DNA, 21 bp, synthetic construct
  source 1..21: mol_type = other DNA
ttcgcgaggataggggagaat

SEQ ID NO: 5411 - DNA, 21 bp, synthetic construct
  source 1..21: mol_type = other DNA
cgctcaaacggctcaggctca

SEQ ID NO: 5412 - DNA, 21 bp, synthetic construct
  source 1..21: mol_type = other DNA
ggggggaataaatccaattat

SEQ ID NO: 5413 - DNA, 21 bp, synthetic construct
  source 1..21: mol_type = other DNA
tactcacgctcagccaaggac

SEQ ID NO: 5414 - DNA, 21 bp, synthetic construct
  source 1..21: mol_type = other DNA
ttcgcgaggcacggggataat

SEQ ID NO: 5415 - DNA, 21 bp, synthetic construct
  source 1..21: mol_type = other DNA
tacgcccgcgacggcatcaac

SEQ ID NO: 5416 - DNA, 21 bp, synthetic construct
  source 1..21: mol_type = other DNA
tacgcccgccataacatcaac

SEQ ID NO: 5417 - DNA, 21 bp, synthetic construct
  source 1..21: mol_type = other DNA
tatgcgagggagggggtgaat

SEQ ID NO: 5418 - DNA, 21 bp, synthetic construct
  source 1..21: mol_type = other DNA
acgagggatgtggcggggagg

SEQ ID NO: 5419 - DNA, 21 bp, synthetic construct
  source 1..21: mol_type = other DNA
tcactgggctcatcaaagtac

SEQ ID NO: 5420 - DNA, 21 bp, synthetic construct
  source 1..21: mol_type = other DNA
ttcgcgaaagggggggggaat

SEQ ID NO: 5421 - DNA, 21 bp, synthetic construct
  source 1..21: mol_type = other DNA
gggagggatagggggccgggg

SEQ ID NO: 5422 - DNA, 21 bp, synthetic construct
  source 1..21: mol_type = other DNA
ataaaaggggggtcctccggg

SEQ ID NO: 5423 - DNA, 21 bp, synthetic construct
  source 1..21: mol_type = other DNA
tacaagggcggctacaacaac

SEQ ID NO: 5424 - DNA, 21 bp, synthetic construct
  source 1..21: mol_type = other DNA
tttgcccgccgcggcgaaaac

SEQ ID NO: 5425 - DNA, 21 bp, synthetic construct
  source 1..21: mol_type = other DNA
tttgcccgctacaacaccaac

SEQ ID NO: 5426 - DNA, 21 bp, synthetic construct
  source 1..21: mol_type = other DNA
tactcacgccccaactcaaac

SEQ ID NO: 5427 - DNA, 21 bp, synthetic construct
  source 1..21: mol_type = other DNA
tactcaaaggaaggctacaac

SEQ ID NO: 5428 - DNA, 21 bp, synthetic construct
  source 1..21: mol_type = other DNA
ttcgcgaaaatggggcagaat

SEQ ID NO: 5429 - DNA, 21 bp, synthetic construct
  source 1..21: mol_type = other DNA
tttgccaagtcaaacaacaac

SEQ ID NO: 5430 - DNA, 21 bp, synthetic construct
  source 1..21: mol_type = other DNA
ttttcacgcgaaggccgcaac

SEQ ID NO: 5431 - DNA, 21 bp, synthetic construct
  source 1..21: mol_type = other DNA
atgacggggaattccgcgtat

SEQ ID NO: 5432 - DNA, 21 bp, synthetic construct
  source 1..21: mol_type = other DNA
tttgccaagctgggcaacaac

SEQ ID NO: 5433 - DNA, 21 bp, synthetic construct
  source 1..21: mol_type = other DNA
caagaatacggcggctaccaa

SEQ ID NO: 5434 - DNA, 21 bp, synthetic construct
  source 1..21: mol_type = other DNA
aacacccgcggcaacggctca

SEQ ID NO: 5435 - DNA, 21 bp, synthetic construct
  source 1..21: mol_type = other DNA
gcggagtcctccaggacgtat

SEQ ID NO: 5436 - DNA, 21 bp, synthetic construct
  source 1..21: mol_type = other DNA
aagaaccatggcggctcatac

SEQ ID NO: 5437 - DNA, 21 bp, synthetic construct
  source 1..21: mol_type = other DNA
tataaagcggatacgaggaat

SEQ ID NO: 5438 - DNA, 21 bp, synthetic construct
  source 1..21: mol_type = other DNA
tatgcgaaattgaatgagaat

SEQ ID NO: 5439 - DNA, 21 bp, synthetic construct
  source 1..21: mol_type = other DNA
tataatcagagggggcagaat

SEQ ID NO: 5440 - DNA, 21 bp, synthetic construct
  source 1..21: mol_type = other DNA
tttgccaagaccaaccaaaac

SEQ ID NO: 5441 - DNA, 21 bp, synthetic construct
  source 1..21: mol_type = other DNA
tggacctcaggctactcaaac

SEQ ID NO: 5442 - DNA, 21 bp, synthetic construct
  source 1..21: mol_type = other DNA
tactcaaagatcaacggcaac

SEQ ID NO: 5443 - DNA, 21 bp, synthetic construct
  source 1..21: mol_type = other DNA
gaccaatcatcaaccacctgg

SEQ ID NO: 5444 - DNA, 21 bp, synthetic construct
  source 1..21: mol_type = other DNA
tacgccaagcataacggcaac

SEQ ID NO: 5445 - DNA, 21 bp, synthetic construct
  source 1..21: mol_type = other DNA
ttcgcgaaatccaatgcgaat

SEQ ID NO: 5446 - DNA, 21 bp, synthetic construct
  source 1..21: mol_type = other DNA
ttcgcgaaacagaatacgaat

SEQ ID NO: 5447 - DNA, 21 bp, synthetic construct
  source 1..21: mol_type = other DNA
ttcgcgaggatgggggataat

SEQ ID NO: 5448 - DNA, 21 bp, synthetic construct
  source 1..21: mol_type = other DNA
ttctccaaagtgaatacgaat

SEQ ID NO: 5449 - DNA, 21 bp, synthetic construct
  source 1..21: mol_type = other DNA
tatacggatcacatgaggaat

SEQ ID NO: 5450 - DNA, 21 bp, synthetic construct
  source 1..21: mol_type = other DNA
taccgctcaaacgccatcgta

SEQ ID NO: 5451 - DNA, 21 bp, synthetic construct
  source 1..21: mol_type = other DNA
ttcgcgaggaataatcagaat

SEQ ID NO: 5452 - DNA, 21 bp, synthetic construct
  source 1..21: mol_type = other DNA
ttctccaaaatgggggggaat

SEQ ID NO: 5453 - DNA, 21 bp, synthetic construct
  source 1..21: mol_type = other DNA
ttcgcgaaaatgaatttcaat

SEQ ID NO: 5454 - DNA, 21 bp, synthetic construct
  source 1..21: mol_type = other DNA
tttgccaagcaaaactcaaac

SEQ ID NO: 5455 - DNA, 21 bp, synthetic construct
  source 1..21: mol_type = other DNA
aacgcccgcggcgccaacgcc

SEQ ID NO: 5456 - DNA, 21 bp, synthetic construct
  source 1..21: mol_type = other DNA
ttctccagggtgaatgggaat

SEQ ID NO: 5457 - DNA, 21 bp, synthetic construct
  source 1..21: mol_type = other DNA
aatacgagggggacgtccgcg

SEQ ID NO: 5458 - DNA, 21 bp, synthetic construct
  source 1..21: mol_type = other DNA
tacgccaagcccaacaacaac

SEQ ID NO: 5459 - DNA, 21 bp, synthetic construct
  source 1..21: mol_type = other DNA
ttcgcgaaaatgaatccgaat

SEQ ID NO: 5460 - DNA, 21 bp, synthetic construct
  source 1..21: mol_type = other DNA
ttcgtgaaatccgcgaatggg

SEQ ID NO: 5461 - DNA, 21 bp, synthetic construct
  source 1..21: mol_type = other DNA
ttcgcgaggcagaatgggaat

SEQ ID NO: 5462 - DNA, 21 bp, synthetic construct
  source 1..21: mol_type = other DNA
ttgtcctccaatttgaaatat

SEQ ID NO: 5463 - DNA, 21 bp, synthetic construct
  source 1..21: mol_type = other DNA
aggtcctccgggacgccggcg

SEQ ID NO: 5464 - DNA, 21 bp, synthetic construct
  source 1..21: mol_type = other DNA
ttcgcgaggttgaatgataat

SEQ ID NO: 5465 - DNA, 21 bp, synthetic construct
  source 1..21: mol_type = other DNA
tacgccaagatgaaccaaaac

SEQ ID NO: 5466 - DNA, 21 bp, synthetic construct
  source 1..21: mol_type = other DNA
tattccaaagatgggaggaat

SEQ ID NO: 5467 - DNA, 21 bp, synthetic construct
  source 1..21: mol_type = other DNA
ttgtatggggggacgaatccg

SEQ ID NO: 5468 - DNA, 21 bp, synthetic construct
  source 1..21: mol_type = other DNA
agggatcacatggcgaggggg

SEQ ID NO: 5469 - DNA, 21 bp, synthetic construct
  source 1..21: mol_type = other DNA
aggccgtatggggggtccgat

SEQ ID NO: 5470 - DNA, 21 bp, synthetic construct
  source 1..21: mol_type = other DNA
ttcgcgaggataaatataaat

SEQ ID NO: 5471 - DNA, 21 bp, synthetic construct
  source 1..21: mol_type = other DNA
gtaaacatgggcaaggcctac

SEQ ID NO: 5472 - DNA, 21 bp, synthetic construct
  source 1..21: mol_type = other DNA
ttcgcgaaaccggggtggaat

SEQ ID NO: 5473 - DNA, 21 bp, synthetic construct
  source 1..21: mol_type = other DNA
ttcgcgaaattcgggaataat

SEQ ID NO: 5474 - DNA, 21 bp, synthetic construct
  source 1..21: mol_type = other DNA
aaagcggattcctccaggtat

SEQ ID NO: 5475 - DNA, 21 bp, synthetic construct
  source 1..21: mol_type = other DNA
cgcggcaacggcaccggctca

SEQ ID NO: 5476 - DNA, 21 bp, synthetic construct
  source 1..21: mol_type = other DNA
gggggggtggcgtcctcctat

SEQ ID NO: 5477 - DNA, 21 bp, synthetic construct
  source 1..21: mol_type = other DNA
gacacctacggcaccaagcat

SEQ ID NO: 5478 - DNA, 21 bp, synthetic construct
  source 1..21: mol_type = other DNA
gactcaggcgtaggccgctac

SEQ ID NO: 5479 - DNA, 21 bp, synthetic construct
  source 1..21: mol_type = other DNA
tattccagggagggggggaat

SEQ ID NO: 5480 - DNA, 21 bp, synthetic construct
  source 1..21: mol_type = other DNA
tattgggggggggagaaacag

SEQ ID NO: 5481 - DNA, 21 bp, synthetic construct
  source 1..21: mol_type = other DNA
tttgccaagtttaacgccaac

SEQ ID NO: 5482 - DNA, 21 bp, synthetic construct
  source 1..21: mol_type = other DNA
accatctcatcatcaaactgg

SEQ ID NO: 5483 - DNA, 21 bp, synthetic construct
  source 1..21: mol_type = other DNA
ataaaatattcctcctccgat

SEQ ID NO: 5484 - DNA, 21 bp, synthetic construct
  source 1..21: mol_type = other DNA
ttcgcgaggccggggacgaat

SEQ ID NO: 5485 - DNA, 21 bp, synthetic construct
  source 1..21: mol_type = other DNA
cgctcaggcggcgccggcggc

SEQ ID NO: 5486 - DNA, 21 bp, synthetic construct
  source 1..21: mol_type = other DNA
aaagataatgcgacgaggtat

SEQ ID NO: 5487 - DNA, 21 bp, synthetic construct
  source 1..21: mol_type = other DNA
tacgccaagcccaactcaaac

SEQ ID NO: 5488 - DNA, 21 bp, synthetic construct
  source 1..21: mol_type = other DNA
tacgcccgctacaaccaaaac

SEQ ID NO: 5489 - DNA, 21 bp, synthetic construct
  source 1..21: mol_type = other DNA
aatgcgagggatataaggtat

SEQ ID NO: 5490 - DNA, 21 bp, synthetic construct
  source 1..21: mol_type = other DNA
atagggcacatggggtccgat

SEQ ID NO: 5491 - DNA, 21 bp, synthetic construct
  source 1..21: mol_type = other DNA
tactcacgcggcgaccataac

SEQ ID NO: 5492 - DNA, 21 bp, synthetic construct
  source 1..21: mol_type = other DNA
tataaaaatgggatgtccaat

SEQ ID NO: 5493 - DNA, 21 bp, synthetic construct
  source 1..21: mol_type = other DNA
ttctccaggccgggggcgaat

SEQ ID NO: 5494 - DNA, 21 bp, synthetic construct
  source 1..21: mol_type = other DNA
ttttcaaagcccggctacaac

SEQ ID NO: 5495 - DNA, 21 bp, synthetic construct
  source 1..21: mol_type = other DNA
ttttcacatgcctcatcatac

SEQ ID NO: 5496 - DNA, 21 bp, synthetic construct
  source 1..21: mol_type = other DNA
aagggcgacaagatcacctgg

SEQ ID NO: 5497 - DNA, 21 bp, synthetic construct
  source 1..21: mol_type = other DNA
tactcacaaggcaagaccaac

SEQ ID NO: 5498 - DNA, 21 bp, synthetic construct
  source 1..21: mol_type = other DNA
ttcgcgaaattgggggtgaat

SEQ ID NO: 5499 - DNA, 21 bp, synthetic construct
  source 1..21: mol_type = other DNA
ttctccaaagaggggaaaaat

SEQ ID NO: 5500 - DNA, 21 bp, synthetic construct
  source 1..21: mol_type = other DNA
atagtgaattccaggaattcc

SEQ ID NO: 5501 - DNA, 21 bp, synthetic construct
  source 1..21: mol_type = other DNA
tttgccaagatcaactacaac

SEQ ID NO: 5502 - DNA, 21 bp, synthetic construct
  source 1..21: mol_type = other DNA
atcggctactcaggcgccgac

SEQ ID NO: 5503 - DNA, 21 bp, synthetic construct
  source 1..21: mol_type = other DNA
ttcgcgaaatataatgagaat

SEQ ID NO: 5504 - DNA, 21 bp, synthetic construct
  source 1..21: mol_type = other DNA
ttttcaaaggtaaacaacaac

SEQ ID NO: 5505 - DNA, 21 bp, synthetic construct
  source 1..21: mol_type = other DNA
cataccaacgtaaccgcctgg

SEQ ID NO: 5506 - DNA, 21 bp, synthetic construct
  source 1..21: mol_type = other DNA
taccattcatcatcaggcaac

SEQ ID NO: 5507 - DNA, 21 bp, synthetic construct
  source 1..21: mol_type = other DNA
ttttttcaaggcggccatcat

SEQ ID NO: 5508 - DNA, 21 bp, synthetic construct
  source 1..21: mol_type = other DNA
ttcgcgaaaatgaatgtgaat

SEQ ID NO: 5509 - DNA, 21 bp, synthetic construct
  source 1..21: mol_type = other DNA
tacgccaaggtaaacatgaac

SEQ ID NO: 5510 - DNA, 21 bp, synthetic construct
  source 1..21: mol_type = other DNA
tataggtatgatgcggtggtg

SEQ ID NO: 5511 - DNA, 21 bp, synthetic construct
  source 1..21: mol_type = other DNA
tggaaaccgggggtgccgtcc

SEQ ID NO: 5512 - DNA, 21 bp, synthetic construct
  source 1..21: mol_type = other DNA
ttctccaaaccgaattccaat

SEQ ID NO: 5513 - DNA, 21 bp, synthetic construct
  source 1..21: mol_type = other DNA
tttgccaagctgaactcaaac

SEQ ID NO: 5514 - DNA, 21 bp, synthetic construct
  source 1..21: mol_type = other DNA
ttctccaaagggggggggaat

SEQ ID NO: 5515 - DNA, 21 bp, synthetic construct
  source 1..21: mol_type = other DNA
ttcgcgaggataaatgataat

SEQ ID NO: 5516 - DNA, 21 bp, synthetic construct
  source 1..21: mol_type = other DNA
ttcgcgaaaacgaatttgaat

SEQ ID NO: 5517 - DNA, 21 bp, synthetic construct
  source 1..21: mol_type = other DNA
gtatcaggctttaccaagcaa

SEQ ID NO: 5518 - DNA, 21 bp, synthetic construct
  source 1..21: mol_type = other DNA
ttctccaggttcaatgagaat

SEQ ID NO: 5519 - DNA, 21 bp, synthetic construct
  source 1..21: mol_type = other DNA
gtatcactgggcacccgcaac

SEQ ID NO: 5520 - DNA, 21 bp, synthetic construct
  source 1..21: mol_type = other DNA
ttctccagggggggggggaat

SEQ ID NO: 5521 - DNA, 21 bp, synthetic construct
  source 1..21: mol_type = other DNA
caaaagatcatgcgcggcgac

SEQ ID NO: 5522 - DNA, 21 bp, synthetic construct
  source 1..21: mol_type = other DNA
taccaacgcgacggctacggc

SEQ ID NO: 5523 - DNA, 21 bp, synthetic construct
  source 1..21: mol_type = other DNA
ttctccaaaacgaatacgaat

SEQ ID NO: 5524 - DNA, 21 bp, synthetic construct
  source 1..21: mol_type = other DNA
cactcccacggggggagggat

SEQ ID NO: 5525 - DNA, 21 bp, synthetic construct
  source 1..21: mol_type = other DNA
cacgataggacgtccacgtat

SEQ ID NO: 5526 - DNA, 21 bp, synthetic construct
  source 1..21: mol_type = other DNA
acctcagactcacgcggctgg

SEQ ID NO: 5527 - DNA, 21 bp, synthetic construct
  source 1..21: mol_type = other DNA
tggaggacggatgggatgggg

SEQ ID NO: 5528 - DNA, 21 bp, synthetic construct
  source 1..21: mol_type = other DNA
ggggtgaaatccgcgtatcag

SEQ ID NO: 5529 - DNA, 21 bp, synthetic construct
  source 1..21: mol_type = other DNA
tttgcccgcatgaacgaaaac

SEQ ID NO: 5530 - DNA, 21 bp, synthetic construct
  source 1..21: mol_type = other DNA
tattccaaacacaatgcgtcc

SEQ ID NO: 5531 - DNA, 21 bp, synthetic construct
  source 1..21: mol_type = other DNA
ttcgcgaaaatgaatacgaat

SEQ ID NO: 5532 - DNA, 21 bp, synthetic construct
  source 1..21: mol_type = other DNA
aaggccgaccgcaacccctac

SEQ ID NO: 5533 - DNA, 21 bp, synthetic construct
  source 1..21: mol_type = other DNA
ttttcacgcgacggcaagaac

SEQ ID NO: 5534 - DNA, 21 bp, synthetic construct
  source 1..21: mol_type = other DNA
tccaatgggaaatggtccggg

SEQ ID NO: 5535 - DNA, 21 bp, synthetic construct
  source 1..21: mol_type = other DNA
aataatttcgggacgagggat

SEQ ID NO: 5536 - DNA, 21 bp, synthetic construct
  source 1..21: mol_type = other DNA
ttcgcgaaagtgaatgcgaat

SEQ ID NO: 5537 - DNA, 21 bp, synthetic construct
  source 1..21: mol_type = other DNA
tatttcccggggacgatgccg

SEQ ID NO: 5538 - DNA, 21 bp, synthetic construct
  source 1..21: mol_type = other DNA
tatgcgcagcaggggttgaat

SEQ ID NO: 5539 - DNA, 21 bp, synthetic construct
  source 1..21: mol_type = other DNA
tatgcgagggatgggacgaat

SEQ ID NO: 5540 - DNA, 21 bp, synthetic construct
  source 1..21: mol_type = other DNA
ttcgcgaaacacaatgggaat

SEQ ID NO: 5541 - DNA, 21 bp, synthetic construct
  source 1..21: mol_type = other DNA
aggaatatggagtccatgtat

SEQ ID NO: 5542 - DNA, 21 bp, synthetic construct
  source 1..21: mol_type = other DNA
tttgccaagatcggcggcaac

SEQ ID NO: 5543 - DNA, 21 bp, synthetic construct
  source 1..21: mol_type = other DNA
ttcgcgaaaccggggtccaat

SEQ ID NO: 5544 - DNA, 21 bp, synthetic construct
  source 1..21: mol_type = other DNA
ttcgcgaaagcgggggataat

SEQ ID NO: 5545 - DNA, 21 bp, synthetic construct
  source 1..21: mol_type = other DNA
gatttcggggtgtccaggcac

SEQ ID NO: 5546 - DNA, 21 bp, synthetic construct
  source 1..21: mol_type = other DNA
ttcgcgaaatccaatacgaat

SEQ ID NO: 5547 - DNA, 21 bp, synthetic construct
  source 1..21: mol_type = other DNA
tatcacgggcacacgttgcac

SEQ ID NO: 5548 - DNA, 21 bp, synthetic construct
  source 1..21: mol_type = other DNA
tttgccaaggccggcggcaac

SEQ ID NO: 5549 - DNA, 21 bp, synthetic construct
  source 1..21: mol_type = other DNA
gccaacatgaaccgcaccgaa

SEQ ID NO: 5550 - DNA, 21 bp, synthetic construct
  source 1..21: mol_type = other DNA
ttttcacgcgaaaactcaaac

SEQ ID NO: 5551 - DNA, 21 bp, synthetic construct
  source 1..21: mol_type = other DNA
ttttcaaagggcaacgaaaac

SEQ ID NO: 5552 - DNA, 21 bp, synthetic construct
  source 1..21: mol_type = other DNA
tatgcgaaaatgaatgagaat

SEQ ID NO: 5553 - DNA, 21 bp, synthetic construct
  source 1..21: mol_type = other DNA
tacgccaagcccaacatgaac

SEQ ID NO: 5554 - DNA, 21 bp, synthetic construct
  source 1..21: mol_type = other DNA
gggaatcagaattccaattat

SEQ ID NO: 5555 - DNA, 21 bp, synthetic construct
  source 1..21: mol_type = other DNA
tattccagggatggggagaat

SEQ ID NO: 5556 - DNA, 21 bp, synthetic construct
  source 1..21: mol_type = other DNA
tacaaccaaaacacctacaag

SEQ ID NO: 5557 - DNA, 21 bp, synthetic construct
  source 1..21: mol_type = other DNA
tttgccaagctgaacgccaac

SEQ ID NO: 5558 - DNA, 21 bp, synthetic construct
  source 1..21: mol_type = other DNA
ttttcaaagaccaaccaaaac

SEQ ID NO: 5559 - DNA, 21 bp, synthetic construct
  source 1..21: mol_type = other DNA
ttctccaggccgaatgagaat

SEQ ID NO: 5560 - DNA, 21 bp, synthetic construct
  source 1..21: mol_type = other DNA
ttttcacgccccggcgtaaac

SEQ ID NO: 5561 - DNA, 21 bp, synthetic construct
  source 1..21: mol_type = other DNA
ttcgcgagggagggggtgaat

SEQ ID NO: 5562 - DNA, 21 bp, synthetic construct
  source 1..21: mol_type = other DNA
ttttcaaaggacggccgcaac

SEQ ID NO: 5563 - DNA, 21 bp, synthetic construct
  source 1..21: mol_type = other DNA
aatcacaaatccacggcgaat

SEQ ID NO: 5564 - DNA, 21 bp, synthetic construct
  source 1..21: mol_type = other DNA
ttcgcgaggccggggcagaat

SEQ ID NO: 5565 - DNA, 21 bp, synthetic construct
  source 1..21: mol_type = other DNA
aactcacaagacaccaagtgg

SEQ ID NO: 5566 - DNA, 21 bp, synthetic construct
  source 1..21: mol_type = other DNA
aacctgtcacatggccatggc

SEQ ID NO: 5567 - DNA, 21 bp, synthetic construct
  source 1..21: mol_type = other DNA
ttcgcgaggttcaatgagaat

SEQ ID NO: 5568 - DNA, 21 bp, synthetic construct
  source 1..21: mol_type = other DNA
tatatgaggaatacggtgccg

SEQ ID NO: 5569 - DNA, 21 bp, synthetic construct
  source 1..21: mol_type = other DNA
tatgagaaatatacgaattcc

SEQ ID NO: 5570 - DNA, 21 bp, synthetic construct
  source 1..21: mol_type = other DNA
catggcggcaccaagaacggc

SEQ ID NO: 5571 - DNA, 21 bp, synthetic construct
  source 1..21: mol_type = other DNA
ttttcacgcgacggccataac

SEQ ID NO: 5572 - DNA, 21 bp, synthetic construct
  source 1..21: mol_type = other DNA
ttttcaaagcccggcatcaac

SEQ ID NO: 5573 - DNA, 21 bp, synthetic construct
  source 1..21: mol_type = other DNA
ttcgcgaaacagggggataat

SEQ ID NO: 5574 - DNA, 21 bp, synthetic construct
  source 1..21: mol_type = other DNA
tttgccaagatcaacaccaac

SEQ ID NO: 5575 - DNA, 21 bp, synthetic construct
  source 1..21: mol_type = other DNA
tactcacgcgacggctcaaac

SEQ ID NO: 5576 - DNA, 21 bp, synthetic construct
  source 1..21: mol_type = other DNA
ttttcaaagcccaaccccaac

SEQ ID NO: 5577 - DNA, 21 bp, synthetic construct
  source 1..21: mol_type = other DNA
cgccccaccggccccaacggc

SEQ ID NO: 5578 - DNA, 21 bp, synthetic construct
  source 1..21: mol_type = other DNA
tggtcaggcggctcaggcggc

SEQ ID NO: 5579 - DNA, 21 bp, synthetic construct
  source 1..21: mol_type = other DNA
aactcagaccgcggcaagaac

SEQ ID NO: 5580 - DNA, 21 bp, synthetic construct
  source 1..21: mol_type = other DNA
gataaagggaataatgcgtat

SEQ ID NO: 5581 - DNA, 21 bp, synthetic construct
  source 1..21: mol_type = other DNA
gtagtagccatgcataagcaa

SEQ ID NO: 5582 - DNA, 21 bp, synthetic construct
  source 1..21: mol_type = other DNA
ataggggggaaacaggggttg

SEQ ID NO: 5583 - DNA, 21 bp, synthetic construct
  source 1..21: mol_type = other DNA
aggataaaagatacgccggag

SEQ ID NO: 5584 - DNA, 21 bp, synthetic construct
  source 1..21: mol_type = other DNA
tactacaagaccgactcatca

SEQ ID NO: 5585 - DNA, 21 bp, synthetic construct
  source 1..21: mol_type = other DNA
ttttcaaagatcaacggcaac

SEQ ID NO: 5586 - DNA, 21 bp, synthetic construct
  source 1..21: mol_type = other DNA
ctgggcgacggctggggcaag

SEQ ID NO: 5587 - DNA, 21 bp, synthetic construct
  source 1..21: mol_type = other DNA
ttttcaaagaacaacgaaaac

SEQ ID NO: 5588 - DNA, 21 bp, synthetic construct
  source 1..21: mol_type = other DNA
ttcgcgagggatggggcgaat

SEQ ID NO: 5589 - DNA, 21 bp, synthetic construct
  source 1..21: mol_type = other DNA
tacgccaaggacaacctgaac

SEQ ID NO: 5590 - DNA, 21 bp, synthetic construct
  source 1..21: mol_type = other DNA
ttcgcgaaagagaattccaat

SEQ ID NO: 5591 - DNA, 21 bp, synthetic construct
  source 1..21: mol_type = other DNA
gattataaagggttcccgtcc

SEQ ID NO: 5592 - DNA, 21 bp, synthetic construct
  source 1..21: mol_type = other DNA
ttcgcgaaattgggggataat

SEQ ID NO: 5593 - DNA, 21 bp, synthetic construct
  source 1..21: mol_type = other DNA
tttgccaaggacggctacaac

SEQ ID NO: 5594 - DNA, 21 bp, synthetic construct
  source 1..21: mol_type = other DNA
ttcgcgaaagatgggatgaat

SEQ ID NO: 5595 - DNA, 21 bp, synthetic construct
  source 1..21: mol_type = other DNA
ttcgcgaaagcgaatgagaat

SEQ ID NO: 5596 - DNA, 21 bp, synthetic construct
  source 1..21: mol_type = other DNA
ttcgcgaaagagggggggaat

SEQ ID NO: 5597 - DNA, 21 bp, synthetic construct
  source 1..21: mol_type = other DNA
taccccggctcaggcggcctg

SEQ ID NO: 5598 - DNA, 21 bp, synthetic construct
  source 1..21: mol_type = other DNA
aattcctccgggatgagggag

SEQ ID NO: 5599 - DNA, 21 bp, synthetic construct
  source 1..21: mol_type = other DNA
ttttcaaagcccaacctgaac

SEQ ID NO: 5600 - DNA, 21 bp, synthetic construct
  source 1..21: mol_type = other DNA
tactcaaagtttggcgtaaac

SEQ ID NO: 5601 - DNA, 21 bp, synthetic construct
  source 1..21: mol_type = other DNA
atcgcctcactgggccgcgac

SEQ ID NO: 5602 - DNA, 21 bp, synthetic construct
  source 1..21: mol_type = other DNA
ttttcaaagatcaacgacaac

SEQ ID NO: 5603 - DNA, 21 bp, synthetic construct
  source 1..21: mol_type = other DNA
gtacgcatcgaccaagcccaa

SEQ ID NO: 5604 - DNA, 21 bp, synthetic construct
  source 1..21: mol_type = other DNA
tacgccaaggaaaacctgaac

SEQ ID NO: 5605 - DNA, 21 bp, synthetic construct
  source 1..21: mol_type = other DNA
tttgcccgccccaaccataac

SEQ ID NO: 5606 - DNA, 21 bp, synthetic construct
  source 1..21: mol_type = other DNA
aatatacacgggtatgtgacg

SEQ ID NO: 5607 - DNA, 21 bp, synthetic construct
  source 1..21: mol_type = other DNA
tacgccaaggacaaccaaaac

SEQ ID NO: 5608 - DNA, 21 bp, synthetic construct
  source 1..21: mol_type = other DNA
ttttcaaaggaaaaccaaaac

SEQ ID NO: 5609 - DNA, 21 bp, synthetic construct
  source 1..21: mol_type = other DNA
ttcgcgaaaaataattataat

SEQ ID NO: 5610 - DNA, 21 bp, synthetic construct
  source 1..21: mol_type = other DNA
ttttcaaagtttggcatcaac

SEQ ID NO: 5611 - DNA, 21 bp, synthetic construct
  source 1..21: mol_type = other DNA
tattcccgactctccgcgata

SEQ ID NO: 5612 - DNA, 21 bp, synthetic construct
  source 1..21: mol_type = other DNA
tggcccccgcctgttaattcc

SEQ ID NO: 5613 - DNA, 21 bp, synthetic construct
  source 1..21: mol_type = other DNA
aggactgcactcgtatttcca

SEQ ID NO: 5614 - DNA, 21 bp, synthetic construct
  source 1..21: mol_type = other DNA
attcaccgtctactcccttcc

SEQ ID NO: 5615 - DNA, 21 bp, synthetic construct
  source 1..21: mol_type = other DNA
tactcacgtctatcagctatc

SEQ ID NO: 5616 - DNA, 21 bp, synthetic construct
  source 1..21: mol_type = other DNA
tattcacgtatcaatgcaaat

SEQ ID NO: 5617 - DNA, 21 bp, synthetic construct
  source 1..21: mol_type = other DNA
tattttactggcgttgtggcc

SEQ ID NO: 5618 - DNA, 21 bp, synthetic construct
  source 1..21: mol_type = other DNA
cgtaatgacatggtttttccc

SEQ ID NO: 5619 - DNA, 21 bp, synthetic construct
  source 1..21: mol_type = other DNA
ttgcataggctcttgaaagac

SEQ ID NO: 5620 - DNA, 21 bp, synthetic construct
  source 1..21: mol_type = other DNA
tatcttaaatctcagtcatat

SEQ ID NO: 5621 - DNA, 21 bp, synthetic construct
  source 1..21: mol_type = other DNA
tattctcggataaacacgaac

SEQ ID NO: 5622 - DNA, 21 bp, synthetic construct
  source 1..21: mol_type = other DNA
tggcctccaccggtcaacagc

SEQ ID NO: 5623 - DNA, 21 bp, synthetic construct
  source 1..21: mol_type = other DNA
tacacaaagtccgacgtgcgg

SEQ ID NO: 5624 - DNA, 21 bp, synthetic construct
  source 1..21: mol_type = other DNA
ttcagccgcgttggcttcaat

SEQ ID NO: 5625 - DNA, 21 bp, synthetic construct
  source 1..21: mol_type = other DNA
cgtacagcccttgtgttcccg

SEQ ID NO: 5626 - DNA, 21 bp, synthetic construct
  source 1..21: mol_type = other DNA
aaaacatatgatgcatttgtg

SEQ ID NO: 5627 - DNA, 21 bp, synthetic construct
  source 1..21: mol_type = other DNA
tatactaaatcggatgtacga

SEQ ID NO: 5628 - DNA, 21 bp, synthetic construct
  source 1..21: mol_type = other DNA
tatagcagatctaacgcaaat

SEQ ID NO: 5629 - DNA, 21 bp, synthetic construct
  source 1..21: mol_type = other DNA
tattcccggcccggccccaat

SEQ ID NO: 5630 - DNA, 21 bp, synthetic construct
  source 1..21: mol_type = other DNA
aagacctacgacgcgttcgtc

SEQ ID NO: 5631 - DNA, 21 bp, synthetic construct
  source 1..21: mol_type = other DNA
tatcttaagtctgaacgtaat

SEQ ID NO: 5632 - DNA, 21 bp, synthetic construct
  source 1..21: mol_type = other DNA
agatccgaacatgtctttcca

SEQ ID NO: 5633 - DNA, 21 bp, synthetic construct
  source 1..21: mol_type = other DNA
tcatacgcgaagtccctcttg

SEQ ID NO: 5634 - DNA, 21 bp, synthetic construct
  source 1..21: mol_type = other DNA
ttatctaagctaagtgcaaac

SEQ ID NO: 5635 - DNA, 21 bp, synthetic construct
  source 1..21: mol_type = other DNA
tattcgaggttatctgggaat

SEQ ID NO: 5636 - DNA, 21 bp, synthetic construct
  source 1..21: mol_type = other DNA
tacagccgtatcaataccaat

SEQ ID NO: 5637 - DNA, 21 bp, synthetic construct
  source 1..21: mol_type = other DNA
tatagcagactaaacaaagac

SEQ ID NO: 5638 - DNA, 21 bp, synthetic construct
  source 1..21: mol_type = other DNA
atccatagacttctaccctca

SEQ ID NO: 5639 - DNA, 21 bp, synthetic construct
  source 1..21: mol_type = other DNA
tactcagccattggaatgaac

SEQ ID NO: 5640 - DNA, 21 bp, synthetic construct
  source 1..21: mol_type = other DNA
tacctgaagagccaatcctac

SEQ ID NO: 5641 - DNA, 21 bp, synthetic construct
  source 1..21: mol_type = other DNA
tatttgaagagtcaggggaac

SEQ ID NO: 5642 - DNA, 21 bp, synthetic construct
  source 1..21: mol_type = other DNA
tacgcgcgaatcgggctgaac

SEQ ID NO: 5643 - DNA, 21 bp, synthetic construct
  source 1..21: mol_type = other DNA
cggaacgatatggtcttccct

SEQ ID NO: 5644 - DNA, 21 bp, synthetic construct
  source 1..21: mol_type = other DNA
tactcacgccttaataaggat

SEQ ID NO: 5645 - DNA, 21 bp, synthetic construct
  source 1..21: mol_type = other DNA
tatagcaaacttaatgataag

SEQ ID NO: 5646 - DNA, 21 bp, synthetic construct
  source 1..21: mol_type = other DNA
tatgccaaaaatggctttaac

SEQ ID NO: 5647 - DNA, 21 bp, synthetic construct
  source 1..21: mol_type = other DNA
tattcgaaggtccagaccaat

SEQ ID NO: 5648 - DNA, 21 bp, synthetic construct
  source 1..21: mol_type = other DNA
tactctcgttccaatgctaac

SEQ ID NO: 5649 - DNA, 21 bp, synthetic construct
  source 1..21: mol_type = other DNA
tacactcgcttaaaccaaaat

SEQ ID NO: 5650 - DNA, 21 bp, synthetic construct
  source 1..21: mol_type = other DNA
tacagtagattgtccggaaac

SEQ ID NO: 5651 - DNA, 21 bp, synthetic construct
  source 1..21: mol_type = other DNA
ctacacaagtctggaatgaat

SEQ ID NO: 5652 - DNA, 21 bp, synthetic construct
  source 1..21: mol_type = other DNA
ctttctaaggtcggagctaat

SEQ ID NO: 5653 - DNA, 21 bp, synthetic construct
  source 1..21: mol_type = other DNA
tacttaaagtcgcaggctatg

SEQ ID NO: 5654 - DNA, 21 bp, synthetic construct
  source 1..21: mol_type = other DNA
tacgttaaatcctccaataat

SEQ ID NO: 5655 - DNA, 21 bp, synthetic construct
  source 1..21: mol_type = other DNA
tacgtcaaatcggaccatcac

SEQ ID NO: 5656 - DNA, 21 bp, synthetic construct
  source 1..21: mol_type = other DNA
tatgctcggttaggaatgaac

SEQ ID NO: 5657 - DNA, 21 bp, synthetic construct
  source 1..21: mol_type = other DNA
tataccagactgaatcagaac

SEQ ID NO: 5658 - DNA, 21 bp, synthetic construct
  source 1..21: mol_type = other DNA
tacgcgcgtggaggaatgaat

SEQ ID NO: 5659 - DNA, 21 bp, synthetic construct
  source 1..21: mol_type = other DNA
cgagggatcgacttctacccc

SEQ ID NO: 5660 - DNA, 21 bp, synthetic construct
  source 1..21: mol_type = other DNA
tacgtaaggtcggatgttcgg

SEQ ID NO: 5661 - DNA, 21 bp, synthetic construct
  source 1..21: mol_type = other DNA
tatgttaagtctgatcaccat

SEQ ID NO: 5662 - DNA, 21 bp, synthetic construct
  source 1..21: mol_type = other DNA
tacgcgaagaacggattcaat

SEQ ID NO: 5663 - DNA, 21 bp, synthetic construct
  source 1..21: mol_type = other DNA
tacctgaaatcagagcgcaac

SEQ ID NO: 5664 - DNA, 21 bp, synthetic construct
  source 1..21: mol_type = other DNA
tactcacggttgaatatgaac

SEQ ID NO: 5665 - DNA, 21 bp, synthetic construct
  source 1..21: mol_type = other DNA
tactcaaagctcaacgacaaa

SEQ ID NO: 5666 - DNA, 21 bp, synthetic construct
  source 1..21: mol_type = other DNA
tatagtcggatgaatgcaaat

SEQ ID NO: 5667 - DNA, 21 bp, synthetic construct
  source 1..21: mol_type = other DNA
ctgagcaaattatccgccaat

SEQ ID NO: 5668 - DNA, 21 bp, synthetic construct
  source 1..21: mol_type = other DNA
tatcataagttagcgaataat

SEQ ID NO: 5669 - DNA, 21 bp, synthetic construct
  source 1..21: mol_type = other DNA
tatgcaagaggtggaaacaat

SEQ ID NO: 5670 - DNA, 21 bp, synthetic construct
  source 1..21: mol_type = other DNA
aggtcggagcacgtattcccc

SEQ ID NO: 5671 - DNA, 21 bp, synthetic construct
  source 1..21: mol_type = other DNA
tatagcaagaatgggatgaac

SEQ ID NO: 5672 - DNA, 21 bp, synthetic construct
  source 1..21: mol_type = other DNA
tattcgaaactcggtgggaac

SEQ ID NO: 5673 - DNA, 21 bp, synthetic construct
  source 1..21: mol_type = other DNA
tatgcacgcggtgggatgaac

SEQ ID NO: 5674 - DNA, 21 bp, synthetic construct
  source 1..21: mol_type = other DNA
tattcgcggatgaacactaac

SEQ ID NO: 5675 - DNA, 21 bp, synthetic construct
  source 1..21: mol_type = other DNA
tattcacgaatgaataacaat

SEQ ID NO: 5676 - DNA, 21 bp, synthetic construct
  source 1..21: mol_type = other DNA
tatcacattttagggaaaaat

SEQ ID NO: 5677 - DNA, 21 bp, synthetic construct
  source 1..21: mol_type = other DNA
ctaagtagggtgggcatcgat

SEQ ID NO: 5678 - DNA, 21 bp, synthetic construct
  source 1..21: mol_type = other DNA
tattctcgcttaaacatgaat

SEQ ID NO: 5679 - DNA, 21 bp, synthetic construct
  source 1..21: mol_type = other DNA
tatttgaaaagtcaagcaatg

SEQ ID NO: 5680 - DNA, 21 bp, synthetic construct
  source 1..21: mol_type = other DNA
tacttcacaggtgtcgtcgca

SEQ ID NO: 5681 - DNA, 21 bp, synthetic construct
  source 1..21: mol_type = other DNA
tattctcggatgaactctaac

SEQ ID NO: 5682 - DNA, 21 bp, synthetic construct
  source 1..21: mol_type = other DNA
atgtcccgtattggagtgaat

SEQ ID NO: 5683 - DNA, 21 bp, synthetic construct
  source 1..21: mol_type = other DNA
ttaagccgctctggcaataac

SEQ ID NO: 5684 - DNA, 21 bp, synthetic construct
  source 1..21: mol_type = other DNA
tactctaaatcgggagcgaat

SEQ ID NO: 5685 - DNA, 21 bp, synthetic construct
  source 1..21: mol_type = other DNA
tatagcaaagctcagccgaat

SEQ ID NO: 5686 - DNA, 21 bp, synthetic construct
  source 1..21: mol_type = other DNA
taccacaagtcgcaaagtaat

SEQ ID NO: 5687 - DNA, 21 bp, synthetic construct
  source 1..21: mol_type = other DNA
gatatgtcctcgcgaatctgg

SEQ ID NO: 5688 - DNA, 21 bp, synthetic construct
  source 1..21: mol_type = other DNA
cactcgaggttgaacgtatcg

SEQ ID NO: 5689 - DNA, 21 bp, synthetic construct
  source 1..21: mol_type = other DNA
tatcataaaagccagtcgaac

SEQ ID NO: 5690 - DNA, 21 bp, synthetic construct
  source 1..21: mol_type = other DNA
tactccaaaatgaatgataac

SEQ ID NO: 5691 - DNA, 21 bp, synthetic construct
  source 1..21: mol_type = other DNA
taccacaaacttgccaacaac

SEQ ID NO: 5692 - DNA, 21 bp, synthetic construct
  source 1..21: mol_type = other DNA
cgaacaccaactgtgtatcct

SEQ ID NO: 5693 - DNA, 21 bp, synthetic construct
  source 1..21: mol_type = other DNA
ttgcataaatcaggcatgaac

SEQ ID NO: 5694 - DNA, 21 bp, synthetic construct
  source 1..21: mol_type = other DNA
tatacgcgactctcgatgaat

SEQ ID NO: 5695 - DNA, 21 bp, synthetic construct
  source 1..21: mol_type = other DNA
tatctgaaatcggacaaaagc

SEQ ID NO: 5696 - DNA, 21 bp, synthetic construct
  source 1..21: mol_type = other DNA
tatacacgttcacagacagaa

SEQ ID NO: 5697 - DNA, 21 bp, synthetic construct
  source 1..21: mol_type = other DNA
gtaacgtccaccaatggcatc

SEQ ID NO: 5698 - DNA, 21 bp, synthetic construct
  source 1..21: mol_type = other DNA
tacgctcggggagggaataac

SEQ ID NO: 5699 - DNA, 21 bp, synthetic construct
  source 1..21: mol_type = other DNA
ttcgttaagtccgatactaaa

SEQ ID NO: 5700 - DNA, 21 bp, synthetic construct
  source 1..21: mol_type = other DNA
tacacccgtttgagtatgaac

SEQ ID NO: 5701 - DNA, 21 bp, synthetic construct
  source 1..21: mol_type = other DNA
tacagtcgtatgaattccaat

SEQ ID NO: 5702 - DNA, 21 bp, synthetic construct
  source 1..21: mol_type = other DNA
agggcgcttgaatgctgctac

SEQ ID NO: 5703 - DNA, 21 bp, synthetic construct
  source 1..21: mol_type = other DNA
ctgcaccgcgatggaattaac

SEQ ID NO: 5704 - DNA, 21 bp, synthetic construct
  source 1..21: mol_type = other DNA
tattcgaagatgaacgacaat

SEQ ID NO: 5705 - DNA, 21 bp, synthetic construct
  source 1..21: mol_type = other DNA
taccttaaatcacaaggtaat

SEQ ID NO: 5706 - DNA, 21 bp, synthetic construct
  source 1..21: mol_type = other DNA
gtacatcgcctgcaagataag

SEQ ID NO: 5707 - DNA, 21 bp, synthetic construct
  source 1..21: mol_type = other DNA
tactctcgacctgggccgaac

SEQ ID NO: 5708 - DNA, 21 bp, synthetic construct
  source 1..21: mol_type = other DNA
tatgttcggtccgacgtgcga

SEQ ID NO: 5709 - DNA, 21 bp, synthetic construct
  source 1..21: mol_type = other DNA
tatgtgcgttcagataggaac

SEQ ID NO: 5710 - DNA, 21 bp, synthetic construct
  source 1..21: mol_type = other DNA
tatgcaagaataggcctaaat

SEQ ID NO: 5711 - DNA, 21 bp, synthetic construct
  source 1..21: mol_type = other DNA
taccttaagtcagataagtcg

SEQ ID NO: 5712 - DNA, 21 bp, synthetic construct
  source 1..21: mol_type = other DNA
tactctcgaatgaataccaat

SEQ ID NO: 5713 - DNA, 21 bp, synthetic construct
  source 1..21: mol_type = other DNA
tattcgtccactcatggcgtg

SEQ ID NO: 5714 - DNA, 21 bp, synthetic construct
  source 1..21: mol_type = other DNA
tactcttcgacccacggtgta

SEQ ID NO: 5715 - DNA, 21 bp, synthetic construct
  source 1..21: mol_type = other DNA
tacactcgcagccaaacggag

SEQ ID NO: 5716 - DNA, 21 bp, synthetic construct
  source 1..21: mol_type = other DNA
tacagccgcatgaacaataac

SEQ ID NO: 5717 - DNA, 21 bp, synthetic construct
  source 1..21: mol_type = other DNA
tactccaaagtgcaaactaac

SEQ ID NO: 5718 - DNA, 21 bp, synthetic construct
  source 1..21: mol_type = other DNA
tttagtcgagtggggtttaac

SEQ ID NO: 5719 - DNA, 21 bp, synthetic construct
  source 1..21: mol_type = other DNA
tacagtaaggcccaacctaac

SEQ ID NO: 5720 - DNA, 21 bp, synthetic construct
  source 1..21: mol_type = other DNA
tcaatggaatctcgactgtgg

SEQ ID NO: 5721 - DNA, 21 bp, synthetic construct
  source 1..21: mol_type = other DNA
tacgcacgccttgggatgaat

SEQ ID NO: 5722 - DNA, 21 bp, synthetic construct
  source 1..21: mol_type = other DNA
ctccaccgcctagcatcttcg

SEQ ID NO: 5723 - DNA, 21 bp, synthetic construct
  source 1..21: mol_type = other DNA
gacctttcgagtcataactgg

SEQ ID NO: 5724 - DNA, 21 bp, synthetic construct
  source 1..21: mol_type = other DNA
ttgtcaagagtaggtatagac

SEQ ID NO: 5725 - DNA, 21 bp, synthetic construct
  source 1..21: mol_type = other DNA
cttcatgcattaagtcataac

SEQ ID NO: 5726 - DNA, 21 bp, synthetic construct
  source 1..21: mol_type = other DNA
gtcactagcacgaacgggata

SEQ ID NO: 5727 - DNA, 21 bp, synthetic construct
  source 1..21: mol_type = other DNA
tatgctagaagcggtttaaac

SEQ ID NO: 5728 - DNA, 21 bp, synthetic construct
  source 1..21: mol_type = other DNA
tactcaaaaaacggcatgaat

SEQ ID NO: 5729 - DNA, 21 bp, synthetic construct
  source 1..21: mol_type = other DNA
cgtactcctaccgtctacccc

SEQ ID NO: 5730 - DNA, 21 bp, synthetic construct
  source 1..21: mol_type = other DNA
tactctaaggtcgggcagaat

SEQ ID NO: 5731 - DNA, 21 bp, synthetic construct
  source 1..21: mol_type = other DNA
tactcaagaatgggaatgaat

SEQ ID NO: 5732 - DNA, 21 bp, synthetic construct
  source 1..21: mol_type = other DNA
ctccatgtccgaagcctaaac

SEQ ID NO: 5733 - DNA, 21 bp, synthetic construct
  source 1..21: mol_type = other DNA
ttgcatcgggacggtatcaat

SEQ ID NO: 5734 - DNA, 21 bp, synthetic construct
  source 1..21: mol_type = other DNA
tatagtcggcagaacgagaat

SEQ ID NO: 5735 - DNA, 21 bp, synthetic construct
  source 1..21: mol_type = other DNA
tactcacgcgttaatgataat

SEQ ID NO: 5736 - DNA, 21 bp, synthetic construct
  source 1..21: mol_type = other DNA
gacatgagtagtagaatatgg

SEQ ID NO: 5737 - DNA, 21 bp, synthetic construct
  source 1..21: mol_type = other DNA
tatgtgaaatatgaagataaa

SEQ ID NO: 5738 - DNA, 21 bp, synthetic construct
  source 1..21: mol_type = other DNA
tattccaagtcaggtgcaaac

SEQ ID NO: 5739 - DNA, 21 bp, synthetic construct
  source 1..21: mol_type = other DNA
tatagtcgcttgcaagaaaat

SEQ ID NO: 5740 - DNA, 21 bp, synthetic construct
  source 1..21: mol_type = other DNA
ctgcacagactgttaaaggat

SEQ ID NO: 5741 - DNA, 21 bp, synthetic construct
  source 1..21: mol_type = other DNA
tacgcgcgatctggcctgaat

SEQ ID NO: 5742 - DNA, 21 bp, synthetic construct
  source 1..21: mol_type = other DNA
ctttctagagtaggtttcaat

SEQ ID NO: 5743 - DNA, 21 bp, synthetic construct
  source 1..21: mol_type = other DNA
tattcgcgtgtaaacgacaac

SEQ ID NO: 5744 - DNA, 21 bp, synthetic construct
  source 1..21: mol_type = other DNA
tacgctcggggagggcccaat

SEQ ID NO: 5745 - DNA, 21 bp, synthetic construct
  source 1..21: mol_type = other DNA
tatgcgcgtggtggacctaac

SEQ ID NO: 5746 - DNA, 21 bp, synthetic construct
  source 1..21: mol_type = other DNA
cactgcggaaaatgcctaaat

SEQ ID NO: 5747 - DNA, 21 bp, synthetic construct
  source 1..21: mol_type = other DNA
ttgcacagatcaggcgataat

SEQ ID NO: 5748 - DNA, 21 bp, synthetic construct
  source 1..21: mol_type = other DNA
ctgcatcgttctggggacaac

SEQ ID NO: 5749 - DNA, 21 bp, synthetic construct
  source 1..21: mol_type = other DNA
tattcccgaatgggtatgaac

SEQ ID NO: 5750 - DNA, 21 bp, synthetic construct
  source 1..21: mol_type = other DNA
tattccaaagtaggccaaaac

SEQ ID NO: 5751 - DNA, 21 bp, synthetic construct
  source 1..21: mol_type = other DNA
aactgtaagccttgcttcgat

SEQ ID NO: 5752 - DNA, 21 bp, synthetic construct
  source 1..21: mol_type = other DNA
ctgtcacgcgtgggctttaac

SEQ ID NO: 5753 - DNA, 21 bp, synthetic construct
  source 1..21: mol_type = other DNA
tactcacgccaaaatgaaaac

SEQ ID NO: 5754 - DNA, 21 bp, synthetic construct
  source 1..21: mol_type = other DNA
tacgtaaagtacgaggacaag

SEQ ID NO: 5755 - DNA, 21 bp, synthetic construct
  source 1..21: mol_type = other DNA
tactcacgattacaggagaac

SEQ ID NO: 5756 - DNA, 21 bp, synthetic construct
  source 1..21: mol_type = other DNA
agaggcattgatttttatcct

SEQ ID NO: 5757 - DNA, 21 bp, synthetic construct
  source 1..21: mol_type = other DNA
catagtcgcatgaatgaaaat

SEQ ID NO: 5758 - DNA, 21 bp, synthetic construct
  source 1..21: mol_type = other DNA
tacgtcagaagtgacagaaat

SEQ ID NO: 5759 - DNA, 21 bp, synthetic construct
  source 1..21: mol_type = other DNA
gatttgtcatcgcacaattgg

SEQ ID NO: 5760 - DNA, 21 bp, synthetic construct
  source 1..21: mol_type = other DNA
ttgcatcggctatccccttat

SEQ ID NO: 5761 - DNA, 21 bp, synthetic construct
  source 1..21: mol_type = other DNA
tactcaaggatgaacgaaaat

SEQ ID NO: 5762 - DNA, 21 bp, synthetic construct
  source 1..21: mol_type = other DNA
ctgcataaagctggatataat

SEQ ID NO: 5763 - DNA, 21 bp, synthetic construct
  source 1..21: mol_type = other DNA
ttacacgctttgtcacacaat

SEQ ID NO: 5764 - DNA, 21 bp, synthetic construct
  source 1..21: mol_type = other DNA
tatagccgtatgaatgagaac

SEQ ID NO: 5765 - DNA, 21 bp, synthetic construct
  source 1..21: mol_type = other DNA
ttgtcacggatttctgtaaac

SEQ ID NO: 5766 - DNA, 21 bp, synthetic construct
  source 1..21: mol_type = other DNA
ctacacgtacgtagtctgaat

SEQ ID NO: 5767 - DNA, 21 bp, synthetic construct
  source 1..21: mol_type = other DNA
tattcgaggatgaacgacaac

SEQ ID NO: 5768 - DNA, 21 bp, synthetic construct
  source 1..21: mol_type = other DNA
ttatggaggacagggattaac

SEQ ID NO: 5769 - DNA, 21 bp, synthetic construct
  source 1..21: mol_type = other DNA
tattttatggggcggtccgac

SEQ ID NO: 5770 - DNA, 21 bp, synthetic construct
  source 1..21: mol_type = other DNA
tactcccggatgaatgataat

SEQ ID NO: 5771 - DNA, 21 bp, synthetic construct
  source 1..21: mol_type = other DNA
ctacaccgagctagcagcaac

SEQ ID NO: 5772 - DNA, 21 bp, synthetic construct
  source 1..21: mol_type = other DNA
tactcccgtgttgatgatcgc

SEQ ID NO: 5773 - DNA, 21 bp, synthetic construct
  source 1..21: mol_type = other DNA
ctgcatcgtgcgtcatccaat

SEQ ID NO: 5774 - DNA, 21 bp, synthetic construct
  source 1..21: mol_type = other DNA
tattcgcgcaacagcgacaac

SEQ ID NO: 5775 - DNA, 21 bp, synthetic construct
  source 1..21: mol_type = other DNA
tatagtgctcgtgggcccaat

SEQ ID NO: 5776 - DNA, 21 bp, synthetic construct
  source 1..21: mol_type = other DNA
agagctctggagtgttgttat

SEQ ID NO: 5777 - DNA, 21 bp, synthetic construct
  source 1..21: mol_type = other DNA
ttaactaggatctcacacaac

SEQ ID NO: 5778 - DNA, 21 bp, synthetic construct
  source 1..21: mol_type = other DNA
ctgacccgaattagtcataat

SEQ ID NO: 5779 - DNA, 21 bp, synthetic construct
  source 1..21: mol_type = other DNA
ctttgtcgtccatgttcagag

SEQ ID NO: 5780 - DNA, 21 bp, synthetic construct
  source 1..21: mol_type = other DNA
ttaagtcgcttaaatcacaat

SEQ ID NO: 5781 - DNA, 21 bp, synthetic construct
  source 1..21: mol_type = other DNA
ctacacgtgcttggaccgaat

SEQ ID NO: 5782 - DNA, 21 bp, synthetic construct
  source 1..21: mol_type = other DNA
tacttcacgggcatctgggct

SEQ ID NO: 5783 - DNA, 21 bp, synthetic construct
  source 1..21: mol_type = other DNA
tacatgaaatatgatacacaa

SEQ ID NO: 5784 - DNA, 21 bp, synthetic construct
  source 1..21: mol_type = other DNA
atgtcacggctgtcacagaac

SEQ ID NO: 5785 - DNA, 21 bp, synthetic construct
  source 1..21: mol_type = other DNA
ctccatcgcagtagtaataat

SEQ ID NO: 5786 - DNA, 21 bp, synthetic construct
  source 1..21: mol_type = other DNA
tacgctcggtccgggtataat

SEQ ID NO: 5787 - DNA, 21 bp, synthetic construct
  source 1..21: mol_type = other DNA
taccatcgtttgtccaataac

SEQ ID NO: 5788 - DNA, 21 bp, synthetic construct
  source 1..21: mol_type = other DNA
ctgcatgtcctggggccaaac

SEQ ID NO: 5789 - DNA, 21 bp, synthetic construct
  source 1..21: mol_type = other DNA
tatgcgcgcagcggatacaac

SEQ ID NO: 5790 - DNA, 21 bp, synthetic construct
  source 1..21: mol_type = other DNA
ttgcacaggtcttcaaacaac

SEQ ID NO: 5791 - DNA, 21 bp, synthetic construct
  source 1..21: mol_type = other DNA
tatcaccggctttctaacaat

SEQ ID NO: 5792 - DNA, 21 bp, synthetic construct
  source 1..21: mol_type = other DNA
tatcatgctcgcgctccgaat

SEQ ID NO: 5793 - DNA, 21 bp, synthetic construct
  source 1..21: mol_type = other DNA
ctatgcagaccgtgctcggaa

SEQ ID NO: 5794 - DNA, 21 bp, synthetic construct
  source 1..21: mol_type = other DNA
ttacacagactgagcccatac

SEQ ID NO: 5795 - DNA, 21 bp, synthetic construct
  source 1..21: mol_type = other DNA
taccacgcacgggccccaaac

SEQ ID NO: 5796 - DNA, 21 bp, synthetic construct
  source 1..21: mol_type = other DNA
aacgaagactgggtgaagtgg

SEQ ID NO: 5797 - DNA, 21 bp, synthetic construct
  source 1..21: mol_type = other DNA
atgtcccgattatctcaaaat

SEQ ID NO: 5798 - DNA, 21 bp, synthetic construct
  source 1..21: mol_type = other DNA
attatgagcagtcgaagctgg

SEQ ID NO: 5799 - DNA, 21 bp, synthetic construct
  source 1..21: mol_type = other DNA
aatgaggattgggtaaaatgg

SEQ ID NO: 5800 - DNA, 21 bp, synthetic construct
  source 1..21: mol_type = other DNA
cattgtggtaagtgtcttaac

SEQ ID NO: 5801 - DNA, 21 bp, synthetic construct
  source 1..21: mol_type = other DNA
tacgctcgaacttcgcataat

SEQ ID NO: 5802 - DNA, 21 bp, synthetic construct
  source 1..21: mol_type = other DNA
aatggtcctcacggctggaat

SEQ ID NO: 5803 - DNA, 21 bp, synthetic construct
  source 1..21: mol_type = other DNA
tactcccgagctggatataac

SEQ ID NO: 5804 - DNA, 21 bp, synthetic construct
  source 1..21: mol_type = other DNA
tgggtacggtcggacacaaaa

SEQ ID NO: 5805 - DNA, 21 bp, synthetic construct
  source 1..21: mol_type = other DNA
taccaacgccaaggatgggac

SEQ ID NO: 5806 - DNA, 21 bp, synthetic construct
  source 1..21: mol_type = other DNA
tatgcccggacctcccacaac

SEQ ID NO: 5807 - DNA, 21 bp, synthetic construct
  source 1..21: mol_type = other DNA
cgactctatgacgcttatcag

SEQ ID NO: 5808 - DNA, 21 bp, synthetic construct
  source 1..21: mol_type = other DNA
gggccggggtatgtgaactgg

SEQ ID NO: 5809 - DNA, 21 bp, synthetic construct
  source 1..21: mol_type = other DNA
tgggtgaggtctgatacgaag

SEQ ID NO: 5810 - DNA, 21 bp, synthetic construct
  source 1..21: mol_type = other DNA
aacggcccgcatggttggaac

SEQ ID NO: 5811 - DNA, 21 bp, synthetic construct
  source 1..21: mol_type = other DNA
cttcatcgcaatactcaaaac

SEQ ID NO: 5812 - DNA, 21 bp, synthetic construct
  source 1..21: mol_type = other DNA
ttgcacaggaacacccagaat

SEQ ID NO: 5813 - DNA, 21 bp, synthetic construct
  source 1..21: mol_type = other DNA
atgcctaatgaggggtggttt

SEQ ID NO: 5814 - DNA, 21 bp, synthetic construct
  source 1..21: mol_type = other DNA
tatctagatcgtgttgtttac

SEQ ID NO: 5815 - DNA, 21 bp, synthetic construct
  source 1..21: mol_type = other DNA
tcctacgcccggtctgtgaac

SEQ ID NO: 5816 - DNA, 21 bp, synthetic construct
  source 1..21: mol_type = other DNA
aggctatacgatgcctaccaa

SEQ ID NO: 5817 - DNA, 21 bp, synthetic construct
  source 1..21: mol_type = other DNA
tacctcgaccgcgtggtatat

SEQ ID NO: 5818 - DNA, 21 bp, synthetic construct
  source 1..21: mol_type = other DNA
atgccaaacgaaggatggttc

SEQ ID NO: 5819 - DNA, 21 bp, synthetic construct
  source 1..21: mol_type = other DNA
ctgacaaggctttcccacaat

SEQ ID NO: 5820 - DNA, 21 bp, synthetic construct
  source 1..21: mol_type = other DNA
agttatgcacgcagcgtaaat

SEQ ID NO: 5821 - DNA, 21 bp, synthetic construct
  source 1..21: mol_type = other DNA
tatagtcgggccggctacaat

SEQ ID NO: 5822 - DNA, 21 bp, synthetic construct
  source 1..21: mol_type = other DNA
tatcgaagtctagttgtcggg

SEQ ID NO: 5823 - DNA, 21 bp, synthetic construct
  source 1..21: mol_type = other DNA
cttaccagattaagccataac

SEQ ID NO: 5824 - DNA, 21 bp, synthetic construct
  source 1..21: mol_type = other DNA
tatgtgaagtccgatcgatgc

SEQ ID NO: 5825 - DNA, 21 bp, synthetic construct
  source 1..21: mol_type = other DNA
ctttggcgcacgggtatcaat

SEQ ID NO: 5826 - DNA, 21 bp, synthetic construct
  source 1..21: mol_type = other DNA
tattttacaggaatatgggca

SEQ ID NO: 5827 - DNA, 21 bp, synthetic construct
  source 1..21: mol_type = other DNA
taccacagggctcaaatgaat

SEQ ID NO: 5828 - DNA, 21 bp, synthetic construct
  source 1..21: mol_type = other DNA
gatgggggccgatctgcttgg

SEQ ID NO: 5829 - DNA, 21 bp, synthetic construct
  source 1..21: mol_type = other DNA
taccgttcactggtagtgggt

SEQ ID NO: 5830 - DNA, 21 bp, synthetic construct
  source 1..21: mol_type = other DNA
gacggagggagatcagcatgg

SEQ ID NO: 5831 - DNA, 21 bp, synthetic construct
  source 1..21: mol_type = other DNA
ctgagccggtcatcatacaat

SEQ ID NO: 5832 - DNA, 21 bp, synthetic construct
  source 1..21: mol_type = other DNA
tacgtcaaatcggacagatgt

SEQ ID NO: 5833 - DNA, 21 bp, synthetic construct
  source 1..21: mol_type = other DNA
cgtgtattagcaaactggcct

SEQ ID NO: 5834 - DNA, 21 bp, synthetic construct
  source 1..21: mol_type = other DNA
ctaatgatagacgcttttcca

SEQ ID NO: 5835 - DNA, 21 bp, synthetic construct
  source 1..21: mol_type = other DNA
taccataggactgggaataat

SEQ ID NO: 5836 - DNA, 21 bp, synthetic construct
  source 1..21: mol_type = other DNA
tatcaccggacaggcaacaac

SEQ ID NO: 5837 - DNA, 21 bp, synthetic construct
  source 1..21: mol_type = other DNA
ttaatgattgatgcattccct

SEQ ID NO: 5838 - DNA, 21 bp, synthetic construct
  source 1..21: mol_type = other DNA
ttgagtaggtcttcttataac

SEQ ID NO: 5839 - DNA, 21 bp, synthetic construct
  source 1..21: mol_type = other DNA
atgacatacgacagttacgac

SEQ ID NO: 5840 - DNA, 21 bp, synthetic construct
  source 1..21: mol_type = other DNA
cgaaatctatatgatactcaa

SEQ ID NO: 5841 - DNA, 21 bp, synthetic construct
  source 1..21: mol_type = other DNA
tttaagcagttagtcaactac

SEQ ID NO: 5842 - DNA, 21 bp, synthetic construct
  source 1..21: mol_type = other DNA
cagccatatgagctaccatgg

SEQ ID NO: 5843 - DNA, 21 bp, synthetic construct
  source 1..21: mol_type = other DNA
gagatggagtcctttaattgg

SEQ ID NO: 5844 - DNA, 21 bp, synthetic construct
  source 1..21: mol_type = other DNA
atgcatcggctggcagtaaat

SEQ ID NO: 5845 - DNA, 21 bp, synthetic construct
  source 1..21: mol_type = other DNA
agggtctcggtgttatggccc

SEQ ID NO: 5846 - DNA, 21 bp, synthetic construct
  source 1..21: mol_type = other DNA
tataaaaatctaatacaaggc

SEQ ID NO: 5847 - DNA, 21 bp, synthetic construct
  source 1..21: mol_type = other DNA
ctccataggttagcagccaat

SEQ ID NO: 5848 - DNA, 21 bp, synthetic construct
  source 1..21: mol_type = other DNA
gaaatggaatcattcaactgg

SEQ ID NO: 5849 - DNA, 21 bp, synthetic construct
  source 1..21: mol_type = other DNA
tacaagaaccttatccagggg

SEQ ID NO: 5850 - DNA, 21 bp, synthetic construct
  source 1..21: mol_type = other DNA
ttcaaacaactggtgaattat

SEQ ID NO: 5851 - DNA, 21 bp, synthetic construct
  source 1..21: mol_type = other DNA
tatttcaatgttgttaagggg

SEQ ID NO: 5852 - DNA, 21 bp, synthetic construct
  source 1..21: mol_type = other DNA
atgcacagacttgcggttaac

SEQ ID NO: 5853 - DNA, 21 bp, synthetic construct
  source 1..21: mol_type = other DNA
cagtatgtccgatcatcaata

SEQ ID NO: 5854 - DNA, 21 bp, synthetic construct
  source 1..21: mol_type = other DNA
ctgcaccggctcgctgcgaac

SEQ ID NO: 5855 - DNA, 21 bp, synthetic construct
  source 1..21: mol_type = other DNA
atgtcaaggttcgacattcat

SEQ ID NO: 5856 - DNA, 21 bp, synthetic construct
  source 1..21: mol_type = other DNA
caatacgtgcgtagctcgatc

SEQ ID NO: 5857 - DNA, 21 bp, synthetic construct
  source 1..21: mol_type = other DNA
tactttaacgtagtaaaagga

SEQ ID NO: 5858 - DNA, 21 bp, synthetic construct
  source 1..21: mol_type = other DNA
cttacgtacgacgcctatgaa

SEQ ID NO: 5859 - DNA, 21 bp, synthetic construct
  source 1..21: mol_type = other DNA
tggggcttatggaggctggac

SEQ ID NO: 5860 - DNA, 21 bp, synthetic construct
  source 1..21: mol_type = other DNA
taccgtgacatcatatcgggt

SEQ ID NO: 5861 - DNA, 21 bp, synthetic construct
  source 1..21: mol_type = other DNA
tatcgagatataatttcagga

SEQ ID NO: 5862 - DNA, 21 bp, synthetic construct
  source 1..21: mol_type = other DNA
ttgacatatgatgcatacgag

SEQ ID NO: 5863 - DNA, 21 bp, synthetic construct
  source 1..21: mol_type = other DNA
tcctatacccgcctccaaacg

SEQ ID NO: 5864 - DNA, 21 bp, synthetic construct
  source 1..21: mol_type = other DNA
cagtatacacgcaacgtgtcc

SEQ ID NO: 5865 - DNA, 21 bp, synthetic construct
  source 1..21: mol_type = other DNA
tcatacacacggctacagact

SEQ ID NO: 5866 - DNA, 21 bp, synthetic construct
  source 1..21: mol_type = other DNA
ggccctggatacgtcaattgg

SEQ ID NO: 5867 - DNA, 21 bp, synthetic construct
  source 1..21: mol_type = other DNA
ttacacgtccggctcaacaat

SEQ ID NO: 5868 - DNA, 21 bp, synthetic construct
  source 1..21: mol_type = other DNA
agaaccagggaagtttggcct

SEQ ID NO: 5869 - DNA, 21 bp, synthetic construct
  source 1..21: mol_type = other DNA
aacgcccctctatggttttcc

SEQ ID NO: 5870 - DNA, 21 bp, synthetic construct
  source 1..21: mol_type = other DNA
cgtaacgcgtttgaccatatg

SEQ ID NO: 5871 - DNA, 21 bp, synthetic construct
  source 1..21: mol_type = other DNA
caatacacccgaaatgtaagt

SEQ ID NO: 5872 - DNA, 21 bp, synthetic construct
  source 1..21: mol_type = other DNA
ttctcgggcagggtacttttt

SEQ ID NO: 5873 - DNA, 21 bp, synthetic construct
  source 1..21: mol_type = other DNA
aagcatgggaccatgtggggg

SEQ ID NO: 5874 - DNA, 21 bp, synthetic construct
  source 1..21: mol_type = other DNA
tctcgcaaaacgggataccct

SEQ ID NO: 5875 - DNA, 21 bp, synthetic construct
  source 1..21: mol_type = other DNA
atacaaaacaaactatggtct

SEQ ID NO: 5876 - DNA, 21 bp, synthetic construct
  source 1..21: mol_type = other DNA
tcttacactaggctcaccttg

SEQ ID NO: 5877 - DNA, 21 bp, synthetic construct
  source 1..21: mol_type = other DNA
aatgcgcccctctggttctcg

SEQ ID NO: 5878 - DNA, 21 bp, synthetic construct
  source 1..21: mol_type = other DNA
aacgatttggtccactggcct

SEQ ID NO: 5879 - DNA, 21 bp, synthetic construct
  source 1..21: mol_type = other DNA
agccggaagactggctatcca

SEQ ID NO: 5880 - DNA, 21 bp, synthetic construct
  source 1..21: mol_type = other DNA
gcctatagcagactcatgtct

SEQ ID NO: 5881 - DNA, 21 bp, synthetic construct
  source 1..21: mol_type = other DNA
tggccatcaatcacgacctat

SEQ ID NO: 5882 - DNA, 21 bp, synthetic construct
  source 1..21: mol_type = other DNA
caactgtccgggctatggcct

SEQ ID NO: 5883 - DNA, 21 bp, synthetic construct
  source 1..21: mol_type = other DNA
aattctccctttgatacttac

SEQ ID NO: 5884 - DNA, 21 bp, synthetic construct
  source 1..21: mol_type = other DNA
atgtcaccgctggtgtggacc

SEQ ID NO: 5885 - DNA, 21 bp, synthetic construct
  source 1..21: mol_type = other DNA
cggcaagggacgtactttccg

SEQ ID NO: 5886 - DNA, 21 bp, synthetic construct
  source 1..21: mol_type = other DNA
accaataccataagatggccc

SEQ ID NO: 5887 - DNA, 21 bp, synthetic construct
  source 1..21: mol_type = other DNA
tacgcgatttattcaacccac

SEQ ID NO: 5888 - DNA, 21 bp, synthetic construct
  source 1..21: mol_type = other DNA
tcagcactgcacgggtaccct

SEQ ID NO: 5889 - DNA, 21 bp, synthetic construct
  source 1..21: mol_type = other DNA
atatatgtgagatcgatttct

SEQ ID NO: 5890 - DNA, 21 bp, synthetic construct
  source 1..21: mol_type = other DNA
acccggggtatggattggcct

SEQ ID NO: 5891 - DNA, 21 bp, synthetic construct
  source 1..21: mol_type = other DNA
tacaagcaatggcatttcgat

SEQ ID NO: 5892 - DNA, 21 bp, synthetic construct
  source 1..21: mol_type = other DNA
gtatacgtccgatcgcagtcc

SEQ ID NO: 5893 - DNA, 21 bp, synthetic construct
  source 1..21: mol_type = other DNA
ctcattaatggcagttggccg

SEQ ID NO: 5894 - DNA, 21 bp, synthetic construct
  source 1..21: mol_type = other DNA
gtgcccatatggcataatggt

SEQ ID NO: 5895 - DNA, 21 bp, synthetic construct
  source 1..21: mol_type = other DNA
gtagttcatggggtttggccc

SEQ ID NO: 5896 - DNA, 21 bp, synthetic construct
  source 1..21: mol_type = other DNA
tcctacgtccggagtacccaa

SEQ ID NO: 5897 - DNA, 21 bp, synthetic construct
  source 1..21: mol_type = other DNA
ggtagcccaataaactgggcc

SEQ ID NO: 5898 - DNA, 21 bp, synthetic construct
  source 1..21: mol_type = other DNA
agtgcgctacatggttatcca

SEQ ID NO: 5899 - DNA, 21 bp, synthetic construct
  source 1..21: mol_type = other DNA
atatatagtaaattacagcat

SEQ ID NO: 5900 - DNA, 21 bp, synthetic construct
  source 1..21: mol_type = other DNA
gaggaatctttttggcgagca

SEQ ID NO: 5901 - DNA, 21 bp, synthetic construct
  source 1..21: mol_type = other DNA
gcttacagtcgacttatgtca

SEQ ID NO: 5902 - DNA, 21 bp, synthetic construct
  source 1..21: mol_type = other DNA
gtttgggttaaaagctcgatc

SEQ ID NO: 5903 - DNA, 21 bp, synthetic construct
  source 1..21: mol_type = other DNA
gtgtatgtaagatctcaaagc

SEQ ID NO: 5904 - DNA, 21 bp, synthetic construct
  source 1..21: mol_type = other DNA
acttacgtgcgatctattact

SEQ ID NO: 5905 - DNA, 21 bp, synthetic construct
  source 1..21: mol_type = other DNA
aagacaggcggaatttggcca

SEQ ID NO: 5906 - DNA, 21 bp, synthetic construct
  source 1..21: mol_type = other DNA
atgagtcccttagtctggacg

SEQ ID NO: 5907 - DNA, 21 bp, synthetic construct
  source 1..21: mol_type = other DNA
ccaggctcgctgcgctatggc

SEQ ID NO: 5908 - DNA, 21 bp, synthetic construct
  source 1..21: mol_type = other DNA
cttgtgtcaaatgactggccc

SEQ ID NO: 5909 - DNA, 21 bp, synthetic construct
  source 1..21: mol_type = other DNA
gggagaagcgtaagcacttgg

SEQ ID NO: 5910 - DNA, 21 bp, synthetic construct
  source 1..21: mol_type = other DNA
gggagcacctacagccgggcg

SEQ ID NO: 5911 - DNA, 21 bp, synthetic construct
  source 1..21: mol_type = other DNA
ccgggaagtttgagatacggt

SEQ ID NO: 5912 - DNA, 21 bp, synthetic construct
  source 1..21: mol_type = other DNA
aaaattagtggatcatggcca

SEQ ID NO: 5913 - DNA, 21 bp, synthetic construct
  source 1..21: mol_type = other DNA
aaacttggaacagcctggccg

SEQ ID NO: 5914 - DNA, 21 bp, synthetic construct
  source 1..21: mol_type = other DNA
gtgtatagtcgcatcgatatt

SEQ ID NO: 5915 - DNA, 21 bp, synthetic construct
  source 1..21: mol_type = other DNA
atttacgtgcgaagtgctagt

SEQ ID NO: 5916 - DNA, 21 bp, synthetic construct
  source 1..21: mol_type = other DNA
aacagtccgttcgacacgtat

SEQ ID NO: 5917 - DNA, 21 bp, synthetic construct
  source 1..21: mol_type = other DNA
tggccctcgattactacgtac

SEQ ID NO: 5918 - DNA, 21 bp, synthetic construct
  source 1..21: mol_type = other DNA
cggagcctttacgacacgttg

SEQ ID NO: 5919 - DNA, 21 bp, synthetic construct
  source 1..21: mol_type = other DNA
tactatgatcttgtcgaatac

SEQ ID NO: 5920 - DNA, 21 bp, synthetic construct
  source 1..21: mol_type = other DNA
atgttggaatattataacaat

SEQ ID NO: 5921 - DNA, 21 bp, synthetic construct
  source 1..21: mol_type = other DNA
aaaacgggtggtatatggcct

SEQ ID NO: 5922 - DNA, 21 bp, synthetic construct
  source 1..21: mol_type = other DNA
aatgacctggttcattggccc

SEQ ID NO: 5923 - DNA, 21 bp, synthetic construct
  source 1..21: mol_type = other DNA
actaatatgtacgacacttat

SEQ ID NO: 5924 - DNA, 21 bp, synthetic construct
  source 1..21: mol_type = other DNA
aagatcctaacggtgtggcca

SEQ ID NO: 5925 - DNA, 21 bp, synthetic construct
  source 1..21: mol_type = other DNA
atatatgtacggtcggcaagc

SEQ ID NO: 5926 - DNA, 21 bp, synthetic construct
  source 1..21: mol_type = other DNA
atttactcgaagctgcaacac

SEQ ID NO: 5927 - DNA, 21 bp, synthetic construct
  source 1..21: mol_type = other DNA
gtttactcccggatagacata

SEQ ID NO: 5928 - DNA, 21 bp, synthetic construct
  source 1..21: mol_type = other DNA
tcttatgtacgctccacacag

SEQ ID NO: 5929 - DNA, 21 bp, synthetic construct
  source 1..21: mol_type = other DNA
ttgtatactcgattagatatt

SEQ ID NO: 5930 - DNA, 21 bp, synthetic construct
  source 1..21: mol_type = other DNA
agagatgaggccaactggcct

SEQ ID NO: 5931 - DNA, 21 bp, synthetic construct
  source 1..21: mol_type = other DNA
aaatctcctaacacgccatgg

SEQ ID NO: 5932 - DNA, 21 bp, synthetic construct
  source 1..21: mol_type = other DNA
gggttcataactgtctaccca

SEQ ID NO: 5933 - DNA, 21 bp, synthetic construct
  source 1..21: mol_type = other DNA
acccgcagcatgtggagcgaa

SEQ ID NO: 5934 - DNA, 21 bp, synthetic construct
  source 1..21: mol_type = other DNA
tataagacaaacaattggccg

SEQ ID NO: 5935 - DNA, 21 bp, synthetic construct
  source 1..21: mol_type = other DNA
aaaaatgcaaccgtgtggccc

SEQ ID NO: 5936 - DNA, 21 bp, synthetic construct
  source 1..21: mol_type = other DNA
gttgtcaaagattactggcct

SEQ ID NO: 5937 - DNA, 21 bp, synthetic construct
  source 1..21: mol_type = other DNA
gggctaggctggataaacggc

SEQ ID NO: 5938 - DNA, 21 bp, synthetic construct
  source 1..21: mol_type = other DNA
caatacgtgagaacagcaaca

SEQ ID NO: 5939 - DNA, 21 bp, synthetic construct
  source 1..21: mol_type = other DNA
cagtatgtacgcacggcgact

SEQ ID NO: 5940 - DNA, 21 bp, synthetic construct
  source 1..21: mol_type = other DNA
agaaatacgtatgactcatat

SEQ ID NO: 5941 - DNA, 21 bp, synthetic construct
  source 1..21: mol_type = other DNA
gttcctacgatgtggagtgcg

SEQ ID NO: 5942 - DNA, 21 bp, synthetic construct
  source 1..21: mol_type = other DNA
atcgttggggaggcgtggcct

SEQ ID NO: 5943 - DNA, 21 bp, synthetic construct
  source 1..21: mol_type = other DNA
acctatgtccggtcaataaca

SEQ ID NO: 5944 - DNA, 21 bp, synthetic construct
  source 1..21: mol_type = other DNA
actgtcaccgaagtctggcca

SEQ ID NO: 5945 - DNA, 21 bp, synthetic construct
  source 1..21: mol_type = other DNA
aagcaaccggtgtggttagca

SEQ ID NO: 5946 - DNA, 21 bp, synthetic construct
  source 1..21: mol_type = other DNA
agggacgaagctaattggccc

SEQ ID NO: 5947 - DNA, 21 bp, synthetic construct
  source 1..21: mol_type = other DNA
aagtacacaaggaccgaaatc

SEQ ID NO: 5948 - DNA, 21 bp, synthetic construct
  source 1..21: mol_type = other DNA
cccatgccgaatatggtgtgg

SEQ ID NO: 5949 - DNA, 21 bp, synthetic construct
  source 1..21: mol_type = other DNA
ctatacacccggcttgacatc

SEQ ID NO: 5950 - DNA, 21 bp, synthetic construct
  source 1..21: mol_type = other DNA
gctcgtgggcagttaccgtgg

SEQ ID NO: 5951 - DNA, 21 bp, synthetic construct
  source 1..21: mol_type = other DNA
ctgcaggggtcaaattggccc

SEQ ID NO: 5952 - DNA, 21 bp, synthetic construct
  source 1..21: mol_type = other DNA
acgcaggcactcaactggccc

SEQ ID NO: 5953 - DNA, 21 bp, synthetic construct
  source 1..21: mol_type = other DNA
aagtcaccgaatactccctgg

SEQ ID NO: 5954 - DNA, 21 bp, synthetic construct
  source 1..21: mol_type = other DNA
atgtatgttcgatccgtggag

SEQ ID NO: 5955 - DNA, 21 bp, synthetic construct
  source 1..21: mol_type = other DNA
gctttgacgaggctccaaatg

SEQ ID NO: 5956 - DNA, 21 bp, synthetic construct
  source 1..21: mol_type = other DNA
tataaacagtggcactttgac

SEQ ID NO: 5957 - DNA, 21 bp, synthetic construct
  source 1..21: mol_type = other DNA
gatccaaaagggtattttttt

SEQ ID NO: 5958 - DNA, 21 bp, synthetic construct
  source 1..21: mol_type = other DNA
ggacgaagtgtttccacctgg

SEQ ID NO: 5959 - DNA, 21 bp, synthetic construct
  source 1..21: mol_type = other DNA
cgtactagagaggtgtggcca

SEQ ID NO: 5960 - DNA, 21 bp, synthetic construct
  source 1..21: mol_type = other DNA
tcttatgtccgaacgttaagt

SEQ ID NO: 5961 - DNA, 21 bp, synthetic construct
  source 1..21: mol_type = other DNA
cgacagaatagtgtctggcca

SEQ ID NO: 5962 - DNA, 21 bp, synthetic construct
  source 1..21: mol_type = other DNA
gcttttgttcggagcgtacca

SEQ ID NO: 5963 - DNA, 21 bp, synthetic construct
  source 1..21: mol_type = other DNA
aacaagaacggtaactggccc

SEQ ID NO: 5964 - DNA, 21 bp, synthetic construct
  source 1..21: mol_type = other DNA
ctgataaacggatcttggccc

SEQ ID NO: 5965 - DNA, 21 bp, synthetic construct
  source 1..21: mol_type = other DNA
cagtacactcgtctgcagctt

SEQ ID NO: 5966 - DNA, 21 bp, synthetic construct
  source 1..21: mol_type = other DNA
gtaaagcctaatataatgtgg

SEQ ID NO: 5967 - DNA, 21 bp, synthetic construct
  source 1..21: mol_type = other DNA
aagagcggggaccactggcca

SEQ ID NO: 5968 - DNA, 21 bp, synthetic construct
  source 1..21: mol_type = other DNA
atctatataaagtcagcggtg

SEQ ID NO: 5969 - DNA, 21 bp, synthetic construct
  source 1..21: mol_type = other DNA
cgacttaacgatacttggcca

SEQ ID NO: 5970 - DNA, 21 bp, synthetic construct
  source 1..21: mol_type = other DNA
aggtcgctatatgatacacta

SEQ ID NO: 5971 - DNA, 21 bp, synthetic construct
  source 1..21: mol_type = other DNA
aaatctggcgatcattggccc

SEQ ID NO: 5972 - DNA, 21 bp, synthetic construct
  source 1..21: mol_type = other DNA
atggtcaataaaacctggccg

SEQ ID NO: 5973 - DNA, 21 bp, synthetic construct
  source 1..21: mol_type = other DNA
agctacgtgcgcaccttgtca

SEQ ID NO: 5974 - DNA, 21 bp, synthetic construct
  source 1..21: mol_type = other DNA
gtctattcccgactagataca

SEQ ID NO: 5975 - DNA, 21 bp, synthetic construct
  source 1..21: mol_type = other DNA
aagatatccggttcttggcct

SEQ ID NO: 5976 - DNA, 21 bp, synthetic construct
  source 1..21: mol_type = other DNA
ttaaaagaccataattggcct

SEQ ID NO: 5977 - DNA, 21 bp, synthetic construct
  source 1..21: mol_type = other DNA
agtgccccgatctattttaat

SEQ ID NO: 5978 - DNA, 21 bp, synthetic construct
  source 1..21: mol_type = other DNA
aaatatactcggactgagatt

SEQ ID NO: 5979 - DNA, 21 bp, synthetic construct
  source 1..21: mol_type = other DNA
ttggttcatgacgcttggccg

SEQ ID NO: 5980 - DNA, 21 bp, synthetic construct
  source 1..21: mol_type = other DNA
aggtgggatccacacgaccaa

SEQ ID NO: 5981 - DNA, 21 bp, synthetic construct
  source 1..21: mol_type = other DNA
gtgtacagccgccttgacacc

SEQ ID NO: 5982 - DNA, 21 bp, synthetic construct
  source 1..21: mol_type = other DNA
ctcaatgtttggaagcaacca

SEQ ID NO: 5983 - DNA, 21 bp, synthetic construct
  source 1..21: mol_type = other DNA
aggttgacagatacttggccg

SEQ ID NO: 5984 - DNA, 21 bp, synthetic construct
  source 1..21: mol_type = other DNA
aaacacggaactatgtgggga

SEQ ID NO: 5985 - DNA, 21 bp, synthetic construct
  source 1..21: mol_type = other DNA
atttatgttaagagtgttagt

SEQ ID NO: 5986 - DNA, 21 bp, synthetic construct
  source 1..21: mol_type = other DNA
atgaaagggaacaactggccg

SEQ ID NO: 5987 - DNA, 21 bp, synthetic construct
  source 1..21: mol_type = other DNA
agaaacgtatatgatgggtac

SEQ ID NO: 5988 - DNA, 21 bp, synthetic construct
  source 1..21: mol_type = other DNA
atatatataaagtcgagcacc

SEQ ID NO: 5989 - DNA, 21 bp, synthetic construct
  source 1..21: mol_type = other DNA
actaaacactatacatttccc

SEQ ID NO: 5990 - DNA, 21 bp, synthetic construct
  source 1..21: mol_type = other DNA
gcattaacccggttacagatg

SEQ ID NO: 5991 - DNA, 21 bp, synthetic construct
  source 1..21: mol_type = other DNA
gttaaaccaaacatcatgtgg

SEQ ID NO: 5992 - DNA, 21 bp, synthetic construct
  source 1..21: mol_type = other DNA
tggaaaatgactcaactcggc

SEQ ID NO: 5993 - DNA, 21 bp, synthetic construct
  source 1..21: mol_type = other DNA
tatgctatctactcgacacat

SEQ ID NO: 5994 - DNA, 21 bp, synthetic construct
  source 1..21: mol_type = other DNA
cagtatattcgttctagcagt

SEQ ID NO: 5995 - DNA, 21 bp, synthetic construct
  source 1..21: mol_type = other DNA
tctatgatccttgactggaag

SEQ ID NO: 5996 - DNA, 21 bp, synthetic construct
  source 1..21: mol_type = other DNA
tggaagatgacgcagcttggt

SEQ ID NO: 5997 - DNA, 21 bp, synthetic construct
  source 1..21: mol_type = other DNA
cgcgagttcgagcagtggcca

SEQ ID NO: 5998 - DNA, 21 bp, synthetic construct
  source 1..21: mol_type = other DNA
tataccgtctattcaacgttc

SEQ ID NO: 5999 - DNA, 21 bp, synthetic construct
  source 1..21: mol_type = other DNA
agactaacggacacatggccc

SEQ ID NO: 6000 - DNA, 21 bp, synthetic construct
  source 1..21: mol_type = other DNA
agggaatttgaacaatggccg

SEQ ID NO: 6001 - DNA, 21 bp, synthetic construct
  source 1..21: mol_type = other DNA
gccttcgtaagatcggttccg

SEQ ID NO: 6002 - DNA, 21 bp, synthetic construct
  source 1..21: mol_type = other DNA
acgaagcattacactttcccg

SEQ ID NO: 6003 - DNA, 21 bp, synthetic construct
  source 1..21: mol_type = other DNA
aataagccactcgactggaaa

SEQ ID NO: 6004 - DNA, 21 bp, synthetic construct
  source 1..21: mol_type = other DNA
aagaacgcgacagtctggccg

SEQ ID NO: 6005 - DNA, 21 bp, synthetic construct
  source 1..21: mol_type = other DNA
atctacgtaaaatctgtctcg

SEQ ID NO: 6006 - DNA, 21 bp, synthetic construct
  source 1..21: mol_type = other DNA
gctacctggccgttgatgggg

SEQ ID NO: 6007 - DNA, 21 bp, synthetic construct
  source 1..21: mol_type = other DNA
atatacattaaaagtgccgta

SEQ ID NO: 6008 - DNA, 21 bp, synthetic construct
  source 1..21: mol_type = other DNA
ggtaacgaattttggagtcca

SEQ ID NO: 6009 - DNA, 21 bp, synthetic construct
  source 1..21: mol_type = other DNA
atctacgtccgctcaatatca

SEQ ID NO: 6010 - DNA, 21 bp, synthetic construct
  source 1..21: mol_type = other DNA
ctcatgaacaacgattggccc

SEQ ID NO: 6011 - DNA, 21 bp, synthetic construct
  source 1..21: mol_type = other DNA
gttacgggggcggtttggccg

SEQ ID NO: 6012 - DNA, 21 bp, synthetic construct
  source 1..21: mol_type = other DNA
acgcgtggcatggactggccg

SEQ ID NO: 6013 - DNA, 21 bp, synthetic construct
  source 1..21: mol_type = other DNA
tcgggacctatctggctagca

SEQ ID NO: 6014 - DNA, 21 bp, synthetic construct
  source 1..21: mol_type = other DNA
cataaaaacccactgtggggg

SEQ ID NO: 6015 - DNA, 21 bp, synthetic construct
  source 1..21: mol_type = other DNA
tccaacggcaggctaaactgg

SEQ ID NO: 6016 - DNA, 21 bp, synthetic construct
  source 1..21: mol_type = other DNA
caatataccaggttgcaatta

SEQ ID NO: 6017 - DNA, 21 bp, synthetic construct
  source 1..21: mol_type = other DNA
atacggggtaatgaatggcca

SEQ ID NO: 6018 - DNA, 21 bp, synthetic construct
  source 1..21: mol_type = other DNA
aggggtccagtgtatctttcg

SEQ ID NO: 6019 - DNA, 21 bp, synthetic construct
  source 1..21: mol_type = other DNA
aggaacaaaggagactggcct

SEQ ID NO: 6020 - DNA, 21 bp, synthetic construct
  source 1..21: mol_type = other DNA
gtgtcgctcttttcaaatcac

SEQ ID NO: 6021 - DNA, 21 bp, synthetic construct
  source 1..21: mol_type = other DNA
atgaagggcaataattggcct

SEQ ID NO: 6022 - DNA, 21 bp, synthetic construct
  source 1..21: mol_type = other DNA
cgcaataagggggattggccg

SEQ ID NO: 6023 - DNA, 21 bp, synthetic construct
  source 1..21: mol_type = other DNA
acacaagctcttaattggccg

SEQ ID NO: 6024 - DNA, 21 bp, synthetic construct
  source 1..21: mol_type = other DNA
aaacagcccgtttggcttgcc

SEQ ID NO: 6025 - DNA, 21 bp, synthetic construct
  source 1..21: mol_type = other DNA
caaggcctctggagggacgcc

SEQ ID NO: 6026 - DNA, 21 bp, synthetic construct
  source 1..21: mol_type = other DNA
cggctcaatgacacctggcct

SEQ ID NO: 6027 - DNA, 21 bp, synthetic construct
  source 1..21: mol_type = other DNA
tcctatacgcggttaacactc

SEQ ID NO: 6028 - DNA, 21 bp, synthetic construct
  source 1..21: mol_type = other DNA
tttgtcgcatccgagtggcca

SEQ ID NO: 6029 - DNA, 21 bp, synthetic construct
  source 1..21: mol_type = other DNA
gtctatcataaatttcagatc

SEQ ID NO: 6030 - DNA, 21 bp, synthetic construct
  source 1..21: mol_type = other DNA
ggtcgtcctaacctactatgg

SEQ ID NO: 6031 - DNA, 21 bp, synthetic construct
  source 1..21: mol_type = other DNA
tggcgcagcactagtttcggg

SEQ ID NO: 6032 - DNA, 21 bp, synthetic construct
  source 1..21: mol_type = other DNA
attcgaggcaacgagtggccg

SEQ ID NO: 6033 - DNA, 21 bp, synthetic construct
  source 1..21: mol_type = other DNA
caatacataaggtccagttcg

SEQ ID NO: 6034 - DNA, 21 bp, synthetic construct
  source 1..21: mol_type = other DNA
aataacatatttgccacatat

SEQ ID NO: 6035 - DNA, 21 bp, synthetic construct
  source 1..21: mol_type = other DNA
tcacgattaacgctcttcccc

SEQ ID NO: 6036 - DNA, 21 bp, synthetic construct
  source 1..21: mol_type = other DNA
cggtatttgaaaagccaagaa

SEQ ID NO: 6037 - DNA, 21 bp, synthetic construct
  source 1..21: mol_type = other DNA
cacaagaatcctttgtggggt

SEQ ID NO: 6038 - DNA, 21 bp, synthetic construct
  source 1..21: mol_type = other DNA
acttttgtcaggtcagttcta

SEQ ID NO: 6039 - DNA, 21 bp, synthetic construct
  source 1..21: mol_type = other DNA
actcgtatggccatgttccct

SEQ ID NO: 6040 - DNA, 21 bp, synthetic construct
  source 1..21: mol_type = other DNA
caatatacgcataaagtactt

SEQ ID NO: 6041 - DNA, 21 bp, synthetic construct
  source 1..21: mol_type = other DNA
atggcacagggtaattggcct

SEQ ID NO: 6042 - DNA, 21 bp, synthetic construct
  source 1..21: mol_type = other DNA
gtctactctaaattgatgacc

SEQ ID NO: 6043 - DNA, 21 bp, synthetic construct
  source 1..21: mol_type = other DNA
ttaatgaataatgactggcca

SEQ ID NO: 6044 - DNA, 21 bp, synthetic construct
  source 1..21: mol_type = other DNA
gtgtgggtgaagtcgtcaata

SEQ ID NO: 6045 - DNA, 21 bp, synthetic construct
  source 1..21: mol_type = other DNA
atgatgtcggacgcttggccg

SEQ ID NO: 6046 - DNA, 21 bp, synthetic construct
  source 1..21: mol_type = other DNA
cgcaaagaaagcatgtggccc

SEQ ID NO: 6047 - DNA, 21 bp, synthetic construct
  source 1..21: mol_type = other DNA
tccggctggctgaccgaggtt

SEQ ID NO: 6048 - DNA, 21 bp, synthetic construct
  source 1..21: mol_type = other DNA
ttgcaaggctctaactggccg

SEQ ID NO: 6049 - DNA, 21 bp, synthetic construct
  source 1..21: mol_type = other DNA
gtgctatcgggcatgtggccc

SEQ ID NO: 6050 - DNA, 21 bp, synthetic construct
  source 1..21: mol_type = other DNA
gtgccgactatgtggtccgca

SEQ ID NO: 6051 - DNA, 21 bp, synthetic construct
  source 1..21: mol_type = other DNA
tcttattctagggttcaggtg

SEQ ID NO: 6052 - DNA, 21 bp, synthetic construct
  source 1..21: mol_type = other DNA
gatgggttagccggttactat

SEQ ID NO: 6053 - DNA, 21 bp, synthetic construct
  source 1..21: mol_type = other DNA
gatccagttaacgtgtggggc

SEQ ID NO: 6054 - DNA, 21 bp, synthetic construct
  source 1..21: mol_type = other DNA
gtgtacacgcgcatggatatc

SEQ ID NO: 6055 - DNA, 21 bp, synthetic construct
  source 1..21: mol_type = other DNA
agatacctgaagagtcaggag

SEQ ID NO: 6056 - DNA, 21 bp, synthetic construct
  source 1..21: mol_type = other DNA
gttgaacacaacaattggccc

SEQ ID NO: 6057 - DNA, 21 bp, synthetic construct
  source 1..21: mol_type = other DNA
tcttacgcacgctcggtcccg

SEQ ID NO: 6058 - DNA, 21 bp, synthetic construct
  source 1..21: mol_type = other DNA
cagttgagcggcctctggccg

SEQ ID NO: 6059 - DNA, 21 bp, synthetic construct
  source 1..21: mol_type = other DNA
caaagagctactttatttccc

SEQ ID NO: 6060 - DNA, 21 bp, synthetic construct
  source 1..21: mol_type = other DNA
atttacatcaaaagctcaacg

SEQ ID NO: 6061 - DNA, 21 bp, synthetic construct
  source 1..21: mol_type = other DNA
acagttactgaggtgtggccc

SEQ ID NO: 6062 - DNA, 21 bp, synthetic construct
  source 1..21: mol_type = other DNA
agaggaccggtttacttatcc

SEQ ID NO: 6063 - DNA, 21 bp, synthetic construct
  source 1..21: mol_type = other DNA
acgtacagtaggctgcaacta

SEQ ID NO: 6064 - DNA, 21 bp, synthetic construct
  source 1..21: mol_type = other DNA
atggataaagatgcttggccg

SEQ ID NO: 6065 - DNA, 21 bp, synthetic construct
  source 1..21: mol_type = other DNA
gaaaaagggatgtggaccccc

SEQ ID NO: 6066 - DNA, 21 bp, synthetic construct
  source 1..21: mol_type = other DNA
ctatacgtaaagtcaacagtt

SEQ ID NO: 6067 - DNA, 21 bp, synthetic construct
  source 1..21: mol_type = other DNA
gtctatacccgaatggacatt

SEQ ID NO: 6068 - DNA, 21 bp, synthetic construct
  source 1..21: mol_type = other DNA
gctatggggtctctttggccg

SEQ ID NO: 6069 - DNA, 21 bp, synthetic construct
  source 1..21: mol_type = other DNA
atgatgggtcagcaatggccc

SEQ ID NO: 6070 - DNA, 21 bp, synthetic construct
  source 1..21: mol_type = other DNA
atggttaacaagacatggccc

SEQ ID NO: 6071 - DNA, 21 bp, synthetic construct
  source 1..21: mol_type = other DNA
agttatgtaaagtcctccact

SEQ ID NO: 6072 - DNA, 21 bp, synthetic construct
  source 1..21: mol_type = other DNA
ctaattctggaaaattggccc

SEQ ID NO: 6073 - DNA, 21 bp, synthetic construct
  source 1..21: mol_type = other DNA
cgcaatggagacaattggccg

SEQ ID NO: 6074 - DNA, 21 bp, synthetic construct
  source 1..21: mol_type = other DNA
tattacgacctcgtggagtat

SEQ ID NO: 6075 - DNA, 21 bp, synthetic construct
  source 1..21: mol_type = other DNA
gtcttctcgaagatacagcac

SEQ ID NO: 6076 - DNA, 21 bp, synthetic construct
  source 1..21: mol_type = other DNA
gtaatgaaggacctttggccg

SEQ ID NO: 6077 - DNA, 21 bp, synthetic construct
  source 1..21: mol_type = other DNA
aagctagggacggcatggcca

SEQ ID NO: 6078 - DNA, 21 bp, synthetic construct
  source 1..21: mol_type = other DNA
actaggtctatgtggtcagag

SEQ ID NO: 6079 - DNA, 21 bp, synthetic construct
  source 1..21: mol_type = other DNA
tcgtatgcccggtctgtgcct

SEQ ID NO: 6080 - DNA, 21 bp, synthetic construct
  source 1..21: mol_type = other DNA
acatattcgcgtttacagtta

SEQ ID NO: 6081 - DNA, 21 bp, synthetic construct
  source 1..21: mol_type = other DNA
aaacgtctccaggaatggcct

SEQ ID NO: 6082 - DNA, 21 bp, synthetic construct
  source 1..21: mol_type = other DNA
gcgatgggttcgctatggccc

SEQ ID NO: 6083 - DNA, 21 bp, synthetic construct
  source 1..21: mol_type = other DNA
cctatgaacgggaattggcct

SEQ ID NO: 6084 - DNA, 21 bp, synthetic construct
  source 1..21: mol_type = other DNA
ataaatctgaaggagtggccg

SEQ ID NO: 6085 - DNA, 21 bp, synthetic construct
  source 1..21: mol_type = other DNA
aacaaacccttagattggaag

SEQ ID NO: 6086 - DNA, 21 bp, synthetic construct
  source 1..21: mol_type = other DNA
caatacgtcttgtcgatgaaa

SEQ ID NO: 6087 - DNA, 21 bp, synthetic construct
  source 1..21: mol_type = other DNA
atagtcggagaagcttggccg

SEQ ID NO: 6088 - DNA, 21 bp, synthetic construct
  source 1..21: mol_type = other DNA
aacttgatgggaacatggccc

SEQ ID NO: 6089 - DNA, 21 bp, synthetic construct
  source 1..21: mol_type = other DNA
gtgttctcgaagagcatgtac

SEQ ID NO: 6090 - DNA, 21 bp, synthetic construct
  source 1..21: mol_type = other DNA
cagtatgtgaaatccaccact

SEQ ID NO: 6091 - DNA, 21 bp, synthetic construct
  source 1..21: mol_type = other DNA
aagcccatgtatctaggtacg

SEQ ID NO: 6092 - DNA, 21 bp, synthetic construct
  source 1..21: mol_type = other DNA
tacaaaactaataactggcca

SEQ ID NO: 6093 - DNA, 21 bp, synthetic construct
  source 1..21: mol_type = other DNA
ttgtatgttaaaagcacggtg

SEQ ID NO: 6094 - DNA, 21 bp, synthetic construct
  source 1..21: mol_type = other DNA
cagtacaccaagagcgtaccc

SEQ ID NO: 6095 - DNA, 21 bp, synthetic construct
  source 1..21: mol_type = other DNA
cagtttgtgaaatctatctct

SEQ ID NO: 6096 - DNA, 21 bp, synthetic construct
  source 1..21: mol_type = other DNA
gatggtttcaccaatctctgg

SEQ ID NO: 6097 - DNA, 21 bp, synthetic construct
  source 1..21: mol_type = other DNA
aagaacgccgaggtgtggcct

SEQ ID NO: 6098 - DNA, 21 bp, synthetic construct
  source 1..21: mol_type = other DNA
tcacgttcaagcttattccct

SEQ ID NO: 6099 - DNA, 21 bp, synthetic construct
  source 1..21: mol_type = other DNA
atggctcaagggaactggccc

SEQ ID NO: 6100 - DNA, 21 bp, synthetic construct
  source 1..21: mol_type = other DNA
gtatatcacaaacttaccaca

SEQ ID NO: 6101 - DNA, 21 bp, synthetic construct
  source 1..21: mol_type = other DNA
gtgtaccataagctcacgact

SEQ ID NO: 6102 - DNA, 21 bp, synthetic construct
  source 1..21: mol_type = other DNA
ggtggaatgttcatgagtccc

SEQ ID NO: 6103 - DNA, 21 bp, synthetic construct
  source 1..21: mol_type = other DNA
cagtacgtacgctccgaaccg

SEQ ID NO: 6104 - DNA, 21 bp, synthetic construct
  source 1..21: mol_type = other DNA
cgcaacaactatgacaactat

SEQ ID NO: 6105 - DNA, 21 bp, synthetic construct
  source 1..21: mol_type = other DNA
gtgtatgtccgcagtgcggag

SEQ ID NO: 6106 - DNA, 21 bp, synthetic construct
  source 1..21: mol_type = other DNA
cagtatgtcattagtcaaaag

SEQ ID NO: 6107 - DNA, 21 bp, synthetic construct
  source 1..21: mol_type = other DNA
ctcaaggatcacaactggcca

SEQ ID NO: 6108 - DNA, 21 bp, synthetic construct
  source 1..21: mol_type = other DNA
aaaaatccattgcagtttcat

SEQ ID NO: 6109 - DNA, 21 bp, synthetic construct
  source 1..21: mol_type = other DNA
cgtggaacgtttgacgtttac

SEQ ID NO: 6110 - DNA, 21 bp, synthetic construct
  source 1..21: mol_type = other DNA
cttaacgtctggaaacagccc

SEQ ID NO: 6111 - DNA, 21 bp, synthetic construct
  source 1..21: mol_type = other DNA
caccgcggtgaactcaactgg

SEQ ID NO: 6112 - DNA, 21 bp, synthetic construct
  source 1..21: mol_type = other DNA
atgcgcgtaatcgactggtct

SEQ ID NO: 6113 - DNA, 21 bp, synthetic construct
  source 1..21: mol_type = other DNA
attcatgatggtgtttggcct

SEQ ID NO: 6114 - DNA, 21 bp, synthetic construct
  source 1..21: mol_type = other DNA
ggcactgcaaagcacccctgg

SEQ ID NO: 6115 - DNA, 21 bp, synthetic construct
  source 1..21: mol_type = other DNA
ggaacagctaaacatccatgg

SEQ ID NO: 6116 - DNA, 21 bp, synthetic construct
  source 1..21: mol_type = other DNA
caatacgttaagtcaactaca

SEQ ID NO: 6117 - DNA, 21 bp, synthetic construct
  source 1..21: mol_type = other DNA
tggcgtggcaccagtatgcaa

SEQ ID NO: 6118 - DNA, 21 bp, synthetic construct
  source 1..21: mol_type = other DNA
cagggtctatggcgcgatgcg

SEQ ID NO: 6119 - DNA, 21 bp, synthetic construct
  source 1..21: mol_type = other DNA
tggaagggaaccacatttcac

SEQ ID NO: 6120 - DNA, 21 bp, synthetic construct
  source 1..21: mol_type = other DNA
atgatgggacaacagtggccg

SEQ ID NO: 6121 - DNA, 21 bp, synthetic construct
  source 1..21: mol_type = other DNA
gtctacacaaagtcaacctct

SEQ ID NO: 6122 - DNA, 21 bp, synthetic construct
  source 1..21: mol_type = other DNA
ttcgtggcttctgaatggcct

SEQ ID NO: 6123 - DNA, 21 bp, synthetic construct
  source 1..21: mol_type = other DNA
aacaataaaggaaactggccg

SEQ ID NO: 6124 - DNA, 21 bp, synthetic construct
  source 1..21: mol_type = other DNA
acgggtgtatggatgcaaacg

SEQ ID NO: 6125 - DNA, 21 bp, synthetic construct
  source 1..21: mol_type = other DNA
gatcggattaactacttgggg

SEQ ID NO: 6126 - DNA, 21 bp, synthetic construct
  source 1..21: mol_type = other DNA
acctactcgaggctcgactcg

SEQ ID NO: 6127 - DNA, 21 bp, synthetic construct
  source 1..21: mol_type = other DNA
tcctacatatatgatggcgac

SEQ ID NO: 6128 - DNA, 21 bp, synthetic construct
  source 1..21: mol_type = other DNA
gcctatgtgaaatctataacc

SEQ ID NO: 6129 - DNA, 21 bp, synthetic construct
  source 1..21: mol_type = other DNA
cagtatacgaagcacgtttca

SEQ ID NO: 6130 - DNA, 21 bp, synthetic construct
  source 1..21: mol_type = other DNA
cgccagcatgtgctatttccc

SEQ ID NO: 6131 - DNA, 21 bp, synthetic construct
  source 1..21: mol_type = other DNA
gcgagaggacaattgccctgg

SEQ ID NO: 6132 - DNA, 21 bp, synthetic construct
  source 1..21: mol_type = other DNA
ggaaagagcataacgcattgg

SEQ ID NO: 6133 - DNA, 21 bp, synthetic construct
  source 1..21: mol_type = other DNA
agttatgcgaaatcagtaata

SEQ ID NO: 6134 - DNA, 21 bp, synthetic construct
  source 1..21: mol_type = other DNA
gggcgaattacgctgtttccg

SEQ ID NO: 6135 - DNA, 21 bp, synthetic construct
  source 1..21: mol_type = other DNA
atttactctgctctgcaaacg

SEQ ID NO: 6136 - DNA, 21 bp, synthetic construct
  source 1..21: mol_type = other DNA
aaagtacagcaacagtggccg

SEQ ID NO: 6137 - DNA, 21 bp, synthetic construct
  source 1..21: mol_type = other DNA
gcatacgtgaagtccatgtct

SEQ ID NO: 6138 - DNA, 21 bp, synthetic construct
  source 1..21: mol_type = other DNA
aaacgtgatagcatgtggccg

SEQ ID NO: 6139 - DNA, 21 bp, synthetic construct
  source 1..21: mol_type = other DNA
atgttagcggagaactggccg

SEQ ID NO: 6140 - DNA, 21 bp, synthetic construct
  source 1..21: mol_type = other DNA
acacggatggcgatgtttcca

SEQ ID NO: 6141 - DNA, 21 bp, synthetic construct
  source 1..21: mol_type = other DNA
aaacctatgtacttggggaca

SEQ ID NO: 6142 - DNA, 21 bp, synthetic construct
  source 1..21: mol_type = other DNA
agtagatcgagtctttttccc

SEQ ID NO: 6143 - DNA, 21 bp, synthetic construct
  source 1..21: mol_type = other DNA
cgttgggacccccatgatcag

SEQ ID NO: 6144 - DNA, 21 bp, synthetic construct
  source 1..21: mol_type = other DNA
ccaatgaggggccacctgttc

SEQ ID NO: 6145 - DNA, 21 bp, synthetic construct
  source 1..21: mol_type = other DNA
tggaaaggtactacgttccat

SEQ ID NO: 6146 - DNA, 21 bp, synthetic construct
  source 1..21: mol_type = other DNA
taccaacgggctgattggccg

SEQ ID NO: 6147 - DNA, 21 bp, synthetic construct
  source 1..21: mol_type = other DNA
gcgtacgttaagagttcaatc

SEQ ID NO: 6148 - DNA, 21 bp, synthetic construct
  source 1..21: mol_type = other DNA
agttacagccgggtacaagtc

SEQ ID NO: 6149 - DNA, 21 bp, synthetic construct
  source 1..21: mol_type = other DNA
ttcctaaagtatagtgattac

SEQ ID NO: 6150 - DNA, 21 bp, synthetic construct
  source 1..21: mol_type = other DNA
cgcatttcgaacgattggccc

SEQ ID NO: 6151 - DNA, 21 bp, synthetic construct
  source 1..21: mol_type = other DNA
caatatactaaaagtgtgcct

SEQ ID NO: 6152 - DNA, 21 bp, synthetic construct
  source 1..21: mol_type = other DNA
aaatttgaatcgaattggcct

SEQ ID NO: 6153 - DNA, 21 bp, synthetic construct
  source 1..21: mol_type = other DNA
gtaaagggagaggcttggccg

SEQ ID NO: 6154 - DNA, 21 bp, synthetic construct
  source 1..21: mol_type = other DNA
caatatgtaaagcatctatct

SEQ ID NO: 6155 - DNA, 21 bp, synthetic construct
  source 1..21: mol_type = other DNA
gtttacgtacggtcggctgaa

SEQ ID NO: 6156 - DNA, 21 bp, synthetic construct
  source 1..21: mol_type = other DNA
gagaagggaatgtggacgccg

SEQ ID NO: 6157 - DNA, 21 bp, synthetic construct
  source 1..21: mol_type = other DNA
aaagtaggggctctgtggccc

SEQ ID NO: 6158 - DNA, 21 bp, synthetic construct
  source 1..21: mol_type = other DNA
gtttacacccgtacagagaag

SEQ ID NO: 6159 - DNA, 21 bp, synthetic construct
  source 1..21: mol_type = other DNA
gacacatggaatatgggaggc

SEQ ID NO: 6160 - DNA, 21 bp, synthetic construct
  source 1..21: mol_type = other DNA
tacaaccatccactaaattgg

SEQ ID NO: 6161 - DNA, 21 bp, synthetic construct
  source 1..21: mol_type = other DNA
gtgtatacacgaaccgaaaaa

SEQ ID NO: 6162 - DNA, 21 bp, synthetic construct
  source 1..21: mol_type = other DNA
cgaaatgtgtacgacggttat

SEQ ID NO: 6163 - DNA, 21 bp, synthetic construct
  source 1..21: mol_type = other DNA
gttcatcacaaaagcatgaca

SEQ ID NO: 6164 - DNA, 21 bp, synthetic construct
  source 1..21: mol_type = other DNA
tggcagggggagcatccatgg

SEQ ID NO: 6165 - DNA, 21 bp, synthetic construct
  source 1..21: mol_type = other DNA
gacaggaataaacttatctgg

SEQ ID NO: 6166 - DNA, 21 bp, synthetic construct
  source 1..21: mol_type = other DNA
gtgtattcaaagcttatgacg

SEQ ID NO: 6167 - DNA, 21 bp, synthetic construct
  source 1..21: mol_type = other DNA
tggcagcccgacccctttcca

SEQ ID NO: 6168 - DNA, 21 bp, synthetic construct
  source 1..21: mol_type = other DNA
ggcttggggtggattaatggg

SEQ ID NO: 6169 - DNA, 21 bp, synthetic construct
  source 1..21: mol_type = other DNA
cgagttctagcgaattggccg

SEQ ID NO: 6170 - DNA, 21 bp, synthetic construct
  source 1..21: mol_type = other DNA
tggacaactcataatatcgtt

SEQ ID NO: 6171 - DNA, 21 bp, synthetic construct
  source 1..21: mol_type = other DNA
cagcgcgcaaccctattccct

SEQ ID NO: 6172 - DNA, 21 bp, synthetic construct
  source 1..21: mol_type = other DNA
cagtacacacacaaggttttg

SEQ ID NO: 6173 - DNA, 21 bp, synthetic construct
  source 1..21: mol_type = other DNA
cgtaacacatacgatagctac

SEQ ID NO: 6174 - DNA, 21 bp, synthetic construct
  source 1..21: mol_type = other DNA
gacatgccgaactggtcgtgg

SEQ ID NO: 6175 - DNA, 21 bp, synthetic construct
  source 1..21: mol_type = other DNA
atatacgtaaaattcgaatcg

SEQ ID NO: 6176 - DNA, 21 bp, synthetic construct
  source 1..21: mol_type = other DNA
tacgtagctgacgattggcca

SEQ ID NO: 6177 - DNA, 21 bp, synthetic construct
  source 1..21: mol_type = other DNA
cagtacgtcaaacacttgtcc

SEQ ID NO: 6178 - DNA, 21 bp, synthetic construct
  source 1..21: mol_type = other DNA
aagcggttacaagagtggcca

SEQ ID NO: 6179 - DNA, 21 bp, synthetic construct
  source 1..21: mol_type = other DNA
cgggaaaggaacgagtggcct

SEQ ID NO: 6180 - DNA, 21 bp, synthetic construct
  source 1..21: mol_type = other DNA
aagatagaggggagctggcca

SEQ ID NO: 6181 - DNA, 21 bp, synthetic construct
  source 1..21: mol_type = other DNA
gcgtatgttaaatcaatgagt

SEQ ID NO: 6182 - DNA, 21 bp, synthetic construct
  source 1..21: mol_type = other DNA
tcatatgttaagtcccaaact

SEQ ID NO: 6183 - DNA, 21 bp, synthetic construct
  source 1..21: mol_type = other DNA
gtcaaaggcgaagcctggccc

SEQ ID NO: 6184 - DNA, 21 bp, synthetic construct
  source 1..21: mol_type = other DNA
atgatgagcgatgcatggccc

SEQ ID NO: 6185 - DNA, 21 bp, synthetic construct
  source 1..21: mol_type = other DNA
tatttggatctcgattggcca

SEQ ID NO: 6186 - DNA, 21 bp, synthetic construct
  source 1..21: mol_type = other DNA
gcttacgttaagagtatcact

SEQ ID NO: 6187 - DNA, 21 bp, synthetic construct
  source 1..21: mol_type = other DNA
agctacgtgaaatcatcgaca

SEQ ID NO: 6188 - DNA, 21 bp, synthetic construct
  source 1..21: mol_type = other DNA
taccttgacttggactggccc

SEQ ID NO: 6189 - DNA, 21 bp, synthetic construct
  source 1..21: mol_type = other DNA
gaccgcataaattatcttgga

SEQ ID NO: 6190 - DNA, 21 bp, synthetic construct
  source 1..21: mol_type = other DNA
aaggtggagtacaactggccg

SEQ ID NO: 6191 - DNA, 21 bp, synthetic construct
  source 1..21: mol_type = other DNA
tcagagcaagaatttaactgg

SEQ ID NO: 6192 - DNA, 21 bp, synthetic construct
  source 1..21: mol_type = other DNA
acttattcccgactggattca

SEQ ID NO: 6193 - DNA, 21 bp, synthetic construct
  source 1..21: mol_type = other DNA
gtatacacaaagaatgaacgg

SEQ ID NO: 6194 - DNA, 21 bp, synthetic construct
  source 1..21: mol_type = other DNA
atctactcaaaactgcaaaca

SEQ ID NO: 6195 - DNA, 21 bp, synthetic construct
  source 1..21: mol_type = other DNA
ggcaaatcaatcactcactgg

SEQ ID NO: 6196 - DNA, 21 bp, synthetic construct
  source 1..21: mol_type = other DNA
ggcatctatgctaccttcccg

SEQ ID NO: 6197 - DNA, 21 bp, synthetic construct
  source 1..21: mol_type = other DNA
aaccatccgcttgcttgggag

SEQ ID NO: 6198 - DNA, 21 bp, synthetic construct
  source 1..21: mol_type = other DNA
cggcgctccgacaattggcct

SEQ ID NO: 6199 - DNA, 21 bp, synthetic construct
  source 1..21: mol_type = other DNA
caattcgtcaagtcgattagt

SEQ ID NO: 6200 - DNA, 21 bp, synthetic construct
  source 1..21: mol_type = other DNA
gtcgagcataataactggcca

SEQ ID NO: 6201 - DNA, 21 bp, synthetic construct
  source 1..21: mol_type = other DNA
cgacacactacggagtggcct

SEQ ID NO: 6202 - DNA, 21 bp, synthetic construct
  source 1..21: mol_type = other DNA
aataagcctctatatttctcc

SEQ ID NO: 6203 - DNA, 21 bp, synthetic construct
  source 1..21: mol_type = other DNA
gtgtatgtcaagactcaatcg

SEQ ID NO: 6204 - DNA, 21 bp, synthetic construct
  source 1..21: mol_type = other DNA
aaagtagaatataattggcca

SEQ ID NO: 6205 - DNA, 21 bp, synthetic construct
  source 1..21: mol_type = other DNA
ggccagcagtatagttattcg

SEQ ID NO: 6206 - DNA, 21 bp, synthetic construct
  source 1..21: mol_type = other DNA
gggcaacaatactcatacagc

SEQ ID NO: 6207 - DNA, 21 bp, synthetic construct
  source 1..21: mol_type = other DNA
acaggggtttggatgcagact

SEQ ID NO: 6208 - DNA, 21 bp, synthetic construct
  source 1..21: mol_type = other DNA
tttttgaaatactctgactat

SEQ ID NO: 6209 - DNA, 21 bp, synthetic construct
  source 1..21: mol_type = other DNA
tcatacagccgcattgcccca

SEQ ID NO: 6210 - DNA, 21 bp, synthetic construct
  source 1..21: mol_type = other DNA
gtacaccataagtctatgact

SEQ ID NO: 6211 - DNA, 21 bp, synthetic construct
  source 1..21: mol_type = other DNA
acattcgttcgatccgtatta

SEQ ID NO: 6212 - DNA, 21 bp, synthetic construct
  source 1..21: mol_type = other DNA
gatcggaacaagctaatatgg

SEQ ID NO: 6213 - DNA, 21 bp, synthetic construct
  source 1..21: mol_type = other DNA
tctcgtgacgttacgtggccc

SEQ ID NO: 6214 - DNA, 21 bp, synthetic construct
  source 1..21: mol_type = other DNA
cgagacactttttggtcaggc

SEQ ID NO: 6215 - DNA, 21 bp, synthetic construct
  source 1..21: mol_type = other DNA
agttacgtaaaatctcagacc

SEQ ID NO: 6216 - DNA, 21 bp, synthetic construct
  source 1..21: mol_type = other DNA
gcatatgtgaaaagcagtata

SEQ ID NO: 6217 - DNA, 21 bp, synthetic construct
  source 1..21: mol_type = other DNA
acgtcgaggccgctcaattgg

SEQ ID NO: 6218 - DNA, 21 bp, synthetic construct
  source 1..21: mol_type = other DNA
caataccataagtcagagtct

SEQ ID NO: 6219 - DNA, 21 bp, synthetic construct
  source 1..21: mol_type = other DNA
ggaaatgagttctggtctccc

SEQ ID NO: 6220 - DNA, 21 bp, synthetic construct
  source 1..21: mol_type = other DNA
aaaaacgaagacatctggcct

SEQ ID NO: 6221 - DNA, 21 bp, synthetic construct
  source 1..21: mol_type = other DNA
tataacgaagggtcctggccg

SEQ ID NO: 6222 - DNA, 21 bp, synthetic construct
  source 1..21: mol_type = other DNA
tcgagtatacacgatcgatat

SEQ ID NO: 6223 - DNA, 21 bp, synthetic construct
  source 1..21: mol_type = other DNA
ccgatgaatggtaactggccc

SEQ ID NO: 6224 - DNA, 21 bp, synthetic construct
  source 1..21: mol_type = other DNA
tcgtattctcggatcgctccc

SEQ ID NO: 6225 - DNA, 21 bp, synthetic construct
  source 1..21: mol_type = other DNA
cgcaataactatgacagcatg

SEQ ID NO: 6226 - DNA, 21 bp, synthetic construct
  source 1..21: mol_type = other DNA
tcgcgtctcacattgtttcct

SEQ ID NO: 6227 - DNA, 21 bp, synthetic construct
  source 1..21: mol_type = other DNA
atgcaagacatcaagtggcct

SEQ ID NO: 6228 - DNA, 21 bp, synthetic construct
  source 1..21: mol_type = other DNA
agaaatgtgttcgatacctct

SEQ ID NO: 6229 - DNA, 21 bp, synthetic construct
  source 1..21: mol_type = other DNA
gaggcaaatttcagtaattgg

SEQ ID NO: 6230 - DNA, 21 bp, synthetic construct
  source 1..21: mol_type = other DNA
acatatagtcgcttagtctta

SEQ ID NO: 6231 - DNA, 21 bp, synthetic construct
  source 1..21: mol_type = other DNA
acatatgtgaggtcggaagtc

SEQ ID NO: 6232 - DNA, 21 bp, synthetic construct
  source 1..21: mol_type = other DNA
caatacactaaatcaagtatc

SEQ ID NO: 6233 - DNA, 21 bp, synthetic construct
  source 1..21: mol_type = other DNA
tcatatatctacgacggtgat

SEQ ID NO: 6234 - DNA, 21 bp, synthetic construct
  source 1..21: mol_type = other DNA
atacacgacggggtctggccg

SEQ ID NO: 6235 - DNA, 21 bp, synthetic construct
  source 1..21: mol_type = other DNA
agaatcagtaatgactggcca

SEQ ID NO: 6236 - DNA, 21 bp, synthetic construct
  source 1..21: mol_type = other DNA
tggtccacaagggagatgatc

SEQ ID NO: 6237 - DNA, 21 bp, synthetic construct
  source 1..21: mol_type = other DNA
ggctctacggatccctggccg

SEQ ID NO: 6238 - DNA, 21 bp, synthetic construct
  source 1..21: mol_type = other DNA
tcgtacgctaagtccgttatc

SEQ ID NO: 6239 - DNA, 21 bp, synthetic construct
  source 1..21: mol_type = other DNA
aagttcgagtccaactggccg

SEQ ID NO: 6240 - DNA, 21 bp, synthetic construct
  source 1..21: mol_type = other DNA
tatttcaccgacgagtggcca

SEQ ID NO: 6241 - DNA, 21 bp, synthetic construct
  source 1..21: mol_type = other DNA
tactttacagatgaatggccc

SEQ ID NO: 6242 - DNA, 21 bp, synthetic construct
  source 1..21: mol_type = other DNA
caatacacaaaacatgtatct

SEQ ID NO: 6243 - DNA, 21 bp, synthetic construct
  source 1..21: mol_type = other DNA
gttatgtcggaggtctggcca

SEQ ID NO: 6244 - DNA, 21 bp, synthetic construct
  source 1..21: mol_type = other DNA
agagatcgggccgaatggcct

SEQ ID NO: 6245 - DNA, 21 bp, synthetic construct
  source 1..21: mol_type = other DNA
tcctatagcagacttatagag

SEQ ID NO: 6246 - DNA, 21 bp, synthetic construct
  source 1..21: mol_type = other DNA
gtaaatagattggtagactgg

SEQ ID NO: 6247 - DNA, 21 bp, synthetic construct
  source 1..21: mol_type = other DNA
acagtaaaaatacaatggccc

SEQ ID NO: 6248 - DNA, 21 bp, synthetic construct
  source 1..21: mol_type = other DNA
cagtatcacaaatcggaaagt

SEQ ID NO: 6249 - DNA, 21 bp, synthetic construct
  source 1..21: mol_type = other DNA
acttataccaagtctcaaacg

SEQ ID NO: 6250 - DNA, 21 bp, synthetic construct
  source 1..21: mol_type = other DNA
aggaatcactacgatacccaa

SEQ ID NO: 6251 - DNA, 21 bp, synthetic construct
  source 1..21: mol_type = other DNA
tacaatgagggatcatggcca

SEQ ID NO: 6252 - DNA, 21 bp, synthetic construct
  source 1..21: mol_type = other DNA
aaaattgaaggatcatggccg

SEQ ID NO: 6253 - DNA, 21 bp, synthetic construct
  source 1..21: mol_type = other DNA
ttgaaagtattacaatgggac

SEQ ID NO: 6254 - DNA, 21 bp, synthetic construct
  source 1..21: mol_type = other DNA
ttcgtgtcttctgactggccg

SEQ ID NO: 6255 - DNA, 21 bp, synthetic construct
  source 1..21: mol_type = other DNA
tggtcaacccgggaaatgatt

SEQ ID NO: 6256 - DNA, 21 bp, synthetic construct
  source 1..21: mol_type = other DNA
gggtttggcgagaagtggcct

SEQ ID NO: 6257 - DNA, 21 bp, synthetic construct
  source 1..21: mol_type = other DNA
gcttacgtgaagagcaatacg

SEQ ID NO: 6258 - DNA, 21 bp, synthetic construct
  source 1..21: mol_type = other DNA
ctggtttcgaacgattggcct

SEQ ID NO: 6259 - DNA, 21 bp, synthetic construct
  source 1..21: mol_type = other DNA
ggtatttacgcaacgtttcca

SEQ ID NO: 6260 - DNA, 21 bp, synthetic construct
  source 1..21: mol_type = other DNA
caatacgttatatctcagaaa

SEQ ID NO: 6261 - DNA, 21 bp, synthetic construct
  source 1..21: mol_type = other DNA
cggaacggcgataactggcct

SEQ ID NO: 6262 - DNA, 21 bp, synthetic construct
  source 1..21: mol_type = other DNA
tcgggatggttgacagaagtc

SEQ ID NO: 6263 - DNA, 21 bp, synthetic construct
  source 1..21: mol_type = other DNA
cgccatacaacagaatggccc

SEQ ID NO: 6264 - DNA, 21 bp, synthetic construct
  source 1..21: mol_type = other DNA
aggagatcagataactggcca

SEQ ID NO: 6265 - DNA, 21 bp, synthetic construct
  source 1..21: mol_type = other DNA
tccaaatatcatgacgtcttt

SEQ ID NO: 6266 - DNA, 21 bp, synthetic construct
  source 1..21: mol_type = other DNA
gtatataccaagtccgagtgg

SEQ ID NO: 6267 - DNA, 21 bp, synthetic construct
  source 1..21: mol_type = other DNA
cagtatgtactttctatgaag

SEQ ID NO: 6268 - DNA, 21 bp, synthetic construct
  source 1..21: mol_type = other DNA
tatatgagtcctgattggcca

SEQ ID NO: 6269 - DNA, 21 bp, synthetic construct
  source 1..21: mol_type = other DNA
cagtatacgaagagcagcatt

SEQ ID NO: 6270 - DNA, 21 bp, synthetic construct
  source 1..21: mol_type = other DNA
aaaaagagcctagattggcct

SEQ ID NO: 6271 - DNA, 21 bp, synthetic construct
  source 1..21: mol_type = other DNA
agcagaaatgtactgggttgg

SEQ ID NO: 6272 - DNA, 21 bp, synthetic construct
  source 1..21: mol_type = other DNA
gcgtatgtaaaatccaacact

SEQ ID NO: 6273 - DNA, 21 bp, synthetic construct
  source 1..21: mol_type = other DNA
acgtacacaaaatcccagacc

SEQ ID NO: 6274 - DNA, 21 bp, synthetic construct
  source 1..21: mol_type = other DNA
caatatgtccggtcggagcca

SEQ ID NO: 6275 - DNA, 21 bp, synthetic construct
  source 1..21: mol_type = other DNA
gttaaggatggcacatggccg

SEQ ID NO: 6276 - DNA, 21 bp, synthetic construct
  source 1..21: mol_type = other DNA
cgtgaccgagcagagtggcca

SEQ ID NO: 6277 - DNA, 21 bp, synthetic construct
  source 1..21: mol_type = other DNA
gatacgtggaacatgggtggt

SEQ ID NO: 6278 - DNA, 21 bp, synthetic construct
  source 1..21: mol_type = other DNA
gtctatactaaaaacgagcga

SEQ ID NO: 6279 - DNA, 21 bp, synthetic construct
  source 1..21: mol_type = other DNA
atcacggtagatggctggcca

SEQ ID NO: 6280 - DNA, 21 bp, synthetic construct
  source 1..21: mol_type = other DNA
cgtaataattacgataattac

SEQ ID NO: 6281 - DNA, 21 bp, synthetic construct
  source 1..21: mol_type = other DNA
ttctcaggcgatacgtggccg

SEQ ID NO: 6282 - DNA, 21 bp, synthetic construct
  source 1..21: mol_type = other DNA
gtttactccaaattaaacacg

SEQ ID NO: 6283 - DNA, 21 bp, synthetic construct
  source 1..21: mol_type = other DNA
acgtccaggttcgacacctac

SEQ ID NO: 6284 - DNA, 21 bp, synthetic construct
  source 1..21: mol_type = other DNA
aaagtaaatgatacatggcct

SEQ ID NO: 6285 - DNA, 21 bp, synthetic construct
  source 1..21: mol_type = other DNA
agtaagtaccacgatgttttc

SEQ ID NO: 6286 - DNA, 21 bp, synthetic construct
  source 1..21: mol_type = other DNA
aggaacgtctttgacacatcg

SEQ ID NO: 6287 - DNA, 21 bp, synthetic construct
  source 1..21: mol_type = other DNA
ataacagtcgacggatggcct

SEQ ID NO: 6288 - DNA, 21 bp, synthetic construct
  source 1..21: mol_type = other DNA
tggaaattccagacagagatc

SEQ ID NO: 6289 - DNA, 21 bp, synthetic construct
  source 1..21: mol_type = other DNA
gtctacactaaatcggaatgg

SEQ ID NO: 6290 - DNA, 21 bp, synthetic construct
  source 1..21: mol_type = other DNA
ggcacttttcaattgtttccg

SEQ ID NO: 6291 - DNA, 21 bp, synthetic construct
  source 1..21: mol_type = other DNA
tatcagcgcgcggactggccc

SEQ ID NO: 6292 - DNA, 21 bp, synthetic construct
  source 1..21: mol_type = other DNA
gtgtatgtacggacggaaatg

SEQ ID NO: 6293 - DNA, 21 bp, synthetic construct
  source 1..21: mol_type = other DNA
caggttgtgaaatacttgcct

SEQ ID NO: 6294 - DNA, 21 bp, synthetic construct
  source 1..21: mol_type = other DNA
acgttcgttaagtcgctaacg

SEQ ID NO: 6295 - DNA, 21 bp, synthetic construct
  source 1..21: mol_type = other DNA
aaggtcgaatatgactggccc

SEQ ID NO: 6296 - DNA, 21 bp, synthetic construct
  source 1..21: mol_type = other DNA
tttgtctcctccgattggccc

SEQ ID NO: 6297 - DNA, 21 bp, synthetic construct
  source 1..21: mol_type = other DNA
caatggacaaagacagtacct

SEQ ID NO: 6298 - DNA, 21 bp, synthetic construct
  source 1..21: mol_type = other DNA
tcatttgtgagatcggttgaa

SEQ ID NO: 6299 - DNA, 21 bp, synthetic construct
  source 1..21: mol_type = other DNA
gttaaccgactggttgattgg

SEQ ID NO: 6300 - DNA, 21 bp, synthetic construct
  source 1..21: mol_type = other DNA
cctatgcctaacatggtatgg

SEQ ID NO: 6301 - DNA, 21 bp, synthetic construct
  source 1..21: mol_type = other DNA
aagaatgaggatatttggccc

SEQ ID NO: 6302 - DNA, 21 bp, synthetic construct
  source 1..21: mol_type = other DNA
tttaaggaggggatctggcct

SEQ ID NO: 6303 - DNA, 21 bp, synthetic construct
  source 1..21: mol_type = other DNA
gggaagaatgtattatggccc

SEQ ID NO: 6304 - DNA, 21 bp, synthetic construct
  source 1..21: mol_type = other DNA
agcttcgtacgatctgtggag

SEQ ID NO: 6305 - DNA, 21 bp, synthetic construct
  source 1..21: mol_type = other DNA
gtagttcgattctcaaatcac

SEQ ID NO: 6306 - DNA, 21 bp, synthetic construct
  source 1..21: mol_type = other DNA
gttcaggcagagagttggccc

SEQ ID NO: 6307 - DNA, 21 bp, synthetic construct
  source 1..21: mol_type = other DNA
gtacacgaggagctatggcca

SEQ ID NO: 6308 - DNA, 21 bp, synthetic construct
  source 1..21: mol_type = other DNA
gccttcactagattagaagtt

SEQ ID NO: 6309 - DNA, 21 bp, synthetic construct
  source 1..21: mol_type = other DNA
gtattttctaaaagtatgtat

SEQ ID NO: 6310 - DNA, 21 bp, synthetic construct
  source 1..21: mol_type = other DNA
gtgatgaaagatctatggccc

SEQ ID NO: 6311 - DNA, 21 bp, synthetic construct
  source 1..21: mol_type = other DNA
cgctataccaagcttgaggag

SEQ ID NO: 6312 - DNA, 21 bp, synthetic construct
  source 1..21: mol_type = other DNA
cgatatgaagcggattggccc

SEQ ID NO: 6313 - DNA, 21 bp, synthetic construct
  source 1..21: mol_type = other DNA
aggaacaattacgattcaatg

SEQ ID NO: 6314 - DNA, 21 bp, synthetic construct
  source 1..21: mol_type = other DNA
gtgtatactaaatccacaagt

SEQ ID NO: 6315 - DNA, 21 bp, synthetic construct
  source 1..21: mol_type = other DNA
ctttacgaagatgtatggcca

SEQ ID NO: 6316 - DNA, 21 bp, synthetic construct
  source 1..21: mol_type = other DNA
ggcagaccaaatcttttatgg

SEQ ID NO: 6317 - DNA, 21 bp, synthetic construct
  source 1..21: mol_type = other DNA
aaacagggctcagagtggcca

SEQ ID NO: 6318 - DNA, 21 bp, synthetic construct
  source 1..21: mol_type = other DNA
atgcttttcaaatacgaggct

SEQ ID NO: 6319 - DNA, 21 bp, synthetic construct
  source 1..21: mol_type = other DNA
tcgagagatgtaacttggcct

SEQ ID NO: 6320 - DNA, 21 bp, synthetic construct
  source 1..21: mol_type = other DNA
tatgtggcagatgactggccc

SEQ ID NO: 6321 - DNA, 21 bp, synthetic construct
  source 1..21: mol_type = other DNA
gtctacgtaaaaacgcagagt

SEQ ID NO: 6322 - DNA, 21 bp, synthetic construct
  source 1..21: mol_type = other DNA
atcctatttaaacgcgagagc

SEQ ID NO: 6323 - DNA, 21 bp, synthetic construct
  source 1..21: mol_type = other DNA
tacgacatgcctgactggcct

SEQ ID NO: 6324 - DNA, 21 bp, synthetic construct
  source 1..21: mol_type = other DNA
attctggatcggaactggcct

SEQ ID NO: 6325 - DNA, 21 bp, synthetic construct
  source 1..21: mol_type = other DNA
acacaagtcgaacactggcca

SEQ ID NO: 6326 - DNA, 21 bp, synthetic construct
  source 1..21: mol_type = other DNA
cgtaaccattatgacacacag

SEQ ID NO: 6327 - DNA, 21 bp, synthetic construct
  source 1..21: mol_type = other DNA
cgactgattgagaattggccc

SEQ ID NO: 6328 - DNA, 21 bp, synthetic construct
  source 1..21: mol_type = other DNA
aagaaccctcttcaattccac

SEQ ID NO: 6329 - DNA, 21 bp, synthetic construct
  source 1..21: mol_type = other DNA
gcatacagccggcttgagtcc

SEQ ID NO: 6330 - DNA, 21 bp, synthetic construct
  source 1..21: mol_type = other DNA
tggaagtttcaaacggaaata

SEQ ID NO: 6331 - DNA, 21 bp, synthetic construct
  source 1..21: mol_type = other DNA
actgttaagattcagtggcca

SEQ ID NO: 6332 - DNA, 21 bp, synthetic construct
  source 1..21: mol_type = other DNA
acctttgtcaaatcattaaca

SEQ ID NO: 6333 - DNA, 21 bp, synthetic construct
  source 1..21: mol_type = other DNA
aagaaatcgctcgactggcca

SEQ ID NO: 6334 - DNA, 21 bp, synthetic construct
  source 1..21: mol_type = other DNA
aagcaaggtagcgaatggcct

SEQ ID NO: 6335 - DNA, 21 bp, synthetic construct
  source 1..21: mol_type = other DNA
ggtcggataacactattccca

SEQ ID NO: 6336 - DNA, 21 bp, synthetic construct
  source 1..21: mol_type = other DNA
aatctgatggggacttggccg

SEQ ID NO: 6337 - DNA, 21 bp, synthetic construct
  source 1..21: mol_type = other DNA
tacgctgaggaagactggcca

SEQ ID NO: 6338 - DNA, 21 bp, synthetic construct
  source 1..21: mol_type = other DNA
aaggtccaacagcaatggcct

SEQ ID NO: 6339 - DNA, 21 bp, synthetic construct
  source 1..21: mol_type = other DNA
attctgttcaagagagaatca

SEQ ID NO: 6340 - DNA, 21 bp, synthetic construct
  source 1..21: mol_type = other DNA
cgcaatgccttcgacacacta

SEQ ID NO: 6341 - DNA, 21 bp, synthetic construct
  source 1..21: mol_type = other DNA
tggaaagatacacgatttgag

SEQ ID NO: 6342 - DNA, 21 bp, synthetic construct
  source 1..21: mol_type = other DNA
aaagagttttatgtgggaagt

SEQ ID NO: 6343 - DNA, 21 bp, synthetic construct
  source 1..21: mol_type = other DNA
aagcctctatacgatggttcc

SEQ ID NO: 6344 - DNA, 21 bp, synthetic construct
  source 1..21: mol_type = other DNA
ggtttcggtgaaaaatggcca

SEQ ID NO: 6345 - DNA, 21 bp, synthetic construct
  source 1..21: mol_type = other DNA
acaggtgtagagttatggccc

SEQ ID NO: 6346 - DNA, 21 bp, synthetic construct
  source 1..21: mol_type = other DNA
actagccgttttgatacttat

SEQ ID NO: 6347 - DNA, 21 bp, synthetic construct
  source 1..21: mol_type = other DNA
cagctaacaaggttagagtct

SEQ ID NO: 6348 - DNA, 21 bp, synthetic construct
  source 1..21: mol_type = other DNA
cgtcttatagaaaactggcct

SEQ ID NO: 6349 - DNA, 21 bp, synthetic construct
  source 1..21: mol_type = other DNA
acgcaggtggagcattggccg

SEQ ID NO: 6350 - DNA, 21 bp, synthetic construct
  source 1..21: mol_type = other DNA
tggaaggacactcgcttcgaa

SEQ ID NO: 6351 - DNA, 21 bp, synthetic construct
  source 1..21: mol_type = other DNA
atgaacgataggatctggcct

SEQ ID NO: 6352 - DNA, 21 bp, synthetic construct
  source 1..21: mol_type = other DNA
gttgtcagtgaaatatggccg

SEQ ID NO: 6353 - DNA, 21 bp, synthetic construct
  source 1..21: mol_type = other DNA
gtcaaagacggtacctggcct

SEQ ID NO: 6354 - DNA, 21 bp, synthetic construct
  source 1..21: mol_type = other DNA
atcattgatgcagaatggcca

SEQ ID NO: 6355 - DNA, 21 bp, synthetic construct
  source 1..21: mol_type = other DNA
gtgtacacaaagcatgagttt

SEQ ID NO: 6356 - DNA, 21 bp, synthetic construct
  source 1..21: mol_type = other DNA
ggcggtatgtttatgtccccg

SEQ ID NO: 6357 - DNA, 21 bp, synthetic construct
  source 1..21: mol_type = other DNA
atgctctttaagtatgaagcg

SEQ ID NO: 6358 - DNA, 21 bp, synthetic construct
  source 1..21: mol_type = other DNA
gtggacaacaacgaatggccc

SEQ ID NO: 6359 - DNA, 21 bp, synthetic construct
  source 1..21: mol_type = other DNA
atttatgtcaagtttgagagc

SEQ ID NO: 6360 - DNA, 21 bp, synthetic construct
  source 1..21: mol_type = other DNA
gtgtattctaagagccaagaa

SEQ ID NO: 6361 - DNA, 21 bp, synthetic construct
  source 1..21: mol_type = other DNA
ttatatgaggacgtttggccc

SEQ ID NO: 6362 - DNA, 21 bp, synthetic construct
  source 1..21: mol_type = other DNA
gtttacagcaaatcgcaggag

SEQ ID NO: 6363 - DNA, 21 bp, synthetic construct
  source 1..21: mol_type = other DNA
aaggttaacgacacgtggcca

SEQ ID NO: 6364 - DNA, 21 bp, synthetic construct
  source 1..21: mol_type = other DNA
tggccttccgagcttgggtgg

SEQ ID NO: 6365 - DNA, 21 bp, synthetic construct
  source 1..21: mol_type = other DNA
gcctacgttaagagtgaaagt

SEQ ID NO: 6366 - DNA, 21 bp, synthetic construct
  source 1..21: mol_type = other DNA
ggttttattaccgtatatccg

SEQ ID NO: 6367 - DNA, 21 bp, synthetic construct
  source 1..21: mol_type = other DNA
caaccaagagccttattcccc

SEQ ID NO: 6368 - DNA, 21 bp, synthetic construct
  source 1..21: mol_type = other DNA
gtttacgtcaaaagtgaaagt

SEQ ID NO: 6369 - DNA, 21 bp, synthetic construct
  source 1..21: mol_type = other DNA
catgggccgagtctttggccc

SEQ ID NO: 6370 - DNA, 21 bp, synthetic construct
  source 1..21: mol_type = other DNA
gtttacgttcgcacagagatg

SEQ ID NO: 6371 - DNA, 21 bp, synthetic construct
  source 1..21: mol_type = other DNA
catcggggggagctaaattgg

SEQ ID NO: 6372 - DNA, 21 bp, synthetic construct
  source 1..21: mol_type = other DNA
ggttggatgaatcgaatcgcg

SEQ ID NO: 6373 - DNA, 21 bp, synthetic construct
  source 1..21: mol_type = other DNA
gtgtattctaagctgaatact

SEQ ID NO: 6374 - DNA, 21 bp, synthetic construct
  source 1..21: mol_type = other DNA
atgaccggaccagtttggccg

SEQ ID NO: 6375 - DNA, 21 bp, synthetic construct
  source 1..21: mol_type = other DNA
cgatacactaaattagaagaa

SEQ ID NO: 6376 - DNA, 21 bp, synthetic construct
  source 1..21: mol_type = other DNA
aaggttgaacaggaatggccc

SEQ ID NO: 6377 - DNA, 21 bp, synthetic construct
  source 1..21: mol_type = other DNA
gggtgggtaaaccgcattgat

SEQ ID NO: 6378 - DNA, 21 bp, synthetic construct
  source 1..21: mol_type = other DNA
cagccgagggctctctttccg

SEQ ID NO: 6379 - DNA, 21 bp, synthetic construct
  source 1..21: mol_type = other DNA
ctcatgcaagatgtctggcct

SEQ ID NO: 6380 - DNA, 21 bp, synthetic construct
  source 1..21: mol_type = other DNA
atcctcgaccgtaattggccc

SEQ ID NO: 6381 - DNA, 21 bp, synthetic construct
  source 1..21: mol_type = other DNA
cctatgcgcggacatctattt

SEQ ID NO: 6382 - DNA, 21 bp, synthetic construct
  source 1..21: mol_type = other DNA
gtggtgtccgagatttggcca

SEQ ID NO: 6383 - DNA, 21 bp, synthetic construct
  source 1..21: mol_type = other DNA
gttgaagagatgagttggcct

SEQ ID NO: 6384 - DNA, 21 bp, synthetic construct
  source 1..21: mol_type = other DNA
gtctataccaaacacgaattc

SEQ ID NO: 6385 - DNA, 21 bp, synthetic construct
  source 1..21: mol_type = other DNA
ataatcgacgctgagtggccc

SEQ ID NO: 6386 - DNA, 21 bp, synthetic construct
  source 1..21: mol_type = other DNA
gcatttacacgactagaggtg

SEQ ID NO: 6387 - DNA, 21 bp, synthetic construct
  source 1..21: mol_type = other DNA
atttggatcaagtcacaaact

SEQ ID NO: 6388 - DNA, 21 bp, synthetic construct
  source 1..21: mol_type = other DNA
aaagtggagtacgattggccg

SEQ ID NO: 6389 - DNA, 21 bp, synthetic construct
  source 1..21: mol_type = other DNA
gcttatgtcaaatccgagtcg

SEQ ID NO: 6390 - DNA, 21 bp, synthetic construct
  source 1..21: mol_type = other DNA
gcctattccagactagaaagc

SEQ ID NO: 6391 - DNA, 21 bp, synthetic construct
  source 1..21: mol_type = other DNA
tatgatatgccggattggccc

SEQ ID NO: 6392 - DNA, 21 bp, synthetic construct
  source 1..21: mol_type = other DNA
gtctatgtaaagtcggagtcc

SEQ ID NO: 6393 - DNA, 21 bp, synthetic construct
  source 1..21: mol_type = other DNA
cggaacgcttttgatactctc

SEQ ID NO: 6394 - DNA, 21 bp, synthetic construct
  source 1..21: mol_type = other DNA
agcgaacaggagttcaattgg

SEQ ID NO: 6395 - DNA, 21 bp, synthetic construct
  source 1..21: mol_type = other DNA
cgttacgaggctgactggcct

SEQ ID NO: 6396 - DNA, 21 bp, synthetic construct
  source 1..21: mol_type = other DNA
aaacccctttatgacggatca

SEQ ID NO: 6397 - DNA, 21 bp, synthetic construct
  source 1..21: mol_type = other DNA
caactcacgcggcttgaatcg

SEQ ID NO: 6398 - DNA, 21 bp, synthetic construct
  source 1..21: mol_type = other DNA
caagtagttaagtatctcccg

SEQ ID NO: 6399 - DNA, 21 bp, synthetic construct
  source 1..21: mol_type = other DNA
aacaaacccctttactttagc

SEQ ID NO: 6400 - DNA, 21 bp, synthetic construct
  source 1..21: mol_type = other DNA
agtgggccgatttggctcgcg

SEQ ID NO: 6401 - DNA, 21 bp, synthetic construct
  source 1..21: mol_type = other DNA
tattttgacgatgagttccca

SEQ ID NO: 6402 - DNA, 21 bp, synthetic construct
  source 1..21: mol_type = other DNA
gtagataataatgagtggccg

SEQ ID NO: 6403 - DNA, 21 bp, synthetic construct
  source 1..21: mol_type = other DNA
aggaatcaatgggacacagca

SEQ ID NO: 6404 - DNA, 21 bp, synthetic construct
  source 1..21: mol_type = other DNA
ttcaaagaaggcatatggccc

SEQ ID NO: 6405 - DNA, 21 bp, synthetic construct
  source 1..21: mol_type = other DNA
aagcgggactctatgtggcct

SEQ ID NO: 6406 - DNA, 21 bp, synthetic construct
  source 1..21: mol_type = other DNA
gtgcatgaagaactctggccg

SEQ ID NO: 6407 - DNA, 21 bp, synthetic construct
  source 1..21: mol_type = other DNA
ttttacgaccccgattggccc

SEQ ID NO: 6408 - DNA, 21 bp, synthetic construct
  source 1..21: mol_type = other DNA
accggggtcgaattgtggcct

SEQ ID NO: 6409 - DNA, 21 bp, synthetic construct
  source 1..21: mol_type = other DNA
aatgaaacaatgtggtcgcct

SEQ ID NO: 6410 - DNA, 21 bp, synthetic construct
  source 1..21: mol_type = other DNA
aggaaggagagtatgtggccg

SEQ ID NO: 6411 - DNA, 21 bp, synthetic construct
  source 1..21: mol_type = other DNA
ctcaaggtgttgcagtgggat

SEQ ID NO: 6412 - DNA, 21 bp, synthetic construct
  source 1..21: mol_type = other DNA
tacttcgatgacgaatttccg

SEQ ID NO: 6413 - DNA, 21 bp, synthetic construct
  source 1..21: mol_type = other DNA
aaggaattctacgtcggcagc

SEQ ID NO: 6414 - DNA, 21 bp, synthetic construct
  source 1..21: mol_type = other DNA
tggcaaggagaacacccgtgg

SEQ ID NO: 6415 - DNA, 21 bp, synthetic construct
  source 1..21: mol_type = other DNA
cgagacagcattgagtggcct

SEQ ID NO: 6416 - DNA, 21 bp, synthetic construct
  source 1..21: mol_type = other DNA
cgcgagagaaatgaatggccg

SEQ ID NO: 6417 - DNA, 21 bp, synthetic construct
  source 1..21: mol_type = other DNA
gtgcacgtcaagttcgagtac

SEQ ID NO: 6418 - DNA, 21 bp, synthetic construct
  source 1..21: mol_type = other DNA
ttctatgatccagactggcct

SEQ ID NO: 6419 - DNA, 21 bp, synthetic construct
  source 1..21: mol_type = other DNA
aagcttgagttggagtggccg

SEQ ID NO: 6420 - DNA, 21 bp, synthetic construct
  source 1..21: mol_type = other DNA
cgggattcgatagaatggcca

SEQ ID NO: 6421 - DNA, 21 bp, synthetic construct
  source 1..21: mol_type = other DNA
aacgagaccatgtggagcccc

SEQ ID NO: 6422 - DNA, 21 bp, synthetic construct
  source 1..21: mol_type = other DNA
gtccaagcggaatcctggccg

SEQ ID NO: 6423 - DNA, 21 bp, synthetic construct
  source 1..21: mol_type = other DNA
aatcaccctttagcatgggaa

SEQ ID NO: 6424 - DNA, 21 bp, synthetic construct
  source 1..21: mol_type = other DNA
ggatggatgaaccgtattgcc

SEQ ID NO: 6425 - DNA, 21 bp, synthetic construct
  source 1..21: mol_type = other DNA
aaagtagagcaagagtggcct

SEQ ID NO: 6426 - DNA, 21 bp, synthetic construct
  source 1..21: mol_type = other DNA
atatattcggcgctccagact

SEQ ID NO: 6427 - DNA, 21 bp, synthetic construct
  source 1..21: mol_type = other DNA
aaactagaacttgaatggcct

SEQ ID NO: 6428 - DNA, 21 bp, synthetic construct
  source 1..21: mol_type = other DNA
gtcgaggaaatgtcttggccg

SEQ ID NO: 6429 - DNA, 21 bp, synthetic construct
  source 1..21: mol_type = other DNA
gtcatgagcgaagtgtggccc

SEQ ID NO: 6430 - DNA, 21 bp, synthetic construct
  source 1..21: mol_type = other DNA
aaaattctcacagtttggcct

SEQ ID NO: 6431 - DNA, 21 bp, synthetic construct
  source 1..21: mol_type = other DNA
cttttcaacggtaattggccg

SEQ ID NO: 6432 - DNA, 21 bp, synthetic construct
  source 1..21: mol_type = other DNA
tccatgattctcgattggaaa

SEQ ID NO: 6433 - DNA, 21 bp, synthetic construct
  source 1..21: mol_type = other DNA
tacatgtcccccgactggccg

SEQ ID NO: 6434 - DNA, 21 bp, synthetic construct
  source 1..21: mol_type = other DNA
acgtatgtgcggtttgaacaa

SEQ ID NO: 6435 - DNA, 21 bp, synthetic construct
  source 1..21: mol_type = other DNA
aaggtgggcgcattgtggcca

SEQ ID NO: 6436 - DNA, 21 bp, synthetic construct
  source 1..21: mol_type = other DNA
gtattatcaggaatgtggccg

SEQ ID NO: 6437 - DNA, 21 bp, synthetic construct
  source 1..21: mol_type = other DNA
cggatgaattttgactggccg

SEQ ID NO: 6438 - DNA, 21 bp, synthetic construct
  source 1..21: mol_type = other DNA
atgctcgccgaaaattggccc

SEQ ID NO: 6439 - DNA, 21 bp, synthetic construct
  source 1..21: mol_type = other DNA
ttgatcctagagaactggcct

SEQ ID NO: 6440 - DNA, 21 bp, synthetic construct
  source 1..21: mol_type = other DNA
tacaaagtgttagactggaca

SEQ ID NO: 6441 - DNA, 21 bp, synthetic construct
  source 1..21: mol_type = other DNA
atgactggtccggtgtggcca

SEQ ID NO: 6442 - DNA, 21 bp, synthetic construct
  source 1..21: mol_type = other DNA
gaccccaagggatacttcttc

SEQ ID NO: 6443 - DNA, 21 bp, synthetic construct
  source 1..21: mol_type = other DNA
ctaatgcaggacgtatggcca

SEQ ID NO: 6444 - DNA, 21 bp, synthetic construct
  source 1..21: mol_type = other DNA
tataaggtccttgattggact

SEQ ID NO: 6445 - DNA, 21 bp, synthetic construct
  source 1..21: mol_type = other DNA
cgaatgaacttcgattggccc

SEQ ID NO: 6446 - DNA, 21 bp, synthetic construct
  source 1..21: mol_type = other DNA
caccgtcatgttcttttcccc

SEQ ID NO: 6447 - DNA, 21 bp, synthetic construct
  source 1..21: mol_type = other DNA
gtcactggtgcagtatggcct

SEQ ID NO: 6448 - DNA, 21 bp, synthetic construct
  source 1..21: mol_type = other DNA
acttactcgaggctcgttctc

SEQ ID NO: 6449 - DNA, 21 bp, synthetic construct
  source 1..21: mol_type = other DNA
catcggcacgtgctatttcct

SEQ ID NO: 6450 - DNA, 21 bp, synthetic construct
  source 1..21: mol_type = other DNA
acatacgtccgattcgagcag

SEQ ID NO: 6451 - DNA, 21 bp, synthetic construct
  source 1..21: mol_type = other DNA
tacaagatgatggaatggccc

SEQ ID NO: 6452 - DNA, 21 bp, synthetic construct
  source 1..21: mol_type = other DNA
tataaaatgatggagtggcct

SEQ ID NO: 6453 - DNA, 21 bp, synthetic construct
  source 1..21: mol_type = other DNA
gacccggtaaatgtttggggg

SEQ ID NO: 6454 - DNA, 21 bp, synthetic construct
  source 1..21: mol_type = other DNA
gtttaccacaagttccaaatt

SEQ ID NO: 6455 - DNA, 21 bp, synthetic construct
  source 1..21: mol_type = other DNA
tctgaaacctgggtgttccca

SEQ ID NO: 6456 - DNA, 21 bp, synthetic construct
  source 1..21: mol_type = other DNA
ggtacgttccagcttttcccc

SEQ ID NO: 6457 - DNA, 21 bp, synthetic construct
  source 1..21: mol_type = other DNA
gatatgccaaattggtcctgg

SEQ ID NO: 6458 - DNA, 21 bp, synthetic construct
  source 1..21: mol_type = other DNA
aggcaaaactcagtatggccc

SEQ ID NO: 6459 - DNA, 21 bp, synthetic construct
  source 1..21: mol_type = other DNA
gtggtgaaggactattggccg

SEQ ID NO: 6460 - DNA, 21 bp, synthetic construct
  source 1..21: mol_type = other DNA
aacaatatcttcgctacttac

SEQ ID NO: 6461 - DNA, 21 bp, synthetic construct
  source 1..21: mol_type = other DNA
tgggggctgtggcgactagat

SEQ ID NO: 6462 - DNA, 21 bp, synthetic construct
  source 1..21: mol_type = other DNA
ggcaaaaacgttctttggcca

SEQ ID NO: 6463 - DNA, 21 bp, synthetic construct
  source 1..21: mol_type = other DNA
tataatcaccccctgaactgg

SEQ ID NO: 6464 - DNA, 21 bp, synthetic construct
  source 1..21: mol_type = other DNA
ttttccggtgacacctggcca

SEQ ID NO: 6465 - DNA, 21 bp, synthetic construct
  source 1..21: mol_type = other DNA
agaggcaccttcgatgtctat

SEQ ID NO: 6466 - DNA, 21 bp, synthetic construct
  source 1..21: mol_type = other DNA
tatcttggagagctctggccc

SEQ ID NO: 6467 - DNA, 21 bp, synthetic construct
  source 1..21: mol_type = other DNA
cgtaaccagtgggatacggcg

SEQ ID NO: 6468 - DNA, 21 bp, synthetic construct
  source 1..21: mol_type = other DNA
cgcgtgtccgtcttgtggccg

SEQ ID NO: 6469 - DNA, 21 bp, synthetic construct
  source 1..21: mol_type = other DNA
ggctctccgatcaattgggct

SEQ ID NO: 6470 - DNA, 21 bp, synthetic construct
  source 1..21: mol_type = other DNA
gctaacgttctaaattgggca

SEQ ID NO: 6471 - DNA, 21 bp, synthetic construct
  source 1..21: mol_type = other DNA
gccaatgtattgaactgggcg

SEQ ID NO: 6472 - DNA, 21 bp, synthetic construct
  source 1..21: mol_type = other DNA
agacagggcacctatttccct

SEQ ID NO: 6473 - DNA, 21 bp, synthetic construct
  source 1..21: mol_type = other DNA
tggccgagtgaactaggatgg

SEQ ID NO: 6474 - DNA, 21 bp, synthetic construct
  source 1..21: mol_type = other DNA
aggatctctatttccccttgg

SEQ ID NO: 6475 - DNA, 21 bp, synthetic construct
  source 1..21: mol_type = other DNA
cataacgggttttggacaggg

SEQ ID NO: 6476 - DNA, 21 bp, synthetic construct
  source 1..21: mol_type = other DNA
cgacttttcaggctggaagct

SEQ ID NO: 6477 - DNA, 21 bp, synthetic construct
  source 1..21: mol_type = other DNA
tggcaaccggatcctttccct

SEQ ID NO: 6478 - DNA, 21 bp, synthetic construct
  source 1..21: mol_type = other DNA
atgcgggtgattgattggagc

SEQ ID NO: 6479 - DNA, 21 bp, synthetic construct
  source 1..21: mol_type = other DNA
cacaatggtttctggaccggt

SEQ ID NO: 6480 - DNA, 21 bp, synthetic construct
  source 1..21: mol_type = other DNA
ggatcaacagacccgtggccc

SEQ ID NO: 6481 - DNA, 21 bp, synthetic construct
  source 1..21: mol_type = other DNA
gttagtttgttcagcaaccat

SEQ ID NO: 6482 - DNA, 21 bp, synthetic construct
  source 1..21: mol_type = other DNA
aagtactttacgtttgaacca

SEQ ID NO: 6483 - DNA, 21 bp, synthetic construct
  source 1..21: mol_type = other DNA
acaaatgattttgatgtgtac

SEQ ID NO: 6484 - DNA, 21 bp, synthetic construct
  source 1..21: mol_type = other DNA
ctttctagagtaggtttcaat

SEQ ID NO: 6485 - DNA, 21 bp, synthetic construct
  source 1..21: mol_type = other DNA
ctgcataaagctggatataat

SEQ ID NO: 6486 - DNA, 21 bp, synthetic construct
  source 1..21: mol_type = other DNA
ctatcccgtttgaaccataac

SEQ ID NO: 6487 - DNA, 21 bp, synthetic construct
  source 1..21: mol_type = other DNA
aaagagaaacccgataaaaga

SEQ ID NO: 6488 - DNA, 21 bp, synthetic construct
  source 1..21: mol_type = other DNA
gggctgtgtccgtctaccaaa

SEQ ID NO: 6489 - DNA, 21 bp, synthetic construct
  source 1..21: mol_type = other DNA
ctgcacagactgttaaaggat

SEQ ID NO: 6490 - DNA, 21 bp, synthetic construct
  source 1..21: mol_type = other DNA
ttaagtcgcttaaatcacaat

SEQ ID NO: 6491 - DNA, 21 bp, synthetic construct
  source 1..21: mol_type = other DNA
agttgtgcggtatctcatcgt

SEQ ID NO: 6492 - DNA, 21 bp, synthetic construct
  source 1..21: mol_type = other DNA
ctgtcacgcgtgggctttaac

SEQ ID NO: 6493 - DNA, 21 bp, synthetic construct
  source 1..21: mol_type = other DNA
tatgtgaaatatgaagataaa

SEQ ID NO: 6494 - DNA, 21 bp, synthetic construct
  source 1..21: mol_type = other DNA
tactcccggatgaatgataat

SEQ ID NO: 6495 - DNA, 21 bp, synthetic construct
  source 1..21: mol_type = other DNA
tactcacgccttaataaggat

SEQ ID NO: 6496 - DNA, 21 bp, synthetic construct
  source 1..21: mol_type = other DNA
tcttgtcccaaaaatgacctc

SEQ ID NO: 6497 - DNA, 21 bp, synthetic construct
  source 1..21: mol_type = other DNA
tatagcagactaaacaaagac

SEQ ID NO: 6498 - DNA, 21 bp, synthetic construct
  source 1..21: mol_type = other DNA
cgcaatgaatacaccacttat

SEQ ID NO: 6499 - DNA, 21 bp, synthetic construct
  source 1..21: mol_type = other DNA
ttttatagatcagacaactgt

SEQ ID NO: 6500 - DNA, 21 bp, synthetic construct
  source 1..21: mol_type = other DNA
cttcacaaggcagggtacaac

SEQ ID NO: 6501 - DNA, 21 bp, synthetic construct
  source 1..21: mol_type = other DNA
tacgtaaagtacgaggacaag

SEQ ID NO: 6502 - DNA, 21 bp, synthetic construct
  source 1..21: mol_type = other DNA
ttgcataggctcttgaaagac

SEQ ID NO: 6503 - DNA, 21 bp, synthetic construct
  source 1..21: mol_type = other DNA
tgcaattatgattccttccct

SEQ ID NO: 6504 - DNA, 21 bp, synthetic construct
  source 1..21: mol_type = other DNA
taccatcgtttgtccaataac

SEQ ID NO: 6505 - DNA, 21 bp, synthetic construct
  source 1..21: mol_type = other DNA
tatcaccggctttctaacaat

SEQ ID NO: 6506 - DNA, 21 bp, synthetic construct
  source 1..21: mol_type = other DNA
tatgtaaagaacgacgcgaga

SEQ ID NO: 6507 - DNA, 21 bp, synthetic construct
  source 1..21: mol_type = other DNA
tacgttaaaaatgatgcacgc

SEQ ID NO: 6508 - DNA, 21 bp, synthetic construct
  source 1..21: mol_type = other DNA
cgcaatgagaaccgaaaaggt

SEQ ID NO: 6509 - DNA, 21 bp, synthetic construct
  source 1..21: mol_type = other DNA
cttcatgcattaagtcataac

SEQ ID NO: 6510 - DNA, 21 bp, synthetic construct
  source 1..21: mol_type = other DNA
tacgctcggggagggcccaat

SEQ ID NO: 6511 - DNA, 21 bp, synthetic construct
  source 1..21: mol_type = other DNA
cgaaacgagtatacgacgtac

SEQ ID NO: 6512 - DNA, 21 bp, synthetic construct
  source 1..21: mol_type = other DNA
tattctcgcttaaacatgaat

SEQ ID NO: 6513 - DNA, 21 bp, synthetic construct
  source 1..21: mol_type = other DNA
tactcacggttgaatatgaac

SEQ ID NO: 6514 - DNA, 21 bp, synthetic construct
  source 1..21: mol_type = other DNA
tactcaaggatgaacgaaaat

SEQ ID NO: 6515 - DNA, 21 bp, synthetic construct
  source 1..21: mol_type = other DNA
catagtcgggtcggccataac

SEQ ID NO: 6516 - DNA, 21 bp, synthetic construct
  source 1..21: mol_type = other DNA
aggcaagcaaagcaaaagaac

SEQ ID NO: 6517 - DNA, 21 bp, synthetic construct
  source 1..21: mol_type = other DNA
tacgcgcgatctggcctgaat

SEQ ID NO: 6518 - DNA, 21 bp, synthetic construct
  source 1..21: mol_type = other DNA
ctccataggttagcagccaat

SEQ ID NO: 6519 - DNA, 21 bp, synthetic construct
  source 1..21: mol_type = other DNA
tatgcgcgtggtggacctaac

SEQ ID NO: 6520 - DNA, 21 bp, synthetic construct
  source 1..21: mol_type = other DNA
cgaacaccaactgtgtatcct

SEQ ID NO: 6521 - DNA, 21 bp, synthetic construct
  source 1..21: mol_type = other DNA
tattcgaggatgaacgacaac

SEQ ID NO: 6522 - DNA, 21 bp, synthetic construct
  source 1..21: mol_type = other DNA
aagatgagttctagcacgtgg

SEQ ID NO: 6523 - DNA, 21 bp, synthetic construct
  source 1..21: mol_type = other DNA
tccacaaattgttacaagagt

SEQ ID NO: 6524 - DNA, 21 bp, synthetic construct
  source 1..21: mol_type = other DNA
ttagattgtgagaggtaccaa

SEQ ID NO: 6525 - DNA, 21 bp, synthetic construct
  source 1..21: mol_type = other DNA
gtctcctcgagcaatggccgt

SEQ ID NO: 6526 - DNA, 21 bp, synthetic construct
  source 1..21: mol_type = other DNA
tacgctcggtccgggtataat

SEQ ID NO: 6527 - DNA, 21 bp, synthetic construct
  source 1..21: mol_type = other DNA
cactcgcgcgtgggtcacaat

SEQ ID NO: 6528 - DNA, 21 bp, synthetic construct
  source 1..21: mol_type = other DNA
ttacacgctttgtcacacaat

SEQ ID NO: 6529 - DNA, 21 bp, synthetic construct
  source 1..21: mol_type = other DNA
tgtgactatattagttacgcg

SEQ ID NO: 6530 - DNA, 21 bp, synthetic construct
  source 1..21: mol_type = other DNA
cgtactcctaccgtctacccc

SEQ ID NO: 6531 - DNA, 21 bp, synthetic construct
  source 1..21: mol_type = other DNA
tatagccgtatgaatgagaac

SEQ ID NO: 6532 - DNA, 21 bp, synthetic construct
  source 1..21: mol_type = other DNA
tatgctagaagcggtttaaac

SEQ ID NO: 6533 - DNA, 21 bp, synthetic construct
  source 1..21: mol_type = other DNA
ctgtctcgtatctccgtgaat

SEQ ID NO: 6534 - DNA, 21 bp, synthetic construct
  source 1..21: mol_type = other DNA
aatgaggattgggtaaaatgg

SEQ ID NO: 6535 - DNA, 21 bp, synthetic construct
  source 1..21: mol_type = other DNA
cactgcggaaaatgcctaaat

SEQ ID NO: 6536 - DNA, 21 bp, synthetic construct
  source 1..21: mol_type = other DNA
aaaatgtcgagttcaacatgg

SEQ ID NO: 6537 - DNA, 21 bp, synthetic construct
  source 1..21: mol_type = other DNA
gtcgagagttccaacgggcgc

SEQ ID NO: 6538 - DNA, 21 bp, synthetic construct
  source 1..21: mol_type = other DNA
aacgaagactgggtgaagtgg

SEQ ID NO: 6539 - DNA, 21 bp, synthetic construct
  source 1..21: mol_type = other DNA
gtgtcgagcagtaacggtaga

SEQ ID NO: 6540 - DNA, 21 bp, synthetic construct
  source 1..21: mol_type = other DNA
gttgaatcatcgaatggtagg

SEQ ID NO: 6541 - DNA, 21 bp, synthetic construct
  source 1..21: mol_type = other DNA
tactcccgagctggatataac

SEQ ID NO: 6542 - DNA, 21 bp, synthetic construct
  source 1..21: mol_type = other DNA
tatagtcgggccggctacaat

SEQ ID NO: 6543 - DNA, 21 bp, synthetic construct
  source 1..21: mol_type = other DNA
agatccgaacatgtctttcca

SEQ ID NO: 6544 - DNA, 21 bp, synthetic construct
  source 1..21: mol_type = other DNA
cgagttaataccagggccaac

SEQ ID NO: 6545 - DNA, 21 bp, synthetic construct
  source 1..21: mol_type = other DNA
tgcgctttcacaggcaccaga

SEQ ID NO: 6546 - DNA, 21 bp, synthetic construct
  source 1..21: mol_type = other DNA
cattactgccctaacaaatta

SEQ ID NO: 6547 - DNA, 21 bp, synthetic construct
  source 1..21: mol_type = other DNA
ccccgcatgtgtgccaataat

SEQ ID NO: 6548 - DNA, 21 bp, synthetic construct
  source 1..21: mol_type = other DNA
aggaataaagatcgcaactca

SEQ ID NO: 6549 - DNA, 21 bp, synthetic construct
  source 1..21: mol_type = other DNA
cataggcaggacagtcgtcga

SEQ ID NO: 6550 - DNA, 21 bp, synthetic construct
  source 1..21: mol_type = other DNA
ttgtcaagagtaggtatagac

SEQ ID NO: 6551 - DNA, 21 bp, synthetic construct
  source 1..21: mol_type = other DNA
aaaatggatagtaggctgtgg

SEQ ID NO: 6552 - DNA, 21 bp, synthetic construct
  source 1..21: mol_type = other DNA
agaaacatgtccgtgtatccc

SEQ ID NO: 6553 - DNA, 21 bp, synthetic construct
  source 1..21: mol_type = other DNA
cgcaatatgtctgtttaccca

SEQ ID NO: 6554 - DNA, 21 bp, synthetic construct
  source 1..21: mol_type = other DNA
agcgcggagtgggtttcatac

SEQ ID NO: 6555 - DNA, 21 bp, synthetic construct
  source 1..21: mol_type = other DNA
taccataggactgggaataat

SEQ ID NO: 6556 - DNA, 21 bp, synthetic construct
  source 1..21: mol_type = other DNA
tactctaaggtcgggcagaat

SEQ ID NO: 6557 - DNA, 21 bp, synthetic construct
  source 1..21: mol_type = other DNA
tcaatggaatctcgactgtgg

SEQ ID NO: 6558 - DNA, 21 bp, synthetic construct
  source 1..21: mol_type = other DNA
ttgtcacggatttctgtaaac

SEQ ID NO: 6559 - DNA, 21 bp, synthetic construct
  source 1..21: mol_type = other DNA
tcggcagaatgggtctcttat

SEQ ID NO: 6560 - DNA, 21 bp, synthetic construct
  source 1..21: mol_type = other DNA
aggtcggagcacgtattcccc

SEQ ID NO: 6561 - DNA, 21 bp, synthetic construct
  source 1..21: mol_type = other DNA
tatagtgctcgtgggcccaat

SEQ ID NO: 6562 - DNA, 21 bp, synthetic construct
  source 1..21: mol_type = other DNA
tatgcgcgcagcggatacaac

SEQ ID NO: 6563 - DNA, 21 bp, synthetic construct
  source 1..21: mol_type = other DNA
ctccgcagtgaatgttgtgta

SEQ ID NO: 6564 - DNA, 21 bp, synthetic construct
  source 1..21: mol_type = other DNA
tactctcgaatgaataccaat

SEQ ID NO: 6565 - DNA, 21 bp, synthetic construct
  source 1..21: mol_type = other DNA
gacctttcgagtcataactgg

SEQ ID NO: 6566 - DNA, 21 bp, synthetic construct
  source 1..21: mol_type = other DNA
cagcttgaagcgcggacgtgg

SEQ ID NO: 6567 - DNA, 21 bp, synthetic construct
  source 1..21: mol_type = other DNA
ctgacccgaattagtcataat

SEQ ID NO: 6568 - DNA, 21 bp, synthetic construct
  source 1..21: mol_type = other DNA
ctaagtagggtgggcatcgat

SEQ ID NO: 6569 - DNA, 21 bp, synthetic construct
  source 1..21: mol_type = other DNA
tactcttcgacccacggtgta

SEQ ID NO: 6570 - DNA, 21 bp, synthetic construct
  source 1..21: mol_type = other DNA
gagatgcagtctagagcctgg

SEQ ID NO: 6571 - DNA, 21 bp, synthetic construct
  source 1..21: mol_type = other DNA
cgactctatgacgcttatcag

SEQ ID NO: 6572 - DNA, 21 bp, synthetic construct
  source 1..21: mol_type = other DNA
ctgagcaaattatccgccaat

SEQ ID NO: 6573 - DNA, 21 bp, synthetic construct
  source 1..21: mol_type = other DNA
accatgagtgaccgcacctgg

SEQ ID NO: 6574 - DNA, 21 bp, synthetic construct
  source 1..21: mol_type = other DNA
cgagaagacgggctacgttgg

SEQ ID NO: 6575 - DNA, 21 bp, synthetic construct
  source 1..21: mol_type = other DNA
catagtcgtttaaatctccaa

SEQ ID NO: 6576 - DNA, 21 bp, synthetic construct
  source 1..21: mol_type = other DNA
ctctgtaggtcatgtgccaaa

SEQ ID NO: 6577 - DNA, 21 bp, synthetic construct
  source 1..21: mol_type = other DNA
agaggtaacggggggcataag

SEQ ID NO: 6578 - DNA, 21 bp, synthetic construct
  source 1..21: mol_type = other DNA
tacacatttctcggccgcaat

SEQ ID NO: 6579 - DNA, 21 bp, synthetic construct
  source 1..21: mol_type = other DNA
ctttgtcgatactcgggcggc

SEQ ID NO: 6580 - DNA, 21 bp, synthetic construct
  source 1..21: mol_type = other DNA
tcttctaattgcctccactac

SEQ ID NO: 6581 - DNA, 21 bp, synthetic construct
  source 1..21: mol_type = other DNA
ttgaggtctgagtgctgcgtc

SEQ ID NO: 6582 - DNA, 21 bp, synthetic construct
  source 1..21: mol_type = other DNA
cggacatttgattcgttcgag

SEQ ID NO: 6583 - DNA, 21 bp, synthetic construct
  source 1..21: mol_type = other DNA
gaaatgcaaagccgagcttgg

SEQ ID NO: 6584 - DNA, 21 bp, synthetic construct
  source 1..21: mol_type = other DNA
catagtcgcatgaatgaaaat

SEQ ID NO: 6585 - DNA, 21 bp, synthetic construct
  source 1..21: mol_type = other DNA
tatcataagttagcgaataat

SEQ ID NO: 6586 - DNA, 21 bp, synthetic construct
  source 1..21: mol_type = other DNA
ctccatcgcagtagtaataat

SEQ ID NO: 6587 - DNA, 21 bp, synthetic construct
  source 1..21: mol_type = other DNA
tactcggcgagaggtccgaac

SEQ ID NO: 6588 - DNA, 21 bp, synthetic construct
  source 1..21: mol_type = other DNA
tacgctcgaacttcgcataat

SEQ ID NO: 6589 - DNA, 21 bp, synthetic construct
  source 1..21: mol_type = other DNA
caattggaggctcgcacttgg

SEQ ID NO: 6590 - DNA, 21 bp, synthetic construct
  source 1..21: mol_type = other DNA
agggaggatggactcagatgg

SEQ ID NO: 6591 - DNA, 21 bp, synthetic construct
  source 1..21: mol_type = other DNA
cgtaatgacatggtttttccc

SEQ ID NO: 6592 - DNA, 21 bp, synthetic construct
  source 1..21: mol_type = other DNA
aagatggacagccgattatgg

SEQ ID NO: 6593 - DNA, 21 bp, synthetic construct
  source 1..21: mol_type = other DNA
ctgcaccggctcgctgcgaac

SEQ ID NO: 6594 - DNA, 21 bp, synthetic construct
  source 1..21: mol_type = other DNA
gtccccggtgactgctgtgtt

SEQ ID NO: 6595 - DNA, 21 bp, synthetic construct
  source 1..21: mol_type = other DNA
ctttctaaggtcggagctaat

SEQ ID NO: 6596 - DNA, 21 bp, synthetic construct
  source 1..21: mol_type = other DNA
tatagtcggatgaatgcaaat

SEQ ID NO: 6597 - DNA, 21 bp, synthetic construct
  source 1..21: mol_type = other DNA
actatgtccgatcgaacttgg

SEQ ID NO: 6598 - DNA, 21 bp, synthetic construct
  source 1..21: mol_type = other DNA
tctatggagtcaagactttgg

SEQ ID NO: 6599 - DNA, 21 bp, synthetic construct
  source 1..21: mol_type = other DNA
ctgcatcgtgcgtcatccaat

SEQ ID NO: 6600 - DNA, 21 bp, synthetic construct
  source 1..21: mol_type = other DNA
tattccaaagtaggccaaaac

SEQ ID NO: 6601 - DNA, 21 bp, synthetic construct
  source 1..21: mol_type = other DNA
acagagtcatcatctggtaga

SEQ ID NO: 6602 - DNA, 21 bp, synthetic construct
  source 1..21: mol_type = other DNA
cattgtggtaagtgtcttaac

SEQ ID NO: 6603 - DNA, 21 bp, synthetic construct
  source 1..21: mol_type = other DNA
tatcaccggacaggcaacaac

SEQ ID NO: 6604 - DNA, 21 bp, synthetic construct
  source 1..21: mol_type = other DNA
cactccagacttaacctgcag

SEQ ID NO: 6605 - DNA, 21 bp, synthetic construct
  source 1..21: mol_type = other DNA
atgccaaacgaaggatggttc

SEQ ID NO: 6606 - DNA, 21 bp, synthetic construct
  source 1..21: mol_type = other DNA
aagatgtcatccgctaactgg

SEQ ID NO: 6607 - DNA, 21 bp, synthetic construct
  source 1..21: mol_type = other DNA
ctatctaaactaaacgataac

SEQ ID NO: 6608 - DNA, 21 bp, synthetic construct
  source 1..21: mol_type = other DNA
cggaacgatatggtcttccct

SEQ ID NO: 6609 - DNA, 21 bp, synthetic construct
  source 1..21: mol_type = other DNA
tattcgtccactcatggcgtg

SEQ ID NO: 6610 - DNA, 21 bp, synthetic construct
  source 1..21: mol_type = other DNA
ctatccaaagttggtgcaaac

SEQ ID NO: 6611 - DNA, 21 bp, synthetic construct
  source 1..21: mol_type = other DNA
cgagggatcgacttctacccc

SEQ ID NO: 6612 - DNA, 21 bp, synthetic construct
  source 1..21: mol_type = other DNA
tactccaaaatgaatgataac

SEQ ID NO: 6613 - DNA, 21 bp, synthetic construct
  source 1..21: mol_type = other DNA
aggacgttcgacagttttgaa

SEQ ID NO: 6614 - DNA, 21 bp, synthetic construct
  source 1..21: mol_type = other DNA
aaaatgtcttctgccaattgg

SEQ ID NO: 6615 - DNA, 21 bp, synthetic construct
  source 1..21: mol_type = other DNA
gatttgtcatcgcacaattgg

SEQ ID NO: 6616 - DNA, 21 bp, synthetic construct
  source 1..21: mol_type = other DNA
tactctcgtatgaacgccaac

SEQ ID NO: 6617 - DNA, 21 bp, synthetic construct
  source 1..21: mol_type = other DNA
tacgtcagaagtgacagaaat

SEQ ID NO: 6618 - DNA, 21 bp, synthetic construct
  source 1..21: mol_type = other DNA
cacagccgtatgaacgagaac

SEQ ID NO: 6619 - DNA, 21 bp, synthetic construct
  source 1..21: mol_type = other DNA
gtaacgtccaccaatggcatc

SEQ ID NO: 6620 - DNA, 21 bp, synthetic construct
  source 1..21: mol_type = other DNA
ttaactaggatctcacacaac

SEQ ID NO: 6621 - DNA, 21 bp, synthetic construct
  source 1..21: mol_type = other DNA
ctacaccgagctagcagcaac

SEQ ID NO: 6622 - DNA, 21 bp, synthetic construct
  source 1..21: mol_type = other DNA
acggaatccagctcgggccga

SEQ ID NO: 6623 - DNA, 21 bp, synthetic construct
  source 1..21: mol_type = other DNA
tattcgcggatgaacactaac

SEQ ID NO: 6624 - DNA, 21 bp, synthetic construct
  source 1..21: mol_type = other DNA
cttacgtacgacgcctatgaa

SEQ ID NO: 6625 - DNA, 21 bp, synthetic construct
  source 1..21: mol_type = other DNA
tattcgaagatgaacgacaat

SEQ ID NO: 6626 - DNA, 21 bp, synthetic construct
  source 1..21: mol_type = other DNA
gtacatcgcctgcaagataag

SEQ ID NO: 6627 - DNA, 21 bp, synthetic construct
  source 1..21: mol_type = other DNA
cgggaaacttacgtgtaccca

SEQ ID NO: 6628 - DNA, 21 bp, synthetic construct
  source 1..21: mol_type = other DNA
ttatctaagctaagtgcaaac

SEQ ID NO: 6629 - DNA, 21 bp, synthetic construct
  source 1..21: mol_type = other DNA
ttttctcgtgtaggcgagaat

SEQ ID NO: 6630 - DNA, 21 bp, synthetic construct
  source 1..21: mol_type = other DNA
tacagtcgtatgaattccaat

SEQ ID NO: 6631 - DNA, 21 bp, synthetic construct
  source 1..21: mol_type = other DNA
atgtcccgattatctcaaaat

SEQ ID NO: 6632 - DNA, 21 bp, synthetic construct
  source 1..21: mol_type = other DNA
cagccatatgagctaccatgg

SEQ ID NO: 6633 - DNA, 21 bp, synthetic construct
  source 1..21: mol_type = other DNA
cactattgtccgaataagctc

SEQ ID NO: 6634 - DNA, 21 bp, synthetic construct
  source 1..21: mol_type = other DNA
tacaatagtactcacgggaga

SEQ ID NO: 6635 - DNA, 21 bp, synthetic construct
  source 1..21: mol_type = other DNA
taccacaaacttgccaacaac

SEQ ID NO: 6636 - DNA, 21 bp, synthetic construct
  source 1..21: mol_type = other DNA
gtcactagcacgaacgggata

SEQ ID NO: 6637 - DNA, 21 bp, synthetic construct
  source 1..21: mol_type = other DNA
ttgacatatgatgcatacgag

SEQ ID NO: 6638 - DNA, 21 bp, synthetic construct
  source 1..21: mol_type = other DNA
gtctatgtcagaactgacaga

SEQ ID NO: 6639 - DNA, 21 bp, synthetic construct
  source 1..21: mol_type = other DNA
gacgatggcagatcgaggtat

SEQ ID NO: 6640 - DNA, 21 bp, synthetic construct
  source 1..21: mol_type = other DNA
ttaagcaagctcaatgacaat

SEQ ID NO: 6641 - DNA, 21 bp, synthetic construct
  source 1..21: mol_type = other DNA
atcgttggggaggcgtggcct

SEQ ID NO: 6642 - DNA, 21 bp, synthetic construct
  source 1..21: mol_type = other DNA
tgttcagggtttgagcgtcgt

SEQ ID NO: 6643 - DNA, 21 bp, synthetic construct
  source 1..21: mol_type = other DNA
ttcttttacaataaaccaacg

SEQ ID NO: 6644 - DNA, 21 bp, synthetic construct
  source 1..21: mol_type = other DNA
aaaccctatattttacataaa

SEQ ID NO: 6645 - DNA, 21 bp, synthetic construct
  source 1..21: mol_type = other DNA
aagcgaccccctgaggcccgt

SEQ ID NO: 6646 - DNA, 21 bp, synthetic construct
  source 1..21: mol_type = other DNA
atgttggaatattataacaat

SEQ ID NO: 6647 - DNA, 21 bp, synthetic construct
  source 1..21: mol_type = other DNA
cactcgaggttgaacgtatcg

SEQ ID NO: 6648 - DNA, 21 bp, synthetic construct
  source 1..21: mol_type = other DNA
tactcacgcgttaatgataat

SEQ ID NO: 6649 - DNA, 21 bp, synthetic construct
  source 1..21: mol_type = other DNA
atgcctaatgaggggtggttt

SEQ ID NO: 6650 - DNA, 21 bp, synthetic construct
  source 1..21: mol_type = other DNA
cttaccagattaagccataac

SEQ ID NO: 6651 - DNA, 21 bp, synthetic construct
  source 1..21: mol_type = other DNA
cattcccggctgaatgttagt

SEQ ID NO: 6652 - DNA, 21 bp, synthetic construct
  source 1..21: mol_type = other DNA
agaggcattgatttttatcct

SEQ ID NO: 6653 - DNA, 21 bp, synthetic construct
  source 1..21: mol_type = other DNA
tatagtcgcttgcaagaaaat

SEQ ID NO: 6654 - DNA, 21 bp, synthetic construct
  source 1..21: mol_type = other DNA
aaacgcgaacccgaacgccgt

SEQ ID NO: 6655 - DNA, 21 bp, synthetic construct
  source 1..21: mol_type = other DNA
gatgacgggaggtcccgatac

SEQ ID NO: 6656 - DNA, 21 bp, synthetic construct
  source 1..21: mol_type = other DNA
aggctatacgatgcctaccaa

SEQ ID NO: 6657 - DNA, 21 bp, synthetic construct
  source 1..21: mol_type = other DNA
agagctctggagtgttgttat

SEQ ID NO: 6658 - DNA, 21 bp, synthetic construct
  source 1..21: mol_type = other DNA
ctaagtcgtgtagcgatgaat

SEQ ID NO: 6659 - DNA, 21 bp, synthetic construct
  source 1..21: mol_type = other DNA
tacagccgcatgaacaataac

SEQ ID NO: 6660 - DNA, 21 bp, synthetic construct
  source 1..21: mol_type = other DNA
gtgccaggcgattgttgcgtc

SEQ ID NO: 6661 - DNA, 21 bp, synthetic construct
  source 1..21: mol_type = other DNA
tactcacgattacaggagaac

SEQ ID NO: 6662 - DNA, 21 bp, synthetic construct
  source 1..21: mol_type = other DNA
cgtatgtcagatcacaattgg

SEQ ID NO: 6663 - DNA, 21 bp, synthetic construct
  source 1..21: mol_type = other DNA
tactctcgtatgggtcataat

SEQ ID NO: 6664 - DNA, 21 bp, synthetic construct
  source 1..21: mol_type = other DNA
cgcgttgaccaacccaagaaa

SEQ ID NO: 6665 - DNA, 21 bp, synthetic construct
  source 1..21: mol_type = other DNA
tataactcaacgcatggtcgc

SEQ ID NO: 6666 - DNA, 21 bp, synthetic construct
  source 1..21: mol_type = other DNA
gtgcacaggcttcaggacaaa

SEQ ID NO: 6667 - DNA, 21 bp, synthetic construct
  source 1..21: mol_type = other DNA
ttctcacgcgttggggaaaac

SEQ ID NO: 6668 - DNA, 21 bp, synthetic construct
  source 1..21: mol_type = other DNA
tatgcccggacctcccacaac

SEQ ID NO: 6669 - DNA, 21 bp, synthetic construct
  source 1..21: mol_type = other DNA
aggatgagcgaccataactgg

SEQ ID NO: 6670 - DNA, 21 bp, synthetic construct
  source 1..21: mol_type = other DNA
agagagacgtatgtatatccc

SEQ ID NO: 6671 - DNA, 21 bp, synthetic construct
  source 1..21: mol_type = other DNA
ttgcacaggtcttcaaacaac

SEQ ID NO: 6672 - DNA, 21 bp, synthetic construct
  source 1..21: mol_type = other DNA
ctacacgtgcttggaccgaat

SEQ ID NO: 6673 - DNA, 21 bp, synthetic construct
  source 1..21: mol_type = other DNA
ctgcatgtcctggggccaaac

SEQ ID NO: 6674 - DNA, 21 bp, synthetic construct
  source 1..21: mol_type = other DNA
tattcacgaatgaataacaat

SEQ ID NO: 6675 - DNA, 21 bp, synthetic construct
  source 1..21: mol_type = other DNA
ctgacaaggctttcccacaat

SEQ ID NO: 6676 - DNA, 21 bp, synthetic construct
  source 1..21: mol_type = other DNA
atgcatcggctggcagtaaat

SEQ ID NO: 6677 - DNA, 21 bp, synthetic construct
  source 1..21: mol_type = other DNA
aattatgcttctcactcctgg

SEQ ID NO: 6678 - DNA, 21 bp, synthetic construct
  source 1..21: mol_type = other DNA
catgggagcactaatggaaaa

SEQ ID NO: 6679 - DNA, 21 bp, synthetic construct
  source 1..21: mol_type = other DNA
atgcacagacttgcggttaac

SEQ ID NO: 6680 - DNA, 21 bp, synthetic construct
  source 1..21: mol_type = other DNA
tactcacgccaaaatgaaaac

SEQ ID NO: 6681 - DNA, 21 bp, synthetic construct
  source 1..21: mol_type = other DNA
cgcaatggtactagctcgtgg

SEQ ID NO: 6682 - DNA, 21 bp, synthetic construct
  source 1..21: mol_type = other DNA
ctacacaagtctggaatgaat

SEQ ID NO: 6683 - DNA, 21 bp, synthetic construct
  source 1..21: mol_type = other DNA
cacggatccacgaacgggaag

SEQ ID NO: 6684 - DNA, 21 bp, synthetic construct
  source 1..21: mol_type = other DNA
aagatgccttctcgagattgg

SEQ ID NO: 6685 - DNA, 21 bp, synthetic construct
  source 1..21: mol_type = other DNA
tatagtcggcagaacgagaat

SEQ ID NO: 6686 - DNA, 21 bp, synthetic construct
  source 1..21: mol_type = other DNA
ggtggcgatggtaatcattat

SEQ ID NO: 6687 - DNA, 21 bp, synthetic construct
  source 1..21: mol_type = other DNA
atgtcacggctgtcacagaac

SEQ ID NO: 6688 - DNA, 21 bp, synthetic construct
  source 1..21: mol_type = other DNA
atgtacaacgactgttgcgtt

SEQ ID NO: 6689 - DNA, 21 bp, synthetic construct
  source 1..21: mol_type = other DNA
tactctaaatcgggagcgaat

SEQ ID NO: 6690 - DNA, 21 bp, synthetic construct
  source 1..21: mol_type = other DNA
aaaatgccaagccgggactgg

SEQ ID NO: 6691 - DNA, 21 bp, synthetic construct
  source 1..21: mol_type = other DNA
gattacacgggaaagagtgct

SEQ ID NO: 6692 - DNA, 21 bp, synthetic construct
  source 1..21: mol_type = other DNA
gtttacgtaaggacggatcgc

SEQ ID NO: 6693 - DNA, 21 bp, synthetic construct
  source 1..21: mol_type = other DNA
agggcgcttgaatgctgctac

SEQ ID NO: 6694 - DNA, 21 bp, synthetic construct
  source 1..21: mol_type = other DNA
gtacgcgagtacatgtcttac

SEQ ID NO: 6695 - DNA, 21 bp, synthetic construct
  source 1..21: mol_type = other DNA
tctctattgaaacctgctaaa

SEQ ID NO: 6696 - DNA, 21 bp, synthetic construct
  source 1..21: mol_type = other DNA
ttcgaaggaagaggatggaac

SEQ ID NO: 6697 - DNA, 21 bp, synthetic construct
  source 1..21: mol_type = other DNA
gacatgagtagtagaatatgg

SEQ ID NO: 6698 - DNA, 21 bp, synthetic construct
  source 1..21: mol_type = other DNA
tacgtaaggtcggatgttcgg

SEQ ID NO: 6699 - DNA, 21 bp, synthetic construct
  source 1..21: mol_type = other DNA
ctgagccggtcatcatacaat

SEQ ID NO: 6700 - DNA, 21 bp, synthetic construct
  source 1..21: mol_type = other DNA
gactatactggtaaatccgcg

SEQ ID NO: 6701 - DNA, 21 bp, synthetic construct
  source 1..21: mol_type = other DNA
ctttggcgcacgggtatcaat

SEQ ID NO: 6702 - DNA, 21 bp, synthetic construct
  source 1..21: mol_type = other DNA
tattcgcgtgtaaacgacaac

SEQ ID NO: 6703 - DNA, 21 bp, synthetic construct
  source 1..21: mol_type = other DNA
tatagcaaacttaatgataag

SEQ ID NO: 6704 - DNA, 21 bp, synthetic construct
  source 1..21: mol_type = other DNA
tactcaaagctcaacgacaaa

SEQ ID NO: 6705 - DNA, 21 bp, synthetic construct
  source 1..21: mol_type = other DNA
gatatgtcctcgcgaatctgg

SEQ ID NO: 6706 - DNA, 21 bp, synthetic construct
  source 1..21: mol_type = other DNA
tacgtcaaatcggacagatgt

SEQ ID NO: 6707 - DNA, 21 bp, synthetic construct
  source 1..21: mol_type = other DNA
aagctggagccgcctaagagg

SEQ ID NO: 6708 - DNA, 21 bp, synthetic construct
  source 1..21: mol_type = other DNA
atgtataatgattgctgtgta

SEQ ID NO: 6709 - DNA, 21 bp, synthetic construct
  source 1..21: mol_type = other DNA
cggaacggaacctcgagctgg

SEQ ID NO: 6710 - DNA, 21 bp, synthetic construct
  source 1..21: mol_type = other DNA
agggtcgatcagcctaaaaag

SEQ ID NO: 6711 - DNA, 21 bp, synthetic construct
  source 1..21: mol_type = other DNA
tttgagggccgcgggtggaat

SEQ ID NO: 6712 - DNA, 21 bp, synthetic construct
  source 1..21: mol_type = other DNA
cgcaactacgatacgtaccct

SEQ ID NO: 6713 - DNA, 21 bp, synthetic construct
  source 1..21: mol_type = other DNA
gttagggaatatatgtcctat

SEQ ID NO: 6714 - DNA, 21 bp, synthetic construct
  source 1..21: mol_type = other DNA
aagatcctaacggtgtggcca

SEQ ID NO: 6715 - DNA, 21 bp, synthetic construct
  source 1..21: mol_type = other DNA
ttgagtaggtcttcttataac

SEQ ID NO: 6716 - DNA, 21 bp, synthetic construct
  source 1..21: mol_type = other DNA
tatcttaaatctcagtcatat

SEQ ID NO: 6717 - DNA, 21 bp, synthetic construct
  source 1..21: mol_type = other DNA
tatgttcggtccgacgtgcga

SEQ ID NO: 6718 - DNA, 21 bp, synthetic construct
  source 1..21: mol_type = other DNA
agaaattatgacacttatccc

SEQ ID NO: 6719 - DNA, 21 bp, synthetic construct
  source 1..21: mol_type = other DNA
tatcagcggcagggttgggat

SEQ ID NO: 6720 - DNA, 21 bp, synthetic construct
  source 1..21: mol_type = other DNA
taccaacgccaaggatgggac

SEQ ID NO: 6721 - DNA, 21 bp, synthetic construct
  source 1..21: mol_type = other DNA
aagcgggagccagagcgtcga

SEQ ID NO: 6722 - DNA, 21 bp, synthetic construct
  source 1..21: mol_type = other DNA
cttcatcgcaatactcaaaac

SEQ ID NO: 6723 - DNA, 21 bp, synthetic construct
  source 1..21: mol_type = other DNA
cagtcggtatgtacgacgaag

SEQ ID NO: 6724 - DNA, 21 bp, synthetic construct
  source 1..21: mol_type = other DNA
aactacgcgtcccatagttgg

SEQ ID NO: 6725 - DNA, 21 bp, synthetic construct
  source 1..21: mol_type = other DNA
tttagtcgagtggggtttaac

SEQ ID NO: 6726 - DNA, 21 bp, synthetic construct
  source 1..21: mol_type = other DNA
ttgcataaatcaggcatgaac

SEQ ID NO: 6727 - DNA, 21 bp, synthetic construct
  source 1..21: mol_type = other DNA
ttgcacaggaacacccagaat

SEQ ID NO: 6728 - DNA, 21 bp, synthetic construct
  source 1..21: mol_type = other DNA
tattccaagtcaggtgcaaac

SEQ ID NO: 6729 - DNA, 21 bp, synthetic construct
  source 1..21: mol_type = other DNA
attatgagcagtcgaagctgg

SEQ ID NO: 6730 - DNA, 21 bp, synthetic construct
  source 1..21: mol_type = other DNA
aggaatcatgaaactttccct

SEQ ID NO: 6731 - DNA, 21 bp, synthetic construct
  source 1..21: mol_type = other DNA
ttttcccggacggggtttaat

SEQ ID NO: 6732 - DNA, 21 bp, synthetic construct
  source 1..21: mol_type = other DNA
tatgcaagaataggcctaaat

SEQ ID NO: 6733 - DNA, 21 bp, synthetic construct
  source 1..21: mol_type = other DNA
ggaggtgacgggaaccactac

SEQ ID NO: 6734 - DNA, 21 bp, synthetic construct
  source 1..21: mol_type = other DNA
tacctgaagagccaatcctac

SEQ ID NO: 6735 - DNA, 21 bp, synthetic construct
  source 1..21: mol_type = other DNA
ggacttatcggtgtttggccc

SEQ ID NO: 6736 - DNA, 21 bp, synthetic construct
  source 1..21: mol_type = other DNA
gataaagggcactgccacccg

SEQ ID NO: 6737 - DNA, 21 bp, synthetic construct
  source 1..21: mol_type = other DNA
tatgttaagtctgatcaccat

SEQ ID NO: 6738 - DNA, 21 bp, synthetic construct
  source 1..21: mol_type = other DNA
gctcaacgcgtgaggagcata

SEQ ID NO: 6739 - DNA, 21 bp, synthetic construct
  source 1..21: mol_type = other DNA
tattcccggcccggccccaat

SEQ ID NO: 6740 - DNA, 21 bp, synthetic construct
  source 1..21: mol_type = other DNA
aagacgatcaatcctggaaag

SEQ ID NO: 6741 - DNA, 21 bp, synthetic construct
  source 1..21: mol_type = other DNA
catagttctacgaatggagcc

SEQ ID NO: 6742 - DNA, 21 bp, synthetic construct
  source 1..21: mol_type = other DNA
tactctcgacctgggccgaac

SEQ ID NO: 6743 - DNA, 21 bp, synthetic construct
  source 1..21: mol_type = other DNA
tattctcggatgaactctaac

SEQ ID NO: 6744 - DNA, 21 bp, synthetic construct
  source 1..21: mol_type = other DNA
ttcagccgcgttggcttcaat

SEQ ID NO: 6745 - DNA, 21 bp, synthetic construct
  source 1..21: mol_type = other DNA
gaaaatcaccccctatggggt

SEQ ID NO: 6746 - DNA, 21 bp, synthetic construct
  source 1..21: mol_type = other DNA
cgtacagcccttgtgttcccg

SEQ ID NO: 6747 - DNA, 21 bp, synthetic construct
  source 1..21: mol_type = other DNA
ataatgtcgagccggtcatgg

SEQ ID NO: 6748 - DNA, 21 bp, synthetic construct
  source 1..21: mol_type = other DNA
tatgcaagaggtggaaacaat

SEQ ID NO: 6749 - DNA, 21 bp, synthetic construct
  source 1..21: mol_type = other DNA
atccatagacttctaccctca

SEQ ID NO: 6750 - DNA, 21 bp, synthetic construct
  source 1..21: mol_type = other DNA
tacgcgcgaatcgggctgaac

SEQ ID NO: 6751 - DNA, 21 bp, synthetic construct
  source 1..21: mol_type = other DNA
aaaacaattaaccccggtaaa

SEQ ID NO: 6752 - DNA, 21 bp, synthetic construct
  source 1..21: mol_type = other DNA
tttcataaattgatgtcgaat

SEQ ID NO: 6753 - DNA, 21 bp, synthetic construct
  source 1..21: mol_type = other DNA
cggaaccacgagacgtttccg

SEQ ID NO: 6754 - DNA, 21 bp, synthetic construct
  source 1..21: mol_type = other DNA
cacgattttaatttccgaggt

SEQ ID NO: 6755 - DNA, 21 bp, synthetic construct
  source 1..21: mol_type = other DNA
ttgcacagatcaggcgataat

SEQ ID NO: 6756 - DNA, 21 bp, synthetic construct
  source 1..21: mol_type = other DNA
cactcaagcacaaacggggct

SEQ ID NO: 6757 - DNA, 21 bp, synthetic construct
  source 1..21: mol_type = other DNA
agctgcccgaagaacgatctt

SEQ ID NO: 6758 - DNA, 21 bp, synthetic construct
  source 1..21: mol_type = other DNA
tatgtgaagtccgatcgatgc

SEQ ID NO: 6759 - DNA, 21 bp, synthetic construct
  source 1..21: mol_type = other DNA
tatgtgcgttcagataggaac

SEQ ID NO: 6760 - DNA, 21 bp, synthetic construct
  source 1..21: mol_type = other DNA
tacgtcaaatcggaccatcac

SEQ ID NO: 6761 - DNA, 21 bp, synthetic construct
  source 1..21: mol_type = other DNA
tattccaggatgggacacaac

SEQ ID NO: 6762 - DNA, 21 bp, synthetic construct
  source 1..21: mol_type = other DNA
gattgccagacaaatcggtcc

SEQ ID NO: 6763 - DNA, 21 bp, synthetic construct
  source 1..21: mol_type = other DNA
attcaccgtctactcccttcc

SEQ ID NO: 6764 - DNA, 21 bp, synthetic construct
  source 1..21: mol_type = other DNA
atccccaactgttataagcat

SEQ ID NO: 6765 - DNA, 21 bp, synthetic construct
  source 1..21: mol_type = other DNA
tactcaagaatgggaatgaat

SEQ ID NO: 6766 - DNA, 21 bp, synthetic construct
  source 1..21: mol_type = other DNA
tcactgcttaagccagccaag

SEQ ID NO: 6767 - DNA, 21 bp, synthetic construct
  source 1..21: mol_type = other DNA
cggacggactgcgtttatcct

SEQ ID NO: 6768 - DNA, 21 bp, synthetic construct
  source 1..21: mol_type = other DNA
tgcgataaagaggcttatcaa

SEQ ID NO: 6769 - DNA, 21 bp, synthetic construct
  source 1..21: mol_type = other DNA
gattgtaaatattttaaggca

SEQ ID NO: 6770 - DNA, 21 bp, synthetic construct
  source 1..21: mol_type = other DNA
tggccttccgagcttgggtgg

SEQ ID NO: 6771 - DNA, 21 bp, synthetic construct
  source 1..21: mol_type = other DNA
tacgctcggggagggaataac

SEQ ID NO: 6772 - DNA, 21 bp, synthetic construct
  source 1..21: mol_type = other DNA
tacctcctgagaggttgcgcg

SEQ ID NO: 6773 - DNA, 21 bp, synthetic construct
  source 1..21: mol_type = other DNA
tactcagccattggaatgaac

SEQ ID NO: 6774 - DNA, 21 bp, synthetic construct
  source 1..21: mol_type = other DNA
gttgctatgcgcgggattgga

SEQ ID NO: 6775 - DNA, 21 bp, synthetic construct
  source 1..21: mol_type = other DNA
ttgtctcgagtggctatgaac

SEQ ID NO: 6776 - DNA, 21 bp, synthetic construct
  source 1..21: mol_type = other DNA
caaagaggtgtgccaaattgg

SEQ ID NO: 6777 - DNA, 21 bp, synthetic construct
  source 1..21: mol_type = other DNA
gccagtacgcactgcacgcgg

SEQ ID NO: 6778 - DNA, 21 bp, synthetic construct
  source 1..21: mol_type = other DNA
cagatgaatccaattaagaaa

SEQ ID NO: 6779 - DNA, 21 bp, synthetic construct
  source 1..21: mol_type = other DNA
tgcggggtcgataagtcccgc

SEQ ID NO: 6780 - DNA, 21 bp, synthetic construct
  source 1..21: mol_type = other DNA
aaggaaaagccagacaagagg

SEQ ID NO: 6781 - DNA, 21 bp, synthetic construct
  source 1..21: mol_type = other DNA
ggtcggatggcagtgagagtc

SEQ ID NO: 6782 - DNA, 21 bp, synthetic construct
  source 1..21: mol_type = other DNA
tgccaccgcgaacactcactt

SEQ ID NO: 6783 - DNA, 21 bp, synthetic construct
  source 1..21: mol_type = other DNA
ctttggcggaattgcgatgca

SEQ ID NO: 6784 - DNA, 21 bp, synthetic construct
  source 1..21: mol_type = other DNA
gagaaccatccgctgtggggc

SEQ ID NO: 6785 - DNA, 21 bp, synthetic construct
  source 1..21: mol_type = other DNA
ttagttaggtatgagaacgta

SEQ ID NO: 6786 - DNA, 21 bp, synthetic construct
  source 1..21: mol_type = other DNA
catggctcagggaattttgta

SEQ ID NO: 6787 - DNA, 21 bp, synthetic construct
  source 1..21: mol_type = other DNA
tttagtcgaattggggagaat

SEQ ID NO: 6788 - DNA, 21 bp, synthetic construct
  source 1..21: mol_type = other DNA
cttgtcagatacgaaaatgtg

SEQ ID NO: 6789 - DNA, 21 bp, synthetic construct
  source 1..21: mol_type = other DNA
aaattggaaccacccaaacgt

SEQ ID NO: 6790 - DNA, 21 bp, synthetic construct
  source 1..21: mol_type = other DNA
tacgcgaagaacggattcaat

SEQ ID NO: 6791 - DNA, 21 bp, synthetic construct
  source 1..21: mol_type = other DNA
acggagacgaaattctgcaac

SEQ ID NO: 6792 - DNA, 21 bp, synthetic construct
  source 1..21: mol_type = other DNA
aaggagaataatgcgaagaaa

SEQ ID NO: 6793 - DNA, 21 bp, synthetic construct
  source 1..21: mol_type = other DNA
gaaatggaatcattcaactgg

SEQ ID NO: 6794 - DNA, 21 bp, synthetic construct
  source 1..21: mol_type = other DNA
ctgcatcgttctggggacaac

SEQ ID NO: 6795 - DNA, 21 bp, synthetic construct
  source 1..21: mol_type = other DNA
tacgcggcaggcagttggaat

SEQ ID NO: 6796 - DNA, 21 bp, synthetic construct
  source 1..21: mol_type = other DNA
gagagaaactcctgcatgcac

SEQ ID NO: 6797 - DNA, 21 bp, synthetic construct
  source 1..21: mol_type = other DNA
gatgcatatgagctctgtgct

SEQ ID NO: 6798 - DNA, 21 bp, synthetic construct
  source 1..21: mol_type = other DNA
cgaaccccggattcgtattgc

SEQ ID NO: 6799 - DNA, 21 bp, synthetic construct
  source 1..21: mol_type = other DNA
tacgcgcgtggaggaatgaat

SEQ ID NO: 6800 - DNA, 21 bp, synthetic construct
  source 1..21: mol_type = other DNA
cagcgtggcgtacccaactgg

SEQ ID NO: 6801 - DNA, 21 bp, synthetic construct
  source 1..21: mol_type = other DNA
ctccatgtccgaagcctaaac

SEQ ID NO: 6802 - DNA, 21 bp, synthetic construct
  source 1..21: mol_type = other DNA
cgcgggaatgaatgttggagt

SEQ ID NO: 6803 - DNA, 21 bp, synthetic construct
  source 1..21: mol_type = other DNA
ctacacgtacgtagtctgaat

SEQ ID NO: 6804 - DNA, 21 bp, synthetic construct
  source 1..21: mol_type = other DNA
tccaacaacgcgtattggggg

SEQ ID NO: 6805 - DNA, 21 bp, synthetic construct
  source 1..21: mol_type = other DNA
gtggcaatgagaggtatcggc

SEQ ID NO: 6806 - DNA, 21 bp, synthetic construct
  source 1..21: mol_type = other DNA
cacgggtccggaaacttcgtg

SEQ ID NO: 6807 - DNA, 21 bp, synthetic construct
  source 1..21: mol_type = other DNA
tgggtgaggtctgatacgaag

SEQ ID NO: 6808 - DNA, 21 bp, synthetic construct
  source 1..21: mol_type = other DNA
cgcgtagattgtggctcaagg

SEQ ID NO: 6809 - DNA, 21 bp, synthetic construct
  source 1..21: mol_type = other DNA
gggaatcagaactataagaag

SEQ ID NO: 6810 - DNA, 21 bp, synthetic construct
  source 1..21: mol_type = other DNA
tgcgggtatactaaccatgta

SEQ ID NO: 6811 - DNA, 21 bp, synthetic construct
  source 1..21: mol_type = other DNA
cataagtgccaaatttcgggt

SEQ ID NO: 6812 - DNA, 21 bp, synthetic construct
  source 1..21: mol_type = other DNA
caaatgaacccgataaaaaag

SEQ ID NO: 6813 - DNA, 21 bp, synthetic construct
  source 1..21: mol_type = other DNA
tattctgcgataggcatgaat

SEQ ID NO: 6814 - DNA, 21 bp, synthetic construct
  source 1..21: mol_type = other DNA
tttgcgaaagaaggacgaaat

SEQ ID NO: 6815 - DNA, 21 bp, synthetic construct
  source 1..21: mol_type = other DNA
ttcgttaagtccgatactaaa

SEQ ID NO: 6816 - DNA, 21 bp, synthetic construct
  source 1..21: mol_type = other DNA
tgcgaattcttccaacgtgaa

SEQ ID NO: 6817 - DNA, 21 bp, synthetic construct
  source 1..21: mol_type = other DNA
cgtaaagataatccaccgcgc

SEQ ID NO: 6818 - DNA, 21 bp, synthetic construct
  source 1..21: mol_type = other DNA
ggctacgcaggtaagaggaat

SEQ ID NO: 6819 - DNA, 21 bp, synthetic construct
  source 1..21: mol_type = other DNA
ttctcccgattgggtcataac

SEQ ID NO: 6820 - DNA, 21 bp, synthetic construct
  source 1..21: mol_type = other DNA
tactctcgttccaatgctaac

SEQ ID NO: 6821 - DNA, 21 bp, synthetic construct
  source 1..21: mol_type = other DNA
ttcgccaaggagggtaggaac

SEQ ID NO: 6822 - DNA, 21 bp, synthetic construct
  source 1..21: mol_type = other DNA
ttcagccgcactggcttcaac

SEQ ID NO: 6823 - DNA, 21 bp, synthetic construct
  source 1..21: mol_type = other DNA
tacagtaaggcccaacctaac

SEQ ID NO: 6824 - DNA, 21 bp, synthetic construct
  source 1..21: mol_type = other DNA
ggaaaatatcctccccaaggc

SEQ ID NO: 6825 - DNA, 21 bp, synthetic construct
  source 1..21: mol_type = other DNA
tatgctcggttaggaatgaac

SEQ ID NO: 6826 - DNA, 21 bp, synthetic construct
  source 1..21: mol_type = other DNA
tacagcaaagctgggtatgac

SEQ ID NO: 6827 - DNA, 21 bp, synthetic construct
  source 1..21: mol_type = other DNA
tatagtaaggcgggctacgat

SEQ ID NO: 6828 - DNA, 21 bp, synthetic construct
  source 1..21: mol_type = other DNA
cggcaggctaaacagaaaaat

SEQ ID NO: 6829 - DNA, 21 bp, synthetic construct
  source 1..21: mol_type = other DNA
tgtggtccccattggaatgct

SEQ ID NO: 6830 - DNA, 21 bp, synthetic construct
  source 1..21: mol_type = other DNA
ttccacaagctcatgagcaac

SEQ ID NO: 6831 - DNA, 21 bp, synthetic construct
  source 1..21: mol_type = other DNA
agagtaacacattgtactggt

SEQ ID NO: 6832 - DNA, 21 bp, synthetic construct
  source 1..21: mol_type = other DNA
ttcaaagccgggacttggaat

SEQ ID NO: 6833 - DNA, 21 bp, synthetic construct
  source 1..21: mol_type = other DNA
cattggactgagtacaacagc

SEQ ID NO: 6834 - DNA, 21 bp, synthetic construct
  source 1..21: mol_type = other DNA
ctacatcgattgatagcagat

SEQ ID NO: 6835 - DNA, 21 bp, synthetic construct
  source 1..21: mol_type = other DNA
atgaactgcgccgcaatgcgc

SEQ ID NO: 6836 - DNA, 21 bp, synthetic construct
  source 1..21: mol_type = other DNA
agtgaaaagaaattaaaattt

SEQ ID NO: 6837 - DNA, 21 bp, synthetic construct
  source 1..21: mol_type = other DNA
tattcccgaatgggtatgaac

SEQ ID NO: 6838 - DNA, 21 bp, synthetic construct
  source 1..21: mol_type = other DNA
gcttgtgatcgctcccatacg

SEQ ID NO: 6839 - DNA, 21 bp, synthetic construct
  source 1..21: mol_type = other DNA
aatccccacacatgtaacaat

SEQ ID NO: 6840 - DNA, 21 bp, synthetic construct
  source 1..21: mol_type = other DNA
tgggtacggtcggacacaaaa

SEQ ID NO: 6841 - DNA, 21 bp, synthetic construct
  source 1..21: mol_type = other DNA
tatgctaagaatggcgcaaat

SEQ ID NO: 6842 - DNA, 21 bp, synthetic construct
  source 1..21: mol_type = other DNA
tatgcgaaattcggccccaat

SEQ ID NO: 6843 - DNA, 21 bp, synthetic construct
  source 1..21: mol_type = other DNA
tacgcacgccttgggatgaat

SEQ ID NO: 6844 - DNA, 21 bp, synthetic construct
  source 1..21: mol_type = other DNA
ctatcgcggtccggtaacaat

SEQ ID NO: 6845 - DNA, 21 bp, synthetic construct
  source 1..21: mol_type = other DNA
tatagtcgagttaatgtaaat

SEQ ID NO: 6846 - DNA, 21 bp, synthetic construct
  source 1..21: mol_type = other DNA
ttttctaaaattggttttaac

SEQ ID NO: 6847 - DNA, 21 bp, synthetic construct
  source 1..21: mol_type = other DNA
tatagcagatctaacgcaaat

SEQ ID NO: 6848 - DNA, 21 bp, synthetic construct
  source 1..21: mol_type = other DNA
aggaacgaaaatcgcaaggga

SEQ ID NO: 6849 - DNA, 21 bp, synthetic construct
  source 1..21: mol_type = other DNA
tatagcaaagctcagccgaat

SEQ ID NO: 6850 - DNA, 21 bp, synthetic construct
  source 1..21: mol_type = other DNA
agtaaaaattcgatatggacc

SEQ ID NO: 6851 - DNA, 21 bp, synthetic construct
  source 1..21: mol_type = other DNA
atgaattgtgctgccatgcgt

SEQ ID NO: 6852 - DNA, 21 bp, synthetic construct
  source 1..21: mol_type = other DNA
ttcagccggataggcgaaaac

SEQ ID NO: 6853 - DNA, 21 bp, synthetic construct
  source 1..21: mol_type = other DNA
tacgcaaaaaacggtgcgaac

SEQ ID NO: 6854 - DNA, 21 bp, synthetic construct
  source 1..21: mol_type = other DNA
taccttaaatcacaaggtaat

SEQ ID NO: 6855 - DNA, 21 bp, synthetic construct
  source 1..21: mol_type = other DNA
ttcagcaaattgaattccaat

SEQ ID NO: 6856 - DNA, 21 bp, synthetic construct
  source 1..21: mol_type = other DNA
tacggatgtcagtcagggttc

SEQ ID NO: 6857 - DNA, 21 bp, synthetic construct
  source 1..21: mol_type = other DNA
ggcaagtacccgccacagggg

SEQ ID NO: 6858 - DNA, 21 bp, synthetic construct
  source 1..21: mol_type = other DNA
tcctgtagaattagcgagaaa

SEQ ID NO: 6859 - DNA, 21 bp, synthetic construct
  source 1..21: mol_type = other DNA
tatgccaaaaatggctttaac

SEQ ID NO: 6860 - DNA, 21 bp, synthetic construct
  source 1..21: mol_type = other DNA
aaaatgagctcgtctgtttgg

SEQ ID NO: 6861 - DNA, 21 bp, synthetic construct
  source 1..21: mol_type = other DNA
tacagtagattgtccggaaac

SEQ ID NO: 6862 - DNA, 21 bp, synthetic construct
  source 1..21: mol_type = other DNA
cttcataaaggctgtacaaac

SEQ ID NO: 6863 - DNA, 21 bp, synthetic construct
  source 1..21: mol_type = other DNA
tgcggccctcactggaacgcc

SEQ ID NO: 6864 - DNA, 21 bp, synthetic construct
  source 1..21: mol_type = other DNA
tggatctttcaatcacacacg

SEQ ID NO: 6865 - DNA, 21 bp, synthetic construct
  source 1..21: mol_type = other DNA
tgccgtggtacagtgtttccc

SEQ ID NO: 6866 - DNA, 21 bp, synthetic construct
  source 1..21: mol_type = other DNA
ctgcctgttcgtggtaaacat

SEQ ID NO: 6867 - DNA, 21 bp, synthetic construct
  source 1..21: mol_type = other DNA
tatagcaaaaagaatgaaaat

SEQ ID NO: 6868 - DNA, 21 bp, synthetic construct
  source 1..21: mol_type = other DNA
tactcccgagtaaacctcaat

SEQ ID NO: 6869 - DNA, 21 bp, synthetic construct
  source 1..21: mol_type = other DNA
tacgccaagtttggtccgaac

SEQ ID NO: 6870 - DNA, 21 bp, synthetic construct
  source 1..21: mol_type = other DNA
atcatgatgataacgcgggga

SEQ ID NO: 6871 - DNA, 21 bp, synthetic construct
  source 1..21: mol_type = other DNA
ggccaatgtggcccgaagtct

SEQ ID NO: 6872 - DNA, 21 bp, synthetic construct
  source 1..21: mol_type = other DNA
accacaattcattcaaggtgg

SEQ ID NO: 6873 - DNA, 21 bp, synthetic construct
  source 1..21: mol_type = other DNA
aaatcgatctggacagacgac

SEQ ID NO: 6874 - DNA, 21 bp, synthetic construct
  source 1..21: mol_type = other DNA
tgtaccggcaatagctccaaa

SEQ ID NO: 6875 - DNA, 21 bp, synthetic construct
  source 1..21: mol_type = other DNA
tgcgaccgatccaatgggggg

SEQ ID NO: 6876 - DNA, 21 bp, synthetic construct
  source 1..21: mol_type = other DNA
tgcaacccgtcggtatacaga

SEQ ID NO: 6877 - DNA, 21 bp, synthetic construct
  source 1..21: mol_type = other DNA
tgtaaaagctacggttcgtcc

SEQ ID NO: 6878 - DNA, 21 bp, synthetic construct
  source 1..21: mol_type = other DNA
tatgcagcgggatcctggaac

SEQ ID NO: 6879 - DNA, 21 bp, synthetic construct
  source 1..21: mol_type = other DNA
aatattgttaactaccgccaa

SEQ ID NO: 6880 - DNA, 21 bp, synthetic construct
  source 1..21: mol_type = other DNA
taccacaagtcgcaaagtaat

SEQ ID NO: 6881 - DNA, 21 bp, synthetic construct
  source 1..21: mol_type = other DNA
tgcacacgaatggactacggg

SEQ ID NO: 6882 - DNA, 21 bp, synthetic construct
  source 1..21: mol_type = other DNA
tatgcacgcggtgggatgaac

SEQ ID NO: 6883 - DNA, 21 bp, synthetic construct
  source 1..21: mol_type = other DNA
atcagtgaatacagcaaatgg

SEQ ID NO: 6884 - DNA, 21 bp, synthetic construct
  source 1..21: mol_type = other DNA
atgacctatgatagctatgat

SEQ ID NO: 6885 - DNA, 21 bp, synthetic construct
  source 1..21: mol_type = other DNA
actaattgggaatcatactta

SEQ ID NO: 6886 - DNA, 21 bp, synthetic construct
  source 1..21: mol_type = other DNA
tggcctccaccggtcaacagc

SEQ ID NO: 6887 - DNA, 21 bp, synthetic construct
  source 1..21: mol_type = other DNA
tgtgcatttaccgggacgcgc

SEQ ID NO: 6888 - DNA, 21 bp, synthetic construct
  source 1..21: mol_type = other DNA
tggacttgttctaggaagcag

SEQ ID NO: 6889 - DNA, 21 bp, synthetic construct
  source 1..21: mol_type = other DNA
ttccatcaccgtcaaaaccat

SEQ ID NO: 6890 - DNA, 21 bp, synthetic construct
  source 1..21: mol_type = other DNA
tttaaagtttgggatggaggc

SEQ ID NO: 6891 - DNA, 21 bp, synthetic construct
  source 1..21: mol_type = other DNA
tacttcacaggtgtcgtcgca

SEQ ID NO: 6892 - DNA, 21 bp, synthetic construct
  source 1..21: mol_type = other DNA
aaaattcctattaattggtcc

SEQ ID NO: 6893 - DNA, 21 bp, synthetic construct
  source 1..21: mol_type = other DNA
ggctacagatctttatacccg

SEQ ID NO: 6894 - DNA, 21 bp, synthetic construct
  source 1..21: mol_type = other DNA
aggcaggagaagcacttgagg

SEQ ID NO: 6895 - DNA, 21 bp, synthetic construct
  source 1..21: mol_type = other DNA
ttttcgaggctcgggcacaat

SEQ ID NO: 6896 - DNA, 21 bp, synthetic construct
  source 1..21: mol_type = other DNA
tattttactggcgttgtggcc

SEQ ID NO: 6897 - DNA, 21 bp, synthetic construct
  source 1..21: mol_type = other DNA
cgaaaggacaaccctcctcgg

SEQ ID NO: 6898 - DNA, 21 bp, synthetic construct
  source 1..21: mol_type = other DNA
tatcataaaagccagtcgaac

SEQ ID NO: 6899 - DNA, 21 bp, synthetic construct
  source 1..21: mol_type = other DNA
tacgttaaatcctccaataat

SEQ ID NO: 6900 - DNA, 21 bp, synthetic construct
  source 1..21: mol_type = other DNA
tacgcgcgcgaaacatggaat

SEQ ID NO: 6901 - DNA, 21 bp, synthetic construct
  source 1..21: mol_type = other DNA
tgttgggacactagtaacgcg

SEQ ID NO: 6902 - DNA, 21 bp, synthetic construct
  source 1..21: mol_type = other DNA
tacgccaaagccggccacaat

SEQ ID NO: 6903 - DNA, 21 bp, synthetic construct
  source 1..21: mol_type = other DNA
atgacatacgacagttacgac

SEQ ID NO: 6904 - DNA, 21 bp, synthetic construct
  source 1..21: mol_type = other DNA
aagatgtcgtcctcggtgtgg

SEQ ID NO: 6905 - DNA, 21 bp, synthetic construct
  source 1..21: mol_type = other DNA
tacgccaggatgggaataaat

SEQ ID NO: 6906 - DNA, 21 bp, synthetic construct
  source 1..21: mol_type = other DNA
gattctccgtggtcaaactgg

SEQ ID NO: 6907 - DNA, 21 bp, synthetic construct
  source 1..21: mol_type = other DNA
aattcgacttcatgtacaccg

SEQ ID NO: 6908 - DNA, 21 bp, synthetic construct
  source 1..21: mol_type = other DNA
aggactgcactcgtatttcca

SEQ ID NO: 6909 - DNA, 21 bp, synthetic construct
  source 1..21: mol_type = other DNA
tatgcgaaggctggtcataac

SEQ ID NO: 6910 - DNA, 21 bp, synthetic construct
  source 1..21: mol_type = other DNA
cacaagtgtggtgacactcgc

SEQ ID NO: 6911 - DNA, 21 bp, synthetic construct
  source 1..21: mol_type = other DNA
ctagctaggaacgcgagtaat

SEQ ID NO: 6912 - DNA, 21 bp, synthetic construct
  source 1..21: mol_type = other DNA
agaatgaaagacgtctaccct

SEQ ID NO: 6913 - DNA, 21 bp, synthetic construct
  source 1..21: mol_type = other DNA
cgttgcgagatcaacgctaca

SEQ ID NO: 6914 - DNA, 21 bp, synthetic construct
  source 1..21: mol_type = other DNA
tattctgagtatgacacctac

SEQ ID NO: 6915 - DNA, 21 bp, synthetic construct
  source 1..21: mol_type = other DNA
cgaatgaaggatgtgtatccc

SEQ ID NO: 6916 - DNA, 21 bp, synthetic construct
  source 1..21: mol_type = other DNA
tttgtcaaatcggacaccaag

SEQ ID NO: 6917 - DNA, 21 bp, synthetic construct
  source 1..21: mol_type = other DNA
tactcacgtgtcaacgtcaac

SEQ ID NO: 6918 - DNA, 21 bp, synthetic construct
  source 1..21: mol_type = other DNA
taccacgcacgggccccaaac

SEQ ID NO: 6919 - DNA, 21 bp, synthetic construct
  source 1..21: mol_type = other DNA
aacatagtcaattatcgacag

SEQ ID NO: 6920 - DNA, 21 bp, synthetic construct
  source 1..21: mol_type = other DNA
tacatttgtagtaacgccaag

SEQ ID NO: 6921 - DNA, 21 bp, synthetic construct
  source 1..21: mol_type = other DNA
accttgatgggaaaatgtacg

SEQ ID NO: 6922 - DNA, 21 bp, synthetic construct
  source 1..21: mol_type = other DNA
agtactatggaatgctcatcc

SEQ ID NO: 6923 - DNA, 21 bp, synthetic construct
  source 1..21: mol_type = other DNA
aaatgggttcgatccgctgtg

SEQ ID NO: 6924 - DNA, 21 bp, synthetic construct
  source 1..21: mol_type = other DNA
cgaaacaaggacagaaatagt

SEQ ID NO: 6925 - DNA, 21 bp, synthetic construct
  source 1..21: mol_type = other DNA
cgttggtcagagcgggattgt

SEQ ID NO: 6926 - DNA, 21 bp, synthetic construct
  source 1..21: mol_type = other DNA
gacaagatgtgcttcgctaag

SEQ ID NO: 6927 - DNA, 21 bp, synthetic construct
  source 1..21: mol_type = other DNA
ttaagccgctctggcaataac

SEQ ID NO: 6928 - DNA, 21 bp, synthetic construct
  source 1..21: mol_type = other DNA
gtccacgactcaagccactgt

SEQ ID NO: 6929 - DNA, 21 bp, synthetic construct
  source 1..21: mol_type = other DNA
tattcgaggttatctgggaat

SEQ ID NO: 6930 - DNA, 21 bp, synthetic construct
  source 1..21: mol_type = other DNA
tgcgattacggttcgcgctca

SEQ ID NO: 6931 - DNA, 21 bp, synthetic construct
  source 1..21: mol_type = other DNA
tcctgcaaatccgggaacgct

SEQ ID NO: 6932 - DNA, 21 bp, synthetic construct
  source 1..21: mol_type = other DNA
ctgggactgtggaccgaatct

SEQ ID NO: 6933 - DNA, 21 bp, synthetic construct
  source 1..21: mol_type = other DNA
acgtgtaggacgctgaaaaca

SEQ ID NO: 6934 - DNA, 21 bp, synthetic construct
  source 1..21: mol_type = other DNA
tgtacagaaaatcgaggagta

SEQ ID NO: 6935 - DNA, 21 bp, synthetic construct
  source 1..21: mol_type = other DNA
ggtcccggtacatgcaaatcc

SEQ ID NO: 6936 - DNA, 21 bp, synthetic construct
  source 1..21: mol_type = other DNA
tgccagtacgttaaatgggaa

SEQ ID NO: 6937 - DNA, 21 bp, synthetic construct
  source 1..21: mol_type = other DNA
accgaaacaaagttttgtaat

SEQ ID NO: 6938 - DNA, 21 bp, synthetic construct
  source 1..21: mol_type = other DNA
aactcttctgcttgccgcacc

SEQ ID NO: 6939 - DNA, 21 bp, synthetic construct
  source 1..21: mol_type = other DNA
agtggatgtagccggacggat

SEQ ID NO: 6940 - DNA, 21 bp, synthetic construct
  source 1..21: mol_type = other DNA
atgtgttcgatgcgaaatgca

SEQ ID NO: 6941 - DNA, 21 bp, synthetic construct
  source 1..21: mol_type = other DNA
aggtcctgtttgggctccaat

SEQ ID NO: 6942 - DNA, 21 bp, synthetic construct
  source 1..21: mol_type = other DNA
aaacgtccgccggaagcacgg

SEQ ID NO: 6943 - DNA, 21 bp, synthetic construct
  source 1..21: mol_type = other DNA
ttttctaagctaaactcaaac

SEQ ID NO: 6944 - DNA, 21 bp, synthetic construct
  source 1..21: mol_type = other DNA
aagaataactgcacgtttgga

SEQ ID NO: 6945 - DNA, 21 bp, synthetic construct
  source 1..21: mol_type = other DNA
tgtaacaatagtggatactct

SEQ ID NO: 6946 - DNA, 21 bp, synthetic construct
  source 1..21: mol_type = other DNA
atgtctcgaatcggcgttaac

SEQ ID NO: 6947 - DNA, 21 bp, synthetic construct
  source 1..21: mol_type = other DNA
tatcatgctcgcgctccgaat

SEQ ID NO: 6948 - DNA, 21 bp, synthetic construct
  source 1..21: mol_type = other DNA
ttgaagctgtgtgcccacaat

SEQ ID NO: 6949 - DNA, 21 bp, synthetic construct
  source 1..21: mol_type = other DNA
agatgcgataaaatattaacg

SEQ ID NO: 6950 - DNA, 21 bp, synthetic construct
  source 1..21: mol_type = other DNA
tcaaaaacgtatagctgtccg

SEQ ID NO: 6951 - DNA, 21 bp, synthetic construct
  source 1..21: mol_type = other DNA
aaaatgttacctggtaaccgt

SEQ ID NO: 6952 - DNA, 21 bp, synthetic construct
  source 1..21: mol_type = other DNA
tatcaacggcaatgtgagagc

SEQ ID NO: 6953 - DNA, 21 bp, synthetic construct
  source 1..21: mol_type = other DNA
aatacataccgatgtgatggg

SEQ ID NO: 6954 - DNA, 21 bp, synthetic construct
  source 1..21: mol_type = other DNA
tcttgtggcggattacacggg

SEQ ID NO: 6955 - DNA, 21 bp, synthetic construct
  source 1..21: mol_type = other DNA
attagcgagtattcgaagtgg

SEQ ID NO: 6956 - DNA, 21 bp, synthetic construct
  source 1..21: mol_type = other DNA
tttaaggctggaacctggaac

SEQ ID NO: 6957 - DNA, 21 bp, synthetic construct
  source 1..21: mol_type = other DNA
tcttgtaagagcggcaatgcc

SEQ ID NO: 6958 - DNA, 21 bp, synthetic construct
  source 1..21: mol_type = other DNA
ctatccaagttatcctgcaat

SEQ ID NO: 6959 - DNA, 21 bp, synthetic construct
  source 1..21: mol_type = other DNA
tacagcagaattaacgccaac

SEQ ID NO: 6960 - DNA, 21 bp, synthetic construct
  source 1..21: mol_type = other DNA
ctcgggttgtggacagagtcc

SEQ ID NO: 6961 - DNA, 21 bp, synthetic construct
  source 1..21: mol_type = other DNA
aagatgttgccgggaaatcgg

SEQ ID NO: 6962 - DNA, 21 bp, synthetic construct
  source 1..21: mol_type = other DNA
tactggagtcagacgccttcg

SEQ ID NO: 6963 - DNA, 21 bp, synthetic construct
  source 1..21: mol_type = other DNA
acggtttggacatcggattgt

SEQ ID NO: 6964 - DNA, 21 bp, synthetic construct
  source 1..21: mol_type = other DNA
tgtggttacaccaatcacgtt

SEQ ID NO: 6965 - DNA, 21 bp, synthetic construct
  source 1..21: mol_type = other DNA
cagtatgtccgatcatcaata

SEQ ID NO: 6966 - DNA, 21 bp, synthetic construct
  source 1..21: mol_type = other DNA
agttgtatgaatgtcgctccg

SEQ ID NO: 6967 - DNA, 21 bp, synthetic construct
  source 1..21: mol_type = other DNA
gccttttgtacaaacaaaacg

SEQ ID NO: 6968 - DNA, 21 bp, synthetic construct
  source 1..21: mol_type = other DNA
acgcagtgcaaagagcactac

SEQ ID NO: 6969 - DNA, 21 bp, synthetic construct
  source 1..21: mol_type = other DNA
cggtggagcgaaagagactgc

SEQ ID NO: 6970 - DNA, 21 bp, synthetic construct
  source 1..21: mol_type = other DNA
tgtacatacaagtggagtgaa

SEQ ID NO: 6971 - DNA, 21 bp, synthetic construct
  source 1..21: mol_type = other DNA
attagcgtgtgtaaacaacag

SEQ ID NO: 6972 - DNA, 21 bp, synthetic construct
  source 1..21: mol_type = other DNA
tcccactggagtgactgcgac

SEQ ID NO: 6973 - DNA, 21 bp, synthetic construct
  source 1..21: mol_type = other DNA
atgtcccgtattggagtgaat

SEQ ID NO: 6974 - DNA, 21 bp, synthetic construct
  source 1..21: mol_type = other DNA
tacgcacgagggaatgataat

SEQ ID NO: 6975 - DNA, 21 bp, synthetic construct
  source 1..21: mol_type = other DNA
agctgtcgactagtagacgtt

SEQ ID NO: 6976 - DNA, 21 bp, synthetic construct
  source 1..21: mol_type = other DNA
ttgccagtgagagggaagcac

SEQ ID NO: 6977 - DNA, 21 bp, synthetic construct
  source 1..21: mol_type = other DNA
aagagtatttggaccgatgat

SEQ ID NO: 6978 - DNA, 21 bp, synthetic construct
  source 1..21: mol_type = other DNA
tgtcaatcagaaggtagaacc

SEQ ID NO: 6979 - DNA, 21 bp, synthetic construct
  source 1..21: mol_type = other DNA
ctttgcaggccatgccgggaa

SEQ ID NO: 6980 - DNA, 21 bp, synthetic construct
  source 1..21: mol_type = other DNA
tcttggacatacgaggaatgt

SEQ ID NO: 6981 - DNA, 21 bp, synthetic construct
  source 1..21: mol_type = other DNA
acctgtcagcgtctgtccggt

SEQ ID NO: 6982 - DNA, 21 bp, synthetic construct
  source 1..21: mol_type = other DNA
ttgcaccggcttatcgctgac

SEQ ID NO: 6983 - DNA, 21 bp, synthetic construct
  source 1..21: mol_type = other DNA
tgtgacgggacggggcgacgt

SEQ ID NO: 6984 - DNA, 21 bp, synthetic construct
  source 1..21: mol_type = other DNA
catgacttcaactttagggga

SEQ ID NO: 6985 - DNA, 21 bp, synthetic construct
  source 1..21: mol_type = other DNA
gcgttctgcaccaataagact

SEQ ID NO: 6986 - DNA, 21 bp, synthetic construct
  source 1..21: mol_type = other DNA
agagaggtattaaaatggagt

SEQ ID NO: 6987 - DNA, 21 bp, synthetic construct
  source 1..21: mol_type = other DNA
acgtgtggaatgaggggagct

SEQ ID NO: 6988 - DNA, 21 bp, synthetic construct
  source 1..21: mol_type = other DNA
tgcggtcgaggagctggaata

SEQ ID NO: 6989 - DNA, 21 bp, synthetic construct
  source 1..21: mol_type = other DNA
tatttcgagaagatatgtgaa

SEQ ID NO: 6990 - DNA, 21 bp, synthetic construct
  source 1..21: mol_type = other DNA
cctcgtatgtgcgcgaacaac

SEQ ID NO: 6991 - DNA, 21 bp, synthetic construct
  source 1..21: mol_type = other DNA
tactttacagatgaatggccc

SEQ ID NO: 6992 - DNA, 21 bp, synthetic construct
  source 1..21: mol_type = other DNA
gggtgctcagggtttaagaca

SEQ ID NO: 6993 - DNA, 21 bp, synthetic construct
  source 1..21: mol_type = other DNA
tgcaaatggatacgggaaggc

SEQ ID NO: 6994 - DNA, 21 bp, synthetic construct
  source 1..21: mol_type = other DNA
atgaaaatcacaggtccccgc

SEQ ID NO: 6995 - DNA, 21 bp, synthetic construct
  source 1..21: mol_type = other DNA
tgtcaatatgtcaagtgggag

SEQ ID NO: 6996 - DNA, 21 bp, synthetic construct
  source 1..21: mol_type = other DNA
cgaacatacgacacttacatc

SEQ ID NO: 6997 - DNA, 21 bp, synthetic construct
  source 1..21: mol_type = other DNA
cgatacgaggcaagtaattgg

SEQ ID NO: 6998 - DNA, 21 bp, synthetic construct
  source 1..21: mol_type = other DNA
tacagcaagctaggaggtaat

SEQ ID NO: 6999 - DNA, 21 bp, synthetic construct
  source 1..21: mol_type = other DNA
tattctcgggtgaatctgaac

SEQ ID NO: 7000 - DNA, 21 bp, synthetic construct
  source 1..21: mol_type = other DNA
tacttcgcccatttttcccat

SEQ ID NO: 7001 - DNA, 21 bp, synthetic construct
  source 1..21: mol_type = other DNA
gggtgcaaccgttcaacggct

SEQ ID NO: 7002 - DNA, 21 bp, synthetic construct
  source 1..21: mol_type = other DNA
aagctctgtcccaatcttatc

SEQ ID NO: 7003 - DNA, 21 bp, synthetic construct
  source 1..21: mol_type = other DNA
tggcctacagccttttacgct

SEQ ID NO: 7004 - DNA, 21 bp, synthetic construct
  source 1..21: mol_type = other DNA
ctttgtcgtccatgttcagag

SEQ ID NO: 7005 - DNA, 21 bp, synthetic construct
  source 1..21: mol_type = other DNA
tactctaagaaaaacgagaac

SEQ ID NO: 7006 - DNA, 21 bp, synthetic construct
  source 1..21: mol_type = other DNA
tgcctgatacgtgacgttaaa

SEQ ID NO: 7007 - DNA, 21 bp, synthetic construct
  source 1..21: mol_type = other DNA
cacgactcggcctggagctgg

SEQ ID NO: 7008 - DNA, 21 bp, synthetic construct
  source 1..21: mol_type = other DNA
agggcaaaaatcaattggcca

SEQ ID NO: 7009 - DNA, 21 bp, synthetic construct
  source 1..21: mol_type = other DNA
acgggtgtatggatgcaaacg

SEQ ID NO: 7010 - DNA, 21 bp, synthetic construct
  source 1..21: mol_type = other DNA
tacagcgaatacgatacatat

SEQ ID NO: 7011 - DNA, 21 bp, synthetic construct
  source 1..21: mol_type = other DNA
tacagccgcaccggaagcgat

SEQ ID NO: 7012 - DNA, 21 bp, synthetic construct
  source 1..21: mol_type = other DNA
tactcaaaaaacggcatgaat

SEQ ID NO: 7013 - DNA, 21 bp, synthetic construct
  source 1..21: mol_type = other DNA
tgtgactatggaagcagatcc

SEQ ID NO: 7014 - DNA, 21 bp, synthetic construct
  source 1..21: mol_type = other DNA
tgctcgggtttcgaacggcga

SEQ ID NO: 7015 - DNA, 21 bp, synthetic construct
  source 1..21: mol_type = other DNA
tgcaatataggcgataaacgg

SEQ ID NO: 7016 - DNA, 21 bp, synthetic construct
  source 1..21: mol_type = other DNA
tatagtagaacggggagtgac

SEQ ID NO: 7017 - DNA, 21 bp, synthetic construct
  source 1..21: mol_type = other DNA
ggagagtggtgtgtgaagaat

SEQ ID NO: 7018 - DNA, 21 bp, synthetic construct
  source 1..21: mol_type = other DNA
taccataaacatagtctgaac

SEQ ID NO: 7019 - DNA, 21 bp, synthetic construct
  source 1..21: mol_type = other DNA
ttttctaaaatgaacatcaat

SEQ ID NO: 7020 - DNA, 21 bp, synthetic construct
  source 1..21: mol_type = other DNA
atatgccgcggatatacatct

SEQ ID NO: 7021 - DNA, 21 bp, synthetic construct
  source 1..21: mol_type = other DNA
cagtaccatatctatagcgga

SEQ ID NO: 7022 - DNA, 21 bp, synthetic construct
  source 1..21: mol_type = other DNA
tgcatcatcaagaaccaggtg

SEQ ID NO: 7023 - DNA, 21 bp, synthetic construct
  source 1..21: mol_type = other DNA
tacgcgaaacaaggccataat

SEQ ID NO: 7024 - DNA, 21 bp, synthetic construct
  source 1..21: mol_type = other DNA
gagctcggccgcttcggatgc

SEQ ID NO: 7025 - DNA, 21 bp, synthetic construct
  source 1..21: mol_type = other DNA
gaatatcagactagaccgtgc

SEQ ID NO: 7026 - DNA, 21 bp, synthetic construct
  source 1..21: mol_type = other DNA
acttccgggatttggaacgtt

SEQ ID NO: 7027 - DNA, 21 bp, synthetic construct
  source 1..21: mol_type = other DNA
agcaataatgcctactgggga

SEQ ID NO: 7028 - DNA, 21 bp, synthetic construct
  source 1..21: mol_type = other DNA
tgcgccgtacagggtgtcaag

SEQ ID NO: 7029 - DNA, 21 bp, synthetic construct
  source 1..21: mol_type = other DNA
tatttgaagagtcaggggaac

SEQ ID NO: 7030 - DNA, 21 bp, synthetic construct
  source 1..21: mol_type = other DNA
gaatggtgcaatacggacaaa

SEQ ID NO: 7031 - DNA, 21 bp, synthetic construct
  source 1..21: mol_type = other DNA
tatcacaagcactccttgaat

SEQ ID NO: 7032 - DNA, 21 bp, synthetic construct
  source 1..21: mol_type = other DNA
atgcgaactcctgttatacgg

SEQ ID NO: 7033 - DNA, 21 bp, synthetic construct
  source 1..21: mol_type = other DNA
agctgtaaatcttcttatacg

SEQ ID NO: 7034 - DNA, 21 bp, synthetic construct
  source 1..21: mol_type = other DNA
gaactagggcgttttgggtgt

SEQ ID NO: 7035 - DNA, 21 bp, synthetic construct
  source 1..21: mol_type = other DNA
atgttgtgtgtagctggtgac

SEQ ID NO: 7036 - DNA, 21 bp, synthetic construct
  source 1..21: mol_type = other DNA
tatgctcgtgagacctggaac

SEQ ID NO: 7037 - DNA, 21 bp, synthetic construct
  source 1..21: mol_type = other DNA
taccagcgtcagtgcgaatca

SEQ ID NO: 7038 - DNA, 21 bp, synthetic construct
  source 1..21: mol_type = other DNA
ggcccaggaacttgtaagtct

SEQ ID NO: 7039 - DNA, 21 bp, synthetic construct
  source 1..21: mol_type = other DNA
agttacagcaacccttggatc

SEQ ID NO: 7040 - DNA, 21 bp, synthetic construct
  source 1..21: mol_type = other DNA
tacggtgctggtacctggcat

SEQ ID NO: 7041 - DNA, 21 bp, synthetic construct
  source 1..21: mol_type = other DNA
tcaacttgcaacatgcaagct

SEQ ID NO: 7042 - DNA, 21 bp, synthetic construct
  source 1..21: mol_type = other DNA
acaaagcgccagcaatggcca

SEQ ID NO: 7043 - DNA, 21 bp, synthetic construct
  source 1..21: mol_type = other DNA
ctgaaactatgcgctcataac

SEQ ID NO: 7044 - DNA, 21 bp, synthetic construct
  source 1..21: mol_type = other DNA
tacgctagaggcggtcaaaat

SEQ ID NO: 7045 - DNA, 21 bp, synthetic construct
  source 1..21: mol_type = other DNA
tgtacatctgatagctttccc

SEQ ID NO: 7046 - DNA, 21 bp, synthetic construct
  source 1..21: mol_type = other DNA
ttttcaaagatgaactataat

SEQ ID NO: 7047 - DNA, 21 bp, synthetic construct
  source 1..21: mol_type = other DNA
tacttcacgggcatctgggct

SEQ ID NO: 7048 - DNA, 21 bp, synthetic construct
  source 1..21: mol_type = other DNA
agctgcatgaacgtagccccc

SEQ ID NO: 7049 - DNA, 21 bp, synthetic construct
  source 1..21: mol_type = other DNA
tgctgggatacatcgaatgct

SEQ ID NO: 7050 - DNA, 21 bp, synthetic construct
  source 1..21: mol_type = other DNA
tgtgagttttttcagagagag

SEQ ID NO: 7051 - DNA, 21 bp, synthetic construct
  source 1..21: mol_type = other DNA
tgtactaataacggcaaccgt

SEQ ID NO: 7052 - DNA, 21 bp, synthetic construct
  source 1..21: mol_type = other DNA
tacagtaaaatgaaccaaaat

SEQ ID NO: 7053 - DNA, 21 bp, synthetic construct
  source 1..21: mol_type = other DNA
cggtgtgaaattaatgcaact

SEQ ID NO: 7054 - DNA, 21 bp, synthetic construct
  source 1..21: mol_type = other DNA
cgtcatccctccttaaatttt

SEQ ID NO: 7055 - DNA, 21 bp, synthetic construct
  source 1..21: mol_type = other DNA
cagtacactcgtctgcagctt

SEQ ID NO: 7056 - DNA, 21 bp, synthetic construct
  source 1..21: mol_type = other DNA
ttggcccggaatgcctcaaac

SEQ ID NO: 7057 - DNA, 21 bp, synthetic construct
  source 1..21: mol_type = other DNA
tactttcccaatttcatttcg

SEQ ID NO: 7058 - DNA, 21 bp, synthetic construct
  source 1..21: mol_type = other DNA
gcttacagtcgacttatgtca

SEQ ID NO: 7059 - DNA, 21 bp, synthetic construct
  source 1..21: mol_type = other DNA
tcctcaaagtattcgccctgg

SEQ ID NO: 7060 - DNA, 21 bp, synthetic construct
  source 1..21: mol_type = other DNA
ctgtgccggtatagcggtgga

SEQ ID NO: 7061 - DNA, 21 bp, synthetic construct
  source 1..21: mol_type = other DNA
actccttattgcaaccttcgc

SEQ ID NO: 7062 - DNA, 21 bp, synthetic construct
  source 1..21: mol_type = other DNA
gcctacgtctccagtacctgt

SEQ ID NO: 7063 - DNA, 21 bp, synthetic construct
  source 1..21: mol_type = other DNA
tgctatagacacgttacagca

SEQ ID NO: 7064 - DNA, 21 bp, synthetic construct
  source 1..21: mol_type = other DNA
gatcagtggtgcaaaaaggtg

SEQ ID NO: 7065 - DNA, 21 bp, synthetic construct
  source 1..21: mol_type = other DNA
aactgtaattttgttggaaaa

SEQ ID NO: 7066 - DNA, 21 bp, synthetic construct
  source 1..21: mol_type = other DNA
tgcgtagattgggggcttgac

SEQ ID NO: 7067 - DNA, 21 bp, synthetic construct
  source 1..21: mol_type = other DNA
cgtatgtctgccagtaactgg

SEQ ID NO: 7068 - DNA, 21 bp, synthetic construct
  source 1..21: mol_type = other DNA
ttctacaggtccgataattgc

SEQ ID NO: 7069 - DNA, 21 bp, synthetic construct
  source 1..21: mol_type = other DNA
tactccaggtataatattaat

SEQ ID NO: 7070 - DNA, 21 bp, synthetic construct
  source 1..21: mol_type = other DNA
tgccatcaggttctcttgcct

SEQ ID NO: 7071 - DNA, 21 bp, synthetic construct
  source 1..21: mol_type = other DNA
tgtctcatccgggatgtcaag

SEQ ID NO: 7072 - DNA, 21 bp, synthetic construct
  source 1..21: mol_type = other DNA
cgtgtaaacacacgagctaat

SEQ ID NO: 7073 - DNA, 21 bp, synthetic construct
  source 1..21: mol_type = other DNA
tgtggcagaggggcggggatc

SEQ ID NO: 7074 - DNA, 21 bp, synthetic construct
  source 1..21: mol_type = other DNA
tatgcacgtcaaaattataat

SEQ ID NO: 7075 - DNA, 21 bp, synthetic construct
  source 1..21: mol_type = other DNA
tattcacgtatcaatgcaaat

SEQ ID NO: 7076 - DNA, 21 bp, synthetic construct
  source 1..21: mol_type = other DNA
tatacgcgactctcgatgaat

SEQ ID NO: 7077 - DNA, 21 bp, synthetic construct
  source 1..21: mol_type = other DNA
ccgtgtggcccttgtacttat

SEQ ID NO: 7078 - DNA, 21 bp, synthetic construct
  source 1..21: mol_type = other DNA
tatttttcagggaagacccta

SEQ ID NO: 7079 - DNA, 21 bp, synthetic construct
  source 1..21: mol_type = other DNA
acttactcgaggctcgttctc

SEQ ID NO: 7080 - DNA, 21 bp, synthetic construct
  source 1..21: mol_type = other DNA
aactgtaagccttgcttcgat

SEQ ID NO: 7081 - DNA, 21 bp, synthetic construct
  source 1..21: mol_type = other DNA
aatctcggctggctaaaaccc

SEQ ID NO: 7082 - DNA, 21 bp, synthetic construct
  source 1..21: mol_type = other DNA
tacagcaaaaccggcgataat

SEQ ID NO: 7083 - DNA, 21 bp, synthetic construct
  source 1..21: mol_type = other DNA
gattggtcgacccgagagtgg

SEQ ID NO: 7084 - DNA, 21 bp, synthetic construct
  source 1..21: mol_type = other DNA
caatataccaggttgcaatta

SEQ ID NO: 7085 - DNA, 21 bp, synthetic construct
  source 1..21: mol_type = other DNA
ttcagcaagataggcttcaat

SEQ ID NO: 7086 - DNA, 21 bp, synthetic construct
  source 1..21: mol_type = other DNA
ttcaaggtgtgggacggggga

SEQ ID NO: 7087 - DNA, 21 bp, synthetic construct
  source 1..21: mol_type = other DNA
aactatgttaaaagcacatgt

SEQ ID NO: 7088 - DNA, 21 bp, synthetic construct
  source 1..21: mol_type = other DNA
atgcactgggacgcactccat

SEQ ID NO: 7089 - DNA, 21 bp, synthetic construct
  source 1..21: mol_type = other DNA
tattcgaaactcggtgggaac

SEQ ID NO: 7090 - DNA, 21 bp, synthetic construct
  source 1..21: mol_type = other DNA
ctttttaggtctggccctaat

SEQ ID NO: 7091 - DNA, 21 bp, synthetic construct
  source 1..21: mol_type = other DNA
aacaaaaattgggtaatagga

SEQ ID NO: 7092 - DNA, 21 bp, synthetic construct
  source 1..21: mol_type = other DNA
ggcctctgcccatcgactaag

SEQ ID NO: 7093 - DNA, 21 bp, synthetic construct
  source 1..21: mol_type = other DNA
ctacctatctactcgttaacc

SEQ ID NO: 7094 - DNA, 21 bp, synthetic construct
  source 1..21: mol_type = other DNA
gagatggagtcctttaattgg

SEQ ID NO: 7095 - DNA, 21 bp, synthetic construct
  source 1..21: mol_type = other DNA
cgtgccaagataaactggcct

SEQ ID NO: 7096 - DNA, 21 bp, synthetic construct
  source 1..21: mol_type = other DNA
tcttgtgagatcaagcatatc

SEQ ID NO: 7097 - DNA, 21 bp, synthetic construct
  source 1..21: mol_type = other DNA
ttatggaggacagggattaac

SEQ ID NO: 7098 - DNA, 21 bp, synthetic construct
  source 1..21: mol_type = other DNA
atgtgttcgaactatggtagc

SEQ ID NO: 7099 - DNA, 21 bp, synthetic construct
  source 1..21: mol_type = other DNA
atctggataaaatcccagacc

SEQ ID NO: 7100 - DNA, 21 bp, synthetic construct
  source 1..21: mol_type = other DNA
aagacctacgacgcgttcgtc

SEQ ID NO: 7101 - DNA, 21 bp, synthetic construct
  source 1..21: mol_type = other DNA
agtaatggaagactgaattgg

SEQ ID NO: 7102 - DNA, 21 bp, synthetic construct
  source 1..21: mol_type = other DNA
tatgtgaagtcgagtaacaac

SEQ ID NO: 7103 - DNA, 21 bp, synthetic construct
  source 1..21: mol_type = other DNA
aacaccatgtggttaaatccg

SEQ ID NO: 7104 - DNA, 21 bp, synthetic construct
  source 1..21: mol_type = other DNA
aacacgtataggtgcgacggc

SEQ ID NO: 7105 - DNA, 21 bp, synthetic construct
  source 1..21: mol_type = other DNA
tctacgtgtaatatgcaggca

SEQ ID NO: 7106 - DNA, 21 bp, synthetic construct
  source 1..21: mol_type = other DNA
tatgctcggggcaacgacaac

SEQ ID NO: 7107 - DNA, 21 bp, synthetic construct
  source 1..21: mol_type = other DNA
caatatcacatatactcaggt

SEQ ID NO: 7108 - DNA, 21 bp, synthetic construct
  source 1..21: mol_type = other DNA
cgaatgtcagcgtcaaattgg

SEQ ID NO: 7109 - DNA, 21 bp, synthetic construct
  source 1..21: mol_type = other DNA
tattcccgactctccgcgata

SEQ ID NO: 7110 - DNA, 21 bp, synthetic construct
  source 1..21: mol_type = other DNA
tatgggtgccaatccggcttt

SEQ ID NO: 7111 - DNA, 21 bp, synthetic construct
  source 1..21: mol_type = other DNA
tggatgaatatcaacgactgc

SEQ ID NO: 7112 - DNA, 21 bp, synthetic construct
  source 1..21: mol_type = other DNA
tatgctcgcatgggtattaac

SEQ ID NO: 7113 - DNA, 21 bp, synthetic construct
  source 1..21: mol_type = other DNA
tactttagtggacagatttgt

SEQ ID NO: 7114 - DNA, 21 bp, synthetic construct
  source 1..21: mol_type = other DNA
gcgtatgtgtcgtcaacatgc

SEQ ID NO: 7115 - DNA, 21 bp, synthetic construct
  source 1..21: mol_type = other DNA
tatcacaaggggaataacaat

SEQ ID NO: 7116 - DNA, 21 bp, synthetic construct
  source 1..21: mol_type = other DNA
ggatgttcgggcttcaaaact

SEQ ID NO: 7117 - DNA, 21 bp, synthetic construct
  source 1..21: mol_type = other DNA
ggttgccaggcggggatgaaa

SEQ ID NO: 7118 - DNA, 21 bp, synthetic construct
  source 1..21: mol_type = other DNA
agttgcaggctcgtcgatgtg

SEQ ID NO: 7119 - DNA, 21 bp, synthetic construct
  source 1..21: mol_type = other DNA
tgcgattacataagctatgct

SEQ ID NO: 7120 - DNA, 21 bp, synthetic construct
  source 1..21: mol_type = other DNA
tactccaagtctggcgataat

SEQ ID NO: 7121 - DNA, 21 bp, synthetic construct
  source 1..21: mol_type = other DNA
aatcattgggtgcgtgatcat

SEQ ID NO: 7122 - DNA, 21 bp, synthetic construct
  source 1..21: mol_type = other DNA
gtaatgagtaattggaaccgc

SEQ ID NO: 7123 - DNA, 21 bp, synthetic construct
  source 1..21: mol_type = other DNA
tcgggctgctctcgaactgac

SEQ ID NO: 7124 - DNA, 21 bp, synthetic construct
  source 1..21: mol_type = other DNA
tatcacgttgcggaccgttgc

SEQ ID NO: 7125 - DNA, 21 bp, synthetic construct
  source 1..21: mol_type = other DNA
cgggaccacgattgctacgca

SEQ ID NO: 7126 - DNA, 21 bp, synthetic construct
  source 1..21: mol_type = other DNA
tccccaaacggctgtaatggt

SEQ ID NO: 7127 - DNA, 21 bp, synthetic construct
  source 1..21: mol_type = other DNA
ttgcatcgggacggtatcaat

SEQ ID NO: 7128 - DNA, 21 bp, synthetic construct
  source 1..21: mol_type = other DNA
gcctgtgaaaggaaaatgaca

SEQ ID NO: 7129 - DNA, 21 bp, synthetic construct
  source 1..21: mol_type = other DNA
atctaccttaagaagcaagtc

SEQ ID NO: 7130 - DNA, 21 bp, synthetic construct
  source 1..21: mol_type = other DNA
aagcacagaacaatcgtgaac

SEQ ID NO: 7131 - DNA, 21 bp, synthetic construct
  source 1..21: mol_type = other DNA
aatagctgcaatatgactagg

SEQ ID NO: 7132 - DNA, 21 bp, synthetic construct
  source 1..21: mol_type = other DNA
tgtgacaaggaagcctaccag

SEQ ID NO: 7133 - DNA, 21 bp, synthetic construct
  source 1..21: mol_type = other DNA
tatagcaagaatgggatgaac

SEQ ID NO: 7134 - DNA, 21 bp, synthetic construct
  source 1..21: mol_type = other DNA
cgggactggattcagttcgag

SEQ ID NO: 7135 - DNA, 21 bp, synthetic construct
  source 1..21: mol_type = other DNA
cacgagacgtgcgtgcgtgga

SEQ ID NO: 7136 - DNA, 21 bp, synthetic construct
  source 1..21: mol_type = other DNA
gataaatatctgaacacatgt

SEQ ID NO: 7137 - DNA, 21 bp, synthetic construct
  source 1..21: mol_type = other DNA
tatcttaagtctgaacgtaat

SEQ ID NO: 7138 - DNA, 21 bp, synthetic construct
  source 1..21: mol_type = other DNA
gagtggtgtaacaccgataag

SEQ ID NO: 7139 - DNA, 21 bp, synthetic construct
  source 1..21: mol_type = other DNA
gtgttctcgcgttccatgtgc

SEQ ID NO: 7140 - DNA, 21 bp, synthetic construct
  source 1..21: mol_type = other DNA
acgcaagtgtattccaattgg

SEQ ID NO: 7141 - DNA, 21 bp, synthetic construct
  source 1..21: mol_type = other DNA
agaactcaacctcccgctcgt

SEQ ID NO: 7142 - DNA, 21 bp, synthetic construct
  source 1..21: mol_type = other DNA
ttggcacggtcagcagtcaat

SEQ ID NO: 7143 - DNA, 21 bp, synthetic construct
  source 1..21: mol_type = other DNA
tacagccgtatcaataccaat

SEQ ID NO: 7144 - DNA, 21 bp, synthetic construct
  source 1..21: mol_type = other DNA
gcgagaggacaattgccctgg

SEQ ID NO: 7145 - DNA, 21 bp, synthetic construct
  source 1..21: mol_type = other DNA
gagggatatcatgactgggcg

SEQ ID NO: 7146 - DNA, 21 bp, synthetic construct
  source 1..21: mol_type = other DNA
gacaatacattttctaattgg

SEQ ID NO: 7147 - DNA, 21 bp, synthetic construct
  source 1..21: mol_type = other DNA
gactggtctacgagggaatgg

SEQ ID NO: 7148 - DNA, 21 bp, synthetic construct
  source 1..21: mol_type = other DNA
ataatgatgattacccgtggt

SEQ ID NO: 7149 - DNA, 21 bp, synthetic construct
  source 1..21: mol_type = other DNA
ggttatcgaagtctttatcct

SEQ ID NO: 7150 - DNA, 21 bp, synthetic construct
  source 1..21: mol_type = other DNA
tggcatcgtcttagtgtgaat

SEQ ID NO: 7151 - DNA, 21 bp, synthetic construct
  source 1..21: mol_type = other DNA
aaactatgccctaacttaata

SEQ ID NO: 7152 - DNA, 21 bp, synthetic construct
  source 1..21: mol_type = other DNA
cgttatgaagcctctaactgg

SEQ ID NO: 7153 - DNA, 21 bp, synthetic construct
  source 1..21: mol_type = other DNA
gtcatgtgcgatgcttatccc

SEQ ID NO: 7154 - DNA, 21 bp, synthetic construct
  source 1..21: mol_type = other DNA
tcccgccgattttatgaggaa

SEQ ID NO: 7155 - DNA, 21 bp, synthetic construct
  source 1..21: mol_type = other DNA
aaaacatatgatgcatttgtg

SEQ ID NO: 7156 - DNA, 21 bp, synthetic construct
  source 1..21: mol_type = other DNA
gaacgcggatacctcgattat

SEQ ID NO: 7157 - DNA, 21 bp, synthetic construct
  source 1..21: mol_type = other DNA
tacagcagaactaataccaat

SEQ ID NO: 7158 - DNA, 21 bp, synthetic construct
  source 1..21: mol_type = other DNA
agtgagtactcatcgtggccc

SEQ ID NO: 7159 - DNA, 21 bp, synthetic construct
  source 1..21: mol_type = other DNA
cgtgaagtgctcaagtggtct

SEQ ID NO: 7160 - DNA, 21 bp, synthetic construct
  source 1..21: mol_type = other DNA
gcttgcgagcgtaagatgact

SEQ ID NO: 7161 - DNA, 21 bp, synthetic construct
  source 1..21: mol_type = other DNA
ctttgttatccgtgcaactcc

SEQ ID NO: 7162 - DNA, 21 bp, synthetic construct
  source 1..21: mol_type = other DNA
caatacgtgcgtagctcgatc

SEQ ID NO: 7163 - DNA, 21 bp, synthetic construct
  source 1..21: mol_type = other DNA
atctcaaataagcactggtca

SEQ ID NO: 7164 - DNA, 21 bp, synthetic construct
  source 1..21: mol_type = other DNA
ggccctggatacgtcaattgg

SEQ ID NO: 7165 - DNA, 21 bp, synthetic construct
  source 1..21: mol_type = other DNA
gggtcctcaacctccatttgg

SEQ ID NO: 7166 - DNA, 21 bp, synthetic construct
  source 1..21: mol_type = other DNA
ctatgcagaccgtgctcggaa

SEQ ID NO: 7167 - DNA, 21 bp, synthetic construct
  source 1..21: mol_type = other DNA
tgttatgggacgtcgatgtat

SEQ ID NO: 7168 - DNA, 21 bp, synthetic construct
  source 1..21: mol_type = other DNA
ccgggaagtttgagatacggt

SEQ ID NO: 7169 - DNA, 21 bp, synthetic construct
  source 1..21: mol_type = other DNA
ctgcaccgcgatggaattaac

SEQ ID NO: 7170 - DNA, 21 bp, synthetic construct
  source 1..21: mol_type = other DNA
ctcgcgcgtagcgcggttaac

SEQ ID NO: 7171 - DNA, 21 bp, synthetic construct
  source 1..21: mol_type = other DNA
tatgcacgcggtgggcagaac

SEQ ID NO: 7172 - DNA, 21 bp, synthetic construct
  source 1..21: mol_type = other DNA
aagatacccatcaactggagt

SEQ ID NO: 7173 - DNA, 21 bp, synthetic construct
  source 1..21: mol_type = other DNA
ccaagaccgaacgtctatagc

SEQ ID NO: 7174 - DNA, 21 bp, synthetic construct
  source 1..21: mol_type = other DNA
tactcacgtctatcagctatc

SEQ ID NO: 7175 - DNA, 21 bp, synthetic construct
  source 1..21: mol_type = other DNA
catagtcattatactaattat

SEQ ID NO: 7176 - DNA, 21 bp, synthetic construct
  source 1..21: mol_type = other DNA
cactggaccgaatataatagt

SEQ ID NO: 7177 - DNA, 21 bp, synthetic construct
  source 1..21: mol_type = other DNA
atgaccacgtgcgaaaacgtg

SEQ ID NO: 7178 - DNA, 21 bp, synthetic construct
  source 1..21: mol_type = other DNA
tgcacgaacaatgggaataga

SEQ ID NO: 7179 - DNA, 21 bp, synthetic construct
  source 1..21: mol_type = other DNA
aaaaacaattgtacattcggc

SEQ ID NO: 7180 - DNA, 21 bp, synthetic construct
  source 1..21: mol_type = other DNA
tggcccccgcctgttaattcc

SEQ ID NO: 7181 - DNA, 21 bp, synthetic construct
  source 1..21: mol_type = other DNA
atgtacagccaacatgagtgt

SEQ ID NO: 7182 - DNA, 21 bp, synthetic construct
  source 1..21: mol_type = other DNA
aatacgtgggcgcgagattat

SEQ ID NO: 7183 - DNA, 21 bp, synthetic construct
  source 1..21: mol_type = other DNA
agactgtttaatactatccaa

SEQ ID NO: 7184 - DNA, 21 bp, synthetic construct
  source 1..21: mol_type = other DNA
atctctgtttgcaagcagcaa

SEQ ID NO: 7185 - DNA, 21 bp, synthetic construct
  source 1..21: mol_type = other DNA
agaggtgggttctcaccattc

SEQ ID NO: 7186 - DNA, 21 bp, synthetic construct
  source 1..21: mol_type = other DNA
tgcacgggtaacagttcgaag

SEQ ID NO: 7187 - DNA, 21 bp, synthetic construct
  source 1..21: mol_type = other DNA
tcgcgactaatgtttgtcgga

SEQ ID NO: 7188 - DNA, 21 bp, synthetic construct
  source 1..21: mol_type = other DNA
tacagtaaatcaaattgcaat

SEQ ID NO: 7189 - DNA, 21 bp, synthetic construct
  source 1..21: mol_type = other DNA
cggtgtgacaagattctcaca

SEQ ID NO: 7190 - DNA, 21 bp, synthetic construct
  source 1..21: mol_type = other DNA
aaggacatgttacgttgggac

SEQ ID NO: 7191 - DNA, 21 bp, synthetic construct
  source 1..21: mol_type = other DNA
ctttggaaaaccggtcacaat

SEQ ID NO: 7192 - DNA, 21 bp, synthetic construct
  source 1..21: mol_type = other DNA
tcgcgatacacatactctgag

SEQ ID NO: 7193 - DNA, 21 bp, synthetic construct
  source 1..21: mol_type = other DNA
tgtaatccaagtgtgtatagg

SEQ ID NO: 7194 - DNA, 21 bp, synthetic construct
  source 1..21: mol_type = other DNA
tttaattattcgacgctaccg

SEQ ID NO: 7195 - DNA, 21 bp, synthetic construct
  source 1..21: mol_type = other DNA
aagccatacatcctgcacaag

SEQ ID NO: 7196 - DNA, 21 bp, synthetic construct
  source 1..21: mol_type = other DNA
aaagctatgtgtggatcgggc

SEQ ID NO: 7197 - DNA, 21 bp, synthetic construct
  source 1..21: mol_type = other DNA
ggatgtcaagccggaatgaag

SEQ ID NO: 7198 - DNA, 21 bp, synthetic construct
  source 1..21: mol_type = other DNA
gctcgtgggcagttaccgtgg

SEQ ID NO: 7199 - DNA, 21 bp, synthetic construct
  source 1..21: mol_type = other DNA
ctagactgcgaacggtatcag

SEQ ID NO: 7200 - DNA, 21 bp, synthetic construct
  source 1..21: mol_type = other DNA
tactttgaaaaaatttgcgag

SEQ ID NO: 7201 - DNA, 21 bp, synthetic construct
  source 1..21: mol_type = other DNA
aataggaaatcgcagtcggtc

SEQ ID NO: 7202 - DNA, 21 bp, synthetic construct
  source 1..21: mol_type = other DNA
aagtatttcaataccttcccc

SEQ ID NO: 7203 - DNA, 21 bp, synthetic construct
  source 1..21: mol_type = other DNA
taccataaaatgcaatgcaat

SEQ ID NO: 7204 - DNA, 21 bp, synthetic construct
  source 1..21: mol_type = other DNA
atacataggttcacgacaaat

SEQ ID NO: 7205 - DNA, 21 bp, synthetic construct
  source 1..21: mol_type = other DNA
acttgccaacgcctaagcgga

SEQ ID NO: 7206 - DNA, 21 bp, synthetic construct
  source 1..21: mol_type = other DNA
agtagattaatgttcgtaggc

SEQ ID NO: 7207 - DNA, 21 bp, synthetic construct
  source 1..21: mol_type = other DNA
cgtaccgattgtgtctacccg

SEQ ID NO: 7208 - DNA, 21 bp, synthetic construct
  source 1..21: mol_type = other DNA
tatgcaaggcaaaacttcaat

SEQ ID NO: 7209 - DNA, 21 bp, synthetic construct
  source 1..21: mol_type = other DNA
aactacattaaagctaattgc

SEQ ID NO: 7210 - DNA, 21 bp, synthetic construct
  source 1..21: mol_type = other DNA
cgcaatcaggagtgtgagagt

SEQ ID NO: 7211 - DNA, 21 bp, synthetic construct
  source 1..21: mol_type = other DNA
caaaacacgaaatgggcgtgt

SEQ ID NO: 7212 - DNA, 21 bp, synthetic construct
  source 1..21: mol_type = other DNA
cctcgtcccaatgtatactcg

SEQ ID NO: 7213 - DNA, 21 bp, synthetic construct
  source 1..21: mol_type = other DNA
tactacacaggtcgtactaat

SEQ ID NO: 7214 - DNA, 21 bp, synthetic construct
  source 1..21: mol_type = other DNA
aattgcaaaccatgttttgac

SEQ ID NO: 7215 - DNA, 21 bp, synthetic construct
  source 1..21: mol_type = other DNA
ttctcaaagatgaatataaac

SEQ ID NO: 7216 - DNA, 21 bp, synthetic construct
  source 1..21: mol_type = other DNA
tattcaaagatgaatcagaac

SEQ ID NO: 7217 - DNA, 21 bp, synthetic construct
  source 1..21: mol_type = other DNA
tacgccaaaagtaattacaat

SEQ ID NO: 7218 - DNA, 21 bp, synthetic construct
  source 1..21: mol_type = other DNA
catgaaacatgtgtcagaggg

SEQ ID NO: 7219 - DNA, 21 bp, synthetic construct
  source 1..21: mol_type = other DNA
gtttactgggttggagaagtg

SEQ ID NO: 7220 - DNA, 21 bp, synthetic construct
  source 1..21: mol_type = other DNA
gtgagtgcatacagaggagct

SEQ ID NO: 7221 - DNA, 21 bp, synthetic construct
  source 1..21: mol_type = other DNA
tattctaaatcaggtgacaac

SEQ ID NO: 7222 - DNA, 21 bp, synthetic construct
  source 1..21: mol_type = other DNA
acaaatgaattttatggctgg

SEQ ID NO: 7223 - DNA, 21 bp, synthetic construct
  source 1..21: mol_type = other DNA
tgcttgagaacggatattgcc

SEQ ID NO: 7224 - DNA, 21 bp, synthetic construct
  source 1..21: mol_type = other DNA
ccttgcggaccgtgcacgtac

SEQ ID NO: 7225 - DNA, 21 bp, synthetic construct
  source 1..21: mol_type = other DNA
gggcgcatggcggtaagggta

SEQ ID NO: 7226 - DNA, 21 bp, synthetic construct
  source 1..21: mol_type = other DNA
cgggtttccgattactcgtgg

SEQ ID NO: 7227 - DNA, 21 bp, synthetic construct
  source 1..21: mol_type = other DNA
cacaatggtttctggaccggt

SEQ ID NO: 7228 - DNA, 21 bp, synthetic construct
  source 1..21: mol_type = other DNA
atggagatagaccccattttt

SEQ ID NO: 7229 - DNA, 21 bp, synthetic construct
  source 1..21: mol_type = other DNA
aattacgtcaagtcgacgtgc

SEQ ID NO: 7230 - DNA, 21 bp, synthetic construct
  source 1..21: mol_type = other DNA
tacttcagcggaaaaacgctg

SEQ ID NO: 7231 - DNA, 21 bp, synthetic construct
  source 1..21: mol_type = other DNA
tatagtaagacgggagacaac

SEQ ID NO: 7232 - DNA, 21 bp, synthetic construct
  source 1..21: mol_type = other DNA
aaatacgaccacctcggatcc

SEQ ID NO: 7233 - DNA, 21 bp, synthetic construct
  source 1..21: mol_type = other DNA
ggtaatacggggatctgctac

SEQ ID NO: 7234 - DNA, 21 bp, synthetic construct
  source 1..21: mol_type = other DNA
gacaagtacttgaatacctgc

SEQ ID NO: 7235 - DNA, 21 bp, synthetic construct
  source 1..21: mol_type = other DNA
ttgtgtcgcccgtgtagggag

SEQ ID NO: 7236 - DNA, 21 bp, synthetic construct
  source 1..21: mol_type = other DNA
tggcacagattatccgtaaac

SEQ ID NO: 7237 - DNA, 21 bp, synthetic construct
  source 1..21: mol_type = other DNA
gctggagtggcaacatatagc

SEQ ID NO: 7238 - DNA, 21 bp, synthetic construct
  source 1..21: mol_type = other DNA
agcaacatgtacgactcgtac

SEQ ID NO: 7239 - DNA, 21 bp, synthetic construct
  source 1..21: mol_type = other DNA
ttggcgtataatgtatcgaca

SEQ ID NO: 7240 - DNA, 21 bp, synthetic construct
  source 1..21: mol_type = other DNA
tatagcggccaagggtgcgta

SEQ ID NO: 7241 - DNA, 21 bp, synthetic construct
  source 1..21: mol_type = other DNA
aaatccccgtatgctacgttt

SEQ ID NO: 7242 - DNA, 21 bp, synthetic construct
  source 1..21: mol_type = other DNA
atttgtcgtggctacaccagt

SEQ ID NO: 7243 - DNA, 21 bp, synthetic construct
  source 1..21: mol_type = other DNA
tgtaacggcttttattgtgaa

SEQ ID NO: 7244 - DNA, 21 bp, synthetic construct
  source 1..21: mol_type = other DNA
tgcaatggcgaggcggcatct

SEQ ID NO: 7245 - DNA, 21 bp, synthetic construct
  source 1..21: mol_type = other DNA
ctagcatacaacgtttccacg

SEQ ID NO: 7246 - DNA, 21 bp, synthetic construct
  source 1..21: mol_type = other DNA
aacagttgtaacatgacgcgt

SEQ ID NO: 7247 - DNA, 21 bp, synthetic construct
  source 1..21: mol_type = other DNA
caaagcgtttgcaccacaaaa

SEQ ID NO: 7248 - DNA, 21 bp, synthetic construct
  source 1..21: mol_type = other DNA
gcaggtgtagccacgtactca

SEQ ID NO: 7249 - DNA, 21 bp, synthetic construct
  source 1..21: mol_type = other DNA
cagacggactgtgtaaaccaa

SEQ ID NO: 7250 - DNA, 21 bp, synthetic construct
  source 1..21: mol_type = other DNA
tgcgtcgcgacaaaagatcgt

SEQ ID NO: 7251 - DNA, 21 bp, synthetic construct
  source 1..21: mol_type = other DNA
ttctcgaaaatgaattacaac

SEQ ID NO: 7252 - DNA, 21 bp, synthetic construct
  source 1..21: mol_type = other DNA
acaatggtagaatcctgtcga

SEQ ID NO: 7253 - DNA, 21 bp, synthetic construct
  source 1..21: mol_type = other DNA
acacatcaggactggtcgtct

SEQ ID NO: 7254 - DNA, 21 bp, synthetic construct
  source 1..21: mol_type = other DNA
tgcaataactcagggtattcg

SEQ ID NO: 7255 - DNA, 21 bp, synthetic construct
  source 1..21: mol_type = other DNA
tgcgatggaacaggtaggagg

SEQ ID NO: 7256 - DNA, 21 bp, synthetic construct
  source 1..21: mol_type = other DNA
cataaatgcggagatacccgt

SEQ ID NO: 7257 - DNA, 21 bp, synthetic construct
  source 1..21: mol_type = other DNA
tcgtgccgaatctcggaaaag

SEQ ID NO: 7258 - DNA, 21 bp, synthetic construct
  source 1..21: mol_type = other DNA
agcgcctgtaatgtgaagcat

SEQ ID NO: 7259 - DNA, 21 bp, synthetic construct
  source 1..21: mol_type = other DNA
tcagccgcccaagtttggccg

SEQ ID NO: 7260 - DNA, 21 bp, synthetic construct
  source 1..21: mol_type = other DNA
taccacagggctcaaatgaat

SEQ ID NO: 7261 - DNA, 21 bp, synthetic construct
  source 1..21: mol_type = other DNA
tggtgccgagaatgcatgaac

SEQ ID NO: 7262 - DNA, 21 bp, synthetic construct
  source 1..21: mol_type = other DNA
tcaagatatacttattcagaa

SEQ ID NO: 7263 - DNA, 21 bp, synthetic construct
  source 1..21: mol_type = other DNA
cataataagtactcgaattat

SEQ ID NO: 7264 - DNA, 21 bp, synthetic construct
  source 1..21: mol_type = other DNA
acttacgctagcagcaactgg

SEQ ID NO: 7265 - DNA, 21 bp, synthetic construct
  source 1..21: mol_type = other DNA
tatgtccgctcaggcgattgt

SEQ ID NO: 7266 - DNA, 21 bp, synthetic construct
  source 1..21: mol_type = other DNA
acacaatgtaaggaacattat

SEQ ID NO: 7267 - DNA, 21 bp, synthetic construct
  source 1..21: mol_type = other DNA
ttgtatataaaatccgcactt

SEQ ID NO: 7268 - DNA, 21 bp, synthetic construct
  source 1..21: mol_type = other DNA
acatatgcaagttctaattgg

SEQ ID NO: 7269 - DNA, 21 bp, synthetic construct
  source 1..21: mol_type = other DNA
aattcatccgcctgtcggaca

SEQ ID NO: 7270 - DNA, 21 bp, synthetic construct
  source 1..21: mol_type = other DNA
gctaagtcggtcttccagtct

SEQ ID NO: 7271 - DNA, 21 bp, synthetic construct
  source 1..21: mol_type = other DNA
aatactatgtggctcaaccct

SEQ ID NO: 7272 - DNA, 21 bp, synthetic construct
  source 1..21: mol_type = other DNA
aaagatatgcttaggtgggat

SEQ ID NO: 7273 - DNA, 21 bp, synthetic construct
  source 1..21: mol_type = other DNA
tatgccaagcaggggcacaac

SEQ ID NO: 7274 - DNA, 21 bp, synthetic construct
  source 1..21: mol_type = other DNA
tatgcccggggtggagtaaac

SEQ ID NO: 7275 - DNA, 21 bp, synthetic construct
  source 1..21: mol_type = other DNA
taccataaaggcaacaataac

SEQ ID NO: 7276 - DNA, 21 bp, synthetic construct
  source 1..21: mol_type = other DNA
cgtgttacccactgcacgggc

SEQ ID NO: 7277 - DNA, 21 bp, synthetic construct
  source 1..21: mol_type = other DNA
ggggaaacaaactggcgcttt

SEQ ID NO: 7278 - DNA, 21 bp, synthetic construct
  source 1..21: mol_type = other DNA
aagtatgatcatttaggttct

SEQ ID NO: 7279 - DNA, 21 bp, synthetic construct
  source 1..21: mol_type = other DNA
aatgggtggggctacggtccc

SEQ ID NO: 7280 - DNA, 21 bp, synthetic construct
  source 1..21: mol_type = other DNA
acaaacactatccgttggcct

SEQ ID NO: 7281 - DNA, 21 bp, synthetic construct
  source 1..21: mol_type = other DNA
gtgcgtggagcaacctgcgag

SEQ ID NO: 7282 - DNA, 21 bp, synthetic construct
  source 1..21: mol_type = other DNA
atccaccgaatgatggttaat

SEQ ID NO: 7283 - DNA, 21 bp, synthetic construct
  source 1..21: mol_type = other DNA
ctcgtacggggccttaactgg

SEQ ID NO: 7284 - DNA, 21 bp, synthetic construct
  source 1..21: mol_type = other DNA
tttgctcggtccggtatgaat

SEQ ID NO: 7285 - DNA, 21 bp, synthetic construct
  source 1..21: mol_type = other DNA
tatggggccggaacttggcac

SEQ ID NO: 7286 - DNA, 21 bp, synthetic construct
  source 1..21: mol_type = other DNA
ggcatgcgtatacgtgagaaa

SEQ ID NO: 7287 - DNA, 21 bp, synthetic construct
  source 1..21: mol_type = other DNA
tacgctcgacagaattttaac

SEQ ID NO: 7288 - DNA, 21 bp, synthetic construct
  source 1..21: mol_type = other DNA
tccggctggctgaccgaggtt

SEQ ID NO: 7289 - DNA, 21 bp, synthetic construct
  source 1..21: mol_type = other DNA
atacatcggatgatggtaaac

SEQ ID NO: 7290 - DNA, 21 bp, synthetic construct
  source 1..21: mol_type = other DNA
actagccgttttgatacttat

SEQ ID NO: 7291 - DNA, 21 bp, synthetic construct
  source 1..21: mol_type = other DNA
aaagtttacggttacaatccg

SEQ ID NO: 7292 - DNA, 21 bp, synthetic construct
  source 1..21: mol_type = other DNA
tattctcggataaacacgaac

SEQ ID NO: 7293 - DNA, 21 bp, synthetic construct
  source 1..21: mol_type = other DNA
cttcgaatgtgggacgaagcg

SEQ ID NO: 7294 - DNA, 21 bp, synthetic construct
  source 1..21: mol_type = other DNA
tgtggcgtagacaaatcaaga

SEQ ID NO: 7295 - DNA, 21 bp, synthetic construct
  source 1..21: mol_type = other DNA
acgtggaagggtcctccttgc

SEQ ID NO: 7296 - DNA, 21 bp, synthetic construct
  source 1..21: mol_type = other DNA
tcatattcgaatccgtggatt

SEQ ID NO: 7297 - DNA, 21 bp, synthetic construct
  source 1..21: mol_type = other DNA
tacgctcgacagaactacaac

SEQ ID NO: 7298 - DNA, 21 bp, synthetic construct
  source 1..21: mol_type = other DNA
tatcacattttagggaaaaat

SEQ ID NO: 7299 - DNA, 21 bp, synthetic construct
  source 1..21: mol_type = other DNA
ttctccaggatgggaccaaat

SEQ ID NO: 7300 - DNA, 21 bp, synthetic construct
  source 1..21: mol_type = other DNA
aagggaaattggtactccgaa

SEQ ID NO: 7301 - DNA, 21 bp, synthetic construct
  source 1..21: mol_type = other DNA
aataagaactgggttatcggt

SEQ ID NO: 7302 - DNA, 21 bp, synthetic construct
  source 1..21: mol_type = other DNA
tatgcgaagtcaaactataac

SEQ ID NO: 7303 - DNA, 21 bp, synthetic construct
  source 1..21: mol_type = other DNA
ttcggtctgtccgatcggtgg

SEQ ID NO: 7304 - DNA, 21 bp, synthetic construct
  source 1..21: mol_type = other DNA
gtttgttcgtcaaacctagtc

SEQ ID NO: 7305 - DNA, 21 bp, synthetic construct
  source 1..21: mol_type = other DNA
ataagcaacaaacattggtcg

SEQ ID NO: 7306 - DNA, 21 bp, synthetic construct
  source 1..21: mol_type = other DNA
ctcaggatgtgggatgaggcc

SEQ ID NO: 7307 - DNA, 21 bp, synthetic construct
  source 1..21: mol_type = other DNA
cggcacccaagtctcaacttc

SEQ ID NO: 7308 - DNA, 21 bp, synthetic construct
  source 1..21: mol_type = other DNA
tgccagagtgaggggcgaact

SEQ ID NO: 7309 - DNA, 21 bp, synthetic construct
  source 1..21: mol_type = other DNA
atttactacaaagggaatctt

SEQ ID NO: 7310 - DNA, 21 bp, synthetic construct
  source 1..21: mol_type = other DNA
aagcaaccggtgtggttagca

SEQ ID NO: 7311 - DNA, 21 bp, synthetic construct
  source 1..21: mol_type = other DNA
actatggtggagtcttgccgg

SEQ ID NO: 7312 - DNA, 21 bp, synthetic construct
  source 1..21: mol_type = other DNA
tactttactcggcaggttaac

SEQ ID NO: 7313 - DNA, 21 bp, synthetic construct
  source 1..21: mol_type = other DNA
tgcaacaaaacttcggtaact

SEQ ID NO: 7314 - DNA, 21 bp, synthetic construct
  source 1..21: mol_type = other DNA
tgtcgctggtcagattgttca

SEQ ID NO: 7315 - DNA, 21 bp, synthetic construct
  source 1..21: mol_type = other DNA
tacgcgcgatcagattgctgt

SEQ ID NO: 7316 - DNA, 21 bp, synthetic construct
  source 1..21: mol_type = other DNA
ggatcgacatattctcgtgcc

SEQ ID NO: 7317 - DNA, 21 bp, synthetic construct
  source 1..21: mol_type = other DNA
cgtggcaacgagtgctggtct

SEQ ID NO: 7318 - DNA, 21 bp, synthetic construct
  source 1..21: mol_type = other DNA
agttgcaagtcatcatacacc

SEQ ID NO: 7319 - DNA, 21 bp, synthetic construct
  source 1..21: mol_type = other DNA
ttacacaagagtacatgcgat

SEQ ID NO: 7320 - DNA, 21 bp, synthetic construct
  source 1..21: mol_type = other DNA
gtgtatagtcgcatcgatatt

SEQ ID NO: 7321 - DNA, 21 bp, synthetic construct
  source 1..21: mol_type = other DNA
cggattaaattcgatacctac

SEQ ID NO: 7322 - DNA, 21 bp, synthetic construct
  source 1..21: mol_type = other DNA
aaagggaactggtatagtgag

SEQ ID NO: 7323 - DNA, 21 bp, synthetic construct
  source 1..21: mol_type = other DNA
aacttaggatggcttaagcct

SEQ ID NO: 7324 - DNA, 21 bp, synthetic construct
  source 1..21: mol_type = other DNA
gtaaggtatacggatagtaaa

SEQ ID NO: 7325 - DNA, 21 bp, synthetic construct
  source 1..21: mol_type = other DNA
ctgtggagaaacgataaccaa

SEQ ID NO: 7326 - DNA, 21 bp, synthetic construct
  source 1..21: mol_type = other DNA
aagcatcacgatgttaattgc

SEQ ID NO: 7327 - DNA, 21 bp, synthetic construct
  source 1..21: mol_type = other DNA
gacatgccgaactggtcgtgg

SEQ ID NO: 7328 - DNA, 21 bp, synthetic construct
  source 1..21: mol_type = other DNA
aataaatcctgtagttctatg

SEQ ID NO: 7329 - DNA, 21 bp, synthetic construct
  source 1..21: mol_type = other DNA
atgagtcggtttgatatccac

SEQ ID NO: 7330 - DNA, 21 bp, synthetic construct
  source 1..21: mol_type = other DNA
ggtatgcgcattcgagaaaag

SEQ ID NO: 7331 - DNA, 21 bp, synthetic construct
  source 1..21: mol_type = other DNA
gggatagcaccgtgtggcagt

SEQ ID NO: 7332 - DNA, 21 bp, synthetic construct
  source 1..21: mol_type = other DNA
cgaaatgtgtacgacggttat

SEQ ID NO: 7333 - DNA, 21 bp, synthetic construct
  source 1..21: mol_type = other DNA
agccgttttgtatcatgggac

SEQ ID NO: 7334 - DNA, 21 bp, synthetic construct
  source 1..21: mol_type = other DNA
tacgctcgaggcggcgtcaat

SEQ ID NO: 7335 - DNA, 21 bp, synthetic construct
  source 1..21: mol_type = other DNA
aatcgaatcgacgcaaaatgc

SEQ ID NO: 7336 - DNA, 21 bp, synthetic construct
  source 1..21: mol_type = other DNA
accgggtgcatggccggcaaa

SEQ ID NO: 7337 - DNA, 21 bp, synthetic construct
  source 1..21: mol_type = other DNA
tcggcaccaatttacttcaac

SEQ ID NO: 7338 - DNA, 21 bp, synthetic construct
  source 1..21: mol_type = other DNA
gccagctgcaatgggctacgg

SEQ ID NO: 7339 - DNA, 21 bp, synthetic construct
  source 1..21: mol_type = other DNA
tacgcgaaaggaaacgcgaac

SEQ ID NO: 7340 - DNA, 21 bp, synthetic construct
  source 1..21: mol_type = other DNA
gtttcaactaacaacccttgc

SEQ ID NO: 7341 - DNA, 21 bp, synthetic construct
  source 1..21: mol_type = other DNA
cgggatatctggcgtgacgct

SEQ ID NO: 7342 - DNA, 21 bp, synthetic construct
  source 1..21: mol_type = other DNA
tccccctgttcgacgggtaat

SEQ ID NO: 7343 - DNA, 21 bp, synthetic construct
  source 1..21: mol_type = other DNA
aataattgcgcggacaatttc

SEQ ID NO: 7344 - DNA, 21 bp, synthetic construct
  source 1..21: mol_type = other DNA
tttagtcgtatgggccccaac

SEQ ID NO: 7345 - DNA, 21 bp, synthetic construct
  source 1..21: mol_type = other DNA
ggtggatggaatcacctagtt

SEQ ID NO: 7346 - DNA, 21 bp, synthetic construct
  source 1..21: mol_type = other DNA
aaaaatgtgggccgtaacaac

SEQ ID NO: 7347 - DNA, 21 bp, synthetic construct
  source 1..21: mol_type = other DNA
aatcgtgcacgcaacgtatca

SEQ ID NO: 7348 - DNA, 21 bp, synthetic construct
  source 1..21: mol_type = other DNA
gcaaactgtgacgtcgtagac

SEQ ID NO: 7349 - DNA, 21 bp, synthetic construct
  source 1..21: mol_type = other DNA
tcgtgcgattctggtaaagca

SEQ ID NO: 7350 - DNA, 21 bp, synthetic construct
  source 1..21: mol_type = other DNA
aagtggaggggagatgagtca

SEQ ID NO: 7351 - DNA, 21 bp, synthetic construct
  source 1..21: mol_type = other DNA
atttatggaagagtgattaac

SEQ ID NO: 7352 - DNA, 21 bp, synthetic construct
  source 1..21: mol_type = other DNA
tatgctcggcagaatgcaaat

SEQ ID NO: 7353 - DNA, 21 bp, synthetic construct
  source 1..21: mol_type = other DNA
atgttagagtactacaataac

SEQ ID NO: 7354 - DNA, 21 bp, synthetic construct
  source 1..21: mol_type = other DNA
tctcaaaatgcgtacgctatg

SEQ ID NO: 7355 - DNA, 21 bp, synthetic construct
  source 1..21: mol_type = other DNA
tctctgtgcccgagactttcg

SEQ ID NO: 7356 - DNA, 21 bp, synthetic construct
  source 1..21: mol_type = other DNA
taccttaattgcatgaaaccc

SEQ ID NO: 7357 - DNA, 21 bp, synthetic construct
  source 1..21: mol_type = other DNA
ggcatgataaagccaacccgg

SEQ ID NO: 7358 - DNA, 21 bp, synthetic construct
  source 1..21: mol_type = other DNA
aggacttatgatacctatata

SEQ ID NO: 7359 - DNA, 21 bp, synthetic construct
  source 1..21: mol_type = other DNA
tactcccgtgttgatgatcgc

SEQ ID NO: 7360 - DNA, 21 bp, synthetic construct
  source 1..21: mol_type = other DNA
gagtggatgagacccggacaa

SEQ ID NO: 7361 - DNA, 21 bp, synthetic construct
  source 1..21: mol_type = other DNA
agcaactggcgaacagacctt

SEQ ID NO: 7362 - DNA, 21 bp, synthetic construct
  source 1..21: mol_type = other DNA
gagcatatgtggcacactgag

SEQ ID NO: 7363 - DNA, 21 bp, synthetic construct
  source 1..21: mol_type = other DNA
tgcgtgtatgcaataggctcc

SEQ ID NO: 7364 - DNA, 21 bp, synthetic construct
  source 1..21: mol_type = other DNA
tccatatgtgccaacggtgaa

SEQ ID NO: 7365 - DNA, 21 bp, synthetic construct
  source 1..21: mol_type = other DNA
aaccctcatacttgcaataac

SEQ ID NO: 7366 - DNA, 21 bp, synthetic construct
  source 1..21: mol_type = other DNA
gacaggccgatatattactcg

SEQ ID NO: 7367 - DNA, 21 bp, synthetic construct
  source 1..21: mol_type = other DNA
gtatgctcatcgaatttggtg

SEQ ID NO: 7368 - DNA, 21 bp, synthetic construct
  source 1..21: mol_type = other DNA
aacactcaatttacgtgtgtc

SEQ ID NO: 7369 - DNA, 21 bp, synthetic construct
  source 1..21: mol_type = other DNA
gaacggaatagctgtatgcat

SEQ ID NO: 7370 - DNA, 21 bp, synthetic construct
  source 1..21: mol_type = other DNA
cagaataccaagtgggcttgc

SEQ ID NO: 7371 - DNA, 21 bp, synthetic construct
  source 1..21: mol_type = other DNA
acgtacactcggctagtaaat

SEQ ID NO: 7372 - DNA, 21 bp, synthetic construct
  source 1..21: mol_type = other DNA
atagtcggagaagcttggccg

SEQ ID NO: 7373 - DNA, 21 bp, synthetic construct
  source 1..21: mol_type = other DNA
agggtgagcgactattcctgg

SEQ ID NO: 7374 - DNA, 21 bp, synthetic construct
  source 1..21: mol_type = other DNA
attcaccgatttaccactaac

SEQ ID NO: 7375 - DNA, 21 bp, synthetic construct
  source 1..21: mol_type = other DNA
ctctcaaaattgtcttgtaac

SEQ ID NO: 7376 - DNA, 21 bp, synthetic construct
  source 1..21: mol_type = other DNA
tattcgaggaccaacacaaac

SEQ ID NO: 7377 - DNA, 21 bp, synthetic construct
  source 1..21: mol_type = other DNA
tgcgtaaatctgattcgtaat

SEQ ID NO: 7378 - DNA, 21 bp, synthetic construct
  source 1..21: mol_type = other DNA
tggatattccagtcccatacc

SEQ ID NO: 7379 - DNA, 21 bp, synthetic construct
  source 1..21: mol_type = other DNA
agaaaacccgaggctacccgg

SEQ ID NO: 7380 - DNA, 21 bp, synthetic construct
  source 1..21: mol_type = other DNA
gtatattgggtcggcgaggtc

SEQ ID NO: 7381 - DNA, 21 bp, synthetic construct
  source 1..21: mol_type = other DNA
aacaagtcatgctcttcgatg

SEQ ID NO: 7382 - DNA, 21 bp, synthetic construct
  source 1..21: mol_type = other DNA
tataggccatgtaatgcttca

SEQ ID NO: 7383 - DNA, 21 bp, synthetic construct
  source 1..21: mol_type = other DNA
ttcgtgtgcgatccttcaaag

SEQ ID NO: 7384 - DNA, 21 bp, synthetic construct
  source 1..21: mol_type = other DNA
cgcaccccaaattacaattat

SEQ ID NO: 7385 - DNA, 21 bp, synthetic construct
  source 1..21: mol_type = other DNA
aattatatcaaggcgaactgt

SEQ ID NO: 7386 - DNA, 21 bp, synthetic construct
  source 1..21: mol_type = other DNA
tacacccgtttgagtatgaac

SEQ ID NO: 7387 - DNA, 21 bp, synthetic construct
  source 1..21: mol_type = other DNA
gtccccaccagacaatggccg

SEQ ID NO: 7388 - DNA, 21 bp, synthetic construct
  source 1..21: mol_type = other DNA
ttctctatccgccttggtacc

SEQ ID NO: 7389 - DNA, 21 bp, synthetic construct
  source 1..21: mol_type = other DNA
tgtgtttacgcgattggtagt

SEQ ID NO: 7390 - DNA, 21 bp, synthetic construct
  source 1..21: mol_type = other DNA
tgtaagtggatccgtgaggga

SEQ ID NO: 7391 - DNA, 21 bp, synthetic construct
  source 1..21: mol_type = other DNA
ctctctagaatccagaccaat

SEQ ID NO: 7392 - DNA, 21 bp, synthetic construct
  source 1..21: mol_type = other DNA
ggctgtaatcgctctaccgcg

SEQ ID NO: 7393 - DNA, 21 bp, synthetic construct
  source 1..21: mol_type = other DNA
cggacgcccgacagttactgt

SEQ ID NO: 7394 - DNA, 21 bp, synthetic construct
  source 1..21: mol_type = other DNA
atgtgctctatgaggaacgcg

SEQ ID NO: 7395 - DNA, 21 bp, synthetic construct
  source 1..21: mol_type = other DNA
tcctacatatatgatggcgac

SEQ ID NO: 7396 - DNA, 21 bp, synthetic construct
  source 1..21: mol_type = other DNA
tacagccggcaaggcggaaac

SEQ ID NO: 7397 - DNA, 21 bp, synthetic construct
  source 1..21: mol_type = other DNA
actacgaggtgggcaggccct

SEQ ID NO: 7398 - DNA, 21 bp, synthetic construct
  source 1..21: mol_type = other DNA
gctatggggtctctttggccg

SEQ ID NO: 7399 - DNA, 21 bp, synthetic construct
  source 1..21: mol_type = other DNA
agctggacttatgaagagtgc

SEQ ID NO: 7400 - DNA, 21 bp, synthetic construct
  source 1..21: mol_type = other DNA
tacctgaaatcagagcgcaac

SEQ ID NO: 7401 - DNA, 21 bp, synthetic construct
  source 1..21: mol_type = other DNA
ggttttattaccgtatatccg

SEQ ID NO: 7402 - DNA, 21 bp, synthetic construct
  source 1..21: mol_type = other DNA
tcatctaaatactccccgtgg

SEQ ID NO: 7403 - DNA, 21 bp, synthetic construct
  source 1..21: mol_type = other DNA
caatattataattccgcatca

SEQ ID NO: 7404 - DNA, 21 bp, synthetic construct
  source 1..21: mol_type = other DNA
tataaggtccttgattggact

SEQ ID NO: 7405 - DNA, 21 bp, synthetic construct
  source 1..21: mol_type = other DNA
cgctatgactggccgcataac

SEQ ID NO: 7406 - DNA, 21 bp, synthetic construct
  source 1..21: mol_type = other DNA
aaagtatgttcagcaactgac

SEQ ID NO: 7407 - DNA, 21 bp, synthetic construct
  source 1..21: mol_type = other DNA
tgtaacggtgaagcagcctca

SEQ ID NO: 7408 - DNA, 21 bp, synthetic construct
  source 1..21: mol_type = other DNA
atggaatggcaggagaggtat

SEQ ID NO: 7409 - DNA, 21 bp, synthetic construct
  source 1..21: mol_type = other DNA
tgccgttggtccgactgcagc

SEQ ID NO: 7410 - DNA, 21 bp, synthetic construct
  source 1..21: mol_type = other DNA
aaagaaaacaacgctaaaaag

SEQ ID NO: 7411 - DNA, 21 bp, synthetic construct
  source 1..21: mol_type = other DNA
tacttttccggagtacccagt

SEQ ID NO: 7412 - DNA, 21 bp, synthetic construct
  source 1..21: mol_type = other DNA
tggatcccgggaatggggacg

SEQ ID NO: 7413 - DNA, 21 bp, synthetic construct
  source 1..21: mol_type = other DNA
ggcccgatcaactgtaagagc

SEQ ID NO: 7414 - DNA, 21 bp, synthetic construct
  source 1..21: mol_type = other DNA
tacagtggacagggttgtgtc

SEQ ID NO: 7415 - DNA, 21 bp, synthetic construct
  source 1..21: mol_type = other DNA
acgcaccaagattggtccagt

SEQ ID NO: 7416 - DNA, 21 bp, synthetic construct
  source 1..21: mol_type = other DNA
aaccgatggaataatcacggc

SEQ ID NO: 7417 - DNA, 21 bp, synthetic construct
  source 1..21: mol_type = other DNA
ggatggatgaaccgtattgcc

SEQ ID NO: 7418 - DNA, 21 bp, synthetic construct
  source 1..21: mol_type = other DNA
tggtccacaagggagatgatc

SEQ ID NO: 7419 - DNA, 21 bp, synthetic construct
  source 1..21: mol_type = other DNA
tattctaagtcgaactgtaac

SEQ ID NO: 7420 - DNA, 21 bp, synthetic construct
  source 1..21: mol_type = other DNA
aaggtatatggctataaccca

SEQ ID NO: 7421 - DNA, 21 bp, synthetic construct
  source 1..21: mol_type = other DNA
gggcctattaattgcaaatcg

SEQ ID NO: 7422 - DNA, 21 bp, synthetic construct
  source 1..21: mol_type = other DNA
tgtgcggttcaaggcgtgaaa

SEQ ID NO: 7423 - DNA, 21 bp, synthetic construct
  source 1..21: mol_type = other DNA
tattctcgggtgaatctgaac

SEQ ID NO: 7424 - DNA, 21 bp, synthetic construct
  source 1..21: mol_type = other DNA
acacacaggttgattgtagcc

SEQ ID NO: 7425 - DNA, 21 bp, synthetic construct
  source 1..21: mol_type = other DNA
tttcataaattgatgtcgaat

SEQ ID NO: 7426 - DNA, 21 bp, synthetic construct
  source 1..21: mol_type = other DNA
tatagcaaaaagaatgaaaat

SEQ ID NO: 7427 - DNA, 21 bp, synthetic construct
  source 1..21: mol_type = other DNA
tacttcgccggccaattcagt

SEQ ID NO: 7428 - DNA, 21 bp, synthetic construct
  source 1..21: mol_type = other DNA
ttttctaaaattggttttaac

SEQ ID NO: 7429 - DNA, 21 bp, synthetic construct
  source 1..21: mol_type = other DNA
ttcagcaaattgaattccaat

SEQ ID NO: 7430 - DNA, 21 bp, synthetic construct
  source 1..21: mol_type = other DNA
tactctaagaaaaacgagaac

SEQ ID NO: 7431 - DNA, 21 bp, synthetic construct
  source 1..21: mol_type = other DNA
catggctcagggaattttgta

SEQ ID NO: 7432 - DNA, 21 bp, synthetic construct
  source 1..21: mol_type = other DNA
ttaagcaagctcaatgacaat

SEQ ID NO: 7433 - DNA, 21 bp, synthetic construct
  source 1..21: mol_type = other DNA
ttccacaagctcatgagcaac

SEQ ID NO: 7434 - DNA, 21 bp, synthetic construct
  source 1..21: mol_type = other DNA
tatttttcagggaagacccta

SEQ ID NO: 7435 - DNA, 21 bp, synthetic construct
  source 1..21: mol_type = other DNA
ttcagcaagataggcttcaat

SEQ ID NO: 7436 - DNA, 21 bp, synthetic construct
  source 1..21: mol_type = other DNA
tatgctaaaggtggcctaaac

SEQ ID NO: 7437 - DNA, 21 bp, synthetic construct
  source 1..21: mol_type = other DNA
tactcacgtgtcaacgtcaac

SEQ ID NO: 7438 - DNA, 21 bp, synthetic construct
  source 1..21: mol_type = other DNA
ctacatcgattgatagcagat

SEQ ID NO: 7439 - DNA, 21 bp, synthetic construct
  source 1..21: mol_type = other DNA
tatagtcgagttaatgtaaat

SEQ ID NO: 7440 - DNA, 21 bp, synthetic construct
  source 1..21: mol_type = other DNA
cgaatgaaggatgtgtatccc

SEQ ID NO: 7441 - DNA, 21 bp, synthetic construct
  source 1..21: mol_type = other DNA
tacgccaagggcggattaaat

SEQ ID NO: 7442 - DNA, 21 bp, synthetic construct
  source 1..21: mol_type = other DNA
tacgccaggatgggaataaat

SEQ ID NO: 7443 - DNA, 21 bp, synthetic construct
  source 1..21: mol_type = other DNA
tactcccgagtaaacctcaat

SEQ ID NO: 7444 - DNA, 21 bp, synthetic construct
  source 1..21: mol_type = other DNA
ctaagtcgtgtagcgatgaat

SEQ ID NO: 7445 - DNA, 21 bp, synthetic construct
  source 1..21: mol_type = other DNA
tacttcagcggaaaaacgctg

SEQ ID NO: 7446 - DNA, 21 bp, synthetic construct
  source 1..21: mol_type = other DNA
tatgtaaaatccaaccacggc

SEQ ID NO: 7447 - DNA, 21 bp, synthetic construct
  source 1..21: mol_type = other DNA
tacagtaaaatgaaccaaaat

SEQ ID NO: 7448 - DNA, 21 bp, synthetic construct
  source 1..21: mol_type = other DNA
tatgtcaaaagtgacaatgcg

SEQ ID NO: 7449 - DNA, 21 bp, synthetic construct
  source 1..21: mol_type = other DNA
tatgctcgcatgggtattaac

SEQ ID NO: 7450 - DNA, 21 bp, synthetic construct
  source 1..21: mol_type = other DNA
tatgcccggggtggagtaaac

SEQ ID NO: 7451 - DNA, 21 bp, synthetic construct
  source 1..21: mol_type = other DNA
ttgtctcgagtggctatgaac

SEQ ID NO: 7452 - DNA, 21 bp, synthetic construct
  source 1..21: mol_type = other DNA
tatgtgaagtcgagtaacaac

SEQ ID NO: 7453 - DNA, 21 bp, synthetic construct
  source 1..21: mol_type = other DNA
tggtttacggggtacaatgca

SEQ ID NO: 7454 - DNA, 21 bp, synthetic construct
  source 1..21: mol_type = other DNA
tacgctaaagcgaatttcaac

SEQ ID NO: 7455 - DNA, 21 bp, synthetic construct
  source 1..21: mol_type = other DNA
ctatctaaactaaacgataac

SEQ ID NO: 7456 - DNA, 21 bp, synthetic construct
  source 1..21: mol_type = other DNA
cattcccggctgaatgttagt

SEQ ID NO: 7457 - DNA, 21 bp, synthetic construct
  source 1..21: mol_type = other DNA
ttttctaaaatgaacatcaat

SEQ ID NO: 7458 - DNA, 21 bp, synthetic construct
  source 1..21: mol_type = other DNA
ttttctaagctaaactcaaac

SEQ ID NO: 7459 - DNA, 21 bp, synthetic construct
  source 1..21: mol_type = other DNA
tattcacgggtgaacaataac

SEQ ID NO: 7460 - DNA, 21 bp, synthetic construct
  source 1..21: mol_type = other DNA
atgtctcgaatcggcgttaac

SEQ ID NO: 7461 - DNA, 21 bp, synthetic construct
  source 1..21: mol_type = other DNA
ttctcaaagatgaatataaac

SEQ ID NO: 7462 - DNA, 21 bp, synthetic construct
  source 1..21: mol_type = other DNA
tacagcagaattaacgccaac

SEQ ID NO: 7463 - DNA, 21 bp, synthetic construct
  source 1..21: mol_type = other DNA
tacgcccgacaaaacgcgaac

SEQ ID NO: 7464 - DNA, 21 bp, synthetic construct
  source 1..21: mol_type = other DNA
tattacacgggagtcaaggga

SEQ ID NO: 7465 - DNA, 21 bp, synthetic construct
  source 1..21: mol_type = other DNA
tatgcaaaggcaaactttaat

SEQ ID NO: 7466 - DNA, 21 bp, synthetic construct
  source 1..21: mol_type = other DNA
tacgccaagtttggtccgaac

SEQ ID NO: 7467 - DNA, 21 bp, synthetic construct
  source 1..21: mol_type = other DNA
ctatccaaagttggtgcaaac

SEQ ID NO: 7468 - DNA, 21 bp, synthetic construct
  source 1..21: mol_type = other DNA
tacagcagaactaataccaat

SEQ ID NO: 7469 - DNA, 21 bp, synthetic construct
  source 1..21: mol_type = other DNA
tatgcgaaattcggccccaat

SEQ ID NO: 7470 - DNA, 21 bp, synthetic construct
  source 1..21: mol_type = other DNA
taccatatacttggaaagaac

SEQ ID NO: 7471 - DNA, 21 bp, synthetic construct
  source 1..21: mol_type = other DNA
tatgcaaggcaaaacttcaat

SEQ ID NO: 7472 - DNA, 21 bp, synthetic construct
  source 1..21: mol_type = other DNA
ctagctaggaacgcgagtaat

SEQ ID NO: 7473 - DNA, 21 bp, synthetic construct
  source 1..21: mol_type = other DNA
aagatggacagccgattatgg

SEQ ID NO: 7474 - DNA, 21 bp, synthetic construct
  source 1..21: mol_type = other DNA
tttgtcaaatcggacaccaag

SEQ ID NO: 7475 - DNA, 21 bp, synthetic construct
  source 1..21: mol_type = other DNA
agttatgccaaatcactactg

SEQ ID NO: 7476 - DNA, 21 bp, synthetic construct
  source 1..21: mol_type = other DNA
tattatcacgggatgctagcc

SEQ ID NO: 7477 - DNA, 21 bp, synthetic construct
  source 1..21: mol_type = other DNA
tatacaaagagtgactcgaaa

SEQ ID NO: 7478 - DNA, 21 bp, synthetic construct
  source 1..21: mol_type = other DNA
tacgccaaaagtaattacaat

SEQ ID NO: 7479 - DNA, 21 bp, synthetic construct
  source 1..21: mol_type = other DNA
cggaaccacgagacgtttccg

SEQ ID NO: 7480 - DNA, 21 bp, synthetic construct
  source 1..21: mol_type = other DNA
tacagcaagctaggaggtaat

SEQ ID NO: 7481 - DNA, 21 bp, synthetic construct
  source 1..21: mol_type = other DNA
ttggcacggtcagcagtcaat

SEQ ID NO: 7482 - DNA, 21 bp, synthetic construct
  source 1..21: mol_type = other DNA
ctccgcagtgaatgttgtgta

SEQ ID NO: 7483 - DNA, 21 bp, synthetic construct
  source 1..21: mol_type = other DNA
gttgctatgcgcgggattgga

SEQ ID NO: 7484 - DNA, 21 bp, synthetic construct
  source 1..21: mol_type = other DNA
tatgctaagaatggcgcaaat

SEQ ID NO: 7485 - DNA, 21 bp, synthetic construct
  source 1..21: mol_type = other DNA
tatgcgaaggctggtcataac

SEQ ID NO: 7486 - DNA, 21 bp, synthetic construct
  source 1..21: mol_type = other DNA
tacgcaaaaggtaacatgaat

SEQ ID NO: 7487 - DNA, 21 bp, synthetic construct
  source 1..21: mol_type = other DNA
caattggaggctcgcacttgg

SEQ ID NO: 7488 - DNA, 21 bp, synthetic construct
  source 1..21: mol_type = other DNA
tacgcaaaaaacggtgcgaac

SEQ ID NO: 7489 - DNA, 21 bp, synthetic construct
  source 1..21: mol_type = other DNA
tttagtcgaattggggagaat

SEQ ID NO: 7490 - DNA, 21 bp, synthetic construct
  source 1..21: mol_type = other DNA
tatgccaagcaggggcacaac

SEQ ID NO: 7491 - DNA, 21 bp, synthetic construct
  source 1..21: mol_type = other DNA
tatgctcggcagaatgcaaat

SEQ ID NO: 7492 - DNA, 21 bp, synthetic construct
  source 1..21: mol_type = other DNA
ttcagccggataggcgaaaac

SEQ ID NO: 7493 - DNA, 21 bp, synthetic construct
  source 1..21: mol_type = other DNA
tatgcacgcggtgggcagaac

SEQ ID NO: 7494 - DNA, 21 bp, synthetic construct
  source 1..21: mol_type = other DNA
ctctcaaaagtagctgtcaat

SEQ ID NO: 7495 - DNA, 21 bp, synthetic construct
  source 1..21: mol_type = other DNA
ctcgcgcgtagcgcggttaac

SEQ ID NO: 7496 - DNA, 21 bp, synthetic construct
  source 1..21: mol_type = other DNA
ggaaaatatcctccccaaggc

SEQ ID NO: 7497 - DNA, 21 bp, synthetic construct
  source 1..21: mol_type = other DNA
aagatgagttctagcacgtgg

SEQ ID NO: 7498 - DNA, 21 bp, synthetic construct
  source 1..21: mol_type = other DNA
tacaccaaaagcgattctaag

SEQ ID NO: 7499 - DNA, 21 bp, synthetic construct
  source 1..21: mol_type = other DNA
tattctgcgataggcatgaat

SEQ ID NO: 7500 - DNA, 21 bp, synthetic construct
  source 1..21: mol_type = other DNA
tatgcgaagtcaaactataac

SEQ ID NO: 7501 - DNA, 21 bp, synthetic construct
  source 1..21: mol_type = other DNA
tacgcgaaacaaggccataat

SEQ ID NO: 7502 - DNA, 21 bp, synthetic construct
  source 1..21: mol_type = other DNA
tactctcgtatgaacgccaac

SEQ ID NO: 7503 - DNA, 21 bp, synthetic construct
  source 1..21: mol_type = other DNA
catagtcgtttaaatctccaa

SEQ ID NO: 7504 - DNA, 21 bp, synthetic construct
  source 1..21: mol_type = other DNA
tatgcgagagtagggactaat

SEQ ID NO: 7505 - DNA, 21 bp, synthetic construct
  source 1..21: mol_type = other DNA
aaaatggatagtaggctgtgg

SEQ ID NO: 7506 - DNA, 21 bp, synthetic construct
  source 1..21: mol_type = other DNA
ttgcaccggcttatcgctgac

SEQ ID NO: 7507 - DNA, 21 bp, synthetic construct
  source 1..21: mol_type = other DNA
tacgctaaaatggggatgaat

SEQ ID NO: 7508 - DNA, 21 bp, synthetic construct
  source 1..21: mol_type = other DNA
cactcaagcacaaacggggct

SEQ ID NO: 7509 - DNA, 21 bp, synthetic construct
  source 1..21: mol_type = other DNA
tactataccggggtaaaaggt

SEQ ID NO: 7510 - DNA, 21 bp, synthetic construct
  source 1..21: mol_type = other DNA
ttcgctaaacaaggacccaac

SEQ ID NO: 7511 - DNA, 21 bp, synthetic construct
  source 1..21: mol_type = other DNA
ttctcacgcgttggggaaaac

SEQ ID NO: 7512 - DNA, 21 bp, synthetic construct
  source 1..21: mol_type = other DNA
tatgctaagggaaatatgaac

SEQ ID NO: 7513 - DNA, 21 bp, synthetic construct
  source 1..21: mol_type = other DNA
gtgcacaggcttcaggacaaa

SEQ ID NO: 7514 - DNA, 21 bp, synthetic construct
  source 1..21: mol_type = other DNA
tacagtcgtgttaataacaat

SEQ ID NO: 7515 - DNA, 21 bp, synthetic construct
  source 1..21: mol_type = other DNA
ttcaaagccgggacttggaat

SEQ ID NO: 7516 - DNA, 21 bp, synthetic construct
  source 1..21: mol_type = other DNA
tatgccaagatgggtatgaac

SEQ ID NO: 7517 - DNA, 21 bp, synthetic construct
  source 1..21: mol_type = other DNA
tatagtaagacgggagacaac

SEQ ID NO: 7518 - DNA, 21 bp, synthetic construct
  source 1..21: mol_type = other DNA
ctgtcccgtattcaaactaac

SEQ ID NO: 7519 - DNA, 21 bp, synthetic construct
  source 1..21: mol_type = other DNA
aattgcaaaccatgttttgac

SEQ ID NO: 7520 - DNA, 21 bp, synthetic construct
  source 1..21: mol_type = other DNA
agcttgtgtccccgactatct

SEQ ID NO: 7521 - DNA, 21 bp, synthetic construct
  source 1..21: mol_type = other DNA
ggcaagtacccgccacagggg

SEQ ID NO: 7522 - DNA, 21 bp, synthetic construct
  source 1..21: mol_type = other DNA
ttggcccggaatgcctcaaac

SEQ ID NO: 7523 - DNA, 21 bp, synthetic construct
  source 1..21: mol_type = other DNA
aagatgtcatccgctaactgg

SEQ ID NO: 7524 - DNA, 21 bp, synthetic construct
  source 1..21: mol_type = other DNA
tacgcgaaaggaaacgcgaac

SEQ ID NO: 7525 - DNA, 21 bp, synthetic construct
  source 1..21: mol_type = other DNA
ttcagccgcactggcttcaac

SEQ ID NO: 7526 - DNA, 21 bp, synthetic construct
  source 1..21: mol_type = other DNA
aaaatgtcgagttcaacatgg

SEQ ID NO: 7527 - DNA, 21 bp, synthetic construct
  source 1..21: mol_type = other DNA
ctctctagaatccagaccaat

SEQ ID NO: 7528 - DNA, 21 bp, synthetic construct
  source 1..21: mol_type = other DNA
tattctaaaatcaatatcaat

SEQ ID NO: 7529 - DNA, 21 bp, synthetic construct
  source 1..21: mol_type = other DNA
tatcacaagcactccttgaat

SEQ ID NO: 7530 - DNA, 21 bp, synthetic construct
  source 1..21: mol_type = other DNA
tactcaaagattaacataaac

SEQ ID NO: 7531 - DNA, 21 bp, synthetic construct
  source 1..21: mol_type = other DNA
tacagcaaaaccggcgataat

SEQ ID NO: 7532 - DNA, 21 bp, synthetic construct
  source 1..21: mol_type = other DNA
tacgcccgggttggcaccaac

SEQ ID NO: 7533 - DNA, 21 bp, synthetic construct
  source 1..21: mol_type = other DNA
tattcgaggaccaacacaaac

SEQ ID NO: 7534 - DNA, 21 bp, synthetic construct
  source 1..21: mol_type = other DNA
tattcaaagatgaatcagaac

SEQ ID NO: 7535 - DNA, 21 bp, synthetic construct
  source 1..21: mol_type = other DNA
tacgtcaagagcaatcatgga

SEQ ID NO: 7536 - DNA, 21 bp, synthetic construct
  source 1..21: mol_type = other DNA
aaaatgagctcgtctgtttgg

SEQ ID NO: 7537 - DNA, 21 bp, synthetic construct
  source 1..21: mol_type = other DNA
ctacatcggttggccagctcc

SEQ ID NO: 7538 - DNA, 21 bp, synthetic construct
  source 1..21: mol_type = other DNA
ttatcgaaggtggccgtgaac

SEQ ID NO: 7539 - DNA, 21 bp, synthetic construct
  source 1..21: mol_type = other DNA
tatttcagcggcgtgccgtcc

SEQ ID NO: 7540 - DNA, 21 bp, synthetic construct
  source 1..21: mol_type = other DNA
tactcgcgcacaaacccaaac

SEQ ID NO: 7541 - DNA, 21 bp, synthetic construct
  source 1..21: mol_type = other DNA
agaatgaaagacgtctaccct

SEQ ID NO: 7542 - DNA, 21 bp, synthetic construct
  source 1..21: mol_type = other DNA
tacgctcgaggcggcgtcaat

SEQ ID NO: 7543 - DNA, 21 bp, synthetic construct
  source 1..21: mol_type = other DNA
aggaatcatgaaactttccct

SEQ ID NO: 7544 - DNA, 21 bp, synthetic construct
  source 1..21: mol_type = other DNA
ttttcccggacggggtttaat

SEQ ID NO: 7545 - DNA, 21 bp, synthetic construct
  source 1..21: mol_type = other DNA
ttttctcgtgtaggcgagaat

SEQ ID NO: 7546 - DNA, 21 bp, synthetic construct
  source 1..21: mol_type = other DNA
cgagaagacgggctacgttgg

SEQ ID NO: 7547 - DNA, 21 bp, synthetic construct
  source 1..21: mol_type = other DNA
actagaagtgggctgaacgcg

SEQ ID NO: 7548 - DNA, 21 bp, synthetic construct
  source 1..21: mol_type = other DNA
tatgccaagggcaatgcaaat

SEQ ID NO: 7549 - DNA, 21 bp, synthetic construct
  source 1..21: mol_type = other DNA
tatgtaaagaacgacgcgaga

SEQ ID NO: 7550 - DNA, 21 bp, synthetic construct
  source 1..21: mol_type = other DNA
atcagtgaatacagcaaatgg

SEQ ID NO: 7551 - DNA, 21 bp, synthetic construct
  source 1..21: mol_type = other DNA
gtggcaatgagaggtatcggc

SEQ ID NO: 7552 - DNA, 21 bp, synthetic construct
  source 1..21: mol_type = other DNA
tacttttccggagtacccagt

SEQ ID NO: 7553 - DNA, 21 bp, synthetic construct
  source 1..21: mol_type = other DNA
tatacaaagagcaaccacctg

SEQ ID NO: 7554 - DNA, 21 bp, synthetic construct
  source 1..21: mol_type = other DNA
gtgtcgagcagtaacggtaga

SEQ ID NO: 7555 - DNA, 21 bp, synthetic construct
  source 1..21: mol_type = other DNA
tacgctcgacagaattttaac

SEQ ID NO: 7556 - DNA, 21 bp, synthetic construct
  source 1..21: mol_type = other DNA
tacagcaaagctgggtatgac

SEQ ID NO: 7557 - DNA, 21 bp, synthetic construct
  source 1..21: mol_type = other DNA
ttagttaggtatgagaacgta

SEQ ID NO: 7558 - DNA, 21 bp, synthetic construct
  source 1..21: mol_type = other DNA
tatgcgaggttgggaggcaat

SEQ ID NO: 7559 - DNA, 21 bp, synthetic construct
  source 1..21: mol_type = other DNA
attcaccccactagatatggt

SEQ ID NO: 7560 - DNA, 21 bp, synthetic construct
  source 1..21: mol_type = other DNA
tttgctcggtccggtatgaat

SEQ ID NO: 7561 - DNA, 21 bp, synthetic construct
  source 1..21: mol_type = other DNA
ttttccaagttaggaaataac

SEQ ID NO: 7562 - DNA, 21 bp, synthetic construct
  source 1..21: mol_type = other DNA
tatgcgcggcagaatatgaat

SEQ ID NO: 7563 - DNA, 21 bp, synthetic construct
  source 1..21: mol_type = other DNA
agggaggatggactcagatgg

SEQ ID NO: 7564 - DNA, 21 bp, synthetic construct
  source 1..21: mol_type = other DNA
agaaacatgtccgtgtatccc

SEQ ID NO: 7565 - DNA, 21 bp, synthetic construct
  source 1..21: mol_type = other DNA
tttaaggctggaacctggaac

SEQ ID NO: 7566 - DNA, 21 bp, synthetic construct
  source 1..21: mol_type = other DNA
tacgctagaggcggtcaaaat

SEQ ID NO: 7567 - DNA, 21 bp, synthetic construct
  source 1..21: mol_type = other DNA
aaaatgtcttctgccaattgg

SEQ ID NO: 7568 - DNA, 21 bp, synthetic construct
  source 1..21: mol_type = other DNA
tatgctcggggcaacgacaac

SEQ ID NO: 7569 - DNA, 21 bp, synthetic construct
  source 1..21: mol_type = other DNA
cacgggtccggaaacttcgtg

SEQ ID NO: 7570 - DNA, 21 bp, synthetic construct
  source 1..21: mol_type = other DNA
tctatggagtcaagactttgg

SEQ ID NO: 7571 - DNA, 21 bp, synthetic construct
  source 1..21: mol_type = other DNA
gtctcctcgagcaatggccgt

SEQ ID NO: 7572 - DNA, 21 bp, synthetic construct
  source 1..21: mol_type = other DNA
ttcgcgcgctctggcatgaac

SEQ ID NO: 7573 - DNA, 21 bp, synthetic construct
  source 1..21: mol_type = other DNA
tatagtaaggcgggctacgat

SEQ ID NO: 7574 - DNA, 21 bp, synthetic construct
  source 1..21: mol_type = other DNA
tacactaaaagtaatcatttg

SEQ ID NO: 7575 - DNA, 21 bp, synthetic construct
  source 1..21: mol_type = other DNA
gactatactggtaaatccgcg

SEQ ID NO: 7576 - DNA, 21 bp, synthetic construct
  source 1..21: mol_type = other DNA
tatttccacgccacgagagat

SEQ ID NO: 7577 - DNA, 21 bp, synthetic construct
  source 1..21: mol_type = other DNA
tttgccaagcaggggcctaat

SEQ ID NO: 7578 - DNA, 21 bp, synthetic construct
  source 1..21: mol_type = other DNA
tacgcacggcttggtggaaac

SEQ ID NO: 7579 - DNA, 21 bp, synthetic construct
  source 1..21: mol_type = other DNA
actatgtccgatcgaacttgg

SEQ ID NO: 7580 - DNA, 21 bp, synthetic construct
  source 1..21: mol_type = other DNA
cagcttgaagcgcggacgtgg

SEQ ID NO: 7581 - DNA, 21 bp, synthetic construct
  source 1..21: mol_type = other DNA
accatgagtgaccgcacctgg

SEQ ID NO: 7582 - DNA, 21 bp, synthetic construct
  source 1..21: mol_type = other DNA
gttgaatcatcgaatggtagg

SEQ ID NO: 7583 - DNA, 21 bp, synthetic construct
  source 1..21: mol_type = other DNA
aaaatgccaagccgggactgg

SEQ ID NO: 7584 - DNA, 21 bp, synthetic construct
  source 1..21: mol_type = other DNA
acacgctctggtttaaatgcc

SEQ ID NO: 7585 - DNA, 21 bp, synthetic construct
  source 1..21: mol_type = other DNA
tacgcacgagggaatgataat

SEQ ID NO: 7586 - DNA, 21 bp, synthetic construct
  source 1..21: mol_type = other DNA
cactccagacttaacctgcag

SEQ ID NO: 7587 - DNA, 21 bp, synthetic construct
  source 1..21: mol_type = other DNA
tactccaagtctggcgataat

SEQ ID NO: 7588 - DNA, 21 bp, synthetic construct
  source 1..21: mol_type = other DNA
cacagccgtatgaacgagaac

SEQ ID NO: 7589 - DNA, 21 bp, synthetic construct
  source 1..21: mol_type = other DNA
cgcaatatgtctgtttaccca

SEQ ID NO: 7590 - DNA, 21 bp, synthetic construct
  source 1..21: mol_type = other DNA
tatgcgcgtctcaacgagaat

SEQ ID NO: 7591 - DNA, 21 bp, synthetic construct
  source 1..21: mol_type = other DNA
cggaacggaacctcgagctgg

SEQ ID NO: 7592 - DNA, 21 bp, synthetic construct
  source 1..21: mol_type = other DNA
aagatgccttctcgagattgg

SEQ ID NO: 7593 - DNA, 21 bp, synthetic construct
  source 1..21: mol_type = other DNA
acggaatccagctcgggccga

SEQ ID NO: 7594 - DNA, 21 bp, synthetic construct
  source 1..21: mol_type = other DNA
tacgccaaagccggccacaat

SEQ ID NO: 7595 - DNA, 21 bp, synthetic construct
  source 1..21: mol_type = other DNA
acagagtcatcatctggtaga

SEQ ID NO: 7596 - DNA, 21 bp, synthetic construct
  source 1..21: mol_type = other DNA
catagttctacgaatggagcc

SEQ ID NO: 7597 - DNA, 21 bp, synthetic construct
  source 1..21: mol_type = other DNA
tacagccgcaccggaagcgat

SEQ ID NO: 7598 - DNA, 21 bp, synthetic construct
  source 1..21: mol_type = other DNA
gtcgagagttccaacgggcgc

SEQ ID NO: 7599 - DNA, 21 bp, synthetic construct
  source 1..21: mol_type = other DNA
tacgccaggttgaatgaaaac

SEQ ID NO: 7600 - DNA, 21 bp, synthetic construct
  source 1..21: mol_type = other DNA
tggcatcgtcttagtgtgaat

SEQ ID NO: 7601 - DNA, 21 bp, synthetic construct
  source 1..21: mol_type = other DNA
tacaatagtactcacgggaga

SEQ ID NO: 7602 - DNA, 21 bp, synthetic construct
  source 1..21: mol_type = other DNA
taccataaacatagtctgaac

SEQ ID NO: 7603 - DNA, 21 bp, synthetic construct
  source 1..21: mol_type = other DNA
tactcgaaaggtggagcgaat

SEQ ID NO: 7604 - DNA, 21 bp, synthetic construct
  source 1..21: mol_type = other DNA
tattctaaatcaggtgacaac

SEQ ID NO: 7605 - DNA, 21 bp, synthetic construct
  source 1..21: mol_type = other DNA
gattacacgggaaagagtgct

SEQ ID NO: 7606 - DNA, 21 bp, synthetic construct
  source 1..21: mol_type = other DNA
ctatcgcggtccggtaacaat

SEQ ID NO: 7607 - DNA, 21 bp, synthetic construct
  source 1..21: mol_type = other DNA
gggtcctcaacctccatttgg

SEQ ID NO: 7608 - DNA, 21 bp, synthetic construct
  source 1..21: mol_type = other DNA
tggcacagattatccgtaaac

SEQ ID NO: 7609 - DNA, 21 bp, synthetic construct
  source 1..21: mol_type = other DNA
aattacgcaaagtcatatgcc

SEQ ID NO: 7610 - DNA, 21 bp, synthetic construct
  source 1..21: mol_type = other DNA
tacttttccggtaccgagaat

SEQ ID NO: 7611 - DNA, 21 bp, synthetic construct
  source 1..21: mol_type = other DNA
atgagcagggcagggaataac

SEQ ID NO: 7612 - DNA, 21 bp, synthetic construct
  source 1..21: mol_type = other DNA
ttgaggtctgagtgctgcgtc

SEQ ID NO: 7613 - DNA, 21 bp, synthetic construct
  source 1..21: mol_type = other DNA
tactgggaaggaactcgacac

SEQ ID NO: 7614 - DNA, 21 bp, synthetic construct
  source 1..21: mol_type = other DNA
tatagtagaacggggagtgac

SEQ ID NO: 7615 - DNA, 21 bp, synthetic construct
  source 1..21: mol_type = other DNA
ctgtctcgtatctccgtgaat

SEQ ID NO: 7616 - DNA, 21 bp, synthetic construct
  source 1..21: mol_type = other DNA
ttctcgaaactgggtaacaat

SEQ ID NO: 7617 - DNA, 21 bp, synthetic construct
  source 1..21: mol_type = other DNA
attagcgagtattcgaagtgg

SEQ ID NO: 7618 - DNA, 21 bp, synthetic construct
  source 1..21: mol_type = other DNA
tactggcaaggggtaaatgaa

SEQ ID NO: 7619 - DNA, 21 bp, synthetic construct
  source 1..21: mol_type = other DNA
tacgttaagagcgataacgct

SEQ ID NO: 7620 - DNA, 21 bp, synthetic construct
  source 1..21: mol_type = other DNA
ctttactcacgactcgataag

SEQ ID NO: 7621 - DNA, 21 bp, synthetic construct
  source 1..21: mol_type = other DNA
tattgggagggcacaagacat

SEQ ID NO: 7622 - DNA, 21 bp, synthetic construct
  source 1..21: mol_type = other DNA
catactgatgatagttacccg

SEQ ID NO: 7623 - DNA, 21 bp, synthetic construct
  source 1..21: mol_type = other DNA
gtccccggtgactgctgtgtt

SEQ ID NO: 7624 - DNA, 21 bp, synthetic construct
  source 1..21: mol_type = other DNA
tttgagggccgcgggtggaat

SEQ ID NO: 7625 - DNA, 21 bp, synthetic construct
  source 1..21: mol_type = other DNA
tatttcagcggcacggaaaac

SEQ ID NO: 7626 - DNA, 21 bp, synthetic construct
  source 1..21: mol_type = other DNA
tacgcaagacagaatcagaat

SEQ ID NO: 7627 - DNA, 21 bp, synthetic construct
  source 1..21: mol_type = other DNA
tacgttcgcaatgatgacaaa

SEQ ID NO: 7628 - DNA, 21 bp, synthetic construct
  source 1..21: mol_type = other DNA
ttcgcgaagcaggggttcaac

SEQ ID NO: 7629 - DNA, 21 bp, synthetic construct
  source 1..21: mol_type = other DNA
gtgccaggcgattgttgcgtc

SEQ ID NO: 7630 - DNA, 21 bp, synthetic construct
  source 1..21: mol_type = other DNA
cttcacaaggcagggtacaac

SEQ ID NO: 7631 - DNA, 21 bp, synthetic construct
  source 1..21: mol_type = other DNA
tactaccatggtatgttagcg

SEQ ID NO: 7632 - DNA, 21 bp, synthetic construct
  source 1..21: mol_type = other DNA
taccataaaggcaacaataac

SEQ ID NO: 7633 - DNA, 21 bp, synthetic construct
  source 1..21: mol_type = other DNA
aactatgcgaaatcgtacgct

SEQ ID NO: 7634 - DNA, 21 bp, synthetic construct
  source 1..21: mol_type = other DNA
tacgcggcaggcagttggaat

SEQ ID NO: 7635 - DNA, 21 bp, synthetic construct
  source 1..21: mol_type = other DNA
caaaaacatgccccgaatgcc

SEQ ID NO: 7636 - DNA, 21 bp, synthetic construct
  source 1..21: mol_type = other DNA
tacgttaaaaatgatgcacgc

SEQ ID NO: 7637 - DNA, 21 bp, synthetic construct
  source 1..21: mol_type = other DNA
cagaagcacgctccaaacgct

SEQ ID NO: 7638 - DNA, 21 bp, synthetic construct
  source 1..21: mol_type = other DNA
acatggtctgacaatggggta

SEQ ID NO: 7639 - DNA, 21 bp, synthetic construct
  source 1..21: mol_type = other DNA
cgaacatacgacacttacatc

SEQ ID NO: 7640 - DNA, 21 bp, synthetic construct
  source 1..21: mol_type = other DNA
ggaagctctacaagcatatgg

SEQ ID NO: 7641 - DNA, 21 bp, synthetic construct
  source 1..21: mol_type = other DNA
cgcaatggtactagctcgtgg

SEQ ID NO: 7642 - DNA, 21 bp, synthetic construct
  source 1..21: mol_type = other DNA
tatgcgcggcaaaaccaaaac

SEQ ID NO: 7643 - DNA, 21 bp, synthetic construct
  source 1..21: mol_type = other DNA
tattctaagggaggggccaac

SEQ ID NO: 7644 - DNA, 21 bp, synthetic construct
  source 1..21: mol_type = other DNA
tatgcgcgtgttggaggcaac

SEQ ID NO: 7645 - DNA, 21 bp, synthetic construct
  source 1..21: mol_type = other DNA
atgagtcgtgccggcaacaat

SEQ ID NO: 7646 - DNA, 21 bp, synthetic construct
  source 1..21: mol_type = other DNA
tatgtgaggaacgacgataag

SEQ ID NO: 7647 - DNA, 21 bp, synthetic construct
  source 1..21: mol_type = other DNA
cttgtcagatacgaaaatgtg

SEQ ID NO: 7648 - DNA, 21 bp, synthetic construct
  source 1..21: mol_type = other DNA
tattataccggcaggacgaac

SEQ ID NO: 7649 - DNA, 21 bp, synthetic construct
  source 1..21: mol_type = other DNA
tacgctagagtcggcggtaat

SEQ ID NO: 7650 - DNA, 21 bp, synthetic construct
  source 1..21: mol_type = other DNA
ttcgaaggaagaggatggaac

SEQ ID NO: 7651 - DNA, 21 bp, synthetic construct
  source 1..21: mol_type = other DNA
tatcacaaggggaataacaat

SEQ ID NO: 7652 - DNA, 21 bp, synthetic construct
  source 1..21: mol_type = other DNA
tattggcagggagtgaacgag

SEQ ID NO: 7653 - DNA, 21 bp, synthetic construct
  source 1..21: mol_type = other DNA
cgaacgaacaacgaatatccc

SEQ ID NO: 7654 - DNA, 21 bp, synthetic construct
  source 1..21: mol_type = other DNA
tatgcccggatgggtgagaac

SEQ ID NO: 7655 - DNA, 21 bp, synthetic construct
  source 1..21: mol_type = other DNA
tatataaaatcggactatcag

SEQ ID NO: 7656 - DNA, 21 bp, synthetic construct
  source 1..21: mol_type = other DNA
cacacggacgacagctatccc

SEQ ID NO: 7657 - DNA, 21 bp, synthetic construct
  source 1..21: mol_type = other DNA
tactttcatgcaacaagggac

SEQ ID NO: 7658 - DNA, 21 bp, synthetic construct
  source 1..21: mol_type = other DNA
tacagtcgaaacaattccaat

SEQ ID NO: 7659 - DNA, 21 bp, synthetic construct
  source 1..21: mol_type = other DNA
tacgcgcgtctgggtccttcg

SEQ ID NO: 7660 - DNA, 21 bp, synthetic construct
  source 1..21: mol_type = other DNA
cgaaatggaacgtcagtgtgg

SEQ ID NO: 7661 - DNA, 21 bp, synthetic construct
  source 1..21: mol_type = other DNA
tttgccaaacaaggctttaat

SEQ ID NO: 7662 - DNA, 21 bp, synthetic construct
  source 1..21: mol_type = other DNA
tattatacgggtatgaataat

SEQ ID NO: 7663 - DNA, 21 bp, synthetic construct
  source 1..21: mol_type = other DNA
tactactcaggagaacgaaac

SEQ ID NO: 7664 - DNA, 21 bp, synthetic construct
  source 1..21: mol_type = other DNA
tacgcacgtatgggagaaaat

SEQ ID NO: 7665 - DNA, 21 bp, synthetic construct
  source 1..21: mol_type = other DNA
tattcaagaggtggtttcaac

SEQ ID NO: 7666 - DNA, 21 bp, synthetic construct
  source 1..21: mol_type = other DNA
ttgtatagtaggcttgacaaa

SEQ ID NO: 7667 - DNA, 21 bp, synthetic construct
  source 1..21: mol_type = other DNA
acgtggtcggataacggagtt

SEQ ID NO: 7668 - DNA, 21 bp, synthetic construct
  source 1..21: mol_type = other DNA
cacggatccacgaacgggaag

SEQ ID NO: 7669 - DNA, 21 bp, synthetic construct
  source 1..21: mol_type = other DNA
actcataaattgtccgtgaat

SEQ ID NO: 7670 - DNA, 21 bp, synthetic construct
  source 1..21: mol_type = other DNA
tttgcacggcagggcttcaat

SEQ ID NO: 7671 - DNA, 21 bp, synthetic construct
  source 1..21: mol_type = other DNA
tatgctcgattaggccccagc

SEQ ID NO: 7672 - DNA, 21 bp, synthetic construct
  source 1..21: mol_type = other DNA
tacgcgcgcgaaacatggaat

SEQ ID NO: 7673 - DNA, 21 bp, synthetic construct
  source 1..21: mol_type = other DNA
tattgggcggataagcacgca

SEQ ID NO: 7674 - DNA, 21 bp, synthetic construct
  source 1..21: mol_type = other DNA
tattcaagagtagacgacaga

SEQ ID NO: 7675 - DNA, 21 bp, synthetic construct
  source 1..21: mol_type = other DNA
gactacgcgaaatcactcttg

SEQ ID NO: 7676 - DNA, 21 bp, synthetic construct
  source 1..21: mol_type = other DNA
cgcacaaataatgagtaccca

SEQ ID NO: 7677 - DNA, 21 bp, synthetic construct
  source 1..21: mol_type = other DNA
tataactcaacgcatggtcgc

SEQ ID NO: 7678 - DNA, 21 bp, synthetic construct
  source 1..21: mol_type = other DNA
aagatgtcgtcctcggtgtgg

SEQ ID NO: 7679 - DNA, 21 bp, synthetic construct
  source 1..21: mol_type = other DNA
tactcggcgagaggtccgaac

SEQ ID NO: 7680 - DNA, 21 bp, synthetic construct
  source 1..21: mol_type = other DNA
ttcgctcgacaaggatttaac

SEQ ID NO: 7681 - DNA, 21 bp, synthetic construct
  source 1..21: mol_type = other DNA
tttagtagaatgaaccagaac

SEQ ID NO: 7682 - DNA, 21 bp, synthetic construct
  source 1..21: mol_type = other DNA
ttttcaaagatgaactataat

SEQ ID NO: 7683 - DNA, 21 bp, synthetic construct
  source 1..21: mol_type = other DNA
actcatcgacttatcgtcgca

SEQ ID NO: 7684 - DNA, 21 bp, synthetic construct
  source 1..21: mol_type = other DNA
tactcgcgaggcggatttaat

SEQ ID NO: 7685 - DNA, 21 bp, synthetic construct
  source 1..21: mol_type = other DNA
ggtggcgatggtaatcattat

SEQ ID NO: 7686 - DNA, 21 bp, synthetic construct
  source 1..21: mol_type = other DNA
tattctaggcataatttaaat

SEQ ID NO: 7687 - DNA, 21 bp, synthetic construct
  source 1..21: mol_type = other DNA
cggaacgggacttctgtttgg

SEQ ID NO: 7688 - DNA, 21 bp, synthetic construct
  source 1..21: mol_type = other DNA
tatagcaggacgaatccgaat

SEQ ID NO: 7689 - DNA, 21 bp, synthetic construct
  source 1..21: mol_type = other DNA
tattcgagaaataacagtaac

SEQ ID NO: 7690 - DNA, 21 bp, synthetic construct
  source 1..21: mol_type = other DNA
cttaggcgcaagccagacctt

SEQ ID NO: 7691 - DNA, 21 bp, synthetic construct
  source 1..21: mol_type = other DNA
tatgcagcgggatcctggaac

SEQ ID NO: 7692 - DNA, 21 bp, synthetic construct
  source 1..21: mol_type = other DNA
ttcagccggatgaatcaaaat

SEQ ID NO: 7693 - DNA, 21 bp, synthetic construct
  source 1..21: mol_type = other DNA
tattattcgggtgagcgcaat

SEQ ID NO: 7694 - DNA, 21 bp, synthetic construct
  source 1..21: mol_type = other DNA
catgggagcactaatggaaaa

SEQ ID NO: 7695 - DNA, 21 bp, synthetic construct
  source 1..21: mol_type = other DNA
tacttcatgggtcgcagtgat

SEQ ID NO: 7696 - DNA, 21 bp, synthetic construct
  source 1..21: mol_type = other DNA
ttctcgaaaatgaattacaac

SEQ ID NO: 7697 - DNA, 21 bp, synthetic construct
  source 1..21: mol_type = other DNA
tatgctcgtgagacctggaac

SEQ ID NO: 7698 - DNA, 21 bp, synthetic construct
  source 1..21: mol_type = other DNA
ataatgtcgagccggtcatgg

SEQ ID NO: 7699 - DNA, 21 bp, synthetic construct
  source 1..21: mol_type = other DNA
ttttcgcgtatgaacagtaat

SEQ ID NO: 7700 - DNA, 21 bp, synthetic construct
  source 1..21: mol_type = other DNA
tactgggcagacaaacatgcc

SEQ ID NO: 7701 - DNA, 21 bp, synthetic construct
  source 1..21: mol_type = other DNA
tttgctcgacaaggcatgaac

SEQ ID NO: 7702 - DNA, 21 bp, synthetic construct
  source 1..21: mol_type = other DNA
acccacaagctatctgtaaac

SEQ ID NO: 7703 - DNA, 21 bp, synthetic construct
  source 1..21: mol_type = other DNA
ttcagccgcatgaattccaac

SEQ ID NO: 7704 - DNA, 21 bp, synthetic construct
  source 1..21: mol_type = other DNA
tttgtaaagtttcaagtcaac

SEQ ID NO: 7705 - DNA, 21 bp, synthetic construct
  source 1..21: mol_type = other DNA
atccatccgacgaggtacggg

SEQ ID NO: 7706 - DNA, 21 bp, synthetic construct
  source 1..21: mol_type = other DNA
caaagtaagctgagcacatgg

SEQ ID NO: 7707 - DNA, 21 bp, synthetic construct
  source 1..21: mol_type = other DNA
tactcccggcacaacctaaac

SEQ ID NO: 7708 - DNA, 21 bp, synthetic construct
  source 1..21: mol_type = other DNA
ttcgcacgccagggaatgaat

SEQ ID NO: 7709 - DNA, 21 bp, synthetic construct
  source 1..21: mol_type = other DNA
tatgcgaaaaatggcgacaac

SEQ ID NO: 7710 - DNA, 21 bp, synthetic construct
  source 1..21: mol_type = other DNA
cggacatttgattcgttcgag

SEQ ID NO: 7711 - DNA, 21 bp, synthetic construct
  source 1..21: mol_type = other DNA
ttctcccgtagtggcatgaac

SEQ ID NO: 7712 - DNA, 21 bp, synthetic construct
  source 1..21: mol_type = other DNA
aggacttatgatacctatata

SEQ ID NO: 7713 - DNA, 21 bp, synthetic construct
  source 1..21: mol_type = other DNA
ttcgcaaaatccggacaaaac

SEQ ID NO: 7714 - DNA, 21 bp, synthetic construct
  source 1..21: mol_type = other DNA
tatgcacgtcaaaattataat

SEQ ID NO: 7715 - DNA, 21 bp, synthetic construct
  source 1..21: mol_type = other DNA
tattgggtagataaggtagct

SEQ ID NO: 7716 - DNA, 21 bp, synthetic construct
  source 1..21: mol_type = other DNA
gaaatgcaaagccgagcttgg

SEQ ID NO: 7717 - DNA, 21 bp, synthetic construct
  source 1..21: mol_type = other DNA
agagagacgtatgtatatccc

SEQ ID NO: 7718 - DNA, 21 bp, synthetic construct
  source 1..21: mol_type = other DNA
tactacacaggtcgtactaat

SEQ ID NO: 7719 - DNA, 21 bp, synthetic construct
  source 1..21: mol_type = other DNA
ttcgtcaaattccaggttaat

SEQ ID NO: 7720 - DNA, 21 bp, synthetic construct
  source 1..21: mol_type = other DNA
tttagtcgctcaggaatgaat

SEQ ID NO: 7721 - DNA, 21 bp, synthetic construct
  source 1..21: mol_type = other DNA
tacgcaaagatggggtggaac

SEQ ID NO: 7722 - DNA, 21 bp, synthetic construct
  source 1..21: mol_type = other DNA
tactacactgggatgaacaac

SEQ ID NO: 7723 - DNA, 21 bp, synthetic construct
  source 1..21: mol_type = other DNA
tacagtcggaattctgataat

SEQ ID NO: 7724 - DNA, 21 bp, synthetic construct
  source 1..21: mol_type = other DNA
tactccaggtataatattaat

SEQ ID NO: 7725 - DNA, 21 bp, synthetic construct
  source 1..21: mol_type = other DNA
cgcacagatcagtactttccg

SEQ ID NO: 7726 - DNA, 21 bp, synthetic construct
  source 1..21: mol_type = other DNA
aggcaagcaaagcaaaagaac

SEQ ID NO: 7727 - DNA, 21 bp, synthetic construct
  source 1..21: mol_type = other DNA
tatgcgaaaatgggctggaat

SEQ ID NO: 7728 - DNA, 21 bp, synthetic construct
  source 1..21: mol_type = other DNA
tacataaaaggggatttattt

SEQ ID NO: 7729 - DNA, 21 bp, synthetic construct
  source 1..21: mol_type = other DNA
taccatagatatggcattgac

SEQ ID NO: 7730 - DNA, 21 bp, synthetic construct
  source 1..21: mol_type = other DNA
gagatgcagtctagagcctgg

SEQ ID NO: 7731 - DNA, 21 bp, synthetic construct
  source 1..21: mol_type = other DNA
ctatcccgtttgaaccataac

SEQ ID NO: 7732 - DNA, 21 bp, synthetic construct
  source 1..21: mol_type = other DNA
cagtcgaaattgtcgacctgg

SEQ ID NO: 7733 - DNA, 21 bp, synthetic construct
  source 1..21: mol_type = other DNA
tatagtaaattcaatgacaac

SEQ ID NO: 7734 - DNA, 21 bp, synthetic construct
  source 1..21: mol_type = other DNA
tatgctaagttaaaccataac

SEQ ID NO: 7735 - DNA, 21 bp, synthetic construct
  source 1..21: mol_type = other DNA
aggacgttcgacagttttgaa

SEQ ID NO: 7736 - DNA, 21 bp, synthetic construct
  source 1..21: mol_type = other DNA
tattttgcaggacagttttct

SEQ ID NO: 7737 - DNA, 21 bp, synthetic construct
  source 1..21: mol_type = other DNA
tttgcgaagtcgggccagaat

SEQ ID NO: 7738 - DNA, 21 bp, synthetic construct
  source 1..21: mol_type = other DNA
tattctaaatggaaccagaat

SEQ ID NO: 7739 - DNA, 21 bp, synthetic construct
  source 1..21: mol_type = other DNA
tatctcataagcgatactaaa

SEQ ID NO: 7740 - DNA, 21 bp, synthetic construct
  source 1..21: mol_type = other DNA
tacgcaaagaacggagataat

SEQ ID NO: 7741 - DNA, 21 bp, synthetic construct
  source 1..21: mol_type = other DNA
gattatgctaagtcgttgcta

SEQ ID NO: 7742 - DNA, 21 bp, synthetic construct
  source 1..21: mol_type = other DNA
tacgcccgaccaggccacaat

SEQ ID NO: 7743 - DNA, 21 bp, synthetic construct
  source 1..21: mol_type = other DNA
ggaggtgacgggaaccactac

SEQ ID NO: 7744 - DNA, 21 bp, synthetic construct
  source 1..21: mol_type = other DNA
tttgcccgacaaggatacaat

SEQ ID NO: 7745 - DNA, 21 bp, synthetic construct
  source 1..21: mol_type = other DNA
tttgcgaaagaaggacgaaat

SEQ ID NO: 7746 - DNA, 21 bp, synthetic construct
  source 1..21: mol_type = other DNA
gacgatggcagatcgaggtat

SEQ ID NO: 7747 - DNA, 21 bp, synthetic construct
  source 1..21: mol_type = other DNA
tacgcgaaactaaatcacaat

SEQ ID NO: 7748 - DNA, 21 bp, synthetic construct
  source 1..21: mol_type = other DNA
gaacatggcaagtcactgtgg

SEQ ID NO: 7749 - DNA, 21 bp, synthetic construct
  source 1..21: mol_type = other DNA
tactcgaagtttaacgataat

SEQ ID NO: 7750 - DNA, 21 bp, synthetic construct
  source 1..21: mol_type = other DNA
tactgggtggacaaagtggcc

SEQ ID NO: 7751 - DNA, 21 bp, synthetic construct
  source 1..21: mol_type = other DNA
tatcaccggtacgggatcgat

SEQ ID NO: 7752 - DNA, 21 bp, synthetic construct
  source 1..21: mol_type = other DNA
tacctgattagtgacaccaag

SEQ ID NO: 7753 - DNA, 21 bp, synthetic construct
  source 1..21: mol_type = other DNA
ttctccaggatgggaccaaat

SEQ ID NO: 7754 - DNA, 21 bp, synthetic construct
  source 1..21: mol_type = other DNA
tggttcagtggggagcattcc

SEQ ID NO: 7755 - DNA, 21 bp, synthetic construct
  source 1..21: mol_type = other DNA
ttcgccaaggagggtaggaac

SEQ ID NO: 7756 - DNA, 21 bp, synthetic construct
  source 1..21: mol_type = other DNA
gatgacgggaggtcccgatac

SEQ ID NO: 7757 - DNA, 21 bp, synthetic construct
  source 1..21: mol_type = other DNA
tggttcaccggttataacgcc

SEQ ID NO: 7758 - DNA, 21 bp, synthetic construct
  source 1..21: mol_type = other DNA
tatatgaagtacgacacccag

SEQ ID NO: 7759 - DNA, 21 bp, synthetic construct
  source 1..21: mol_type = other DNA
tttgttcgaagtcaaattagt

SEQ ID NO: 7760 - DNA, 21 bp, synthetic construct
  source 1..21: mol_type = other DNA
tatgcacgcccgggacataac

SEQ ID NO: 7761 - DNA, 21 bp, synthetic construct
  source 1..21: mol_type = other DNA
agaacggaccaatatttcccc

SEQ ID NO: 7762 - DNA, 21 bp, synthetic construct
  source 1..21: mol_type = other DNA
cgggaaacttacgtgtaccca

SEQ ID NO: 7763 - DNA, 21 bp, synthetic construct
  source 1..21: mol_type = other DNA
atatgccgcggatatacatct

SEQ ID NO: 7764 - DNA, 21 bp, synthetic construct
  source 1..21: mol_type = other DNA
tatagtcgtcagggaggcaat

SEQ ID NO: 7765 - DNA, 21 bp, synthetic construct
  source 1..21: mol_type = other DNA
tataaagatggtacgtggtac

SEQ ID NO: 7766 - DNA, 21 bp, synthetic construct
  source 1..21: mol_type = other DNA
tgcaaaaaaggctgctttgag

SEQ ID NO: 7767 - DNA, 21 bp, synthetic construct
  source 1..21: mol_type = other DNA
ttttcgaggctcgggcacaat

SEQ ID NO: 7768 - DNA, 21 bp, synthetic construct
  source 1..21: mol_type = other DNA
tacgctcgacagaactacaac

SEQ ID NO: 7769 - DNA, 21 bp, synthetic construct
  source 1..21: mol_type = other DNA
tttgcgcgggcaggattaaat

SEQ ID NO: 7770 - DNA, 21 bp, synthetic construct
  source 1..21: mol_type = other DNA
tttgctcgaggggggtacaac

SEQ ID NO: 7771 - DNA, 21 bp, synthetic construct
  source 1..21: mol_type = other DNA
tactcgaagtggaatcaaaac

SEQ ID NO: 7772 - DNA, 21 bp, synthetic construct
  source 1..21: mol_type = other DNA
tgtaagaagggttgtttcgaa

SEQ ID NO: 7773 - DNA, 21 bp, synthetic construct
  source 1..21: mol_type = other DNA
tttagtcgtatgggccccaac

SEQ ID NO: 7774 - DNA, 21 bp, synthetic construct
  source 1..21: mol_type = other DNA
atgtataatgattgctgtgta

SEQ ID NO: 7775 - DNA, 21 bp, synthetic construct
  source 1..21: mol_type = other DNA
tacagccggcaaggcggaaac

SEQ ID NO: 7776 - DNA, 21 bp, synthetic construct
  source 1..21: mol_type = other DNA
aactatgcgcgttccaacaat

SEQ ID NO: 7777 - DNA, 21 bp, synthetic construct
  source 1..21: mol_type = other DNA
tacattaagagtgattaccaa

SEQ ID NO: 7778 - DNA, 21 bp, synthetic construct
  source 1..21: mol_type = other DNA
ttcgctagggctggtctgaac

SEQ ID NO: 7779 - DNA, 21 bp, synthetic construct
  source 1..21: mol_type = other DNA
tggttttcgggtgaacactct

SEQ ID NO: 7780 - DNA, 21 bp, synthetic construct
  source 1..21: mol_type = other DNA
tatatcaagggcgaccttttc

SEQ ID NO: 7781 - DNA, 21 bp, synthetic construct
  source 1..21: mol_type = other DNA
tactttactcggcaggttaac

SEQ ID NO: 7782 - DNA, 21 bp, synthetic construct
  source 1..21: mol_type = other DNA
attgaaagagtgtcgtatgga

SEQ ID NO: 7783 - DNA, 21 bp, synthetic construct
  source 1..21: mol_type = other DNA
caccataaagggaacatgaat

SEQ ID NO: 7784 - DNA, 21 bp, synthetic construct
  source 1..21: mol_type = other DNA
ttcgcgcgccagggctataac

SEQ ID NO: 7785 - DNA, 21 bp, synthetic construct
  source 1..21: mol_type = other DNA
cgtatgtcagatcacaattgg

SEQ ID NO: 7786 - DNA, 21 bp, synthetic construct
  source 1..21: mol_type = other DNA
ttctcccgattgggtcataac

SEQ ID NO: 7787 - DNA, 21 bp, synthetic construct
  source 1..21: mol_type = other DNA
atcgagcgagtctcatacggt

SEQ ID NO: 7788 - DNA, 21 bp, synthetic construct
  source 1..21: mol_type = other DNA
cgaatgtcagcgtcaaattgg

SEQ ID NO: 7789 - DNA, 21 bp, synthetic construct
  source 1..21: mol_type = other DNA
tacgcgaggaacaatatgaat

SEQ ID NO: 7790 - DNA, 21 bp, synthetic construct
  source 1..21: mol_type = other DNA
gagcacggtaaaagcctctgg

SEQ ID NO: 7791 - DNA, 21 bp, synthetic construct
  source 1..21: mol_type = other DNA
ttcgcgcgcggcggttataat

SEQ ID NO: 7792 - DNA, 21 bp, synthetic construct
  source 1..21: mol_type = other DNA
ttcgtaaggtctcagatctcc

SEQ ID NO: 7793 - DNA, 21 bp, synthetic construct
  source 1..21: mol_type = other DNA
tgcggtgcctactggacagag

SEQ ID NO: 7794 - DNA, 21 bp, synthetic construct
  source 1..21: mol_type = other DNA
tttgcgaagggaggaaataac

SEQ ID NO: 7795 - DNA, 21 bp, synthetic construct
  source 1..21: mol_type = other DNA
atccaccgaatgatggttaat

SEQ ID NO: 7796 - DNA, 21 bp, synthetic construct
  source 1..21: mol_type = other DNA
tatgcacgaaataacatgaac

SEQ ID NO: 7797 - DNA, 21 bp, synthetic construct
  source 1..21: mol_type = other DNA
ttcgctaaaggggggaacaat

SEQ ID NO: 7798 - DNA, 21 bp, synthetic construct
  source 1..21: mol_type = other DNA
catcacaagggcaatatgaac

SEQ ID NO: 7799 - DNA, 21 bp, synthetic construct
  source 1..21: mol_type = other DNA
tacacccactccaacttgcat

SEQ ID NO: 7800 - DNA, 21 bp, synthetic construct
  source 1..21: mol_type = other DNA
tcaaatgcacactcctcatgg

SEQ ID NO: 7801 - DNA, 21 bp, synthetic construct
  source 1..21: mol_type = other DNA
ttgcacaggatgggaacgagt

SEQ ID NO: 7802 - DNA, 21 bp, synthetic construct
  source 1..21: mol_type = other DNA
aggatgagcgaccataactgg

SEQ ID NO: 7803 - DNA, 21 bp, synthetic construct
  source 1..21: mol_type = other DNA
cgtgttacccactgcacgggc

SEQ ID NO: 7804 - DNA, 21 bp, synthetic construct
  source 1..21: mol_type = other DNA
tatactcatagcaatctccac

SEQ ID NO: 7805 - DNA, 21 bp, synthetic construct
  source 1..21: mol_type = other DNA
tacgcccgttatggtctaaat

SEQ ID NO: 7806 - DNA, 21 bp, synthetic construct
  source 1..21: mol_type = other DNA
atttcagaattgagtcgctgg

SEQ ID NO: 7807 - DNA, 21 bp, synthetic construct
  source 1..21: mol_type = other DNA
tgcgctttcacaggcaccaga

SEQ ID NO: 7808 - DNA, 21 bp, synthetic construct
  source 1..21: mol_type = other DNA
aattacgctcgcagcaataac

SEQ ID NO: 7809 - DNA, 21 bp, synthetic construct
  source 1..21: mol_type = other DNA
ataagtgagctgagccgttgg

SEQ ID NO: 7810 - DNA, 21 bp, synthetic construct
  source 1..21: mol_type = other DNA
ttcgcaaggatgggtccgaac

SEQ ID NO: 7811 - DNA, 21 bp, synthetic construct
  source 1..21: mol_type = other DNA
tatcagcggcagggttgggat

SEQ ID NO: 7812 - DNA, 21 bp, synthetic construct
  source 1..21: mol_type = other DNA
tacaaggacggcacctggtat

SEQ ID NO: 7813 - DNA, 21 bp, synthetic construct
  source 1..21: mol_type = other DNA
tatggggccggaacttggcac

SEQ ID NO: 7814 - DNA, 21 bp, synthetic construct
  source 1..21: mol_type = other DNA
tatcaccgccttgacaatcca

SEQ ID NO: 7815 - DNA, 21 bp, synthetic construct
  source 1..21: mol_type = other DNA
tacgctagtggacactggaat

SEQ ID NO: 7816 - DNA, 21 bp, synthetic construct
  source 1..21: mol_type = other DNA
tcggcagaatgggtctcttat

SEQ ID NO: 7817 - DNA, 21 bp, synthetic construct
  source 1..21: mol_type = other DNA
ctgcatcgcatgggcactagc

SEQ ID NO: 7818 - DNA, 21 bp, synthetic construct
  source 1..21: mol_type = other DNA
agaggtaacggggggcataag

SEQ ID NO: 7819 - DNA, 21 bp, synthetic construct
  source 1..21: mol_type = other DNA
atgtacaacgactgttgcgtt

SEQ ID NO: 7820 - DNA, 21 bp, synthetic construct
  source 1..21: mol_type = other DNA
cataaatgcggagatacccgt

SEQ ID NO: 7821 - DNA, 21 bp, synthetic construct
  source 1..21: mol_type = other DNA
aaccaaaagcatcttatgtat

SEQ ID NO: 7822 - DNA, 21 bp, synthetic construct
  source 1..21: mol_type = other DNA
cgcaactacgatacgtaccct

SEQ ID NO: 7823 - DNA, 21 bp, synthetic construct
  source 1..21: mol_type = other DNA
tatttcacccgacaagtgaat

SEQ ID NO: 7824 - DNA, 21 bp, synthetic construct
  source 1..21: mol_type = other DNA
tattggaaaaatactcccgac

SEQ ID NO: 7825 - DNA, 21 bp, synthetic construct
  source 1..21: mol_type = other DNA
agaaattatgacacttatccc

SEQ ID NO: 7826 - DNA, 21 bp, synthetic construct
  source 1..21: mol_type = other DNA
tatagccgctacaacataaac

SEQ ID NO: 7827 - DNA, 21 bp, synthetic construct
  source 1..21: mol_type = other DNA
taccatagattggataacccc

SEQ ID NO: 7828 - DNA, 21 bp, synthetic construct
  source 1..21: mol_type = other DNA
tacacaaggacacaagcgtac

SEQ ID NO: 7829 - DNA, 21 bp, synthetic construct
  source 1..21: mol_type = other DNA
atgagtgcgcatgttaagtat

SEQ ID NO: 7830 - DNA, 21 bp, synthetic construct
  source 1..21: mol_type = other DNA
aagagcccctacgcaaccttc

SEQ ID NO: 7831 - DNA, 21 bp, synthetic construct
  source 1..21: mol_type = other DNA
tcgaacgcccattcatcctgg

SEQ ID NO: 7832 - DNA, 21 bp, synthetic construct
  source 1..21: mol_type = other DNA
tatgcgtctgggcattggaac

SEQ ID NO: 7833 - DNA, 21 bp, synthetic construct
  source 1..21: mol_type = other DNA
atgtccgcacacgtgaaatac

SEQ ID NO: 7834 - DNA, 21 bp, synthetic construct
  source 1..21: mol_type = other DNA
cgtatgtctgccagtaactgg

SEQ ID NO: 7835 - DNA, 21 bp, synthetic construct
  source 1..21: mol_type = other DNA
tactggaagaacacaccggat

SEQ ID NO: 7836 - DNA, 21 bp, synthetic construct
  source 1..21: mol_type = other DNA
tttgctcgcatgggaccaaat

SEQ ID NO: 7837 - DNA, 21 bp, synthetic construct
  source 1..21: mol_type = other DNA
ttgtgtgggagttgtcggagt

SEQ ID NO: 7838 - DNA, 21 bp, synthetic construct
  source 1..21: mol_type = other DNA
aattcgccataccgtcctttt

SEQ ID NO: 7839 - DNA, 21 bp, synthetic construct
  source 1..21: mol_type = other DNA
ctgtggaggtccggagtgaac

SEQ ID NO: 7840 - DNA, 21 bp, synthetic construct
  source 1..21: mol_type = other DNA
tacggtgctggtacctggcat

SEQ ID NO: 7841 - DNA, 21 bp, synthetic construct
  source 1..21: mol_type = other DNA
agatgcggagactgtgtgttc

SEQ ID NO: 7842 - DNA, 21 bp, synthetic construct
  source 1..21: mol_type = other DNA
ttgtgtcgcccgtgtagggag

SEQ ID NO: 7843 - DNA, 21 bp, synthetic construct
  source 1..21: mol_type = other DNA
tacgcaaggcaaaatcacaat

SEQ ID NO: 7844 - DNA, 21 bp, synthetic construct
  source 1..21: mol_type = other DNA
tattggaagggcgacaatggt

SEQ ID NO: 7845 - DNA, 21 bp, synthetic construct
  source 1..21: mol_type = other DNA
tactggaaaggagataacggc

SEQ ID NO: 7846 - DNA, 21 bp, synthetic construct
  source 1..21: mol_type = other DNA
tattccagaaatgctgataac

SEQ ID NO: 7847 - DNA, 21 bp, synthetic construct
  source 1..21: mol_type = other DNA
cgcggagaatggcaatttgcg

SEQ ID NO: 7848 - DNA, 21 bp, synthetic construct
  source 1..21: mol_type = other DNA
tatgtgtacagtaatacccac

SEQ ID NO: 7849 - DNA, 21 bp, synthetic construct
  source 1..21: mol_type = other DNA
agcgcggagtgggtttcatac

SEQ ID NO: 7850 - DNA, 21 bp, synthetic construct
  source 1..21: mol_type = other DNA
atacatcggatgatggtaaac

SEQ ID NO: 7851 - DNA, 21 bp, synthetic construct
  source 1..21: mol_type = other DNA
tacgtttattcgaacacacat

SEQ ID NO: 7852 - DNA, 21 bp, synthetic construct
  source 1..21: mol_type = other DNA
tccaagtatgcaccaaatagt

SEQ ID NO: 7853 - DNA, 21 bp, synthetic construct
  source 1..21: mol_type = other DNA
tcctgtagaattagcgagaaa

SEQ ID NO: 7854 - DNA, 21 bp, synthetic construct
  source 1..21: mol_type = other DNA
tcaaaatacgcgccgaactct

SEQ ID NO: 7855 - DNA, 21 bp, synthetic construct
  source 1..21: mol_type = other DNA
tatgctcgctacggattaaac

SEQ ID NO: 7856 - DNA, 21 bp, synthetic construct
  source 1..21: mol_type = other DNA
aatcagaaacacctgatgtac

SEQ ID NO: 7857 - DNA, 21 bp, synthetic construct
  source 1..21: mol_type = other DNA
tattccaggatgggacacaac

SEQ ID NO: 7858 - DNA, 21 bp, synthetic construct
  source 1..21: mol_type = other DNA
tatacccgaactcaggcctat

SEQ ID NO: 7859 - DNA, 21 bp, synthetic construct
  source 1..21: mol_type = other DNA
tggtgccgagaatgcatgaac

SEQ ID NO: 7860 - DNA, 21 bp, synthetic construct
  source 1..21: mol_type = other DNA
aactccccttataggccgttc

SEQ ID NO: 7861 - DNA, 21 bp, synthetic construct
  source 1..21: mol_type = other DNA
gttagggaatatatgtcctat

SEQ ID NO: 7862 - DNA, 21 bp, synthetic construct
  source 1..21: mol_type = other DNA
tatcatcgtgcacagatgaac

SEQ ID NO: 7863 - DNA, 21 bp, synthetic construct
  source 1..21: mol_type = other DNA
acgaacgagttctacggttgg

SEQ ID NO: 7864 - DNA, 21 bp, synthetic construct
  source 1..21: mol_type = other DNA
tatgcccgacagaaccataac

SEQ ID NO: 7865 - DNA, 21 bp, synthetic construct
  source 1..21: mol_type = other DNA
tactctcgcaacgcagacaat

SEQ ID NO: 7866 - DNA, 21 bp, synthetic construct
  source 1..21: mol_type = other DNA
taccaccgccttggatcaact

SEQ ID NO: 7867 - DNA, 21 bp, synthetic construct
  source 1..21: mol_type = other DNA
cgaaacgagtatacgacgtac

SEQ ID NO: 7868 - DNA, 21 bp, synthetic construct
  source 1..21: mol_type = other DNA
taccacaggtcaagtagcaat

SEQ ID NO: 7869 - DNA, 21 bp, synthetic construct
  source 1..21: mol_type = other DNA
tatcatcgattaggtagcacg

SEQ ID NO: 7870 - DNA, 21 bp, synthetic construct
  source 1..21: mol_type = other DNA
cgcaatgaatacaccacttat

SEQ ID NO: 7871 - DNA, 21 bp, synthetic construct
  source 1..21: mol_type = other DNA
aattatgcttctcactcctgg

SEQ ID NO: 7872 - DNA, 21 bp, synthetic construct
  source 1..21: mol_type = other DNA
atgctctgcgtcgcaggcgat

SEQ ID NO: 7873 - DNA, 21 bp, synthetic construct
  source 1..21: mol_type = other DNA
cgttgtggcgattgcgtattt

SEQ ID NO: 7874 - DNA, 21 bp, synthetic construct
  source 1..21: mol_type = other DNA
tatgctaggttaaaccataac

SEQ ID NO: 7875 - DNA, 21 bp, synthetic construct
  source 1..21: mol_type = other DNA
ggctacgcaggtaagaggaat

SEQ ID NO: 7876 - DNA, 21 bp, synthetic construct
  source 1..21: mol_type = other DNA
ctatccaagttatcctgcaat

SEQ ID NO: 7877 - DNA, 21 bp, synthetic construct
  source 1..21: mol_type = other DNA
tactctcgtatgggtcataat

SEQ ID NO: 7878 - DNA, 21 bp, synthetic construct
  source 1..21: mol_type = other DNA
aataattgcgcggacaatttc

SEQ ID NO: 7879 - DNA, 21 bp, synthetic construct
  source 1..21: mol_type = other DNA
tcttctcccaaccttagctgg

SEQ ID NO: 7880 - DNA, 21 bp, synthetic construct
  source 1..21: mol_type = other DNA
tgtgcatttaccgggacgcgc

SEQ ID NO: 7881 - DNA, 21 bp, synthetic construct
  source 1..21: mol_type = other DNA
cgttatgaagcctctaactgg

SEQ ID NO: 7882 - DNA, 21 bp, synthetic construct
  source 1..21: mol_type = other DNA
cgcaacgacttccaagtctat

SEQ ID NO: 7883 - DNA, 21 bp, synthetic construct
  source 1..21: mol_type = other DNA
tacgcccgtctaaatcacaat

SEQ ID NO: 7884 - DNA, 21 bp, synthetic construct
  source 1..21: mol_type = other DNA
gtacgcgagtacatgtcttac

SEQ ID NO: 7885 - DNA, 21 bp, synthetic construct
  source 1..21: mol_type = other DNA
ctttggaaaaccggtcacaat

SEQ ID NO: 7886 - DNA, 21 bp, synthetic construct
  source 1..21: mol_type = other DNA
acttacgctagcagcaactgg

SEQ ID NO: 7887 - DNA, 21 bp, synthetic construct
  source 1..21: mol_type = other DNA
ggagagtggtgtgtgaagaat

SEQ ID NO: 7888 - DNA, 21 bp, synthetic construct
  source 1..21: mol_type = other DNA
tatcatcgttcgtcttctaac

SEQ ID NO: 7889 - DNA, 21 bp, synthetic construct
  source 1..21: mol_type = other DNA
ttgtggaagactgggcataac

SEQ ID NO: 7890 - DNA, 21 bp, synthetic construct
  source 1..21: mol_type = other DNA
aagaatatgtggcaaaattca

SEQ ID NO: 7891 - DNA, 21 bp, synthetic construct
  source 1..21: mol_type = other DNA
cagcacggacactcccagtgg

SEQ ID NO: 7892 - DNA, 21 bp, synthetic construct
  source 1..21: mol_type = other DNA
agaaatgattttcaggtttac

SEQ ID NO: 7893 - DNA, 21 bp, synthetic construct
  source 1..21: mol_type = other DNA
accgaaacaaagttttgtaat

SEQ ID NO: 7894 - DNA, 21 bp, synthetic construct
  source 1..21: mol_type = other DNA
cgatacgaggcaagtaattgg

SEQ ID NO: 7895 - DNA, 21 bp, synthetic construct
  source 1..21: mol_type = other DNA
tattggaaaagccagacagat

SEQ ID NO: 7896 - DNA, 21 bp, synthetic construct
  source 1..21: mol_type = other DNA
tcatccccgaatctctcgtgg

SEQ ID NO: 7897 - DNA, 21 bp, synthetic construct
  source 1..21: mol_type = other DNA
tgtacatctgatagctttccc

SEQ ID NO: 7898 - DNA, 21 bp, synthetic construct
  source 1..21: mol_type = other DNA
tggtgtcgtgagtgtatgaat

SEQ ID NO: 7899 - DNA, 21 bp, synthetic construct
  source 1..21: mol_type = other DNA
catagtcgggtcggccataac

SEQ ID NO: 7900 - DNA, 21 bp, synthetic construct
  source 1..21: mol_type = other DNA
tactggaagtcacaaaccgac

SEQ ID NO: 7901 - DNA, 21 bp, synthetic construct
  source 1..21: mol_type = other DNA
tacgcgaggcacggacagaat

SEQ ID NO: 7902 - DNA, 21 bp, synthetic construct
  source 1..21: mol_type = other DNA
tcctcaccatactctcaattc

SEQ ID NO: 7903 - DNA, 21 bp, synthetic construct
  source 1..21: mol_type = other DNA
cactcgcgcgtgggtcacaat

SEQ ID NO: 7904 - DNA, 21 bp, synthetic construct
  source 1..21: mol_type = other DNA
tactatcatgggatggctgtc

SEQ ID NO: 7905 - DNA, 21 bp, synthetic construct
  source 1..21: mol_type = other DNA
cggggtgagtggcagttcgca

SEQ ID NO: 7906 - DNA, 21 bp, synthetic construct
  source 1..21: mol_type = other DNA
atgcactgggacgcactccat

SEQ ID NO: 7907 - DNA, 21 bp, synthetic construct
  source 1..21: mol_type = other DNA
tatgcccgccatggccaaaac

SEQ ID NO: 7908 - DNA, 21 bp, synthetic construct
  source 1..21: mol_type = other DNA
tattaccacggtatggcggtt

SEQ ID NO: 7909 - DNA, 21 bp, synthetic construct
  source 1..21: mol_type = other DNA
agtccgtttatgaggcgtgag

SEQ ID NO: 7910 - DNA, 21 bp, synthetic construct
  source 1..21: mol_type = other DNA
aatgctttggtggggcgggat

SEQ ID NO: 7911 - DNA, 21 bp, synthetic construct
  source 1..21: mol_type = other DNA
tatgtggttacgcatcggaat

SEQ ID NO: 7912 - DNA, 21 bp, synthetic construct
  source 1..21: mol_type = other DNA
ggtcgttttagtgaggggcgt

SEQ ID NO: 7913 - DNA, 21 bp, synthetic construct
  source 1..21: mol_type = other DNA
acgaagtggggtgcgcatgtt

SEQ ID NO: 7914 - DNA, 21 bp, synthetic construct
  source 1..21: mol_type = other DNA
ctgaggtattctcggactgag

SEQ ID NO: 7915 - DNA, 21 bp, synthetic construct
  source 1..21: mol_type = other DNA
tttcgggggaattgtgggcct

SEQ ID NO: 7916 - DNA, 21 bp, synthetic construct
  source 1..21: mol_type = other DNA
gggcctggtgcggggtgtaat

SEQ ID NO: 7917 - DNA, 21 bp, synthetic construct
  source 1..21: mol_type = other DNA
tattttagtaagcagattgct

SEQ ID NO: 7918 - DNA, 21 bp, synthetic construct
  source 1..21: mol_type = other DNA
gatttgtctgataggaggtgg

SEQ ID NO: 7919 - DNA, 21 bp, synthetic construct
  source 1..21: mol_type = other DNA
cggaagcttccgggggttgct

SEQ ID NO: 7920 - DNA, 21 bp, synthetic construct
  source 1..21: mol_type = other DNA
gggcgtgttgttagtaagccg

SEQ ID NO: 7921 - DNA, 21 bp, synthetic construct
  source 1..21: mol_type = other DNA
ttgagggatggtactcctagt

SEQ ID NO: 7922 - DNA, 21 bp, synthetic construct
  source 1..21: mol_type = other DNA
tttgatgagaaggtgaggcgg

SEQ ID NO: 7923 - DNA, 21 bp, synthetic construct
  source 1..21: mol_type = other DNA
gttcaggttggtcgggcgtgt

SEQ ID NO: 7924 - DNA, 21 bp, synthetic construct
  source 1..21: mol_type = other DNA
gttatggaggctagggcgtgg

SEQ ID NO: 7925 - DNA, 21 bp, synthetic construct
  source 1..21: mol_type = other DNA
ggtgttgctggttgtgtggct

SEQ ID NO: 7926 - DNA, 21 bp, synthetic construct
  source 1..21: mol_type = other DNA
aattcttattcgcgtgcgttt

SEQ ID NO: 7927 - DNA, 21 bp, synthetic construct
  source 1..21: mol_type = other DNA
atgcggcttagtcggcaggat

SEQ ID NO: 7928 - DNA, 21 bp, synthetic construct
  source 1..21: mol_type = other DNA
cttttggagtctagtaagtgg

SEQ ID NO: 7929 - DNA, 21 bp, synthetic construct
  source 1..21: mol_type = other DNA
agttcgctttgtttgcgtgag

SEQ ID NO: 7930 - DNA, 21 bp, synthetic construct
  source 1..21: mol_type = other DNA
ggtggtcctgggtctatttgg

SEQ ID NO: 7931 - DNA, 21 bp, synthetic construct
  source 1..21: mol_type = other DNA
tattatcggggtccgtcgggt

SEQ ID NO: 7932 - DNA, 21 bp, synthetic construct
  source 1..21: mol_type = other DNA
gggcttggttcgacgtgttcg

SEQ ID NO: 7933 - DNA, 21 bp, synthetic construct
  source 1..21: mol_type = other DNA
tatgtgcggtcttcgatgggt

SEQ ID NO: 7934 - DNA, 21 bp, synthetic construct
  source 1..21: mol_type = other DNA
tgtggtgggcttagtcgtggt

SEQ ID NO: 7935 - DNA, 21 bp, synthetic construct
  source 1..21: mol_type = other DNA
tgggctttgaggcggatggag

SEQ ID NO: 7936 - DNA, 21 bp, synthetic construct
  source 1..21: mol_type = other DNA
tgtatgtcggataagagggcg

SEQ ID NO: 7937 - DNA, 21 bp, synthetic construct
  source 1..21: mol_type = other DNA
tgttcgatgattaataagtct

SEQ ID NO: 7938 - DNA, 21 bp, synthetic construct
  source 1..21: mol_type = other DNA
gatccggttgctcgtagttgg

SEQ ID NO: 7939 - DNA, 21 bp, synthetic construct
  source 1..21: mol_type = other DNA
gagtcttcttcgcggacgtgg

SEQ ID NO: 7940 - DNA, 21 bp, synthetic construct
  source 1..21: mol_type = other DNA
ctgagtcgtgctagtgtgaat

SEQ ID NO: 7941 - DNA, 21 bp, synthetic construct
  source 1..21: mol_type = other DNA
gatccgtcttggaagcgggtt

SEQ ID NO: 7942 - DNA, 21 bp, synthetic construct
  source 1..21: mol_type = other DNA
tatgggcagggttatggtcgg

SEQ ID NO: 7943 - DNA, 21 bp, synthetic construct
  source 1..21: mol_type = other DNA
ttggatgctaagtgtatgccg

SEQ ID NO: 7944 - DNA, 21 bp, synthetic construct
  source 1..21: mol_type = other DNA
tattttgctggtcgtattgat

SEQ ID NO: 7945 - DNA, 21 bp, synthetic construct
  source 1..21: mol_type = other DNA
tattttagtggtcgtgtggct

SEQ ID NO: 7946 - DNA, 21 bp, synthetic construct
  source 1..21: mol_type = other DNA
tattctcggcttctgcctatg

SEQ ID NO: 7947 - DNA, 21 bp, synthetic construct
  source 1..21: mol_type = other DNA
tattctcggattatggctaat

SEQ ID NO: 7948 - DNA, 21 bp, synthetic construct
  source 1..21: mol_type = other DNA
gtgcgtcatcggagtgagttg

SEQ ID NO: 7949 - DNA, 21 bp, synthetic construct
  source 1..21: mol_type = other DNA
gatatggagtcggctgtttgg

SEQ ID NO: 7950 - DNA, 21 bp, synthetic construct
  source 1..21: mol_type = other DNA
tggacgactcggattagtcat

SEQ ID NO: 7951 - DNA, 21 bp, synthetic construct
  source 1..21: mol_type = other DNA
catcgttttctgaagggggag

SEQ ID NO: 7952 - DNA, 21 bp, synthetic construct
  source 1..21: mol_type = other DNA
tgggttgggggtcggagtaat

SEQ ID NO: 7953 - DNA, 21 bp, synthetic construct
  source 1..21: mol_type = other DNA
cttcataggcagctgccgctg

SEQ ID NO: 7954 - DNA, 21 bp, synthetic construct
  source 1..21: mol_type = other DNA
tgtgagaagctgtcttctagg

SEQ ID NO: 7955 - DNA, 21 bp, synthetic construct
  source 1..21: mol_type = other DNA
ttgcgtcatattagtcatact

SEQ ID NO: 7956 - DNA, 21 bp, synthetic construct
  source 1..21: mol_type = other DNA
gcgtgggagcgtaagcttatg

SEQ ID NO: 7957 - DNA, 21 bp, synthetic construct
  source 1..21: mol_type = other DNA
tttgttgctcgtgtgcgtgat

SEQ ID NO: 7958 - DNA, 21 bp, synthetic construct
  source 1..21: mol_type = other DNA
tggggtcatcctagtagggcg

SEQ ID NO: 7959 - DNA, 21 bp, synthetic construct
  source 1..21: mol_type = other DNA
gctgagagggggtgttgtggt

SEQ ID NO: 7960 - DNA, 21 bp, synthetic construct
  source 1..21: mol_type = other DNA
aggatggagtcgagtgtttgg

SEQ ID NO: 7961 - DNA, 21 bp, synthetic construct
  source 1..21: mol_type = other DNA
tgtgttagtgtgggtagggct

SEQ ID NO: 7962 - DNA, 21 bp, synthetic construct
  source 1..21: mol_type = other DNA
gttgagtcgtctaatggtgtt

SEQ ID NO: 7963 - DNA, 21 bp, synthetic construct
  source 1..21: mol_type = other DNA
gattctgattttacgagttgg

SEQ ID NO: 7964 - DNA, 21 bp, synthetic construct
  source 1..21: mol_type = other DNA
gctcatcgtcttcttccttct

SEQ ID NO: 7965 - DNA, 21 bp, synthetic construct
  source 1..21: mol_type = other DNA
ggtcaggattctaggaggaat

SEQ ID NO: 7966 - DNA, 21 bp, synthetic construct
  source 1..21: mol_type = other DNA
gatcttaattctcggtcgtgg

SEQ ID NO: 7967 - DNA, 21 bp, synthetic construct
  source 1..21: mol_type = other DNA
gcgagtattacgacgtgtagg

SEQ ID NO: 7968 - DNA, 21 bp, synthetic construct
  source 1..21: mol_type = other DNA
gcttttactcatcgggtgcag

SEQ ID NO: 7969 - DNA, 21 bp, synthetic construct
  source 1..21: mol_type = other DNA
tatcttaagtctcagacgagt

SEQ ID NO: 7970 - DNA, 21 bp, synthetic construct
  source 1..21: mol_type = other DNA
tgtggtagttggcagcgtgag

SEQ ID NO: 7971 - DNA, 21 bp, synthetic construct
  source 1..21: mol_type = other DNA
tatagtcgtcttcatgttgat

SEQ ID NO: 7972 - DNA, 21 bp, synthetic construct
  source 1..21: mol_type = other DNA
cgtgtgtcgtgtcctccgccg

SEQ ID NO: 7973 - DNA, 21 bp, synthetic construct
  source 1..21: mol_type = other DNA
cgttcggattttgttacttat

SEQ ID NO: 7974 - DNA, 21 bp, synthetic construct
  source 1..21: mol_type = other DNA
cagtatgcgaggagtctggag

SEQ ID NO: 7975 - DNA, 21 bp, synthetic construct
  source 1..21: mol_type = other DNA
ggtatggagcctgtgcgttgg

SEQ ID NO: 7976 - DNA, 21 bp, synthetic construct
  source 1..21: mol_type = other DNA
gatatgaggatggggacttgg

SEQ ID NO: 7977 - DNA, 21 bp, synthetic construct
  source 1..21: mol_type = other DNA
cagccgccttcttgtaaggcg

SEQ ID NO: 7978 - DNA, 21 bp, synthetic construct
  source 1..21: mol_type = other DNA
gcccaaggggcggattcttgg

SEQ ID NO: 7979 - DNA, 21 bp, synthetic construct
  source 1..21: mol_type = other DNA
ggtgggcattatatgcttaag

SEQ ID NO: 7980 - DNA, 21 bp, synthetic construct
  source 1..21: mol_type = other DNA
tttagtaggcttgggattaat

SEQ ID NO: 7981 - DNA, 21 bp, synthetic construct
  source 1..21: mol_type = other DNA
tattcggttattgggcctaat

SEQ ID NO: 7982 - DNA, 21 bp, synthetic construct
  source 1..21: mol_type = other DNA
cgggatgtgacggtgtttcct

SEQ ID NO: 7983 - DNA, 21 bp, synthetic construct
  source 1..21: mol_type = other DNA
cgtaatagggatgtttatccg

SEQ ID NO: 7984 - DNA, 21 bp, synthetic construct
  source 1..21: mol_type = other DNA
ggtatggcggatagggcttgg

SEQ ID NO: 7985 - DNA, 21 bp, synthetic construct
  source 1..21: mol_type = other DNA
actgagtctactaatgggcgt

SEQ ID NO: 7986 - DNA, 21 bp, synthetic construct
  source 1..21: mol_type = other DNA
agtgttcggcaggagcgttat

SEQ ID NO: 7987 - DNA, 21 bp, synthetic construct
  source 1..21: mol_type = other DNA
ggggttgatcaggtgaggtgg

SEQ ID NO: 7988 - DNA, 21 bp, synthetic construct
  source 1..21: mol_type = other DNA
aatttgatgggttgtactggt

SEQ ID NO: 7989 - DNA, 21 bp, synthetic construct
  source 1..21: mol_type = other DNA
ggggctgagggtgtgcggtgg

SEQ ID NO: 7990 - DNA, 21 bp, synthetic construct
  source 1..21: mol_type = other DNA
gttatggaggataggatttgg

SEQ ID NO: 7991 - DNA, 21 bp, synthetic construct
  source 1..21: mol_type = other DNA
ctgacgtctcgtgagggtatt

SEQ ID NO: 7992 - DNA, 21 bp, synthetic construct
  source 1..21: mol_type = other DNA
tggagtacgcataaggctttt

SEQ ID NO: 7993 - DNA, 21 bp, synthetic construct
  source 1..21: mol_type = other DNA
cgggaggaggtttcgatttgg

SEQ ID NO: 7994 - DNA, 21 bp, synthetic construct
  source 1..21: mol_type = other DNA
aatatggcgtcggcggggtgg

SEQ ID NO: 7995 - DNA, 21 bp, synthetic construct
  source 1..21: mol_type = other DNA
cttatttctggtgatggtccg

SEQ ID NO: 7996 - DNA, 21 bp, synthetic construct
  source 1..21: mol_type = other DNA
tcggcttatagtgctaagtat

SEQ ID NO: 7997 - DNA, 21 bp, synthetic construct
  source 1..21: mol_type = other DNA
tatgctagggcggggcctgat

SEQ ID NO: 7998 - DNA, 21 bp, synthetic construct
  source 1..21: mol_type = other DNA
gtggagtcttcgcggttgtgg

SEQ ID NO: 7999 - DNA, 21 bp, synthetic construct
  source 1..21: mol_type = other DNA
gatatgtcgtcggttgcgtgg

SEQ ID NO: 8000 - DNA, 21 bp, synthetic construct
  source 1..21: mol_type = other DNA
gattcttttcgggggtatgat

SEQ ID NO: 8001 - DNA, 21 bp, synthetic construct
  source 1..21: mol_type = other DNA
gggggtcctggttcgatttgg

SEQ ID NO: 8002 - DNA, 21 bp, synthetic construct
  source 1..21: mol_type = other DNA
gatctggcgagtccggattgg

SEQ ID NO: 8003 - DNA, 21 bp, synthetic construct
  source 1..21: mol_type = other DNA
gtgagtacgcattgttgtgcg

SEQ ID NO: 8004 - DNA, 21 bp, synthetic construct
  source 1..21: mol_type = other DNA
gtgctgagttctaatgtttgg

SEQ ID NO: 8005 - DNA, 21 bp, synthetic construct
  source 1..21: mol_type = other DNA
gtgatgcctgatagggtttgg

SEQ ID NO: 8006 - DNA, 21 bp, synthetic construct
  source 1..21: mol_type = other DNA
aagatggaggataggagttgg

SEQ ID NO: 8007 - DNA, 21 bp, synthetic construct
  source 1..21: mol_type = other DNA
aggtcgatggttgggtgtgat

SEQ ID NO: 8008 - DNA, 21 bp, synthetic construct
  source 1..21: mol_type = other DNA
agtttgagtgataggggttgg

SEQ ID NO: 8009 - DNA, 21 bp, synthetic construct
  source 1..21: mol_type = other DNA
acttttgcgcatacgaatcgt

SEQ ID NO: 8010 - DNA, 21 bp, synthetic construct
  source 1..21: mol_type = other DNA
ttgagtaaggttggtacgaat

SEQ ID NO: 8011 - DNA, 21 bp, synthetic construct
  source 1..21: mol_type = other DNA
tcgggtaattatacggctcgt

SEQ ID NO: 8012 - DNA, 21 bp, synthetic construct
  source 1..21: mol_type = other DNA
tatcatagggctgctgcgttg

SEQ ID NO: 8013 - DNA, 21 bp, synthetic construct
  source 1..21: mol_type = other DNA
aatatgagtgcggggacgtgg

SEQ ID NO: 8014 - DNA, 21 bp, synthetic construct
  source 1..21: mol_type = other DNA
gcgaagggttgggttcgggat

SEQ ID NO: 8015 - DNA, 21 bp, synthetic construct
  source 1..21: mol_type = other DNA
gttatggcgagtcagggttgg

SEQ ID NO: 8016 - DNA, 21 bp, synthetic construct
  source 1..21: mol_type = other DNA
gatttgagttctgggaattgg

SEQ ID NO: 8017 - DNA, 21 bp, synthetic construct
  source 1..21: mol_type = other DNA
aagttggatgattatggttgg

SEQ ID NO: 8018 - DNA, 21 bp, synthetic construct
  source 1..21: mol_type = other DNA
tattcgaggttggatgtgctg

SEQ ID NO: 8019 - DNA, 21 bp, synthetic construct
  source 1..21: mol_type = other DNA
attttgtcggatcgttcttgg

SEQ ID NO: 8020 - DNA, 21 bp, synthetic construct
  source 1..21: mol_type = other DNA
tattcgagggttggttcgggt

SEQ ID NO: 8021 - DNA, 21 bp, synthetic construct
  source 1..21: mol_type = other DNA
ggttttgcgaggctgcgggat

SEQ ID NO: 8022 - DNA, 21 bp, synthetic construct
  source 1..21: mol_type = other DNA
cttagtcgtattggtactaat

SEQ ID NO: 8023 - DNA, 21 bp, synthetic construct
  source 1..21: mol_type = other DNA
ggtggggagtcgtcgatttgg

SEQ ID NO: 8024 - DNA, 21 bp, synthetic construct
  source 1..21: mol_type = other DNA
attagtgagtttagtggttat

SEQ ID NO: 8025 - DNA, 21 bp, synthetic construct
  source 1..21: mol_type = other DNA
aggcttgcggatgcgtatccg

SEQ ID NO: 8026 - DNA, 21 bp, synthetic construct
  source 1..21: mol_type = other DNA
tggttttctgggcagattgct

SEQ ID NO: 8027 - DNA, 21 bp, synthetic construct
  source 1..21: mol_type = other DNA
tgtacttctaagactgggcat

SEQ ID NO: 8028 - DNA, 21 bp, synthetic construct
  source 1..21: mol_type = other DNA
aggacgaatcgggttgagtgg

SEQ ID NO: 8029 - DNA, 21 bp, synthetic construct
  source 1..21: mol_type = other DNA
gttgaggcgtctaggtcttgg

SEQ ID NO: 8030 - DNA, 21 bp, synthetic construct
  source 1..21: mol_type = other DNA
gtgctttctgcgagtagttgg

SEQ ID NO: 8031 - DNA, 21 bp, synthetic construct
  source 1..21: mol_type = other DNA
gttctgtctgagcggagttgg

SEQ ID NO: 8032 - DNA, 21 bp, synthetic construct
  source 1..21: mol_type = other DNA
ctttcggcgttgtctgttaat

SEQ ID NO: 8033 - DNA, 21 bp, synthetic construct
  source 1..21: mol_type = other DNA
cgtggtggtggtctgtttgtt

SEQ ID NO: 8034 - DNA, 21 bp, synthetic construct
  source 1..21: mol_type = other DNA
acggagtcgactcatggtcgg

SEQ ID NO: 8035 - DNA, 21 bp, synthetic construct
  source 1..21: mol_type = other DNA
tatgtgcggtctgatactgct

SEQ ID NO: 8036 - DNA, 21 bp, synthetic construct
  source 1..21: mol_type = other DNA
agggaggcggtttctacgtgg

SEQ ID NO: 8037 - DNA, 21 bp, synthetic construct
  source 1..21: mol_type = other DNA
tattattcgggtgttaagttg

SEQ ID NO: 8038 - DNA, 21 bp, synthetic construct
  source 1..21: mol_type = other DNA
tatcgtatgtctcttgagcgt

SEQ ID NO: 8039 - DNA, 21 bp, synthetic construct
  source 1..21: mol_type = other DNA
ttgatggagcagaggacttgg

SEQ ID NO: 8040 - DNA, 21 bp, synthetic construct
  source 1..21: mol_type = other DNA
ggttgtcggcatggggatatt

SEQ ID NO: 8041 - DNA, 21 bp, synthetic construct
  source 1..21: mol_type = other DNA
tggcgtggtagtcagcatgtt

SEQ ID NO: 8042 - DNA, 21 bp, synthetic construct
  source 1..21: mol_type = other DNA
ggttctgagtttgtgtcgtat

SEQ ID NO: 8043 - DNA, 21 bp, synthetic construct
  source 1..21: mol_type = other DNA
agtcttagtgatcggggttgg

SEQ ID NO: 8044 - DNA, 21 bp, synthetic construct
  source 1..21: mol_type = other DNA
tattggcatggtaagccggag

SEQ ID NO: 8045 - DNA, 21 bp, synthetic construct
  source 1..21: mol_type = other DNA
ttttttcgtggtaatatgggg

SEQ ID NO: 8046 - DNA, 21 bp, synthetic construct
  source 1..21: mol_type = other DNA
gtggagtcgtctagtcgttgg

SEQ ID NO: 8047 - DNA, 21 bp, synthetic construct
  source 1..21: mol_type = other DNA
tgtgggaaggctcatagttcg

SEQ ID NO: 8048 - DNA, 21 bp, synthetic construct
  source 1..21: mol_type = other DNA
gatatgtcggtggggaagtgg

SEQ ID NO: 8049 - DNA, 21 bp, synthetic construct
  source 1..21: mol_type = other DNA
ttgctgtcttctcatgattgg

SEQ ID NO: 8050 - DNA, 21 bp, synthetic construct
  source 1..21: mol_type = other DNA
atgagggatgggactagtagt

SEQ ID NO: 8051 - DNA, 21 bp, synthetic construct
  source 1..21: mol_type = other DNA
tatgttaagtcggatgttggt

SEQ ID NO: 8052 - DNA, 21 bp, synthetic construct
  source 1..21: mol_type = other DNA
tggtcgcgtgtgggggtgaat

SEQ ID NO: 8053 - DNA, 21 bp, synthetic construct
  source 1..21: mol_type = other DNA
tggtcttataagtctaatggt

SEQ ID NO: 8054 - DNA, 21 bp, synthetic construct
  source 1..21: mol_type = other DNA
tattggggtggggttgttagt

SEQ ID NO: 8055 - DNA, 21 bp, synthetic construct
  source 1..21: mol_type = other DNA
aagatggaggcgatgacgtgg

SEQ ID NO: 8056 - DNA, 21 bp, synthetic construct
  source 1..21: mol_type = other DNA
cttagtcggttggggggtggg

SEQ ID NO: 8057 - DNA, 21 bp, synthetic construct
  source 1..21: mol_type = other DNA
ttgatggaggcggctacttgg

SEQ ID NO: 8058 - DNA, 21 bp, synthetic construct
  source 1..21: mol_type = other DNA
aagctggattatcttgggacg

SEQ ID NO: 8059 - DNA, 21 bp, synthetic construct
  source 1..21: mol_type = other DNA
ctttcgagggcttcgcatgat

SEQ ID NO: 8060 - DNA, 21 bp, synthetic construct
  source 1..21: mol_type = other DNA
tattttagtggtgttcagccg

SEQ ID NO: 8061 - DNA, 21 bp, synthetic construct
  source 1..21: mol_type = other DNA
ctgtcgcgtgttagtcctgat

SEQ ID NO: 8062 - DNA, 21 bp, synthetic construct
  source 1..21: mol_type = other DNA
tggcgtgctgggaaggattat

SEQ ID NO: 8063 - DNA, 21 bp, synthetic construct
  source 1..21: mol_type = other DNA
aggttggagagtgttcagtgg

SEQ ID NO: 8064 - DNA, 21 bp, synthetic construct
  source 1..21: mol_type = other DNA
tatttttctggtagggatgag

SEQ ID NO: 8065 - DNA, 21 bp, synthetic construct
  source 1..21: mol_type = other DNA
attttgaagtgtacgaataat

SEQ ID NO: 8066 - DNA, 21 bp, synthetic construct
  source 1..21: mol_type = other DNA
tattctcgtgtggcgccggat

SEQ ID NO: 8067 - DNA, 21 bp, synthetic construct
  source 1..21: mol_type = other DNA
cgtttggagtctactcattgg

SEQ ID NO: 8068 - DNA, 21 bp, synthetic construct
  source 1..21: mol_type = other DNA
tattggtctggtactgtgacg

SEQ ID NO: 8069 - DNA, 21 bp, synthetic construct
  source 1..21: mol_type = other DNA
tatgctcgtcttagtattaat

SEQ ID NO: 8070 - DNA, 21 bp, synthetic construct
  source 1..21: mol_type = other DNA
aggggggagtatcattatccg

SEQ ID NO: 8071 - DNA, 21 bp, synthetic construct
  source 1..21: mol_type = other DNA
tttgctgcgaagtggtcgagt

SEQ ID NO: 8072 - DNA, 21 bp, synthetic construct
  source 1..21: mol_type = other DNA
tatgtgaagagtcagactatt

SEQ ID NO: 8073 - DNA, 21 bp, synthetic construct
  source 1..21: mol_type = other DNA
agtctttgtaagactacgtcg

SEQ ID NO: 8074 - DNA, 21 bp, synthetic construct
  source 1..21: mol_type = other DNA
cctcttagttctggtgtttgg

SEQ ID NO: 8075 - DNA, 21 bp, synthetic construct
  source 1..21: mol_type = other DNA
ttgatgggtggtgggacgtgg

SEQ ID NO: 8076 - DNA, 21 bp, synthetic construct
  source 1..21: mol_type = other DNA
ggttcgccgggggtgtcgtgg

SEQ ID NO: 8077 - DNA, 21 bp, synthetic construct
  source 1..21: mol_type = other DNA
caggatgattatcttacgtgg

SEQ ID NO: 8078 - DNA, 21 bp, synthetic construct
  source 1..21: mol_type = other DNA
tatgtgaagagtcagcagtct

SEQ ID NO: 8079 - DNA, 21 bp, synthetic construct
  source 1..21: mol_type = other DNA
cagaatgagtatgttatttat

SEQ ID NO: 8080 - DNA, 21 bp, synthetic construct
  source 1..21: mol_type = other DNA
gttccggggcgttctggtttt

SEQ ID NO: 8081 - DNA, 21 bp, synthetic construct
  source 1..21: mol_type = other DNA
ttttggagtgggaaggctgct

SEQ ID NO: 8082 - DNA, 21 bp, synthetic construct
  source 1..21: mol_type = other DNA
tcgacgtatgatagttttccg

SEQ ID NO: 8083 - DNA, 21 bp, synthetic construct
  source 1..21: mol_type = other DNA
tattttagtggtcggcatgag

SEQ ID NO: 8084 - DNA, 21 bp, synthetic construct
  source 1..21: mol_type = other DNA
cattctaagtctggtgggtgg

SEQ ID NO: 8085 - DNA, 21 bp, synthetic construct
  source 1..21: mol_type = other DNA
ggtgggccggggtctaattgg

SEQ ID NO: 8086 - DNA, 21 bp, synthetic construct
  source 1..21: mol_type = other DNA
ggttctcctggttcgatttgg

SEQ ID NO: 8087 - DNA, 21 bp, synthetic construct
  source 1..21: mol_type = other DNA
gttagtgagtttgcttcgtat

SEQ ID NO: 8088 - DNA, 21 bp, synthetic construct
  source 1..21: mol_type = other DNA
cttcataagttgtcgaataat

SEQ ID NO: 8089 - DNA, 21 bp, synthetic construct
  source 1..21: mol_type = other DNA
ctttgtaagccgtgtttgact

SEQ ID NO: 8090 - DNA, 21 bp, synthetic construct
  source 1..21: mol_type = other DNA
cgtagtttggattcttatccg

SEQ ID NO: 8091 - DNA, 21 bp, synthetic construct
  source 1..21: mol_type = other DNA
tgtgcgcctcgggtgtcgagt

SEQ ID NO: 8092 - DNA, 21 bp, synthetic construct
  source 1..21: mol_type = other DNA
ccgtatgcgaagagtccgctt

SEQ ID NO: 8093 - DNA, 21 bp, synthetic construct
  source 1..21: mol_type = other DNA
tctttgagttctcgggattgg

SEQ ID NO: 8094 - DNA, 21 bp, synthetic construct
  source 1..21: mol_type = other DNA
tgggttgataggacgaggggt

SEQ ID NO: 8095 - DNA, 21 bp, synthetic construct
  source 1..21: mol_type = other DNA
attatgcctgataggagttgg

SEQ ID NO: 8096 - DNA, 21 bp, synthetic construct
  source 1..21: mol_type = other DNA
attaattctcgtgagggtatt

SEQ ID NO: 8097 - DNA, 21 bp, synthetic construct
  source 1..21: mol_type = other DNA
ctgagtgatggtacgagtccg

SEQ ID NO: 8098 - DNA, 21 bp, synthetic construct
  source 1..21: mol_type = other DNA
tatgtgcggtctcagccgctt

SEQ ID NO: 8099 - DNA, 21 bp, synthetic construct
  source 1..21: mol_type = other DNA
tattttagtggggtgagggag

SEQ ID NO: 8100 - DNA, 21 bp, synthetic construct
  source 1..21: mol_type = other DNA
tatagtgcgtatcgtagtgtt

SEQ ID NO: 8101 - DNA, 21 bp, synthetic construct
  source 1..21: mol_type = other DNA
ggtggggagcattctacttgg

SEQ ID NO: 8102 - DNA, 21 bp, synthetic construct
  source 1..21: mol_type = other DNA
gtgatgctggatcgtggttgg

SEQ ID NO: 8103 - DNA, 21 bp, synthetic construct
  source 1..21: mol_type = other DNA
ggggggggggttgtgaagtat

SEQ ID NO: 8104 - DNA, 21 bp, synthetic construct
  source 1..21: mol_type = other DNA
tattggtcggaggttagggcg

SEQ ID NO: 8105 - DNA, 21 bp, synthetic construct
  source 1..21: mol_type = other DNA
attatgtcggataggctttgg

SEQ ID NO: 8106 - DNA, 21 bp, synthetic construct
  source 1..21: mol_type = other DNA
ttgcatagtaagctgcctaat

SEQ ID NO: 8107 - DNA, 21 bp, synthetic construct
  source 1..21: mol_type = other DNA
tattggtcgcatgtgaaggag

SEQ ID NO: 8108 - DNA, 21 bp, synthetic construct
  source 1..21: mol_type = other DNA
gcgcctgcggatcggggttgg

SEQ ID NO: 8109 - DNA, 21 bp, synthetic construct
  source 1..21: mol_type = other DNA
tattatagtggtcagcatgct

SEQ ID NO: 8110 - DNA, 21 bp, synthetic construct
  source 1..21: mol_type = other DNA
gatctgcggatggcgacttgg

SEQ ID NO: 8111 - DNA, 21 bp, synthetic construct
  source 1..21: mol_type = other DNA
gtggtgagtactaatggtgtt

SEQ ID NO: 8112 - DNA, 21 bp, synthetic construct
  source 1..21: mol_type = other DNA
ttgtcgagggttgggcagaat

SEQ ID NO: 8113 - DNA, 21 bp, synthetic construct
  source 1..21: mol_type = other DNA
tattttacggggagggagaag

SEQ ID NO: 8114 - DNA, 21 bp, synthetic construct
  source 1..21: mol_type = other DNA
tattggtctcaggttcgtgag

SEQ ID NO: 8115 - DNA, 21 bp, synthetic construct
  source 1..21: mol_type = other DNA
ctttcgaggctttcgccggtg

SEQ ID NO: 8116 - DNA, 21 bp, synthetic construct
  source 1..21: mol_type = other DNA
tctatgagtagtgctatgtgg

SEQ ID NO: 8117 - DNA, 21 bp, synthetic construct
  source 1..21: mol_type = other DNA
attggtgagtctaggctgtgg

SEQ ID NO: 8118 - DNA, 21 bp, synthetic construct
  source 1..21: mol_type = other DNA
gttcggtcgactaatggtgtt

SEQ ID NO: 8119 - DNA, 21 bp, synthetic construct
  source 1..21: mol_type = other DNA
tgtatgggtgcgcttccggag

SEQ ID NO: 8120 - DNA, 21 bp, synthetic construct
  source 1..21: mol_type = other DNA
gttttgtcttcggtttcttgg

SEQ ID NO: 8121 - DNA, 21 bp, synthetic construct
  source 1..21: mol_type = other DNA
attactagttcgaatggtatt

SEQ ID NO: 8122 - DNA, 21 bp, synthetic construct
  source 1..21: mol_type = other DNA
ttgagtaggactagtattgat

SEQ ID NO: 8123 - DNA, 21 bp, synthetic construct
  source 1..21: mol_type = other DNA
tattggtcgcaggttgttgag

SEQ ID NO: 8124 - DNA, 21 bp, synthetic construct
  source 1..21: mol_type = other DNA
gtgtattcgactaatgggatt

SEQ ID NO: 8125 - DNA, 21 bp, synthetic construct
  source 1..21: mol_type = other DNA
tcggaggcgttgactcgtagg

SEQ ID NO: 8126 - DNA, 21 bp, synthetic construct
  source 1..21: mol_type = other DNA
atgagggatggtacgaatgct

SEQ ID NO: 8127 - DNA, 21 bp, synthetic construct
  source 1..21: mol_type = other DNA
aagttggatgttggtaattgg

SEQ ID NO: 8128 - DNA, 21 bp, synthetic construct
  source 1..21: mol_type = other DNA
gataatgcttcgtctgtttgg

SEQ ID NO: 8129 - DNA, 21 bp, synthetic construct
  source 1..21: mol_type = other DNA
attttgtctagttctgggtgg

SEQ ID NO: 8130 - DNA, 21 bp, synthetic construct
  source 1..21: mol_type = other DNA
ctttatgagtctcgtgcgtgg

SEQ ID NO: 8131 - DNA, 21 bp, synthetic construct
  source 1..21: mol_type = other DNA
tattatggtcgtacgtcgagt

SEQ ID NO: 8132 - DNA, 21 bp, synthetic construct
  source 1..21: mol_type = other DNA
tttagtcggattgggggtggt

SEQ ID NO: 8133 - DNA, 21 bp, synthetic construct
  source 1..21: mol_type = other DNA
gtggcgcttaaggggtgggat

SEQ ID NO: 8134 - DNA, 21 bp, synthetic construct
  source 1..21: mol_type = other DNA
atgagtcgtgcgtcgtataat

SEQ ID NO: 8135 - DNA, 21 bp, synthetic construct
  source 1..21: mol_type = other DNA
tgtggtgtgggtcgtattgct

SEQ ID NO: 8136 - DNA, 21 bp, synthetic construct
  source 1..21: mol_type = other DNA
aaggatgattttagtgtgtat

SEQ ID NO: 8137 - DNA, 21 bp, synthetic construct
  source 1..21: mol_type = other DNA
tttgtttctaagaatggggtt

SEQ ID NO: 8138 - DNA, 21 bp, synthetic construct
  source 1..21: mol_type = other DNA
acgtggacgggtaataatgcg

SEQ ID NO: 8139 - DNA, 21 bp, synthetic construct
  source 1..21: mol_type = other DNA
aggggtgattctccgtcttgg

SEQ ID NO: 8140 - DNA, 21 bp, synthetic construct
  source 1..21: mol_type = other DNA
gatatggtttctcggagttgg

SEQ ID NO: 8141 - DNA, 21 bp, synthetic construct
  source 1..21: mol_type = other DNA
tattttacggggagtcagaat

SEQ ID NO: 8142 - DNA, 21 bp, synthetic construct
  source 1..21: mol_type = other DNA
gttacgtcgacgatgggtagg

SEQ ID NO: 8143 - DNA, 21 bp, synthetic construct
  source 1..21: mol_type = other DNA
gtgatggcggatcgtgcgtgg

SEQ ID NO: 8144 - DNA, 21 bp, synthetic construct
  source 1..21: mol_type = other DNA
gcttatcgtacggatagtcgt

SEQ ID NO: 8145 - DNA, 21 bp, synthetic construct
  source 1..21: mol_type = other DNA
tattttgcgggtaggttggcg

SEQ ID NO: 8146 - DNA, 21 bp, synthetic construct
  source 1..21: mol_type = other DNA
cagttggagtcgaggagttgg

SEQ ID NO: 8147 - DNA, 21 bp, synthetic construct
  source 1..21: mol_type = other DNA
aagatggattatagtacgcgt

SEQ ID NO: 8148 - DNA, 21 bp, synthetic construct
  source 1..21: mol_type = other DNA
ggtgagagttcggtgcggtgg

SEQ ID NO: 8149 - DNA, 21 bp, synthetic construct
  source 1..21: mol_type = other DNA
catagtaggctgaatgttgtt

SEQ ID NO: 8150 - DNA, 21 bp, synthetic construct
  source 1..21: mol_type = other DNA
ttgcctgatggggatgggcct

SEQ ID NO: 8151 - DNA, 21 bp, synthetic construct
  source 1..21: mol_type = other DNA
tattttactggggcttgggat

SEQ ID NO: 8152 - DNA, 21 bp, synthetic construct
  source 1..21: mol_type = other DNA
agggagtctggggtttcttgg

SEQ ID NO: 8153 - DNA, 21 bp, synthetic construct
  source 1..21: mol_type = other DNA
tatgagcctggttgtaaggag

SEQ ID NO: 8154 - DNA, 21 bp, synthetic construct
  source 1..21: mol_type = other DNA
ttggcgcgtgggggtcctgat

SEQ ID NO: 8155 - DNA, 21 bp, synthetic construct
  source 1..21: mol_type = other DNA
tatgcgcgtcagtctaataat

SEQ ID NO: 8156 - DNA, 21 bp, synthetic construct
  source 1..21: mol_type = other DNA
tggaaggctggtggtaaggtt

SEQ ID NO: 8157 - DNA, 21 bp, synthetic construct
  source 1..21: mol_type = other DNA
gagccggagcggggttggttt

SEQ ID NO: 8158 - DNA, 21 bp, synthetic construct
  source 1..21: mol_type = other DNA
cggggtgagtctcatagttgg

SEQ ID NO: 8159 - DNA, 21 bp, synthetic construct
  source 1..21: mol_type = other DNA
tattggaatgcgaatctggag

SEQ ID NO: 8160 - DNA, 21 bp, synthetic construct
  source 1..21: mol_type = other DNA
tattggtctggtgtgactgag

SEQ ID NO: 8161 - DNA, 21 bp, synthetic construct
  source 1..21: mol_type = other DNA
tctaggagtactaatggggtg

SEQ ID NO: 8162 - DNA, 21 bp, synthetic construct
  source 1..21: mol_type = other DNA
tattttacggggaggcttgat

SEQ ID NO: 8163 - DNA, 21 bp, synthetic construct
  source 1..21: mol_type = other DNA
tggtggtcgggttatgtggag

SEQ ID NO: 8164 - DNA, 21 bp, synthetic construct
  source 1..21: mol_type = other DNA
tattttactggtgtgagttcg

SEQ ID NO: 8165 - DNA, 21 bp, synthetic construct
  source 1..21: mol_type = other DNA
aggcctgtttgtcctactggt

SEQ ID NO: 8166 - DNA, 21 bp, synthetic construct
  source 1..21: mol_type = other DNA
tattggtcttctgtgcgtgag

SEQ ID NO: 8167 - DNA, 21 bp, synthetic construct
  source 1..21: mol_type = other DNA
ttgcatgttgctatgccgaat

SEQ ID NO: 8168 - DNA, 21 bp, synthetic construct
  source 1..21: mol_type = other DNA
ttgcataggttgtctgttgat

SEQ ID NO: 8169 - DNA, 21 bp, synthetic construct
  source 1..21: mol_type = other DNA
cggacttatgattcttttgcg

SEQ ID NO: 8170 - DNA, 21 bp, synthetic construct
  source 1..21: mol_type = other DNA
cgttcgttggagggttcggat

SEQ ID NO: 8171 - DNA, 21 bp, synthetic construct
  source 1..21: mol_type = other DNA
ctgcatcgtttgggggattcg

SEQ ID NO: 8172 - DNA, 21 bp, synthetic construct
  source 1..21: mol_type = other DNA
actcgggatagtcctatgttt

SEQ ID NO: 8173 - DNA, 21 bp, synthetic construct
  source 1..21: mol_type = other DNA
cttcgttcgggtatggggcct

SEQ ID NO: 8174 - DNA, 21 bp, synthetic construct
  source 1..21: mol_type = other DNA
gggagtggggaggagaggtgg

SEQ ID NO: 8175 - DNA, 21 bp, synthetic construct
  source 1..21: mol_type = other DNA
tggactcctatgtgtaaggcg

SEQ ID NO: 8176 - DNA, 21 bp, synthetic construct
  source 1..21: mol_type = other DNA
ttttggcatggtgttagtgat

SEQ ID NO: 8177 - DNA, 21 bp, synthetic construct
  source 1..21: mol_type = other DNA
ctgactaagttgtcgaataat

SEQ ID NO: 8178 - DNA, 21 bp, synthetic construct
  source 1..21: mol_type = other DNA
gtggggtatcggaatcaggtg

SEQ ID NO: 8179 - DNA, 21 bp, synthetic construct
  source 1..21: mol_type = other DNA
ctttcgcggttgtctcctgtg

SEQ ID NO: 8180 - DNA, 21 bp, synthetic construct
  source 1..21: mol_type = other DNA
ttgcgggagaggtatagtaat

SEQ ID NO: 8181 - DNA, 21 bp, synthetic construct
  source 1..21: mol_type = other DNA
tcgtatgcgaagtctgtgctg

SEQ ID NO: 8182 - DNA, 21 bp, synthetic construct
  source 1..21: mol_type = other DNA
aatatggcgtcttctggttgg

SEQ ID NO: 8183 - DNA, 21 bp, synthetic construct
  source 1..21: mol_type = other DNA
aggacttatgatgcgattgct

SEQ ID NO: 8184 - DNA, 21 bp, synthetic construct
  source 1..21: mol_type = other DNA
ttgagtcgggtttcttttgat

SEQ ID NO: 8185 - DNA, 21 bp, synthetic construct
  source 1..21: mol_type = other DNA
aggtctgagtttgttagtttt

SEQ ID NO: 8186 - DNA, 21 bp, synthetic construct
  source 1..21: mol_type = other DNA
ggtgggtcgctgttgatgtct

SEQ ID NO: 8187 - DNA, 21 bp, synthetic construct
  source 1..21: mol_type = other DNA
gatccttctagtcattcgtgg

SEQ ID NO: 8188 - DNA, 21 bp, synthetic construct
  source 1..21: mol_type = other DNA
gtgcttgcgtctgtgacttgg

SEQ ID NO: 8189 - DNA, 21 bp, synthetic construct
  source 1..21: mol_type = other DNA
gctcctgctagtgctacttgg

SEQ ID NO: 8190 - DNA, 21 bp, synthetic construct
  source 1..21: mol_type = other DNA
gaggtgaggacttatcctaag

SEQ ID NO: 8191 - DNA, 21 bp, synthetic construct
  source 1..21: mol_type = other DNA
gggtggggttcgaataataag

SEQ ID NO: 8192 - DNA, 21 bp, synthetic construct
  source 1..21: mol_type = other DNA
aggaatagtacggtttatcct

SEQ ID NO: 8193 - DNA, 21 bp, synthetic construct
  source 1..21: mol_type = other DNA
tattggtcggggctgaatgat

SEQ ID NO: 8194 - DNA, 21 bp, synthetic construct
  source 1..21: mol_type = other DNA
gcccaagggcttagtgctggt

SEQ ID NO: 8195 - DNA, 21 bp, synthetic construct
  source 1..21: mol_type = other DNA
ttggggtcttggaggaatagt

SEQ ID NO: 8196 - DNA, 21 bp, synthetic construct
  source 1..21: mol_type = other DNA
aggacttctactatgggggtg

SEQ ID NO: 8197 - DNA, 21 bp, synthetic construct
  source 1..21: mol_type = other DNA
tattttactggtactttgacg

SEQ ID NO: 8198 - DNA, 21 bp, synthetic construct
  source 1..21: mol_type = other DNA
tgtgaggggaagcttcatccg

SEQ ID NO: 8199 - DNA, 21 bp, synthetic construct
  source 1..21: mol_type = other DNA
gcgtatgcttattctgctgcg

SEQ ID NO: 8200 - DNA, 21 bp, synthetic construct
  source 1..21: mol_type = other DNA
tcgatggcgagtaatacttgg

SEQ ID NO: 8201 - DNA, 21 bp, synthetic construct
  source 1..21: mol_type = other DNA
ggttcgagtacgtctaattgg

SEQ ID NO: 8202 - DNA, 21 bp, synthetic construct
  source 1..21: mol_type = other DNA
cttgctaggggtgggtttgat

SEQ ID NO: 8203 - DNA, 21 bp, synthetic construct
  source 1..21: mol_type = other DNA
tatgtgcgttttgataataat

SEQ ID NO: 8204 - DNA, 21 bp, synthetic construct
  source 1..21: mol_type = other DNA
tggggtgttcgtgagcgtggg

SEQ ID NO: 8205 - DNA, 21 bp, synthetic construct
  source 1..21: mol_type = other DNA
tttggtaagcagcagatgctg

SEQ ID NO: 8206 - DNA, 21 bp, synthetic construct
  source 1..21: mol_type = other DNA
tatgtgcgtagtggtccgatg

SEQ ID NO: 8207 - DNA, 21 bp, synthetic construct
  source 1..21: mol_type = other DNA
aggggggatagtcctctgtgg

SEQ ID NO: 8208 - DNA, 21 bp, synthetic construct
  source 1..21: mol_type = other DNA
ctgcatcggttgagtagtgat

SEQ ID NO: 8209 - DNA, 21 bp, synthetic construct
  source 1..21: mol_type = other DNA
ctttcgaaggcgagtagtaat

SEQ ID NO: 8210 - DNA, 21 bp, synthetic construct
  source 1..21: mol_type = other DNA
gtggctttggagggggcggat

SEQ ID NO: 8211 - DNA, 21 bp, synthetic construct
  source 1..21: mol_type = other DNA
tattcgcgtgtggggccggtt

SEQ ID NO: 8212 - DNA, 21 bp, synthetic construct
  source 1..21: mol_type = other DNA
cagccgcaggatcgttcgtgg

SEQ ID NO: 8213 - DNA, 21 bp, synthetic construct
  source 1..21: mol_type = other DNA
tttagtcggcttagtccgctg

SEQ ID NO: 8214 - DNA, 21 bp, synthetic construct
  source 1..21: mol_type = other DNA
tatagtcgtattcagcttgat

SEQ ID NO: 8215 - DNA, 21 bp, synthetic construct
  source 1..21: mol_type = other DNA
tgtgagaagggtattcggtgt

SEQ ID NO: 8216 - DNA, 21 bp, synthetic construct
  source 1..21: mol_type = other DNA
cgtggtaattctccgctgact

SEQ ID NO: 8217 - DNA, 21 bp, synthetic construct
  source 1..21: mol_type = other DNA
attgtttcgactaatgggagg

SEQ ID NO: 8218 - DNA, 21 bp, synthetic construct
  source 1..21: mol_type = other DNA
gttcttcagtcttctgtttgg

SEQ ID NO: 8219 - DNA, 21 bp, synthetic construct
  source 1..21: mol_type = other DNA
acgtgggatgggctggttgct

SEQ ID NO: 8220 - DNA, 21 bp, synthetic construct
  source 1..21: mol_type = other DNA
aggatgtctgatgcttatgcg

SEQ ID NO: 8221 - DNA, 21 bp, synthetic construct
  source 1..21: mol_type = other DNA
ggtagttatggggggagtcgt

SEQ ID NO: 8222 - DNA, 21 bp, synthetic construct
  source 1..21: mol_type = other DNA
ctggtgcgtggggggacgaat

SEQ ID NO: 8223 - DNA, 21 bp, synthetic construct
  source 1..21: mol_type = other DNA
ggggggggggcgcagatgtgg

SEQ ID NO: 8224 - DNA, 21 bp, synthetic construct
  source 1..21: mol_type = other DNA
ggtagtagtggtgtggcgtgg

SEQ ID NO: 8225 - DNA, 21 bp, synthetic construct
  source 1..21: mol_type = other DNA
aagtgggagcggtctccgatt

SEQ ID NO: 8226 - DNA, 21 bp, synthetic construct
  source 1..21: mol_type = other DNA
tatcatgctcttaatctggat

SEQ ID NO: 8227 - DNA, 21 bp, synthetic construct
  source 1..21: mol_type = other DNA
ggtgatgctctgtctcattgg

SEQ ID NO: 8228 - DNA, 21 bp, synthetic construct
  source 1..21: mol_type = other DNA
gatacgcttcttcatttgagg

SEQ ID NO: 8229 - DNA, 21 bp, synthetic construct
  source 1..21: mol_type = other DNA
tcggatggtgtgtcgaagtgg

SEQ ID NO: 8230 - DNA, 21 bp, synthetic construct
  source 1..21: mol_type = other DNA
ctgagtagggtgggtcctgat

SEQ ID NO: 8231 - DNA, 21 bp, synthetic construct
  source 1..21: mol_type = other DNA
gatctgagttcgacttcgtgg

SEQ ID NO: 8232 - DNA, 21 bp, synthetic construct
  source 1..21: mol_type = other DNA
ggggcggattttgttaagtgg

SEQ ID NO: 8233 - DNA, 21 bp, synthetic construct
  source 1..21: mol_type = other DNA
catgattctacgcatggtcgg

SEQ ID NO: 8234 - DNA, 21 bp, synthetic construct
  source 1..21: mol_type = other DNA
ccgtctcgtttggagaatagg

SEQ ID NO: 8235 - DNA, 21 bp, synthetic construct
  source 1..21: mol_type = other DNA
ctgtcgaaggttgggcataat

SEQ ID NO: 8236 - DNA, 21 bp, synthetic construct
  source 1..21: mol_type = other DNA
gtgggggtgaaggggtgggat

SEQ ID NO: 8237 - DNA, 21 bp, synthetic construct
  source 1..21: mol_type = other DNA
tatgggacggggacgtggtct

SEQ ID NO: 8238 - DNA, 21 bp, synthetic construct
  source 1..21: mol_type = other DNA
agtttgagtagtagtgtttgg

SEQ ID NO: 8239 - DNA, 21 bp, synthetic construct
  source 1..21: mol_type = other DNA
tattttactgcgcgtatggag

SEQ ID NO: 8240 - DNA, 21 bp, synthetic construct
  source 1..21: mol_type = other DNA
cgtgttccgtctaagtgggat

SEQ ID NO: 8241 - DNA, 21 bp, synthetic construct
  source 1..21: mol_type = other DNA
gaggatgagtttactgggttt

SEQ ID NO: 8242 - DNA, 21 bp, synthetic construct
  source 1..21: mol_type = other DNA
ggtggtgaggggtctttttgg

SEQ ID NO: 8243 - DNA, 21 bp, synthetic construct
  source 1..21: mol_type = other DNA
ttgcatgctaatttgccgaat

SEQ ID NO: 8244 - DNA, 21 bp, synthetic construct
  source 1..21: mol_type = other DNA
tttggtggtgggttgtttgtt

SEQ ID NO: 8245 - DNA, 21 bp, synthetic construct
  source 1..21: mol_type = other DNA
gttatgggggctcgtgattgg

SEQ ID NO: 8246 - DNA, 21 bp, synthetic construct
  source 1..21: mol_type = other DNA
tggactagtactcatggtgtt

SEQ ID NO: 8247 - DNA, 21 bp, synthetic construct
  source 1..21: mol_type = other DNA
tattcgagggcgggtgggtct

SEQ ID NO: 8248 - DNA, 21 bp, synthetic construct
  source 1..21: mol_type = other DNA
tattatacggggaagttggat

SEQ ID NO: 8249 - DNA, 21 bp, synthetic construct
  source 1..21: mol_type = other DNA
aggtctgattggaagatttct

SEQ ID NO: 8250 - DNA, 21 bp, synthetic construct
  source 1..21: mol_type = other DNA
aatatgaattcgagtacgtgg

SEQ ID NO: 8251 - DNA, 21 bp, synthetic construct
  source 1..21: mol_type = other DNA
cgtggggatctggtgtatcct

SEQ ID NO: 8252 - DNA, 21 bp, synthetic construct
  source 1..21: mol_type = other DNA
gatcttcgtgctgggaattgg

SEQ ID NO: 8253 - DNA, 21 bp, synthetic construct
  source 1..21: mol_type = other DNA
gctcctggtaatatttcttgg

SEQ ID NO: 8254 - DNA, 21 bp, synthetic construct
  source 1..21: mol_type = other DNA
gtgaagtataatgttcatctg

SEQ ID NO: 8255 - DNA, 21 bp, synthetic construct
  source 1..21: mol_type = other DNA
cggggggatgatcgtggttgg

SEQ ID NO: 8256 - DNA, 21 bp, synthetic construct
  source 1..21: mol_type = other DNA
tatttttcgggtattcattct

SEQ ID NO: 8257 - DNA, 21 bp, synthetic construct
  source 1..21: mol_type = other DNA
actcctagtacgatttatttt

SEQ ID NO: 8258 - DNA, 21 bp, synthetic construct
  source 1..21: mol_type = other DNA
gagatggagagtagtgtttgg

SEQ ID NO: 8259 - DNA, 21 bp, synthetic construct
  source 1..21: mol_type = other DNA
tggactgagggtactaggtat

SEQ ID NO: 8260 - DNA, 21 bp, synthetic construct
  source 1..21: mol_type = other DNA
gagggtattgcgcgtacgtgg

SEQ ID NO: 8261 - DNA, 21 bp, synthetic construct
  source 1..21: mol_type = other DNA
atgtatgcgttttcgattgag

SEQ ID NO: 8262 - DNA, 21 bp, synthetic construct
  source 1..21: mol_type = other DNA
tatgtttattcggatagtcgg

SEQ ID NO: 8263 - DNA, 21 bp, synthetic construct
  source 1..21: mol_type = other DNA
gatagtgtttatcagctgcgt

SEQ ID NO: 8264 - DNA, 21 bp, synthetic construct
  source 1..21: mol_type = other DNA
cggcttttggatgtgtatccg

SEQ ID NO: 8265 - DNA, 21 bp, synthetic construct
  source 1..21: mol_type = other DNA
gggaggagttatattccgtcg

SEQ ID NO: 8266 - DNA, 21 bp, synthetic construct
  source 1..21: mol_type = other DNA
tattttcagggtaagattgcg

SEQ ID NO: 8267 - DNA, 21 bp, synthetic construct
  source 1..21: mol_type = other DNA
tatgttaggtctgatggtatg

SEQ ID NO: 8268 - DNA, 21 bp, synthetic construct
  source 1..21: mol_type = other DNA
attccgcctttgtttaatgtt

SEQ ID NO: 8269 - DNA, 21 bp, synthetic construct
  source 1..21: mol_type = other DNA
cagggtgtttcgagggagtgg

SEQ ID NO: 8270 - DNA, 21 bp, synthetic construct
  source 1..21: mol_type = other DNA
cgtcttgaggcggcgaattgg

SEQ ID NO: 8271 - DNA, 21 bp, synthetic construct
  source 1..21: mol_type = other DNA
tggtggagtgagattcgttct

SEQ ID NO: 8272 - DNA, 21 bp, synthetic construct
  source 1..21: mol_type = other DNA
tattctcgtttgtcggctgat

SEQ ID NO: 8273 - DNA, 21 bp, synthetic construct
  source 1..21: mol_type = other DNA
gctcctggggatattcggtgg

SEQ ID NO: 8274 - DNA, 21 bp, synthetic construct
  source 1..21: mol_type = other DNA
cggtcggatcagtggaggggt

SEQ ID NO: 8275 - DNA, 21 bp, synthetic construct
  source 1..21: mol_type = other DNA
cattatcctttgagtgcgaag

SEQ ID NO: 8276 - DNA, 21 bp, synthetic construct
  source 1..21: mol_type = other DNA
atggatgattttactgtgtat

SEQ ID NO: 8277 - DNA, 21 bp, synthetic construct
  source 1..21: mol_type = other DNA
ggtggtcttggttctcagtgg

SEQ ID NO: 8278 - DNA, 21 bp, synthetic construct
  source 1..21: mol_type = other DNA
ctgtctcgtacggcttatgat

SEQ ID NO: 8279 - DNA, 21 bp, synthetic construct
  source 1..21: mol_type = other DNA
cgttatggtgatgtgatgcga

SEQ ID NO: 8280 - DNA, 21 bp, synthetic construct
  source 1..21: mol_type = other DNA
gatcttcggggtacgagtgcg

SEQ ID NO: 8281 - DNA, 21 bp, synthetic construct
  source 1..21: mol_type = other DNA
tcgtataggggggctagggag

SEQ ID NO: 8282 - DNA, 21 bp, synthetic construct
  source 1..21: mol_type = other DNA
atgcataggcttctgtctgat

SEQ ID NO: 8283 - DNA, 21 bp, synthetic construct
  source 1..21: mol_type = other DNA
gatttgcagagttcgtcttgg

SEQ ID NO: 8284 - DNA, 21 bp, synthetic construct
  source 1..21: mol_type = other DNA
aataggtatggggttgtttct

SEQ ID NO: 8285 - DNA, 21 bp, synthetic construct
  source 1..21: mol_type = other DNA
gttgtgatgactcgtgatagg

SEQ ID NO: 8286 - DNA, 21 bp, synthetic construct
  source 1..21: mol_type = other DNA
tatagtcggattggtgcgggt

SEQ ID NO: 8287 - DNA, 21 bp, synthetic construct
  source 1..21: mol_type = other DNA
tgtggtgaggggagtaaggcg

SEQ ID NO: 8288 - DNA, 21 bp, synthetic construct
  source 1..21: mol_type = other DNA
gggtctgagtttttgggttgg

SEQ ID NO: 8289 - DNA, 21 bp, synthetic construct
  source 1..21: mol_type = other DNA
agggatagtgataatgggatt

SEQ ID NO: 8290 - DNA, 21 bp, synthetic construct
  source 1..21: mol_type = other DNA
tggaggcgggagtcgtcttcg

SEQ ID NO: 8291 - DNA, 21 bp, synthetic construct
  source 1..21: mol_type = other DNA
ttgtctcggcttagtcaggat

SEQ ID NO: 8292 - DNA, 21 bp, synthetic construct
  source 1..21: mol_type = other DNA
tattttgcggggattgcgcag

SEQ ID NO: 8293 - DNA, 21 bp, synthetic construct
  source 1..21: mol_type = other DNA
agtagtcctcgtgggtcggat

SEQ ID NO: 8294 - DNA, 21 bp, synthetic construct
  source 1..21: mol_type = other DNA
tttgggttgattatgaaggcg

SEQ ID NO: 8295 - DNA, 21 bp, synthetic construct
  source 1..21: mol_type = other DNA
aagagtattgcgtcgcctggg

SEQ ID NO: 8296 - DNA, 21 bp, synthetic construct
  source 1..21: mol_type = other DNA
gtgctgcattcgtcgaattgg

SEQ ID NO: 8297 - DNA, 21 bp, synthetic construct
  source 1..21: mol_type = other DNA
gtggcggatcatttgcgttgg

SEQ ID NO: 8298 - DNA, 21 bp, synthetic construct
  source 1..21: mol_type = other DNA
tatccgcctatgcttattgct

SEQ ID NO: 8299 - DNA, 21 bp, synthetic construct
  source 1..21: mol_type = other DNA
gggtgtaaggggtcgtgtggg

SEQ ID NO: 8300 - DNA, 21 bp, synthetic construct
  source 1..21: mol_type = other DNA
cattatgagaagactggtcgg

SEQ ID NO: 8301 - DNA, 21 bp, synthetic construct
  source 1..21: mol_type = other DNA
ctggctcgtactggttgggat

SEQ ID NO: 8302 - DNA, 21 bp, synthetic construct
  source 1..21: mol_type = other DNA
gggggtggttatgggcgtaat

SEQ ID NO: 8303 - DNA, 21 bp, synthetic construct
  source 1..21: mol_type = other DNA
tggcgtcttcataagggggat

SEQ ID NO: 8304 - DNA, 21 bp, synthetic construct
  source 1..21: mol_type = other DNA
ctgtctcgtattgctaataat

SEQ ID NO: 8305 - DNA, 21 bp, synthetic construct
  source 1..21: mol_type = other DNA
gcgttgggtgatcggacttgg

SEQ ID NO: 8306 - DNA, 21 bp, synthetic construct
  source 1..21: mol_type = other DNA
gattttcgtggtgctcgtttg

SEQ ID NO: 8307 - DNA, 21 bp, synthetic construct
  source 1..21: mol_type = other DNA
cttgcgaagactgcgcataat

SEQ ID NO: 8308 - DNA, 21 bp, synthetic construct
  source 1..21: mol_type = other DNA
cctatggcttcgcttcagtgg

SEQ ID NO: 8309 - DNA, 21 bp, synthetic construct
  source 1..21: mol_type = other DNA
tatgcgaggcttggtaataat

SEQ ID NO: 8310 - DNA, 21 bp, synthetic construct
  source 1..21: mol_type = other DNA
ggtagtgagctgagttcgtgg

SEQ ID NO: 8311 - DNA, 21 bp, synthetic construct
  source 1..21: mol_type = other DNA
tattttcattcgacgaagact

SEQ ID NO: 8312 - DNA, 21 bp, synthetic construct
  source 1..21: mol_type = other DNA
aggatgtcttctgattatcgg

SEQ ID NO: 8313 - DNA, 21 bp, synthetic construct
  source 1..21: mol_type = other DNA
gtgatggcggatgcgtttcct

SEQ ID NO: 8314 - DNA, 21 bp, synthetic construct
  source 1..21: mol_type = other DNA
tggaagggtcgggagacgact

SEQ ID NO: 8315 - DNA, 21 bp, synthetic construct
  source 1..21: mol_type = other DNA
cttggtagtagggagaggttt

SEQ ID NO: 8316 - DNA, 21 bp, synthetic construct
  source 1..21: mol_type = other DNA
atggggaaggtgtgtaatagt

SEQ ID NO: 8317 - DNA, 21 bp, synthetic construct
  source 1..21: mol_type = other DNA
gatgggagtagtaggtcttgg

SEQ ID NO: 8318 - DNA, 21 bp, synthetic construct
  source 1..21: mol_type = other DNA
ctgtctaggcttaatgctgat

SEQ ID NO: 8319 - DNA, 21 bp, synthetic construct
  source 1..21: mol_type = other DNA
ctttttagtggggttgggcct

SEQ ID NO: 8320 - DNA, 21 bp, synthetic construct
  source 1..21: mol_type = other DNA
gttgcttcggtttgtaagggg

SEQ ID NO: 8321 - DNA, 21 bp, synthetic construct
  source 1..21: mol_type = other DNA
tattatgatctgaagaggtct

SEQ ID NO: 8322 - DNA, 21 bp, synthetic construct
  source 1..21: mol_type = other DNA
tgggtggcgtctcgttcgagt

SEQ ID NO: 8323 - DNA, 21 bp, synthetic construct
  source 1..21: mol_type = other DNA
gttatgactgcgcgggattgg

SEQ ID NO: 8324 - DNA, 21 bp, synthetic construct
  source 1..21: mol_type = other DNA
cttagtaagcttagttctaat

SEQ ID NO: 8325 - DNA, 21 bp, synthetic construct
  source 1..21: mol_type = other DNA
cgtggtctggagggtatggat

SEQ ID NO: 8326 - DNA, 21 bp, synthetic construct
  source 1..21: mol_type = other DNA
tgggctatgcggcgggtggag

SEQ ID NO: 8327 - DNA, 21 bp, synthetic construct
  source 1..21: mol_type = other DNA
tatcggggtgcgtctaatcat

SEQ ID NO: 8328 - DNA, 21 bp, synthetic construct
  source 1..21: mol_type = other DNA
cagggtaatgggttgtatcgt

SEQ ID NO: 8329 - DNA, 21 bp, synthetic construct
  source 1..21: mol_type = other DNA
acgcgttcgtttagtcatggt

SEQ ID NO: 8330 - DNA, 21 bp, synthetic construct
  source 1..21: mol_type = other DNA
tattggacgggtctgcatgag

SEQ ID NO: 8331 - DNA, 21 bp, synthetic construct
  source 1..21: mol_type = other DNA
gtgttgtctgatattacttgg

SEQ ID NO: 8332 - DNA, 21 bp, synthetic construct
  source 1..21: mol_type = other DNA
ttgttggattctgcgaagtgg

SEQ ID NO: 8333 - DNA, 21 bp, synthetic construct
  source 1..21: mol_type = other DNA
agtactagtactaatgggatt

SEQ ID NO: 8334 - DNA, 21 bp, synthetic construct
  source 1..21: mol_type = other DNA
gttcctgattgggttgatcgt

SEQ ID NO: 8335 - DNA, 21 bp, synthetic construct
  source 1..21: mol_type = other DNA
tctgggtatcggggggctgtg

SEQ ID NO: 8336 - DNA, 21 bp, synthetic construct
  source 1..21: mol_type = other DNA
ttgaaggatgggactagtgct

SEQ ID NO: 8337 - DNA, 21 bp, synthetic construct
  source 1..21: mol_type = other DNA
tatagtagggctggtgatgat

SEQ ID NO: 8338 - DNA, 21 bp, synthetic construct
  source 1..21: mol_type = other DNA
ttgtctcggtcgtcgatgaat

SEQ ID NO: 8339 - DNA, 21 bp, synthetic construct
  source 1..21: mol_type = other DNA
tatagtaagttgtcggatcgt

SEQ ID NO: 8340 - DNA, 21 bp, synthetic construct
  source 1..21: mol_type = other DNA
gatgggtatagtgggcgtgat

SEQ ID NO: 8341 - DNA, 21 bp, synthetic construct
  source 1..21: mol_type = other DNA
tattcgcgtcttaatgtgggg

SEQ ID NO: 8342 - DNA, 21 bp, synthetic construct
  source 1..21: mol_type = other DNA
gaggcgtggactgatcggggg

SEQ ID NO: 8343 - DNA, 21 bp, synthetic construct
  source 1..21: mol_type = other DNA
gtgtcgaataagtctacgggt

SEQ ID NO: 8344 - DNA, 21 bp, synthetic construct
  source 1..21: mol_type = other DNA
tggagtaggggggcggcgacg

SEQ ID NO: 8345 - DNA, 21 bp, synthetic construct
  source 1..21: mol_type = other DNA
gatacgtatgagacgcggtgg

SEQ ID NO: 8346 - DNA, 21 bp, synthetic construct
  source 1..21: mol_type = other DNA
gttatgtcttcggctgggtgg

SEQ ID NO: 8347 - DNA, 21 bp, synthetic construct
  source 1..21: mol_type = other DNA
tatactcgtgttcaggagaat

SEQ ID NO: 8348 - DNA, 21 bp, synthetic construct
  source 1..21: mol_type = other DNA
gagcttgagtcgtggtcgtgg

SEQ ID NO: 8349 - DNA, 21 bp, synthetic construct
  source 1..21: mol_type = other DNA
cgggatggtgtttctgcgtgg

SEQ ID NO: 8350 - DNA, 21 bp, synthetic construct
  source 1..21: mol_type = other DNA
agttttggtcctccttatggt

SEQ ID NO: 8351 - DNA, 21 bp, synthetic construct
  source 1..21: mol_type = other DNA
actttttatgggcagaatgcg

SEQ ID NO: 8352 - DNA, 21 bp, synthetic construct
  source 1..21: mol_type = other DNA
aggatggaggtgggggattgg

SEQ ID NO: 8353 - DNA, 21 bp, synthetic construct
  source 1..21: mol_type = other DNA
tattcgaaggctcagggtgtg

SEQ ID NO: 8354 - DNA, 21 bp, synthetic construct
  source 1..21: mol_type = other DNA
cattcgaagctgaatcctatg

SEQ ID NO: 8355 - DNA, 21 bp, synthetic construct
  source 1..21: mol_type = other DNA
ttgtttgatgctacgccgagt

SEQ ID NO: 8356 - DNA, 21 bp, synthetic construct
  source 1..21: mol_type = other DNA
cgtgaggggtatcgggggtat

SEQ ID NO: 8357 - DNA, 21 bp, synthetic construct
  source 1..21: mol_type = other DNA
ttggcgcggagtgggggtggt

SEQ ID NO: 8358 - DNA, 21 bp, synthetic construct
  source 1..21: mol_type = other DNA
ttttggggtggtgttgttgat

SEQ ID NO: 8359 - DNA, 21 bp, synthetic construct
  source 1..21: mol_type = other DNA
gtttcttcggataatggtatg

SEQ ID NO: 8360 - DNA, 21 bp, synthetic construct
  source 1..21: mol_type = other DNA
tatgttcgttcggattctagt

SEQ ID NO: 8361 - DNA, 21 bp, synthetic construct
  source 1..21: mol_type = other DNA
attagtaagacgtgtcgggag

SEQ ID NO: 8362 - DNA, 21 bp, synthetic construct
  source 1..21: mol_type = other DNA
agtatgcaggatcgtagttgg

SEQ ID NO: 8363 - DNA, 21 bp, synthetic construct
  source 1..21: mol_type = other DNA
tggtctaatcgtgctcgtgat

SEQ ID NO: 8364 - DNA, 21 bp, synthetic construct
  source 1..21: mol_type = other DNA
tatgttattagtgatcgtaat

SEQ ID NO: 8365 - DNA, 21 bp, synthetic construct
  source 1..21: mol_type = other DNA
ttgcgtctgcatgggcgggat

SEQ ID NO: 8366 - DNA, 21 bp, synthetic construct
  source 1..21: mol_type = other DNA
aatcagcggtatggttctagt

SEQ ID NO: 8367 - DNA, 21 bp, synthetic construct
  source 1..21: mol_type = other DNA
tttgtttctacgaatggggtt

SEQ ID NO: 8368 - DNA, 21 bp, synthetic construct
  source 1..21: mol_type = other DNA
tcggggggtgggttgtttcct

SEQ ID NO: 8369 - DNA, 21 bp, synthetic construct
  source 1..21: mol_type = other DNA
gatattgcgcataagcgttat

SEQ ID NO: 8370 - DNA, 21 bp, synthetic construct
  source 1..21: mol_type = other DNA
gtggctttgaagggggcgggt

SEQ ID NO: 8371 - DNA, 21 bp, synthetic construct
  source 1..21: mol_type = other DNA
tgtacgaatgtgtgtaatgct

SEQ ID NO: 8372 - DNA, 21 bp, synthetic construct
  source 1..21: mol_type = other DNA
atgtggaatgggacgccgtcg

SEQ ID NO: 8373 - DNA, 21 bp, synthetic construct
  source 1..21: mol_type = other DNA
ttgtatggtagtcgtcagact

SEQ ID NO: 8374 - DNA, 21 bp, synthetic construct
  source 1..21: mol_type = other DNA
gcgggggatgggctgtgggtg

SEQ ID NO: 8375 - DNA, 21 bp, synthetic construct
  source 1..21: mol_type = other DNA
gttctttctcatgctacttgg

SEQ ID NO: 8376 - DNA, 21 bp, synthetic construct
  source 1..21: mol_type = other DNA
tatcatgcgaagggtgataat

SEQ ID NO: 8377 - DNA, 21 bp, synthetic construct
  source 1..21: mol_type = other DNA
gagactgatggttggaggaat

SEQ ID NO: 8378 - DNA, 21 bp, synthetic construct
  source 1..21: mol_type = other DNA
ttgcttagtagtgctgattgg

SEQ ID NO: 8379 - DNA, 21 bp, synthetic construct
  source 1..21: mol_type = other DNA
aaggatggttttagtacttat

SEQ ID NO: 8380 - DNA, 21 bp, synthetic construct
  source 1..21: mol_type = other DNA
gggtcggaggttactaggcgg

SEQ ID NO: 8381 - DNA, 21 bp, synthetic construct
  source 1..21: mol_type = other DNA
gctgagccgccggtgatgtgg

SEQ ID NO: 8382 - DNA, 21 bp, synthetic construct
  source 1..21: mol_type = other DNA
tttgctcatattcatgggaag

SEQ ID NO: 8383 - DNA, 21 bp, synthetic construct
  source 1..21: mol_type = other DNA
attcagagtacgaatggtcgg

SEQ ID NO: 8384 - DNA, 21 bp, synthetic construct
  source 1..21: mol_type = other DNA
ggtacgaagtggtcggatcgg

SEQ ID NO: 8385 - DNA, 21 bp, synthetic construct
  source 1..21: mol_type = other DNA
gtttggcctggtaggtctact

SEQ ID NO: 8386 - DNA, 21 bp, synthetic construct
  source 1..21: mol_type = other DNA
ttggcgcggcttgggcctgat

SEQ ID NO: 8387 - DNA, 21 bp, synthetic construct
  source 1..21: mol_type = other DNA
cattgtcctacgattccgatg

SEQ ID NO: 8388 - DNA, 21 bp, synthetic construct
  source 1..21: mol_type = other DNA
tatgctcgtgggtcgctgaat

SEQ ID NO: 8389 - DNA, 21 bp, synthetic construct
  source 1..21: mol_type = other DNA
tatgttaagtctgctgggagt

SEQ ID NO: 8390 - DNA, 21 bp, synthetic construct
  source 1..21: mol_type = other DNA
tgggatgctattaggcggaat

SEQ ID NO: 8391 - DNA, 21 bp, synthetic construct
  source 1..21: mol_type = other DNA
ctgggggagaatttgcggtgg

SEQ ID NO: 8392 - DNA, 21 bp, synthetic construct
  source 1..21: mol_type = other DNA
tggttttctggtgtgcagctt

SEQ ID NO: 8393 - DNA, 21 bp, synthetic construct
  source 1..21: mol_type = other DNA
tggtggacgggtatgattgcg

SEQ ID NO: 8394 - DNA, 21 bp, synthetic construct
  source 1..21: mol_type = other DNA
gatcatcgggggacgggttgg

SEQ ID NO: 8395 - DNA, 21 bp, synthetic construct
  source 1..21: mol_type = other DNA
tttttttctgggactaaggtg

SEQ ID NO: 8396 - DNA, 21 bp, synthetic construct
  source 1..21: mol_type = other DNA
aatggtgcggatggtcgttgg

SEQ ID NO: 8397 - DNA, 21 bp, synthetic construct
  source 1..21: mol_type = other DNA
agttatcggctggttgataag

SEQ ID NO: 8398 - DNA, 21 bp, synthetic construct
  source 1..21: mol_type = other DNA
tggccgtatgggaatgatgcg

SEQ ID NO: 8399 - DNA, 21 bp, synthetic construct
  source 1..21: mol_type = other DNA
cggggtggggggctttatgtt

SEQ ID NO: 8400 - DNA, 21 bp, synthetic construct
  source 1..21: mol_type = other DNA
tattcgtatgcgggtgggggg

SEQ ID NO: 8401 - DNA, 21 bp, synthetic construct
  source 1..21: mol_type = other DNA
gtttatgttaaggcgcataat

SEQ ID NO: 8402 - DNA, 21 bp, synthetic construct
  source 1..21: mol_type = other DNA
tattggtctggtactcagggt

SEQ ID NO: 8403 - DNA, 21 bp, synthetic construct
  source 1..21: mol_type = other DNA
gagatggctgcgtatgattgg

SEQ ID NO: 8404 - DNA, 21 bp, synthetic construct
  source 1..21: mol_type = other DNA
cgttcggatactacttatccg

SEQ ID NO: 8405 - DNA, 21 bp, synthetic construct
  source 1..21: mol_type = other DNA
agggaggattttagtgcgtgg

SEQ ID NO: 8406 - DNA, 21 bp, synthetic construct
  source 1..21: mol_type = other DNA
tatgctcgtcagaattttaat

SEQ ID NO: 8407 - DNA, 21 bp, synthetic construct
  source 1..21: mol_type = other DNA
atgtcttcagagtatgagcgt

SEQ ID NO: 8408 - DNA, 21 bp, synthetic construct
  source 1..21: mol_type = other DNA
tggaggaagacggatgggggg

SEQ ID NO: 8409 - DNA, 21 bp, synthetic construct
  source 1..21: mol_type = other DNA
tgggataatggggttacgggt

SEQ ID NO: 8410 - DNA, 21 bp, synthetic construct
  source 1..21: mol_type = other DNA
aagtggcagagtgtttctgct

SEQ ID NO: 8411 - DNA, 21 bp, synthetic construct
  source 1..21: mol_type = other DNA
gtggagtatcgtgggattggg

SEQ ID NO: 8412 - DNA, 21 bp, synthetic construct
  source 1..21: mol_type = other DNA
agtctgaatgatcatttgctg

SEQ ID NO: 8413 - DNA, 21 bp, synthetic construct
  source 1..21: mol_type = other DNA
tatgtgcgtagtgatcgggtg

SEQ ID NO: 8414 - DNA, 21 bp, synthetic construct
  source 1..21: mol_type = other DNA
tgtcggcctgtgtgtacgcct

SEQ ID NO: 8415 - DNA, 21 bp, synthetic construct
  source 1..21: mol_type = other DNA
aattttcgtagtgatttgcgt

SEQ ID NO: 8416 - DNA, 21 bp, synthetic construct
  source 1..21: mol_type = other DNA
cctatgcgtgagacgctttgg

SEQ ID NO: 8417 - DNA, 21 bp, synthetic construct
  source 1..21: mol_type = other DNA
tatctgatttctgatacgaag

SEQ ID NO: 8418 - DNA, 21 bp, synthetic construct
  source 1..21: mol_type = other DNA
ttgtggaatggggttgggcct

SEQ ID NO: 8419 - DNA, 21 bp, synthetic construct
  source 1..21: mol_type = other DNA
ttggcggagactcggcgttat

SEQ ID NO: 8420 - DNA, 21 bp, synthetic construct
  source 1..21: mol_type = other DNA
tctcagtcttcgaggtgtgcg

SEQ ID NO: 8421 - DNA, 21 bp, synthetic construct
  source 1..21: mol_type = other DNA
ttggctaagtcggggactaat

SEQ ID NO: 8422 - DNA, 21 bp, synthetic construct
  source 1..21: mol_type = other DNA
attagtaagacgtgtgggtcg

SEQ ID NO: 8423 - DNA, 21 bp, synthetic construct
  source 1..21: mol_type = other DNA
ttggcgggtagggggtgggat

SEQ ID NO: 8424 - DNA, 21 bp, synthetic construct
  source 1..21: mol_type = other DNA
gcgaggcatcatacgtcttct

SEQ ID NO: 8425 - DNA, 21 bp, synthetic construct
  source 1..21: mol_type = other DNA
tggttgaagattgggaaggcg

SEQ ID NO: 8426 - DNA, 21 bp, synthetic construct
  source 1..21: mol_type = other DNA
atgctttcttctcagacttgg

SEQ ID NO: 8427 - DNA, 21 bp, synthetic construct
  source 1..21: mol_type = other DNA
tggtggacggggtatgtggat

SEQ ID NO: 8428 - DNA, 21 bp, synthetic construct
  source 1..21: mol_type = other DNA
gagtggtcttcgcttgatgat

SEQ ID NO: 8429 - DNA, 21 bp, synthetic construct
  source 1..21: mol_type = other DNA
cttcgtgatgggacgctgagg

SEQ ID NO: 8430 - DNA, 21 bp, synthetic construct
  source 1..21: mol_type = other DNA
tttcagcgtgtttataaggat

SEQ ID NO: 8431 - DNA, 21 bp, synthetic construct
  source 1..21: mol_type = other DNA
gggggtgctacgtcgaattgg

SEQ ID NO: 8432 - DNA, 21 bp, synthetic construct
  source 1..21: mol_type = other DNA
aagtttcattcgaattctctt

SEQ ID NO: 8433 - DNA, 21 bp, synthetic construct
  source 1..21: mol_type = other DNA
ctgagtgctcttaatcgtaat

SEQ ID NO: 8434 - DNA, 21 bp, synthetic construct
  source 1..21: mol_type = other DNA
gggggtgagagttcggtgtgg

SEQ ID NO: 8435 - DNA, 21 bp, synthetic construct
  source 1..21: mol_type = other DNA
cgtttggatgcgcatgattgg

SEQ ID NO: 8436 - DNA, 21 bp, synthetic construct
  source 1..21: mol_type = other DNA
ggggttgatgtggttcgttgg

SEQ ID NO: 8437 - DNA, 21 bp, synthetic construct
  source 1..21: mol_type = other DNA
gcccaagggattagtgctggg

SEQ ID NO: 8438 - DNA, 21 bp, synthetic construct
  source 1..21: mol_type = other DNA
aatggtgttaatgggttgtgg

SEQ ID NO: 8439 - DNA, 21 bp, synthetic construct
  source 1..21: mol_type = other DNA
gatcttaggagttctgattgg

SEQ ID NO: 8440 - DNA, 21 bp, synthetic construct
  source 1..21: mol_type = other DNA
gggggggagtcgagtctgtgg

SEQ ID NO: 8441 - DNA, 21 bp, synthetic construct
  source 1..21: mol_type = other DNA
cttgctcggggggggtgggat

SEQ ID NO: 8442 - DNA, 21 bp, synthetic construct
  source 1..21: mol_type = other DNA
ggtaatagtgagcggaggtgg

SEQ ID NO: 8443 - DNA, 21 bp, synthetic construct
  source 1..21: mol_type = other DNA
tattttactaggacgatggcg

SEQ ID NO: 8444 - DNA, 21 bp, synthetic construct
  source 1..21: mol_type = other DNA
gggggggagggtagtgcttgg

SEQ ID NO: 8445 - DNA, 21 bp, synthetic construct
  source 1..21: mol_type = other DNA
tctgggaagtgtgcggcgacg

SEQ ID NO: 8446 - DNA, 21 bp, synthetic construct
  source 1..21: mol_type = other DNA
gatggtccggtgtttaatcgg

SEQ ID NO: 8447 - DNA, 21 bp, synthetic construct
  source 1..21: mol_type = other DNA
ttgccgcagtcgtcgaattgg

SEQ ID NO: 8448 - DNA, 21 bp, synthetic construct
  source 1..21: mol_type = other DNA
gttgatgagtttctttcttgg

SEQ ID NO: 8449 - DNA, 21 bp, synthetic construct
  source 1..21: mol_type = other DNA
tttcatggtaatgcgcgtgtg

SEQ ID NO: 8450 - DNA, 21 bp, synthetic construct
  source 1..21: mol_type = other DNA
cgtgcttttgattcgtattcg

SEQ ID NO: 8451 - DNA, 21 bp, synthetic construct
  source 1..21: mol_type = other DNA
ttgcatcgtctgatgcctgat

SEQ ID NO: 8452 - DNA, 21 bp, synthetic construct
  source 1..21: mol_type = other DNA
tatgttaagtcgcagcctggg

SEQ ID NO: 8453 - DNA, 21 bp, synthetic construct
  source 1..21: mol_type = other DNA
tatagtaagctgaatacgcat

SEQ ID NO: 8454 - DNA, 21 bp, synthetic construct
  source 1..21: mol_type = other DNA
ttggcgcggagtggttatgat

SEQ ID NO: 8455 - DNA, 21 bp, synthetic construct
  source 1..21: mol_type = other DNA
ctgagtcgggtgggtgcggat

SEQ ID NO: 8456 - DNA, 21 bp, synthetic construct
  source 1..21: mol_type = other DNA
gagctggtgactaagcggtat

SEQ ID NO: 8457 - DNA, 21 bp, synthetic construct
  source 1..21: mol_type = other DNA
aatgcgtttgagggggctgat

SEQ ID NO: 8458 - DNA, 21 bp, synthetic construct
  source 1..21: mol_type = other DNA
atgtttgatgggagttctgcg

SEQ ID NO: 8459 - DNA, 21 bp, synthetic construct
  source 1..21: mol_type = other DNA
tgggctagtcggactcgtgat

SEQ ID NO: 8460 - DNA, 21 bp, synthetic construct
  source 1..21: mol_type = other DNA
tggggttctcggagggagggt

SEQ ID NO: 8461 - DNA, 21 bp, synthetic construct
  source 1..21: mol_type = other DNA
ttttctcgtttgcatattgat

SEQ ID NO: 8462 - DNA, 21 bp, synthetic construct
  source 1..21: mol_type = other DNA
gcttatcgtcgtccggatgct

SEQ ID NO: 8463 - DNA, 21 bp, synthetic construct
  source 1..21: mol_type = other DNA
gatgggtcgacgagtacttgg

SEQ ID NO: 8464 - DNA, 21 bp, synthetic construct
  source 1..21: mol_type = other DNA
gcccaaggtaattggaagggt

SEQ ID NO: 8465 - DNA, 21 bp, synthetic construct
  source 1..21: mol_type = other DNA
tgttgtggtggtagggggcct

SEQ ID NO: 8466 - DNA, 21 bp, synthetic construct
  source 1..21: mol_type = other DNA
gttagtgagtctctgtattgg

SEQ ID NO: 8467 - DNA, 21 bp, synthetic construct
  source 1..21: mol_type = other DNA
agttatgcggtgaggagggag

SEQ ID NO: 8468 - DNA, 21 bp, synthetic construct
  source 1..21: mol_type = other DNA
ggtggggattttgagcattgg

SEQ ID NO: 8469 - DNA, 21 bp, synthetic construct
  source 1..21: mol_type = other DNA
acgtcttatggggctaatgct

SEQ ID NO: 8470 - DNA, 21 bp, synthetic construct
  source 1..21: mol_type = other DNA
tttgggaatgggagtagttat

SEQ ID NO: 8471 - DNA, 21 bp, synthetic construct
  source 1..21: mol_type = other DNA
ttttttactggtgttgtgggt

SEQ ID NO: 8472 - DNA, 21 bp, synthetic construct
  source 1..21: mol_type = other DNA
ctgggtggtacttcgcggtat

SEQ ID NO: 8473 - DNA, 21 bp, synthetic construct
  source 1..21: mol_type = other DNA
acgtatgagggtgctgttgct

SEQ ID NO: 8474 - DNA, 21 bp, synthetic construct
  source 1..21: mol_type = other DNA
gctgatttgacggtgcggagg

SEQ ID NO: 8475 - DNA, 21 bp, synthetic construct
  source 1..21: mol_type = other DNA
cttgcgcgttcgggtccggat

SEQ ID NO: 8476 - DNA, 21 bp, synthetic construct
  source 1..21: mol_type = other DNA
actgatgagactgtgtatcgg

SEQ ID NO: 8477 - DNA, 21 bp, synthetic construct
  source 1..21: mol_type = other DNA
gatgatggttctagtcgttat

SEQ ID NO: 8478 - DNA, 21 bp, synthetic construct
  source 1..21: mol_type = other DNA
gattcgcctgagtggagggat

SEQ ID NO: 8479 - DNA, 21 bp, synthetic construct
  source 1..21: mol_type = other DNA
aaggttgcgcttcttagtacg

SEQ ID NO: 8480 - DNA, 21 bp, synthetic construct
  source 1..21: mol_type = other DNA
ttgcataagcttggtgatgat

SEQ ID NO: 8481 - DNA, 21 bp, synthetic construct
  source 1..21: mol_type = other DNA
tattatacggggatgattagt

SEQ ID NO: 8482 - DNA, 21 bp, synthetic construct
  source 1..21: mol_type = other DNA
tttgaggctcctaattcttgg

SEQ ID NO: 8483 - DNA, 21 bp, synthetic construct
  source 1..21: mol_type = other DNA
gatgagggtggttatccgtgg

SEQ ID NO: 8484 - DNA, 21 bp, synthetic construct
  source 1..21: mol_type = other DNA
tgggtgagggaggctaatcgt

SEQ ID NO: 8485 - DNA, 21 bp, synthetic construct
  source 1..21: mol_type = other DNA
cggtataatatgtcgcgggag

SEQ ID NO: 8486 - DNA, 21 bp, synthetic construct
  source 1..21: mol_type = other DNA
gttctgtctacgaatggtgtt

SEQ ID NO: 8487 - DNA, 21 bp, synthetic construct
  source 1..21: mol_type = other DNA
tataattttaagcgggatggt

SEQ ID NO: 8488 - DNA, 21 bp, synthetic construct
  source 1..21: mol_type = other DNA
tggtggacggggacggttagt

SEQ ID NO: 8489 - DNA, 21 bp, synthetic construct
  source 1..21: mol_type = other DNA
tattgggcgggtattccggat

SEQ ID NO: 8490 - DNA, 21 bp, synthetic construct
  source 1..21: mol_type = other DNA
ttgtggggtggtattcctagt

SEQ ID NO: 8491 - DNA, 21 bp, synthetic construct
  source 1..21: mol_type = other DNA
gttgttgattatatgagtcat

SEQ ID NO: 8492 - DNA, 21 bp, synthetic construct
  source 1..21: mol_type = other DNA
ttttttagtggtattattgat

SEQ ID NO: 8493 - DNA, 21 bp, synthetic construct
  source 1..21: mol_type = other DNA
tatgtgcgttttgattcgggt

SEQ ID NO: 8494 - DNA, 21 bp, synthetic construct
  source 1..21: mol_type = other DNA
cgggttggtcatactgcttgg

SEQ ID NO: 8495 - DNA, 21 bp, synthetic construct
  source 1..21: mol_type = other DNA
tggtcgcatatggggaagggg

SEQ ID NO: 8496 - DNA, 21 bp, synthetic construct
  source 1..21: mol_type = other DNA
tattatactggttttacgaat

SEQ ID NO: 8497 - DNA, 21 bp, synthetic construct
  source 1..21: mol_type = other DNA
gttattgaggatgcgtatcct

SEQ ID NO: 8498 - DNA, 21 bp, synthetic construct
  source 1..21: mol_type = other DNA
ggtgtgattaatgtggcttgg

SEQ ID NO: 8499 - DNA, 21 bp, synthetic construct
  source 1..21: mol_type = other DNA
tatatgagtactaatgggatt

SEQ ID NO: 8500 - DNA, 21 bp, synthetic construct
  source 1..21: mol_type = other DNA
attgagtcttttaatgggagg

SEQ ID NO: 8501 - DNA, 21 bp, synthetic construct
  source 1..21: mol_type = other DNA
gggatggggagtgagcggtgg

SEQ ID NO: 8502 - DNA, 21 bp, synthetic construct
  source 1..21: mol_type = other DNA
tcggcgtatcgtgggggtggt

SEQ ID NO: 8503 - DNA, 21 bp, synthetic construct
  source 1..21: mol_type = other DNA
cattgggctaagagtcttgag

SEQ ID NO: 8504 - DNA, 21 bp, synthetic construct
  source 1..21: mol_type = other DNA
gatcttgggagtgcgtcgtgg

SEQ ID NO: 8505 - DNA, 21 bp, synthetic construct
  source 1..21: mol_type = other DNA
tatagtaagcagaattttaat

SEQ ID NO: 8506 - DNA, 21 bp, synthetic construct
  source 1..21: mol_type = other DNA
ggttttcgtcatccggggagt

SEQ ID NO: 8507 - DNA, 21 bp, synthetic construct
  source 1..21: mol_type = other DNA
cgtatgagttcgggtgtgtgg

SEQ ID NO: 8508 - DNA, 21 bp, synthetic construct
  source 1..21: mol_type = other DNA
gctgagagtagtaggctgtgg

SEQ ID NO: 8509 - DNA, 21 bp, synthetic construct
  source 1..21: mol_type = other DNA
ttgtgggatggtactggtgct

SEQ ID NO: 8510 - DNA, 21 bp, synthetic construct
  source 1..21: mol_type = other DNA
tctagtgattattcgagttat

SEQ ID NO: 8511 - DNA, 21 bp, synthetic construct
  source 1..21: mol_type = other DNA
gagaatgggggtgggaggtgg

SEQ ID NO: 8512 - DNA, 21 bp, synthetic construct
  source 1..21: mol_type = other DNA
tatgatcggttgtctgataat

SEQ ID NO: 8513 - DNA, 21 bp, synthetic construct
  source 1..21: mol_type = other DNA
cggaatgagtttactggtttt

SEQ ID NO: 8514 - DNA, 21 bp, synthetic construct
  source 1..21: mol_type = other DNA
tctgattctactaatggtatg

SEQ ID NO: 8515 - DNA, 21 bp, synthetic construct
  source 1..21: mol_type = other DNA
gagaggatgaattgtcatagt

SEQ ID NO: 8516 - DNA, 21 bp, synthetic construct
  source 1..21: mol_type = other DNA
tattctaggttgggtggggat

SEQ ID NO: 8517 - DNA, 21 bp, synthetic construct
  source 1..21: mol_type = other DNA
cttttgcagagttcgacgtgg

SEQ ID NO: 8518 - DNA, 21 bp, synthetic construct
  source 1..21: mol_type = other DNA
tgggctagggggagtgggttg

SEQ ID NO: 8519 - DNA, 21 bp, synthetic construct
  source 1..21: mol_type = other DNA
ggtgcggatgcggtgcgttgg

SEQ ID NO: 8520 - DNA, 21 bp, synthetic construct
  source 1..21: mol_type = other DNA
gatttttatggtcggcctgcg

SEQ ID NO: 8521 - DNA, 21 bp, synthetic construct
  source 1..21: mol_type = other DNA
agtggtgctacgagtaattgg

SEQ ID NO: 8522 - DNA, 21 bp, synthetic construct
  source 1..21: mol_type = other DNA
cgtgctttggaggggcgtgat

SEQ ID NO: 8523 - DNA, 21 bp, synthetic construct
  source 1..21: mol_type = other DNA
cagtggaaggtgactgatagg

SEQ ID NO: 8524 - DNA, 21 bp, synthetic construct
  source 1..21: mol_type = other DNA
gggggggttccgcctaagtat

SEQ ID NO: 8525 - DNA, 21 bp, synthetic construct
  source 1..21: mol_type = other DNA
ggtaggtctggtggggtttgg

SEQ ID NO: 8526 - DNA, 21 bp, synthetic construct
  source 1..21: mol_type = other DNA
tattcgcggttgagtgtggat

SEQ ID NO: 8527 - DNA, 21 bp, synthetic construct
  source 1..21: mol_type = other DNA
ttttttgctggtgttaaggat

SEQ ID NO: 8528 - DNA, 21 bp, synthetic construct
  source 1..21: mol_type = other DNA
tggtgtgagggtgtgatgacg

SEQ ID NO: 8529 - DNA, 21 bp, synthetic construct
  source 1..21: mol_type = other DNA
tggcgtgtgtctgatcagaag

SEQ ID NO: 8530 - DNA, 21 bp, synthetic construct
  source 1..21: mol_type = other DNA
tatgtgaagagtgattcgcat

SEQ ID NO: 8531 - DNA, 21 bp, synthetic construct
  source 1..21: mol_type = other DNA
ggtatggggtcgagtgtgtgg

SEQ ID NO: 8532 - DNA, 21 bp, synthetic construct
  source 1..21: mol_type = other DNA
gctggtgagagtcggggttgg

SEQ ID NO: 8533 - DNA, 21 bp, synthetic construct
  source 1..21: mol_type = other DNA
tgggcgaggagtcctgggagt

SEQ ID NO: 8534 - DNA, 21 bp, synthetic construct
  source 1..21: mol_type = other DNA
aagagtgttaagtttctgggt

SEQ ID NO: 8535 - DNA, 21 bp, synthetic construct
  source 1..21: mol_type = other DNA
actctggttaggactacgggt

SEQ ID NO: 8536 - DNA, 21 bp, synthetic construct
  source 1..21: mol_type = other DNA
tattatacggggcggctggag

SEQ ID NO: 8537 - DNA, 21 bp, synthetic construct
  source 1..21: mol_type = other DNA
aagtggacttctaatagtggg

SEQ ID NO: 8538 - DNA, 21 bp, synthetic construct
  source 1..21: mol_type = other DNA
ttgagtaaggttggtcagaat

SEQ ID NO: 8539 - DNA, 21 bp, synthetic construct
  source 1..21: mol_type = other DNA
gtgagggcgtatgcgacgggt

SEQ ID NO: 8540 - DNA, 21 bp, synthetic construct
  source 1..21: mol_type = other DNA
cattcgcgtttgaatgagagt

SEQ ID NO: 8541 - DNA, 21 bp, synthetic construct
  source 1..21: mol_type = other DNA
actaggtatactggtcagcat

SEQ ID NO: 8542 - DNA, 21 bp, synthetic construct
  source 1..21: mol_type = other DNA
cgttttcatgctgggacgatg

SEQ ID NO: 8543 - DNA, 21 bp, synthetic construct
  source 1..21: mol_type = other DNA
tatcgtgtgcgtgatattggg

SEQ ID NO: 8544 - DNA, 21 bp, synthetic construct
  source 1..21: mol_type = other DNA
gttgatagtacttgtcatgct

SEQ ID NO: 8545 - DNA, 21 bp, synthetic construct
  source 1..21: mol_type = other DNA
aagtattcttcgttttcggct

SEQ ID NO: 8546 - DNA, 21 bp, synthetic construct
  source 1..21: mol_type = other DNA
cgtgatgggaatagtgcttgg

SEQ ID NO: 8547 - DNA, 21 bp, synthetic construct
  source 1..21: mol_type = other DNA
tggttttctggggagacggat

SEQ ID NO: 8548 - DNA, 21 bp, synthetic construct
  source 1..21: mol_type = other DNA
cgttcggcgtttgagcctttt

SEQ ID NO: 8549 - DNA, 21 bp, synthetic construct
  source 1..21: mol_type = other DNA
catcattttagtgggaagcag

SEQ ID NO: 8550 - DNA, 21 bp, synthetic construct
  source 1..21: mol_type = other DNA
tctaggtggggtgatgcggct

SEQ ID NO: 8551 - DNA, 21 bp, synthetic construct
  source 1..21: mol_type = other DNA
ttgtggcggtcggataataat

SEQ ID NO: 8552 - DNA, 21 bp, synthetic construct
  source 1..21: mol_type = other DNA
gggagtgagtttcatacttgg

SEQ ID NO: 8553 - DNA, 21 bp, synthetic construct
  source 1..21: mol_type = other DNA
ggtgctgggacgagttcgtgg

SEQ ID NO: 8554 - DNA, 21 bp, synthetic construct
  source 1..21: mol_type = other DNA
tatgttcgttctcaggttgat

SEQ ID NO: 8555 - DNA, 21 bp, synthetic construct
  source 1..21: mol_type = other DNA
ccgaataggtttactaaggat

SEQ ID NO: 8556 - DNA, 21 bp, synthetic construct
  source 1..21: mol_type = other DNA
gcgagtagtactaatggtcgg

SEQ ID NO: 8557 - DNA, 21 bp, synthetic construct
  source 1..21: mol_type = other DNA
agggttgaggatgcgtttcct

SEQ ID NO: 8558 - DNA, 21 bp, synthetic construct
  source 1..21: mol_type = other DNA
ttgcatcgtgagtcgcctaat

SEQ ID NO: 8559 - DNA, 21 bp, synthetic construct
  source 1..21: mol_type = other DNA
tttttttctacgaatggggtt

SEQ ID NO: 8560 - DNA, 21 bp, synthetic construct
  source 1..21: mol_type = other DNA
ttgactcgtattagtagtaat

SEQ ID NO: 8561 - DNA, 21 bp, synthetic construct
  source 1..21: mol_type = other DNA
agggttccgtataagggtgat

SEQ ID NO: 8562 - DNA, 21 bp, synthetic construct
  source 1..21: mol_type = other DNA
gtgtcgtcgcagtggcggggt

SEQ ID NO: 8563 - DNA, 21 bp, synthetic construct
  source 1..21: mol_type = other DNA
cggtcggctgatgcttttccg

SEQ ID NO: 8564 - DNA, 21 bp, synthetic construct
  source 1..21: mol_type = other DNA
tatgttggtggggcgtattcg

SEQ ID NO: 8565 - DNA, 21 bp, synthetic construct
  source 1..21: mol_type = other DNA
actagttatgattctggttgg

SEQ ID NO: 8566 - DNA, 21 bp, synthetic construct
  source 1..21: mol_type = other DNA
ggggctgatcatgtgacttgg

SEQ ID NO: 8567 - DNA, 21 bp, synthetic construct
  source 1..21: mol_type = other DNA
tatgttcggtcgatgaatact

SEQ ID NO: 8568 - DNA, 21 bp, synthetic construct
  source 1..21: mol_type = other DNA
ctgagtcgggtgagtgcggat

SEQ ID NO: 8569 - DNA, 21 bp, synthetic construct
  source 1..21: mol_type = other DNA
tcttgtacgccttgtaaggcg

SEQ ID NO: 8570 - DNA, 21 bp, synthetic construct
  source 1..21: mol_type = other DNA
gtggcgacgcatggggcgggt

SEQ ID NO: 8571 - DNA, 21 bp, synthetic construct
  source 1..21: mol_type = other DNA
tttcctggttcgtgttgtgct

SEQ ID NO: 8572 - DNA, 21 bp, synthetic construct
  source 1..21: mol_type = other DNA
gtggagtctagtcgtgcgtgg

SEQ ID NO: 8573 - DNA, 21 bp, synthetic construct
  source 1..21: mol_type = other DNA
ttttatgggcatccttatgat

SEQ ID NO: 8574 - DNA, 21 bp, synthetic construct
  source 1..21: mol_type = other DNA
aggctggagtctacgggttgg

SEQ ID NO: 8575 - DNA, 21 bp, synthetic construct
  source 1..21: mol_type = other DNA
gttgctaggacgtatcgtgag

SEQ ID NO: 8576 - DNA, 21 bp, synthetic construct
  source 1..21: mol_type = other DNA
tattctaagattgggcgtgat

SEQ ID NO: 8577 - DNA, 21 bp, synthetic construct
  source 1..21: mol_type = other DNA
aaggatgattatactactttt

SEQ ID NO: 8578 - DNA, 21 bp, synthetic construct
  source 1..21: mol_type = other DNA
tggtatagtgggattattgcg

SEQ ID NO: 8579 - DNA, 21 bp, synthetic construct
  source 1..21: mol_type = other DNA
agggatgtgggttgttgtggt

SEQ ID NO: 8580 - DNA, 21 bp, synthetic construct
  source 1..21: mol_type = other DNA
ctttttactgggtttggtcct

SEQ ID NO: 8581 - DNA, 21 bp, synthetic construct
  source 1..21: mol_type = other DNA
tattttgctgggactcatact

SEQ ID NO: 8582 - DNA, 21 bp, synthetic construct
  source 1..21: mol_type = other DNA
aggacgaatgttgtgtttccg

SEQ ID NO: 8583 - DNA, 21 bp, synthetic construct
  source 1..21: mol_type = other DNA
ctggtgtatgggaagaatgtt

SEQ ID NO: 8584 - DNA, 21 bp, synthetic construct
  source 1..21: mol_type = other DNA
ttgacgaggctgcatgcggtt

SEQ ID NO: 8585 - DNA, 21 bp, synthetic construct
  source 1..21: mol_type = other DNA
ttgcatgttagtcttgagaat

SEQ ID NO: 8586 - DNA, 21 bp, synthetic construct
  source 1..21: mol_type = other DNA
atggttaggaatcagccgaat

SEQ ID NO: 8587 - DNA, 21 bp, synthetic construct
  source 1..21: mol_type = other DNA
cattttcctcgtagtacgggt

SEQ ID NO: 8588 - DNA, 21 bp, synthetic construct
  source 1..21: mol_type = other DNA
gattttacggatcgtaagtgg

SEQ ID NO: 8589 - DNA, 21 bp, synthetic construct
  source 1..21: mol_type = other DNA
cttcctaggactggtgattgg

SEQ ID NO: 8590 - DNA, 21 bp, synthetic construct
  source 1..21: mol_type = other DNA
aatgatgggcatattaagggt

SEQ ID NO: 8591 - DNA, 21 bp, synthetic construct
  source 1..21: mol_type = other DNA
tggggtgggcataggggggtt

SEQ ID NO: 8592 - DNA, 21 bp, synthetic construct
  source 1..21: mol_type = other DNA
gctactgattctggtcctcgg

SEQ ID NO: 8593 - DNA, 21 bp, synthetic construct
  source 1..21: mol_type = other DNA
tcgtggagtggtgggacgaag

SEQ ID NO: 8594 - DNA, 21 bp, synthetic construct
  source 1..21: mol_type = other DNA
tttatgccgggtcataggacg

SEQ ID NO: 8595 - DNA, 21 bp, synthetic construct
  source 1..21: mol_type = other DNA
gttgcgatgtcgggggctggg

SEQ ID NO: 8596 - DNA, 21 bp, synthetic construct
  source 1..21: mol_type = other DNA
aagttgcctaattatgggtat

SEQ ID NO: 8597 - DNA, 21 bp, synthetic construct
  source 1..21: mol_type = other DNA
gagatgctgagtgttagttgg

SEQ ID NO: 8598 - DNA, 21 bp, synthetic construct
  source 1..21: mol_type = other DNA
tttcttaagcataataattat

SEQ ID NO: 8599 - DNA, 21 bp, synthetic construct
  source 1..21: mol_type = other DNA
cgttcggagcatgcgtatcct

SEQ ID NO: 8600 - DNA, 21 bp, synthetic construct
  source 1..21: mol_type = other DNA
attggggttaagggttgggat

SEQ ID NO: 8601 - DNA, 21 bp, synthetic construct
  source 1..21: mol_type = other DNA
gaggcgttgaatgggtgggat

SEQ ID NO: 8602 - DNA, 21 bp, synthetic construct
  source 1..21: mol_type = other DNA
cattggtctcagaatggggtg

SEQ ID NO: 8603 - DNA, 21 bp, synthetic construct
  source 1..21: mol_type = other DNA
agttttgggccgaggactagt

SEQ ID NO: 8604 - DNA, 21 bp, synthetic construct
  source 1..21: mol_type = other DNA
tattttgagcgtaagcctgat

SEQ ID NO: 8605 - DNA, 21 bp, synthetic construct
  source 1..21: mol_type = other DNA
gggtcgcctggggtggcgtgg

SEQ ID NO: 8606 - DNA, 21 bp, synthetic construct
  source 1..21: mol_type = other DNA
acggggggtgggatgtttgtg

SEQ ID NO: 8607 - DNA, 21 bp, synthetic construct
  source 1..21: mol_type = other DNA
ggggagttgatgggtattgag

SEQ ID NO: 8608 - DNA, 21 bp, synthetic construct
  source 1..21: mol_type = other DNA
ctttggagtggtattggtccg

SEQ ID NO: 8609 - DNA, 21 bp, synthetic construct
  source 1..21: mol_type = other DNA
aaggatgattataatacgtat

SEQ ID NO: 8610 - DNA, 21 bp, synthetic construct
  source 1..21: mol_type = other DNA
cagggggaggcgcgtatttgg

SEQ ID NO: 8611 - DNA, 21 bp, synthetic construct
  source 1..21: mol_type = other DNA
attgatgcgagttctatttgg

SEQ ID NO: 8612 - DNA, 21 bp, synthetic construct
  source 1..21: mol_type = other DNA
gcgtttgatgggacgtctgct

SEQ ID NO: 8613 - DNA, 21 bp, synthetic construct
  source 1..21: mol_type = other DNA
gctaggtatgggggtagggag

SEQ ID NO: 8614 - DNA, 21 bp, synthetic construct
  source 1..21: mol_type = other DNA
gataataggggtttgattgct

SEQ ID NO: 8615 - DNA, 21 bp, synthetic construct
  source 1..21: mol_type = other DNA
cggtctgaggtttctgtttgg

SEQ ID NO: 8616 - DNA, 21 bp, synthetic construct
  source 1..21: mol_type = other DNA
agggaggggactagtgcttgg

SEQ ID NO: 8617 - DNA, 21 bp, synthetic construct
  source 1..21: mol_type = other DNA
gatcctgcgagtcgggcttgg

SEQ ID NO: 8618 - DNA, 21 bp, synthetic construct
  source 1..21: mol_type = other DNA
tgttgtactgctctgagtccg

SEQ ID NO: 8619 - DNA, 21 bp, synthetic construct
  source 1..21: mol_type = other DNA
gttgttggtgtttgtccggcg

SEQ ID NO: 8620 - DNA, 21 bp, synthetic construct
  source 1..21: mol_type = other DNA
tctcctggttatcctagtttt

SEQ ID NO: 8621 - DNA, 21 bp, synthetic construct
  source 1..21: mol_type = other DNA
ttttttagtggtaagctggat

SEQ ID NO: 8622 - DNA, 21 bp, synthetic construct
  source 1..21: mol_type = other DNA
tattggacgggtaggcctgat

SEQ ID NO: 8623 - DNA, 21 bp, synthetic construct
  source 1..21: mol_type = other DNA
tttgagtctgataatggggtg

SEQ ID NO: 8624 - DNA, 21 bp, synthetic construct
  source 1..21: mol_type = other DNA
ctttctaagctttctttgaat

SEQ ID NO: 8625 - DNA, 21 bp, synthetic construct
  source 1..21: mol_type = other DNA
gttggggagcgtgggtgggat

SEQ ID NO: 8626 - DNA, 21 bp, synthetic construct
  source 1..21: mol_type = other DNA
gggagtgctttgtcttcgtgg

SEQ ID NO: 8627 - DNA, 21 bp, synthetic construct
  source 1..21: mol_type = other DNA
gttagtgattttttggtttat

SEQ ID NO: 8628 - DNA, 21 bp, synthetic construct
  source 1..21: mol_type = other DNA
tgtctgggggagttggcggct

SEQ ID NO: 8629 - DNA, 21 bp, synthetic construct
  source 1..21: mol_type = other DNA
gggtgtggtactaagtgtggg

SEQ ID NO: 8630 - DNA, 21 bp, synthetic construct
  source 1..21: mol_type = other DNA
ggttgtcgtcatagtcctgtt

SEQ ID NO: 8631 - DNA, 21 bp, synthetic construct
  source 1..21: mol_type = other DNA
ggtgggcttacttgttgtggt

SEQ ID NO: 8632 - DNA, 21 bp, synthetic construct
  source 1..21: mol_type = other DNA
attgagtcgacgaatggggct

SEQ ID NO: 8633 - DNA, 21 bp, synthetic construct
  source 1..21: mol_type = other DNA
aagaatcgggatatgtcgtgg

SEQ ID NO: 8634 - DNA, 21 bp, synthetic construct
  source 1..21: mol_type = other DNA
cgtgaggctgatgcgtatgcg

SEQ ID NO: 8635 - DNA, 21 bp, synthetic construct
  source 1..21: mol_type = other DNA
cggcttattgatgtttatcct

SEQ ID NO: 8636 - DNA, 21 bp, synthetic construct
  source 1..21: mol_type = other DNA
tgtgggagtgttcaggtgaat

SEQ ID NO: 8637 - DNA, 21 bp, synthetic construct
  source 1..21: mol_type = other DNA
ggttatcagcatatgaagatg

SEQ ID NO: 8638 - DNA, 21 bp, synthetic construct
  source 1..21: mol_type = other DNA
gcggctaagtattctgatcgt

SEQ ID NO: 8639 - DNA, 21 bp, synthetic construct
  source 1..21: mol_type = other DNA
atgcgggatggtacggttgct

SEQ ID NO: 8640 - DNA, 21 bp, synthetic construct
  source 1..21: mol_type = other DNA
gggacggagtggcagccgttt

SEQ ID NO: 8641 - DNA, 21 bp, synthetic construct
  source 1..21: mol_type = other DNA
ggttcgcctggtgtggcgtgg

SEQ ID NO: 8642 - DNA, 21 bp, synthetic construct
  source 1..21: mol_type = other DNA
gatgcgattaatgggcgtaat

SEQ ID NO: 8643 - DNA, 21 bp, synthetic construct
  source 1..21: mol_type = other DNA
ttgcatcgtttgaatccgtcg

SEQ ID NO: 8644 - DNA, 21 bp, synthetic construct
  source 1..21: mol_type = other DNA
tggattggttatgtgaagaat

SEQ ID NO: 8645 - DNA, 21 bp, synthetic construct
  source 1..21: mol_type = other DNA
gttatgatgcttccgaatagt

SEQ ID NO: 8646 - DNA, 21 bp, synthetic construct
  source 1..21: mol_type = other DNA
cctggtagggctggttatttg

SEQ ID NO: 8647 - DNA, 21 bp, synthetic construct
  source 1..21: mol_type = other DNA
gtgatgtcgactcatggggtg

SEQ ID NO: 8648 - DNA, 21 bp, synthetic construct
  source 1..21: mol_type = other DNA
aatgtgaaggggatttcgctt

SEQ ID NO: 8649 - DNA, 21 bp, synthetic construct
  source 1..21: mol_type = other DNA
gaggtgattgggcggcgtgcg

SEQ ID NO: 8650 - DNA, 21 bp, synthetic construct
  source 1..21: mol_type = other DNA
ggtcatgagcctgggtgggcg

SEQ ID NO: 8651 - DNA, 21 bp, synthetic construct
  source 1..21: mol_type = other DNA
acgcgttctgattatttgagg

SEQ ID NO: 8652 - DNA, 21 bp, synthetic construct
  source 1..21: mol_type = other DNA
ggtactcctcgtagggattgg

SEQ ID NO: 8653 - DNA, 21 bp, synthetic construct
  source 1..21: mol_type = other DNA
ttttttgcggggaaggttagt

SEQ ID NO: 8654 - DNA, 21 bp, synthetic construct
  source 1..21: mol_type = other DNA
cgttctcttgagggttatttt

SEQ ID NO: 8655 - DNA, 21 bp, synthetic construct
  source 1..21: mol_type = other DNA
gtgaatagtacgaatgggatg

SEQ ID NO: 8656 - DNA, 21 bp, synthetic construct
  source 1..21: mol_type = other DNA
tattttagtggtgcggttgat

SEQ ID NO: 8657 - DNA, 21 bp, synthetic construct
  source 1..21: mol_type = other DNA
ggtgatgagtgggagcatttt

SEQ ID NO: 8658 - DNA, 21 bp, synthetic construct
  source 1..21: mol_type = other DNA
gatttgagtgcggttgattgg

SEQ ID NO: 8659 - DNA, 21 bp, synthetic construct
  source 1..21: mol_type = other DNA
agtgcccaagggaagtatagt

SEQ ID NO: 8660 - DNA, 21 bp, synthetic construct
  source 1..21: mol_type = other DNA
ggttatcggtctgcttctttg

SEQ ID NO: 8661 - DNA, 21 bp, synthetic construct
  source 1..21: mol_type = other DNA
aagtatgctttttcttctgag

SEQ ID NO: 8662 - DNA, 21 bp, synthetic construct
  source 1..21: mol_type = other DNA
ggtattcgtaatgttatgcat

SEQ ID NO: 8663 - DNA, 21 bp, synthetic construct
  source 1..21: mol_type = other DNA
gatgggagggttaattttagg

SEQ ID NO: 8664 - DNA, 21 bp, synthetic construct
  source 1..21: mol_type = other DNA
cgggagaatcatcctcgggcg

SEQ ID NO: 8665 - DNA, 21 bp, synthetic construct
  source 1..21: mol_type = other DNA
gttgggtcgtgtgctagggct

SEQ ID NO: 8666 - DNA, 21 bp, synthetic construct
  source 1..21: mol_type = other DNA
agggtggggaagggtgattgg

SEQ ID NO: 8667 - DNA, 21 bp, synthetic construct
  source 1..21: mol_type = other DNA
aatgttagtgagtggaggaat

SEQ ID NO: 8668 - DNA, 21 bp, synthetic construct
  source 1..21: mol_type = other DNA
aatcgtggtaattgtcggggt

SEQ ID NO: 8669 - DNA, 21 bp, synthetic construct
  source 1..21: mol_type = other DNA
tatgttaagtcttctaatatt

SEQ ID NO: 8670 - DNA, 21 bp, synthetic construct
  source 1..21: mol_type = other DNA
gatttggctagttctgcttgg

SEQ ID NO: 8671 - DNA, 21 bp, synthetic construct
  source 1..21: mol_type = other DNA
aatagttgggggaagggttcg

SEQ ID NO: 8672 - DNA, 21 bp, synthetic construct
  source 1..21: mol_type = other DNA
gggtttaggctggggcatggg

SEQ ID NO: 8673 - DNA, 21 bp, synthetic construct
  source 1..21: mol_type = other DNA
caggatgggcgttcgtcgtat

SEQ ID NO: 8674 - DNA, 21 bp, synthetic construct
  source 1..21: mol_type = other DNA
tcgtgggctcggtcggagttg

SEQ ID NO: 8675 - DNA, 21 bp, synthetic construct
  source 1..21: mol_type = other DNA
gatagtgtggagtttttgcgt

SEQ ID NO: 8676 - DNA, 21 bp, synthetic construct
  source 1..21: mol_type = other DNA
cctctggattcttataagtgg

SEQ ID NO: 8677 - DNA, 21 bp, synthetic construct
  source 1..21: mol_type = other DNA
ttgtctcgtgcttctgcgaat

SEQ ID NO: 8678 - DNA, 21 bp, synthetic construct
  source 1..21: mol_type = other DNA
ggttatcgtacggggaatacg

SEQ ID NO: 8679 - DNA, 21 bp, synthetic construct
  source 1..21: mol_type = other DNA
gtgtctcgggatagttatcgt

SEQ ID NO: 8680 - DNA, 21 bp, synthetic construct
  source 1..21: mol_type = other DNA
gggaagtatcaggataagtat

SEQ ID NO: 8681 - DNA, 21 bp, synthetic construct
  source 1..21: mol_type = other DNA
cataataataagtatcgggat

SEQ ID NO: 8682 - DNA, 21 bp, synthetic construct
  source 1..21: mol_type = other DNA
tattttcaggggacttataat

SEQ ID NO: 8683 - DNA, 21 bp, synthetic construct
  source 1..21: mol_type = other DNA
tgtgggccgcgtaatcctgag

SEQ ID NO: 8684 - DNA, 21 bp, synthetic construct
  source 1..21: mol_type = other DNA
tttactggggtgctgtgtgcg

SEQ ID NO: 8685 - DNA, 21 bp, synthetic construct
  source 1..21: mol_type = other DNA
gcgggtggtgggttgtatatt

SEQ ID NO: 8686 - DNA, 21 bp, synthetic construct
  source 1..21: mol_type = other DNA
tcgctggctgcgcatgattgg

SEQ ID NO: 8687 - DNA, 21 bp, synthetic construct
  source 1..21: mol_type = other DNA
tttgtgagtagtcattcgcgg

SEQ ID NO: 8688 - DNA, 21 bp, synthetic construct
  source 1..21: mol_type = other DNA
gatctgtctacgtatgattgg

SEQ ID NO: 8689 - DNA, 21 bp, synthetic construct
  source 1..21: mol_type = other DNA
ttggcgcgtaatttgcctaat

SEQ ID NO: 8690 - DNA, 21 bp, synthetic construct
  source 1..21: mol_type = other DNA
catacgattgattcgtttcct

SEQ ID NO: 8691 - DNA, 21 bp, synthetic construct
  source 1..21: mol_type = other DNA
ggtagtcagggttcgtcttgg

SEQ ID NO: 8692 - DNA, 21 bp, synthetic construct
  source 1..21: mol_type = other DNA
actcatcatccgcggttgagt

SEQ ID NO: 8693 - DNA, 21 bp, synthetic construct
  source 1..21: mol_type = other DNA
tgtgagaagcgtcaggcttcg

SEQ ID NO: 8694 - DNA, 21 bp, synthetic construct
  source 1..21: mol_type = other DNA
tggggttctctgcatcgtact

SEQ ID NO: 8695 - DNA, 21 bp, synthetic construct
  source 1..21: mol_type = other DNA
gggggtacgacttctacgtgg

SEQ ID NO: 8696 - DNA, 21 bp, synthetic construct
  source 1..21: mol_type = other DNA
ttgcataggatgcagacggat

SEQ ID NO: 8697 - DNA, 21 bp, synthetic construct
  source 1..21: mol_type = other DNA
gataagttgccggcttataag

SEQ ID NO: 8698 - DNA, 21 bp, synthetic construct
  source 1..21: mol_type = other DNA
gattatgcgtatagtaaggag

SEQ ID NO: 8699 - DNA, 21 bp, synthetic construct
  source 1..21: mol_type = other DNA
aatctgttgtctgcgcagtgg

SEQ ID NO: 8700 - DNA, 21 bp, synthetic construct
  source 1..21: mol_type = other DNA
ggtcctgaggggattcggtgg

SEQ ID NO: 8701 - DNA, 21 bp, synthetic construct
  source 1..21: mol_type = other DNA
cataagtatggttctaatgtt

SEQ ID NO: 8702 - DNA, 21 bp, synthetic construct
  source 1..21: mol_type = other DNA
ccgcatgcttcggggccggtg

SEQ ID NO: 8703 - DNA, 21 bp, synthetic construct
  source 1..21: mol_type = other DNA
agggatcagggtgtgtcgtgg

SEQ ID NO: 8704 - DNA, 21 bp, synthetic construct
  source 1..21: mol_type = other DNA
gatactgttgctcgtaggctt

SEQ ID NO: 8705 - DNA, 21 bp, synthetic construct
  source 1..21: mol_type = other DNA
aatgctacggtgtgttgtggt

SEQ ID NO: 8706 - DNA, 21 bp, synthetic construct
  source 1..21: mol_type = other DNA
ctttctcggcttacggttaat

SEQ ID NO: 8707 - DNA, 21 bp, synthetic construct
  source 1..21: mol_type = other DNA
acgtcggagtatcatgtgtat

SEQ ID NO: 8708 - DNA, 21 bp, synthetic construct
  source 1..21: mol_type = other DNA
gggggtgagactagtcagtgg

SEQ ID NO: 8709 - DNA, 21 bp, synthetic construct
  source 1..21: mol_type = other DNA
gatatgcgttcgccgaattgg

SEQ ID NO: 8710 - DNA, 21 bp, synthetic construct
  source 1..21: mol_type = other DNA
agggaggagaatgttaggtgg

SEQ ID NO: 8711 - DNA, 21 bp, synthetic construct
  source 1..21: mol_type = other DNA
ctgcatgatgcgactgggcct

SEQ ID NO: 8712 - DNA, 21 bp, synthetic construct
  source 1..21: mol_type = other DNA
gggcatttgcgggagaggacg

SEQ ID NO: 8713 - DNA, 21 bp, synthetic construct
  source 1..21: mol_type = other DNA
tttcattctacgtcgaggacg

SEQ ID NO: 8714 - DNA, 21 bp, synthetic construct
  source 1..21: mol_type = other DNA
tggagtggtcctgttcgttcg

SEQ ID NO: 8715 - DNA, 21 bp, synthetic construct
  source 1..21: mol_type = other DNA
gtttcggattgggcgcctttt

SEQ ID NO: 8716 - DNA, 21 bp, synthetic construct
  source 1..21: mol_type = other DNA
gcgcctagtggtattatggct

SEQ ID NO: 8717 - DNA, 21 bp, synthetic construct
  source 1..21: mol_type = other DNA
acttggactggtatgaatgcg

SEQ ID NO: 8718 - DNA, 21 bp, synthetic construct
  source 1..21: mol_type = other DNA
tattattctggtgtgacgtcg

SEQ ID NO: 8719 - DNA, 21 bp, synthetic construct
  source 1..21: mol_type = other DNA
agttttgggagtgatcatgat

SEQ ID NO: 8720 - DNA, 21 bp, synthetic construct
  source 1..21: mol_type = other DNA
tcgtatcttgcggataggaag

SEQ ID NO: 8721 - DNA, 21 bp, synthetic construct
  source 1..21: mol_type = other DNA
gtgtatgttaagagtacgagt

SEQ ID NO: 8722 - DNA, 21 bp, synthetic construct
  source 1..21: mol_type = other DNA
atttcggagtttcgttcgtat

SEQ ID NO: 8723 - DNA, 21 bp, synthetic construct
  source 1..21: mol_type = other DNA
ttgtgggatggttcggcgagt

SEQ ID NO: 8724 - DNA, 21 bp, synthetic construct
  source 1..21: mol_type = other DNA
ttggctcgtagttcgtctaat

SEQ ID NO: 8725 - DNA, 21 bp, synthetic construct
  source 1..21: mol_type = other DNA
cggggggatgatcggtcgtgg

SEQ ID NO: 8726 - DNA, 21 bp, synthetic construct
  source 1..21: mol_type = other DNA
tattttagtgggtctctgtct

SEQ ID NO: 8727 - DNA, 21 bp, synthetic construct
  source 1..21: mol_type = other DNA
ccgtatgcgcgggatgcgggt

SEQ ID NO: 8728 - DNA, 21 bp, synthetic construct
  source 1..21: mol_type = other DNA
tattttagtaatgttgctgcg

SEQ ID NO: 8729 - DNA, 21 bp, synthetic construct
  source 1..21: mol_type = other DNA
gatttgcgtgatagggcgtgg

SEQ ID NO: 8730 - DNA, 21 bp, synthetic construct
  source 1..21: mol_type = other DNA
tattcgcgtaatagtgataat

SEQ ID NO: 8731 - DNA, 21 bp, synthetic construct
  source 1..21: mol_type = other DNA
cagtcgggtatgttgaggtgt

SEQ ID NO: 8732 - DNA, 21 bp, synthetic construct
  source 1..21: mol_type = other DNA
gtgttggggcagggtaattgg

SEQ ID NO: 8733 - DNA, 21 bp, synthetic construct
  source 1..21: mol_type = other DNA
actcagctgcatggttctaat

SEQ ID NO: 8734 - DNA, 21 bp, synthetic construct
  source 1..21: mol_type = other DNA
gagaggtatcctagtcagagg

SEQ ID NO: 8735 - DNA, 21 bp, synthetic construct
  source 1..21: mol_type = other DNA
gtgtatcataataagtcggtg

SEQ ID NO: 8736 - DNA, 21 bp, synthetic construct
  source 1..21: mol_type = other DNA
ggttctgggttgtcgagttgg

SEQ ID NO: 8737 - DNA, 21 bp, synthetic construct
  source 1..21: mol_type = other DNA
gaggctttgcggggttgggat

SEQ ID NO: 8738 - DNA, 21 bp, synthetic construct
  source 1..21: mol_type = other DNA
ggtgtggtgaatgtttcttgg

SEQ ID NO: 8739 - DNA, 21 bp, synthetic construct
  source 1..21: mol_type = other DNA
tggcctacgtcgcgggggacg

SEQ ID NO: 8740 - DNA, 21 bp, synthetic construct
  source 1..21: mol_type = other DNA
tttacggtgcctggtatggat

SEQ ID NO: 8741 - DNA, 21 bp, synthetic construct
  source 1..21: mol_type = other DNA
ttgcataggctgtctggtgat

SEQ ID NO: 8742 - DNA, 21 bp, synthetic construct
  source 1..21: mol_type = other DNA
gatggggattggacggttttt

SEQ ID NO: 8743 - DNA, 21 bp, synthetic construct
  source 1..21: mol_type = other DNA
ggtcatgggacgaatagtttt

SEQ ID NO: 8744 - DNA, 21 bp, synthetic construct
  source 1..21: mol_type = other DNA
ggtggtaagtttcattcgggg

SEQ ID NO: 8745 - DNA, 21 bp, synthetic construct
  source 1..21: mol_type = other DNA
tgtgatggtactaaggtttcg

SEQ ID NO: 8746 - DNA, 21 bp, synthetic construct
  source 1..21: mol_type = other DNA
gtgcatgggatgggttgggat

SEQ ID NO: 8747 - DNA, 21 bp, synthetic construct
  source 1..21: mol_type = other DNA
attgatgattggaatgcgtgg

SEQ ID NO: 8748 - DNA, 21 bp, synthetic construct
  source 1..21: mol_type = other DNA
gggtatagtgagcgtgtgcgt

SEQ ID NO: 8749 - DNA, 21 bp, synthetic construct
  source 1..21: mol_type = other DNA
gttgctcatgctggtgcgggt

SEQ ID NO: 8750 - DNA, 21 bp, synthetic construct
  source 1..21: mol_type = other DNA
aggagtgagggttatttgaag

SEQ ID NO: 8751 - DNA, 21 bp, synthetic construct
  source 1..21: mol_type = other DNA
tattattcggggcaggtgttg

SEQ ID NO: 8752 - DNA, 21 bp, synthetic construct
  source 1..21: mol_type = other DNA
aaggagtatgggggtagtcgg

SEQ ID NO: 8753 - DNA, 21 bp, synthetic construct
  source 1..21: mol_type = other DNA
gattgggctaagaggtctgtt

SEQ ID NO: 8754 - DNA, 21 bp, synthetic construct
  source 1..21: mol_type = other DNA
gtgtcgggtggtactgcgggt

SEQ ID NO: 8755 - DNA, 21 bp, synthetic construct
  source 1..21: mol_type = other DNA
agggatcttgatgcttatcct

SEQ ID NO: 8756 - DNA, 21 bp, synthetic construct
  source 1..21: mol_type = other DNA
aattggaagagtggtagtggt

SEQ ID NO: 8757 - DNA, 21 bp, synthetic construct
  source 1..21: mol_type = other DNA
tcttatgggatgccgaggagt

SEQ ID NO: 8758 - DNA, 21 bp, synthetic construct
  source 1..21: mol_type = other DNA
aatgctcttggttgtgcgggt

SEQ ID NO: 8759 - DNA, 21 bp, synthetic construct
  source 1..21: mol_type = other DNA
tggcgtggtaagcctgagtcg

SEQ ID NO: 8760 - DNA, 21 bp, synthetic construct
  source 1..21: mol_type = other DNA
gatggtgcgatttatcttcgg

SEQ ID NO: 8761 - DNA, 21 bp, synthetic construct
  source 1..21: mol_type = other DNA
tgtgggagttataggcaggct

SEQ ID NO: 8762 - DNA, 21 bp, synthetic construct
  source 1..21: mol_type = other DNA
gtggctaggatggagagtgtg

SEQ ID NO: 8763 - DNA, 21 bp, synthetic construct
  source 1..21: mol_type = other DNA
ggggttcttgctaaggtggtt

SEQ ID NO: 8764 - DNA, 21 bp, synthetic construct
  source 1..21: mol_type = other DNA
gggggggataggtttcggacg

SEQ ID NO: 8765 - DNA, 21 bp, synthetic construct
  source 1..21: mol_type = other DNA
gttcggtcgcatttttcggct

SEQ ID NO: 8766 - DNA, 21 bp, synthetic construct
  source 1..21: mol_type = other DNA
tattttagtggtacgaataat

SEQ ID NO: 8767 - DNA, 21 bp, synthetic construct
  source 1..21: mol_type = other DNA
gtttcgacgggttctcctccg

SEQ ID NO: 8768 - DNA, 21 bp, synthetic construct
  source 1..21: mol_type = other DNA
agtggtggtcggtgggttggt

SEQ ID NO: 8769 - DNA, 21 bp, synthetic construct
  source 1..21: mol_type = other DNA
agtaggtttgagagtgtgcgg

SEQ ID NO: 8770 - DNA, 21 bp, synthetic construct
  source 1..21: mol_type = other DNA
cgtgggagtgagcgtatttgt

SEQ ID NO: 8771 - DNA, 21 bp, synthetic construct
  source 1..21: mol_type = other DNA
cgggaggatggttcgtattgg

SEQ ID NO: 8772 - DNA, 21 bp, synthetic construct
  source 1..21: mol_type = other DNA
tggaatccgattaggcatgcg

SEQ ID NO: 8773 - DNA, 21 bp, synthetic construct
  source 1..21: mol_type = other DNA
gctcattctcgtccgtttgtt

SEQ ID NO: 8774 - DNA, 21 bp, synthetic construct
  source 1..21: mol_type = other DNA
tggaaggggcattctggtcat

SEQ ID NO: 8775 - DNA, 21 bp, synthetic construct
  source 1..21: mol_type = other DNA
tatgcgcgtcttggggataat

SEQ ID NO: 8776 - DNA, 21 bp, synthetic construct
  source 1..21: mol_type = other DNA
attaggatggatgcttatcct

SEQ ID NO: 8777 - DNA, 21 bp, synthetic construct
  source 1..21: mol_type = other DNA
gagcttaggttttcgaagaat

SEQ ID NO: 8778 - DNA, 21 bp, synthetic construct
  source 1..21: mol_type = other DNA
cgtgatgagctgactacgtat

SEQ ID NO: 8779 - DNA, 21 bp, synthetic construct
  source 1..21: mol_type = other DNA
gtggctacgctggggtgggat

SEQ ID NO: 8780 - DNA, 21 bp, synthetic construct
  source 1..21: mol_type = other DNA
tcgtctccgcgttggaaggat

SEQ ID NO: 8781 - DNA, 21 bp, synthetic construct
  source 1..21: mol_type = other DNA
gggtggtcgagtaagaatagt

SEQ ID NO: 8782 - DNA, 21 bp, synthetic construct
  source 1..21: mol_type = other DNA
tggtttacggggattcgtgat

SEQ ID NO: 8783 - DNA, 21 bp, synthetic construct
  source 1..21: mol_type = other DNA
atggatggtaattctctttgg

SEQ ID NO: 8784 - DNA, 21 bp, synthetic construct
  source 1..21: mol_type = other DNA
gatttgacgctgtctagttgg

SEQ ID NO: 8785 - DNA, 21 bp, synthetic construct
  source 1..21: mol_type = other DNA
acgggtcaggggtatcgtagt

SEQ ID NO: 8786 - DNA, 21 bp, synthetic construct
  source 1..21: mol_type = other DNA
tgggataagggtgctgggcgt

SEQ ID NO: 8787 - DNA, 21 bp, synthetic construct
  source 1..21: mol_type = other DNA
gttgtgtcggggtcgagtgct

SEQ ID NO: 8788 - DNA, 21 bp, synthetic construct
  source 1..21: mol_type = other DNA
gttgggggtgggacgtggaat

SEQ ID NO: 8789 - DNA, 21 bp, synthetic construct
  source 1..21: mol_type = other DNA
tatgttcggtcgagtacgggt

SEQ ID NO: 8790 - DNA, 21 bp, synthetic construct
  source 1..21: mol_type = other DNA
tggggtcgtcagggtattggg

SEQ ID NO: 8791 - DNA, 21 bp, synthetic construct
  source 1..21: mol_type = other DNA
tattggtctcaggtggcgcag

SEQ ID NO: 8792 - DNA, 21 bp, synthetic construct
  source 1..21: mol_type = other DNA
aggagtgagttttcgacttat

SEQ ID NO: 8793 - DNA, 21 bp, synthetic construct
  source 1..21: mol_type = other DNA
atgtataagactagttcgcat

SEQ ID NO: 8794 - DNA, 21 bp, synthetic construct
  source 1..21: mol_type = other DNA
tatccgtttcctcaggtttct

SEQ ID NO: 8795 - DNA, 21 bp, synthetic construct
  source 1..21: mol_type = other DNA
tggttttctgggcagactgag

SEQ ID NO: 8796 - DNA, 21 bp, synthetic construct
  source 1..21: mol_type = other DNA
tgggatcgtgggaagcagttg

SEQ ID NO: 8797 - DNA, 21 bp, synthetic construct
  source 1..21: mol_type = other DNA
ggggttaatgaggtgcgttgg

SEQ ID NO: 8798 - DNA, 21 bp, synthetic construct
  source 1..21: mol_type = other DNA
catggtagtgcttgtgggatg

SEQ ID NO: 8799 - DNA, 21 bp, synthetic construct
  source 1..21: mol_type = other DNA
tggagtagtgggcgtgagcgt

SEQ ID NO: 8800 - DNA, 21 bp, synthetic construct
  source 1..21: mol_type = other DNA
tgtaggcctgttaaggatggg

SEQ ID NO: 8801 - DNA, 21 bp, synthetic construct
  source 1..21: mol_type = other DNA
ggtgatgagtatcattcttgg

SEQ ID NO: 8802 - DNA, 21 bp, synthetic construct
  source 1..21: mol_type = other DNA
tatagtcgggctgggtcttcg

SEQ ID NO: 8803 - DNA, 21 bp, synthetic construct
  source 1..21: mol_type = other DNA
gggtatttgaagaggccgcct

SEQ ID NO: 8804 - DNA, 21 bp, synthetic construct
  source 1..21: mol_type = other DNA
acgtataatcctaggtcttcg

SEQ ID NO: 8805 - DNA, 21 bp, synthetic construct
  source 1..21: mol_type = other DNA
ttgcataagcttactacggat

SEQ ID NO: 8806 - DNA, 21 bp, synthetic construct
  source 1..21: mol_type = other DNA
acgaaggatgggtggctgcct

SEQ ID NO: 8807 - DNA, 21 bp, synthetic construct
  source 1..21: mol_type = other DNA
tttttttcgggtgagaggtct

SEQ ID NO: 8808 - DNA, 21 bp, synthetic construct
  source 1..21: mol_type = other DNA
ttggcggggacgcagactgag

SEQ ID NO: 8809 - DNA, 21 bp, synthetic construct
  source 1..21: mol_type = other DNA
tttgcgaggagtggtgggggg

SEQ ID NO: 8810 - DNA, 21 bp, synthetic construct
  source 1..21: mol_type = other DNA
ggggatgtggaggtgcggtgg

SEQ ID NO: 8811 - DNA, 21 bp, synthetic construct
  source 1..21: mol_type = other DNA
gtgtgggagaaggctcgtatg

SEQ ID NO: 8812 - DNA, 21 bp, synthetic construct
  source 1..21: mol_type = other DNA
tggtttagtgggaaggttgat

SEQ ID NO: 8813 - DNA, 21 bp, synthetic construct
  source 1..21: mol_type = other DNA
aggtatgagggggcgctgcgt

SEQ ID NO: 8814 - DNA, 21 bp, synthetic construct
  source 1..21: mol_type = other DNA
gctggttttgatcgtcagtgg

SEQ ID NO: 8815 - DNA, 21 bp, synthetic construct
  source 1..21: mol_type = other DNA
tatgttaggagtaatgatttg

SEQ ID NO: 8816 - DNA, 21 bp, synthetic construct
  source 1..21: mol_type = other DNA
tttggtcgggcttatggggct

SEQ ID NO: 8817 - DNA, 21 bp, synthetic construct
  source 1..21: mol_type = other DNA
aggtttggtgatatgacgagg

SEQ ID NO: 8818 - DNA, 21 bp, synthetic construct
  source 1..21: mol_type = other DNA
gggctgtatgattatgtggcg

SEQ ID NO: 8819 - DNA, 21 bp, synthetic construct
  source 1..21: mol_type = other DNA
agtatgcctagtagtcagtgg

SEQ ID NO: 8820 - DNA, 21 bp, synthetic construct
  source 1..21: mol_type = other DNA
ttgaggagtggtgtggggcct

SEQ ID NO: 8821 - DNA, 21 bp, synthetic construct
  source 1..21: mol_type = other DNA
gggtctggtgattctaagtgg

SEQ ID NO: 8822 - DNA, 21 bp, synthetic construct
  source 1..21: mol_type = other DNA
tattggtctggggtgagtgct

SEQ ID NO: 8823 - DNA, 21 bp, synthetic construct
  source 1..21: mol_type = other DNA
tggcctggtcagtctggtttt

SEQ ID NO: 8824 - DNA, 21 bp, synthetic construct
  source 1..21: mol_type = other DNA
ttgtatcataagtcgtcgtct

SEQ ID NO: 8825 - DNA, 21 bp, synthetic construct
  source 1..21: mol_type = other DNA
aggtatcctaatcagactaat

SEQ ID NO: 8826 - DNA, 21 bp, synthetic construct
  source 1..21: mol_type = other DNA
aggatttttaataagggggag

SEQ ID NO: 8827 - DNA, 21 bp, synthetic construct
  source 1..21: mol_type = other DNA
ttggcttcgagggggtgggat

SEQ ID NO: 8828 - DNA, 21 bp, synthetic construct
  source 1..21: mol_type = other DNA
ggtgagggtgtggctaggtgg

SEQ ID NO: 8829 - DNA, 21 bp, synthetic construct
  source 1..21: mol_type = other DNA
gatctgacgtcggctgagtgg

SEQ ID NO: 8830 - DNA, 21 bp, synthetic construct
  source 1..21: mol_type = other DNA
cagaatgattctgttcgttgg

SEQ ID NO: 8831 - DNA, 21 bp, synthetic construct
  source 1..21: mol_type = other DNA
gttttgcagtcggcgagttgg

SEQ ID NO: 8832 - DNA, 21 bp, synthetic construct
  source 1..21: mol_type = other DNA
acgcgtgagggtgatccggct

SEQ ID NO: 8833 - DNA, 21 bp, synthetic construct
  source 1..21: mol_type = other DNA
tgggtggcgaggacgaaggat

SEQ ID NO: 8834 - DNA, 21 bp, synthetic construct
  source 1..21: mol_type = other DNA
agtcttcctccgtcttatggt

SEQ ID NO: 8835 - DNA, 21 bp, synthetic construct
  source 1..21: mol_type = other DNA
aatgtggcgcgtgcggctgtt

SEQ ID NO: 8836 - DNA, 21 bp, synthetic construct
  source 1..21: mol_type = other DNA
catcataagtggcctaatgct

SEQ ID NO: 8837 - DNA, 21 bp, synthetic construct
  source 1..21: mol_type = other DNA
ggttggagggttcgtgagggg

SEQ ID NO: 8838 - DNA, 21 bp, synthetic construct
  source 1..21: mol_type = other DNA
actcatggtacttcgacttgt

SEQ ID NO: 8839 - DNA, 21 bp, synthetic construct
  source 1..21: mol_type = other DNA
tcttttcgtagtgttcatcag

SEQ ID NO: 8840 - DNA, 21 bp, synthetic construct
  source 1..21: mol_type = other DNA
ggttgtgctaagctgtgtgat

SEQ ID NO: 8841 - DNA, 21 bp, synthetic construct
  source 1..21: mol_type = other DNA
tttggtcggattggttgggat

SEQ ID NO: 8842 - DNA, 21 bp, synthetic construct
  source 1..21: mol_type = other DNA
cggaagtctgatgtgtatccg

SEQ ID NO: 8843 - DNA, 21 bp, synthetic construct
  source 1..21: mol_type = other DNA
gttgcggatggtcttcgttgg

SEQ ID NO: 8844 - DNA, 21 bp, synthetic construct
  source 1..21: mol_type = other DNA
tttgatggtcattctgcgtgg

SEQ ID NO: 8845 - DNA, 21 bp, synthetic construct
  source 1..21: mol_type = other DNA
agttatgctcatcgttctcct

SEQ ID NO: 8846 - DNA, 21 bp, synthetic construct
  source 1..21: mol_type = other DNA
ggtgttgagacttctaggtgg

SEQ ID NO: 8847 - DNA, 21 bp, synthetic construct
  source 1..21: mol_type = other DNA
ttttcgggtaagtatggtcat

SEQ ID NO: 8848 - DNA, 21 bp, synthetic construct
  source 1..21: mol_type = other DNA
atgcttgatgggacgagtgcg

SEQ ID NO: 8849 - DNA, 21 bp, synthetic construct
  source 1..21: mol_type = other DNA
catgctccgacggatcgtagg

SEQ ID NO: 8850 - DNA, 21 bp, synthetic construct
  source 1..21: mol_type = other DNA
ttttctcgggctggtagtaat

SEQ ID NO: 8851 - DNA, 21 bp, synthetic construct
  source 1..21: mol_type = other DNA
ttgaggaatgggaatgctgcg

SEQ ID NO: 8852 - DNA, 21 bp, synthetic construct
  source 1..21: mol_type = other DNA
gatatgggggctggttcttgg

SEQ ID NO: 8853 - DNA, 21 bp, synthetic construct
  source 1..21: mol_type = other DNA
caggagaagtgggggaagggg

SEQ ID NO: 8854 - DNA, 21 bp, synthetic construct
  source 1..21: mol_type = other DNA
tattttagtggtgagactcgg

SEQ ID NO: 8855 - DNA, 21 bp, synthetic construct
  source 1..21: mol_type = other DNA
tttattgaggcgaggcggaat

SEQ ID NO: 8856 - DNA, 21 bp, synthetic construct
  source 1..21: mol_type = other DNA
ggttcgatgagttctacttgg

SEQ ID NO: 8857 - DNA, 21 bp, synthetic construct
  source 1..21: mol_type = other DNA
tctgatggttcttctaagtgg

SEQ ID NO: 8858 - DNA, 21 bp, synthetic construct
  source 1..21: mol_type = other DNA
ggggctaggagtgctgattat

SEQ ID NO: 8859 - DNA, 21 bp, synthetic construct
  source 1..21: mol_type = other DNA
gtttttaggacgcagggtggg

SEQ ID NO: 8860 - DNA, 21 bp, synthetic construct
  source 1..21: mol_type = other DNA
gttatttatcctagtggtgcg

SEQ ID NO: 8861 - DNA, 21 bp, synthetic construct
  source 1..21: mol_type = other DNA
aagttggttgagagtgatggt

SEQ ID NO: 8862 - DNA, 21 bp, synthetic construct
  source 1..21: mol_type = other DNA
tcttttgatcgtcagcgtagt

SEQ ID NO: 8863 - DNA, 21 bp, synthetic construct
  source 1..21: mol_type = other DNA
aggtttgctcataaggagaat

SEQ ID NO: 8864 - DNA, 21 bp, synthetic construct
  source 1..21: mol_type = other DNA
cgttatcctgatcgggctctt

SEQ ID NO: 8865 - DNA, 21 bp, synthetic construct
  source 1..21: mol_type = other DNA
tattctgctctgcagcgtaat

SEQ ID NO: 8866 - DNA, 21 bp, synthetic construct
  source 1..21: mol_type = other DNA
aattctgagtttatgagttat

SEQ ID NO: 8867 - DNA, 21 bp, synthetic construct
  source 1..21: mol_type = other DNA
ggtcagggtaattcggtttgg

SEQ ID NO: 8868 - DNA, 21 bp, synthetic construct
  source 1..21: mol_type = other DNA
gtggatgagtggagtactttt

SEQ ID NO: 8869 - DNA, 21 bp, synthetic construct
  source 1..21: mol_type = other DNA
tattatgcggggcagagggag

SEQ ID NO: 8870 - DNA, 21 bp, synthetic construct
  source 1..21: mol_type = other DNA
tgtcagaaggttgggatgatt

SEQ ID NO: 8871 - DNA, 21 bp, synthetic construct
  source 1..21: mol_type = other DNA
agggatggtcagtcttcttat

SEQ ID NO: 8872 - DNA, 21 bp, synthetic construct
  source 1..21: mol_type = other DNA
ccgcttagtacttctaattgg

SEQ ID NO: 8873 - DNA, 21 bp, synthetic construct
  source 1..21: mol_type = other DNA
gggtgtgttcatggtggtgct

SEQ ID NO: 8874 - DNA, 21 bp, synthetic construct
  source 1..21: mol_type = other DNA
tatgagtgttgtaagcagacg

SEQ ID NO: 8875 - DNA, 21 bp, synthetic construct
  source 1..21: mol_type = other DNA
aggtcggagaagggttatcat

SEQ ID NO: 8876 - DNA, 21 bp, synthetic construct
  source 1..21: mol_type = other DNA
tggtggcatggtgtgtcggct

SEQ ID NO: 8877 - DNA, 21 bp, synthetic construct
  source 1..21: mol_type = other DNA
gcggtgattcctagtcgtggg

SEQ ID NO: 8878 - DNA, 21 bp, synthetic construct
  source 1..21: mol_type = other DNA
acttatactaagtcggctgtt

SEQ ID NO: 8879 - DNA, 21 bp, synthetic construct
  source 1..21: mol_type = other DNA
cgtgagcagatggtgagttgg

SEQ ID NO: 8880 - DNA, 21 bp, synthetic construct
  source 1..21: mol_type = other DNA
gcttatgggagtgtgaggtct

SEQ ID NO: 8881 - DNA, 21 bp, synthetic construct
  source 1..21: mol_type = other DNA
cgtttgagtgagtcgacttgg

SEQ ID NO: 8882 - DNA, 21 bp, synthetic construct
  source 1..21: mol_type = other DNA
gatgaggagggtgctctgagt

SEQ ID NO: 8883 - DNA, 21 bp, synthetic construct
  source 1..21: mol_type = other DNA
aagcatgattcgagtcgttat

SEQ ID NO: 8884 - DNA, 21 bp, synthetic construct
  source 1..21: mol_type = other DNA
tggcggtcggggaatatgggt

SEQ ID NO: 8885 - DNA, 21 bp, synthetic construct
  source 1..21: mol_type = other DNA
aagtatgattcttccagttgg

SEQ ID NO: 8886 - DNA, 21 bp, synthetic construct
  source 1..21: mol_type = other DNA
ctgtgggatgggacgtttgcg

SEQ ID NO: 8887 - DNA, 21 bp, synthetic construct
  source 1..21: mol_type = other DNA
agggctcctgatactaggtgg

SEQ ID NO: 8888 - DNA, 21 bp, synthetic construct
  source 1..21: mol_type = other DNA
tataggcctgatggttatggg

SEQ ID NO: 8889 - DNA, 21 bp, synthetic construct
  source 1..21: mol_type = other DNA
gttcattctgatcggtcttgg

SEQ ID NO: 8890 - DNA, 21 bp, synthetic construct
  source 1..21: mol_type = other DNA
tatctggggcagccgtatttt

SEQ ID NO: 8891 - DNA, 21 bp, synthetic construct
  source 1..21: mol_type = other DNA
attttgcatgatagttctgag

SEQ ID NO: 8892 - DNA, 21 bp, synthetic construct
  source 1..21: mol_type = other DNA
acggttgagcgggcgcggttt

SEQ ID NO: 8893 - DNA, 21 bp, synthetic construct
  source 1..21: mol_type = other DNA
tattttagtggtgttgcggct

SEQ ID NO: 8894 - DNA, 21 bp, synthetic construct
  source 1..21: mol_type = other DNA
ttttttactgggattgctgat

SEQ ID NO: 8895 - DNA, 21 bp, synthetic construct
  source 1..21: mol_type = other DNA
tggcagagtgctaatggtgtt

SEQ ID NO: 8896 - DNA, 21 bp, synthetic construct
  source 1..21: mol_type = other DNA
gttgatgattttaattctttt

SEQ ID NO: 8897 - DNA, 21 bp, synthetic construct
  source 1..21: mol_type = other DNA
aaggcgtttcatgcgggggcg

SEQ ID NO: 8898 - DNA, 21 bp, synthetic construct
  source 1..21: mol_type = other DNA
aggggtggttcgtatggtagt

SEQ ID NO: 8899 - DNA, 21 bp, synthetic construct
  source 1..21: mol_type = other DNA
actgatgcgttttgtgcgccg

SEQ ID NO: 8900 - DNA, 21 bp, synthetic construct
  source 1..21: mol_type = other DNA
tggaatgctcctcatcgtgcg

SEQ ID NO: 8901 - DNA, 21 bp, synthetic construct
  source 1..21: mol_type = other DNA
tgtttggggatgtgtagtgag

SEQ ID NO: 8902 - DNA, 21 bp, synthetic construct
  source 1..21: mol_type = other DNA
actaggccggggtcgcatgtg

SEQ ID NO: 8903 - DNA, 21 bp, synthetic construct
  source 1..21: mol_type = other DNA
acggatgcgatgagtagttgg

SEQ ID NO: 8904 - DNA, 21 bp, synthetic construct
  source 1..21: mol_type = other DNA
catcatcctcggatgggtctt

SEQ ID NO: 8905 - DNA, 21 bp, synthetic construct
  source 1..21: mol_type = other DNA
tatggggtgggtacgtggtcg

SEQ ID NO: 8906 - DNA, 21 bp, synthetic construct
  source 1..21: mol_type = other DNA
tggcagaagaggcctacggag

SEQ ID NO: 8907 - DNA, 21 bp, synthetic construct
  source 1..21: mol_type = other DNA
cagaggtatgcttctcctcag

SEQ ID NO: 8908 - DNA, 21 bp, synthetic construct
  source 1..21: mol_type = other DNA
ctgagtagggctagtgataat

SEQ ID NO: 8909 - DNA, 21 bp, synthetic construct
  source 1..21: mol_type = other DNA
gcggatgggagtgtgcgttgg

SEQ ID NO: 8910 - DNA, 21 bp, synthetic construct
  source 1..21: mol_type = other DNA
agggttgttaatgttatgccg

SEQ ID NO: 8911 - DNA, 21 bp, synthetic construct
  source 1..21: mol_type = other DNA
tatccgtcgggtagtgctggt

SEQ ID NO: 8912 - DNA, 21 bp, synthetic construct
  source 1..21: mol_type = other DNA
attaagtcgagttggcatgct

SEQ ID NO: 8913 - DNA, 21 bp, synthetic construct
  source 1..21: mol_type = other DNA
tatacgaggttggataatgat

SEQ ID NO: 8914 - DNA, 21 bp, synthetic construct
  source 1..21: mol_type = other DNA
tattttgcgggtgtgtcggat

SEQ ID NO: 8915 - DNA, 21 bp, synthetic construct
  source 1..21: mol_type = other DNA
aatgcgaattttgagcgtcgg

SEQ ID NO: 8916 - DNA, 21 bp, synthetic construct
  source 1..21: mol_type = other DNA
tggaagcctaattcgaagtct

SEQ ID NO: 8917 - DNA, 21 bp, synthetic construct
  source 1..21: mol_type = other DNA
tatacgaggttgaattttgat

SEQ ID NO: 8918 - DNA, 21 bp, synthetic construct
  source 1..21: mol_type = other DNA
gtgcataagctttcgcttaat

SEQ ID NO: 8919 - DNA, 21 bp, synthetic construct
  source 1..21: mol_type = other DNA
ggttcgtatagggggttgggt

SEQ ID NO: 8920 - DNA, 21 bp, synthetic construct
  source 1..21: mol_type = other DNA
gtgttttcgtctaatggtgtg

SEQ ID NO: 8921 - DNA, 21 bp, synthetic construct
  source 1..21: mol_type = other DNA
tttcgttcggatcgttatggt

SEQ ID NO: 8922 - DNA, 21 bp, synthetic construct
  source 1..21: mol_type = other DNA
gggagttggattcctcatggt

SEQ ID NO: 8923 - DNA, 21 bp, synthetic construct
  source 1..21: mol_type = other DNA
cggggtggggggattagtgcg

SEQ ID NO: 8924 - DNA, 21 bp, synthetic construct
  source 1..21: mol_type = other DNA
gggcagctgcggtatgataag

SEQ ID NO: 8925 - DNA, 21 bp, synthetic construct
  source 1..21: mol_type = other DNA
cgtggtgggacttatcatagt

SEQ ID NO: 8926 - DNA, 21 bp, synthetic construct
  source 1..21: mol_type = other DNA
ccttttgcggtttcgattgag

SEQ ID NO: 8927 - DNA, 21 bp, synthetic construct
  source 1..21: mol_type = other DNA
gagaatgatcagttgccgcct

SEQ ID NO: 8928 - DNA, 21 bp, synthetic construct
  source 1..21: mol_type = other DNA
ggtctttcggataatcggagg

SEQ ID NO: 8929 - DNA, 21 bp, synthetic construct
  source 1..21: mol_type = other DNA
gctcttgggcgtgagtatagg

SEQ ID NO: 8930 - DNA, 21 bp, synthetic construct
  source 1..21: mol_type = other DNA
gtgggtggtagtaggttttcg

SEQ ID NO: 8931 - DNA, 21 bp, synthetic construct
  source 1..21: mol_type = other DNA
ctttttaggatgcgtgatggg

SEQ ID NO: 8932 - DNA, 21 bp, synthetic construct
  source 1..21: mol_type = other DNA
ttttttgttggtcatcatgat

SEQ ID NO: 8933 - DNA, 21 bp, synthetic construct
  source 1..21: mol_type = other DNA
atggagtctagtaatggtgtt

SEQ ID NO: 8934 - DNA, 21 bp, synthetic construct
  source 1..21: mol_type = other DNA
actgagagtacggtttatagt

SEQ ID NO: 8935 - DNA, 21 bp, synthetic construct
  source 1..21: mol_type = other DNA
tgtgttaatcggtgtgttgtg

SEQ ID NO: 8936 - DNA, 21 bp, synthetic construct
  source 1..21: mol_type = other DNA
aattatagtcatattaagtct

SEQ ID NO: 8937 - DNA, 21 bp, synthetic construct
  source 1..21: mol_type = other DNA
tgggataggatgtcggcgaag

SEQ ID NO: 8938 - DNA, 21 bp, synthetic construct
  source 1..21: mol_type = other DNA
gatcgtgcgtcgtcttcgtgg

SEQ ID NO: 8939 - DNA, 21 bp, synthetic construct
  source 1..21: mol_type = other DNA
cgtgaggattcgtctatgtgg

SEQ ID NO: 8940 - DNA, 21 bp, synthetic construct
  source 1..21: mol_type = other DNA
gtggcttggcagggtacgggg

SEQ ID NO: 8941 - DNA, 21 bp, synthetic construct
  source 1..21: mol_type = other DNA
tatggtacgcatcggtttact

SEQ ID NO: 8942 - DNA, 21 bp, synthetic construct
  source 1..21: mol_type = other DNA
acgcggtgtgttggggagatt

SEQ ID NO: 8943 - DNA, 21 bp, synthetic construct
  source 1..21: mol_type = other DNA
ctggaggatcatttgcggtgg

SEQ ID NO: 8944 - DNA, 21 bp, synthetic construct
  source 1..21: mol_type = other DNA
gtgtatgggacgtcgcgtagt

SEQ ID NO: 8945 - DNA, 21 bp, synthetic construct
  source 1..21: mol_type = other DNA
tggcagggggggcagcggggt

SEQ ID NO: 8946 - DNA, 21 bp, synthetic construct
  source 1..21: mol_type = other DNA
gtgccgcctttgtttgcggtg

SEQ ID NO: 8947 - DNA, 21 bp, synthetic construct
  source 1..21: mol_type = other DNA
actgttacgcatcatcgtctt

SEQ ID NO: 8948 - DNA, 21 bp, synthetic construct
  source 1..21: mol_type = other DNA
ggtggtcctggtacttggaat

SEQ ID NO: 8949 - DNA, 21 bp, synthetic construct
  source 1..21: mol_type = other DNA
gatcgttgggggagtagtgcg

SEQ ID NO: 8950 - DNA, 21 bp, synthetic construct
  source 1..21: mol_type = other DNA
tctggttatcgtgctcaggcg

SEQ ID NO: 8951 - DNA, 21 bp, synthetic construct
  source 1..21: mol_type = other DNA
gatctttcgagtcttgagtgg

SEQ ID NO: 8952 - DNA, 21 bp, synthetic construct
  source 1..21: mol_type = other DNA
tatgagtcgacgaatggggtt

SEQ ID NO: 8953 - DNA, 21 bp, synthetic construct
  source 1..21: mol_type = other DNA
aggggtgattatcaggttttt

SEQ ID NO: 8954 - DNA, 21 bp, synthetic construct
  source 1..21: mol_type = other DNA
tttaatccgccggctatgtat

SEQ ID NO: 8955 - DNA, 21 bp, synthetic construct
  source 1..21: mol_type = other DNA
gtttttgataataggcggtct

SEQ ID NO: 8956 - DNA, 21 bp, synthetic construct
  source 1..21: mol_type = other DNA
gggtggcgtggtgtgagtgct

SEQ ID NO: 8957 - DNA, 21 bp, synthetic construct
  source 1..21: mol_type = other DNA
tggtggcaggggattacggag

SEQ ID NO: 8958 - DNA, 21 bp, synthetic construct
  source 1..21: mol_type = other DNA
cgttgttgtggtcatttttat

SEQ ID NO: 8959 - DNA, 21 bp, synthetic construct
  source 1..21: mol_type = other DNA
ggggctcggactccgacgtgg

SEQ ID NO: 8960 - DNA, 21 bp, synthetic construct
  source 1..21: mol_type = other DNA
tattttggtgcgaggcgtgag

SEQ ID NO: 8961 - DNA, 21 bp, synthetic construct
  source 1..21: mol_type = other DNA
tggtctagtaataggtcttct

SEQ ID NO: 8962 - DNA, 21 bp, synthetic construct
  source 1..21: mol_type = other DNA
tggtggacgggggaggttgag

SEQ ID NO: 8963 - DNA, 21 bp, synthetic construct
  source 1..21: mol_type = other DNA
gttggttcgtcgaagtgtgtg

SEQ ID NO: 8964 - DNA, 21 bp, synthetic construct
  source 1..21: mol_type = other DNA
actgatgattggagtacgtgg

SEQ ID NO: 8965 - DNA, 21 bp, synthetic construct
  source 1..21: mol_type = other DNA
acttggagtggtatgaatgcg

SEQ ID NO: 8966 - DNA, 21 bp, synthetic construct
  source 1..21: mol_type = other DNA
gtgagtacgagtaagcattgg

SEQ ID NO: 8967 - DNA, 21 bp, synthetic construct
  source 1..21: mol_type = other DNA
aatcggtatggggcggcgcat

SEQ ID NO: 8968 - DNA, 21 bp, synthetic construct
  source 1..21: mol_type = other DNA
tggaatgcgtcgtataagcag

SEQ ID NO: 8969 - DNA, 21 bp, synthetic construct
  source 1..21: mol_type = other DNA
acggatgagtggagtccttat

SEQ ID NO: 8970 - DNA, 21 bp, synthetic construct
  source 1..21: mol_type = other DNA
ggtcaggttgggcgttataat

SEQ ID NO: 8971 - DNA, 21 bp, synthetic construct
  source 1..21: mol_type = other DNA
tgtaagccgtgtactgcgaat

SEQ ID NO: 8972 - DNA, 21 bp, synthetic construct
  source 1..21: mol_type = other DNA
ggtggtcgggggtataatatg

SEQ ID NO: 8973 - DNA, 21 bp, synthetic construct
  source 1..21: mol_type = other DNA
ggtgtggctaatactatgtgg

SEQ ID NO: 8974 - DNA, 21 bp, synthetic construct
  source 1..21: mol_type = other DNA
ctgcttgatagtcgtgattgg

SEQ ID NO: 8975 - DNA, 21 bp, synthetic construct
  source 1..21: mol_type = other DNA
cataaggaggggtgtggtctt

SEQ ID NO: 8976 - DNA, 21 bp, synthetic construct
  source 1..21: mol_type = other DNA
gatttgcaggctcatgattgg

SEQ ID NO: 8977 - DNA, 21 bp, synthetic construct
  source 1..21: mol_type = other DNA
tctgggattacttgttgtcct

SEQ ID NO: 8978 - DNA, 21 bp, synthetic construct
  source 1..21: mol_type = other DNA
cggggtgtgtatcgtagtgag

SEQ ID NO: 8979 - DNA, 21 bp, synthetic construct
  source 1..21: mol_type = other DNA
ggtgggtttggtgcggataag

SEQ ID NO: 8980 - DNA, 21 bp, synthetic construct
  source 1..21: mol_type = other DNA
tattcgagggttgattataat

SEQ ID NO: 8981 - DNA, 21 bp, synthetic construct
  source 1..21: mol_type = other DNA
gggacgcatacgagtgcttgt

SEQ ID NO: 8982 - DNA, 21 bp, synthetic construct
  source 1..21: mol_type = other DNA
ggttctccttcgtctagttgg

SEQ ID NO: 8983 - DNA, 21 bp, synthetic construct
  source 1..21: mol_type = other DNA
tggtggtctggggtttctgtg

SEQ ID NO: 8984 - DNA, 21 bp, synthetic construct
  source 1..21: mol_type = other DNA
tcgaggtttcgggttactgat

SEQ ID NO: 8985 - DNA, 21 bp, synthetic construct
  source 1..21: mol_type = other DNA
gtgaatgagtattctcggtat

SEQ ID NO: 8986 - DNA, 21 bp, synthetic construct
  source 1..21: mol_type = other DNA
tattttacggctcagttggat

SEQ ID NO: 8987 - DNA, 21 bp, synthetic construct
  source 1..21: mol_type = other DNA
tgtgagagtgtttgtctttat

SEQ ID NO: 8988 - DNA, 21 bp, synthetic construct
  source 1..21: mol_type = other DNA
tgtgttcaggtgaagagtggg

SEQ ID NO: 8989 - DNA, 21 bp, synthetic construct
  source 1..21: mol_type = other DNA
tgggcggatgctcggcggacg

SEQ ID NO: 8990 - DNA, 21 bp, synthetic construct
  source 1..21: mol_type = other DNA
tatcatagtcgtccgtttgcg

SEQ ID NO: 8991 - DNA, 21 bp, synthetic construct
  source 1..21: mol_type = other DNA
agtcagtgtacgagtagtccg

SEQ ID NO: 8992 - DNA, 21 bp, synthetic construct
  source 1..21: mol_type = other DNA
atttcggagtttcttgggtgg

SEQ ID NO: 8993 - DNA, 21 bp, synthetic construct
  source 1..21: mol_type = other DNA
attgatgagtgggcttcttat

SEQ ID NO: 8994 - DNA, 21 bp, synthetic construct
  source 1..21: mol_type = other DNA
ttgattgcttctgttagtgct

SEQ ID NO: 8995 - DNA, 21 bp, synthetic construct
  source 1..21: mol_type = other DNA
ctgttgtcggatgtgaagtgg

SEQ ID NO: 8996 - DNA, 21 bp, synthetic construct
  source 1..21: mol_type = other DNA
agtgggtcgaggtttaattct

SEQ ID NO: 8997 - DNA, 21 bp, synthetic construct
  source 1..21: mol_type = other DNA
agtgggaatcgtggggtgtgg

SEQ ID NO: 8998 - DNA, 21 bp, synthetic construct
  source 1..21: mol_type = other DNA
gataaggttcctgcgaggttt

SEQ ID NO: 8999 - DNA, 21 bp, synthetic construct
  source 1..21: mol_type = other DNA
attgagcggaggggttgggat

SEQ ID NO: 9000 - DNA, 21 bp, synthetic construct
  source 1..21: mol_type = other DNA
agttggttgaaggatgatgtt

SEQ ID NO: 9001 - DNA, 21 bp, synthetic construct
  source 1..21: mol_type = other DNA
aggggtcgggagtttcgggag

SEQ ID NO: 9002 - DNA, 21 bp, synthetic construct
  source 1..21: mol_type = other DNA
catgggtctgatcgtcgtttt

SEQ ID NO: 9003 - DNA, 21 bp, synthetic construct
  source 1..21: mol_type = other DNA
acgccgggtaatacgtcgagt

SEQ ID NO: 9004 - DNA, 21 bp, synthetic construct
  source 1..21: mol_type = other DNA
tgtgatgggtcttgtaaggcg

SEQ ID NO: 9005 - DNA, 21 bp, synthetic construct
  source 1..21: mol_type = other DNA
gggacgcggcctagtgagcct

SEQ ID NO: 9006 - DNA, 21 bp, synthetic construct
  source 1..21: mol_type = other DNA
tcgaagtatcatggttcgggg

SEQ ID NO: 9007 - DNA, 21 bp, synthetic construct
  source 1..21: mol_type = other DNA
gcgcgttatagtactggggct

SEQ ID NO: 9008 - DNA, 21 bp, synthetic construct
  source 1..21: mol_type = other DNA
cagggtaatggtagttttatt

SEQ ID NO: 9009 - DNA, 21 bp, synthetic construct
  source 1..21: mol_type = other DNA
ggtggtgagggttcgagttgg

SEQ ID NO: 9010 - DNA, 21 bp, synthetic construct
  source 1..21: mol_type = other DNA
tgttgtaagggtcagcctatg

SEQ ID NO: 9011 - DNA, 21 bp, synthetic construct
  source 1..21: mol_type = other DNA
gtgtttagggggcatgttggt

SEQ ID NO: 9012 - DNA, 21 bp, synthetic construct
  source 1..21: mol_type = other DNA
aagagggatgggacttctgcg

SEQ ID NO: 9013 - DNA, 21 bp, synthetic construct
  source 1..21: mol_type = other DNA
tttcctgggtctatttgtgtg

SEQ ID NO: 9014 - DNA, 21 bp, synthetic construct
  source 1..21: mol_type = other DNA
aatggtgattcgggtaagtgg

SEQ ID NO: 9015 - DNA, 21 bp, synthetic construct
  source 1..21: mol_type = other DNA
aattttggtcctcgtgctact

SEQ ID NO: 9016 - DNA, 21 bp, synthetic construct
  source 1..21: mol_type = other DNA
tgtgaggatgtgtgtcatggg

SEQ ID NO: 9017 - DNA, 21 bp, synthetic construct
  source 1..21: mol_type = other DNA
actttgtcgactaatgggagg

SEQ ID NO: 9018 - DNA, 21 bp, synthetic construct
  source 1..21: mol_type = other DNA
ttgagtgattttaagatttat

SEQ ID NO: 9019 - DNA, 21 bp, synthetic construct
  source 1..21: mol_type = other DNA
gatgtgtgttgtacgcgggtt

SEQ ID NO: 9020 - DNA, 21 bp, synthetic construct
  source 1..21: mol_type = other DNA
gggagtatgacgtcgagttgg

SEQ ID NO: 9021 - DNA, 21 bp, synthetic construct
  source 1..21: mol_type = other DNA
gggaatggtgagattcgttgg

SEQ ID NO: 9022 - DNA, 21 bp, synthetic construct
  source 1..21: mol_type = other DNA
gatagtgttgtgcatctgcgg

SEQ ID NO: 9023 - DNA, 21 bp, synthetic construct
  source 1..21: mol_type = other DNA
gagtataagacgtatgggaag

SEQ ID NO: 9024 - DNA, 21 bp, synthetic construct
  source 1..21: mol_type = other DNA
cgtgcgcttgatgggtgggat

SEQ ID NO: 9025 - DNA, 21 bp, synthetic construct
  source 1..21: mol_type = other DNA
ggttcgggggatagtctttgg

SEQ ID NO: 9026 - DNA, 21 bp, synthetic construct
  source 1..21: mol_type = other DNA
cagggtcagccttctaagtgg

SEQ ID NO: 9027 - DNA, 21 bp, synthetic construct
  source 1..21: mol_type = other DNA
gggggtagttcgagtacttgg

SEQ ID NO: 9028 - DNA, 21 bp, synthetic construct
  source 1..21: mol_type = other DNA
gggtcttatcagaatactcgt

SEQ ID NO: 9029 - DNA, 21 bp, synthetic construct
  source 1..21: mol_type = other DNA
atgtggaaggataagagtaat

SEQ ID NO: 9030 - DNA, 21 bp, synthetic construct
  source 1..21: mol_type = other DNA
ggtagtccggggtctcattgg

SEQ ID NO: 9031 - DNA, 21 bp, synthetic construct
  source 1..21: mol_type = other DNA
gttcataggctgcagcttgat

SEQ ID NO: 9032 - DNA, 21 bp, synthetic construct
  source 1..21: mol_type = other DNA
gagcgtccgagtagtaagtat

SEQ ID NO: 9033 - DNA, 21 bp, synthetic construct
  source 1..21: mol_type = other DNA
ggggggaatggggtttcgtgg

SEQ ID NO: 9034 - DNA, 21 bp, synthetic construct
  source 1..21: mol_type = other DNA
tatcatggtaagtatcagctg

SEQ ID NO: 9035 - DNA, 21 bp, synthetic construct
  source 1..21: mol_type = other DNA
tttatgcgtggtatgggtagt

SEQ ID NO: 9036 - DNA, 21 bp, synthetic construct
  source 1..21: mol_type = other DNA
agggaggggtctagttcttgg

SEQ ID NO: 9037 - DNA, 21 bp, synthetic construct
  source 1..21: mol_type = other DNA
ccgagttggggtgatcatttg

SEQ ID NO: 9038 - DNA, 21 bp, synthetic construct
  source 1..21: mol_type = other DNA
ttttcgaaggagtggaggccg

SEQ ID NO: 9039 - DNA, 21 bp, synthetic construct
  source 1..21: mol_type = other DNA
gttgagtttgagatgagttat

SEQ ID NO: 9040 - DNA, 21 bp, synthetic construct
  source 1..21: mol_type = other DNA
gatgatgttgtgtctaggcgt

SEQ ID NO: 9041 - DNA, 21 bp, synthetic construct
  source 1..21: mol_type = other DNA
gtgtttcggagtgttgagaag

SEQ ID NO: 9042 - DNA, 21 bp, synthetic construct
  source 1..21: mol_type = other DNA
ctgacgcggcttagtcctgat

SEQ ID NO: 9043 - DNA, 21 bp, synthetic construct
  source 1..21: mol_type = other DNA
aattgggctcgttcgattgag

SEQ ID NO: 9044 - DNA, 21 bp, synthetic construct
  source 1..21: mol_type = other DNA
gatatgggggatcatggttgg

SEQ ID NO: 9045 - DNA, 21 bp, synthetic construct
  source 1..21: mol_type = other DNA
cgtgagtctgctgtgagttgg

SEQ ID NO: 9046 - DNA, 21 bp, synthetic construct
  source 1..21: mol_type = other DNA
aatttggagtcgcatgtgtgg

SEQ ID NO: 9047 - DNA, 21 bp, synthetic construct
  source 1..21: mol_type = other DNA
tatattaagtatgatacgggt

SEQ ID NO: 9048 - DNA, 21 bp, synthetic construct
  source 1..21: mol_type = other DNA
tggtggagtggtgttattgag

SEQ ID NO: 9049 - DNA, 21 bp, synthetic construct
  source 1..21: mol_type = other DNA
gggatgtctattgaggcgcgg

SEQ ID NO: 9050 - DNA, 21 bp, synthetic construct
  source 1..21: mol_type = other DNA
cgtgatgctgaggtttttcct

SEQ ID NO: 9051 - DNA, 21 bp, synthetic construct
  source 1..21: mol_type = other DNA
gagaagaagtttgttccggcg

SEQ ID NO: 9052 - DNA, 21 bp, synthetic construct
  source 1..21: mol_type = other DNA
ttggtgaagagtacgaattat

SEQ ID NO: 9053 - DNA, 21 bp, synthetic construct
  source 1..21: mol_type = other DNA
gattgggcggtttctattgag

SEQ ID NO: 9054 - DNA, 21 bp, synthetic construct
  source 1..21: mol_type = other DNA
tgggttagggagcgggcgtct

SEQ ID NO: 9055 - DNA, 21 bp, synthetic construct
  source 1..21: mol_type = other DNA
ttgcgtgatgggacgtatgcg

SEQ ID NO: 9056 - DNA, 21 bp, synthetic construct
  source 1..21: mol_type = other DNA
gattggacgggtaatgcggcg

SEQ ID NO: 9057 - DNA, 21 bp, synthetic construct
  source 1..21: mol_type = other DNA
agggatgttactgtttttccg

SEQ ID NO: 9058 - DNA, 21 bp, synthetic construct
  source 1..21: mol_type = other DNA
gaggttgatggtttgcgttgg

SEQ ID NO: 9059 - DNA, 21 bp, synthetic construct
  source 1..21: mol_type = other DNA
gtgtggtctgctaatggtatt

SEQ ID NO: 9060 - DNA, 21 bp, synthetic construct
  source 1..21: mol_type = other DNA
ccgttggcggatcgtatgtgg

SEQ ID NO: 9061 - DNA, 21 bp, synthetic construct
  source 1..21: mol_type = other DNA
tgtggtgatattgggagtgtg

SEQ ID NO: 9062 - DNA, 21 bp, synthetic construct
  source 1..21: mol_type = other DNA
ctttctcggttgggtattgat

SEQ ID NO: 9063 - DNA, 21 bp, synthetic construct
  source 1..21: mol_type = other DNA
cgttatcgtgatggtgctgcg

SEQ ID NO: 9064 - DNA, 21 bp, synthetic construct
  source 1..21: mol_type = other DNA
attgagagttcgtctgggcgg

SEQ ID NO: 9065 - DNA, 21 bp, synthetic construct
  source 1..21: mol_type = other DNA
gatgttatgaggtcgaggtcg

SEQ ID NO: 9066 - DNA, 21 bp, synthetic construct
  source 1..21: mol_type = other DNA
catgatggttcgtcgcagtgg

SEQ ID NO: 9067 - DNA, 21 bp, synthetic construct
  source 1..21: mol_type = other DNA
aatggttttaaggatcgtggt

SEQ ID NO: 9068 - DNA, 21 bp, synthetic construct
  source 1..21: mol_type = other DNA
tattttacgggtatgactgtg

SEQ ID NO: 9069 - DNA, 21 bp, synthetic construct
  source 1..21: mol_type = other DNA
tgtgcgacgaggcttgcgcat

SEQ ID NO: 9070 - DNA, 21 bp, synthetic construct
  source 1..21: mol_type = other DNA
gggctggggcatcagcagtgt

SEQ ID NO: 9071 - DNA, 21 bp, synthetic construct
  source 1..21: mol_type = other DNA
gagcggacttcggttgcggcg

SEQ ID NO: 9072 - DNA, 21 bp, synthetic construct
  source 1..21: mol_type = other DNA
tgtgggagtggttgttcgatt

SEQ ID NO: 9073 - DNA, 21 bp, synthetic construct
  source 1..21: mol_type = other DNA
tgtactatttcgcggtgtccg

SEQ ID NO: 9074 - DNA, 21 bp, synthetic construct
  source 1..21: mol_type = other DNA
cggacttctatgcatcctggg

SEQ ID NO: 9075 - DNA, 21 bp, synthetic construct
  source 1..21: mol_type = other DNA
tgtttggctaagcatgttgcg

SEQ ID NO: 9076 - DNA, 21 bp, synthetic construct
  source 1..21: mol_type = other DNA
tatagtcgtactggtcagggg

SEQ ID NO: 9077 - DNA, 21 bp, synthetic construct
  source 1..21: mol_type = other DNA
gagactgattctggttattgg

SEQ ID NO: 9078 - DNA, 21 bp, synthetic construct
  source 1..21: mol_type = other DNA
tatagtacgaattggaagtct

SEQ ID NO: 9079 - DNA, 21 bp, synthetic construct
  source 1..21: mol_type = other DNA
tgggtgcgggcgagtgcgagt

SEQ ID NO: 9080 - DNA, 21 bp, synthetic construct
  source 1..21: mol_type = other DNA
aggagggatgggagtccggct

SEQ ID NO: 9081 - DNA, 21 bp, synthetic construct
  source 1..21: mol_type = other DNA
ggtgatacggtggtgcggtgg

SEQ ID NO: 9082 - DNA, 21 bp, synthetic construct
  source 1..21: mol_type = other DNA
gtttttcgttcgacgcctgct

SEQ ID NO: 9083 - DNA, 21 bp, synthetic construct
  source 1..21: mol_type = other DNA
agttttaagcgggcgaatgag

SEQ ID NO: 9084 - DNA, 21 bp, synthetic construct
  source 1..21: mol_type = other DNA
tgtgatagtgtttgtgcttat

SEQ ID NO: 9085 - DNA, 21 bp, synthetic construct
  source 1..21: mol_type = other DNA
ggttgttctggtaattcgtgt

SEQ ID NO: 9086 - DNA, 21 bp, synthetic construct
  source 1..21: mol_type = other DNA
tttccgttgcggcgtgtggat

SEQ ID NO: 9087 - DNA, 21 bp, synthetic construct
  source 1..21: mol_type = other DNA
aatctggggagttcgacgtgg

SEQ ID NO: 9088 - DNA, 21 bp, synthetic construct
  source 1..21: mol_type = other DNA
ttggctaggcttgcttatgat

SEQ ID NO: 9089 - DNA, 21 bp, synthetic construct
  source 1..21: mol_type = other DNA
gcttgtcggcataatccggcg

SEQ ID NO: 9090 - DNA, 21 bp, synthetic construct
  source 1..21: mol_type = other DNA
tcgtggaagtcgacttctgcg

SEQ ID NO: 9091 - DNA, 21 bp, synthetic construct
  source 1..21: mol_type = other DNA
gctggtccggattatgggtgg

SEQ ID NO: 9092 - DNA, 21 bp, synthetic construct
  source 1..21: mol_type = other DNA
gctccgcctgatgttcgttgg

SEQ ID NO: 9093 - DNA, 21 bp, synthetic construct
  source 1..21: mol_type = other DNA
gtgttgtcgtctactacttgg

SEQ ID NO: 9094 - DNA, 21 bp, synthetic construct
  source 1..21: mol_type = other DNA
cgtttgtatgatacgtttgct

SEQ ID NO: 9095 - DNA, 21 bp, synthetic construct
  source 1..21: mol_type = other DNA
tgggcgggggcgggtcgtacg

SEQ ID NO: 9096 - DNA, 21 bp, synthetic construct
  source 1..21: mol_type = other DNA
cagtatgctcgtcagaatcat

SEQ ID NO: 9097 - DNA, 21 bp, synthetic construct
  source 1..21: mol_type = other DNA
actaggtataagcctacggat

SEQ ID NO: 9098 - DNA, 21 bp, synthetic construct
  source 1..21: mol_type = other DNA
aatgtgggtaaggctaattgt

SEQ ID NO: 9099 - DNA, 21 bp, synthetic construct
  source 1..21: mol_type = other DNA
gtggggaagtatgctgtgcat

SEQ ID NO: 9100 - DNA, 21 bp, synthetic construct
  source 1..21: mol_type = other DNA
gtgggtacgcgggctgcttgg

SEQ ID NO: 9101 - DNA, 21 bp, synthetic construct
  source 1..21: mol_type = other DNA
ttgggtgatgctgtgtgtcgg

SEQ ID NO: 9102 - DNA, 21 bp, synthetic construct
  source 1..21: mol_type = other DNA
gcgcataatcgtagtacttat

SEQ ID NO: 9103 - DNA, 21 bp, synthetic construct
  source 1..21: mol_type = other DNA
tatgtggcgggttgtaaggag

SEQ ID NO: 9104 - DNA, 21 bp, synthetic construct
  source 1..21: mol_type = other DNA
gttgggattaattgtaaggag

SEQ ID NO: 9105 - DNA, 21 bp, synthetic construct
  source 1..21: mol_type = other DNA
aagggtgtttatgcgcatggt

SEQ ID NO: 9106 - DNA, 21 bp, synthetic construct
  source 1..21: mol_type = other DNA
ggggggcctggttattcgagg

SEQ ID NO: 9107 - DNA, 21 bp, synthetic construct
  source 1..21: mol_type = other DNA
aatgctggtgtttttacgggg

SEQ ID NO: 9108 - DNA, 21 bp, synthetic construct
  source 1..21: mol_type = other DNA
actcttggttctcctgatcgg

SEQ ID NO: 9109 - DNA, 21 bp, synthetic construct
  source 1..21: mol_type = other DNA
tattggcaggggctggcgtct

SEQ ID NO: 9110 - DNA, 21 bp, synthetic construct
  source 1..21: mol_type = other DNA
ggtgctactgtgtatcgtggt

SEQ ID NO: 9111 - DNA, 21 bp, synthetic construct
  source 1..21: mol_type = other DNA
cgtggtgataatatttttcct

SEQ ID NO: 9112 - DNA, 21 bp, synthetic construct
  source 1..21: mol_type = other DNA
tatgtgcgtcatgatacgctg

SEQ ID NO: 9113 - DNA, 21 bp, synthetic construct
  source 1..21: mol_type = other DNA
ggttcgggtatgaatgcgtgg

SEQ ID NO: 9114 - DNA, 21 bp, synthetic construct
  source 1..21: mol_type = other DNA
tctcgggatgagtggagggat

SEQ ID NO: 9115 - DNA, 21 bp, synthetic construct
  source 1..21: mol_type = other DNA
ttggcgaggactgcgttgaat

SEQ ID NO: 9116 - DNA, 21 bp, synthetic construct
  source 1..21: mol_type = other DNA
cgtttggcgggggagtgtaat

SEQ ID NO: 9117 - DNA, 21 bp, synthetic construct
  source 1..21: mol_type = other DNA
ctgttgtctgcgaatacgtgg

SEQ ID NO: 9118 - DNA, 21 bp, synthetic construct
  source 1..21: mol_type = other DNA
gatctggcgtctatggtttgg

SEQ ID NO: 9119 - DNA, 21 bp, synthetic construct
  source 1..21: mol_type = other DNA
aattatgctaagtctcagaat

SEQ ID NO: 9120 - DNA, 21 bp, synthetic construct
  source 1..21: mol_type = other DNA
tggagggggaatgcgactgtt

SEQ ID NO: 9121 - DNA, 21 bp, synthetic construct
  source 1..21: mol_type = other DNA
gcgtataatggtccgcgtgct

SEQ ID NO: 9122 - DNA, 21 bp, synthetic construct
  source 1..21: mol_type = other DNA
tgtactagggttgttgtggat

SEQ ID NO: 9123 - DNA, 21 bp, synthetic construct
  source 1..21: mol_type = other DNA
tttgatgagcatgagccgccg

SEQ ID NO: 9124 - DNA, 21 bp, synthetic construct
  source 1..21: mol_type = other DNA
cctcatctgcataggggtgcg

SEQ ID NO: 9125 - DNA, 21 bp, synthetic construct
  source 1..21: mol_type = other DNA
tattttactggtgttgttggg

SEQ ID NO: 9126 - DNA, 21 bp, synthetic construct
  source 1..21: mol_type = other DNA
tggtcggggacgcggatgcag

SEQ ID NO: 9127 - DNA, 21 bp, synthetic construct
  source 1..21: mol_type = other DNA
tggagtgttaagagggagact

SEQ ID NO: 9128 - DNA, 21 bp, synthetic construct
  source 1..21: mol_type = other DNA
ttgtctaaggctgctacgaat

SEQ ID NO: 9129 - DNA, 21 bp, synthetic construct
  source 1..21: mol_type = other DNA
tatttttcgggggtgagtgat

SEQ ID NO: 9130 - DNA, 21 bp, synthetic construct
  source 1..21: mol_type = other DNA
gatctggagagtgcgaggtgg

SEQ ID NO: 9131 - DNA, 21 bp, synthetic construct
  source 1..21: mol_type = other DNA
cattttgcgggtacttgggat

SEQ ID NO: 9132 - DNA, 21 bp, synthetic construct
  source 1..21: mol_type = other DNA
gtgcctgtgggttgttgtggt

SEQ ID NO: 9133 - DNA, 21 bp, synthetic construct
  source 1..21: mol_type = other DNA
gggttgggtgcgtctcggtat

SEQ ID NO: 9134 - DNA, 21 bp, synthetic construct
  source 1..21: mol_type = other DNA
gtgacggatacgaatggtgtg

SEQ ID NO: 9135 - DNA, 21 bp, synthetic construct
  source 1..21: mol_type = other DNA
tatactaggtcggatcataat

SEQ ID NO: 9136 - DNA, 21 bp, synthetic construct
  source 1..21: mol_type = other DNA
gtgcgtagtgttaatggggtg

SEQ ID NO: 9137 - DNA, 21 bp, synthetic construct
  source 1..21: mol_type = other DNA
tggagggcggttcgtgcggag

SEQ ID NO: 9138 - DNA, 21 bp, synthetic construct
  source 1..21: mol_type = other DNA
gggagtgggactaatgcgtgg

SEQ ID NO: 9139 - DNA, 21 bp, synthetic construct
  source 1..21: mol_type = other DNA
ttttcggagaggcgtgggctt

SEQ ID NO: 9140 - DNA, 21 bp, synthetic construct
  source 1..21: mol_type = other DNA
gttttggcgagtgttagttgg

SEQ ID NO: 9141 - DNA, 21 bp, synthetic construct
  source 1..21: mol_type = other DNA
tggaggggtggtggtggtagt

SEQ ID NO: 9142 - DNA, 21 bp, synthetic construct
  source 1..21: mol_type = other DNA
agtacgtatgatgctattgtt

SEQ ID NO: 9143 - DNA, 21 bp, synthetic construct
  source 1..21: mol_type = other DNA
tatcataggactgcttctttg

SEQ ID NO: 9144 - DNA, 21 bp, synthetic construct
  source 1..21: mol_type = other DNA
agggataatgggtatccttgg

SEQ ID NO: 9145 - DNA, 21 bp, synthetic construct
  source 1..21: mol_type = other DNA
tatgattctactaatggggtt

SEQ ID NO: 9146 - DNA, 21 bp, synthetic construct
  source 1..21: mol_type = other DNA
ctttctcggttgggtcctatt

SEQ ID NO: 9147 - DNA, 21 bp, synthetic construct
  source 1..21: mol_type = other DNA
gatttgcgtgttcagacgtgg

SEQ ID NO: 9148 - DNA, 21 bp, synthetic construct
  source 1..21: mol_type = other DNA
acgtatcgggatggggggagg

SEQ ID NO: 9149 - DNA, 21 bp, synthetic construct
  source 1..21: mol_type = other DNA
gctggtggttcgcgtgattgg

SEQ ID NO: 9150 - DNA, 21 bp, synthetic construct
  source 1..21: mol_type = other DNA
tatttttcgggggctcattct

SEQ ID NO: 9151 - DNA, 21 bp, synthetic construct
  source 1..21: mol_type = other DNA
tttatggatgggacggcggcg

SEQ ID NO: 9152 - DNA, 21 bp, synthetic construct
  source 1..21: mol_type = other DNA
ttggtgcggtttgagaatgtg

SEQ ID NO: 9153 - DNA, 21 bp, synthetic construct
  source 1..21: mol_type = other DNA
gggtctgcgacgagtggttgg

SEQ ID NO: 9154 - DNA, 21 bp, synthetic construct
  source 1..21: mol_type = other DNA
aggtgtggggagtgtggtgtt

SEQ ID NO: 9155 - DNA, 21 bp, synthetic construct
  source 1..21: mol_type = other DNA
tggggttcgtctagggctact

SEQ ID NO: 9156 - DNA, 21 bp, synthetic construct
  source 1..21: mol_type = other DNA
ggtgatggtgagagtcggtgg

SEQ ID NO: 9157 - DNA, 21 bp, synthetic construct
  source 1..21: mol_type = other DNA
ttgtcgcgtgcggcgaataat

SEQ ID NO: 9158 - DNA, 21 bp, synthetic construct
  source 1..21: mol_type = other DNA
gcgatgctttctagtacgtgg

SEQ ID NO: 9159 - DNA, 21 bp, synthetic construct
  source 1..21: mol_type = other DNA
agtgcttataggagtggtacg

SEQ ID NO: 9160 - DNA, 21 bp, synthetic construct
  source 1..21: mol_type = other DNA
agtttgggggatcggacgtgg

SEQ ID NO: 9161 - DNA, 21 bp, synthetic construct
  source 1..21: mol_type = other DNA
agggatggttcttctagttgg

SEQ ID NO: 9162 - DNA, 21 bp, synthetic construct
  source 1..21: mol_type = other DNA
tttaggttgcctcgtgagact

SEQ ID NO: 9163 - DNA, 21 bp, synthetic construct
  source 1..21: mol_type = other DNA
cggatggattcggcggcttgg

SEQ ID NO: 9164 - DNA, 21 bp, synthetic construct
  source 1..21: mol_type = other DNA
tggattaatggtatggttgct

SEQ ID NO: 9165 - DNA, 21 bp, synthetic construct
  source 1..21: mol_type = other DNA
tctttgtctgatcgtacgtgg

SEQ ID NO: 9166 - DNA, 21 bp, synthetic construct
  source 1..21: mol_type = other DNA
gtttctgagtttgagattttt

SEQ ID NO: 9167 - DNA, 21 bp, synthetic construct
  source 1..21: mol_type = other DNA
tggcctaatggggttaatggt

SEQ ID NO: 9168 - DNA, 21 bp, synthetic construct
  source 1..21: mol_type = other DNA
ggtgatggtgctagtcggtat

SEQ ID NO: 9169 - DNA, 21 bp, synthetic construct
  source 1..21: mol_type = other DNA
aggtatgtgaataaggagagt

SEQ ID NO: 9170 - DNA, 21 bp, synthetic construct
  source 1..21: mol_type = other DNA
gttaagagttcgaatggggtt

SEQ ID NO: 9171 - DNA, 21 bp, synthetic construct
  source 1..21: mol_type = other DNA
agggatcagttttcgacgtat

SEQ ID NO: 9172 - DNA, 21 bp, synthetic construct
  source 1..21: mol_type = other DNA
ggtggtatgctggtggagcgg

SEQ ID NO: 9173 - DNA, 21 bp, synthetic construct
  source 1..21: mol_type = other DNA
attgctagtgagggggctggg

SEQ ID NO: 9174 - DNA, 21 bp, synthetic construct
  source 1..21: mol_type = other DNA
gcgattactgctattgggtgt

SEQ ID NO: 9175 - DNA, 21 bp, synthetic construct
  source 1..21: mol_type = other DNA
tattattctgggcagttggcg

SEQ ID NO: 9176 - DNA, 21 bp, synthetic construct
  source 1..21: mol_type = other DNA
gggacgtgtggggttgagaag

SEQ ID NO: 9177 - DNA, 21 bp, synthetic construct
  source 1..21: mol_type = other DNA
aatcatctgcatgctcgtagt

SEQ ID NO: 9178 - DNA, 21 bp, synthetic construct
  source 1..21: mol_type = other DNA
agtgctagtgcgctgagttgg

SEQ ID NO: 9179 - DNA, 21 bp, synthetic construct
  source 1..21: mol_type = other DNA
aggtggctgaagaatgagccg

SEQ ID NO: 9180 - DNA, 21 bp, synthetic construct
  source 1..21: mol_type = other DNA
tatgttcggagtgattctact

SEQ ID NO: 9181 - DNA, 21 bp, synthetic construct
  source 1..21: mol_type = other DNA
tgtgtgactggttgtcgggat

SEQ ID NO: 9182 - DNA, 21 bp, synthetic construct
  source 1..21: mol_type = other DNA
tttttttcgggtgcgattgag

SEQ ID NO: 9183 - DNA, 21 bp, synthetic construct
  source 1..21: mol_type = other DNA
acggatgattttcttgcttgg

SEQ ID NO: 9184 - DNA, 21 bp, synthetic construct
  source 1..21: mol_type = other DNA
tttggtggtgtttctgcgtat

SEQ ID NO: 9185 - DNA, 21 bp, synthetic construct
  source 1..21: mol_type = other DNA
tgttgtggttcgaagaatgct

SEQ ID NO: 9186 - DNA, 21 bp, synthetic construct
  source 1..21: mol_type = other DNA
tggtattcgggggttttgtct

SEQ ID NO: 9187 - DNA, 21 bp, synthetic construct
  source 1..21: mol_type = other DNA
gataggcatcctgataggcgg

SEQ ID NO: 9188 - DNA, 21 bp, synthetic construct
  source 1..21: mol_type = other DNA
tattcgcgtttgaatggttct

SEQ ID NO: 9189 - DNA, 21 bp, synthetic construct
  source 1..21: mol_type = other DNA
aatgaggattttgtggcttgg

SEQ ID NO: 9190 - DNA, 21 bp, synthetic construct
  source 1..21: mol_type = other DNA
agtaggtcgtatggttctggt

SEQ ID NO: 9191 - DNA, 21 bp, synthetic construct
  source 1..21: mol_type = other DNA
tggttttctggggaggtggcg

SEQ ID NO: 9192 - DNA, 21 bp, synthetic construct
  source 1..21: mol_type = other DNA
agggatcatcatcctcgtgtt

SEQ ID NO: 9193 - DNA, 21 bp, synthetic construct
  source 1..21: mol_type = other DNA
gtggaggctactaatggggtt

SEQ ID NO: 9194 - DNA, 21 bp, synthetic construct
  source 1..21: mol_type = other DNA
agggcgggggcgcggtatgat

SEQ ID NO: 9195 - DNA, 21 bp, synthetic construct
  source 1..21: mol_type = other DNA
attgagatttataaggcgaat

SEQ ID NO: 9196 - DNA, 21 bp, synthetic construct
  source 1..21: mol_type = other DNA
cattggatgggtaataaggag

SEQ ID NO: 9197 - DNA, 21 bp, synthetic construct
  source 1..21: mol_type = other DNA
gtttatggtagttctgggagg

SEQ ID NO: 9198 - DNA, 21 bp, synthetic construct
  source 1..21: mol_type = other DNA
ggttctggtgcttctgcgtgg

SEQ ID NO: 9199 - DNA, 21 bp, synthetic construct
  source 1..21: mol_type = other DNA
ggttctgatcatgttatgtgg

SEQ ID NO: 9200 - DNA, 21 bp, synthetic construct
  source 1..21: mol_type = other DNA
gggtcttatcgttctgtgggt

SEQ ID NO: 9201 - DNA, 21 bp, synthetic construct
  source 1..21: mol_type = other DNA
gatgctgatgaggtgcatggg

SEQ ID NO: 9202 - DNA, 21 bp, synthetic construct
  source 1..21: mol_type = other DNA
ggtattgagacgagtaagtgg

SEQ ID NO: 9203 - DNA, 21 bp, synthetic construct
  source 1..21: mol_type = other DNA
gggtctgaggggtcgacgtgg

SEQ ID NO: 9204 - DNA, 21 bp, synthetic construct
  source 1..21: mol_type = other DNA
acgacggttccgacggggttg

SEQ ID NO: 9205 - DNA, 21 bp, synthetic construct
  source 1..21: mol_type = other DNA
tttaattctactgttgcttat

SEQ ID NO: 9206 - DNA, 21 bp, synthetic construct
  source 1..21: mol_type = other DNA
tgtcggcatcctgttactgct

SEQ ID NO: 9207 - DNA, 21 bp, synthetic construct
  source 1..21: mol_type = other DNA
ggtgataatgcgtttgggggg

SEQ ID NO: 9208 - DNA, 21 bp, synthetic construct
  source 1..21: mol_type = other DNA
tattggcgtggtacgatggat

SEQ ID NO: 9209 - DNA, 21 bp, synthetic construct
  source 1..21: mol_type = other DNA
gcgacttcggcgctggagaat

SEQ ID NO: 9210 - DNA, 21 bp, synthetic construct
  source 1..21: mol_type = other DNA
ggtgggggtgcgagtacgtgg

SEQ ID NO: 9211 - DNA, 21 bp, synthetic construct
  source 1..21: mol_type = other DNA
gatgagaatgcgtttccttat

SEQ ID NO: 9212 - DNA, 21 bp, synthetic construct
  source 1..21: mol_type = other DNA
tgtctgaagaatgagcggggg

SEQ ID NO: 9213 - DNA, 21 bp, synthetic construct
  source 1..21: mol_type = other DNA
tatatgagtgatcgtacttgg

SEQ ID NO: 9214 - DNA, 21 bp, synthetic construct
  source 1..21: mol_type = other DNA
actaattgtgctattaatgcg

SEQ ID NO: 9215 - DNA, 21 bp, synthetic construct
  source 1..21: mol_type = other DNA
aatatgtcgcaggggtcttgg

SEQ ID NO: 9216 - DNA, 21 bp, synthetic construct
  source 1..21: mol_type = other DNA
tatggtgctatgtgtcttgag

SEQ ID NO: 9217 - DNA, 21 bp, synthetic construct
  source 1..21: mol_type = other DNA
gggagttcgacgtctcattgg

SEQ ID NO: 9218 - DNA, 21 bp, synthetic construct
  source 1..21: mol_type = other DNA
gtgatgaatgcttctgattct

SEQ ID NO: 9219 - DNA, 21 bp, synthetic construct
  source 1..21: mol_type = other DNA
gtgaatgattatttgtcttat

SEQ ID NO: 9220 - DNA, 21 bp, synthetic construct
  source 1..21: mol_type = other DNA
ttgactcggttgtctcctgtg

SEQ ID NO: 9221 - DNA, 21 bp, synthetic construct
  source 1..21: mol_type = other DNA
aaggatagttatcatgtgttt

SEQ ID NO: 9222 - DNA, 21 bp, synthetic construct
  source 1..21: mol_type = other DNA
tggtcgttggagcgtacgtgg

SEQ ID NO: 9223 - DNA, 21 bp, synthetic construct
  source 1..21: mol_type = other DNA
ctttttgatggtacggagtct

SEQ ID NO: 9224 - DNA, 21 bp, synthetic construct
  source 1..21: mol_type = other DNA
tggactagttcgaatgtggcg

SEQ ID NO: 9225 - DNA, 21 bp, synthetic construct
  source 1..21: mol_type = other DNA
agggaggatactagtacttgg

SEQ ID NO: 9226 - DNA, 21 bp, synthetic construct
  source 1..21: mol_type = other DNA
ttgcggactgattgttgtgtg

SEQ ID NO: 9227 - DNA, 21 bp, synthetic construct
  source 1..21: mol_type = other DNA
gttcatagttttaatggggtg

SEQ ID NO: 9228 - DNA, 21 bp, synthetic construct
  source 1..21: mol_type = other DNA
gcccaaggtgggcagtctttt

SEQ ID NO: 9229 - DNA, 21 bp, synthetic construct
  source 1..21: mol_type = other DNA
ggtgtggagagggctaagtgg

SEQ ID NO: 9230 - DNA, 21 bp, synthetic construct
  source 1..21: mol_type = other DNA
tttggtaagggggagtgggcg

SEQ ID NO: 9231 - DNA, 21 bp, synthetic construct
  source 1..21: mol_type = other DNA
aagatggatgctgtgtcgtgg

SEQ ID NO: 9232 - DNA, 21 bp, synthetic construct
  source 1..21: mol_type = other DNA
tggtttactgggactgtggcg

SEQ ID NO: 9233 - DNA, 21 bp, synthetic construct
  source 1..21: mol_type = other DNA
ggtgggggtagttctttgtgg

SEQ ID NO: 9234 - DNA, 21 bp, synthetic construct
  source 1..21: mol_type = other DNA
tattttacgggggcgcctgat

SEQ ID NO: 9235 - DNA, 21 bp, synthetic construct
  source 1..21: mol_type = other DNA
tggactgggacgaaggatcct

SEQ ID NO: 9236 - DNA, 21 bp, synthetic construct
  source 1..21: mol_type = other DNA
catacgatgcgtggtggttat

SEQ ID NO: 9237 - DNA, 21 bp, synthetic construct
  source 1..21: mol_type = other DNA
gtggatgatgatgtgtggggt

SEQ ID NO: 9238 - DNA, 21 bp, synthetic construct
  source 1..21: mol_type = other DNA
cttgctaggtcgtcgactaat

SEQ ID NO: 9239 - DNA, 21 bp, synthetic construct
  source 1..21: mol_type = other DNA
ggggtgacgacttctgggtgg

SEQ ID NO: 9240 - DNA, 21 bp, synthetic construct
  source 1..21: mol_type = other DNA
cctgagtatgggaagtcggtt

SEQ ID NO: 9241 - DNA, 21 bp, synthetic construct
  source 1..21: mol_type = other DNA
tatttttcggggtatacttcg

SEQ ID NO: 9242 - DNA, 21 bp, synthetic construct
  source 1..21: mol_type = other DNA
gatgcgagggtggtgcgtcat

SEQ ID NO: 9243 - DNA, 21 bp, synthetic construct
  source 1..21: mol_type = other DNA
tcggatgagtattctacttat

SEQ ID NO: 9244 - DNA, 21 bp, synthetic construct
  source 1..21: mol_type = other DNA
cttttttctggggaggcggct

SEQ ID NO: 9245 - DNA, 21 bp, synthetic construct
  source 1..21: mol_type = other DNA
tggcagagtcatacgcgtaat

SEQ ID NO: 9246 - DNA, 21 bp, synthetic construct
  source 1..21: mol_type = other DNA
tgtgttagtgcgtgtgagcgt

SEQ ID NO: 9247 - DNA, 21 bp, synthetic construct
  source 1..21: mol_type = other DNA
tattttactgatattcgtgag

SEQ ID NO: 9248 - DNA, 21 bp, synthetic construct
  source 1..21: mol_type = other DNA
cctgtggcgagtcgggattgg

SEQ ID NO: 9249 - DNA, 21 bp, synthetic construct
  source 1..21: mol_type = other DNA
acgtataggggtcaggggggt

SEQ ID NO: 9250 - DNA, 21 bp, synthetic construct
  source 1..21: mol_type = other DNA
tggtcgagggatgcgcagaag

SEQ ID NO: 9251 - DNA, 21 bp, synthetic construct
  source 1..21: mol_type = other DNA
tttggtgggctgtgttgtagt

SEQ ID NO: 9252 - DNA, 21 bp, synthetic construct
  source 1..21: mol_type = other DNA
gctgggtcgattgatgggtcg

SEQ ID NO: 9253 - DNA, 21 bp, synthetic construct
  source 1..21: mol_type = other DNA
attcctgatacttgttgtgtg

SEQ ID NO: 9254 - DNA, 21 bp, synthetic construct
  source 1..21: mol_type = other DNA
acgacggattatgtgatgtat

SEQ ID NO: 9255 - DNA, 21 bp, synthetic construct
  source 1..21: mol_type = other DNA
tatgctattgagtgtagtaag

SEQ ID NO: 9256 - DNA, 21 bp, synthetic construct
  source 1..21: mol_type = other DNA
atttcttggtcgcaggtggat

SEQ ID NO: 9257 - DNA, 21 bp, synthetic construct
  source 1..21: mol_type = other DNA
actgatggtacgtctatgtgg

SEQ ID NO: 9258 - DNA, 21 bp, synthetic construct
  source 1..21: mol_type = other DNA
gttatgatttcggcgagttgg

SEQ ID NO: 9259 - DNA, 21 bp, synthetic construct
  source 1..21: mol_type = other DNA
aagcatgattttactgggtct

SEQ ID NO: 9260 - DNA, 21 bp, synthetic construct
  source 1..21: mol_type = other DNA
actgttgggacgactatgttg

SEQ ID NO: 9261 - DNA, 21 bp, synthetic construct
  source 1..21: mol_type = other DNA
agttatgggaaggtgatggtt

SEQ ID NO: 9262 - DNA, 21 bp, synthetic construct
  source 1..21: mol_type = other DNA
gggcagtggaggacttctgct

SEQ ID NO: 9263 - DNA, 21 bp, synthetic construct
  source 1..21: mol_type = other DNA
gggattgtgtctgtgtcgtgg

SEQ ID NO: 9264 - DNA, 21 bp, synthetic construct
  source 1..21: mol_type = other DNA
gatgctgtgctgcatcttagg

SEQ ID NO: 9265 - DNA, 21 bp, synthetic construct
  source 1..21: mol_type = other DNA
gtgggtcgggataatttgacg

SEQ ID NO: 9266 - DNA, 21 bp, synthetic construct
  source 1..21: mol_type = other DNA
attgcgtcgaagggtgcgggt

SEQ ID NO: 9267 - DNA, 21 bp, synthetic construct
  source 1..21: mol_type = other DNA
gttgcgtctcatggtgcgggg

SEQ ID NO: 9268 - DNA, 21 bp, synthetic construct
  source 1..21: mol_type = other DNA
gataagcgtcagcctgggtgg

SEQ ID NO: 9269 - DNA, 21 bp, synthetic construct
  source 1..21: mol_type = other DNA
gcgccggttgcgcaggatggg

SEQ ID NO: 9270 - DNA, 21 bp, synthetic construct
  source 1..21: mol_type = other DNA
aagcatgatgagggtaatggt

SEQ ID NO: 9271 - DNA, 21 bp, synthetic construct
  source 1..21: mol_type = other DNA
cagtatcgtgcgagtgctgct

SEQ ID NO: 9272 - DNA, 21 bp, synthetic construct
  source 1..21: mol_type = other DNA
tggtcttctaaggctgaggag

SEQ ID NO: 9273 - DNA, 21 bp, synthetic construct
  source 1..21: mol_type = other DNA
tatgatgtgggtacgtggtcg

SEQ ID NO: 9274 - DNA, 21 bp, synthetic construct
  source 1..21: mol_type = other DNA
attggggctttgggttgggat

SEQ ID NO: 9275 - DNA, 21 bp, synthetic construct
  source 1..21: mol_type = other DNA
tgtaataagcctatgactgct

SEQ ID NO: 9276 - DNA, 21 bp, synthetic construct
  source 1..21: mol_type = other DNA
gcgggttcgttttcgcggagt

SEQ ID NO: 9277 - DNA, 21 bp, synthetic construct
  source 1..21: mol_type = other DNA
ctgcatgcgcgtggggttgat

SEQ ID NO: 9278 - DNA, 21 bp, synthetic construct
  source 1..21: mol_type = other DNA
attatgtcggggcatgattgg

SEQ ID NO: 9279 - DNA, 21 bp, synthetic construct
  source 1..21: mol_type = other DNA
ggggcgagtagtaggaattgg

SEQ ID NO: 9280 - DNA, 21 bp, synthetic construct
  source 1..21: mol_type = other DNA
tatttttctgctcggttggat

SEQ ID NO: 9281 - DNA, 21 bp, synthetic construct
  source 1..21: mol_type = other DNA
tctgctcctgggactcattgt

SEQ ID NO: 9282 - DNA, 21 bp, synthetic construct
  source 1..21: mol_type = other DNA
aagagttcggttaatcatgat

SEQ ID NO: 9283 - DNA, 21 bp, synthetic construct
  source 1..21: mol_type = other DNA
aggacggctgatagttttatt

SEQ ID NO: 9284 - DNA, 21 bp, synthetic construct
  source 1..21: mol_type = other DNA
ctgccggagaggcttggtagt

SEQ ID NO: 9285 - DNA, 21 bp, synthetic construct
  source 1..21: mol_type = other DNA
gtgaattcgtctaatggtcgt

SEQ ID NO: 9286 - DNA, 21 bp, synthetic construct
  source 1..21: mol_type = other DNA
tatccgaattgtcctggggtt

SEQ ID NO: 9287 - DNA, 21 bp, synthetic construct
  source 1..21: mol_type = other DNA
atttcgcttaagtgttcggag

SEQ ID NO: 9288 - DNA, 21 bp, synthetic construct
  source 1..21: mol_type = other DNA
gttctggattctgtgaggtgg

SEQ ID NO: 9289 - DNA, 21 bp, synthetic construct
  source 1..21: mol_type = other DNA
tcggcgagtactaatggggtg

SEQ ID NO: 9290 - DNA, 21 bp, synthetic construct
  source 1..21: mol_type = other DNA
gttttgagttcgaagacttgg

SEQ ID NO: 9291 - DNA, 21 bp, synthetic construct
  source 1..21: mol_type = other DNA
aatcgggagttgggtagttct

SEQ ID NO: 9292 - DNA, 21 bp, synthetic construct
  source 1..21: mol_type = other DNA
gatagtcttccggtggataag

SEQ ID NO: 9293 - DNA, 21 bp, synthetic construct
  source 1..21: mol_type = other DNA
tcttatggtaataggactact

SEQ ID NO: 9294 - DNA, 21 bp, synthetic construct
  source 1..21: mol_type = other DNA
tttacgaagagtgggccgaat

SEQ ID NO: 9295 - DNA, 21 bp, synthetic construct
  source 1..21: mol_type = other DNA
tattctaagctggatagtatg

SEQ ID NO: 9296 - DNA, 21 bp, synthetic construct
  source 1..21: mol_type = other DNA
aggactgaggggacttttccg

SEQ ID NO: 9297 - DNA, 21 bp, synthetic construct
  source 1..21: mol_type = other DNA
ggggagcgtgtggatcggcgt

SEQ ID NO: 9298 - DNA, 21 bp, synthetic construct
  source 1..21: mol_type = other DNA
gttaatagtaggtggcatgcg

SEQ ID NO: 9299 - DNA, 21 bp, synthetic construct
  source 1..21: mol_type = other DNA
ggtagtattggtgcgctttgg

SEQ ID NO: 9300 - DNA, 21 bp, synthetic construct
  source 1..21: mol_type = other DNA
tgtaaggctcagtcgtgtggg

SEQ ID NO: 9301 - DNA, 21 bp, synthetic construct
  source 1..21: mol_type = other DNA
tattggagtggtaatgctgct

SEQ ID NO: 9302 - DNA, 21 bp, synthetic construct
  source 1..21: mol_type = other DNA
ttgatgaatgatgcgtatgtg

SEQ ID NO: 9303 - DNA, 21 bp, synthetic construct
  source 1..21: mol_type = other DNA
tatgttcgtcatgatgtgatg

SEQ ID NO: 9304 - DNA, 21 bp, synthetic construct
  source 1..21: mol_type = other DNA
tattttagtggtactaatatg

SEQ ID NO: 9305 - DNA, 21 bp, synthetic construct
  source 1..21: mol_type = other DNA
gagccgggggagcggtcgggt

SEQ ID NO: 9306 - DNA, 21 bp, synthetic construct
  source 1..21: mol_type = other DNA
gcgatgtcggcgtcgaattgg

SEQ ID NO: 9307 - DNA, 21 bp, synthetic construct
  source 1..21: mol_type = other DNA
gtttgggatgcgaatggggtt

SEQ ID NO: 9308 - DNA, 21 bp, synthetic construct
  source 1..21: mol_type = other DNA
tgtgggggtctgtgttcgtcg

SEQ ID NO: 9309 - DNA, 21 bp, synthetic construct
  source 1..21: mol_type = other DNA
tggtttagtggtcatgtggag

SEQ ID NO: 9310 - DNA, 21 bp, synthetic construct
  source 1..21: mol_type = other DNA
aagtttgattatagtagtatt

SEQ ID NO: 9311 - DNA, 21 bp, synthetic construct
  source 1..21: mol_type = other DNA
gtttatgctaagtcgcaggtg

SEQ ID NO: 9312 - DNA, 21 bp, synthetic construct
  source 1..21: mol_type = other DNA
ctgttgtcgagtgcgacttgg

SEQ ID NO: 9313 - DNA, 21 bp, synthetic construct
  source 1..21: mol_type = other DNA
gcgagggttgaggcgtttcct

SEQ ID NO: 9314 - DNA, 21 bp, synthetic construct
  source 1..21: mol_type = other DNA
gtggaggtggcgcgggtgagg

SEQ ID NO: 9315 - DNA, 21 bp, synthetic construct
  source 1..21: mol_type = other DNA
gttgggactggtccttgtggg

SEQ ID NO: 9316 - DNA, 21 bp, synthetic construct
  source 1..21: mol_type = other DNA
tattattctggtacttatgtt

SEQ ID NO: 9317 - DNA, 21 bp, synthetic construct
  source 1..21: mol_type = other DNA
aatgagcgtgggtgttgtggg

SEQ ID NO: 9318 - DNA, 21 bp, synthetic construct
  source 1..21: mol_type = other DNA
tattttatgggggagcgtgag

SEQ ID NO: 9319 - DNA, 21 bp, synthetic construct
  source 1..21: mol_type = other DNA
aattcgccggcttgtaaggcg

SEQ ID NO: 9320 - DNA, 21 bp, synthetic construct
  source 1..21: mol_type = other DNA
ttttttacgggggtgttgaat

SEQ ID NO: 9321 - DNA, 21 bp, synthetic construct
  source 1..21: mol_type = other DNA
gggggtaatgggagttcttgg

SEQ ID NO: 9322 - DNA, 21 bp, synthetic construct
  source 1..21: mol_type = other DNA
tcggcttatcgtcagggtacg

SEQ ID NO: 9323 - DNA, 21 bp, synthetic construct
  source 1..21: mol_type = other DNA
gcggggcttgattctcgtccg

SEQ ID NO: 9324 - DNA, 21 bp, synthetic construct
  source 1..21: mol_type = other DNA
agtgatctgaggtgttgtgcg

SEQ ID NO: 9325 - DNA, 21 bp, synthetic construct
  source 1..21: mol_type = other DNA
gttgttaagcagacggctacg

SEQ ID NO: 9326 - DNA, 21 bp, synthetic construct
  source 1..21: mol_type = other DNA
gcttgtacgacggctcttatt

SEQ ID NO: 9327 - DNA, 21 bp, synthetic construct
  source 1..21: mol_type = other DNA
ttgaagtatagtgagactagg

SEQ ID NO: 9328 - DNA, 21 bp, synthetic construct
  source 1..21: mol_type = other DNA
ttgactagggtgggtttgaat

SEQ ID NO: 9329 - DNA, 21 bp, synthetic construct
  source 1..21: mol_type = other DNA
ggtgggattgcttcgacgtgg

SEQ ID NO: 9330 - DNA, 21 bp, synthetic construct
  source 1..21: mol_type = other DNA
gggtggagttcggctggtaag

SEQ ID NO: 9331 - DNA, 21 bp, synthetic construct
  source 1..21: mol_type = other DNA
attgatgatggttcttgggcg

SEQ ID NO: 9332 - DNA, 21 bp, synthetic construct
  source 1..21: mol_type = other DNA
tgttgtaagcttgagacgcct

SEQ ID NO: 9333 - DNA, 21 bp, synthetic construct
  source 1..21: mol_type = other DNA
gtggtttatgatgcgtttgtg

SEQ ID NO: 9334 - DNA, 21 bp, synthetic construct
  source 1..21: mol_type = other DNA
tgtggggcttgttctccgaat

SEQ ID NO: 9335 - DNA, 21 bp, synthetic construct
  source 1..21: mol_type = other DNA
gggagtgcgacgagtacgtgg

SEQ ID NO: 9336 - DNA, 21 bp, synthetic construct
  source 1..21: mol_type = other DNA
tgtcggggtccttgtacgggg

SEQ ID NO: 9337 - DNA, 21 bp, synthetic construct
  source 1..21: mol_type = other DNA
gagattccgccgattcgtcgg

SEQ ID NO: 9338 - DNA, 21 bp, synthetic construct
  source 1..21: mol_type = other DNA
tgtaaggcgaatcgggttgag

SEQ ID NO: 9339 - DNA, 21 bp, synthetic construct
  source 1..21: mol_type = other DNA
attgggacgtctcgggagtgg

SEQ ID NO: 9340 - DNA, 21 bp, synthetic construct
  source 1..21: mol_type = other DNA
tgtaatctttctccgacttct

SEQ ID NO: 9341 - DNA, 21 bp, synthetic construct
  source 1..21: mol_type = other DNA
gggcggtctactgataatacg

SEQ ID NO: 9342 - DNA, 21 bp, synthetic construct
  source 1..21: mol_type = other DNA
tctgagttttatgctgctgtg

SEQ ID NO: 9343 - DNA, 21 bp, synthetic construct
  source 1..21: mol_type = other DNA
cctgggggtactagtggttgg

SEQ ID NO: 9344 - DNA, 21 bp, synthetic construct
  source 1..21: mol_type = other DNA
tgttgtgcgggtcgtactgcg

SEQ ID NO: 9345 - DNA, 21 bp, synthetic construct
  source 1..21: mol_type = other DNA
gtggattcgactcatggtgtg

SEQ ID NO: 9346 - DNA, 21 bp, synthetic construct
  source 1..21: mol_type = other DNA
actgtgggggggtgttgtctt

SEQ ID NO: 9347 - DNA, 21 bp, synthetic construct
  source 1..21: mol_type = other DNA
ggttctgaggggtcgctttgg

SEQ ID NO: 9348 - DNA, 21 bp, synthetic construct
  source 1..21: mol_type = other DNA
aagtatctgcatgctgatttt

SEQ ID NO: 9349 - DNA, 21 bp, synthetic construct
  source 1..21: mol_type = other DNA
gtgggtggtgctagtacttgg

SEQ ID NO: 9350 - DNA, 21 bp, synthetic construct
  source 1..21: mol_type = other DNA
atggagggttgttgtgctggt

SEQ ID NO: 9351 - DNA, 21 bp, synthetic construct
  source 1..21: mol_type = other DNA
gagcgttcggcggaggcgcat

SEQ ID NO: 9352 - DNA, 21 bp, synthetic construct
  source 1..21: mol_type = other DNA
cgttctcaggattcgtttccg

SEQ ID NO: 9353 - DNA, 21 bp, synthetic construct
  source 1..21: mol_type = other DNA
aggcctaatgagagtgattgg

SEQ ID NO: 9354 - DNA, 21 bp, synthetic construct
  source 1..21: mol_type = other DNA
cgtctggagagtcatggttgg

SEQ ID NO: 9355 - DNA, 21 bp, synthetic construct
  source 1..21: mol_type = other DNA
atggttcagcagtgttgtggg

SEQ ID NO: 9356 - DNA, 21 bp, synthetic construct
  source 1..21: mol_type = other DNA
gctcgggcggatgggtggggg

SEQ ID NO: 9357 - DNA, 21 bp, synthetic construct
  source 1..21: mol_type = other DNA
tgggcgcgtgggagtaatggt

SEQ ID NO: 9358 - DNA, 21 bp, synthetic construct
  source 1..21: mol_type = other DNA
ctggcgcgtttgggtgctaat

SEQ ID NO: 9359 - DNA, 21 bp, synthetic construct
  source 1..21: mol_type = other DNA
catgtgacgacgcattgttct

SEQ ID NO: 9360 - DNA, 21 bp, synthetic construct
  source 1..21: mol_type = other DNA
tggccttttggggagtctgct

SEQ ID NO: 9361 - DNA, 21 bp, synthetic construct
  source 1..21: mol_type = other DNA
gggaggccgcctctgaagccg

SEQ ID NO: 9362 - DNA, 21 bp, synthetic construct
  source 1..21: mol_type = other DNA
tattcgcggcttgatagtgtt

SEQ ID NO: 9363 - DNA, 21 bp, synthetic construct
  source 1..21: mol_type = other DNA
ttgactgggcaggctgagttg

SEQ ID NO: 9364 - DNA, 21 bp, synthetic construct
  source 1..21: mol_type = other DNA
caggggctgggttgttgtgtg

SEQ ID NO: 9365 - DNA, 21 bp, synthetic construct
  source 1..21: mol_type = other DNA
tattcgcgtgtttcggagctg

SEQ ID NO: 9366 - DNA, 21 bp, synthetic construct
  source 1..21: mol_type = other DNA
gagtgtgggggttgtcggcct

SEQ ID NO: 9367 - DNA, 21 bp, synthetic construct
  source 1..21: mol_type = other DNA
tatgttcggtcggatgggact

SEQ ID NO: 9368 - DNA, 21 bp, synthetic construct
  source 1..21: mol_type = other DNA
tgtgatgctgagatgcgtgag

SEQ ID NO: 9369 - DNA, 21 bp, synthetic construct
  source 1..21: mol_type = other DNA
catcggaaggttgcgtatgat

SEQ ID NO: 9370 - DNA, 21 bp, synthetic construct
  source 1..21: mol_type = other DNA
ggtactagtgcgtataggggt

SEQ ID NO: 9371 - DNA, 21 bp, synthetic construct
  source 1..21: mol_type = other DNA
ttgtggattgagaagccgacg

SEQ ID NO: 9372 - DNA, 21 bp, synthetic construct
  source 1..21: mol_type = other DNA
agtaggtataaggaggttctg

SEQ ID NO: 9373 - DNA, 21 bp, synthetic construct
  source 1..21: mol_type = other DNA
tattcgaggcttggtgtgcag

SEQ ID NO: 9374 - DNA, 21 bp, synthetic construct
  source 1..21: mol_type = other DNA
tattttactggttctacggat

SEQ ID NO: 9375 - DNA, 21 bp, synthetic construct
  source 1..21: mol_type = other DNA
aatttgagtgatgtgcgttgg

SEQ ID NO: 9376 - DNA, 21 bp, synthetic construct
  source 1..21: mol_type = other DNA
aaggggaattcggggaatctt

SEQ ID NO: 9377 - DNA, 21 bp, synthetic construct
  source 1..21: mol_type = other DNA
tgggaggggatgaagcgtaat

SEQ ID NO: 9378 - DNA, 21 bp, synthetic construct
  source 1..21: mol_type = other DNA
ggtgtgggttcgtatattgtt

SEQ ID NO: 9379 - DNA, 21 bp, synthetic construct
  source 1..21: mol_type = other DNA
cctctgtctgcgtcgtcgtgg

SEQ ID NO: 9380 - DNA, 21 bp, synthetic construct
  source 1..21: mol_type = other DNA
tgtgagggtgtgagtcgggag

SEQ ID NO: 9381 - DNA, 21 bp, synthetic construct
  source 1..21: mol_type = other DNA
tttccggatgggaagaggttt

SEQ ID NO: 9382 - DNA, 21 bp, synthetic construct
  source 1..21: mol_type = other DNA
gggtggcgtgctggtggtgct

SEQ ID NO: 9383 - DNA, 21 bp, synthetic construct
  source 1..21: mol_type = other DNA
ttgtgtgctgatcctagtagg

SEQ ID NO: 9384 - DNA, 21 bp, synthetic construct
  source 1..21: mol_type = other DNA
cgtaattttgggcgtgatggt

SEQ ID NO: 9385 - DNA, 21 bp, synthetic construct
  source 1..21: mol_type = other DNA
atgacgactgtggttactgct

SEQ ID NO: 9386 - DNA, 21 bp, synthetic construct
  source 1..21: mol_type = other DNA
tttcagactgagagtagtgtg

SEQ ID NO: 9387 - DNA, 21 bp, synthetic construct
  source 1..21: mol_type = other DNA
cttttggcgtcggcgacttgg

SEQ ID NO: 9388 - DNA, 21 bp, synthetic construct
  source 1..21: mol_type = other DNA
gatttgcgtactgcgtcttgg

SEQ ID NO: 9389 - DNA, 21 bp, synthetic construct
  source 1..21: mol_type = other DNA
gggaaggggcttgagcatatt

SEQ ID NO: 9390 - DNA, 21 bp, synthetic construct
  source 1..21: mol_type = other DNA
caggcgcagacttcgggttgg

SEQ ID NO: 9391 - DNA, 21 bp, synthetic construct
  source 1..21: mol_type = other DNA
aatggggatgctgggtcttgg

SEQ ID NO: 9392 - DNA, 21 bp, synthetic construct
  source 1..21: mol_type = other DNA
tatgtgaggtctgatagtgct

SEQ ID NO: 9393 - DNA, 21 bp, synthetic construct
  source 1..21: mol_type = other DNA
tgtggtgggggttgtccgtct

SEQ ID NO: 9394 - DNA, 21 bp, synthetic construct
  source 1..21: mol_type = other DNA
tggcgtacggggttgggtggg

SEQ ID NO: 9395 - DNA, 21 bp, synthetic construct
  source 1..21: mol_type = other DNA
gcgtcgacttggaatgatcct

SEQ ID NO: 9396 - DNA, 21 bp, synthetic construct
  source 1..21: mol_type = other DNA
gagaagctttgttgtcatggg

SEQ ID NO: 9397 - DNA, 21 bp, synthetic construct
  source 1..21: mol_type = other DNA
tgtcagcttaattgtagtgtg

SEQ ID NO: 9398 - DNA, 21 bp, synthetic construct
  source 1..21: mol_type = other DNA
acttctggtccgcctcatcgt

SEQ ID NO: 9399 - DNA, 21 bp, synthetic construct
  source 1..21: mol_type = other DNA
tcttttgatgggacgcctagt

SEQ ID NO: 9400 - DNA, 21 bp, synthetic construct
  source 1..21: mol_type = other DNA
gctggtgcggcgaagacttgg

SEQ ID NO: 9401 - DNA, 21 bp, synthetic construct
  source 1..21: mol_type = other DNA
gatcgggttgttagtactgtg

SEQ ID NO: 9402 - DNA, 21 bp, synthetic construct
  source 1..21: mol_type = other DNA
cgtgggggggattctgcttgg

SEQ ID NO: 9403 - DNA, 21 bp, synthetic construct
  source 1..21: mol_type = other DNA
ggttggggtgattggaaggat

SEQ ID NO: 9404 - DNA, 21 bp, synthetic construct
  source 1..21: mol_type = other DNA
cttgctaagacgggtcttaat

SEQ ID NO: 9405 - DNA, 21 bp, synthetic construct
  source 1..21: mol_type = other DNA
acgtattcgggtgatctgcct

SEQ ID NO: 9406 - DNA, 21 bp, synthetic construct
  source 1..21: mol_type = other DNA
gtggagtatgattggcaggat

SEQ ID NO: 9407 - DNA, 21 bp, synthetic construct
  source 1..21: mol_type = other DNA
aagtgtacgtatgagcagaat

SEQ ID NO: 9408 - DNA, 21 bp, synthetic construct
  source 1..21: mol_type = other DNA
ccggggggttcgggtacgtgg

SEQ ID NO: 9409 - DNA, 21 bp, synthetic construct
  source 1..21: mol_type = other DNA
cttgcgcatggtccgtataat

SEQ ID NO: 9410 - DNA, 21 bp, synthetic construct
  source 1..21: mol_type = other DNA
tatgctaagcctggttttaat

SEQ ID NO: 9411 - DNA, 21 bp, synthetic construct
  source 1..21: mol_type = other DNA
cgggatccttcttcgtcttgg

SEQ ID NO: 9412 - DNA, 21 bp, synthetic construct
  source 1..21: mol_type = other DNA
agtgggccggagcggtcgtgg

SEQ ID NO: 9413 - DNA, 21 bp, synthetic construct
  source 1..21: mol_type = other DNA
cggagtattgatgcttatccg

SEQ ID NO: 9414 - DNA, 21 bp, synthetic construct
  source 1..21: mol_type = other DNA
ttgtggcggggttctgatctg

SEQ ID NO: 9415 - DNA, 21 bp, synthetic construct
  source 1..21: mol_type = other DNA
ggttcgtggtgtactgttccg

SEQ ID NO: 9416 - DNA, 21 bp, synthetic construct
  source 1..21: mol_type = other DNA
gaggtggtgtctcgggctggg

SEQ ID NO: 9417 - DNA, 21 bp, synthetic construct
  source 1..21: mol_type = other DNA
ggggggttgtgttgtccgagt

SEQ ID NO: 9418 - DNA, 21 bp, synthetic construct
  source 1..21: mol_type = other DNA
tatatggttgatgcgtttgtg

SEQ ID NO: 9419 - DNA, 21 bp, synthetic construct
  source 1..21: mol_type = other DNA
tggaatcattcgccggcggct

SEQ ID NO: 9420 - DNA, 21 bp, synthetic construct
  source 1..21: mol_type = other DNA
attgtgtctgattctcgtggg

SEQ ID NO: 9421 - DNA, 21 bp, synthetic construct
  source 1..21: mol_type = other DNA
gcgagtaatacgcgttttcat

SEQ ID NO: 9422 - DNA, 21 bp, synthetic construct
  source 1..21: mol_type = other DNA
gtgtctctggagggtaggaat

SEQ ID NO: 9423 - DNA, 21 bp, synthetic construct
  source 1..21: mol_type = other DNA
gctcatgagtttggtccggtg

SEQ ID NO: 9424 - DNA, 21 bp, synthetic construct
  source 1..21: mol_type = other DNA
cagttggagagggggaattgg

SEQ ID NO: 9425 - DNA, 21 bp, synthetic construct
  source 1..21: mol_type = other DNA
tatgatctttgttctaagagg

SEQ ID NO: 9426 - DNA, 21 bp, synthetic construct
  source 1..21: mol_type = other DNA
gtgcttacgtctcagatttgg

SEQ ID NO: 9427 - DNA, 21 bp, synthetic construct
  source 1..21: mol_type = other DNA
gggggtccgggtgttgggtgg

SEQ ID NO: 9428 - DNA, 21 bp, synthetic construct
  source 1..21: mol_type = other DNA
gtggaggagggttggtcttgg

SEQ ID NO: 9429 - DNA, 21 bp, synthetic construct
  source 1..21: mol_type = other DNA
gtggctggtggtagtgctggg

SEQ ID NO: 9430 - DNA, 21 bp, synthetic construct
  source 1..21: mol_type = other DNA
tgtggggctcttcggatttct

SEQ ID NO: 9431 - DNA, 21 bp, synthetic construct
  source 1..21: mol_type = other DNA
gggttgtatgcggcgactctg

SEQ ID NO: 9432 - DNA, 21 bp, synthetic construct
  source 1..21: mol_type = other DNA
gagggtgctagtgttctttgg

SEQ ID NO: 9433 - DNA, 21 bp, synthetic construct
  source 1..21: mol_type = other DNA
ggtggtgcggagaggcggtat

SEQ ID NO: 9434 - DNA, 21 bp, synthetic construct
  source 1..21: mol_type = other DNA
gggatgtttggtcggcgtgat

SEQ ID NO: 9435 - DNA, 21 bp, synthetic construct
  source 1..21: mol_type = other DNA
gattctgaggggatgcgttat

SEQ ID NO: 9436 - DNA, 21 bp, synthetic construct
  source 1..21: mol_type = other DNA
ggtatggctgatcctacgtgg

SEQ ID NO: 9437 - DNA, 21 bp, synthetic construct
  source 1..21: mol_type = other DNA
ttttataatcagcattcgtgt

SEQ ID NO: 9438 - DNA, 21 bp, synthetic construct
  source 1..21: mol_type = other DNA
tttgttaagtatgatccttct

SEQ ID NO: 9439 - DNA, 21 bp, synthetic construct
  source 1..21: mol_type = other DNA
tatcagcgttatggtacggct

SEQ ID NO: 9440 - DNA, 21 bp, synthetic construct
  source 1..21: mol_type = other DNA
cggggtagtgatacgtatccg

SEQ ID NO: 9441 - DNA, 21 bp, synthetic construct
  source 1..21: mol_type = other DNA
ttgttggattcttatgattgg

SEQ ID NO: 9442 - DNA, 21 bp, synthetic construct
  source 1..21: mol_type = other DNA
cattctagggctgcgagtttt

SEQ ID NO: 9443 - DNA, 21 bp, synthetic construct
  source 1..21: mol_type = other DNA
ggtggtgctggtagtctttgg

SEQ ID NO: 9444 - DNA, 21 bp, synthetic construct
  source 1..21: mol_type = other DNA
acgaatgtgcctagtcttaat

SEQ ID NO: 9445 - DNA, 21 bp, synthetic construct
  source 1..21: mol_type = other DNA
gtggatttgtatgttagttgg

SEQ ID NO: 9446 - DNA, 21 bp, synthetic construct
  source 1..21: mol_type = other DNA
tcgaagggttgttgtgattct

SEQ ID NO: 9447 - DNA, 21 bp, synthetic construct
  source 1..21: mol_type = other DNA
ttttctgatgttgatacgctg

SEQ ID NO: 9448 - DNA, 21 bp, synthetic construct
  source 1..21: mol_type = other DNA
tatcataagttgtctgttgtg

SEQ ID NO: 9449 - DNA, 21 bp, synthetic construct
  source 1..21: mol_type = other DNA
ggtgtttatagtatgaagact

SEQ ID NO: 9450 - DNA, 21 bp, synthetic construct
  source 1..21: mol_type = other DNA
cttatgtctggtgagggtccg

SEQ ID NO: 9451 - DNA, 21 bp, synthetic construct
  source 1..21: mol_type = other DNA
ggggatgctgctggtcgtagg

SEQ ID NO: 9452 - DNA, 21 bp, synthetic construct
  source 1..21: mol_type = other DNA
actgtttatgcgggggagcct

SEQ ID NO: 9453 - DNA, 21 bp, synthetic construct
  source 1..21: mol_type = other DNA
ttgcatcgtcttggggtgtct

SEQ ID NO: 9454 - DNA, 21 bp, synthetic construct
  source 1..21: mol_type = other DNA
tgtggtacgaagtgttcgttg

SEQ ID NO: 9455 - DNA, 21 bp, synthetic construct
  source 1..21: mol_type = other DNA
tggcttgctgataaggggtct

SEQ ID NO: 9456 - DNA, 21 bp, synthetic construct
  source 1..21: mol_type = other DNA
ggtggtgctcattctaatttt

SEQ ID NO: 9457 - DNA, 21 bp, synthetic construct
  source 1..21: mol_type = other DNA
aagtttgagatgaatgctttg

SEQ ID NO: 9458 - DNA, 21 bp, synthetic construct
  source 1..21: mol_type = other DNA
gctgatcagcgtatgcgtgtg

SEQ ID NO: 9459 - DNA, 21 bp, synthetic construct
  source 1..21: mol_type = other DNA
tggtgggcgggtgttgtgagt

SEQ ID NO: 9460 - DNA, 21 bp, synthetic construct
  source 1..21: mol_type = other DNA
aagtttgttgcggtgtcggat

SEQ ID NO: 9461 - DNA, 21 bp, synthetic construct
  source 1..21: mol_type = other DNA
atttatgctgatcggacttgg

SEQ ID NO: 9462 - DNA, 21 bp, synthetic construct
  source 1..21: mol_type = other DNA
cagggggaggcgaggagttgg

SEQ ID NO: 9463 - DNA, 21 bp, synthetic construct
  source 1..21: mol_type = other DNA
tgtggttttgcgtgtccttcg

SEQ ID NO: 9464 - DNA, 21 bp, synthetic construct
  source 1..21: mol_type = other DNA
tattattctggtgtgactcat

SEQ ID NO: 9465 - DNA, 21 bp, synthetic construct
  source 1..21: mol_type = other DNA
tatccttcggggtctattggg

SEQ ID NO: 9466 - DNA, 21 bp, synthetic construct
  source 1..21: mol_type = other DNA
gtgttgtctcagtcgttgtgg

SEQ ID NO: 9467 - DNA, 21 bp, synthetic construct
  source 1..21: mol_type = other DNA
cagggtgggagtggggcgtgg

SEQ ID NO: 9468 - DNA, 21 bp, synthetic construct
  source 1..21: mol_type = other DNA
tttttggcttctcgtgattgg

SEQ ID NO: 9469 - DNA, 21 bp, synthetic construct
  source 1..21: mol_type = other DNA
cttatgagtccgtgttgtggt

SEQ ID NO: 9470 - DNA, 21 bp, synthetic construct
  source 1..21: mol_type = other DNA
tgtagtggggcttgtgctgct

SEQ ID NO: 9471 - DNA, 21 bp, synthetic construct
  source 1..21: mol_type = other DNA
gcttcggagtcgctgcggcgg

SEQ ID NO: 9472 - DNA, 21 bp, synthetic construct
  source 1..21: mol_type = other DNA
gtgcaggatggtttgcgttgg

SEQ ID NO: 9473 - DNA, 21 bp, synthetic construct
  source 1..21: mol_type = other DNA
gtttggaagcctgagccgggt

SEQ ID NO: 9474 - DNA, 21 bp, synthetic construct
  source 1..21: mol_type = other DNA
acgactgattatactatgttt

SEQ ID NO: 9475 - DNA, 21 bp, synthetic construct
  source 1..21: mol_type = other DNA
tgtaatgattcgactaagagt

SEQ ID NO: 9476 - DNA, 21 bp, synthetic construct
  source 1..21: mol_type = other DNA
tgggcggagctgcgtagggct

SEQ ID NO: 9477 - DNA, 21 bp, synthetic construct
  source 1..21: mol_type = other DNA
tgttgttcgggggtggggatt

SEQ ID NO: 9478 - DNA, 21 bp, synthetic construct
  source 1..21: mol_type = other DNA
atggtttttgaggatagggtg

SEQ ID NO: 9479 - DNA, 21 bp, synthetic construct
  source 1..21: mol_type = other DNA
tattctaggcttagtaatgtt

SEQ ID NO: 9480 - DNA, 21 bp, synthetic construct
  source 1..21: mol_type = other DNA
tctctggtgaaggatgctccg

SEQ ID NO: 9481 - DNA, 21 bp, synthetic construct
  source 1..21: mol_type = other DNA
gagaggggggcgggtgaggtt

SEQ ID NO: 9482 - DNA, 21 bp, synthetic construct
  source 1..21: mol_type = other DNA
ggtcctgagaggatgtcggtt

SEQ ID NO: 9483 - DNA, 21 bp, synthetic construct
  source 1..21: mol_type = other DNA
aggggggagtcgagtatttgg

SEQ ID NO: 9484 - DNA, 21 bp, synthetic construct
  source 1..21: mol_type = other DNA
tgtaggtcgggggcggcgttg

SEQ ID NO: 9485 - DNA, 21 bp, synthetic construct
  source 1..21: mol_type = other DNA
ccgactgctgattctattggt

SEQ ID NO: 9486 - DNA, 21 bp, synthetic construct
  source 1..21: mol_type = other DNA
ttgagtcgtctgttgccggat

SEQ ID NO: 9487 - DNA, 21 bp, synthetic construct
  source 1..21: mol_type = other DNA
tgtgggccgtctagtgcggct

SEQ ID NO: 9488 - DNA, 21 bp, synthetic construct
  source 1..21: mol_type = other DNA
gtggttggtgcggagtctacg

SEQ ID NO: 9489 - DNA, 21 bp, synthetic construct
  source 1..21: mol_type = other DNA
tgtaagttgccgtgtgggttg

SEQ ID NO: 9490 - DNA, 21 bp, synthetic construct
  source 1..21: mol_type = other DNA
cttttgtgtaaggctcagggt

SEQ ID NO: 9491 - DNA, 21 bp, synthetic construct
  source 1..21: mol_type = other DNA
acttggtctggtgataatcct

SEQ ID NO: 9492 - DNA, 21 bp, synthetic construct
  source 1..21: mol_type = other DNA
ggtggtggttctcagtcgtgg

SEQ ID NO: 9493 - DNA, 21 bp, synthetic construct
  source 1..21: mol_type = other DNA
ttggggggtgcggcttataag

SEQ ID NO: 9494 - DNA, 21 bp, synthetic construct
  source 1..21: mol_type = other DNA
tatgattcttctaatggtatt

SEQ ID NO: 9495 - DNA, 21 bp, synthetic construct
  source 1..21: mol_type = other DNA
tttcatgtgagggggcctgat

SEQ ID NO: 9496 - DNA, 21 bp, synthetic construct
  source 1..21: mol_type = other DNA
ggggtgccgtatacgatgccg

SEQ ID NO: 9497 - DNA, 21 bp, synthetic construct
  source 1..21: mol_type = other DNA
gggaagtcggcgcttaatggt

SEQ ID NO: 9498 - DNA, 21 bp, synthetic construct
  source 1..21: mol_type = other DNA
caggatggtagttcgacttgg

SEQ ID NO: 9499 - DNA, 21 bp, synthetic construct
  source 1..21: mol_type = other DNA
tgggcggcggggggtgcgagg

SEQ ID NO: 9500 - DNA, 21 bp, synthetic construct
  source 1..21: mol_type = other DNA
aggtgtcctgattgtcatctg

SEQ ID NO: 9501 - DNA, 21 bp, synthetic construct
  source 1..21: mol_type = other DNA
acgcgtagtggggagaatgcg

SEQ ID NO: 9502 - DNA, 21 bp, synthetic construct
  source 1..21: mol_type = other DNA
aggcttgagagtgtggcttgg

SEQ ID NO: 9503 - DNA, 21 bp, synthetic construct
  source 1..21: mol_type = other DNA
tattatacggggcattctctt

SEQ ID NO: 9504 - DNA, 21 bp, synthetic construct
  source 1..21: mol_type = other DNA
tgtcagacggtttgtgcggct

SEQ ID NO: 9505 - DNA, 21 bp, synthetic construct
  source 1..21: mol_type = other DNA
tattggtcggctactactgcg

SEQ ID NO: 9506 - DNA, 21 bp, synthetic construct
  source 1..21: mol_type = other DNA
gagctttcggttgtgattcat

SEQ ID NO: 9507 - DNA, 21 bp, synthetic construct
  source 1..21: mol_type = other DNA
agtgttggttcgagtgagagg

SEQ ID NO: 9508 - DNA, 21 bp, synthetic construct
  source 1..21: mol_type = other DNA
tggttggagggtgagagtgtg

SEQ ID NO: 9509 - DNA, 21 bp, synthetic construct
  source 1..21: mol_type = other DNA
tatgctaggacgtctacgccg

SEQ ID NO: 9510 - DNA, 21 bp, synthetic construct
  source 1..21: mol_type = other DNA
ggggggatgtcgagtacgtgg

SEQ ID NO: 9511 - DNA, 21 bp, synthetic construct
  source 1..21: mol_type = other DNA
ccgaatggggaggctacttgg

SEQ ID NO: 9512 - DNA, 21 bp, synthetic construct
  source 1..21: mol_type = other DNA
tgggattctgataatggtcgt

SEQ ID NO: 9513 - DNA, 21 bp, synthetic construct
  source 1..21: mol_type = other DNA
aggggggttggtccggattcg

SEQ ID NO: 9514 - DNA, 21 bp, synthetic construct
  source 1..21: mol_type = other DNA
tgttatttgacgaagtgtgat

SEQ ID NO: 9515 - DNA, 21 bp, synthetic construct
  source 1..21: mol_type = other DNA
ttgtatgttaggtggtgtggt

SEQ ID NO: 9516 - DNA, 21 bp, synthetic construct
  source 1..21: mol_type = other DNA
gttgcgtcggcgtgttgtggg

SEQ ID NO: 9517 - DNA, 21 bp, synthetic construct
  source 1..21: mol_type = other DNA
acgattgggggtgcgtgtatt

SEQ ID NO: 9518 - DNA, 21 bp, synthetic construct
  source 1..21: mol_type = other DNA
tattatgctggtgttcttagt

SEQ ID NO: 9519 - DNA, 21 bp, synthetic construct
  source 1..21: mol_type = other DNA
ttggagtatggtatgagtggt

SEQ ID NO: 9520 - DNA, 21 bp, synthetic construct
  source 1..21: mol_type = other DNA
acgtatcgtggtaagccggat

SEQ ID NO: 9521 - DNA, 21 bp, synthetic construct
  source 1..21: mol_type = other DNA
gggggtcgtaatgggattgag

SEQ ID NO: 9522 - DNA, 21 bp, synthetic construct
  source 1..21: mol_type = other DNA
cttctgggtgagaatcctgat

SEQ ID NO: 9523 - DNA, 21 bp, synthetic construct
  source 1..21: mol_type = other DNA
ggtggtgattttagttcttat

SEQ ID NO: 9524 - DNA, 21 bp, synthetic construct
  source 1..21: mol_type = other DNA
cgggatgaggggtcgacttgg

SEQ ID NO: 9525 - DNA, 21 bp, synthetic construct
  source 1..21: mol_type = other DNA
tctggggctagtcatttgtgg

SEQ ID NO: 9526 - DNA, 21 bp, synthetic construct
  source 1..21: mol_type = other DNA
ggttctagtacgagtgtttgg

SEQ ID NO: 9527 - DNA, 21 bp, synthetic construct
  source 1..21: mol_type = other DNA
tatgttcaggggaataagtat

SEQ ID NO: 9528 - DNA, 21 bp, synthetic construct
  source 1..21: mol_type = other DNA
gttgatagtacggagggtgtg

SEQ ID NO: 9529 - DNA, 21 bp, synthetic construct
  source 1..21: mol_type = other DNA
agttctgatgcggttcgttgg

SEQ ID NO: 9530 - DNA, 21 bp, synthetic construct
  source 1..21: mol_type = other DNA
actgaggggaagcgttttacg

SEQ ID NO: 9531 - DNA, 21 bp, synthetic construct
  source 1..21: mol_type = other DNA
gtggcttcgatggggattggt

SEQ ID NO: 9532 - DNA, 21 bp, synthetic construct
  source 1..21: mol_type = other DNA
tggtattctgggattcagatg

SEQ ID NO: 9533 - DNA, 21 bp, synthetic construct
  source 1..21: mol_type = other DNA
tgtggtcttggtagtgaggct

SEQ ID NO: 9534 - DNA, 21 bp, synthetic construct
  source 1..21: mol_type = other DNA
tggggtgctcgtgctgagcgg

SEQ ID NO: 9535 - DNA, 21 bp, synthetic construct
  source 1..21: mol_type = other DNA
agttctgagtatttggtttat

SEQ ID NO: 9536 - DNA, 21 bp, synthetic construct
  source 1..21: mol_type = other DNA
agttatcatctgaagatgggt

SEQ ID NO: 9537 - DNA, 21 bp, synthetic construct
  source 1..21: mol_type = other DNA
attggttttgtgtgttctgag

SEQ ID NO: 9538 - DNA, 21 bp, synthetic construct
  source 1..21: mol_type = other DNA
tattcgtctttgaatattaat

SEQ ID NO: 9539 - DNA, 21 bp, synthetic construct
  source 1..21: mol_type = other DNA
tattttgctgggatggtgcag

SEQ ID NO: 9540 - DNA, 21 bp, synthetic construct
  source 1..21: mol_type = other DNA
gtggggtggcggggtaggtcg

SEQ ID NO: 9541 - DNA, 21 bp, synthetic construct
  source 1..21: mol_type = other DNA
tctatgtcggatgttaggtgg

SEQ ID NO: 9542 - DNA, 21 bp, synthetic construct
  source 1..21: mol_type = other DNA
cgtctgagtgatgttgcgtgg

SEQ ID NO: 9543 - DNA, 21 bp, synthetic construct
  source 1..21: mol_type = other DNA
tcgagtgggatgagttcgtgg

SEQ ID NO: 9544 - DNA, 21 bp, synthetic construct
  source 1..21: mol_type = other DNA
acttcggagaatgtttatttt

SEQ ID NO: 9545 - DNA, 21 bp, synthetic construct
  source 1..21: mol_type = other DNA
ggggatgagtatgtggcgttt

SEQ ID NO: 9546 - DNA, 21 bp, synthetic construct
  source 1..21: mol_type = other DNA
tattggtctggtattaaggag

SEQ ID NO: 9547 - DNA, 21 bp, synthetic construct
  source 1..21: mol_type = other DNA
tcggcttttgtgcattgtgtg

SEQ ID NO: 9548 - DNA, 21 bp, synthetic construct
  source 1..21: mol_type = other DNA
ggggagggtcagagttcgtgg

SEQ ID NO: 9549 - DNA, 21 bp, synthetic construct
  source 1..21: mol_type = other DNA
cttgttagtggtgaggatgtg

SEQ ID NO: 9550 - DNA, 21 bp, synthetic construct
  source 1..21: mol_type = other DNA
cgtgcggattcgaagcagtcg

SEQ ID NO: 9551 - DNA, 21 bp, synthetic construct
  source 1..21: mol_type = other DNA
aatgcgttggattggcgggat

SEQ ID NO: 9552 - DNA, 21 bp, synthetic construct
  source 1..21: mol_type = other DNA
ggtctggctagttctgcttgg

SEQ ID NO: 9553 - DNA, 21 bp, synthetic construct
  source 1..21: mol_type = other DNA
agtcttgggaagtatgggcat

SEQ ID NO: 9554 - DNA, 21 bp, synthetic construct
  source 1..21: mol_type = other DNA
actcttgttttgtgtcgggag

SEQ ID NO: 9555 - DNA, 21 bp, synthetic construct
  source 1..21: mol_type = other DNA
agtgatggtgcttgttgtgct

SEQ ID NO: 9556 - DNA, 21 bp, synthetic construct
  source 1..21: mol_type = other DNA
cttgatgatgggaggtttcag

SEQ ID NO: 9557 - DNA, 21 bp, synthetic construct
  source 1..21: mol_type = other DNA
gctggtatggagaataagatg

SEQ ID NO: 9558 - DNA, 21 bp, synthetic construct
  source 1..21: mol_type = other DNA
ggttctgataattcgcgttgg

SEQ ID NO: 9559 - DNA, 21 bp, synthetic construct
  source 1..21: mol_type = other DNA
aggaggctgtcgatgagtctg

SEQ ID NO: 9560 - DNA, 21 bp, synthetic construct
  source 1..21: mol_type = other DNA
aagctggatcatatggggatg

SEQ ID NO: 9561 - DNA, 21 bp, synthetic construct
  source 1..21: mol_type = other DNA
gatatgatgggtaatccggct

SEQ ID NO: 9562 - DNA, 21 bp, synthetic construct
  source 1..21: mol_type = other DNA
ggggattcgagtgttaggaag

SEQ ID NO: 9563 - DNA, 21 bp, synthetic construct
  source 1..21: mol_type = other DNA
gggtatatggagggtgggggt

SEQ ID NO: 9564 - DNA, 21 bp, synthetic construct
  source 1..21: mol_type = other DNA
tggggtcgtcaggctttgggg

SEQ ID NO: 9565 - DNA, 21 bp, synthetic construct
  source 1..21: mol_type = other DNA
gataattcgggtcggctttat

SEQ ID NO: 9566 - DNA, 21 bp, synthetic construct
  source 1..21: mol_type = other DNA
gggtttgctctgcctggtggg

SEQ ID NO: 9567 - DNA, 21 bp, synthetic construct
  source 1..21: mol_type = other DNA
ggttctgggtcggcgttgtgg

SEQ ID NO: 9568 - DNA, 21 bp, synthetic construct
  source 1..21: mol_type = other DNA
tattggctggataatgttggg

SEQ ID NO: 9569 - DNA, 21 bp, synthetic construct
  source 1..21: mol_type = other DNA
tggggtagtcaggggcgtggg

SEQ ID NO: 9570 - DNA, 21 bp, synthetic construct
  source 1..21: mol_type = other DNA
cggcttgatgataggagttgg

SEQ ID NO: 9571 - DNA, 21 bp, synthetic construct
  source 1..21: mol_type = other DNA
tgttgtaaggtggcgatgagt

SEQ ID NO: 9572 - DNA, 21 bp, synthetic construct
  source 1..21: mol_type = other DNA
atgaattgtggtatgcagtgt

SEQ ID NO: 9573 - DNA, 21 bp, synthetic construct
  source 1..21: mol_type = other DNA
gttggtactgataggggttgg

SEQ ID NO: 9574 - DNA, 21 bp, synthetic construct
  source 1..21: mol_type = other DNA
agtactagttctcggtattcg

SEQ ID NO: 9575 - DNA, 21 bp, synthetic construct
  source 1..21: mol_type = other DNA
tcttggggtgcgaagcagagt

SEQ ID NO: 9576 - DNA, 21 bp, synthetic construct
  source 1..21: mol_type = other DNA
gctccgtcgcatattgcgtgg

SEQ ID NO: 9577 - DNA, 21 bp, synthetic construct
  source 1..21: mol_type = other DNA
gatccgatgagtttggggtgg

SEQ ID NO: 9578 - DNA, 21 bp, synthetic construct
  source 1..21: mol_type = other DNA
ttgaatactaggtggcagggg

SEQ ID NO: 9579 - DNA, 21 bp, synthetic construct
  source 1..21: mol_type = other DNA
tgtaagaggggttggtcggag

SEQ ID NO: 9580 - DNA, 21 bp, synthetic construct
  source 1..21: mol_type = other DNA
atgacggtgcgtactagtttg

SEQ ID NO: 9581 - DNA, 21 bp, synthetic construct
  source 1..21: mol_type = other DNA
gatctgcgtgcggttagttgg

SEQ ID NO: 9582 - DNA, 21 bp, synthetic construct
  source 1..21: mol_type = other DNA
ttgttggagagtcgtagttgg

SEQ ID NO: 9583 - DNA, 21 bp, synthetic construct
  source 1..21: mol_type = other DNA
tattattcgggtgtttcggag

SEQ ID NO: 9584 - DNA, 21 bp, synthetic construct
  source 1..21: mol_type = other DNA
tcttatcgttctgctgtgctg

SEQ ID NO: 9585 - DNA, 21 bp, synthetic construct
  source 1..21: mol_type = other DNA
tattatagtggggttcgtgat

SEQ ID NO: 9586 - DNA, 21 bp, synthetic construct
  source 1..21: mol_type = other DNA
atgcgtctgggtgggctgact

SEQ ID NO: 9587 - DNA, 21 bp, synthetic construct
  source 1..21: mol_type = other DNA
attgcgggggctgagagggct

SEQ ID NO: 9588 - DNA, 21 bp, synthetic construct
  source 1..21: mol_type = other DNA
aatcataagaatacgcctccg

SEQ ID NO: 9589 - DNA, 21 bp, synthetic construct
  source 1..21: mol_type = other DNA
tttattgagcagttgccgcag

SEQ ID NO: 9590 - DNA, 21 bp, synthetic construct
  source 1..21: mol_type = other DNA
tcggttgtgagtcagaagtct

SEQ ID NO: 9591 - DNA, 21 bp, synthetic construct
  source 1..21: mol_type = other DNA
tgtagtcttaaggatcgttgt

SEQ ID NO: 9592 - DNA, 21 bp, synthetic construct
  source 1..21: mol_type = other DNA
ttttgtattcggttgtggttg

SEQ ID NO: 9593 - DNA, 21 bp, synthetic construct
  source 1..21: mol_type = other DNA
gctatggtggcgcgtgattgg

SEQ ID NO: 9594 - DNA, 21 bp, synthetic construct
  source 1..21: mol_type = other DNA
attttggcggagcgtactgct

SEQ ID NO: 9595 - DNA, 21 bp, synthetic construct
  source 1..21: mol_type = other DNA
tataatgaggtttctattgcg

SEQ ID NO: 9596 - DNA, 21 bp, synthetic construct
  source 1..21: mol_type = other DNA
ggtattggttgtacgaagctg

SEQ ID NO: 9597 - DNA, 21 bp, synthetic construct
  source 1..21: mol_type = other DNA
gggtcgggtgtgagtaattgg

SEQ ID NO: 9598 - DNA, 21 bp, synthetic construct
  source 1..21: mol_type = other DNA
tcggtgcgtttgcagagtgag

SEQ ID NO: 9599 - DNA, 21 bp, synthetic construct
  source 1..21: mol_type = other DNA
gttatgaagtcggtgagtact

SEQ ID NO: 9600 - DNA, 21 bp, synthetic construct
  source 1..21: mol_type = other DNA
gttcctgggcggggtgctggt

SEQ ID NO: 9601 - DNA, 21 bp, synthetic construct
  source 1..21: mol_type = other DNA
ctgtgggatggtactcgtgcg

SEQ ID NO: 9602 - DNA, 21 bp, synthetic construct
  source 1..21: mol_type = other DNA
ttttctgggtattcgagtagt

SEQ ID NO: 9603 - DNA, 21 bp, synthetic construct
  source 1..21: mol_type = other DNA
gatatggagtctaatcgttgg

SEQ ID NO: 9604 - DNA, 21 bp, synthetic construct
  source 1..21: mol_type = other DNA
ctggatgattggagtcatttt

SEQ ID NO: 9605 - DNA, 21 bp, synthetic construct
  source 1..21: mol_type = other DNA
tatgcgcggggggctcttaat

SEQ ID NO: 9606 - DNA, 21 bp, synthetic construct
  source 1..21: mol_type = other DNA
tatcggagtactagtcatctg

SEQ ID NO: 9607 - DNA, 21 bp, synthetic construct
  source 1..21: mol_type = other DNA
tgtcgtcctgagcatgggccg

SEQ ID NO: 9608 - DNA, 21 bp, synthetic construct
  source 1..21: mol_type = other DNA
atgtataagtcgcgggttgat

SEQ ID NO: 9609 - DNA, 21 bp, synthetic construct
  source 1..21: mol_type = other DNA
ctttcgaatgctcctgtgggt

SEQ ID NO: 9610 - DNA, 21 bp, synthetic construct
  source 1..21: mol_type = other DNA
agtgctcctgagcgtttgctg

SEQ ID NO: 9611 - DNA, 21 bp, synthetic construct
  source 1..21: mol_type = other DNA
gctggtgagggggtgaagtgg

SEQ ID NO: 9612 - DNA, 21 bp, synthetic construct
  source 1..21: mol_type = other DNA
ggtacgctgcctgcttatagg

SEQ ID NO: 9613 - DNA, 21 bp, synthetic construct
  source 1..21: mol_type = other DNA
tggagtcgtgatactgataat

SEQ ID NO: 9614 - DNA, 21 bp, synthetic construct
  source 1..21: mol_type = other DNA
cggggtagtgggtttcatggg

SEQ ID NO: 9615 - DNA, 21 bp, synthetic construct
  source 1..21: mol_type = other DNA
tgtggtactccttgttcggct

SEQ ID NO: 9616 - DNA, 21 bp, synthetic construct
  source 1..21: mol_type = other DNA
attgggtctgcggtgctgagg

SEQ ID NO: 9617 - DNA, 21 bp, synthetic construct
  source 1..21: mol_type = other DNA
aggatggctgattctgtttgg

SEQ ID NO: 9618 - DNA, 21 bp, synthetic construct
  source 1..21: mol_type = other DNA
gatttttttgggcatgatgcg

SEQ ID NO: 9619 - DNA, 21 bp, synthetic construct
  source 1..21: mol_type = other DNA
acgggtgctacggttggttgt

SEQ ID NO: 9620 - DNA, 21 bp, synthetic construct
  source 1..21: mol_type = other DNA
gagaggtatgggttgtgtgct

SEQ ID NO: 9621 - DNA, 21 bp, synthetic construct
  source 1..21: mol_type = other DNA
cgggatgagaggccgggtggt

SEQ ID NO: 9622 - DNA, 21 bp, synthetic construct
  source 1..21: mol_type = other DNA
gctcgttttgatgcgtttcct

SEQ ID NO: 9623 - DNA, 21 bp, synthetic construct
  source 1..21: mol_type = other DNA
tatgatccgaggtcgaataat

SEQ ID NO: 9624 - DNA, 21 bp, synthetic construct
  source 1..21: mol_type = other DNA
gagcttgattctattcagtgg

SEQ ID NO: 9625 - DNA, 21 bp, synthetic construct
  source 1..21: mol_type = other DNA
tatgttcgtgcgccgctgtcg

SEQ ID NO: 9626 - DNA, 21 bp, synthetic construct
  source 1..21: mol_type = other DNA
tattcgcggattggtgatcat

SEQ ID NO: 9627 - DNA, 21 bp, synthetic construct
  source 1..21: mol_type = other DNA
attacttttcgttgtggtaag

SEQ ID NO: 9628 - DNA, 21 bp, synthetic construct
  source 1..21: mol_type = other DNA
gtggagactgtgcggtataag

SEQ ID NO: 9629 - DNA, 21 bp, synthetic construct
  source 1..21: mol_type = other DNA
gatctgatgtcgttgagttgg

SEQ ID NO: 9630 - DNA, 21 bp, synthetic construct
  source 1..21: mol_type = other DNA
gcgagtgattatcagactttt

SEQ ID NO: 9631 - DNA, 21 bp, synthetic construct
  source 1..21: mol_type = other DNA
atgagtgatgggactggtccg

SEQ ID NO: 9632 - DNA, 21 bp, synthetic construct
  source 1..21: mol_type = other DNA
gcgtctgatgagtggagggat

SEQ ID NO: 9633 - DNA, 21 bp, synthetic construct
  source 1..21: mol_type = other DNA
tatttggggggtgatcattgg

SEQ ID NO: 9634 - DNA, 21 bp, synthetic construct
  source 1..21: mol_type = other DNA
ctgccgacggggtgggggccg

SEQ ID NO: 9635 - DNA, 21 bp, synthetic construct
  source 1..21: mol_type = other DNA
ggtccggagactgtgaagtgg

SEQ ID NO: 9636 - DNA, 21 bp, synthetic construct
  source 1..21: mol_type = other DNA
tattctagtgtggttgcggag

SEQ ID NO: 9637 - DNA, 21 bp, synthetic construct
  source 1..21: mol_type = other DNA
tattttgagggggtgaagggt

SEQ ID NO: 9638 - DNA, 21 bp, synthetic construct
  source 1..21: mol_type = other DNA
ggtccgaatttgcatccgagt

SEQ ID NO: 9639 - DNA, 21 bp, synthetic construct
  source 1..21: mol_type = other DNA
cgggaggattatgtttatcct

SEQ ID NO: 9640 - DNA, 21 bp, synthetic construct
  source 1..21: mol_type = other DNA
tgtagtaagcctagtgctgtt

SEQ ID NO: 9641 - DNA, 21 bp, synthetic construct
  source 1..21: mol_type = other DNA
tatggttgtaatggttgtagt

SEQ ID NO: 9642 - DNA, 21 bp, synthetic construct
  source 1..21: mol_type = other DNA
gatatgagttctacgaagtgg

SEQ ID NO: 9643 - DNA, 21 bp, synthetic construct
  source 1..21: mol_type = other DNA
ggtgctgggaatagtctttgg

SEQ ID NO: 9644 - DNA, 21 bp, synthetic construct
  source 1..21: mol_type = other DNA
atgattgcggatggtggtgct

SEQ ID NO: 9645 - DNA, 21 bp, synthetic construct
  source 1..21: mol_type = other DNA
tggtattcggggaggactgag

SEQ ID NO: 9646 - DNA, 21 bp, synthetic construct
  source 1..21: mol_type = other DNA
tgtaagtatggggcggaggct

SEQ ID NO: 9647 - DNA, 21 bp, synthetic construct
  source 1..21: mol_type = other DNA
gttgttccgctttgtgatcct

SEQ ID NO: 9648 - DNA, 21 bp, synthetic construct
  source 1..21: mol_type = other DNA
acgcggagtggtagtaatgcg

SEQ ID NO: 9649 - DNA, 21 bp, synthetic construct
  source 1..21: mol_type = other DNA
cttgcttctgcttgtcttagt

SEQ ID NO: 9650 - DNA, 21 bp, synthetic construct
  source 1..21: mol_type = other DNA
gctggggcgtgtgatgcgtcg

SEQ ID NO: 9651 - DNA, 21 bp, synthetic construct
  source 1..21: mol_type = other DNA
tgtaattctggttgttctgtt

SEQ ID NO: 9652 - DNA, 21 bp, synthetic construct
  source 1..21: mol_type = other DNA
tggagtagggggggtagtgcg

SEQ ID NO: 9653 - DNA, 21 bp, synthetic construct
  source 1..21: mol_type = other DNA
gagattagtaagactcagatt

SEQ ID NO: 9654 - DNA, 21 bp, synthetic construct
  source 1..21: mol_type = other DNA
tttgatcgtaagccgcagatt

SEQ ID NO: 9655 - DNA, 21 bp, synthetic construct
  source 1..21: mol_type = other DNA
tatacgagtgataatgggttg

SEQ ID NO: 9656 - DNA, 21 bp, synthetic construct
  source 1..21: mol_type = other DNA
aatggggcgaatggtgtttgg

SEQ ID NO: 9657 - DNA, 21 bp, synthetic construct
  source 1..21: mol_type = other DNA
ttggaggctgtttctagggct

SEQ ID NO: 9658 - DNA, 21 bp, synthetic construct
  source 1..21: mol_type = other DNA
gagatgctgccgtatcgtggt

SEQ ID NO: 9659 - DNA, 21 bp, synthetic construct
  source 1..21: mol_type = other DNA
agtgcggatacttggcgggat

SEQ ID NO: 9660 - DNA, 21 bp, synthetic construct
  source 1..21: mol_type = other DNA
ttgactgtggcgactgtggag

SEQ ID NO: 9661 - DNA, 21 bp, synthetic construct
  source 1..21: mol_type = other DNA
ctgactgagaagctggctagt

SEQ ID NO: 9662 - DNA, 21 bp, synthetic construct
  source 1..21: mol_type = other DNA
tatttttcgggttcttcggcg

SEQ ID NO: 9663 - DNA, 21 bp, synthetic construct
  source 1..21: mol_type = other DNA
atgtttgggtcgactgcgggt

SEQ ID NO: 9664 - DNA, 21 bp, synthetic construct
  source 1..21: mol_type = other DNA
tatgattatgatgcttatcct

SEQ ID NO: 9665 - DNA, 21 bp, synthetic construct
  source 1..21: mol_type = other DNA
tcgaatcctgctcctcattct

SEQ ID NO: 9666 - DNA, 21 bp, synthetic construct
  source 1..21: mol_type = other DNA
tattttgtgggtgagcgtgag

SEQ ID NO: 9667 - DNA, 21 bp, synthetic construct
  source 1..21: mol_type = other DNA
tgggggaagaatatggggttg

SEQ ID NO: 9668 - DNA, 21 bp, synthetic construct
  source 1..21: mol_type = other DNA
gttgctcatgttcctctttgt

SEQ ID NO: 9669 - DNA, 21 bp, synthetic construct
  source 1..21: mol_type = other DNA
tatgctcggactggtacgtcg

SEQ ID NO: 9670 - DNA, 21 bp, synthetic construct
  source 1..21: mol_type = other DNA
ggtggtggtacttcgtcttgg

SEQ ID NO: 9671 - DNA, 21 bp, synthetic construct
  source 1..21: mol_type = other DNA
ggtaatttggataatggtggt

SEQ ID NO: 9672 - DNA, 21 bp, synthetic construct
  source 1..21: mol_type = other DNA
cggacttatgattcgatgcct

SEQ ID NO: 9673 - DNA, 21 bp, synthetic construct
  source 1..21: mol_type = other DNA
ggtggggagagtacgtcttgg

SEQ ID NO: 9674 - DNA, 21 bp, synthetic construct
  source 1..21: mol_type = other DNA
tatcggcttaggattagtgat

SEQ ID NO: 9675 - DNA, 21 bp, synthetic construct
  source 1..21: mol_type = other DNA
attgctgcgacgtgttgtaat

SEQ ID NO: 9676 - DNA, 21 bp, synthetic construct
  source 1..21: mol_type = other DNA
gggggggagggtctgcggtgg

SEQ ID NO: 9677 - DNA, 21 bp, synthetic construct
  source 1..21: mol_type = other DNA
tgtgctcctgattatcgtgag

SEQ ID NO: 9678 - DNA, 21 bp, synthetic construct
  source 1..21: mol_type = other DNA
attttgtctgatagggtgtgg

SEQ ID NO: 9679 - DNA, 21 bp, synthetic construct
  source 1..21: mol_type = other DNA
gcccaaggtattggtacttgg

SEQ ID NO: 9680 - DNA, 21 bp, synthetic construct
  source 1..21: mol_type = other DNA
gatgagagtgtgcggacgtgg

SEQ ID NO: 9681 - DNA, 21 bp, synthetic construct
  source 1..21: mol_type = other DNA
tggcttaagagtcaggctggg

SEQ ID NO: 9682 - DNA, 21 bp, synthetic construct
  source 1..21: mol_type = other DNA
aagtcgactacttcggagccg

SEQ ID NO: 9683 - DNA, 21 bp, synthetic construct
  source 1..21: mol_type = other DNA
ggggagatgtcggttcggtgg

SEQ ID NO: 9684 - DNA, 21 bp, synthetic construct
  source 1..21: mol_type = other DNA
ttgtctgcgctgagtaataat

SEQ ID NO: 9685 - DNA, 21 bp, synthetic construct
  source 1..21: mol_type = other DNA
gggggggattatattggtacg

SEQ ID NO: 9686 - DNA, 21 bp, synthetic construct
  source 1..21: mol_type = other DNA
gatatggggtctgcggattgg

SEQ ID NO: 9687 - DNA, 21 bp, synthetic construct
  source 1..21: mol_type = other DNA
tggctggcgggtccgtcggct

SEQ ID NO: 9688 - DNA, 21 bp, synthetic construct
  source 1..21: mol_type = other DNA
gtggcggatcatgttcggtgg

SEQ ID NO: 9689 - DNA, 21 bp, synthetic construct
  source 1..21: mol_type = other DNA
cgtgaggggacggtttattgg

SEQ ID NO: 9690 - DNA, 21 bp, synthetic construct
  source 1..21: mol_type = other DNA
tcgttgtcttctcaggagtgg

SEQ ID NO: 9691 - DNA, 21 bp, synthetic construct
  source 1..21: mol_type = other DNA
gatcaggggtatagtacgtgg

SEQ ID NO: 9692 - DNA, 21 bp, synthetic construct
  source 1..21: mol_type = other DNA
ttggcgaggcttgggtatgat

SEQ ID NO: 9693 - DNA, 21 bp, synthetic construct
  source 1..21: mol_type = other DNA
actgcgacggggtgttgtcct

SEQ ID NO: 9694 - DNA, 21 bp, synthetic construct
  source 1..21: mol_type = other DNA
acttattctgttgatcttggg

SEQ ID NO: 9695 - DNA, 21 bp, synthetic construct
  source 1..21: mol_type = other DNA
ttgggggcttattctctgcat

SEQ ID NO: 9696 - DNA, 21 bp, synthetic construct
  source 1..21: mol_type = other DNA
tgtaagatgggtcgggatgag

SEQ ID NO: 9697 - DNA, 21 bp, synthetic construct
  source 1..21: mol_type = other DNA
ttgcggggtgatgattgtgcg

SEQ ID NO: 9698 - DNA, 21 bp, synthetic construct
  source 1..21: mol_type = other DNA
ttgccgagtggtgattcgccg

SEQ ID NO: 9699 - DNA, 21 bp, synthetic construct
  source 1..21: mol_type = other DNA
tgtgggaaggatttgcttcat

SEQ ID NO: 9700 - DNA, 21 bp, synthetic construct
  source 1..21: mol_type = other DNA
gagatgggtggtcgtgagtgg

SEQ ID NO: 9701 - DNA, 21 bp, synthetic construct
  source 1..21: mol_type = other DNA
tatgtgaagtttgagtctggt

SEQ ID NO: 9702 - DNA, 21 bp, synthetic construct
  source 1..21: mol_type = other DNA
gggactgggggggatactggg

SEQ ID NO: 9703 - DNA, 21 bp, synthetic construct
  source 1..21: mol_type = other DNA
gttactggtgcgtgttgttct

SEQ ID NO: 9704 - DNA, 21 bp, synthetic construct
  source 1..21: mol_type = other DNA
gattatgcgtcgattaagtgg

SEQ ID NO: 9705 - DNA, 21 bp, synthetic construct
  source 1..21: mol_type = other DNA
ggggatgagtcgtcggtttgg

SEQ ID NO: 9706 - DNA, 21 bp, synthetic construct
  source 1..21: mol_type = other DNA
cagtcgtctgtttttaatgat

SEQ ID NO: 9707 - DNA, 21 bp, synthetic construct
  source 1..21: mol_type = other DNA
ggtgataaggagactgcggcg

SEQ ID NO: 9708 - DNA, 21 bp, synthetic construct
  source 1..21: mol_type = other DNA
agtgcttattctcctttgagt

SEQ ID NO: 9709 - DNA, 21 bp, synthetic construct
  source 1..21: mol_type = other DNA
aatcctttggcgtctaattgg

SEQ ID NO: 9710 - DNA, 21 bp, synthetic construct
  source 1..21: mol_type = other DNA
cgtgaggatgtttcgttgtgg

SEQ ID NO: 9711 - DNA, 21 bp, synthetic construct
  source 1..21: mol_type = other DNA
tattttacgggtcatcttgag

SEQ ID NO: 9712 - DNA, 21 bp, synthetic construct
  source 1..21: mol_type = other DNA
gggctgaatgttgttgcgtgg

SEQ ID NO: 9713 - DNA, 21 bp, synthetic construct
  source 1..21: mol_type = other DNA
atgatgacgtctagtcagtgg

SEQ ID NO: 9714 - DNA, 21 bp, synthetic construct
  source 1..21: mol_type = other DNA
cctgatttttctactaggtat

SEQ ID NO: 9715 - DNA, 21 bp, synthetic construct
  source 1..21: mol_type = other DNA
tgtattgtgactgctaattgt

SEQ ID NO: 9716 - DNA, 21 bp, synthetic construct
  source 1..21: mol_type = other DNA
gtgaatgatggggtgaagtgg

SEQ ID NO: 9717 - DNA, 21 bp, synthetic construct
  source 1..21: mol_type = other DNA
ctttgtaagagttgtggttct

SEQ ID NO: 9718 - DNA, 21 bp, synthetic construct
  source 1..21: mol_type = other DNA
acggtgtggggggatgcggct

SEQ ID NO: 9719 - DNA, 21 bp, synthetic construct
  source 1..21: mol_type = other DNA
gatcttgagtcttcttattgg

SEQ ID NO: 9720 - DNA, 21 bp, synthetic construct
  source 1..21: mol_type = other DNA
gttgattctactaatgggttg

SEQ ID NO: 9721 - DNA, 21 bp, synthetic construct
  source 1..21: mol_type = other DNA
aggttggagtcggcggtgtgg

SEQ ID NO: 9722 - DNA, 21 bp, synthetic construct
  source 1..21: mol_type = other DNA
cctatgagtgcggtgggttgg

SEQ ID NO: 9723 - DNA, 21 bp, synthetic construct
  source 1..21: mol_type = other DNA
agggatccgtctgtttttccg

SEQ ID NO: 9724 - DNA, 21 bp, synthetic construct
  source 1..21: mol_type = other DNA
acgaatgctcagattctgact

SEQ ID NO: 9725 - DNA, 21 bp, synthetic construct
  source 1..21: mol_type = other DNA
ttttctgtgcgtggtaatctg

SEQ ID NO: 9726 - DNA, 21 bp, synthetic construct
  source 1..21: mol_type = other DNA
tgtttggcgatgtctaagccg

SEQ ID NO: 9727 - DNA, 21 bp, synthetic construct
  source 1..21: mol_type = other DNA
acgcgggagggtgatgctcct

SEQ ID NO: 9728 - DNA, 21 bp, synthetic construct
  source 1..21: mol_type = other DNA
gtgttgtctcatactgatttg

SEQ ID NO: 9729 - DNA, 21 bp, synthetic construct
  source 1..21: mol_type = other DNA
tatacgcggttggattcgtcg

SEQ ID NO: 9730 - DNA, 21 bp, synthetic construct
  source 1..21: mol_type = other DNA
caggatgagtggacttatgtt

SEQ ID NO: 9731 - DNA, 21 bp, synthetic construct
  source 1..21: mol_type = other DNA
gttattggtatggggcgggat

SEQ ID NO: 9732 - DNA, 21 bp, synthetic construct
  source 1..21: mol_type = other DNA
ggtgatgagtatatttcgtat

SEQ ID NO: 9733 - DNA, 21 bp, synthetic construct
  source 1..21: mol_type = other DNA
agtaattcgtctttgaattgt

SEQ ID NO: 9734 - DNA, 21 bp, synthetic construct
  source 1..21: mol_type = other DNA
acgtctcttgagtttggggct

SEQ ID NO: 9735 - DNA, 21 bp, synthetic construct
  source 1..21: mol_type = other DNA
ggtgtgacggaggtttcttgg

SEQ ID NO: 9736 - DNA, 21 bp, synthetic construct
  source 1..21: mol_type = other DNA
agttttgatgcggataggtgg

SEQ ID NO: 9737 - DNA, 21 bp, synthetic construct
  source 1..21: mol_type = other DNA
ttttttagtggggctgtggag

SEQ ID NO: 9738 - DNA, 21 bp, synthetic construct
  source 1..21: mol_type = other DNA
atgcggttttgtaaggattcg

SEQ ID NO: 9739 - DNA, 21 bp, synthetic construct
  source 1..21: mol_type = other DNA
tattcggattttgctcctttt

SEQ ID NO: 9740 - DNA, 21 bp, synthetic construct
  source 1..21: mol_type = other DNA
ggttctactgtgtgtaaggat

SEQ ID NO: 9741 - DNA, 21 bp, synthetic construct
  source 1..21: mol_type = other DNA
ggggagcctaggagtgggaat

SEQ ID NO: 9742 - DNA, 21 bp, synthetic construct
  source 1..21: mol_type = other DNA
tttggttataggcaggggtcg

SEQ ID NO: 9743 - DNA, 21 bp, synthetic construct
  source 1..21: mol_type = other DNA
tctatgtgtaaggatgattgt

SEQ ID NO: 9744 - DNA, 21 bp, synthetic construct
  source 1..21: mol_type = other DNA
gggtatagtgattttcgtaat

SEQ ID NO: 9745 - DNA, 21 bp, synthetic construct
  source 1..21: mol_type = other DNA
ggtttgtatgttgaggcgggt

SEQ ID NO: 9746 - DNA, 21 bp, synthetic construct
  source 1..21: mol_type = other DNA
aatattcctggtatgatgtat

SEQ ID NO: 9747 - DNA, 21 bp, synthetic construct
  source 1..21: mol_type = other DNA
cttagtgttgatatttgtgct

SEQ ID NO: 9748 - DNA, 21 bp, synthetic construct
  source 1..21: mol_type = other DNA
gtgtctatggggtctgctggt

SEQ ID NO: 9749 - DNA, 21 bp, synthetic construct
  source 1..21: mol_type = other DNA
actcggcagggggatgaggcg

SEQ ID NO: 9750 - DNA, 21 bp, synthetic construct
  source 1..21: mol_type = other DNA
gggggtattaattatgatttg

SEQ ID NO: 9751 - DNA, 21 bp, synthetic construct
  source 1..21: mol_type = other DNA
tggaatgctggtggtgctttt

SEQ ID NO: 9752 - DNA, 21 bp, synthetic construct
  source 1..21: mol_type = other DNA
aggatggatcatactaatttt

SEQ ID NO: 9753 - DNA, 21 bp, synthetic construct
  source 1..21: mol_type = other DNA
attatgagtgatcttgcttgg

SEQ ID NO: 9754 - DNA, 21 bp, synthetic construct
  source 1..21: mol_type = other DNA
tgtggggaggctattctgatg

SEQ ID NO: 9755 - DNA, 21 bp, synthetic construct
  source 1..21: mol_type = other DNA
agtagtacgcagagttcgttt

SEQ ID NO: 9756 - DNA, 21 bp, synthetic construct
  source 1..21: mol_type = other DNA
gggcttagttcggcgacttgg

SEQ ID NO: 9757 - DNA, 21 bp, synthetic construct
  source 1..21: mol_type = other DNA
gtgagtgctgggtatcagtgg

SEQ ID NO: 9758 - DNA, 21 bp, synthetic construct
  source 1..21: mol_type = other DNA
tattttgcgggtattcctgcg

SEQ ID NO: 9759 - DNA, 21 bp, synthetic construct
  source 1..21: mol_type = other DNA
gagcttatggctcattcgtgg

SEQ ID NO: 9760 - DNA, 21 bp, synthetic construct
  source 1..21: mol_type = other DNA
ggtgggactcctgttaatgtg

SEQ ID NO: 9761 - DNA, 21 bp, synthetic construct
  source 1..21: mol_type = other DNA
ggtgttacggctgttgcttgg

SEQ ID NO: 9762 - DNA, 21 bp, synthetic construct
  source 1..21: mol_type = other DNA
gagcctgagagtaggagttgg

SEQ ID NO: 9763 - DNA, 21 bp, synthetic construct
  source 1..21: mol_type = other DNA
tgtgatggtgtgcctcggggt

SEQ ID NO: 9764 - DNA, 21 bp, synthetic construct
  source 1..21: mol_type = other DNA
agggatggtgggcggattggt

SEQ ID NO: 9765 - DNA, 21 bp, synthetic construct
  source 1..21: mol_type = other DNA
aatgggcagggggggcattgg

SEQ ID NO: 9766 - DNA, 21 bp, synthetic construct
  source 1..21: mol_type = other DNA
gttgagtcgtctagtttgtgg

SEQ ID NO: 9767 - DNA, 21 bp, synthetic construct
  source 1..21: mol_type = other DNA
acttgtactgggacttgttcg

SEQ ID NO: 9768 - DNA, 21 bp, synthetic construct
  source 1..21: mol_type = other DNA
gtggatagtgataatgggcgt

SEQ ID NO: 9769 - DNA, 21 bp, synthetic construct
  source 1..21: mol_type = other DNA
attgtgagtatttgtgcggcg

SEQ ID NO: 9770 - DNA, 21 bp, synthetic construct
  source 1..21: mol_type = other DNA
gatcatgctaatccgccggat

SEQ ID NO: 9771 - DNA, 21 bp, synthetic construct
  source 1..21: mol_type = other DNA
ttttcgggtatgagtccttcg

SEQ ID NO: 9772 - DNA, 21 bp, synthetic construct
  source 1..21: mol_type = other DNA
tgtatgactggtctgaagtgt

SEQ ID NO: 9773 - DNA, 21 bp, synthetic construct
  source 1..21: mol_type = other DNA
aattgtaatgcgtcttgtgtg

SEQ ID NO: 9774 - DNA, 21 bp, synthetic construct
  source 1..21: mol_type = other DNA
aaggtgggtgatctgcgtgct

SEQ ID NO: 9775 - DNA, 21 bp, synthetic construct
  source 1..21: mol_type = other DNA
gtggagagttcgaatggtagg

SEQ ID NO: 9776 - DNA, 21 bp, synthetic construct
  source 1..21: mol_type = other DNA
gagtttgatgctcgtacgtgg

SEQ ID NO: 9777 - DNA, 21 bp, synthetic construct
  source 1..21: mol_type = other DNA
atttgtagtcgtgtgaatggt

SEQ ID NO: 9778 - DNA, 21 bp, synthetic construct
  source 1..21: mol_type = other DNA
catgtgaagtgttgtcctcct

SEQ ID NO: 9779 - DNA, 21 bp, synthetic construct
  source 1..21: mol_type = other DNA
agtagtatggtgtcttgtgct

SEQ ID NO: 9780 - DNA, 21 bp, synthetic construct
  source 1..21: mol_type = other DNA
ttgagtgcgggggagctttgg

SEQ ID NO: 9781 - DNA, 21 bp, synthetic construct
  source 1..21: mol_type = other DNA
gtgatgaattctagtggtgcg

SEQ ID NO: 9782 - DNA, 21 bp, synthetic construct
  source 1..21: mol_type = other DNA
ttggatgggtgttgttctgct

SEQ ID NO: 9783 - DNA, 21 bp, synthetic construct
  source 1..21: mol_type = other DNA
tttagggatggtactgctgct

SEQ ID NO: 9784 - DNA, 21 bp, synthetic construct
  source 1..21: mol_type = other DNA
tgtgatactgcttgtacgcgg

SEQ ID NO: 9785 - DNA, 21 bp, synthetic construct
  source 1..21: mol_type = other DNA
ggggagttgacggtgcggtgg

SEQ ID NO: 9786 - DNA, 21 bp, synthetic construct
  source 1..21: mol_type = other DNA
ttggaggggagggaggagggg

SEQ ID NO: 9787 - DNA, 21 bp, synthetic construct
  source 1..21: mol_type = other DNA
tgtttgaagatttgtacgcct

SEQ ID NO: 9788 - DNA, 21 bp, synthetic construct
  source 1..21: mol_type = other DNA
atggagcggaattcttcgagt

SEQ ID NO: 9789 - DNA, 21 bp, synthetic construct
  source 1..21: mol_type = other DNA
ggtggtgagcggtcgacgtgg

SEQ ID NO: 9790 - DNA, 21 bp, synthetic construct
  source 1..21: mol_type = other DNA
tggcattcgacgaatgggctg

SEQ ID NO: 9791 - DNA, 21 bp, synthetic construct
  source 1..21: mol_type = other DNA
gggggttctgatcggatttgg

SEQ ID NO: 9792 - DNA, 21 bp, synthetic construct
  source 1..21: mol_type = other DNA
tgtgcggttgtgtgttcttct

SEQ ID NO: 9793 - DNA, 21 bp, synthetic construct
  source 1..21: mol_type = other DNA
gtgttttcgcgtctggatact

SEQ ID NO: 9794 - DNA, 21 bp, synthetic construct
  source 1..21: mol_type = other DNA
gggcattgtggggctacggtg

SEQ ID NO: 9795 - DNA, 21 bp, synthetic construct
  source 1..21: mol_type = other DNA
ggtgttgctggtgcgagtttt

SEQ ID NO: 9796 - DNA, 21 bp, synthetic construct
  source 1..21: mol_type = other DNA
gctggtgagtgggtgacttat

SEQ ID NO: 9797 - DNA, 21 bp, synthetic construct
  source 1..21: mol_type = other DNA
cttgagcatcgtctggttaat

SEQ ID NO: 9798 - DNA, 21 bp, synthetic construct
  source 1..21: mol_type = other DNA
gatagtgcgtctcgtgcgtgg

SEQ ID NO: 9799 - DNA, 21 bp, synthetic construct
  source 1..21: mol_type = other DNA
gggtgttgtacgaatgaggtg

SEQ ID NO: 9800 - DNA, 21 bp, synthetic construct
  source 1..21: mol_type = other DNA
tattcgcgggcgtctgatgat

SEQ ID NO: 9801 - DNA, 21 bp, synthetic construct
  source 1..21: mol_type = other DNA
atgtggaatggtattaatcct

SEQ ID NO: 9802 - DNA, 21 bp, synthetic construct
  source 1..21: mol_type = other DNA
ggtggtatgggtgttagttgg

SEQ ID NO: 9803 - DNA, 21 bp, synthetic construct
  source 1..21: mol_type = other DNA
tgttgtgatcctagtaatgtg

SEQ ID NO: 9804 - DNA, 21 bp, synthetic construct
  source 1..21: mol_type = other DNA
ggtattcctaattgtagggag

SEQ ID NO: 9805 - DNA, 21 bp, synthetic construct
  source 1..21: mol_type = other DNA
ttgtgtaagctggctcagcct

SEQ ID NO: 9806 - DNA, 21 bp, synthetic construct
  source 1..21: mol_type = other DNA
cctcggagtactcatggtgtt

SEQ ID NO: 9807 - DNA, 21 bp, synthetic construct
  source 1..21: mol_type = other DNA
gagatgcatgctgatgttatt

SEQ ID NO: 9808 - DNA, 21 bp, synthetic construct
  source 1..21: mol_type = other DNA
ttgattactaagcctgggtat

SEQ ID NO: 9809 - DNA, 21 bp, synthetic construct
  source 1..21: mol_type = other DNA
acgattgctgatgcgtatcct

SEQ ID NO: 9810 - DNA, 21 bp, synthetic construct
  source 1..21: mol_type = other DNA
actatgagggatgcttttccg

SEQ ID NO: 9811 - DNA, 21 bp, synthetic construct
  source 1..21: mol_type = other DNA
gcgactaattggcggctggct

SEQ ID NO: 9812 - DNA, 21 bp, synthetic construct
  source 1..21: mol_type = other DNA
agtgcccaatcgtggacggat

SEQ ID NO: 9813 - DNA, 21 bp, synthetic construct
  source 1..21: mol_type = other DNA
cttcatgcgagtcagatgaat

SEQ ID NO: 9814 - DNA, 21 bp, synthetic construct
  source 1..21: mol_type = other DNA
atgcataggctgtctatggat

SEQ ID NO: 9815 - DNA, 21 bp, synthetic construct
  source 1..21: mol_type = other DNA
gttgctcaggcgggtgcgggt

SEQ ID NO: 9816 - DNA, 21 bp, synthetic construct
  source 1..21: mol_type = other DNA
ggtgcgcctgatagtattcgt

SEQ ID NO: 9817 - DNA, 21 bp, synthetic construct
  source 1..21: mol_type = other DNA
cgggaggattttagtacgttt

SEQ ID NO: 9818 - DNA, 21 bp, synthetic construct
  source 1..21: mol_type = other DNA
catgaggattcgtgtagtgct

SEQ ID NO: 9819 - DNA, 21 bp, synthetic construct
  source 1..21: mol_type = other DNA
tattattcggggcgtagtgag

SEQ ID NO: 9820 - DNA, 21 bp, synthetic construct
  source 1..21: mol_type = other DNA
ttttttaatactgctcatagt

SEQ ID NO: 9821 - DNA, 21 bp, synthetic construct
  source 1..21: mol_type = other DNA
tatgtgaagtcgcagggtgtg

SEQ ID NO: 9822 - DNA, 21 bp, synthetic construct
  source 1..21: mol_type = other DNA
tgtacgaagaatgtgaatgcg

SEQ ID NO: 9823 - DNA, 21 bp, synthetic construct
  source 1..21: mol_type = other DNA
atggtgtcttgtggtggttgt

SEQ ID NO: 9824 - DNA, 21 bp, synthetic construct
  source 1..21: mol_type = other DNA
actttgtctactaatggtgtg

SEQ ID NO: 9825 - DNA, 21 bp, synthetic construct
  source 1..21: mol_type = other DNA
tctgctagtacggcgaagagt

SEQ ID NO: 9826 - DNA, 21 bp, synthetic construct
  source 1..21: mol_type = other DNA
gttatgtctgaggcttcgtgg

SEQ ID NO: 9827 - DNA, 21 bp, synthetic construct
  source 1..21: mol_type = other DNA
cttggtgcggctacgtgtcag

SEQ ID NO: 9828 - DNA, 21 bp, synthetic construct
  source 1..21: mol_type = other DNA
tgttgtggtaatgtgaagatt

SEQ ID NO: 9829 - DNA, 21 bp, synthetic construct
  source 1..21: mol_type = other DNA
tctggggagtatactcctttt

SEQ ID NO: 9830 - DNA, 21 bp, synthetic construct
  source 1..21: mol_type = other DNA
tgtaaggtttctgcgaatttg

SEQ ID NO: 9831 - DNA, 21 bp, synthetic construct
  source 1..21: mol_type = other DNA
gggagtgatacgtcgcgttgg

SEQ ID NO: 9832 - DNA, 21 bp, synthetic construct
  source 1..21: mol_type = other DNA
cgttgtccgtttgttgagacg

SEQ ID NO: 9833 - DNA, 21 bp, synthetic construct
  source 1..21: mol_type = other DNA
atgttgagtttgtgttgtgcg

SEQ ID NO: 9834 - DNA, 21 bp, synthetic construct
  source 1..21: mol_type = other DNA
cagaattgtgttgatcggtgt

SEQ ID NO: 9835 - DNA, 21 bp, synthetic construct
  source 1..21: mol_type = other DNA
tttgaggtgcctggagataag

SEQ ID NO: 9836 - DNA, 21 bp, synthetic construct
  source 1..21: mol_type = other DNA
cctggggcgtcttcggtgtgg

SEQ ID NO: 9837 - DNA, 21 bp, synthetic construct
  source 1..21: mol_type = other DNA
ggttttggtgattttcagaat

SEQ ID NO: 9838 - DNA, 21 bp, synthetic construct
  source 1..21: mol_type = other DNA
agtactgctgggacgagttgt

SEQ ID NO: 9839 - DNA, 21 bp, synthetic construct
  source 1..21: mol_type = other DNA
ggtatggttccgcgggatatg

SEQ ID NO: 9840 - DNA, 21 bp, synthetic construct
  source 1..21: mol_type = other DNA
gcgtggagtactaatggtgtg

SEQ ID NO: 9841 - DNA, 21 bp, synthetic construct
  source 1..21: mol_type = other DNA
tgttcgaataagtgtactgtt

SEQ ID NO: 9842 - DNA, 21 bp, synthetic construct
  source 1..21: mol_type = other DNA
tggtggagtggtacgccggat

SEQ ID NO: 9843 - DNA, 21 bp, synthetic construct
  source 1..21: mol_type = other DNA
gagtgtctggcgtcttgtcgg

SEQ ID NO: 9844 - DNA, 21 bp, synthetic construct
  source 1..21: mol_type = other DNA
tttgatgcttctactctgtct

SEQ ID NO: 9845 - DNA, 21 bp, synthetic construct
  source 1..21: mol_type = other DNA
attactgagcgtgttaatact

SEQ ID NO: 9846 - DNA, 21 bp, synthetic construct
  source 1..21: mol_type = other DNA
tatagtaaggcggcgccgttg

SEQ ID NO: 9847 - DNA, 21 bp, synthetic construct
  source 1..21: mol_type = other DNA
ggtttgagtagtagtagttgg

SEQ ID NO: 9848 - DNA, 21 bp, synthetic construct
  source 1..21: mol_type = other DNA
cggcttgagaatcctcatact

SEQ ID NO: 9849 - DNA, 21 bp, synthetic construct
  source 1..21: mol_type = other DNA
aagcttgatgaggtgtatcct

SEQ ID NO: 9850 - DNA, 21 bp, synthetic construct
  source 1..21: mol_type = other DNA
ccgtctgctaagaatctgggg

SEQ ID NO: 9851 - DNA, 21 bp, synthetic construct
  source 1..21: mol_type = other DNA
gagggtcctccgccgaggaat

SEQ ID NO: 9852 - DNA, 21 bp, synthetic construct
  source 1..21: mol_type = other DNA
gttggtcagcaggttgtgttg

SEQ ID NO: 9853 - DNA, 21 bp, synthetic construct
  source 1..21: mol_type = other DNA
gtgtcggattttgatattttt

SEQ ID NO: 9854 - DNA, 21 bp, synthetic construct
  source 1..21: mol_type = other DNA
gggagttttcgtcagggtggt

SEQ ID NO: 9855 - DNA, 21 bp, synthetic construct
  source 1..21: mol_type = other DNA
catgagccgtcgaggacgtgg

SEQ ID NO: 9856 - DNA, 21 bp, synthetic construct
  source 1..21: mol_type = other DNA
actggtgtgcatgtgacgccg

SEQ ID NO: 9857 - DNA, 21 bp, synthetic construct
  source 1..21: mol_type = other DNA
tgtatgcagctgaagtctcat

SEQ ID NO: 9858 - DNA, 21 bp, synthetic construct
  source 1..21: mol_type = other DNA
catgatgcgttttcttcttgg

SEQ ID NO: 9859 - DNA, 21 bp, synthetic construct
  source 1..21: mol_type = other DNA
acgtggcatggtgatgggcct

SEQ ID NO: 9860 - DNA, 21 bp, synthetic construct
  source 1..21: mol_type = other DNA
tggggtagtcagggggggacg

SEQ ID NO: 9861 - DNA, 21 bp, synthetic construct
  source 1..21: mol_type = other DNA
attgaggggcttagggcgtct

SEQ ID NO: 9862 - DNA, 21 bp, synthetic construct
  source 1..21: mol_type = other DNA
ttgtctaggatttcgatggat

SEQ ID NO: 9863 - DNA, 21 bp, synthetic construct
  source 1..21: mol_type = other DNA
tgtgagcggaatgagtgtccg

SEQ ID NO: 9864 - DNA, 21 bp, synthetic construct
  source 1..21: mol_type = other DNA
gattatgagagtgcttgtgtt

SEQ ID NO: 9865 - DNA, 21 bp, synthetic construct
  source 1..21: mol_type = other DNA
gcttgggataatgaggctatg

SEQ ID NO: 9866 - DNA, 21 bp, synthetic construct
  source 1..21: mol_type = other DNA
aagaatggttcgtcgtcgtgg

SEQ ID NO: 9867 - DNA, 21 bp, synthetic construct
  source 1..21: mol_type = other DNA
actgattctgagtggagggat

SEQ ID NO: 9868 - DNA, 21 bp, synthetic construct
  source 1..21: mol_type = other DNA
tgttgtggtccgggtaagtct

SEQ ID NO: 9869 - DNA, 21 bp, synthetic construct
  source 1..21: mol_type = other DNA
gtttcggatactaatggtatt

SEQ ID NO: 9870 - DNA, 21 bp, synthetic construct
  source 1..21: mol_type = other DNA
atgggtttgggtcttcatatt

SEQ ID NO: 9871 - DNA, 21 bp, synthetic construct
  source 1..21: mol_type = other DNA
tgtgttattgttaagcaggtg

SEQ ID NO: 9872 - DNA, 21 bp, synthetic construct
  source 1..21: mol_type = other DNA
agtgagatttgttcgtcgccg

SEQ ID NO: 9873 - DNA, 21 bp, synthetic construct
  source 1..21: mol_type = other DNA
tgtgcggctggtacgtcgcct

SEQ ID NO: 9874 - DNA, 21 bp, synthetic construct
  source 1..21: mol_type = other DNA
atttgtggtgcgccgtgtgtg

SEQ ID NO: 9875 - DNA, 21 bp, synthetic construct
  source 1..21: mol_type = other DNA
gattcgatggctacggagcgg

SEQ ID NO: 9876 - DNA, 21 bp, synthetic construct
  source 1..21: mol_type = other DNA
ttttgtttggggaattcgggt

SEQ ID NO: 9877 - DNA, 21 bp, synthetic construct
  source 1..21: mol_type = other DNA
aatgatggtcggagtgggtgg

SEQ ID NO: 9878 - DNA, 21 bp, synthetic construct
  source 1..21: mol_type = other DNA
ggtcctacgagtgtgctgtgg

SEQ ID NO: 9879 - DNA, 21 bp, synthetic construct
  source 1..21: mol_type = other DNA
gataggatttttctgtcggct

SEQ ID NO: 9880 - DNA, 21 bp, synthetic construct
  source 1..21: mol_type = other DNA
atggataatgcggctcagcgt

SEQ ID NO: 9881 - DNA, 21 bp, synthetic construct
  source 1..21: mol_type = other DNA
gctgatggtgggacggtttat

SEQ ID NO: 9882 - DNA, 21 bp, synthetic construct
  source 1..21: mol_type = other DNA
tattggagtagggtgagtgag

SEQ ID NO: 9883 - DNA, 21 bp, synthetic construct
  source 1..21: mol_type = other DNA
tggagtgagcggctgcgttct

SEQ ID NO: 9884 - DNA, 21 bp, synthetic construct
  source 1..21: mol_type = other DNA
tattgggagggggttactagt

SEQ ID NO: 9885 - DNA, 21 bp, synthetic construct
  source 1..21: mol_type = other DNA
gtgaaggggattgctgtgagt

SEQ ID NO: 9886 - DNA, 21 bp, synthetic construct
  source 1..21: mol_type = other DNA
tgtgttgcgtcttatacgtgt

SEQ ID NO: 9887 - DNA, 21 bp, synthetic construct
  source 1..21: mol_type = other DNA
aaggagtttttgtctgatcgg

SEQ ID NO: 9888 - DNA, 21 bp, synthetic construct
  source 1..21: mol_type = other DNA
tgggagtttaagcatctgggt

SEQ ID NO: 9889 - DNA, 21 bp, synthetic construct
  source 1..21: mol_type = other DNA
ccgatgcatgctacttcgtgg

SEQ ID NO: 9890 - DNA, 21 bp, synthetic construct
  source 1..21: mol_type = other DNA
gataagaagagtgatttggtg

SEQ ID NO: 9891 - DNA, 21 bp, synthetic construct
  source 1..21: mol_type = other DNA
agggtggagctgagtcctctg

SEQ ID NO: 9892 - DNA, 21 bp, synthetic construct
  source 1..21: mol_type = other DNA
tctgcttgtaagacgactgag

SEQ ID NO: 9893 - DNA, 21 bp, synthetic construct
  source 1..21: mol_type = other DNA
attcctaatcggtgtgaggcg

SEQ ID NO: 9894 - DNA, 21 bp, synthetic construct
  source 1..21: mol_type = other DNA
tgtaatccttcgtcggagaag

SEQ ID NO: 9895 - DNA, 21 bp, synthetic construct
  source 1..21: mol_type = other DNA
ttgtctcattgttgtgattct

SEQ ID NO: 9896 - DNA, 21 bp, synthetic construct
  source 1..21: mol_type = other DNA
ggtattaatgttccgactggg

SEQ ID NO: 9897 - DNA, 21 bp, synthetic construct
  source 1..21: mol_type = other DNA
tgtggtgtgaagtgtcagctt

SEQ ID NO: 9898 - DNA, 21 bp, synthetic construct
  source 1..21: mol_type = other DNA
tctggtacgttttcgggggag

SEQ ID NO: 9899 - DNA, 21 bp, synthetic construct
  source 1..21: mol_type = other DNA
cttgttatttgtcgtgggcat

SEQ ID NO: 9900 - DNA, 21 bp, synthetic construct
  source 1..21: mol_type = other DNA
ttgtctgttaattcttctggg

SEQ ID NO: 9901 - DNA, 21 bp, synthetic construct
  source 1..21: mol_type = other DNA
ttgcataagcttagtgtgact

SEQ ID NO: 9902 - DNA, 21 bp, synthetic construct
  source 1..21: mol_type = other DNA
tatttttcgggtcaggcggag

SEQ ID NO: 9903 - DNA, 21 bp, synthetic construct
  source 1..21: mol_type = other DNA
tatgttcttagtgatagtcgt

SEQ ID NO: 9904 - DNA, 21 bp, synthetic construct
  source 1..21: mol_type = other DNA
gagctgattggtggtgggtct

SEQ ID NO: 9905 - DNA, 21 bp, synthetic construct
  source 1..21: mol_type = other DNA
atgacggtggattgttctcgg

SEQ ID NO: 9906 - DNA, 21 bp, synthetic construct
  source 1..21: mol_type = other DNA
ctggagtatcataaggttcct

SEQ ID NO: 9907 - DNA, 21 bp, synthetic construct
  source 1..21: mol_type = other DNA
gtgggtacttttagggagggt

SEQ ID NO: 9908 - DNA, 21 bp, synthetic construct
  source 1..21: mol_type = other DNA
gttccggatgctgtgcgttgg

SEQ ID NO: 9909 - DNA, 21 bp, synthetic construct
  source 1..21: mol_type = other DNA
attggggggtcttctggttgg

SEQ ID NO: 9910 - DNA, 21 bp, synthetic construct
  source 1..21: mol_type = other DNA
gagatgtttttgaatggtgtg

SEQ ID NO: 9911 - DNA, 21 bp, synthetic construct
  source 1..21: mol_type = other DNA
tctgggaagggttggtcggct

SEQ ID NO: 9912 - DNA, 21 bp, synthetic construct
  source 1..21: mol_type = other DNA
ggggcttcggctgggacgttt

SEQ ID NO: 9913 - DNA, 21 bp, synthetic construct
  source 1..21: mol_type = other DNA
cgtggggtgtattcgaatgtt

SEQ ID NO: 9914 - DNA, 21 bp, synthetic construct
  source 1..21: mol_type = other DNA
gggggtggggatcagcgttgg

SEQ ID NO: 9915 - DNA, 21 bp, synthetic construct
  source 1..21: mol_type = other DNA
gatttggatcatgagggtgtt

SEQ ID NO: 9916 - DNA, 21 bp, synthetic construct
  source 1..21: mol_type = other DNA
cctgggaattcgcatgcgtgg

SEQ ID NO: 9917 - DNA, 21 bp, synthetic construct
  source 1..21: mol_type = other DNA
tgttctctggggtcggatcgt

SEQ ID NO: 9918 - DNA, 21 bp, synthetic construct
  source 1..21: mol_type = other DNA
gttactgcgtcggggtgtgct

SEQ ID NO: 9919 - DNA, 21 bp, synthetic construct
  source 1..21: mol_type = other DNA
cttggtcttaaggggtgggat

SEQ ID NO: 9920 - DNA, 21 bp, synthetic construct
  source 1..21: mol_type = other DNA
gttgagggtgtgacggggcat

SEQ ID NO: 9921 - DNA, 21 bp, synthetic construct
  source 1..21: mol_type = other DNA
attggtcatgttagtgattgg

SEQ ID NO: 9922 - DNA, 21 bp, synthetic construct
  source 1..21: mol_type = other DNA
ggtcggaattttgggactcct

SEQ ID NO: 9923 - DNA, 21 bp, synthetic construct
  source 1..21: mol_type = other DNA
tattttagtgctgttactgcg

SEQ ID NO: 9924 - DNA, 21 bp, synthetic construct
  source 1..21: mol_type = other DNA
agtgggggtactagtttgtgg

SEQ ID NO: 9925 - DNA, 21 bp, synthetic construct
  source 1..21: mol_type = other DNA
gggttgatgcatgagcatttg

SEQ ID NO: 9926 - DNA, 21 bp, synthetic construct
  source 1..21: mol_type = other DNA
agtcaggattgttgtgggcct

SEQ ID NO: 9927 - DNA, 21 bp, synthetic construct
  source 1..21: mol_type = other DNA
ttgtggactggtgctggtcct

SEQ ID NO: 9928 - DNA, 21 bp, synthetic construct
  source 1..21: mol_type = other DNA
gtgactggggatcgtattgtt

SEQ ID NO: 9929 - DNA, 21 bp, synthetic construct
  source 1..21: mol_type = other DNA
cgtagtatggatatttttcct

SEQ ID NO: 9930 - DNA, 21 bp, synthetic construct
  source 1..21: mol_type = other DNA
tttttttctgggacgttggag

SEQ ID NO: 9931 - DNA, 21 bp, synthetic construct
  source 1..21: mol_type = other DNA
tgtgagtttcagaagtgtccg

SEQ ID NO: 9932 - DNA, 21 bp, synthetic construct
  source 1..21: mol_type = other DNA
gtggagatgggtcggactggt

SEQ ID NO: 9933 - DNA, 21 bp, synthetic construct
  source 1..21: mol_type = other DNA
acgagtctggtgagggtgagt

SEQ ID NO: 9934 - DNA, 21 bp, synthetic construct
  source 1..21: mol_type = other DNA
tcgatgcttaagtatccgagt

SEQ ID NO: 9935 - DNA, 21 bp, synthetic construct
  source 1..21: mol_type = other DNA
tatttttcgcttgagcgtgat

SEQ ID NO: 9936 - DNA, 21 bp, synthetic construct
  source 1..21: mol_type = other DNA
ggtggggatttgcggcagcag

SEQ ID NO: 9937 - DNA, 21 bp, synthetic construct
  source 1..21: mol_type = other DNA
attcggggtggtggtgctggt

SEQ ID NO: 9938 - DNA, 21 bp, synthetic construct
  source 1..21: mol_type = other DNA
gcttggactgaggctaatcgt

SEQ ID NO: 9939 - DNA, 21 bp, synthetic construct
  source 1..21: mol_type = other DNA
ggggggaatgggtcgtcgtat

SEQ ID NO: 9940 - DNA, 21 bp, synthetic construct
  source 1..21: mol_type = other DNA
ggggttactgagattaagtgt

SEQ ID NO: 9941 - DNA, 21 bp, synthetic construct
  source 1..21: mol_type = other DNA
ttggttacgcatggttctctt

SEQ ID NO: 9942 - DNA, 21 bp, synthetic construct
  source 1..21: mol_type = other DNA
gggatgcgggattctgtgacg

SEQ ID NO: 9943 - DNA, 21 bp, synthetic construct
  source 1..21: mol_type = other DNA
ggtgatttgtttttggcggtt

SEQ ID NO: 9944 - DNA, 21 bp, synthetic construct
  source 1..21: mol_type = other DNA
gagttgacgtctgatccgggg

SEQ ID NO: 9945 - DNA, 21 bp, synthetic construct
  source 1..21: mol_type = other DNA
gctttgggtatgcctttgcag

SEQ ID NO: 9946 - DNA, 21 bp, synthetic construct
  source 1..21: mol_type = other DNA
tttagtcggcttaatgatgat

SEQ ID NO: 9947 - DNA, 21 bp, synthetic construct
  source 1..21: mol_type = other DNA
tttagtgttggtatttgtagt

SEQ ID NO: 9948 - DNA, 21 bp, synthetic construct
  source 1..21: mol_type = other DNA
agtagggttacgtatcgggag

SEQ ID NO: 9949 - DNA, 21 bp, synthetic construct
  source 1..21: mol_type = other DNA
ctgtgtcttggtgcttgtacg

SEQ ID NO: 9950 - DNA, 21 bp, synthetic construct
  source 1..21: mol_type = other DNA
ggtggtgcgggttctgcgtgg

SEQ ID NO: 9951 - DNA, 21 bp, synthetic construct
  source 1..21: mol_type = other DNA
gattctagtccttcgtgtcct

SEQ ID NO: 9952 - DNA, 21 bp, synthetic construct
  source 1..21: mol_type = other DNA
gggcttagttctcctttgtgg

SEQ ID NO: 9953 - DNA, 21 bp, synthetic construct
  source 1..21: mol_type = other DNA
tgtattactcgggagcatgtg

SEQ ID NO: 9954 - DNA, 21 bp, synthetic construct
  source 1..21: mol_type = other DNA
aatgctccggttggggctggg

SEQ ID NO: 9955 - DNA, 21 bp, synthetic construct
  source 1..21: mol_type = other DNA
gtgccttctagtgttacgtgg

SEQ ID NO: 9956 - DNA, 21 bp, synthetic construct
  source 1..21: mol_type = other DNA
tatagtagggttcagggtgat

SEQ ID NO: 9957 - DNA, 21 bp, synthetic construct
  source 1..21: mol_type = other DNA
ttgagtaagattggttataat

SEQ ID NO: 9958 - DNA, 21 bp, synthetic construct
  source 1..21: mol_type = other DNA
cggggtgaggggcggctttat

SEQ ID NO: 9959 - DNA, 21 bp, synthetic construct
  source 1..21: mol_type = other DNA
aaggttggtgagcagactcgg

SEQ ID NO: 9960 - DNA, 21 bp, synthetic construct
  source 1..21: mol_type = other DNA
agtctttctacggagaatctg

SEQ ID NO: 9961 - DNA, 21 bp, synthetic construct
  source 1..21: mol_type = other DNA
gcgtgttcgactattcatctg

SEQ ID NO: 9962 - DNA, 21 bp, synthetic construct
  source 1..21: mol_type = other DNA
gatcaggctgtgagggtgtcg

SEQ ID NO: 9963 - DNA, 21 bp, synthetic construct
  source 1..21: mol_type = other DNA
gattcgacgtcgcagctgtcg

SEQ ID NO: 9964 - DNA, 21 bp, synthetic construct
  source 1..21: mol_type = other DNA
ggtgcggggacttctgggtgg

SEQ ID NO: 9965 - DNA, 21 bp, synthetic construct
  source 1..21: mol_type = other DNA
gatccttcgactcagctgtgg

SEQ ID NO: 9966 - DNA, 21 bp, synthetic construct
  source 1..21: mol_type = other DNA
cagggggcgtcttctagttgg

SEQ ID NO: 9967 - DNA, 21 bp, synthetic construct
  source 1..21: mol_type = other DNA
cttgtgaagtgtgtggttggg

SEQ ID NO: 9968 - DNA, 21 bp, synthetic construct
  source 1..21: mol_type = other DNA
tggtcgtctacgaagacgcat

SEQ ID NO: 9969 - DNA, 21 bp, synthetic construct
  source 1..21: mol_type = other DNA
gtgccgtatgagactcctgtg

SEQ ID NO: 9970 - DNA, 21 bp, synthetic construct
  source 1..21: mol_type = other DNA
gtgggggcggatcggcagtgg

SEQ ID NO: 9971 - DNA, 21 bp, synthetic construct
  source 1..21: mol_type = other DNA
tggagggctgaggttagtcgt

SEQ ID NO: 9972 - DNA, 21 bp, synthetic construct
  source 1..21: mol_type = other DNA
attgttgctggttatagtttt

SEQ ID NO: 9973 - DNA, 21 bp, synthetic construct
  source 1..21: mol_type = other DNA
actaggacgggtgagaatgct

SEQ ID NO: 9974 - DNA, 21 bp, synthetic construct
  source 1..21: mol_type = other DNA
gtgtgtagtggtgctgagggt

SEQ ID NO: 9975 - DNA, 21 bp, synthetic construct
  source 1..21: mol_type = other DNA
gattttaaggctcttggtact

SEQ ID NO: 9976 - DNA, 21 bp, synthetic construct
  source 1..21: mol_type = other DNA
gatagttttggtaatgctgct

SEQ ID NO: 9977 - DNA, 21 bp, synthetic construct
  source 1..21: mol_type = other DNA
gatccttttgcgcctagttgg

SEQ ID NO: 9978 - DNA, 21 bp, synthetic construct
  source 1..21: mol_type = other DNA
ttgtgggatgctcaggggaag

SEQ ID NO: 9979 - DNA, 21 bp, synthetic construct
  source 1..21: mol_type = other DNA
tttaatagtagtgttggtttt

SEQ ID NO: 9980 - DNA, 21 bp, synthetic construct
  source 1..21: mol_type = other DNA
attggtaatggtacttggaat

SEQ ID NO: 9981 - DNA, 21 bp, synthetic construct
  source 1..21: mol_type = other DNA
aagagtgggacggttggtgag

SEQ ID NO: 9982 - DNA, 21 bp, synthetic construct
  source 1..21: mol_type = other DNA
gttgctatgagttcttgttgt

SEQ ID NO: 9983 - DNA, 21 bp, synthetic construct
  source 1..21: mol_type = other DNA
gttgatactattgtttgtgag

SEQ ID NO: 9984 - DNA, 21 bp, synthetic construct
  source 1..21: mol_type = other DNA
tttggggggcattcgagttat

SEQ ID NO: 9985 - DNA, 21 bp, synthetic construct
  source 1..21: mol_type = other DNA
tttggtcggtgtgatattacg

SEQ ID NO: 9986 - DNA, 21 bp, synthetic construct
  source 1..21: mol_type = other DNA
tattatactgctgtggtgggt

SEQ ID NO: 9987 - DNA, 21 bp, synthetic construct
  source 1..21: mol_type = other DNA
tatgttttttcggggcctgtg

SEQ ID NO: 9988 - DNA, 21 bp, synthetic construct
  source 1..21: mol_type = other DNA
cctggtcagattatgacggct

SEQ ID NO: 9989 - DNA, 21 bp, synthetic construct
  source 1..21: mol_type = other DNA
attgattatgcgcctggtgag

SEQ ID NO: 9990 - DNA, 21 bp, synthetic construct
  source 1..21: mol_type = other DNA
gagtctgcgactcttgttctt

SEQ ID NO: 9991 - DNA, 21 bp, synthetic construct
  source 1..21: mol_type = other DNA
tcggatcctaagattgtggcg

SEQ ID NO: 9992 - DNA, 21 bp, synthetic construct
  source 1..21: mol_type = other DNA
ctgcagaagtttgatcggtcg

SEQ ID NO: 9993 - DNA, 21 bp, synthetic construct
  source 1..21: mol_type = other DNA
tgttgtaagagtgttactgcg

SEQ ID NO: 9994 - DNA, 21 bp, synthetic construct
  source 1..21: mol_type = other DNA
ggtctgagtagtgcggtgtgg

SEQ ID NO: 9995 - DNA, 21 bp, synthetic construct
  source 1..21: mol_type = other DNA
aatggtgtgtggactaatccg

SEQ ID NO: 9996 - DNA, 21 bp, synthetic construct
  source 1..21: mol_type = other DNA
gtgactacgcggggtcctaat

SEQ ID NO: 9997 - DNA, 21 bp, synthetic construct
  source 1..21: mol_type = other DNA
agtacggagtggattccttat

SEQ ID NO: 9998 - DNA, 21 bp, synthetic construct
  source 1..21: mol_type = other DNA
gatgtgtcttctcgtacttgg

SEQ ID NO: 9999 - DNA, 21 bp, synthetic construct
  source 1..21: mol_type = other DNA
tctgatggggttagtgttcgt

SEQ ID NO: 10000 - DNA, 21 bp, synthetic construct
  source 1..21: mol_type = other DNA
tttgagtctaatgagccgtgg

SEQ ID NO: 10001 - DNA, 21 bp, synthetic construct
  source 1..21: mol_type = other DNA
gggtctgttgggaatgcttgg

SEQ ID NO: 10002 - DNA, 21 bp, synthetic construct
  source 1..21: mol_type = other DNA
gttcctggtattcctgttaat

SEQ ID NO: 10003 - DNA, 21 bp, synthetic construct
  source 1..21: mol_type = other DNA
gtttgtaatgggaatatttgt

SEQ ID NO: 10004 - DNA, 21 bp, synthetic construct
  source 1..21: mol_type = other DNA
gtggcgactgaggggcgggat

SEQ ID NO: 10005 - DNA, 21 bp, synthetic construct
  source 1..21: mol_type = other DNA
cgggagggtattgagtcttgg

SEQ ID NO: 10006 - DNA, 21 bp, synthetic construct
  source 1..21: mol_type = other DNA
gctgtggagggttgttgtggg

SEQ ID NO: 10007 - DNA, 21 bp, synthetic construct
  source 1..21: mol_type = other DNA
atttctggtattagtatgtat

SEQ ID NO: 10008 - DNA, 21 bp, synthetic construct
  source 1..21: mol_type = other DNA
gattggtcgcggtgttctaag

SEQ ID NO: 10009 - DNA, 21 bp, synthetic construct
  source 1..21: mol_type = other DNA
tattgggctggtgtggagtcg

SEQ ID NO: 10010 - DNA, 21 bp, synthetic construct
  source 1..21: mol_type = other DNA
ttttatagtggggtgttgagt

SEQ ID NO: 10011 - DNA, 21 bp, synthetic construct
  source 1..21: mol_type = other DNA
cgtgtggctgattgtgcgccg

SEQ ID NO: 10012 - DNA, 21 bp, synthetic construct
  source 1..21: mol_type = other DNA
tatattgctgggtgtggtaat

SEQ ID NO: 10013 - DNA, 21 bp, synthetic construct
  source 1..21: mol_type = other DNA
gggagtggtcagtcgatttgg

SEQ ID NO: 10014 - DNA, 21 bp, synthetic construct
  source 1..21: mol_type = other DNA
tctctttcgtctacgacttgg

SEQ ID NO: 10015 - DNA, 21 bp, synthetic construct
  source 1..21: mol_type = other DNA
agtcttggggggagtacgtgg

SEQ ID NO: 10016 - DNA, 21 bp, synthetic construct
  source 1..21: mol_type = other DNA
ccgattcgtgtttctgatgtt

SEQ ID NO: 10017 - DNA, 21 bp, synthetic construct
  source 1..21: mol_type = other DNA
agttgttcgacgggttatcct

SEQ ID NO: 10018 - DNA, 21 bp, synthetic construct
  source 1..21: mol_type = other DNA
gttggtgttagtagttcgggt

SEQ ID NO: 10019 - DNA, 21 bp, synthetic construct
  source 1..21: mol_type = other DNA
gggctggtgtcgagtgctatg

SEQ ID NO: 10020 - DNA, 21 bp, synthetic construct
  source 1..21: mol_type = other DNA
gttggttgtgctcatcttcct

SEQ ID NO: 10021 - DNA, 21 bp, synthetic construct
  source 1..21: mol_type = other DNA
cttcatgctctgagtacggat

SEQ ID NO: 10022 - DNA, 21 bp, synthetic construct
  source 1..21: mol_type = other DNA
gagcttgattcgcgggattgg

SEQ ID NO: 10023 - DNA, 21 bp, synthetic construct
  source 1..21: mol_type = other DNA
gatgtgcgtactgatagtaat

SEQ ID NO: 10024 - DNA, 21 bp, synthetic construct
  source 1..21: mol_type = other DNA
gttgcggggcagattacgatt

SEQ ID NO: 10025 - DNA, 21 bp, synthetic construct
  source 1..21: mol_type = other DNA
ggtgttgataggcatatgcct

SEQ ID NO: 10026 - DNA, 21 bp, synthetic construct
  source 1..21: mol_type = other DNA
gggtgtattattccgggtgtg

SEQ ID NO: 10027 - DNA, 21 bp, synthetic construct
  source 1..21: mol_type = other DNA
cgtctggatgatgttctttgg

SEQ ID NO: 10028 - DNA, 21 bp, synthetic construct
  source 1..21: mol_type = other DNA
ggtgggagtacgtctgtgtgg

SEQ ID NO: 10029 - DNA, 21 bp, synthetic construct
  source 1..21: mol_type = other DNA
tatttttcgggtcgtgagtct

SEQ ID NO: 10030 - DNA, 21 bp, synthetic construct
  source 1..21: mol_type = other DNA
gggagtagttcgtcggcttgg

SEQ ID NO: 10031 - DNA, 21 bp, synthetic construct
  source 1..21: mol_type = other DNA
agggataggaattcttatgtt

SEQ ID NO: 10032 - DNA, 21 bp, synthetic construct
  source 1..21: mol_type = other DNA
ttgggtggggttttgacggtg

SEQ ID NO: 10033 - DNA, 21 bp, synthetic construct
  source 1..21: mol_type = other DNA
atggttgcttgtggttgtggt

SEQ ID NO: 10034 - DNA, 21 bp, synthetic construct
  source 1..21: mol_type = other DNA
tgtgatggggtgggggttgcg

SEQ ID NO: 10035 - DNA, 21 bp, synthetic construct
  source 1..21: mol_type = other DNA
agtgggagtacgagtggttgg

SEQ ID NO: 10036 - DNA, 21 bp, synthetic construct
  source 1..21: mol_type = other DNA
gagctgagtagtagggagtgg

SEQ ID NO: 10037 - DNA, 21 bp, synthetic construct
  source 1..21: mol_type = other DNA
ggtgttaagatgaattgttcg

SEQ ID NO: 10038 - DNA, 21 bp, synthetic construct
  source 1..21: mol_type = other DNA
tggctgaagcagactttgctt

SEQ ID NO: 10039 - DNA, 21 bp, synthetic construct
  source 1..21: mol_type = other DNA
cgggatattgattgtctgtct

SEQ ID NO: 10040 - DNA, 21 bp, synthetic construct
  source 1..21: mol_type = other DNA
cgtatttatgatgctgttccg

SEQ ID NO: 10041 - DNA, 21 bp, synthetic construct
  source 1..21: mol_type = other DNA
gggcgggcgtatgcgcatcct

SEQ ID NO: 10042 - DNA, 21 bp, synthetic construct
  source 1..21: mol_type = other DNA
gttgctgggcgttgttgtcgg

SEQ ID NO: 10043 - DNA, 21 bp, synthetic construct
  source 1..21: mol_type = other DNA
ggttctgctggtgttagttgg

SEQ ID NO: 10044 - DNA, 21 bp, synthetic construct
  source 1..21: mol_type = other DNA
atggaggttagggagtcgggg

SEQ ID NO: 10045 - DNA, 21 bp, synthetic construct
  source 1..21: mol_type = other DNA
cgggagggggtgtctgcgtgg

SEQ ID NO: 10046 - DNA, 21 bp, synthetic construct
  source 1..21: mol_type = other DNA
acgtgggaggggagtcctgct

SEQ ID NO: 10047 - DNA, 21 bp, synthetic construct
  source 1..21: mol_type = other DNA
gggagtcatggggtgtcttgg

SEQ ID NO: 10048 - DNA, 21 bp, synthetic construct
  source 1..21: mol_type = other DNA
ggggtgcggaatgtgatgcct

SEQ ID NO: 10049 - DNA, 21 bp, synthetic construct
  source 1..21: mol_type = other DNA
gatgattcgttttatccgagt

SEQ ID NO: 10050 - DNA, 21 bp, synthetic construct
  source 1..21: mol_type = other DNA
ttggatatttgttgtaaggtt

SEQ ID NO: 10051 - DNA, 21 bp, synthetic construct
  source 1..21: mol_type = other DNA
gtgggtgtgtcgccgctgtgg

SEQ ID NO: 10052 - DNA, 21 bp, synthetic construct
  source 1..21: mol_type = other DNA
gcgcttttggctgctcggagt

SEQ ID NO: 10053 - DNA, 21 bp, synthetic construct
  source 1..21: mol_type = other DNA
gatgcgtattctgggcgggat

SEQ ID NO: 10054 - DNA, 21 bp, synthetic construct
  source 1..21: mol_type = other DNA
ggtcaggatgggaatgcttgg

SEQ ID NO: 10055 - DNA, 21 bp, synthetic construct
  source 1..21: mol_type = other DNA
tcgtcgggtacgtctctttgg

SEQ ID NO: 10056 - DNA, 21 bp, synthetic construct
  source 1..21: mol_type = other DNA
tcgggggcgtcgccgctgtgg

SEQ ID NO: 10057 - DNA, 21 bp, synthetic construct
  source 1..21: mol_type = other DNA
ttgttgggtgtttgtgatgcg

SEQ ID NO: 10058 - DNA, 21 bp, synthetic construct
  source 1..21: mol_type = other DNA
tttgtggatccgcgttgtacg

SEQ ID NO: 10059 - DNA, 21 bp, synthetic construct
  source 1..21: mol_type = other DNA
ttggcgtcgcgtgatgcggcg

SEQ ID NO: 10060 - DNA, 21 bp, synthetic construct
  source 1..21: mol_type = other DNA
acggttcattcgttgtctgat

SEQ ID NO: 10061 - DNA, 21 bp, synthetic construct
  source 1..21: mol_type = other DNA
gggttgaaggtgggtgctatt

SEQ ID NO: 10062 - DNA, 21 bp, synthetic construct
  source 1..21: mol_type = other DNA
cagagtagtccgcttgtgagg

SEQ ID NO: 10063 - DNA, 21 bp, synthetic construct
  source 1..21: mol_type = other DNA
gtggatgattggagtatgtat

SEQ ID NO: 10064 - DNA, 21 bp, synthetic construct
  source 1..21: mol_type = other DNA
gatgctctggagtggcgggat

SEQ ID NO: 10065 - DNA, 21 bp, synthetic construct
  source 1..21: mol_type = other DNA
ttgagtagggcggggtttgat

SEQ ID NO: 10066 - DNA, 21 bp, synthetic construct
  source 1..21: mol_type = other DNA
ttgtcggcgctttctgttaat

SEQ ID NO: 10067 - DNA, 21 bp, synthetic construct
  source 1..21: mol_type = other DNA
atttttgctggtcctggtcct

SEQ ID NO: 10068 - DNA, 21 bp, synthetic construct
  source 1..21: mol_type = other DNA
gcgatggagtcgacgcagtgg

SEQ ID NO: 10069 - DNA, 21 bp, synthetic construct
  source 1..21: mol_type = other DNA
cataatattggtcgtgatgtt

SEQ ID NO: 10070 - DNA, 21 bp, synthetic construct
  source 1..21: mol_type = other DNA
cgttctgagacggtgtatgtg

SEQ ID NO: 10071 - DNA, 21 bp, synthetic construct
  source 1..21: mol_type = other DNA
gatgaggggaattttcgtagt

SEQ ID NO: 10072 - DNA, 21 bp, synthetic construct
  source 1..21: mol_type = other DNA
agtcggtgtgagaaggttgtg

SEQ ID NO: 10073 - DNA, 21 bp, synthetic construct
  source 1..21: mol_type = other DNA
cgtactggttctttttgtatt

SEQ ID NO: 10074 - DNA, 21 bp, synthetic construct
  source 1..21: mol_type = other DNA
tgtggtcggagtgggactcat

SEQ ID NO: 10075 - DNA, 21 bp, synthetic construct
  source 1..21: mol_type = other DNA
ggtgagcttacggttaagtgg

SEQ ID NO: 10076 - DNA, 21 bp, synthetic construct
  source 1..21: mol_type = other DNA
tatgcgcgtaatgctccgagt

SEQ ID NO: 10077 - DNA, 21 bp, synthetic construct
  source 1..21: mol_type = other DNA
gtggatgattggtctctttat

SEQ ID NO: 10078 - DNA, 21 bp, synthetic construct
  source 1..21: mol_type = other DNA
gttactgattatgttacttat

SEQ ID NO: 10079 - DNA, 21 bp, synthetic construct
  source 1..21: mol_type = other DNA
tgtacttctggtaatgaggct

SEQ ID NO: 10080 - DNA, 21 bp, synthetic construct
  source 1..21: mol_type = other DNA
aatgagagtacgagttcgtgg

SEQ ID NO: 10081 - DNA, 21 bp, synthetic construct
  source 1..21: mol_type = other DNA
tgtgatagtccttgtacggct

SEQ ID NO: 10082 - DNA, 21 bp, synthetic construct
  source 1..21: mol_type = other DNA
cggatgatgtctggggattgg

SEQ ID NO: 10083 - DNA, 21 bp, synthetic construct
  source 1..21: mol_type = other DNA
ctgcatggtggttgttgtgct

SEQ ID NO: 10084 - DNA, 21 bp, synthetic construct
  source 1..21: mol_type = other DNA
gtggtgaatcctggtcatgat

SEQ ID NO: 10085 - DNA, 21 bp, synthetic construct
  source 1..21: mol_type = other DNA
agtcatgattcttgtcagaat

SEQ ID NO: 10086 - DNA, 21 bp, synthetic construct
  source 1..21: mol_type = other DNA
gttcctccggagctgcatgcg

SEQ ID NO: 10087 - DNA, 21 bp, synthetic construct
  source 1..21: mol_type = other DNA
ttgttgcatactgggaattgg

SEQ ID NO: 10088 - DNA, 21 bp, synthetic construct
  source 1..21: mol_type = other DNA
tataatgcgagtgggggtaat

SEQ ID NO: 10089 - DNA, 21 bp, synthetic construct
  source 1..21: mol_type = other DNA
gatatgacgtcgagtgtttgg

SEQ ID NO: 10090 - DNA, 21 bp, synthetic construct
  source 1..21: mol_type = other DNA
attagtggtcagtctgggtgg

SEQ ID NO: 10091 - DNA, 21 bp, synthetic construct
  source 1..21: mol_type = other DNA
gtgtgttgtggtcctcgtggg

SEQ ID NO: 10092 - DNA, 21 bp, synthetic construct
  source 1..21: mol_type = other DNA
ctgtatgagtttgatcatacg

SEQ ID NO: 10093 - DNA, 21 bp, synthetic construct
  source 1..21: mol_type = other DNA
ctggtgaattcggttgctagg

SEQ ID NO: 10094 - DNA, 21 bp, synthetic construct
  source 1..21: mol_type = other DNA
ttggcggctagttgttgtgtt

SEQ ID NO: 10095 - DNA, 21 bp, synthetic construct
  source 1..21: mol_type = other DNA
cagctgcctggtaattgtggt

SEQ ID NO: 10096 - DNA, 21 bp, synthetic construct
  source 1..21: mol_type = other DNA
tggcatcatggtacgaatgtg

SEQ ID NO: 10097 - DNA, 21 bp, synthetic construct
  source 1..21: mol_type = other DNA
ttgagtaagttgtcgtatgat

SEQ ID NO: 10098 - DNA, 21 bp, synthetic construct
  source 1..21: mol_type = other DNA
gtgcatagggaggatggtgtt

SEQ ID NO: 10099 - DNA, 21 bp, synthetic construct
  source 1..21: mol_type = other DNA
ggtatggattctaattctgtg

SEQ ID NO: 10100 - DNA, 21 bp, synthetic construct
  source 1..21: mol_type = other DNA
gagttgggttcgcatacgtgg

SEQ ID NO: 10101 - DNA, 21 bp, synthetic construct
  source 1..21: mol_type = other DNA
agtcatgcgttggctccgggt

SEQ ID NO: 10102 - DNA, 21 bp, synthetic construct
  source 1..21: mol_type = other DNA
aggggtgagagtgttagttgg

SEQ ID NO: 10103 - DNA, 21 bp, synthetic construct
  source 1..21: mol_type = other DNA
cgggctattgattcgccgatg

SEQ ID NO: 10104 - DNA, 21 bp, synthetic construct
  source 1..21: mol_type = other DNA
ggggggagtgcgtctacttgg

SEQ ID NO: 10105 - DNA, 21 bp, synthetic construct
  source 1..21: mol_type = other DNA
aggatggatgatagttatgcg

SEQ ID NO: 10106 - DNA, 21 bp, synthetic construct
  source 1..21: mol_type = other DNA
tctttttggggtgatcttccg

SEQ ID NO: 10107 - DNA, 21 bp, synthetic construct
  source 1..21: mol_type = other DNA
gatgagtggacgctgtcgcct

SEQ ID NO: 10108 - DNA, 21 bp, synthetic construct
  source 1..21: mol_type = other DNA
tcttggacggggcaggcggct

SEQ ID NO: 10109 - DNA, 21 bp, synthetic construct
  source 1..21: mol_type = other DNA
gttgcgaatgcggggtgggat

SEQ ID NO: 10110 - DNA, 21 bp, synthetic construct
  source 1..21: mol_type = other DNA
gatctgtcgagtaattcgtgg

SEQ ID NO: 10111 - DNA, 21 bp, synthetic construct
  source 1..21: mol_type = other DNA
gtgggttatgttgggattggg

SEQ ID NO: 10112 - DNA, 21 bp, synthetic construct
  source 1..21: mol_type = other DNA
gtgcctcagagtgtgcattgg

SEQ ID NO: 10113 - DNA, 21 bp, synthetic construct
  source 1..21: mol_type = other DNA
atggagtctcaggtgaggtgg

SEQ ID NO: 10114 - DNA, 21 bp, synthetic construct
  source 1..21: mol_type = other DNA
gatggttcggcgcgtttgtgg

SEQ ID NO: 10115 - DNA, 21 bp, synthetic construct
  source 1..21: mol_type = other DNA
cgggcgctgtctggtgcgggg

SEQ ID NO: 10116 - DNA, 21 bp, synthetic construct
  source 1..21: mol_type = other DNA
aagtttgattttaatgcggtg

SEQ ID NO: 10117 - DNA, 21 bp, synthetic construct
  source 1..21: mol_type = other DNA
gctaatgattatatgtcgtat

SEQ ID NO: 10118 - DNA, 21 bp, synthetic construct
  source 1..21: mol_type = other DNA
cctgctcgtggggagacgtgg

SEQ ID NO: 10119 - DNA, 21 bp, synthetic construct
  source 1..21: mol_type = other DNA
tggttggctgctagtgataag

SEQ ID NO: 10120 - DNA, 21 bp, synthetic construct
  source 1..21: mol_type = other DNA
gggtcgcgtgaggttgcttgg

SEQ ID NO: 10121 - DNA, 21 bp, synthetic construct
  source 1..21: mol_type = other DNA
atgttgcttgagagttgtggg

SEQ ID NO: 10122 - DNA, 21 bp, synthetic construct
  source 1..21: mol_type = other DNA
gtggctcatgaggggattggt

SEQ ID NO: 10123 - DNA, 21 bp, synthetic construct
  source 1..21: mol_type = other DNA
atggagaggggtgggtcgacg

SEQ ID NO: 10124 - DNA, 21 bp, synthetic construct
  source 1..21: mol_type = other DNA
tatccgaatgggaatgcgggg

SEQ ID NO: 10125 - DNA, 21 bp, synthetic construct
  source 1..21: mol_type = other DNA
tatctgaagaatgatccgttg

SEQ ID NO: 10126 - DNA, 21 bp, synthetic construct
  source 1..21: mol_type = other DNA
gatcagtctgcgcatagttgg

SEQ ID NO: 10127 - DNA, 21 bp, synthetic construct
  source 1..21: mol_type = other DNA
gtgtctactcgtccttatagt

SEQ ID NO: 10128 - DNA, 21 bp, synthetic construct
  source 1..21: mol_type = other DNA
cgggagcatacttctaattgg

SEQ ID NO: 10129 - DNA, 21 bp, synthetic construct
  source 1..21: mol_type = other DNA
gggcgtggtcagacgggtgag

SEQ ID NO: 10130 - DNA, 21 bp, synthetic construct
  source 1..21: mol_type = other DNA
tcggtgcgtccttctcatgag

SEQ ID NO: 10131 - DNA, 21 bp, synthetic construct
  source 1..21: mol_type = other DNA
tttgcttcgtcgatgtgttgt

SEQ ID NO: 10132 - DNA, 21 bp, synthetic construct
  source 1..21: mol_type = other DNA
ccgtattctagtattatggag

SEQ ID NO: 10133 - DNA, 21 bp, synthetic construct
  source 1..21: mol_type = other DNA
gggagtgaggttagtagttgg

SEQ ID NO: 10134 - DNA, 21 bp, synthetic construct
  source 1..21: mol_type = other DNA
tcggaggctgggaatactttt

SEQ ID NO: 10135 - DNA, 21 bp, synthetic construct
  source 1..21: mol_type = other DNA
gggcagtcgactagtagttgg

SEQ ID NO: 10136 - DNA, 21 bp, synthetic construct
  source 1..21: mol_type = other DNA
tgtgtggttgatgtgcgttgt

SEQ ID NO: 10137 - DNA, 21 bp, synthetic construct
  source 1..21: mol_type = other DNA
gagccgaatggtcggggtgtg

SEQ ID NO: 10138 - DNA, 21 bp, synthetic construct
  source 1..21: mol_type = other DNA
tattttatgggggttagggag

SEQ ID NO: 10139 - DNA, 21 bp, synthetic construct
  source 1..21: mol_type = other DNA
gagggggcggagacgactccg

SEQ ID NO: 10140 - DNA, 21 bp, synthetic construct
  source 1..21: mol_type = other DNA
tgtggttgtgtgatgtcgccg

SEQ ID NO: 10141 - DNA, 21 bp, synthetic construct
  source 1..21: mol_type = other DNA
attacgggtttttcgacggat

SEQ ID NO: 10142 - DNA, 21 bp, synthetic construct
  source 1..21: mol_type = other DNA
gcggatggtagtcagggtgct

SEQ ID NO: 10143 - DNA, 21 bp, synthetic construct
  source 1..21: mol_type = other DNA
tatagtgcgaatggtcctaat

SEQ ID NO: 10144 - DNA, 21 bp, synthetic construct
  source 1..21: mol_type = other DNA
gtggatcaggcgtctcgtgct

SEQ ID NO: 10145 - DNA, 21 bp, synthetic construct
  source 1..21: mol_type = other DNA
tcgaagtttcagcgtatggat

SEQ ID NO: 10146 - DNA, 21 bp, synthetic construct
  source 1..21: mol_type = other DNA
atttcgtgtgggacttgtgat

SEQ ID NO: 10147 - DNA, 21 bp, synthetic construct
  source 1..21: mol_type = other DNA
attacttcgactaatggtgcg

SEQ ID NO: 10148 - DNA, 21 bp, synthetic construct
  source 1..21: mol_type = other DNA
acgttgggggggaatgggtgt

SEQ ID NO: 10149 - DNA, 21 bp, synthetic construct
  source 1..21: mol_type = other DNA
gatggtagtagtagtaagtgg

SEQ ID NO: 10150 - DNA, 21 bp, synthetic construct
  source 1..21: mol_type = other DNA
cgggaggggtattcgcattgg

SEQ ID NO: 10151 - DNA, 21 bp, synthetic construct
  source 1..21: mol_type = other DNA
gataggctgccggcgtcgcat

SEQ ID NO: 10152 - DNA, 21 bp, synthetic construct
  source 1..21: mol_type = other DNA
gggttgccggatcgtacgtgg

SEQ ID NO: 10153 - DNA, 21 bp, synthetic construct
  source 1..21: mol_type = other DNA
agtggtttttcggagtctaat

SEQ ID NO: 10154 - DNA, 21 bp, synthetic construct
  source 1..21: mol_type = other DNA
actgtgggggtggagtggact

SEQ ID NO: 10155 - DNA, 21 bp, synthetic construct
  source 1..21: mol_type = other DNA
gggggttctacttctgggtgg

SEQ ID NO: 10156 - DNA, 21 bp, synthetic construct
  source 1..21: mol_type = other DNA
ggggagctttgttgtgttggg

SEQ ID NO: 10157 - DNA, 21 bp, synthetic construct
  source 1..21: mol_type = other DNA
cctttggcttctgggtcttgg

SEQ ID NO: 10158 - DNA, 21 bp, synthetic construct
  source 1..21: mol_type = other DNA
tgtaagccttctggggttatg

SEQ ID NO: 10159 - DNA, 21 bp, synthetic construct
  source 1..21: mol_type = other DNA
tatgcgcgggcgggtgttaat

SEQ ID NO: 10160 - DNA, 21 bp, synthetic construct
  source 1..21: mol_type = other DNA
tatgttaggtctagtgatcag

SEQ ID NO: 10161 - DNA, 21 bp, synthetic construct
  source 1..21: mol_type = other DNA
gtgatgtctgtttcttcgtgg

SEQ ID NO: 10162 - DNA, 21 bp, synthetic construct
  source 1..21: mol_type = other DNA
tcgagtgatctggcttcgggg

SEQ ID NO: 10163 - DNA, 21 bp, synthetic construct
  source 1..21: mol_type = other DNA
gggtgttgtgataagcctatg

SEQ ID NO: 10164 - DNA, 21 bp, synthetic construct
  source 1..21: mol_type = other DNA
gagttggaggggtttcagtat

SEQ ID NO: 10165 - DNA, 21 bp, synthetic construct
  source 1..21: mol_type = other DNA
ttggattatcttccgccggag

SEQ ID NO: 10166 - DNA, 21 bp, synthetic construct
  source 1..21: mol_type = other DNA
tgtcagggtcttcggttgtgt

SEQ ID NO: 10167 - DNA, 21 bp, synthetic construct
  source 1..21: mol_type = other DNA
cgttttgatggtactcctccg

SEQ ID NO: 10168 - DNA, 21 bp, synthetic construct
  source 1..21: mol_type = other DNA
ggtgagagttctcataatctg

SEQ ID NO: 10169 - DNA, 21 bp, synthetic construct
  source 1..21: mol_type = other DNA
cgttctgagtttacggagtat

SEQ ID NO: 10170 - DNA, 21 bp, synthetic construct
  source 1..21: mol_type = other DNA
gcgccggtgagtagggagtgg

SEQ ID NO: 10171 - DNA, 21 bp, synthetic construct
  source 1..21: mol_type = other DNA
gggctgccttgttgttcggcg

SEQ ID NO: 10172 - DNA, 21 bp, synthetic construct
  source 1..21: mol_type = other DNA
tatgggccttcgacttgtaat

SEQ ID NO: 10173 - DNA, 21 bp, synthetic construct
  source 1..21: mol_type = other DNA
attgagtcgcgggagggtatt

SEQ ID NO: 10174 - DNA, 21 bp, synthetic construct
  source 1..21: mol_type = other DNA
gggcattgtggtagggattgt

SEQ ID NO: 10175 - DNA, 21 bp, synthetic construct
  source 1..21: mol_type = other DNA
attgggtcgccgactggtgtt

SEQ ID NO: 10176 - DNA, 21 bp, synthetic construct
  source 1..21: mol_type = other DNA
tggtggagtgctatgcctaat

SEQ ID NO: 10177 - DNA, 21 bp, synthetic construct
  source 1..21: mol_type = other DNA
catggggatcctatgcggtgg

SEQ ID NO: 10178 - DNA, 21 bp, synthetic construct
  source 1..21: mol_type = other DNA
tgtgagcgtaggtgtgtggat

SEQ ID NO: 10179 - DNA, 21 bp, synthetic construct
  source 1..21: mol_type = other DNA
tttgtgcttctgggtgatggg

SEQ ID NO: 10180 - DNA, 21 bp, synthetic construct
  source 1..21: mol_type = other DNA
aagtgtcagggtggttgtgct

SEQ ID NO: 10181 - DNA, 21 bp, synthetic construct
  source 1..21: mol_type = other DNA
attacgagttttaatggggtt

SEQ ID NO: 10182 - DNA, 21 bp, synthetic construct
  source 1..21: mol_type = other DNA
atttcgggtggtggtgctggg

SEQ ID NO: 10183 - DNA, 21 bp, synthetic construct
  source 1..21: mol_type = other DNA
gttaataatagttgtctgacg

SEQ ID NO: 10184 - DNA, 21 bp, synthetic construct
  source 1..21: mol_type = other DNA
ttggatgattattcgatgtat

SEQ ID NO: 10185 - DNA, 21 bp, synthetic construct
  source 1..21: mol_type = other DNA
gctggtggtacttctctttgg

SEQ ID NO: 10186 - DNA, 21 bp, synthetic construct
  source 1..21: mol_type = other DNA
ctggagacttgttgtacggcg

SEQ ID NO: 10187 - DNA, 21 bp, synthetic construct
  source 1..21: mol_type = other DNA
tggtatagtaatattaaggat

SEQ ID NO: 10188 - DNA, 21 bp, synthetic construct
  source 1..21: mol_type = other DNA
agtccttcgaggacgaggcct

SEQ ID NO: 10189 - DNA, 21 bp, synthetic construct
  source 1..21: mol_type = other DNA
tggtttagtaatattcaggcg

SEQ ID NO: 10190 - DNA, 21 bp, synthetic construct
  source 1..21: mol_type = other DNA
tcgggtgcgtatatgagggcg

SEQ ID NO: 10191 - DNA, 21 bp, synthetic construct
  source 1..21: mol_type = other DNA
agggttacttgggttgttggg

SEQ ID NO: 10192 - DNA, 21 bp, synthetic construct
  source 1..21: mol_type = other DNA
tctgcggatgcggttcgttgg

SEQ ID NO: 10193 - DNA, 21 bp, synthetic construct
  source 1..21: mol_type = other DNA
agttgggcgcggagtgtggag

SEQ ID NO: 10194 - DNA, 21 bp, synthetic construct
  source 1..21: mol_type = other DNA
ggttatgctgtttctgagtgt

SEQ ID NO: 10195 - DNA, 21 bp, synthetic construct
  source 1..21: mol_type = other DNA
caagatgtgaagggtaagtgg

SEQ ID NO: 10196 - DNA, 21 bp, synthetic construct
  source 1..21: mol_type = other DNA
tgtaatcagggtggtactgtg

SEQ ID NO: 10197 - DNA, 21 bp, synthetic construct
  source 1..21: mol_type = other DNA
gcttgtaggcatgggggtccg

SEQ ID NO: 10198 - DNA, 21 bp, synthetic construct
  source 1..21: mol_type = other DNA
aatgggcgggggggtgagtgg

SEQ ID NO: 10199 - DNA, 21 bp, synthetic construct
  source 1..21: mol_type = other DNA
aggggtgatgatcgtggttgg

SEQ ID NO: 10200 - DNA, 21 bp, synthetic construct
  source 1..21: mol_type = other DNA
cgggagggtggtcatttgaat

SEQ ID NO: 10201 - DNA, 21 bp, synthetic construct
  source 1..21: mol_type = other DNA
cagtctagtttgacgcaggat

SEQ ID NO: 10202 - DNA, 21 bp, synthetic construct
  source 1..21: mol_type = other DNA
attcagtcgtctagtggtatt

SEQ ID NO: 10203 - DNA, 21 bp, synthetic construct
  source 1..21: mol_type = other DNA
ccgtatgcggtttctcctttg

SEQ ID NO: 10204 - DNA, 21 bp, synthetic construct
  source 1..21: mol_type = other DNA
tctaaggattgttgtattggt

SEQ ID NO: 10205 - DNA, 21 bp, synthetic construct
  source 1..21: mol_type = other DNA
gatcatagtgctggtagtggt

SEQ ID NO: 10206 - DNA, 21 bp, synthetic construct
  source 1..21: mol_type = other DNA
tgtattaatttgtgggtgcag

SEQ ID NO: 10207 - DNA, 21 bp, synthetic construct
  source 1..21: mol_type = other DNA
gggactgttcctccgggttct

SEQ ID NO: 10208 - DNA, 21 bp, synthetic construct
  source 1..21: mol_type = other DNA
aaggttcaggatgcgtatccg

SEQ ID NO: 10209 - DNA, 21 bp, synthetic construct
  source 1..21: mol_type = other DNA
cagtttgcgtattctcgggag

SEQ ID NO: 10210 - DNA, 21 bp, synthetic construct
  source 1..21: mol_type = other DNA
agtgatgggtttcgtattagt

SEQ ID NO: 10211 - DNA, 21 bp, synthetic construct
  source 1..21: mol_type = other DNA
gggagtagggcgatgtatccg

SEQ ID NO: 10212 - DNA, 21 bp, synthetic construct
  source 1..21: mol_type = other DNA
tattcgttggttagtacgaag

SEQ ID NO: 10213 - DNA, 21 bp, synthetic construct
  source 1..21: mol_type = other DNA
tgtgcgccttctatggagaag

SEQ ID NO: 10214 - DNA, 21 bp, synthetic construct
  source 1..21: mol_type = other DNA
ggttctggtccgtgttgtgct

SEQ ID NO: 10215 - DNA, 21 bp, synthetic construct
  source 1..21: mol_type = other DNA
tgtcttgagcgttcgacgctg

SEQ ID NO: 10216 - DNA, 21 bp, synthetic construct
  source 1..21: mol_type = other DNA
aatggttttgatggtagttgg

SEQ ID NO: 10217 - DNA, 21 bp, synthetic construct
  source 1..21: mol_type = other DNA
ccgattgatgagacgtgttcg

SEQ ID NO: 10218 - DNA, 21 bp, synthetic construct
  source 1..21: mol_type = other DNA
tgggatgtggggacttggaat

SEQ ID NO: 10219 - DNA, 21 bp, synthetic construct
  source 1..21: mol_type = other DNA
attatggagtcggcgacgtgg

SEQ ID NO: 10220 - DNA, 21 bp, synthetic construct
  source 1..21: mol_type = other DNA
cgtgatgttgttaatggtact

SEQ ID NO: 10221 - DNA, 21 bp, synthetic construct
  source 1..21: mol_type = other DNA
tttggtggtaatgggctgcag

SEQ ID NO: 10222 - DNA, 21 bp, synthetic construct
  source 1..21: mol_type = other DNA
gggggggatggttcggcttat

SEQ ID NO: 10223 - DNA, 21 bp, synthetic construct
  source 1..21: mol_type = other DNA
ggtggtgggtttgttgcgtat

SEQ ID NO: 10224 - DNA, 21 bp, synthetic construct
  source 1..21: mol_type = other DNA
tttgcgaagtgtagtgtggtg

SEQ ID NO: 10225 - DNA, 21 bp, synthetic construct
  source 1..21: mol_type = other DNA
tctacggattatgtgtcttgg

SEQ ID NO: 10226 - DNA, 21 bp, synthetic construct
  source 1..21: mol_type = other DNA
tgtggtggtgcttgtgcgtct

SEQ ID NO: 10227 - DNA, 21 bp, synthetic construct
  source 1..21: mol_type = other DNA
tgtcagacgagtgataggccg

SEQ ID NO: 10228 - DNA, 21 bp, synthetic construct
  source 1..21: mol_type = other DNA
ctgtgtgctccggctaagtgt

SEQ ID NO: 10229 - DNA, 21 bp, synthetic construct
  source 1..21: mol_type = other DNA
gcgtataggcctctttcgggg

SEQ ID NO: 10230 - DNA, 21 bp, synthetic construct
  source 1..21: mol_type = other DNA
tggttgaaggggcttactgat

SEQ ID NO: 10231 - DNA, 21 bp, synthetic construct
  source 1..21: mol_type = other DNA
gagttgctttcgagtcattgg

SEQ ID NO: 10232 - DNA, 21 bp, synthetic construct
  source 1..21: mol_type = other DNA
acgatgggtcagggggttccg

SEQ ID NO: 10233 - DNA, 21 bp, synthetic construct
  source 1..21: mol_type = other DNA
tgtgcgcctgcgtttagggag

SEQ ID NO: 10234 - DNA, 21 bp, synthetic construct
  source 1..21: mol_type = other DNA
gattggcatgggctgattgct

SEQ ID NO: 10235 - DNA, 21 bp, synthetic construct
  source 1..21: mol_type = other DNA
ttgatgggtagttgttgtccg

SEQ ID NO: 10236 - DNA, 21 bp, synthetic construct
  source 1..21: mol_type = other DNA
aatgggatgacggagcggtgg

SEQ ID NO: 10237 - DNA, 21 bp, synthetic construct
  source 1..21: mol_type = other DNA
tcgatgtgttggcttttggtt

SEQ ID NO: 10238 - DNA, 21 bp, synthetic construct
  source 1..21: mol_type = other DNA
tcgattggggttcatcgtgcg

SEQ ID NO: 10239 - DNA, 21 bp, synthetic construct
  source 1..21: mol_type = other DNA
gattcttctcgtgcgtatccg

SEQ ID NO: 10240 - DNA, 21 bp, synthetic construct
  source 1..21: mol_type = other DNA
ttgtcgcgtgctgcgcatgat

SEQ ID NO: 10241 - DNA, 21 bp, synthetic construct
  source 1..21: mol_type = other DNA
actggtcttgctacgtcgtgt

SEQ ID NO: 10242 - DNA, 21 bp, synthetic construct
  source 1..21: mol_type = other DNA
aattcggattttaaggtgttt

SEQ ID NO: 10243 - DNA, 21 bp, synthetic construct
  source 1..21: mol_type = other DNA
gggtggttgaaggagctgcat

SEQ ID NO: 10244 - DNA, 21 bp, synthetic construct
  source 1..21: mol_type = other DNA
actagtgattataagacgtat

SEQ ID NO: 10245 - DNA, 21 bp, synthetic construct
  source 1..21: mol_type = other DNA
acgtatgataatgtgtttagg

SEQ ID NO: 10246 - DNA, 21 bp, synthetic construct
  source 1..21: mol_type = other DNA
tgtattccttgtgtgccgagg

SEQ ID NO: 10247 - DNA, 21 bp, synthetic construct
  source 1..21: mol_type = other DNA
cattgggatggttcggctgct

SEQ ID NO: 10248 - DNA, 21 bp, synthetic construct
  source 1..21: mol_type = other DNA
acggatgggaagtgttgtatg

SEQ ID NO: 10249 - DNA, 21 bp, synthetic construct
  source 1..21: mol_type = other DNA
tgtattgattcgtgtgttcgt

SEQ ID NO: 10250 - DNA, 21 bp, synthetic construct
  source 1..21: mol_type = other DNA
gtgccgggttatggtgctggt

SEQ ID NO: 10251 - DNA, 21 bp, synthetic construct
  source 1..21: mol_type = other DNA
ccgaatacgactcatggtggt

SEQ ID NO: 10252 - DNA, 21 bp, synthetic construct
  source 1..21: mol_type = other DNA
gcgtcggggcagtcggcgtgg

SEQ ID NO: 10253 - DNA, 21 bp, synthetic construct
  source 1..21: mol_type = other DNA
ggtaggattgctcctcatagt

SEQ ID NO: 10254 - DNA, 21 bp, synthetic construct
  source 1..21: mol_type = other DNA
tgtttgcctgggaatgcgtgt

SEQ ID NO: 10255 - DNA, 21 bp, synthetic construct
  source 1..21: mol_type = other DNA
gattcgttgtcgggtcgtaat

SEQ ID NO: 10256 - DNA, 21 bp, synthetic construct
  source 1..21: mol_type = other DNA
tgtgctggtgagtgtcgggct

SEQ ID NO: 10257 - DNA, 21 bp, synthetic construct
  source 1..21: mol_type = other DNA
agggatggggctgtgtcttgg

SEQ ID NO: 10258 - DNA, 21 bp, synthetic construct
  source 1..21: mol_type = other DNA
tattttgctgggcaggctgag

SEQ ID NO: 10259 - DNA, 21 bp, synthetic construct
  source 1..21: mol_type = other DNA
tgggagggtggtctttctggt

SEQ ID NO: 10260 - DNA, 21 bp, synthetic construct
  source 1..21: mol_type = other DNA
gtggatgctagttgttctgct

SEQ ID NO: 10261 - DNA, 21 bp, synthetic construct
  source 1..21: mol_type = other DNA
catgagactaaggttcctgcg

SEQ ID NO: 10262 - DNA, 21 bp, synthetic construct
  source 1..21: mol_type = other DNA
aagagggatcgtctgtatggg

SEQ ID NO: 10263 - DNA, 21 bp, synthetic construct
  source 1..21: mol_type = other DNA
cgggagacgggtgtggagtgg

SEQ ID NO: 10264 - DNA, 21 bp, synthetic construct
  source 1..21: mol_type = other DNA
gtgccgatgaggggggctgat

SEQ ID NO: 10265 - DNA, 21 bp, synthetic construct
  source 1..21: mol_type = other DNA
ttggttagtaaggttagttgt

SEQ ID NO: 10266 - DNA, 21 bp, synthetic construct
  source 1..21: mol_type = other DNA
cgtgagcctgatgtgcggtat

SEQ ID NO: 10267 - DNA, 21 bp, synthetic construct
  source 1..21: mol_type = other DNA
cttcatcggacttcggttgat

SEQ ID NO: 10268 - DNA, 21 bp, synthetic construct
  source 1..21: mol_type = other DNA
tattggagtgataagatggcg

SEQ ID NO: 10269 - DNA, 21 bp, synthetic construct
  source 1..21: mol_type = other DNA
atgtcgcgtgtgagtaataat

SEQ ID NO: 10270 - DNA, 21 bp, synthetic construct
  source 1..21: mol_type = other DNA
aaggagaatcatgttacttgg

SEQ ID NO: 10271 - DNA, 21 bp, synthetic construct
  source 1..21: mol_type = other DNA
aatttggggtctgctcattgg

SEQ ID NO: 10272 - DNA, 21 bp, synthetic construct
  source 1..21: mol_type = other DNA
ggtctgactgggtgttgtggg

SEQ ID NO: 10273 - DNA, 21 bp, synthetic construct
  source 1..21: mol_type = other DNA
gttccttgtgggcttgttcgt

SEQ ID NO: 10274 - DNA, 21 bp, synthetic construct
  source 1..21: mol_type = other DNA
tattttcagggtgtggctctg

SEQ ID NO: 10275 - DNA, 21 bp, synthetic construct
  source 1..21: mol_type = other DNA
tcttcttcttcttcgacgtgg

SEQ ID NO: 10276 - DNA, 21 bp, synthetic construct
  source 1..21: mol_type = other DNA
tctgtggcgaagatgacgggt

SEQ ID NO: 10277 - DNA, 21 bp, synthetic construct
  source 1..21: mol_type = other DNA
tatgtgaggtctgctttgaat

SEQ ID NO: 10278 - DNA, 21 bp, synthetic construct
  source 1..21: mol_type = other DNA
cataagtggttggatactgat

SEQ ID NO: 10279 - DNA, 21 bp, synthetic construct
  source 1..21: mol_type = other DNA
acggcgggtatgcctggggct

SEQ ID NO: 10280 - DNA, 21 bp, synthetic construct
  source 1..21: mol_type = other DNA
gcgtattatctgaaggattct

SEQ ID NO: 10281 - DNA, 21 bp, synthetic construct
  source 1..21: mol_type = other DNA
gggggggagctgaggacgtgg

SEQ ID NO: 10282 - DNA, 21 bp, synthetic construct
  source 1..21: mol_type = other DNA
ttgggtcatggtacgtgggat

SEQ ID NO: 10283 - DNA, 21 bp, synthetic construct
  source 1..21: mol_type = other DNA
tttccgattagtggttgtggt

SEQ ID NO: 10284 - DNA, 21 bp, synthetic construct
  source 1..21: mol_type = other DNA
tttagtcatgttgataatggt

SEQ ID NO: 10285 - DNA, 21 bp, synthetic construct
  source 1..21: mol_type = other DNA
gagtctagtactcatggggtt

SEQ ID NO: 10286 - DNA, 21 bp, synthetic construct
  source 1..21: mol_type = other DNA
tttgtgtgtgtgatgcttgtt

SEQ ID NO: 10287 - DNA, 21 bp, synthetic construct
  source 1..21: mol_type = other DNA
tattttgagggtaagcagtcg

SEQ ID NO: 10288 - DNA, 21 bp, synthetic construct
  source 1..21: mol_type = other DNA
gagtgggcgcggtctcttatg

SEQ ID NO: 10289 - DNA, 21 bp, synthetic construct
  source 1..21: mol_type = other DNA
aatgatagtacgagtaagtgg

SEQ ID NO: 10290 - DNA, 21 bp, synthetic construct
  source 1..21: mol_type = other DNA
gctgcggattttgtgaggtat

SEQ ID NO: 10291 - DNA, 21 bp, synthetic construct
  source 1..21: mol_type = other DNA
ctttctggtagttgttgtgct

SEQ ID NO: 10292 - DNA, 21 bp, synthetic construct
  source 1..21: mol_type = other DNA
cttttttctggggaggctccg

SEQ ID NO: 10293 - DNA, 21 bp, synthetic construct
  source 1..21: mol_type = other DNA
cggacggctgatagttttgct

SEQ ID NO: 10294 - DNA, 21 bp, synthetic construct
  source 1..21: mol_type = other DNA
tatacgaagcttaatgataat

SEQ ID NO: 10295 - DNA, 21 bp, synthetic construct
  source 1..21: mol_type = other DNA
tgtgagcttccgtgttgtgag

SEQ ID NO: 10296 - DNA, 21 bp, synthetic construct
  source 1..21: mol_type = other DNA
tatattaagtctgatgtgggt

SEQ ID NO: 10297 - DNA, 21 bp, synthetic construct
  source 1..21: mol_type = other DNA
aatttgttgtctttggctcat

SEQ ID NO: 10298 - DNA, 21 bp, synthetic construct
  source 1..21: mol_type = other DNA
ggtagtcatgattcgcattgg

SEQ ID NO: 10299 - DNA, 21 bp, synthetic construct
  source 1..21: mol_type = other DNA
gggagtgcggagagttgtgct

SEQ ID NO: 10300 - DNA, 21 bp, synthetic construct
  source 1..21: mol_type = other DNA
acgattaatgtggctatggcg

SEQ ID NO: 10301 - DNA, 21 bp, synthetic construct
  source 1..21: mol_type = other DNA
attgggtctacgaatggtgtt

SEQ ID NO: 10302 - DNA, 21 bp, synthetic construct
  source 1..21: mol_type = other DNA
ttttggaatggtaattctccg

SEQ ID NO: 10303 - DNA, 21 bp, synthetic construct
  source 1..21: mol_type = other DNA
gctgagatttcgaggagttgg

SEQ ID NO: 10304 - DNA, 21 bp, synthetic construct
  source 1..21: mol_type = other DNA
gttactgatggggttcgttgg

SEQ ID NO: 10305 - DNA, 21 bp, synthetic construct
  source 1..21: mol_type = other DNA
tattttagtgcggtggcggct

SEQ ID NO: 10306 - DNA, 21 bp, synthetic construct
  source 1..21: mol_type = other DNA
ggtgagggtacgagtcattgg

SEQ ID NO: 10307 - DNA, 21 bp, synthetic construct
  source 1..21: mol_type = other DNA
gtgattgatcgttcgctgagt

SEQ ID NO: 10308 - DNA, 21 bp, synthetic construct
  source 1..21: mol_type = other DNA
attaatgagagttctaaggat

SEQ ID NO: 10309 - DNA, 21 bp, synthetic construct
  source 1..21: mol_type = other DNA
gagatgaaggctgtgcatgcg

SEQ ID NO: 10310 - DNA, 21 bp, synthetic construct
  source 1..21: mol_type = other DNA
tctggggggggttctagttgg

SEQ ID NO: 10311 - DNA, 21 bp, synthetic construct
  source 1..21: mol_type = other DNA
agggatgagattaatcattgg

SEQ ID NO: 10312 - DNA, 21 bp, synthetic construct
  source 1..21: mol_type = other DNA
tatgtgcggacggatatgtat

SEQ ID NO: 10313 - DNA, 21 bp, synthetic construct
  source 1..21: mol_type = other DNA
tgtatgagttcgccgtgttct

SEQ ID NO: 10314 - DNA, 21 bp, synthetic construct
  source 1..21: mol_type = other DNA
tgggggagtgtgtgttgtgct

SEQ ID NO: 10315 - DNA, 21 bp, synthetic construct
  source 1..21: mol_type = other DNA
cgtgatgtggaggtttttcct

SEQ ID NO: 10316 - DNA, 21 bp, synthetic construct
  source 1..21: mol_type = other DNA
gttacgtttgggaatccgctt

SEQ ID NO: 10317 - DNA, 21 bp, synthetic construct
  source 1..21: mol_type = other DNA
ttgtgtcggaattatctgact

SEQ ID NO: 10318 - DNA, 21 bp, synthetic construct
  source 1..21: mol_type = other DNA
cctatgggtacggctctgtgg

SEQ ID NO: 10319 - DNA, 21 bp, synthetic construct
  source 1..21: mol_type = other DNA
ttttttacgcataagatggat

SEQ ID NO: 10320 - DNA, 21 bp, synthetic construct
  source 1..21: mol_type = other DNA
gtgcgtgtgatgagttcggag

SEQ ID NO: 10321 - DNA, 21 bp, synthetic construct
  source 1..21: mol_type = other DNA
ggttctcatgttagttcgtgg

SEQ ID NO: 10322 - DNA, 21 bp, synthetic construct
  source 1..21: mol_type = other DNA
ggggcttcggatagtaggtgg

SEQ ID NO: 10323 - DNA, 21 bp, synthetic construct
  source 1..21: mol_type = other DNA
ggggatgggtctagtctgtgg

SEQ ID NO: 10324 - DNA, 21 bp, synthetic construct
  source 1..21: mol_type = other DNA
tttactcgtctgcatgcggat

SEQ ID NO: 10325 - DNA, 21 bp, synthetic construct
  source 1..21: mol_type = other DNA
agggatgggaattcggcttat

SEQ ID NO: 10326 - DNA, 21 bp, synthetic construct
  source 1..21: mol_type = other DNA
aggcttagtacgaatggtatt

SEQ ID NO: 10327 - DNA, 21 bp, synthetic construct
  source 1..21: mol_type = other DNA
agtcgtagtggttcggttgtt

SEQ ID NO: 10328 - DNA, 21 bp, synthetic construct
  source 1..21: mol_type = other DNA
ttgcatcggttgtcggagggt

SEQ ID NO: 10329 - DNA, 21 bp, synthetic construct
  source 1..21: mol_type = other DNA
actttggctgatcgtggttgg

SEQ ID NO: 10330 - DNA, 21 bp, synthetic construct
  source 1..21: mol_type = other DNA
gttgggattgcttcggaggcg

SEQ ID NO: 10331 - DNA, 21 bp, synthetic construct
  source 1..21: mol_type = other DNA
acggcgggtatgattttgggt

SEQ ID NO: 10332 - DNA, 21 bp, synthetic construct
  source 1..21: mol_type = other DNA
ccgttgtatgatgggcctcgg

SEQ ID NO: 10333 - DNA, 21 bp, synthetic construct
  source 1..21: mol_type = other DNA
aatgatggttcgagttcttat

SEQ ID NO: 10334 - DNA, 21 bp, synthetic construct
  source 1..21: mol_type = other DNA
tttactggtacgtctgggacg

SEQ ID NO: 10335 - DNA, 21 bp, synthetic construct
  source 1..21: mol_type = other DNA
gatttgtcgaaggcgatgtgg

SEQ ID NO: 10336 - DNA, 21 bp, synthetic construct
  source 1..21: mol_type = other DNA
ctgtctgttgtttgttgtgcg

SEQ ID NO: 10337 - DNA, 21 bp, synthetic construct
  source 1..21: mol_type = other DNA
tttgatgggaattctgcttat

SEQ ID NO: 10338 - DNA, 21 bp, synthetic construct
  source 1..21: mol_type = other DNA
actatgagttcgtcggcttgg

SEQ ID NO: 10339 - DNA, 21 bp, synthetic construct
  source 1..21: mol_type = other DNA
tggccgtcgggggggcagggg

SEQ ID NO: 10340 - DNA, 21 bp, synthetic construct
  source 1..21: mol_type = other DNA
tatagtcgtggtggtcctgat

SEQ ID NO: 10341 - DNA, 21 bp, synthetic construct
  source 1..21: mol_type = other DNA
cctagtcgtgcggaggcggat

SEQ ID NO: 10342 - DNA, 21 bp, synthetic construct
  source 1..21: mol_type = other DNA
tttgagggtcagtataaggtg

SEQ ID NO: 10343 - DNA, 21 bp, synthetic construct
  source 1..21: mol_type = other DNA
tgtcttgaggttaagattgct

SEQ ID NO: 10344 - DNA, 21 bp, synthetic construct
  source 1..21: mol_type = other DNA
gcttcttcgctgattattttg

SEQ ID NO: 10345 - DNA, 21 bp, synthetic construct
  source 1..21: mol_type = other DNA
tgtggtggtagttgtgcggcg

SEQ ID NO: 10346 - DNA, 21 bp, synthetic construct
  source 1..21: mol_type = other DNA
tggacgaaggatgctgcttgg

SEQ ID NO: 10347 - DNA, 21 bp, synthetic construct
  source 1..21: mol_type = other DNA
gatcggggttttttgcagagt

SEQ ID NO: 10348 - DNA, 21 bp, synthetic construct
  source 1..21: mol_type = other DNA
gcgcttacttctcagtcttgg

SEQ ID NO: 10349 - DNA, 21 bp, synthetic construct
  source 1..21: mol_type = other DNA
catggtagtggtatgatgatt

SEQ ID NO: 10350 - DNA, 21 bp, synthetic construct
  source 1..21: mol_type = other DNA
tgggctaggagtagtagtggt

SEQ ID NO: 10351 - DNA, 21 bp, synthetic construct
  source 1..21: mol_type = other DNA
gtgcctacgaagggtattggg

SEQ ID NO: 10352 - DNA, 21 bp, synthetic construct
  source 1..21: mol_type = other DNA
acgctgttgaattcgcctaat

SEQ ID NO: 10353 - DNA, 21 bp, synthetic construct
  source 1..21: mol_type = other DNA
ttggcttcgcgggttactgct

SEQ ID NO: 10354 - DNA, 21 bp, synthetic construct
  source 1..21: mol_type = other DNA
tatgcgcggctgggttatgat

SEQ ID NO: 10355 - DNA, 21 bp, synthetic construct
  source 1..21: mol_type = other DNA
tgtggtcatagttgtgtgtcg

SEQ ID NO: 10356 - DNA, 21 bp, synthetic construct
  source 1..21: mol_type = other DNA
gttaataaggtgtgtgctgat

SEQ ID NO: 10357 - DNA, 21 bp, synthetic construct
  source 1..21: mol_type = other DNA
gatggtcttagtgggtctgat

SEQ ID NO: 10358 - DNA, 21 bp, synthetic construct
  source 1..21: mol_type = other DNA
tattttagtggtagtgtgttt

SEQ ID NO: 10359 - DNA, 21 bp, synthetic construct
  source 1..21: mol_type = other DNA
atgtggagtgagaatcatggg

SEQ ID NO: 10360 - DNA, 21 bp, synthetic construct
  source 1..21: mol_type = other DNA
gtgaatgtggttccgacgctg

SEQ ID NO: 10361 - DNA, 21 bp, synthetic construct
  source 1..21: mol_type = other DNA
cggactcttacgcaggggact

SEQ ID NO: 10362 - DNA, 21 bp, synthetic construct
  source 1..21: mol_type = other DNA
gtgttggggagtagtaattgg

SEQ ID NO: 10363 - DNA, 21 bp, synthetic construct
  source 1..21: mol_type = other DNA
tcggtggtgggttatgggagt

SEQ ID NO: 10364 - DNA, 21 bp, synthetic construct
  source 1..21: mol_type = other DNA
gatctgcggggtcaggctgcg

SEQ ID NO: 10365 - DNA, 21 bp, synthetic construct
  source 1..21: mol_type = other DNA
ggtgatggtagtgtgaggtat

SEQ ID NO: 10366 - DNA, 21 bp, synthetic construct
  source 1..21: mol_type = other DNA
gcttttcagactagtatgatg

SEQ ID NO: 10367 - DNA, 21 bp, synthetic construct
  source 1..21: mol_type = other DNA
gattatggggggcgtcttttg

SEQ ID NO: 10368 - DNA, 21 bp, synthetic construct
  source 1..21: mol_type = other DNA
catcctccgttgcttgttgtg

SEQ ID NO: 10369 - DNA, 21 bp, synthetic construct
  source 1..21: mol_type = other DNA
tatttttctaatattccgacg

SEQ ID NO: 10370 - DNA, 21 bp, synthetic construct
  source 1..21: mol_type = other DNA
agggatcctatgacgtcgtat

SEQ ID NO: 10371 - DNA, 21 bp, synthetic construct
  source 1..21: mol_type = other DNA
gtgtctgagtttactacgtat

SEQ ID NO: 10372 - DNA, 21 bp, synthetic construct
  source 1..21: mol_type = other DNA
tggcgtaatccggatattgtg

SEQ ID NO: 10373 - DNA, 21 bp, synthetic construct
  source 1..21: mol_type = other DNA
atggttatgcttcagagtgcg

SEQ ID NO: 10374 - DNA, 21 bp, synthetic construct
  source 1..21: mol_type = other DNA
tttggggagcttagggagggg

SEQ ID NO: 10375 - DNA, 21 bp, synthetic construct
  source 1..21: mol_type = other DNA
gattatgagtctagggtgtgg

SEQ ID NO: 10376 - DNA, 21 bp, synthetic construct
  source 1..21: mol_type = other DNA
gcgccgaatacggtgagttgg

SEQ ID NO: 10377 - DNA, 21 bp, synthetic construct
  source 1..21: mol_type = other DNA
cgtgaggtggctgtgtcgtgg

SEQ ID NO: 10378 - DNA, 21 bp, synthetic construct
  source 1..21: mol_type = other DNA
actgtgaataatgtttatcat

SEQ ID NO: 10379 - DNA, 21 bp, synthetic construct
  source 1..21: mol_type = other DNA
gtggagagtgtgaatgggatt

SEQ ID NO: 10380 - DNA, 21 bp, synthetic construct
  source 1..21: mol_type = other DNA
attgctactttgggtattggt

SEQ ID NO: 10381 - DNA, 21 bp, synthetic construct
  source 1..21: mol_type = other DNA
ggggatgtggctgggttttcg

SEQ ID NO: 10382 - DNA, 21 bp, synthetic construct
  source 1..21: mol_type = other DNA
tatagtaagctggatcctctt

SEQ ID NO: 10383 - DNA, 21 bp, synthetic construct
  source 1..21: mol_type = other DNA
tcgacgccttcgtctcctacg

SEQ ID NO: 10384 - DNA, 21 bp, synthetic construct
  source 1..21: mol_type = other DNA
ggttgttgtcctatggaggct

SEQ ID NO: 10385 - DNA, 21 bp, synthetic construct
  source 1..21: mol_type = other DNA
ggtagtaatctgttgcctgtg

SEQ ID NO: 10386 - DNA, 21 bp, synthetic construct
  source 1..21: mol_type = other DNA
cctggggaggtgcgggagtgg

SEQ ID NO: 10387 - DNA, 21 bp, synthetic construct
  source 1..21: mol_type = other DNA
ttttatacgggtgtgtcggct

SEQ ID NO: 10388 - DNA, 21 bp, synthetic construct
  source 1..21: mol_type = other DNA
tctgatcctctgagtcggccg

SEQ ID NO: 10389 - DNA, 21 bp, synthetic construct
  source 1..21: mol_type = other DNA
cttcatcggctgcaggatgat

SEQ ID NO: 10390 - DNA, 21 bp, synthetic construct
  source 1..21: mol_type = other DNA
ggtgtggattctgtgaagtgg

SEQ ID NO: 10391 - DNA, 21 bp, synthetic construct
  source 1..21: mol_type = other DNA
agtgggtcgacttctacgtgg

SEQ ID NO: 10392 - DNA, 21 bp, synthetic construct
  source 1..21: mol_type = other DNA
aagtttgataatagtggtagt

SEQ ID NO: 10393 - DNA, 21 bp, synthetic construct
  source 1..21: mol_type = other DNA
tatccgagtggtggggcgggg

SEQ ID NO: 10394 - DNA, 21 bp, synthetic construct
  source 1..21: mol_type = other DNA
tgtcgttgttttaggggtatt

SEQ ID NO: 10395 - DNA, 21 bp, synthetic construct
  source 1..21: mol_type = other DNA
gatgctgggttggctgaggtg

SEQ ID NO: 10396 - DNA, 21 bp, synthetic construct
  source 1..21: mol_type = other DNA
aagtttgataatactgggagt

SEQ ID NO: 10397 - DNA, 21 bp, synthetic construct
  source 1..21: mol_type = other DNA
tgtgcgccgtatcttcatgag

SEQ ID NO: 10398 - DNA, 21 bp, synthetic construct
  source 1..21: mol_type = other DNA
tttgctgcgtatgtgtctact

SEQ ID NO: 10399 - DNA, 21 bp, synthetic construct
  source 1..21: mol_type = other DNA
gatgttggtttgcggccttgg

SEQ ID NO: 10400 - DNA, 21 bp, synthetic construct
  source 1..21: mol_type = other DNA
tattatcaggggactgttgat

SEQ ID NO: 10401 - DNA, 21 bp, synthetic construct
  source 1..21: mol_type = other DNA
ggtaatagggatgctgtggag

SEQ ID NO: 10402 - DNA, 21 bp, synthetic construct
  source 1..21: mol_type = other DNA
tgtggtggtccgtgtcagtct

SEQ ID NO: 10403 - DNA, 21 bp, synthetic construct
  source 1..21: mol_type = other DNA
gcttcggtggcgggggttcgt

SEQ ID NO: 10404 - DNA, 21 bp, synthetic construct
  source 1..21: mol_type = other DNA
aatgttagtcatgagcgtggt

SEQ ID NO: 10405 - DNA, 21 bp, synthetic construct
  source 1..21: mol_type = other DNA
attaagatgacgggtagggat

SEQ ID NO: 10406 - DNA, 21 bp, synthetic construct
  source 1..21: mol_type = other DNA
ggtgggactgatcgtacttgg

SEQ ID NO: 10407 - DNA, 21 bp, synthetic construct
  source 1..21: mol_type = other DNA
tgttcgccgatgagggattgt

SEQ ID NO: 10408 - DNA, 21 bp, synthetic construct
  source 1..21: mol_type = other DNA
gatgtgtatggtgggtttgcg

SEQ ID NO: 10409 - DNA, 21 bp, synthetic construct
  source 1..21: mol_type = other DNA
aatatgggtgatcgggtgtgg

SEQ ID NO: 10410 - DNA, 21 bp, synthetic construct
  source 1..21: mol_type = other DNA
gaggggccgtcgcgtgggtgg

SEQ ID NO: 10411 - DNA, 21 bp, synthetic construct
  source 1..21: mol_type = other DNA
ggttatggttctcctcattct

SEQ ID NO: 10412 - DNA, 21 bp, synthetic construct
  source 1..21: mol_type = other DNA
gattgtcgtgctgcttgtaag

SEQ ID NO: 10413 - DNA, 21 bp, synthetic construct
  source 1..21: mol_type = other DNA
ttgcctcctctgtatcaggtt

SEQ ID NO: 10414 - DNA, 21 bp, synthetic construct
  source 1..21: mol_type = other DNA
gcgacggctgtgccgaagact

SEQ ID NO: 10415 - DNA, 21 bp, synthetic construct
  source 1..21: mol_type = other DNA
acgcctgttaagggtgcgatg

SEQ ID NO: 10416 - DNA, 21 bp, synthetic construct
  source 1..21: mol_type = other DNA
agtgatggtagttctaattgg

SEQ ID NO: 10417 - DNA, 21 bp, synthetic construct
  source 1..21: mol_type = other DNA
ggtcaggtggcggatggttgg

SEQ ID NO: 10418 - DNA, 21 bp, synthetic construct
  source 1..21: mol_type = other DNA
gggagtggtagtagtccttgg

SEQ ID NO: 10419 - DNA, 21 bp, synthetic construct
  source 1..21: mol_type = other DNA
cttgggcatgattattttccg

SEQ ID NO: 10420 - DNA, 21 bp, synthetic construct
  source 1..21: mol_type = other DNA
cttgtgggtcttaagcagttg

SEQ ID NO: 10421 - DNA, 21 bp, synthetic construct
  source 1..21: mol_type = other DNA
agtaaggattggtcgggtagt

SEQ ID NO: 10422 - DNA, 21 bp, synthetic construct
  source 1..21: mol_type = other DNA
tatgttcggtatgatactggg

SEQ ID NO: 10423 - DNA, 21 bp, synthetic construct
  source 1..21: mol_type = other DNA
gaggcgcataatcctgtgtat

SEQ ID NO: 10424 - DNA, 21 bp, synthetic construct
  source 1..21: mol_type = other DNA
attagtgatgagcggtgttgt

SEQ ID NO: 10425 - DNA, 21 bp, synthetic construct
  source 1..21: mol_type = other DNA
ggggttgattataatactggg

SEQ ID NO: 10426 - DNA, 21 bp, synthetic construct
  source 1..21: mol_type = other DNA
cgtgatgatagttcttcgtgg

SEQ ID NO: 10427 - DNA, 21 bp, synthetic construct
  source 1..21: mol_type = other DNA
gttcatgagtcggtgcattgg

SEQ ID NO: 10428 - DNA, 21 bp, synthetic construct
  source 1..21: mol_type = other DNA
gtgtgggctgatcattcttgg

SEQ ID NO: 10429 - DNA, 21 bp, synthetic construct
  source 1..21: mol_type = other DNA
tggaagatgggttgtgctgat

SEQ ID NO: 10430 - DNA, 21 bp, synthetic construct
  source 1..21: mol_type = other DNA
actcctcagtcgccgatgttt

SEQ ID NO: 10431 - DNA, 21 bp, synthetic construct
  source 1..21: mol_type = other DNA
cctttgtcttcgaatttgtgg

SEQ ID NO: 10432 - DNA, 21 bp, synthetic construct
  source 1..21: mol_type = other DNA
aatggtgatgatcagtctatg

SEQ ID NO: 10433 - DNA, 21 bp, synthetic construct
  source 1..21: mol_type = other DNA
gggcctccggagagtatgatt

SEQ ID NO: 10434 - DNA, 21 bp, synthetic construct
  source 1..21: mol_type = other DNA
gtggatcgtgaggcgactgct

SEQ ID NO: 10435 - DNA, 21 bp, synthetic construct
  source 1..21: mol_type = other DNA
tgttgtagtccgcagaaggtt

SEQ ID NO: 10436 - DNA, 21 bp, synthetic construct
  source 1..21: mol_type = other DNA
acgagtagtgcttgttgttcg

SEQ ID NO: 10437 - DNA, 21 bp, synthetic construct
  source 1..21: mol_type = other DNA
ggttggaattcgacgcttggg

SEQ ID NO: 10438 - DNA, 21 bp, synthetic construct
  source 1..21: mol_type = other DNA
acgaattatggtgttggtgcg

SEQ ID NO: 10439 - DNA, 21 bp, synthetic construct
  source 1..21: mol_type = other DNA
tgtgggaagcagacttgtatt

SEQ ID NO: 10440 - DNA, 21 bp, synthetic construct
  source 1..21: mol_type = other DNA
gggaatgaggggagtagtctt

SEQ ID NO: 10441 - DNA, 21 bp, synthetic construct
  source 1..21: mol_type = other DNA
tttgatggtactgttccgttt

SEQ ID NO: 10442 - DNA, 21 bp, synthetic construct
  source 1..21: mol_type = other DNA
tgtgggagttctagtaattgt

SEQ ID NO: 10443 - DNA, 21 bp, synthetic construct
  source 1..21: mol_type = other DNA
tggttgaaggattctacgatt

SEQ ID NO: 10444 - DNA, 21 bp, synthetic construct
  source 1..21: mol_type = other DNA
ggggggggttcgtcggggtgg

SEQ ID NO: 10445 - DNA, 21 bp, synthetic construct
  source 1..21: mol_type = other DNA
cgtttggaggttggtagttgg

SEQ ID NO: 10446 - DNA, 21 bp, synthetic construct
  source 1..21: mol_type = other DNA
gctcctggtcatgttgggtgg

SEQ ID NO: 10447 - DNA, 21 bp, synthetic construct
  source 1..21: mol_type = other DNA
ttgcatcgggctggtattgat

SEQ ID NO: 10448 - DNA, 21 bp, synthetic construct
  source 1..21: mol_type = other DNA
cagctttatgatgctggggtg

SEQ ID NO: 10449 - DNA, 21 bp, synthetic construct
  source 1..21: mol_type = other DNA
cctatgggtgctaatacttgg

SEQ ID NO: 10450 - DNA, 21 bp, synthetic construct
  source 1..21: mol_type = other DNA
ttggatgcttttagtggttgg

SEQ ID NO: 10451 - DNA, 21 bp, synthetic construct
  source 1..21: mol_type = other DNA
tatgttcgttttgaggatcct

SEQ ID NO: 10452 - DNA, 21 bp, synthetic construct
  source 1..21: mol_type = other DNA
tcggtgacgtgtactttgcct

SEQ ID NO: 10453 - DNA, 21 bp, synthetic construct
  source 1..21: mol_type = other DNA
aaggattcttttacgagttgg

SEQ ID NO: 10454 - DNA, 21 bp, synthetic construct
  source 1..21: mol_type = other DNA
ggtgggcctgcgactacgggg

SEQ ID NO: 10455 - DNA, 21 bp, synthetic construct
  source 1..21: mol_type = other DNA
gtgtattcgtctaatggtgtg

SEQ ID NO: 10456 - DNA, 21 bp, synthetic construct
  source 1..21: mol_type = other DNA
acgtctggtccttcgaggctg

SEQ ID NO: 10457 - DNA, 21 bp, synthetic construct
  source 1..21: mol_type = other DNA
aatcgtatggatggtgatccg

SEQ ID NO: 10458 - DNA, 21 bp, synthetic construct
  source 1..21: mol_type = other DNA
agtaattcgacttctgggtgg

SEQ ID NO: 10459 - DNA, 21 bp, synthetic construct
  source 1..21: mol_type = other DNA
aatgtgcatagtgagccttgt

SEQ ID NO: 10460 - DNA, 21 bp, synthetic construct
  source 1..21: mol_type = other DNA
tatgcgggtgagatgattgtg

SEQ ID NO: 10461 - DNA, 21 bp, synthetic construct
  source 1..21: mol_type = other DNA
tattggtcgggtcagggggcg

SEQ ID NO: 10462 - DNA, 21 bp, synthetic construct
  source 1..21: mol_type = other DNA
ccggctaatggggttgttggt

SEQ ID NO: 10463 - DNA, 21 bp, synthetic construct
  source 1..21: mol_type = other DNA
ttgtcggctcatacgacgcct

SEQ ID NO: 10464 - DNA, 21 bp, synthetic construct
  source 1..21: mol_type = other DNA
gtgtcggattatgcttcgtat

SEQ ID NO: 10465 - DNA, 21 bp, synthetic construct
  source 1..21: mol_type = other DNA
gattggactggggttatggcg

SEQ ID NO: 10466 - DNA, 21 bp, synthetic construct
  source 1..21: mol_type = other DNA
gcttatgctccggaggtttcg

SEQ ID NO: 10467 - DNA, 21 bp, synthetic construct
  source 1..21: mol_type = other DNA
tatgatcctactttgacgaat

SEQ ID NO: 10468 - DNA, 21 bp, synthetic construct
  source 1..21: mol_type = other DNA
ttgctgacgccggcgtgtgat

SEQ ID NO: 10469 - DNA, 21 bp, synthetic construct
  source 1..21: mol_type = other DNA
attgcgcatttgggttctggt

SEQ ID NO: 10470 - DNA, 21 bp, synthetic construct
  source 1..21: mol_type = other DNA
agtctggatactgtgcgttgg

SEQ ID NO: 10471 - DNA, 21 bp, synthetic construct
  source 1..21: mol_type = other DNA
tggttgattgctgaggctgat

SEQ ID NO: 10472 - DNA, 21 bp, synthetic construct
  source 1..21: mol_type = other DNA
ggtatgagtaattctagttgg

SEQ ID NO: 10473 - DNA, 21 bp, synthetic construct
  source 1..21: mol_type = other DNA
ggggaggatcaggttcgttgg

SEQ ID NO: 10474 - DNA, 21 bp, synthetic construct
  source 1..21: mol_type = other DNA
cgtccgggtgggtcggctggt

SEQ ID NO: 10475 - DNA, 21 bp, synthetic construct
  source 1..21: mol_type = other DNA
gcgtgttctgattgtatggtt

SEQ ID NO: 10476 - DNA, 21 bp, synthetic construct
  source 1..21: mol_type = other DNA
tgtggtattgggtcgtgtcat

SEQ ID NO: 10477 - DNA, 21 bp, synthetic construct
  source 1..21: mol_type = other DNA
gttggttcgattactcagtgg

SEQ ID NO: 10478 - DNA, 21 bp, synthetic construct
  source 1..21: mol_type = other DNA
ggtgctcatacgagtacgtgg

SEQ ID NO: 10479 - DNA, 21 bp, synthetic construct
  source 1..21: mol_type = other DNA
acggttaagggggctgcgttg

SEQ ID NO: 10480 - DNA, 21 bp, synthetic construct
  source 1..21: mol_type = other DNA
cagcctgagtctcgttcgtgg

SEQ ID NO: 10481 - DNA, 21 bp, synthetic construct
  source 1..21: mol_type = other DNA
ggtgcttcgtcgtcgtcgtgg

SEQ ID NO: 10482 - DNA, 21 bp, synthetic construct
  source 1..21: mol_type = other DNA
tgtggggggtgtgttggtgtg

SEQ ID NO: 10483 - DNA, 21 bp, synthetic construct
  source 1..21: mol_type = other DNA
gtggttcggtgtgatgggtgt

SEQ ID NO: 10484 - DNA, 21 bp, synthetic construct
  source 1..21: mol_type = other DNA
atggaggggcggtgttgtagt

SEQ ID NO: 10485 - DNA, 21 bp, synthetic construct
  source 1..21: mol_type = other DNA
ctggtgggtctgaagtctctt

SEQ ID NO: 10486 - DNA, 21 bp, synthetic construct
  source 1..21: mol_type = other DNA
ggtgatggtgtttcgctttgg

SEQ ID NO: 10487 - DNA, 21 bp, synthetic construct
  source 1..21: mol_type = other DNA
tcggttgctccgctgtgtgcg

SEQ ID NO: 10488 - DNA, 21 bp, synthetic construct
  source 1..21: mol_type = other DNA
tattctaagcttgatgcgacg

SEQ ID NO: 10489 - DNA, 21 bp, synthetic construct
  source 1..21: mol_type = other DNA
gtttgggatgctatgggggtt

SEQ ID NO: 10490 - DNA, 21 bp, synthetic construct
  source 1..21: mol_type = other DNA
atgcctgctctggatcttggt

SEQ ID NO: 10491 - DNA, 21 bp, synthetic construct
  source 1..21: mol_type = other DNA
ctttgggatggtcagagtgcg

SEQ ID NO: 10492 - DNA, 21 bp, synthetic construct
  source 1..21: mol_type = other DNA
actgcgtggttgaagcaggat

SEQ ID NO: 10493 - DNA, 21 bp, synthetic construct
  source 1..21: mol_type = other DNA
catttggcgagtgcgaattgg

SEQ ID NO: 10494 - DNA, 21 bp, synthetic construct
  source 1..21: mol_type = other DNA
tatgttcggagttctaatgag

SEQ ID NO: 10495 - DNA, 21 bp, synthetic construct
  source 1..21: mol_type = other DNA
ttgagttcttctaatgggcgt

SEQ ID NO: 10496 - DNA, 21 bp, synthetic construct
  source 1..21: mol_type = other DNA
gctatggctgatactacgtgg

SEQ ID NO: 10497 - DNA, 21 bp, synthetic construct
  source 1..21: mol_type = other DNA
tgtggtgtgatggagaagtgt

SEQ ID NO: 10498 - DNA, 21 bp, synthetic construct
  source 1..21: mol_type = other DNA
gtgagtagtacgtgtacggct

SEQ ID NO: 10499 - DNA, 21 bp, synthetic construct
  source 1..21: mol_type = other DNA
atttgtgcttctaggctttcg

SEQ ID NO: 10500 - DNA, 21 bp, synthetic construct
  source 1..21: mol_type = other DNA
tcgagtcagtttgtttcgtat

SEQ ID NO: 10501 - DNA, 21 bp, synthetic construct
  source 1..21: mol_type = other DNA
tctgtttctcatgagggtggt

SEQ ID NO: 10502 - DNA, 21 bp, synthetic construct
  source 1..21: mol_type = other DNA
ctttggaatggggtttcgtcg

SEQ ID NO: 10503 - DNA, 21 bp, synthetic construct
  source 1..21: mol_type = other DNA
tttgattcgtctaatggtcgt

SEQ ID NO: 10504 - DNA, 21 bp, synthetic construct
  source 1..21: mol_type = other DNA
acggagagttctcaggggcgg

SEQ ID NO: 10505 - DNA, 21 bp, synthetic construct
  source 1..21: mol_type = other DNA
tattttcatggtttgcctgat

SEQ ID NO: 10506 - DNA, 21 bp, synthetic construct
  source 1..21: mol_type = other DNA
gttggttcttcttcttcgtgg

SEQ ID NO: 10507 - DNA, 21 bp, synthetic construct
  source 1..21: mol_type = other DNA
gtggtgggttgtagtccggat

SEQ ID NO: 10508 - DNA, 21 bp, synthetic construct
  source 1..21: mol_type = other DNA
gcttcggggaatagttcttgg

SEQ ID NO: 10509 - DNA, 21 bp, synthetic construct
  source 1..21: mol_type = other DNA
ttgaagaatggtactcctgct

SEQ ID NO: 10510 - DNA, 21 bp, synthetic construct
  source 1..21: mol_type = other DNA
atggaggggaaggggtgggat

SEQ ID NO: 10511 - DNA, 21 bp, synthetic construct
  source 1..21: mol_type = other DNA
catcctccggattatagtgcg

SEQ ID NO: 10512 - DNA, 21 bp, synthetic construct
  source 1..21: mol_type = other DNA
gagactaggcttggtgcgggg

SEQ ID NO: 10513 - DNA, 21 bp, synthetic construct
  source 1..21: mol_type = other DNA
ttgacttatgatgctggtatt

SEQ ID NO: 10514 - DNA, 21 bp, synthetic construct
  source 1..21: mol_type = other DNA
ctgccgagtgcgtatccgttt

SEQ ID NO: 10515 - DNA, 21 bp, synthetic construct
  source 1..21: mol_type = other DNA
gggggtcctacttctcagtgg

SEQ ID NO: 10516 - DNA, 21 bp, synthetic construct
  source 1..21: mol_type = other DNA
attactggtgtgtcgggtaat

SEQ ID NO: 10517 - DNA, 21 bp, synthetic construct
  source 1..21: mol_type = other DNA
aattgtagtattaagccttgt

SEQ ID NO: 10518 - DNA, 21 bp, synthetic construct
  source 1..21: mol_type = other DNA
gatagggctcctgcttctgcg

SEQ ID NO: 10519 - DNA, 21 bp, synthetic construct
  source 1..21: mol_type = other DNA
gtggataggggttcgacgatt

SEQ ID NO: 10520 - DNA, 21 bp, synthetic construct
  source 1..21: mol_type = other DNA
tatgtgcgtactgataagggg

SEQ ID NO: 10521 - DNA, 21 bp, synthetic construct
  source 1..21: mol_type = other DNA
ggggttgatgctggtgtgagg

SEQ ID NO: 10522 - DNA, 21 bp, synthetic construct
  source 1..21: mol_type = other DNA
gatcagtcgccggtgaagtgg

SEQ ID NO: 10523 - DNA, 21 bp, synthetic construct
  source 1..21: mol_type = other DNA
ccttatgcgcagagtccgatg

SEQ ID NO: 10524 - DNA, 21 bp, synthetic construct
  source 1..21: mol_type = other DNA
tgtcaggatgggtctggggct

SEQ ID NO: 10525 - DNA, 21 bp, synthetic construct
  source 1..21: mol_type = other DNA
aagactgatcatgtttttcct

SEQ ID NO: 10526 - DNA, 21 bp, synthetic construct
  source 1..21: mol_type = other DNA
ggtggggattattcttcgttt

SEQ ID NO: 10527 - DNA, 21 bp, synthetic construct
  source 1..21: mol_type = other DNA
gtttgtcgtcagagttgtgag

SEQ ID NO: 10528 - DNA, 21 bp, synthetic construct
  source 1..21: mol_type = other DNA
tggagtgctattacggataat

SEQ ID NO: 10529 - DNA, 21 bp, synthetic construct
  source 1..21: mol_type = other DNA
ggtgggggttcggcttcgtgg

SEQ ID NO: 10530 - DNA, 21 bp, synthetic construct
  source 1..21: mol_type = other DNA
agggaggattctaggtcttgg

SEQ ID NO: 10531 - DNA, 21 bp, synthetic construct
  source 1..21: mol_type = other DNA
ttggctactggtgatggtcct

SEQ ID NO: 10532 - DNA, 21 bp, synthetic construct
  source 1..21: mol_type = other DNA
gtttcgcatggttctgctggg

SEQ ID NO: 10533 - DNA, 21 bp, synthetic construct
  source 1..21: mol_type = other DNA
gcgtctgagacgtctacgtgg

SEQ ID NO: 10534 - DNA, 21 bp, synthetic construct
  source 1..21: mol_type = other DNA
attatgttgccgggtcatggg

SEQ ID NO: 10535 - DNA, 21 bp, synthetic construct
  source 1..21: mol_type = other DNA
ttgagtgtggctgggcggatg

SEQ ID NO: 10536 - DNA, 21 bp, synthetic construct
  source 1..21: mol_type = other DNA
aagtgggattcgcaggggact

SEQ ID NO: 10537 - DNA, 21 bp, synthetic construct
  source 1..21: mol_type = other DNA
gggttggattctcgtgctgct

SEQ ID NO: 10538 - DNA, 21 bp, synthetic construct
  source 1..21: mol_type = other DNA
attatgaattctggggtgtgg

SEQ ID NO: 10539 - DNA, 21 bp, synthetic construct
  source 1..21: mol_type = other DNA
ttttctgcgcctaatgctttt

SEQ ID NO: 10540 - DNA, 21 bp, synthetic construct
  source 1..21: mol_type = other DNA
ggtagtgggcagcatggtgcg

SEQ ID NO: 10541 - DNA, 21 bp, synthetic construct
  source 1..21: mol_type = other DNA
tgtaatgagtgtcctcatcct

SEQ ID NO: 10542 - DNA, 21 bp, synthetic construct
  source 1..21: mol_type = other DNA
agttttaatcctaagtgtgag

SEQ ID NO: 10543 - DNA, 21 bp, synthetic construct
  source 1..21: mol_type = other DNA
agtggtgtgacggatgcgcgt

SEQ ID NO: 10544 - DNA, 21 bp, synthetic construct
  source 1..21: mol_type = other DNA
gaggttgagaggcgggctcct

SEQ ID NO: 10545 - DNA, 21 bp, synthetic construct
  source 1..21: mol_type = other DNA
aggggggattcggttcattgg

SEQ ID NO: 10546 - DNA, 21 bp, synthetic construct
  source 1..21: mol_type = other DNA
tatcagcctcttctgacggtg

SEQ ID NO: 10547 - DNA, 21 bp, synthetic construct
  source 1..21: mol_type = other DNA
cgtccggcttgtactgtgtgt

SEQ ID NO: 10548 - DNA, 21 bp, synthetic construct
  source 1..21: mol_type = other DNA
ggggggtcgaattcgagttgg

SEQ ID NO: 10549 - DNA, 21 bp, synthetic construct
  source 1..21: mol_type = other DNA
gggattcatcaggagccgcat

SEQ ID NO: 10550 - DNA, 21 bp, synthetic construct
  source 1..21: mol_type = other DNA
gttgcggatccttctgcggct

SEQ ID NO: 10551 - DNA, 21 bp, synthetic construct
  source 1..21: mol_type = other DNA
gggccgagttcgagtttgtgg

SEQ ID NO: 10552 - DNA, 21 bp, synthetic construct
  source 1..21: mol_type = other DNA
gttgcggagcggggtgcgggg

SEQ ID NO: 10553 - DNA, 21 bp, synthetic construct
  source 1..21: mol_type = other DNA
actaatgagagtgtttatgtg

SEQ ID NO: 10554 - DNA, 21 bp, synthetic construct
  source 1..21: mol_type = other DNA
acgagtccggttgcggttaat

SEQ ID NO: 10555 - DNA, 21 bp, synthetic construct
  source 1..21: mol_type = other DNA
gttgagcggtgttgtgtggct

SEQ ID NO: 10556 - DNA, 21 bp, synthetic construct
  source 1..21: mol_type = other DNA
tgtttggatgcgtgtaatcgg

SEQ ID NO: 10557 - DNA, 21 bp, synthetic construct
  source 1..21: mol_type = other DNA
aatggggctcgtttgccgggt

SEQ ID NO: 10558 - DNA, 21 bp, synthetic construct
  source 1..21: mol_type = other DNA
gatatgagtaagagttgtgtg

SEQ ID NO: 10559 - DNA, 21 bp, synthetic construct
  source 1..21: mol_type = other DNA
gcgatgacgggtgctagtact

SEQ ID NO: 10560 - DNA, 21 bp, synthetic construct
  source 1..21: mol_type = other DNA
tgtttgtcgtgtcctaagagt

SEQ ID NO: 10561 - DNA, 21 bp, synthetic construct
  source 1..21: mol_type = other DNA
ggttcgaatacgtcgggttgg

SEQ ID NO: 10562 - DNA, 21 bp, synthetic construct
  source 1..21: mol_type = other DNA
gagccgggttcggtgcgttgg

SEQ ID NO: 10563 - DNA, 21 bp, synthetic construct
  source 1..21: mol_type = other DNA
ttttatactggtaggtcggag

SEQ ID NO: 10564 - DNA, 21 bp, synthetic construct
  source 1..21: mol_type = other DNA
gggtctgatcggtcggggtcg

SEQ ID NO: 10565 - DNA, 21 bp, synthetic construct
  source 1..21: mol_type = other DNA
gggcgtggggatagtggttgg

SEQ ID NO: 10566 - DNA, 21 bp, synthetic construct
  source 1..21: mol_type = other DNA
tggaatagtaatgctgataat

SEQ ID NO: 10567 - DNA, 21 bp, synthetic construct
  source 1..21: mol_type = other DNA
tctccttctgaggttaattcg

SEQ ID NO: 10568 - DNA, 21 bp, synthetic construct
  source 1..21: mol_type = other DNA
cttatggataatgtgagtcat

SEQ ID NO: 10569 - DNA, 21 bp, synthetic construct
  source 1..21: mol_type = other DNA
ttgtctgatggttggcgggat

SEQ ID NO: 10570 - DNA, 21 bp, synthetic construct
  source 1..21: mol_type = other DNA
ggtttggaggggtcgaagtgg

SEQ ID NO: 10571 - DNA, 21 bp, synthetic construct
  source 1..21: mol_type = other DNA
gatggggcggctattatgtct

SEQ ID NO: 10572 - DNA, 21 bp, synthetic construct
  source 1..21: mol_type = other DNA
tggactaagtcgcaggagtgg

SEQ ID NO: 10573 - DNA, 21 bp, synthetic construct
  source 1..21: mol_type = other DNA
cgtccggagtcgagtcagtgg

SEQ ID NO: 10574 - DNA, 21 bp, synthetic construct
  source 1..21: mol_type = other DNA
gtggagggtcgtatgtggtcg

SEQ ID NO: 10575 - DNA, 21 bp, synthetic construct
  source 1..21: mol_type = other DNA
attgatggtacgtcgatgtgg

SEQ ID NO: 10576 - DNA, 21 bp, synthetic construct
  source 1..21: mol_type = other DNA
gttcctcatgatagggagtgg

SEQ ID NO: 10577 - DNA, 21 bp, synthetic construct
  source 1..21: mol_type = other DNA
ggtgggtcgagttcggtttgg

SEQ ID NO: 10578 - DNA, 21 bp, synthetic construct
  source 1..21: mol_type = other DNA
aggctgccggagtctactgat

SEQ ID NO: 10579 - DNA, 21 bp, synthetic construct
  source 1..21: mol_type = other DNA
ctgggtgattctaatatggtt

SEQ ID NO: 10580 - DNA, 21 bp, synthetic construct
  source 1..21: mol_type = other DNA
cgtgaggaggttggggtgtgg

SEQ ID NO: 10581 - DNA, 21 bp, synthetic construct
  source 1..21: mol_type = other DNA
gatttggattcgtatctggat

SEQ ID NO: 10582 - DNA, 21 bp, synthetic construct
  source 1..21: mol_type = other DNA
ttggctaaggggggttatgat

SEQ ID NO: 10583 - DNA, 21 bp, synthetic construct
  source 1..21: mol_type = other DNA
cttgatggtgtttctctgtat

SEQ ID NO: 10584 - DNA, 21 bp, synthetic construct
  source 1..21: mol_type = other DNA
agggaggctcagagtgggtgg

SEQ ID NO: 10585 - DNA, 21 bp, synthetic construct
  source 1..21: mol_type = other DNA
gggcttagtagtgcttcttgg

SEQ ID NO: 10586 - DNA, 21 bp, synthetic construct
  source 1..21: mol_type = other DNA
tattttgaggggatgtttgat

SEQ ID NO: 10587 - DNA, 21 bp, synthetic construct
  source 1..21: mol_type = other DNA
ggtgcgcctggggatgcgaag

SEQ ID NO: 10588 - DNA, 21 bp, synthetic construct
  source 1..21: mol_type = other DNA
tgttgtgggttgaagagtggg

SEQ ID NO: 10589 - DNA, 21 bp, synthetic construct
  source 1..21: mol_type = other DNA
ggtgggcatgtgtctagttgg

SEQ ID NO: 10590 - DNA, 21 bp, synthetic construct
  source 1..21: mol_type = other DNA
aatgcgagtactagtagttgg

SEQ ID NO: 10591 - DNA, 21 bp, synthetic construct
  source 1..21: mol_type = other DNA
tggtctatgactacggataat

SEQ ID NO: 10592 - DNA, 21 bp, synthetic construct
  source 1..21: mol_type = other DNA
actcagattgcgccggatcgg

SEQ ID NO: 10593 - DNA, 21 bp, synthetic construct
  source 1..21: mol_type = other DNA
tatctggttatgtcttcgagt

SEQ ID NO: 10594 - DNA, 21 bp, synthetic construct
  source 1..21: mol_type = other DNA
agggaggaggctgagcgtggg

SEQ ID NO: 10595 - DNA, 21 bp, synthetic construct
  source 1..21: mol_type = other DNA
gttgggggtacttctttgtat

SEQ ID NO: 10596 - DNA, 21 bp, synthetic construct
  source 1..21: mol_type = other DNA
ggtgttattcagggttgttgt

SEQ ID NO: 10597 - DNA, 21 bp, synthetic construct
  source 1..21: mol_type = other DNA
tattggtcggctatggcggag

SEQ ID NO: 10598 - DNA, 21 bp, synthetic construct
  source 1..21: mol_type = other DNA
gggtcgcctagtagtggttgg

SEQ ID NO: 10599 - DNA, 21 bp, synthetic construct
  source 1..21: mol_type = other DNA
tggtcgcggctgaattctgat

SEQ ID NO: 10600 - DNA, 21 bp, synthetic construct
  source 1..21: mol_type = other DNA
tattttcatgctatgcagtct

SEQ ID NO: 10601 - DNA, 21 bp, synthetic construct
  source 1..21: mol_type = other DNA
cgttctgatactagttcttgg

SEQ ID NO: 10602 - DNA, 21 bp, synthetic construct
  source 1..21: mol_type = other DNA
atgtctccgatgagtcagaat

SEQ ID NO: 10603 - DNA, 21 bp, synthetic construct
  source 1..21: mol_type = other DNA
gagttgttggcggcgacttgg

SEQ ID NO: 10604 - DNA, 21 bp, synthetic construct
  source 1..21: mol_type = other DNA
tatagtaagtctagtccgctt

SEQ ID NO: 10605 - DNA, 21 bp, synthetic construct
  source 1..21: mol_type = other DNA
gaggatcggggtttggagggt

SEQ ID NO: 10606 - DNA, 21 bp, synthetic construct
  source 1..21: mol_type = other DNA
cgtactccttctgagtatccg

SEQ ID NO: 10607 - DNA, 21 bp, synthetic construct
  source 1..21: mol_type = other DNA
gggagggttgatatgtatgat

SEQ ID NO: 10608 - DNA, 21 bp, synthetic construct
  source 1..21: mol_type = other DNA
tgtgggcgtgattattgtcct

SEQ ID NO: 10609 - DNA, 21 bp, synthetic construct
  source 1..21: mol_type = other DNA
tctggggggtctcatacgtgg

SEQ ID NO: 10610 - DNA, 21 bp, synthetic construct
  source 1..21: mol_type = other DNA
gataggtgtgttcagccgtgt

SEQ ID NO: 10611 - DNA, 21 bp, synthetic construct
  source 1..21: mol_type = other DNA
tgtctttcgtctccttgtagt

SEQ ID NO: 10612 - DNA, 21 bp, synthetic construct
  source 1..21: mol_type = other DNA
gtgcctgatactgtgcgttat

SEQ ID NO: 10613 - DNA, 21 bp, synthetic construct
  source 1..21: mol_type = other DNA
tgtaagggttcgtgtgagcag

SEQ ID NO: 10614 - DNA, 21 bp, synthetic construct
  source 1..21: mol_type = other DNA
gagtggtctgctatttgtaag

SEQ ID NO: 10615 - DNA, 21 bp, synthetic construct
  source 1..21: mol_type = other DNA
agggagatgtctgttcattgg

SEQ ID NO: 10616 - DNA, 21 bp, synthetic construct
  source 1..21: mol_type = other DNA
tttcttaatgggtgttgtagt

SEQ ID NO: 10617 - DNA, 21 bp, synthetic construct
  source 1..21: mol_type = other DNA
tctccttggggggatccgtct

SEQ ID NO: 10618 - DNA, 21 bp, synthetic construct
  source 1..21: mol_type = other DNA
agtgaggaggcgtttccgtat

SEQ ID NO: 10619 - DNA, 21 bp, synthetic construct
  source 1..21: mol_type = other DNA
tgttttctgagtgattgtctg

SEQ ID NO: 10620 - DNA, 21 bp, synthetic construct
  source 1..21: mol_type = other DNA
ggtagtctggattcgcgttgg

SEQ ID NO: 10621 - DNA, 21 bp, synthetic construct
  source 1..21: mol_type = other DNA
tatttttcgcgtgagatttcg

SEQ ID NO: 10622 - DNA, 21 bp, synthetic construct
  source 1..21: mol_type = other DNA
gttgagccttgttgtcgtatg

SEQ ID NO: 10623 - DNA, 21 bp, synthetic construct
  source 1..21: mol_type = other DNA
gttggtccggtgctgtgtagt

SEQ ID NO: 10624 - DNA, 21 bp, synthetic construct
  source 1..21: mol_type = other DNA
gcccaatcggtgggtacttgg

SEQ ID NO: 10625 - DNA, 21 bp, synthetic construct
  source 1..21: mol_type = other DNA
ttgcataagcttagtgtgggt

SEQ ID NO: 10626 - DNA, 21 bp, synthetic construct
  source 1..21: mol_type = other DNA
gcgcgtgctgatttgggtagt

SEQ ID NO: 10627 - DNA, 21 bp, synthetic construct
  source 1..21: mol_type = other DNA
ggtagtccgtcggcgagttgg

SEQ ID NO: 10628 - DNA, 21 bp, synthetic construct
  source 1..21: mol_type = other DNA
gttccgggttttggggcgggt

SEQ ID NO: 10629 - DNA, 21 bp, synthetic construct
  source 1..21: mol_type = other DNA
ggtggggcgattcgggagtgg

SEQ ID NO: 10630 - DNA, 21 bp, synthetic construct
  source 1..21: mol_type = other DNA
actgcgcagtcgtatacgttt

SEQ ID NO: 10631 - DNA, 21 bp, synthetic construct
  source 1..21: mol_type = other DNA
tggctgcttaagtctgatgtt

SEQ ID NO: 10632 - DNA, 21 bp, synthetic construct
  source 1..21: mol_type = other DNA
gggcctcctcatgtggcgtgg

SEQ ID NO: 10633 - DNA, 21 bp, synthetic construct
  source 1..21: mol_type = other DNA
tgtagtcaggtggcgtgtccg

SEQ ID NO: 10634 - DNA, 21 bp, synthetic construct
  source 1..21: mol_type = other DNA
gtgcgttcgggttcggctggg

SEQ ID NO: 10635 - DNA, 21 bp, synthetic construct
  source 1..21: mol_type = other DNA
tgtgcgattactgggtgtcgg

SEQ ID NO: 10636 - DNA, 21 bp, synthetic construct
  source 1..21: mol_type = other DNA
gttatgacgtctgctgggtgg

SEQ ID NO: 10637 - DNA, 21 bp, synthetic construct
  source 1..21: mol_type = other DNA
attaatagttcttcggtttgg

SEQ ID NO: 10638 - DNA, 21 bp, synthetic construct
  source 1..21: mol_type = other DNA
tgtggttcgtcttgtgcggct

SEQ ID NO: 10639 - DNA, 21 bp, synthetic construct
  source 1..21: mol_type = other DNA
ggtttggagtcgcgggagtgg

SEQ ID NO: 10640 - DNA, 21 bp, synthetic construct
  source 1..21: mol_type = other DNA
acttggacgggtgatggtgcg

SEQ ID NO: 10641 - DNA, 21 bp, synthetic construct
  source 1..21: mol_type = other DNA
gattggctggagaagggtatt

SEQ ID NO: 10642 - DNA, 21 bp, synthetic construct
  source 1..21: mol_type = other DNA
cctctgatgagtggtccgatt

SEQ ID NO: 10643 - DNA, 21 bp, synthetic construct
  source 1..21: mol_type = other DNA
tgggcgcggggtcatgataat

SEQ ID NO: 10644 - DNA, 21 bp, synthetic construct
  source 1..21: mol_type = other DNA
tgtgggtcgtctacttgttct

SEQ ID NO: 10645 - DNA, 21 bp, synthetic construct
  source 1..21: mol_type = other DNA
tatgctaatgtggctcataat

SEQ ID NO: 10646 - DNA, 21 bp, synthetic construct
  source 1..21: mol_type = other DNA
gttgcgagtatgtatggtatt

SEQ ID NO: 10647 - DNA, 21 bp, synthetic construct
  source 1..21: mol_type = other DNA
gggtcggcggcgtcggcttgg

SEQ ID NO: 10648 - DNA, 21 bp, synthetic construct
  source 1..21: mol_type = other DNA
tcggatggggagtcttcgtgg

SEQ ID NO: 10649 - DNA, 21 bp, synthetic construct
  source 1..21: mol_type = other DNA
tattggtctggttcgattgct

SEQ ID NO: 10650 - DNA, 21 bp, synthetic construct
  source 1..21: mol_type = other DNA
attgcggggcgtggggctggg

SEQ ID NO: 10651 - DNA, 21 bp, synthetic construct
  source 1..21: mol_type = other DNA
aggggtactgaggtttatccg

SEQ ID NO: 10652 - DNA, 21 bp, synthetic construct
  source 1..21: mol_type = other DNA
tcgagtgggtcgagtacgtgg

SEQ ID NO: 10653 - DNA, 21 bp, synthetic construct
  source 1..21: mol_type = other DNA
gatgatggggattctcggtgg

SEQ ID NO: 10654 - DNA, 21 bp, synthetic construct
  source 1..21: mol_type = other DNA
gatatgaatgttggggcttgg

SEQ ID NO: 10655 - DNA, 21 bp, synthetic construct
  source 1..21: mol_type = other DNA
cgggagggtggtggttcgtgg

SEQ ID NO: 10656 - DNA, 21 bp, synthetic construct
  source 1..21: mol_type = other DNA
gttagtgggggtgcgttggct

SEQ ID NO: 10657 - DNA, 21 bp, synthetic construct
  source 1..21: mol_type = other DNA
gtgggggtgtctgggaatggg

SEQ ID NO: 10658 - DNA, 21 bp, synthetic construct
  source 1..21: mol_type = other DNA
ggggagctttgttgtgagacg

SEQ ID NO: 10659 - DNA, 21 bp, synthetic construct
  source 1..21: mol_type = other DNA
ggtgggtcgggggtttcgtgg

SEQ ID NO: 10660 - DNA, 21 bp, synthetic construct
  source 1..21: mol_type = other DNA
aggtcttcggttaatggggtg

SEQ ID NO: 10661 - DNA, 21 bp, synthetic construct
  source 1..21: mol_type = other DNA
ggtgtggagtctagtccgcag

SEQ ID NO: 10662 - DNA, 21 bp, synthetic construct
  source 1..21: mol_type = other DNA
agggattcggggagtgcgtgg

SEQ ID NO: 10663 - DNA, 21 bp, synthetic construct
  source 1..21: mol_type = other DNA
agtagtgggtcgtcgatgtgg

SEQ ID NO: 10664 - DNA, 21 bp, synthetic construct
  source 1..21: mol_type = other DNA
cggacggttgatttgtttccg

SEQ ID NO: 10665 - DNA, 21 bp, synthetic construct
  source 1..21: mol_type = other DNA
gcttcgagtgggaatcttatg

SEQ ID NO: 10666 - DNA, 21 bp, synthetic construct
  source 1..21: mol_type = other DNA
tattcgtctagtaatggtttg

SEQ ID NO: 10667 - DNA, 21 bp, synthetic construct
  source 1..21: mol_type = other DNA
agggagaatacgccggggtgg

SEQ ID NO: 10668 - DNA, 21 bp, synthetic construct
  source 1..21: mol_type = other DNA
attttgtctgagcgggcgtgg

SEQ ID NO: 10669 - DNA, 21 bp, synthetic construct
  source 1..21: mol_type = other DNA
aatgagcgggggggtgttgtt

SEQ ID NO: 10670 - DNA, 21 bp, synthetic construct
  source 1..21: mol_type = other DNA
actgatgagtggcagagttat

SEQ ID NO: 10671 - DNA, 21 bp, synthetic construct
  source 1..21: mol_type = other DNA
gtggctgcgagttcgacttgg

SEQ ID NO: 10672 - DNA, 21 bp, synthetic construct
  source 1..21: mol_type = other DNA
attcatagggctttgcatgat

SEQ ID NO: 10673 - DNA, 21 bp, synthetic construct
  source 1..21: mol_type = other DNA
tgtggggttaggtgtcaggat

SEQ ID NO: 10674 - DNA, 21 bp, synthetic construct
  source 1..21: mol_type = other DNA
ggggttcctgggacgatgccg

SEQ ID NO: 10675 - DNA, 21 bp, synthetic construct
  source 1..21: mol_type = other DNA
ttgtatggtggtagtattggg

SEQ ID NO: 10676 - DNA, 21 bp, synthetic construct
  source 1..21: mol_type = other DNA
gattattctgggcggagtgct

SEQ ID NO: 10677 - DNA, 21 bp, synthetic construct
  source 1..21: mol_type = other DNA
tcgggtcttgcttatgcgatg

SEQ ID NO: 10678 - DNA, 21 bp, synthetic construct
  source 1..21: mol_type = other DNA
gggcatagttgttgtactttg

SEQ ID NO: 10679 - DNA, 21 bp, synthetic construct
  source 1..21: mol_type = other DNA
tgtatgccgaattgtctggtt

SEQ ID NO: 10680 - DNA, 21 bp, synthetic construct
  source 1..21: mol_type = other DNA
gctggtggggggtatattctg

SEQ ID NO: 10681 - DNA, 21 bp, synthetic construct
  source 1..21: mol_type = other DNA
aatttgcgtggttcgggggct

SEQ ID NO: 10682 - DNA, 21 bp, synthetic construct
  source 1..21: mol_type = other DNA
gggtattctgcttgttcgcat

SEQ ID NO: 10683 - DNA, 21 bp, synthetic construct
  source 1..21: mol_type = other DNA
gttctggttgatgcgtatgtt

SEQ ID NO: 10684 - DNA, 21 bp, synthetic construct
  source 1..21: mol_type = other DNA
tttgaggcggatgcgtatccg

SEQ ID NO: 10685 - DNA, 21 bp, synthetic construct
  source 1..21: mol_type = other DNA
aatcagttgggggatcgtttg

SEQ ID NO: 10686 - DNA, 21 bp, synthetic construct
  source 1..21: mol_type = other DNA
ggggaggtgatgagtcttacg

SEQ ID NO: 10687 - DNA, 21 bp, synthetic construct
  source 1..21: mol_type = other DNA
tggatggcgaaggttgttgag

SEQ ID NO: 10688 - DNA, 21 bp, synthetic construct
  source 1..21: mol_type = other DNA
aataagtggggtgatccgagt

SEQ ID NO: 10689 - DNA, 21 bp, synthetic construct
  source 1..21: mol_type = other DNA
gggcttattgctccgcattcg

SEQ ID NO: 10690 - DNA, 21 bp, synthetic construct
  source 1..21: mol_type = other DNA
cgtgggattgatgagtttcct

SEQ ID NO: 10691 - DNA, 21 bp, synthetic construct
  source 1..21: mol_type = other DNA
attgggctgacgggtgattgg

SEQ ID NO: 10692 - DNA, 21 bp, synthetic construct
  source 1..21: mol_type = other DNA
gggggggggcagactagttgg

SEQ ID NO: 10693 - DNA, 21 bp, synthetic construct
  source 1..21: mol_type = other DNA
ccgtcttcgttgatggcgagt

SEQ ID NO: 10694 - DNA, 21 bp, synthetic construct
  source 1..21: mol_type = other DNA
atgactggtcttagtattgtg

SEQ ID NO: 10695 - DNA, 21 bp, synthetic construct
  source 1..21: mol_type = other DNA
gggatgagtgaggttttgtgg

SEQ ID NO: 10696 - DNA, 21 bp, synthetic construct
  source 1..21: mol_type = other DNA
acgcaggtttcgtcttataag

SEQ ID NO: 10697 - DNA, 21 bp, synthetic construct
  source 1..21: mol_type = other DNA
tggaagagtgggggtgcgctg

SEQ ID NO: 10698 - DNA, 21 bp, synthetic construct
  source 1..21: mol_type = other DNA
cagaagggtctggggattgcg

SEQ ID NO: 10699 - DNA, 21 bp, synthetic construct
  source 1..21: mol_type = other DNA
tgggctttggcgacgattcat

SEQ ID NO: 10700 - DNA, 21 bp, synthetic construct
  source 1..21: mol_type = other DNA
tctttgattgagaagcttagg

SEQ ID NO: 10701 - DNA, 21 bp, synthetic construct
  source 1..21: mol_type = other DNA
cttactttgacgaatattaag

SEQ ID NO: 10702 - DNA, 21 bp, synthetic construct
  source 1..21: mol_type = other DNA
tataagctgggtcttcttggg

SEQ ID NO: 10703 - DNA, 21 bp, synthetic construct
  source 1..21: mol_type = other DNA
tataagtctttgtcggctgct

SEQ ID NO: 10704 - DNA, 21 bp, synthetic construct
  source 1..21: mol_type = other DNA
agtgggctgagtacgactaag

SEQ ID NO: 10705 - DNA, 21 bp, synthetic construct
  source 1..21: mol_type = other DNA
gctagtttgacgtctcagcat

SEQ ID NO: 10706 - DNA, 21 bp, synthetic construct
  source 1..21: mol_type = other DNA
aattctttggcgacgtttaag

SEQ ID NO: 10707 - DNA, 21 bp, synthetic construct
  source 1..21: mol_type = other DNA
gggaagatgggggctttgtcg

SEQ ID NO: 10708 - DNA, 21 bp, synthetic construct
  source 1..21: mol_type = other DNA
acgctgatgacgaaggtgggt

SEQ ID NO: 10709 - DNA, 21 bp, synthetic construct
  source 1..21: mol_type = other DNA
tctacgattgctagtcctcat

SEQ ID NO: 10710 - DNA, 21 bp, synthetic construct
  source 1..21: mol_type = other DNA
gctagtttgtctagtcgtagt

SEQ ID NO: 10711 - DNA, 21 bp, synthetic construct
  source 1..21: mol_type = other DNA
tcgaaggggttgggtgcggtg

SEQ ID NO: 10712 - DNA, 21 bp, synthetic construct
  source 1..21: mol_type = other DNA
acgaatgtttcgaatggtaag

SEQ ID NO: 10713 - DNA, 21 bp, synthetic construct
  source 1..21: mol_type = other DNA
atgatgactatttcgactaag

SEQ ID NO: 10714 - DNA, 21 bp, synthetic construct
  source 1..21: mol_type = other DNA
cattctttgtctagttctggt

SEQ ID NO: 10715 - DNA, 21 bp, synthetic construct
  source 1..21: mol_type = other DNA
acgactacgtctagtcatgct

SEQ ID NO: 10716 - DNA, 21 bp, synthetic construct
  source 1..21: mol_type = other DNA
caggctattaagcttatgccg

SEQ ID NO: 10717 - DNA, 21 bp, synthetic construct
  source 1..21: mol_type = other DNA
gtgattacgattggttcgaag

SEQ ID NO: 10718 - DNA, 21 bp, synthetic construct
  source 1..21: mol_type = other DNA
gatgggatgtcgatgaatagg

SEQ ID NO: 10719 - DNA, 21 bp, synthetic construct
  source 1..21: mol_type = other DNA
agtaagctttctctgtctggt

SEQ ID NO: 10720 - DNA, 21 bp, synthetic construct
  source 1..21: mol_type = other DNA
acggtgccgacgcagactaag

SEQ ID NO: 10721 - DNA, 21 bp, synthetic construct
  source 1..21: mol_type = other DNA
agtattgggcttgtgaagccg

SEQ ID NO: 10722 - DNA, 21 bp, synthetic construct
  source 1..21: mol_type = other DNA
tggtcgcttgcgtcgacgggt

SEQ ID NO: 10723 - DNA, 21 bp, synthetic construct
  source 1..21: mol_type = other DNA
ttgaaggggtcgcatgctgat

SEQ ID NO: 10724 - DNA, 21 bp, synthetic construct
  source 1..21: mol_type = other DNA
tctaaggttccgctgatgccg

SEQ ID NO: 10725 - DNA, 21 bp, synthetic construct
  source 1..21: mol_type = other DNA
ctttcgaagatgccgtttggg

SEQ ID NO: 10726 - DNA, 21 bp, synthetic construct
  source 1..21: mol_type = other DNA
cagtggtcttcgaagttgttt

SEQ ID NO: 10727 - DNA, 21 bp, synthetic construct
  source 1..21: mol_type = other DNA
atgtcgcttaagggggttaat

SEQ ID NO: 10728 - DNA, 21 bp, synthetic construct
  source 1..21: mol_type = other DNA
acgctggtgtctaatactaag

SEQ ID NO: 10729 - DNA, 30 bp, synthetic construct
  source 1..30: mol_type = other DNA
gtggggtggagtcggctggatcttactact

SEQ ID NO: 10730 - DNA, 30 bp, synthetic construct
  source 1..30: mol_type = other DNA
gggggtttgggtaatcttcgtcattgtgtg

SEQ ID NO: 10731 - DNA, 30 bp, synthetic construct
  source 1..30: mol_type = other DNA
cttgggtatgttagtattggggctgcttgt

SEQ ID NO: 10732 - DNA, 30 bp, synthetic construct
  source 1..30: mol_type = other DNA
cgggaggctggtcgtattgtgagtcaggag

SEQ ID NO: 10733 - DNA, 30 bp, synthetic construct
  source 1..30: mol_type = other DNA
cttcggtatagtaagactcagggggagtct

SEQ ID NO: 10734 - DNA, 30 bp, synthetic construct
  source 1..30: mol_type = other DNA
aagccttatgcgcttaatggtagggaggtg

SEQ ID NO: 10735 - DNA, 30 bp, synthetic construct
  source 1..30: mol_type = other DNA
tattctctgacgggtgggtctatttgtctt

SEQ ID NO: 10736 - DNA, 30 bp, synthetic construct
  source 1..30: mol_type = other DNA
ctgggtccgcctcctgctattgggaagtgt

SEQ ID NO: 10737 - DNA, 30 bp, synthetic construct
  source 1..30: mol_type = other DNA
cttggttttactaagtcgtctggttcggat

SEQ ID NO: 10738 - DNA, 30 bp, synthetic construct
  source 1..30: mol_type = other DNA
tcgccgtatgctaggagttctgcgggggtg

SEQ ID NO: 10739 - DNA, 30 bp, synthetic construct
  source 1..30: mol_type = other DNA
ttgggttgggcttcgaattcggtggcttct

SEQ ID NO: 10740 - DNA, 30 bp, synthetic construct
  source 1..30: mol_type = other DNA
tcgtcgattaatggtccgccgaagtggtcg

SEQ ID NO: 10741 - DNA, 30 bp, synthetic construct
  source 1..30: mol_type = other DNA
ttggggtttgctcgtactggtgctgcggat

SEQ ID NO: 10742 - DNA, 30 bp, synthetic construct
  source 1..30: mol_type = other DNA
aagacgatgaatgggatgtctagggctatt

SEQ ID NO: 10743 - DNA, 30 bp, synthetic construct
  source 1..30: mol_type = other DNA
aagcctcttcatgcgttggggtctgtgttg

SEQ ID NO: 10744 - DNA, 30 bp, synthetic construct
  source 1..30: mol_type = other DNA
ttttggcctaatagtagtctgcctattcgg

SEQ ID NO: 10745 - DNA, 30 bp, synthetic construct
  source 1..30: mol_type = other DNA
cagcgtttttcggctgcttctgtttcgccg

SEQ ID NO: 10746 - DNA, 30 bp, synthetic construct
  source 1..30: mol_type = other DNA
ggtaatatgctggcgaggcagagtgcgttt

SEQ ID NO: 10747 - DNA, 30 bp, synthetic construct
  source 1..30: mol_type = other DNA
ctgcgttattcggttgcgggttcttcggtt

SEQ ID NO: 10748 - DNA, 30 bp, synthetic construct
  source 1..30: mol_type = other DNA
attgggatggttcctgcgactgggttttgt

SEQ ID NO: 10749 - DNA, 30 bp, synthetic construct
  source 1..30: mol_type = other DNA
tctgctcttttgggggttccgaagtgtacg

SEQ ID NO: 10750 - DNA, 30 bp, synthetic construct
  source 1..30: mol_type = other DNA
gatcctcatagggttcatctgggtttgggt

SEQ ID NO: 10751 - DNA, 30 bp, synthetic construct
  source 1..30: mol_type = other DNA
ggggtgttgaagagtttgacttggacgggg

SEQ ID NO: 10752 - DNA, 30 bp, synthetic construct
  source 1..30: mol_type = other DNA
attcctttttcgcgggttaatccggatacg

SEQ ID NO: 10753 - DNA, 30 bp, synthetic construct
  source 1..30: mol_type = other DNA
aatctgattgtggggtttgatccgatggcg

SEQ ID NO: 10754 - DNA, 30 bp, synthetic construct
  source 1..30: mol_type = other DNA
ctgcttccgaatttggtgggttctagggcg

SEQ ID NO: 10755 - DNA, 30 bp, synthetic construct
  source 1..30: mol_type = other DNA
gctggtgggcatccggaggggtatgttaat

SEQ ID NO: 10756 - DNA, 21 bp, synthetic construct
  source 1..21: mol_type = other DNA
tattggactcagcggtatgct

SEQ ID NO: 10757 - DNA, 21 bp, synthetic construct
  source 1..21: mol_type = other DNA
tattggggtcagagggctgtt

SEQ ID NO: 10758 - DNA, 21 bp, synthetic construct
  source 1..21: mol_type = other DNA
tattattcgcagcagtctcgg

SEQ ID NO: 10759 - DNA, 21 bp, synthetic construct
  source 1..21: mol_type = other DNA
ttttggacgcagaagggttct

SEQ ID NO: 10760 - DNA, 21 bp, synthetic construct
  source 1..21: mol_type = other DNA
tattggtcgcagcgtgcgttt

SEQ ID NO: 10761 - DNA, 21 bp, synthetic construct
  source 1..21: mol_type = other DNA
tattttggtcagagttgtagg

SEQ ID NO: 10762 - DNA, 21 bp, synthetic construct
  source 1..21: mol_type = other DNA
tttatgtatcagaaggggtgt

SEQ ID NO: 10763 - DNA, 21 bp, synthetic construct
  source 1..21: mol_type = other DNA
gctactcgggatttgcatagg

SEQ ID NO: 10764 - DNA, 21 bp, synthetic construct
  source 1..21: mol_type = other DNA
tttatgcgtcagtctagttgt

SEQ ID NO: 10765 - DNA, 21 bp, synthetic construct
  source 1..21: mol_type = other DNA
tattggggtcaggggaggtgt

SEQ ID NO: 10766 - DNA, 21 bp, synthetic construct
  source 1..21: mol_type = other DNA
ttttggggtcagaggactggt

SEQ ID NO: 10767 - DNA, 21 bp, synthetic construct
  source 1..21: mol_type = other DNA
ttttctcatcagcgttcgctt

SEQ ID NO: 10768 - DNA, 21 bp, synthetic construct
  source 1..21: mol_type = other DNA
tttactttgcagcgttgtctt

SEQ ID NO: 10769 - DNA, 21 bp, synthetic construct
  source 1..21: mol_type = other DNA
tattttgcgcagcatgggttt

SEQ ID NO: 10770 - DNA, 21 bp, synthetic construct
  source 1..21: mol_type = other DNA
tattttggtcagggtcggagt

SEQ ID NO: 10771 - DNA, 21 bp, synthetic construct
  source 1..21: mol_type = other DNA
cggttgtttgttaaggaggcg

SEQ ID NO: 10772 - DNA, 21 bp, synthetic construct
  source 1..21: mol_type = other DNA
tttcgttctcagcagcggacg

SEQ ID NO: 10773 - DNA, 21 bp, synthetic construct
  source 1..21: mol_type = other DNA
tttttgtcgcagcgttgtgcg

SEQ ID NO: 10774 - DNA, 21 bp, synthetic construct
  source 1..21: mol_type = other DNA
ttttttaagcaggtgggtaag

SEQ ID NO: 10775 - DNA, 21 bp, synthetic construct
  source 1..21: mol_type = other DNA
tttggttttcagaagagtcag

SEQ ID NO: 10776 - DNA, 21 bp, synthetic construct
  source 1..21: mol_type = other DNA
tttattgctcagcagcggagg

SEQ ID NO: 10777 - DNA, 21 bp, synthetic construct
  source 1..21: mol_type = other DNA
tttagtctgcagaagcggtgg

SEQ ID NO: 10778 - DNA, 21 bp, synthetic construct
  source 1..21: mol_type = other DNA
tttgttggtcagagggggtgt

SEQ ID NO: 10779 - DNA, 21 bp, synthetic construct
  source 1..21: mol_type = other DNA
tttaggtctcagcagttttgt

SEQ ID NO: 10780 - DNA, 21 bp, synthetic construct
  source 1..21: mol_type = other DNA
tttattcatcagcggaatcag

SEQ ID NO: 10781 - DNA, 21 bp, synthetic construct
  source 1..21: mol_type = other DNA
ttttctgctcagaggtgtgct

SEQ ID NO: 10782 - DNA, 21 bp, synthetic construct
  source 1..21: mol_type = other DNA
tttcttagtcagaagtgtcat

SEQ ID NO: 10783 - DNA, 21 bp, synthetic construct
  source 1..21: mol_type = other DNA
tttcattctcaggggcggtcg

SEQ ID NO: 10784 - DNA, 21 bp, synthetic construct
  source 1..21: mol_type = other DNA
tggtatagtcagatgaagggg

SEQ ID NO: 10785 - DNA, 21 bp, synthetic construct
  source 1..21: mol_type = other DNA
tgtgatgggggtgtgcggatg

SEQ ID NO: 10786 - DNA, 21 bp, synthetic construct
  source 1..21: mol_type = other DNA
gtggggtataagggtgtgggt

SEQ ID NO: 10787 - DNA, 21 bp, synthetic construct
  source 1..21: mol_type = other DNA
ttttttaagcaggttcattgt

SEQ ID NO: 10788 - DNA, 21 bp, synthetic construct
  source 1..21: mol_type = other DNA
tttgcttatcagcgggctagt

SEQ ID NO: 10789 - DNA, 21 bp, synthetic construct
  source 1..21: mol_type = other DNA
tttggggcgcagaaggtttat

SEQ ID NO: 10790 - DNA, 21 bp, synthetic construct
  source 1..21: mol_type = other DNA
gcttgtaatgattcggcgagg

SEQ ID NO: 10791 - DNA, 21 bp, synthetic construct
  source 1..21: mol_type = other DNA
tattttttgcagaagccttgt

SEQ ID NO: 10792 - DNA, 21 bp, synthetic construct
  source 1..21: mol_type = other DNA
aattgtgcgcatgtttcgggg

SEQ ID NO: 10793 - DNA, 21 bp, synthetic construct
  source 1..21: mol_type = other DNA
gcgacgaagcctgcgctgagt

SEQ ID NO: 10794 - DNA, 21 bp, synthetic construct
  source 1..21: mol_type = other DNA
caggatccgattaaggctcgt

SEQ ID NO: 10795 - DNA, 21 bp, synthetic construct
  source 1..21: mol_type = other DNA
ctgagtaatactaagtgtgtt

SEQ ID NO: 10796 - DNA, 21 bp, synthetic construct
  source 1..21: mol_type = other DNA
gggcttaagagtcttacgccg

SEQ ID NO: 10797 - DNA, 30 bp, synthetic construct
  source 1..30: mol_type = other DNA
cgtttggtgacgaataagttggttcagctg

SEQ ID NO: 10798 - DNA, 30 bp, synthetic construct
  source 1..30: mol_type = other DNA
cgtttggcgtatatgactgatacgttgttg

SEQ ID NO: 10799 - DNA, 30 bp, synthetic construct
  source 1..30: mol_type = other DNA
tatcggcggatggatatggatagggttgtg

SEQ ID NO: 10800 - DNA, 30 bp, synthetic construct
  source 1..30: mol_type = other DNA
ttgactggggggcagccgcgtaataggctt

SEQ ID NO: 10801 - DNA, 30 bp, synthetic construct
  source 1..30: mol_type = other DNA
tggtggatgggttctgataattcgggtatt

SEQ ID NO: 10802 - DNA, 30 bp, synthetic construct
  source 1..30: mol_type = other DNA
gttatggggtatttgactgaggggtgtact

SEQ ID NO: 10803 - DNA, 30 bp, synthetic construct
  source 1..30: mol_type = other DNA
tgtcctggggatagtcagggtagtgtgggt

SEQ ID NO: 10804 - DNA, 30 bp, synthetic construct
  source 1..30: mol_type = other DNA
tcgaagacggctcgtgaggcttttccgttt

SEQ ID NO: 10805 - DNA, 30 bp, synthetic construct
  source 1..30: mol_type = other DNA
gttcgggaggggtttgagggttatggtctt

SEQ ID NO: 10806 - DNA, 30 bp, synthetic construct
  source 1..30: mol_type = other DNA
gagaattttgatcggactcgtcctaggtct

SEQ ID NO: 10807 - DNA, 30 bp, synthetic construct
  source 1..30: mol_type = other DNA
tcttatgctgatgctttttgtgataggtgt

SEQ ID NO: 10808 - DNA, 30 bp, synthetic construct
  source 1..30: mol_type = other DNA
acttatagtggggatggtgatgtggcgtgt

SEQ ID NO: 10809 - DNA, 30 bp, synthetic construct
  source 1..30: mol_type = other DNA
aggcttagggttgatatgggtagttgggct

SEQ ID NO: 10810 - DNA, 30 bp, synthetic construct
  source 1..30: mol_type = other DNA
aattatgattctaggtcttgtagtcgttgt

SEQ ID NO: 10811 - DNA, 30 bp, synthetic construct
  source 1..30: mol_type = other DNA
gcttttccgaatctggtgtcttctcgtttt

SEQ ID NO: 10812 - DNA, 30 bp, synthetic construct
  source 1..30: mol_type = other DNA
agttatgtttcttctagttcgacttgtatt

SEQ ID NO: 10813 - DNA, 30 bp, synthetic construct
  source 1..30: mol_type = other DNA
cagtatttgagtgggcgtgttggtcagtgt

SEQ ID NO: 10814 - DNA, 30 bp, synthetic construct
  source 1..30: mol_type = other DNA
ggtatttcgttgaatactaggaatcatctg

SEQ ID NO: 10815 - DNA, 30 bp, synthetic construct
  source 1..30: mol_type = other DNA
ttgtcgaatgattcgaattgggttaattgt

SEQ ID NO: 10816 - DNA, 30 bp, synthetic construct
  source 1..30: mol_type = other DNA
cgtgaggcttggaagcgtgagtctggtttg

SEQ ID NO: 10817 - DNA, 30 bp, synthetic construct
  source 1..30: mol_type = other DNA
tctactgttagtgttgatcggcctagggtg

SEQ ID NO: 10818 - DNA, 30 bp, synthetic construct
  source 1..30: mol_type = other DNA
cttatgaagacgtcttatcttgagtctgat

SEQ ID NO: 10819 - DNA, 30 bp, synthetic construct
  source 1..30: mol_type = other DNA
tcgcgtagtacggcgtctatggtttgttgt

SEQ ID NO: 10820 - DNA, 30 bp, synthetic construct
  source 1..30: mol_type = other DNA
tgtcctgagaggtctcatagtagtgtggat

SEQ ID NO: 10821 - DNA, 30 bp, synthetic construct
  source 1..30: mol_type = other DNA
ttttttcctaatcataataagagtgcgcag

SEQ ID NO: 10822 - DNA, 30 bp, synthetic construct
  source 1..30: mol_type = other DNA
atggataggctggatcggtttacggcttgt

SEQ ID NO: 10823 - DNA, 30 bp, synthetic construct
  source 1..30: mol_type = other DNA
gagttgttttctcagtctcgtagtgggtat

SEQ ID NO: 10824 - DNA, 30 bp, synthetic construct
  source 1..30: mol_type = other DNA
atgtatcatcttaatgtgcctaagggggtt

SEQ ID NO: 10825 - DNA, 30 bp, synthetic construct
  source 1..30: mol_type = other DNA
ttgttgccgaatgggcgtgggcttgttacg

SEQ ID NO: 10826 - DNA, 30 bp, synthetic construct
  source 1..30: mol_type = other DNA
tattttcctaataagttggtggaggttgcg

SEQ ID NO: 10827 - DNA, 21 bp, synthetic construct
  source 1..21: mol_type = other DNA
tatcataaagcgatgcagaat

SEQ ID NO: 10828 - DNA, 21 bp, synthetic construct
  source 1..21: mol_type = other DNA
tatccctctggtatgcgactt

SEQ ID NO: 10829 - DNA, 21 bp, synthetic construct
  source 1..21: mol_type = other DNA
tatcacaaaaatatgccaaat

SEQ ID NO: 10830 - DNA, 21 bp, synthetic construct
  source 1..21: mol_type = other DNA
tacccgtttccgactgaggcg

SEQ ID NO: 10831 - DNA, 21 bp, synthetic construct
  source 1..21: mol_type = other DNA
gtactaggccgcccatcctac

SEQ ID NO: 10832 - DNA, 21 bp, synthetic construct
  source 1..21: mol_type = other DNA
aacgcacgtgagggtcgtaat

SEQ ID NO: 10833 - DNA, 21 bp, synthetic construct
  source 1..21: mol_type = other DNA
tgccgggcgaattgtgtccca

SEQ ID NO: 10834 - DNA, 21 bp, synthetic construct
  source 1..21: mol_type = other DNA
ctgcatcgttcgggcatcgat

SEQ ID NO: 10835 - DNA, 21 bp, synthetic construct
  source 1..21: mol_type = other DNA
tatttttcgggtatacagagc

SEQ ID NO: 10836 - DNA, 21 bp, synthetic construct
  source 1..21: mol_type = other DNA
atgatcagggatgcatacccc

SEQ ID NO: 10837 - DNA, 21 bp, synthetic construct
  source 1..21: mol_type = other DNA
gatcataaagggaatatcgct

SEQ ID NO: 10838 - DNA, 21 bp, synthetic construct
  source 1..21: mol_type = other DNA
catcataagctacaaactctc

SEQ ID NO: 10839 - DNA, 21 bp, synthetic construct
  source 1..21: mol_type = other DNA
aaacccgcgtccaccagttgg

SEQ ID NO: 10840 - DNA, 21 bp, synthetic construct
  source 1..21: mol_type = other DNA
gtcgcgacccatggggcggga

SEQ ID NO: 10841 - DNA, 21 bp, synthetic construct
  source 1..21: mol_type = other DNA
tattggagcggcataccggaa

SEQ ID NO: 10842 - DNA, 21 bp, synthetic construct
  source 1..21: mol_type = other DNA
cggtccaaggcagacgatcat

SEQ ID NO: 10843 - DNA, 21 bp, synthetic construct
  source 1..21: mol_type = other DNA
tacgctaaggggggatctaac

SEQ ID NO: 10844 - DNA, 21 bp, synthetic construct
  source 1..21: mol_type = other DNA
tttccatatggccaaaaaatg

SEQ ID NO: 10845 - DNA, 21 bp, synthetic construct
  source 1..21: mol_type = other DNA
accgatttgacggtatacaga

SEQ ID NO: 10846 - DNA, 21 bp, synthetic construct
  source 1..21: mol_type = other DNA
gacatgtcaacgcggacctgg

SEQ ID NO: 10847 - DNA, 21 bp, synthetic construct
  source 1..21: mol_type = other DNA
tgtaagcagggatgtatgact

SEQ ID NO: 10848 - DNA, 21 bp, synthetic construct
  source 1..21: mol_type = other DNA
ttacataaatttgctgagaac

SEQ ID NO: 10849 - DNA, 21 bp, synthetic construct
  source 1..21: mol_type = other DNA
tatgtaaagtcgcaggtaatc

SEQ ID NO: 10850 - DNA, 21 bp, synthetic construct
  source 1..21: mol_type = other DNA
tgcaaccaaaaatgtgctgca

SEQ ID NO: 10851 - DNA, 21 bp, synthetic construct
  source 1..21: mol_type = other DNA
tgtaataaattatgtacccct

SEQ ID NO: 10852 - DNA, 21 bp, synthetic construct
  source 1..21: mol_type = other DNA
agttacgacggaaccgcggcc

SEQ ID NO: 10853 - DNA, 21 bp, synthetic construct
  source 1..21: mol_type = other DNA
acttttaaacacaatcccttc

SEQ ID NO: 10854 - DNA, 21 bp, synthetic construct
  source 1..21: mol_type = other DNA
gttaaatcctccaatggggtc

SEQ ID NO: 10855 - DNA, 21 bp, synthetic construct
  source 1..21: mol_type = other DNA
cgcgagtcaccatacaagctt

SEQ ID NO: 10856 - DNA, 21 bp, synthetic construct
  source 1..21: mol_type = other DNA
tgtcctagattaggctgtgcg

SEQ ID NO: 10857 - DNA, 21 bp, synthetic construct
  source 1..21: mol_type = other DNA
ccccatgtacgtcaaactatc

SEQ ID NO: 10858 - DNA, 21 bp, synthetic construct
  source 1..21: mol_type = other DNA
tgtaaacagacctgtatgatg

SEQ ID NO: 10859 - DNA, 21 bp, synthetic construct
  source 1..21: mol_type = other DNA
agagttaacggtgattggcct

SEQ ID NO: 10860 - DNA, 21 bp, synthetic construct
  source 1..21: mol_type = other DNA
tgcgataagaagtgcacgact

SEQ ID NO: 10861 - DNA, 21 bp, synthetic construct
  source 1..21: mol_type = other DNA
tgcggtcaagcctgtaaaccg

SEQ ID NO: 10862 - DNA, 21 bp, synthetic construct
  source 1..21: mol_type = other DNA
tatcatgcctcagggccaaaa

SEQ ID NO: 10863 - DNA, 21 bp, synthetic construct
  source 1..21: mol_type = other DNA
aaggaagggcccgtctggcct

SEQ ID NO: 10864 - DNA, 21 bp, synthetic construct
  source 1..21: mol_type = other DNA
cacaccaggctaagcaacggc

SEQ ID NO: 10865 - DNA, 21 bp, synthetic construct
  source 1..21: mol_type = other DNA
ctgctcgcaagctcagagtgg

SEQ ID NO: 10866 - DNA, 21 bp, synthetic construct
  source 1..21: mol_type = other DNA
tgcactaagaccagagactgc

SEQ ID NO: 10867 - DNA, 21 bp, synthetic construct
  source 1..21: mol_type = other DNA
tgtgaaggcaggcacacgtgc

SEQ ID NO: 10868 - DNA, 21 bp, synthetic construct
  source 1..21: mol_type = other DNA
tgcaaccaacgctgtgcacca

SEQ ID NO: 10869 - DNA, 21 bp, synthetic construct
  source 1..21: mol_type = other DNA
tgcaacgtaacacgtaactgt

SEQ ID NO: 10870 - DNA, 21 bp, synthetic construct
  source 1..21: mol_type = other DNA
ttgcggaacgggaccaatccc

SEQ ID NO: 10871 - DNA, 21 bp, synthetic construct
  source 1..21: mol_type = other DNA
tgctccggtagccagaaatgc

SEQ ID NO: 10872 - DNA, 21 bp, synthetic construct
  source 1..21: mol_type = other DNA
ccctgcaagacgggaggtgaa

SEQ ID NO: 10873 - DNA, 21 bp, synthetic construct
  source 1..21: mol_type = other DNA
gagccggtcgccaggagttgg

SEQ ID NO: 10874 - DNA, 21 bp, synthetic construct
  source 1..21: mol_type = other DNA
gtggcatacgatgcgatagtt

SEQ ID NO: 10875 - DNA, 21 bp, synthetic construct
  source 1..21: mol_type = other DNA
tgtagagcggactgccaccca

SEQ ID NO: 10876 - DNA, 21 bp, synthetic construct
  source 1..21: mol_type = other DNA
tgcgctctgaagaactgtcca

SEQ ID NO: 10877 - DNA, 21 bp, synthetic construct
  source 1..21: mol_type = other DNA
caagatgtgcggcaaacgaaa

SEQ ID NO: 10878 - DNA, 21 bp, synthetic construct
  source 1..21: mol_type = other DNA
tgtaggggtgtgacggggtgt

SEQ ID NO: 10879 - DNA, 21 bp, synthetic construct
  source 1..21: mol_type = other DNA
tgtgagaaggtactcaagcct

SEQ ID NO: 10880 - DNA, 21 bp, synthetic construct
  source 1..21: mol_type = other DNA
tattggcatgctaaagttgaa

SEQ ID NO: 10881 - DNA, 21 bp, synthetic construct
  source 1..21: mol_type = other DNA
cagttcgtaagatcagaacct

SEQ ID NO: 10882 - DNA, 21 bp, synthetic construct
  source 1..21: mol_type = other DNA
gatccggtcagtcctaagtgg

SEQ ID NO: 10883 - DNA, 21 bp, synthetic construct
  source 1..21: mol_type = other DNA
tgcaggacgacgtgtcacgag

SEQ ID NO: 10884 - DNA, 21 bp, synthetic construct
  source 1..21: mol_type = other DNA
tgcaaatctgcgtgtcacgaa

SEQ ID NO: 10885 - DNA, 21 bp, synthetic construct
  source 1..21: mol_type = other DNA
aacctgcgggggcaggctgcg

SEQ ID NO: 10886 - DNA, 21 bp, synthetic construct
  source 1..21: mol_type = other DNA
tgtgcgcgtaattcgacatgt

SEQ ID NO: 10887 - DNA, 21 bp, synthetic construct
  source 1..21: mol_type = other DNA
gtttatcaccgcacccaggag

SEQ ID NO: 10888 - DNA, 21 bp, synthetic construct
  source 1..21: mol_type = other DNA
tgcaaagatggtcctatgctt

SEQ ID NO: 10889 - DNA, 21 bp, synthetic construct
  source 1..21: mol_type = other DNA
tggtacgatggtactggcccg

SEQ ID NO: 10890 - DNA, 21 bp, synthetic construct
  source 1..21: mol_type = other DNA
atcatgagttcatctgcgtgg

SEQ ID NO: 10891 - DNA, 21 bp, synthetic construct
  source 1..21: mol_type = other DNA
tgtaaggggcaaactatggat

SEQ ID NO: 10892 - DNA, 21 bp, synthetic construct
  source 1..21: mol_type = other DNA
tattcaaaatctggccccggg

SEQ ID NO: 10893 - DNA, 21 bp, synthetic construct
  source 1..21: mol_type = other DNA
aacatggagtcccgcgattgg

SEQ ID NO: 10894 - DNA, 21 bp, synthetic construct
  source 1..21: mol_type = other DNA
tgccgcatcggggtctgtccg

SEQ ID NO: 10895 - DNA, 21 bp, synthetic construct
  source 1..21: mol_type = other DNA
aggaacgactataactacccc

SEQ ID NO: 10896 - DNA, 21 bp, synthetic construct
  source 1..21: mol_type = other DNA
ccgtgtaaaaatggaatggcg

SEQ ID NO: 10897 - DNA, 21 bp, synthetic construct
  source 1..21: mol_type = other DNA
tgccataagttgaattgtgcc

SEQ ID NO: 10898 - DNA, 21 bp, synthetic construct
  source 1..21: mol_type = other DNA
tgtgctctacagaagtgcgct

SEQ ID NO: 10899 - DNA, 21 bp, synthetic construct
  source 1..21: mol_type = other DNA
gctggggatgactgtaagaaa

SEQ ID NO: 10900 - DNA, 21 bp, synthetic construct
  source 1..21: mol_type = other DNA
tataatggcgggccgatgcag

SEQ ID NO: 10901 - DNA, 21 bp, synthetic construct
  source 1..21: mol_type = other DNA
ccagaggacttccaccagctg

SEQ ID NO: 10902 - DNA, 21 bp, synthetic construct
  source 1..21: mol_type = other DNA
tgtgccaaccatacaaagccc

SEQ ID NO: 10903 - DNA, 21 bp, synthetic construct
  source 1..21: mol_type = other DNA
tataaatctgattgttgtgta

SEQ ID NO: 10904 - DNA, 21 bp, synthetic construct
  source 1..21: mol_type = other DNA
tttactaagaccaattgtaat

SEQ ID NO: 10905 - DNA, 21 bp, synthetic construct
  source 1..21: mol_type = other DNA
tatacacggaccagcccaatt

SEQ ID NO: 10906 - DNA, 21 bp, synthetic construct
  source 1..21: mol_type = other DNA
tgcatcaagaatacagcttgc

SEQ ID NO: 10907 - DNA, 21 bp, synthetic construct
  source 1..21: mol_type = other DNA
atgtatatgtccgggaaaggc

SEQ ID NO: 10908 - DNA, 21 bp, synthetic construct
  source 1..21: mol_type = other DNA
ccagaccatgacaagtgtaag

SEQ ID NO: 10909 - DNA, 21 bp, synthetic construct
  source 1..21: mol_type = other DNA
cgagccgaagattacttcccc

SEQ ID NO: 10910 - DNA, 21 bp, synthetic construct
  source 1..21: mol_type = other DNA
acgaaagggggcacgtacggg

SEQ ID NO: 10911 - DNA, 21 bp, synthetic construct
  source 1..21: mol_type = other DNA
tgcatgtctacgaggtgtgaa

SEQ ID NO: 10912 - DNA, 21 bp, synthetic construct
  source 1..21: mol_type = other DNA
ccgggtgacacttaccctgca

SEQ ID NO: 10913 - DNA, 21 bp, synthetic construct
  source 1..21: mol_type = other DNA
tgcggaaaactgtgttcgcac

SEQ ID NO: 10914 - DNA, 21 bp, synthetic construct
  source 1..21: mol_type = other DNA
taccacaaggcgtcgatcggc

SEQ ID NO: 10915 - DNA, 21 bp, synthetic construct
  source 1..21: mol_type = other DNA
actaggaacggtatgaacgct

SEQ ID NO: 10916 - DNA, 21 bp, synthetic construct
  source 1..21: mol_type = other DNA
tgccgcgccaacagtgggtgt

SEQ ID NO: 10917 - DNA, 21 bp, synthetic construct
  source 1..21: mol_type = other DNA
tacaagcagggtgtcatgaac

SEQ ID NO: 10918 - DNA, 21 bp, synthetic construct
  source 1..21: mol_type = other DNA
atgaagggaggctccgctggc

SEQ ID NO: 10919 - DNA, 21 bp, synthetic construct
  source 1..21: mol_type = other DNA
cgggatggcatgcgtggattt

SEQ ID NO: 10920 - DNA, 21 bp, synthetic construct
  source 1..21: mol_type = other DNA
cgcatggatacaggtaagtgg

SEQ ID NO: 10921 - DNA, 21 bp, synthetic construct
  source 1..21: mol_type = other DNA
caccaccgagcgcaggacaac

SEQ ID NO: 10922 - DNA, 21 bp, synthetic construct
  source 1..21: mol_type = other DNA
tgtaacgcgatgaaatgtgca

SEQ ID NO: 10923 - DNA, 21 bp, synthetic construct
  source 1..21: mol_type = other DNA
caactgcaatctcaacaatgg

SEQ ID NO: 10924 - DNA, 21 bp, synthetic construct
  source 1..21: mol_type = other DNA
gtcttagaggacagatcgtgg

SEQ ID NO: 10925 - DNA, 21 bp, synthetic construct
  source 1..21: mol_type = other DNA
tatgcgcgagggagcgcgtta

SEQ ID NO: 10926 - DNA, 21 bp, synthetic construct
  source 1..21: mol_type = other DNA
tgtacccaaaaaggctgttcc

SEQ ID NO: 10927 - DNA, 21 bp, synthetic construct
  source 1..21: mol_type = other DNA
aacgaagcggcgagcacatgg

SEQ ID NO: 10928 - DNA, 21 bp, synthetic construct
  source 1..21: mol_type = other DNA
tggctagttaaaacgtccggg

SEQ ID NO: 10929 - DNA, 21 bp, synthetic construct
  source 1..21: mol_type = other DNA
tgcggttcgaaagtctgcaac

SEQ ID NO: 10930 - DNA, 21 bp, synthetic construct
  source 1..21: mol_type = other DNA
tgttctaaaagctgcatggtt

SEQ ID NO: 10931 - DNA, 21 bp, synthetic construct
  source 1..21: mol_type = other DNA
tgctcgtctgtaaagtgcatg

SEQ ID NO: 10932 - DNA, 21 bp, synthetic construct
  source 1..21: mol_type = other DNA
ttatggcgcacggagcctgac

SEQ ID NO: 10933 - DNA, 21 bp, synthetic construct
  source 1..21: mol_type = other DNA
tgcggacaaaaatgttctcac

SEQ ID NO: 10934 - DNA, 21 bp, synthetic construct
  source 1..21: mol_type = other DNA
tgcgcagatcgctgcaattcg

SEQ ID NO: 10935 - DNA, 21 bp, synthetic construct
  source 1..21: mol_type = other DNA
tactccaaatccatgcctaat

SEQ ID NO: 10936 - DNA, 21 bp, synthetic construct
  source 1..21: mol_type = other DNA
ataatggcccacaataattgg

SEQ ID NO: 10937 - DNA, 21 bp, synthetic construct
  source 1..21: mol_type = other DNA
tgcccgaaacagttatgcata

SEQ ID NO: 10938 - DNA, 21 bp, synthetic construct
  source 1..21: mol_type = other DNA
tgtaggctaggtgagtgtcac

SEQ ID NO: 10939 - DNA, 21 bp, synthetic construct
  source 1..21: mol_type = other DNA
gatctgcgagcaagccagtgg

SEQ ID NO: 10940 - DNA, 21 bp, synthetic construct
  source 1..21: mol_type = other DNA
tgcagggaccaatgcatgcaa

SEQ ID NO: 10941 - DNA, 21 bp, synthetic construct
  source 1..21: mol_type = other DNA
tacgcgaagtcgagtccctcg

SEQ ID NO: 10942 - DNA, 21 bp, synthetic construct
  source 1..21: mol_type = other DNA
cagtctgattataagtacttt

SEQ ID NO: 10943 - DNA, 21 bp, synthetic construct
  source 1..21: mol_type = other DNA
ttgtcgcgttcaggacgcgac

SEQ ID NO: 10944 - DNA, 21 bp, synthetic construct
  source 1..21: mol_type = other DNA
taccacaggcttgatgcgatg

SEQ ID NO: 10945 - DNA, 21 bp, synthetic construct
  source 1..21: mol_type = other DNA
atgaggtcgggctccggtcca

SEQ ID NO: 10946 - DNA, 21 bp, synthetic construct
  source 1..21: mol_type = other DNA
catccattggcctcgggctgg

SEQ ID NO: 10947 - DNA, 21 bp, synthetic construct
  source 1..21: mol_type = other DNA
ggggggactcgcggcaatacc

SEQ ID NO: 10948 - DNA, 21 bp, synthetic construct
  source 1..21: mol_type = other DNA
tacgctaagtcagcgcaaaac

SEQ ID NO: 10949 - DNA, 21 bp, synthetic construct
  source 1..21: mol_type = other DNA
actgtcggttcgcgcaccgcg

SEQ ID NO: 10950 - DNA, 21 bp, synthetic construct
  source 1..21: mol_type = other DNA
taccagaagaacatgatgaat

SEQ ID NO: 10951 - DNA, 21 bp, synthetic construct
  source 1..21: mol_type = other DNA
tggaaggactggatgcccaat

SEQ ID NO: 10952 - protein, 7 aa, synthetic construct
YSKSNNN

SEQ ID NO: 10953 - protein, 7 aa, synthetic construct
DHGINKW

SEQ ID NO: 10954 - protein, 7 aa, synthetic construct
STGVNKW

SEQ ID NO: 10955 - protein, 7 aa, synthetic construct
YAKGNIN

SEQ ID NO: 10956 - protein, 7 aa, synthetic construct
LHRQNID

SEQ ID NO: 10957 - protein, 7 aa, synthetic construct
HSKVNIN

SEQ ID NO: 10958 - protein, 7 aa, synthetic construct
YAKLNIN

SEQ ID NO: 10959 - protein, 7 aa, synthetic construct
YSKVNIN

SEQ ID NO: 10960 - protein, 7 aa, synthetic construct
YAKANYN

SEQ ID NO: 10961 - protein, 7 aa, synthetic construct
FSKQNYN

SEQ ID NO: 10962 - protein, 7 aa, synthetic construct
YAKSNNN

SEQ ID NO: 10963 - protein, 7 aa, synthetic construct
YSKSNIN

SEQ ID NO: 10964 - protein, 7 aa, synthetic construct
IDEWHHF

SEQ ID NO: 10965 - protein, 7 aa, synthetic construct
YAKANIN

SEQ ID NO: 10966 - protein, 7 aa, synthetic construct
YSKANCN

SEQ ID NO: 10967 - protein, 7 aa, synthetic construct
FSRMNDN

SEQ ID NO: 10968 - protein, 7 aa, synthetic construct
YAKIGYN

SEQ ID NO: 10969 - protein, 7 aa, synthetic construct
GNDYQSY

SEQ ID NO: 10970 - protein, 7 aa, synthetic construct
YAKSNIN

SEQ ID NO: 10971 - protein, 7 aa, synthetic construct
FSKANIN

SEQ ID NO: 10972 - protein, 7 aa, synthetic construct
YSRENYN

SEQ ID NO: 10973 - protein, 7 aa, synthetic construct
YARLNMN

SEQ ID NO: 10974 - protein, 7 aa, synthetic construct
YAKGNNN

SEQ ID NO: 10975 - protein, 7 aa, synthetic construct
TEETYYK

SEQ ID NO: 10976 - protein, 7 aa, synthetic construct
FAKGNIN

SEQ ID NO: 10977 - protein, 7 aa, synthetic construct
YAKQGNN

SEQ ID NO: 10978 - protein, 7 aa, synthetic construct
FSKLGYN

SEQ ID NO: 10979 - protein, 7 aa, synthetic construct
FAKAGYN

SEQ ID NO: 10980 - protein, 7 aa, synthetic construct
YSRFNDN

SEQ ID NO: 10981 - protein, 7 aa, synthetic construct
YSKAGCN

SEQ ID NO: 10982 - protein, 7 aa, synthetic construct
YAKQNIN

SEQ ID NO: 10983 - protein, 7 aa, synthetic construct
DNHSNKW

SEQ ID NO: 10984 - protein, 7 aa, synthetic construct
YAKHGYN

SEQ ID NO: 10985 - protein, 7 aa, synthetic construct
DGLSNKW

SEQ ID NO: 10986 - protein, 7 aa, synthetic construct
FAKTGYN

SEQ ID NO: 10987 - protein, 7 aa, synthetic construct
SNDTVYR

SEQ ID NO: 10988 - protein, 7 aa, synthetic construct
NGTSYSW

SEQ ID NO: 10989 - protein, 7 aa, synthetic construct
FSRMNHN

SEQ ID NO: 10990 - protein, 7 aa, synthetic construct
YSKQGIN

SEQ ID NO: 10991 - protein, 7 aa, synthetic construct
TNNTVYK

SEQ ID NO: 10992 - protein, 7 aa, synthetic construct
DVNGNYA

SEQ ID NO: 10993 - protein, 7 aa, synthetic construct
YSRHNDN

SEQ ID NO: 10994 - protein, 7 aa, synthetic construct
YAKANCN

SEQ ID NO: 10995 - protein, 7 aa, synthetic construct
LSRTSDN

SEQ ID NO: 10996 - protein, 7 aa, synthetic construct
YSRYGDN

SEQ ID NO: 10997 - protein, 7 aa, synthetic construct
YAKPGYN

SEQ ID NO: 10998 - protein, 7 aa, synthetic construct
YAKAGNN

SEQ ID NO: 10999 - protein, 7 aa, synthetic construct
YAKANNN

SEQ ID NO: 11000 - protein, 7 aa, synthetic construct
YSKQNMN

SEQ ID NO: 11001 - protein, 7 aa, synthetic construct
YAKQNMN

SEQ ID NO: 11002 - protein, 7 aa, synthetic construct
IVSTNGV

SEQ ID NO: 11003 - protein, 7 aa, synthetic construct
LAKTGIN

SEQ ID NO: 11004 - protein, 7 aa, synthetic construct
YAKAGIN

SEQ ID NO: 11005 - protein, 7 aa, synthetic construct
LSRLNII

SEQ ID NO: 11006 - protein, 7 aa, synthetic construct
FAKSGIN

SEQ ID NO: 11007 - protein, 7 aa, synthetic construct
DDVSRKW

SEQ ID NO: 11008 - protein, 7 aa, synthetic construct
YVKSDNG

SEQ ID NO: 11009 - protein, 7 aa, synthetic construct
VAHAGIG

SEQ ID NO: 11010 - protein, 7 aa, synthetic construct
FSKLGFN

SEQ ID NO: 11011 - protein, 7 aa, synthetic construct
YAKSGIN

SEQ ID NO: 11012 - protein, 7 aa, synthetic construct
YAKLGNN

SEQ ID NO: 11013 - protein, 7 aa, synthetic construct
YSKTNIN

SEQ ID NO: 11014 - protein, 7 aa, synthetic construct
FSRLSDN

SEQ ID NO: 11015 - protein, 7 aa, synthetic construct
LSKLNDN

SEQ ID NO: 11016 - protein, 7 aa, synthetic construct
YARTGSS

SEQ ID NO: 11017 - protein, 7 aa, synthetic construct
YSKAGIN

SEQ ID NO: 11018 - protein, 7 aa, synthetic construct
LHKLSNQ

SEQ ID NO: 11019 - protein, 7 aa, synthetic construct
YHKLNLV

SEQ ID NO: 11020 - protein, 7 aa, synthetic construct
YSRLDRD

SEQ ID NO: 11021 - protein, 7 aa, synthetic construct
YARIGDN

SEQ ID NO: 11022 - protein, 7 aa, synthetic construct
VESSSKW

SEQ ID NO: 11023 - protein, 7 aa, synthetic construct
YARPGYN

SEQ ID NO: 11024 - protein, 7 aa, synthetic construct
LAKLGPN

SEQ ID NO: 11025 - protein, 7 aa, synthetic construct
YSKHNMN

SEQ ID NO: 11026 - protein, 7 aa, synthetic construct
YAKTGIN

SEQ ID NO: 11027 - protein, 7 aa, synthetic construct
YAKNGIN

SEQ ID NO: 11028 - protein, 7 aa, synthetic construct
LSRTGDN

SEQ ID NO: 11029 - protein, 7 aa, synthetic construct
NDGESQW

SEQ ID NO: 11030 - protein, 7 aa, synthetic construct
YHASSYN

SEQ ID NO: 11031 - protein, 7 aa, synthetic construct
EAYSDRD

SEQ ID NO: 11032 - protein, 7 aa, synthetic construct
YSKTNCN

SEQ ID NO: 11033 - protein, 7 aa, synthetic construct
YSKSGQN

SEQ ID NO: 11034 - protein, 7 aa, synthetic construct
LARGADN

SEQ ID NO: 11035 - protein, 7 aa, synthetic construct
YARLGQN

SEQ ID NO: 11036 - protein, 7 aa, synthetic construct
YFAGKYD

SEQ ID NO: 11037 - protein, 7 aa, synthetic construct
LSKTGNN

SEQ ID NO: 11038 - protein, 7 aa, synthetic construct
LSRSSID

SEQ ID NO: 11039 - protein, 7 aa, synthetic construct
GRFYSDG

SEQ ID NO: 11040 - protein, 7 aa, synthetic construct
YSRHNHN

SEQ ID NO: 11041 - protein, 7 aa, synthetic construct
DKFDNYA

SEQ ID NO: 11042 - protein, 7 aa, synthetic construct
YAKENRN

SEQ ID NO: 11043 - protein, 7 aa, synthetic construct
LSKLNSN

SEQ ID NO: 11044 - protein, 7 aa, synthetic construct
LAKAGIN

SEQ ID NO: 11045 - protein, 7 aa, synthetic construct
LAKNGIN

SEQ ID NO: 11046 - protein, 7 aa, synthetic construct
ASGSSSW

SEQ ID NO: 11047 - protein, 7 aa, synthetic construct
YARLGSN

SEQ ID NO: 11048 - protein, 7 aa, synthetic construct
LSRMNFN

SEQ ID NO: 11049 - protein, 7 aa, synthetic construct
LSRSGDN

SEQ ID NO: 11050 - protein, 7 aa, synthetic construct
MTRIENN

SEQ ID NO: 11051 - protein, 7 aa, synthetic construct
RITHPYS

SEQ ID NO: 11052 - protein, 7 aa, synthetic construct
TSDYMSF

SEQ ID NO: 11053 - protein, 7 aa, synthetic construct
YAKTGCN

SEQ ID NO: 11054 - protein, 7 aa, synthetic construct
YSKVNMN

SEQ ID NO: 11055 - protein, 7 aa, synthetic construct
EHATSNW

SEQ ID NO: 11056 - protein, 7 aa, synthetic construct
MISTNGR

SEQ ID NO: 11057 - protein, 7 aa, synthetic construct
LSRAGDN

SEQ ID NO: 11058 - protein, 7 aa, synthetic construct
FSKINYN

SEQ ID NO: 11059 - protein, 7 aa, synthetic construct
YARVGDN

SEQ ID NO: 11060 - protein, 7 aa, synthetic construct
FSRIGDN

SEQ ID NO: 11061 - protein, 7 aa, synthetic construct
FSKAGNN

SEQ ID NO: 11062 - protein, 7 aa, synthetic construct
HEGHSHW

SEQ ID NO: 11063 - protein, 7 aa, synthetic construct
TVSTNGI

SEQ ID NO: 11064 - protein, 7 aa, synthetic construct
RSDTVYI

SEQ ID NO: 11065 - protein, 7 aa, synthetic construct
YSKANDN

SEQ ID NO: 11066 - protein, 7 aa, synthetic construct
YSKNNYN

SEQ ID NO: 11067 - protein, 7 aa, synthetic construct
YSARNDN

SEQ ID NO: 11068 - protein, 7 aa, synthetic construct
VPSSQVW

SEQ ID NO: 11069 - protein, 7 aa, synthetic construct
FAYENRN

SEQ ID NO: 11070 - protein, 7 aa, synthetic construct
FSKLNPN

SEQ ID NO: 11071 - protein, 7 aa, synthetic construct
YSRNGDN

SEQ ID NO: 11072 - protein, 7 aa, synthetic construct
YSRASDQ

SEQ ID NO: 11073 - protein, 7 aa, synthetic construct
YLKSTNN

SEQ ID NO: 11074 - protein, 7 aa, synthetic construct
FSKLNQN

SEQ ID NO: 11075 - protein, 7 aa, synthetic construct
QHKLQPL

SEQ ID NO: 11076 - protein, 7 aa, synthetic construct
NADYNRN

SEQ ID NO: 11077 - protein, 7 aa, synthetic construct
LSRIGDN

SEQ ID NO: 11078 - protein, 7 aa, synthetic construct
YAKLGPN

SEQ ID NO: 11079 - protein, 7 aa, synthetic construct
LSRLGDN

SEQ ID NO: 11080 - protein, 7 aa, synthetic construct
YAREGYN

SEQ ID NO: 11081 - protein, 7 aa, synthetic construct
HPPAYSS

SEQ ID NO: 11082 - protein, 7 aa, synthetic construct
YSRTNDN

SEQ ID NO: 11083 - protein, 7 aa, synthetic construct
YARLGDN

SEQ ID NO: 11084 - protein, 7 aa, synthetic construct
FAKSGFN

SEQ ID NO: 11085 - protein, 7 aa, synthetic construct
YARMGQN

SEQ ID NO: 11086 - protein, 7 aa, synthetic construct
FARTSDN

SEQ ID NO: 11087 - protein, 7 aa, synthetic construct
LSKIGLN

SEQ ID NO: 11088 - protein, 7 aa, synthetic construct
FTSSNGV

SEQ ID NO: 11089 - protein, 7 aa, synthetic construct
YARANLN

SEQ ID NO: 11090 - protein, 7 aa, synthetic construct
LSKIGQN

SEQ ID NO: 11091 - protein, 7 aa, synthetic construct
FARTGDN

SEQ ID NO: 11092 - protein, 7 aa, synthetic construct
FAKTGNN

SEQ ID NO: 11093 - protein, 7 aa, synthetic construct
FSRINLN

SEQ ID NO: 11094 - protein, 7 aa, synthetic construct
ASEFMTF

SEQ ID NO: 11095 - protein, 7 aa, synthetic construct
FSRAGDN

SEQ ID NO: 11096 - protein, 7 aa, synthetic construct
YSKAGQN

SEQ ID NO: 11097 - protein, 7 aa, synthetic construct
FSRAGFN

SEQ ID NO: 11098 - protein, 7 aa, synthetic construct
FSRYGSN

SEQ ID NO: 11099 - protein, 7 aa, synthetic construct
YARQNTN

SEQ ID NO: 11100 - protein, 7 aa, synthetic construct
MVSTNGV

SEQ ID NO: 11101 - protein, 7 aa, synthetic construct
AKSTNGI

SEQ ID NO: 11102 - protein, 7 aa, synthetic construct
VGSAHNW

SEQ ID NO: 11103 - protein, 7 aa, synthetic construct
YSKQNTN

SEQ ID NO: 11104 - protein, 7 aa, synthetic construct
LARSGDN

SEQ ID NO: 11105 - protein, 7 aa, synthetic construct
ILSTNGI

SEQ ID NO: 11106 - protein, 7 aa, synthetic construct
VFSTNGI

SEQ ID NO: 11107 - protein, 7 aa, synthetic construct
LLSTNGR

SEQ ID NO: 11108 - protein, 7 aa, synthetic construct
YARQGQN

SEQ ID NO: 11109 - protein, 7 aa, synthetic construct
YSRSGIN

SEQ ID NO: 11110 - protein, 7 aa, synthetic construct
LSKVGDN

SEQ ID NO: 11111 - protein, 7 aa, synthetic construct
YSKANTN

SEQ ID NO: 11112 - protein, 7 aa, synthetic construct
GESDRKW

SEQ ID NO: 11113 - protein, 7 aa, synthetic construct
LSKIGVN

SEQ ID NO: 11114 - protein, 7 aa, synthetic construct
LAKSGQN

SEQ ID NO: 11115 - protein, 7 aa, synthetic construct
YAKSGQN

SEQ ID NO: 11116 - protein, 7 aa, synthetic construct
FSKLGHN

SEQ ID NO: 11117 - protein, 7 aa, synthetic construct
YSRVNEN

SEQ ID NO: 11118 - protein, 7 aa, synthetic construct
YSKNNHN

SEQ ID NO: 11119 - protein, 7 aa, synthetic construct
LYSTNGI

SEQ ID NO: 11120 - protein, 7 aa, synthetic construct
YARQGMN

SEQ ID NO: 11121 - protein, 7 aa, synthetic construct
LSKVGSN

SEQ ID NO: 11122 - protein, 7 aa, synthetic construct
EMGGGSW

SEQ ID NO: 11123 - protein, 7 aa, synthetic construct
FAKSGHN

SEQ ID NO: 11124 - protein, 7 aa, synthetic construct
YAKSNMN

SEQ ID NO: 11125 - protein, 7 aa, synthetic construct
YAKANMN

SEQ ID NO: 11126 - protein, 7 aa, synthetic construct
DLSHAKW

SEQ ID NO: 11127 - protein, 7 aa, synthetic construct
GEGIVRW

SEQ ID NO: 11128 - protein, 7 aa, synthetic construct
YSKGNDN

SEQ ID NO: 11129 - protein, 7 aa, synthetic construct
YARVGQN

SEQ ID NO: 11130 - protein, 7 aa, synthetic construct
LARTGDN

SEQ ID NO: 11131 - protein, 7 aa, synthetic construct
LSRSNDN

SEQ ID NO: 11132 - protein, 7 aa, synthetic construct
SVSTNGR

SEQ ID NO: 11133 - protein, 7 aa, synthetic construct
YSKHNVN

SEQ ID NO: 11134 - protein, 7 aa, synthetic construct
YARANVN

SEQ ID NO: 11135 - protein, 7 aa, synthetic construct
LAKNGNN

SEQ ID NO: 11136 - protein, 7 aa, synthetic construct
LHKLTVS

SEQ ID NO: 11137 - protein, 7 aa, synthetic construct
LAKQGFN

SEQ ID NO: 11138 - protein, 7 aa, synthetic construct
GNDMSTW

SEQ ID NO: 11139 - protein, 7 aa, synthetic construct
FVSTNGI

SEQ ID NO: 11140 - protein, 7 aa, synthetic construct
FSRINDN

SEQ ID NO: 11141 - protein, 7 aa, synthetic construct
FARAGMN

SEQ ID NO: 11142 - protein, 7 aa, synthetic construct
GSGIQNW

SEQ ID NO: 11143 - protein, 7 aa, synthetic construct
YVSTNGV

SEQ ID NO: 11144 - protein, 7 aa, synthetic construct
LSKAGFN

SEQ ID NO: 11145 - protein, 7 aa, synthetic construct
YSKGNMN

SEQ ID NO: 11146 - protein, 7 aa, synthetic construct
YARQGDN

SEQ ID NO: 11147 - protein, 7 aa, synthetic construct
YAKTGQN

SEQ ID NO: 11148 - protein, 7 aa, synthetic construct
TRNGNIA

SEQ ID NO: 11149 - protein, 7 aa, synthetic construct
QVSTNGV

SEQ ID NO: 11150 - protein, 7 aa, synthetic construct
FHSTNGI

SEQ ID NO: 11151 - protein, 7 aa, synthetic construct
TRIGNNA

SEQ ID NO: 11152 - protein, 7 aa, synthetic construct
FVRSDIK

SEQ ID NO: 11153 - protein, 7 aa, synthetic construct
FSKTGPN

SEQ ID NO: 11154 - protein, 7 aa, synthetic construct
LSKLGPN

SEQ ID NO: 11155 - protein, 7 aa, synthetic construct
VKSMNGV

SEQ ID NO: 11156 - protein, 7 aa, synthetic construct
LFSTNGV

SEQ ID NO: 11157 - protein, 7 aa, synthetic construct
YARSGDN

SEQ ID NO: 11158 - protein, 7 aa, synthetic construct
YSKQGSN

SEQ ID NO: 11159 - protein, 7 aa, synthetic construct
YAKLNFN

SEQ ID NO: 11160 - protein, 7 aa, synthetic construct
IESTNGV

SEQ ID NO: 11161 - protein, 7 aa, synthetic construct
LHRATYD

SEQ ID NO: 11162 - protein, 7 aa, synthetic construct
FVSTNGV

SEQ ID NO: 11163 - protein, 7 aa, synthetic construct
YAKDNWN

SEQ ID NO: 11164 - protein, 7 aa, synthetic construct
PQSTNGV

SEQ ID NO: 11165 - protein, 7 aa, synthetic construct
YSKWNDN

SEQ ID NO: 11166 - protein, 7 aa, synthetic construct
LAKQGHN

SEQ ID NO: 11167 - protein, 7 aa, synthetic construct
SISTNGR

SEQ ID NO: 11168 - protein, 7 aa, synthetic construct
YAKLGFN

SEQ ID NO: 11169 - protein, 7 aa, synthetic construct
LHKASPT

SEQ ID NO: 11170 - protein, 7 aa, synthetic construct
YSSLNPK

SEQ ID NO: 11171 - protein, 7 aa, synthetic construct
YARTNDN

SEQ ID NO: 11172 - protein, 7 aa, synthetic construct
LAKNGFN

SEQ ID NO: 11173 - protein, 7 aa, synthetic construct
LAKSGMN

SEQ ID NO: 11174 - protein, 7 aa, synthetic construct
FSKAGIN

SEQ ID NO: 11175 - protein, 7 aa, synthetic construct
LSKQGNN

SEQ ID NO: 11176 - protein, 7 aa, synthetic construct
FSKTGFN

SEQ ID NO: 11177 - protein, 7 aa, synthetic construct
YSKQGMN

SEQ ID NO: 11178 - protein, 7 aa, synthetic construct
LSKMGPN

SEQ ID NO: 11179 - protein, 7 aa, synthetic construct
YARLNDN

SEQ ID NO: 11180 - protein, 7 aa, synthetic construct
YSRMGDN

SEQ ID NO: 11181 - protein, 7 aa, synthetic construct
RNEGSSW

SEQ ID NO: 11182 - protein, 7 aa, synthetic construct
YSKSGYN

SEQ ID NO: 11183 - protein, 7 aa, synthetic construct
LAKQGLN

SEQ ID NO: 11184 - protein, 7 aa, synthetic construct
HKSTNGY

SEQ ID NO: 11185 - protein, 7 aa, synthetic construct
LSKLGLN

SEQ ID NO: 11186 - protein, 7 aa, synthetic construct
QDGNSRY

SEQ ID NO: 11187 - protein, 7 aa, synthetic construct
LSRMNDN

SEQ ID NO: 11188 - protein, 7 aa, synthetic construct
LAKGGFN

SEQ ID NO: 11189 - protein, 7 aa, synthetic construct
LSKSGPN

SEQ ID NO: 11190 - protein, 7 aa, synthetic construct
FMSTNGV

SEQ ID NO: 11191 - protein, 7 aa, synthetic construct
YGSTNGV

SEQ ID NO: 11192 - protein, 7 aa, synthetic construct
MSKLNAN

SEQ ID NO: 11193 - protein, 7 aa, synthetic construct
KLPDYGN

SEQ ID NO: 11194 - protein, 7 aa, synthetic construct
YAKQGFN

SEQ ID NO: 11195 - protein, 7 aa, synthetic construct
THSGKSA

SEQ ID NO: 11196 - protein, 7 aa, synthetic construct
FSRTGDN

SEQ ID NO: 11197 - protein, 7 aa, synthetic construct
LAKSGLN

SEQ ID NO: 11198 - protein, 7 aa, synthetic construct
FARAGPN

SEQ ID NO: 11199 - protein, 7 aa, synthetic construct
YSKMNTN

SEQ ID NO: 11200 - protein, 7 aa, synthetic construct
LQSTNGI

SEQ ID NO: 11201 - protein, 7 aa, synthetic construct
MTSTNGV

SEQ ID NO: 11202 - protein, 7 aa, synthetic construct
YARPGIN

SEQ ID NO: 11203 - protein, 7 aa, synthetic construct
YAKTGFN

SEQ ID NO: 11204 - protein, 7 aa, synthetic construct
YAKNGHN

SEQ ID NO: 11205 - protein, 7 aa, synthetic construct
FSKVGMN

SEQ ID NO: 11206 - protein, 7 aa, synthetic construct
LAKTGMN

SEQ ID NO: 11207 - protein, 7 aa, synthetic construct
LSKTGPN

SEQ ID NO: 11208 - protein, 7 aa, synthetic construct
MSSTNGV

SEQ ID NO: 11209 - protein, 7 aa, synthetic construct
LSRQNDN

SEQ ID NO: 11210 - protein, 7 aa, synthetic construct
YAKSGGN

SEQ ID NO: 11211 - protein, 7 aa, synthetic construct
LAKAGHN

SEQ ID NO: 11212 - protein, 7 aa, synthetic construct
YSKTGHN

SEQ ID NO: 11213 - protein, 7 aa, synthetic construct
WASTNGV

SEQ ID NO: 11214 - protein, 7 aa, synthetic construct
IVSTNGI

SEQ ID NO: 11215 - protein, 7 aa, synthetic construct
YAKGGQN

SEQ ID NO: 11216 - protein, 7 aa, synthetic construct
FAKTGHN

SEQ ID NO: 11217 - protein, 7 aa, synthetic construct
FAKGGIN

SEQ ID NO: 11218 - protein, 7 aa, synthetic construct
YSKHNDN

SEQ ID NO: 11219 - protein, 7 aa, synthetic construct
FSKVGAN

SEQ ID NO: 11220 - protein, 7 aa, synthetic construct
YAKNGYN

SEQ ID NO: 11221 - protein, 7 aa, synthetic construct
FSKIGPN

SEQ ID NO: 11222 - protein, 7 aa, synthetic construct
FAKSGNN

SEQ ID NO: 11223 - protein, 7 aa, synthetic construct
YSRQGTN

SEQ ID NO: 11224 - protein, 7 aa, synthetic construct
HISTNGV

SEQ ID NO: 11225 - protein, 7 aa, synthetic construct
YARAGQN

SEQ ID NO: 11226 - protein, 7 aa, synthetic construct
YSKMGMN

SEQ ID NO: 11227 - protein, 7 aa, synthetic construct
LAKTGHN

SEQ ID NO: 11228 - protein, 7 aa, synthetic construct
YSKQNPN

SEQ ID NO: 11229 - protein, 7 aa, synthetic construct
YARAGKD

SEQ ID NO: 11230 - protein, 7 aa, synthetic construct
YSKVGDN

SEQ ID NO: 11231 - protein, 7 aa, synthetic construct
FISTNGI

SEQ ID NO: 11232 - protein, 7 aa, synthetic construct
FASTNGI

SEQ ID NO: 11233 - protein, 7 aa, synthetic construct
FWSGEVS

SEQ ID NO: 11234 - protein, 7 aa, synthetic construct
CSGRPQE

SEQ ID NO: 11235 - protein, 7 aa, synthetic construct
FASTNGV

SEQ ID NO: 11236 - protein, 7 aa, synthetic construct
LSKSSVN

SEQ ID NO: 11237 - protein, 7 aa, synthetic construct
FAKGGWN

SEQ ID NO: 11238 - protein, 7 aa, synthetic construct
YSKLGIN

SEQ ID NO: 11239 - protein, 7 aa, synthetic construct
LSKVGMN

SEQ ID NO: 11240 - protein, 7 aa, synthetic construct
TYSGNNA

SEQ ID NO: 11241 - protein, 7 aa, synthetic construct
RSPVTFP

SEQ ID NO: 11242 - protein, 7 aa, synthetic construct
LARPGPN

SEQ ID NO: 11243 - protein, 7 aa, synthetic construct
LAKGGIN

SEQ ID NO: 11244 - protein, 7 aa, synthetic construct
IVSTNGR

SEQ ID NO: 11245 - protein, 7 aa, synthetic construct
WESTNGV

SEQ ID NO: 11246 - protein, 7 aa, synthetic construct
YAKNGVN

SEQ ID NO: 11247 - protein, 7 aa, synthetic construct
LSRTGEN

SEQ ID NO: 11248 - protein, 7 aa, synthetic construct
TKLGDNA

SEQ ID NO: 11249 - protein, 7 aa, synthetic construct
FSKQGYN

SEQ ID NO: 11250 - protein, 7 aa, synthetic construct
FDSTNGI

SEQ ID NO: 11251 - protein, 7 aa, synthetic construct
YARNGDN

SEQ ID NO: 11252 - protein, 7 aa, synthetic construct
LSKVGEN

SEQ ID NO: 11253 - protein, 7 aa, synthetic construct
LSKLGIN

SEQ ID NO: 11254 - protein, 7 aa, synthetic construct
YARQGEN

SEQ ID NO: 11255 - protein, 7 aa, synthetic construct
YVSTNGI

SEQ ID NO: 11256 - protein, 7 aa, synthetic construct
QESTNGV

SEQ ID NO: 11257 - protein, 7 aa, synthetic construct
LHARGLD

SEQ ID NO: 11258 - protein, 7 aa, synthetic construct
YARLNVN

SEQ ID NO: 11259 - protein, 7 aa, synthetic construct
PYAVSMK

SEQ ID NO: 11260 - protein, 7 aa, synthetic construct
YSKVNFN

SEQ ID NO: 11261 - protein, 7 aa, synthetic construct
LSKTGHN

SEQ ID NO: 11262 - protein, 7 aa, synthetic construct
VMSTNGI

SEQ ID NO: 11263 - protein, 7 aa, synthetic construct
LAKTGQN

SEQ ID NO: 11264 - protein, 7 aa, synthetic construct
YAKGGFN

SEQ ID NO: 11265 - protein, 7 aa, synthetic construct
LSKAGPN

SEQ ID NO: 11266 - protein, 7 aa, synthetic construct
FAKTGMN

SEQ ID NO: 11267 - protein, 7 aa, synthetic construct
LSKAGMN

SEQ ID NO: 11268 - protein, 7 aa, synthetic construct
YSKQGDN

SEQ ID NO: 11269 - protein, 7 aa, synthetic construct
YARDGYN

SEQ ID NO: 11270 - protein, 7 aa, synthetic construct
YSRQGMN

SEQ ID NO: 11271 - protein, 7 aa, synthetic construct
LAKTGFN

SEQ ID NO: 11272 - protein, 7 aa, synthetic construct
TLSTNGI

SEQ ID NO: 11273 - protein, 7 aa, synthetic construct
AISTNGR

SEQ ID NO: 11274 - protein, 7 aa, synthetic construct
YARNGQN

SEQ ID NO: 11275 - protein, 7 aa, synthetic construct
YAKPGNN

SEQ ID NO: 11276 - protein, 7 aa, synthetic construct
FSKLNTN

SEQ ID NO: 11277 - protein, 7 aa, synthetic construct
IKSTNGV

SEQ ID NO: 11278 - protein, 7 aa, synthetic construct
TLSANGR

SEQ ID NO: 11279 - protein, 7 aa, synthetic construct
RESTNGV

SEQ ID NO: 11280 - protein, 7 aa, synthetic construct
YAKPGFN

SEQ ID NO: 11281 - protein, 7 aa, synthetic construct
YARAGIN

SEQ ID NO: 11282 - protein, 7 aa, synthetic construct
AKSTNGV

SEQ ID NO: 11283 - protein, 7 aa, synthetic construct
VKYDWSD

SEQ ID NO: 11284 - protein, 7 aa, synthetic construct
YHKTSLN

SEQ ID NO: 11285 - protein, 7 aa, synthetic construct
YAKGNPN

SEQ ID NO: 11286 - protein, 7 aa, synthetic construct
EWSTNGR

SEQ ID NO: 11287 - protein, 7 aa, synthetic construct
LKSTNGI

SEQ ID NO: 11288 - protein, 7 aa, synthetic construct
VGSTNGI

SEQ ID NO: 11289 - protein, 7 aa, synthetic construct
RDETRLW

SEQ ID NO: 11290 - protein, 7 aa, synthetic construct
LAKQGIN

SEQ ID NO: 11291 - protein, 7 aa, synthetic construct
YSRMGEN

SEQ ID NO: 11292 - protein, 7 aa, synthetic construct
VQSTNGI

SEQ ID NO: 11293 - protein, 7 aa, synthetic construct
YSKTGLN

SEQ ID NO: 11294 - protein, 7 aa, synthetic construct
YSKQGVN

SEQ ID NO: 11295 - protein, 7 aa, synthetic construct
FSKLNLN

SEQ ID NO: 11296 - protein, 7 aa, synthetic construct
YAKSGLN

SEQ ID NO: 11297 - protein, 7 aa, synthetic construct
SETSSRW

SEQ ID NO: 11298 - protein, 7 aa, synthetic construct
IPQTNYA

SEQ ID NO: 11299 - protein, 7 aa, synthetic construct
GNMNRYD

SEQ ID NO: 11300 - protein, 7 aa, synthetic construct
LLSTNGI

SEQ ID NO: 11301 - protein, 7 aa, synthetic construct
HGGASAY

SEQ ID NO: 11302 - protein, 7 aa, synthetic construct
EKSTNGR

SEQ ID NO: 11303 - protein, 7 aa, synthetic construct
LSRMGDN

SEQ ID NO: 11304 - protein, 7 aa, synthetic construct
GNDGSKY

SEQ ID NO: 11305 - protein, 7 aa, synthetic construct
YSKGNTN

SEQ ID NO: 11306 - protein, 7 aa, synthetic construct
FAKTGPN

SEQ ID NO: 11307 - protein, 7 aa, synthetic construct
YARLGVN

SEQ ID NO: 11308 - protein, 7 aa, synthetic construct
YSKGNVN

SEQ ID NO: 11309 - protein, 7 aa, synthetic construct
YMSTNGI

SEQ ID NO: 11310 - protein, 7 aa, synthetic construct
SYSTNGI

SEQ ID NO: 11311 - protein, 7 aa, synthetic construct
YSKSNVN

SEQ ID NO: 11312 - protein, 7 aa, synthetic construct
SLSTNGR

SEQ ID NO: 11313 - protein, 7 aa, synthetic construct
YSRHGTN

SEQ ID NO: 11314 - protein, 7 aa, synthetic construct
YSKTGGN

SEQ ID NO: 11315 - protein, 7 aa, synthetic construct
YSKANAN

SEQ ID NO: 11316 - protein, 7 aa, synthetic construct
LAKSGIN

SEQ ID NO: 11317 - protein, 7 aa, synthetic construct
LAKGGQN

SEQ ID NO: 11318 - protein, 7 aa, synthetic construct
YSKGNQN

SEQ ID NO: 11319 - protein, 7 aa, synthetic construct
LSKAGQN

SEQ ID NO: 11320 - protein, 7 aa, synthetic construct
WDSSNGV

SEQ ID NO: 11321 - protein, 7 aa, synthetic construct
LAKSGSN

SEQ ID NO: 11322 - protein, 7 aa, synthetic construct
YSKYGPN

SEQ ID NO: 11323 - protein, 7 aa, synthetic construct
LSKAGHN

SEQ ID NO: 11324 - protein, 7 aa, synthetic construct
LSKMNLN

SEQ ID NO: 11325 - protein, 7 aa, synthetic construct
LAKGGLN

SEQ ID NO: 11326 - protein, 7 aa, synthetic construct
LSKVGLN

SEQ ID NO: 11327 - protein, 7 aa, synthetic construct
FAKGGHN

SEQ ID NO: 11328 - protein, 7 aa, synthetic construct
EQSTNGR

SEQ ID NO: 11329 - protein, 7 aa, synthetic construct
GEVNVRW

SEQ ID NO: 11330 - protein, 7 aa, synthetic construct
PMSTNGR

SEQ ID NO: 11331 - protein, 7 aa, synthetic construct
NVSTNGR

SEQ ID NO: 11332 - protein, 7 aa, synthetic construct
YARLNAN

SEQ ID NO: 11333 - protein, 7 aa, synthetic construct
LAKNGHN

SEQ ID NO: 11334 - protein, 7 aa, synthetic construct
NTSTNGV

SEQ ID NO: 11335 - protein, 7 aa, synthetic construct
LARNGDN

SEQ ID NO: 11336 - protein, 7 aa, synthetic construct
YAKIGLN

SEQ ID NO: 11337 - protein, 7 aa, synthetic construct
YSKTGDN

SEQ ID NO: 11338 - protein, 7 aa, synthetic construct
ITSTNGI

SEQ ID NO: 11339 - protein, 7 aa, synthetic construct
YSKNNFN

SEQ ID NO: 11340 - protein, 7 aa, synthetic construct
TYSTNGI

SEQ ID NO: 11341 - protein, 7 aa, synthetic construct
GMDGNKY

SEQ ID NO: 11342 - protein, 7 aa, synthetic construct
LMSTNGI

SEQ ID NO: 11343 - protein, 7 aa, synthetic construct
MQSTNGV

SEQ ID NO: 11344 - protein, 7 aa, synthetic construct
YAKAGAN

SEQ ID NO: 11345 - protein, 7 aa, synthetic construct
LAKTGSN

SEQ ID NO: 11346 - protein, 7 aa, synthetic construct
LSKIGMN

SEQ ID NO: 11347 - protein, 7 aa, synthetic construct
FSKTGNN

SEQ ID NO: 11348 - protein, 7 aa, synthetic construct
YSKTGAN

SEQ ID NO: 11349 - protein, 7 aa, synthetic construct
ANGRSLY

SEQ ID NO: 11350 - protein, 7 aa, synthetic construct
YAKSGVN

SEQ ID NO: 11351 - protein, 7 aa, synthetic construct
YSRININ

SEQ ID NO: 11352 - protein, 7 aa, synthetic construct
YSKIGEN

SEQ ID NO: 11353 - protein, 7 aa, synthetic construct
HMSTNGV

SEQ ID NO: 11354 - protein, 7 aa, synthetic construct
AQSTNGV

SEQ ID NO: 11355 - protein, 7 aa, synthetic construct
LAKSGHN

SEQ ID NO: 11356 - protein, 7 aa, synthetic construct
LAKMGFN

SEQ ID NO: 11357 - protein, 7 aa, synthetic construct
RSETVYQ

SEQ ID NO: 11358 - protein, 7 aa, synthetic construct
YSKSGTN

SEQ ID NO: 11359 - protein, 7 aa, synthetic construct
YSKGNAN

SEQ ID NO: 11360 - protein, 7 aa, synthetic construct
GGSNSSW

SEQ ID NO: 11361 - protein, 7 aa, synthetic construct
AHSTNGV

SEQ ID NO: 11362 - protein, 7 aa, synthetic construct
LSKAGVN

SEQ ID NO: 11363 - protein, 7 aa, synthetic construct
IASTNGI

SEQ ID NO: 11364 - protein, 7 aa, synthetic construct
REPNVQW

SEQ ID NO: 11365 - protein, 7 aa, synthetic construct
YASSGYN

SEQ ID NO: 11366 - protein, 7 aa, synthetic construct
VSSSNGV

SEQ ID NO: 11367 - protein, 7 aa, synthetic construct
FARSGVN

SEQ ID NO: 11368 - protein, 7 aa, synthetic construct
YAKTGLN

SEQ ID NO: 11369 - protein, 7 aa, synthetic construct
YARSNDN

SEQ ID NO: 11370 - protein, 7 aa, synthetic construct
FARNGQN

SEQ ID NO: 11371 - protein, 7 aa, synthetic construct
LAKQGPN

SEQ ID NO: 11372 - protein, 7 aa, synthetic construct
NQADLRW

SEQ ID NO: 11373 - protein, 7 aa, synthetic construct
DPSDKRW

SEQ ID NO: 11374 - protein, 7 aa, synthetic construct
LSSTNGI

SEQ ID NO: 11375 - protein, 7 aa, synthetic construct
HKSTNGI

SEQ ID NO: 11376 - protein, 7 aa, synthetic construct
YAKTGDN

SEQ ID NO: 11377 - protein, 7 aa, synthetic construct
YSKNGLN

SEQ ID NO: 11378 - protein, 7 aa, synthetic construct
FARNGMN

SEQ ID NO: 11379 - protein, 7 aa, synthetic construct
EKSTNGI

SEQ ID NO: 11380 - protein, 7 aa, synthetic construct
IGGTSNY

SEQ ID NO: 11381 - protein, 7 aa, synthetic construct
YSRANNN

SEQ ID NO: 11382 - protein, 7 aa, synthetic construct
LSKQGYN

SEQ ID NO: 11383 - protein, 7 aa, synthetic construct
LAKTGVN

SEQ ID NO: 11384 - protein, 7 aa, synthetic construct
YSKIGTN

SEQ ID NO: 11385 - protein, 7 aa, synthetic construct
YSRLGFN

SEQ ID NO: 11386 - protein, 7 aa, synthetic construct
IHSSNGV

SEQ ID NO: 11387 - protein, 7 aa, synthetic construct
MSESSRW

SEQ ID NO: 11388 - protein, 7 aa, synthetic construct
YSRNGLN

SEQ ID NO: 11389 - protein, 7 aa, synthetic construct
LAKTGAN

SEQ ID NO: 11390 - protein, 7 aa, synthetic construct
LARGGDN

SEQ ID NO: 11391 - protein, 7 aa, synthetic construct
FSKLNMN

SEQ ID NO: 11392 - protein, 7 aa, synthetic construct
TRSGSSA

SEQ ID NO: 11393 - protein, 7 aa, synthetic construct
YAKANLN

SEQ ID NO: 11394 - protein, 7 aa, synthetic construct
YAKHGFN

SEQ ID NO: 11395 - protein, 7 aa, synthetic construct
SVSTNGI

SEQ ID NO: 11396 - protein, 7 aa, synthetic construct
IGSTNGI

SEQ ID NO: 11397 - protein, 7 aa, synthetic construct
LSKLNPN

SEQ ID NO: 11398 - protein, 7 aa, synthetic construct
YSKTGNN

SEQ ID NO: 11399 - protein, 7 aa, synthetic construct
YSKHNSN

SEQ ID NO: 11400 - protein, 7 aa, synthetic construct
FVSTNGR

SEQ ID NO: 11401 - protein, 7 aa, synthetic construct
YAKANVN

SEQ ID NO: 11402 - protein, 7 aa, synthetic construct
TNSTHGI

SEQ ID NO: 11403 - protein, 7 aa, synthetic construct
LSKSGLN

SEQ ID NO: 11404 - protein, 7 aa, synthetic construct
RDEFRAY

SEQ ID NO: 11405 - protein, 7 aa, synthetic construct
LGSTNGR

SEQ ID NO: 11406 - protein, 7 aa, synthetic construct
QKSTNGV

SEQ ID NO: 11407 - protein, 7 aa, synthetic construct
YSKAGGN

SEQ ID NO: 11408 - protein, 7 aa, synthetic construct
VVSTNGV

SEQ ID NO: 11409 - protein, 7 aa, synthetic construct
PKSTNGV

SEQ ID NO: 11410 - protein, 7 aa, synthetic construct
SDSSNGR

SEQ ID NO: 11411 - protein, 7 aa, synthetic construct
YSKANSN

SEQ ID NO: 11412 - protein, 7 aa, synthetic construct
LSKSGFN

SEQ ID NO: 11413 - protein, 7 aa, synthetic construct
ATSTNGV

SEQ ID NO: 11414 - protein, 7 aa, synthetic construct
REGTSYY

SEQ ID NO: 11415 - protein, 7 aa, synthetic construct
FSSTNGI

SEQ ID NO: 11416 - protein, 7 aa, synthetic construct
YQSTNGI

SEQ ID NO: 11417 - protein, 7 aa, synthetic construct
YARSNEN

SEQ ID NO: 11418 - protein, 7 aa, synthetic construct
HESTNGV

SEQ ID NO: 11419 - protein, 7 aa, synthetic construct
STSTNGI

SEQ ID NO: 11420 - protein, 7 aa, synthetic construct
VYSSNGV

SEQ ID NO: 11421 - protein, 7 aa, synthetic construct
ESSTNGR

SEQ ID NO: 11422 - protein, 7 aa, synthetic construct
LAKMGMN

SEQ ID NO: 11423 - protein, 7 aa, synthetic construct
TKSTNGV

SEQ ID NO: 11424 - protein, 7 aa, synthetic construct
YAKVGPN

SEQ ID NO: 11425 - protein, 7 aa, synthetic construct
NASTNGR

SEQ ID NO: 11426 - protein, 7 aa, synthetic construct
YARLGFN

SEQ ID NO: 11427 - protein, 7 aa, synthetic construct
MSEASTW

SEQ ID NO: 11428 - protein, 7 aa, synthetic construct
LAKIGPN

SEQ ID NO: 11429 - protein, 7 aa, synthetic construct
NSGTAKY

SEQ ID NO: 11430 - protein, 7 aa, synthetic construct
FSKAGPN

SEQ ID NO: 11431 - protein, 7 aa, synthetic construct
YAKGGDN

SEQ ID NO: 11432 - protein, 7 aa, synthetic construct
LAKSGTN

SEQ ID NO: 11433 - protein, 7 aa, synthetic construct
LSKMGHN

SEQ ID NO: 11434 - protein, 7 aa, synthetic construct
TTSQNGR

SEQ ID NO: 11435 - protein, 7 aa, synthetic construct
YSRINFN

SEQ ID NO: 11436 - protein, 7 aa, synthetic construct
YAKGGNN

SEQ ID NO: 11437 - protein, 7 aa, synthetic construct
FSRQNDN

SEQ ID NO: 11438 - protein, 7 aa, synthetic construct
TYSTNGV

SEQ ID NO: 11439 - protein, 7 aa, synthetic construct
FAKTGFN

SEQ ID NO: 11440 - protein, 7 aa, synthetic construct
DGGTSRY

SEQ ID NO: 11441 - protein, 7 aa, synthetic construct
LSKGNYN

SEQ ID NO: 11442 - protein, 7 aa, synthetic construct
HDSSNGV

SEQ ID NO: 11443 - protein, 7 aa, synthetic construct
LKNGQSA

SEQ ID NO: 11444 - protein, 7 aa, synthetic construct
QDTSSRW

SEQ ID NO: 11445 - protein, 7 aa, synthetic construct
YAKAGLN

SEQ ID NO: 11446 - protein, 7 aa, synthetic construct
LSKQNIN

SEQ ID NO: 11447 - protein, 7 aa, synthetic construct
LHSTNGV

SEQ ID NO: 11448 - protein, 7 aa, synthetic construct
YESSNGV

SEQ ID NO: 11449 - protein, 7 aa, synthetic construct
YAKSNFN

SEQ ID NO: 11450 - protein, 7 aa, synthetic construct
TGSTNGI

SEQ ID NO: 11451 - protein, 7 aa, synthetic construct
TQSTNGV

SEQ ID NO: 11452 - protein, 7 aa, synthetic construct
YESTNGI

SEQ ID NO: 11453 - protein, 7 aa, synthetic construct
MKSTNGV

SEQ ID NO: 11454 - protein, 7 aa, synthetic construct
YSKDNWN

SEQ ID NO: 11455 - protein, 7 aa, synthetic construct
HVSTNGV

SEQ ID NO: 11456 - protein, 7 aa, synthetic construct
LVSTNGV

SEQ ID NO: 11457 - protein, 7 aa, synthetic construct
FSKVGTN

SEQ ID NO: 11458 - protein, 7 aa, synthetic construct
YSKAGVN

SEQ ID NO: 11459 - protein, 7 aa, synthetic construct
FGSTNGV

SEQ ID NO: 11460 - protein, 7 aa, synthetic construct
LAKGGHN

SEQ ID NO: 11461 - protein, 7 aa, synthetic construct
VASSNGV

SEQ ID NO: 11462 - protein, 7 aa, synthetic construct
IKSTNGI

SEQ ID NO: 11463 - protein, 7 aa, synthetic construct
TRSGDIA

SEQ ID NO: 11464 - protein, 7 aa, synthetic construct
YSKGNLN

SEQ ID NO: 11465 - protein, 7 aa, synthetic construct
FAKQGWN

SEQ ID NO: 11466 - protein, 7 aa, synthetic construct
LSKAGLN

SEQ ID NO: 11467 - protein, 7 aa, synthetic construct
SFSTNGI

SEQ ID NO: 11468 - protein, 7 aa, synthetic construct
YSRPGHN

SEQ ID NO: 11469 - protein, 7 aa, synthetic construct
TRDTNGR

SEQ ID NO: 11470 - protein, 7 aa, synthetic construct
YAKTGGN

SEQ ID NO: 11471 - protein, 7 aa, synthetic construct
YARGNDN

SEQ ID NO: 11472 - protein, 7 aa, synthetic construct
VASTNGI

SEQ ID NO: 11473 - protein, 7 aa, synthetic construct
AQSTNGI

SEQ ID NO: 11474 - protein, 7 aa, synthetic construct
FAKTGIN

SEQ ID NO: 11475 - protein, 7 aa, synthetic construct
RASDVYP

SEQ ID NO: 11476 - protein, 7 aa, synthetic construct
RGSDVFP

SEQ ID NO: 11477 - protein, 7 aa, synthetic construct
LAKGGPN

SEQ ID NO: 11478 - protein, 7 aa, synthetic construct
LSKAGAN

SEQ ID NO: 11479 - protein, 7 aa, synthetic construct
YAKGNFN

SEQ ID NO: 11480 - protein, 7 aa, synthetic construct
ADSTNGR

SEQ ID NO: 11481 - protein, 7 aa, synthetic construct
LAKAGYN

SEQ ID NO: 11482 - protein, 7 aa, synthetic construct
LSKVGVN

SEQ ID NO: 11483 - protein, 7 aa, synthetic construct
YSKGNIN

SEQ ID NO: 11484 - protein, 7 aa, synthetic construct
WSSSNGV

SEQ ID NO: 11485 - protein, 7 aa, synthetic construct
AVSTNGR

SEQ ID NO: 11486 - protein, 7 aa, synthetic construct
LSKIGNN

SEQ ID NO: 11487 - protein, 7 aa, synthetic construct
IDSTNGV

SEQ ID NO: 11488 - protein, 7 aa, synthetic construct
SSDYKIY

SEQ ID NO: 11489 - protein, 7 aa, synthetic construct
FSKAGFN

SEQ ID NO: 11490 - protein, 7 aa, synthetic construct
FESTNGV

SEQ ID NO: 11491 - protein, 7 aa, synthetic construct
SNSREGI

SEQ ID NO: 11492 - protein, 7 aa, synthetic construct
YSKANVN

SEQ ID NO: 11493 - protein, 7 aa, synthetic construct
SHSTNGV

SEQ ID NO: 11494 - protein, 7 aa, synthetic construct
YSRGNEN

SEQ ID NO: 11495 - protein, 7 aa, synthetic construct
LSKTGIN

SEQ ID NO: 11496 - protein, 7 aa, synthetic construct
YSKSNDN

SEQ ID NO: 11497 - protein, 7 aa, synthetic construct
YSRHGFN

SEQ ID NO: 11498 - protein, 7 aa, synthetic construct
YARYGDN

SEQ ID NO: 11499 - protein, 7 aa, synthetic construct
YSRQNDN

SEQ ID NO: 11500 - protein, 7 aa, synthetic construct
LSKGNFN

SEQ ID NO: 11501 - protein, 7 aa, synthetic construct
QKSTNGI

SEQ ID NO: 11502 - protein, 7 aa, synthetic construct
FARNGAN

SEQ ID NO: 11503 - protein, 7 aa, synthetic construct
FISTNGV

SEQ ID NO: 11504 - protein, 7 aa, synthetic construct
YAKQGLN

SEQ ID NO: 11505 - protein, 7 aa, synthetic construct
DYTGRIA

SEQ ID NO: 11506 - protein, 7 aa, synthetic construct
TYSSNGV

SEQ ID NO: 11507 - protein, 7 aa, synthetic construct
SRSTNGA

SEQ ID NO: 11508 - protein, 7 aa, synthetic construct
YSKHNAN

SEQ ID NO: 11509 - protein, 7 aa, synthetic construct
LARPGIN

SEQ ID NO: 11510 - protein, 7 aa, synthetic construct
VPYTSSN

SEQ ID NO: 11511 - protein, 7 aa, synthetic construct
YHSSNGV

SEQ ID NO: 11512 - protein, 7 aa, synthetic construct
YHKNGYN

SEQ ID NO: 11513 - protein, 7 aa, synthetic construct
IFSTNGV

SEQ ID NO: 11514 - protein, 7 aa, synthetic construct
FSKANVN

SEQ ID NO: 11515 - protein, 7 aa, synthetic construct
YAKNGSN

SEQ ID NO: 11516 - protein, 7 aa, synthetic construct
AESTNGR

SEQ ID NO: 11517 - protein, 7 aa, synthetic construct
YAKAGTN

SEQ ID NO: 11518 - protein, 7 aa, synthetic construct
HISTNGI

SEQ ID NO: 11519 - protein, 7 aa, synthetic construct
YAKAGVN

SEQ ID NO: 11520 - protein, 7 aa, synthetic construct
FSKTGYN

SEQ ID NO: 11521 - protein, 7 aa, synthetic construct
YARGGDN

SEQ ID NO: 11522 - protein, 7 aa, synthetic construct
VESTNGV

SEQ ID NO: 11523 - protein, 7 aa, synthetic construct
FQSSNGV

SEQ ID NO: 11524 - protein, 7 aa, synthetic construct
SHSSNGV

SEQ ID NO: 11525 - protein, 7 aa, synthetic construct
YAKSNHN

SEQ ID NO: 11526 - protein, 7 aa, synthetic construct
LARLGDN

SEQ ID NO: 11527 - protein, 7 aa, synthetic construct
LQSTNGV

SEQ ID NO: 11528 - protein, 7 aa, synthetic construct
YSKANIN

SEQ ID NO: 11529 - protein, 7 aa, synthetic construct
HNSSNGV

SEQ ID NO: 11530 - protein, 7 aa, synthetic construct
LSKQGPN

SEQ ID NO: 11531 - protein, 7 aa, synthetic construct
VISTNGI

SEQ ID NO: 11532 - protein, 7 aa, synthetic construct
FAKSGLN

SEQ ID NO: 11533 - protein, 7 aa, synthetic construct
YAKVGAN

SEQ ID NO: 11534 - protein, 7 aa, synthetic construct
LSSTNGV

SEQ ID NO: 11535 - protein, 7 aa, synthetic construct
YAKGGSN

SEQ ID NO: 11536 - protein, 7 aa, synthetic construct
FSKANHN

SEQ ID NO: 11537 - protein, 7 aa, synthetic construct
FISTNGR

SEQ ID NO: 11538 - protein, 7 aa, synthetic construct
LSRLSET

SEQ ID NO: 11539 - protein, 7 aa, synthetic construct
WQSSNGI

SEQ ID NO: 11540 - protein, 7 aa, synthetic construct
YYSTNGV

SEQ ID NO: 11541 - protein, 7 aa, synthetic construct
NWSTNGV

SEQ ID NO: 11542 - protein, 7 aa, synthetic construct
YSKTGMN

SEQ ID NO: 11543 - protein, 7 aa, synthetic construct
LSKVGTN

SEQ ID NO: 11544 - protein, 7 aa, synthetic construct
THYDNGR

SEQ ID NO: 11545 - protein, 7 aa, synthetic construct
YRSSNGV

SEQ ID NO: 11546 - protein, 7 aa, synthetic construct
RESDLKW

SEQ ID NO: 11547 - protein, 7 aa, synthetic construct
YAKSGSN

SEQ ID NO: 11548 - protein, 7 aa, synthetic construct
YAKGNLN

SEQ ID NO: 11549 - protein, 7 aa, synthetic construct
YAKSGTN

SEQ ID NO: 11550 - protein, 7 aa, synthetic construct
YISTNGI

SEQ ID NO: 11551 - protein, 7 aa, synthetic construct
EDGSPRW

SEQ ID NO: 11552 - protein, 7 aa, synthetic construct
LSRQGDN

SEQ ID NO: 11553 - protein, 7 aa, synthetic construct
LSKVGIN

SEQ ID NO: 11554 - protein, 7 aa, synthetic construct
WGSTNGV

SEQ ID NO: 11555 - protein, 7 aa, synthetic construct
LSKLGNN

SEQ ID NO: 11556 - protein, 7 aa, synthetic construct
YASTNGV

SEQ ID NO: 11557 - protein, 7 aa, synthetic construct
YSKIGVN

SEQ ID NO: 11558 - protein, 7 aa, synthetic construct
YSRNGVN

SEQ ID NO: 11559 - protein, 7 aa, synthetic construct
YSKVGIN

SEQ ID NO: 11560 - protein, 7 aa, synthetic construct
YSRINDN

SEQ ID NO: 11561 - protein, 7 aa, synthetic construct
LSKIGIN

SEQ ID NO: 11562 - protein, 7 aa, synthetic construct
VGSSNGV

SEQ ID NO: 11563 - protein, 7 aa, synthetic construct
TISTNGI

SEQ ID NO: 11564 - protein, 7 aa, synthetic construct
YSKKNEN

SEQ ID NO: 11565 - protein, 7 aa, synthetic construct
LARSGEN

SEQ ID NO: 11566 - protein, 7 aa, synthetic construct
VRSTNGE

SEQ ID NO: 11567 - protein, 7 aa, synthetic construct
YAKGNTN

SEQ ID NO: 11568 - protein, 7 aa, synthetic construct
QGSTNGR

SEQ ID NO: 11569 - protein, 7 aa, synthetic construct
FSKVGLN

SEQ ID NO: 11570 - protein, 7 aa, synthetic construct
LAKGGMN

SEQ ID NO: 11571 - protein, 7 aa, synthetic construct
LVSTNGR

SEQ ID NO: 11572 - protein, 7 aa, synthetic construct
LAKSGVN

SEQ ID NO: 11573 - protein, 7 aa, synthetic construct
YSKPGPN

SEQ ID NO: 11574 - protein, 7 aa, synthetic construct
YSKTGTN

SEQ ID NO: 11575 - protein, 7 aa, synthetic construct
RKDGTAS

SEQ ID NO: 11576 - protein, 7 aa, synthetic construct
TQSSNGV

SEQ ID NO: 11577 - protein, 7 aa, synthetic construct
YSKHNNN

SEQ ID NO: 11578 - protein, 7 aa, synthetic construct
YSKVNYN

SEQ ID NO: 11579 - protein, 7 aa, synthetic construct
LSKLNQN

SEQ ID NO: 11580 - protein, 7 aa, synthetic construct
LAKLGIN

SEQ ID NO: 11581 - protein, 7 aa, synthetic construct
YARVGFN

SEQ ID NO: 11582 - protein, 7 aa, synthetic construct
QNGHSSW

SEQ ID NO: 11583 - protein, 7 aa, synthetic construct
YSKSGVN

SEQ ID NO: 11584 - protein, 7 aa, synthetic construct
GGDGNAY

SEQ ID NO: 11585 - protein, 7 aa, synthetic construct
YARANDN

SEQ ID NO: 11586 - protein, 7 aa, synthetic construct
VLSTNGV

SEQ ID NO: 11587 - protein, 7 aa, synthetic construct
TDETVYS

SEQ ID NO: 11588 - protein, 7 aa, synthetic construct
ITSSNGV

SEQ ID NO: 11589 - protein, 7 aa, synthetic construct
MMSTNGV

SEQ ID NO: 11590 - protein, 7 aa, synthetic construct
LSKIGTN

SEQ ID NO: 11591 - protein, 7 aa, synthetic construct
RSDTSIW

SEQ ID NO: 11592 - protein, 7 aa, synthetic construct
SFSTNGV

SEQ ID NO: 11593 - protein, 7 aa, synthetic construct
FSKLGAN

SEQ ID NO: 11594 - protein, 7 aa, synthetic construct
SESTNGI

SEQ ID NO: 11595 - protein, 7 aa, synthetic construct
YAKAGSN

SEQ ID NO: 11596 - protein, 7 aa, synthetic construct
IESTNGI

SEQ ID NO: 11597 - protein, 7 aa, synthetic construct
QSSTNGV

SEQ ID NO: 11598 - protein, 7 aa, synthetic construct
FSSSNGV

SEQ ID NO: 11599 - protein, 7 aa, synthetic construct
YAKGGMN

SEQ ID NO: 11600 - protein, 7 aa, synthetic construct
YARANMN

SEQ ID NO: 11601 - protein, 7 aa, synthetic construct
YAKGGAN

SEQ ID NO: 11602 - protein, 7 aa, synthetic construct
YAKNGQN

SEQ ID NO: 11603 - protein, 7 aa, synthetic construct
GTSTNGR

SEQ ID NO: 11604 - protein, 7 aa, synthetic construct
YAKTNYN

SEQ ID NO: 11605 - protein, 7 aa, synthetic construct
RAESKTW

SEQ ID NO: 11606 - protein, 7 aa, synthetic construct
STSQNGR

SEQ ID NO: 11607 - protein, 7 aa, synthetic construct
PNSTNGV

SEQ ID NO: 11608 - protein, 7 aa, synthetic construct
FARNGTN

SEQ ID NO: 11609 - protein, 7 aa, synthetic construct
LSKVGNN

SEQ ID NO: 11610 - protein, 7 aa, synthetic construct
FARNGVN

SEQ ID NO: 11611 - protein, 7 aa, synthetic construct
FSRVGDN

SEQ ID NO: 11612 - protein, 7 aa, synthetic construct
YAKIGAN

SEQ ID NO: 11613 - protein, 7 aa, synthetic construct
NEDFVRY

SEQ ID NO: 11614 - protein, 7 aa, synthetic construct
VDEFRTY

SEQ ID NO: 11615 - protein, 7 aa, synthetic construct
TDSTNGI

SEQ ID NO: 11616 - protein, 7 aa, synthetic construct
RHDQVYP

SEQ ID NO: 11617 - protein, 7 aa, synthetic construct
YRSTNGY

SEQ ID NO: 11618 - protein, 7 aa, synthetic construct
HSRLNVE

SEQ ID NO: 11619 - protein, 7 aa, synthetic construct
ERSTNGV

SEQ ID NO: 11620 - protein, 7 aa, synthetic construct
LSKSGHN

SEQ ID NO: 11621 - protein, 7 aa, synthetic construct
FSRTGEN

SEQ ID NO: 11622 - protein, 7 aa, synthetic construct
GSSTNGR

SEQ ID NO: 11623 - protein, 7 aa, synthetic construct
YSRNGMN

SEQ ID NO: 11624 - protein, 7 aa, synthetic construct
LSKANFN

SEQ ID NO: 11625 - protein, 7 aa, synthetic construct
WESSNGV

SEQ ID NO: 11626 - protein, 7 aa, synthetic construct
IESSNGV

SEQ ID NO: 11627 - protein, 7 aa, synthetic construct
FARNGFN

SEQ ID NO: 11628 - protein, 7 aa, synthetic construct
VMSSNGV

SEQ ID NO: 11629 - protein, 7 aa, synthetic construct
YSKHNFN

SEQ ID NO: 11630 - protein, 7 aa, synthetic construct
YSKNGFN

SEQ ID NO: 11631 - protein, 7 aa, synthetic construct
YAKEGRN

SEQ ID NO: 11632 - protein, 7 aa, synthetic construct
YSKNGSN

SEQ ID NO: 11633 - protein, 7 aa, synthetic construct
ASSTNGV

SEQ ID NO: 11634 - protein, 7 aa, synthetic construct
YAKLGMN

SEQ ID NO: 11635 - protein, 7 aa, synthetic construct
SWSSNGV

SEQ ID NO: 11636 - protein, 7 aa, synthetic construct
RNLDVTW

SEQ ID NO: 11637 - protein, 7 aa, synthetic construct
PQSSNGV

SEQ ID NO: 11638 - protein, 7 aa, synthetic construct
YFTGTSS

SEQ ID NO: 11639 - protein, 7 aa, synthetic construct
LMSTNGV

SEQ ID NO: 11640 - protein, 7 aa, synthetic construct
YSKSGNN

SEQ ID NO: 11641 - protein, 7 aa, synthetic construct
GWSTNGV

SEQ ID NO: 11642 - protein, 7 aa, synthetic construct
TKSGMNA

SEQ ID NO: 11643 - protein, 7 aa, synthetic construct
YSRQGNN

SEQ ID NO: 11644 - protein, 7 aa, synthetic construct
TESTNGI

SEQ ID NO: 11645 - protein, 7 aa, synthetic construct
VPYTGYD

SEQ ID NO: 11646 - protein, 7 aa, synthetic construct
LSARSDN

SEQ ID NO: 11647 - protein, 7 aa, synthetic construct
QDSTNGI

SEQ ID NO: 11648 - protein, 7 aa, synthetic construct
YSKSGMN

SEQ ID NO: 11649 - protein, 7 aa, synthetic construct
TQSSSGR

SEQ ID NO: 11650 - protein, 7 aa, synthetic construct
LSRNNDN

SEQ ID NO: 11651 - protein, 7 aa, synthetic construct
YARSGEN

SEQ ID NO: 11652 - protein, 7 aa, synthetic construct
QVSTNGR

SEQ ID NO: 11653 - protein, 7 aa, synthetic construct
LSKLGTN

SEQ ID NO: 11654 - protein, 7 aa, synthetic construct
YSRNNNN

SEQ ID NO: 11655 - protein, 7 aa, synthetic construct
LSKAGSN

SEQ ID NO: 11656 - protein, 7 aa, synthetic construct
LHVQGPN

SEQ ID NO: 11657 - protein, 7 aa, synthetic construct
HFSSNGV

SEQ ID NO: 11658 - protein, 7 aa, synthetic construct
YSKSNHN

SEQ ID NO: 11659 - protein, 7 aa, synthetic construct
TFSSNGV

SEQ ID NO: 11660 - protein, 7 aa, synthetic construct
YSKMGLN

SEQ ID NO: 11661 - protein, 7 aa, synthetic construct
YSKVGGN

SEQ ID NO: 11662 - protein, 7 aa, synthetic construct
LSKIGDN

SEQ ID NO: 11663 - protein, 7 aa, synthetic construct
VASTNGV

SEQ ID NO: 11664 - protein, 7 aa, synthetic construct
SDSTNGV

SEQ ID NO: 11665 - protein, 7 aa, synthetic construct
LISTNGV

SEQ ID NO: 11666 - protein, 7 aa, synthetic construct
YSKSGGN

SEQ ID NO: 11667 - protein, 7 aa, synthetic construct
YSKTGSN

SEQ ID NO: 11668 - protein, 7 aa, synthetic construct
LARNGWN

SEQ ID NO: 11669 - protein, 7 aa, synthetic construct
MASTNGV

SEQ ID NO: 11670 - protein, 7 aa, synthetic construct
FSRQNVN

SEQ ID NO: 11671 - protein, 7 aa, synthetic construct
VKSSNGV

SEQ ID NO: 11672 - protein, 7 aa, synthetic construct
YARSNFN

SEQ ID NO: 11673 - protein, 7 aa, synthetic construct
LAKGGAN

SEQ ID NO: 11674 - protein, 7 aa, synthetic construct
FAKNGYN

SEQ ID NO: 11675 - protein, 7 aa, synthetic construct
FDSTNGV

SEQ ID NO: 11676 - protein, 7 aa, synthetic construct
LSKSGAN

SEQ ID NO: 11677 - protein, 7 aa, synthetic construct
YAKAGMN

SEQ ID NO: 11678 - protein, 7 aa, synthetic construct
FSKQGPN

SEQ ID NO: 11679 - protein, 7 aa, synthetic construct
MVSTNGR

SEQ ID NO: 11680 - protein, 7 aa, synthetic construct
VISSNGV

SEQ ID NO: 11681 - protein, 7 aa, synthetic construct
FSRMNEN

SEQ ID NO: 11682 - protein, 7 aa, synthetic construct
YARMGDN

SEQ ID NO: 11683 - protein, 7 aa, synthetic construct
YSKQNAN

SEQ ID NO: 11684 - protein, 7 aa, synthetic construct
RESTNGI

SEQ ID NO: 11685 - protein, 7 aa, synthetic construct
LSKGNVN

SEQ ID NO: 11686 - protein, 7 aa, synthetic construct
LSKLGSN

SEQ ID NO: 11687 - protein, 7 aa, synthetic construct
YAKLGLN

SEQ ID NO: 11688 - protein, 7 aa, synthetic construct
YSKQNLN

SEQ ID NO: 11689 - protein, 7 aa, synthetic construct
LSKANHN

SEQ ID NO: 11690 - protein, 7 aa, synthetic construct
VLSTNGI

SEQ ID NO: 11691 - protein, 7 aa, synthetic construct
HRSTNGQ

SEQ ID NO: 11692 - protein, 7 aa, synthetic construct
TTSTNGV

SEQ ID NO: 11693 - protein, 7 aa, synthetic construct
FSKMNVN

SEQ ID NO: 11694 - protein, 7 aa, synthetic construct
GADGSRW

SEQ ID NO: 11695 - protein, 7 aa, synthetic construct
AASTNGI

SEQ ID NO: 11696 - protein, 7 aa, synthetic construct
LAKGGVN

SEQ ID NO: 11697 - protein, 7 aa, synthetic construct
GMKNVMF

SEQ ID NO: 11698 - protein, 7 aa, synthetic construct
HESTNGI

SEQ ID NO: 11699 - protein, 7 aa, synthetic construct
YSKMGSN

SEQ ID NO: 11700 - protein, 7 aa, synthetic construct
NNGGSLW

SEQ ID NO: 11701 - protein, 7 aa, synthetic construct
LMSTNGR

SEQ ID NO: 11702 - protein, 7 aa, synthetic construct
AVSTNGV

SEQ ID NO: 11703 - protein, 7 aa, synthetic construct
YSRQNTN

SEQ ID NO: 11704 - protein, 7 aa, synthetic construct
FSKVGHN

SEQ ID NO: 11705 - protein, 7 aa, synthetic construct
YHRQGGD

SEQ ID NO: 11706 - protein, 7 aa, synthetic construct
FARTGEN

SEQ ID NO: 11707 - protein, 7 aa, synthetic construct
RALEGAD

SEQ ID NO: 11708 - protein, 7 aa, synthetic construct
YAKSNDN

SEQ ID NO: 11709 - protein, 7 aa, synthetic construct
LRNGNSA

SEQ ID NO: 11710 - protein, 7 aa, synthetic construct
LLSTNGV

SEQ ID NO: 11711 - protein, 7 aa, synthetic construct
LAKSGEN

SEQ ID NO: 11712 - protein, 7 aa, synthetic construct
YAKTNMN

SEQ ID NO: 11713 - protein, 7 aa, synthetic construct
RRDGTAY

SEQ ID NO: 11714 - protein, 7 aa, synthetic construct
STSTNGV

SEQ ID NO: 11715 - protein, 7 aa, synthetic construct
YSKYNLN

SEQ ID NO: 11716 - protein, 7 aa, synthetic construct
DGGTSHY

SEQ ID NO: 11717 - protein, 7 aa, synthetic construct
MESTNGR

SEQ ID NO: 11718 - protein, 7 aa, synthetic construct
HQSTNGI

SEQ ID NO: 11719 - protein, 7 aa, synthetic construct
LAKGGNN

SEQ ID NO: 11720 - protein, 7 aa, synthetic construct
SESTNGR

SEQ ID NO: 11721 - protein, 7 aa, synthetic construct
YSKHGNN

SEQ ID NO: 11722 - protein, 7 aa, synthetic construct
LPREVYA

SEQ ID NO: 11723 - protein, 7 aa, synthetic construct
QMSTNGR

SEQ ID NO: 11724 - protein, 7 aa, synthetic construct
YSKQNVN

SEQ ID NO: 11725 - protein, 7 aa, synthetic construct
YAREGPN

SEQ ID NO: 11726 - protein, 7 aa, synthetic construct
KDGESSW

SEQ ID NO: 11727 - protein, 7 aa, synthetic construct
YARAGDN

SEQ ID NO: 11728 - protein, 7 aa, synthetic construct
FSKVGDN

SEQ ID NO: 11729 - protein, 7 aa, synthetic construct
AASTNGV

SEQ ID NO: 11730 - protein, 7 aa, synthetic construct
LSKMGFN

SEQ ID NO: 11731 - protein, 7 aa, synthetic construct
QRYDAYE

SEQ ID NO: 11732 - protein, 7 aa, synthetic construct
TISTNGV

SEQ ID NO: 11733 - protein, 7 aa, synthetic construct
EGSTNGR

SEQ ID NO: 11734 - protein, 7 aa, synthetic construct
YAKSGEN

SEQ ID NO: 11735 - protein, 7 aa, synthetic construct
LAKTGNN

SEQ ID NO: 11736 - protein, 7 aa, synthetic construct
NFSTNGI

SEQ ID NO: 11737 - protein, 7 aa, synthetic construct
LAKVGYN

SEQ ID NO: 11738 - protein, 7 aa, synthetic construct
IASTNGV

SEQ ID NO: 11739 - protein, 7 aa, synthetic construct
RGADVHW

SEQ ID NO: 11740 - protein, 7 aa, synthetic construct
FSKLNEN

SEQ ID NO: 11741 - protein, 7 aa, synthetic construct
YFSGTTD

SEQ ID NO: 11742 - protein, 7 aa, synthetic construct
LAKMGPN

SEQ ID NO: 11743 - protein, 7 aa, synthetic construct
YSKINHN

SEQ ID NO: 11744 - protein, 7 aa, synthetic construct
VEFEWSD

SEQ ID NO: 11745 - protein, 7 aa, synthetic construct
YARLNFN

SEQ ID NO: 11746 - protein, 7 aa, synthetic construct
YSKHNIN

SEQ ID NO: 11747 - protein, 7 aa, synthetic construct
AMSTNGV

SEQ ID NO: 11748 - protein, 7 aa, synthetic construct
LAKLGLN

SEQ ID NO: 11749 - protein, 7 aa, synthetic construct
LAKSGNN

SEQ ID NO: 11750 - protein, 7 aa, synthetic construct
HFSTNGI

SEQ ID NO: 11751 - protein, 7 aa, synthetic construct
HASSNGV

SEQ ID NO: 11752 - protein, 7 aa, synthetic construct
QQSTNGI

SEQ ID NO: 11753 - protein, 7 aa, synthetic construct
YSRSNIN

SEQ ID NO: 11754 - protein, 7 aa, synthetic construct
SNESSTW

SEQ ID NO: 11755 - protein, 7 aa, synthetic construct
YAKQGAN

SEQ ID NO: 11756 - protein, 7 aa, synthetic construct
PASTNGR

SEQ ID NO: 11757 - protein, 7 aa, synthetic construct
VFSTNGV

SEQ ID NO: 11758 - protein, 7 aa, synthetic construct
YSKMGDN

SEQ ID NO: 11759 - protein, 7 aa, synthetic construct
YSKWGAN

SEQ ID NO: 11760 - protein, 7 aa, synthetic construct
YSKTGVN

SEQ ID NO: 11761 - protein, 7 aa, synthetic construct
LAKAGVN

SEQ ID NO: 11762 - protein, 7 aa, synthetic construct
LSRIGEN

SEQ ID NO: 11763 - protein, 7 aa, synthetic construct
YSKSNLN

SEQ ID NO: 11764 - protein, 7 aa, synthetic construct
YSRTNEN

SEQ ID NO: 11765 - protein, 7 aa, synthetic construct
VGSTNGV

SEQ ID NO: 11766 - protein, 7 aa, synthetic construct
YAKTGAN

SEQ ID NO: 11767 - protein, 7 aa, synthetic construct
GSERSSW

SEQ ID NO: 11768 - protein, 7 aa, synthetic construct
LSKMNDN

SEQ ID NO: 11769 - protein, 7 aa, synthetic construct
QQSTNGV

SEQ ID NO: 11770 - protein, 7 aa, synthetic construct
YARQNDN

SEQ ID NO: 11771 - protein, 7 aa, synthetic construct
HNSTNGI

SEQ ID NO: 11772 - protein, 7 aa, synthetic construct
FSRTGQN

SEQ ID NO: 11773 - protein, 7 aa, synthetic construct
PQSTNGI

SEQ ID NO: 11774 - protein, 7 aa, synthetic construct
SQSTNGV

SEQ ID NO: 11775 - protein, 7 aa, synthetic construct
PWSSNGV

SEQ ID NO: 11776 - protein, 7 aa, synthetic construct
IMSTNGV

SEQ ID NO: 11777 - protein, 7 aa, synthetic construct
SKSTNGI

SEQ ID NO: 11778 - protein, 7 aa, synthetic construct
WNSSNGV

SEQ ID NO: 11779 - protein, 7 aa, synthetic construct
YARIGEN

SEQ ID NO: 11780 - protein, 7 aa, synthetic construct
LSGESRY

SEQ ID NO: 11781 - protein, 7 aa, synthetic construct
YARNGGN

SEQ ID NO: 11782 - protein, 7 aa, synthetic construct
DNRGNNA

SEQ ID NO: 11783 - protein, 7 aa, synthetic construct
LESTNGR

SEQ ID NO: 11784 - protein, 7 aa, synthetic construct
LAKQGMN

SEQ ID NO: 11785 - protein, 7 aa, synthetic construct
FTSTNGV

SEQ ID NO: 11786 - protein, 7 aa, synthetic construct
NESTNGV

SEQ ID NO: 11787 - protein, 7 aa, synthetic construct
THSTNGI

SEQ ID NO: 11788 - protein, 7 aa, synthetic construct
YVHSQNY

SEQ ID NO: 11789 - protein, 7 aa, synthetic construct
NDGRSNY

SEQ ID NO: 11790 - protein, 7 aa, synthetic construct
YAKVGMN

SEQ ID NO: 11791 - protein, 7 aa, synthetic construct
LAKSGAN

SEQ ID NO: 11792 - protein, 7 aa, synthetic construct
YSRHNEN

SEQ ID NO: 11793 - protein, 7 aa, synthetic construct
YAKANPN

SEQ ID NO: 11794 - protein, 7 aa, synthetic construct
RSEATYP

SEQ ID NO: 11795 - protein, 7 aa, synthetic construct
LSRSGEN

SEQ ID NO: 11796 - protein, 7 aa, synthetic construct
YSKMNLN

SEQ ID NO: 11797 - protein, 7 aa, synthetic construct
YAKNGMN

SEQ ID NO: 11798 - protein, 7 aa, synthetic construct
FHSSNGV

SEQ ID NO: 11799 - protein, 7 aa, synthetic construct
LSRAGEN

SEQ ID NO: 11800 - protein, 7 aa, synthetic construct
LGSTNGI

SEQ ID NO: 11801 - protein, 7 aa, synthetic construct
YSSSNGV

SEQ ID NO: 11802 - protein, 7 aa, synthetic construct
LAKQGVN

SEQ ID NO: 11803 - protein, 7 aa, synthetic construct
FSRQGMN

SEQ ID NO: 11804 - protein, 7 aa, synthetic construct
SASTNGI

SEQ ID NO: 11805 - protein, 7 aa, synthetic construct
QMSTNGV

SEQ ID NO: 11806 - protein, 7 aa, synthetic construct
LSKNNVN

SEQ ID NO: 11807 - protein, 7 aa, synthetic construct
HASTNGI

SEQ ID NO: 11808 - protein, 7 aa, synthetic construct
TPDHVQW

SEQ ID NO: 11809 - protein, 7 aa, synthetic construct
RLETHDW

SEQ ID NO: 11810 - protein, 7 aa, synthetic construct
GTSTASW

SEQ ID NO: 11811 - protein, 7 aa, synthetic construct
YSKNGHN

SEQ ID NO: 11812 - protein, 7 aa, synthetic construct
YSKHNTN

SEQ ID NO: 11813 - protein, 7 aa, synthetic construct
YSRHGEN

SEQ ID NO: 11814 - protein, 7 aa, synthetic construct
LARQGDN

SEQ ID NO: 11815 - protein, 7 aa, synthetic construct
FSKIGIN

SEQ ID NO: 11816 - protein, 7 aa, synthetic construct
YSKLGDN

SEQ ID NO: 11817 - protein, 7 aa, synthetic construct
YSKLNGN

SEQ ID NO: 11818 - protein, 7 aa, synthetic construct
YSRNGQN

SEQ ID NO: 11819 - protein, 7 aa, synthetic construct
ISSTNGV

SEQ ID NO: 11820 - protein, 7 aa, synthetic construct
YALSGFN

SEQ ID NO: 11821 - protein, 7 aa, synthetic construct
PISTNGR

SEQ ID NO: 11822 - protein, 7 aa, synthetic construct
MFSTNGI

SEQ ID NO: 11823 - protein, 7 aa, synthetic construct
LSKMNHN

SEQ ID NO: 11824 - protein, 7 aa, synthetic construct
TDGQSGW

SEQ ID NO: 11825 - protein, 7 aa, synthetic construct
AISTNGV

SEQ ID NO: 11826 - protein, 7 aa, synthetic construct
VTSTNGI

SEQ ID NO: 11827 - protein, 7 aa, synthetic construct
LAKTGDN

SEQ ID NO: 11828 - protein, 7 aa, synthetic construct
YSKGGFN

SEQ ID NO: 11829 - protein, 7 aa, synthetic construct
LSKLNMN

SEQ ID NO: 11830 - protein, 7 aa, synthetic construct
YQSSNGV

SEQ ID NO: 11831 - protein, 7 aa, synthetic construct
LTSTNGV

SEQ ID NO: 11832 - protein, 7 aa, synthetic construct
LSKQNVN

SEQ ID NO: 11833 - protein, 7 aa, synthetic construct
LSKQGHN

SEQ ID NO: 11834 - protein, 7 aa, synthetic construct
DALHGRN

SEQ ID NO: 11835 - protein, 7 aa, synthetic construct
YSKVNSN

SEQ ID NO: 11836 - protein, 7 aa, synthetic construct
FESSNGV

SEQ ID NO: 11837 - protein, 7 aa, synthetic construct
YSKVNVN

SEQ ID NO: 11838 - protein, 7 aa, synthetic construct
FSKVGVN

SEQ ID NO: 11839 - protein, 7 aa, synthetic construct
TSGSSSW

SEQ ID NO: 11840 - protein, 7 aa, synthetic construct
TMSTNGV

SEQ ID NO: 11841 - protein, 7 aa, synthetic construct
HNSTNGV

SEQ ID NO: 11842 - protein, 7 aa, synthetic construct
MHSTNGI

SEQ ID NO: 11843 - protein, 7 aa, synthetic construct
YAKGNQN

SEQ ID NO: 11844 - protein, 7 aa, synthetic construct
SNSTNGI

SEQ ID NO: 11845 - protein, 7 aa, synthetic construct
YSKAGTN

SEQ ID NO: 11846 - protein, 7 aa, synthetic construct
TESTNGV

SEQ ID NO: 11847 - protein, 7 aa, synthetic construct
NVDHVSW

SEQ ID NO: 11848 - protein, 7 aa, synthetic construct
TDSTNGV

SEQ ID NO: 11849 - protein, 7 aa, synthetic construct
FSKSGHN

SEQ ID NO: 11850 - protein, 7 aa, synthetic construct
SISTNGI

SEQ ID NO: 11851 - protein, 7 aa, synthetic construct
SMSTNGI

SEQ ID NO: 11852 - protein, 7 aa, synthetic construct
SMSTNGV

SEQ ID NO: 11853 - protein, 7 aa, synthetic construct
HQSTNGV

SEQ ID NO: 11854 - protein, 7 aa, synthetic construct
QASTNGV

SEQ ID NO: 11855 - protein, 7 aa, synthetic construct
PHSTNGV

SEQ ID NO: 11856 - protein, 7 aa, synthetic construct
RLSESNW

SEQ ID NO: 11857 - protein, 7 aa, synthetic construct
EHSTNGR

SEQ ID NO: 11858 - protein, 7 aa, synthetic construct
MHSTNGV

SEQ ID NO: 11859 - protein, 7 aa, synthetic construct
VTSSMGR

SEQ ID NO: 11860 - protein, 7 aa, synthetic construct
YSKSGIN

SEQ ID NO: 11861 - protein, 7 aa, synthetic construct
FSKDNFN

SEQ ID NO: 11862 - protein, 7 aa, synthetic construct
YSKGNNN

SEQ ID NO: 11863 - protein, 7 aa, synthetic construct
TKSSNGV

SEQ ID NO: 11864 - protein, 7 aa, synthetic construct
TASTNGI

SEQ ID NO: 11865 - protein, 7 aa, synthetic construct
YSKIGQN

SEQ ID NO: 11866 - protein, 7 aa, synthetic construct
HTSTNGI

SEQ ID NO: 11867 - protein, 7 aa, synthetic construct
SDSTNGI

SEQ ID NO: 11868 - protein, 7 aa, synthetic construct
LAKHGAN

SEQ ID NO: 11869 - protein, 7 aa, synthetic construct
AESTNGV

SEQ ID NO: 11870 - protein, 7 aa, synthetic construct
YLSTNGV

SEQ ID NO: 11871 - protein, 7 aa, synthetic construct
LAKMGVN

SEQ ID NO: 11872 - protein, 7 aa, synthetic construct
SASSNGV

SEQ ID NO: 11873 - protein, 7 aa, synthetic construct
VVSSNGV

SEQ ID NO: 11874 - protein, 7 aa, synthetic construct
AISTNGI

SEQ ID NO: 11875 - protein, 7 aa, synthetic construct
HTSTNGV

SEQ ID NO: 11876 - protein, 7 aa, synthetic construct
FAKGGMN

SEQ ID NO: 11877 - protein, 7 aa, synthetic construct
GGGTNAW

SEQ ID NO: 11878 - protein, 7 aa, synthetic construct
TNSTNGV

SEQ ID NO: 11879 - protein, 7 aa, synthetic construct
YAKNGLN

SEQ ID NO: 11880 - protein, 7 aa, synthetic construct
YSKANQN

SEQ ID NO: 11881 - protein, 7 aa, synthetic construct
VEYGQRN

SEQ ID NO: 11882 - protein, 7 aa, synthetic construct
ASSTNGI

SEQ ID NO: 11883 - protein, 7 aa, synthetic construct
LSKMGNN

SEQ ID NO: 11884 - protein, 7 aa, synthetic construct
YAKQGVN

SEQ ID NO: 11885 - protein, 7 aa, synthetic construct
PESTNGV

SEQ ID NO: 11886 - protein, 7 aa, synthetic construct
HYSTNGI

SEQ ID NO: 11887 - protein, 7 aa, synthetic construct
LSKVGPN

SEQ ID NO: 11888 - protein, 7 aa, synthetic construct
TASSNGV

SEQ ID NO: 11889 - protein, 7 aa, synthetic construct
INSTNGI

SEQ ID NO: 11890 - protein, 7 aa, synthetic construct
YARDGPN

SEQ ID NO: 11891 - protein, 7 aa, synthetic construct
YSKMNIN

SEQ ID NO: 11892 - protein, 7 aa, synthetic construct
LNSTNGV

SEQ ID NO: 11893 - protein, 7 aa, synthetic construct
YSKQNEN

SEQ ID NO: 11894 - protein, 7 aa, synthetic construct
YAKGNHN

SEQ ID NO: 11895 - protein, 7 aa, synthetic construct
EVSTNGR

SEQ ID NO: 11896 - protein, 7 aa, synthetic construct
YAKGNDN

SEQ ID NO: 11897 - protein, 7 aa, synthetic construct
SDGSSLW

SEQ ID NO: 11898 - protein, 7 aa, synthetic construct
TFSTNGV

SEQ ID NO: 11899 - protein, 7 aa, synthetic construct
LSKTGVN

SEQ ID NO: 11900 - protein, 7 aa, synthetic construct
YSRNGYN

SEQ ID NO: 11901 - protein, 7 aa, synthetic construct
YARTSTD

SEQ ID NO: 11902 - protein, 7 aa, synthetic construct
LSKAGTN

SEQ ID NO: 11903 - protein, 7 aa, synthetic construct
YSKQGEN

SEQ ID NO: 11904 - protein, 7 aa, synthetic construct
FAKSGAN

SEQ ID NO: 11905 - protein, 7 aa, synthetic construct
LARQGEN

SEQ ID NO: 11906 - protein, 7 aa, synthetic construct
QTSTNGV

SEQ ID NO: 11907 - protein, 7 aa, synthetic construct
LSKANMN

SEQ ID NO: 11908 - protein, 7 aa, synthetic construct
YESTNGV

SEQ ID NO: 11909 - protein, 7 aa, synthetic construct
LSKAGDN

SEQ ID NO: 11910 - protein, 7 aa, synthetic construct
YSKMGNN

SEQ ID NO: 11911 - protein, 7 aa, synthetic construct
YSRANEN

SEQ ID NO: 11912 - protein, 7 aa, synthetic construct
TRNGANA

SEQ ID NO: 11913 - protein, 7 aa, synthetic construct
ETSTNGR

SEQ ID NO: 11914 - protein, 7 aa, synthetic construct
WQETNGK

SEQ ID NO: 11915 - protein, 7 aa, synthetic construct
ITSTNGV

SEQ ID NO: 11916 - protein, 7 aa, synthetic construct
SGSTNGV

SEQ ID NO: 11917 - protein, 7 aa, synthetic construct
FNSSNGV

SEQ ID NO: 11918 - protein, 7 aa, synthetic construct
FSRAGTN

SEQ ID NO: 11919 - protein, 7 aa, synthetic construct
QTSSNGV

SEQ ID NO: 11920 - protein, 7 aa, synthetic construct
PESTNGR

SEQ ID NO: 11921 - protein, 7 aa, synthetic construct
IMSTNGI

SEQ ID NO: 11922 - protein, 7 aa, synthetic construct
ENSTNGR

SEQ ID NO: 11923 - protein, 7 aa, synthetic construct
RPNGHSA

SEQ ID NO: 11924 - protein, 7 aa, synthetic construct
IHSTNGI

SEQ ID NO: 11925 - protein, 7 aa, synthetic construct
PRSSNGV

SEQ ID NO: 11926 - protein, 7 aa, synthetic construct
LQSSNGV

SEQ ID NO: 11927 - protein, 7 aa, synthetic construct
YSKVGVN

SEQ ID NO: 11928 - protein, 7 aa, synthetic construct
YSKQNHN

SEQ ID NO: 11929 - protein, 7 aa, synthetic construct
LSKGGPN

SEQ ID NO: 11930 - protein, 7 aa, synthetic construct
IQSTNGI

SEQ ID NO: 11931 - protein, 7 aa, synthetic construct
TNRVPHS

SEQ ID NO: 11932 - protein, 7 aa, synthetic construct
HHGVSAY

SEQ ID NO: 11933 - protein, 7 aa, synthetic construct
VWSSNGV

SEQ ID NO: 11934 - protein, 7 aa, synthetic construct
YSKQGTN

SEQ ID NO: 11935 - protein, 7 aa, synthetic construct
ADSTNGV

SEQ ID NO: 11936 - protein, 7 aa, synthetic construct
GEGYSTW

SEQ ID NO: 11937 - protein, 7 aa, synthetic construct
LSRINFN

SEQ ID NO: 11938 - protein, 7 aa, synthetic construct
HMSTNGI

SEQ ID NO: 11939 - protein, 7 aa, synthetic construct
YAKANDN

SEQ ID NO: 11940 - protein, 7 aa, synthetic construct
IISTNGI

SEQ ID NO: 11941 - protein, 7 aa, synthetic construct
HYSTNGV

SEQ ID NO: 11942 - protein, 7 aa, synthetic construct
IISTNGR

SEQ ID NO: 11943 - protein, 7 aa, synthetic construct
YARYNDN

SEQ ID NO: 11944 - protein, 7 aa, synthetic construct
LISTNGI

SEQ ID NO: 11945 - protein, 7 aa, synthetic construct
YSKSGLN

SEQ ID NO: 11946 - protein, 7 aa, synthetic construct
HWSTNGI

SEQ ID NO: 11947 - protein, 7 aa, synthetic construct
LSKLNLN

SEQ ID NO: 11948 - protein, 7 aa, synthetic construct
YSKSNPN

SEQ ID NO: 11949 - protein, 7 aa, synthetic construct
YSRNGTN

SEQ ID NO: 11950 - protein, 7 aa, synthetic construct
YAKIGMN

SEQ ID NO: 11951 - protein, 7 aa, synthetic construct
LTSTNGI

SEQ ID NO: 11952 - protein, 7 aa, synthetic construct
SVSTNGV

SEQ ID NO: 11953 - protein, 7 aa, synthetic construct
MESSNGV

SEQ ID NO: 11954 - protein, 7 aa, synthetic construct
SNSSNGV

SEQ ID NO: 11955 - protein, 7 aa, synthetic construct
VYSTNGV

SEQ ID NO: 11956 - protein, 7 aa, synthetic construct
SHSTNGI

SEQ ID NO: 11957 - protein, 7 aa, synthetic construct
QHSTNGV

SEQ ID NO: 11958 - protein, 7 aa, synthetic construct
LSKTGMN

SEQ ID NO: 11959 - protein, 7 aa, synthetic construct
LSKQGMN

SEQ ID NO: 11960 - protein, 7 aa, synthetic construct
LSKSSNN

SEQ ID NO: 11961 - protein, 7 aa, synthetic construct
FGSTNGI

SEQ ID NO: 11962 - protein, 7 aa, synthetic construct
YARVGEN

SEQ ID NO: 11963 - protein, 7 aa, synthetic construct
FSKAGQN

SEQ ID NO: 11964 - protein, 7 aa, synthetic construct
HTSSNGV

SEQ ID NO: 11965 - protein, 7 aa, synthetic construct
YSKTGEN

SEQ ID NO: 11966 - protein, 7 aa, synthetic construct
YFSHVVE

SEQ ID NO: 11967 - protein, 7 aa, synthetic construct
LAKNGPN

SEQ ID NO: 11968 - protein, 7 aa, synthetic construct
ISESSRW

SEQ ID NO: 11969 - protein, 7 aa, synthetic construct
LSRYNEN

SEQ ID NO: 11970 - protein, 7 aa, synthetic construct
LSRLSDT

SEQ ID NO: 11971 - protein, 7 aa, synthetic construct
LASTNGR

SEQ ID NO: 11972 - protein, 7 aa, synthetic construct
YAKAGDN

SEQ ID NO: 11973 - protein, 7 aa, synthetic construct
HGSTNGV

SEQ ID NO: 11974 - protein, 7 aa, synthetic construct
VSSTNGI

SEQ ID NO: 11975 - protein, 7 aa, synthetic construct
FSKSGPN

SEQ ID NO: 11976 - protein, 7 aa, synthetic construct
AWSTNGV

SEQ ID NO: 11977 - protein, 7 aa, synthetic construct
LSKMGIN

SEQ ID NO: 11978 - protein, 7 aa, synthetic construct
LAKAGLN

SEQ ID NO: 11979 - protein, 7 aa, synthetic construct
VTSSNGV

SEQ ID NO: 11980 - protein, 7 aa, synthetic construct
YSKANPN

SEQ ID NO: 11981 - protein, 7 aa, synthetic construct
LSKGNHN

SEQ ID NO: 11982 - protein, 7 aa, synthetic construct
TAAHVTW

SEQ ID NO: 11983 - protein, 7 aa, synthetic construct
QESTNGR

SEQ ID NO: 11984 - protein, 7 aa, synthetic construct
LSKMGLN

SEQ ID NO: 11985 - protein, 7 aa, synthetic construct
ISSSNGM

SEQ ID NO: 11986 - protein, 7 aa, synthetic construct
LHSTNGI

SEQ ID NO: 11987 - protein, 7 aa, synthetic construct
LAKNGMN

SEQ ID NO: 11988 - protein, 7 aa, synthetic construct
YSKSNAN

SEQ ID NO: 11989 - protein, 7 aa, synthetic construct
LAKTGTN

SEQ ID NO: 11990 - protein, 7 aa, synthetic construct
MMSTNGI

SEQ ID NO: 11991 - protein, 7 aa, synthetic construct
YSRDGYN

SEQ ID NO: 11992 - protein, 7 aa, synthetic construct
YTSSNGV

SEQ ID NO: 11993 - protein, 7 aa, synthetic construct
EASTNGR

SEQ ID NO: 11994 - protein, 7 aa, synthetic construct
NSSTSTW

SEQ ID NO: 11995 - protein, 7 aa, synthetic construct
YSKANNN

SEQ ID NO: 11996 - protein, 7 aa, synthetic construct
TSSTNGV

SEQ ID NO: 11997 - protein, 7 aa, synthetic construct
PYAASRD

SEQ ID NO: 11998 - protein, 7 aa, synthetic construct
ANGSSKY

SEQ ID NO: 11999 - protein, 7 aa, synthetic construct
NHSTNGR

SEQ ID NO: 12000 - protein, 7 aa, synthetic construct
YSRQNPN

SEQ ID NO: 12001 - protein, 7 aa, synthetic construct
YAKSQMN

SEQ ID NO: 12002 - protein, 7 aa, synthetic construct
QISTNGI

SEQ ID NO: 12003 - protein, 7 aa, synthetic construct
YHVHGDN

SEQ ID NO: 12004 - protein, 7 aa, synthetic construct
YAKPGAN

SEQ ID NO: 12005 - protein, 7 aa, synthetic construct
YSKSGSN

SEQ ID NO: 12006 - protein, 7 aa, synthetic construct
YAKSGAN

SEQ ID NO: 12007 - protein, 7 aa, synthetic construct
YNSSNGV

SEQ ID NO: 12008 - protein, 7 aa, synthetic construct
YRTDGFS

SEQ ID NO: 12009 - protein, 7 aa, synthetic construct
SSSTNGI

SEQ ID NO: 12010 - protein, 7 aa, synthetic construct
YAKMGLN

SEQ ID NO: 12011 - protein, 7 aa, synthetic construct
YSASGPN

SEQ ID NO: 12012 - protein, 7 aa, synthetic construct
LSKQGFN

SEQ ID NO: 12013 - protein, 7 aa, synthetic construct
HDSTNGV

SEQ ID NO: 12014 - protein, 7 aa, synthetic construct
VSSQNGV

SEQ ID NO: 12015 - protein, 7 aa, synthetic construct
YSKMGQN

SEQ ID NO: 12016 - protein, 7 aa, synthetic construct
NFSTNGR

SEQ ID NO: 12017 - protein, 7 aa, synthetic construct
YSRGNDN

SEQ ID NO: 12018 - protein, 7 aa, synthetic construct
ASDTNGR

SEQ ID NO: 12019 - protein, 7 aa, synthetic construct
TQSLNGR

SEQ ID NO: 12020 - protein, 7 aa, synthetic construct
PSSTNGV

SEQ ID NO: 12021 - protein, 7 aa, synthetic construct
KDGNSSW

SEQ ID NO: 12022 - protein, 7 aa, synthetic construct
FAKAGWN

SEQ ID NO: 12023 - protein, 7 aa, synthetic construct
YYSGKID

SEQ ID NO: 12024 - protein, 7 aa, synthetic construct
LSRINDN

SEQ ID NO: 12025 - protein, 7 aa, synthetic construct
TTSTNGI

SEQ ID NO: 12026 - protein, 7 aa, synthetic construct
EASTNGI

SEQ ID NO: 12027 - protein, 7 aa, synthetic construct
FSSTNGV

SEQ ID NO: 12028 - protein, 7 aa, synthetic construct
FAKAGFN

SEQ ID NO: 12029 - protein, 7 aa, synthetic construct
LARGGEN

SEQ ID NO: 12030 - protein, 7 aa, synthetic construct
VESSNGV

SEQ ID NO: 12031 - protein, 7 aa, synthetic construct
YAKNGGN

SEQ ID NO: 12032 - protein, 7 aa, synthetic construct
SGSTNGI

SEQ ID NO: 12033 - protein, 7 aa, synthetic construct
YAKNGTN

SEQ ID NO: 12034 - protein, 7 aa, synthetic construct
LHKNTEN

SEQ ID NO: 12035 - protein, 7 aa, synthetic construct
FRSSNGV

SEQ ID NO: 12036 - protein, 7 aa, synthetic construct
KGADHSW

SEQ ID NO: 12037 - protein, 7 aa, synthetic construct
VNSTNGV

SEQ ID NO: 12038 - protein, 7 aa, synthetic construct
VNSTNGI

SEQ ID NO: 12039 - protein, 7 aa, synthetic construct
NHASHAW

SEQ ID NO: 12040 - protein, 7 aa, synthetic construct
LAKMGLN

SEQ ID NO: 12041 - protein, 7 aa, synthetic construct
YSKYNIN

SEQ ID NO: 12042 - protein, 7 aa, synthetic construct
YFTHQSE

SEQ ID NO: 12043 - protein, 7 aa, synthetic construct
YAKTGNN

SEQ ID NO: 12044 - protein, 7 aa, synthetic construct
LISTNGR

SEQ ID NO: 12045 - protein, 7 aa, synthetic construct
SRSSNGV

SEQ ID NO: 12046 - protein, 7 aa, synthetic construct
LASTNGI

SEQ ID NO: 12047 - protein, 7 aa, synthetic construct
AGSTNGV

SEQ ID NO: 12048 - protein, 7 aa, synthetic construct
RTSSNGQ

SEQ ID NO: 12049 - protein, 7 aa, synthetic construct
ERSTNGI

SEQ ID NO: 12050 - protein, 7 aa, synthetic construct
PGSTNGV

SEQ ID NO: 12051 - protein, 7 aa, synthetic construct
LARNGEN

SEQ ID NO: 12052 - protein, 7 aa, synthetic construct
SQSTNGI

SEQ ID NO: 12053 - protein, 7 aa, synthetic construct
YAKMGQN

SEQ ID NO: 12054 - protein, 7 aa, synthetic construct
KFPSHDW

SEQ ID NO: 12055 - protein, 7 aa, synthetic construct
VESTNGI

SEQ ID NO: 12056 - protein, 7 aa, synthetic construct
LSKMNIN

SEQ ID NO: 12057 - protein, 7 aa, synthetic construct
RNEGVAW

SEQ ID NO: 12058 - protein, 7 aa, synthetic construct
YAKGGVN

SEQ ID NO: 12059 - protein, 7 aa, synthetic construct
YSKMGGN

SEQ ID NO: 12060 - protein, 7 aa, synthetic construct
FISSNGV

SEQ ID NO: 12061 - protein, 7 aa, synthetic construct
YSKGNPN

SEQ ID NO: 12062 - protein, 7 aa, synthetic construct
ALSTNGR

SEQ ID NO: 12063 - protein, 7 aa, synthetic construct
KESSYAW

SEQ ID NO: 12064 - protein, 7 aa, synthetic construct
TGSTNGV

SEQ ID NO: 12065 - protein, 7 aa, synthetic construct
LSKTGAN

SEQ ID NO: 12066 - protein, 7 aa, synthetic construct
RESSNGY

SEQ ID NO: 12067 - protein, 7 aa, synthetic construct
LAKGGSN

SEQ ID NO: 12068 - protein, 7 aa, synthetic construct
GTGKQQW

SEQ ID NO: 12069 - protein, 7 aa, synthetic construct
SSSTNGV

SEQ ID NO: 12070 - protein, 7 aa, synthetic construct
RDSTNGI

SEQ ID NO: 12071 - protein, 7 aa, synthetic construct
LKDGTAS

SEQ ID NO: 12072 - protein, 7 aa, synthetic construct
MDSTNGR

SEQ ID NO: 12073 - protein, 7 aa, synthetic construct
HASTNGV

SEQ ID NO: 12074 - protein, 7 aa, synthetic construct
QWDGSPS

SEQ ID NO: 12075 - protein, 7 aa, synthetic construct
MGSTNGV

SEQ ID NO: 12076 - protein, 7 aa, synthetic construct
NDSTNGR

SEQ ID NO: 12077 - protein, 7 aa, synthetic construct
TPEPVRW

SEQ ID NO: 12078 - protein, 7 aa, synthetic construct
TTSSNGV

SEQ ID NO: 12079 - protein, 7 aa, synthetic construct
NFSTNGV

SEQ ID NO: 12080 - protein, 7 aa, synthetic construct
LARNGGN

SEQ ID NO: 12081 - protein, 7 aa, synthetic construct
TGSSNGV

SEQ ID NO: 12082 - protein, 7 aa, synthetic construct
YAKPGHN

SEQ ID NO: 12083 - protein, 7 aa, synthetic construct
YAKHGAN

SEQ ID NO: 12084 - protein, 7 aa, synthetic construct
ARSSNGV

SEQ ID NO: 12085 - protein, 7 aa, synthetic construct
YSKTNYN

SEQ ID NO: 12086 - protein, 7 aa, synthetic construct
SSSTNGL

SEQ ID NO: 12087 - protein, 7 aa, synthetic construct
FQSTNGI

SEQ ID NO: 12088 - protein, 7 aa, synthetic construct
IGSTNGV

SEQ ID NO: 12089 - protein, 7 aa, synthetic construct
NESTNGR

SEQ ID NO: 12090 - protein, 7 aa, synthetic construct
PLSTNGR

SEQ ID NO: 12091 - protein, 7 aa, synthetic construct
YSKGNSN

SEQ ID NO: 12092 - protein, 7 aa, synthetic construct
LSKAGEN

SEQ ID NO: 12093 - protein, 7 aa, synthetic construct
KKDGTNA

SEQ ID NO: 12094 - protein, 7 aa, synthetic construct
YSRSGEN

SEQ ID NO: 12095 - protein, 7 aa, synthetic construct
YARYNPN

SEQ ID NO: 12096 - protein, 7 aa, synthetic construct
VNETNGV

SEQ ID NO: 12097 - protein, 7 aa, synthetic construct
TMSTNGI

SEQ ID NO: 12098 - protein, 7 aa, synthetic construct
RDSTNGV

SEQ ID NO: 12099 - protein, 7 aa, synthetic construct
YYSTNGI

SEQ ID NO: 12100 - protein, 7 aa, synthetic construct
VHSSNGV

SEQ ID NO: 12101 - protein, 7 aa, synthetic construct
YSKMGAN

SEQ ID NO: 12102 - protein, 7 aa, synthetic construct
LSKSNVN

SEQ ID NO: 12103 - protein, 7 aa, synthetic construct
YNNGSRY

SEQ ID NO: 12104 - protein, 7 aa, synthetic construct
WISTNGV

SEQ ID NO: 12105 - protein, 7 aa, synthetic construct
HGSTNGI

SEQ ID NO: 12106 - protein, 7 aa, synthetic construct
YARGGGN

SEQ ID NO: 12107 - protein, 7 aa, synthetic construct
LDSTNGI

SEQ ID NO: 12108 - protein, 7 aa, synthetic construct
YSREGPN

SEQ ID NO: 12109 - protein, 7 aa, synthetic construct
LSKMNYN

SEQ ID NO: 12110 - protein, 7 aa, synthetic construct
YSRSNEN

SEQ ID NO: 12111 - protein, 7 aa, synthetic construct
YARPGLN

SEQ ID NO: 12112 - protein, 7 aa, synthetic construct
LAKAGNN

SEQ ID NO: 12113 - protein, 7 aa, synthetic construct
SDSTNGR

SEQ ID NO: 12114 - protein, 7 aa, synthetic construct
YSKTNFN

SEQ ID NO: 12115 - protein, 7 aa, synthetic construct
LARAGTN

SEQ ID NO: 12116 - protein, 7 aa, synthetic construct
RYDGSSA

SEQ ID NO: 12117 - protein, 7 aa, synthetic construct
TNSSNGV

SEQ ID NO: 12118 - protein, 7 aa, synthetic construct
QNSTNGI

SEQ ID NO: 12119 - protein, 7 aa, synthetic construct
YSKNGIN

SEQ ID NO: 12120 - protein, 7 aa, synthetic construct
FTSTNGI

SEQ ID NO: 12121 - protein, 7 aa, synthetic construct
TADNYTV

SEQ ID NO: 12122 - protein, 7 aa, synthetic construct
SISTNGV

SEQ ID NO: 12123 - protein, 7 aa, synthetic construct
GNNGNVW

SEQ ID NO: 12124 - protein, 7 aa, synthetic construct
SLSTNGV

SEQ ID NO: 12125 - protein, 7 aa, synthetic construct
YSKSGCN

SEQ ID NO: 12126 - protein, 7 aa, synthetic construct
ESSTNGI

SEQ ID NO: 12127 - protein, 7 aa, synthetic construct
LSKGNIN

SEQ ID NO: 12128 - protein, 7 aa, synthetic construct
TWSTNGI

SEQ ID NO: 12129 - protein, 7 aa, synthetic construct
QNSTNGV

SEQ ID NO: 12130 - protein, 7 aa, synthetic construct
ENSTNGK

SEQ ID NO: 12131 - protein, 7 aa, synthetic construct
LVSTNGI

SEQ ID NO: 12132 - protein, 7 aa, synthetic construct
FYSTNGV

SEQ ID NO: 12133 - protein, 7 aa, synthetic construct
MNSTNGI

SEQ ID NO: 12134 - protein, 7 aa, synthetic construct
PDSTNGR

SEQ ID NO: 12135 - protein, 7 aa, synthetic construct
YAKAGCN

SEQ ID NO: 12136 - protein, 7 aa, synthetic construct
YSKQNQN

SEQ ID NO: 12137 - protein, 7 aa, synthetic construct
LRSSNGV

SEQ ID NO: 12138 - protein, 7 aa, synthetic construct
YSKVNDN

SEQ ID NO: 12139 - protein, 7 aa, synthetic construct
RDGNSTY

SEQ ID NO: 12140 - protein, 7 aa, synthetic construct
SSGSSSW

SEQ ID NO: 12141 - protein, 7 aa, synthetic construct
MESTNGI

SEQ ID NO: 12142 - protein, 7 aa, synthetic construct
YSRQGDN

SEQ ID NO: 12143 - protein, 7 aa, synthetic construct
YARTNEN

SEQ ID NO: 12144 - protein, 7 aa, synthetic construct
TASTNGV

SEQ ID NO: 12145 - protein, 7 aa, synthetic construct
ILSTNGV

SEQ ID NO: 12146 - protein, 7 aa, synthetic construct
LSRLGEN

SEQ ID NO: 12147 - protein, 7 aa, synthetic construct
LASTNGV

SEQ ID NO: 12148 - protein, 7 aa, synthetic construct
YSKVGEN

SEQ ID NO: 12149 - protein, 7 aa, synthetic construct
YARSNQN

SEQ ID NO: 12150 - protein, 7 aa, synthetic construct
NQSTNGR

SEQ ID NO: 12151 - protein, 7 aa, synthetic construct
YARGGEN

SEQ ID NO: 12152 - protein, 7 aa, synthetic construct
YSKHNLN

SEQ ID NO: 12153 - protein, 7 aa, synthetic construct
HKSSNGV

SEQ ID NO: 12154 - protein, 7 aa, synthetic construct
LAKMGIN

SEQ ID NO: 12155 - protein, 7 aa, synthetic construct
GQGNSAW

SEQ ID NO: 12156 - protein, 7 aa, synthetic construct
YAKDGPN

SEQ ID NO: 12157 - protein, 7 aa, synthetic construct
NKYGSDV

SEQ ID NO: 12158 - protein, 7 aa, synthetic construct
YARGNEN

SEQ ID NO: 12159 - protein, 7 aa, synthetic construct
GQSTNGR

SEQ ID NO: 12160 - protein, 7 aa, synthetic construct
HFSTNGV

SEQ ID NO: 12161 - protein, 7 aa, synthetic construct
NASTNGV

SEQ ID NO: 12162 - protein, 7 aa, synthetic construct
SASTNGR

SEQ ID NO: 12163 - protein, 7 aa, synthetic construct
RENNVTW

SEQ ID NO: 12164 - protein, 7 aa, synthetic construct
QHSTNGI

SEQ ID NO: 12165 - protein, 7 aa, synthetic construct
LSKIGPN

SEQ ID NO: 12166 - protein, 7 aa, synthetic construct
PMSTNGV

SEQ ID NO: 12167 - protein, 7 aa, synthetic construct
LSRANEN

SEQ ID NO: 12168 - protein, 7 aa, synthetic construct
YSKINDN

SEQ ID NO: 12169 - protein, 7 aa, synthetic construct
LAKNGAN

SEQ ID NO: 12170 - protein, 7 aa, synthetic construct
YSKNGAN

SEQ ID NO: 12171 - protein, 7 aa, synthetic construct
AYSTNGV

SEQ ID NO: 12172 - protein, 7 aa, synthetic construct
YSKQNNN

SEQ ID NO: 12173 - protein, 7 aa, synthetic construct
YNSTNGI

SEQ ID NO: 12174 - protein, 7 aa, synthetic construct
LAKAGQN

SEQ ID NO: 12175 - protein, 7 aa, synthetic construct
LSKENYN

SEQ ID NO: 12176 - protein, 7 aa, synthetic construct
TSSTNGI

SEQ ID NO: 12177 - protein, 7 aa, synthetic construct
FSKIQTE

SEQ ID NO: 12178 - protein, 7 aa, synthetic construct
EDSTNGR

SEQ ID NO: 12179 - protein, 7 aa, synthetic construct
SNSTNGV

SEQ ID NO: 12180 - protein, 7 aa, synthetic construct
RDSNVYP

SEQ ID NO: 12181 - protein, 7 aa, synthetic construct
RPDGTPS

SEQ ID NO: 12182 - protein, 7 aa, synthetic construct
YAKQNPN

SEQ ID NO: 12183 - protein, 7 aa, synthetic construct
LAKGGTN

SEQ ID NO: 12184 - protein, 7 aa, synthetic construct
LSKNNYN

SEQ ID NO: 12185 - protein, 7 aa, synthetic construct
FNSTNGV

SEQ ID NO: 12186 - protein, 7 aa, synthetic construct
NNSTNGV

SEQ ID NO: 12187 - protein, 7 aa, synthetic construct
GSSTNGV

SEQ ID NO: 12188 - protein, 7 aa, synthetic construct
EESTNGR

SEQ ID NO: 12189 - protein, 7 aa, synthetic construct
YSKNGNN

SEQ ID NO: 12190 - protein, 7 aa, synthetic construct
VTSTNGV

SEQ ID NO: 12191 - protein, 7 aa, synthetic construct
LAKNGTN

SEQ ID NO: 12192 - protein, 7 aa, synthetic construct
LYSTNGV

SEQ ID NO: 12193 - protein, 7 aa, synthetic construct
NYRGDNA

SEQ ID NO: 12194 - protein, 7 aa, synthetic construct
ISYDYGN

SEQ ID NO: 12195 - protein, 7 aa, synthetic construct
LAKNGVN

SEQ ID NO: 12196 - protein, 7 aa, synthetic construct
LHASSMN

SEQ ID NO: 12197 - protein, 7 aa, synthetic construct
QISTNGV

SEQ ID NO: 12198 - protein, 7 aa, synthetic construct
VHKQLPN

SEQ ID NO: 12199 - protein, 7 aa, synthetic construct
YESINGR

SEQ ID NO: 12200 - protein, 7 aa, synthetic construct
GMKNKFD

SEQ ID NO: 12201 - protein, 7 aa, synthetic construct
NQSTNGV

SEQ ID NO: 12202 - protein, 7 aa, synthetic construct
QDSTNGR

SEQ ID NO: 12203 - protein, 7 aa, synthetic construct
FSRQGNN

SEQ ID NO: 12204 - protein, 7 aa, synthetic construct
LAKQGAN

SEQ ID NO: 12205 - protein, 7 aa, synthetic construct
FQSTNGV

SEQ ID NO: 12206 - protein, 7 aa, synthetic construct
VDSTNGV

SEQ ID NO: 12207 - protein, 7 aa, synthetic construct
LAKQGNN

SEQ ID NO: 12208 - protein, 7 aa, synthetic construct
KDGVSVW

SEQ ID NO: 12209 - protein, 7 aa, synthetic construct
GESTNGR

SEQ ID NO: 12210 - protein, 7 aa, synthetic construct
WVSTNGV

SEQ ID NO: 12211 - protein, 7 aa, synthetic construct
LSKSGQN

SEQ ID NO: 12212 - protein, 7 aa, synthetic construct
TGGESRW

SEQ ID NO: 12213 - protein, 7 aa, synthetic construct
FARSGEN

SEQ ID NO: 12214 - protein, 7 aa, synthetic construct
RLSTNGV

SEQ ID NO: 12215 - protein, 7 aa, synthetic construct
TWSSNGV

SEQ ID NO: 12216 - protein, 7 aa, synthetic construct
MNSTNGV

SEQ ID NO: 12217 - protein, 7 aa, synthetic construct
KTSREGV

SEQ ID NO: 12218 - protein, 7 aa, synthetic construct
MFSTNGV

SEQ ID NO: 12219 - protein, 7 aa, synthetic construct
LAKPGPN

SEQ ID NO: 12220 - protein, 7 aa, synthetic construct
YSKLQDN

SEQ ID NO: 12221 - protein, 7 aa, synthetic construct
DLDSTKW

SEQ ID NO: 12222 - protein, 7 aa, synthetic construct
HESSNGV

SEQ ID NO: 12223 - protein, 7 aa, synthetic construct
SGSSNGR

SEQ ID NO: 12224 - protein, 7 aa, synthetic construct
YAKTGEN

SEQ ID NO: 12225 - protein, 7 aa, synthetic construct
YAKQGTN

SEQ ID NO: 12226 - protein, 7 aa, synthetic construct
YTRSDTS

SEQ ID NO: 12227 - protein, 7 aa, synthetic construct
LSKAGIN

SEQ ID NO: 12228 - protein, 7 aa, synthetic construct
PHSTNGI

SEQ ID NO: 12229 - protein, 7 aa, synthetic construct
ISSTNGI

SEQ ID NO: 12230 - protein, 7 aa, synthetic construct
KQSDLTW

SEQ ID NO: 12231 - protein, 7 aa, synthetic construct
LSKQGIN

SEQ ID NO: 12232 - protein, 7 aa, synthetic construct
LESSNGV

SEQ ID NO: 12233 - protein, 7 aa, synthetic construct
HWSSNGV

SEQ ID NO: 12234 - protein, 7 aa, synthetic construct
REGAGSW

SEQ ID NO: 12235 - protein, 7 aa, synthetic construct
RLDSNGW

SEQ ID NO: 12236 - protein, 7 aa, synthetic construct
YARPGTN

SEQ ID NO: 12237 - protein, 7 aa, synthetic construct
NYNNVYS

SEQ ID NO: 12238 - protein, 7 aa, synthetic construct
LSKVGGN

SEQ ID NO: 12239 - protein, 7 aa, synthetic construct
HSSTNGV

SEQ ID NO: 12240 - protein, 7 aa, synthetic construct
LSKMNTN

SEQ ID NO: 12241 - protein, 7 aa, synthetic construct
LSKSGTN

SEQ ID NO: 12242 - protein, 7 aa, synthetic construct
TISSNGV

SEQ ID NO: 12243 - protein, 7 aa, synthetic construct
PVSTNGV

SEQ ID NO: 12244 - protein, 7 aa, synthetic construct
YSKMGEN

SEQ ID NO: 12245 - protein, 7 aa, synthetic construct
RGENHAW

SEQ ID NO: 12246 - protein, 7 aa, synthetic construct
NSSTNGV

SEQ ID NO: 12247 - protein, 7 aa, synthetic construct
VDSREGR

SEQ ID NO: 12248 - protein, 7 aa, synthetic construct
FSRANEN

SEQ ID NO: 12249 - protein, 7 aa, synthetic construct
QGSGLFI

SEQ ID NO: 12250 - protein, 7 aa, synthetic construct
LSKSANN

SEQ ID NO: 12251 - protein, 7 aa, synthetic construct
WTSSNGV

SEQ ID NO: 12252 - protein, 7 aa, synthetic construct
LHSSNGV

SEQ ID NO: 12253 - protein, 7 aa, synthetic construct
YSKVNEN

SEQ ID NO: 12254 - protein, 7 aa, synthetic construct
TMSSNGV

SEQ ID NO: 12255 - protein, 7 aa, synthetic construct
HDSTNGR

SEQ ID NO: 12256 - protein, 7 aa, synthetic construct
LAKQGQN

SEQ ID NO: 12257 - protein, 7 aa, synthetic construct
EKSTNGV

SEQ ID NO: 12258 - protein, 7 aa, synthetic construct
LSRMGEN

SEQ ID NO: 12259 - protein, 7 aa, synthetic construct
FAKMGPN

SEQ ID NO: 12260 - protein, 7 aa, synthetic construct
PYSTNGV

SEQ ID NO: 12261 - protein, 7 aa, synthetic construct
WHSSNGV

SEQ ID NO: 12262 - protein, 7 aa, synthetic construct
NESTNGI

SEQ ID NO: 12263 - protein, 7 aa, synthetic construct
SNASSNW

SEQ ID NO: 12264 - protein, 7 aa, synthetic construct
YSKSNMN

SEQ ID NO: 12265 - protein, 7 aa, synthetic construct
LHKNLPD

SEQ ID NO: 12266 - protein, 7 aa, synthetic construct
AQSSNGV

SEQ ID NO: 12267 - protein, 7 aa, synthetic construct
NHSGRSA

SEQ ID NO: 12268 - protein, 7 aa, synthetic construct
FSKFNPN

SEQ ID NO: 12269 - protein, 7 aa, synthetic construct
NTSTNGI

SEQ ID NO: 12270 - protein, 7 aa, synthetic construct
RQDHVMY

SEQ ID NO: 12271 - protein, 7 aa, synthetic construct
NTGNSHW

SEQ ID NO: 12272 - protein, 7 aa, synthetic construct
PWEGGPR

SEQ ID NO: 12273 - protein, 7 aa, synthetic construct
IQSSNGV

SEQ ID NO: 12274 - protein, 7 aa, synthetic construct
LSRHNEN

SEQ ID NO: 12275 - protein, 7 aa, synthetic construct
MSDNKHW

SEQ ID NO: 12276 - protein, 7 aa, synthetic construct
LSKSNIN

SEQ ID NO: 12277 - protein, 7 aa, synthetic construct
YSRQGEN

SEQ ID NO: 12278 - protein, 7 aa, synthetic construct
YARLNIN

SEQ ID NO: 12279 - protein, 7 aa, synthetic construct
IDGNSPY

SEQ ID NO: 12280 - protein, 7 aa, synthetic construct
MDSTNGV

SEQ ID NO: 12281 - protein, 7 aa, synthetic construct
LSKSGSN

SEQ ID NO: 12282 - protein, 7 aa, synthetic construct
ASSSNGV

SEQ ID NO: 12283 - protein, 7 aa, synthetic construct
MLSTNGV

SEQ ID NO: 12284 - protein, 7 aa, synthetic construct
FSRTNVN

SEQ ID NO: 12285 - protein, 7 aa, synthetic construct
LDSTNGV

SEQ ID NO: 12286 - protein, 7 aa, synthetic construct
YSRINMN

SEQ ID NO: 12287 - protein, 7 aa, synthetic construct
FSRLGEN

SEQ ID NO: 12288 - protein, 7 aa, synthetic construct
YYTGIND

SEQ ID NO: 12289 - protein, 7 aa, synthetic construct
HSSTNGI

SEQ ID NO: 12290 - protein, 7 aa, synthetic construct
MTSTNGI

SEQ ID NO: 12291 - protein, 7 aa, synthetic construct
PGSTNGR

SEQ ID NO: 12292 - protein, 7 aa, synthetic construct
YASSNGV

SEQ ID NO: 12293 - protein, 7 aa, synthetic construct
MVSTNGI

SEQ ID NO: 12294 - protein, 7 aa, synthetic construct
LESTNGI

SEQ ID NO: 12295 - protein, 7 aa, synthetic construct
ISSSNGV

SEQ ID NO: 12296 - protein, 7 aa, synthetic construct
YSKNGVN

SEQ ID NO: 12297 - protein, 7 aa, synthetic construct
WQSSNGV

SEQ ID NO: 12298 - protein, 7 aa, synthetic construct
FSKLGLN

SEQ ID NO: 12299 - protein, 7 aa, synthetic construct
NKSTNGV

SEQ ID NO: 12300 - protein, 7 aa, synthetic construct
YFTGTNN

SEQ ID NO: 12301 - protein, 7 aa, synthetic construct
PKSTNGI

SEQ ID NO: 12302 - protein, 7 aa, synthetic construct
WASTNGI

SEQ ID NO: 12303 - protein, 7 aa, synthetic construct
MGGSSNW

SEQ ID NO: 12304 - protein, 7 aa, synthetic construct
ATDYMAY

SEQ ID NO: 12305 - protein, 7 aa, synthetic construct
FSRAGEN

SEQ ID NO: 12306 - protein, 7 aa, synthetic construct
RNDGTSW

SEQ ID NO: 12307 - protein, 7 aa, synthetic construct
LSKTGQN

SEQ ID NO: 12308 - protein, 7 aa, synthetic construct
YAKQNHN

SEQ ID NO: 12309 - protein, 7 aa, synthetic construct
FYSTNGI

SEQ ID NO: 12310 - protein, 7 aa, synthetic construct
WASSNGV

SEQ ID NO: 12311 - protein, 7 aa, synthetic construct
TVSSNGV

SEQ ID NO: 12312 - protein, 7 aa, synthetic construct
VDSTNGI

SEQ ID NO: 12313 - protein, 7 aa, synthetic construct
LAKIGFN

SEQ ID NO: 12314 - protein, 7 aa, synthetic construct
RSGESAW

SEQ ID NO: 12315 - protein, 7 aa, synthetic construct
MRTGMGP

SEQ ID NO: 12316 - protein, 7 aa, synthetic construct
FMSTNGI

SEQ ID NO: 12317 - protein, 7 aa, synthetic construct
YAKGNSN

SEQ ID NO: 12318 - protein, 7 aa, synthetic construct
HVSSNGV

SEQ ID NO: 12319 - protein, 7 aa, synthetic construct
NLKGTGA

SEQ ID NO: 12320 - protein, 7 aa, synthetic construct
GHAGSTW

SEQ ID NO: 12321 - protein, 7 aa, synthetic construct
VAGRGYD

SEQ ID NO: 12322 - protein, 7 aa, synthetic construct
NHSTNGI

SEQ ID NO: 12323 - protein, 7 aa, synthetic construct
YSRYNEN

SEQ ID NO: 12324 - protein, 7 aa, synthetic construct
NQSTNGI

SEQ ID NO: 12325 - protein, 7 aa, synthetic construct
TSDYESY

SEQ ID NO: 12326 - protein, 7 aa, synthetic construct
YSKQGGN

SEQ ID NO: 12327 - protein, 7 aa, synthetic construct
LAKSGCN

SEQ ID NO: 12328 - protein, 7 aa, synthetic construct
HSSTHGQ

SEQ ID NO: 12329 - protein, 7 aa, synthetic construct
SFSSNGV

SEQ ID NO: 12330 - protein, 7 aa, synthetic construct
YYTGTTM

SEQ ID NO: 12331 - protein, 7 aa, synthetic construct
AFSTNGV

SEQ ID NO: 12332 - protein, 7 aa, synthetic construct
IISSNGV

SEQ ID NO: 12333 - protein, 7 aa, synthetic construct
VSSTNGV

SEQ ID NO: 12334 - protein, 7 aa, synthetic construct
LSKMNAN

SEQ ID NO: 12335 - protein, 7 aa, synthetic construct
RANGDNA

SEQ ID NO: 12336 - protein, 7 aa, synthetic construct
YSKHGSN

SEQ ID NO: 12337 - protein, 7 aa, synthetic construct
LSKHNDN

SEQ ID NO: 12338 - protein, 7 aa, synthetic construct
ADGISTY

SEQ ID NO: 12339 - protein, 7 aa, synthetic construct
YSKNGDN

SEQ ID NO: 12340 - protein, 7 aa, synthetic construct
STSSNGV

SEQ ID NO: 12341 - protein, 7 aa, synthetic construct
LAKGNYN

SEQ ID NO: 12342 - protein, 7 aa, synthetic construct
VNSSNGV

SEQ ID NO: 12343 - protein, 7 aa, synthetic construct
IYSTNGV

SEQ ID NO: 12344 - protein, 7 aa, synthetic construct
YSDFNGR

SEQ ID NO: 12345 - protein, 7 aa, synthetic construct
HDSTNGI

SEQ ID NO: 12346 - protein, 7 aa, synthetic construct
YAKHGLN

SEQ ID NO: 12347 - protein, 7 aa, synthetic construct
YAKLGVN

SEQ ID NO: 12348 - protein, 7 aa, synthetic construct
KNDGNPW

SEQ ID NO: 12349 - protein, 7 aa, synthetic construct
LAKNGQN

SEQ ID NO: 12350 - protein, 7 aa, synthetic construct
AHSTNGI

SEQ ID NO: 12351 - protein, 7 aa, synthetic construct
NTDGWRD

SEQ ID NO: 12352 - protein, 7 aa, synthetic construct
RDGASVY

SEQ ID NO: 12353 - protein, 7 aa, synthetic construct
WISSNGV

SEQ ID NO: 12354 - protein, 7 aa, synthetic construct
RDSSNGV

SEQ ID NO: 12355 - protein, 7 aa, synthetic construct
YAKPGVN

SEQ ID NO: 12356 - protein, 7 aa, synthetic construct
SQSSNGV

SEQ ID NO: 12357 - protein, 7 aa, synthetic construct
AWSTNGI

SEQ ID NO: 12358 - protein, 7 aa, synthetic construct
ANSTNGI

SEQ ID NO: 12359 - protein, 7 aa, synthetic construct
PTSTNGI

SEQ ID NO: 12360 - protein, 7 aa, synthetic construct
IYSTNGI

SEQ ID NO: 12361 - protein, 7 aa, synthetic construct
FESTNGR

SEQ ID NO: 12362 - protein, 7 aa, synthetic construct
LMSSNGV

SEQ ID NO: 12363 - protein, 7 aa, synthetic construct
QMSTNGI

SEQ ID NO: 12364 - protein, 7 aa, synthetic construct
FSKIGQN

SEQ ID NO: 12365 - protein, 7 aa, synthetic construct
YSKNGQN

SEQ ID NO: 12366 - protein, 7 aa, synthetic construct
YSKGGNN

SEQ ID NO: 12367 - protein, 7 aa, synthetic construct
THSGFGP

SEQ ID NO: 12368 - protein, 7 aa, synthetic construct
NASQGWD

SEQ ID NO: 12369 - protein, 7 aa, synthetic construct
AGGANVW

SEQ ID NO: 12370 - protein, 7 aa, synthetic construct
YSKINFN

SEQ ID NO: 12371 - protein, 7 aa, synthetic construct
EWSTNGV

SEQ ID NO: 12372 - protein, 7 aa, synthetic construct
NVSTNGV

SEQ ID NO: 12373 - protein, 7 aa, synthetic construct
YSRNGEN

SEQ ID NO: 12374 - protein, 7 aa, synthetic construct
WVSSNGV

SEQ ID NO: 12375 - protein, 7 aa, synthetic construct
MYDGTRS

SEQ ID NO: 12376 - protein, 7 aa, synthetic construct
FSKGNIN

SEQ ID NO: 12377 - protein, 7 aa, synthetic construct
GDSTNGR

SEQ ID NO: 12378 - protein, 7 aa, synthetic construct
YSKINVN

SEQ ID NO: 12379 - protein, 7 aa, synthetic construct
YSKAGEN

SEQ ID NO: 12380 - protein, 7 aa, synthetic construct
FHSTNGV

SEQ ID NO: 12381 - protein, 7 aa, synthetic construct
SESTNGV

SEQ ID NO: 12382 - protein, 7 aa, synthetic construct
LSKNGHN

SEQ ID NO: 12383 - protein, 7 aa, synthetic construct
MDSTNGI

SEQ ID NO: 12384 - protein, 7 aa, synthetic construct
YAKMGSN

SEQ ID NO: 12385 - protein, 7 aa, synthetic construct
YSRQNEN

SEQ ID NO: 12386 - protein, 7 aa, synthetic construct
DSSTWRD

SEQ ID NO: 12387 - protein, 7 aa, synthetic construct
YSRSGDN

SEQ ID NO: 12388 - protein, 7 aa, synthetic construct
WESTNGI

SEQ ID NO: 12389 - protein, 7 aa, synthetic construct
NSSSNGV

SEQ ID NO: 12390 - protein, 7 aa, synthetic construct
LSKQGVN

SEQ ID NO: 12391 - protein, 7 aa, synthetic construct
IDSTNGR

SEQ ID NO: 12392 - protein, 7 aa, synthetic construct
TSSSNGV

SEQ ID NO: 12393 - protein, 7 aa, synthetic construct
WDSTNGI

SEQ ID NO: 12394 - protein, 7 aa, synthetic construct
QESTNGI

SEQ ID NO: 12395 - protein, 7 aa, synthetic construct
YAKMGVN

SEQ ID NO: 12396 - protein, 7 aa, synthetic construct
LSSSNGV

SEQ ID NO: 12397 - protein, 7 aa, synthetic construct
LSKSGNN

SEQ ID NO: 12398 - protein, 7 aa, synthetic construct
RTNTNGI

SEQ ID NO: 12399 - protein, 7 aa, synthetic construct
WNSTNGI

SEQ ID NO: 12400 - protein, 7 aa, synthetic construct
DTNAMKY

SEQ ID NO: 12401 - protein, 7 aa, synthetic construct
AVSTNGI

SEQ ID NO: 12402 - protein, 7 aa, synthetic construct
SGSSNPW

SEQ ID NO: 12403 - protein, 7 aa, synthetic construct
IASSNGV

SEQ ID NO: 12404 - protein, 7 aa, synthetic construct
KNGGSAW

SEQ ID NO: 12405 - protein, 7 aa, synthetic construct
QWSSNGV

SEQ ID NO: 12406 - protein, 7 aa, synthetic construct
YSKSGEN

SEQ ID NO: 12407 - protein, 7 aa, synthetic construct
IVSSNGV

SEQ ID NO: 12408 - protein, 7 aa, synthetic construct
HLSTNGV

SEQ ID NO: 12409 - protein, 7 aa, synthetic construct
FAKGGLN

SEQ ID NO: 12410 - protein, 7 aa, synthetic construct
YSKNGTN

SEQ ID NO: 12411 - protein, 7 aa, synthetic construct
HHSTNGI

SEQ ID NO: 12412 - protein, 7 aa, synthetic construct
KLPEYGH

SEQ ID NO: 12413 - protein, 7 aa, synthetic construct
NSKGTGA

SEQ ID NO: 12414 - protein, 7 aa, synthetic construct
TDSTSGR

SEQ ID NO: 12415 - protein, 7 aa, synthetic construct
YGSTNGI

SEQ ID NO: 12416 - protein, 7 aa, synthetic construct
LGGASLY

SEQ ID NO: 12417 - protein, 7 aa, synthetic construct
LNSTNGI

SEQ ID NO: 12418 - protein, 7 aa, synthetic construct
LSRQGEN

SEQ ID NO: 12419 - protein, 7 aa, synthetic construct
YAKLNPN

SEQ ID NO: 12420 - protein, 7 aa, synthetic construct
QASTNGI

SEQ ID NO: 12421 - protein, 7 aa, synthetic construct
GVKGTMF

SEQ ID NO: 12422 - protein, 7 aa, synthetic construct
YAKQNVN

SEQ ID NO: 12423 - protein, 7 aa, synthetic construct
SSSTTGR

SEQ ID NO: 12424 - protein, 7 aa, synthetic construct
HGGNSHY

SEQ ID NO: 12425 - protein, 7 aa, synthetic construct
RDERTTY

SEQ ID NO: 12426 - protein, 7 aa, synthetic construct
RLSDAYP

SEQ ID NO: 12427 - protein, 7 aa, synthetic construct
IARTGHD

SEQ ID NO: 12428 - protein, 7 aa, synthetic construct
SDSSNGV

SEQ ID NO: 12429 - protein, 7 aa, synthetic construct
NDSTNGV

SEQ ID NO: 12430 - protein, 7 aa, synthetic construct
RSNETFP

SEQ ID NO: 12431 - protein, 7 aa, synthetic construct
SLSTNGI

SEQ ID NO: 12432 - protein, 7 aa, synthetic construct
RDSTPHW

SEQ ID NO: 12433 - protein, 7 aa, synthetic construct
VNATNGV

SEQ ID NO: 12434 - protein, 7 aa, synthetic construct
VVSTNGI

SEQ ID NO: 12435 - protein, 7 aa, synthetic construct
YAKTNVN

SEQ ID NO: 12436 - protein, 7 aa, synthetic construct
HISSNGV

SEQ ID NO: 12437 - protein, 7 aa, synthetic construct
GNSTNGI

SEQ ID NO: 12438 - protein, 7 aa, synthetic construct
YARNGEN

SEQ ID NO: 12439 - protein, 7 aa, synthetic construct
YSKNNPN

SEQ ID NO: 12440 - protein, 7 aa, synthetic construct
KNGQSTY

SEQ ID NO: 12441 - protein, 7 aa, synthetic construct
VVSTNGR

SEQ ID NO: 12442 - protein, 7 aa, synthetic construct
LAKSGDN

SEQ ID NO: 12443 - protein, 7 aa, synthetic construct
LAKLGAN

SEQ ID NO: 12444 - protein, 7 aa, synthetic construct
LFSTNGI

SEQ ID NO: 12445 - protein, 7 aa, synthetic construct
DTSTNGR

SEQ ID NO: 12446 - protein, 7 aa, synthetic construct
LGSTNGV

SEQ ID NO: 12447 - protein, 7 aa, synthetic construct
MISTNGV

SEQ ID NO: 12448 - protein, 7 aa, synthetic construct
YSKTNNN

SEQ ID NO: 12449 - protein, 7 aa, synthetic construct
ELNDVKW

SEQ ID NO: 12450 - protein, 7 aa, synthetic construct
AESTNGI

SEQ ID NO: 12451 - protein, 7 aa, synthetic construct
RGATIMP

SEQ ID NO: 12452 - protein, 7 aa, synthetic construct
VRDTNGM

SEQ ID NO: 12453 - protein, 7 aa, synthetic construct
LRSGAAP

SEQ ID NO: 12454 - protein, 7 aa, synthetic construct
WNSTNGV

SEQ ID NO: 12455 - protein, 7 aa, synthetic construct
EWSTNGI

SEQ ID NO: 12456 - protein, 7 aa, synthetic construct
WQRGEIN

SEQ ID NO: 12457 - protein, 7 aa, synthetic construct
LARGNVN

SEQ ID NO: 12458 - protein, 7 aa, synthetic construct
SWSTNGV

SEQ ID NO: 12459 - protein, 7 aa, synthetic construct
FMSSNGV

SEQ ID NO: 12460 - protein, 7 aa, synthetic construct
PISTNGV

SEQ ID NO: 12461 - protein, 7 aa, synthetic construct
SRFGDSA

SEQ ID NO: 12462 - protein, 7 aa, synthetic construct
SGDGSRY

SEQ ID NO: 12463 - protein, 7 aa, synthetic construct
YSKYGDN

SEQ ID NO: 12464 - protein, 7 aa, synthetic construct
LSKNGIN

SEQ ID NO: 12465 - protein, 7 aa, synthetic construct
SGSSNGV

SEQ ID NO: 12466 - protein, 7 aa, synthetic construct
NISTNGV

SEQ ID NO: 12467 - protein, 7 aa, synthetic construct
NAGTSNW

SEQ ID NO: 12468 - protein, 7 aa, synthetic construct
RREDSYS

SEQ ID NO: 12469 - protein, 7 aa, synthetic construct
NKSTNGI

SEQ ID NO: 12470 - protein, 7 aa, synthetic construct
LSRVNEN

SEQ ID NO: 12471 - protein, 7 aa, synthetic construct
RISSNGV

SEQ ID NO: 12472 - protein, 7 aa, synthetic construct
THSSNGV

SEQ ID NO: 12473 - protein, 7 aa, synthetic construct
YISTNGV

SEQ ID NO: 12474 - protein, 7 aa, synthetic construct
LARMGDN

SEQ ID NO: 12475 - protein, 7 aa, synthetic construct
TAYGQNA

SEQ ID NO: 12476 - protein, 7 aa, synthetic construct
YSRPGLN

SEQ ID NO: 12477 - protein, 7 aa, synthetic construct
MISTNGI

SEQ ID NO: 12478 - protein, 7 aa, synthetic construct
FSKNGPN

SEQ ID NO: 12479 - protein, 7 aa, synthetic construct
LSKANTN

SEQ ID NO: 12480 - protein, 7 aa, synthetic construct
LAKGNFN

SEQ ID NO: 12481 - protein, 7 aa, synthetic construct
VQSSNGV

SEQ ID NO: 12482 - protein, 7 aa, synthetic construct
YSKANEN

SEQ ID NO: 12483 - protein, 7 aa, synthetic construct
YARAGEN

SEQ ID NO: 12484 - protein, 7 aa, synthetic construct
LNSSNGV

SEQ ID NO: 12485 - protein, 7 aa, synthetic construct
YISTNGR

SEQ ID NO: 12486 - protein, 7 aa, synthetic construct
INSSNGV

SEQ ID NO: 12487 - protein, 7 aa, synthetic construct
YSKNNNN

SEQ ID NO: 12488 - protein, 7 aa, synthetic construct
GGHMSTY

SEQ ID NO: 12489 - protein, 7 aa, synthetic construct
PWSTNGV

SEQ ID NO: 12490 - protein, 7 aa, synthetic construct
QESSNGV

SEQ ID NO: 12491 - protein, 7 aa, synthetic construct
LRDGTGS

SEQ ID NO: 12492 - protein, 7 aa, synthetic construct
IKSSNGV

SEQ ID NO: 12493 - protein, 7 aa, synthetic construct
IKWESGD

SEQ ID NO: 12494 - protein, 7 aa, synthetic construct
YSKNNAN

SEQ ID NO: 12495 - protein, 7 aa, synthetic construct
PNSSNGV

SEQ ID NO: 12496 - protein, 7 aa, synthetic construct
LSRQNEN

SEQ ID NO: 12497 - protein, 7 aa, synthetic construct
YARMGGN

SEQ ID NO: 12498 - protein, 7 aa, synthetic construct
QNSTNGR

SEQ ID NO: 12499 - protein, 7 aa, synthetic construct
KNESTLW

SEQ ID NO: 12500 - protein, 7 aa, synthetic construct
YHKSDFN

SEQ ID NO: 12501 - protein, 7 aa, synthetic construct
IDSTNGI

SEQ ID NO: 12502 - protein, 7 aa, synthetic construct
FESTNGI

SEQ ID NO: 12503 - protein, 7 aa, synthetic construct
YSKMNSN

SEQ ID NO: 12504 - protein, 7 aa, synthetic construct
VPSTNGR

SEQ ID NO: 12505 - protein, 7 aa, synthetic construct
LAKTGEN

SEQ ID NO: 12506 - protein, 7 aa, synthetic construct
HNNSSSW

SEQ ID NO: 12507 - protein, 7 aa, synthetic construct
LTSSNGV

SEQ ID NO: 12508 - protein, 7 aa, synthetic construct
YAKGNCN

SEQ ID NO: 12509 - protein, 7 aa, synthetic construct
AGGGSTY

SEQ ID NO: 12510 - protein, 7 aa, synthetic construct
FLSTNGV

SEQ ID NO: 12511 - protein, 7 aa, synthetic construct
TESSEGR

SEQ ID NO: 12512 - protein, 7 aa, synthetic construct
ATETGPK

SEQ ID NO: 12513 - protein, 7 aa, synthetic construct
VDSSNGV

SEQ ID NO: 12514 - protein, 7 aa, synthetic construct
YARANEN

SEQ ID NO: 12515 - protein, 7 aa, synthetic construct
YSRGGDN

SEQ ID NO: 12516 - protein, 7 aa, synthetic construct
QSSTNGI

SEQ ID NO: 12517 - protein, 7 aa, synthetic construct
YSKMNEN

SEQ ID NO: 12518 - protein, 7 aa, synthetic construct
YSRHGPN

SEQ ID NO: 12519 - protein, 7 aa, synthetic construct
PSSSNGV

SEQ ID NO: 12520 - protein, 7 aa, synthetic construct
ENSTNGV

SEQ ID NO: 12521 - protein, 7 aa, synthetic construct
ANSTNGV

SEQ ID NO: 12522 - protein, 7 aa, synthetic construct
DNGLSKY

SEQ ID NO: 12523 - protein, 7 aa, synthetic construct
HESTNGR

SEQ ID NO: 12524 - protein, 7 aa, synthetic construct
QTSREGI

SEQ ID NO: 12525 - protein, 7 aa, synthetic construct
FYTGHAD

SEQ ID NO: 12526 - protein, 7 aa, synthetic construct
RNDLTFP

SEQ ID NO: 12527 - protein, 7 aa, synthetic construct
DTGTSRY

SEQ ID NO: 12528 - protein, 7 aa, synthetic construct
MASTNGI

SEQ ID NO: 12529 - protein, 7 aa, synthetic construct
YSKVNPN

SEQ ID NO: 12530 - protein, 7 aa, synthetic construct
YSKENYN

SEQ ID NO: 12531 - protein, 7 aa, synthetic construct
VAYTSSD

SEQ ID NO: 12532 - protein, 7 aa, synthetic construct
YSKHGDN

SEQ ID NO: 12533 - protein, 7 aa, synthetic construct
QTSTNGI

SEQ ID NO: 12534 - protein, 7 aa, synthetic construct
YSKHNQN

SEQ ID NO: 12535 - protein, 7 aa, synthetic construct
IRSSNGV

SEQ ID NO: 12536 - protein, 7 aa, synthetic construct
YSKSNEN

SEQ ID NO: 12537 - protein, 7 aa, synthetic construct
RVTENWL

SEQ ID NO: 12538 - protein, 7 aa, synthetic construct
KESTSKW

SEQ ID NO: 12539 - protein, 7 aa, synthetic construct
YDSTNGI

SEQ ID NO: 12540 - protein, 7 aa, synthetic construct
YAKHGVN

SEQ ID NO: 12541 - protein, 7 aa, synthetic construct
VNESVAW

SEQ ID NO: 12542 - protein, 7 aa, synthetic construct
FSKQNIN

SEQ ID NO: 12543 - protein, 7 aa, synthetic construct
YSKQNDN

SEQ ID NO: 12544 - protein, 7 aa, synthetic construct
MRSSNGV

SEQ ID NO: 12545 - protein, 7 aa, synthetic construct
VPHKGSG

SEQ ID NO: 12546 - protein, 7 aa, synthetic construct
TFSGTMA

SEQ ID NO: 12547 - protein, 7 aa, synthetic construct
YDSSNGV

SEQ ID NO: 12548 - protein, 7 aa, synthetic construct
FSKQGHN

SEQ ID NO: 12549 - protein, 7 aa, synthetic construct
MKDGTAS

SEQ ID NO: 12550 - protein, 7 aa, synthetic construct
AWSSNGV

SEQ ID NO: 12551 - protein, 7 aa, synthetic construct
LSKQGAN

SEQ ID NO: 12552 - protein, 7 aa, synthetic construct
YSRVNGN

SEQ ID NO: 12553 - protein, 7 aa, synthetic construct
LARMGYN

SEQ ID NO: 12554 - protein, 7 aa, synthetic construct
YVSSNGV

SEQ ID NO: 12555 - protein, 7 aa, synthetic construct
LARLGEN

SEQ ID NO: 12556 - protein, 7 aa, synthetic construct
LAKMGQN

SEQ ID NO: 12557 - protein, 7 aa, synthetic construct
LSKMNNN

SEQ ID NO: 12558 - protein, 7 aa, synthetic construct
FASSNGV

SEQ ID NO: 12559 - protein, 7 aa, synthetic construct
FSRQGFN

SEQ ID NO: 12560 - protein, 7 aa, synthetic construct
NQSSVTW

SEQ ID NO: 12561 - protein, 7 aa, synthetic construct
EMSTNGR

SEQ ID NO: 12562 - protein, 7 aa, synthetic construct
LISSNGV

SEQ ID NO: 12563 - protein, 7 aa, synthetic construct
YSKVNQN

SEQ ID NO: 12564 - protein, 7 aa, synthetic construct
LAKHGLN

SEQ ID NO: 12565 - protein, 7 aa, synthetic construct
LAKSGGN

SEQ ID NO: 12566 - protein, 7 aa, synthetic construct
YARMNDN

SEQ ID NO: 12567 - protein, 7 aa, synthetic construct
YTHGTNH

SEQ ID NO: 12568 - protein, 7 aa, synthetic construct
VERSGWD

SEQ ID NO: 12569 - protein, 7 aa, synthetic construct
ESYNGRN

SEQ ID NO: 12570 - protein, 7 aa, synthetic construct
YSSTNGV

SEQ ID NO: 12571 - protein, 7 aa, synthetic construct
YSKNNIN

SEQ ID NO: 12572 - protein, 7 aa, synthetic construct
LSKNNIN

SEQ ID NO: 12573 - protein, 7 aa, synthetic construct
EMAHKNW

SEQ ID NO: 12574 - protein, 7 aa, synthetic construct
YAKYNPN

SEQ ID NO: 12575 - protein, 7 aa, synthetic construct
SSSSNGV

SEQ ID NO: 12576 - protein, 7 aa, synthetic construct
FARNGDN

SEQ ID NO: 12577 - protein, 7 aa, synthetic construct
YDSTNGV

SEQ ID NO: 12578 - protein, 7 aa, synthetic construct
TGSSHGW

SEQ ID NO: 12579 - protein, 7 aa, synthetic construct
FSRVNDN

SEQ ID NO: 12580 - protein, 7 aa, synthetic construct
TYSGDPA

SEQ ID NO: 12581 - protein, 7 aa, synthetic construct
GDMVVRY

SEQ ID NO: 12582 - protein, 7 aa, synthetic construct
FAKSGTN

SEQ ID NO: 12583 - protein, 7 aa, synthetic construct
NSGVSIY

SEQ ID NO: 12584 - protein, 7 aa, synthetic construct
DGGHSHY

SEQ ID NO: 12585 - protein, 7 aa, synthetic construct
WTDTNGA

SEQ ID NO: 12586 - protein, 7 aa, synthetic construct
LSRSGND

SEQ ID NO: 12587 - protein, 7 aa, synthetic construct
LAKQGTN

SEQ ID NO: 12588 - protein, 7 aa, synthetic construct
GDDFTKF

SEQ ID NO: 12589 - protein, 7 aa, synthetic construct
GHSTNGI

SEQ ID NO: 12590 - protein, 7 aa, synthetic construct
YFQGVIN

SEQ ID NO: 12591 - protein, 7 aa, synthetic construct
QGSTNGI

SEQ ID NO: 12592 - protein, 7 aa, synthetic construct
AGSTNGI

SEQ ID NO: 12593 - protein, 7 aa, synthetic construct
FAKGNVN

SEQ ID NO: 12594 - protein, 7 aa, synthetic construct
LSKGNLN

SEQ ID NO: 12595 - protein, 7 aa, synthetic construct
GDYPVKY

SEQ ID NO: 12596 - protein, 7 aa, synthetic construct
MESTNGV

SEQ ID NO: 12597 - protein, 7 aa, synthetic construct
MSSTNGI

SEQ ID NO: 12598 - protein, 7 aa, synthetic construct
NLGSNTW

SEQ ID NO: 12599 - protein, 7 aa, synthetic construct
HSRANTD

SEQ ID NO: 12600 - protein, 7 aa, synthetic construct
GRNGNPA

SEQ ID NO: 12601 - protein, 7 aa, synthetic construct
YSKHGQN

SEQ ID NO: 12602 - protein, 7 aa, synthetic construct
YSKMGTN

SEQ ID NO: 12603 - protein, 7 aa, synthetic construct
LDSTNGR

SEQ ID NO: 12604 - protein, 7 aa, synthetic construct
DRYGRSP

SEQ ID NO: 12605 - protein, 7 aa, synthetic construct
NSSTNGI

SEQ ID NO: 12606 - protein, 7 aa, synthetic construct
FSKMNTN

SEQ ID NO: 12607 - protein, 7 aa, synthetic construct
YSRFNEN

SEQ ID NO: 12608 - protein, 7 aa, synthetic construct
GGSGTTW

SEQ ID NO: 12609 - protein, 7 aa, synthetic construct
TVGYSTY

SEQ ID NO: 12610 - protein, 7 aa, synthetic construct
SESSNGV

SEQ ID NO: 12611 - protein, 7 aa, synthetic construct
RGPAEYP

SEQ ID NO: 12612 - protein, 7 aa, synthetic construct
YAKTNPN

SEQ ID NO: 12613 - protein, 7 aa, synthetic construct
NHSTNGV

SEQ ID NO: 12614 - protein, 7 aa, synthetic construct
LYSSNGV

SEQ ID NO: 12615 - protein, 7 aa, synthetic construct
QNQSHTW

SEQ ID NO: 12616 - protein, 7 aa, synthetic construct
YSKPGLN

SEQ ID NO: 12617 - protein, 7 aa, synthetic construct
LARAGDN

SEQ ID NO: 12618 - protein, 7 aa, synthetic construct
SNSSHGW

SEQ ID NO: 12619 - protein, 7 aa, synthetic construct
YSKTNDN

SEQ ID NO: 12620 - protein, 7 aa, synthetic construct
NMSTNGR

SEQ ID NO: 12621 - protein, 7 aa, synthetic construct
YAKIGTN

SEQ ID NO: 12622 - protein, 7 aa, synthetic construct
YSKTNHN

SEQ ID NO: 12623 - protein, 7 aa, synthetic construct
YAKLGDN

SEQ ID NO: 12624 - protein, 7 aa, synthetic construct
YTKSGSN

SEQ ID NO: 12625 - protein, 7 aa, synthetic construct
LSKMNEN

SEQ ID NO: 12626 - protein, 7 aa, synthetic construct
SYSTNGV

SEQ ID NO: 12627 - protein, 7 aa, synthetic construct
DSHSHTW

SEQ ID NO: 12628 - protein, 7 aa, synthetic construct
LTRSSYD

SEQ ID NO: 12629 - protein, 7 aa, synthetic construct
FSKTGLN

SEQ ID NO: 12630 - protein, 7 aa, synthetic construct
HGSSNGV

SEQ ID NO: 12631 - protein, 7 aa, synthetic construct
LAKLGNN

SEQ ID NO: 12632 - protein, 7 aa, synthetic construct
YAKTNHN

SEQ ID NO: 12633 - protein, 7 aa, synthetic construct
QEHTVYR

SEQ ID NO: 12634 - protein, 7 aa, synthetic construct
ANSSNGV

SEQ ID NO: 12635 - protein, 7 aa, synthetic construct
FESKVAY

SEQ ID NO: 12636 - protein, 7 aa, synthetic construct
SASSNGI

SEQ ID NO: 12637 - protein, 7 aa, synthetic construct
YSKDGPN

SEQ ID NO: 12638 - protein, 7 aa, synthetic construct
GQGSSTW

SEQ ID NO: 12639 - protein, 7 aa, synthetic construct
QQSTNGR

SEQ ID NO: 12640 - protein, 7 aa, synthetic construct
RNDSNGV

SEQ ID NO: 12641 - protein, 7 aa, synthetic construct
YSRHGDN

SEQ ID NO: 12642 - protein, 7 aa, synthetic construct
YFSSNGV

SEQ ID NO: 12643 - protein, 7 aa, synthetic construct
HMSSNGV

SEQ ID NO: 12644 - protein, 7 aa, synthetic construct
LSKMGSN

SEQ ID NO: 12645 - protein, 7 aa, synthetic construct
NNSSNGV

SEQ ID NO: 12646 - protein, 7 aa, synthetic construct
LASSNGV

SEQ ID NO: 12647 - protein, 7 aa, synthetic construct
QHSREGV

SEQ ID NO: 12648 - protein, 7 aa, synthetic construct
LSKMGTN

SEQ ID NO: 12649 - protein, 7 aa, synthetic construct
FDGKSPY

SEQ ID NO: 12650 - protein, 7 aa, synthetic construct
YSVKNTN

SEQ ID NO: 12651 - protein, 7 aa, synthetic construct
LSKQNLN

SEQ ID NO: 12652 - protein, 7 aa, synthetic construct
GANQSSW

SEQ ID NO: 12653 - protein, 7 aa, synthetic construct
LARDGPN

SEQ ID NO: 12654 - protein, 7 aa, synthetic construct
ITSDNGR

SEQ ID NO: 12655 - protein, 7 aa, synthetic construct
MHSSNGV

SEQ ID NO: 12656 - protein, 7 aa, synthetic construct
YAKQNLN

SEQ ID NO: 12657 - protein, 7 aa, synthetic construct
TRNGTPA

SEQ ID NO: 12658 - protein, 7 aa, synthetic construct
YSKGGIN

SEQ ID NO: 12659 - protein, 7 aa, synthetic construct
TNDAVKW

SEQ ID NO: 12660 - protein, 7 aa, synthetic construct
TKSGDLP

SEQ ID NO: 12661 - protein, 7 aa, synthetic construct
YSRNNQN

SEQ ID NO: 12662 - protein, 7 aa, synthetic construct
GQSTNGV

SEQ ID NO: 12663 - protein, 7 aa, synthetic construct
DSYSGQD

SEQ ID NO: 12664 - protein, 7 aa, synthetic construct
FSKANTN

SEQ ID NO: 12665 - protein, 7 aa, synthetic construct
TLSSNGV

SEQ ID NO: 12666 - protein, 7 aa, synthetic construct
YSREGFN

SEQ ID NO: 12667 - protein, 7 aa, synthetic construct
YLKSQTV

SEQ ID NO: 12668 - protein, 7 aa, synthetic construct
FDSSNGV

SEQ ID NO: 12669 - protein, 7 aa, synthetic construct
QESQNGR

SEQ ID NO: 12670 - protein, 7 aa, synthetic construct
MTSSNGV

SEQ ID NO: 12671 - protein, 7 aa, synthetic construct
RGNESGW

SEQ ID NO: 12672 - protein, 7 aa, synthetic construct
YAKEGYN

SEQ ID NO: 12673 - protein, 7 aa, synthetic construct
YAKSNQN

SEQ ID NO: 12674 - protein, 7 aa, synthetic construct
AMSTNGI

SEQ ID NO: 12675 - protein, 7 aa, synthetic construct
YARYGEN

SEQ ID NO: 12676 - protein, 7 aa, synthetic construct
VASSGAG

SEQ ID NO: 12677 - protein, 7 aa, synthetic construct
NISTNGI

SEQ ID NO: 12678 - protein, 7 aa, synthetic construct
FSRVNEN

SEQ ID NO: 12679 - protein, 7 aa, synthetic construct
LSKLGEN

SEQ ID NO: 12680 - protein, 7 aa, synthetic construct
DHKGQIA

SEQ ID NO: 12681 - protein, 7 aa, synthetic construct
YAKLNAN

SEQ ID NO: 12682 - protein, 7 aa, synthetic construct
YAKANQN

SEQ ID NO: 12683 - protein, 7 aa, synthetic construct
GESTNGV

SEQ ID NO: 12684 - protein, 7 aa, synthetic construct
YAKQNTN

SEQ ID NO: 12685 - protein, 7 aa, synthetic construct
YSKANGN

SEQ ID NO: 12686 - protein, 7 aa, synthetic construct
IDSSNGV

SEQ ID NO: 12687 - protein, 7 aa, synthetic construct
FFSTNGI

SEQ ID NO: 12688 - protein, 7 aa, synthetic construct
YSKINTN

SEQ ID NO: 12689 - protein, 7 aa, synthetic construct
DNSTNGR

SEQ ID NO: 12690 - protein, 7 aa, synthetic construct
VEYSFGD

SEQ ID NO: 12691 - protein, 7 aa, synthetic construct
FAKTGVN

SEQ ID NO: 12692 - protein, 7 aa, synthetic construct
TESSNGV

SEQ ID NO: 12693 - protein, 7 aa, synthetic construct
NYSTNGI

SEQ ID NO: 12694 - protein, 7 aa, synthetic construct
IMSSNGV

SEQ ID NO: 12695 - protein, 7 aa, synthetic construct
LARIGSN

SEQ ID NO: 12696 - protein, 7 aa, synthetic construct
NDSTNGI

SEQ ID NO: 12697 - protein, 7 aa, synthetic construct
FSKVGEN

SEQ ID NO: 12698 - protein, 7 aa, synthetic construct
LSKLGDN

SEQ ID NO: 12699 - protein, 7 aa, synthetic construct
VTDFNGK

SEQ ID NO: 12700 - protein, 7 aa, synthetic construct
YSKPNFN

SEQ ID NO: 12701 - protein, 7 aa, synthetic construct
QGSTNGV

SEQ ID NO: 12702 - protein, 7 aa, synthetic construct
FSKMGHN

SEQ ID NO: 12703 - protein, 7 aa, synthetic construct
DFRGNDA

SEQ ID NO: 12704 - protein, 7 aa, synthetic construct
FAKNGLN

SEQ ID NO: 12705 - protein, 7 aa, synthetic construct
YSKGNEN

SEQ ID NO: 12706 - protein, 7 aa, synthetic construct
YSKTNVN

SEQ ID NO: 12707 - protein, 7 aa, synthetic construct
VDSTNGR

SEQ ID NO: 12708 - protein, 7 aa, synthetic construct
RGGYETF

SEQ ID NO: 12709 - protein, 7 aa, synthetic construct
VPQRGDF

SEQ ID NO: 12710 - protein, 7 aa, synthetic construct
PWSTNGI

SEQ ID NO: 12711 - protein, 7 aa, synthetic construct
HANTSNW

SEQ ID NO: 12712 - protein, 7 aa, synthetic construct
AFSTNGI

SEQ ID NO: 12713 - protein, 7 aa, synthetic construct
MLSTNGI

SEQ ID NO: 12714 - protein, 7 aa, synthetic construct
EQSTNGI

SEQ ID NO: 12715 - protein, 7 aa, synthetic construct
SKSSNGV

SEQ ID NO: 12716 - protein, 7 aa, synthetic construct
YAKLNNN

SEQ ID NO: 12717 - protein, 7 aa, synthetic construct
YSKNNMN

SEQ ID NO: 12718 - protein, 7 aa, synthetic construct
YAHAGIG

SEQ ID NO: 12719 - protein, 7 aa, synthetic construct
GPQSSTW

SEQ ID NO: 12720 - protein, 7 aa, synthetic construct
NQDYVKY

SEQ ID NO: 12721 - protein, 7 aa, synthetic construct
YFDGKVS

SEQ ID NO: 12722 - protein, 7 aa, synthetic construct
FARFGPN

SEQ ID NO: 12723 - protein, 7 aa, synthetic construct
SNGNSSY

SEQ ID NO: 12724 - protein, 7 aa, synthetic construct
GNSTNGV

SEQ ID NO: 12725 - protein, 7 aa, synthetic construct
DNRGRAA

SEQ ID NO: 12726 - protein, 7 aa, synthetic construct
YSKSNSN

SEQ ID NO: 12727 - protein, 7 aa, synthetic construct
LARAGSN

SEQ ID NO: 12728 - protein, 7 aa, synthetic construct
YAKFGFN

SEQ ID NO: 12729 - protein, 7 aa, synthetic construct
YARPGMN

SEQ ID NO: 12730 - protein, 7 aa, synthetic construct
YAKAGGN

SEQ ID NO: 12731 - protein, 7 aa, synthetic construct
QNSSNGV

SEQ ID NO: 12732 - protein, 7 aa, synthetic construct
TDSSNGV

SEQ ID NO: 12733 - protein, 7 aa, synthetic construct
FSRSGQN

SEQ ID NO: 12734 - protein, 7 aa, synthetic construct
YAKGNEN

SEQ ID NO: 12735 - protein, 7 aa, synthetic construct
YSRDNFN

SEQ ID NO: 12736 - protein, 7 aa, synthetic construct
YSAANAN

SEQ ID NO: 12737 - protein, 7 aa, synthetic construct
IESTNGR

SEQ ID NO: 12738 - protein, 7 aa, synthetic construct
NDGGSAW

SEQ ID NO: 12739 - protein, 7 aa, synthetic construct
YSKYGEN

SEQ ID NO: 12740 - protein, 7 aa, synthetic construct
YAKQGEN

SEQ ID NO: 12741 - protein, 7 aa, synthetic construct
LSKNGVN

SEQ ID NO: 12742 - protein, 7 aa, synthetic construct
LAKAGTN

SEQ ID NO: 12743 - protein, 7 aa, synthetic construct
NASTNGI

SEQ ID NO: 12744 - protein, 7 aa, synthetic construct
YAKTNTN

SEQ ID NO: 12745 - protein, 7 aa, synthetic construct
LSKANQN

SEQ ID NO: 12746 - protein, 7 aa, synthetic construct
EVSTNGV

SEQ ID NO: 12747 - protein, 7 aa, synthetic construct
LAKVGPN

SEQ ID NO: 12748 - protein, 7 aa, synthetic construct
SRDTNGR

SEQ ID NO: 12749 - protein, 7 aa, synthetic construct
YSKGGVN

SEQ ID NO: 12750 - protein, 7 aa, synthetic construct
YAKLNVN

SEQ ID NO: 12751 - protein, 7 aa, synthetic construct
TYSGDSA

SEQ ID NO: 12752 - protein, 7 aa, synthetic construct
LSRYNDN

SEQ ID NO: 12753 - protein, 7 aa, synthetic construct
PNGRSAY

SEQ ID NO: 12754 - protein, 7 aa, synthetic construct
YSRENFN

SEQ ID NO: 12755 - protein, 7 aa, synthetic construct
GWRGEPS

SEQ ID NO: 12756 - protein, 7 aa, synthetic construct
YAKSNAN

SEQ ID NO: 12757 - protein, 7 aa, synthetic construct
LSRFNDN

SEQ ID NO: 12758 - protein, 7 aa, synthetic construct
RGDRTFP

SEQ ID NO: 12759 - protein, 7 aa, synthetic construct
AYSTNGI

SEQ ID NO: 12760 - protein, 7 aa, synthetic construct
SSGASTW

SEQ ID NO: 12761 - protein, 7 aa, synthetic construct
YAKQNAN

SEQ ID NO: 12762 - protein, 7 aa, synthetic construct
DGNGSHW

SEQ ID NO: 12763 - protein, 7 aa, synthetic construct
FSRNGMN

SEQ ID NO: 12764 - protein, 7 aa, synthetic construct
ADSTNGI

SEQ ID NO: 12765 - protein, 7 aa, synthetic construct
GTGANPW

SEQ ID NO: 12766 - protein, 7 aa, synthetic construct
TKNGNSA

SEQ ID NO: 12767 - protein, 7 aa, synthetic construct
FSKAGDN

SEQ ID NO: 12768 - protein, 7 aa, synthetic construct
GQKGIPY

SEQ ID NO: 12769 - protein, 7 aa, synthetic construct
ATSSNGV

SEQ ID NO: 12770 - protein, 7 aa, synthetic construct
RPDTVQW

SEQ ID NO: 12771 - protein, 7 aa, synthetic construct
PDSTNGV

SEQ ID NO: 12772 - protein, 7 aa, synthetic construct
LARIGEN

SEQ ID NO: 12773 - protein, 7 aa, synthetic construct
LDSSNGV

SEQ ID NO: 12774 - protein, 7 aa, synthetic construct
GSSTNGI

SEQ ID NO: 12775 - protein, 7 aa, synthetic construct
YAKGGAG

SEQ ID NO: 12776 - protein, 7 aa, synthetic construct
FSRSNDN

SEQ ID NO: 12777 - protein, 7 aa, synthetic construct
YAKAGEN

SEQ ID NO: 12778 - protein, 7 aa, synthetic construct
YARDGWN

SEQ ID NO: 12779 - protein, 7 aa, synthetic construct
YSKVGGD

SEQ ID NO: 12780 - protein, 7 aa, synthetic construct
NDRKTGE

SEQ ID NO: 12781 - protein, 7 aa, synthetic construct
APSTHTW

SEQ ID NO: 12782 - protein, 7 aa, synthetic construct
NVSTNGI

SEQ ID NO: 12783 - protein, 7 aa, synthetic construct
PTSSNGV

SEQ ID NO: 12784 - protein, 7 aa, synthetic construct
FVSSNGV

SEQ ID NO: 12785 - protein, 7 aa, synthetic construct
FSKMNDN

SEQ ID NO: 12786 - protein, 7 aa, synthetic construct
QSGSSPY

SEQ ID NO: 12787 - protein, 7 aa, synthetic construct
LAKGGEN

SEQ ID NO: 12788 - protein, 7 aa, synthetic construct
FARGGDN

SEQ ID NO: 12789 - protein, 7 aa, synthetic construct
LAREGPN

SEQ ID NO: 12790 - protein, 7 aa, synthetic construct
ASGNSMW

SEQ ID NO: 12791 - protein, 7 aa, synthetic construct
GHADQKW

SEQ ID NO: 12792 - protein, 7 aa, synthetic construct
IDSVNGR

SEQ ID NO: 12793 - protein, 7 aa, synthetic construct
LAKVGHN

SEQ ID NO: 12794 - protein, 7 aa, synthetic construct
FSRYNEN

SEQ ID NO: 12795 - protein, 7 aa, synthetic construct
YSRHGYN

SEQ ID NO: 12796 - protein, 7 aa, synthetic construct
FDSTNGR

SEQ ID NO: 12797 - protein, 7 aa, synthetic construct
GGSSTVW

SEQ ID NO: 12798 - protein, 7 aa, synthetic construct
YLSTNGI

SEQ ID NO: 12799 - protein, 7 aa, synthetic construct
FSRQNEN

SEQ ID NO: 12800 - protein, 7 aa, synthetic construct
YARPNFN

SEQ ID NO: 12801 - protein, 7 aa, synthetic construct
YSKINLN

SEQ ID NO: 12802 - protein, 7 aa, synthetic construct
YAKGGEN

SEQ ID NO: 12803 - protein, 7 aa, synthetic construct
LARAGEN

SEQ ID NO: 12804 - protein, 7 aa, synthetic construct
VTDGMRY

SEQ ID NO: 12805 - protein, 7 aa, synthetic construct
QSSSNGV

SEQ ID NO: 12806 - protein, 7 aa, synthetic construct
DGGSASW

SEQ ID NO: 12807 - protein, 7 aa, synthetic construct
LAKIGIN

SEQ ID NO: 12808 - protein, 7 aa, synthetic construct
QQSSNGV

SEQ ID NO: 12809 - protein, 7 aa, synthetic construct
GNGKSSY

SEQ ID NO: 12810 - protein, 7 aa, synthetic construct
LAKVGIN

SEQ ID NO: 12811 - protein, 7 aa, synthetic construct
GVPGTMF

SEQ ID NO: 12812 - protein, 7 aa, synthetic construct
LSRSSQD

SEQ ID NO: 12813 - protein, 7 aa, synthetic construct
YSKINEN

SEQ ID NO: 12814 - protein, 7 aa, synthetic construct
GYSTNGR

SEQ ID NO: 12815 - protein, 7 aa, synthetic construct
IRSGSAG

SEQ ID NO: 12816 - protein, 7 aa, synthetic construct
YARHGEN

SEQ ID NO: 12817 - protein, 7 aa, synthetic construct
LSRSNEN

SEQ ID NO: 12818 - protein, 7 aa, synthetic construct
TDAQSRY

SEQ ID NO: 12819 - protein, 7 aa, synthetic construct
YSKNNTN

SEQ ID NO: 12820 - protein, 7 aa, synthetic construct
KNGESNW

SEQ ID NO: 12821 - protein, 7 aa, synthetic construct
LARIGDN

SEQ ID NO: 12822 - protein, 7 aa, synthetic construct
GHSTNGV

SEQ ID NO: 12823 - protein, 7 aa, synthetic construct
YSKMNGN

SEQ ID NO: 12824 - protein, 7 aa, synthetic construct
FSKSGLN

SEQ ID NO: 12825 - protein, 7 aa, synthetic construct
RETNVGW

SEQ ID NO: 12826 - protein, 7 aa, synthetic construct
GASTNGR

SEQ ID NO: 12827 - protein, 7 aa, synthetic construct
YSKTGCN

SEQ ID NO: 12828 - protein, 7 aa, synthetic construct
FARGGEN

SEQ ID NO: 12829 - protein, 7 aa, synthetic construct
YAKLGIN

SEQ ID NO: 12830 - protein, 7 aa, synthetic construct
DSTGMKY

SEQ ID NO: 12831 - protein, 7 aa, synthetic construct
MNSSNGV

SEQ ID NO: 12832 - protein, 7 aa, synthetic construct
FSKTGMN

SEQ ID NO: 12833 - protein, 7 aa, synthetic construct
FARNGEN

SEQ ID NO: 12834 - protein, 7 aa, synthetic construct
TWTGVGP

SEQ ID NO: 12835 - protein, 7 aa, synthetic construct
SHGASTW

SEQ ID NO: 12836 - protein, 7 aa, synthetic construct
SISSNGV

SEQ ID NO: 12837 - protein, 7 aa, synthetic construct
KNDSILW

SEQ ID NO: 12838 - protein, 7 aa, synthetic construct
YAKEGWN

SEQ ID NO: 12839 - protein, 7 aa, synthetic construct
KSSTNGV

SEQ ID NO: 12840 - protein, 7 aa, synthetic construct
FAKTGQN

SEQ ID NO: 12841 - protein, 7 aa, synthetic construct
YSKEGPN

SEQ ID NO: 12842 - protein, 7 aa, synthetic construct
GWSTNGI

SEQ ID NO: 12843 - protein, 7 aa, synthetic construct
NPSSSAW

SEQ ID NO: 12844 - protein, 7 aa, synthetic construct
ALSTNGV

SEQ ID NO: 12845 - protein, 7 aa, synthetic construct
YFAGVPA

SEQ ID NO: 12846 - protein, 7 aa, synthetic construct
YHASTPN

SEQ ID NO: 12847 - protein, 7 aa, synthetic construct
YSKNNDN

SEQ ID NO: 12848 - protein, 7 aa, synthetic construct
FYSSNGV

SEQ ID NO: 12849 - protein, 7 aa, synthetic construct
YAKEGPN

SEQ ID NO: 12850 - protein, 7 aa, synthetic construct
YFSGSMT

SEQ ID NO: 12851 - protein, 7 aa, synthetic construct
TEGQSKW

SEQ ID NO: 12852 - protein, 7 aa, synthetic construct
LAKIGLN

SEQ ID NO: 12853 - protein, 7 aa, synthetic construct
LSKQNAN

SEQ ID NO: 12854 - protein, 7 aa, synthetic construct
FAKNGMN

SEQ ID NO: 12855 - protein, 7 aa, synthetic construct
ESSTNGV

SEQ ID NO: 12856 - protein, 7 aa, synthetic construct
SNATTGW

SEQ ID NO: 12857 - protein, 7 aa, synthetic construct
LRNGVNA

SEQ ID NO: 12858 - protein, 7 aa, synthetic construct
LSRTNEN

SEQ ID NO: 12859 - protein, 7 aa, synthetic construct
WMSSNGV

SEQ ID NO: 12860 - protein, 7 aa, synthetic construct
PHSSNGV

SEQ ID NO: 12861 - protein, 7 aa, synthetic construct
FSRDNYN

SEQ ID NO: 12862 - protein, 7 aa, synthetic construct
PYSTNGI

SEQ ID NO: 12863 - protein, 7 aa, synthetic construct
YAKGGGN

SEQ ID NO: 12864 - protein, 7 aa, synthetic construct
LALRGMD

SEQ ID NO: 12865 - protein, 7 aa, synthetic construct
LSKANNN

SEQ ID NO: 12866 - protein, 7 aa, synthetic construct
YSKINMN

SEQ ID NO: 12867 - protein, 7 aa, synthetic construct
MGSTNGI

SEQ ID NO: 12868 - protein, 7 aa, synthetic construct
QTSTNGR

SEQ ID NO: 12869 - protein, 7 aa, synthetic construct
YARPGFN

SEQ ID NO: 12870 - protein, 7 aa, synthetic construct
VPPYHHS

SEQ ID NO: 12871 - protein, 7 aa, synthetic construct
YAKLNTN

SEQ ID NO: 12872 - protein, 7 aa, synthetic construct
KDSHVAW

SEQ ID NO: 12873 - protein, 7 aa, synthetic construct
MYSTNGI

SEQ ID NO: 12874 - protein, 7 aa, synthetic construct
GGAGVGW

SEQ ID NO: 12875 - protein, 7 aa, synthetic construct
TGGTSAY

SEQ ID NO: 12876 - protein, 7 aa, synthetic construct
FSRSGDN

SEQ ID NO: 12877 - protein, 7 aa, synthetic construct
KRSGENA

SEQ ID NO: 12878 - protein, 7 aa, synthetic construct
LNGRGYD

SEQ ID NO: 12879 - protein, 7 aa, synthetic construct
AGSGNAW

SEQ ID NO: 12880 - protein, 7 aa, synthetic construct
PFSTNGI

SEQ ID NO: 12881 - protein, 7 aa, synthetic construct
LAKIGVN

SEQ ID NO: 12882 - protein, 7 aa, synthetic construct
LARHGEN

SEQ ID NO: 12883 - protein, 7 aa, synthetic construct
IGLSGFD

SEQ ID NO: 12884 - protein, 7 aa, synthetic construct
LSKANDN

SEQ ID NO: 12885 - protein, 7 aa, synthetic construct
LKLNPNS

SEQ ID NO: 12886 - protein, 7 aa, synthetic construct
LARVGEN

SEQ ID NO: 12887 - protein, 7 aa, synthetic construct
FARPGPN

SEQ ID NO: 12888 - protein, 7 aa, synthetic construct
YAKQGGN

SEQ ID NO: 12889 - protein, 7 aa, synthetic construct
YAKDGWN

SEQ ID NO: 12890 - protein, 7 aa, synthetic construct
YYSGHVT

SEQ ID NO: 12891 - protein, 7 aa, synthetic construct
MESNVRW

SEQ ID NO: 12892 - protein, 7 aa, synthetic construct
YAKVGQN

SEQ ID NO: 12893 - protein, 7 aa, synthetic construct
LAKHGMN

SEQ ID NO: 12894 - protein, 7 aa, synthetic construct
GTSTNGV

SEQ ID NO: 12895 - protein, 7 aa, synthetic construct
NNRGRDA

SEQ ID NO: 12896 - protein, 7 aa, synthetic construct
STSTDGR

SEQ ID NO: 12897 - protein, 7 aa, synthetic construct
YAKHGDN

SEQ ID NO: 12898 - protein, 7 aa, synthetic construct
MSSSNGV

SEQ ID NO: 12899 - protein, 7 aa, synthetic construct
EFSTNGR

SEQ ID NO: 12900 - protein, 7 aa, synthetic construct
SVSSNGV

SEQ ID NO: 12901 - protein, 7 aa, synthetic construct
LAKTGGN

SEQ ID NO: 12902 - protein, 7 aa, synthetic construct
PDSTNGI

SEQ ID NO: 12903 - protein, 7 aa, synthetic construct
FAKNGVN

SEQ ID NO: 12904 - protein, 7 aa, synthetic construct
LARPGVN

SEQ ID NO: 12905 - protein, 7 aa, synthetic construct
GSVQVKY

SEQ ID NO: 12906 - protein, 7 aa, synthetic construct
YSREGWN

SEQ ID NO: 12907 - protein, 7 aa, synthetic construct
GNTVVSW

SEQ ID NO: 12908 - protein, 7 aa, synthetic construct
EYSTNGR

SEQ ID NO: 12909 - protein, 7 aa, synthetic construct
LSRFNEN

SEQ ID NO: 12910 - protein, 7 aa, synthetic construct
YWNNNES

SEQ ID NO: 12911 - protein, 7 aa, synthetic construct
FSKSGMN

SEQ ID NO: 12912 - protein, 7 aa, synthetic construct
LAREGYN

SEQ ID NO: 12913 - protein, 7 aa, synthetic construct
LESTNGV

SEQ ID NO: 12914 - protein, 7 aa, synthetic construct
YSRPGIN

SEQ ID NO: 12915 - protein, 7 aa, synthetic construct
FSRINEN

SEQ ID NO: 12916 - protein, 7 aa, synthetic construct
NISTNGR

SEQ ID NO: 12917 - protein, 7 aa, synthetic construct
LVRSVNE

SEQ ID NO: 12918 - protein, 7 aa, synthetic construct
YSRFGSN

SEQ ID NO: 12919 - protein, 7 aa, synthetic construct
FSRLGYN

SEQ ID NO: 12920 - protein, 7 aa, synthetic construct
YSRYGMN

SEQ ID NO: 12921 - protein, 7 aa, synthetic construct
YSKYNEN

SEQ ID NO: 12922 - protein, 7 aa, synthetic construct
FFSGETL

SEQ ID NO: 12923 - protein, 7 aa, synthetic construct
FSKMGLN

SEQ ID NO: 12924 - protein, 7 aa, synthetic construct
DNHGNRY

SEQ ID NO: 12925 - protein, 7 aa, synthetic construct
YAKMGDN

SEQ ID NO: 12926 - protein, 7 aa, synthetic construct
VPNKGDF

SEQ ID NO: 12927 - protein, 7 aa, synthetic construct
STGSSNW

SEQ ID NO: 12928 - protein, 7 aa, synthetic construct
YSRGGEN

SEQ ID NO: 12929 - protein, 7 aa, synthetic construct
YSKNGEN

SEQ ID NO: 12930 - protein, 7 aa, synthetic construct
FSRQGDN

SEQ ID NO: 12931 - protein, 7 aa, synthetic construct
LVSSNGV

SEQ ID NO: 12932 - protein, 7 aa, synthetic construct
NSSGRSA

SEQ ID NO: 12933 - protein, 7 aa, synthetic construct
NPKGSGE

SEQ ID NO: 12934 - protein, 7 aa, synthetic construct
FAKGGVN

SEQ ID NO: 12935 - protein, 7 aa, synthetic construct
YAKLGEN

SEQ ID NO: 12936 - protein, 7 aa, synthetic construct
YSKHGEN

SEQ ID NO: 12937 - protein, 7 aa, synthetic construct
NEKRMYE

SEQ ID NO: 12938 - protein, 7 aa, synthetic construct
LAKEGRN

SEQ ID NO: 12939 - protein, 7 aa, synthetic construct
YEYGYGN

SEQ ID NO: 12940 - protein, 7 aa, synthetic construct
LARYGEN

SEQ ID NO: 12941 - protein, 7 aa, synthetic construct
FTRLDDR

SEQ ID NO: 12942 - protein, 7 aa, synthetic construct
YNRLGYD

SEQ ID NO: 12943 - protein, 7 aa, synthetic construct
TREGDVP

SEQ ID NO: 12944 - protein, 7 aa, synthetic construct
EASTNGV

SEQ ID NO: 12945 - protein, 7 aa, synthetic construct
HNAMSSY

SEQ ID NO: 12946 - protein, 7 aa, synthetic construct
LHKVLYD

SEQ ID NO: 12947 - protein, 7 aa, synthetic construct
FSKANNN

SEQ ID NO: 12948 - protein, 7 aa, synthetic construct
MSETSGW

SEQ ID NO: 12949 - protein, 7 aa, synthetic construct
TWNGQNA

SEQ ID NO: 12950 - protein, 7 aa, synthetic construct
LAKHGSN

SEQ ID NO: 12951 - protein, 7 aa, synthetic construct
PGSSNGV

SEQ ID NO: 12952 - protein, 7 aa, synthetic construct
FSKTGAN

SEQ ID NO: 12953 - protein, 7 aa, synthetic construct
NGMNGRD

SEQ ID NO: 12954 - protein, 7 aa, synthetic construct
DARTDRN

SEQ ID NO: 12955 - protein, 7 aa, synthetic construct
SSSSNGM

SEQ ID NO: 12956 - protein, 7 aa, synthetic construct
QHSSNGV

SEQ ID NO: 12957 - protein, 7 aa, synthetic construct
FSKIGDN

SEQ ID NO: 12958 - protein, 7 aa, synthetic construct
FSKSGVN

SEQ ID NO: 12959 - protein, 7 aa, synthetic construct
ETSTNGI

SEQ ID NO: 12960 - protein, 7 aa, synthetic construct
ESSSNGV

SEQ ID NO: 12961 - protein, 7 aa, synthetic construct
NKYGMDT

SEQ ID NO: 12962 - protein, 7 aa, synthetic construct
YAKIGDN

SEQ ID NO: 12963 - protein, 7 aa, synthetic construct
SNGRNPY

SEQ ID NO: 12964 - protein, 7 aa, synthetic construct
LAKGGDN

SEQ ID NO: 12965 - protein, 7 aa, synthetic construct
TPSTNGR

SEQ ID NO: 12966 - protein, 7 aa, synthetic construct
GEGIHKW

SEQ ID NO: 12967 - protein, 7 aa, synthetic construct
NHRLAEN

SEQ ID NO: 12968 - protein, 7 aa, synthetic construct
LSRGNDN

SEQ ID NO: 12969 - protein, 7 aa, synthetic construct
YVRTDTS

SEQ ID NO: 12970 - protein, 7 aa, synthetic construct
YAKSNSN

SEQ ID NO: 12971 - protein, 7 aa, synthetic construct
LARGSND

SEQ ID NO: 12972 - protein, 7 aa, synthetic construct
PFSSNGV

SEQ ID NO: 12973 - protein, 7 aa, synthetic construct
YSRDGPN

SEQ ID NO: 12974 - protein, 7 aa, synthetic construct
LAKGNPN

SEQ ID NO: 12975 - protein, 7 aa, synthetic construct
YAKVGVN

SEQ ID NO: 12976 - protein, 7 aa, synthetic construct
DSSTNGR

SEQ ID NO: 12977 - protein, 7 aa, synthetic construct
AKSSNGV

SEQ ID NO: 12978 - protein, 7 aa, synthetic construct
EKGYNVY

SEQ ID NO: 12979 - protein, 7 aa, synthetic construct
EAPDIRY

SEQ ID NO: 12980 - protein, 7 aa, synthetic construct
HSATSKY

SEQ ID NO: 12981 - protein, 7 aa, synthetic construct
LSRNGEN

SEQ ID NO: 12982 - protein, 7 aa, synthetic construct
FAKTGDN

SEQ ID NO: 12983 - protein, 7 aa, synthetic construct
GPTEVRY

SEQ ID NO: 12984 - protein, 7 aa, synthetic construct
LAKLGQN

SEQ ID NO: 12985 - protein, 7 aa, synthetic construct
TQSTHGN

SEQ ID NO: 12986 - protein, 7 aa, synthetic construct
NGSTNGV

SEQ ID NO: 12987 - protein, 7 aa, synthetic construct
LSRHGDN

SEQ ID NO: 12988 - protein, 7 aa, synthetic construct
EGSTNGV

SEQ ID NO: 12989 - protein, 7 aa, synthetic construct
EEARGRL

SEQ ID NO: 12990 - protein, 7 aa, synthetic construct
FSRHNDN

SEQ ID NO: 12991 - protein, 7 aa, synthetic construct
RQSSNGE

SEQ ID NO: 12992 - protein, 7 aa, synthetic construct
NARTGHD

SEQ ID NO: 12993 - protein, 7 aa, synthetic construct
YSREGHN

SEQ ID NO: 12994 - protein, 7 aa, synthetic construct
TSSTVGR

SEQ ID NO: 12995 - protein, 7 aa, synthetic construct
YAKENWN

SEQ ID NO: 12996 - protein, 7 aa, synthetic construct
STNGMSY

SEQ ID NO: 12997 - protein, 7 aa, synthetic construct
PNAGVSW

SEQ ID NO: 12998 - protein, 7 aa, synthetic construct
ENGKGMN

SEQ ID NO: 12999 - protein, 7 aa, synthetic construct
YAAASLY

SEQ ID NO: 13000 - protein, 7 aa, synthetic construct
GVSGSSW

SEQ ID NO: 13001 - protein, 7 aa, synthetic construct
LSKMGQN

SEQ ID NO: 13002 - protein, 7 aa, synthetic construct
KESTNGV

SEQ ID NO: 13003 - protein, 7 aa, synthetic construct
NMSTNGV

SEQ ID NO: 13004 - protein, 7 aa, synthetic construct
FSKSGAN

SEQ ID NO: 13005 - protein, 7 aa, synthetic construct
YSKNNQN

SEQ ID NO: 13006 - protein, 7 aa, synthetic construct
YSKNNEN

SEQ ID NO: 13007 - protein, 7 aa, synthetic construct
YAKLNMN

SEQ ID NO: 13008 - protein, 7 aa, synthetic construct
SGTTGWD

SEQ ID NO: 13009 - protein, 7 aa, synthetic construct
QYSTNGV

SEQ ID NO: 13010 - protein, 7 aa, synthetic construct
FSKANDN

SEQ ID NO: 13011 - protein, 7 aa, synthetic construct
YARHNPN

SEQ ID NO: 13012 - protein, 7 aa, synthetic construct
YSRRGDN

SEQ ID NO: 13013 - protein, 7 aa, synthetic construct
LSKMNSN

SEQ ID NO: 13014 - protein, 7 aa, synthetic construct
FSRTNDN

SEQ ID NO: 13015 - protein, 7 aa, synthetic construct
NHTGKMA

SEQ ID NO: 13016 - protein, 7 aa, synthetic construct
VPYKGDF

SEQ ID NO: 13017 - protein, 7 aa, synthetic construct
LFSSNGV

SEQ ID NO: 13018 - protein, 7 aa, synthetic construct
VNSNSSW

SEQ ID NO: 13019 - protein, 7 aa, synthetic construct
PVSTNGR

SEQ ID NO: 13020 - protein, 7 aa, synthetic construct
LHASTVN

SEQ ID NO: 13021 - protein, 7 aa, synthetic construct
LSRNGDN

SEQ ID NO: 13022 - protein, 7 aa, synthetic construct
FSRMGFN

SEQ ID NO: 13023 - protein, 7 aa, synthetic construct
TSPNLSW

SEQ ID NO: 13024 - protein, 7 aa, synthetic construct
DAYRGSD

SEQ ID NO: 13025 - protein, 7 aa, synthetic construct
SGQSTGW

SEQ ID NO: 13026 - protein, 7 aa, synthetic construct
LSKQGTN

SEQ ID NO: 13027 - protein, 7 aa, synthetic construct
YAKPGTN

SEQ ID NO: 13028 - protein, 7 aa, synthetic construct
SSSSATW

SEQ ID NO: 13029 - protein, 7 aa, synthetic construct
PASTNGI

SEQ ID NO: 13030 - protein, 7 aa, synthetic construct
QFSTNGV

SEQ ID NO: 13031 - protein, 7 aa, synthetic construct
LSKASGN

SEQ ID NO: 13032 - protein, 7 aa, synthetic construct
LDGNSMY

SEQ ID NO: 13033 - protein, 7 aa, synthetic construct
YAKMGEN

SEQ ID NO: 13034 - protein, 7 aa, synthetic construct
SMSSNGV

SEQ ID NO: 13035 - protein, 7 aa, synthetic construct
WSSAYPV

SEQ ID NO: 13036 - protein, 7 aa, synthetic construct
YSRHNSN

SEQ ID NO: 13037 - protein, 7 aa, synthetic construct
LAKIGAN

SEQ ID NO: 13038 - protein, 7 aa, synthetic construct
TGQTTSW

SEQ ID NO: 13039 - protein, 7 aa, synthetic construct
DHSTNGR

SEQ ID NO: 13040 - protein, 7 aa, synthetic construct
GDSTNGV

SEQ ID NO: 13041 - protein, 7 aa, synthetic construct
ERSSNGV

SEQ ID NO: 13042 - protein, 7 aa, synthetic construct
YSKTNLN

SEQ ID NO: 13043 - protein, 7 aa, synthetic construct
SNGASSY

SEQ ID NO: 13044 - protein, 7 aa, synthetic construct
YAKLNLN

SEQ ID NO: 13045 - protein, 7 aa, synthetic construct
LSKNGLN

SEQ ID NO: 13046 - protein, 7 aa, synthetic construct
EGGGGRY

SEQ ID NO: 13047 - protein, 7 aa, synthetic construct
WRSDGYA

SEQ ID NO: 13048 - protein, 7 aa, synthetic construct
YSKFNEN

SEQ ID NO: 13049 - protein, 7 aa, synthetic construct
SSTGMSF

SEQ ID NO: 13050 - protein, 7 aa, synthetic construct
MTDGTKY

SEQ ID NO: 13051 - protein, 7 aa, synthetic construct
VQDYDRN

SEQ ID NO: 13052 - protein, 7 aa, synthetic construct
NQDGYMV

SEQ ID NO: 13053 - protein, 7 aa, synthetic construct
NTATNGR

SEQ ID NO: 13054 - protein, 7 aa, synthetic construct
LSKSNLN

SEQ ID NO: 13055 - protein, 7 aa, synthetic construct
VPSTNGV

SEQ ID NO: 13056 - protein, 7 aa, synthetic construct
NFQGYGQ

SEQ ID NO: 13057 - protein, 7 aa, synthetic construct
NAYEARN

SEQ ID NO: 13058 - protein, 7 aa, synthetic construct
KESSNGV

SEQ ID NO: 13059 - protein, 7 aa, synthetic construct
DRGNSTY

SEQ ID NO: 13060 - protein, 7 aa, synthetic construct
YAKANEN

SEQ ID NO: 13061 - protein, 7 aa, synthetic construct
DLRGTGA

SEQ ID NO: 13062 - protein, 7 aa, synthetic construct
YARPNEN

SEQ ID NO: 13063 - protein, 7 aa, synthetic construct
YSKWGDN

SEQ ID NO: 13064 - protein, 7 aa, synthetic construct
YSRFNPN

SEQ ID NO: 13065 - protein, 7 aa, synthetic construct
LAKAGEN

SEQ ID NO: 13066 - protein, 7 aa, synthetic construct
HLSTNGR

SEQ ID NO: 13067 - protein, 7 aa, synthetic construct
NHSSNGV

SEQ ID NO: 13068 - protein, 7 aa, synthetic construct
GPPDFMR

SEQ ID NO: 13069 - protein, 7 aa, synthetic construct
TGSSHDW

SEQ ID NO: 13070 - protein, 7 aa, synthetic construct
EISTNGR

SEQ ID NO: 13071 - protein, 7 aa, synthetic construct
FSRSGEN

SEQ ID NO: 13072 - protein, 7 aa, synthetic construct
LSKQNTN

SEQ ID NO: 13073 - protein, 7 aa, synthetic construct
YSRDGHN

SEQ ID NO: 13074 - protein, 7 aa, synthetic construct
LSRGNEN

SEQ ID NO: 13075 - protein, 7 aa, synthetic construct
GSGEVRY

SEQ ID NO: 13076 - protein, 7 aa, synthetic construct
PYSSNGV

SEQ ID NO: 13077 - protein, 7 aa, synthetic construct
YSRPGVN

SEQ ID NO: 13078 - protein, 7 aa, synthetic construct
GLGSVTW

SEQ ID NO: 13079 - protein, 7 aa, synthetic construct
RQSDSFE

SEQ ID NO: 13080 - protein, 7 aa, synthetic construct
YFSGANV

SEQ ID NO: 13081 - protein, 7 aa, synthetic construct
DSEGTRN

SEQ ID NO: 13082 - protein, 7 aa, synthetic construct
SGSPNRY

SEQ ID NO: 13083 - protein, 7 aa, synthetic construct
RESVNGW

SEQ ID NO: 13084 - protein, 7 aa, synthetic construct
LAKLGTN

SEQ ID NO: 13085 - protein, 7 aa, synthetic construct
MMSSNGV

SEQ ID NO: 13086 - protein, 7 aa, synthetic construct
GGPQVLY

SEQ ID NO: 13087 - protein, 7 aa, synthetic construct
YFASQRE

SEQ ID NO: 13088 - protein, 7 aa, synthetic construct
GRGENHY

SEQ ID NO: 13089 - protein, 7 aa, synthetic construct
YSREGKN

SEQ ID NO: 13090 - protein, 7 aa, synthetic construct
EGLIGKD

SEQ ID NO: 13091 - protein, 7 aa, synthetic construct
LSKAGGN

SEQ ID NO: 13092 - protein, 7 aa, synthetic construct
PESTNGI

SEQ ID NO: 13093 - protein, 7 aa, synthetic construct
YSREGAN

SEQ ID NO: 13094 - protein, 7 aa, synthetic construct
GIGNSAW

SEQ ID NO: 13095 - protein, 7 aa, synthetic construct
YAKVGDN

SEQ ID NO: 13096 - protein, 7 aa, synthetic construct
PMSTNGI

SEQ ID NO: 13097 - protein, 7 aa, synthetic construct
GNEMESW

SEQ ID NO: 13098 - protein, 7 aa, synthetic construct
PESSNGV

SEQ ID NO: 13099 - protein, 7 aa, synthetic construct
RTSSTGV

SEQ ID NO: 13100 - protein, 7 aa, synthetic construct
IKYTSSD

SEQ ID NO: 13101 - protein, 7 aa, synthetic construct
TRSDPNS

SEQ ID NO: 13102 - protein, 7 aa, synthetic construct
SDGISPY

SEQ ID NO: 13103 - protein, 7 aa, synthetic construct
YSRTNGN

SEQ ID NO: 13104 - protein, 7 aa, synthetic construct
YSKTNMN

SEQ ID NO: 13105 - protein, 7 aa, synthetic construct
CSVPSLP

SEQ ID NO: 13106 - protein, 7 aa, synthetic construct
YAKSNEN

SEQ ID NO: 13107 - protein, 7 aa, synthetic construct
TGGHSTW

SEQ ID NO: 13108 - protein, 7 aa, synthetic construct
YGGHTMY

SEQ ID NO: 13109 - protein, 7 aa, synthetic construct
FSKMNEN

SEQ ID NO: 13110 - protein, 7 aa, synthetic construct
FSKLGDN

SEQ ID NO: 13111 - protein, 7 aa, synthetic construct
TPRGAAA

SEQ ID NO: 13112 - protein, 7 aa, synthetic construct
HHEHGPR

SEQ ID NO: 13113 - protein, 7 aa, synthetic construct
YSREGMN

SEQ ID NO: 13114 - protein, 7 aa, synthetic construct
DYRGTLP

SEQ ID NO: 13115 - protein, 7 aa, synthetic construct
YAKPGMN

SEQ ID NO: 13116 - protein, 7 aa, synthetic construct
IGGSSTY

SEQ ID NO: 13117 - protein, 7 aa, synthetic construct
DHANSRY

SEQ ID NO: 13118 - protein, 7 aa, synthetic construct
YARDGMN

SEQ ID NO: 13119 - protein, 7 aa, synthetic construct
YAREGHN

SEQ ID NO: 13120 - protein, 7 aa, synthetic construct
FNGRTSY

SEQ ID NO: 13121 - protein, 7 aa, synthetic construct
YNRLSDN

SEQ ID NO: 13122 - protein, 7 aa, synthetic construct
FAKGGTN

SEQ ID NO: 13123 - protein, 7 aa, synthetic construct
ASGTSPW

SEQ ID NO: 13124 - protein, 7 aa, synthetic construct
FSRSNEN

SEQ ID NO: 13125 - protein, 7 aa, synthetic construct
GRSGNAA

SEQ ID NO: 13126 - protein, 7 aa, synthetic construct
FSRHGFN

SEQ ID NO: 13127 - protein, 7 aa, synthetic construct
YNSTEGR

SEQ ID NO: 13128 - protein, 7 aa, synthetic construct
QQPSHLW

SEQ ID NO: 13129 - protein, 7 aa, synthetic construct
DGDRGGW

SEQ ID NO: 13130 - protein, 7 aa, synthetic construct
FAKSGDN

SEQ ID NO: 13131 - protein, 7 aa, synthetic construct
YAKEGCN

SEQ ID NO: 13132 - protein, 7 aa, synthetic construct
MRNDGYG

SEQ ID NO: 13133 - protein, 7 aa, synthetic construct
VNGGSKY

SEQ ID NO: 13134 - protein, 7 aa, synthetic construct
ITEGLKW

SEQ ID NO: 13135 - protein, 7 aa, synthetic construct
WLAGPSA

SEQ ID NO: 13136 - protein, 7 aa, synthetic construct
NGQGSTW

SEQ ID NO: 13137 - protein, 7 aa, synthetic construct
FARTNDN

SEQ ID NO: 13138 - protein, 7 aa, synthetic construct
RYHDSYA

SEQ ID NO: 13139 - protein, 7 aa, synthetic construct
RQSINGY

SEQ ID NO: 13140 - protein, 7 aa, synthetic construct
QAERGYD

SEQ ID NO: 13141 - protein, 7 aa, synthetic construct
FARFGAN

SEQ ID NO: 13142 - protein, 7 aa, synthetic construct
TRQGISA

SEQ ID NO: 13143 - protein, 7 aa, synthetic construct
YVRNDHS

SEQ ID NO: 13144 - protein, 7 aa, synthetic construct
DMNNNKW

SEQ ID NO: 13145 - protein, 7 aa, synthetic construct
FVRSDSN

SEQ ID NO: 13146 - protein, 7 aa, synthetic construct
YSRDGFN

SEQ ID NO: 13147 - protein, 7 aa, synthetic construct
YARDGHN

SEQ ID NO: 13148 - protein, 7 aa, synthetic construct
FSKAGEN

SEQ ID NO: 13149 - protein, 7 aa, synthetic construct
GNEGYWD

SEQ ID NO: 13150 - protein, 7 aa, synthetic construct
NSLGTGA

SEQ ID NO: 13151 - protein, 7 aa, synthetic construct
YAKHGEN

SEQ ID NO: 13152 - protein, 7 aa, synthetic construct
WGSSSSY

SEQ ID NO: 13153 - protein, 7 aa, synthetic construct
YSREGLN

SEQ ID NO: 13154 - protein, 7 aa, synthetic construct
YSRENWN

SEQ ID NO: 13155 - protein, 7 aa, synthetic construct
LTSTHGM

SEQ ID NO: 13156 - protein, 7 aa, synthetic construct
NTGTSSY

SEQ ID NO: 13157 - protein, 7 aa, synthetic construct
YAKDGFN

SEQ ID NO: 13158 - protein, 7 aa, synthetic construct
QPLGGYD

SEQ ID NO: 13159 - protein, 7 aa, synthetic construct
EYGGGKY

SEQ ID NO: 13160 - protein, 7 aa, synthetic construct
FSRQGEN

SEQ ID NO: 13161 - protein, 7 aa, synthetic construct
LWNATAP

SEQ ID NO: 13162 - protein, 7 aa, synthetic construct
YAKQNEN

SEQ ID NO: 13163 - protein, 7 aa, synthetic construct
NFSGQNA

SEQ ID NO: 13164 - protein, 7 aa, synthetic construct
NNGHMAY

SEQ ID NO: 13165 - protein, 7 aa, synthetic construct
FSKIGEN

SEQ ID NO: 13166 - protein, 7 aa, synthetic construct
FSKINPN

SEQ ID NO: 13167 - protein, 7 aa, synthetic construct
GGGTSPY

SEQ ID NO: 13168 - protein, 7 aa, synthetic construct
GNGGTHW

SEQ ID NO: 13169 - protein, 7 aa, synthetic construct
YSRDNWN

SEQ ID NO: 13170 - protein, 7 aa, synthetic construct
IGSANGV

SEQ ID NO: 13171 - protein, 7 aa, synthetic construct
WSRLENN

SEQ ID NO: 13172 - protein, 7 aa, synthetic construct
GSSNEKW

SEQ ID NO: 13173 - protein, 7 aa, synthetic construct
YSRENHN

SEQ ID NO: 13174 - protein, 7 aa, synthetic construct
YARPGQN

SEQ ID NO: 13175 - protein, 7 aa, synthetic construct
NEGRGYA

SEQ ID NO: 13176 - protein, 7 aa, synthetic construct
LSKSSLD

SEQ ID NO: 13177 - protein, 7 aa, synthetic construct
YSKEGWN

SEQ ID NO: 13178 - protein, 7 aa, synthetic construct
ESSGSSW

SEQ ID NO: 13179 - protein, 7 aa, synthetic construct
YARDGAN

SEQ ID NO: 13180 - protein, 7 aa, synthetic construct
FAKEGWN

SEQ ID NO: 13181 - protein, 7 aa, synthetic construct
YSRLGEN

SEQ ID NO: 13182 - protein, 7 aa, synthetic construct
FAREGFN

SEQ ID NO: 13183 - protein, 7 aa, synthetic construct
GIYDTMP

SEQ ID NO: 13184 - protein, 7 aa, synthetic construct
EALSDRG

SEQ ID NO: 13185 - protein, 7 aa, synthetic construct
YFELRSN

SEQ ID NO: 13186 - protein, 7 aa, synthetic construct
HGTGTHF

SEQ ID NO: 13187 - protein, 7 aa, synthetic construct
IQGTTYA

SEQ ID NO: 13188 - protein, 7 aa, synthetic construct
FSKHNDN

SEQ ID NO: 13189 - protein, 7 aa, synthetic construct
GSASTQW

SEQ ID NO: 13190 - protein, 7 aa, synthetic construct
YSKTNEN

SEQ ID NO: 13191 - protein, 7 aa, synthetic construct
MPSPNFG

SEQ ID NO: 13192 - protein, 7 aa, synthetic construct
YKTGTMY

SEQ ID NO: 13193 - protein, 7 aa, synthetic construct
FSKLGEN

SEQ ID NO: 13194 - protein, 7 aa, synthetic construct
VSGTHGV

SEQ ID NO: 13195 - protein, 7 aa, synthetic construct
YVHSNSN

SEQ ID NO: 13196 - protein, 7 aa, synthetic construct
YSRLDET

SEQ ID NO: 13197 - protein, 7 aa, synthetic construct
YAKLGTN

SEQ ID NO: 13198 - protein, 7 aa, synthetic construct
NMNGYGQ

SEQ ID NO: 13199 - protein, 7 aa, synthetic construct
YARMGTN

SEQ ID NO: 13200 - protein, 7 aa, synthetic construct
YARDGNN

SEQ ID NO: 13201 - protein, 7 aa, synthetic construct
GEERSKW

SEQ ID NO: 13202 - protein, 7 aa, synthetic construct
MANHVTY

SEQ ID NO: 13203 - protein, 7 aa, synthetic construct
YASGSNG

SEQ ID NO: 13204 - protein, 7 aa, synthetic construct
RDHTSTY

SEQ ID NO: 13205 - protein, 7 aa, synthetic construct
VGGNSTY

SEQ ID NO: 13206 - protein, 7 aa, synthetic construct
YAREGMN

SEQ ID NO: 13207 - protein, 7 aa, synthetic construct
NSGNSSY

SEQ ID NO: 13208 - protein, 7 aa, synthetic construct
VSNKSAG

SEQ ID NO: 13209 - protein, 7 aa, synthetic construct
INGVHMV

SEQ ID NO: 13210 - protein, 7 aa, synthetic construct
YHGGAPV

SEQ ID NO: 13211 - protein, 7 aa, synthetic construct
YHRSFDP

SEQ ID NO: 13212 - protein, 7 aa, synthetic construct
YYTGLQA

SEQ ID NO: 13213 - protein, 7 aa, synthetic construct
FDGTRPY

SEQ ID NO: 13214 - protein, 7 aa, synthetic construct
KSEYYSD

SEQ ID NO: 13215 - protein, 7 aa, synthetic construct
NVDYARN

SEQ ID NO: 13216 - protein, 7 aa, synthetic construct
NAIGVTW

SEQ ID NO: 13217 - protein, 7 aa, synthetic construct
INGHSNY

SEQ ID NO: 13218 - protein, 7 aa, synthetic construct
ITGYAQF

SEQ ID NO: 13219 - protein, 7 aa, synthetic construct
FSRYNDN

SEQ ID NO: 13220 - protein, 7 aa, synthetic construct
FAKFGTN

SEQ ID NO: 13221 - protein, 7 aa, synthetic construct
YSRFGPN

SEQ ID NO: 13222 - protein, 7 aa, synthetic construct
YSRYNPN

SEQ ID NO: 13223 - protein, 7 aa, synthetic construct
FARYGPN

SEQ ID NO: 13224 - protein, 7 aa, synthetic construct
YARFGMN

SEQ ID NO: 13225 - protein, 7 aa, synthetic construct
GSYNTTY

SEQ ID NO: 13226 - protein, 7 aa, synthetic construct
LAQSGPN

SEQ ID NO: 13227 - protein, 7 aa, synthetic construct
TSGNSTY

SEQ ID NO: 13228 - protein, 7 aa, synthetic construct
RENNGSW

SEQ ID NO: 13229 - protein, 7 aa, synthetic construct
MQYDSGD

SEQ ID NO: 13230 - protein, 7 aa, synthetic construct
YAKYGEN

SEQ ID NO: 13231 - protein, 7 aa, synthetic construct
IDGRNYA

SEQ ID NO: 13232 - protein, 7 aa, synthetic construct
LWNGEQA

SEQ ID NO: 13233 - protein, 7 aa, synthetic construct
QEGGSRY

SEQ ID NO: 13234 - protein, 7 aa, synthetic construct
YFTHTGE

SEQ ID NO: 13235 - protein, 7 aa, synthetic construct
FSRMGEN

SEQ ID NO: 13236 - protein, 7 aa, synthetic construct
HDNQSKY

SEQ ID NO: 13237 - protein, 7 aa, synthetic construct
YVSGTMN

SEQ ID NO: 13238 - protein, 7 aa, synthetic construct
WYAGTHE

SEQ ID NO: 13239 - protein, 7 aa, synthetic construct
AGSSVGW

SEQ ID NO: 13240 - protein, 7 aa, synthetic construct
LPRAGDF

SEQ ID NO: 13241 - protein, 7 aa, synthetic construct
EAQGMRN

SEQ ID NO: 13242 - protein, 7 aa, synthetic construct
EGSMTKW

SEQ ID NO: 13243 - protein, 7 aa, synthetic construct
YAKTNEN

SEQ ID NO: 13244 - protein, 7 aa, synthetic construct
YAREGLN

SEQ ID NO: 13245 - protein, 7 aa, synthetic construct
SQGNTNW

SEQ ID NO: 13246 - protein, 7 aa, synthetic construct
LDSSVRY

SEQ ID NO: 13247 - protein, 7 aa, synthetic construct
FARLGYN

SEQ ID NO: 13248 - protein, 7 aa, synthetic construct
NIKWDPH

SEQ ID NO: 13249 - protein, 7 aa, synthetic construct
EGNGTRN

SEQ ID NO: 13250 - protein, 7 aa, synthetic construct
NIPGLIY

SEQ ID NO: 13251 - protein, 7 aa, synthetic construct
YARMNEN

SEQ ID NO: 13252 - protein, 7 aa, synthetic construct
ADAYKTY

SEQ ID NO: 13253 - protein, 7 aa, synthetic construct
FSKNGWN

SEQ ID NO: 13254 - protein, 7 aa, synthetic construct
GISTNGR

SEQ ID NO: 13255 - protein, 7 aa, synthetic construct
YSRFGDN

SEQ ID NO: 13256 - protein, 7 aa, synthetic construct
YSRFGGN

SEQ ID NO: 13257 - protein, 7 aa, synthetic construct
FSKNNWN

SEQ ID NO: 13258 - protein, 7 aa, synthetic construct
YSKFGYN

SEQ ID NO: 13259 - protein, 7 aa, synthetic construct
YARWGEN

SEQ ID NO: 13260 - protein, 7 aa, synthetic construct
FARFGSN

SEQ ID NO: 13261 - protein, 7 aa, synthetic construct
QTGTSPY

SEQ ID NO: 13262 - protein, 7 aa, synthetic construct
NNIDVRW

SEQ ID NO: 13263 - protein, 7 aa, synthetic construct
YSRENIN

SEQ ID NO: 13264 - protein, 7 aa, synthetic construct
QNNGSPY

SEQ ID NO: 13265 - protein, 7 aa, synthetic construct
LNSLAAY

SEQ ID NO: 13266 - protein, 7 aa, synthetic construct
SNGGTTW

SEQ ID NO: 13267 - protein, 7 aa, synthetic construct
YSNIGPN

SEQ ID NO: 13268 - protein, 7 aa, synthetic construct
SGGTALY

SEQ ID NO: 13269 - protein, 7 aa, synthetic construct
RAGMPGA

SEQ ID NO: 13270 - protein, 7 aa, synthetic construct
YSKENWN

SEQ ID NO: 13271 - protein, 7 aa, synthetic construct
TRAGNGA

SEQ ID NO: 13272 - protein, 7 aa, synthetic construct
NQGNNTW

SEQ ID NO: 13273 - protein, 7 aa, synthetic construct
IEYHSGN

SEQ ID NO: 13274 - protein, 7 aa, synthetic construct
VSGSSAY

SEQ ID NO: 13275 - protein, 7 aa, synthetic construct
YARENYN

SEQ ID NO: 13276 - protein, 7 aa, synthetic construct
RQADTYP

SEQ ID NO: 13277 - protein, 7 aa, synthetic construct
DSSGQRY

SEQ ID NO: 13278 - protein, 7 aa, synthetic construct
GIQNQSW

SEQ ID NO: 13279 - protein, 7 aa, synthetic construct
VGGNSGY

SEQ ID NO: 13280 - protein, 7 aa, synthetic construct
VGNGSLY

SEQ ID NO: 13281 - protein, 7 aa, synthetic construct
GGGVAHY

SEQ ID NO: 13282 - protein, 7 aa, synthetic construct
TGSSTSW

SEQ ID NO: 13283 - protein, 7 aa, synthetic construct
YSRDNHN

SEQ ID NO: 13284 - protein, 7 aa, synthetic construct
VQYESRD

SEQ ID NO: 13285 - protein, 7 aa, synthetic construct
SGNGSFI

SEQ ID NO: 13286 - protein, 7 aa, synthetic construct
YTSNTKY

SEQ ID NO: 13287 - protein, 7 aa, synthetic construct
YSKGGDN

SEQ ID NO: 13288 - protein, 7 aa, synthetic construct
YHDNGRN

SEQ ID NO: 13289 - protein, 7 aa, synthetic construct
SAGNSTY

SEQ ID NO: 13290 - protein, 7 aa, synthetic construct
SGTGNGW

SEQ ID NO: 13291 - protein, 7 aa, synthetic construct
YSRPNEN

SEQ ID NO: 13292 - protein, 7 aa, synthetic construct
TNEWGGH

SEQ ID NO: 13293 - protein, 7 aa, synthetic construct
RPPEYNS

SEQ ID NO: 13294 - protein, 7 aa, synthetic construct
ITNYHHE

SEQ ID NO: 13295 - protein, 7 aa, synthetic construct
NGTSSGW

SEQ ID NO: 13296 - protein, 7 aa, synthetic construct
TMSNTYS

SEQ ID NO: 13297 - protein, 7 aa, synthetic construct
YSGSQHY

SEQ ID NO: 13298 - protein, 7 aa, synthetic construct
YSREGIN

SEQ ID NO: 13299 - protein, 7 aa, synthetic construct
RNETSAY

SEQ ID NO: 13300 - protein, 7 aa, synthetic construct
RDGYNGF

SEQ ID NO: 13301 - protein, 7 aa, synthetic construct
YAREGIN

SEQ ID NO: 13302 - protein, 7 aa, synthetic construct
GLGGNPY

SEQ ID NO: 13303 - protein, 7 aa, synthetic construct
VNINTAW

SEQ ID NO: 13304 - protein, 7 aa, synthetic construct
YWDSTHS

SEQ ID NO: 13305 - protein, 7 aa, synthetic construct
YSKDNMN

SEQ ID NO: 13306 - protein, 7 aa, synthetic construct
DKNTSNW

SEQ ID NO: 13307 - protein, 7 aa, synthetic construct
FSKHNEN

SEQ ID NO: 13308 - protein, 7 aa, synthetic construct
FSSTNGT

SEQ ID NO: 13309 - protein, 7 aa, synthetic construct
YAKVGEN

SEQ ID NO: 13310 - protein, 7 aa, synthetic construct
FSRLGAN

SEQ ID NO: 13311 - protein, 7 aa, synthetic construct
STGISSY

SEQ ID NO: 13312 - protein, 7 aa, synthetic construct
YSKENCN

SEQ ID NO: 13313 - protein, 7 aa, synthetic construct
NSGAASW

SEQ ID NO: 13314 - protein, 7 aa, synthetic construct
YARDGLN

SEQ ID NO: 13315 - protein, 7 aa, synthetic construct
LLSNQTW

SEQ ID NO: 13316 - protein, 7 aa, synthetic construct
YSRDGNN

SEQ ID NO: 13317 - protein, 7 aa, synthetic construct
YSKEGFN

SEQ ID NO: 13318 - protein, 7 aa, synthetic construct
YAKEGFN

SEQ ID NO: 13319 - protein, 7 aa, synthetic construct
YSRTNSD

SEQ ID NO: 13320 - protein, 7 aa, synthetic construct
VASDHGR

SEQ ID NO: 13321 - protein, 7 aa, synthetic construct
TNEGSAW

SEQ ID NO: 13322 - protein, 7 aa, synthetic construct
NDKGYGS

SEQ ID NO: 13323 - protein, 7 aa, synthetic construct
NNYGTPF

SEQ ID NO: 13324 - protein, 7 aa, synthetic construct
EISRGHM

SEQ ID NO: 13325 - protein, 7 aa, synthetic construct
EEFGQRN

SEQ ID NO: 13326 - protein, 7 aa, synthetic construct
TMTGFGA

SEQ ID NO: 13327 - protein, 7 aa, synthetic construct
NINGTGR

SEQ ID NO: 13328 - protein, 7 aa, synthetic construct
GAGSSSY

SEQ ID NO: 13329 - protein, 7 aa, synthetic construct
RNDEAKW

SEQ ID NO: 13330 - protein, 7 aa, synthetic construct
LHATQPN

SEQ ID NO: 13331 - protein, 7 aa, synthetic construct
WNTGVHY

SEQ ID NO: 13332 - protein, 7 aa, synthetic construct
SAGTSSY

SEQ ID NO: 13333 - protein, 7 aa, synthetic construct
TGEAPRN

SEQ ID NO: 13334 - protein, 7 aa, synthetic construct
DYQGTNP

SEQ ID NO: 13335 - protein, 7 aa, synthetic construct
GISMIMP

SEQ ID NO: 13336 - protein, 7 aa, synthetic construct
EKNTGWD

SEQ ID NO: 13337 - protein, 7 aa, synthetic construct
YSKFGNN

SEQ ID NO: 13338 - protein, 7 aa, synthetic construct
YSRENVN

SEQ ID NO: 13339 - protein, 7 aa, synthetic construct
SSEGTRY

SEQ ID NO: 13340 - protein, 7 aa, synthetic construct
TPKSNYA

SEQ ID NO: 13341 - protein, 7 aa, synthetic construct
DNRGTGS

SEQ ID NO: 13342 - protein, 7 aa, synthetic construct
LANSHWD

SEQ ID NO: 13343 - protein, 7 aa, synthetic construct
EGGKSPY

SEQ ID NO: 13344 - protein, 7 aa, synthetic construct
HGESAGW

SEQ ID NO: 13345 - protein, 7 aa, synthetic construct
ISQERYG

SEQ ID NO: 13346 - protein, 7 aa, synthetic construct
YSKDNYN

SEQ ID NO: 13347 - protein, 7 aa, synthetic construct
FSRDNPN

SEQ ID NO: 13348 - protein, 7 aa, synthetic construct
FARDNFN

SEQ ID NO: 13349 - protein, 7 aa, synthetic construct
FAKFGAN

SEQ ID NO: 13350 - protein, 7 aa, synthetic construct
NMYPTPG

SEQ ID NO: 13351 - protein, 7 aa, synthetic construct
YSRFGAN

SEQ ID NO: 13352 - protein, 7 aa, synthetic construct
FSRFGNN

SEQ ID NO: 13353 - protein, 7 aa, synthetic construct
YSKWGTN

SEQ ID NO: 13354 - protein, 7 aa, synthetic construct
YSRWGEN

SEQ ID NO: 13355 - protein, 7 aa, synthetic construct
FAKWGQN

SEQ ID NO: 13356 - protein, 7 aa, synthetic construct
NQSPIPV

SEQ ID NO: 13357 - protein, 7 aa, synthetic construct
GGNTSTY

SEQ ID NO: 13358 - protein, 7 aa, synthetic construct
RAVDAYS

SEQ ID NO: 13359 - protein, 7 aa, synthetic construct
TMGTNPY

SEQ ID NO: 13360 - protein, 7 aa, synthetic construct
DNRNVAW

SEQ ID NO: 13361 - protein, 7 aa, synthetic construct
KSVDYGS

SEQ ID NO: 13362 - protein, 7 aa, synthetic construct
GNSGANW

SEQ ID NO: 13363 - protein, 7 aa, synthetic construct
YEQGWRD

SEQ ID NO: 13364 - protein, 7 aa, synthetic construct
DNGNARY

SEQ ID NO: 13365 - protein, 7 aa, synthetic construct
YMGGEMV

SEQ ID NO: 13366 - protein, 7 aa, synthetic construct
DFGSNGR

SEQ ID NO: 13367 - protein, 7 aa, synthetic construct
GQDYSTY

SEQ ID NO: 13368 - protein, 7 aa, synthetic construct
NAYGVPR

SEQ ID NO: 13369 - protein, 7 aa, synthetic construct
SAESYRN

SEQ ID NO: 13370 - protein, 7 aa, synthetic construct
YTHFEFD

SEQ ID NO: 13371 - protein, 7 aa, synthetic construct
RSQDTAW

SEQ ID NO: 13372 - protein, 7 aa, synthetic construct
ISGATAG

SEQ ID NO: 13373 - protein, 7 aa, synthetic construct
YSRDGAN

SEQ ID NO: 13374 - protein, 7 aa, synthetic construct
YAKWGQN

SEQ ID NO: 13375 - protein, 7 aa, synthetic construct
GGGATAY

SEQ ID NO: 13376 - protein, 7 aa, synthetic construct
FSRENPN

SEQ ID NO: 13377 - protein, 7 aa, synthetic construct
LKYEHAD

SEQ ID NO: 13378 - protein, 7 aa, synthetic construct
NVSELRW

SEQ ID NO: 13379 - protein, 7 aa, synthetic construct
YQSGEMN

SEQ ID NO: 13380 - protein, 7 aa, synthetic construct
YSRENDN

SEQ ID NO: 13381 - protein, 7 aa, synthetic construct
TRTGDGA

SEQ ID NO: 13382 - protein, 7 aa, synthetic construct
WRQGEME

SEQ ID NO: 13383 - protein, 7 aa, synthetic construct
VGTIGRD

SEQ ID NO: 13384 - protein, 7 aa, synthetic construct
SSTGNGW

SEQ ID NO: 13385 - protein, 7 aa, synthetic construct
RGETSTY

SEQ ID NO: 13386 - protein, 7 aa, synthetic construct
YSKWGEN

SEQ ID NO: 13387 - protein, 7 aa, synthetic construct
HDAKSMY

SEQ ID NO: 13388 - protein, 7 aa, synthetic construct
DTDHMRF

SEQ ID NO: 13389 - protein, 7 aa, synthetic construct
RSDGGYG

SEQ ID NO: 13390 - protein, 7 aa, synthetic construct
FSRDGPN

SEQ ID NO: 13391 - protein, 7 aa, synthetic construct
TTGSNPF

SEQ ID NO: 13392 - protein, 7 aa, synthetic construct
FARAGEN

SEQ ID NO: 13393 - protein, 7 aa, synthetic construct
HSKNNDN

SEQ ID NO: 13394 - protein, 7 aa, synthetic construct
YIRHETQ

SEQ ID NO: 13395 - protein, 7 aa, synthetic construct
NGSQSSY

SEQ ID NO: 13396 - protein, 7 aa, synthetic construct
YSGGGMP

SEQ ID NO: 13397 - protein, 7 aa, synthetic construct
MGSSNAW

SEQ ID NO: 13398 - protein, 7 aa, synthetic construct
NLQASSW

SEQ ID NO: 13399 - protein, 7 aa, synthetic construct
FSRYNAN

SEQ ID NO: 13400 - protein, 7 aa, synthetic construct
KGADVYP

SEQ ID NO: 13401 - protein, 7 aa, synthetic construct
VDSTSGR

SEQ ID NO: 13402 - protein, 7 aa, synthetic construct
NMHGIPM

SEQ ID NO: 13403 - protein, 7 aa, synthetic construct
LATTTNW

SEQ ID NO: 13404 - protein, 7 aa, synthetic construct
YVMENRN

SEQ ID NO: 13405 - protein, 7 aa, synthetic construct
YSRDGWN

SEQ ID NO: 13406 - protein, 7 aa, synthetic construct
YSRDGDN

SEQ ID NO: 13407 - protein, 7 aa, synthetic construct
VHDSGGR

SEQ ID NO: 13408 - protein, 7 aa, synthetic construct
FARDGPN

SEQ ID NO: 13409 - protein, 7 aa, synthetic construct
FSRENIN

SEQ ID NO: 13410 - protein, 7 aa, synthetic construct
GLKNYPA

SEQ ID NO: 13411 - protein, 7 aa, synthetic construct
YSREGTN

SEQ ID NO: 13412 - protein, 7 aa, synthetic construct
VSPSSVW

SEQ ID NO: 13413 - protein, 7 aa, synthetic construct
GIPNIAY

SEQ ID NO: 13414 - protein, 7 aa, synthetic construct
EGHNGRD

SEQ ID NO: 13415 - protein, 7 aa, synthetic construct
DSTSVTW

SEQ ID NO: 13416 - protein, 7 aa, synthetic construct
GSGLVAY

SEQ ID NO: 13417 - protein, 7 aa, synthetic construct
MSGQGAG

SEQ ID NO: 13418 - protein, 7 aa, synthetic construct
MKNGDAS

SEQ ID NO: 13419 - protein, 7 aa, synthetic construct
RDDVSAY

SEQ ID NO: 13420 - protein, 7 aa, synthetic construct
HWASNGM

SEQ ID NO: 13421 - protein, 7 aa, synthetic construct
YAVSGAG

SEQ ID NO: 13422 - protein, 7 aa, synthetic construct
LDGFSAR

SEQ ID NO: 13423 - protein, 7 aa, synthetic construct
EQWGNGD

SEQ ID NO: 13424 - protein, 7 aa, synthetic construct
YAKFGHN

SEQ ID NO: 13425 - protein, 7 aa, synthetic construct
NVDGMAW

SEQ ID NO: 13426 - protein, 7 aa, synthetic construct
SNPGSVY

SEQ ID NO: 13427 - protein, 7 aa, synthetic construct
YSNLSMP

SEQ ID NO: 13428 - protein, 7 aa, synthetic construct
RQVDVYA

SEQ ID NO: 13429 - protein, 7 aa, synthetic construct
IDGTNGR

SEQ ID NO: 13430 - protein, 7 aa, synthetic construct
LHGGPAP

SEQ ID NO: 13431 - protein, 7 aa, synthetic construct
YAKDGMN

SEQ ID NO: 13432 - protein, 7 aa, synthetic construct
SSGESLY

SEQ ID NO: 13433 - protein, 7 aa, synthetic construct
RDPGYVV

SEQ ID NO: 13434 - protein, 7 aa, synthetic construct
QGGTTSY

SEQ ID NO: 13435 - protein, 7 aa, synthetic construct
FSREGWN

SEQ ID NO: 13436 - protein, 7 aa, synthetic construct
YARFGAN

SEQ ID NO: 13437 - protein, 7 aa, synthetic construct
TSASNGV

SEQ ID NO: 13438 - protein, 7 aa, synthetic construct
TNPNVAW

SEQ ID NO: 13439 - protein, 7 aa, synthetic construct
YARDNYN

SEQ ID NO: 13440 - protein, 7 aa, synthetic construct
FSRFGQN

SEQ ID NO: 13441 - protein, 7 aa, synthetic construct
GERLVTY

SEQ ID NO: 13442 - protein, 7 aa, synthetic construct
TPLSPSW

SEQ ID NO: 13443 - protein, 7 aa, synthetic construct
FSRYGEN

SEQ ID NO: 13444 - protein, 7 aa, synthetic construct
FARLGDN

SEQ ID NO: 13445 - protein, 7 aa, synthetic construct
YSRENEN

SEQ ID NO: 13446 - protein, 7 aa, synthetic construct
FARDNMN

SEQ ID NO: 13447 - protein, 7 aa, synthetic construct
VGEAGYF

SEQ ID NO: 13448 - protein, 7 aa, synthetic construct
YARFGQN

SEQ ID NO: 13449 - protein, 7 aa, synthetic construct
FSRFGEN

SEQ ID NO: 13450 - protein, 7 aa, synthetic construct
LKDGRSA

SEQ ID NO: 13451 - protein, 7 aa, synthetic construct
IATRGID

SEQ ID NO: 13452 - protein, 7 aa, synthetic construct
ADSASSW

SEQ ID NO: 13453 - protein, 7 aa, synthetic construct
NQPGSHM

SEQ ID NO: 13454 - protein, 7 aa, synthetic construct
FARPGHN

SEQ ID NO: 13455 - protein, 7 aa, synthetic construct
FSRYGDN

SEQ ID NO: 13456 - protein, 7 aa, synthetic construct
YARDGGN

SEQ ID NO: 13457 - protein, 7 aa, synthetic construct
SGSSTGY

SEQ ID NO: 13458 - protein, 7 aa, synthetic construct
GNGAGYS

SEQ ID NO: 13459 - protein, 7 aa, synthetic construct
NHSGDPS

SEQ ID NO: 13460 - protein, 7 aa, synthetic construct
EDGKGGW

SEQ ID NO: 13461 - protein, 7 aa, synthetic construct
YSKDNGN

SEQ ID NO: 13462 - protein, 7 aa, synthetic construct
YSRFGVN

SEQ ID NO: 13463 - protein, 7 aa, synthetic construct
NTYGTGE

SEQ ID NO: 13464 - protein, 7 aa, synthetic construct
FSPNVVF

SEQ ID NO: 13465 - protein, 7 aa, synthetic construct
YSKEGMN

SEQ ID NO: 13466 - protein, 7 aa, synthetic construct
NGEAGRY

SEQ ID NO: 13467 - protein, 7 aa, synthetic construct
LEGQYGN

SEQ ID NO: 13468 - protein, 7 aa, synthetic construct
FSKENGN

SEQ ID NO: 13469 - protein, 7 aa, synthetic construct
ALEGHSW

SEQ ID NO: 13470 - protein, 7 aa, synthetic construct
YAKENPN

SEQ ID NO: 13471 - protein, 7 aa, synthetic construct
YAKFGAN

SEQ ID NO: 13472 - protein, 7 aa, synthetic construct
FSKDNAN

SEQ ID NO: 13473 - protein, 7 aa, synthetic construct
ANHDVGW

SEQ ID NO: 13474 - protein, 7 aa, synthetic construct
EPPSLRY

SEQ ID NO: 13475 - protein, 7 aa, synthetic construct
GSNDSRY

SEQ ID NO: 13476 - protein, 7 aa, synthetic construct
FSKFGSN

SEQ ID NO: 13477 - protein, 7 aa, synthetic construct
GLKDSAW

SEQ ID NO: 13478 - protein, 7 aa, synthetic construct
SKEHGYA

SEQ ID NO: 13479 - protein, 7 aa, synthetic construct
YSRDNLN

SEQ ID NO: 13480 - protein, 7 aa, synthetic construct
FSKFGLN

SEQ ID NO: 13481 - protein, 7 aa, synthetic construct
IQYENGG

SEQ ID NO: 13482 - protein, 7 aa, synthetic construct
GYNYSGA

SEQ ID NO: 13483 - protein, 7 aa, synthetic construct
IMSADAW

SEQ ID NO: 13484 - protein, 7 aa, synthetic construct
YSRFGEN

SEQ ID NO: 13485 - protein, 7 aa, synthetic construct
DMKGNVA

SEQ ID NO: 13486 - protein, 7 aa, synthetic construct
FAKFGSN

SEQ ID NO: 13487 - protein, 7 aa, synthetic construct
TSDRDGR

SEQ ID NO: 13488 - protein, 7 aa, synthetic construct
NHAGNGA

SEQ ID NO: 13489 - protein, 7 aa, synthetic construct
NEASGGW

SEQ ID NO: 13490 - protein, 7 aa, synthetic construct
FSKFGQN

SEQ ID NO: 13491 - protein, 7 aa, synthetic construct
NMTGNGA

SEQ ID NO: 13492 - protein, 7 aa, synthetic construct
NGTGATY

SEQ ID NO: 13493 - protein, 7 aa, synthetic construct
YSKFGTN

SEQ ID NO: 13494 - protein, 7 aa, synthetic construct
ASIDGPK

SEQ ID NO: 13495 - protein, 7 aa, synthetic construct
SDRGSGA

SEQ ID NO: 13496 - protein, 7 aa, synthetic construct
YSKFGEN

SEQ ID NO: 13497 - protein, 7 aa, synthetic construct
FMSSNGA

SEQ ID NO: 13498 - protein, 7 aa, synthetic construct
FSKENYN

SEQ ID NO: 13499 - protein, 7 aa, synthetic construct
YTNYNGA

SEQ ID NO: 13500 - protein, 7 aa, synthetic construct
WRDSNGA

SEQ ID NO: 13501 - protein, 7 aa, synthetic construct
YAKWGTN

SEQ ID NO: 13502 - protein, 7 aa, synthetic construct
FAKWGEN

SEQ ID NO: 13503 - protein, 7 aa, synthetic construct
YFRDHAP

SEQ ID NO: 13504 - protein, 7 aa, synthetic construct
YARFGDN

SEQ ID NO: 13505 - protein, 7 aa, synthetic construct
TAYGDGA

SEQ ID NO: 13506 - protein, 7 aa, synthetic construct
YSRQNYN

SEQ ID NO: 13507 - protein, 7 aa, synthetic construct
YARMGYN

SEQ ID NO: 13508 - protein, 7 aa, synthetic construct
YARGNYN

SEQ ID NO: 13509 - protein, 7 aa, synthetic construct
YSRSNYN

SEQ ID NO: 13510 - protein, 7 aa, synthetic construct
YSRLNYN

SEQ ID NO: 13511 - protein, 7 aa, synthetic construct
FSRVNIN

SEQ ID NO: 13512 - protein, 7 aa, synthetic construct
YSRHGQN

SEQ ID NO: 13513 - protein, 7 aa, synthetic construct
YSRQGYN

SEQ ID NO: 13514 - protein, 7 aa, synthetic construct
FSRLGIN

SEQ ID NO: 13515 - protein, 7 aa, synthetic construct
YARMNIN

SEQ ID NO: 13516 - protein, 7 aa, synthetic construct
YSRANYN

SEQ ID NO: 13517 - protein, 7 aa, synthetic construct
YSRLNIN

SEQ ID NO: 13518 - protein, 7 aa, synthetic construct
FARGGYN

SEQ ID NO: 13519 - protein, 7 aa, synthetic construct
FSRANHN

SEQ ID NO: 13520 - protein, 7 aa, synthetic construct
FSRAGYN

SEQ ID NO: 13521 - protein, 7 aa, synthetic construct
FSKMNYN

SEQ ID NO: 13522 - protein, 7 aa, synthetic construct
FARLNIN

SEQ ID NO: 13523 - protein, 7 aa, synthetic construct
YSKQNIN

SEQ ID NO: 13524 - protein, 7 aa, synthetic construct
FARTNYN

SEQ ID NO: 13525 - protein, 7 aa, synthetic construct
YARIGYN

SEQ ID NO: 13526 - protein, 7 aa, synthetic construct
YSKLNNN

SEQ ID NO: 13527 - protein, 7 aa, synthetic construct
YAKFNYN

SEQ ID NO: 13528 - protein, 7 aa, synthetic construct
YARQNYN

SEQ ID NO: 13529 - protein, 7 aa, synthetic construct
FSRANYN

SEQ ID NO: 13530 - protein, 7 aa, synthetic construct
YAKAGYN

SEQ ID NO: 13531 - protein, 7 aa, synthetic construct
YSRTNIN

SEQ ID NO: 13532 - protein, 7 aa, synthetic construct
YSKMGYN

SEQ ID NO: 13533 - protein, 7 aa, synthetic construct
FSRINNN

SEQ ID NO: 13534 - protein, 7 aa, synthetic construct
FSRANIN

SEQ ID NO: 13535 - protein, 7 aa, synthetic construct
YSRLNNN

SEQ ID NO: 13536 - protein, 7 aa, synthetic construct
YARAGNN

SEQ ID NO: 13537 - protein, 7 aa, synthetic construct
YSKLNIN

SEQ ID NO: 13538 - protein, 7 aa, synthetic construct
FSRLNHN

SEQ ID NO: 13539 - protein, 7 aa, synthetic construct
YSRQNNN

SEQ ID NO: 13540 - protein, 7 aa, synthetic construct
FARIGPN

SEQ ID NO: 13541 - protein, 7 aa, synthetic construct
YSRGNYN

SEQ ID NO: 13542 - protein, 7 aa, synthetic construct
YARYGVN

SEQ ID NO: 13543 - protein, 7 aa, synthetic construct
YSRLNFN

SEQ ID NO: 13544 - protein, 7 aa, synthetic construct
YAKYGYN

SEQ ID NO: 13545 - protein, 7 aa, synthetic construct
YARMGFN

SEQ ID NO: 13546 - protein, 7 aa, synthetic construct
YSKANMN

SEQ ID NO: 13547 - protein, 7 aa, synthetic construct
FSKININ

SEQ ID NO: 13548 - protein, 7 aa, synthetic construct
YSRYNAN

SEQ ID NO: 13549 - protein, 7 aa, synthetic construct
YARAGYN

SEQ ID NO: 13550 - protein, 7 aa, synthetic construct
FSRAGNN

SEQ ID NO: 13551 - protein, 7 aa, synthetic construct
FSKIGYN

SEQ ID NO: 13552 - protein, 7 aa, synthetic construct
YSKHNYN

SEQ ID NO: 13553 - protein, 7 aa, synthetic construct
YARTGYN

SEQ ID NO: 13554 - protein, 7 aa, synthetic construct
YSRNGNN

SEQ ID NO: 13555 - protein, 7 aa, synthetic construct
YARGGYN

SEQ ID NO: 13556 - protein, 7 aa, synthetic construct
YSRAGYN

SEQ ID NO: 13557 - protein, 7 aa, synthetic construct
YAKTGYN

SEQ ID NO: 13558 - protein, 7 aa, synthetic construct
YSKGNCN

SEQ ID NO: 13559 - protein, 7 aa, synthetic construct
YAKMGYN

SEQ ID NO: 13560 - protein, 7 aa, synthetic construct
FARNGYN

SEQ ID NO: 13561 - protein, 7 aa, synthetic construct
FSRNNMN

SEQ ID NO: 13562 - protein, 7 aa, synthetic construct
YSRQNMN

SEQ ID NO: 13563 - protein, 7 aa, synthetic construct
YSRNNMN

SEQ ID NO: 13564 - protein, 7 aa, synthetic construct
YSKRNEN

SEQ ID NO: 13565 - protein, 7 aa, synthetic construct
YSKAGWN

SEQ ID NO: 13566 - protein, 7 aa, synthetic construct
YARHNFN

SEQ ID NO: 13567 - protein, 7 aa, synthetic construct
YARANYN

SEQ ID NO: 13568 - protein, 7 aa, synthetic construct
YARYGPN

SEQ ID NO: 13569 - protein, 7 aa, synthetic construct
FSRSGHN

SEQ ID NO: 13570 - protein, 7 aa, synthetic construct
YAKVGKN

SEQ ID NO: 13571 - protein, 7 aa, synthetic construct
YSRQNHN

SEQ ID NO: 13572 - protein, 7 aa, synthetic construct
FSRMNLN

SEQ ID NO: 13573 - protein, 7 aa, synthetic construct
FARSGYN

SEQ ID NO: 13574 - protein, 7 aa, synthetic construct
YAKHGHN

SEQ ID NO: 13575 - protein, 7 aa, synthetic construct
YARGGIN

SEQ ID NO: 13576 - protein, 7 aa, synthetic construct
FSKVGYN

SEQ ID NO: 13577 - protein, 7 aa, synthetic construct
YARQGYN

SEQ ID NO: 13578 - protein, 7 aa, synthetic construct
YAKYGPN

SEQ ID NO: 13579 - protein, 7 aa, synthetic construct
YSRHNPN

SEQ ID NO: 13580 - protein, 7 aa, synthetic construct
YSRVGIN

SEQ ID NO: 13581 - protein, 7 aa, synthetic construct
SGSYTNY

SEQ ID NO: 13582 - protein, 7 aa, synthetic construct
YARGNNN

SEQ ID NO: 13583 - protein, 7 aa, synthetic construct
YARVGNN

SEQ ID NO: 13584 - protein, 7 aa, synthetic construct
FSKSGYN

SEQ ID NO: 13585 - protein, 7 aa, synthetic construct
YAKVGYN

SEQ ID NO: 13586 - protein, 7 aa, synthetic construct
FSRLGHN

SEQ ID NO: 13587 - protein, 7 aa, synthetic construct
CAPAGRD

SEQ ID NO: 13588 - protein, 7 aa, synthetic construct
YSRSGFN

SEQ ID NO: 13589 - protein, 7 aa, synthetic construct
FSRVGPN

SEQ ID NO: 13590 - protein, 7 aa, synthetic construct
FSKFGPN

SEQ ID NO: 13591 - protein, 7 aa, synthetic construct
YSRHNFN

SEQ ID NO: 13592 - protein, 7 aa, synthetic construct
YARQGIN

SEQ ID NO: 13593 - protein, 7 aa, synthetic construct
YSKTGYN

SEQ ID NO: 13594 - protein, 7 aa, synthetic construct
YSRSGHN

SEQ ID NO: 13595 - protein, 7 aa, synthetic construct
FSRIGHN

SEQ ID NO: 13596 - protein, 7 aa, synthetic construct
YSRKNDN

SEQ ID NO: 13597 - protein, 7 aa, synthetic construct
YARNGYN

SEQ ID NO: 13598 - protein, 7 aa, synthetic construct
RGDGHYN

SEQ ID NO: 13599 - protein, 7 aa, synthetic construct
YSRTGYN

SEQ ID NO: 13600 - protein, 7 aa, synthetic construct
YSRHGIN

SEQ ID NO: 13601 - protein, 7 aa, synthetic construct
YSRANPN

SEQ ID NO: 13602 - protein, 7 aa, synthetic construct
YSRTNMN

SEQ ID NO: 13603 - protein, 7 aa, synthetic construct
YARSGIN

SEQ ID NO: 13604 - protein, 7 aa, synthetic construct
FSRLGNN

SEQ ID NO: 13605 - protein, 7 aa, synthetic construct
YHRLGID

SEQ ID NO: 13606 - protein, 7 aa, synthetic construct
YSRNGIN

SEQ ID NO: 13607 - protein, 7 aa, synthetic construct
YARLNNN

SEQ ID NO: 13608 - protein, 7 aa, synthetic construct
FSRANMN

SEQ ID NO: 13609 - protein, 7 aa, synthetic construct
YARGNMN

SEQ ID NO: 13610 - protein, 7 aa, synthetic construct
YARSNPN

SEQ ID NO: 13611 - protein, 7 aa, synthetic construct
YARYGNN

SEQ ID NO: 13612 - protein, 7 aa, synthetic construct
YSKHGYN

SEQ ID NO: 13613 - protein, 7 aa, synthetic construct
FARQGNN

SEQ ID NO: 13614 - protein, 7 aa, synthetic construct
LHKLLVG

SEQ ID NO: 13615 - protein, 7 aa, synthetic construct
FARTGIN

SEQ ID NO: 13616 - protein, 7 aa, synthetic construct
FARAGYN

SEQ ID NO: 13617 - protein, 7 aa, synthetic construct
FARQGPN

SEQ ID NO: 13618 - protein, 7 aa, synthetic construct
FARGGIN

SEQ ID NO: 13619 - protein, 7 aa, synthetic construct
FSRKNEN

SEQ ID NO: 13620 - protein, 7 aa, synthetic construct
YARLGNN

SEQ ID NO: 13621 - protein, 7 aa, synthetic construct
FARQGIN

SEQ ID NO: 13622 - protein, 7 aa, synthetic construct
YSKFNNN

SEQ ID NO: 13623 - protein, 7 aa, synthetic construct
FSRIGPN

SEQ ID NO: 13624 - protein, 7 aa, synthetic construct
YSRGGPN

SEQ ID NO: 13625 - protein, 7 aa, synthetic construct
YARFGPN

SEQ ID NO: 13626 - protein, 7 aa, synthetic construct
FSKMGYN

SEQ ID NO: 13627 - protein, 7 aa, synthetic construct
YSRSNHN

SEQ ID NO: 13628 - protein, 7 aa, synthetic construct
YARHNYN

SEQ ID NO: 13629 - protein, 7 aa, synthetic construct
YSKHGPN

SEQ ID NO: 13630 - protein, 7 aa, synthetic construct
FARVGYN

SEQ ID NO: 13631 - protein, 7 aa, synthetic construct
YARYGIN

SEQ ID NO: 13632 - protein, 7 aa, synthetic construct
YSRMGHN

SEQ ID NO: 13633 - protein, 7 aa, synthetic construct
YSRGNAN

SEQ ID NO: 13634 - protein, 7 aa, synthetic construct
FAKYGPN

SEQ ID NO: 13635 - protein, 7 aa, synthetic construct
YSRAGIN

SEQ ID NO: 13636 - protein, 7 aa, synthetic construct
YARTGIN

SEQ ID NO: 13637 - protein, 7 aa, synthetic construct
FSRTGYN

SEQ ID NO: 13638 - protein, 7 aa, synthetic construct
YSRAGFN

SEQ ID NO: 13639 - protein, 7 aa, synthetic construct
FSRANTN

SEQ ID NO: 13640 - protein, 7 aa, synthetic construct
YSRIGYN

SEQ ID NO: 13641 - protein, 7 aa, synthetic construct
YARMNNN

SEQ ID NO: 13642 - protein, 7 aa, synthetic construct
YSKRNDN

SEQ ID NO: 13643 - protein, 7 aa, synthetic construct
YAKVGWN

SEQ ID NO: 13644 - protein, 7 aa, synthetic construct
YARNANN

SEQ ID NO: 13645 - protein, 7 aa, synthetic construct
YARAGMN

SEQ ID NO: 13646 - protein, 7 aa, synthetic construct
YAKLNYN

SEQ ID NO: 13647 - protein, 7 aa, synthetic construct
YSRYGTN

SEQ ID NO: 13648 - protein, 7 aa, synthetic construct
FARGGHN

SEQ ID NO: 13649 - protein, 7 aa, synthetic construct
YSRVNYN

SEQ ID NO: 13650 - protein, 7 aa, synthetic construct
FSRHGSN

SEQ ID NO: 13651 - protein, 7 aa, synthetic construct
YIKSDKM

SEQ ID NO: 13652 - protein, 7 aa, synthetic construct
FARSGNN

SEQ ID NO: 13653 - protein, 7 aa, synthetic construct
FARSGIN

SEQ ID NO: 13654 - protein, 7 aa, synthetic construct
YSRTNFN

SEQ ID NO: 13655 - protein, 7 aa, synthetic construct
YARIGSN

SEQ ID NO: 13656 - protein, 7 aa, synthetic construct
FSKGNYN

SEQ ID NO: 13657 - protein, 7 aa, synthetic construct
YSKAGDN

SEQ ID NO: 13658 - protein, 7 aa, synthetic construct
TVDHVKW

SEQ ID NO: 13659 - protein, 7 aa, synthetic construct
YSRMGIN

SEQ ID NO: 13660 - protein, 7 aa, synthetic construct
YSKGGWN

SEQ ID NO: 13661 - protein, 7 aa, synthetic construct
YARGANN

SEQ ID NO: 13662 - protein, 7 aa, synthetic construct
YSRVNMN

SEQ ID NO: 13663 - protein, 7 aa, synthetic construct
FARQGHN

SEQ ID NO: 13664 - protein, 7 aa, synthetic construct
YSRIGIN

SEQ ID NO: 13665 - protein, 7 aa, synthetic construct
YSKHGIN

SEQ ID NO: 13666 - protein, 7 aa, synthetic construct
YARGNHN

SEQ ID NO: 13667 - protein, 7 aa, synthetic construct
YSRMNYN

SEQ ID NO: 13668 - protein, 7 aa, synthetic construct
YSRHNMN

SEQ ID NO: 13669 - protein, 7 aa, synthetic construct
YARHGIN

SEQ ID NO: 13670 - protein, 7 aa, synthetic construct
YSRMGSN

SEQ ID NO: 13671 - protein, 7 aa, synthetic construct
YSRINNN

SEQ ID NO: 13672 - protein, 7 aa, synthetic construct
FSKVGNN

SEQ ID NO: 13673 - protein, 7 aa, synthetic construct
YSKHGLN

SEQ ID NO: 13674 - protein, 7 aa, synthetic construct
YSRMGFN

SEQ ID NO: 13675 - protein, 7 aa, synthetic construct
YSRNNVN

SEQ ID NO: 13676 - protein, 7 aa, synthetic construct
YSRNNIN

SEQ ID NO: 13677 - protein, 7 aa, synthetic construct
YSRYGVN

SEQ ID NO: 13678 - protein, 7 aa, synthetic construct
FARHNIN

SEQ ID NO: 13679 - protein, 7 aa, synthetic construct
YSRHGSN

SEQ ID NO: 13680 - protein, 7 aa, synthetic construct
FSKHNNN

SEQ ID NO: 13681 - protein, 7 aa, synthetic construct
YARIGIN

SEQ ID NO: 13682 - protein, 7 aa, synthetic construct
YARHGHN

SEQ ID NO: 13683 - protein, 7 aa, synthetic construct
FSRQNNN

SEQ ID NO: 13684 - protein, 7 aa, synthetic construct
YSRHNVN

SEQ ID NO: 13685 - protein, 7 aa, synthetic construct
FARGNNN

SEQ ID NO: 13686 - protein, 7 aa, synthetic construct
FAKGGYN

SEQ ID NO: 13687 - protein, 7 aa, synthetic construct
FARQNIN

SEQ ID NO: 13688 - protein, 7 aa, synthetic construct
FSRLNVN

SEQ ID NO: 13689 - protein, 7 aa, synthetic construct
YSRTNPN

SEQ ID NO: 13690 - protein, 7 aa, synthetic construct
FSRAGIN

SEQ ID NO: 13691 - protein, 7 aa, synthetic construct
YSRINHN

SEQ ID NO: 13692 - protein, 7 aa, synthetic construct
YAASGRN

SEQ ID NO: 13693 - protein, 7 aa, synthetic construct
FSRQNYN

SEQ ID NO: 13694 - protein, 7 aa, synthetic construct
FSRMNVN

SEQ ID NO: 13695 - protein, 7 aa, synthetic construct
FARYGQN

SEQ ID NO: 13696 - protein, 7 aa, synthetic construct
FSRLNSN

SEQ ID NO: 13697 - protein, 7 aa, synthetic construct
YSKVNWN

SEQ ID NO: 13698 - protein, 7 aa, synthetic construct
YAKFGPN

SEQ ID NO: 13699 - protein, 7 aa, synthetic construct
YARGNLN

SEQ ID NO: 13700 - protein, 7 aa, synthetic construct
FSRTNNN

SEQ ID NO: 13701 - protein, 7 aa, synthetic construct
FSRSGYN

SEQ ID NO: 13702 - protein, 7 aa, synthetic construct
LHRAAGN

SEQ ID NO: 13703 - protein, 7 aa, synthetic construct
FARHGPN

SEQ ID NO: 13704 - protein, 7 aa, synthetic construct
YAKFNNN

SEQ ID NO: 13705 - protein, 7 aa, synthetic construct
NVAERKW

SEQ ID NO: 13706 - protein, 7 aa, synthetic construct
FARANNN

SEQ ID NO: 13707 - protein, 7 aa, synthetic construct
FSKIGNN

SEQ ID NO: 13708 - protein, 7 aa, synthetic construct
YARAGSN

SEQ ID NO: 13709 - protein, 7 aa, synthetic construct
YSRQGHN

SEQ ID NO: 13710 - protein, 7 aa, synthetic construct
FSRANSN

SEQ ID NO: 13711 - protein, 7 aa, synthetic construct
FARSANN

SEQ ID NO: 13712 - protein, 7 aa, synthetic construct
YSRQNLN

SEQ ID NO: 13713 - protein, 7 aa, synthetic construct
YAKGGIN

SEQ ID NO: 13714 - protein, 7 aa, synthetic construct
YARANHN

SEQ ID NO: 13715 - protein, 7 aa, synthetic construct
YSRLNHN

SEQ ID NO: 13716 - protein, 7 aa, synthetic construct
YSRANHN

SEQ ID NO: 13717 - protein, 7 aa, synthetic construct
YARHGSN

SEQ ID NO: 13718 - protein, 7 aa, synthetic construct
YARIGVN

SEQ ID NO: 13719 - protein, 7 aa, synthetic construct
YSRANFN

SEQ ID NO: 13720 - protein, 7 aa, synthetic construct
FSRLNMN

SEQ ID NO: 13721 - protein, 7 aa, synthetic construct
YSRSNTN

SEQ ID NO: 13722 - protein, 7 aa, synthetic construct
YARIGQN

SEQ ID NO: 13723 - protein, 7 aa, synthetic construct
YSRSGMN

SEQ ID NO: 13724 - protein, 7 aa, synthetic construct
YARHGYN

SEQ ID NO: 13725 - protein, 7 aa, synthetic construct
YAKHGIN

SEQ ID NO: 13726 - protein, 7 aa, synthetic construct
YARLGYN

SEQ ID NO: 13727 - protein, 7 aa, synthetic construct
FARHGFN

SEQ ID NO: 13728 - protein, 7 aa, synthetic construct
YSRSGQN

SEQ ID NO: 13729 - protein, 7 aa, synthetic construct
YSRNGHN

SEQ ID NO: 13730 - protein, 7 aa, synthetic construct
YSRMGVN

SEQ ID NO: 13731 - protein, 7 aa, synthetic construct
YAKSGWN

SEQ ID NO: 13732 - protein, 7 aa, synthetic construct
FSRVGTN

SEQ ID NO: 13733 - protein, 7 aa, synthetic construct
FARLGIN

SEQ ID NO: 13734 - protein, 7 aa, synthetic construct
FSKLGPN

SEQ ID NO: 13735 - protein, 7 aa, synthetic construct
FSRNNHN

SEQ ID NO: 13736 - protein, 7 aa, synthetic construct
YARNNYN

SEQ ID NO: 13737 - protein, 7 aa, synthetic construct
FSRIGIN

SEQ ID NO: 13738 - protein, 7 aa, synthetic construct
FSRLNQN

SEQ ID NO: 13739 - protein, 7 aa, synthetic construct
YSRIGMN

SEQ ID NO: 13740 - protein, 7 aa, synthetic construct
YSRNGFN

SEQ ID NO: 13741 - protein, 7 aa, synthetic construct
YARLNHN

SEQ ID NO: 13742 - protein, 7 aa, synthetic construct
YARQGSN

SEQ ID NO: 13743 - protein, 7 aa, synthetic construct
YSKWNTN

SEQ ID NO: 13744 - protein, 7 aa, synthetic construct
FARSNMN

SEQ ID NO: 13745 - protein, 7 aa, synthetic construct
YSRVGYN

SEQ ID NO: 13746 - protein, 7 aa, synthetic construct
YVRSQNL

SEQ ID NO: 13747 - protein, 7 aa, synthetic construct
FSRINMN

SEQ ID NO: 13748 - protein, 7 aa, synthetic construct
YSKMNPN

SEQ ID NO: 13749 - protein, 7 aa, synthetic construct
YSRGNMN

SEQ ID NO: 13750 - protein, 7 aa, synthetic construct
FSKYNIN

SEQ ID NO: 13751 - protein, 7 aa, synthetic construct
YSRVGNN

SEQ ID NO: 13752 - protein, 7 aa, synthetic construct
FAKSGPN

SEQ ID NO: 13753 - protein, 7 aa, synthetic construct
FARSGFN

SEQ ID NO: 13754 - protein, 7 aa, synthetic construct
YSRMNQN

SEQ ID NO: 13755 - protein, 7 aa, synthetic construct
YARMGNN

SEQ ID NO: 13756 - protein, 7 aa, synthetic construct
FSRGGIN

SEQ ID NO: 13757 - protein, 7 aa, synthetic construct
YSRSGNN

SEQ ID NO: 13758 - protein, 7 aa, synthetic construct
YSRSNAN

SEQ ID NO: 13759 - protein, 7 aa, synthetic construct
YSRGNPN

SEQ ID NO: 13760 - protein, 7 aa, synthetic construct
FSRAGLN

SEQ ID NO: 13761 - protein, 7 aa, synthetic construct
YARGGMN

SEQ ID NO: 13762 - protein, 7 aa, synthetic construct
FSKLNYN

SEQ ID NO: 13763 - protein, 7 aa, synthetic construct
FSRIGQN

SEQ ID NO: 13764 - protein, 7 aa, synthetic construct
YARSGLN

SEQ ID NO: 13765 - protein, 7 aa, synthetic construct
YARQNHN

SEQ ID NO: 13766 - protein, 7 aa, synthetic construct
YSRGNHN

SEQ ID NO: 13767 - protein, 7 aa, synthetic construct
FSRVGIN

SEQ ID NO: 13768 - protein, 7 aa, synthetic construct
YSRVNHN

SEQ ID NO: 13769 - protein, 7 aa, synthetic construct
FSRMGPN

SEQ ID NO: 13770 - protein, 7 aa, synthetic construct
YSKVGWN

SEQ ID NO: 13771 - protein, 7 aa, synthetic construct
YSRQGFN

SEQ ID NO: 13772 - protein, 7 aa, synthetic construct
YSRQGPN

SEQ ID NO: 13773 - protein, 7 aa, synthetic construct
FSRLGLN

SEQ ID NO: 13774 - protein, 7 aa, synthetic construct
FSRTGHN

SEQ ID NO: 13775 - protein, 7 aa, synthetic construct
YSKWNAN

SEQ ID NO: 13776 - protein, 7 aa, synthetic construct
FARTGLN

SEQ ID NO: 13777 - protein, 7 aa, synthetic construct
YAKIGPN

SEQ ID NO: 13778 - protein, 7 aa, synthetic construct
FSRIGLN

SEQ ID NO: 13779 - protein, 7 aa, synthetic construct
YAKIGFN

SEQ ID NO: 13780 - protein, 7 aa, synthetic construct
YSKIGDN

SEQ ID NO: 13781 - protein, 7 aa, synthetic construct
FARFNTN

SEQ ID NO: 13782 - protein, 7 aa, synthetic construct
YSRVNFN

SEQ ID NO: 13783 - protein, 7 aa, synthetic construct
YARTNTN

SEQ ID NO: 13784 - protein, 7 aa, synthetic construct
FARNGLN

SEQ ID NO: 13785 - protein, 7 aa, synthetic construct
YAKYGIN

SEQ ID NO: 13786 - protein, 7 aa, synthetic construct
YARHGMN

SEQ ID NO: 13787 - protein, 7 aa, synthetic construct
YARGNFN

SEQ ID NO: 13788 - protein, 7 aa, synthetic construct
FSKLNSN

SEQ ID NO: 13789 - protein, 7 aa, synthetic construct
YARVGHN

SEQ ID NO: 13790 - protein, 7 aa, synthetic construct
TNATSKW

SEQ ID NO: 13791 - protein, 7 aa, synthetic construct
YSRANVN

SEQ ID NO: 13792 - protein, 7 aa, synthetic construct
YSRAGGN

SEQ ID NO: 13793 - protein, 7 aa, synthetic construct
YSRKGEN

SEQ ID NO: 13794 - protein, 7 aa, synthetic construct
FARLGHN

SEQ ID NO: 13795 - protein, 7 aa, synthetic construct
RDDFTAY

SEQ ID NO: 13796 - protein, 7 aa, synthetic construct
FARSGPN

SEQ ID NO: 13797 - protein, 7 aa, synthetic construct
FSKLGNN

SEQ ID NO: 13798 - protein, 7 aa, synthetic construct
YARTNIN

SEQ ID NO: 13799 - protein, 7 aa, synthetic construct
FSRLGVN

SEQ ID NO: 13800 - protein, 7 aa, synthetic construct
YAKSGCN

SEQ ID NO: 13801 - protein, 7 aa, synthetic construct
YSRYNQN

SEQ ID NO: 13802 - protein, 7 aa, synthetic construct
YSRIGQN

SEQ ID NO: 13803 - protein, 7 aa, synthetic construct
YSRMNSN

SEQ ID NO: 13804 - protein, 7 aa, synthetic construct
YSRSGVN

SEQ ID NO: 13805 - protein, 7 aa, synthetic construct
YARAGVN

SEQ ID NO: 13806 - protein, 7 aa, synthetic construct
FSKVGPN

SEQ ID NO: 13807 - protein, 7 aa, synthetic construct
LSKLGHN

SEQ ID NO: 13808 - protein, 7 aa, synthetic construct
YARHGQN

SEQ ID NO: 13809 - protein, 7 aa, synthetic construct
YARTNLN

SEQ ID NO: 13810 - protein, 7 aa, synthetic construct
YSRHNTN

SEQ ID NO: 13811 - protein, 7 aa, synthetic construct
RSGNSSY

SEQ ID NO: 13812 - protein, 7 aa, synthetic construct
YARTNVN

SEQ ID NO: 13813 - protein, 7 aa, synthetic construct
FARSGLN

SEQ ID NO: 13814 - protein, 7 aa, synthetic construct
YSKANFN

SEQ ID NO: 13815 - protein, 7 aa, synthetic construct
YSKHNHN

SEQ ID NO: 13816 - protein, 7 aa, synthetic construct
YSRLNPN

SEQ ID NO: 13817 - protein, 7 aa, synthetic construct
YSRQNVN

SEQ ID NO: 13818 - protein, 7 aa, synthetic construct
YSRLNVN

SEQ ID NO: 13819 - protein, 7 aa, synthetic construct
FARAGAN

SEQ ID NO: 13820 - protein, 7 aa, synthetic construct
YSRTNHN

SEQ ID NO: 13821 - protein, 7 aa, synthetic construct
YARQNVN

SEQ ID NO: 13822 - protein, 7 aa, synthetic construct
YARQGHN

SEQ ID NO: 13823 - protein, 7 aa, synthetic construct
YAKYNHN

SEQ ID NO: 13824 - protein, 7 aa, synthetic construct
FSRVGSN

SEQ ID NO: 13825 - protein, 7 aa, synthetic construct
YSRQNQN

SEQ ID NO: 13826 - protein, 7 aa, synthetic construct
YARVGLN

SEQ ID NO: 13827 - protein, 7 aa, synthetic construct
FARTGVN

SEQ ID NO: 13828 - protein, 7 aa, synthetic construct
YARSGYN

SEQ ID NO: 13829 - protein, 7 aa, synthetic construct
YSKYGNN

SEQ ID NO: 13830 - protein, 7 aa, synthetic construct
YSRVGHN

SEQ ID NO: 13831 - protein, 7 aa, synthetic construct
FAKMGYN

SEQ ID NO: 13832 - protein, 7 aa, synthetic construct
YAKYGHN

SEQ ID NO: 13833 - protein, 7 aa, synthetic construct
YSKSGHN

SEQ ID NO: 13834 - protein, 7 aa, synthetic construct
YARIGMN

SEQ ID NO: 13835 - protein, 7 aa, synthetic construct
YSRINLN

SEQ ID NO: 13836 - protein, 7 aa, synthetic construct
YARMNFN

SEQ ID NO: 13837 - protein, 7 aa, synthetic construct
YSKVGFN

SEQ ID NO: 13838 - protein, 7 aa, synthetic construct
FSRMGNN

SEQ ID NO: 13839 - protein, 7 aa, synthetic construct
YSRNNHN

SEQ ID NO: 13840 - protein, 7 aa, synthetic construct
FSRGNIN

SEQ ID NO: 13841 - protein, 7 aa, synthetic construct
LHRMTPN

SEQ ID NO: 13842 - protein, 7 aa, synthetic construct
YSRSNQN

SEQ ID NO: 13843 - protein, 7 aa, synthetic construct
LSKLGFN

SEQ ID NO: 13844 - protein, 7 aa, synthetic construct
YSRLNTN

SEQ ID NO: 13845 - protein, 7 aa, synthetic construct
YARGNSN

SEQ ID NO: 13846 - protein, 7 aa, synthetic construct
YARANFN

SEQ ID NO: 13847 - protein, 7 aa, synthetic construct
YSRSNVN

SEQ ID NO: 13848 - protein, 7 aa, synthetic construct
YSRLNLN

SEQ ID NO: 13849 - protein, 7 aa, synthetic construct
YARMGHN

SEQ ID NO: 13850 - protein, 7 aa, synthetic construct
YSRANDN

SEQ ID NO: 13851 - protein, 7 aa, synthetic construct
YARTGFN

SEQ ID NO: 13852 - protein, 7 aa, synthetic construct
FARSGQN

SEQ ID NO: 13853 - protein, 7 aa, synthetic construct
FSRANVN

SEQ ID NO: 13854 - protein, 7 aa, synthetic construct
YSRMNVN

SEQ ID NO: 13855 - protein, 7 aa, synthetic construct
YAKAGQN

SEQ ID NO: 13856 - protein, 7 aa, synthetic construct
YSRTGHN

SEQ ID NO: 13857 - protein, 7 aa, synthetic construct
YARSGFN

SEQ ID NO: 13858 - protein, 7 aa, synthetic construct
YARTGSN

SEQ ID NO: 13859 - protein, 7 aa, synthetic construct
YAKQGWN

SEQ ID NO: 13860 - protein, 7 aa, synthetic construct
FARTGFN

SEQ ID NO: 13861 - protein, 7 aa, synthetic construct
FSKANFN

SEQ ID NO: 13862 - protein, 7 aa, synthetic construct
YSRLNGN

SEQ ID NO: 13863 - protein, 7 aa, synthetic construct
YSRLGKD

SEQ ID NO: 13864 - protein, 7 aa, synthetic construct
YARSGPN

SEQ ID NO: 13865 - protein, 7 aa, synthetic construct
YSRINQN

SEQ ID NO: 13866 - protein, 7 aa, synthetic construct
FAKQGYN

SEQ ID NO: 13867 - protein, 7 aa, synthetic construct
FSRTGTN

SEQ ID NO: 13868 - protein, 7 aa, synthetic construct
YAKIGHN

SEQ ID NO: 13869 - protein, 7 aa, synthetic construct
LSRMNYN

SEQ ID NO: 13870 - protein, 7 aa, synthetic construct
FSRMNTN

SEQ ID NO: 13871 - protein, 7 aa, synthetic construct
YSRGNQN

SEQ ID NO: 13872 - protein, 7 aa, synthetic construct
YSRMNPN

SEQ ID NO: 13873 - protein, 7 aa, synthetic construct
YARQNPN

SEQ ID NO: 13874 - protein, 7 aa, synthetic construct
YSRLGLN

SEQ ID NO: 13875 - protein, 7 aa, synthetic construct
YARAGLN

SEQ ID NO: 13876 - protein, 7 aa, synthetic construct
YARGNQN

SEQ ID NO: 13877 - protein, 7 aa, synthetic construct
YSKMGFN

SEQ ID NO: 13878 - protein, 7 aa, synthetic construct
YARVGYN

SEQ ID NO: 13879 - protein, 7 aa, synthetic construct
FSRAGQN

SEQ ID NO: 13880 - protein, 7 aa, synthetic construct
LAKLGHN

SEQ ID NO: 13881 - protein, 7 aa, synthetic construct
IRSMNGV

SEQ ID NO: 13882 - protein, 7 aa, synthetic construct
YAKAGPN

SEQ ID NO: 13883 - protein, 7 aa, synthetic construct
YSKGNWN

SEQ ID NO: 13884 - protein, 7 aa, synthetic construct
TNSTNGI

SEQ ID NO: 13885 - protein, 7 aa, synthetic construct
YSRVNTN

SEQ ID NO: 13886 - protein, 7 aa, synthetic construct
FHKLGSN

SEQ ID NO: 13887 - protein, 7 aa, synthetic construct
YSRTGQN

SEQ ID NO: 13888 - protein, 7 aa, synthetic construct
YSRSGSN

SEQ ID NO: 13889 - protein, 7 aa, synthetic construct
FSRANFN

SEQ ID NO: 13890 - protein, 7 aa, synthetic construct
YARMGSN

SEQ ID NO: 13891 - protein, 7 aa, synthetic construct
FARVGIN

SEQ ID NO: 13892 - protein, 7 aa, synthetic construct
YARTGMN

SEQ ID NO: 13893 - protein, 7 aa, synthetic construct
FARTGQN

SEQ ID NO: 13894 - protein, 7 aa, synthetic construct
FSRVGHN

SEQ ID NO: 13895 - protein, 7 aa, synthetic construct
YAKMNIN

SEQ ID NO: 13896 - protein, 7 aa, synthetic construct
YARMGAN

SEQ ID NO: 13897 - protein, 7 aa, synthetic construct
YARIGFN

SEQ ID NO: 13898 - protein, 7 aa, synthetic construct
YSRLNQN

SEQ ID NO: 13899 - protein, 7 aa, synthetic construct
YSKMNYN

SEQ ID NO: 13900 - protein, 7 aa, synthetic construct
YSRQGAN

SEQ ID NO: 13901 - protein, 7 aa, synthetic construct
YSRVGMN

SEQ ID NO: 13902 - protein, 7 aa, synthetic construct
FSRTGFN

SEQ ID NO: 13903 - protein, 7 aa, synthetic construct
YSRMNFN

SEQ ID NO: 13904 - protein, 7 aa, synthetic construct
YSKIGNN

SEQ ID NO: 13905 - protein, 7 aa, synthetic construct
YARVGMN

SEQ ID NO: 13906 - protein, 7 aa, synthetic construct
YARKGEN

SEQ ID NO: 13907 - protein, 7 aa, synthetic construct
FSRMNSN

SEQ ID NO: 13908 - protein, 7 aa, synthetic construct
YSKSGWN

SEQ ID NO: 13909 - protein, 7 aa, synthetic construct
YAKLGYN

SEQ ID NO: 13910 - protein, 7 aa, synthetic construct
FARMGLN

SEQ ID NO: 13911 - protein, 7 aa, synthetic construct
FSRLGSN

SEQ ID NO: 13912 - protein, 7 aa, synthetic construct
YSRVNAN

SEQ ID NO: 13913 - protein, 7 aa, synthetic construct
YSKAGFN

SEQ ID NO: 13914 - protein, 7 aa, synthetic construct
YARGGSN

SEQ ID NO: 13915 - protein, 7 aa, synthetic construct
YAKSNWN

SEQ ID NO: 13916 - protein, 7 aa, synthetic construct
YAKMGFN

SEQ ID NO: 13917 - protein, 7 aa, synthetic construct
FSRLGMN

SEQ ID NO: 13918 - protein, 7 aa, synthetic construct
YSRANMN

SEQ ID NO: 13919 - protein, 7 aa, synthetic construct
YAKQNYN

SEQ ID NO: 13920 - protein, 7 aa, synthetic construct
YSRQGQN

SEQ ID NO: 13921 - protein, 7 aa, synthetic construct
FARMGPN

SEQ ID NO: 13922 - protein, 7 aa, synthetic construct
YSRGNLN

SEQ ID NO: 13923 - protein, 7 aa, synthetic construct
YSRTGFN

SEQ ID NO: 13924 - protein, 7 aa, synthetic construct
FAKNGPN

SEQ ID NO: 13925 - protein, 7 aa, synthetic construct
FARHGYN

SEQ ID NO: 13926 - protein, 7 aa, synthetic construct
FARFNQN

SEQ ID NO: 13927 - protein, 7 aa, synthetic construct
FARSGAN

SEQ ID NO: 13928 - protein, 7 aa, synthetic construct
YARIGPN

SEQ ID NO: 13929 - protein, 7 aa, synthetic construct
LSRHNDN

SEQ ID NO: 13930 - protein, 7 aa, synthetic construct
YARTGLN

SEQ ID NO: 13931 - protein, 7 aa, synthetic construct
YSKHGHN

SEQ ID NO: 13932 - protein, 7 aa, synthetic construct
FSRQGYN

SEQ ID NO: 13933 - protein, 7 aa, synthetic construct
YARGGNN

SEQ ID NO: 13934 - protein, 7 aa, synthetic construct
FARTGPN

SEQ ID NO: 13935 - protein, 7 aa, synthetic construct
YSRVNSN

SEQ ID NO: 13936 - protein, 7 aa, synthetic construct
FSRLNGN

SEQ ID NO: 13937 - protein, 7 aa, synthetic construct
YSRMNIN

SEQ ID NO: 13938 - protein, 7 aa, synthetic construct
YSKMGPN

SEQ ID NO: 13939 - protein, 7 aa, synthetic construct
YSRIGTN

SEQ ID NO: 13940 - protein, 7 aa, synthetic construct
YARMGVN

SEQ ID NO: 13941 - protein, 7 aa, synthetic construct
VSGRSAY

SEQ ID NO: 13942 - protein, 7 aa, synthetic construct
YSRTNTN

SEQ ID NO: 13943 - protein, 7 aa, synthetic construct
YSRVGTN

SEQ ID NO: 13944 - protein, 7 aa, synthetic construct
YSRSGYN

SEQ ID NO: 13945 - protein, 7 aa, synthetic construct
YAKAGWN

SEQ ID NO: 13946 - protein, 7 aa, synthetic construct
YSRTGLN

SEQ ID NO: 13947 - protein, 7 aa, synthetic construct
FARTGAN

SEQ ID NO: 13948 - protein, 7 aa, synthetic construct
FSRLNAN

SEQ ID NO: 13949 - protein, 7 aa, synthetic construct
YSRIGVN

SEQ ID NO: 13950 - protein, 7 aa, synthetic construct
FSRIGVN

SEQ ID NO: 13951 - protein, 7 aa, synthetic construct
YAKGGCN

SEQ ID NO: 13952 - protein, 7 aa, synthetic construct
YAKSGMN

SEQ ID NO: 13953 - protein, 7 aa, synthetic construct
YARLNSN

SEQ ID NO: 13954 - protein, 7 aa, synthetic construct
YSRVNVN

SEQ ID NO: 13955 - protein, 7 aa, synthetic construct
YSRNNPN

SEQ ID NO: 13956 - protein, 7 aa, synthetic construct
YSRMNAN

SEQ ID NO: 13957 - protein, 7 aa, synthetic construct
YAKGGHN

SEQ ID NO: 13958 - protein, 7 aa, synthetic construct
FARGGSN

SEQ ID NO: 13959 - protein, 7 aa, synthetic construct
YSKHGFN

SEQ ID NO: 13960 - protein, 7 aa, synthetic construct
YARSGMN

SEQ ID NO: 13961 - protein, 7 aa, synthetic construct
FSRVGQN

SEQ ID NO: 13962 - protein, 7 aa, synthetic construct
FSRAGHN

SEQ ID NO: 13963 - protein, 7 aa, synthetic construct
YARMNYN

SEQ ID NO: 13964 - protein, 7 aa, synthetic construct
YSRSGAN

SEQ ID NO: 13965 - protein, 7 aa, synthetic construct
YARQGGN

SEQ ID NO: 13966 - protein, 7 aa, synthetic construct
FSRIGSN

SEQ ID NO: 13967 - protein, 7 aa, synthetic construct
YSRANTN

SEQ ID NO: 13968 - protein, 7 aa, synthetic construct
YARAGTN

SEQ ID NO: 13969 - protein, 7 aa, synthetic construct
YARMNHN

SEQ ID NO: 13970 - protein, 7 aa, synthetic construct
FSRLGQN

SEQ ID NO: 13971 - protein, 7 aa, synthetic construct
FSKIGHN

SEQ ID NO: 13972 - protein, 7 aa, synthetic construct
YSRIGHN

SEQ ID NO: 13973 - protein, 7 aa, synthetic construct
YARNGFN

SEQ ID NO: 13974 - protein, 7 aa, synthetic construct
YARLNTN

SEQ ID NO: 13975 - protein, 7 aa, synthetic construct
YARNGMN

SEQ ID NO: 13976 - protein, 7 aa, synthetic construct
YSRANIN

SEQ ID NO: 13977 - protein, 7 aa, synthetic construct
FARVGPN

SEQ ID NO: 13978 - protein, 7 aa, synthetic construct
LSKLNAN

SEQ ID NO: 13979 - protein, 7 aa, synthetic construct
LAKIGYN

SEQ ID NO: 13980 - protein, 7 aa, synthetic construct
YSRINAN

SEQ ID NO: 13981 - protein, 7 aa, synthetic construct
YSKIGLN

SEQ ID NO: 13982 - protein, 7 aa, synthetic construct
FSRLNPN

SEQ ID NO: 13983 - protein, 7 aa, synthetic construct
YAKTGHN

SEQ ID NO: 13984 - protein, 7 aa, synthetic construct
YSRMGMN

SEQ ID NO: 13985 - protein, 7 aa, synthetic construct
YSKQGYN

SEQ ID NO: 13986 - protein, 7 aa, synthetic construct
FAKAGPN

SEQ ID NO: 13987 - protein, 7 aa, synthetic construct
YSRANGN

SEQ ID NO: 13988 - protein, 7 aa, synthetic construct
FAKTGWN

SEQ ID NO: 13989 - protein, 7 aa, synthetic construct
YARVGAN

SEQ ID NO: 13990 - protein, 7 aa, synthetic construct
YARQGPN

SEQ ID NO: 13991 - protein, 7 aa, synthetic construct
YSKVGAN

SEQ ID NO: 13992 - protein, 7 aa, synthetic construct
YSRAGAN

SEQ ID NO: 13993 - protein, 7 aa, synthetic construct
FSRHGNN

SEQ ID NO: 13994 - protein, 7 aa, synthetic construct
FARYGSN

SEQ ID NO: 13995 - protein, 7 aa, synthetic construct
FSRLNDN

SEQ ID NO: 13996 - protein, 7 aa, synthetic construct
VFSSNGV

SEQ ID NO: 13997 - protein, 7 aa, synthetic construct
YSRANAN

SEQ ID NO: 13998 - protein, 7 aa, synthetic construct
YSKMNMN

SEQ ID NO: 13999 - protein, 7 aa, synthetic construct
YSKGNFN

SEQ ID NO: 14000 - protein, 7 aa, synthetic construct
FSRAGSN

SEQ ID NO: 14001 - protein, 7 aa, synthetic construct
YSRAGQN

SEQ ID NO: 14002 - protein, 7 aa, synthetic construct
YSRSATN

SEQ ID NO: 14003 - protein, 7 aa, synthetic construct
YARGGLN

SEQ ID NO: 14004 - protein, 7 aa, synthetic construct
YAKTGVN

SEQ ID NO: 14005 - protein, 7 aa, synthetic construct
YSKLGPN

SEQ ID NO: 14006 - protein, 7 aa, synthetic construct
YARQGVN

SEQ ID NO: 14007 - protein, 7 aa, synthetic construct
YSKVGCN

SEQ ID NO: 14008 - protein, 7 aa, synthetic construct
LSRSGTN

SEQ ID NO: 14009 - protein, 7 aa, synthetic construct
FARQGLN

SEQ ID NO: 14010 - protein, 7 aa, synthetic construct
YSRVGLN

SEQ ID NO: 14011 - protein, 7 aa, synthetic construct
YARMGMN

SEQ ID NO: 14012 - protein, 7 aa, synthetic construct
FARGGVN

SEQ ID NO: 14013 - protein, 7 aa, synthetic construct
YAKAGFN

SEQ ID NO: 14014 - protein, 7 aa, synthetic construct
FRSTNGI

SEQ ID NO: 14015 - protein, 7 aa, synthetic construct
FSRANNN

SEQ ID NO: 14016 - protein, 7 aa, synthetic construct
IRSTNGI

SEQ ID NO: 14017 - protein, 7 aa, synthetic construct
FSKMGNN

SEQ ID NO: 14018 - protein, 7 aa, synthetic construct
FSKLNVN

SEQ ID NO: 14019 - protein, 7 aa, synthetic construct
YSRSGGN

SEQ ID NO: 14020 - protein, 7 aa, synthetic construct
YARGNPN

SEQ ID NO: 14021 - protein, 7 aa, synthetic construct
FSRPNNN

SEQ ID NO: 14022 - protein, 7 aa, synthetic construct
FARTGSN

SEQ ID NO: 14023 - protein, 7 aa, synthetic construct
YARVGPN

SEQ ID NO: 14024 - protein, 7 aa, synthetic construct
YSRKNEN

SEQ ID NO: 14025 - protein, 7 aa, synthetic construct
YARGGAN

SEQ ID NO: 14026 - protein, 7 aa, synthetic construct
YSKMNFN

SEQ ID NO: 14027 - protein, 7 aa, synthetic construct
LSKQNFN

SEQ ID NO: 14028 - protein, 7 aa, synthetic construct
TKSTNGI

SEQ ID NO: 14029 - protein, 7 aa, synthetic construct
YSRHNIN

SEQ ID NO: 14030 - protein, 7 aa, synthetic construct
FARTGYN

SEQ ID NO: 14031 - protein, 7 aa, synthetic construct
FSRINVN

SEQ ID NO: 14032 - protein, 7 aa, synthetic construct
YARAGHN

SEQ ID NO: 14033 - protein, 7 aa, synthetic construct
YSRQGLN

SEQ ID NO: 14034 - protein, 7 aa, synthetic construct
YSRLGHN

SEQ ID NO: 14035 - protein, 7 aa, synthetic construct
FSKLNNN

SEQ ID NO: 14036 - protein, 7 aa, synthetic construct
YSKLNPN

SEQ ID NO: 14037 - protein, 7 aa, synthetic construct
YSRTNSN

SEQ ID NO: 14038 - protein, 7 aa, synthetic construct
YSRAGTN

SEQ ID NO: 14039 - protein, 7 aa, synthetic construct
ITGMSKY

SEQ ID NO: 14040 - protein, 7 aa, synthetic construct
YSKVGPN

SEQ ID NO: 14041 - protein, 7 aa, synthetic construct
YARGNVN

SEQ ID NO: 14042 - protein, 7 aa, synthetic construct
YARTGGN

SEQ ID NO: 14043 - protein, 7 aa, synthetic construct
YSRMNHN

SEQ ID NO: 14044 - protein, 7 aa, synthetic construct
FARNGIN

SEQ ID NO: 14045 - protein, 7 aa, synthetic construct
YSKQGCN

SEQ ID NO: 14046 - protein, 7 aa, synthetic construct
YSRLGMN

SEQ ID NO: 14047 - protein, 7 aa, synthetic construct
FSRAGMN

SEQ ID NO: 14048 - protein, 7 aa, synthetic construct
YARNGPN

SEQ ID NO: 14049 - protein, 7 aa, synthetic construct
FSRIGGN

SEQ ID NO: 14050 - protein, 7 aa, synthetic construct
YSKLNAN

SEQ ID NO: 14051 - protein, 7 aa, synthetic construct
FARGGFN

SEQ ID NO: 14052 - protein, 7 aa, synthetic construct
YSKHGAN

SEQ ID NO: 14053 - protein, 7 aa, synthetic construct
YARSGQN

SEQ ID NO: 14054 - protein, 7 aa, synthetic construct
LAKTGPN

SEQ ID NO: 14055 - protein, 7 aa, synthetic construct
YAKYGMN

SEQ ID NO: 14056 - protein, 7 aa, synthetic construct
YSRMNNN

SEQ ID NO: 14057 - protein, 7 aa, synthetic construct
LHKTTHN

SEQ ID NO: 14058 - protein, 7 aa, synthetic construct
FSRVGMN

SEQ ID NO: 14059 - protein, 7 aa, synthetic construct
YSRVGPN

SEQ ID NO: 14060 - protein, 7 aa, synthetic construct
LHAALPN

SEQ ID NO: 14061 - protein, 7 aa, synthetic construct
YSRAGHN

SEQ ID NO: 14062 - protein, 7 aa, synthetic construct
YARTNPN

SEQ ID NO: 14063 - protein, 7 aa, synthetic construct
FSKMNFN

SEQ ID NO: 14064 - protein, 7 aa, synthetic construct
FARNGHN

SEQ ID NO: 14065 - protein, 7 aa, synthetic construct
YSRINPN

SEQ ID NO: 14066 - protein, 7 aa, synthetic construct
FSKLNHN

SEQ ID NO: 14067 - protein, 7 aa, synthetic construct
YARTNQN

SEQ ID NO: 14068 - protein, 7 aa, synthetic construct
YARQNQN

SEQ ID NO: 14069 - protein, 7 aa, synthetic construct
YARIGHN

SEQ ID NO: 14070 - protein, 7 aa, synthetic construct
YSRPNYN

SEQ ID NO: 14071 - protein, 7 aa, synthetic construct
YSKWNNN

SEQ ID NO: 14072 - protein, 7 aa, synthetic construct
FARGGAN

SEQ ID NO: 14073 - protein, 7 aa, synthetic construct
FSRTGLN

SEQ ID NO: 14074 - protein, 7 aa, synthetic construct
YSRIGGN

SEQ ID NO: 14075 - protein, 7 aa, synthetic construct
YSKIGIN

SEQ ID NO: 14076 - protein, 7 aa, synthetic construct
YARPGAN

SEQ ID NO: 14077 - protein, 7 aa, synthetic construct
FARTGMN

SEQ ID NO: 14078 - protein, 7 aa, synthetic construct
YSRSNMN

SEQ ID NO: 14079 - protein, 7 aa, synthetic construct
YSKLNQN

SEQ ID NO: 14080 - protein, 7 aa, synthetic construct
YAKGNWN

SEQ ID NO: 14081 - protein, 7 aa, synthetic construct
LSKIGHN

SEQ ID NO: 14082 - protein, 7 aa, synthetic construct
YSKANYN

SEQ ID NO: 14083 - protein, 7 aa, synthetic construct
YSRVGVN

SEQ ID NO: 14084 - protein, 7 aa, synthetic construct
FARGGPN

SEQ ID NO: 14085 - protein, 7 aa, synthetic construct
YSKVGHN

SEQ ID NO: 14086 - protein, 7 aa, synthetic construct
YAKQGSN

SEQ ID NO: 14087 - protein, 7 aa, synthetic construct
YARSGTN

SEQ ID NO: 14088 - protein, 7 aa, synthetic construct
FSRQGPN

SEQ ID NO: 14089 - protein, 7 aa, synthetic construct
YARNGHN

SEQ ID NO: 14090 - protein, 7 aa, synthetic construct
YARQGTN

SEQ ID NO: 14091 - protein, 7 aa, synthetic construct
YSRGGMN

SEQ ID NO: 14092 - protein, 7 aa, synthetic construct
FSRVGAN

SEQ ID NO: 14093 - protein, 7 aa, synthetic construct
YSKMGVN

SEQ ID NO: 14094 - protein, 7 aa, synthetic construct
YSKVGSN

SEQ ID NO: 14095 - protein, 7 aa, synthetic construct
YARANPN

SEQ ID NO: 14096 - protein, 7 aa, synthetic construct
FARGNIN

SEQ ID NO: 14097 - protein, 7 aa, synthetic construct
YSKLNHN

SEQ ID NO: 14098 - protein, 7 aa, synthetic construct
YSRVGFN

SEQ ID NO: 14099 - protein, 7 aa, synthetic construct
YSRMNMN

SEQ ID NO: 14100 - protein, 7 aa, synthetic construct
YARHNSN

SEQ ID NO: 14101 - protein, 7 aa, synthetic construct
YARGGTN

SEQ ID NO: 14102 - protein, 7 aa, synthetic construct
LSRQGPN

SEQ ID NO: 14103 - protein, 7 aa, synthetic construct
YSRAGLN

SEQ ID NO: 14104 - protein, 7 aa, synthetic construct
YSKTGFN

SEQ ID NO: 14105 - protein, 7 aa, synthetic construct
YARSGGN

SEQ ID NO: 14106 - protein, 7 aa, synthetic construct
YSRGNIN

SEQ ID NO: 14107 - protein, 7 aa, synthetic construct
YARGGFN

SEQ ID NO: 14108 - protein, 7 aa, synthetic construct
LRSTNGV

SEQ ID NO: 14109 - protein, 7 aa, synthetic construct
YARSGVN

SEQ ID NO: 14110 - protein, 7 aa, synthetic construct
YSRFNMN

SEQ ID NO: 14111 - protein, 7 aa, synthetic construct
YVKSNNN

SEQ ID NO: 14112 - protein, 7 aa, synthetic construct
YAKLGHN

SEQ ID NO: 14113 - protein, 7 aa, synthetic construct
YARHGLN

SEQ ID NO: 14114 - protein, 7 aa, synthetic construct
YARIGGN

SEQ ID NO: 14115 - protein, 7 aa, synthetic construct
YSRVGSN

SEQ ID NO: 14116 - protein, 7 aa, synthetic construct
YSRQGVN

SEQ ID NO: 14117 - protein, 7 aa, synthetic construct
FAKYNPN

SEQ ID NO: 14118 - protein, 7 aa, synthetic construct
YSKWNQN

SEQ ID NO: 14119 - protein, 7 aa, synthetic construct
FSRMGAN

SEQ ID NO: 14120 - protein, 7 aa, synthetic construct
FSRSGLN

SEQ ID NO: 14121 - protein, 7 aa, synthetic construct
YSKSGFN

SEQ ID NO: 14122 - protein, 7 aa, synthetic construct
YARTGVN

SEQ ID NO: 14123 - protein, 7 aa, synthetic construct
YSKNGCN

SEQ ID NO: 14124 - protein, 7 aa, synthetic construct
YAKVGHN

SEQ ID NO: 14125 - protein, 7 aa, synthetic construct
IFSTNGI

SEQ ID NO: 14126 - protein, 7 aa, synthetic construct
YSRIGFN

SEQ ID NO: 14127 - protein, 7 aa, synthetic construct
YSKYGLN

SEQ ID NO: 14128 - protein, 7 aa, synthetic construct
YAKTNWN

SEQ ID NO: 14129 - protein, 7 aa, synthetic construct
HSRTGSN

SEQ ID NO: 14130 - protein, 7 aa, synthetic construct
YSRMNLN

SEQ ID NO: 14131 - protein, 7 aa, synthetic construct
FARGGTN

SEQ ID NO: 14132 - protein, 7 aa, synthetic construct
YSRINVN

SEQ ID NO: 14133 - protein, 7 aa, synthetic construct
YTRLNQN

SEQ ID NO: 14134 - protein, 7 aa, synthetic construct
PRSTNGI

SEQ ID NO: 14135 - protein, 7 aa, synthetic construct
FARIGNN

SEQ ID NO: 14136 - protein, 7 aa, synthetic construct
YSRLGAN

SEQ ID NO: 14137 - protein, 7 aa, synthetic construct
YSRAGVN

SEQ ID NO: 14138 - protein, 7 aa, synthetic construct
LSKLGVN

SEQ ID NO: 14139 - protein, 7 aa, synthetic construct
YAKQGYN

SEQ ID NO: 14140 - protein, 7 aa, synthetic construct
YARSGSN

SEQ ID NO: 14141 - protein, 7 aa, synthetic construct
YSRTNVN

SEQ ID NO: 14142 - protein, 7 aa, synthetic construct
YSRANSN

SEQ ID NO: 14143 - protein, 7 aa, synthetic construct
YSRGGFN

SEQ ID NO: 14144 - protein, 7 aa, synthetic construct
YSRGGYN

SEQ ID NO: 14145 - protein, 7 aa, synthetic construct
YARTGTN

SEQ ID NO: 14146 - protein, 7 aa, synthetic construct
YARLGHN

SEQ ID NO: 14147 - protein, 7 aa, synthetic construct
YARTNAN

SEQ ID NO: 14148 - protein, 7 aa, synthetic construct
YSRTNNN

SEQ ID NO: 14149 - protein, 7 aa, synthetic construct
YSRSGLN

SEQ ID NO: 14150 - protein, 7 aa, synthetic construct
YSKQGFN

SEQ ID NO: 14151 - protein, 7 aa, synthetic construct
YARVGTN

SEQ ID NO: 14152 - protein, 7 aa, synthetic construct
YSRPNHN

SEQ ID NO: 14153 - protein, 7 aa, synthetic construct
LAKAGMN

SEQ ID NO: 14154 - protein, 7 aa, synthetic construct
YARHGDN

SEQ ID NO: 14155 - protein, 7 aa, synthetic construct
FSRININ

SEQ ID NO: 14156 - protein, 7 aa, synthetic construct
YSRGGNN

SEQ ID NO: 14157 - protein, 7 aa, synthetic construct
YARMGLN

SEQ ID NO: 14158 - protein, 7 aa, synthetic construct
YAKGNVN

SEQ ID NO: 14159 - protein, 7 aa, synthetic construct
YAKTGMN

SEQ ID NO: 14160 - protein, 7 aa, synthetic construct
YSRWNEN

SEQ ID NO: 14161 - protein, 7 aa, synthetic construct
IDASSRW

SEQ ID NO: 14162 - protein, 7 aa, synthetic construct
YARQNLN

SEQ ID NO: 14163 - protein, 7 aa, synthetic construct
FARGGLN

SEQ ID NO: 14164 - protein, 7 aa, synthetic construct
FSKYGHN

SEQ ID NO: 14165 - protein, 7 aa, synthetic construct
FAKYGYN

SEQ ID NO: 14166 - protein, 7 aa, synthetic construct
YARYGSN

SEQ ID NO: 14167 - protein, 7 aa, synthetic construct
FSRVGNN

SEQ ID NO: 14168 - protein, 7 aa, synthetic construct
YSRVNIN

SEQ ID NO: 14169 - protein, 7 aa, synthetic construct
LSKMNVN

SEQ ID NO: 14170 - protein, 7 aa, synthetic construct
YARQGFN

SEQ ID NO: 14171 - protein, 7 aa, synthetic construct
FSRANQN

SEQ ID NO: 14172 - protein, 7 aa, synthetic construct
YARFNGN

SEQ ID NO: 14173 - protein, 7 aa, synthetic construct
YAKRGEN

SEQ ID NO: 14174 - protein, 7 aa, synthetic construct
YSKLGAN

SEQ ID NO: 14175 - protein, 7 aa, synthetic construct
YSRAGMN

SEQ ID NO: 14176 - protein, 7 aa, synthetic construct
YSKIGPN

SEQ ID NO: 14177 - protein, 7 aa, synthetic construct
FARGGNN

SEQ ID NO: 14178 - protein, 7 aa, synthetic construct
YSRMGLN

SEQ ID NO: 14179 - protein, 7 aa, synthetic construct
FSRVGVN

SEQ ID NO: 14180 - protein, 7 aa, synthetic construct
YAKIGIN

SEQ ID NO: 14181 - protein, 7 aa, synthetic construct
YSKMNVN

SEQ ID NO: 14182 - protein, 7 aa, synthetic construct
YAKMGHN

SEQ ID NO: 14183 - protein, 7 aa, synthetic construct
YSRAGNN

SEQ ID NO: 14184 - protein, 7 aa, synthetic construct
YSRPNFN

SEQ ID NO: 14185 - protein, 7 aa, synthetic construct
YAKTGWN

SEQ ID NO: 14186 - protein, 7 aa, synthetic construct
YVRSGGN

SEQ ID NO: 14187 - protein, 7 aa, synthetic construct
YARLGAN

SEQ ID NO: 14188 - protein, 7 aa, synthetic construct
YSKFNMN

SEQ ID NO: 14189 - protein, 7 aa, synthetic construct
QGEERKW

SEQ ID NO: 14190 - protein, 7 aa, synthetic construct
YSRAGPN

SEQ ID NO: 14191 - protein, 7 aa, synthetic construct
YARTGHN

SEQ ID NO: 14192 - protein, 7 aa, synthetic construct
FSRLNIN

SEQ ID NO: 14193 - protein, 7 aa, synthetic construct
YARGNTN

SEQ ID NO: 14194 - protein, 7 aa, synthetic construct
YSRHGLN

SEQ ID NO: 14195 - protein, 7 aa, synthetic construct
YARLNQN

SEQ ID NO: 14196 - protein, 7 aa, synthetic construct
YSRMGAN

SEQ ID NO: 14197 - protein, 7 aa, synthetic construct
YARTNYN

SEQ ID NO: 14198 - protein, 7 aa, synthetic construct
YAKNGPN

SEQ ID NO: 14199 - protein, 7 aa, synthetic construct
YAGRGPN

SEQ ID NO: 14200 - protein, 7 aa, synthetic construct
YSKLNFN

SEQ ID NO: 14201 - protein, 7 aa, synthetic construct
FSRSGVN

SEQ ID NO: 14202 - protein, 7 aa, synthetic construct
FSKNNYN

SEQ ID NO: 14203 - protein, 7 aa, synthetic construct
YSRQNAN

SEQ ID NO: 14204 - protein, 7 aa, synthetic construct
FSRIGTN

SEQ ID NO: 14205 - protein, 7 aa, synthetic construct
LAKLGFN

SEQ ID NO: 14206 - protein, 7 aa, synthetic construct
YSRQGIN

SEQ ID NO: 14207 - protein, 7 aa, synthetic construct
YSKLNTN

SEQ ID NO: 14208 - protein, 7 aa, synthetic construct
YSKMNNN

SEQ ID NO: 14209 - protein, 7 aa, synthetic construct
FSRQNAN

SEQ ID NO: 14210 - protein, 7 aa, synthetic construct
FAKSGWN

SEQ ID NO: 14211 - protein, 7 aa, synthetic construct
YSRTGSN

SEQ ID NO: 14212 - protein, 7 aa, synthetic construct
NWSSNGV

SEQ ID NO: 14213 - protein, 7 aa, synthetic construct
FARMGTN

SEQ ID NO: 14214 - protein, 7 aa, synthetic construct
FAKHNYN

SEQ ID NO: 14215 - protein, 7 aa, synthetic construct
FARMGHN

SEQ ID NO: 14216 - protein, 7 aa, synthetic construct
YARSGAN

SEQ ID NO: 14217 - protein, 7 aa, synthetic construct
YARGGHN

SEQ ID NO: 14218 - protein, 7 aa, synthetic construct
YSRTGIN

SEQ ID NO: 14219 - protein, 7 aa, synthetic construct
YARLGPN

SEQ ID NO: 14220 - protein, 7 aa, synthetic construct
MKSTNGI

SEQ ID NO: 14221 - protein, 7 aa, synthetic construct
YSKYGVN

SEQ ID NO: 14222 - protein, 7 aa, synthetic construct
YSKSGPN

SEQ ID NO: 14223 - protein, 7 aa, synthetic construct
FSRQGLN

SEQ ID NO: 14224 - protein, 7 aa, synthetic construct
YSKIGYN

SEQ ID NO: 14225 - protein, 7 aa, synthetic construct
YARIGNN

SEQ ID NO: 14226 - protein, 7 aa, synthetic construct
FSKLNAN

SEQ ID NO: 14227 - protein, 7 aa, synthetic construct
LAKAGPN

SEQ ID NO: 14228 - protein, 7 aa, synthetic construct
FAKNGFN

SEQ ID NO: 14229 - protein, 7 aa, synthetic construct
YSKLGVN

SEQ ID NO: 14230 - protein, 7 aa, synthetic construct
LAKTGLN

SEQ ID NO: 14231 - protein, 7 aa, synthetic construct
FSRIGMN

SEQ ID NO: 14232 - protein, 7 aa, synthetic construct
YARANAN

SEQ ID NO: 14233 - protein, 7 aa, synthetic construct
YSRGGIN

SEQ ID NO: 14234 - protein, 7 aa, synthetic construct
YSKLGMN

SEQ ID NO: 14235 - protein, 7 aa, synthetic construct
FAKSGMN

SEQ ID NO: 14236 - protein, 7 aa, synthetic construct
YARSNTN

SEQ ID NO: 14237 - protein, 7 aa, synthetic construct
YSRTNLN

SEQ ID NO: 14238 - protein, 7 aa, synthetic construct
YSKLGSN

SEQ ID NO: 14239 - protein, 7 aa, synthetic construct
FARGNVN

SEQ ID NO: 14240 - protein, 7 aa, synthetic construct
CGGIGRS

SEQ ID NO: 14241 - protein, 7 aa, synthetic construct
WMSTNGV

SEQ ID NO: 14242 - protein, 7 aa, synthetic construct
YSKMGHN

SEQ ID NO: 14243 - protein, 7 aa, synthetic construct
YSRLNSN

SEQ ID NO: 14244 - protein, 7 aa, synthetic construct
EMDNVRW

SEQ ID NO: 14245 - protein, 7 aa, synthetic construct
FSRQNLN

SEQ ID NO: 14246 - protein, 7 aa, synthetic construct
QYGKVYI

SEQ ID NO: 14247 - protein, 7 aa, synthetic construct
YSKQGLN

SEQ ID NO: 14248 - protein, 7 aa, synthetic construct
YVRSSQN

SEQ ID NO: 14249 - protein, 7 aa, synthetic construct
YSRMNTN

SEQ ID NO: 14250 - protein, 7 aa, synthetic construct
YSRYGEN

SEQ ID NO: 14251 - protein, 7 aa, synthetic construct
FSRMNQN

SEQ ID NO: 14252 - protein, 7 aa, synthetic construct
YSKYGAN

SEQ ID NO: 14253 - protein, 7 aa, synthetic construct
YSKTGWN

SEQ ID NO: 14254 - protein, 7 aa, synthetic construct
FSRSNYN

SEQ ID NO: 14255 - protein, 7 aa, synthetic construct
RGGSSPY

SEQ ID NO: 14256 - protein, 7 aa, synthetic construct
LSKMNFN

SEQ ID NO: 14257 - protein, 7 aa, synthetic construct
FSKVNYN

SEQ ID NO: 14258 - protein, 7 aa, synthetic construct
FSRQNIN

SEQ ID NO: 14259 - protein, 7 aa, synthetic construct
YSKLNVN

SEQ ID NO: 14260 - protein, 7 aa, synthetic construct
YSRVNQN

SEQ ID NO: 14261 - protein, 7 aa, synthetic construct
YSRSGTN

SEQ ID NO: 14262 - protein, 7 aa, synthetic construct
YSRIGAN

SEQ ID NO: 14263 - protein, 7 aa, synthetic construct
YSRTGGN

SEQ ID NO: 14264 - protein, 7 aa, synthetic construct
YARTGAN

SEQ ID NO: 14265 - protein, 7 aa, synthetic construct
YARSGHN

SEQ ID NO: 14266 - protein, 7 aa, synthetic construct
LSKMGVN

SEQ ID NO: 14267 - protein, 7 aa, synthetic construct
YSRTGMN

SEQ ID NO: 14268 - protein, 7 aa, synthetic construct
FSKMGPN

SEQ ID NO: 14269 - protein, 7 aa, synthetic construct
YARTGPN

SEQ ID NO: 14270 - protein, 7 aa, synthetic construct
YAKGGYN

SEQ ID NO: 14271 - protein, 7 aa, synthetic construct
FARANYN

SEQ ID NO: 14272 - protein, 7 aa, synthetic construct
YAKTNFN

SEQ ID NO: 14273 - protein, 7 aa, synthetic construct
YARMGPN

SEQ ID NO: 14274 - protein, 7 aa, synthetic construct
YAKTGPN

SEQ ID NO: 14275 - protein, 7 aa, synthetic construct
YVRTGVN

SEQ ID NO: 14276 - protein, 7 aa, synthetic construct
YARTSGN

SEQ ID NO: 14277 - protein, 7 aa, synthetic construct
YARKGDN

SEQ ID NO: 14278 - protein, 7 aa, synthetic construct
MHNGTNA

SEQ ID NO: 14279 - protein, 7 aa, synthetic construct
YARGNAN

SEQ ID NO: 14280 - protein, 7 aa, synthetic construct
YAKMGAN

SEQ ID NO: 14281 - protein, 7 aa, synthetic construct
LARTGEN

SEQ ID NO: 14282 - protein, 7 aa, synthetic construct
FSRLNTN

SEQ ID NO: 14283 - protein, 7 aa, synthetic construct
YSRNNSN

SEQ ID NO: 14284 - protein, 7 aa, synthetic construct
LKSTNGV

SEQ ID NO: 14285 - protein, 7 aa, synthetic construct
YVRSNVG

SEQ ID NO: 14286 - protein, 7 aa, synthetic construct
YTSTNGI

SEQ ID NO: 14287 - protein, 7 aa, synthetic construct
YSKMNHN

SEQ ID NO: 14288 - protein, 7 aa, synthetic construct
YSRSNLN

SEQ ID NO: 14289 - protein, 7 aa, synthetic construct
YSKLNMN

SEQ ID NO: 14290 - protein, 7 aa, synthetic construct
YSKVGYN

SEQ ID NO: 14291 - protein, 7 aa, synthetic construct
YSKLGTN

SEQ ID NO: 14292 - protein, 7 aa, synthetic construct
YSKRGDN

SEQ ID NO: 14293 - protein, 7 aa, synthetic construct
YSRTGNN

SEQ ID NO: 14294 - protein, 7 aa, synthetic construct
FSRVNVN

SEQ ID NO: 14295 - protein, 7 aa, synthetic construct
YFTGRTS

SEQ ID NO: 14296 - protein, 7 aa, synthetic construct
FARLNNN

SEQ ID NO: 14297 - protein, 7 aa, synthetic construct
FAKIGFN

SEQ ID NO: 14298 - protein, 7 aa, synthetic construct
YSRIGSN

SEQ ID NO: 14299 - protein, 7 aa, synthetic construct
FARMGNN

SEQ ID NO: 14300 - protein, 7 aa, synthetic construct
YSRGNFN

SEQ ID NO: 14301 - protein, 7 aa, synthetic construct
YSRLNMN

SEQ ID NO: 14302 - protein, 7 aa, synthetic construct
YTSAYPR

SEQ ID NO: 14303 - protein, 7 aa, synthetic construct
YSRLNEN

SEQ ID NO: 14304 - protein, 7 aa, synthetic construct
YSKIGSN

SEQ ID NO: 14305 - protein, 7 aa, synthetic construct
FSRVGYN

SEQ ID NO: 14306 - protein, 7 aa, synthetic construct
YARHGVN

SEQ ID NO: 14307 - protein, 7 aa, synthetic construct
YSRINSN

SEQ ID NO: 14308 - protein, 7 aa, synthetic construct
YSRNGAN

SEQ ID NO: 14309 - protein, 7 aa, synthetic construct
YARTNMN

SEQ ID NO: 14310 - protein, 7 aa, synthetic construct
YSRPNVN

SEQ ID NO: 14311 - protein, 7 aa, synthetic construct
FARQGMN

SEQ ID NO: 14312 - protein, 7 aa, synthetic construct
YSRTNAN

SEQ ID NO: 14313 - protein, 7 aa, synthetic construct
YSKHGTN

SEQ ID NO: 14314 - protein, 7 aa, synthetic construct
LAKLGYN

SEQ ID NO: 14315 - protein, 7 aa, synthetic construct
FSRANAN

SEQ ID NO: 14316 - protein, 7 aa, synthetic construct
YSRINYN

SEQ ID NO: 14317 - protein, 7 aa, synthetic construct
LAKMGHN

SEQ ID NO: 14318 - protein, 7 aa, synthetic construct
LSKLGMN

SEQ ID NO: 14319 - protein, 7 aa, synthetic construct
LAKHGIN

SEQ ID NO: 14320 - protein, 7 aa, synthetic construct
YSKKGDN

SEQ ID NO: 14321 - protein, 7 aa, synthetic construct
FSRLNNN

SEQ ID NO: 14322 - protein, 7 aa, synthetic construct
FSRHNQN

SEQ ID NO: 14323 - protein, 7 aa, synthetic construct
FSRVGGN

SEQ ID NO: 14324 - protein, 7 aa, synthetic construct
YSRVNPN

SEQ ID NO: 14325 - protein, 7 aa, synthetic construct
YSRTGVN

SEQ ID NO: 14326 - protein, 7 aa, synthetic construct
SWSTNGI

SEQ ID NO: 14327 - protein, 7 aa, synthetic construct
LSRLNDN

SEQ ID NO: 14328 - protein, 7 aa, synthetic construct
YSRINTN

SEQ ID NO: 14329 - protein, 7 aa, synthetic construct
LNTSVKW

SEQ ID NO: 14330 - protein, 7 aa, synthetic construct
YSKNGYN

SEQ ID NO: 14331 - protein, 7 aa, synthetic construct
YTHSNKQ

SEQ ID NO: 14332 - protein, 7 aa, synthetic construct
FARSGMN

SEQ ID NO: 14333 - protein, 7 aa, synthetic construct
YSKINYN

SEQ ID NO: 14334 - protein, 7 aa, synthetic construct
FARTGGN

SEQ ID NO: 14335 - protein, 7 aa, synthetic construct
FSKIGMN

SEQ ID NO: 14336 - protein, 7 aa, synthetic construct
YSRTNQN

SEQ ID NO: 14337 - protein, 7 aa, synthetic construct
FSKGNFN

SEQ ID NO: 14338 - protein, 7 aa, synthetic construct
YARNGTN

SEQ ID NO: 14339 - protein, 7 aa, synthetic construct
YAREGRN

SEQ ID NO: 14340 - protein, 7 aa, synthetic construct
YSRTNYN

SEQ ID NO: 14341 - protein, 7 aa, synthetic construct
ILSSNGV

SEQ ID NO: 14342 - protein, 7 aa, synthetic construct
YSKLGYN

SEQ ID NO: 14343 - protein, 7 aa, synthetic construct
YSKLNSN

SEQ ID NO: 14344 - protein, 7 aa, synthetic construct
YSRVGQN

SEQ ID NO: 14345 - protein, 7 aa, synthetic construct
LSRQNFN

SEQ ID NO: 14346 - protein, 7 aa, synthetic construct
YSRTGAN

SEQ ID NO: 14347 - protein, 7 aa, synthetic construct
YSRMGNN

SEQ ID NO: 14348 - protein, 7 aa, synthetic construct
RESGLAW

SEQ ID NO: 14349 - protein, 7 aa, synthetic construct
FARNGSN

SEQ ID NO: 14350 - protein, 7 aa, synthetic construct
YSRLNAN

SEQ ID NO: 14351 - protein, 7 aa, synthetic construct
FSKIGAN

SEQ ID NO: 14352 - protein, 7 aa, synthetic construct
FARGNYN

SEQ ID NO: 14353 - protein, 7 aa, synthetic construct
FARVGLN

SEQ ID NO: 14354 - protein, 7 aa, synthetic construct
YSKHNPN

SEQ ID NO: 14355 - protein, 7 aa, synthetic construct
YARTNFN

SEQ ID NO: 14356 - protein, 7 aa, synthetic construct
LARVGLN

SEQ ID NO: 14357 - protein, 7 aa, synthetic construct
NQRGYGN

SEQ ID NO: 14358 - protein, 7 aa, synthetic construct
YSKSNTN

SEQ ID NO: 14359 - protein, 7 aa, synthetic construct
YSKAGHN

SEQ ID NO: 14360 - protein, 7 aa, synthetic construct
YSRQNIN

SEQ ID NO: 14361 - protein, 7 aa, synthetic construct
HYSSNGV

SEQ ID NO: 14362 - protein, 7 aa, synthetic construct
YARAGGN

SEQ ID NO: 14363 - protein, 7 aa, synthetic construct
FARSGTN

SEQ ID NO: 14364 - protein, 7 aa, synthetic construct
FAKVGYN

SEQ ID NO: 14365 - protein, 7 aa, synthetic construct
YSRYGIN

SEQ ID NO: 14366 - protein, 7 aa, synthetic construct
FSRLNLN

SEQ ID NO: 14367 - protein, 7 aa, synthetic construct
FSRLGPN

SEQ ID NO: 14368 - protein, 7 aa, synthetic construct
YAKNNWN

SEQ ID NO: 14369 - protein, 7 aa, synthetic construct
YFVGSRA

SEQ ID NO: 14370 - protein, 7 aa, synthetic construct
YSKLGFN

SEQ ID NO: 14371 - protein, 7 aa, synthetic construct
FSKAGYN

SEQ ID NO: 14372 - protein, 7 aa, synthetic construct
YARKNDN

SEQ ID NO: 14373 - protein, 7 aa, synthetic construct
YARSNIN

SEQ ID NO: 14374 - protein, 7 aa, synthetic construct
YSRVGGN

SEQ ID NO: 14375 - protein, 7 aa, synthetic construct
FSRGNVN

SEQ ID NO: 14376 - protein, 7 aa, synthetic construct
MWDGTSP

SEQ ID NO: 14377 - protein, 7 aa, synthetic construct
FSRQGAN

SEQ ID NO: 14378 - protein, 7 aa, synthetic construct
YSRVGAN

SEQ ID NO: 14379 - protein, 7 aa, synthetic construct
YSKAGPN

SEQ ID NO: 14380 - protein, 7 aa, synthetic construct
YAKMGIN

SEQ ID NO: 14381 - protein, 7 aa, synthetic construct
FSKMNHN

SEQ ID NO: 14382 - protein, 7 aa, synthetic construct
FSRMGIN

SEQ ID NO: 14383 - protein, 7 aa, synthetic construct
YAKVGFN

SEQ ID NO: 14384 - protein, 7 aa, synthetic construct
YSRLGSN

SEQ ID NO: 14385 - protein, 7 aa, synthetic construct
RSGYGAG

SEQ ID NO: 14386 - protein, 7 aa, synthetic construct
YAKGNMN

SEQ ID NO: 14387 - protein, 7 aa, synthetic construct
YSRHNAN

SEQ ID NO: 14388 - protein, 7 aa, synthetic construct
YSKLNLN

SEQ ID NO: 14389 - protein, 7 aa, synthetic construct
FSRLGTN

SEQ ID NO: 14390 - protein, 7 aa, synthetic construct
FSRTNYN

SEQ ID NO: 14391 - protein, 7 aa, synthetic construct
FSRVGLN

SEQ ID NO: 14392 - protein, 7 aa, synthetic construct
IHSTNGV

SEQ ID NO: 14393 - protein, 7 aa, synthetic construct
YSKTGQN

SEQ ID NO: 14394 - protein, 7 aa, synthetic construct
INSTNGV

SEQ ID NO: 14395 - protein, 7 aa, synthetic construct
YSRMNGN

SEQ ID NO: 14396 - protein, 7 aa, synthetic construct
YSRGGAN

SEQ ID NO: 14397 - protein, 7 aa, synthetic construct
YARHGFN

SEQ ID NO: 14398 - protein, 7 aa, synthetic construct
YSRHNGN

SEQ ID NO: 14399 - protein, 7 aa, synthetic construct
YARTGNN

SEQ ID NO: 14400 - protein, 7 aa, synthetic construct
YSKQNWN

SEQ ID NO: 14401 - protein, 7 aa, synthetic construct
YSRGGLN

SEQ ID NO: 14402 - protein, 7 aa, synthetic construct
RGHDVSW

SEQ ID NO: 14403 - protein, 7 aa, synthetic construct
YSRNNTN

SEQ ID NO: 14404 - protein, 7 aa, synthetic construct
YSRSNNN

SEQ ID NO: 14405 - protein, 7 aa, synthetic construct
YARIGAN

SEQ ID NO: 14406 - protein, 7 aa, synthetic construct
FSRNGLN

SEQ ID NO: 14407 - protein, 7 aa, synthetic construct
YSRNNFN

SEQ ID NO: 14408 - protein, 7 aa, synthetic construct
YSRGGQN

SEQ ID NO: 14409 - protein, 7 aa, synthetic construct
YSRGNNN

SEQ ID NO: 14410 - protein, 7 aa, synthetic construct
YSRMGQN

SEQ ID NO: 14411 - protein, 7 aa, synthetic construct
LSKIGEN

SEQ ID NO: 14412 - protein, 7 aa, synthetic construct
LSRANFN

SEQ ID NO: 14413 - protein, 7 aa, synthetic construct
FARVGAN

SEQ ID NO: 14414 - protein, 7 aa, synthetic construct
YSKYGHN

SEQ ID NO: 14415 - protein, 7 aa, synthetic construct
KAASHGW

SEQ ID NO: 14416 - protein, 7 aa, synthetic construct
YSKIGHN

SEQ ID NO: 14417 - protein, 7 aa, synthetic construct
YSRHGVN

SEQ ID NO: 14418 - protein, 7 aa, synthetic construct
YSKQNFN

SEQ ID NO: 14419 - protein, 7 aa, synthetic construct
YARGGVN

SEQ ID NO: 14420 - protein, 7 aa, synthetic construct
FSRTNIN

SEQ ID NO: 14421 - protein, 7 aa, synthetic construct
YARQNNN

SEQ ID NO: 14422 - protein, 7 aa, synthetic construct
YARYGMN

SEQ ID NO: 14423 - protein, 7 aa, synthetic construct
PYAKSVD

SEQ ID NO: 14424 - protein, 7 aa, synthetic construct
YARANSN

SEQ ID NO: 14425 - protein, 7 aa, synthetic construct
FARMNNN

SEQ ID NO: 14426 - protein, 7 aa, synthetic construct
FARSGHN

SEQ ID NO: 14427 - protein, 7 aa, synthetic construct
YAKWGPN

SEQ ID NO: 14428 - protein, 7 aa, synthetic construct
YTHTQRN

SEQ ID NO: 14429 - protein, 7 aa, synthetic construct
YAKSNPN

SEQ ID NO: 14430 - protein, 7 aa, synthetic construct
NWSTNGI

SEQ ID NO: 14431 - protein, 7 aa, synthetic construct
YARQNMN

SEQ ID NO: 14432 - protein, 7 aa, synthetic construct
YARQNIN

SEQ ID NO: 14433 - protein, 7 aa, synthetic construct
YARAGFN

SEQ ID NO: 14434 - protein, 7 aa, synthetic construct
YSKYGQN

SEQ ID NO: 14435 - protein, 7 aa, synthetic construct
YAKIGKN

SEQ ID NO: 14436 - protein, 7 aa, synthetic construct
FSKIGVN

SEQ ID NO: 14437 - protein, 7 aa, synthetic construct
LSRVNDN

SEQ ID NO: 14438 - protein, 7 aa, synthetic construct
FAREGRN

SEQ ID NO: 14439 - protein, 7 aa, synthetic construct
TARGDRA

SEQ ID NO: 14440 - protein, 7 aa, synthetic construct
FSRMNIN

SEQ ID NO: 14441 - protein, 7 aa, synthetic construct
YAKSGPN

SEQ ID NO: 14442 - protein, 7 aa, synthetic construct
FSKLGIN

SEQ ID NO: 14443 - protein, 7 aa, synthetic construct
YSRIGLN

SEQ ID NO: 14444 - protein, 7 aa, synthetic construct
YARSGNN

SEQ ID NO: 14445 - protein, 7 aa, synthetic construct
YARTGQN

SEQ ID NO: 14446 - protein, 7 aa, synthetic construct
VRSGSIG

SEQ ID NO: 14447 - protein, 7 aa, synthetic construct
YSRAGSN

SEQ ID NO: 14448 - protein, 7 aa, synthetic construct
YSKYGTN

SEQ ID NO: 14449 - protein, 7 aa, synthetic construct
YARQNEN

SEQ ID NO: 14450 - protein, 7 aa, synthetic construct
YSKYNVN

SEQ ID NO: 14451 - protein, 7 aa, synthetic construct
YSRHNLN

SEQ ID NO: 14452 - protein, 7 aa, synthetic construct
YSKIGFN

SEQ ID NO: 14453 - protein, 7 aa, synthetic construct
LSRVGAS

SEQ ID NO: 14454 - protein, 7 aa, synthetic construct
FSRSNVN

SEQ ID NO: 14455 - protein, 7 aa, synthetic construct
YSRFNNN

SEQ ID NO: 14456 - protein, 7 aa, synthetic construct
FAKQGFN

SEQ ID NO: 14457 - protein, 7 aa, synthetic construct
FSKHNFN

SEQ ID NO: 14458 - protein, 7 aa, synthetic construct
YARPGHN

SEQ ID NO: 14459 - protein, 7 aa, synthetic construct
NRSTNGV

SEQ ID NO: 14460 - protein, 7 aa, synthetic construct
WMSTNGI

SEQ ID NO: 14461 - protein, 7 aa, synthetic construct
YSKLNYN

SEQ ID NO: 14462 - protein, 7 aa, synthetic construct
LRGKGYD

SEQ ID NO: 14463 - protein, 7 aa, synthetic construct
YSKYGSN

SEQ ID NO: 14464 - protein, 7 aa, synthetic construct
FSRAGPN

SEQ ID NO: 14465 - protein, 7 aa, synthetic construct
KDNTPYW

SEQ ID NO: 14466 - protein, 7 aa, synthetic construct
FARGGGN

SEQ ID NO: 14467 - protein, 7 aa, synthetic construct
LSKTGLN

SEQ ID NO: 14468 - protein, 7 aa, synthetic construct
YSRSNDN

SEQ ID NO: 14469 - protein, 7 aa, synthetic construct
YSRPNIN

SEQ ID NO: 14470 - protein, 7 aa, synthetic construct
YAKLNHN

SEQ ID NO: 14471 - protein, 7 aa, synthetic construct
YTRMHQN

SEQ ID NO: 14472 - protein, 7 aa, synthetic construct
FSRSGFN

SEQ ID NO: 14473 - protein, 7 aa, synthetic construct
FARNGPN

SEQ ID NO: 14474 - protein, 7 aa, synthetic construct
YSKNNVN

SEQ ID NO: 14475 - protein, 7 aa, synthetic construct
RGSQTSY

SEQ ID NO: 14476 - protein, 7 aa, synthetic construct
YARVGGN

SEQ ID NO: 14477 - protein, 7 aa, synthetic construct
YSRINGN

SEQ ID NO: 14478 - protein, 7 aa, synthetic construct
YSKWNEN

SEQ ID NO: 14479 - protein, 7 aa, synthetic construct
YSRIGNN

SEQ ID NO: 14480 - protein, 7 aa, synthetic construct
YAKYGSN

SEQ ID NO: 14481 - protein, 7 aa, synthetic construct
PTSTNGV

SEQ ID NO: 14482 - protein, 7 aa, synthetic construct
FARAGHN

SEQ ID NO: 14483 - protein, 7 aa, synthetic construct
LSKVGAN

SEQ ID NO: 14484 - protein, 7 aa, synthetic construct
YSRPGMN

SEQ ID NO: 14485 - protein, 7 aa, synthetic construct
YAKHGSN

SEQ ID NO: 14486 - protein, 7 aa, synthetic construct
FARYNGN

SEQ ID NO: 14487 - protein, 7 aa, synthetic construct
YARINNN

SEQ ID NO: 14488 - protein, 7 aa, synthetic construct
KLDRSNW

SEQ ID NO: 14489 - protein, 7 aa, synthetic construct
LHRAGIS

SEQ ID NO: 14490 - protein, 7 aa, synthetic construct
FSRAGVN

SEQ ID NO: 14491 - protein, 7 aa, synthetic construct
FSRMNAN

SEQ ID NO: 14492 - protein, 7 aa, synthetic construct
FSRMNMN

SEQ ID NO: 14493 - protein, 7 aa, synthetic construct
FSRVNTN

SEQ ID NO: 14494 - protein, 7 aa, synthetic construct
YNSTNGV

SEQ ID NO: 14495 - protein, 7 aa, synthetic construct
RLYDAYE

SEQ ID NO: 14496 - protein, 7 aa, synthetic construct
YARIGTN

SEQ ID NO: 14497 - protein, 7 aa, synthetic construct
YSKGGMN

SEQ ID NO: 14498 - protein, 7 aa, synthetic construct
LAKMGNN

SEQ ID NO: 14499 - protein, 7 aa, synthetic construct
VISTNGV

SEQ ID NO: 14500 - protein, 7 aa, synthetic construct
YAKHGWN

SEQ ID NO: 14501 - protein, 7 aa, synthetic construct
YARGNIN

SEQ ID NO: 14502 - protein, 7 aa, synthetic construct
VWSTNGI

SEQ ID NO: 14503 - protein, 7 aa, synthetic construct
YSKIGAN

SEQ ID NO: 14504 - protein, 7 aa, synthetic construct
YSRSNPN

SEQ ID NO: 14505 - protein, 7 aa, synthetic construct
YSRQNFN

SEQ ID NO: 14506 - protein, 7 aa, synthetic construct
WGSTNGI

SEQ ID NO: 14507 - protein, 7 aa, synthetic construct
YARLGMN

SEQ ID NO: 14508 - protein, 7 aa, synthetic construct
FSKAGAN

SEQ ID NO: 14509 - protein, 7 aa, synthetic construct
FSKSNWN

SEQ ID NO: 14510 - protein, 7 aa, synthetic construct
LSKNNHN

SEQ ID NO: 14511 - protein, 7 aa, synthetic construct
YAKSNLN

SEQ ID NO: 14512 - protein, 7 aa, synthetic construct
YARNNPN

SEQ ID NO: 14513 - protein, 7 aa, synthetic construct
FSKAGLN

SEQ ID NO: 14514 - protein, 7 aa, synthetic construct
YSRVNNN

SEQ ID NO: 14515 - protein, 7 aa, synthetic construct
FSRTGAN

SEQ ID NO: 14516 - protein, 7 aa, synthetic construct
FARTNMN

SEQ ID NO: 14517 - protein, 7 aa, synthetic construct
NTSMNGR

SEQ ID NO: 14518 - protein, 7 aa, synthetic construct
YSKNGWN

SEQ ID NO: 14519 - protein, 7 aa, synthetic construct
FSRSNMN

SEQ ID NO: 14520 - protein, 7 aa, synthetic construct
FSKSGFN

SEQ ID NO: 14521 - protein, 7 aa, synthetic construct
FSKLNIN

SEQ ID NO: 14522 - protein, 7 aa, synthetic construct
FARAGLN

SEQ ID NO: 14523 - protein, 7 aa, synthetic construct
LNATSSW

SEQ ID NO: 14524 - protein, 7 aa, synthetic construct
YSKYNMN

SEQ ID NO: 14525 - protein, 7 aa, synthetic construct
THKLSVN

SEQ ID NO: 14526 - protein, 7 aa, synthetic construct
YARSNVN

SEQ ID NO: 14527 - protein, 7 aa, synthetic construct
YARNGIN

SEQ ID NO: 14528 - protein, 7 aa, synthetic construct
FAKSGVN

SEQ ID NO: 14529 - protein, 7 aa, synthetic construct
YARNGLN

SEQ ID NO: 14530 - protein, 7 aa, synthetic construct
YARHGAN

SEQ ID NO: 14531 - protein, 7 aa, synthetic construct
YSRNGPN

SEQ ID NO: 14532 - protein, 7 aa, synthetic construct
YARLNPN

SEQ ID NO: 14533 - protein, 7 aa, synthetic construct
YAKNGWN

SEQ ID NO: 14534 - protein, 7 aa, synthetic construct
RGGSSNY

SEQ ID NO: 14535 - protein, 7 aa, synthetic construct
YAKHGQN

SEQ ID NO: 14536 - protein, 7 aa, synthetic construct
YARYGQN

SEQ ID NO: 14537 - protein, 7 aa, synthetic construct
FSKQNFN

SEQ ID NO: 14538 - protein, 7 aa, synthetic construct
FARIGIN

SEQ ID NO: 14539 - protein, 7 aa, synthetic construct
YSKGGLN

SEQ ID NO: 14540 - protein, 7 aa, synthetic construct
LSKIGAN

SEQ ID NO: 14541 - protein, 7 aa, synthetic construct
YSKNNSN

SEQ ID NO: 14542 - protein, 7 aa, synthetic construct
YARLGLN

SEQ ID NO: 14543 - protein, 7 aa, synthetic construct
FSRANLN

SEQ ID NO: 14544 - protein, 7 aa, synthetic construct
YAKLGSN

SEQ ID NO: 14545 - protein, 7 aa, synthetic construct
YSRVSDT

SEQ ID NO: 14546 - protein, 7 aa, synthetic construct
FTAGTRN

SEQ ID NO: 14547 - protein, 7 aa, synthetic construct
YSRNGSN

SEQ ID NO: 14548 - protein, 7 aa, synthetic construct
LAKLGVN

SEQ ID NO: 14549 - protein, 7 aa, synthetic construct
YSKKNDN

SEQ ID NO: 14550 - protein, 7 aa, synthetic construct
FSRTNTN

SEQ ID NO: 14551 - protein, 7 aa, synthetic construct
MSAHVKY

SEQ ID NO: 14552 - protein, 7 aa, synthetic construct
YSKAGYN

SEQ ID NO: 14553 - protein, 7 aa, synthetic construct
FSKRNDN

SEQ ID NO: 14554 - protein, 7 aa, synthetic construct
YSKKGEN

SEQ ID NO: 14555 - protein, 7 aa, synthetic construct
FARVGMN

SEQ ID NO: 14556 - protein, 7 aa, synthetic construct
YSRLGYN

SEQ ID NO: 14557 - protein, 7 aa, synthetic construct
FSKTGWN

SEQ ID NO: 14558 - protein, 7 aa, synthetic construct
YSRYNDN

SEQ ID NO: 14559 - protein, 7 aa, synthetic construct
FAKNGIN

SEQ ID NO: 14560 - protein, 7 aa, synthetic construct
FAKHGPN

SEQ ID NO: 14561 - protein, 7 aa, synthetic construct
IALRGAG

SEQ ID NO: 14562 - protein, 7 aa, synthetic construct
FSRGGYN

SEQ ID NO: 14563 - protein, 7 aa, synthetic construct
FSRMGHN

SEQ ID NO: 14564 - protein, 7 aa, synthetic construct
YAKNGEN

SEQ ID NO: 14565 - protein, 7 aa, synthetic construct
YARPGVN

SEQ ID NO: 14566 - protein, 7 aa, synthetic construct
YARYNVN

SEQ ID NO: 14567 - protein, 7 aa, synthetic construct
YSKVNAN

SEQ ID NO: 14568 - protein, 7 aa, synthetic construct
YSKYGIN

SEQ ID NO: 14569 - protein, 7 aa, synthetic construct
YSRGGSN

SEQ ID NO: 14570 - protein, 7 aa, synthetic construct
FSKYNAN

SEQ ID NO: 14571 - protein, 7 aa, synthetic construct
FSRQGIN

SEQ ID NO: 14572 - protein, 7 aa, synthetic construct
YHKLNPA

SEQ ID NO: 14573 - protein, 7 aa, synthetic construct
LARMGEN

SEQ ID NO: 14574 - protein, 7 aa, synthetic construct
YSRLGPN

SEQ ID NO: 14575 - protein, 7 aa, synthetic construct
YARMGIN

SEQ ID NO: 14576 - protein, 7 aa, synthetic construct
YSRIGDN

SEQ ID NO: 14577 - protein, 7 aa, synthetic construct
LSKLGAN

SEQ ID NO: 14578 - protein, 7 aa, synthetic construct
YAKANHN

SEQ ID NO: 14579 - protein, 7 aa, synthetic construct
FSKVNFN

SEQ ID NO: 14580 - protein, 7 aa, synthetic construct
YARSNHN

SEQ ID NO: 14581 - protein, 7 aa, synthetic construct
YSKLNDN

SEQ ID NO: 14582 - protein, 7 aa, synthetic construct
YAKGGWN

SEQ ID NO: 14583 - protein, 7 aa, synthetic construct
LSRASVI

SEQ ID NO: 14584 - protein, 7 aa, synthetic construct
FNSTNGI

SEQ ID NO: 14585 - protein, 7 aa, synthetic construct
YSRLGNN

SEQ ID NO: 14586 - protein, 7 aa, synthetic construct
YSKYNTN

SEQ ID NO: 14587 - protein, 7 aa, synthetic construct
YSKINAN

SEQ ID NO: 14588 - protein, 7 aa, synthetic construct
HWSTNGV

SEQ ID NO: 14589 - protein, 7 aa, synthetic construct
YSRGNSN

SEQ ID NO: 14590 - protein, 7 aa, synthetic construct
FSRTGMN

SEQ ID NO: 14591 - protein, 7 aa, synthetic construct
VRYESGN

SEQ ID NO: 14592 - protein, 7 aa, synthetic construct
FARHGNN

SEQ ID NO: 14593 - protein, 7 aa, synthetic construct
YSRSGPN

SEQ ID NO: 14594 - protein, 7 aa, synthetic construct
FARIGVN

SEQ ID NO: 14595 - protein, 7 aa, synthetic construct
FSKAGVN

SEQ ID NO: 14596 - protein, 7 aa, synthetic construct
LAKNGSN

SEQ ID NO: 14597 - protein, 7 aa, synthetic construct
FSRMNNN

SEQ ID NO: 14598 - protein, 7 aa, synthetic construct
FSKAGSN

SEQ ID NO: 14599 - protein, 7 aa, synthetic construct
YSRGGTN

SEQ ID NO: 14600 - protein, 7 aa, synthetic construct
IQSTNGV

SEQ ID NO: 14601 - protein, 7 aa, synthetic construct
YARYGAN

SEQ ID NO: 14602 - protein, 7 aa, synthetic construct
YAKQGPN

SEQ ID NO: 14603 - protein, 7 aa, synthetic construct
FARMGMN

SEQ ID NO: 14604 - protein, 7 aa, synthetic construct
YSKINNN

SEQ ID NO: 14605 - protein, 7 aa, synthetic construct
FSRSGNN

SEQ ID NO: 14606 - protein, 7 aa, synthetic construct
YQPNSYG

SEQ ID NO: 14607 - protein, 7 aa, synthetic construct
YSRAGDN

SEQ ID NO: 14608 - protein, 7 aa, synthetic construct
YARRNDN

SEQ ID NO: 14609 - protein, 7 aa, synthetic construct
FSRSGIN

SEQ ID NO: 14610 - protein, 7 aa, synthetic construct
FARLGSN

SEQ ID NO: 14611 - protein, 7 aa, synthetic construct
FARTNTN

SEQ ID NO: 14612 - protein, 7 aa, synthetic construct
FSKMGFN

SEQ ID NO: 14613 - protein, 7 aa, synthetic construct
YIRTQIN

SEQ ID NO: 14614 - protein, 7 aa, synthetic construct
YSRTGTN

SEQ ID NO: 14615 - protein, 7 aa, synthetic construct
FSKAGWN

SEQ ID NO: 14616 - protein, 7 aa, synthetic construct
FARAGFN

SEQ ID NO: 14617 - protein, 7 aa, synthetic construct
YSRHGGN

SEQ ID NO: 14618 - protein, 7 aa, synthetic construct
YSKVGKN

SEQ ID NO: 14619 - protein, 7 aa, synthetic construct
YSKAGAN

SEQ ID NO: 14620 - protein, 7 aa, synthetic construct
YSRMGPN

SEQ ID NO: 14621 - protein, 7 aa, synthetic construct
FSRQNFN

SEQ ID NO: 14622 - protein, 7 aa, synthetic construct
FARQGVN

SEQ ID NO: 14623 - protein, 7 aa, synthetic construct
YAKIGNN

SEQ ID NO: 14624 - protein, 7 aa, synthetic construct
FARQGAN

SEQ ID NO: 14625 - protein, 7 aa, synthetic construct
LSKANAN

SEQ ID NO: 14626 - protein, 7 aa, synthetic construct
PGSTNGI

SEQ ID NO: 14627 - protein, 7 aa, synthetic construct
YARNNLN

SEQ ID NO: 14628 - protein, 7 aa, synthetic construct
YSRLNDN

SEQ ID NO: 14629 - protein, 7 aa, synthetic construct
FARVGHN

SEQ ID NO: 14630 - protein, 7 aa, synthetic construct
FSKMNAN

SEQ ID NO: 14631 - protein, 7 aa, synthetic construct
LSKMGAN

SEQ ID NO: 14632 - protein, 7 aa, synthetic construct
YSRIGPN

SEQ ID NO: 14633 - protein, 7 aa, synthetic construct
FSRQNQN

SEQ ID NO: 14634 - protein, 7 aa, synthetic construct
FSRSGSN

SEQ ID NO: 14635 - protein, 7 aa, synthetic construct
YSRLGGN

SEQ ID NO: 14636 - protein, 7 aa, synthetic construct
RFNGLNA

SEQ ID NO: 14637 - protein, 7 aa, synthetic construct
YARYNMN

SEQ ID NO: 14638 - protein, 7 aa, synthetic construct
YSRNNYN

SEQ ID NO: 14639 - protein, 7 aa, synthetic construct
PFSTNGV

SEQ ID NO: 14640 - protein, 7 aa, synthetic construct
WVKSSPG

SEQ ID NO: 14641 - protein, 7 aa, synthetic construct
FAKEGRN

SEQ ID NO: 14642 - protein, 7 aa, synthetic construct
YSRFNAN

SEQ ID NO: 14643 - protein, 7 aa, synthetic construct
ESYVGRN

SEQ ID NO: 14644 - protein, 7 aa, synthetic construct
YAKYGQN

SEQ ID NO: 14645 - protein, 7 aa, synthetic construct
FARIGLN

SEQ ID NO: 14646 - protein, 7 aa, synthetic construct
PNSTNGI

SEQ ID NO: 14647 - protein, 7 aa, synthetic construct
YSRQNSN

SEQ ID NO: 14648 - protein, 7 aa, synthetic construct
FAKMGFN

SEQ ID NO: 14649 - protein, 7 aa, synthetic construct
FSRNNAN

SEQ ID NO: 14650 - protein, 7 aa, synthetic construct
FSRQGHN

SEQ ID NO: 14651 - protein, 7 aa, synthetic construct
WSKLHAN

SEQ ID NO: 14652 - protein, 7 aa, synthetic construct
NYSTNGV

SEQ ID NO: 14653 - protein, 7 aa, synthetic construct
YSKYNAN

SEQ ID NO: 14654 - protein, 7 aa, synthetic construct
YSRNNAN

SEQ ID NO: 14655 - protein, 7 aa, synthetic construct
YSKHNEN

SEQ ID NO: 14656 - protein, 7 aa, synthetic construct
FSRQNMN

SEQ ID NO: 14657 - protein, 7 aa, synthetic construct
YAKIGVN

SEQ ID NO: 14658 - protein, 7 aa, synthetic construct
HHSSNGV

SEQ ID NO: 14659 - protein, 7 aa, synthetic construct
YSRYNVN

SEQ ID NO: 14660 - protein, 7 aa, synthetic construct
FSRGGPN

SEQ ID NO: 14661 - protein, 7 aa, synthetic construct
FSKANPN

SEQ ID NO: 14662 - protein, 7 aa, synthetic construct
YHSTNGI

SEQ ID NO: 14663 - protein, 7 aa, synthetic construct
TRTGVSA

SEQ ID NO: 14664 - protein, 7 aa, synthetic construct
YSRSNFN

SEQ ID NO: 14665 - protein, 7 aa, synthetic construct
YSKHGGN

SEQ ID NO: 14666 - protein, 7 aa, synthetic construct
YSRYGQN

SEQ ID NO: 14667 - protein, 7 aa, synthetic construct
FARHGMN

SEQ ID NO: 14668 - protein, 7 aa, synthetic construct
FSRSNIN

SEQ ID NO: 14669 - protein, 7 aa, synthetic construct
FARQGTN

SEQ ID NO: 14670 - protein, 7 aa, synthetic construct
YARLGTN

SEQ ID NO: 14671 - protein, 7 aa, synthetic construct
YSKNNWN

SEQ ID NO: 14672 - protein, 7 aa, synthetic construct
FARGNLN

SEQ ID NO: 14673 - protein, 7 aa, synthetic construct
FSKLNDN

SEQ ID NO: 14674 - protein, 7 aa, synthetic construct
YSRINEN

SEQ ID NO: 14675 - protein, 7 aa, synthetic construct
FSRHNEN

SEQ ID NO: 14676 - protein, 7 aa, synthetic construct
FSKVGQN

SEQ ID NO: 14677 - protein, 7 aa, synthetic construct
FARHNNN

SEQ ID NO: 14678 - protein, 7 aa, synthetic construct
YSRYNMN

SEQ ID NO: 14679 - protein, 7 aa, synthetic construct
YAKYGAN

SEQ ID NO: 14680 - protein, 7 aa, synthetic construct
FAKHGYN

SEQ ID NO: 14681 - protein, 7 aa, synthetic construct
YARNGAN

SEQ ID NO: 14682 - protein, 7 aa, synthetic construct
FSKANLN

SEQ ID NO: 14683 - protein, 7 aa, synthetic construct
GGASKGW

SEQ ID NO: 14684 - protein, 7 aa, synthetic construct
FSRVNHN

SEQ ID NO: 14685 - protein, 7 aa, synthetic construct
YARTNHN

SEQ ID NO: 14686 - protein, 7 aa, synthetic construct
YSRPNLN

SEQ ID NO: 14687 - protein, 7 aa, synthetic construct
PSSTNGI

SEQ ID NO: 14688 - protein, 7 aa, synthetic construct
LARVGQN

SEQ ID NO: 14689 - protein, 7 aa, synthetic construct
YHKMSLG

SEQ ID NO: 14690 - protein, 7 aa, synthetic construct
FSRGNYN

SEQ ID NO: 14691 - protein, 7 aa, synthetic construct
YSRSNSN

SEQ ID NO: 14692 - protein, 7 aa, synthetic construct
LSRSGWN

SEQ ID NO: 14693 - protein, 7 aa, synthetic construct
YARMGEN

SEQ ID NO: 14694 - protein, 7 aa, synthetic construct
YSKYNQN

SEQ ID NO: 14695 - protein, 7 aa, synthetic construct
YARLGIN

SEQ ID NO: 14696 - protein, 7 aa, synthetic construct
YSKFNIN

SEQ ID NO: 14697 - protein, 7 aa, synthetic construct
YARNNHN

SEQ ID NO: 14698 - protein, 7 aa, synthetic construct
FSRANDN

SEQ ID NO: 14699 - protein, 7 aa, synthetic construct
FSRHNIN

SEQ ID NO: 14700 - protein, 7 aa, synthetic construct
YAKGGTN

SEQ ID NO: 14701 - protein, 7 aa, synthetic construct
YSRQNGN

SEQ ID NO: 14702 - protein, 7 aa, synthetic construct
ETSTNGV

SEQ ID NO: 14703 - protein, 7 aa, synthetic construct
RDRYSAG

SEQ ID NO: 14704 - protein, 7 aa, synthetic construct
YSRLGQN

SEQ ID NO: 14705 - protein, 7 aa, synthetic construct
YARANQN

SEQ ID NO: 14706 - protein, 7 aa, synthetic construct
MQSSNGV

SEQ ID NO: 14707 - protein, 7 aa, synthetic construct
LSKHNLN

SEQ ID NO: 14708 - protein, 7 aa, synthetic construct
MSRVSVL

SEQ ID NO: 14709 - protein, 7 aa, synthetic construct
LSKHNTN

SEQ ID NO: 14710 - protein, 7 aa, synthetic construct
RGPNSYP

SEQ ID NO: 14711 - protein, 7 aa, synthetic construct
FAKAGHN

SEQ ID NO: 14712 - protein, 7 aa, synthetic construct
FSRMGLN

SEQ ID NO: 14713 - protein, 7 aa, synthetic construct
FSKHGNN

SEQ ID NO: 14714 - protein, 7 aa, synthetic construct
YHKLQNG

SEQ ID NO: 14715 - protein, 7 aa, synthetic construct
FSRYGTN

SEQ ID NO: 14716 - protein, 7 aa, synthetic construct
DKYDRYT

SEQ ID NO: 14717 - protein, 7 aa, synthetic construct
YSKFNVN

SEQ ID NO: 14718 - protein, 7 aa, synthetic construct
LSKMNQN

SEQ ID NO: 14719 - protein, 7 aa, synthetic construct
YSKFNYN

SEQ ID NO: 14720 - protein, 7 aa, synthetic construct
FSKANAN

SEQ ID NO: 14721 - protein, 7 aa, synthetic construct
YARVGVN

SEQ ID NO: 14722 - protein, 7 aa, synthetic construct
YSRYNTN

SEQ ID NO: 14723 - protein, 7 aa, synthetic construct
FAREGWN

SEQ ID NO: 14724 - protein, 7 aa, synthetic construct
MYSTNGV

SEQ ID NO: 14725 - protein, 7 aa, synthetic construct
NYSTNGR

SEQ ID NO: 14726 - protein, 7 aa, synthetic construct
YAKANTN

SEQ ID NO: 14727 - protein, 7 aa, synthetic construct
YARVNYN

SEQ ID NO: 14728 - protein, 7 aa, synthetic construct
YSKYNHN

SEQ ID NO: 14729 - protein, 7 aa, synthetic construct
YSRNNDN

SEQ ID NO: 14730 - protein, 7 aa, synthetic construct
QDSTNGV

SEQ ID NO: 14731 - protein, 7 aa, synthetic construct
YARNNVN

SEQ ID NO: 14732 - protein, 7 aa, synthetic construct
FARHGAN

SEQ ID NO: 14733 - protein, 7 aa, synthetic construct
FVKSNSG

SEQ ID NO: 14734 - protein, 7 aa, synthetic construct
FSKQNWN

SEQ ID NO: 14735 - protein, 7 aa, synthetic construct
YAKPNWN

SEQ ID NO: 14736 - protein, 7 aa, synthetic construct
FSKGNWN

SEQ ID NO: 14737 - protein, 7 aa, synthetic construct
YSRYGSN

SEQ ID NO: 14738 - protein, 7 aa, synthetic construct
YAKSNTN

SEQ ID NO: 14739 - protein, 7 aa, synthetic construct
VAYTNGY

SEQ ID NO: 14740 - protein, 7 aa, synthetic construct
YSKWNSN

SEQ ID NO: 14741 - protein, 7 aa, synthetic construct
FSKHGPN

SEQ ID NO: 14742 - protein, 7 aa, synthetic construct
GANEWRD

SEQ ID NO: 14743 - protein, 7 aa, synthetic construct
YARPGPN

SEQ ID NO: 14744 - protein, 7 aa, synthetic construct
YAKRGDN

SEQ ID NO: 14745 - protein, 7 aa, synthetic construct
LPNQWRD

SEQ ID NO: 14746 - protein, 7 aa, synthetic construct
YFSQRTE

SEQ ID NO: 14747 - protein, 7 aa, synthetic construct
FARTNFN

SEQ ID NO: 14748 - protein, 7 aa, synthetic construct
ATSTNGI

SEQ ID NO: 14749 - protein, 7 aa, synthetic construct
NTSSNGV

SEQ ID NO: 14750 - protein, 7 aa, synthetic construct
YGRVTSN

SEQ ID NO: 14751 - protein, 7 aa, synthetic construct
YAKLGQN

SEQ ID NO: 14752 - protein, 7 aa, synthetic construct
FSKGGFN

SEQ ID NO: 14753 - protein, 7 aa, synthetic construct
LAKLGMN

SEQ ID NO: 14754 - protein, 7 aa, synthetic construct
FSRQGTN

SEQ ID NO: 14755 - protein, 7 aa, synthetic construct
FARSNTN

SEQ ID NO: 14756 - protein, 7 aa, synthetic construct
FSRMGSN

SEQ ID NO: 14757 - protein, 7 aa, synthetic construct
LARVGNN

SEQ ID NO: 14758 - protein, 7 aa, synthetic construct
FARLGNN

SEQ ID NO: 14759 - protein, 7 aa, synthetic construct
YSRSNGN

SEQ ID NO: 14760 - protein, 7 aa, synthetic construct
FSRQNSN

SEQ ID NO: 14761 - protein, 7 aa, synthetic construct
YARDGRN

SEQ ID NO: 14762 - protein, 7 aa, synthetic construct
YAKYGGN

SEQ ID NO: 14763 - protein, 7 aa, synthetic construct
YSRNNLN

SEQ ID NO: 14764 - protein, 7 aa, synthetic construct
FSKAGTN

SEQ ID NO: 14765 - protein, 7 aa, synthetic construct
YSRHNQN

SEQ ID NO: 14766 - protein, 7 aa, synthetic construct
FAKHGHN

SEQ ID NO: 14767 - protein, 7 aa, synthetic construct
WKHLSMG

SEQ ID NO: 14768 - protein, 7 aa, synthetic construct
YARAGAN

SEQ ID NO: 14769 - protein, 7 aa, synthetic construct
ERNIGRL

SEQ ID NO: 14770 - protein, 7 aa, synthetic construct
CKGGCMV

SEQ ID NO: 14771 - protein, 7 aa, synthetic construct
YAKQGDN

SEQ ID NO: 14772 - protein, 7 aa, synthetic construct
WFSGTTN

SEQ ID NO: 14773 - protein, 7 aa, synthetic construct
FSKRNEN

SEQ ID NO: 14774 - protein, 7 aa, synthetic construct
FSRGNAN

SEQ ID NO: 14775 - protein, 7 aa, synthetic construct
LARVGIN

SEQ ID NO: 14776 - protein, 7 aa, synthetic construct
YSRLGTN

SEQ ID NO: 14777 - protein, 7 aa, synthetic construct
FSRVNAN

SEQ ID NO: 14778 - protein, 7 aa, synthetic construct
FSRNGFN

SEQ ID NO: 14779 - protein, 7 aa, synthetic construct
YARPGSN

SEQ ID NO: 14780 - protein, 7 aa, synthetic construct
YSKNNCN

SEQ ID NO: 14781 - protein, 7 aa, synthetic construct
YARQNSN

SEQ ID NO: 14782 - protein, 7 aa, synthetic construct
YAKIGSN

SEQ ID NO: 14783 - protein, 7 aa, synthetic construct
FSKIGTN

SEQ ID NO: 14784 - protein, 7 aa, synthetic construct
FSRVNYN

SEQ ID NO: 14785 - protein, 7 aa, synthetic construct
FARGNFN

SEQ ID NO: 14786 - protein, 7 aa, synthetic construct
FARTNHN

SEQ ID NO: 14787 - protein, 7 aa, synthetic construct
DAAYVKY

SEQ ID NO: 14788 - protein, 7 aa, synthetic construct
YSKYNDN

SEQ ID NO: 14789 - protein, 7 aa, synthetic construct
FARQNMN

SEQ ID NO: 14790 - protein, 7 aa, synthetic construct
RLTDITW

SEQ ID NO: 14791 - protein, 7 aa, synthetic construct
YARYGTN

SEQ ID NO: 14792 - protein, 7 aa, synthetic construct
FNGSNRY

SEQ ID NO: 14793 - protein, 7 aa, synthetic construct
TNWGGPA

SEQ ID NO: 14794 - protein, 7 aa, synthetic construct
FARAGGN

SEQ ID NO: 14795 - protein, 7 aa, synthetic construct
YSKYNSN

SEQ ID NO: 14796 - protein, 7 aa, synthetic construct
FAKVGFN

SEQ ID NO: 14797 - protein, 7 aa, synthetic construct
FSRNGIN

SEQ ID NO: 14798 - protein, 7 aa, synthetic construct
FSKAGHN

SEQ ID NO: 14799 - protein, 7 aa, synthetic construct
LAKNGCN

SEQ ID NO: 14800 - protein, 7 aa, synthetic construct
YAKYNMN

SEQ ID NO: 14801 - protein, 7 aa, synthetic construct
GGGSVRY

SEQ ID NO: 14802 - protein, 7 aa, synthetic construct
FSRQNHN

SEQ ID NO: 14803 - protein, 7 aa, synthetic construct
QHYNGLG

SEQ ID NO: 14804 - protein, 7 aa, synthetic construct
YAKANWN

SEQ ID NO: 14805 - protein, 7 aa, synthetic construct
YARHGTN

SEQ ID NO: 14806 - protein, 7 aa, synthetic construct
FARHGLN

SEQ ID NO: 14807 - protein, 7 aa, synthetic construct
YSKQGPN

SEQ ID NO: 14808 - protein, 7 aa, synthetic construct
FARSGGN

SEQ ID NO: 14809 - protein, 7 aa, synthetic construct
FSRNNVN

SEQ ID NO: 14810 - protein, 7 aa, synthetic construct
FSRLGGN

SEQ ID NO: 14811 - protein, 7 aa, synthetic construct
YARMNTN

SEQ ID NO: 14812 - protein, 7 aa, synthetic construct
EQSTNGV

SEQ ID NO: 14813 - protein, 7 aa, synthetic construct
RAAEVYP

SEQ ID NO: 14814 - protein, 7 aa, synthetic construct
LSKGGFN

SEQ ID NO: 14815 - protein, 7 aa, synthetic construct
NKWGMSP

SEQ ID NO: 14816 - protein, 7 aa, synthetic construct
YARFNPN

SEQ ID NO: 14817 - protein, 7 aa, synthetic construct
YARSSQS

SEQ ID NO: 14818 - protein, 7 aa, synthetic construct
YAKTNNN

SEQ ID NO: 14819 - protein, 7 aa, synthetic construct
YYQGTSA

SEQ ID NO: 14820 - protein, 7 aa, synthetic construct
FSRHGIN

SEQ ID NO: 14821 - protein, 7 aa, synthetic construct
FSRVNLN

SEQ ID NO: 14822 - protein, 7 aa, synthetic construct
YSKFNAN

SEQ ID NO: 14823 - protein, 7 aa, synthetic construct
YARMNPN

SEQ ID NO: 14824 - protein, 7 aa, synthetic construct
YARSSQI

SEQ ID NO: 14825 - protein, 7 aa, synthetic construct
FAKGGAN

SEQ ID NO: 14826 - protein, 7 aa, synthetic construct
YSRYNSN

SEQ ID NO: 14827 - protein, 7 aa, synthetic construct
FARMGVN

SEQ ID NO: 14828 - protein, 7 aa, synthetic construct
FARSNLN

SEQ ID NO: 14829 - protein, 7 aa, synthetic construct
FARQGYN

SEQ ID NO: 14830 - protein, 7 aa, synthetic construct
YAKTNLN

SEQ ID NO: 14831 - protein, 7 aa, synthetic construct
FSRSNFN

SEQ ID NO: 14832 - protein, 7 aa, synthetic construct
FAKNGNN

SEQ ID NO: 14833 - protein, 7 aa, synthetic construct
YAKPGLN

SEQ ID NO: 14834 - protein, 7 aa, synthetic construct
IFSSNGV

SEQ ID NO: 14835 - protein, 7 aa, synthetic construct
FSRSNHN

SEQ ID NO: 14836 - protein, 7 aa, synthetic construct
FARSGDN

SEQ ID NO: 14837 - protein, 7 aa, synthetic construct
YARENKN

SEQ ID NO: 14838 - protein, 7 aa, synthetic construct
YAKYGTN

SEQ ID NO: 14839 - protein, 7 aa, synthetic construct
FSRSNLN

SEQ ID NO: 14840 - protein, 7 aa, synthetic construct
REVSRSY

SEQ ID NO: 14841 - protein, 7 aa, synthetic construct
MNSSSGW

SEQ ID NO: 14842 - protein, 7 aa, synthetic construct
YSRMGGN

SEQ ID NO: 14843 - protein, 7 aa, synthetic construct
FSRQGQN

SEQ ID NO: 14844 - protein, 7 aa, synthetic construct
FARIGQN

SEQ ID NO: 14845 - protein, 7 aa, synthetic construct
YAKYGVN

SEQ ID NO: 14846 - protein, 7 aa, synthetic construct
YSRPNNN

SEQ ID NO: 14847 - protein, 7 aa, synthetic construct
YSKINPN

SEQ ID NO: 14848 - protein, 7 aa, synthetic construct
IGSSNGV

SEQ ID NO: 14849 - protein, 7 aa, synthetic construct
FSKQGFN

SEQ ID NO: 14850 - protein, 7 aa, synthetic construct
YSKSNWN

SEQ ID NO: 14851 - protein, 7 aa, synthetic construct
LAKHGTN

SEQ ID NO: 14852 - protein, 7 aa, synthetic construct
FSRMGMN

SEQ ID NO: 14853 - protein, 7 aa, synthetic construct
FARMGIN

SEQ ID NO: 14854 - protein, 7 aa, synthetic construct
LSRQGWN

SEQ ID NO: 14855 - protein, 7 aa, synthetic construct
FSRTNLN

SEQ ID NO: 14856 - protein, 7 aa, synthetic construct
YARMNAN

SEQ ID NO: 14857 - protein, 7 aa, synthetic construct
LSKHGYN

SEQ ID NO: 14858 - protein, 7 aa, synthetic construct
YARAGPN

SEQ ID NO: 14859 - protein, 7 aa, synthetic construct
AQAAKNW

SEQ ID NO: 14860 - protein, 7 aa, synthetic construct
LSRTSTN

SEQ ID NO: 14861 - protein, 7 aa, synthetic construct
YSRLGVN

SEQ ID NO: 14862 - protein, 7 aa, synthetic construct
YSKYNFN

SEQ ID NO: 14863 - protein, 7 aa, synthetic construct
YTHSTYG

SEQ ID NO: 14864 - protein, 7 aa, synthetic construct
YARVNHN

SEQ ID NO: 14865 - protein, 7 aa, synthetic construct
YSRPGNN

SEQ ID NO: 14866 - protein, 7 aa, synthetic construct
YAKVGLN

SEQ ID NO: 14867 - protein, 7 aa, synthetic construct
YSRHGMN

SEQ ID NO: 14868 - protein, 7 aa, synthetic construct
YHKLLSG

SEQ ID NO: 14869 - protein, 7 aa, synthetic construct
FARQGQN

SEQ ID NO: 14870 - protein, 7 aa, synthetic construct
YARHGGN

SEQ ID NO: 14871 - protein, 7 aa, synthetic construct
LARLGSN

SEQ ID NO: 14872 - protein, 7 aa, synthetic construct
FSKYNNN

SEQ ID NO: 14873 - protein, 7 aa, synthetic construct
YSKLNKN

SEQ ID NO: 14874 - protein, 7 aa, synthetic construct
FSRGGAN

SEQ ID NO: 14875 - protein, 7 aa, synthetic construct
FARMGAN

SEQ ID NO: 14876 - protein, 7 aa, synthetic construct
ENRPERK

SEQ ID NO: 14877 - protein, 7 aa, synthetic construct
FSRNGYN

SEQ ID NO: 14878 - protein, 7 aa, synthetic construct
FARLGVN

SEQ ID NO: 14879 - protein, 7 aa, synthetic construct
RNESSFP

SEQ ID NO: 14880 - protein, 7 aa, synthetic construct
FSRHNVN

SEQ ID NO: 14881 - protein, 7 aa, synthetic construct
YFAHVQE

SEQ ID NO: 14882 - protein, 7 aa, synthetic construct
LARGGSY

SEQ ID NO: 14883 - protein, 7 aa, synthetic construct
FSKHNTN

SEQ ID NO: 14884 - protein, 7 aa, synthetic construct
IDGHSYY

SEQ ID NO: 14885 - protein, 7 aa, synthetic construct
YSKFNSN

SEQ ID NO: 14886 - protein, 7 aa, synthetic construct
YAKYNIN

SEQ ID NO: 14887 - protein, 7 aa, synthetic construct
YSKYNNN

SEQ ID NO: 14888 - protein, 7 aa, synthetic construct
YARTNGN

SEQ ID NO: 14889 - protein, 7 aa, synthetic construct
LNSMSKY

SEQ ID NO: 14890 - protein, 7 aa, synthetic construct
TGGTSYY

SEQ ID NO: 14891 - protein, 7 aa, synthetic construct
YARNNMN

SEQ ID NO: 14892 - protein, 7 aa, synthetic construct
YAKHGGN

SEQ ID NO: 14893 - protein, 7 aa, synthetic construct
RANAGAG

SEQ ID NO: 14894 - protein, 7 aa, synthetic construct
FSRTNAN

SEQ ID NO: 14895 - protein, 7 aa, synthetic construct
FSRVNMN

SEQ ID NO: 14896 - protein, 7 aa, synthetic construct
FAKHGFN

SEQ ID NO: 14897 - protein, 7 aa, synthetic construct
YARANIN

SEQ ID NO: 14898 - protein, 7 aa, synthetic construct
NQYGSGR

SEQ ID NO: 14899 - protein, 7 aa, synthetic construct
FSRVNQN

SEQ ID NO: 14900 - protein, 7 aa, synthetic construct
FARVGNN

SEQ ID NO: 14901 - protein, 7 aa, synthetic construct
FSRSNAN

SEQ ID NO: 14902 - protein, 7 aa, synthetic construct
YAKKGDN

SEQ ID NO: 14903 - protein, 7 aa, synthetic construct
FSRINSN

SEQ ID NO: 14904 - protein, 7 aa, synthetic construct
YSRFNTN

SEQ ID NO: 14905 - protein, 7 aa, synthetic construct
FARSNYN

SEQ ID NO: 14906 - protein, 7 aa, synthetic construct
LSRINEN

SEQ ID NO: 14907 - protein, 7 aa, synthetic construct
GNTSKSW

SEQ ID NO: 14908 - protein, 7 aa, synthetic construct
FARQNNN

SEQ ID NO: 14909 - protein, 7 aa, synthetic construct
LSKPGPN

SEQ ID NO: 14910 - protein, 7 aa, synthetic construct
YARNNFN

SEQ ID NO: 14911 - protein, 7 aa, synthetic construct
FARVNNN

SEQ ID NO: 14912 - protein, 7 aa, synthetic construct
FARTNVN

SEQ ID NO: 14913 - protein, 7 aa, synthetic construct
VDGRSMY

SEQ ID NO: 14914 - protein, 7 aa, synthetic construct
FSRTNHN

SEQ ID NO: 14915 - protein, 7 aa, synthetic construct
YSKINSN

SEQ ID NO: 14916 - protein, 7 aa, synthetic construct
VQGRSSY

SEQ ID NO: 14917 - protein, 7 aa, synthetic construct
FAKRNDN

SEQ ID NO: 14918 - protein, 7 aa, synthetic construct
FARLGTN

SEQ ID NO: 14919 - protein, 7 aa, synthetic construct
YSKFNPN

SEQ ID NO: 14920 - protein, 7 aa, synthetic construct
FAKQGMN

SEQ ID NO: 14921 - protein, 7 aa, synthetic construct
FAKLGPN

SEQ ID NO: 14922 - protein, 7 aa, synthetic construct
YSKINQN

SEQ ID NO: 14923 - protein, 7 aa, synthetic construct
FAKMGHN

SEQ ID NO: 14924 - protein, 7 aa, synthetic construct
YSKMGKN

SEQ ID NO: 14925 - protein, 7 aa, synthetic construct
FSRTGPN

SEQ ID NO: 14926 - protein, 7 aa, synthetic construct
NARGMGN

SEQ ID NO: 14927 - protein, 7 aa, synthetic construct
YYQYKTA

SEQ ID NO: 14928 - protein, 7 aa, synthetic construct
FSKGNNN

SEQ ID NO: 14929 - protein, 7 aa, synthetic construct
YAKYNFN

SEQ ID NO: 14930 - protein, 7 aa, synthetic construct
LAKQGSN

SEQ ID NO: 14931 - protein, 7 aa, synthetic construct
YSKPNWN

SEQ ID NO: 14932 - protein, 7 aa, synthetic construct
YAKPNYN

SEQ ID NO: 14933 - protein, 7 aa, synthetic construct
YSKFNHN

SEQ ID NO: 14934 - protein, 7 aa, synthetic construct
FSRSNPN

SEQ ID NO: 14935 - protein, 7 aa, synthetic construct
FSRPNHN

SEQ ID NO: 14936 - protein, 7 aa, synthetic construct
NQLPTPK

SEQ ID NO: 14937 - protein, 7 aa, synthetic construct
MPRSTYG

SEQ ID NO: 14938 - protein, 7 aa, synthetic construct
FAKYNNN

SEQ ID NO: 14939 - protein, 7 aa, synthetic construct
FSRFNTN

SEQ ID NO: 14940 - protein, 7 aa, synthetic construct
YAKYNYN

SEQ ID NO: 14941 - protein, 7 aa, synthetic construct
YSRGGHN

SEQ ID NO: 14942 - protein, 7 aa, synthetic construct
YARPNPN

SEQ ID NO: 14943 - protein, 7 aa, synthetic construct
YSKGGTN

SEQ ID NO: 14944 - protein, 7 aa, synthetic construct
FARHGIN

SEQ ID NO: 14945 - protein, 7 aa, synthetic construct
FARAGQN

SEQ ID NO: 14946 - protein, 7 aa, synthetic construct
FSKIGSN

SEQ ID NO: 14947 - protein, 7 aa, synthetic construct
RNTSTNW

SEQ ID NO: 14948 - protein, 7 aa, synthetic construct
FARMGSN

SEQ ID NO: 14949 - protein, 7 aa, synthetic construct
LSKWNEN

SEQ ID NO: 14950 - protein, 7 aa, synthetic construct
FSRPNYN

SEQ ID NO: 14951 - protein, 7 aa, synthetic construct
YAKTNDN

SEQ ID NO: 14952 - protein, 7 aa, synthetic construct
FSRGNNN

SEQ ID NO: 14953 - protein, 7 aa, synthetic construct
LSKNNLN

SEQ ID NO: 14954 - protein, 7 aa, synthetic construct
RTSSYGV

SEQ ID NO: 14955 - protein, 7 aa, synthetic construct
LAKIGMN

SEQ ID NO: 14956 - protein, 7 aa, synthetic construct
FARAGVN

SEQ ID NO: 14957 - protein, 7 aa, synthetic construct
FAKPNIN

SEQ ID NO: 14958 - protein, 7 aa, synthetic construct
YSRTGPN

SEQ ID NO: 14959 - protein, 7 aa, synthetic construct
YAREGWN

SEQ ID NO: 14960 - protein, 7 aa, synthetic construct
YRPRVPD

SEQ ID NO: 14961 - protein, 7 aa, synthetic construct
LAKGHYG

SEQ ID NO: 14962 - protein, 7 aa, synthetic construct
AGNSRDW

SEQ ID NO: 14963 - protein, 7 aa, synthetic construct
YARPNMN

SEQ ID NO: 14964 - protein, 7 aa, synthetic construct
YAREGFN

SEQ ID NO: 14965 - protein, 7 aa, synthetic construct
YAKQNQN

SEQ ID NO: 14966 - protein, 7 aa, synthetic construct
LSRMGGN

SEQ ID NO: 14967 - protein, 7 aa, synthetic construct
LSKWNDN

SEQ ID NO: 14968 - protein, 7 aa, synthetic construct
FSKRGDN

SEQ ID NO: 14969 - protein, 7 aa, synthetic construct
YSRKGDN

SEQ ID NO: 14970 - protein, 7 aa, synthetic construct
FSKHGFN

SEQ ID NO: 14971 - protein, 7 aa, synthetic construct
FARTNQN

SEQ ID NO: 14972 - protein, 7 aa, synthetic construct
FARSNVN

SEQ ID NO: 14973 - protein, 7 aa, synthetic construct
FAKIGPN

SEQ ID NO: 14974 - protein, 7 aa, synthetic construct
FSRSNSN

SEQ ID NO: 14975 - protein, 7 aa, synthetic construct
YAKLGGN

SEQ ID NO: 14976 - protein, 7 aa, synthetic construct
FSKLGQN

SEQ ID NO: 14977 - protein, 7 aa, synthetic construct
FARHNAN

SEQ ID NO: 14978 - protein, 7 aa, synthetic construct
FARSNHN

SEQ ID NO: 14979 - protein, 7 aa, synthetic construct
FARMGYN

SEQ ID NO: 14980 - protein, 7 aa, synthetic construct
FAKNGWN

SEQ ID NO: 14981 - protein, 7 aa, synthetic construct
FAKFGPN

SEQ ID NO: 14982 - protein, 7 aa, synthetic construct
FSRTNSN

SEQ ID NO: 14983 - protein, 7 aa, synthetic construct
FARANAN

SEQ ID NO: 14984 - protein, 7 aa, synthetic construct
YSKTNAN

SEQ ID NO: 14985 - protein, 7 aa, synthetic construct
YSKFNLN

SEQ ID NO: 14986 - protein, 7 aa, synthetic construct
YARKNEN

SEQ ID NO: 14987 - protein, 7 aa, synthetic construct
NYGNMKN

SEQ ID NO: 14988 - protein, 7 aa, synthetic construct
YSKFNTN

SEQ ID NO: 14989 - protein, 7 aa, synthetic construct
TKFGLSA

SEQ ID NO: 14990 - protein, 7 aa, synthetic construct
YAREGKN

SEQ ID NO: 14991 - protein, 7 aa, synthetic construct
FARMNHN

SEQ ID NO: 14992 - protein, 7 aa, synthetic construct
FAKGGQN

SEQ ID NO: 14993 - protein, 7 aa, synthetic construct
YSRNNGN

SEQ ID NO: 14994 - protein, 7 aa, synthetic construct
FARSNSN

SEQ ID NO: 14995 - protein, 7 aa, synthetic construct
YSREGRN

SEQ ID NO: 14996 - protein, 7 aa, synthetic construct
FARHGVN

SEQ ID NO: 14997 - protein, 7 aa, synthetic construct
FARIGAN

SEQ ID NO: 14998 - protein, 7 aa, synthetic construct
YSKTNWN

SEQ ID NO: 14999 - protein, 7 aa, synthetic construct
MWSSNGV

SEQ ID NO: 15000 - protein, 7 aa, synthetic construct
YSKYGMN

SEQ ID NO: 15001 - protein, 7 aa, synthetic construct
FSRGNPN

SEQ ID NO: 15002 - protein, 7 aa, synthetic construct
FSKMGAN

SEQ ID NO: 15003 - protein, 7 aa, synthetic construct
FARSNFN

SEQ ID NO: 15004 - protein, 7 aa, synthetic construct
YAKWNAN

SEQ ID NO: 15005 - protein, 7 aa, synthetic construct
LSKINFN

SEQ ID NO: 15006 - protein, 7 aa, synthetic construct
YAKIGGN

SEQ ID NO: 15007 - protein, 7 aa, synthetic construct
MGTSRGW

SEQ ID NO: 15008 - protein, 7 aa, synthetic construct
YFGGKQA

SEQ ID NO: 15009 - protein, 7 aa, synthetic construct
YARSSQD

SEQ ID NO: 15010 - protein, 7 aa, synthetic construct
WLKSQAS

SEQ ID NO: 15011 - protein, 7 aa, synthetic construct
FSRNNNN

SEQ ID NO: 15012 - protein, 7 aa, synthetic construct
RSNSAYP

SEQ ID NO: 15013 - protein, 7 aa, synthetic construct
GNSTSKF

SEQ ID NO: 15014 - protein, 7 aa, synthetic construct
FAKQGIN

SEQ ID NO: 15015 - protein, 7 aa, synthetic construct
LSRYGDN

SEQ ID NO: 15016 - protein, 7 aa, synthetic construct
FSRINAN

SEQ ID NO: 15017 - protein, 7 aa, synthetic construct
SKGTSYY

SEQ ID NO: 15018 - protein, 7 aa, synthetic construct
FAKGNPN

SEQ ID NO: 15019 - protein, 7 aa, synthetic construct
FSRGNTN

SEQ ID NO: 15020 - protein, 7 aa, synthetic construct
LKSSNGV

SEQ ID NO: 15021 - protein, 7 aa, synthetic construct
KHSTNGV

SEQ ID NO: 15022 - protein, 7 aa, synthetic construct
FSKPNYN

SEQ ID NO: 15023 - protein, 7 aa, synthetic construct
NRYKSGE

SEQ ID NO: 15024 - protein, 7 aa, synthetic construct
FSRNNLN

SEQ ID NO: 15025 - protein, 7 aa, synthetic construct
YPGKSSF

SEQ ID NO: 15026 - protein, 7 aa, synthetic construct
YSKYNYN

SEQ ID NO: 15027 - protein, 7 aa, synthetic construct
YAKWNPN

SEQ ID NO: 15028 - protein, 7 aa, synthetic construct
YARHNHN

SEQ ID NO: 15029 - protein, 7 aa, synthetic construct
FAKGNAN

SEQ ID NO: 15030 - protein, 7 aa, synthetic construct
GRLKSDQ

SEQ ID NO: 15031 - protein, 7 aa, synthetic construct
FARTNAN

SEQ ID NO: 15032 - protein, 7 aa, synthetic construct
YAKFNPN

SEQ ID NO: 15033 - protein, 7 aa, synthetic construct
FSRVNSN

SEQ ID NO: 15034 - protein, 7 aa, synthetic construct
RNNTVYM

SEQ ID NO: 15035 - protein, 7 aa, synthetic construct
FSKHGHN

SEQ ID NO: 15036 - protein, 7 aa, synthetic construct
LSKFNYN

SEQ ID NO: 15037 - protein, 7 aa, synthetic construct
FSKHGLN

SEQ ID NO: 15038 - protein, 7 aa, synthetic construct
SRYGDAA

SEQ ID NO: 15039 - protein, 7 aa, synthetic construct
NKSSSSW

SEQ ID NO: 15040 - protein, 7 aa, synthetic construct
FSRGGVN

SEQ ID NO: 15041 - protein, 7 aa, synthetic construct
YARSNYN

SEQ ID NO: 15042 - protein, 7 aa, synthetic construct
TPYGKMA

SEQ ID NO: 15043 - protein, 7 aa, synthetic construct
FSKKNDN

SEQ ID NO: 15044 - protein, 7 aa, synthetic construct
FSRNNSN

SEQ ID NO: 15045 - protein, 7 aa, synthetic construct
FARTNLN

SEQ ID NO: 15046 - protein, 7 aa, synthetic construct
FSKSNYN

SEQ ID NO: 15047 - protein, 7 aa, synthetic construct
FSKSGWN

SEQ ID NO: 15048 - protein, 7 aa, synthetic construct
YAKPNFN

SEQ ID NO: 15049 - protein, 7 aa, synthetic construct
FARGNPN

SEQ ID NO: 15050 - protein, 7 aa, synthetic construct
YARPNIN

SEQ ID NO: 15051 - protein, 7 aa, synthetic construct
CVKTDRN

SEQ ID NO: 15052 - protein, 7 aa, synthetic construct
FARQNTN

SEQ ID NO: 15053 - protein, 7 aa, synthetic construct
YARFNMN

SEQ ID NO: 15054 - protein, 7 aa, synthetic construct
FSKQNAN

SEQ ID NO: 15055 - protein, 7 aa, synthetic construct
FSRVNFN

SEQ ID NO: 15056 - protein, 7 aa, synthetic construct
FSRKGEN

SEQ ID NO: 15057 - protein, 7 aa, synthetic construct
YAKDGRN

SEQ ID NO: 15058 - protein, 7 aa, synthetic construct
FSRHNTN

SEQ ID NO: 15059 - protein, 7 aa, synthetic construct
LSKQGSN

SEQ ID NO: 15060 - protein, 7 aa, synthetic construct
YARRNEN

SEQ ID NO: 15061 - protein, 7 aa, synthetic construct
LRGGADR

SEQ ID NO: 15062 - protein, 7 aa, synthetic construct
YSRYNNN

SEQ ID NO: 15063 - protein, 7 aa, synthetic construct
FSRGNHN

SEQ ID NO: 15064 - protein, 7 aa, synthetic construct
FARVGQN

SEQ ID NO: 15065 - protein, 7 aa, synthetic construct
TSNNVYH

SEQ ID NO: 15066 - protein, 7 aa, synthetic construct
YSKPGYN

SEQ ID NO: 15067 - protein, 7 aa, synthetic construct
FARANHN

SEQ ID NO: 15068 - protein, 7 aa, synthetic construct
FARYNQN

SEQ ID NO: 15069 - protein, 7 aa, synthetic construct
YAKMGKN

SEQ ID NO: 15070 - protein, 7 aa, synthetic construct
YAKMNYN

SEQ ID NO: 15071 - protein, 7 aa, synthetic construct
FARSNAN

SEQ ID NO: 15072 - protein, 7 aa, synthetic construct
FSKMNSN

SEQ ID NO: 15073 - protein, 7 aa, synthetic construct
FSRPGPN

SEQ ID NO: 15074 - protein, 7 aa, synthetic construct
LARHGDN

SEQ ID NO: 15075 - protein, 7 aa, synthetic construct
LSKYNDN

SEQ ID NO: 15076 - protein, 7 aa, synthetic construct
TNARSSY

SEQ ID NO: 15077 - protein, 7 aa, synthetic construct
YARYNAN

SEQ ID NO: 15078 - protein, 7 aa, synthetic construct
YSRGGGN

SEQ ID NO: 15079 - protein, 7 aa, synthetic construct
RYTGTPA

SEQ ID NO: 15080 - protein, 7 aa, synthetic construct
YSRDNRN

SEQ ID NO: 15081 - protein, 7 aa, synthetic construct
FAKLNMN

SEQ ID NO: 15082 - protein, 7 aa, synthetic construct
YARFNNN

SEQ ID NO: 15083 - protein, 7 aa, synthetic construct
NIPYSMP

SEQ ID NO: 15084 - protein, 7 aa, synthetic construct
FSKHGYN

SEQ ID NO: 15085 - protein, 7 aa, synthetic construct
FAKNGAN

SEQ ID NO: 15086 - protein, 7 aa, synthetic construct
FSKMGVN

SEQ ID NO: 15087 - protein, 7 aa, synthetic construct
YARINSN

SEQ ID NO: 15088 - protein, 7 aa, synthetic construct
FSKHGIN

SEQ ID NO: 15089 - protein, 7 aa, synthetic construct
SESTHGM

SEQ ID NO: 15090 - protein, 7 aa, synthetic construct
GASGSIY

SEQ ID NO: 15091 - protein, 7 aa, synthetic construct
YARINLN

SEQ ID NO: 15092 - protein, 7 aa, synthetic construct
LSKIGGN

SEQ ID NO: 15093 - protein, 7 aa, synthetic construct
FSKYGMN

SEQ ID NO: 15094 - protein, 7 aa, synthetic construct
FSRSNQN

SEQ ID NO: 15095 - protein, 7 aa, synthetic construct
VRSTSGI

SEQ ID NO: 15096 - protein, 7 aa, synthetic construct
FSRGNSN

SEQ ID NO: 15097 - protein, 7 aa, synthetic construct
FARIGTN

SEQ ID NO: 15098 - protein, 7 aa, synthetic construct
YSKRGEN

SEQ ID NO: 15099 - protein, 7 aa, synthetic construct
YAKHGTN

SEQ ID NO: 15100 - protein, 7 aa, synthetic construct
FARQNAN

SEQ ID NO: 15101 - protein, 7 aa, synthetic construct
YRNAVIG

SEQ ID NO: 15102 - protein, 7 aa, synthetic construct
YSKPGNN

SEQ ID NO: 15103 - protein, 7 aa, synthetic construct
FAKSNFN

SEQ ID NO: 15104 - protein, 7 aa, synthetic construct
FARHGQN

SEQ ID NO: 15105 - protein, 7 aa, synthetic construct
FARAGSN

SEQ ID NO: 15106 - protein, 7 aa, synthetic construct
FARVGSN

SEQ ID NO: 15107 - protein, 7 aa, synthetic construct
FSKTGQN

SEQ ID NO: 15108 - protein, 7 aa, synthetic construct
FSRTNMN

SEQ ID NO: 15109 - protein, 7 aa, synthetic construct
YTYGIKA

SEQ ID NO: 15110 - protein, 7 aa, synthetic construct
YARMNSN

SEQ ID NO: 15111 - protein, 7 aa, synthetic construct
FARMNLN

SEQ ID NO: 15112 - protein, 7 aa, synthetic construct
MTGHSLY

SEQ ID NO: 15113 - protein, 7 aa, synthetic construct
FSRINPN

SEQ ID NO: 15114 - protein, 7 aa, synthetic construct
FSKYNVN

SEQ ID NO: 15115 - protein, 7 aa, synthetic construct
YARLNGN

SEQ ID NO: 15116 - protein, 7 aa, synthetic construct
GIVTVRH

SEQ ID NO: 15117 - protein, 7 aa, synthetic construct
FAKAGAN

SEQ ID NO: 15118 - protein, 7 aa, synthetic construct
YAKQNDN

SEQ ID NO: 15119 - protein, 7 aa, synthetic construct
FARQNHN

SEQ ID NO: 15120 - protein, 7 aa, synthetic construct
FARINNN

SEQ ID NO: 15121 - protein, 7 aa, synthetic construct
FARVGTN

SEQ ID NO: 15122 - protein, 7 aa, synthetic construct
FARYGNN

SEQ ID NO: 15123 - protein, 7 aa, synthetic construct
YAKINNN

SEQ ID NO: 15124 - protein, 7 aa, synthetic construct
FSKQNVN

SEQ ID NO: 15125 - protein, 7 aa, synthetic construct
FAKRGEN

SEQ ID NO: 15126 - protein, 7 aa, synthetic construct
YAKYNNN

SEQ ID NO: 15127 - protein, 7 aa, synthetic construct
FSKFNHN

SEQ ID NO: 15128 - protein, 7 aa, synthetic construct
FAKQNWN

SEQ ID NO: 15129 - protein, 7 aa, synthetic construct
FSKSGTN

SEQ ID NO: 15130 - protein, 7 aa, synthetic construct
SRTGLNA

SEQ ID NO: 15131 - protein, 7 aa, synthetic construct
YSRFNVN

SEQ ID NO: 15132 - protein, 7 aa, synthetic construct
FSRHGLN

SEQ ID NO: 15133 - protein, 7 aa, synthetic construct
YARSNGN

SEQ ID NO: 15134 - protein, 7 aa, synthetic construct
YARINAN

SEQ ID NO: 15135 - protein, 7 aa, synthetic construct
FARLGQN

SEQ ID NO: 15136 - protein, 7 aa, synthetic construct
FSRGGSN

SEQ ID NO: 15137 - protein, 7 aa, synthetic construct
FSRYGVN

SEQ ID NO: 15138 - protein, 7 aa, synthetic construct
YSKINKN

SEQ ID NO: 15139 - protein, 7 aa, synthetic construct
FARYGVN

SEQ ID NO: 15140 - protein, 7 aa, synthetic construct
YARINVN

SEQ ID NO: 15141 - protein, 7 aa, synthetic construct
YAKWNSN

SEQ ID NO: 15142 - protein, 7 aa, synthetic construct
VYDRKGT

SEQ ID NO: 15143 - protein, 7 aa, synthetic construct
FSRGNMN

SEQ ID NO: 15144 - protein, 7 aa, synthetic construct
FARQNQN

SEQ ID NO: 15145 - protein, 7 aa, synthetic construct
FSKYNSN

SEQ ID NO: 15146 - protein, 7 aa, synthetic construct
YARVNPN

SEQ ID NO: 15147 - protein, 7 aa, synthetic construct
YARHGNN

SEQ ID NO: 15148 - protein, 7 aa, synthetic construct
YSRYGGN

SEQ ID NO: 15149 - protein, 7 aa, synthetic construct
YAKMNKN

SEQ ID NO: 15150 - protein, 7 aa, synthetic construct
FSRTNFN

SEQ ID NO: 15151 - protein, 7 aa, synthetic construct
VGRWGSD

SEQ ID NO: 15152 - protein, 7 aa, synthetic construct
FSKYNGN

SEQ ID NO: 15153 - protein, 7 aa, synthetic construct
QYGTAKF

SEQ ID NO: 15154 - protein, 7 aa, synthetic construct
FAKYNHN

SEQ ID NO: 15155 - protein, 7 aa, synthetic construct
YKSNSNY

SEQ ID NO: 15156 - protein, 7 aa, synthetic construct
FAKSGEN

SEQ ID NO: 15157 - protein, 7 aa, synthetic construct
FAKHGLN

SEQ ID NO: 15158 - protein, 7 aa, synthetic construct
YARVNLN

SEQ ID NO: 15159 - protein, 7 aa, synthetic construct
CKSGGQT

SEQ ID NO: 15160 - protein, 7 aa, synthetic construct
TRTGVMA

SEQ ID NO: 15161 - protein, 7 aa, synthetic construct
FARHNQN

SEQ ID NO: 15162 - protein, 7 aa, synthetic construct
YARHNAN

SEQ ID NO: 15163 - protein, 7 aa, synthetic construct
YSKLATN

SEQ ID NO: 15164 - protein, 7 aa, synthetic construct
FARGNQN

SEQ ID NO: 15165 - protein, 7 aa, synthetic construct
FSRGGNN

SEQ ID NO: 15166 - protein, 7 aa, synthetic construct
FSKVGGN

SEQ ID NO: 15167 - protein, 7 aa, synthetic construct
YAKMNPN

SEQ ID NO: 15168 - protein, 7 aa, synthetic construct
FSRDNRN

SEQ ID NO: 15169 - protein, 7 aa, synthetic construct
YARDNRN

SEQ ID NO: 15170 - protein, 7 aa, synthetic construct
FARINHN

SEQ ID NO: 15171 - protein, 7 aa, synthetic construct
VKYTGSN

SEQ ID NO: 15172 - protein, 7 aa, synthetic construct
TQYNTYH

SEQ ID NO: 15173 - protein, 7 aa, synthetic construct
YARPGGN

SEQ ID NO: 15174 - protein, 7 aa, synthetic construct
VRQLSAG

SEQ ID NO: 15175 - protein, 7 aa, synthetic construct
NVRRNGE

SEQ ID NO: 15176 - protein, 7 aa, synthetic construct
FSRSNNN

SEQ ID NO: 15177 - protein, 7 aa, synthetic construct
FARHGHN

SEQ ID NO: 15178 - protein, 7 aa, synthetic construct
FSKYGVN

SEQ ID NO: 15179 - protein, 7 aa, synthetic construct
FSKHGAN

SEQ ID NO: 15180 - protein, 7 aa, synthetic construct
YAKWNTN

SEQ ID NO: 15181 - protein, 7 aa, synthetic construct
FAKANHN

SEQ ID NO: 15182 - protein, 7 aa, synthetic construct
FARLNSN

SEQ ID NO: 15183 - protein, 7 aa, synthetic construct
YAKWGSN

SEQ ID NO: 15184 - protein, 7 aa, synthetic construct
FSKHNPN

SEQ ID NO: 15185 - protein, 7 aa, synthetic construct
MHKLQVA

SEQ ID NO: 15186 - protein, 7 aa, synthetic construct
FSKGGHN

SEQ ID NO: 15187 - protein, 7 aa, synthetic construct
FSRFNAN

SEQ ID NO: 15188 - protein, 7 aa, synthetic construct
IPSKSAG

SEQ ID NO: 15189 - protein, 7 aa, synthetic construct
YAKWNNN

SEQ ID NO: 15190 - protein, 7 aa, synthetic construct
VSASTKW

SEQ ID NO: 15191 - protein, 7 aa, synthetic construct
YSREGNN

SEQ ID NO: 15192 - protein, 7 aa, synthetic construct
FARQNFN

SEQ ID NO: 15193 - protein, 7 aa, synthetic construct
FAKQNMN

SEQ ID NO: 15194 - protein, 7 aa, synthetic construct
RASGVSY

SEQ ID NO: 15195 - protein, 7 aa, synthetic construct
FSKGGWN

SEQ ID NO: 15196 - protein, 7 aa, synthetic construct
TRHGGSP

SEQ ID NO: 15197 - protein, 7 aa, synthetic construct
RDRQSTY

SEQ ID NO: 15198 - protein, 7 aa, synthetic construct
YARVNVN

SEQ ID NO: 15199 - protein, 7 aa, synthetic construct
MNAKSHY

SEQ ID NO: 15200 - protein, 7 aa, synthetic construct
FSKINNN

SEQ ID NO: 15201 - protein, 7 aa, synthetic construct
FSKNGYN

SEQ ID NO: 15202 - protein, 7 aa, synthetic construct
FAKANFN

SEQ ID NO: 15203 - protein, 7 aa, synthetic construct
HAGDRWI

SEQ ID NO: 15204 - protein, 7 aa, synthetic construct
FSRIGYN

SEQ ID NO: 15205 - protein, 7 aa, synthetic construct
FAKYNAN

SEQ ID NO: 15206 - protein, 7 aa, synthetic construct
FSRINQN

SEQ ID NO: 15207 - protein, 7 aa, synthetic construct
YARVNAN

SEQ ID NO: 15208 - protein, 7 aa, synthetic construct
YSRPGFN

SEQ ID NO: 15209 - protein, 7 aa, synthetic construct
SRGSGYA

SEQ ID NO: 15210 - protein, 7 aa, synthetic construct
NLRGNGG

SEQ ID NO: 15211 - protein, 7 aa, synthetic construct
FAKYGAN

SEQ ID NO: 15212 - protein, 7 aa, synthetic construct
FSKFNMN

SEQ ID NO: 15213 - protein, 7 aa, synthetic construct
FSRHGVN

SEQ ID NO: 15214 - protein, 7 aa, synthetic construct
FSKTNFN

SEQ ID NO: 15215 - protein, 7 aa, synthetic construct
YSKYNPN

SEQ ID NO: 15216 - protein, 7 aa, synthetic construct
FSKLGTN

SEQ ID NO: 15217 - protein, 7 aa, synthetic construct
FARINTN

SEQ ID NO: 15218 - protein, 7 aa, synthetic construct
YARHNVN

SEQ ID NO: 15219 - protein, 7 aa, synthetic construct
FSRGGMN

SEQ ID NO: 15220 - protein, 7 aa, synthetic construct
YVRNIAS

SEQ ID NO: 15221 - protein, 7 aa, synthetic construct
TRSGASS

SEQ ID NO: 15222 - protein, 7 aa, synthetic construct
FARQNLN

SEQ ID NO: 15223 - protein, 7 aa, synthetic construct
FSKSNMN

SEQ ID NO: 15224 - protein, 7 aa, synthetic construct
SGSPTKW

SEQ ID NO: 15225 - protein, 7 aa, synthetic construct
FARLGAN

SEQ ID NO: 15226 - protein, 7 aa, synthetic construct
NSSGARY

SEQ ID NO: 15227 - protein, 7 aa, synthetic construct
FSKINHN

SEQ ID NO: 15228 - protein, 7 aa, synthetic construct
FARSNNN

SEQ ID NO: 15229 - protein, 7 aa, synthetic construct
FSKMGIN

SEQ ID NO: 15230 - protein, 7 aa, synthetic construct
FSKFNSN

SEQ ID NO: 15231 - protein, 7 aa, synthetic construct
YMRGSLN

SEQ ID NO: 15232 - protein, 7 aa, synthetic construct
FSKHNSN

SEQ ID NO: 15233 - protein, 7 aa, synthetic construct
YARFNAN

SEQ ID NO: 15234 - protein, 7 aa, synthetic construct
YSRVSGL

SEQ ID NO: 15235 - protein, 7 aa, synthetic construct
FSRGGHN

SEQ ID NO: 15236 - protein, 7 aa, synthetic construct
FAKYGMN

SEQ ID NO: 15237 - protein, 7 aa, synthetic construct
FAKHGVN

SEQ ID NO: 15238 - protein, 7 aa, synthetic construct
FRMGGAG

SEQ ID NO: 15239 - protein, 7 aa, synthetic construct
QALSGKN

SEQ ID NO: 15240 - protein, 7 aa, synthetic construct
ISNAVKY

SEQ ID NO: 15241 - protein, 7 aa, synthetic construct
FAKYGTN

SEQ ID NO: 15242 - protein, 7 aa, synthetic construct
FARNNHN

SEQ ID NO: 15243 - protein, 7 aa, synthetic construct
FSRANGN

SEQ ID NO: 15244 - protein, 7 aa, synthetic construct
TKGMSSY

SEQ ID NO: 15245 - protein, 7 aa, synthetic construct
YAKHNHN

SEQ ID NO: 15246 - protein, 7 aa, synthetic construct
FAKQGTN

SEQ ID NO: 15247 - protein, 7 aa, synthetic construct
FARMGQN

SEQ ID NO: 15248 - protein, 7 aa, synthetic construct
LPKGNYG

SEQ ID NO: 15249 - protein, 7 aa, synthetic construct
FSKYGAN

SEQ ID NO: 15250 - protein, 7 aa, synthetic construct
YVKSAMS

SEQ ID NO: 15251 - protein, 7 aa, synthetic construct
FAKHGNN

SEQ ID NO: 15252 - protein, 7 aa, synthetic construct
TSTGRMA

SEQ ID NO: 15253 - protein, 7 aa, synthetic construct
YARPNLN

SEQ ID NO: 15254 - protein, 7 aa, synthetic construct
LARVAKD

SEQ ID NO: 15255 - protein, 7 aa, synthetic construct
FAKWNQN

SEQ ID NO: 15256 - protein, 7 aa, synthetic construct
FSKYNMN

SEQ ID NO: 15257 - protein, 7 aa, synthetic construct
FARANIN

SEQ ID NO: 15258 - protein, 7 aa, synthetic construct
LPRSGNV

SEQ ID NO: 15259 - protein, 7 aa, synthetic construct
FARVNHN

SEQ ID NO: 15260 - protein, 7 aa, synthetic construct
YVRNGQG

SEQ ID NO: 15261 - protein, 7 aa, synthetic construct
FSRHNAN

SEQ ID NO: 15262 - protein, 7 aa, synthetic construct
FSRFGGN

SEQ ID NO: 15263 - protein, 7 aa, synthetic construct
FARNNAN

SEQ ID NO: 15264 - protein, 7 aa, synthetic construct
RNGTNGY

SEQ ID NO: 15265 - protein, 7 aa, synthetic construct
FSKHGVN

SEQ ID NO: 15266 - protein, 7 aa, synthetic construct
FARLNGN

SEQ ID NO: 15267 - protein, 7 aa, synthetic construct
FAKYGHN

SEQ ID NO: 15268 - protein, 7 aa, synthetic construct
TKYGHTA

SEQ ID NO: 15269 - protein, 7 aa, synthetic construct
FAKRGDN

SEQ ID NO: 15270 - protein, 7 aa, synthetic construct
RSHNTVV

SEQ ID NO: 15271 - protein, 7 aa, synthetic construct
FAKMNNN

SEQ ID NO: 15272 - protein, 7 aa, synthetic construct
YARLGGN

SEQ ID NO: 15273 - protein, 7 aa, synthetic construct
IIMVKNA

SEQ ID NO: 15274 - protein, 7 aa, synthetic construct
YARHNQN

SEQ ID NO: 15275 - protein, 7 aa, synthetic construct
LHTRTYD

SEQ ID NO: 15276 - protein, 7 aa, synthetic construct
FAKHGAN

SEQ ID NO: 15277 - protein, 7 aa, synthetic construct
YKPFTTN

SEQ ID NO: 15278 - protein, 7 aa, synthetic construct
FSRMGQN

SEQ ID NO: 15279 - protein, 7 aa, synthetic construct
YAKYNTN

SEQ ID NO: 15280 - protein, 7 aa, synthetic construct
FSKQGIN

SEQ ID NO: 15281 - protein, 7 aa, synthetic construct
YAKWNQN

SEQ ID NO: 15282 - protein, 7 aa, synthetic construct
FSRPGYN

SEQ ID NO: 15283 - protein, 7 aa, synthetic construct
FSRGNFN

SEQ ID NO: 15284 - protein, 7 aa, synthetic construct
VNMARAL

SEQ ID NO: 15285 - protein, 7 aa, synthetic construct
FSRSGGN

SEQ ID NO: 15286 - protein, 7 aa, synthetic construct
TGAGMKY

SEQ ID NO: 15287 - protein, 7 aa, synthetic construct
FARHNSN

SEQ ID NO: 15288 - protein, 7 aa, synthetic construct
FARPNIN

SEQ ID NO: 15289 - protein, 7 aa, synthetic construct
FAKPNNN

SEQ ID NO: 15290 - protein, 7 aa, synthetic construct
RQMDTYG

SEQ ID NO: 15291 - protein, 7 aa, synthetic construct
TARGVSA

SEQ ID NO: 15292 - protein, 7 aa, synthetic construct
FVRTINN

SEQ ID NO: 15293 - protein, 7 aa, synthetic construct
FARIGGN

SEQ ID NO: 15294 - protein, 7 aa, synthetic construct
FSKQGVN

SEQ ID NO: 15295 - protein, 7 aa, synthetic construct
FARANFN

SEQ ID NO: 15296 - protein, 7 aa, synthetic construct
RANHSGG

SEQ ID NO: 15297 - protein, 7 aa, synthetic construct
FARGNDN

SEQ ID NO: 15298 - protein, 7 aa, synthetic construct
FARYGAN

SEQ ID NO: 15299 - protein, 7 aa, synthetic construct
YAKWNGN

SEQ ID NO: 15300 - protein, 7 aa, synthetic construct
FARLNHN

SEQ ID NO: 15301 - protein, 7 aa, synthetic construct
FARLGLN

SEQ ID NO: 15302 - protein, 7 aa, synthetic construct
YAKWGAN

SEQ ID NO: 15303 - protein, 7 aa, synthetic construct
FSRHGQN

SEQ ID NO: 15304 - protein, 7 aa, synthetic construct
FSRHGAN

SEQ ID NO: 15305 - protein, 7 aa, synthetic construct
YSRENRN

SEQ ID NO: 15306 - protein, 7 aa, synthetic construct
FAKQGAN

SEQ ID NO: 15307 - protein, 7 aa, synthetic construct
FSKRGEN

SEQ ID NO: 15308 - protein, 7 aa, synthetic construct
YAREGAN

SEQ ID NO: 15309 - protein, 7 aa, synthetic construct
FSKFNAN

SEQ ID NO: 15310 - protein, 7 aa, synthetic construct
FARKGEN

SEQ ID NO: 15311 - protein, 7 aa, synthetic construct
NVPSSMY

SEQ ID NO: 15312 - protein, 7 aa, synthetic construct
GLKYTPH

SEQ ID NO: 15313 - protein, 7 aa, synthetic construct
FSRQGGN

SEQ ID NO: 15314 - protein, 7 aa, synthetic construct
FSKYGLN

SEQ ID NO: 15315 - protein, 7 aa, synthetic construct
FSRHGMN

SEQ ID NO: 15316 - protein, 7 aa, synthetic construct
FARLGGN

SEQ ID NO: 15317 - protein, 7 aa, synthetic construct
FAKYGSN

SEQ ID NO: 15318 - protein, 7 aa, synthetic construct
WSKLNAI

SEQ ID NO: 15319 - protein, 7 aa, synthetic construct
FSKNGMN

SEQ ID NO: 15320 - protein, 7 aa, synthetic construct
FARINAN

SEQ ID NO: 15321 - protein, 7 aa, synthetic construct
SGNGYVR

SEQ ID NO: 15322 - protein, 7 aa, synthetic construct
FAKYGIN

SEQ ID NO: 15323 - protein, 7 aa, synthetic construct
FARMNMN

SEQ ID NO: 15324 - protein, 7 aa, synthetic construct
FARKGDN

SEQ ID NO: 15325 - protein, 7 aa, synthetic construct
RNSSSTY

SEQ ID NO: 15326 - protein, 7 aa, synthetic construct
YSKYGGN

SEQ ID NO: 15327 - protein, 7 aa, synthetic construct
FARINSN

SEQ ID NO: 15328 - protein, 7 aa, synthetic construct
FSKYNTN

SEQ ID NO: 15329 - protein, 7 aa, synthetic construct
YAKYNSN

SEQ ID NO: 15330 - protein, 7 aa, synthetic construct
RRADSGG

SEQ ID NO: 15331 - protein, 7 aa, synthetic construct
FARQNSN

SEQ ID NO: 15332 - protein, 7 aa, synthetic construct
YSKGGGN

SEQ ID NO: 15333 - protein, 7 aa, synthetic construct
YARDGFN

SEQ ID NO: 15334 - protein, 7 aa, synthetic construct
FARPGNN

SEQ ID NO: 15335 - protein, 7 aa, synthetic construct
YARINHN

SEQ ID NO: 15336 - protein, 7 aa, synthetic construct
FAREGKN

SEQ ID NO: 15337 - protein, 7 aa, synthetic construct
FRNGTGA

SEQ ID NO: 15338 - protein, 7 aa, synthetic construct
RGSNLYP

SEQ ID NO: 15339 - protein, 7 aa, synthetic construct
YARVNTN

SEQ ID NO: 15340 - protein, 7 aa, synthetic construct
GNQTSRN

SEQ ID NO: 15341 - protein, 7 aa, synthetic construct
FSRGNQN

SEQ ID NO: 15342 - protein, 7 aa, synthetic construct
YSKPGAN

SEQ ID NO: 15343 - protein, 7 aa, synthetic construct
FSKYGQN

SEQ ID NO: 15344 - protein, 7 aa, synthetic construct
YSKPGIN

SEQ ID NO: 15345 - protein, 7 aa, synthetic construct
YAKPNHN

SEQ ID NO: 15346 - protein, 7 aa, synthetic construct
TRTHDKL

SEQ ID NO: 15347 - protein, 7 aa, synthetic construct
FARRNEN

SEQ ID NO: 15348 - protein, 7 aa, synthetic construct
FSRRNEN

SEQ ID NO: 15349 - protein, 7 aa, synthetic construct
YSRYGNN

SEQ ID NO: 15350 - protein, 7 aa, synthetic construct
FAKANWN

SEQ ID NO: 15351 - protein, 7 aa, synthetic construct
YAKINKN

SEQ ID NO: 15352 - protein, 7 aa, synthetic construct
YSKIGKN

SEQ ID NO: 15353 - protein, 7 aa, synthetic construct
YAKWGGN

SEQ ID NO: 15354 - protein, 7 aa, synthetic construct
YSKWGNN

SEQ ID NO: 15355 - protein, 7 aa, synthetic construct
YAKYNAN

SEQ ID NO: 15356 - protein, 7 aa, synthetic construct
KSGLSSY

SEQ ID NO: 15357 - protein, 7 aa, synthetic construct
FARMNQN

SEQ ID NO: 15358 - protein, 7 aa, synthetic construct
FAKNGSN

SEQ ID NO: 15359 - protein, 7 aa, synthetic construct
IPTMKYA

SEQ ID NO: 15360 - protein, 7 aa, synthetic construct
SRTGREA

SEQ ID NO: 15361 - protein, 7 aa, synthetic construct
FARNNVN

SEQ ID NO: 15362 - protein, 7 aa, synthetic construct
YARQNAM

SEQ ID NO: 15363 - protein, 7 aa, synthetic construct
YSKFNGN

SEQ ID NO: 15364 - protein, 7 aa, synthetic construct
ISGYGGG

SEQ ID NO: 15365 - protein, 7 aa, synthetic construct
FAKFNPN

SEQ ID NO: 15366 - protein, 7 aa, synthetic construct
KSEYGPF

SEQ ID NO: 15367 - protein, 7 aa, synthetic construct
YARANGN

SEQ ID NO: 15368 - protein, 7 aa, synthetic construct
LSYSGRD

SEQ ID NO: 15369 - protein, 7 aa, synthetic construct
YSRPNQN

SEQ ID NO: 15370 - protein, 7 aa, synthetic construct
YYSNTKV

SEQ ID NO: 15371 - protein, 7 aa, synthetic construct
FAKSNWN

SEQ ID NO: 15372 - protein, 7 aa, synthetic construct
FARSNPN

SEQ ID NO: 15373 - protein, 7 aa, synthetic construct
YSRSNIQ

SEQ ID NO: 15374 - protein, 7 aa, synthetic construct
EIRTGHL

SEQ ID NO: 15375 - protein, 7 aa, synthetic construct
EKGMGRL

SEQ ID NO: 15376 - protein, 7 aa, synthetic construct
LSRAAGI

SEQ ID NO: 15377 - protein, 7 aa, synthetic construct
VDKKYYA

SEQ ID NO: 15378 - protein, 7 aa, synthetic construct
RNLPMLN

SEQ ID NO: 15379 - protein, 7 aa, synthetic construct
YAKPGQN

SEQ ID NO: 15380 - protein, 7 aa, synthetic construct
FARANTN

SEQ ID NO: 15381 - protein, 7 aa, synthetic construct
LRNGFSP

SEQ ID NO: 15382 - protein, 7 aa, synthetic construct
FARNNTN

SEQ ID NO: 15383 - protein, 7 aa, synthetic construct
LAGTSRF

SEQ ID NO: 15384 - protein, 7 aa, synthetic construct
FARINVN

SEQ ID NO: 15385 - protein, 7 aa, synthetic construct
VLGRGVN

SEQ ID NO: 15386 - protein, 7 aa, synthetic construct
LRGDGYG

SEQ ID NO: 15387 - protein, 7 aa, synthetic construct
FARANMN

SEQ ID NO: 15388 - protein, 7 aa, synthetic construct
FSRHGGN

SEQ ID NO: 15389 - protein, 7 aa, synthetic construct
RGEWSSP

SEQ ID NO: 15390 - protein, 7 aa, synthetic construct
FSKANEN

SEQ ID NO: 15391 - protein, 7 aa, synthetic construct
QPMRGGG

SEQ ID NO: 15392 - protein, 7 aa, synthetic construct
YGPQPKL

SEQ ID NO: 15393 - protein, 7 aa, synthetic construct
FSRHGTN

SEQ ID NO: 15394 - protein, 7 aa, synthetic construct
YSKDGWN

SEQ ID NO: 15395 - protein, 7 aa, synthetic construct
YSKYGFN

SEQ ID NO: 15396 - protein, 7 aa, synthetic construct
FAKYNSN

SEQ ID NO: 15397 - protein, 7 aa, synthetic construct
FAKYNMN

SEQ ID NO: 15398 - protein, 7 aa, synthetic construct
DVRLRGQ

SEQ ID NO: 15399 - protein, 7 aa, synthetic construct
FSKYGSN

SEQ ID NO: 15400 - protein, 7 aa, synthetic construct
WLKSTPN

SEQ ID NO: 15401 - protein, 7 aa, synthetic construct
NMFGSGM

SEQ ID NO: 15402 - protein, 7 aa, synthetic construct
NHGYMRD

SEQ ID NO: 15403 - protein, 7 aa, synthetic construct
FAKYNLN

SEQ ID NO: 15404 - protein, 7 aa, synthetic construct
YAKKNDN

SEQ ID NO: 15405 - protein, 7 aa, synthetic construct
YAKYNQN

SEQ ID NO: 15406 - protein, 7 aa, synthetic construct
FSRANPN

SEQ ID NO: 15407 - protein, 7 aa, synthetic construct
RGSNSMP

SEQ ID NO: 15408 - protein, 7 aa, synthetic construct
YKVSSTY

SEQ ID NO: 15409 - protein, 7 aa, synthetic construct
NSSSGPR

SEQ ID NO: 15410 - protein, 7 aa, synthetic construct
FARMNVN

SEQ ID NO: 15411 - protein, 7 aa, synthetic construct
LSRSGTD

SEQ ID NO: 15412 - protein, 7 aa, synthetic construct
FARYNAN

SEQ ID NO: 15413 - protein, 7 aa, synthetic construct
YAKFNQN

SEQ ID NO: 15414 - protein, 7 aa, synthetic construct
MKNGGAA

SEQ ID NO: 15415 - protein, 7 aa, synthetic construct
MDYGWSD

SEQ ID NO: 15416 - protein, 7 aa, synthetic construct
FSRGGTN

SEQ ID NO: 15417 - protein, 7 aa, synthetic construct
FARHGGN

SEQ ID NO: 15418 - protein, 7 aa, synthetic construct
FARIGDN

SEQ ID NO: 15419 - protein, 7 aa, synthetic construct
YSAGKIN

SEQ ID NO: 15420 - protein, 7 aa, synthetic construct
YARFNTN

SEQ ID NO: 15421 - protein, 7 aa, synthetic construct
YARYNTN

SEQ ID NO: 15422 - protein, 7 aa, synthetic construct
FSRPGHN

SEQ ID NO: 15423 - protein, 7 aa, synthetic construct
SYAVSRD

SEQ ID NO: 15424 - protein, 7 aa, synthetic construct
YARYNNN

SEQ ID NO: 15425 - protein, 7 aa, synthetic construct
YSRFNGN

SEQ ID NO: 15426 - protein, 7 aa, synthetic construct
RGTTGAG

SEQ ID NO: 15427 - protein, 7 aa, synthetic construct
RSHASAG

SEQ ID NO: 15428 - protein, 7 aa, synthetic construct
FAKYGVN

SEQ ID NO: 15429 - protein, 7 aa, synthetic construct
GMGSTKY

SEQ ID NO: 15430 - protein, 7 aa, synthetic construct
YAKFNVN

SEQ ID NO: 15431 - protein, 7 aa, synthetic construct
YMKSGPN

SEQ ID NO: 15432 - protein, 7 aa, synthetic construct
RNSGSVF

SEQ ID NO: 15433 - protein, 7 aa, synthetic construct
TENTVRK

SEQ ID NO: 15434 - protein, 7 aa, synthetic construct
YARFNVN

SEQ ID NO: 15435 - protein, 7 aa, synthetic construct
YARPNAN

SEQ ID NO: 15436 - protein, 7 aa, synthetic construct
NYNRGAG

SEQ ID NO: 15437 - protein, 7 aa, synthetic construct
YMKHSPN

SEQ ID NO: 15438 - protein, 7 aa, synthetic construct
FAKIGAN

SEQ ID NO: 15439 - protein, 7 aa, synthetic construct
FARPNNN

SEQ ID NO: 15440 - protein, 7 aa, synthetic construct
YARINQN

SEQ ID NO: 15441 - protein, 7 aa, synthetic construct
FARNNSN

SEQ ID NO: 15442 - protein, 7 aa, synthetic construct
WKGGTSN

SEQ ID NO: 15443 - protein, 7 aa, synthetic construct
YAKRNDN

SEQ ID NO: 15444 - protein, 7 aa, synthetic construct
FSRMNPN

SEQ ID NO: 15445 - protein, 7 aa, synthetic construct
NSSDGPR

SEQ ID NO: 15446 - protein, 7 aa, synthetic construct
YAKWGNN

SEQ ID NO: 15447 - protein, 7 aa, synthetic construct
FAKFNHN

SEQ ID NO: 15448 - protein, 7 aa, synthetic construct
FSRMGGN

SEQ ID NO: 15449 - protein, 7 aa, synthetic construct
FARMNAN

SEQ ID NO: 15450 - protein, 7 aa, synthetic construct
YYAKVLP

SEQ ID NO: 15451 - protein, 7 aa, synthetic construct
FSKFNQN

SEQ ID NO: 15452 - protein, 7 aa, synthetic construct
FARLNAN

SEQ ID NO: 15453 - protein, 7 aa, synthetic construct
FARVGGN

SEQ ID NO: 15454 - protein, 7 aa, synthetic construct
YAKFNSN

SEQ ID NO: 15455 - protein, 7 aa, synthetic construct
TRGGGSG

SEQ ID NO: 15456 - protein, 7 aa, synthetic construct
FARNNFN

SEQ ID NO: 15457 - protein, 7 aa, synthetic construct
SAPPTKF

SEQ ID NO: 15458 - protein, 7 aa, synthetic construct
WNQFTGN

SEQ ID NO: 15459 - protein, 7 aa, synthetic construct
DANHNRN

SEQ ID NO: 15460 - protein, 7 aa, synthetic construct
FSRLGDN

SEQ ID NO: 15461 - protein, 7 aa, synthetic construct
YTKGTVN

SEQ ID NO: 15462 - protein, 7 aa, synthetic construct
YAKMGTN

SEQ ID NO: 15463 - protein, 7 aa, synthetic construct
FARHNGN

SEQ ID NO: 15464 - protein, 7 aa, synthetic construct
FARVNQN

SEQ ID NO: 15465 - protein, 7 aa, synthetic construct
THALVNA

SEQ ID NO: 15466 - protein, 7 aa, synthetic construct
FAKFNVN

SEQ ID NO: 15467 - protein, 7 aa, synthetic construct
YMKREIS

SEQ ID NO: 15468 - protein, 7 aa, synthetic construct
TPPTFKV

SEQ ID NO: 15469 - protein, 7 aa, synthetic construct
FAKYGNN

SEQ ID NO: 15470 - protein, 7 aa, synthetic construct
YTRYGLD

SEQ ID NO: 15471 - protein, 7 aa, synthetic construct
YARVNNN

SEQ ID NO: 15472 - protein, 7 aa, synthetic construct
TPTGRPA

SEQ ID NO: 15473 - protein, 7 aa, synthetic construct
FSKYGNN

SEQ ID NO: 15474 - protein, 7 aa, synthetic construct
FAKHGQN

SEQ ID NO: 15475 - protein, 7 aa, synthetic construct
WRGNGVN

SEQ ID NO: 15476 - protein, 7 aa, synthetic construct
YAKFNHN

SEQ ID NO: 15477 - protein, 7 aa, synthetic construct
FSKQGWN

SEQ ID NO: 15478 - protein, 7 aa, synthetic construct
FSKFNVN

SEQ ID NO: 15479 - protein, 7 aa, synthetic construct
FSKYGGN

SEQ ID NO: 15480 - protein, 7 aa, synthetic construct
YSKFGPN

SEQ ID NO: 15481 - protein, 7 aa, synthetic construct
FSKYNLN

SEQ ID NO: 15482 - protein, 7 aa, synthetic construct
FAKYNTN

SEQ ID NO: 15483 - protein, 7 aa, synthetic construct
GNRNYSE

SEQ ID NO: 15484 - protein, 7 aa, synthetic construct
FARMNPN

SEQ ID NO: 15485 - protein, 7 aa, synthetic construct
YAKVSSN

SEQ ID NO: 15486 - protein, 7 aa, synthetic construct
FSKGGSN

SEQ ID NO: 15487 - protein, 7 aa, synthetic construct
FAKYGLN

SEQ ID NO: 15488 - protein, 7 aa, synthetic construct
FARMNTN

SEQ ID NO: 15489 - protein, 7 aa, synthetic construct
FAKAGSN

SEQ ID NO: 15490 - protein, 7 aa, synthetic construct
YARVNSN

SEQ ID NO: 15491 - protein, 7 aa, synthetic construct
YARHGPN

SEQ ID NO: 15492 - protein, 7 aa, synthetic construct
IVHLKNS

SEQ ID NO: 15493 - protein, 7 aa, synthetic construct
GRANHSG

SEQ ID NO: 15494 - protein, 7 aa, synthetic construct
FSKNNFN

SEQ ID NO: 15495 - protein, 7 aa, synthetic construct
YAKYNVN

SEQ ID NO: 15496 - protein, 7 aa, synthetic construct
FARVGDN

SEQ ID NO: 15497 - protein, 7 aa, synthetic construct
FSRPNPN

SEQ ID NO: 15498 - protein, 7 aa, synthetic construct
FAKYNVN

SEQ ID NO: 15499 - protein, 7 aa, synthetic construct
NNRGTSE

SEQ ID NO: 15500 - protein, 7 aa, synthetic construct
HRSGGYD

SEQ ID NO: 15501 - protein, 7 aa, synthetic construct
FARHNVN

SEQ ID NO: 15502 - protein, 7 aa, synthetic construct
YARHNDN

SEQ ID NO: 15503 - protein, 7 aa, synthetic construct
TLTGRNS

SEQ ID NO: 15504 - protein, 7 aa, synthetic construct
FAKMGSN

SEQ ID NO: 15505 - protein, 7 aa, synthetic construct
FARVNSN

SEQ ID NO: 15506 - protein, 7 aa, synthetic construct
VYRPVTN

SEQ ID NO: 15507 - protein, 7 aa, synthetic construct
FSRNNQN

SEQ ID NO: 15508 - protein, 7 aa, synthetic construct
MKSYGVG

SEQ ID NO: 15509 - protein, 7 aa, synthetic construct
FSKYGIN

SEQ ID NO: 15510 - protein, 7 aa, synthetic construct
FARANQN

SEQ ID NO: 15511 - protein, 7 aa, synthetic construct
FARHGSN

SEQ ID NO: 15512 - protein, 7 aa, synthetic construct
RSNGSGP

SEQ ID NO: 15513 - protein, 7 aa, synthetic construct
NNSRGSY

SEQ ID NO: 15514 - protein, 7 aa, synthetic construct
YTKLTGN

SEQ ID NO: 15515 - protein, 7 aa, synthetic construct
FAKHNQN

SEQ ID NO: 15516 - protein, 7 aa, synthetic construct
YSRFNSN

SEQ ID NO: 15517 - protein, 7 aa, synthetic construct
FSKKGDN

SEQ ID NO: 15518 - protein, 7 aa, synthetic construct
YARPNQN

SEQ ID NO: 15519 - protein, 7 aa, synthetic construct
FARVNYN

SEQ ID NO: 15520 - protein, 7 aa, synthetic construct
RTEYQVG

SEQ ID NO: 15521 - protein, 7 aa, synthetic construct
FARYNNN

SEQ ID NO: 15522 - protein, 7 aa, synthetic construct
FSRYNGN

SEQ ID NO: 15523 - protein, 7 aa, synthetic construct
FARFGGN

SEQ ID NO: 15524 - protein, 7 aa, synthetic construct
FSKENCN

SEQ ID NO: 15525 - protein, 7 aa, synthetic construct
DSGYNRN

SEQ ID NO: 15526 - protein, 7 aa, synthetic construct
FAKIGVN

SEQ ID NO: 15527 - protein, 7 aa, synthetic construct
YARPNGN

SEQ ID NO: 15528 - protein, 7 aa, synthetic construct
NRSGTSA

SEQ ID NO: 15529 - protein, 7 aa, synthetic construct
FAKYNIN

SEQ ID NO: 15530 - protein, 7 aa, synthetic construct
FAKLGMN

SEQ ID NO: 15531 - protein, 7 aa, synthetic construct
YARFNSN

SEQ ID NO: 15532 - protein, 7 aa, synthetic construct
FAKKGEN

SEQ ID NO: 15533 - protein, 7 aa, synthetic construct
FAKLGLN

SEQ ID NO: 15534 - protein, 7 aa, synthetic construct
FAKVGPN

SEQ ID NO: 15535 - protein, 7 aa, synthetic construct
RGSSRDS

SEQ ID NO: 15536 - protein, 7 aa, synthetic construct
FARVNVN

SEQ ID NO: 15537 - protein, 7 aa, synthetic construct
SGYGMMN

SEQ ID NO: 15538 - protein, 7 aa, synthetic construct
FAKLGAN

SEQ ID NO: 15539 - protein, 7 aa, synthetic construct
DRNTRMV

SEQ ID NO: 15540 - protein, 7 aa, synthetic construct
AQKDTMY

SEQ ID NO: 15541 - protein, 7 aa, synthetic construct
YSRFNQN

SEQ ID NO: 15542 - protein, 7 aa, synthetic construct
FSKYGTN

SEQ ID NO: 15543 - protein, 7 aa, synthetic construct
YARPNTN

SEQ ID NO: 15544 - protein, 7 aa, synthetic construct
FKGTTPY

SEQ ID NO: 15545 - protein, 7 aa, synthetic construct
RWAKEVG

SEQ ID NO: 15546 - protein, 7 aa, synthetic construct
WYQNQKD

SEQ ID NO: 15547 - protein, 7 aa, synthetic construct
TMLGARN

SEQ ID NO: 15548 - protein, 7 aa, synthetic construct
FAKYGQN

SEQ ID NO: 15549 - protein, 7 aa, synthetic construct
DRGDRFS

SEQ ID NO: 15550 - protein, 7 aa, synthetic construct
YAKFNTN

SEQ ID NO: 15551 - protein, 7 aa, synthetic construct
FSKGGAN

SEQ ID NO: 15552 - protein, 7 aa, synthetic construct
FARKNDN

SEQ ID NO: 15553 - protein, 7 aa, synthetic construct
FARVNLN

SEQ ID NO: 15554 - protein, 7 aa, synthetic construct
GPPAFKA

SEQ ID NO: 15555 - protein, 7 aa, synthetic construct
QPRRIEV

SEQ ID NO: 15556 - protein, 7 aa, synthetic construct
RSRNESG

SEQ ID NO: 15557 - protein, 7 aa, synthetic construct
LRTAGAG

SEQ ID NO: 15558 - protein, 7 aa, synthetic construct
FARVNMN

SEQ ID NO: 15559 - protein, 7 aa, synthetic construct
FAKRNEN

SEQ ID NO: 15560 - protein, 7 aa, synthetic construct
FAKHGGN

SEQ ID NO: 15561 - protein, 7 aa, synthetic construct
SWTGATA

SEQ ID NO: 15562 - protein, 7 aa, synthetic construct
FSKYNQN

SEQ ID NO: 15563 - protein, 7 aa, synthetic construct
FARVNAN

SEQ ID NO: 15564 - protein, 7 aa, synthetic construct
YAKINTN

SEQ ID NO: 15565 - protein, 7 aa, synthetic construct
FAKTNAN

SEQ ID NO: 15566 - protein, 7 aa, synthetic construct
TRTGIAS

SEQ ID NO: 15567 - protein, 7 aa, synthetic construct
FAKANPN

SEQ ID NO: 15568 - protein, 7 aa, synthetic construct
YMKRGVD

SEQ ID NO: 15569 - protein, 7 aa, synthetic construct
FARRNDN

SEQ ID NO: 15570 - protein, 7 aa, synthetic construct
INLSKLQ

SEQ ID NO: 15571 - protein, 7 aa, synthetic construct
FSRYGQN

SEQ ID NO: 15572 - protein, 7 aa, synthetic construct
LWKNAMD

SEQ ID NO: 15573 - protein, 7 aa, synthetic construct
FARNNLN

SEQ ID NO: 15574 - protein, 7 aa, synthetic construct
FAKHNHN

SEQ ID NO: 15575 - protein, 7 aa, synthetic construct
YAKNNSN

SEQ ID NO: 15576 - protein, 7 aa, synthetic construct
WHSPNGI

SEQ ID NO: 15577 - protein, 7 aa, synthetic construct
YARPGEN

SEQ ID NO: 15578 - protein, 7 aa, synthetic construct
EKYKGHM

SEQ ID NO: 15579 - protein, 7 aa, synthetic construct
YQRNNMV

SEQ ID NO: 15580 - protein, 7 aa, synthetic construct
FSKIGGN

SEQ ID NO: 15581 - protein, 7 aa, synthetic construct
FARMNSN

SEQ ID NO: 15582 - protein, 7 aa, synthetic construct
FAKIGSN

SEQ ID NO: 15583 - protein, 7 aa, synthetic construct
RSSNSAY

SEQ ID NO: 15584 - protein, 7 aa, synthetic construct
FAKSNSN

SEQ ID NO: 15585 - protein, 7 aa, synthetic construct
FSKQNQN

SEQ ID NO: 15586 - protein, 7 aa, synthetic construct
YAKNSNI

SEQ ID NO: 15587 - protein, 7 aa, synthetic construct
RSGTIYP

SEQ ID NO: 15588 - protein, 7 aa, synthetic construct
FARINQN

SEQ ID NO: 15589 - protein, 7 aa, synthetic construct
TSHGRSA

SEQ ID NO: 15590 - protein, 7 aa, synthetic construct
FARYNSN

SEQ ID NO: 15591 - protein, 7 aa, synthetic construct
NNRGTQA

SEQ ID NO: 15592 - protein, 7 aa, synthetic construct
FARMGGN

SEQ ID NO: 15593 - protein, 7 aa, synthetic construct
FARANSN

SEQ ID NO: 15594 - protein, 7 aa, synthetic construct
FARENKN

SEQ ID NO: 15595 - protein, 7 aa, synthetic construct
FSRGGQN

SEQ ID NO: 15596 - protein, 7 aa, synthetic construct
FSRSNGN

SEQ ID NO: 15597 - protein, 7 aa, synthetic construct
FSRGNGN

SEQ ID NO: 15598 - protein, 7 aa, synthetic construct
YARMNGN

SEQ ID NO: 15599 - protein, 7 aa, synthetic construct
GIIRSPV

SEQ ID NO: 15600 - protein, 7 aa, synthetic construct
WKEHAKN

SEQ ID NO: 15601 - protein, 7 aa, synthetic construct
YSKPNTN

SEQ ID NO: 15602 - protein, 7 aa, synthetic construct
YAKPNIN

SEQ ID NO: 15603 - protein, 7 aa, synthetic construct
FAKLGSN

SEQ ID NO: 15604 - protein, 7 aa, synthetic construct
GKGNTLY

SEQ ID NO: 15605 - protein, 7 aa, synthetic construct
FSRPGTN

SEQ ID NO: 15606 - protein, 7 aa, synthetic construct
FAKANMN

SEQ ID NO: 15607 - protein, 7 aa, synthetic construct
FSRAGNE

SEQ ID NO: 15608 - protein, 7 aa, synthetic construct
FNGRGIN

SEQ ID NO: 15609 - protein, 7 aa, synthetic construct
TQYSSGY

SEQ ID NO: 15610 - protein, 7 aa, synthetic construct
NLRSRGE

SEQ ID NO: 15611 - protein, 7 aa, synthetic construct
LHRNMTD

SEQ ID NO: 15612 - protein, 7 aa, synthetic construct
GIRRQVD

SEQ ID NO: 15613 - protein, 7 aa, synthetic construct
FAKYGGN

SEQ ID NO: 15614 - protein, 7 aa, synthetic construct
AGSTSRA

SEQ ID NO: 15615 - protein, 7 aa, synthetic construct
KRSAGLD

SEQ ID NO: 15616 - protein, 7 aa, synthetic construct
FSKFNTN

SEQ ID NO: 15617 - protein, 7 aa, synthetic construct
HKNGSGQ

SEQ ID NO: 15618 - protein, 7 aa, synthetic construct
YAKINPN

SEQ ID NO: 15619 - protein, 7 aa, synthetic construct
NPRKNEM

SEQ ID NO: 15620 - protein, 7 aa, synthetic construct
FAKLNIN

SEQ ID NO: 15621 - protein, 7 aa, synthetic construct
QDTNKYW

SEQ ID NO: 15622 - protein, 7 aa, synthetic construct
HSMKVSY

SEQ ID NO: 15623 - protein, 7 aa, synthetic construct
WSPGRPN

SEQ ID NO: 15624 - protein, 7 aa, synthetic construct
FSKKGEN

SEQ ID NO: 15625 - protein, 7 aa, synthetic construct
FSKVNSN

SEQ ID NO: 15626 - protein, 7 aa, synthetic construct
TYIGNKA

SEQ ID NO: 15627 - protein, 7 aa, synthetic construct
EGSSWKN

SEQ ID NO: 15628 - protein, 7 aa, synthetic construct
YARHNNN

SEQ ID NO: 15629 - protein, 7 aa, synthetic construct
NSGKTMY

SEQ ID NO: 15630 - protein, 7 aa, synthetic construct
FAKLNHN

SEQ ID NO: 15631 - protein, 7 aa, synthetic construct
YAKFNLN

SEQ ID NO: 15632 - protein, 7 aa, synthetic construct
FSRENRN

SEQ ID NO: 15633 - protein, 7 aa, synthetic construct
MGHLSSY

SEQ ID NO: 15634 - protein, 7 aa, synthetic construct
RGGMYTG

SEQ ID NO: 15635 - protein, 7 aa, synthetic construct
YAKVNVN

SEQ ID NO: 15636 - protein, 7 aa, synthetic construct
TRDGRVA

SEQ ID NO: 15637 - protein, 7 aa, synthetic construct
ARQVKEL

SEQ ID NO: 15638 - protein, 7 aa, synthetic construct
FAKFNNN

SEQ ID NO: 15639 - protein, 7 aa, synthetic construct
TNGHGRN

SEQ ID NO: 15640 - protein, 7 aa, synthetic construct
FAKYNQN

SEQ ID NO: 15641 - protein, 7 aa, synthetic construct
YARFGGN

SEQ ID NO: 15642 - protein, 7 aa, synthetic construct
YAKFGGN

SEQ ID NO: 15643 - protein, 7 aa, synthetic construct
FSKINLN

SEQ ID NO: 15644 - protein, 7 aa, synthetic construct
YARHNTN

SEQ ID NO: 15645 - protein, 7 aa, synthetic construct
FARPNAN

SEQ ID NO: 15646 - protein, 7 aa, synthetic construct
YARHNGN

SEQ ID NO: 15647 - protein, 7 aa, synthetic construct
FAKEGCN

SEQ ID NO: 15648 - protein, 7 aa, synthetic construct
FAKHNNN

SEQ ID NO: 15649 - protein, 7 aa, synthetic construct
FAKHNLN

SEQ ID NO: 15650 - protein, 7 aa, synthetic construct
YNKGIPY

SEQ ID NO: 15651 - protein, 7 aa, synthetic construct
FSKFNNN

SEQ ID NO: 15652 - protein, 7 aa, synthetic construct
TDKYSTF

SEQ ID NO: 15653 - protein, 7 aa, synthetic construct
FARVNIN

SEQ ID NO: 15654 - protein, 7 aa, synthetic construct
YMSETWS

SEQ ID NO: 15655 - protein, 7 aa, synthetic construct
YIKNQRD

SEQ ID NO: 15656 - protein, 7 aa, synthetic construct
NQGTVRF

SEQ ID NO: 15657 - protein, 7 aa, synthetic construct
FARPNGN

SEQ ID NO: 15658 - protein, 7 aa, synthetic construct
WQAKVMS

SEQ ID NO: 15659 - protein, 7 aa, synthetic construct
IHAKQLN

SEQ ID NO: 15660 - protein, 7 aa, synthetic construct
VSATRFG

SEQ ID NO: 15661 - protein, 7 aa, synthetic construct
YLKKDLS

SEQ ID NO: 15662 - protein, 7 aa, synthetic construct
VHPEYHA

SEQ ID NO: 15663 - protein, 7 aa, synthetic construct
KGGGHPF

SEQ ID NO: 15664 - protein, 7 aa, synthetic construct
FAKQGGN

SEQ ID NO: 15665 - protein, 7 aa, synthetic construct
FSKINAN

SEQ ID NO: 15666 - protein, 7 aa, synthetic construct
MRGPVSP

SEQ ID NO: 15667 - protein, 7 aa, synthetic construct
FARINPN

SEQ ID NO: 15668 - protein, 7 aa, synthetic construct
FAKFNTN

SEQ ID NO: 15669 - protein, 7 aa, synthetic construct
SMRSPNS

SEQ ID NO: 15670 - protein, 7 aa, synthetic construct
FARMGEN

SEQ ID NO: 15671 - protein, 7 aa, synthetic construct
YTKTSPS

SEQ ID NO: 15672 - protein, 7 aa, synthetic construct
FLKSNTG

SEQ ID NO: 15673 - protein, 7 aa, synthetic construct
KANGSYA

SEQ ID NO: 15674 - protein, 7 aa, synthetic construct
FAKDNYN

SEQ ID NO: 15675 - protein, 7 aa, synthetic construct
KGDPPWG

SEQ ID NO: 15676 - protein, 7 aa, synthetic construct
FARNNMN

SEQ ID NO: 15677 - protein, 7 aa, synthetic construct
YAAKSNN

SEQ ID NO: 15678 - protein, 7 aa, synthetic construct
YRPGKNE

SEQ ID NO: 15679 - protein, 7 aa, synthetic construct
FARMNGN

SEQ ID NO: 15680 - protein, 7 aa, synthetic construct
FAKVGGN

SEQ ID NO: 15681 - protein, 7 aa, synthetic construct
FAKMNAN

SEQ ID NO: 15682 - protein, 7 aa, synthetic construct
YAKYNDN

SEQ ID NO: 15683 - protein, 7 aa, synthetic construct
FAKFGGN

SEQ ID NO: 15684 - protein, 7 aa, synthetic construct
FSKHGGN

SEQ ID NO: 15685 - protein, 7 aa, synthetic construct
KPYHNDI

SEQ ID NO: 15686 - protein, 7 aa, synthetic construct
VQGVGKN

SEQ ID NO: 15687 - protein, 7 aa, synthetic construct
FARVNFN

SEQ ID NO: 15688 - protein, 7 aa, synthetic construct
FAKLGGN

SEQ ID NO: 15689 - protein, 7 aa, synthetic construct
FAKYNGN

SEQ ID NO: 15690 - protein, 7 aa, synthetic construct
QKQREIG

SEQ ID NO: 15691 - protein, 7 aa, synthetic construct
FAKIGTN

SEQ ID NO: 15692 - protein, 7 aa, synthetic construct
FAKANVN

SEQ ID NO: 15693 - protein, 7 aa, synthetic construct
FARQNPN

SEQ ID NO: 15694 - protein, 7 aa, synthetic construct
TNRNDIR

SEQ ID NO: 15695 - protein, 7 aa, synthetic construct
YKHGPLA

SEQ ID NO: 15696 - protein, 7 aa, synthetic construct
TSVGTRN

SEQ ID NO: 15697 - protein, 7 aa, synthetic construct
FARVNTN

SEQ ID NO: 15698 - protein, 7 aa, synthetic construct
VANYGRD

SEQ ID NO: 15699 - protein, 7 aa, synthetic construct
HSKGTRD

SEQ ID NO: 15700 - protein, 7 aa, synthetic construct
FSRVNPN

SEQ ID NO: 15701 - protein, 7 aa, synthetic construct
FAKTNVN

SEQ ID NO: 15702 - protein, 7 aa, synthetic construct
RDATNYP

SEQ ID NO: 15703 - protein, 7 aa, synthetic construct
KSGGVGY

SEQ ID NO: 15704 - protein, 7 aa, synthetic construct
FARINGN

SEQ ID NO: 15705 - protein, 7 aa, synthetic construct
FAKFNGN

SEQ ID NO: 15706 - protein, 7 aa, synthetic construct
WNKNIHS

SEQ ID NO: 15707 - protein, 7 aa, synthetic construct
FARPGGN

SEQ ID NO: 15708 - protein, 7 aa, synthetic construct
FAKINHN

SEQ ID NO: 15709 - protein, 7 aa, synthetic construct
GFTNSVY

SEQ ID NO: 15710 - protein, 7 aa, synthetic construct
FSRHNSN

SEQ ID NO: 15711 - protein, 7 aa, synthetic construct
FAKFNIN

SEQ ID NO: 15712 - protein, 7 aa, synthetic construct
YKGWTAA

SEQ ID NO: 15713 - protein, 7 aa, synthetic construct
RPYTDMD

SEQ ID NO: 15714 - protein, 7 aa, synthetic construct
YAKINSN

SEQ ID NO: 15715 - protein, 7 aa, synthetic construct
FAKINMN

SEQ ID NO: 15716 - protein, 7 aa, synthetic construct
FARPGSN

SEQ ID NO: 15717 - protein, 7 aa, synthetic construct
YAKINHN

SEQ ID NO: 15718 - protein, 7 aa, synthetic construct
NGDGGSY

SEQ ID NO: 15719 - protein, 7 aa, synthetic construct
FARHNPN

SEQ ID NO: 15720 - protein, 7 aa, synthetic construct
FSKGGQN

SEQ ID NO: 15721 - protein, 7 aa, synthetic construct
RAGGASG

SEQ ID NO: 15722 - protein, 7 aa, synthetic construct
PIKSQSG

SEQ ID NO: 15723 - protein, 7 aa, synthetic construct
FARYGGN

SEQ ID NO: 15724 - protein, 7 aa, synthetic construct
FSKPGFN

SEQ ID NO: 15725 - protein, 7 aa, synthetic construct
HWSGANP

SEQ ID NO: 15726 - protein, 7 aa, synthetic construct
FSKFNIN

SEQ ID NO: 15727 - protein, 7 aa, synthetic construct
NWGNKSD

SEQ ID NO: 15728 - protein, 7 aa, synthetic construct
FARFNSN

SEQ ID NO: 15729 - protein, 7 aa, synthetic construct
YQASMAN

SEQ ID NO: 15730 - protein, 7 aa, synthetic construct
FAKINFN

SEQ ID NO: 15731 - protein, 7 aa, synthetic construct
YSRPNGN

SEQ ID NO: 15732 - protein, 7 aa, synthetic construct
IKGYGLD

SEQ ID NO: 15733 - protein, 7 aa, synthetic construct
FSKLSQQ

SEQ ID NO: 15734 - protein, 7 aa, synthetic construct
FAKIGDN

SEQ ID NO: 15735 - protein, 7 aa, synthetic construct
FARHNFN

SEQ ID NO: 15736 - protein, 7 aa, synthetic construct
FSKINSN

SEQ ID NO: 15737 - protein, 7 aa, synthetic construct
FAKPGIN

SEQ ID NO: 15738 - protein, 7 aa, synthetic construct
YSKWNPN

SEQ ID NO: 15739 - protein, 7 aa, synthetic construct
FSKWNQN

SEQ ID NO: 15740 - protein, 7 aa, synthetic construct
WTPSAYS

SEQ ID NO: 15741 - protein, 7 aa, synthetic construct
DPRSRAS

SEQ ID NO: 15742 - protein, 7 aa, synthetic construct
FARKNEN

SEQ ID NO: 15743 - protein, 7 aa, synthetic construct
YMVRTGG

SEQ ID NO: 15744 - protein, 7 aa, synthetic construct
FAKFNQN

SEQ ID NO: 15745 - protein, 7 aa, synthetic construct
GYKGTMP

SEQ ID NO: 15746 - protein, 7 aa, synthetic construct
FVGGPMT

SEQ ID NO: 15747 - protein, 7 aa, synthetic construct
QSLKGAG

SEQ ID NO: 15748 - protein, 7 aa, synthetic construct
LLREGDW

SEQ ID NO: 15749 - protein, 7 aa, synthetic construct
FARPNSN

SEQ ID NO: 15750 - protein, 7 aa, synthetic construct
YKSASPN

SEQ ID NO: 15751 - protein, 7 aa, synthetic construct
FSKPNAN

SEQ ID NO: 15752 - protein, 7 aa, synthetic construct
EHGRGHD

SEQ ID NO: 15753 - protein, 7 aa, synthetic construct
GQVRTPT

SEQ ID NO: 15754 - protein, 7 aa, synthetic construct
YIAGPVK

SEQ ID NO: 15755 - protein, 7 aa, synthetic construct
WHTSIPN

SEQ ID NO: 15756 - protein, 7 aa, synthetic construct
DKGKGMY

SEQ ID NO: 15757 - protein, 7 aa, synthetic construct
HRSWGDA

SEQ ID NO: 15758 - protein, 7 aa, synthetic construct
FAKNNLN

SEQ ID NO: 15759 - protein, 7 aa, synthetic construct
FSRKGDN

SEQ ID NO: 15760 - protein, 7 aa, synthetic construct
WRNGEAN

SEQ ID NO: 15761 - protein, 7 aa, synthetic construct
HGHGTYT

SEQ ID NO: 15762 - protein, 7 aa, synthetic construct
NSKVGRD

SEQ ID NO: 15763 - protein, 7 aa, synthetic construct
FAKHNAN

SEQ ID NO: 15764 - protein, 7 aa, synthetic construct
FARPNTN

SEQ ID NO: 15765 - protein, 7 aa, synthetic construct
RSTGGAG

SEQ ID NO: 15766 - protein, 7 aa, synthetic construct
YGSGTQY

SEQ ID NO: 15767 - protein, 7 aa, synthetic construct
QGSTNSY

SEQ ID NO: 15768 - protein, 7 aa, synthetic construct
YNNTSMR

SEQ ID NO: 15769 - protein, 7 aa, synthetic construct
NNYGSPG

SEQ ID NO: 15770 - protein, 7 aa, synthetic construct
FAKNNGN

SEQ ID NO: 15771 - protein, 7 aa, synthetic construct
YVSYQVN

SEQ ID NO: 15772 - protein, 7 aa, synthetic construct
EMKHGHM

SEQ ID NO: 15773 - protein, 7 aa, synthetic construct
VRANHTN

SEQ ID NO: 15774 - protein, 7 aa, synthetic construct
YRPGAHA

SEQ ID NO: 15775 - protein, 7 aa, synthetic construct
FARNNDN

SEQ ID NO: 15776 - protein, 7 aa, synthetic construct
YQRDVMQ

SEQ ID NO: 15777 - protein, 7 aa, synthetic construct
WRSAAVP

SEQ ID NO: 15778 - protein, 7 aa, synthetic construct
FAKYGDN

SEQ ID NO: 15779 - protein, 7 aa, synthetic construct
YARENFN

SEQ ID NO: 15780 - protein, 7 aa, synthetic construct
CKNVTAE

SEQ ID NO: 15781 - protein, 7 aa, synthetic construct
LKSRIIE

SEQ ID NO: 15782 - protein, 7 aa, synthetic construct
FSKFNDN

SEQ ID NO: 15783 - protein, 7 aa, synthetic construct
MQPYGSG

SEQ ID NO: 15784 - protein, 7 aa, synthetic construct
FARPNLN

SEQ ID NO: 15785 - protein, 7 aa, synthetic construct
YSRPGDN

SEQ ID NO: 15786 - protein, 7 aa, synthetic construct
FSKPGNN

SEQ ID NO: 15787 - protein, 7 aa, synthetic construct
YNKTGAN

SEQ ID NO: 15788 - protein, 7 aa, synthetic construct
FAKYGEN

SEQ ID NO: 15789 - protein, 7 aa, synthetic construct
FAKHNFN

SEQ ID NO: 15790 - protein, 7 aa, synthetic construct
FARPGIN

SEQ ID NO: 15791 - protein, 7 aa, synthetic construct
FSRGGEN

SEQ ID NO: 15792 - protein, 7 aa, synthetic construct
PDINKRS

SEQ ID NO: 15793 - protein, 7 aa, synthetic construct
NAKYSGE

SEQ ID NO: 15794 - protein, 7 aa, synthetic construct
FSRPNVN

SEQ ID NO: 15795 - protein, 7 aa, synthetic construct
YAKVNLN

SEQ ID NO: 15796 - protein, 7 aa, synthetic construct
RGDVQAW

SEQ ID NO: 15797 - protein, 7 aa, synthetic construct
FAKINNN

SEQ ID NO: 15798 - protein, 7 aa, synthetic construct
FAKNGEN

SEQ ID NO: 15799 - protein, 7 aa, synthetic construct
YSKTNGN

SEQ ID NO: 15800 - protein, 7 aa, synthetic construct
LNINFHG

SEQ ID NO: 15801 - protein, 7 aa, synthetic construct
SYHDMRD

SEQ ID NO: 15802 - protein, 7 aa, synthetic construct
FSKPNVN

SEQ ID NO: 15803 - protein, 7 aa, synthetic construct
FAKNNMN

SEQ ID NO: 15804 - protein, 7 aa, synthetic construct
FAKWNEN

SEQ ID NO: 15805 - protein, 7 aa, synthetic construct
NVKGTTY

SEQ ID NO: 15806 - protein, 7 aa, synthetic construct
LTYGDRS

SEQ ID NO: 15807 - protein, 7 aa, synthetic construct
KSSSMGV

SEQ ID NO: 15808 - protein, 7 aa, synthetic construct
SVYGGAG

SEQ ID NO: 15809 - protein, 7 aa, synthetic construct
FAKVNPN

SEQ ID NO: 15810 - protein, 7 aa, synthetic construct
FSRDNAN

SEQ ID NO: 15811 - protein, 7 aa, synthetic construct
FARPGYN

SEQ ID NO: 15812 - protein, 7 aa, synthetic construct
YARENPN

SEQ ID NO: 15813 - protein, 7 aa, synthetic construct
NMNNSYS

SEQ ID NO: 15814 - protein, 7 aa, synthetic construct
TSYGQGS

SEQ ID NO: 15815 - protein, 7 aa, synthetic construct
FARHGTN

SEQ ID NO: 15816 - protein, 7 aa, synthetic construct
FSKPNWN

SEQ ID NO: 15817 - protein, 7 aa, synthetic construct
SRDNQHW

SEQ ID NO: 15818 - protein, 7 aa, synthetic construct
YSNFSHS

SEQ ID NO: 15819 - protein, 7 aa, synthetic construct
TKSGDKA

SEQ ID NO: 15820 - protein, 7 aa, synthetic construct
RDGRDSV

SEQ ID NO: 15821 - protein, 7 aa, synthetic construct
RSHAGSD

SEQ ID NO: 15822 - protein, 7 aa, synthetic construct
YLLNSHS

SEQ ID NO: 15823 - protein, 7 aa, synthetic construct
NVLGVPV

SEQ ID NO: 15824 - protein, 7 aa, synthetic construct
FAKMNQN

SEQ ID NO: 15825 - protein, 7 aa, synthetic construct
YAKNNDN

SEQ ID NO: 15826 - protein, 7 aa, synthetic construct
FAKHNTN

SEQ ID NO: 15827 - protein, 7 aa, synthetic construct
FSRFNGN

SEQ ID NO: 15828 - protein, 7 aa, synthetic construct
YAKINQN

SEQ ID NO: 15829 - protein, 7 aa, synthetic construct
FAKTNDN

SEQ ID NO: 15830 - protein, 7 aa, synthetic construct
HGKTSRE

SEQ ID NO: 15831 - protein, 7 aa, synthetic construct
YSKPNSN

SEQ ID NO: 15832 - protein, 7 aa, synthetic construct
TPMSTHF

SEQ ID NO: 15833 - protein, 7 aa, synthetic construct
LSQTVSY

SEQ ID NO: 15834 - protein, 7 aa, synthetic construct
RRAEPQS

SEQ ID NO: 15835 - protein, 7 aa, synthetic construct
YSKPGWN

SEQ ID NO: 15836 - protein, 7 aa, synthetic construct
YAKFGNN

SEQ ID NO: 15837 - protein, 7 aa, synthetic construct
FAKPGLN

SEQ ID NO: 15838 - protein, 7 aa, synthetic construct
SKTTTQY

SEQ ID NO: 15839 - protein, 7 aa, synthetic construct
MKNVSNF

SEQ ID NO: 15840 - protein, 7 aa, synthetic construct
YHRSHEL

SEQ ID NO: 15841 - protein, 7 aa, synthetic construct
RITGSST

SEQ ID NO: 15842 - protein, 7 aa, synthetic construct
FSRPGSN

SEQ ID NO: 15843 - protein, 7 aa, synthetic construct
LASNGVN

SEQ ID NO: 15844 - protein, 7 aa, synthetic construct
FAKINQN

SEQ ID NO: 15845 - protein, 7 aa, synthetic construct
FAREGTN

SEQ ID NO: 15846 - protein, 7 aa, synthetic construct
VMTRNEW

SEQ ID NO: 15847 - protein, 7 aa, synthetic construct
FAKVNIN

SEQ ID NO: 15848 - protein, 7 aa, synthetic construct
FAKKNDN

SEQ ID NO: 15849 - protein, 7 aa, synthetic construct
FSRMGTN

SEQ ID NO: 15850 - protein, 7 aa, synthetic construct
YAKFGIN

SEQ ID NO: 15851 - protein, 7 aa, synthetic construct
NTDYGYA

SEQ ID NO: 15852 - protein, 7 aa, synthetic construct
KHANIIG

SEQ ID NO: 15853 - protein, 7 aa, synthetic construct
NTRMTGA

SEQ ID NO: 15854 - protein, 7 aa, synthetic construct
FAKKNEN

SEQ ID NO: 15855 - protein, 7 aa, synthetic construct
HSRNYTD

SEQ ID NO: 15856 - protein, 7 aa, synthetic construct
FAKHGTN

SEQ ID NO: 15857 - protein, 7 aa, synthetic construct
FAKINAN

SEQ ID NO: 15858 - protein, 7 aa, synthetic construct
YAKDGLN

SEQ ID NO: 15859 - protein, 7 aa, synthetic construct
FAKINPN

SEQ ID NO: 15860 - protein, 7 aa, synthetic construct
GRMEKST

SEQ ID NO: 15861 - protein, 7 aa, synthetic construct
YAKDGTN

SEQ ID NO: 15862 - protein, 7 aa, synthetic construct
FAKPGGN

SEQ ID NO: 15863 - protein, 7 aa, synthetic construct
WTKSNTA

SEQ ID NO: 15864 - protein, 7 aa, synthetic construct
IRNITGE

SEQ ID NO: 15865 - protein, 7 aa, synthetic construct
WTKANDH

SEQ ID NO: 15866 - protein, 7 aa, synthetic construct
YAKDNPN

SEQ ID NO: 15867 - protein, 7 aa, synthetic construct
FARDNHN

SEQ ID NO: 15868 - protein, 7 aa, synthetic construct
SPTGRAA

SEQ ID NO: 15869 - protein, 7 aa, synthetic construct
GVSNMMV

SEQ ID NO: 15870 - protein, 7 aa, synthetic construct
GDNKPNW

SEQ ID NO: 15871 - protein, 7 aa, synthetic construct
IMVRDTK

SEQ ID NO: 15872 - protein, 7 aa, synthetic construct
LESSRGY

SEQ ID NO: 15873 - protein, 7 aa, synthetic construct
FSKPGQN

SEQ ID NO: 15874 - protein, 7 aa, synthetic construct
SRGLNPS

SEQ ID NO: 15875 - protein, 7 aa, synthetic construct
IAGLNKA

SEQ ID NO: 15876 - protein, 7 aa, synthetic construct
KVNGGSG

SEQ ID NO: 15877 - protein, 7 aa, synthetic construct
VSNNIRG

SEQ ID NO: 15878 - protein, 7 aa, synthetic construct
SSKGTNA

SEQ ID NO: 15879 - protein, 7 aa, synthetic construct
FSRDGVN

SEQ ID NO: 15880 - protein, 7 aa, synthetic construct
FSKPNMN

SEQ ID NO: 15881 - protein, 7 aa, synthetic construct
FAKDNIN

SEQ ID NO: 15882 - protein, 7 aa, synthetic construct
TKHGADV

SEQ ID NO: 15883 - protein, 7 aa, synthetic construct
DQNKNTW

SEQ ID NO: 15884 - protein, 7 aa, synthetic construct
YSKENVN

SEQ ID NO: 15885 - protein, 7 aa, synthetic construct
HGPNSYG

SEQ ID NO: 15886 - protein, 7 aa, synthetic construct
GNSNTAH

SEQ ID NO: 15887 - protein, 7 aa, synthetic construct
HYGDKYQ

SEQ ID NO: 15888 - protein, 7 aa, synthetic construct
YRSTVAD

SEQ ID NO: 15889 - protein, 7 aa, synthetic construct
FSRNNPN

SEQ ID NO: 15890 - protein, 7 aa, synthetic construct
YRPGSGD

SEQ ID NO: 15891 - protein, 7 aa, synthetic construct
NKTWGDA

SEQ ID NO: 15892 - protein, 7 aa, synthetic construct
TGTNTTY

SEQ ID NO: 15893 - protein, 7 aa, synthetic construct
EAPANRN

SEQ ID NO: 15894 - protein, 7 aa, synthetic construct
FSKEGMN

SEQ ID NO: 15895 - protein, 7 aa, synthetic construct
GDESRYY

SEQ ID NO: 15896 - protein, 7 aa, synthetic construct
FSRHNMN

SEQ ID NO: 15897 - protein, 7 aa, synthetic construct
YLNKSYD

SEQ ID NO: 15898 - protein, 7 aa, synthetic construct
FSKPGTN

SEQ ID NO: 15899 - protein, 7 aa, synthetic construct
FAKFNEN

SEQ ID NO: 15900 - protein, 7 aa, synthetic construct
FSKPNNN

SEQ ID NO: 15901 - protein, 7 aa, synthetic construct
GFRGDGA

SEQ ID NO: 15902 - protein, 7 aa, synthetic construct
FARHNMN

SEQ ID NO: 15903 - protein, 7 aa, synthetic construct
YSGSSYA

SEQ ID NO: 15904 - protein, 7 aa, synthetic construct
WLKHEAS

SEQ ID NO: 15905 - protein, 7 aa, synthetic construct
FAKPGMN

SEQ ID NO: 15906 - protein, 7 aa, synthetic construct
KTESDNR

SEQ ID NO: 15907 - protein, 7 aa, synthetic construct
VKRSEPI

SEQ ID NO: 15908 - protein, 7 aa, synthetic construct
FSRDNQN

SEQ ID NO: 15909 - protein, 7 aa, synthetic construct
FSRPGQN

SEQ ID NO: 15910 - protein, 7 aa, synthetic construct
FARDNAN

SEQ ID NO: 15911 - protein, 7 aa, synthetic construct
YYKNGAA

SEQ ID NO: 15912 - protein, 7 aa, synthetic construct
FARENWN

SEQ ID NO: 15913 - protein, 7 aa, synthetic construct
FSKPGWN

SEQ ID NO: 15914 - protein, 7 aa, synthetic construct
FAKDNAN

SEQ ID NO: 15915 - protein, 7 aa, synthetic construct
KPNGYPA

SEQ ID NO: 15916 - protein, 7 aa, synthetic construct
FAKLGEN

SEQ ID NO: 15917 - protein, 7 aa, synthetic construct
FAKDGEN

SEQ ID NO: 15918 - protein, 7 aa, synthetic construct
FARENDN

SEQ ID NO: 15919 - protein, 7 aa, synthetic construct
RKSETGG

SEQ ID NO: 15920 - protein, 7 aa, synthetic construct
RNEGAAG

SEQ ID NO: 15921 - protein, 7 aa, synthetic construct
FAKDGSN

SEQ ID NO: 15922 - protein, 7 aa, synthetic construct
WENKQAW

SEQ ID NO: 15923 - protein, 7 aa, synthetic construct
FSKDNQN

SEQ ID NO: 15924 - protein, 7 aa, synthetic construct
DGGRGRD

SEQ ID NO: 15925 - protein, 7 aa, synthetic construct
FSKYNPN

SEQ ID NO: 15926 - protein, 7 aa, synthetic construct
FSRRGDN

SEQ ID NO: 15927 - protein, 7 aa, synthetic construct
FSKFGHN

SEQ ID NO: 15928 - protein, 7 aa, synthetic construct
YSRYGPN

SEQ ID NO: 15929 - protein, 7 aa, synthetic construct
FARFNNN

SEQ ID NO: 15930 - protein, 7 aa, synthetic construct
FARFNAN

SEQ ID NO: 15931 - protein, 7 aa, synthetic construct
YSKWGQN

SEQ ID NO: 15932 - protein, 7 aa, synthetic construct
YSKWNGN

SEQ ID NO: 15933 - protein, 7 aa, synthetic construct
FSRYNQN

SEQ ID NO: 15934 - protein, 7 aa, synthetic construct
YARPNYN

SEQ ID NO: 15935 - protein, 7 aa, synthetic construct
YSRRNEN

SEQ ID NO: 15936 - protein, 7 aa, synthetic construct
FSKANWN

SEQ ID NO: 15937 - protein, 7 aa, synthetic construct
FARENYN

SEQ ID NO: 15938 - protein, 7 aa, synthetic construct
YARFGNN

SEQ ID NO: 15939 - protein, 7 aa, synthetic construct
FSRPGFN

SEQ ID NO: 15940 - protein, 7 aa, synthetic construct
FSKANYN

SEQ ID NO: 15941 - protein, 7 aa, synthetic construct
YSKININ

SEQ ID NO: 15942 - protein, 7 aa, synthetic construct
YAKSNYN

SEQ ID NO: 15943 - protein, 7 aa, synthetic construct
LHARNIN

SEQ ID NO: 15944 - protein, 7 aa, synthetic construct
YAKTNIN

SEQ ID NO: 15945 - protein, 7 aa, synthetic construct
YAKSGYN

SEQ ID NO: 15946 - protein, 7 aa, synthetic construct
FSKVGIN

SEQ ID NO: 15947 - protein, 7 aa, synthetic construct
YAKNGNN

SEQ ID NO: 15948 - protein, 7 aa, synthetic construct
YARPGNN

SEQ ID NO: 15949 - protein, 7 aa, synthetic construct
YAKPGIN

SEQ ID NO: 15950 - protein, 7 aa, synthetic construct
YSRHGAN

SEQ ID NO: 15951 - protein, 7 aa, synthetic construct
YAKMGNN

SEQ ID NO: 15952 - protein, 7 aa, synthetic construct
FARNGNN

SEQ ID NO: 15953 - protein, 7 aa, synthetic construct
FAKGGPN

SEQ ID NO: 15954 - protein, 7 aa, synthetic construct
YSKTGIN

SEQ ID NO: 15955 - protein, 7 aa, synthetic construct
YAKVGNN

SEQ ID NO: 15956 - protein, 7 aa, synthetic construct
YSKAGSN

SEQ ID NO: 15957 - protein, 7 aa, synthetic construct
YSRANLN

SEQ ID NO: 15958 - protein, 7 aa, synthetic construct
YSRPGPN

SEQ ID NO: 15959 - protein, 7 aa, synthetic construct
FARTGHN

SEQ ID NO: 15960 - protein, 7 aa, synthetic construct
VAMRGIG

SEQ ID NO: 15961 - protein, 7 aa, synthetic construct
LSKVGQN

SEQ ID NO: 15962 - protein, 7 aa, synthetic construct
TNYGRPS

SEQ ID NO: 15963 - protein, 7 aa, synthetic construct
YARQNFN

SEQ ID NO: 15964 - protein, 7 aa, synthetic construct
YARQGAN

SEQ ID NO: 15965 - protein, 7 aa, synthetic construct
YARINYN

SEQ ID NO: 15966 - protein, 7 aa, synthetic construct
YAKQGHN

SEQ ID NO: 15967 - protein, 7 aa, synthetic construct
LHKSGMN

SEQ ID NO: 15968 - protein, 7 aa, synthetic construct
STSSSGR

SEQ ID NO: 15969 - protein, 7 aa, synthetic construct
YARENRN

SEQ ID NO: 15970 - protein, 7 aa, synthetic construct
FSRVGFN

SEQ ID NO: 15971 - protein, 7 aa, synthetic construct
FSKIGFN

SEQ ID NO: 15972 - protein, 7 aa, synthetic construct
FSRIGAN

SEQ ID NO: 15973 - protein, 7 aa, synthetic construct
YAKMGPN

SEQ ID NO: 15974 - protein, 7 aa, synthetic construct
YSKLGQN

SEQ ID NO: 15975 - protein, 7 aa, synthetic construct
LSKANVN

SEQ ID NO: 15976 - protein, 7 aa, synthetic construct
YSKQGNN

SEQ ID NO: 15977 - protein, 7 aa, synthetic construct
YSKANLN

SEQ ID NO: 15978 - protein, 7 aa, synthetic construct
HQSSNGV

SEQ ID NO: 15979 - protein, 7 aa, synthetic construct
FAKGNFN

SEQ ID NO: 15980 - protein, 7 aa, synthetic construct
FSKLNFN

SEQ ID NO: 15981 - protein, 7 aa, synthetic construct
YSRGNTN

SEQ ID NO: 15982 - protein, 7 aa, synthetic construct
FAKGGFN

SEQ ID NO: 15983 - protein, 7 aa, synthetic construct
YARSNSN

SEQ ID NO: 15984 - protein, 7 aa, synthetic construct
LSKIGSN

SEQ ID NO: 15985 - protein, 7 aa, synthetic construct
GSSTSIW

SEQ ID NO: 15986 - protein, 7 aa, synthetic construct
YSKQGQN

SEQ ID NO: 15987 - protein, 7 aa, synthetic construct
FSRSGMN

SEQ ID NO: 15988 - protein, 7 aa, synthetic construct
YAKLGAN

SEQ ID NO: 15989 - protein, 7 aa, synthetic construct
YARMNLN

SEQ ID NO: 15990 - protein, 7 aa, synthetic construct
FARSGSN

SEQ ID NO: 15991 - protein, 7 aa, synthetic construct
YAKYGNN

SEQ ID NO: 15992 - protein, 7 aa, synthetic construct
YSKMGIN

SEQ ID NO: 15993 - protein, 7 aa, synthetic construct
FARENRN

SEQ ID NO: 15994 - protein, 7 aa, synthetic construct
YSRTGEN

SEQ ID NO: 15995 - protein, 7 aa, synthetic construct
YSKGNYN

SEQ ID NO: 15996 - protein, 7 aa, synthetic construct
YSKVGQN

SEQ ID NO: 15997 - protein, 7 aa, synthetic construct
LSKNGPN

SEQ ID NO: 15998 - protein, 7 aa, synthetic construct
YARANTN

SEQ ID NO: 15999 - protein, 7 aa, synthetic construct
YARQNAN

SEQ ID NO: 16000 - protein, 7 aa, synthetic construct
AMSTNGR

SEQ ID NO: 16001 - protein, 7 aa, synthetic construct
LAKMGAN

SEQ ID NO: 16002 - protein, 7 aa, synthetic construct
PYAKSEL

SEQ ID NO: 16003 - protein, 7 aa, synthetic construct
YAKANFN

SEQ ID NO: 16004 - protein, 7 aa, synthetic construct
TQSTNGI

SEQ ID NO: 16005 - protein, 7 aa, synthetic construct
YARIGLN

SEQ ID NO: 16006 - protein, 7 aa, synthetic construct
YARLGEN

SEQ ID NO: 16007 - protein, 7 aa, synthetic construct
YSRANQN

SEQ ID NO: 16008 - protein, 7 aa, synthetic construct
YAKPGPN

SEQ ID NO: 16009 - protein, 7 aa, synthetic construct
YAKAGHN

SEQ ID NO: 16010 - protein, 7 aa, synthetic construct
FAKGGNN

SEQ ID NO: 16011 - protein, 7 aa, synthetic construct
PASTNGV

SEQ ID NO: 16012 - protein, 7 aa, synthetic construct
VLSSNGV

SEQ ID NO: 16013 - protein, 7 aa, synthetic construct
YSKTGPN

SEQ ID NO: 16014 - protein, 7 aa, synthetic construct
YSKMNDN

SEQ ID NO: 16015 - protein, 7 aa, synthetic construct
YARSNAN

SEQ ID NO: 16016 - protein, 7 aa, synthetic construct
YSRLGDN

SEQ ID NO: 16017 - protein, 7 aa, synthetic construct
YAKGGPN

SEQ ID NO: 16018 - protein, 7 aa, synthetic construct
YSKNGPN

SEQ ID NO: 16019 - protein, 7 aa, synthetic construct
YSKQGAN

SEQ ID NO: 16020 - protein, 7 aa, synthetic construct
LSKANIN

SEQ ID NO: 16021 - protein, 7 aa, synthetic construct
QVSTNGI

SEQ ID NO: 16022 - protein, 7 aa, synthetic construct
YSKNGMN

SEQ ID NO: 16023 - protein, 7 aa, synthetic construct
YSKMNAN

SEQ ID NO: 16024 - protein, 7 aa, synthetic construct
FSKIGLN

SEQ ID NO: 16025 - protein, 7 aa, synthetic construct
YSKVGLN

SEQ ID NO: 16026 - protein, 7 aa, synthetic construct
YAKQGMN

SEQ ID NO: 16027 - protein, 7 aa, synthetic construct
TVSTNGV

SEQ ID NO: 16028 - protein, 7 aa, synthetic construct
LAKAGAN

SEQ ID NO: 16029 - protein, 7 aa, synthetic construct
YSKQGHN

SEQ ID NO: 16030 - protein, 7 aa, synthetic construct
YAKSGDN

SEQ ID NO: 16031 - protein, 7 aa, synthetic construct
LSKAGNN

SEQ ID NO: 16032 - protein, 7 aa, synthetic construct
SKSTNGV

SEQ ID NO: 16033 - protein, 7 aa, synthetic construct
FSKVGFN

SEQ ID NO: 16034 - protein, 7 aa, synthetic construct
FSRIGEN

SEQ ID NO: 16035 - protein, 7 aa, synthetic construct
YSRVNLN

SEQ ID NO: 16036 - protein, 7 aa, synthetic construct
YAKMGMN

SEQ ID NO: 16037 - protein, 7 aa, synthetic construct
FAKSGYN

SEQ ID NO: 16038 - protein, 7 aa, synthetic construct
YAKNGFN

SEQ ID NO: 16039 - protein, 7 aa, synthetic construct
FAKSGQN

SEQ ID NO: 16040 - protein, 7 aa, synthetic construct
LSKLNTN

SEQ ID NO: 16041 - protein, 7 aa, synthetic construct
LAKAGFN

SEQ ID NO: 16042 - protein, 7 aa, synthetic construct
YMSTNGV

SEQ ID NO: 16043 - protein, 7 aa, synthetic construct
LSRTGQN

SEQ ID NO: 16044 - protein, 7 aa, synthetic construct
MRNGTMS

SEQ ID NO: 16045 - protein, 7 aa, synthetic construct
YAKSGFN

SEQ ID NO: 16046 - protein, 7 aa, synthetic construct
YSKIGGN

SEQ ID NO: 16047 - protein, 7 aa, synthetic construct
YAKGGLN

SEQ ID NO: 16048 - protein, 7 aa, synthetic construct
LSKSGVN

SEQ ID NO: 16049 - protein, 7 aa, synthetic construct
HVSTNGI

SEQ ID NO: 16050 - protein, 7 aa, synthetic construct
LSKVAVN

SEQ ID NO: 16051 - protein, 7 aa, synthetic construct
LARVGAN

SEQ ID NO: 16052 - protein, 7 aa, synthetic construct
LSRAGPL

SEQ ID NO: 16053 - protein, 7 aa, synthetic construct
FSKQNHN

SEQ ID NO: 16054 - protein, 7 aa, synthetic construct
IISTNGV

SEQ ID NO: 16055 - protein, 7 aa, synthetic construct
YSRQGGN

SEQ ID NO: 16056 - protein, 7 aa, synthetic construct
TLSTNGV

SEQ ID NO: 16057 - protein, 7 aa, synthetic construct
YSKSNFN

SEQ ID NO: 16058 - protein, 7 aa, synthetic construct
YAKTGTN

SEQ ID NO: 16059 - protein, 7 aa, synthetic construct
VYSTNGI

SEQ ID NO: 16060 - protein, 7 aa, synthetic construct
FSKVGSN

SEQ ID NO: 16061 - protein, 7 aa, synthetic construct
YMSSNGV

SEQ ID NO: 16062 - protein, 7 aa, synthetic construct
LSKHNFN

SEQ ID NO: 16063 - protein, 7 aa, synthetic construct
FSKLGMN

SEQ ID NO: 16064 - protein, 7 aa, synthetic construct
FSRLNEN

SEQ ID NO: 16065 - protein, 7 aa, synthetic construct
YAKQNFN

SEQ ID NO: 16066 - protein, 7 aa, synthetic construct
LSKANLN

SEQ ID NO: 16067 - protein, 7 aa, synthetic construct
QISTNGR

SEQ ID NO: 16068 - protein, 7 aa, synthetic construct
YAKGNAN

SEQ ID NO: 16069 - protein, 7 aa, synthetic construct
LAKVGFN

SEQ ID NO: 16070 - protein, 7 aa, synthetic construct
FRSTNGV

SEQ ID NO: 16071 - protein, 7 aa, synthetic construct
YSRAGEN

SEQ ID NO: 16072 - protein, 7 aa, synthetic construct
LSKTGTN

SEQ ID NO: 16073 - protein, 7 aa, synthetic construct
TRSGLNA

SEQ ID NO: 16074 - protein, 7 aa, synthetic construct
YSKLGLN

SEQ ID NO: 16075 - protein, 7 aa, synthetic construct
YSKVNTN

SEQ ID NO: 16076 - protein, 7 aa, synthetic construct
YSKLAPN

SEQ ID NO: 16077 - protein, 7 aa, synthetic construct
YSRMNEN

SEQ ID NO: 16078 - protein, 7 aa, synthetic construct
LSKSGIN

SEQ ID NO: 16079 - protein, 7 aa, synthetic construct
TFSTNGI

SEQ ID NO: 16080 - protein, 7 aa, synthetic construct
YAKTGSN

SEQ ID NO: 16081 - protein, 7 aa, synthetic construct
YSKFNDN

SEQ ID NO: 16082 - protein, 7 aa, synthetic construct
YSSTNGI

SEQ ID NO: 16083 - protein, 7 aa, synthetic construct
YSRNGGN

SEQ ID NO: 16084 - protein, 7 aa, synthetic construct
FARGNTN

SEQ ID NO: 16085 - protein, 7 aa, synthetic construct
YAKHGNN

SEQ ID NO: 16086 - protein, 7 aa, synthetic construct
LSRMNMN

SEQ ID NO: 16087 - protein, 7 aa, synthetic construct
YSKLGGN

SEQ ID NO: 16088 - protein, 7 aa, synthetic construct
FSRVGEN

SEQ ID NO: 16089 - protein, 7 aa, synthetic construct
LAKHGVN

SEQ ID NO: 16090 - protein, 7 aa, synthetic construct
LSKLNEN

SEQ ID NO: 16091 - protein, 7 aa, synthetic construct
FAKQGPN

SEQ ID NO: 16092 - protein, 7 aa, synthetic construct
HSSSNGV

SEQ ID NO: 16093 - protein, 7 aa, synthetic construct
LSRANDN

SEQ ID NO: 16094 - protein, 7 aa, synthetic construct
FARDNRN

SEQ ID NO: 16095 - protein, 7 aa, synthetic construct
LSRTNDN

SEQ ID NO: 16096 - protein, 7 aa, synthetic construct
MQSTNGI

SEQ ID NO: 16097 - protein, 7 aa, synthetic construct
YSKMNQN

SEQ ID NO: 16098 - protein, 7 aa, synthetic construct
FSRNGVN

SEQ ID NO: 16099 - protein, 7 aa, synthetic construct
YAKNGDN

SEQ ID NO: 16100 - protein, 7 aa, synthetic construct
YSKVQTN

SEQ ID NO: 16101 - protein, 7 aa, synthetic construct
LARQGSN

SEQ ID NO: 16102 - protein, 7 aa, synthetic construct
YAKQGIN

SEQ ID NO: 16103 - protein, 7 aa, synthetic construct
YARGGQN

SEQ ID NO: 16104 - protein, 7 aa, synthetic construct
YASTNGI

SEQ ID NO: 16105 - protein, 7 aa, synthetic construct
FSKLGVN

SEQ ID NO: 16106 - protein, 7 aa, synthetic construct
YSKQGWN

SEQ ID NO: 16107 - protein, 7 aa, synthetic construct
TWSTNGV

SEQ ID NO: 16108 - protein, 7 aa, synthetic construct
YAKNGAN

SEQ ID NO: 16109 - protein, 7 aa, synthetic construct
FSKMNIN

SEQ ID NO: 16110 - protein, 7 aa, synthetic construct
YSKNNLN

SEQ ID NO: 16111 - protein, 7 aa, synthetic construct
YSKHGMN

SEQ ID NO: 16112 - protein, 7 aa, synthetic construct
VQSTNGR

SEQ ID NO: 16113 - protein, 7 aa, synthetic construct
THSTNGV

SEQ ID NO: 16114 - protein, 7 aa, synthetic construct
FAKQNYN

SEQ ID NO: 16115 - protein, 7 aa, synthetic construct
MLSTNGR

SEQ ID NO: 16116 - protein, 7 aa, synthetic construct
YSKSGAN

SEQ ID NO: 16117 - protein, 7 aa, synthetic construct
FSKANMN

SEQ ID NO: 16118 - protein, 7 aa, synthetic construct
YSKHGVN

SEQ ID NO: 16119 - protein, 7 aa, synthetic construct
FSKAGMN

SEQ ID NO: 16120 - protein, 7 aa, synthetic construct
FARQGFN

SEQ ID NO: 16121 - protein, 7 aa, synthetic construct
YSKLGEN

SEQ ID NO: 16122 - protein, 7 aa, synthetic construct
LSKSGMN

SEQ ID NO: 16123 - protein, 7 aa, synthetic construct
YKSSNGV

SEQ ID NO: 16124 - protein, 7 aa, synthetic construct
QWSTNGV

SEQ ID NO: 16125 - protein, 7 aa, synthetic construct
YAKQGQN

SEQ ID NO: 16126 - protein, 7 aa, synthetic construct
YAKYGLN

SEQ ID NO: 16127 - protein, 7 aa, synthetic construct
SASTNGV

SEQ ID NO: 16128 - protein, 7 aa, synthetic construct
LSRMNEN

SEQ ID NO: 16129 - protein, 7 aa, synthetic construct
FSRSGAN

SEQ ID NO: 16130 - protein, 7 aa, synthetic construct
WVKSSPN

SEQ ID NO: 16131 - protein, 7 aa, synthetic construct
YARLNEN

SEQ ID NO: 16132 - protein, 7 aa, synthetic construct
YRSTNGI

SEQ ID NO: 16133 - protein, 7 aa, synthetic construct
LAKNGLN

SEQ ID NO: 16134 - protein, 7 aa, synthetic construct
VHSTNGI

SEQ ID NO: 16135 - protein, 7 aa, synthetic construct
DYTGKSA

SEQ ID NO: 16136 - protein, 7 aa, synthetic construct
YSKSGDN

SEQ ID NO: 16137 - protein, 7 aa, synthetic construct
YSRVNDN

SEQ ID NO: 16138 - protein, 7 aa, synthetic construct
YSKQNSN

SEQ ID NO: 16139 - protein, 7 aa, synthetic construct
LSKMGMN

SEQ ID NO: 16140 - protein, 7 aa, synthetic construct
FAKTGLN

SEQ ID NO: 16141 - protein, 7 aa, synthetic construct
DKYNDYK

SEQ ID NO: 16142 - protein, 7 aa, synthetic construct
YSKGGAN

SEQ ID NO: 16143 - protein, 7 aa, synthetic construct
YAKHGMN

SEQ ID NO: 16144 - protein, 7 aa, synthetic construct
FKSSNGV

SEQ ID NO: 16145 - protein, 7 aa, synthetic construct
YSRLNDA

SEQ ID NO: 16146 - protein, 7 aa, synthetic construct
FAKFNMN

SEQ ID NO: 16147 - protein, 7 aa, synthetic construct
YSKGGQN

SEQ ID NO: 16148 - protein, 7 aa, synthetic construct
LSKTGSN

SEQ ID NO: 16149 - protein, 7 aa, synthetic construct
YFTGIHG

SEQ ID NO: 16150 - protein, 7 aa, synthetic construct
YAKANAN

SEQ ID NO: 16151 - protein, 7 aa, synthetic construct
YTKSNTH

SEQ ID NO: 16152 - protein, 7 aa, synthetic construct
FSKTGHN

SEQ ID NO: 16153 - protein, 7 aa, synthetic construct
FARIGMN

SEQ ID NO: 16154 - protein, 7 aa, synthetic construct
YAKSNVN

SEQ ID NO: 16155 - protein, 7 aa, synthetic construct
FSRQGVN

SEQ ID NO: 16156 - protein, 7 aa, synthetic construct
FAKSGSN

SEQ ID NO: 16157 - protein, 7 aa, synthetic construct
YSRMGTN

SEQ ID NO: 16158 - protein, 7 aa, synthetic construct
VMSTNGV

SEQ ID NO: 16159 - protein, 7 aa, synthetic construct
NNSTNGI

SEQ ID NO: 16160 - protein, 7 aa, synthetic construct
YSRPGAN

SEQ ID NO: 16161 - protein, 7 aa, synthetic construct
YAKIGQN

SEQ ID NO: 16162 - protein, 7 aa, synthetic construct
YAKYGFN

SEQ ID NO: 16163 - protein, 7 aa, synthetic construct
LSKVNFN

SEQ ID NO: 16164 - protein, 7 aa, synthetic construct
YSKSNQN

SEQ ID NO: 16165 - protein, 7 aa, synthetic construct
YISSNGV

SEQ ID NO: 16166 - protein, 7 aa, synthetic construct
FAKANYN

SEQ ID NO: 16167 - protein, 7 aa, synthetic construct
GGSGMKY

SEQ ID NO: 16168 - protein, 7 aa, synthetic construct
SNTGRNA

SEQ ID NO: 16169 - protein, 7 aa, synthetic construct
YARMNVN

SEQ ID NO: 16170 - protein, 7 aa, synthetic construct
KQSTNGV

SEQ ID NO: 16171 - protein, 7 aa, synthetic construct
YESGPMR

SEQ ID NO: 16172 - protein, 7 aa, synthetic construct
KGEATTW

SEQ ID NO: 16173 - protein, 7 aa, synthetic construct
FAKTGAN

SEQ ID NO: 16174 - protein, 7 aa, synthetic construct
FAKGNWN

SEQ ID NO: 16175 - protein, 7 aa, synthetic construct
YSKVNHN

SEQ ID NO: 16176 - protein, 7 aa, synthetic construct
FSKSGIN

SEQ ID NO: 16177 - protein, 7 aa, synthetic construct
YAKTNAN

SEQ ID NO: 16178 - protein, 7 aa, synthetic construct
YSRNNEN

SEQ ID NO: 16179 - protein, 7 aa, synthetic construct
FSKMNLN

SEQ ID NO: 16180 - protein, 7 aa, synthetic construct
RESSNGV

SEQ ID NO: 16181 - protein, 7 aa, synthetic construct
LSKHNEN

SEQ ID NO: 16182 - protein, 7 aa, synthetic construct
QFSTNGI

SEQ ID NO: 16183 - protein, 7 aa, synthetic construct
FARVGFN

SEQ ID NO: 16184 - protein, 7 aa, synthetic construct
FAKNGHN

SEQ ID NO: 16185 - protein, 7 aa, synthetic construct
FSRMGVN

SEQ ID NO: 16186 - protein, 7 aa, synthetic construct
HHSTNGV

SEQ ID NO: 16187 - protein, 7 aa, synthetic construct
LSKNGFN

SEQ ID NO: 16188 - protein, 7 aa, synthetic construct
YSRPNAN

SEQ ID NO: 16189 - protein, 7 aa, synthetic construct
YAKQNWN

SEQ ID NO: 16190 - protein, 7 aa, synthetic construct
YSKVNNN

SEQ ID NO: 16191 - protein, 7 aa, synthetic construct
LAKIGHN

SEQ ID NO: 16192 - protein, 7 aa, synthetic construct
TTDFNGF

SEQ ID NO: 16193 - protein, 7 aa, synthetic construct
IYSSNGV

SEQ ID NO: 16194 - protein, 7 aa, synthetic construct
RDSQTTW

SEQ ID NO: 16195 - protein, 7 aa, synthetic construct
RVSSNGV

SEQ ID NO: 16196 - protein, 7 aa, synthetic construct
FAKGNNN

SEQ ID NO: 16197 - protein, 7 aa, synthetic construct
FSRMGDN

SEQ ID NO: 16198 - protein, 7 aa, synthetic construct
MHVKSPN

SEQ ID NO: 16199 - protein, 7 aa, synthetic construct
VGSINGI

SEQ ID NO: 16200 - protein, 7 aa, synthetic construct
YSKVNLN

SEQ ID NO: 16201 - protein, 7 aa, synthetic construct
TGSAVKW

SEQ ID NO: 16202 - protein, 7 aa, synthetic construct
YYTKVPT

SEQ ID NO: 16203 - protein, 7 aa, synthetic construct
YSKNGGN

SEQ ID NO: 16204 - protein, 7 aa, synthetic construct
MYGGVNP

SEQ ID NO: 16205 - protein, 7 aa, synthetic construct
RPNTANF

SEQ ID NO: 16206 - protein, 7 aa, synthetic construct
YYSSNGV

SEQ ID NO: 16207 - protein, 7 aa, synthetic construct
FAKQGHN

SEQ ID NO: 16208 - protein, 7 aa, synthetic construct
NGSTNGR

SEQ ID NO: 16209 - protein, 7 aa, synthetic construct
LSKHNQN

SEQ ID NO: 16210 - protein, 7 aa, synthetic construct
YARMNMN

SEQ ID NO: 16211 - protein, 7 aa, synthetic construct
LSKSNHN

SEQ ID NO: 16212 - protein, 7 aa, synthetic construct
YARNNDN

SEQ ID NO: 16213 - protein, 7 aa, synthetic construct
IERERYA

SEQ ID NO: 16214 - protein, 7 aa, synthetic construct
SMTGTSY

SEQ ID NO: 16215 - protein, 7 aa, synthetic construct
FSKTGIN

SEQ ID NO: 16216 - protein, 7 aa, synthetic construct
YSREGYN

SEQ ID NO: 16217 - protein, 7 aa, synthetic construct
YTKSQTD

SEQ ID NO: 16218 - protein, 7 aa, synthetic construct
LNRLGPT

SEQ ID NO: 16219 - protein, 7 aa, synthetic construct
RYSTNGV

SEQ ID NO: 16220 - protein, 7 aa, synthetic construct
FAKLGFN

SEQ ID NO: 16221 - protein, 7 aa, synthetic construct
LSKTNFN

SEQ ID NO: 16222 - protein, 7 aa, synthetic construct
YAKNNYN

SEQ ID NO: 16223 - protein, 7 aa, synthetic construct
SDGNSSY

SEQ ID NO: 16224 - protein, 7 aa, synthetic construct
RGSPTLY

SEQ ID NO: 16225 - protein, 7 aa, synthetic construct
FAKTGTN

SEQ ID NO: 16226 - protein, 7 aa, synthetic construct
FSKHNLN

SEQ ID NO: 16227 - protein, 7 aa, synthetic construct
FSKMNMN

SEQ ID NO: 16228 - protein, 7 aa, synthetic construct
FARIGSN

SEQ ID NO: 16229 - protein, 7 aa, synthetic construct
NPGRSSY

SEQ ID NO: 16230 - protein, 7 aa, synthetic construct
NMTGKSA

SEQ ID NO: 16231 - protein, 7 aa, synthetic construct
LAKMGTN

SEQ ID NO: 16232 - protein, 7 aa, synthetic construct
ERKPGNI

SEQ ID NO: 16233 - protein, 7 aa, synthetic construct
PLSTNGV

SEQ ID NO: 16234 - protein, 7 aa, synthetic construct
SYSSNGV

SEQ ID NO: 16235 - protein, 7 aa, synthetic construct
LSKQGLN

SEQ ID NO: 16236 - protein, 7 aa, synthetic construct
YSRPGSN

SEQ ID NO: 16237 - protein, 7 aa, synthetic construct
LSRNNEN

SEQ ID NO: 16238 - protein, 7 aa, synthetic construct
FSKMNQN

SEQ ID NO: 16239 - protein, 7 aa, synthetic construct
TPGRSGF

SEQ ID NO: 16240 - protein, 7 aa, synthetic construct
AHSSNGV

SEQ ID NO: 16241 - protein, 7 aa, synthetic construct
RGDQSTW

SEQ ID NO: 16242 - protein, 7 aa, synthetic construct
FSKMGMN

SEQ ID NO: 16243 - protein, 7 aa, synthetic construct
RGDHAGF

SEQ ID NO: 16244 - protein, 7 aa, synthetic construct
FAKENRN

SEQ ID NO: 16245 - protein, 7 aa, synthetic construct
FSKGNVN

SEQ ID NO: 16246 - protein, 7 aa, synthetic construct
YAKLNDN

SEQ ID NO: 16247 - protein, 7 aa, synthetic construct
NNRGTPA

SEQ ID NO: 16248 - protein, 7 aa, synthetic construct
YSRPNPN

SEQ ID NO: 16249 - protein, 7 aa, synthetic construct
FAKHGMN

SEQ ID NO: 16250 - protein, 7 aa, synthetic construct
YARPNHN

SEQ ID NO: 16251 - protein, 7 aa, synthetic construct
FAKPNWN

SEQ ID NO: 16252 - protein, 7 aa, synthetic construct
FSRNGQN

SEQ ID NO: 16253 - protein, 7 aa, synthetic construct
KSGGYPY

SEQ ID NO: 16254 - protein, 7 aa, synthetic construct
YARSSDS

SEQ ID NO: 16255 - protein, 7 aa, synthetic construct
LSRVNMN

SEQ ID NO: 16256 - protein, 7 aa, synthetic construct
KSGNSSY

SEQ ID NO: 16257 - protein, 7 aa, synthetic construct
YSRPGTN

SEQ ID NO: 16258 - protein, 7 aa, synthetic construct
MSRLNAT

SEQ ID NO: 16259 - protein, 7 aa, synthetic construct
YAKKGEN

SEQ ID NO: 16260 - protein, 7 aa, synthetic construct
YAKVGTN

SEQ ID NO: 16261 - protein, 7 aa, synthetic construct
FSRINHN

SEQ ID NO: 16262 - protein, 7 aa, synthetic construct
YTRSQEM

SEQ ID NO: 16263 - protein, 7 aa, synthetic construct
LSKLNGN

SEQ ID NO: 16264 - protein, 7 aa, synthetic construct
YARMNQN

SEQ ID NO: 16265 - protein, 7 aa, synthetic construct
YNAVIMK

SEQ ID NO: 16266 - protein, 7 aa, synthetic construct
YARPNVN

SEQ ID NO: 16267 - protein, 7 aa, synthetic construct
LARPGNN

SEQ ID NO: 16268 - protein, 7 aa, synthetic construct
FARLNTN

SEQ ID NO: 16269 - protein, 7 aa, synthetic construct
RNSQSVF

SEQ ID NO: 16270 - protein, 7 aa, synthetic construct
LWRNAEN

SEQ ID NO: 16271 - protein, 7 aa, synthetic construct
FAKTGSN

SEQ ID NO: 16272 - protein, 7 aa, synthetic construct
RGTSSNY

SEQ ID NO: 16273 - protein, 7 aa, synthetic construct
LSRAQSI

SEQ ID NO: 16274 - protein, 7 aa, synthetic construct
GPVHVNY

SEQ ID NO: 16275 - protein, 7 aa, synthetic construct
YSVRHPN

SEQ ID NO: 16276 - protein, 7 aa, synthetic construct
FAKDNRN

SEQ ID NO: 16277 - protein, 7 aa, synthetic construct
SRNGGNA

SEQ ID NO: 16278 - protein, 7 aa, synthetic construct
WAKLSLN

SEQ ID NO: 16279 - protein, 7 aa, synthetic construct
FAKQGNN

SEQ ID NO: 16280 - protein, 7 aa, synthetic construct
YAKIGEN

SEQ ID NO: 16281 - protein, 7 aa, synthetic construct
FSRQNTN

SEQ ID NO: 16282 - protein, 7 aa, synthetic construct
FSKSNHN

SEQ ID NO: 16283 - protein, 7 aa, synthetic construct
YARVNIN

SEQ ID NO: 16284 - protein, 7 aa, synthetic construct
YARINMN

SEQ ID NO: 16285 - protein, 7 aa, synthetic construct
FSKSGSN

SEQ ID NO: 16286 - protein, 7 aa, synthetic construct
NVRNQMA

SEQ ID NO: 16287 - protein, 7 aa, synthetic construct
YSKPGFN

SEQ ID NO: 16288 - protein, 7 aa, synthetic construct
FARANLN

SEQ ID NO: 16289 - protein, 7 aa, synthetic construct
YAKDGYN

SEQ ID NO: 16290 - protein, 7 aa, synthetic construct
YARPGDN

SEQ ID NO: 16291 - protein, 7 aa, synthetic construct
GDKVIRY

SEQ ID NO: 16292 - protein, 7 aa, synthetic construct
YAKYNLN

SEQ ID NO: 16293 - protein, 7 aa, synthetic construct
FAKMNIN

SEQ ID NO: 16294 - protein, 7 aa, synthetic construct
FSKMGSN

SEQ ID NO: 16295 - protein, 7 aa, synthetic construct
NSRLNDN

SEQ ID NO: 16296 - protein, 7 aa, synthetic construct
VSNKGAG

SEQ ID NO: 16297 - protein, 7 aa, synthetic construct
RGEHNAW

SEQ ID NO: 16298 - protein, 7 aa, synthetic construct
YERFIPN

SEQ ID NO: 16299 - protein, 7 aa, synthetic construct
TKSGTNA

SEQ ID NO: 16300 - protein, 7 aa, synthetic construct
YALKGMN

SEQ ID NO: 16301 - protein, 7 aa, synthetic construct
FAKSGGN

SEQ ID NO: 16302 - protein, 7 aa, synthetic construct
FARSNQN

SEQ ID NO: 16303 - protein, 7 aa, synthetic construct
FAKIGNN

SEQ ID NO: 16304 - protein, 7 aa, synthetic construct
SSGSNHW

SEQ ID NO: 16305 - protein, 7 aa, synthetic construct
MTGTSSY

SEQ ID NO: 16306 - protein, 7 aa, synthetic construct
YSRPGQN

SEQ ID NO: 16307 - protein, 7 aa, synthetic construct
FSKGNTN

SEQ ID NO: 16308 - protein, 7 aa, synthetic construct
RRDGVNA

SEQ ID NO: 16309 - protein, 7 aa, synthetic construct
YHKYSTD

SEQ ID NO: 16310 - protein, 7 aa, synthetic construct
YSKPNNN

SEQ ID NO: 16311 - protein, 7 aa, synthetic construct
FAKMGIN

SEQ ID NO: 16312 - protein, 7 aa, synthetic construct
FAKHNIN

SEQ ID NO: 16313 - protein, 7 aa, synthetic construct
TRSGGVA

SEQ ID NO: 16314 - protein, 7 aa, synthetic construct
NRSGMAA

SEQ ID NO: 16315 - protein, 7 aa, synthetic construct
YRQGLSN

SEQ ID NO: 16316 - protein, 7 aa, synthetic construct
FARINMN

SEQ ID NO: 16317 - protein, 7 aa, synthetic construct
FAKLGHN

SEQ ID NO: 16318 - protein, 7 aa, synthetic construct
FAKQNNN

SEQ ID NO: 16319 - protein, 7 aa, synthetic construct
FAKHGSN

SEQ ID NO: 16320 - protein, 7 aa, synthetic construct
FSKQGQN

SEQ ID NO: 16321 - protein, 7 aa, synthetic construct
DMRRMGE

SEQ ID NO: 16322 - protein, 7 aa, synthetic construct
GPGISKY

SEQ ID NO: 16323 - protein, 7 aa, synthetic construct
NTVNTMR

SEQ ID NO: 16324 - protein, 7 aa, synthetic construct
FSKVNQN

SEQ ID NO: 16325 - protein, 7 aa, synthetic construct
YSKTNQN

SEQ ID NO: 16326 - protein, 7 aa, synthetic construct
YAKFNAN

SEQ ID NO: 16327 - protein, 7 aa, synthetic construct
LAKSSPI

SEQ ID NO: 16328 - protein, 7 aa, synthetic construct
TRSGGSP

SEQ ID NO: 16329 - protein, 7 aa, synthetic construct
YAKGNGN

SEQ ID NO: 16330 - protein, 7 aa, synthetic construct
FAKQGSN

SEQ ID NO: 16331 - protein, 7 aa, synthetic construct
FSKNNSN

SEQ ID NO: 16332 - protein, 7 aa, synthetic construct
FSKVNPN

SEQ ID NO: 16333 - protein, 7 aa, synthetic construct
YGAIGRN

SEQ ID NO: 16334 - protein, 7 aa, synthetic construct
FSKSNNN

SEQ ID NO: 16335 - protein, 7 aa, synthetic construct
FARLNQN

SEQ ID NO: 16336 - protein, 7 aa, synthetic construct
MRNQPNA

SEQ ID NO: 16337 - protein, 7 aa, synthetic construct
YTRVDSN

SEQ ID NO: 16338 - protein, 7 aa, synthetic construct
YSRPGGN

SEQ ID NO: 16339 - protein, 7 aa, synthetic construct
HSRLTDN

SEQ ID NO: 16340 - protein, 7 aa, synthetic construct
VGSNHSW

SEQ ID NO: 16341 - protein, 7 aa, synthetic construct
LHDSRTY

SEQ ID NO: 16342 - protein, 7 aa, synthetic construct
YAKYNGN

SEQ ID NO: 16343 - protein, 7 aa, synthetic construct
TYSKPNS

SEQ ID NO: 16344 - protein, 7 aa, synthetic construct
YSRENAN

SEQ ID NO: 16345 - protein, 7 aa, synthetic construct
KAEYGAG

SEQ ID NO: 16346 - protein, 7 aa, synthetic construct
FAKVGNN

SEQ ID NO: 16347 - protein, 7 aa, synthetic construct
GTSSAAW

SEQ ID NO: 16348 - protein, 7 aa, synthetic construct
FSKHGSN

SEQ ID NO: 16349 - protein, 7 aa, synthetic construct
YARGSDL

SEQ ID NO: 16350 - protein, 7 aa, synthetic construct
FSRPNIN

SEQ ID NO: 16351 - protein, 7 aa, synthetic construct
FAKMGAN

SEQ ID NO: 16352 - protein, 7 aa, synthetic construct
FSKTNHN

SEQ ID NO: 16353 - protein, 7 aa, synthetic construct
RFSGEPS

SEQ ID NO: 16354 - protein, 7 aa, synthetic construct
KSDGSTW

SEQ ID NO: 16355 - protein, 7 aa, synthetic construct
ITNVNYG

SEQ ID NO: 16356 - protein, 7 aa, synthetic construct
YVQNRPN

SEQ ID NO: 16357 - protein, 7 aa, synthetic construct
YLPGHMN

SEQ ID NO: 16358 - protein, 7 aa, synthetic construct
YIRGNTN

SEQ ID NO: 16359 - protein, 7 aa, synthetic construct
FSRHNGN

SEQ ID NO: 16360 - protein, 7 aa, synthetic construct
RGGNTMP

SEQ ID NO: 16361 - protein, 7 aa, synthetic construct
FARIGEN

SEQ ID NO: 16362 - protein, 7 aa, synthetic construct
RSNGSGS

SEQ ID NO: 16363 - protein, 7 aa, synthetic construct
GGNKSNY

SEQ ID NO: 16364 - protein, 7 aa, synthetic construct
YSRSAKD

SEQ ID NO: 16365 - protein, 7 aa, synthetic construct
FARHGDN

SEQ ID NO: 16366 - protein, 7 aa, synthetic construct
YARDGIN

SEQ ID NO: 16367 - protein, 7 aa, synthetic construct
YARHNIN

SEQ ID NO: 16368 - protein, 7 aa, synthetic construct
YAREGVN

SEQ ID NO: 16369 - protein, 7 aa, synthetic construct
TRDVAGR

SEQ ID NO: 16370 - protein, 7 aa, synthetic construct
SLGSSKY

SEQ ID NO: 16371 - protein, 7 aa, synthetic construct
FAKGGGN

SEQ ID NO: 16372 - protein, 7 aa, synthetic construct
GRDRGPG

SEQ ID NO: 16373 - protein, 7 aa, synthetic construct
IKGGSSG

SEQ ID NO: 16374 - protein, 7 aa, synthetic construct
YKGGYNN

SEQ ID NO: 16375 - protein, 7 aa, synthetic construct
FARRGEN

SEQ ID NO: 16376 - protein, 7 aa, synthetic construct
FARYNTN

SEQ ID NO: 16377 - protein, 7 aa, synthetic construct
YSRPNSN

SEQ ID NO: 16378 - protein, 7 aa, synthetic construct
YSKEGYN

SEQ ID NO: 16379 - protein, 7 aa, synthetic construct
FAKMGQN

SEQ ID NO: 16380 - protein, 7 aa, synthetic construct
FAKSNNN

SEQ ID NO: 16381 - protein, 7 aa, synthetic construct
FSREGRN

SEQ ID NO: 16382 - protein, 7 aa, synthetic construct
MTGNSAY

SEQ ID NO: 16383 - protein, 7 aa, synthetic construct
FAKLGNN

SEQ ID NO: 16384 - protein, 7 aa, synthetic construct
QEYGGYQ

SEQ ID NO: 16385 - protein, 7 aa, synthetic construct
NTRGNGS

SEQ ID NO: 16386 - protein, 7 aa, synthetic construct
AESSRTY

SEQ ID NO: 16387 - protein, 7 aa, synthetic construct
KNHGGSY

SEQ ID NO: 16388 - protein, 7 aa, synthetic construct
YKADTRN

SEQ ID NO: 16389 - protein, 7 aa, synthetic construct
YAKLNEN

SEQ ID NO: 16390 - protein, 7 aa, synthetic construct
YNQRGQN

SEQ ID NO: 16391 - protein, 7 aa, synthetic construct
FAKTNQN

SEQ ID NO: 16392 - protein, 7 aa, synthetic construct
WTSGYSN

SEQ ID NO: 16393 - protein, 7 aa, synthetic construct
YSKINGN

SEQ ID NO: 16394 - protein, 7 aa, synthetic construct
DQSSTTW

SEQ ID NO: 16395 - protein, 7 aa, synthetic construct
YAKHNGN

SEQ ID NO: 16396 - protein, 7 aa, synthetic construct
FAKSNAN

SEQ ID NO: 16397 - protein, 7 aa, synthetic construct
FAKQNTN

SEQ ID NO: 16398 - protein, 7 aa, synthetic construct
FARMGDN

SEQ ID NO: 16399 - protein, 7 aa, synthetic construct
FSKVNTN

SEQ ID NO: 16400 - protein, 7 aa, synthetic construct
YTDHMRN

SEQ ID NO: 16401 - protein, 7 aa, synthetic construct
YRSNAIV

SEQ ID NO: 16402 - protein, 7 aa, synthetic construct
FARNNQN

SEQ ID NO: 16403 - protein, 7 aa, synthetic construct
FSKMGGN

SEQ ID NO: 16404 - protein, 7 aa, synthetic construct
FAKMNFN

SEQ ID NO: 16405 - protein, 7 aa, synthetic construct
FAKQNSN

SEQ ID NO: 16406 - protein, 7 aa, synthetic construct
NARGANA

SEQ ID NO: 16407 - protein, 7 aa, synthetic construct
FSRVNGN

SEQ ID NO: 16408 - protein, 7 aa, synthetic construct
NTRGTSA

SEQ ID NO: 16409 - protein, 7 aa, synthetic construct
YAKPNNN

SEQ ID NO: 16410 - protein, 7 aa, synthetic construct
FAKMNPN

SEQ ID NO: 16411 - protein, 7 aa, synthetic construct
FVKSANG

SEQ ID NO: 16412 - protein, 7 aa, synthetic construct
FARQNGN

SEQ ID NO: 16413 - protein, 7 aa, synthetic construct
LSSNLKY

SEQ ID NO: 16414 - protein, 7 aa, synthetic construct
RSSGTPA

SEQ ID NO: 16415 - protein, 7 aa, synthetic construct
FARLNDN

SEQ ID NO: 16416 - protein, 7 aa, synthetic construct
YAKMNQN

SEQ ID NO: 16417 - protein, 7 aa, synthetic construct
YSKDGRN

SEQ ID NO: 16418 - protein, 7 aa, synthetic construct
LYGGTNP

SEQ ID NO: 16419 - protein, 7 aa, synthetic construct
RDHMARG

SEQ ID NO: 16420 - protein, 7 aa, synthetic construct
RPYGGSD

SEQ ID NO: 16421 - protein, 7 aa, synthetic construct
FARININ

SEQ ID NO: 16422 - protein, 7 aa, synthetic construct
VNMGKAY

SEQ ID NO: 16423 - protein, 7 aa, synthetic construct
FAKPGWN

SEQ ID NO: 16424 - protein, 7 aa, synthetic construct
FAKFGNN

SEQ ID NO: 16425 - protein, 7 aa, synthetic construct
KADSSRY

SEQ ID NO: 16426 - protein, 7 aa, synthetic construct
RGNGTGS

SEQ ID NO: 16427 - protein, 7 aa, synthetic construct
GGVASSY

SEQ ID NO: 16428 - protein, 7 aa, synthetic construct
DTYGTKH

SEQ ID NO: 16429 - protein, 7 aa, synthetic construct
DSGVGRY

SEQ ID NO: 16430 - protein, 7 aa, synthetic construct
YSREGGN

SEQ ID NO: 16431 - protein, 7 aa, synthetic construct
YWGGEKQ

SEQ ID NO: 16432 - protein, 7 aa, synthetic construct
FAKFNAN

SEQ ID NO: 16433 - protein, 7 aa, synthetic construct
TISSSNW

SEQ ID NO: 16434 - protein, 7 aa, synthetic construct
IKYSSSD

SEQ ID NO: 16435 - protein, 7 aa, synthetic construct
FARPGTN

SEQ ID NO: 16436 - protein, 7 aa, synthetic construct
RSGGAGG

SEQ ID NO: 16437 - protein, 7 aa, synthetic construct
KDNATRY

SEQ ID NO: 16438 - protein, 7 aa, synthetic construct
YAKPNSN

SEQ ID NO: 16439 - protein, 7 aa, synthetic construct
YARYNQN

SEQ ID NO: 16440 - protein, 7 aa, synthetic construct
NARDIRY

SEQ ID NO: 16441 - protein, 7 aa, synthetic construct
IGHMGSD

SEQ ID NO: 16442 - protein, 7 aa, synthetic construct
YSRGDHN

SEQ ID NO: 16443 - protein, 7 aa, synthetic construct
YKNGMSN

SEQ ID NO: 16444 - protein, 7 aa, synthetic construct
FSRPGAN

SEQ ID NO: 16445 - protein, 7 aa, synthetic construct
FSKPGYN

SEQ ID NO: 16446 - protein, 7 aa, synthetic construct
FSHASSY

SEQ ID NO: 16447 - protein, 7 aa, synthetic construct
KGDKITW

SEQ ID NO: 16448 - protein, 7 aa, synthetic construct
YSQGKTN

SEQ ID NO: 16449 - protein, 7 aa, synthetic construct
FAKLGVN

SEQ ID NO: 16450 - protein, 7 aa, synthetic construct
FSKEGKN

SEQ ID NO: 16451 - protein, 7 aa, synthetic construct
IVNSRNS

SEQ ID NO: 16452 - protein, 7 aa, synthetic construct
FAKINYN

SEQ ID NO: 16453 - protein, 7 aa, synthetic construct
IGYSGAD

SEQ ID NO: 16454 - protein, 7 aa, synthetic construct
FAKYNEN

SEQ ID NO: 16455 - protein, 7 aa, synthetic construct
FSKVNNN

SEQ ID NO: 16456 - protein, 7 aa, synthetic construct
HTNVTAW

SEQ ID NO: 16457 - protein, 7 aa, synthetic construct
YHSSSGN

SEQ ID NO: 16458 - protein, 7 aa, synthetic construct
FFQGGHH

SEQ ID NO: 16459 - protein, 7 aa, synthetic construct
FAKMNVN

SEQ ID NO: 16460 - protein, 7 aa, synthetic construct
YAKVNMN

SEQ ID NO: 16461 - protein, 7 aa, synthetic construct
YRYDAVV

SEQ ID NO: 16462 - protein, 7 aa, synthetic construct
WKPGVPS

SEQ ID NO: 16463 - protein, 7 aa, synthetic construct
FSKPNSN

SEQ ID NO: 16464 - protein, 7 aa, synthetic construct
FAKLNSN

SEQ ID NO: 16465 - protein, 7 aa, synthetic construct
FSKGGGN

SEQ ID NO: 16466 - protein, 7 aa, synthetic construct
FARINDN

SEQ ID NO: 16467 - protein, 7 aa, synthetic construct
FAKTNLN

SEQ ID NO: 16468 - protein, 7 aa, synthetic construct
VSGFTKQ

SEQ ID NO: 16469 - protein, 7 aa, synthetic construct
FSRFNEN

SEQ ID NO: 16470 - protein, 7 aa, synthetic construct
VSLGTRN

SEQ ID NO: 16471 - protein, 7 aa, synthetic construct
FSRGGGN

SEQ ID NO: 16472 - protein, 7 aa, synthetic construct
QKIMRGD

SEQ ID NO: 16473 - protein, 7 aa, synthetic construct
YQRDGYG

SEQ ID NO: 16474 - protein, 7 aa, synthetic construct
FSKTNTN

SEQ ID NO: 16475 - protein, 7 aa, synthetic construct
HSHGGRD

SEQ ID NO: 16476 - protein, 7 aa, synthetic construct
HDRTSTY

SEQ ID NO: 16477 - protein, 7 aa, synthetic construct
TSDSRGW

SEQ ID NO: 16478 - protein, 7 aa, synthetic construct
WRTDGMG

SEQ ID NO: 16479 - protein, 7 aa, synthetic construct
GVKSAYQ

SEQ ID NO: 16480 - protein, 7 aa, synthetic construct
FARMNEN

SEQ ID NO: 16481 - protein, 7 aa, synthetic construct
YSKHNAS

SEQ ID NO: 16482 - protein, 7 aa, synthetic construct
FAKMNTN

SEQ ID NO: 16483 - protein, 7 aa, synthetic construct
KADRNPY

SEQ ID NO: 16484 - protein, 7 aa, synthetic construct
FSRDGKN

SEQ ID NO: 16485 - protein, 7 aa, synthetic construct
SNGKWSG

SEQ ID NO: 16486 - protein, 7 aa, synthetic construct
NNFGTRD

SEQ ID NO: 16487 - protein, 7 aa, synthetic construct
FAKVNAN

SEQ ID NO: 16488 - protein, 7 aa, synthetic construct
YFPGTMP

SEQ ID NO: 16489 - protein, 7 aa, synthetic construct
YAQQGLN

SEQ ID NO: 16490 - protein, 7 aa, synthetic construct
YARDGTN

SEQ ID NO: 16491 - protein, 7 aa, synthetic construct
FAKHNGN

SEQ ID NO: 16492 - protein, 7 aa, synthetic construct
RNMESMY

SEQ ID NO: 16493 - protein, 7 aa, synthetic construct
FAKIGGN

SEQ ID NO: 16494 - protein, 7 aa, synthetic construct
FAKPGSN

SEQ ID NO: 16495 - protein, 7 aa, synthetic construct
FAKAGDN

SEQ ID NO: 16496 - protein, 7 aa, synthetic construct
DFGVSRH

SEQ ID NO: 16497 - protein, 7 aa, synthetic construct
FAKSNTN

SEQ ID NO: 16498 - protein, 7 aa, synthetic construct
YHGHTLH

SEQ ID NO: 16499 - protein, 7 aa, synthetic construct
FAKAGGN

SEQ ID NO: 16500 - protein, 7 aa, synthetic construct
ANMNRTE

SEQ ID NO: 16501 - protein, 7 aa, synthetic construct
FSRENSN

SEQ ID NO: 16502 - protein, 7 aa, synthetic construct
FSKGNEN

SEQ ID NO: 16503 - protein, 7 aa, synthetic construct
YAKMNEN

SEQ ID NO: 16504 - protein, 7 aa, synthetic construct
YAKPNMN

SEQ ID NO: 16505 - protein, 7 aa, synthetic construct
GNQNSNY

SEQ ID NO: 16506 - protein, 7 aa, synthetic construct
YSRDGEN

SEQ ID NO: 16507 - protein, 7 aa, synthetic construct
YNQNTYK

SEQ ID NO: 16508 - protein, 7 aa, synthetic construct
FAKLNAN

SEQ ID NO: 16509 - protein, 7 aa, synthetic construct
FSKTNQN

SEQ ID NO: 16510 - protein, 7 aa, synthetic construct
FSRPNEN

SEQ ID NO: 16511 - protein, 7 aa, synthetic construct
FSRPGVN

SEQ ID NO: 16512 - protein, 7 aa, synthetic construct
FAREGVN

SEQ ID NO: 16513 - protein, 7 aa, synthetic construct
FSKDGRN

SEQ ID NO: 16514 - protein, 7 aa, synthetic construct
NHKSTAN

SEQ ID NO: 16515 - protein, 7 aa, synthetic construct
FARPGQN

SEQ ID NO: 16516 - protein, 7 aa, synthetic construct
NSQDTKW

SEQ ID NO: 16517 - protein, 7 aa, synthetic construct
NLSHGHG

SEQ ID NO: 16518 - protein, 7 aa, synthetic construct
FARFNEN

SEQ ID NO: 16519 - protein, 7 aa, synthetic construct
YMRNTVP

SEQ ID NO: 16520 - protein, 7 aa, synthetic construct
YEKYTNS

SEQ ID NO: 16521 - protein, 7 aa, synthetic construct
HGGTKNG

SEQ ID NO: 16522 - protein, 7 aa, synthetic construct
FSRDGHN

SEQ ID NO: 16523 - protein, 7 aa, synthetic construct
FSKPGIN

SEQ ID NO: 16524 - protein, 7 aa, synthetic construct
FAKQGDN

SEQ ID NO: 16525 - protein, 7 aa, synthetic construct
FAKINTN

SEQ ID NO: 16526 - protein, 7 aa, synthetic construct
YSRDGSN

SEQ ID NO: 16527 - protein, 7 aa, synthetic construct
FSKPNPN

SEQ ID NO: 16528 - protein, 7 aa, synthetic construct
RPTGPNG

SEQ ID NO: 16529 - protein, 7 aa, synthetic construct
WSGGSGG

SEQ ID NO: 16530 - protein, 7 aa, synthetic construct
NSDRGKN

SEQ ID NO: 16531 - protein, 7 aa, synthetic construct
DKGNNAY

SEQ ID NO: 16532 - protein, 7 aa, synthetic construct
VVAMHKQ

SEQ ID NO: 16533 - protein, 7 aa, synthetic construct
IGGKQGL

SEQ ID NO: 16534 - protein, 7 aa, synthetic construct
RIKDTPE

SEQ ID NO: 16535 - protein, 7 aa, synthetic construct
YYKTDSS

SEQ ID NO: 16536 - protein, 7 aa, synthetic construct
FSKINGN

SEQ ID NO: 16537 - protein, 7 aa, synthetic construct
LGDGWGK

SEQ ID NO: 16538 - protein, 7 aa, synthetic construct
FSKNNEN

SEQ ID NO: 16539 - protein, 7 aa, synthetic construct
FARDGAN

SEQ ID NO: 16540 - protein, 7 aa, synthetic construct
YAKDNLN

SEQ ID NO: 16541 - protein, 7 aa, synthetic construct
FAKENSN

SEQ ID NO: 16542 - protein, 7 aa, synthetic construct
DYKGFPS

SEQ ID NO: 16543 - protein, 7 aa, synthetic construct
FAKLGDN

SEQ ID NO: 16544 - protein, 7 aa, synthetic construct
FAKDGYN

SEQ ID NO: 16545 - protein, 7 aa, synthetic construct
FAKDGMN

SEQ ID NO: 16546 - protein, 7 aa, synthetic construct
FAKANEN

SEQ ID NO: 16547 - protein, 7 aa, synthetic construct
FAKEGGN

SEQ ID NO: 16548 - protein, 7 aa, synthetic construct
YPGSGGL

SEQ ID NO: 16549 - protein, 7 aa, synthetic construct
NSSGMRE

SEQ ID NO: 16550 - protein, 7 aa, synthetic construct
FSKPNLN

SEQ ID NO: 16551 - protein, 7 aa, synthetic construct
YSKFGVN

SEQ ID NO: 16552 - protein, 7 aa, synthetic construct
IASLGRD

SEQ ID NO: 16553 - protein, 7 aa, synthetic construct
FSKINDN

SEQ ID NO: 16554 - protein, 7 aa, synthetic construct
VRIDQAQ

SEQ ID NO: 16555 - protein, 7 aa, synthetic construct
YAKENLN

SEQ ID NO: 16556 - protein, 7 aa, synthetic construct
FARPNHN

SEQ ID NO: 16557 - protein, 7 aa, synthetic construct
NIHGYVT

SEQ ID NO: 16558 - protein, 7 aa, synthetic construct
YAKDNQN

SEQ ID NO: 16559 - protein, 7 aa, synthetic construct
FSKENQN

SEQ ID NO: 16560 - protein, 7 aa, synthetic construct
FAKNNYN

SEQ ID NO: 16561 - protein, 7 aa, synthetic construct
FSKFGIN

SEQ ID NO: 16562 - protein, 7 aa, synthetic construct
YSRLSAI

SEQ ID NO: 16563 - protein, 7 aa, synthetic construct
WPPPVNS

SEQ ID NO: 16564 - protein, 7 aa, synthetic construct
RTALVFP

SEQ ID NO: 16565 - protein, 7 aa, synthetic construct
IHRLLPS

SEQ ID NO: 16566 - protein, 7 aa, synthetic construct
YFTGVVA

SEQ ID NO: 16567 - protein, 7 aa, synthetic construct
RNDMVFP

SEQ ID NO: 16568 - protein, 7 aa, synthetic construct
LHRLLKD

SEQ ID NO: 16569 - protein, 7 aa, synthetic construct
YLKSQSY

SEQ ID NO: 16570 - protein, 7 aa, synthetic construct
YTKSDVR

SEQ ID NO: 16571 - protein, 7 aa, synthetic construct
KTYDAFV

SEQ ID NO: 16572 - protein, 7 aa, synthetic construct
YLKSERN

SEQ ID NO: 16573 - protein, 7 aa, synthetic construct
RSEHVFP

SEQ ID NO: 16574 - protein, 7 aa, synthetic construct
SYAKSLL

SEQ ID NO: 16575 - protein, 7 aa, synthetic construct
LSKLSAN

SEQ ID NO: 16576 - protein, 7 aa, synthetic construct
YSRLSGN

SEQ ID NO: 16577 - protein, 7 aa, synthetic construct
YSRLNKD

SEQ ID NO: 16578 - protein, 7 aa, synthetic construct
YSAIGMN

SEQ ID NO: 16579 - protein, 7 aa, synthetic construct
YLKSQGN

SEQ ID NO: 16580 - protein, 7 aa, synthetic construct
YSKLNDK

SEQ ID NO: 16581 - protein, 7 aa, synthetic construct
YLKSQAM

SEQ ID NO: 16582 - protein, 7 aa, synthetic construct
YVKSSNN

SEQ ID NO: 16583 - protein, 7 aa, synthetic construct
YVKSDHH

SEQ ID NO: 16584 - protein, 7 aa, synthetic construct
RGIDFYP

SEQ ID NO: 16585 - protein, 7 aa, synthetic construct
YVRSDVR

SEQ ID NO: 16586 - protein, 7 aa, synthetic construct
YHKLANN

SEQ ID NO: 16587 - protein, 7 aa, synthetic construct
YHILGKN

SEQ ID NO: 16588 - protein, 7 aa, synthetic construct
LSRVGID

SEQ ID NO: 16589 - protein, 7 aa, synthetic construct
MSRIGVN

SEQ ID NO: 16590 - protein, 7 aa, synthetic construct
LSRSGNN

SEQ ID NO: 16591 - protein, 7 aa, synthetic construct
YSKAQPN

SEQ ID NO: 16592 - protein, 7 aa, synthetic construct
YHKSQSN

SEQ ID NO: 16593 - protein, 7 aa, synthetic construct
DMSSRIW

SEQ ID NO: 16594 - protein, 7 aa, synthetic construct
HSRLNVS

SEQ ID NO: 16595 - protein, 7 aa, synthetic construct
RTPTVYP

SEQ ID NO: 16596 - protein, 7 aa, synthetic construct
YTRLSMN

SEQ ID NO: 16597 - protein, 7 aa, synthetic construct
YLKSDKS

SEQ ID NO: 16598 - protein, 7 aa, synthetic construct
YTRSQTE

SEQ ID NO: 16599 - protein, 7 aa, synthetic construct
FVKSDTK

SEQ ID NO: 16600 - protein, 7 aa, synthetic construct
RALECCY

SEQ ID NO: 16601 - protein, 7 aa, synthetic construct
LHRDGIN

SEQ ID NO: 16602 - protein, 7 aa, synthetic construct
VHRLQDK

SEQ ID NO: 16603 - protein, 7 aa, synthetic construct
YVRSDRN

SEQ ID NO: 16604 - protein, 7 aa, synthetic construct
YSSTHGV

SEQ ID NO: 16605 - protein, 7 aa, synthetic construct
SMESRLW

SEQ ID NO: 16606 - protein, 7 aa, synthetic construct
LHRLASS

SEQ ID NO: 16607 - protein, 7 aa, synthetic construct
DLSSHNW

SEQ ID NO: 16608 - protein, 7 aa, synthetic construct
LHALSHN

SEQ ID NO: 16609 - protein, 7 aa, synthetic construct
LHVRSLN

SEQ ID NO: 16610 - protein, 7 aa, synthetic construct
YVKYEDK

SEQ ID NO: 16611 - protein, 7 aa, synthetic construct
YSRLQEN

SEQ ID NO: 16612 - protein, 7 aa, synthetic construct
LSRVGFN

SEQ ID NO: 16613 - protein, 7 aa, synthetic construct
YARGGPN

SEQ ID NO: 16614 - protein, 7 aa, synthetic construct
HCGKCLN

SEQ ID NO: 16615 - protein, 7 aa, synthetic construct
LHRSGDN

SEQ ID NO: 16616 - protein, 7 aa, synthetic construct
NCKPCFD

SEQ ID NO: 16617 - protein, 7 aa, synthetic construct
HSRMNEN

SEQ ID NO: 16618 - protein, 7 aa, synthetic construct
LHRLSPY

SEQ ID NO: 16619 - protein, 7 aa, synthetic construct
LHKAGYN

SEQ ID NO: 16620 - protein, 7 aa, synthetic construct
LSRISVN

SEQ ID NO: 16621 - protein, 7 aa, synthetic construct
YSRMNDN

SEQ ID NO: 16622 - protein, 7 aa, synthetic construct
LWRTGIN

SEQ ID NO: 16623 - protein, 7 aa, synthetic construct
YFMGRSD

SEQ ID NO: 16624 - protein, 7 aa, synthetic construct
LHRASSN

SEQ ID NO: 16625 - protein, 7 aa, synthetic construct
YSRVDDR

SEQ ID NO: 16626 - protein, 7 aa, synthetic construct
YSRNSDN

SEQ ID NO: 16627 - protein, 7 aa, synthetic construct
YSARGPN

SEQ ID NO: 16628 - protein, 7 aa, synthetic construct
LTRISHN

SEQ ID NO: 16629 - protein, 7 aa, synthetic construct
LCRPCSE

SEQ ID NO: 16630 - protein, 7 aa, synthetic construct
LSRLNHN

SEQ ID NO: 16631 - protein, 7 aa, synthetic construct
LHVLGPN

SEQ ID NO: 16632 - protein, 7 aa, synthetic construct
YFTGIWA

SEQ ID NO: 16633 - protein, 7 aa, synthetic construct
YMKYDTQ

SEQ ID NO: 16634 - protein, 7 aa, synthetic construct
MSRLSQN

SEQ ID NO: 16635 - protein, 7 aa, synthetic construct
LHRSSNN

SEQ ID NO: 16636 - protein, 7 aa, synthetic construct
YHRLSNN

SEQ ID NO: 16637 - protein, 7 aa, synthetic construct
YHARAPN

SEQ ID NO: 16638 - protein, 7 aa, synthetic construct
NEDWVKW

SEQ ID NO: 16639 - protein, 7 aa, synthetic construct
IMSSRSW

SEQ ID NO: 16640 - protein, 7 aa, synthetic construct
YARTSHN

SEQ ID NO: 16641 - protein, 7 aa, synthetic construct
NGPHGWN

SEQ ID NO: 16642 - protein, 7 aa, synthetic construct
WVRSDTK

SEQ ID NO: 16643 - protein, 7 aa, synthetic construct
YQRQGWD

SEQ ID NO: 16644 - protein, 7 aa, synthetic construct
RLYDAYQ

SEQ ID NO: 16645 - protein, 7 aa, synthetic construct
GPGYVNW

SEQ ID NO: 16646 - protein, 7 aa, synthetic construct
LHRNTQN

SEQ ID NO: 16647 - protein, 7 aa, synthetic construct
MPNEGWF

SEQ ID NO: 16648 - protein, 7 aa, synthetic construct
YLDRVVY

SEQ ID NO: 16649 - protein, 7 aa, synthetic construct
SYARSVN

SEQ ID NO: 16650 - protein, 7 aa, synthetic construct
LTRLSHN

SEQ ID NO: 16651 - protein, 7 aa, synthetic construct
YRSLVVG

SEQ ID NO: 16652 - protein, 7 aa, synthetic construct
YVKSDRC

SEQ ID NO: 16653 - protein, 7 aa, synthetic construct
YHRAQMN

SEQ ID NO: 16654 - protein, 7 aa, synthetic construct
DGGRSAW

SEQ ID NO: 16655 - protein, 7 aa, synthetic construct
LSRSSYN

SEQ ID NO: 16656 - protein, 7 aa, synthetic construct
RVLANWP

SEQ ID NO: 16657 - protein, 7 aa, synthetic construct
LMIDAFP

SEQ ID NO: 16658 - protein, 7 aa, synthetic construct
YHRTGNN

SEQ ID NO: 16659 - protein, 7 aa, synthetic construct
MTYDSYD

SEQ ID NO: 16660 - protein, 7 aa, synthetic construct
RNLYDTQ

SEQ ID NO: 16661 - protein, 7 aa, synthetic construct
FKQLVNY

SEQ ID NO: 16662 - protein, 7 aa, synthetic construct
QPYELPW

SEQ ID NO: 16663 - protein, 7 aa, synthetic construct
EMESFNW

SEQ ID NO: 16664 - protein, 7 aa, synthetic construct
MHRLAVN

SEQ ID NO: 16665 - protein, 7 aa, synthetic construct
RVSVLWP

SEQ ID NO: 16666 - protein, 7 aa, synthetic construct
YKNLIQG

SEQ ID NO: 16667 - protein, 7 aa, synthetic construct
LHRLAAN

SEQ ID NO: 16668 - protein, 7 aa, synthetic construct
YFNVVKG

SEQ ID NO: 16669 - protein, 7 aa, synthetic construct
QYVRSSI

SEQ ID NO: 16670 - protein, 7 aa, synthetic construct
MSRFDIH

SEQ ID NO: 16671 - protein, 7 aa, synthetic construct
LTYDAYE

SEQ ID NO: 16672 - protein, 7 aa, synthetic construct
WGLWRLD

SEQ ID NO: 16673 - protein, 7 aa, synthetic construct
YRDIISG

SEQ ID NO: 16674 - protein, 7 aa, synthetic construct
SYTRLQT

SEQ ID NO: 16675 - protein, 7 aa, synthetic construct
QYTRNVS

SEQ ID NO: 16676 - protein, 7 aa, synthetic construct
LHVRLNN

SEQ ID NO: 16677 - protein, 7 aa, synthetic construct
RTREVWP

SEQ ID NO: 16678 - protein, 7 aa, synthetic construct
NAPLWFS

SEQ ID NO: 16679 - protein, 7 aa, synthetic construct
RNAFDHM

SEQ ID NO: 16680 - protein, 7 aa, synthetic construct
FSGRVLF

SEQ ID NO: 16681 - protein, 7 aa, synthetic construct
KHGTMWG

SEQ ID NO: 16682 - protein, 7 aa, synthetic construct
SRKTGYP

SEQ ID NO: 16683 - protein, 7 aa, synthetic construct
IQNKLWS

SEQ ID NO: 16684 - protein, 7 aa, synthetic construct
SYTRLTL

SEQ ID NO: 16685 - protein, 7 aa, synthetic construct
NDLVHWP

SEQ ID NO: 16686 - protein, 7 aa, synthetic construct
AYSRLMS

SEQ ID NO: 16687 - protein, 7 aa, synthetic construct
WPSITTY

SEQ ID NO: 16688 - protein, 7 aa, synthetic construct
QLSGLWP

SEQ ID NO: 16689 - protein, 7 aa, synthetic construct
NSPFDTY

SEQ ID NO: 16690 - protein, 7 aa, synthetic construct
MSPLVWT

SEQ ID NO: 16691 - protein, 7 aa, synthetic construct
RQGTYFP

SEQ ID NO: 16692 - protein, 7 aa, synthetic construct
TNTIRWP

SEQ ID NO: 16693 - protein, 7 aa, synthetic construct
YAIYSTH

SEQ ID NO: 16694 - protein, 7 aa, synthetic construct
SALHGYP

SEQ ID NO: 16695 - protein, 7 aa, synthetic construct
IYVRSIS

SEQ ID NO: 16696 - protein, 7 aa, synthetic construct
TRGMDWP

SEQ ID NO: 16697 - protein, 7 aa, synthetic construct
YKQWHFD

SEQ ID NO: 16698 - protein, 7 aa, synthetic construct
VYVRSQS

SEQ ID NO: 16699 - protein, 7 aa, synthetic construct
LINGSWP

SEQ ID NO: 16700 - protein, 7 aa, synthetic construct
VPIWHNG

SEQ ID NO: 16701 - protein, 7 aa, synthetic construct
VVHGVWP

SEQ ID NO: 16702 - protein, 7 aa, synthetic construct
SYVRSTQ

SEQ ID NO: 16703 - protein, 7 aa, synthetic construct
GSPINWA

SEQ ID NO: 16704 - protein, 7 aa, synthetic construct
IYSKLQH

SEQ ID NO: 16705 - protein, 7 aa, synthetic construct
EESFWRA

SEQ ID NO: 16706 - protein, 7 aa, synthetic construct
VWVKSSI

SEQ ID NO: 16707 - protein, 7 aa, synthetic construct
TYVRSIT

SEQ ID NO: 16708 - protein, 7 aa, synthetic construct
KTGGIWP

SEQ ID NO: 16709 - protein, 7 aa, synthetic construct
PGSLRYG

SEQ ID NO: 16710 - protein, 7 aa, synthetic construct
LVSNDWP

SEQ ID NO: 16711 - protein, 7 aa, synthetic construct
GRSVSTW

SEQ ID NO: 16712 - protein, 7 aa, synthetic construct
GSTYSRA

SEQ ID NO: 16713 - protein, 7 aa, synthetic construct
KISGSWP

SEQ ID NO: 16714 - protein, 7 aa, synthetic construct
KLGTAWP

SEQ ID NO: 16715 - protein, 7 aa, synthetic construct
VYSRIDI

SEQ ID NO: 16716 - protein, 7 aa, synthetic construct
IYVRSAS

SEQ ID NO: 16717 - protein, 7 aa, synthetic construct
RSLYDTL

SEQ ID NO: 16718 - protein, 7 aa, synthetic construct
YYDLVEY

SEQ ID NO: 16719 - protein, 7 aa, synthetic construct
MLEYYNN

SEQ ID NO: 16720 - protein, 7 aa, synthetic construct
TNMYDTY

SEQ ID NO: 16721 - protein, 7 aa, synthetic construct
KILTVWP

SEQ ID NO: 16722 - protein, 7 aa, synthetic construct
LYTRLDI

SEQ ID NO: 16723 - protein, 7 aa, synthetic construct
RDEANWP

SEQ ID NO: 16724 - protein, 7 aa, synthetic construct
KSPNTPW

SEQ ID NO: 16725 - protein, 7 aa, synthetic construct
GFITVYP

SEQ ID NO: 16726 - protein, 7 aa, synthetic construct
TRSMWSE

SEQ ID NO: 16727 - protein, 7 aa, synthetic construct
YKTNNWP

SEQ ID NO: 16728 - protein, 7 aa, synthetic construct
KNATVWP

SEQ ID NO: 16729 - protein, 7 aa, synthetic construct
VVKDYWP

SEQ ID NO: 16730 - protein, 7 aa, synthetic construct
GLGWING

SEQ ID NO: 16731 - protein, 7 aa, synthetic construct
QYVRTAT

SEQ ID NO: 16732 - protein, 7 aa, synthetic construct
RNTYDSY

SEQ ID NO: 16733 - protein, 7 aa, synthetic construct
VPTMWSA

SEQ ID NO: 16734 - protein, 7 aa, synthetic construct
IVGEAWP

SEQ ID NO: 16735 - protein, 7 aa, synthetic construct
TVTEVWP

SEQ ID NO: 16736 - protein, 7 aa, synthetic construct
KQPVWLA

SEQ ID NO: 16737 - protein, 7 aa, synthetic construct
KYTRTEI

SEQ ID NO: 16738 - protein, 7 aa, synthetic construct
PMPNMVW

SEQ ID NO: 16739 - protein, 7 aa, synthetic construct
ARGQLPW

SEQ ID NO: 16740 - protein, 7 aa, synthetic construct
LQGSNWP

SEQ ID NO: 16741 - protein, 7 aa, synthetic construct
TQALNWP

SEQ ID NO: 16742 - protein, 7 aa, synthetic construct
MYVRSVE

SEQ ID NO: 16743 - protein, 7 aa, synthetic construct
ALTRLQM

SEQ ID NO: 16744 - protein, 7 aa, synthetic construct
DPKGYFF

SEQ ID NO: 16745 - protein, 7 aa, synthetic construct
SYVRTLS

SEQ ID NO: 16746 - protein, 7 aa, synthetic construct
RQNSVWP

SEQ ID NO: 16747 - protein, 7 aa, synthetic construct
AFVRSVP

SEQ ID NO: 16748 - protein, 7 aa, synthetic construct
NKNGNWP

SEQ ID NO: 16749 - protein, 7 aa, synthetic construct
QYTRLQL

SEQ ID NO: 16750 - protein, 7 aa, synthetic construct
VKPNIMW

SEQ ID NO: 16751 - protein, 7 aa, synthetic construct
KSGDHWP

SEQ ID NO: 16752 - protein, 7 aa, synthetic construct
IYIKSAV

SEQ ID NO: 16753 - protein, 7 aa, synthetic construct
RLNDTWP

SEQ ID NO: 16754 - protein, 7 aa, synthetic construct
MVNKTWP

SEQ ID NO: 16755 - protein, 7 aa, synthetic construct
VYSRLDT

SEQ ID NO: 16756 - protein, 7 aa, synthetic construct
LKDHNWP

SEQ ID NO: 16757 - protein, 7 aa, synthetic construct
SAPIYFN

SEQ ID NO: 16758 - protein, 7 aa, synthetic construct
LVHDAWP

SEQ ID NO: 16759 - protein, 7 aa, synthetic construct
RWDPHDQ

SEQ ID NO: 16760 - protein, 7 aa, synthetic construct
LNVWKQP

SEQ ID NO: 16761 - protein, 7 aa, synthetic construct
RLTDTWP

SEQ ID NO: 16762 - protein, 7 aa, synthetic construct
IYVKSVS

SEQ ID NO: 16763 - protein, 7 aa, synthetic construct
MKGNNWP

SEQ ID NO: 16764 - protein, 7 aa, synthetic construct
RNVYDGY

SEQ ID NO: 16765 - protein, 7 aa, synthetic construct
IYIKSST

SEQ ID NO: 16766 - protein, 7 aa, synthetic construct
TKHYTFP

SEQ ID NO: 16767 - protein, 7 aa, synthetic construct
WKMTQLG

SEQ ID NO: 16768 - protein, 7 aa, synthetic construct
QYIRSSS

SEQ ID NO: 16769 - protein, 7 aa, synthetic construct
SMILDWK

SEQ ID NO: 16770 - protein, 7 aa, synthetic construct
REFEQWP

SEQ ID NO: 16771 - protein, 7 aa, synthetic construct
YTVYSTF

SEQ ID NO: 16772 - protein, 7 aa, synthetic construct
NKPLDWK

SEQ ID NO: 16773 - protein, 7 aa, synthetic construct
ATWPLMG

SEQ ID NO: 16774 - protein, 7 aa, synthetic construct
GNEFWSP

SEQ ID NO: 16775 - protein, 7 aa, synthetic construct
LMNNDWP

SEQ ID NO: 16776 - protein, 7 aa, synthetic construct
VTGAVWP

SEQ ID NO: 16777 - protein, 7 aa, synthetic construct
SGPIWLA

SEQ ID NO: 16778 - protein, 7 aa, synthetic construct
HKNPLWG

SEQ ID NO: 16779 - protein, 7 aa, synthetic construct
SNGRLNW

SEQ ID NO: 16780 - protein, 7 aa, synthetic construct
IRGNEWP

SEQ ID NO: 16781 - protein, 7 aa, synthetic construct
RGPVYLS

SEQ ID NO: 16782 - protein, 7 aa, synthetic construct
RNKGDWP

SEQ ID NO: 16783 - protein, 7 aa, synthetic construct
VSLFSNH

SEQ ID NO: 16784 - protein, 7 aa, synthetic construct
QGLWRDA

SEQ ID NO: 16785 - protein, 7 aa, synthetic construct
FVASEWP

SEQ ID NO: 16786 - protein, 7 aa, synthetic construct
VYHKFQI

SEQ ID NO: 16787 - protein, 7 aa, synthetic construct
GRPNLLW

SEQ ID NO: 16788 - protein, 7 aa, synthetic construct
WRSTSFG

SEQ ID NO: 16789 - protein, 7 aa, synthetic construct
NNIFATY

SEQ ID NO: 16790 - protein, 7 aa, synthetic construct
SRLTLFP

SEQ ID NO: 16791 - protein, 7 aa, synthetic construct
RYLKSQE

SEQ ID NO: 16792 - protein, 7 aa, synthetic construct
TFVRSVL

SEQ ID NO: 16793 - protein, 7 aa, synthetic construct
TRMAMFP

SEQ ID NO: 16794 - protein, 7 aa, synthetic construct
QYTHKVL

SEQ ID NO: 16795 - protein, 7 aa, synthetic construct
MAQGNWP

SEQ ID NO: 16796 - protein, 7 aa, synthetic construct
VYSKLMT

SEQ ID NO: 16797 - protein, 7 aa, synthetic construct
MMSDAWP

SEQ ID NO: 16798 - protein, 7 aa, synthetic construct
RKESMWP

SEQ ID NO: 16799 - protein, 7 aa, synthetic construct
SGWLTEV

SEQ ID NO: 16800 - protein, 7 aa, synthetic construct
VLSGMWP

SEQ ID NO: 16801 - protein, 7 aa, synthetic construct
SYSRVQV

SEQ ID NO: 16802 - protein, 7 aa, synthetic construct
DGLAGYY

SEQ ID NO: 16803 - protein, 7 aa, synthetic construct
DPVNVWG

SEQ ID NO: 16804 - protein, 7 aa, synthetic construct
VYTRMDI

SEQ ID NO: 16805 - protein, 7 aa, synthetic construct
VEHNNWP

SEQ ID NO: 16806 - protein, 7 aa, synthetic construct
SYARSVP

SEQ ID NO: 16807 - protein, 7 aa, synthetic construct
QRATLFP

SEQ ID NO: 16808 - protein, 7 aa, synthetic construct
TYSRLQL

SEQ ID NO: 16809 - protein, 7 aa, synthetic construct
MDKDAWP

SEQ ID NO: 16810 - protein, 7 aa, synthetic construct
EKGMWTP

SEQ ID NO: 16811 - protein, 7 aa, synthetic construct
LYVKSTV

SEQ ID NO: 16812 - protein, 7 aa, synthetic construct
AMGSLWP

SEQ ID NO: 16813 - protein, 7 aa, synthetic construct
MMGQQWP

SEQ ID NO: 16814 - protein, 7 aa, synthetic construct
SYVKSST

SEQ ID NO: 16815 - protein, 7 aa, synthetic construct
LILENWP

SEQ ID NO: 16816 - protein, 7 aa, synthetic construct
RNGDNWP

SEQ ID NO: 16817 - protein, 7 aa, synthetic construct
VFSKIQH

SEQ ID NO: 16818 - protein, 7 aa, synthetic construct
VMKDLWP

SEQ ID NO: 16819 - protein, 7 aa, synthetic construct
KRLQEWP

SEQ ID NO: 16820 - protein, 7 aa, synthetic construct
PMNGNWP

SEQ ID NO: 16821 - protein, 7 aa, synthetic construct
INLKEWP

SEQ ID NO: 16822 - protein, 7 aa, synthetic construct
QYVLSMK

SEQ ID NO: 16823 - protein, 7 aa, synthetic construct
NLMGTWP

SEQ ID NO: 16824 - protein, 7 aa, synthetic construct
VFSKSMY

SEQ ID NO: 16825 - protein, 7 aa, synthetic construct
QYVKSTT

SEQ ID NO: 16826 - protein, 7 aa, synthetic construct
KPMYLGT

SEQ ID NO: 16827 - protein, 7 aa, synthetic construct
QYTKSVP

SEQ ID NO: 16828 - protein, 7 aa, synthetic construct
QFVKSIS

SEQ ID NO: 16829 - protein, 7 aa, synthetic construct
DGFTNLW

SEQ ID NO: 16830 - protein, 7 aa, synthetic construct
KNAEVWP

SEQ ID NO: 16831 - protein, 7 aa, synthetic construct
SRSSLFP

SEQ ID NO: 16832 - protein, 7 aa, synthetic construct
VYHKLTT

SEQ ID NO: 16833 - protein, 7 aa, synthetic construct
GGMFMSP

SEQ ID NO: 16834 - protein, 7 aa, synthetic construct
QYVRSEP

SEQ ID NO: 16835 - protein, 7 aa, synthetic construct
RNNYDNY

SEQ ID NO: 16836 - protein, 7 aa, synthetic construct
VYVRSAE

SEQ ID NO: 16837 - protein, 7 aa, synthetic construct
QYVISQK

SEQ ID NO: 16838 - protein, 7 aa, synthetic construct
KNPLQFH

SEQ ID NO: 16839 - protein, 7 aa, synthetic construct
RGTFDVY

SEQ ID NO: 16840 - protein, 7 aa, synthetic construct
HRGELNW

SEQ ID NO: 16841 - protein, 7 aa, synthetic construct
MRVIDWS

SEQ ID NO: 16842 - protein, 7 aa, synthetic construct
IHDGVWP

SEQ ID NO: 16843 - protein, 7 aa, synthetic construct
GTAKHPW

SEQ ID NO: 16844 - protein, 7 aa, synthetic construct
WRGTSMQ

SEQ ID NO: 16845 - protein, 7 aa, synthetic construct
WKGTTFH

SEQ ID NO: 16846 - protein, 7 aa, synthetic construct
VYTKSTS

SEQ ID NO: 16847 - protein, 7 aa, synthetic construct
NNKGNWP

SEQ ID NO: 16848 - protein, 7 aa, synthetic construct
TGVWMQT

SEQ ID NO: 16849 - protein, 7 aa, synthetic construct
DRINYLG

SEQ ID NO: 16850 - protein, 7 aa, synthetic construct
TYSRLDS

SEQ ID NO: 16851 - protein, 7 aa, synthetic construct
SYIYDGD

SEQ ID NO: 16852 - protein, 7 aa, synthetic construct
AYVKSIT

SEQ ID NO: 16853 - protein, 7 aa, synthetic construct
QYTKHVS

SEQ ID NO: 16854 - protein, 7 aa, synthetic construct
RQHVLFP

SEQ ID NO: 16855 - protein, 7 aa, synthetic construct
GKSITHW

SEQ ID NO: 16856 - protein, 7 aa, synthetic construct
SYAKSVI

SEQ ID NO: 16857 - protein, 7 aa, synthetic construct
GRITLFP

SEQ ID NO: 16858 - protein, 7 aa, synthetic construct
IYSALQT

SEQ ID NO: 16859 - protein, 7 aa, synthetic construct
KVQQQWP

SEQ ID NO: 16860 - protein, 7 aa, synthetic construct
AYVKSMS

SEQ ID NO: 16861 - protein, 7 aa, synthetic construct
KRDSMWP

SEQ ID NO: 16862 - protein, 7 aa, synthetic construct
MLAENWP

SEQ ID NO: 16863 - protein, 7 aa, synthetic construct
PMRGHLF

SEQ ID NO: 16864 - protein, 7 aa, synthetic construct
YQRADWP

SEQ ID NO: 16865 - protein, 7 aa, synthetic construct
AYVKSSI

SEQ ID NO: 16866 - protein, 7 aa, synthetic construct
FLKYSDY

SEQ ID NO: 16867 - protein, 7 aa, synthetic construct
RISNDWP

SEQ ID NO: 16868 - protein, 7 aa, synthetic construct
KFESNWP

SEQ ID NO: 16869 - protein, 7 aa, synthetic construct
VKGEAWP

SEQ ID NO: 16870 - protein, 7 aa, synthetic construct
QYVKHLS

SEQ ID NO: 16871 - protein, 7 aa, synthetic construct
KVGALWP

SEQ ID NO: 16872 - protein, 7 aa, synthetic construct
VYTRTEK

SEQ ID NO: 16873 - protein, 7 aa, synthetic construct
DTWNMGG

SEQ ID NO: 16874 - protein, 7 aa, synthetic construct
YNHPLNW

SEQ ID NO: 16875 - protein, 7 aa, synthetic construct
VHHKSMT

SEQ ID NO: 16876 - protein, 7 aa, synthetic construct
WQGEHPW

SEQ ID NO: 16877 - protein, 7 aa, synthetic construct
DRNKLIW

SEQ ID NO: 16878 - protein, 7 aa, synthetic construct
WQPDPFP

SEQ ID NO: 16879 - protein, 7 aa, synthetic construct
WTTHNIV

SEQ ID NO: 16880 - protein, 7 aa, synthetic construct
DMPNWSW

SEQ ID NO: 16881 - protein, 7 aa, synthetic construct
IYVKFES

SEQ ID NO: 16882 - protein, 7 aa, synthetic construct
YVADDWP

SEQ ID NO: 16883 - protein, 7 aa, synthetic construct
RERNEWP

SEQ ID NO: 16884 - protein, 7 aa, synthetic construct
KIEGSWP

SEQ ID NO: 16885 - protein, 7 aa, synthetic construct
SYVKSQT

SEQ ID NO: 16886 - protein, 7 aa, synthetic construct
YLDLDWP

SEQ ID NO: 16887 - protein, 7 aa, synthetic construct
KVEYNWP

SEQ ID NO: 16888 - protein, 7 aa, synthetic construct
SEQEFNW

SEQ ID NO: 16889 - protein, 7 aa, synthetic construct
VYTKNER

SEQ ID NO: 16890 - protein, 7 aa, synthetic construct
IYSKLQT

SEQ ID NO: 16891 - protein, 7 aa, synthetic construct
GIYATFP

SEQ ID NO: 16892 - protein, 7 aa, synthetic construct
NHPLAWE

SEQ ID NO: 16893 - protein, 7 aa, synthetic construct
RRSDNWP

SEQ ID NO: 16894 - protein, 7 aa, synthetic construct
RHTTEWP

SEQ ID NO: 16895 - protein, 7 aa, synthetic construct
NKPLYFS

SEQ ID NO: 16896 - protein, 7 aa, synthetic construct
VYVKTQS

SEQ ID NO: 16897 - protein, 7 aa, synthetic construct
GQQYSYS

SEQ ID NO: 16898 - protein, 7 aa, synthetic construct
SYSRIAP

SEQ ID NO: 16899 - protein, 7 aa, synthetic construct
SRDVTWP

SEQ ID NO: 16900 - protein, 7 aa, synthetic construct
RDTFWSG

SEQ ID NO: 16901 - protein, 7 aa, synthetic construct
TSRPLNW

SEQ ID NO: 16902 - protein, 7 aa, synthetic construct
QYHKSES

SEQ ID NO: 16903 - protein, 7 aa, synthetic construct
KNEDIWP

SEQ ID NO: 16904 - protein, 7 aa, synthetic construct
YNEGSWP

SEQ ID NO: 16905 - protein, 7 aa, synthetic construct
SSIHDRY

SEQ ID NO: 16906 - protein, 7 aa, synthetic construct
RNNYDSM

SEQ ID NO: 16907 - protein, 7 aa, synthetic construct
MQDIKWP

SEQ ID NO: 16908 - protein, 7 aa, synthetic construct
RNVFDTS

SEQ ID NO: 16909 - protein, 7 aa, synthetic construct
EANFSNW

SEQ ID NO: 16910 - protein, 7 aa, synthetic construct
TYSRLVL

SEQ ID NO: 16911 - protein, 7 aa, synthetic construct
TYVRSEV

SEQ ID NO: 16912 - protein, 7 aa, synthetic construct
QYTKSSI

SEQ ID NO: 16913 - protein, 7 aa, synthetic construct
WSTREMI

SEQ ID NO: 16914 - protein, 7 aa, synthetic construct
GSTDPWP

SEQ ID NO: 16915 - protein, 7 aa, synthetic construct
YFTDEWP

SEQ ID NO: 16916 - protein, 7 aa, synthetic construct
VMSEVWP

SEQ ID NO: 16917 - protein, 7 aa, synthetic construct
RDRAEWP

SEQ ID NO: 16918 - protein, 7 aa, synthetic construct
SYSRLIE

SEQ ID NO: 16919 - protein, 7 aa, synthetic construct
VNRLVDW

SEQ ID NO: 16920 - protein, 7 aa, synthetic construct
TVKIQWP

SEQ ID NO: 16921 - protein, 7 aa, synthetic construct
TYTKSQT

SEQ ID NO: 16922 - protein, 7 aa, synthetic construct
RNHYDTQ

SEQ ID NO: 16923 - protein, 7 aa, synthetic construct
LKVLQWD

SEQ ID NO: 16924 - protein, 7 aa, synthetic construct
FVSSDWP

SEQ ID NO: 16925 - protein, 7 aa, synthetic construct
GFGEKWP

SEQ ID NO: 16926 - protein, 7 aa, synthetic construct
AYVKSNT

SEQ ID NO: 16927 - protein, 7 aa, synthetic construct
SKYHDVF

SEQ ID NO: 16928 - protein, 7 aa, synthetic construct
VYTKSEW

SEQ ID NO: 16929 - protein, 7 aa, synthetic construct
YMSPDWP

SEQ ID NO: 16930 - protein, 7 aa, synthetic construct
KKSLDWP

SEQ ID NO: 16931 - protein, 7 aa, synthetic construct
SRNVLGW

SEQ ID NO: 16932 - protein, 7 aa, synthetic construct
VKDGTWP

SEQ ID NO: 16933 - protein, 7 aa, synthetic construct
ITVDGWP

SEQ ID NO: 16934 - protein, 7 aa, synthetic construct
FSGDTWP

SEQ ID NO: 16935 - protein, 7 aa, synthetic construct
VYSKLNT

SEQ ID NO: 16936 - protein, 7 aa, synthetic construct
TSRFDTY

SEQ ID NO: 16937 - protein, 7 aa, synthetic construct
KVNDTWP

SEQ ID NO: 16938 - protein, 7 aa, synthetic construct
WKFQTEI

SEQ ID NO: 16939 - protein, 7 aa, synthetic construct
GTFQLFP

SEQ ID NO: 16940 - protein, 7 aa, synthetic construct
VYVRTEM

SEQ ID NO: 16941 - protein, 7 aa, synthetic construct
QVVKYLP

SEQ ID NO: 16942 - protein, 7 aa, synthetic construct
TFVKSLT

SEQ ID NO: 16943 - protein, 7 aa, synthetic construct
KVEYDWP

SEQ ID NO: 16944 - protein, 7 aa, synthetic construct
QWTKTVP

SEQ ID NO: 16945 - protein, 7 aa, synthetic construct
SFVRSVE

SEQ ID NO: 16946 - protein, 7 aa, synthetic construct
FKEGIWP

SEQ ID NO: 16947 - protein, 7 aa, synthetic construct
GKNVLWP

SEQ ID NO: 16948 - protein, 7 aa, synthetic construct
VVRFSNH

SEQ ID NO: 16949 - protein, 7 aa, synthetic construct
VQAESWP

SEQ ID NO: 16950 - protein, 7 aa, synthetic construct
VHEELWP

SEQ ID NO: 16951 - protein, 7 aa, synthetic construct
AFTRLEV

SEQ ID NO: 16952 - protein, 7 aa, synthetic construct
RYTKLEE

SEQ ID NO: 16953 - protein, 7 aa, synthetic construct
RYEADWP

SEQ ID NO: 16954 - protein, 7 aa, synthetic construct
LYEDVWP

SEQ ID NO: 16955 - protein, 7 aa, synthetic construct
KQGSEWP

SEQ ID NO: 16956 - protein, 7 aa, synthetic construct
MLFKYEA

SEQ ID NO: 16957 - protein, 7 aa, synthetic construct
ILFKRES

SEQ ID NO: 16958 - protein, 7 aa, synthetic construct
YDMPDWP

SEQ ID NO: 16959 - protein, 7 aa, synthetic construct
ILDRNWP

SEQ ID NO: 16960 - protein, 7 aa, synthetic construct
TQVEHWP

SEQ ID NO: 16961 - protein, 7 aa, synthetic construct
RLIENWP

SEQ ID NO: 16962 - protein, 7 aa, synthetic construct
AYSRLES

SEQ ID NO: 16963 - protein, 7 aa, synthetic construct
YAEEDWP

SEQ ID NO: 16964 - protein, 7 aa, synthetic construct
RNAFDTL

SEQ ID NO: 16965 - protein, 7 aa, synthetic construct
WKDTRFE

SEQ ID NO: 16966 - protein, 7 aa, synthetic construct
KEFYVGS

SEQ ID NO: 16967 - protein, 7 aa, synthetic construct
KPLYDGS

SEQ ID NO: 16968 - protein, 7 aa, synthetic construct
TGVELWP

SEQ ID NO: 16969 - protein, 7 aa, synthetic construct
QLTRLES

SEQ ID NO: 16970 - protein, 7 aa, synthetic construct
MNDRIWP

SEQ ID NO: 16971 - protein, 7 aa, synthetic construct
VVSEIWP

SEQ ID NO: 16972 - protein, 7 aa, synthetic construct
IIDAEWP

SEQ ID NO: 16973 - protein, 7 aa, synthetic construct
VYTKHEF

SEQ ID NO: 16974 - protein, 7 aa, synthetic construct
VDNNEWP

SEQ ID NO: 16975 - protein, 7 aa, synthetic construct
VYSKSQE

SEQ ID NO: 16976 - protein, 7 aa, synthetic construct
WPSELGW

SEQ ID NO: 16977 - protein, 7 aa, synthetic construct
AYVKSES

SEQ ID NO: 16978 - protein, 7 aa, synthetic construct
QPRALFP

SEQ ID NO: 16979 - protein, 7 aa, synthetic construct
VYVKSES

SEQ ID NO: 16980 - protein, 7 aa, synthetic construct
HGPSLWP

SEQ ID NO: 16981 - protein, 7 aa, synthetic construct
GWMNRIA

SEQ ID NO: 16982 - protein, 7 aa, synthetic construct
MTGPVWP

SEQ ID NO: 16983 - protein, 7 aa, synthetic construct
KVEQEWP

SEQ ID NO: 16984 - protein, 7 aa, synthetic construct
GWVNRID

SEQ ID NO: 16985 - protein, 7 aa, synthetic construct
LMQDVWP

SEQ ID NO: 16986 - protein, 7 aa, synthetic construct
VEEMSWP

SEQ ID NO: 16987 - protein, 7 aa, synthetic construct
IWIKSQT

SEQ ID NO: 16988 - protein, 7 aa, synthetic construct
YFDDEFP

SEQ ID NO: 16989 - protein, 7 aa, synthetic construct
RNQWDTA

SEQ ID NO: 16990 - protein, 7 aa, synthetic construct
FYDPDWP

SEQ ID NO: 16991 - protein, 7 aa, synthetic construct
NETMWSP

SEQ ID NO: 16992 - protein, 7 aa, synthetic construct
RDSIEWP

SEQ ID NO: 16993 - protein, 7 aa, synthetic construct
VHVKFEY

SEQ ID NO: 16994 - protein, 7 aa, synthetic construct
KLELEWP

SEQ ID NO: 16995 - protein, 7 aa, synthetic construct
LFNGNWP

SEQ ID NO: 16996 - protein, 7 aa, synthetic construct
TYVRFEQ

SEQ ID NO: 16997 - protein, 7 aa, synthetic construct
RMNFDWP

SEQ ID NO: 16998 - protein, 7 aa, synthetic construct
YKVLDWT

SEQ ID NO: 16999 - protein, 7 aa, synthetic construct
HRHVLFP

SEQ ID NO: 17000 - protein, 7 aa, synthetic construct
YKMMEWP

SEQ ID NO: 17001 - protein, 7 aa, synthetic construct
SETWVFP

SEQ ID NO: 17002 - protein, 7 aa, synthetic construct
YLGELWP

SEQ ID NO: 17003 - protein, 7 aa, synthetic construct
ANVLNWA

SEQ ID NO: 17004 - protein, 7 aa, synthetic construct
RISISPW

SEQ ID NO: 17005 - protein, 7 aa, synthetic construct
HNGFWTG

SEQ ID NO: 17006 - protein, 7 aa, synthetic construct
RLFRLEA

SEQ ID NO: 17007 - protein, 7 aa, synthetic construct
KYFTFEP

SEQ ID NO: 17008 - protein, 7 aa, synthetic construct
TNDFDVY

SEQ ID NO: 17009 - protein, 7 aa, synthetic construct
KEKPDKR

SEQ ID NO: 17010 - protein, 7 aa, synthetic construct
GLCPSTK

SEQ ID NO: 17011 - protein, 7 aa, synthetic construct
SCAVSHR

SEQ ID NO: 17012 - protein, 7 aa, synthetic construct
SCPKNDL

SEQ ID NO: 17013 - protein, 7 aa, synthetic construct
RNEYTTY

SEQ ID NO: 17014 - protein, 7 aa, synthetic construct
FYRSDNC

SEQ ID NO: 17015 - protein, 7 aa, synthetic construct
CNYDSFP

SEQ ID NO: 17016 - protein, 7 aa, synthetic construct
YVKNDAR

SEQ ID NO: 17017 - protein, 7 aa, synthetic construct
RNENRKG

SEQ ID NO: 17018 - protein, 7 aa, synthetic construct
HSRVGHN

SEQ ID NO: 17019 - protein, 7 aa, synthetic construct
RQAKQKN

SEQ ID NO: 17020 - protein, 7 aa, synthetic construct
KMSSSTW

SEQ ID NO: 17021 - protein, 7 aa, synthetic construct
STNCYKS

SEQ ID NO: 17022 - protein, 7 aa, synthetic construct
LDCERYQ

SEQ ID NO: 17023 - protein, 7 aa, synthetic construct
VSSSNGR

SEQ ID NO: 17024 - protein, 7 aa, synthetic construct
CDYISYA

SEQ ID NO: 17025 - protein, 7 aa, synthetic construct
VESSNGR

SEQ ID NO: 17026 - protein, 7 aa, synthetic construct
RVNTRAN

SEQ ID NO: 17027 - protein, 7 aa, synthetic construct
CAFTGTR

SEQ ID NO: 17028 - protein, 7 aa, synthetic construct
HYCPNKL

SEQ ID NO: 17029 - protein, 7 aa, synthetic construct
PRMCANN

SEQ ID NO: 17030 - protein, 7 aa, synthetic construct
RNKDRNS

SEQ ID NO: 17031 - protein, 7 aa, synthetic construct
HRQDSRR

SEQ ID NO: 17032 - protein, 7 aa, synthetic construct
KMDSRLW

SEQ ID NO: 17033 - protein, 7 aa, synthetic construct
RNMSVYP

SEQ ID NO: 17034 - protein, 7 aa, synthetic construct
SAEWVSY

SEQ ID NO: 17035 - protein, 7 aa, synthetic construct
LRSECCV

SEQ ID NO: 17036 - protein, 7 aa, synthetic construct
QLEARTW

SEQ ID NO: 17037 - protein, 7 aa, synthetic construct
EMQSRAW

SEQ ID NO: 17038 - protein, 7 aa, synthetic construct
TMSDRTW

SEQ ID NO: 17039 - protein, 7 aa, synthetic construct
REDGLRW

SEQ ID NO: 17040 - protein, 7 aa, synthetic construct
HSRLNLQ

SEQ ID NO: 17041 - protein, 7 aa, synthetic construct
LCRSCAK

SEQ ID NO: 17042 - protein, 7 aa, synthetic construct
RGNGGHK

SEQ ID NO: 17043 - protein, 7 aa, synthetic construct
YTFLGRN

SEQ ID NO: 17044 - protein, 7 aa, synthetic construct
LCRYSGG

SEQ ID NO: 17045 - protein, 7 aa, synthetic construct
SSNCLHY

SEQ ID NO: 17046 - protein, 7 aa, synthetic construct
RTFDSFE

SEQ ID NO: 17047 - protein, 7 aa, synthetic construct
VPGDCCV

SEQ ID NO: 17048 - protein, 7 aa, synthetic construct
TESSSGR

SEQ ID NO: 17049 - protein, 7 aa, synthetic construct
KMSSANW

SEQ ID NO: 17050 - protein, 7 aa, synthetic construct
RETYVYP

SEQ ID NO: 17051 - protein, 7 aa, synthetic construct
YNSTHGR

SEQ ID NO: 17052 - protein, 7 aa, synthetic construct
VYVRTDR

SEQ ID NO: 17053 - protein, 7 aa, synthetic construct
DDGRSRY

SEQ ID NO: 17054 - protein, 7 aa, synthetic construct
CSGFERR

SEQ ID NO: 17055 - protein, 7 aa, synthetic construct
FFYNKPT

SEQ ID NO: 17056 - protein, 7 aa, synthetic construct
KPYILHK

SEQ ID NO: 17057 - protein, 7 aa, synthetic construct
KRPPEAR

SEQ ID NO: 17058 - protein, 7 aa, synthetic construct
KREPERR

SEQ ID NO: 17059 - protein, 7 aa, synthetic construct
LSRVAMN

SEQ ID NO: 17060 - protein, 7 aa, synthetic construct
RMSDHNW

SEQ ID NO: 17061 - protein, 7 aa, synthetic construct
RVDQPKK

SEQ ID NO: 17062 - protein, 7 aa, synthetic construct
NYASHSW

SEQ ID NO: 17063 - protein, 7 aa, synthetic construct
HGSTNGK

SEQ ID NO: 17064 - protein, 7 aa, synthetic construct
RNGTSSW

SEQ ID NO: 17065 - protein, 7 aa, synthetic construct
KMPSRDW

SEQ ID NO: 17066 - protein, 7 aa, synthetic construct
GGDGNHY

SEQ ID NO: 17067 - protein, 7 aa, synthetic construct
MYNDCCV

SEQ ID NO: 17068 - protein, 7 aa, synthetic construct
VREYMSY

SEQ ID NO: 17069 - protein, 7 aa, synthetic construct
SLLKPAK

SEQ ID NO: 17070 - protein, 7 aa, synthetic construct
FEGRGWN

SEQ ID NO: 17071 - protein, 7 aa, synthetic construct
KLEPPKR

SEQ ID NO: 17072 - protein, 7 aa, synthetic construct
RNYDTYP

SEQ ID NO: 17073 - protein, 7 aa, synthetic construct
QSVCTTK

SEQ ID NO: 17074 - protein, 7 aa, synthetic construct
RNHETFP

SEQ ID NO: 17075 - protein, 7 aa, synthetic construct
GLIGVWP

SEQ ID NO: 17076 - protein, 7 aa, synthetic construct
DKGHCHP

SEQ ID NO: 17077 - protein, 7 aa, synthetic construct
AQRVRSI

SEQ ID NO: 17078 - protein, 7 aa, synthetic construct
KTINPGK

SEQ ID NO: 17079 - protein, 7 aa, synthetic construct
HSSTNGA

SEQ ID NO: 17080 - protein, 7 aa, synthetic construct
ENHPLWG

SEQ ID NO: 17081 - protein, 7 aa, synthetic construct
FHKLMSN

SEQ ID NO: 17082 - protein, 7 aa, synthetic construct
HDFNFRG

SEQ ID NO: 17083 - protein, 7 aa, synthetic construct
DCQTNRS

SEQ ID NO: 17084 - protein, 7 aa, synthetic construct
IPNCYKH

SEQ ID NO: 17085 - protein, 7 aa, synthetic construct
RTDCVYP

SEQ ID NO: 17086 - protein, 7 aa, synthetic construct
CDKEAYQ

SEQ ID NO: 17087 - protein, 7 aa, synthetic construct
DCKYFKA

SEQ ID NO: 17088 - protein, 7 aa, synthetic construct
YLLRGCA

SEQ ID NO: 17089 - protein, 7 aa, synthetic construct
QRGVPNW

SEQ ID NO: 17090 - protein, 7 aa, synthetic construct
ASTHCTR

SEQ ID NO: 17091 - protein, 7 aa, synthetic construct
QMNPIKK

SEQ ID NO: 17092 - protein, 7 aa, synthetic construct
CGVDKSR

SEQ ID NO: 17093 - protein, 7 aa, synthetic construct
GRMAVRV

SEQ ID NO: 17094 - protein, 7 aa, synthetic construct
CHREHSL

SEQ ID NO: 17095 - protein, 7 aa, synthetic construct
LWRNCDA

SEQ ID NO: 17096 - protein, 7 aa, synthetic construct
LVRYENV

SEQ ID NO: 17097 - protein, 7 aa, synthetic construct
HGSGNFV

SEQ ID NO: 17098 - protein, 7 aa, synthetic construct
TETKFCN

SEQ ID NO: 17099 - protein, 7 aa, synthetic construct
KENNAKK

SEQ ID NO: 17100 - protein, 7 aa, synthetic construct
YAAGSWN

SEQ ID NO: 17101 - protein, 7 aa, synthetic construct
ERNSCMH

SEQ ID NO: 17102 - protein, 7 aa, synthetic construct
DAYELCA

SEQ ID NO: 17103 - protein, 7 aa, synthetic construct
RTPDSYC

SEQ ID NO: 17104 - protein, 7 aa, synthetic construct
RGNECWS

SEQ ID NO: 17105 - protein, 7 aa, synthetic construct
SNNAYWG

SEQ ID NO: 17106 - protein, 7 aa, synthetic construct
RVDCGSR

SEQ ID NO: 17107 - protein, 7 aa, synthetic construct
GNQNYKK

SEQ ID NO: 17108 - protein, 7 aa, synthetic construct
CGYTNHV

SEQ ID NO: 17109 - protein, 7 aa, synthetic construct
HKCQISG

SEQ ID NO: 17110 - protein, 7 aa, synthetic construct
CEFFQRE

SEQ ID NO: 17111 - protein, 7 aa, synthetic construct
RKDNPPR

SEQ ID NO: 17112 - protein, 7 aa, synthetic construct
GYAGKRN

SEQ ID NO: 17113 - protein, 7 aa, synthetic construct
GKYPPQG

SEQ ID NO: 17114 - protein, 7 aa, synthetic construct
YSKAGYD

SEQ ID NO: 17115 - protein, 7 aa, synthetic construct
CGPHWNA

SEQ ID NO: 17116 - protein, 7 aa, synthetic construct
RVTHCTG

SEQ ID NO: 17117 - protein, 7 aa, synthetic construct
FKAGTWN

SEQ ID NO: 17118 - protein, 7 aa, synthetic construct
HWTEYNS

SEQ ID NO: 17119 - protein, 7 aa, synthetic construct
LHRLIAD

SEQ ID NO: 17120 - protein, 7 aa, synthetic construct
MNCAAMR

SEQ ID NO: 17121 - protein, 7 aa, synthetic construct
SEKKLKF

SEQ ID NO: 17122 - protein, 7 aa, synthetic construct
ACDRSHT

SEQ ID NO: 17123 - protein, 7 aa, synthetic construct
NPHTCNN

SEQ ID NO: 17124 - protein, 7 aa, synthetic construct
SKNSIWT

SEQ ID NO: 17125 - protein, 7 aa, synthetic construct
YGCQSGF

SEQ ID NO: 17126 - protein, 7 aa, synthetic construct
SCRISEK

SEQ ID NO: 17127 - protein, 7 aa, synthetic construct
KMSSSVW

SEQ ID NO: 17128 - protein, 7 aa, synthetic construct
LHKGCTN

SEQ ID NO: 17129 - protein, 7 aa, synthetic construct
WIFQSHT

SEQ ID NO: 17130 - protein, 7 aa, synthetic construct
CRGTVFP

SEQ ID NO: 17131 - protein, 7 aa, synthetic construct
LPVRGKH

SEQ ID NO: 17132 - protein, 7 aa, synthetic construct
IMMITRG

SEQ ID NO: 17133 - protein, 7 aa, synthetic construct
GQCGPKS

SEQ ID NO: 17134 - protein, 7 aa, synthetic construct
TTIHSRW

SEQ ID NO: 17135 - protein, 7 aa, synthetic construct
KSIWTDD

SEQ ID NO: 17136 - protein, 7 aa, synthetic construct
CTGNSSK

SEQ ID NO: 17137 - protein, 7 aa, synthetic construct
CDRSNGG

SEQ ID NO: 17138 - protein, 7 aa, synthetic construct
CNPSVYR

SEQ ID NO: 17139 - protein, 7 aa, synthetic construct
CKSYGSS

SEQ ID NO: 17140 - protein, 7 aa, synthetic construct
NIVNYRQ

SEQ ID NO: 17141 - protein, 7 aa, synthetic construct
CTRMDYG

SEQ ID NO: 17142 - protein, 7 aa, synthetic construct
ISEYSKW

SEQ ID NO: 17143 - protein, 7 aa, synthetic construct
TNWESYL

SEQ ID NO: 17144 - protein, 7 aa, synthetic construct
WTCSRKQ

SEQ ID NO: 17145 - protein, 7 aa, synthetic construct
FHHRQNH

SEQ ID NO: 17146 - protein, 7 aa, synthetic construct
FKVWDGG

SEQ ID NO: 17147 - protein, 7 aa, synthetic construct
KIPINWS

SEQ ID NO: 17148 - protein, 7 aa, synthetic construct
GYRSLYP

SEQ ID NO: 17149 - protein, 7 aa, synthetic construct
RQEKHLR

SEQ ID NO: 17150 - protein, 7 aa, synthetic construct
YARETWN

SEQ ID NO: 17151 - protein, 7 aa, synthetic construct
CWDTSNA

SEQ ID NO: 17152 - protein, 7 aa, synthetic construct
DSPWSNW

SEQ ID NO: 17153 - protein, 7 aa, synthetic construct
NSTSCTP

SEQ ID NO: 17154 - protein, 7 aa, synthetic construct
HKCGDTR

SEQ ID NO: 17155 - protein, 7 aa, synthetic construct
LARNASN

SEQ ID NO: 17156 - protein, 7 aa, synthetic construct
RMKDVYP

SEQ ID NO: 17157 - protein, 7 aa, synthetic construct
RCEINAT

SEQ ID NO: 17158 - protein, 7 aa, synthetic construct
YSEYDTY

SEQ ID NO: 17159 - protein, 7 aa, synthetic construct
YICSNAK

SEQ ID NO: 17160 - protein, 7 aa, synthetic construct
TLMGKCT

SEQ ID NO: 17161 - protein, 7 aa, synthetic construct
STMECSS

SEQ ID NO: 17162 - protein, 7 aa, synthetic construct
KWVRSAV

SEQ ID NO: 17163 - protein, 7 aa, synthetic construct
RWSERDC

SEQ ID NO: 17164 - protein, 7 aa, synthetic construct
DKMCFAK

SEQ ID NO: 17165 - protein, 7 aa, synthetic construct
VHDSSHC

SEQ ID NO: 17166 - protein, 7 aa, synthetic construct
CDYGSRS

SEQ ID NO: 17167 - protein, 7 aa, synthetic construct
SCKSGNA

SEQ ID NO: 17168 - protein, 7 aa, synthetic construct
LGLWTES

SEQ ID NO: 17169 - protein, 7 aa, synthetic construct
TCRTLKT

SEQ ID NO: 17170 - protein, 7 aa, synthetic construct
CTENRGV

SEQ ID NO: 17171 - protein, 7 aa, synthetic construct
GPGTCKS

SEQ ID NO: 17172 - protein, 7 aa, synthetic construct
CQYVKWE

SEQ ID NO: 17173 - protein, 7 aa, synthetic construct
NSSACRT

SEQ ID NO: 17174 - protein, 7 aa, synthetic construct
SGCSRTD

SEQ ID NO: 17175 - protein, 7 aa, synthetic construct
MCSMRNA

SEQ ID NO: 17176 - protein, 7 aa, synthetic construct
RSCLGSN

SEQ ID NO: 17177 - protein, 7 aa, synthetic construct
KNNCTFG

SEQ ID NO: 17178 - protein, 7 aa, synthetic construct
CNNSGYS

SEQ ID NO: 17179 - protein, 7 aa, synthetic construct
LKLCAHN

SEQ ID NO: 17180 - protein, 7 aa, synthetic construct
RCDKILT

SEQ ID NO: 17181 - protein, 7 aa, synthetic construct
SKTYSCP

SEQ ID NO: 17182 - protein, 7 aa, synthetic construct
KMLPGNR

SEQ ID NO: 17183 - protein, 7 aa, synthetic construct
YQRQCES

SEQ ID NO: 17184 - protein, 7 aa, synthetic construct
NTYRCDG

SEQ ID NO: 17185 - protein, 7 aa, synthetic construct
SCGGLHG

SEQ ID NO: 17186 - protein, 7 aa, synthetic construct
LSKLSCN

SEQ ID NO: 17187 - protein, 7 aa, synthetic construct
YWSQTPS

SEQ ID NO: 17188 - protein, 7 aa, synthetic construct
TVWTSDC

SEQ ID NO: 17189 - protein, 7 aa, synthetic construct
SCMNVAP

SEQ ID NO: 17190 - protein, 7 aa, synthetic construct
AFCTNKT

SEQ ID NO: 17191 - protein, 7 aa, synthetic construct
TQCKEHY

SEQ ID NO: 17192 - protein, 7 aa, synthetic construct
CTYKWSE

SEQ ID NO: 17193 - protein, 7 aa, synthetic construct
ISVCKQQ

SEQ ID NO: 17194 - protein, 7 aa, synthetic construct
SHWSDCD

SEQ ID NO: 17195 - protein, 7 aa, synthetic construct
SCRLVDV

SEQ ID NO: 17196 - protein, 7 aa, synthetic construct
CQSEGRT

SEQ ID NO: 17197 - protein, 7 aa, synthetic construct
LCRPCRE

SEQ ID NO: 17198 - protein, 7 aa, synthetic construct
SWTYEEC

SEQ ID NO: 17199 - protein, 7 aa, synthetic construct
TCQRLSG

SEQ ID NO: 17200 - protein, 7 aa, synthetic construct
CDGTGRR

SEQ ID NO: 17201 - protein, 7 aa, synthetic construct
REVLKWS

SEQ ID NO: 17202 - protein, 7 aa, synthetic construct
TCGMRGA

SEQ ID NO: 17203 - protein, 7 aa, synthetic construct
CGRGAGI

SEQ ID NO: 17204 - protein, 7 aa, synthetic construct
YFEKICE

SEQ ID NO: 17205 - protein, 7 aa, synthetic construct
GCSGFKT

SEQ ID NO: 17206 - protein, 7 aa, synthetic construct
CKWIREG

SEQ ID NO: 17207 - protein, 7 aa, synthetic construct
MKITGPR

SEQ ID NO: 17208 - protein, 7 aa, synthetic construct
RTYDTYI

SEQ ID NO: 17209 - protein, 7 aa, synthetic construct
RYEASNW

SEQ ID NO: 17210 - protein, 7 aa, synthetic construct
YFAHFSH

SEQ ID NO: 17211 - protein, 7 aa, synthetic construct
GCNRSTA

SEQ ID NO: 17212 - protein, 7 aa, synthetic construct
KLCPNLI

SEQ ID NO: 17213 - protein, 7 aa, synthetic construct
WPTAFYA

SEQ ID NO: 17214 - protein, 7 aa, synthetic construct
CLIRDVK

SEQ ID NO: 17215 - protein, 7 aa, synthetic construct
HDSAWSW

SEQ ID NO: 17216 - protein, 7 aa, synthetic construct
RAKINWP

SEQ ID NO: 17217 - protein, 7 aa, synthetic construct
YSRTGSD

SEQ ID NO: 17218 - protein, 7 aa, synthetic construct
CNIGDKR

SEQ ID NO: 17219 - protein, 7 aa, synthetic construct
GEWCVKN

SEQ ID NO: 17220 - protein, 7 aa, synthetic construct
YHKHSLN

SEQ ID NO: 17221 - protein, 7 aa, synthetic construct
ICRGYTS

SEQ ID NO: 17222 - protein, 7 aa, synthetic construct
QYHIYSG

SEQ ID NO: 17223 - protein, 7 aa, synthetic construct
CIIKNQV

SEQ ID NO: 17224 - protein, 7 aa, synthetic construct
ELGRFGC

SEQ ID NO: 17225 - protein, 7 aa, synthetic construct
EYQTRPC

SEQ ID NO: 17226 - protein, 7 aa, synthetic construct
TSGIWNV

SEQ ID NO: 17227 - protein, 7 aa, synthetic construct
CAVQGVK

SEQ ID NO: 17228 - protein, 7 aa, synthetic construct
EWCNTDK

SEQ ID NO: 17229 - protein, 7 aa, synthetic construct
MRTPVIR

SEQ ID NO: 17230 - protein, 7 aa, synthetic construct
SCKSSYT

SEQ ID NO: 17231 - protein, 7 aa, synthetic construct
MLCVAGD

SEQ ID NO: 17232 - protein, 7 aa, synthetic construct
SYSNPWI

SEQ ID NO: 17233 - protein, 7 aa, synthetic construct
YGAGTWH

SEQ ID NO: 17234 - protein, 7 aa, synthetic construct
STCNMQA

SEQ ID NO: 17235 - protein, 7 aa, synthetic construct
TKRQQWP

SEQ ID NO: 17236 - protein, 7 aa, synthetic construct
CTSDSFP

SEQ ID NO: 17237 - protein, 7 aa, synthetic construct
CTNNGNR

SEQ ID NO: 17238 - protein, 7 aa, synthetic construct
RHPSLNF

SEQ ID NO: 17239 - protein, 7 aa, synthetic construct
YFPNFIS

SEQ ID NO: 17240 - protein, 7 aa, synthetic construct
SSKYSPW

SEQ ID NO: 17241 - protein, 7 aa, synthetic construct
TPYCNLR

SEQ ID NO: 17242 - protein, 7 aa, synthetic construct
AYVSSTC

SEQ ID NO: 17243 - protein, 7 aa, synthetic construct
CYRHVTA

SEQ ID NO: 17244 - protein, 7 aa, synthetic construct
DQWCKKV

SEQ ID NO: 17245 - protein, 7 aa, synthetic construct
NCNFVGK

SEQ ID NO: 17246 - protein, 7 aa, synthetic construct
CVDWGLD

SEQ ID NO: 17247 - protein, 7 aa, synthetic construct
RMSASNW

SEQ ID NO: 17248 - protein, 7 aa, synthetic construct
YSRYNIN

SEQ ID NO: 17249 - protein, 7 aa, synthetic construct
CHQVLLP

SEQ ID NO: 17250 - protein, 7 aa, synthetic construct
PCGPCTY

SEQ ID NO: 17251 - protein, 7 aa, synthetic construct
YFSGKTL

SEQ ID NO: 17252 - protein, 7 aa, synthetic construct
NLGWLKP

SEQ ID NO: 17253 - protein, 7 aa, synthetic construct
DWSTREW

SEQ ID NO: 17254 - protein, 7 aa, synthetic construct
NYVKSTC

SEQ ID NO: 17255 - protein, 7 aa, synthetic construct
MHWDALH

SEQ ID NO: 17256 - protein, 7 aa, synthetic construct
LFRSGPN

SEQ ID NO: 17257 - protein, 7 aa, synthetic construct
NKNWVIG

SEQ ID NO: 17258 - protein, 7 aa, synthetic construct
LPIYSLT

SEQ ID NO: 17259 - protein, 7 aa, synthetic construct
SCEIKHI

SEQ ID NO: 17260 - protein, 7 aa, synthetic construct
MCSNYGS

SEQ ID NO: 17261 - protein, 7 aa, synthetic construct
NTMWLNP

SEQ ID NO: 17262 - protein, 7 aa, synthetic construct
WMNINDC

SEQ ID NO: 17263 - protein, 7 aa, synthetic construct
YFSGQIC

SEQ ID NO: 17264 - protein, 7 aa, synthetic construct
YHKGNNN

SEQ ID NO: 17265 - protein, 7 aa, synthetic construct
GCQAGMK

SEQ ID NO: 17266 - protein, 7 aa, synthetic construct
NHWVRDH

SEQ ID NO: 17267 - protein, 7 aa, synthetic construct
VMSNWNR

SEQ ID NO: 17268 - protein, 7 aa, synthetic construct
YHVADRC

SEQ ID NO: 17269 - protein, 7 aa, synthetic construct
RDHDCYA

SEQ ID NO: 17270 - protein, 7 aa, synthetic construct
SPNGCNG

SEQ ID NO: 17271 - protein, 7 aa, synthetic construct
ACERKMT

SEQ ID NO: 17272 - protein, 7 aa, synthetic construct
IYLKKQV

SEQ ID NO: 17273 - protein, 7 aa, synthetic construct
KHRTIVN

SEQ ID NO: 17274 - protein, 7 aa, synthetic construct
NSCNMTR

SEQ ID NO: 17275 - protein, 7 aa, synthetic construct
RDWIQFE

SEQ ID NO: 17276 - protein, 7 aa, synthetic construct
HETCVRG

SEQ ID NO: 17277 - protein, 7 aa, synthetic construct
DKYLNTC

SEQ ID NO: 17278 - protein, 7 aa, synthetic construct
VFSRSMC

SEQ ID NO: 17279 - protein, 7 aa, synthetic construct
TQVYSNW

SEQ ID NO: 17280 - protein, 7 aa, synthetic construct
RTQPPAR

SEQ ID NO: 17281 - protein, 7 aa, synthetic construct
LARSAVN

SEQ ID NO: 17282 - protein, 7 aa, synthetic construct
EGYHDWA

SEQ ID NO: 17283 - protein, 7 aa, synthetic construct
DNTFSNW

SEQ ID NO: 17284 - protein, 7 aa, synthetic construct
WHRLSVN

SEQ ID NO: 17285 - protein, 7 aa, synthetic construct
VMCDAYP

SEQ ID NO: 17286 - protein, 7 aa, synthetic construct
SRRFYEE

SEQ ID NO: 17287 - protein, 7 aa, synthetic construct
ERGYLDY

SEQ ID NO: 17288 - protein, 7 aa, synthetic construct
SEYSSWP

SEQ ID NO: 17289 - protein, 7 aa, synthetic construct
LCYPCNS

SEQ ID NO: 17290 - protein, 7 aa, synthetic construct
ISNKHWS

SEQ ID NO: 17291 - protein, 7 aa, synthetic construct
CYGTSMY

SEQ ID NO: 17292 - protein, 7 aa, synthetic construct
PRPNVYS

SEQ ID NO: 17293 - protein, 7 aa, synthetic construct
HSHYTNY

SEQ ID NO: 17294 - protein, 7 aa, synthetic construct
MTTCENV

SEQ ID NO: 17295 - protein, 7 aa, synthetic construct
MYSQHEC

SEQ ID NO: 17296 - protein, 7 aa, synthetic construct
NTWARDY

SEQ ID NO: 17297 - protein, 7 aa, synthetic construct
RLFNTIQ

SEQ ID NO: 17298 - protein, 7 aa, synthetic construct
RGGFSPF

SEQ ID NO: 17299 - protein, 7 aa, synthetic construct
SRLMFVG

SEQ ID NO: 17300 - protein, 7 aa, synthetic construct
YSKSNCN

SEQ ID NO: 17301 - protein, 7 aa, synthetic construct
KDMLRWD

SEQ ID NO: 17302 - protein, 7 aa, synthetic construct
LWKTGHN

SEQ ID NO: 17303 - protein, 7 aa, synthetic construct
SRYTYSE

SEQ ID NO: 17304 - protein, 7 aa, synthetic construct
FNYSTLP

SEQ ID NO: 17305 - protein, 7 aa, synthetic construct
KAMCGSG

SEQ ID NO: 17306 - protein, 7 aa, synthetic construct
NRKSQSV

SEQ ID NO: 17307 - protein, 7 aa, synthetic construct
KYFNTFP

SEQ ID NO: 17308 - protein, 7 aa, synthetic construct
YHKMQCN

SEQ ID NO: 17309 - protein, 7 aa, synthetic construct
IHRFTTN

SEQ ID NO: 17310 - protein, 7 aa, synthetic construct
NYIKANC

SEQ ID NO: 17311 - protein, 7 aa, synthetic construct
RNQECES

SEQ ID NO: 17312 - protein, 7 aa, synthetic construct
QNTKWAC

SEQ ID NO: 17313 - protein, 7 aa, synthetic construct
YYTGRTN

SEQ ID NO: 17314 - protein, 7 aa, synthetic construct
VYWVGEV

SEQ ID NO: 17315 - protein, 7 aa, synthetic construct
VSAYRGA

SEQ ID NO: 17316 - protein, 7 aa, synthetic construct
TNEFYGW

SEQ ID NO: 17317 - protein, 7 aa, synthetic construct
CLRTDIA

SEQ ID NO: 17318 - protein, 7 aa, synthetic construct
RVSDYSW

SEQ ID NO: 17319 - protein, 7 aa, synthetic construct
MEIDPIF

SEQ ID NO: 17320 - protein, 7 aa, synthetic construct
KYDHLGS

SEQ ID NO: 17321 - protein, 7 aa, synthetic construct
GNTGICY

SEQ ID NO: 17322 - protein, 7 aa, synthetic construct
AGVATYS

SEQ ID NO: 17323 - protein, 7 aa, synthetic construct
SNMYDSY

SEQ ID NO: 17324 - protein, 7 aa, synthetic construct
LAYNVST

SEQ ID NO: 17325 - protein, 7 aa, synthetic construct
YSGQGCV

SEQ ID NO: 17326 - protein, 7 aa, synthetic construct
KSPYATF

SEQ ID NO: 17327 - protein, 7 aa, synthetic construct
CNGFYCE

SEQ ID NO: 17328 - protein, 7 aa, synthetic construct
CNGEAAS

SEQ ID NO: 17329 - protein, 7 aa, synthetic construct
QTDCVNQ

SEQ ID NO: 17330 - protein, 7 aa, synthetic construct
CVATKDR

SEQ ID NO: 17331 - protein, 7 aa, synthetic construct
TMVESCR

SEQ ID NO: 17332 - protein, 7 aa, synthetic construct
THQDWSS

SEQ ID NO: 17333 - protein, 7 aa, synthetic construct
SACNVKH

SEQ ID NO: 17334 - protein, 7 aa, synthetic construct
SAAQVWP

SEQ ID NO: 17335 - protein, 7 aa, synthetic construct
WCRECMN

SEQ ID NO: 17336 - protein, 7 aa, synthetic construct
HNKYSNY

SEQ ID NO: 17337 - protein, 7 aa, synthetic construct
TYASSNW

SEQ ID NO: 17338 - protein, 7 aa, synthetic construct
YVRSGDC

SEQ ID NO: 17339 - protein, 7 aa, synthetic construct
LYIKSAL

SEQ ID NO: 17340 - protein, 7 aa, synthetic construct
AKSVFQS

SEQ ID NO: 17341 - protein, 7 aa, synthetic construct
GETNWRF

SEQ ID NO: 17342 - protein, 7 aa, synthetic construct
NGWGYGP

SEQ ID NO: 17343 - protein, 7 aa, synthetic construct
VRGATCE

SEQ ID NO: 17344 - protein, 7 aa, synthetic construct
IHRMMVN

SEQ ID NO: 17345 - protein, 7 aa, synthetic construct
LVRGLNW

SEQ ID NO: 17346 - protein, 7 aa, synthetic construct
GMRIREK

SEQ ID NO: 17347 - protein, 7 aa, synthetic construct
KVYGYNP

SEQ ID NO: 17348 - protein, 7 aa, synthetic construct
LRMWDEA

SEQ ID NO: 17349 - protein, 7 aa, synthetic construct
TWKGPPC

SEQ ID NO: 17350 - protein, 7 aa, synthetic construct
KGNWYSE

SEQ ID NO: 17351 - protein, 7 aa, synthetic construct
FGLSDRW

SEQ ID NO: 17352 - protein, 7 aa, synthetic construct
VCSSNLV

SEQ ID NO: 17353 - protein, 7 aa, synthetic construct
IYYKGNL

SEQ ID NO: 17354 - protein, 7 aa, synthetic construct
YFTRQVN

SEQ ID NO: 17355 - protein, 7 aa, synthetic construct
CNKTSVT

SEQ ID NO: 17356 - protein, 7 aa, synthetic construct
CRWSDCS

SEQ ID NO: 17357 - protein, 7 aa, synthetic construct
YARSDCC

SEQ ID NO: 17358 - protein, 7 aa, synthetic construct
LHKSTCD

SEQ ID NO: 17359 - protein, 7 aa, synthetic construct
RIKFDTY

SEQ ID NO: 17360 - protein, 7 aa, synthetic construct
VRYTDSK

SEQ ID NO: 17361 - protein, 7 aa, synthetic construct
LWRNDNQ

SEQ ID NO: 17362 - protein, 7 aa, synthetic construct
KHHDVNC

SEQ ID NO: 17363 - protein, 7 aa, synthetic construct
NKSCSSM

SEQ ID NO: 17364 - protein, 7 aa, synthetic construct
GIAPCGS

SEQ ID NO: 17365 - protein, 7 aa, synthetic construct
SRFVSWD

SEQ ID NO: 17366 - protein, 7 aa, synthetic construct
NRIDAKC

SEQ ID NO: 17367 - protein, 7 aa, synthetic construct
TGCMAGK

SEQ ID NO: 17368 - protein, 7 aa, synthetic construct
ASCNGLR

SEQ ID NO: 17369 - protein, 7 aa, synthetic construct
VSTNNPC

SEQ ID NO: 17370 - protein, 7 aa, synthetic construct
RDIWRDA

SEQ ID NO: 17371 - protein, 7 aa, synthetic construct
SPCSTGN

SEQ ID NO: 17372 - protein, 7 aa, synthetic construct
NNCADNF

SEQ ID NO: 17373 - protein, 7 aa, synthetic construct
GGWNHLV

SEQ ID NO: 17374 - protein, 7 aa, synthetic construct
KNVGRNN

SEQ ID NO: 17375 - protein, 7 aa, synthetic construct
NRARNVS

SEQ ID NO: 17376 - protein, 7 aa, synthetic construct
ANCDVVD

SEQ ID NO: 17377 - protein, 7 aa, synthetic construct
SCDSGKA

SEQ ID NO: 17378 - protein, 7 aa, synthetic construct
KWRGDES

SEQ ID NO: 17379 - protein, 7 aa, synthetic construct
IYGRVIN

SEQ ID NO: 17380 - protein, 7 aa, synthetic construct
SQNAYAM

SEQ ID NO: 17381 - protein, 7 aa, synthetic construct
SLCPRLS

SEQ ID NO: 17382 - protein, 7 aa, synthetic construct
YLNCMKP

SEQ ID NO: 17383 - protein, 7 aa, synthetic construct
GMIKPTR

SEQ ID NO: 17384 - protein, 7 aa, synthetic construct
EWMRPGQ

SEQ ID NO: 17385 - protein, 7 aa, synthetic construct
SNWRTDL

SEQ ID NO: 17386 - protein, 7 aa, synthetic construct
EHMWHTE

SEQ ID NO: 17387 - protein, 7 aa, synthetic construct
CVYAIGS

SEQ ID NO: 17388 - protein, 7 aa, synthetic construct
SICANGE

SEQ ID NO: 17389 - protein, 7 aa, synthetic construct
DRPIYYS

SEQ ID NO: 17390 - protein, 7 aa, synthetic construct
NTQFTCV

SEQ ID NO: 17391 - protein, 7 aa, synthetic construct
TYTRLVN

SEQ ID NO: 17392 - protein, 7 aa, synthetic construct
CVNLIRN

SEQ ID NO: 17393 - protein, 7 aa, synthetic construct
RKPEATR

SEQ ID NO: 17394 - protein, 7 aa, synthetic construct
YRPCNAS

SEQ ID NO: 17395 - protein, 7 aa, synthetic construct
FVCDPSK

SEQ ID NO: 17396 - protein, 7 aa, synthetic construct
RTPNYNY

SEQ ID NO: 17397 - protein, 7 aa, synthetic construct
VPTRQWP

SEQ ID NO: 17398 - protein, 7 aa, synthetic construct
FSIRLGT

SEQ ID NO: 17399 - protein, 7 aa, synthetic construct
LSRIQTN

SEQ ID NO: 17400 - protein, 7 aa, synthetic construct
TTRWAGP

SEQ ID NO: 17401 - protein, 7 aa, synthetic construct
QYYNSAS

SEQ ID NO: 17402 - protein, 7 aa, synthetic construct
RYDWPHN

SEQ ID NO: 17403 - protein, 7 aa, synthetic construct
KVCSATD

SEQ ID NO: 17404 - protein, 7 aa, synthetic construct
MEWQERY

SEQ ID NO: 17405 - protein, 7 aa, synthetic construct
YFSGVPS

SEQ ID NO: 17406 - protein, 7 aa, synthetic construct
WIPGMGT

SEQ ID NO: 17407 - protein, 7 aa, synthetic construct
GPINCKS

SEQ ID NO: 17408 - protein, 7 aa, synthetic construct
NRWNNHG

SEQ ID NO: 17409 - protein, 7 aa, synthetic construct
THRLIVA

SEQ ID NO: 17410 - protein, 7 aa, synthetic construct
YFAGQFS

SEQ ID NO: 17411 - protein, 7 aa, synthetic construct
YVKSNHG

SEQ ID NO: 17412 - protein, 7 aa, synthetic construct
YVKSDNA

SEQ ID NO: 17413 - protein, 7 aa, synthetic construct
WFTGYNA

SEQ ID NO: 17414 - protein, 7 aa, synthetic construct
YYTGVKG

SEQ ID NO: 17415 - protein, 7 aa, synthetic construct
YYHGMLA

SEQ ID NO: 17416 - protein, 7 aa, synthetic construct
YTKSDSK

SEQ ID NO: 17417 - protein, 7 aa, synthetic construct
YTKSNHL

SEQ ID NO: 17418 - protein, 7 aa, synthetic construct
IHPTRYG

SEQ ID NO: 17419 - protein, 7 aa, synthetic construct
YFHATRD

SEQ ID NO: 17420 - protein, 7 aa, synthetic construct
NYAKSYA

SEQ ID NO: 17421 - protein, 7 aa, synthetic construct
YFSGTEN

SEQ ID NO: 17422 - protein, 7 aa, synthetic construct
MSRAGNN

SEQ ID NO: 17423 - protein, 7 aa, synthetic construct
YWEGTRH

SEQ ID NO: 17424 - protein, 7 aa, synthetic construct
YWQGVNE

SEQ ID NO: 17425 - protein, 7 aa, synthetic construct
LYSRLDK

SEQ ID NO: 17426 - protein, 7 aa, synthetic construct
HTDDSYP

SEQ ID NO: 17427 - protein, 7 aa, synthetic construct
YVRNDDK

SEQ ID NO: 17428 - protein, 7 aa, synthetic construct
QKHAPNA

SEQ ID NO: 17429 - protein, 7 aa, synthetic construct
TWSDNGV

SEQ ID NO: 17430 - protein, 7 aa, synthetic construct
RTNNEYP

SEQ ID NO: 17431 - protein, 7 aa, synthetic construct
YIKSDYQ

SEQ ID NO: 17432 - protein, 7 aa, synthetic construct
YARLGPS

SEQ ID NO: 17433 - protein, 7 aa, synthetic construct
RNGTSVW

SEQ ID NO: 17434 - protein, 7 aa, synthetic construct
YYTGMNN

SEQ ID NO: 17435 - protein, 7 aa, synthetic construct
YYSGERN

SEQ ID NO: 17436 - protein, 7 aa, synthetic construct
YWADKHA

SEQ ID NO: 17437 - protein, 7 aa, synthetic construct
DYAKSLL

SEQ ID NO: 17438 - protein, 7 aa, synthetic construct
LRRKPDL

SEQ ID NO: 17439 - protein, 7 aa, synthetic construct
FVKFQVN

SEQ ID NO: 17440 - protein, 7 aa, synthetic construct
QSKLSTW

SEQ ID NO: 17441 - protein, 7 aa, synthetic construct
YWVDKVA

SEQ ID NO: 17442 - protein, 7 aa, synthetic construct
YAKMGWN

SEQ ID NO: 17443 - protein, 7 aa, synthetic construct
RTDQYFP

SEQ ID NO: 17444 - protein, 7 aa, synthetic construct
YIKGDLF

SEQ ID NO: 17445 - protein, 7 aa, synthetic construct
YHRYGID

SEQ ID NO: 17446 - protein, 7 aa, synthetic construct
YLISDTK

SEQ ID NO: 17447 - protein, 7 aa, synthetic construct
EHGKSLW

SEQ ID NO: 17448 - protein, 7 aa, synthetic construct
WFSGEHS

SEQ ID NO: 17449 - protein, 7 aa, synthetic construct
FVRSQIS

SEQ ID NO: 17450 - protein, 7 aa, synthetic construct
YKDGTWY

SEQ ID NO: 17451 - protein, 7 aa, synthetic construct
CKKGCFE

SEQ ID NO: 17452 - protein, 7 aa, synthetic construct
NYARSNN

SEQ ID NO: 17453 - protein, 7 aa, synthetic construct
IERVSYG

SEQ ID NO: 17454 - protein, 7 aa, synthetic construct
HHKGNMN

SEQ ID NO: 17455 - protein, 7 aa, synthetic construct
CGAYWTE

SEQ ID NO: 17456 - protein, 7 aa, synthetic construct
YTHSNLH

SEQ ID NO: 17457 - protein, 7 aa, synthetic construct
SNAHSSW

SEQ ID NO: 17458 - protein, 7 aa, synthetic construct
LHRMGTS

SEQ ID NO: 17459 - protein, 7 aa, synthetic construct
YARYGLN

SEQ ID NO: 17460 - protein, 7 aa, synthetic construct
ISELSRW

SEQ ID NO: 17461 - protein, 7 aa, synthetic construct
YHRLDNP

SEQ ID NO: 17462 - protein, 7 aa, synthetic construct
YASGHWN

SEQ ID NO: 17463 - protein, 7 aa, synthetic construct
NQKHLMY

SEQ ID NO: 17464 - protein, 7 aa, synthetic construct
YWKNTPD

SEQ ID NO: 17465 - protein, 7 aa, synthetic construct
YTRTQAY

SEQ ID NO: 17466 - protein, 7 aa, synthetic construct
LCGSCRS

SEQ ID NO: 17467 - protein, 7 aa, synthetic construct
NSPYRPF

SEQ ID NO: 17468 - protein, 7 aa, synthetic construct
LWRSGVN

SEQ ID NO: 17469 - protein, 7 aa, synthetic construct
RCGDCVF

SEQ ID NO: 17470 - protein, 7 aa, synthetic construct
YWKGDNG

SEQ ID NO: 17471 - protein, 7 aa, synthetic construct
YSRNADN

SEQ ID NO: 17472 - protein, 7 aa, synthetic construct
RGEWQFA

SEQ ID NO: 17473 - protein, 7 aa, synthetic construct
YVYSNTH

SEQ ID NO: 17474 - protein, 7 aa, synthetic construct
SKYAPNS

SEQ ID NO: 17475 - protein, 7 aa, synthetic construct
YHRLGST

SEQ ID NO: 17476 - protein, 7 aa, synthetic construct
YHRSSSN

SEQ ID NO: 17477 - protein, 7 aa, synthetic construct
SSPNLSW

SEQ ID NO: 17478 - protein, 7 aa, synthetic construct
RNDFQVY

SEQ ID NO: 17479 - protein, 7 aa, synthetic construct
KNMWQNS

SEQ ID NO: 17480 - protein, 7 aa, synthetic construct
QHGHSQW

SEQ ID NO: 17481 - protein, 7 aa, synthetic construct
YWKSQTD

SEQ ID NO: 17482 - protein, 7 aa, synthetic construct
SSPYSQF

SEQ ID NO: 17483 - protein, 7 aa, synthetic construct
YYHGMAV

SEQ ID NO: 17484 - protein, 7 aa, synthetic construct
SPFMRRE

SEQ ID NO: 17485 - protein, 7 aa, synthetic construct
NALVGRD

SEQ ID NO: 17486 - protein, 7 aa, synthetic construct
YVVTHRN

SEQ ID NO: 17487 - protein, 7 aa, synthetic construct
GRFSEGR

SEQ ID NO: 17488 - protein, 7 aa, synthetic construct
TKWGAHV

SEQ ID NO: 17489 - protein, 7 aa, synthetic construct
LRYSRTE

SEQ ID NO: 17490 - protein, 7 aa, synthetic construct
FRGNCGP

SEQ ID NO: 17491 - protein, 7 aa, synthetic construct
GPGAGCN

SEQ ID NO: 17492 - protein, 7 aa, synthetic construct
YFSKQIA

SEQ ID NO: 17493 - protein, 7 aa, synthetic construct
DLSDRRW

SEQ ID NO: 17494 - protein, 7 aa, synthetic construct
RKLPGVA

SEQ ID NO: 17495 - protein, 7 aa, synthetic construct
GRVVSKP

SEQ ID NO: 17496 - protein, 7 aa, synthetic construct
LRDGTPS

SEQ ID NO: 17497 - protein, 7 aa, synthetic construct
FDEKVRR

SEQ ID NO: 17498 - protein, 7 aa, synthetic construct
VQVGRAC

SEQ ID NO: 17499 - protein, 7 aa, synthetic construct
VMEARAW

SEQ ID NO: 17500 - protein, 7 aa, synthetic construct
GVAGCVA

SEQ ID NO: 17501 - protein, 7 aa, synthetic construct
NSYSRAF

SEQ ID NO: 17502 - protein, 7 aa, synthetic construct
MRLSRQD

SEQ ID NO: 17503 - protein, 7 aa, synthetic construct
LLESSKW

SEQ ID NO: 17504 - protein, 7 aa, synthetic construct
SSLCLRE

SEQ ID NO: 17505 - protein, 7 aa, synthetic construct
GGPGSIW

SEQ ID NO: 17506 - protein, 7 aa, synthetic construct
YYRGPSG

SEQ ID NO: 17507 - protein, 7 aa, synthetic construct
GLGSTCS

SEQ ID NO: 17508 - protein, 7 aa, synthetic construct
YVRSSMG

SEQ ID NO: 17509 - protein, 7 aa, synthetic construct
CGGLSRG

SEQ ID NO: 17510 - protein, 7 aa, synthetic construct
WALRRME

SEQ ID NO: 17511 - protein, 7 aa, synthetic construct
CMSDKRA

SEQ ID NO: 17512 - protein, 7 aa, synthetic construct
CSMINKS

SEQ ID NO: 17513 - protein, 7 aa, synthetic construct
DPVARSW

SEQ ID NO: 17514 - protein, 7 aa, synthetic construct
ESSSRTW

SEQ ID NO: 17515 - protein, 7 aa, synthetic construct
LSRASVN

SEQ ID NO: 17516 - protein, 7 aa, synthetic construct
DPSWKRV

SEQ ID NO: 17517 - protein, 7 aa, synthetic construct
YGQGYGR

SEQ ID NO: 17518 - protein, 7 aa, synthetic construct
LDAKCMP

SEQ ID NO: 17519 - protein, 7 aa, synthetic construct
YFAGRID

SEQ ID NO: 17520 - protein, 7 aa, synthetic construct
YFSGRVA

SEQ ID NO: 17521 - protein, 7 aa, synthetic construct
YSRLLPM

SEQ ID NO: 17522 - protein, 7 aa, synthetic construct
YSRIMAN

SEQ ID NO: 17523 - protein, 7 aa, synthetic construct
VRHRSEL

SEQ ID NO: 17524 - protein, 7 aa, synthetic construct
DMESAVW

SEQ ID NO: 17525 - protein, 7 aa, synthetic construct
WTTRISH

SEQ ID NO: 17526 - protein, 7 aa, synthetic construct
HRFLKGE

SEQ ID NO: 17527 - protein, 7 aa, synthetic construct
WVGGRSN

SEQ ID NO: 17528 - protein, 7 aa, synthetic construct
LHRQLPL

SEQ ID NO: 17529 - protein, 7 aa, synthetic construct
CEKLSSR

SEQ ID NO: 17530 - protein, 7 aa, synthetic construct
LRHISHT

SEQ ID NO: 17531 - protein, 7 aa, synthetic construct
AWERKLM

SEQ ID NO: 17532 - protein, 7 aa, synthetic construct
FVARVRD

SEQ ID NO: 17533 - protein, 7 aa, synthetic construct
WGHPSRA

SEQ ID NO: 17534 - protein, 7 aa, synthetic construct
AERGCCG

SEQ ID NO: 17535 - protein, 7 aa, synthetic construct
RMESSVW

SEQ ID NO: 17536 - protein, 7 aa, synthetic construct
CVSVGRA

SEQ ID NO: 17537 - protein, 7 aa, synthetic construct
DSDFTSW

SEQ ID NO: 17538 - protein, 7 aa, synthetic construct
AHRLLPS

SEQ ID NO: 17539 - protein, 7 aa, synthetic construct
GQDSRRN

SEQ ID NO: 17540 - protein, 7 aa, synthetic construct
DLNSRSW

SEQ ID NO: 17541 - protein, 7 aa, synthetic construct
ASITTCR

SEQ ID NO: 17542 - protein, 7 aa, synthetic construct
AFTHRVQ

SEQ ID NO: 17543 - protein, 7 aa, synthetic construct
YLKSQTS

SEQ ID NO: 17544 - protein, 7 aa, synthetic construct
CGSWQRE

SEQ ID NO: 17545 - protein, 7 aa, synthetic construct
YSRLHVD

SEQ ID NO: 17546 - protein, 7 aa, synthetic construct
RVSCPPP

SEQ ID NO: 17547 - protein, 7 aa, synthetic construct
RSDFVTY

SEQ ID NO: 17548 - protein, 7 aa, synthetic construct
QYARSLE

SEQ ID NO: 17549 - protein, 7 aa, synthetic construct
GMEPVRW

SEQ ID NO: 17550 - protein, 7 aa, synthetic construct
DMRMGTW

SEQ ID NO: 17551 - protein, 7 aa, synthetic construct
QPPSCKA

SEQ ID NO: 17552 - protein, 7 aa, synthetic construct
AQGADSW

SEQ ID NO: 17553 - protein, 7 aa, synthetic construct
GGHYMLK

SEQ ID NO: 17554 - protein, 7 aa, synthetic construct
YSVIGPN

SEQ ID NO: 17555 - protein, 7 aa, synthetic construct
RDVTVFP

SEQ ID NO: 17556 - protein, 7 aa, synthetic construct
RNRDVYP

SEQ ID NO: 17557 - protein, 7 aa, synthetic construct
GMADRAW

SEQ ID NO: 17558 - protein, 7 aa, synthetic construct
TESTNGR

SEQ ID NO: 17559 - protein, 7 aa, synthetic construct
SVRQERY

SEQ ID NO: 17560 - protein, 7 aa, synthetic construct
GVDQVRW

SEQ ID NO: 17561 - protein, 7 aa, synthetic construct
NLMGCTG

SEQ ID NO: 17562 - protein, 7 aa, synthetic construct
GAEGVRW

SEQ ID NO: 17563 - protein, 7 aa, synthetic construct
VMEDRIW

SEQ ID NO: 17564 - protein, 7 aa, synthetic construct
LTSREGI

SEQ ID NO: 17565 - protein, 7 aa, synthetic construct
WSTHKAF

SEQ ID NO: 17566 - protein, 7 aa, synthetic construct
REEVSIW

SEQ ID NO: 17567 - protein, 7 aa, synthetic construct
NMASAGW

SEQ ID NO: 17568 - protein, 7 aa, synthetic construct
LISGDGP

SEQ ID NO: 17569 - protein, 7 aa, synthetic construct
SAYSAKY

SEQ ID NO: 17570 - protein, 7 aa, synthetic construct
YARAGPD

SEQ ID NO: 17571 - protein, 7 aa, synthetic construct
VESSRLW

SEQ ID NO: 17572 - protein, 7 aa, synthetic construct
DMSSVAW

SEQ ID NO: 17573 - protein, 7 aa, synthetic construct
DSFRGYD

SEQ ID NO: 17574 - protein, 7 aa, synthetic construct
DLASPDW

SEQ ID NO: 17575 - protein, 7 aa, synthetic construct
VSTHCCA

SEQ ID NO: 17576 - protein, 7 aa, synthetic construct
VLSSNVW

SEQ ID NO: 17577 - protein, 7 aa, synthetic construct
VMPDRVW

SEQ ID NO: 17578 - protein, 7 aa, synthetic construct
KMEDRSW

SEQ ID NO: 17579 - protein, 7 aa, synthetic construct
RSMVGCD

SEQ ID NO: 17580 - protein, 7 aa, synthetic construct
SLSDRGW

SEQ ID NO: 17581 - protein, 7 aa, synthetic construct
TFAHTNR

SEQ ID NO: 17582 - protein, 7 aa, synthetic construct
SGNYTAR

SEQ ID NO: 17583 - protein, 7 aa, synthetic construct
YHRAAAL

SEQ ID NO: 17584 - protein, 7 aa, synthetic construct
NMSAGTW

SEQ ID NO: 17585 - protein, 7 aa, synthetic construct
AKGWVRD

SEQ ID NO: 17586 - protein, 7 aa, synthetic construct
VMASQGW

SEQ ID NO: 17587 - protein, 7 aa, synthetic construct
DLSSGNW

SEQ ID NO: 17588 - protein, 7 aa, synthetic construct
KLDDYGW

SEQ ID NO: 17589 - protein, 7 aa, synthetic construct
YSRLDVL

SEQ ID NO: 17590 - protein, 7 aa, synthetic construct
ILSDRSW

SEQ ID NO: 17591 - protein, 7 aa, synthetic construct
YSRVGSG

SEQ ID NO: 17592 - protein, 7 aa, synthetic construct
GFARLRD

SEQ ID NO: 17593 - protein, 7 aa, synthetic construct
LSRIGTN

SEQ ID NO: 17594 - protein, 7 aa, synthetic construct
GGESSIW

SEQ ID NO: 17595 - protein, 7 aa, synthetic construct
ISEFSGY

SEQ ID NO: 17596 - protein, 7 aa, synthetic construct
RLADAYP

SEQ ID NO: 17597 - protein, 7 aa, synthetic construct
WFSGQIA

SEQ ID NO: 17598 - protein, 7 aa, synthetic construct
CTSKTGH

SEQ ID NO: 17599 - protein, 7 aa, synthetic construct
RTNRVEW

SEQ ID NO: 17600 - protein, 7 aa, synthetic construct
VEASRSW

SEQ ID NO: 17601 - protein, 7 aa, synthetic construct
VLSASSW

SEQ ID NO: 17602 - protein, 7 aa, synthetic construct
VLSERSW

SEQ ID NO: 17603 - protein, 7 aa, synthetic construct
LSALSVN

SEQ ID NO: 17604 - protein, 7 aa, synthetic construct
RGGGLFV

SEQ ID NO: 17605 - protein, 7 aa, synthetic construct
TESTHGR

SEQ ID NO: 17606 - protein, 7 aa, synthetic construct
YVRSDTA

SEQ ID NO: 17607 - protein, 7 aa, synthetic construct
REAVSTW

SEQ ID NO: 17608 - protein, 7 aa, synthetic construct
YYSGVKL

SEQ ID NO: 17609 - protein, 7 aa, synthetic construct
YRMSLER

SEQ ID NO: 17610 - protein, 7 aa, synthetic construct
LMEQRTW

SEQ ID NO: 17611 - protein, 7 aa, synthetic construct
GCRHGDI

SEQ ID NO: 17612 - protein, 7 aa, synthetic construct
WRGSQHV

SEQ ID NO: 17613 - protein, 7 aa, synthetic construct
GSEFVSY

SEQ ID NO: 17614 - protein, 7 aa, synthetic construct
YWHGKPE

SEQ ID NO: 17615 - protein, 7 aa, synthetic construct
FFRGNMG

SEQ ID NO: 17616 - protein, 7 aa, synthetic construct
VESSSRW

SEQ ID NO: 17617 - protein, 7 aa, synthetic construct
CGKAHSS

SEQ ID NO: 17618 - protein, 7 aa, synthetic construct
DMSVGKW

SEQ ID NO: 17619 - protein, 7 aa, synthetic construct
LLSSHDW

SEQ ID NO: 17620 - protein, 7 aa, synthetic construct
MRDGTSS

SEQ ID NO: 17621 - protein, 7 aa, synthetic construct
YVKSDVG

SEQ ID NO: 17622 - protein, 7 aa, synthetic construct
WSRVGVN

SEQ ID NO: 17623 - protein, 7 aa, synthetic construct
WSYKSNG

SEQ ID NO: 17624 - protein, 7 aa, synthetic construct
YWGGVVS

SEQ ID NO: 17625 - protein, 7 aa, synthetic construct
KMEAMTW

SEQ ID NO: 17626 - protein, 7 aa, synthetic construct
LSRLGGG

SEQ ID NO: 17627 - protein, 7 aa, synthetic construct
LMEAATW

SEQ ID NO: 17628 - protein, 7 aa, synthetic construct
KLDYLGT

SEQ ID NO: 17629 - protein, 7 aa, synthetic construct
LSRASHD

SEQ ID NO: 17630 - protein, 7 aa, synthetic construct
YFSGVQP

SEQ ID NO: 17631 - protein, 7 aa, synthetic construct
LSRVSPD

SEQ ID NO: 17632 - protein, 7 aa, synthetic construct
WRAGKDY

SEQ ID NO: 17633 - protein, 7 aa, synthetic construct
RLESVQW

SEQ ID NO: 17634 - protein, 7 aa, synthetic construct
YFSGRDE

SEQ ID NO: 17635 - protein, 7 aa, synthetic construct
ILKCTNN

SEQ ID NO: 17636 - protein, 7 aa, synthetic construct
YSRVAPD

SEQ ID NO: 17637 - protein, 7 aa, synthetic construct
RLESTHW

SEQ ID NO: 17638 - protein, 7 aa, synthetic construct
YWSGTVT

SEQ ID NO: 17639 - protein, 7 aa, synthetic construct
YARLSIN

SEQ ID NO: 17640 - protein, 7 aa, synthetic construct
RGEYHYP

SEQ ID NO: 17641 - protein, 7 aa, synthetic construct
FAAKWSS

SEQ ID NO: 17642 - protein, 7 aa, synthetic construct
YVKSQTI

SEQ ID NO: 17643 - protein, 7 aa, synthetic construct
SLCKTTS

SEQ ID NO: 17644 - protein, 7 aa, synthetic construct
PLSSGVW

SEQ ID NO: 17645 - protein, 7 aa, synthetic construct
LMGGGTW

SEQ ID NO: 17646 - protein, 7 aa, synthetic construct
GSPGVSW

SEQ ID NO: 17647 - protein, 7 aa, synthetic construct
QDDYLTW

SEQ ID NO: 17648 - protein, 7 aa, synthetic construct
YVKSQQS

SEQ ID NO: 17649 - protein, 7 aa, synthetic construct
QNEYVIY

SEQ ID NO: 17650 - protein, 7 aa, synthetic construct
VPGRSGF

SEQ ID NO: 17651 - protein, 7 aa, synthetic construct
FWSGKAA

SEQ ID NO: 17652 - protein, 7 aa, synthetic construct
STYDSFP

SEQ ID NO: 17653 - protein, 7 aa, synthetic construct
YFSGRHE

SEQ ID NO: 17654 - protein, 7 aa, synthetic construct
HSKSGGW

SEQ ID NO: 17655 - protein, 7 aa, synthetic construct
GGPGSNW

SEQ ID NO: 17656 - protein, 7 aa, synthetic construct
GSPGSIW

SEQ ID NO: 17657 - protein, 7 aa, synthetic construct
VSEFASY

SEQ ID NO: 17658 - protein, 7 aa, synthetic construct
LHKLSNN

SEQ ID NO: 17659 - protein, 7 aa, synthetic construct
LCKPCLT

SEQ ID NO: 17660 - protein, 7 aa, synthetic construct
RSLDSYP

SEQ ID NO: 17661 - protein, 7 aa, synthetic construct
CAPRVSS

SEQ ID NO: 17662 - protein, 7 aa, synthetic construct
PYAKSPL

SEQ ID NO: 17663 - protein, 7 aa, synthetic construct
SLSSRDW

SEQ ID NO: 17664 - protein, 7 aa, synthetic construct
WVDRTRG

SEQ ID NO: 17665 - protein, 7 aa, synthetic construct
IMPDRSW

SEQ ID NO: 17666 - protein, 7 aa, synthetic construct
INSREGI

SEQ ID NO: 17667 - protein, 7 aa, synthetic construct
LSDGTSP

SEQ ID NO: 17668 - protein, 7 aa, synthetic construct
YVRSQPL

SEQ ID NO: 17669 - protein, 7 aa, synthetic construct
YFSGVRE

SEQ ID NO: 17670 - protein, 7 aa, synthetic construct
YSAYRSV

SEQ ID NO: 17671 - protein, 7 aa, synthetic construct
GGEHSTW

SEQ ID NO: 17672 - protein, 7 aa, synthetic construct
VMLDRGW

SEQ ID NO: 17673 - protein, 7 aa, synthetic construct
GGGVVKY

SEQ ID NO: 17674 - protein, 7 aa, synthetic construct
YWSEVRA

SEQ ID NO: 17675 - protein, 7 aa, synthetic construct
IMSDRLW

SEQ ID NO: 17676 - protein, 7 aa, synthetic construct
LHSKLPN

SEQ ID NO: 17677 - protein, 7 aa, synthetic construct
YWSHVKE

SEQ ID NO: 17678 - protein, 7 aa, synthetic construct
APADRGW

SEQ ID NO: 17679 - protein, 7 aa, synthetic construct
YYSGQHA

SEQ ID NO: 17680 - protein, 7 aa, synthetic construct
DLRMATW

SEQ ID NO: 17681 - protein, 7 aa, synthetic construct
LSRVGQN

SEQ ID NO: 17682 - protein, 7 aa, synthetic construct
YFTGREK

SEQ ID NO: 17683 - protein, 7 aa, synthetic construct
YWSQVRE

SEQ ID NO: 17684 - protein, 7 aa, synthetic construct
LSRLSPV

SEQ ID NO: 17685 - protein, 7 aa, synthetic construct
SMSSAMW

SEQ ID NO: 17686 - protein, 7 aa, synthetic construct
IGESRLW

SEQ ID NO: 17687 - protein, 7 aa, synthetic construct
VRSTNGV

SEQ ID NO: 17688 - protein, 7 aa, synthetic construct
CMGALPE

SEQ ID NO: 17689 - protein, 7 aa, synthetic construct
VLSSVSW

SEQ ID NO: 17690 - protein, 7 aa, synthetic construct
ITSSNGI

SEQ ID NO: 17691 - protein, 7 aa, synthetic construct
LSRTSID

SEQ ID NO: 17692 - protein, 7 aa, synthetic construct
YWSQVVE

SEQ ID NO: 17693 - protein, 7 aa, synthetic construct
SEALTRR

SEQ ID NO: 17694 - protein, 7 aa, synthetic construct
MRDGTNA

SEQ ID NO: 17695 - protein, 7 aa, synthetic construct
KLDVGNW

SEQ ID NO: 17696 - protein, 7 aa, synthetic construct
DNASSVW

SEQ ID NO: 17697 - protein, 7 aa, synthetic construct
ILSSSGW

SEQ ID NO: 17698 - protein, 7 aa, synthetic construct
LYESRAW

SEQ ID NO: 17699 - protein, 7 aa, synthetic construct
YYGRTSS

SEQ ID NO: 17700 - protein, 7 aa, synthetic construct
FSRIGGG

SEQ ID NO: 17701 - protein, 7 aa, synthetic construct
VALKGWD

SEQ ID NO: 17702 - protein, 7 aa, synthetic construct
MSRASYN

SEQ ID NO: 17703 - protein, 7 aa, synthetic construct
CGVGRIA

SEQ ID NO: 17704 - protein, 7 aa, synthetic construct
KDDFSVY

SEQ ID NO: 17705 - protein, 7 aa, synthetic construct
FVSKNGV

SEQ ID NO: 17706 - protein, 7 aa, synthetic construct
TWTGNNA

SEQ ID NO: 17707 - protein, 7 aa, synthetic construct
RGDSPSW

SEQ ID NO: 17708 - protein, 7 aa, synthetic construct
DMVSRSW

SEQ ID NO: 17709 - protein, 7 aa, synthetic construct
YFTGSQN

SEQ ID NO: 17710 - protein, 7 aa, synthetic construct
VTSTMGR

SEQ ID NO: 17711 - protein, 7 aa, synthetic construct
VMADRAW

SEQ ID NO: 17712 - protein, 7 aa, synthetic construct
AYRTDSR

SEQ ID NO: 17713 - protein, 7 aa, synthetic construct
YFAGRLA

SEQ ID NO: 17714 - protein, 7 aa, synthetic construct
QLESRSW

SEQ ID NO: 17715 - protein, 7 aa, synthetic construct
KMDYSTR

SEQ ID NO: 17716 - protein, 7 aa, synthetic construct
GESSVRW

SEQ ID NO: 17717 - protein, 7 aa, synthetic construct
HSRLNVV

SEQ ID NO: 17718 - protein, 7 aa, synthetic construct
LPDGDGP

SEQ ID NO: 17719 - protein, 7 aa, synthetic construct
YFTGAWD

SEQ ID NO: 17720 - protein, 7 aa, synthetic construct
RESGVSW

SEQ ID NO: 17721 - protein, 7 aa, synthetic construct
YEPGCKE

SEQ ID NO: 17722 - protein, 7 aa, synthetic construct
LARGGPD

SEQ ID NO: 17723 - protein, 7 aa, synthetic construct
YARQSNN

SEQ ID NO: 17724 - protein, 7 aa, synthetic construct
WKAGGKV

SEQ ID NO: 17725 - protein, 7 aa, synthetic construct
EPERGWF

SEQ ID NO: 17726 - protein, 7 aa, synthetic construct
RGESHSW

SEQ ID NO: 17727 - protein, 7 aa, synthetic construct
YWNANLE

SEQ ID NO: 17728 - protein, 7 aa, synthetic construct
YWSGVTE

SEQ ID NO: 17729 - protein, 7 aa, synthetic construct
SRSTNGV

SEQ ID NO: 17730 - protein, 7 aa, synthetic construct
YFTGRLD

SEQ ID NO: 17731 - protein, 7 aa, synthetic construct
WWSGYVE

SEQ ID NO: 17732 - protein, 7 aa, synthetic construct
YFTGVSS

SEQ ID NO: 17733 - protein, 7 aa, synthetic construct
RPVCPTG

SEQ ID NO: 17734 - protein, 7 aa, synthetic construct
YWSSVRE

SEQ ID NO: 17735 - protein, 7 aa, synthetic construct
LHVAMPN

SEQ ID NO: 17736 - protein, 7 aa, synthetic construct
LHRLSVD

SEQ ID NO: 17737 - protein, 7 aa, synthetic construct
RTYDSFA

SEQ ID NO: 17738 - protein, 7 aa, synthetic construct
RSLEGSD

SEQ ID NO: 17739 - protein, 7 aa, synthetic construct
LHRLGDS

SEQ ID NO: 17740 - protein, 7 aa, synthetic construct
TRDSPMF

SEQ ID NO: 17741 - protein, 7 aa, synthetic construct
LRSGMGP

SEQ ID NO: 17742 - protein, 7 aa, synthetic construct
GSGEERW

SEQ ID NO: 17743 - protein, 7 aa, synthetic construct
WTPMCKA

SEQ ID NO: 17744 - protein, 7 aa, synthetic construct
FWHGVSD

SEQ ID NO: 17745 - protein, 7 aa, synthetic construct
LTKLSNN

SEQ ID NO: 17746 - protein, 7 aa, synthetic construct
VGYRNQV

SEQ ID NO: 17747 - protein, 7 aa, synthetic construct
LRERYSN

SEQ ID NO: 17748 - protein, 7 aa, synthetic construct
SYAKSVL

SEQ ID NO: 17749 - protein, 7 aa, synthetic construct
NMASSGW

SEQ ID NO: 17750 - protein, 7 aa, synthetic construct
RTYDAIA

SEQ ID NO: 17751 - protein, 7 aa, synthetic construct
LSRVSFD

SEQ ID NO: 17752 - protein, 7 aa, synthetic construct
RSEFVSF

SEQ ID NO: 17753 - protein, 7 aa, synthetic construct
GGSLLMS

SEQ ID NO: 17754 - protein, 7 aa, synthetic construct
DPSSHSW

SEQ ID NO: 17755 - protein, 7 aa, synthetic construct
VLASVTW

SEQ ID NO: 17756 - protein, 7 aa, synthetic construct
APASATW

SEQ ID NO: 17757 - protein, 7 aa, synthetic construct
EVRTYPK

SEQ ID NO: 17758 - protein, 7 aa, synthetic construct
GWGSNNK

SEQ ID NO: 17759 - protein, 7 aa, synthetic construct
RNSTVYP

SEQ ID NO: 17760 - protein, 7 aa, synthetic construct
YWSGLND

SEQ ID NO: 17761 - protein, 7 aa, synthetic construct
AQGLSAG

SEQ ID NO: 17762 - protein, 7 aa, synthetic construct
LGSWRNS

SEQ ID NO: 17763 - protein, 7 aa, synthetic construct
RTSTMGV

SEQ ID NO: 17764 - protein, 7 aa, synthetic construct
YFTGTLT

SEQ ID NO: 17765 - protein, 7 aa, synthetic construct
CEGKLHP

SEQ ID NO: 17766 - protein, 7 aa, synthetic construct
AYAYSAA

SEQ ID NO: 17767 - protein, 7 aa, synthetic construct
SMASNTW

SEQ ID NO: 17768 - protein, 7 aa, synthetic construct
GSSTSNW

SEQ ID NO: 17769 - protein, 7 aa, synthetic construct
LARGGFD

SEQ ID NO: 17770 - protein, 7 aa, synthetic construct
YVRFDNN

SEQ ID NO: 17771 - protein, 7 aa, synthetic construct
WGVRERG

SEQ ID NO: 17772 - protein, 7 aa, synthetic construct
FGKQQML

SEQ ID NO: 17773 - protein, 7 aa, synthetic construct
YVRSGPM

SEQ ID NO: 17774 - protein, 7 aa, synthetic construct
RGDSPLW

SEQ ID NO: 17775 - protein, 7 aa, synthetic construct
LHRLSSD

SEQ ID NO: 17776 - protein, 7 aa, synthetic construct
LSKASSN

SEQ ID NO: 17777 - protein, 7 aa, synthetic construct
VALEGAD

SEQ ID NO: 17778 - protein, 7 aa, synthetic construct
YSRVGPV

SEQ ID NO: 17779 - protein, 7 aa, synthetic construct
QPQDRSW

SEQ ID NO: 17780 - protein, 7 aa, synthetic construct
FSRLSPL

SEQ ID NO: 17781 - protein, 7 aa, synthetic construct
YSRIQLD

SEQ ID NO: 17782 - protein, 7 aa, synthetic construct
CEKGIRC

SEQ ID NO: 17783 - protein, 7 aa, synthetic construct
RGNSPLT

SEQ ID NO: 17784 - protein, 7 aa, synthetic construct
VLQSSVW

SEQ ID NO: 17785 - protein, 7 aa, synthetic construct
TWDGLVA

SEQ ID NO: 17786 - protein, 7 aa, synthetic construct
RMSDAYA

SEQ ID NO: 17787 - protein, 7 aa, synthetic construct
GSYGGSR

SEQ ID NO: 17788 - protein, 7 aa, synthetic construct
LVRGGTN

SEQ ID NO: 17789 - protein, 7 aa, synthetic construct
GGGAQMW

SEQ ID NO: 17790 - protein, 7 aa, synthetic construct
GSSGVAW

SEQ ID NO: 17791 - protein, 7 aa, synthetic construct
KWERSPI

SEQ ID NO: 17792 - protein, 7 aa, synthetic construct
YHALNLD

SEQ ID NO: 17793 - protein, 7 aa, synthetic construct
GDALSHW

SEQ ID NO: 17794 - protein, 7 aa, synthetic construct
DTLLHLR

SEQ ID NO: 17795 - protein, 7 aa, synthetic construct
SDGVSKW

SEQ ID NO: 17796 - protein, 7 aa, synthetic construct
LSRVGPD

SEQ ID NO: 17797 - protein, 7 aa, synthetic construct
DLSSTSW

SEQ ID NO: 17798 - protein, 7 aa, synthetic construct
GADFVKW

SEQ ID NO: 17799 - protein, 7 aa, synthetic construct
HDSTHGR

SEQ ID NO: 17800 - protein, 7 aa, synthetic construct
PSRLENR

SEQ ID NO: 17801 - protein, 7 aa, synthetic construct
LSKVGHN

SEQ ID NO: 17802 - protein, 7 aa, synthetic construct
VGVKGWD

SEQ ID NO: 17803 - protein, 7 aa, synthetic construct
YGTGTWS

SEQ ID NO: 17804 - protein, 7 aa, synthetic construct
SLSSSVW

SEQ ID NO: 17805 - protein, 7 aa, synthetic construct
YFTARME

SEQ ID NO: 17806 - protein, 7 aa, synthetic construct
RVPSKWD

SEQ ID NO: 17807 - protein, 7 aa, synthetic construct
EDEFTGF

SEQ ID NO: 17808 - protein, 7 aa, synthetic construct
GGEGSFW

SEQ ID NO: 17809 - protein, 7 aa, synthetic construct
LHANLPN

SEQ ID NO: 17810 - protein, 7 aa, synthetic construct
FGGGLFV

SEQ ID NO: 17811 - protein, 7 aa, synthetic construct
VMGARDW

SEQ ID NO: 17812 - protein, 7 aa, synthetic construct
WTSTHGV

SEQ ID NO: 17813 - protein, 7 aa, synthetic construct
YSRAGGS

SEQ ID NO: 17814 - protein, 7 aa, synthetic construct
YYTGKLD

SEQ ID NO: 17815 - protein, 7 aa, synthetic construct
RSDWKIS

SEQ ID NO: 17816 - protein, 7 aa, synthetic construct
NMNSSTW

SEQ ID NO: 17817 - protein, 7 aa, synthetic construct
RGDLVYP

SEQ ID NO: 17818 - protein, 7 aa, synthetic construct
DLRAGNW

SEQ ID NO: 17819 - protein, 7 aa, synthetic construct
APGNISW

SEQ ID NO: 17820 - protein, 7 aa, synthetic construct
VKYNVHL

SEQ ID NO: 17821 - protein, 7 aa, synthetic construct
RGDDRGW

SEQ ID NO: 17822 - protein, 7 aa, synthetic construct
YFSGIHS

SEQ ID NO: 17823 - protein, 7 aa, synthetic construct
TPSTIYF

SEQ ID NO: 17824 - protein, 7 aa, synthetic construct
EMESSVW

SEQ ID NO: 17825 - protein, 7 aa, synthetic construct
WTEGTRY

SEQ ID NO: 17826 - protein, 7 aa, synthetic construct
EGIARTW

SEQ ID NO: 17827 - protein, 7 aa, synthetic construct
MYAFSIE

SEQ ID NO: 17828 - protein, 7 aa, synthetic construct
YVYSDSR

SEQ ID NO: 17829 - protein, 7 aa, synthetic construct
DSVYQLR

SEQ ID NO: 17830 - protein, 7 aa, synthetic construct
RLLDVYP

SEQ ID NO: 17831 - protein, 7 aa, synthetic construct
GRSYIPS

SEQ ID NO: 17832 - protein, 7 aa, synthetic construct
YFQGKIA

SEQ ID NO: 17833 - protein, 7 aa, synthetic construct
YVRSDGM

SEQ ID NO: 17834 - protein, 7 aa, synthetic construct
IPPLFNV

SEQ ID NO: 17835 - protein, 7 aa, synthetic construct
QGVSREW

SEQ ID NO: 17836 - protein, 7 aa, synthetic construct
RLEAANW

SEQ ID NO: 17837 - protein, 7 aa, synthetic construct
WWSEIRS

SEQ ID NO: 17838 - protein, 7 aa, synthetic construct
YSRLSAD

SEQ ID NO: 17839 - protein, 7 aa, synthetic construct
APGDIRW

SEQ ID NO: 17840 - protein, 7 aa, synthetic construct
RSDQWRG

SEQ ID NO: 17841 - protein, 7 aa, synthetic construct
HYPLSAK

SEQ ID NO: 17842 - protein, 7 aa, synthetic construct
MDDFTVY

SEQ ID NO: 17843 - protein, 7 aa, synthetic construct
GGLGSQW

SEQ ID NO: 17844 - protein, 7 aa, synthetic construct
LSRTAYD

SEQ ID NO: 17845 - protein, 7 aa, synthetic construct
RYGDVMR

SEQ ID NO: 17846 - protein, 7 aa, synthetic construct
DLRGTSA

SEQ ID NO: 17847 - protein, 7 aa, synthetic construct
SYRGARE

SEQ ID NO: 17848 - protein, 7 aa, synthetic construct
MHRLLSD

SEQ ID NO: 17849 - protein, 7 aa, synthetic construct
DLQSSSW

SEQ ID NO: 17850 - protein, 7 aa, synthetic construct
NRYGVVS

SEQ ID NO: 17851 - protein, 7 aa, synthetic construct
VVMTRDR

SEQ ID NO: 17852 - protein, 7 aa, synthetic construct
YSRIGAG

SEQ ID NO: 17853 - protein, 7 aa, synthetic construct
CGEGSKA

SEQ ID NO: 17854 - protein, 7 aa, synthetic construct
GSEFLGW

SEQ ID NO: 17855 - protein, 7 aa, synthetic construct
RDSDNGI

SEQ ID NO: 17856 - protein, 7 aa, synthetic construct
WRRESSS

SEQ ID NO: 17857 - protein, 7 aa, synthetic construct
LSRLSQD

SEQ ID NO: 17858 - protein, 7 aa, synthetic construct
YFAGIAQ

SEQ ID NO: 17859 - protein, 7 aa, synthetic construct
SSPRGSD

SEQ ID NO: 17860 - protein, 7 aa, synthetic construct
FGLIMKA

SEQ ID NO: 17861 - protein, 7 aa, synthetic construct
KSIASPG

SEQ ID NO: 17862 - protein, 7 aa, synthetic construct
VLHSSNW

SEQ ID NO: 17863 - protein, 7 aa, synthetic construct
VADHLRW

SEQ ID NO: 17864 - protein, 7 aa, synthetic construct
YPPMLIA

SEQ ID NO: 17865 - protein, 7 aa, synthetic construct
GCKGSCG

SEQ ID NO: 17866 - protein, 7 aa, synthetic construct
HYEKTGR

SEQ ID NO: 17867 - protein, 7 aa, synthetic construct
LARTGWD

SEQ ID NO: 17868 - protein, 7 aa, synthetic construct
GGGYGRN

SEQ ID NO: 17869 - protein, 7 aa, synthetic construct
WRLHKGD

SEQ ID NO: 17870 - protein, 7 aa, synthetic construct
LSRIANN

SEQ ID NO: 17871 - protein, 7 aa, synthetic construct
ALGDRTW

SEQ ID NO: 17872 - protein, 7 aa, synthetic construct
DFRGARL

SEQ ID NO: 17873 - protein, 7 aa, synthetic construct
LAKTAHN

SEQ ID NO: 17874 - protein, 7 aa, synthetic construct
PMASLQW

SEQ ID NO: 17875 - protein, 7 aa, synthetic construct
GSELSSW

SEQ ID NO: 17876 - protein, 7 aa, synthetic construct
YFHSTKT

SEQ ID NO: 17877 - protein, 7 aa, synthetic construct
RMSSDYR

SEQ ID NO: 17878 - protein, 7 aa, synthetic construct
VMADAFP

SEQ ID NO: 17879 - protein, 7 aa, synthetic construct
WKGRETT

SEQ ID NO: 17880 - protein, 7 aa, synthetic construct
LGSRERF

SEQ ID NO: 17881 - protein, 7 aa, synthetic construct
MGKVCNS

SEQ ID NO: 17882 - protein, 7 aa, synthetic construct
DGSSRSW

SEQ ID NO: 17883 - protein, 7 aa, synthetic construct
LSRLNAD

SEQ ID NO: 17884 - protein, 7 aa, synthetic construct
LFSGVGP

SEQ ID NO: 17885 - protein, 7 aa, synthetic construct
VASVCKG

SEQ ID NO: 17886 - protein, 7 aa, synthetic construct
YYDLKRS

SEQ ID NO: 17887 - protein, 7 aa, synthetic construct
WVASRSS

SEQ ID NO: 17888 - protein, 7 aa, synthetic construct
VMTARDW

SEQ ID NO: 17889 - protein, 7 aa, synthetic construct
LSKLSSN

SEQ ID NO: 17890 - protein, 7 aa, synthetic construct
RGLEGMD

SEQ ID NO: 17891 - protein, 7 aa, synthetic construct
WAMRRVE

SEQ ID NO: 17892 - protein, 7 aa, synthetic construct
YRGASNH

SEQ ID NO: 17893 - protein, 7 aa, synthetic construct
QGNGLYR

SEQ ID NO: 17894 - protein, 7 aa, synthetic construct
TRSFSHG

SEQ ID NO: 17895 - protein, 7 aa, synthetic construct
YWTGLHE

SEQ ID NO: 17896 - protein, 7 aa, synthetic construct
VLSDITW

SEQ ID NO: 17897 - protein, 7 aa, synthetic construct
LLDSAKW

SEQ ID NO: 17898 - protein, 7 aa, synthetic construct
VPDWVDR

SEQ ID NO: 17899 - protein, 7 aa, synthetic construct
SGYRGAV

SEQ ID NO: 17900 - protein, 7 aa, synthetic construct
LKDGTSA

SEQ ID NO: 17901 - protein, 7 aa, synthetic construct
YSRAGDD

SEQ ID NO: 17902 - protein, 7 aa, synthetic construct
LSRSSMN

SEQ ID NO: 17903 - protein, 7 aa, synthetic construct
YSKLSDR

SEQ ID NO: 17904 - protein, 7 aa, synthetic construct
DGYSGRD

SEQ ID NO: 17905 - protein, 7 aa, synthetic construct
YSRLNVG

SEQ ID NO: 17906 - protein, 7 aa, synthetic construct
EAWTDRG

SEQ ID NO: 17907 - protein, 7 aa, synthetic construct
VSNKSTG

SEQ ID NO: 17908 - protein, 7 aa, synthetic construct
WSRGAAT

SEQ ID NO: 17909 - protein, 7 aa, synthetic construct
DTYETRW

SEQ ID NO: 17910 - protein, 7 aa, synthetic construct
VMSSAGW

SEQ ID NO: 17911 - protein, 7 aa, synthetic construct
YTRVQEN

SEQ ID NO: 17912 - protein, 7 aa, synthetic construct
ELESWSW

SEQ ID NO: 17913 - protein, 7 aa, synthetic construct
RDGVSAW

SEQ ID NO: 17914 - protein, 7 aa, synthetic construct
SFGPPYG

SEQ ID NO: 17915 - protein, 7 aa, synthetic construct
TFYGQNA

SEQ ID NO: 17916 - protein, 7 aa, synthetic construct
RMEVGDW

SEQ ID NO: 17917 - protein, 7 aa, synthetic construct
YSKAQGV

SEQ ID NO: 17918 - protein, 7 aa, synthetic construct
HSKLNPM

SEQ ID NO: 17919 - protein, 7 aa, synthetic construct
LFDATPS

SEQ ID NO: 17920 - protein, 7 aa, synthetic construct
REGYRGY

SEQ ID NO: 17921 - protein, 7 aa, synthetic construct
LARSGGG

SEQ ID NO: 17922 - protein, 7 aa, synthetic construct
FWGGVVD

SEQ ID NO: 17923 - protein, 7 aa, synthetic construct
VSSDNGM

SEQ ID NO: 17924 - protein, 7 aa, synthetic construct
YVRSDSS

SEQ ID NO: 17925 - protein, 7 aa, synthetic construct
ISKTCRE

SEQ ID NO: 17926 - protein, 7 aa, synthetic construct
SMQDRSW

SEQ ID NO: 17927 - protein, 7 aa, synthetic construct
WSNRARD

SEQ ID NO: 17928 - protein, 7 aa, synthetic construct
YVISDRN

SEQ ID NO: 17929 - protein, 7 aa, synthetic construct
LRLHGRD

SEQ ID NO: 17930 - protein, 7 aa, synthetic construct
NQRYGSS

SEQ ID NO: 17931 - protein, 7 aa, synthetic construct
SGGGLFP

SEQ ID NO: 17932 - protein, 7 aa, synthetic construct
DIAHKRY

SEQ ID NO: 17933 - protein, 7 aa, synthetic construct
VALKGAG

SEQ ID NO: 17934 - protein, 7 aa, synthetic construct
CTNVCNA

SEQ ID NO: 17935 - protein, 7 aa, synthetic construct
MWNGTPS

SEQ ID NO: 17936 - protein, 7 aa, synthetic construct
LYGSRQT

SEQ ID NO: 17937 - protein, 7 aa, synthetic construct
AGDGLWV

SEQ ID NO: 17938 - protein, 7 aa, synthetic construct
VLSHATW

SEQ ID NO: 17939 - protein, 7 aa, synthetic construct
YHAKGDN

SEQ ID NO: 17940 - protein, 7 aa, synthetic construct
ETDGWRN

SEQ ID NO: 17941 - protein, 7 aa, synthetic construct
LLSSADW

SEQ ID NO: 17942 - protein, 7 aa, synthetic construct
KDGFSTY

SEQ ID NO: 17943 - protein, 7 aa, synthetic construct
GSEVTRR

SEQ ID NO: 17944 - protein, 7 aa, synthetic construct
AEPPVMW

SEQ ID NO: 17945 - protein, 7 aa, synthetic construct
FAHIHGK

SEQ ID NO: 17946 - protein, 7 aa, synthetic construct
IQSTNGR

SEQ ID NO: 17947 - protein, 7 aa, synthetic construct
GTKWSDR

SEQ ID NO: 17948 - protein, 7 aa, synthetic construct
VWPGRST

SEQ ID NO: 17949 - protein, 7 aa, synthetic construct
LARLGPD

SEQ ID NO: 17950 - protein, 7 aa, synthetic construct
HCPTIPM

SEQ ID NO: 17951 - protein, 7 aa, synthetic construct
YARGSLN

SEQ ID NO: 17952 - protein, 7 aa, synthetic construct
YVKSAGS

SEQ ID NO: 17953 - protein, 7 aa, synthetic construct
WDAIRRN

SEQ ID NO: 17954 - protein, 7 aa, synthetic construct
LGENLRW

SEQ ID NO: 17955 - protein, 7 aa, synthetic construct
WFSGVQL

SEQ ID NO: 17956 - protein, 7 aa, synthetic construct
WWTGMIA

SEQ ID NO: 17957 - protein, 7 aa, synthetic construct
DHRGTGW

SEQ ID NO: 17958 - protein, 7 aa, synthetic construct
FFSGTKV

SEQ ID NO: 17959 - protein, 7 aa, synthetic construct
NGADGRW

SEQ ID NO: 17960 - protein, 7 aa, synthetic construct
SYRLVDK

SEQ ID NO: 17961 - protein, 7 aa, synthetic construct
WPYGNDA

SEQ ID NO: 17962 - protein, 7 aa, synthetic construct
RGGGLYV

SEQ ID NO: 17963 - protein, 7 aa, synthetic construct
YSYAGGG

SEQ ID NO: 17964 - protein, 7 aa, synthetic construct
VYVKAHN

SEQ ID NO: 17965 - protein, 7 aa, synthetic construct
YWSGTQG

SEQ ID NO: 17966 - protein, 7 aa, synthetic construct
EMAAYDW

SEQ ID NO: 17967 - protein, 7 aa, synthetic construct
RSDTTYP

SEQ ID NO: 17968 - protein, 7 aa, synthetic construct
REDFSAW

SEQ ID NO: 17969 - protein, 7 aa, synthetic construct
MSSEYER

SEQ ID NO: 17970 - protein, 7 aa, synthetic construct
WRKTDGG

SEQ ID NO: 17971 - protein, 7 aa, synthetic construct
WDNGVTG

SEQ ID NO: 17972 - protein, 7 aa, synthetic construct
KWQSVSA

SEQ ID NO: 17973 - protein, 7 aa, synthetic construct
VEYRGIG

SEQ ID NO: 17974 - protein, 7 aa, synthetic construct
SLNDHLL

SEQ ID NO: 17975 - protein, 7 aa, synthetic construct
YVRSDRV

SEQ ID NO: 17976 - protein, 7 aa, synthetic construct
CRPVCTP

SEQ ID NO: 17977 - protein, 7 aa, synthetic construct
NFRSDLR

SEQ ID NO: 17978 - protein, 7 aa, synthetic construct
PMRETLW

SEQ ID NO: 17979 - protein, 7 aa, synthetic construct
LWNGVGP

SEQ ID NO: 17980 - protein, 7 aa, synthetic construct
LAETRRY

SEQ ID NO: 17981 - protein, 7 aa, synthetic construct
SQSSRCA

SEQ ID NO: 17982 - protein, 7 aa, synthetic construct
ISKTCGS

SEQ ID NO: 17983 - protein, 7 aa, synthetic construct
LAGRGWD

SEQ ID NO: 17984 - protein, 7 aa, synthetic construct
ARHHTSS

SEQ ID NO: 17985 - protein, 7 aa, synthetic construct
WLKIGKA

SEQ ID NO: 17986 - protein, 7 aa, synthetic construct
MLSSQTW

SEQ ID NO: 17987 - protein, 7 aa, synthetic construct
WWTGYVD

SEQ ID NO: 17988 - protein, 7 aa, synthetic construct
EWSSLDD

SEQ ID NO: 17989 - protein, 7 aa, synthetic construct
LRDGTLR

SEQ ID NO: 17990 - protein, 7 aa, synthetic construct
FQRVYKD

SEQ ID NO: 17991 - protein, 7 aa, synthetic construct
GGATSNW

SEQ ID NO: 17992 - protein, 7 aa, synthetic construct
KFHSNSL

SEQ ID NO: 17993 - protein, 7 aa, synthetic construct
LSALNRN

SEQ ID NO: 17994 - protein, 7 aa, synthetic construct
GGESSVW

SEQ ID NO: 17995 - protein, 7 aa, synthetic construct
RLDAHDW

SEQ ID NO: 17996 - protein, 7 aa, synthetic construct
GVDVVRW

SEQ ID NO: 17997 - protein, 7 aa, synthetic construct
AQGISAG

SEQ ID NO: 17998 - protein, 7 aa, synthetic construct
NGVNGLW

SEQ ID NO: 17999 - protein, 7 aa, synthetic construct
DLRSSDW

SEQ ID NO: 18000 - protein, 7 aa, synthetic construct
GGESSLW

SEQ ID NO: 18001 - protein, 7 aa, synthetic construct
LARGGWD

SEQ ID NO: 18002 - protein, 7 aa, synthetic construct
GNSERRW

SEQ ID NO: 18003 - protein, 7 aa, synthetic construct
YFTRTMA

SEQ ID NO: 18004 - protein, 7 aa, synthetic construct
GGEGSAW

SEQ ID NO: 18005 - protein, 7 aa, synthetic construct
SGKCAAT

SEQ ID NO: 18006 - protein, 7 aa, synthetic construct
DGPVFNR

SEQ ID NO: 18007 - protein, 7 aa, synthetic construct
LPQSSNW

SEQ ID NO: 18008 - protein, 7 aa, synthetic construct
VDEFLSW

SEQ ID NO: 18009 - protein, 7 aa, synthetic construct
FHGNARV

SEQ ID NO: 18010 - protein, 7 aa, synthetic construct
RAFDSYS

SEQ ID NO: 18011 - protein, 7 aa, synthetic construct
LHRLMPD

SEQ ID NO: 18012 - protein, 7 aa, synthetic construct
YVKSQPG

SEQ ID NO: 18013 - protein, 7 aa, synthetic construct
YSKLNTH

SEQ ID NO: 18014 - protein, 7 aa, synthetic construct
LARSGYD

SEQ ID NO: 18015 - protein, 7 aa, synthetic construct
LSRVGAD

SEQ ID NO: 18016 - protein, 7 aa, synthetic construct
ELVTKRY

SEQ ID NO: 18017 - protein, 7 aa, synthetic construct
NAFEGAD

SEQ ID NO: 18018 - protein, 7 aa, synthetic construct
MFDGSSA

SEQ ID NO: 18019 - protein, 7 aa, synthetic construct
WASRTRD

SEQ ID NO: 18020 - protein, 7 aa, synthetic construct
WGSRREG

SEQ ID NO: 18021 - protein, 7 aa, synthetic construct
FSRLHID

SEQ ID NO: 18022 - protein, 7 aa, synthetic construct
AYRRPDA

SEQ ID NO: 18023 - protein, 7 aa, synthetic construct
DGSTSTW

SEQ ID NO: 18024 - protein, 7 aa, synthetic construct
AQGNWKG

SEQ ID NO: 18025 - protein, 7 aa, synthetic construct
CCGGRGP

SEQ ID NO: 18026 - protein, 7 aa, synthetic construct
VSESLYW

SEQ ID NO: 18027 - protein, 7 aa, synthetic construct
SYAVRRE

SEQ ID NO: 18028 - protein, 7 aa, synthetic construct
GGDFEHW

SEQ ID NO: 18029 - protein, 7 aa, synthetic construct
TSYGANA

SEQ ID NO: 18030 - protein, 7 aa, synthetic construct
FGNGSSY

SEQ ID NO: 18031 - protein, 7 aa, synthetic construct
FFTGVVG

SEQ ID NO: 18032 - protein, 7 aa, synthetic construct
LGGTSRY

SEQ ID NO: 18033 - protein, 7 aa, synthetic construct
TYEGAVA

SEQ ID NO: 18034 - protein, 7 aa, synthetic construct
ADLTVRR

SEQ ID NO: 18035 - protein, 7 aa, synthetic construct
LARSGPD

SEQ ID NO: 18036 - protein, 7 aa, synthetic construct
TDETVYR

SEQ ID NO: 18037 - protein, 7 aa, synthetic construct
DDGSSRY

SEQ ID NO: 18038 - protein, 7 aa, synthetic construct
DSPEWRD

SEQ ID NO: 18039 - protein, 7 aa, synthetic construct
KVALLST

SEQ ID NO: 18040 - protein, 7 aa, synthetic construct
LHKLGDD

SEQ ID NO: 18041 - protein, 7 aa, synthetic construct
YYTGMIS

SEQ ID NO: 18042 - protein, 7 aa, synthetic construct
FEAPNSW

SEQ ID NO: 18043 - protein, 7 aa, synthetic construct
DEGGYPW

SEQ ID NO: 18044 - protein, 7 aa, synthetic construct
WVREANR

SEQ ID NO: 18045 - protein, 7 aa, synthetic construct
RYNMSRE

SEQ ID NO: 18046 - protein, 7 aa, synthetic construct
YNFKRDG

SEQ ID NO: 18047 - protein, 7 aa, synthetic construct
WWTGTVS

SEQ ID NO: 18048 - protein, 7 aa, synthetic construct
YWAGIPD

SEQ ID NO: 18049 - protein, 7 aa, synthetic construct
LWGGIPS

SEQ ID NO: 18050 - protein, 7 aa, synthetic construct
VVDYMSH

SEQ ID NO: 18051 - protein, 7 aa, synthetic construct
FFSGIID

SEQ ID NO: 18052 - protein, 7 aa, synthetic construct
YVRFDSG

SEQ ID NO: 18053 - protein, 7 aa, synthetic construct
RVGHTAW

SEQ ID NO: 18054 - protein, 7 aa, synthetic construct
WSHMGKG

SEQ ID NO: 18055 - protein, 7 aa, synthetic construct
YYTGFTN

SEQ ID NO: 18056 - protein, 7 aa, synthetic construct
VIEDAYP

SEQ ID NO: 18057 - protein, 7 aa, synthetic construct
GVINVAW

SEQ ID NO: 18058 - protein, 7 aa, synthetic construct
IESFNGR

SEQ ID NO: 18059 - protein, 7 aa, synthetic construct
GMGSERW

SEQ ID NO: 18060 - protein, 7 aa, synthetic construct
SAYRGGG

SEQ ID NO: 18061 - protein, 7 aa, synthetic construct
HWAKSLE

SEQ ID NO: 18062 - protein, 7 aa, synthetic construct
DLGSASW

SEQ ID NO: 18063 - protein, 7 aa, synthetic construct
GFRHPGS

SEQ ID NO: 18064 - protein, 7 aa, synthetic construct
RMSSGVW

SEQ ID NO: 18065 - protein, 7 aa, synthetic construct
AESSRLW

SEQ ID NO: 18066 - protein, 7 aa, synthetic construct
LWDGTGA

SEQ ID NO: 18067 - protein, 7 aa, synthetic construct
SSDYSSY

SEQ ID NO: 18068 - protein, 7 aa, synthetic construct
ENGGGRW

SEQ ID NO: 18069 - protein, 7 aa, synthetic construct
YDRLSDN

SEQ ID NO: 18070 - protein, 7 aa, synthetic construct
RNEFTGF

SEQ ID NO: 18071 - protein, 7 aa, synthetic construct
SDSTNGM

SEQ ID NO: 18072 - protein, 7 aa, synthetic construct
ERMNCHS

SEQ ID NO: 18073 - protein, 7 aa, synthetic construct
YSRLGGD

SEQ ID NO: 18074 - protein, 7 aa, synthetic construct
LLQSSTW

SEQ ID NO: 18075 - protein, 7 aa, synthetic construct
WARGSGL

SEQ ID NO: 18076 - protein, 7 aa, synthetic construct
GADAVRW

SEQ ID NO: 18077 - protein, 7 aa, synthetic construct
DFYGRPA

SEQ ID NO: 18078 - protein, 7 aa, synthetic construct
SGATSNW

SEQ ID NO: 18079 - protein, 7 aa, synthetic construct
RALEGRD

SEQ ID NO: 18080 - protein, 7 aa, synthetic construct
QWKVTDR

SEQ ID NO: 18081 - protein, 7 aa, synthetic construct
GGVPPKY

SEQ ID NO: 18082 - protein, 7 aa, synthetic construct
GRSGGVW

SEQ ID NO: 18083 - protein, 7 aa, synthetic construct
YSRLSVD

SEQ ID NO: 18084 - protein, 7 aa, synthetic construct
FFAGVKD

SEQ ID NO: 18085 - protein, 7 aa, synthetic construct
WCEGVMT

SEQ ID NO: 18086 - protein, 7 aa, synthetic construct
WRVSDQK

SEQ ID NO: 18087 - protein, 7 aa, synthetic construct
YVKSDSH

SEQ ID NO: 18088 - protein, 7 aa, synthetic construct
GMGSSVW

SEQ ID NO: 18089 - protein, 7 aa, synthetic construct
AGESRGW

SEQ ID NO: 18090 - protein, 7 aa, synthetic construct
WARSPGS

SEQ ID NO: 18091 - protein, 7 aa, synthetic construct
KSVKFLG

SEQ ID NO: 18092 - protein, 7 aa, synthetic construct
TLVRTTG

SEQ ID NO: 18093 - protein, 7 aa, synthetic construct
YYTGRLE

SEQ ID NO: 18094 - protein, 7 aa, synthetic construct
KWTSNSG

SEQ ID NO: 18095 - protein, 7 aa, synthetic construct
VRAYATG

SEQ ID NO: 18096 - protein, 7 aa, synthetic construct
HSRLNES

SEQ ID NO: 18097 - protein, 7 aa, synthetic construct
TRYTGQH

SEQ ID NO: 18098 - protein, 7 aa, synthetic construct
RFHAGTM

SEQ ID NO: 18099 - protein, 7 aa, synthetic construct
YRVRDIG

SEQ ID NO: 18100 - protein, 7 aa, synthetic construct
VDSTCHA

SEQ ID NO: 18101 - protein, 7 aa, synthetic construct
KYSSFSA

SEQ ID NO: 18102 - protein, 7 aa, synthetic construct
RDGNSAW

SEQ ID NO: 18103 - protein, 7 aa, synthetic construct
WFSGETD

SEQ ID NO: 18104 - protein, 7 aa, synthetic construct
RSAFEPF

SEQ ID NO: 18105 - protein, 7 aa, synthetic construct
HHFSGKQ

SEQ ID NO: 18106 - protein, 7 aa, synthetic construct
SRWGDAA

SEQ ID NO: 18107 - protein, 7 aa, synthetic construct
LWRSDNN

SEQ ID NO: 18108 - protein, 7 aa, synthetic construct
GSEFHTW

SEQ ID NO: 18109 - protein, 7 aa, synthetic construct
GAGTSSW

SEQ ID NO: 18110 - protein, 7 aa, synthetic construct
YVRSQVD

SEQ ID NO: 18111 - protein, 7 aa, synthetic construct
PNRFTKD

SEQ ID NO: 18112 - protein, 7 aa, synthetic construct
ASSTNGR

SEQ ID NO: 18113 - protein, 7 aa, synthetic construct
RVEDAFP

SEQ ID NO: 18114 - protein, 7 aa, synthetic construct
LHRESPN

SEQ ID NO: 18115 - protein, 7 aa, synthetic construct
FFSTNGV

SEQ ID NO: 18116 - protein, 7 aa, synthetic construct
LTRISSN

SEQ ID NO: 18117 - protein, 7 aa, synthetic construct
RVPYKGD

SEQ ID NO: 18118 - protein, 7 aa, synthetic construct
VSSQWRG

SEQ ID NO: 18119 - protein, 7 aa, synthetic construct
RSADAFP

SEQ ID NO: 18120 - protein, 7 aa, synthetic construct
YVGGAYS

SEQ ID NO: 18121 - protein, 7 aa, synthetic construct
TSYDSGW

SEQ ID NO: 18122 - protein, 7 aa, synthetic construct
GADHVTW

SEQ ID NO: 18123 - protein, 7 aa, synthetic construct
YVRSMNT

SEQ ID NO: 18124 - protein, 7 aa, synthetic construct
LSRVSAD

SEQ ID NO: 18125 - protein, 7 aa, synthetic construct
SCTPCKA

SEQ ID NO: 18126 - protein, 7 aa, synthetic construct
VATHGAG

SEQ ID NO: 18127 - protein, 7 aa, synthetic construct
FPGSCCA

SEQ ID NO: 18128 - protein, 7 aa, synthetic construct
VESSRAW

SEQ ID NO: 18129 - protein, 7 aa, synthetic construct
FYGHPYD

SEQ ID NO: 18130 - protein, 7 aa, synthetic construct
RLESTGW

SEQ ID NO: 18131 - protein, 7 aa, synthetic construct
VARTYRE

SEQ ID NO: 18132 - protein, 7 aa, synthetic construct
YSKIGRD

SEQ ID NO: 18133 - protein, 7 aa, synthetic construct
KDDYTTF

SEQ ID NO: 18134 - protein, 7 aa, synthetic construct
WYSGIIA

SEQ ID NO: 18135 - protein, 7 aa, synthetic construct
RDVGCCG

SEQ ID NO: 18136 - protein, 7 aa, synthetic construct
LFTGFGP

SEQ ID NO: 18137 - protein, 7 aa, synthetic construct
YFAGTHT

SEQ ID NO: 18138 - protein, 7 aa, synthetic construct
RTNVVFP

SEQ ID NO: 18139 - protein, 7 aa, synthetic construct
LVYGKNV

SEQ ID NO: 18140 - protein, 7 aa, synthetic construct
LTRLHAV

SEQ ID NO: 18141 - protein, 7 aa, synthetic construct
LHVSLEN

SEQ ID NO: 18142 - protein, 7 aa, synthetic construct
MVRNQPN

SEQ ID NO: 18143 - protein, 7 aa, synthetic construct
HFPRSTG

SEQ ID NO: 18144 - protein, 7 aa, synthetic construct
DFTDRKW

SEQ ID NO: 18145 - protein, 7 aa, synthetic construct
LPRTGDW

SEQ ID NO: 18146 - protein, 7 aa, synthetic construct
NDGHIKG

SEQ ID NO: 18147 - protein, 7 aa, synthetic construct
WGGHRGV

SEQ ID NO: 18148 - protein, 7 aa, synthetic construct
ATDSGPR

SEQ ID NO: 18149 - protein, 7 aa, synthetic construct
SWSGGTK

SEQ ID NO: 18150 - protein, 7 aa, synthetic construct
FMPGHRT

SEQ ID NO: 18151 - protein, 7 aa, synthetic construct
VAMSGAG

SEQ ID NO: 18152 - protein, 7 aa, synthetic construct
KLPNYGY

SEQ ID NO: 18153 - protein, 7 aa, synthetic construct
EMLSVSW

SEQ ID NO: 18154 - protein, 7 aa, synthetic construct
FLKHNNY

SEQ ID NO: 18155 - protein, 7 aa, synthetic construct
RSEHAYP

SEQ ID NO: 18156 - protein, 7 aa, synthetic construct
IGVKGWD

SEQ ID NO: 18157 - protein, 7 aa, synthetic construct
EALNGWD

SEQ ID NO: 18158 - protein, 7 aa, synthetic construct
HWSQNGV

SEQ ID NO: 18159 - protein, 7 aa, synthetic construct
SFGPRTS

SEQ ID NO: 18160 - protein, 7 aa, synthetic construct
YFERKPD

SEQ ID NO: 18161 - protein, 7 aa, synthetic construct
GSPGVAW

SEQ ID NO: 18162 - protein, 7 aa, synthetic construct
TGGGMFV

SEQ ID NO: 18163 - protein, 7 aa, synthetic construct
GELMGIE

SEQ ID NO: 18164 - protein, 7 aa, synthetic construct
LWSGIGP

SEQ ID NO: 18165 - protein, 7 aa, synthetic construct
KDDYNTY

SEQ ID NO: 18166 - protein, 7 aa, synthetic construct
QGEARIW

SEQ ID NO: 18167 - protein, 7 aa, synthetic construct
IDASSIW

SEQ ID NO: 18168 - protein, 7 aa, synthetic construct
AFDGTSA

SEQ ID NO: 18169 - protein, 7 aa, synthetic construct
ARYGGRE

SEQ ID NO: 18170 - protein, 7 aa, synthetic construct
DNRGLIA

SEQ ID NO: 18171 - protein, 7 aa, synthetic construct
RSEVSVW

SEQ ID NO: 18172 - protein, 7 aa, synthetic construct
REGTSAW

SEQ ID NO: 18173 - protein, 7 aa, synthetic construct
DPASRAW

SEQ ID NO: 18174 - protein, 7 aa, synthetic construct
CCTALSP

SEQ ID NO: 18175 - protein, 7 aa, synthetic construct
VVGVCPA

SEQ ID NO: 18176 - protein, 7 aa, synthetic construct
SPGYPSF

SEQ ID NO: 18177 - protein, 7 aa, synthetic construct
FFSGKLD

SEQ ID NO: 18178 - protein, 7 aa, synthetic construct
YWTGRPD

SEQ ID NO: 18179 - protein, 7 aa, synthetic construct
FESDNGV

SEQ ID NO: 18180 - protein, 7 aa, synthetic construct
LSKLSLN

SEQ ID NO: 18181 - protein, 7 aa, synthetic construct
VGERGWD

SEQ ID NO: 18182 - protein, 7 aa, synthetic construct
GSALSSW

SEQ ID NO: 18183 - protein, 7 aa, synthetic construct
VSDFLVY

SEQ ID NO: 18184 - protein, 7 aa, synthetic construct
CLGELAA

SEQ ID NO: 18185 - protein, 7 aa, synthetic construct
GCGTKCG

SEQ ID NO: 18186 - protein, 7 aa, synthetic construct
GCRHSPV

SEQ ID NO: 18187 - protein, 7 aa, synthetic construct
GGLTCCG

SEQ ID NO: 18188 - protein, 7 aa, synthetic construct
IESTNGA

SEQ ID NO: 18189 - protein, 7 aa, synthetic construct
KNRDMSW

SEQ ID NO: 18190 - protein, 7 aa, synthetic construct
READAYA

SEQ ID NO: 18191 - protein, 7 aa, synthetic construct
RLIDVYP

SEQ ID NO: 18192 - protein, 7 aa, synthetic construct
CGSVQVN

SEQ ID NO: 18193 - protein, 7 aa, synthetic construct
GYQHMKM

SEQ ID NO: 18194 - protein, 7 aa, synthetic construct
AAKYSDR

SEQ ID NO: 18195 - protein, 7 aa, synthetic construct
MRDGTVA

SEQ ID NO: 18196 - protein, 7 aa, synthetic construct
GTEWQPF

SEQ ID NO: 18197 - protein, 7 aa, synthetic construct
DAINGRN

SEQ ID NO: 18198 - protein, 7 aa, synthetic construct
LHRLNPS

SEQ ID NO: 18199 - protein, 7 aa, synthetic construct
WIGYVKN

SEQ ID NO: 18200 - protein, 7 aa, synthetic construct
VMMLPNS

SEQ ID NO: 18201 - protein, 7 aa, synthetic construct
PGRAGYL

SEQ ID NO: 18202 - protein, 7 aa, synthetic construct
VMSTHGV

SEQ ID NO: 18203 - protein, 7 aa, synthetic construct
NVKGISL

SEQ ID NO: 18204 - protein, 7 aa, synthetic construct
EVIGRRA

SEQ ID NO: 18205 - protein, 7 aa, synthetic construct
GHEPGWA

SEQ ID NO: 18206 - protein, 7 aa, synthetic construct
TRSDYLR

SEQ ID NO: 18207 - protein, 7 aa, synthetic construct
GTPRRDW

SEQ ID NO: 18208 - protein, 7 aa, synthetic construct
FFAGKVS

SEQ ID NO: 18209 - protein, 7 aa, synthetic construct
RSLEGYF

SEQ ID NO: 18210 - protein, 7 aa, synthetic construct
VNSTNGM

SEQ ID NO: 18211 - protein, 7 aa, synthetic construct
YFSGAVD

SEQ ID NO: 18212 - protein, 7 aa, synthetic construct
GDEWEHF

SEQ ID NO: 18213 - protein, 7 aa, synthetic construct
DLSAVDW

SEQ ID NO: 18214 - protein, 7 aa, synthetic construct
SAQGKYS

SEQ ID NO: 18215 - protein, 7 aa, synthetic construct
GYRSASL

SEQ ID NO: 18216 - protein, 7 aa, synthetic construct
KYAFSSE

SEQ ID NO: 18217 - protein, 7 aa, synthetic construct
GIRNVMH

SEQ ID NO: 18218 - protein, 7 aa, synthetic construct
DGRVNFR

SEQ ID NO: 18219 - protein, 7 aa, synthetic construct
RENHPRA

SEQ ID NO: 18220 - protein, 7 aa, synthetic construct
VGSCARA

SEQ ID NO: 18221 - protein, 7 aa, synthetic construct
RVGKGDW

SEQ ID NO: 18222 - protein, 7 aa, synthetic construct
NVSEWRN

SEQ ID NO: 18223 - protein, 7 aa, synthetic construct
NRGNCRG

SEQ ID NO: 18224 - protein, 7 aa, synthetic construct
YVKSSNI

SEQ ID NO: 18225 - protein, 7 aa, synthetic construct
DLASSAW

SEQ ID NO: 18226 - protein, 7 aa, synthetic construct
NSWGKGS

SEQ ID NO: 18227 - protein, 7 aa, synthetic construct
GFRLGHG

SEQ ID NO: 18228 - protein, 7 aa, synthetic construct
QDGRSSY

SEQ ID NO: 18229 - protein, 7 aa, synthetic construct
SWARSEL

SEQ ID NO: 18230 - protein, 7 aa, synthetic construct
DSVEFLR

SEQ ID NO: 18231 - protein, 7 aa, synthetic construct
PLDSYKW

SEQ ID NO: 18232 - protein, 7 aa, synthetic construct
LSRASAN

SEQ ID NO: 18233 - protein, 7 aa, synthetic construct
GYRTGNT

SEQ ID NO: 18234 - protein, 7 aa, synthetic construct
VSRDSYR

SEQ ID NO: 18235 - protein, 7 aa, synthetic construct
GKYQDKY

SEQ ID NO: 18236 - protein, 7 aa, synthetic construct
HNNKYRD

SEQ ID NO: 18237 - protein, 7 aa, synthetic construct
YFQGTYN

SEQ ID NO: 18238 - protein, 7 aa, synthetic construct
CGPRNPE

SEQ ID NO: 18239 - protein, 7 aa, synthetic construct
FTGVLCA

SEQ ID NO: 18240 - protein, 7 aa, synthetic construct
AGGGLYI

SEQ ID NO: 18241 - protein, 7 aa, synthetic construct
SLAAHDW

SEQ ID NO: 18242 - protein, 7 aa, synthetic construct
FVSSHSR

SEQ ID NO: 18243 - protein, 7 aa, synthetic construct
DLSTYDW

SEQ ID NO: 18244 - protein, 7 aa, synthetic construct
LARNLPN

SEQ ID NO: 18245 - protein, 7 aa, synthetic construct
HTIDSFP

SEQ ID NO: 18246 - protein, 7 aa, synthetic construct
GSQGSSW

SEQ ID NO: 18247 - protein, 7 aa, synthetic construct
THHPRLS

SEQ ID NO: 18248 - protein, 7 aa, synthetic construct
CEKRQAS

SEQ ID NO: 18249 - protein, 7 aa, synthetic construct
WGSLHRT

SEQ ID NO: 18250 - protein, 7 aa, synthetic construct
GGTTSTW

SEQ ID NO: 18251 - protein, 7 aa, synthetic construct
LHRMQTD

SEQ ID NO: 18252 - protein, 7 aa, synthetic construct
DKLPAYK

SEQ ID NO: 18253 - protein, 7 aa, synthetic construct
DYAYSKE

SEQ ID NO: 18254 - protein, 7 aa, synthetic construct
NLLSAQW

SEQ ID NO: 18255 - protein, 7 aa, synthetic construct
GPEGIRW

SEQ ID NO: 18256 - protein, 7 aa, synthetic construct
HKYGSNV

SEQ ID NO: 18257 - protein, 7 aa, synthetic construct
PHASGPV

SEQ ID NO: 18258 - protein, 7 aa, synthetic construct
RDQGVSW

SEQ ID NO: 18259 - protein, 7 aa, synthetic construct
DTVARRL

SEQ ID NO: 18260 - protein, 7 aa, synthetic construct
NATVCCG

SEQ ID NO: 18261 - protein, 7 aa, synthetic construct
LSRLTVN

SEQ ID NO: 18262 - protein, 7 aa, synthetic construct
TSEYHVY

SEQ ID NO: 18263 - protein, 7 aa, synthetic construct
GGETSQW

SEQ ID NO: 18264 - protein, 7 aa, synthetic construct
DMRSPNW

SEQ ID NO: 18265 - protein, 7 aa, synthetic construct
REENVRW

SEQ ID NO: 18266 - protein, 7 aa, synthetic construct
LHDATGP

SEQ ID NO: 18267 - protein, 7 aa, synthetic construct
GHLRERT

SEQ ID NO: 18268 - protein, 7 aa, synthetic construct
FHSTSRT

SEQ ID NO: 18269 - protein, 7 aa, synthetic construct
WSGPVRS

SEQ ID NO: 18270 - protein, 7 aa, synthetic construct
VSDWAPF

SEQ ID NO: 18271 - protein, 7 aa, synthetic construct
APSGIMA

SEQ ID NO: 18272 - protein, 7 aa, synthetic construct
TWTGMNA

SEQ ID NO: 18273 - protein, 7 aa, synthetic construct
YYSGVTS

SEQ ID NO: 18274 - protein, 7 aa, synthetic construct
SFGSDHD

SEQ ID NO: 18275 - protein, 7 aa, synthetic construct
SYLADRK

SEQ ID NO: 18276 - protein, 7 aa, synthetic construct
VYVKSTS

SEQ ID NO: 18277 - protein, 7 aa, synthetic construct
ISEFRSY

SEQ ID NO: 18278 - protein, 7 aa, synthetic construct
LWDGSAS

SEQ ID NO: 18279 - protein, 7 aa, synthetic construct
LARSSSN

SEQ ID NO: 18280 - protein, 7 aa, synthetic construct
RGDDRSW

SEQ ID NO: 18281 - protein, 7 aa, synthetic construct
YFSGSLS

SEQ ID NO: 18282 - protein, 7 aa, synthetic construct
PYARDAG

SEQ ID NO: 18283 - protein, 7 aa, synthetic construct
YFSNVAA

SEQ ID NO: 18284 - protein, 7 aa, synthetic construct
DLRDRAW

SEQ ID NO: 18285 - protein, 7 aa, synthetic construct
QSGMLRC

SEQ ID NO: 18286 - protein, 7 aa, synthetic construct
VLGQGNW

SEQ ID NO: 18287 - protein, 7 aa, synthetic construct
TQLHGSN

SEQ ID NO: 18288 - protein, 7 aa, synthetic construct
ERYPSQR

SEQ ID NO: 18289 - protein, 7 aa, synthetic construct
VYHNKSV

SEQ ID NO: 18290 - protein, 7 aa, synthetic construct
GSGLSSW

SEQ ID NO: 18291 - protein, 7 aa, synthetic construct
EALRGWD

SEQ ID NO: 18292 - protein, 7 aa, synthetic construct
GVVNVSW

SEQ ID NO: 18293 - protein, 7 aa, synthetic construct
WPTSRGT

SEQ ID NO: 18294 - protein, 7 aa, synthetic construct
FTVPGMD

SEQ ID NO: 18295 - protein, 7 aa, synthetic construct
LHRLSGD

SEQ ID NO: 18296 - protein, 7 aa, synthetic construct
DGDWTVF

SEQ ID NO: 18297 - protein, 7 aa, synthetic construct
GHGTNSF

SEQ ID NO: 18298 - protein, 7 aa, synthetic construct
GGKFHSG

SEQ ID NO: 18299 - protein, 7 aa, synthetic construct
CDGTKVS

SEQ ID NO: 18300 - protein, 7 aa, synthetic construct
VHGMGWD

SEQ ID NO: 18301 - protein, 7 aa, synthetic construct
IDDWNAW

SEQ ID NO: 18302 - protein, 7 aa, synthetic construct
GYSERVR

SEQ ID NO: 18303 - protein, 7 aa, synthetic construct
VAHAGAG

SEQ ID NO: 18304 - protein, 7 aa, synthetic construct
RSEGYLK

SEQ ID NO: 18305 - protein, 7 aa, synthetic construct
YYSGQVL

SEQ ID NO: 18306 - protein, 7 aa, synthetic construct
KEYGGSR

SEQ ID NO: 18307 - protein, 7 aa, synthetic construct
DWAKRSV

SEQ ID NO: 18308 - protein, 7 aa, synthetic construct
VSGGTAG

SEQ ID NO: 18309 - protein, 7 aa, synthetic construct
RDLDAYP

SEQ ID NO: 18310 - protein, 7 aa, synthetic construct
NWKSGSG

SEQ ID NO: 18311 - protein, 7 aa, synthetic construct
SYGMPRS

SEQ ID NO: 18312 - protein, 7 aa, synthetic construct
NALGCAG

SEQ ID NO: 18313 - protein, 7 aa, synthetic construct
WRGKPES

SEQ ID NO: 18314 - protein, 7 aa, synthetic construct
DGAIYLR

SEQ ID NO: 18315 - protein, 7 aa, synthetic construct
CGSYRQA

SEQ ID NO: 18316 - protein, 7 aa, synthetic construct
VARMESV

SEQ ID NO: 18317 - protein, 7 aa, synthetic construct
GVLAKVV

SEQ ID NO: 18318 - protein, 7 aa, synthetic construct
GGDRFRT

SEQ ID NO: 18319 - protein, 7 aa, synthetic construct
VRSHFSA

SEQ ID NO: 18320 - protein, 7 aa, synthetic construct
YFSGTNN

SEQ ID NO: 18321 - protein, 7 aa, synthetic construct
VSTGSPP

SEQ ID NO: 18322 - protein, 7 aa, synthetic construct
SGGRWVG

SEQ ID NO: 18323 - protein, 7 aa, synthetic construct
SRFESVR

SEQ ID NO: 18324 - protein, 7 aa, synthetic construct
RGSERIC

SEQ ID NO: 18325 - protein, 7 aa, synthetic construct
REDGSYW

SEQ ID NO: 18326 - protein, 7 aa, synthetic construct
WNPIRHA

SEQ ID NO: 18327 - protein, 7 aa, synthetic construct
AHSRPFV

SEQ ID NO: 18328 - protein, 7 aa, synthetic construct
WKGHSGH

SEQ ID NO: 18329 - protein, 7 aa, synthetic construct
IRMDAYP

SEQ ID NO: 18330 - protein, 7 aa, synthetic construct
ELRFSKN

SEQ ID NO: 18331 - protein, 7 aa, synthetic construct
RDELTTY

SEQ ID NO: 18332 - protein, 7 aa, synthetic construct
VATLGWD

SEQ ID NO: 18333 - protein, 7 aa, synthetic construct
SSPRWKD

SEQ ID NO: 18334 - protein, 7 aa, synthetic construct
GWSSKNS

SEQ ID NO: 18335 - protein, 7 aa, synthetic construct
WFTGIRD

SEQ ID NO: 18336 - protein, 7 aa, synthetic construct
MDGNSLW

SEQ ID NO: 18337 - protein, 7 aa, synthetic construct
DLTLSSW

SEQ ID NO: 18338 - protein, 7 aa, synthetic construct
TGQGYRS

SEQ ID NO: 18339 - protein, 7 aa, synthetic construct
WDKGAGR

SEQ ID NO: 18340 - protein, 7 aa, synthetic construct
VVSGSSA

SEQ ID NO: 18341 - protein, 7 aa, synthetic construct
VGGGTWN

SEQ ID NO: 18342 - protein, 7 aa, synthetic construct
YVRSSTG

SEQ ID NO: 18343 - protein, 7 aa, synthetic construct
WGRQGIG

SEQ ID NO: 18344 - protein, 7 aa, synthetic construct
YWSQVAQ

SEQ ID NO: 18345 - protein, 7 aa, synthetic construct
RSEFSTY

SEQ ID NO: 18346 - protein, 7 aa, synthetic construct
MYKTSSH

SEQ ID NO: 18347 - protein, 7 aa, synthetic construct
YPFPQVS

SEQ ID NO: 18348 - protein, 7 aa, synthetic construct
WFSGQTE

SEQ ID NO: 18349 - protein, 7 aa, synthetic construct
WDRGKQL

SEQ ID NO: 18350 - protein, 7 aa, synthetic construct
GVNEVRW

SEQ ID NO: 18351 - protein, 7 aa, synthetic construct
HGSACGM

SEQ ID NO: 18352 - protein, 7 aa, synthetic construct
WSSGRER

SEQ ID NO: 18353 - protein, 7 aa, synthetic construct
CRPVKDG

SEQ ID NO: 18354 - protein, 7 aa, synthetic construct
GDEYHSW

SEQ ID NO: 18355 - protein, 7 aa, synthetic construct
YSRAGSS

SEQ ID NO: 18356 - protein, 7 aa, synthetic construct
GYLKRPP

SEQ ID NO: 18357 - protein, 7 aa, synthetic construct
TYNPRSS

SEQ ID NO: 18358 - protein, 7 aa, synthetic construct
LHKLTTD

SEQ ID NO: 18359 - protein, 7 aa, synthetic construct
TKDGWLP

SEQ ID NO: 18360 - protein, 7 aa, synthetic construct
FFSGERS

SEQ ID NO: 18361 - protein, 7 aa, synthetic construct
LAGTQTE

SEQ ID NO: 18362 - protein, 7 aa, synthetic construct
FARSGGG

SEQ ID NO: 18363 - protein, 7 aa, synthetic construct
GDVEVRW

SEQ ID NO: 18364 - protein, 7 aa, synthetic construct
VWEKARM

SEQ ID NO: 18365 - protein, 7 aa, synthetic construct
WFSGKVD

SEQ ID NO: 18366 - protein, 7 aa, synthetic construct
RYEGALR

SEQ ID NO: 18367 - protein, 7 aa, synthetic construct
AGFDRQW

SEQ ID NO: 18368 - protein, 7 aa, synthetic construct
YVRSNDL

SEQ ID NO: 18369 - protein, 7 aa, synthetic construct
FGRAYGA

SEQ ID NO: 18370 - protein, 7 aa, synthetic construct
RFGDMTR

SEQ ID NO: 18371 - protein, 7 aa, synthetic construct
GLYDYVA

SEQ ID NO: 18372 - protein, 7 aa, synthetic construct
SMPSSQW

SEQ ID NO: 18373 - protein, 7 aa, synthetic construct
LRSGVGP

SEQ ID NO: 18374 - protein, 7 aa, synthetic construct
GSGDSKW

SEQ ID NO: 18375 - protein, 7 aa, synthetic construct
YWSGVSA

SEQ ID NO: 18376 - protein, 7 aa, synthetic construct
WPGQSGF

SEQ ID NO: 18377 - protein, 7 aa, synthetic construct
LYHKSSS

SEQ ID NO: 18378 - protein, 7 aa, synthetic construct
RYPNQTN

SEQ ID NO: 18379 - protein, 7 aa, synthetic construct
RIFNKGE

SEQ ID NO: 18380 - protein, 7 aa, synthetic construct
LASRGWD

SEQ ID NO: 18381 - protein, 7 aa, synthetic construct
GEGVARW

SEQ ID NO: 18382 - protein, 7 aa, synthetic construct
DLTSAEW

SEQ ID NO: 18383 - protein, 7 aa, synthetic construct
QNDSVRW

SEQ ID NO: 18384 - protein, 7 aa, synthetic construct
VLQSASW

SEQ ID NO: 18385 - protein, 7 aa, synthetic construct
TREGDPA

SEQ ID NO: 18386 - protein, 7 aa, synthetic construct
WVARTKD

SEQ ID NO: 18387 - protein, 7 aa, synthetic construct
SLPPSYG

SEQ ID NO: 18388 - protein, 7 aa, synthetic construct
NVARAAV

SEQ ID NO: 18389 - protein, 7 aa, synthetic construct
HHKWPNA

SEQ ID NO: 18390 - protein, 7 aa, synthetic construct
GWRVREG

SEQ ID NO: 18391 - protein, 7 aa, synthetic construct
THGTSTC

SEQ ID NO: 18392 - protein, 7 aa, synthetic construct
SFRSVHQ

SEQ ID NO: 18393 - protein, 7 aa, synthetic construct
GCAKLCD

SEQ ID NO: 18394 - protein, 7 aa, synthetic construct
FGRIGWD

SEQ ID NO: 18395 - protein, 7 aa, synthetic construct
RKSDVYP

SEQ ID NO: 18396 - protein, 7 aa, synthetic construct
VADGLRW

SEQ ID NO: 18397 - protein, 7 aa, synthetic construct
FDGHSAW

SEQ ID NO: 18398 - protein, 7 aa, synthetic construct
SYAHRSP

SEQ ID NO: 18399 - protein, 7 aa, synthetic construct
GVETSRW

SEQ ID NO: 18400 - protein, 7 aa, synthetic construct
FSGKYGH

SEQ ID NO: 18401 - protein, 7 aa, synthetic construct
MLDGTSA

SEQ ID NO: 18402 - protein, 7 aa, synthetic construct
HAPTDRR

SEQ ID NO: 18403 - protein, 7 aa, synthetic construct
LRNGNAA

SEQ ID NO: 18404 - protein, 7 aa, synthetic construct
DMGAGSW

SEQ ID NO: 18405 - protein, 7 aa, synthetic construct
QEKWGKG

SEQ ID NO: 18406 - protein, 7 aa, synthetic construct
YFSGETR

SEQ ID NO: 18407 - protein, 7 aa, synthetic construct
FIEARRN

SEQ ID NO: 18408 - protein, 7 aa, synthetic construct
GSMSSTW

SEQ ID NO: 18409 - protein, 7 aa, synthetic construct
SDGSSKW

SEQ ID NO: 18410 - protein, 7 aa, synthetic construct
GARSADY

SEQ ID NO: 18411 - protein, 7 aa, synthetic construct
VFRTQGG

SEQ ID NO: 18412 - protein, 7 aa, synthetic construct
VIYPSGA

SEQ ID NO: 18413 - protein, 7 aa, synthetic construct
KLVESDG

SEQ ID NO: 18414 - protein, 7 aa, synthetic construct
SFDRQRS

SEQ ID NO: 18415 - protein, 7 aa, synthetic construct
RFAHKEN

SEQ ID NO: 18416 - protein, 7 aa, synthetic construct
RYPDRAL

SEQ ID NO: 18417 - protein, 7 aa, synthetic construct
YSALQRN

SEQ ID NO: 18418 - protein, 7 aa, synthetic construct
NSEFMSY

SEQ ID NO: 18419 - protein, 7 aa, synthetic construct
GQGNSVW

SEQ ID NO: 18420 - protein, 7 aa, synthetic construct
VDEWSTF

SEQ ID NO: 18421 - protein, 7 aa, synthetic construct
YYAGQRE

SEQ ID NO: 18422 - protein, 7 aa, synthetic construct
CQKVGMI

SEQ ID NO: 18423 - protein, 7 aa, synthetic construct
RDGQSSY

SEQ ID NO: 18424 - protein, 7 aa, synthetic construct
PLSTSNW

SEQ ID NO: 18425 - protein, 7 aa, synthetic construct
GCVHGGA

SEQ ID NO: 18426 - protein, 7 aa, synthetic construct
YECCKQT

SEQ ID NO: 18427 - protein, 7 aa, synthetic construct
RSEKGYH

SEQ ID NO: 18428 - protein, 7 aa, synthetic construct
WWHGVSA

SEQ ID NO: 18429 - protein, 7 aa, synthetic construct
AVIPSRG

SEQ ID NO: 18430 - protein, 7 aa, synthetic construct
TYTKSAV

SEQ ID NO: 18431 - protein, 7 aa, synthetic construct
REQMVSW

SEQ ID NO: 18432 - protein, 7 aa, synthetic construct
AYGSVRS

SEQ ID NO: 18433 - protein, 7 aa, synthetic construct
RLSESTW

SEQ ID NO: 18434 - protein, 7 aa, synthetic construct
DEEGALS

SEQ ID NO: 18435 - protein, 7 aa, synthetic construct
KHDSSRY

SEQ ID NO: 18436 - protein, 7 aa, synthetic construct
WRSGNMG

SEQ ID NO: 18437 - protein, 7 aa, synthetic construct
KYDSSSW

SEQ ID NO: 18438 - protein, 7 aa, synthetic construct
LWDGTFA

SEQ ID NO: 18439 - protein, 7 aa, synthetic construct
RAPDTRW

SEQ ID NO: 18440 - protein, 7 aa, synthetic construct
YRPDGYG

SEQ ID NO: 18441 - protein, 7 aa, synthetic construct
VHSDRSW

SEQ ID NO: 18442 - protein, 7 aa, synthetic construct
YLGQPYF

SEQ ID NO: 18443 - protein, 7 aa, synthetic construct
ILHDSSE

SEQ ID NO: 18444 - protein, 7 aa, synthetic construct
TVERARF

SEQ ID NO: 18445 - protein, 7 aa, synthetic construct
YFSGVAA

SEQ ID NO: 18446 - protein, 7 aa, synthetic construct
FFTGIAD

SEQ ID NO: 18447 - protein, 7 aa, synthetic construct
WQSANGV

SEQ ID NO: 18448 - protein, 7 aa, synthetic construct
VDDFNSF

SEQ ID NO: 18449 - protein, 7 aa, synthetic construct
KAFHAGA

SEQ ID NO: 18450 - protein, 7 aa, synthetic construct
RGGSYGS

SEQ ID NO: 18451 - protein, 7 aa, synthetic construct
TDAFCAP

SEQ ID NO: 18452 - protein, 7 aa, synthetic construct
WNAPHRA

SEQ ID NO: 18453 - protein, 7 aa, synthetic construct
CLGMCSE

SEQ ID NO: 18454 - protein, 7 aa, synthetic construct
TRPGSHV

SEQ ID NO: 18455 - protein, 7 aa, synthetic construct
TDAMSSW

SEQ ID NO: 18456 - protein, 7 aa, synthetic construct
HHPRMGL

SEQ ID NO: 18457 - protein, 7 aa, synthetic construct
YGVGTWS

SEQ ID NO: 18458 - protein, 7 aa, synthetic construct
WQKRPTE

SEQ ID NO: 18459 - protein, 7 aa, synthetic construct
QRYASPQ

SEQ ID NO: 18460 - protein, 7 aa, synthetic construct
LSRASDN

SEQ ID NO: 18461 - protein, 7 aa, synthetic construct
ADGSVRW

SEQ ID NO: 18462 - protein, 7 aa, synthetic construct
RVVNVMP

SEQ ID NO: 18463 - protein, 7 aa, synthetic construct
YPSGSAG

SEQ ID NO: 18464 - protein, 7 aa, synthetic construct
IKSSWHA

SEQ ID NO: 18465 - protein, 7 aa, synthetic construct
YTRLDND

SEQ ID NO: 18466 - protein, 7 aa, synthetic construct
YFAGVSD

SEQ ID NO: 18467 - protein, 7 aa, synthetic construct
NANFERR

SEQ ID NO: 18468 - protein, 7 aa, synthetic construct
WKPNSKS

SEQ ID NO: 18469 - protein, 7 aa, synthetic construct
YTRLNFD

SEQ ID NO: 18470 - protein, 7 aa, synthetic construct
VHKLSLN

SEQ ID NO: 18471 - protein, 7 aa, synthetic construct
GSYRGLG

SEQ ID NO: 18472 - protein, 7 aa, synthetic construct
FRSDRYG

SEQ ID NO: 18473 - protein, 7 aa, synthetic construct
GSWIPHG

SEQ ID NO: 18474 - protein, 7 aa, synthetic construct
RGGGISA

SEQ ID NO: 18475 - protein, 7 aa, synthetic construct
GQLRYDK

SEQ ID NO: 18476 - protein, 7 aa, synthetic construct
RGGTYHS

SEQ ID NO: 18477 - protein, 7 aa, synthetic construct
PFAVSIE

SEQ ID NO: 18478 - protein, 7 aa, synthetic construct
ENDQLPP

SEQ ID NO: 18479 - protein, 7 aa, synthetic construct
GLSDNRR

SEQ ID NO: 18480 - protein, 7 aa, synthetic construct
ALGREYR

SEQ ID NO: 18481 - protein, 7 aa, synthetic construct
VGGSRFS

SEQ ID NO: 18482 - protein, 7 aa, synthetic construct
LFRMRDG

SEQ ID NO: 18483 - protein, 7 aa, synthetic construct
FFVGHHD

SEQ ID NO: 18484 - protein, 7 aa, synthetic construct
TESTVYS

SEQ ID NO: 18485 - protein, 7 aa, synthetic construct
CVNRCVV

SEQ ID NO: 18486 - protein, 7 aa, synthetic construct
NYSHIKS

SEQ ID NO: 18487 - protein, 7 aa, synthetic construct
WDRMSAK

SEQ ID NO: 18488 - protein, 7 aa, synthetic construct
DRASSSW

SEQ ID NO: 18489 - protein, 7 aa, synthetic construct
REDSSMW

SEQ ID NO: 18490 - protein, 7 aa, synthetic construct
VAWQGTG

SEQ ID NO: 18491 - protein, 7 aa, synthetic construct
YGTHRFT

SEQ ID NO: 18492 - protein, 7 aa, synthetic construct
TRCVGEI

SEQ ID NO: 18493 - protein, 7 aa, synthetic construct
LEDHLRW

SEQ ID NO: 18494 - protein, 7 aa, synthetic construct
VYGTSRS

SEQ ID NO: 18495 - protein, 7 aa, synthetic construct
WQGGQRG

SEQ ID NO: 18496 - protein, 7 aa, synthetic construct
VPPLFAV

SEQ ID NO: 18497 - protein, 7 aa, synthetic construct
TVTHHRL

SEQ ID NO: 18498 - protein, 7 aa, synthetic construct
GGPGTWN

SEQ ID NO: 18499 - protein, 7 aa, synthetic construct
DRWGSSA

SEQ ID NO: 18500 - protein, 7 aa, synthetic construct
SGYRAQA

SEQ ID NO: 18501 - protein, 7 aa, synthetic construct
DLSSLEW

SEQ ID NO: 18502 - protein, 7 aa, synthetic construct
RGDYQVF

SEQ ID NO: 18503 - protein, 7 aa, synthetic construct
FNPPAMY

SEQ ID NO: 18504 - protein, 7 aa, synthetic construct
VFDNRRS

SEQ ID NO: 18505 - protein, 7 aa, synthetic construct
GWRGVSA

SEQ ID NO: 18506 - protein, 7 aa, synthetic construct
WWQGITE

SEQ ID NO: 18507 - protein, 7 aa, synthetic construct
RCCGHFY

SEQ ID NO: 18508 - protein, 7 aa, synthetic construct
GARTPTW

SEQ ID NO: 18509 - protein, 7 aa, synthetic construct
YFGARRE

SEQ ID NO: 18510 - protein, 7 aa, synthetic construct
WSSNRSS

SEQ ID NO: 18511 - protein, 7 aa, synthetic construct
WWTGEVE

SEQ ID NO: 18512 - protein, 7 aa, synthetic construct
VGSSKCV

SEQ ID NO: 18513 - protein, 7 aa, synthetic construct
TDDWSTW

SEQ ID NO: 18514 - protein, 7 aa, synthetic construct
TWSGMNA

SEQ ID NO: 18515 - protein, 7 aa, synthetic construct
VSTSKHW

SEQ ID NO: 18516 - protein, 7 aa, synthetic construct
NRYGAAH

SEQ ID NO: 18517 - protein, 7 aa, synthetic construct
WNASYKQ

SEQ ID NO: 18518 - protein, 7 aa, synthetic construct
TDEWSPY

SEQ ID NO: 18519 - protein, 7 aa, synthetic construct
GQVGRYN

SEQ ID NO: 18520 - protein, 7 aa, synthetic construct
CKPCTAN

SEQ ID NO: 18521 - protein, 7 aa, synthetic construct
GGRGYNM

SEQ ID NO: 18522 - protein, 7 aa, synthetic construct
GVANTMW

SEQ ID NO: 18523 - protein, 7 aa, synthetic construct
LLDSRDW

SEQ ID NO: 18524 - protein, 7 aa, synthetic construct
HKEGCGL

SEQ ID NO: 18525 - protein, 7 aa, synthetic construct
DLQAHDW

SEQ ID NO: 18526 - protein, 7 aa, synthetic construct
SGITCCP

SEQ ID NO: 18527 - protein, 7 aa, synthetic construct
RGVYRSE

SEQ ID NO: 18528 - protein, 7 aa, synthetic construct
GGFGADK

SEQ ID NO: 18529 - protein, 7 aa, synthetic construct
YSRVDYN

SEQ ID NO: 18530 - protein, 7 aa, synthetic construct
GTHTSAC

SEQ ID NO: 18531 - protein, 7 aa, synthetic construct
GSPSSSW

SEQ ID NO: 18532 - protein, 7 aa, synthetic construct
WWSGVSV

SEQ ID NO: 18533 - protein, 7 aa, synthetic construct
SRFRVTD

SEQ ID NO: 18534 - protein, 7 aa, synthetic construct
VNEYSRY

SEQ ID NO: 18535 - protein, 7 aa, synthetic construct
YFTAQLD

SEQ ID NO: 18536 - protein, 7 aa, synthetic construct
CESVCLY

SEQ ID NO: 18537 - protein, 7 aa, synthetic construct
CVQVKSG

SEQ ID NO: 18538 - protein, 7 aa, synthetic construct
WADARRT

SEQ ID NO: 18539 - protein, 7 aa, synthetic construct
YHSRPFA

SEQ ID NO: 18540 - protein, 7 aa, synthetic construct
SQCTSSP

SEQ ID NO: 18541 - protein, 7 aa, synthetic construct
ISEFLGW

SEQ ID NO: 18542 - protein, 7 aa, synthetic construct
IDEWASY

SEQ ID NO: 18543 - protein, 7 aa, synthetic construct
LIASVSA

SEQ ID NO: 18544 - protein, 7 aa, synthetic construct
LLSDVKW

SEQ ID NO: 18545 - protein, 7 aa, synthetic construct
SGSRFNS

SEQ ID NO: 18546 - protein, 7 aa, synthetic construct
SGNRGVW

SEQ ID NO: 18547 - protein, 7 aa, synthetic construct
DKVPARF

SEQ ID NO: 18548 - protein, 7 aa, synthetic construct
IERRGWD

SEQ ID NO: 18549 - protein, 7 aa, synthetic construct
SWLKDDV

SEQ ID NO: 18550 - protein, 7 aa, synthetic construct
RGREFRE

SEQ ID NO: 18551 - protein, 7 aa, synthetic construct
HGSDRRF

SEQ ID NO: 18552 - protein, 7 aa, synthetic construct
TPGNTSS

SEQ ID NO: 18553 - protein, 7 aa, synthetic construct
CDGSCKA

SEQ ID NO: 18554 - protein, 7 aa, synthetic construct
GTRPSEP

SEQ ID NO: 18555 - protein, 7 aa, synthetic construct
SKYHGSG

SEQ ID NO: 18556 - protein, 7 aa, synthetic construct
ARYSTGA

SEQ ID NO: 18557 - protein, 7 aa, synthetic construct
QGNGSFI

SEQ ID NO: 18558 - protein, 7 aa, synthetic construct
GGEGSSW

SEQ ID NO: 18559 - protein, 7 aa, synthetic construct
CCKGQPM

SEQ ID NO: 18560 - protein, 7 aa, synthetic construct
VFRGHVG

SEQ ID NO: 18561 - protein, 7 aa, synthetic construct
KRDGTSA

SEQ ID NO: 18562 - protein, 7 aa, synthetic construct
FPGSICV

SEQ ID NO: 18563 - protein, 7 aa, synthetic construct
NGDSGKW

SEQ ID NO: 18564 - protein, 7 aa, synthetic construct
NFGPRAT

SEQ ID NO: 18565 - protein, 7 aa, synthetic construct
CEDVCHG

SEQ ID NO: 18566 - protein, 7 aa, synthetic construct
TLSTNGR

SEQ ID NO: 18567 - protein, 7 aa, synthetic construct
LSDFKIY

SEQ ID NO: 18568 - protein, 7 aa, synthetic construct
DVCCTRV

SEQ ID NO: 18569 - protein, 7 aa, synthetic construct
GSMTSSW

SEQ ID NO: 18570 - protein, 7 aa, synthetic construct
GNGEIRW

SEQ ID NO: 18571 - protein, 7 aa, synthetic construct
DSVVHLR

SEQ ID NO: 18572 - protein, 7 aa, synthetic construct
EYKTYGK

SEQ ID NO: 18573 - protein, 7 aa, synthetic construct
RALDGWD

SEQ ID NO: 18574 - protein, 7 aa, synthetic construct
GSGDSLW

SEQ ID NO: 18575 - protein, 7 aa, synthetic construct
QGQPSKW

SEQ ID NO: 18576 - protein, 7 aa, synthetic construct
GGSSSTW

SEQ ID NO: 18577 - protein, 7 aa, synthetic construct
GSYQNTR

SEQ ID NO: 18578 - protein, 7 aa, synthetic construct
MWKDKSN

SEQ ID NO: 18579 - protein, 7 aa, synthetic construct
GSPGSHW

SEQ ID NO: 18580 - protein, 7 aa, synthetic construct
VHRLQLD

SEQ ID NO: 18581 - protein, 7 aa, synthetic construct
ERPSSKY

SEQ ID NO: 18582 - protein, 7 aa, synthetic construct
GGNGVSW

SEQ ID NO: 18583 - protein, 7 aa, synthetic construct
YHGKYQL

SEQ ID NO: 18584 - protein, 7 aa, synthetic construct
FMRGMGS

SEQ ID NO: 18585 - protein, 7 aa, synthetic construct
REGSSSW

SEQ ID NO: 18586 - protein, 7 aa, synthetic construct
PSWGDHL

SEQ ID NO: 18587 - protein, 7 aa, synthetic construct
FSKEWRP

SEQ ID NO: 18588 - protein, 7 aa, synthetic construct
VEFEMSY

SEQ ID NO: 18589 - protein, 7 aa, synthetic construct
DDVVSRR

SEQ ID NO: 18590 - protein, 7 aa, synthetic construct
VFRSVEK

SEQ ID NO: 18591 - protein, 7 aa, synthetic construct
LTRLSPD

SEQ ID NO: 18592 - protein, 7 aa, synthetic construct
NWARSIE

SEQ ID NO: 18593 - protein, 7 aa, synthetic construct
DMGDHGW

SEQ ID NO: 18594 - protein, 7 aa, synthetic construct
RESAVSW

SEQ ID NO: 18595 - protein, 7 aa, synthetic construct
NLESHVW

SEQ ID NO: 18596 - protein, 7 aa, synthetic construct
YIKYDTG

SEQ ID NO: 18597 - protein, 7 aa, synthetic construct
WWSGVIE

SEQ ID NO: 18598 - protein, 7 aa, synthetic construct
GMSIEAR

SEQ ID NO: 18599 - protein, 7 aa, synthetic construct
RDAEVFP

SEQ ID NO: 18600 - protein, 7 aa, synthetic construct
EKKFVPA

SEQ ID NO: 18601 - protein, 7 aa, synthetic construct
LVKSTNY

SEQ ID NO: 18602 - protein, 7 aa, synthetic construct
DWAVSIE

SEQ ID NO: 18603 - protein, 7 aa, synthetic construct
WVRERAS

SEQ ID NO: 18604 - protein, 7 aa, synthetic construct
LRDGTYA

SEQ ID NO: 18605 - protein, 7 aa, synthetic construct
DWTGNAA

SEQ ID NO: 18606 - protein, 7 aa, synthetic construct
EVDGLRW

SEQ ID NO: 18607 - protein, 7 aa, synthetic construct
VWSANGI

SEQ ID NO: 18608 - protein, 7 aa, synthetic construct
PLADRMW

SEQ ID NO: 18609 - protein, 7 aa, synthetic construct
CGDIGSV

SEQ ID NO: 18610 - protein, 7 aa, synthetic construct
LSRLGID

SEQ ID NO: 18611 - protein, 7 aa, synthetic construct
RYRDGAA

SEQ ID NO: 18612 - protein, 7 aa, synthetic construct
IESSSGR

SEQ ID NO: 18613 - protein, 7 aa, synthetic construct
DVMRSRS

SEQ ID NO: 18614 - protein, 7 aa, synthetic construct
HDGSSQW

SEQ ID NO: 18615 - protein, 7 aa, synthetic construct
NGFKDRG

SEQ ID NO: 18616 - protein, 7 aa, synthetic construct
YFTGMTV

SEQ ID NO: 18617 - protein, 7 aa, synthetic construct
CATRLAH

SEQ ID NO: 18618 - protein, 7 aa, synthetic construct
GLGHQQC

SEQ ID NO: 18619 - protein, 7 aa, synthetic construct
ERTSVAA

SEQ ID NO: 18620 - protein, 7 aa, synthetic construct
CGSGCSI

SEQ ID NO: 18621 - protein, 7 aa, synthetic construct
CTISRCP

SEQ ID NO: 18622 - protein, 7 aa, synthetic construct
RTSMHPG

SEQ ID NO: 18623 - protein, 7 aa, synthetic construct
CLAKHVA

SEQ ID NO: 18624 - protein, 7 aa, synthetic construct
YSRTGQG

SEQ ID NO: 18625 - protein, 7 aa, synthetic construct
ETDSGYW

SEQ ID NO: 18626 - protein, 7 aa, synthetic construct
YSTNWKS

SEQ ID NO: 18627 - protein, 7 aa, synthetic construct
WVRASAS

SEQ ID NO: 18628 - protein, 7 aa, synthetic construct
RRDGSPA

SEQ ID NO: 18629 - protein, 7 aa, synthetic construct
GDTVVRW

SEQ ID NO: 18630 - protein, 7 aa, synthetic construct
VFRSTPA

SEQ ID NO: 18631 - protein, 7 aa, synthetic construct
SFKRANE

SEQ ID NO: 18632 - protein, 7 aa, synthetic construct
CDSVCAY

SEQ ID NO: 18633 - protein, 7 aa, synthetic construct
GCSGNSC

SEQ ID NO: 18634 - protein, 7 aa, synthetic construct
FPLRRVD

SEQ ID NO: 18635 - protein, 7 aa, synthetic construct
NLGSSTW

SEQ ID NO: 18636 - protein, 7 aa, synthetic construct
LARLAYD

SEQ ID NO: 18637 - protein, 7 aa, synthetic construct
ACRHNPA

SEQ ID NO: 18638 - protein, 7 aa, synthetic construct
SWKSTSA

SEQ ID NO: 18639 - protein, 7 aa, synthetic construct
AGPDYGW

SEQ ID NO: 18640 - protein, 7 aa, synthetic construct
APPDVRW

SEQ ID NO: 18641 - protein, 7 aa, synthetic construct
VLSSTTW

SEQ ID NO: 18642 - protein, 7 aa, synthetic construct
RLYDTFA

SEQ ID NO: 18643 - protein, 7 aa, synthetic construct
WAGAGRT

SEQ ID NO: 18644 - protein, 7 aa, synthetic construct
QYARQNH

SEQ ID NO: 18645 - protein, 7 aa, synthetic construct
TRYKPTD

SEQ ID NO: 18646 - protein, 7 aa, synthetic construct
NVGKANC

SEQ ID NO: 18647 - protein, 7 aa, synthetic construct
VGKYAVH

SEQ ID NO: 18648 - protein, 7 aa, synthetic construct
VGTRAAW

SEQ ID NO: 18649 - protein, 7 aa, synthetic construct
LGDAVCR

SEQ ID NO: 18650 - protein, 7 aa, synthetic construct
AHNRSTY

SEQ ID NO: 18651 - protein, 7 aa, synthetic construct
YVAGCKE

SEQ ID NO: 18652 - protein, 7 aa, synthetic construct
VGINCKE

SEQ ID NO: 18653 - protein, 7 aa, synthetic construct
KGVYAHG

SEQ ID NO: 18654 - protein, 7 aa, synthetic construct
GGPGYSR

SEQ ID NO: 18655 - protein, 7 aa, synthetic construct
NAGVFTG

SEQ ID NO: 18656 - protein, 7 aa, synthetic construct
TLGSPDR

SEQ ID NO: 18657 - protein, 7 aa, synthetic construct
YWQGLAS

SEQ ID NO: 18658 - protein, 7 aa, synthetic construct
GATVYRG

SEQ ID NO: 18659 - protein, 7 aa, synthetic construct
RGDNIFP

SEQ ID NO: 18660 - protein, 7 aa, synthetic construct
YVRHDTL

SEQ ID NO: 18661 - protein, 7 aa, synthetic construct
GSGMNAW

SEQ ID NO: 18662 - protein, 7 aa, synthetic construct
SRDEWRD

SEQ ID NO: 18663 - protein, 7 aa, synthetic construct
LARTALN

SEQ ID NO: 18664 - protein, 7 aa, synthetic construct
RLAGECN

SEQ ID NO: 18665 - protein, 7 aa, synthetic construct
LLSANTW

SEQ ID NO: 18666 - protein, 7 aa, synthetic construct
DLASMVW

SEQ ID NO: 18667 - protein, 7 aa, synthetic construct
NYAKSQN

SEQ ID NO: 18668 - protein, 7 aa, synthetic construct
WRGNATV

SEQ ID NO: 18669 - protein, 7 aa, synthetic construct
AYNGPRA

SEQ ID NO: 18670 - protein, 7 aa, synthetic construct
CTRVVVD

SEQ ID NO: 18671 - protein, 7 aa, synthetic construct
FDEHEPP

SEQ ID NO: 18672 - protein, 7 aa, synthetic construct
PHLHRGA

SEQ ID NO: 18673 - protein, 7 aa, synthetic construct
YFTGVVG

SEQ ID NO: 18674 - protein, 7 aa, synthetic construct
WSGTRMQ

SEQ ID NO: 18675 - protein, 7 aa, synthetic construct
WSVKRET

SEQ ID NO: 18676 - protein, 7 aa, synthetic construct
LSKAATN

SEQ ID NO: 18677 - protein, 7 aa, synthetic construct
YFSGVSD

SEQ ID NO: 18678 - protein, 7 aa, synthetic construct
DLESARW

SEQ ID NO: 18679 - protein, 7 aa, synthetic construct
HFAGTWD

SEQ ID NO: 18680 - protein, 7 aa, synthetic construct
VPVGCCG

SEQ ID NO: 18681 - protein, 7 aa, synthetic construct
GLGASRY

SEQ ID NO: 18682 - protein, 7 aa, synthetic construct
VTDTNGV

SEQ ID NO: 18683 - protein, 7 aa, synthetic construct
YTRSDHN

SEQ ID NO: 18684 - protein, 7 aa, synthetic construct
VRSVNGV

SEQ ID NO: 18685 - protein, 7 aa, synthetic construct
WRAVRAE

SEQ ID NO: 18686 - protein, 7 aa, synthetic construct
GSGTNAW

SEQ ID NO: 18687 - protein, 7 aa, synthetic construct
FSERRGL

SEQ ID NO: 18688 - protein, 7 aa, synthetic construct
VLASVSW

SEQ ID NO: 18689 - protein, 7 aa, synthetic construct
WRGGGGS

SEQ ID NO: 18690 - protein, 7 aa, synthetic construct
STYDAIV

SEQ ID NO: 18691 - protein, 7 aa, synthetic construct
YHRTASL

SEQ ID NO: 18692 - protein, 7 aa, synthetic construct
RDNGYPW

SEQ ID NO: 18693 - protein, 7 aa, synthetic construct
LSRLGPI

SEQ ID NO: 18694 - protein, 7 aa, synthetic construct
DLRVQTW

SEQ ID NO: 18695 - protein, 7 aa, synthetic construct
TYRDGGR

SEQ ID NO: 18696 - protein, 7 aa, synthetic construct
AGGSRDW

SEQ ID NO: 18697 - protein, 7 aa, synthetic construct
YFSGAHS

SEQ ID NO: 18698 - protein, 7 aa, synthetic construct
FMDGTAA

SEQ ID NO: 18699 - protein, 7 aa, synthetic construct
LVRFENV

SEQ ID NO: 18700 - protein, 7 aa, synthetic construct
GSATSGW

SEQ ID NO: 18701 - protein, 7 aa, synthetic construct
RCGECGV

SEQ ID NO: 18702 - protein, 7 aa, synthetic construct
WGSSRAT

SEQ ID NO: 18703 - protein, 7 aa, synthetic construct
GDGESRW

SEQ ID NO: 18704 - protein, 7 aa, synthetic construct
LSRAANN

SEQ ID NO: 18705 - protein, 7 aa, synthetic construct
AMLSSTW

SEQ ID NO: 18706 - protein, 7 aa, synthetic construct
SAYRSGT

SEQ ID NO: 18707 - protein, 7 aa, synthetic construct
SLGDRTW

SEQ ID NO: 18708 - protein, 7 aa, synthetic construct
RDGSSSW

SEQ ID NO: 18709 - protein, 7 aa, synthetic construct
FRLPRET

SEQ ID NO: 18710 - protein, 7 aa, synthetic construct
RMDSAAW

SEQ ID NO: 18711 - protein, 7 aa, synthetic construct
WINGMVA

SEQ ID NO: 18712 - protein, 7 aa, synthetic construct
SLSDRTW

SEQ ID NO: 18713 - protein, 7 aa, synthetic construct
VSEFEIF

SEQ ID NO: 18714 - protein, 7 aa, synthetic construct
WPNGVNG

SEQ ID NO: 18715 - protein, 7 aa, synthetic construct
GDGASRY

SEQ ID NO: 18716 - protein, 7 aa, synthetic construct
RYVNKES

SEQ ID NO: 18717 - protein, 7 aa, synthetic construct
RDQFSTY

SEQ ID NO: 18718 - protein, 7 aa, synthetic construct
GGMLVER

SEQ ID NO: 18719 - protein, 7 aa, synthetic construct
IASEGAG

SEQ ID NO: 18720 - protein, 7 aa, synthetic construct
AITAIGC

SEQ ID NO: 18721 - protein, 7 aa, synthetic construct
YYSGQLA

SEQ ID NO: 18722 - protein, 7 aa, synthetic construct
GTCGVEK

SEQ ID NO: 18723 - protein, 7 aa, synthetic construct
NHLHARS

SEQ ID NO: 18724 - protein, 7 aa, synthetic construct
SASALSW

SEQ ID NO: 18725 - protein, 7 aa, synthetic construct
RWLKNEP

SEQ ID NO: 18726 - protein, 7 aa, synthetic construct
YVRSDST

SEQ ID NO: 18727 - protein, 7 aa, synthetic construct
CVTGCRD

SEQ ID NO: 18728 - protein, 7 aa, synthetic construct
FFSGAIE

SEQ ID NO: 18729 - protein, 7 aa, synthetic construct
TDDFLAW

SEQ ID NO: 18730 - protein, 7 aa, synthetic construct
FGGVSAY

SEQ ID NO: 18731 - protein, 7 aa, synthetic construct
CCGSKNA

SEQ ID NO: 18732 - protein, 7 aa, synthetic construct
WYSGVLS

SEQ ID NO: 18733 - protein, 7 aa, synthetic construct
DRHPDRR

SEQ ID NO: 18734 - protein, 7 aa, synthetic construct
YSRLNGS

SEQ ID NO: 18735 - protein, 7 aa, synthetic construct
NEDFVAW

SEQ ID NO: 18736 - protein, 7 aa, synthetic construct
SRSYGSG

SEQ ID NO: 18737 - protein, 7 aa, synthetic construct
WFSGEVA

SEQ ID NO: 18738 - protein, 7 aa, synthetic construct
RDHHPRV

SEQ ID NO: 18739 - protein, 7 aa, synthetic construct
VEATNGV

SEQ ID NO: 18740 - protein, 7 aa, synthetic construct
RAGARYD

SEQ ID NO: 18741 - protein, 7 aa, synthetic construct
IEIYKAN

SEQ ID NO: 18742 - protein, 7 aa, synthetic construct
HWMGNKE

SEQ ID NO: 18743 - protein, 7 aa, synthetic construct
VYGSSGR

SEQ ID NO: 18744 - protein, 7 aa, synthetic construct
GSGASAW

SEQ ID NO: 18745 - protein, 7 aa, synthetic construct
GSDHVMW

SEQ ID NO: 18746 - protein, 7 aa, synthetic construct
GSYRSVG

SEQ ID NO: 18747 - protein, 7 aa, synthetic construct
DADEVHG

SEQ ID NO: 18748 - protein, 7 aa, synthetic construct
GIETSKW

SEQ ID NO: 18749 - protein, 7 aa, synthetic construct
GSEGSTW

SEQ ID NO: 18750 - protein, 7 aa, synthetic construct
TTVPTGL

SEQ ID NO: 18751 - protein, 7 aa, synthetic construct
FNSTVAY

SEQ ID NO: 18752 - protein, 7 aa, synthetic construct
CRHPVTA

SEQ ID NO: 18753 - protein, 7 aa, synthetic construct
GDNAFGG

SEQ ID NO: 18754 - protein, 7 aa, synthetic construct
YWRGTMD

SEQ ID NO: 18755 - protein, 7 aa, synthetic construct
ATSALEN

SEQ ID NO: 18756 - protein, 7 aa, synthetic construct
GGGASTW

SEQ ID NO: 18757 - protein, 7 aa, synthetic construct
DENAFPY

SEQ ID NO: 18758 - protein, 7 aa, synthetic construct
CLKNERG

SEQ ID NO: 18759 - protein, 7 aa, synthetic construct
YMSDRTW

SEQ ID NO: 18760 - protein, 7 aa, synthetic construct
TNCAINA

SEQ ID NO: 18761 - protein, 7 aa, synthetic construct
NMSQGSW

SEQ ID NO: 18762 - protein, 7 aa, synthetic construct
YGAMCLE

SEQ ID NO: 18763 - protein, 7 aa, synthetic construct
GSSTSHW

SEQ ID NO: 18764 - protein, 7 aa, synthetic construct
VMNASDS

SEQ ID NO: 18765 - protein, 7 aa, synthetic construct
VNDYLSY

SEQ ID NO: 18766 - protein, 7 aa, synthetic construct
LTRLSPV

SEQ ID NO: 18767 - protein, 7 aa, synthetic construct
KDSYHVF

SEQ ID NO: 18768 - protein, 7 aa, synthetic construct
WSLERTW

SEQ ID NO: 18769 - protein, 7 aa, synthetic construct
LFDGTES

SEQ ID NO: 18770 - protein, 7 aa, synthetic construct
WTSSNVA

SEQ ID NO: 18771 - protein, 7 aa, synthetic construct
REDTSTW

SEQ ID NO: 18772 - protein, 7 aa, synthetic construct
LRTDCCV

SEQ ID NO: 18773 - protein, 7 aa, synthetic construct
VHSFNGV

SEQ ID NO: 18774 - protein, 7 aa, synthetic construct
AQGGQSF

SEQ ID NO: 18775 - protein, 7 aa, synthetic construct
GVERAKW

SEQ ID NO: 18776 - protein, 7 aa, synthetic construct
FGKGEWA

SEQ ID NO: 18777 - protein, 7 aa, synthetic construct
KMDAVSW

SEQ ID NO: 18778 - protein, 7 aa, synthetic construct
WFTGTVA

SEQ ID NO: 18779 - protein, 7 aa, synthetic construct
GGGSSLW

SEQ ID NO: 18780 - protein, 7 aa, synthetic construct
YFTGAPD

SEQ ID NO: 18781 - protein, 7 aa, synthetic construct
WTGTKDP

SEQ ID NO: 18782 - protein, 7 aa, synthetic construct
HTMRGGY

SEQ ID NO: 18783 - protein, 7 aa, synthetic construct
VDDDVWG

SEQ ID NO: 18784 - protein, 7 aa, synthetic construct
LARSSTN

SEQ ID NO: 18785 - protein, 7 aa, synthetic construct
GVTTSGW

SEQ ID NO: 18786 - protein, 7 aa, synthetic construct
PEYGKSV

SEQ ID NO: 18787 - protein, 7 aa, synthetic construct
YFSGYTS

SEQ ID NO: 18788 - protein, 7 aa, synthetic construct
DARVVRH

SEQ ID NO: 18789 - protein, 7 aa, synthetic construct
SDEYSTY

SEQ ID NO: 18790 - protein, 7 aa, synthetic construct
LFSGEAA

SEQ ID NO: 18791 - protein, 7 aa, synthetic construct
WQSHTRN

SEQ ID NO: 18792 - protein, 7 aa, synthetic construct
CVSACER

SEQ ID NO: 18793 - protein, 7 aa, synthetic construct
YFTDIRE

SEQ ID NO: 18794 - protein, 7 aa, synthetic construct
PVASRDW

SEQ ID NO: 18795 - protein, 7 aa, synthetic construct
TYRGQGG

SEQ ID NO: 18796 - protein, 7 aa, synthetic construct
WSRDAQK

SEQ ID NO: 18797 - protein, 7 aa, synthetic construct
FGGLCCS

SEQ ID NO: 18798 - protein, 7 aa, synthetic construct
AGSIDGS

SEQ ID NO: 18799 - protein, 7 aa, synthetic construct
IPDTCCV

SEQ ID NO: 18800 - protein, 7 aa, synthetic construct
TTDYVMY

SEQ ID NO: 18801 - protein, 7 aa, synthetic construct
YAIECSK

SEQ ID NO: 18802 - protein, 7 aa, synthetic construct
ISWSQVD

SEQ ID NO: 18803 - protein, 7 aa, synthetic construct
TDGTSMW

SEQ ID NO: 18804 - protein, 7 aa, synthetic construct
VMISASW

SEQ ID NO: 18805 - protein, 7 aa, synthetic construct
KHDFTGS

SEQ ID NO: 18806 - protein, 7 aa, synthetic construct
TVGTTML

SEQ ID NO: 18807 - protein, 7 aa, synthetic construct
SYGKVMV

SEQ ID NO: 18808 - protein, 7 aa, synthetic construct
GQWRTSA

SEQ ID NO: 18809 - protein, 7 aa, synthetic construct
GIVSVSW

SEQ ID NO: 18810 - protein, 7 aa, synthetic construct
DAVLHLR

SEQ ID NO: 18811 - protein, 7 aa, synthetic construct
VGRDNLT

SEQ ID NO: 18812 - protein, 7 aa, synthetic construct
IASKGAG

SEQ ID NO: 18813 - protein, 7 aa, synthetic construct
VASHGAG

SEQ ID NO: 18814 - protein, 7 aa, synthetic construct
DKRQPGW

SEQ ID NO: 18815 - protein, 7 aa, synthetic construct
APVAQDG

SEQ ID NO: 18816 - protein, 7 aa, synthetic construct
KHDEGNG

SEQ ID NO: 18817 - protein, 7 aa, synthetic construct
QYRASAA

SEQ ID NO: 18818 - protein, 7 aa, synthetic construct
WSSKAEE

SEQ ID NO: 18819 - protein, 7 aa, synthetic construct
YDVGTWS

SEQ ID NO: 18820 - protein, 7 aa, synthetic construct
IGALGWD

SEQ ID NO: 18821 - protein, 7 aa, synthetic construct
CNKPMTA

SEQ ID NO: 18822 - protein, 7 aa, synthetic construct
AGSFSRS

SEQ ID NO: 18823 - protein, 7 aa, synthetic construct
LHARGVD

SEQ ID NO: 18824 - protein, 7 aa, synthetic construct
IMSGHDW

SEQ ID NO: 18825 - protein, 7 aa, synthetic construct
GASSRNW

SEQ ID NO: 18826 - protein, 7 aa, synthetic construct
YFSARLD

SEQ ID NO: 18827 - protein, 7 aa, synthetic construct
SAPGTHC

SEQ ID NO: 18828 - protein, 7 aa, synthetic construct
KSSVNHD

SEQ ID NO: 18829 - protein, 7 aa, synthetic construct
RTADSFI

SEQ ID NO: 18830 - protein, 7 aa, synthetic construct
LPERLGS

SEQ ID NO: 18831 - protein, 7 aa, synthetic construct
VNSSNGR

SEQ ID NO: 18832 - protein, 7 aa, synthetic construct
YPNCPGV

SEQ ID NO: 18833 - protein, 7 aa, synthetic construct
ISLKCSE

SEQ ID NO: 18834 - protein, 7 aa, synthetic construct
VLDSVRW

SEQ ID NO: 18835 - protein, 7 aa, synthetic construct
VLSSKTW

SEQ ID NO: 18836 - protein, 7 aa, synthetic construct
NRELGSS

SEQ ID NO: 18837 - protein, 7 aa, synthetic construct
DSLPVDK

SEQ ID NO: 18838 - protein, 7 aa, synthetic construct
SYGNRTT

SEQ ID NO: 18839 - protein, 7 aa, synthetic construct
FTKSGPN

SEQ ID NO: 18840 - protein, 7 aa, synthetic construct
YSKLDSM

SEQ ID NO: 18841 - protein, 7 aa, synthetic construct
RTEGTFP

SEQ ID NO: 18842 - protein, 7 aa, synthetic construct
GERVDRR

SEQ ID NO: 18843 - protein, 7 aa, synthetic construct
VNSRWHA

SEQ ID NO: 18844 - protein, 7 aa, synthetic construct
GSIGALW

SEQ ID NO: 18845 - protein, 7 aa, synthetic construct
CKAQSCG

SEQ ID NO: 18846 - protein, 7 aa, synthetic construct
YWSGNAA

SEQ ID NO: 18847 - protein, 7 aa, synthetic construct
LMNDAYV

SEQ ID NO: 18848 - protein, 7 aa, synthetic construct
YVRHDVM

SEQ ID NO: 18849 - protein, 7 aa, synthetic construct
YFSGTNM

SEQ ID NO: 18850 - protein, 7 aa, synthetic construct
EPGERSG

SEQ ID NO: 18851 - protein, 7 aa, synthetic construct
AMSASNW

SEQ ID NO: 18852 - protein, 7 aa, synthetic construct
VWDANGV

SEQ ID NO: 18853 - protein, 7 aa, synthetic construct
CGGLCSS

SEQ ID NO: 18854 - protein, 7 aa, synthetic construct
WFSGHVE

SEQ ID NO: 18855 - protein, 7 aa, synthetic construct
KFDYSSI

SEQ ID NO: 18856 - protein, 7 aa, synthetic construct
VYAKSQV

SEQ ID NO: 18857 - protein, 7 aa, synthetic construct
LLSSATW

SEQ ID NO: 18858 - protein, 7 aa, synthetic construct
ARVEAFP

SEQ ID NO: 18859 - protein, 7 aa, synthetic construct
VEVARVR

SEQ ID NO: 18860 - protein, 7 aa, synthetic construct
VGTGPCG

SEQ ID NO: 18861 - protein, 7 aa, synthetic construct
YYSGTYV

SEQ ID NO: 18862 - protein, 7 aa, synthetic construct
NERGCCG

SEQ ID NO: 18863 - protein, 7 aa, synthetic construct
YFMGERE

SEQ ID NO: 18864 - protein, 7 aa, synthetic construct
NSPACKA

SEQ ID NO: 18865 - protein, 7 aa, synthetic construct
FFTGVLN

SEQ ID NO: 18866 - protein, 7 aa, synthetic construct
GGNGSSW

SEQ ID NO: 18867 - protein, 7 aa, synthetic construct
SAYRQGT

SEQ ID NO: 18868 - protein, 7 aa, synthetic construct
AGLDSRP

SEQ ID NO: 18869 - protein, 7 aa, synthetic construct
SDLRCCA

SEQ ID NO: 18870 - protein, 7 aa, synthetic construct
VVKQTAT

SEQ ID NO: 18871 - protein, 7 aa, synthetic construct
ACTTALI

SEQ ID NO: 18872 - protein, 7 aa, synthetic construct
LKYSETR

SEQ ID NO: 18873 - protein, 7 aa, synthetic construct
LTRVGLN

SEQ ID NO: 18874 - protein, 7 aa, synthetic construct
GGIASTW

SEQ ID NO: 18875 - protein, 7 aa, synthetic construct
GWSSAGK

SEQ ID NO: 18876 - protein, 7 aa, synthetic construct
IDDGSWA

SEQ ID NO: 18877 - protein, 7 aa, synthetic construct
CCKLETP

SEQ ID NO: 18878 - protein, 7 aa, synthetic construct
VVYDAFV

SEQ ID NO: 18879 - protein, 7 aa, synthetic construct
CGACSPN

SEQ ID NO: 18880 - protein, 7 aa, synthetic construct
GSATSTW

SEQ ID NO: 18881 - protein, 7 aa, synthetic construct
CRGPCTG

SEQ ID NO: 18882 - protein, 7 aa, synthetic construct
EIPPIRR

SEQ ID NO: 18883 - protein, 7 aa, synthetic construct
CKANRVE

SEQ ID NO: 18884 - protein, 7 aa, synthetic construct
IGTSREW

SEQ ID NO: 18885 - protein, 7 aa, synthetic construct
CNLSPTS

SEQ ID NO: 18886 - protein, 7 aa, synthetic construct
GRSTDNT

SEQ ID NO: 18887 - protein, 7 aa, synthetic construct
SEFYAAV

SEQ ID NO: 18888 - protein, 7 aa, synthetic construct
PGGTSGW

SEQ ID NO: 18889 - protein, 7 aa, synthetic construct
CCAGRTA

SEQ ID NO: 18890 - protein, 7 aa, synthetic construct
VDSTHGV

SEQ ID NO: 18891 - protein, 7 aa, synthetic construct
TVGGCCL

SEQ ID NO: 18892 - protein, 7 aa, synthetic construct
GSEGSLW

SEQ ID NO: 18893 - protein, 7 aa, synthetic construct
KYLHADF

SEQ ID NO: 18894 - protein, 7 aa, synthetic construct
VGGASTW

SEQ ID NO: 18895 - protein, 7 aa, synthetic construct
MEGCCAG

SEQ ID NO: 18896 - protein, 7 aa, synthetic construct
ERSAEAH

SEQ ID NO: 18897 - protein, 7 aa, synthetic construct
RSQDSFP

SEQ ID NO: 18898 - protein, 7 aa, synthetic construct
RPNESDW

SEQ ID NO: 18899 - protein, 7 aa, synthetic construct
RLESHGW

SEQ ID NO: 18900 - protein, 7 aa, synthetic construct
MVQQCCG

SEQ ID NO: 18901 - protein, 7 aa, synthetic construct
ARADGWG

SEQ ID NO: 18902 - protein, 7 aa, synthetic construct
WARGSNG

SEQ ID NO: 18903 - protein, 7 aa, synthetic construct
LARLGAN

SEQ ID NO: 18904 - protein, 7 aa, synthetic construct
HVTTHCS

SEQ ID NO: 18905 - protein, 7 aa, synthetic construct
WPFGESA

SEQ ID NO: 18906 - protein, 7 aa, synthetic construct
GRPPLKP

SEQ ID NO: 18907 - protein, 7 aa, synthetic construct
YSRLDSV

SEQ ID NO: 18908 - protein, 7 aa, synthetic construct
LTGQAEL

SEQ ID NO: 18909 - protein, 7 aa, synthetic construct
QGLGCCV

SEQ ID NO: 18910 - protein, 7 aa, synthetic construct
YSRVSEL

SEQ ID NO: 18911 - protein, 7 aa, synthetic construct
ECGGCRP

SEQ ID NO: 18912 - protein, 7 aa, synthetic construct
YVRSDGT

SEQ ID NO: 18913 - protein, 7 aa, synthetic construct
CDAEMRE

SEQ ID NO: 18914 - protein, 7 aa, synthetic construct
HRKVAYD

SEQ ID NO: 18915 - protein, 7 aa, synthetic construct
GTSAYRG

SEQ ID NO: 18916 - protein, 7 aa, synthetic construct
LWIEKPT

SEQ ID NO: 18917 - protein, 7 aa, synthetic construct
SRYKEVL

SEQ ID NO: 18918 - protein, 7 aa, synthetic construct
YSRLGVQ

SEQ ID NO: 18919 - protein, 7 aa, synthetic construct
YFTGSTD

SEQ ID NO: 18920 - protein, 7 aa, synthetic construct
NLSDVRW

SEQ ID NO: 18921 - protein, 7 aa, synthetic construct
KGNSGNL

SEQ ID NO: 18922 - protein, 7 aa, synthetic construct
WEGMKRN

SEQ ID NO: 18923 - protein, 7 aa, synthetic construct
GVGSYIV

SEQ ID NO: 18924 - protein, 7 aa, synthetic construct
PLSASSW

SEQ ID NO: 18925 - protein, 7 aa, synthetic construct
CEGVSRE

SEQ ID NO: 18926 - protein, 7 aa, synthetic construct
FPDGKRF

SEQ ID NO: 18927 - protein, 7 aa, synthetic construct
GWRAGGA

SEQ ID NO: 18928 - protein, 7 aa, synthetic construct
LCADPSR

SEQ ID NO: 18929 - protein, 7 aa, synthetic construct
RNFGRDG

SEQ ID NO: 18930 - protein, 7 aa, synthetic construct
MTTVVTA

SEQ ID NO: 18931 - protein, 7 aa, synthetic construct
FQTESSV

SEQ ID NO: 18932 - protein, 7 aa, synthetic construct
LLASATW

SEQ ID NO: 18933 - protein, 7 aa, synthetic construct
DLRTASW

SEQ ID NO: 18934 - protein, 7 aa, synthetic construct
GKGLEHI

SEQ ID NO: 18935 - protein, 7 aa, synthetic construct
QAQTSGW

SEQ ID NO: 18936 - protein, 7 aa, synthetic construct
NGDAGSW

SEQ ID NO: 18937 - protein, 7 aa, synthetic construct
YVRSDSA

SEQ ID NO: 18938 - protein, 7 aa, synthetic construct
CGGGCPS

SEQ ID NO: 18939 - protein, 7 aa, synthetic construct
WRTGLGG

SEQ ID NO: 18940 - protein, 7 aa, synthetic construct
ASTWNDP

SEQ ID NO: 18941 - protein, 7 aa, synthetic construct
EKLCCHG

SEQ ID NO: 18942 - protein, 7 aa, synthetic construct
CQLNCSV

SEQ ID NO: 18943 - protein, 7 aa, synthetic construct
TSGPPHR

SEQ ID NO: 18944 - protein, 7 aa, synthetic construct
SFDGTPS

SEQ ID NO: 18945 - protein, 7 aa, synthetic construct
AGAAKTW

SEQ ID NO: 18946 - protein, 7 aa, synthetic construct
DRVVSTV

SEQ ID NO: 18947 - protein, 7 aa, synthetic construct
RGGDSAW

SEQ ID NO: 18948 - protein, 7 aa, synthetic construct
GWGDWKD

SEQ ID NO: 18949 - protein, 7 aa, synthetic construct
TYSGDLP

SEQ ID NO: 18950 - protein, 7 aa, synthetic construct
VEYDWQD

SEQ ID NO: 18951 - protein, 7 aa, synthetic construct
KCTYEQN

SEQ ID NO: 18952 - protein, 7 aa, synthetic construct
PGGSGTW

SEQ ID NO: 18953 - protein, 7 aa, synthetic construct
LAHGPYN

SEQ ID NO: 18954 - protein, 7 aa, synthetic construct
RDPSSSW

SEQ ID NO: 18955 - protein, 7 aa, synthetic construct
SGPERSW

SEQ ID NO: 18956 - protein, 7 aa, synthetic construct
RSIDAYP

SEQ ID NO: 18957 - protein, 7 aa, synthetic construct
LWRGSDL

SEQ ID NO: 18958 - protein, 7 aa, synthetic construct
GSWCTVP

SEQ ID NO: 18959 - protein, 7 aa, synthetic construct
EVVSRAG

SEQ ID NO: 18960 - protein, 7 aa, synthetic construct
GGLCCPS

SEQ ID NO: 18961 - protein, 7 aa, synthetic construct
YMVDAFV

SEQ ID NO: 18962 - protein, 7 aa, synthetic construct
WNHSPAA

SEQ ID NO: 18963 - protein, 7 aa, synthetic construct
IVSDSRG

SEQ ID NO: 18964 - protein, 7 aa, synthetic construct
ASNTRFH

SEQ ID NO: 18965 - protein, 7 aa, synthetic construct
VSLEGRN

SEQ ID NO: 18966 - protein, 7 aa, synthetic construct
AHEFGPV

SEQ ID NO: 18967 - protein, 7 aa, synthetic construct
QLERGNW

SEQ ID NO: 18968 - protein, 7 aa, synthetic construct
YDLCSKR

SEQ ID NO: 18969 - protein, 7 aa, synthetic construct
VLTSQIW

SEQ ID NO: 18970 - protein, 7 aa, synthetic construct
GGPGVGW

SEQ ID NO: 18971 - protein, 7 aa, synthetic construct
VEEGWSW

SEQ ID NO: 18972 - protein, 7 aa, synthetic construct
VAGGSAG

SEQ ID NO: 18973 - protein, 7 aa, synthetic construct
CGALRIS

SEQ ID NO: 18974 - protein, 7 aa, synthetic construct
GLYAATL

SEQ ID NO: 18975 - protein, 7 aa, synthetic construct
EGASVLW

SEQ ID NO: 18976 - protein, 7 aa, synthetic construct
GGAERRY

SEQ ID NO: 18977 - protein, 7 aa, synthetic construct
GMFGRRD

SEQ ID NO: 18978 - protein, 7 aa, synthetic construct
DSEGMRY

SEQ ID NO: 18979 - protein, 7 aa, synthetic construct
GMADPTW

SEQ ID NO: 18980 - protein, 7 aa, synthetic construct
FYNQHSC

SEQ ID NO: 18981 - protein, 7 aa, synthetic construct
FVKYDPS

SEQ ID NO: 18982 - protein, 7 aa, synthetic construct
YQRYGTA

SEQ ID NO: 18983 - protein, 7 aa, synthetic construct
RGSDTYP

SEQ ID NO: 18984 - protein, 7 aa, synthetic construct
LLDSYDW

SEQ ID NO: 18985 - protein, 7 aa, synthetic construct
HSRAASF

SEQ ID NO: 18986 - protein, 7 aa, synthetic construct
GGAGSLW

SEQ ID NO: 18987 - protein, 7 aa, synthetic construct
TNVPSLN

SEQ ID NO: 18988 - protein, 7 aa, synthetic construct
VDLYVSW

SEQ ID NO: 18989 - protein, 7 aa, synthetic construct
SKGCCDS

SEQ ID NO: 18990 - protein, 7 aa, synthetic construct
FSDVDTL

SEQ ID NO: 18991 - protein, 7 aa, synthetic construct
YHKLSVV

SEQ ID NO: 18992 - protein, 7 aa, synthetic construct
GVYSMKT

SEQ ID NO: 18993 - protein, 7 aa, synthetic construct
LMSGEGP

SEQ ID NO: 18994 - protein, 7 aa, synthetic construct
GDAAGRR

SEQ ID NO: 18995 - protein, 7 aa, synthetic construct
TVYAGEP

SEQ ID NO: 18996 - protein, 7 aa, synthetic construct
LHRLGVS

SEQ ID NO: 18997 - protein, 7 aa, synthetic construct
CGTKCSL

SEQ ID NO: 18998 - protein, 7 aa, synthetic construct
WLADKGS

SEQ ID NO: 18999 - protein, 7 aa, synthetic construct
GGAHSNF

SEQ ID NO: 19000 - protein, 7 aa, synthetic construct
KFEMNAL

SEQ ID NO: 19001 - protein, 7 aa, synthetic construct
ADQRMRV

SEQ ID NO: 19002 - protein, 7 aa, synthetic construct
WWAGVVS

SEQ ID NO: 19003 - protein, 7 aa, synthetic construct
KFVAVSD

SEQ ID NO: 19004 - protein, 7 aa, synthetic construct
IYADRTW

SEQ ID NO: 19005 - protein, 7 aa, synthetic construct
QGEARSW

SEQ ID NO: 19006 - protein, 7 aa, synthetic construct
CGFACPS

SEQ ID NO: 19007 - protein, 7 aa, synthetic construct
YYSGVTH

SEQ ID NO: 19008 - protein, 7 aa, synthetic construct
YPSGSIG

SEQ ID NO: 19009 - protein, 7 aa, synthetic construct
VLSQSLW

SEQ ID NO: 19010 - protein, 7 aa, synthetic construct
QGGSGAW

SEQ ID NO: 19011 - protein, 7 aa, synthetic construct
FLASRDW

SEQ ID NO: 19012 - protein, 7 aa, synthetic construct
LMSPCCG

SEQ ID NO: 19013 - protein, 7 aa, synthetic construct
CSGACAA

SEQ ID NO: 19014 - protein, 7 aa, synthetic construct
ASESLRR

SEQ ID NO: 19015 - protein, 7 aa, synthetic construct
VQDGLRW

SEQ ID NO: 19016 - protein, 7 aa, synthetic construct
VWKPEPG

SEQ ID NO: 19017 - protein, 7 aa, synthetic construct
TTDYTMF

SEQ ID NO: 19018 - protein, 7 aa, synthetic construct
CNDSTKS

SEQ ID NO: 19019 - protein, 7 aa, synthetic construct
WAELRRA

SEQ ID NO: 19020 - protein, 7 aa, synthetic construct
CCSGVGI

SEQ ID NO: 19021 - protein, 7 aa, synthetic construct
MVFEDRV

SEQ ID NO: 19022 - protein, 7 aa, synthetic construct
YSRLSNV

SEQ ID NO: 19023 - protein, 7 aa, synthetic construct
SLVKDAP

SEQ ID NO: 19024 - protein, 7 aa, synthetic construct
ERGAGEV

SEQ ID NO: 19025 - protein, 7 aa, synthetic construct
GPERMSV

SEQ ID NO: 19026 - protein, 7 aa, synthetic construct
RGESSIW

SEQ ID NO: 19027 - protein, 7 aa, synthetic construct
CRSGAAL

SEQ ID NO: 19028 - protein, 7 aa, synthetic construct
PTADSIG

SEQ ID NO: 19029 - protein, 7 aa, synthetic construct
LSRLLPD

SEQ ID NO: 19030 - protein, 7 aa, synthetic construct
CGPSSAA

SEQ ID NO: 19031 - protein, 7 aa, synthetic construct
VVGAEST

SEQ ID NO: 19032 - protein, 7 aa, synthetic construct
CKLPCGL

SEQ ID NO: 19033 - protein, 7 aa, synthetic construct
LLCKAQG

SEQ ID NO: 19034 - protein, 7 aa, synthetic construct
TWSGDNP

SEQ ID NO: 19035 - protein, 7 aa, synthetic construct
GGGSQSW

SEQ ID NO: 19036 - protein, 7 aa, synthetic construct
LGGAAYK

SEQ ID NO: 19037 - protein, 7 aa, synthetic construct
YDSSNGI

SEQ ID NO: 19038 - protein, 7 aa, synthetic construct
FHVRGPD

SEQ ID NO: 19039 - protein, 7 aa, synthetic construct
GVPYTMP

SEQ ID NO: 19040 - protein, 7 aa, synthetic construct
GKSALNG

SEQ ID NO: 19041 - protein, 7 aa, synthetic construct
QDGSSTW

SEQ ID NO: 19042 - protein, 7 aa, synthetic construct
WAAGGAR

SEQ ID NO: 19043 - protein, 7 aa, synthetic construct
RCPDCHL

SEQ ID NO: 19044 - protein, 7 aa, synthetic construct
TRSGENA

SEQ ID NO: 19045 - protein, 7 aa, synthetic construct
RLESVAW

SEQ ID NO: 19046 - protein, 7 aa, synthetic construct
YYTGHSL

SEQ ID NO: 19047 - protein, 7 aa, synthetic construct
CQTVCAA

SEQ ID NO: 19048 - protein, 7 aa, synthetic construct
YWSATTA

SEQ ID NO: 19049 - protein, 7 aa, synthetic construct
ELSVVIH

SEQ ID NO: 19050 - protein, 7 aa, synthetic construct
SVGSSER

SEQ ID NO: 19051 - protein, 7 aa, synthetic construct
WLEGESV

SEQ ID NO: 19052 - protein, 7 aa, synthetic construct
YARTSTP

SEQ ID NO: 19053 - protein, 7 aa, synthetic construct
GGMSSTW

SEQ ID NO: 19054 - protein, 7 aa, synthetic construct
PNGEATW

SEQ ID NO: 19055 - protein, 7 aa, synthetic construct
WDSDNGR

SEQ ID NO: 19056 - protein, 7 aa, synthetic construct
RGVGPDS

SEQ ID NO: 19057 - protein, 7 aa, synthetic construct
CYLTKCD

SEQ ID NO: 19058 - protein, 7 aa, synthetic construct
LYVRWCG

SEQ ID NO: 19059 - protein, 7 aa, synthetic construct
VASACCG

SEQ ID NO: 19060 - protein, 7 aa, synthetic construct
TIGGACI

SEQ ID NO: 19061 - protein, 7 aa, synthetic construct
YYAGVLS

SEQ ID NO: 19062 - protein, 7 aa, synthetic construct
LEYGMSG

SEQ ID NO: 19063 - protein, 7 aa, synthetic construct
TYRGKPD

SEQ ID NO: 19064 - protein, 7 aa, synthetic construct
GGRNGIE

SEQ ID NO: 19065 - protein, 7 aa, synthetic construct
LLGENPD

SEQ ID NO: 19066 - protein, 7 aa, synthetic construct
GGDFSSY

SEQ ID NO: 19067 - protein, 7 aa, synthetic construct
RDEGSTW

SEQ ID NO: 19068 - protein, 7 aa, synthetic construct
SGASHLW

SEQ ID NO: 19069 - protein, 7 aa, synthetic construct
GSSTSVW

SEQ ID NO: 19070 - protein, 7 aa, synthetic construct
YVQGNKY

SEQ ID NO: 19071 - protein, 7 aa, synthetic construct
VDSTEGV

SEQ ID NO: 19072 - protein, 7 aa, synthetic construct
SSDAVRW

SEQ ID NO: 19073 - protein, 7 aa, synthetic construct
TEGKRFT

SEQ ID NO: 19074 - protein, 7 aa, synthetic construct
VASMGIG

SEQ ID NO: 19075 - protein, 7 aa, synthetic construct
WYSGIQM

SEQ ID NO: 19076 - protein, 7 aa, synthetic construct
CGLGSEA

SEQ ID NO: 19077 - protein, 7 aa, synthetic construct
WGARAER

SEQ ID NO: 19078 - protein, 7 aa, synthetic construct
SSEYLVY

SEQ ID NO: 19079 - protein, 7 aa, synthetic construct
SYHLKMG

SEQ ID NO: 19080 - protein, 7 aa, synthetic construct
IGFVCSE

SEQ ID NO: 19081 - protein, 7 aa, synthetic construct
YSSLNIN

SEQ ID NO: 19082 - protein, 7 aa, synthetic construct
YFAGMVQ

SEQ ID NO: 19083 - protein, 7 aa, synthetic construct
VGWRGRS

SEQ ID NO: 19084 - protein, 7 aa, synthetic construct
SMSDVRW

SEQ ID NO: 19085 - protein, 7 aa, synthetic construct
RLSDVAW

SEQ ID NO: 19086 - protein, 7 aa, synthetic construct
SSGMSSW

SEQ ID NO: 19087 - protein, 7 aa, synthetic construct
TSENVYF

SEQ ID NO: 19088 - protein, 7 aa, synthetic construct
GDEYVAF

SEQ ID NO: 19089 - protein, 7 aa, synthetic construct
YWSGIKE

SEQ ID NO: 19090 - protein, 7 aa, synthetic construct
SAFVHCV

SEQ ID NO: 19091 - protein, 7 aa, synthetic construct
GEGQSSW

SEQ ID NO: 19092 - protein, 7 aa, synthetic construct
LVSGEDV

SEQ ID NO: 19093 - protein, 7 aa, synthetic construct
RADSKQS

SEQ ID NO: 19094 - protein, 7 aa, synthetic construct
NALDWRD

SEQ ID NO: 19095 - protein, 7 aa, synthetic construct
GLASSAW

SEQ ID NO: 19096 - protein, 7 aa, synthetic construct
SLGKYGH

SEQ ID NO: 19097 - protein, 7 aa, synthetic construct
TLVLCRE

SEQ ID NO: 19098 - protein, 7 aa, synthetic construct
SDGACCA

SEQ ID NO: 19099 - protein, 7 aa, synthetic construct
LDDGRFQ

SEQ ID NO: 19100 - protein, 7 aa, synthetic construct
AGMENKM

SEQ ID NO: 19101 - protein, 7 aa, synthetic construct
GSDNSRW

SEQ ID NO: 19102 - protein, 7 aa, synthetic construct
RRLSMSL

SEQ ID NO: 19103 - protein, 7 aa, synthetic construct
KLDHMGM

SEQ ID NO: 19104 - protein, 7 aa, synthetic construct
DMMGNPA

SEQ ID NO: 19105 - protein, 7 aa, synthetic construct
GDSSVRK

SEQ ID NO: 19106 - protein, 7 aa, synthetic construct
GYMEGGG

SEQ ID NO: 19107 - protein, 7 aa, synthetic construct
WGRQALG

SEQ ID NO: 19108 - protein, 7 aa, synthetic construct
DNSGRLY

SEQ ID NO: 19109 - protein, 7 aa, synthetic construct
GFALPGG

SEQ ID NO: 19110 - protein, 7 aa, synthetic construct
GSGSALW

SEQ ID NO: 19111 - protein, 7 aa, synthetic construct
YWLDNVG

SEQ ID NO: 19112 - protein, 7 aa, synthetic construct
WGSQGRG

SEQ ID NO: 19113 - protein, 7 aa, synthetic construct
RLDDRSW

SEQ ID NO: 19114 - protein, 7 aa, synthetic construct
CCKVAMS

SEQ ID NO: 19115 - protein, 7 aa, synthetic construct
MNCGMQC

SEQ ID NO: 19116 - protein, 7 aa, synthetic construct
VGTDRGW

SEQ ID NO: 19117 - protein, 7 aa, synthetic construct
STSSRYS

SEQ ID NO: 19118 - protein, 7 aa, synthetic construct
SWGAKQS

SEQ ID NO: 19119 - protein, 7 aa, synthetic construct
APSHIAW

SEQ ID NO: 19120 - protein, 7 aa, synthetic construct
DPMSLGW

SEQ ID NO: 19121 - protein, 7 aa, synthetic construct
LNTRWQG

SEQ ID NO: 19122 - protein, 7 aa, synthetic construct
CKRGWSE

SEQ ID NO: 19123 - protein, 7 aa, synthetic construct
MTVRTSL

SEQ ID NO: 19124 - protein, 7 aa, synthetic construct
DLRAVSW

SEQ ID NO: 19125 - protein, 7 aa, synthetic construct
LLESRSW

SEQ ID NO: 19126 - protein, 7 aa, synthetic construct
YYSGVSE

SEQ ID NO: 19127 - protein, 7 aa, synthetic construct
SYRSAVL

SEQ ID NO: 19128 - protein, 7 aa, synthetic construct
YYSGVRD

SEQ ID NO: 19129 - protein, 7 aa, synthetic construct
MRLGGLT

SEQ ID NO: 19130 - protein, 7 aa, synthetic construct
IAGAERA

SEQ ID NO: 19131 - protein, 7 aa, synthetic construct
NHKNTPP

SEQ ID NO: 19132 - protein, 7 aa, synthetic construct
FIEQLPQ

SEQ ID NO: 19133 - protein, 7 aa, synthetic construct
SVVSQKS

SEQ ID NO: 19134 - protein, 7 aa, synthetic construct
CSLKDRC

SEQ ID NO: 19135 - protein, 7 aa, synthetic construct
FCIRLWL

SEQ ID NO: 19136 - protein, 7 aa, synthetic construct
AMVARDW

SEQ ID NO: 19137 - protein, 7 aa, synthetic construct
ILAERTA

SEQ ID NO: 19138 - protein, 7 aa, synthetic construct
YNEVSIA

SEQ ID NO: 19139 - protein, 7 aa, synthetic construct
GIGCTKL

SEQ ID NO: 19140 - protein, 7 aa, synthetic construct
GSGVSNW

SEQ ID NO: 19141 - protein, 7 aa, synthetic construct
SVRLQSE

SEQ ID NO: 19142 - protein, 7 aa, synthetic construct
VMKSVST

SEQ ID NO: 19143 - protein, 7 aa, synthetic construct
VPGRGAG

SEQ ID NO: 19144 - protein, 7 aa, synthetic construct
LWDGTRA

SEQ ID NO: 19145 - protein, 7 aa, synthetic construct
FSGYSSS

SEQ ID NO: 19146 - protein, 7 aa, synthetic construct
DMESNRW

SEQ ID NO: 19147 - protein, 7 aa, synthetic construct
LDDWSHF

SEQ ID NO: 19148 - protein, 7 aa, synthetic construct
YARGALN

SEQ ID NO: 19149 - protein, 7 aa, synthetic construct
YRSTSHL

SEQ ID NO: 19150 - protein, 7 aa, synthetic construct
CRPEHGP

SEQ ID NO: 19151 - protein, 7 aa, synthetic construct
MYKSRVD

SEQ ID NO: 19152 - protein, 7 aa, synthetic construct
LSNAPVG

SEQ ID NO: 19153 - protein, 7 aa, synthetic construct
SAPERLL

SEQ ID NO: 19154 - protein, 7 aa, synthetic construct
AGEGVKW

SEQ ID NO: 19155 - protein, 7 aa, synthetic construct
GTLPAYR

SEQ ID NO: 19156 - protein, 7 aa, synthetic construct
WSRDTDN

SEQ ID NO: 19157 - protein, 7 aa, synthetic construct
RGSGFHG

SEQ ID NO: 19158 - protein, 7 aa, synthetic construct
CGTPCSA

SEQ ID NO: 19159 - protein, 7 aa, synthetic construct
IGSAVLR

SEQ ID NO: 19160 - protein, 7 aa, synthetic construct
RMADSVW

SEQ ID NO: 19161 - protein, 7 aa, synthetic construct
DFFGHDA

SEQ ID NO: 19162 - protein, 7 aa, synthetic construct
TGATVGC

SEQ ID NO: 19163 - protein, 7 aa, synthetic construct
ERYGLCA

SEQ ID NO: 19164 - protein, 7 aa, synthetic construct
RDERPGG

SEQ ID NO: 19165 - protein, 7 aa, synthetic construct
ARFDAFP

SEQ ID NO: 19166 - protein, 7 aa, synthetic construct
YDPRSNN

SEQ ID NO: 19167 - protein, 7 aa, synthetic construct
ELDSIQW

SEQ ID NO: 19168 - protein, 7 aa, synthetic construct
YVRAPLS

SEQ ID NO: 19169 - protein, 7 aa, synthetic construct
YSRIGDH

SEQ ID NO: 19170 - protein, 7 aa, synthetic construct
ITFRCGK

SEQ ID NO: 19171 - protein, 7 aa, synthetic construct
VETVRYK

SEQ ID NO: 19172 - protein, 7 aa, synthetic construct
DLMSLSW

SEQ ID NO: 19173 - protein, 7 aa, synthetic construct
ASDYQTF

SEQ ID NO: 19174 - protein, 7 aa, synthetic construct
MSDGTGP

SEQ ID NO: 19175 - protein, 7 aa, synthetic construct
ASDEWRD

SEQ ID NO: 19176 - protein, 7 aa, synthetic construct
YLGGDHW

SEQ ID NO: 19177 - protein, 7 aa, synthetic construct
LPTGWGP

SEQ ID NO: 19178 - protein, 7 aa, synthetic construct
GPETVKW

SEQ ID NO: 19179 - protein, 7 aa, synthetic construct
YSSVVAE

SEQ ID NO: 19180 - protein, 7 aa, synthetic construct
YFEGVKG

SEQ ID NO: 19181 - protein, 7 aa, synthetic construct
GPNLHPS

SEQ ID NO: 19182 - protein, 7 aa, synthetic construct
REDYVYP

SEQ ID NO: 19183 - protein, 7 aa, synthetic construct
CSKPSAV

SEQ ID NO: 19184 - protein, 7 aa, synthetic construct
YGCNGCS

SEQ ID NO: 19185 - protein, 7 aa, synthetic construct
DMSSTKW

SEQ ID NO: 19186 - protein, 7 aa, synthetic construct
GAGNSLW

SEQ ID NO: 19187 - protein, 7 aa, synthetic construct
MIADGGA

SEQ ID NO: 19188 - protein, 7 aa, synthetic construct
WYSGRTE

SEQ ID NO: 19189 - protein, 7 aa, synthetic construct
CKYGAEA

SEQ ID NO: 19190 - protein, 7 aa, synthetic construct
VVPLCDP

SEQ ID NO: 19191 - protein, 7 aa, synthetic construct
TRSGSNA

SEQ ID NO: 19192 - protein, 7 aa, synthetic construct
LASACLS

SEQ ID NO: 19193 - protein, 7 aa, synthetic construct
AGACDAS

SEQ ID NO: 19194 - protein, 7 aa, synthetic construct
CNSGCSV

SEQ ID NO: 19195 - protein, 7 aa, synthetic construct
WSRGGSA

SEQ ID NO: 19196 - protein, 7 aa, synthetic construct
EISKTQI

SEQ ID NO: 19197 - protein, 7 aa, synthetic construct
FDRKPQI

SEQ ID NO: 19198 - protein, 7 aa, synthetic construct
YTSDNGL

SEQ ID NO: 19199 - protein, 7 aa, synthetic construct
NGANGVW

SEQ ID NO: 19200 - protein, 7 aa, synthetic construct
LEAVSRA

SEQ ID NO: 19201 - protein, 7 aa, synthetic construct
EMLPYRG

SEQ ID NO: 19202 - protein, 7 aa, synthetic construct
SADTWRD

SEQ ID NO: 19203 - protein, 7 aa, synthetic construct
LTVATVE

SEQ ID NO: 19204 - protein, 7 aa, synthetic construct
LTEKLAS

SEQ ID NO: 19205 - protein, 7 aa, synthetic construct
YFSGSSA

SEQ ID NO: 19206 - protein, 7 aa, synthetic construct
MFGSTAG

SEQ ID NO: 19207 - protein, 7 aa, synthetic construct
YDYDAYP

SEQ ID NO: 19208 - protein, 7 aa, synthetic construct
SNPAPHS

SEQ ID NO: 19209 - protein, 7 aa, synthetic construct
YFVGERE

SEQ ID NO: 19210 - protein, 7 aa, synthetic construct
WGKNMGL

SEQ ID NO: 19211 - protein, 7 aa, synthetic construct
VAHVPLC

SEQ ID NO: 19212 - protein, 7 aa, synthetic construct
YARTGTS

SEQ ID NO: 19213 - protein, 7 aa, synthetic construct
GGGTSSW

SEQ ID NO: 19214 - protein, 7 aa, synthetic construct
GNLDNGG

SEQ ID NO: 19215 - protein, 7 aa, synthetic construct
RTYDSMP

SEQ ID NO: 19216 - protein, 7 aa, synthetic construct
GGESTSW

SEQ ID NO: 19217 - protein, 7 aa, synthetic construct
YRLRISD

SEQ ID NO: 19218 - protein, 7 aa, synthetic construct
IAATCCN

SEQ ID NO: 19219 - protein, 7 aa, synthetic construct
GGEGLRW

SEQ ID NO: 19220 - protein, 7 aa, synthetic construct
CAPDYRE

SEQ ID NO: 19221 - protein, 7 aa, synthetic construct
ILSDRVW

SEQ ID NO: 19222 - protein, 7 aa, synthetic construct
AQGIGTW

SEQ ID NO: 19223 - protein, 7 aa, synthetic construct
DESVRTW

SEQ ID NO: 19224 - protein, 7 aa, synthetic construct
WLKSQAG

SEQ ID NO: 19225 - protein, 7 aa, synthetic construct
KSTTSEP

SEQ ID NO: 19226 - protein, 7 aa, synthetic construct
GEMSVRW

SEQ ID NO: 19227 - protein, 7 aa, synthetic construct
LSALSNN

SEQ ID NO: 19228 - protein, 7 aa, synthetic construct
GGDYIGT

SEQ ID NO: 19229 - protein, 7 aa, synthetic construct
DMGSADW

SEQ ID NO: 19230 - protein, 7 aa, synthetic construct
VADHVRW

SEQ ID NO: 19231 - protein, 7 aa, synthetic construct
REGTVYW

SEQ ID NO: 19232 - protein, 7 aa, synthetic construct
SLSSQEW

SEQ ID NO: 19233 - protein, 7 aa, synthetic construct
DQGYSTW

SEQ ID NO: 19234 - protein, 7 aa, synthetic construct
LARLGYD

SEQ ID NO: 19235 - protein, 7 aa, synthetic construct
TATGCCP

SEQ ID NO: 19236 - protein, 7 aa, synthetic construct
TYSVDLG

SEQ ID NO: 19237 - protein, 7 aa, synthetic construct
LGAYSLH

SEQ ID NO: 19238 - protein, 7 aa, synthetic construct
CKMGRDE

SEQ ID NO: 19239 - protein, 7 aa, synthetic construct
LRGDDCA

SEQ ID NO: 19240 - protein, 7 aa, synthetic construct
LPSGDSP

SEQ ID NO: 19241 - protein, 7 aa, synthetic construct
CGKDLLH

SEQ ID NO: 19242 - protein, 7 aa, synthetic construct
EMGGREW

SEQ ID NO: 19243 - protein, 7 aa, synthetic construct
YVKFESG

SEQ ID NO: 19244 - protein, 7 aa, synthetic construct
GTGGDTG

SEQ ID NO: 19245 - protein, 7 aa, synthetic construct
VTGACCS

SEQ ID NO: 19246 - protein, 7 aa, synthetic construct
DYASIKW

SEQ ID NO: 19247 - protein, 7 aa, synthetic construct
GDESSVW

SEQ ID NO: 19248 - protein, 7 aa, synthetic construct
QSSVFND

SEQ ID NO: 19249 - protein, 7 aa, synthetic construct
GDKETAA

SEQ ID NO: 19250 - protein, 7 aa, synthetic construct
SAYSPLS

SEQ ID NO: 19251 - protein, 7 aa, synthetic construct
NPLASNW

SEQ ID NO: 19252 - protein, 7 aa, synthetic construct
REDVSLW

SEQ ID NO: 19253 - protein, 7 aa, synthetic construct
YFTGHLE

SEQ ID NO: 19254 - protein, 7 aa, synthetic construct
GLNVVAW

SEQ ID NO: 19255 - protein, 7 aa, synthetic construct
MMTSSQW

SEQ ID NO: 19256 - protein, 7 aa, synthetic construct
PDFSTRY

SEQ ID NO: 19257 - protein, 7 aa, synthetic construct
CIVTANC

SEQ ID NO: 19258 - protein, 7 aa, synthetic construct
VNDGVKW

SEQ ID NO: 19259 - protein, 7 aa, synthetic construct
LCKSCGS

SEQ ID NO: 19260 - protein, 7 aa, synthetic construct
TVWGDAA

SEQ ID NO: 19261 - protein, 7 aa, synthetic construct
DLESSYW

SEQ ID NO: 19262 - protein, 7 aa, synthetic construct
VDSTNGL

SEQ ID NO: 19263 - protein, 7 aa, synthetic construct
RLESAVW

SEQ ID NO: 19264 - protein, 7 aa, synthetic construct
PMSAVGW

SEQ ID NO: 19265 - protein, 7 aa, synthetic construct
RDPSVFP

SEQ ID NO: 19266 - protein, 7 aa, synthetic construct
TNAQILT

SEQ ID NO: 19267 - protein, 7 aa, synthetic construct
FSVRGNL

SEQ ID NO: 19268 - protein, 7 aa, synthetic construct
CLAMSKP

SEQ ID NO: 19269 - protein, 7 aa, synthetic construct
TREGDAP

SEQ ID NO: 19270 - protein, 7 aa, synthetic construct
VLSHTDL

SEQ ID NO: 19271 - protein, 7 aa, synthetic construct
YTRLDSS

SEQ ID NO: 19272 - protein, 7 aa, synthetic construct
QDEWTYV

SEQ ID NO: 19273 - protein, 7 aa, synthetic construct
VIGMGRD

SEQ ID NO: 19274 - protein, 7 aa, synthetic construct
GDEYISY

SEQ ID NO: 19275 - protein, 7 aa, synthetic construct
SNSSLNC

SEQ ID NO: 19276 - protein, 7 aa, synthetic construct
TSLEFGA

SEQ ID NO: 19277 - protein, 7 aa, synthetic construct
GVTEVSW

SEQ ID NO: 19278 - protein, 7 aa, synthetic construct
SFDADRW

SEQ ID NO: 19279 - protein, 7 aa, synthetic construct
FFSGAVE

SEQ ID NO: 19280 - protein, 7 aa, synthetic construct
MRFCKDS

SEQ ID NO: 19281 - protein, 7 aa, synthetic construct
YSDFAPF

SEQ ID NO: 19282 - protein, 7 aa, synthetic construct
GSTVCKD

SEQ ID NO: 19283 - protein, 7 aa, synthetic construct
GEPRSGN

SEQ ID NO: 19284 - protein, 7 aa, synthetic construct
FGYRQGS

SEQ ID NO: 19285 - protein, 7 aa, synthetic construct
SMCKDDC

SEQ ID NO: 19286 - protein, 7 aa, synthetic construct
GYSDFRN

SEQ ID NO: 19287 - protein, 7 aa, synthetic construct
GLYVEAG

SEQ ID NO: 19288 - protein, 7 aa, synthetic construct
NIPGMMY

SEQ ID NO: 19289 - protein, 7 aa, synthetic construct
LSVDICA

SEQ ID NO: 19290 - protein, 7 aa, synthetic construct
VSMGSAG

SEQ ID NO: 19291 - protein, 7 aa, synthetic construct
TRQGDEA

SEQ ID NO: 19292 - protein, 7 aa, synthetic construct
GGINYDL

SEQ ID NO: 19293 - protein, 7 aa, synthetic construct
WNAGGAF

SEQ ID NO: 19294 - protein, 7 aa, synthetic construct
RMDHTNF

SEQ ID NO: 19295 - protein, 7 aa, synthetic construct
IMSDLAW

SEQ ID NO: 19296 - protein, 7 aa, synthetic construct
CGEAILM

SEQ ID NO: 19297 - protein, 7 aa, synthetic construct
SSTQSSF

SEQ ID NO: 19298 - protein, 7 aa, synthetic construct
GLSSATW

SEQ ID NO: 19299 - protein, 7 aa, synthetic construct
VSAGYQW

SEQ ID NO: 19300 - protein, 7 aa, synthetic construct
YFAGIPA

SEQ ID NO: 19301 - protein, 7 aa, synthetic construct
ELMAHSW

SEQ ID NO: 19302 - protein, 7 aa, synthetic construct
GGTPVNV

SEQ ID NO: 19303 - protein, 7 aa, synthetic construct
GVTAVAW

SEQ ID NO: 19304 - protein, 7 aa, synthetic construct
EPESRSW

SEQ ID NO: 19305 - protein, 7 aa, synthetic construct
CDGVPRG

SEQ ID NO: 19306 - protein, 7 aa, synthetic construct
RDGGRIG

SEQ ID NO: 19307 - protein, 7 aa, synthetic construct
NGQGGHW

SEQ ID NO: 19308 - protein, 7 aa, synthetic construct
VESSSLW

SEQ ID NO: 19309 - protein, 7 aa, synthetic construct
TCTGTCS

SEQ ID NO: 19310 - protein, 7 aa, synthetic construct
VDSDNGR

SEQ ID NO: 19311 - protein, 7 aa, synthetic construct
IVSICAA

SEQ ID NO: 19312 - protein, 7 aa, synthetic construct
DHANPPD

SEQ ID NO: 19313 - protein, 7 aa, synthetic construct
FSGMSPS

SEQ ID NO: 19314 - protein, 7 aa, synthetic construct
CMTGLKC

SEQ ID NO: 19315 - protein, 7 aa, synthetic construct
NCNASCV

SEQ ID NO: 19316 - protein, 7 aa, synthetic construct
KVGDLRA

SEQ ID NO: 19317 - protein, 7 aa, synthetic construct
EFDARTW

SEQ ID NO: 19318 - protein, 7 aa, synthetic construct
ICSRVNG

SEQ ID NO: 19319 - protein, 7 aa, synthetic construct
HVKCCPP

SEQ ID NO: 19320 - protein, 7 aa, synthetic construct
SSMVSCA

SEQ ID NO: 19321 - protein, 7 aa, synthetic construct
LSAGELW

SEQ ID NO: 19322 - protein, 7 aa, synthetic construct
VMNSSGA

SEQ ID NO: 19323 - protein, 7 aa, synthetic construct
LDGCCSA

SEQ ID NO: 19324 - protein, 7 aa, synthetic construct
FRDGTAA

SEQ ID NO: 19325 - protein, 7 aa, synthetic construct
CDTACTR

SEQ ID NO: 19326 - protein, 7 aa, synthetic construct
GELTVRW

SEQ ID NO: 19327 - protein, 7 aa, synthetic construct
LEGREEG

SEQ ID NO: 19328 - protein, 7 aa, synthetic construct
CLKICTP

SEQ ID NO: 19329 - protein, 7 aa, synthetic construct
MERNSSS

SEQ ID NO: 19330 - protein, 7 aa, synthetic construct
GGERSTW

SEQ ID NO: 19331 - protein, 7 aa, synthetic construct
WHSTNGL

SEQ ID NO: 19332 - protein, 7 aa, synthetic construct
GGSDRIW

SEQ ID NO: 19333 - protein, 7 aa, synthetic construct
CAVVCSS

SEQ ID NO: 19334 - protein, 7 aa, synthetic construct
VFSRLDT

SEQ ID NO: 19335 - protein, 7 aa, synthetic construct
GHCGATV

SEQ ID NO: 19336 - protein, 7 aa, synthetic construct
GVAGASF

SEQ ID NO: 19337 - protein, 7 aa, synthetic construct
AGEWVTY

SEQ ID NO: 19338 - protein, 7 aa, synthetic construct
LEHRLVN

SEQ ID NO: 19339 - protein, 7 aa, synthetic construct
DSASRAW

SEQ ID NO: 19340 - protein, 7 aa, synthetic construct
GCCTNEV

SEQ ID NO: 19341 - protein, 7 aa, synthetic construct
YSRASDD

SEQ ID NO: 19342 - protein, 7 aa, synthetic construct
MWNGINP

SEQ ID NO: 19343 - protein, 7 aa, synthetic construct
GGMGVSW

SEQ ID NO: 19344 - protein, 7 aa, synthetic construct
CCDPSNV

SEQ ID NO: 19345 - protein, 7 aa, synthetic construct
GIPNCRE

SEQ ID NO: 19346 - protein, 7 aa, synthetic construct
LCKLAQP

SEQ ID NO: 19347 - protein, 7 aa, synthetic construct
PRSTHGV

SEQ ID NO: 19348 - protein, 7 aa, synthetic construct
EMHADVI

SEQ ID NO: 19349 - protein, 7 aa, synthetic construct
LITKPGY

SEQ ID NO: 19350 - protein, 7 aa, synthetic construct
TIADAYP

SEQ ID NO: 19351 - protein, 7 aa, synthetic construct
TMRDAFP

SEQ ID NO: 19352 - protein, 7 aa, synthetic construct
ATNWRLA

SEQ ID NO: 19353 - protein, 7 aa, synthetic construct
SAQSWTD

SEQ ID NO: 19354 - protein, 7 aa, synthetic construct
LHASQMN

SEQ ID NO: 19355 - protein, 7 aa, synthetic construct
MHRLSMD

SEQ ID NO: 19356 - protein, 7 aa, synthetic construct
VAQAGAG

SEQ ID NO: 19357 - protein, 7 aa, synthetic construct
GAPDSIR

SEQ ID NO: 19358 - protein, 7 aa, synthetic construct
REDFSTF

SEQ ID NO: 19359 - protein, 7 aa, synthetic construct
HEDSCSA

SEQ ID NO: 19360 - protein, 7 aa, synthetic construct
YYSGRSE

SEQ ID NO: 19361 - protein, 7 aa, synthetic construct
FFNTAHS

SEQ ID NO: 19362 - protein, 7 aa, synthetic construct
YVKSQGV

SEQ ID NO: 19363 - protein, 7 aa, synthetic construct
CTKNVNA

SEQ ID NO: 19364 - protein, 7 aa, synthetic construct
MVSCGGC

SEQ ID NO: 19365 - protein, 7 aa, synthetic construct
SASTAKS

SEQ ID NO: 19366 - protein, 7 aa, synthetic construct
VMSEASW

SEQ ID NO: 19367 - protein, 7 aa, synthetic construct
LGAATCQ

SEQ ID NO: 19368 - protein, 7 aa, synthetic construct
CCGNVKI

SEQ ID NO: 19369 - protein, 7 aa, synthetic construct
SGEYTPF

SEQ ID NO: 19370 - protein, 7 aa, synthetic construct
CKVSANL

SEQ ID NO: 19371 - protein, 7 aa, synthetic construct
GSDTSRW

SEQ ID NO: 19372 - protein, 7 aa, synthetic construct
RCPFVET

SEQ ID NO: 19373 - protein, 7 aa, synthetic construct
MLSLCCA

SEQ ID NO: 19374 - protein, 7 aa, synthetic construct
QNCVDRC

SEQ ID NO: 19375 - protein, 7 aa, synthetic construct
FEVPGDK

SEQ ID NO: 19376 - protein, 7 aa, synthetic construct
PGASSVW

SEQ ID NO: 19377 - protein, 7 aa, synthetic construct
GFGDFQN

SEQ ID NO: 19378 - protein, 7 aa, synthetic construct
STAGTSC

SEQ ID NO: 19379 - protein, 7 aa, synthetic construct
GMVPRDM

SEQ ID NO: 19380 - protein, 7 aa, synthetic construct
CSNKCTV

SEQ ID NO: 19381 - protein, 7 aa, synthetic construct
WWSGTPD

SEQ ID NO: 19382 - protein, 7 aa, synthetic construct
ECLASCR

SEQ ID NO: 19383 - protein, 7 aa, synthetic construct
FDASTLS

SEQ ID NO: 19384 - protein, 7 aa, synthetic construct
ITERVNT

SEQ ID NO: 19385 - protein, 7 aa, synthetic construct
YSKAAPL

SEQ ID NO: 19386 - protein, 7 aa, synthetic construct
GLSSSSW

SEQ ID NO: 19387 - protein, 7 aa, synthetic construct
RLENPHT

SEQ ID NO: 19388 - protein, 7 aa, synthetic construct
KLDEVYP

SEQ ID NO: 19389 - protein, 7 aa, synthetic construct
PSAKNLG

SEQ ID NO: 19390 - protein, 7 aa, synthetic construct
EGPPPRN

SEQ ID NO: 19391 - protein, 7 aa, synthetic construct
VGQQVVL

SEQ ID NO: 19392 - protein, 7 aa, synthetic construct
VSDFDIF

SEQ ID NO: 19393 - protein, 7 aa, synthetic construct
GSFRQGG

SEQ ID NO: 19394 - protein, 7 aa, synthetic construct
HEPSRTW

SEQ ID NO: 19395 - protein, 7 aa, synthetic construct
TGVHVTP

SEQ ID NO: 19396 - protein, 7 aa, synthetic construct
CMQLKSH

SEQ ID NO: 19397 - protein, 7 aa, synthetic construct
HDAFSSW

SEQ ID NO: 19398 - protein, 7 aa, synthetic construct
TWHGDGP

SEQ ID NO: 19399 - protein, 7 aa, synthetic construct
WGSQGGT

SEQ ID NO: 19400 - protein, 7 aa, synthetic construct
IEGLRAS

SEQ ID NO: 19401 - protein, 7 aa, synthetic construct
LSRISMD

SEQ ID NO: 19402 - protein, 7 aa, synthetic construct
CERNECP

SEQ ID NO: 19403 - protein, 7 aa, synthetic construct
DYESACV

SEQ ID NO: 19404 - protein, 7 aa, synthetic construct
AWDNEAM

SEQ ID NO: 19405 - protein, 7 aa, synthetic construct
KNGSSSW

SEQ ID NO: 19406 - protein, 7 aa, synthetic construct
TDSEWRD

SEQ ID NO: 19407 - protein, 7 aa, synthetic construct
CCGPGKS

SEQ ID NO: 19408 - protein, 7 aa, synthetic construct
VSDTNGI

SEQ ID NO: 19409 - protein, 7 aa, synthetic construct
MGLGLHI

SEQ ID NO: 19410 - protein, 7 aa, synthetic construct
CVIVKQV

SEQ ID NO: 19411 - protein, 7 aa, synthetic construct
SEICSSP

SEQ ID NO: 19412 - protein, 7 aa, synthetic construct
CAAGTSP

SEQ ID NO: 19413 - protein, 7 aa, synthetic construct
ICGAPCV

SEQ ID NO: 19414 - protein, 7 aa, synthetic construct
DSMATER

SEQ ID NO: 19415 - protein, 7 aa, synthetic construct
FCLGNSG

SEQ ID NO: 19416 - protein, 7 aa, synthetic construct
NDGRSGW

SEQ ID NO: 19417 - protein, 7 aa, synthetic construct
GPTSVLW

SEQ ID NO: 19418 - protein, 7 aa, synthetic construct
DRIFLSA

SEQ ID NO: 19419 - protein, 7 aa, synthetic construct
MDNAAQR

SEQ ID NO: 19420 - protein, 7 aa, synthetic construct
ADGGTVY

SEQ ID NO: 19421 - protein, 7 aa, synthetic construct
YWSRVSE

SEQ ID NO: 19422 - protein, 7 aa, synthetic construct
WSERLRS

SEQ ID NO: 19423 - protein, 7 aa, synthetic construct
YWEGVTS

SEQ ID NO: 19424 - protein, 7 aa, synthetic construct
VKGIAVS

SEQ ID NO: 19425 - protein, 7 aa, synthetic construct
CVASYTC

SEQ ID NO: 19426 - protein, 7 aa, synthetic construct
KEFLSDR

SEQ ID NO: 19427 - protein, 7 aa, synthetic construct
WEFKHLG

SEQ ID NO: 19428 - protein, 7 aa, synthetic construct
PMHATSW

SEQ ID NO: 19429 - protein, 7 aa, synthetic construct
DKKSDLV

SEQ ID NO: 19430 - protein, 7 aa, synthetic construct
RVELSPL

SEQ ID NO: 19431 - protein, 7 aa, synthetic construct
SACKTTE

SEQ ID NO: 19432 - protein, 7 aa, synthetic construct
IPNRCEA

SEQ ID NO: 19433 - protein, 7 aa, synthetic construct
CNPSSEK

SEQ ID NO: 19434 - protein, 7 aa, synthetic construct
LSHCCDS

SEQ ID NO: 19435 - protein, 7 aa, synthetic construct
GINVPTG

SEQ ID NO: 19436 - protein, 7 aa, synthetic construct
CGVKCQL

SEQ ID NO: 19437 - protein, 7 aa, synthetic construct
SGTFSGE

SEQ ID NO: 19438 - protein, 7 aa, synthetic construct
LVICRGH

SEQ ID NO: 19439 - protein, 7 aa, synthetic construct
LSVNSSG

SEQ ID NO: 19440 - protein, 7 aa, synthetic construct
LHKLSVT

SEQ ID NO: 19441 - protein, 7 aa, synthetic construct
YFSGQAE

SEQ ID NO: 19442 - protein, 7 aa, synthetic construct
YVLSDSR

SEQ ID NO: 19443 - protein, 7 aa, synthetic construct
ELIGGGS

SEQ ID NO: 19444 - protein, 7 aa, synthetic construct
MTVDCSR

SEQ ID NO: 19445 - protein, 7 aa, synthetic construct
LEYHKVP

SEQ ID NO: 19446 - protein, 7 aa, synthetic construct
VGTFREG

SEQ ID NO: 19447 - protein, 7 aa, synthetic construct
VPDAVRW

SEQ ID NO: 19448 - protein, 7 aa, synthetic construct
IGGSSGW

SEQ ID NO: 19449 - protein, 7 aa, synthetic construct
EMFLNGV

SEQ ID NO: 19450 - protein, 7 aa, synthetic construct
SGKGWSA

SEQ ID NO: 19451 - protein, 7 aa, synthetic construct
GASAGTF

SEQ ID NO: 19452 - protein, 7 aa, synthetic construct
RGVYSNV

SEQ ID NO: 19453 - protein, 7 aa, synthetic construct
GGGDQRW

SEQ ID NO: 19454 - protein, 7 aa, synthetic construct
DLDHEGV

SEQ ID NO: 19455 - protein, 7 aa, synthetic construct
PGNSHAW

SEQ ID NO: 19456 - protein, 7 aa, synthetic construct
CSLGSDR

SEQ ID NO: 19457 - protein, 7 aa, synthetic construct
VTASGCA

SEQ ID NO: 19458 - protein, 7 aa, synthetic construct
LGLKGWD

SEQ ID NO: 19459 - protein, 7 aa, synthetic construct
VEGVTGH

SEQ ID NO: 19460 - protein, 7 aa, synthetic construct
IGHVSDW

SEQ ID NO: 19461 - protein, 7 aa, synthetic construct
GRNFGTP

SEQ ID NO: 19462 - protein, 7 aa, synthetic construct
YFSAVTA

SEQ ID NO: 19463 - protein, 7 aa, synthetic construct
SGGTSLW

SEQ ID NO: 19464 - protein, 7 aa, synthetic construct
GLMHEHL

SEQ ID NO: 19465 - protein, 7 aa, synthetic construct
SQDCCGP

SEQ ID NO: 19466 - protein, 7 aa, synthetic construct
LWTGAGP

SEQ ID NO: 19467 - protein, 7 aa, synthetic construct
VTGDRIV

SEQ ID NO: 19468 - protein, 7 aa, synthetic construct
RSMDIFP

SEQ ID NO: 19469 - protein, 7 aa, synthetic construct
FFSGTLE

SEQ ID NO: 19470 - protein, 7 aa, synthetic construct
CEFQKCP

SEQ ID NO: 19471 - protein, 7 aa, synthetic construct
VEMGRTG

SEQ ID NO: 19472 - protein, 7 aa, synthetic construct
TSLVRVS

SEQ ID NO: 19473 - protein, 7 aa, synthetic construct
SMLKYPS

SEQ ID NO: 19474 - protein, 7 aa, synthetic construct
YFSLERD

SEQ ID NO: 19475 - protein, 7 aa, synthetic construct
GGDLRQQ

SEQ ID NO: 19476 - protein, 7 aa, synthetic construct
IRGGGAG

SEQ ID NO: 19477 - protein, 7 aa, synthetic construct
AWTEANR

SEQ ID NO: 19478 - protein, 7 aa, synthetic construct
GGNGSSY

SEQ ID NO: 19479 - protein, 7 aa, synthetic construct
GVTEIKC

SEQ ID NO: 19480 - protein, 7 aa, synthetic construct
LVTHGSL

SEQ ID NO: 19481 - protein, 7 aa, synthetic construct
GMRDSVT

SEQ ID NO: 19482 - protein, 7 aa, synthetic construct
GDLFLAV

SEQ ID NO: 19483 - protein, 7 aa, synthetic construct
ELTSDPG

SEQ ID NO: 19484 - protein, 7 aa, synthetic construct
ALGMPLQ

SEQ ID NO: 19485 - protein, 7 aa, synthetic construct
FSRLNDD

SEQ ID NO: 19486 - protein, 7 aa, synthetic construct
FSVGICS

SEQ ID NO: 19487 - protein, 7 aa, synthetic construct
SRVTYRE

SEQ ID NO: 19488 - protein, 7 aa, synthetic construct
LCLGACT

SEQ ID NO: 19489 - protein, 7 aa, synthetic construct
GGAGSAW

SEQ ID NO: 19490 - protein, 7 aa, synthetic construct
DSSPSCP

SEQ ID NO: 19491 - protein, 7 aa, synthetic construct
GLSSPLW

SEQ ID NO: 19492 - protein, 7 aa, synthetic construct
CITREHV

SEQ ID NO: 19493 - protein, 7 aa, synthetic construct
NAPVGAG

SEQ ID NO: 19494 - protein, 7 aa, synthetic construct
VPSSVTW

SEQ ID NO: 19495 - protein, 7 aa, synthetic construct
YSRVQGD

SEQ ID NO: 19496 - protein, 7 aa, synthetic construct
LSKIGYN

SEQ ID NO: 19497 - protein, 7 aa, synthetic construct
RGEGRLY

SEQ ID NO: 19498 - protein, 7 aa, synthetic construct
KVGEQTR

SEQ ID NO: 19499 - protein, 7 aa, synthetic construct
SLSTENL

SEQ ID NO: 19500 - protein, 7 aa, synthetic construct
ACSTIHL

SEQ ID NO: 19501 - protein, 7 aa, synthetic construct
DQAVRVS

SEQ ID NO: 19502 - protein, 7 aa, synthetic construct
DSTSQLS

SEQ ID NO: 19503 - protein, 7 aa, synthetic construct
GAGTSGW

SEQ ID NO: 19504 - protein, 7 aa, synthetic construct
DPSTQLW

SEQ ID NO: 19505 - protein, 7 aa, synthetic construct
QGASSSW

SEQ ID NO: 19506 - protein, 7 aa, synthetic construct
LVKCVVG

SEQ ID NO: 19507 - protein, 7 aa, synthetic construct
WSSTKTH

SEQ ID NO: 19508 - protein, 7 aa, synthetic construct
VPYETPV

SEQ ID NO: 19509 - protein, 7 aa, synthetic construct
VGADRQW

SEQ ID NO: 19510 - protein, 7 aa, synthetic construct
WRAEVSR

SEQ ID NO: 19511 - protein, 7 aa, synthetic construct
IVAGYSF

SEQ ID NO: 19512 - protein, 7 aa, synthetic construct
TRTGENA

SEQ ID NO: 19513 - protein, 7 aa, synthetic construct
VCSGAEG

SEQ ID NO: 19514 - protein, 7 aa, synthetic construct
DFKALGT

SEQ ID NO: 19515 - protein, 7 aa, synthetic construct
DSFGNAA

SEQ ID NO: 19516 - protein, 7 aa, synthetic construct
DPFAPSW

SEQ ID NO: 19517 - protein, 7 aa, synthetic construct
LWDAQGK

SEQ ID NO: 19518 - protein, 7 aa, synthetic construct
FNSSVGF

SEQ ID NO: 19519 - protein, 7 aa, synthetic construct
IGNGTWN

SEQ ID NO: 19520 - protein, 7 aa, synthetic construct
KSGTVGE

SEQ ID NO: 19521 - protein, 7 aa, synthetic construct
VAMSSCC

SEQ ID NO: 19522 - protein, 7 aa, synthetic construct
VDTIVCE

SEQ ID NO: 19523 - protein, 7 aa, synthetic construct
FGGHSSY

SEQ ID NO: 19524 - protein, 7 aa, synthetic construct
FGRCDIT

SEQ ID NO: 19525 - protein, 7 aa, synthetic construct
YYTAVVG

SEQ ID NO: 19526 - protein, 7 aa, synthetic construct
YVFSGPV

SEQ ID NO: 19527 - protein, 7 aa, synthetic construct
PGQIMTA

SEQ ID NO: 19528 - protein, 7 aa, synthetic construct
IDYAPGE

SEQ ID NO: 19529 - protein, 7 aa, synthetic construct
ESATLVL

SEQ ID NO: 19530 - protein, 7 aa, synthetic construct
SDPKIVA

SEQ ID NO: 19531 - protein, 7 aa, synthetic construct
LQKFDRS

SEQ ID NO: 19532 - protein, 7 aa, synthetic construct
CCKSVTA

SEQ ID NO: 19533 - protein, 7 aa, synthetic construct
GLSSAVW

SEQ ID NO: 19534 - protein, 7 aa, synthetic construct
NGVWTNP

SEQ ID NO: 19535 - protein, 7 aa, synthetic construct
VTTRGPN

SEQ ID NO: 19536 - protein, 7 aa, synthetic construct
STEWIPY

SEQ ID NO: 19537 - protein, 7 aa, synthetic construct
DVSSRTW

SEQ ID NO: 19538 - protein, 7 aa, synthetic construct
SDGVSVR

SEQ ID NO: 19539 - protein, 7 aa, synthetic construct
FESNEPW

SEQ ID NO: 19540 - protein, 7 aa, synthetic construct
GSVGNAW

SEQ ID NO: 19541 - protein, 7 aa, synthetic construct
VPGIPVN

SEQ ID NO: 19542 - protein, 7 aa, synthetic construct
VCNGNIC

SEQ ID NO: 19543 - protein, 7 aa, synthetic construct
VATEGRD

SEQ ID NO: 19544 - protein, 7 aa, synthetic construct
REGIESW

SEQ ID NO: 19545 - protein, 7 aa, synthetic construct
AVEGCCG

SEQ ID NO: 19546 - protein, 7 aa, synthetic construct
ISGISMY

SEQ ID NO: 19547 - protein, 7 aa, synthetic construct
DWSRCSK

SEQ ID NO: 19548 - protein, 7 aa, synthetic construct
YWAGVES

SEQ ID NO: 19549 - protein, 7 aa, synthetic construct
FYSGVLS

SEQ ID NO: 19550 - protein, 7 aa, synthetic construct
RVADCAP

SEQ ID NO: 19551 - protein, 7 aa, synthetic construct
YIAGCGN

SEQ ID NO: 19552 - protein, 7 aa, synthetic construct
GSGQSIW

SEQ ID NO: 19553 - protein, 7 aa, synthetic construct
SLSSTTW

SEQ ID NO: 19554 - protein, 7 aa, synthetic construct
SLGGSTW

SEQ ID NO: 19555 - protein, 7 aa, synthetic construct
PIRVSDV

SEQ ID NO: 19556 - protein, 7 aa, synthetic construct
SCSTGYP

SEQ ID NO: 19557 - protein, 7 aa, synthetic construct
VGVSSSG

SEQ ID NO: 19558 - protein, 7 aa, synthetic construct
GLVSSAM

SEQ ID NO: 19559 - protein, 7 aa, synthetic construct
VGCAHLP

SEQ ID NO: 19560 - protein, 7 aa, synthetic construct
LHALSTD

SEQ ID NO: 19561 - protein, 7 aa, synthetic construct
ELDSRDW

SEQ ID NO: 19562 - protein, 7 aa, synthetic construct
DVRTDSN

SEQ ID NO: 19563 - protein, 7 aa, synthetic construct
VAGQITI

SEQ ID NO: 19564 - protein, 7 aa, synthetic construct
GVDRHMP

SEQ ID NO: 19565 - protein, 7 aa, synthetic construct
GCIIPGV

SEQ ID NO: 19566 - protein, 7 aa, synthetic construct
RLDDVLW

SEQ ID NO: 19567 - protein, 7 aa, synthetic construct
GGSTSVW

SEQ ID NO: 19568 - protein, 7 aa, synthetic construct
YFSGRES

SEQ ID NO: 19569 - protein, 7 aa, synthetic construct
GSSSSAW

SEQ ID NO: 19570 - protein, 7 aa, synthetic construct
RDRNSYV

SEQ ID NO: 19571 - protein, 7 aa, synthetic construct
LGGVLTV

SEQ ID NO: 19572 - protein, 7 aa, synthetic construct
MVACGCG

SEQ ID NO: 19573 - protein, 7 aa, synthetic construct
CDGVGVA

SEQ ID NO: 19574 - protein, 7 aa, synthetic construct
SGSTSGW

SEQ ID NO: 19575 - protein, 7 aa, synthetic construct
ELSSREW

SEQ ID NO: 19576 - protein, 7 aa, synthetic construct
GVKMNCS

SEQ ID NO: 19577 - protein, 7 aa, synthetic construct
WLKQTLL

SEQ ID NO: 19578 - protein, 7 aa, synthetic construct
RDIDCLS

SEQ ID NO: 19579 - protein, 7 aa, synthetic construct
RIYDAVP

SEQ ID NO: 19580 - protein, 7 aa, synthetic construct
GRAYAHP

SEQ ID NO: 19581 - protein, 7 aa, synthetic construct
VAGRCCR

SEQ ID NO: 19582 - protein, 7 aa, synthetic construct
GSAGVSW

SEQ ID NO: 19583 - protein, 7 aa, synthetic construct
MEVRESG

SEQ ID NO: 19584 - protein, 7 aa, synthetic construct
REGVSAW

SEQ ID NO: 19585 - protein, 7 aa, synthetic construct
TWEGSPA

SEQ ID NO: 19586 - protein, 7 aa, synthetic construct
GSHGVSW

SEQ ID NO: 19587 - protein, 7 aa, synthetic construct
GVRNVMP

SEQ ID NO: 19588 - protein, 7 aa, synthetic construct
DDSFYPS

SEQ ID NO: 19589 - protein, 7 aa, synthetic construct
LDICCKV

SEQ ID NO: 19590 - protein, 7 aa, synthetic construct
VGVSPLW

SEQ ID NO: 19591 - protein, 7 aa, synthetic construct
ALLAARS

SEQ ID NO: 19592 - protein, 7 aa, synthetic construct
DAYSGRD

SEQ ID NO: 19593 - protein, 7 aa, synthetic construct
GQDGNAW

SEQ ID NO: 19594 - protein, 7 aa, synthetic construct
SSGTSLW

SEQ ID NO: 19595 - protein, 7 aa, synthetic construct
SGASPLW

SEQ ID NO: 19596 - protein, 7 aa, synthetic construct
LLGVCDA

SEQ ID NO: 19597 - protein, 7 aa, synthetic construct
FVDPRCT

SEQ ID NO: 19598 - protein, 7 aa, synthetic construct
LASRDAA

SEQ ID NO: 19599 - protein, 7 aa, synthetic construct
TVHSLSD

SEQ ID NO: 19600 - protein, 7 aa, synthetic construct
GLKVGAI

SEQ ID NO: 19601 - protein, 7 aa, synthetic construct
QSSPLVR

SEQ ID NO: 19602 - protein, 7 aa, synthetic construct
VDDWSMY

SEQ ID NO: 19603 - protein, 7 aa, synthetic construct
DALEWRD

SEQ ID NO: 19604 - protein, 7 aa, synthetic construct
LSRAGFD

SEQ ID NO: 19605 - protein, 7 aa, synthetic construct
IFAGPGP

SEQ ID NO: 19606 - protein, 7 aa, synthetic construct
AMESTQW

SEQ ID NO: 19607 - protein, 7 aa, synthetic construct
HNIGRDV

SEQ ID NO: 19608 - protein, 7 aa, synthetic construct
RSETVYV

SEQ ID NO: 19609 - protein, 7 aa, synthetic construct
DEGNFRS

SEQ ID NO: 19610 - protein, 7 aa, synthetic construct
SRCEKVV

SEQ ID NO: 19611 - protein, 7 aa, synthetic construct
RTGSFCI

SEQ ID NO: 19612 - protein, 7 aa, synthetic construct
CGRSGTH

SEQ ID NO: 19613 - protein, 7 aa, synthetic construct
GELTVKW

SEQ ID NO: 19614 - protein, 7 aa, synthetic construct
YARNAPS

SEQ ID NO: 19615 - protein, 7 aa, synthetic construct
VDDWSLY

SEQ ID NO: 19616 - protein, 7 aa, synthetic construct
VTDYVTY

SEQ ID NO: 19617 - protein, 7 aa, synthetic construct
CTSGNEA

SEQ ID NO: 19618 - protein, 7 aa, synthetic construct
NESTSSW

SEQ ID NO: 19619 - protein, 7 aa, synthetic construct
CDSPCTA

SEQ ID NO: 19620 - protein, 7 aa, synthetic construct
RMMSGDW

SEQ ID NO: 19621 - protein, 7 aa, synthetic construct
LHGGCCA

SEQ ID NO: 19622 - protein, 7 aa, synthetic construct
VVNPGHD

SEQ ID NO: 19623 - protein, 7 aa, synthetic construct
SHDSCQN

SEQ ID NO: 19624 - protein, 7 aa, synthetic construct
VPPELHA

SEQ ID NO: 19625 - protein, 7 aa, synthetic construct
LLHTGNW

SEQ ID NO: 19626 - protein, 7 aa, synthetic construct
YNASGGN

SEQ ID NO: 19627 - protein, 7 aa, synthetic construct
DMTSSVW

SEQ ID NO: 19628 - protein, 7 aa, synthetic construct
ISGQSGW

SEQ ID NO: 19629 - protein, 7 aa, synthetic construct
VCCGPRG

SEQ ID NO: 19630 - protein, 7 aa, synthetic construct
LYEFDHT

SEQ ID NO: 19631 - protein, 7 aa, synthetic construct
LVNSVAR

SEQ ID NO: 19632 - protein, 7 aa, synthetic construct
LAASCCV

SEQ ID NO: 19633 - protein, 7 aa, synthetic construct
QLPGNCG

SEQ ID NO: 19634 - protein, 7 aa, synthetic construct
WHHGTNV

SEQ ID NO: 19635 - protein, 7 aa, synthetic construct
LSKLSYD

SEQ ID NO: 19636 - protein, 7 aa, synthetic construct
VHREDGV

SEQ ID NO: 19637 - protein, 7 aa, synthetic construct
GMDSNSV

SEQ ID NO: 19638 - protein, 7 aa, synthetic construct
ELGSHTW

SEQ ID NO: 19639 - protein, 7 aa, synthetic construct
SHALAPG

SEQ ID NO: 19640 - protein, 7 aa, synthetic construct
RGESVSW

SEQ ID NO: 19641 - protein, 7 aa, synthetic construct
RAIDSPM

SEQ ID NO: 19642 - protein, 7 aa, synthetic construct
GGSASTW

SEQ ID NO: 19643 - protein, 7 aa, synthetic construct
RMDDSYA

SEQ ID NO: 19644 - protein, 7 aa, synthetic construct
SFWGDLP

SEQ ID NO: 19645 - protein, 7 aa, synthetic construct
DEWTLSP

SEQ ID NO: 19646 - protein, 7 aa, synthetic construct
SWTGQAA

SEQ ID NO: 19647 - protein, 7 aa, synthetic construct
VANAGWD

SEQ ID NO: 19648 - protein, 7 aa, synthetic construct
DLSSNSW

SEQ ID NO: 19649 - protein, 7 aa, synthetic construct
VGYVGIG

SEQ ID NO: 19650 - protein, 7 aa, synthetic construct
VPQSVHW

SEQ ID NO: 19651 - protein, 7 aa, synthetic construct
MESQVRW

SEQ ID NO: 19652 - protein, 7 aa, synthetic construct
DGSARLW

SEQ ID NO: 19653 - protein, 7 aa, synthetic construct
RALSGAG

SEQ ID NO: 19654 - protein, 7 aa, synthetic construct
KFDFNAV

SEQ ID NO: 19655 - protein, 7 aa, synthetic construct
ANDYMSY

SEQ ID NO: 19656 - protein, 7 aa, synthetic construct
PARGETW

SEQ ID NO: 19657 - protein, 7 aa, synthetic construct
WLAASDK

SEQ ID NO: 19658 - protein, 7 aa, synthetic construct
GSREVAW

SEQ ID NO: 19659 - protein, 7 aa, synthetic construct
MLLESCG

SEQ ID NO: 19660 - protein, 7 aa, synthetic construct
VAHEGIG

SEQ ID NO: 19661 - protein, 7 aa, synthetic construct
MERGGST

SEQ ID NO: 19662 - protein, 7 aa, synthetic construct
YPNGNAG

SEQ ID NO: 19663 - protein, 7 aa, synthetic construct
YLKNDPL

SEQ ID NO: 19664 - protein, 7 aa, synthetic construct
DQSAHSW

SEQ ID NO: 19665 - protein, 7 aa, synthetic construct
VSTRPYS

SEQ ID NO: 19666 - protein, 7 aa, synthetic construct
REHTSNW

SEQ ID NO: 19667 - protein, 7 aa, synthetic construct
GRGQTGE

SEQ ID NO: 19668 - protein, 7 aa, synthetic construct
SVRPSHE

SEQ ID NO: 19669 - protein, 7 aa, synthetic construct
FASSMCC

SEQ ID NO: 19670 - protein, 7 aa, synthetic construct
PYSSIME

SEQ ID NO: 19671 - protein, 7 aa, synthetic construct
GSEVSSW

SEQ ID NO: 19672 - protein, 7 aa, synthetic construct
SEAGNTF

SEQ ID NO: 19673 - protein, 7 aa, synthetic construct
GQSTSSW

SEQ ID NO: 19674 - protein, 7 aa, synthetic construct
CVVDVRC

SEQ ID NO: 19675 - protein, 7 aa, synthetic construct
EPNGRGV

SEQ ID NO: 19676 - protein, 7 aa, synthetic construct
YFMGVRE

SEQ ID NO: 19677 - protein, 7 aa, synthetic construct
EGAETTP

SEQ ID NO: 19678 - protein, 7 aa, synthetic construct
CGCVMSP

SEQ ID NO: 19679 - protein, 7 aa, synthetic construct
ITGFSTD

SEQ ID NO: 19680 - protein, 7 aa, synthetic construct
ADGSQGA

SEQ ID NO: 19681 - protein, 7 aa, synthetic construct
YSANGPN

SEQ ID NO: 19682 - protein, 7 aa, synthetic construct
VDQASRA

SEQ ID NO: 19683 - protein, 7 aa, synthetic construct
SKFQRMD

SEQ ID NO: 19684 - protein, 7 aa, synthetic construct
ISCGTCD

SEQ ID NO: 19685 - protein, 7 aa, synthetic construct
ITSTNGA

SEQ ID NO: 19686 - protein, 7 aa, synthetic construct
TLGGNGC

SEQ ID NO: 19687 - protein, 7 aa, synthetic construct
DGSSSKW

SEQ ID NO: 19688 - protein, 7 aa, synthetic construct
REGYSHW

SEQ ID NO: 19689 - protein, 7 aa, synthetic construct
DRLPASH

SEQ ID NO: 19690 - protein, 7 aa, synthetic construct
GLPDRTW

SEQ ID NO: 19691 - protein, 7 aa, synthetic construct
SGFSESN

SEQ ID NO: 19692 - protein, 7 aa, synthetic construct
TVGVEWT

SEQ ID NO: 19693 - protein, 7 aa, synthetic construct
GGSTSGW

SEQ ID NO: 19694 - protein, 7 aa, synthetic construct
GELCCVG

SEQ ID NO: 19695 - protein, 7 aa, synthetic construct
PLASGSW

SEQ ID NO: 19696 - protein, 7 aa, synthetic construct
CKPSGVM

SEQ ID NO: 19697 - protein, 7 aa, synthetic construct
YVRSSDQ

SEQ ID NO: 19698 - protein, 7 aa, synthetic construct
VMSVSSW

SEQ ID NO: 19699 - protein, 7 aa, synthetic construct
SSDLASG

SEQ ID NO: 19700 - protein, 7 aa, synthetic construct
GCCDKPM

SEQ ID NO: 19701 - protein, 7 aa, synthetic construct
ELEGFQY

SEQ ID NO: 19702 - protein, 7 aa, synthetic construct
LDYLPPE

SEQ ID NO: 19703 - protein, 7 aa, synthetic construct
CQGLRLC

SEQ ID NO: 19704 - protein, 7 aa, synthetic construct
RFDGTPP

SEQ ID NO: 19705 - protein, 7 aa, synthetic construct
GESSHNL

SEQ ID NO: 19706 - protein, 7 aa, synthetic construct
RSEFTEY

SEQ ID NO: 19707 - protein, 7 aa, synthetic construct
APVSREW

SEQ ID NO: 19708 - protein, 7 aa, synthetic construct
GLPCCSA

SEQ ID NO: 19709 - protein, 7 aa, synthetic construct
YGPSTCN

SEQ ID NO: 19710 - protein, 7 aa, synthetic construct
IESREGI

SEQ ID NO: 19711 - protein, 7 aa, synthetic construct
GHCGRDC

SEQ ID NO: 19712 - protein, 7 aa, synthetic construct
IGSPTGV

SEQ ID NO: 19713 - protein, 7 aa, synthetic construct
WWSAMPN

SEQ ID NO: 19714 - protein, 7 aa, synthetic construct
HGDPMRW

SEQ ID NO: 19715 - protein, 7 aa, synthetic construct
CERRCVD

SEQ ID NO: 19716 - protein, 7 aa, synthetic construct
FVLLGDG

SEQ ID NO: 19717 - protein, 7 aa, synthetic construct
KCQGGCA

SEQ ID NO: 19718 - protein, 7 aa, synthetic construct
ITSFNGV

SEQ ID NO: 19719 - protein, 7 aa, synthetic construct
ISGGGAG

SEQ ID NO: 19720 - protein, 7 aa, synthetic construct
VNNSCLT

SEQ ID NO: 19721 - protein, 7 aa, synthetic construct
LDDYSMY

SEQ ID NO: 19722 - protein, 7 aa, synthetic construct
AGGTSLW

SEQ ID NO: 19723 - protein, 7 aa, synthetic construct
LETCCTA

SEQ ID NO: 19724 - protein, 7 aa, synthetic construct
WYSNIKD

SEQ ID NO: 19725 - protein, 7 aa, synthetic construct
SPSRTRP

SEQ ID NO: 19726 - protein, 7 aa, synthetic construct
WFSNIQA

SEQ ID NO: 19727 - protein, 7 aa, synthetic construct
SGAYMRA

SEQ ID NO: 19728 - protein, 7 aa, synthetic construct
RVTWVVG

SEQ ID NO: 19729 - protein, 7 aa, synthetic construct
SADAVRW

SEQ ID NO: 19730 - protein, 7 aa, synthetic construct
SWARSVE

SEQ ID NO: 19731 - protein, 7 aa, synthetic construct
GYAVSEC

SEQ ID NO: 19732 - protein, 7 aa, synthetic construct
QDVKGKW

SEQ ID NO: 19733 - protein, 7 aa, synthetic construct
CNQGGTV

SEQ ID NO: 19734 - protein, 7 aa, synthetic construct
ACRHGGP

SEQ ID NO: 19735 - protein, 7 aa, synthetic construct
NGRGGEW

SEQ ID NO: 19736 - protein, 7 aa, synthetic construct
REGGHLN

SEQ ID NO: 19737 - protein, 7 aa, synthetic construct
QSSLTQD

SEQ ID NO: 19738 - protein, 7 aa, synthetic construct
IQSSSGI

SEQ ID NO: 19739 - protein, 7 aa, synthetic construct
PYAVSPL

SEQ ID NO: 19740 - protein, 7 aa, synthetic construct
SKDCCIG

SEQ ID NO: 19741 - protein, 7 aa, synthetic construct
DHSAGSG

SEQ ID NO: 19742 - protein, 7 aa, synthetic construct
CINLWVQ

SEQ ID NO: 19743 - protein, 7 aa, synthetic construct
GTVPPGS

SEQ ID NO: 19744 - protein, 7 aa, synthetic construct
KVQDAYP

SEQ ID NO: 19745 - protein, 7 aa, synthetic construct
QFAYSRE

SEQ ID NO: 19746 - protein, 7 aa, synthetic construct
SDGFRIS

SEQ ID NO: 19747 - protein, 7 aa, synthetic construct
GSRAMYP

SEQ ID NO: 19748 - protein, 7 aa, synthetic construct
YSLVSTK

SEQ ID NO: 19749 - protein, 7 aa, synthetic construct
CAPSMEK

SEQ ID NO: 19750 - protein, 7 aa, synthetic construct
GSGPCCA

SEQ ID NO: 19751 - protein, 7 aa, synthetic construct
CLERSTL

SEQ ID NO: 19752 - protein, 7 aa, synthetic construct
NGFDGSW

SEQ ID NO: 19753 - protein, 7 aa, synthetic construct
PIDETCS

SEQ ID NO: 19754 - protein, 7 aa, synthetic construct
WDVGTWN

SEQ ID NO: 19755 - protein, 7 aa, synthetic construct
IMESATW

SEQ ID NO: 19756 - protein, 7 aa, synthetic construct
RDVVNGT

SEQ ID NO: 19757 - protein, 7 aa, synthetic construct
FGGNGLQ

SEQ ID NO: 19758 - protein, 7 aa, synthetic construct
GGDGSAY

SEQ ID NO: 19759 - protein, 7 aa, synthetic construct
GGGFVAY

SEQ ID NO: 19760 - protein, 7 aa, synthetic construct
FAKCSVV

SEQ ID NO: 19761 - protein, 7 aa, synthetic construct
STDYVSW

SEQ ID NO: 19762 - protein, 7 aa, synthetic construct
CGGACAS

SEQ ID NO: 19763 - protein, 7 aa, synthetic construct
CQTSDRP

SEQ ID NO: 19764 - protein, 7 aa, synthetic construct
LCAPAKC

SEQ ID NO: 19765 - protein, 7 aa, synthetic construct
AYRPLSG

SEQ ID NO: 19766 - protein, 7 aa, synthetic construct
WLKGLTD

SEQ ID NO: 19767 - protein, 7 aa, synthetic construct
ELLSSHW

SEQ ID NO: 19768 - protein, 7 aa, synthetic construct
TMGQGVP

SEQ ID NO: 19769 - protein, 7 aa, synthetic construct
CAPAFRE

SEQ ID NO: 19770 - protein, 7 aa, synthetic construct
DWHGLIA

SEQ ID NO: 19771 - protein, 7 aa, synthetic construct
LMGSCCP

SEQ ID NO: 19772 - protein, 7 aa, synthetic construct
NGMTERW

SEQ ID NO: 19773 - protein, 7 aa, synthetic construct
SMCWLLV

SEQ ID NO: 19774 - protein, 7 aa, synthetic construct
SIGVHRA

SEQ ID NO: 19775 - protein, 7 aa, synthetic construct
DSSRAYP

SEQ ID NO: 19776 - protein, 7 aa, synthetic construct
LSRAAHD

SEQ ID NO: 19777 - protein, 7 aa, synthetic construct
TGLATSC

SEQ ID NO: 19778 - protein, 7 aa, synthetic construct
NSDFKVF

SEQ ID NO: 19779 - protein, 7 aa, synthetic construct
GWLKELH

SEQ ID NO: 19780 - protein, 7 aa, synthetic construct
TSDYKTY

SEQ ID NO: 19781 - protein, 7 aa, synthetic construct
TYDNVFR

SEQ ID NO: 19782 - protein, 7 aa, synthetic construct
CIPCVPR

SEQ ID NO: 19783 - protein, 7 aa, synthetic construct
HWDGSAA

SEQ ID NO: 19784 - protein, 7 aa, synthetic construct
TDGKCCM

SEQ ID NO: 19785 - protein, 7 aa, synthetic construct
CIDSCVR

SEQ ID NO: 19786 - protein, 7 aa, synthetic construct
VPGYGAG

SEQ ID NO: 19787 - protein, 7 aa, synthetic construct
PNTTHGG

SEQ ID NO: 19788 - protein, 7 aa, synthetic construct
ASGQSAW

SEQ ID NO: 19789 - protein, 7 aa, synthetic construct
GRIAPHS

SEQ ID NO: 19790 - protein, 7 aa, synthetic construct
CLPGNAC

SEQ ID NO: 19791 - protein, 7 aa, synthetic construct
DSLSGRN

SEQ ID NO: 19792 - protein, 7 aa, synthetic construct
CAGECRA

SEQ ID NO: 19793 - protein, 7 aa, synthetic construct
RDGAVSW

SEQ ID NO: 19794 - protein, 7 aa, synthetic construct
YFAGQAE

SEQ ID NO: 19795 - protein, 7 aa, synthetic construct
WEGGLSG

SEQ ID NO: 19796 - protein, 7 aa, synthetic construct
VDASCSA

SEQ ID NO: 19797 - protein, 7 aa, synthetic construct
HETKVPA

SEQ ID NO: 19798 - protein, 7 aa, synthetic construct
KRDRLYG

SEQ ID NO: 19799 - protein, 7 aa, synthetic construct
RETGVEW

SEQ ID NO: 19800 - protein, 7 aa, synthetic construct
VPMRGAD

SEQ ID NO: 19801 - protein, 7 aa, synthetic construct
LVSKVSC

SEQ ID NO: 19802 - protein, 7 aa, synthetic construct
REPDVRY

SEQ ID NO: 19803 - protein, 7 aa, synthetic construct
LHRTSVD

SEQ ID NO: 19804 - protein, 7 aa, synthetic construct
YWSDKMA

SEQ ID NO: 19805 - protein, 7 aa, synthetic construct
MSRVSNN

SEQ ID NO: 19806 - protein, 7 aa, synthetic construct
KENHVTW

SEQ ID NO: 19807 - protein, 7 aa, synthetic construct
NLGSAHW

SEQ ID NO: 19808 - protein, 7 aa, synthetic construct
GLTGCCG

SEQ ID NO: 19809 - protein, 7 aa, synthetic construct
VPCGLVR

SEQ ID NO: 19810 - protein, 7 aa, synthetic construct
YFQGVAL

SEQ ID NO: 19811 - protein, 7 aa, synthetic construct
SSSSSTW

SEQ ID NO: 19812 - protein, 7 aa, synthetic construct
SVAKMTG

SEQ ID NO: 19813 - protein, 7 aa, synthetic construct
YVRSALN

SEQ ID NO: 19814 - protein, 7 aa, synthetic construct
HKWLDTD

SEQ ID NO: 19815 - protein, 7 aa, synthetic construct
TAGMPGA

SEQ ID NO: 19816 - protein, 7 aa, synthetic construct
AYYLKDS

SEQ ID NO: 19817 - protein, 7 aa, synthetic construct
GGELRTW

SEQ ID NO: 19818 - protein, 7 aa, synthetic construct
LGHGTWD

SEQ ID NO: 19819 - protein, 7 aa, synthetic construct
FPISGCG

SEQ ID NO: 19820 - protein, 7 aa, synthetic construct
FSHVDNG

SEQ ID NO: 19821 - protein, 7 aa, synthetic construct
ESSTHGV

SEQ ID NO: 19822 - protein, 7 aa, synthetic construct
FVCVMLV

SEQ ID NO: 19823 - protein, 7 aa, synthetic construct
YFEGKQS

SEQ ID NO: 19824 - protein, 7 aa, synthetic construct
EWARSLM

SEQ ID NO: 19825 - protein, 7 aa, synthetic construct
NDSTSKW

SEQ ID NO: 19826 - protein, 7 aa, synthetic construct
AADFVRY

SEQ ID NO: 19827 - protein, 7 aa, synthetic construct
LSGSCCA

SEQ ID NO: 19828 - protein, 7 aa, synthetic construct
LFSGEAP

SEQ ID NO: 19829 - protein, 7 aa, synthetic construct
RTADSFA

SEQ ID NO: 19830 - protein, 7 aa, synthetic construct
YTKLNDN

SEQ ID NO: 19831 - protein, 7 aa, synthetic construct
CELPCCE

SEQ ID NO: 19832 - protein, 7 aa, synthetic construct
YIKSDVG

SEQ ID NO: 19833 - protein, 7 aa, synthetic construct
NLLSLAH

SEQ ID NO: 19834 - protein, 7 aa, synthetic construct
GSHDSHW

SEQ ID NO: 19835 - protein, 7 aa, synthetic construct
GSAESCA

SEQ ID NO: 19836 - protein, 7 aa, synthetic construct
TINVAMA

SEQ ID NO: 19837 - protein, 7 aa, synthetic construct
FWNGNSP

SEQ ID NO: 19838 - protein, 7 aa, synthetic construct
AEISRSW

SEQ ID NO: 19839 - protein, 7 aa, synthetic construct
VTDGVRW

SEQ ID NO: 19840 - protein, 7 aa, synthetic construct
YFSAVAA

SEQ ID NO: 19841 - protein, 7 aa, synthetic construct
GEGTSHW

SEQ ID NO: 19842 - protein, 7 aa, synthetic construct
VIDRSLS

SEQ ID NO: 19843 - protein, 7 aa, synthetic construct
INESSKD

SEQ ID NO: 19844 - protein, 7 aa, synthetic construct
EMKAVHA

SEQ ID NO: 19845 - protein, 7 aa, synthetic construct
SGGGSSW

SEQ ID NO: 19846 - protein, 7 aa, synthetic construct
RDEINHW

SEQ ID NO: 19847 - protein, 7 aa, synthetic construct
YVRTDMY

SEQ ID NO: 19848 - protein, 7 aa, synthetic construct
CMSSPCS

SEQ ID NO: 19849 - protein, 7 aa, synthetic construct
WGSVCCA

SEQ ID NO: 19850 - protein, 7 aa, synthetic construct
RDVEVFP

SEQ ID NO: 19851 - protein, 7 aa, synthetic construct
VTFGNPL

SEQ ID NO: 19852 - protein, 7 aa, synthetic construct
LCRNYLT

SEQ ID NO: 19853 - protein, 7 aa, synthetic construct
PMGTALW

SEQ ID NO: 19854 - protein, 7 aa, synthetic construct
FFTHKMD

SEQ ID NO: 19855 - protein, 7 aa, synthetic construct
VRVMSSE

SEQ ID NO: 19856 - protein, 7 aa, synthetic construct
GSHVSSW

SEQ ID NO: 19857 - protein, 7 aa, synthetic construct
GASDSRW

SEQ ID NO: 19858 - protein, 7 aa, synthetic construct
GDGSSLW

SEQ ID NO: 19859 - protein, 7 aa, synthetic construct
FTRLHAD

SEQ ID NO: 19860 - protein, 7 aa, synthetic construct
RDGNSAY

SEQ ID NO: 19861 - protein, 7 aa, synthetic construct
RLSTNGI

SEQ ID NO: 19862 - protein, 7 aa, synthetic construct
SRSGSVV

SEQ ID NO: 19863 - protein, 7 aa, synthetic construct
LHRLSEG

SEQ ID NO: 19864 - protein, 7 aa, synthetic construct
TLADRGW

SEQ ID NO: 19865 - protein, 7 aa, synthetic construct
VGIASEA

SEQ ID NO: 19866 - protein, 7 aa, synthetic construct
TAGMILG

SEQ ID NO: 19867 - protein, 7 aa, synthetic construct
PLYDGPR

SEQ ID NO: 19868 - protein, 7 aa, synthetic construct
NDGSSSY

SEQ ID NO: 19869 - protein, 7 aa, synthetic construct
FTGTSGT

SEQ ID NO: 19870 - protein, 7 aa, synthetic construct
DLSKAMW

SEQ ID NO: 19871 - protein, 7 aa, synthetic construct
LSVVCCA

SEQ ID NO: 19872 - protein, 7 aa, synthetic construct
FDGNSAY

SEQ ID NO: 19873 - protein, 7 aa, synthetic construct
TMSSSAW

SEQ ID NO: 19874 - protein, 7 aa, synthetic construct
WPSGGQG

SEQ ID NO: 19875 - protein, 7 aa, synthetic construct
YSRGGPD

SEQ ID NO: 19876 - protein, 7 aa, synthetic construct
PSRAEAD

SEQ ID NO: 19877 - protein, 7 aa, synthetic construct
FEGQYKV

SEQ ID NO: 19878 - protein, 7 aa, synthetic construct
CLEVKIA

SEQ ID NO: 19879 - protein, 7 aa, synthetic construct
ASSLIIL

SEQ ID NO: 19880 - protein, 7 aa, synthetic construct
CGGSCAA

SEQ ID NO: 19881 - protein, 7 aa, synthetic construct
WTKDAAW

SEQ ID NO: 19882 - protein, 7 aa, synthetic construct
DRGFLQS

SEQ ID NO: 19883 - protein, 7 aa, synthetic construct
ALTSQSW

SEQ ID NO: 19884 - protein, 7 aa, synthetic construct
HGSGMMI

SEQ ID NO: 19885 - protein, 7 aa, synthetic construct
WARSSSG

SEQ ID NO: 19886 - protein, 7 aa, synthetic construct
VPTKGIG

SEQ ID NO: 19887 - protein, 7 aa, synthetic construct
TLLNSPN

SEQ ID NO: 19888 - protein, 7 aa, synthetic construct
LASRVTA

SEQ ID NO: 19889 - protein, 7 aa, synthetic construct
YARLGYD

SEQ ID NO: 19890 - protein, 7 aa, synthetic construct
CGHSCVS

SEQ ID NO: 19891 - protein, 7 aa, synthetic construct
VNKVCAD

SEQ ID NO: 19892 - protein, 7 aa, synthetic construct
DGLSGSD

SEQ ID NO: 19893 - protein, 7 aa, synthetic construct
YFSGSVF

SEQ ID NO: 19894 - protein, 7 aa, synthetic construct
MWSENHG

SEQ ID NO: 19895 - protein, 7 aa, synthetic construct
VNVVPTL

SEQ ID NO: 19896 - protein, 7 aa, synthetic construct
RTLTQGT

SEQ ID NO: 19897 - protein, 7 aa, synthetic construct
VLGSSNW

SEQ ID NO: 19898 - protein, 7 aa, synthetic construct
SVVGYGS

SEQ ID NO: 19899 - protein, 7 aa, synthetic construct
DLRGQAA

SEQ ID NO: 19900 - protein, 7 aa, synthetic construct
GDGSVRY

SEQ ID NO: 19901 - protein, 7 aa, synthetic construct
AFQTSMM

SEQ ID NO: 19902 - protein, 7 aa, synthetic construct
DYGGRLL

SEQ ID NO: 19903 - protein, 7 aa, synthetic construct
HPPLLVV

SEQ ID NO: 19904 - protein, 7 aa, synthetic construct
YFSNIPT

SEQ ID NO: 19905 - protein, 7 aa, synthetic construct
RDPMTSY

SEQ ID NO: 19906 - protein, 7 aa, synthetic construct
VSEFTTY

SEQ ID NO: 19907 - protein, 7 aa, synthetic construct
WRNPDIV

SEQ ID NO: 19908 - protein, 7 aa, synthetic construct
MVMLQSA

SEQ ID NO: 19909 - protein, 7 aa, synthetic construct
FGELREG

SEQ ID NO: 19910 - protein, 7 aa, synthetic construct
DYESRVW

SEQ ID NO: 19911 - protein, 7 aa, synthetic construct
APNTVSW

SEQ ID NO: 19912 - protein, 7 aa, synthetic construct
REVAVSW

SEQ ID NO: 19913 - protein, 7 aa, synthetic construct
TVNNVYH

SEQ ID NO: 19914 - protein, 7 aa, synthetic construct
VESVNGI

SEQ ID NO: 19915 - protein, 7 aa, synthetic construct
IATLGIG

SEQ ID NO: 19916 - protein, 7 aa, synthetic construct
GDVAGFS

SEQ ID NO: 19917 - protein, 7 aa, synthetic construct
YSKLDPL

SEQ ID NO: 19918 - protein, 7 aa, synthetic construct
STPSSPT

SEQ ID NO: 19919 - protein, 7 aa, synthetic construct
GCCPMEA

SEQ ID NO: 19920 - protein, 7 aa, synthetic construct
GSNLLPV

SEQ ID NO: 19921 - protein, 7 aa, synthetic construct
PGEVREW

SEQ ID NO: 19922 - protein, 7 aa, synthetic construct
FYTGVSA

SEQ ID NO: 19923 - protein, 7 aa, synthetic construct
SDPLSRP

SEQ ID NO: 19924 - protein, 7 aa, synthetic construct
LHRLQDD

SEQ ID NO: 19925 - protein, 7 aa, synthetic construct
GVDSVKW

SEQ ID NO: 19926 - protein, 7 aa, synthetic construct
SGSTSTW

SEQ ID NO: 19927 - protein, 7 aa, synthetic construct
KFDNSGS

SEQ ID NO: 19928 - protein, 7 aa, synthetic construct
YPSGGAG

SEQ ID NO: 19929 - protein, 7 aa, synthetic construct
CRCFRGI

SEQ ID NO: 19930 - protein, 7 aa, synthetic construct
DAGLAEV

SEQ ID NO: 19931 - protein, 7 aa, synthetic construct
KFDNTGS

SEQ ID NO: 19932 - protein, 7 aa, synthetic construct
CAPYLHE

SEQ ID NO: 19933 - protein, 7 aa, synthetic construct
FAAYVST

SEQ ID NO: 19934 - protein, 7 aa, synthetic construct
DVGLRPW

SEQ ID NO: 19935 - protein, 7 aa, synthetic construct
YYQGTVD

SEQ ID NO: 19936 - protein, 7 aa, synthetic construct
GNRDAVE

SEQ ID NO: 19937 - protein, 7 aa, synthetic construct
CGGPCQS

SEQ ID NO: 19938 - protein, 7 aa, synthetic construct
ASVAGVR

SEQ ID NO: 19939 - protein, 7 aa, synthetic construct
NVSHERG

SEQ ID NO: 19940 - protein, 7 aa, synthetic construct
IKMTGRD

SEQ ID NO: 19941 - protein, 7 aa, synthetic construct
GGTDRTW

SEQ ID NO: 19942 - protein, 7 aa, synthetic construct
CSPMRDC

SEQ ID NO: 19943 - protein, 7 aa, synthetic construct
DVYGGFA

SEQ ID NO: 19944 - protein, 7 aa, synthetic construct
NMGDRVW

SEQ ID NO: 19945 - protein, 7 aa, synthetic construct
EGPSRGW

SEQ ID NO: 19946 - protein, 7 aa, synthetic construct
GYGSPHS

SEQ ID NO: 19947 - protein, 7 aa, synthetic construct
DCRAACK

SEQ ID NO: 19948 - protein, 7 aa, synthetic construct
LPPLYQV

SEQ ID NO: 19949 - protein, 7 aa, synthetic construct
ATAVPKT

SEQ ID NO: 19950 - protein, 7 aa, synthetic construct
TPVKGAM

SEQ ID NO: 19951 - protein, 7 aa, synthetic construct
SDGSSNW

SEQ ID NO: 19952 - protein, 7 aa, synthetic construct
GQVADGW

SEQ ID NO: 19953 - protein, 7 aa, synthetic construct
GSGSSPW

SEQ ID NO: 19954 - protein, 7 aa, synthetic construct
LGHDYFP

SEQ ID NO: 19955 - protein, 7 aa, synthetic construct
LVGLKQL

SEQ ID NO: 19956 - protein, 7 aa, synthetic construct
SKDWSGS

SEQ ID NO: 19957 - protein, 7 aa, synthetic construct
YVRYDTG

SEQ ID NO: 19958 - protein, 7 aa, synthetic construct
EAHNPVY

SEQ ID NO: 19959 - protein, 7 aa, synthetic construct
ISDERCC

SEQ ID NO: 19960 - protein, 7 aa, synthetic construct
GVDYNTG

SEQ ID NO: 19961 - protein, 7 aa, synthetic construct
RDDSSSW

SEQ ID NO: 19962 - protein, 7 aa, synthetic construct
VHESVHW

SEQ ID NO: 19963 - protein, 7 aa, synthetic construct
VWADHSW

SEQ ID NO: 19964 - protein, 7 aa, synthetic construct
WKMGCAD

SEQ ID NO: 19965 - protein, 7 aa, synthetic construct
TPQSPMF

SEQ ID NO: 19966 - protein, 7 aa, synthetic construct
PLSSNLW

SEQ ID NO: 19967 - protein, 7 aa, synthetic construct
NGDDQSM

SEQ ID NO: 19968 - protein, 7 aa, synthetic construct
GPPESMI

SEQ ID NO: 19969 - protein, 7 aa, synthetic construct
VDREATA

SEQ ID NO: 19970 - protein, 7 aa, synthetic construct
CCSPQKV

SEQ ID NO: 19971 - protein, 7 aa, synthetic construct
TSSACCS

SEQ ID NO: 19972 - protein, 7 aa, synthetic construct
GWNSTLG

SEQ ID NO: 19973 - protein, 7 aa, synthetic construct
TNYGVGA

SEQ ID NO: 19974 - protein, 7 aa, synthetic construct
CGKQTCI

SEQ ID NO: 19975 - protein, 7 aa, synthetic construct
GNEGSSL

SEQ ID NO: 19976 - protein, 7 aa, synthetic construct
FDGTVPF

SEQ ID NO: 19977 - protein, 7 aa, synthetic construct
CGSSSNC

SEQ ID NO: 19978 - protein, 7 aa, synthetic construct
WLKDSTI

SEQ ID NO: 19979 - protein, 7 aa, synthetic construct
GGGSSGW

SEQ ID NO: 19980 - protein, 7 aa, synthetic construct
RLEVGSW

SEQ ID NO: 19981 - protein, 7 aa, synthetic construct
APGHVGW

SEQ ID NO: 19982 - protein, 7 aa, synthetic construct
LHRAGID

SEQ ID NO: 19983 - protein, 7 aa, synthetic construct
QLYDAGV

SEQ ID NO: 19984 - protein, 7 aa, synthetic construct
PMGANTW

SEQ ID NO: 19985 - protein, 7 aa, synthetic construct
LDAFSGW

SEQ ID NO: 19986 - protein, 7 aa, synthetic construct
YVRFEDP

SEQ ID NO: 19987 - protein, 7 aa, synthetic construct
SVTCTLP

SEQ ID NO: 19988 - protein, 7 aa, synthetic construct
KDSFTSW

SEQ ID NO: 19989 - protein, 7 aa, synthetic construct
GGPATTG

SEQ ID NO: 19990 - protein, 7 aa, synthetic construct
TSGPSRL

SEQ ID NO: 19991 - protein, 7 aa, synthetic construct
NRMDGDP

SEQ ID NO: 19992 - protein, 7 aa, synthetic construct
SNSTSGW

SEQ ID NO: 19993 - protein, 7 aa, synthetic construct
NVHSEPC

SEQ ID NO: 19994 - protein, 7 aa, synthetic construct
YAGEMIV

SEQ ID NO: 19995 - protein, 7 aa, synthetic construct
YWSGQGA

SEQ ID NO: 19996 - protein, 7 aa, synthetic construct
PANGVVG

SEQ ID NO: 19997 - protein, 7 aa, synthetic construct
LSAHTTP

SEQ ID NO: 19998 - protein, 7 aa, synthetic construct
VSDYASY

SEQ ID NO: 19999 - protein, 7 aa, synthetic construct
DWTGVMA

SEQ ID NO: 20000 - protein, 7 aa, synthetic construct
AYAPEVS

SEQ ID NO: 20001 - protein, 7 aa, synthetic construct
YDPTLTN

SEQ ID NO: 20002 - protein, 7 aa, synthetic construct
LLTPACD

SEQ ID NO: 20003 - protein, 7 aa, synthetic construct
IAHLGSG

SEQ ID NO: 20004 - protein, 7 aa, synthetic construct
SLDTVRW

SEQ ID NO: 20005 - protein, 7 aa, synthetic construct
WLIAEAD

SEQ ID NO: 20006 - protein, 7 aa, synthetic construct
GMSNSSW

SEQ ID NO: 20007 - protein, 7 aa, synthetic construct
GEDQVRW

SEQ ID NO: 20008 - protein, 7 aa, synthetic construct
RPGGSAG

SEQ ID NO: 20009 - protein, 7 aa, synthetic construct
ACSDCMV

SEQ ID NO: 20010 - protein, 7 aa, synthetic construct
CGIGSCH

SEQ ID NO: 20011 - protein, 7 aa, synthetic construct
VGSITQW

SEQ ID NO: 20012 - protein, 7 aa, synthetic construct
GAHTSTW

SEQ ID NO: 20013 - protein, 7 aa, synthetic construct
TVKGAAL

SEQ ID NO: 20014 - protein, 7 aa, synthetic construct
QPESRSW

SEQ ID NO: 20015 - protein, 7 aa, synthetic construct
GASSSSW

SEQ ID NO: 20016 - protein, 7 aa, synthetic construct
CGGCVGV

SEQ ID NO: 20017 - protein, 7 aa, synthetic construct
VVRCDGC

SEQ ID NO: 20018 - protein, 7 aa, synthetic construct
MEGRCCS

SEQ ID NO: 20019 - protein, 7 aa, synthetic construct
LVGLKSL

SEQ ID NO: 20020 - protein, 7 aa, synthetic construct
GDGVSLW

SEQ ID NO: 20021 - protein, 7 aa, synthetic construct
SVAPLCA

SEQ ID NO: 20022 - protein, 7 aa, synthetic construct
YSKLDAT

SEQ ID NO: 20023 - protein, 7 aa, synthetic construct
VWDAMGV

SEQ ID NO: 20024 - protein, 7 aa, synthetic construct
MPALDLG

SEQ ID NO: 20025 - protein, 7 aa, synthetic construct
LWDGQSA

SEQ ID NO: 20026 - protein, 7 aa, synthetic construct
TAWLKQD

SEQ ID NO: 20027 - protein, 7 aa, synthetic construct
HLASANW

SEQ ID NO: 20028 - protein, 7 aa, synthetic construct
YVRSSNE

SEQ ID NO: 20029 - protein, 7 aa, synthetic construct
LSSSNGR

SEQ ID NO: 20030 - protein, 7 aa, synthetic construct
AMADTTW

SEQ ID NO: 20031 - protein, 7 aa, synthetic construct
CGVMEKC

SEQ ID NO: 20032 - protein, 7 aa, synthetic construct
VSSTCTA

SEQ ID NO: 20033 - protein, 7 aa, synthetic construct
ICASRLS

SEQ ID NO: 20034 - protein, 7 aa, synthetic construct
SSQFVSY

SEQ ID NO: 20035 - protein, 7 aa, synthetic construct
SVSHEGG

SEQ ID NO: 20036 - protein, 7 aa, synthetic construct
LWNGVSS

SEQ ID NO: 20037 - protein, 7 aa, synthetic construct
FDSSNGR

SEQ ID NO: 20038 - protein, 7 aa, synthetic construct
TESSQGR

SEQ ID NO: 20039 - protein, 7 aa, synthetic construct
YFHGLPD

SEQ ID NO: 20040 - protein, 7 aa, synthetic construct
VGSSSSW

SEQ ID NO: 20041 - protein, 7 aa, synthetic construct
VVGCSPD

SEQ ID NO: 20042 - protein, 7 aa, synthetic construct
ASGNSSW

SEQ ID NO: 20043 - protein, 7 aa, synthetic construct
LKNGTPA

SEQ ID NO: 20044 - protein, 7 aa, synthetic construct
MEGKGWD

SEQ ID NO: 20045 - protein, 7 aa, synthetic construct
HPPDYSA

SEQ ID NO: 20046 - protein, 7 aa, synthetic construct
ETRLGAG

SEQ ID NO: 20047 - protein, 7 aa, synthetic construct
LTYDAGI

SEQ ID NO: 20048 - protein, 7 aa, synthetic construct
LPSAYPF

SEQ ID NO: 20049 - protein, 7 aa, synthetic construct
GGPTSQW

SEQ ID NO: 20050 - protein, 7 aa, synthetic construct
ITGVSGN

SEQ ID NO: 20051 - protein, 7 aa, synthetic construct
NCSIKPC

SEQ ID NO: 20052 - protein, 7 aa, synthetic construct
DRAPASA

SEQ ID NO: 20053 - protein, 7 aa, synthetic construct
VDRGSTI

SEQ ID NO: 20054 - protein, 7 aa, synthetic construct
YVRTDKG

SEQ ID NO: 20055 - protein, 7 aa, synthetic construct
GVDAGVR

SEQ ID NO: 20056 - protein, 7 aa, synthetic construct
DQSPVKW

SEQ ID NO: 20057 - protein, 7 aa, synthetic construct
PYAQSPM

SEQ ID NO: 20058 - protein, 7 aa, synthetic construct
CQDGSGA

SEQ ID NO: 20059 - protein, 7 aa, synthetic construct
KTDHVFP

SEQ ID NO: 20060 - protein, 7 aa, synthetic construct
GGDYSSF

SEQ ID NO: 20061 - protein, 7 aa, synthetic construct
VCRQSCE

SEQ ID NO: 20062 - protein, 7 aa, synthetic construct
WSAITDN

SEQ ID NO: 20063 - protein, 7 aa, synthetic construct
GGGSASW

SEQ ID NO: 20064 - protein, 7 aa, synthetic construct
REDSRSW

SEQ ID NO: 20065 - protein, 7 aa, synthetic construct
LATGDGP

SEQ ID NO: 20066 - protein, 7 aa, synthetic construct
VSHGSAG

SEQ ID NO: 20067 - protein, 7 aa, synthetic construct
ASETSTW

SEQ ID NO: 20068 - protein, 7 aa, synthetic construct
IMLPGHG

SEQ ID NO: 20069 - protein, 7 aa, synthetic construct
LSVAGRM

SEQ ID NO: 20070 - protein, 7 aa, synthetic construct
KWDSQGT

SEQ ID NO: 20071 - protein, 7 aa, synthetic construct
GLDSRAA

SEQ ID NO: 20072 - protein, 7 aa, synthetic construct
IMNSGVW

SEQ ID NO: 20073 - protein, 7 aa, synthetic construct
FSAPNAF

SEQ ID NO: 20074 - protein, 7 aa, synthetic construct
GSGQHGA

SEQ ID NO: 20075 - protein, 7 aa, synthetic construct
CNECPHP

SEQ ID NO: 20076 - protein, 7 aa, synthetic construct
SFNPKCE

SEQ ID NO: 20077 - protein, 7 aa, synthetic construct
SGVTDAR

SEQ ID NO: 20078 - protein, 7 aa, synthetic construct
EVERRAP

SEQ ID NO: 20079 - protein, 7 aa, synthetic construct
RGDSVHW

SEQ ID NO: 20080 - protein, 7 aa, synthetic construct
YQPLLTV

SEQ ID NO: 20081 - protein, 7 aa, synthetic construct
RPACTVC

SEQ ID NO: 20082 - protein, 7 aa, synthetic construct
GIHQEPH

SEQ ID NO: 20083 - protein, 7 aa, synthetic construct
VADPSAA

SEQ ID NO: 20084 - protein, 7 aa, synthetic construct
GPSSSLW

SEQ ID NO: 20085 - protein, 7 aa, synthetic construct
VAERGAG

SEQ ID NO: 20086 - protein, 7 aa, synthetic construct
TNESVYV

SEQ ID NO: 20087 - protein, 7 aa, synthetic construct
TSPVAVN

SEQ ID NO: 20088 - protein, 7 aa, synthetic construct
VERCCVA

SEQ ID NO: 20089 - protein, 7 aa, synthetic construct
CLDACNR

SEQ ID NO: 20090 - protein, 7 aa, synthetic construct
NGARLPG

SEQ ID NO: 20091 - protein, 7 aa, synthetic construct
DMSKSCV

SEQ ID NO: 20092 - protein, 7 aa, synthetic construct
AMTGAST

SEQ ID NO: 20093 - protein, 7 aa, synthetic construct
CLSCPKS

SEQ ID NO: 20094 - protein, 7 aa, synthetic construct
GSNTSGW

SEQ ID NO: 20095 - protein, 7 aa, synthetic construct
EPGSVRW

SEQ ID NO: 20096 - protein, 7 aa, synthetic construct
FYTGRSE

SEQ ID NO: 20097 - protein, 7 aa, synthetic construct
GSDRSGS

SEQ ID NO: 20098 - protein, 7 aa, synthetic construct
GRGDSGW

SEQ ID NO: 20099 - protein, 7 aa, synthetic construct
WNSNADN

SEQ ID NO: 20100 - protein, 7 aa, synthetic construct
SPSEVNS

SEQ ID NO: 20101 - protein, 7 aa, synthetic construct
LMDNVSH

SEQ ID NO: 20102 - protein, 7 aa, synthetic construct
LSDGWRD

SEQ ID NO: 20103 - protein, 7 aa, synthetic construct
GLEGSKW

SEQ ID NO: 20104 - protein, 7 aa, synthetic construct
DGAAIMS

SEQ ID NO: 20105 - protein, 7 aa, synthetic construct
WTKSQEW

SEQ ID NO: 20106 - protein, 7 aa, synthetic construct
RPESSQW

SEQ ID NO: 20107 - protein, 7 aa, synthetic construct
VEGRMWS

SEQ ID NO: 20108 - protein, 7 aa, synthetic construct
IDGTSMW

SEQ ID NO: 20109 - protein, 7 aa, synthetic construct
VPHDREW

SEQ ID NO: 20110 - protein, 7 aa, synthetic construct
GGSSSVW

SEQ ID NO: 20111 - protein, 7 aa, synthetic construct
RLPESTD

SEQ ID NO: 20112 - protein, 7 aa, synthetic construct
LGDSNMV

SEQ ID NO: 20113 - protein, 7 aa, synthetic construct
REEVGVW

SEQ ID NO: 20114 - protein, 7 aa, synthetic construct
DLDSYLD

SEQ ID NO: 20115 - protein, 7 aa, synthetic construct
LAKGGYD

SEQ ID NO: 20116 - protein, 7 aa, synthetic construct
LDGVSLY

SEQ ID NO: 20117 - protein, 7 aa, synthetic construct
REAQSGW

SEQ ID NO: 20118 - protein, 7 aa, synthetic construct
GLSSASW

SEQ ID NO: 20119 - protein, 7 aa, synthetic construct
YFEGMFD

SEQ ID NO: 20120 - protein, 7 aa, synthetic construct
GAPGDAK

SEQ ID NO: 20121 - protein, 7 aa, synthetic construct
CCGLKSG

SEQ ID NO: 20122 - protein, 7 aa, synthetic construct
GGHVSSW

SEQ ID NO: 20123 - protein, 7 aa, synthetic construct
NASTSSW

SEQ ID NO: 20124 - protein, 7 aa, synthetic construct
WSMTTDN

SEQ ID NO: 20125 - protein, 7 aa, synthetic construct
TQIAPDR

SEQ ID NO: 20126 - protein, 7 aa, synthetic construct
YLVMSSS

SEQ ID NO: 20127 - protein, 7 aa, synthetic construct
REEAERG

SEQ ID NO: 20128 - protein, 7 aa, synthetic construct
VGGTSLY

SEQ ID NO: 20129 - protein, 7 aa, synthetic construct
GVIQGCC

SEQ ID NO: 20130 - protein, 7 aa, synthetic construct
YWSAMAE

SEQ ID NO: 20131 - protein, 7 aa, synthetic construct
GSPSSGW

SEQ ID NO: 20132 - protein, 7 aa, synthetic construct
WSRLNSD

SEQ ID NO: 20133 - protein, 7 aa, synthetic construct
YFHAMQS

SEQ ID NO: 20134 - protein, 7 aa, synthetic construct
RSDTSSW

SEQ ID NO: 20135 - protein, 7 aa, synthetic construct
MSPMSQN

SEQ ID NO: 20136 - protein, 7 aa, synthetic construct
ELLAATW

SEQ ID NO: 20137 - protein, 7 aa, synthetic construct
YSKSSPL

SEQ ID NO: 20138 - protein, 7 aa, synthetic construct
EDRGLEG

SEQ ID NO: 20139 - protein, 7 aa, synthetic construct
RTPSEYP

SEQ ID NO: 20140 - protein, 7 aa, synthetic construct
GRVDMYD

SEQ ID NO: 20141 - protein, 7 aa, synthetic construct
CGRDYCP

SEQ ID NO: 20142 - protein, 7 aa, synthetic construct
SGGSHTW

SEQ ID NO: 20143 - protein, 7 aa, synthetic construct
DRCVQPC

SEQ ID NO: 20144 - protein, 7 aa, synthetic construct
CLSSPCS

SEQ ID NO: 20145 - protein, 7 aa, synthetic construct
VPDTVRY

SEQ ID NO: 20146 - protein, 7 aa, synthetic construct
CKGSCEQ

SEQ ID NO: 20147 - protein, 7 aa, synthetic construct
EWSAICK

SEQ ID NO: 20148 - protein, 7 aa, synthetic construct
REMSVHW

SEQ ID NO: 20149 - protein, 7 aa, synthetic construct
FLNGCCS

SEQ ID NO: 20150 - protein, 7 aa, synthetic construct
SPWGDPS

SEQ ID NO: 20151 - protein, 7 aa, synthetic construct
SEEAFPY

SEQ ID NO: 20152 - protein, 7 aa, synthetic construct
CFLSDCL

SEQ ID NO: 20153 - protein, 7 aa, synthetic construct
GSLDSRW

SEQ ID NO: 20154 - protein, 7 aa, synthetic construct
YFSREIS

SEQ ID NO: 20155 - protein, 7 aa, synthetic construct
VEPCCRM

SEQ ID NO: 20156 - protein, 7 aa, synthetic construct
VGPVLCS

SEQ ID NO: 20157 - protein, 7 aa, synthetic construct
AQSVGTW

SEQ ID NO: 20158 - protein, 7 aa, synthetic construct
LHKLSVG

SEQ ID NO: 20159 - protein, 7 aa, synthetic construct
ARADLGS

SEQ ID NO: 20160 - protein, 7 aa, synthetic construct
GSPSASW

SEQ ID NO: 20161 - protein, 7 aa, synthetic construct
VPGFGAG

SEQ ID NO: 20162 - protein, 7 aa, synthetic construct
GGAIREW

SEQ ID NO: 20163 - protein, 7 aa, synthetic construct
TAQSYTF

SEQ ID NO: 20164 - protein, 7 aa, synthetic construct
WLLKSDV

SEQ ID NO: 20165 - protein, 7 aa, synthetic construct
GPPHVAW

SEQ ID NO: 20166 - protein, 7 aa, synthetic construct
CSQVACP

SEQ ID NO: 20167 - protein, 7 aa, synthetic construct
VRSGSAG

SEQ ID NO: 20168 - protein, 7 aa, synthetic construct
CAITGCR

SEQ ID NO: 20169 - protein, 7 aa, synthetic construct
VMTSAGW

SEQ ID NO: 20170 - protein, 7 aa, synthetic construct
INSSSVW

SEQ ID NO: 20171 - protein, 7 aa, synthetic construct
CGSSCAA

SEQ ID NO: 20172 - protein, 7 aa, synthetic construct
GLESREW

SEQ ID NO: 20173 - protein, 7 aa, synthetic construct
TWTGDGA

SEQ ID NO: 20174 - protein, 7 aa, synthetic construct
DWLEKGI

SEQ ID NO: 20175 - protein, 7 aa, synthetic construct
PLMSGPI

SEQ ID NO: 20176 - protein, 7 aa, synthetic construct
WARGHDN

SEQ ID NO: 20177 - protein, 7 aa, synthetic construct
CGSSTCS

SEQ ID NO: 20178 - protein, 7 aa, synthetic construct
YANVAHN

SEQ ID NO: 20179 - protein, 7 aa, synthetic construct
VASMYGI

SEQ ID NO: 20180 - protein, 7 aa, synthetic construct
GSAASAW

SEQ ID NO: 20181 - protein, 7 aa, synthetic construct
SDGESSW

SEQ ID NO: 20182 - protein, 7 aa, synthetic construct
YWSGSIA

SEQ ID NO: 20183 - protein, 7 aa, synthetic construct
IAGRGAG

SEQ ID NO: 20184 - protein, 7 aa, synthetic construct
RGTEVYP

SEQ ID NO: 20185 - protein, 7 aa, synthetic construct
SSGSSTW

SEQ ID NO: 20186 - protein, 7 aa, synthetic construct
DDGDSRW

SEQ ID NO: 20187 - protein, 7 aa, synthetic construct
DMNVGAW

SEQ ID NO: 20188 - protein, 7 aa, synthetic construct
REGGGSW

SEQ ID NO: 20189 - protein, 7 aa, synthetic construct
VSGGALA

SEQ ID NO: 20190 - protein, 7 aa, synthetic construct
VGVSGNG

SEQ ID NO: 20191 - protein, 7 aa, synthetic construct
GELCCET

SEQ ID NO: 20192 - protein, 7 aa, synthetic construct
GGSGVSW

SEQ ID NO: 20193 - protein, 7 aa, synthetic construct
RSSVNGV

SEQ ID NO: 20194 - protein, 7 aa, synthetic construct
GVESSPQ

SEQ ID NO: 20195 - protein, 7 aa, synthetic construct
RDSGSAW

SEQ ID NO: 20196 - protein, 7 aa, synthetic construct
SSGSSMW

SEQ ID NO: 20197 - protein, 7 aa, synthetic construct
RTVDLFP

SEQ ID NO: 20198 - protein, 7 aa, synthetic construct
ASSGNLM

SEQ ID NO: 20199 - protein, 7 aa, synthetic construct
YSSSNGL

SEQ ID NO: 20200 - protein, 7 aa, synthetic construct
RENTPGW

SEQ ID NO: 20201 - protein, 7 aa, synthetic construct
ILSERAW

SEQ ID NO: 20202 - protein, 7 aa, synthetic construct
NERGGVV

SEQ ID NO: 20203 - protein, 7 aa, synthetic construct
TDEWQSY

SEQ ID NO: 20204 - protein, 7 aa, synthetic construct
VAASSTW

SEQ ID NO: 20205 - protein, 7 aa, synthetic construct
IHRALHD

SEQ ID NO: 20206 - protein, 7 aa, synthetic construct
CGVRCQD

SEQ ID NO: 20207 - protein, 7 aa, synthetic construct
GVPGTMP

SEQ ID NO: 20208 - protein, 7 aa, synthetic construct
LYGGSIG

SEQ ID NO: 20209 - protein, 7 aa, synthetic construct
DYSGRSA

SEQ ID NO: 20210 - protein, 7 aa, synthetic construct
SGLAYAM

SEQ ID NO: 20211 - protein, 7 aa, synthetic construct
GHSCCTL

SEQ ID NO: 20212 - protein, 7 aa, synthetic construct
CMPNCLV

SEQ ID NO: 20213 - protein, 7 aa, synthetic construct
AGGGYIL

SEQ ID NO: 20214 - protein, 7 aa, synthetic construct
NLRGSGA

SEQ ID NO: 20215 - protein, 7 aa, synthetic construct
GYSACSH

SEQ ID NO: 20216 - protein, 7 aa, synthetic construct
VLVDAYV

SEQ ID NO: 20217 - protein, 7 aa, synthetic construct
FEADAYP

SEQ ID NO: 20218 - protein, 7 aa, synthetic construct
NQLGDRL

SEQ ID NO: 20219 - protein, 7 aa, synthetic construct
GEVMSLT

SEQ ID NO: 20220 - protein, 7 aa, synthetic construct
WMAKVVE

SEQ ID NO: 20221 - protein, 7 aa, synthetic construct
NKWGDPS

SEQ ID NO: 20222 - protein, 7 aa, synthetic construct
GLIAPHS

SEQ ID NO: 20223 - protein, 7 aa, synthetic construct
RGIDEFP

SEQ ID NO: 20224 - protein, 7 aa, synthetic construct
IGLTGDW

SEQ ID NO: 20225 - protein, 7 aa, synthetic construct
GGGQTSW

SEQ ID NO: 20226 - protein, 7 aa, synthetic construct
PSSLMAS

SEQ ID NO: 20227 - protein, 7 aa, synthetic construct
MTGLSIV

SEQ ID NO: 20228 - protein, 7 aa, synthetic construct
GMSEVLW

SEQ ID NO: 20229 - protein, 7 aa, synthetic construct
TQVSSYK

SEQ ID NO: 20230 - protein, 7 aa, synthetic construct
WKSGGAL

SEQ ID NO: 20231 - protein, 7 aa, synthetic construct
QKGLGIA

SEQ ID NO: 20232 - protein, 7 aa, synthetic construct
WALATIH

SEQ ID NO: 20233 - protein, 7 aa, synthetic construct
SLIEKLR

SEQ ID NO: 20234 - protein, 7 aa, synthetic construct
LTLTNIK

SEQ ID NO: 20235 - protein, 7 aa, synthetic construct
YKLGLLG

SEQ ID NO: 20236 - protein, 7 aa, synthetic construct
YKSLSAA

SEQ ID NO: 20237 - protein, 7 aa, synthetic construct
SGLSTTK

SEQ ID NO: 20238 - protein, 7 aa, synthetic construct
ASLTSQH

SEQ ID NO: 20239 - protein, 7 aa, synthetic construct
NSLATFK

SEQ ID NO: 20240 - protein, 7 aa, synthetic construct
GKMGALS

SEQ ID NO: 20241 - protein, 7 aa, synthetic construct
TLMTKVG

SEQ ID NO: 20242 - protein, 7 aa, synthetic construct
STIASPH

SEQ ID NO: 20243 - protein, 7 aa, synthetic construct
ASLSSRS

SEQ ID NO: 20244 - protein, 7 aa, synthetic construct
SKGLGAV

SEQ ID NO: 20245 - protein, 7 aa, synthetic construct
TNVSNGK

SEQ ID NO: 20246 - protein, 7 aa, synthetic construct
MMTISTK

SEQ ID NO: 20247 - protein, 7 aa, synthetic construct
HSLSSSG

SEQ ID NO: 20248 - protein, 7 aa, synthetic construct
TTTSSHA

SEQ ID NO: 20249 - protein, 7 aa, synthetic construct
QAIKLMP

SEQ ID NO: 20250 - protein, 7 aa, synthetic construct
VITIGSK

SEQ ID NO: 20251 - protein, 7 aa, synthetic construct
DGMSMNR

SEQ ID NO: 20252 - protein, 7 aa, synthetic construct
SKLSLSG

SEQ ID NO: 20253 - protein, 7 aa, synthetic construct
TVPTQTK

SEQ ID NO: 20254 - protein, 7 aa, synthetic construct
SIGLVKP

SEQ ID NO: 20255 - protein, 7 aa, synthetic construct
WSLASTG

SEQ ID NO: 20256 - protein, 7 aa, synthetic construct
LKGSHAD

SEQ ID NO: 20257 - protein, 7 aa, synthetic construct
SKVPLMP

SEQ ID NO: 20258 - protein, 7 aa, synthetic construct
LSKMPFG

SEQ ID NO: 20259 - protein, 7 aa, synthetic construct
QWSSKLF

SEQ ID NO: 20260 - protein, 7 aa, synthetic construct
MSLKGVN

SEQ ID NO: 20261 - protein, 7 aa, synthetic construct
TLVSNTK

SEQ ID NO: 20262 - protein, 10 aa, synthetic construct
VGWSRLDLTT

SEQ ID NO: 20263 - protein, 10 aa, synthetic construct
GGLGNLRHCV

SEQ ID NO: 20264 - protein, 10 aa, synthetic construct
LGYVSIGAAC

SEQ ID NO: 20265 - protein, 10 aa, synthetic construct
REAGRIVSQE

SEQ ID NO: 20266 - protein, 10 aa, synthetic construct
LRYSKTQGES

SEQ ID NO: 20267 - protein, 10 aa, synthetic construct
KPYALNGREV

SEQ ID NO: 20268 - protein, 10 aa, synthetic construct
YSLTGGSICL

SEQ ID NO: 20269 - protein, 10 aa, synthetic construct
LGPPPAIGKC

SEQ ID NO: 20270 - protein, 10 aa, synthetic construct
LGFTKSSGSD

SEQ ID NO: 20271 - protein, 10 aa, synthetic construct
SPYARSSAGV

SEQ ID NO: 20272 - protein, 10 aa, synthetic construct
LGWASNSVAS

SEQ ID NO: 20273 - protein, 10 aa, synthetic construct
SSINGPPKWS

SEQ ID NO: 20274 - protein, 10 aa, synthetic construct
LGFARTGAAD

SEQ ID NO: 20275 - protein, 10 aa, synthetic construct
KTMNGMSRAI

SEQ ID NO: 20276 - protein, 10 aa, synthetic construct
KPLHALGSVL

SEQ ID NO: 20277 - protein, 10 aa, synthetic construct
FWPNSSLPIR

SEQ ID NO: 20278 - protein, 10 aa, synthetic construct
QRFSAASVSP

SEQ ID NO: 20279 - protein, 10 aa, synthetic construct
GNMLARQSAF

SEQ ID NO: 20280 - protein, 10 aa, synthetic construct
LRYSVAGSSV

SEQ ID NO: 20281 - protein, 10 aa, synthetic construct
IGMVPATGFC

SEQ ID NO: 20282 - protein, 10 aa, synthetic construct
SALLGVPKCT

SEQ ID NO: 20283 - protein, 10 aa, synthetic construct
DPHRVHLGLG

SEQ ID NO: 20284 - protein, 10 aa, synthetic construct
GVLKSLTWTG

SEQ ID NO: 20285 - protein, 10 aa, synthetic construct
IPFSRVNPDT

SEQ ID NO: 20286 - protein, 10 aa, synthetic construct
NLIVGFDPMA

SEQ ID NO: 20287 - protein, 10 aa, synthetic construct
LLPNLVGSRA

SEQ ID NO: 20288 - protein, 10 aa, synthetic construct
AGGHPEGYVN

SEQ ID NO: 20289 - protein, 7 aa, synthetic construct
YWTQRYA

SEQ ID NO: 20290 - protein, 7 aa, synthetic construct
YWGQRAV

SEQ ID NO: 20291 - protein, 7 aa, synthetic construct
YYSQQSR

SEQ ID NO: 20292 - protein, 7 aa, synthetic construct
FWTQKGS

SEQ ID NO: 20293 - protein, 7 aa, synthetic construct
YWSQRAF

SEQ ID NO: 20294 - protein, 7 aa, synthetic construct
YFGQSCR

SEQ ID NO: 20295 - protein, 7 aa, synthetic construct
FMYQKGC

SEQ ID NO: 20296 - protein, 7 aa, synthetic construct
ATRDLHR

SEQ ID NO: 20297 - protein, 7 aa, synthetic construct
FMRQSSC

SEQ ID NO: 20298 - protein, 7 aa, synthetic construct
YWGQGRC

SEQ ID NO: 20299 - protein, 7 aa, synthetic construct
FWGQRTG

SEQ ID NO: 20300 - protein, 7 aa, synthetic construct
FSHQRSL

SEQ ID NO: 20301 - protein, 7 aa, synthetic construct
FTLQRCL

SEQ ID NO: 20302 - protein, 7 aa, synthetic construct
YFAQHGF

SEQ ID NO: 20303 - protein, 7 aa, synthetic construct
YFGQGRS

SEQ ID NO: 20304 - protein, 7 aa, synthetic construct
RLFVKEA

SEQ ID NO: 20305 - protein, 7 aa, synthetic construct
FRSQQRT

SEQ ID NO: 20306 - protein, 7 aa, synthetic construct
FLSQRCA

SEQ ID NO: 20307 - protein, 7 aa, synthetic construct
FFKQVGK

SEQ ID NO: 20308 - protein, 7 aa, synthetic construct
FGFQKSQ

SEQ ID NO: 20309 - protein, 7 aa, synthetic construct
FIAQQRR

SEQ ID NO: 20310 - protein, 7 aa, synthetic construct
FSLQKRW

SEQ ID NO: 20311 - protein, 7 aa, synthetic construct
FVGQRGC

SEQ ID NO: 20312 - protein, 7 aa, synthetic construct
FRSQQFC

SEQ ID NO: 20313 - protein, 7 aa, synthetic construct
FIHQRNQ

SEQ ID NO: 20314 - protein, 7 aa, synthetic construct
FSAQRCA

SEQ ID NO: 20315 - protein, 7 aa, synthetic construct
FLSQKCH

SEQ ID NO: 20316 - protein, 7 aa, synthetic construct
FHSQGRS

SEQ ID NO: 20317 - protein, 7 aa, synthetic construct
WYSQMKG

SEQ ID NO: 20318 - protein, 7 aa, synthetic construct
CDGGVRM

SEQ ID NO: 20319 - protein, 7 aa, synthetic construct
VGYKGVG

SEQ ID NO: 20320 - protein, 7 aa, synthetic construct
FFKQVHC

SEQ ID NO: 20321 - protein, 7 aa, synthetic construct
FAYQRAS

SEQ ID NO: 20322 - protein, 7 aa, synthetic construct
FGAQKVY

SEQ ID NO: 20323 - protein, 7 aa, synthetic construct
ACNDSAR

SEQ ID NO: 20324 - protein, 7 aa, synthetic construct
YFLQKPC

SEQ ID NO: 20325 - protein, 7 aa, synthetic construct
NCAHVSG

SEQ ID NO: 20326 - protein, 7 aa, synthetic construct
ATKPALS

SEQ ID NO: 20327 - protein, 7 aa, synthetic construct
QDPIKAR

SEQ ID NO: 20328 - protein, 7 aa, synthetic construct
LSNTKCV

SEQ ID NO: 20329 - protein, 7 aa, synthetic construct
GLKSLTP

SEQ ID NO: 20330 - protein, 10 aa, synthetic construct
RLVTNKLVQL

SEQ ID NO: 20331 - protein, 10 aa, synthetic construct
RLAYMTDTLL

SEQ ID NO: 20332 - protein, 10 aa, synthetic construct
YRRMDMDRVV

SEQ ID NO: 20333 - protein, 10 aa, synthetic construct
LTGGQPRNRL

SEQ ID NO: 20334 - protein, 10 aa, synthetic construct
WWMGSDNSGI

SEQ ID NO: 20335 - protein, 10 aa, synthetic construct
VMGYLTEGCT

SEQ ID NO: 20336 - protein, 10 aa, synthetic construct
CPGDSQGSVG

SEQ ID NO: 20337 - protein, 10 aa, synthetic construct
SKTAREAFPF

SEQ ID NO: 20338 - protein, 10 aa, synthetic construct
VREGFEGYGL

SEQ ID NO: 20339 - protein, 10 aa, synthetic construct
ENFDRTRPRS

SEQ ID NO: 20340 - protein, 10 aa, synthetic construct
SYADAFCDRC

SEQ ID NO: 20341 - protein, 10 aa, synthetic construct
TYSGDGDVAC

SEQ ID NO: 20342 - protein, 10 aa, synthetic construct
RLRVDMGSWA

SEQ ID NO: 20343 - protein, 10 aa, synthetic construct
NYDSRSCSRC

SEQ ID NO: 20344 - protein, 10 aa, synthetic construct
AFPNLVSSRF

SEQ ID NO: 20345 - protein, 10 aa, synthetic construct
SYVSSSSTCI

SEQ ID NO: 20346 - protein, 10 aa, synthetic construct
QYLSGRVGQC

SEQ ID NO: 20347 - protein, 10 aa, synthetic construct
GISLNTRNHL

SEQ ID NO: 20348 - protein, 10 aa, synthetic construct
LSNDSNWVNC

SEQ ID NO: 20349 - protein, 10 aa, synthetic construct
REAWKRESGL

SEQ ID NO: 20350 - protein, 10 aa, synthetic construct
STVSVDRPRV

SEQ ID NO: 20351 - protein, 10 aa, synthetic construct
LMKTSYLESD

SEQ ID NO: 20352 - protein, 10 aa, synthetic construct
SRSTASMVCC

SEQ ID NO: 20353 - protein, 10 aa, synthetic construct
CPERSHSSVD

SEQ ID NO: 20354 - protein, 10 aa, synthetic construct
FFPNHNKSAQ

SEQ ID NO: 20355 - protein, 10 aa, synthetic construct
MDRLDRFTAC

SEQ ID NO: 20356 - protein, 10 aa, synthetic construct
ELFSQSRSGY

SEQ ID NO: 20357 - protein, 10 aa, synthetic construct
MYHLNVPKGV

SEQ ID NO: 20358 - protein, 10 aa, synthetic construct
LLPNGRGLVT

SEQ ID NO: 20359 - protein, 10 aa, synthetic construct
YFPNKLVEVA

SEQ ID NO: 20360 - protein, 7 aa, synthetic construct
YHKAMQN

SEQ ID NO: 20361 - protein, 7 aa, synthetic construct
YPSGMRL

SEQ ID NO: 20362 - protein, 7 aa, synthetic construct
YHKNMPN

SEQ ID NO: 20363 - protein, 7 aa, synthetic construct
YPFPTEA

SEQ ID NO: 20364 - protein, 7 aa, synthetic construct
VLGRPSY

SEQ ID NO: 20365 - protein, 7 aa, synthetic construct
NAREGRN

SEQ ID NO: 20366 - protein, 7 aa, synthetic construct
CRANCVP

SEQ ID NO: 20367 - protein, 7 aa, synthetic construct
LHRSGID

SEQ ID NO: 20368 - protein, 7 aa, synthetic construct
YFSGIQS

SEQ ID NO: 20369 - protein, 7 aa, synthetic construct
MIRDAYP

SEQ ID NO: 20370 - protein, 7 aa, synthetic construct
DHKGNIA

SEQ ID NO: 20371 - protein, 7 aa, synthetic construct
HHKLQTL

SEQ ID NO: 20372 - protein, 7 aa, synthetic construct
KPASTSW

SEQ ID NO: 20373 - protein, 7 aa, synthetic construct
YWSGIPE

SEQ ID NO: 20374 - protein, 7 aa, synthetic construct
RSKADDH

SEQ ID NO: 20375 - protein, 7 aa, synthetic construct
FPYGQKM

SEQ ID NO: 20376 - protein, 7 aa, synthetic construct
TDLTVYR

SEQ ID NO: 20377 - protein, 7 aa, synthetic construct
DMSTRTW

SEQ ID NO: 20378 - protein, 7 aa, synthetic construct
CKQGCMT

SEQ ID NO: 20379 - protein, 7 aa, synthetic construct
LHKFAEN

SEQ ID NO: 20380 - protein, 7 aa, synthetic construct
YVKSQVI

SEQ ID NO: 20381 - protein, 7 aa, synthetic construct
CNQKCAA

SEQ ID NO: 20382 - protein, 7 aa, synthetic construct
CNKLCTP

SEQ ID NO: 20383 - protein, 7 aa, synthetic construct
SYDGTAA

SEQ ID NO: 20384 - protein, 7 aa, synthetic construct
TFKHNPF

SEQ ID NO: 20385 - protein, 7 aa, synthetic construct
RESPYKL

SEQ ID NO: 20386 - protein, 7 aa, synthetic construct
CPRLGCA

SEQ ID NO: 20387 - protein, 7 aa, synthetic construct
PHVRQTI

SEQ ID NO: 20388 - protein, 7 aa, synthetic construct
CKQTCMM

SEQ ID NO: 20389 - protein, 7 aa, synthetic construct
RVNGDWP

SEQ ID NO: 20390 - protein, 7 aa, synthetic construct
CDKKCTT

SEQ ID NO: 20391 - protein, 7 aa, synthetic construct
CGQACKP

SEQ ID NO: 20392 - protein, 7 aa, synthetic construct
YHASGPK

SEQ ID NO: 20393 - protein, 7 aa, synthetic construct
KEGPVWP

SEQ ID NO: 20394 - protein, 7 aa, synthetic construct
HTRLSNG

SEQ ID NO: 20395 - protein, 7 aa, synthetic construct
LLASSEW

SEQ ID NO: 20396 - protein, 7 aa, synthetic construct
CTKTRDC

SEQ ID NO: 20397 - protein, 7 aa, synthetic construct
CEGRHTC

SEQ ID NO: 20398 - protein, 7 aa, synthetic construct
CNQRCAP

SEQ ID NO: 20399 - protein, 7 aa, synthetic construct
CNVTRNC

SEQ ID NO: 20400 - protein, 7 aa, synthetic construct
LRNGTNP

SEQ ID NO: 20401 - protein, 7 aa, synthetic construct
CSGSQKC

SEQ ID NO: 20402 - protein, 7 aa, synthetic construct
PCKTGGE

SEQ ID NO: 20403 - protein, 7 aa, synthetic construct
EPVARSW

SEQ ID NO: 20404 - protein, 7 aa, synthetic construct
VAYDAIV

SEQ ID NO: 20405 - protein, 7 aa, synthetic construct
CRADCHP

SEQ ID NO: 20406 - protein, 7 aa, synthetic construct
CALKNCP

SEQ ID NO: 20407 - protein, 7 aa, synthetic construct
QDVRQTK

SEQ ID NO: 20408 - protein, 7 aa, synthetic construct
CRGVTGC

SEQ ID NO: 20409 - protein, 7 aa, synthetic construct
CEKVLKP

SEQ ID NO: 20410 - protein, 7 aa, synthetic construct
YWHAKVE

SEQ ID NO: 20411 - protein, 7 aa, synthetic construct
QFVRSEP

SEQ ID NO: 20412 - protein, 7 aa, synthetic construct
DPVSPKW

SEQ ID NO: 20413 - protein, 7 aa, synthetic construct
CRTTCHE

SEQ ID NO: 20414 - protein, 7 aa, synthetic construct
CKSACHE

SEQ ID NO: 20415 - protein, 7 aa, synthetic construct
NLRGQAA

SEQ ID NO: 20416 - protein, 7 aa, synthetic construct
CARNSTC

SEQ ID NO: 20417 - protein, 7 aa, synthetic construct
VYHRTQE

SEQ ID NO: 20418 - protein, 7 aa, synthetic construct
CKDGPML

SEQ ID NO: 20419 - protein, 7 aa, synthetic construct
WYDGTGP

SEQ ID NO: 20420 - protein, 7 aa, synthetic construct
IMSSSAW

SEQ ID NO: 20421 - protein, 7 aa, synthetic construct
CKGQTMD

SEQ ID NO: 20422 - protein, 7 aa, synthetic construct
YSKSGPG

SEQ ID NO: 20423 - protein, 7 aa, synthetic construct
NMESRDW

SEQ ID NO: 20424 - protein, 7 aa, synthetic construct
CRIGVCP

SEQ ID NO: 20425 - protein, 7 aa, synthetic construct
RNDYNYP

SEQ ID NO: 20426 - protein, 7 aa, synthetic construct
PCKNGMA

SEQ ID NO: 20427 - protein, 7 aa, synthetic construct
CHKLNCA

SEQ ID NO: 20428 - protein, 7 aa, synthetic construct
CALQKCA

SEQ ID NO: 20429 - protein, 7 aa, synthetic construct
AGDDCKK

SEQ ID NO: 20430 - protein, 7 aa, synthetic construct
YNGGPMQ

SEQ ID NO: 20431 - protein, 7 aa, synthetic construct
PEDFHQL

SEQ ID NO: 20432 - protein, 7 aa, synthetic construct
CANHTKP

SEQ ID NO: 20433 - protein, 7 aa, synthetic construct
YKSDCCV

SEQ ID NO: 20434 - protein, 7 aa, synthetic construct
FTKTNCN

SEQ ID NO: 20435 - protein, 7 aa, synthetic construct
YTRTSPI

SEQ ID NO: 20436 - protein, 7 aa, synthetic construct
CIKNTAC

SEQ ID NO: 20437 - protein, 7 aa, synthetic construct
MYMSGKG

SEQ ID NO: 20438 - protein, 7 aa, synthetic construct
PDHDKCK

SEQ ID NO: 20439 - protein, 7 aa, synthetic construct
RAEDYFP

SEQ ID NO: 20440 - protein, 7 aa, synthetic construct
TKGGTYG

SEQ ID NO: 20441 - protein, 7 aa, synthetic construct
CMSTRCE

SEQ ID NO: 20442 - protein, 7 aa, synthetic construct
PGDTYPA

SEQ ID NO: 20443 - protein, 7 aa, synthetic construct
CGKLCSH

SEQ ID NO: 20444 - protein, 7 aa, synthetic construct
YHKASIG

SEQ ID NO: 20445 - protein, 7 aa, synthetic construct
TRNGMNA

SEQ ID NO: 20446 - protein, 7 aa, synthetic construct
CRANSGC

SEQ ID NO: 20447 - protein, 7 aa, synthetic construct
YKQGVMN

SEQ ID NO: 20448 - protein, 7 aa, synthetic construct
MKGGSAG

SEQ ID NO: 20449 - protein, 7 aa, synthetic construct
RDGMRGF

SEQ ID NO: 20450 - protein, 7 aa, synthetic construct
RMDTGKW

SEQ ID NO: 20451 - protein, 7 aa, synthetic construct
HHRAQDN

SEQ ID NO: 20452 - protein, 7 aa, synthetic construct
CNAMKCA

SEQ ID NO: 20453 - protein, 7 aa, synthetic construct
QLQSQQW

SEQ ID NO: 20454 - protein, 7 aa, synthetic construct
VLEDRSW

SEQ ID NO: 20455 - protein, 7 aa, synthetic construct
YARGSAL

SEQ ID NO: 20456 - protein, 7 aa, synthetic construct
CTQKGCS

SEQ ID NO: 20457 - protein, 7 aa, synthetic construct
NEAASTW

SEQ ID NO: 20458 - protein, 7 aa, synthetic construct
WLVKTSG

SEQ ID NO: 20459 - protein, 7 aa, synthetic construct
CGSKVCN

SEQ ID NO: 20460 - protein, 7 aa, synthetic construct
CSKSCMV

SEQ ID NO: 20461 - protein, 7 aa, synthetic construct
CSSVKCM

SEQ ID NO: 20462 - protein, 7 aa, synthetic construct
LWRTEPD

SEQ ID NO: 20463 - protein, 7 aa, synthetic construct
CGQKCSH

SEQ ID NO: 20464 - protein, 7 aa, synthetic construct
CADRCNS

SEQ ID NO: 20465 - protein, 7 aa, synthetic construct
YSKSMPN

SEQ ID NO: 20466 - protein, 7 aa, synthetic construct
IMAHNNW

SEQ ID NO: 20467 - protein, 7 aa, synthetic construct
CPKQLCI

SEQ ID NO: 20468 - protein, 7 aa, synthetic construct
CRLGECH

SEQ ID NO: 20469 - protein, 7 aa, synthetic construct
DLRASQW

SEQ ID NO: 20470 - protein, 7 aa, synthetic construct
CRDQCMQ

SEQ ID NO: 20471 - protein, 7 aa, synthetic construct
YAKSSPS

SEQ ID NO: 20472 - protein, 7 aa, synthetic construct
QSDYKYF

SEQ ID NO: 20473 - protein, 7 aa, synthetic construct
LSRSGRD

SEQ ID NO: 20474 - protein, 7 aa, synthetic construct
YHRLDAM

SEQ ID NO: 20475 - protein, 7 aa, synthetic construct
MRSGSGP

SEQ ID NO: 20476 - protein, 7 aa, synthetic construct
HPLASGW

SEQ ID NO: 20477 - protein, 7 aa, synthetic construct
GGTRGNT

SEQ ID NO: 20478 - protein, 7 aa, synthetic construct
YAKSAQN

SEQ ID NO: 20479 - protein, 7 aa, synthetic construct
TVGSRTA

SEQ ID NO: 20480 - protein, 7 aa, synthetic construct
YQKNMMN

SEQ ID NO: 20481 - protein, 7 aa, synthetic construct
WKDWMPN

SEQ ID NO: 20482 - protein, 15 aa, synthetic construct
GGGGGGGGGGGGGGG

SEQ ID NO: 20483 - protein, 15 aa, synthetic construct
GGGGSGGGGSGGGGS

SEQ ID NO: 20484 - protein, 12 aa, synthetic construct
YFLASRKXNGXN

SEQ ID NO: 20485 - protein, 10 aa, synthetic construct
XXSSTNGIVR

SEQ ID NO: 20486 - protein, 7 aa, synthetic construct
PSATNGV

SEQ ID NO: 20487 - protein, 8 aa, synthetic construct
  VARIANT 2: note = X is any amino acid residue other than P
  VARIANT 1: note = X is any amino acid residue other than D, K, R
  source 1..8: note = Adeno-associated virus
  VARIANT 8: note = X is V, I, or R
XXSTSNGX

SEQ ID NO: 20488 - protein, 7 aa, synthetic construct
  VARIANT 5: note = X is D, E, Q, N, or A
  VARIANT 6: note = X is N, V, T, P, G, S, M, or A
  VARIANT 7: note = X is C, G, I, A, N, R, K, S, or T
YVKSXXX

SEQ ID NO: 20489 - protein, 7 aa, synthetic construct
  VARIANT 7: note = X is C, G, I, A, N, R, K, S, or T
  VARIANT 6: note = X is N, V, T, P, G, S, M, or A
  VARIANT 5: note = X is D, E, Q, N, or A
YVKTXXX

SEQ ID NO: 20490 - protein, 7 aa, synthetic construct
  VARIANT 7: note = X is C, G, I, A, N, R, K, S, or T
  VARIANT 5: note = X is D, E, Q, N, or A
  VARIANT 6: note = X is N, V, T, P, G, S, M, or A
YVRTXXX

SEQ ID NO: 20491 - protein, 7 aa, synthetic construct
  VARIANT 5: note = X is A, V, F, T, or S
RXXDXYP

SEQ ID NO: 20492 - protein, 9 aa, synthetic construct
YWFLASTRK

SEQ ID NO: 20493 - DNA, 57 bp, synthetic construct
  source 1..57: mol_type = other DNA
atggagtttgggctgagctgggttttcctcgttgctctttttagaggtgtccagtgt

SEQ ID NO: 20494 - protein, 83 aa, synthetic construct
GTATTCCTTGGTTTTGAACCCAACCGGTCTGCGCCTGTGCMNNMNNMNNMNNMNNMNNMNNTTGGGCACTCTGGTGGTTTGTG

SEQ ID NO: 20495 - DNA, 30 bp, synthetic construct
  source 1..30: mol_type = other DNA
cactcatcgaccaatacttgtactatctct

SEQ ID NO: 20496 - protein, 86 aa, synthetic construct
ATCGACCAATACTTGTACTATCTCTCTAGAACTNNKNNKNNKNNKNNKNNKNNKNNKNNKNNKCTAAAATTCAGTGTGGCCGGACC

SEQ ID NO: 20497 - DNA, 77 bp, synthetic construct
  source 1..77: mol_type = other DNA
atcgaccaatacttgtactatctctctagaactnnknnknnknnknnknnknnkctaaaattcagtgtggccggacc

SEQ ID NO: 20498 - DNA, 25 bp, synthetic construct
  source 1..25: mol_type = other DNA
ttgtccttgttgaaggccgttggag

SEQ ID NO: 20499 - DNA, 26 bp, synthetic construct
  source 1..26: mol_type = other DNA
gtattccttggttttgaacccaaccg

SEQ ID NO: 20500 - protein, 12 aa, synthetic construct
FLYASKRXGNXN

SEQ ID NO: 20501 - protein, 7 aa, synthetic construct
  VARIANT 1: note = X is S, Y, D, N, or A
  VARIANT 6: note = X is L, Y, V, A, Q, or E
  VARIANT 7: note = X is L, A, P, D, N, or I
XYAKSXX

SEQ ID NO: 20502 - protein, 8 aa, synthetic construct
RSVSSNGV

SEQ ID NO: 20503 - protein, 7 aa, synthetic construct
  VARIANT 6: note = X is V, N, S, H, D, or R
  VARIANT 5: note = X is N, G, V, S, H, A, or R
  VARIANT 1: note = X is V, P, D, S, or L
XKSSXXW

SEQ ID NO: 20504 - protein, 7 aa, synthetic construct
  VARIANT 5: note = X is D, E, Q, N, or A
  VARIANT 6: note = X is N, V, T, P, G, S, M, or A
  VARIANT 7: note = X is C, G, I, A, N, R, K, S, or T
YVRSXXX

SEQ ID NO: 20505 - protein, 10 aa, synthetic construct
XXSSTNGVIR

SEQ ID NO: 20506 - protein, 736 aa, Adeno-associated virus 9
MAADGYLPDWLEDNLSEGIREWWALKPGAPQPKANQQHQDNARGLVLPGYKYLGPGNGLDKGEPVNAADAAALEHDKAYDQQLKAGDNPYLKYNHADAEFQERLKEDTSFGGNLGRAVFQAKKRLLEPLGLVEEAAKTAPGKKRPVEQSPQEPDSSAGIGKSGAQPAKKRLNFGQTGDTESVPDPQPIGEPPAAPSGVGSLTMASGGGAPVADNNEGADGVGSSSGNWHCDSQWLGDRVITTSTRTWALPTYNNHLYKQISNSTSGGSSNDNAYFGYSTPWGYFDFNRFHCHFSPRDWQRLINNNWGFRPKRLNFKLFNIQVKEVTDNNGVKTIANNLTSTVQVFTDSDYQLPYVLGSAHEGCLPPFPADVFMIPQYGYLTLNDGSQAVGRSSFYCLEYFPSQMLRTGNNFQFSYEFENVPFHSSYAHSQSLDRLMNPLIDQYLYYLSKTINGSGQNQQTLKFSVAGPSNMAVQGRNYIPGPSYRQQRVSTTVTQNNNSEFAWPGASSWALNGRNSLMNPGPAMASHKEGEDRFFPLSGSLIFGKQGTGRDNVDADKVMITNEEEIKTTNPVATESYGQVATNHQSAQAQAQTGWVQNQGILPGMVWQDRDVYLQGPIWAKIPHTDGNFHPSPLMGGFGMKHPPPQILIKNTPVPADPPTAFNKDKLNSFITQYSTGQVSVEIEWELQKENSKRWNPEIQYTSNYYKSNNVEFAVNTEGVYSEPRPIGTRYLTRNL

SEQ ID NO: 20507 - protein, 736 aa, synthetic construct
MAADGYLPDWLEDNLSEGIREWWALKPGAPQPKANQQHQDNARGLVLPGYKYLGPGNGLDKGEPVNAADAAALEHDKAYDQQLKAGDNPYLKYNHADAEFQERLKEDTSFGGNLGRAVFQAKKRLLEPLGLVEEAAKTAPGKKRPVEQSPQEPDSSAGIGKSGAQPAKKRLNFGQTGDTESVPDPQPIGEPPAAPSGVGSLTMASGGGAPVADNNEGADGVGSSSGNWHCDSQWLGDRVITTSTRTWALPTYNNHLYKQISNSTSGGSSNDNAYFGYSTPWGYFDFNRFHCHFSPRDWQRLINNNWGFRPKRLNFKLFNIQVKEVTDNNGVKTIANNLTSTVQVFTDSDYQLPYVLGSAHEGCLPPFPADVFMIPQYGYLTLNDGSQAVGRSSFYCLEYFPSQMLRTGNNFQFSYEFENVPFHSSYAHSQSLDRLMNPLIDQYLYYLSRTINGSGQNQQTLKFSVAGPSNMAVQGRNYIPGPSYRQQRVSTTVTQNNNSEFAWPGASSWALNGRNSLMNPGPAMASHKEGEDRFFPLSGSLIFGKQGTGRDNVDADKVMITNEEEIKTTNPVATESYGQVATNHQSAQAQAQTGWVQNQGILPGMVWQDRDVYLQGPIWAKIPHTDGNFHPSPLMGGFGMKHPPPQILIKNTPVPADPPTAFNKDKLNSFITQYSTGQVSVEIEWELQKENSKRWNPEIQYTSNYYKSNNVEFAVNTEGVYSEPRPIGTRYLTRNL

SEQ ID NO: 20508 - protein, 743 aa, synthetic construct
MAADGYLPDWLEDNLSEGIREWWALKPGAPQPKANQQHQDNARGLVLPGYKYLGPGNGLDKGEPVNAADAAALEHDKAYDQQLKAGDNPYLKYNHADAEFQERLKEDTSFGGNLGRAVFQAKKRLLEPLGLVEEAAKTAPGKKRPVEQSPQEPDSSAGIGKSGAQPAKKRLNFGQTGDTESVPDPQPIGEPPAAPSGVGSLTMASGGGAPVADNNEGADGVGSSSGNWHCDSQWLGDRVITTSTRTWALPTYNNHLYKQISNSTSGGSSNDNAYFGYSTPWGYFDFNRFHCHFSPRDWQRLINNNWGFRPKRLNFKLFNIQVKEVTDNNGVKTIANNLTSTVQVFTDSDYQLPYVLGSAHEGCLPPFPADVFMIPQYGYLTLNDGSQAVGRSSFYCLEYFPSQMLRTGNNFQFSYEFENVPFHSSYAHSQSLDRLMNPLIDQYLYYLSRTINGSGQNQQTLKFSVAGPSNMAVQGRNYIPGPSYRQQRVSTTVTQNNNSEFAWPGASSWALNGRNSLMNPGPAMASHKEGEDRFFPLSGSLIFGKQGTGRDNVDADKVMITNEEEIKTTNPVATESYGQVATNHQSAQYSRIGPNAQAQTGWVQNQGILPGMVWQDRDVYLQGPIWAKIPHTDGNFHPSPLMGGFGMKHPPPQILIKNTPVPADPPTAFNKDKLNSFITQYSTGQVSVEIEWELQKENSKRWNPEIQYTSNYYKSNNVEFAVNTEGVYSEPRPIGTRYLTRNL

SEQ ID NO: 20509 - protein, 743 aa, synthetic construct
MAADGYLPDWLEDNLSEGIREWWALKPGAPQPKANQQHQDNARGLVLPGYKYLGPGNGLDKGEPVNAADAAALEHDKAYDQQLKAGDNPYLKYNHADAEFQERLKEDTSFGGNLGRAVFQAKKRLLEPLGLVEEAAKTAPGKKRPVEQSPQEPDSSAGIGKSGAQPAKKRLNFGQTGDTESVPDPQPIGEPPAAPSGVGSLTMASGGGAPVADNNEGADGVGSSSGNWHCDSQWLGDRVITTSTRTWALPTYNNHLYKQISNSTSGGSSNDNAYFGYSTPWGYFDFNRFHCHFSPRDWQRLINNNWGFRPKRLNFKLFNIQVKEVTDNNGVKTIANNLTSTVQVFTDSDYQLPYVLGSAHEGCLPPFPADVFMIPQYGYLTLNDGSQAVGRSSFYCLEYFPSQMLRTGNNFQFSYEFENVPFHSSYAHSQSLDRLMNPLIDQYLYYLSRTINGSGQNQQTLKFSVAGPSNMAVQGRNYIPGPSYRQQRVSTTVTQNNNSEFAWPGASSWALNGRNSLMNPGPAMASHKEGEDRFFPLSGSLIFGKQGTGRDNVDADKVMITNEEEIKTTNPVATESYGQVATNHQSAQYSRLNMNAQAQTGWVQNQGILPGMVWQDRDVYLQGPIWAKIPHTDGNFHPSPLMGGFGMKHPPPQILIKNTPVPADPPTAFNKDKLNSFITQYSTGQVSVEIEWELQKENSKRWNPEIQYTSNYYKSNNVEFAVNTEGVYSEPRPIGTRYLTRNL

SEQ ID NO: 20510 - protein, 743 aa, synthetic construct
MAADGYLPDWLEDNLSEGIREWWALKPGAPQPKANQQHQDNARGLVLPGYKYLGPGNGLDKGEPVNAADAAALEHDKAYDQQLKAGDNPYLKYNHADAEFQERLKEDTSFGGNLGRAVFQAKKRLLEPLGLVEEAAKTAPGKKRPVEQSPQEPDSSAGIGKSGAQPAKKRLNFGQTGDTESVPDPQPIGEPPAAPSGVGSLTMASGGGAPVADNNEGADGVGSSSGNWHCDSQWLGDRVITTSTRTWALPTYNNHLYKQISNSTSGGSSNDNAYFGYSTPWGYFDFNRFHCHFSPRDWQRLINNNWGFRPKRLNFKLFNIQVKEVTDNNGVKTIANNLTSTVQVFTDSDYQLPYVLGSAHEGCLPPFPADVFMIPQYGYLTLNDGSQAVGRSSFYCLEYFPSQMLRTGNNFQFSYEFENVPFHSSYAHSQSLDRLMNPLIDQYLYYLSRTINGSGQNQQTLKFSVAGPSNMAVQGRNYIPGPSYRQQRVSTTVTQNNNSEFAWPGASSWALNGRNSLMNPGPAMASHKEGEDRFFPLSGSLIFGKQGTGRDNVDADKVMITNEEEIKTTNPVATESYGQVATNHQSAQYSRLNKDAQAQTGWVQNQGILPGMVWQDRDVYLQGPIWAKIPHTDGNFHPSPLMGGFGMKHPPPQILIKNTPVPADPPTAFNKDKLNSFITQYSTGQVSVEIEWELQKENSKRWNPEIQYTSNYYKSNNVEFAVNTEGVYSEPRPIGTRYLTRNL

SEQ ID NO: 20511 - protein, 743 aa, synthetic construct
MAADGYLPDWLEDNLSEGIREWWALKPGAPQPKANQQHQDNARGLVLPGYKYLGPGNGLDKGEPVNAADAAALEHDKAYDQQLKAGDNPYLKYNHADAEFQERLKEDTSFGGNLGRAVFQAKKRLLEPLGLVEEAAKTAPGKKRPVEQSPQEPDSSAGIGKSGAQPAKKRLNFGQTGDTESVPDPQPIGEPPAAPSGVGSLTMASGGGAPVADNNEGADGVGSSSGNWHCDSQWLGDRVITTSTRTWALPTYNNHLYKQISNSTSGGSSNDNAYFGYSTPWGYFDFNRFHCHFSPRDWQRLINNNWGFRPKRLNFKLFNIQVKEVTDNNGVKTIANNLTSTVQVFTDSDYQLPYVLGSAHEGCLPPFPADVFMIPQYGYLTLNDGSQAVGRSSFYCLEYFPSQMLRTGNNFQFSYEFENVPFHSSYAHSQSLDRLMNPLIDQYLYYLSRTINGSGQNQQTLKFSVAGPSNMAVQGRNYIPGPSYRQQRVSTTVTQNNNSEFAWPGASSWALNGRNSLMNPGPAMASHKEGEDRFFPLSGSLIFGKQGTGRDNVDADKVMITNEEEIKTTNPVATESYGQVATNHQSAQVHRLQDKAQAQTGWVQNQGILPGMVWQDRDVYLQGPIWAKIPHTDGNFHPSPLMGGFGMKHPPPQILIKNTPVPADPPTAFNKDKLNSFITQYSTGQVSVEIEWELQKENSKRWNPEIQYTSNYYKSNNVEFAVNTEGVYSEPRPIGTRYLTRNL

SEQ ID NO: 20512 - protein, 743 aa, synthetic construct
MAADGYLPDWLEDNLSEGIREWWALKPGAPQPKANQQHQDNARGLVLPGYKYLGPGNGLDKGEPVNAADAAALEHDKAYDQQLKAGDNPYLKYNHADAEFQERLKEDTSFGGNLGRAVFQAKKRLLEPLGLVEEAAKTAPGKKRPVEQSPQEPDSSAGIGKSGAQPAKKRLNFGQTGDTESVPDPQPIGEPPAAPSGVGSLTMASGGGAPVADNNEGADGVGSSSGNWHCDSQWLGDRVITTSTRTWALPTYNNHLYKQISNSTSGGSSNDNAYFGYSTPWGYFDFNRFHCHFSPRDWQRLINNNWGFRPKRLNFKLFNIQVKEVTDNNGVKTIANNLTSTVQVFTDSDYQLPYVLGSAHEGCLPPFPADVFMIPQYGYLTLNDGSQAVGRSSFYCLEYFPSQMLRTGNNFQFSYEFENVPFHSSYAHSQSLDRLMNPLIDQYLYYLSRTINGSGQNQQTLKFSVAGPSNMAVQGRNYIPGPSYRQQRVSTTVTQNNNSEFAWPGASSWALNGRNSLMNPGPAMASHKEGEDRFFPLSGSLIFGKQGTGRDNVDADKVMITNEEEIKTTNPVATESYGQVATNHQSAQYHRLSNNAQAQTGWVQNQGILPGMVWQDRDVYLQGPIWAKIPHTDGNFHPSPLMGGFGMKHPPPQILIKNTPVPADPPTAFNKDKLNSFITQYSTGQVSVEIEWELQKENSKRWNPEIQYTSNYYKSNNVEFAVNTEGVYSEPRPIGTRYLTRNL

SEQ ID NO: 20513 - protein, 743 aa, synthetic construct
MAADGYLPDWLEDNLSEGIREWWALKPGAPQPKANQQHQDNARGLVLPGYKYLGPGNGLDKGEPVNAADAAALEHDKAYDQQLKAGDNPYLKYNHADAEFQERLKEDTSFGGNLGRAVFQAKKRLLEPLGLVEEAAKTAPGKKRPVEQSPQEPDSSAGIGKSGAQPAKKRLNFGQTGDTESVPDPQPIGEPPAAPSGVGSLTMASGGGAPVADNNEGADGVGSSSGNWHCDSQWLGDRVITTSTRTWALPTYNNHLYKQISNSTSGGSSNDNAYFGYSTPWGYFDFNRFHCHFSPRDWQRLINNNWGFRPKRLNFKLFNIQVKEVTDNNGVKTIANNLTSTVQVFTDSDYQLPYVLGSAHEGCLPPFPADVFMIPQYGYLTLNDGSQAVGRSSFYCLEYFPSQMLRTGNNFQFSYEFENVPFHSSYAHSQSLDRLMNPLIDQYLYYLSRTINGSGQNQQTLKFSVAGPSNMAVQGRNYIPGPSYRQQRVSTTVTQNNNSEFAWPGASSWALNGRNSLMNPGPAMASHKEGEDRFFPLSGSLIFGKQGTGRDNVDADKVMITNEEEIKTTNPVATESYGQVATNHQSAQLHALSHNAQAQTGWVQNQGILPGMVWQDRDVYLQGPIWAKIPHTDGNFHPSPLMGGFGMKHPPPQILIKNTPVPADPPTAFNKDKLNSFITQYSTGQVSVEIEWELQKENSKRWNPEIQYTSNYYKSNNVEFAVNTEGVYSEPRPIGTRYLTRNL

SEQ ID NO: 20514 - DNA, 21 bp, synthetic construct
  source 1..21: mol_type = other DNA
tgtagaccaccgccaaggctt

SEQ ID NO: 20515 - DNA, 21 bp, synthetic construct
  source 1..21: mol_type = other DNA
tgttccaaaaaggctacaaac

SEQ ID NO: 20516 - DNA, 21 bp, synthetic construct
  source 1..21: mol_type = other DNA
cttcataaactcgcgaacaat

SEQ ID NO: 20517 - DNA, 21 bp, synthetic construct
  source 1..21: mol_type = other DNA
atgaccggattatcttgcctc

SEQ ID NO: 20518 - DNA, 21 bp, synthetic construct
  source 1..21: mol_type = other DNA
ttatgcaaaccttgtttgcat

SEQ ID NO: 20519 - DNA, 21 bp, synthetic construct
  source 1..21: mol_type = other DNA
acgccttactgcaatctccgt

SEQ ID NO: 20520 - DNA, 21 bp, synthetic construct
  source 1..21: mol_type = other DNA
ctgcacaagctatctattaat

SEQ ID NO: 20521 - DNA, 21 bp, synthetic construct
  source 1..21: mol_type = other DNA
ctatctaaactcagttttaat

SEQ ID NO: 20522 - DNA, 21 bp, synthetic construct
  source 1..21: mol_type = other DNA
atagcattgaagggttgggat

SEQ ID NO: 20523 - DNA, 21 bp, synthetic construct
  source 1..21: mol_type = other DNA
ctgagcaagttgtcattcaat

SEQ ID NO: 20524 - DNA, 21 bp, synthetic construct
  source 1..21: mol_type = other DNA
ttacataaattgagcatcaac

SEQ ID NO: 20525 - DNA, 21 bp, synthetic construct
  source 1..21: mol_type = other DNA
ctgtcgaaactatcgatcaac

SEQ ID NO: 20526 - DNA, 21 bp, synthetic construct
  source 1..21: mol_type = other DNA
atcgctctcaagggttgggac

SEQ ID NO: 20527 - DNA, 21 bp, synthetic construct
  source 1..21: mol_type = other DNA
cttcacaagctgaccgtgaac

SEQ ID NO: 20528 - DNA, 21 bp, synthetic construct
  source 1..21: mol_type = other DNA
cttcacaaattgggagataac

SEQ ID NO: 20529 - DNA, 21 bp, synthetic construct
  source 1..21: mol_type = other DNA
ttgcataaactcggcgacaac

SEQ ID NO: 20530 - DNA, 21 bp, synthetic construct
  source 1..21: mol_type = other DNA
ttgcacaagttgtcagtgaac

SEQ ID NO: 20531 - DNA, 21 bp, synthetic construct
  source 1..21: mol_type = other DNA
ttgcataaattaacagttaat

SEQ ID NO: 20532 - DNA, 21 bp, synthetic construct
  source 1..21: mol_type = other DNA
atagcgttaaaagggtgggat

SEQ ID NO: 20533 - DNA, 21 bp, synthetic construct
  source 1..21: mol_type = other DNA
ttgcacaagttatcaccaaac

SEQ ID NO: 20534 - DNA, 21 bp, synthetic construct
  source 1..21: mol_type = other DNA
ttacataagttggccaataac

SEQ ID NO: 20535 - DNA, 21 bp, synthetic construct
  source 1..21: mol_type = other DNA
tgcaaaagcggttgctgtcct

SEQ ID NO: 20536 - DNA, 21 bp, synthetic construct
  source 1..21: mol_type = other DNA
ctacataagcttatgcccgac

SEQ ID NO: 20537 - DNA, 21 bp, synthetic construct
  source 1..21: mol_type = other DNA
agacttgtcgacgtgttccct

SEQ ID NO: 20538 - DNA, 21 bp, synthetic construct
  source 1..21: mol_type = other DNA
ttgcacaaactaagcgaaaac

SEQ ID NO: 20539 - DNA, 21 bp, synthetic construct
  source 1..21: mol_type = other DNA
ttattatccagcgcgacttgg

SEQ ID NO: 20540 - DNA, 21 bp, synthetic construct
  source 1..21: mol_type = other DNA
tattctaaattaggtcccgac

SEQ ID NO: 20541 - DNA, 21 bp, synthetic construct
  source 1..21: mol_type = other DNA
ttgcatagattattggacgac

SEQ ID NO: 20542 - DNA, 21 bp, synthetic construct
  source 1..21: mol_type = other DNA
ctacataaactaagcgttaat

SEQ ID NO: 20543 - DNA, 21 bp, synthetic construct
  source 1..21: mol_type = other DNA
cttcacaaattaagtatgaat

SEQ ID NO: 20544 - DNA, 21 bp, synthetic construct
  source 1..21: mol_type = other DNA
ttgtcaaagttgtcttataat

SEQ ID NO: 20545 - DNA, 21 bp, synthetic construct
  source 1..21: mol_type = other DNA
cttcacaagttagctcaaaat

SEQ ID NO: 20546 - DNA, 21 bp, synthetic construct
  source 1..21: mol_type = other DNA
ctaactcgcttaagtgccaac

SEQ ID NO: 20547 - DNA, 21 bp, synthetic construct
  source 1..21: mol_type = other DNA
ctccaccggctacttgatgac

SEQ ID NO: 20548 - DNA, 21 bp, synthetic construct
  source 1..21: mol_type = other DNA
aggctcgaagacgtttttcca

SEQ ID NO: 20549 - DNA, 21 bp, synthetic construct
  source 1..21: mol_type = other DNA
ctccataagttaagttttgat

SEQ ID NO: 20550 - DNA, 21 bp, synthetic construct
  source 1..21: mol_type = other DNA
cttcacaagcttatgccggat

SEQ ID NO: 20551 - DNA, 21 bp, synthetic construct
  source 1..21: mol_type = other DNA
cttagcaaaatcggtcccaac

SEQ ID NO: 20552 - DNA, 21 bp, synthetic construct
  source 1..21: mol_type = other DNA
ctccacaagctcgctaataat

SEQ ID NO: 20553 - DNA, 21 bp, synthetic construct
  source 1..21: mol_type = other DNA
ttacacaaattgatgaataat

SEQ ID NO: 20554 - DNA, 21 bp, synthetic construct
  source 1..21: mol_type = other DNA
ttaagtaagcttagcattaat

SEQ ID NO: 20555 - DNA, 21 bp, synthetic construct
  source 1..21: mol_type = other DNA
ttatctaagctgaacttaaat

SEQ ID NO: 20556 - DNA, 21 bp, synthetic construct
  source 1..21: mol_type = other DNA
ttgcacaaactgtcatttgac

SEQ ID NO: 20557 - DNA, 21 bp, synthetic construct
  source 1..21: mol_type = other DNA
ttgcacaaattgatgcctgat

SEQ ID NO: 20558 - DNA, 21 bp, synthetic construct
  source 1..21: mol_type = other DNA
agagaagacttcgtgcagtgg

SEQ ID NO: 20559 - DNA, 21 bp, synthetic construct
  source 1..21: mol_type = other DNA
ctgcacaaattaagcacgaac

SEQ ID NO: 20560 - DNA, 21 bp, synthetic construct
  source 1..21: mol_type = other DNA
ttagcgaagacgggctataat

SEQ ID NO: 20561 - DNA, 21 bp, synthetic construct
  source 1..21: mol_type = other DNA
atcgccctcaaaggatgggac

SEQ ID NO: 20562 - DNA, 21 bp, synthetic construct
  source 1..21: mol_type = other DNA
ctaagcaaactcagctacaat

SEQ ID NO: 20563 - DNA, 21 bp, synthetic construct
  source 1..21: mol_type = other DNA
cttcataagttgtcggagaat

SEQ ID NO: 20564 - DNA, 21 bp, synthetic construct
  source 1..21: mol_type = other DNA
ttgtcgaggctaggaccagat

SEQ ID NO: 20565 - DNA, 21 bp, synthetic construct
  source 1..21: mol_type = other DNA
aggctcgagtcggctatttgg

SEQ ID NO: 20566 - DNA, 21 bp, synthetic construct
  source 1..21: mol_type = other DNA
gttctctctgcctcgacgtgg

SEQ ID NO: 20567 - DNA, 21 bp, synthetic construct
  source 1..21: mol_type = other DNA
cgtttggaggatgtgttcccc

SEQ ID NO: 20568 - DNA, 21 bp, synthetic construct
  source 1..21: mol_type = other DNA
cttcataaactaagtccgaat

SEQ ID NO: 20569 - DNA, 21 bp, synthetic construct
  source 1..21: mol_type = other DNA
gttaacgattatacaatcttc

SEQ ID NO: 20570 - DNA, 21 bp, synthetic construct
  source 1..21: mol_type = other DNA
ttgagtagaattgggccggac

SEQ ID NO: 20571 - DNA, 21 bp, synthetic construct
  source 1..21: mol_type = other DNA
cttcataagctgggcgagaat

SEQ ID NO: 20572 - DNA, 21 bp, synthetic construct
  source 1..21: mol_type = other DNA
cccatggaagccagatcctgg

SEQ ID NO: 20573 - DNA, 21 bp, synthetic construct
  source 1..21: mol_type = other DNA
cttcacaagttgagtccatta

SEQ ID NO: 20574 - DNA, 21 bp, synthetic construct
  source 1..21: mol_type = other DNA
ttgcataaattggccaacaac

SEQ ID NO: 20575 - DNA, 21 bp, synthetic construct
  source 1..21: mol_type = other DNA
ctccacaaattgagcctcaat

SEQ ID NO: 20576 - DNA, 21 bp, synthetic construct
  source 1..21: mol_type = other DNA
ctacacaaattaagcactaat

SEQ ID NO: 20577 - DNA, 21 bp, synthetic construct
  source 1..21: mol_type = other DNA
ttgcataagttgttgaacgac

SEQ ID NO: 20578 - DNA, 21 bp, synthetic construct
  source 1..21: mol_type = other DNA
ctacataaactttctatcgac

SEQ ID NO: 20579 - DNA, 21 bp, synthetic construct
  source 1..21: mol_type = other DNA
cttcacaagttgatgcctaat

SEQ ID NO: 20580 - DNA, 21 bp, synthetic construct
  source 1..21: mol_type = other DNA
ttgcataagctctcgacaaac

SEQ ID NO: 20581 - DNA, 21 bp, synthetic construct
  source 1..21: mol_type = other DNA
tatagcaaattaggaccggat

SEQ ID NO: 20582 - DNA, 21 bp, synthetic construct
  source 1..21: mol_type = other DNA
atattatcgtctacgacctgg

SEQ ID NO: 20583 - DNA, 21 bp, synthetic construct
  source 1..21: mol_type = other DNA
ttacataaactctcgttgaac

SEQ ID NO: 20584 - DNA, 21 bp, synthetic construct
  source 1..21: mol_type = other DNA
aggactcctacctgtaaacca

SEQ ID NO: 20585 - DNA, 21 bp, synthetic construct
  source 1..21: mol_type = other DNA
tgtgctcccgatcatagagag

SEQ ID NO: 20586 - DNA, 21 bp, synthetic construct
  source 1..21: mol_type = other DNA
ctacataagttgagcgtcgac

SEQ ID NO: 20587 - DNA, 21 bp, synthetic construct
  source 1..21: mol_type = other DNA
ttacacaaactggcgcagaac

SEQ ID NO: 20588 - DNA, 21 bp, synthetic construct
  source 1..21: mol_type = other DNA
ttgcataagctgacggttaat

SEQ ID NO: 20589 - DNA, 21 bp, synthetic construct
  source 1..21: mol_type = other DNA
ttgcacaagctgaataacaat

SEQ ID NO: 20590 - DNA, 21 bp, synthetic construct
  source 1..21: mol_type = other DNA
ttgcacaagctaagcattgat

SEQ ID NO: 20591 - DNA, 21 bp, synthetic construct
  source 1..21: mol_type = other DNA
ttttcaaagttagggccgaac

SEQ ID NO: 20592 - DNA, 21 bp, synthetic construct
  source 1..21: mol_type = other DNA
ctggcaaaaagcggcccaaat

SEQ ID NO: 20593 - DNA, 21 bp, synthetic construct
  source 1..21: mol_type = other DNA
ttacataagctttcgacgaat

SEQ ID NO: 20594 - DNA, 21 bp, synthetic construct
  source 1..21: mol_type = other DNA
ttatcaaaactgtccccaaac

SEQ ID NO: 20595 - DNA, 21 bp, synthetic construct
  source 1..21: mol_type = other DNA
aggaccattgatgtattccct

SEQ ID NO: 20596 - DNA, 21 bp, synthetic construct
  source 1..21: mol_type = other DNA
ttacataaattgtcacccgac

SEQ ID NO: 20597 - DNA, 21 bp, synthetic construct
  source 1..21: mol_type = other DNA
tatgctaagaacgggcccaat

SEQ ID NO: 20598 - DNA, 21 bp, synthetic construct
  source 1..21: mol_type = other DNA
ttgcataaactaatgccgaac

SEQ ID NO: 20599 - DNA, 21 bp, synthetic construct
  source 1..21: mol_type = other DNA
ttaactaagttgagtcctaat

SEQ ID NO: 20600 - DNA, 21 bp, synthetic construct
  source 1..21: mol_type = other DNA
cgtttgctcgacgtgtatccg

SEQ ID NO: 20601 - DNA, 21 bp, synthetic construct
  source 1..21: mol_type = other DNA
ttacatcgtttgctcgatgat

SEQ ID NO: 20602 - DNA, 21 bp, synthetic construct
  source 1..21: mol_type = other DNA
ttacacaagcttagtgagaac

SEQ ID NO: 20603 - DNA, 21 bp, synthetic construct
  source 1..21: mol_type = other DNA
cttacgaggcttagccctaac

SEQ ID NO: 20604 - DNA, 21 bp, synthetic construct
  source 1..21: mol_type = other DNA
cttcataaattgtccgaaaat

SEQ ID NO: 20605 - DNA, 21 bp, synthetic construct
  source 1..21: mol_type = other DNA
ctccacaaattaactgtaaac

SEQ ID NO: 20606 - DNA, 21 bp, synthetic construct
  source 1..21: mol_type = other DNA
ctacacaaattgaatccagat

SEQ ID NO: 20607 - DNA, 21 bp, synthetic construct
  source 1..21: mol_type = other DNA
ctacataagttgtcccacgac

SEQ ID NO: 20608 - DNA, 21 bp, synthetic construct
  source 1..21: mol_type = other DNA
tatagtaaacttcaggataac

SEQ ID NO: 20609 - DNA, 21 bp, synthetic construct
  source 1..21: mol_type = other DNA
ttgcataaactctcgatgaac

SEQ ID NO: 20610 - DNA, 21 bp, synthetic construct
  source 1..21: mol_type = other DNA
ctccacaagcttatgaacaac

SEQ ID NO: 20611 - DNA, 21 bp, synthetic construct
  source 1..21: mol_type = other DNA
ttacataaactttcaatagac

SEQ ID NO: 20612 - DNA, 21 bp, synthetic construct
  source 1..21: mol_type = other DNA
ctccatagacttttagacgac

SEQ ID NO: 20613 - DNA, 21 bp, synthetic construct
  source 1..21: mol_type = other DNA
atgcacaaactttcaccaaat

SEQ ID NO: 20614 - DNA, 21 bp, synthetic construct
  source 1..21: mol_type = other DNA
cggacacctgaagtgtttcca

SEQ ID NO: 20615 - DNA, 21 bp, synthetic construct
  source 1..21: mol_type = other DNA
tacttgaaatccgacacgaat

SEQ ID NO: 20616 - DNA, 21 bp, synthetic construct
  source 1..21: mol_type = other DNA
ctctgcaaaccctgcttgata

SEQ ID NO: 20617 - DNA, 21 bp, synthetic construct
  source 1..21: mol_type = other DNA
ttacataagctaggggacaat

SEQ ID NO: 20618 - DNA, 21 bp, synthetic construct
  source 1..21: mol_type = other DNA
ttccacaagctaggcattaat

SEQ ID NO: 20619 - DNA, 21 bp, synthetic construct
  source 1..21: mol_type = other DNA
tacgttaaaagcgacgtgaat

SEQ ID NO: 20620 - DNA, 21 bp, synthetic construct
  source 1..21: mol_type = other DNA
tttcacaaattagggcctgat

SEQ ID NO: 20621 - DNA, 21 bp, synthetic construct
  source 1..21: mol_type = other DNA
aacgcacttaagggatgggat

SEQ ID NO: 20622 - DNA, 21 bp, synthetic construct
  source 1..21: mol_type = other DNA
cttcacaagttacagcagaac

SEQ ID NO: 20623 - DNA, 21 bp, synthetic construct
  source 1..21: mol_type = other DNA
ttatctaagatagggccaaat

SEQ ID NO: 20624 - DNA, 21 bp, synthetic construct
  source 1..21: mol_type = other DNA
ttgcacaagcttagtcatgat

SEQ ID NO: 20625 - DNA, 21 bp, synthetic construct
  source 1..21: mol_type = other DNA
ttaagtaaattatcccaaaat

SEQ ID NO: 20626 - DNA, 21 bp, synthetic construct
  source 1..21: mol_type = other DNA
ttacacaaggctggtcccaac

SEQ ID NO: 20627 - DNA, 21 bp, synthetic construct
  source 1..21: mol_type = other DNA
tattccaaagtcgggccgaaa

SEQ ID NO: 20628 - DNA, 21 bp, synthetic construct
  source 1..21: mol_type = other DNA
cctttaatgtccagggactgg

SEQ ID NO: 20629 - DNA, 21 bp, synthetic construct
  source 1..21: mol_type = other DNA
ttaagcaaattgggtccgaac

SEQ ID NO: 20630 - DNA, 21 bp, synthetic construct
  source 1..21: mol_type = other DNA
aaggacgaattcaccacattc

SEQ ID NO: 20631 - DNA, 21 bp, synthetic construct
  source 1..21: mol_type = other DNA
tacgttaagtcccaaaccggg

SEQ ID NO: 20632 - DNA, 21 bp, synthetic construct
  source 1..21: mol_type = other DNA
agaacactcgatgtgttccca

SEQ ID NO: 20633 - DNA, 21 bp, synthetic construct
  source 1..21: mol_type = other DNA
ttacacaaattgatgcctgac

SEQ ID NO: 20634 - DNA, 21 bp, synthetic construct
  source 1..21: mol_type = other DNA
cttcacaaactcctcaatgat

SEQ ID NO: 20635 - DNA, 21 bp, synthetic construct
  source 1..21: mol_type = other DNA
ctaagtcgtttggggcctgac

SEQ ID NO: 20636 - DNA, 21 bp, synthetic construct
  source 1..21: mol_type = other DNA
ctttctaaactgaacgagaac

SEQ ID NO: 20637 - DNA, 21 bp, synthetic construct
  source 1..21: mol_type = other DNA
atgcataagttgagtccgaac

SEQ ID NO: 20638 - DNA, 21 bp, synthetic construct
  source 1..21: mol_type = other DNA
ctgaccaggataagccccgac

SEQ ID NO: 20639 - DNA, 21 bp, synthetic construct
  source 1..21: mol_type = other DNA
atgcataagttgtcagtgaat

SEQ ID NO: 20640 - DNA, 21 bp, synthetic construct
  source 1..21: mol_type = other DNA
ttccataagctgggtccagac

SEQ ID NO: 20641 - DNA, 21 bp, synthetic construct
  source 1..21: mol_type = other DNA
tactttacaggcatagttgcg

SEQ ID NO: 20642 - DNA, 21 bp, synthetic construct
  source 1..21: mol_type = other DNA
ttgcataaacttcaacaaaac

SEQ ID NO: 20643 - DNA, 21 bp, synthetic construct
  source 1..21: mol_type = other DNA
tatgtcaaaagccaacttggt

SEQ ID NO: 20644 - DNA, 21 bp, synthetic construct
  source 1..21: mol_type = other DNA
cttcacaaattaggagataat

SEQ ID NO: 20645 - DNA, 21 bp, synthetic construct
  source 1..21: mol_type = other DNA
ttgcacaagttgtccccctta

SEQ ID NO: 20646 - DNA, 21 bp, synthetic construct
  source 1..21: mol_type = other DNA
ttgcataagctgtcaactgat

SEQ ID NO: 20647 - DNA, 21 bp, synthetic construct
  source 1..21: mol_type = other DNA
ctacacgccaagctaccgaat

SEQ ID NO: 20648 - DNA, 21 bp, synthetic construct
  source 1..21: mol_type = other DNA
ctgcacaagttgagtatcgat

SEQ ID NO: 20649 - DNA, 21 bp, synthetic construct
  source 1..21: mol_type = other DNA
ctacatcgcttgaaccccgac

SEQ ID NO: 20650 - DNA, 21 bp, synthetic construct
  source 1..21: mol_type = other DNA
ttagctcgaaccggaccggac

SEQ ID NO: 20651 - DNA, 21 bp, synthetic construct
  source 1..21: mol_type = other DNA
cttcacaagctcaataacaac

SEQ ID NO: 20652 - DNA, 21 bp, synthetic construct
  source 1..21: mol_type = other DNA
tatagcaagctgggacctgat

SEQ ID NO: 20653 - DNA, 21 bp, synthetic construct
  source 1..21: mol_type = other DNA
cgtgatgaaacggttttcccc

SEQ ID NO: 20654 - DNA, 21 bp, synthetic construct
  source 1..21: mol_type = other DNA
tacagcaaaataggagccaac

SEQ ID NO: 20655 - DNA, 21 bp, synthetic construct
  source 1..21: mol_type = other DNA
ttgcacgtcttgggtcctaat

SEQ ID NO: 20656 - DNA, 21 bp, synthetic construct
  source 1..21: mol_type = other DNA
tatagcaaggtaggcccagac

SEQ ID NO: 20657 - DNA, 21 bp, synthetic construct
  source 1..21: mol_type = other DNA
ttgtcaaagctgagcgataac

SEQ ID NO: 20658 - DNA, 21 bp, synthetic construct
  source 1..21: mol_type = other DNA
ttacataaactatcccctctg

SEQ ID NO: 20659 - DNA, 21 bp, synthetic construct
  source 1..21: mol_type = other DNA
ctcagcaaggttggcttaaac

SEQ ID NO: 20660 - DNA, 21 bp, synthetic construct
  source 1..21: mol_type = other DNA
ttgcataagctcaaccctgac

SEQ ID NO: 20661 - DNA, 21 bp, synthetic construct
  source 1..21: mol_type = other DNA
ttgcatgctaaattgccaaac

SEQ ID NO: 20662 - DNA, 21 bp, synthetic construct
  source 1..21: mol_type = other DNA
atactttctagcagtaattgg

SEQ ID NO: 20663 - DNA, 21 bp, synthetic construct
  source 1..21: mol_type = other DNA
ttgcacaaattaggagaaaat

SEQ ID NO: 20664 - DNA, 21 bp, synthetic construct
  source 1..21: mol_type = other DNA
ttgacccgtttgtctccaaat

SEQ ID NO: 20665 - DNA, 21 bp, synthetic construct
  source 1..21: mol_type = other DNA
aaagatgacttctcgacgtgg

SEQ ID NO: 20666 - DNA, 21 bp, synthetic construct
  source 1..21: mol_type = other DNA
ttgcatagaaaagggatcgat

SEQ ID NO: 20667 - DNA, 21 bp, synthetic construct
  source 1..21: mol_type = other DNA
tacgtcaagagtgacccgggc

SEQ ID NO: 20668 - DNA, 21 bp, synthetic construct
  source 1..21: mol_type = other DNA
tatgtgaagtcggatgttaac

SEQ ID NO: 20669 - DNA, 21 bp, synthetic construct
  source 1..21: mol_type = other DNA
ttattcgatggaactggccct

SEQ ID NO: 20670 - DNA, 21 bp, synthetic construct
  source 1..21: mol_type = other DNA
ctatctaagctttctgccaac

SEQ ID NO: 20671 - DNA, 21 bp, synthetic construct
  source 1..21: mol_type = other DNA
ttaactcgtatctcaccagat

SEQ ID NO: 20672 - DNA, 21 bp, synthetic construct
  source 1..21: mol_type = other DNA
gagatggcctcacacggctgg

SEQ ID NO: 20673 - DNA, 21 bp, synthetic construct
  source 1..21: mol_type = other DNA
aaagatgattttaccagcttt

SEQ ID NO: 20674 - DNA, 21 bp, synthetic construct
  source 1..21: mol_type = other DNA
gttgatagtacgaacggtatt

SEQ ID NO: 20675 - DNA, 21 bp, synthetic construct
  source 1..21: mol_type = other DNA
atgcacaaactcagtgtcaac

SEQ ID NO: 20676 - DNA, 21 bp, synthetic construct
  source 1..21: mol_type = other DNA
atcctaacgtcggctacttgg

SEQ ID NO: 20677 - DNA, 21 bp, synthetic construct
  source 1..21: mol_type = other DNA
tattctaaactgaatcctctc

SEQ ID NO: 20678 - DNA, 21 bp, synthetic construct
  source 1..21: mol_type = other DNA
ctcgcgaggacagggcccgat

SEQ ID NO: 20679 - DNA, 21 bp, synthetic construct
  source 1..21: mol_type = other DNA
gttggttgcgcccatttaccc

SEQ ID NO: 20680 - DNA, 21 bp, synthetic construct
  source 1..21: mol_type = other DNA
ctgaccaaactttcgccaaac

SEQ ID NO: 20681 - DNA, 21 bp, synthetic construct
  source 1..21: mol_type = other DNA
ttagcgcgattggggccgaat

SEQ ID NO: 20682 - DNA, 21 bp, synthetic construct
  source 1..21: mol_type = other DNA
ttgtcgagaataggtccagac

SEQ ID NO: 20683 - DNA, 21 bp, synthetic construct
  source 1..21: mol_type = other DNA
ggaggtataggcagtgtatgg

SEQ ID NO: 20684 - DNA, 21 bp, synthetic construct
  source 1..21: mol_type = other DNA
ctgagtaagttaaatctgaac

SEQ ID NO: 20685 - DNA, 21 bp, synthetic construct
  source 1..21: mol_type = other DNA
cgaatcatagatgctttcccg

SEQ ID NO: 20686 - DNA, 21 bp, synthetic construct
  source 1..21: mol_type = other DNA
ttaagtaaaattggccccaat

SEQ ID NO: 20687 - DNA, 21 bp, synthetic construct
  source 1..21: mol_type = other DNA
ctttctaaagttgggatgaat

SEQ ID NO: 20688 - DNA, 21 bp, synthetic construct
  source 1..21: mol_type = other DNA
cgaacgatagacgtttttcca

SEQ ID NO: 20689 - DNA, 21 bp, synthetic construct
  source 1..21: mol_type = other DNA
gtgttgtcgagcgccaactgg

SEQ ID NO: 20690 - DNA, 21 bp, synthetic construct
  source 1..21: mol_type = other DNA
cgtctggctgatgtattcccg

SEQ ID NO: 20691 - DNA, 21 bp, synthetic construct
  source 1..21: mol_type = other DNA
ttagctaagtcaggtccgaac

SEQ ID NO: 20692 - DNA, 21 bp, synthetic construct
  source 1..21: mol_type = other DNA
aaggacgactttacaacctat

SEQ ID NO: 20693 - DNA, 21 bp, synthetic construct
  source 1..21: mol_type = other DNA
cgacttgaggatgtttttccc

SEQ ID NO: 20694 - DNA, 21 bp, synthetic construct
  source 1..21: mol_type = other DNA
ctttttgacggcacagcctca

SEQ ID NO: 20695 - DNA, 21 bp, synthetic construct
  source 1..21: mol_type = other DNA
tacgcaaagttaggtccaaac

SEQ ID NO: 20696 - DNA, 21 bp, synthetic construct
  source 1..21: mol_type = other DNA
ttaacgagactgtcagcaaat

SEQ ID NO: 20697 - DNA, 21 bp, synthetic construct
  source 1..21: mol_type = other DNA
aaagacgattttacgacattt

SEQ ID NO: 20698 - DNA, 21 bp, synthetic construct
  source 1..21: mol_type = other DNA
attgcaacgttgggatgggat

SEQ ID NO: 20699 - DNA, 21 bp, synthetic construct
  source 1..21: mol_type = other DNA
tatgtgaaaagtgacagaggc

SEQ ID NO: 20700 - DNA, 21 bp, synthetic construct
  source 1..21: mol_type = other DNA
ctctccaaagtgggcaacaat

SEQ ID NO: 20701 - DNA, 21 bp, synthetic construct
  source 1..21: mol_type = other DNA
gtagactctactaatggtgtt

SEQ ID NO: 20702 - DNA, 21 bp, synthetic construct
  source 1..21: mol_type = other DNA
gtaatcagtacaaatggtatt

SEQ ID NO: 20703 - DNA, 21 bp, synthetic construct
  source 1..21: mol_type = other DNA
tacttcacgggcatattagct

SEQ ID NO: 20704 - DNA, 21 bp, synthetic construct
  source 1..21: mol_type = other DNA
gttctttcgtctagcatgtgg

SEQ ID NO: 20705 - DNA, 21 bp, synthetic construct
  source 1..21: mol_type = other DNA
tatgtcaagagccagaccaat

SEQ ID NO: 20706 - DNA, 21 bp, synthetic construct
  source 1..21: mol_type = other DNA
tattcaaaagcaggagggggt

SEQ ID NO: 20707 - DNA, 21 bp, synthetic construct
  source 1..21: mol_type = other DNA
tatgtaaaaagtcagacggga

SEQ ID NO: 20708 - DNA, 21 bp, synthetic construct
  source 1..21: mol_type = other DNA
cggttaattgatgcgttcccc

SEQ ID NO: 20709 - DNA, 21 bp, synthetic construct
  source 1..21: mol_type = other DNA
ttaagtaaggtgggtatgaac

SEQ ID NO: 20710 - DNA, 21 bp, synthetic construct
  source 1..21: mol_type = other DNA
tgcacgtcaaagacgttgcat

SEQ ID NO: 20711 - DNA, 21 bp, synthetic construct
  source 1..21: mol_type = other DNA
tatgcgaaggccgggcctaat

SEQ ID NO: 20712 - DNA, 21 bp, synthetic construct
  source 1..21: mol_type = other DNA
agggacgagaccgtgtttccg

SEQ ID NO: 20713 - DNA, 21 bp, synthetic construct
  source 1..21: mol_type = other DNA
ctccacaagctcagcccagac

SEQ ID NO: 20714 - DNA, 21 bp, synthetic construct
  source 1..21: mol_type = other DNA
ttgagtagaattgggccgaat

SEQ ID NO: 20715 - DNA, 21 bp, synthetic construct
  source 1..21: mol_type = other DNA
ctcgccaggcttggcccaaac

SEQ ID NO: 20716 - DNA, 21 bp, synthetic construct
  source 1..21: mol_type = other DNA
tattttaccgggattctagag

SEQ ID NO: 20717 - DNA, 21 bp, synthetic construct
  source 1..21: mol_type = other DNA
ttgatgatcgacgcgttcccc

SEQ ID NO: 20718 - DNA, 21 bp, synthetic construct
  source 1..21: mol_type = other DNA
cgacttgaggatgcgtttccg

SEQ ID NO: 20719 - DNA, 21 bp, synthetic construct
  source 1..21: mol_type = other DNA
ctatcccggatcggtcccaat

SEQ ID NO: 20720 - DNA, 21 bp, synthetic construct
  source 1..21: mol_type = other DNA
gtcgctcttaaggggtgggac

SEQ ID NO: 20721 - DNA, 21 bp, synthetic construct
  source 1..21: mol_type = other DNA
cttcacaagttaaatgagaac

SEQ ID NO: 20722 - DNA, 21 bp, synthetic construct
  source 1..21: mol_type = other DNA
tactcaaaagtcggacctgat

SEQ ID NO: 20723 - DNA, 21 bp, synthetic construct
  source 1..21: mol_type = other DNA
atacttagctcgtcaacatgg

SEQ ID NO: 20724 - DNA, 21 bp, synthetic construct
  source 1..21: mol_type = other DNA
agactgatcgacgcctttccg

SEQ ID NO: 20725 - DNA, 21 bp, synthetic construct
  source 1..21: mol_type = other DNA
agggacgacttcgtgacctgg

SEQ ID NO: 20726 - DNA, 21 bp, synthetic construct
  source 1..21: mol_type = other DNA
gttgcaacgaaaggatgggat

SEQ ID NO: 20727 - DNA, 21 bp, synthetic construct
  source 1..21: mol_type = other DNA
ttacataagttgaacaataat

SEQ ID NO: 20728 - DNA, 21 bp, synthetic construct
  source 1..21: mol_type = other DNA
atgcataaattaggggtcaat

SEQ ID NO: 20729 - DNA, 21 bp, synthetic construct
  source 1..21: mol_type = other DNA
attatggagagtgctgtgtgg

SEQ ID NO: 20730 - DNA, 21 bp, synthetic construct
  source 1..21: mol_type = other DNA
aggggattagaggggtttgac

SEQ ID NO: 20731 - DNA, 21 bp, synthetic construct
  source 1..21: mol_type = other DNA
tatgtgaaatcagatcatggg

SEQ ID NO: 20732 - DNA, 21 bp, synthetic construct
  source 1..21: mol_type = other DNA
cttagtcgtattgggcctgat

SEQ ID NO: 20733 - DNA, 21 bp, synthetic construct
  source 1..21: mol_type = other DNA
ctacatgttctcggacccaac

SEQ ID NO: 20734 - DNA, 21 bp, synthetic construct
  source 1..21: mol_type = other DNA
tatgtaaaatcggatccagga

SEQ ID NO: 20735 - DNA, 21 bp, synthetic construct
  source 1..21: mol_type = other DNA
tacgttaagtcacaggccgga

SEQ ID NO: 20736 - DNA, 21 bp, synthetic construct
  source 1..21: mol_type = other DNA
tactttaccggcatactcgcg

SEQ ID NO: 20737 - DNA, 21 bp, synthetic construct
  source 1..21: mol_type = other DNA
ctacacaaacttagtacggac

SEQ ID NO: 20738 - DNA, 21 bp, synthetic construct
  source 1..21: mol_type = other DNA
aaagatgagtttacaactttt

SEQ ID NO: 20739 - DNA, 21 bp, synthetic construct
  source 1..21: mol_type = other DNA
ctctcacgcatcggaccagat

SEQ ID NO: 20740 - DNA, 21 bp, synthetic construct
  source 1..21: mol_type = other DNA
tttcataagctcgggataaac

SEQ ID NO: 20741 - DNA, 21 bp, synthetic construct
  source 1..21: mol_type = other DNA
ctgagcaagttgagtccgaat

SEQ ID NO: 20742 - DNA, 21 bp, synthetic construct
  source 1..21: mol_type = other DNA
ctgagtcgtgttggctttgat

SEQ ID NO: 20743 - DNA, 21 bp, synthetic construct
  source 1..21: mol_type = other DNA
ttacacaaggcagggcacaat

SEQ ID NO: 20744 - DNA, 21 bp, synthetic construct
  source 1..21: mol_type = other DNA
tacttcactggaatattggaa

SEQ ID NO: 20745 - DNA, 21 bp, synthetic construct
  source 1..21: mol_type = other DNA
aaagatgagtttagctcgtgg

SEQ ID NO: 20746 - DNA, 21 bp, synthetic construct
  source 1..21: mol_type = other DNA
cttcataaattaaacaataac

SEQ ID NO: 20747 - DNA, 21 bp, synthetic construct
  source 1..21: mol_type = other DNA
ttccacaaattaggaatcaat

SEQ ID NO: 20748 - DNA, 21 bp, synthetic construct
  source 1..21: mol_type = other DNA
ctttcaaaggtaggtaacaac

SEQ ID NO: 20749 - DNA, 21 bp, synthetic construct
  source 1..21: mol_type = other DNA
ctgcataaagcaggaccgaat

SEQ ID NO: 20750 - DNA, 21 bp, synthetic construct
  source 1..21: mol_type = other DNA
ttatcaaagctctcctacgat

SEQ ID NO: 20751 - DNA, 21 bp, synthetic construct
  source 1..21: mol_type = other DNA
cttagtaaagtaggtataaat

SEQ ID NO: 20752 - DNA, 21 bp, synthetic construct
  source 1..21: mol_type = other DNA
cgcactttagacgtttttcct

SEQ ID NO: 20753 - DNA, 21 bp, synthetic construct
  source 1..21: mol_type = other DNA
gtgttaagcgctagtacctgg

SEQ ID NO: 20754 - DNA, 21 bp, synthetic construct
  source 1..21: mol_type = other DNA
ctacataaactctcgccactc

SEQ ID NO: 20755 - DNA, 21 bp, synthetic construct
  source 1..21: mol_type = other DNA
tacgtaaaatcacaaactaac

SEQ ID NO: 20756 - DNA, 21 bp, synthetic construct
  source 1..21: mol_type = other DNA
gtcaaaagcacgaacggggtg

SEQ ID NO: 20757 - DNA, 21 bp, synthetic construct
  source 1..21: mol_type = other DNA
ctttcgaagcttagccagaac

SEQ ID NO: 20758 - DNA, 21 bp, synthetic construct
  source 1..21: mol_type = other DNA
atacttagtagtcagagttgg

SEQ ID NO: 20759 - DNA, 21 bp, synthetic construct
  source 1..21: mol_type = other DNA
ctgtgcaaaccgtgcctacaa

SEQ ID NO: 20760 - DNA, 21 bp, synthetic construct
  source 1..21: mol_type = other DNA
gacctgagtagtgcgaagtgg

SEQ ID NO: 20761 - DNA, 21 bp, synthetic construct
  source 1..21: mol_type = other DNA
gttgcgtctaaaggctgggac

SEQ ID NO: 20762 - DNA, 21 bp, synthetic construct
  source 1..21: mol_type = other DNA
aaagatgatttcaccacatgg

SEQ ID NO: 20763 - DNA, 21 bp, synthetic construct
  source 1..21: mol_type = other DNA
aatttagcctccgccacgtgg

SEQ ID NO: 20764 - DNA, 21 bp, synthetic construct
  source 1..21: mol_type = other DNA
ctacacaggttaggattagac

SEQ ID NO: 20765 - DNA, 21 bp, synthetic construct
  source 1..21: mol_type = other DNA
tactcaaagctcggtccagac

SEQ ID NO: 20766 - DNA, 21 bp, synthetic construct
  source 1..21: mol_type = other DNA
tattccaaaatgggaccgaat

SEQ ID NO: 20767 - DNA, 21 bp, synthetic construct
  source 1..21: mol_type = other DNA
atgcacaagctgggtgttaac

SEQ ID NO: 20768 - DNA, 21 bp, synthetic construct
  source 1..21: mol_type = other DNA
gaaatggcctctataaagtgg

SEQ ID NO: 20769 - DNA, 21 bp, synthetic construct
  source 1..21: mol_type = other DNA
ctaagtaaactttctgacaac

SEQ ID NO: 20770 - DNA, 21 bp, synthetic construct
  source 1..21: mol_type = other DNA
attgcccatttaggttgggat

SEQ ID NO: 20771 - DNA, 21 bp, synthetic construct
  source 1..21: mol_type = other DNA
tatttcacgggtattattgaa

SEQ ID NO: 20772 - DNA, 21 bp, synthetic construct
  source 1..21: mol_type = other DNA
tacgccaaaagtggtccgaat

SEQ ID NO: 20773 - DNA, 21 bp, synthetic construct
  source 1..21: mol_type = other DNA
tatacaaagacgcagactaac

SEQ ID NO: 20774 - DNA, 21 bp, synthetic construct
  source 1..21: mol_type = other DNA
ctgtcgaagttgcacaccaac

SEQ ID NO: 20775 - DNA, 21 bp, synthetic construct
  source 1..21: mol_type = other DNA
tacactaaaacacaaacaaat

SEQ ID NO: 20776 - DNA, 21 bp, synthetic construct
  source 1..21: mol_type = other DNA
ctctctaaagcaagtcataac

SEQ ID NO: 20777 - DNA, 21 bp, synthetic construct
  source 1..21: mol_type = other DNA
aaagacgagtttttatcgtgg

SEQ ID NO: 20778 - DNA, 21 bp, synthetic construct
  source 1..21: mol_type = other DNA
ctggccaaaactggttttaat

SEQ ID NO: 20779 - DNA, 21 bp, synthetic construct
  source 1..21: mol_type = other DNA
tatagcaaattaaacccaatg

SEQ ID NO: 20780 - DNA, 21 bp, synthetic construct
  source 1..21: mol_type = other DNA
aaagacgacttcaccagcttc

SEQ ID NO: 20781 - DNA, 21 bp, synthetic construct
  source 1..21: mol_type = other DNA
ttatctagagtcggtcttaac

SEQ ID NO: 20782 - DNA, 21 bp, synthetic construct
  source 1..21: mol_type = other DNA
gtcgctactaaggggtgggac

SEQ ID NO: 20783 - DNA, 21 bp, synthetic construct
  source 1..21: mol_type = other DNA
tatttcaccggcattgtggag

SEQ ID NO: 20784 - DNA, 21 bp, synthetic construct
  source 1..21: mol_type = other DNA
aatgctttgaaagggtgggac

SEQ ID NO: 20785 - DNA, 21 bp, synthetic construct
  source 1..21: mol_type = other DNA
tacgctaagataggacccaac

SEQ ID NO: 20786 - DNA, 21 bp, synthetic construct
  source 1..21: mol_type = other DNA
ttgtcgaaagttgggcttaat

SEQ ID NO: 20787 - DNA, 21 bp, synthetic construct
  source 1..21: mol_type = other DNA
aggttagaagacgtcttcccg

SEQ ID NO: 20788 - DNA, 21 bp, synthetic construct
  source 1..21: mol_type = other DNA
tacagcaaggccggtggaggg

SEQ ID NO: 20789 - DNA, 21 bp, synthetic construct
  source 1..21: mol_type = other DNA
ttatcgaaggttggcatcaac

SEQ ID NO: 20790 - DNA, 21 bp, synthetic construct
  source 1..21: mol_type = other DNA
tatgtaaaaagtgatacatcg

SEQ ID NO: 20791 - DNA, 21 bp, synthetic construct
  source 1..21: mol_type = other DNA
ccccttgcgagctcgacttgg

SEQ ID NO: 20792 - DNA, 21 bp, synthetic construct
  source 1..21: mol_type = other DNA
ttaagtaaactccatactaat

SEQ ID NO: 20793 - DNA, 21 bp, synthetic construct
  source 1..21: mol_type = other DNA
aaggacgattttagcacatgg

SEQ ID NO: 20794 - DNA, 21 bp, synthetic construct
  source 1..21: mol_type = other DNA
ctctgtaaaccttgcttgggc

SEQ ID NO: 20795 - DNA, 21 bp, synthetic construct
  source 1..21: mol_type = other DNA
tacgcaaagagtggtataaat

SEQ ID NO: 20796 - DNA, 21 bp, synthetic construct
  source 1..21: mol_type = other DNA
ctttcaaaacttggccctaac

SEQ ID NO: 20797 - DNA, 21 bp, synthetic construct
  source 1..21: mol_type = other DNA
tatgttaaaagtcagacaggg

SEQ ID NO: 20798 - DNA, 21 bp, synthetic construct
  source 1..21: mol_type = other DNA
tattccaagttaaatccaacc

SEQ ID NO: 20799 - DNA, 21 bp, synthetic construct
  source 1..21: mol_type = other DNA
tactctaaattaaatgataat

SEQ ID NO: 20800 - DNA, 21 bp, synthetic construct
  source 1..21: mol_type = other DNA
tttcataaattggggatcaac

SEQ ID NO: 20801 - DNA, 21 bp, synthetic construct
  source 1..21: mol_type = other DNA
tacgtaaagtcgcaaacggga

SEQ ID NO: 20802 - DNA, 21 bp, synthetic construct
  source 1..21: mol_type = other DNA
aaagacgactttgtgtcctgg

SEQ ID NO: 20803 - DNA, 21 bp, synthetic construct
  source 1..21: mol_type = other DNA
tacgtaaagtctcagctagga

SEQ ID NO: 20804 - DNA, 21 bp, synthetic construct
  source 1..21: mol_type = other DNA
tatcataaattaaatccggat

SEQ ID NO: 20805 - DNA, 21 bp, synthetic construct
  source 1..21: mol_type = other DNA
tacagtaagatagggccgaac

SEQ ID NO: 20806 - DNA, 21 bp, synthetic construct
  source 1..21: mol_type = other DNA
aaggacgagttcactggttat

SEQ ID NO: 20807 - DNA, 21 bp, synthetic construct
  source 1..21: mol_type = other DNA
tactcgaaagtgggcgtgaat

SEQ ID NO: 20808 - DNA, 21 bp, synthetic construct
  source 1..21: mol_type = other DNA
cttcataaagcgggtcataac

SEQ ID NO: 20809 - DNA, 21 bp, synthetic construct
  source 1..21: mol_type = other DNA
tacgttaagagtcaacccgga

SEQ ID NO: 20810 - DNA, 21 bp, synthetic construct
  source 1..21: mol_type = other DNA
ttccacaagttaagtccgaac

SEQ ID NO: 20811 - DNA, 21 bp, synthetic construct
  source 1..21: mol_type = other DNA
atcgccaataaaggctgggat

SEQ ID NO: 20812 - DNA, 21 bp, synthetic construct
  source 1..21: mol_type = other DNA
ttcagcaaacttaacgtgaat

SEQ ID NO: 20813 - DNA, 21 bp, synthetic construct
  source 1..21: mol_type = other DNA
cgcacggagacagtatttccc

SEQ ID NO: 20814 - DNA, 21 bp, synthetic construct
  source 1..21: mol_type = other DNA
tattcaaagttggggccaaat

SEQ ID NO: 20815 - DNA, 21 bp, synthetic construct
  source 1..21: mol_type = other DNA
aaggatgaattttctacttat

SEQ ID NO: 20816 - DNA, 21 bp, synthetic construct
  source 1..21: mol_type = other DNA
cttgcaaaaaccggatacaac

SEQ ID NO: 20817 - DNA, 21 bp, synthetic construct
  source 1..21: mol_type = other DNA
ttccataaattatcactcaac

SEQ ID NO: 20818 - DNA, 21 bp, synthetic construct
  source 1..21: mol_type = other DNA
atcctggaaagccgcacgtgg

SEQ ID NO: 20819 - DNA, 21 bp, synthetic construct
  source 1..21: mol_type = other DNA
cgagaaatagacgtctacccg

SEQ ID NO: 20820 - DNA, 21 bp, synthetic construct
  source 1..21: mol_type = other DNA
tacagcaagctgcaggccaac

SEQ ID NO: 20821 - DNA, 21 bp, synthetic construct
  source 1..21: mol_type = other DNA
aaggatgagttcagcacatat

SEQ ID NO: 20822 - DNA, 21 bp, synthetic construct
  source 1..21: mol_type = other DNA
ttctcgaaactcaatgtcaat

SEQ ID NO: 20823 - DNA, 21 bp, synthetic construct
  source 1..21: mol_type = other DNA
aaggatgaattcagcagttgg

SEQ ID NO: 20824 - DNA, 21 bp, synthetic construct
  source 1..21: mol_type = other DNA
cttacgcggttacatccagac

SEQ ID NO: 20825 - DNA, 21 bp, synthetic construct
  source 1..21: mol_type = other DNA
atcttgtcaagtagcacgtgg

SEQ ID NO: 20826 - DNA, 21 bp, synthetic construct
  source 1..21: mol_type = other DNA
gtggccaataaggggtgggac

SEQ ID NO: 20827 - DNA, 21 bp, synthetic construct
  source 1..21: mol_type = other DNA
ttttcgaagctgaatgtaaac

SEQ ID NO: 20828 - DNA, 21 bp, synthetic construct
  source 1..21: mol_type = other DNA
gtttcagagttcctcagctac

SEQ ID NO: 20829 - DNA, 21 bp, synthetic construct
  source 1..21: mol_type = other DNA
ctgtccaagctaagtagtaat

SEQ ID NO: 20830 - DNA, 21 bp, synthetic construct
  source 1..21: mol_type = other DNA
ttgagtaagttgaatttgaac

SEQ ID NO: 20831 - DNA, 21 bp, synthetic construct
  source 1..21: mol_type = other DNA
tatagtaaaattggattgaat

SEQ ID NO: 20832 - DNA, 21 bp, synthetic construct
  source 1..21: mol_type = other DNA
tactttacgggtaaaatagca

SEQ ID NO: 20833 - DNA, 21 bp, synthetic construct
  source 1..21: mol_type = other DNA
aaggatgatttcgtcagttgg

SEQ ID NO: 20834 - DNA, 21 bp, synthetic construct
  source 1..21: mol_type = other DNA
aggctcattgacgtttatcca

SEQ ID NO: 20835 - DNA, 21 bp, synthetic construct
  source 1..21: mol_type = other DNA
tatcataagttggccaataat

SEQ ID NO: 20836 - DNA, 21 bp, synthetic construct
  source 1..21: mol_type = other DNA
ccaatggcaagtagcacatgg

SEQ ID NO: 20837 - DNA, 21 bp, synthetic construct
  source 1..21: mol_type = other DNA
gaagcgttggaaggtcgtgat

SEQ ID NO: 20838 - DNA, 21 bp, synthetic construct
  source 1..21: mol_type = other DNA
aaagatgaatttacaggctac

SEQ ID NO: 20839 - DNA, 21 bp, synthetic construct
  source 1..21: mol_type = other DNA
tatataaaatcacaacccgga

SEQ ID NO: 20840 - DNA, 21 bp, synthetic construct
  source 1..21: mol_type = other DNA
ttacataagctgagcaataat

SEQ ID NO: 20841 - DNA, 21 bp, synthetic construct
  source 1..21: mol_type = other DNA
aaggatgattttacttcattt

SEQ ID NO: 20842 - DNA, 21 bp, synthetic construct
  source 1..21: mol_type = other DNA
agggggttggaagggtatgac

SEQ ID NO: 20843 - DNA, 21 bp, synthetic construct
  source 1..21: mol_type = other DNA
cgcacaccgctcgtgttccct

SEQ ID NO: 20844 - DNA, 21 bp, synthetic construct
  source 1..21: mol_type = other DNA
ctatctaaagtaggtcctaat

SEQ ID NO: 20845 - DNA, 21 bp, synthetic construct
  source 1..21: mol_type = other DNA
tggaccccgtattgcaaggca

SEQ ID NO: 20846 - DNA, 21 bp, synthetic construct
  source 1..21: mol_type = other DNA
cgtggtctggaaggcttcgat

SEQ ID NO: 20847 - DNA, 21 bp, synthetic construct
  source 1..21: mol_type = other DNA
tatgtaaagtcagattcaatg

SEQ ID NO: 20848 - DNA, 21 bp, synthetic construct
  source 1..21: mol_type = other DNA
aaggacgacttcgtcgcatgg

SEQ ID NO: 20849 - DNA, 21 bp, synthetic construct
  source 1..21: mol_type = other DNA
aacgcgcttgagggcagagac

SEQ ID NO: 20850 - DNA, 21 bp, synthetic construct
  source 1..21: mol_type = other DNA
gttgaatcgagcaacggcgtg

SEQ ID NO: 20851 - DNA, 21 bp, synthetic construct
  source 1..21: mol_type = other DNA
gttgaatccaccaatggggtt

SEQ ID NO: 20852 - DNA, 21 bp, synthetic construct
  source 1..21: mol_type = other DNA
tatgctaaaactggacctaat

SEQ ID NO: 20853 - DNA, 21 bp, synthetic construct
  source 1..21: mol_type = other DNA
tatttcacgggtattgtggcc

SEQ ID NO: 20854 - DNA, 21 bp, synthetic construct
  source 1..21: mol_type = other DNA
aaagacgagttccattcgttc

SEQ ID NO: 20855 - DNA, 21 bp, synthetic construct
  source 1..21: mol_type = other DNA
cgtggcgaacatgtgttccca

SEQ ID NO: 20856 - DNA, 21 bp, synthetic construct
  source 1..21: mol_type = other DNA
ttgagtaaggtcgggaataac

SEQ ID NO: 20857 - DNA, 21 bp, synthetic construct
  source 1..21: mol_type = other DNA
ctgtcaaaacttaaccttaac

SEQ ID NO: 20858 - DNA, 21 bp, synthetic construct
  source 1..21: mol_type = other DNA
ctttttgatggaacacctgct

SEQ ID NO: 20859 - DNA, 21 bp, synthetic construct
  source 1..21: mol_type = other DNA
tatcataaacttaatttggac

SEQ ID NO: 20860 - DNA, 21 bp, synthetic construct
  source 1..21: mol_type = other DNA
aagatggatagtgtcagatgg

SEQ ID NO: 20861 - DNA, 21 bp, synthetic construct
  source 1..21: mol_type = other DNA
ctacatcgcttgggccccgac

SEQ ID NO: 20862 - DNA, 21 bp, synthetic construct
  source 1..21: mol_type = other DNA
ctgagcaaggttggaccgaac

SEQ ID NO: 20863 - DNA, 21 bp, synthetic construct
  source 1..21: mol_type = other DNA
tattcgaaagttggcgaaaat

SEQ ID NO: 20864 - DNA, 21 bp, synthetic construct
  source 1..21: mol_type = other DNA
tacgtgaaatccgacgccttg

SEQ ID NO: 20865 - DNA, 21 bp, synthetic construct
  source 1..21: mol_type = other DNA
gtagcaagcaagggatgggat

SEQ ID NO: 20866 - DNA, 21 bp, synthetic construct
  source 1..21: mol_type = other DNA
ttatgcaagccatgtttgacc

SEQ ID NO: 20867 - DNA, 21 bp, synthetic construct
  source 1..21: mol_type = other DNA
ttcagtaaactaaacatcaat

SEQ ID NO: 20868 - DNA, 21 bp, synthetic construct
  source 1..21: mol_type = other DNA
tatgcaaagaccggattgaat

SEQ ID NO: 20869 - DNA, 21 bp, synthetic construct
  source 1..21: mol_type = other DNA
ttgttcgacggcacgcccgcg

SEQ ID NO: 20870 - DNA, 21 bp, synthetic construct
  source 1..21: mol_type = other DNA
ttgagtcgggtaggttacgac

SEQ ID NO: 20871 - DNA, 21 bp, synthetic construct
  source 1..21: mol_type = other DNA
ttatctaaggtgggggccaat

SEQ ID NO: 20872 - DNA, 21 bp, synthetic construct
  source 1..21: mol_type = other DNA
aaagatgattttaccagctgg

SEQ ID NO: 20873 - DNA, 21 bp, synthetic construct
  source 1..21: mol_type = other DNA
tgtaaaccaagagaaggcaca

SEQ ID NO: 20874 - DNA, 21 bp, synthetic construct
  source 1..21: mol_type = other DNA
aggctagaagacgccttccct

SEQ ID NO: 20875 - DNA, 21 bp, synthetic construct
  source 1..21: mol_type = other DNA
aaggacgacttcacatcttgg

SEQ ID NO: 20876 - DNA, 21 bp, synthetic construct
  source 1..21: mol_type = other DNA
ttgcacaagaaaggtccagac

SEQ ID NO: 20877 - DNA, 21 bp, synthetic construct
  source 1..21: mol_type = other DNA
ttacacaaactaaatcctttg

SEQ ID NO: 20878 - DNA, 21 bp, synthetic construct
  source 1..21: mol_type = other DNA
aaagatgatttcactgtctat

SEQ ID NO: 20879 - DNA, 21 bp, synthetic construct
  source 1..21: mol_type = other DNA
ctcatggcagatgcctatccg

SEQ ID NO: 20880 - DNA, 21 bp, synthetic construct
  source 1..21: mol_type = other DNA
taccacaagcttaacccagac

SEQ ID NO: 20881 - DNA, 21 bp, synthetic construct
  source 1..21: mol_type = other DNA
tattccaagttgagtgataat

SEQ ID NO: 20882 - DNA, 21 bp, synthetic construct
  source 1..21: mol_type = other DNA
aggattattgacgcatttcct

SEQ ID NO: 20883 - DNA, 21 bp, synthetic construct
  source 1..21: mol_type = other DNA
gttcaatctactaatggcgtt

SEQ ID NO: 20884 - DNA, 21 bp, synthetic construct
  source 1..21: mol_type = other DNA
tacgtcaagtcagatcggggt

SEQ ID NO: 20885 - DNA, 21 bp, synthetic construct
  source 1..21: mol_type = other DNA
agactcttggatgcctatccc

SEQ ID NO: 20886 - DNA, 21 bp, synthetic construct
  source 1..21: mol_type = other DNA
aaggacgatttcacaatgttc

SEQ ID NO: 20887 - DNA, 21 bp, synthetic construct
  source 1..21: mol_type = other DNA
tacagtaagatgggccccaac

SEQ ID NO: 20888 - DNA, 21 bp, synthetic construct
  source 1..21: mol_type = other DNA
ttgcacagactagggccggat

SEQ ID NO: 20889 - DNA, 21 bp, synthetic construct
  source 1..21: mol_type = other DNA
ctccataagttacttgtgggg

SEQ ID NO: 20890 - DNA, 21 bp, synthetic construct
  source 1..21: mol_type = other DNA
ctcagcaagttgaacactaac

SEQ ID NO: 20891 - DNA, 21 bp, synthetic construct
  source 1..21: mol_type = other DNA
tatgttaaatcagatatgaag

SEQ ID NO: 20892 - DNA, 21 bp, synthetic construct
  source 1..21: mol_type = other DNA
tttagtaaattgaatacgaac

SEQ ID NO: 20893 - DNA, 21 bp, synthetic construct
  source 1..21: mol_type = other DNA
agggaagatgccgtgagatgg

SEQ ID NO: 20894 - DNA, 21 bp, synthetic construct
  source 1..21: mol_type = other DNA
cgagaggagggagtgtcttgg

SEQ ID NO: 20895 - DNA, 21 bp, synthetic construct
  source 1..21: mol_type = other DNA
tacgcgaaaatcgggcctaat

SEQ ID NO: 20896 - DNA, 21 bp, synthetic construct
  source 1..21: mol_type = other DNA
ttgagtaagttaagcttaaac

SEQ ID NO: 20897 - DNA, 21 bp, synthetic construct
  source 1..21: mol_type = other DNA
gtaaagagcacgaacgggata

SEQ ID NO: 20898 - DNA, 21 bp, synthetic construct
  source 1..21: mol_type = other DNA
ttgcgcatgagtggatgtccc

SEQ ID NO: 20899 - DNA, 21 bp, synthetic construct
  source 1..21: mol_type = other DNA
ttgcacaaactctcggttgat

SEQ ID NO: 20900 - DNA, 21 bp, synthetic construct
  source 1..21: mol_type = other DNA
gtaaaaagcaccaacgggatt

SEQ ID NO: 20901 - DNA, 21 bp, synthetic construct
  source 1..21: mol_type = other DNA
tatctcaagagtgataccaac

SEQ ID NO: 20902 - DNA, 21 bp, synthetic construct
  source 1..21: mol_type = other DNA
tttcataaactgtcacccaac

SEQ ID NO: 20903 - DNA, 21 bp, synthetic construct
  source 1..21: mol_type = other DNA
tacgtaaagagcgaccacggg

SEQ ID NO: 20904 - DNA, 21 bp, synthetic construct
  source 1..21: mol_type = other DNA
gtagagtcaacgaatgggagg

SEQ ID NO: 20905 - DNA, 21 bp, synthetic construct
  source 1..21: mol_type = other DNA
gtggatagcacgaacggcgta

SEQ ID NO: 20906 - DNA, 21 bp, synthetic construct
  source 1..21: mol_type = other DNA
aaagacgaattttctacgtac

SEQ ID NO: 20907 - DNA, 21 bp, synthetic construct
  source 1..21: mol_type = other DNA
gtcaactcgacaaacggggtt

SEQ ID NO: 20908 - DNA, 21 bp, synthetic construct
  source 1..21: mol_type = other DNA
ttcagcaagctcaatgataat

SEQ ID NO: 20909 - DNA, 21 bp, synthetic construct
  source 1..21: mol_type = other DNA
gttctaagctcagctaattgg

SEQ ID NO: 20910 - DNA, 21 bp, synthetic construct
  source 1..21: mol_type = other DNA
ttgttcgatggcactgcggca

SEQ ID NO: 20911 - DNA, 21 bp, synthetic construct
  source 1..21: mol_type = other DNA
tactcggcgataggacccaat

SEQ ID NO: 20912 - DNA, 21 bp, synthetic construct
  source 1..21: mol_type = other DNA
ctctcacgtattgggcccaat

SEQ ID NO: 20913 - DNA, 21 bp, synthetic construct
  source 1..21: mol_type = other DNA
gtcatatccacgaacggaata

SEQ ID NO: 20914 - DNA, 21 bp, synthetic construct
  source 1..21: mol_type = other DNA
ttgcatcgtctcggtcttgat

SEQ ID NO: 20915 - DNA, 21 bp, synthetic construct
  source 1..21: mol_type = other DNA
tttagcaaattgaacgttaac

SEQ ID NO: 20916 - DNA, 21 bp, synthetic construct
  source 1..21: mol_type = other DNA
cttcataaaaagggccctgat

SEQ ID NO: 20917 - DNA, 21 bp, synthetic construct
  source 1..21: mol_type = other DNA
ctgtgcaaaccatgcgataca

SEQ ID NO: 20918 - DNA, 21 bp, synthetic construct
  source 1..21: mol_type = other DNA
ttatgtaaaccctgcgtaacg

SEQ ID NO: 20919 - DNA, 21 bp, synthetic construct
  source 1..21: mol_type = other DNA
aaggatgaatttcacagtttt

SEQ ID NO: 20920 - DNA, 21 bp, synthetic construct
  source 1..21: mol_type = other DNA
aaagatgattttgtggcttgg

SEQ ID NO: 20921 - DNA, 21 bp, synthetic construct
  source 1..21: mol_type = other DNA
cgccttgatgatgtcttcccg

SEQ ID NO: 20922 - DNA, 21 bp, synthetic construct
  source 1..21: mol_type = other DNA
ctatgcaaaccttgcttagat

SEQ ID NO: 20923 - DNA, 21 bp, synthetic construct
  source 1..21: mol_type = other DNA
ttacatgctgcgctcccgaac

SEQ ID NO: 20924 - DNA, 21 bp, synthetic construct
  source 1..21: mol_type = other DNA
gttatgagcacaaacggagta

SEQ ID NO: 20925 - DNA, 21 bp, synthetic construct
  source 1..21: mol_type = other DNA
aacctggctagtgcgacttgg

SEQ ID NO: 20926 - DNA, 21 bp, synthetic construct
  source 1..21: mol_type = other DNA
atattgacaagcgcgacgtgg

SEQ ID NO: 20927 - DNA, 21 bp, synthetic construct
  source 1..21: mol_type = other DNA
ctgtgcaagccctgtccgacc

SEQ ID NO: 20928 - DNA, 21 bp, synthetic construct
  source 1..21: mol_type = other DNA
attctcagcagcaccacgtgg

SEQ ID NO: 20929 - DNA, 21 bp, synthetic construct
  source 1..21: mol_type = other DNA
tatgtgaaaagccaaatgggc

SEQ ID NO: 20930 - DNA, 21 bp, synthetic construct
  source 1..21: mol_type = other DNA
agtacaagtactaacggggtg

SEQ ID NO: 20931 - DNA, 21 bp, synthetic construct
  source 1..21: mol_type = other DNA
gtcctctccgatcgcatctgg

SEQ ID NO: 20932 - DNA, 21 bp, synthetic construct
  source 1..21: mol_type = other DNA
ctgtgcaaaccctgtacgacg

SEQ ID NO: 20933 - DNA, 21 bp, synthetic construct
  source 1..21: mol_type = other DNA
tacgtaaagtctcagatgggg

SEQ ID NO: 20934 - DNA, 21 bp, synthetic construct
  source 1..21: mol_type = other DNA
ttaagtcgcgtcggtcctaac

SEQ ID NO: 20935 - DNA, 21 bp, synthetic construct
  source 1..21: mol_type = other DNA
agaacagatgacgtgtttcct

SEQ ID NO: 20936 - DNA, 21 bp, synthetic construct
  source 1..21: mol_type = other DNA
gacatggcgtcggcaagttgg

SEQ ID NO: 20937 - DNA, 21 bp, synthetic construct
  source 1..21: mol_type = other DNA
taccacgctaaattgccgaat

SEQ ID NO: 20938 - DNA, 21 bp, synthetic construct
  source 1..21: mol_type = other DNA
atactagcaagtagagactgg

SEQ ID NO: 20939 - DNA, 21 bp, synthetic construct
  source 1..21: mol_type = other DNA
aaagatgatttcaccacgtac

SEQ ID NO: 20940 - DNA, 21 bp, synthetic construct
  source 1..21: mol_type = other DNA
aggaccgaaacggtcttcccg

SEQ ID NO: 20941 - DNA, 21 bp, synthetic construct
  source 1..21: mol_type = other DNA
caactgagtagctccacctgg

SEQ ID NO: 20942 - DNA, 21 bp, synthetic construct
  source 1..21: mol_type = other DNA
tgcacgaaatcgtgttgccca

SEQ ID NO: 20943 - DNA, 21 bp, synthetic construct
  source 1..21: mol_type = other DNA
cttcaccgcttgagcccgccc

SEQ ID NO: 20944 - DNA, 21 bp, synthetic construct
  source 1..21: mol_type = other DNA
acactgtcaagcgccacctgg

SEQ ID NO: 20945 - DNA, 21 bp, synthetic construct
  source 1..21: mol_type = other DNA
gtcgctactaagggcgcgggt

SEQ ID NO: 20946 - DNA, 21 bp, synthetic construct
  source 1..21: mol_type = other DNA
tatttcactggagtggtggcg

SEQ ID NO: 20947 - DNA, 21 bp, synthetic construct
  source 1..21: mol_type = other DNA
ctgtcgcgtgtagggcccaat

SEQ ID NO: 20948 - DNA, 21 bp, synthetic construct
  source 1..21: mol_type = other DNA
aatgctttagaaggtcgtgat

SEQ ID NO: 20949 - DNA, 21 bp, synthetic construct
  source 1..21: mol_type = other DNA
cgcggcctagagggatacgat

SEQ ID NO: 20950 - DNA, 21 bp, synthetic construct
  source 1..21: mol_type = other DNA
tttcacaagctgagcttaaat

SEQ ID NO: 20951 - DNA, 21 bp, synthetic construct
  source 1..21: mol_type = other DNA
ggcgggatcgggtcggtctgg

SEQ ID NO: 20952 - DNA, 21 bp, synthetic construct
  source 1..21: mol_type = other DNA
ctccatgtcaagcttccagac

SEQ ID NO: 20953 - DNA, 21 bp, synthetic construct
  source 1..21: mol_type = other DNA
aaggacgatttcaccgcatgg

SEQ ID NO: 20954 - DNA, 21 bp, synthetic construct
  source 1..21: mol_type = other DNA
ataatgtcgagtgccacgtgg

SEQ ID NO: 20955 - DNA, 21 bp, synthetic construct
  source 1..21: mol_type = other DNA
attatgagctcggcgacctgg

SEQ ID NO: 20956 - DNA, 21 bp, synthetic construct
  source 1..21: mol_type = other DNA
ctgagccgtgttggcctcaat

SEQ ID NO: 20957 - DNA, 21 bp, synthetic construct
  source 1..21: mol_type = other DNA
gatatggcatcgaagacttgg

SEQ ID NO: 20958 - DNA, 21 bp, synthetic construct
  source 1..21: mol_type = other DNA
tacgtaaagtcggataagatg

SEQ ID NO: 20959 - DNA, 21 bp, synthetic construct
  source 1..21: mol_type = other DNA
ctccacaaactatcaaacaac

SEQ ID NO: 20960 - DNA, 21 bp, synthetic construct
  source 1..21: mol_type = other DNA
tacgttaagagtgacgtcagg

SEQ ID NO: 20961 - DNA, 21 bp, synthetic construct
  source 1..21: mol_type = other DNA
ttgcataaggctggatacaac

SEQ ID NO: 20962 - DNA, 21 bp, synthetic construct
  source 1..21: mol_type = other DNA
tacgtaaaaagtgacagccgt

SEQ ID NO: 20963 - DNA, 21 bp, synthetic construct
  source 1..21: mol_type = other DNA
ctagccagatcaggcccaaac

SEQ ID NO: 20964 - DNA, 21 bp, synthetic construct
  source 1..21: mol_type = other DNA
gtagaatctacgaatggtgta

SEQ ID NO: 20965 - DNA, 21 bp, synthetic construct
  source 1..21: mol_type = other DNA
gtaacaagtaccaatggaatc

SEQ ID NO: 20966 - DNA, 21 bp, synthetic construct
  source 1..21: mol_type = other DNA
gacttatcatcagctaaatgg

SEQ ID NO: 20967 - DNA, 21 bp, synthetic construct
  source 1..21: mol_type = other DNA
tatgtgaaatcgcagacgatg

SEQ ID NO: 20968 - DNA, 21 bp, synthetic construct
  source 1..21: mol_type = other DNA
aaggatgagttttccacatgg

SEQ ID NO: 20969 - DNA, 21 bp, synthetic construct
  source 1..21: mol_type = other DNA
tacgtgaagtcagacactagc

SEQ ID NO: 20970 - DNA, 21 bp, synthetic construct
  source 1..21: mol_type = other DNA
gatttgtcatcgagcaaatgg

SEQ ID NO: 20971 - DNA, 21 bp, synthetic construct
  source 1..21: mol_type = other DNA
gtcacttccacgaacggtata

SEQ ID NO: 20972 - DNA, 21 bp, synthetic construct
  source 1..21: mol_type = other DNA
tatagcgctatcgggccaaat

SEQ ID NO: 20973 - DNA, 21 bp, synthetic construct
  source 1..21: mol_type = other DNA
tatagcaaggtcggtgtaaac

SEQ ID NO: 20974 - DNA, 21 bp, synthetic construct
  source 1..21: mol_type = other DNA
agaggggaaactgtattccca

SEQ ID NO: 20975 - DNA, 21 bp, synthetic construct
  source 1..21: mol_type = other DNA
aaggacgactttacgacttat

SEQ ID NO: 20976 - DNA, 21 bp, synthetic construct
  source 1..21: mol_type = other DNA
gtgaactccacgaacggcatt

SEQ ID NO: 20977 - DNA, 21 bp, synthetic construct
  source 1..21: mol_type = other DNA
cttctcagttctgctacatgg

SEQ ID NO: 20978 - DNA, 21 bp, synthetic construct
  source 1..21: mol_type = other DNA
aaggatgactttacacatttc

SEQ ID NO: 20979 - DNA, 21 bp, synthetic construct
  source 1..21: mol_type = other DNA
aaagacgacttcacaagttgg

SEQ ID NO: 20980 - DNA, 21 bp, synthetic construct
  source 1..21: mol_type = other DNA
atcgagtccaccaacgggagg

SEQ ID NO: 20981 - DNA, 21 bp, synthetic construct
  source 1..21: mol_type = other DNA
tatgtaaagagtcagcctacc

SEQ ID NO: 20982 - DNA, 21 bp, synthetic construct
  source 1..21: mol_type = other DNA
ttatgccgtccttgttcccat

SEQ ID NO: 20983 - DNA, 21 bp, synthetic construct
  source 1..21: mol_type = other DNA
tatgtgaaaagccagatgttg

SEQ ID NO: 20984 - DNA, 21 bp, synthetic construct
  source 1..21: mol_type = other DNA
tatgtcaaaagtgacaaaatg

SEQ ID NO: 20985 - DNA, 21 bp, synthetic construct
  source 1..21: mol_type = other DNA
ggtgggttgggaagtcattgg

SEQ ID NO: 20986 - DNA, 21 bp, synthetic construct
  source 1..21: mol_type = other DNA
aaggacgactttacgacttgg

SEQ ID NO: 20987 - DNA, 21 bp, synthetic construct
  source 1..21: mol_type = other DNA
tattcgaaagcccagccaaat

SEQ ID NO: 20988 - DNA, 21 bp, synthetic construct
  source 1..21: mol_type = other DNA
ctctccaagctgaacgccaat

SEQ ID NO: 20989 - DNA, 21 bp, synthetic construct
  source 1..21: mol_type = other DNA
taccacgtcaagtcaccgaac

SEQ ID NO: 20990 - DNA, 21 bp, synthetic construct
  source 1..21: mol_type = other DNA
tactttactgggatcatcgag

SEQ ID NO: 20991 - DNA, 21 bp, synthetic construct
  source 1..21: mol_type = other DNA
aggacggacgacacattccca

SEQ ID NO: 20992 - DNA, 21 bp, synthetic construct
  source 1..21: mol_type = other DNA
aaggatgattttacttcgtgg

SEQ ID NO: 20993 - DNA, 21 bp, synthetic construct
  source 1..21: mol_type = other DNA
tatagtaaagtgggggcaaac

SEQ ID NO: 20994 - DNA, 21 bp, synthetic construct
  source 1..21: mol_type = other DNA
tactttacgggggtagcgcta

SEQ ID NO: 20995 - DNA, 21 bp, synthetic construct
  source 1..21: mol_type = other DNA
attgaaagtacgaatggtcgt

SEQ ID NO: 20996 - DNA, 21 bp, synthetic construct
  source 1..21: mol_type = other DNA
gatatgagtgcatctacttgg

SEQ ID NO: 20997 - DNA, 21 bp, synthetic construct
  source 1..21: mol_type = other DNA
taccataagttaggcccacag

SEQ ID NO: 20998 - DNA, 21 bp, synthetic construct
  source 1..21: mol_type = other DNA
atcatggcgtcagcaaactgg

SEQ ID NO: 20999 - DNA, 21 bp, synthetic construct
  source 1..21: mol_type = other DNA
attttatcatcccaatcgtgg

SEQ ID NO: 21000 - DNA, 21 bp, synthetic construct
  source 1..21: mol_type = other DNA
tactttaccggcttcatagaa

SEQ ID NO: 21001 - DNA, 21 bp, synthetic construct
  source 1..21: mol_type = other DNA
accagtgaaaatgtgtatttt

SEQ ID NO: 21002 - DNA, 21 bp, synthetic construct
  source 1..21: mol_type = other DNA
tactttactggcgtgaaggag

SEQ ID NO: 21003 - DNA, 21 bp, synthetic construct
  source 1..21: mol_type = other DNA
cgcactgacgatgtcttccca

SEQ ID NO: 21004 - DNA, 21 bp, synthetic construct
  source 1..21: mol_type = other DNA
tactcaaaggtgggaacgaat

SEQ ID NO: 21005 - DNA, 21 bp, synthetic construct
  source 1..21: mol_type = other DNA
gtcatgagtacgaacggtgta

SEQ ID NO: 21006 - DNA, 21 bp, synthetic construct
  source 1..21: mol_type = other DNA
ctctccaaactgtcacttaac

SEQ ID NO: 21007 - DNA, 21 bp, synthetic construct
  source 1..21: mol_type = other DNA
tacgtaaagtcgcagacgagt

SEQ ID NO: 21008 - DNA, 21 bp, synthetic construct
  source 1..21: mol_type = other DNA
ctctgcaagccgtgcactaca

SEQ ID NO: 21009 - DNA, 21 bp, synthetic construct
  source 1..21: mol_type = other DNA
tatgttaaaagtgatgcactc

SEQ ID NO: 21010 - DNA, 21 bp, synthetic construct
  source 1..21: mol_type = other DNA
tacgtgaaaagtgacagcatg

SEQ ID NO: 21011 - DNA, 21 bp, synthetic construct
  source 1..21: mol_type = other DNA
tatcatgtaaaaagcccaaat

SEQ ID NO: 21012 - DNA, 21 bp, synthetic construct
  source 1..21: mol_type = other DNA
ctgtttgacggtaccgggccc

SEQ ID NO: 21013 - DNA, 21 bp, synthetic construct
  source 1..21: mol_type = other DNA
tatagcaaactttccgacaac

SEQ ID NO: 21014 - DNA, 21 bp, synthetic construct
  source 1..21: mol_type = other DNA
aaggacgagttcagcacctac

SEQ ID NO: 21015 - DNA, 21 bp, synthetic construct
  source 1..21: mol_type = other DNA
aggaccgataccgtatatcca

SEQ ID NO: 21016 - DNA, 21 bp, synthetic construct
  source 1..21: mol_type = other DNA
aggatgttagacgcattccca

SEQ ID NO: 21017 - DNA, 21 bp, synthetic construct
  source 1..21: mol_type = other DNA
tacgcgaagtcgggcccaaac

SEQ ID NO: 21018 - DNA, 21 bp, synthetic construct
  source 1..21: mol_type = other DNA
aaggacgacttcagtacgtat

SEQ ID NO: 21019 - DNA, 21 bp, synthetic construct
  source 1..21: mol_type = other DNA
gttaagtctacgaatggtatc

SEQ ID NO: 21020 - DNA, 21 bp, synthetic construct
  source 1..21: mol_type = other DNA
tatttaaaatctcagatgacg

SEQ ID NO: 21021 - DNA, 21 bp, synthetic construct
  source 1..21: mol_type = other DNA
tacttcagcggcatcatagaa

SEQ ID NO: 21022 - DNA, 21 bp, synthetic construct
  source 1..21: mol_type = other DNA
atgtttgacggaaccgctgca

SEQ ID NO: 21023 - DNA, 21 bp, synthetic construct
  source 1..21: mol_type = other DNA
ataatggaatcagcggtttgg

SEQ ID NO: 21024 - DNA, 21 bp, synthetic construct
  source 1..21: mol_type = other DNA
gtagacagcaccaatggcagg

SEQ ID NO: 21025 - DNA, 21 bp, synthetic construct
  source 1..21: mol_type = other DNA
tacacaaagttgcaatataac

SEQ ID NO: 21026 - DNA, 21 bp, synthetic construct
  source 1..21: mol_type = other DNA
ctaagcaaagtaggagcaaac

SEQ ID NO: 21027 - DNA, 21 bp, synthetic construct
  source 1..21: mol_type = other DNA
aggacagaaaccgtgtatcct

SEQ ID NO: 21028 - DNA, 21 bp, synthetic construct
  source 1..21: mol_type = other DNA
tacagtaaattgtctcttaac

SEQ ID NO: 21029 - DNA, 21 bp, synthetic construct
  source 1..21: mol_type = other DNA
tatagcaagataggcgaaaac

SEQ ID NO: 21030 - DNA, 21 bp, synthetic construct
  source 1..21: mol_type = other DNA
tatgttaagtcggacaggcac

SEQ ID NO: 21031 - DNA, 21 bp, synthetic construct
  source 1..21: mol_type = other DNA
tacagcaagctaaacccatta

SEQ ID NO: 21032 - DNA, 21 bp, synthetic construct
  source 1..21: mol_type = other DNA
ctctcgaaactcaatgataat

SEQ ID NO: 21033 - DNA, 21 bp, synthetic construct
  source 1..21: mol_type = other DNA
cggttggtggatgtttttccg

SEQ ID NO: 21034 - DNA, 21 bp, synthetic construct
  source 1..21: mol_type = other DNA
tatgtgaaatccgacatgagg

SEQ ID NO: 21035 - DNA, 21 bp, synthetic construct
  source 1..21: mol_type = other DNA
tttcacaagctgtcaaccaat

SEQ ID NO: 21036 - DNA, 21 bp, synthetic construct
  source 1..21: mol_type = other DNA
tttgtaaaatccgacactaag

SEQ ID NO: 21037 - DNA, 21 bp, synthetic construct
  source 1..21: mol_type = other DNA
tatttcaccggagtcgctttg

SEQ ID NO: 21038 - DNA, 21 bp, synthetic construct
  source 1..21: mol_type = other DNA
aaggacgactttaccgtatac

SEQ ID NO: 21039 - DNA, 21 bp, synthetic construct
  source 1..21: mol_type = other DNA
cttgctagaacaggcctgaat

SEQ ID NO: 21040 - DNA, 21 bp, synthetic construct
  source 1..21: mol_type = other DNA
tatgtaaagagcgactcgatg

SEQ ID NO: 21041 - DNA, 21 bp, synthetic construct
  source 1..21: mol_type = other DNA
ttatgtagaccgtgcttcgaa

SEQ ID NO: 21042 - DNA, 21 bp, synthetic construct
  source 1..21: mol_type = other DNA
ctatgcaagccttgtgcaaca

SEQ ID NO: 21043 - DNA, 21 bp, synthetic construct
  source 1..21: mol_type = other DNA
gtggaaagtacgaacggtagg

SEQ ID NO: 21044 - DNA, 21 bp, synthetic construct
  source 1..21: mol_type = other DNA
tacgccaagagtgggatgaat

SEQ ID NO: 21045 - DNA, 21 bp, synthetic construct
  source 1..21: mol_type = other DNA
aggggtgagcacgtatttccc

SEQ ID NO: 21046 - DNA, 21 bp, synthetic construct
  source 1..21: mol_type = other DNA
cgagaggacatggtgaggtgg

SEQ ID NO: 21047 - DNA, 21 bp, synthetic construct
  source 1..21: mol_type = other DNA
ctctcgagggtttcaatcaat

SEQ ID NO: 21048 - DNA, 21 bp, synthetic construct
  source 1..21: mol_type = other DNA
ctaagcaaggtaggcatgaat

SEQ ID NO: 21049 - DNA, 21 bp, synthetic construct
  source 1..21: mol_type = other DNA
tacgttaaaagtgacacaagg

SEQ ID NO: 21050 - DNA, 21 bp, synthetic construct
  source 1..21: mol_type = other DNA
gtaaatagcaccaatggcgtc

SEQ ID NO: 21051 - DNA, 21 bp, synthetic construct
  source 1..21: mol_type = other DNA
tacactaaaagccagaccaac

SEQ ID NO: 21052 - DNA, 21 bp, synthetic construct
  source 1..21: mol_type = other DNA
tatttcacaggcattatggaa

SEQ ID NO: 21053 - DNA, 21 bp, synthetic construct
  source 1..21: mol_type = other DNA
ctcgctagatcagggcccaac

SEQ ID NO: 21054 - DNA, 21 bp, synthetic construct
  source 1..21: mol_type = other DNA
cgtaacttagacgtattccct

SEQ ID NO: 21055 - DNA, 21 bp, synthetic construct
  source 1..21: mol_type = other DNA
ccgttggcatcgagtacgtgg

SEQ ID NO: 21056 - DNA, 21 bp, synthetic construct
  source 1..21: mol_type = other DNA
gttatggagtcatcaaagtgg

SEQ ID NO: 21057 - DNA, 21 bp, synthetic construct
  source 1..21: mol_type = other DNA
ccactgatgagtcgtgattgg

SEQ ID NO: 21058 - DNA, 21 bp, synthetic construct
  source 1..21: mol_type = other DNA
tttagtaaattgggcccaaat

SEQ ID NO: 21059 - DNA, 21 bp, synthetic construct
  source 1..21: mol_type = other DNA
ctcgcgaaaaccgggcctaat

SEQ ID NO: 21060 - DNA, 21 bp, synthetic construct
  source 1..21: mol_type = other DNA
gaccttagctcgagctcgtgg

SEQ ID NO: 21061 - DNA, 21 bp, synthetic construct
  source 1..21: mol_type = other DNA
ttgtttagcggagaagggccg

SEQ ID NO: 21062 - DNA, 21 bp, synthetic construct
  source 1..21: mol_type = other DNA
tatgtgaaaagtgataacggt

SEQ ID NO: 21063 - DNA, 21 bp, synthetic construct
  source 1..21: mol_type = other DNA
tattcgaaattacaagccaat

SEQ ID NO: 21064 - DNA, 21 bp, synthetic construct
  source 1..21: mol_type = other DNA
ttaagtaggcttgctataaac

SEQ ID NO: 21065 - DNA, 21 bp, synthetic construct
  source 1..21: mol_type = other DNA
tatagtaaagtgggaccgaat

SEQ ID NO: 21066 - DNA, 21 bp, synthetic construct
  source 1..21: mol_type = other DNA
tactttactggaatagttgaa

SEQ ID NO: 21067 - DNA, 21 bp, synthetic construct
  source 1..21: mol_type = other DNA
gttatatccacgaatggaatt

SEQ ID NO: 21068 - DNA, 21 bp, synthetic construct
  source 1..21: mol_type = other DNA
taccacaaaatgctgccggac

SEQ ID NO: 21069 - DNA, 21 bp, synthetic construct
  source 1..21: mol_type = other DNA
aatctcagcagtagcacgtgg

SEQ ID NO: 21070 - DNA, 21 bp, synthetic construct
  source 1..21: mol_type = other DNA
ctcgcgaagggggggccaaac

SEQ ID NO: 21071 - DNA, 21 bp, synthetic construct
  source 1..21: mol_type = other DNA
aggatgatcgatgtctatcca

SEQ ID NO: 21072 - DNA, 21 bp, synthetic construct
  source 1..21: mol_type = other DNA
tatcacaaactgggaccccaa

SEQ ID NO: 21073 - DNA, 21 bp, synthetic construct
  source 1..21: mol_type = other DNA
gacttgcaagccagatcatgg

SEQ ID NO: 21074 - DNA, 21 bp, synthetic construct
  source 1..21: mol_type = other DNA
ctatcgagagtcggttttgac

SEQ ID NO: 21075 - DNA, 21 bp, synthetic construct
  source 1..21: mol_type = other DNA
ttcgttaaatcagacaataga

SEQ ID NO: 21076 - DNA, 21 bp, synthetic construct
  source 1..21: mol_type = other DNA
atagctaacaaggggtgggac

SEQ ID NO: 21077 - DNA, 21 bp, synthetic construct
  source 1..21: mol_type = other DNA
gttatgtccaccaatggagtt

SEQ ID NO: 21078 - DNA, 21 bp, synthetic construct
  source 1..21: mol_type = other DNA
agagatgagactgtgttcccc

SEQ ID NO: 21079 - DNA, 21 bp, synthetic construct
  source 1..21: mol_type = other DNA
cgaggggaaaatgtgttcccc

SEQ ID NO: 21080 - DNA, 21 bp, synthetic construct
  source 1..21: mol_type = other DNA
tatcataagctccagttcgat

SEQ ID NO: 21081 - DNA, 21 bp, synthetic construct
  source 1..21: mol_type = other DNA
taccacaaattgcaatttgac

SEQ ID NO: 21082 - DNA, 21 bp, synthetic construct
  source 1..21: mol_type = other DNA
ttagccaagacgggtcccaat

SEQ ID NO: 21083 - DNA, 21 bp, synthetic construct
  source 1..21: mol_type = other DNA
aagtcggagttcacgacctac

SEQ ID NO: 21084 - DNA, 21 bp, synthetic construct
  source 1..21: mol_type = other DNA
ttgtgtaagccgtgtcttgac

SEQ ID NO: 21085 - DNA, 21 bp, synthetic construct
  source 1..21: mol_type = other DNA
agattagccgatgcgttccct

SEQ ID NO: 21086 - DNA, 21 bp, synthetic construct
  source 1..21: mol_type = other DNA
tatgtcaaatcacaagcgggc

SEQ ID NO: 21087 - DNA, 21 bp, synthetic construct
  source 1..21: mol_type = other DNA
tttgcctgcatgaatagcaat

SEQ ID NO: 21088 - DNA, 21 bp, synthetic construct
  source 1..21: mol_type = other DNA
ctccatcgtctgttgaaggat

SEQ ID NO: 21089 - DNA, 21 bp, synthetic construct
  source 1..21: mol_type = other DNA
ttgatggctgacgcgtacccc

SEQ ID NO: 21090 - DNA, 21 bp, synthetic construct
  source 1..21: mol_type = other DNA
ttgaccagagttgccccgaac

SEQ ID NO: 21091 - DNA, 21 bp, synthetic construct
  source 1..21: mol_type = other DNA
tatttcacgggacaggtagaa

SEQ ID NO: 21092 - DNA, 21 bp, synthetic construct
  source 1..21: mol_type = other DNA
tattctaaaaagaatgacaat

SEQ ID NO: 21093 - DNA, 21 bp, synthetic construct
  source 1..21: mol_type = other DNA
aggaatgaattttgtacattt

SEQ ID NO: 21094 - DNA, 21 bp, synthetic construct
  source 1..21: mol_type = other DNA
ctatgtaaaagttgtcttact

SEQ ID NO: 21095 - DNA, 21 bp, synthetic construct
  source 1..21: mol_type = other DNA
tacttcagtggaatacccctt

SEQ ID NO: 21096 - DNA, 21 bp, synthetic construct
  source 1..21: mol_type = other DNA
tatagtaagctcggacttaac

SEQ ID NO: 21097 - DNA, 21 bp, synthetic construct
  source 1..21: mol_type = other DNA
ctcagtaaaattggctataat

SEQ ID NO: 21098 - DNA, 21 bp, synthetic construct
  source 1..21: mol_type = other DNA
ttagcacgtagcggcccgaat

SEQ ID NO: 21099 - DNA, 21 bp, synthetic construct
  source 1..21: mol_type = other DNA
tatgtgaagagccaggctggc

SEQ ID NO: 21100 - DNA, 21 bp, synthetic construct
  source 1..21: mol_type = other DNA
ttgcaccgtcttttacacgat

SEQ ID NO: 21101 - DNA, 21 bp, synthetic construct
  source 1..21: mol_type = other DNA
acgttaagttctgctacatgg

SEQ ID NO: 21102 - DNA, 21 bp, synthetic construct
  source 1..21: mol_type = other DNA
taccacaagcttaaccctcca

SEQ ID NO: 21103 - DNA, 21 bp, synthetic construct
  source 1..21: mol_type = other DNA
atgttcgatggcactgcagcc

SEQ ID NO: 21104 - DNA, 21 bp, synthetic construct
  source 1..21: mol_type = other DNA
gtcgccagcacgaacgggatt

SEQ ID NO: 21105 - DNA, 21 bp, synthetic construct
  source 1..21: mol_type = other DNA
tatgctaagcacggaccgaat

SEQ ID NO: 21106 - DNA, 21 bp, synthetic construct
  source 1..21: mol_type = other DNA
gtgcagagcaccaacggagta

SEQ ID NO: 21107 - DNA, 21 bp, synthetic construct
  source 1..21: mol_type = other DNA
cgggaggatcacgtatattgg

SEQ ID NO: 21108 - DNA, 21 bp, synthetic construct
  source 1..21: mol_type = other DNA
taccacaagttgaatgataac

SEQ ID NO: 21109 - DNA, 21 bp, synthetic construct
  source 1..21: mol_type = other DNA
ctccacaaaaagagtccggat

SEQ ID NO: 21110 - DNA, 21 bp, synthetic construct
  source 1..21: mol_type = other DNA
ttgcataaagccggctataat

SEQ ID NO: 21111 - DNA, 21 bp, synthetic construct
  source 1..21: mol_type = other DNA
tatgcgaagtcaggacctaac

SEQ ID NO: 21112 - DNA, 21 bp, synthetic construct
  source 1..21: mol_type = other DNA
atgttcgatggcacagccgca

SEQ ID NO: 21113 - DNA, 21 bp, synthetic construct
  source 1..21: mol_type = other DNA
ctttccaaattaagcgcaaat

SEQ ID NO: 21114 - DNA, 21 bp, synthetic construct
  source 1..21: mol_type = other DNA
gttatgagcaccaacggagtg

SEQ ID NO: 21115 - DNA, 21 bp, synthetic construct
  source 1..21: mol_type = other DNA
tattccaaaatcggtcctaat

SEQ ID NO: 21116 - DNA, 21 bp, synthetic construct
  source 1..21: mol_type = other DNA
gtagagagcagagaagggatt

SEQ ID NO: 21117 - DNA, 21 bp, synthetic construct
  source 1..21: mol_type = other DNA
tacgtcaagtctgatcatatg

SEQ ID NO: 21118 - DNA, 21 bp, synthetic construct
  source 1..21: mol_type = other DNA
tatgagccgggctgcgatgaa

SEQ ID NO: 21119 - DNA, 21 bp, synthetic construct
  source 1..21: mol_type = other DNA
gtaatgccggatgcgttcccc

SEQ ID NO: 21120 - DNA, 21 bp, synthetic construct
  source 1..21: mol_type = other DNA
ttgaccagacttcaccccgat

SEQ ID NO: 21121 - DNA, 21 bp, synthetic construct
  source 1..21: mol_type = other DNA
attatgtcatcgaacatttgg

SEQ ID NO: 21122 - DNA, 21 bp, synthetic construct
  source 1..21: mol_type = other DNA
cttatgattgatgcattccct

SEQ ID NO: 21123 - DNA, 21 bp, synthetic construct
  source 1..21: mol_type = other DNA
ttgcacaaaaatcttccggac

SEQ ID NO: 21124 - DNA, 21 bp, synthetic construct
  source 1..21: mol_type = other DNA
tatagtaaagttggcaccaac

SEQ ID NO: 21125 - DNA, 21 bp, synthetic construct
  source 1..21: mol_type = other DNA
gtcataagcacaaatggagtc

SEQ ID NO: 21126 - DNA, 21 bp, synthetic construct
  source 1..21: mol_type = other DNA
ttacacgtaaaattgcccgat

SEQ ID NO: 21127 - DNA, 21 bp, synthetic construct
  source 1..21: mol_type = other DNA
ttcgttaagtctgacacaaaa

SEQ ID NO: 21128 - DNA, 21 bp, synthetic construct
  source 1..21: mol_type = other DNA
ctcagtcgtatcggagacaat

SEQ ID NO: 21129 - DNA, 21 bp, synthetic construct
  source 1..21: mol_type = other DNA
tacagtaaactcaacccgacg

SEQ ID NO: 21130 - DNA, 21 bp, synthetic construct
  source 1..21: mol_type = other DNA
cttacgagactgtcgcacaac

SEQ ID NO: 21131 - DNA, 21 bp, synthetic construct
  source 1..21: mol_type = other DNA
ctgatcaatgatgcgtatccg

SEQ ID NO: 21132 - DNA, 21 bp, synthetic construct
  source 1..21: mol_type = other DNA
cgcatgcttgatgcttttcct

SEQ ID NO: 21133 - DNA, 21 bp, synthetic construct
  source 1..21: mol_type = other DNA
aggacatcagatgtctaccca

SEQ ID NO: 21134 - DNA, 21 bp, synthetic construct
  source 1..21: mol_type = other DNA
aggttggagagcaccttgtgg

SEQ ID NO: 21135 - DNA, 21 bp, synthetic construct
  source 1..21: mol_type = other DNA
ataatggcaagccatggctgg

SEQ ID NO: 21136 - DNA, 21 bp, synthetic construct
  source 1..21: mol_type = other DNA
ctacacaggttaagtttggat

SEQ ID NO: 21137 - DNA, 21 bp, synthetic construct
  source 1..21: mol_type = other DNA
aatggcgctggttgctgcaga

SEQ ID NO: 21138 - DNA, 21 bp, synthetic construct
  source 1..21: mol_type = other DNA
taccacaaacttgataataac

SEQ ID NO: 21139 - DNA, 21 bp, synthetic construct
  source 1..21: mol_type = other DNA
tattttacggggaaggtggcg

SEQ ID NO: 21140 - DNA, 21 bp, synthetic construct
  source 1..21: mol_type = other DNA
cggttgctagacgcataccct

SEQ ID NO: 21141 - DNA, 21 bp, synthetic construct
  source 1..21: mol_type = other DNA
gtagcgacgaaaggtgctggg

SEQ ID NO: 21142 - DNA, 21 bp, synthetic construct
  source 1..21: mol_type = other DNA
ttgtgtaaaccgtgcgccacg

SEQ ID NO: 21143 - DNA, 21 bp, synthetic construct
  source 1..21: mol_type = other DNA
gtggagagtactaacggcgta

SEQ ID NO: 21144 - DNA, 21 bp, synthetic construct
  source 1..21: mol_type = other DNA
tatgtgaaaagcgattctttc

SEQ ID NO: 21145 - DNA, 21 bp, synthetic construct
  source 1..21: mol_type = other DNA
atcgctaccctcgggtgggac

SEQ ID NO: 21146 - DNA, 21 bp, synthetic construct
  source 1..21: mol_type = other DNA
cgcatgatagacgtgtacccg

SEQ ID NO: 21147 - DNA, 21 bp, synthetic construct
  source 1..21: mol_type = other DNA
ttgcataggctgtcagcggat

SEQ ID NO: 21148 - DNA, 21 bp, synthetic construct
  source 1..21: mol_type = other DNA
ttacataagatgtcgatgaac

SEQ ID NO: 21149 - DNA, 21 bp, synthetic construct
  source 1..21: mol_type = other DNA
cgggacatagatgtttttcct

SEQ ID NO: 21150 - DNA, 21 bp, synthetic construct
  source 1..21: mol_type = other DNA
ttagcacgcactggattaaat

SEQ ID NO: 21151 - DNA, 21 bp, synthetic construct
  source 1..21: mol_type = other DNA
tatgtcaagtcggattctcgg

SEQ ID NO: 21152 - DNA, 21 bp, synthetic construct
  source 1..21: mol_type = other DNA
tggtggtctggtgttatggag

SEQ ID NO: 21153 - DNA, 21 bp, synthetic construct
  source 1..21: mol_type = other DNA
ccaatggaatcgcactcttgg

SEQ ID NO: 21154 - DNA, 21 bp, synthetic construct
  source 1..21: mol_type = other DNA
cttcacgcggctttgcctaat

SEQ ID NO: 21155 - DNA, 21 bp, synthetic construct
  source 1..21: mol_type = other DNA
cctatgggatcttccacgtgg

SEQ ID NO: 21156 - DNA, 21 bp, synthetic construct
  source 1..21: mol_type = other DNA
gacctgtccagtcaaacttgg

SEQ ID NO: 21157 - DNA, 21 bp, synthetic construct
  source 1..21: mol_type = other DNA
ctacacagacttggaatggat

SEQ ID NO: 21158 - DNA, 21 bp, synthetic construct
  source 1..21: mol_type = other DNA
aaagatgactttactgcctgg

SEQ ID NO: 21159 - DNA, 21 bp, synthetic construct
  source 1..21: mol_type = other DNA
ttctccaaactcaatttcaac

SEQ ID NO: 21160 - DNA, 21 bp, synthetic construct
  source 1..21: mol_type = other DNA
tactcaaaggtaggtccaaac

SEQ ID NO: 21161 - DNA, 21 bp, synthetic construct
  source 1..21: mol_type = other DNA
atagaatccaccaatggagtg

SEQ ID NO: 21162 - DNA, 21 bp, synthetic construct
  source 1..21: mol_type = other DNA
tacagcaaactcaattccaat

SEQ ID NO: 21163 - DNA, 21 bp, synthetic construct
  source 1..21: mol_type = other DNA
tacgtaaagtctgacagtttt

SEQ ID NO: 21164 - DNA, 21 bp, synthetic construct
  source 1..21: mol_type = other DNA
ggatcggaattccagacatac

SEQ ID NO: 21165 - DNA, 21 bp, synthetic construct
  source 1..21: mol_type = other DNA
ttcagcaaaatcggccctaat

SEQ ID NO: 21166 - DNA, 21 bp, synthetic construct
  source 1..21: mol_type = other DNA
gtcgaaagcacaaacggtcga

SEQ ID NO: 21167 - DNA, 21 bp, synthetic construct
  source 1..21: mol_type = other DNA
ctaagtaaagtgggtgtaaat

SEQ ID NO: 21168 - DNA, 21 bp, synthetic construct
  source 1..21: mol_type = other DNA
ctcgcacgtagcgggccgaat

SEQ ID NO: 21169 - DNA, 21 bp, synthetic construct
  source 1..21: mol_type = other DNA
tatgtgaagcacgacgtaaag

SEQ ID NO: 21170 - DNA, 21 bp, synthetic construct
  source 1..21: mol_type = other DNA
tacgtcaagtcacaaatgctc

SEQ ID NO: 21171 - DNA, 21 bp, synthetic construct
  source 1..21: mol_type = other DNA
tgtggtaaacgttgtgtgccg

SEQ ID NO: 21172 - DNA, 21 bp, synthetic construct
  source 1..21: mol_type = other DNA
aggaccccccaggtgttccca

SEQ ID NO: 21173 - DNA, 21 bp, synthetic construct
  source 1..21: mol_type = other DNA
aggggacccgaagtgttcccg

SEQ ID NO: 21174 - DNA, 21 bp, synthetic construct
  source 1..21: mol_type = other DNA
ttgtgtaaaccttgtttacag

SEQ ID NO: 21175 - DNA, 21 bp, synthetic construct
  source 1..21: mol_type = other DNA
aaggacgacttcacgtcgttc

SEQ ID NO: 21176 - DNA, 21 bp, synthetic construct
  source 1..21: mol_type = other DNA
gtgctcagcactaatggtgta

SEQ ID NO: 21177 - DNA, 21 bp, synthetic construct
  source 1..21: mol_type = other DNA
agggagatcgatgtttatcca

SEQ ID NO: 21178 - DNA, 21 bp, synthetic construct
  source 1..21: mol_type = other DNA
tacagtaagataggagataac

SEQ ID NO: 21179 - DNA, 21 bp, synthetic construct
  source 1..21: mol_type = other DNA
ctctcgcgtgtggggcccgat

SEQ ID NO: 21180 - DNA, 21 bp, synthetic construct
  source 1..21: mol_type = other DNA
ttgtcaagaattggtgataac

SEQ ID NO: 21181 - DNA, 21 bp, synthetic construct
  source 1..21: mol_type = other DNA
tattcgaagctaagcctaaat

SEQ ID NO: 21182 - DNA, 21 bp, synthetic construct
  source 1..21: mol_type = other DNA
atcctaagctcgtcaaactgg

SEQ ID NO: 21183 - DNA, 21 bp, synthetic construct
  source 1..21: mol_type = other DNA
tatgctaagagcggtagcaac

SEQ ID NO: 21184 - DNA, 21 bp, synthetic construct
  source 1..21: mol_type = other DNA
tatcatgccaagctccctaac

SEQ ID NO: 21185 - DNA, 21 bp, synthetic construct
  source 1..21: mol_type = other DNA
ttagcacgcacggggtatgat

SEQ ID NO: 21186 - DNA, 21 bp, synthetic construct
  source 1..21: mol_type = other DNA
ttatgcaaaccatgccaaact

SEQ ID NO: 21187 - DNA, 21 bp, synthetic construct
  source 1..21: mol_type = other DNA
tatcataaattgaacctggat

SEQ ID NO: 21188 - DNA, 21 bp, synthetic construct
  source 1..21: mol_type = other DNA
gtcgagagcaccaatggagta

SEQ ID NO: 21189 - DNA, 21 bp, synthetic construct
  source 1..21: mol_type = other DNA
ctccatcggcttagcatagac

SEQ ID NO: 21190 - DNA, 21 bp, synthetic construct
  source 1..21: mol_type = other DNA
ctgtcgagggtgggacatgat

SEQ ID NO: 21191 - DNA, 21 bp, synthetic construct
  source 1..21: mol_type = other DNA
gtgatgcctgacgcgtatccc

SEQ ID NO: 21192 - DNA, 21 bp, synthetic construct
  source 1..21: mol_type = other DNA
cgcgaggagcacgtctttcct

SEQ ID NO: 21193 - DNA, 21 bp, synthetic construct
  source 1..21: mol_type = other DNA
tattcaaagagtggacccaac

SEQ ID NO: 21194 - DNA, 21 bp, synthetic construct
  source 1..21: mol_type = other DNA
gtgttcagcacaaatggcgtg

SEQ ID NO: 21195 - DNA, 21 bp, synthetic construct
  source 1..21: mol_type = other DNA
cgcggtgagacagtgtttccg

SEQ ID NO: 21196 - DNA, 21 bp, synthetic construct
  source 1..21: mol_type = other DNA
atcttgagttcgtcttcatgg

SEQ ID NO: 21197 - DNA, 21 bp, synthetic construct
  source 1..21: mol_type = other DNA
gtaacgtctacgaatggtgtt

SEQ ID NO: 21198 - DNA, 21 bp, synthetic construct
  source 1..21: mol_type = other DNA
tatagtaaactcggacccaat

SEQ ID NO: 21199 - DNA, 21 bp, synthetic construct
  source 1..21: mol_type = other DNA
ctccataagaacttacccgat

SEQ ID NO: 21200 - DNA, 21 bp, synthetic construct
  source 1..21: mol_type = other DNA
atagcacacctcgggtgggac

SEQ ID NO: 21201 - DNA, 21 bp, synthetic construct
  source 1..21: mol_type = other DNA
tacgttaaacatgatgttaaa

SEQ ID NO: 21202 - DNA, 21 bp, synthetic construct
  source 1..21: mol_type = other DNA
tttgtaaagagtgacaaccgc

SEQ ID NO: 21203 - DNA, 21 bp, synthetic construct
  source 1..21: mol_type = other DNA
tactttacaggtatcaaggac

SEQ ID NO: 21204 - DNA, 21 bp, synthetic construct
  source 1..21: mol_type = other DNA
ctctccaagataggttacaac

SEQ ID NO: 21205 - DNA, 21 bp, synthetic construct
  source 1..21: mol_type = other DNA
ttgtttgatggaacgtcggcc

SEQ ID NO: 21206 - DNA, 21 bp, synthetic construct
  source 1..21: mol_type = other DNA
tactttaccggaataactgag

SEQ ID NO: 21207 - DNA, 21 bp, synthetic construct
  source 1..21: mol_type = other DNA
gtaatttcaacgaacggtgta

SEQ ID NO: 21208 - DNA, 21 bp, synthetic construct
  source 1..21: mol_type = other DNA
cgcactgaaaccgtatatccg

SEQ ID NO: 21209 - DNA, 21 bp, synthetic construct
  source 1..21: mol_type = other DNA
aggactgaccatgtatttccg

SEQ ID NO: 21210 - DNA, 21 bp, synthetic construct
  source 1..21: mol_type = other DNA
atgcatcgcctattacccgat

SEQ ID NO: 21211 - DNA, 21 bp, synthetic construct
  source 1..21: mol_type = other DNA
ctattcgacggcaccagtgct

SEQ ID NO: 21212 - DNA, 21 bp, synthetic construct
  source 1..21: mol_type = other DNA
cgaaccaatgaggtatttccg

SEQ ID NO: 21213 - DNA, 21 bp, synthetic construct
  source 1..21: mol_type = other DNA
ttgtgtaagccttgtgacacc

SEQ ID NO: 21214 - DNA, 21 bp, synthetic construct
  source 1..21: mol_type = other DNA
accgaaagtactaacggtgtt

SEQ ID NO: 21215 - DNA, 21 bp, synthetic construct
  source 1..21: mol_type = other DNA
ttgactaggttgcatgcggac

SEQ ID NO: 21216 - DNA, 21 bp, synthetic construct
  source 1..21: mol_type = other DNA
gtgttgtcatccacaacgtgg

SEQ ID NO: 21217 - DNA, 21 bp, synthetic construct
  source 1..21: mol_type = other DNA
tacactaaattaagccctaat

SEQ ID NO: 21218 - DNA, 21 bp, synthetic construct
  source 1..21: mol_type = other DNA
atgtttgatgggacgagtgca

SEQ ID NO: 21219 - DNA, 21 bp, synthetic construct
  source 1..21: mol_type = other DNA
ttgcacgccttgtcacacaac

SEQ ID NO: 21220 - DNA, 21 bp, synthetic construct
  source 1..21: mol_type = other DNA
tatttcacaggcaccatagag

SEQ ID NO: 21221 - DNA, 21 bp, synthetic construct
  source 1..21: mol_type = other DNA
gtcgactccaccaatggtatc

SEQ ID NO: 21222 - DNA, 21 bp, synthetic construct
  source 1..21: mol_type = other DNA
cgcctcatggacgcctttccc

SEQ ID NO: 21223 - DNA, 21 bp, synthetic construct
  source 1..21: mol_type = other DNA
tacttcaccggtgtcttagcg

SEQ ID NO: 21224 - DNA, 21 bp, synthetic construct
  source 1..21: mol_type = other DNA
ttccataaattaagcacaaac

SEQ ID NO: 21225 - DNA, 21 bp, synthetic construct
  source 1..21: mol_type = other DNA
taccataagatgttacccgat

SEQ ID NO: 21226 - DNA, 21 bp, synthetic construct
  source 1..21: mol_type = other DNA
aaggatgacttcacaacgttc

SEQ ID NO: 21227 - DNA, 21 bp, synthetic construct
  source 1..21: mol_type = other DNA
tacgtgaaatctcagactatg

SEQ ID NO: 21228 - DNA, 21 bp, synthetic construct
  source 1..21: mol_type = other DNA
tactccaaagtccaaacaaat

SEQ ID NO: 21229 - DNA, 21 bp, synthetic construct
  source 1..21: mol_type = other DNA
ttatcacgtattgggatgaac

SEQ ID NO: 21230 - DNA, 21 bp, synthetic construct
  source 1..21: mol_type = other DNA
cgtgaggatacagttaaatgg

SEQ ID NO: 21231 - DNA, 21 bp, synthetic construct
  source 1..21: mol_type = other DNA
ttttctaaattgaatataaac

SEQ ID NO: 21232 - DNA, 21 bp, synthetic construct
  source 1..21: mol_type = other DNA
tatacgaagctttcacccaac

SEQ ID NO: 21233 - DNA, 21 bp, synthetic construct
  source 1..21: mol_type = other DNA
gagatggcaagtcatagctgg

SEQ ID NO: 21234 - DNA, 21 bp, synthetic construct
  source 1..21: mol_type = other DNA
tatttcactggacaggtcgaa

SEQ ID NO: 21235 - DNA, 21 bp, synthetic construct
  source 1..21: mol_type = other DNA
tattccaaggttggatcgaat

SEQ ID NO: 21236 - DNA, 21 bp, synthetic construct
  source 1..21: mol_type = other DNA
tacgtaaagtcggatacggcg

SEQ ID NO: 21237 - DNA, 21 bp, synthetic construct
  source 1..21: mol_type = other DNA
tatacgaagtcacaaactaat

SEQ ID NO: 21238 - DNA, 21 bp, synthetic construct
  source 1..21: mol_type = other DNA
atgtacaacgactgttgtgtg

SEQ ID NO: 21239 - DNA, 21 bp, synthetic construct
  source 1..21: mol_type = other DNA
tatgttaaatctcagttatca

SEQ ID NO: 21240 - DNA, 21 bp, synthetic construct
  source 1..21: mol_type = other DNA
ttatgcaaaccttgccctaca

SEQ ID NO: 21241 - DNA, 21 bp, synthetic construct
  source 1..21: mol_type = other DNA
tatgtcaaaagccaaacttcc

SEQ ID NO: 21242 - DNA, 21 bp, synthetic construct
  source 1..21: mol_type = other DNA
ttgagccgtctttcgttcgat

SEQ ID NO: 21243 - DNA, 21 bp, synthetic construct
  source 1..21: mol_type = other DNA
cgtttggacaacgtataccct

SEQ ID NO: 21244 - DNA, 21 bp, synthetic construct
  source 1..21: mol_type = other DNA
ctcttctcaggcgagggtcct

SEQ ID NO: 21245 - DNA, 21 bp, synthetic construct
  source 1..21: mol_type = other DNA
cgggaagagaatgtatacccg

SEQ ID NO: 21246 - DNA, 21 bp, synthetic construct
  source 1..21: mol_type = other DNA
tattctaaacagggtcctaac

SEQ ID NO: 21247 - DNA, 21 bp, synthetic construct
  source 1..21: mol_type = other DNA
tactccaaaaacggcccaaac

SEQ ID NO: 21248 - DNA, 21 bp, synthetic construct
  source 1..21: mol_type = other DNA
agggctttagaggggtacgat

SEQ ID NO: 21249 - DNA, 21 bp, synthetic construct
  source 1..21: mol_type = other DNA
acggagtcaacaaatggggtg

SEQ ID NO: 21250 - DNA, 21 bp, synthetic construct
  source 1..21: mol_type = other DNA
ttgagccgtttgtcctttgat

SEQ ID NO: 21251 - DNA, 21 bp, synthetic construct
  source 1..21: mol_type = other DNA
gatttgagagcggctacgtgg

SEQ ID NO: 21252 - DNA, 21 bp, synthetic construct
  source 1..21: mol_type = other DNA
tatgtaaaaagcgatactcgc

SEQ ID NO: 21253 - DNA, 21 bp, synthetic construct
  source 1..21: mol_type = other DNA
tatctcaaatcccagcagtct

SEQ ID NO: 21254 - DNA, 21 bp, synthetic construct
  source 1..21: mol_type = other DNA
cgcgggccagaggtcttcccc

SEQ ID NO: 21255 - DNA, 21 bp, synthetic construct
  source 1..21: mol_type = other DNA
aaagacgatttcacccacttt

SEQ ID NO: 21256 - DNA, 21 bp, synthetic construct
  source 1..21: mol_type = other DNA
tatgtgaaaagtgacactgcc

SEQ ID NO: 21257 - DNA, 21 bp, synthetic construct
  source 1..21: mol_type = other DNA
tatagcaaggcgggtccaaat

SEQ ID NO: 21258 - DNA, 21 bp, synthetic construct
  source 1..21: mol_type = other DNA
agaacggagacagtgtaccct

SEQ ID NO: 21259 - DNA, 21 bp, synthetic construct
  source 1..21: mol_type = other DNA
tacttcacaggcaaagttgaa

SEQ ID NO: 21260 - DNA, 21 bp, synthetic construct
  source 1..21: mol_type = other DNA
tatagcaagacgggccctaat

SEQ ID NO: 21261 - DNA, 21 bp, synthetic construct
  source 1..21: mol_type = other DNA
taccacaagttaaacctcgat

SEQ ID NO: 21262 - DNA, 21 bp, synthetic construct
  source 1..21: mol_type = other DNA
gtccccggtgactgttgtgtg

SEQ ID NO: 21263 - DNA, 21 bp, synthetic construct
  source 1..21: mol_type = other DNA
ataatgatggacgcttacccc

SEQ ID NO: 21264 - DNA, 21 bp, synthetic construct
  source 1..21: mol_type = other DNA
ctacacaaattacataccaat

SEQ ID NO: 21265 - DNA, 21 bp, synthetic construct
  source 1..21: mol_type = other DNA
tggtggagcggtgttaaagaa

SEQ ID NO: 21266 - DNA, 21 bp, synthetic construct
  source 1..21: mol_type = other DNA
ttatcgaaattgtcctcaaac

SEQ ID NO: 21267 - DNA, 21 bp, synthetic construct
  source 1..21: mol_type = other DNA
ataatgagcagcgctaattgg

SEQ ID NO: 21268 - DNA, 21 bp, synthetic construct
  source 1..21: mol_type = other DNA
ctcttctcaggggatgggcca

SEQ ID NO: 21269 - DNA, 21 bp, synthetic construct
  source 1..21: mol_type = other DNA
cttagcaagctcaatcctaac

SEQ ID NO: 21270 - DNA, 21 bp, synthetic construct
  source 1..21: mol_type = other DNA
attgagtctactaacggtgtc

SEQ ID NO: 21271 - DNA, 21 bp, synthetic construct
  source 1..21: mol_type = other DNA
tatagtaaattaggattcaac

SEQ ID NO: 21272 - DNA, 21 bp, synthetic construct
  source 1..21: mol_type = other DNA
gacctggcgagctacaagtgg

SEQ ID NO: 21273 - DNA, 21 bp, synthetic construct
  source 1..21: mol_type = other DNA
aaagatgaattcagtacgtgg

SEQ ID NO: 21274 - DNA, 21 bp, synthetic construct
  source 1..21: mol_type = other DNA
gatatgtcaagcagtaagtgg

SEQ ID NO: 21275 - DNA, 21 bp, synthetic construct
  source 1..21: mol_type = other DNA
ggctgtaggccgggatgtggc

SEQ ID NO: 21276 - DNA, 21 bp, synthetic construct
  source 1..21: mol_type = other DNA
cggacggtggacacttacccg

SEQ ID NO: 21277 - DNA, 21 bp, synthetic construct
  source 1..21: mol_type = other DNA
cagttatcttcaagtacatgg

SEQ ID NO: 21278 - DNA, 21 bp, synthetic construct
  source 1..21: mol_type = other DNA
tatttcacgggtgtaaaagaa

SEQ ID NO: 21279 - DNA, 21 bp, synthetic construct
  source 1..21: mol_type = other DNA
tacgtgaagtcagacacaagg

SEQ ID NO: 21280 - DNA, 21 bp, synthetic construct
  source 1..21: mol_type = other DNA
ctacatcgtttactcccggac

SEQ ID NO: 21281 - DNA, 21 bp, synthetic construct
  source 1..21: mol_type = other DNA
aaagatgactttactatgttt

SEQ ID NO: 21282 - DNA, 21 bp, synthetic construct
  source 1..21: mol_type = other DNA
cgcacgaatgatgttttcccc

SEQ ID NO: 21283 - DNA, 21 bp, synthetic construct
  source 1..21: mol_type = other DNA
ttacataggttaggtgctgat

SEQ ID NO: 21284 - DNA, 21 bp, synthetic construct
  source 1..21: mol_type = other DNA
tatattaagagtcagttgaac

SEQ ID NO: 21285 - DNA, 21 bp, synthetic construct
  source 1..21: mol_type = other DNA
tactcaaaacttgaccgcaat

SEQ ID NO: 21286 - DNA, 21 bp, synthetic construct
  source 1..21: mol_type = other DNA
aggttgatggatgcattccca

SEQ ID NO: 21287 - DNA, 21 bp, synthetic construct
  source 1..21: mol_type = other DNA
gtggccagtacgaatggggtt

SEQ ID NO: 21288 - DNA, 21 bp, synthetic construct
  source 1..21: mol_type = other DNA
agaaccccggaggttttcccc

SEQ ID NO: 21289 - DNA, 21 bp, synthetic construct
  source 1..21: mol_type = other DNA
tacgtaaaaagtgacacaagg

SEQ ID NO: 21290 - DNA, 21 bp, synthetic construct
  source 1..21: mol_type = other DNA
atcgaaagcagcaacgggagg

SEQ ID NO: 21291 - DNA, 21 bp, synthetic construct
  source 1..21: mol_type = other DNA
ctgcatagattgtcgccgctc

SEQ ID NO: 21292 - DNA, 21 bp, synthetic construct
  source 1..21: mol_type = other DNA
cccatggaatcatcaaaatgg

SEQ ID NO: 21293 - DNA, 21 bp, synthetic construct
  source 1..21: mol_type = other DNA
atgcacaaattgagtgaaaac

SEQ ID NO: 21294 - DNA, 21 bp, synthetic construct
  source 1..21: mol_type = other DNA
cgaacggagacagtgtatcct

SEQ ID NO: 21295 - DNA, 21 bp, synthetic construct
  source 1..21: mol_type = other DNA
atccataaacttagtgccaac

SEQ ID NO: 21296 - DNA, 21 bp, synthetic construct
  source 1..21: mol_type = other DNA
gttatggcgtcgtcaagttgg

SEQ ID NO: 21297 - DNA, 21 bp, synthetic construct
  source 1..21: mol_type = other DNA
cgtacagagcatgtattccca

SEQ ID NO: 21298 - DNA, 21 bp, synthetic construct
  source 1..21: mol_type = other DNA
gtcgcgttggaaggccgggac

SEQ ID NO: 21299 - DNA, 21 bp, synthetic construct
  source 1..21: mol_type = other DNA
cgtgaagtcgatgtctttcca

SEQ ID NO: 21300 - DNA, 21 bp, synthetic construct
  source 1..21: mol_type = other DNA
ttaagcaaactaaatgcaaat

SEQ ID NO: 21301 - DNA, 21 bp, synthetic construct
  source 1..21: mol_type = other DNA
taccataagctcaatttagac

SEQ ID NO: 21302 - DNA, 21 bp, synthetic construct
  source 1..21: mol_type = other DNA
tactcaaagatagggcaaaat

SEQ ID NO: 21303 - DNA, 21 bp, synthetic construct
  source 1..21: mol_type = other DNA
gttacctctactaatggtata

SEQ ID NO: 21304 - DNA, 21 bp, synthetic construct
  source 1..21: mol_type = other DNA
cgcctcgcggacgcttttccc

SEQ ID NO: 21305 - DNA, 21 bp, synthetic construct
  source 1..21: mol_type = other DNA
attcatcggcttggaccggat

SEQ ID NO: 21306 - DNA, 21 bp, synthetic construct
  source 1..21: mol_type = other DNA
tacgtcaagagcgacatgaaa

SEQ ID NO: 21307 - DNA, 21 bp, synthetic construct
  source 1..21: mol_type = other DNA
tacttgaaatcgcagccatac

SEQ ID NO: 21308 - DNA, 21 bp, synthetic construct
  source 1..21: mol_type = other DNA
aaggacgagttcagcgggtac

SEQ ID NO: 21309 - DNA, 21 bp, synthetic construct
  source 1..21: mol_type = other DNA
cttcataaaatgtcgatgaat

SEQ ID NO: 21310 - DNA, 21 bp, synthetic construct
  source 1..21: mol_type = other DNA
ttaagtaaaataggcgttaac

SEQ ID NO: 21311 - DNA, 21 bp, synthetic construct
  source 1..21: mol_type = other DNA
ttagcaaagactgccccaaat

SEQ ID NO: 21312 - DNA, 21 bp, synthetic construct
  source 1..21: mol_type = other DNA
atagaaagtactcatggccgg

SEQ ID NO: 21313 - DNA, 21 bp, synthetic construct
  source 1..21: mol_type = other DNA
ttgcacagattgttgccagat

SEQ ID NO: 21314 - DNA, 21 bp, synthetic construct
  source 1..21: mol_type = other DNA
gtagcattaaaaggatgggat

SEQ ID NO: 21315 - DNA, 21 bp, synthetic construct
  source 1..21: mol_type = other DNA
tacgtgaagagccaggcagga

SEQ ID NO: 21316 - DNA, 21 bp, synthetic construct
  source 1..21: mol_type = other DNA
gtaagcgaatttttgtcgtat

SEQ ID NO: 21317 - DNA, 21 bp, synthetic construct
  source 1..21: mol_type = other DNA
gtcgcatcaacaaacggggtg

SEQ ID NO: 21318 - DNA, 21 bp, synthetic construct
  source 1..21: mol_type = other DNA
ttggccaagagcgggcataat

SEQ ID NO: 21319 - DNA, 21 bp, synthetic construct
  source 1..21: mol_type = other DNA
ttgcaccgccttaatccctta

SEQ ID NO: 21320 - DNA, 21 bp, synthetic construct
  source 1..21: mol_type = other DNA
agggaagagggcgtaagttgg

SEQ ID NO: 21321 - DNA, 21 bp, synthetic construct
  source 1..21: mol_type = other DNA
tacataaagtcgcaactaaat

SEQ ID NO: 21322 - DNA, 21 bp, synthetic construct
  source 1..21: mol_type = other DNA
agggatgatttcaccagttac

SEQ ID NO: 21323 - DNA, 21 bp, synthetic construct
  source 1..21: mol_type = other DNA
cttagcagaatcggcatgaat

SEQ ID NO: 21324 - DNA, 21 bp, synthetic construct
  source 1..21: mol_type = other DNA
agaggagaaacagtctatcca

SEQ ID NO: 21325 - DNA, 21 bp, synthetic construct
  source 1..21: mol_type = other DNA
cgtgacgaaacagtttatccg

SEQ ID NO: 21326 - DNA, 21 bp, synthetic construct
  source 1..21: mol_type = other DNA
cgtgacgagtttacaacgtat

SEQ ID NO: 21327 - DNA, 21 bp, synthetic construct
  source 1..21: mol_type = other DNA
gttgaatcgcgggagggaatc

SEQ ID NO: 21328 - DNA, 21 bp, synthetic construct
  source 1..21: mol_type = other DNA
tatagtaaattggataggaac

SEQ ID NO: 21329 - DNA, 21 bp, synthetic construct
  source 1..21: mol_type = other DNA
ttatcgaaagcagcatttaat

SEQ ID NO: 21330 - DNA, 21 bp, synthetic construct
  source 1..21: mol_type = other DNA
ctttcgagggtcggcttcaac

SEQ ID NO: 21331 - DNA, 21 bp, synthetic construct
  source 1..21: mol_type = other DNA
ttacaccgtctaggtggtgac

SEQ ID NO: 21332 - DNA, 21 bp, synthetic construct
  source 1..21: mol_type = other DNA
tatttcacaggaaaaattgcg

SEQ ID NO: 21333 - DNA, 21 bp, synthetic construct
  source 1..21: mol_type = other DNA
gttgagtcaactaatggggcg

SEQ ID NO: 21334 - DNA, 21 bp, synthetic construct
  source 1..21: mol_type = other DNA
ttcggcggtggactgtttgtg

SEQ ID NO: 21335 - DNA, 21 bp, synthetic construct
  source 1..21: mol_type = other DNA
ctgtgcaagccgtgtgttacg

SEQ ID NO: 21336 - DNA, 21 bp, synthetic construct
  source 1..21: mol_type = other DNA
tacgtgaaaagtgatcgccat

SEQ ID NO: 21337 - DNA, 21 bp, synthetic construct
  source 1..21: mol_type = other DNA
tatttcacggggattacagaa

SEQ ID NO: 21338 - DNA, 21 bp, synthetic construct
  source 1..21: mol_type = other DNA
ctacaccgattgagcgacaat

SEQ ID NO: 21339 - DNA, 21 bp, synthetic construct
  source 1..21: mol_type = other DNA
aggggcccagacgtttttccg

SEQ ID NO: 21340 - DNA, 21 bp, synthetic construct
  source 1..21: mol_type = other DNA
ctaagtaggctttcgcatgat

SEQ ID NO: 21341 - DNA, 21 bp, synthetic construct
  source 1..21: mol_type = other DNA
ttggctaaaggcggccccaat

SEQ ID NO: 21342 - DNA, 21 bp, synthetic construct
  source 1..21: mol_type = other DNA
cttacacgggtgagcccggac

SEQ ID NO: 21343 - DNA, 21 bp, synthetic construct
  source 1..21: mol_type = other DNA
ttttctaagttgaactttaac

SEQ ID NO: 21344 - DNA, 21 bp, synthetic construct
  source 1..21: mol_type = other DNA
aggactgaaaccgtctacccg

SEQ ID NO: 21345 - DNA, 21 bp, synthetic construct
  source 1..21: mol_type = other DNA
tattcaaaagcggggcctaac

SEQ ID NO: 21346 - DNA, 21 bp, synthetic construct
  source 1..21: mol_type = other DNA
ttaagtaagcttaacatgaac

SEQ ID NO: 21347 - DNA, 21 bp, synthetic construct
  source 1..21: mol_type = other DNA
cgcctcgagagtgctgcatgg

SEQ ID NO: 21348 - DNA, 21 bp, synthetic construct
  source 1..21: mol_type = other DNA
gtggctcttgaggggagagat

SEQ ID NO: 21349 - DNA, 21 bp, synthetic construct
  source 1..21: mol_type = other DNA
ataatgacggaccgcatctgg

SEQ ID NO: 21350 - DNA, 21 bp, synthetic construct
  source 1..21: mol_type = other DNA
ttgcgtgacggaactccagcc

SEQ ID NO: 21351 - DNA, 21 bp, synthetic construct
  source 1..21: mol_type = other DNA
ttgagcaggatagggcagaat

SEQ ID NO: 21352 - DNA, 21 bp, synthetic construct
  source 1..21: mol_type = other DNA
agggaagactcagtaaggtgg

SEQ ID NO: 21353 - DNA, 21 bp, synthetic construct
  source 1..21: mol_type = other DNA
ctagaaagcagagagggtatt

SEQ ID NO: 21354 - DNA, 21 bp, synthetic construct
  source 1..21: mol_type = other DNA
gttatgcccgatgcataccct

SEQ ID NO: 21355 - DNA, 21 bp, synthetic construct
  source 1..21: mol_type = other DNA
gtgaaatctactaatggtatc

SEQ ID NO: 21356 - DNA, 21 bp, synthetic construct
  source 1..21: mol_type = other DNA
ttgtgtcgtccatgtgctgag

SEQ ID NO: 21357 - DNA, 21 bp, synthetic construct
  source 1..21: mol_type = other DNA
aattctcttgaaggtagagac

SEQ ID NO: 21358 - DNA, 21 bp, synthetic construct
  source 1..21: mol_type = other DNA
gtctctgaattcttgagtttc

SEQ ID NO: 21359 - DNA, 21 bp, synthetic construct
  source 1..21: mol_type = other DNA
ttacaccgtctcggtgacgat

SEQ ID NO: 21360 - DNA, 21 bp, synthetic construct
  source 1..21: mol_type = other DNA
cgcggagttgatgtgtacccc

SEQ ID NO: 21361 - DNA, 21 bp, synthetic construct
  source 1..21: mol_type = other DNA
agattagcagacgtttttcct

SEQ ID NO: 21362 - DNA, 21 bp, synthetic construct
  source 1..21: mol_type = other DNA
tatagtaagctcaacgataac

SEQ ID NO: 21363 - DNA, 21 bp, synthetic construct
  source 1..21: mol_type = other DNA
tatttcactgggcattgggaa

SEQ ID NO: 21364 - DNA, 21 bp, synthetic construct
  source 1..21: mol_type = other DNA
tatgtcaagtcggaccgcatg

SEQ ID NO: 21365 - DNA, 21 bp, synthetic construct
  source 1..21: mol_type = other DNA
cgaggtgacaatgttttcccc

SEQ ID NO: 21366 - DNA, 21 bp, synthetic construct
  source 1..21: mol_type = other DNA
ctacaccgacttagtgcagac

SEQ ID NO: 21367 - DNA, 21 bp, synthetic construct
  source 1..21: mol_type = other DNA
ttacacaagcttagtagtgat

SEQ ID NO: 21368 - DNA, 21 bp, synthetic construct
  source 1..21: mol_type = other DNA
atgtttgacggcacacctgct

SEQ ID NO: 21369 - DNA, 21 bp, synthetic construct
  source 1..21: mol_type = other DNA
ctatgcaagccctgcatgact

SEQ ID NO: 21370 - DNA, 21 bp, synthetic construct
  source 1..21: mol_type = other DNA
ctttcaaagttgaacgacaac

SEQ ID NO: 21371 - DNA, 21 bp, synthetic construct
  source 1..21: mol_type = other DNA
cgcttgatggacgcgtacccc

SEQ ID NO: 21372 - DNA, 21 bp, synthetic construct
  source 1..21: mol_type = other DNA
tacgcaaaacatgggcctaac

SEQ ID NO: 21373 - DNA, 21 bp, synthetic construct
  source 1..21: mol_type = other DNA
gaaagcgatttcaagatatgg

SEQ ID NO: 21374 - DNA, 21 bp, synthetic construct
  source 1..21: mol_type = other DNA
atgcacagattgctcccagac

SEQ ID NO: 21375 - DNA, 21 bp, synthetic construct
  source 1..21: mol_type = other DNA
cgagaaatagacgtgtacccc

SEQ ID NO: 21376 - DNA, 21 bp, synthetic construct
  source 1..21: mol_type = other DNA
tatgcgaagtcagggattaac

SEQ ID NO: 21377 - DNA, 21 bp, synthetic construct
  source 1..21: mol_type = other DNA
gtcatggaagcacggaactgg

SEQ ID NO: 21378 - DNA, 21 bp, synthetic construct
  source 1..21: mol_type = other DNA
tacagtaaagtgggcgtgaac

SEQ ID NO: 21379 - DNA, 21 bp, synthetic construct
  source 1..21: mol_type = other DNA
agaggtcctgaagtgtttcct

SEQ ID NO: 21380 - DNA, 21 bp, synthetic construct
  source 1..21: mol_type = other DNA
tactcaaagacgggagctaat

SEQ ID NO: 21381 - DNA, 21 bp, synthetic construct
  source 1..21: mol_type = other DNA
ttctcgaagctaaacaccaat

SEQ ID NO: 21382 - DNA, 21 bp, synthetic construct
  source 1..21: mol_type = other DNA
ctctcacggattggtcaaaac

SEQ ID NO: 21383 - DNA, 21 bp, synthetic construct
  source 1..21: mol_type = other DNA
tactcgaagattggacagaat

SEQ ID NO: 21384 - DNA, 21 bp, synthetic construct
  source 1..21: mol_type = other DNA
gtcctctcagatcgcctatgg

SEQ ID NO: 21385 - DNA, 21 bp, synthetic construct
  source 1..21: mol_type = other DNA
tattttagcggcgtggtagag

SEQ ID NO: 21386 - DNA, 21 bp, synthetic construct
  source 1..21: mol_type = other DNA
tactttaccggcaagatagca

SEQ ID NO: 21387 - DNA, 21 bp, synthetic construct
  source 1..21: mol_type = other DNA
gggagtattacgtctacttgg

SEQ ID NO: 21388 - DNA, 21 bp, synthetic construct
  source 1..21: mol_type = other DNA
tatgcaaagacgggtccgaac

SEQ ID NO: 21389 - DNA, 21 bp, synthetic construct
  source 1..21: mol_type = other DNA
aggaccgaacatgtttttccg

SEQ ID NO: 21390 - DNA, 21 bp, synthetic construct
  source 1..21: mol_type = other DNA
tacgcgaaaactggtatgaac

SEQ ID NO: 21391 - DNA, 21 bp, synthetic construct
  source 1..21: mol_type = other DNA
ctccaccgcctaggcgcagac

SEQ ID NO: 21392 - DNA, 21 bp, synthetic construct
  source 1..21: mol_type = other DNA
ctctgtaagccctgccaaacc

SEQ ID NO: 21393 - DNA, 21 bp, synthetic construct
  source 1..21: mol_type = other DNA
attgaaagcagcaacggtcgt

SEQ ID NO: 21394 - DNA, 21 bp, synthetic construct
  source 1..21: mol_type = other DNA
tatgtgaaatcacaggtatcc

SEQ ID NO: 21395 - DNA, 21 bp, synthetic construct
  source 1..21: mol_type = other DNA
aggggacctcaggtatttccg

SEQ ID NO: 21396 - DNA, 21 bp, synthetic construct
  source 1..21: mol_type = other DNA
aaagatgatttcactacatac

SEQ ID NO: 21397 - DNA, 21 bp, synthetic construct
  source 1..21: mol_type = other DNA
agaggtgacaacattttcccc

SEQ ID NO: 21398 - DNA, 21 bp, synthetic construct
  source 1..21: mol_type = other DNA
tacgccaagaccggtactaac

SEQ ID NO: 21399 - DNA, 21 bp, synthetic construct
  source 1..21: mol_type = other DNA
tatgaaccggggtgtcatgag

SEQ ID NO: 21400 - DNA, 21 bp, synthetic construct
  source 1..21: mol_type = other DNA
gtaatgtcaactaatggaata

SEQ ID NO: 21401 - DNA, 21 bp, synthetic construct
  source 1..21: mol_type = other DNA
aaggacgaattctctagttgg

SEQ ID NO: 21402 - DNA, 21 bp, synthetic construct
  source 1..21: mol_type = other DNA
cgcctcatggacgtctatccg

SEQ ID NO: 21403 - DNA, 21 bp, synthetic construct
  source 1..21: mol_type = other DNA
cttgctaaaggggggttcaat

SEQ ID NO: 21404 - DNA, 21 bp, synthetic construct
  source 1..21: mol_type = other DNA
ccctatgctaagagcccgatg

SEQ ID NO: 21405 - DNA, 21 bp, synthetic construct
  source 1..21: mol_type = other DNA
gttatggctgatgcctttccc

SEQ ID NO: 21406 - DNA, 21 bp, synthetic construct
  source 1..21: mol_type = other DNA
tatagcaagctgggggtaaac

SEQ ID NO: 21407 - DNA, 21 bp, synthetic construct
  source 1..21: mol_type = other DNA
atagagagtaccaacggtata

SEQ ID NO: 21408 - DNA, 21 bp, synthetic construct
  source 1..21: mol_type = other DNA
ttgcataaactccagactgac

SEQ ID NO: 21409 - DNA, 21 bp, synthetic construct
  source 1..21: mol_type = other DNA
ctcgcgcgaacgggaatgaac

SEQ ID NO: 21410 - DNA, 21 bp, synthetic construct
  source 1..21: mol_type = other DNA
gttatgtcatccacgacttgg

SEQ ID NO: 21411 - DNA, 21 bp, synthetic construct
  source 1..21: mol_type = other DNA
aggactatagatgcgttccct

SEQ ID NO: 21412 - DNA, 21 bp, synthetic construct
  source 1..21: mol_type = other DNA
gtccctggagattgctgcgtc

SEQ ID NO: 21413 - DNA, 21 bp, synthetic construct
  source 1..21: mol_type = other DNA
tacgctaaaacaggagcgaac

SEQ ID NO: 21414 - DNA, 21 bp, synthetic construct
  source 1..21: mol_type = other DNA
aaagacgattttcatacttac

SEQ ID NO: 21415 - DNA, 21 bp, synthetic construct
  source 1..21: mol_type = other DNA
ccgtatgcaaaatccgtggag

SEQ ID NO: 21416 - DNA, 21 bp, synthetic construct
  source 1..21: mol_type = other DNA
ctcacgcgccttcaaattaat

SEQ ID NO: 21417 - DNA, 21 bp, synthetic construct
  source 1..21: mol_type = other DNA
tattttacgggtgtgttgcag

SEQ ID NO: 21418 - DNA, 21 bp, synthetic construct
  source 1..21: mol_type = other DNA
ttgtgtaagccgtgtctcatg

SEQ ID NO: 21419 - DNA, 21 bp, synthetic construct
  source 1..21: mol_type = other DNA
ccaatgtcatccagcagctgg

SEQ ID NO: 21420 - DNA, 21 bp, synthetic construct
  source 1..21: mol_type = other DNA
ctttcaaaggctagtgtgaat

SEQ ID NO: 21421 - DNA, 21 bp, synthetic construct
  source 1..21: mol_type = other DNA
tattcaaaactgaacatgaat

SEQ ID NO: 21422 - DNA, 21 bp, synthetic construct
  source 1..21: mol_type = other DNA
aacttatcatcgtcaacctgg

SEQ ID NO: 21423 - DNA, 21 bp, synthetic construct
  source 1..21: mol_type = other DNA
tatgtaaaacacgatccccat

SEQ ID NO: 21424 - DNA, 21 bp, synthetic construct
  source 1..21: mol_type = other DNA
taccataagttaaacccgatg

SEQ ID NO: 21425 - DNA, 21 bp, synthetic construct
  source 1..21: mol_type = other DNA
tactcgaagctcaatcctatg

SEQ ID NO: 21426 - DNA, 21 bp, synthetic construct
  source 1..21: mol_type = other DNA
atcatgatggatgcgtatcca

SEQ ID NO: 21427 - DNA, 21 bp, synthetic construct
  source 1..21: mol_type = other DNA
ctgagtagaattggaccgaac

SEQ ID NO: 21428 - DNA, 21 bp, synthetic construct
  source 1..21: mol_type = other DNA
ttaaccaggttgagcccggat

SEQ ID NO: 21429 - DNA, 21 bp, synthetic construct
  source 1..21: mol_type = other DNA
tacagcaagatggggccaaac

SEQ ID NO: 21430 - DNA, 21 bp, synthetic construct
  source 1..21: mol_type = other DNA
cgtggtgagaacgtatttcca

SEQ ID NO: 21431 - DNA, 21 bp, synthetic construct
  source 1..21: mol_type = other DNA
tatttgaaaagccagcctttc

SEQ ID NO: 21432 - DNA, 21 bp, synthetic construct
  source 1..21: mol_type = other DNA
gttgcgaacaaaggctgggat

SEQ ID NO: 21433 - DNA, 21 bp, synthetic construct
  source 1..21: mol_type = other DNA
atcagtagcacgaatggtatc

SEQ ID NO: 21434 - DNA, 21 bp, synthetic construct
  source 1..21: mol_type = other DNA
caaaacgactttgtattcccc

SEQ ID NO: 21435 - DNA, 21 bp, synthetic construct
  source 1..21: mol_type = other DNA
tatgtcaaatcagactctcgt

SEQ ID NO: 21436 - DNA, 21 bp, synthetic construct
  source 1..21: mol_type = other DNA
tattcaaagatgaatgagaat

SEQ ID NO: 21437 - DNA, 21 bp, synthetic construct
  source 1..21: mol_type = other DNA
cgtacagagcacgtgttcccc

SEQ ID NO: 21438 - DNA, 21 bp, synthetic construct
  source 1..21: mol_type = other DNA
cttcatgcctcgggtcccaat

SEQ ID NO: 21439 - DNA, 21 bp, synthetic construct
  source 1..21: mol_type = other DNA
tttgagggacatgtcaggttt

SEQ ID NO: 21440 - DNA, 21 bp, synthetic construct
  source 1..21: mol_type = other DNA
gatatgtcatcgtctgtgtgg

SEQ ID NO: 21441 - DNA, 21 bp, synthetic construct
  source 1..21: mol_type = other DNA
gaactggcatcgagagagtgg

SEQ ID NO: 21442 - DNA, 21 bp, synthetic construct
  source 1..21: mol_type = other DNA
ttgagtaaggcctcgcacaat

SEQ ID NO: 21443 - DNA, 21 bp, synthetic construct
  source 1..21: mol_type = other DNA
agggatattgacgtttatccg

SEQ ID NO: 21444 - DNA, 21 bp, synthetic construct
  source 1..21: mol_type = other DNA
ttgcataagctgcatactaac

SEQ ID NO: 21445 - DNA, 21 bp, synthetic construct
  source 1..21: mol_type = other DNA
cgcgaagactccgtatactgg

SEQ ID NO: 21446 - DNA, 21 bp, synthetic construct
  source 1..21: mol_type = other DNA
agggagattgatgtttaccct

SEQ ID NO: 21447 - DNA, 21 bp, synthetic construct
  source 1..21: mol_type = other DNA
cttcataaacactcacagaat

SEQ ID NO: 21448 - DNA, 21 bp, synthetic construct
  source 1..21: mol_type = other DNA
ggggacgaatttgtacactgg

SEQ ID NO: 21449 - DNA, 21 bp, synthetic construct
  source 1..21: mol_type = other DNA
ttaactagggttgcaccgaat

SEQ ID NO: 21450 - DNA, 21 bp, synthetic construct
  source 1..21: mol_type = other DNA
ttttcaaagctgaatgtgaat

SEQ ID NO: 21451 - DNA, 21 bp, synthetic construct
  source 1..21: mol_type = other DNA
gtaatgtcgtcagcgaactgg

SEQ ID NO: 21452 - DNA, 21 bp, synthetic construct
  source 1..21: mol_type = other DNA
aggggagataacgtgttccca

SEQ ID NO: 21453 - DNA, 21 bp, synthetic construct
  source 1..21: mol_type = other DNA
gtaaattcaactaacggagta

SEQ ID NO: 21454 - DNA, 21 bp, synthetic construct
  source 1..21: mol_type = other DNA
tacgccaaatcgggagataac

SEQ ID NO: 21455 - DNA, 21 bp, synthetic construct
  source 1..21: mol_type = other DNA
gttgattcgacgaacggacga

SEQ ID NO: 21456 - DNA, 21 bp, synthetic construct
  source 1..21: mol_type = other DNA
ttacacgctagcggaccgaac

SEQ ID NO: 21457 - DNA, 21 bp, synthetic construct
  source 1..21: mol_type = other DNA
cgactcgaatcaacgctttgg

SEQ ID NO: 21458 - DNA, 21 bp, synthetic construct
  source 1..21: mol_type = other DNA
ctttttgacgggacggcagcc

SEQ ID NO: 21459 - DNA, 21 bp, synthetic construct
  source 1..21: mol_type = other DNA
ttgatgaatgatgcgtatccg

SEQ ID NO: 21460 - DNA, 21 bp, synthetic construct
  source 1..21: mol_type = other DNA
atgttcgatgggaccccagcg

SEQ ID NO: 21461 - DNA, 21 bp, synthetic construct
  source 1..21: mol_type = other DNA
gtgagtacccattgcagggct

SEQ ID NO: 21462 - DNA, 21 bp, synthetic construct
  source 1..21: mol_type = other DNA
tatagtaaggccggtgacaat

SEQ ID NO: 21463 - DNA, 21 bp, synthetic construct
  source 1..21: mol_type = other DNA
ctgagcaagctaaaccaaaac

SEQ ID NO: 21464 - DNA, 21 bp, synthetic construct
  source 1..21: mol_type = other DNA
tacttcagtggcattgtggaa

SEQ ID NO: 21465 - DNA, 21 bp, synthetic construct
  source 1..21: mol_type = other DNA
tatttctcggggattattgag

SEQ ID NO: 21466 - DNA, 21 bp, synthetic construct
  source 1..21: mol_type = other DNA
ctcacccgcctacacgctgac

SEQ ID NO: 21467 - DNA, 21 bp, synthetic construct
  source 1..21: mol_type = other DNA
tacgccaaatcaggctcgaat

SEQ ID NO: 21468 - DNA, 21 bp, synthetic construct
  source 1..21: mol_type = other DNA
gtcgagtcgaccaatggcaga

SEQ ID NO: 21469 - DNA, 21 bp, synthetic construct
  source 1..21: mol_type = other DNA
tggtggtcgggagtaaaggag

SEQ ID NO: 21470 - DNA, 21 bp, synthetic construct
  source 1..21: mol_type = other DNA
ccgatggcctcgtctacgtgg

SEQ ID NO: 21471 - DNA, 21 bp, synthetic construct
  source 1..21: mol_type = other DNA
ttgcaccgcctaggagaggac

SEQ ID NO: 21472 - DNA, 21 bp, synthetic construct
  source 1..21: mol_type = other DNA
tacagcaagatcggtcaaaat

SEQ ID NO: 21473 - DNA, 21 bp, synthetic construct
  source 1..21: mol_type = other DNA
tacctcaagtacgacccactg

SEQ ID NO: 21474 - DNA, 21 bp, synthetic construct
  source 1..21: mol_type = other DNA
attatgagcgcctccaattgg

SEQ ID NO: 21475 - DNA, 21 bp, synthetic construct
  source 1..21: mol_type = other DNA
tactctaagatagggcataat

SEQ ID NO: 21476 - DNA, 21 bp, synthetic construct
  source 1..21: mol_type = other DNA
tattttacgggcaaagtggcg

SEQ ID NO: 21477 - DNA, 21 bp, synthetic construct
  source 1..21: mol_type = other DNA
ttgtgcaaaccgtgtgagaca

SEQ ID NO: 21478 - DNA, 21 bp, synthetic construct
  source 1..21: mol_type = other DNA
tatagcaaaattggccacaac

SEQ ID NO: 21479 - DNA, 21 bp, synthetic construct
  source 1..21: mol_type = other DNA
gatatggcaagtgcgtcctgg

SEQ ID NO: 21480 - DNA, 21 bp, synthetic construct
  source 1..21: mol_type = other DNA
atgttgagcagtcaaacctgg

SEQ ID NO: 21481 - DNA, 21 bp, synthetic construct
  source 1..21: mol_type = other DNA
tccgagtctacaaatggtcgt

SEQ ID NO: 21482 - DNA, 21 bp, synthetic construct
  source 1..21: mol_type = other DNA
cgagaggatagtgtgcgttgg

SEQ ID NO: 21483 - DNA, 21 bp, synthetic construct
  source 1..21: mol_type = other DNA
atgtttgacggaaccgcggct

SEQ ID NO: 21484 - DNA, 21 bp, synthetic construct
  source 1..21: mol_type = other DNA
ctcagtaaattaagttacgac

SEQ ID NO: 21485 - DNA, 21 bp, synthetic construct
  source 1..21: mol_type = other DNA
ctgtgtaagccttgcctttcc

SEQ ID NO: 21486 - DNA, 21 bp, synthetic construct
  source 1..21: mol_type = other DNA
tatactagattagacccgctg

SEQ ID NO: 21487 - DNA, 21 bp, synthetic construct
  source 1..21: mol_type = other DNA
tattttaccgggaaggtcgag

SEQ ID NO: 21488 - DNA, 21 bp, synthetic construct
  source 1..21: mol_type = other DNA
tactcgaaactcgggattaac

SEQ ID NO: 21489 - DNA, 21 bp, synthetic construct
  source 1..21: mol_type = other DNA
ccgatggcttcctctaactgg

SEQ ID NO: 21490 - DNA, 21 bp, synthetic construct
  source 1..21: mol_type = other DNA
tatagtaaagttggaattaac

SEQ ID NO: 21491 - DNA, 21 bp, synthetic construct
  source 1..21: mol_type = other DNA
agaaccgtagatacctatcct

SEQ ID NO: 21492 - DNA, 21 bp, synthetic construct
  source 1..21: mol_type = other DNA
tatgtcaagtctcaaccgttt

SEQ ID NO: 21493 - DNA, 21 bp, synthetic construct
  source 1..21: mol_type = other DNA
tactcacgactattgccggac

SEQ ID NO: 21494 - DNA, 21 bp, synthetic construct
  source 1..21: mol_type = other DNA
gtgttaagtgaccgaatatgg

SEQ ID NO: 21495 - DNA, 21 bp, synthetic construct
  source 1..21: mol_type = other DNA
gtagctgagaaggggtgggat

SEQ ID NO: 21496 - DNA, 21 bp, synthetic construct
  source 1..21: mol_type = other DNA
ttgtgcaaaccctgttcaact

SEQ ID NO: 21497 - DNA, 21 bp, synthetic construct
  source 1..21: mol_type = other DNA
tatcataaagcccaaatgaat

SEQ ID NO: 21498 - DNA, 21 bp, synthetic construct
  source 1..21: mol_type = other DNA
tattttacaggtatccttgcg

SEQ ID NO: 21499 - DNA, 21 bp, synthetic construct
  source 1..21: mol_type = other DNA
cccatggattcctccagatgg

SEQ ID NO: 21500 - DNA, 21 bp, synthetic construct
  source 1..21: mol_type = other DNA
aggaaactggatgtctatccg

SEQ ID NO: 21501 - DNA, 21 bp, synthetic construct
  source 1..21: mol_type = other DNA
cgtactgacgacgtgtaccca

SEQ ID NO: 21502 - DNA, 21 bp, synthetic construct
  source 1..21: mol_type = other DNA
tacgcgaagcagggccctaat

SEQ ID NO: 21503 - DNA, 21 bp, synthetic construct
  source 1..21: mol_type = other DNA
ttacacaagcatagtcaaaat

SEQ ID NO: 21504 - DNA, 21 bp, synthetic construct
  source 1..21: mol_type = other DNA
tatagtaaggccaatttcaac

SEQ ID NO: 21505 - DNA, 21 bp, synthetic construct
  source 1..21: mol_type = other DNA
ggatcagaattcgtgagttat

SEQ ID NO: 21506 - DNA, 21 bp, synthetic construct
  source 1..21: mol_type = other DNA
tatcacgcagccggtccaaat

SEQ ID NO: 21507 - DNA, 21 bp, synthetic construct
  source 1..21: mol_type = other DNA
tatgcgaagacgggttttaac

SEQ ID NO: 21508 - DNA, 21 bp, synthetic construct
  source 1..21: mol_type = other DNA
tacgttaaatctcaagccggg

SEQ ID NO: 21509 - DNA, 21 bp, synthetic construct
  source 1..21: mol_type = other DNA
aggacgccgcaagtttatccg

SEQ ID NO: 21510 - DNA, 21 bp, synthetic construct
  source 1..21: mol_type = other DNA
tacagcaaggtcggatacaac

SEQ ID NO: 21511 - DNA, 21 bp, synthetic construct
  source 1..21: mol_type = other DNA
aaagatgatttttcaacctac

SEQ ID NO: 21512 - DNA, 21 bp, synthetic construct
  source 1..21: mol_type = other DNA
cgcggaccggacgtttaccca

SEQ ID NO: 21513 - DNA, 21 bp, synthetic construct
  source 1..21: mol_type = other DNA
tatttcacgggcgtggtggca

SEQ ID NO: 21514 - DNA, 21 bp, synthetic construct
  source 1..21: mol_type = other DNA
ttgtttagtggcgacggacct

SEQ ID NO: 21515 - DNA, 21 bp, synthetic construct
  source 1..21: mol_type = other DNA
attatgtcgtcctcaagctgg

SEQ ID NO: 21516 - DNA, 21 bp, synthetic construct
  source 1..21: mol_type = other DNA
gtattttctacgaacggtgtc

SEQ ID NO: 21517 - DNA, 21 bp, synthetic construct
  source 1..21: mol_type = other DNA
cgaactgagacagtctaccca

SEQ ID NO: 21518 - DNA, 21 bp, synthetic construct
  source 1..21: mol_type = other DNA
tactcaaaaaccggtcccaac

SEQ ID NO: 21519 - DNA, 21 bp, synthetic construct
  source 1..21: mol_type = other DNA
ttccacaaattgtcgaataac

SEQ ID NO: 21520 - DNA, 21 bp, synthetic construct
  source 1..21: mol_type = other DNA
ccgatggctagtgcgacatgg

SEQ ID NO: 21521 - DNA, 21 bp, synthetic construct
  source 1..21: mol_type = other DNA
ttggctaagaatggtccgaac

SEQ ID NO: 21522 - DNA, 21 bp, synthetic construct
  source 1..21: mol_type = other DNA
atcatggagagcagaaattgg

SEQ ID NO: 21523 - DNA, 21 bp, synthetic construct
  source 1..21: mol_type = other DNA
aggctcatggatgcttacccg

SEQ ID NO: 21524 - DNA, 21 bp, synthetic construct
  source 1..21: mol_type = other DNA
gtgagtagcaccaatggaatt

SEQ ID NO: 21525 - DNA, 21 bp, synthetic construct
  source 1..21: mol_type = other DNA
gatttacggtctagtacttgg

SEQ ID NO: 21526 - DNA, 21 bp, synthetic construct
  source 1..21: mol_type = other DNA
ttaattaacgacgcttaccca

SEQ ID NO: 21527 - DNA, 21 bp, synthetic construct
  source 1..21: mol_type = other DNA
cgggatgaattcacaagtttt

SEQ ID NO: 21528 - DNA, 21 bp, synthetic construct
  source 1..21: mol_type = other DNA
ctcgccaaaacagcacccaac

SEQ ID NO: 21529 - DNA, 21 bp, synthetic construct
  source 1..21: mol_type = other DNA
ctatgtgccccgtgcctcaca

SEQ ID NO: 21530 - DNA, 21 bp, synthetic construct
  source 1..21: mol_type = other DNA
ttctccaagctcaatatgaat

SEQ ID NO: 21531 - DNA, 21 bp, synthetic construct
  source 1..21: mol_type = other DNA
tttcacaagctcagtaacaat

SEQ ID NO: 21532 - DNA, 21 bp, synthetic construct
  source 1..21: mol_type = other DNA
tactcgaaagcgaatgataat

SEQ ID NO: 21533 - DNA, 21 bp, synthetic construct
  source 1..21: mol_type = other DNA
tattctaaaatagggatcaat

SEQ ID NO: 21534 - DNA, 21 bp, synthetic construct
  source 1..21: mol_type = other DNA
cccatggcgagtagcaattgg

SEQ ID NO: 21535 - DNA, 21 bp, synthetic construct
  source 1..21: mol_type = other DNA
ataacaagcactaatggtata

SEQ ID NO: 21536 - DNA, 21 bp, synthetic construct
  source 1..21: mol_type = other DNA
gtgatgcctgacgcatttccg

SEQ ID NO: 21537 - DNA, 21 bp, synthetic construct
  source 1..21: mol_type = other DNA
tatagcaaaatgaacgacaat

SEQ ID NO: 21538 - DNA, 21 bp, synthetic construct
  source 1..21: mol_type = other DNA
aacctcgccagcgcgtcttgg

SEQ ID NO: 21539 - DNA, 21 bp, synthetic construct
  source 1..21: mol_type = other DNA
tacgtgaaatcgcagcagtta

SEQ ID NO: 21540 - DNA, 21 bp, synthetic construct
  source 1..21: mol_type = other DNA
ctacataagttaaatcacgat

SEQ ID NO: 21541 - DNA, 21 bp, synthetic construct
  source 1..21: mol_type = other DNA
tactttacgggcattcatgaa

SEQ ID NO: 21542 - DNA, 21 bp, synthetic construct
  source 1..21: mol_type = other DNA
gtgagcgagttcgaaatatat

SEQ ID NO: 21543 - DNA, 21 bp, synthetic construct
  source 1..21: mol_type = other DNA
ttaacacgcttacatatagat

SEQ ID NO: 21544 - DNA, 21 bp, synthetic construct
  source 1..21: mol_type = other DNA
cgcgaggactttgtttcttgg

SEQ ID NO: 21545 - DNA, 21 bp, synthetic construct
  source 1..21: mol_type = other DNA
aaagacgagttttcgtcatgg

SEQ ID NO: 21546 - DNA, 21 bp, synthetic construct
  source 1..21: mol_type = other DNA
tatagtaaagcaggtactaat

SEQ ID NO: 21547 - DNA, 21 bp, synthetic construct
  source 1..21: mol_type = other DNA
cagcttgaagcacgcacatgg

SEQ ID NO: 21548 - DNA, 21 bp, synthetic construct
  source 1..21: mol_type = other DNA
tatgtcaagtccgatactcga

SEQ ID NO: 21549 - DNA, 21 bp, synthetic construct
  source 1..21: mol_type = other DNA
tattcgaaagctaacatcaat

SEQ ID NO: 21550 - DNA, 21 bp, synthetic construct
  source 1..21: mol_type = other DNA
atgagtcgtatcgggccaaat

SEQ ID NO: 21551 - DNA, 21 bp, synthetic construct
  source 1..21: mol_type = other DNA
gatttaagctcgcagacatgg

SEQ ID NO: 21552 - DNA, 21 bp, synthetic construct
  source 1..21: mol_type = other DNA
tacgccaagaccggtaacaac

SEQ ID NO: 21553 - DNA, 21 bp, synthetic construct
  source 1..21: mol_type = other DNA
gcacccggatcagtaaggtgg

SEQ ID NO: 21554 - DNA, 21 bp, synthetic construct
  source 1..21: mol_type = other DNA
tatcataaactcaacgacaat

SEQ ID NO: 21555 - DNA, 21 bp, synthetic construct
  source 1..21: mol_type = other DNA
tactcaaagttagccccaaat

SEQ ID NO: 21556 - DNA, 21 bp, synthetic construct
  source 1..21: mol_type = other DNA
gatttggcctcccgggaatgg

SEQ ID NO: 21557 - DNA, 21 bp, synthetic construct
  source 1..21: mol_type = other DNA
gaaatggctagtcatgggtgg

SEQ ID NO: 21558 - DNA, 21 bp, synthetic construct
  source 1..21: mol_type = other DNA
agaggtcccgatgtctatcct

SEQ ID NO: 21559 - DNA, 21 bp, synthetic construct
  source 1..21: mol_type = other DNA
aggaatgatgacgtttttcct

SEQ ID NO: 21560 - DNA, 21 bp, synthetic construct
  source 1..21: mol_type = other DNA
ctcagccgtgttagcgataac

SEQ ID NO: 21561 - DNA, 21 bp, synthetic construct
  source 1..21: mol_type = other DNA
gtgatgtcaaccaatggcgtc

SEQ ID NO: 21562 - DNA, 21 bp, synthetic construct
  source 1..21: mol_type = other DNA
taccacgcgaaaggattgaac

SEQ ID NO: 21563 - DNA, 21 bp, synthetic construct
  source 1..21: mol_type = other DNA
ttgtcaaaattgaatcaaaat

SEQ ID NO: 21564 - DNA, 21 bp, synthetic construct
  source 1..21: mol_type = other DNA
tacgcgaaaggtggacctaat

SEQ ID NO: 21565 - DNA, 21 bp, synthetic construct
  source 1..21: mol_type = other DNA
tacagtaagacggggactaat

SEQ ID NO: 21566 - DNA, 21 bp, synthetic construct
  source 1..21: mol_type = other DNA
tacgttaagagtgatcgatgt

SEQ ID NO: 21567 - DNA, 21 bp, synthetic construct
  source 1..21: mol_type = other DNA
ctcatgaatgacgcttaccct

SEQ ID NO: 21568 - DNA, 21 bp, synthetic construct
  source 1..21: mol_type = other DNA
ctttcgaagttgaacatgaat

SEQ ID NO: 21569 - DNA, 21 bp, synthetic construct
  source 1..21: mol_type = other DNA
tatagtaaattaaaccctaac

SEQ ID NO: 21570 - DNA, 21 bp, synthetic construct
  source 1..21: mol_type = other DNA
tacgttaaatcggatagcatg

SEQ ID NO: 21571 - DNA, 21 bp, synthetic construct
  source 1..21: mol_type = other DNA
agtatgagttctgcaatctgg

SEQ ID NO: 21572 - DNA, 21 bp, synthetic construct
  source 1..21: mol_type = other DNA
ttacgagatgggacttcggcc

SEQ ID NO: 21573 - DNA, 21 bp, synthetic construct
  source 1..21: mol_type = other DNA
atgcatcgccttttaccagat

SEQ ID NO: 21574 - DNA, 21 bp, synthetic construct
  source 1..21: mol_type = other DNA
cgcaccccacaggtgtaccca

SEQ ID NO: 21575 - DNA, 21 bp, synthetic construct
  source 1..21: mol_type = other DNA
atcatgagcagtaatatctgg

SEQ ID NO: 21576 - DNA, 21 bp, synthetic construct
  source 1..21: mol_type = other DNA
atattagagtcgagaacttgg

SEQ ID NO: 21577 - DNA, 21 bp, synthetic construct
  source 1..21: mol_type = other DNA
tatttcacgggaattttggcc

SEQ ID NO: 21578 - DNA, 21 bp, synthetic construct
  source 1..21: mol_type = other DNA
ttgaccagggtctcaccagat

SEQ ID NO: 21579 - DNA, 21 bp, synthetic construct
  source 1..21: mol_type = other DNA
tatgtaaagagccaaacgatg

SEQ ID NO: 21580 - DNA, 21 bp, synthetic construct
  source 1..21: mol_type = other DNA
tacttcacgggaaaattagaa

SEQ ID NO: 21581 - DNA, 21 bp, synthetic construct
  source 1..21: mol_type = other DNA
tattcggtgataggaccgaat

SEQ ID NO: 21582 - DNA, 21 bp, synthetic construct
  source 1..21: mol_type = other DNA
gaggcactccggggctgggac

SEQ ID NO: 21583 - DNA, 21 bp, synthetic construct
  source 1..21: mol_type = other DNA
cgactcacagacgcctatcca

SEQ ID NO: 21584 - DNA, 21 bp, synthetic construct
  source 1..21: mol_type = other DNA
ttatgcaagccgtgtctaggg

SEQ ID NO: 21585 - DNA, 21 bp, synthetic construct
  source 1..21: mol_type = other DNA
caaatggcaagcgtcaaatgg

SEQ ID NO: 21586 - DNA, 21 bp, synthetic construct
  source 1..21: mol_type = other DNA
tatgccaagagtggtgcaaat

SEQ ID NO: 21587 - DNA, 21 bp, synthetic construct
  source 1..21: mol_type = other DNA
tacagcaagattggtataaac

SEQ ID NO: 21588 - DNA, 21 bp, synthetic construct
  source 1..21: mol_type = other DNA
agaacgtcggacgtctttcca

SEQ ID NO: 21589 - DNA, 21 bp, synthetic construct
  source 1..21: mol_type = other DNA
tggtgcgaaggggtgatgacg

SEQ ID NO: 21590 - DNA, 21 bp, synthetic construct
  source 1..21: mol_type = other DNA
tatcacaagttagacaacaat

SEQ ID NO: 21591 - DNA, 21 bp, synthetic construct
  source 1..21: mol_type = other DNA
ttatcgaagttgaacccgaat

SEQ ID NO: 21592 - DNA, 21 bp, synthetic construct
  source 1..21: mol_type = other DNA
ttgtcgaagctaaatgaaaat

SEQ ID NO: 21593 - DNA, 21 bp, synthetic construct
  source 1..21: mol_type = other DNA
gttctttccagctccgcgtgg

SEQ ID NO: 21594 - DNA, 21 bp, synthetic construct
  source 1..21: mol_type = other DNA
ctcagcaaagtgggcaataat

SEQ ID NO: 21595 - DNA, 21 bp, synthetic construct
  source 1..21: mol_type = other DNA
ctccatagattgggtgataac

SEQ ID NO: 21596 - DNA, 21 bp, synthetic construct
  source 1..21: mol_type = other DNA
aattgtaaaccttgtttcgac

SEQ ID NO: 21597 - DNA, 21 bp, synthetic construct
  source 1..21: mol_type = other DNA
cgaaccccttctgtatacccc

SEQ ID NO: 21598 - DNA, 21 bp, synthetic construct
  source 1..21: mol_type = other DNA
ctatccaggatcggggagaac

SEQ ID NO: 21599 - DNA, 21 bp, synthetic construct
  source 1..21: mol_type = other DNA
ttagccaggacaggcatgaat

SEQ ID NO: 21600 - DNA, 21 bp, synthetic construct
  source 1..21: mol_type = other DNA
ctttcaaaactaaatacgaac

SEQ ID NO: 21601 - DNA, 21 bp, synthetic construct
  source 1..21: mol_type = other DNA
tactttacgggtacaattgaa

SEQ ID NO: 21602 - DNA, 21 bp, synthetic construct
  source 1..21: mol_type = other DNA
attatggcctcacaaacttgg

SEQ ID NO: 21603 - DNA, 21 bp, synthetic construct
  source 1..21: mol_type = other DNA
tatgcgaaactgggcccgaat

SEQ ID NO: 21604 - DNA, 21 bp, synthetic construct
  source 1..21: mol_type = other DNA
cttagtagggtaggtcctgac

SEQ ID NO: 21605 - DNA, 21 bp, synthetic construct
  source 1..21: mol_type = other DNA
tatttcaccgggattaaagat

SEQ ID NO: 21606 - DNA, 21 bp, synthetic construct
  source 1..21: mol_type = other DNA
ttgcacaaactgaaccatgac

SEQ ID NO: 21607 - DNA, 21 bp, synthetic construct
  source 1..21: mol_type = other DNA
tatttcaccggaaaattggag

SEQ ID NO: 21608 - DNA, 21 bp, synthetic construct
  source 1..21: mol_type = other DNA
tatcacaaactgaatcccatg

SEQ ID NO: 21609 - DNA, 21 bp, synthetic construct
  source 1..21: mol_type = other DNA
acccagtcgacgaatggggtg

SEQ ID NO: 21610 - DNA, 21 bp, synthetic construct
  source 1..21: mol_type = other DNA
ctgacgcgtgtgagtccggat

SEQ ID NO: 21611 - DNA, 21 bp, synthetic construct
  source 1..21: mol_type = other DNA
tacgtcaagtcagacaatggg

SEQ ID NO: 21612 - DNA, 21 bp, synthetic construct
  source 1..21: mol_type = other DNA
tacttcaccggtaaggttgcc

SEQ ID NO: 21613 - DNA, 21 bp, synthetic construct
  source 1..21: mol_type = other DNA
gacatggccagtaaaacatgg

SEQ ID NO: 21614 - DNA, 21 bp, synthetic construct
  source 1..21: mol_type = other DNA
tattccaaggtcggtataaat

SEQ ID NO: 21615 - DNA, 21 bp, synthetic construct
  source 1..21: mol_type = other DNA
tatgtcaagtcagatacccga

SEQ ID NO: 21616 - DNA, 21 bp, synthetic construct
  source 1..21: mol_type = other DNA
gtgttatcgacgaatggaatt

SEQ ID NO: 21617 - DNA, 21 bp, synthetic construct
  source 1..21: mol_type = other DNA
tacgttaagtctcaagttatg

SEQ ID NO: 21618 - DNA, 21 bp, synthetic construct
  source 1..21: mol_type = other DNA
tacttttcgggtattccttta

SEQ ID NO: 21619 - DNA, 21 bp, synthetic construct
  source 1..21: mol_type = other DNA
ttagcccgctcgggtcctgac

SEQ ID NO: 21620 - DNA, 21 bp, synthetic construct
  source 1..21: mol_type = other DNA
gatctcagtagctcaaagtgg

SEQ ID NO: 21621 - DNA, 21 bp, synthetic construct
  source 1..21: mol_type = other DNA
ttcagtaaattgaatgtcaac

SEQ ID NO: 21622 - DNA, 21 bp, synthetic construct
  source 1..21: mol_type = other DNA
aaaatgagcagttcagtttgg

SEQ ID NO: 21623 - DNA, 21 bp, synthetic construct
  source 1..21: mol_type = other DNA
ctctgcaagccgtgtataaca

SEQ ID NO: 21624 - DNA, 21 bp, synthetic construct
  source 1..21: mol_type = other DNA
cgcgcgctcgagggggcagat

SEQ ID NO: 21625 - DNA, 21 bp, synthetic construct
  source 1..21: mol_type = other DNA
cagatggcctctgttaagtgg

SEQ ID NO: 21626 - DNA, 21 bp, synthetic construct
  source 1..21: mol_type = other DNA
tacttttcaggggtgaaggag

SEQ ID NO: 21627 - DNA, 21 bp, synthetic construct
  source 1..21: mol_type = other DNA
aggactgaacacgtgtttcct

SEQ ID NO: 21628 - DNA, 21 bp, synthetic construct
  source 1..21: mol_type = other DNA
tacctaaagagccaaccttat

SEQ ID NO: 21629 - DNA, 21 bp, synthetic construct
  source 1..21: mol_type = other DNA
ttgtctagattgagctttgac

SEQ ID NO: 21630 - DNA, 21 bp, synthetic construct
  source 1..21: mol_type = other DNA
taccacaaattacaggtattt

SEQ ID NO: 21631 - DNA, 21 bp, synthetic construct
  source 1..21: mol_type = other DNA
tactcgaagctaaatcccaac

SEQ ID NO: 21632 - DNA, 21 bp, synthetic construct
  source 1..21: mol_type = other DNA
cgtgatgattttacgactttc

SEQ ID NO: 21633 - DNA, 21 bp, synthetic construct
  source 1..21: mol_type = other DNA
atcgagagtcgcgagggcata

SEQ ID NO: 21634 - DNA, 21 bp, synthetic construct
  source 1..21: mol_type = other DNA
aggttaatggatgtttaccct

SEQ ID NO: 21635 - DNA, 21 bp, synthetic construct
  source 1..21: mol_type = other DNA
agggaggactttactacatgg

SEQ ID NO: 21636 - DNA, 21 bp, synthetic construct
  source 1..21: mol_type = other DNA
aaggatgatttcgtttcttat

SEQ ID NO: 21637 - DNA, 21 bp, synthetic construct
  source 1..21: mol_type = other DNA
ttacaccgtctttccgtagtg

SEQ ID NO: 21638 - DNA, 21 bp, synthetic construct
  source 1..21: mol_type = other DNA
cgcgcgcttgaaggttatgac

SEQ ID NO: 21639 - DNA, 21 bp, synthetic construct
  source 1..21: mol_type = other DNA
agggatgaattcacgacatac

SEQ ID NO: 21640 - DNA, 21 bp, synthetic construct
  source 1..21: mol_type = other DNA
cggggagagacggtttatccc

SEQ ID NO: 21641 - DNA, 21 bp, synthetic construct
  source 1..21: mol_type = other DNA
agggaagatatggtccgctgg

SEQ ID NO: 21642 - DNA, 21 bp, synthetic construct
  source 1..21: mol_type = other DNA
gacatggggagccacaagtgg

SEQ ID NO: 21643 - DNA, 21 bp, synthetic construct
  source 1..21: mol_type = other DNA
tactcaaagcttaataccaac

SEQ ID NO: 21644 - DNA, 21 bp, synthetic construct
  source 1..21: mol_type = other DNA
tacattaagcatgatccaatg

SEQ ID NO: 21645 - DNA, 21 bp, synthetic construct
  source 1..21: mol_type = other DNA
tattctaaaattggccaaaat

SEQ ID NO: 21646 - DNA, 21 bp, synthetic construct
  source 1..21: mol_type = other DNA
tatgttaagagtcaaccatat

SEQ ID NO: 21647 - DNA, 21 bp, synthetic construct
  source 1..21: mol_type = other DNA
tatgtaaaaagccaggtcatg

SEQ ID NO: 21648 - DNA, 21 bp, synthetic construct
  source 1..21: mol_type = other DNA
tacagcaaatctggtccgaac

SEQ ID NO: 21649 - DNA, 21 bp, synthetic construct
  source 1..21: mol_type = other DNA
aggacaccaagcgtgtatccg

SEQ ID NO: 21650 - DNA, 21 bp, synthetic construct
  source 1..21: mol_type = other DNA
tttagcaagcttaatgccaac

SEQ ID NO: 21651 - DNA, 21 bp, synthetic construct
  source 1..21: mol_type = other DNA
gtcacttcaagtaacggagtc

SEQ ID NO: 21652 - DNA, 21 bp, synthetic construct
  source 1..21: mol_type = other DNA
gtccctgaattttgtcgaccg

SEQ ID NO: 21653 - DNA, 21 bp, synthetic construct
  source 1..21: mol_type = other DNA
ttgcacaggttaagcgcagat

SEQ ID NO: 21654 - DNA, 21 bp, synthetic construct
  source 1..21: mol_type = other DNA
tattccaaggtgggggtaaat

SEQ ID NO: 21655 - DNA, 21 bp, synthetic construct
  source 1..21: mol_type = other DNA
agggaagacactgtcaagtgg

SEQ ID NO: 21656 - DNA, 21 bp, synthetic construct
  source 1..21: mol_type = other DNA
gccccgggcagtgttcgttgg

SEQ ID NO: 21657 - DNA, 21 bp, synthetic construct
  source 1..21: mol_type = other DNA
ttttcaaagcttaaccagaac

SEQ ID NO: 21658 - DNA, 21 bp, synthetic construct
  source 1..21: mol_type = other DNA
tatagcaaaataggccaaaac

SEQ ID NO: 21659 - DNA, 21 bp, synthetic construct
  source 1..21: mol_type = other DNA
tacgtaaagtcggacgtggga

SEQ ID NO: 21660 - DNA, 21 bp, synthetic construct
  source 1..21: mol_type = other DNA
tatgccaaggggggtccaaac

SEQ ID NO: 21661 - DNA, 21 bp, synthetic construct
  source 1..21: mol_type = other DNA
ctgcactccaaattaccgaac

SEQ ID NO: 21662 - DNA, 21 bp, synthetic construct
  source 1..21: mol_type = other DNA
cgaatgatcgacgcgtaccct

SEQ ID NO: 21663 - DNA, 21 bp, synthetic construct
  source 1..21: mol_type = other DNA
tactcgaagctgcaagataat

SEQ ID NO: 21664 - DNA, 21 bp, synthetic construct
  source 1..21: mol_type = other DNA
cttcatcgcctctcgctcgac

SEQ ID NO: 21665 - DNA, 21 bp, synthetic construct
  source 1..21: mol_type = other DNA
aaagatgaattttcgggatat

SEQ ID NO: 21666 - DNA, 21 bp, synthetic construct
  source 1..21: mol_type = other DNA
aaatcggactttgtgagctgg

SEQ ID NO: 21667 - DNA, 21 bp, synthetic construct
  source 1..21: mol_type = other DNA
tacgtaaaaagccagcccttc

SEQ ID NO: 21668 - DNA, 21 bp, synthetic construct
  source 1..21: mol_type = other DNA
tacctaaagtcgcaaccattt

SEQ ID NO: 21669 - DNA, 21 bp, synthetic construct
  source 1..21: mol_type = other DNA
cgcgacatcgatgtgtacccc

SEQ ID NO: 21670 - DNA, 21 bp, synthetic construct
  source 1..21: mol_type = other DNA
cgtacaattgacgcttttccc

SEQ ID NO: 21671 - DNA, 21 bp, synthetic construct
  source 1..21: mol_type = other DNA
cgcacaggcgacgcctacccg

SEQ ID NO: 21672 - DNA, 21 bp, synthetic construct
  source 1..21: mol_type = other DNA
ttgagtaaagtagggcacaat

SEQ ID NO: 21673 - DNA, 21 bp, synthetic construct
  source 1..21: mol_type = other DNA
tattttactggtaagctcgag

SEQ ID NO: 21674 - DNA, 21 bp, synthetic construct
  source 1..21: mol_type = other DNA
tacgccaaaagcggattaaat

SEQ ID NO: 21675 - DNA, 21 bp, synthetic construct
  source 1..21: mol_type = other DNA
tattcgaaagtagggtataat

SEQ ID NO: 21676 - DNA, 21 bp, synthetic construct
  source 1..21: mol_type = other DNA
tatcataaactgaatgagaat

SEQ ID NO: 21677 - DNA, 21 bp, synthetic construct
  source 1..21: mol_type = other DNA
ctacatgcactcagccacaat

SEQ ID NO: 21678 - DNA, 21 bp, synthetic construct
  source 1..21: mol_type = other DNA
cttagcagggtgggcggcaac

SEQ ID NO: 21679 - DNA, 21 bp, synthetic construct
  source 1..21: mol_type = other DNA
ttgcatcgcttaggtgataac

SEQ ID NO: 21680 - DNA, 21 bp, synthetic construct
  source 1..21: mol_type = other DNA
cggatggaggtaagtacgtgg

SEQ ID NO: 21681 - DNA, 21 bp, synthetic construct
  source 1..21: mol_type = other DNA
tacgtgaagtcgagcaataac

SEQ ID NO: 21682 - DNA, 21 bp, synthetic construct
  source 1..21: mol_type = other DNA
tatgtgaaatccgatgtacgt

SEQ ID NO: 21683 - DNA, 21 bp, synthetic construct
  source 1..21: mol_type = other DNA
cggatgttggacgcctatccc

SEQ ID NO: 21684 - DNA, 21 bp, synthetic construct
  source 1..21: mol_type = other DNA
tactcaaagctagggatgaac

SEQ ID NO: 21685 - DNA, 21 bp, synthetic construct
  source 1..21: mol_type = other DNA
ctacaccgacttgggcaggac

SEQ ID NO: 21686 - DNA, 21 bp, synthetic construct
  source 1..21: mol_type = other DNA
ctggcacgtagcggccccgat

SEQ ID NO: 21687 - DNA, 21 bp, synthetic construct
  source 1..21: mol_type = other DNA
ttaagcaaagcatcggtaaac

SEQ ID NO: 21688 - DNA, 21 bp, synthetic construct
  source 1..21: mol_type = other DNA
cttcataggctatcggataac

SEQ ID NO: 21689 - DNA, 21 bp, synthetic construct
  source 1..21: mol_type = other DNA
gacatgtccgcgagcacgtgg

SEQ ID NO: 21690 - DNA, 21 bp, synthetic construct
  source 1..21: mol_type = other DNA
tacgtgaagagcgacagcagg

SEQ ID NO: 21691 - DNA, 21 bp, synthetic construct
  source 1..21: mol_type = other DNA
tacagtaaggtcggagagaac

SEQ ID NO: 21692 - DNA, 21 bp, synthetic construct
  source 1..21: mol_type = other DNA
ttgtcgcgtctaagtcccata

SEQ ID NO: 21693 - DNA, 21 bp, synthetic construct
  source 1..21: mol_type = other DNA
gtactttccagtacgacatgg

SEQ ID NO: 21694 - DNA, 21 bp, synthetic construct
  source 1..21: mol_type = other DNA
tacgtaaaatcgaataataat

SEQ ID NO: 21695 - DNA, 21 bp, synthetic construct
  source 1..21: mol_type = other DNA
gatttagcttcgtataaatgg

SEQ ID NO: 21696 - DNA, 21 bp, synthetic construct
  source 1..21: mol_type = other DNA
tatagtaaacataatattaat

SEQ ID NO: 21697 - DNA, 21 bp, synthetic construct
  source 1..21: mol_type = other DNA
tatgtcagaagcgacaaaggg

SEQ ID NO: 21698 - DNA, 21 bp, synthetic construct
  source 1..21: mol_type = other DNA
tatcataaattaaatccaccg

SEQ ID NO: 21699 - DNA, 21 bp, synthetic construct
  source 1..21: mol_type = other DNA
agggaagaagtttcgatttgg

SEQ ID NO: 21700 - DNA, 21 bp, synthetic construct
  source 1..21: mol_type = other DNA
ctgaaagatggtacctgttcg

SEQ ID NO: 21701 - DNA, 21 bp, synthetic construct
  source 1..21: mol_type = other DNA
gtcatggctagcagttcctgg

SEQ ID NO: 21702 - DNA, 21 bp, synthetic construct
  source 1..21: mol_type = other DNA
ttgcataaacttaacgaaaac

SEQ ID NO: 21703 - DNA, 21 bp, synthetic construct
  source 1..21: mol_type = other DNA
ttatgcaagccatgtctactc

SEQ ID NO: 21704 - DNA, 21 bp, synthetic construct
  source 1..21: mol_type = other DNA
taccacaagttaaacgagaac

SEQ ID NO: 21705 - DNA, 21 bp, synthetic construct
  source 1..21: mol_type = other DNA
ttgcaccgcttgagcacgccc

SEQ ID NO: 21706 - DNA, 21 bp, synthetic construct
  source 1..21: mol_type = other DNA
tactcaaagctccaaaaaaac

SEQ ID NO: 21707 - DNA, 21 bp, synthetic construct
  source 1..21: mol_type = other DNA
ttatctcggcttagtttcgac

SEQ ID NO: 21708 - DNA, 21 bp, synthetic construct
  source 1..21: mol_type = other DNA
gtattgagtagctctatgtgg

SEQ ID NO: 21709 - DNA, 21 bp, synthetic construct
  source 1..21: mol_type = other DNA
ttcagcaggatcgggcccgac

SEQ ID NO: 21710 - DNA, 21 bp, synthetic construct
  source 1..21: mol_type = other DNA
cgtggtcccgatgtcttcccc

SEQ ID NO: 21711 - DNA, 21 bp, synthetic construct
  source 1..21: mol_type = other DNA
taccacaagctgaatagtaat

SEQ ID NO: 21712 - DNA, 21 bp, synthetic construct
  source 1..21: mol_type = other DNA
aggaccccgcaggtgtttccg

SEQ ID NO: 21713 - DNA, 21 bp, synthetic construct
  source 1..21: mol_type = other DNA
gttggctcgacgaatggtgta

SEQ ID NO: 21714 - DNA, 21 bp, synthetic construct
  source 1..21: mol_type = other DNA
agaacgccgacagtttacccc

SEQ ID NO: 21715 - DNA, 21 bp, synthetic construct
  source 1..21: mol_type = other DNA
gttgattcgacgaatggtgtg

SEQ ID NO: 21716 - DNA, 21 bp, synthetic construct
  source 1..21: mol_type = other DNA
tactttacgggaacaaaggaa

SEQ ID NO: 21717 - DNA, 21 bp, synthetic construct
  source 1..21: mol_type = other DNA
aaatcagattttgtggtctat

SEQ ID NO: 21718 - DNA, 21 bp, synthetic construct
  source 1..21: mol_type = other DNA
ttaacgagaatttctcataat

SEQ ID NO: 21719 - DNA, 21 bp, synthetic construct
  source 1..21: mol_type = other DNA
ttacatgccaatctaccgaac

SEQ ID NO: 21720 - DNA, 21 bp, synthetic construct
  source 1..21: mol_type = other DNA
ttaaccagggtatcacccgac

SEQ ID NO: 21721 - DNA, 21 bp, synthetic construct
  source 1..21: mol_type = other DNA
gttatggaagctagagattgg

SEQ ID NO: 21722 - DNA, 21 bp, synthetic construct
  source 1..21: mol_type = other DNA
aagagcgacttcgtagtatac

SEQ ID NO: 21723 - DNA, 21 bp, synthetic construct
  source 1..21: mol_type = other DNA
aggtcggatttcgtcgtatat

SEQ ID NO: 21724 - DNA, 21 bp, synthetic construct
  source 1..21: mol_type = other DNA
gtgcaaagtacgaatgggatc

SEQ ID NO: 21725 - DNA, 21 bp, synthetic construct
  source 1..21: mol_type = other DNA
attcacaaattatccgctaat

SEQ ID NO: 21726 - DNA, 21 bp, synthetic construct
  source 1..21: mol_type = other DNA
ctagccaaaaacgggccaaac

SEQ ID NO: 21727 - DNA, 21 bp, synthetic construct
  source 1..21: mol_type = other DNA
ctccacaagttgcaaaccgat

SEQ ID NO: 21728 - DNA, 21 bp, synthetic construct
  source 1..21: mol_type = other DNA
tattttacgggtcacattgat

SEQ ID NO: 21729 - DNA, 21 bp, synthetic construct
  source 1..21: mol_type = other DNA
tatttcagcggcgtcaaagag

SEQ ID NO: 21730 - DNA, 21 bp, synthetic construct
  source 1..21: mol_type = other DNA
gtcgagagtacgaatggaatc

SEQ ID NO: 21731 - DNA, 21 bp, synthetic construct
  source 1..21: mol_type = other DNA
tgtaccaagccgtgctgtccg

SEQ ID NO: 21732 - DNA, 21 bp, synthetic construct
  source 1..21: mol_type = other DNA
cttcacaaaatgagcatgaat

SEQ ID NO: 21733 - DNA, 21 bp, synthetic construct
  source 1..21: mol_type = other DNA
agagaagacggcgttcgatgg

SEQ ID NO: 21734 - DNA, 21 bp, synthetic construct
  source 1..21: mol_type = other DNA
tatgtgaaaagcgaccatatg

SEQ ID NO: 21735 - DNA, 21 bp, synthetic construct
  source 1..21: mol_type = other DNA
gatatgggaagttcagtctgg

SEQ ID NO: 21736 - DNA, 21 bp, synthetic construct
  source 1..21: mol_type = other DNA
cgacttgaatcgagagagtgg

SEQ ID NO: 21737 - DNA, 21 bp, synthetic construct
  source 1..21: mol_type = other DNA
ctgcataagttgaaccctctt

SEQ ID NO: 21738 - DNA, 21 bp, synthetic construct
  source 1..21: mol_type = other DNA
tatgctaagactgggtataac

SEQ ID NO: 21739 - DNA, 21 bp, synthetic construct
  source 1..21: mol_type = other DNA
tatagcaaactggcgcccaat

SEQ ID NO: 21740 - DNA, 21 bp, synthetic construct
  source 1..21: mol_type = other DNA
tattcaaaaattggagaaaat

SEQ ID NO: 21741 - DNA, 21 bp, synthetic construct
  source 1..21: mol_type = other DNA
tatagtaaaatgaacttgaac

SEQ ID NO: 21742 - DNA, 21 bp, synthetic construct
  source 1..21: mol_type = other DNA
tatgcgaagactggggctaat

SEQ ID NO: 21743 - DNA, 21 bp, synthetic construct
  source 1..21: mol_type = other DNA
tactctaaagtgggtttaaac

SEQ ID NO: 21744 - DNA, 21 bp, synthetic construct
  source 1..21: mol_type = other DNA
cgagacgagttcatagcatgg

SEQ ID NO: 21745 - DNA, 21 bp, synthetic construct
  source 1..21: mol_type = other DNA
ttggcgagaactggagaaaat

SEQ ID NO: 21746 - DNA, 21 bp, synthetic construct
  source 1..21: mol_type = other DNA
tattcaaaattaagtatgaac

SEQ ID NO: 21747 - DNA, 21 bp, synthetic construct
  source 1..21: mol_type = other DNA
ctgtccaaggtaggggtgaac

SEQ ID NO: 21748 - DNA, 21 bp, synthetic construct
  source 1..21: mol_type = other DNA
tactccaagcaaggacctaat

SEQ ID NO: 21749 - DNA, 21 bp, synthetic construct
  source 1..21: mol_type = other DNA
tatataaaacacgacccgatg

SEQ ID NO: 21750 - DNA, 21 bp, synthetic construct
  source 1..21: mol_type = other DNA
ttgactaggcttagcgtagat

SEQ ID NO: 21751 - DNA, 21 bp, synthetic construct
  source 1..21: mol_type = other DNA
cgcgacgactttactacttgg

SEQ ID NO: 21752 - DNA, 21 bp, synthetic construct
  source 1..21: mol_type = other DNA
acggatagtaccaatggggtg

SEQ ID NO: 21753 - DNA, 21 bp, synthetic construct
  source 1..21: mol_type = other DNA
cctatggcttctcagcaatgg

SEQ ID NO: 21754 - DNA, 21 bp, synthetic construct
  source 1..21: mol_type = other DNA
aggaatctggatgtctttccc

SEQ ID NO: 21755 - DNA, 21 bp, synthetic construct
  source 1..21: mol_type = other DNA
ctccacaggctgggcgacaat

SEQ ID NO: 21756 - DNA, 21 bp, synthetic construct
  source 1..21: mol_type = other DNA
tacagtaaagtcgggagcaac

SEQ ID NO: 21757 - DNA, 21 bp, synthetic construct
  source 1..21: mol_type = other DNA
cgaggcccggaggtgtacccc

SEQ ID NO: 21758 - DNA, 21 bp, synthetic construct
  source 1..21: mol_type = other DNA
tatgtcaaatcccagcctggc

SEQ ID NO: 21759 - DNA, 21 bp, synthetic construct
  source 1..21: mol_type = other DNA
ttaagtcgggtagggattgac

SEQ ID NO: 21760 - DNA, 21 bp, synthetic construct
  source 1..21: mol_type = other DNA
gtaatgtccacaaatggggtc

SEQ ID NO: 21761 - DNA, 21 bp, synthetic construct
  source 1..21: mol_type = other DNA
ttgcacaggttgggctacgac

SEQ ID NO: 21762 - DNA, 21 bp, synthetic construct
  source 1..21: mol_type = other DNA
gatttagagagccggaagtgg

SEQ ID NO: 21763 - DNA, 21 bp, synthetic construct
  source 1..21: mol_type = other DNA
tactttacagggcaagttgag

SEQ ID NO: 21764 - DNA, 21 bp, synthetic construct
  source 1..21: mol_type = other DNA
ctcagtaaggtgggtcagaat

SEQ ID NO: 21765 - DNA, 21 bp, synthetic construct
  source 1..21: mol_type = other DNA
tatgttaagagtgatgttggt

SEQ ID NO: 21766 - DNA, 21 bp, synthetic construct
  source 1..21: mol_type = other DNA
agaggtccagatgtctatcct

SEQ ID NO: 21767 - DNA, 21 bp, synthetic construct
  source 1..21: mol_type = other DNA
gttttaagctctaacatctgg

SEQ ID NO: 21768 - DNA, 21 bp, synthetic construct
  source 1..21: mol_type = other DNA
tattccaaggctggttgtaac

SEQ ID NO: 21769 - DNA, 21 bp, synthetic construct
  source 1..21: mol_type = other DNA
gacctagctagtagagagtgg

SEQ ID NO: 21770 - DNA, 21 bp, synthetic construct
  source 1..21: mol_type = other DNA
tatagtaaactaggaagcaat

SEQ ID NO: 21771 - DNA, 21 bp, synthetic construct
  source 1..21: mol_type = other DNA
ctccatagattgggcgaagat

SEQ ID NO: 21772 - DNA, 21 bp, synthetic construct
  source 1..21: mol_type = other DNA
tatagcaagctcaatttgaac

SEQ ID NO: 21773 - DNA, 21 bp, synthetic construct
  source 1..21: mol_type = other DNA
tattttaccgggaagaaggag

SEQ ID NO: 21774 - DNA, 21 bp, synthetic construct
  source 1..21: mol_type = other DNA
gtgtcagactttaagatctac

SEQ ID NO: 21775 - DNA, 21 bp, synthetic construct
  source 1..21: mol_type = other DNA
acctcgtcaactaatggcgtc

SEQ ID NO: 21776 - DNA, 21 bp, synthetic construct
  source 1..21: mol_type = other DNA
aaaagcgaatttacaacttat

SEQ ID NO: 21777 - DNA, 21 bp, synthetic construct
  source 1..21: mol_type = other DNA
taccacaaactcaatcccatg

SEQ ID NO: 21778 - DNA, 21 bp, synthetic construct
  source 1..21: mol_type = other DNA
ttgcacaggttgagtttagat

SEQ ID NO: 21779 - DNA, 21 bp, synthetic construct
  source 1..21: mol_type = other DNA
ttattcgatgggactgcgagc

SEQ ID NO: 21780 - DNA, 21 bp, synthetic construct
  source 1..21: mol_type = other DNA
tattcgaaaatgggacctaac

SEQ ID NO: 21781 - DNA, 21 bp, synthetic construct
  source 1..21: mol_type = other DNA
tatgtcaagagtcaacaacta

SEQ ID NO: 21782 - DNA, 21 bp, synthetic construct
  source 1..21: mol_type = other DNA
gtcatgagcagcgccaattgg

SEQ ID NO: 21783 - DNA, 21 bp, synthetic construct
  source 1..21: mol_type = other DNA
atacttgcctcggcaacttgg

SEQ ID NO: 21784 - DNA, 21 bp, synthetic construct
  source 1..21: mol_type = other DNA
ttgagcagggtaggggcggat

SEQ ID NO: 21785 - DNA, 21 bp, synthetic construct
  source 1..21: mol_type = other DNA
ctgtgtaaaccgtgtcttact

SEQ ID NO: 21786 - DNA, 21 bp, synthetic construct
  source 1..21: mol_type = other DNA
tatagcaagaatggtcccaat

SEQ ID NO: 21787 - DNA, 21 bp, synthetic construct
  source 1..21: mol_type = other DNA
ctgtcccgattgagtcacgat

SEQ ID NO: 21788 - DNA, 21 bp, synthetic construct
  source 1..21: mol_type = other DNA
gttttaagttcaagccaatgg

SEQ ID NO: 21789 - DNA, 21 bp, synthetic construct
  source 1..21: mol_type = other DNA
tatttcaccggtgttatacaa

SEQ ID NO: 21790 - DNA, 21 bp, synthetic construct
  source 1..21: mol_type = other DNA
tattttactggaatacgggag

SEQ ID NO: 21791 - DNA, 21 bp, synthetic construct
  source 1..21: mol_type = other DNA
taccataagctcaataataat

SEQ ID NO: 21792 - DNA, 21 bp, synthetic construct
  source 1..21: mol_type = other DNA
ctgcacaagatgagcatgaac

SEQ ID NO: 21793 - DNA, 21 bp, synthetic construct
  source 1..21: mol_type = other DNA
ttgcacagattactaaaggac

SEQ ID NO: 21794 - DNA, 21 bp, synthetic construct
  source 1..21: mol_type = other DNA
ctacacaaaaatacagaaaat

SEQ ID NO: 21795 - DNA, 21 bp, synthetic construct
  source 1..21: mol_type = other DNA
ccgtgtggaccctgtacatat

SEQ ID NO: 21796 - DNA, 21 bp, synthetic construct
  source 1..21: mol_type = other DNA
tactccaagctaaatgccaat

SEQ ID NO: 21797 - DNA, 21 bp, synthetic construct
  source 1..21: mol_type = other DNA
tgtaaggacccctgctgtggt

SEQ ID NO: 21798 - DNA, 21 bp, synthetic construct
  source 1..21: mol_type = other DNA
aaaatggactccgtacggtgg

SEQ ID NO: 21799 - DNA, 21 bp, synthetic construct
  source 1..21: mol_type = other DNA
aggacagatgatgtctatcct

SEQ ID NO: 21800 - DNA, 21 bp, synthetic construct
  source 1..21: mol_type = other DNA
tactttagcggaattactgcg

SEQ ID NO: 21801 - DNA, 21 bp, synthetic construct
  source 1..21: mol_type = other DNA
tattcgaaaataggacagaac

SEQ ID NO: 21802 - DNA, 21 bp, synthetic construct
  source 1..21: mol_type = other DNA
ttatcgaagttgaacagcaac

SEQ ID NO: 21803 - DNA, 21 bp, synthetic construct
  source 1..21: mol_type = other DNA
tacctgaaaagtcaaggcaac

SEQ ID NO: 21804 - DNA, 21 bp, synthetic construct
  source 1..21: mol_type = other DNA
tatgttaaaagcgatcatcat

SEQ ID NO: 21805 - DNA, 21 bp, synthetic construct
  source 1..21: mol_type = other DNA
tatagcaaaattggtcataac

SEQ ID NO: 21806 - DNA, 21 bp, synthetic construct
  source 1..21: mol_type = other DNA
tatgtaaaaagtcaagcaggc

SEQ ID NO: 21807 - DNA, 21 bp, synthetic construct
  source 1..21: mol_type = other DNA
ctctcaaaaataggaccgaac

SEQ ID NO: 21808 - DNA, 21 bp, synthetic construct
  source 1..21: mol_type = other DNA
gatttgagttcttcacagtgg

SEQ ID NO: 21809 - DNA, 21 bp, synthetic construct
  source 1..21: mol_type = other DNA
ttaacgaggttaagtcataat

SEQ ID NO: 21810 - DNA, 21 bp, synthetic construct
  source 1..21: mol_type = other DNA
gacatgtccagccacaaatgg

SEQ ID NO: 21811 - DNA, 21 bp, synthetic construct
  source 1..21: mol_type = other DNA
ctatcgagagttggctatgac

SEQ ID NO: 21812 - DNA, 21 bp, synthetic construct
  source 1..21: mol_type = other DNA
aacgcactcaggggctgggac

SEQ ID NO: 21813 - DNA, 21 bp, synthetic construct
  source 1..21: mol_type = other DNA
gagttagctagtcgtgaatgg

SEQ ID NO: 21814 - DNA, 21 bp, synthetic construct
  source 1..21: mol_type = other DNA
agacttatggatgcttatcca

SEQ ID NO: 21815 - DNA, 21 bp, synthetic construct
  source 1..21: mol_type = other DNA
gttatggaaagcaggaaatgg

SEQ ID NO: 21816 - DNA, 21 bp, synthetic construct
  source 1..21: mol_type = other DNA
tattccaagctcaattataat

SEQ ID NO: 21817 - DNA, 21 bp, synthetic construct
  source 1..21: mol_type = other DNA
tttgccaaatcgggacccaac

SEQ ID NO: 21818 - DNA, 21 bp, synthetic construct
  source 1..21: mol_type = other DNA
ctgcatcgcctttcgctagac

SEQ ID NO: 21819 - DNA, 21 bp, synthetic construct
  source 1..21: mol_type = other DNA
ggtgatgaataccatagttac

SEQ ID NO: 21820 - DNA, 21 bp, synthetic construct
  source 1..21: mol_type = other DNA
ctgacgagactgcacatcgac

SEQ ID NO: 21821 - DNA, 21 bp, synthetic construct
  source 1..21: mol_type = other DNA
tacagcaagcttaacataaat

SEQ ID NO: 21822 - DNA, 21 bp, synthetic construct
  source 1..21: mol_type = other DNA
agagatgagacggtctaccct

SEQ ID NO: 21823 - DNA, 21 bp, synthetic construct
  source 1..21: mol_type = other DNA
cgaactgatacggtctaccct

SEQ ID NO: 21824 - DNA, 21 bp, synthetic construct
  source 1..21: mol_type = other DNA
agagacgagtttacgtcgttc

SEQ ID NO: 21825 - DNA, 21 bp, synthetic construct
  source 1..21: mol_type = other DNA
ttcagtaagttaaattacaac

SEQ ID NO: 21826 - DNA, 21 bp, synthetic construct
  source 1..21: mol_type = other DNA
tatagtaaagcgggggtaaat

SEQ ID NO: 21827 - DNA, 21 bp, synthetic construct
  source 1..21: mol_type = other DNA
attgctactaggggaataggg

SEQ ID NO: 21828 - DNA, 21 bp, synthetic construct
  source 1..21: mol_type = other DNA
cacgagagcacgaacggggtt

SEQ ID NO: 21829 - DNA, 21 bp, synthetic construct
  source 1..21: mol_type = other DNA
ttgcaccggctaggagacaat

SEQ ID NO: 21830 - DNA, 21 bp, synthetic construct
  source 1..21: mol_type = other DNA
aaggatgaattcaaatcgtgg

SEQ ID NO: 21831 - DNA, 21 bp, synthetic construct
  source 1..21: mol_type = other DNA
tactccaagttgggcctaaac

SEQ ID NO: 21832 - DNA, 21 bp, synthetic construct
  source 1..21: mol_type = other DNA
ctccacaggttaacgacggac

SEQ ID NO: 21833 - DNA, 21 bp, synthetic construct
  source 1..21: mol_type = other DNA
ctctcgagattgtcaagtgac

SEQ ID NO: 21834 - DNA, 21 bp, synthetic construct
  source 1..21: mol_type = other DNA
taccacaaactgaatcccttg

SEQ ID NO: 21835 - DNA, 21 bp, synthetic construct
  source 1..21: mol_type = other DNA
cgcacaccacaagtctttccg

SEQ ID NO: 21836 - DNA, 21 bp, synthetic construct
  source 1..21: mol_type = other DNA
aggggggacgatgtgtacccg

SEQ ID NO: 21837 - DNA, 21 bp, synthetic construct
  source 1..21: mol_type = other DNA
ttagcaaaaacaggccacaat

SEQ ID NO: 21838 - DNA, 21 bp, synthetic construct
  source 1..21: mol_type = other DNA
gtggagtcattcaatggtagg

SEQ ID NO: 21839 - DNA, 21 bp, synthetic construct
  source 1..21: mol_type = other DNA
ttgtcccgcacgtcggtgaat

SEQ ID NO: 21840 - DNA, 21 bp, synthetic construct
  source 1..21: mol_type = other DNA
ataacgtcaacaaacggaata

SEQ ID NO: 21841 - DNA, 21 bp, synthetic construct
  source 1..21: mol_type = other DNA
cgcggagacgatgtctttcct

SEQ ID NO: 21842 - DNA, 21 bp, synthetic construct
  source 1..21: mol_type = other DNA
tacagtaagttgaatgagatg

SEQ ID NO: 21843 - DNA, 21 bp, synthetic construct
  source 1..21: mol_type = other DNA
ctgagccgtttgtcaccgaat

SEQ ID NO: 21844 - DNA, 21 bp, synthetic construct
  source 1..21: mol_type = other DNA
gagatggacagtagaatgtgg

SEQ ID NO: 21845 - DNA, 21 bp, synthetic construct
  source 1..21: mol_type = other DNA
gtaatggagtcaagagactgg

SEQ ID NO: 21846 - DNA, 21 bp, synthetic construct
  source 1..21: mol_type = other DNA
cggggcgataacgtgtttcca

SEQ ID NO: 21847 - DNA, 21 bp, synthetic construct
  source 1..21: mol_type = other DNA
agagatgaaacatcccattgg

SEQ ID NO: 21848 - DNA, 21 bp, synthetic construct
  source 1..21: mol_type = other DNA
ataatgtctgcgagtaactgg

SEQ ID NO: 21849 - DNA, 21 bp, synthetic construct
  source 1..21: mol_type = other DNA
atgcacagattgctcccggat

SEQ ID NO: 21850 - DNA, 21 bp, synthetic construct
  source 1..21: mol_type = other DNA
ttacataggctctcccctcct

SEQ ID NO: 21851 - DNA, 21 bp, synthetic construct
  source 1..21: mol_type = other DNA
cccctcgatagtaggtcctgg

SEQ ID NO: 21852 - DNA, 21 bp, synthetic construct
  source 1..21: mol_type = other DNA
ataatggccagcgctaattgg

SEQ ID NO: 21853 - DNA, 21 bp, synthetic construct
  source 1..21: mol_type = other DNA
agagacgatttcacgatgtat

SEQ ID NO: 21854 - DNA, 21 bp, synthetic construct
  source 1..21: mol_type = other DNA
atccatagactgctctcagat

SEQ ID NO: 21855 - DNA, 21 bp, synthetic construct
  source 1..21: mol_type = other DNA
ctcacgcgtgtggccccaaac

SEQ ID NO: 21856 - DNA, 21 bp, synthetic construct
  source 1..21: mol_type = other DNA
ttgcaccggttgatggaagac

SEQ ID NO: 21857 - DNA, 21 bp, synthetic construct
  source 1..21: mol_type = other DNA
gtaagttccactaatggagta

SEQ ID NO: 21858 - DNA, 21 bp, synthetic construct
  source 1..21: mol_type = other DNA
ttgcacaaaaagggggagaat

SEQ ID NO: 21859 - DNA, 21 bp, synthetic construct
  source 1..21: mol_type = other DNA
cgcggggagtcagtttacccc

SEQ ID NO: 21860 - DNA, 21 bp, synthetic construct
  source 1..21: mol_type = other DNA
tactcaaaacttaacggcaac

SEQ ID NO: 21861 - DNA, 21 bp, synthetic construct
  source 1..21: mol_type = other DNA
acttcagagaacgtctacttc

SEQ ID NO: 21862 - DNA, 21 bp, synthetic construct
  source 1..21: mol_type = other DNA
tacttcacaggatttatggac

SEQ ID NO: 21863 - DNA, 21 bp, synthetic construct
  source 1..21: mol_type = other DNA
tacgtaaaatcacaaatgatg

SEQ ID NO: 21864 - DNA, 21 bp, synthetic construct
  source 1..21: mol_type = other DNA
cctatggaaagcgttaagtgg

SEQ ID NO: 21865 - DNA, 21 bp, synthetic construct
  source 1..21: mol_type = other DNA
tattttgcgggtataaaagag

SEQ ID NO: 21866 - DNA, 21 bp, synthetic construct
  source 1..21: mol_type = other DNA
agaggcgaaacagtataccct

SEQ ID NO: 21867 - DNA, 21 bp, synthetic construct
  source 1..21: mol_type = other DNA
tatgcaaaatcgggcgagaac

SEQ ID NO: 21868 - DNA, 21 bp, synthetic construct
  source 1..21: mol_type = other DNA
acaagttctaccaacggtgta

SEQ ID NO: 21869 - DNA, 21 bp, synthetic construct
  source 1..21: mol_type = other DNA
tatgcaaagacggggatgaat

SEQ ID NO: 21870 - DNA, 21 bp, synthetic construct
  source 1..21: mol_type = other DNA
gtgatggaaagcagtaaatgg

SEQ ID NO: 21871 - DNA, 21 bp, synthetic construct
  source 1..21: mol_type = other DNA
tactttacgggcattcatgca

SEQ ID NO: 21872 - DNA, 21 bp, synthetic construct
  source 1..21: mol_type = other DNA
ctttctagagtgtctgacaat

SEQ ID NO: 21873 - DNA, 21 bp, synthetic construct
  source 1..21: mol_type = other DNA
tacgcaaaaaacggaccgaat

SEQ ID NO: 21874 - DNA, 21 bp, synthetic construct
  source 1..21: mol_type = other DNA
ttacaccgtttgagcgacccc

SEQ ID NO: 21875 - DNA, 21 bp, synthetic construct
  source 1..21: mol_type = other DNA
gatctttcatcacagaagtgg

SEQ ID NO: 21876 - DNA, 21 bp, synthetic construct
  source 1..21: mol_type = other DNA
cgaacggacacggtttaccct

SEQ ID NO: 21877 - DNA, 21 bp, synthetic construct
  source 1..21: mol_type = other DNA
tatcataaactcaataataac

SEQ ID NO: 21878 - DNA, 21 bp, synthetic construct
  source 1..21: mol_type = other DNA
tactcaaaattgaatggtaac

SEQ ID NO: 21879 - DNA, 21 bp, synthetic construct
  source 1..21: mol_type = other DNA
tactcgaaagtaggagacaac

SEQ ID NO: 21880 - DNA, 21 bp, synthetic construct
  source 1..21: mol_type = other DNA
ttaactaggttgcatacggat

SEQ ID NO: 21881 - DNA, 21 bp, synthetic construct
  source 1..21: mol_type = other DNA
atgagagacggtacgccagcc

SEQ ID NO: 21882 - DNA, 21 bp, synthetic construct
  source 1..21: mol_type = other DNA
cgcgaggatggtgtccggtgg

SEQ ID NO: 21883 - DNA, 21 bp, synthetic construct
  source 1..21: mol_type = other DNA
cgaaagttagacgtatacccc

SEQ ID NO: 21884 - DNA, 21 bp, synthetic construct
  source 1..21: mol_type = other DNA
agactagagtctgcagtatgg

SEQ ID NO: 21885 - DNA, 21 bp, synthetic construct
  source 1..21: mol_type = other DNA
cttcgcgacgggacgcctgct

SEQ ID NO: 21886 - DNA, 21 bp, synthetic construct
  source 1..21: mol_type = other DNA
tacgtgaaatcccaaccgact

SEQ ID NO: 21887 - DNA, 21 bp, synthetic construct
  source 1..21: mol_type = other DNA
actaacagtacgaatggcgtt

SEQ ID NO: 21888 - DNA, 21 bp, synthetic construct
  source 1..21: mol_type = other DNA
cggagccttgatgtctaccct

SEQ ID NO: 21889 - DNA, 21 bp, synthetic construct
  source 1..21: mol_type = other DNA
ttaagtcgagttggccacgac

SEQ ID NO: 21890 - DNA, 21 bp, synthetic construct
  source 1..21: mol_type = other DNA
tatttcactggtgtggtcgga

SEQ ID NO: 21891 - DNA, 21 bp, synthetic construct
  source 1..21: mol_type = other DNA
cgggacgaatttacggcttgg

SEQ ID NO: 21892 - DNA, 21 bp, synthetic construct
  source 1..21: mol_type = other DNA
tctgagtctactaatggtcgg

SEQ ID NO: 21893 - DNA, 21 bp, synthetic construct
  source 1..21: mol_type = other DNA
taccacaaaaagcaggagaat

SEQ ID NO: 21894 - DNA, 21 bp, synthetic construct
  source 1..21: mol_type = other DNA
cgaggtccagaaatatatccc

SEQ ID NO: 21895 - DNA, 21 bp, synthetic construct
  source 1..21: mol_type = other DNA
gacttaacgagcgctaagtgg

SEQ ID NO: 21896 - DNA, 21 bp, synthetic construct
  source 1..21: mol_type = other DNA
cccgaaagtacgaacgggaga

SEQ ID NO: 21897 - DNA, 21 bp, synthetic construct
  source 1..21: mol_type = other DNA
ctatgtaaaccttgcaataca

SEQ ID NO: 21898 - DNA, 21 bp, synthetic construct
  source 1..21: mol_type = other DNA
gtcgcggaaaaaggatgggac

SEQ ID NO: 21899 - DNA, 21 bp, synthetic construct
  source 1..21: mol_type = other DNA
gtcgacagtactaatggaaga

SEQ ID NO: 21900 - DNA, 21 bp, synthetic construct
  source 1..21: mol_type = other DNA
cgcgaggatggagtctcttgg

SEQ ID NO: 21901 - DNA, 21 bp, synthetic construct
  source 1..21: mol_type = other DNA
cgtactcccgtggtgtatccg

SEQ ID NO: 21902 - DNA, 21 bp, synthetic construct
  source 1..21: mol_type = other DNA
tacttcagtggtgtaaaagcg

SEQ ID NO: 21903 - DNA, 21 bp, synthetic construct
  source 1..21: mol_type = other DNA
tacgtcaagagtgatatgcgc

SEQ ID NO: 21904 - DNA, 21 bp, synthetic construct
  source 1..21: mol_type = other DNA
tactttactgggataatggag

SEQ ID NO: 21905 - DNA, 21 bp, synthetic construct
  source 1..21: mol_type = other DNA
tacgcgaaaatgggaccaaac

SEQ ID NO: 21906 - DNA, 21 bp, synthetic construct
  source 1..21: mol_type = other DNA
gttttcagcaccaacggcatc

SEQ ID NO: 21907 - DNA, 21 bp, synthetic construct
  source 1..21: mol_type = other DNA
gagatggcaagcatcaaatgg

SEQ ID NO: 21908 - DNA, 21 bp, synthetic construct
  source 1..21: mol_type = other DNA
atgttcgacggaacatccgct

SEQ ID NO: 21909 - DNA, 21 bp, synthetic construct
  source 1..21: mol_type = other DNA
ggttcagaattttcgacgtgg

SEQ ID NO: 21910 - DNA, 21 bp, synthetic construct
  source 1..21: mol_type = other DNA
tactccaaactctcgatgaac

SEQ ID NO: 21911 - DNA, 21 bp, synthetic construct
  source 1..21: mol_type = other DNA
cttgcaagacaatcatacaac

SEQ ID NO: 21912 - DNA, 21 bp, synthetic construct
  source 1..21: mol_type = other DNA
ctctctcggttatcaccagat

SEQ ID NO: 21913 - DNA, 21 bp, synthetic construct
  source 1..21: mol_type = other DNA
taccatgccgctggccccaac

SEQ ID NO: 21914 - DNA, 21 bp, synthetic construct
  source 1..21: mol_type = other DNA
gacctcaggagtgcgaactgg

SEQ ID NO: 21915 - DNA, 21 bp, synthetic construct
  source 1..21: mol_type = other DNA
tacgtaaagtctgactcgcac

SEQ ID NO: 21916 - DNA, 21 bp, synthetic construct
  source 1..21: mol_type = other DNA
ttagcgaaaacggctccgaac

SEQ ID NO: 21917 - DNA, 21 bp, synthetic construct
  source 1..21: mol_type = other DNA
gcaggcggcgggttgtatgta

SEQ ID NO: 21918 - DNA, 21 bp, synthetic construct
  source 1..21: mol_type = other DNA
tattctaaggccggctctaat

SEQ ID NO: 21919 - DNA, 21 bp, synthetic construct
  source 1..21: mol_type = other DNA
aggttgacggatgcttacccc

SEQ ID NO: 21920 - DNA, 21 bp, synthetic construct
  source 1..21: mol_type = other DNA
tatttcactggtcagaaagaa

SEQ ID NO: 21921 - DNA, 21 bp, synthetic construct
  source 1..21: mol_type = other DNA
gacatgcagagcagcacatgg

SEQ ID NO: 21922 - DNA, 21 bp, synthetic construct
  source 1..21: mol_type = other DNA
ttatcgcgtattagtttcaat

SEQ ID NO: 21923 - DNA, 21 bp, synthetic construct
  source 1..21: mol_type = other DNA
tatagcaagctcaacgggaat

SEQ ID NO: 21924 - DNA, 21 bp, synthetic construct
  source 1..21: mol_type = other DNA
ctttcaagagtgggaatagat

SEQ ID NO: 21925 - DNA, 21 bp, synthetic construct
  source 1..21: mol_type = other DNA
gatttgaccagccgtgattgg

SEQ ID NO: 21926 - DNA, 21 bp, synthetic construct
  source 1..21: mol_type = other DNA
tacttcgctggtaagaaggac

SEQ ID NO: 21927 - DNA, 21 bp, synthetic construct
  source 1..21: mol_type = other DNA
ttacatcgcttgggcccaaac

SEQ ID NO: 21928 - DNA, 21 bp, synthetic construct
  source 1..21: mol_type = other DNA
aacattcctgggatgatgtat

SEQ ID NO: 21929 - DNA, 21 bp, synthetic construct
  source 1..21: mol_type = other DNA
ctcatgactgatcgaacttgg

SEQ ID NO: 21930 - DNA, 21 bp, synthetic construct
  source 1..21: mol_type = other DNA
agggacgacttcaccaccttt

SEQ ID NO: 21931 - DNA, 21 bp, synthetic construct
  source 1..21: mol_type = other DNA
agagaagaacatgtgttccca

SEQ ID NO: 21932 - DNA, 21 bp, synthetic construct
  source 1..21: mol_type = other DNA
aggacagacgtagtctatccg

SEQ ID NO: 21933 - DNA, 21 bp, synthetic construct
  source 1..21: mol_type = other DNA
gatttgaggagtgtcacctgg

SEQ ID NO: 21934 - DNA, 21 bp, synthetic construct
  source 1..21: mol_type = other DNA
ctatgtaagccgtgtagtacc

SEQ ID NO: 21935 - DNA, 21 bp, synthetic construct
  source 1..21: mol_type = other DNA
cgtgaagacttttcagcgtgg

SEQ ID NO: 21936 - DNA, 21 bp, synthetic construct
  source 1..21: mol_type = other DNA
tttcataagttaggctcaaac

SEQ ID NO: 21937 - DNA, 21 bp, synthetic construct
  source 1..21: mol_type = other DNA
tacttcacgggtattagagaa

SEQ ID NO: 21938 - DNA, 21 bp, synthetic construct
  source 1..21: mol_type = other DNA
gtcgctgagggattgaggtgg

SEQ ID NO: 21939 - DNA, 21 bp, synthetic construct
  source 1..21: mol_type = other DNA
aaggatgattatactaccttc

SEQ ID NO: 21940 - DNA, 21 bp, synthetic construct
  source 1..21: mol_type = other DNA
ttttcaaaactaaacgacaac

SEQ ID NO: 21941 - DNA, 21 bp, synthetic construct
  source 1..21: mol_type = other DNA
gtaatggaggcacgggactgg

SEQ ID NO: 21942 - DNA, 21 bp, synthetic construct
  source 1..21: mol_type = other DNA
tatttctcgggtattacagca

SEQ ID NO: 21943 - DNA, 21 bp, synthetic construct
  source 1..21: mol_type = other DNA
aggacaaacgaagtgtttcca

SEQ ID NO: 21944 - DNA, 21 bp, synthetic construct
  source 1..21: mol_type = other DNA
tatattaagagtgataaaatg

SEQ ID NO: 21945 - DNA, 21 bp, synthetic construct
  source 1..21: mol_type = other DNA
agattagacgacgtatttcct

SEQ ID NO: 21946 - DNA, 21 bp, synthetic construct
  source 1..21: mol_type = other DNA
ttacatagactgcaagataat

SEQ ID NO: 21947 - DNA, 21 bp, synthetic construct
  source 1..21: mol_type = other DNA
tacttcacaggaaaagtagcc

SEQ ID NO: 21948 - DNA, 21 bp, synthetic construct
  source 1..21: mol_type = other DNA
tatgctaaaactggcaataat

SEQ ID NO: 21949 - DNA, 21 bp, synthetic construct
  source 1..21: mol_type = other DNA
aggggtgtcgacgtatatcct

SEQ ID NO: 21950 - DNA, 21 bp, synthetic construct
  source 1..21: mol_type = other DNA
taccacaagttgaacgcaaat

SEQ ID NO: 21951 - DNA, 21 bp, synthetic construct
  source 1..21: mol_type = other DNA
ctctcccgaattagtacgaac

SEQ ID NO: 21952 - DNA, 21 bp, synthetic construct
  source 1..21: mol_type = other DNA
tacagtaagatgaatgtgaac

SEQ ID NO: 21953 - DNA, 21 bp, synthetic construct
  source 1..21: mol_type = other DNA
tacttttccggtatcgtagag

SEQ ID NO: 21954 - DNA, 21 bp, synthetic construct
  source 1..21: mol_type = other DNA
tatcatgccaaggggctcaat

SEQ ID NO: 21955 - DNA, 21 bp, synthetic construct
  source 1..21: mol_type = other DNA
aatgctttacgcggatgggat

SEQ ID NO: 21956 - DNA, 21 bp, synthetic construct
  source 1..21: mol_type = other DNA
ttctccaaggtgggaccgaat

SEQ ID NO: 21957 - DNA, 21 bp, synthetic construct
  source 1..21: mol_type = other DNA
aaagatgagttcgtatcatat

SEQ ID NO: 21958 - DNA, 21 bp, synthetic construct
  source 1..21: mol_type = other DNA
gatctgacttctgcaaaatgg

SEQ ID NO: 21959 - DNA, 21 bp, synthetic construct
  source 1..21: mol_type = other DNA
cgagacgagttcgtgagttat

SEQ ID NO: 21960 - DNA, 21 bp, synthetic construct
  source 1..21: mol_type = other DNA
ctccacagattatctgtgaac

SEQ ID NO: 21961 - DNA, 21 bp, synthetic construct
  source 1..21: mol_type = other DNA
gtaacttcatcgaacggaata

SEQ ID NO: 21962 - DNA, 21 bp, synthetic construct
  source 1..21: mol_type = other DNA
agggaagaagatgtgtaccct

SEQ ID NO: 21963 - DNA, 21 bp, synthetic construct
  source 1..21: mol_type = other DNA
tatagcaggcttcttccagat

SEQ ID NO: 21964 - DNA, 21 bp, synthetic construct
  source 1..21: mol_type = other DNA
agggaggatagcgtttattgg

SEQ ID NO: 21965 - DNA, 21 bp, synthetic construct
  source 1..21: mol_type = other DNA
acattgggttgtccggatcgg

SEQ ID NO: 21966 - DNA, 21 bp, synthetic construct
  source 1..21: mol_type = other DNA
tatgcgaggactgggccggat

SEQ ID NO: 21967 - DNA, 21 bp, synthetic construct
  source 1..21: mol_type = other DNA
attgcacaggtaggatgggat

SEQ ID NO: 21968 - DNA, 21 bp, synthetic construct
  source 1..21: mol_type = other DNA
gttgccacgaaaggtataggg

SEQ ID NO: 21969 - DNA, 21 bp, synthetic construct
  source 1..21: mol_type = other DNA
ttgtgcaagccatgccacacg

SEQ ID NO: 21970 - DNA, 21 bp, synthetic construct
  source 1..21: mol_type = other DNA
ataacatcgactaacgggcgt

SEQ ID NO: 21971 - DNA, 21 bp, synthetic construct
  source 1..21: mol_type = other DNA
ttttcgaaattgaacgcgaat

SEQ ID NO: 21972 - DNA, 21 bp, synthetic construct
  source 1..21: mol_type = other DNA
aggctagaatcttccagctgg

SEQ ID NO: 21973 - DNA, 21 bp, synthetic construct
  source 1..21: mol_type = other DNA
tacatcaagagccagccgggc

SEQ ID NO: 21974 - DNA, 21 bp, synthetic construct
  source 1..21: mol_type = other DNA
atgcataagctttcagagaat

SEQ ID NO: 21975 - DNA, 21 bp, synthetic construct
  source 1..21: mol_type = other DNA
tattttaccggagtaaccgag

SEQ ID NO: 21976 - DNA, 21 bp, synthetic construct
  source 1..21: mol_type = other DNA
tatgtgaaaagccaacctcta

SEQ ID NO: 21977 - DNA, 21 bp, synthetic construct
  source 1..21: mol_type = other DNA
taccacaagttgaacaacaat

SEQ ID NO: 21978 - DNA, 21 bp, synthetic construct
  source 1..21: mol_type = other DNA
tatttttctggaatagtagct

SEQ ID NO: 21979 - DNA, 21 bp, synthetic construct
  source 1..21: mol_type = other DNA
gatatgggaagctcgacgtgg

SEQ ID NO: 21980 - DNA, 21 bp, synthetic construct
  source 1..21: mol_type = other DNA
ttatgtaagccgagccttacc

SEQ ID NO: 21981 - DNA, 21 bp, synthetic construct
  source 1..21: mol_type = other DNA
tattttagtaagattattgcc

SEQ ID NO: 21982 - DNA, 21 bp, synthetic construct
  source 1..21: mol_type = other DNA
tactttacgggacaaaaggag

SEQ ID NO: 21983 - DNA, 21 bp, synthetic construct
  source 1..21: mol_type = other DNA
tacctgaagagtcaacagagc

SEQ ID NO: 21984 - DNA, 21 bp, synthetic construct
  source 1..21: mol_type = other DNA
tacttaaagagccaaacgagc

SEQ ID NO: 21985 - DNA, 21 bp, synthetic construct
  source 1..21: mol_type = other DNA
ggaggccttgggtcgcactgg

SEQ ID NO: 21986 - DNA, 21 bp, synthetic construct
  source 1..21: mol_type = other DNA
tattttacagggcaaaaagag

SEQ ID NO: 21987 - DNA, 21 bp, synthetic construct
  source 1..21: mol_type = other DNA
agggaagaaggcgtcagctgg

SEQ ID NO: 21988 - DNA, 21 bp, synthetic construct
  source 1..21: mol_type = other DNA
agatcagatgtcgtttacccg

SEQ ID NO: 21989 - DNA, 21 bp, synthetic construct
  source 1..21: mol_type = other DNA
tactctaaattgaatctcaat

SEQ ID NO: 21990 - DNA, 21 bp, synthetic construct
  source 1..21: mol_type = other DNA
tacatcaagggggactataaa

SEQ ID NO: 21991 - DNA, 21 bp, synthetic construct
  source 1..21: mol_type = other DNA
gacatgggttcgagcacatgg

SEQ ID NO: 21992 - DNA, 21 bp, synthetic construct
  source 1..21: mol_type = other DNA
tatagtaagttaagcatgaac

SEQ ID NO: 21993 - DNA, 21 bp, synthetic construct
  source 1..21: mol_type = other DNA
attatggagagtgctacgtgg

SEQ ID NO: 21994 - DNA, 21 bp, synthetic construct
  source 1..21: mol_type = other DNA
ctgtgtaagccgtgtaacact

SEQ ID NO: 21995 - DNA, 21 bp, synthetic construct
  source 1..21: mol_type = other DNA
gtgaagtcgacaaatggagtt

SEQ ID NO: 21996 - DNA, 21 bp, synthetic construct
  source 1..21: mol_type = other DNA
aaattggacgattatggttgg

SEQ ID NO: 21997 - DNA, 21 bp, synthetic construct
  source 1..21: mol_type = other DNA
tacagtaaggcccaaccgaac

SEQ ID NO: 21998 - DNA, 21 bp, synthetic construct
  source 1..21: mol_type = other DNA
cgcgaggaggacgtttatccg

SEQ ID NO: 21999 - DNA, 21 bp, synthetic construct
  source 1..21: mol_type = other DNA
cctatgggaagcagtagttgg

SEQ ID NO: 22000 - DNA, 21 bp, synthetic construct
  source 1..21: mol_type = other DNA
tactttaccgggcacatggat

SEQ ID NO: 22001 - DNA, 21 bp, synthetic construct
  source 1..21: mol_type = other DNA
ccgtacgcaaaatctcccatg

SEQ ID NO: 22002 - DNA, 21 bp, synthetic construct
  source 1..21: mol_type = other DNA
gtgagtagttcaaatggagta

SEQ ID NO: 22003 - DNA, 21 bp, synthetic construct
  source 1..21: mol_type = other DNA
agaggcgaggatgtatatcca

SEQ ID NO: 22004 - DNA, 21 bp, synthetic construct
  source 1..21: mol_type = other DNA
ttgcacgtcaggctgaataat

SEQ ID NO: 22005 - DNA, 21 bp, synthetic construct
  source 1..21: mol_type = other DNA
gtaacgagcacaaatggcatt

SEQ ID NO: 22006 - DNA, 21 bp, synthetic construct
  source 1..21: mol_type = other DNA
atgttcgatggaacgatggcc

SEQ ID NO: 22007 - DNA, 21 bp, synthetic construct
  source 1..21: mol_type = other DNA
cgggaagaaaccgtcaggtgg

SEQ ID NO: 22008 - DNA, 21 bp, synthetic construct
  source 1..21: mol_type = other DNA
ttgcaccgcttaggtatggac

SEQ ID NO: 22009 - DNA, 21 bp, synthetic construct
  source 1..21: mol_type = other DNA
cgcacggcagatgcgtatccg

SEQ ID NO: 22010 - DNA, 21 bp, synthetic construct
  source 1..21: mol_type = other DNA
ttacataagttacagccggat

SEQ ID NO: 22011 - DNA, 21 bp, synthetic construct
  source 1..21: mol_type = other DNA
aacatggcgtcgcatacctgg

SEQ ID NO: 22012 - DNA, 21 bp, synthetic construct
  source 1..21: mol_type = other DNA
tatttcagcggaatcgtggca

SEQ ID NO: 22013 - DNA, 21 bp, synthetic construct
  source 1..21: mol_type = other DNA
cgcttagagtctgccatgtgg

SEQ ID NO: 22014 - DNA, 21 bp, synthetic construct
  source 1..21: mol_type = other DNA
ttgtgtcgtccctgctcagcc

SEQ ID NO: 22015 - DNA, 21 bp, synthetic construct
  source 1..21: mol_type = other DNA
tatgtcagaagtgacacggga

SEQ ID NO: 22016 - DNA, 21 bp, synthetic construct
  source 1..21: mol_type = other DNA
cttacgcgtgtagctcctaat

SEQ ID NO: 22017 - DNA, 21 bp, synthetic construct
  source 1..21: mol_type = other DNA
tattttacaggcgtgaaagat

SEQ ID NO: 22018 - DNA, 21 bp, synthetic construct
  source 1..21: mol_type = other DNA
agggacgagttcacggggtat

SEQ ID NO: 22019 - DNA, 21 bp, synthetic construct
  source 1..21: mol_type = other DNA
cttacgcgtctccacacagac

SEQ ID NO: 22020 - DNA, 21 bp, synthetic construct
  source 1..21: mol_type = other DNA
tacgtgaaaagtcagaatgga

SEQ ID NO: 22021 - DNA, 21 bp, synthetic construct
  source 1..21: mol_type = other DNA
tattctaaatcagggctaaat

SEQ ID NO: 22022 - DNA, 21 bp, synthetic construct
  source 1..21: mol_type = other DNA
gatctgactgcacgaaactgg

SEQ ID NO: 22023 - DNA, 21 bp, synthetic construct
  source 1..21: mol_type = other DNA
tatgtcaagagccagatgatg

SEQ ID NO: 22024 - DNA, 21 bp, synthetic construct
  source 1..21: mol_type = other DNA
cgtgatgattttacggcctat

SEQ ID NO: 22025 - DNA, 21 bp, synthetic construct
  source 1..21: mol_type = other DNA
atagagagcacaaacggacga

SEQ ID NO: 22026 - DNA, 21 bp, synthetic construct
  source 1..21: mol_type = other DNA
attatgagctcgcacggctgg

SEQ ID NO: 22027 - DNA, 21 bp, synthetic construct
  source 1..21: mol_type = other DNA
gaaatgaaagccaggacctgg

SEQ ID NO: 22028 - DNA, 21 bp, synthetic construct
  source 1..21: mol_type = other DNA
attctttccagtagtagttgg

SEQ ID NO: 22029 - DNA, 21 bp, synthetic construct
  source 1..21: mol_type = other DNA
gttaccagcactaacggtgta

SEQ ID NO: 22030 - DNA, 21 bp, synthetic construct
  source 1..21: mol_type = other DNA
tatgtcaagagtcagccgcta

SEQ ID NO: 22031 - DNA, 21 bp, synthetic construct
  source 1..21: mol_type = other DNA
tacttttcgggcaaagtcgag

SEQ ID NO: 22032 - DNA, 21 bp, synthetic construct
  source 1..21: mol_type = other DNA
acagaatcaacccacgggaga

SEQ ID NO: 22033 - DNA, 21 bp, synthetic construct
  source 1..21: mol_type = other DNA
tatgtgaaaagccagaatatg

SEQ ID NO: 22034 - DNA, 21 bp, synthetic construct
  source 1..21: mol_type = other DNA
ttgtatgacggcacatcagct

SEQ ID NO: 22035 - DNA, 21 bp, synthetic construct
  source 1..21: mol_type = other DNA
atagcgtcgctcggatgggat

SEQ ID NO: 22036 - DNA, 21 bp, synthetic construct
  source 1..21: mol_type = other DNA
gttgggacgaaaggatgggat

SEQ ID NO: 22037 - DNA, 21 bp, synthetic construct
  source 1..21: mol_type = other DNA
tatcttaaatcacaacagact

SEQ ID NO: 22038 - DNA, 21 bp, synthetic construct
  source 1..21: mol_type = other DNA
aagatgtcttcgtcgacatgg

SEQ ID NO: 22039 - DNA, 21 bp, synthetic construct
  source 1..21: mol_type = other DNA
tactcaaaggtgggctttaat

SEQ ID NO: 22040 - DNA, 21 bp, synthetic construct
  source 1..21: mol_type = other DNA
tatagtaagattggaaacaat

SEQ ID NO: 22041 - DNA, 21 bp, synthetic construct
  source 1..21: mol_type = other DNA
tatgcgaaaagtggtcaaaac

SEQ ID NO: 22042 - DNA, 21 bp, synthetic construct
  source 1..21: mol_type = other DNA
attcagtcgactaacggggtc

SEQ ID NO: 22043 - DNA, 21 bp, synthetic construct
  source 1..21: mol_type = other DNA
ctacatcgactgctccatgac

SEQ ID NO: 22044 - DNA, 21 bp, synthetic construct
  source 1..21: mol_type = other DNA
gtttcgtccagcaacggcgtc

SEQ ID NO: 22045 - DNA, 21 bp, synthetic construct
  source 1..21: mol_type = other DNA
ctctctcgtattggtcacgat

SEQ ID NO: 22046 - DNA, 21 bp, synthetic construct
  source 1..21: mol_type = other DNA
tatgtcaaaagtcaaccaatc

SEQ ID NO: 22047 - DNA, 21 bp, synthetic construct
  source 1..21: mol_type = other DNA
actgaaagtaccaacggtata

SEQ ID NO: 22048 - DNA, 21 bp, synthetic construct
  source 1..21: mol_type = other DNA
tacagtaagttggggtataac

SEQ ID NO: 22049 - DNA, 21 bp, synthetic construct
  source 1..21: mol_type = other DNA
tacgcgaaaagtggagtgaat

SEQ ID NO: 22050 - DNA, 21 bp, synthetic construct
  source 1..21: mol_type = other DNA
tacgttaagtcacagccgatt

SEQ ID NO: 22051 - DNA, 21 bp, synthetic construct
  source 1..21: mol_type = other DNA
tacttcacaggtaaaaaagaa

SEQ ID NO: 22052 - DNA, 21 bp, synthetic construct
  source 1..21: mol_type = other DNA
tactccaaggccaacgtcaat

SEQ ID NO: 22053 - DNA, 21 bp, synthetic construct
  source 1..21: mol_type = other DNA
tatttcactggtatccacgcg

SEQ ID NO: 22054 - DNA, 21 bp, synthetic construct
  source 1..21: mol_type = other DNA
aacagcttagagggccgtgat

SEQ ID NO: 22055 - DNA, 21 bp, synthetic construct
  source 1..21: mol_type = other DNA
agggaagagggtgtcgcatgg

SEQ ID NO: 22056 - DNA, 21 bp, synthetic construct
  source 1..21: mol_type = other DNA
aaagacgattttacgatgtac

SEQ ID NO: 22057 - DNA, 21 bp, synthetic construct
  source 1..21: mol_type = other DNA
tatcataaactaaactccaac

SEQ ID NO: 22058 - DNA, 21 bp, synthetic construct
  source 1..21: mol_type = other DNA
catcacaaattgggggaaaat

SEQ ID NO: 22059 - DNA, 21 bp, synthetic construct
  source 1..21: mol_type = other DNA
ttgtctcggataggcgacaat

SEQ ID NO: 22060 - DNA, 21 bp, synthetic construct
  source 1..21: mol_type = other DNA
agggaggtagacgtgttccct

SEQ ID NO: 22061 - DNA, 21 bp, synthetic construct
  source 1..21: mol_type = other DNA
aggatgattgatgcctatccg

SEQ ID NO: 22062 - DNA, 21 bp, synthetic construct
  source 1..21: mol_type = other DNA
ttgcacaggttgggccaagat

SEQ ID NO: 22063 - DNA, 21 bp, synthetic construct
  source 1..21: mol_type = other DNA
ctatgcaaaccctgtttaagt

SEQ ID NO: 22064 - DNA, 21 bp, synthetic construct
  source 1..21: mol_type = other DNA
gtcatgtcgtcacagctctgg

SEQ ID NO: 22065 - DNA, 21 bp, synthetic construct
  source 1..21: mol_type = other DNA
tatgttaaaagcgataatgca

SEQ ID NO: 22066 - DNA, 21 bp, synthetic construct
  source 1..21: mol_type = other DNA
ttccataagttgagccccgtt

SEQ ID NO: 22067 - DNA, 21 bp, synthetic construct
  source 1..21: mol_type = other DNA
ctcagcaaattaaattctaat

SEQ ID NO: 22068 - DNA, 21 bp, synthetic construct
  source 1..21: mol_type = other DNA
gttagcgagttcaccacttat

SEQ ID NO: 22069 - DNA, 21 bp, synthetic construct
  source 1..21: mol_type = other DNA
gtcatgtcgactaatggcaga

SEQ ID NO: 22070 - DNA, 21 bp, synthetic construct
  source 1..21: mol_type = other DNA
gcacttgagagcaggacgtgg

SEQ ID NO: 22071 - DNA, 21 bp, synthetic construct
  source 1..21: mol_type = other DNA
ttgcaccgggccggtccggat

SEQ ID NO: 22072 - DNA, 21 bp, synthetic construct
  source 1..21: mol_type = other DNA
tacgcgaaagctggtccaaac

SEQ ID NO: 22073 - DNA, 21 bp, synthetic construct
  source 1..21: mol_type = other DNA
agaatggaagacgcgtacccc

SEQ ID NO: 22074 - DNA, 21 bp, synthetic construct
  source 1..21: mol_type = other DNA
gtaggacacaaggggtgggat

SEQ ID NO: 22075 - DNA, 21 bp, synthetic construct
  source 1..21: mol_type = other DNA
ttttcaaaacttaatactaat

SEQ ID NO: 22076 - DNA, 21 bp, synthetic construct
  source 1..21: mol_type = other DNA
gtgagcgaatttaaagtctat

SEQ ID NO: 22077 - DNA, 21 bp, synthetic construct
  source 1..21: mol_type = other DNA
aggggagctgacgtgtatccc

SEQ ID NO: 22078 - DNA, 21 bp, synthetic construct
  source 1..21: mol_type = other DNA
cttcataagctccaagttgat

SEQ ID NO: 22079 - DNA, 21 bp, synthetic construct
  source 1..21: mol_type = other DNA
cttgctaagaccgcccctaat

SEQ ID NO: 22080 - DNA, 21 bp, synthetic construct
  source 1..21: mol_type = other DNA
tattttacggggcataccgat

SEQ ID NO: 22081 - DNA, 21 bp, synthetic construct
  source 1..21: mol_type = other DNA
agtgaaagcaccaacggccgg

SEQ ID NO: 22082 - DNA, 21 bp, synthetic construct
  source 1..21: mol_type = other DNA
tacgtaaagtctcagccattg

SEQ ID NO: 22083 - DNA, 21 bp, synthetic construct
  source 1..21: mol_type = other DNA
tattcgaaagcaggagagaac

SEQ ID NO: 22084 - DNA, 21 bp, synthetic construct
  source 1..21: mol_type = other DNA
ttccacaagttgggtagtaat

SEQ ID NO: 22085 - DNA, 21 bp, synthetic construct
  source 1..21: mol_type = other DNA
ttacaccggctaagccccctg

SEQ ID NO: 22086 - DNA, 21 bp, synthetic construct
  source 1..21: mol_type = other DNA
tacttcactgggcatatagac

SEQ ID NO: 22087 - DNA, 21 bp, synthetic construct
  source 1..21: mol_type = other DNA
aaggacgaatttgtgagttac

SEQ ID NO: 22088 - DNA, 21 bp, synthetic construct
  source 1..21: mol_type = other DNA
ttgtgtaaaccgtgtatgacg

SEQ ID NO: 22089 - DNA, 21 bp, synthetic construct
  source 1..21: mol_type = other DNA
tactccaaagcggggataaac

SEQ ID NO: 22090 - DNA, 21 bp, synthetic construct
  source 1..21: mol_type = other DNA
taccacaagttagcgaacaac

SEQ ID NO: 22091 - DNA, 21 bp, synthetic construct
  source 1..21: mol_type = other DNA
tattccaagattggtactaac

SEQ ID NO: 22092 - DNA, 21 bp, synthetic construct
  source 1..21: mol_type = other DNA
tcatcctcgacaaatggggta

SEQ ID NO: 22093 - DNA, 21 bp, synthetic construct
  source 1..21: mol_type = other DNA
ctttctcgcgtaagcatcaat

SEQ ID NO: 22094 - DNA, 21 bp, synthetic construct
  source 1..21: mol_type = other DNA
tactttaccggcaaactcgat

SEQ ID NO: 22095 - DNA, 21 bp, synthetic construct
  source 1..21: mol_type = other DNA
gaaatggccagtagagattgg

SEQ ID NO: 22096 - DNA, 21 bp, synthetic construct
  source 1..21: mol_type = other DNA
tatgtaaagtcgcaacagcat

SEQ ID NO: 22097 - DNA, 21 bp, synthetic construct
  source 1..21: mol_type = other DNA
ttacacagtaagctccccaat

SEQ ID NO: 22098 - DNA, 21 bp, synthetic construct
  source 1..21: mol_type = other DNA
tattttagtaaaatcaaagaa

SEQ ID NO: 22099 - DNA, 21 bp, synthetic construct
  source 1..21: mol_type = other DNA
tatttcatgggcaaaatagca

SEQ ID NO: 22100 - DNA, 21 bp, synthetic construct
  source 1..21: mol_type = other DNA
ttctccaaactgaacttgaat

SEQ ID NO: 22101 - DNA, 21 bp, synthetic construct
  source 1..21: mol_type = other DNA
aatatggcaagtgccaaatgg

SEQ ID NO: 22102 - DNA, 21 bp, synthetic construct
  source 1..21: mol_type = other DNA
cctatgagcagttcgtcttgg

SEQ ID NO: 22103 - DNA, 21 bp, synthetic construct
  source 1..21: mol_type = other DNA
tatttcaccgggaaaacggaa

SEQ ID NO: 22104 - DNA, 21 bp, synthetic construct
  source 1..21: mol_type = other DNA
cgtgcccttgacgggtgggac

SEQ ID NO: 22105 - DNA, 21 bp, synthetic construct
  source 1..21: mol_type = other DNA
gatttgtcgagctcaagctgg

SEQ ID NO: 22106 - DNA, 21 bp, synthetic construct
  source 1..21: mol_type = other DNA
ttttcgaaattaaacaacaat

SEQ ID NO: 22107 - DNA, 21 bp, synthetic construct
  source 1..21: mol_type = other DNA
tacgcgaaaaatggggcaaat

SEQ ID NO: 22108 - DNA, 21 bp, synthetic construct
  source 1..21: mol_type = other DNA
tacttttcagggattgtagcc

SEQ ID NO: 22109 - DNA, 21 bp, synthetic construct
  source 1..21: mol_type = other DNA
atcgaatcgacgaacgggagg

SEQ ID NO: 22110 - DNA, 21 bp, synthetic construct
  source 1..21: mol_type = other DNA
tacagtgtaatagggcctaac

SEQ ID NO: 22111 - DNA, 21 bp, synthetic construct
  source 1..21: mol_type = other DNA
tacgttaagtcagaccaccac

SEQ ID NO: 22112 - DNA, 21 bp, synthetic construct
  source 1..21: mol_type = other DNA
agagaagaaatggtgcgttgg

SEQ ID NO: 22113 - DNA, 21 bp, synthetic construct
  source 1..21: mol_type = other DNA
cttagtaggttaaatgataat

SEQ ID NO: 22114 - DNA, 21 bp, synthetic construct
  source 1..21: mol_type = other DNA
acggctagtacaaatggtgtg

SEQ ID NO: 22115 - DNA, 21 bp, synthetic construct
  source 1..21: mol_type = other DNA
tatagcaagcttggtacaaat

SEQ ID NO: 22116 - DNA, 21 bp, synthetic construct
  source 1..21: mol_type = other DNA
gtcttttcaacgaatggtatt

SEQ ID NO: 22117 - DNA, 21 bp, synthetic construct
  source 1..21: mol_type = other DNA
gcgggaggtggactttacgtg

SEQ ID NO: 22118 - DNA, 21 bp, synthetic construct
  source 1..21: mol_type = other DNA
ttctcgaaactcaaccccaat

SEQ ID NO: 22119 - DNA, 21 bp, synthetic construct
  source 1..21: mol_type = other DNA
ttaagccgggctgcccctaat

SEQ ID NO: 22120 - DNA, 21 bp, synthetic construct
  source 1..21: mol_type = other DNA
tacttcacgggtgtcatggag

SEQ ID NO: 22121 - DNA, 21 bp, synthetic construct
  source 1..21: mol_type = other DNA
gtgagttcgacgaatggccgg

SEQ ID NO: 22122 - DNA, 21 bp, synthetic construct
  source 1..21: mol_type = other DNA
cgcagcgaattcctcgcgttt

SEQ ID NO: 22123 - DNA, 21 bp, synthetic construct
  source 1..21: mol_type = other DNA
gtaatgagcgaccgcatctgg

SEQ ID NO: 22124 - DNA, 21 bp, synthetic construct
  source 1..21: mol_type = other DNA
ccaatgggtagtgctatgtgg

SEQ ID NO: 22125 - DNA, 21 bp, synthetic construct
  source 1..21: mol_type = other DNA
tatgttaagtcaaacaataac

SEQ ID NO: 22126 - DNA, 21 bp, synthetic construct
  source 1..21: mol_type = other DNA
tattccaaacttggggacaat

SEQ ID NO: 22127 - DNA, 21 bp, synthetic construct
  source 1..21: mol_type = other DNA
tacttcactggacagaaggaa

SEQ ID NO: 22128 - DNA, 21 bp, synthetic construct
  source 1..21: mol_type = other DNA
ggtgatgagttcgtccattgg

SEQ ID NO: 22129 - DNA, 21 bp, synthetic construct
  source 1..21: mol_type = other DNA
cgagaggaggacgtttaccct

SEQ ID NO: 22130 - DNA, 21 bp, synthetic construct
  source 1..21: mol_type = other DNA
tatcataagttaaacccactc

SEQ ID NO: 22131 - DNA, 21 bp, synthetic construct
  source 1..21: mol_type = other DNA
cgcggacctgacgtatacccc

SEQ ID NO: 22132 - DNA, 21 bp, synthetic construct
  source 1..21: mol_type = other DNA
aaggacgatttccacgtgtgg

SEQ ID NO: 22133 - DNA, 21 bp, synthetic construct
  source 1..21: mol_type = other DNA
tatttcactgggatacacgag

SEQ ID NO: 22134 - DNA, 21 bp, synthetic construct
  source 1..21: mol_type = other DNA
atgcgcgatggaacccccgct

SEQ ID NO: 22135 - DNA, 21 bp, synthetic construct
  source 1..21: mol_type = other DNA
aaagacgacttttgtacattt

SEQ ID NO: 22136 - DNA, 21 bp, synthetic construct
  source 1..21: mol_type = other DNA
ataccttcagatagactatgg

SEQ ID NO: 22137 - DNA, 21 bp, synthetic construct
  source 1..21: mol_type = other DNA
atcatgactagcagggactgg

SEQ ID NO: 22138 - DNA, 21 bp, synthetic construct
  source 1..21: mol_type = other DNA
ttgtccaggatcagtaccaat

SEQ ID NO: 22139 - DNA, 21 bp, synthetic construct
  source 1..21: mol_type = other DNA
aggacggacaccgtgtatccc

SEQ ID NO: 22140 - DNA, 21 bp, synthetic construct
  source 1..21: mol_type = other DNA
aaggatgacttccacacgtat

SEQ ID NO: 22141 - DNA, 21 bp, synthetic construct
  source 1..21: mol_type = other DNA
cgggaagacttcgtaacctgg

SEQ ID NO: 22142 - DNA, 21 bp, synthetic construct
  source 1..21: mol_type = other DNA
agtagcagcactaacggagtt

SEQ ID NO: 22143 - DNA, 21 bp, synthetic construct
  source 1..21: mol_type = other DNA
tatagtaaactcaacacaaat

SEQ ID NO: 22144 - DNA, 21 bp, synthetic construct
  source 1..21: mol_type = other DNA
tacgtgcgctcggataaggga

SEQ ID NO: 22145 - DNA, 21 bp, synthetic construct
  source 1..21: mol_type = other DNA
cgtacaccccaagtcttccca

SEQ ID NO: 22146 - DNA, 21 bp, synthetic construct
  source 1..21: mol_type = other DNA
gatttgagaagtgcggcgtgg

SEQ ID NO: 22147 - DNA, 21 bp, synthetic construct
  source 1..21: mol_type = other DNA
tacacacgtcttgatccatta

SEQ ID NO: 22148 - DNA, 21 bp, synthetic construct
  source 1..21: mol_type = other DNA
tattcaaaaatgaatattaat

SEQ ID NO: 22149 - DNA, 21 bp, synthetic construct
  source 1..21: mol_type = other DNA
tattttagtggaatccaagaa

SEQ ID NO: 22150 - DNA, 21 bp, synthetic construct
  source 1..21: mol_type = other DNA
tactttactggcaagctcgaa

SEQ ID NO: 22151 - DNA, 21 bp, synthetic construct
  source 1..21: mol_type = other DNA
gtggcaagcagagggtgggac

SEQ ID NO: 22152 - DNA, 21 bp, synthetic construct
  source 1..21: mol_type = other DNA
tacttcaccggcaaaatagat

SEQ ID NO: 22153 - DNA, 21 bp, synthetic construct
  source 1..21: mol_type = other DNA
tatcttaagtcacagatctat

SEQ ID NO: 22154 - DNA, 21 bp, synthetic construct
  source 1..21: mol_type = other DNA
ctatccaaggtaggacataat

SEQ ID NO: 22155 - DNA, 21 bp, synthetic construct
  source 1..21: mol_type = other DNA
tattttactgggaagaccgag

SEQ ID NO: 22156 - DNA, 21 bp, synthetic construct
  source 1..21: mol_type = other DNA
cgcagcgatttcgttgcattt

SEQ ID NO: 22157 - DNA, 21 bp, synthetic construct
  source 1..21: mol_type = other DNA
atcacgagtacaaatggcaga

SEQ ID NO: 22158 - DNA, 21 bp, synthetic construct
  source 1..21: mol_type = other DNA
ttctctaagattcagacggaa

SEQ ID NO: 22159 - DNA, 21 bp, synthetic construct
  source 1..21: mol_type = other DNA
ctaagtcgtctatccccaatt

SEQ ID NO: 22160 - DNA, 21 bp, synthetic construct
  source 1..21: mol_type = other DNA
gtatcggaatttgagatctac

SEQ ID NO: 22161 - DNA, 21 bp, synthetic construct
  source 1..21: mol_type = other DNA
cggaccagtgatgtattccct

SEQ ID NO: 22162 - DNA, 21 bp, synthetic construct
  source 1..21: mol_type = other DNA
cttcatagagcaggccccgac

SEQ ID NO: 22163 - DNA, 21 bp, synthetic construct
  source 1..21: mol_type = other DNA
cgcttaatggacgcctatcca

SEQ ID NO: 22164 - DNA, 21 bp, synthetic construct
  source 1..21: mol_type = other DNA
tatttcaccggcatgaaggag

SEQ ID NO: 22165 - DNA, 21 bp, synthetic construct
  source 1..21: mol_type = other DNA
tactcaaaattgtctatgaat

SEQ ID NO: 22166 - DNA, 21 bp, synthetic construct
  source 1..21: mol_type = other DNA
gatttgtcaagtcacaactgg

SEQ ID NO: 22167 - DNA, 21 bp, synthetic construct
  source 1..21: mol_type = other DNA
tacagcaagctgtcaatgaac

SEQ ID NO: 22168 - DNA, 21 bp, synthetic construct
  source 1..21: mol_type = other DNA
cgtgggacagatgtcttccct

SEQ ID NO: 22169 - DNA, 21 bp, synthetic construct
  source 1..21: mol_type = other DNA
gttgttagtaccaatgggatt

SEQ ID NO: 22170 - DNA, 21 bp, synthetic construct
  source 1..21: mol_type = other DNA
tactctaagaagaatgagaat

SEQ ID NO: 22171 - DNA, 21 bp, synthetic construct
  source 1..21: mol_type = other DNA
cgcgaggaggtcagcatatgg

SEQ ID NO: 22172 - DNA, 21 bp, synthetic construct
  source 1..21: mol_type = other DNA
gttgcgactgaaggcagagat

SEQ ID NO: 22173 - DNA, 21 bp, synthetic construct
  source 1..21: mol_type = other DNA
ctgcataaattatcctccgat

SEQ ID NO: 22174 - DNA, 21 bp, synthetic construct
  source 1..21: mol_type = other DNA
tacgtaaggtctgcgcccggc

SEQ ID NO: 22175 - DNA, 21 bp, synthetic construct
  source 1..21: mol_type = other DNA
ctctcacgggtcggtcaaaac

SEQ ID NO: 22176 - DNA, 21 bp, synthetic construct
  source 1..21: mol_type = other DNA
ttttccaagcttaacgaaaat

SEQ ID NO: 22177 - DNA, 21 bp, synthetic construct
  source 1..21: mol_type = other DNA
aggttgtacgacgcgattcct

SEQ ID NO: 22178 - DNA, 21 bp, synthetic construct
  source 1..21: mol_type = other DNA
ctcgctaagacaggcttcaac

SEQ ID NO: 22179 - DNA, 21 bp, synthetic construct
  source 1..21: mol_type = other DNA
tatgccaagaccggtataaat

SEQ ID NO: 22180 - DNA, 21 bp, synthetic construct
  source 1..21: mol_type = other DNA
tattttactggcgtgatggaa

SEQ ID NO: 22181 - DNA, 21 bp, synthetic construct
  source 1..21: mol_type = other DNA
aaaatggcagaccgtcaatgg

SEQ ID NO: 22182 - DNA, 21 bp, synthetic construct
  source 1..21: mol_type = other DNA
gtggttagcacaaatgggagg

SEQ ID NO: 22183 - DNA, 21 bp, synthetic construct
  source 1..21: mol_type = other DNA
cgggatgagtttcatagttac

SEQ ID NO: 22184 - DNA, 21 bp, synthetic construct
  source 1..21: mol_type = other DNA
ctatcccgtcttagccaggac

SEQ ID NO: 22185 - DNA, 21 bp, synthetic construct
  source 1..21: mol_type = other DNA
tatcataagttgaatcataat

SEQ ID NO: 22186 - DNA, 21 bp, synthetic construct
  source 1..21: mol_type = other DNA
aaggatgacttcaccatgtat

SEQ ID NO: 22187 - DNA, 21 bp, synthetic construct
  source 1..21: mol_type = other DNA
ctatgtcgcccgtgctcgacc

SEQ ID NO: 22188 - DNA, 21 bp, synthetic construct
  source 1..21: mol_type = other DNA
agaatgctagatgcgtaccca

SEQ ID NO: 22189 - DNA, 21 bp, synthetic construct
  source 1..21: mol_type = other DNA
tatagtaaggtacagactaat

SEQ ID NO: 22190 - DNA, 21 bp, synthetic construct
  source 1..21: mol_type = other DNA
tatgcgaaacagggtccgaac

SEQ ID NO: 22191 - DNA, 21 bp, synthetic construct
  source 1..21: mol_type = other DNA
gtagggttggagggaagggat

SEQ ID NO: 22192 - DNA, 21 bp, synthetic construct
  source 1..21: mol_type = other DNA
tattcaaaaataggcgcgaac

SEQ ID NO: 22193 - DNA, 21 bp, synthetic construct
  source 1..21: mol_type = other DNA
tatttcatgggtgttaaggaa

SEQ ID NO: 22194 - DNA, 21 bp, synthetic construct
  source 1..21: mol_type = other DNA
ttgtgtaagccctgcctcaac

SEQ ID NO: 22195 - DNA, 21 bp, synthetic construct
  source 1..21: mol_type = other DNA
attactagcacgaatggtatt

SEQ ID NO: 22196 - DNA, 21 bp, synthetic construct
  source 1..21: mol_type = other DNA
ctacatcgcctcacaactgat

SEQ ID NO: 22197 - DNA, 21 bp, synthetic construct
  source 1..21: mol_type = other DNA
tattggaccggacttcatgaa

SEQ ID NO: 22198 - DNA, 21 bp, synthetic construct
  source 1..21: mol_type = other DNA
ctgtcgaagattggggtgaat

SEQ ID NO: 22199 - DNA, 21 bp, synthetic construct
  source 1..21: mol_type = other DNA
tatgtgagaagtgatacgggg

SEQ ID NO: 22200 - DNA, 21 bp, synthetic construct
  source 1..21: mol_type = other DNA
ttttcaaagatacaaaccgag

SEQ ID NO: 22201 - DNA, 21 bp, synthetic construct
  source 1..21: mol_type = other DNA
cgtggcgatgacgtgtatcca

SEQ ID NO: 22202 - DNA, 21 bp, synthetic construct
  source 1..21: mol_type = other DNA
atcttaagtgatcgtaactgg

SEQ ID NO: 22203 - DNA, 21 bp, synthetic construct
  source 1..21: mol_type = other DNA
gggggagagggttcttcgtgg

SEQ ID NO: 22204 - DNA, 21 bp, synthetic construct
  source 1..21: mol_type = other DNA
attttgagctccagagactgg

SEQ ID NO: 22205 - DNA, 21 bp, synthetic construct
  source 1..21: mol_type = other DNA
gttcttagcaccaacgggatc

SEQ ID NO: 22206 - DNA, 21 bp, synthetic construct
  source 1..21: mol_type = other DNA
agagaggactacgtacactgg

SEQ ID NO: 22207 - DNA, 21 bp, synthetic construct
  source 1..21: mol_type = other DNA
ctccacaggctcgggcctaat

SEQ ID NO: 22208 - DNA, 21 bp, synthetic construct
  source 1..21: mol_type = other DNA
cgtggtgataccgtctaccca

SEQ ID NO: 22209 - DNA, 21 bp, synthetic construct
  source 1..21: mol_type = other DNA
agatcattagacgtttatccc

SEQ ID NO: 22210 - DNA, 21 bp, synthetic construct
  source 1..21: mol_type = other DNA
cgaggcccccaagtcttccca

SEQ ID NO: 22211 - DNA, 21 bp, synthetic construct
  source 1..21: mol_type = other DNA
atgctaagttcacagacttgg

SEQ ID NO: 22212 - DNA, 21 bp, synthetic construct
  source 1..21: mol_type = other DNA
taccataaagctggagaaaac

SEQ ID NO: 22213 - DNA, 21 bp, synthetic construct
  source 1..21: mol_type = other DNA
attatggaatcacgtaactgg

SEQ ID NO: 22214 - DNA, 21 bp, synthetic construct
  source 1..21: mol_type = other DNA
agaaatgacgttgtatacccg

SEQ ID NO: 22215 - DNA, 21 bp, synthetic construct
  source 1..21: mol_type = other DNA
tatcacgcgaaacaattaaac

SEQ ID NO: 22216 - DNA, 21 bp, synthetic construct
  source 1..21: mol_type = other DNA
gtctcatcgactaacggtatc

SEQ ID NO: 22217 - DNA, 21 bp, synthetic construct
  source 1..21: mol_type = other DNA
ataatgagtagttcgatgtgg

SEQ ID NO: 22218 - DNA, 21 bp, synthetic construct
  source 1..21: mol_type = other DNA
tgtaacccatctgtgtatcgg

SEQ ID NO: 22219 - DNA, 21 bp, synthetic construct
  source 1..21: mol_type = other DNA
cgagggatagatttctatccc

SEQ ID NO: 22220 - DNA, 21 bp, synthetic construct
  source 1..21: mol_type = other DNA
cttaccagattgtcagttgac

SEQ ID NO: 22221 - DNA, 21 bp, synthetic construct
  source 1..21: mol_type = other DNA
attatggcttcgcacggatgg

SEQ ID NO: 22222 - DNA, 21 bp, synthetic construct
  source 1..21: mol_type = other DNA
attgaatccagagaggggata

SEQ ID NO: 22223 - DNA, 21 bp, synthetic construct
  source 1..21: mol_type = other DNA
tacagtaagttgaatcagaac

SEQ ID NO: 22224 - DNA, 21 bp, synthetic construct
  source 1..21: mol_type = other DNA
agggaggacggtgtcaaatgg

SEQ ID NO: 22225 - DNA, 21 bp, synthetic construct
  source 1..21: mol_type = other DNA
ttgtgcaaaccttgcggcaca

SEQ ID NO: 22226 - DNA, 21 bp, synthetic construct
  source 1..21: mol_type = other DNA
tatgcgaagaccggtagcaac

SEQ ID NO: 22227 - DNA, 21 bp, synthetic construct
  source 1..21: mol_type = other DNA
tatagtaagattggaagcaac

SEQ ID NO: 22228 - DNA, 21 bp, synthetic construct
  source 1..21: mol_type = other DNA
gttcacagtacgaatggtatt

SEQ ID NO: 22229 - DNA, 21 bp, synthetic construct
  source 1..21: mol_type = other DNA
tactttacagggcaaaaagag

SEQ ID NO: 22230 - DNA, 21 bp, synthetic construct
  source 1..21: mol_type = other DNA
ttacttcagtcgtcaacctgg

SEQ ID NO: 22231 - DNA, 21 bp, synthetic construct
  source 1..21: mol_type = other DNA
cttagcaaaataggaattaat

SEQ ID NO: 22232 - DNA, 21 bp, synthetic construct
  source 1..21: mol_type = other DNA
ttacatcgcctatcaatggat

SEQ ID NO: 22233 - DNA, 21 bp, synthetic construct
  source 1..21: mol_type = other DNA
acaaaatacggggaccccgcg

SEQ ID NO: 22234 - DNA, 21 bp, synthetic construct
  source 1..21: mol_type = other DNA
cgggcgctcgaatgttgttat

SEQ ID NO: 22235 - DNA, 21 bp, synthetic construct
  source 1..21: mol_type = other DNA
gacctccgttcggcagcatgg

SEQ ID NO: 22236 - DNA, 21 bp, synthetic construct
  source 1..21: mol_type = other DNA
atcatgactgataggatttgg

SEQ ID NO: 22237 - DNA, 21 bp, synthetic construct
  source 1..21: mol_type = other DNA
gtttccagtaccaacggacgt

SEQ ID NO: 22238 - DNA, 21 bp, synthetic construct
  source 1..21: mol_type = other DNA
tattcaaaacttaatgaaatg

SEQ ID NO: 22239 - DNA, 21 bp, synthetic construct
  source 1..21: mol_type = other DNA
atagagtcatcgaatggccgc

SEQ ID NO: 22240 - DNA, 21 bp, synthetic construct
  source 1..21: mol_type = other DNA
tacttcacgggagtcattgcg

SEQ ID NO: 22241 - DNA, 21 bp, synthetic construct
  source 1..21: mol_type = other DNA
ttagctaggaatggtctcaat

SEQ ID NO: 22242 - DNA, 21 bp, synthetic construct
  source 1..21: mol_type = other DNA
agaatggccgacgcgtttcct

SEQ ID NO: 22243 - DNA, 21 bp, synthetic construct
  source 1..21: mol_type = other DNA
tatttctcaggaataattgat

SEQ ID NO: 22244 - DNA, 21 bp, synthetic construct
  source 1..21: mol_type = other DNA
ggttccgaattcatctcgttc

SEQ ID NO: 22245 - DNA, 21 bp, synthetic construct
  source 1..21: mol_type = other DNA
tattctaaactgggttacaat

SEQ ID NO: 22246 - DNA, 21 bp, synthetic construct
  source 1..21: mol_type = other DNA
aggatggtagacgtgtttcct

SEQ ID NO: 22247 - DNA, 21 bp, synthetic construct
  source 1..21: mol_type = other DNA
cgcggtcccgaagtttatcca

SEQ ID NO: 22248 - DNA, 21 bp, synthetic construct
  source 1..21: mol_type = other DNA
tactctaagttacaaccaacc

SEQ ID NO: 22249 - DNA, 21 bp, synthetic construct
  source 1..21: mol_type = other DNA
cgcttagaaagtgccatatgg

SEQ ID NO: 22250 - DNA, 21 bp, synthetic construct
  source 1..21: mol_type = other DNA
ttacataggctacaagtagat

SEQ ID NO: 22251 - DNA, 21 bp, synthetic construct
  source 1..21: mol_type = other DNA
aaggacgattataccacgtgg

SEQ ID NO: 22252 - DNA, 21 bp, synthetic construct
  source 1..21: mol_type = other DNA
ctgtcaaagactggacccaat

SEQ ID NO: 22253 - DNA, 21 bp, synthetic construct
  source 1..21: mol_type = other DNA
ctttctaagatcggtcacaac

SEQ ID NO: 22254 - DNA, 21 bp, synthetic construct
  source 1..21: mol_type = other DNA
tactttacaggtatgaaagaa

SEQ ID NO: 22255 - DNA, 21 bp, synthetic construct
  source 1..21: mol_type = other DNA
tgtaaagagaagtgtcgtccc

SEQ ID NO: 22256 - DNA, 21 bp, synthetic construct
  source 1..21: mol_type = other DNA
cttgctaggactggctacgac

SEQ ID NO: 22257 - DNA, 21 bp, synthetic construct
  source 1..21: mol_type = other DNA
gaccatggaaagtgtgggcgg

SEQ ID NO: 22258 - DNA, 21 bp, synthetic construct
  source 1..21: mol_type = other DNA
tattcaaagataggtgtgaac

SEQ ID NO: 22259 - DNA, 21 bp, synthetic construct
  source 1..21: mol_type = other DNA
gtcgagagcagcaatggtcga

SEQ ID NO: 22260 - DNA, 21 bp, synthetic construct
  source 1..21: mol_type = other DNA
attatggaaagtaggaagtgg

SEQ ID NO: 22261 - DNA, 21 bp, synthetic construct
  source 1..21: mol_type = other DNA
gatatgcaatcatcaacgtgg

SEQ ID NO: 22262 - DNA, 21 bp, synthetic construct
  source 1..21: mol_type = other DNA
tacgtgaaaagcgatagaatg

SEQ ID NO: 22263 - DNA, 21 bp, synthetic construct
  source 1..21: mol_type = other DNA
tatttcaccgggatcgttgac

SEQ ID NO: 22264 - DNA, 21 bp, synthetic construct
  source 1..21: mol_type = other DNA
ctctcacgcttagcgatcaat

SEQ ID NO: 22265 - DNA, 21 bp, synthetic construct
  source 1..21: mol_type = other DNA
agccatagtaccaatggcgta

SEQ ID NO: 22266 - DNA, 21 bp, synthetic construct
  source 1..21: mol_type = other DNA
tatagtaaagctaacgtaaac

SEQ ID NO: 22267 - DNA, 21 bp, synthetic construct
  source 1..21: mol_type = other DNA
gttatggaagcgcgcgattgg

SEQ ID NO: 22268 - DNA, 21 bp, synthetic construct
  source 1..21: mol_type = other DNA
tactccaagctggactggaac

SEQ ID NO: 22269 - DNA, 21 bp, synthetic construct
  source 1..21: mol_type = other DNA
ccactccaatcgagggattgg

SEQ ID NO: 22270 - DNA, 21 bp, synthetic construct
  source 1..21: mol_type = other DNA
aggggtgagttcgtctatcct

SEQ ID NO: 22271 - DNA, 21 bp, synthetic construct
  source 1..21: mol_type = other DNA
ctaacacgtctatccccggtc

SEQ ID NO: 22272 - DNA, 21 bp, synthetic construct
  source 1..21: mol_type = other DNA
tactcgaagctaggtcaaaac

SEQ ID NO: 22273 - DNA, 21 bp, synthetic construct
  source 1..21: mol_type = other DNA
tatttcaccggtcagaaggaa

SEQ ID NO: 22274 - DNA, 21 bp, synthetic construct
  source 1..21: mol_type = other DNA
tattctaaagcgggcttcaac

SEQ ID NO: 22275 - DNA, 21 bp, synthetic construct
  source 1..21: mol_type = other DNA
tacgtcaagtctgacaacgcg

SEQ ID NO: 22276 - DNA, 21 bp, synthetic construct
  source 1..21: mol_type = other DNA
attgagtcgtctaatggtcga

SEQ ID NO: 22277 - DNA, 21 bp, synthetic construct
  source 1..21: mol_type = other DNA
ttgtcgagactcaactttgat

SEQ ID NO: 22278 - DNA, 21 bp, synthetic construct
  source 1..21: mol_type = other DNA
aggggcagcgacgtattccct

SEQ ID NO: 22279 - DNA, 21 bp, synthetic construct
  source 1..21: mol_type = other DNA
tacgctaaaactggcatcaac

SEQ ID NO: 22280 - DNA, 21 bp, synthetic construct
  source 1..21: mol_type = other DNA
agaaccaacgacgtctttcct

SEQ ID NO: 22281 - DNA, 21 bp, synthetic construct
  source 1..21: mol_type = other DNA
tactcgaagctgggttttaat

SEQ ID NO: 22282 - DNA, 21 bp, synthetic construct
  source 1..21: mol_type = other DNA
tacgctaagagcggtgaaaac

SEQ ID NO: 22283 - DNA, 21 bp, synthetic construct
  source 1..21: mol_type = other DNA
agaaaacaggacgtctttcca

SEQ ID NO: 22284 - DNA, 21 bp, synthetic construct
  source 1..21: mol_type = other DNA
ctccatagactctcggcggac

SEQ ID NO: 22285 - DNA, 21 bp, synthetic construct
  source 1..21: mol_type = other DNA
tatagtaagctaagcatgaac

SEQ ID NO: 22286 - DNA, 21 bp, synthetic construct
  source 1..21: mol_type = other DNA
aaagatgactttcactcgtac

SEQ ID NO: 22287 - DNA, 21 bp, synthetic construct
  source 1..21: mol_type = other DNA
tattttacaggaaagattgac

SEQ ID NO: 22288 - DNA, 21 bp, synthetic construct
  source 1..21: mol_type = other DNA
cgaatgcccgacgcttatcca

SEQ ID NO: 22289 - DNA, 21 bp, synthetic construct
  source 1..21: mol_type = other DNA
tatttcacggggcatacagct

SEQ ID NO: 22290 - DNA, 21 bp, synthetic construct
  source 1..21: mol_type = other DNA
cgcgatgaatttactggctac

SEQ ID NO: 22291 - DNA, 21 bp, synthetic construct
  source 1..21: mol_type = other DNA
attatggagtcaagaaactgg

SEQ ID NO: 22292 - DNA, 21 bp, synthetic construct
  source 1..21: mol_type = other DNA
tatgctaaaagcggtcctaat

SEQ ID NO: 22293 - DNA, 21 bp, synthetic construct
  source 1..21: mol_type = other DNA
aaaacttatgatgcatttgta

SEQ ID NO: 22294 - DNA, 21 bp, synthetic construct
  source 1..21: mol_type = other DNA
tatagcaaaacgggatacaac

SEQ ID NO: 22295 - DNA, 21 bp, synthetic construct
  source 1..21: mol_type = other DNA
cccatggagagccaaaaatgg

SEQ ID NO: 22296 - DNA, 21 bp, synthetic construct
  source 1..21: mol_type = other DNA
cgagatgaatttacttcttat

SEQ ID NO: 22297 - DNA, 21 bp, synthetic construct
  source 1..21: mol_type = other DNA
aagatggccgatagacagtgg

SEQ ID NO: 22298 - DNA, 21 bp, synthetic construct
  source 1..21: mol_type = other DNA
aggatgcctgatgcatatcca

SEQ ID NO: 22299 - DNA, 21 bp, synthetic construct
  source 1..21: mol_type = other DNA
ctggcccgtcagagctacaat

SEQ ID NO: 22300 - DNA, 21 bp, synthetic construct
  source 1..21: mol_type = other DNA
ctgtcacgagtcggagggaat

SEQ ID NO: 22301 - DNA, 21 bp, synthetic construct
  source 1..21: mol_type = other DNA
ctccatagattatcacccgtg

SEQ ID NO: 22302 - DNA, 21 bp, synthetic construct
  source 1..21: mol_type = other DNA
tactggagcggggtattagat

SEQ ID NO: 22303 - DNA, 21 bp, synthetic construct
  source 1..21: mol_type = other DNA
aaagatgactttcatgtttgg

SEQ ID NO: 22304 - DNA, 21 bp, synthetic construct
  source 1..21: mol_type = other DNA
ccttacgcgaagagtgtcgaa

SEQ ID NO: 22305 - DNA, 21 bp, synthetic construct
  source 1..21: mol_type = other DNA
agaggagacactgtgtaccct

SEQ ID NO: 22306 - DNA, 21 bp, synthetic construct
  source 1..21: mol_type = other DNA
gacgctattcgtggttgggat

SEQ ID NO: 22307 - DNA, 21 bp, synthetic construct
  source 1..21: mol_type = other DNA
ctccatcgcctctcaaccaac

SEQ ID NO: 22308 - DNA, 21 bp, synthetic construct
  source 1..21: mol_type = other DNA
gtgatggaaagtcgggattgg

SEQ ID NO: 22309 - DNA, 21 bp, synthetic construct
  source 1..21: mol_type = other DNA
cgtactgcagatgcatttcct

SEQ ID NO: 22310 - DNA, 21 bp, synthetic construct
  source 1..21: mol_type = other DNA
tattcaaaattaaacattaac

SEQ ID NO: 22311 - DNA, 21 bp, synthetic construct
  source 1..21: mol_type = other DNA
tacagcaaactgaacgataag

SEQ ID NO: 22312 - DNA, 21 bp, synthetic construct
  source 1..21: mol_type = other DNA
agagacgagtttcactcattc

SEQ ID NO: 22313 - DNA, 21 bp, synthetic construct
  source 1..21: mol_type = other DNA
atagcgagtaggggttgggat

SEQ ID NO: 22314 - DNA, 21 bp, synthetic construct
  source 1..21: mol_type = other DNA
gtggcagaaggtctccgatgg

SEQ ID NO: 22315 - DNA, 21 bp, synthetic construct
  source 1..21: mol_type = other DNA
aggggcgaaagcgtatatcct

SEQ ID NO: 22316 - DNA, 21 bp, synthetic construct
  source 1..21: mol_type = other DNA
tacgtgaagagccagctgagc

SEQ ID NO: 22317 - DNA, 21 bp, synthetic construct
  source 1..21: mol_type = other DNA
tacttcaccggagtatcgctg

SEQ ID NO: 22318 - DNA, 21 bp, synthetic construct
  source 1..21: mol_type = other DNA
cgagggcctgaggtctttccc

SEQ ID NO: 22319 - DNA, 21 bp, synthetic construct
  source 1..21: mol_type = other DNA
cttcaccgcttgagtgaccac

SEQ ID NO: 22320 - DNA, 21 bp, synthetic construct
  source 1..21: mol_type = other DNA
ctttgtaagccgtgcgaaacc

SEQ ID NO: 22321 - DNA, 21 bp, synthetic construct
  source 1..21: mol_type = other DNA
gccttggaatctcgtacttgg

SEQ ID NO: 22322 - DNA, 21 bp, synthetic construct
  source 1..21: mol_type = other DNA
gtcggatccaccaatgggatc

SEQ ID NO: 22323 - DNA, 21 bp, synthetic construct
  source 1..21: mol_type = other DNA
gacctatccagcagtcagtgg

SEQ ID NO: 22324 - DNA, 21 bp, synthetic construct
  source 1..21: mol_type = other DNA
agagaggattttgtcacttgg

SEQ ID NO: 22325 - DNA, 21 bp, synthetic construct
  source 1..21: mol_type = other DNA
aaggacgatttccatagctat

SEQ ID NO: 22326 - DNA, 21 bp, synthetic construct
  source 1..21: mol_type = other DNA
gatgcaataaggggctgggac

SEQ ID NO: 22327 - DNA, 21 bp, synthetic construct
  source 1..21: mol_type = other DNA
tactcaaaagcaggaggcaat

SEQ ID NO: 22328 - DNA, 21 bp, synthetic construct
  source 1..21: mol_type = other DNA
tacgccaagagtggcagcaac

SEQ ID NO: 22329 - DNA, 21 bp, synthetic construct
  source 1..21: mol_type = other DNA
gtcggtctcgaagggcgagac

SEQ ID NO: 22330 - DNA, 21 bp, synthetic construct
  source 1..21: mol_type = other DNA
ttgagtcgccaagggcctaat

SEQ ID NO: 22331 - DNA, 21 bp, synthetic construct
  source 1..21: mol_type = other DNA
atgcgtgacggcacttcggct

SEQ ID NO: 22332 - DNA, 21 bp, synthetic construct
  source 1..21: mol_type = other DNA
catgaatctaccaatggtgtc

SEQ ID NO: 22333 - DNA, 21 bp, synthetic construct
  source 1..21: mol_type = other DNA
ctccatagattgggcggcgat

SEQ ID NO: 22334 - DNA, 21 bp, synthetic construct
  source 1..21: mol_type = other DNA
tacgcccgcacgggaccagac

SEQ ID NO: 22335 - DNA, 21 bp, synthetic construct
  source 1..21: mol_type = other DNA
ataatggcaagtcagacctgg

SEQ ID NO: 22336 - DNA, 21 bp, synthetic construct
  source 1..21: mol_type = other DNA
caccataagcttggcgagaac

SEQ ID NO: 22337 - DNA, 21 bp, synthetic construct
  source 1..21: mol_type = other DNA
ctgagtcgaattggagaaaat

SEQ ID NO: 22338 - DNA, 21 bp, synthetic construct
  source 1..21: mol_type = other DNA
ttacacagattgtctatcgat

SEQ ID NO: 22339 - DNA, 21 bp, synthetic construct
  source 1..21: mol_type = other DNA
agagacgattttacagtatat

SEQ ID NO: 22340 - DNA, 21 bp, synthetic construct
  source 1..21: mol_type = other DNA
tatttcagcggaaaggttgaa

SEQ ID NO: 22341 - DNA, 21 bp, synthetic construct
  source 1..21: mol_type = other DNA
gtcacgagtagcaatggtatt

SEQ ID NO: 22342 - DNA, 21 bp, synthetic construct
  source 1..21: mol_type = other DNA
gtatcggatttcatggcgttt

SEQ ID NO: 22343 - DNA, 21 bp, synthetic construct
  source 1..21: mol_type = other DNA
aggaccggagatgcgtatccc

SEQ ID NO: 22344 - DNA, 21 bp, synthetic construct
  source 1..21: mol_type = other DNA
aaggatgattttactggctgg

SEQ ID NO: 22345 - DNA, 21 bp, synthetic construct
  source 1..21: mol_type = other DNA
tacagcaaattaaatatgaat

SEQ ID NO: 22346 - DNA, 21 bp, synthetic construct
  source 1..21: mol_type = other DNA
ctccatcgcctcctcccggtt

SEQ ID NO: 22347 - DNA, 21 bp, synthetic construct
  source 1..21: mol_type = other DNA
agaatggaggatgccttccca

SEQ ID NO: 22348 - DNA, 21 bp, synthetic construct
  source 1..21: mol_type = other DNA
agagaggaaacggtcttccca

SEQ ID NO: 22349 - DNA, 21 bp, synthetic construct
  source 1..21: mol_type = other DNA
tggttctcgggcattaaggaa

SEQ ID NO: 22350 - DNA, 21 bp, synthetic construct
  source 1..21: mol_type = other DNA
agagaagattttacgacatgg

SEQ ID NO: 22351 - DNA, 21 bp, synthetic construct
  source 1..21: mol_type = other DNA
atgtcaaggattggaccgaac

SEQ ID NO: 22352 - DNA, 21 bp, synthetic construct
  source 1..21: mol_type = other DNA
agggacgagcacgtcttccct

SEQ ID NO: 22353 - DNA, 21 bp, synthetic construct
  source 1..21: mol_type = other DNA
tacctgaaaagccaatcacag

SEQ ID NO: 22354 - DNA, 21 bp, synthetic construct
  source 1..21: mol_type = other DNA
tatagcaaggcgggagcaaac

SEQ ID NO: 22355 - DNA, 21 bp, synthetic construct
  source 1..21: mol_type = other DNA
ctcagtcgtaccagtttaaat

SEQ ID NO: 22356 - DNA, 21 bp, synthetic construct
  source 1..21: mol_type = other DNA
tactccaaagctggggcgaat

SEQ ID NO: 22357 - DNA, 21 bp, synthetic construct
  source 1..21: mol_type = other DNA
tttagcaagctcaatctcaac

SEQ ID NO: 22358 - DNA, 21 bp, synthetic construct
  source 1..21: mol_type = other DNA
tacgttcgctcagatacaggg

SEQ ID NO: 22359 - DNA, 21 bp, synthetic construct
  source 1..21: mol_type = other DNA
atcgagtccacgcacggtcga

SEQ ID NO: 22360 - DNA, 21 bp, synthetic construct
  source 1..21: mol_type = other DNA
tattttaccggtcagacagcc

SEQ ID NO: 22361 - DNA, 21 bp, synthetic construct
  source 1..21: mol_type = other DNA
gacctccgtgctgcgacctgg

SEQ ID NO: 22362 - DNA, 21 bp, synthetic construct
  source 1..21: mol_type = other DNA
tatttcaccggtactatcgac

SEQ ID NO: 22363 - DNA, 21 bp, synthetic construct
  source 1..21: mol_type = other DNA
tactcaaaattggggtcgaat

SEQ ID NO: 22364 - DNA, 21 bp, synthetic construct
  source 1..21: mol_type = other DNA
ataacgtcgactaacggaata

SEQ ID NO: 22365 - DNA, 21 bp, synthetic construct
  source 1..21: mol_type = other DNA
tacgcgaagagtggctataac

SEQ ID NO: 22366 - DNA, 21 bp, synthetic construct
  source 1..21: mol_type = other DNA
taccttaagagccagactatc

SEQ ID NO: 22367 - DNA, 21 bp, synthetic construct
  source 1..21: mol_type = other DNA
tactttactggtacagttgct

SEQ ID NO: 22368 - DNA, 21 bp, synthetic construct
  source 1..21: mol_type = other DNA
aaagacgattactccatctac

SEQ ID NO: 22369 - DNA, 21 bp, synthetic construct
  source 1..21: mol_type = other DNA
ctgacgcgcttacatcaggac

SEQ ID NO: 22370 - DNA, 21 bp, synthetic construct
  source 1..21: mol_type = other DNA
atgatggaaagttcgaaatgg

SEQ ID NO: 22371 - DNA, 21 bp, synthetic construct
  source 1..21: mol_type = other DNA
atcgcgcaagtggggtgggac

SEQ ID NO: 22372 - DNA, 21 bp, synthetic construct
  source 1..21: mol_type = other DNA
ggaggcgagtttagtgcctgg

SEQ ID NO: 22373 - DNA, 21 bp, synthetic construct
  source 1..21: mol_type = other DNA
aaaatgagcagtagcacatgg

SEQ ID NO: 22374 - DNA, 21 bp, synthetic construct
  source 1..21: mol_type = other DNA
ttgttaacatcttctacgtgg

SEQ ID NO: 22375 - DNA, 21 bp, synthetic construct
  source 1..21: mol_type = other DNA
cgtatggaggatgcatatcct

SEQ ID NO: 22376 - DNA, 21 bp, synthetic construct
  source 1..21: mol_type = other DNA
ttaagtcgcgtgagcattaac

SEQ ID NO: 22377 - DNA, 21 bp, synthetic construct
  source 1..21: mol_type = other DNA
atacactcaaccaatggtata

SEQ ID NO: 22378 - DNA, 21 bp, synthetic construct
  source 1..21: mol_type = other DNA
cgtatggagtcagtcatgtgg

SEQ ID NO: 22379 - DNA, 21 bp, synthetic construct
  source 1..21: mol_type = other DNA
atgttggccagctcgacatgg

SEQ ID NO: 22380 - DNA, 21 bp, synthetic construct
  source 1..21: mol_type = other DNA
tatcataagatgtctcctgtg

SEQ ID NO: 22381 - DNA, 21 bp, synthetic construct
  source 1..21: mol_type = other DNA
gacatggcaagtaaagactgg

SEQ ID NO: 22382 - DNA, 21 bp, synthetic construct
  source 1..21: mol_type = other DNA
ctcgcacgcaccgcaccagac

SEQ ID NO: 22383 - DNA, 21 bp, synthetic construct
  source 1..21: mol_type = other DNA
tattggagtggtattttggaa

SEQ ID NO: 22384 - DNA, 21 bp, synthetic construct
  source 1..21: mol_type = other DNA
cgaaccagtgacgtatatcct

SEQ ID NO: 22385 - DNA, 21 bp, synthetic construct
  source 1..21: mol_type = other DNA
aaagacgactattccgtattc

SEQ ID NO: 22386 - DNA, 21 bp, synthetic construct
  source 1..21: mol_type = other DNA
tattcgaaggtcggcagggac

SEQ ID NO: 22387 - DNA, 21 bp, synthetic construct
  source 1..21: mol_type = other DNA
agggatgggacatcggcctgg

SEQ ID NO: 22388 - DNA, 21 bp, synthetic construct
  source 1..21: mol_type = other DNA
cggagcgagcacgtcttccct

SEQ ID NO: 22389 - DNA, 21 bp, synthetic construct
  source 1..21: mol_type = other DNA
aagggggaaagtcgagactgg

SEQ ID NO: 22390 - DNA, 21 bp, synthetic construct
  source 1..21: mol_type = other DNA
aaggatgagttcatgagttat

SEQ ID NO: 22391 - DNA, 21 bp, synthetic construct
  source 1..21: mol_type = other DNA
ttcacgaagagtgggcccaat

SEQ ID NO: 22392 - DNA, 21 bp, synthetic construct
  source 1..21: mol_type = other DNA
tacttcacgggcagattagaa

SEQ ID NO: 22393 - DNA, 21 bp, synthetic construct
  source 1..21: mol_type = other DNA
ttatattcaggtgaggggcct

SEQ ID NO: 22394 - DNA, 21 bp, synthetic construct
  source 1..21: mol_type = other DNA
atactttcggatcggatatgg

SEQ ID NO: 22395 - DNA, 21 bp, synthetic construct
  source 1..21: mol_type = other DNA
tatttcaccggtatacatgcc

SEQ ID NO: 22396 - DNA, 21 bp, synthetic construct
  source 1..21: mol_type = other DNA
agggaagatggagtatcttgg

SEQ ID NO: 22397 - DNA, 21 bp, synthetic construct
  source 1..21: mol_type = other DNA
aatgacggaacttcaaaatgg

SEQ ID NO: 22398 - DNA, 21 bp, synthetic construct
  source 1..21: mol_type = other DNA
ttttgcaaaccgtgtccgggc

SEQ ID NO: 22399 - DNA, 21 bp, synthetic construct
  source 1..21: mol_type = other DNA
ttagctaaaactggtattaac

SEQ ID NO: 22400 - DNA, 21 bp, synthetic construct
  source 1..21: mol_type = other DNA
tacgttaagagtcaaactatg

SEQ ID NO: 22401 - DNA, 21 bp, synthetic construct
  source 1..21: mol_type = other DNA
ttgagtagggtttcaataaac

SEQ ID NO: 22402 - DNA, 21 bp, synthetic construct
  source 1..21: mol_type = other DNA
cgcggtgcagatgtttaccca

SEQ ID NO: 22403 - DNA, 21 bp, synthetic construct
  source 1..21: mol_type = other DNA
cgcggggacaatgtttttccc

SEQ ID NO: 22404 - DNA, 21 bp, synthetic construct
  source 1..21: mol_type = other DNA
cttcaccgcctcagcccggta

SEQ ID NO: 22405 - DNA, 21 bp, synthetic construct
  source 1..21: mol_type = other DNA
ttgtctaaagtaggtatgaac

SEQ ID NO: 22406 - DNA, 21 bp, synthetic construct
  source 1..21: mol_type = other DNA
gttatggaggccagaaattgg

SEQ ID NO: 22407 - DNA, 21 bp, synthetic construct
  source 1..21: mol_type = other DNA
ctagctaagaccggggtgaac

SEQ ID NO: 22408 - DNA, 21 bp, synthetic construct
  source 1..21: mol_type = other DNA
catgaatcaacgaatggtgtc

SEQ ID NO: 22409 - DNA, 21 bp, synthetic construct
  source 1..21: mol_type = other DNA
ttgtccagattgagtccctta

SEQ ID NO: 22410 - DNA, 21 bp, synthetic construct
  source 1..21: mol_type = other DNA
tattcgaaagtagggcacaat

SEQ ID NO: 22411 - DNA, 21 bp, synthetic construct
  source 1..21: mol_type = other DNA
ctgcacagattgagcatggac

SEQ ID NO: 22412 - DNA, 21 bp, synthetic construct
  source 1..21: mol_type = other DNA
gtaatggagagccgtgtttgg

SEQ ID NO: 22413 - DNA, 21 bp, synthetic construct
  source 1..21: mol_type = other DNA
ctgcaccgattgacagccgat

SEQ ID NO: 22414 - DNA, 21 bp, synthetic construct
  source 1..21: mol_type = other DNA
tatagcaaattaggaatgaat

SEQ ID NO: 22415 - DNA, 21 bp, synthetic construct
  source 1..21: mol_type = other DNA
gtagtctatgacgcttttgtt

SEQ ID NO: 22416 - DNA, 21 bp, synthetic construct
  source 1..21: mol_type = other DNA
ctaagtaggatctcaactaat

SEQ ID NO: 22417 - DNA, 21 bp, synthetic construct
  source 1..21: mol_type = other DNA
tactctagattggaccctgtt

SEQ ID NO: 22418 - DNA, 21 bp, synthetic construct
  source 1..21: mol_type = other DNA
tacgtcaaaagccagcaacac

SEQ ID NO: 22419 - DNA, 21 bp, synthetic construct
  source 1..21: mol_type = other DNA
aggggtgaagaggtgtttcca

SEQ ID NO: 22420 - DNA, 21 bp, synthetic construct
  source 1..21: mol_type = other DNA
gatatgtcggccagggcttgg

SEQ ID NO: 22421 - DNA, 21 bp, synthetic construct
  source 1..21: mol_type = other DNA
gtgatgaacgatgcatttccg

SEQ ID NO: 22422 - DNA, 21 bp, synthetic construct
  source 1..21: mol_type = other DNA
ctccatagattgtctccaatg

SEQ ID NO: 22423 - DNA, 21 bp, synthetic construct
  source 1..21: mol_type = other DNA
tactttactgggaagacagat

SEQ ID NO: 22424 - DNA, 21 bp, synthetic construct
  source 1..21: mol_type = other DNA
tatactcgattagactataat

SEQ ID NO: 22425 - DNA, 21 bp, synthetic construct
  source 1..21: mol_type = other DNA
tacttcagcggtaccaaagag

SEQ ID NO: 22426 - DNA, 21 bp, synthetic construct
  source 1..21: mol_type = other DNA
tactttacaggttacgtggat

SEQ ID NO: 22427 - DNA, 21 bp, synthetic construct
  source 1..21: mol_type = other DNA
gacatgagctcatcaaaatgg

SEQ ID NO: 22428 - DNA, 21 bp, synthetic construct
  source 1..21: mol_type = other DNA
tacagtaaaatcggaacaaat

SEQ ID NO: 22429 - DNA, 21 bp, synthetic construct
  source 1..21: mol_type = other DNA
tacagcaaaattggtcaaaac

SEQ ID NO: 22430 - DNA, 21 bp, synthetic construct
  source 1..21: mol_type = other DNA
gaccttgaatctcgaaaatgg

SEQ ID NO: 22431 - DNA, 21 bp, synthetic construct
  source 1..21: mol_type = other DNA
taccacaaacttaaccacaac

SEQ ID NO: 22432 - DNA, 21 bp, synthetic construct
  source 1..21: mol_type = other DNA
agggaagagaccgttcgatgg

SEQ ID NO: 22433 - DNA, 21 bp, synthetic construct
  source 1..21: mol_type = other DNA
cgtagcgaatttgtctcttat

SEQ ID NO: 22434 - DNA, 21 bp, synthetic construct
  source 1..21: mol_type = other DNA
agagacgagtttacgtcatat

SEQ ID NO: 22435 - DNA, 21 bp, synthetic construct
  source 1..21: mol_type = other DNA
gacctacgttcggtgacgtgg

SEQ ID NO: 22436 - DNA, 21 bp, synthetic construct
  source 1..21: mol_type = other DNA
ctcagtcgcatttcgacaaac

SEQ ID NO: 22437 - DNA, 21 bp, synthetic construct
  source 1..21: mol_type = other DNA
ctatgcaaaccttgcttaatg

SEQ ID NO: 22438 - DNA, 21 bp, synthetic construct
  source 1..21: mol_type = other DNA
ctatcaaaagctgggcctaat

SEQ ID NO: 22439 - DNA, 21 bp, synthetic construct
  source 1..21: mol_type = other DNA
ctacaccgtctttcgcaggac

SEQ ID NO: 22440 - DNA, 21 bp, synthetic construct
  source 1..21: mol_type = other DNA
cgagaggaaacagtaaggtgg

SEQ ID NO: 22441 - DNA, 21 bp, synthetic construct
  source 1..21: mol_type = other DNA
gtcatgagtacgaatggtatt

SEQ ID NO: 22442 - DNA, 21 bp, synthetic construct
  source 1..21: mol_type = other DNA
tatagtaaagttggggacaat

SEQ ID NO: 22443 - DNA, 21 bp, synthetic construct
  source 1..21: mol_type = other DNA
cgtagcgacgttgtgtatcct

SEQ ID NO: 22444 - DNA, 21 bp, synthetic construct
  source 1..21: mol_type = other DNA
ctcagtcggacaagtgtcaac

SEQ ID NO: 22445 - DNA, 21 bp, synthetic construct
  source 1..21: mol_type = other DNA
cttcacagattaggagtatcc

SEQ ID NO: 22446 - DNA, 21 bp, synthetic construct
  source 1..21: mol_type = other DNA
ctccatagattgagccacgac

SEQ ID NO: 22447 - DNA, 21 bp, synthetic construct
  source 1..21: mol_type = other DNA
atgtgtaagccgtgtttaaca

SEQ ID NO: 22448 - DNA, 21 bp, synthetic construct
  source 1..21: mol_type = other DNA
ttaaccagactgcaccaagat

SEQ ID NO: 22449 - DNA, 21 bp, synthetic construct
  source 1..21: mol_type = other DNA
tttcacaagttgatgtcgaac

SEQ ID NO: 22450 - DNA, 21 bp, synthetic construct
  source 1..21: mol_type = other DNA
ctaagccgaacctcgtatgac

SEQ ID NO: 22451 - DNA, 21 bp, synthetic construct
  source 1..21: mol_type = other DNA
tactcaaaggttggcgccaat

SEQ ID NO: 22452 - DNA, 21 bp, synthetic construct
  source 1..21: mol_type = other DNA
tacttgaagagtcagagcgac

SEQ ID NO: 22453 - DNA, 21 bp, synthetic construct
  source 1..21: mol_type = other DNA
ttagctagaacggcatatgat

SEQ ID NO: 22454 - DNA, 21 bp, synthetic construct
  source 1..21: mol_type = other DNA
atcatggccgatcgtggttgg

SEQ ID NO: 22455 - DNA, 21 bp, synthetic construct
  source 1..21: mol_type = other DNA
ctacataggctaacggctgac

SEQ ID NO: 22456 - DNA, 21 bp, synthetic construct
  source 1..21: mol_type = other DNA
caattagaggcaaggacctgg

SEQ ID NO: 22457 - DNA, 21 bp, synthetic construct
  source 1..21: mol_type = other DNA
cgcagcgacttcgtagtctac

SEQ ID NO: 22458 - DNA, 21 bp, synthetic construct
  source 1..21: mol_type = other DNA
tatcacaaggcaggggagaat

SEQ ID NO: 22459 - DNA, 21 bp, synthetic construct
  source 1..21: mol_type = other DNA
ctcttgagtagcgcgagctgg

SEQ ID NO: 22460 - DNA, 21 bp, synthetic construct
  source 1..21: mol_type = other DNA
aacatcccgggcatgatgtac

SEQ ID NO: 22461 - DNA, 21 bp, synthetic construct
  source 1..21: mol_type = other DNA
atgttatcttcaagcacttgg

SEQ ID NO: 22462 - DNA, 21 bp, synthetic construct
  source 1..21: mol_type = other DNA
tttcataaactcaatgagaac

SEQ ID NO: 22463 - DNA, 21 bp, synthetic construct
  source 1..21: mol_type = other DNA
tacgcaaaaaccggatacaat

SEQ ID NO: 22464 - DNA, 21 bp, synthetic construct
  source 1..21: mol_type = other DNA
tatttaaagagtgataaatcg

SEQ ID NO: 22465 - DNA, 21 bp, synthetic construct
  source 1..21: mol_type = other DNA
tatagcaagttgaatgtcaac

SEQ ID NO: 22466 - DNA, 21 bp, synthetic construct
  source 1..21: mol_type = other DNA
caactagaaagtcgttcgtgg

SEQ ID NO: 22467 - DNA, 21 bp, synthetic construct
  source 1..21: mol_type = other DNA
tactcgaagctaggagtcaat

SEQ ID NO: 22468 - DNA, 21 bp, synthetic construct
  source 1..21: mol_type = other DNA
agggaagatttcgtgagctgg

SEQ ID NO: 22469 - DNA, 21 bp, synthetic construct
  source 1..21: mol_type = other DNA
gagatgaaggctcgtacttgg

SEQ ID NO: 22470 - DNA, 21 bp, synthetic construct
  source 1..21: mol_type = other DNA
tacttctcaggtgtcaccgag

SEQ ID NO: 22471 - DNA, 21 bp, synthetic construct
  source 1..21: mol_type = other DNA
tactttgcggggaaaaaagat

SEQ ID NO: 22472 - DNA, 21 bp, synthetic construct
  source 1..21: mol_type = other DNA
cccatgggctcttcatcctgg

SEQ ID NO: 22473 - DNA, 21 bp, synthetic construct
  source 1..21: mol_type = other DNA
ttcagcaaattaaaccataac

SEQ ID NO: 22474 - DNA, 21 bp, synthetic construct
  source 1..21: mol_type = other DNA
gttgtaagcacaaacggtgtg

SEQ ID NO: 22475 - DNA, 21 bp, synthetic construct
  source 1..21: mol_type = other DNA
ggaggagaaagctcgagctgg

SEQ ID NO: 22476 - DNA, 21 bp, synthetic construct
  source 1..21: mol_type = other DNA
tggtggtcggggattactgag

SEQ ID NO: 22477 - DNA, 21 bp, synthetic construct
  source 1..21: mol_type = other DNA
cgaacaggagacgcgtatcct

SEQ ID NO: 22478 - DNA, 21 bp, synthetic construct
  source 1..21: mol_type = other DNA
agagacgaaaatgtgtttcct

SEQ ID NO: 22479 - DNA, 21 bp, synthetic construct
  source 1..21: mol_type = other DNA
gtcgcgactcgcggctgggac

SEQ ID NO: 22480 - DNA, 21 bp, synthetic construct
  source 1..21: mol_type = other DNA
gtgatggaatctagggtatgg

SEQ ID NO: 22481 - DNA, 21 bp, synthetic construct
  source 1..21: mol_type = other DNA
aaggatgactactccacttat

SEQ ID NO: 22482 - DNA, 21 bp, synthetic construct
  source 1..21: mol_type = other DNA
tacctgaagtcccagtcgatg

SEQ ID NO: 22483 - DNA, 21 bp, synthetic construct
  source 1..21: mol_type = other DNA
ccgatgtcctcgcatggttgg

SEQ ID NO: 22484 - DNA, 21 bp, synthetic construct
  source 1..21: mol_type = other DNA
gaaatgtcgagtattaagtgg

SEQ ID NO: 22485 - DNA, 21 bp, synthetic construct
  source 1..21: mol_type = other DNA
gttatgagctcacaatcgtgg

SEQ ID NO: 22486 - DNA, 21 bp, synthetic construct
  source 1..21: mol_type = other DNA
aaaggcgagtccagggattgg

SEQ ID NO: 22487 - DNA, 21 bp, synthetic construct
  source 1..21: mol_type = other DNA
ctacataggttgtcaatcccc

SEQ ID NO: 22488 - DNA, 21 bp, synthetic construct
  source 1..21: mol_type = other DNA
ttatccaggttgagtcctata

SEQ ID NO: 22489 - DNA, 21 bp, synthetic construct
  source 1..21: mol_type = other DNA
tatgctaaaacagggcacaac

SEQ ID NO: 22490 - DNA, 21 bp, synthetic construct
  source 1..21: mol_type = other DNA
ttgctctcctctgcctcctgg

SEQ ID NO: 22491 - DNA, 21 bp, synthetic construct
  source 1..21: mol_type = other DNA
agattaccaacagtctttccg

SEQ ID NO: 22492 - DNA, 21 bp, synthetic construct
  source 1..21: mol_type = other DNA
gagcccgaacgtggctggttt

SEQ ID NO: 22493 - DNA, 21 bp, synthetic construct
  source 1..21: mol_type = other DNA
agactcaacgacgtataccct

SEQ ID NO: 22494 - DNA, 21 bp, synthetic construct
  source 1..21: mol_type = other DNA
gatttgcagtcatccacctgg

SEQ ID NO: 22495 - DNA, 21 bp, synthetic construct
  source 1..21: mol_type = other DNA
tataccaaactacagtacaat

SEQ ID NO: 22496 - DNA, 21 bp, synthetic construct
  source 1..21: mol_type = other DNA
ttagcacgccaatcttataac

SEQ ID NO: 22497 - DNA, 21 bp, synthetic construct
  source 1..21: mol_type = other DNA
ttaagtagaacgtcggataat

SEQ ID NO: 22498 - DNA, 21 bp, synthetic construct
  source 1..21: mol_type = other DNA
ttccacaagaagggacccgat

SEQ ID NO: 22499 - DNA, 21 bp, synthetic construct
  source 1..21: mol_type = other DNA
agcgaaagcacaaacggaaga

SEQ ID NO: 22500 - DNA, 21 bp, synthetic construct
  source 1..21: mol_type = other DNA
ctggcccgtcagagctataat

SEQ ID NO: 22501 - DNA, 21 bp, synthetic construct
  source 1..21: mol_type = other DNA
ttcagtaaagttgggcctaat

SEQ ID NO: 22502 - DNA, 21 bp, synthetic construct
  source 1..21: mol_type = other DNA
cgagaggaaggggtggcttgg

SEQ ID NO: 22503 - DNA, 21 bp, synthetic construct
  source 1..21: mol_type = other DNA
tatgtcagaattggtcccaac

SEQ ID NO: 22504 - DNA, 21 bp, synthetic construct
  source 1..21: mol_type = other DNA
gtgtcgagtaccaacggagtg

SEQ ID NO: 22505 - DNA, 21 bp, synthetic construct
  source 1..21: mol_type = other DNA
gtagaaagctcaaatggtgta

SEQ ID NO: 22506 - DNA, 21 bp, synthetic construct
  source 1..21: mol_type = other DNA
cgcctaatcgatgtctacccg

SEQ ID NO: 22507 - DNA, 21 bp, synthetic construct
  source 1..21: mol_type = other DNA
acccactcaaccaatggggta

SEQ ID NO: 22508 - DNA, 21 bp, synthetic construct
  source 1..21: mol_type = other DNA
cgcggcgatgacgtctatccc

SEQ ID NO: 22509 - DNA, 21 bp, synthetic construct
  source 1..21: mol_type = other DNA
ctgcacaaattgcaggtcgac

SEQ ID NO: 22510 - DNA, 21 bp, synthetic construct
  source 1..21: mol_type = other DNA
cgaggtttagagggcatggac

SEQ ID NO: 22511 - DNA, 21 bp, synthetic construct
  source 1..21: mol_type = other DNA
cgcatgacggatgcataccca

SEQ ID NO: 22512 - DNA, 21 bp, synthetic construct
  source 1..21: mol_type = other DNA
agattggagtcgacacattgg

SEQ ID NO: 22513 - DNA, 21 bp, synthetic construct
  source 1..21: mol_type = other DNA
tacgctaaatcgggatttaac

SEQ ID NO: 22514 - DNA, 21 bp, synthetic construct
  source 1..21: mol_type = other DNA
ctttacgacgggaccaatgcc

SEQ ID NO: 22515 - DNA, 21 bp, synthetic construct
  source 1..21: mol_type = other DNA
cgtaacgacgatgtgttcccg

SEQ ID NO: 22516 - DNA, 21 bp, synthetic construct
  source 1..21: mol_type = other DNA
ctacacaaattgacgacagat

SEQ ID NO: 22517 - DNA, 21 bp, synthetic construct
  source 1..21: mol_type = other DNA
ttaagccgccttagtcctgac

SEQ ID NO: 22518 - DNA, 21 bp, synthetic construct
  source 1..21: mol_type = other DNA
tatgtacgttccgatacgggg

SEQ ID NO: 22519 - DNA, 21 bp, synthetic construct
  source 1..21: mol_type = other DNA
ttgtcgcggacttccctcaac

SEQ ID NO: 22520 - DNA, 21 bp, synthetic construct
  source 1..21: mol_type = other DNA
tactggtcgggtatcatcgaa

SEQ ID NO: 22521 - DNA, 21 bp, synthetic construct
  source 1..21: mol_type = other DNA
tacagtaaggccggagaaaat

SEQ ID NO: 22522 - DNA, 21 bp, synthetic construct
  source 1..21: mol_type = other DNA
tattctaagacaggtatgaac

SEQ ID NO: 22523 - DNA, 21 bp, synthetic construct
  source 1..21: mol_type = other DNA
aaagatgactacactacgtgg

SEQ ID NO: 22524 - DNA, 21 bp, synthetic construct
  source 1..21: mol_type = other DNA
ctcacccgtctcagtcctacg

SEQ ID NO: 22525 - DNA, 21 bp, synthetic construct
  source 1..21: mol_type = other DNA
cgtaccgatcacgttttcccc

SEQ ID NO: 22526 - DNA, 21 bp, synthetic construct
  source 1..21: mol_type = other DNA
agaaccaaagaggtatacccc

SEQ ID NO: 22527 - DNA, 21 bp, synthetic construct
  source 1..21: mol_type = other DNA
tattccaaaatcggagacaat

SEQ ID NO: 22528 - DNA, 21 bp, synthetic construct
  source 1..21: mol_type = other DNA
gttgaaagctttaacggccgt

SEQ ID NO: 22529 - DNA, 21 bp, synthetic construct
  source 1..21: mol_type = other DNA
aaggatgaattcctcagctgg

SEQ ID NO: 22530 - DNA, 21 bp, synthetic construct
  source 1..21: mol_type = other DNA
ataactagcaccaatggggtc

SEQ ID NO: 22531 - DNA, 21 bp, synthetic construct
  source 1..21: mol_type = other DNA
tatttcacaggaaagatcgcg

SEQ ID NO: 22532 - DNA, 21 bp, synthetic construct
  source 1..21: mol_type = other DNA
ttgtcacgtataagcaataat

SEQ ID NO: 22533 - DNA, 21 bp, synthetic construct
  source 1..21: mol_type = other DNA
gtcaatagtactaatggaatt

SEQ ID NO: 22534 - DNA, 21 bp, synthetic construct
  source 1..21: mol_type = other DNA
ctttcaaggctcagccccaac

SEQ ID NO: 22535 - DNA, 21 bp, synthetic construct
  source 1..21: mol_type = other DNA
ttacacaggctgtcgcctaac

SEQ ID NO: 22536 - DNA, 21 bp, synthetic construct
  source 1..21: mol_type = other DNA
ctatcgcggacatcccataat

SEQ ID NO: 22537 - DNA, 21 bp, synthetic construct
  source 1..21: mol_type = other DNA
ttacatcgactcagtatggat

SEQ ID NO: 22538 - DNA, 21 bp, synthetic construct
  source 1..21: mol_type = other DNA
tatagtaaggcgaataacaat

SEQ ID NO: 22539 - DNA, 21 bp, synthetic construct
  source 1..21: mol_type = other DNA
tatagcaaactgggggaaaac

SEQ ID NO: 22540 - DNA, 21 bp, synthetic construct
  source 1..21: mol_type = other DNA
tattttactggaaagcacgag

SEQ ID NO: 22541 - DNA, 21 bp, synthetic construct
  source 1..21: mol_type = other DNA
tatagtaaaatcgggtataat

SEQ ID NO: 22542 - DNA, 21 bp, synthetic construct
  source 1..21: mol_type = other DNA
gtcaacagcacaaatggcgtc

SEQ ID NO: 22543 - DNA, 21 bp, synthetic construct
  source 1..21: mol_type = other DNA
cctatggaatcgttgaaatgg

SEQ ID NO: 22544 - DNA, 21 bp, synthetic construct
  source 1..21: mol_type = other DNA
cttcaccgtaagggaatagac

SEQ ID NO: 22545 - DNA, 21 bp, synthetic construct
  source 1..21: mol_type = other DNA
tacttaaaatcacaggcctcg

SEQ ID NO: 22546 - DNA, 21 bp, synthetic construct
  source 1..21: mol_type = other DNA
cgcgaagatcacgtaagttgg

SEQ ID NO: 22547 - DNA, 21 bp, synthetic construct
  source 1..21: mol_type = other DNA
tacagtcgcttaaatgatgat

SEQ ID NO: 22548 - DNA, 21 bp, synthetic construct
  source 1..21: mol_type = other DNA
cggactgtcacagtgtacccg

SEQ ID NO: 22549 - DNA, 21 bp, synthetic construct
  source 1..21: mol_type = other DNA
tatttcactgggaagttggac

SEQ ID NO: 22550 - DNA, 21 bp, synthetic construct
  source 1..21: mol_type = other DNA
gtcaatgattacgttacatat

SEQ ID NO: 22551 - DNA, 21 bp, synthetic construct
  source 1..21: mol_type = other DNA
tatgtaaagagctctaataat

SEQ ID NO: 22552 - DNA, 21 bp, synthetic construct
  source 1..21: mol_type = other DNA
agagccctcgaggggcgtgac

SEQ ID NO: 22553 - DNA, 21 bp, synthetic construct
  source 1..21: mol_type = other DNA
aggcctaatgactgtaaaact

SEQ ID NO: 22554 - DNA, 21 bp, synthetic construct
  source 1..21: mol_type = other DNA
aggacgccggtcgtctaccct

SEQ ID NO: 22555 - DNA, 21 bp, synthetic construct
  source 1..21: mol_type = other DNA
ctcgccaagacggcgcataac

SEQ ID NO: 22556 - DNA, 21 bp, synthetic construct
  source 1..21: mol_type = other DNA
acgttgagtagtcagacgtgg

SEQ ID NO: 22557 - DNA, 21 bp, synthetic construct
  source 1..21: mol_type = other DNA
ttgatgagttcggcgaaatgg

SEQ ID NO: 22558 - DNA, 21 bp, synthetic construct
  source 1..21: mol_type = other DNA
gagctccagtcctctaagtgg

SEQ ID NO: 22559 - DNA, 21 bp, synthetic construct
  source 1..21: mol_type = other DNA
ttatcacgcgtaagcgtgaat

SEQ ID NO: 22560 - DNA, 21 bp, synthetic construct
  source 1..21: mol_type = other DNA
tactttacaggcattcacgct

SEQ ID NO: 22561 - DNA, 21 bp, synthetic construct
  source 1..21: mol_type = other DNA
ctagcccgtaccgcactcaac

SEQ ID NO: 22562 - DNA, 21 bp, synthetic construct
  source 1..21: mol_type = other DNA
ctcgctaaaacggggcataac

SEQ ID NO: 22563 - DNA, 21 bp, synthetic construct
  source 1..21: mol_type = other DNA
catagccgtctggggccggat

SEQ ID NO: 22564 - DNA, 21 bp, synthetic construct
  source 1..21: mol_type = other DNA
gtggctacgagggggtgggat

SEQ ID NO: 22565 - DNA, 21 bp, synthetic construct
  source 1..21: mol_type = other DNA
agggatgaggaggtatatccg

SEQ ID NO: 22566 - DNA, 21 bp, synthetic construct
  source 1..21: mol_type = other DNA
ttgagcaggataggtacgaac

SEQ ID NO: 22567 - DNA, 21 bp, synthetic construct
  source 1..21: mol_type = other DNA
tacagcaagatcggacagaac

SEQ ID NO: 22568 - DNA, 21 bp, synthetic construct
  source 1..21: mol_type = other DNA
tacttcgctgggcgtatcgca

SEQ ID NO: 22569 - DNA, 21 bp, synthetic construct
  source 1..21: mol_type = other DNA
aaagacgactacacgacgtac

SEQ ID NO: 22570 - DNA, 21 bp, synthetic construct
  source 1..21: mol_type = other DNA
tacagcaaagttggtcaaaat

SEQ ID NO: 22571 - DNA, 21 bp, synthetic construct
  source 1..21: mol_type = other DNA
tattttacaggagtgattccc

SEQ ID NO: 22572 - DNA, 21 bp, synthetic construct
  source 1..21: mol_type = other DNA
ttgagcaggatagggcatgac

SEQ ID NO: 22573 - DNA, 21 bp, synthetic construct
  source 1..21: mol_type = other DNA
tacagcaagatcggagtcaat

SEQ ID NO: 22574 - DNA, 21 bp, synthetic construct
  source 1..21: mol_type = other DNA
cgtggtgaagacgtctacccc

SEQ ID NO: 22575 - DNA, 21 bp, synthetic construct
  source 1..21: mol_type = other DNA
ctccatcggctgagttatgac

SEQ ID NO: 22576 - DNA, 21 bp, synthetic construct
  source 1..21: mol_type = other DNA
ttgtcgaaaataggcaataat

SEQ ID NO: 22577 - DNA, 21 bp, synthetic construct
  source 1..21: mol_type = other DNA
gtagcgactaagggcatcgga

SEQ ID NO: 22578 - DNA, 21 bp, synthetic construct
  source 1..21: mol_type = other DNA
tatctaaagtcgcagagttca

SEQ ID NO: 22579 - DNA, 21 bp, synthetic construct
  source 1..21: mol_type = other DNA
atcatgtcatcagcaaactgg

SEQ ID NO: 22580 - DNA, 21 bp, synthetic construct
  source 1..21: mol_type = other DNA
atgttgagcagttcgacgtgg

SEQ ID NO: 22581 - DNA, 21 bp, synthetic construct
  source 1..21: mol_type = other DNA
atggagagcacgaatgggagg

SEQ ID NO: 22582 - DNA, 21 bp, synthetic construct
  source 1..21: mol_type = other DNA
tactccaaagcaaacgagaat

SEQ ID NO: 22583 - DNA, 21 bp, synthetic construct
  source 1..21: mol_type = other DNA
tacttcaccggacagttagag

SEQ ID NO: 22584 - DNA, 21 bp, synthetic construct
  source 1..21: mol_type = other DNA
gaccttaccagccgagagtgg

SEQ ID NO: 22585 - DNA, 21 bp, synthetic construct
  source 1..21: mol_type = other DNA
tactcgaagatgaacgataac

SEQ ID NO: 22586 - DNA, 21 bp, synthetic construct
  source 1..21: mol_type = other DNA
ctaagtcgtcttagttcagat

SEQ ID NO: 22587 - DNA, 21 bp, synthetic construct
  source 1..21: mol_type = other DNA
tatttcagtggtattcagctt

SEQ ID NO: 22588 - DNA, 21 bp, synthetic construct
  source 1..21: mol_type = other DNA
ctcagtagagtgtcggtaaac

SEQ ID NO: 22589 - DNA, 21 bp, synthetic construct
  source 1..21: mol_type = other DNA
aaatcggatttcgttacctat

SEQ ID NO: 22590 - DNA, 21 bp, synthetic construct
  source 1..21: mol_type = other DNA
gacttgcgtgcttctacgtgg

SEQ ID NO: 22591 - DNA, 21 bp, synthetic construct
  source 1..21: mol_type = other DNA
ctgcataggctctccgatcca

SEQ ID NO: 22592 - DNA, 21 bp, synthetic construct
  source 1..21: mol_type = other DNA
cgtgacgaaaccgtttttcca

SEQ ID NO: 22593 - DNA, 21 bp, synthetic construct
  source 1..21: mol_type = other DNA
tatagcaagatagggtttaac

SEQ ID NO: 22594 - DNA, 21 bp, synthetic construct
  source 1..21: mol_type = other DNA
atcttagcaagcgctacatgg

SEQ ID NO: 22595 - DNA, 21 bp, synthetic construct
  source 1..21: mol_type = other DNA
agagaggagacggtatactgg

SEQ ID NO: 22596 - DNA, 21 bp, synthetic construct
  source 1..21: mol_type = other DNA
tatttcagcggcaagaaagaa

SEQ ID NO: 22597 - DNA, 21 bp, synthetic construct
  source 1..21: mol_type = other DNA
tatcataaacttaatgctaac

SEQ ID NO: 22598 - DNA, 21 bp, synthetic construct
  source 1..21: mol_type = other DNA
tacgcaaaaactggcttcaat

SEQ ID NO: 22599 - DNA, 21 bp, synthetic construct
  source 1..21: mol_type = other DNA
ttggcaagaaatggatggaat

SEQ ID NO: 22600 - DNA, 21 bp, synthetic construct
  source 1..21: mol_type = other DNA
tattttacaggcatcactagt

SEQ ID NO: 22601 - DNA, 21 bp, synthetic construct
  source 1..21: mol_type = other DNA
tatctaaaaagtcagagcaat

SEQ ID NO: 22602 - DNA, 21 bp, synthetic construct
  source 1..21: mol_type = other DNA
tatttcactggaaaagctgat

SEQ ID NO: 22603 - DNA, 21 bp, synthetic construct
  source 1..21: mol_type = other DNA
tacttcaccggaatacaatcc

SEQ ID NO: 22604 - DNA, 21 bp, synthetic construct
  source 1..21: mol_type = other DNA
ctagatgactacacaacgtgg

SEQ ID NO: 22605 - DNA, 21 bp, synthetic construct
  source 1..21: mol_type = other DNA
aaagatgattatactgtgttc

SEQ ID NO: 22606 - DNA, 21 bp, synthetic construct
  source 1..21: mol_type = other DNA
tttagtaagttgaattccaat

SEQ ID NO: 22607 - DNA, 21 bp, synthetic construct
  source 1..21: mol_type = other DNA
tactccaaagccaatgcaaat

SEQ ID NO: 22608 - DNA, 21 bp, synthetic construct
  source 1..21: mol_type = other DNA
gacttgagcagtcaaaaatgg

SEQ ID NO: 22609 - DNA, 21 bp, synthetic construct
  source 1..21: mol_type = other DNA
tactcaaaggctaatttgaat

SEQ ID NO: 22610 - DNA, 21 bp, synthetic construct
  source 1..21: mol_type = other DNA
ctacaccgcctccagttagat

SEQ ID NO: 22611 - DNA, 21 bp, synthetic construct
  source 1..21: mol_type = other DNA
taccacaaggcacagatgaac

SEQ ID NO: 22612 - DNA, 21 bp, synthetic construct
  source 1..21: mol_type = other DNA
cgcatggtggatgttttcccc

SEQ ID NO: 22613 - DNA, 21 bp, synthetic construct
  source 1..21: mol_type = other DNA
cgtctcgaaagtgcgaactgg

SEQ ID NO: 22614 - DNA, 21 bp, synthetic construct
  source 1..21: mol_type = other DNA
tatgctaaaatgggccctaat

SEQ ID NO: 22615 - DNA, 21 bp, synthetic construct
  source 1..21: mol_type = other DNA
tatttctctggtaagattgaa

SEQ ID NO: 22616 - DNA, 21 bp, synthetic construct
  source 1..21: mol_type = other DNA
gtgctctctagttctcagtgg

SEQ ID NO: 22617 - DNA, 21 bp, synthetic construct
  source 1..21: mol_type = other DNA
ttgcaccggctctcgcacgat

SEQ ID NO: 22618 - DNA, 21 bp, synthetic construct
  source 1..21: mol_type = other DNA
tattttagcggcgtcaaagcg

SEQ ID NO: 22619 - DNA, 21 bp, synthetic construct
  source 1..21: mol_type = other DNA
ctgcaccgcttacaggacaac

SEQ ID NO: 22620 - DNA, 21 bp, synthetic construct
  source 1..21: mol_type = other DNA
tccgatggatgtagcaagtgg

SEQ ID NO: 22621 - DNA, 21 bp, synthetic construct
  source 1..21: mol_type = other DNA
tattttgcaggccgcatcgca

SEQ ID NO: 22622 - DNA, 21 bp, synthetic construct
  source 1..21: mol_type = other DNA
tacagtaaaactggaatgaat

SEQ ID NO: 22623 - DNA, 21 bp, synthetic construct
  source 1..21: mol_type = other DNA
tatttttccggtgtaaaggat

SEQ ID NO: 22624 - DNA, 21 bp, synthetic construct
  source 1..21: mol_type = other DNA
tactttacaggtcaaacggaa

SEQ ID NO: 22625 - DNA, 21 bp, synthetic construct
  source 1..21: mol_type = other DNA
cgaacctacgattcgttcgtg

SEQ ID NO: 22626 - DNA, 21 bp, synthetic construct
  source 1..21: mol_type = other DNA
ctttgcaggccttgtggcgaa

SEQ ID NO: 22627 - DNA, 21 bp, synthetic construct
  source 1..21: mol_type = other DNA
tactcgaaaatcgggctaaac

SEQ ID NO: 22628 - DNA, 21 bp, synthetic construct
  source 1..21: mol_type = other DNA
tacacaaaattaaacccgaac

SEQ ID NO: 22629 - DNA, 21 bp, synthetic construct
  source 1..21: mol_type = other DNA
tggtttagcgggataaaggaa

SEQ ID NO: 22630 - DNA, 21 bp, synthetic construct
  source 1..21: mol_type = other DNA
cttcataggttgggcgatgac

SEQ ID NO: 22631 - DNA, 21 bp, synthetic construct
  source 1..21: mol_type = other DNA
aggttagagtccgctaattgg

SEQ ID NO: 22632 - DNA, 21 bp, synthetic construct
  source 1..21: mol_type = other DNA
aacatggcgtccgcaaagtgg

SEQ ID NO: 22633 - DNA, 21 bp, synthetic construct
  source 1..21: mol_type = other DNA
tatttctctaaaatcgttgca

SEQ ID NO: 22634 - DNA, 21 bp, synthetic construct
  source 1..21: mol_type = other DNA
ctacaccgtttgagtgaggac

SEQ ID NO: 22635 - DNA, 21 bp, synthetic construct
  source 1..21: mol_type = other DNA
gtatggtcgacaaatggccgt

SEQ ID NO: 22636 - DNA, 21 bp, synthetic construct
  source 1..21: mol_type = other DNA
gtattgagcgatcgaaattgg

SEQ ID NO: 22637 - DNA, 21 bp, synthetic construct
  source 1..21: mol_type = other DNA
agggatgaattcacaagctac

SEQ ID NO: 22638 - DNA, 21 bp, synthetic construct
  source 1..21: mol_type = other DNA
tacagtaagaccgggagcaac

SEQ ID NO: 22639 - DNA, 21 bp, synthetic construct
  source 1..21: mol_type = other DNA
aaaatgcctagtagggactgg

SEQ ID NO: 22640 - DNA, 21 bp, synthetic construct
  source 1..21: mol_type = other DNA
acggaaagcactaacggacgt

SEQ ID NO: 22641 - DNA, 21 bp, synthetic construct
  source 1..21: mol_type = other DNA
cggtccgagtttgtggtttat

SEQ ID NO: 22642 - DNA, 21 bp, synthetic construct
  source 1..21: mol_type = other DNA
tattttactggagtgctcgcc

SEQ ID NO: 22643 - DNA, 21 bp, synthetic construct
  source 1..21: mol_type = other DNA
taccataagatgatgcttaac

SEQ ID NO: 22644 - DNA, 21 bp, synthetic construct
  source 1..21: mol_type = other DNA
gatacttatgatagctaccct

SEQ ID NO: 22645 - DNA, 21 bp, synthetic construct
  source 1..21: mol_type = other DNA
tactttgcagggaaaattgcg

SEQ ID NO: 22646 - DNA, 21 bp, synthetic construct
  source 1..21: mol_type = other DNA
aagggagagtcgagagagtgg

SEQ ID NO: 22647 - DNA, 21 bp, synthetic construct
  source 1..21: mol_type = other DNA
tatagcaagactggagcgaac

SEQ ID NO: 22648 - DNA, 21 bp, synthetic construct
  source 1..21: mol_type = other DNA
aaattgcaagagcgtacctgg

SEQ ID NO: 22649 - DNA, 21 bp, synthetic construct
  source 1..21: mol_type = other DNA
cgtgacatggaagtttatccg

SEQ ID NO: 22650 - DNA, 21 bp, synthetic construct
  source 1..21: mol_type = other DNA
ggtggggagtcgtcatcatgg

SEQ ID NO: 22651 - DNA, 21 bp, synthetic construct
  source 1..21: mol_type = other DNA
tactttacaggcaagactgag

SEQ ID NO: 22652 - DNA, 21 bp, synthetic construct
  source 1..21: mol_type = other DNA
ttcagcaaagttggctacaac

SEQ ID NO: 22653 - DNA, 21 bp, synthetic construct
  source 1..21: mol_type = other DNA
tacagcaagttcggtcccaac

SEQ ID NO: 22654 - DNA, 21 bp, synthetic construct
  source 1..21: mol_type = other DNA
tatttaaaatatgatccgtta

SEQ ID NO: 22655 - DNA, 21 bp, synthetic construct
  source 1..21: mol_type = other DNA
aacgatgggtcgagcaagtgg

SEQ ID NO: 22656 - DNA, 21 bp, synthetic construct
  source 1..21: mol_type = other DNA
tacagcaagagcggcttaaat

SEQ ID NO: 22657 - DNA, 21 bp, synthetic construct
  source 1..21: mol_type = other DNA
tactttacagggaagcttgac

SEQ ID NO: 22658 - DNA, 21 bp, synthetic construct
  source 1..21: mol_type = other DNA
tatttcacgggcacagtcgat

SEQ ID NO: 22659 - DNA, 21 bp, synthetic construct
  source 1..21: mol_type = other DNA
cgagaggaaggagtgtcatgg

SEQ ID NO: 22660 - DNA, 21 bp, synthetic construct
  source 1..21: mol_type = other DNA
ctaacgcgtctgtctcccgac

SEQ ID NO: 22661 - DNA, 21 bp, synthetic construct
  source 1..21: mol_type = other DNA
ttgcaccgcttgactgaggac

SEQ ID NO: 22662 - DNA, 21 bp, synthetic construct
  source 1..21: mol_type = other DNA
aggactggtgatgcataccca

SEQ ID NO: 22663 - DNA, 21 bp, synthetic construct
  source 1..21: mol_type = other DNA
agagacgattttgtaaagtgg

SEQ ID NO: 22664 - DNA, 21 bp, synthetic construct
  source 1..21: mol_type = other DNA
ttctccagactgaacgatgat

SEQ ID NO: 22665 - DNA, 21 bp, synthetic construct
  source 1..21: mol_type = other DNA
aggttgtcatcgcaaacatgg

SEQ ID NO: 22666 - DNA, 21 bp, synthetic construct
  source 1..21: mol_type = other DNA
cgctcggaatttgtgtcatac

SEQ ID NO: 22667 - DNA, 21 bp, synthetic construct
  source 1..21: mol_type = other DNA
tatagtaaggctaacgcaaac

SEQ ID NO: 22668 - DNA, 21 bp, synthetic construct
  source 1..21: mol_type = other DNA
acgcaaagtactaacggtgtt

SEQ ID NO: 22669 - DNA, 21 bp, synthetic construct
  source 1..21: mol_type = other DNA
tattcaaaagttggcagcaac

SEQ ID NO: 22670 - DNA, 21 bp, synthetic construct
  source 1..21: mol_type = other DNA
attcatagtactaacgggata

SEQ ID NO: 22671 - DNA, 21 bp, synthetic construct
  source 1..21: mol_type = other DNA
tacgtcagaagtgacaccggc

SEQ ID NO: 22672 - DNA, 21 bp, synthetic construct
  source 1..21: mol_type = other DNA
ttgttgcaaagtagtacatgg

SEQ ID NO: 22673 - DNA, 21 bp, synthetic construct
  source 1..21: mol_type = other DNA
cgtagcgaagagacctatcct

SEQ ID NO: 22674 - DNA, 21 bp, synthetic construct
  source 1..21: mol_type = other DNA
agaaccgcacaagtctatcca

SEQ ID NO: 22675 - DNA, 21 bp, synthetic construct
  source 1..21: mol_type = other DNA
tatataaagtcagacaaaatg

SEQ ID NO: 22676 - DNA, 21 bp, synthetic construct
  source 1..21: mol_type = other DNA
ctacatcgtctgggttatgat

SEQ ID NO: 22677 - DNA, 21 bp, synthetic construct
  source 1..21: mol_type = other DNA
gtcaaggggtcgtgtgagcaa

SEQ ID NO: 22678 - DNA, 21 bp, synthetic construct
  source 1..21: mol_type = other DNA
gtcgtgtcaacgaatggagtc

SEQ ID NO: 22679 - DNA, 21 bp, synthetic construct
  source 1..21: mol_type = other DNA
attttggcctcacgtgattgg

SEQ ID NO: 22680 - DNA, 21 bp, synthetic construct
  source 1..21: mol_type = other DNA
tactttatgggggtcaaagag

SEQ ID NO: 22681 - DNA, 21 bp, synthetic construct
  source 1..21: mol_type = other DNA
tggttctctggaatcaaagag

SEQ ID NO: 22682 - DNA, 21 bp, synthetic construct
  source 1..21: mol_type = other DNA
cggatgagcgacgctttccct

SEQ ID NO: 22683 - DNA, 21 bp, synthetic construct
  source 1..21: mol_type = other DNA
cggttgagcgacgcttatccg

SEQ ID NO: 22684 - DNA, 21 bp, synthetic construct
  source 1..21: mol_type = other DNA
cacgagagtacaaacggggtt

SEQ ID NO: 22685 - DNA, 21 bp, synthetic construct
  source 1..21: mol_type = other DNA
cccatgggatcgagtcaatgg

SEQ ID NO: 22686 - DNA, 21 bp, synthetic construct
  source 1..21: mol_type = other DNA
tatttcaccggccaactcgac

SEQ ID NO: 22687 - DNA, 21 bp, synthetic construct
  source 1..21: mol_type = other DNA
cgtgatgaattccatagtttt

SEQ ID NO: 22688 - DNA, 21 bp, synthetic construct
  source 1..21: mol_type = other DNA
tacctcaagagccaagcgagt

SEQ ID NO: 22689 - DNA, 21 bp, synthetic construct
  source 1..21: mol_type = other DNA
tactttagcaagattgtcgcg

SEQ ID NO: 22690 - DNA, 21 bp, synthetic construct
  source 1..21: mol_type = other DNA
tatcacaaattaaacaacaac

SEQ ID NO: 22691 - DNA, 21 bp, synthetic construct
  source 1..21: mol_type = other DNA
agagaggaatacgtgacgtac

SEQ ID NO: 22692 - DNA, 21 bp, synthetic construct
  source 1..21: mol_type = other DNA
gtagacagcacaaacggcgta

SEQ ID NO: 22693 - DNA, 21 bp, synthetic construct
  source 1..21: mol_type = other DNA
tactccaaaataggttcaaat

SEQ ID NO: 22694 - DNA, 21 bp, synthetic construct
  source 1..21: mol_type = other DNA
aggacacccacaacataccca

SEQ ID NO: 22695 - DNA, 21 bp, synthetic construct
  source 1..21: mol_type = other DNA
aaggatgactatagcacttgg

SEQ ID NO: 22696 - DNA, 21 bp, synthetic construct
  source 1..21: mol_type = other DNA
tattcgaagctcggaggtaat

SEQ ID NO: 22697 - DNA, 21 bp, synthetic construct
  source 1..21: mol_type = other DNA
cgcatgccagacgcttacccc

SEQ ID NO: 22698 - DNA, 21 bp, synthetic construct
  source 1..21: mol_type = other DNA
cgcgatgaacatgtttttcca

SEQ ID NO: 22699 - DNA, 21 bp, synthetic construct
  source 1..21: mol_type = other DNA
ctgagtcgtctttcccctctg

SEQ ID NO: 22700 - DNA, 21 bp, synthetic construct
  source 1..21: mol_type = other DNA
aaagacgaatttatgtcctac

SEQ ID NO: 22701 - DNA, 21 bp, synthetic construct
  source 1..21: mol_type = other DNA
attgggatcaaggggtgggat

SEQ ID NO: 22702 - DNA, 21 bp, synthetic construct
  source 1..21: mol_type = other DNA
ttagccagaactgctcccgat

SEQ ID NO: 22703 - DNA, 21 bp, synthetic construct
  source 1..21: mol_type = other DNA
aaggatgattatactacttat

SEQ ID NO: 22704 - DNA, 21 bp, synthetic construct
  source 1..21: mol_type = other DNA
taccataaacttaacgttgtg

SEQ ID NO: 22705 - DNA, 21 bp, synthetic construct
  source 1..21: mol_type = other DNA
tacacaaaatccgacaacagg

SEQ ID NO: 22706 - DNA, 21 bp, synthetic construct
  source 1..21: mol_type = other DNA
cgtatgtcagacgcctacccc

SEQ ID NO: 22707 - DNA, 21 bp, synthetic construct
  source 1..21: mol_type = other DNA
ctcagcaaagtcggaacgaat

SEQ ID NO: 22708 - DNA, 21 bp, synthetic construct
  source 1..21: mol_type = other DNA
ctgtgtcgtccgtgcttggaa

SEQ ID NO: 22709 - DNA, 21 bp, synthetic construct
  source 1..21: mol_type = other DNA
tattttactggtcatatcgaa

SEQ ID NO: 22710 - DNA, 21 bp, synthetic construct
  source 1..21: mol_type = other DNA
atggatgattataccatgtat

SEQ ID NO: 22711 - DNA, 21 bp, synthetic construct
  source 1..21: mol_type = other DNA
gatttggaaagtcgtgattgg

SEQ ID NO: 22712 - DNA, 21 bp, synthetic construct
  source 1..21: mol_type = other DNA
ctcgaaagtacaaacggaatt

SEQ ID NO: 22713 - DNA, 21 bp, synthetic construct
  source 1..21: mol_type = other DNA
tactcaaagatcggcaataac

SEQ ID NO: 22714 - DNA, 21 bp, synthetic construct
  source 1..21: mol_type = other DNA
aaagacgaatttgtgtcattt

SEQ ID NO: 22715 - DNA, 21 bp, synthetic construct
  source 1..21: mol_type = other DNA
tactttacaggcaccgtcgcg

SEQ ID NO: 22716 - DNA, 21 bp, synthetic construct
  source 1..21: mol_type = other DNA
gatatggagtcacgcgtttgg

SEQ ID NO: 22717 - DNA, 21 bp, synthetic construct
  source 1..21: mol_type = other DNA
agggaagaagatgtgtatccc

SEQ ID NO: 22718 - DNA, 21 bp, synthetic construct
  source 1..21: mol_type = other DNA
ctcagtcgcgttgggagggac

SEQ ID NO: 22719 - DNA, 21 bp, synthetic construct
  source 1..21: mol_type = other DNA
taccacaaaatgagcccagtt

SEQ ID NO: 22720 - DNA, 21 bp, synthetic construct
  source 1..21: mol_type = other DNA
gacctcagctcacgcgattgg

SEQ ID NO: 22721 - DNA, 21 bp, synthetic construct
  source 1..21: mol_type = other DNA
agagaggactttacgtcgtgg

SEQ ID NO: 22722 - DNA, 21 bp, synthetic construct
  source 1..21: mol_type = other DNA
gaattggaatcacgaagttgg

SEQ ID NO: 22723 - DNA, 21 bp, synthetic construct
  source 1..21: mol_type = other DNA
acaaattccacaaacggtgtg

SEQ ID NO: 22724 - DNA, 21 bp, synthetic construct
  source 1..21: mol_type = other DNA
tcagactccactaacggtagg

SEQ ID NO: 22725 - DNA, 21 bp, synthetic construct
  source 1..21: mol_type = other DNA
ttgcatagattgagccaagat

SEQ ID NO: 22726 - DNA, 21 bp, synthetic construct
  source 1..21: mol_type = other DNA
cgttccgagtcagtataccct

SEQ ID NO: 22727 - DNA, 21 bp, synthetic construct
  source 1..21: mol_type = other DNA
tatactaagagtgataatcga

SEQ ID NO: 22728 - DNA, 21 bp, synthetic construct
  source 1..21: mol_type = other DNA
tactcgaagcttaacaataat

SEQ ID NO: 22729 - DNA, 21 bp, synthetic construct
  source 1..21: mol_type = other DNA
gatccggcgagcagagagtgg

SEQ ID NO: 22730 - DNA, 21 bp, synthetic construct
  source 1..21: mol_type = other DNA
tacagcaaagccggttataac

SEQ ID NO: 22731 - DNA, 21 bp, synthetic construct
  source 1..21: mol_type = other DNA
aaagaagattatttaagttgg

SEQ ID NO: 22732 - DNA, 21 bp, synthetic construct
  source 1..21: mol_type = other DNA
tacacaagaatcgggcccgat

SEQ ID NO: 22733 - DNA, 21 bp, synthetic construct
  source 1..21: mol_type = other DNA
tacgcaaagtccggtctgaac

SEQ ID NO: 22734 - DNA, 21 bp, synthetic construct
  source 1..21: mol_type = other DNA
gatatggcgagcaacaggtgg

SEQ ID NO: 22735 - DNA, 21 bp, synthetic construct
  source 1..21: mol_type = other DNA
tacgtgaagagccagcaatgc

SEQ ID NO: 22736 - DNA, 21 bp, synthetic construct
  source 1..21: mol_type = other DNA
tacgcgaagactggtcataat

SEQ ID NO: 22737 - DNA, 21 bp, synthetic construct
  source 1..21: mol_type = other DNA
tattcaaagatagggcacaac

SEQ ID NO: 22738 - DNA, 21 bp, synthetic construct
  source 1..21: mol_type = other DNA
cggttggagagccgtgaatgg

SEQ ID NO: 22739 - DNA, 21 bp, synthetic construct
  source 1..21: mol_type = other DNA
tacttgaagtcacagtcaaat

SEQ ID NO: 22740 - DNA, 21 bp, synthetic construct
  source 1..21: mol_type = other DNA
attatggaatcggcgacatgg

SEQ ID NO: 22741 - DNA, 21 bp, synthetic construct
  source 1..21: mol_type = other DNA
cgcacgaaggaagtctatcca

SEQ ID NO: 22742 - DNA, 21 bp, synthetic construct
  source 1..21: mol_type = other DNA
tactcaaagacgggcaacaac

SEQ ID NO: 22743 - DNA, 21 bp, synthetic construct
  source 1..21: mol_type = other DNA
ttcagtaagctcaataataat

SEQ ID NO: 22744 - DNA, 21 bp, synthetic construct
  source 1..21: mol_type = other DNA
tacaccaaatcccaaactgat

SEQ ID NO: 22745 - DNA, 21 bp, synthetic construct
  source 1..21: mol_type = other DNA
ttgtctaaatcgggaccaaac

SEQ ID NO: 22746 - DNA, 21 bp, synthetic construct
  source 1..21: mol_type = other DNA
tacttcacggggcgcttggag

SEQ ID NO: 22747 - DNA, 21 bp, synthetic construct
  source 1..21: mol_type = other DNA
cgcttggatgatgtgtacccc

SEQ ID NO: 22748 - DNA, 21 bp, synthetic construct
  source 1..21: mol_type = other DNA
tggtttagtggaatcaaagag

SEQ ID NO: 22749 - DNA, 21 bp, synthetic construct
  source 1..21: mol_type = other DNA
tacttcagcaaggtgaaggaa

SEQ ID NO: 22750 - DNA, 21 bp, synthetic construct
  source 1..21: mol_type = other DNA
agggacgaattttcaccatat

SEQ ID NO: 22751 - DNA, 21 bp, synthetic construct
  source 1..21: mol_type = other DNA
tatgtaaagtcccaaaacggg

SEQ ID NO: 22752 - DNA, 21 bp, synthetic construct
  source 1..21: mol_type = other DNA
tacttcacgggtactgttgat

SEQ ID NO: 22753 - DNA, 21 bp, synthetic construct
  source 1..21: mol_type = other DNA
cactcaagattaggccccgac

SEQ ID NO: 22754 - DNA, 21 bp, synthetic construct
  source 1..21: mol_type = other DNA
gtgatggaggcaagatcttgg

SEQ ID NO: 22755 - DNA, 21 bp, synthetic construct
  source 1..21: mol_type = other DNA
atcacgtcgaccaacgggatc

SEQ ID NO: 22756 - DNA, 21 bp, synthetic construct
  source 1..21: mol_type = other DNA
ttccataaacttatgagtaac

SEQ ID NO: 22757 - DNA, 21 bp, synthetic construct
  source 1..21: mol_type = other DNA
agggaagatggcgtcacttgg

SEQ ID NO: 22758 - DNA, 21 bp, synthetic construct
  source 1..21: mol_type = other DNA
tatgtcaagatagctccgcat

SEQ ID NO: 22759 - DNA, 21 bp, synthetic construct
  source 1..21: mol_type = other DNA
gctgaatcaactaacggtaga

SEQ ID NO: 22760 - DNA, 21 bp, synthetic construct
  source 1..21: mol_type = other DNA
taccacgctaaacagattaac

SEQ ID NO: 22761 - DNA, 21 bp, synthetic construct
  source 1..21: mol_type = other DNA
ttcgctaagagcggtcctaat

SEQ ID NO: 22762 - DNA, 21 bp, synthetic construct
  source 1..21: mol_type = other DNA
atacacagattgggccctgac

SEQ ID NO: 22763 - DNA, 21 bp, synthetic construct
  source 1..21: mol_type = other DNA
tattttagcggtgtgaaagat

SEQ ID NO: 22764 - DNA, 21 bp, synthetic construct
  source 1..21: mol_type = other DNA
ccaatggagtcattgaaatgg

SEQ ID NO: 22765 - DNA, 21 bp, synthetic construct
  source 1..21: mol_type = other DNA
tactcaaaaattggctttaat

SEQ ID NO: 22766 - DNA, 21 bp, synthetic construct
  source 1..21: mol_type = other DNA
gaggcactcgagggacgggac

SEQ ID NO: 22767 - DNA, 21 bp, synthetic construct
  source 1..21: mol_type = other DNA
gatttatcggatcgccggtgg

SEQ ID NO: 22768 - DNA, 21 bp, synthetic construct
  source 1..21: mol_type = other DNA
tatagcaaagtagggctcaac

SEQ ID NO: 22769 - DNA, 21 bp, synthetic construct
  source 1..21: mol_type = other DNA
aggatggacgacgtatacccg

SEQ ID NO: 22770 - DNA, 21 bp, synthetic construct
  source 1..21: mol_type = other DNA
tacgtcaagtcacaaaacatg

SEQ ID NO: 22771 - DNA, 21 bp, synthetic construct
  source 1..21: mol_type = other DNA
tatttgaaaagtcagagctgt

SEQ ID NO: 22772 - DNA, 21 bp, synthetic construct
  source 1..21: mol_type = other DNA
gcatcgtccacgaacggtcgg

SEQ ID NO: 22773 - DNA, 21 bp, synthetic construct
  source 1..21: mol_type = other DNA
tattccaaacttagcaccaat

SEQ ID NO: 22774 - DNA, 21 bp, synthetic construct
  source 1..21: mol_type = other DNA
aggggcctggaggggatggat

SEQ ID NO: 22775 - DNA, 21 bp, synthetic construct
  source 1..21: mol_type = other DNA
atggacgattataatcctttt

SEQ ID NO: 22776 - DNA, 21 bp, synthetic construct
  source 1..21: mol_type = other DNA
ctccacaggttgtccatggac

SEQ ID NO: 22777 - DNA, 21 bp, synthetic construct
  source 1..21: mol_type = other DNA
cgcctcgaatcacagtcgtgg

SEQ ID NO: 22778 - DNA, 21 bp, synthetic construct
  source 1..21: mol_type = other DNA
tatcataagttaaacccgatg

SEQ ID NO: 22779 - DNA, 21 bp, synthetic construct
  source 1..21: mol_type = other DNA
tacagcaaactccagcctacg

SEQ ID NO: 22780 - DNA, 21 bp, synthetic construct
  source 1..21: mol_type = other DNA
gttaggagtacaaacggagtc

SEQ ID NO: 22781 - DNA, 21 bp, synthetic construct
  source 1..21: mol_type = other DNA
tattttacgggagtgagttta

SEQ ID NO: 22782 - DNA, 21 bp, synthetic construct
  source 1..21: mol_type = other DNA
ttacacaggttgttgccggtg

SEQ ID NO: 22783 - DNA, 21 bp, synthetic construct
  source 1..21: mol_type = other DNA
tatgtgaaatcacagatgtcg

SEQ ID NO: 22784 - DNA, 21 bp, synthetic construct
  source 1..21: mol_type = other DNA
ttacaccggctaagccaagac

SEQ ID NO: 22785 - DNA, 21 bp, synthetic construct
  source 1..21: mol_type = other DNA
atgtttgacggcactatggct

SEQ ID NO: 22786 - DNA, 21 bp, synthetic construct
  source 1..21: mol_type = other DNA
aggacttatgacagttttgta

SEQ ID NO: 22787 - DNA, 21 bp, synthetic construct
  source 1..21: mol_type = other DNA
aggactctcgacgcatttccg

SEQ ID NO: 22788 - DNA, 21 bp, synthetic construct
  source 1..21: mol_type = other DNA
gatttgacatctcgggaatgg

SEQ ID NO: 22789 - DNA, 21 bp, synthetic construct
  source 1..21: mol_type = other DNA
gacatggcctcacagcaatgg

SEQ ID NO: 22790 - DNA, 21 bp, synthetic construct
  source 1..21: mol_type = other DNA
aacgatggtacaagcaagtgg

SEQ ID NO: 22791 - DNA, 21 bp, synthetic construct
  source 1..21: mol_type = other DNA
gatatgggatcgcataaatgg

SEQ ID NO: 22792 - DNA, 21 bp, synthetic construct
  source 1..21: mol_type = other DNA
tactttaccggtaagcaggag

SEQ ID NO: 22793 - DNA, 21 bp, synthetic construct
  source 1..21: mol_type = other DNA
ggcggcgaaaccagtacctgg

SEQ ID NO: 22794 - DNA, 21 bp, synthetic construct
  source 1..21: mol_type = other DNA
tactttacaggtcaagtggag

SEQ ID NO: 22795 - DNA, 21 bp, synthetic construct
  source 1..21: mol_type = other DNA
gatttgctatccagggactgg

SEQ ID NO: 22796 - DNA, 21 bp, synthetic construct
  source 1..21: mol_type = other DNA
ctcagcagaatcggtgataac

SEQ ID NO: 22797 - DNA, 21 bp, synthetic construct
  source 1..21: mol_type = other DNA
agaacatttgacgtgtttccg

SEQ ID NO: 22798 - DNA, 21 bp, synthetic construct
  source 1..21: mol_type = other DNA
tatagtaagttaggcattaat

SEQ ID NO: 22799 - DNA, 21 bp, synthetic construct
  source 1..21: mol_type = other DNA
accgacgaaacagtgtaccgg

SEQ ID NO: 22800 - DNA, 21 bp, synthetic construct
  source 1..21: mol_type = other DNA
cgccttagcgatgcctacccg

SEQ ID NO: 22801 - DNA, 21 bp, synthetic construct
  source 1..21: mol_type = other DNA
acgcaaagtacgaatggaata

SEQ ID NO: 22802 - DNA, 21 bp, synthetic construct
  source 1..21: mol_type = other DNA
tattttacaggggtgcaggct

SEQ ID NO: 22803 - DNA, 21 bp, synthetic construct
  source 1..21: mol_type = other DNA
ttcagtaagctcaacacgaac

SEQ ID NO: 22804 - DNA, 21 bp, synthetic construct
  source 1..21: mol_type = other DNA
tacgtaaagagtgatatggcc

SEQ ID NO: 22805 - DNA, 21 bp, synthetic construct
  source 1..21: mol_type = other DNA
tatgcaaaatcaggacagaat

SEQ ID NO: 22806 - DNA, 21 bp, synthetic construct
  source 1..21: mol_type = other DNA
cttagtaaaataggcgtcaat

SEQ ID NO: 22807 - DNA, 21 bp, synthetic construct
  source 1..21: mol_type = other DNA
tactcaaaactcaacgtgaac

SEQ ID NO: 22808 - DNA, 21 bp, synthetic construct
  source 1..21: mol_type = other DNA
atcatggagtcacgtaaatgg

SEQ ID NO: 22809 - DNA, 21 bp, synthetic construct
  source 1..21: mol_type = other DNA
cttcacagattacaagtcagt

SEQ ID NO: 22810 - DNA, 21 bp, synthetic construct
  source 1..21: mol_type = other DNA
ttttcaaaagtcggatttaac

SEQ ID NO: 22811 - DNA, 21 bp, synthetic construct
  source 1..21: mol_type = other DNA
tatagtaaagcggggggaaac

SEQ ID NO: 22812 - DNA, 21 bp, synthetic construct
  source 1..21: mol_type = other DNA
gtggggagtacaaacggaata

SEQ ID NO: 22813 - DNA, 21 bp, synthetic construct
  source 1..21: mol_type = other DNA
aatatggccagccacacttgg

SEQ ID NO: 22814 - DNA, 21 bp, synthetic construct
  source 1..21: mol_type = other DNA
ctgagtaaggcatccactaac

SEQ ID NO: 22815 - DNA, 21 bp, synthetic construct
  source 1..21: mol_type = other DNA
aggagtgagttcgttagttat

SEQ ID NO: 22816 - DNA, 21 bp, synthetic construct
  source 1..21: mol_type = other DNA
ctagcaaagagcggcaataac

SEQ ID NO: 22817 - DNA, 21 bp, synthetic construct
  source 1..21: mol_type = other DNA
tatcatgctcaaggacctaat

SEQ ID NO: 22818 - DNA, 21 bp, synthetic construct
  source 1..21: mol_type = other DNA
ctccatcgcctcatggaggat

SEQ ID NO: 22819 - DNA, 21 bp, synthetic construct
  source 1..21: mol_type = other DNA
ctgcatagattaagtgtggta

SEQ ID NO: 22820 - DNA, 21 bp, synthetic construct
  source 1..21: mol_type = other DNA
tacagcaaaatgaatgagaat

SEQ ID NO: 22821 - DNA, 21 bp, synthetic construct
  source 1..21: mol_type = other DNA
ctccacaggctttcaagcaat

SEQ ID NO: 22822 - DNA, 21 bp, synthetic construct
  source 1..21: mol_type = other DNA
ataatgagcagtagctcttgg

SEQ ID NO: 22823 - DNA, 21 bp, synthetic construct
  source 1..21: mol_type = other DNA
ctctcacggatcgggaccaat

SEQ ID NO: 22824 - DNA, 21 bp, synthetic construct
  source 1..21: mol_type = other DNA
cgcgatgacttcactgtttac

SEQ ID NO: 22825 - DNA, 21 bp, synthetic construct
  source 1..21: mol_type = other DNA
tgtgccccggactatcgcctc

SEQ ID NO: 22826 - DNA, 21 bp, synthetic construct
  source 1..21: mol_type = other DNA
ctccataggctaacggaagat

SEQ ID NO: 22827 - DNA, 21 bp, synthetic construct
  source 1..21: mol_type = other DNA
tattctaagtccgggaacaat

SEQ ID NO: 22828 - DNA, 21 bp, synthetic construct
  source 1..21: mol_type = other DNA
cgagaagagacggtcttcccc

SEQ ID NO: 22829 - DNA, 21 bp, synthetic construct
  source 1..21: mol_type = other DNA
tacagtaaactcaataacaat

SEQ ID NO: 22830 - DNA, 21 bp, synthetic construct
  source 1..21: mol_type = other DNA
ttgcacaagctaaccactgac

SEQ ID NO: 22831 - DNA, 21 bp, synthetic construct
  source 1..21: mol_type = other DNA
ttaagcagagtaggacgggat

SEQ ID NO: 22832 - DNA, 21 bp, synthetic construct
  source 1..21: mol_type = other DNA
tattcaaaaagtggcattaat

SEQ ID NO: 22833 - DNA, 21 bp, synthetic construct
  source 1..21: mol_type = other DNA
tactttactgggcgtgttgaa

SEQ ID NO: 22834 - DNA, 21 bp, synthetic construct
  source 1..21: mol_type = other DNA
gaaggtatttcacgtgattgg

SEQ ID NO: 22835 - DNA, 21 bp, synthetic construct
  source 1..21: mol_type = other DNA
tatcataagaaacaagaaaac

SEQ ID NO: 22836 - DNA, 21 bp, synthetic construct
  source 1..21: mol_type = other DNA
tatagcaagttgaacttcaat

SEQ ID NO: 22837 - DNA, 21 bp, synthetic construct
  source 1..21: mol_type = other DNA
aaagatgactattcaacgtat

SEQ ID NO: 22838 - DNA, 21 bp, synthetic construct
  source 1..21: mol_type = other DNA
gtacaaagtacaaatggtcgc

SEQ ID NO: 22839 - DNA, 21 bp, synthetic construct
  source 1..21: mol_type = other DNA
ataatgagtcatgcaacatgg

SEQ ID NO: 22840 - DNA, 21 bp, synthetic construct
  source 1..21: mol_type = other DNA
cgagaggacggggtaacgtgg

SEQ ID NO: 22841 - DNA, 21 bp, synthetic construct
  source 1..21: mol_type = other DNA
tacagtaaggcgaatataaac

SEQ ID NO: 22842 - DNA, 21 bp, synthetic construct
  source 1..21: mol_type = other DNA
tacgtaaagagtcaaccctgc

SEQ ID NO: 22843 - DNA, 21 bp, synthetic construct
  source 1..21: mol_type = other DNA
ttatcaaaggttggcacgaac

SEQ ID NO: 22844 - DNA, 21 bp, synthetic construct
  source 1..21: mol_type = other DNA
actgagtctacaaacggcaga

SEQ ID NO: 22845 - DNA, 21 bp, synthetic construct
  source 1..21: mol_type = other DNA
gtaatgaatgacgcgttccct

SEQ ID NO: 22846 - DNA, 21 bp, synthetic construct
  source 1..21: mol_type = other DNA
tacagtaaacacggtcccaac

SEQ ID NO: 22847 - DNA, 21 bp, synthetic construct
  source 1..21: mol_type = other DNA
tacttctcgggccaagtagaa

SEQ ID NO: 22848 - DNA, 21 bp, synthetic construct
  source 1..21: mol_type = other DNA
aggactgaaacaacgtaccct

SEQ ID NO: 22849 - DNA, 21 bp, synthetic construct
  source 1..21: mol_type = other DNA
agagatatcgacgtgttcccc

SEQ ID NO: 22850 - DNA, 21 bp, synthetic construct
  source 1..21: mol_type = other DNA
gagggaatcagtagagactgg

SEQ ID NO: 22851 - DNA, 21 bp, synthetic construct
  source 1..21: mol_type = other DNA
aggatggaaagctcggtttgg

SEQ ID NO: 22852 - DNA, 21 bp, synthetic construct
  source 1..21: mol_type = other DNA
tatttcactggtcaaactgaa

SEQ ID NO: 22853 - DNA, 21 bp, synthetic construct
  source 1..21: mol_type = other DNA
agagaggagactgtacgttgg

SEQ ID NO: 22854 - DNA, 21 bp, synthetic construct
  source 1..21: mol_type = other DNA
ctaagcaggttgaatgctgat

SEQ ID NO: 22855 - DNA, 21 bp, synthetic construct
  source 1..21: mol_type = other DNA
ttttcgaaagtggggtataat

SEQ ID NO: 22856 - DNA, 21 bp, synthetic construct
  source 1..21: mol_type = other DNA
tactcaaaattaggcaccaac

SEQ ID NO: 22857 - DNA, 21 bp, synthetic construct
  source 1..21: mol_type = other DNA
ttgcacaagagcggtatgaac

SEQ ID NO: 22858 - DNA, 21 bp, synthetic construct
  source 1..21: mol_type = other DNA
atccacagtacaaatggtgtc

SEQ ID NO: 22859 - DNA, 21 bp, synthetic construct
  source 1..21: mol_type = other DNA
aggaatgagagtgtttacccc

SEQ ID NO: 22860 - DNA, 21 bp, synthetic construct
  source 1..21: mol_type = other DNA
gtcctctctgataggaactgg

SEQ ID NO: 22861 - DNA, 21 bp, synthetic construct
  source 1..21: mol_type = other DNA
aaagacgattatacgacctac

SEQ ID NO: 22862 - DNA, 21 bp, synthetic construct
  source 1..21: mol_type = other DNA
attatggcttctcgggactgg

SEQ ID NO: 22863 - DNA, 21 bp, synthetic construct
  source 1..21: mol_type = other DNA
ttgcacaaactcctcgttggt

SEQ ID NO: 22864 - DNA, 21 bp, synthetic construct
  source 1..21: mol_type = other DNA
ttcgcgaagaccggtccgaac

SEQ ID NO: 22865 - DNA, 21 bp, synthetic construct
  source 1..21: mol_type = other DNA
tattcgcgactcaacgacgac

SEQ ID NO: 22866 - DNA, 21 bp, synthetic construct
  source 1..21: mol_type = other DNA
aggatggaatctgcagtgtgg

SEQ ID NO: 22867 - DNA, 21 bp, synthetic construct
  source 1..21: mol_type = other DNA
ttggagtcacgtgaagggatt

SEQ ID NO: 22868 - DNA, 21 bp, synthetic construct
  source 1..21: mol_type = other DNA
cataccagcactaatggaatc

SEQ ID NO: 22869 - DNA, 21 bp, synthetic construct
  source 1..21: mol_type = other DNA
ttacataaactccaagtcacc

SEQ ID NO: 22870 - DNA, 21 bp, synthetic construct
  source 1..21: mol_type = other DNA
cttcacagattacaaagcact

SEQ ID NO: 22871 - DNA, 21 bp, synthetic construct
  source 1..21: mol_type = other DNA
ctgtcgcgcataagtccgaac

SEQ ID NO: 22872 - DNA, 21 bp, synthetic construct
  source 1..21: mol_type = other DNA
tatgtaaaaagccagttagac

SEQ ID NO: 22873 - DNA, 21 bp, synthetic construct
  source 1..21: mol_type = other DNA
tattcaaagttaaatgacaag

SEQ ID NO: 22874 - DNA, 21 bp, synthetic construct
  source 1..21: mol_type = other DNA
ttgagccgcgtaggttttaat

SEQ ID NO: 22875 - DNA, 21 bp, synthetic construct
  source 1..21: mol_type = other DNA
tacgtgaagcatgaccctcac

SEQ ID NO: 22876 - DNA, 21 bp, synthetic construct
  source 1..21: mol_type = other DNA
aaagacagtttcactagctgg

SEQ ID NO: 22877 - DNA, 21 bp, synthetic construct
  source 1..21: mol_type = other DNA
tattttacgggtcaactggaa

SEQ ID NO: 22878 - DNA, 21 bp, synthetic construct
  source 1..21: mol_type = other DNA
ctacacaaatcaggaatgaat

SEQ ID NO: 22879 - DNA, 21 bp, synthetic construct
  source 1..21: mol_type = other DNA
tatgctaagagtgggttcaat

SEQ ID NO: 22880 - DNA, 21 bp, synthetic construct
  source 1..21: mol_type = other DNA
gtatcggagttcaaggtttac

SEQ ID NO: 22881 - DNA, 21 bp, synthetic construct
  source 1..21: mol_type = other DNA
ttgcacagattgagtactaac

SEQ ID NO: 22882 - DNA, 21 bp, synthetic construct
  source 1..21: mol_type = other DNA
gcccccggctctattaaatgg

SEQ ID NO: 22883 - DNA, 21 bp, synthetic construct
  source 1..21: mol_type = other DNA
tacttcgccggcagagtcgaa

SEQ ID NO: 22884 - DNA, 21 bp, synthetic construct
  source 1..21: mol_type = other DNA
agagatgactttactgtatac

SEQ ID NO: 22885 - DNA, 21 bp, synthetic construct
  source 1..21: mol_type = other DNA
gtccaatcaagcaacggagtt

SEQ ID NO: 22886 - DNA, 21 bp, synthetic construct
  source 1..21: mol_type = other DNA
cgagatgactttacttcctat

SEQ ID NO: 22887 - DNA, 21 bp, synthetic construct
  source 1..21: mol_type = other DNA
tacttgaaaagtcagaattat

SEQ ID NO: 22888 - DNA, 21 bp, synthetic construct
  source 1..21: mol_type = other DNA
ctctacagcggcgaaggaccg

SEQ ID NO: 22889 - DNA, 21 bp, synthetic construct
  source 1..21: mol_type = other DNA
cacacatcgacaaatgggata

SEQ ID NO: 22890 - DNA, 21 bp, synthetic construct
  source 1..21: mol_type = other DNA
cgcatggaagacgcttttccc

SEQ ID NO: 22891 - DNA, 21 bp, synthetic construct
  source 1..21: mol_type = other DNA
tactctaagttaggagagaat

SEQ ID NO: 22892 - DNA, 21 bp, synthetic construct
  source 1..21: mol_type = other DNA
tatcacgccttaaacatagac

SEQ ID NO: 22893 - DNA, 21 bp, synthetic construct
  source 1..21: mol_type = other DNA
tactttagcggtaaaattgca

SEQ ID NO: 22894 - DNA, 21 bp, synthetic construct
  source 1..21: mol_type = other DNA
ttccacaagttaaacgaaaat

SEQ ID NO: 22895 - DNA, 21 bp, synthetic construct
  source 1..21: mol_type = other DNA
ctgcaccgattaagcacatcg

SEQ ID NO: 22896 - DNA, 21 bp, synthetic construct
  source 1..21: mol_type = other DNA
gacatgagcagtagcgtttgg

SEQ ID NO: 22897 - DNA, 21 bp, synthetic construct
  source 1..21: mol_type = other DNA
attccccgtttctgtgcaccg

SEQ ID NO: 22898 - DNA, 21 bp, synthetic construct
  source 1..21: mol_type = other DNA
ttagcgaagtcgggcgtgaac

SEQ ID NO: 22899 - DNA, 21 bp, synthetic construct
  source 1..21: mol_type = other DNA
gtcatagaggatgcataccca

SEQ ID NO: 22900 - DNA, 21 bp, synthetic construct
  source 1..21: mol_type = other DNA
tacttctcaggagtcaaggac

SEQ ID NO: 22901 - DNA, 21 bp, synthetic construct
  source 1..21: mol_type = other DNA
tatcatgcgaagcaaataaat

SEQ ID NO: 22902 - DNA, 21 bp, synthetic construct
  source 1..21: mol_type = other DNA
tattttacgggtgtcactgaa

SEQ ID NO: 22903 - DNA, 21 bp, synthetic construct
  source 1..21: mol_type = other DNA
aaatcagacttcgtctcttat

SEQ ID NO: 22904 - DNA, 21 bp, synthetic construct
  source 1..21: mol_type = other DNA
agagatgagttttccacttat

SEQ ID NO: 22905 - DNA, 21 bp, synthetic construct
  source 1..21: mol_type = other DNA
ctcagcaagagtgggcctaat

SEQ ID NO: 22906 - DNA, 21 bp, synthetic construct
  source 1..21: mol_type = other DNA
gtgttgagttctagtgcctgg

SEQ ID NO: 22907 - DNA, 21 bp, synthetic construct
  source 1..21: mol_type = other DNA
tcagacagtactaacggccga

SEQ ID NO: 22908 - DNA, 21 bp, synthetic construct
  source 1..21: mol_type = other DNA
tacgtaaaatcccagccctac

SEQ ID NO: 22909 - DNA, 21 bp, synthetic construct
  source 1..21: mol_type = other DNA
tactttacaggggtcgttgct

SEQ ID NO: 22910 - DNA, 21 bp, synthetic construct
  source 1..21: mol_type = other DNA
gatctacaggcacgcagctgg

SEQ ID NO: 22911 - DNA, 21 bp, synthetic construct
  source 1..21: mol_type = other DNA
gcgggggacggcttatgggtc

SEQ ID NO: 22912 - DNA, 21 bp, synthetic construct
  source 1..21: mol_type = other DNA
gttcagagctcaaacggcgtc

SEQ ID NO: 22913 - DNA, 21 bp, synthetic construct
  source 1..21: mol_type = other DNA
tacttcacaggcacatttgac

SEQ ID NO: 22914 - DNA, 21 bp, synthetic construct
  source 1..21: mol_type = other DNA
tactttaccggtaccgttgac

SEQ ID NO: 22915 - DNA, 21 bp, synthetic construct
  source 1..21: mol_type = other DNA
acgatgagcacaaatggtgtg

SEQ ID NO: 22916 - DNA, 21 bp, synthetic construct
  source 1..21: mol_type = other DNA
atcacaagtacgaatggcatt

SEQ ID NO: 22917 - DNA, 21 bp, synthetic construct
  source 1..21: mol_type = other DNA
gacttagagtcacgtgaatgg

SEQ ID NO: 22918 - DNA, 21 bp, synthetic construct
  source 1..21: mol_type = other DNA
tattttagcgggcaggtcgag

SEQ ID NO: 22919 - DNA, 21 bp, synthetic construct
  source 1..21: mol_type = other DNA
tacgcgaagaatggtttcaac

SEQ ID NO: 22920 - DNA, 21 bp, synthetic construct
  source 1..21: mol_type = other DNA
agaacaccagatgcgtaccct

SEQ ID NO: 22921 - DNA, 21 bp, synthetic construct
  source 1..21: mol_type = other DNA
agagaagagcaggtcaggtgg

SEQ ID NO: 22922 - DNA, 21 bp, synthetic construct
  source 1..21: mol_type = other DNA
ggaagcccgggcgtcggttgg

SEQ ID NO: 22923 - DNA, 21 bp, synthetic construct
  source 1..21: mol_type = other DNA
ttaagcaaaattggacataac

SEQ ID NO: 22924 - DNA, 21 bp, synthetic construct
  source 1..21: mol_type = other DNA
gagccagagcggggttggttc

SEQ ID NO: 22925 - DNA, 21 bp, synthetic construct
  source 1..21: mol_type = other DNA
aaagacggctattccacatac

SEQ ID NO: 22926 - DNA, 21 bp, synthetic construct
  source 1..21: mol_type = other DNA
tacttttcaggtaagaaggag

SEQ ID NO: 22927 - DNA, 21 bp, synthetic construct
  source 1..21: mol_type = other DNA
tactttagcgggaaaatcgag

SEQ ID NO: 22928 - DNA, 21 bp, synthetic construct
  source 1..21: mol_type = other DNA
tacttctcgaagataaaggag

SEQ ID NO: 22929 - DNA, 21 bp, synthetic construct
  source 1..21: mol_type = other DNA
cgtggcgacaatgtctacccg

SEQ ID NO: 22930 - DNA, 21 bp, synthetic construct
  source 1..21: mol_type = other DNA
tacttctcaggtgttgtcgaa

SEQ ID NO: 22931 - DNA, 21 bp, synthetic construct
  source 1..21: mol_type = other DNA
tatacgaaatcccagccgtgt

SEQ ID NO: 22932 - DNA, 21 bp, synthetic construct
  source 1..21: mol_type = other DNA
tatgcaaagagcggcacgaat

SEQ ID NO: 22933 - DNA, 21 bp, synthetic construct
  source 1..21: mol_type = other DNA
ggcggaccgtctagctcatgg

SEQ ID NO: 22934 - DNA, 21 bp, synthetic construct
  source 1..21: mol_type = other DNA
cttcttagctcgagtaattgg

SEQ ID NO: 22935 - DNA, 21 bp, synthetic construct
  source 1..21: mol_type = other DNA
ctccaccggctccaagctgac

SEQ ID NO: 22936 - DNA, 21 bp, synthetic construct
  source 1..21: mol_type = other DNA
tactctaaggttgggtataat

SEQ ID NO: 22937 - DNA, 21 bp, synthetic construct
  source 1..21: mol_type = other DNA
tatttaaaatcgcaggcctat

SEQ ID NO: 22938 - DNA, 21 bp, synthetic construct
  source 1..21: mol_type = other DNA
tatgtgaagagccagaaaata

SEQ ID NO: 22939 - DNA, 21 bp, synthetic construct
  source 1..21: mol_type = other DNA
cggcttgaaagtacgcactgg

SEQ ID NO: 22940 - DNA, 21 bp, synthetic construct
  source 1..21: mol_type = other DNA
aaagacgagtttaagagctgg

SEQ ID NO: 22941 - DNA, 21 bp, synthetic construct
  source 1..21: mol_type = other DNA
ctcatgcgcgacgctttccct

SEQ ID NO: 22942 - DNA, 21 bp, synthetic construct
  source 1..21: mol_type = other DNA
aagtctgactatcttacctac

SEQ ID NO: 22943 - DNA, 21 bp, synthetic construct
  source 1..21: mol_type = other DNA
tatagtaaatcgggtcacaat

SEQ ID NO: 22944 - DNA, 21 bp, synthetic construct
  source 1..21: mol_type = other DNA
tacttcaccggcaaaacagaa

SEQ ID NO: 22945 - DNA, 21 bp, synthetic construct
  source 1..21: mol_type = other DNA
ctaagcagaatctcacctaat

SEQ ID NO: 22946 - DNA, 21 bp, synthetic construct
  source 1..21: mol_type = other DNA
agggatgacttcacgagctgg

SEQ ID NO: 22947 - DNA, 21 bp, synthetic construct
  source 1..21: mol_type = other DNA
gacatgagcagtcgaatatgg

SEQ ID NO: 22948 - DNA, 21 bp, synthetic construct
  source 1..21: mol_type = other DNA
ctgcacgcaaacttgcccaat

SEQ ID NO: 22949 - DNA, 21 bp, synthetic construct
  source 1..21: mol_type = other DNA
ttgcatagactacagagtgat

SEQ ID NO: 22950 - DNA, 21 bp, synthetic construct
  source 1..21: mol_type = other DNA
tactcaaaacttaactttaac

SEQ ID NO: 22951 - DNA, 21 bp, synthetic construct
  source 1..21: mol_type = other DNA
cggaacgatacggtgtacccc

SEQ ID NO: 22952 - DNA, 21 bp, synthetic construct
  source 1..21: mol_type = other DNA
ttgagtcggatcggaagggat

SEQ ID NO: 22953 - DNA, 21 bp, synthetic construct
  source 1..21: mol_type = other DNA
acaagggaaggcgatcctgcc

SEQ ID NO: 22954 - DNA, 21 bp, synthetic construct
  source 1..21: mol_type = other DNA
aggaagcacgacgtatacccg

SEQ ID NO: 22955 - DNA, 21 bp, synthetic construct
  source 1..21: mol_type = other DNA
accgacgggacctctaggtgg

SEQ ID NO: 22956 - DNA, 21 bp, synthetic construct
  source 1..21: mol_type = other DNA
acgagatccaccaatggcgtg

SEQ ID NO: 22957 - DNA, 21 bp, synthetic construct
  source 1..21: mol_type = other DNA
ggatcccccggggttggttgg

SEQ ID NO: 22958 - DNA, 21 bp, synthetic construct
  source 1..21: mol_type = other DNA
tactggaccggcgtggtcgaa

SEQ ID NO: 22959 - DNA, 21 bp, synthetic construct
  source 1..21: mol_type = other DNA
cggatggattcggtcaagtgg

SEQ ID NO: 22960 - DNA, 21 bp, synthetic construct
  source 1..21: mol_type = other DNA
tataccaagagccaacagatt

SEQ ID NO: 22961 - DNA, 21 bp, synthetic construct
  source 1..21: mol_type = other DNA
agaaacgaagacgtttatccg

SEQ ID NO: 22962 - DNA, 21 bp, synthetic construct
  source 1..21: mol_type = other DNA
cccttacagagtcgagactgg

SEQ ID NO: 22963 - DNA, 21 bp, synthetic construct
  source 1..21: mol_type = other DNA
gacttgcaaagcagggaatgg

SEQ ID NO: 22964 - DNA, 21 bp, synthetic construct
  source 1..21: mol_type = other DNA
tatgtgaggtctgataagtta

SEQ ID NO: 22965 - DNA, 21 bp, synthetic construct
  source 1..21: mol_type = other DNA
catgatgggacgagtgcttgg

SEQ ID NO: 22966 - DNA, 21 bp, synthetic construct
  source 1..21: mol_type = other DNA
tataccaagagcgactcaaaa

SEQ ID NO: 22967 - DNA, 21 bp, synthetic construct
  source 1..21: mol_type = other DNA
cctatggcatctttacagtgg

SEQ ID NO: 22968 - DNA, 21 bp, synthetic construct
  source 1..21: mol_type = other DNA
tattcaaaaccagggcccaat

SEQ ID NO: 22969 - DNA, 21 bp, synthetic construct
  source 1..21: mol_type = other DNA
tactttactggctcctgggac

SEQ ID NO: 22970 - DNA, 21 bp, synthetic construct
  source 1..21: mol_type = other DNA
cgggaagacttcgtgagatac

SEQ ID NO: 22971 - DNA, 21 bp, synthetic construct
  source 1..21: mol_type = other DNA
tatttttccggtatgaaagag

SEQ ID NO: 22972 - DNA, 21 bp, synthetic construct
  source 1..21: mol_type = other DNA
tctatgagcagtagtacctgg

SEQ ID NO: 22973 - DNA, 21 bp, synthetic construct
  source 1..21: mol_type = other DNA
tattttactggtaaacaggaa

SEQ ID NO: 22974 - DNA, 21 bp, synthetic construct
  source 1..21: mol_type = other DNA
gacttgacttctcgtgagtgg

SEQ ID NO: 22975 - DNA, 21 bp, synthetic construct
  source 1..21: mol_type = other DNA
gttgaatcgacaaacggcatt

SEQ ID NO: 22976 - DNA, 21 bp, synthetic construct
  source 1..21: mol_type = other DNA
tactttagtggcatcatagac

SEQ ID NO: 22977 - DNA, 21 bp, synthetic construct
  source 1..21: mol_type = other DNA
accgagagcacacacggtcga

SEQ ID NO: 22978 - DNA, 21 bp, synthetic construct
  source 1..21: mol_type = other DNA
tacttctccggaattgtgagc

SEQ ID NO: 22979 - DNA, 21 bp, synthetic construct
  source 1..21: mol_type = other DNA
tatgccaaatcaggaactaac

SEQ ID NO: 22980 - DNA, 21 bp, synthetic construct
  source 1..21: mol_type = other DNA
tgccttagcaagacagggcac

SEQ ID NO: 22981 - DNA, 21 bp, synthetic construct
  source 1..21: mol_type = other DNA
acggacgagttttcaacttgg

SEQ ID NO: 22982 - DNA, 21 bp, synthetic construct
  source 1..21: mol_type = other DNA
ggaagcgactatgtagcgtgg

SEQ ID NO: 22983 - DNA, 21 bp, synthetic construct
  source 1..21: mol_type = other DNA
tattctaaagttggcgggaat

SEQ ID NO: 22984 - DNA, 21 bp, synthetic construct
  source 1..21: mol_type = other DNA
ttacatcgcttacaggcggat

SEQ ID NO: 22985 - DNA, 21 bp, synthetic construct
  source 1..21: mol_type = other DNA
tattttgcgggtcgcgtagag

SEQ ID NO: 22986 - DNA, 21 bp, synthetic construct
  source 1..21: mol_type = other DNA
tatgtgaagtcgaatcatgga

SEQ ID NO: 22987 - DNA, 21 bp, synthetic construct
  source 1..21: mol_type = other DNA
ttgtcaagagtgagtcccaat

SEQ ID NO: 22988 - DNA, 21 bp, synthetic construct
  source 1..21: mol_type = other DNA
ttatcgcgcgcttcggagaac

SEQ ID NO: 22989 - DNA, 21 bp, synthetic construct
  source 1..21: mol_type = other DNA
tatagcaaagttggcagggac

SEQ ID NO: 22990 - DNA, 21 bp, synthetic construct
  source 1..21: mol_type = other DNA
tttagtagattgaaccccgac

SEQ ID NO: 22991 - DNA, 21 bp, synthetic construct
  source 1..21: mol_type = other DNA
aggagcgagtttgtgaccttt

SEQ ID NO: 22992 - DNA, 21 bp, synthetic construct
  source 1..21: mol_type = other DNA
agaacggatgacgctttcccg

SEQ ID NO: 22993 - DNA, 21 bp, synthetic construct
  source 1..21: mol_type = other DNA
ctgcacaagttacaggttacg

SEQ ID NO: 22994 - DNA, 21 bp, synthetic construct
  source 1..21: mol_type = other DNA
tattttacaggcatggtcgaa

SEQ ID NO: 22995 - DNA, 21 bp, synthetic construct
  source 1..21: mol_type = other DNA
tatcttaaaagccaatcaagc

SEQ ID NO: 22996 - DNA, 21 bp, synthetic construct
  source 1..21: mol_type = other DNA
tatttcagcggccacatcgat

SEQ ID NO: 22997 - DNA, 21 bp, synthetic construct
  source 1..21: mol_type = other DNA
taccatgcgaaatcattaaac

SEQ ID NO: 22998 - DNA, 21 bp, synthetic construct
  source 1..21: mol_type = other DNA
gttggatcaacccatggcgtt

SEQ ID NO: 22999 - DNA, 21 bp, synthetic construct
  source 1..21: mol_type = other DNA
gacctaacatcgagagactgg

SEQ ID NO: 23000 - DNA, 21 bp, synthetic construct
  source 1..21: mol_type = other DNA
cgagatgattttgtcacgtgg

SEQ ID NO: 23001 - DNA, 21 bp, synthetic construct
  source 1..21: mol_type = other DNA
tatcataagagccaaagtaac

SEQ ID NO: 23002 - DNA, 21 bp, synthetic construct
  source 1..21: mol_type = other DNA
tactggacagggattcaagag

SEQ ID NO: 23003 - DNA, 21 bp, synthetic construct
  source 1..21: mol_type = other DNA
tacgtacggtcggacactggt

SEQ ID NO: 23004 - DNA, 21 bp, synthetic construct
  source 1..21: mol_type = other DNA
tacagtaaactcaatcacaac

SEQ ID NO: 23005 - DNA, 21 bp, synthetic construct
  source 1..21: mol_type = other DNA
cgtgatgaattcagcacttac

SEQ ID NO: 23006 - DNA, 21 bp, synthetic construct
  source 1..21: mol_type = other DNA
agattgtcagacgcatatcct

SEQ ID NO: 23007 - DNA, 21 bp, synthetic construct
  source 1..21: mol_type = other DNA
gacctcgcctcctcggcgtgg

SEQ ID NO: 23008 - DNA, 21 bp, synthetic construct
  source 1..21: mol_type = other DNA
tactctaaagcaggagacaac

SEQ ID NO: 23009 - DNA, 21 bp, synthetic construct
  source 1..21: mol_type = other DNA
tattttgccggaaaggttgat

SEQ ID NO: 23010 - DNA, 21 bp, synthetic construct
  source 1..21: mol_type = other DNA
tattttaccggggtggcaaag

SEQ ID NO: 23011 - DNA, 21 bp, synthetic construct
  source 1..21: mol_type = other DNA
cgcggggataatgtgtaccct

SEQ ID NO: 23012 - DNA, 21 bp, synthetic construct
  source 1..21: mol_type = other DNA
cgggaggaacaagtacgttgg

SEQ ID NO: 23013 - DNA, 21 bp, synthetic construct
  source 1..21: mol_type = other DNA
atgcatagattaagcgcggac

SEQ ID NO: 23014 - DNA, 21 bp, synthetic construct
  source 1..21: mol_type = other DNA
tattttactggggttatagca

SEQ ID NO: 23015 - DNA, 21 bp, synthetic construct
  source 1..21: mol_type = other DNA
cggaacgatgtcgtctatcct

SEQ ID NO: 23016 - DNA, 21 bp, synthetic construct
  source 1..21: mol_type = other DNA
ttccaccggttgggacccgat

SEQ ID NO: 23017 - DNA, 21 bp, synthetic construct
  source 1..21: mol_type = other DNA
ttagccaagggcggttttaac

SEQ ID NO: 23018 - DNA, 21 bp, synthetic construct
  source 1..21: mol_type = other DNA
agagatcagacagtgtatccg

SEQ ID NO: 23019 - DNA, 21 bp, synthetic construct
  source 1..21: mol_type = other DNA
tatttcacgggcaaaacggac

SEQ ID NO: 23020 - DNA, 21 bp, synthetic construct
  source 1..21: mol_type = other DNA
tacttcagtggggttaaagac

SEQ ID NO: 23021 - DNA, 21 bp, synthetic construct
  source 1..21: mol_type = other DNA
ttatgtcgcccatgcggagag

SEQ ID NO: 23022 - DNA, 21 bp, synthetic construct
  source 1..21: mol_type = other DNA
tatttcacgggttttatcgag

SEQ ID NO: 23023 - DNA, 21 bp, synthetic construct
  source 1..21: mol_type = other DNA
aaggatgattacagtgtcttt

SEQ ID NO: 23024 - DNA, 21 bp, synthetic construct
  source 1..21: mol_type = other DNA
ctgtgccgtccgtgcaaagaa

SEQ ID NO: 23025 - DNA, 21 bp, synthetic construct
  source 1..21: mol_type = other DNA
tacttcaccggcgtaatccct

SEQ ID NO: 23026 - DNA, 21 bp, synthetic construct
  source 1..21: mol_type = other DNA
tatcttaagagccaaatgacc

SEQ ID NO: 23027 - DNA, 21 bp, synthetic construct
  source 1..21: mol_type = other DNA
agggacgagttttcaacatat

SEQ ID NO: 23028 - DNA, 21 bp, synthetic construct
  source 1..21: mol_type = other DNA
tacgcgaagactggggttaat

SEQ ID NO: 23029 - DNA, 21 bp, synthetic construct
  source 1..21: mol_type = other DNA
ggaagcgaattctcgagatgg

SEQ ID NO: 23030 - DNA, 21 bp, synthetic construct
  source 1..21: mol_type = other DNA
gtaggaagtacaaacggggtc

SEQ ID NO: 23031 - DNA, 21 bp, synthetic construct
  source 1..21: mol_type = other DNA
ttgtcgaggataagtcataat

SEQ ID NO: 23032 - DNA, 21 bp, synthetic construct
  source 1..21: mol_type = other DNA
tacttcacaggacacatagag

SEQ ID NO: 23033 - DNA, 21 bp, synthetic construct
  source 1..21: mol_type = other DNA
cgaatggagagcgcggtctgg

SEQ ID NO: 23034 - DNA, 21 bp, synthetic construct
  source 1..21: mol_type = other DNA
gaaggtattgccaggacatgg

SEQ ID NO: 23035 - DNA, 21 bp, synthetic construct
  source 1..21: mol_type = other DNA
tatttcaccggcaaactggat

SEQ ID NO: 23036 - DNA, 21 bp, synthetic construct
  source 1..21: mol_type = other DNA
ccaatggcgtccgctacttgg

SEQ ID NO: 23037 - DNA, 21 bp, synthetic construct
  source 1..21: mol_type = other DNA
aaggatgacttctcggtctat

SEQ ID NO: 23038 - DNA, 21 bp, synthetic construct
  source 1..21: mol_type = other DNA
ttctgtaagccttgccctggt

SEQ ID NO: 23039 - DNA, 21 bp, synthetic construct
  source 1..21: mol_type = other DNA
tacgctagaaccggtccaaac

SEQ ID NO: 23040 - DNA, 21 bp, synthetic construct
  source 1..21: mol_type = other DNA
aaggacgattataccacttgg

SEQ ID NO: 23041 - DNA, 21 bp, synthetic construct
  source 1..21: mol_type = other DNA
actgatgagaccgtttacaga

SEQ ID NO: 23042 - DNA, 21 bp, synthetic construct
  source 1..21: mol_type = other DNA
agaatggaagtgtcgacctgg

SEQ ID NO: 23043 - DNA, 21 bp, synthetic construct
  source 1..21: mol_type = other DNA
ctcagtcgacttggcgacaat

SEQ ID NO: 23044 - DNA, 21 bp, synthetic construct
  source 1..21: mol_type = other DNA
tatgccagaaccggacttgat

SEQ ID NO: 23045 - DNA, 21 bp, synthetic construct
  source 1..21: mol_type = other DNA
ctcagcagggtgagtcccaac

SEQ ID NO: 23046 - DNA, 21 bp, synthetic construct
  source 1..21: mol_type = other DNA
gttgagtcggttaatggagtt

SEQ ID NO: 23047 - DNA, 21 bp, synthetic construct
  source 1..21: mol_type = other DNA
tacagtaagatgaacataaac

SEQ ID NO: 23048 - DNA, 21 bp, synthetic construct
  source 1..21: mol_type = other DNA
accgaaagttcgtctggacgt

SEQ ID NO: 23049 - DNA, 21 bp, synthetic construct
  source 1..21: mol_type = other DNA
tatcttaagagtcaaagcact

SEQ ID NO: 23050 - DNA, 21 bp, synthetic construct
  source 1..21: mol_type = other DNA
tacacgaagagccagagttat

SEQ ID NO: 23051 - DNA, 21 bp, synthetic construct
  source 1..21: mol_type = other DNA
tacttcacggggaagcaagag

SEQ ID NO: 23052 - DNA, 21 bp, synthetic construct
  source 1..21: mol_type = other DNA
tacgcaaaatcaggatacaat

SEQ ID NO: 23053 - DNA, 21 bp, synthetic construct
  source 1..21: mol_type = other DNA
cgagaggatagtgtgtattgg

SEQ ID NO: 23054 - DNA, 21 bp, synthetic construct
  source 1..21: mol_type = other DNA
ctcactcggattagctccaac

SEQ ID NO: 23055 - DNA, 21 bp, synthetic construct
  source 1..21: mol_type = other DNA
tcaatgtcaagcgcgatatgg

SEQ ID NO: 23056 - DNA, 21 bp, synthetic construct
  source 1..21: mol_type = other DNA
tacgcccgaacaggaccgaat

SEQ ID NO: 23057 - DNA, 21 bp, synthetic construct
  source 1..21: mol_type = other DNA
aggactgccgacgcataccct

SEQ ID NO: 23058 - DNA, 21 bp, synthetic construct
  source 1..21: mol_type = other DNA
tacttcgcgggtaaagtcgac

SEQ ID NO: 23059 - DNA, 21 bp, synthetic construct
  source 1..21: mol_type = other DNA
cttgctaaatcgggccacaat

SEQ ID NO: 23060 - DNA, 21 bp, synthetic construct
  source 1..21: mol_type = other DNA
tatctgaagagccaggtttac

SEQ ID NO: 23061 - DNA, 21 bp, synthetic construct
  source 1..21: mol_type = other DNA
ttgagcaaggcgggcccaaac

SEQ ID NO: 23062 - DNA, 21 bp, synthetic construct
  source 1..21: mol_type = other DNA
attccaagtgaccggttgtgg

SEQ ID NO: 23063 - DNA, 21 bp, synthetic construct
  source 1..21: mol_type = other DNA
agattgtctgacgtctaccca

SEQ ID NO: 23064 - DNA, 21 bp, synthetic construct
  source 1..21: mol_type = other DNA
ttacatcgactgagtgacttt

SEQ ID NO: 23065 - DNA, 21 bp, synthetic construct
  source 1..21: mol_type = other DNA
cctaggagcaccaatggggtt

SEQ ID NO: 23066 - DNA, 21 bp, synthetic construct
  source 1..21: mol_type = other DNA
tacttctcgggcatacaggag

SEQ ID NO: 23067 - DNA, 21 bp, synthetic construct
  source 1..21: mol_type = other DNA
agggatgatttcaccacatgg

SEQ ID NO: 23068 - DNA, 21 bp, synthetic construct
  source 1..21: mol_type = other DNA
ttaagcagggcttcgaccaac

SEQ ID NO: 23069 - DNA, 21 bp, synthetic construct
  source 1..21: mol_type = other DNA
agggcattagaaggcgccgac

SEQ ID NO: 23070 - DNA, 21 bp, synthetic construct
  source 1..21: mol_type = other DNA
gttctatcgacgaatggtagg

SEQ ID NO: 23071 - DNA, 21 bp, synthetic construct
  source 1..21: mol_type = other DNA
tatagcaaggccaacgacaac

SEQ ID NO: 23072 - DNA, 21 bp, synthetic construct
  source 1..21: mol_type = other DNA
tactctaagacggggcacaat

SEQ ID NO: 23073 - DNA, 21 bp, synthetic construct
  source 1..21: mol_type = other DNA
ccagaatccactaatggtcgg

SEQ ID NO: 23074 - DNA, 21 bp, synthetic construct
  source 1..21: mol_type = other DNA
gtattctcaaccaatgggatc

SEQ ID NO: 23075 - DNA, 21 bp, synthetic construct
  source 1..21: mol_type = other DNA
agactcgaaagcgcgatgtgg

SEQ ID NO: 23076 - DNA, 21 bp, synthetic construct
  source 1..21: mol_type = other DNA
tatctcaagagtcaacagtat

SEQ ID NO: 23077 - DNA, 21 bp, synthetic construct
  source 1..21: mol_type = other DNA
ttgtgccgtccatgtatggag

SEQ ID NO: 23078 - DNA, 21 bp, synthetic construct
  source 1..21: mol_type = other DNA
tatgcgaaatccggagccaac

SEQ ID NO: 23079 - DNA, 21 bp, synthetic construct
  source 1..21: mol_type = other DNA
gttgcgtctcgcggttgggat

SEQ ID NO: 23080 - DNA, 21 bp, synthetic construct
  source 1..21: mol_type = other DNA
tactttacaggagtaaccgcg

SEQ ID NO: 23081 - DNA, 21 bp, synthetic construct
  source 1..21: mol_type = other DNA
ctgagcagaacgagtcacaac

SEQ ID NO: 23082 - DNA, 21 bp, synthetic construct
  source 1..21: mol_type = other DNA
tatagcaagttaagtacaaat

SEQ ID NO: 23083 - DNA, 21 bp, synthetic construct
  source 1..21: mol_type = other DNA
ttttcgaagattggaccgaac

SEQ ID NO: 23084 - DNA, 21 bp, synthetic construct
  source 1..21: mol_type = other DNA
tggtggtcaggccgaatcgag

SEQ ID NO: 23085 - DNA, 21 bp, synthetic construct
  source 1..21: mol_type = other DNA
tatgcaaaaaacgggaataat

SEQ ID NO: 23086 - DNA, 21 bp, synthetic construct
  source 1..21: mol_type = other DNA
gacatgagttcgcataagtgg

SEQ ID NO: 23087 - DNA, 21 bp, synthetic construct
  source 1..21: mol_type = other DNA
tatagccgcgtgggggttgat

SEQ ID NO: 23088 - DNA, 21 bp, synthetic construct
  source 1..21: mol_type = other DNA
tacagtaaagtgggacataac

SEQ ID NO: 23089 - DNA, 21 bp, synthetic construct
  source 1..21: mol_type = other DNA
gtactttccactaatggtatt

SEQ ID NO: 23090 - DNA, 21 bp, synthetic construct
  source 1..21: mol_type = other DNA
tactcaaagaccggttacaat

SEQ ID NO: 23091 - DNA, 21 bp, synthetic construct
  source 1..21: mol_type = other DNA
atacaaagtacgaatggtgta

SEQ ID NO: 23092 - DNA, 21 bp, synthetic construct
  source 1..21: mol_type = other DNA
tatagcaagatgaattttaat

SEQ ID NO: 23093 - DNA, 21 bp, synthetic construct
  source 1..21: mol_type = other DNA
ctaagtaagatgaattacaac

SEQ ID NO: 23094 - DNA, 21 bp, synthetic construct
  source 1..21: mol_type = other DNA
acgaagagcaccaatggagtt

SEQ ID NO: 23095 - DNA, 21 bp, synthetic construct
  source 1..21: mol_type = other DNA
ttttcacgaattggaccggat

SEQ ID NO: 23096 - DNA, 21 bp, synthetic construct
  source 1..21: mol_type = other DNA
ttggctaagtctgggaacaat

SEQ ID NO: 23097 - DNA, 21 bp, synthetic construct
  source 1..21: mol_type = other DNA
agggaatctgttagtacgtgg

SEQ ID NO: 23098 - DNA, 21 bp, synthetic construct
  source 1..21: mol_type = other DNA
ctaagggatggtacacccgcg

SEQ ID NO: 23099 - DNA, 21 bp, synthetic construct
  source 1..21: mol_type = other DNA
ttgtcgcgagcatcccccaac

SEQ ID NO: 23100 - DNA, 21 bp, synthetic construct
  source 1..21: mol_type = other DNA
tacgtgaaaattgcgccccac

SEQ ID NO: 23101 - DNA, 21 bp, synthetic construct
  source 1..21: mol_type = other DNA
tatttcacgggtagagtcgag

SEQ ID NO: 23102 - DNA, 21 bp, synthetic construct
  source 1..21: mol_type = other DNA
tattttaccggtcacttggaa

SEQ ID NO: 23103 - DNA, 21 bp, synthetic construct
  source 1..21: mol_type = other DNA
gatcttagagcgagcacatgg

SEQ ID NO: 23104 - DNA, 21 bp, synthetic construct
  source 1..21: mol_type = other DNA
tattttgccgggataaaagag

SEQ ID NO: 23105 - DNA, 21 bp, synthetic construct
  source 1..21: mol_type = other DNA
tattggaccggaatacaggaa

SEQ ID NO: 23106 - DNA, 21 bp, synthetic construct
  source 1..21: mol_type = other DNA
ctcagccgcgccagtgtaaac

SEQ ID NO: 23107 - DNA, 21 bp, synthetic construct
  source 1..21: mol_type = other DNA
agggaagaattcgtacattgg

SEQ ID NO: 23108 - DNA, 21 bp, synthetic construct
  source 1..21: mol_type = other DNA
tacgtgaggtccgatgcgaac

SEQ ID NO: 23109 - DNA, 21 bp, synthetic construct
  source 1..21: mol_type = other DNA
gacctgcgtagctcgacgtgg

SEQ ID NO: 23110 - DNA, 21 bp, synthetic construct
  source 1..21: mol_type = other DNA
aagatggatagtcgcctatgg

SEQ ID NO: 23111 - DNA, 21 bp, synthetic construct
  source 1..21: mol_type = other DNA
tatctaaaaagtcaaagtatg

SEQ ID NO: 23112 - DNA, 21 bp, synthetic construct
  source 1..21: mol_type = other DNA
tatataaaaggagattacaag

SEQ ID NO: 23113 - DNA, 21 bp, synthetic construct
  source 1..21: mol_type = other DNA
ttttcacgtctcaacccagat

SEQ ID NO: 23114 - DNA, 21 bp, synthetic construct
  source 1..21: mol_type = other DNA
gacatgactagtcataagtgg

SEQ ID NO: 23115 - DNA, 21 bp, synthetic construct
  source 1..21: mol_type = other DNA
ataatggaggcgagggactgg

SEQ ID NO: 23116 - DNA, 21 bp, synthetic construct
  source 1..21: mol_type = other DNA
tactttgcgggtaaaattgag

SEQ ID NO: 23117 - DNA, 21 bp, synthetic construct
  source 1..21: mol_type = other DNA
cgtgacgagttcgtgtcatgg

SEQ ID NO: 23118 - DNA, 21 bp, synthetic construct
  source 1..21: mol_type = other DNA
cgtactccaactgtctacccc

SEQ ID NO: 23119 - DNA, 21 bp, synthetic construct
  source 1..21: mol_type = other DNA
tacttcacaggcttcaaagag

SEQ ID NO: 23120 - DNA, 21 bp, synthetic construct
  source 1..21: mol_type = other DNA
tacgtacgaagcgacaaaaac

SEQ ID NO: 23121 - DNA, 21 bp, synthetic construct
  source 1..21: mol_type = other DNA
gacttaagatcagccagctgg

SEQ ID NO: 23122 - DNA, 21 bp, synthetic construct
  source 1..21: mol_type = other DNA
cttgcaaggacggctcttaat

SEQ ID NO: 23123 - DNA, 21 bp, synthetic construct
  source 1..21: mol_type = other DNA
tatgcgaagtcgggcatgaac

SEQ ID NO: 23124 - DNA, 21 bp, synthetic construct
  source 1..21: mol_type = other DNA
actgagtcatcaagcgggagg

SEQ ID NO: 23125 - DNA, 21 bp, synthetic construct
  source 1..21: mol_type = other DNA
tacttcgcggggaggattgcg

SEQ ID NO: 23126 - DNA, 21 bp, synthetic construct
  source 1..21: mol_type = other DNA
tactttacggggatcatagat

SEQ ID NO: 23127 - DNA, 21 bp, synthetic construct
  source 1..21: mol_type = other DNA
aaagatgattttacaggctgg

SEQ ID NO: 23128 - DNA, 21 bp, synthetic construct
  source 1..21: mol_type = other DNA
ctcagcagaatctcctttaac

SEQ ID NO: 23129 - DNA, 21 bp, synthetic construct
  source 1..21: mol_type = other DNA
agcgacggtacttcgagatgg

SEQ ID NO: 23130 - DNA, 21 bp, synthetic construct
  source 1..21: mol_type = other DNA
aatgacggaagttctaaatgg

SEQ ID NO: 23131 - DNA, 21 bp, synthetic construct
  source 1..21: mol_type = other DNA
tatgtaaggtcagacttaatg

SEQ ID NO: 23132 - DNA, 21 bp, synthetic construct
  source 1..21: mol_type = other DNA
tatgctaaatcaggtgttaac

SEQ ID NO: 23133 - DNA, 21 bp, synthetic construct
  source 1..21: mol_type = other DNA
gacatgagtgctcgtgcctgg

SEQ ID NO: 23134 - DNA, 21 bp, synthetic construct
  source 1..21: mol_type = other DNA
cgattggagagctcatcttgg

SEQ ID NO: 23135 - DNA, 21 bp, synthetic construct
  source 1..21: mol_type = other DNA
gagagtgattttaagatttat

SEQ ID NO: 23136 - DNA, 21 bp, synthetic construct
  source 1..21: mol_type = other DNA
ttaaccagactgcagatcaac

SEQ ID NO: 23137 - DNA, 21 bp, synthetic construct
  source 1..21: mol_type = other DNA
gtcttaagctcgaacgtttgg

SEQ ID NO: 23138 - DNA, 21 bp, synthetic construct
  source 1..21: mol_type = other DNA
ttgtcgcgcacaagctacgat

SEQ ID NO: 23139 - DNA, 21 bp, synthetic construct
  source 1..21: mol_type = other DNA
cgagaaggttactcgcactgg

SEQ ID NO: 23140 - DNA, 21 bp, synthetic construct
  source 1..21: mol_type = other DNA
gacctattaagtcgcgattgg

SEQ ID NO: 23141 - DNA, 21 bp, synthetic construct
  source 1..21: mol_type = other DNA
ggcggggaaactagtcggtgg

SEQ ID NO: 23142 - DNA, 21 bp, synthetic construct
  source 1..21: mol_type = other DNA
cgtatggagagcgcgaattgg

SEQ ID NO: 23143 - DNA, 21 bp, synthetic construct
  source 1..21: mol_type = other DNA
cgagatgaaacgagttcatgg

SEQ ID NO: 23144 - DNA, 21 bp, synthetic construct
  source 1..21: mol_type = other DNA
ttgtgcaaaccgtgctacacc

SEQ ID NO: 23145 - DNA, 21 bp, synthetic construct
  source 1..21: mol_type = other DNA
aggttagagtcccaaagctgg

SEQ ID NO: 23146 - DNA, 21 bp, synthetic construct
  source 1..21: mol_type = other DNA
ttgacacgtgctgcccccaat

SEQ ID NO: 23147 - DNA, 21 bp, synthetic construct
  source 1..21: mol_type = other DNA
agtgcaagcacaaatggagta

SEQ ID NO: 23148 - DNA, 21 bp, synthetic construct
  source 1..21: mol_type = other DNA
tatttcaccggtactgtagca

SEQ ID NO: 23149 - DNA, 21 bp, synthetic construct
  source 1..21: mol_type = other DNA
tatagtaagcttggtgctaac

SEQ ID NO: 23150 - DNA, 21 bp, synthetic construct
  source 1..21: mol_type = other DNA
cgcgatgactttagttcatac

SEQ ID NO: 23151 - DNA, 21 bp, synthetic construct
  source 1..21: mol_type = other DNA
ctcagcaaggcggcgttcaac

SEQ ID NO: 23152 - DNA, 21 bp, synthetic construct
  source 1..21: mol_type = other DNA
ctttcgcgcttgggtgacaac

SEQ ID NO: 23153 - DNA, 21 bp, synthetic construct
  source 1..21: mol_type = other DNA
tatagtaaactagggcagaat

SEQ ID NO: 23154 - DNA, 21 bp, synthetic construct
  source 1..21: mol_type = other DNA
atcatgcacgcgagagattgg

SEQ ID NO: 23155 - DNA, 21 bp, synthetic construct
  source 1..21: mol_type = other DNA
atattggagtcccgcgggtgg

SEQ ID NO: 23156 - DNA, 21 bp, synthetic construct
  source 1..21: mol_type = other DNA
gtcagcgatttcaaaatttat

SEQ ID NO: 23157 - DNA, 21 bp, synthetic construct
  source 1..21: mol_type = other DNA
cgcacagacgatgcgtttcct

SEQ ID NO: 23158 - DNA, 21 bp, synthetic construct
  source 1..21: mol_type = other DNA
tatcccttcccagagcccgca

SEQ ID NO: 23159 - DNA, 21 bp, synthetic construct
  source 1..21: mol_type = other DNA
tattttagtggcacagtagca

SEQ ID NO: 23160 - DNA, 21 bp, synthetic construct
  source 1..21: mol_type = other DNA
cggggtgatacggtttatcca

SEQ ID NO: 23161 - DNA, 21 bp, synthetic construct
  source 1..21: mol_type = other DNA
aggatgccggatgcctaccct

SEQ ID NO: 23162 - DNA, 21 bp, synthetic construct
  source 1..21: mol_type = other DNA
tactctaaagctaatacaaac

SEQ ID NO: 23163 - DNA, 21 bp, synthetic construct
  source 1..21: mol_type = other DNA
ggttcgcctggtgtaggctgg

SEQ ID NO: 23164 - DNA, 21 bp, synthetic construct
  source 1..21: mol_type = other DNA
tacttcacaggatttagagag

SEQ ID NO: 23165 - DNA, 21 bp, synthetic construct
  source 1..21: mol_type = other DNA
aaggatgattacgaatacttt

SEQ ID NO: 23166 - DNA, 21 bp, synthetic construct
  source 1..21: mol_type = other DNA
ctctacgatgggacgagcgca

SEQ ID NO: 23167 - DNA, 21 bp, synthetic construct
  source 1..21: mol_type = other DNA
agggatgactttacagtctgg

SEQ ID NO: 23168 - DNA, 21 bp, synthetic construct
  source 1..21: mol_type = other DNA
tatacgaaatcagatagtaaa

SEQ ID NO: 23169 - DNA, 21 bp, synthetic construct
  source 1..21: mol_type = other DNA
cgcgaggaaaccgtatatcca

SEQ ID NO: 23170 - DNA, 21 bp, synthetic construct
  source 1..21: mol_type = other DNA
atacattccaccaacggggtg

SEQ ID NO: 23171 - DNA, 21 bp, synthetic construct
  source 1..21: mol_type = other DNA
gttatggaatcacgggcatgg

SEQ ID NO: 23172 - DNA, 21 bp, synthetic construct
  source 1..21: mol_type = other DNA
ctgactcgtatcagccacaac

SEQ ID NO: 23173 - DNA, 21 bp, synthetic construct
  source 1..21: mol_type = other DNA
gggagtgagtttcaaacgtat

SEQ ID NO: 23174 - DNA, 21 bp, synthetic construct
  source 1..21: mol_type = other DNA
cgtaatgaggatgtgtatccc

SEQ ID NO: 23175 - DNA, 21 bp, synthetic construct
  source 1..21: mol_type = other DNA
tattcgaaaatgaatgtaaat

SEQ ID NO: 23176 - DNA, 21 bp, synthetic construct
  source 1..21: mol_type = other DNA
tatttctcgggcataaccgcc

SEQ ID NO: 23177 - DNA, 21 bp, synthetic construct
  source 1..21: mol_type = other DNA
gtcatggccgacgccttccct

SEQ ID NO: 23178 - DNA, 21 bp, synthetic construct
  source 1..21: mol_type = other DNA
tatagtgctagcggacccaac

SEQ ID NO: 23179 - DNA, 21 bp, synthetic construct
  source 1..21: mol_type = other DNA
cgaccggagagtagtagatgg

SEQ ID NO: 23180 - DNA, 21 bp, synthetic construct
  source 1..21: mol_type = other DNA
tggtggtcaggaatccgtgaa

SEQ ID NO: 23181 - DNA, 21 bp, synthetic construct
  source 1..21: mol_type = other DNA
gtttatagtaccaacggagtt

SEQ ID NO: 23182 - DNA, 21 bp, synthetic construct
  source 1..21: mol_type = other DNA
atgcaccggctaagtcccgtg

SEQ ID NO: 23183 - DNA, 21 bp, synthetic construct
  source 1..21: mol_type = other DNA
actacgagcacgaatggggtc

SEQ ID NO: 23184 - DNA, 21 bp, synthetic construct
  source 1..21: mol_type = other DNA
ttacgggatggtaccaatgcg

SEQ ID NO: 23185 - DNA, 21 bp, synthetic construct
  source 1..21: mol_type = other DNA
tacttttcgggtcatatagac

SEQ ID NO: 23186 - DNA, 21 bp, synthetic construct
  source 1..21: mol_type = other DNA
ttatcgcgtctaaacgcggac

SEQ ID NO: 23187 - DNA, 21 bp, synthetic construct
  source 1..21: mol_type = other DNA
cgtcttcacgatgcgtaccca

SEQ ID NO: 23188 - DNA, 21 bp, synthetic construct
  source 1..21: mol_type = other DNA
ttacataagaaatcccccgac

SEQ ID NO: 23189 - DNA, 21 bp, synthetic construct
  source 1..21: mol_type = other DNA
ctttgcagaccgtgtcccgaa

SEQ ID NO: 23190 - DNA, 21 bp, synthetic construct
  source 1..21: mol_type = other DNA
tacctaaaatcacagtcgaca

SEQ ID NO: 23191 - DNA, 21 bp, synthetic construct
  source 1..21: mol_type = other DNA
aggttgcacgatgcttatccc

SEQ ID NO: 23192 - DNA, 21 bp, synthetic construct
  source 1..21: mol_type = other DNA
tatttcacaggcactgtcgca

SEQ ID NO: 23193 - DNA, 21 bp, synthetic construct
  source 1..21: mol_type = other DNA
tattcaaagatgaatacgaat

SEQ ID NO: 23194 - DNA, 21 bp, synthetic construct
  source 1..21: mol_type = other DNA
tactttacaggtcgcacagag

SEQ ID NO: 23195 - DNA, 21 bp, synthetic construct
  source 1..21: mol_type = other DNA
tacgcccgcctgggaccaaat

SEQ ID NO: 23196 - DNA, 21 bp, synthetic construct
  source 1..21: mol_type = other DNA
gtcatggagagtagagcttgg

SEQ ID NO: 23197 - DNA, 21 bp, synthetic construct
  source 1..21: mol_type = other DNA
cttagcaggctctccccaatt

SEQ ID NO: 23198 - DNA, 21 bp, synthetic construct
  source 1..21: mol_type = other DNA
acagtgagtacaaatggagtg

SEQ ID NO: 23199 - DNA, 21 bp, synthetic construct
  source 1..21: mol_type = other DNA
agagaggaggatgtgtacccg

SEQ ID NO: 23200 - DNA, 21 bp, synthetic construct
  source 1..21: mol_type = other DNA
actctatcctcccaaacatgg

SEQ ID NO: 23201 - DNA, 21 bp, synthetic construct
  source 1..21: mol_type = other DNA
tgcagacctccaacgcgcgac

SEQ ID NO: 23202 - DNA, 21 bp, synthetic construct
  source 1..21: mol_type = other DNA
gatatggaaagccgcaaatgg

SEQ ID NO: 23203 - DNA, 21 bp, synthetic construct
  source 1..21: mol_type = other DNA
tatgcaaagccaggtccgaac

SEQ ID NO: 23204 - DNA, 21 bp, synthetic construct
  source 1..21: mol_type = other DNA
gtggggctcaaaggttgggac

SEQ ID NO: 23205 - DNA, 21 bp, synthetic construct
  source 1..21: mol_type = other DNA
tattcgcgcgtagggtacaat

SEQ ID NO: 23206 - DNA, 21 bp, synthetic construct
  source 1..21: mol_type = other DNA
ctcagccgggtctctccaaac

SEQ ID NO: 23207 - DNA, 21 bp, synthetic construct
  source 1..21: mol_type = other DNA
tactggagtggtatacctatg

SEQ ID NO: 23208 - DNA, 21 bp, synthetic construct
  source 1..21: mol_type = other DNA
atcctcagttcgcgcgaatgg

SEQ ID NO: 23209 - DNA, 21 bp, synthetic construct
  source 1..21: mol_type = other DNA
cgcgacggtactagctcttgg

SEQ ID NO: 23210 - DNA, 21 bp, synthetic construct
  source 1..21: mol_type = other DNA
tatttcgcaggacggatagag

SEQ ID NO: 23211 - DNA, 21 bp, synthetic construct
  source 1..21: mol_type = other DNA
gatcttcggagtgcttcttgg

SEQ ID NO: 23212 - DNA, 21 bp, synthetic construct
  source 1..21: mol_type = other DNA
atatcgtcaaccaacggaatt

SEQ ID NO: 23213 - DNA, 21 bp, synthetic construct
  source 1..21: mol_type = other DNA
aatttagcgtctgcaagctgg

SEQ ID NO: 23214 - DNA, 21 bp, synthetic construct
  source 1..21: mol_type = other DNA
tttgcgcgtacgggtccgaac

SEQ ID NO: 23215 - DNA, 21 bp, synthetic construct
  source 1..21: mol_type = other DNA
acggtctccaccaacggcgtg

SEQ ID NO: 23216 - DNA, 21 bp, synthetic construct
  source 1..21: mol_type = other DNA
tacagtaaacagaatgataac

SEQ ID NO: 23217 - DNA, 21 bp, synthetic construct
  source 1..21: mol_type = other DNA
agggatggcgtgtcccgatgg

SEQ ID NO: 23218 - DNA, 21 bp, synthetic construct
  source 1..21: mol_type = other DNA
tacagtaaagtggggcgtgat

SEQ ID NO: 23219 - DNA, 21 bp, synthetic construct
  source 1..21: mol_type = other DNA
tatagcaaggctaatgaaaac

SEQ ID NO: 23220 - DNA, 21 bp, synthetic construct
  source 1..21: mol_type = other DNA
aggggtgatgacgtattccca

SEQ ID NO: 23221 - DNA, 21 bp, synthetic construct
  source 1..21: mol_type = other DNA
gaaatgcagtctcgcgcctgg

SEQ ID NO: 23222 - DNA, 21 bp, synthetic construct
  source 1..21: mol_type = other DNA
aggactaatgatgtctatcct

SEQ ID NO: 23223 - DNA, 21 bp, synthetic construct
  source 1..21: mol_type = other DNA
gacttgcagagccgctcgtgg

SEQ ID NO: 23224 - DNA, 21 bp, synthetic construct
  source 1..21: mol_type = other DNA
ttaagagatggaactccggcg

SEQ ID NO: 23225 - DNA, 21 bp, synthetic construct
  source 1..21: mol_type = other DNA
ctctgtagaccttgctcttct

SEQ ID NO: 23226 - DNA, 21 bp, synthetic construct
  source 1..21: mol_type = other DNA
catacatctacgaatggcgtg

SEQ ID NO: 23227 - DNA, 21 bp, synthetic construct
  source 1..21: mol_type = other DNA
tcagatgggacaagccgttgg

SEQ ID NO: 23228 - DNA, 21 bp, synthetic construct
  source 1..21: mol_type = other DNA
tattttactggtcatatggag

SEQ ID NO: 23229 - DNA, 21 bp, synthetic construct
  source 1..21: mol_type = other DNA
tatgcgcgtacaggccctaat

SEQ ID NO: 23230 - DNA, 21 bp, synthetic construct
  source 1..21: mol_type = other DNA
cgacttgagagtcacgggtgg

SEQ ID NO: 23231 - DNA, 21 bp, synthetic construct
  source 1..21: mol_type = other DNA
ttgcataggttgcaacttgac

SEQ ID NO: 23232 - DNA, 21 bp, synthetic construct
  source 1..21: mol_type = other DNA
tgtaaggaagactccaggatc

SEQ ID NO: 23233 - DNA, 21 bp, synthetic construct
  source 1..21: mol_type = other DNA
ttcgaagggcacgttcgcttc

SEQ ID NO: 23234 - DNA, 21 bp, synthetic construct
  source 1..21: mol_type = other DNA
tattccaaactaaaccaaaat

SEQ ID NO: 23235 - DNA, 21 bp, synthetic construct
  source 1..21: mol_type = other DNA
tatagtaaaaataattgcaac

SEQ ID NO: 23236 - DNA, 21 bp, synthetic construct
  source 1..21: mol_type = other DNA
attatgtcatctcgtggttgg

SEQ ID NO: 23237 - DNA, 21 bp, synthetic construct
  source 1..21: mol_type = other DNA
aaaatggactcccgattatgg

SEQ ID NO: 23238 - DNA, 21 bp, synthetic construct
  source 1..21: mol_type = other DNA
ccgctcgactcatacaagtgg

SEQ ID NO: 23239 - DNA, 21 bp, synthetic construct
  source 1..21: mol_type = other DNA
cttcaccgcttgatgcccgat

SEQ ID NO: 23240 - DNA, 21 bp, synthetic construct
  source 1..21: mol_type = other DNA
gtgggccataaaggttgggac

SEQ ID NO: 23241 - DNA, 21 bp, synthetic construct
  source 1..21: mol_type = other DNA
ctcagcaagacaggccctaac

SEQ ID NO: 23242 - DNA, 21 bp, synthetic construct
  source 1..21: mol_type = other DNA
cgcgacgggacctcaagttgg

SEQ ID NO: 23243 - DNA, 21 bp, synthetic construct
  source 1..21: mol_type = other DNA
tatctaaaatcgcaaacgatt

SEQ ID NO: 23244 - DNA, 21 bp, synthetic construct
  source 1..21: mol_type = other DNA
agaatgagcgatgcttatccg

SEQ ID NO: 23245 - DNA, 21 bp, synthetic construct
  source 1..21: mol_type = other DNA
gtgatgtctgagcgcacgtgg

SEQ ID NO: 23246 - DNA, 21 bp, synthetic construct
  source 1..21: mol_type = other DNA
acggatggcacgagtaggtgg

SEQ ID NO: 23247 - DNA, 21 bp, synthetic construct
  source 1..21: mol_type = other DNA
cgggaagatttcactagctgg

SEQ ID NO: 23248 - DNA, 21 bp, synthetic construct
  source 1..21: mol_type = other DNA
tatcacaaaatgatgttgaat

SEQ ID NO: 23249 - DNA, 21 bp, synthetic construct
  source 1..21: mol_type = other DNA
acgcatagcaccaacggagtc

SEQ ID NO: 23250 - DNA, 21 bp, synthetic construct
  source 1..21: mol_type = other DNA
tacctaaaatcccagtctgat

SEQ ID NO: 23251 - DNA, 21 bp, synthetic construct
  source 1..21: mol_type = other DNA
ccctacgcgaagtcgcccttg

SEQ ID NO: 23252 - DNA, 21 bp, synthetic construct
  source 1..21: mol_type = other DNA
tcgaacagcaccaatggcgta

SEQ ID NO: 23253 - DNA, 21 bp, synthetic construct
  source 1..21: mol_type = other DNA
attgcagctttaggatgggac

SEQ ID NO: 23254 - DNA, 21 bp, synthetic construct
  source 1..21: mol_type = other DNA
cgaaatgatatggtatttccg

SEQ ID NO: 23255 - DNA, 21 bp, synthetic construct
  source 1..21: mol_type = other DNA
gacccggcatcacgcgcgtgg

SEQ ID NO: 23256 - DNA, 21 bp, synthetic construct
  source 1..21: mol_type = other DNA
agatatgaacctgtatgtcct

SEQ ID NO: 23257 - DNA, 21 bp, synthetic construct
  source 1..21: mol_type = other DNA
tacgttcgtagcgacaaactc

SEQ ID NO: 23258 - DNA, 21 bp, synthetic construct
  source 1..21: mol_type = other DNA
aaagacgaatttaggagtttc

SEQ ID NO: 23259 - DNA, 21 bp, synthetic construct
  source 1..21: mol_type = other DNA
gtaggcacaaaggggtgggac

SEQ ID NO: 23260 - DNA, 21 bp, synthetic construct
  source 1..21: mol_type = other DNA
cgtatggaatcatcgcaatgg

SEQ ID NO: 23261 - DNA, 21 bp, synthetic construct
  source 1..21: mol_type = other DNA
agcagttcgactaacggaatc

SEQ ID NO: 23262 - DNA, 21 bp, synthetic construct
  source 1..21: mol_type = other DNA
tatagcaaggctcaagggata

SEQ ID NO: 23263 - DNA, 21 bp, synthetic construct
  source 1..21: mol_type = other DNA
tattttactgggatgcatgaa

SEQ ID NO: 23264 - DNA, 21 bp, synthetic construct
  source 1..21: mol_type = other DNA
gtattgagcgaccgcaattgg

SEQ ID NO: 23265 - DNA, 21 bp, synthetic construct
  source 1..21: mol_type = other DNA
acggatgagtttcacgcttac

SEQ ID NO: 23266 - DNA, 21 bp, synthetic construct
  source 1..21: mol_type = other DNA
attgagtccagccggacgtgg

SEQ ID NO: 23267 - DNA, 21 bp, synthetic construct
  source 1..21: mol_type = other DNA
attatggaagctcgagattgg

SEQ ID NO: 23268 - DNA, 21 bp, synthetic construct
  source 1..21: mol_type = other DNA
cgcactgatgatacttttccg

SEQ ID NO: 23269 - DNA, 21 bp, synthetic construct
  source 1..21: mol_type = other DNA
aggtcagagttcgagacgttc

SEQ ID NO: 23270 - DNA, 21 bp, synthetic construct
  source 1..21: mol_type = other DNA
tacgtaaaatcacagaatata

SEQ ID NO: 23271 - DNA, 21 bp, synthetic construct
  source 1..21: mol_type = other DNA
cagatggccagccgtgactgg

SEQ ID NO: 23272 - DNA, 21 bp, synthetic construct
  source 1..21: mol_type = other DNA
cccatggccgatagaaagtgg

SEQ ID NO: 23273 - DNA, 21 bp, synthetic construct
  source 1..21: mol_type = other DNA
tactctaaattgggagcgaat

SEQ ID NO: 23274 - DNA, 21 bp, synthetic construct
  source 1..21: mol_type = other DNA
accctctcgactaatggtcgt

SEQ ID NO: 23275 - DNA, 21 bp, synthetic construct
  source 1..21: mol_type = other DNA
aaggacgactatgttagttat

SEQ ID NO: 23276 - DNA, 21 bp, synthetic construct
  source 1..21: mol_type = other DNA
tatttcactgggactaaagag

SEQ ID NO: 23277 - DNA, 21 bp, synthetic construct
  source 1..21: mol_type = other DNA
tacgcgaaaaatgggcttaat

SEQ ID NO: 23278 - DNA, 21 bp, synthetic construct
  source 1..21: mol_type = other DNA
ttaatgagcggtgacgggcca

SEQ ID NO: 23279 - DNA, 21 bp, synthetic construct
  source 1..21: mol_type = other DNA
ttgtgggatggaactggtgcc

SEQ ID NO: 23280 - DNA, 21 bp, synthetic construct
  source 1..21: mol_type = other DNA
aagttggaaagctcgatgtgg

SEQ ID NO: 23281 - DNA, 21 bp, synthetic construct
  source 1..21: mol_type = other DNA
atcatggcaagcagagattgg

SEQ ID NO: 23282 - DNA, 21 bp, synthetic construct
  source 1..21: mol_type = other DNA
tacagcaagttaggggggaac

SEQ ID NO: 23283 - DNA, 21 bp, synthetic construct
  source 1..21: mol_type = other DNA
ctgcaccgtttgcaggtggac

SEQ ID NO: 23284 - DNA, 21 bp, synthetic construct
  source 1..21: mol_type = other DNA
tattttaccgggacagtagac

SEQ ID NO: 23285 - DNA, 21 bp, synthetic construct
  source 1..21: mol_type = other DNA
gtcatgagtgacagagtttgg

SEQ ID NO: 23286 - DNA, 21 bp, synthetic construct
  source 1..21: mol_type = other DNA
aagatgagctctgcaaattgg

SEQ ID NO: 23287 - DNA, 21 bp, synthetic construct
  source 1..21: mol_type = other DNA
agagaagacttcacggcatgg

SEQ ID NO: 23288 - DNA, 21 bp, synthetic construct
  source 1..21: mol_type = other DNA
tattggagcggaataatagag

SEQ ID NO: 23289 - DNA, 21 bp, synthetic construct
  source 1..21: mol_type = other DNA
ctatcaagggttagtcctaac

SEQ ID NO: 23290 - DNA, 21 bp, synthetic construct
  source 1..21: mol_type = other DNA
cgtgacgaattcagtacgtac

SEQ ID NO: 23291 - DNA, 21 bp, synthetic construct
  source 1..21: mol_type = other DNA
tacagcaaagtaggctacaat

SEQ ID NO: 23292 - DNA, 21 bp, synthetic construct
  source 1..21: mol_type = other DNA
agagaagacggcgtgagctgg

SEQ ID NO: 23293 - DNA, 21 bp, synthetic construct
  source 1..21: mol_type = other DNA
agaacatatgacagcattccc

SEQ ID NO: 23294 - DNA, 21 bp, synthetic construct
  source 1..21: mol_type = other DNA
agggacgagtacagttcctat

SEQ ID NO: 23295 - DNA, 21 bp, synthetic construct
  source 1..21: mol_type = other DNA
tacgtaaaatcgcaacccctc

SEQ ID NO: 23296 - DNA, 21 bp, synthetic construct
  source 1..21: mol_type = other DNA
tactctaaagctggtaccaac

SEQ ID NO: 23297 - DNA, 21 bp, synthetic construct
  source 1..21: mol_type = other DNA
agaagcgaaagcgtgtatcca

SEQ ID NO: 23298 - DNA, 21 bp, synthetic construct
  source 1..21: mol_type = other DNA
aaagattccttcacctcgtgg

SEQ ID NO: 23299 - DNA, 21 bp, synthetic construct
  source 1..21: mol_type = other DNA
tactctaaggtcggacgagat

SEQ ID NO: 23300 - DNA, 21 bp, synthetic construct
  source 1..21: mol_type = other DNA
tcaatggagtcgcatggttgg

SEQ ID NO: 23301 - DNA, 21 bp, synthetic construct
  source 1..21: mol_type = other DNA
tactcaaaggcggggagcaac

SEQ ID NO: 23302 - DNA, 21 bp, synthetic construct
  source 1..21: mol_type = other DNA
aacatggcgtcaagagattgg

SEQ ID NO: 23303 - DNA, 21 bp, synthetic construct
  source 1..21: mol_type = other DNA
ctttctcgagcgagtacaaat

SEQ ID NO: 23304 - DNA, 21 bp, synthetic construct
  source 1..21: mol_type = other DNA
gacatggcatcgaatcgatgg

SEQ ID NO: 23305 - DNA, 21 bp, synthetic construct
  source 1..21: mol_type = other DNA
ttgagccgtgtatctccgaat

SEQ ID NO: 23306 - DNA, 21 bp, synthetic construct
  source 1..21: mol_type = other DNA
tacttctccgggattcatgcg

SEQ ID NO: 23307 - DNA, 21 bp, synthetic construct
  source 1..21: mol_type = other DNA
tattttactggaacgttcgat

SEQ ID NO: 23308 - DNA, 21 bp, synthetic construct
  source 1..21: mol_type = other DNA
aggggggacgatgtttaccct

SEQ ID NO: 23309 - DNA, 21 bp, synthetic construct
  source 1..21: mol_type = other DNA
tattttacaggaactactgag

SEQ ID NO: 23310 - DNA, 21 bp, synthetic construct
  source 1..21: mol_type = other DNA
cgtatgggggatgcgtaccct

SEQ ID NO: 23311 - DNA, 21 bp, synthetic construct
  source 1..21: mol_type = other DNA
ttgcacaggatgtcgatagat

SEQ ID NO: 23312 - DNA, 21 bp, synthetic construct
  source 1..21: mol_type = other DNA
cacgacggaacttccgcgtgg

SEQ ID NO: 23313 - DNA, 21 bp, synthetic construct
  source 1..21: mol_type = other DNA
tatcataagttagatatcaat

SEQ ID NO: 23314 - DNA, 21 bp, synthetic construct
  source 1..21: mol_type = other DNA
attacttcgaccaacgggata

SEQ ID NO: 23315 - DNA, 21 bp, synthetic construct
  source 1..21: mol_type = other DNA
tacttcaccggtaaacatgag

SEQ ID NO: 23316 - DNA, 21 bp, synthetic construct
  source 1..21: mol_type = other DNA
tactttacaggtaaggcggat

SEQ ID NO: 23317 - DNA, 21 bp, synthetic construct
  source 1..21: mol_type = other DNA
agagaaatgactgtctttccg

SEQ ID NO: 23318 - DNA, 21 bp, synthetic construct
  source 1..21: mol_type = other DNA
agaaatatggacgtatatcct

SEQ ID NO: 23319 - DNA, 21 bp, synthetic construct
  source 1..21: mol_type = other DNA
gatatgatgtctcataaatgg

SEQ ID NO: 23320 - DNA, 21 bp, synthetic construct
  source 1..21: mol_type = other DNA
agcgacggggtttctaggtgg

SEQ ID NO: 23321 - DNA, 21 bp, synthetic construct
  source 1..21: mol_type = other DNA
tacgtgaagtcacaactcgat

SEQ ID NO: 23322 - DNA, 21 bp, synthetic construct
  source 1..21: mol_type = other DNA
cgcaacgacgtggtttatccc

SEQ ID NO: 23323 - DNA, 21 bp, synthetic construct
  source 1..21: mol_type = other DNA
taccacaaattgcagtcattc

SEQ ID NO: 23324 - DNA, 21 bp, synthetic construct
  source 1..21: mol_type = other DNA
tacttctcgggacaaaaagag

SEQ ID NO: 23325 - DNA, 21 bp, synthetic construct
  source 1..21: mol_type = other DNA
accgggagcacaaacggggta

SEQ ID NO: 23326 - DNA, 21 bp, synthetic construct
  source 1..21: mol_type = other DNA
agaacttcggatgtgtacccg

SEQ ID NO: 23327 - DNA, 21 bp, synthetic construct
  source 1..21: mol_type = other DNA
agagaagaccatgtctcctgg

SEQ ID NO: 23328 - DNA, 21 bp, synthetic construct
  source 1..21: mol_type = other DNA
tacttcagcgggatcgtcgcc

SEQ ID NO: 23329 - DNA, 21 bp, synthetic construct
  source 1..21: mol_type = other DNA
agagcactggaaggggcggat

SEQ ID NO: 23330 - DNA, 21 bp, synthetic construct
  source 1..21: mol_type = other DNA
gtcctaagtgaccgatcctgg

SEQ ID NO: 23331 - DNA, 21 bp, synthetic construct
  source 1..21: mol_type = other DNA
ctttcgcggataagcgtaaat

SEQ ID NO: 23332 - DNA, 21 bp, synthetic construct
  source 1..21: mol_type = other DNA
gtgatgttcgatgcttatccg

SEQ ID NO: 23333 - DNA, 21 bp, synthetic construct
  source 1..21: mol_type = other DNA
tattttagtggtatcgtatca

SEQ ID NO: 23334 - DNA, 21 bp, synthetic construct
  source 1..21: mol_type = other DNA
ttcagcaaattgaatcaaaac

SEQ ID NO: 23335 - DNA, 21 bp, synthetic construct
  source 1..21: mol_type = other DNA
tacctcaagagccaggaatgg

SEQ ID NO: 23336 - DNA, 21 bp, synthetic construct
  source 1..21: mol_type = other DNA
ccgatgatgtcaggcacgtgg

SEQ ID NO: 23337 - DNA, 21 bp, synthetic construct
  source 1..21: mol_type = other DNA
gtgtttagtacgaacggcatt

SEQ ID NO: 23338 - DNA, 21 bp, synthetic construct
  source 1..21: mol_type = other DNA
gatttaagcagttcggattgg

SEQ ID NO: 23339 - DNA, 21 bp, synthetic construct
  source 1..21: mol_type = other DNA
tactttagcgggcagaaagag

SEQ ID NO: 23340 - DNA, 21 bp, synthetic construct
  source 1..21: mol_type = other DNA
tatttcacgggaatgcgcgag

SEQ ID NO: 23341 - DNA, 21 bp, synthetic construct
  source 1..21: mol_type = other DNA
tacgcaaaggtagggcctaat

SEQ ID NO: 23342 - DNA, 21 bp, synthetic construct
  source 1..21: mol_type = other DNA
aaagatggtacaagttattgg

SEQ ID NO: 23343 - DNA, 21 bp, synthetic construct
  source 1..21: mol_type = other DNA
gatatgagttcaaataagtgg

SEQ ID NO: 23344 - DNA, 21 bp, synthetic construct
  source 1..21: mol_type = other DNA
ctaagccggttgggtggtggt

SEQ ID NO: 23345 - DNA, 21 bp, synthetic construct
  source 1..21: mol_type = other DNA
tatttttccggcgtgaaggcc

SEQ ID NO: 23346 - DNA, 21 bp, synthetic construct
  source 1..21: mol_type = other DNA
cgcctatatgatgccatcccc

SEQ ID NO: 23347 - DNA, 21 bp, synthetic construct
  source 1..21: mol_type = other DNA
gtaatgagcagtactacatgg

SEQ ID NO: 23348 - DNA, 21 bp, synthetic construct
  source 1..21: mol_type = other DNA
cgcgaggacgctgtacggtgg

SEQ ID NO: 23349 - DNA, 21 bp, synthetic construct
  source 1..21: mol_type = other DNA
agaggtgagggtgtgtatccg

SEQ ID NO: 23350 - DNA, 21 bp, synthetic construct
  source 1..21: mol_type = other DNA
tattttacgggtactttggag

SEQ ID NO: 23351 - DNA, 21 bp, synthetic construct
  source 1..21: mol_type = other DNA
tattctaaggcgggatacaat

SEQ ID NO: 23352 - DNA, 21 bp, synthetic construct
  source 1..21: mol_type = other DNA
aggactagtgacgcgtaccca

SEQ ID NO: 23353 - DNA, 21 bp, synthetic construct
  source 1..21: mol_type = other DNA
tacttcactggtattacgtca

SEQ ID NO: 23354 - DNA, 21 bp, synthetic construct
  source 1..21: mol_type = other DNA
tattccaaagctaacatgaat

SEQ ID NO: 23355 - DNA, 21 bp, synthetic construct
  source 1..21: mol_type = other DNA
gttcactctagtaatggagtg

SEQ ID NO: 23356 - DNA, 21 bp, synthetic construct
  source 1..21: mol_type = other DNA
tattttactggtcgtctcgag

SEQ ID NO: 23357 - DNA, 21 bp, synthetic construct
  source 1..21: mol_type = other DNA
ttcagcaaggtaggtttcaat

SEQ ID NO: 23358 - DNA, 21 bp, synthetic construct
  source 1..21: mol_type = other DNA
tacagcaaaatgggcgcaaac

SEQ ID NO: 23359 - DNA, 21 bp, synthetic construct
  source 1..21: mol_type = other DNA
tacgtcaaaagccagcaaacc

SEQ ID NO: 23360 - DNA, 21 bp, synthetic construct
  source 1..21: mol_type = other DNA
tacgcaaaaactggcacgaat

SEQ ID NO: 23361 - DNA, 21 bp, synthetic construct
  source 1..21: mol_type = other DNA
gatttctatggaaagtatgct

SEQ ID NO: 23362 - DNA, 21 bp, synthetic construct
  source 1..21: mol_type = other DNA
cgtgcattggaaggaagggat

SEQ ID NO: 23363 - DNA, 21 bp, synthetic construct
  source 1..21: mol_type = other DNA
ctagagtcgactaatggcagg

SEQ ID NO: 23364 - DNA, 21 bp, synthetic construct
  source 1..21: mol_type = other DNA
gtactctctgaccgtctctgg

SEQ ID NO: 23365 - DNA, 21 bp, synthetic construct
  source 1..21: mol_type = other DNA
gatatgagcagtaaggtgtgg

SEQ ID NO: 23366 - DNA, 21 bp, synthetic construct
  source 1..21: mol_type = other DNA
tttcataaaaaaggtccggac

SEQ ID NO: 23367 - DNA, 21 bp, synthetic construct
  source 1..21: mol_type = other DNA
tatcttaagtctcagagttac

SEQ ID NO: 23368 - DNA, 21 bp, synthetic construct
  source 1..21: mol_type = other DNA
ctctgcaaaccatgtttaaat

SEQ ID NO: 23369 - DNA, 21 bp, synthetic construct
  source 1..21: mol_type = other DNA
gtgctttctgcctcttcgtgg

SEQ ID NO: 23370 - DNA, 21 bp, synthetic construct
  source 1..21: mol_type = other DNA
gtaatggccgatcgcaagtgg

SEQ ID NO: 23371 - DNA, 21 bp, synthetic construct
  source 1..21: mol_type = other DNA
ctgcacagactttcgcaggat

SEQ ID NO: 23372 - DNA, 21 bp, synthetic construct
  source 1..21: mol_type = other DNA
tatttttcaaaggtcaaagag

SEQ ID NO: 23373 - DNA, 21 bp, synthetic construct
  source 1..21: mol_type = other DNA
tactcaaaaatgggattcaat

SEQ ID NO: 23374 - DNA, 21 bp, synthetic construct
  source 1..21: mol_type = other DNA
tatttcacagggaaacacgac

SEQ ID NO: 23375 - DNA, 21 bp, synthetic construct
  source 1..21: mol_type = other DNA
cttcaccggctgagtgaattt

SEQ ID NO: 23376 - DNA, 21 bp, synthetic construct
  source 1..21: mol_type = other DNA
tacagcaaaattgggaagaat

SEQ ID NO: 23377 - DNA, 21 bp, synthetic construct
  source 1..21: mol_type = other DNA
ttcagtgtgtgtactgggagc

SEQ ID NO: 23378 - DNA, 21 bp, synthetic construct
  source 1..21: mol_type = other DNA
cgcatggatgatgtctatccc

SEQ ID NO: 23379 - DNA, 21 bp, synthetic construct
  source 1..21: mol_type = other DNA
cggagtgccgacgcgtaccct

SEQ ID NO: 23380 - DNA, 21 bp, synthetic construct
  source 1..21: mol_type = other DNA
ttacaccgcttaagccctatg

SEQ ID NO: 23381 - DNA, 21 bp, synthetic construct
  source 1..21: mol_type = other DNA
ctctcacgcgcagctccgaac

SEQ ID NO: 23382 - DNA, 21 bp, synthetic construct
  source 1..21: mol_type = other DNA
cgagaagactcggtctactgg

SEQ ID NO: 23383 - DNA, 21 bp, synthetic construct
  source 1..21: mol_type = other DNA
tatgttaagagtcaaaacatc

SEQ ID NO: 23384 - DNA, 21 bp, synthetic construct
  source 1..21: mol_type = other DNA
cccatgggtagcgcccaatgg

SEQ ID NO: 23385 - DNA, 21 bp, synthetic construct
  source 1..21: mol_type = other DNA
ctccatgtacgacttaacaat

SEQ ID NO: 23386 - DNA, 21 bp, synthetic construct
  source 1..21: mol_type = other DNA
tatcttaaaagtcaggattac

SEQ ID NO: 23387 - DNA, 21 bp, synthetic construct
  source 1..21: mol_type = other DNA
agggacgagttcaccagctac

SEQ ID NO: 23388 - DNA, 21 bp, synthetic construct
  source 1..21: mol_type = other DNA
gtcctttcggacaggaattgg

SEQ ID NO: 23389 - DNA, 21 bp, synthetic construct
  source 1..21: mol_type = other DNA
tacttttcagggcaaattgag

SEQ ID NO: 23390 - DNA, 21 bp, synthetic construct
  source 1..21: mol_type = other DNA
tacgtgaaaagtcaggcatca

SEQ ID NO: 23391 - DNA, 21 bp, synthetic construct
  source 1..21: mol_type = other DNA
cgcacattggatgccttccca

SEQ ID NO: 23392 - DNA, 21 bp, synthetic construct
  source 1..21: mol_type = other DNA
ctatcgcgactgaacgataac

SEQ ID NO: 23393 - DNA, 21 bp, synthetic construct
  source 1..21: mol_type = other DNA
gtcctatcaacaaacggggtc

SEQ ID NO: 23394 - DNA, 21 bp, synthetic construct
  source 1..21: mol_type = other DNA
tacgcgaaaccgggtcccaat

SEQ ID NO: 23395 - DNA, 21 bp, synthetic construct
  source 1..21: mol_type = other DNA
ttgcaccgtctgagtgattcg

SEQ ID NO: 23396 - DNA, 21 bp, synthetic construct
  source 1..21: mol_type = other DNA
gtactttcgagcaatgtctgg

SEQ ID NO: 23397 - DNA, 21 bp, synthetic construct
  source 1..21: mol_type = other DNA
tactggtcagctataaaagag

SEQ ID NO: 23398 - DNA, 21 bp, synthetic construct
  source 1..21: mol_type = other DNA
tactttagcgggatcccaagt

SEQ ID NO: 23399 - DNA, 21 bp, synthetic construct
  source 1..21: mol_type = other DNA
tactcgaaaaccggcttgaac

SEQ ID NO: 23400 - DNA, 21 bp, synthetic construct
  source 1..21: mol_type = other DNA
tattccaagctttcaagtaat

SEQ ID NO: 23401 - DNA, 21 bp, synthetic construct
  source 1..21: mol_type = other DNA
gtcgctatggaggggcgggac

SEQ ID NO: 23402 - DNA, 21 bp, synthetic construct
  source 1..21: mol_type = other DNA
ttatcgagggtaggacgcgat

SEQ ID NO: 23403 - DNA, 21 bp, synthetic construct
  source 1..21: mol_type = other DNA
gatgatggctcctcacgttgg

SEQ ID NO: 23404 - DNA, 21 bp, synthetic construct
  source 1..21: mol_type = other DNA
gacatggaatcacgcacatgg

SEQ ID NO: 23405 - DNA, 21 bp, synthetic construct
  source 1..21: mol_type = other DNA
ttacatcggctccagtcgacc

SEQ ID NO: 23406 - DNA, 21 bp, synthetic construct
  source 1..21: mol_type = other DNA
ctcagccgcacgtcgactaac

SEQ ID NO: 23407 - DNA, 21 bp, synthetic construct
  source 1..21: mol_type = other DNA
aaaggtgaaagtcgcgagtgg

SEQ ID NO: 23408 - DNA, 21 bp, synthetic construct
  source 1..21: mol_type = other DNA
gacctacaaagcagtacatgg

SEQ ID NO: 23409 - DNA, 21 bp, synthetic construct
  source 1..21: mol_type = other DNA
aggatggaatcggctaactgg

SEQ ID NO: 23410 - DNA, 21 bp, synthetic construct
  source 1..21: mol_type = other DNA
ggaagtgagtttattagcttt

SEQ ID NO: 23411 - DNA, 21 bp, synthetic construct
  source 1..21: mol_type = other DNA
tacttaaagtcacagagtcaa

SEQ ID NO: 23412 - DNA, 21 bp, synthetic construct
  source 1..21: mol_type = other DNA
ataatgacctctcgtgattgg

SEQ ID NO: 23413 - DNA, 21 bp, synthetic construct
  source 1..21: mol_type = other DNA
ttacatcgtctgagcgttaac

SEQ ID NO: 23414 - DNA, 21 bp, synthetic construct
  source 1..21: mol_type = other DNA
tatttcagtggtcagaaggaa

SEQ ID NO: 23415 - DNA, 21 bp, synthetic construct
  source 1..21: mol_type = other DNA
ttcttcactgggatcatcgag

SEQ ID NO: 23416 - DNA, 21 bp, synthetic construct
  source 1..21: mol_type = other DNA
aaagatgactacagcacttat

SEQ ID NO: 23417 - DNA, 21 bp, synthetic construct
  source 1..21: mol_type = other DNA
tatagtaaaacgggactaaat

SEQ ID NO: 23418 - DNA, 21 bp, synthetic construct
  source 1..21: mol_type = other DNA
gttatgtcggatcgtatatgg

SEQ ID NO: 23419 - DNA, 21 bp, synthetic construct
  source 1..21: mol_type = other DNA
cgggatagcacagtatttccg

SEQ ID NO: 23420 - DNA, 21 bp, synthetic construct
  source 1..21: mol_type = other DNA
gatttgtcgagcagggactgg

SEQ ID NO: 23421 - DNA, 21 bp, synthetic construct
  source 1..21: mol_type = other DNA
ggagctgatcatgttaagtgg

SEQ ID NO: 23422 - DNA, 21 bp, synthetic construct
  source 1..21: mol_type = other DNA
tatagcaaggcaaataccaat

SEQ ID NO: 23423 - DNA, 21 bp, synthetic construct
  source 1..21: mol_type = other DNA
tatagcaaagcgggacataac

SEQ ID NO: 23424 - DNA, 21 bp, synthetic construct
  source 1..21: mol_type = other DNA
cgtcttcatgacgcctacccg

SEQ ID NO: 23425 - DNA, 21 bp, synthetic construct
  source 1..21: mol_type = other DNA
ttgcataggataggcgccaac

SEQ ID NO: 23426 - DNA, 21 bp, synthetic construct
  source 1..21: mol_type = other DNA
aaggacgattataccctcttc

SEQ ID NO: 23427 - DNA, 21 bp, synthetic construct
  source 1..21: mol_type = other DNA
tactcgaagcttgactataat

SEQ ID NO: 23428 - DNA, 21 bp, synthetic construct
  source 1..21: mol_type = other DNA
aaatgcaagccctgcccgata

SEQ ID NO: 23429 - DNA, 21 bp, synthetic construct
  source 1..21: mol_type = other DNA
atgcaccgcttaagtccgctt

SEQ ID NO: 23430 - DNA, 21 bp, synthetic construct
  source 1..21: mol_type = other DNA
gacttaggctcagcgaaatgg

SEQ ID NO: 23431 - DNA, 21 bp, synthetic construct
  source 1..21: mol_type = other DNA
tactataccggtgtgaaagag

SEQ ID NO: 23432 - DNA, 21 bp, synthetic construct
  source 1..21: mol_type = other DNA
cgaaacgaatcagtgtatcct

SEQ ID NO: 23433 - DNA, 21 bp, synthetic construct
  source 1..21: mol_type = other DNA
ctggccaggacaggtgacaat

SEQ ID NO: 23434 - DNA, 21 bp, synthetic construct
  source 1..21: mol_type = other DNA
taccacgcacagggcccgaac

SEQ ID NO: 23435 - DNA, 21 bp, synthetic construct
  source 1..21: mol_type = other DNA
tacagcaaggctgggtttaat

SEQ ID NO: 23436 - DNA, 21 bp, synthetic construct
  source 1..21: mol_type = other DNA
tatttctcgggcaagatagct

SEQ ID NO: 23437 - DNA, 21 bp, synthetic construct
  source 1..21: mol_type = other DNA
gaaatggcgtcccactcatgg

SEQ ID NO: 23438 - DNA, 21 bp, synthetic construct
  source 1..21: mol_type = other DNA
atgcgggacggtacaccttcg

SEQ ID NO: 23439 - DNA, 21 bp, synthetic construct
  source 1..21: mol_type = other DNA
gacatgtcgagcgtccaatgg

SEQ ID NO: 23440 - DNA, 21 bp, synthetic construct
  source 1..21: mol_type = other DNA
gttcagtcgacaaacggaata

SEQ ID NO: 23441 - DNA, 21 bp, synthetic construct
  source 1..21: mol_type = other DNA
tactcaaaacaaaacattaat

SEQ ID NO: 23442 - DNA, 21 bp, synthetic construct
  source 1..21: mol_type = other DNA
gtgaattcgagcaatggggtt

SEQ ID NO: 23443 - DNA, 21 bp, synthetic construct
  source 1..21: mol_type = other DNA
agagatggcatgtctgcttgg

SEQ ID NO: 23444 - DNA, 21 bp, synthetic construct
  source 1..21: mol_type = other DNA
ttttcaagagtgggtgagaac

SEQ ID NO: 23445 - DNA, 21 bp, synthetic construct
  source 1..21: mol_type = other DNA
tactctaagcaaggtgctaat

SEQ ID NO: 23446 - DNA, 21 bp, synthetic construct
  source 1..21: mol_type = other DNA
ttggctaagacggggaacaat

SEQ ID NO: 23447 - DNA, 21 bp, synthetic construct
  source 1..21: mol_type = other DNA
ctgcaccgcttaagtccaaat

SEQ ID NO: 23448 - DNA, 21 bp, synthetic construct
  source 1..21: mol_type = other DNA
tactttagtggaataactgcc

SEQ ID NO: 23449 - DNA, 21 bp, synthetic construct
  source 1..21: mol_type = other DNA
cgtatggcagatgccttccca

SEQ ID NO: 23450 - DNA, 21 bp, synthetic construct
  source 1..21: mol_type = other DNA
cgtttggaaagtagcggctgg

SEQ ID NO: 23451 - DNA, 21 bp, synthetic construct
  source 1..21: mol_type = other DNA
tcgacagactacgtgagttgg

SEQ ID NO: 23452 - DNA, 21 bp, synthetic construct
  source 1..21: mol_type = other DNA
tactttagcaaggtcatcgct

SEQ ID NO: 23453 - DNA, 21 bp, synthetic construct
  source 1..21: mol_type = other DNA
atccagagtacgaacggcatt

SEQ ID NO: 23454 - DNA, 21 bp, synthetic construct
  source 1..21: mol_type = other DNA
gttagttcctcaaatggtcgc

SEQ ID NO: 23455 - DNA, 21 bp, synthetic construct
  source 1..21: mol_type = other DNA
tactttagcgggcagattgaa

SEQ ID NO: 23456 - DNA, 21 bp, synthetic construct
  source 1..21: mol_type = other DNA
taccttaagagccagtcgttc

SEQ ID NO: 23457 - DNA, 21 bp, synthetic construct
  source 1..21: mol_type = other DNA
tattttacaggaagacttgaa

SEQ ID NO: 23458 - DNA, 21 bp, synthetic construct
  source 1..21: mol_type = other DNA
gtctctgaatttacaacctac

SEQ ID NO: 23459 - DNA, 21 bp, synthetic construct
  source 1..21: mol_type = other DNA
ggctgcgggacaaaaagcgga

SEQ ID NO: 23460 - DNA, 21 bp, synthetic construct
  source 1..21: mol_type = other DNA
aagagtgagtttaaaatcttc

SEQ ID NO: 23461 - DNA, 21 bp, synthetic construct
  source 1..21: mol_type = other DNA
gaaatggagagttccgtctgg

SEQ ID NO: 23462 - DNA, 21 bp, synthetic construct
  source 1..21: mol_type = other DNA
tactttagtggtaccattgac

SEQ ID NO: 23463 - DNA, 21 bp, synthetic construct
  source 1..21: mol_type = other DNA
agagactcgaccgttttcccc

SEQ ID NO: 23464 - DNA, 21 bp, synthetic construct
  source 1..21: mol_type = other DNA
cgcgaagatggggtaaagtgg

SEQ ID NO: 23465 - DNA, 21 bp, synthetic construct
  source 1..21: mol_type = other DNA
ctaatgtcgagcgccaagtgg

SEQ ID NO: 23466 - DNA, 21 bp, synthetic construct
  source 1..21: mol_type = other DNA
gttatggctgacagaatatgg

SEQ ID NO: 23467 - DNA, 21 bp, synthetic construct
  source 1..21: mol_type = other DNA
gacctgaactctcgtagttgg

SEQ ID NO: 23468 - DNA, 21 bp, synthetic construct
  source 1..21: mol_type = other DNA
agagatatggacgtgtaccct

SEQ ID NO: 23469 - DNA, 21 bp, synthetic construct
  source 1..21: mol_type = other DNA
cgcgatgaattcagcccgtac

SEQ ID NO: 23470 - DNA, 21 bp, synthetic construct
  source 1..21: mol_type = other DNA
tacttttccgggagattagaa

SEQ ID NO: 23471 - DNA, 21 bp, synthetic construct
  source 1..21: mol_type = other DNA
tatctaaagtcgcaaaactac

SEQ ID NO: 23472 - DNA, 21 bp, synthetic construct
  source 1..21: mol_type = other DNA
ttagctcgcacgggagataac

SEQ ID NO: 23473 - DNA, 21 bp, synthetic construct
  source 1..21: mol_type = other DNA
agagaggaactagttcgatgg

SEQ ID NO: 23474 - DNA, 21 bp, synthetic construct
  source 1..21: mol_type = other DNA
tactttacaggctacatcgac

SEQ ID NO: 23475 - DNA, 21 bp, synthetic construct
  source 1..21: mol_type = other DNA
cgcgacgatttcacggtgtat

SEQ ID NO: 23476 - DNA, 21 bp, synthetic construct
  source 1..21: mol_type = other DNA
tactttactggcactgtgctg

SEQ ID NO: 23477 - DNA, 21 bp, synthetic construct
  source 1..21: mol_type = other DNA
tatagcaagaagaacgagaac

SEQ ID NO: 23478 - DNA, 21 bp, synthetic construct
  source 1..21: mol_type = other DNA
cttagtaaggtagggtacgat

SEQ ID NO: 23479 - DNA, 21 bp, synthetic construct
  source 1..21: mol_type = other DNA
tacttttcggggaagatagac

SEQ ID NO: 23480 - DNA, 21 bp, synthetic construct
  source 1..21: mol_type = other DNA
cgagacggcaccagtgcgtgg

SEQ ID NO: 23481 - DNA, 21 bp, synthetic construct
  source 1..21: mol_type = other DNA
gtaccggactatgtccgatat

SEQ ID NO: 23482 - DNA, 21 bp, synthetic construct
  source 1..21: mol_type = other DNA
tacacaaaatcgcagcaaata

SEQ ID NO: 23483 - DNA, 21 bp, synthetic construct
  source 1..21: mol_type = other DNA
cgcggggacgatcactaccct

SEQ ID NO: 23484 - DNA, 21 bp, synthetic construct
  source 1..21: mol_type = other DNA
ctctgtcgtccatgttcgcag

SEQ ID NO: 23485 - DNA, 21 bp, synthetic construct
  source 1..21: mol_type = other DNA
ataatggaaagccggaactgg

SEQ ID NO: 23486 - DNA, 21 bp, synthetic construct
  source 1..21: mol_type = other DNA
gatatgtcagttaggacctgg

SEQ ID NO: 23487 - DNA, 21 bp, synthetic construct
  source 1..21: mol_type = other DNA
gaaatggggtcggccacgtgg

SEQ ID NO: 23488 - DNA, 21 bp, synthetic construct
  source 1..21: mol_type = other DNA
ttattggagtctcgctcatgg

SEQ ID NO: 23489 - DNA, 21 bp, synthetic construct
  source 1..21: mol_type = other DNA
tatgttagatctgataagaat

SEQ ID NO: 23490 - DNA, 21 bp, synthetic construct
  source 1..21: mol_type = other DNA
cgagatggtacaagctcgtgg

SEQ ID NO: 23491 - DNA, 21 bp, synthetic construct
  source 1..21: mol_type = other DNA
tatagtaaaatgaacaccaac

SEQ ID NO: 23492 - DNA, 21 bp, synthetic construct
  source 1..21: mol_type = other DNA
agggaagagacggtctacccg

SEQ ID NO: 23493 - DNA, 21 bp, synthetic construct
  source 1..21: mol_type = other DNA
agactcgataatgtctatccc

SEQ ID NO: 23494 - DNA, 21 bp, synthetic construct
  source 1..21: mol_type = other DNA
atctccagcacaaatggtatt

SEQ ID NO: 23495 - DNA, 21 bp, synthetic construct
  source 1..21: mol_type = other DNA
gtaaattccaccaacggcatg

SEQ ID NO: 23496 - DNA, 21 bp, synthetic construct
  source 1..21: mol_type = other DNA
cgcatggagagtagcatgtgg

SEQ ID NO: 23497 - DNA, 21 bp, synthetic construct
  source 1..21: mol_type = other DNA
tatgtgagaagtgatttagga

SEQ ID NO: 23498 - DNA, 21 bp, synthetic construct
  source 1..21: mol_type = other DNA
aaagacgacttcacaggttgg

SEQ ID NO: 23499 - DNA, 21 bp, synthetic construct
  source 1..21: mol_type = other DNA
cgtttaaatgatgtttatccc

SEQ ID NO: 23500 - DNA, 21 bp, synthetic construct
  source 1..21: mol_type = other DNA
atgaaagatggtacaaatcct

SEQ ID NO: 23501 - DNA, 21 bp, synthetic construct
  source 1..21: mol_type = other DNA
tactttagcggaactaaggaa

SEQ ID NO: 23502 - DNA, 21 bp, synthetic construct
  source 1..21: mol_type = other DNA
cattcatcgacaaatggagtg

SEQ ID NO: 23503 - DNA, 21 bp, synthetic construct
  source 1..21: mol_type = other DNA
tactttacgggcgaggtgaat

SEQ ID NO: 23504 - DNA, 21 bp, synthetic construct
  source 1..21: mol_type = other DNA
tatgcaaagacgggagataat

SEQ ID NO: 23505 - DNA, 21 bp, synthetic construct
  source 1..21: mol_type = other DNA
cctttggactcgcgcagttgg

SEQ ID NO: 23506 - DNA, 21 bp, synthetic construct
  source 1..21: mol_type = other DNA
cgttctgtctctgtttttccg

SEQ ID NO: 23507 - DNA, 21 bp, synthetic construct
  source 1..21: mol_type = other DNA
agaaatgaccacgttttcccg

SEQ ID NO: 23508 - DNA, 21 bp, synthetic construct
  source 1..21: mol_type = other DNA
ccaatgggcagcagtacatgg

SEQ ID NO: 23509 - DNA, 21 bp, synthetic construct
  source 1..21: mol_type = other DNA
ctccataagaagggagaaaac

SEQ ID NO: 23510 - DNA, 21 bp, synthetic construct
  source 1..21: mol_type = other DNA
gtccactcaactaacgggata

SEQ ID NO: 23511 - DNA, 21 bp, synthetic construct
  source 1..21: mol_type = other DNA
atcatggcagatcgtgtgtgg

SEQ ID NO: 23512 - DNA, 21 bp, synthetic construct
  source 1..21: mol_type = other DNA
gcccatgagtttggcccggta

SEQ ID NO: 23513 - DNA, 21 bp, synthetic construct
  source 1..21: mol_type = other DNA
tattggagcggcgtaatagaa

SEQ ID NO: 23514 - DNA, 21 bp, synthetic construct
  source 1..21: mol_type = other DNA
tacttaaaaagccaatctcta

SEQ ID NO: 23515 - DNA, 21 bp, synthetic construct
  source 1..21: mol_type = other DNA
cctatggacagtagtcgctgg

SEQ ID NO: 23516 - DNA, 21 bp, synthetic construct
  source 1..21: mol_type = other DNA
cgtaaacatgatgtgtatcct

SEQ ID NO: 23517 - DNA, 21 bp, synthetic construct
  source 1..21: mol_type = other DNA
aggtctgaatttatgagttac

SEQ ID NO: 23518 - DNA, 21 bp, synthetic construct
  source 1..21: mol_type = other DNA
ataatgcatgctcgggactgg

SEQ ID NO: 23519 - DNA, 21 bp, synthetic construct
  source 1..21: mol_type = other DNA
ttgcacaggttgtcaccaggg

SEQ ID NO: 23520 - DNA, 21 bp, synthetic construct
  source 1..21: mol_type = other DNA
gtcaacagtacaaatgggatg

SEQ ID NO: 23521 - DNA, 21 bp, synthetic construct
  source 1..21: mol_type = other DNA
attgctggaagaggctgggat

SEQ ID NO: 23522 - DNA, 21 bp, synthetic construct
  source 1..21: mol_type = other DNA
tatgccaagacaggcgtcaac

SEQ ID NO: 23523 - DNA, 21 bp, synthetic construct
  source 1..21: mol_type = other DNA
agactcgacgatgtttatccg

SEQ ID NO: 23524 - DNA, 21 bp, synthetic construct
  source 1..21: mol_type = other DNA
atagcggggcgtgggtgggac

SEQ ID NO: 23525 - DNA, 21 bp, synthetic construct
  source 1..21: mol_type = other DNA
ccgcgttcgactaacggagta

SEQ ID NO: 23526 - DNA, 21 bp, synthetic construct
  source 1..21: mol_type = other DNA
ctccacagactatcgacccct

SEQ ID NO: 23527 - DNA, 21 bp, synthetic construct
  source 1..21: mol_type = other DNA
atagcggatcatgtacggtgg

SEQ ID NO: 23528 - DNA, 21 bp, synthetic construct
  source 1..21: mol_type = other DNA
tacttttcgggacaaattgag

SEQ ID NO: 23529 - DNA, 21 bp, synthetic construct
  source 1..21: mol_type = other DNA
tactctaagcaggggttcaat

SEQ ID NO: 23530 - DNA, 21 bp, synthetic construct
  source 1..21: mol_type = other DNA
actaagtatggcgatcctgca

SEQ ID NO: 23531 - DNA, 21 bp, synthetic construct
  source 1..21: mol_type = other DNA
tatttgcggtcccagagttat

SEQ ID NO: 23532 - DNA, 21 bp, synthetic construct
  source 1..21: mol_type = other DNA
gatctgcagtccagcaagtgg

SEQ ID NO: 23533 - DNA, 21 bp, synthetic construct
  source 1..21: mol_type = other DNA
cggggtgagactgtgtacccc

SEQ ID NO: 23534 - DNA, 21 bp, synthetic construct
  source 1..21: mol_type = other DNA
ataatgagcgaccgcgtctgg

SEQ ID NO: 23535 - DNA, 21 bp, synthetic construct
  source 1..21: mol_type = other DNA
tacagcaagaagaacgataat

SEQ ID NO: 23536 - DNA, 21 bp, synthetic construct
  source 1..21: mol_type = other DNA
aaagatgactacacgacttgg

SEQ ID NO: 23537 - DNA, 21 bp, synthetic construct
  source 1..21: mol_type = other DNA
atcgccagcttggggtgggac

SEQ ID NO: 23538 - DNA, 21 bp, synthetic construct
  source 1..21: mol_type = other DNA
aggggaacggacgtttttccg

SEQ ID NO: 23539 - DNA, 21 bp, synthetic construct
  source 1..21: mol_type = other DNA
cgaggtgagtttacgtatcct

SEQ ID NO: 23540 - DNA, 21 bp, synthetic construct
  source 1..21: mol_type = other DNA
agagaaccgcacgtgagctgg

SEQ ID NO: 23541 - DNA, 21 bp, synthetic construct
  source 1..21: mol_type = other DNA
cgcggagaatttgtttaccca

SEQ ID NO: 23542 - DNA, 21 bp, synthetic construct
  source 1..21: mol_type = other DNA
ttttgcaaaccatgcctcaca

SEQ ID NO: 23543 - DNA, 21 bp, synthetic construct
  source 1..21: mol_type = other DNA
tgcggtaccaaatgttgccca

SEQ ID NO: 23544 - DNA, 21 bp, synthetic construct
  source 1..21: mol_type = other DNA
tactttacgggtatcccggat

SEQ ID NO: 23545 - DNA, 21 bp, synthetic construct
  source 1..21: mol_type = other DNA
gtgaccagttctaatggcgtt

SEQ ID NO: 23546 - DNA, 21 bp, synthetic construct
  source 1..21: mol_type = other DNA
tatttctcggggaagatggag

SEQ ID NO: 23547 - DNA, 21 bp, synthetic construct
  source 1..21: mol_type = other DNA
cacgtatcaacaaatggtgta

SEQ ID NO: 23548 - DNA, 21 bp, synthetic construct
  source 1..21: mol_type = other DNA
tatttcagtggtcagatagaa

SEQ ID NO: 23549 - DNA, 21 bp, synthetic construct
  source 1..21: mol_type = other DNA
tatttcaccgggcagactgag

SEQ ID NO: 23550 - DNA, 21 bp, synthetic construct
  source 1..21: mol_type = other DNA
ctaagccgcttgaatttcgac

SEQ ID NO: 23551 - DNA, 21 bp, synthetic construct
  source 1..21: mol_type = other DNA
accgcctcgactaatggagtt

SEQ ID NO: 23552 - DNA, 21 bp, synthetic construct
  source 1..21: mol_type = other DNA
atacaccgccttttaagtgac

SEQ ID NO: 23553 - DNA, 21 bp, synthetic construct
  source 1..21: mol_type = other DNA
tatacaaaatcacagtcctat

SEQ ID NO: 23554 - DNA, 21 bp, synthetic construct
  source 1..21: mol_type = other DNA
tatagcaagatgggctataat

SEQ ID NO: 23555 - DNA, 21 bp, synthetic construct
  source 1..21: mol_type = other DNA
ctatgtcgcccttgttccgag

SEQ ID NO: 23556 - DNA, 21 bp, synthetic construct
  source 1..21: mol_type = other DNA
cgcgaggattttaccgcctgg

SEQ ID NO: 23557 - DNA, 21 bp, synthetic construct
  source 1..21: mol_type = other DNA
tactcgaaggtcggtggtaac

SEQ ID NO: 23558 - DNA, 21 bp, synthetic construct
  source 1..21: mol_type = other DNA
ctccaccgcattggagcgaat

SEQ ID NO: 23559 - DNA, 21 bp, synthetic construct
  source 1..21: mol_type = other DNA
cgaagtgattttaagatattt

SEQ ID NO: 23560 - DNA, 21 bp, synthetic construct
  source 1..21: mol_type = other DNA
tatagtaaattaaatggaaat

SEQ ID NO: 23561 - DNA, 21 bp, synthetic construct
  source 1..21: mol_type = other DNA
ctgttgtccgataggacgtgg

SEQ ID NO: 23562 - DNA, 21 bp, synthetic construct
  source 1..21: mol_type = other DNA
tcagagagtactaatggacgc

SEQ ID NO: 23563 - DNA, 21 bp, synthetic construct
  source 1..21: mol_type = other DNA
cgcgacgattttacctcatgg

SEQ ID NO: 23564 - DNA, 21 bp, synthetic construct
  source 1..21: mol_type = other DNA
attttgtcagcccgggactgg

SEQ ID NO: 23565 - DNA, 21 bp, synthetic construct
  source 1..21: mol_type = other DNA
tcatcttctaccaatgggatt

SEQ ID NO: 23566 - DNA, 21 bp, synthetic construct
  source 1..21: mol_type = other DNA
cgttccgaacacgtatttccg

SEQ ID NO: 23567 - DNA, 21 bp, synthetic construct
  source 1..21: mol_type = other DNA
atgcatagattgtcgccggta

SEQ ID NO: 23568 - DNA, 21 bp, synthetic construct
  source 1..21: mol_type = other DNA
aaggatgactacacaacgtat

SEQ ID NO: 23569 - DNA, 21 bp, synthetic construct
  source 1..21: mol_type = other DNA
gacatggaaagccgtggatgg

SEQ ID NO: 23570 - DNA, 21 bp, synthetic construct
  source 1..21: mol_type = other DNA
aggagcgagtttgagacgttc

SEQ ID NO: 23571 - DNA, 21 bp, synthetic construct
  source 1..21: mol_type = other DNA
gttgcgtctactaacgggatc

SEQ ID NO: 23572 - DNA, 21 bp, synthetic construct
  source 1..21: mol_type = other DNA
ctctcgagactcgggggaggt

SEQ ID NO: 23573 - DNA, 21 bp, synthetic construct
  source 1..21: mol_type = other DNA
aggaacgagttcactccgttc

SEQ ID NO: 23574 - DNA, 21 bp, synthetic construct
  source 1..21: mol_type = other DNA
acggacggcacttcgcgttgg

SEQ ID NO: 23575 - DNA, 21 bp, synthetic construct
  source 1..21: mol_type = other DNA
cgcacctacgattctatacct

SEQ ID NO: 23576 - DNA, 21 bp, synthetic construct
  source 1..21: mol_type = other DNA
tatttcactggggtcacagcc

SEQ ID NO: 23577 - DNA, 21 bp, synthetic construct
  source 1..21: mol_type = other DNA
tactcgaaaatgaacgcgaac

SEQ ID NO: 23578 - DNA, 21 bp, synthetic construct
  source 1..21: mol_type = other DNA
ttgacaaggatctctagtaat

SEQ ID NO: 23579 - DNA, 21 bp, synthetic construct
  source 1..21: mol_type = other DNA
tacgctaaattcggtcccaac

SEQ ID NO: 23580 - DNA, 21 bp, synthetic construct
  source 1..21: mol_type = other DNA
tacttcacggggacgatggat

SEQ ID NO: 23581 - DNA, 21 bp, synthetic construct
  source 1..21: mol_type = other DNA
tatcataaagcaagccccatc

SEQ ID NO: 23582 - DNA, 21 bp, synthetic construct
  source 1..21: mol_type = other DNA
tatttcacggggaaacaagaa

SEQ ID NO: 23583 - DNA, 21 bp, synthetic construct
  source 1..21: mol_type = other DNA
tgcaagccgggcggccattgg

SEQ ID NO: 23584 - DNA, 21 bp, synthetic construct
  source 1..21: mol_type = other DNA
tacttcacagggaaacatgaa

SEQ ID NO: 23585 - DNA, 21 bp, synthetic construct
  source 1..21: mol_type = other DNA
gagctacagagtagcacctgg

SEQ ID NO: 23586 - DNA, 21 bp, synthetic construct
  source 1..21: mol_type = other DNA
tacagtaaattgtcaacaaac

SEQ ID NO: 23587 - DNA, 21 bp, synthetic construct
  source 1..21: mol_type = other DNA
atgtgcaaaccctgtctgacc

SEQ ID NO: 23588 - DNA, 21 bp, synthetic construct
  source 1..21: mol_type = other DNA
ctgagccgtgtttcattcgac

SEQ ID NO: 23589 - DNA, 21 bp, synthetic construct
  source 1..21: mol_type = other DNA
cgtggtggtggtttattccca

SEQ ID NO: 23590 - DNA, 21 bp, synthetic construct
  source 1..21: mol_type = other DNA
ctcagcagggctagtgaaaat

SEQ ID NO: 23591 - DNA, 21 bp, synthetic construct
  source 1..21: mol_type = other DNA
ttacaccggctgatgccggac

SEQ ID NO: 23592 - DNA, 21 bp, synthetic construct
  source 1..21: mol_type = other DNA
aatcctcatacttgcaacaat

SEQ ID NO: 23593 - DNA, 21 bp, synthetic construct
  source 1..21: mol_type = other DNA
cttgtcgatggacttagatgg

SEQ ID NO: 23594 - DNA, 21 bp, synthetic construct
  source 1..21: mol_type = other DNA
cggaccccggacgcttatcca

SEQ ID NO: 23595 - DNA, 21 bp, synthetic construct
  source 1..21: mol_type = other DNA
tatgttcgaagtggaccaaat

SEQ ID NO: 23596 - DNA, 21 bp, synthetic construct
  source 1..21: mol_type = other DNA
ctatgccggccatgtagtagt

SEQ ID NO: 23597 - DNA, 21 bp, synthetic construct
  source 1..21: mol_type = other DNA
aagatgtcttcaagtgtatgg

SEQ ID NO: 23598 - DNA, 21 bp, synthetic construct
  source 1..21: mol_type = other DNA
gttcactcgacaaatggacgc

SEQ ID NO: 23599 - DNA, 21 bp, synthetic construct
  source 1..21: mol_type = other DNA
tatgtgaaatccgatcgttgc

SEQ ID NO: 23600 - DNA, 21 bp, synthetic construct
  source 1..21: mol_type = other DNA
gacccagcctctcgggaatgg

SEQ ID NO: 23601 - DNA, 21 bp, synthetic construct
  source 1..21: mol_type = other DNA
tacttcaccgggttcgttgag

SEQ ID NO: 23602 - DNA, 21 bp, synthetic construct
  source 1..21: mol_type = other DNA
tattttacgggcataaattca

SEQ ID NO: 23603 - DNA, 21 bp, synthetic construct
  source 1..21: mol_type = other DNA
tatagtaaactgaacgctaat

SEQ ID NO: 23604 - DNA, 21 bp, synthetic construct
  source 1..21: mol_type = other DNA
cgcctcgccgacgcctaccct

SEQ ID NO: 23605 - DNA, 21 bp, synthetic construct
  source 1..21: mol_type = other DNA
tacttcaccgggtggcccgat

SEQ ID NO: 23606 - DNA, 21 bp, synthetic construct
  source 1..21: mol_type = other DNA
cgcgatgagtttgtgtcatgg

SEQ ID NO: 23607 - DNA, 21 bp, synthetic construct
  source 1..21: mol_type = other DNA
atagaaagttcgcgtacatgg

SEQ ID NO: 23608 - DNA, 21 bp, synthetic construct
  source 1..21: mol_type = other DNA
gtgccagattatgtgaggtac

SEQ ID NO: 23609 - DNA, 21 bp, synthetic construct
  source 1..21: mol_type = other DNA
ttacatcgcctgtctaccagt

SEQ ID NO: 23610 - DNA, 21 bp, synthetic construct
  source 1..21: mol_type = other DNA
agaggagacaacgtctatccc

SEQ ID NO: 23611 - DNA, 21 bp, synthetic construct
  source 1..21: mol_type = other DNA
atgatggagtcgagcaagtgg

SEQ ID NO: 23612 - DNA, 21 bp, synthetic construct
  source 1..21: mol_type = other DNA
ctccacgtcaggagcttaaac

SEQ ID NO: 23613 - DNA, 21 bp, synthetic construct
  source 1..21: mol_type = other DNA
acagatagtactaacggaata

SEQ ID NO: 23614 - DNA, 21 bp, synthetic construct
  source 1..21: mol_type = other DNA
agagaggatgggctaagatgg

SEQ ID NO: 23615 - DNA, 21 bp, synthetic construct
  source 1..21: mol_type = other DNA
cttcataggcttggtgatcat

SEQ ID NO: 23616 - DNA, 21 bp, synthetic construct
  source 1..21: mol_type = other DNA
ctccaccggttgcaatcggac

SEQ ID NO: 23617 - DNA, 21 bp, synthetic construct
  source 1..21: mol_type = other DNA
ccaatgggacaagcgacatgg

SEQ ID NO: 23618 - DNA, 21 bp, synthetic construct
  source 1..21: mol_type = other DNA
ttgtctcgaacaggacaaaac

SEQ ID NO: 23619 - DNA, 21 bp, synthetic construct
  source 1..21: mol_type = other DNA
tacagtaaagtaggctggaat

SEQ ID NO: 23620 - DNA, 21 bp, synthetic construct
  source 1..21: mol_type = other DNA
agagacgaattctcgggttat

SEQ ID NO: 23621 - DNA, 21 bp, synthetic construct
  source 1..21: mol_type = other DNA
gggagtcccggtgtgcattgg

SEQ ID NO: 23622 - DNA, 21 bp, synthetic construct
  source 1..21: mol_type = other DNA
gatgcgtttgaggggagggat

SEQ ID NO: 23623 - DNA, 21 bp, synthetic construct
  source 1..21: mol_type = other DNA
aaaatggattcaataggttgg

SEQ ID NO: 23624 - DNA, 21 bp, synthetic construct
  source 1..21: mol_type = other DNA
tattctaagataggtaaaaac

SEQ ID NO: 23625 - DNA, 21 bp, synthetic construct
  source 1..21: mol_type = other DNA
gtgatgtcatctcgggactgg

SEQ ID NO: 23626 - DNA, 21 bp, synthetic construct
  source 1..21: mol_type = other DNA
cgcgacgatttcaccgtatgg

SEQ ID NO: 23627 - DNA, 21 bp, synthetic construct
  source 1..21: mol_type = other DNA
tactttgctggtagaattgaa

SEQ ID NO: 23628 - DNA, 21 bp, synthetic construct
  source 1..21: mol_type = other DNA
ctccgtgacggaacgagcgcg

SEQ ID NO: 23629 - DNA, 21 bp, synthetic construct
  source 1..21: mol_type = other DNA
ctgagtagaatttcagtaaat

SEQ ID NO: 23630 - DNA, 21 bp, synthetic construct
  source 1..21: mol_type = other DNA
ttcagtaaactcaatgagaac

SEQ ID NO: 23631 - DNA, 21 bp, synthetic construct
  source 1..21: mol_type = other DNA
tactttaccggcgtccttgag

SEQ ID NO: 23632 - DNA, 21 bp, synthetic construct
  source 1..21: mol_type = other DNA
caaatggagtcaaggatgtgg

SEQ ID NO: 23633 - DNA, 21 bp, synthetic construct
  source 1..21: mol_type = other DNA
tacttcacgggtacgacggaa

SEQ ID NO: 23634 - DNA, 21 bp, synthetic construct
  source 1..21: mol_type = other DNA
tttttcagcggcattaaagag

SEQ ID NO: 23635 - DNA, 21 bp, synthetic construct
  source 1..21: mol_type = other DNA
cgcacatccgatgcttatcct

SEQ ID NO: 23636 - DNA, 21 bp, synthetic construct
  source 1..21: mol_type = other DNA
tataagggtagctgcgaacag

SEQ ID NO: 23637 - DNA, 21 bp, synthetic construct
  source 1..21: mol_type = other DNA
acaggttctaccaatggcgtg

SEQ ID NO: 23638 - DNA, 21 bp, synthetic construct
  source 1..21: mol_type = other DNA
attgccaagagggggtgggat

SEQ ID NO: 23639 - DNA, 21 bp, synthetic construct
  source 1..21: mol_type = other DNA
tatacaagactggacaaagat

SEQ ID NO: 23640 - DNA, 21 bp, synthetic construct
  source 1..21: mol_type = other DNA
tattcaaagataggcgggaat

SEQ ID NO: 23641 - DNA, 21 bp, synthetic construct
  source 1..21: mol_type = other DNA
cagccagagtcgaggagctgg

SEQ ID NO: 23642 - DNA, 21 bp, synthetic construct
  source 1..21: mol_type = other DNA
ttgtcgcggatatcccagaac

SEQ ID NO: 23643 - DNA, 21 bp, synthetic construct
  source 1..21: mol_type = other DNA
aaagatggctattccgcttac

SEQ ID NO: 23644 - DNA, 21 bp, synthetic construct
  source 1..21: mol_type = other DNA
atcaccagtacgaatggcatc

SEQ ID NO: 23645 - DNA, 21 bp, synthetic construct
  source 1..21: mol_type = other DNA
ctgtcgcgcgtgggcagggac

SEQ ID NO: 23646 - DNA, 21 bp, synthetic construct
  source 1..21: mol_type = other DNA
ctttcgcgcaccagtgataac

SEQ ID NO: 23647 - DNA, 21 bp, synthetic construct
  source 1..21: mol_type = other DNA
tattcaaaggtgggatgtaat

SEQ ID NO: 23648 - DNA, 21 bp, synthetic construct
  source 1..21: mol_type = other DNA
tatgtcaaaagcgacagccat

SEQ ID NO: 23649 - DNA, 21 bp, synthetic construct
  source 1..21: mol_type = other DNA
gatcttagttcacataattgg

SEQ ID NO: 23650 - DNA, 21 bp, synthetic construct
  source 1..21: mol_type = other DNA
tatgtaaaaagccaacaaacg

SEQ ID NO: 23651 - DNA, 21 bp, synthetic construct
  source 1..21: mol_type = other DNA
tattcgcgcttaaatgttctg

SEQ ID NO: 23652 - DNA, 21 bp, synthetic construct
  source 1..21: mol_type = other DNA
ttcgctaggacaggtcctaat

SEQ ID NO: 23653 - DNA, 21 bp, synthetic construct
  source 1..21: mol_type = other DNA
atagctaaacgaggatgggac

SEQ ID NO: 23654 - DNA, 21 bp, synthetic construct
  source 1..21: mol_type = other DNA
cgtgatgaatttaatcattgg

SEQ ID NO: 23655 - DNA, 21 bp, synthetic construct
  source 1..21: mol_type = other DNA
ccgatggggtcagcacagtgg

SEQ ID NO: 23656 - DNA, 21 bp, synthetic construct
  source 1..21: mol_type = other DNA
tattctaagtcgggcatgaac

SEQ ID NO: 23657 - DNA, 21 bp, synthetic construct
  source 1..21: mol_type = other DNA
acgcacagcacgaatgggatc

SEQ ID NO: 23658 - DNA, 21 bp, synthetic construct
  source 1..21: mol_type = other DNA
ttaactaggctagtaaacaat

SEQ ID NO: 23659 - DNA, 21 bp, synthetic construct
  source 1..21: mol_type = other DNA
tattcgaaggtgggccagaat

SEQ ID NO: 23660 - DNA, 21 bp, synthetic construct
  source 1..21: mol_type = other DNA
tatttcacaggcaagctaagc

SEQ ID NO: 23661 - DNA, 21 bp, synthetic construct
  source 1..21: mol_type = other DNA
tatagcaaaatgaacatgaat

SEQ ID NO: 23662 - DNA, 21 bp, synthetic construct
  source 1..21: mol_type = other DNA
tatttcacgggtaagccagac

SEQ ID NO: 23663 - DNA, 21 bp, synthetic construct
  source 1..21: mol_type = other DNA
aaagatgattatcatacatat

SEQ ID NO: 23664 - DNA, 21 bp, synthetic construct
  source 1..21: mol_type = other DNA
tacccatttcccgaaccagct

SEQ ID NO: 23665 - DNA, 21 bp, synthetic construct
  source 1..21: mol_type = other DNA
tacttcgcgggaattaaggaa

SEQ ID NO: 23666 - DNA, 21 bp, synthetic construct
  source 1..21: mol_type = other DNA
tatttcacggggcgaacagct

SEQ ID NO: 23667 - DNA, 21 bp, synthetic construct
  source 1..21: mol_type = other DNA
tactcgcgaacaggtcctaat

SEQ ID NO: 23668 - DNA, 21 bp, synthetic construct
  source 1..21: mol_type = other DNA
tattctaagatggggcttaat

SEQ ID NO: 23669 - DNA, 21 bp, synthetic construct
  source 1..21: mol_type = other DNA
tacagtaaatcaggcaataac

SEQ ID NO: 23670 - DNA, 21 bp, synthetic construct
  source 1..21: mol_type = other DNA
tatgttcgaagcgcacctggg

SEQ ID NO: 23671 - DNA, 21 bp, synthetic construct
  source 1..21: mol_type = other DNA
gacgctttcgaaggacgagac

SEQ ID NO: 23672 - DNA, 21 bp, synthetic construct
  source 1..21: mol_type = other DNA
tatttcactgggcagcacgca

SEQ ID NO: 23673 - DNA, 21 bp, synthetic construct
  source 1..21: mol_type = other DNA
ttgtctcgtgtttcgccaaat

SEQ ID NO: 23674 - DNA, 21 bp, synthetic construct
  source 1..21: mol_type = other DNA
ttatgtcgcccttgcccggag

SEQ ID NO: 23675 - DNA, 21 bp, synthetic construct
  source 1..21: mol_type = other DNA
tttcacaaactctctccagtc

SEQ ID NO: 23676 - DNA, 21 bp, synthetic construct
  source 1..21: mol_type = other DNA
ataatggagagtcgagcgtgg

SEQ ID NO: 23677 - DNA, 21 bp, synthetic construct
  source 1..21: mol_type = other DNA
tactcgaaagctaatcctaac

SEQ ID NO: 23678 - DNA, 21 bp, synthetic construct
  source 1..21: mol_type = other DNA
cgttcagaatttttgcctttt

SEQ ID NO: 23679 - DNA, 21 bp, synthetic construct
  source 1..21: mol_type = other DNA
aaggacgacttcacgggatgg

SEQ ID NO: 23680 - DNA, 21 bp, synthetic construct
  source 1..21: mol_type = other DNA
tactttaccggacagacagag

SEQ ID NO: 23681 - DNA, 21 bp, synthetic construct
  source 1..21: mol_type = other DNA
gacatggggtcgtcaagttgg

SEQ ID NO: 23682 - DNA, 21 bp, synthetic construct
  source 1..21: mol_type = other DNA
tacttcaccggaaagtgcgag

SEQ ID NO: 23683 - DNA, 21 bp, synthetic construct
  source 1..21: mol_type = other DNA
atgaaggacggcaccaaccca

SEQ ID NO: 23684 - DNA, 21 bp, synthetic construct
  source 1..21: mol_type = other DNA
ttatgtcgtccaggatcagaa

SEQ ID NO: 23685 - DNA, 21 bp, synthetic construct
  source 1..21: mol_type = other DNA
aggggggaattcacttacccc

SEQ ID NO: 23686 - DNA, 21 bp, synthetic construct
  source 1..21: mol_type = other DNA
ttctcaaggctaggaccgaac

SEQ ID NO: 23687 - DNA, 21 bp, synthetic construct
  source 1..21: mol_type = other DNA
ttgcacagattggtgccggac

SEQ ID NO: 23688 - DNA, 21 bp, synthetic construct
  source 1..21: mol_type = other DNA
tacttgaagagtcagcaaaca

SEQ ID NO: 23689 - DNA, 21 bp, synthetic construct
  source 1..21: mol_type = other DNA
tatttcactggcagggcggaa

SEQ ID NO: 23690 - DNA, 21 bp, synthetic construct
  source 1..21: mol_type = other DNA
tattggagcggtgtgaaagaa

SEQ ID NO: 23691 - DNA, 21 bp, synthetic construct
  source 1..21: mol_type = other DNA
atgcatagactgtcacccttg

SEQ ID NO: 23692 - DNA, 21 bp, synthetic construct
  source 1..21: mol_type = other DNA
gtgattagtaccaacggtata

SEQ ID NO: 23693 - DNA, 21 bp, synthetic construct
  source 1..21: mol_type = other DNA
atgcaccgtttaggctatgac

SEQ ID NO: 23694 - DNA, 21 bp, synthetic construct
  source 1..21: mol_type = other DNA
ttaagcaggctgggatacgac

SEQ ID NO: 23695 - DNA, 21 bp, synthetic construct
  source 1..21: mol_type = other DNA
tatagcaaaaccggtcataac

SEQ ID NO: 23696 - DNA, 21 bp, synthetic construct
  source 1..21: mol_type = other DNA
ttgagaactgactgctgcgtt

SEQ ID NO: 23697 - DNA, 21 bp, synthetic construct
  source 1..21: mol_type = other DNA
tattacactggagttaaggaa

SEQ ID NO: 23698 - DNA, 21 bp, synthetic construct
  source 1..21: mol_type = other DNA
tactttagcggtaaaatggaa

SEQ ID NO: 23699 - DNA, 21 bp, synthetic construct
  source 1..21: mol_type = other DNA
tacgctcgtactggtttagac

SEQ ID NO: 23700 - DNA, 21 bp, synthetic construct
  source 1..21: mol_type = other DNA
tgcacctctaagtatggccac

SEQ ID NO: 23701 - DNA, 21 bp, synthetic construct
  source 1..21: mol_type = other DNA
aagctacaggaaagaacttgg

SEQ ID NO: 23702 - DNA, 21 bp, synthetic construct
  source 1..21: mol_type = other DNA
tatgttaagtcagacgcaggt

SEQ ID NO: 23703 - DNA, 21 bp, synthetic construct
  source 1..21: mol_type = other DNA
agagacgacttcacagcatac

SEQ ID NO: 23704 - DNA, 21 bp, synthetic construct
  source 1..21: mol_type = other DNA
tatttaaagtcacaggggaat

SEQ ID NO: 23705 - DNA, 21 bp, synthetic construct
  source 1..21: mol_type = other DNA
tggtggagtggcataacagaa

SEQ ID NO: 23706 - DNA, 21 bp, synthetic construct
  source 1..21: mol_type = other DNA
ccaatgggcagctcccagtgg

SEQ ID NO: 23707 - DNA, 21 bp, synthetic construct
  source 1..21: mol_type = other DNA
cgcgaggagatggttagatgg

SEQ ID NO: 23708 - DNA, 21 bp, synthetic construct
  source 1..21: mol_type = other DNA
aatgatggcgtaagcaaatgg

SEQ ID NO: 23709 - DNA, 21 bp, synthetic construct
  source 1..21: mol_type = other DNA
cggaacgatcatgtatttcca

SEQ ID NO: 23710 - DNA, 21 bp, synthetic construct
  source 1..21: mol_type = other DNA
ccgatggagagcagcaagtgg

SEQ ID NO: 23711 - DNA, 21 bp, synthetic construct
  source 1..21: mol_type = other DNA
ttgtcgaagatcggtgtgaac

SEQ ID NO: 23712 - DNA, 21 bp, synthetic construct
  source 1..21: mol_type = other DNA
tattccagggtaggtccggat

SEQ ID NO: 23713 - DNA, 21 bp, synthetic construct
  source 1..21: mol_type = other DNA
tttcataaaaagggtcctgac

SEQ ID NO: 23714 - DNA, 21 bp, synthetic construct
  source 1..21: mol_type = other DNA
tacagtaaattgaattacaac

SEQ ID NO: 23715 - DNA, 21 bp, synthetic construct
  source 1..21: mol_type = other DNA
agaatgactgacgcgtatccg

SEQ ID NO: 23716 - DNA, 21 bp, synthetic construct
  source 1..21: mol_type = other DNA
acaatcagcactaacggtgta

SEQ ID NO: 23717 - DNA, 21 bp, synthetic construct
  source 1..21: mol_type = other DNA
gtgcagtcgactaacggcaga

SEQ ID NO: 23718 - DNA, 21 bp, synthetic construct
  source 1..21: mol_type = other DNA
tatcacgcgaaacagaataat

SEQ ID NO: 23719 - DNA, 21 bp, synthetic construct
  source 1..21: mol_type = other DNA
tatagtaaatcgggctgcaat

SEQ ID NO: 23720 - DNA, 21 bp, synthetic construct
  source 1..21: mol_type = other DNA
agagaggattttagtgcgtgg

SEQ ID NO: 23721 - DNA, 21 bp, synthetic construct
  source 1..21: mol_type = other DNA
tactttactggaaagacggac

SEQ ID NO: 23722 - DNA, 21 bp, synthetic construct
  source 1..21: mol_type = other DNA
agagatggaacatcaagctgg

SEQ ID NO: 23723 - DNA, 21 bp, synthetic construct
  source 1..21: mol_type = other DNA
atggatgactacaacccgttc

SEQ ID NO: 23724 - DNA, 21 bp, synthetic construct
  source 1..21: mol_type = other DNA
tactccaagcacaatatcaac

SEQ ID NO: 23725 - DNA, 21 bp, synthetic construct
  source 1..21: mol_type = other DNA
aggcccgagtcctcacggtgg

SEQ ID NO: 23726 - DNA, 21 bp, synthetic construct
  source 1..21: mol_type = other DNA
tactttaccggaaggacggcg

SEQ ID NO: 23727 - DNA, 21 bp, synthetic construct
  source 1..21: mol_type = other DNA
gacatggagtcgaggaagtgg

SEQ ID NO: 23728 - DNA, 21 bp, synthetic construct
  source 1..21: mol_type = other DNA
agaaatgacacagtatatccg

SEQ ID NO: 23729 - DNA, 21 bp, synthetic construct
  source 1..21: mol_type = other DNA
gtgaacgactatgtgacctac

SEQ ID NO: 23730 - DNA, 21 bp, synthetic construct
  source 1..21: mol_type = other DNA
tatttcagtggtatcccggcc

SEQ ID NO: 23731 - DNA, 21 bp, synthetic construct
  source 1..21: mol_type = other DNA
tcattagaaagtcggaagtgg

SEQ ID NO: 23732 - DNA, 21 bp, synthetic construct
  source 1..21: mol_type = other DNA
tattgggcaggggtaaaggat

SEQ ID NO: 23733 - DNA, 21 bp, synthetic construct
  source 1..21: mol_type = other DNA
gacgacggcgtaagtagatgg

SEQ ID NO: 23734 - DNA, 21 bp, synthetic construct
  source 1..21: mol_type = other DNA
tatgtgaaatcacagccttgt

SEQ ID NO: 23735 - DNA, 21 bp, synthetic construct
  source 1..21: mol_type = other DNA
tactctaagttaaaccataat

SEQ ID NO: 23736 - DNA, 21 bp, synthetic construct
  source 1..21: mol_type = other DNA
atcatgagcagtgccatgtgg

SEQ ID NO: 23737 - DNA, 21 bp, synthetic construct
  source 1..21: mol_type = other DNA
ttaactagattatccccaact

SEQ ID NO: 23738 - DNA, 21 bp, synthetic construct
  source 1..21: mol_type = other DNA
ttgcacagactctccgaagat

SEQ ID NO: 23739 - DNA, 21 bp, synthetic construct
  source 1..21: mol_type = other DNA
tttagcaggatcggatacaat

SEQ ID NO: 23740 - DNA, 21 bp, synthetic construct
  source 1..21: mol_type = other DNA
gtgatgagagacgcgtacccg

SEQ ID NO: 23741 - DNA, 21 bp, synthetic construct
  source 1..21: mol_type = other DNA
tatagtaagatgaatgcgaat

SEQ ID NO: 23742 - DNA, 21 bp, synthetic construct
  source 1..21: mol_type = other DNA
agggacgatttctcaagttat

SEQ ID NO: 23743 - DNA, 21 bp, synthetic construct
  source 1..21: mol_type = other DNA
tattcgaaaatgaatcataat

SEQ ID NO: 23744 - DNA, 21 bp, synthetic construct
  source 1..21: mol_type = other DNA
tatttcacgggtagagccgag

SEQ ID NO: 23745 - DNA, 21 bp, synthetic construct
  source 1..21: mol_type = other DNA
tacagtaagttagatcataac

SEQ ID NO: 23746 - DNA, 21 bp, synthetic construct
  source 1..21: mol_type = other DNA
tattccaaaagcggctcaaac

SEQ ID NO: 23747 - DNA, 21 bp, synthetic construct
  source 1..21: mol_type = other DNA
ccaatgtcaagttctggttgg

SEQ ID NO: 23748 - DNA, 21 bp, synthetic construct
  source 1..21: mol_type = other DNA
aaagatgagtatcacacttat

SEQ ID NO: 23749 - DNA, 21 bp, synthetic construct
  source 1..21: mol_type = other DNA
ctacataagaacacggagaac

SEQ ID NO: 23750 - DNA, 21 bp, synthetic construct
  source 1..21: mol_type = other DNA
tatagtaaaaccggtaataac

SEQ ID NO: 23751 - DNA, 21 bp, synthetic construct
  source 1..21: mol_type = other DNA
gtcccatctagcgtaaggtgg

SEQ ID NO: 23752 - DNA, 21 bp, synthetic construct
  source 1..21: mol_type = other DNA
cgcgtggaggatgcttaccca

SEQ ID NO: 23753 - DNA, 21 bp, synthetic construct
  source 1..21: mol_type = other DNA
tacagcaaggtaggctccaac

SEQ ID NO: 23754 - DNA, 21 bp, synthetic construct
  source 1..21: mol_type = other DNA
ccaatgggagacagaaaatgg

SEQ ID NO: 23755 - DNA, 21 bp, synthetic construct
  source 1..21: mol_type = other DNA
cgtgaggagtttgtgcactgg

SEQ ID NO: 23756 - DNA, 21 bp, synthetic construct
  source 1..21: mol_type = other DNA
atacttagcgcacgagattgg

SEQ ID NO: 23757 - DNA, 21 bp, synthetic construct
  source 1..21: mol_type = other DNA
cggacaagcgacgtctatccc

SEQ ID NO: 23758 - DNA, 21 bp, synthetic construct
  source 1..21: mol_type = other DNA
catgactcgaccaatggagtc

SEQ ID NO: 23759 - DNA, 21 bp, synthetic construct
  source 1..21: mol_type = other DNA
aggggagacactgtttatccg

SEQ ID NO: 23760 - DNA, 21 bp, synthetic construct
  source 1..21: mol_type = other DNA
tatttcagtggaacgaaggaa

SEQ ID NO: 23761 - DNA, 21 bp, synthetic construct
  source 1..21: mol_type = other DNA
tatacccgtattggcccagac

SEQ ID NO: 23762 - DNA, 21 bp, synthetic construct
  source 1..21: mol_type = other DNA
ttttttacaggtattatagaa

SEQ ID NO: 23763 - DNA, 21 bp, synthetic construct
  source 1..21: mol_type = other DNA
gtgttcagtacgaatggtagg

SEQ ID NO: 23764 - DNA, 21 bp, synthetic construct
  source 1..21: mol_type = other DNA
aaacttgagtcaagcatgtgg

SEQ ID NO: 23765 - DNA, 21 bp, synthetic construct
  source 1..21: mol_type = other DNA
agggacgaccacgtgtattgg

SEQ ID NO: 23766 - DNA, 21 bp, synthetic construct
  source 1..21: mol_type = other DNA
ttcagccgcataggtcttaac

SEQ ID NO: 23767 - DNA, 21 bp, synthetic construct
  source 1..21: mol_type = other DNA
gggggcaccacatcgtgctgg

SEQ ID NO: 23768 - DNA, 21 bp, synthetic construct
  source 1..21: mol_type = other DNA
atcatgtcggatagactctgg

SEQ ID NO: 23769 - DNA, 21 bp, synthetic construct
  source 1..21: mol_type = other DNA
aggggagataacgtatatcca

SEQ ID NO: 23770 - DNA, 21 bp, synthetic construct
  source 1..21: mol_type = other DNA
tatagcaagaccggatttaac

SEQ ID NO: 23771 - DNA, 21 bp, synthetic construct
  source 1..21: mol_type = other DNA
tatttcacaggagtagttgat

SEQ ID NO: 23772 - DNA, 21 bp, synthetic construct
  source 1..21: mol_type = other DNA
gatttgagggcgcacgactgg

SEQ ID NO: 23773 - DNA, 21 bp, synthetic construct
  source 1..21: mol_type = other DNA
tactttagcggcgtaatggct

SEQ ID NO: 23774 - DNA, 21 bp, synthetic construct
  source 1..21: mol_type = other DNA
atttgtaaaccttgcctaacc

SEQ ID NO: 23775 - DNA, 21 bp, synthetic construct
  source 1..21: mol_type = other DNA
tattttgccggggtaaaagag

SEQ ID NO: 23776 - DNA, 21 bp, synthetic construct
  source 1..21: mol_type = other DNA
atcatgatggatagaggttgg

SEQ ID NO: 23777 - DNA, 21 bp, synthetic construct
  source 1..21: mol_type = other DNA
gtcttgagcactaacgggcgt

SEQ ID NO: 23778 - DNA, 21 bp, synthetic construct
  source 1..21: mol_type = other DNA
cgccgtgaggatgtatatccg

SEQ ID NO: 23779 - DNA, 21 bp, synthetic construct
  source 1..21: mol_type = other DNA
accgatgggacaagcagatgg

SEQ ID NO: 23780 - DNA, 21 bp, synthetic construct
  source 1..21: mol_type = other DNA
cttgcaaagtcgggtattaac

SEQ ID NO: 23781 - DNA, 21 bp, synthetic construct
  source 1..21: mol_type = other DNA
ggaagcgagttcagcacctgg

SEQ ID NO: 23782 - DNA, 21 bp, synthetic construct
  source 1..21: mol_type = other DNA
tatacacggctcgatcccgtt

SEQ ID NO: 23783 - DNA, 21 bp, synthetic construct
  source 1..21: mol_type = other DNA
tactggagcggcgtcaaagaa

SEQ ID NO: 23784 - DNA, 21 bp, synthetic construct
  source 1..21: mol_type = other DNA
taccatgcaaaaggagacaac

SEQ ID NO: 23785 - DNA, 21 bp, synthetic construct
  source 1..21: mol_type = other DNA
ggaggggagttctcccgctgg

SEQ ID NO: 23786 - DNA, 21 bp, synthetic construct
  source 1..21: mol_type = other DNA
agtcttgaaagcaggagctgg

SEQ ID NO: 23787 - DNA, 21 bp, synthetic construct
  source 1..21: mol_type = other DNA
ttctcgaaactgaactcgaat

SEQ ID NO: 23788 - DNA, 21 bp, synthetic construct
  source 1..21: mol_type = other DNA
tacgtaagatcagaccttatg

SEQ ID NO: 23789 - DNA, 21 bp, synthetic construct
  source 1..21: mol_type = other DNA
gacatgagtgtacgcacgtgg

SEQ ID NO: 23790 - DNA, 21 bp, synthetic construct
  source 1..21: mol_type = other DNA
tatagcgccattgggatgaac

SEQ ID NO: 23791 - DNA, 21 bp, synthetic construct
  source 1..21: mol_type = other DNA
cggggagatgaccattatccc

SEQ ID NO: 23792 - DNA, 21 bp, synthetic construct
  source 1..21: mol_type = other DNA
tactttacgggtgtacaaagc

SEQ ID NO: 23793 - DNA, 21 bp, synthetic construct
  source 1..21: mol_type = other DNA
aggaatgatgtagtgtacccg

SEQ ID NO: 23794 - DNA, 21 bp, synthetic construct
  source 1..21: mol_type = other DNA
atcgcaacccgtggtatcggc

SEQ ID NO: 23795 - DNA, 21 bp, synthetic construct
  source 1..21: mol_type = other DNA
agaaatgagttcaccactttc

SEQ ID NO: 23796 - DNA, 21 bp, synthetic construct
  source 1..21: mol_type = other DNA
cttgcgaaaaccgcacacaac

SEQ ID NO: 23797 - DNA, 21 bp, synthetic construct
  source 1..21: mol_type = other DNA
cgaacacatgatacattccct

SEQ ID NO: 23798 - DNA, 21 bp, synthetic construct
  source 1..21: mol_type = other DNA
gctggagatgggctgtgggtt

SEQ ID NO: 23799 - DNA, 21 bp, synthetic construct
  source 1..21: mol_type = other DNA
aggttaaacgacgcatatccg

SEQ ID NO: 23800 - DNA, 21 bp, synthetic construct
  source 1..21: mol_type = other DNA
taccacaggttgcagccagac

SEQ ID NO: 23801 - DNA, 21 bp, synthetic construct
  source 1..21: mol_type = other DNA
gtgatgcagagtagggattgg

SEQ ID NO: 23802 - DNA, 21 bp, synthetic construct
  source 1..21: mol_type = other DNA
aggggccccgagatctaccct

SEQ ID NO: 23803 - DNA, 21 bp, synthetic construct
  source 1..21: mol_type = other DNA
gtcgaaagtacaaacggcgca

SEQ ID NO: 23804 - DNA, 21 bp, synthetic construct
  source 1..21: mol_type = other DNA
ttatgcaaaccatgcttagtc

SEQ ID NO: 23805 - DNA, 21 bp, synthetic construct
  source 1..21: mol_type = other DNA
tactttacaggcacgatagat

SEQ ID NO: 23806 - DNA, 21 bp, synthetic construct
  source 1..21: mol_type = other DNA
ttgcaccgcttgggtgtgtct

SEQ ID NO: 23807 - DNA, 21 bp, synthetic construct
  source 1..21: mol_type = other DNA
tatgttataagtgacagaaac

SEQ ID NO: 23808 - DNA, 21 bp, synthetic construct
  source 1..21: mol_type = other DNA
tatagtaaacaaggattaaat

SEQ ID NO: 23809 - DNA, 21 bp, synthetic construct
  source 1..21: mol_type = other DNA
gacatgatgagtagagactgg

SEQ ID NO: 23810 - DNA, 21 bp, synthetic construct
  source 1..21: mol_type = other DNA
ctccaccgactcagtataccg

SEQ ID NO: 23811 - DNA, 21 bp, synthetic construct
  source 1..21: mol_type = other DNA
ctctcacgtcttcaagagaat

SEQ ID NO: 23812 - DNA, 21 bp, synthetic construct
  source 1..21: mol_type = other DNA
tacgctaaaacagggctcaac

SEQ ID NO: 23813 - DNA, 21 bp, synthetic construct
  source 1..21: mol_type = other DNA
attatgtcggatagaggctgg

SEQ ID NO: 23814 - DNA, 21 bp, synthetic construct
  source 1..21: mol_type = other DNA
cgaggttctgatgtctttcca

SEQ ID NO: 23815 - DNA, 21 bp, synthetic construct
  source 1..21: mol_type = other DNA
gaactcgccagtcatgcgtgg

SEQ ID NO: 23816 - DNA, 21 bp, synthetic construct
  source 1..21: mol_type = other DNA
tactttacggggacattggcc

SEQ ID NO: 23817 - DNA, 21 bp, synthetic construct
  source 1..21: mol_type = other DNA
cttcatcgtctgcagtcccat

SEQ ID NO: 23818 - DNA, 21 bp, synthetic construct
  source 1..21: mol_type = other DNA
gctatggccgacagaacgtgg

SEQ ID NO: 23819 - DNA, 21 bp, synthetic construct
  source 1..21: mol_type = other DNA
tacagcaagatgaacagcaat

SEQ ID NO: 23820 - DNA, 21 bp, synthetic construct
  source 1..21: mol_type = other DNA
tattttacaggaaagcacgaa

SEQ ID NO: 23821 - DNA, 21 bp, synthetic construct
  source 1..21: mol_type = other DNA
agggaggaaagtcgaagttgg

SEQ ID NO: 23822 - DNA, 21 bp, synthetic construct
  source 1..21: mol_type = other DNA
tacttcacgggccacatggaa

SEQ ID NO: 23823 - DNA, 21 bp, synthetic construct
  source 1..21: mol_type = other DNA
tatctaaaatcgcagacttac

SEQ ID NO: 23824 - DNA, 21 bp, synthetic construct
  source 1..21: mol_type = other DNA
acgaggagcaccaatggagta

SEQ ID NO: 23825 - DNA, 21 bp, synthetic construct
  source 1..21: mol_type = other DNA
tatactaagtcagatgtcaga

SEQ ID NO: 23826 - DNA, 21 bp, synthetic construct
  source 1..21: mol_type = other DNA
cgaggagaggaaatatacccc

SEQ ID NO: 23827 - DNA, 21 bp, synthetic construct
  source 1..21: mol_type = other DNA
catgatgggacatctaaatgg

SEQ ID NO: 23828 - DNA, 21 bp, synthetic construct
  source 1..21: mol_type = other DNA
tttttctcgggaatcaaggag

SEQ ID NO: 23829 - DNA, 21 bp, synthetic construct
  source 1..21: mol_type = other DNA
ttagctaaaggcgggtttaac

SEQ ID NO: 23830 - DNA, 21 bp, synthetic construct
  source 1..21: mol_type = other DNA
ccactggacagctataaatgg

SEQ ID NO: 23831 - DNA, 21 bp, synthetic construct
  source 1..21: mol_type = other DNA
cgcacgaacgacgtatacccg

SEQ ID NO: 23832 - DNA, 21 bp, synthetic construct
  source 1..21: mol_type = other DNA
attatgtcggacagggtgtgg

SEQ ID NO: 23833 - DNA, 21 bp, synthetic construct
  source 1..21: mol_type = other DNA
gagatgagctcgataaaatgg

SEQ ID NO: 23834 - DNA, 21 bp, synthetic construct
  source 1..21: mol_type = other DNA
cacgaaagcaccaatggagtg

SEQ ID NO: 23835 - DNA, 21 bp, synthetic construct
  source 1..21: mol_type = other DNA
gtagaaagcgccaacggtgtg

SEQ ID NO: 23836 - DNA, 21 bp, synthetic construct
  source 1..21: mol_type = other DNA
tattttaccggtaaaatcaat

SEQ ID NO: 23837 - DNA, 21 bp, synthetic construct
  source 1..21: mol_type = other DNA
aggcttagcgatgtatatcct

SEQ ID NO: 23838 - DNA, 21 bp, synthetic construct
  source 1..21: mol_type = other DNA
taccatgcccttaacttggat

SEQ ID NO: 23839 - DNA, 21 bp, synthetic construct
  source 1..21: mol_type = other DNA
agattgcatgacgcctatcct

SEQ ID NO: 23840 - DNA, 21 bp, synthetic construct
  source 1..21: mol_type = other DNA
gtcgtatcaacgaacggaatt

SEQ ID NO: 23841 - DNA, 21 bp, synthetic construct
  source 1..21: mol_type = other DNA
tactcaaaggcaggcgtgaac

SEQ ID NO: 23842 - DNA, 21 bp, synthetic construct
  source 1..21: mol_type = other DNA
gttcagagcacgaacggccgg

SEQ ID NO: 23843 - DNA, 21 bp, synthetic construct
  source 1..21: mol_type = other DNA
tacagcaagagtggtgctaac

SEQ ID NO: 23844 - DNA, 21 bp, synthetic construct
  source 1..21: mol_type = other DNA
cgcgagtttgacgctttcccg

SEQ ID NO: 23845 - DNA, 21 bp, synthetic construct
  source 1..21: mol_type = other DNA
cttgcaaaagccggacccaat

SEQ ID NO: 23846 - DNA, 21 bp, synthetic construct
  source 1..21: mol_type = other DNA
agagatgagttcacgcactac

SEQ ID NO: 23847 - DNA, 21 bp, synthetic construct
  source 1..21: mol_type = other DNA
ggaagtgaatattccaaatgg

SEQ ID NO: 23848 - DNA, 21 bp, synthetic construct
  source 1..21: mol_type = other DNA
tggtggagcggagtgcagagc

SEQ ID NO: 23849 - DNA, 21 bp, synthetic construct
  source 1..21: mol_type = other DNA
tattccaaagcaaattttaat

SEQ ID NO: 23850 - DNA, 21 bp, synthetic construct
  source 1..21: mol_type = other DNA
tattttcacgggaaattggaa

SEQ ID NO: 23851 - DNA, 21 bp, synthetic construct
  source 1..21: mol_type = other DNA
ttgcatcggttgcacccaaac

SEQ ID NO: 23852 - DNA, 21 bp, synthetic construct
  source 1..21: mol_type = other DNA
ctgtctaaaatcggactcaac

SEQ ID NO: 23853 - DNA, 21 bp, synthetic construct
  source 1..21: mol_type = other DNA
cgagatgaatacactggtttt

SEQ ID NO: 23854 - DNA, 21 bp, synthetic construct
  source 1..21: mol_type = other DNA
tactccagactaggtttagat

SEQ ID NO: 23855 - DNA, 21 bp, synthetic construct
  source 1..21: mol_type = other DNA
aactcggaatacctgcccttt

SEQ ID NO: 23856 - DNA, 21 bp, synthetic construct
  source 1..21: mol_type = other DNA
aagagcgatttcgtatcgtgg

SEQ ID NO: 23857 - DNA, 21 bp, synthetic construct
  source 1..21: mol_type = other DNA
tatttcactgggaggatagac

SEQ ID NO: 23858 - DNA, 21 bp, synthetic construct
  source 1..21: mol_type = other DNA
ttatcgagagcttctgtgaat

SEQ ID NO: 23859 - DNA, 21 bp, synthetic construct
  source 1..21: mol_type = other DNA
ctacacagattggcggcaaac

SEQ ID NO: 23860 - DNA, 21 bp, synthetic construct
  source 1..21: mol_type = other DNA
tatagcaaacagaatttaaat

SEQ ID NO: 23861 - DNA, 21 bp, synthetic construct
  source 1..21: mol_type = other DNA
gcaggtggcggactattcatc

SEQ ID NO: 23862 - DNA, 21 bp, synthetic construct
  source 1..21: mol_type = other DNA
aggttggaatcacatggatgg

SEQ ID NO: 23863 - DNA, 21 bp, synthetic construct
  source 1..21: mol_type = other DNA
ctgtgcaggccctgtagcacc

SEQ ID NO: 23864 - DNA, 21 bp, synthetic construct
  source 1..21: mol_type = other DNA
tatctagggcagccctatttc

SEQ ID NO: 23865 - DNA, 21 bp, synthetic construct
  source 1..21: mol_type = other DNA
gtcccagatcatgtgagatgg

SEQ ID NO: 23866 - DNA, 21 bp, synthetic construct
  source 1..21: mol_type = other DNA
cccttgagtagcgcatcctgg

SEQ ID NO: 23867 - DNA, 21 bp, synthetic construct
  source 1..21: mol_type = other DNA
agtgattctacaaatggtgtg

SEQ ID NO: 23868 - DNA, 21 bp, synthetic construct
  source 1..21: mol_type = other DNA
tattttacaggggagaaggaa

SEQ ID NO: 23869 - DNA, 21 bp, synthetic construct
  source 1..21: mol_type = other DNA
tgcaagcccaataatggcatc

SEQ ID NO: 23870 - DNA, 21 bp, synthetic construct
  source 1..21: mol_type = other DNA
ttgcataagatgatgatgaat

SEQ ID NO: 23871 - DNA, 21 bp, synthetic construct
  source 1..21: mol_type = other DNA
tactttacaggaaaacccgat

SEQ ID NO: 23872 - DNA, 21 bp, synthetic construct
  source 1..21: mol_type = other DNA
cgcggcgataatatcttcccg

SEQ ID NO: 23873 - DNA, 21 bp, synthetic construct
  source 1..21: mol_type = other DNA
ctcacccgcccgtgcagtgag

SEQ ID NO: 23874 - DNA, 21 bp, synthetic construct
  source 1..21: mol_type = other DNA
tatttcgccggaaagatcgaa

SEQ ID NO: 23875 - DNA, 21 bp, synthetic construct
  source 1..21: mol_type = other DNA
tatgttagatcggatcataac

SEQ ID NO: 23876 - DNA, 21 bp, synthetic construct
  source 1..21: mol_type = other DNA
agatcagaacatacttatcct

SEQ ID NO: 23877 - DNA, 21 bp, synthetic construct
  source 1..21: mol_type = other DNA
taccacaagagcaatatgaat

SEQ ID NO: 23878 - DNA, 21 bp, synthetic construct
  source 1..21: mol_type = other DNA
tatgcaaaaacaggacagaat

SEQ ID NO: 23879 - DNA, 21 bp, synthetic construct
  source 1..21: mol_type = other DNA
atgccaacgggcgatggacct

SEQ ID NO: 23880 - DNA, 21 bp, synthetic construct
  source 1..21: mol_type = other DNA
tacgctaagacgggtcaaaac

SEQ ID NO: 23881 - DNA, 21 bp, synthetic construct
  source 1..21: mol_type = other DNA
ataatgtcgtcacgagaatgg

SEQ ID NO: 23882 - DNA, 21 bp, synthetic construct
  source 1..21: mol_type = other DNA
gccatggcagatcgtacttgg

SEQ ID NO: 23883 - DNA, 21 bp, synthetic construct
  source 1..21: mol_type = other DNA
tacttcaccgggaagagggag

SEQ ID NO: 23884 - DNA, 21 bp, synthetic construct
  source 1..21: mol_type = other DNA
gactacgctaaatcactttta

SEQ ID NO: 23885 - DNA, 21 bp, synthetic construct
  source 1..21: mol_type = other DNA
tactttcatggtatacacgag

SEQ ID NO: 23886 - DNA, 21 bp, synthetic construct
  source 1..21: mol_type = other DNA
ctcgcaaaaagtggtgttaac

SEQ ID NO: 23887 - DNA, 21 bp, synthetic construct
  source 1..21: mol_type = other DNA
gttatgtcaagcagggaatgg

SEQ ID NO: 23888 - DNA, 21 bp, synthetic construct
  source 1..21: mol_type = other DNA
cgcgaggatggagttacgtgg

SEQ ID NO: 23889 - DNA, 21 bp, synthetic construct
  source 1..21: mol_type = other DNA
ttcagcaggttaaatccggac

SEQ ID NO: 23890 - DNA, 21 bp, synthetic construct
  source 1..21: mol_type = other DNA
tatttctctggagtaactgag

SEQ ID NO: 23891 - DNA, 21 bp, synthetic construct
  source 1..21: mol_type = other DNA
agtgatagtacaaatggacgc

SEQ ID NO: 23892 - DNA, 21 bp, synthetic construct
  source 1..21: mol_type = other DNA
gctgagagtaccaatggccga

SEQ ID NO: 23893 - DNA, 21 bp, synthetic construct
  source 1..21: mol_type = other DNA
attatggcagacagagggtgg

SEQ ID NO: 23894 - DNA, 21 bp, synthetic construct
  source 1..21: mol_type = other DNA
tatttcacggggcacacagag

SEQ ID NO: 23895 - DNA, 21 bp, synthetic construct
  source 1..21: mol_type = other DNA
cgcgatgagtttagtgggtat

SEQ ID NO: 23896 - DNA, 21 bp, synthetic construct
  source 1..21: mol_type = other DNA
gatatggcaagtacaaactgg

SEQ ID NO: 23897 - DNA, 21 bp, synthetic construct
  source 1..21: mol_type = other DNA
tactttacagggcgcgctgaa

SEQ ID NO: 23898 - DNA, 21 bp, synthetic construct
  source 1..21: mol_type = other DNA
atgcaccggttaagcacgaat

SEQ ID NO: 23899 - DNA, 21 bp, synthetic construct
  source 1..21: mol_type = other DNA
ttacatcgtctgagttcgaac

SEQ ID NO: 23900 - DNA, 21 bp, synthetic construct
  source 1..21: mol_type = other DNA
attggccatgaaggatgggac

SEQ ID NO: 23901 - DNA, 21 bp, synthetic construct
  source 1..21: mol_type = other DNA
cgttctgaattcgtcacgttc

SEQ ID NO: 23902 - DNA, 21 bp, synthetic construct
  source 1..21: mol_type = other DNA
atactttcagatcgagtctgg

SEQ ID NO: 23903 - DNA, 21 bp, synthetic construct
  source 1..21: mol_type = other DNA
atcatgtcctcgagcatgtgg

SEQ ID NO: 23904 - DNA, 21 bp, synthetic construct
  source 1..21: mol_type = other DNA
ggttgccgcccagacccagtc

SEQ ID NO: 23905 - DNA, 21 bp, synthetic construct
  source 1..21: mol_type = other DNA
gatatgacctcacacaaatgg

SEQ ID NO: 23906 - DNA, 21 bp, synthetic construct
  source 1..21: mol_type = other DNA
aaggatgattacactagttac

SEQ ID NO: 23907 - DNA, 21 bp, synthetic construct
  source 1..21: mol_type = other DNA
atcctctcaagtcgcgactgg

SEQ ID NO: 23908 - DNA, 21 bp, synthetic construct
  source 1..21: mol_type = other DNA
tacttcacgggggtcactgaa

SEQ ID NO: 23909 - DNA, 21 bp, synthetic construct
  source 1..21: mol_type = other DNA
tattcacggttgcagcccgac

SEQ ID NO: 23910 - DNA, 21 bp, synthetic construct
  source 1..21: mol_type = other DNA
aggatgtcagatgcctatccg

SEQ ID NO: 23911 - DNA, 21 bp, synthetic construct
  source 1..21: mol_type = other DNA
aaagatgaattcaagtcatat

SEQ ID NO: 23912 - DNA, 21 bp, synthetic construct
  source 1..21: mol_type = other DNA
aaggatggatacagtacctat

SEQ ID NO: 23913 - DNA, 21 bp, synthetic construct
  source 1..21: mol_type = other DNA
tactcgcgcattggggccggt

SEQ ID NO: 23914 - DNA, 21 bp, synthetic construct
  source 1..21: mol_type = other DNA
agaaccgccgacgcattcccc

SEQ ID NO: 23915 - DNA, 21 bp, synthetic construct
  source 1..21: mol_type = other DNA
agactactagatgtataccct

SEQ ID NO: 23916 - DNA, 21 bp, synthetic construct
  source 1..21: mol_type = other DNA
agagacgagtttacttcgtgg

SEQ ID NO: 23917 - DNA, 21 bp, synthetic construct
  source 1..21: mol_type = other DNA
tatttccatggagtcaaggaa

SEQ ID NO: 23918 - DNA, 21 bp, synthetic construct
  source 1..21: mol_type = other DNA
ccaatggctgaccgcaaatgg

SEQ ID NO: 23919 - DNA, 21 bp, synthetic construct
  source 1..21: mol_type = other DNA
tacactaaatcacaagagtgg

SEQ ID NO: 23920 - DNA, 21 bp, synthetic construct
  source 1..21: mol_type = other DNA
agcgacggcactagtcgatgg

SEQ ID NO: 23921 - DNA, 21 bp, synthetic construct
  source 1..21: mol_type = other DNA
ctcagcaggatctccaacaac

SEQ ID NO: 23922 - DNA, 21 bp, synthetic construct
  source 1..21: mol_type = other DNA
tattttaccggaaagcatgag

SEQ ID NO: 23923 - DNA, 21 bp, synthetic construct
  source 1..21: mol_type = other DNA
cacgctagtactaacggagtt

SEQ ID NO: 23924 - DNA, 21 bp, synthetic construct
  source 1..21: mol_type = other DNA
tacgtaaaaagcgatgcggga

SEQ ID NO: 23925 - DNA, 21 bp, synthetic construct
  source 1..21: mol_type = other DNA
tactttcacggcgtaaaagag

SEQ ID NO: 23926 - DNA, 21 bp, synthetic construct
  source 1..21: mol_type = other DNA
tatagtaagagcggattcaat

SEQ ID NO: 23927 - DNA, 21 bp, synthetic construct
  source 1..21: mol_type = other DNA
tatttcacgggctatgtcgac

SEQ ID NO: 23928 - DNA, 21 bp, synthetic construct
  source 1..21: mol_type = other DNA
tggtggtcaggtgtccaatca

SEQ ID NO: 23929 - DNA, 21 bp, synthetic construct
  source 1..21: mol_type = other DNA
agggatgagttcagtagcttt

SEQ ID NO: 23930 - DNA, 21 bp, synthetic construct
  source 1..21: mol_type = other DNA
gttatgagtacgcatggggtg

SEQ ID NO: 23931 - DNA, 21 bp, synthetic construct
  source 1..21: mol_type = other DNA
gtactatctagcaacacatgg

SEQ ID NO: 23932 - DNA, 21 bp, synthetic construct
  source 1..21: mol_type = other DNA
tacagcaaggttggtttcaac

SEQ ID NO: 23933 - DNA, 21 bp, synthetic construct
  source 1..21: mol_type = other DNA
tattttacggggatccagagt

SEQ ID NO: 23934 - DNA, 21 bp, synthetic construct
  source 1..21: mol_type = other DNA
ataatgagcgaccgcggttgg

SEQ ID NO: 23935 - DNA, 21 bp, synthetic construct
  source 1..21: mol_type = other DNA
gaatcggacttcaaaatctac

SEQ ID NO: 23936 - DNA, 21 bp, synthetic construct
  source 1..21: mol_type = other DNA
cgggatgagaacgtcttccca

SEQ ID NO: 23937 - DNA, 21 bp, synthetic construct
  source 1..21: mol_type = other DNA
acagacggtacctcacgatgg

SEQ ID NO: 23938 - DNA, 21 bp, synthetic construct
  source 1..21: mol_type = other DNA
tatttcacaggggaagtcaac

SEQ ID NO: 23939 - DNA, 21 bp, synthetic construct
  source 1..21: mol_type = other DNA
tatgtcaagagcgatcccatg

SEQ ID NO: 23940 - DNA, 21 bp, synthetic construct
  source 1..21: mol_type = other DNA
ttctttagcgggattaaagaa

SEQ ID NO: 23941 - DNA, 21 bp, synthetic construct
  source 1..21: mol_type = other DNA
atcgcatcccgaggctgggac

SEQ ID NO: 23942 - DNA, 21 bp, synthetic construct
  source 1..21: mol_type = other DNA
gatatgacatcaagagattgg

SEQ ID NO: 23943 - DNA, 21 bp, synthetic construct
  source 1..21: mol_type = other DNA
gtgatgactgccagggactgg

SEQ ID NO: 23944 - DNA, 21 bp, synthetic construct
  source 1..21: mol_type = other DNA
ctacttgaaagcaggagttgg

SEQ ID NO: 23945 - DNA, 21 bp, synthetic construct
  source 1..21: mol_type = other DNA
tactttacagggcagagggag

SEQ ID NO: 23946 - DNA, 21 bp, synthetic construct
  source 1..21: mol_type = other DNA
aaagatgattacctttcatgg

SEQ ID NO: 23947 - DNA, 21 bp, synthetic construct
  source 1..21: mol_type = other DNA
ttttcgcggttgagtgacaac

SEQ ID NO: 23948 - DNA, 21 bp, synthetic construct
  source 1..21: mol_type = other DNA
tactcgaaggccaacagtaat

SEQ ID NO: 23949 - DNA, 21 bp, synthetic construct
  source 1..21: mol_type = other DNA
gtgcacagctcgaacggggta

SEQ ID NO: 23950 - DNA, 21 bp, synthetic construct
  source 1..21: mol_type = other DNA
cgtgacgaagaagtctaccca

SEQ ID NO: 23951 - DNA, 21 bp, synthetic construct
  source 1..21: mol_type = other DNA
agggaagcggtgagcacgtgg

SEQ ID NO: 23952 - DNA, 21 bp, synthetic construct
  source 1..21: mol_type = other DNA
ttagatgagtggcatggcttc

SEQ ID NO: 23953 - DNA, 21 bp, synthetic construct
  source 1..21: mol_type = other DNA
gtcttaagcgacagattgtgg

SEQ ID NO: 23954 - DNA, 21 bp, synthetic construct
  source 1..21: mol_type = other DNA
tatcacaagttaaatgtagtt

SEQ ID NO: 23955 - DNA, 21 bp, synthetic construct
  source 1..21: mol_type = other DNA
agagaggattttgtccgttat

SEQ ID NO: 23956 - DNA, 21 bp, synthetic construct
  source 1..21: mol_type = other DNA
tcggattccacaaacgggagg

SEQ ID NO: 23957 - DNA, 21 bp, synthetic construct
  source 1..21: mol_type = other DNA
agggacggggtcagcaaatgg

SEQ ID NO: 23958 - DNA, 21 bp, synthetic construct
  source 1..21: mol_type = other DNA
tcagacggtgtgagtagatgg

SEQ ID NO: 23959 - DNA, 21 bp, synthetic construct
  source 1..21: mol_type = other DNA
agatcagctgatgcctatccc

SEQ ID NO: 23960 - DNA, 21 bp, synthetic construct
  source 1..21: mol_type = other DNA
ttcgaatcgacaaatggagtc

SEQ ID NO: 23961 - DNA, 21 bp, synthetic construct
  source 1..21: mol_type = other DNA
cgtgaagagactgtgtttccc

SEQ ID NO: 23962 - DNA, 21 bp, synthetic construct
  source 1..21: mol_type = other DNA
gtgcatcgcctccaggataag

SEQ ID NO: 23963 - DNA, 21 bp, synthetic construct
  source 1..21: mol_type = other DNA
tgtgcgatcgattatcgtgaa

SEQ ID NO: 23964 - DNA, 21 bp, synthetic construct
  source 1..21: mol_type = other DNA
tattcgcgattaagccccgat

SEQ ID NO: 23965 - DNA, 21 bp, synthetic construct
  source 1..21: mol_type = other DNA
ttggagtcaactaatggcata

SEQ ID NO: 23966 - DNA, 21 bp, synthetic construct
  source 1..21: mol_type = other DNA
gcgatggccgaccgccaatgg

SEQ ID NO: 23967 - DNA, 21 bp, synthetic construct
  source 1..21: mol_type = other DNA
agtactagtacgaatggcata

SEQ ID NO: 23968 - DNA, 21 bp, synthetic construct
  source 1..21: mol_type = other DNA
tactttaccggaatgatggat

SEQ ID NO: 23969 - DNA, 21 bp, synthetic construct
  source 1..21: mol_type = other DNA
ttgcaccgtctgcaggtttca

SEQ ID NO: 23970 - DNA, 21 bp, synthetic construct
  source 1..21: mol_type = other DNA
cacgatagcacaaacggggtt

SEQ ID NO: 23971 - DNA, 21 bp, synthetic construct
  source 1..21: mol_type = other DNA
tattttacaggacgcactgaa

SEQ ID NO: 23972 - DNA, 21 bp, synthetic construct
  source 1..21: mol_type = other DNA
ctcagtaggatcagtcaaaat

SEQ ID NO: 23973 - DNA, 21 bp, synthetic construct
  source 1..21: mol_type = other DNA
tatttcacgggcaggaccgaa

SEQ ID NO: 23974 - DNA, 21 bp, synthetic construct
  source 1..21: mol_type = other DNA
tattggagtggaatacaggaa

SEQ ID NO: 23975 - DNA, 21 bp, synthetic construct
  source 1..21: mol_type = other DNA
agactaagtgatgcctaccct

SEQ ID NO: 23976 - DNA, 21 bp, synthetic construct
  source 1..21: mol_type = other DNA
gacctcgagtccagggactgg

SEQ ID NO: 23977 - DNA, 21 bp, synthetic construct
  source 1..21: mol_type = other DNA
tatcacaggctctccgtggat

SEQ ID NO: 23978 - DNA, 21 bp, synthetic construct
  source 1..21: mol_type = other DNA
atccaaagcacgaatggaagg

SEQ ID NO: 23979 - DNA, 21 bp, synthetic construct
  source 1..21: mol_type = other DNA
tactcaaaacagggcctgaac

SEQ ID NO: 23980 - DNA, 21 bp, synthetic construct
  source 1..21: mol_type = other DNA
ttggcgaaaaccggtgtcaat

SEQ ID NO: 23981 - DNA, 21 bp, synthetic construct
  source 1..21: mol_type = other DNA
gtcatgggaagtagcaattgg

SEQ ID NO: 23982 - DNA, 21 bp, synthetic construct
  source 1..21: mol_type = other DNA
tattttaccggccaacgggag

SEQ ID NO: 23983 - DNA, 21 bp, synthetic construct
  source 1..21: mol_type = other DNA
tatttcacggggaaagcagac

SEQ ID NO: 23984 - DNA, 21 bp, synthetic construct
  source 1..21: mol_type = other DNA
agggatgaatttatcgcttgg

SEQ ID NO: 23985 - DNA, 21 bp, synthetic construct
  source 1..21: mol_type = other DNA
ttgtcaaaagtgggatatgac

SEQ ID NO: 23986 - DNA, 21 bp, synthetic construct
  source 1..21: mol_type = other DNA
atgccgacaggagacggtcca

SEQ ID NO: 23987 - DNA, 21 bp, synthetic construct
  source 1..21: mol_type = other DNA
tattcgaggctaggccccaac

SEQ ID NO: 23988 - DNA, 21 bp, synthetic construct
  source 1..21: mol_type = other DNA
ttgtgccgcccgtgtattgag

SEQ ID NO: 23989 - DNA, 21 bp, synthetic construct
  source 1..21: mol_type = other DNA
gggagtgatggagtaagatgg

SEQ ID NO: 23990 - DNA, 21 bp, synthetic construct
  source 1..21: mol_type = other DNA
gatatggagtctaggggctgg

SEQ ID NO: 23991 - DNA, 21 bp, synthetic construct
  source 1..21: mol_type = other DNA
tacgtacgtagcgatgtgaag

SEQ ID NO: 23992 - DNA, 21 bp, synthetic construct
  source 1..21: mol_type = other DNA
cgcgatgaattcaagagctgg

SEQ ID NO: 23993 - DNA, 21 bp, synthetic construct
  source 1..21: mol_type = other DNA
tacgcgaaatcaggttctaac

SEQ ID NO: 23994 - DNA, 21 bp, synthetic construct
  source 1..21: mol_type = other DNA
ttaagtaaaatcggaatgaac

SEQ ID NO: 23995 - DNA, 21 bp, synthetic construct
  source 1..21: mol_type = other DNA
cgtctcaatgatgcgtaccct

SEQ ID NO: 23996 - DNA, 21 bp, synthetic construct
  source 1..21: mol_type = other DNA
attatgagtgaccgcttatgg

SEQ ID NO: 23997 - DNA, 21 bp, synthetic construct
  source 1..21: mol_type = other DNA
tactcgaaagcccagggcatt

SEQ ID NO: 23998 - DNA, 21 bp, synthetic construct
  source 1..21: mol_type = other DNA
gaaatggccgcatatgactgg

SEQ ID NO: 23999 - DNA, 21 bp, synthetic construct
  source 1..21: mol_type = other DNA
tatcataagctgcaaagcttt

SEQ ID NO: 24000 - DNA, 21 bp, synthetic construct
  source 1..21: mol_type = other DNA
tattgggcgggtgttaaagag

SEQ ID NO: 24001 - DNA, 21 bp, synthetic construct
  source 1..21: mol_type = other DNA
aaggacgacttctccggctgg

SEQ ID NO: 24002 - DNA, 21 bp, synthetic construct
  source 1..21: mol_type = other DNA
acgcgagagggcgacccggcg

SEQ ID NO: 24003 - DNA, 21 bp, synthetic construct
  source 1..21: mol_type = other DNA
gagatggcatcgcgggactgg

SEQ ID NO: 24004 - DNA, 21 bp, synthetic construct
  source 1..21: mol_type = other DNA
tatagcaaagcgggtcagaat

SEQ ID NO: 24005 - DNA, 21 bp, synthetic construct
  source 1..21: mol_type = other DNA
ctgtcacgtttagggtatgat

SEQ ID NO: 24006 - DNA, 21 bp, synthetic construct
  source 1..21: mol_type = other DNA
attttaagtgacagaatttgg

SEQ ID NO: 24007 - DNA, 21 bp, synthetic construct
  source 1..21: mol_type = other DNA
gctagtagtaccaacggcgtg

SEQ ID NO: 24008 - DNA, 21 bp, synthetic construct
  source 1..21: mol_type = other DNA
tttagtaaacttaacatgaat

SEQ ID NO: 24009 - DNA, 21 bp, synthetic construct
  source 1..21: mol_type = other DNA
taccatgccaaacaaaataat

SEQ ID NO: 24010 - DNA, 21 bp, synthetic construct
  source 1..21: mol_type = other DNA
gtattaagtgacaggttgtgg

SEQ ID NO: 24011 - DNA, 21 bp, synthetic construct
  source 1..21: mol_type = other DNA
ttgagccgcgccgcaaacaat

SEQ ID NO: 24012 - DNA, 21 bp, synthetic construct
  source 1..21: mol_type = other DNA
tactttactgggatgagggaa

SEQ ID NO: 24013 - DNA, 21 bp, synthetic construct
  source 1..21: mol_type = other DNA
ctccaccgccttcatcctaat

SEQ ID NO: 24014 - DNA, 21 bp, synthetic construct
  source 1..21: mol_type = other DNA
atgagggatgggaccagcgca

SEQ ID NO: 24015 - DNA, 21 bp, synthetic construct
  source 1..21: mol_type = other DNA
tatttcagcggtaaaatcgat

SEQ ID NO: 24016 - DNA, 21 bp, synthetic construct
  source 1..21: mol_type = other DNA
cgagacgagtttactagtttt

SEQ ID NO: 24017 - DNA, 21 bp, synthetic construct
  source 1..21: mol_type = other DNA
atgcatcgcttatcatttgat

SEQ ID NO: 24018 - DNA, 21 bp, synthetic construct
  source 1..21: mol_type = other DNA
cttcacaaactgcaacctgac

SEQ ID NO: 24019 - DNA, 21 bp, synthetic construct
  source 1..21: mol_type = other DNA
gacttgagcgatcgtaaatgg

SEQ ID NO: 24020 - DNA, 21 bp, synthetic construct
  source 1..21: mol_type = other DNA
ttatccaaagcgagtacgaat

SEQ ID NO: 24021 - DNA, 21 bp, synthetic construct
  source 1..21: mol_type = other DNA
cgcacgtcggacgcataccca

SEQ ID NO: 24022 - DNA, 21 bp, synthetic construct
  source 1..21: mol_type = other DNA
tacttttcgggtatcccagct

SEQ ID NO: 24023 - DNA, 21 bp, synthetic construct
  source 1..21: mol_type = other DNA
attatgtctagttcagcctgg

SEQ ID NO: 24024 - DNA, 21 bp, synthetic construct
  source 1..21: mol_type = other DNA
cgcgatgactttaccgcgtac

SEQ ID NO: 24025 - DNA, 21 bp, synthetic construct
  source 1..21: mol_type = other DNA
tattcaaaacttgaccacaat

SEQ ID NO: 24026 - DNA, 21 bp, synthetic construct
  source 1..21: mol_type = other DNA
gattggatccctaaatgtcca

SEQ ID NO: 24027 - DNA, 21 bp, synthetic construct
  source 1..21: mol_type = other DNA
gtggagtcagcaaatggggtt

SEQ ID NO: 24028 - DNA, 21 bp, synthetic construct
  source 1..21: mol_type = other DNA
gcaggagaaagtcgtgggtgg

SEQ ID NO: 24029 - DNA, 21 bp, synthetic construct
  source 1..21: mol_type = other DNA
cgtggtggggatgtctacccc

SEQ ID NO: 24030 - DNA, 21 bp, synthetic construct
  source 1..21: mol_type = other DNA
tacttttccgggactaaagag

SEQ ID NO: 24031 - DNA, 21 bp, synthetic construct
  source 1..21: mol_type = other DNA
gatctatctgataggaagtgg

SEQ ID NO: 24032 - DNA, 21 bp, synthetic construct
  source 1..21: mol_type = other DNA
ttcttctcaggggtaatcgct

SEQ ID NO: 24033 - DNA, 21 bp, synthetic construct
  source 1..21: mol_type = other DNA
attatgtcggacaggttatgg

SEQ ID NO: 24034 - DNA, 21 bp, synthetic construct
  source 1..21: mol_type = other DNA
ctatcgaagataggagcaaac

SEQ ID NO: 24035 - DNA, 21 bp, synthetic construct
  source 1..21: mol_type = other DNA
ttgtctcggctgtctcaagat

SEQ ID NO: 24036 - DNA, 21 bp, synthetic construct
  source 1..21: mol_type = other DNA
tacagtaagccgggtccgaac

SEQ ID NO: 24037 - DNA, 21 bp, synthetic construct
  source 1..21: mol_type = other DNA
ttcagtcgggtcggcgaaaat

SEQ ID NO: 24038 - DNA, 21 bp, synthetic construct
  source 1..21: mol_type = other DNA
tacagtagactgtcaccagac

SEQ ID NO: 24039 - DNA, 21 bp, synthetic construct
  source 1..21: mol_type = other DNA
tatttctctggagttatggcg

SEQ ID NO: 24040 - DNA, 21 bp, synthetic construct
  source 1..21: mol_type = other DNA
agaggtgagctcatctttccc

SEQ ID NO: 24041 - DNA, 21 bp, synthetic construct
  source 1..21: mol_type = other DNA
cccatggaaagtagggaatgg

SEQ ID NO: 24042 - DNA, 21 bp, synthetic construct
  source 1..21: mol_type = other DNA
ggtgaagatcacgtacgctgg

SEQ ID NO: 24043 - DNA, 21 bp, synthetic construct
  source 1..21: mol_type = other DNA
tatagtcgggtcagcccggac

SEQ ID NO: 24044 - DNA, 21 bp, synthetic construct
  source 1..21: mol_type = other DNA
tattttagcggagtgatctca

SEQ ID NO: 24045 - DNA, 21 bp, synthetic construct
  source 1..21: mol_type = other DNA
tattggagtggactactggag

SEQ ID NO: 24046 - DNA, 21 bp, synthetic construct
  source 1..21: mol_type = other DNA
cgcgatgactcggtattcccc

SEQ ID NO: 24047 - DNA, 21 bp, synthetic construct
  source 1..21: mol_type = other DNA
cgcagcgagttcatgtcttat

SEQ ID NO: 24048 - DNA, 21 bp, synthetic construct
  source 1..21: mol_type = other DNA
cgcgaagaatatacctcatgg

SEQ ID NO: 24049 - DNA, 21 bp, synthetic construct
  source 1..21: mol_type = other DNA
tacttttcaggcatacacgat

SEQ ID NO: 24050 - DNA, 21 bp, synthetic construct
  source 1..21: mol_type = other DNA
gttgacgaatatctaagctgg

SEQ ID NO: 24051 - DNA, 21 bp, synthetic construct
  source 1..21: mol_type = other DNA
tatttctcggggaaaaaggat

SEQ ID NO: 24052 - DNA, 21 bp, synthetic construct
  source 1..21: mol_type = other DNA
tatttcacaggtatacacgac

SEQ ID NO: 24053 - DNA, 21 bp, synthetic construct
  source 1..21: mol_type = other DNA
gaatcaagcacaaatgggcgt

SEQ ID NO: 24054 - DNA, 21 bp, synthetic construct
  source 1..21: mol_type = other DNA
tattttgcgggtataatagcg

SEQ ID NO: 24055 - DNA, 21 bp, synthetic construct
  source 1..21: mol_type = other DNA
gtcatggaggcaagagactgg

SEQ ID NO: 24056 - DNA, 21 bp, synthetic construct
  source 1..21: mol_type = other DNA
ttaatggctgatcggacctgg

SEQ ID NO: 24057 - DNA, 21 bp, synthetic construct
  source 1..21: mol_type = other DNA
cgcacggagacgacctatccc

SEQ ID NO: 24058 - DNA, 21 bp, synthetic construct
  source 1..21: mol_type = other DNA
cgtggcgaccatgtttatcct

SEQ ID NO: 24059 - DNA, 21 bp, synthetic construct
  source 1..21: mol_type = other DNA
attgcgagtacgaacggagtt

SEQ ID NO: 24060 - DNA, 21 bp, synthetic construct
  source 1..21: mol_type = other DNA
gttcccgaccacgtccgctgg

SEQ ID NO: 24061 - DNA, 21 bp, synthetic construct
  source 1..21: mol_type = other DNA
ctcagtagggcgagtcctaat

SEQ ID NO: 24062 - DNA, 21 bp, synthetic construct
  source 1..21: mol_type = other DNA
tatttttccggtataccagag

SEQ ID NO: 24063 - DNA, 21 bp, synthetic construct
  source 1..21: mol_type = other DNA
actaccagtaccaatggtata

SEQ ID NO: 24064 - DNA, 21 bp, synthetic construct
  source 1..21: mol_type = other DNA
tacgtccgtagcgaccacaac

SEQ ID NO: 24065 - DNA, 21 bp, synthetic construct
  source 1..21: mol_type = other DNA
atttcctccactaatggagtc

SEQ ID NO: 24066 - DNA, 21 bp, synthetic construct
  source 1..21: mol_type = other DNA
tacagtaaaatgggattgaat

SEQ ID NO: 24067 - DNA, 21 bp, synthetic construct
  source 1..21: mol_type = other DNA
tattcgaagacaggcttcaat

SEQ ID NO: 24068 - DNA, 21 bp, synthetic construct
  source 1..21: mol_type = other DNA
gatttacggactgcgacttgg

SEQ ID NO: 24069 - DNA, 21 bp, synthetic construct
  source 1..21: mol_type = other DNA
tacagcaagttgagtgatcgt

SEQ ID NO: 24070 - DNA, 21 bp, synthetic construct
  source 1..21: mol_type = other DNA
cgtgacgaattttcctcgttc

SEQ ID NO: 24071 - DNA, 21 bp, synthetic construct
  source 1..21: mol_type = other DNA
aaggacgattacagcacctac

SEQ ID NO: 24072 - DNA, 21 bp, synthetic construct
  source 1..21: mol_type = other DNA
aggacctcgactgtgtacccc

SEQ ID NO: 24073 - DNA, 21 bp, synthetic construct
  source 1..21: mol_type = other DNA
tactttacgggaaaattgtca

SEQ ID NO: 24074 - DNA, 21 bp, synthetic construct
  source 1..21: mol_type = other DNA
agaatgtctgatgcatttccc

SEQ ID NO: 24075 - DNA, 21 bp, synthetic construct
  source 1..21: mol_type = other DNA
tatttttcggggatacaagac

SEQ ID NO: 24076 - DNA, 21 bp, synthetic construct
  source 1..21: mol_type = other DNA
aaaatggaggaccggtcttgg

SEQ ID NO: 24077 - DNA, 21 bp, synthetic construct
  source 1..21: mol_type = other DNA
tcagccgagtgggttagctac

SEQ ID NO: 24078 - DNA, 21 bp, synthetic construct
  source 1..21: mol_type = other DNA
tatgtaaagtctcaacagact

SEQ ID NO: 24079 - DNA, 21 bp, synthetic construct
  source 1..21: mol_type = other DNA
agaatggaaagtgtaatgtgg

SEQ ID NO: 24080 - DNA, 21 bp, synthetic construct
  source 1..21: mol_type = other DNA
tccgatggaacaagtaagtgg

SEQ ID NO: 24081 - DNA, 21 bp, synthetic construct
  source 1..21: mol_type = other DNA
aagatggacagcatcgggtgg

SEQ ID NO: 24082 - DNA, 21 bp, synthetic construct
  source 1..21: mol_type = other DNA
aatacttatcggtgcgatggc

SEQ ID NO: 24083 - DNA, 21 bp, synthetic construct
  source 1..21: mol_type = other DNA
tacgccaagaatgggtacaat

SEQ ID NO: 24084 - DNA, 21 bp, synthetic construct
  source 1..21: mol_type = other DNA
gaagcgttgaggggttgggat

SEQ ID NO: 24085 - DNA, 21 bp, synthetic construct
  source 1..21: mol_type = other DNA
tacgctagggggggacctaac

SEQ ID NO: 24086 - DNA, 21 bp, synthetic construct
  source 1..21: mol_type = other DNA
cattcacgaatcgggcccaac

SEQ ID NO: 24087 - DNA, 21 bp, synthetic construct
  source 1..21: mol_type = other DNA
aaagacgattttagcgtatac

SEQ ID NO: 24088 - DNA, 21 bp, synthetic construct
  source 1..21: mol_type = other DNA
gatctcggtagcgccaagtgg

SEQ ID NO: 24089 - DNA, 21 bp, synthetic construct
  source 1..21: mol_type = other DNA
tactctagagtcggtgtcgac

SEQ ID NO: 24090 - DNA, 21 bp, synthetic construct
  source 1..21: mol_type = other DNA
tatttcagtggcaggctcgaa

SEQ ID NO: 24091 - DNA, 21 bp, synthetic construct
  source 1..21: mol_type = other DNA
ggagaggaccatgttagatgg

SEQ ID NO: 24092 - DNA, 21 bp, synthetic construct
  source 1..21: mol_type = other DNA
gtgatggaagcgcgtagctgg

SEQ ID NO: 24093 - DNA, 21 bp, synthetic construct
  source 1..21: mol_type = other DNA
ggctcggattacgttgcatgg

SEQ ID NO: 24094 - DNA, 21 bp, synthetic construct
  source 1..21: mol_type = other DNA
tacttcagcggcatccaggat

SEQ ID NO: 24095 - DNA, 21 bp, synthetic construct
  source 1..21: mol_type = other DNA
aaagatggctattcaacttat

SEQ ID NO: 24096 - DNA, 21 bp, synthetic construct
  source 1..21: mol_type = other DNA
aaagatgattacacgggtttc

SEQ ID NO: 24097 - DNA, 21 bp, synthetic construct
  source 1..21: mol_type = other DNA
gtgatggcggatcgcctatgg

SEQ ID NO: 24098 - DNA, 21 bp, synthetic construct
  source 1..21: mol_type = other DNA
ctaagtaggatatcgcatgat

SEQ ID NO: 24099 - DNA, 21 bp, synthetic construct
  source 1..21: mol_type = other DNA
agagaagaggtcgtgcggtgg

SEQ ID NO: 24100 - DNA, 21 bp, synthetic construct
  source 1..21: mol_type = other DNA
ttacacaggttacaaagccac

SEQ ID NO: 24101 - DNA, 21 bp, synthetic construct
  source 1..21: mol_type = other DNA
tacttcactggcgtccaagcc

SEQ ID NO: 24102 - DNA, 21 bp, synthetic construct
  source 1..21: mol_type = other DNA
ccgatggagtctgtgaaatgg

SEQ ID NO: 24103 - DNA, 21 bp, synthetic construct
  source 1..21: mol_type = other DNA
cgaatgcaggatgcttacccg

SEQ ID NO: 24104 - DNA, 21 bp, synthetic construct
  source 1..21: mol_type = other DNA
ctcgccaagacgggaatcaat

SEQ ID NO: 24105 - DNA, 21 bp, synthetic construct
  source 1..21: mol_type = other DNA
agaatggagagtcagtcgtgg

SEQ ID NO: 24106 - DNA, 21 bp, synthetic construct
  source 1..21: mol_type = other DNA
atgtttgacggaaccaacccg

SEQ ID NO: 24107 - DNA, 21 bp, synthetic construct
  source 1..21: mol_type = other DNA
cgcactgatgtcgtataccct

SEQ ID NO: 24108 - DNA, 21 bp, synthetic construct
  source 1..21: mol_type = other DNA
gacggcagtagtagactttgg

SEQ ID NO: 24109 - DNA, 21 bp, synthetic construct
  source 1..21: mol_type = other DNA
tacctaaaatctcaagtatat

SEQ ID NO: 24110 - DNA, 21 bp, synthetic construct
  source 1..21: mol_type = other DNA
cagggagaagcgcgtacttgg

SEQ ID NO: 24111 - DNA, 21 bp, synthetic construct
  source 1..21: mol_type = other DNA
tacgcgaagagcggcgacaat

SEQ ID NO: 24112 - DNA, 21 bp, synthetic construct
  source 1..21: mol_type = other DNA
gggtcggaattcgtttcctac

SEQ ID NO: 24113 - DNA, 21 bp, synthetic construct
  source 1..21: mol_type = other DNA
aaagacgagtttaaaagctac

SEQ ID NO: 24114 - DNA, 21 bp, synthetic construct
  source 1..21: mol_type = other DNA
tactgggctggggtgaaggaa

SEQ ID NO: 24115 - DNA, 21 bp, synthetic construct
  source 1..21: mol_type = other DNA
gtaggattaaaggggtgggat

SEQ ID NO: 24116 - DNA, 21 bp, synthetic construct
  source 1..21: mol_type = other DNA
gtgcatagtactaacggcagg

SEQ ID NO: 24117 - DNA, 21 bp, synthetic construct
  source 1..21: mol_type = other DNA
acggatggcacaagccgctgg

SEQ ID NO: 24118 - DNA, 21 bp, synthetic construct
  source 1..21: mol_type = other DNA
gggtgtgggacaaagcacggt

SEQ ID NO: 24119 - DNA, 21 bp, synthetic construct
  source 1..21: mol_type = other DNA
tatttcacgggtgtaatcgac

SEQ ID NO: 24120 - DNA, 21 bp, synthetic construct
  source 1..21: mol_type = other DNA
aagagtgattttgtgagctac

SEQ ID NO: 24121 - DNA, 21 bp, synthetic construct
  source 1..21: mol_type = other DNA
aggtcagattttgttgtttat

SEQ ID NO: 24122 - DNA, 21 bp, synthetic construct
  source 1..21: mol_type = other DNA
ggctgtcggtacggcgacatc

SEQ ID NO: 24123 - DNA, 21 bp, synthetic construct
  source 1..21: mol_type = other DNA
acaaatagcaccaatggcatc

SEQ ID NO: 24124 - DNA, 21 bp, synthetic construct
  source 1..21: mol_type = other DNA
ctgtcacgtgtcggcgcagac

SEQ ID NO: 24125 - DNA, 21 bp, synthetic construct
  source 1..21: mol_type = other DNA
ttaagtaaggccggatttaat

SEQ ID NO: 24126 - DNA, 21 bp, synthetic construct
  source 1..21: mol_type = other DNA
tacgcacgtacggctccagac

SEQ ID NO: 24127 - DNA, 21 bp, synthetic construct
  source 1..21: mol_type = other DNA
agatcagagttcgtaagctac

SEQ ID NO: 24128 - DNA, 21 bp, synthetic construct
  source 1..21: mol_type = other DNA
gttaacgattacataagttac

SEQ ID NO: 24129 - DNA, 21 bp, synthetic construct
  source 1..21: mol_type = other DNA
accgatttgaccgtgtaccgt

SEQ ID NO: 24130 - DNA, 21 bp, synthetic construct
  source 1..21: mol_type = other DNA
gtcatgagcagcagagattgg

SEQ ID NO: 24131 - DNA, 21 bp, synthetic construct
  source 1..21: mol_type = other DNA
tcaacctcaaccaatggcgtg

SEQ ID NO: 24132 - DNA, 21 bp, synthetic construct
  source 1..21: mol_type = other DNA
tacgctaaagccggttacaac

SEQ ID NO: 24133 - DNA, 21 bp, synthetic construct
  source 1..21: mol_type = other DNA
tactccaaagccaacaataat

SEQ ID NO: 24134 - DNA, 21 bp, synthetic construct
  source 1..21: mol_type = other DNA
ccaatggaatccagtcaatgg

SEQ ID NO: 24135 - DNA, 21 bp, synthetic construct
  source 1..21: mol_type = other DNA
tacagccgtttgggaccgaac

SEQ ID NO: 24136 - DNA, 21 bp, synthetic construct
  source 1..21: mol_type = other DNA
cgcgagagcgtctcaacctgg

SEQ ID NO: 24137 - DNA, 21 bp, synthetic construct
  source 1..21: mol_type = other DNA
tacagtcgagttggccctgac

SEQ ID NO: 24138 - DNA, 21 bp, synthetic construct
  source 1..21: mol_type = other DNA
gatatggagagcaggacttgg

SEQ ID NO: 24139 - DNA, 21 bp, synthetic construct
  source 1..21: mol_type = other DNA
agggaagactacacgacctgg

SEQ ID NO: 24140 - DNA, 21 bp, synthetic construct
  source 1..21: mol_type = other DNA
ctacatcgtttgaaccctctg

SEQ ID NO: 24141 - DNA, 21 bp, synthetic construct
  source 1..21: mol_type = other DNA
aggacgatcgactcatatgca

SEQ ID NO: 24142 - DNA, 21 bp, synthetic construct
  source 1..21: mol_type = other DNA
gtactgacctctgctaagtgg

SEQ ID NO: 24143 - DNA, 21 bp, synthetic construct
  source 1..21: mol_type = other DNA
aaaagtgattacgtgacgtac

SEQ ID NO: 24144 - DNA, 21 bp, synthetic construct
  source 1..21: mol_type = other DNA
tactttgcaggtaagatctcc

SEQ ID NO: 24145 - DNA, 21 bp, synthetic construct
  source 1..21: mol_type = other DNA
tactgggctggcgtcaaagac

SEQ ID NO: 24146 - DNA, 21 bp, synthetic construct
  source 1..21: mol_type = other DNA
tactggacaggagtcaccgaa

SEQ ID NO: 24147 - DNA, 21 bp, synthetic construct
  source 1..21: mol_type = other DNA
ctacacagactatcggaccac

SEQ ID NO: 24148 - DNA, 21 bp, synthetic construct
  source 1..21: mol_type = other DNA
tatttcacaggaattattgac

SEQ ID NO: 24149 - DNA, 21 bp, synthetic construct
  source 1..21: mol_type = other DNA
tacgtaaggagcgacgtaaag

SEQ ID NO: 24150 - DNA, 21 bp, synthetic construct
  source 1..21: mol_type = other DNA
tactcaaaaatgaatatgaat

SEQ ID NO: 24151 - DNA, 21 bp, synthetic construct
  source 1..21: mol_type = other DNA
tactttaccggatatctcgac

SEQ ID NO: 24152 - DNA, 21 bp, synthetic construct
  source 1..21: mol_type = other DNA
tgtggccctgggtgttgtcct

SEQ ID NO: 24153 - DNA, 21 bp, synthetic construct
  source 1..21: mol_type = other DNA
tatttctcaggcactatagat

SEQ ID NO: 24154 - DNA, 21 bp, synthetic construct
  source 1..21: mol_type = other DNA
cttcaccgattatctgtagat

SEQ ID NO: 24155 - DNA, 21 bp, synthetic construct
  source 1..21: mol_type = other DNA
gttttaacgagcgcaaaatgg

SEQ ID NO: 24156 - DNA, 21 bp, synthetic construct
  source 1..21: mol_type = other DNA
tactggtcgggcatccaagag

SEQ ID NO: 24157 - DNA, 21 bp, synthetic construct
  source 1..21: mol_type = other DNA
tactcaaagagcggctgtaat

SEQ ID NO: 24158 - DNA, 21 bp, synthetic construct
  source 1..21: mol_type = other DNA
ataagttcaacgaacgggatc

SEQ ID NO: 24159 - DNA, 21 bp, synthetic construct
  source 1..21: mol_type = other DNA
tattcgaaaatgaataataat

SEQ ID NO: 24160 - DNA, 21 bp, synthetic construct
  source 1..21: mol_type = other DNA
cgcgatgactttaccatgtac

SEQ ID NO: 24161 - DNA, 21 bp, synthetic construct
  source 1..21: mol_type = other DNA
aaggatgactatagtatctat

SEQ ID NO: 24162 - DNA, 21 bp, synthetic construct
  source 1..21: mol_type = other DNA
tactttactggggtcattcag

SEQ ID NO: 24163 - DNA, 21 bp, synthetic construct
  source 1..21: mol_type = other DNA
gtgtggaaacccgaacccgga

SEQ ID NO: 24164 - DNA, 21 bp, synthetic construct
  source 1..21: mol_type = other DNA
agaagggaagacgtgtaccca

SEQ ID NO: 24165 - DNA, 21 bp, synthetic construct
  source 1..21: mol_type = other DNA
tacttcacgggcaaacgagag

SEQ ID NO: 24166 - DNA, 21 bp, synthetic construct
  source 1..21: mol_type = other DNA
agatcagagttcaccacgtat

SEQ ID NO: 24167 - DNA, 21 bp, synthetic construct
  source 1..21: mol_type = other DNA
cgaagtgagtttaaagtcttt

SEQ ID NO: 24168 - DNA, 21 bp, synthetic construct
  source 1..21: mol_type = other DNA
gatcttcaatctaggagttgg

SEQ ID NO: 24169 - DNA, 21 bp, synthetic construct
  source 1..21: mol_type = other DNA
cgtgacgatcatgtctaccct

SEQ ID NO: 24170 - DNA, 21 bp, synthetic construct
  source 1..21: mol_type = other DNA
gggggagaacactcgacctgg

SEQ ID NO: 24171 - DNA, 21 bp, synthetic construct
  source 1..21: mol_type = other DNA
tatttctcaggcataccttcg

SEQ ID NO: 24172 - DNA, 21 bp, synthetic construct
  source 1..21: mol_type = other DNA
ataatggctgacagggtttgg

SEQ ID NO: 24173 - DNA, 21 bp, synthetic construct
  source 1..21: mol_type = other DNA
ataagtagcacaaatggtgtc

SEQ ID NO: 24174 - DNA, 21 bp, synthetic construct
  source 1..21: mol_type = other DNA
gacatgatgagccacaagtgg

SEQ ID NO: 24175 - DNA, 21 bp, synthetic construct
  source 1..21: mol_type = other DNA
tatgctaaaacaggggaaaac

SEQ ID NO: 24176 - DNA, 21 bp, synthetic construct
  source 1..21: mol_type = other DNA
tactctaaggccggacaaaac

SEQ ID NO: 24177 - DNA, 21 bp, synthetic construct
  source 1..21: mol_type = other DNA
tactccaaaattggatacaat

SEQ ID NO: 24178 - DNA, 21 bp, synthetic construct
  source 1..21: mol_type = other DNA
cacaactcaacgaatggtgta

SEQ ID NO: 24179 - DNA, 21 bp, synthetic construct
  source 1..21: mol_type = other DNA
taccatgcgctgaatatcgat

SEQ ID NO: 24180 - DNA, 21 bp, synthetic construct
  source 1..21: mol_type = other DNA
ctatcaaaacttggtttcaac

SEQ ID NO: 24181 - DNA, 21 bp, synthetic construct
  source 1..21: mol_type = other DNA
tacttctcaggggttaaggcc

SEQ ID NO: 24182 - DNA, 21 bp, synthetic construct
  source 1..21: mol_type = other DNA
accgcgtcaacgaacggcatt

SEQ ID NO: 24183 - DNA, 21 bp, synthetic construct
  source 1..21: mol_type = other DNA
cagatggaaagccgtatgtgg

SEQ ID NO: 24184 - DNA, 21 bp, synthetic construct
  source 1..21: mol_type = other DNA
tattctaaaatgaacttcaat

SEQ ID NO: 24185 - DNA, 21 bp, synthetic construct
  source 1..21: mol_type = other DNA
tactgggcggggataaaggac

SEQ ID NO: 24186 - DNA, 21 bp, synthetic construct
  source 1..21: mol_type = other DNA
cgtgacatggatgtatatcca

SEQ ID NO: 24187 - DNA, 21 bp, synthetic construct
  source 1..21: mol_type = other DNA
ctacacaggctcagtagcgat

SEQ ID NO: 24188 - DNA, 21 bp, synthetic construct
  source 1..21: mol_type = other DNA
tatgtcaaatcgcaacagtgt

SEQ ID NO: 24189 - DNA, 21 bp, synthetic construct
  source 1..21: mol_type = other DNA
ttgtgccgcccttgctcccag

SEQ ID NO: 24190 - DNA, 21 bp, synthetic construct
  source 1..21: mol_type = other DNA
cgttcagaattcgaaacattt

SEQ ID NO: 24191 - DNA, 21 bp, synthetic construct
  source 1..21: mol_type = other DNA
gaacatgcgactagcaattgg

SEQ ID NO: 24192 - DNA, 21 bp, synthetic construct
  source 1..21: mol_type = other DNA
tactttaccggacactgggag

SEQ ID NO: 24193 - DNA, 21 bp, synthetic construct
  source 1..21: mol_type = other DNA
tacttttcgggtattcctgcc

SEQ ID NO: 24194 - DNA, 21 bp, synthetic construct
  source 1..21: mol_type = other DNA
acattgagcacaaatgggagg

SEQ ID NO: 24195 - DNA, 21 bp, synthetic construct
  source 1..21: mol_type = other DNA
tacttcagtgggattcccgaa

SEQ ID NO: 24196 - DNA, 21 bp, synthetic construct
  source 1..21: mol_type = other DNA
cgtgacgggatgtctgcgtgg

SEQ ID NO: 24197 - DNA, 21 bp, synthetic construct
  source 1..21: mol_type = other DNA
attgcagaccacgttagatgg

SEQ ID NO: 24198 - DNA, 21 bp, synthetic construct
  source 1..21: mol_type = other DNA
tacgtgcggagcgatctcatg

SEQ ID NO: 24199 - DNA, 21 bp, synthetic construct
  source 1..21: mol_type = other DNA
cgcgacgatcatgtttaccct

SEQ ID NO: 24200 - DNA, 21 bp, synthetic construct
  source 1..21: mol_type = other DNA
caacccgaaagccgctcgtgg

SEQ ID NO: 24201 - DNA, 21 bp, synthetic construct
  source 1..21: mol_type = other DNA
cgtgaagagtatgtaacatat

SEQ ID NO: 24202 - DNA, 21 bp, synthetic construct
  source 1..21: mol_type = other DNA
gtggatgagtacttgtcgtgg

SEQ ID NO: 24203 - DNA, 21 bp, synthetic construct
  source 1..21: mol_type = other DNA
tatttcacgggcatgatagaa

SEQ ID NO: 24204 - DNA, 21 bp, synthetic construct
  source 1..21: mol_type = other DNA
gatctaaccagcagagaatgg

SEQ ID NO: 24205 - DNA, 21 bp, synthetic construct
  source 1..21: mol_type = other DNA
aggagcgaatttacgacatac

SEQ ID NO: 24206 - DNA, 21 bp, synthetic construct
  source 1..21: mol_type = other DNA
ttacatcgattatcctctgac

SEQ ID NO: 24207 - DNA, 21 bp, synthetic construct
  source 1..21: mol_type = other DNA
tacttcagtggggtgaaaatg

SEQ ID NO: 24208 - DNA, 21 bp, synthetic construct
  source 1..21: mol_type = other DNA
gacctggagtcgagttattgg

SEQ ID NO: 24209 - DNA, 21 bp, synthetic construct
  source 1..21: mol_type = other DNA
aaagatgacttctcaccgtgg

SEQ ID NO: 24210 - DNA, 21 bp, synthetic construct
  source 1..21: mol_type = other DNA
tattttacaggcaagcctaat

SEQ ID NO: 24211 - DNA, 21 bp, synthetic construct
  source 1..21: mol_type = other DNA
tatgcaaagttcggcccgaat

SEQ ID NO: 24212 - DNA, 21 bp, synthetic construct
  source 1..21: mol_type = other DNA
atacagtcaactaacggacgc

SEQ ID NO: 24213 - DNA, 21 bp, synthetic construct
  source 1..21: mol_type = other DNA
tatgcccgcggtggtcccaat

SEQ ID NO: 24214 - DNA, 21 bp, synthetic construct
  source 1..21: mol_type = other DNA
gatccaagctcgcactcttgg

SEQ ID NO: 24215 - DNA, 21 bp, synthetic construct
  source 1..21: mol_type = other DNA
tacagtaagagtggtatgaat

SEQ ID NO: 24216 - DNA, 21 bp, synthetic construct
  source 1..21: mol_type = other DNA
agaggcgatgatcattatcca

SEQ ID NO: 24217 - DNA, 21 bp, synthetic construct
  source 1..21: mol_type = other DNA
ataatgaccgatagaatatgg

SEQ ID NO: 24218 - DNA, 21 bp, synthetic construct
  source 1..21: mol_type = other DNA
tattttagtggcatacatgct

SEQ ID NO: 24219 - DNA, 21 bp, synthetic construct
  source 1..21: mol_type = other DNA
cgcgaagaaacggtctattgg

SEQ ID NO: 24220 - DNA, 21 bp, synthetic construct
  source 1..21: mol_type = other DNA
gatatgtcttccaggatttgg

SEQ ID NO: 24221 - DNA, 21 bp, synthetic construct
  source 1..21: mol_type = other DNA
tatagccgcactggtccgaac

SEQ ID NO: 24222 - DNA, 21 bp, synthetic construct
  source 1..21: mol_type = other DNA
ttgcatcgactgagcgttgac

SEQ ID NO: 24223 - DNA, 21 bp, synthetic construct
  source 1..21: mol_type = other DNA
aggggggacgatcactaccca

SEQ ID NO: 24224 - DNA, 21 bp, synthetic construct
  source 1..21: mol_type = other DNA
tacctgaaaagtcaggccatg

SEQ ID NO: 24225 - DNA, 21 bp, synthetic construct
  source 1..21: mol_type = other DNA
gatgatggagtgtcacgctgg

SEQ ID NO: 24226 - DNA, 21 bp, synthetic construct
  source 1..21: mol_type = other DNA
tattctaaaaccggcacaaac

SEQ ID NO: 24227 - DNA, 21 bp, synthetic construct
  source 1..21: mol_type = other DNA
tactccagattgaaccccgac

SEQ ID NO: 24228 - DNA, 21 bp, synthetic construct
  source 1..21: mol_type = other DNA
cgggaggaaaccgtttttccg

SEQ ID NO: 24229 - DNA, 21 bp, synthetic construct
  source 1..21: mol_type = other DNA
acagctagtacaaatggtatc

SEQ ID NO: 24230 - DNA, 21 bp, synthetic construct
  source 1..21: mol_type = other DNA
gttgattccaccaacgggcgt

SEQ ID NO: 24231 - DNA, 21 bp, synthetic construct
  source 1..21: mol_type = other DNA
tacacaaggctggattacaac

SEQ ID NO: 24232 - DNA, 21 bp, synthetic construct
  source 1..21: mol_type = other DNA
tactttagtggagttaaaatg

SEQ ID NO: 24233 - DNA, 21 bp, synthetic construct
  source 1..21: mol_type = other DNA
aaggacgaatggagtgtttac

SEQ ID NO: 24234 - DNA, 21 bp, synthetic construct
  source 1..21: mol_type = other DNA
cgaagtgaatttgaaaccttc

SEQ ID NO: 24235 - DNA, 21 bp, synthetic construct
  source 1..21: mol_type = other DNA
tacttcacgggagtacagctc

SEQ ID NO: 24236 - DNA, 21 bp, synthetic construct
  source 1..21: mol_type = other DNA
tactccaagagcgggcataac

SEQ ID NO: 24237 - DNA, 21 bp, synthetic construct
  source 1..21: mol_type = other DNA
agggaagactacgtcaagtgg

SEQ ID NO: 24238 - DNA, 21 bp, synthetic construct
  source 1..21: mol_type = other DNA
gtgatggctgacagaaaatgg

SEQ ID NO: 24239 - DNA, 21 bp, synthetic construct
  source 1..21: mol_type = other DNA
tatagcaagatgaatccgaat

SEQ ID NO: 24240 - DNA, 21 bp, synthetic construct
  source 1..21: mol_type = other DNA
tacagccgattaaatgaagac

SEQ ID NO: 24241 - DNA, 21 bp, synthetic construct
  source 1..21: mol_type = other DNA
tggagcacgcactgttgtgcg

SEQ ID NO: 24242 - DNA, 21 bp, synthetic construct
  source 1..21: mol_type = other DNA
ctctgtaaaccttgtctggtg

SEQ ID NO: 24243 - DNA, 21 bp, synthetic construct
  source 1..21: mol_type = other DNA
gtcatggagtctcgtaagtgg

SEQ ID NO: 24244 - DNA, 21 bp, synthetic construct
  source 1..21: mol_type = other DNA
gtaatggccgatcggatctgg

SEQ ID NO: 24245 - DNA, 21 bp, synthetic construct
  source 1..21: mol_type = other DNA
agattggcggatgcgtatccg

SEQ ID NO: 24246 - DNA, 21 bp, synthetic construct
  source 1..21: mol_type = other DNA
taccatcgtttgctacctgac

SEQ ID NO: 24247 - DNA, 21 bp, synthetic construct
  source 1..21: mol_type = other DNA
cgcgacgagacttccagttgg

SEQ ID NO: 24248 - DNA, 21 bp, synthetic construct
  source 1..21: mol_type = other DNA
aaagatgattttagtgggtgg

SEQ ID NO: 24249 - DNA, 21 bp, synthetic construct
  source 1..21: mol_type = other DNA
tggtggagcggcatacacgag

SEQ ID NO: 24250 - DNA, 21 bp, synthetic construct
  source 1..21: mol_type = other DNA
ccgatggccagccaacagtgg

SEQ ID NO: 24251 - DNA, 21 bp, synthetic construct
  source 1..21: mol_type = other DNA
gttgagtcatctaacgggaga

SEQ ID NO: 24252 - DNA, 21 bp, synthetic construct
  source 1..21: mol_type = other DNA
tatttctctggccaaatcgag

SEQ ID NO: 24253 - DNA, 21 bp, synthetic construct
  source 1..21: mol_type = other DNA
tattttactggaaagcatgac

SEQ ID NO: 24254 - DNA, 21 bp, synthetic construct
  source 1..21: mol_type = other DNA
accgacgaattccatgcctat

SEQ ID NO: 24255 - DNA, 21 bp, synthetic construct
  source 1..21: mol_type = other DNA
tatcacgctaagagcctcaat

SEQ ID NO: 24256 - DNA, 21 bp, synthetic construct
  source 1..21: mol_type = other DNA
tatctgaaatctcaaacttcg

SEQ ID NO: 24257 - DNA, 21 bp, synthetic construct
  source 1..21: mol_type = other DNA
ttgtcgaaagtcggtcaaaac

SEQ ID NO: 24258 - DNA, 21 bp, synthetic construct
  source 1..21: mol_type = other DNA
ataatggctgacagaggctgg

SEQ ID NO: 24259 - DNA, 21 bp, synthetic construct
  source 1..21: mol_type = other DNA
tattctaaactgtccgataga

SEQ ID NO: 24260 - DNA, 21 bp, synthetic construct
  source 1..21: mol_type = other DNA
ctaagcaaaataggaatgaac

SEQ ID NO: 24261 - DNA, 21 bp, synthetic construct
  source 1..21: mol_type = other DNA
atgctatgtgtggcaggcgac

SEQ ID NO: 24262 - DNA, 21 bp, synthetic construct
  source 1..21: mol_type = other DNA
aaagacgattactctacgtgg

SEQ ID NO: 24263 - DNA, 21 bp, synthetic construct
  source 1..21: mol_type = other DNA
tatgtaaagagtcaagttagt

SEQ ID NO: 24264 - DNA, 21 bp, synthetic construct
  source 1..21: mol_type = other DNA
tattttagcggagtaacggaa

SEQ ID NO: 24265 - DNA, 21 bp, synthetic construct
  source 1..21: mol_type = other DNA
gaaatggaaagtagtatctgg

SEQ ID NO: 24266 - DNA, 21 bp, synthetic construct
  source 1..21: mol_type = other DNA
ttgcatcggttgagcgaccat

SEQ ID NO: 24267 - DNA, 21 bp, synthetic construct
  source 1..21: mol_type = other DNA
cgctcggactttgaatacttt

SEQ ID NO: 24268 - DNA, 21 bp, synthetic construct
  source 1..21: mol_type = other DNA
atgcaccggctgttgagcgat

SEQ ID NO: 24269 - DNA, 21 bp, synthetic construct
  source 1..21: mol_type = other DNA
ggcgacgagtatcattcctat

SEQ ID NO: 24270 - DNA, 21 bp, synthetic construct
  source 1..21: mol_type = other DNA
atgcacagactcagtttcgac

SEQ ID NO: 24271 - DNA, 21 bp, synthetic construct
  source 1..21: mol_type = other DNA
atgcatcgtctctcggtcgac

SEQ ID NO: 24272 - DNA, 21 bp, synthetic construct
  source 1..21: mol_type = other DNA
tctcactcaacgaatgggagg

SEQ ID NO: 24273 - DNA, 21 bp, synthetic construct
  source 1..21: mol_type = other DNA
tatttctcgggcattcacgca

SEQ ID NO: 24274 - DNA, 21 bp, synthetic construct
  source 1..21: mol_type = other DNA
ctcgctaaacagggtcctaat

SEQ ID NO: 24275 - DNA, 21 bp, synthetic construct
  source 1..21: mol_type = other DNA
ctacacagaatgagtcctgat

SEQ ID NO: 24276 - DNA, 21 bp, synthetic construct
  source 1..21: mol_type = other DNA
ttctttactggccaagtggat

SEQ ID NO: 24277 - DNA, 21 bp, synthetic construct
  source 1..21: mol_type = other DNA
tatgtgaggtcagatatgcta

SEQ ID NO: 24278 - DNA, 21 bp, synthetic construct
  source 1..21: mol_type = other DNA
gttcttgcatcagtgacctgg

SEQ ID NO: 24279 - DNA, 21 bp, synthetic construct
  source 1..21: mol_type = other DNA
tacagtaaagccggctgcaat

SEQ ID NO: 24280 - DNA, 21 bp, synthetic construct
  source 1..21: mol_type = other DNA
gaaatggagagcagagtttgg

SEQ ID NO: 24281 - DNA, 21 bp, synthetic construct
  source 1..21: mol_type = other DNA
tactcagcctcgggtcccaat

SEQ ID NO: 24282 - DNA, 21 bp, synthetic construct
  source 1..21: mol_type = other DNA
tactggtccggtgtccaagaa

SEQ ID NO: 24283 - DNA, 21 bp, synthetic construct
  source 1..21: mol_type = other DNA
atcacatcaacaaacggtgta

SEQ ID NO: 24284 - DNA, 21 bp, synthetic construct
  source 1..21: mol_type = other DNA
cttcaccgtcttagtccgggc

SEQ ID NO: 24285 - DNA, 21 bp, synthetic construct
  source 1..21: mol_type = other DNA
aaggacgactatacagggttt

SEQ ID NO: 24286 - DNA, 21 bp, synthetic construct
  source 1..21: mol_type = other DNA
tactttaccgggaaggcagac

SEQ ID NO: 24287 - DNA, 21 bp, synthetic construct
  source 1..21: mol_type = other DNA
cgttcagaatttttgagttat

SEQ ID NO: 24288 - DNA, 21 bp, synthetic construct
  source 1..21: mol_type = other DNA
tactttagcggtgtcaccgaa

SEQ ID NO: 24289 - DNA, 21 bp, synthetic construct
  source 1..21: mol_type = other DNA
gtgatgtctcaagctacttgg

SEQ ID NO: 24290 - DNA, 21 bp, synthetic construct
  source 1..21: mol_type = other DNA
tatctaaagagccaagcttat

SEQ ID NO: 24291 - DNA, 21 bp, synthetic construct
  source 1..21: mol_type = other DNA
gacatggaaagcagggtatgg

SEQ ID NO: 24292 - DNA, 21 bp, synthetic construct
  source 1..21: mol_type = other DNA
gacttgcgaatggcaacatgg

SEQ ID NO: 24293 - DNA, 21 bp, synthetic construct
  source 1..21: mol_type = other DNA
catgagtctacaaacggcgtt

SEQ ID NO: 24294 - DNA, 21 bp, synthetic construct
  source 1..21: mol_type = other DNA
ttttttactggacagatcgaa

SEQ ID NO: 24295 - DNA, 21 bp, synthetic construct
  source 1..21: mol_type = other DNA
caggatgggacctcggcctgg

SEQ ID NO: 24296 - DNA, 21 bp, synthetic construct
  source 1..21: mol_type = other DNA
actgatgaattcagtacctgg

SEQ ID NO: 24297 - DNA, 21 bp, synthetic construct
  source 1..21: mol_type = other DNA
tattggtcgggagtgctcgac

SEQ ID NO: 24298 - DNA, 21 bp, synthetic construct
  source 1..21: mol_type = other DNA
cttagtcggttaggtgaaaac

SEQ ID NO: 24299 - DNA, 21 bp, synthetic construct
  source 1..21: mol_type = other DNA
tattggtcaggtgtgaaggag

SEQ ID NO: 24300 - DNA, 21 bp, synthetic construct
  source 1..21: mol_type = other DNA
tacttcactggtaaacacgaa

SEQ ID NO: 24301 - DNA, 21 bp, synthetic construct
  source 1..21: mol_type = other DNA
tatcataggctacagatcgac

SEQ ID NO: 24302 - DNA, 21 bp, synthetic construct
  source 1..21: mol_type = other DNA
agagatatggaggtgtaccca

SEQ ID NO: 24303 - DNA, 21 bp, synthetic construct
  source 1..21: mol_type = other DNA
tactttactggacagttggat

SEQ ID NO: 24304 - DNA, 21 bp, synthetic construct
  source 1..21: mol_type = other DNA
tactggtccggcatccttgag

SEQ ID NO: 24305 - DNA, 21 bp, synthetic construct
  source 1..21: mol_type = other DNA
aagtcggactatgtcacatat

SEQ ID NO: 24306 - DNA, 21 bp, synthetic construct
  source 1..21: mol_type = other DNA
tattggtccgggatccccatg

SEQ ID NO: 24307 - DNA, 21 bp, synthetic construct
  source 1..21: mol_type = other DNA
tatgtgcgaagtggtccgagt

SEQ ID NO: 24308 - DNA, 21 bp, synthetic construct
  source 1..21: mol_type = other DNA
gacttaggttcatcaacgtgg

SEQ ID NO: 24309 - DNA, 21 bp, synthetic construct
  source 1..21: mol_type = other DNA
gtcatggggtctagtaactgg

SEQ ID NO: 24310 - DNA, 21 bp, synthetic construct
  source 1..21: mol_type = other DNA
gtatggtctacgaacgggatt

SEQ ID NO: 24311 - DNA, 21 bp, synthetic construct
  source 1..21: mol_type = other DNA
tacgcaaaaacgggatcgaat

SEQ ID NO: 24312 - DNA, 21 bp, synthetic construct
  source 1..21: mol_type = other DNA
aattacgcaaaaagcttggag

SEQ ID NO: 24313 - DNA, 21 bp, synthetic construct
  source 1..21: mol_type = other DNA
tcacactcaacgaacggggtt

SEQ ID NO: 24314 - DNA, 21 bp, synthetic construct
  source 1..21: mol_type = other DNA
tatttcaccggaagttgggat

SEQ ID NO: 24315 - DNA, 21 bp, synthetic construct
  source 1..21: mol_type = other DNA
tactggagtggcgtgacggaa

SEQ ID NO: 24316 - DNA, 21 bp, synthetic construct
  source 1..21: mol_type = other DNA
agtctcgagtccaggaaatgg

SEQ ID NO: 24317 - DNA, 21 bp, synthetic construct
  source 1..21: mol_type = other DNA
tatcacaggcttttgccggat

SEQ ID NO: 24318 - DNA, 21 bp, synthetic construct
  source 1..21: mol_type = other DNA
tatagcaaggcgaattacaat

SEQ ID NO: 24319 - DNA, 21 bp, synthetic construct
  source 1..21: mol_type = other DNA
aaagacgaatttaggagctat

SEQ ID NO: 24320 - DNA, 21 bp, synthetic construct
  source 1..21: mol_type = other DNA
gacatggcttcgacgaattgg

SEQ ID NO: 24321 - DNA, 21 bp, synthetic construct
  source 1..21: mol_type = other DNA
gtaatgaccgcacgagattgg

SEQ ID NO: 24322 - DNA, 21 bp, synthetic construct
  source 1..21: mol_type = other DNA
acgacttccactaacgggatt

SEQ ID NO: 24323 - DNA, 21 bp, synthetic construct
  source 1..21: mol_type = other DNA
aaggacgattatagtacgtac

SEQ ID NO: 24324 - DNA, 21 bp, synthetic construct
  source 1..21: mol_type = other DNA
tacagcaggttgcagcctgac

SEQ ID NO: 24325 - DNA, 21 bp, synthetic construct
  source 1..21: mol_type = other DNA
gctgggggtggcttatttata

SEQ ID NO: 24326 - DNA, 21 bp, synthetic construct
  source 1..21: mol_type = other DNA
tatttgaaaagccaaatctac

SEQ ID NO: 24327 - DNA, 21 bp, synthetic construct
  source 1..21: mol_type = other DNA
aatatgagctccagctcgtgg

SEQ ID NO: 24328 - DNA, 21 bp, synthetic construct
  source 1..21: mol_type = other DNA
cgtatggagtctagcgtatgg

SEQ ID NO: 24329 - DNA, 21 bp, synthetic construct
  source 1..21: mol_type = other DNA
atagatggaaggggatgggat

SEQ ID NO: 24330 - DNA, 21 bp, synthetic construct
  source 1..21: mol_type = other DNA
agaatggagagtagccagtgg

SEQ ID NO: 24331 - DNA, 21 bp, synthetic construct
  source 1..21: mol_type = other DNA
ggcagtccgggagtaggctgg

SEQ ID NO: 24332 - DNA, 21 bp, synthetic construct
  source 1..21: mol_type = other DNA
agggaagacttcgtcaggtgg

SEQ ID NO: 24333 - DNA, 21 bp, synthetic construct
  source 1..21: mol_type = other DNA
attcaatctactaatggtata

SEQ ID NO: 24334 - DNA, 21 bp, synthetic construct
  source 1..21: mol_type = other DNA
gggtcccccggagtccattgg

SEQ ID NO: 24335 - DNA, 21 bp, synthetic construct
  source 1..21: mol_type = other DNA
aggatgggcgacgcctatcca

SEQ ID NO: 24336 - DNA, 21 bp, synthetic construct
  source 1..21: mol_type = other DNA
tatacgcgcctgagccccgac

SEQ ID NO: 24337 - DNA, 21 bp, synthetic construct
  source 1..21: mol_type = other DNA
gacatggaaagtcacaagtgg

SEQ ID NO: 24338 - DNA, 21 bp, synthetic construct
  source 1..21: mol_type = other DNA
tacgtacgctcggacctgggt

SEQ ID NO: 24339 - DNA, 21 bp, synthetic construct
  source 1..21: mol_type = other DNA
tactttagcaagattagggag

SEQ ID NO: 24340 - DNA, 21 bp, synthetic construct
  source 1..21: mol_type = other DNA
attttgtccgacaggagttgg

SEQ ID NO: 24341 - DNA, 21 bp, synthetic construct
  source 1..21: mol_type = other DNA
aaagatgattatcacagttat

SEQ ID NO: 24342 - DNA, 21 bp, synthetic construct
  source 1..21: mol_type = other DNA
tacgtgaggtctgacgttaaa

SEQ ID NO: 24343 - DNA, 21 bp, synthetic construct
  source 1..21: mol_type = other DNA
tatctgaaatcgcagagccat

SEQ ID NO: 24344 - DNA, 21 bp, synthetic construct
  source 1..21: mol_type = other DNA
atcatgtcgtctaggtcctgg

SEQ ID NO: 24345 - DNA, 21 bp, synthetic construct
  source 1..21: mol_type = other DNA
aatagtactcactgttgtgca

SEQ ID NO: 24346 - DNA, 21 bp, synthetic construct
  source 1..21: mol_type = other DNA
ttgtgtcggccatgttccgat

SEQ ID NO: 24347 - DNA, 21 bp, synthetic construct
  source 1..21: mol_type = other DNA
tattttacgggagttagagac

SEQ ID NO: 24348 - DNA, 21 bp, synthetic construct
  source 1..21: mol_type = other DNA
actcgcagtacgaacggggtc

SEQ ID NO: 24349 - DNA, 21 bp, synthetic construct
  source 1..21: mol_type = other DNA
tacctgaaaagtgaacgtaac

SEQ ID NO: 24350 - DNA, 21 bp, synthetic construct
  source 1..21: mol_type = other DNA
ttttcaagaattggaccaaac

SEQ ID NO: 24351 - DNA, 21 bp, synthetic construct
  source 1..21: mol_type = other DNA
tattctaaactctcaacgaac

SEQ ID NO: 24352 - DNA, 21 bp, synthetic construct
  source 1..21: mol_type = other DNA
aaggacgactttgtaagctac

SEQ ID NO: 24353 - DNA, 21 bp, synthetic construct
  source 1..21: mol_type = other DNA
cacagtcgggttggccacaac

SEQ ID NO: 24354 - DNA, 21 bp, synthetic construct
  source 1..21: mol_type = other DNA
cattgtaaaccgtgcttaacg

SEQ ID NO: 24355 - DNA, 21 bp, synthetic construct
  source 1..21: mol_type = other DNA
gtcgaaagttctcgactctgg

SEQ ID NO: 24356 - DNA, 21 bp, synthetic construct
  source 1..21: mol_type = other DNA
tattggagtggcatacaggac

SEQ ID NO: 24357 - DNA, 21 bp, synthetic construct
  source 1..21: mol_type = other DNA
ctctcgaggcagggtccgaac

SEQ ID NO: 24358 - DNA, 21 bp, synthetic construct
  source 1..21: mol_type = other DNA
ttggcaagagccggatacaat

SEQ ID NO: 24359 - DNA, 21 bp, synthetic construct
  source 1..21: mol_type = other DNA
tattttactggcgtgcatcag

SEQ ID NO: 24360 - DNA, 21 bp, synthetic construct
  source 1..21: mol_type = other DNA
tactttacagggagaatggac

SEQ ID NO: 24361 - DNA, 21 bp, synthetic construct
  source 1..21: mol_type = other DNA
gatatgggcagtagctcgtgg

SEQ ID NO: 24362 - DNA, 21 bp, synthetic construct
  source 1..21: mol_type = other DNA
gccccagactcggtccgttgg

SEQ ID NO: 24363 - DNA, 21 bp, synthetic construct
  source 1..21: mol_type = other DNA
catagtaggataggcccgaat

SEQ ID NO: 24364 - DNA, 21 bp, synthetic construct
  source 1..21: mol_type = other DNA
tacgtcaggtcaggaccatcc

SEQ ID NO: 24365 - DNA, 21 bp, synthetic construct
  source 1..21: mol_type = other DNA
tatagcaggttggccccggac

SEQ ID NO: 24366 - DNA, 21 bp, synthetic construct
  source 1..21: mol_type = other DNA
cgtgagccccatgtctcatgg

SEQ ID NO: 24367 - DNA, 21 bp, synthetic construct
  source 1..21: mol_type = other DNA
agagatgagttcacagtctat

SEQ ID NO: 24368 - DNA, 21 bp, synthetic construct
  source 1..21: mol_type = other DNA
agggaggaagaggtatatccc

SEQ ID NO: 24369 - DNA, 21 bp, synthetic construct
  source 1..21: mol_type = other DNA
ttactaagtgaccgaacctgg

SEQ ID NO: 24370 - DNA, 21 bp, synthetic construct
  source 1..21: mol_type = other DNA
tactttacgggtgtagctgat

SEQ ID NO: 24371 - DNA, 21 bp, synthetic construct
  source 1..21: mol_type = other DNA
tatctgaaatcgcagatgtat

SEQ ID NO: 24372 - DNA, 21 bp, synthetic construct
  source 1..21: mol_type = other DNA
atgcaccgtctttctgctgat

SEQ ID NO: 24373 - DNA, 21 bp, synthetic construct
  source 1..21: mol_type = other DNA
tatttctctggaatacaatcg

SEQ ID NO: 24374 - DNA, 21 bp, synthetic construct
  source 1..21: mol_type = other DNA
cgaacaagtaccgtctatccg

SEQ ID NO: 24375 - DNA, 21 bp, synthetic construct
  source 1..21: mol_type = other DNA
cccatgatgagcgggacttgg

SEQ ID NO: 24376 - DNA, 21 bp, synthetic construct
  source 1..21: mol_type = other DNA
agcgatggcgtatcacgctgg

SEQ ID NO: 24377 - DNA, 21 bp, synthetic construct
  source 1..21: mol_type = other DNA
ttatgtcgaccgtgcgtagag

SEQ ID NO: 24378 - DNA, 21 bp, synthetic construct
  source 1..21: mol_type = other DNA
ttgtcgaagatcggtataaac

SEQ ID NO: 24379 - DNA, 21 bp, synthetic construct
  source 1..21: mol_type = other DNA
actgactcaacaaatggtatt

SEQ ID NO: 24380 - DNA, 21 bp, synthetic construct
  source 1..21: mol_type = other DNA
tacttcaccggtcaccctgac

SEQ ID NO: 24381 - DNA, 21 bp, synthetic construct
  source 1..21: mol_type = other DNA
tactttacaggacagatccaa

SEQ ID NO: 24382 - DNA, 21 bp, synthetic construct
  source 1..21: mol_type = other DNA
tatttttcgggcgtcattgga

SEQ ID NO: 24383 - DNA, 21 bp, synthetic construct
  source 1..21: mol_type = other DNA
tatgcgaaagttggaccgaac

SEQ ID NO: 24384 - DNA, 21 bp, synthetic construct
  source 1..21: mol_type = other DNA
tactttaccgggatgattgag

SEQ ID NO: 24385 - DNA, 21 bp, synthetic construct
  source 1..21: mol_type = other DNA
tattttactgggatcccggaa

SEQ ID NO: 24386 - DNA, 21 bp, synthetic construct
  source 1..21: mol_type = other DNA
agactcgaaagctccgcttgg

SEQ ID NO: 24387 - DNA, 21 bp, synthetic construct
  source 1..21: mol_type = other DNA
cgtgaccccaccgttttcccg

SEQ ID NO: 24388 - DNA, 21 bp, synthetic construct
  source 1..21: mol_type = other DNA
caaatggcttcgagagattgg

SEQ ID NO: 24389 - DNA, 21 bp, synthetic construct
  source 1..21: mol_type = other DNA
tacagtaaggcaggcatcaat

SEQ ID NO: 24390 - DNA, 21 bp, synthetic construct
  source 1..21: mol_type = other DNA
tatagtaaacgcaatgaaaat

SEQ ID NO: 24391 - DNA, 21 bp, synthetic construct
  source 1..21: mol_type = other DNA
catgcctccactaatggggtg

SEQ ID NO: 24392 - DNA, 21 bp, synthetic construct
  source 1..21: mol_type = other DNA
tacgtccgcagcgacatgttg

SEQ ID NO: 24393 - DNA, 21 bp, synthetic construct
  source 1..21: mol_type = other DNA
tatttgaagtcgcaagcgatg

SEQ ID NO: 24394 - DNA, 21 bp, synthetic construct
  source 1..21: mol_type = other DNA
ctcgcaaagggtggattcaac

SEQ ID NO: 24395 - DNA, 21 bp, synthetic construct
  source 1..21: mol_type = other DNA
tatagcaagcagaacataaat

SEQ ID NO: 24396 - DNA, 21 bp, synthetic construct
  source 1..21: mol_type = other DNA
tacgttcgctcaggtccgcta

SEQ ID NO: 24397 - DNA, 21 bp, synthetic construct
  source 1..21: mol_type = other DNA
tattttaccggcttcatggat

SEQ ID NO: 24398 - DNA, 21 bp, synthetic construct
  source 1..21: mol_type = other DNA
gcgcacgaatttgggcctgtg

SEQ ID NO: 24399 - DNA, 21 bp, synthetic construct
  source 1..21: mol_type = other DNA
gaaccagagtcccgctcatgg

SEQ ID NO: 24400 - DNA, 21 bp, synthetic construct
  source 1..21: mol_type = other DNA
tacgtcaagtcccaagccagt

SEQ ID NO: 24401 - DNA, 21 bp, synthetic construct
  source 1..21: mol_type = other DNA
aaagacgaatttaaggtatat

SEQ ID NO: 24402 - DNA, 21 bp, synthetic construct
  source 1..21: mol_type = other DNA
tactccaagtcgggttttaac

SEQ ID NO: 24403 - DNA, 21 bp, synthetic construct
  source 1..21: mol_type = other DNA
cacgacggcactagcaagtgg

SEQ ID NO: 24404 - DNA, 21 bp, synthetic construct
  source 1..21: mol_type = other DNA
tattcgaaacatggaccaaat

SEQ ID NO: 24405 - DNA, 21 bp, synthetic construct
  source 1..21: mol_type = other DNA
tatttcagcggcgtgaagcaa

SEQ ID NO: 24406 - DNA, 21 bp, synthetic construct
  source 1..21: mol_type = other DNA
tacgtccgtagtgacgccaat

SEQ ID NO: 24407 - DNA, 21 bp, synthetic construct
  source 1..21: mol_type = other DNA
cgcgacgatttccacatctat

SEQ ID NO: 24408 - DNA, 21 bp, synthetic construct
  source 1..21: mol_type = other DNA
tattcgaagaccggtgtcaat

SEQ ID NO: 24409 - DNA, 21 bp, synthetic construct
  source 1..21: mol_type = other DNA
cggactgctcaggtatacccc

SEQ ID NO: 24410 - DNA, 21 bp, synthetic construct
  source 1..21: mol_type = other DNA
tcattggaatctcgttcatgg

SEQ ID NO: 24411 - DNA, 21 bp, synthetic construct
  source 1..21: mol_type = other DNA
tattgggctggaattaaagat

SEQ ID NO: 24412 - DNA, 21 bp, synthetic construct
  source 1..21: mol_type = other DNA
agtggggagagcaggttgtgg

SEQ ID NO: 24413 - DNA, 21 bp, synthetic construct
  source 1..21: mol_type = other DNA
ttaatgagagatgcctttccc

SEQ ID NO: 24414 - DNA, 21 bp, synthetic construct
  source 1..21: mol_type = other DNA
aaggacgactaccacacctac

SEQ ID NO: 24415 - DNA, 21 bp, synthetic construct
  source 1..21: mol_type = other DNA
ctctgccggccctgtgcagaa

SEQ ID NO: 24416 - DNA, 21 bp, synthetic construct
  source 1..21: mol_type = other DNA
atcatgagtagcagggagtgg

SEQ ID NO: 24417 - DNA, 21 bp, synthetic construct
  source 1..21: mol_type = other DNA
tatgttaagtcgcagacgtgg

SEQ ID NO: 24418 - DNA, 21 bp, synthetic construct
  source 1..21: mol_type = other DNA
tatttccacggtaaaattgag

SEQ ID NO: 24419 - DNA, 21 bp, synthetic construct
  source 1..21: mol_type = other DNA
gtagccgatcacgtccggtgg

SEQ ID NO: 24420 - DNA, 21 bp, synthetic construct
  source 1..21: mol_type = other DNA
ataaactcccgggagggtata

SEQ ID NO: 24421 - DNA, 21 bp, synthetic construct
  source 1..21: mol_type = other DNA
tatttcacgggtaaaacagat

SEQ ID NO: 24422 - DNA, 21 bp, synthetic construct
  source 1..21: mol_type = other DNA
tatatttgttcgaatgcgaaa

SEQ ID NO: 24423 - DNA, 21 bp, synthetic construct
  source 1..21: mol_type = other DNA
cgtacatttgacgccttccct

SEQ ID NO: 24424 - DNA, 21 bp, synthetic construct
  source 1..21: mol_type = other DNA
ataatggcagaccgtacttgg

SEQ ID NO: 24425 - DNA, 21 bp, synthetic construct
  source 1..21: mol_type = other DNA
tacgagtcgactaatgggaag

SEQ ID NO: 24426 - DNA, 21 bp, synthetic construct
  source 1..21: mol_type = other DNA
tacttcgctgggatcaaggaa

SEQ ID NO: 24427 - DNA, 21 bp, synthetic construct
  source 1..21: mol_type = other DNA
ataggcataaaaggttgggac

SEQ ID NO: 24428 - DNA, 21 bp, synthetic construct
  source 1..21: mol_type = other DNA
gttatgagcgaaaggacatgg

SEQ ID NO: 24429 - DNA, 21 bp, synthetic construct
  source 1..21: mol_type = other DNA
ttcagtcgcatcggtccgaat

SEQ ID NO: 24430 - DNA, 21 bp, synthetic construct
  source 1..21: mol_type = other DNA
tgcgcgcccgactatgaagag

SEQ ID NO: 24431 - DNA, 21 bp, synthetic construct
  source 1..21: mol_type = other DNA
cgtggggagcacacgtatccg

SEQ ID NO: 24432 - DNA, 21 bp, synthetic construct
  source 1..21: mol_type = other DNA
gtattgagctctaatacttgg

SEQ ID NO: 24433 - DNA, 21 bp, synthetic construct
  source 1..21: mol_type = other DNA
agggatgaccacgtgtatcca

SEQ ID NO: 24434 - DNA, 21 bp, synthetic construct
  source 1..21: mol_type = other DNA
agggatgatcacgtataccca

SEQ ID NO: 24435 - DNA, 21 bp, synthetic construct
  source 1..21: mol_type = other DNA
gtattgagtgatagagcgtgg

SEQ ID NO: 24436 - DNA, 21 bp, synthetic construct
  source 1..21: mol_type = other DNA
ctcagccgtatctctcacaac

SEQ ID NO: 24437 - DNA, 21 bp, synthetic construct
  source 1..21: mol_type = other DNA
cagcttgagtcccggagctgg

SEQ ID NO: 24438 - DNA, 21 bp, synthetic construct
  source 1..21: mol_type = other DNA
gacctgggaagcagtacttgg

SEQ ID NO: 24439 - DNA, 21 bp, synthetic construct
  source 1..21: mol_type = other DNA
ctcgccaaaagtgggataaat

SEQ ID NO: 24440 - DNA, 21 bp, synthetic construct
  source 1..21: mol_type = other DNA
gttatgagcagcagatcctgg

SEQ ID NO: 24441 - DNA, 21 bp, synthetic construct
  source 1..21: mol_type = other DNA
aggacgcacgacacctttccc

SEQ ID NO: 24442 - DNA, 21 bp, synthetic construct
  source 1..21: mol_type = other DNA
taccatgctaagcagaacaac

SEQ ID NO: 24443 - DNA, 21 bp, synthetic construct
  source 1..21: mol_type = other DNA
gtaatgtccgacagactctgg

SEQ ID NO: 24444 - DNA, 21 bp, synthetic construct
  source 1..21: mol_type = other DNA
tatcacgctaagcagaacaac

SEQ ID NO: 24445 - DNA, 21 bp, synthetic construct
  source 1..21: mol_type = other DNA
agagaggaaaacgtgtatcct

SEQ ID NO: 24446 - DNA, 21 bp, synthetic construct
  source 1..21: mol_type = other DNA
tacttcactggaaagattaac

SEQ ID NO: 24447 - DNA, 21 bp, synthetic construct
  source 1..21: mol_type = other DNA
tacttcacgggtaaacacgat

SEQ ID NO: 24448 - DNA, 21 bp, synthetic construct
  source 1..21: mol_type = other DNA
cctctttcatcagcgagttgg

SEQ ID NO: 24449 - DNA, 21 bp, synthetic construct
  source 1..21: mol_type = other DNA
aaagacgacttcgttacatgg

SEQ ID NO: 24450 - DNA, 21 bp, synthetic construct
  source 1..21: mol_type = other DNA
atcggagaaagccgtctgtgg

SEQ ID NO: 24451 - DNA, 21 bp, synthetic construct
  source 1..21: mol_type = other DNA
tatgtaaagaacgatgccaga

SEQ ID NO: 24452 - DNA, 21 bp, synthetic construct
  source 1..21: mol_type = other DNA
tatttcaccggacaacgcgaa

SEQ ID NO: 24453 - DNA, 21 bp, synthetic construct
  source 1..21: mol_type = other DNA
tactttaccggacaattagca

SEQ ID NO: 24454 - DNA, 21 bp, synthetic construct
  source 1..21: mol_type = other DNA
tattttactggtaagcctgat

SEQ ID NO: 24455 - DNA, 21 bp, synthetic construct
  source 1..21: mol_type = other DNA
tcgacatccactaacggaata

SEQ ID NO: 24456 - DNA, 21 bp, synthetic construct
  source 1..21: mol_type = other DNA
tatttttcactaaaagtagag

SEQ ID NO: 24457 - DNA, 21 bp, synthetic construct
  source 1..21: mol_type = other DNA
tattttactgggtttaaggaa

SEQ ID NO: 24458 - DNA, 21 bp, synthetic construct
  source 1..21: mol_type = other DNA
tattttgcaggagttaagtca

SEQ ID NO: 24459 - DNA, 21 bp, synthetic construct
  source 1..21: mol_type = other DNA
tatttcagcggcatcccagca

SEQ ID NO: 24460 - DNA, 21 bp, synthetic construct
  source 1..21: mol_type = other DNA
tataccaggatcggacccaac

SEQ ID NO: 24461 - DNA, 21 bp, synthetic construct
  source 1..21: mol_type = other DNA
aggggcgagtataccttccca

SEQ ID NO: 24462 - DNA, 21 bp, synthetic construct
  source 1..21: mol_type = other DNA
ctttgggacggtacggggccc

SEQ ID NO: 24463 - DNA, 21 bp, synthetic construct
  source 1..21: mol_type = other DNA
atcatggccgatcgtggatgg

SEQ ID NO: 24464 - DNA, 21 bp, synthetic construct
  source 1..21: mol_type = other DNA
tggctaaagtcacagataggg

SEQ ID NO: 24465 - DNA, 21 bp, synthetic construct
  source 1..21: mol_type = other DNA
aggaattctaccgtgtaccct

SEQ ID NO: 24466 - DNA, 21 bp, synthetic construct
  source 1..21: mol_type = other DNA
ctcagtcggatagcgttaaat

SEQ ID NO: 24467 - DNA, 21 bp, synthetic construct
  source 1..21: mol_type = other DNA
actcagtcaactaacggcatt

SEQ ID NO: 24468 - DNA, 21 bp, synthetic construct
  source 1..21: mol_type = other DNA
cgtgacgaccatgtctatccg

SEQ ID NO: 24469 - DNA, 21 bp, synthetic construct
  source 1..21: mol_type = other DNA
ctgtcccgcattgcccacaat

SEQ ID NO: 24470 - DNA, 21 bp, synthetic construct
  source 1..21: mol_type = other DNA
tattcgagattaagtcctgat

SEQ ID NO: 24471 - DNA, 21 bp, synthetic construct
  source 1..21: mol_type = other DNA
tacgcaaaacaaggttacaat

SEQ ID NO: 24472 - DNA, 21 bp, synthetic construct
  source 1..21: mol_type = other DNA
tatacccgccttaatgacaac

SEQ ID NO: 24473 - DNA, 21 bp, synthetic construct
  source 1..21: mol_type = other DNA
cttgccaggacgggcatagat

SEQ ID NO: 24474 - DNA, 21 bp, synthetic construct
  source 1..21: mol_type = other DNA
tatttctcaggggtaaagatg

SEQ ID NO: 24475 - DNA, 21 bp, synthetic construct
  source 1..21: mol_type = other DNA
tacttcactggtaaagcgaac

SEQ ID NO: 24476 - DNA, 21 bp, synthetic construct
  source 1..21: mol_type = other DNA
tacgtaaagtacgaagataag

SEQ ID NO: 24477 - DNA, 21 bp, synthetic construct
  source 1..21: mol_type = other DNA
tatgcacgtaccggcccaggg

SEQ ID NO: 24478 - DNA, 21 bp, synthetic construct
  source 1..21: mol_type = other DNA
tatgtcaggtcgaacccaggg

SEQ ID NO: 24479 - DNA, 21 bp, synthetic construct
  source 1..21: mol_type = other DNA
tacttcactggcatgattgaa

SEQ ID NO: 24480 - DNA, 21 bp, synthetic construct
  source 1..21: mol_type = other DNA
ctatgtcgcccctgtgaggaa

SEQ ID NO: 24481 - DNA, 21 bp, synthetic construct
  source 1..21: mol_type = other DNA
gccttcgaatgtacccctggt

SEQ ID NO: 24482 - DNA, 21 bp, synthetic construct
  source 1..21: mol_type = other DNA
gtaatgtccgacagaacttgg

SEQ ID NO: 24483 - DNA, 21 bp, synthetic construct
  source 1..21: mol_type = other DNA
gttatgtccgatcgggtctgg

SEQ ID NO: 24484 - DNA, 21 bp, synthetic construct
  source 1..21: mol_type = other DNA
agagatgaccacgtttatccg

SEQ ID NO: 24485 - DNA, 21 bp, synthetic construct
  source 1..21: mol_type = other DNA
tatagcaaaatgggaaacaac

SEQ ID NO: 24486 - DNA, 21 bp, synthetic construct
  source 1..21: mol_type = other DNA
tacttcactggccaaacggcg

SEQ ID NO: 24487 - DNA, 21 bp, synthetic construct
  source 1..21: mol_type = other DNA
tactttacaggtaagcaggat

SEQ ID NO: 24488 - DNA, 21 bp, synthetic construct
  source 1..21: mol_type = other DNA
aggggtgaagagatttatcca

SEQ ID NO: 24489 - DNA, 21 bp, synthetic construct
  source 1..21: mol_type = other DNA
agagacgatagtgtttttcct

SEQ ID NO: 24490 - DNA, 21 bp, synthetic construct
  source 1..21: mol_type = other DNA
gatatggcctcgaaggattgg

SEQ ID NO: 24491 - DNA, 21 bp, synthetic construct
  source 1..21: mol_type = other DNA
ttgcaccggctttcgggtgac

SEQ ID NO: 24492 - DNA, 21 bp, synthetic construct
  source 1..21: mol_type = other DNA
tacttttcaggggtcaaacag

SEQ ID NO: 24493 - DNA, 21 bp, synthetic construct
  source 1..21: mol_type = other DNA
taccatgctaagcagctcaat

SEQ ID NO: 24494 - DNA, 21 bp, synthetic construct
  source 1..21: mol_type = other DNA
tatagtaaaatgggccacaac

SEQ ID NO: 24495 - DNA, 21 bp, synthetic construct
  source 1..21: mol_type = other DNA
tacttttctggcatccaattg

SEQ ID NO: 24496 - DNA, 21 bp, synthetic construct
  source 1..21: mol_type = other DNA
atcatgacggaccgcatctgg

SEQ ID NO: 24497 - DNA, 21 bp, synthetic construct
  source 1..21: mol_type = other DNA
agaaccagtgatgcttatccc

SEQ ID NO: 24498 - DNA, 21 bp, synthetic construct
  source 1..21: mol_type = other DNA
gtgaatgactatatttcatat

SEQ ID NO: 24499 - DNA, 21 bp, synthetic construct
  source 1..21: mol_type = other DNA
gacctcttatctgctaagtgg

SEQ ID NO: 24500 - DNA, 21 bp, synthetic construct
  source 1..21: mol_type = other DNA
gtctggagcacaaatggcata

SEQ ID NO: 24501 - DNA, 21 bp, synthetic construct
  source 1..21: mol_type = other DNA
ctgagtcgcgttggccagaat

SEQ ID NO: 24502 - DNA, 21 bp, synthetic construct
  source 1..21: mol_type = other DNA
tatttcacaggccatatggac

SEQ ID NO: 24503 - DNA, 21 bp, synthetic construct
  source 1..21: mol_type = other DNA
tactttaccggtgttatggat

SEQ ID NO: 24504 - DNA, 21 bp, synthetic construct
  source 1..21: mol_type = other DNA
gtacgtagcactaatggcgtt

SEQ ID NO: 24505 - DNA, 21 bp, synthetic construct
  source 1..21: mol_type = other DNA
gagatggaatcgcgggtctgg

SEQ ID NO: 24506 - DNA, 21 bp, synthetic construct
  source 1..21: mol_type = other DNA
gcccccgaaagcgttcggtgg

SEQ ID NO: 24507 - DNA, 21 bp, synthetic construct
  source 1..21: mol_type = other DNA
cagggggaaagtcgtttatgg

SEQ ID NO: 24508 - DNA, 21 bp, synthetic construct
  source 1..21: mol_type = other DNA
tactttaccggacgtgccgag

SEQ ID NO: 24509 - DNA, 21 bp, synthetic construct
  source 1..21: mol_type = other DNA
agatcagaggaaacttaccca

SEQ ID NO: 24510 - DNA, 21 bp, synthetic construct
  source 1..21: mol_type = other DNA
tatcataaatcaaacatgaac

SEQ ID NO: 24511 - DNA, 21 bp, synthetic construct
  source 1..21: mol_type = other DNA
cgtaatatggacgcgtaccca

SEQ ID NO: 24512 - DNA, 21 bp, synthetic construct
  source 1..21: mol_type = other DNA
tattgcaagccatgtctcacc

SEQ ID NO: 24513 - DNA, 21 bp, synthetic construct
  source 1..21: mol_type = other DNA
tatttcaccggcacccttgca

SEQ ID NO: 24514 - DNA, 21 bp, synthetic construct
  source 1..21: mol_type = other DNA
aaatcagaattcaagacgtac

SEQ ID NO: 24515 - DNA, 21 bp, synthetic construct
  source 1..21: mol_type = other DNA
gtggagtcgaccaacggatgg

SEQ ID NO: 24516 - DNA, 21 bp, synthetic construct
  source 1..21: mol_type = other DNA
ctttcaagggcagccaataac

SEQ ID NO: 24517 - DNA, 21 bp, synthetic construct
  source 1..21: mol_type = other DNA
tactttaccggacacaccgcc

SEQ ID NO: 24518 - DNA, 21 bp, synthetic construct
  source 1..21: mol_type = other DNA
agcgaatccacgaatgggagg

SEQ ID NO: 24519 - DNA, 21 bp, synthetic construct
  source 1..21: mol_type = other DNA
cgtaacatggatgtctacccc

SEQ ID NO: 24520 - DNA, 21 bp, synthetic construct
  source 1..21: mol_type = other DNA
tacttcaccggagttaccgag

SEQ ID NO: 24521 - DNA, 21 bp, synthetic construct
  source 1..21: mol_type = other DNA
tactcgaaggggaatataaat

SEQ ID NO: 24522 - DNA, 21 bp, synthetic construct
  source 1..21: mol_type = other DNA
tttcatagactcggtccagac

SEQ ID NO: 24523 - DNA, 21 bp, synthetic construct
  source 1..21: mol_type = other DNA
agggatgaatttagcagttgg

SEQ ID NO: 24524 - DNA, 21 bp, synthetic construct
  source 1..21: mol_type = other DNA
aggacttcgacgcacgggatc

SEQ ID NO: 24525 - DNA, 21 bp, synthetic construct
  source 1..21: mol_type = other DNA
tgcaaaggttcaacggagcag

SEQ ID NO: 24526 - DNA, 21 bp, synthetic construct
  source 1..21: mol_type = other DNA
atagggcacgagggctgggat

SEQ ID NO: 24527 - DNA, 21 bp, synthetic construct
  source 1..21: mol_type = other DNA
tatttttcgggcacaaaggaa

SEQ ID NO: 24528 - DNA, 21 bp, synthetic construct
  source 1..21: mol_type = other DNA
tatctaaagagtcaaagcggg

SEQ ID NO: 24529 - DNA, 21 bp, synthetic construct
  source 1..21: mol_type = other DNA
ggaggccccagctctagctgg

SEQ ID NO: 24530 - DNA, 21 bp, synthetic construct
  source 1..21: mol_type = other DNA
ctttgtcgaccatgtagcaat

SEQ ID NO: 24531 - DNA, 21 bp, synthetic construct
  source 1..21: mol_type = other DNA
ctatgtcgtccgtgctcgccc

SEQ ID NO: 24532 - DNA, 21 bp, synthetic construct
  source 1..21: mol_type = other DNA
aggaacatggatgcatatcct

SEQ ID NO: 24533 - DNA, 21 bp, synthetic construct
  source 1..21: mol_type = other DNA
aaggatagttttactgcgtgg

SEQ ID NO: 24534 - DNA, 21 bp, synthetic construct
  source 1..21: mol_type = other DNA
ttcttcacaggccaaatagag

SEQ ID NO: 24535 - DNA, 21 bp, synthetic construct
  source 1..21: mol_type = other DNA
caggatgggacgagctactgg

SEQ ID NO: 24536 - DNA, 21 bp, synthetic construct
  source 1..21: mol_type = other DNA
ctccatagattgtctacaggg

SEQ ID NO: 24537 - DNA, 21 bp, synthetic construct
  source 1..21: mol_type = other DNA
tactggtctgccataaaggag

SEQ ID NO: 24538 - DNA, 21 bp, synthetic construct
  source 1..21: mol_type = other DNA
cgcccagaggctcgctcatgg

SEQ ID NO: 24539 - DNA, 21 bp, synthetic construct
  source 1..21: mol_type = other DNA
attatggaatcgagggcctgg

SEQ ID NO: 24540 - DNA, 21 bp, synthetic construct
  source 1..21: mol_type = other DNA
ataaggagtaccaacggcgta

SEQ ID NO: 24541 - DNA, 21 bp, synthetic construct
  source 1..21: mol_type = other DNA
tattggacgggggttaccgag

SEQ ID NO: 24542 - DNA, 21 bp, synthetic construct
  source 1..21: mol_type = other DNA
aaagatgactacacattgttt

SEQ ID NO: 24543 - DNA, 21 bp, synthetic construct
  source 1..21: mol_type = other DNA
tacttttcgggtaggaaggag

SEQ ID NO: 24544 - DNA, 21 bp, synthetic construct
  source 1..21: mol_type = other DNA
gatggagcgacgagccgctgg

SEQ ID NO: 24545 - DNA, 21 bp, synthetic construct
  source 1..21: mol_type = other DNA
tacagtaaaactggtataaac

SEQ ID NO: 24546 - DNA, 21 bp, synthetic construct
  source 1..21: mol_type = other DNA
ctatgccgcccctgcttaacc

SEQ ID NO: 24547 - DNA, 21 bp, synthetic construct
  source 1..21: mol_type = other DNA
tacttcacgggtattccagag

SEQ ID NO: 24548 - DNA, 21 bp, synthetic construct
  source 1..21: mol_type = other DNA
tattttacggggataccggcc

SEQ ID NO: 24549 - DNA, 21 bp, synthetic construct
  source 1..21: mol_type = other DNA
tactggtctggggtcagtgaa

SEQ ID NO: 24550 - DNA, 21 bp, synthetic construct
  source 1..21: mol_type = other DNA
atggacgactacactatgtac

SEQ ID NO: 24551 - DNA, 21 bp, synthetic construct
  source 1..21: mol_type = other DNA
aagacctacgacgcttttgtc

SEQ ID NO: 24552 - DNA, 21 bp, synthetic construct
  source 1..21: mol_type = other DNA
ctgtgtcgcccatgtaacgaa

SEQ ID NO: 24553 - DNA, 21 bp, synthetic construct
  source 1..21: mol_type = other DNA
gacgacggtagcagtaggtgg

SEQ ID NO: 24554 - DNA, 21 bp, synthetic construct
  source 1..21: mol_type = other DNA
atgtcagactttaaaatcttc

SEQ ID NO: 24555 - DNA, 21 bp, synthetic construct
  source 1..21: mol_type = other DNA
aggagtgagttcgctacttgg

SEQ ID NO: 24556 - DNA, 21 bp, synthetic construct
  source 1..21: mol_type = other DNA
tatgcaaagaatggtttaaac

SEQ ID NO: 24557 - DNA, 21 bp, synthetic construct
  source 1..21: mol_type = other DNA
ttgtcgcgtataagtcctgac

SEQ ID NO: 24558 - DNA, 21 bp, synthetic construct
  source 1..21: mol_type = other DNA
tatgcacgtataggaccgaac

SEQ ID NO: 24559 - DNA, 21 bp, synthetic construct
  source 1..21: mol_type = other DNA
gatgggtcgtcccggttatgg

SEQ ID NO: 24560 - DNA, 21 bp, synthetic construct
  source 1..21: mol_type = other DNA
gtaatgagttctcgagagtgg

SEQ ID NO: 24561 - DNA, 21 bp, synthetic construct
  source 1..21: mol_type = other DNA
aatatggcagacaggacgtgg

SEQ ID NO: 24562 - DNA, 21 bp, synthetic construct
  source 1..21: mol_type = other DNA
tacttaaagagtcagtcgcat

SEQ ID NO: 24563 - DNA, 21 bp, synthetic construct
  source 1..21: mol_type = other DNA
gctgattcaaccaatggccgt

SEQ ID NO: 24564 - DNA, 21 bp, synthetic construct
  source 1..21: mol_type = other DNA
tactccaagatcggtaagaat

SEQ ID NO: 24565 - DNA, 21 bp, synthetic construct
  source 1..21: mol_type = other DNA
tacgccaaggcagggtataat

SEQ ID NO: 24566 - DNA, 21 bp, synthetic construct
  source 1..21: mol_type = other DNA
ctgcaccgcctaagcacgggt

SEQ ID NO: 24567 - DNA, 21 bp, synthetic construct
  source 1..21: mol_type = other DNA
aagaacgacggaaatccgtgg

SEQ ID NO: 24568 - DNA, 21 bp, synthetic construct
  source 1..21: mol_type = other DNA
tattttacgggaatacaagga

SEQ ID NO: 24569 - DNA, 21 bp, synthetic construct
  source 1..21: mol_type = other DNA
tgcatgccaggagtcccactg

SEQ ID NO: 24570 - DNA, 21 bp, synthetic construct
  source 1..21: mol_type = other DNA
tattggtccggggtcagcgag

SEQ ID NO: 24571 - DNA, 21 bp, synthetic construct
  source 1..21: mol_type = other DNA
tactttaccggggttgtggac

SEQ ID NO: 24572 - DNA, 21 bp, synthetic construct
  source 1..21: mol_type = other DNA
cgaatgagtgacgcttaccca

SEQ ID NO: 24573 - DNA, 21 bp, synthetic construct
  source 1..21: mol_type = other DNA
tatttcacgggagttgcgcag

SEQ ID NO: 24574 - DNA, 21 bp, synthetic construct
  source 1..21: mol_type = other DNA
cgttccgagttcatgccctat

SEQ ID NO: 24575 - DNA, 21 bp, synthetic construct
  source 1..21: mol_type = other DNA
cttacgagagcggctcctaac

SEQ ID NO: 24576 - DNA, 21 bp, synthetic construct
  source 1..21: mol_type = other DNA
ggaggagaaagctcaacgtgg

SEQ ID NO: 24577 - DNA, 21 bp, synthetic construct
  source 1..21: mol_type = other DNA
aggcttgagtcaagtgcatgg

SEQ ID NO: 24578 - DNA, 21 bp, synthetic construct
  source 1..21: mol_type = other DNA
gtcatgtcgtcagcaggttgg

SEQ ID NO: 24579 - DNA, 21 bp, synthetic construct
  source 1..21: mol_type = other DNA
cggaatgaatttacccccttt

SEQ ID NO: 24580 - DNA, 21 bp, synthetic construct
  source 1..21: mol_type = other DNA
ttgctccaatctgcaacctgg

SEQ ID NO: 24581 - DNA, 21 bp, synthetic construct
  source 1..21: mol_type = other DNA
ggggccgaccacgtcaaatgg

SEQ ID NO: 24582 - DNA, 21 bp, synthetic construct
  source 1..21: mol_type = other DNA
tattggactggtgttacggag

SEQ ID NO: 24583 - DNA, 21 bp, synthetic construct
  source 1..21: mol_type = other DNA
tatgtaaagtcacaggcatgt

SEQ ID NO: 24584 - DNA, 21 bp, synthetic construct
  source 1..21: mol_type = other DNA
tggactgggactagttgtctt

SEQ ID NO: 24585 - DNA, 21 bp, synthetic construct
  source 1..21: mol_type = other DNA
tacttcaccggcgaaaaagag

SEQ ID NO: 24586 - DNA, 21 bp, synthetic construct
  source 1..21: mol_type = other DNA
tactttacaggtatgttcgag

SEQ ID NO: 24587 - DNA, 21 bp, synthetic construct
  source 1..21: mol_type = other DNA
tatttcaccggggtgaagggc

SEQ ID NO: 24588 - DNA, 21 bp, synthetic construct
  source 1..21: mol_type = other DNA
gagttggcgtcccacgcctgg

SEQ ID NO: 24589 - DNA, 21 bp, synthetic construct
  source 1..21: mol_type = other DNA
cgcgacgaattcgttggatac

SEQ ID NO: 24590 - DNA, 21 bp, synthetic construct
  source 1..21: mol_type = other DNA
aatatgtcagaccgtggttgg

SEQ ID NO: 24591 - DNA, 21 bp, synthetic construct
  source 1..21: mol_type = other DNA
atcctcgaaagtagaggctgg

SEQ ID NO: 24592 - DNA, 21 bp, synthetic construct
  source 1..21: mol_type = other DNA
tacttttcgggcataatacag

SEQ ID NO: 24593 - DNA, 21 bp, synthetic construct
  source 1..21: mol_type = other DNA
tacttcaccggaatgcacgag

SEQ ID NO: 24594 - DNA, 21 bp, synthetic construct
  source 1..21: mol_type = other DNA
ttttccaagcttaatcacaat

SEQ ID NO: 24595 - DNA, 21 bp, synthetic construct
  source 1..21: mol_type = other DNA
tactggaccggcgtcgtagat

SEQ ID NO: 24596 - DNA, 21 bp, synthetic construct
  source 1..21: mol_type = other DNA
cgtacatccactcacggcgta

SEQ ID NO: 24597 - DNA, 21 bp, synthetic construct
  source 1..21: mol_type = other DNA
agagtagaagacgcgtatccg

SEQ ID NO: 24598 - DNA, 21 bp, synthetic construct
  source 1..21: mol_type = other DNA
taccacaaggcctcgccgata

SEQ ID NO: 24599 - DNA, 21 bp, synthetic construct
  source 1..21: mol_type = other DNA
aggagcgaattcaccacatat

SEQ ID NO: 24600 - DNA, 21 bp, synthetic construct
  source 1..21: mol_type = other DNA
gcgggccccagccgcggttgg

SEQ ID NO: 24601 - DNA, 21 bp, synthetic construct
  source 1..21: mol_type = other DNA
attttgtcaagcagggagtgg

SEQ ID NO: 24602 - DNA, 21 bp, synthetic construct
  source 1..21: mol_type = other DNA
cttagtaagatagggctaaat

SEQ ID NO: 24603 - DNA, 21 bp, synthetic construct
  source 1..21: mol_type = other DNA
agtcaaagcaccaacggagta

SEQ ID NO: 24604 - DNA, 21 bp, synthetic construct
  source 1..21: mol_type = other DNA
tacttctcaggtactgtcgcc

SEQ ID NO: 24605 - DNA, 21 bp, synthetic construct
  source 1..21: mol_type = other DNA
tatcacgcaaagggaccatca

SEQ ID NO: 24606 - DNA, 21 bp, synthetic construct
  source 1..21: mol_type = other DNA
tacacgagattgaacgataat

SEQ ID NO: 24607 - DNA, 21 bp, synthetic construct
  source 1..21: mol_type = other DNA
cggttggaaagcgctgtctgg

SEQ ID NO: 24608 - DNA, 21 bp, synthetic construct
  source 1..21: mol_type = other DNA
acaacttctaccaacggagta

SEQ ID NO: 24609 - DNA, 21 bp, synthetic construct
  source 1..21: mol_type = other DNA
ttaagtcgaattgcgacgaac

SEQ ID NO: 24610 - DNA, 21 bp, synthetic construct
  source 1..21: mol_type = other DNA
tattggagtggggttcaagag

SEQ ID NO: 24611 - DNA, 21 bp, synthetic construct
  source 1..21: mol_type = other DNA
catgttagcacgaacggagtt

SEQ ID NO: 24612 - DNA, 21 bp, synthetic construct
  source 1..21: mol_type = other DNA
tctgatggcgtgagccgctgg

SEQ ID NO: 24613 - DNA, 21 bp, synthetic construct
  source 1..21: mol_type = other DNA
tactccaaggcgggctggaat

SEQ ID NO: 24614 - DNA, 21 bp, synthetic construct
  source 1..21: mol_type = other DNA
tacttcagtggcatgaaggaa

SEQ ID NO: 24615 - DNA, 21 bp, synthetic construct
  source 1..21: mol_type = other DNA
atgagagatgggactccaagc

SEQ ID NO: 24616 - DNA, 21 bp, synthetic construct
  source 1..21: mol_type = other DNA
tattttagcggaatcccggat

SEQ ID NO: 24617 - DNA, 21 bp, synthetic construct
  source 1..21: mol_type = other DNA
tttgcaaagtccgggtgcgga

SEQ ID NO: 24618 - DNA, 21 bp, synthetic construct
  source 1..21: mol_type = other DNA
tgtaagcccgaagcgcctggg

SEQ ID NO: 24619 - DNA, 21 bp, synthetic construct
  source 1..21: mol_type = other DNA
tacttccatgggaaaattgca

SEQ ID NO: 24620 - DNA, 21 bp, synthetic construct
  source 1..21: mol_type = other DNA
tacttctcaggcgtcatcagt

SEQ ID NO: 24621 - DNA, 21 bp, synthetic construct
  source 1..21: mol_type = other DNA
tgcaagaccacgaagtgctgc

SEQ ID NO: 24622 - DNA, 21 bp, synthetic construct
  source 1..21: mol_type = other DNA
cgcgatgaattcgtctcgtat

SEQ ID NO: 24623 - DNA, 21 bp, synthetic construct
  source 1..21: mol_type = other DNA
gaaatggattcccggatgtgg

SEQ ID NO: 24624 - DNA, 21 bp, synthetic construct
  source 1..21: mol_type = other DNA
ctctgccggccgtgtcaagag

SEQ ID NO: 24625 - DNA, 21 bp, synthetic construct
  source 1..21: mol_type = other DNA
gtactctccgataggagttgg

SEQ ID NO: 24626 - DNA, 21 bp, synthetic construct
  source 1..21: mol_type = other DNA
tatagtcggttgggactggat

SEQ ID NO: 24627 - DNA, 21 bp, synthetic construct
  source 1..21: mol_type = other DNA
tggttctccggtatcttggag

SEQ ID NO: 24628 - DNA, 21 bp, synthetic construct
  source 1..21: mol_type = other DNA
cgagaggattatgtaaaatgg

SEQ ID NO: 24629 - DNA, 21 bp, synthetic construct
  source 1..21: mol_type = other DNA
tttttttcgggaatcatcgag

SEQ ID NO: 24630 - DNA, 21 bp, synthetic construct
  source 1..21: mol_type = other DNA
tacgctaagaacggtgccaac

SEQ ID NO: 24631 - DNA, 21 bp, synthetic construct
  source 1..21: mol_type = other DNA
aagaacgattttgtgacctac

SEQ ID NO: 24632 - DNA, 21 bp, synthetic construct
  source 1..21: mol_type = other DNA
tacagcaagcttgattcaaac

SEQ ID NO: 24633 - DNA, 21 bp, synthetic construct
  source 1..21: mol_type = other DNA
caccaaagcactaatggcgtc

SEQ ID NO: 24634 - DNA, 21 bp, synthetic construct
  source 1..21: mol_type = other DNA
tactttagtggtaagcatgag

SEQ ID NO: 24635 - DNA, 21 bp, synthetic construct
  source 1..21: mol_type = other DNA
ttatgggatgggaccggccca

SEQ ID NO: 24636 - DNA, 21 bp, synthetic construct
  source 1..21: mol_type = other DNA
tgctttgacggcaggtccgcg

SEQ ID NO: 24637 - DNA, 21 bp, synthetic construct
  source 1..21: mol_type = other DNA
tatttcacgggccaaattcag

SEQ ID NO: 24638 - DNA, 21 bp, synthetic construct
  source 1..21: mol_type = other DNA
tacttctcgaaaatacgagaa

SEQ ID NO: 24639 - DNA, 21 bp, synthetic construct
  source 1..21: mol_type = other DNA
tacgcgcgtcctggcccgaat

SEQ ID NO: 24640 - DNA, 21 bp, synthetic construct
  source 1..21: mol_type = other DNA
gttatgcgcgatgcctatccc

SEQ ID NO: 24641 - DNA, 21 bp, synthetic construct
  source 1..21: mol_type = other DNA
ttagctaagacctcctgtaat

SEQ ID NO: 24642 - DNA, 21 bp, synthetic construct
  source 1..21: mol_type = other DNA
tattttacgggtaaatgtgaa

SEQ ID NO: 24643 - DNA, 21 bp, synthetic construct
  source 1..21: mol_type = other DNA
tacttcacaggctacgtggaa

SEQ ID NO: 24644 - DNA, 21 bp, synthetic construct
  source 1..21: mol_type = other DNA
tacttcaccggacagattgtt

SEQ ID NO: 24645 - DNA, 21 bp, synthetic construct
  source 1..21: mol_type = other DNA
tattcgcggataaatttaaat

SEQ ID NO: 24646 - DNA, 21 bp, synthetic construct
  source 1..21: mol_type = other DNA
tacagtcgcctacaaccggat

SEQ ID NO: 24647 - DNA, 21 bp, synthetic construct
  source 1..21: mol_type = other DNA
ctctgtagaccctgcatagaa

SEQ ID NO: 24648 - DNA, 21 bp, synthetic construct
  source 1..21: mol_type = other DNA
ctcagcagaatctcgcccgat

SEQ ID NO: 24649 - DNA, 21 bp, synthetic construct
  source 1..21: mol_type = other DNA
tacagtaagttaagctcaaac

SEQ ID NO: 24650 - DNA, 21 bp, synthetic construct
  source 1..21: mol_type = other DNA
tatgtgcggagcgatttaatg

SEQ ID NO: 24651 - DNA, 21 bp, synthetic construct
  source 1..21: mol_type = other DNA
aggagttcagatgtgtaccca

SEQ ID NO: 24652 - DNA, 21 bp, synthetic construct
  source 1..21: mol_type = other DNA
cgcatggaagaagtatatccc

SEQ ID NO: 24653 - DNA, 21 bp, synthetic construct
  source 1..21: mol_type = other DNA
ctgagagacgggacgaacgct

SEQ ID NO: 24654 - DNA, 21 bp, synthetic construct
  source 1..21: mol_type = other DNA
ctccatcgccttgttccagat

SEQ ID NO: 24655 - DNA, 21 bp, synthetic construct
  source 1..21: mol_type = other DNA
tattggtcgggtgtaaccgcg

SEQ ID NO: 24656 - DNA, 21 bp, synthetic construct
  source 1..21: mol_type = other DNA
gtaatcgaagatgcgtatcct

SEQ ID NO: 24657 - DNA, 21 bp, synthetic construct
  source 1..21: mol_type = other DNA
cggctcccgaccgtattcccc

SEQ ID NO: 24658 - DNA, 21 bp, synthetic construct
  source 1..21: mol_type = other DNA
tatgtgaggagtcagccgggg

SEQ ID NO: 24659 - DNA, 21 bp, synthetic construct
  source 1..21: mol_type = other DNA
tgcaccagcaaaaatggacat

SEQ ID NO: 24660 - DNA, 21 bp, synthetic construct
  source 1..21: mol_type = other DNA
tacagcaaagttaattataat

SEQ ID NO: 24661 - DNA, 21 bp, synthetic construct
  source 1..21: mol_type = other DNA
gtaggcggaaaatgtcctggt

SEQ ID NO: 24662 - DNA, 21 bp, synthetic construct
  source 1..21: mol_type = other DNA
ataatgagcgatcgtgtctgg

SEQ ID NO: 24663 - DNA, 21 bp, synthetic construct
  source 1..21: mol_type = other DNA
tatacgaagtctcaaacggac

SEQ ID NO: 24664 - DNA, 21 bp, synthetic construct
  source 1..21: mol_type = other DNA
cggacctacgattcttttcca

SEQ ID NO: 24665 - DNA, 21 bp, synthetic construct
  source 1..21: mol_type = other DNA
tatcttaagagccaaccttac

SEQ ID NO: 24666 - DNA, 21 bp, synthetic construct
  source 1..21: mol_type = other DNA
tatagcaaaggaaacataaac

SEQ ID NO: 24667 - DNA, 21 bp, synthetic construct
  source 1..21: mol_type = other DNA
actaaatcgactaacggggta

SEQ ID NO: 24668 - DNA, 21 bp, synthetic construct
  source 1..21: mol_type = other DNA
ctccatcggctcagtcccagt

SEQ ID NO: 24669 - DNA, 21 bp, synthetic construct
  source 1..21: mol_type = other DNA
gacatgacatcatctagttgg

SEQ ID NO: 24670 - DNA, 21 bp, synthetic construct
  source 1..21: mol_type = other DNA
aggtcggactttgtggcgttc

SEQ ID NO: 24671 - DNA, 21 bp, synthetic construct
  source 1..21: mol_type = other DNA
tacttcacggggatggtagag

SEQ ID NO: 24672 - DNA, 21 bp, synthetic construct
  source 1..21: mol_type = other DNA
ccaatggagtcgcgtgagtgg

SEQ ID NO: 24673 - DNA, 21 bp, synthetic construct
  source 1..21: mol_type = other DNA
tatcaccgattgtccgatgac

SEQ ID NO: 24674 - DNA, 21 bp, synthetic construct
  source 1..21: mol_type = other DNA
tacagcaggcttcaacccttg

SEQ ID NO: 24675 - DNA, 21 bp, synthetic construct
  source 1..21: mol_type = other DNA
aactatgcgaagtcactggaa

SEQ ID NO: 24676 - DNA, 21 bp, synthetic construct
  source 1..21: mol_type = other DNA
tacgtcaagagtcaagcctgc

SEQ ID NO: 24677 - DNA, 21 bp, synthetic construct
  source 1..21: mol_type = other DNA
ttttcacgtcttaatcctgat

SEQ ID NO: 24678 - DNA, 21 bp, synthetic construct
  source 1..21: mol_type = other DNA
tactccaagcaagggatgaat

SEQ ID NO: 24679 - DNA, 21 bp, synthetic construct
  source 1..21: mol_type = other DNA
tatttttcgggaaaacaggaa

SEQ ID NO: 24680 - DNA, 21 bp, synthetic construct
  source 1..21: mol_type = other DNA
gtgatgtcttcgcgtagttgg

SEQ ID NO: 24681 - DNA, 21 bp, synthetic construct
  source 1..21: mol_type = other DNA
atgaaagatggcaccaatgcg

SEQ ID NO: 24682 - DNA, 21 bp, synthetic construct
  source 1..21: mol_type = other DNA
aaggatgagttccgatcatac

SEQ ID NO: 24683 - DNA, 21 bp, synthetic construct
  source 1..21: mol_type = other DNA
ttcttcgatggaacaagcgca

SEQ ID NO: 24684 - DNA, 21 bp, synthetic construct
  source 1..21: mol_type = other DNA
tatcataaacatcagactaac

SEQ ID NO: 24685 - DNA, 21 bp, synthetic construct
  source 1..21: mol_type = other DNA
ggcggagattattcatcatgg

SEQ ID NO: 24686 - DNA, 21 bp, synthetic construct
  source 1..21: mol_type = other DNA
tatttcagtggtaagcaagag

SEQ ID NO: 24687 - DNA, 21 bp, synthetic construct
  source 1..21: mol_type = other DNA
ttgcacagactatcaccgtcc

SEQ ID NO: 24688 - DNA, 21 bp, synthetic construct
  source 1..21: mol_type = other DNA
tactttaccgggatacaggac

SEQ ID NO: 24689 - DNA, 21 bp, synthetic construct
  source 1..21: mol_type = other DNA
aggatggaatctcaaggttgg

SEQ ID NO: 24690 - DNA, 21 bp, synthetic construct
  source 1..21: mol_type = other DNA
gggggagagacatcgagatgg

SEQ ID NO: 24691 - DNA, 21 bp, synthetic construct
  source 1..21: mol_type = other DNA
ctgtgcaggccgtgtagcgga

SEQ ID NO: 24692 - DNA, 21 bp, synthetic construct
  source 1..21: mol_type = other DNA
aaagacgactatgagtatttc

SEQ ID NO: 24693 - DNA, 21 bp, synthetic construct
  source 1..21: mol_type = other DNA
tacgtcaggtcaggacctaac

SEQ ID NO: 24694 - DNA, 21 bp, synthetic construct
  source 1..21: mol_type = other DNA
tattttaccggaaagcgcgaa

SEQ ID NO: 24695 - DNA, 21 bp, synthetic construct
  source 1..21: mol_type = other DNA
tttgcgaagaacggtccaaat

SEQ ID NO: 24696 - DNA, 21 bp, synthetic construct
  source 1..21: mol_type = other DNA
tatagtaaagccggatggaac

SEQ ID NO: 24697 - DNA, 21 bp, synthetic construct
  source 1..21: mol_type = other DNA
cgcagtgtggatgcgtacccc

SEQ ID NO: 24698 - DNA, 21 bp, synthetic construct
  source 1..21: mol_type = other DNA
tacgttcgtagtgaccatggg

SEQ ID NO: 24699 - DNA, 21 bp, synthetic construct
  source 1..21: mol_type = other DNA
ttatgccgaccttgtaccgaa

SEQ ID NO: 24700 - DNA, 21 bp, synthetic construct
  source 1..21: mol_type = other DNA
ctttcgcgcatttctatgaac

SEQ ID NO: 24701 - DNA, 21 bp, synthetic construct
  source 1..21: mol_type = other DNA
tacttcacaggtaaaagggag

SEQ ID NO: 24702 - DNA, 21 bp, synthetic construct
  source 1..21: mol_type = other DNA
cggagcgatttcgagtatttc

SEQ ID NO: 24703 - DNA, 21 bp, synthetic construct
  source 1..21: mol_type = other DNA
atgcgcgacggcactaacgcg

SEQ ID NO: 24704 - DNA, 21 bp, synthetic construct
  source 1..21: mol_type = other DNA
cgagaggccgtttctacatgg

SEQ ID NO: 24705 - DNA, 21 bp, synthetic construct
  source 1..21: mol_type = other DNA
attatggccgatcgtgcttgg

SEQ ID NO: 24706 - DNA, 21 bp, synthetic construct
  source 1..21: mol_type = other DNA
ctaagtcgggcatcggcgaac

SEQ ID NO: 24707 - DNA, 21 bp, synthetic construct
  source 1..21: mol_type = other DNA
tattcacgcgttggtgaaaac

SEQ ID NO: 24708 - DNA, 21 bp, synthetic construct
  source 1..21: mol_type = other DNA
tacgtgcgaagtaatccggga

SEQ ID NO: 24709 - DNA, 21 bp, synthetic construct
  source 1..21: mol_type = other DNA
tacagcaaaagtggctataat

SEQ ID NO: 24710 - DNA, 21 bp, synthetic construct
  source 1..21: mol_type = other DNA
ccgatggggtccgcaatgtgg

SEQ ID NO: 24711 - DNA, 21 bp, synthetic construct
  source 1..21: mol_type = other DNA
tatttttcaggcattccagag

SEQ ID NO: 24712 - DNA, 21 bp, synthetic construct
  source 1..21: mol_type = other DNA
ttgtccagagctagtgcgaat

SEQ ID NO: 24713 - DNA, 21 bp, synthetic construct
  source 1..21: mol_type = other DNA
tactttgccggcgtatgccca

SEQ ID NO: 24714 - DNA, 21 bp, synthetic construct
  source 1..21: mol_type = other DNA
agggaattcgatgcctttcct

SEQ ID NO: 24715 - DNA, 21 bp, synthetic construct
  source 1..21: mol_type = other DNA
gtagccgaccatttacgttgg

SEQ ID NO: 24716 - DNA, 21 bp, synthetic construct
  source 1..21: mol_type = other DNA
tacttcgcaggcgttcgggag

SEQ ID NO: 24717 - DNA, 21 bp, synthetic construct
  source 1..21: mol_type = other DNA
tactcgaagcagaatttcaat

SEQ ID NO: 24718 - DNA, 21 bp, synthetic construct
  source 1..21: mol_type = other DNA
cgggaggattttgtatcgtat

SEQ ID NO: 24719 - DNA, 21 bp, synthetic construct
  source 1..21: mol_type = other DNA
ttttttaccgggagggtggag

SEQ ID NO: 24720 - DNA, 21 bp, synthetic construct
  source 1..21: mol_type = other DNA
ttgacgcgtataagtcgggac

SEQ ID NO: 24721 - DNA, 21 bp, synthetic construct
  source 1..21: mol_type = other DNA
ttacatagactatctactcac

SEQ ID NO: 24722 - DNA, 21 bp, synthetic construct
  source 1..21: mol_type = other DNA
tacagtaggttacaggataat

SEQ ID NO: 24723 - DNA, 21 bp, synthetic construct
  source 1..21: mol_type = other DNA
tactttcatgggaagatcgaa

SEQ ID NO: 24724 - DNA, 21 bp, synthetic construct
  source 1..21: mol_type = other DNA
tatagtaggttggaccccgtc

SEQ ID NO: 24725 - DNA, 21 bp, synthetic construct
  source 1..21: mol_type = other DNA
ttttttacaggcaagatagcc

SEQ ID NO: 24726 - DNA, 21 bp, synthetic construct
  source 1..21: mol_type = other DNA
aaaggggacagcagatcatgg

SEQ ID NO: 24727 - DNA, 21 bp, synthetic construct
  source 1..21: mol_type = other DNA
tactatacaggaaagaaggag

SEQ ID NO: 24728 - DNA, 21 bp, synthetic construct
  source 1..21: mol_type = other DNA
cttgacgaatggcacggattt

SEQ ID NO: 24729 - DNA, 21 bp, synthetic construct
  source 1..21: mol_type = other DNA
tacttcagtggccagatggaa

SEQ ID NO: 24730 - DNA, 21 bp, synthetic construct
  source 1..21: mol_type = other DNA
tacttctcaggtatggttgcg

SEQ ID NO: 24731 - DNA, 21 bp, synthetic construct
  source 1..21: mol_type = other DNA
tacttttcgggggtttcccag

SEQ ID NO: 24732 - DNA, 21 bp, synthetic construct
  source 1..21: mol_type = other DNA
agagacgaattcgtcagttgg

SEQ ID NO: 24733 - DNA, 21 bp, synthetic construct
  source 1..21: mol_type = other DNA
cataatagtacaaacggggtg

SEQ ID NO: 24734 - DNA, 21 bp, synthetic construct
  source 1..21: mol_type = other DNA
agggatggaactagtcactgg

SEQ ID NO: 24735 - DNA, 21 bp, synthetic construct
  source 1..21: mol_type = other DNA
aaaagcgattacttaacttat

SEQ ID NO: 24736 - DNA, 21 bp, synthetic construct
  source 1..21: mol_type = other DNA
ccatacgcgaagagtagggat

SEQ ID NO: 24737 - DNA, 21 bp, synthetic construct
  source 1..21: mol_type = other DNA
taccatgccaagggagtaaac

SEQ ID NO: 24738 - DNA, 21 bp, synthetic construct
  source 1..21: mol_type = other DNA
tacttcacaggcattcagggg

SEQ ID NO: 24739 - DNA, 21 bp, synthetic construct
  source 1..21: mol_type = other DNA
tacttttcaggcgaaaaggaa

SEQ ID NO: 24740 - DNA, 21 bp, synthetic construct
  source 1..21: mol_type = other DNA
attttaagtgatcgggtgtgg

SEQ ID NO: 24741 - DNA, 21 bp, synthetic construct
  source 1..21: mol_type = other DNA
tattggagtggagtcacggcc

SEQ ID NO: 24742 - DNA, 21 bp, synthetic construct
  source 1..21: mol_type = other DNA
cgcgaagaaaccgtgtattgg

SEQ ID NO: 24743 - DNA, 21 bp, synthetic construct
  source 1..21: mol_type = other DNA
gaactagagagtagagaatgg

SEQ ID NO: 24744 - DNA, 21 bp, synthetic construct
  source 1..21: mol_type = other DNA
cacagtaagctaaatcctatg

SEQ ID NO: 24745 - DNA, 21 bp, synthetic construct
  source 1..21: mol_type = other DNA
cgcgacgagttttgtacgcga

SEQ ID NO: 24746 - DNA, 21 bp, synthetic construct
  source 1..21: mol_type = other DNA
tatttccacggtaagatagcc

SEQ ID NO: 24747 - DNA, 21 bp, synthetic construct
  source 1..21: mol_type = other DNA
tactttagcggcatccagagc

SEQ ID NO: 24748 - DNA, 21 bp, synthetic construct
  source 1..21: mol_type = other DNA
ctttgtcgcccttgtagggag

SEQ ID NO: 24749 - DNA, 21 bp, synthetic construct
  source 1..21: mol_type = other DNA
aagtcagagtactcaacatat

SEQ ID NO: 24750 - DNA, 21 bp, synthetic construct
  source 1..21: mol_type = other DNA
tattggaccggaacggtggca

SEQ ID NO: 24751 - DNA, 21 bp, synthetic construct
  source 1..21: mol_type = other DNA
ctagcgaaaaccggcaataac

SEQ ID NO: 24752 - DNA, 21 bp, synthetic construct
  source 1..21: mol_type = other DNA
agggacggcgctagcagctgg

SEQ ID NO: 24753 - DNA, 21 bp, synthetic construct
  source 1..21: mol_type = other DNA
cttgcccgtactgggatcgac

SEQ ID NO: 24754 - DNA, 21 bp, synthetic construct
  source 1..21: mol_type = other DNA
ttcttttcgggtatcaaggag

SEQ ID NO: 24755 - DNA, 21 bp, synthetic construct
  source 1..21: mol_type = other DNA
ccgatggagagttcccagtgg

SEQ ID NO: 24756 - DNA, 21 bp, synthetic construct
  source 1..21: mol_type = other DNA
cgcggtgatgaagtctatccg

SEQ ID NO: 24757 - DNA, 21 bp, synthetic construct
  source 1..21: mol_type = other DNA
tggtggtcaggcgtaatagaa

SEQ ID NO: 24758 - DNA, 21 bp, synthetic construct
  source 1..21: mol_type = other DNA
aagatgccgtcgcgcgattgg

SEQ ID NO: 24759 - DNA, 21 bp, synthetic construct
  source 1..21: mol_type = other DNA
aacgacgggaattcgaagtgg

SEQ ID NO: 24760 - DNA, 21 bp, synthetic construct
  source 1..21: mol_type = other DNA
atcatgtcggatagggtttgg

SEQ ID NO: 24761 - DNA, 21 bp, synthetic construct
  source 1..21: mol_type = other DNA
tacttcactggcagaaccgag

SEQ ID NO: 24762 - DNA, 21 bp, synthetic construct
  source 1..21: mol_type = other DNA
tactttacaggtcaacatgcc

SEQ ID NO: 24763 - DNA, 21 bp, synthetic construct
  source 1..21: mol_type = other DNA
tttagccgtattgggatgaac

SEQ ID NO: 24764 - DNA, 21 bp, synthetic construct
  source 1..21: mol_type = other DNA
ataatgagcaccaacggggtg

SEQ ID NO: 24765 - DNA, 21 bp, synthetic construct
  source 1..21: mol_type = other DNA
tattttagcggaaagatcatg

SEQ ID NO: 24766 - DNA, 21 bp, synthetic construct
  source 1..21: mol_type = other DNA
actcgatcaacgaacggcgtg

SEQ ID NO: 24767 - DNA, 21 bp, synthetic construct
  source 1..21: mol_type = other DNA
cgtgacggcagctctgcatgg

SEQ ID NO: 24768 - DNA, 21 bp, synthetic construct
  source 1..21: mol_type = other DNA
tattttacgggaaaggctaat

SEQ ID NO: 24769 - DNA, 21 bp, synthetic construct
  source 1..21: mol_type = other DNA
tatgttaaaggtgatacacgg

SEQ ID NO: 24770 - DNA, 21 bp, synthetic construct
  source 1..21: mol_type = other DNA
agggtaatggacgcgtacgct

SEQ ID NO: 24771 - DNA, 21 bp, synthetic construct
  source 1..21: mol_type = other DNA
tatttctcgggtactattaat

SEQ ID NO: 24772 - DNA, 21 bp, synthetic construct
  source 1..21: mol_type = other DNA
catacgagcactaacggtgtc

SEQ ID NO: 24773 - DNA, 21 bp, synthetic construct
  source 1..21: mol_type = other DNA
atgagtaagcttaacgccaac

SEQ ID NO: 24774 - DNA, 21 bp, synthetic construct
  source 1..21: mol_type = other DNA
cgtgatgacttcgtcaaatgg

SEQ ID NO: 24775 - DNA, 21 bp, synthetic construct
  source 1..21: mol_type = other DNA
aaagacgatttcgtctcctac

SEQ ID NO: 24776 - DNA, 21 bp, synthetic construct
  source 1..21: mol_type = other DNA
aaagacgactttgtgagctac

SEQ ID NO: 24777 - DNA, 21 bp, synthetic construct
  source 1..21: mol_type = other DNA
tacgtaaggtctgacactaaa

SEQ ID NO: 24778 - DNA, 21 bp, synthetic construct
  source 1..21: mol_type = other DNA
tacttcaccggacagatggac

SEQ ID NO: 24779 - DNA, 21 bp, synthetic construct
  source 1..21: mol_type = other DNA
tatttcagtggtgtcgtacgc

SEQ ID NO: 24780 - DNA, 21 bp, synthetic construct
  source 1..21: mol_type = other DNA
tatagtaaggttggcaagaac

SEQ ID NO: 24781 - DNA, 21 bp, synthetic construct
  source 1..21: mol_type = other DNA
gttgaatctagcaggttatgg

SEQ ID NO: 24782 - DNA, 21 bp, synthetic construct
  source 1..21: mol_type = other DNA
cgagaggagttcacggcatgg

SEQ ID NO: 24783 - DNA, 21 bp, synthetic construct
  source 1..21: mol_type = other DNA
tatttcacgggaatccaagat

SEQ ID NO: 24784 - DNA, 21 bp, synthetic construct
  source 1..21: mol_type = other DNA
gcgggcgaatcgcgcggttgg

SEQ ID NO: 24785 - DNA, 21 bp, synthetic construct
  source 1..21: mol_type = other DNA
tacgtcaagtcgcagcagact

SEQ ID NO: 24786 - DNA, 21 bp, synthetic construct
  source 1..21: mol_type = other DNA
cgagaccaaaccgtttatccg

SEQ ID NO: 24787 - DNA, 21 bp, synthetic construct
  source 1..21: mol_type = other DNA
gtcttttccacaaacggcgtg

SEQ ID NO: 24788 - DNA, 21 bp, synthetic construct
  source 1..21: mol_type = other DNA
tacttgaagtcccagtcagga

SEQ ID NO: 24789 - DNA, 21 bp, synthetic construct
  source 1..21: mol_type = other DNA
tattttacaggcagaatagat

SEQ ID NO: 24790 - DNA, 21 bp, synthetic construct
  source 1..21: mol_type = other DNA
tattttacaggtgtccaatta

SEQ ID NO: 24791 - DNA, 21 bp, synthetic construct
  source 1..21: mol_type = other DNA
tactctaagatggggaataac

SEQ ID NO: 24792 - DNA, 21 bp, synthetic construct
  source 1..21: mol_type = other DNA
taccacaaaatgcagtgcaac

SEQ ID NO: 24793 - DNA, 21 bp, synthetic construct
  source 1..21: mol_type = other DNA
tatttcagtggtcagatcgaa

SEQ ID NO: 24794 - DNA, 21 bp, synthetic construct
  source 1..21: mol_type = other DNA
aaaatgtctagcgccaactgg

SEQ ID NO: 24795 - DNA, 21 bp, synthetic construct
  source 1..21: mol_type = other DNA
tatgctaaggggaacccaaat

SEQ ID NO: 24796 - DNA, 21 bp, synthetic construct
  source 1..21: mol_type = other DNA
ggcggtatagggtctaactgg

SEQ ID NO: 24797 - DNA, 21 bp, synthetic construct
  source 1..21: mol_type = other DNA
ttatgtagaccttgtaaggag

SEQ ID NO: 24798 - DNA, 21 bp, synthetic construct
  source 1..21: mol_type = other DNA
tacagcaaattggattcacgt

SEQ ID NO: 24799 - DNA, 21 bp, synthetic construct
  source 1..21: mol_type = other DNA
tggtggagtgggatggtggaa

SEQ ID NO: 24800 - DNA, 21 bp, synthetic construct
  source 1..21: mol_type = other DNA
tttttcacggggaaaatcgca

SEQ ID NO: 24801 - DNA, 21 bp, synthetic construct
  source 1..21: mol_type = other DNA
cgggaccaaaccgtataccct

SEQ ID NO: 24802 - DNA, 21 bp, synthetic construct
  source 1..21: mol_type = other DNA
gggagccccggagtgcattgg

SEQ ID NO: 24803 - DNA, 21 bp, synthetic construct
  source 1..21: mol_type = other DNA
ttaagcagacttaacatggac

SEQ ID NO: 24804 - DNA, 21 bp, synthetic construct
  source 1..21: mol_type = other DNA
tactggtctggagttatcgag

SEQ ID NO: 24805 - DNA, 21 bp, synthetic construct
  source 1..21: mol_type = other DNA
cgcggggaaggggtctaccca

SEQ ID NO: 24806 - DNA, 21 bp, synthetic construct
  source 1..21: mol_type = other DNA
ctttcgcgtttaaatatggat

SEQ ID NO: 24807 - DNA, 21 bp, synthetic construct
  source 1..21: mol_type = other DNA
tacgccaaaggtaacccgaac

SEQ ID NO: 24808 - DNA, 21 bp, synthetic construct
  source 1..21: mol_type = other DNA
tttcataggttgagccctgac

SEQ ID NO: 24809 - DNA, 21 bp, synthetic construct
  source 1..21: mol_type = other DNA
tattcccggcttaacttggat

SEQ ID NO: 24810 - DNA, 21 bp, synthetic construct
  source 1..21: mol_type = other DNA
tatagtaagttgggagataac

SEQ ID NO: 24811 - DNA, 21 bp, synthetic construct
  source 1..21: mol_type = other DNA
tacagtaagatgaacaataat

SEQ ID NO: 24812 - DNA, 21 bp, synthetic construct
  source 1..21: mol_type = other DNA
tatagtaaattgcagaagaat

SEQ ID NO: 24813 - DNA, 21 bp, synthetic construct
  source 1..21: mol_type = other DNA
tttttcactggggtgcgcgag

SEQ ID NO: 24814 - DNA, 21 bp, synthetic construct
  source 1..21: mol_type = other DNA
tattggagcgcaatcaaagaa

SEQ ID NO: 24815 - DNA, 21 bp, synthetic construct
  source 1..21: mol_type = other DNA
tatgtcaaatcagacatggct

SEQ ID NO: 24816 - DNA, 21 bp, synthetic construct
  source 1..21: mol_type = other DNA
ttttcccgcttgagtcctcta

SEQ ID NO: 24817 - DNA, 21 bp, synthetic construct
  source 1..21: mol_type = other DNA
tatttcacagggcagaccgac

SEQ ID NO: 24818 - DNA, 21 bp, synthetic construct
  source 1..21: mol_type = other DNA
tacttgaaatcgcagcattat

SEQ ID NO: 24819 - DNA, 21 bp, synthetic construct
  source 1..21: mol_type = other DNA
tatttcactgggaaacaagac

SEQ ID NO: 24820 - DNA, 21 bp, synthetic construct
  source 1..21: mol_type = other DNA
gttatggaatctacccgatgg

SEQ ID NO: 24821 - DNA, 21 bp, synthetic construct
  source 1..21: mol_type = other DNA
tatttcagtggtacaaaactg

SEQ ID NO: 24822 - DNA, 21 bp, synthetic construct
  source 1..21: mol_type = other DNA
gggggcgagacctcccactgg

SEQ ID NO: 24823 - DNA, 21 bp, synthetic construct
  source 1..21: mol_type = other DNA
agggagtcagaagtcagatgg

SEQ ID NO: 24824 - DNA, 21 bp, synthetic construct
  source 1..21: mol_type = other DNA
cgattagaggatcgtctctgg

SEQ ID NO: 24825 - DNA, 21 bp, synthetic construct
  source 1..21: mol_type = other DNA
ttctttacgggagtaagggag

SEQ ID NO: 24826 - DNA, 21 bp, synthetic construct
  source 1..21: mol_type = other DNA
tatttcgccgggaaggttgcc

SEQ ID NO: 24827 - DNA, 21 bp, synthetic construct
  source 1..21: mol_type = other DNA
tacgtgaaaagccaaacctgg

SEQ ID NO: 24828 - DNA, 21 bp, synthetic construct
  source 1..21: mol_type = other DNA
tacttctcgggccagactgca

SEQ ID NO: 24829 - DNA, 21 bp, synthetic construct
  source 1..21: mol_type = other DNA
agagatgaatttgttagctgg

SEQ ID NO: 24830 - DNA, 21 bp, synthetic construct
  source 1..21: mol_type = other DNA
ttatccagaatcgcactcaat

SEQ ID NO: 24831 - DNA, 21 bp, synthetic construct
  source 1..21: mol_type = other DNA
tactcgaagatgggcgcgaat

SEQ ID NO: 24832 - DNA, 21 bp, synthetic construct
  source 1..21: mol_type = other DNA
cttcatagactctccgacagc

SEQ ID NO: 24833 - DNA, 21 bp, synthetic construct
  source 1..21: mol_type = other DNA
attggtgagtcacgactatgg

SEQ ID NO: 24834 - DNA, 21 bp, synthetic construct
  source 1..21: mol_type = other DNA
tatagtaaacagggtatgaac

SEQ ID NO: 24835 - DNA, 21 bp, synthetic construct
  source 1..21: mol_type = other DNA
gtaggacaccgtggctgggac

SEQ ID NO: 24836 - DNA, 21 bp, synthetic construct
  source 1..21: mol_type = other DNA
tccggaagtactaacggtgtg

SEQ ID NO: 24837 - DNA, 21 bp, synthetic construct
  source 1..21: mol_type = other DNA
tttcatcggcttagcatcgat

SEQ ID NO: 24838 - DNA, 21 bp, synthetic construct
  source 1..21: mol_type = other DNA
tactggagcggcgtcaaggac

SEQ ID NO: 24839 - DNA, 21 bp, synthetic construct
  source 1..21: mol_type = other DNA
tatcttaagtctcagaccgtg

SEQ ID NO: 24840 - DNA, 21 bp, synthetic construct
  source 1..21: mol_type = other DNA
tattttaccggtatgatcgag

SEQ ID NO: 24841 - DNA, 21 bp, synthetic construct
  source 1..21: mol_type = other DNA
cgggacgaatttacggtgtac

SEQ ID NO: 24842 - DNA, 21 bp, synthetic construct
  source 1..21: mol_type = other DNA
ttagcacgaactgggattgac

SEQ ID NO: 24843 - DNA, 21 bp, synthetic construct
  source 1..21: mol_type = other DNA
accatttcgaccaatggagtg

SEQ ID NO: 24844 - DNA, 21 bp, synthetic construct
  source 1..21: mol_type = other DNA
tacgctagaacgggaccggga

SEQ ID NO: 24845 - DNA, 21 bp, synthetic construct
  source 1..21: mol_type = other DNA
tgcaaacctgatgctataaga

SEQ ID NO: 24846 - DNA, 21 bp, synthetic construct
  source 1..21: mol_type = other DNA
gtcaacgactttgtaacttac

SEQ ID NO: 24847 - DNA, 21 bp, synthetic construct
  source 1..21: mol_type = other DNA
tacttctcgggtcaaaaggaa

SEQ ID NO: 24848 - DNA, 21 bp, synthetic construct
  source 1..21: mol_type = other DNA
ataatgagcgggagaacgtgg

SEQ ID NO: 24849 - DNA, 21 bp, synthetic construct
  source 1..21: mol_type = other DNA
tattggacaggagtatcagag

SEQ ID NO: 24850 - DNA, 21 bp, synthetic construct
  source 1..21: mol_type = other DNA
aggatgcaagacgcatatcca

SEQ ID NO: 24851 - DNA, 21 bp, synthetic construct
  source 1..21: mol_type = other DNA
tatttttccggtaaagtctca

SEQ ID NO: 24852 - DNA, 21 bp, synthetic construct
  source 1..21: mol_type = other DNA
tacacgagattagacccggtc

SEQ ID NO: 24853 - DNA, 21 bp, synthetic construct
  source 1..21: mol_type = other DNA
gatttgcgctccgcaaattgg

SEQ ID NO: 24854 - DNA, 21 bp, synthetic construct
  source 1..21: mol_type = other DNA
taccatagacttagtatccat

SEQ ID NO: 24855 - DNA, 21 bp, synthetic construct
  source 1..21: mol_type = other DNA
atactctcagacaggaattgg

SEQ ID NO: 24856 - DNA, 21 bp, synthetic construct
  source 1..21: mol_type = other DNA
agaacgtatgacagcttcccg

SEQ ID NO: 24857 - DNA, 21 bp, synthetic construct
  source 1..21: mol_type = other DNA
cgcaagcaagatgtattcccg

SEQ ID NO: 24858 - DNA, 21 bp, synthetic construct
  source 1..21: mol_type = other DNA
tttttcagtggtgtcttagaa

SEQ ID NO: 24859 - DNA, 21 bp, synthetic construct
  source 1..21: mol_type = other DNA
tacagcaagtccaattttaat

SEQ ID NO: 24860 - DNA, 21 bp, synthetic construct
  source 1..21: mol_type = other DNA
taccacgcgaaaggccctagt

SEQ ID NO: 24861 - DNA, 21 bp, synthetic construct
  source 1..21: mol_type = other DNA
tattttacagggaagagggaa

SEQ ID NO: 24862 - DNA, 21 bp, synthetic construct
  source 1..21: mol_type = other DNA
gtaatgagccaggcaacctgg

SEQ ID NO: 24863 - DNA, 21 bp, synthetic construct
  source 1..21: mol_type = other DNA
ctgcatagactgtcggatcat

SEQ ID NO: 24864 - DNA, 21 bp, synthetic construct
  source 1..21: mol_type = other DNA
tactttaccggcgttatagat

SEQ ID NO: 24865 - DNA, 21 bp, synthetic construct
  source 1..21: mol_type = other DNA
tacttaaagtccgagaggaat

SEQ ID NO: 24866 - DNA, 21 bp, synthetic construct
  source 1..21: mol_type = other DNA
attaacagtactaacgggcgc

SEQ ID NO: 24867 - DNA, 21 bp, synthetic construct
  source 1..21: mol_type = other DNA
tacgtcagatcagacgtcggg

SEQ ID NO: 24868 - DNA, 21 bp, synthetic construct
  source 1..21: mol_type = other DNA
tatttcaccggttatattgat

SEQ ID NO: 24869 - DNA, 21 bp, synthetic construct
  source 1..21: mol_type = other DNA
gagaagaagtttaatccattc

SEQ ID NO: 24870 - DNA, 21 bp, synthetic construct
  source 1..21: mol_type = other DNA
ctctgcagaccgtgtagcgat

SEQ ID NO: 24871 - DNA, 21 bp, synthetic construct
  source 1..21: mol_type = other DNA
tattttacaggtaccatggac

SEQ ID NO: 24872 - DNA, 21 bp, synthetic construct
  source 1..21: mol_type = other DNA
tacttgaagtctcagcaatac

SEQ ID NO: 24873 - DNA, 21 bp, synthetic construct
  source 1..21: mol_type = other DNA
tactttacgggtcatcatgac

SEQ ID NO: 24874 - DNA, 21 bp, synthetic construct
  source 1..21: mol_type = other DNA
tatgcgaaaaacggaatgaat

SEQ ID NO: 24875 - DNA, 21 bp, synthetic construct
  source 1..21: mol_type = other DNA
tatttcacaggaatgattagt

SEQ ID NO: 24876 - DNA, 21 bp, synthetic construct
  source 1..21: mol_type = other DNA
tacttcactggggtaaaggac

SEQ ID NO: 24877 - DNA, 21 bp, synthetic construct
  source 1..21: mol_type = other DNA
tatctcaagtcccaatcctgc

SEQ ID NO: 24878 - DNA, 21 bp, synthetic construct
  source 1..21: mol_type = other DNA
tattggacgggggttgtcgac

SEQ ID NO: 24879 - DNA, 21 bp, synthetic construct
  source 1..21: mol_type = other DNA
taccacaagagcggagacaac

SEQ ID NO: 24880 - DNA, 21 bp, synthetic construct
  source 1..21: mol_type = other DNA
tattatacagggagagtagaa

SEQ ID NO: 24881 - DNA, 21 bp, synthetic construct
  source 1..21: mol_type = other DNA
tgcgcaccggattatagatct

SEQ ID NO: 24882 - DNA, 21 bp, synthetic construct
  source 1..21: mol_type = other DNA
ctcgcccgtaacggcttaaac

SEQ ID NO: 24883 - DNA, 21 bp, synthetic construct
  source 1..21: mol_type = other DNA
gtcatgtccgataggcactgg

SEQ ID NO: 24884 - DNA, 21 bp, synthetic construct
  source 1..21: mol_type = other DNA
aaggatgaattcaaagtctac

SEQ ID NO: 24885 - DNA, 21 bp, synthetic construct
  source 1..21: mol_type = other DNA
ctaagccgcaccggccagaac

SEQ ID NO: 24886 - DNA, 21 bp, synthetic construct
  source 1..21: mol_type = other DNA
tatcatgccaaaggcgaaaac

SEQ ID NO: 24887 - DNA, 21 bp, synthetic construct
  source 1..21: mol_type = other DNA
tactggtcaggagttaaggag

SEQ ID NO: 24888 - DNA, 21 bp, synthetic construct
  source 1..21: mol_type = other DNA
tattcaaaaacagggtcgaat

SEQ ID NO: 24889 - DNA, 21 bp, synthetic construct
  source 1..21: mol_type = other DNA
tactttacgggagttgtaggc

SEQ ID NO: 24890 - DNA, 21 bp, synthetic construct
  source 1..21: mol_type = other DNA
atgaaggacgggacgaacgca

SEQ ID NO: 24891 - DNA, 21 bp, synthetic construct
  source 1..21: mol_type = other DNA
tactataccggcataatcgcc

SEQ ID NO: 24892 - DNA, 21 bp, synthetic construct
  source 1..21: mol_type = other DNA
aaggatgattttgtgacttgg

SEQ ID NO: 24893 - DNA, 21 bp, synthetic construct
  source 1..21: mol_type = other DNA
tatcataggttaagtatcccg

SEQ ID NO: 24894 - DNA, 21 bp, synthetic construct
  source 1..21: mol_type = other DNA
tactcaaaaatgaatctaaac

SEQ ID NO: 24895 - DNA, 21 bp, synthetic construct
  source 1..21: mol_type = other DNA
aaagacgactattccgcgtac

SEQ ID NO: 24896 - DNA, 21 bp, synthetic construct
  source 1..21: mol_type = other DNA
aaagatgattttttgagctgg

SEQ ID NO: 24897 - DNA, 21 bp, synthetic construct
  source 1..21: mol_type = other DNA
aaaagtgaatatagtacgtac

SEQ ID NO: 24898 - DNA, 21 bp, synthetic construct
  source 1..21: mol_type = other DNA
tatctgattagtgatacaaag

SEQ ID NO: 24899 - DNA, 21 bp, synthetic construct
  source 1..21: mol_type = other DNA
agtacttatgacagtttcccg

SEQ ID NO: 24900 - DNA, 21 bp, synthetic construct
  source 1..21: mol_type = other DNA
cttcggactgattgctgtgtc

SEQ ID NO: 24901 - DNA, 21 bp, synthetic construct
  source 1..21: mol_type = other DNA
agggatcagactgtataccca

SEQ ID NO: 24902 - DNA, 21 bp, synthetic construct
  source 1..21: mol_type = other DNA
aaggatgggttttcacattac

SEQ ID NO: 24903 - DNA, 21 bp, synthetic construct
  source 1..21: mol_type = other DNA
ttggcaaagaatgggtttaac

SEQ ID NO: 24904 - DNA, 21 bp, synthetic construct
  source 1..21: mol_type = other DNA
tattggagtggaatacaactt

SEQ ID NO: 24905 - DNA, 21 bp, synthetic construct
  source 1..21: mol_type = other DNA
agaatggaagacagaatttgg

SEQ ID NO: 24906 - DNA, 21 bp, synthetic construct
  source 1..21: mol_type = other DNA
tttagtcggttgaatgacgac

SEQ ID NO: 24907 - DNA, 21 bp, synthetic construct
  source 1..21: mol_type = other DNA
atgagcagattatctcagaac

SEQ ID NO: 24908 - DNA, 21 bp, synthetic construct
  source 1..21: mol_type = other DNA
gctagtagtactaatgggcga

SEQ ID NO: 24909 - DNA, 21 bp, synthetic construct
  source 1..21: mol_type = other DNA
tatttctcaggcgtaattgat

SEQ ID NO: 24910 - DNA, 21 bp, synthetic construct
  source 1..21: mol_type = other DNA
tatttcagtgggcgtaaagaa

SEQ ID NO: 24911 - DNA, 21 bp, synthetic construct
  source 1..21: mol_type = other DNA
agaggaggagacgtttatccg

SEQ ID NO: 24912 - DNA, 21 bp, synthetic construct
  source 1..21: mol_type = other DNA
tcggatgggacatcgaggtgg

SEQ ID NO: 24913 - DNA, 21 bp, synthetic construct
  source 1..21: mol_type = other DNA
agggacgagttcgtgagctac

SEQ ID NO: 24914 - DNA, 21 bp, synthetic construct
  source 1..21: mol_type = other DNA
ggaggagaatatagtaagtgg

SEQ ID NO: 24915 - DNA, 21 bp, synthetic construct
  source 1..21: mol_type = other DNA
ggtgcagagcatgtcaggtgg

SEQ ID NO: 24916 - DNA, 21 bp, synthetic construct
  source 1..21: mol_type = other DNA
gacatgacgagtcgtgactgg

SEQ ID NO: 24917 - DNA, 21 bp, synthetic construct
  source 1..21: mol_type = other DNA
cgggatgagacgagtcactgg

SEQ ID NO: 24918 - DNA, 21 bp, synthetic construct
  source 1..21: mol_type = other DNA
ttggccaaaaccggagctaac

SEQ ID NO: 24919 - DNA, 21 bp, synthetic construct
  source 1..21: mol_type = other DNA
tacttgaaatcccaggactat

SEQ ID NO: 24920 - DNA, 21 bp, synthetic construct
  source 1..21: mol_type = other DNA
tacttctcgggcataccagac

SEQ ID NO: 24921 - DNA, 21 bp, synthetic construct
  source 1..21: mol_type = other DNA
ctccatagggtgggccaaaac

SEQ ID NO: 24922 - DNA, 21 bp, synthetic construct
  source 1..21: mol_type = other DNA
aatagtttggaaggtagaaac

SEQ ID NO: 24923 - DNA, 21 bp, synthetic construct
  source 1..21: mol_type = other DNA
tactggtcaggtgtggtggcc

SEQ ID NO: 24924 - DNA, 21 bp, synthetic construct
  source 1..21: mol_type = other DNA
aatatggctagccgggactgg

SEQ ID NO: 24925 - DNA, 21 bp, synthetic construct
  source 1..21: mol_type = other DNA
gtaccagaatcagtccgatgg

SEQ ID NO: 24926 - DNA, 21 bp, synthetic construct
  source 1..21: mol_type = other DNA
tattttacgggccatccagat

SEQ ID NO: 24927 - DNA, 21 bp, synthetic construct
  source 1..21: mol_type = other DNA
tattcccgactccaaccagat

SEQ ID NO: 24928 - DNA, 21 bp, synthetic construct
  source 1..21: mol_type = other DNA
cgagacgtctcggtgtttcct

SEQ ID NO: 24929 - DNA, 21 bp, synthetic construct
  source 1..21: mol_type = other DNA
tacttcacagggcagagcgac

SEQ ID NO: 24930 - DNA, 21 bp, synthetic construct
  source 1..21: mol_type = other DNA
tatagtcgcgtcggcgggggg

SEQ ID NO: 24931 - DNA, 21 bp, synthetic construct
  source 1..21: mol_type = other DNA
ctcgcccgcatcggttgggac

SEQ ID NO: 24932 - DNA, 21 bp, synthetic construct
  source 1..21: mol_type = other DNA
agaagcgaattcgaaacattc

SEQ ID NO: 24933 - DNA, 21 bp, synthetic construct
  source 1..21: mol_type = other DNA
tacagtagactaggagagaat

SEQ ID NO: 24934 - DNA, 21 bp, synthetic construct
  source 1..21: mol_type = other DNA
aaggatgagttcaaagtttac

SEQ ID NO: 24935 - DNA, 21 bp, synthetic construct
  source 1..21: mol_type = other DNA
ctctcgaggatagctacaaat

SEQ ID NO: 24936 - DNA, 21 bp, synthetic construct
  source 1..21: mol_type = other DNA
tatctgaaatcacagagcttt

SEQ ID NO: 24937 - DNA, 21 bp, synthetic construct
  source 1..21: mol_type = other DNA
tacagccgcaagaacgacaac

SEQ ID NO: 24938 - DNA, 21 bp, synthetic construct
  source 1..21: mol_type = other DNA
tacttgaaatccgacaaaagt

SEQ ID NO: 24939 - DNA, 21 bp, synthetic construct
  source 1..21: mol_type = other DNA
taccacaaactggacattaac

SEQ ID NO: 24940 - DNA, 21 bp, synthetic construct
  source 1..21: mol_type = other DNA
agaacacatgatgtgtaccca

SEQ ID NO: 24941 - DNA, 21 bp, synthetic construct
  source 1..21: mol_type = other DNA
cccaggagtaccaatggtgtt

SEQ ID NO: 24942 - DNA, 21 bp, synthetic construct
  source 1..21: mol_type = other DNA
ctgtcacgtatcagtcacgac

SEQ ID NO: 24943 - DNA, 21 bp, synthetic construct
  source 1..21: mol_type = other DNA
tgcaaacccttagaacgaccg

SEQ ID NO: 24944 - DNA, 21 bp, synthetic construct
  source 1..21: mol_type = other DNA
ctcgcccggacaggcgagaac

SEQ ID NO: 24945 - DNA, 21 bp, synthetic construct
  source 1..21: mol_type = other DNA
agagacggtttctcgtcatac

SEQ ID NO: 24946 - DNA, 21 bp, synthetic construct
  source 1..21: mol_type = other DNA
ttatcaagggtttctgtggat

SEQ ID NO: 24947 - DNA, 21 bp, synthetic construct
  source 1..21: mol_type = other DNA
ggtggagagggaagtttttgg

SEQ ID NO: 24948 - DNA, 21 bp, synthetic construct
  source 1..21: mol_type = other DNA
tattttacaggtatacatgta

SEQ ID NO: 24949 - DNA, 21 bp, synthetic construct
  source 1..21: mol_type = other DNA
tattttgcgggcaagagggag

SEQ ID NO: 24950 - DNA, 21 bp, synthetic construct
  source 1..21: mol_type = other DNA
agagacgagtttaaatcgtgg

SEQ ID NO: 24951 - DNA, 21 bp, synthetic construct
  source 1..21: mol_type = other DNA
tatttcacaggagtgatggac

SEQ ID NO: 24952 - DNA, 21 bp, synthetic construct
  source 1..21: mol_type = other DNA
tatcacgcgaaaggcgtcaat

SEQ ID NO: 24953 - DNA, 21 bp, synthetic construct
  source 1..21: mol_type = other DNA
tgcacgtcattaactggacat

SEQ ID NO: 24954 - DNA, 21 bp, synthetic construct
  source 1..21: mol_type = other DNA
tacagtcgggtcggagagaac

SEQ ID NO: 24955 - DNA, 21 bp, synthetic construct
  source 1..21: mol_type = other DNA
tacgtaaaatctgacccgatg

SEQ ID NO: 24956 - DNA, 21 bp, synthetic construct
  source 1..21: mol_type = other DNA
ctggcccgcggggggccggac

SEQ ID NO: 24957 - DNA, 21 bp, synthetic construct
  source 1..21: mol_type = other DNA
tactttacaggtttcatggag

SEQ ID NO: 24958 - DNA, 21 bp, synthetic construct
  source 1..21: mol_type = other DNA
ctctcaagaattggccgcgac

SEQ ID NO: 24959 - DNA, 21 bp, synthetic construct
  source 1..21: mol_type = other DNA
cgggatgaattcgtaagcttt

SEQ ID NO: 24960 - DNA, 21 bp, synthetic construct
  source 1..21: mol_type = other DNA
tactccaagcagaacctcaac

SEQ ID NO: 24961 - DNA, 21 bp, synthetic construct
  source 1..21: mol_type = other DNA
tgggttaagagtgacacgcat

SEQ ID NO: 24962 - DNA, 21 bp, synthetic construct
  source 1..21: mol_type = other DNA
tacttcacgggcaaaaatgag

SEQ ID NO: 24963 - DNA, 21 bp, synthetic construct
  source 1..21: mol_type = other DNA
tatagcaaagtgggccacgac

SEQ ID NO: 24964 - DNA, 21 bp, synthetic construct
  source 1..21: mol_type = other DNA
ttagaaagcacaaatggggtg

SEQ ID NO: 24965 - DNA, 21 bp, synthetic construct
  source 1..21: mol_type = other DNA
ggttcccctggcgtgagatgg

SEQ ID NO: 24966 - DNA, 21 bp, synthetic construct
  source 1..21: mol_type = other DNA
tggcctcctccagttaattca

SEQ ID NO: 24967 - DNA, 21 bp, synthetic construct
  source 1..21: mol_type = other DNA
ttggagtccacgaatgggata

SEQ ID NO: 24968 - DNA, 21 bp, synthetic construct
  source 1..21: mol_type = other DNA
ttaagtaggatcgcacataac

SEQ ID NO: 24969 - DNA, 21 bp, synthetic construct
  source 1..21: mol_type = other DNA
cgagaggatcacgtattttgg

SEQ ID NO: 24970 - DNA, 21 bp, synthetic construct
  source 1..21: mol_type = other DNA
tttgcaaaaacaggcccaaat

SEQ ID NO: 24971 - DNA, 21 bp, synthetic construct
  source 1..21: mol_type = other DNA
tattggagtggagtacaggag

SEQ ID NO: 24972 - DNA, 21 bp, synthetic construct
  source 1..21: mol_type = other DNA
tattttagtggtgttattcct

SEQ ID NO: 24973 - DNA, 21 bp, synthetic construct
  source 1..21: mol_type = other DNA
tacagcaagatgggcttcaac

SEQ ID NO: 24974 - DNA, 21 bp, synthetic construct
  source 1..21: mol_type = other DNA
caggacgggacatcgaaatgg

SEQ ID NO: 24975 - DNA, 21 bp, synthetic construct
  source 1..21: mol_type = other DNA
acagactcaacgaacggcgtg

SEQ ID NO: 24976 - DNA, 21 bp, synthetic construct
  source 1..21: mol_type = other DNA
ttagccaaaactggaatgaat

SEQ ID NO: 24977 - DNA, 21 bp, synthetic construct
  source 1..21: mol_type = other DNA
ttggcgcgagggggctatgat

SEQ ID NO: 24978 - DNA, 21 bp, synthetic construct
  source 1..21: mol_type = other DNA
aaagacgactatacctcctat

SEQ ID NO: 24979 - DNA, 21 bp, synthetic construct
  source 1..21: mol_type = other DNA
aaggatgactttgtgagttat

SEQ ID NO: 24980 - DNA, 21 bp, synthetic construct
  source 1..21: mol_type = other DNA
agggacgggaccagtatgtgg

SEQ ID NO: 24981 - DNA, 21 bp, synthetic construct
  source 1..21: mol_type = other DNA
tactcgaaaatgggtaaaaat

SEQ ID NO: 24982 - DNA, 21 bp, synthetic construct
  source 1..21: mol_type = other DNA
tactggaccggggtgagtgaa

SEQ ID NO: 24983 - DNA, 21 bp, synthetic construct
  source 1..21: mol_type = other DNA
caaggtgaggcaagaacatgg

SEQ ID NO: 24984 - DNA, 21 bp, synthetic construct
  source 1..21: mol_type = other DNA
tacttcaccggaattaacagt

SEQ ID NO: 24985 - DNA, 21 bp, synthetic construct
  source 1..21: mol_type = other DNA
tactggtcgggaatcaaggat

SEQ ID NO: 24986 - DNA, 21 bp, synthetic construct
  source 1..21: mol_type = other DNA
tgggtaaaatcggatacacac

SEQ ID NO: 24987 - DNA, 21 bp, synthetic construct
  source 1..21: mol_type = other DNA
ggaggcgatggggtcagatgg

SEQ ID NO: 24988 - DNA, 21 bp, synthetic construct
  source 1..21: mol_type = other DNA
cactcccgcctgaatgtggtt

SEQ ID NO: 24989 - DNA, 21 bp, synthetic construct
  source 1..21: mol_type = other DNA
ctaagcaagattggaaacaat

SEQ ID NO: 24990 - DNA, 21 bp, synthetic construct
  source 1..21: mol_type = other DNA
cgttctgagttcagtacatat

SEQ ID NO: 24991 - DNA, 21 bp, synthetic construct
  source 1..21: mol_type = other DNA
ttttctcgagctggtcccaac

SEQ ID NO: 24992 - DNA, 21 bp, synthetic construct
  source 1..21: mol_type = other DNA
tccgatgggaccagtaaatgg

SEQ ID NO: 24993 - DNA, 21 bp, synthetic construct
  source 1..21: mol_type = other DNA
acagagtcgacaaatggcatc

SEQ ID NO: 24994 - DNA, 21 bp, synthetic construct
  source 1..21: mol_type = other DNA
agagagaacactgtgtattgg

SEQ ID NO: 24995 - DNA, 21 bp, synthetic construct
  source 1..21: mol_type = other DNA
ttgtcaaggacaagcacaaat

SEQ ID NO: 24996 - DNA, 21 bp, synthetic construct
  source 1..21: mol_type = other DNA
gtgatgtcggacagggcatgg

SEQ ID NO: 24997 - DNA, 21 bp, synthetic construct
  source 1..21: mol_type = other DNA
ctaagtcgcgccagtgataac

SEQ ID NO: 24998 - DNA, 21 bp, synthetic construct
  source 1..21: mol_type = other DNA
tatgtgaggagcggccccttg

SEQ ID NO: 24999 - DNA, 21 bp, synthetic construct
  source 1..21: mol_type = other DNA
cgtatggaaagcgtcagttgg

SEQ ID NO: 25000 - DNA, 21 bp, synthetic construct
  source 1..21: mol_type = other DNA
ttcttcaccggaaaaattgca

SEQ ID NO: 25001 - DNA, 21 bp, synthetic construct
  source 1..21: mol_type = other DNA
agtgacgggacctcgaaatgg

SEQ ID NO: 25002 - DNA, 21 bp, synthetic construct
  source 1..21: mol_type = other DNA
tatagccggcttgatcccgta

SEQ ID NO: 25003 - DNA, 21 bp, synthetic construct
  source 1..21: mol_type = other DNA
acgacgagtaccaatggcatc

SEQ ID NO: 25004 - DNA, 21 bp, synthetic construct
  source 1..21: mol_type = other DNA
cttatgtcaggcgatggaccc

SEQ ID NO: 25005 - DNA, 21 bp, synthetic construct
  source 1..21: mol_type = other DNA
ctttgcagaccatgcgaagag

SEQ ID NO: 25006 - DNA, 21 bp, synthetic construct
  source 1..21: mol_type = other DNA
tattttgcgggagtcagagaa

SEQ ID NO: 25007 - DNA, 21 bp, synthetic construct
  source 1..21: mol_type = other DNA
tatgtgcgtagcgaccatggg

SEQ ID NO: 25008 - DNA, 21 bp, synthetic construct
  source 1..21: mol_type = other DNA
tacgtacgttctcagaccgac

SEQ ID NO: 25009 - DNA, 21 bp, synthetic construct
  source 1..21: mol_type = other DNA
ttctttacaggcaagattgac

SEQ ID NO: 25010 - DNA, 21 bp, synthetic construct
  source 1..21: mol_type = other DNA
tactttactggcgtcaaaggt

SEQ ID NO: 25011 - DNA, 21 bp, synthetic construct
  source 1..21: mol_type = other DNA
cttatggcagacagaacgtgg

SEQ ID NO: 25012 - DNA, 21 bp, synthetic construct
  source 1..21: mol_type = other DNA
ggaggggaaactagtcattgg

SEQ ID NO: 25013 - DNA, 21 bp, synthetic construct
  source 1..21: mol_type = other DNA
ataaattcgacaaatggtaga

SEQ ID NO: 25014 - DNA, 21 bp, synthetic construct
  source 1..21: mol_type = other DNA
gtttccagtagcaacggacga

SEQ ID NO: 25015 - DNA, 21 bp, synthetic construct
  source 1..21: mol_type = other DNA
tactcaaagacggggatcaat

SEQ ID NO: 25016 - DNA, 21 bp, synthetic construct
  source 1..21: mol_type = other DNA
agaagtgagttcctctcctac

SEQ ID NO: 25017 - DNA, 21 bp, synthetic construct
  source 1..21: mol_type = other DNA
tacttcgcaggcgttaaggaa

SEQ ID NO: 25018 - DNA, 21 bp, synthetic construct
  source 1..21: mol_type = other DNA
tattttgccggagttaaggaa

SEQ ID NO: 25019 - DNA, 21 bp, synthetic construct
  source 1..21: mol_type = other DNA
atcaatggcaggggatgggac

SEQ ID NO: 25020 - DNA, 21 bp, synthetic construct
  source 1..21: mol_type = other DNA
aggacgtacgatagttacccg

SEQ ID NO: 25021 - DNA, 21 bp, synthetic construct
  source 1..21: mol_type = other DNA
gaccttcgtatggctacctgg

SEQ ID NO: 25022 - DNA, 21 bp, synthetic construct
  source 1..21: mol_type = other DNA
cggaatgaatttaccacgtac

SEQ ID NO: 25023 - DNA, 21 bp, synthetic construct
  source 1..21: mol_type = other DNA
tacagtaaacaggggtacaat

SEQ ID NO: 25024 - DNA, 21 bp, synthetic construct
  source 1..21: mol_type = other DNA
tatttctcaggaaaacacgaa

SEQ ID NO: 25025 - DNA, 21 bp, synthetic construct
  source 1..21: mol_type = other DNA
tatttcagcgggatccatgac

SEQ ID NO: 25026 - DNA, 21 bp, synthetic construct
  source 1..21: mol_type = other DNA
tatagcaaacaaaattttaac

SEQ ID NO: 25027 - DNA, 21 bp, synthetic construct
  source 1..21: mol_type = other DNA
gaaatgacaagccatatgtgg

SEQ ID NO: 25028 - DNA, 21 bp, synthetic construct
  source 1..21: mol_type = other DNA
tacgccaagaatggtaacaac

SEQ ID NO: 25029 - DNA, 21 bp, synthetic construct
  source 1..21: mol_type = other DNA
aaggatgagttccgctcattt

SEQ ID NO: 25030 - DNA, 21 bp, synthetic construct
  source 1..21: mol_type = other DNA
tactcaaagatgggacataat

SEQ ID NO: 25031 - DNA, 21 bp, synthetic construct
  source 1..21: mol_type = other DNA
agggaatatgacgcattcccc

SEQ ID NO: 25032 - DNA, 21 bp, synthetic construct
  source 1..21: mol_type = other DNA
agagacgaatttaagtcgtac

SEQ ID NO: 25033 - DNA, 21 bp, synthetic construct
  source 1..21: mol_type = other DNA
tattttagtggtacggtatcc

SEQ ID NO: 25034 - DNA, 21 bp, synthetic construct
  source 1..21: mol_type = other DNA
agaatggacagcgttaaatgg

SEQ ID NO: 25035 - DNA, 21 bp, synthetic construct
  source 1..21: mol_type = other DNA
cgctctgagtttttgccctac

SEQ ID NO: 25036 - DNA, 21 bp, synthetic construct
  source 1..21: mol_type = other DNA
tacttcacggggagacatgaa

SEQ ID NO: 25037 - DNA, 21 bp, synthetic construct
  source 1..21: mol_type = other DNA
ttacacgtccaaggtcccaat

SEQ ID NO: 25038 - DNA, 21 bp, synthetic construct
  source 1..21: mol_type = other DNA
actgacccgtgcaaaccacct

SEQ ID NO: 25039 - DNA, 21 bp, synthetic construct
  source 1..21: mol_type = other DNA
ttagaaagcacgaacggacga

SEQ ID NO: 25040 - DNA, 21 bp, synthetic construct
  source 1..21: mol_type = other DNA
tatagtagagtgtcagaccct

SEQ ID NO: 25041 - DNA, 21 bp, synthetic construct
  source 1..21: mol_type = other DNA
tactccaaacgtaacgagaac

SEQ ID NO: 25042 - DNA, 21 bp, synthetic construct
  source 1..21: mol_type = other DNA
tactttagcggcgtacagcag

SEQ ID NO: 25043 - DNA, 21 bp, synthetic construct
  source 1..21: mol_type = other DNA
tggtggagcggtataagggag

SEQ ID NO: 25044 - DNA, 21 bp, synthetic construct
  source 1..21: mol_type = other DNA
cggacgcacgacgtctatccc

SEQ ID NO: 25045 - DNA, 21 bp, synthetic construct
  source 1..21: mol_type = other DNA
acgagggacgggtgtatggcc

SEQ ID NO: 25046 - DNA, 21 bp, synthetic construct
  source 1..21: mol_type = other DNA
aaagatgatttcgtaagtttc

SEQ ID NO: 25047 - DNA, 21 bp, synthetic construct
  source 1..21: mol_type = other DNA
tactttactggtatagtcgat

SEQ ID NO: 25048 - DNA, 21 bp, synthetic construct
  source 1..21: mol_type = other DNA
aaggacgacttcactggcttc

SEQ ID NO: 25049 - DNA, 21 bp, synthetic construct
  source 1..21: mol_type = other DNA
ccccaaagcactaatggtgtg

SEQ ID NO: 25050 - DNA, 21 bp, synthetic construct
  source 1..21: mol_type = other DNA
cgtgaggacttcactacgtgg

SEQ ID NO: 25051 - DNA, 21 bp, synthetic construct
  source 1..21: mol_type = other DNA
ttgagtagattgcaggagaac

SEQ ID NO: 25052 - DNA, 21 bp, synthetic construct
  source 1..21: mol_type = other DNA
gatctttccagtacctcctgg

SEQ ID NO: 25053 - DNA, 21 bp, synthetic construct
  source 1..21: mol_type = other DNA
tatttcaccggcaaacacgat

SEQ ID NO: 25054 - DNA, 21 bp, synthetic construct
  source 1..21: mol_type = other DNA
tattttagtggggttcaatca

SEQ ID NO: 25055 - DNA, 21 bp, synthetic construct
  source 1..21: mol_type = other DNA
tcaacgtacgattcttttccc

SEQ ID NO: 25056 - DNA, 21 bp, synthetic construct
  source 1..21: mol_type = other DNA
tacttctccaaaattatcgcg

SEQ ID NO: 25057 - DNA, 21 bp, synthetic construct
  source 1..21: mol_type = other DNA
tactccagggttggtggagga

SEQ ID NO: 25058 - DNA, 21 bp, synthetic construct
  source 1..21: mol_type = other DNA
aaaatggaagacagaagctgg

SEQ ID NO: 25059 - DNA, 21 bp, synthetic construct
  source 1..21: mol_type = other DNA
caaatggctgcacatgactgg

SEQ ID NO: 25060 - DNA, 21 bp, synthetic construct
  source 1..21: mol_type = other DNA
taccaccggctttcaattcca

SEQ ID NO: 25061 - DNA, 21 bp, synthetic construct
  source 1..21: mol_type = other DNA
tgtgctccagattatcacgag

SEQ ID NO: 25062 - DNA, 21 bp, synthetic construct
  source 1..21: mol_type = other DNA
tattttcacggcatacaagag

SEQ ID NO: 25063 - DNA, 21 bp, synthetic construct
  source 1..21: mol_type = other DNA
atcttagcggataggaactgg

SEQ ID NO: 25064 - DNA, 21 bp, synthetic construct
  source 1..21: mol_type = other DNA
cggactagtacgcatggtatc

SEQ ID NO: 25065 - DNA, 21 bp, synthetic construct
  source 1..21: mol_type = other DNA
tacagtaggctctcgcccgac

SEQ ID NO: 25066 - DNA, 21 bp, synthetic construct
  source 1..21: mol_type = other DNA
ctgcaccggttatcggatttc

SEQ ID NO: 25067 - DNA, 21 bp, synthetic construct
  source 1..21: mol_type = other DNA
tatttttcgggtgtcaagatg

SEQ ID NO: 25068 - DNA, 21 bp, synthetic construct
  source 1..21: mol_type = other DNA
ttgtgtaagccctgccttgca

SEQ ID NO: 25069 - DNA, 21 bp, synthetic construct
  source 1..21: mol_type = other DNA
cgtagtgagcatacgtaccca

SEQ ID NO: 25070 - DNA, 21 bp, synthetic construct
  source 1..21: mol_type = other DNA
tactcgaagcaaaatgcgaat

SEQ ID NO: 25071 - DNA, 21 bp, synthetic construct
  source 1..21: mol_type = other DNA
tactcccggatagaacctaac

SEQ ID NO: 25072 - DNA, 21 bp, synthetic construct
  source 1..21: mol_type = other DNA
attgagtccactaacgggatt

SEQ ID NO: 25073 - DNA, 21 bp, synthetic construct
  source 1..21: mol_type = other DNA
cgcgatgggagtagtctttgg

SEQ ID NO: 25074 - DNA, 21 bp, synthetic construct
  source 1..21: mol_type = other DNA
tattttgcgggtagaattgcc

SEQ ID NO: 25075 - DNA, 21 bp, synthetic construct
  source 1..21: mol_type = other DNA
tactggtccgggattccggaa

SEQ ID NO: 25076 - DNA, 21 bp, synthetic construct
  source 1..21: mol_type = other DNA
acttcaagtagcaacggagtc

SEQ ID NO: 25077 - DNA, 21 bp, synthetic construct
  source 1..21: mol_type = other DNA
tacgtaaggatcggacccaat

SEQ ID NO: 25078 - DNA, 21 bp, synthetic construct
  source 1..21: mol_type = other DNA
gtaatgtcaagtcagagctgg

SEQ ID NO: 25079 - DNA, 21 bp, synthetic construct
  source 1..21: mol_type = other DNA
tattccaagcaaaacgacaat

SEQ ID NO: 25080 - DNA, 21 bp, synthetic construct
  source 1..21: mol_type = other DNA
actatgtcgacgaatgggata

SEQ ID NO: 25081 - DNA, 21 bp, synthetic construct
  source 1..21: mol_type = other DNA
ggtgaggactacgtaagatgg

SEQ ID NO: 25082 - DNA, 21 bp, synthetic construct
  source 1..21: mol_type = other DNA
tttagtcgattgggtcctaat

SEQ ID NO: 25083 - DNA, 21 bp, synthetic construct
  source 1..21: mol_type = other DNA
taccatgccaacctccccaat

SEQ ID NO: 25084 - DNA, 21 bp, synthetic construct
  source 1..21: mol_type = other DNA
tatgcgaggctaggtccgaac

SEQ ID NO: 25085 - DNA, 21 bp, synthetic construct
  source 1..21: mol_type = other DNA
tatagtaaaacaggatgtaac

SEQ ID NO: 25086 - DNA, 21 bp, synthetic construct
  source 1..21: mol_type = other DNA
tattttactggacacccgaac

SEQ ID NO: 25087 - DNA, 21 bp, synthetic construct
  source 1..21: mol_type = other DNA
agagaagacggcgtcacctgg

SEQ ID NO: 25088 - DNA, 21 bp, synthetic construct
  source 1..21: mol_type = other DNA
accgatagcactaatggcatt

SEQ ID NO: 25089 - DNA, 21 bp, synthetic construct
  source 1..21: mol_type = other DNA
ttgagtaagattggtgccaat

SEQ ID NO: 25090 - DNA, 21 bp, synthetic construct
  source 1..21: mol_type = other DNA
cgtggtatggacgtatatcca

SEQ ID NO: 25091 - DNA, 21 bp, synthetic construct
  source 1..21: mol_type = other DNA
gtgatggagttcaatgcattc

SEQ ID NO: 25092 - DNA, 21 bp, synthetic construct
  source 1..21: mol_type = other DNA
tacgctaaaaacgggtttaac

SEQ ID NO: 25093 - DNA, 21 bp, synthetic construct
  source 1..21: mol_type = other DNA
tggtggagcggggtcatggaa

SEQ ID NO: 25094 - DNA, 21 bp, synthetic construct
  source 1..21: mol_type = other DNA
ggatcagaattcgtgcgatgg

SEQ ID NO: 25095 - DNA, 21 bp, synthetic construct
  source 1..21: mol_type = other DNA
tatttcagcggccgcctggag

SEQ ID NO: 25096 - DNA, 21 bp, synthetic construct
  source 1..21: mol_type = other DNA
tggtttagtggcatactagaa

SEQ ID NO: 25097 - DNA, 21 bp, synthetic construct
  source 1..21: mol_type = other DNA
gtccacagactacaagacaaa

SEQ ID NO: 25098 - DNA, 21 bp, synthetic construct
  source 1..21: mol_type = other DNA
agttcggagtacttggtatat

SEQ ID NO: 25099 - DNA, 21 bp, synthetic construct
  source 1..21: mol_type = other DNA
cgcatggagtcacgcgactgg

SEQ ID NO: 25100 - DNA, 21 bp, synthetic construct
  source 1..21: mol_type = other DNA
tatttcgctggaaaaattagt

SEQ ID NO: 25101 - DNA, 21 bp, synthetic construct
  source 1..21: mol_type = other DNA
cgcctcgaggctgtcacatgg

SEQ ID NO: 25102 - DNA, 21 bp, synthetic construct
  source 1..21: mol_type = other DNA
tggtggtcaggaattcatgaa

SEQ ID NO: 25103 - DNA, 21 bp, synthetic construct
  source 1..21: mol_type = other DNA
ttgttatcgagttcaaactgg

SEQ ID NO: 25104 - DNA, 21 bp, synthetic construct
  source 1..21: mol_type = other DNA
atgcatcgacttctttcggac

SEQ ID NO: 25105 - DNA, 21 bp, synthetic construct
  source 1..21: mol_type = other DNA
acagaatatatgtgtcggccc

SEQ ID NO: 25106 - DNA, 21 bp, synthetic construct
  source 1..21: mol_type = other DNA
atgtcacggcttagtcaaaac

SEQ ID NO: 25107 - DNA, 21 bp, synthetic construct
  source 1..21: mol_type = other DNA
aggacaaatacggtgtaccct

SEQ ID NO: 25108 - DNA, 21 bp, synthetic construct
  source 1..21: mol_type = other DNA
tattcccggataggagagaac

SEQ ID NO: 25109 - DNA, 21 bp, synthetic construct
  source 1..21: mol_type = other DNA
tacttccacggaaaggtagaa

SEQ ID NO: 25110 - DNA, 21 bp, synthetic construct
  source 1..21: mol_type = other DNA
tattcaaggcttaacgaggat

SEQ ID NO: 25111 - DNA, 21 bp, synthetic construct
  source 1..21: mol_type = other DNA
tacttcaccggcaaacccgac

SEQ ID NO: 25112 - DNA, 21 bp, synthetic construct
  source 1..21: mol_type = other DNA
tacttcaccggtgtgcgtgat

SEQ ID NO: 25113 - DNA, 21 bp, synthetic construct
  source 1..21: mol_type = other DNA
tatttcagtggcgttatgtcg

SEQ ID NO: 25114 - DNA, 21 bp, synthetic construct
  source 1..21: mol_type = other DNA
tatttcagcggaaccaaagac

SEQ ID NO: 25115 - DNA, 21 bp, synthetic construct
  source 1..21: mol_type = other DNA
gttgtgtacgatgccttcgta

SEQ ID NO: 25116 - DNA, 21 bp, synthetic construct
  source 1..21: mol_type = other DNA
cgcatggaggatcgcaattgg

SEQ ID NO: 25117 - DNA, 21 bp, synthetic construct
  source 1..21: mol_type = other DNA
tattggtcagccatccctgct

SEQ ID NO: 25118 - DNA, 21 bp, synthetic construct
  source 1..21: mol_type = other DNA
ccgatgggcgatcggaagtgg

SEQ ID NO: 25119 - DNA, 21 bp, synthetic construct
  source 1..21: mol_type = other DNA
tatttcagcggcatacccgca

SEQ ID NO: 25120 - DNA, 21 bp, synthetic construct
  source 1..21: mol_type = other DNA
agaacagtgacggtttatcca

SEQ ID NO: 25121 - DNA, 21 bp, synthetic construct
  source 1..21: mol_type = other DNA
gtcatgagtgatcgtacgtgg

SEQ ID NO: 25122 - DNA, 21 bp, synthetic construct
  source 1..21: mol_type = other DNA
tgtaagccagatagtcgtgta

SEQ ID NO: 25123 - DNA, 21 bp, synthetic construct
  source 1..21: mol_type = other DNA
cgcatggaatcacaaagttgg

SEQ ID NO: 25124 - DNA, 21 bp, synthetic construct
  source 1..21: mol_type = other DNA
ttgcaccgactcggcgactct

SEQ ID NO: 25125 - DNA, 21 bp, synthetic construct
  source 1..21: mol_type = other DNA
tggtcaactcattgctgcgct

SEQ ID NO: 25126 - DNA, 21 bp, synthetic construct
  source 1..21: mol_type = other DNA
aaggaccagtatactatgttc

SEQ ID NO: 25127 - DNA, 21 bp, synthetic construct
  source 1..21: mol_type = other DNA
tatagcaaagcgaacctaaac

SEQ ID NO: 25128 - DNA, 21 bp, synthetic construct
  source 1..21: mol_type = other DNA
atcgcggatcacctaagatgg

SEQ ID NO: 25129 - DNA, 21 bp, synthetic construct
  source 1..21: mol_type = other DNA
ttgcatgtgcgttccttgaat

SEQ ID NO: 25130 - DNA, 21 bp, synthetic construct
  source 1..21: mol_type = other DNA
tattactcaggtatagtagcc

SEQ ID NO: 25131 - DNA, 21 bp, synthetic construct
  source 1..21: mol_type = other DNA
tatttcactgggcaccacgat

SEQ ID NO: 25132 - DNA, 21 bp, synthetic construct
  source 1..21: mol_type = other DNA
cttagcagggtggcgatgaac

SEQ ID NO: 25133 - DNA, 21 bp, synthetic construct
  source 1..21: mol_type = other DNA
tattggagtggaatacacgaa

SEQ ID NO: 25134 - DNA, 21 bp, synthetic construct
  source 1..21: mol_type = other DNA
tatagcaaacataacgtaaac

SEQ ID NO: 25135 - DNA, 21 bp, synthetic construct
  source 1..21: mol_type = other DNA
ttatgtaaaccgtgccataca

SEQ ID NO: 25136 - DNA, 21 bp, synthetic construct
  source 1..21: mol_type = other DNA
agcatggaaagtcatcagtgg

SEQ ID NO: 25137 - DNA, 21 bp, synthetic construct
  source 1..21: mol_type = other DNA
tatcacgcgaatttacctaac

SEQ ID NO: 25138 - DNA, 21 bp, synthetic construct
  source 1..21: mol_type = other DNA
tattttcatggtaaagtggag

SEQ ID NO: 25139 - DNA, 21 bp, synthetic construct
  source 1..21: mol_type = other DNA
agagacggcgtctcgaagtgg

SEQ ID NO: 25140 - DNA, 21 bp, synthetic construct
  source 1..21: mol_type = other DNA
tacgtgaggtctcagatcgga

SEQ ID NO: 25141 - DNA, 21 bp, synthetic construct
  source 1..21: mol_type = other DNA
cgtgaggagtcaaggtcctgg

SEQ ID NO: 25142 - DNA, 21 bp, synthetic construct
  source 1..21: mol_type = other DNA
aggatggagtcgtcagtgtgg

SEQ ID NO: 25143 - DNA, 21 bp, synthetic construct
  source 1..21: mol_type = other DNA
gtgttagaatcacgcgactgg

SEQ ID NO: 25144 - DNA, 21 bp, synthetic construct
  source 1..21: mol_type = other DNA
ttccatcggctctcggtcgac

SEQ ID NO: 25145 - DNA, 21 bp, synthetic construct
  source 1..21: mol_type = other DNA
acctcagaatacaaatactat

SEQ ID NO: 25146 - DNA, 21 bp, synthetic construct
  source 1..21: mol_type = other DNA
tactttaccggtatggtacaa

SEQ ID NO: 25147 - DNA, 21 bp, synthetic construct
  source 1..21: mol_type = other DNA
tactacaccggtcgggtcgag

SEQ ID NO: 25148 - DNA, 21 bp, synthetic construct
  source 1..21: mol_type = other DNA
cgtagtctagactcataccct

SEQ ID NO: 25149 - DNA, 21 bp, synthetic construct
  source 1..21: mol_type = other DNA
tacgcgaagactgcttacaac

SEQ ID NO: 25150 - DNA, 21 bp, synthetic construct
  source 1..21: mol_type = other DNA
agtgcagaatgggtgtcttac

SEQ ID NO: 25151 - DNA, 21 bp, synthetic construct
  source 1..21: mol_type = other DNA
gttatgagtgaccgccattgg

SEQ ID NO: 25152 - DNA, 21 bp, synthetic construct
  source 1..21: mol_type = other DNA
tattttacggggaagctagtt

SEQ ID NO: 25153 - DNA, 21 bp, synthetic construct
  source 1..21: mol_type = other DNA
agaactttcgatgcttttccc

SEQ ID NO: 25154 - DNA, 21 bp, synthetic construct
  source 1..21: mol_type = other DNA
ggtgatggaacgagccgctgg

SEQ ID NO: 25155 - DNA, 21 bp, synthetic construct
  source 1..21: mol_type = other DNA
agaatggaaagtagggactgg

SEQ ID NO: 25156 - DNA, 21 bp, synthetic construct
  source 1..21: mol_type = other DNA
aaggacgattatagccactat

SEQ ID NO: 25157 - DNA, 21 bp, synthetic construct
  source 1..21: mol_type = other DNA
tgcaagtcgtacggatcatcg

SEQ ID NO: 25158 - DNA, 21 bp, synthetic construct
  source 1..21: mol_type = other DNA
tatagccgggcgggggataat

SEQ ID NO: 25159 - DNA, 21 bp, synthetic construct
  source 1..21: mol_type = other DNA
ctgtgcaagccgtgcttcacc

SEQ ID NO: 25160 - DNA, 21 bp, synthetic construct
  source 1..21: mol_type = other DNA
tacttcacggggcagcgtgaa

SEQ ID NO: 25161 - DNA, 21 bp, synthetic construct
  source 1..21: mol_type = other DNA
acaagtacgcactgctgtgct

SEQ ID NO: 25162 - DNA, 21 bp, synthetic construct
  source 1..21: mol_type = other DNA
tacgtcaagtcgcagagctac

SEQ ID NO: 25163 - DNA, 21 bp, synthetic construct
  source 1..21: mol_type = other DNA
agggagggaactagtaaatgg

SEQ ID NO: 25164 - DNA, 21 bp, synthetic construct
  source 1..21: mol_type = other DNA
tattggagtggcattgccgat

SEQ ID NO: 25165 - DNA, 21 bp, synthetic construct
  source 1..21: mol_type = other DNA
tatttcacaggcgtggccgac

SEQ ID NO: 25166 - DNA, 21 bp, synthetic construct
  source 1..21: mol_type = other DNA
tattacactggcaaaaaagaa

SEQ ID NO: 25167 - DNA, 21 bp, synthetic construct
  source 1..21: mol_type = other DNA
tatagccgtgtcggtggaggc

SEQ ID NO: 25168 - DNA, 21 bp, synthetic construct
  source 1..21: mol_type = other DNA
ttttcaagagttgggcctaac

SEQ ID NO: 25169 - DNA, 21 bp, synthetic construct
  source 1..21: mol_type = other DNA
ttttggacaggtgtcaaggag

SEQ ID NO: 25170 - DNA, 21 bp, synthetic construct
  source 1..21: mol_type = other DNA
tacttttcaggggtcatgagc

SEQ ID NO: 25171 - DNA, 21 bp, synthetic construct
  source 1..21: mol_type = other DNA
atgttcgatggtactaatccc

SEQ ID NO: 25172 - DNA, 21 bp, synthetic construct
  source 1..21: mol_type = other DNA
aggcgcacagacgtgtacccc

SEQ ID NO: 25173 - DNA, 21 bp, synthetic construct
  source 1..21: mol_type = other DNA
gtcctccagagtgcgacctgg

SEQ ID NO: 25174 - DNA, 21 bp, synthetic construct
  source 1..21: mol_type = other DNA
agaagtatggacagctatcct

SEQ ID NO: 25175 - DNA, 21 bp, synthetic construct
  source 1..21: mol_type = other DNA
tatagtagggtgggtacgggc

SEQ ID NO: 25176 - DNA, 21 bp, synthetic construct
  source 1..21: mol_type = other DNA
gtagcacgactcggatgggac

SEQ ID NO: 25177 - DNA, 21 bp, synthetic construct
  source 1..21: mol_type = other DNA
gatcttcagtctcgcgagtgg

SEQ ID NO: 25178 - DNA, 21 bp, synthetic construct
  source 1..21: mol_type = other DNA
cgggaggatatggtaaaatgg

SEQ ID NO: 25179 - DNA, 21 bp, synthetic construct
  source 1..21: mol_type = other DNA
agagatgagttcaccagctgg

SEQ ID NO: 25180 - DNA, 21 bp, synthetic construct
  source 1..21: mol_type = other DNA
tatatgaaggatgcctatccc

SEQ ID NO: 25181 - DNA, 21 bp, synthetic construct
  source 1..21: mol_type = other DNA
tactttactggtcaaacagat

SEQ ID NO: 25182 - DNA, 21 bp, synthetic construct
  source 1..21: mol_type = other DNA
gtgggtagcacacacggggta

SEQ ID NO: 25183 - DNA, 21 bp, synthetic construct
  source 1..21: mol_type = other DNA
tactccagagtgtcgcccgac

SEQ ID NO: 25184 - DNA, 21 bp, synthetic construct
  source 1..21: mol_type = other DNA
tataccaaaagcaacacacac

SEQ ID NO: 25185 - DNA, 21 bp, synthetic construct
  source 1..21: mol_type = other DNA
tactggtcaggggtccaagaa

SEQ ID NO: 25186 - DNA, 21 bp, synthetic construct
  source 1..21: mol_type = other DNA
gggggcgagtactccaaatgg

SEQ ID NO: 25187 - DNA, 21 bp, synthetic construct
  source 1..21: mol_type = other DNA
agtgacggtacgtcgaagtgg

SEQ ID NO: 25188 - DNA, 21 bp, synthetic construct
  source 1..21: mol_type = other DNA
atgatggacggaacttccgct

SEQ ID NO: 25189 - DNA, 21 bp, synthetic construct
  source 1..21: mol_type = other DNA
tatagtagactgggggtggga

SEQ ID NO: 25190 - DNA, 21 bp, synthetic construct
  source 1..21: mol_type = other DNA
atccgatccacgaatggagtg

SEQ ID NO: 25191 - DNA, 21 bp, synthetic construct
  source 1..21: mol_type = other DNA
catgagtcaaccaacggaagg

SEQ ID NO: 25192 - DNA, 21 bp, synthetic construct
  source 1..21: mol_type = other DNA
tatagccggttacaatttgac

SEQ ID NO: 25193 - DNA, 21 bp, synthetic construct
  source 1..21: mol_type = other DNA
tacttcacagggacccttgaa

SEQ ID NO: 25194 - DNA, 21 bp, synthetic construct
  source 1..21: mol_type = other DNA
agggatgaatttgtttcgtat

SEQ ID NO: 25195 - DNA, 21 bp, synthetic construct
  source 1..21: mol_type = other DNA
tacactaaaagcgacgtacgg

SEQ ID NO: 25196 - DNA, 21 bp, synthetic construct
  source 1..21: mol_type = other DNA
aaatgcattgaagactgctgt

SEQ ID NO: 25197 - DNA, 21 bp, synthetic construct
  source 1..21: mol_type = other DNA
gacatggtgagtcggagctgg

SEQ ID NO: 25198 - DNA, 21 bp, synthetic construct
  source 1..21: mol_type = other DNA
tacgctagggtgggtccaaac

SEQ ID NO: 25199 - DNA, 21 bp, synthetic construct
  source 1..21: mol_type = other DNA
caggatggtaatagcaggtgg

SEQ ID NO: 25200 - DNA, 21 bp, synthetic construct
  source 1..21: mol_type = other DNA
agggaggagaccgtgtactgg

SEQ ID NO: 25201 - DNA, 21 bp, synthetic construct
  source 1..21: mol_type = other DNA
ttacacaagctaggggatgac

SEQ ID NO: 25202 - DNA, 21 bp, synthetic construct
  source 1..21: mol_type = other DNA
tgtaagcctgggactgggcta

SEQ ID NO: 25203 - DNA, 21 bp, synthetic construct
  source 1..21: mol_type = other DNA
ttccaccgtctttcgccagat

SEQ ID NO: 25204 - DNA, 21 bp, synthetic construct
  source 1..21: mol_type = other DNA
tacttcacgggtcatcccaat

SEQ ID NO: 25205 - DNA, 21 bp, synthetic construct
  source 1..21: mol_type = other DNA
tactataccggtaagatagat

SEQ ID NO: 25206 - DNA, 21 bp, synthetic construct
  source 1..21: mol_type = other DNA
agagatgagtttactcgctgg

SEQ ID NO: 25207 - DNA, 21 bp, synthetic construct
  source 1..21: mol_type = other DNA
cgtagtgagttcaaaacatac

SEQ ID NO: 25208 - DNA, 21 bp, synthetic construct
  source 1..21: mol_type = other DNA
cgtgaagaagacgtatatcct

SEQ ID NO: 25209 - DNA, 21 bp, synthetic construct
  source 1..21: mol_type = other DNA
taccatcgcctcagtgacgat

SEQ ID NO: 25210 - DNA, 21 bp, synthetic construct
  source 1..21: mol_type = other DNA
tattggtcaggggtcagcgag

SEQ ID NO: 25211 - DNA, 21 bp, synthetic construct
  source 1..21: mol_type = other DNA
tactttaccggcaagcatgat

SEQ ID NO: 25212 - DNA, 21 bp, synthetic construct
  source 1..21: mol_type = other DNA
ctcctcgcgtccgctacttgg

SEQ ID NO: 25213 - DNA, 21 bp, synthetic construct
  source 1..21: mol_type = other DNA
tactggaccggcgtgcccgag

SEQ ID NO: 25214 - DNA, 21 bp, synthetic construct
  source 1..21: mol_type = other DNA
atcatggcagagagaacctgg

SEQ ID NO: 25215 - DNA, 21 bp, synthetic construct
  source 1..21: mol_type = other DNA
tatagtagacttagcccaata

SEQ ID NO: 25216 - DNA, 21 bp, synthetic construct
  source 1..21: mol_type = other DNA
ggtggggcggggtcttgctgg

SEQ ID NO: 25217 - DNA, 21 bp, synthetic construct
  source 1..21: mol_type = other DNA
tacttctcaggcgtggttagg

SEQ ID NO: 25218 - DNA, 21 bp, synthetic construct
  source 1..21: mol_type = other DNA
tacagtaaggccaatatgaac

SEQ ID NO: 25219 - DNA, 21 bp, synthetic construct
  source 1..21: mol_type = other DNA
gatatgaccagtagctcgtgg

SEQ ID NO: 25220 - DNA, 21 bp, synthetic construct
  source 1..21: mol_type = other DNA
gtgctgcagtccagtgtgtgg

SEQ ID NO: 25221 - DNA, 21 bp, synthetic construct
  source 1..21: mol_type = other DNA
tttagccgtctcaatgataat

SEQ ID NO: 25222 - DNA, 21 bp, synthetic construct
  source 1..21: mol_type = other DNA
ggtgagaacgttgtacgatgg

SEQ ID NO: 25223 - DNA, 21 bp, synthetic construct
  source 1..21: mol_type = other DNA
gggtcggctactagcagctgg

SEQ ID NO: 25224 - DNA, 21 bp, synthetic construct
  source 1..21: mol_type = other DNA
agaagcgaccacgtgtatccc

SEQ ID NO: 25225 - DNA, 21 bp, synthetic construct
  source 1..21: mol_type = other DNA
tactttagtggtattccgcaa

SEQ ID NO: 25226 - DNA, 21 bp, synthetic construct
  source 1..21: mol_type = other DNA
ggcccagatcatgtcagatgg

SEQ ID NO: 25227 - DNA, 21 bp, synthetic construct
  source 1..21: mol_type = other DNA
tatgatggttcatgtaaggct

SEQ ID NO: 25228 - DNA, 21 bp, synthetic construct
  source 1..21: mol_type = other DNA
tattggacaggtaagatagaa

SEQ ID NO: 25229 - DNA, 21 bp, synthetic construct
  source 1..21: mol_type = other DNA
aggttagagagcacttcctgg

SEQ ID NO: 25230 - DNA, 21 bp, synthetic construct
  source 1..21: mol_type = other DNA
tatttctctaaagtgattgca

SEQ ID NO: 25231 - DNA, 21 bp, synthetic construct
  source 1..21: mol_type = other DNA
ttatgccgcccttgctcgggg

SEQ ID NO: 25232 - DNA, 21 bp, synthetic construct
  source 1..21: mol_type = other DNA
tatttcagtggtgtcgctgcc

SEQ ID NO: 25233 - DNA, 21 bp, synthetic construct
  source 1..21: mol_type = other DNA
tactttacgggagtcagcagt

SEQ ID NO: 25234 - DNA, 21 bp, synthetic construct
  source 1..21: mol_type = other DNA
agactcgaagaccgcaaatgg

SEQ ID NO: 25235 - DNA, 21 bp, synthetic construct
  source 1..21: mol_type = other DNA
tactggagtggagtgtctgaa

SEQ ID NO: 25236 - DNA, 21 bp, synthetic construct
  source 1..21: mol_type = other DNA
ttgcatagactgtcggcaggg

SEQ ID NO: 25237 - DNA, 21 bp, synthetic construct
  source 1..21: mol_type = other DNA
tactggagcggtgtatcagag

SEQ ID NO: 25238 - DNA, 21 bp, synthetic construct
  source 1..21: mol_type = other DNA
tactggagcggagtgtctgaa

SEQ ID NO: 25239 - DNA, 21 bp, synthetic construct
  source 1..21: mol_type = other DNA
tacttttccggcaaacaggaa

SEQ ID NO: 25240 - DNA, 21 bp, synthetic construct
  source 1..21: mol_type = other DNA
tattcccgactccaagacaat

SEQ ID NO: 25241 - DNA, 21 bp, synthetic construct
  source 1..21: mol_type = other DNA
tgcatgaaatcaagagagatt

SEQ ID NO: 25242 - DNA, 21 bp, synthetic construct
  source 1..21: mol_type = other DNA
tacttcagtgggaagcaagag

SEQ ID NO: 25243 - DNA, 21 bp, synthetic construct
  source 1..21: mol_type = other DNA
tattctaaaatgaattacaac

SEQ ID NO: 25244 - DNA, 21 bp, synthetic construct
  source 1..21: mol_type = other DNA
ggggacgggacctcgaggtgg

SEQ ID NO: 25245 - DNA, 21 bp, synthetic construct
  source 1..21: mol_type = other DNA
tacgctaaaggaaatattaac

SEQ ID NO: 25246 - DNA, 21 bp, synthetic construct
  source 1..21: mol_type = other DNA
ggtggaattggcagcaattgg

SEQ ID NO: 25247 - DNA, 21 bp, synthetic construct
  source 1..21: mol_type = other DNA
ttctttacgggagtaagagaa

SEQ ID NO: 25248 - DNA, 21 bp, synthetic construct
  source 1..21: mol_type = other DNA
tatagtaagattaactataac

SEQ ID NO: 25249 - DNA, 21 bp, synthetic construct
  source 1..21: mol_type = other DNA
ctgcgtagcgaatgctgcgta

SEQ ID NO: 25250 - DNA, 21 bp, synthetic construct
  source 1..21: mol_type = other DNA
cgaatggagagccagggatgg

SEQ ID NO: 25251 - DNA, 21 bp, synthetic construct
  source 1..21: mol_type = other DNA
tacgtaaaatcgcaacaatct

SEQ ID NO: 25252 - DNA, 21 bp, synthetic construct
  source 1..21: mol_type = other DNA
tatagtcgtctcaatcctgat

SEQ ID NO: 25253 - DNA, 21 bp, synthetic construct
  source 1..21: mol_type = other DNA
tactctagggtaggaggggga

SEQ ID NO: 25254 - DNA, 21 bp, synthetic construct
  source 1..21: mol_type = other DNA
tactttactggcatccatgat

SEQ ID NO: 25255 - DNA, 21 bp, synthetic construct
  source 1..21: mol_type = other DNA
tgtggcaaaattaagcccgga

SEQ ID NO: 25256 - DNA, 21 bp, synthetic construct
  source 1..21: mol_type = other DNA
agagaggaagccgtatcgtgg

SEQ ID NO: 25257 - DNA, 21 bp, synthetic construct
  source 1..21: mol_type = other DNA
gttgcccacgcaggaatcggc

SEQ ID NO: 25258 - DNA, 21 bp, synthetic construct
  source 1..21: mol_type = other DNA
tatttcaccggagttcagtct

SEQ ID NO: 25259 - DNA, 21 bp, synthetic construct
  source 1..21: mol_type = other DNA
tacgcgaagggcaacatcaac

SEQ ID NO: 25260 - DNA, 21 bp, synthetic construct
  source 1..21: mol_type = other DNA
tatcataggttgagtcctgag

SEQ ID NO: 25261 - DNA, 21 bp, synthetic construct
  source 1..21: mol_type = other DNA
gaaaaaaaattcaaccctttt

SEQ ID NO: 25262 - DNA, 21 bp, synthetic construct
  source 1..21: mol_type = other DNA
ggttccccgggggttcactgg

SEQ ID NO: 25263 - DNA, 21 bp, synthetic construct
  source 1..21: mol_type = other DNA
gtcatggccgaccgagcatgg

SEQ ID NO: 25264 - DNA, 21 bp, synthetic construct
  source 1..21: mol_type = other DNA
tacttttctgggaaaaccgac

SEQ ID NO: 25265 - DNA, 21 bp, synthetic construct
  source 1..21: mol_type = other DNA
tattggaccggggtgattgat

SEQ ID NO: 25266 - DNA, 21 bp, synthetic construct
  source 1..21: mol_type = other DNA
cgctcagatcatgtatatcct

SEQ ID NO: 25267 - DNA, 21 bp, synthetic construct
  source 1..21: mol_type = other DNA
tattggtcaggagtgaaagat

SEQ ID NO: 25268 - DNA, 21 bp, synthetic construct
  source 1..21: mol_type = other DNA
cggaaggacgacgttttcccg

SEQ ID NO: 25269 - DNA, 21 bp, synthetic construct
  source 1..21: mol_type = other DNA
cgcatggagagcatcaagtgg

SEQ ID NO: 25270 - DNA, 21 bp, synthetic construct
  source 1..21: mol_type = other DNA
cgtgactttgacgtttatccc

SEQ ID NO: 25271 - DNA, 21 bp, synthetic construct
  source 1..21: mol_type = other DNA
tactggacaggcatgattgaa

SEQ ID NO: 25272 - DNA, 21 bp, synthetic construct
  source 1..21: mol_type = other DNA
ccgtatgcccggagtgttgag

SEQ ID NO: 25273 - DNA, 21 bp, synthetic construct
  source 1..21: mol_type = other DNA
tggtggagcggggtgggtgct

SEQ ID NO: 25274 - DNA, 21 bp, synthetic construct
  source 1..21: mol_type = other DNA
ctggccaggctaggggcaaac

SEQ ID NO: 25275 - DNA, 21 bp, synthetic construct
  source 1..21: mol_type = other DNA
gacttaagggacagaggttgg

SEQ ID NO: 25276 - DNA, 21 bp, synthetic construct
  source 1..21: mol_type = other DNA
tatttcagcgggcaaaaggac

SEQ ID NO: 25277 - DNA, 21 bp, synthetic construct
  source 1..21: mol_type = other DNA
tacctgaagagccaaacttat

SEQ ID NO: 25278 - DNA, 21 bp, synthetic construct
  source 1..21: mol_type = other DNA
tactggtcggggatagctgac

SEQ ID NO: 25279 - DNA, 21 bp, synthetic construct
  source 1..21: mol_type = other DNA
cgtccagattcggttagatgg

SEQ ID NO: 25280 - DNA, 21 bp, synthetic construct
  source 1..21: mol_type = other DNA
agagaagattacgtcaagtat

SEQ ID NO: 25281 - DNA, 21 bp, synthetic construct
  source 1..21: mol_type = other DNA
tattggacaggggttgttgag

SEQ ID NO: 25282 - DNA, 21 bp, synthetic construct
  source 1..21: mol_type = other DNA
atagatgattatgttcattgg

SEQ ID NO: 25283 - DNA, 21 bp, synthetic construct
  source 1..21: mol_type = other DNA
aacggccctgggtgtccatgg

SEQ ID NO: 25284 - DNA, 21 bp, synthetic construct
  source 1..21: mol_type = other DNA
gatctggaaagtagggagtgg

SEQ ID NO: 25285 - DNA, 21 bp, synthetic construct
  source 1..21: mol_type = other DNA
cgtgacgatttcgtgagcttt

SEQ ID NO: 25286 - DNA, 21 bp, synthetic construct
  source 1..21: mol_type = other DNA
ttgcaccgagttggacagaat

SEQ ID NO: 25287 - DNA, 21 bp, synthetic construct
  source 1..21: mol_type = other DNA
ttccatagacttagtcccaac

SEQ ID NO: 25288 - DNA, 21 bp, synthetic construct
  source 1..21: mol_type = other DNA
tatttcagtggagagaaagaa

SEQ ID NO: 25289 - DNA, 21 bp, synthetic construct
  source 1..21: mol_type = other DNA
tattttactggaaaacgcgaa

SEQ ID NO: 25290 - DNA, 21 bp, synthetic construct
  source 1..21: mol_type = other DNA
gtgcccagtccatgtgatggg

SEQ ID NO: 25291 - DNA, 21 bp, synthetic construct
  source 1..21: mol_type = other DNA
agggccgtcgatgcgtaccca

SEQ ID NO: 25292 - DNA, 21 bp, synthetic construct
  source 1..21: mol_type = other DNA
taccacgctaagggggagaat

SEQ ID NO: 25293 - DNA, 21 bp, synthetic construct
  source 1..21: mol_type = other DNA
cgggacgatttcacagcctac

SEQ ID NO: 25294 - DNA, 21 bp, synthetic construct
  source 1..21: mol_type = other DNA
tatttctcgggcacgaaagag

SEQ ID NO: 25295 - DNA, 21 bp, synthetic construct
  source 1..21: mol_type = other DNA
gtaaatgatttcgtcacctat

SEQ ID NO: 25296 - DNA, 21 bp, synthetic construct
  source 1..21: mol_type = other DNA
agagacgactttgttaagtgg

SEQ ID NO: 25297 - DNA, 21 bp, synthetic construct
  source 1..21: mol_type = other DNA
tggcgcactggtacttgtgcc

SEQ ID NO: 25298 - DNA, 21 bp, synthetic construct
  source 1..21: mol_type = other DNA
tatttttcagggaaagcagag

SEQ ID NO: 25299 - DNA, 21 bp, synthetic construct
  source 1..21: mol_type = other DNA
ccgtatgccagaagtgaaatg

SEQ ID NO: 25300 - DNA, 21 bp, synthetic construct
  source 1..21: mol_type = other DNA
ctaagtaggagctcatataac

SEQ ID NO: 25301 - DNA, 21 bp, synthetic construct
  source 1..21: mol_type = other DNA
gggagtccaggagttcggtgg

SEQ ID NO: 25302 - DNA, 21 bp, synthetic construct
  source 1..21: mol_type = other DNA
gttccggactgggtggaattt

SEQ ID NO: 25303 - DNA, 21 bp, synthetic construct
  source 1..21: mol_type = other DNA
aagagcgactttgtgacgtac

SEQ ID NO: 25304 - DNA, 21 bp, synthetic construct
  source 1..21: mol_type = other DNA
cgtgaagaggaagtctaccct

SEQ ID NO: 25305 - DNA, 21 bp, synthetic construct
  source 1..21: mol_type = other DNA
ttgtgtaggccgtgtcacgag

SEQ ID NO: 25306 - DNA, 21 bp, synthetic construct
  source 1..21: mol_type = other DNA
attagtgagttctcaggatac

SEQ ID NO: 25307 - DNA, 21 bp, synthetic construct
  source 1..21: mol_type = other DNA
cgtgcccttgaaggggcagac

SEQ ID NO: 25308 - DNA, 21 bp, synthetic construct
  source 1..21: mol_type = other DNA
ttagtagacggcttacgctgg

SEQ ID NO: 25309 - DNA, 21 bp, synthetic construct
  source 1..21: mol_type = other DNA
tattttagtggagtgagcgag

SEQ ID NO: 25310 - DNA, 21 bp, synthetic construct
  source 1..21: mol_type = other DNA
tatcttaagtcacagagcctc

SEQ ID NO: 25311 - DNA, 21 bp, synthetic construct
  source 1..21: mol_type = other DNA
tatctgaaatctcaagagtgg

SEQ ID NO: 25312 - DNA, 21 bp, synthetic construct
  source 1..21: mol_type = other DNA
tatgcgaaaactggctgcaat

SEQ ID NO: 25313 - DNA, 21 bp, synthetic construct
  source 1..21: mol_type = other DNA
ctatgccgaccctgtcatgaa

SEQ ID NO: 25314 - DNA, 21 bp, synthetic construct
  source 1..21: mol_type = other DNA
tgcgatggaccatgttgccct

SEQ ID NO: 25315 - DNA, 21 bp, synthetic construct
  source 1..21: mol_type = other DNA
tactttagcggccaattggaa

SEQ ID NO: 25316 - DNA, 21 bp, synthetic construct
  source 1..21: mol_type = other DNA
ttgcaccggctcgcagccaac

SEQ ID NO: 25317 - DNA, 21 bp, synthetic construct
  source 1..21: mol_type = other DNA
cactgccctacgattcccatg

SEQ ID NO: 25318 - DNA, 21 bp, synthetic construct
  source 1..21: mol_type = other DNA
tattccaaggtggggtggaat

SEQ ID NO: 25319 - DNA, 21 bp, synthetic construct
  source 1..21: mol_type = other DNA
agaatggagtcggtgtcgtgg

SEQ ID NO: 25320 - DNA, 21 bp, synthetic construct
  source 1..21: mol_type = other DNA
acgagtgagtataagtattac

SEQ ID NO: 25321 - DNA, 21 bp, synthetic construct
  source 1..21: mol_type = other DNA
agggtagattgcggaagccgg

SEQ ID NO: 25322 - DNA, 21 bp, synthetic construct
  source 1..21: mol_type = other DNA
cgggatatctcagtcttcccg

SEQ ID NO: 25323 - DNA, 21 bp, synthetic construct
  source 1..21: mol_type = other DNA
tattcgaaacagaacgtcaat

SEQ ID NO: 25324 - DNA, 21 bp, synthetic construct
  source 1..21: mol_type = other DNA
agtagaagtactaacgggatt

SEQ ID NO: 25325 - DNA, 21 bp, synthetic construct
  source 1..21: mol_type = other DNA
cgagaggacttcgttaaatac

SEQ ID NO: 25326 - DNA, 21 bp, synthetic construct
  source 1..21: mol_type = other DNA
tactttaccggtaaaaccaac

SEQ ID NO: 25327 - DNA, 21 bp, synthetic construct
  source 1..21: mol_type = other DNA
tatagcaggctgaacatggac

SEQ ID NO: 25328 - DNA, 21 bp, synthetic construct
  source 1..21: mol_type = other DNA
taccatcgcctcggtattgac

SEQ ID NO: 25329 - DNA, 21 bp, synthetic construct
  source 1..21: mol_type = other DNA
tactggtcgggcatacccgaa

SEQ ID NO: 25330 - DNA, 21 bp, synthetic construct
  source 1..21: mol_type = other DNA
ttcagcagactctcagataat

SEQ ID NO: 25331 - DNA, 21 bp, synthetic construct
  source 1..21: mol_type = other DNA
tatttcgcgggaaagatcgcc

SEQ ID NO: 25332 - DNA, 21 bp, synthetic construct
  source 1..21: mol_type = other DNA
tatttcacggggaagacaaat

SEQ ID NO: 25333 - DNA, 21 bp, synthetic construct
  source 1..21: mol_type = other DNA
ttacacaggcttcacgttgac

SEQ ID NO: 25334 - DNA, 21 bp, synthetic construct
  source 1..21: mol_type = other DNA
cggaacgaatttacgacgttt

SEQ ID NO: 25335 - DNA, 21 bp, synthetic construct
  source 1..21: mol_type = other DNA
ctaactagattgcaatcaaat

SEQ ID NO: 25336 - DNA, 21 bp, synthetic construct
  source 1..21: mol_type = other DNA
gacatgcaaagccgtgattgg

SEQ ID NO: 25337 - DNA, 21 bp, synthetic construct
  source 1..21: mol_type = other DNA
tacagccgtttggatcctgtt

SEQ ID NO: 25338 - DNA, 21 bp, synthetic construct
  source 1..21: mol_type = other DNA
caagaagactatgtaacatgg

SEQ ID NO: 25339 - DNA, 21 bp, synthetic construct
  source 1..21: mol_type = other DNA
tacttttcaggtcagaaagat

SEQ ID NO: 25340 - DNA, 21 bp, synthetic construct
  source 1..21: mol_type = other DNA
tatgtgcgaagtgatatgcac

SEQ ID NO: 25341 - DNA, 21 bp, synthetic construct
  source 1..21: mol_type = other DNA
taccatgtagctgacagatgc

SEQ ID NO: 25342 - DNA, 21 bp, synthetic construct
  source 1..21: mol_type = other DNA
gcacccgatagcgtgagatgg

SEQ ID NO: 25343 - DNA, 21 bp, synthetic construct
  source 1..21: mol_type = other DNA
agtcgatcaactaatggagtc

SEQ ID NO: 25344 - DNA, 21 bp, synthetic construct
  source 1..21: mol_type = other DNA
aggatggaggaggtgtaccca

SEQ ID NO: 25345 - DNA, 21 bp, synthetic construct
  source 1..21: mol_type = other DNA
agaagtgagtttcttcccttc

SEQ ID NO: 25346 - DNA, 21 bp, synthetic construct
  source 1..21: mol_type = other DNA
gacctccagagtagcagctgg

SEQ ID NO: 25347 - DNA, 21 bp, synthetic construct
  source 1..21: mol_type = other DNA
aaggacgggtacagtacctac

SEQ ID NO: 25348 - DNA, 21 bp, synthetic construct
  source 1..21: mol_type = other DNA
tactcccgattaggagagaac

SEQ ID NO: 25349 - DNA, 21 bp, synthetic construct
  source 1..21: mol_type = other DNA
tatttcacggggcgaccggat

SEQ ID NO: 25350 - DNA, 21 bp, synthetic construct
  source 1..21: mol_type = other DNA
ctggcaaagcaaggccctaac

SEQ ID NO: 25351 - DNA, 21 bp, synthetic construct
  source 1..21: mol_type = other DNA
ctgcatcgactgtcggagcac

SEQ ID NO: 25352 - DNA, 21 bp, synthetic construct
  source 1..21: mol_type = other DNA
tactggacgggcaaaatcgag

SEQ ID NO: 25353 - DNA, 21 bp, synthetic construct
  source 1..21: mol_type = other DNA
tacacaagattagatcccatg

SEQ ID NO: 25354 - DNA, 21 bp, synthetic construct
  source 1..21: mol_type = other DNA
gtgcagtctaccaatgggcgc

SEQ ID NO: 25355 - DNA, 21 bp, synthetic construct
  source 1..21: mol_type = other DNA
tatttttcaggcgtacgtgag

SEQ ID NO: 25356 - DNA, 21 bp, synthetic construct
  source 1..21: mol_type = other DNA
tggtggaccggggtgtgtgaa

SEQ ID NO: 25357 - DNA, 21 bp, synthetic construct
  source 1..21: mol_type = other DNA
tactggacaggcgtgacagaa

SEQ ID NO: 25358 - DNA, 21 bp, synthetic construct
  source 1..21: mol_type = other DNA
cattcgcgtgtgggtcataat

SEQ ID NO: 25359 - DNA, 21 bp, synthetic construct
  source 1..21: mol_type = other DNA
cttcacaggctgattgctgat

SEQ ID NO: 25360 - DNA, 21 bp, synthetic construct
  source 1..21: mol_type = other DNA
agaaacgagttcacgacatat

SEQ ID NO: 25361 - DNA, 21 bp, synthetic construct
  source 1..21: mol_type = other DNA
aatgacgggatcagcaaatgg

SEQ ID NO: 25362 - DNA, 21 bp, synthetic construct
  source 1..21: mol_type = other DNA
tacgccaagcaagggtataac

SEQ ID NO: 25363 - DNA, 21 bp, synthetic construct
  source 1..21: mol_type = other DNA
tattttagcggcaagaaagac

SEQ ID NO: 25364 - DNA, 21 bp, synthetic construct
  source 1..21: mol_type = other DNA
tattggaccggagttccggaa

SEQ ID NO: 25365 - DNA, 21 bp, synthetic construct
  source 1..21: mol_type = other DNA
tactctcggattggtcccaat

SEQ ID NO: 25366 - DNA, 21 bp, synthetic construct
  source 1..21: mol_type = other DNA
agagacatggatgcttatccg

SEQ ID NO: 25367 - DNA, 21 bp, synthetic construct
  source 1..21: mol_type = other DNA
aggggaggaggactgtttccg

SEQ ID NO: 25368 - DNA, 21 bp, synthetic construct
  source 1..21: mol_type = other DNA
tacttcagcggaatccccgaa

SEQ ID NO: 25369 - DNA, 21 bp, synthetic construct
  source 1..21: mol_type = other DNA
agaagtgattttaagatctac

SEQ ID NO: 25370 - DNA, 21 bp, synthetic construct
  source 1..21: mol_type = other DNA
tatttcactggagttttagaa

SEQ ID NO: 25371 - DNA, 21 bp, synthetic construct
  source 1..21: mol_type = other DNA
tattttgcggggaagcatgat

SEQ ID NO: 25372 - DNA, 21 bp, synthetic construct
  source 1..21: mol_type = other DNA
agaggcgaacatacatacccc

SEQ ID NO: 25373 - DNA, 21 bp, synthetic construct
  source 1..21: mol_type = other DNA
atgcatagacttgctgtgaac

SEQ ID NO: 25374 - DNA, 21 bp, synthetic construct
  source 1..21: mol_type = other DNA
cgatcagaatttacaacttac

SEQ ID NO: 25375 - DNA, 21 bp, synthetic construct
  source 1..21: mol_type = other DNA
tgtgctcccgtctgttgtgaa

SEQ ID NO: 25376 - DNA, 21 bp, synthetic construct
  source 1..21: mol_type = other DNA
atgcatagactgtctaccaac

SEQ ID NO: 25377 - DNA, 21 bp, synthetic construct
  source 1..21: mol_type = other DNA
agaggggacgaggtgtaccca

SEQ ID NO: 25378 - DNA, 21 bp, synthetic construct
  source 1..21: mol_type = other DNA
cgtctaagcagtcagacttgg

SEQ ID NO: 25379 - DNA, 21 bp, synthetic construct
  source 1..21: mol_type = other DNA
tatacgaggttagatccacac

SEQ ID NO: 25380 - DNA, 21 bp, synthetic construct
  source 1..21: mol_type = other DNA
tatagtaaggcaaactccaac

SEQ ID NO: 25381 - DNA, 21 bp, synthetic construct
  source 1..21: mol_type = other DNA
gtgcctgaacattgcaaggat

SEQ ID NO: 25382 - DNA, 21 bp, synthetic construct
  source 1..21: mol_type = other DNA
atggagagtacgaacggtgtc

SEQ ID NO: 25383 - DNA, 21 bp, synthetic construct
  source 1..21: mol_type = other DNA
tactttagcggtgtaatggac

SEQ ID NO: 25384 - DNA, 21 bp, synthetic construct
  source 1..21: mol_type = other DNA
tattggagcgccattaaggaa

SEQ ID NO: 25385 - DNA, 21 bp, synthetic construct
  source 1..21: mol_type = other DNA
gatatggtatcccggtcatgg

SEQ ID NO: 25386 - DNA, 21 bp, synthetic construct
  source 1..21: mol_type = other DNA
tatgattcgacgaacggactc

SEQ ID NO: 25387 - DNA, 21 bp, synthetic construct
  source 1..21: mol_type = other DNA
tattttcacggcaaggtcgca

SEQ ID NO: 25388 - DNA, 21 bp, synthetic construct
  source 1..21: mol_type = other DNA
gtatatagtacaaatggaatc

SEQ ID NO: 25389 - DNA, 21 bp, synthetic construct
  source 1..21: mol_type = other DNA
gatatgcagtctagggactgg

SEQ ID NO: 25390 - DNA, 21 bp, synthetic construct
  source 1..21: mol_type = other DNA
tattttactggccaatcagat

SEQ ID NO: 25391 - DNA, 21 bp, synthetic construct
  source 1..21: mol_type = other DNA
tatagtagattaggtttaaac

SEQ ID NO: 25392 - DNA, 21 bp, synthetic construct
  source 1..21: mol_type = other DNA
ggtgatggcacgagccgttgg

SEQ ID NO: 25393 - DNA, 21 bp, synthetic construct
  source 1..21: mol_type = other DNA
cgcttagaggatcgtagctgg

SEQ ID NO: 25394 - DNA, 21 bp, synthetic construct
  source 1..21: mol_type = other DNA
tacgtgaaaaatgacgctagg

SEQ ID NO: 25395 - DNA, 21 bp, synthetic construct
  source 1..21: mol_type = other DNA
tacagtagacttaacgtgctc

SEQ ID NO: 25396 - DNA, 21 bp, synthetic construct
  source 1..21: mol_type = other DNA
tactttgcaggcaaagtggcg

SEQ ID NO: 25397 - DNA, 21 bp, synthetic construct
  source 1..21: mol_type = other DNA
atgcgaaatacgcattgcgat

SEQ ID NO: 25398 - DNA, 21 bp, synthetic construct
  source 1..21: mol_type = other DNA
cactcaaaactgaatccaatg

SEQ ID NO: 25399 - DNA, 21 bp, synthetic construct
  source 1..21: mol_type = other DNA
gttttaagtactaacggaatc

SEQ ID NO: 25400 - DNA, 21 bp, synthetic construct
  source 1..21: mol_type = other DNA
aggatggaagacagaaactgg

SEQ ID NO: 25401 - DNA, 21 bp, synthetic construct
  source 1..21: mol_type = other DNA
agcatgtcatcctcaacttgg

SEQ ID NO: 25402 - DNA, 21 bp, synthetic construct
  source 1..21: mol_type = other DNA
tattcaaaactagacagcaat

SEQ ID NO: 25403 - DNA, 21 bp, synthetic construct
  source 1..21: mol_type = other DNA
aacacttacgatagttatccc

SEQ ID NO: 25404 - DNA, 21 bp, synthetic construct
  source 1..21: mol_type = other DNA
gtaatgagcacaaacgggcgc

SEQ ID NO: 25405 - DNA, 21 bp, synthetic construct
  source 1..21: mol_type = other DNA
tactcgcgcatacaaccagac

SEQ ID NO: 25406 - DNA, 21 bp, synthetic construct
  source 1..21: mol_type = other DNA
tatacgaagcttaatcctaat

SEQ ID NO: 25407 - DNA, 21 bp, synthetic construct
  source 1..21: mol_type = other DNA
tactttaccggtcgaatcgat

SEQ ID NO: 25408 - DNA, 21 bp, synthetic construct
  source 1..21: mol_type = other DNA
tatttcactggcatgtttgaa

SEQ ID NO: 25409 - DNA, 21 bp, synthetic construct
  source 1..21: mol_type = other DNA
tgcagaggcgagcagaagatg

SEQ ID NO: 25410 - DNA, 21 bp, synthetic construct
  source 1..21: mol_type = other DNA
agtcaaagtacaaacgggata

SEQ ID NO: 25411 - DNA, 21 bp, synthetic construct
  source 1..21: mol_type = other DNA
gttaacagctcgaacggagtg

SEQ ID NO: 25412 - DNA, 21 bp, synthetic construct
  source 1..21: mol_type = other DNA
tacagcaggctacaaaacgac

SEQ ID NO: 25413 - DNA, 21 bp, synthetic construct
  source 1..21: mol_type = other DNA
tcctgtaaatcctcttacaca

SEQ ID NO: 25414 - DNA, 21 bp, synthetic construct
  source 1..21: mol_type = other DNA
ctgtgtcgaccgtgtagtata

SEQ ID NO: 25415 - DNA, 21 bp, synthetic construct
  source 1..21: mol_type = other DNA
tattggagtggaattccggag

SEQ ID NO: 25416 - DNA, 21 bp, synthetic construct
  source 1..21: mol_type = other DNA
tactccaagatcaattacaat

SEQ ID NO: 25417 - DNA, 21 bp, synthetic construct
  source 1..21: mol_type = other DNA
ggcgccgagcatgtacgctgg

SEQ ID NO: 25418 - DNA, 21 bp, synthetic construct
  source 1..21: mol_type = other DNA
tacttttcgggcgaaaaagag

SEQ ID NO: 25419 - DNA, 21 bp, synthetic construct
  source 1..21: mol_type = other DNA
ttgacgaaactatcgaacaat

SEQ ID NO: 25420 - DNA, 21 bp, synthetic construct
  source 1..21: mol_type = other DNA
aaagatgattacgtgtcgtac

SEQ ID NO: 25421 - DNA, 21 bp, synthetic construct
  source 1..21: mol_type = other DNA
tattggagcggtataaaagac

SEQ ID NO: 25422 - DNA, 21 bp, synthetic construct
  source 1..21: mol_type = other DNA
tatctgaaatcgcaatcctgg

SEQ ID NO: 25423 - DNA, 21 bp, synthetic construct
  source 1..21: mol_type = other DNA
tatgagagcacaaacggaaaa

SEQ ID NO: 25424 - DNA, 21 bp, synthetic construct
  source 1..21: mol_type = other DNA
cgcgaggactatgttaaatac

SEQ ID NO: 25425 - DNA, 21 bp, synthetic construct
  source 1..21: mol_type = other DNA
tattttcatggaaaggtagaa

SEQ ID NO: 25426 - DNA, 21 bp, synthetic construct
  source 1..21: mol_type = other DNA
tatagtaaatttggcccgaat

SEQ ID NO: 25427 - DNA, 21 bp, synthetic construct
  source 1..21: mol_type = other DNA
tacactaagagtcaaccttgc

SEQ ID NO: 25428 - DNA, 21 bp, synthetic construct
  source 1..21: mol_type = other DNA
tacacaagactttcacctgat

SEQ ID NO: 25429 - DNA, 21 bp, synthetic construct
  source 1..21: mol_type = other DNA
gtcccgttgaagggttgggat

SEQ ID NO: 25430 - DNA, 21 bp, synthetic construct
  source 1..21: mol_type = other DNA
tacagtaaaatggggatgaat

SEQ ID NO: 25431 - DNA, 21 bp, synthetic construct
  source 1..21: mol_type = other DNA
tacttcaccggtaaaccaaac

SEQ ID NO: 25432 - DNA, 21 bp, synthetic construct
  source 1..21: mol_type = other DNA
tatcatcgtctgggagaggac

SEQ ID NO: 25433 - DNA, 21 bp, synthetic construct
  source 1..21: mol_type = other DNA
tattggagtggaattcaggat

SEQ ID NO: 25434 - DNA, 21 bp, synthetic construct
  source 1..21: mol_type = other DNA
ttacatgctaatggacctaac

SEQ ID NO: 25435 - DNA, 21 bp, synthetic construct
  source 1..21: mol_type = other DNA
ttacatagacaattaccatta

SEQ ID NO: 25436 - DNA, 21 bp, synthetic construct
  source 1..21: mol_type = other DNA
ggtgatggctactcaaagtgg

SEQ ID NO: 25437 - DNA, 21 bp, synthetic construct
  source 1..21: mol_type = other DNA
tattttactggcgtaccctcg

SEQ ID NO: 25438 - DNA, 21 bp, synthetic construct
  source 1..21: mol_type = other DNA
aaaaatgccgaagtataccca

SEQ ID NO: 25439 - DNA, 21 bp, synthetic construct
  source 1..21: mol_type = other DNA
ttacatcgtttgggcgaccac

SEQ ID NO: 25440 - DNA, 21 bp, synthetic construct
  source 1..21: mol_type = other DNA
tactctaaagctaactacaac

SEQ ID NO: 25441 - DNA, 21 bp, synthetic construct
  source 1..21: mol_type = other DNA
tatgtaaaaagtcaatcctac

SEQ ID NO: 25442 - DNA, 21 bp, synthetic construct
  source 1..21: mol_type = other DNA
tactctagacttggatacaac

SEQ ID NO: 25443 - DNA, 21 bp, synthetic construct
  source 1..21: mol_type = other DNA
tcgggcgaatctcgactctgg

SEQ ID NO: 25444 - DNA, 21 bp, synthetic construct
  source 1..21: mol_type = other DNA
gtggatgagtggaagacctac

SEQ ID NO: 25445 - DNA, 21 bp, synthetic construct
  source 1..21: mol_type = other DNA
tacttttccggtcgtttagag

SEQ ID NO: 25446 - DNA, 21 bp, synthetic construct
  source 1..21: mol_type = other DNA
tggaccgacatgtgtaaagct

SEQ ID NO: 25447 - DNA, 21 bp, synthetic construct
  source 1..21: mol_type = other DNA
tactttagcggcataccagtc

SEQ ID NO: 25448 - DNA, 21 bp, synthetic construct
  source 1..21: mol_type = other DNA
atgagagatggtaccaatgca

SEQ ID NO: 25449 - DNA, 21 bp, synthetic construct
  source 1..21: mol_type = other DNA
attagaagtacaaacggggtg

SEQ ID NO: 25450 - DNA, 21 bp, synthetic construct
  source 1..21: mol_type = other DNA
cgagaagattttgtgcgctgg

SEQ ID NO: 25451 - DNA, 21 bp, synthetic construct
  source 1..21: mol_type = other DNA
ggggtcaacggttgcaagccc

SEQ ID NO: 25452 - DNA, 21 bp, synthetic construct
  source 1..21: mol_type = other DNA
tactttagtggtaccgtggac

SEQ ID NO: 25453 - DNA, 21 bp, synthetic construct
  source 1..21: mol_type = other DNA
ctatctaaactcggccataat

SEQ ID NO: 25454 - DNA, 21 bp, synthetic construct
  source 1..21: mol_type = other DNA
ggagacgaatggattccttat

SEQ ID NO: 25455 - DNA, 21 bp, synthetic construct
  source 1..21: mol_type = other DNA
tattttacaggacgtcatgag

SEQ ID NO: 25456 - DNA, 21 bp, synthetic construct
  source 1..21: mol_type = other DNA
ctggccaggatggggtacaat

SEQ ID NO: 25457 - DNA, 21 bp, synthetic construct
  source 1..21: mol_type = other DNA
tatgtacgaagccaaataggg

SEQ ID NO: 25458 - DNA, 21 bp, synthetic construct
  source 1..21: mol_type = other DNA
tacttcagcgggaaaatggat

SEQ ID NO: 25459 - DNA, 21 bp, synthetic construct
  source 1..21: mol_type = other DNA
cgagatggcgtatcgaagtgg

SEQ ID NO: 25460 - DNA, 21 bp, synthetic construct
  source 1..21: mol_type = other DNA
agggacgagttcaagtcgttc

SEQ ID NO: 25461 - DNA, 21 bp, synthetic construct
  source 1..21: mol_type = other DNA
tacttcaccggacacacggac

SEQ ID NO: 25462 - DNA, 21 bp, synthetic construct
  source 1..21: mol_type = other DNA
aaagacgagtttaaagtatat

SEQ ID NO: 25463 - DNA, 21 bp, synthetic construct
  source 1..21: mol_type = other DNA
ttatgtaaaccttgtattacg

SEQ ID NO: 25464 - DNA, 21 bp, synthetic construct
  source 1..21: mol_type = other DNA
tatctcaagtcgcaactttat

SEQ ID NO: 25465 - DNA, 21 bp, synthetic construct
  source 1..21: mol_type = other DNA
tacttttcgggcacaaaggat

SEQ ID NO: 25466 - DNA, 21 bp, synthetic construct
  source 1..21: mol_type = other DNA
cgagaagatttcaccacttgg

SEQ ID NO: 25467 - DNA, 21 bp, synthetic construct
  source 1..21: mol_type = other DNA
cgcacaattgatagttacgcg

SEQ ID NO: 25468 - DNA, 21 bp, synthetic construct
  source 1..21: mol_type = other DNA
tttttcacaggtgtccgagaa

SEQ ID NO: 25469 - DNA, 21 bp, synthetic construct
  source 1..21: mol_type = other DNA
cgacgtaccgatgtgtacccc

SEQ ID NO: 25470 - DNA, 21 bp, synthetic construct
  source 1..21: mol_type = other DNA
gttcctttgcgtggcatcggc

SEQ ID NO: 25471 - DNA, 21 bp, synthetic construct
  source 1..21: mol_type = other DNA
aatacaagcactaacggcgta

SEQ ID NO: 25472 - DNA, 21 bp, synthetic construct
  source 1..21: mol_type = other DNA
tatgtacgttccgacagcatg

SEQ ID NO: 25473 - DNA, 21 bp, synthetic construct
  source 1..21: mol_type = other DNA
tactttactggagagagggag

SEQ ID NO: 25474 - DNA, 21 bp, synthetic construct
  source 1..21: mol_type = other DNA
tatcatagactgggccaggac

SEQ ID NO: 25475 - DNA, 21 bp, synthetic construct
  source 1..21: mol_type = other DNA
cgtaccgaatttacgacgtac

SEQ ID NO: 25476 - DNA, 21 bp, synthetic construct
  source 1..21: mol_type = other DNA
tatagcagagtcgggataaac

SEQ ID NO: 25477 - DNA, 21 bp, synthetic construct
  source 1..21: mol_type = other DNA
tattttgctggagtcagggcc

SEQ ID NO: 25478 - DNA, 21 bp, synthetic construct
  source 1..21: mol_type = other DNA
gctatggcggatagacagtgg

SEQ ID NO: 25479 - DNA, 21 bp, synthetic construct
  source 1..21: mol_type = other DNA
aaggatgattggactccattc

SEQ ID NO: 25480 - DNA, 21 bp, synthetic construct
  source 1..21: mol_type = other DNA
tacttcgccggggtcaaaagt

SEQ ID NO: 25481 - DNA, 21 bp, synthetic construct
  source 1..21: mol_type = other DNA
gggggcgagtcaagcacatgg

SEQ ID NO: 25482 - DNA, 21 bp, synthetic construct
  source 1..21: mol_type = other DNA
tttgaaagtgataacggcgtt

SEQ ID NO: 25483 - DNA, 21 bp, synthetic construct
  source 1..21: mol_type = other DNA
cgtgatatggacgcataccca

SEQ ID NO: 25484 - DNA, 21 bp, synthetic construct
  source 1..21: mol_type = other DNA
tggtggtcgggaactaaagaa

SEQ ID NO: 25485 - DNA, 21 bp, synthetic construct
  source 1..21: mol_type = other DNA
tattttgctggcaagcgtgat

SEQ ID NO: 25486 - DNA, 21 bp, synthetic construct
  source 1..21: mol_type = other DNA
gagacttcgacgaacggacgc

SEQ ID NO: 25487 - DNA, 21 bp, synthetic construct
  source 1..21: mol_type = other DNA
cgcgtcatggatgcttatgcc

SEQ ID NO: 25488 - DNA, 21 bp, synthetic construct
  source 1..21: mol_type = other DNA
tatagtaggttacagttcaac

SEQ ID NO: 25489 - DNA, 21 bp, synthetic construct
  source 1..21: mol_type = other DNA
tatagcaagcagggggcaaac

SEQ ID NO: 25490 - DNA, 21 bp, synthetic construct
  source 1..21: mol_type = other DNA
tactatacaggggtgagggaa

SEQ ID NO: 25491 - DNA, 21 bp, synthetic construct
  source 1..21: mol_type = other DNA
tatactcgcatcggcatgaat

SEQ ID NO: 25492 - DNA, 21 bp, synthetic construct
  source 1..21: mol_type = other DNA
tattttacgggctttgtcgaa

SEQ ID NO: 25493 - DNA, 21 bp, synthetic construct
  source 1..21: mol_type = other DNA
tactctcgtctcgcacctgat

SEQ ID NO: 25494 - DNA, 21 bp, synthetic construct
  source 1..21: mol_type = other DNA
taccacaggttagatccagac

SEQ ID NO: 25495 - DNA, 21 bp, synthetic construct
  source 1..21: mol_type = other DNA
gagatgcaaagcagggcatgg

SEQ ID NO: 25496 - DNA, 21 bp, synthetic construct
  source 1..21: mol_type = other DNA
atgcatagacttggttacgat

SEQ ID NO: 25497 - DNA, 21 bp, synthetic construct
  source 1..21: mol_type = other DNA
tatttcaccggtgaattcgag

SEQ ID NO: 25498 - DNA, 21 bp, synthetic construct
  source 1..21: mol_type = other DNA
aaagatgactactcacattat

SEQ ID NO: 25499 - DNA, 21 bp, synthetic construct
  source 1..21: mol_type = other DNA
tattttcatggtcaaatcgaa

SEQ ID NO: 25500 - DNA, 21 bp, synthetic construct
  source 1..21: mol_type = other DNA
tacttccagggtaaaatagat

SEQ ID NO: 25501 - DNA, 21 bp, synthetic construct
  source 1..21: mol_type = other DNA
tacttttcaggtataatgcaa

SEQ ID NO: 25502 - DNA, 21 bp, synthetic construct
  source 1..21: mol_type = other DNA
tattttagtggccagcatgaa

SEQ ID NO: 25503 - DNA, 21 bp, synthetic construct
  source 1..21: mol_type = other DNA
cttctaagctcgcatgactgg

SEQ ID NO: 25504 - DNA, 21 bp, synthetic construct
  source 1..21: mol_type = other DNA
tatagcaagatcggtggtaac

SEQ ID NO: 25505 - DNA, 21 bp, synthetic construct
  source 1..21: mol_type = other DNA
agagaagacatggtcaagtgg

SEQ ID NO: 25506 - DNA, 21 bp, synthetic construct
  source 1..21: mol_type = other DNA
aggtcggaatttctcccctat

SEQ ID NO: 25507 - DNA, 21 bp, synthetic construct
  source 1..21: mol_type = other DNA
tactcaaagaggaacgataac

SEQ ID NO: 25508 - DNA, 21 bp, synthetic construct
  source 1..21: mol_type = other DNA
tactcaaggcttggtgcggat

SEQ ID NO: 25509 - DNA, 21 bp, synthetic construct
  source 1..21: mol_type = other DNA
tactctaagacgggctgcaat

SEQ ID NO: 25510 - DNA, 21 bp, synthetic construct
  source 1..21: mol_type = other DNA
tatgcccgtgctggccccaat

SEQ ID NO: 25511 - DNA, 21 bp, synthetic construct
  source 1..21: mol_type = other DNA
caaggcgagtcgaggctttgg

SEQ ID NO: 25512 - DNA, 21 bp, synthetic construct
  source 1..21: mol_type = other DNA
tattggactggagtctccgag

SEQ ID NO: 25513 - DNA, 21 bp, synthetic construct
  source 1..21: mol_type = other DNA
ttcgcgaggtccggtccgaat

SEQ ID NO: 25514 - DNA, 21 bp, synthetic construct
  source 1..21: mol_type = other DNA
tactcaaagatgaactataac

SEQ ID NO: 25515 - DNA, 21 bp, synthetic construct
  source 1..21: mol_type = other DNA
atagcacgcgaaggatgggac

SEQ ID NO: 25516 - DNA, 21 bp, synthetic construct
  source 1..21: mol_type = other DNA
tactcccgccttggaatggga

SEQ ID NO: 25517 - DNA, 21 bp, synthetic construct
  source 1..21: mol_type = other DNA
cgggacttcgacgcgtacccg

SEQ ID NO: 25518 - DNA, 21 bp, synthetic construct
  source 1..21: mol_type = other DNA
ttgcaccgcttaagcgaacat

SEQ ID NO: 25519 - DNA, 21 bp, synthetic construct
  source 1..21: mol_type = other DNA
ctctcgaaagcaggttttaac

SEQ ID NO: 25520 - DNA, 21 bp, synthetic construct
  source 1..21: mol_type = other DNA
catatggcagaccgcgggtgg

SEQ ID NO: 25521 - DNA, 21 bp, synthetic construct
  source 1..21: mol_type = other DNA
tatgtacgttcgcaattgaat

SEQ ID NO: 25522 - DNA, 21 bp, synthetic construct
  source 1..21: mol_type = other DNA
ctgcacagattatcctacgac

SEQ ID NO: 25523 - DNA, 21 bp, synthetic construct
  source 1..21: mol_type = other DNA
tattttacgggtgagagggat

SEQ ID NO: 25524 - DNA, 21 bp, synthetic construct
  source 1..21: mol_type = other DNA
cgggaggaagtggtcagatgg

SEQ ID NO: 25525 - DNA, 21 bp, synthetic construct
  source 1..21: mol_type = other DNA
tacttcacaggcgtcgccaaa

SEQ ID NO: 25526 - DNA, 21 bp, synthetic construct
  source 1..21: mol_type = other DNA
ctgtgtaggccttgtgtggaa

SEQ ID NO: 25527 - DNA, 21 bp, synthetic construct
  source 1..21: mol_type = other DNA
cgcgacgacttcagcgggtgg

SEQ ID NO: 25528 - DNA, 21 bp, synthetic construct
  source 1..21: mol_type = other DNA
tcaccaaatgggtgcaacggt

SEQ ID NO: 25529 - DNA, 21 bp, synthetic construct
  source 1..21: mol_type = other DNA
tacgtaaagagccaaatgagc

SEQ ID NO: 25530 - DNA, 21 bp, synthetic construct
  source 1..21: mol_type = other DNA
tatactcgcctcgacccgatg

SEQ ID NO: 25531 - DNA, 21 bp, synthetic construct
  source 1..21: mol_type = other DNA
gttttcagtacaaatggtgtc

SEQ ID NO: 25532 - DNA, 21 bp, synthetic construct
  source 1..21: mol_type = other DNA
cacacgtctactaatgggatt

SEQ ID NO: 25533 - DNA, 21 bp, synthetic construct
  source 1..21: mol_type = other DNA
ttccacaagaaagggccggat

SEQ ID NO: 25534 - DNA, 21 bp, synthetic construct
  source 1..21: mol_type = other DNA
tacttcactgggcggattgac

SEQ ID NO: 25535 - DNA, 21 bp, synthetic construct
  source 1..21: mol_type = other DNA
gtactcagttcgcaaggatgg

SEQ ID NO: 25536 - DNA, 21 bp, synthetic construct
  source 1..21: mol_type = other DNA
cttaaagacggaaccggacct

SEQ ID NO: 25537 - DNA, 21 bp, synthetic construct
  source 1..21: mol_type = other DNA
agaacccctttagtatttccg

SEQ ID NO: 25538 - DNA, 21 bp, synthetic construct
  source 1..21: mol_type = other DNA
gtacacgactatatgagttac

SEQ ID NO: 25539 - DNA, 21 bp, synthetic construct
  source 1..21: mol_type = other DNA
aggagcgagtttaaaacgtac

SEQ ID NO: 25540 - DNA, 21 bp, synthetic construct
  source 1..21: mol_type = other DNA
ctacaccgcctacacacctct

SEQ ID NO: 25541 - DNA, 21 bp, synthetic construct
  source 1..21: mol_type = other DNA
tattttcatgggaagattgat

SEQ ID NO: 25542 - DNA, 21 bp, synthetic construct
  source 1..21: mol_type = other DNA
tattcacgggtccaaccagac

SEQ ID NO: 25543 - DNA, 21 bp, synthetic construct
  source 1..21: mol_type = other DNA
tacttcactggccagttagca

SEQ ID NO: 25544 - DNA, 21 bp, synthetic construct
  source 1..21: mol_type = other DNA
gggggcccagggagtcactgg

SEQ ID NO: 25545 - DNA, 21 bp, synthetic construct
  source 1..21: mol_type = other DNA
tatttcgcgggcaagcgtgaa

SEQ ID NO: 25546 - DNA, 21 bp, synthetic construct
  source 1..21: mol_type = other DNA
tatttcagcggggaaaaggaa

SEQ ID NO: 25547 - DNA, 21 bp, synthetic construct
  source 1..21: mol_type = other DNA
ttttcccggattggagccaac

SEQ ID NO: 25548 - DNA, 21 bp, synthetic construct
  source 1..21: mol_type = other DNA
tacttttcacgtgtgattgaa

SEQ ID NO: 25549 - DNA, 21 bp, synthetic construct
  source 1..21: mol_type = other DNA
tacgtcaggtctgatcacggc

SEQ ID NO: 25550 - DNA, 21 bp, synthetic construct
  source 1..21: mol_type = other DNA
tattacagtggtattcaagcg

SEQ ID NO: 25551 - DNA, 21 bp, synthetic construct
  source 1..21: mol_type = other DNA
gcccccgaaacggttagatgg

SEQ ID NO: 25552 - DNA, 21 bp, synthetic construct
  source 1..21: mol_type = other DNA
tgtcgggagggcaccgtaagg

SEQ ID NO: 25553 - DNA, 21 bp, synthetic construct
  source 1..21: mol_type = other DNA
ttagaagattgggttaagtat

SEQ ID NO: 25554 - DNA, 21 bp, synthetic construct
  source 1..21: mol_type = other DNA
attaatagtcgtgaaggcata

SEQ ID NO: 25555 - DNA, 21 bp, synthetic construct
  source 1..21: mol_type = other DNA
ctgcatagattgcatgtcgat

SEQ ID NO: 25556 - DNA, 21 bp, synthetic construct
  source 1..21: mol_type = other DNA
atgcatcggctggccgtaaat

SEQ ID NO: 25557 - DNA, 21 bp, synthetic construct
  source 1..21: mol_type = other DNA
tgcacgtcgaagggaggtcac

SEQ ID NO: 25558 - DNA, 21 bp, synthetic construct
  source 1..21: mol_type = other DNA
gtaatgtttgacgcctacccc

SEQ ID NO: 25559 - DNA, 21 bp, synthetic construct
  source 1..21: mol_type = other DNA
ctccatcgcttgcaagaatac

SEQ ID NO: 25560 - DNA, 21 bp, synthetic construct
  source 1..21: mol_type = other DNA
tatagcaagtcgggaataaat

SEQ ID NO: 25561 - DNA, 21 bp, synthetic construct
  source 1..21: mol_type = other DNA
tactcgaaggtagggcatgat

SEQ ID NO: 25562 - DNA, 21 bp, synthetic construct
  source 1..21: mol_type = other DNA
tactggaccggcaagatcgag

SEQ ID NO: 25563 - DNA, 21 bp, synthetic construct
  source 1..21: mol_type = other DNA
cggagtgaattcatgacgtat

SEQ ID NO: 25564 - DNA, 21 bp, synthetic construct
  source 1..21: mol_type = other DNA
gttgaaagtacgaatggttgg

SEQ ID NO: 25565 - DNA, 21 bp, synthetic construct
  source 1..21: mol_type = other DNA
tacttcacaggacaccttgag

SEQ ID NO: 25566 - DNA, 21 bp, synthetic construct
  source 1..21: mol_type = other DNA
aagaatgatgggaacccctgg

SEQ ID NO: 25567 - DNA, 21 bp, synthetic construct
  source 1..21: mol_type = other DNA
ttttcacggaccgggcctaac

SEQ ID NO: 25568 - DNA, 21 bp, synthetic construct
  source 1..21: mol_type = other DNA
tttttcactggtaaaatagat

SEQ ID NO: 25569 - DNA, 21 bp, synthetic construct
  source 1..21: mol_type = other DNA
tatgctaaaacagcctataat

SEQ ID NO: 25570 - DNA, 21 bp, synthetic construct
  source 1..21: mol_type = other DNA
ctcgccagagggggctacgac

SEQ ID NO: 25571 - DNA, 21 bp, synthetic construct
  source 1..21: mol_type = other DNA
tacgcacggggcgggccgaat

SEQ ID NO: 25572 - DNA, 21 bp, synthetic construct
  source 1..21: mol_type = other DNA
tgtgccccgtatcagcatgaa

SEQ ID NO: 25573 - DNA, 21 bp, synthetic construct
  source 1..21: mol_type = other DNA
tattggtctggagtggccgct

SEQ ID NO: 25574 - DNA, 21 bp, synthetic construct
  source 1..21: mol_type = other DNA
tactttaccggccgccacgaa

SEQ ID NO: 25575 - DNA, 21 bp, synthetic construct
  source 1..21: mol_type = other DNA
acaaaatggggagatgccgca

SEQ ID NO: 25576 - DNA, 21 bp, synthetic construct
  source 1..21: mol_type = other DNA
ctaagtaggttaaatcataac

SEQ ID NO: 25577 - DNA, 21 bp, synthetic construct
  source 1..21: mol_type = other DNA
gtctactccaccaatggtgtg

SEQ ID NO: 25578 - DNA, 21 bp, synthetic construct
  source 1..21: mol_type = other DNA
ttatctagaaccgcttttgac

SEQ ID NO: 25579 - DNA, 21 bp, synthetic construct
  source 1..21: mol_type = other DNA
tattttaccggaactcactcg

SEQ ID NO: 25580 - DNA, 21 bp, synthetic construct
  source 1..21: mol_type = other DNA
tacagtaaatcgggcacgaat

SEQ ID NO: 25581 - DNA, 21 bp, synthetic construct
  source 1..21: mol_type = other DNA
tatgtccgatcggatgtgaaa

SEQ ID NO: 25582 - DNA, 21 bp, synthetic construct
  source 1..21: mol_type = other DNA
tacgcaaagtccggatgcaac

SEQ ID NO: 25583 - DNA, 21 bp, synthetic construct
  source 1..21: mol_type = other DNA
agagaagattatgtttacccg

SEQ ID NO: 25584 - DNA, 21 bp, synthetic construct
  source 1..21: mol_type = other DNA
tacttcagcggtgttataggc

SEQ ID NO: 25585 - DNA, 21 bp, synthetic construct
  source 1..21: mol_type = other DNA
ataatgtcaagtaaactttgg

SEQ ID NO: 25586 - DNA, 21 bp, synthetic construct
  source 1..21: mol_type = other DNA
tattgggcaggtaaacttgag

SEQ ID NO: 25587 - DNA, 21 bp, synthetic construct
  source 1..21: mol_type = other DNA
tacttcagtggtaaggcggaa

SEQ ID NO: 25588 - DNA, 21 bp, synthetic construct
  source 1..21: mol_type = other DNA
aagaacgcggaggtttatccc

SEQ ID NO: 25589 - DNA, 21 bp, synthetic construct
  source 1..21: mol_type = other DNA
cgcttggaggatcggaagtgg

SEQ ID NO: 25590 - DNA, 21 bp, synthetic construct
  source 1..21: mol_type = other DNA
agggcctccgatgtttatcct

SEQ ID NO: 25591 - DNA, 21 bp, synthetic construct
  source 1..21: mol_type = other DNA
tacttaatttcagatacgaaa

SEQ ID NO: 25592 - DNA, 21 bp, synthetic construct
  source 1..21: mol_type = other DNA
ctcagtcgcgtgagcgtagat

SEQ ID NO: 25593 - DNA, 21 bp, synthetic construct
  source 1..21: mol_type = other DNA
cgaacgaacacagtctatccc

SEQ ID NO: 25594 - DNA, 21 bp, synthetic construct
  source 1..21: mol_type = other DNA
aaggacgattattctacctac

SEQ ID NO: 25595 - DNA, 21 bp, synthetic construct
  source 1..21: mol_type = other DNA
tactacagtgggattgtgtca

SEQ ID NO: 25596 - DNA, 21 bp, synthetic construct
  source 1..21: mol_type = other DNA
tgcaagcccatatgctgtgag

SEQ ID NO: 25597 - DNA, 21 bp, synthetic construct
  source 1..21: mol_type = other DNA
atgatggatggcaccagtgca

SEQ ID NO: 25598 - DNA, 21 bp, synthetic construct
  source 1..21: mol_type = other DNA
gtagcccacgcgggagcaggt

SEQ ID NO: 25599 - DNA, 21 bp, synthetic construct
  source 1..21: mol_type = other DNA
tatttcaccggcattcccgac

SEQ ID NO: 25600 - DNA, 21 bp, synthetic construct
  source 1..21: mol_type = other DNA
tgcgtgaagaccgatcgaaat

SEQ ID NO: 25601 - DNA, 21 bp, synthetic construct
  source 1..21: mol_type = other DNA
gtctggagtaccaacggcatc

SEQ ID NO: 25602 - DNA, 21 bp, synthetic construct
  source 1..21: mol_type = other DNA
cgtagtcatgatgcgtttccg

SEQ ID NO: 25603 - DNA, 21 bp, synthetic construct
  source 1..21: mol_type = other DNA
actgacgaatggtccccatac

SEQ ID NO: 25604 - DNA, 21 bp, synthetic construct
  source 1..21: mol_type = other DNA
tacttccacggcaaagttgag

SEQ ID NO: 25605 - DNA, 21 bp, synthetic construct
  source 1..21: mol_type = other DNA
tatgtaaggagcgatgtgggc

SEQ ID NO: 25606 - DNA, 21 bp, synthetic construct
  source 1..21: mol_type = other DNA
ctttgcaaaccgtgcttggcc

SEQ ID NO: 25607 - DNA, 21 bp, synthetic construct
  source 1..21: mol_type = other DNA
ttttttacgggtaaggtggcg

SEQ ID NO: 25608 - DNA, 21 bp, synthetic construct
  source 1..21: mol_type = other DNA
attctatcggaccgtatgtgg

SEQ ID NO: 25609 - DNA, 21 bp, synthetic construct
  source 1..21: mol_type = other DNA
gaaggaatctcacgctcatgg

SEQ ID NO: 25610 - DNA, 21 bp, synthetic construct
  source 1..21: mol_type = other DNA
tattttagcggaaccatcaac

SEQ ID NO: 25611 - DNA, 21 bp, synthetic construct
  source 1..21: mol_type = other DNA
tatttcagcggacaacacgaa

SEQ ID NO: 25612 - DNA, 21 bp, synthetic construct
  source 1..21: mol_type = other DNA
agggatgagttcatgagttat

SEQ ID NO: 25613 - DNA, 21 bp, synthetic construct
  source 1..21: mol_type = other DNA
cggggcgaattaattttccct

SEQ ID NO: 25614 - DNA, 21 bp, synthetic construct
  source 1..21: mol_type = other DNA
aaggacgattttagcccttgg

SEQ ID NO: 25615 - DNA, 21 bp, synthetic construct
  source 1..21: mol_type = other DNA
tactccaaacaaggaaacaac

SEQ ID NO: 25616 - DNA, 21 bp, synthetic construct
  source 1..21: mol_type = other DNA
tacttcacaggggaacgtgac

SEQ ID NO: 25617 - DNA, 21 bp, synthetic construct
  source 1..21: mol_type = other DNA
ggttcggaatatctagcatgg

SEQ ID NO: 25618 - DNA, 21 bp, synthetic construct
  source 1..21: mol_type = other DNA
ggtaatgagtttagtagctgg

SEQ ID NO: 25619 - DNA, 21 bp, synthetic construct
  source 1..21: mol_type = other DNA
gatctgcgcgatcgggggtgg

SEQ ID NO: 25620 - DNA, 21 bp, synthetic construct
  source 1..21: mol_type = other DNA
ttcagtcgtgttgggcagaac

SEQ ID NO: 25621 - DNA, 21 bp, synthetic construct
  source 1..21: mol_type = other DNA
acattttcgaccaatggcgtt

SEQ ID NO: 25622 - DNA, 21 bp, synthetic construct
  source 1..21: mol_type = other DNA
tacagccgaatacagcctgac

SEQ ID NO: 25623 - DNA, 21 bp, synthetic construct
  source 1..21: mol_type = other DNA
tacacgaaatcaaatacccat

SEQ ID NO: 25624 - DNA, 21 bp, synthetic construct
  source 1..21: mol_type = other DNA
tatagtcgcgtgggtgagaat

SEQ ID NO: 25625 - DNA, 21 bp, synthetic construct
  source 1..21: mol_type = other DNA
ttatcgagggtatcgtttgat

SEQ ID NO: 25626 - DNA, 21 bp, synthetic construct
  source 1..21: mol_type = other DNA
ttacatagattatcagagttc

SEQ ID NO: 25627 - DNA, 21 bp, synthetic construct
  source 1..21: mol_type = other DNA
atccttagtgatcgctcctgg

SEQ ID NO: 25628 - DNA, 21 bp, synthetic construct
  source 1..21: mol_type = other DNA
tatgccaagaatggccacaat

SEQ ID NO: 25629 - DNA, 21 bp, synthetic construct
  source 1..21: mol_type = other DNA
tactggtccgggatacaagac

SEQ ID NO: 25630 - DNA, 21 bp, synthetic construct
  source 1..21: mol_type = other DNA
gggtctggccttagtcattgg

SEQ ID NO: 25631 - DNA, 21 bp, synthetic construct
  source 1..21: mol_type = other DNA
ttttcaagggtgggtcaaaat

SEQ ID NO: 25632 - DNA, 21 bp, synthetic construct
  source 1..21: mol_type = other DNA
cgagatgatttcgtcagttac

SEQ ID NO: 25633 - DNA, 21 bp, synthetic construct
  source 1..21: mol_type = other DNA
tatcatcgtctccaacccgat

SEQ ID NO: 25634 - DNA, 21 bp, synthetic construct
  source 1..21: mol_type = other DNA
tactccaagcaaggttacaat

SEQ ID NO: 25635 - DNA, 21 bp, synthetic construct
  source 1..21: mol_type = other DNA
agtatggcgtccagcagttgg

SEQ ID NO: 25636 - DNA, 21 bp, synthetic construct
  source 1..21: mol_type = other DNA
ttctcgaaagcaaattataac

SEQ ID NO: 25637 - DNA, 21 bp, synthetic construct
  source 1..21: mol_type = other DNA
ttcactagtactaacggagtt

SEQ ID NO: 25638 - DNA, 21 bp, synthetic construct
  source 1..21: mol_type = other DNA
tacttcagtggcaaggtgagc

SEQ ID NO: 25639 - DNA, 21 bp, synthetic construct
  source 1..21: mol_type = other DNA
gtcatgagcgatcgcgcttgg

SEQ ID NO: 25640 - DNA, 21 bp, synthetic construct
  source 1..21: mol_type = other DNA
tatttctcaggggtggtgaac

SEQ ID NO: 25641 - DNA, 21 bp, synthetic construct
  source 1..21: mol_type = other DNA
atgcacaggttaagcgtggat

SEQ ID NO: 25642 - DNA, 21 bp, synthetic construct
  source 1..21: mol_type = other DNA
cgggaagatggactgcgatgg

SEQ ID NO: 25643 - DNA, 21 bp, synthetic construct
  source 1..21: mol_type = other DNA
tactttagcggtcaaattcaa

SEQ ID NO: 25644 - DNA, 21 bp, synthetic construct
  source 1..21: mol_type = other DNA
aaggatggatacagtatatac

SEQ ID NO: 25645 - DNA, 21 bp, synthetic construct
  source 1..21: mol_type = other DNA
ctcagagatggcacgcccagt

SEQ ID NO: 25646 - DNA, 21 bp, synthetic construct
  source 1..21: mol_type = other DNA
catgggagcacaaacggtgtc

SEQ ID NO: 25647 - DNA, 21 bp, synthetic construct
  source 1..21: mol_type = other DNA
cgtgatggatttagcagctat

SEQ ID NO: 25648 - DNA, 21 bp, synthetic construct
  source 1..21: mol_type = other DNA
aactctctagaggggcggaat

SEQ ID NO: 25649 - DNA, 21 bp, synthetic construct
  source 1..21: mol_type = other DNA
aggtccgaatttcatagtttc

SEQ ID NO: 25650 - DNA, 21 bp, synthetic construct
  source 1..21: mol_type = other DNA
tatgcgaggactgcacctgat

SEQ ID NO: 25651 - DNA, 21 bp, synthetic construct
  source 1..21: mol_type = other DNA
agacctgaagcgaggagttgg

SEQ ID NO: 25652 - DNA, 21 bp, synthetic construct
  source 1..21: mol_type = other DNA
tacttctccggtcgaatggag

SEQ ID NO: 25653 - DNA, 21 bp, synthetic construct
  source 1..21: mol_type = other DNA
tatagcaaatcaaacataaat

SEQ ID NO: 25654 - DNA, 21 bp, synthetic construct
  source 1..21: mol_type = other DNA
tacttcgcaggtaagcgggac

SEQ ID NO: 25655 - DNA, 21 bp, synthetic construct
  source 1..21: mol_type = other DNA
cgtgctagcgatgtgtacccc

SEQ ID NO: 25656 - DNA, 21 bp, synthetic construct
  source 1..21: mol_type = other DNA
cttgcgcggaatggatggaac

SEQ ID NO: 25657 - DNA, 21 bp, synthetic construct
  source 1..21: mol_type = other DNA
cgtatggactcatcaggctgg

SEQ ID NO: 25658 - DNA, 21 bp, synthetic construct
  source 1..21: mol_type = other DNA
cgtgaggacggcgttagctgg

SEQ ID NO: 25659 - DNA, 21 bp, synthetic construct
  source 1..21: mol_type = other DNA
tattttcacgggaagtgcgat

SEQ ID NO: 25660 - DNA, 21 bp, synthetic construct
  source 1..21: mol_type = other DNA
gatacggctacgtgtctaagg

SEQ ID NO: 25661 - DNA, 21 bp, synthetic construct
  source 1..21: mol_type = other DNA
accgagtacatgtgcagacca

SEQ ID NO: 25662 - DNA, 21 bp, synthetic construct
  source 1..21: mol_type = other DNA
agggatggcaatagcagctgg

SEQ ID NO: 25663 - DNA, 21 bp, synthetic construct
  source 1..21: mol_type = other DNA
tatttctcaggcgtcatggat

SEQ ID NO: 25664 - DNA, 21 bp, synthetic construct
  source 1..21: mol_type = other DNA
tttgccaaacatggttgcggt

SEQ ID NO: 25665 - DNA, 21 bp, synthetic construct
  source 1..21: mol_type = other DNA
tactggacaggagtgccggac

SEQ ID NO: 25666 - DNA, 21 bp, synthetic construct
  source 1..21: mol_type = other DNA
tacacacgtctcggagacggt

SEQ ID NO: 25667 - DNA, 21 bp, synthetic construct
  source 1..21: mol_type = other DNA
tgcaaatatctaaaatcagat

SEQ ID NO: 25668 - DNA, 21 bp, synthetic construct
  source 1..21: mol_type = other DNA
aaagatggttactcttcttgg

SEQ ID NO: 25669 - DNA, 21 bp, synthetic construct
  source 1..21: mol_type = other DNA
ttctcacgggccggcccgaat

SEQ ID NO: 25670 - DNA, 21 bp, synthetic construct
  source 1..21: mol_type = other DNA
gttatgggaagctcgaattgg

SEQ ID NO: 25671 - DNA, 21 bp, synthetic construct
  source 1..21: mol_type = other DNA
tacttttcagggcagcatgag

SEQ ID NO: 25672 - DNA, 21 bp, synthetic construct
  source 1..21: mol_type = other DNA
aaagatgattttaccgggttt

SEQ ID NO: 25673 - DNA, 21 bp, synthetic construct
  source 1..21: mol_type = other DNA
tatgttcgctcacaagacaac

SEQ ID NO: 25674 - DNA, 21 bp, synthetic construct
  source 1..21: mol_type = other DNA
tggtggagcggcacaaaggag

SEQ ID NO: 25675 - DNA, 21 bp, synthetic construct
  source 1..21: mol_type = other DNA
cgagcagtggacgcctatccc

SEQ ID NO: 25676 - DNA, 21 bp, synthetic construct
  source 1..21: mol_type = other DNA
gaattgcaatcatcgacttgg

SEQ ID NO: 25677 - DNA, 21 bp, synthetic construct
  source 1..21: mol_type = other DNA
tacacaagacttgattttaat

SEQ ID NO: 25678 - DNA, 21 bp, synthetic construct
  source 1..21: mol_type = other DNA
tactggagcggcgtcacggcc

SEQ ID NO: 25679 - DNA, 21 bp, synthetic construct
  source 1..21: mol_type = other DNA
agctggtctaccaacggcatc

SEQ ID NO: 25680 - DNA, 21 bp, synthetic construct
  source 1..21: mol_type = other DNA
tttagtaaagctggtcctaac

SEQ ID NO: 25681 - DNA, 21 bp, synthetic construct
  source 1..21: mol_type = other DNA
aatacatatgactcctaccct

SEQ ID NO: 25682 - DNA, 21 bp, synthetic construct
  source 1..21: mol_type = other DNA
tactcacgtttaaatatggat

SEQ ID NO: 25683 - DNA, 21 bp, synthetic construct
  source 1..21: mol_type = other DNA
tactggtccggtattcaagat

SEQ ID NO: 25684 - DNA, 21 bp, synthetic construct
  source 1..21: mol_type = other DNA
ttatcgaagctgtcatgtaac

SEQ ID NO: 25685 - DNA, 21 bp, synthetic construct
  source 1..21: mol_type = other DNA
actttatctacgaacggagtt

SEQ ID NO: 25686 - DNA, 21 bp, synthetic construct
  source 1..21: mol_type = other DNA
agagaggacttcgtgagctac

SEQ ID NO: 25687 - DNA, 21 bp, synthetic construct
  source 1..21: mol_type = other DNA
gcggggggaggtttgtttatt

SEQ ID NO: 25688 - DNA, 21 bp, synthetic construct
  source 1..21: mol_type = other DNA
tacttcacgggtgtccaccaa

SEQ ID NO: 25689 - DNA, 21 bp, synthetic construct
  source 1..21: mol_type = other DNA
aggacggagttcaccacttat

SEQ ID NO: 25690 - DNA, 21 bp, synthetic construct
  source 1..21: mol_type = other DNA
tatgtgaggtcagatcacgga

SEQ ID NO: 25691 - DNA, 21 bp, synthetic construct
  source 1..21: mol_type = other DNA
cactgcaagccctgtctgacc

SEQ ID NO: 25692 - DNA, 21 bp, synthetic construct
  source 1..21: mol_type = other DNA
tacagcaaacataatgaaaat

SEQ ID NO: 25693 - DNA, 21 bp, synthetic construct
  source 1..21: mol_type = other DNA
tacgcaaagaccggagaaaat

SEQ ID NO: 25694 - DNA, 21 bp, synthetic construct
  source 1..21: mol_type = other DNA
agaagcgagtttatgtcattt

SEQ ID NO: 25695 - DNA, 21 bp, synthetic construct
  source 1..21: mol_type = other DNA
actatgtcaactaacggggtt

SEQ ID NO: 25696 - DNA, 21 bp, synthetic construct
  source 1..21: mol_type = other DNA
tttgctcgctctgggcccaac

SEQ ID NO: 25697 - DNA, 21 bp, synthetic construct
  source 1..21: mol_type = other DNA
tatttcacgggcgaacgtgaa

SEQ ID NO: 25698 - DNA, 21 bp, synthetic construct
  source 1..21: mol_type = other DNA
gacttgagttcaacgagctgg

SEQ ID NO: 25699 - DNA, 21 bp, synthetic construct
  source 1..21: mol_type = other DNA
tatttcagcggaacggtatcg

SEQ ID NO: 25700 - DNA, 21 bp, synthetic construct
  source 1..21: mol_type = other DNA
tattggagcggcgtagtcgcg

SEQ ID NO: 25701 - DNA, 21 bp, synthetic construct
  source 1..21: mol_type = other DNA
tatttcacgggcatggtggac

SEQ ID NO: 25702 - DNA, 21 bp, synthetic construct
  source 1..21: mol_type = other DNA
attgcccatcggggttgggac

SEQ ID NO: 25703 - DNA, 21 bp, synthetic construct
  source 1..21: mol_type = other DNA
ttttcgagggtaggtgagaat

SEQ ID NO: 25704 - DNA, 21 bp, synthetic construct
  source 1..21: mol_type = other DNA
tacttcaccggcattcacgtc

SEQ ID NO: 25705 - DNA, 21 bp, synthetic construct
  source 1..21: mol_type = other DNA
tatgcaaagggcggttacaac

SEQ ID NO: 25706 - DNA, 21 bp, synthetic construct
  source 1..21: mol_type = other DNA
tactggtccggtgtgaccgcg

SEQ ID NO: 25707 - DNA, 21 bp, synthetic construct
  source 1..21: mol_type = other DNA
tacttcactggcgtccataaa

SEQ ID NO: 25708 - DNA, 21 bp, synthetic construct
  source 1..21: mol_type = other DNA
tactccgcaatcggtatgaat

SEQ ID NO: 25709 - DNA, 21 bp, synthetic construct
  source 1..21: mol_type = other DNA
attaactcaactaatggagta

SEQ ID NO: 25710 - DNA, 21 bp, synthetic construct
  source 1..21: mol_type = other DNA
tattcgaggctcaacgaacag

SEQ ID NO: 25711 - DNA, 21 bp, synthetic construct
  source 1..21: mol_type = other DNA
atcgagagcttcaatggacgt

SEQ ID NO: 25712 - DNA, 21 bp, synthetic construct
  source 1..21: mol_type = other DNA
cgcaccagcactcatggaata

SEQ ID NO: 25713 - DNA, 21 bp, synthetic construct
  source 1..21: mol_type = other DNA
tggtggagtggggtgattgag

SEQ ID NO: 25714 - DNA, 21 bp, synthetic construct
  source 1..21: mol_type = other DNA
gacatgtcatccaaagtttgg

SEQ ID NO: 25715 - DNA, 21 bp, synthetic construct
  source 1..21: mol_type = other DNA
ttggccaagaccgcgtgtaat

SEQ ID NO: 25716 - DNA, 21 bp, synthetic construct
  source 1..21: mol_type = other DNA
gttgcggaccatgtgagatgg

SEQ ID NO: 25717 - DNA, 21 bp, synthetic construct
  source 1..21: mol_type = other DNA
ttttcgaaacttaattataat

SEQ ID NO: 25718 - DNA, 21 bp, synthetic construct
  source 1..21: mol_type = other DNA
aatatgaccagccatagttgg

SEQ ID NO: 25719 - DNA, 21 bp, synthetic construct
  source 1..21: mol_type = other DNA
aaagattacactgtattcccg

SEQ ID NO: 25720 - DNA, 21 bp, synthetic construct
  source 1..21: mol_type = other DNA
tacttcagcggtgtccgtgaa

SEQ ID NO: 25721 - DNA, 21 bp, synthetic construct
  source 1..21: mol_type = other DNA
tactggacgggaactgtagca

SEQ ID NO: 25722 - DNA, 21 bp, synthetic construct
  source 1..21: mol_type = other DNA
cgattggaatccgccgcctgg

SEQ ID NO: 25723 - DNA, 21 bp, synthetic construct
  source 1..21: mol_type = other DNA
tattacacgggcgttcgcgag

SEQ ID NO: 25724 - DNA, 21 bp, synthetic construct
  source 1..21: mol_type = other DNA
cgtgagtacgatgcctttcct

SEQ ID NO: 25725 - DNA, 21 bp, synthetic construct
  source 1..21: mol_type = other DNA
cgttccgagtttgagacgttt

SEQ ID NO: 25726 - DNA, 21 bp, synthetic construct
  source 1..21: mol_type = other DNA
accagcagtacaaatggaatc

SEQ ID NO: 25727 - DNA, 21 bp, synthetic construct
  source 1..21: mol_type = other DNA
gtggctatgaaaggggcaggt

SEQ ID NO: 25728 - DNA, 21 bp, synthetic construct
  source 1..21: mol_type = other DNA
ctagctaaaagcggagctaat

SEQ ID NO: 25729 - DNA, 21 bp, synthetic construct
  source 1..21: mol_type = other DNA
tatgtgcggagtgatgtaggc

SEQ ID NO: 25730 - DNA, 21 bp, synthetic construct
  source 1..21: mol_type = other DNA
tattttagcaacattaaagag

SEQ ID NO: 25731 - DNA, 21 bp, synthetic construct
  source 1..21: mol_type = other DNA
ctcagcaagctaggacacaac

SEQ ID NO: 25732 - DNA, 21 bp, synthetic construct
  source 1..21: mol_type = other DNA
ggaatagaaaccgtgcgatgg

SEQ ID NO: 25733 - DNA, 21 bp, synthetic construct
  source 1..21: mol_type = other DNA
tttagccgtattggcataaat

SEQ ID NO: 25734 - DNA, 21 bp, synthetic construct
  source 1..21: mol_type = other DNA
tatacccgtttggataatggg

SEQ ID NO: 25735 - DNA, 21 bp, synthetic construct
  source 1..21: mol_type = other DNA
aacatggcggatcgtacatgg

SEQ ID NO: 25736 - DNA, 21 bp, synthetic construct
  source 1..21: mol_type = other DNA
ttacatagggctggcatagat

SEQ ID NO: 25737 - DNA, 21 bp, synthetic construct
  source 1..21: mol_type = other DNA
tacagcaaacataatgacaac

SEQ ID NO: 25738 - DNA, 21 bp, synthetic construct
  source 1..21: mol_type = other DNA
tactcaaaacataatttcaac

SEQ ID NO: 25739 - DNA, 21 bp, synthetic construct
  source 1..21: mol_type = other DNA
tgtgttcgtcctcagactccg

SEQ ID NO: 25740 - DNA, 21 bp, synthetic construct
  source 1..21: mol_type = other DNA
tactttacaggtcataccgaa

SEQ ID NO: 25741 - DNA, 21 bp, synthetic construct
  source 1..21: mol_type = other DNA
gatctaaatagcaggtcgtgg

SEQ ID NO: 25742 - DNA, 21 bp, synthetic construct
  source 1..21: mol_type = other DNA
ttggcaaagtctggtgcaaac

SEQ ID NO: 25743 - DNA, 21 bp, synthetic construct
  source 1..21: mol_type = other DNA
tactcgcgtctaggggtgaat

SEQ ID NO: 25744 - DNA, 21 bp, synthetic construct
  source 1..21: mol_type = other DNA
aaactcgacgtgggtaactgg

SEQ ID NO: 25745 - DNA, 21 bp, synthetic construct
  source 1..21: mol_type = other DNA
aggtcagaattcgtgagtttc

SEQ ID NO: 25746 - DNA, 21 bp, synthetic construct
  source 1..21: mol_type = other DNA
tacttttcaggaattggggct

SEQ ID NO: 25747 - DNA, 21 bp, synthetic construct
  source 1..21: mol_type = other DNA
tacgtgaaatcggggcctatg

SEQ ID NO: 25748 - DNA, 21 bp, synthetic construct
  source 1..21: mol_type = other DNA
aacgatggtgtttcaaagtgg

SEQ ID NO: 25749 - DNA, 21 bp, synthetic construct
  source 1..21: mol_type = other DNA
tatttttctggtaagatggac

SEQ ID NO: 25750 - DNA, 21 bp, synthetic construct
  source 1..21: mol_type = other DNA
tactttagcgggatccatgcc

SEQ ID NO: 25751 - DNA, 21 bp, synthetic construct
  source 1..21: mol_type = other DNA
tattctaagagtggttggaac

SEQ ID NO: 25752 - DNA, 21 bp, synthetic construct
  source 1..21: mol_type = other DNA
caggaggattacgtcacctgg

SEQ ID NO: 25753 - DNA, 21 bp, synthetic construct
  source 1..21: mol_type = other DNA
attgatagcacaaacggtcgc

SEQ ID NO: 25754 - DNA, 21 bp, synthetic construct
  source 1..21: mol_type = other DNA
tataccaagagtcaggaatgg

SEQ ID NO: 25755 - DNA, 21 bp, synthetic construct
  source 1..21: mol_type = other DNA
gtgatgagtgaccgtttatgg

SEQ ID NO: 25756 - DNA, 21 bp, synthetic construct
  source 1..21: mol_type = other DNA
tacttccacggggtggcggct

SEQ ID NO: 25757 - DNA, 21 bp, synthetic construct
  source 1..21: mol_type = other DNA
ttgtcgaaacataactttaat

SEQ ID NO: 25758 - DNA, 21 bp, synthetic construct
  source 1..21: mol_type = other DNA
gtaatgcaatcacgcgactgg

SEQ ID NO: 25759 - DNA, 21 bp, synthetic construct
  source 1..21: mol_type = other DNA
tacttttccaaggtgagggaa

SEQ ID NO: 25760 - DNA, 21 bp, synthetic construct
  source 1..21: mol_type = other DNA
tattggtcaggagttaccgag

SEQ ID NO: 25761 - DNA, 21 bp, synthetic construct
  source 1..21: mol_type = other DNA
tacttctcgggagtcatcccc

SEQ ID NO: 25762 - DNA, 21 bp, synthetic construct
  source 1..21: mol_type = other DNA
aaagacggcttcagtcactat

SEQ ID NO: 25763 - DNA, 21 bp, synthetic construct
  source 1..21: mol_type = other DNA
tatttcacaggatttcatgag

SEQ ID NO: 25764 - DNA, 21 bp, synthetic construct
  source 1..21: mol_type = other DNA
tattttcatggtgtagtggaa

SEQ ID NO: 25765 - DNA, 21 bp, synthetic construct
  source 1..21: mol_type = other DNA
ttagcgaggagtgccgttaat

SEQ ID NO: 25766 - DNA, 21 bp, synthetic construct
  source 1..21: mol_type = other DNA
cgcactttcgacgcgttccca

SEQ ID NO: 25767 - DNA, 21 bp, synthetic construct
  source 1..21: mol_type = other DNA
tacttcgccggggttcgagcg

SEQ ID NO: 25768 - DNA, 21 bp, synthetic construct
  source 1..21: mol_type = other DNA
agatcagagtttaagacttat

SEQ ID NO: 25769 - DNA, 21 bp, synthetic construct
  source 1..21: mol_type = other DNA
aggagtatagacgcgtatcca

SEQ ID NO: 25770 - DNA, 21 bp, synthetic construct
  source 1..21: mol_type = other DNA
gagctagagagtcgctcatgg

SEQ ID NO: 25771 - DNA, 21 bp, synthetic construct
  source 1..21: mol_type = other DNA
aggctggatgatcgtgggtgg

SEQ ID NO: 25772 - DNA, 21 bp, synthetic construct
  source 1..21: mol_type = other DNA
tataccaggttaggtgatgga

SEQ ID NO: 25773 - DNA, 21 bp, synthetic construct
  source 1..21: mol_type = other DNA
aaggacgacttcctttcatgg

SEQ ID NO: 25774 - DNA, 21 bp, synthetic construct
  source 1..21: mol_type = other DNA
acccactctactaacggtatt

SEQ ID NO: 25775 - DNA, 21 bp, synthetic construct
  source 1..21: mol_type = other DNA
tactggactggagtaatcgac

SEQ ID NO: 25776 - DNA, 21 bp, synthetic construct
  source 1..21: mol_type = other DNA
gtctcggattgggctccgttc

SEQ ID NO: 25777 - DNA, 21 bp, synthetic construct
  source 1..21: mol_type = other DNA
agagacgaattccattcgtat

SEQ ID NO: 25778 - DNA, 21 bp, synthetic construct
  source 1..21: mol_type = other DNA
tatcacgcgaaaggcgataat

SEQ ID NO: 25779 - DNA, 21 bp, synthetic construct
  source 1..21: mol_type = other DNA
tacgcgaggggaggactaaat

SEQ ID NO: 25780 - DNA, 21 bp, synthetic construct
  source 1..21: mol_type = other DNA
cgaacctatgactcctatcct

SEQ ID NO: 25781 - DNA, 21 bp, synthetic construct
  source 1..21: mol_type = other DNA
tacgataagggtacctgggac

SEQ ID NO: 25782 - DNA, 21 bp, synthetic construct
  source 1..21: mol_type = other DNA
aggaatgaatttgtaacgtat

SEQ ID NO: 25783 - DNA, 21 bp, synthetic construct
  source 1..21: mol_type = other DNA
tatacacggctgaatccagac

SEQ ID NO: 25784 - DNA, 21 bp, synthetic construct
  source 1..21: mol_type = other DNA
tacagtcgaatcggaccatac

SEQ ID NO: 25785 - DNA, 21 bp, synthetic construct
  source 1..21: mol_type = other DNA
gtcctatcggaccgcgcatgg

SEQ ID NO: 25786 - DNA, 21 bp, synthetic construct
  source 1..21: mol_type = other DNA
atcccgggtttctgtgggccg

SEQ ID NO: 25787 - DNA, 21 bp, synthetic construct
  source 1..21: mol_type = other DNA
cgcatggagagcgtgatatgg

SEQ ID NO: 25788 - DNA, 21 bp, synthetic construct
  source 1..21: mol_type = other DNA
tattactcaggcatacgcgaa

SEQ ID NO: 25789 - DNA, 21 bp, synthetic construct
  source 1..21: mol_type = other DNA
ctatctagacttggggagaat

SEQ ID NO: 25790 - DNA, 21 bp, synthetic construct
  source 1..21: mol_type = other DNA
ttctcgaggctcggtgctaat

SEQ ID NO: 25791 - DNA, 21 bp, synthetic construct
  source 1..21: mol_type = other DNA
tctgaatcaacgaatggcgtt

SEQ ID NO: 25792 - DNA, 21 bp, synthetic construct
  source 1..21: mol_type = other DNA
tacagtagattgaatctagat

SEQ ID NO: 25793 - DNA, 21 bp, synthetic construct
  source 1..21: mol_type = other DNA
tacgcgcgaacaggtacaaac

SEQ ID NO: 25794 - DNA, 21 bp, synthetic construct
  source 1..21: mol_type = other DNA
tacagcagagtcggaccaaac

SEQ ID NO: 25795 - DNA, 21 bp, synthetic construct
  source 1..21: mol_type = other DNA
tacttctctggaaaattgtcc

SEQ ID NO: 25796 - DNA, 21 bp, synthetic construct
  source 1..21: mol_type = other DNA
tactttaccggtatgagagca

SEQ ID NO: 25797 - DNA, 21 bp, synthetic construct
  source 1..21: mol_type = other DNA
tactggtcaggaattcctgaa

SEQ ID NO: 25798 - DNA, 21 bp, synthetic construct
  source 1..21: mol_type = other DNA
agaacatccacacacggcata

SEQ ID NO: 25799 - DNA, 21 bp, synthetic construct
  source 1..21: mol_type = other DNA
aggatggctgacagagattgg

SEQ ID NO: 25800 - DNA, 21 bp, synthetic construct
  source 1..21: mol_type = other DNA
ttttcgcgggtcgggattaac

SEQ ID NO: 25801 - DNA, 21 bp, synthetic construct
  source 1..21: mol_type = other DNA
atcatggctgataggacctgg

SEQ ID NO: 25802 - DNA, 21 bp, synthetic construct
  source 1..21: mol_type = other DNA
aacatgtcaagttcgagttgg

SEQ ID NO: 25803 - DNA, 21 bp, synthetic construct
  source 1..21: mol_type = other DNA
cgttcggaattcaaggttttc

SEQ ID NO: 25804 - DNA, 21 bp, synthetic construct
  source 1..21: mol_type = other DNA
tatgtaaaatacgagaatcct

SEQ ID NO: 25805 - DNA, 21 bp, synthetic construct
  source 1..21: mol_type = other DNA
ggtggggacggatcgcactgg

SEQ ID NO: 25806 - DNA, 21 bp, synthetic construct
  source 1..21: mol_type = other DNA
tattcccgtctgggggaaaac

SEQ ID NO: 25807 - DNA, 21 bp, synthetic construct
  source 1..21: mol_type = other DNA
tattacaccggtaaatgtgag

SEQ ID NO: 25808 - DNA, 21 bp, synthetic construct
  source 1..21: mol_type = other DNA
tatcatagattgggcattgat

SEQ ID NO: 25809 - DNA, 21 bp, synthetic construct
  source 1..21: mol_type = other DNA
gagttggaatcccgtgagtgg

SEQ ID NO: 25810 - DNA, 21 bp, synthetic construct
  source 1..21: mol_type = other DNA
ttcagtagaacgggtccgaat

SEQ ID NO: 25811 - DNA, 21 bp, synthetic construct
  source 1..21: mol_type = other DNA
tacgtaaaaagtcagccaatg

SEQ ID NO: 25812 - DNA, 21 bp, synthetic construct
  source 1..21: mol_type = other DNA
tacagtaaggtaggccccaag

SEQ ID NO: 25813 - DNA, 21 bp, synthetic construct
  source 1..21: mol_type = other DNA
ttgctcgccgatagaacatgg

SEQ ID NO: 25814 - DNA, 21 bp, synthetic construct
  source 1..21: mol_type = other DNA
tatttctccgggcagctggac

SEQ ID NO: 25815 - DNA, 21 bp, synthetic construct
  source 1..21: mol_type = other DNA
aagatgtccgatcacacgtgg

SEQ ID NO: 25816 - DNA, 21 bp, synthetic construct
  source 1..21: mol_type = other DNA
tatgcacgcactggtcccaac

SEQ ID NO: 25817 - DNA, 21 bp, synthetic construct
  source 1..21: mol_type = other DNA
tatttttcaggcacgcatgag

SEQ ID NO: 25818 - DNA, 21 bp, synthetic construct
  source 1..21: mol_type = other DNA
tatagcaagcacaatttcaac

SEQ ID NO: 25819 - DNA, 21 bp, synthetic construct
  source 1..21: mol_type = other DNA
cgatcagaattcaagacctat

SEQ ID NO: 25820 - DNA, 21 bp, synthetic construct
  source 1..21: mol_type = other DNA
ctctctaaggccggtcacaat

SEQ ID NO: 25821 - DNA, 21 bp, synthetic construct
  source 1..21: mol_type = other DNA
cagaatgatttcgtttttcct

SEQ ID NO: 25822 - DNA, 21 bp, synthetic construct
  source 1..21: mol_type = other DNA
tattctaaacaaggctgcaac

SEQ ID NO: 25823 - DNA, 21 bp, synthetic construct
  source 1..21: mol_type = other DNA
ctacatcgacttcaggacgac

SEQ ID NO: 25824 - DNA, 21 bp, synthetic construct
  source 1..21: mol_type = other DNA
tttagtcgtgtaggcgcaaat

SEQ ID NO: 25825 - DNA, 21 bp, synthetic construct
  source 1..21: mol_type = other DNA
taccataagatgcaatgtaat

SEQ ID NO: 25826 - DNA, 21 bp, synthetic construct
  source 1..21: mol_type = other DNA
tactcgaaacataacactaac

SEQ ID NO: 25827 - DNA, 21 bp, synthetic construct
  source 1..21: mol_type = other DNA
ctctcaagaattcagacaaat

SEQ ID NO: 25828 - DNA, 21 bp, synthetic construct
  source 1..21: mol_type = other DNA
tacagtaagatggggacgaac

SEQ ID NO: 25829 - DNA, 21 bp, synthetic construct
  source 1..21: mol_type = other DNA
tactggtctggaacaattgct

SEQ ID NO: 25830 - DNA, 21 bp, synthetic construct
  source 1..21: mol_type = other DNA
tacttccacgggcagattgag

SEQ ID NO: 25831 - DNA, 21 bp, synthetic construct
  source 1..21: mol_type = other DNA
ttatgtcgaccctgccaggaa

SEQ ID NO: 25832 - DNA, 21 bp, synthetic construct
  source 1..21: mol_type = other DNA
tattccaaaagtggtaccaac

SEQ ID NO: 25833 - DNA, 21 bp, synthetic construct
  source 1..21: mol_type = other DNA
ctgtcaaagatgaacttcaat

SEQ ID NO: 25834 - DNA, 21 bp, synthetic construct
  source 1..21: mol_type = other DNA
tattcgaggctacatcctatg

SEQ ID NO: 25835 - DNA, 21 bp, synthetic construct
  source 1..21: mol_type = other DNA
tatttcacaggttacttagat

SEQ ID NO: 25836 - DNA, 21 bp, synthetic construct
  source 1..21: mol_type = other DNA
tatttcagtggaatccacgtc

SEQ ID NO: 25837 - DNA, 21 bp, synthetic construct
  source 1..21: mol_type = other DNA
tatttccacggtaaagtggcc

SEQ ID NO: 25838 - DNA, 21 bp, synthetic construct
  source 1..21: mol_type = other DNA
tactttagcggtaagataaac

SEQ ID NO: 25839 - DNA, 21 bp, synthetic construct
  source 1..21: mol_type = other DNA
aggctcgaggacaggtcatgg

SEQ ID NO: 25840 - DNA, 21 bp, synthetic construct
  source 1..21: mol_type = other DNA
tacttttcaggcaaggccgac

SEQ ID NO: 25841 - DNA, 21 bp, synthetic construct
  source 1..21: mol_type = other DNA
gctccagagactgtacggtgg

SEQ ID NO: 25842 - DNA, 21 bp, synthetic construct
  source 1..21: mol_type = other DNA
tatagcaaactcgatagtaga

SEQ ID NO: 25843 - DNA, 21 bp, synthetic construct
  source 1..21: mol_type = other DNA
tactctaggattggaccagat

SEQ ID NO: 25844 - DNA, 21 bp, synthetic construct
  source 1..21: mol_type = other DNA
agagatgcaacttcatcatgg

SEQ ID NO: 25845 - DNA, 21 bp, synthetic construct
  source 1..21: mol_type = other DNA
tatagtcgcataggcggcggt

SEQ ID NO: 25846 - DNA, 21 bp, synthetic construct
  source 1..21: mol_type = other DNA
tactggagcggcgtcgcggca

SEQ ID NO: 25847 - DNA, 21 bp, synthetic construct
  source 1..21: mol_type = other DNA
tatagtaggttgggtgatgac

SEQ ID NO: 25848 - DNA, 21 bp, synthetic construct
  source 1..21: mol_type = other DNA
agggaagaccatgtgttctgg

SEQ ID NO: 25849 - DNA, 21 bp, synthetic construct
  source 1..21: mol_type = other DNA
tacttccatggtaaatgtgac

SEQ ID NO: 25850 - DNA, 21 bp, synthetic construct
  source 1..21: mol_type = other DNA
tatttcagtggaaagacagat

SEQ ID NO: 25851 - DNA, 21 bp, synthetic construct
  source 1..21: mol_type = other DNA
ttttcgcgtataggtatgaac

SEQ ID NO: 25852 - DNA, 21 bp, synthetic construct
  source 1..21: mol_type = other DNA
tatgttcgtagcgatacgaag

SEQ ID NO: 25853 - DNA, 21 bp, synthetic construct
  source 1..21: mol_type = other DNA
tattattctgggatcgtagcg

SEQ ID NO: 25854 - DNA, 21 bp, synthetic construct
  source 1..21: mol_type = other DNA
aaggacgaataccatacctac

SEQ ID NO: 25855 - DNA, 21 bp, synthetic construct
  source 1..21: mol_type = other DNA
gtaatggagagcacaaggtgg

SEQ ID NO: 25856 - DNA, 21 bp, synthetic construct
  source 1..21: mol_type = other DNA
tgtgacaaggaaccatgttgt

SEQ ID NO: 25857 - DNA, 21 bp, synthetic construct
  source 1..21: mol_type = other DNA
cgtgacgaatttatgtcctac

SEQ ID NO: 25858 - DNA, 21 bp, synthetic construct
  source 1..21: mol_type = other DNA
agaggcattgacttttatcca

SEQ ID NO: 25859 - DNA, 21 bp, synthetic construct
  source 1..21: mol_type = other DNA
tggtggagcgggctcaaagag

SEQ ID NO: 25860 - DNA, 21 bp, synthetic construct
  source 1..21: mol_type = other DNA
atgagtaggatcggcgttaat

SEQ ID NO: 25861 - DNA, 21 bp, synthetic construct
  source 1..21: mol_type = other DNA
tatcaccgaatagggccaaat

SEQ ID NO: 25862 - DNA, 21 bp, synthetic construct
  source 1..21: mol_type = other DNA
aaagatgagtggtcagtgtat

SEQ ID NO: 25863 - DNA, 21 bp, synthetic construct
  source 1..21: mol_type = other DNA
agccatagcacaaacggacgt

SEQ ID NO: 25864 - DNA, 21 bp, synthetic construct
  source 1..21: mol_type = other DNA
ggtggggacggagtgcggtgg

SEQ ID NO: 25865 - DNA, 21 bp, synthetic construct
  source 1..21: mol_type = other DNA
ttaagcaggataagcatgaat

SEQ ID NO: 25866 - DNA, 21 bp, synthetic construct
  source 1..21: mol_type = other DNA
aaattcgactattcctcgtgc

SEQ ID NO: 25867 - DNA, 21 bp, synthetic construct
  source 1..21: mol_type = other DNA
gagaacgacttcaagattttt

SEQ ID NO: 25868 - DNA, 21 bp, synthetic construct
  source 1..21: mol_type = other DNA
atctggagtactaacggcgta

SEQ ID NO: 25869 - DNA, 21 bp, synthetic construct
  source 1..21: mol_type = other DNA
tatttcacaggattcgcggag

SEQ ID NO: 25870 - DNA, 21 bp, synthetic construct
  source 1..21: mol_type = other DNA
cattgtgagggtcgccccgta

SEQ ID NO: 25871 - DNA, 21 bp, synthetic construct
  source 1..21: mol_type = other DNA
tactttaccggtatgatagca

SEQ ID NO: 25872 - DNA, 21 bp, synthetic construct
  source 1..21: mol_type = other DNA
cgcgacggcaatagtagttgg

SEQ ID NO: 25873 - DNA, 21 bp, synthetic construct
  source 1..21: mol_type = other DNA
tgtggtcgcccgcagatggag

SEQ ID NO: 25874 - DNA, 21 bp, synthetic construct
  source 1..21: mol_type = other DNA
agggacgaaagttcttactgg

SEQ ID NO: 25875 - DNA, 21 bp, synthetic construct
  source 1..21: mol_type = other DNA
tattcaaaaatgaattctaat

SEQ ID NO: 25876 - DNA, 21 bp, synthetic construct
  source 1..21: mol_type = other DNA
ggtatggagttctgcagaccg

SEQ ID NO: 25877 - DNA, 21 bp, synthetic construct
  source 1..21: mol_type = other DNA
tgcggagggggtacggcaggc

SEQ ID NO: 25878 - DNA, 21 bp, synthetic construct
  source 1..21: mol_type = other DNA
tacttctcagggacagttgat

SEQ ID NO: 25879 - DNA, 21 bp, synthetic construct
  source 1..21: mol_type = other DNA
ctgtctaaggttggatcaaac

SEQ ID NO: 25880 - DNA, 21 bp, synthetic construct
  source 1..21: mol_type = other DNA
cacagctcgaccaacggcatt

SEQ ID NO: 25881 - DNA, 21 bp, synthetic construct
  source 1..21: mol_type = other DNA
tattttacgggcgtcacggat

SEQ ID NO: 25882 - DNA, 21 bp, synthetic construct
  source 1..21: mol_type = other DNA
tactatagtggaatcagagag

SEQ ID NO: 25883 - DNA, 21 bp, synthetic construct
  source 1..21: mol_type = other DNA
gggggggagacttcgacttgg

SEQ ID NO: 25884 - DNA, 21 bp, synthetic construct
  source 1..21: mol_type = other DNA
gagatgacgtcacacatgtgg

SEQ ID NO: 25885 - DNA, 21 bp, synthetic construct
  source 1..21: mol_type = other DNA
tactttgcgggaataatagag

SEQ ID NO: 25886 - DNA, 21 bp, synthetic construct
  source 1..21: mol_type = other DNA
ttcagtcgagtcggccagaac

SEQ ID NO: 25887 - DNA, 21 bp, synthetic construct
  source 1..21: mol_type = other DNA
tactttgaaggaagaaaggaa

SEQ ID NO: 25888 - DNA, 21 bp, synthetic construct
  source 1..21: mol_type = other DNA
tactcgaaatcgggttacaac

SEQ ID NO: 25889 - DNA, 21 bp, synthetic construct
  source 1..21: mol_type = other DNA
tattccaagatgggaatgaac

SEQ ID NO: 25890 - DNA, 21 bp, synthetic construct
  source 1..21: mol_type = other DNA
aatgatggtaacagtaaatgg

SEQ ID NO: 25891 - DNA, 21 bp, synthetic construct
  source 1..21: mol_type = other DNA
tacctcaaaagtcaagagtat

SEQ ID NO: 25892 - DNA, 21 bp, synthetic construct
  source 1..21: mol_type = other DNA
tatagtaaattaaatgtcgtt

SEQ ID NO: 25893 - DNA, 21 bp, synthetic construct
  source 1..21: mol_type = other DNA
ttgtgggacggtactaacccg

SEQ ID NO: 25894 - DNA, 21 bp, synthetic construct
  source 1..21: mol_type = other DNA
gtcgcaacagagggtcgagac

SEQ ID NO: 25895 - DNA, 21 bp, synthetic construct
  source 1..21: mol_type = other DNA
gatttagcaagtagcgcctgg

SEQ ID NO: 25896 - DNA, 21 bp, synthetic construct
  source 1..21: mol_type = other DNA
tttttcagtgggatcctagag

SEQ ID NO: 25897 - DNA, 21 bp, synthetic construct
  source 1..21: mol_type = other DNA
tactggacaggcgttagtgaa

SEQ ID NO: 25898 - DNA, 21 bp, synthetic construct
  source 1..21: mol_type = other DNA
cgcctcgaatcgacgagctgg

SEQ ID NO: 25899 - DNA, 21 bp, synthetic construct
  source 1..21: mol_type = other DNA
gtttcagaatttgcgagctac

SEQ ID NO: 25900 - DNA, 21 bp, synthetic construct
  source 1..21: mol_type = other DNA
aaaatggaagcgatgacttgg

SEQ ID NO: 25901 - DNA, 21 bp, synthetic construct
  source 1..21: mol_type = other DNA
gacatgtcgagcaacaaatgg

SEQ ID NO: 25902 - DNA, 21 bp, synthetic construct
  source 1..21: mol_type = other DNA
tattttagcgcaataaaagaa

SEQ ID NO: 25903 - DNA, 21 bp, synthetic construct
  source 1..21: mol_type = other DNA
tacagcaagcaaaatgtcaac

SEQ ID NO: 25904 - DNA, 21 bp, synthetic construct
  source 1..21: mol_type = other DNA
ttttcgagggtaggacaaaat

SEQ ID NO: 25905 - DNA, 21 bp, synthetic construct
  source 1..21: mol_type = other DNA
tctcggagtacgaatgggata

SEQ ID NO: 25906 - DNA, 21 bp, synthetic construct
  source 1..21: mol_type = other DNA
tattcggcccgtaacgacaat

SEQ ID NO: 25907 - DNA, 21 bp, synthetic construct
  source 1..21: mol_type = other DNA
ctccatcgtatgagcatcgac

SEQ ID NO: 25908 - DNA, 21 bp, synthetic construct
  source 1..21: mol_type = other DNA
tattggacggggaaaatagct

SEQ ID NO: 25909 - DNA, 21 bp, synthetic construct
  source 1..21: mol_type = other DNA
ttgtgtcgcccctgcgacgag

SEQ ID NO: 25910 - DNA, 21 bp, synthetic construct
  source 1..21: mol_type = other DNA
ctcgagtcaactaacggagtc

SEQ ID NO: 25911 - DNA, 21 bp, synthetic construct
  source 1..21: mol_type = other DNA
gcaggaccttcaagaggctgg

SEQ ID NO: 25912 - DNA, 21 bp, synthetic construct
  source 1..21: mol_type = other DNA
tatgcccgttctgggccgaac

SEQ ID NO: 25913 - DNA, 21 bp, synthetic construct
  source 1..21: mol_type = other DNA
caagaaagtactaacggacgt

SEQ ID NO: 25914 - DNA, 21 bp, synthetic construct
  source 1..21: mol_type = other DNA
aaagacgactttgtatcattc

SEQ ID NO: 25915 - DNA, 21 bp, synthetic construct
  source 1..21: mol_type = other DNA
tacgccaaaactggcgacaat

SEQ ID NO: 25916 - DNA, 21 bp, synthetic construct
  source 1..21: mol_type = other DNA
tacttttcaggagtagcggca

SEQ ID NO: 25917 - DNA, 21 bp, synthetic construct
  source 1..21: mol_type = other DNA
tactcaaaacacaatctaaat

SEQ ID NO: 25918 - DNA, 21 bp, synthetic construct
  source 1..21: mol_type = other DNA
ttttttagcggggtgcgtgaa

SEQ ID NO: 25919 - DNA, 21 bp, synthetic construct
  source 1..21: mol_type = other DNA
ttcagtcgtatcggacagaat

SEQ ID NO: 25920 - DNA, 21 bp, synthetic construct
  source 1..21: mol_type = other DNA
gaacccgaaagtcgtaaatgg

SEQ ID NO: 25921 - DNA, 21 bp, synthetic construct
  source 1..21: mol_type = other DNA
tacagtaaacagggcaataac

SEQ ID NO: 25922 - DNA, 21 bp, synthetic construct
  source 1..21: mol_type = other DNA
cactcaaagatgaactacaat

SEQ ID NO: 25923 - DNA, 21 bp, synthetic construct
  source 1..21: mol_type = other DNA
agagacgattttagcgctttc

SEQ ID NO: 25924 - DNA, 21 bp, synthetic construct
  source 1..21: mol_type = other DNA
tacagcagattgaatgacccc

SEQ ID NO: 25925 - DNA, 21 bp, synthetic construct
  source 1..21: mol_type = other DNA
tactcaaggcttagttttgat

SEQ ID NO: 25926 - DNA, 21 bp, synthetic construct
  source 1..21: mol_type = other DNA
tatttcacggggagacatgag

SEQ ID NO: 25927 - DNA, 21 bp, synthetic construct
  source 1..21: mol_type = other DNA
ggagcggaacacgtacgctgg

SEQ ID NO: 25928 - DNA, 21 bp, synthetic construct
  source 1..21: mol_type = other DNA
gacgatggcacctcaaaatgg

SEQ ID NO: 25929 - DNA, 21 bp, synthetic construct
  source 1..21: mol_type = other DNA
gaaactgacagcggttactgg

SEQ ID NO: 25930 - DNA, 21 bp, synthetic construct
  source 1..21: mol_type = other DNA
tatttcagtaaggtccgcgag

SEQ ID NO: 25931 - DNA, 21 bp, synthetic construct
  source 1..21: mol_type = other DNA
cgaacgccgaccacttatccg

SEQ ID NO: 25932 - DNA, 21 bp, synthetic construct
  source 1..21: mol_type = other DNA
gcatcctccacgaatggagtc

SEQ ID NO: 25933 - DNA, 21 bp, synthetic construct
  source 1..21: mol_type = other DNA
tacttcactggcacgaatagc

SEQ ID NO: 25934 - DNA, 21 bp, synthetic construct
  source 1..21: mol_type = other DNA
tacgtaaaatacgacaccagc

SEQ ID NO: 25935 - DNA, 21 bp, synthetic construct
  source 1..21: mol_type = other DNA
tatttcagtggaaaagcggat

SEQ ID NO: 25936 - DNA, 21 bp, synthetic construct
  source 1..21: mol_type = other DNA
ttgtcccgatctagctacaac

SEQ ID NO: 25937 - DNA, 21 bp, synthetic construct
  source 1..21: mol_type = other DNA
tatagccgcatcggagaagac

SEQ ID NO: 25938 - DNA, 21 bp, synthetic construct
  source 1..21: mol_type = other DNA
ttgtcgaagatcgggatgaat

SEQ ID NO: 25939 - DNA, 21 bp, synthetic construct
  source 1..21: mol_type = other DNA
ttagcgaaggctggaccaaac

SEQ ID NO: 25940 - DNA, 21 bp, synthetic construct
  source 1..21: mol_type = other DNA
ctggaggactgggtgaaatac

SEQ ID NO: 25941 - DNA, 21 bp, synthetic construct
  source 1..21: mol_type = other DNA
tactatagtgggatcgcagct

SEQ ID NO: 25942 - DNA, 21 bp, synthetic construct
  source 1..21: mol_type = other DNA
tacttcatgggagtcagggag

SEQ ID NO: 25943 - DNA, 21 bp, synthetic construct
  source 1..21: mol_type = other DNA
gggggagcgacatcctcatgg

SEQ ID NO: 25944 - DNA, 21 bp, synthetic construct
  source 1..21: mol_type = other DNA
tactcaagaattggtggtggc

SEQ ID NO: 25945 - DNA, 21 bp, synthetic construct
  source 1..21: mol_type = other DNA
aaggatgactatcattcatat

SEQ ID NO: 25946 - DNA, 21 bp, synthetic construct
  source 1..21: mol_type = other DNA
ccgatgagctcgagcgggtgg

SEQ ID NO: 25947 - DNA, 21 bp, synthetic construct
  source 1..21: mol_type = other DNA
tatagcaggatccagcctgat

SEQ ID NO: 25948 - DNA, 21 bp, synthetic construct
  source 1..21: mol_type = other DNA
tacgaaaatggatgcaaggaa

SEQ ID NO: 25949 - DNA, 21 bp, synthetic construct
  source 1..21: mol_type = other DNA
tactcacgtgttagtgatcca

SEQ ID NO: 25950 - DNA, 21 bp, synthetic construct
  source 1..21: mol_type = other DNA
tattttagcggtcaaacggcg

SEQ ID NO: 25951 - DNA, 21 bp, synthetic construct
  source 1..21: mol_type = other DNA
tactcacgtgtaggaactgga

SEQ ID NO: 25952 - DNA, 21 bp, synthetic construct
  source 1..21: mol_type = other DNA
tacttcagcgggacccacgaa

SEQ ID NO: 25953 - DNA, 21 bp, synthetic construct
  source 1..21: mol_type = other DNA
tcaaatagtactaatggaatc

SEQ ID NO: 25954 - DNA, 21 bp, synthetic construct
  source 1..21: mol_type = other DNA
tattttgctgggaaaagagat

SEQ ID NO: 25955 - DNA, 21 bp, synthetic construct
  source 1..21: mol_type = other DNA
tattcgcgtttgaacgataat

SEQ ID NO: 25956 - DNA, 21 bp, synthetic construct
  source 1..21: mol_type = other DNA
tatgcaagacttggagctaat

SEQ ID NO: 25957 - DNA, 21 bp, synthetic construct
  source 1..21: mol_type = other DNA
tattccaggttaaacctgatg

SEQ ID NO: 25958 - DNA, 21 bp, synthetic construct
  source 1..21: mol_type = other DNA
gcagacagcacaaacgggcga

SEQ ID NO: 25959 - DNA, 21 bp, synthetic construct
  source 1..21: mol_type = other DNA
gtcccagattacgtaaggtac

SEQ ID NO: 25960 - DNA, 21 bp, synthetic construct
  source 1..21: mol_type = other DNA
aaggatgagttcacaaaatat

SEQ ID NO: 25961 - DNA, 21 bp, synthetic construct
  source 1..21: mol_type = other DNA
aggtcgcacgacgccttccca

SEQ ID NO: 25962 - DNA, 21 bp, synthetic construct
  source 1..21: mol_type = other DNA
gtgtggtcaactaatgggatt

SEQ ID NO: 25963 - DNA, 21 bp, synthetic construct
  source 1..21: mol_type = other DNA
atgtgggacggcactggtcca

SEQ ID NO: 25964 - DNA, 21 bp, synthetic construct
  source 1..21: mol_type = other DNA
gactacgcttgtaagaaagag

SEQ ID NO: 25965 - DNA, 21 bp, synthetic construct
  source 1..21: mol_type = other DNA
ttctttaccggcaagattgct

SEQ ID NO: 25966 - DNA, 21 bp, synthetic construct
  source 1..21: mol_type = other DNA
tggacgccggtctgcaaggca

SEQ ID NO: 25967 - DNA, 21 bp, synthetic construct
  source 1..21: mol_type = other DNA
ggttcgcctggtgtacactgg

SEQ ID NO: 25968 - DNA, 21 bp, synthetic construct
  source 1..21: mol_type = other DNA
gagggaatagctcgcacgtgg

SEQ ID NO: 25969 - DNA, 21 bp, synthetic construct
  source 1..21: mol_type = other DNA
cgcgatgatttcgtgaaatgg

SEQ ID NO: 25970 - DNA, 21 bp, synthetic construct
  source 1..21: mol_type = other DNA
cgggatgatttctcagccttt

SEQ ID NO: 25971 - DNA, 21 bp, synthetic construct
  source 1..21: mol_type = other DNA
ctttgcagaccctgtctagag

SEQ ID NO: 25972 - DNA, 21 bp, synthetic construct
  source 1..21: mol_type = other DNA
ctcgcccgcactgcctacgac

SEQ ID NO: 25973 - DNA, 21 bp, synthetic construct
  source 1..21: mol_type = other DNA
atcttgtccgataggtcgtgg

SEQ ID NO: 25974 - DNA, 21 bp, synthetic construct
  source 1..21: mol_type = other DNA
tattggacaggtacggtggcg

SEQ ID NO: 25975 - DNA, 21 bp, synthetic construct
  source 1..21: mol_type = other DNA
agagagtgcggtgtgggacca

SEQ ID NO: 25976 - DNA, 21 bp, synthetic construct
  source 1..21: mol_type = other DNA
gattgcaaatattttaaagct

SEQ ID NO: 25977 - DNA, 21 bp, synthetic construct
  source 1..21: mol_type = other DNA
gagggcattagcagaagctgg

SEQ ID NO: 25978 - DNA, 21 bp, synthetic construct
  source 1..21: mol_type = other DNA
tactttaccggtaagcagagt

SEQ ID NO: 25979 - DNA, 21 bp, synthetic construct
  source 1..21: mol_type = other DNA
tattctaagcacaatgtcaat

SEQ ID NO: 25980 - DNA, 21 bp, synthetic construct
  source 1..21: mol_type = other DNA
gcgggagggggtctcttcatt

SEQ ID NO: 25981 - DNA, 21 bp, synthetic construct
  source 1..21: mol_type = other DNA
cgtggaggtgggctttttgtc

SEQ ID NO: 25982 - DNA, 21 bp, synthetic construct
  source 1..21: mol_type = other DNA
tacgacagcactaatgggttg

SEQ ID NO: 25983 - DNA, 21 bp, synthetic construct
  source 1..21: mol_type = other DNA
tactatacgggagttgtcgcg

SEQ ID NO: 25984 - DNA, 21 bp, synthetic construct
  source 1..21: mol_type = other DNA
cgtagccacgatgccttcccc

SEQ ID NO: 25985 - DNA, 21 bp, synthetic construct
  source 1..21: mol_type = other DNA
gtcctcgagagtagggattgg

SEQ ID NO: 25986 - DNA, 21 bp, synthetic construct
  source 1..21: mol_type = other DNA
aaggacgagttccgtacctac

SEQ ID NO: 25987 - DNA, 21 bp, synthetic construct
  source 1..21: mol_type = other DNA
ctcgcccgctccgcggttaac

SEQ ID NO: 25988 - DNA, 21 bp, synthetic construct
  source 1..21: mol_type = other DNA
taccataggttgggtgacgac

SEQ ID NO: 25989 - DNA, 21 bp, synthetic construct
  source 1..21: mol_type = other DNA
gtgtggtcgacgaacggaatt

SEQ ID NO: 25990 - DNA, 21 bp, synthetic construct
  source 1..21: mol_type = other DNA
tttgctagaaatggtcccaat

SEQ ID NO: 25991 - DNA, 21 bp, synthetic construct
  source 1..21: mol_type = other DNA
ctccatagacttttaccaaac

SEQ ID NO: 25992 - DNA, 21 bp, synthetic construct
  source 1..21: mol_type = other DNA
atcgcttcaaccaacggtgta

SEQ ID NO: 25993 - DNA, 21 bp, synthetic construct
  source 1..21: mol_type = other DNA
ggtccggaccatgtcaggtgg

SEQ ID NO: 25994 - DNA, 21 bp, synthetic construct
  source 1..21: mol_type = other DNA
aatatgagtgcagggacttgg

SEQ ID NO: 25995 - DNA, 21 bp, synthetic construct
  source 1..21: mol_type = other DNA
agggatgactatacctcgtgg

SEQ ID NO: 25996 - DNA, 21 bp, synthetic construct
  source 1..21: mol_type = other DNA
ctcgcccgtgcgggctataac

SEQ ID NO: 25997 - DNA, 21 bp, synthetic construct
  source 1..21: mol_type = other DNA
ctcactcgtttaagtcctgta

SEQ ID NO: 25998 - DNA, 21 bp, synthetic construct
  source 1..21: mol_type = other DNA
ggagacggtacttctaggtgg

SEQ ID NO: 25999 - DNA, 21 bp, synthetic construct
  source 1..21: mol_type = other DNA
ataatggcggaacgtacatgg

SEQ ID NO: 26000 - DNA, 21 bp, synthetic construct
  source 1..21: mol_type = other DNA
tatttcacggggatgatcgcc

SEQ ID NO: 26001 - DNA, 21 bp, synthetic construct
  source 1..21: mol_type = other DNA
cgcgacgctatgtctagttgg

SEQ ID NO: 26002 - DNA, 21 bp, synthetic construct
  source 1..21: mol_type = other DNA
tacgtaaggtctgacccccgt

SEQ ID NO: 26003 - DNA, 21 bp, synthetic construct
  source 1..21: mol_type = other DNA
tatttcactggcacttactcc

SEQ ID NO: 26004 - DNA, 21 bp, synthetic construct
  source 1..21: mol_type = other DNA
tattttatgggcgtccgtgaa

SEQ ID NO: 26005 - DNA, 21 bp, synthetic construct
  source 1..21: mol_type = other DNA
tacttcaccggtttccacgaa

SEQ ID NO: 26006 - DNA, 21 bp, synthetic construct
  source 1..21: mol_type = other DNA
agactagaagaccgagcttgg

SEQ ID NO: 26007 - DNA, 21 bp, synthetic construct
  source 1..21: mol_type = other DNA
tacttcgccggtaaacacgac

SEQ ID NO: 26008 - DNA, 21 bp, synthetic construct
  source 1..21: mol_type = other DNA
tatttctcagggcagcttgaa

SEQ ID NO: 26009 - DNA, 21 bp, synthetic construct
  source 1..21: mol_type = other DNA
tatttcacggggaaacaatca

SEQ ID NO: 26010 - DNA, 21 bp, synthetic construct
  source 1..21: mol_type = other DNA
tactggcgcctttctgataat

SEQ ID NO: 26011 - DNA, 21 bp, synthetic construct
  source 1..21: mol_type = other DNA
ctgtgggacgggacaaatgcg

SEQ ID NO: 26012 - DNA, 21 bp, synthetic construct
  source 1..21: mol_type = other DNA
tactttagcggggtgatcgac

SEQ ID NO: 26013 - DNA, 21 bp, synthetic construct
  source 1..21: mol_type = other DNA
ttgtcaaaaatgaacattaat

SEQ ID NO: 26014 - DNA, 21 bp, synthetic construct
  source 1..21: mol_type = other DNA
aaggacgacttcacggggttc

SEQ ID NO: 26015 - DNA, 21 bp, synthetic construct
  source 1..21: mol_type = other DNA
cttgctaagactgggatgaat

SEQ ID NO: 26016 - DNA, 21 bp, synthetic construct
  source 1..21: mol_type = other DNA
cgcgaggattatacaacatgg

SEQ ID NO: 26017 - DNA, 21 bp, synthetic construct
  source 1..21: mol_type = other DNA
agagatgactactcgaccttt

SEQ ID NO: 26018 - DNA, 21 bp, synthetic construct
  source 1..21: mol_type = other DNA
cactcaaggttaaatatagta

SEQ ID NO: 26019 - DNA, 21 bp, synthetic construct
  source 1..21: mol_type = other DNA
agatctcatgacgcatttcct

SEQ ID NO: 26020 - DNA, 21 bp, synthetic construct
  source 1..21: mol_type = other DNA
ttggacgattatacgacatgg

SEQ ID NO: 26021 - DNA, 21 bp, synthetic construct
  source 1..21: mol_type = other DNA
tattggagcggtatcaaggag

SEQ ID NO: 26022 - DNA, 21 bp, synthetic construct
  source 1..21: mol_type = other DNA
tatttttccggtcaaaccgcg

SEQ ID NO: 26023 - DNA, 21 bp, synthetic construct
  source 1..21: mol_type = other DNA
tatagcaaacaaggatttaat

SEQ ID NO: 26024 - DNA, 21 bp, synthetic construct
  source 1..21: mol_type = other DNA
tactttagcggacgtcaggag

SEQ ID NO: 26025 - DNA, 21 bp, synthetic construct
  source 1..21: mol_type = other DNA
cgccactctaagctgcccgga

SEQ ID NO: 26026 - DNA, 21 bp, synthetic construct
  source 1..21: mol_type = other DNA
ttcagccgtgtgggtcccaat

SEQ ID NO: 26027 - DNA, 21 bp, synthetic construct
  source 1..21: mol_type = other DNA
ctacaccgtttaggagacagc

SEQ ID NO: 26028 - DNA, 21 bp, synthetic construct
  source 1..21: mol_type = other DNA
gatatggagagctatgattgg

SEQ ID NO: 26029 - DNA, 21 bp, synthetic construct
  source 1..21: mol_type = other DNA
cagttgagcgatcgcacctgg

SEQ ID NO: 26030 - DNA, 21 bp, synthetic construct
  source 1..21: mol_type = other DNA
tacgctaagacaggttggaat

SEQ ID NO: 26031 - DNA, 21 bp, synthetic construct
  source 1..21: mol_type = other DNA
ctctgccgcccctgtagcccg

SEQ ID NO: 26032 - DNA, 21 bp, synthetic construct
  source 1..21: mol_type = other DNA
cgtgacggtacctcccattgg

SEQ ID NO: 26033 - DNA, 21 bp, synthetic construct
  source 1..21: mol_type = other DNA
gacctacgagctcatgattgg

SEQ ID NO: 26034 - DNA, 21 bp, synthetic construct
  source 1..21: mol_type = other DNA
attaacgggcgtggctgggat

SEQ ID NO: 26035 - DNA, 21 bp, synthetic construct
  source 1..21: mol_type = other DNA
gagagttcgactaacggcaga

SEQ ID NO: 26036 - DNA, 21 bp, synthetic construct
  source 1..21: mol_type = other DNA
tattccaaaatgaatcaaaac

SEQ ID NO: 26037 - DNA, 21 bp, synthetic construct
  source 1..21: mol_type = other DNA
tatttctcaggccagatggag

SEQ ID NO: 26038 - DNA, 21 bp, synthetic construct
  source 1..21: mol_type = other DNA
ataatgatggaccgcggctgg

SEQ ID NO: 26039 - DNA, 21 bp, synthetic construct
  source 1..21: mol_type = other DNA
aagggagattcacgtagttgg

SEQ ID NO: 26040 - DNA, 21 bp, synthetic construct
  source 1..21: mol_type = other DNA
ttctggtcaggtgttaaagag

SEQ ID NO: 26041 - DNA, 21 bp, synthetic construct
  source 1..21: mol_type = other DNA
tacttccatggtaaagtagct

SEQ ID NO: 26042 - DNA, 21 bp, synthetic construct
  source 1..21: mol_type = other DNA
tatagtaagtcggggagcaat

SEQ ID NO: 26043 - DNA, 21 bp, synthetic construct
  source 1..21: mol_type = other DNA
tatgtaagaagtgatgcaatg

SEQ ID NO: 26044 - DNA, 21 bp, synthetic construct
  source 1..21: mol_type = other DNA
aagagcgagttcaaaacatat

SEQ ID NO: 26045 - DNA, 21 bp, synthetic construct
  source 1..21: mol_type = other DNA
cccatgagtagccacgggtgg

SEQ ID NO: 26046 - DNA, 21 bp, synthetic construct
  source 1..21: mol_type = other DNA
tattcgaaacataacgataat

SEQ ID NO: 26047 - DNA, 21 bp, synthetic construct
  source 1..21: mol_type = other DNA
tatttcaccgggacggtaaag

SEQ ID NO: 26048 - DNA, 21 bp, synthetic construct
  source 1..21: mol_type = other DNA
tttagtcgcgtaggaatgaat

SEQ ID NO: 26049 - DNA, 21 bp, synthetic construct
  source 1..21: mol_type = other DNA
tatgcgaaaacgggctggaat

SEQ ID NO: 26050 - DNA, 21 bp, synthetic construct
  source 1..21: mol_type = other DNA
tattcagttgccggatgcaat

SEQ ID NO: 26051 - DNA, 21 bp, synthetic construct
  source 1..21: mol_type = other DNA
tatttcactggatatccggat

SEQ ID NO: 26052 - DNA, 21 bp, synthetic construct
  source 1..21: mol_type = other DNA
tatttctcgggacagatacag

SEQ ID NO: 26053 - DNA, 21 bp, synthetic construct
  source 1..21: mol_type = other DNA
tacttcactggagtccttcaa

SEQ ID NO: 26054 - DNA, 21 bp, synthetic construct
  source 1..21: mol_type = other DNA
ataatgagcagtgcaggttgg

SEQ ID NO: 26055 - DNA, 21 bp, synthetic construct
  source 1..21: mol_type = other DNA
tactttacaggtaagcatgac

SEQ ID NO: 26056 - DNA, 21 bp, synthetic construct
  source 1..21: mol_type = other DNA
ctatgcaggccgtgtgatgaa

SEQ ID NO: 26057 - DNA, 21 bp, synthetic construct
  source 1..21: mol_type = other DNA
agaggagatcacgtatacccc

SEQ ID NO: 26058 - DNA, 21 bp, synthetic construct
  source 1..21: mol_type = other DNA
aaagacgagttcaaaacgtac

SEQ ID NO: 26059 - DNA, 21 bp, synthetic construct
  source 1..21: mol_type = other DNA
tattcacgtatcggggataat

SEQ ID NO: 26060 - DNA, 21 bp, synthetic construct
  source 1..21: mol_type = other DNA
cgcagcgagtttgtttcattc

SEQ ID NO: 26061 - DNA, 21 bp, synthetic construct
  source 1..21: mol_type = other DNA
tactcgaagttagactcacgc

SEQ ID NO: 26062 - DNA, 21 bp, synthetic construct
  source 1..21: mol_type = other DNA
taccaccgtttaggtcaagat

SEQ ID NO: 26063 - DNA, 21 bp, synthetic construct
  source 1..21: mol_type = other DNA
tacgcgaaatcagggtggaac

SEQ ID NO: 26064 - DNA, 21 bp, synthetic construct
  source 1..21: mol_type = other DNA
gacatgggcgaccgtaagtgg

SEQ ID NO: 26065 - DNA, 21 bp, synthetic construct
  source 1..21: mol_type = other DNA
tattttaccggtcaacttgcc

SEQ ID NO: 26066 - DNA, 21 bp, synthetic construct
  source 1..21: mol_type = other DNA
taccaccgcttgcaaatagat

SEQ ID NO: 26067 - DNA, 21 bp, synthetic construct
  source 1..21: mol_type = other DNA
gacatgaggagtgcaaattgg

SEQ ID NO: 26068 - DNA, 21 bp, synthetic construct
  source 1..21: mol_type = other DNA
ccttatgccaagagcccgcta

SEQ ID NO: 26069 - DNA, 21 bp, synthetic construct
  source 1..21: mol_type = other DNA
cgagatggaacttcaatgtgg

SEQ ID NO: 26070 - DNA, 21 bp, synthetic construct
  source 1..21: mol_type = other DNA
tactttactggtgtgacggac

SEQ ID NO: 26071 - DNA, 21 bp, synthetic construct
  source 1..21: mol_type = other DNA
tcgcaatcaacgaatggcgta

SEQ ID NO: 26072 - DNA, 21 bp, synthetic construct
  source 1..21: mol_type = other DNA
cgcgatggagcctcgtcttgg

SEQ ID NO: 26073 - DNA, 21 bp, synthetic construct
  source 1..21: mol_type = other DNA
ttcttttcgggcgtactcgag

SEQ ID NO: 26074 - DNA, 21 bp, synthetic construct
  source 1..21: mol_type = other DNA
cataccgatgactcataccct

SEQ ID NO: 26075 - DNA, 21 bp, synthetic construct
  source 1..21: mol_type = other DNA
tatagcaagaaaaatgtgaat

SEQ ID NO: 26076 - DNA, 21 bp, synthetic construct
  source 1..21: mol_type = other DNA
cgtgaagagaatgttcgttgg

SEQ ID NO: 26077 - DNA, 21 bp, synthetic construct
  source 1..21: mol_type = other DNA
agggagccaggcgttagatgg

SEQ ID NO: 26078 - DNA, 21 bp, synthetic construct
  source 1..21: mol_type = other DNA
tatgcgaaagccggggcgaat

SEQ ID NO: 26079 - DNA, 21 bp, synthetic construct
  source 1..21: mol_type = other DNA
cgcgaggatgaggtgtattgg

SEQ ID NO: 26080 - DNA, 21 bp, synthetic construct
  source 1..21: mol_type = other DNA
cgcggaggagatgtgtacccc

SEQ ID NO: 26081 - DNA, 21 bp, synthetic construct
  source 1..21: mol_type = other DNA
agaatggaatcaataaaatgg

SEQ ID NO: 26082 - DNA, 21 bp, synthetic construct
  source 1..21: mol_type = other DNA
tacttccatgggaaacttgag

SEQ ID NO: 26083 - DNA, 21 bp, synthetic construct
  source 1..21: mol_type = other DNA
tatgctaagcagggttggaat

SEQ ID NO: 26084 - DNA, 21 bp, synthetic construct
  source 1..21: mol_type = other DNA
tactcgcgcgtggggtttaat

SEQ ID NO: 26085 - DNA, 21 bp, synthetic construct
  source 1..21: mol_type = other DNA
atagaatcatttaatggcaga

SEQ ID NO: 26086 - DNA, 21 bp, synthetic construct
  source 1..21: mol_type = other DNA
tactctaaggtcaactacaac

SEQ ID NO: 26087 - DNA, 21 bp, synthetic construct
  source 1..21: mol_type = other DNA
aacacctcaaccaatggagtc

SEQ ID NO: 26088 - DNA, 21 bp, synthetic construct
  source 1..21: mol_type = other DNA
tactttacaggaatgacagac

SEQ ID NO: 26089 - DNA, 21 bp, synthetic construct
  source 1..21: mol_type = other DNA
tacttctctggtaagcacgat

SEQ ID NO: 26090 - DNA, 21 bp, synthetic construct
  source 1..21: mol_type = other DNA
tattttagtggtacttatgat

SEQ ID NO: 26091 - DNA, 21 bp, synthetic construct
  source 1..21: mol_type = other DNA
ggaagcgccacctcatcgtgg

SEQ ID NO: 26092 - DNA, 21 bp, synthetic construct
  source 1..21: mol_type = other DNA
agagaggagaacgtttactgg

SEQ ID NO: 26093 - DNA, 21 bp, synthetic construct
  source 1..21: mol_type = other DNA
agaagtgatttcgtaacctac

SEQ ID NO: 26094 - DNA, 21 bp, synthetic construct
  source 1..21: mol_type = other DNA
tatagtaaaatgggaaccaac

SEQ ID NO: 26095 - DNA, 21 bp, synthetic construct
  source 1..21: mol_type = other DNA
tatttttcagggaggaccgct

SEQ ID NO: 26096 - DNA, 21 bp, synthetic construct
  source 1..21: mol_type = other DNA
gttatgcaagcaagcaactgg

SEQ ID NO: 26097 - DNA, 21 bp, synthetic construct
  source 1..21: mol_type = other DNA
tatgcacggacagggatcaat

SEQ ID NO: 26098 - DNA, 21 bp, synthetic construct
  source 1..21: mol_type = other DNA
aggatggatagtagtgggtgg

SEQ ID NO: 26099 - DNA, 21 bp, synthetic construct
  source 1..21: mol_type = other DNA
tatttcagcggcaagctaagt

SEQ ID NO: 26100 - DNA, 21 bp, synthetic construct
  source 1..21: mol_type = other DNA
tacttcaccggagttactgac

SEQ ID NO: 26101 - DNA, 21 bp, synthetic construct
  source 1..21: mol_type = other DNA
tatttcgcagggaagagggaa

SEQ ID NO: 26102 - DNA, 21 bp, synthetic construct
  source 1..21: mol_type = other DNA
tactcccgccttcagccttta

SEQ ID NO: 26103 - DNA, 21 bp, synthetic construct
  source 1..21: mol_type = other DNA
tacgtcaggtcagacatgcat

SEQ ID NO: 26104 - DNA, 21 bp, synthetic construct
  source 1..21: mol_type = other DNA
tatttcacagggacagtatta

SEQ ID NO: 26105 - DNA, 21 bp, synthetic construct
  source 1..21: mol_type = other DNA
cgcgaaggaacatcgaagtgg

SEQ ID NO: 26106 - DNA, 21 bp, synthetic construct
  source 1..21: mol_type = other DNA
tactcgcgtcttcaagagaac

SEQ ID NO: 26107 - DNA, 21 bp, synthetic construct
  source 1..21: mol_type = other DNA
tactcaaaagctggccacaat

SEQ ID NO: 26108 - DNA, 21 bp, synthetic construct
  source 1..21: mol_type = other DNA
tatagtcgtttaggagccgac

SEQ ID NO: 26109 - DNA, 21 bp, synthetic construct
  source 1..21: mol_type = other DNA
agggacgattacagcacatac

SEQ ID NO: 26110 - DNA, 21 bp, synthetic construct
  source 1..21: mol_type = other DNA
acctgtaaggcacagatgggt

SEQ ID NO: 26111 - DNA, 21 bp, synthetic construct
  source 1..21: mol_type = other DNA
atggaatccactaatggggtg

SEQ ID NO: 26112 - DNA, 21 bp, synthetic construct
  source 1..21: mol_type = other DNA
gtattatctagcaagacatgg

SEQ ID NO: 26113 - DNA, 21 bp, synthetic construct
  source 1..21: mol_type = other DNA
ttgatgaccgacaggacatgg

SEQ ID NO: 26114 - DNA, 21 bp, synthetic construct
  source 1..21: mol_type = other DNA
atcgaatcgtctaatggcgtc

SEQ ID NO: 26115 - DNA, 21 bp, synthetic construct
  source 1..21: mol_type = other DNA
ctctccagggcgtccgacaac

SEQ ID NO: 26116 - DNA, 21 bp, synthetic construct
  source 1..21: mol_type = other DNA
gggagctctacgtctacttgg

SEQ ID NO: 26117 - DNA, 21 bp, synthetic construct
  source 1..21: mol_type = other DNA
tatagccgcataggtcctgac

SEQ ID NO: 26118 - DNA, 21 bp, synthetic construct
  source 1..21: mol_type = other DNA
cgaggtgaccgtgtattccca

SEQ ID NO: 26119 - DNA, 21 bp, synthetic construct
  source 1..21: mol_type = other DNA
cgcaactcgacagtatatcca

SEQ ID NO: 26120 - DNA, 21 bp, synthetic construct
  source 1..21: mol_type = other DNA
tacttcgcagggaaaagggac

SEQ ID NO: 26121 - DNA, 21 bp, synthetic construct
  source 1..21: mol_type = other DNA
ctccataagctccaaccgtgt

SEQ ID NO: 26122 - DNA, 21 bp, synthetic construct
  source 1..21: mol_type = other DNA
aggatgtcagatgcatatgcc

SEQ ID NO: 26123 - DNA, 21 bp, synthetic construct
  source 1..21: mol_type = other DNA
cggctccaagacgtgacctgg

SEQ ID NO: 26124 - DNA, 21 bp, synthetic construct
  source 1..21: mol_type = other DNA
tacactcgcttagataaggac

SEQ ID NO: 26125 - DNA, 21 bp, synthetic construct
  source 1..21: mol_type = other DNA
ttaaaggacggaacatccgcc

SEQ ID NO: 26126 - DNA, 21 bp, synthetic construct
  source 1..21: mol_type = other DNA
tatagcaggttgggcgttaac

SEQ ID NO: 26127 - DNA, 21 bp, synthetic construct
  source 1..21: mol_type = other DNA
agggacgactacgttcactgg

SEQ ID NO: 26128 - DNA, 21 bp, synthetic construct
  source 1..21: mol_type = other DNA
gatatggcaagccaacagtgg

SEQ ID NO: 26129 - DNA, 21 bp, synthetic construct
  source 1..21: mol_type = other DNA
ctaatgagtgatcgctcttgg

SEQ ID NO: 26130 - DNA, 21 bp, synthetic construct
  source 1..21: mol_type = other DNA
tactgtaagccttgcttaact

SEQ ID NO: 26131 - DNA, 21 bp, synthetic construct
  source 1..21: mol_type = other DNA
ctccatagattgagtggggat

SEQ ID NO: 26132 - DNA, 21 bp, synthetic construct
  source 1..21: mol_type = other DNA
tatagtcgtattgaaccgaat

SEQ ID NO: 26133 - DNA, 21 bp, synthetic construct
  source 1..21: mol_type = other DNA
tactttaccgggatgatctca

SEQ ID NO: 26134 - DNA, 21 bp, synthetic construct
  source 1..21: mol_type = other DNA
ttccataagatgaactataac

SEQ ID NO: 26135 - DNA, 21 bp, synthetic construct
  source 1..21: mol_type = other DNA
aaagacgaatttactaagtac

SEQ ID NO: 26136 - DNA, 21 bp, synthetic construct
  source 1..21: mol_type = other DNA
tacagcagagtcggcgagaac

SEQ ID NO: 26137 - DNA, 21 bp, synthetic construct
  source 1..21: mol_type = other DNA
tcgcggtcgacaaatggtatc

SEQ ID NO: 26138 - DNA, 21 bp, synthetic construct
  source 1..21: mol_type = other DNA
tatgctaggttgggtgccaac

SEQ ID NO: 26139 - DNA, 21 bp, synthetic construct
  source 1..21: mol_type = other DNA
tatagtcgggtcggcttaaac

SEQ ID NO: 26140 - DNA, 21 bp, synthetic construct
  source 1..21: mol_type = other DNA
agggatgactacttgtcgtgg

SEQ ID NO: 26141 - DNA, 21 bp, synthetic construct
  source 1..21: mol_type = other DNA
tattggagtggggtgaaattg

SEQ ID NO: 26142 - DNA, 21 bp, synthetic construct
  source 1..21: mol_type = other DNA
tacttttcgggaatccttggc

SEQ ID NO: 26143 - DNA, 21 bp, synthetic construct
  source 1..21: mol_type = other DNA
gtagacgaatggaaaacatat

SEQ ID NO: 26144 - DNA, 21 bp, synthetic construct
  source 1..21: mol_type = other DNA
tatttcactggtatgatggac

SEQ ID NO: 26145 - DNA, 21 bp, synthetic construct
  source 1..21: mol_type = other DNA
ttctcgagggtgggtaacaat

SEQ ID NO: 26146 - DNA, 21 bp, synthetic construct
  source 1..21: mol_type = other DNA
tacagcaaaatggggatcaat

SEQ ID NO: 26147 - DNA, 21 bp, synthetic construct
  source 1..21: mol_type = other DNA
attgacgactacgtgcactgg

SEQ ID NO: 26148 - DNA, 21 bp, synthetic construct
  source 1..21: mol_type = other DNA
tatcataagcattccttaaat

SEQ ID NO: 26149 - DNA, 21 bp, synthetic construct
  source 1..21: mol_type = other DNA
tacttttcagggcaaataatg

SEQ ID NO: 26150 - DNA, 21 bp, synthetic construct
  source 1..21: mol_type = other DNA
tacttaaaaagtcagatgtac

SEQ ID NO: 26151 - DNA, 21 bp, synthetic construct
  source 1..21: mol_type = other DNA
aggttagaagaccgatcctgg

SEQ ID NO: 26152 - DNA, 21 bp, synthetic construct
  source 1..21: mol_type = other DNA
tatttctcgggtacatacgaa

SEQ ID NO: 26153 - DNA, 21 bp, synthetic construct
  source 1..21: mol_type = other DNA
tcggacggagttagtcgttgg

SEQ ID NO: 26154 - DNA, 21 bp, synthetic construct
  source 1..21: mol_type = other DNA
aggttggagtcagtgagctgg

SEQ ID NO: 26155 - DNA, 21 bp, synthetic construct
  source 1..21: mol_type = other DNA
atctggagtacgaatggcatc

SEQ ID NO: 26156 - DNA, 21 bp, synthetic construct
  source 1..21: mol_type = other DNA
gggtccccatcgtcgtcctgg

SEQ ID NO: 26157 - DNA, 21 bp, synthetic construct
  source 1..21: mol_type = other DNA
agggacgagtatacagggttc

SEQ ID NO: 26158 - DNA, 21 bp, synthetic construct
  source 1..21: mol_type = other DNA
tatcacgcgagagggctaaat

SEQ ID NO: 26159 - DNA, 21 bp, synthetic construct
  source 1..21: mol_type = other DNA
tactcgaagatgaaccctaac

SEQ ID NO: 26160 - DNA, 21 bp, synthetic construct
  source 1..21: mol_type = other DNA
tgcgctggtatgtgtggcgcc

SEQ ID NO: 26161 - DNA, 21 bp, synthetic construct
  source 1..21: mol_type = other DNA
agatgtgaaaggcccccggct

SEQ ID NO: 26162 - DNA, 21 bp, synthetic construct
  source 1..21: mol_type = other DNA
aaggacgacttctcggcttat

SEQ ID NO: 26163 - DNA, 21 bp, synthetic construct
  source 1..21: mol_type = other DNA
aggatggaagcgctcgattgg

SEQ ID NO: 26164 - DNA, 21 bp, synthetic construct
  source 1..21: mol_type = other DNA
tattggagcggcacgatagcg

SEQ ID NO: 26165 - DNA, 21 bp, synthetic construct
  source 1..21: mol_type = other DNA
ggaggcgaatactcaaagtgg

SEQ ID NO: 26166 - DNA, 21 bp, synthetic construct
  source 1..21: mol_type = other DNA
tacttttcaggcattcccgca

SEQ ID NO: 26167 - DNA, 21 bp, synthetic construct
  source 1..21: mol_type = other DNA
cttttacagagcgcgacatgg

SEQ ID NO: 26168 - DNA, 21 bp, synthetic construct
  source 1..21: mol_type = other DNA
tacagtaagcaagggcacaac

SEQ ID NO: 26169 - DNA, 21 bp, synthetic construct
  source 1..21: mol_type = other DNA
tactttagtggaacttatgag

SEQ ID NO: 26170 - DNA, 21 bp, synthetic construct
  source 1..21: mol_type = other DNA
atcatgagctcgagtgcatgg

SEQ ID NO: 26171 - DNA, 21 bp, synthetic construct
  source 1..21: mol_type = other DNA
aggaggacagacgtctatcct

SEQ ID NO: 26172 - DNA, 21 bp, synthetic construct
  source 1..21: mol_type = other DNA
tgtaaggctaatcctcctgag

SEQ ID NO: 26173 - DNA, 21 bp, synthetic construct
  source 1..21: mol_type = other DNA
gtgccggatttcgtcaagtgg

SEQ ID NO: 26174 - DNA, 21 bp, synthetic construct
  source 1..21: mol_type = other DNA
cgttcgatcgatgcttacccg

SEQ ID NO: 26175 - DNA, 21 bp, synthetic construct
  source 1..21: mol_type = other DNA
tacactcgcatagggcctaat

SEQ ID NO: 26176 - DNA, 21 bp, synthetic construct
  source 1..21: mol_type = other DNA
tattctaagctgaatacgcat

SEQ ID NO: 26177 - DNA, 21 bp, synthetic construct
  source 1..21: mol_type = other DNA
tattggtccactattaaggaa

SEQ ID NO: 26178 - DNA, 21 bp, synthetic construct
  source 1..21: mol_type = other DNA
gggcctgatcacgtacgttgg

SEQ ID NO: 26179 - DNA, 21 bp, synthetic construct
  source 1..21: mol_type = other DNA
tacagtagaattggcgaaaac

SEQ ID NO: 26180 - DNA, 21 bp, synthetic construct
  source 1..21: mol_type = other DNA
caaaacgagttttcgacatat

SEQ ID NO: 26181 - DNA, 21 bp, synthetic construct
  source 1..21: mol_type = other DNA
gactggtacggtaacgctgcc

SEQ ID NO: 26182 - DNA, 21 bp, synthetic construct
  source 1..21: mol_type = other DNA
atatggtcaacaaacgggata

SEQ ID NO: 26183 - DNA, 21 bp, synthetic construct
  source 1..21: mol_type = other DNA
gggggtgaagggtccttctgg

SEQ ID NO: 26184 - DNA, 21 bp, synthetic construct
  source 1..21: mol_type = other DNA
tcaatggagagtcgcacatgg

SEQ ID NO: 26185 - DNA, 21 bp, synthetic construct
  source 1..21: mol_type = other DNA
aggatggaatcgtcaatgtgg

SEQ ID NO: 26186 - DNA, 21 bp, synthetic construct
  source 1..21: mol_type = other DNA
aggtgcggaggagattggcct

SEQ ID NO: 26187 - DNA, 21 bp, synthetic construct
  source 1..21: mol_type = other DNA
tacgcacgagtcgggcccaat

SEQ ID NO: 26188 - DNA, 21 bp, synthetic construct
  source 1..21: mol_type = other DNA
cacagcagtaccaacggtgtg

SEQ ID NO: 26189 - DNA, 21 bp, synthetic construct
  source 1..21: mol_type = other DNA
tatgctaggtcgggcttaaac

SEQ ID NO: 26190 - DNA, 21 bp, synthetic construct
  source 1..21: mol_type = other DNA
atgagcgatttcaagattttt

SEQ ID NO: 26191 - DNA, 21 bp, synthetic construct
  source 1..21: mol_type = other DNA
ctttgtagaccgtgctacgaa

SEQ ID NO: 26192 - DNA, 21 bp, synthetic construct
  source 1..21: mol_type = other DNA
tacacaaggttacagaacacg

SEQ ID NO: 26193 - DNA, 21 bp, synthetic construct
  source 1..21: mol_type = other DNA
tacttccatggtattcaggaa

SEQ ID NO: 26194 - DNA, 21 bp, synthetic construct
  source 1..21: mol_type = other DNA
tactacacgggagtgattgcc

SEQ ID NO: 26195 - DNA, 21 bp, synthetic construct
  source 1..21: mol_type = other DNA
atcatgagtacaaacggggta

SEQ ID NO: 26196 - DNA, 21 bp, synthetic construct
  source 1..21: mol_type = other DNA
tactttacaggcaggccagac

SEQ ID NO: 26197 - DNA, 21 bp, synthetic construct
  source 1..21: mol_type = other DNA
aggaacgacatggtgttcccc

SEQ ID NO: 26198 - DNA, 21 bp, synthetic construct
  source 1..21: mol_type = other DNA
tatttcgcggggaggacggaa

SEQ ID NO: 26199 - DNA, 21 bp, synthetic construct
  source 1..21: mol_type = other DNA
tatttcacggggcagcttgct

SEQ ID NO: 26200 - DNA, 21 bp, synthetic construct
  source 1..21: mol_type = other DNA
atccaccgtttgtcacctgat

SEQ ID NO: 26201 - DNA, 21 bp, synthetic construct
  source 1..21: mol_type = other DNA
tatgccagaatggggcctaac

SEQ ID NO: 26202 - DNA, 21 bp, synthetic construct
  source 1..21: mol_type = other DNA
tactttcaggggattagggag

SEQ ID NO: 26203 - DNA, 21 bp, synthetic construct
  source 1..21: mol_type = other DNA
ctccatcggctccacccatta

SEQ ID NO: 26204 - DNA, 21 bp, synthetic construct
  source 1..21: mol_type = other DNA
cgtgaaagtgaagtcaggtgg

SEQ ID NO: 26205 - DNA, 21 bp, synthetic construct
  source 1..21: mol_type = other DNA
tacgccaaagccggctttaat

SEQ ID NO: 26206 - DNA, 21 bp, synthetic construct
  source 1..21: mol_type = other DNA
tatagcaaacagaaccataat

SEQ ID NO: 26207 - DNA, 21 bp, synthetic construct
  source 1..21: mol_type = other DNA
tatagcaagagaggggaaaat

SEQ ID NO: 26208 - DNA, 21 bp, synthetic construct
  source 1..21: mol_type = other DNA
tatgcgaggataggtcttaac

SEQ ID NO: 26209 - DNA, 21 bp, synthetic construct
  source 1..21: mol_type = other DNA
ctttcaaaatcgagcatcaac

SEQ ID NO: 26210 - DNA, 21 bp, synthetic construct
  source 1..21: mol_type = other DNA
ggctcaagtacaagcacgtgg

SEQ ID NO: 26211 - DNA, 21 bp, synthetic construct
  source 1..21: mol_type = other DNA
tacttttcgggtgtggtacca

SEQ ID NO: 26212 - DNA, 21 bp, synthetic construct
  source 1..21: mol_type = other DNA
tacttctccggtatcagcaag

SEQ ID NO: 26213 - DNA, 21 bp, synthetic construct
  source 1..21: mol_type = other DNA
aaaatgcaggatcgtagctgg

SEQ ID NO: 26214 - DNA, 21 bp, synthetic construct
  source 1..21: mol_type = other DNA
ttcttcaccggcacttttgac

SEQ ID NO: 26215 - DNA, 21 bp, synthetic construct
  source 1..21: mol_type = other DNA
cttagtcgggcaggcgacaac

SEQ ID NO: 26216 - DNA, 21 bp, synthetic construct
  source 1..21: mol_type = other DNA
tgcaaggccccatgctgcccc

SEQ ID NO: 26217 - DNA, 21 bp, synthetic construct
  source 1..21: mol_type = other DNA
tatttcacaggaaggagcgat

SEQ ID NO: 26218 - DNA, 21 bp, synthetic construct
  source 1..21: mol_type = other DNA
cgatcgagtgatgtatatcct

SEQ ID NO: 26219 - DNA, 21 bp, synthetic construct
  source 1..21: mol_type = other DNA
gtactaagcgcaagcagttgg

SEQ ID NO: 26220 - DNA, 21 bp, synthetic construct
  source 1..21: mol_type = other DNA
cgggatgggtcatcagcgtgg

SEQ ID NO: 26221 - DNA, 21 bp, synthetic construct
  source 1..21: mol_type = other DNA
tacttcacgggccggctggac

SEQ ID NO: 26222 - DNA, 21 bp, synthetic construct
  source 1..21: mol_type = other DNA
ttttggtcgggagtggtagag

SEQ ID NO: 26223 - DNA, 21 bp, synthetic construct
  source 1..21: mol_type = other DNA
aggctggaagaccggttgtgg

SEQ ID NO: 26224 - DNA, 21 bp, synthetic construct
  source 1..21: mol_type = other DNA
tactcgcgtgtaggaatcaat

SEQ ID NO: 26225 - DNA, 21 bp, synthetic construct
  source 1..21: mol_type = other DNA
ggaggtgagcatagcacatgg

SEQ ID NO: 26226 - DNA, 21 bp, synthetic construct
  source 1..21: mol_type = other DNA
tatttttccggccgagtggcg

SEQ ID NO: 26227 - DNA, 21 bp, synthetic construct
  source 1..21: mol_type = other DNA
gatcttaagagcgccagttgg

SEQ ID NO: 26228 - DNA, 21 bp, synthetic construct
  source 1..21: mol_type = other DNA
tacgtgaggagccaagataat

SEQ ID NO: 26229 - DNA, 21 bp, synthetic construct
  source 1..21: mol_type = other DNA
tactttcatggaaaggtagcg

SEQ ID NO: 26230 - DNA, 21 bp, synthetic construct
  source 1..21: mol_type = other DNA
tactccaagatggggacaaat

SEQ ID NO: 26231 - DNA, 21 bp, synthetic construct
  source 1..21: mol_type = other DNA
agggatggtatgagcgcttgg

SEQ ID NO: 26232 - DNA, 21 bp, synthetic construct
  source 1..21: mol_type = other DNA
agggaagattttgtaaagtat

SEQ ID NO: 26233 - DNA, 21 bp, synthetic construct
  source 1..21: mol_type = other DNA
ctacaccgtatgagtccagac

SEQ ID NO: 26234 - DNA, 21 bp, synthetic construct
  source 1..21: mol_type = other DNA
tacgcacgcacaggcgtcaac

SEQ ID NO: 26235 - DNA, 21 bp, synthetic construct
  source 1..21: mol_type = other DNA
tattttagcggaattcacagt

SEQ ID NO: 26236 - DNA, 21 bp, synthetic construct
  source 1..21: mol_type = other DNA
atacataggctaagtccggac

SEQ ID NO: 26237 - DNA, 21 bp, synthetic construct
  source 1..21: mol_type = other DNA
ttagcgaaaacgggcatgaac

SEQ ID NO: 26238 - DNA, 21 bp, synthetic construct
  source 1..21: mol_type = other DNA
tacgttagatcagacgtacac

SEQ ID NO: 26239 - DNA, 21 bp, synthetic construct
  source 1..21: mol_type = other DNA
agaacgagtacacatggagtt

SEQ ID NO: 26240 - DNA, 21 bp, synthetic construct
  source 1..21: mol_type = other DNA
ttgtgtgctgatccaagccgg

SEQ ID NO: 26241 - DNA, 21 bp, synthetic construct
  source 1..21: mol_type = other DNA
tggtggtccggtatacccatg

SEQ ID NO: 26242 - DNA, 21 bp, synthetic construct
  source 1..21: mol_type = other DNA
gtagacgaatggagtaccttc

SEQ ID NO: 26243 - DNA, 21 bp, synthetic construct
  source 1..21: mol_type = other DNA
ttcttcagcgggatcattgcg

SEQ ID NO: 26244 - DNA, 21 bp, synthetic construct
  source 1..21: mol_type = other DNA
taccatagactatcaaacgac

SEQ ID NO: 26245 - DNA, 21 bp, synthetic construct
  source 1..21: mol_type = other DNA
tacagtcgtctcaacaactta

SEQ ID NO: 26246 - DNA, 21 bp, synthetic construct
  source 1..21: mol_type = other DNA
tgtgctcctaggctccacgag

SEQ ID NO: 26247 - DNA, 21 bp, synthetic construct
  source 1..21: mol_type = other DNA
tattactccggaatagccgca

SEQ ID NO: 26248 - DNA, 21 bp, synthetic construct
  source 1..21: mol_type = other DNA
ggaggcgccactagtagttgg

SEQ ID NO: 26249 - DNA, 21 bp, synthetic construct
  source 1..21: mol_type = other DNA
tactcacgcgttgctccagac

SEQ ID NO: 26250 - DNA, 21 bp, synthetic construct
  source 1..21: mol_type = other DNA
ttcgttaaaagtcagcctggt

SEQ ID NO: 26251 - DNA, 21 bp, synthetic construct
  source 1..21: mol_type = other DNA
tattcgaggcttaacgatccg

SEQ ID NO: 26252 - DNA, 21 bp, synthetic construct
  source 1..21: mol_type = other DNA
ctctgtagaccctgctccgtc

SEQ ID NO: 26253 - DNA, 21 bp, synthetic construct
  source 1..21: mol_type = other DNA
gacatggcaacaagtacttgg

SEQ ID NO: 26254 - DNA, 21 bp, synthetic construct
  source 1..21: mol_type = other DNA
aaagatgatttcgtgagtttt

SEQ ID NO: 26255 - DNA, 21 bp, synthetic construct
  source 1..21: mol_type = other DNA
tatttctcaggtatcactggt

SEQ ID NO: 26256 - DNA, 21 bp, synthetic construct
  source 1..21: mol_type = other DNA
gacatgggctcaagtaactgg

SEQ ID NO: 26257 - DNA, 21 bp, synthetic construct
  source 1..21: mol_type = other DNA
tactttagtggcatacagcat

SEQ ID NO: 26258 - DNA, 21 bp, synthetic construct
  source 1..21: mol_type = other DNA
tacagcaagttaaacacacat

SEQ ID NO: 26259 - DNA, 21 bp, synthetic construct
  source 1..21: mol_type = other DNA
ttcagcagaattgggatgaat

SEQ ID NO: 26260 - DNA, 21 bp, synthetic construct
  source 1..21: mol_type = other DNA
catacttcgacgaacggcata

SEQ ID NO: 26261 - DNA, 21 bp, synthetic construct
  source 1..21: mol_type = other DNA
tattggaccggcgtgagtgat

SEQ ID NO: 26262 - DNA, 21 bp, synthetic construct
  source 1..21: mol_type = other DNA
ttatgcaagccttgcttggaa

SEQ ID NO: 26263 - DNA, 21 bp, synthetic construct
  source 1..21: mol_type = other DNA
gagttagacagtcgcgagtgg

SEQ ID NO: 26264 - DNA, 21 bp, synthetic construct
  source 1..21: mol_type = other DNA
agggacgactgggtgaagtgg

SEQ ID NO: 26265 - DNA, 21 bp, synthetic construct
  source 1..21: mol_type = other DNA
tatgtgagatcagacttccgc

SEQ ID NO: 26266 - DNA, 21 bp, synthetic construct
  source 1..21: mol_type = other DNA
tacttctcgggtattccggtg

SEQ ID NO: 26267 - DNA, 21 bp, synthetic construct
  source 1..21: mol_type = other DNA
tacttcagcggaattatgcca

SEQ ID NO: 26268 - DNA, 21 bp, synthetic construct
  source 1..21: mol_type = other DNA
tactttactggcgtcgcccaa

SEQ ID NO: 26269 - DNA, 21 bp, synthetic construct
  source 1..21: mol_type = other DNA
ggctcagctacgagtacttgg

SEQ ID NO: 26270 - DNA, 21 bp, synthetic construct
  source 1..21: mol_type = other DNA
tattggacagggatgctagat

SEQ ID NO: 26271 - DNA, 21 bp, synthetic construct
  source 1..21: mol_type = other DNA
taccatagattaggggaagat

SEQ ID NO: 26272 - DNA, 21 bp, synthetic construct
  source 1..21: mol_type = other DNA
agagggatggatgtgtaccct

SEQ ID NO: 26273 - DNA, 21 bp, synthetic construct
  source 1..21: mol_type = other DNA
tatagtcgtcttggtgaaaat

SEQ ID NO: 26274 - DNA, 21 bp, synthetic construct
  source 1..21: mol_type = other DNA
tcgcggtccaccaacggtgta

SEQ ID NO: 26275 - DNA, 21 bp, synthetic construct
  source 1..21: mol_type = other DNA
tactggacagggatggtggat

SEQ ID NO: 26276 - DNA, 21 bp, synthetic construct
  source 1..21: mol_type = other DNA
gtagaaagtgtgaacggcgta

SEQ ID NO: 26277 - DNA, 21 bp, synthetic construct
  source 1..21: mol_type = other DNA
tatgctcgcctaggactaaac

SEQ ID NO: 26278 - DNA, 21 bp, synthetic construct
  source 1..21: mol_type = other DNA
tacgtgagaagcgacagtctc

SEQ ID NO: 26279 - DNA, 21 bp, synthetic construct
  source 1..21: mol_type = other DNA
tattggactgggactgtggcg

SEQ ID NO: 26280 - DNA, 21 bp, synthetic construct
  source 1..21: mol_type = other DNA
actaagtggggggacgcggcc

SEQ ID NO: 26281 - DNA, 21 bp, synthetic construct
  source 1..21: mol_type = other DNA
tacgtgaaaagtcaaacgatt

SEQ ID NO: 26282 - DNA, 21 bp, synthetic construct
  source 1..21: mol_type = other DNA
cgtgagggtacctcaaagtgg

SEQ ID NO: 26283 - DNA, 21 bp, synthetic construct
  source 1..21: mol_type = other DNA
agagaaccgggtgtgcgatgg

SEQ ID NO: 26284 - DNA, 21 bp, synthetic construct
  source 1..21: mol_type = other DNA
tactcaaaaatgggatacaac

SEQ ID NO: 26285 - DNA, 21 bp, synthetic construct
  source 1..21: mol_type = other DNA
tacagtagagttcagcctgat

SEQ ID NO: 26286 - DNA, 21 bp, synthetic construct
  source 1..21: mol_type = other DNA
tgcaaaccacacccgcttctc

SEQ ID NO: 26287 - DNA, 21 bp, synthetic construct
  source 1..21: mol_type = other DNA
aatatgggaagccgtgattgg

SEQ ID NO: 26288 - DNA, 21 bp, synthetic construct
  source 1..21: mol_type = other DNA
catagccgactcaatattgtt

SEQ ID NO: 26289 - DNA, 21 bp, synthetic construct
  source 1..21: mol_type = other DNA
cttgcgaaaaccggaaccaat

SEQ ID NO: 26290 - DNA, 21 bp, synthetic construct
  source 1..21: mol_type = other DNA
ggggatggaaccaagtgtgga

SEQ ID NO: 26291 - DNA, 21 bp, synthetic construct
  source 1..21: mol_type = other DNA
tacactcgacttgaccctcat

SEQ ID NO: 26292 - DNA, 21 bp, synthetic construct
  source 1..21: mol_type = other DNA
tattggtcgggagtacctgag

SEQ ID NO: 26293 - DNA, 21 bp, synthetic construct
  source 1..21: mol_type = other DNA
tatgtgaggtcacagacggac

SEQ ID NO: 26294 - DNA, 21 bp, synthetic construct
  source 1..21: mol_type = other DNA
tatgcaagactaggcctgaat

SEQ ID NO: 26295 - DNA, 21 bp, synthetic construct
  source 1..21: mol_type = other DNA
atggatgattttacagtctac

SEQ ID NO: 26296 - DNA, 21 bp, synthetic construct
  source 1..21: mol_type = other DNA
tatgtacgatcggatcccaga

SEQ ID NO: 26297 - DNA, 21 bp, synthetic construct
  source 1..21: mol_type = other DNA
gtggctggtaaaggttgtggc

SEQ ID NO: 26298 - DNA, 21 bp, synthetic construct
  source 1..21: mol_type = other DNA
tactttagtggacgtgctgag

SEQ ID NO: 26299 - DNA, 21 bp, synthetic construct
  source 1..21: mol_type = other DNA
tattttgccgggagatttgat

SEQ ID NO: 26300 - DNA, 21 bp, synthetic construct
  source 1..21: mol_type = other DNA
tacagtagattgcaaccgctc

SEQ ID NO: 26301 - DNA, 21 bp, synthetic construct
  source 1..21: mol_type = other DNA
aaggatgattatcagacctgg

SEQ ID NO: 26302 - DNA, 21 bp, synthetic construct
  source 1..21: mol_type = other DNA
cgggaagaggccgtctcctgg

SEQ ID NO: 26303 - DNA, 21 bp, synthetic construct
  source 1..21: mol_type = other DNA
tacagtaagatgaaccataac

SEQ ID NO: 26304 - DNA, 21 bp, synthetic construct
  source 1..21: mol_type = other DNA
aaagacggctattccatctat

SEQ ID NO: 26305 - DNA, 21 bp, synthetic construct
  source 1..21: mol_type = other DNA
cgaaatgaatttacgagttgg

SEQ ID NO: 26306 - DNA, 21 bp, synthetic construct
  source 1..21: mol_type = other DNA
tactcacggttgggggaagac

SEQ ID NO: 26307 - DNA, 21 bp, synthetic construct
  source 1..21: mol_type = other DNA
tacagtaggctgtcgccgaac

SEQ ID NO: 26308 - DNA, 21 bp, synthetic construct
  source 1..21: mol_type = other DNA
gacggtgctacctcgagatgg

SEQ ID NO: 26309 - DNA, 21 bp, synthetic construct
  source 1..21: mol_type = other DNA
tattggacgggcaaggttgag

SEQ ID NO: 26310 - DNA, 21 bp, synthetic construct
  source 1..21: mol_type = other DNA
ggtgacgaatacatgccattc

SEQ ID NO: 26311 - DNA, 21 bp, synthetic construct
  source 1..21: mol_type = other DNA
gtccccgattacgtcaagtac

SEQ ID NO: 26312 - DNA, 21 bp, synthetic construct
  source 1..21: mol_type = other DNA
tactcccgattacacatcgat

SEQ ID NO: 26313 - DNA, 21 bp, synthetic construct
  source 1..21: mol_type = other DNA
tactctcgcattggtccttgc

SEQ ID NO: 26314 - DNA, 21 bp, synthetic construct
  source 1..21: mol_type = other DNA
gggggagatggtagtcattgg

SEQ ID NO: 26315 - DNA, 21 bp, synthetic construct
  source 1..21: mol_type = other DNA
tattggacggggatgatagag

SEQ ID NO: 26316 - DNA, 21 bp, synthetic construct
  source 1..21: mol_type = other DNA
ttcggtggcgggttatttgta

SEQ ID NO: 26317 - DNA, 21 bp, synthetic construct
  source 1..21: mol_type = other DNA
cacatggccgatagaggttgg

SEQ ID NO: 26318 - DNA, 21 bp, synthetic construct
  source 1..21: mol_type = other DNA
tactcccgagttggcgaaaac

SEQ ID NO: 26319 - DNA, 21 bp, synthetic construct
  source 1..21: mol_type = other DNA
ctggcgaaggggggccacaat

SEQ ID NO: 26320 - DNA, 21 bp, synthetic construct
  source 1..21: mol_type = other DNA
tatttttccggaaccgttttc

SEQ ID NO: 26321 - DNA, 21 bp, synthetic construct
  source 1..21: mol_type = other DNA
gatatgggaagctccaattgg

SEQ ID NO: 26322 - DNA, 21 bp, synthetic construct
  source 1..21: mol_type = other DNA
tacagtaagatgaaccagaat

SEQ ID NO: 26323 - DNA, 21 bp, synthetic construct
  source 1..21: mol_type = other DNA
cataatagtacgaacggagtg

SEQ ID NO: 26324 - DNA, 21 bp, synthetic construct
  source 1..21: mol_type = other DNA
aaggacgactgggttaaatat

SEQ ID NO: 26325 - DNA, 21 bp, synthetic construct
  source 1..21: mol_type = other DNA
ttacaccgcctccatgttgac

SEQ ID NO: 26326 - DNA, 21 bp, synthetic construct
  source 1..21: mol_type = other DNA
tatgcaaagagcggaggcaat

SEQ ID NO: 26327 - DNA, 21 bp, synthetic construct
  source 1..21: mol_type = other DNA
ttttcaagaattggtcaaaat

SEQ ID NO: 26328 - DNA, 21 bp, synthetic construct
  source 1..21: mol_type = other DNA
tatttttccggacaggtgatg

SEQ ID NO: 26329 - DNA, 21 bp, synthetic construct
  source 1..21: mol_type = other DNA
attatggcgagtcaatcttgg

SEQ ID NO: 26330 - DNA, 21 bp, synthetic construct
  source 1..21: mol_type = other DNA
tacttttcgggtaggatggag

SEQ ID NO: 26331 - DNA, 21 bp, synthetic construct
  source 1..21: mol_type = other DNA
tatagcagggtcggcgatggg

SEQ ID NO: 26332 - DNA, 21 bp, synthetic construct
  source 1..21: mol_type = other DNA
attatggaagacagaggctgg

SEQ ID NO: 26333 - DNA, 21 bp, synthetic construct
  source 1..21: mol_type = other DNA
tattttacgggacgtgcggat

SEQ ID NO: 26334 - DNA, 21 bp, synthetic construct
  source 1..21: mol_type = other DNA
ctttggaacggagaaggaccg

SEQ ID NO: 26335 - DNA, 21 bp, synthetic construct
  source 1..21: mol_type = other DNA
ttcttcagcgggattattgaa

SEQ ID NO: 26336 - DNA, 21 bp, synthetic construct
  source 1..21: mol_type = other DNA
tactttacgggttatgtggaa

SEQ ID NO: 26337 - DNA, 21 bp, synthetic construct
  source 1..21: mol_type = other DNA
tggttttctggtatcaaagac

SEQ ID NO: 26338 - DNA, 21 bp, synthetic construct
  source 1..21: mol_type = other DNA
gtcgacgattacaatatttac

SEQ ID NO: 26339 - DNA, 21 bp, synthetic construct
  source 1..21: mol_type = other DNA
cgcacatcaaccaacggagta

SEQ ID NO: 26340 - DNA, 21 bp, synthetic construct
  source 1..21: mol_type = other DNA
agaagcgttagcgtcttcccc

SEQ ID NO: 26341 - DNA, 21 bp, synthetic construct
  source 1..21: mol_type = other DNA
tatgccagaggaggacctaat

SEQ ID NO: 26342 - DNA, 21 bp, synthetic construct
  source 1..21: mol_type = other DNA
agagacgagtacagcccatgg

SEQ ID NO: 26343 - DNA, 21 bp, synthetic construct
  source 1..21: mol_type = other DNA
tactccaggctcagtcccatg

SEQ ID NO: 26344 - DNA, 21 bp, synthetic construct
  source 1..21: mol_type = other DNA
tacacaaggcttgacaacgga

SEQ ID NO: 26345 - DNA, 21 bp, synthetic construct
  source 1..21: mol_type = other DNA
tattttacaggagttactcac

SEQ ID NO: 26346 - DNA, 21 bp, synthetic construct
  source 1..21: mol_type = other DNA
tgccttcgtgcccgaccagaa

SEQ ID NO: 26347 - DNA, 21 bp, synthetic construct
  source 1..21: mol_type = other DNA
tattttacagggcaacaggca

SEQ ID NO: 26348 - DNA, 21 bp, synthetic construct
  source 1..21: mol_type = other DNA
ttctttacgggacgtatagat

SEQ ID NO: 26349 - DNA, 21 bp, synthetic construct
  source 1..21: mol_type = other DNA
aaagatgatttcgtgtcgtat

SEQ ID NO: 26350 - DNA, 21 bp, synthetic construct
  source 1..21: mol_type = other DNA
tacttttcgggtatgcgcgat

SEQ ID NO: 26351 - DNA, 21 bp, synthetic construct
  source 1..21: mol_type = other DNA
atgctacctggctgtaagccg

SEQ ID NO: 26352 - DNA, 21 bp, synthetic construct
  source 1..21: mol_type = other DNA
cgaaatgaattttcgaccttc

SEQ ID NO: 26353 - DNA, 21 bp, synthetic construct
  source 1..21: mol_type = other DNA
ggagtggaaacatgcaaaccg

SEQ ID NO: 26354 - DNA, 21 bp, synthetic construct
  source 1..21: mol_type = other DNA
tacttctcaggaacgaccgaa

SEQ ID NO: 26355 - DNA, 21 bp, synthetic construct
  source 1..21: mol_type = other DNA
tacgtcagaagccagacgcta

SEQ ID NO: 26356 - DNA, 21 bp, synthetic construct
  source 1..21: mol_type = other DNA
cttagtaagcacaatttcaac

SEQ ID NO: 26357 - DNA, 21 bp, synthetic construct
  source 1..21: mol_type = other DNA
gttatgagtagccaattgtgg

SEQ ID NO: 26358 - DNA, 21 bp, synthetic construct
  source 1..21: mol_type = other DNA
ttcagcagggttggggttaac

SEQ ID NO: 26359 - DNA, 21 bp, synthetic construct
  source 1..21: mol_type = other DNA
ctctgcaaaccgtgtagcgag

SEQ ID NO: 26360 - DNA, 21 bp, synthetic construct
  source 1..21: mol_type = other DNA
tattacacagggattatagct

SEQ ID NO: 26361 - DNA, 21 bp, synthetic construct
  source 1..21: mol_type = other DNA
tacatgaaagacgcgtaccca

SEQ ID NO: 26362 - DNA, 21 bp, synthetic construct
  source 1..21: mol_type = other DNA
cgggaagaagaagttagatgg

SEQ ID NO: 26363 - DNA, 21 bp, synthetic construct
  source 1..21: mol_type = other DNA
tacgcccgcatcggcccaaat

SEQ ID NO: 26364 - DNA, 21 bp, synthetic construct
  source 1..21: mol_type = other DNA
agggatgcaaccagctcttgg

SEQ ID NO: 26365 - DNA, 21 bp, synthetic construct
  source 1..21: mol_type = other DNA
cgtgacggtgtaagtaggtgg

SEQ ID NO: 26366 - DNA, 21 bp, synthetic construct
  source 1..21: mol_type = other DNA
gatctccaatccagcgtctgg

SEQ ID NO: 26367 - DNA, 21 bp, synthetic construct
  source 1..21: mol_type = other DNA
tgcaagccatcaccctacccc

SEQ ID NO: 26368 - DNA, 21 bp, synthetic construct
  source 1..21: mol_type = other DNA
tatgcaaaaaatggatggaat

SEQ ID NO: 26369 - DNA, 21 bp, synthetic construct
  source 1..21: mol_type = other DNA
tattttagtggagtggtacgt

SEQ ID NO: 26370 - DNA, 21 bp, synthetic construct
  source 1..21: mol_type = other DNA
gttatgcagagtcgaacatgg

SEQ ID NO: 26371 - DNA, 21 bp, synthetic construct
  source 1..21: mol_type = other DNA
tacagtaagcacggtttaaat

SEQ ID NO: 26372 - DNA, 21 bp, synthetic construct
  source 1..21: mol_type = other DNA
tattattcgggcgtaaagctt

SEQ ID NO: 26373 - DNA, 21 bp, synthetic construct
  source 1..21: mol_type = other DNA
cgattaccaagcgtgtaccct

SEQ ID NO: 26374 - DNA, 21 bp, synthetic construct
  source 1..21: mol_type = other DNA
tattacactggaaaaattgac

SEQ ID NO: 26375 - DNA, 21 bp, synthetic construct
  source 1..21: mol_type = other DNA
agagacataagcgtgtttcct

SEQ ID NO: 26376 - DNA, 21 bp, synthetic construct
  source 1..21: mol_type = other DNA
aaagacgggtatacaagttgg

SEQ ID NO: 26377 - DNA, 21 bp, synthetic construct
  source 1..21: mol_type = other DNA
gtctggaagcctgagcctggc

SEQ ID NO: 26378 - DNA, 21 bp, synthetic construct
  source 1..21: mol_type = other DNA
tactctaggaacagctgtaat

SEQ ID NO: 26379 - DNA, 21 bp, synthetic construct
  source 1..21: mol_type = other DNA
tatgccagacctggtccaaac

SEQ ID NO: 26380 - DNA, 21 bp, synthetic construct
  source 1..21: mol_type = other DNA
ctaagcaagatgaatatcaat

SEQ ID NO: 26381 - DNA, 21 bp, synthetic construct
  source 1..21: mol_type = other DNA
tactggagtaaagtcctggat

SEQ ID NO: 26382 - DNA, 21 bp, synthetic construct
  source 1..21: mol_type = other DNA
tacttcaccgggctgcgagac

SEQ ID NO: 26383 - DNA, 21 bp, synthetic construct
  source 1..21: mol_type = other DNA
tactttgccggtaaacgagag

SEQ ID NO: 26384 - DNA, 21 bp, synthetic construct
  source 1..21: mol_type = other DNA
tacatcaagtacgacccctcg

SEQ ID NO: 26385 - DNA, 21 bp, synthetic construct
  source 1..21: mol_type = other DNA
ggatcggacggcgtccgctgg

SEQ ID NO: 26386 - DNA, 21 bp, synthetic construct
  source 1..21: mol_type = other DNA
tatgtccgcagcgatactcgc

SEQ ID NO: 26387 - DNA, 21 bp, synthetic construct
  source 1..21: mol_type = other DNA
tatttcactggggccttcgat

SEQ ID NO: 26388 - DNA, 21 bp, synthetic construct
  source 1..21: mol_type = other DNA
atcttgagccacgccacgtgg

SEQ ID NO: 26389 - DNA, 21 bp, synthetic construct
  source 1..21: mol_type = other DNA
ttagcaagaggtggaccagat

SEQ ID NO: 26390 - DNA, 21 bp, synthetic construct
  source 1..21: mol_type = other DNA
tttgtcaagtcacaacccggg

SEQ ID NO: 26391 - DNA, 21 bp, synthetic construct
  source 1..21: mol_type = other DNA
tattcacgactgtcggatccg

SEQ ID NO: 26392 - DNA, 21 bp, synthetic construct
  source 1..21: mol_type = other DNA
ttgatgtccgacagaagctgg

SEQ ID NO: 26393 - DNA, 21 bp, synthetic construct
  source 1..21: mol_type = other DNA
tactttaccggtcgagtttcg

SEQ ID NO: 26394 - DNA, 21 bp, synthetic construct
  source 1..21: mol_type = other DNA
tatagtaaagccaaccagaat

SEQ ID NO: 26395 - DNA, 21 bp, synthetic construct
  source 1..21: mol_type = other DNA
ttgttagagtcaagcaagtgg

SEQ ID NO: 26396 - DNA, 21 bp, synthetic construct
  source 1..21: mol_type = other DNA
tattatactggtattagagac

SEQ ID NO: 26397 - DNA, 21 bp, synthetic construct
  source 1..21: mol_type = other DNA
tggttcagcgggattaaggat

SEQ ID NO: 26398 - DNA, 21 bp, synthetic construct
  source 1..21: mol_type = other DNA
gtcatggaagctcgcgcctgg

SEQ ID NO: 26399 - DNA, 21 bp, synthetic construct
  source 1..21: mol_type = other DNA
tattggacgggcgtccaagac

SEQ ID NO: 26400 - DNA, 21 bp, synthetic construct
  source 1..21: mol_type = other DNA
tacttcagtggggtaatgcat

SEQ ID NO: 26401 - DNA, 21 bp, synthetic construct
  source 1..21: mol_type = other DNA
atcatgtcgggtcgtacctgg

SEQ ID NO: 26402 - DNA, 21 bp, synthetic construct
  source 1..21: mol_type = other DNA
aagatgcaagacaggtcttgg

SEQ ID NO: 26403 - DNA, 21 bp, synthetic construct
  source 1..21: mol_type = other DNA
tacagtcgcctaaatgacaac

SEQ ID NO: 26404 - DNA, 21 bp, synthetic construct
  source 1..21: mol_type = other DNA
cgtgacgacttcacggggtgg

SEQ ID NO: 26405 - DNA, 21 bp, synthetic construct
  source 1..21: mol_type = other DNA
ctccatcgtatgtcaccggac

SEQ ID NO: 26406 - DNA, 21 bp, synthetic construct
  source 1..21: mol_type = other DNA
tacttctctggcgtccaatct

SEQ ID NO: 26407 - DNA, 21 bp, synthetic construct
  source 1..21: mol_type = other DNA
tacgtcaagagccagcagagt

SEQ ID NO: 26408 - DNA, 21 bp, synthetic construct
  source 1..21: mol_type = other DNA
tatttcactggaatgaccgac

SEQ ID NO: 26409 - DNA, 21 bp, synthetic construct
  source 1..21: mol_type = other DNA
tattttcacggcattcgcgaa

SEQ ID NO: 26410 - DNA, 21 bp, synthetic construct
  source 1..21: mol_type = other DNA
tacttttctggacagagagaa

SEQ ID NO: 26411 - DNA, 21 bp, synthetic construct
  source 1..21: mol_type = other DNA
tatagtcgtatcggtccacta

SEQ ID NO: 26412 - DNA, 21 bp, synthetic construct
  source 1..21: mol_type = other DNA
ctccaccggttaagcgcggga

SEQ ID NO: 26413 - DNA, 21 bp, synthetic construct
  source 1..21: mol_type = other DNA
atcatgtcgtcggctggctgg

SEQ ID NO: 26414 - DNA, 21 bp, synthetic construct
  source 1..21: mol_type = other DNA
cgcgacgagtatgtccactgg

SEQ ID NO: 26415 - DNA, 21 bp, synthetic construct
  source 1..21: mol_type = other DNA
tttttttcgggcattatcgct

SEQ ID NO: 26416 - DNA, 21 bp, synthetic construct
  source 1..21: mol_type = other DNA
tatagccgcatatctgataac

SEQ ID NO: 26417 - DNA, 21 bp, synthetic construct
  source 1..21: mol_type = other DNA
gacctcagaaccgccacgtgg

SEQ ID NO: 26418 - DNA, 21 bp, synthetic construct
  source 1..21: mol_type = other DNA
tatagccgggtaggagctaac

SEQ ID NO: 26419 - DNA, 21 bp, synthetic construct
  source 1..21: mol_type = other DNA
ggagaagattatgttcgttgg

SEQ ID NO: 26420 - DNA, 21 bp, synthetic construct
  source 1..21: mol_type = other DNA
gacttctacggcaaatacgca

SEQ ID NO: 26421 - DNA, 21 bp, synthetic construct
  source 1..21: mol_type = other DNA
tacttctctggccagataaag

SEQ ID NO: 26422 - DNA, 21 bp, synthetic construct
  source 1..21: mol_type = other DNA
agagaggaggaggtccggtgg

SEQ ID NO: 26423 - DNA, 21 bp, synthetic construct
  source 1..21: mol_type = other DNA
tatgccaagatcggctataac

SEQ ID NO: 26424 - DNA, 21 bp, synthetic construct
  source 1..21: mol_type = other DNA
gtactccagagctcagtttgg

SEQ ID NO: 26425 - DNA, 21 bp, synthetic construct
  source 1..21: mol_type = other DNA
tatttctcgggcaaaattaat

SEQ ID NO: 26426 - DNA, 21 bp, synthetic construct
  source 1..21: mol_type = other DNA
tactttcatgggaaattagac

SEQ ID NO: 26427 - DNA, 21 bp, synthetic construct
  source 1..21: mol_type = other DNA
ttctctcgcctatcagctaac

SEQ ID NO: 26428 - DNA, 21 bp, synthetic construct
  source 1..21: mol_type = other DNA
ttgacctcgcgtgaggggatc

SEQ ID NO: 26429 - DNA, 21 bp, synthetic construct
  source 1..21: mol_type = other DNA
tactttacgggaaggatggat

SEQ ID NO: 26430 - DNA, 21 bp, synthetic construct
  source 1..21: mol_type = other DNA
agagatgactttcatatttac

SEQ ID NO: 26431 - DNA, 21 bp, synthetic construct
  source 1..21: mol_type = other DNA
tatagtaagacggggtggaat

SEQ ID NO: 26432 - DNA, 21 bp, synthetic construct
  source 1..21: mol_type = other DNA
ggggaaaatgtcgtgaggtgg

SEQ ID NO: 26433 - DNA, 21 bp, synthetic construct
  source 1..21: mol_type = other DNA
tatgtgagaagcgatattggt

SEQ ID NO: 26434 - DNA, 21 bp, synthetic construct
  source 1..21: mol_type = other DNA
tcacactcgacaaatggaatt

SEQ ID NO: 26435 - DNA, 21 bp, synthetic construct
  source 1..21: mol_type = other DNA
cgaagtgagttcgctacctat

SEQ ID NO: 26436 - DNA, 21 bp, synthetic construct
  source 1..21: mol_type = other DNA
tttagtaagttaaacccaaac

SEQ ID NO: 26437 - DNA, 21 bp, synthetic construct
  source 1..21: mol_type = other DNA
tattttcaggggaggatcgct

SEQ ID NO: 26438 - DNA, 21 bp, synthetic construct
  source 1..21: mol_type = other DNA
tatgaaccgaactgcaaagag

SEQ ID NO: 26439 - DNA, 21 bp, synthetic construct
  source 1..21: mol_type = other DNA
ttagcgagaattggctgggat

SEQ ID NO: 26440 - DNA, 21 bp, synthetic construct
  source 1..21: mol_type = other DNA
tggttgaaaagccaaatcggt

SEQ ID NO: 26441 - DNA, 21 bp, synthetic construct
  source 1..21: mol_type = other DNA
agagaagaaatggtaagttgg

SEQ ID NO: 26442 - DNA, 21 bp, synthetic construct
  source 1..21: mol_type = other DNA
agaatggaggagagaagctgg

SEQ ID NO: 26443 - DNA, 21 bp, synthetic construct
  source 1..21: mol_type = other DNA
caaaacgactatgtcagttat

SEQ ID NO: 26444 - DNA, 21 bp, synthetic construct
  source 1..21: mol_type = other DNA
gtgcccagctcagttcgctgg

SEQ ID NO: 26445 - DNA, 21 bp, synthetic construct
  source 1..21: mol_type = other DNA
agggacgggacgtgcaagccc

SEQ ID NO: 26446 - DNA, 21 bp, synthetic construct
  source 1..21: mol_type = other DNA
tatagtagactacaacctacc

SEQ ID NO: 26447 - DNA, 21 bp, synthetic construct
  source 1..21: mol_type = other DNA
tatgctaggagcggggaaaac

SEQ ID NO: 26448 - DNA, 21 bp, synthetic construct
  source 1..21: mol_type = other DNA
gatatgagggatcgcatctgg

SEQ ID NO: 26449 - DNA, 21 bp, synthetic construct
  source 1..21: mol_type = other DNA
taccacgctcgaggcctaaac

SEQ ID NO: 26450 - DNA, 21 bp, synthetic construct
  source 1..21: mol_type = other DNA
tgcaaggcaacgattccaggc

SEQ ID NO: 26451 - DNA, 21 bp, synthetic construct
  source 1..21: mol_type = other DNA
tactttacaggtatgtatgac

SEQ ID NO: 26452 - DNA, 21 bp, synthetic construct
  source 1..21: mol_type = other DNA
tacgttcgctcggacgccatg

SEQ ID NO: 26453 - DNA, 21 bp, synthetic construct
  source 1..21: mol_type = other DNA
cacaactcaacaaacggaaga

SEQ ID NO: 26454 - DNA, 21 bp, synthetic construct
  source 1..21: mol_type = other DNA
gtcccggaggattgtagacct

SEQ ID NO: 26455 - DNA, 21 bp, synthetic construct
  source 1..21: mol_type = other DNA
agacctttaatggagaaatgc

SEQ ID NO: 26456 - DNA, 21 bp, synthetic construct
  source 1..21: mol_type = other DNA
tatcttaagtcgcaggaatac

SEQ ID NO: 26457 - DNA, 21 bp, synthetic construct
  source 1..21: mol_type = other DNA
aaggaggactacctgtcctgg

SEQ ID NO: 26458 - DNA, 21 bp, synthetic construct
  source 1..21: mol_type = other DNA
tatttcagcggagtgacatcg

SEQ ID NO: 26459 - DNA, 21 bp, synthetic construct
  source 1..21: mol_type = other DNA
gaaccagaaagcagagcctgg

SEQ ID NO: 26460 - DNA, 21 bp, synthetic construct
  source 1..21: mol_type = other DNA
aggggtggtgacgtctatccg

SEQ ID NO: 26461 - DNA, 21 bp, synthetic construct
  source 1..21: mol_type = other DNA
cgagatgagtttgtcacgtac

SEQ ID NO: 26462 - DNA, 21 bp, synthetic construct
  source 1..21: mol_type = other DNA
ccaatgggttcgcagacctgg

SEQ ID NO: 26463 - DNA, 21 bp, synthetic construct
  source 1..21: mol_type = other DNA
agtacttacgattcctacccg

SEQ ID NO: 26464 - DNA, 21 bp, synthetic construct
  source 1..21: mol_type = other DNA
aaagacgactaccattcctac

SEQ ID NO: 26465 - DNA, 21 bp, synthetic construct
  source 1..21: mol_type = other DNA
ttgtgggacggcacaagcccg

SEQ ID NO: 26466 - DNA, 21 bp, synthetic construct
  source 1..21: mol_type = other DNA
ttctccaggatgggtcctaat

SEQ ID NO: 26467 - DNA, 21 bp, synthetic construct
  source 1..21: mol_type = other DNA
tattcaaggattcagatagac

SEQ ID NO: 26468 - DNA, 21 bp, synthetic construct
  source 1..21: mol_type = other DNA
gaaaacggaggcggccgatgg

SEQ ID NO: 26469 - DNA, 21 bp, synthetic construct
  source 1..21: mol_type = other DNA
tacattaagtcccagagctgt

SEQ ID NO: 26470 - DNA, 21 bp, synthetic construct
  source 1..21: mol_type = other DNA
tttagcaagatgaatttcaat

SEQ ID NO: 26471 - DNA, 21 bp, synthetic construct
  source 1..21: mol_type = other DNA
aggagtgaatttatgccttac

SEQ ID NO: 26472 - DNA, 21 bp, synthetic construct
  source 1..21: mol_type = other DNA
tacgcacgcttggggttaaac

SEQ ID NO: 26473 - DNA, 21 bp, synthetic construct
  source 1..21: mol_type = other DNA
tattcacgtttgggcgataac

SEQ ID NO: 26474 - DNA, 21 bp, synthetic construct
  source 1..21: mol_type = other DNA
tttagtcgcatcggtactaat

SEQ ID NO: 26475 - DNA, 21 bp, synthetic construct
  source 1..21: mol_type = other DNA
actaagagcactaacgggata

SEQ ID NO: 26476 - DNA, 21 bp, synthetic construct
  source 1..21: mol_type = other DNA
tacttccaaggtcgcatagcg

SEQ ID NO: 26477 - DNA, 21 bp, synthetic construct
  source 1..21: mol_type = other DNA
tacagtcgactaggagacaat

SEQ ID NO: 26478 - DNA, 21 bp, synthetic construct
  source 1..21: mol_type = other DNA
tacgtcaaatcacagtgcagc

SEQ ID NO: 26479 - DNA, 21 bp, synthetic construct
  source 1..21: mol_type = other DNA
tatttccacggcaagctcgat

SEQ ID NO: 26480 - DNA, 21 bp, synthetic construct
  source 1..21: mol_type = other DNA
tatgtccgcagtgatgttcat

SEQ ID NO: 26481 - DNA, 21 bp, synthetic construct
  source 1..21: mol_type = other DNA
cacggttcaacaaatggggtt

SEQ ID NO: 26482 - DNA, 21 bp, synthetic construct
  source 1..21: mol_type = other DNA
tatcaccggcttagtccggta

SEQ ID NO: 26483 - DNA, 21 bp, synthetic construct
  source 1..21: mol_type = other DNA
agggatcctacggtgtttccc

SEQ ID NO: 26484 - DNA, 21 bp, synthetic construct
  source 1..21: mol_type = other DNA
tattttagtggacaaatggaa

SEQ ID NO: 26485 - DNA, 21 bp, synthetic construct
  source 1..21: mol_type = other DNA
tattttagcgggaaacatgac

SEQ ID NO: 26486 - DNA, 21 bp, synthetic construct
  source 1..21: mol_type = other DNA
ggtggagaatattcaacttgg

SEQ ID NO: 26487 - DNA, 21 bp, synthetic construct
  source 1..21: mol_type = other DNA
ctaagtcgcactgcgtatgat

SEQ ID NO: 26488 - DNA, 21 bp, synthetic construct
  source 1..21: mol_type = other DNA
tatttcagcggtaagcccaac

SEQ ID NO: 26489 - DNA, 21 bp, synthetic construct
  source 1..21: mol_type = other DNA
tattcgaggctaagtgagctg

SEQ ID NO: 26490 - DNA, 21 bp, synthetic construct
  source 1..21: mol_type = other DNA
tacttccacggtaaaatcgac

SEQ ID NO: 26491 - DNA, 21 bp, synthetic construct
  source 1..21: mol_type = other DNA
tactttgcagggcgaatggag

SEQ ID NO: 26492 - DNA, 21 bp, synthetic construct
  source 1..21: mol_type = other DNA
aaggacgagtacaagtattac

SEQ ID NO: 26493 - DNA, 21 bp, synthetic construct
  source 1..21: mol_type = other DNA
ggcggacctggctcccattgg

SEQ ID NO: 26494 - DNA, 21 bp, synthetic construct
  source 1..21: mol_type = other DNA
tatttcagcggaattatgcag

SEQ ID NO: 26495 - DNA, 21 bp, synthetic construct
  source 1..21: mol_type = other DNA
agatcggaaacggtatatgtc

SEQ ID NO: 26496 - DNA, 21 bp, synthetic construct
  source 1..21: mol_type = other DNA
tactttacgggagtccgctcg

SEQ ID NO: 26497 - DNA, 21 bp, synthetic construct
  source 1..21: mol_type = other DNA
ttttcgcgcttaggccttaat

SEQ ID NO: 26498 - DNA, 21 bp, synthetic construct
  source 1..21: mol_type = other DNA
tatttcgccggtaggatggaa

SEQ ID NO: 26499 - DNA, 21 bp, synthetic construct
  source 1..21: mol_type = other DNA
cgagaacccggagtccggtgg

SEQ ID NO: 26500 - DNA, 21 bp, synthetic construct
  source 1..21: mol_type = other DNA
gtagcgatggaaggcagagat

SEQ ID NO: 26501 - DNA, 21 bp, synthetic construct
  source 1..21: mol_type = other DNA
aagctaccgaattatggctac

SEQ ID NO: 26502 - DNA, 21 bp, synthetic construct
  source 1..21: mol_type = other DNA
ggagcgggaacttcaagatgg

SEQ ID NO: 26503 - DNA, 21 bp, synthetic construct
  source 1..21: mol_type = other DNA
gaaggaccgtcgcgtggatgg

SEQ ID NO: 26504 - DNA, 21 bp, synthetic construct
  source 1..21: mol_type = other DNA
tactttacgggccgcgcagat

SEQ ID NO: 26505 - DNA, 21 bp, synthetic construct
  source 1..21: mol_type = other DNA
tactttactggaaggcacgac

SEQ ID NO: 26506 - DNA, 21 bp, synthetic construct
  source 1..21: mol_type = other DNA
tatttcagtggaatatcgaaa

SEQ ID NO: 26507 - DNA, 21 bp, synthetic construct
  source 1..21: mol_type = other DNA
tgtaaaccgcagactgcgacc

SEQ ID NO: 26508 - DNA, 21 bp, synthetic construct
  source 1..21: mol_type = other DNA
ttgcaccgctctagcaacaat

SEQ ID NO: 26509 - DNA, 21 bp, synthetic construct
  source 1..21: mol_type = other DNA
tttactagcactaatggcatt

SEQ ID NO: 26510 - DNA, 21 bp, synthetic construct
  source 1..21: mol_type = other DNA
aaagatgattacagtgcctat

SEQ ID NO: 26511 - DNA, 21 bp, synthetic construct
  source 1..21: mol_type = other DNA
tgtgtcgaaggaagggctccc

SEQ ID NO: 26512 - DNA, 21 bp, synthetic construct
  source 1..21: mol_type = other DNA
cgtggcgaggaagtattcccg

SEQ ID NO: 26513 - DNA, 21 bp, synthetic construct
  source 1..21: mol_type = other DNA
tactcaaaggcgaatcaaaac

SEQ ID NO: 26514 - DNA, 21 bp, synthetic construct
  source 1..21: mol_type = other DNA
gcgggtgccgacagaggttgg

SEQ ID NO: 26515 - DNA, 21 bp, synthetic construct
  source 1..21: mol_type = other DNA
tatttcactggatacgttgag

SEQ ID NO: 26516 - DNA, 21 bp, synthetic construct
  source 1..21: mol_type = other DNA
tttacatccacaaatggggtg

SEQ ID NO: 26517 - DNA, 21 bp, synthetic construct
  source 1..21: mol_type = other DNA
gttgctagcaaaggcgcaggg

SEQ ID NO: 26518 - DNA, 21 bp, synthetic construct
  source 1..21: mol_type = other DNA
tattttagcggccgcatcgac

SEQ ID NO: 26519 - DNA, 21 bp, synthetic construct
  source 1..21: mol_type = other DNA
aaagatgattttactggcttt

SEQ ID NO: 26520 - DNA, 21 bp, synthetic construct
  source 1..21: mol_type = other DNA
tatttctcgggaacgcaagat

SEQ ID NO: 26521 - DNA, 21 bp, synthetic construct
  source 1..21: mol_type = other DNA
tacttttcaggggtagtcagg

SEQ ID NO: 26522 - DNA, 21 bp, synthetic construct
  source 1..21: mol_type = other DNA
cgggaggactacgtataccca

SEQ ID NO: 26523 - DNA, 21 bp, synthetic construct
  source 1..21: mol_type = other DNA
cgagacgaattcgtaaaatgg

SEQ ID NO: 26524 - DNA, 21 bp, synthetic construct
  source 1..21: mol_type = other DNA
aaggatggcacctcatactgg

SEQ ID NO: 26525 - DNA, 21 bp, synthetic construct
  source 1..21: mol_type = other DNA
tactttaccaatataaaagaa

SEQ ID NO: 26526 - DNA, 21 bp, synthetic construct
  source 1..21: mol_type = other DNA
atgcccaacgaaggctggttt

SEQ ID NO: 26527 - DNA, 21 bp, synthetic construct
  source 1..21: mol_type = other DNA
attatgtcgacaaatggtgta

SEQ ID NO: 26528 - DNA, 21 bp, synthetic construct
  source 1..21: mol_type = other DNA
gtaatgtcaactcacggagta

SEQ ID NO: 26529 - DNA, 21 bp, synthetic construct
  source 1..21: mol_type = other DNA
cgtgatggtgtgagcaaatgg

SEQ ID NO: 26530 - DNA, 21 bp, synthetic construct
  source 1..21: mol_type = other DNA
ggcaacgaattctcatcatgg

SEQ ID NO: 26531 - DNA, 21 bp, synthetic construct
  source 1..21: mol_type = other DNA
aaagaagactacaccacatgg

SEQ ID NO: 26532 - DNA, 21 bp, synthetic construct
  source 1..21: mol_type = other DNA
cccatggcgagtcttcaatgg

SEQ ID NO: 26533 - DNA, 21 bp, synthetic construct
  source 1..21: mol_type = other DNA
tattggtcaggaattaaagaa

SEQ ID NO: 26534 - DNA, 21 bp, synthetic construct
  source 1..21: mol_type = other DNA
tatgtcaaatcaggtcctccg

SEQ ID NO: 26535 - DNA, 21 bp, synthetic construct
  source 1..21: mol_type = other DNA
tacttctcaggaatcccgcat

SEQ ID NO: 26536 - DNA, 21 bp, synthetic construct
  source 1..21: mol_type = other DNA
tacgtccgttcagacattgga

SEQ ID NO: 26537 - DNA, 21 bp, synthetic construct
  source 1..21: mol_type = other DNA
ctcgcaaggacaggcattgat

SEQ ID NO: 26538 - DNA, 21 bp, synthetic construct
  source 1..21: mol_type = other DNA
tatttcagtggagtagttccc

SEQ ID NO: 26539 - DNA, 21 bp, synthetic construct
  source 1..21: mol_type = other DNA
tattttacgggagaggttgct

SEQ ID NO: 26540 - DNA, 21 bp, synthetic construct
  source 1..21: mol_type = other DNA
tacagtcgcttaagtgccatc

SEQ ID NO: 26541 - DNA, 21 bp, synthetic construct
  source 1..21: mol_type = other DNA
tatagcaagagtggagtcaat

SEQ ID NO: 26542 - DNA, 21 bp, synthetic construct
  source 1..21: mol_type = other DNA
agaacgtttgatgcctttcct

SEQ ID NO: 26543 - DNA, 21 bp, synthetic construct
  source 1..21: mol_type = other DNA
ctagcaaggggaggatacgac

SEQ ID NO: 26544 - DNA, 21 bp, synthetic construct
  source 1..21: mol_type = other DNA
tacaccagattaaaccccgac

SEQ ID NO: 26545 - DNA, 21 bp, synthetic construct
  source 1..21: mol_type = other DNA
tgtggctctaagacggggcat

SEQ ID NO: 26546 - DNA, 21 bp, synthetic construct
  source 1..21: mol_type = other DNA
tatttttcaggcacccgtgat

SEQ ID NO: 26547 - DNA, 21 bp, synthetic construct
  source 1..21: mol_type = other DNA
agcaactcaacaaacggcatt

SEQ ID NO: 26548 - DNA, 21 bp, synthetic construct
  source 1..21: mol_type = other DNA
tacagcagaatcggcgacaac

SEQ ID NO: 26549 - DNA, 21 bp, synthetic construct
  source 1..21: mol_type = other DNA
tatcataaatcgggtgataat

SEQ ID NO: 26550 - DNA, 21 bp, synthetic construct
  source 1..21: mol_type = other DNA
ggagtgccaggggtgatgtgg

SEQ ID NO: 26551 - DNA, 21 bp, synthetic construct
  source 1..21: mol_type = other DNA
ttctcgcgtttaggaattaat

SEQ ID NO: 26552 - DNA, 21 bp, synthetic construct
  source 1..21: mol_type = other DNA
tatgtaaagtctcaaggcatg

SEQ ID NO: 26553 - DNA, 21 bp, synthetic construct
  source 1..21: mol_type = other DNA
ctctgtaaaccttgcctcgag

SEQ ID NO: 26554 - DNA, 21 bp, synthetic construct
  source 1..21: mol_type = other DNA
tatttctcgggcagggccgaa

SEQ ID NO: 26555 - DNA, 21 bp, synthetic construct
  source 1..21: mol_type = other DNA
atgtgggacgggactgaggcg

SEQ ID NO: 26556 - DNA, 21 bp, synthetic construct
  source 1..21: mol_type = other DNA
tatagcaaactgaacaaaaat

SEQ ID NO: 26557 - DNA, 21 bp, synthetic construct
  source 1..21: mol_type = other DNA
tacgctagaacaagtatcaac

SEQ ID NO: 26558 - DNA, 21 bp, synthetic construct
  source 1..21: mol_type = other DNA
gtcatggcagacagattgtgg

SEQ ID NO: 26559 - DNA, 21 bp, synthetic construct
  source 1..21: mol_type = other DNA
tattttacagggaaggcccaa

SEQ ID NO: 26560 - DNA, 21 bp, synthetic construct
  source 1..21: mol_type = other DNA
tatttcacgaacatcaaggag

SEQ ID NO: 26561 - DNA, 21 bp, synthetic construct
  source 1..21: mol_type = other DNA
tattccaagatgggtataaac

SEQ ID NO: 26562 - DNA, 21 bp, synthetic construct
  source 1..21: mol_type = other DNA
tactcaccagggtgcaaagaa

SEQ ID NO: 26563 - DNA, 21 bp, synthetic construct
  source 1..21: mol_type = other DNA
tacttttctggtaagcatgat

SEQ ID NO: 26564 - DNA, 21 bp, synthetic construct
  source 1..21: mol_type = other DNA
ttcgcacgtacagggtttaat

SEQ ID NO: 26565 - DNA, 21 bp, synthetic construct
  source 1..21: mol_type = other DNA
ttctctaggctaggttataat

SEQ ID NO: 26566 - DNA, 21 bp, synthetic construct
  source 1..21: mol_type = other DNA
tacctaaaaagtcagttatac

SEQ ID NO: 26567 - DNA, 21 bp, synthetic construct
  source 1..21: mol_type = other DNA
tacgctaagtccaactataac

SEQ ID NO: 26568 - DNA, 21 bp, synthetic construct
  source 1..21: mol_type = other DNA
acagatgagtggtctccctac

SEQ ID NO: 26569 - DNA, 21 bp, synthetic construct
  source 1..21: mol_type = other DNA
tattggactggggtccctgat

SEQ ID NO: 26570 - DNA, 21 bp, synthetic construct
  source 1..21: mol_type = other DNA
tggtggtctgggatcactgat

SEQ ID NO: 26571 - DNA, 21 bp, synthetic construct
  source 1..21: mol_type = other DNA
atgtgggatggtaccggacct

SEQ ID NO: 26572 - DNA, 21 bp, synthetic construct
  source 1..21: mol_type = other DNA
tttgcaaggcaaggtccgaac

SEQ ID NO: 26573 - DNA, 21 bp, synthetic construct
  source 1..21: mol_type = other DNA
tacttcaccggggaagtggcc

SEQ ID NO: 26574 - DNA, 21 bp, synthetic construct
  source 1..21: mol_type = other DNA
aaagacggatatagtgtttac

SEQ ID NO: 26575 - DNA, 21 bp, synthetic construct
  source 1..21: mol_type = other DNA
aaagacggacattccctatgg

SEQ ID NO: 26576 - DNA, 21 bp, synthetic construct
  source 1..21: mol_type = other DNA
agagacgccgaagtatatccc

SEQ ID NO: 26577 - DNA, 21 bp, synthetic construct
  source 1..21: mol_type = other DNA
ttcagtcgaataggcgcaaat

SEQ ID NO: 26578 - DNA, 21 bp, synthetic construct
  source 1..21: mol_type = other DNA
aatatggaaagccgggattgg

SEQ ID NO: 26579 - DNA, 21 bp, synthetic construct
  source 1..21: mol_type = other DNA
ttgtgccaaccatgcctcact

SEQ ID NO: 26580 - DNA, 21 bp, synthetic construct
  source 1..21: mol_type = other DNA
tactttatgggtaaacaagat

SEQ ID NO: 26581 - DNA, 21 bp, synthetic construct
  source 1..21: mol_type = other DNA
ctgatcagaccttgctctgaa

SEQ ID NO: 26582 - DNA, 21 bp, synthetic construct
  source 1..21: mol_type = other DNA
acccgagagggggatgcgcct

SEQ ID NO: 26583 - DNA, 21 bp, synthetic construct
  source 1..21: mol_type = other DNA
tactctagactaggaaaggat

SEQ ID NO: 26584 - DNA, 21 bp, synthetic construct
  source 1..21: mol_type = other DNA
tgcaaagctccatcggccggt

SEQ ID NO: 26585 - DNA, 21 bp, synthetic construct
  source 1..21: mol_type = other DNA
catgacagtaccaatggtagg

SEQ ID NO: 26586 - DNA, 21 bp, synthetic construct
  source 1..21: mol_type = other DNA
tatgtaagatcagatacacat

SEQ ID NO: 26587 - DNA, 21 bp, synthetic construct
  source 1..21: mol_type = other DNA
tactttacggggcagagagat

SEQ ID NO: 26588 - DNA, 21 bp, synthetic construct
  source 1..21: mol_type = other DNA
tacttccatgggatcagagag

SEQ ID NO: 26589 - DNA, 21 bp, synthetic construct
  source 1..21: mol_type = other DNA
gggggtgcaacctcacggtgg

SEQ ID NO: 26590 - DNA, 21 bp, synthetic construct
  source 1..21: mol_type = other DNA
agattgtacgacgcatatcaa

SEQ ID NO: 26591 - DNA, 21 bp, synthetic construct
  source 1..21: mol_type = other DNA
tatgacaaaggaacgtgggat

SEQ ID NO: 26592 - DNA, 21 bp, synthetic construct
  source 1..21: mol_type = other DNA
gggggaccgtcgagtacctgg

SEQ ID NO: 26593 - DNA, 21 bp, synthetic construct
  source 1..21: mol_type = other DNA
ccttacgcacgttcggagatg

SEQ ID NO: 26594 - DNA, 21 bp, synthetic construct
  source 1..21: mol_type = other DNA
agtatggaatcgagaacgtgg

SEQ ID NO: 26595 - DNA, 21 bp, synthetic construct
  source 1..21: mol_type = other DNA
tatgccaaaagtaactataat

SEQ ID NO: 26596 - DNA, 21 bp, synthetic construct
  source 1..21: mol_type = other DNA
attatggggaagtgccccgga

SEQ ID NO: 26597 - DNA, 21 bp, synthetic construct
  source 1..21: mol_type = other DNA
agggacgagctaactagttgg

SEQ ID NO: 26598 - DNA, 21 bp, synthetic construct
  source 1..21: mol_type = other DNA
cgcatggaggatcgtatctgg

SEQ ID NO: 26599 - DNA, 21 bp, synthetic construct
  source 1..21: mol_type = other DNA
tatgcgcgaaccaacccaaat

SEQ ID NO: 26600 - DNA, 21 bp, synthetic construct
  source 1..21: mol_type = other DNA
tacagccgccttcaggaaaac

SEQ ID NO: 26601 - DNA, 21 bp, synthetic construct
  source 1..21: mol_type = other DNA
cgggagagcacccatggtgtg

SEQ ID NO: 26602 - DNA, 21 bp, synthetic construct
  source 1..21: mol_type = other DNA
tattcaaaacagggtcataat

SEQ ID NO: 26603 - DNA, 21 bp, synthetic construct
  source 1..21: mol_type = other DNA
tttcacagattgagtgtagat

SEQ ID NO: 26604 - DNA, 21 bp, synthetic construct
  source 1..21: mol_type = other DNA
tatacaagattgcagacaggc

SEQ ID NO: 26605 - DNA, 21 bp, synthetic construct
  source 1..21: mol_type = other DNA
gctcggtcgactaatggcgtg

SEQ ID NO: 26606 - DNA, 21 bp, synthetic construct
  source 1..21: mol_type = other DNA
taccaccgactgagtgagagc

SEQ ID NO: 26607 - DNA, 21 bp, synthetic construct
  source 1..21: mol_type = other DNA
tactttactaatatacgcgag

SEQ ID NO: 26608 - DNA, 21 bp, synthetic construct
  source 1..21: mol_type = other DNA
tgtaagcctggcgcagggatt

SEQ ID NO: 26609 - DNA, 21 bp, synthetic construct
  source 1..21: mol_type = other DNA
tatttctctggtaaacaagat

SEQ ID NO: 26610 - DNA, 21 bp, synthetic construct
  source 1..21: mol_type = other DNA
tatttctctggtgttcaacaa

SEQ ID NO: 26611 - DNA, 21 bp, synthetic construct
  source 1..21: mol_type = other DNA
tactttagcgggattacagta

SEQ ID NO: 26612 - DNA, 21 bp, synthetic construct
  source 1..21: mol_type = other DNA
tactggacagggacaaccgct

SEQ ID NO: 26613 - DNA, 21 bp, synthetic construct
  source 1..21: mol_type = other DNA
ttgagcagactccagatgaac

SEQ ID NO: 26614 - DNA, 21 bp, synthetic construct
  source 1..21: mol_type = other DNA
tatagtaggcttcacatagac

SEQ ID NO: 26615 - DNA, 21 bp, synthetic construct
  source 1..21: mol_type = other DNA
ggagcagaacacgttaggtgg

SEQ ID NO: 26616 - DNA, 21 bp, synthetic construct
  source 1..21: mol_type = other DNA
catactgacgatagctatccg

SEQ ID NO: 26617 - DNA, 21 bp, synthetic construct
  source 1..21: mol_type = other DNA
aaggatgaatacttaacgttt

SEQ ID NO: 26618 - DNA, 21 bp, synthetic construct
  source 1..21: mol_type = other DNA
tactcaaaaagcaatgacaac

SEQ ID NO: 26619 - DNA, 21 bp, synthetic construct
  source 1..21: mol_type = other DNA
gtcgcaagggaagggtgggat

SEQ ID NO: 26620 - DNA, 21 bp, synthetic construct
  source 1..21: mol_type = other DNA
tacggaaaaggaacatgggat

SEQ ID NO: 26621 - DNA, 21 bp, synthetic construct
  source 1..21: mol_type = other DNA
tattggacaggaatgcttgag

SEQ ID NO: 26622 - DNA, 21 bp, synthetic construct
  source 1..21: mol_type = other DNA
atgctcagcgatcgcaaatgg

SEQ ID NO: 26623 - DNA, 21 bp, synthetic construct
  source 1..21: mol_type = other DNA
ttttcaagagtgggggataac

SEQ ID NO: 26624 - DNA, 21 bp, synthetic construct
  source 1..21: mol_type = other DNA
tatagcaagcacaacttgaat

SEQ ID NO: 26625 - DNA, 21 bp, synthetic construct
  source 1..21: mol_type = other DNA
gctaggcagtgtcttcctatg

SEQ ID NO: 26626 - DNA, 21 bp, synthetic construct
  source 1..21: mol_type = other DNA
tttagtagagtaggttacaac

SEQ ID NO: 26627 - DNA, 21 bp, synthetic construct
  source 1..21: mol_type = other DNA
cgccttgaccacgtctttcca

SEQ ID NO: 26628 - DNA, 21 bp, synthetic construct
  source 1..21: mol_type = other DNA
cgcgacggaagtagtagttgg

SEQ ID NO: 26629 - DNA, 21 bp, synthetic construct
  source 1..21: mol_type = other DNA
tacgttaggtctgacaccaga

SEQ ID NO: 26630 - DNA, 21 bp, synthetic construct
  source 1..21: mol_type = other DNA
cttagccggattcaaacgaat

SEQ ID NO: 26631 - DNA, 21 bp, synthetic construct
  source 1..21: mol_type = other DNA
tatgtcaagagtggaccgatg

SEQ ID NO: 26632 - DNA, 21 bp, synthetic construct
  source 1..21: mol_type = other DNA
tacagtagatgcagtgataat

SEQ ID NO: 26633 - DNA, 21 bp, synthetic construct
  source 1..21: mol_type = other DNA
tgcaaaccgcaaagtggtgca

SEQ ID NO: 26634 - DNA, 21 bp, synthetic construct
  source 1..21: mol_type = other DNA
tacttttcgggaactgtcagc

SEQ ID NO: 26635 - DNA, 21 bp, synthetic construct
  source 1..21: mol_type = other DNA
tatagccgcttaaacatcaac

SEQ ID NO: 26636 - DNA, 21 bp, synthetic construct
  source 1..21: mol_type = other DNA
tattggagtggggtgatcgat

SEQ ID NO: 26637 - DNA, 21 bp, synthetic construct
  source 1..21: mol_type = other DNA
gtaccagattgggtcgagttc

SEQ ID NO: 26638 - DNA, 21 bp, synthetic construct
  source 1..21: mol_type = other DNA
ccgtatgccaaatcacgcgac

SEQ ID NO: 26639 - DNA, 21 bp, synthetic construct
  source 1..21: mol_type = other DNA
tatttcacgggtcagattaac

SEQ ID NO: 26640 - DNA, 21 bp, synthetic construct
  source 1..21: mol_type = other DNA
ggagggcccagctcaacatgg

SEQ ID NO: 26641 - DNA, 21 bp, synthetic construct
  source 1..21: mol_type = other DNA
agagaagaccatgtctactgg

SEQ ID NO: 26642 - DNA, 21 bp, synthetic construct
  source 1..21: mol_type = other DNA
aggaatgagttcaccgggtac

SEQ ID NO: 26643 - DNA, 21 bp, synthetic construct
  source 1..21: mol_type = other DNA
gagaacgaattcaagattttc

SEQ ID NO: 26644 - DNA, 21 bp, synthetic construct
  source 1..21: mol_type = other DNA
tgcactagtaagacaagtcat

SEQ ID NO: 26645 - DNA, 21 bp, synthetic construct
  source 1..21: mol_type = other DNA
tactggagtggtgtcccggaa

SEQ ID NO: 26646 - DNA, 21 bp, synthetic construct
  source 1..21: mol_type = other DNA
agggacgagtttgtctcgttt

SEQ ID NO: 26647 - DNA, 21 bp, synthetic construct
  source 1..21: mol_type = other DNA
gacatgggcagcagtcagtgg

SEQ ID NO: 26648 - DNA, 21 bp, synthetic construct
  source 1..21: mol_type = other DNA
ggatcgccgggggtcgcttgg

SEQ ID NO: 26649 - DNA, 21 bp, synthetic construct
  source 1..21: mol_type = other DNA
acaaaagacgggctctgcgca

SEQ ID NO: 26650 - DNA, 21 bp, synthetic construct
  source 1..21: mol_type = other DNA
gggtcagatcatgtccgttgg

SEQ ID NO: 26651 - DNA, 21 bp, synthetic construct
  source 1..21: mol_type = other DNA
tattttagcggaaagacatcc

SEQ ID NO: 26652 - DNA, 21 bp, synthetic construct
  source 1..21: mol_type = other DNA
agagacggatcatcactgtgg

SEQ ID NO: 26653 - DNA, 21 bp, synthetic construct
  source 1..21: mol_type = other DNA
tatttcaccgggcaacaatca

SEQ ID NO: 26654 - DNA, 21 bp, synthetic construct
  source 1..21: mol_type = other DNA
tatgcaaaaaacggctataac

SEQ ID NO: 26655 - DNA, 21 bp, synthetic construct
  source 1..21: mol_type = other DNA
tataccaaaagtaatcactta

SEQ ID NO: 26656 - DNA, 21 bp, synthetic construct
  source 1..21: mol_type = other DNA
tatgtcagaagccaaacggat

SEQ ID NO: 26657 - DNA, 21 bp, synthetic construct
  source 1..21: mol_type = other DNA
tatttcacaggcttcacggag

SEQ ID NO: 26658 - DNA, 21 bp, synthetic construct
  source 1..21: mol_type = other DNA
gttatggaagatagacgatgg

SEQ ID NO: 26659 - DNA, 21 bp, synthetic construct
  source 1..21: mol_type = other DNA
aaaatgagtgaccatacatgg

SEQ ID NO: 26660 - DNA, 21 bp, synthetic construct
  source 1..21: mol_type = other DNA
aaagatgattttagcgcgtac

SEQ ID NO: 26661 - DNA, 21 bp, synthetic construct
  source 1..21: mol_type = other DNA
agaggtgatagggtttatccg

SEQ ID NO: 26662 - DNA, 21 bp, synthetic construct
  source 1..21: mol_type = other DNA
tattttcacggcaagttagaa

SEQ ID NO: 26663 - DNA, 21 bp, synthetic construct
  source 1..21: mol_type = other DNA
tatagcaaacgcaatgacaat

SEQ ID NO: 26664 - DNA, 21 bp, synthetic construct
  source 1..21: mol_type = other DNA
tatttcagtgggcaaatcttg

SEQ ID NO: 26665 - DNA, 21 bp, synthetic construct
  source 1..21: mol_type = other DNA
agatcggtcgacgcctatccg

SEQ ID NO: 26666 - DNA, 21 bp, synthetic construct
  source 1..21: mol_type = other DNA
tacttcactgggagacaagat

SEQ ID NO: 26667 - DNA, 21 bp, synthetic construct
  source 1..21: mol_type = other DNA
tactttacgggggagtttgaa

SEQ ID NO: 26668 - DNA, 21 bp, synthetic construct
  source 1..21: mol_type = other DNA
agagatgatttttctggctgg

SEQ ID NO: 26669 - DNA, 21 bp, synthetic construct
  source 1..21: mol_type = other DNA
tactatacaggtgttatagag

SEQ ID NO: 26670 - DNA, 21 bp, synthetic construct
  source 1..21: mol_type = other DNA
tacagtaaattagatactaat

SEQ ID NO: 26671 - DNA, 21 bp, synthetic construct
  source 1..21: mol_type = other DNA
ttaatgtcggatcgtgagtgg

SEQ ID NO: 26672 - DNA, 21 bp, synthetic construct
  source 1..21: mol_type = other DNA
ctcgccagaacgggacgcgac

SEQ ID NO: 26673 - DNA, 21 bp, synthetic construct
  source 1..21: mol_type = other DNA
tattttcaaggcaagattgac

SEQ ID NO: 26674 - DNA, 21 bp, synthetic construct
  source 1..21: mol_type = other DNA
cacggaaaaggcgagtgtccg

SEQ ID NO: 26675 - DNA, 21 bp, synthetic construct
  source 1..21: mol_type = other DNA
tatgctaggactggtgttaat

SEQ ID NO: 26676 - DNA, 21 bp, synthetic construct
  source 1..21: mol_type = other DNA
tggtccagagacacatgcaac

SEQ ID NO: 26677 - DNA, 21 bp, synthetic construct
  source 1..21: mol_type = other DNA
ggaggcccaggtgtccgatgg

SEQ ID NO: 26678 - DNA, 21 bp, synthetic construct
  source 1..21: mol_type = other DNA
tgtgataaggaggcatatcag

SEQ ID NO: 26679 - DNA, 21 bp, synthetic construct
  source 1..21: mol_type = other DNA
tatagtagggtacagccaaat

SEQ ID NO: 26680 - DNA, 21 bp, synthetic construct
  source 1..21: mol_type = other DNA
tatggcaagggtacttgggac

SEQ ID NO: 26681 - DNA, 21 bp, synthetic construct
  source 1..21: mol_type = other DNA
ctcaaagacggcacctgtata

SEQ ID NO: 26682 - DNA, 21 bp, synthetic construct
  source 1..21: mol_type = other DNA
tatccctttcctcaggcggcg

SEQ ID NO: 26683 - DNA, 21 bp, synthetic construct
  source 1..21: mol_type = other DNA
tatagcaagcagaatactaat

SEQ ID NO: 26684 - DNA, 21 bp, synthetic construct
  source 1..21: mol_type = other DNA
tatttcagcggagtgcgttct

SEQ ID NO: 26685 - DNA, 21 bp, synthetic construct
  source 1..21: mol_type = other DNA
ggtggggagttctctaagtgg

SEQ ID NO: 26686 - DNA, 21 bp, synthetic construct
  source 1..21: mol_type = other DNA
tatcacaagcacagtcttaac

SEQ ID NO: 26687 - DNA, 21 bp, synthetic construct
  source 1..21: mol_type = other DNA
tgtcgccccaaacaggtcgat

SEQ ID NO: 26688 - DNA, 21 bp, synthetic construct
  source 1..21: mol_type = other DNA
tacttttcaggcactagagaa

SEQ ID NO: 26689 - DNA, 21 bp, synthetic construct
  source 1..21: mol_type = other DNA
tacgctaaaaatgggatgaac

SEQ ID NO: 26690 - DNA, 21 bp, synthetic construct
  source 1..21: mol_type = other DNA
taccatcgtttgagtgtagac

SEQ ID NO: 26691 - DNA, 21 bp, synthetic construct
  source 1..21: mol_type = other DNA
tatgcccgtacctcgataaat

SEQ ID NO: 26692 - DNA, 21 bp, synthetic construct
  source 1..21: mol_type = other DNA
atccacagattattaccgtcg

SEQ ID NO: 26693 - DNA, 21 bp, synthetic construct
  source 1..21: mol_type = other DNA
tatcaccgcctccaagaagac

SEQ ID NO: 26694 - DNA, 21 bp, synthetic construct
  source 1..21: mol_type = other DNA
ctctgggacggaacgcctagt

SEQ ID NO: 26695 - DNA, 21 bp, synthetic construct
  source 1..21: mol_type = other DNA
ttacataggctacaggagtat

SEQ ID NO: 26696 - DNA, 21 bp, synthetic construct
  source 1..21: mol_type = other DNA
cgtatggatgccgtaacttgg

SEQ ID NO: 26697 - DNA, 21 bp, synthetic construct
  source 1..21: mol_type = other DNA
cgaagcgagtttttgccctat

SEQ ID NO: 26698 - DNA, 21 bp, synthetic construct
  source 1..21: mol_type = other DNA
aacatggcatcaacgacctgg

SEQ ID NO: 26699 - DNA, 21 bp, synthetic construct
  source 1..21: mol_type = other DNA
cgcggggagagcagaggatgg

SEQ ID NO: 26700 - DNA, 21 bp, synthetic construct
  source 1..21: mol_type = other DNA
tacttctcgggtgtgcagagc

SEQ ID NO: 26701 - DNA, 21 bp, synthetic construct
  source 1..21: mol_type = other DNA
ttattggcctctagtagctgg

SEQ ID NO: 26702 - DNA, 21 bp, synthetic construct
  source 1..21: mol_type = other DNA
cacatttcgacaaatggtgtt

SEQ ID NO: 26703 - DNA, 21 bp, synthetic construct
  source 1..21: mol_type = other DNA
ataccgtcaagtgtacgctgg

SEQ ID NO: 26704 - DNA, 21 bp, synthetic construct
  source 1..21: mol_type = other DNA
tacacgcgtttagacttcaac

SEQ ID NO: 26705 - DNA, 21 bp, synthetic construct
  source 1..21: mol_type = other DNA
tacgtgaggagcgaccggaat

SEQ ID NO: 26706 - DNA, 21 bp, synthetic construct
  source 1..21: mol_type = other DNA
cgcgacgattttagcgtttac

SEQ ID NO: 26707 - DNA, 21 bp, synthetic construct
  source 1..21: mol_type = other DNA
tacagccgcttgcaccccatg

SEQ ID NO: 26708 - DNA, 21 bp, synthetic construct
  source 1..21: mol_type = other DNA
tactttagcggaaagcaggac

SEQ ID NO: 26709 - DNA, 21 bp, synthetic construct
  source 1..21: mol_type = other DNA
ctagcgaagaccggcttaaac

SEQ ID NO: 26710 - DNA, 21 bp, synthetic construct
  source 1..21: mol_type = other DNA
ctacgagacggctcacctgcg

SEQ ID NO: 26711 - DNA, 21 bp, synthetic construct
  source 1..21: mol_type = other DNA
agggacgactttgtttcgtat

SEQ ID NO: 26712 - DNA, 21 bp, synthetic construct
  source 1..21: mol_type = other DNA
ttacaccgattgatagcagac

SEQ ID NO: 26713 - DNA, 21 bp, synthetic construct
  source 1..21: mol_type = other DNA
ttgttcgatgcaactcctagt

SEQ ID NO: 26714 - DNA, 21 bp, synthetic construct
  source 1..21: mol_type = other DNA
tactgggcaggagtccgtgaa

SEQ ID NO: 26715 - DNA, 21 bp, synthetic construct
  source 1..21: mol_type = other DNA
tggtggagtggagtagcggaa

SEQ ID NO: 26716 - DNA, 21 bp, synthetic construct
  source 1..21: mol_type = other DNA
aaatatgaccacgtgacttgg

SEQ ID NO: 26717 - DNA, 21 bp, synthetic construct
  source 1..21: mol_type = other DNA
tattcgaaaagcaacttcaac

SEQ ID NO: 26718 - DNA, 21 bp, synthetic construct
  source 1..21: mol_type = other DNA
tatttttccggacaaatggag

SEQ ID NO: 26719 - DNA, 21 bp, synthetic construct
  source 1..21: mol_type = other DNA
taccataaactaaacctcgtg

SEQ ID NO: 26720 - DNA, 21 bp, synthetic construct
  source 1..21: mol_type = other DNA
tactggagcgcaataccggcc

SEQ ID NO: 26721 - DNA, 21 bp, synthetic construct
  source 1..21: mol_type = other DNA
tacttccatggaaagcttgag

SEQ ID NO: 26722 - DNA, 21 bp, synthetic construct
  source 1..21: mol_type = other DNA
tacagcagagccggtgataat

SEQ ID NO: 26723 - DNA, 21 bp, synthetic construct
  source 1..21: mol_type = other DNA
tacttcagcggcgttccacat

SEQ ID NO: 26724 - DNA, 21 bp, synthetic construct
  source 1..21: mol_type = other DNA
tacgccaaaggaaatttcaac

SEQ ID NO: 26725 - DNA, 21 bp, synthetic construct
  source 1..21: mol_type = other DNA
tacagccgtttgaacaaggat

SEQ ID NO: 26726 - DNA, 21 bp, synthetic construct
  source 1..21: mol_type = other DNA
ctttgtaggccttgcactgaa

SEQ ID NO: 26727 - DNA, 21 bp, synthetic construct
  source 1..21: mol_type = other DNA
agcgagagtacgaacggggtg

SEQ ID NO: 26728 - DNA, 21 bp, synthetic construct
  source 1..21: mol_type = other DNA
tactggagcggaaccattgcc

SEQ ID NO: 26729 - DNA, 21 bp, synthetic construct
  source 1..21: mol_type = other DNA
catcaatcaacaaacggggtt

SEQ ID NO: 26730 - DNA, 21 bp, synthetic construct
  source 1..21: mol_type = other DNA
cgagaatccacgaatggggtc

SEQ ID NO: 26731 - DNA, 21 bp, synthetic construct
  source 1..21: mol_type = other DNA
agggaaggaactagtaaatgg

SEQ ID NO: 26732 - DNA, 21 bp, synthetic construct
  source 1..21: mol_type = other DNA
tacgtgcgaagcgatgcaacc

SEQ ID NO: 26733 - DNA, 21 bp, synthetic construct
  source 1..21: mol_type = other DNA
tacgccaggctggggttgaat

SEQ ID NO: 26734 - DNA, 21 bp, synthetic construct
  source 1..21: mol_type = other DNA
ttggcgaagacaggaatgaat

SEQ ID NO: 26735 - DNA, 21 bp, synthetic construct
  source 1..21: mol_type = other DNA
tatagtaaacaaaacgctaac

SEQ ID NO: 26736 - DNA, 21 bp, synthetic construct
  source 1..21: mol_type = other DNA
agggacgagttccacgcgtgg

SEQ ID NO: 26737 - DNA, 21 bp, synthetic construct
  source 1..21: mol_type = other DNA
tacagccgtttgggtcttaat

SEQ ID NO: 26738 - DNA, 21 bp, synthetic construct
  source 1..21: mol_type = other DNA
tatttcagcggtactcaggct

SEQ ID NO: 26739 - DNA, 21 bp, synthetic construct
  source 1..21: mol_type = other DNA
atgttgtcggacagaaagtgg

SEQ ID NO: 26740 - DNA, 21 bp, synthetic construct
  source 1..21: mol_type = other DNA
tactttagcggagtagttaat

SEQ ID NO: 26741 - DNA, 21 bp, synthetic construct
  source 1..21: mol_type = other DNA
tactcaaaacaaaacacaaat

SEQ ID NO: 26742 - DNA, 21 bp, synthetic construct
  source 1..21: mol_type = other DNA
tactcgcggctaggtgttggt

SEQ ID NO: 26743 - DNA, 21 bp, synthetic construct
  source 1..21: mol_type = other DNA
tattttagcggtatacctcac

SEQ ID NO: 26744 - DNA, 21 bp, synthetic construct
  source 1..21: mol_type = other DNA
ggtagcgagatgtcgcactgg

SEQ ID NO: 26745 - DNA, 21 bp, synthetic construct
  source 1..21: mol_type = other DNA
tacgccagaactagtcctctg

SEQ ID NO: 26746 - DNA, 21 bp, synthetic construct
  source 1..21: mol_type = other DNA
gttaataatagctgcttgacc

SEQ ID NO: 26747 - DNA, 21 bp, synthetic construct
  source 1..21: mol_type = other DNA
tacgctcgcagcggcatcaac

SEQ ID NO: 26748 - DNA, 21 bp, synthetic construct
  source 1..21: mol_type = other DNA
tcgatggccagttcatcgtgg

SEQ ID NO: 26749 - DNA, 21 bp, synthetic construct
  source 1..21: mol_type = other DNA
gatatgggtgataggaaatgg

SEQ ID NO: 26750 - DNA, 21 bp, synthetic construct
  source 1..21: mol_type = other DNA
tgtaagcctgagatggtcagg

SEQ ID NO: 26751 - DNA, 21 bp, synthetic construct
  source 1..21: mol_type = other DNA
cgcacatatgacgcatacccg

SEQ ID NO: 26752 - DNA, 21 bp, synthetic construct
  source 1..21: mol_type = other DNA
cccatgggaagtcaaacgtgg

SEQ ID NO: 26753 - DNA, 21 bp, synthetic construct
  source 1..21: mol_type = other DNA
ttctcaaaggtcggtcacaat

SEQ ID NO: 26754 - DNA, 21 bp, synthetic construct
  source 1..21: mol_type = other DNA
agcgactcgacaaacggtata

SEQ ID NO: 26755 - DNA, 21 bp, synthetic construct
  source 1..21: mol_type = other DNA
tatttcagcgggactacagag

SEQ ID NO: 26756 - DNA, 21 bp, synthetic construct
  source 1..21: mol_type = other DNA
atgtgggatggcactccgtca

SEQ ID NO: 26757 - DNA, 21 bp, synthetic construct
  source 1..21: mol_type = other DNA
tgtagtcgtgatggcgaaaat

SEQ ID NO: 26758 - DNA, 21 bp, synthetic construct
  source 1..21: mol_type = other DNA
tattatacggggcgtatggag

SEQ ID NO: 26759 - DNA, 21 bp, synthetic construct
  source 1..21: mol_type = other DNA
gacatggaaagctccaaatgg

SEQ ID NO: 26760 - DNA, 21 bp, synthetic construct
  source 1..21: mol_type = other DNA
gggtccgagtatctaacatgg

SEQ ID NO: 26761 - DNA, 21 bp, synthetic construct
  source 1..21: mol_type = other DNA
tacacgaggttagattctcat

SEQ ID NO: 26762 - DNA, 21 bp, synthetic construct
  source 1..21: mol_type = other DNA
tatttcaccggctttatggaa

SEQ ID NO: 26763 - DNA, 21 bp, synthetic construct
  source 1..21: mol_type = other DNA
ttcttcacgggtcgcgtcgaa

SEQ ID NO: 26764 - DNA, 21 bp, synthetic construct
  source 1..21: mol_type = other DNA
aaggacggctattccagctgg

SEQ ID NO: 26765 - DNA, 21 bp, synthetic construct
  source 1..21: mol_type = other DNA
tattttacaggccaaatagta

SEQ ID NO: 26766 - DNA, 21 bp, synthetic construct
  source 1..21: mol_type = other DNA
tattcaaaaatagggaaaaac

SEQ ID NO: 26767 - DNA, 21 bp, synthetic construct
  source 1..21: mol_type = other DNA
attctaagtgaccgaagttgg

SEQ ID NO: 26768 - DNA, 21 bp, synthetic construct
  source 1..21: mol_type = other DNA
aggaatgactttgtttcgttc

SEQ ID NO: 26769 - DNA, 21 bp, synthetic construct
  source 1..21: mol_type = other DNA
tacttctcggggaaaataatg

SEQ ID NO: 26770 - DNA, 21 bp, synthetic construct
  source 1..21: mol_type = other DNA
cgtgaggacttctcaacttgg

SEQ ID NO: 26771 - DNA, 21 bp, synthetic construct
  source 1..21: mol_type = other DNA
tatttcactggaatgcgggcc

SEQ ID NO: 26772 - DNA, 21 bp, synthetic construct
  source 1..21: mol_type = other DNA
tacgttagaagcgattcgatg

SEQ ID NO: 26773 - DNA, 21 bp, synthetic construct
  source 1..21: mol_type = other DNA
tatttaaaatcacaaaccgtt

SEQ ID NO: 26774 - DNA, 21 bp, synthetic construct
  source 1..21: mol_type = other DNA
taccatagattgtcccctgtc

SEQ ID NO: 26775 - DNA, 21 bp, synthetic construct
  source 1..21: mol_type = other DNA
ggcagcggtacttcacactgg

SEQ ID NO: 26776 - DNA, 21 bp, synthetic construct
  source 1..21: mol_type = other DNA
ttaagtaaatcaagtgtaaac

SEQ ID NO: 26777 - DNA, 21 bp, synthetic construct
  source 1..21: mol_type = other DNA
agtacatacgattcgtatccg

SEQ ID NO: 26778 - DNA, 21 bp, synthetic construct
  source 1..21: mol_type = other DNA
cgggacgcgacaagtagctgg

SEQ ID NO: 26779 - DNA, 21 bp, synthetic construct
  source 1..21: mol_type = other DNA
tcggatggtacctcgaagtgg

SEQ ID NO: 26780 - DNA, 21 bp, synthetic construct
  source 1..21: mol_type = other DNA
tgtaaacccaggcaaggggaa

SEQ ID NO: 26781 - DNA, 21 bp, synthetic construct
  source 1..21: mol_type = other DNA
aggaatgaattttccacctat

SEQ ID NO: 26782 - DNA, 21 bp, synthetic construct
  source 1..21: mol_type = other DNA
tactcgcgtgttggtcctaat

SEQ ID NO: 26783 - DNA, 21 bp, synthetic construct
  source 1..21: mol_type = other DNA
tatttcagcggtcaacgggag

SEQ ID NO: 26784 - DNA, 21 bp, synthetic construct
  source 1..21: mol_type = other DNA
tacttctctggtaaaaccagt

SEQ ID NO: 26785 - DNA, 21 bp, synthetic construct
  source 1..21: mol_type = other DNA
ttttcgcgtataggggggggg

SEQ ID NO: 26786 - DNA, 21 bp, synthetic construct
  source 1..21: mol_type = other DNA
tattacactggcaagtgcaac

SEQ ID NO: 26787 - DNA, 21 bp, synthetic construct
  source 1..21: mol_type = other DNA
aaaacagattatgttacgtgg

SEQ ID NO: 26788 - DNA, 21 bp, synthetic construct
  source 1..21: mol_type = other DNA
tatttcgcagggaccataaac

SEQ ID NO: 26789 - DNA, 21 bp, synthetic construct
  source 1..21: mol_type = other DNA
tattttagtgggagattggat

SEQ ID NO: 26790 - DNA, 21 bp, synthetic construct
  source 1..21: mol_type = other DNA
ctctcacgacttaaccataat

SEQ ID NO: 26791 - DNA, 21 bp, synthetic construct
  source 1..21: mol_type = other DNA
tattctcggcccggacctaac

SEQ ID NO: 26792 - DNA, 21 bp, synthetic construct
  source 1..21: mol_type = other DNA
tattggtctggagtctccgcg

SEQ ID NO: 26793 - DNA, 21 bp, synthetic construct
  source 1..21: mol_type = other DNA
tactttacgggagtagctgac

SEQ ID NO: 26794 - DNA, 21 bp, synthetic construct
  source 1..21: mol_type = other DNA
cgtaacgaatttacaggttat

SEQ ID NO: 26795 - DNA, 21 bp, synthetic construct
  source 1..21: mol_type = other DNA
tactttgcggggataataggt

SEQ ID NO: 26796 - DNA, 21 bp, synthetic construct
  source 1..21: mol_type = other DNA
tacgctaagaatggcatcaat

SEQ ID NO: 26797 - DNA, 21 bp, synthetic construct
  source 1..21: mol_type = other DNA
tacagccgcctcaacgaattc

SEQ ID NO: 26798 - DNA, 21 bp, synthetic construct
  source 1..21: mol_type = other DNA
tccgagagcaccaacggaatt

SEQ ID NO: 26799 - DNA, 21 bp, synthetic construct
  source 1..21: mol_type = other DNA
tacagccgaattgggttcgat

SEQ ID NO: 26800 - DNA, 21 bp, synthetic construct
  source 1..21: mol_type = other DNA
cgcgacgagacatcatactgg

SEQ ID NO: 26801 - DNA, 21 bp, synthetic construct
  source 1..21: mol_type = other DNA
agggatggtacaagtagatgg

SEQ ID NO: 26802 - DNA, 21 bp, synthetic construct
  source 1..21: mol_type = other DNA
tacaccaaatccaaccatctt

SEQ ID NO: 26803 - DNA, 21 bp, synthetic construct
  source 1..21: mol_type = other DNA
tactggacaggaaaagtagaa

SEQ ID NO: 26804 - DNA, 21 bp, synthetic construct
  source 1..21: mol_type = other DNA
tacgcaaggagcggtccaaat

SEQ ID NO: 26805 - DNA, 21 bp, synthetic construct
  source 1..21: mol_type = other DNA
tattcccgagcaggaatggat

SEQ ID NO: 26806 - DNA, 21 bp, synthetic construct
  source 1..21: mol_type = other DNA
cgagacgggtcaagtcggtgg

SEQ ID NO: 26807 - DNA, 21 bp, synthetic construct
  source 1..21: mol_type = other DNA
tacgccaggaccggcatgaat

SEQ ID NO: 26808 - DNA, 21 bp, synthetic construct
  source 1..21: mol_type = other DNA
atgatggacggaaccccagcc

SEQ ID NO: 26809 - DNA, 21 bp, synthetic construct
  source 1..21: mol_type = other DNA
tatgtgaagtatgatacatct

SEQ ID NO: 26810 - DNA, 21 bp, synthetic construct
  source 1..21: mol_type = other DNA
ttttttagcggtgtgattgcc

SEQ ID NO: 26811 - DNA, 21 bp, synthetic construct
  source 1..21: mol_type = other DNA
atagccgatcacttacgctgg

SEQ ID NO: 26812 - DNA, 21 bp, synthetic construct
  source 1..21: mol_type = other DNA
accaactcgactaacggtata

SEQ ID NO: 26813 - DNA, 21 bp, synthetic construct
  source 1..21: mol_type = other DNA
tatagtaggatccaattcgat

SEQ ID NO: 26814 - DNA, 21 bp, synthetic construct
  source 1..21: mol_type = other DNA
tactcgagactcaatataaat

SEQ ID NO: 26815 - DNA, 21 bp, synthetic construct
  source 1..21: mol_type = other DNA
tgtaaatcaaataatgaacca

SEQ ID NO: 26816 - DNA, 21 bp, synthetic construct
  source 1..21: mol_type = other DNA
ggggtcgagacctgtaagcca

SEQ ID NO: 26817 - DNA, 21 bp, synthetic construct
  source 1..21: mol_type = other DNA
agggacgaggtaacctcttgg

SEQ ID NO: 26818 - DNA, 21 bp, synthetic construct
  source 1..21: mol_type = other DNA
aaatatgcttttagtactgag

SEQ ID NO: 26819 - DNA, 21 bp, synthetic construct
  source 1..21: mol_type = other DNA
aggcttgagtctacccactgg

SEQ ID NO: 26820 - DNA, 21 bp, synthetic construct
  source 1..21: mol_type = other DNA
tactttgctggaaaaagagag

SEQ ID NO: 26821 - DNA, 21 bp, synthetic construct
  source 1..21: mol_type = other DNA
tatgtcaagtcccaaccgatg

SEQ ID NO: 26822 - DNA, 21 bp, synthetic construct
  source 1..21: mol_type = other DNA
gatttagactcatacaaatgg

SEQ ID NO: 26823 - DNA, 21 bp, synthetic construct
  source 1..21: mol_type = other DNA
ttagctcgcttgggggctaat

SEQ ID NO: 26824 - DNA, 21 bp, synthetic construct
  source 1..21: mol_type = other DNA
tacgctaaggctgggtgtaat

SEQ ID NO: 26825 - DNA, 21 bp, synthetic construct
  source 1..21: mol_type = other DNA
tgtggagcaaagtgttgtcca

SEQ ID NO: 26826 - DNA, 21 bp, synthetic construct
  source 1..21: mol_type = other DNA
tggtcccgagattgcgacaat

SEQ ID NO: 26827 - DNA, 21 bp, synthetic construct
  source 1..21: mol_type = other DNA
tacagccggattcaggacgat

SEQ ID NO: 26828 - DNA, 21 bp, synthetic construct
  source 1..21: mol_type = other DNA
tattggacaggggttccggaa

SEQ ID NO: 26829 - DNA, 21 bp, synthetic construct
  source 1..21: mol_type = other DNA
cgagatgaattgacctcgtgg

SEQ ID NO: 26830 - DNA, 21 bp, synthetic construct
  source 1..21: mol_type = other DNA
tatttccaaggtatacgcgaa

SEQ ID NO: 26831 - DNA, 21 bp, synthetic construct
  source 1..21: mol_type = other DNA
agagatgactatagcacttat

SEQ ID NO: 26832 - DNA, 21 bp, synthetic construct
  source 1..21: mol_type = other DNA
ttccaccgcttatcgattgac

SEQ ID NO: 26833 - DNA, 21 bp, synthetic construct
  source 1..21: mol_type = other DNA
agagacggtattagtgcctgg

SEQ ID NO: 26834 - DNA, 21 bp, synthetic construct
  source 1..21: mol_type = other DNA
tatttcacgggtcgcatggat

SEQ ID NO: 26835 - DNA, 21 bp, synthetic construct
  source 1..21: mol_type = other DNA
agcgatggtgtgtccagatgg

SEQ ID NO: 26836 - DNA, 21 bp, synthetic construct
  source 1..21: mol_type = other DNA
ctggctaaaacggggctgaat

SEQ ID NO: 26837 - DNA, 21 bp, synthetic construct
  source 1..21: mol_type = other DNA
ttagcgcggctcggccccgac

SEQ ID NO: 26838 - DNA, 21 bp, synthetic construct
  source 1..21: mol_type = other DNA
cacgagagtacaaacggccgt

SEQ ID NO: 26839 - DNA, 21 bp, synthetic construct
  source 1..21: mol_type = other DNA
atagtttccacaaacggtgtc

SEQ ID NO: 26840 - DNA, 21 bp, synthetic construct
  source 1..21: mol_type = other DNA
cgactcgagtcatcaggatgg

SEQ ID NO: 26841 - DNA, 21 bp, synthetic construct
  source 1..21: mol_type = other DNA
tatttctcggggatccataac

SEQ ID NO: 26842 - DNA, 21 bp, synthetic construct
  source 1..21: mol_type = other DNA
tatagtcgtttgaatgacaat

SEQ ID NO: 26843 - DNA, 21 bp, synthetic construct
  source 1..21: mol_type = other DNA
ctccatcgcctgcatgtagat

SEQ ID NO: 26844 - DNA, 21 bp, synthetic construct
  source 1..21: mol_type = other DNA
tatgcaaaacaaggctttaat

SEQ ID NO: 26845 - DNA, 21 bp, synthetic construct
  source 1..21: mol_type = other DNA
tatgcacggcaaggaatcaat

SEQ ID NO: 26846 - DNA, 21 bp, synthetic construct
  source 1..21: mol_type = other DNA
tatagtaagaccgggcagaac

SEQ ID NO: 26847 - DNA, 21 bp, synthetic construct
  source 1..21: mol_type = other DNA
tattggacagggaaaatagaa

SEQ ID NO: 26848 - DNA, 21 bp, synthetic construct
  source 1..21: mol_type = other DNA
gacctcagtgacagacgctgg

SEQ ID NO: 26849 - DNA, 21 bp, synthetic construct
  source 1..21: mol_type = other DNA
aggggagattcccccaagtgg

SEQ ID NO: 26850 - DNA, 21 bp, synthetic construct
  source 1..21: mol_type = other DNA
tatttttctggtcaaagtgaa

SEQ ID NO: 26851 - DNA, 21 bp, synthetic construct
  source 1..21: mol_type = other DNA
tacttctctggcatgcgcgag

SEQ ID NO: 26852 - DNA, 21 bp, synthetic construct
  source 1..21: mol_type = other DNA
gatccagctagcagagcttgg

SEQ ID NO: 26853 - DNA, 21 bp, synthetic construct
  source 1..21: mol_type = other DNA
cgcaacgacttcgtgagtttt

SEQ ID NO: 26854 - DNA, 21 bp, synthetic construct
  source 1..21: mol_type = other DNA
acctcgtcatcaaatggtgtt

SEQ ID NO: 26855 - DNA, 21 bp, synthetic construct
  source 1..21: mol_type = other DNA
ttcagtaggataggtgtaaac

SEQ ID NO: 26856 - DNA, 21 bp, synthetic construct
  source 1..21: mol_type = other DNA
ttctggaccggagttaaagaa

SEQ ID NO: 26857 - DNA, 21 bp, synthetic construct
  source 1..21: mol_type = other DNA
aggttagagagttatgattgg

SEQ ID NO: 26858 - DNA, 21 bp, synthetic construct
  source 1..21: mol_type = other DNA
atagaggggagaggctgggac

SEQ ID NO: 26859 - DNA, 21 bp, synthetic construct
  source 1..21: mol_type = other DNA
aaggatgaatttaagacctat

SEQ ID NO: 26860 - DNA, 21 bp, synthetic construct
  source 1..21: mol_type = other DNA
agaatggaggatcggaagtgg

SEQ ID NO: 26861 - DNA, 21 bp, synthetic construct
  source 1..21: mol_type = other DNA
ttagcccggaatttgccgaat

SEQ ID NO: 26862 - DNA, 21 bp, synthetic construct
  source 1..21: mol_type = other DNA
ttcgcccggaacgggcctaac

SEQ ID NO: 26863 - DNA, 21 bp, synthetic construct
  source 1..21: mol_type = other DNA
tactggacaggcgtcccagag

SEQ ID NO: 26864 - DNA, 21 bp, synthetic construct
  source 1..21: mol_type = other DNA
tgcaaacctagacagggtgaa

SEQ ID NO: 26865 - DNA, 21 bp, synthetic construct
  source 1..21: mol_type = other DNA
cgtagtgactttgtagtctac

SEQ ID NO: 26866 - DNA, 21 bp, synthetic construct
  source 1..21: mol_type = other DNA
tatagcagagtccagttaaat

SEQ ID NO: 26867 - DNA, 21 bp, synthetic construct
  source 1..21: mol_type = other DNA
gtagtgtccaccaacggtcgc

SEQ ID NO: 26868 - DNA, 21 bp, synthetic construct
  source 1..21: mol_type = other DNA
tatttctcgggtagacaagaa

SEQ ID NO: 26869 - DNA, 21 bp, synthetic construct
  source 1..21: mol_type = other DNA
tacagccgtattcagatggat

SEQ ID NO: 26870 - DNA, 21 bp, synthetic construct
  source 1..21: mol_type = other DNA
tatttctcgggaatcactgtg

SEQ ID NO: 26871 - DNA, 21 bp, synthetic construct
  source 1..21: mol_type = other DNA
tatttttctggagtcccctcc

SEQ ID NO: 26872 - DNA, 21 bp, synthetic construct
  source 1..21: mol_type = other DNA
atagctgatcatctacgctgg

SEQ ID NO: 26873 - DNA, 21 bp, synthetic construct
  source 1..21: mol_type = other DNA
tattctcgggcaggggacaac

SEQ ID NO: 26874 - DNA, 21 bp, synthetic construct
  source 1..21: mol_type = other DNA
tgtcaaggccagggaaatcct

SEQ ID NO: 26875 - DNA, 21 bp, synthetic construct
  source 1..21: mol_type = other DNA
agcagatcaacaaacggtatc

SEQ ID NO: 26876 - DNA, 21 bp, synthetic construct
  source 1..21: mol_type = other DNA
cgcagtgagttcctaccgtac

SEQ ID NO: 26877 - DNA, 21 bp, synthetic construct
  source 1..21: mol_type = other DNA
tactcaagaatcgcccccgac

SEQ ID NO: 26878 - DNA, 21 bp, synthetic construct
  source 1..21: mol_type = other DNA
tactccaagcaaaaccacaac

SEQ ID NO: 26879 - DNA, 21 bp, synthetic construct
  source 1..21: mol_type = other DNA
tatcatagactaagcgcggat

SEQ ID NO: 26880 - DNA, 21 bp, synthetic construct
  source 1..21: mol_type = other DNA
tatttccacggcattcatgaa

SEQ ID NO: 26881 - DNA, 21 bp, synthetic construct
  source 1..21: mol_type = other DNA
aacctagagagccggggctgg

SEQ ID NO: 26882 - DNA, 21 bp, synthetic construct
  source 1..21: mol_type = other DNA
gtgtactccacgaatggcata

SEQ ID NO: 26883 - DNA, 21 bp, synthetic construct
  source 1..21: mol_type = other DNA
tgcggcaagatgtgttgtcca

SEQ ID NO: 26884 - DNA, 21 bp, synthetic construct
  source 1..21: mol_type = other DNA
tattttacagggaagaacgaa

SEQ ID NO: 26885 - DNA, 21 bp, synthetic construct
  source 1..21: mol_type = other DNA
tacagtcgtcttaatgagcaa

SEQ ID NO: 26886 - DNA, 21 bp, synthetic construct
  source 1..21: mol_type = other DNA
tattctaaacagaataataat

SEQ ID NO: 26887 - DNA, 21 bp, synthetic construct
  source 1..21: mol_type = other DNA
tattggactggtacggtagat

SEQ ID NO: 26888 - DNA, 21 bp, synthetic construct
  source 1..21: mol_type = other DNA
tacttccacggaaaaaaggat

SEQ ID NO: 26889 - DNA, 21 bp, synthetic construct
  source 1..21: mol_type = other DNA
tactcgaaaacaggtcaaaac

SEQ ID NO: 26890 - DNA, 21 bp, synthetic construct
  source 1..21: mol_type = other DNA
tacgctcggagcggtgtgaat

SEQ ID NO: 26891 - DNA, 21 bp, synthetic construct
  source 1..21: mol_type = other DNA
tactcaagactcaatgacgca

SEQ ID NO: 26892 - DNA, 21 bp, synthetic construct
  source 1..21: mol_type = other DNA
tacttcacgggaaaagctcag

SEQ ID NO: 26893 - DNA, 21 bp, synthetic construct
  source 1..21: mol_type = other DNA
tatagtcgcttatcggagaat

SEQ ID NO: 26894 - DNA, 21 bp, synthetic construct
  source 1..21: mol_type = other DNA
cgtgaggattttgttcaatgg

SEQ ID NO: 26895 - DNA, 21 bp, synthetic construct
  source 1..21: mol_type = other DNA
gtggcggatcaccttaggtgg

SEQ ID NO: 26896 - DNA, 21 bp, synthetic construct
  source 1..21: mol_type = other DNA
gaaaccagtaccaatggtaga

SEQ ID NO: 26897 - DNA, 21 bp, synthetic construct
  source 1..21: mol_type = other DNA
aagaccgactacgtgacttgg

SEQ ID NO: 26898 - DNA, 21 bp, synthetic construct
  source 1..21: mol_type = other DNA
tacagtaagggtaacgtcaac

SEQ ID NO: 26899 - DNA, 21 bp, synthetic construct
  source 1..21: mol_type = other DNA
cgctcaccagatgtgtatcct

SEQ ID NO: 26900 - DNA, 21 bp, synthetic construct
  source 1..21: mol_type = other DNA
ctacttactagcagcacatgg

SEQ ID NO: 26901 - DNA, 21 bp, synthetic construct
  source 1..21: mol_type = other DNA
gggtgctacaaaggacccccc

SEQ ID NO: 26902 - DNA, 21 bp, synthetic construct
  source 1..21: mol_type = other DNA
atagattcgaccaatggcagg

SEQ ID NO: 26903 - DNA, 21 bp, synthetic construct
  source 1..21: mol_type = other DNA
agggagagcgataatgggata

SEQ ID NO: 26904 - DNA, 21 bp, synthetic construct
  source 1..21: mol_type = other DNA
ctaaccagtagggaaggcata

SEQ ID NO: 26905 - DNA, 21 bp, synthetic construct
  source 1..21: mol_type = other DNA
caagatggcaccagcaagtgg

SEQ ID NO: 26906 - DNA, 21 bp, synthetic construct
  source 1..21: mol_type = other DNA
tggtgtagagaaggaacacca

SEQ ID NO: 26907 - DNA, 21 bp, synthetic construct
  source 1..21: mol_type = other DNA
gatatgcgctccgctaactgg

SEQ ID NO: 26908 - DNA, 21 bp, synthetic construct
  source 1..21: mol_type = other DNA
ttctctagggtgggtcttaat

SEQ ID NO: 26909 - DNA, 21 bp, synthetic construct
  source 1..21: mol_type = other DNA
tatactcatagcaataagttc

SEQ ID NO: 26910 - DNA, 21 bp, synthetic construct
  source 1..21: mol_type = other DNA
ttacatagactgagcaacggt

SEQ ID NO: 26911 - DNA, 21 bp, synthetic construct
  source 1..21: mol_type = other DNA
cttcacaaaatgatgatgaac

SEQ ID NO: 26912 - DNA, 21 bp, synthetic construct
  source 1..21: mol_type = other DNA
ctacccgatggggatggcccc

SEQ ID NO: 26913 - DNA, 21 bp, synthetic construct
  source 1..21: mol_type = other DNA
tacccgttcccacaagctgca

SEQ ID NO: 26914 - DNA, 21 bp, synthetic construct
  source 1..21: mol_type = other DNA
tatttctcgggaattcaacac

SEQ ID NO: 26915 - DNA, 21 bp, synthetic construct
  source 1..21: mol_type = other DNA
tatcatcgcttgagtaatgat

SEQ ID NO: 26916 - DNA, 21 bp, synthetic construct
  source 1..21: mol_type = other DNA
tatttcagtggcgttcaagat

SEQ ID NO: 26917 - DNA, 21 bp, synthetic construct
  source 1..21: mol_type = other DNA
tgcgatggctcccacaaggct

SEQ ID NO: 26918 - DNA, 21 bp, synthetic construct
  source 1..21: mol_type = other DNA
tacgctaggacaagccccatg

SEQ ID NO: 26919 - DNA, 21 bp, synthetic construct
  source 1..21: mol_type = other DNA
attatgtcccacgccacctgg

SEQ ID NO: 26920 - DNA, 21 bp, synthetic construct
  source 1..21: mol_type = other DNA
agattagaagccgttacgtgg

SEQ ID NO: 26921 - DNA, 21 bp, synthetic construct
  source 1..21: mol_type = other DNA
aaagaggattatactacgtgg

SEQ ID NO: 26922 - DNA, 21 bp, synthetic construct
  source 1..21: mol_type = other DNA
tatagtaggcttcagagcgat

SEQ ID NO: 26923 - DNA, 21 bp, synthetic construct
  source 1..21: mol_type = other DNA
tacttcaccggccagcaagcc

SEQ ID NO: 26924 - DNA, 21 bp, synthetic construct
  source 1..21: mol_type = other DNA
cgtatggaagacagaaaatgg

SEQ ID NO: 26925 - DNA, 21 bp, synthetic construct
  source 1..21: mol_type = other DNA
tattcgcgtttaggacaaaac

SEQ ID NO: 26926 - DNA, 21 bp, synthetic construct
  source 1..21: mol_type = other DNA
taccataagtcacaatcaaat

SEQ ID NO: 26927 - DNA, 21 bp, synthetic construct
  source 1..21: mol_type = other DNA
tacttctccggtgtttcggaa

SEQ ID NO: 26928 - DNA, 21 bp, synthetic construct
  source 1..21: mol_type = other DNA
tcaacctacgacagttatcca

SEQ ID NO: 26929 - DNA, 21 bp, synthetic construct
  source 1..21: mol_type = other DNA
aacgatggcatttcgaagtgg

SEQ ID NO: 26930 - DNA, 21 bp, synthetic construct
  source 1..21: mol_type = other DNA
tacagtcgtgctggacccaac

SEQ ID NO: 26931 - DNA, 21 bp, synthetic construct
  source 1..21: mol_type = other DNA
tacttttctggcaaaccaaac

SEQ ID NO: 26932 - DNA, 21 bp, synthetic construct
  source 1..21: mol_type = other DNA
tactctcgaatccagcttaat

SEQ ID NO: 26933 - DNA, 21 bp, synthetic construct
  source 1..21: mol_type = other DNA
taccataaacacggcccccaa

SEQ ID NO: 26934 - DNA, 21 bp, synthetic construct
  source 1..21: mol_type = other DNA
agattgcaggatgttacgtgg

SEQ ID NO: 26935 - DNA, 21 bp, synthetic construct
  source 1..21: mol_type = other DNA
tacgttaaaagtgacggcagt

SEQ ID NO: 26936 - DNA, 21 bp, synthetic construct
  source 1..21: mol_type = other DNA
tatctaaagagtcaacactac

SEQ ID NO: 26937 - DNA, 21 bp, synthetic construct
  source 1..21: mol_type = other DNA
ttcgcacgaactggagcaaac

SEQ ID NO: 26938 - DNA, 21 bp, synthetic construct
  source 1..21: mol_type = other DNA
ttcttcacggggacgtacgac

SEQ ID NO: 26939 - DNA, 21 bp, synthetic construct
  source 1..21: mol_type = other DNA
agaacttacgatgcgtatcct

SEQ ID NO: 26940 - DNA, 21 bp, synthetic construct
  source 1..21: mol_type = other DNA
tatttcaccgggatgaccgat

SEQ ID NO: 26941 - DNA, 21 bp, synthetic construct
  source 1..21: mol_type = other DNA
tcgttctcaactaatggggta

SEQ ID NO: 26942 - DNA, 21 bp, synthetic construct
  source 1..21: mol_type = other DNA
ttcgcgaggaccgggtataat

SEQ ID NO: 26943 - DNA, 21 bp, synthetic construct
  source 1..21: mol_type = other DNA
tacttcagcggagttatgcaa

SEQ ID NO: 26944 - DNA, 21 bp, synthetic construct
  source 1..21: mol_type = other DNA
tgcaaaccaggtatgggacca

SEQ ID NO: 26945 - DNA, 21 bp, synthetic construct
  source 1..21: mol_type = other DNA
agggatggggcctccacgtgg

SEQ ID NO: 26946 - DNA, 21 bp, synthetic construct
  source 1..21: mol_type = other DNA
tcggatagcaccaatggcatt

SEQ ID NO: 26947 - DNA, 21 bp, synthetic construct
  source 1..21: mol_type = other DNA
tatgtgcgtagcgataataga

SEQ ID NO: 26948 - DNA, 21 bp, synthetic construct
  source 1..21: mol_type = other DNA
tacgcgcgtggcgggttaaac

SEQ ID NO: 26949 - DNA, 21 bp, synthetic construct
  source 1..21: mol_type = other DNA
tacctcaagagtcagacggtg

SEQ ID NO: 26950 - DNA, 21 bp, synthetic construct
  source 1..21: mol_type = other DNA
gatatgtacgtcggaagctgt

SEQ ID NO: 26951 - DNA, 21 bp, synthetic construct
  source 1..21: mol_type = other DNA
aagaacgattacactgtcttt

SEQ ID NO: 26952 - DNA, 21 bp, synthetic construct
  source 1..21: mol_type = other DNA
tacttttcgggcgtcaccagt

SEQ ID NO: 26953 - DNA, 21 bp, synthetic construct
  source 1..21: mol_type = other DNA
tgtaaaatgccaatgcgtgac

SEQ ID NO: 26954 - DNA, 21 bp, synthetic construct
  source 1..21: mol_type = other DNA
tattctcgcaaaaacgaaaat

SEQ ID NO: 26955 - DNA, 21 bp, synthetic construct
  source 1..21: mol_type = other DNA
ccgtatgcgaggtcgccagca

SEQ ID NO: 26956 - DNA, 21 bp, synthetic construct
  source 1..21: mol_type = other DNA
tactcacggatccagatggac

SEQ ID NO: 26957 - DNA, 21 bp, synthetic construct
  source 1..21: mol_type = other DNA
tattttagcggcacgttaagt

SEQ ID NO: 26958 - DNA, 21 bp, synthetic construct
  source 1..21: mol_type = other DNA
ttgagtaaactcggctttaat

SEQ ID NO: 26959 - DNA, 21 bp, synthetic construct
  source 1..21: mol_type = other DNA
aaggatgagttcgtaagcttc

SEQ ID NO: 26960 - DNA, 21 bp, synthetic construct
  source 1..21: mol_type = other DNA
gaatctgactttaaaatttgg

SEQ ID NO: 26961 - DNA, 21 bp, synthetic construct
  source 1..21: mol_type = other DNA
aatatggccagtaccacttgg

SEQ ID NO: 26962 - DNA, 21 bp, synthetic construct
  source 1..21: mol_type = other DNA
ttatggaatggtgaggggcca

SEQ ID NO: 26963 - DNA, 21 bp, synthetic construct
  source 1..21: mol_type = other DNA
ggcagcgagtacttagcctgg

SEQ ID NO: 26964 - DNA, 21 bp, synthetic construct
  source 1..21: mol_type = other DNA
attacaagctcaaacggagtt

SEQ ID NO: 26965 - DNA, 21 bp, synthetic construct
  source 1..21: mol_type = other DNA
cgtgatgattacagcacctat

SEQ ID NO: 26966 - DNA, 21 bp, synthetic construct
  source 1..21: mol_type = other DNA
tatttcaccggccaacgcgac

SEQ ID NO: 26967 - DNA, 21 bp, synthetic construct
  source 1..21: mol_type = other DNA
tactggacgggaatgttggac

SEQ ID NO: 26968 - DNA, 21 bp, synthetic construct
  source 1..21: mol_type = other DNA
aaaaatgacttcgtaacgtat

SEQ ID NO: 26969 - DNA, 21 bp, synthetic construct
  source 1..21: mol_type = other DNA
taccataggttacaggaggat

SEQ ID NO: 26970 - DNA, 21 bp, synthetic construct
  source 1..21: mol_type = other DNA
aacatgagtgatagaggatgg

SEQ ID NO: 26971 - DNA, 21 bp, synthetic construct
  source 1..21: mol_type = other DNA
tacagtcgcctgaatttaatg

SEQ ID NO: 26972 - DNA, 21 bp, synthetic construct
  source 1..21: mol_type = other DNA
tactccagaattgggccgctg

SEQ ID NO: 26973 - DNA, 21 bp, synthetic construct
  source 1..21: mol_type = other DNA
tttgcaaaatctggctacaat

SEQ ID NO: 26974 - DNA, 21 bp, synthetic construct
  source 1..21: mol_type = other DNA
tactcaagaataggcgaggat

SEQ ID NO: 26975 - DNA, 21 bp, synthetic construct
  source 1..21: mol_type = other DNA
agaagtgaattcgtagtgtac

SEQ ID NO: 26976 - DNA, 21 bp, synthetic construct
  source 1..21: mol_type = other DNA
cagaatgattacgtgtcatac

SEQ ID NO: 26977 - DNA, 21 bp, synthetic construct
  source 1..21: mol_type = other DNA
agggaggaaaacgtcaggtgg

SEQ ID NO: 26978 - DNA, 21 bp, synthetic construct
  source 1..21: mol_type = other DNA
tactttacaggccaaatcaat

SEQ ID NO: 26979 - DNA, 21 bp, synthetic construct
  source 1..21: mol_type = other DNA
tacttcacagggacccatagt

SEQ ID NO: 26980 - DNA, 21 bp, synthetic construct
  source 1..21: mol_type = other DNA
tacagtcgcctgtcagaattg

SEQ ID NO: 26981 - DNA, 21 bp, synthetic construct
  source 1..21: mol_type = other DNA
tcagattctacaaatgggatc

SEQ ID NO: 26982 - DNA, 21 bp, synthetic construct
  source 1..21: mol_type = other DNA
cttcacgcaaacggtccaaat

SEQ ID NO: 26983 - DNA, 21 bp, synthetic construct
  source 1..21: mol_type = other DNA
tacttcagtggacagactgcc

SEQ ID NO: 26984 - DNA, 21 bp, synthetic construct
  source 1..21: mol_type = other DNA
tattcgaagcataactacaat

SEQ ID NO: 26985 - DNA, 21 bp, synthetic construct
  source 1..21: mol_type = other DNA
gatccgtctagtcatagctgg

SEQ ID NO: 26986 - DNA, 21 bp, synthetic construct
  source 1..21: mol_type = other DNA
cttgctaaaacgggcatgaac

SEQ ID NO: 26987 - DNA, 21 bp, synthetic construct
  source 1..21: mol_type = other DNA
tgcaaactccagcctccgccg

SEQ ID NO: 26988 - DNA, 21 bp, synthetic construct
  source 1..21: mol_type = other DNA
tatttttcagggatcatgccc

SEQ ID NO: 26989 - DNA, 21 bp, synthetic construct
  source 1..21: mol_type = other DNA
agggacgactattcgacttac

SEQ ID NO: 26990 - DNA, 21 bp, synthetic construct
  source 1..21: mol_type = other DNA
gttttttcgacaaacggccgc

SEQ ID NO: 26991 - DNA, 21 bp, synthetic construct
  source 1..21: mol_type = other DNA
ccatcctcgacaaacggcgtt

SEQ ID NO: 26992 - DNA, 21 bp, synthetic construct
  source 1..21: mol_type = other DNA
aggttagaggatagggcttgg

SEQ ID NO: 26993 - DNA, 21 bp, synthetic construct
  source 1..21: mol_type = other DNA
tgtttcgatgggcgtagtgcc

SEQ ID NO: 26994 - DNA, 21 bp, synthetic construct
  source 1..21: mol_type = other DNA
taccccagtggcgggcccggg

SEQ ID NO: 26995 - DNA, 21 bp, synthetic construct
  source 1..21: mol_type = other DNA
cgcgacgaattcaccaggtgg

SEQ ID NO: 26996 - DNA, 21 bp, synthetic construct
  source 1..21: mol_type = other DNA
atcatgtcaagccatgggtgg

SEQ ID NO: 26997 - DNA, 21 bp, synthetic construct
  source 1..21: mol_type = other DNA
tcagatggagtatcgttgtgg

SEQ ID NO: 26998 - DNA, 21 bp, synthetic construct
  source 1..21: mol_type = other DNA
tatgtacggtctcaaactttg

SEQ ID NO: 26999 - DNA, 21 bp, synthetic construct
  source 1..21: mol_type = other DNA
atgagtgagttcgtatcattt

SEQ ID NO: 27000 - DNA, 21 bp, synthetic construct
  source 1..21: mol_type = other DNA
aaagaagattcccgcacctgg

SEQ ID NO: 27001 - DNA, 21 bp, synthetic construct
  source 1..21: mol_type = other DNA
tatagcagactcggtgaggat

SEQ ID NO: 27002 - DNA, 21 bp, synthetic construct
  source 1..21: mol_type = other DNA
cgtatggccgatcgtgactgg

SEQ ID NO: 27003 - DNA, 21 bp, synthetic construct
  source 1..21: mol_type = other DNA
atagcagaccatttgcggtgg

SEQ ID NO: 27004 - DNA, 21 bp, synthetic construct
  source 1..21: mol_type = other DNA
tgcgccccatatgtacatgaa

SEQ ID NO: 27005 - DNA, 21 bp, synthetic construct
  source 1..21: mol_type = other DNA
ccatatgctaggagcccaatg

SEQ ID NO: 27006 - DNA, 21 bp, synthetic construct
  source 1..21: mol_type = other DNA
ttcactcgtctttcaatcaat

SEQ ID NO: 27007 - DNA, 21 bp, synthetic construct
  source 1..21: mol_type = other DNA
ctacataaactccaggtgtat

SEQ ID NO: 27008 - DNA, 21 bp, synthetic construct
  source 1..21: mol_type = other DNA
cctcagtctactaacggcgtt

SEQ ID NO: 27009 - DNA, 21 bp, synthetic construct
  source 1..21: mol_type = other DNA
tactctcgcgcaggagacaac

SEQ ID NO: 27010 - DNA, 21 bp, synthetic construct
  source 1..21: mol_type = other DNA
gtcagcgagttccaatcttac

SEQ ID NO: 27011 - DNA, 21 bp, synthetic construct
  source 1..21: mol_type = other DNA
tacagccgcatttctcccaat

SEQ ID NO: 27012 - DNA, 21 bp, synthetic construct
  source 1..21: mol_type = other DNA
attacaagcagcaacggaatt

SEQ ID NO: 27013 - DNA, 21 bp, synthetic construct
  source 1..21: mol_type = other DNA
agaagtgagttcgccgtctat

SEQ ID NO: 27014 - DNA, 21 bp, synthetic construct
  source 1..21: mol_type = other DNA
tattggaccggaaaggtggaa

SEQ ID NO: 27015 - DNA, 21 bp, synthetic construct
  source 1..21: mol_type = other DNA
tacttcacgggagttacgggt

SEQ ID NO: 27016 - DNA, 21 bp, synthetic construct
  source 1..21: mol_type = other DNA
tgcgaaaagctcagtagcaga

SEQ ID NO: 27017 - DNA, 21 bp, synthetic construct
  source 1..21: mol_type = other DNA
tattttagtggacgtctcctt

SEQ ID NO: 27018 - DNA, 21 bp, synthetic construct
  source 1..21: mol_type = other DNA
aaggatgagtatctaacgttt

SEQ ID NO: 27019 - DNA, 21 bp, synthetic construct
  source 1..21: mol_type = other DNA
tactggacaggcaccgtagcg

SEQ ID NO: 27020 - DNA, 21 bp, synthetic construct
  source 1..21: mol_type = other DNA
tattcgcgtttacagccactc

SEQ ID NO: 27021 - DNA, 21 bp, synthetic construct
  source 1..21: mol_type = other DNA
ctacataaattcgcggagaac

SEQ ID NO: 27022 - DNA, 21 bp, synthetic construct
  source 1..21: mol_type = other DNA
tactggtccggtgtaacggat

SEQ ID NO: 27023 - DNA, 21 bp, synthetic construct
  source 1..21: mol_type = other DNA
tatttcagtggaacacgcgag

SEQ ID NO: 27024 - DNA, 21 bp, synthetic construct
  source 1..21: mol_type = other DNA
tattttagcgggaccaccgac

SEQ ID NO: 27025 - DNA, 21 bp, synthetic construct
  source 1..21: mol_type = other DNA
tatttcgagggacgtgtggac

SEQ ID NO: 27026 - DNA, 21 bp, synthetic construct
  source 1..21: mol_type = other DNA
cgactggaagaccgcgcatgg

SEQ ID NO: 27027 - DNA, 21 bp, synthetic construct
  source 1..21: mol_type = other DNA
ttagcgcggactggcagagat

SEQ ID NO: 27028 - DNA, 21 bp, synthetic construct
  source 1..21: mol_type = other DNA
cgtggcgacagtccgaagtgg

SEQ ID NO: 27029 - DNA, 21 bp, synthetic construct
  source 1..21: mol_type = other DNA
atattagactcccgcaaatgg

SEQ ID NO: 27030 - DNA, 21 bp, synthetic construct
  source 1..21: mol_type = other DNA
tttagtcgattaaatatgaac

SEQ ID NO: 27031 - DNA, 21 bp, synthetic construct
  source 1..21: mol_type = other DNA
agggagtcggaggtgcgatgg

SEQ ID NO: 27032 - DNA, 21 bp, synthetic construct
  source 1..21: mol_type = other DNA
attgagagcagcaacggggtt

SEQ ID NO: 27033 - DNA, 21 bp, synthetic construct
  source 1..21: mol_type = other DNA
cggaatatgagtgtatatccg

SEQ ID NO: 27034 - DNA, 21 bp, synthetic construct
  source 1..21: mol_type = other DNA
ttctcaagagtaggcgcgaac

SEQ ID NO: 27035 - DNA, 21 bp, synthetic construct
  source 1..21: mol_type = other DNA
ttttccaggatcgggaccaac

SEQ ID NO: 27036 - DNA, 21 bp, synthetic construct
  source 1..21: mol_type = other DNA
tactttaccgggactaataac

SEQ ID NO: 27037 - DNA, 21 bp, synthetic construct
  source 1..21: mol_type = other DNA
tacgagccaggttgcaaggtc

SEQ ID NO: 27038 - DNA, 21 bp, synthetic construct
  source 1..21: mol_type = other DNA
ggatgctccggatttaagacg

SEQ ID NO: 27039 - DNA, 21 bp, synthetic construct
  source 1..21: mol_type = other DNA
tatttccaaggaaggattgaa

SEQ ID NO: 27040 - DNA, 21 bp, synthetic construct
  source 1..21: mol_type = other DNA
tgccgcacaggacaacccgcc

SEQ ID NO: 27041 - DNA, 21 bp, synthetic construct
  source 1..21: mol_type = other DNA
tttttctccggtataatggag

SEQ ID NO: 27042 - DNA, 21 bp, synthetic construct
  source 1..21: mol_type = other DNA
ttcgcaaaaaatggacctaac

SEQ ID NO: 27043 - DNA, 21 bp, synthetic construct
  source 1..21: mol_type = other DNA
gatctacggtcgaagacgtgg

SEQ ID NO: 27044 - DNA, 21 bp, synthetic construct
  source 1..21: mol_type = other DNA
tactttcatggaaagctggac

SEQ ID NO: 27045 - DNA, 21 bp, synthetic construct
  source 1..21: mol_type = other DNA
aatatgtctagcaggggatgg

SEQ ID NO: 27046 - DNA, 21 bp, synthetic construct
  source 1..21: mol_type = other DNA
tacttaaaaagccaatcttac

SEQ ID NO: 27047 - DNA, 21 bp, synthetic construct
  source 1..21: mol_type = other DNA
aaggatgattttactggattc

SEQ ID NO: 27048 - DNA, 21 bp, synthetic construct
  source 1..21: mol_type = other DNA
ttaagcaaagtagggagcaat

SEQ ID NO: 27049 - DNA, 21 bp, synthetic construct
  source 1..21: mol_type = other DNA
tttagtcgtgtgggaacgaat

SEQ ID NO: 27050 - DNA, 21 bp, synthetic construct
  source 1..21: mol_type = other DNA
tactttcagggccgcatagag

SEQ ID NO: 27051 - DNA, 21 bp, synthetic construct
  source 1..21: mol_type = other DNA
tattctaggatccaagatgac

SEQ ID NO: 27052 - DNA, 21 bp, synthetic construct
  source 1..21: mol_type = other DNA
aaggacgattatctaagttgg

SEQ ID NO: 27053 - DNA, 21 bp, synthetic construct
  source 1..21: mol_type = other DNA
cgagacgggacttcgcgttgg

SEQ ID NO: 27054 - DNA, 21 bp, synthetic construct
  source 1..21: mol_type = other DNA
atccgaagtactaacgggatt

SEQ ID NO: 27055 - DNA, 21 bp, synthetic construct
  source 1..21: mol_type = other DNA
cgtgatgagtatagtagctac

SEQ ID NO: 27056 - DNA, 21 bp, synthetic construct
  source 1..21: mol_type = other DNA
tacgcgaggagtggagataac

SEQ ID NO: 27057 - DNA, 21 bp, synthetic construct
  source 1..21: mol_type = other DNA
tattttagcggtaccatccag

SEQ ID NO: 27058 - DNA, 21 bp, synthetic construct
  source 1..21: mol_type = other DNA
agaggcgagtttgtgatgttt

SEQ ID NO: 27059 - DNA, 21 bp, synthetic construct
  source 1..21: mol_type = other DNA
tacttctcgggcagatcagaa

SEQ ID NO: 27060 - DNA, 21 bp, synthetic construct
  source 1..21: mol_type = other DNA
agagacggcagtagcgcgtgg

SEQ ID NO: 27061 - DNA, 21 bp, synthetic construct
  source 1..21: mol_type = other DNA
tactggtcgggcgtaaccgat

SEQ ID NO: 27062 - DNA, 21 bp, synthetic construct
  source 1..21: mol_type = other DNA
tatgctaagagcggatggaac

SEQ ID NO: 27063 - DNA, 21 bp, synthetic construct
  source 1..21: mol_type = other DNA
ttgtgggacggaactatggct

SEQ ID NO: 27064 - DNA, 21 bp, synthetic construct
  source 1..21: mol_type = other DNA
tttgaaagtaccaacggtgta

SEQ ID NO: 27065 - DNA, 21 bp, synthetic construct
  source 1..21: mol_type = other DNA
aaggacgacttcgtctcgttt

SEQ ID NO: 27066 - DNA, 21 bp, synthetic construct
  source 1..21: mol_type = other DNA
gtatccgaatttgaaatcttt

SEQ ID NO: 27067 - DNA, 21 bp, synthetic construct
  source 1..21: mol_type = other DNA
gaaaatgattttaaaatcttc

SEQ ID NO: 27068 - DNA, 21 bp, synthetic construct
  source 1..21: mol_type = other DNA
tacctcaaatcacagccttat

SEQ ID NO: 27069 - DNA, 21 bp, synthetic construct
  source 1..21: mol_type = other DNA
agttggtccacaaatggagta

SEQ ID NO: 27070 - DNA, 21 bp, synthetic construct
  source 1..21: mol_type = other DNA
ttgcacagattaaatcctagt

SEQ ID NO: 27071 - DNA, 21 bp, synthetic construct
  source 1..21: mol_type = other DNA
gttgacgaatggttacccttc

SEQ ID NO: 27072 - DNA, 21 bp, synthetic construct
  source 1..21: mol_type = other DNA
ttctcaagcactaatggagta

SEQ ID NO: 27073 - DNA, 21 bp, synthetic construct
  source 1..21: mol_type = other DNA
tactggacaggcactgttgac

SEQ ID NO: 27074 - DNA, 21 bp, synthetic construct
  source 1..21: mol_type = other DNA
ctttgtcgtccttgctcgatg

SEQ ID NO: 27075 - DNA, 21 bp, synthetic construct
  source 1..21: mol_type = other DNA
tatttttcgggcaagcagtca

SEQ ID NO: 27076 - DNA, 21 bp, synthetic construct
  source 1..21: mol_type = other DNA
cgtagcgaatttgcgacatat

SEQ ID NO: 27077 - DNA, 21 bp, synthetic construct
  source 1..21: mol_type = other DNA
ggggtggaaactgtgcgttgg

SEQ ID NO: 27078 - DNA, 21 bp, synthetic construct
  source 1..21: mol_type = other DNA
ctgtgtagaccgttaagtgag

SEQ ID NO: 27079 - DNA, 21 bp, synthetic construct
  source 1..21: mol_type = other DNA
aaagatgaatttaggacgtat

SEQ ID NO: 27080 - DNA, 21 bp, synthetic construct
  source 1..21: mol_type = other DNA
tatagccgcactggaattaac

SEQ ID NO: 27081 - DNA, 21 bp, synthetic construct
  source 1..21: mol_type = other DNA
tatttccacggcaagcaagaa

SEQ ID NO: 27082 - DNA, 21 bp, synthetic construct
  source 1..21: mol_type = other DNA
ctcgcgaagacagcgtgcaat

SEQ ID NO: 27083 - DNA, 21 bp, synthetic construct
  source 1..21: mol_type = other DNA
atcatgtcaaccaacggggta

SEQ ID NO: 27084 - DNA, 21 bp, synthetic construct
  source 1..21: mol_type = other DNA
tattttcatggcgtagccgcc

SEQ ID NO: 27085 - DNA, 21 bp, synthetic construct
  source 1..21: mol_type = other DNA
agatcagaattccatagcttc

SEQ ID NO: 27086 - DNA, 21 bp, synthetic construct
  source 1..21: mol_type = other DNA
tatcaccgcttgtcggccgac

SEQ ID NO: 27087 - DNA, 21 bp, synthetic construct
  source 1..21: mol_type = other DNA
cataactccacaaatggcgta

SEQ ID NO: 27088 - DNA, 21 bp, synthetic construct
  source 1..21: mol_type = other DNA
tatttcactggtaaacctgaa

SEQ ID NO: 27089 - DNA, 21 bp, synthetic construct
  source 1..21: mol_type = other DNA
tacttttcaggaacagtaatg

SEQ ID NO: 27090 - DNA, 21 bp, synthetic construct
  source 1..21: mol_type = other DNA
tatgcacggacaggggcaaat

SEQ ID NO: 27091 - DNA, 21 bp, synthetic construct
  source 1..21: mol_type = other DNA
aaagactcattcaccgcctgg

SEQ ID NO: 27092 - DNA, 21 bp, synthetic construct
  source 1..21: mol_type = other DNA
ttcttctctggcgtaagggag

SEQ ID NO: 27093 - DNA, 21 bp, synthetic construct
  source 1..21: mol_type = other DNA
aaagatgattgggtcaagtac

SEQ ID NO: 27094 - DNA, 21 bp, synthetic construct
  source 1..21: mol_type = other DNA
tattttagtggaaaaattacc

SEQ ID NO: 27095 - DNA, 21 bp, synthetic construct
  source 1..21: mol_type = other DNA
gagccggagtccaggaagtgg

SEQ ID NO: 27096 - DNA, 21 bp, synthetic construct
  source 1..21: mol_type = other DNA
tattcgaggatcaatgacaat

SEQ ID NO: 27097 - DNA, 21 bp, synthetic construct
  source 1..21: mol_type = other DNA
tatttttccggacaaaacgag

SEQ ID NO: 27098 - DNA, 21 bp, synthetic construct
  source 1..21: mol_type = other DNA
tattcatcgataggccccaac

SEQ ID NO: 27099 - DNA, 21 bp, synthetic construct
  source 1..21: mol_type = other DNA
acagacggctacagcagttgg

SEQ ID NO: 27100 - DNA, 21 bp, synthetic construct
  source 1..21: mol_type = other DNA
tgcaataaacccactactgcg

SEQ ID NO: 27101 - DNA, 21 bp, synthetic construct
  source 1..21: mol_type = other DNA
ccgtgcgggaagcctcctcct

SEQ ID NO: 27102 - DNA, 21 bp, synthetic construct
  source 1..21: mol_type = other DNA
tatgcaaaagggaattttaat

SEQ ID NO: 27103 - DNA, 21 bp, synthetic construct
  source 1..21: mol_type = other DNA
ctgtctcgcatgaattataac

SEQ ID NO: 27104 - DNA, 21 bp, synthetic construct
  source 1..21: mol_type = other DNA
tatttcagcggtatattggga

SEQ ID NO: 27105 - DNA, 21 bp, synthetic construct
  source 1..21: mol_type = other DNA
cagatggcggctcacgattgg

SEQ ID NO: 27106 - DNA, 21 bp, synthetic construct
  source 1..21: mol_type = other DNA
ggaggtgaatttagcaaatgg

SEQ ID NO: 27107 - DNA, 21 bp, synthetic construct
  source 1..21: mol_type = other DNA
ggaggaccaggagtaagatgg

SEQ ID NO: 27108 - DNA, 21 bp, synthetic construct
  source 1..21: mol_type = other DNA
gatatgacagataggaagtgg

SEQ ID NO: 27109 - DNA, 21 bp, synthetic construct
  source 1..21: mol_type = other DNA
ttctcaagagttgggacaaac

SEQ ID NO: 27110 - DNA, 21 bp, synthetic construct
  source 1..21: mol_type = other DNA
tattttacgggatggccggac

SEQ ID NO: 27111 - DNA, 21 bp, synthetic construct
  source 1..21: mol_type = other DNA
tgtgccccggattaccgtcca

SEQ ID NO: 27112 - DNA, 21 bp, synthetic construct
  source 1..21: mol_type = other DNA
tacgtcagaagccagctcaac

SEQ ID NO: 27113 - DNA, 21 bp, synthetic construct
  source 1..21: mol_type = other DNA
tactatactgggaagatcagt

SEQ ID NO: 27114 - DNA, 21 bp, synthetic construct
  source 1..21: mol_type = other DNA
tactccagacttagtgagaac

SEQ ID NO: 27115 - DNA, 21 bp, synthetic construct
  source 1..21: mol_type = other DNA
tacgtacgttcccaacctggc

SEQ ID NO: 27116 - DNA, 21 bp, synthetic construct
  source 1..21: mol_type = other DNA
tacagcaagcacaacaataat

SEQ ID NO: 27117 - DNA, 21 bp, synthetic construct
  source 1..21: mol_type = other DNA
aaggaagactacaccacatgg

SEQ ID NO: 27118 - DNA, 21 bp, synthetic construct
  source 1..21: mol_type = other DNA
tgtaaacccccgagtgactac

SEQ ID NO: 27119 - DNA, 21 bp, synthetic construct
  source 1..21: mol_type = other DNA
tacttcgctggggtaaaagag

SEQ ID NO: 27120 - DNA, 21 bp, synthetic construct
  source 1..21: mol_type = other DNA
tacagcaagggaaactataat

SEQ ID NO: 27121 - DNA, 21 bp, synthetic construct
  source 1..21: mol_type = other DNA
tatagtagggtgggccagaac

SEQ ID NO: 27122 - DNA, 21 bp, synthetic construct
  source 1..21: mol_type = other DNA
tatgcacgcacgtcgccgtta

SEQ ID NO: 27123 - DNA, 21 bp, synthetic construct
  source 1..21: mol_type = other DNA
gacttacgagataggacttgg

SEQ ID NO: 27124 - DNA, 21 bp, synthetic construct
  source 1..21: mol_type = other DNA
cgagacggaaatagtgcctgg

SEQ ID NO: 27125 - DNA, 21 bp, synthetic construct
  source 1..21: mol_type = other DNA
tattcgaagctggacagcaga

SEQ ID NO: 27126 - DNA, 21 bp, synthetic construct
  source 1..21: mol_type = other DNA
tattccaagcatggcctgaac

SEQ ID NO: 27127 - DNA, 21 bp, synthetic construct
  source 1..21: mol_type = other DNA
tatttttcagggcaaatcatg

SEQ ID NO: 27128 - DNA, 21 bp, synthetic construct
  source 1..21: mol_type = other DNA
tatcacaaaaatgggtataac

SEQ ID NO: 27129 - DNA, 21 bp, synthetic construct
  source 1..21: mol_type = other DNA
cggggcgacgaagtgtatccg

SEQ ID NO: 27130 - DNA, 21 bp, synthetic construct
  source 1..21: mol_type = other DNA
ggtcctgaccacgttcgttgg

SEQ ID NO: 27131 - DNA, 21 bp, synthetic construct
  source 1..21: mol_type = other DNA
cgaacgtttgatgcttacccg

SEQ ID NO: 27132 - DNA, 21 bp, synthetic construct
  source 1..21: mol_type = other DNA
tactccagggccggtcctaat

SEQ ID NO: 27133 - DNA, 21 bp, synthetic construct
  source 1..21: mol_type = other DNA
ggggacgaatatcacagctgg

SEQ ID NO: 27134 - DNA, 21 bp, synthetic construct
  source 1..21: mol_type = other DNA
cataatagtacgaatggccgc

SEQ ID NO: 27135 - DNA, 21 bp, synthetic construct
  source 1..21: mol_type = other DNA
ttctttaccggaaaaatcgag

SEQ ID NO: 27136 - DNA, 21 bp, synthetic construct
  source 1..21: mol_type = other DNA
ggggacggttcgagtcgatgg

SEQ ID NO: 27137 - DNA, 21 bp, synthetic construct
  source 1..21: mol_type = other DNA
tactttaccggttaccctgac

SEQ ID NO: 27138 - DNA, 21 bp, synthetic construct
  source 1..21: mol_type = other DNA
tactctagaataggggagaat

SEQ ID NO: 27139 - DNA, 21 bp, synthetic construct
  source 1..21: mol_type = other DNA
cgaaagagcgacgtgtaccct

SEQ ID NO: 27140 - DNA, 21 bp, synthetic construct
  source 1..21: mol_type = other DNA
tactcccggttgcagccaacc

SEQ ID NO: 27141 - DNA, 21 bp, synthetic construct
  source 1..21: mol_type = other DNA
ggaagtccgggggtacactgg

SEQ ID NO: 27142 - DNA, 21 bp, synthetic construct
  source 1..21: mol_type = other DNA
gtaatggaggacagaatctgg

SEQ ID NO: 27143 - DNA, 21 bp, synthetic construct
  source 1..21: mol_type = other DNA
gaccttcaaagcattaagtgg

SEQ ID NO: 27144 - DNA, 21 bp, synthetic construct
  source 1..21: mol_type = other DNA
cttaaagatggtactagtgca

SEQ ID NO: 27145 - DNA, 21 bp, synthetic construct
  source 1..21: mol_type = other DNA
tattttacagggaaggtggga

SEQ ID NO: 27146 - DNA, 21 bp, synthetic construct
  source 1..21: mol_type = other DNA
tacagcaaacatggtatgaac

SEQ ID NO: 27147 - DNA, 21 bp, synthetic construct
  source 1..21: mol_type = other DNA
ggtggagagtatagtaaatgg

SEQ ID NO: 27148 - DNA, 21 bp, synthetic construct
  source 1..21: mol_type = other DNA
tatagtagaatcggtccaggg

SEQ ID NO: 27149 - DNA, 21 bp, synthetic construct
  source 1..21: mol_type = other DNA
tattttacaggtcaaatggat

SEQ ID NO: 27150 - DNA, 21 bp, synthetic construct
  source 1..21: mol_type = other DNA
tatgctcgtacgggcttgaat

SEQ ID NO: 27151 - DNA, 21 bp, synthetic construct
  source 1..21: mol_type = other DNA
tgggtgaaaagctctcctgga

SEQ ID NO: 27152 - DNA, 21 bp, synthetic construct
  source 1..21: mol_type = other DNA
attatttcgactaatgggcgc

SEQ ID NO: 27153 - DNA, 21 bp, synthetic construct
  source 1..21: mol_type = other DNA
gtcaactcgagcaatggacgg

SEQ ID NO: 27154 - DNA, 21 bp, synthetic construct
  source 1..21: mol_type = other DNA
tacagctcaatcggtccgaac

SEQ ID NO: 27155 - DNA, 21 bp, synthetic construct
  source 1..21: mol_type = other DNA
tacttctctgggcaaactgat

SEQ ID NO: 27156 - DNA, 21 bp, synthetic construct
  source 1..21: mol_type = other DNA
cgtcttgaggataggagttgg

SEQ ID NO: 27157 - DNA, 21 bp, synthetic construct
  source 1..21: mol_type = other DNA
atgtgggacggaactatggca

SEQ ID NO: 27158 - DNA, 21 bp, synthetic construct
  source 1..21: mol_type = other DNA
tactacacggggattgtctcg

SEQ ID NO: 27159 - DNA, 21 bp, synthetic construct
  source 1..21: mol_type = other DNA
tatagcaagataggacgagat

SEQ ID NO: 27160 - DNA, 21 bp, synthetic construct
  source 1..21: mol_type = other DNA
tattttgcgggtaaacatgag

SEQ ID NO: 27161 - DNA, 21 bp, synthetic construct
  source 1..21: mol_type = other DNA
tatttttcgggacaattggca

SEQ ID NO: 27162 - DNA, 21 bp, synthetic construct
  source 1..21: mol_type = other DNA
tacttcagtggaacgagagac

SEQ ID NO: 27163 - DNA, 21 bp, synthetic construct
  source 1..21: mol_type = other DNA
tactttcacgggcaagtagct

SEQ ID NO: 27164 - DNA, 21 bp, synthetic construct
  source 1..21: mol_type = other DNA
tactcccggcttgggctgaat

SEQ ID NO: 27165 - DNA, 21 bp, synthetic construct
  source 1..21: mol_type = other DNA
atcatggcttcgcagagctgg

SEQ ID NO: 27166 - DNA, 21 bp, synthetic construct
  source 1..21: mol_type = other DNA
atgtgggacgggactatagcg

SEQ ID NO: 27167 - DNA, 21 bp, synthetic construct
  source 1..21: mol_type = other DNA
tacgcccgaatgggccccgat

SEQ ID NO: 27168 - DNA, 21 bp, synthetic construct
  source 1..21: mol_type = other DNA
tcaatggaatcgcgactttgg

SEQ ID NO: 27169 - DNA, 21 bp, synthetic construct
  source 1..21: mol_type = other DNA
tacttctcgggcacatacgac

SEQ ID NO: 27170 - DNA, 21 bp, synthetic construct
  source 1..21: mol_type = other DNA
tactctaaatcaggggttaat

SEQ ID NO: 27171 - DNA, 21 bp, synthetic construct
  source 1..21: mol_type = other DNA
ggcggcgctacgagtcactgg

SEQ ID NO: 27172 - DNA, 21 bp, synthetic construct
  source 1..21: mol_type = other DNA
cgtccggacacagtacgctgg

SEQ ID NO: 27173 - DNA, 21 bp, synthetic construct
  source 1..21: mol_type = other DNA
tatgtacggtcagattcttta

SEQ ID NO: 27174 - DNA, 21 bp, synthetic construct
  source 1..21: mol_type = other DNA
ttcttctcaggccaggtcgac

SEQ ID NO: 27175 - DNA, 21 bp, synthetic construct
  source 1..21: mol_type = other DNA
ggtagtgagttcaaggtgttc

SEQ ID NO: 27176 - DNA, 21 bp, synthetic construct
  source 1..21: mol_type = other DNA
tatgtacgtagccaaacgtca

SEQ ID NO: 27177 - DNA, 21 bp, synthetic construct
  source 1..21: mol_type = other DNA
ggctgtaggcatggtaccatc

SEQ ID NO: 27178 - DNA, 21 bp, synthetic construct
  source 1..21: mol_type = other DNA
ggtagcgaattcatgagctat

SEQ ID NO: 27179 - DNA, 21 bp, synthetic construct
  source 1..21: mol_type = other DNA
gacctccgtgcagcgaactgg

SEQ ID NO: 27180 - DNA, 21 bp, synthetic construct
  source 1..21: mol_type = other DNA
ttctcgaggctgggaatgaac

SEQ ID NO: 27181 - DNA, 21 bp, synthetic construct
  source 1..21: mol_type = other DNA
tacgcgaagaacggatggaac

SEQ ID NO: 27182 - DNA, 21 bp, synthetic construct
  source 1..21: mol_type = other DNA
attgacggccgcggttgggac

SEQ ID NO: 27183 - DNA, 21 bp, synthetic construct
  source 1..21: mol_type = other DNA
tactggtcaggcatccatgag

SEQ ID NO: 27184 - DNA, 21 bp, synthetic construct
  source 1..21: mol_type = other DNA
cattcacgattaaacgtgtcg

SEQ ID NO: 27185 - DNA, 21 bp, synthetic construct
  source 1..21: mol_type = other DNA
tacgcgaggctcggtcataac

SEQ ID NO: 27186 - DNA, 21 bp, synthetic construct
  source 1..21: mol_type = other DNA
aggtctgaattcctaccttac

SEQ ID NO: 27187 - DNA, 21 bp, synthetic construct
  source 1..21: mol_type = other DNA
gtcgcgagctccaatggggtc

SEQ ID NO: 27188 - DNA, 21 bp, synthetic construct
  source 1..21: mol_type = other DNA
cacagtaggttaaatgtggta

SEQ ID NO: 27189 - DNA, 21 bp, synthetic construct
  source 1..21: mol_type = other DNA
cgcgagtcgacaaatggtatt

SEQ ID NO: 27190 - DNA, 21 bp, synthetic construct
  source 1..21: mol_type = other DNA
tatgttaggagtgacacggct

SEQ ID NO: 27191 - DNA, 21 bp, synthetic construct
  source 1..21: mol_type = other DNA
tatttcgctggcatcattgga

SEQ ID NO: 27192 - DNA, 21 bp, synthetic construct
  source 1..21: mol_type = other DNA
tacttcaccgggagagccgac

SEQ ID NO: 27193 - DNA, 21 bp, synthetic construct
  source 1..21: mol_type = other DNA
tactcccgagtcgggcaaaat

SEQ ID NO: 27194 - DNA, 21 bp, synthetic construct
  source 1..21: mol_type = other DNA
tatcatagactgagtgagaat

SEQ ID NO: 27195 - DNA, 21 bp, synthetic construct
  source 1..21: mol_type = other DNA
tactggacagggaaagttgag

SEQ ID NO: 27196 - DNA, 21 bp, synthetic construct
  source 1..21: mol_type = other DNA
tatagccgattatccttcgac

SEQ ID NO: 27197 - DNA, 21 bp, synthetic construct
  source 1..21: mol_type = other DNA
tggtggaccgggattgccgat

SEQ ID NO: 27198 - DNA, 21 bp, synthetic construct
  source 1..21: mol_type = other DNA
aggaacgagttcacatcgtgg

SEQ ID NO: 27199 - DNA, 21 bp, synthetic construct
  source 1..21: mol_type = other DNA
tatttcacgggtcggactgac

SEQ ID NO: 27200 - DNA, 21 bp, synthetic construct
  source 1..21: mol_type = other DNA
ctttcgagggtatctcctgat

SEQ ID NO: 27201 - DNA, 21 bp, synthetic construct
  source 1..21: mol_type = other DNA
tactttgctggggtgaagggg

SEQ ID NO: 27202 - DNA, 21 bp, synthetic construct
  source 1..21: mol_type = other DNA
agggaagattttagtacgtgg

SEQ ID NO: 27203 - DNA, 21 bp, synthetic construct
  source 1..21: mol_type = other DNA
ctgcataagtttgccgaaaat

SEQ ID NO: 27204 - DNA, 21 bp, synthetic construct
  source 1..21: mol_type = other DNA
tttagccgtgtcggttttaat

SEQ ID NO: 27205 - DNA, 21 bp, synthetic construct
  source 1..21: mol_type = other DNA
tgtaaagaaggcgtgcgttgg

SEQ ID NO: 27206 - DNA, 21 bp, synthetic construct
  source 1..21: mol_type = other DNA
tattggagcggagtgacggac

SEQ ID NO: 27207 - DNA, 21 bp, synthetic construct
  source 1..21: mol_type = other DNA
ctcgcacgcagcgcaccagac

SEQ ID NO: 27208 - DNA, 21 bp, synthetic construct
  source 1..21: mol_type = other DNA
tattttagtggcaggatggaa

SEQ ID NO: 27209 - DNA, 21 bp, synthetic construct
  source 1..21: mol_type = other DNA
tacttctccggaaccgtcagt

SEQ ID NO: 27210 - DNA, 21 bp, synthetic construct
  source 1..21: mol_type = other DNA
tattcaaaaaccgggtggaac

SEQ ID NO: 27211 - DNA, 21 bp, synthetic construct
  source 1..21: mol_type = other DNA
tatcaccgtctttcgcaagac

SEQ ID NO: 27212 - DNA, 21 bp, synthetic construct
  source 1..21: mol_type = other DNA
tatagccgagtagcacctgac

SEQ ID NO: 27213 - DNA, 21 bp, synthetic construct
  source 1..21: mol_type = other DNA
cttgcaagattaggacctgac

SEQ ID NO: 27214 - DNA, 21 bp, synthetic construct
  source 1..21: mol_type = other DNA
actatcagcacaaacgggata

SEQ ID NO: 27215 - DNA, 21 bp, synthetic construct
  source 1..21: mol_type = other DNA
tcggcgtctacgaacggcgtc

SEQ ID NO: 27216 - DNA, 21 bp, synthetic construct
  source 1..21: mol_type = other DNA
ctacacagactgaatcctgat

SEQ ID NO: 27217 - DNA, 21 bp, synthetic construct
  source 1..21: mol_type = other DNA
agggagagtactaacggcgtg

SEQ ID NO: 27218 - DNA, 21 bp, synthetic construct
  source 1..21: mol_type = other DNA
tactatagcggtattgtggct

SEQ ID NO: 27219 - DNA, 21 bp, synthetic construct
  source 1..21: mol_type = other DNA
tggtggtccggggtggcagag

SEQ ID NO: 27220 - DNA, 21 bp, synthetic construct
  source 1..21: mol_type = other DNA
ctccatcgcttgagcacacat

SEQ ID NO: 27221 - DNA, 21 bp, synthetic construct
  source 1..21: mol_type = other DNA
gtgagcgagtttctttcgttt

SEQ ID NO: 27222 - DNA, 21 bp, synthetic construct
  source 1..21: mol_type = other DNA
gatgctttagagtggagggat

SEQ ID NO: 27223 - DNA, 21 bp, synthetic construct
  source 1..21: mol_type = other DNA
agatcggagttcgccacgtac

SEQ ID NO: 27224 - DNA, 21 bp, synthetic construct
  source 1..21: mol_type = other DNA
taccatgcacggggactgaac

SEQ ID NO: 27225 - DNA, 21 bp, synthetic construct
  source 1..21: mol_type = other DNA
cgcgagcccggagttaggtgg

SEQ ID NO: 27226 - DNA, 21 bp, synthetic construct
  source 1..21: mol_type = other DNA
tacgttcgtagtgacagtcgc

SEQ ID NO: 27227 - DNA, 21 bp, synthetic construct
  source 1..21: mol_type = other DNA
tttagtgtttacactggatca

SEQ ID NO: 27228 - DNA, 21 bp, synthetic construct
  source 1..21: mol_type = other DNA
tacagcagaattggagacaac

SEQ ID NO: 27229 - DNA, 21 bp, synthetic construct
  source 1..21: mol_type = other DNA
tatagcaagcaagggtgtaat

SEQ ID NO: 27230 - DNA, 21 bp, synthetic construct
  source 1..21: mol_type = other DNA
tactctaaaatgggatcaaat

SEQ ID NO: 27231 - DNA, 21 bp, synthetic construct
  source 1..21: mol_type = other DNA
tacgtgcgcagcgacacgcac

SEQ ID NO: 27232 - DNA, 21 bp, synthetic construct
  source 1..21: mol_type = other DNA
ttatgtaaaccttgttttacg

SEQ ID NO: 27233 - DNA, 21 bp, synthetic construct
  source 1..21: mol_type = other DNA
gttgcccctaagtgtgctgaa

SEQ ID NO: 27234 - DNA, 21 bp, synthetic construct
  source 1..21: mol_type = other DNA
ggggatgagtatcattcgtgg

SEQ ID NO: 27235 - DNA, 21 bp, synthetic construct
  source 1..21: mol_type = other DNA
tattggtcaggcacgatcgca

SEQ ID NO: 27236 - DNA, 21 bp, synthetic construct
  source 1..21: mol_type = other DNA
tactggacaggtgtttccgac

SEQ ID NO: 27237 - DNA, 21 bp, synthetic construct
  source 1..21: mol_type = other DNA
tatgcccgcactgggaccaat

SEQ ID NO: 27238 - DNA, 21 bp, synthetic construct
  source 1..21: mol_type = other DNA
ccttacgcaagatcggtagaa

SEQ ID NO: 27239 - DNA, 21 bp, synthetic construct
  source 1..21: mol_type = other DNA
agggacgacttcagcttatgg

SEQ ID NO: 27240 - DNA, 21 bp, synthetic construct
  source 1..21: mol_type = other DNA
agtaattcaactaatggcgtc

SEQ ID NO: 27241 - DNA, 21 bp, synthetic construct
  source 1..21: mol_type = other DNA
atgtcccgcataggtgtcaac

SEQ ID NO: 27242 - DNA, 21 bp, synthetic construct
  source 1..21: mol_type = other DNA
tacagtaagtcgaactgcaac

SEQ ID NO: 27243 - DNA, 21 bp, synthetic construct
  source 1..21: mol_type = other DNA
tactggtcgggcactatagat

SEQ ID NO: 27244 - DNA, 21 bp, synthetic construct
  source 1..21: mol_type = other DNA
tttgaatctacgaatggcaga

SEQ ID NO: 27245 - DNA, 21 bp, synthetic construct
  source 1..21: mol_type = other DNA
tacagtagacttaattatgac

SEQ ID NO: 27246 - DNA, 21 bp, synthetic construct
  source 1..21: mol_type = other DNA
ctgcatagggcttctagtaat

SEQ ID NO: 27247 - DNA, 21 bp, synthetic construct
  source 1..21: mol_type = other DNA
aacatgtctgccggcacgtgg

SEQ ID NO: 27248 - DNA, 21 bp, synthetic construct
  source 1..21: mol_type = other DNA
ttatcaaaaatgaactataat

SEQ ID NO: 27249 - DNA, 21 bp, synthetic construct
  source 1..21: mol_type = other DNA
tacgtccgaagccagactgat

SEQ ID NO: 27250 - DNA, 21 bp, synthetic construct
  source 1..21: mol_type = other DNA
tacgccaaacaaggatggaac

SEQ ID NO: 27251 - DNA, 21 bp, synthetic construct
  source 1..21: mol_type = other DNA
cgagacggaaactcatcatgg

SEQ ID NO: 27252 - DNA, 21 bp, synthetic construct
  source 1..21: mol_type = other DNA
ttagctaaaaacggattcaat

SEQ ID NO: 27253 - DNA, 21 bp, synthetic construct
  source 1..21: mol_type = other DNA
gttcctgatttcgttaggtat

SEQ ID NO: 27254 - DNA, 21 bp, synthetic construct
  source 1..21: mol_type = other DNA
tatcacaagtataatgttaac

SEQ ID NO: 27255 - DNA, 21 bp, synthetic construct
  source 1..21: mol_type = other DNA
tatagtagattgcacgccaac

SEQ ID NO: 27256 - DNA, 21 bp, synthetic construct
  source 1..21: mol_type = other DNA
tatttcaccggccgaatggac

SEQ ID NO: 27257 - DNA, 21 bp, synthetic construct
  source 1..21: mol_type = other DNA
tgcatcggtgaatgctgcccg

SEQ ID NO: 27258 - DNA, 21 bp, synthetic construct
  source 1..21: mol_type = other DNA
cacgatggagtgtcaaagtgg

SEQ ID NO: 27259 - DNA, 21 bp, synthetic construct
  source 1..21: mol_type = other DNA
tattttacgggtaagattggt

SEQ ID NO: 27260 - DNA, 21 bp, synthetic construct
  source 1..21: mol_type = other DNA
tggcccaacggcgtaaacgga

SEQ ID NO: 27261 - DNA, 21 bp, synthetic construct
  source 1..21: mol_type = other DNA
tattggtcaggagtgagggag

SEQ ID NO: 27262 - DNA, 21 bp, synthetic construct
  source 1..21: mol_type = other DNA
cgcactttcgatgtcttccct

SEQ ID NO: 27263 - DNA, 21 bp, synthetic construct
  source 1..21: mol_type = other DNA
tggccgccgccggtcaacagt

SEQ ID NO: 27264 - DNA, 21 bp, synthetic construct
  source 1..21: mol_type = other DNA
tactttagtggagtgagggta

SEQ ID NO: 27265 - DNA, 21 bp, synthetic construct
  source 1..21: mol_type = other DNA
ggaccaggaacttgtaaatca

SEQ ID NO: 27266 - DNA, 21 bp, synthetic construct
  source 1..21: mol_type = other DNA
tatagcaaacacaattataat

SEQ ID NO: 27267 - DNA, 21 bp, synthetic construct
  source 1..21: mol_type = other DNA
ctctgggatgggacttcgccc

SEQ ID NO: 27268 - DNA, 21 bp, synthetic construct
  source 1..21: mol_type = other DNA
cgggacggaacgagtcactgg

SEQ ID NO: 27269 - DNA, 21 bp, synthetic construct
  source 1..21: mol_type = other DNA
caactttctgacagaacttgg

SEQ ID NO: 27270 - DNA, 21 bp, synthetic construct
  source 1..21: mol_type = other DNA
ttcgactcaacgaatggcgtg

SEQ ID NO: 27271 - DNA, 21 bp, synthetic construct
  source 1..21: mol_type = other DNA
tgcacgagcgcgacgggacac

SEQ ID NO: 27272 - DNA, 21 bp, synthetic construct
  source 1..21: mol_type = other DNA
tgcaaggaaaaatgctgtgaa

SEQ ID NO: 27273 - DNA, 21 bp, synthetic construct
  source 1..21: mol_type = other DNA
ccgagtagcacgaatggggtg

SEQ ID NO: 27274 - DNA, 21 bp, synthetic construct
  source 1..21: mol_type = other DNA
tacttttcgggcacccaagca

SEQ ID NO: 27275 - DNA, 21 bp, synthetic construct
  source 1..21: mol_type = other DNA
tacgtgcgatctgatgttggg

SEQ ID NO: 27276 - DNA, 21 bp, synthetic construct
  source 1..21: mol_type = other DNA
tttccagggagttgcaaagaa

SEQ ID NO: 27277 - DNA, 21 bp, synthetic construct
  source 1..21: mol_type = other DNA
agagatgcggatgtttatcca

SEQ ID NO: 27278 - DNA, 21 bp, synthetic construct
  source 1..21: mol_type = other DNA
ttgagcaagagctcaattaac

SEQ ID NO: 27279 - DNA, 21 bp, synthetic construct
  source 1..21: mol_type = other DNA
cgcggcagcgatgtatttccg

SEQ ID NO: 27280 - DNA, 21 bp, synthetic construct
  source 1..21: mol_type = other DNA
ttgtgtagaccatgccgcgaa

SEQ ID NO: 27281 - DNA, 21 bp, synthetic construct
  source 1..21: mol_type = other DNA
cttgcgcgcaacggctggaac

SEQ ID NO: 27282 - DNA, 21 bp, synthetic construct
  source 1..21: mol_type = other DNA
tattccagagttggacagaat

SEQ ID NO: 27283 - DNA, 21 bp, synthetic construct
  source 1..21: mol_type = other DNA
ttttcgaggttaaacgacaat

SEQ ID NO: 27284 - DNA, 21 bp, synthetic construct
  source 1..21: mol_type = other DNA
agagaggagtacacgagctgg

SEQ ID NO: 27285 - DNA, 21 bp, synthetic construct
  source 1..21: mol_type = other DNA
tattttactgggcgcttagac

SEQ ID NO: 27286 - DNA, 21 bp, synthetic construct
  source 1..21: mol_type = other DNA
ggtggcgaagggtccagctgg

SEQ ID NO: 27287 - DNA, 21 bp, synthetic construct
  source 1..21: mol_type = other DNA
tgcgcttcaaagactggacat

SEQ ID NO: 27288 - DNA, 21 bp, synthetic construct
  source 1..21: mol_type = other DNA
tacagcaaagggaacctcaat

SEQ ID NO: 27289 - DNA, 21 bp, synthetic construct
  source 1..21: mol_type = other DNA
tgtcgccctaatacgcatccg

SEQ ID NO: 27290 - DNA, 21 bp, synthetic construct
  source 1..21: mol_type = other DNA
tacttcagcggggtgaagatc

SEQ ID NO: 27291 - DNA, 21 bp, synthetic construct
  source 1..21: mol_type = other DNA
tactggagcgggacagtggct

SEQ ID NO: 27292 - DNA, 21 bp, synthetic construct
  source 1..21: mol_type = other DNA
tatgccaaggcagggttcaac

SEQ ID NO: 27293 - DNA, 21 bp, synthetic construct
  source 1..21: mol_type = other DNA
aagtcggactttacatcatat

SEQ ID NO: 27294 - DNA, 21 bp, synthetic construct
  source 1..21: mol_type = other DNA
gtttccacccactgttatgcc

SEQ ID NO: 27295 - DNA, 21 bp, synthetic construct
  source 1..21: mol_type = other DNA
ctgcaccgcctttcaaatggc

SEQ ID NO: 27296 - DNA, 21 bp, synthetic construct
  source 1..21: mol_type = other DNA
tactattcaggagtgttggcg

SEQ ID NO: 27297 - DNA, 21 bp, synthetic construct
  source 1..21: mol_type = other DNA
tactttagcggtatccaatcg

SEQ ID NO: 27298 - DNA, 21 bp, synthetic construct
  source 1..21: mol_type = other DNA
atagcacacagaggatgggat

SEQ ID NO: 27299 - DNA, 21 bp, synthetic construct
  source 1..21: mol_type = other DNA
tatgccaggataggaaacaat

SEQ ID NO: 27300 - DNA, 21 bp, synthetic construct
  source 1..21: mol_type = other DNA
cgggatggtcaatcgagctgg

SEQ ID NO: 27301 - DNA, 21 bp, synthetic construct
  source 1..21: mol_type = other DNA
tacttcactggaaaaccagag

SEQ ID NO: 27302 - DNA, 21 bp, synthetic construct
  source 1..21: mol_type = other DNA
tattcgcgagcgggctttgac

SEQ ID NO: 27303 - DNA, 21 bp, synthetic construct
  source 1..21: mol_type = other DNA
tgcaagtcggagcacgtcagg

SEQ ID NO: 27304 - DNA, 21 bp, synthetic construct
  source 1..21: mol_type = other DNA
tactttaccggatttactgaa

SEQ ID NO: 27305 - DNA, 21 bp, synthetic construct
  source 1..21: mol_type = other DNA
tacgctcgtatcgggctaaat

SEQ ID NO: 27306 - DNA, 21 bp, synthetic construct
  source 1..21: mol_type = other DNA
gacacctacgactcatatcca

SEQ ID NO: 27307 - DNA, 21 bp, synthetic construct
  source 1..21: mol_type = other DNA
aaagttgatcacgtcaggtgg

SEQ ID NO: 27308 - DNA, 21 bp, synthetic construct
  source 1..21: mol_type = other DNA
tttgctcgcactggatacaat

SEQ ID NO: 27309 - DNA, 21 bp, synthetic construct
  source 1..21: mol_type = other DNA
acaatgagtgatcgaacatgg

SEQ ID NO: 27310 - DNA, 21 bp, synthetic construct
  source 1..21: mol_type = other DNA
tcctggagtactaatggggtt

SEQ ID NO: 27311 - DNA, 21 bp, synthetic construct
  source 1..21: mol_type = other DNA
tatttctcaggcatccaaagc

SEQ ID NO: 27312 - DNA, 21 bp, synthetic construct
  source 1..21: mol_type = other DNA
tacttcagtggggtaagggca

SEQ ID NO: 27313 - DNA, 21 bp, synthetic construct
  source 1..21: mol_type = other DNA
tattttaccggccagtgcgag

SEQ ID NO: 27314 - DNA, 21 bp, synthetic construct
  source 1..21: mol_type = other DNA
cggagcgagtttcatggctac

SEQ ID NO: 27315 - DNA, 21 bp, synthetic construct
  source 1..21: mol_type = other DNA
ttactcgaaagttcgaaatgg

SEQ ID NO: 27316 - DNA, 21 bp, synthetic construct
  source 1..21: mol_type = other DNA
tatgcgcgcgtgggtgccaac

SEQ ID NO: 27317 - DNA, 21 bp, synthetic construct
  source 1..21: mol_type = other DNA
ttacatcggcttagcatggga

SEQ ID NO: 27318 - DNA, 21 bp, synthetic construct
  source 1..21: mol_type = other DNA
tatttttcgggacaagtcatg

SEQ ID NO: 27319 - DNA, 21 bp, synthetic construct
  source 1..21: mol_type = other DNA
agagatgaaaccagctattgg

SEQ ID NO: 27320 - DNA, 21 bp, synthetic construct
  source 1..21: mol_type = other DNA
attatgccgagccgtaactgg

SEQ ID NO: 27321 - DNA, 21 bp, synthetic construct
  source 1..21: mol_type = other DNA
tactccaggattagcgacaat

SEQ ID NO: 27322 - DNA, 21 bp, synthetic construct
  source 1..21: mol_type = other DNA
tatagtcgtattaatgacaat

SEQ ID NO: 27323 - DNA, 21 bp, synthetic construct
  source 1..21: mol_type = other DNA
aaggaggattatacgacgtgg

SEQ ID NO: 27324 - DNA, 21 bp, synthetic construct
  source 1..21: mol_type = other DNA
tatcaccgcctcggcgatgat

SEQ ID NO: 27325 - DNA, 21 bp, synthetic construct
  source 1..21: mol_type = other DNA
ctgtgggacggaacgaacgcc

SEQ ID NO: 27326 - DNA, 21 bp, synthetic construct
  source 1..21: mol_type = other DNA
taccatcggttatctgacaat

SEQ ID NO: 27327 - DNA, 21 bp, synthetic construct
  source 1..21: mol_type = other DNA
ttcttttctggtgtcacggct

SEQ ID NO: 27328 - DNA, 21 bp, synthetic construct
  source 1..21: mol_type = other DNA
cgtatggaggctttagactgg

SEQ ID NO: 27329 - DNA, 21 bp, synthetic construct
  source 1..21: mol_type = other DNA
ctctgggatggcaccatggcc

SEQ ID NO: 27330 - DNA, 21 bp, synthetic construct
  source 1..21: mol_type = other DNA
agaacgccaaccacgtttccc

SEQ ID NO: 27331 - DNA, 21 bp, synthetic construct
  source 1..21: mol_type = other DNA
gtaatgagcagccggacgtgg

SEQ ID NO: 27332 - DNA, 21 bp, synthetic construct
  source 1..21: mol_type = other DNA
ttctcaaaggctggaccaaat

SEQ ID NO: 27333 - DNA, 21 bp, synthetic construct
  source 1..21: mol_type = other DNA
tatgttagatctcagacaagt

SEQ ID NO: 27334 - DNA, 21 bp, synthetic construct
  source 1..21: mol_type = other DNA
tacagcagaatagggccaaac

SEQ ID NO: 27335 - DNA, 21 bp, synthetic construct
  source 1..21: mol_type = other DNA
tacagtagtttgaacataaac

SEQ ID NO: 27336 - DNA, 21 bp, synthetic construct
  source 1..21: mol_type = other DNA
tattgggcaggcatcagagaa

SEQ ID NO: 27337 - DNA, 21 bp, synthetic construct
  source 1..21: mol_type = other DNA
tacgtcaagtatgaaaacccc

SEQ ID NO: 27338 - DNA, 21 bp, synthetic construct
  source 1..21: mol_type = other DNA
tggttgaagtcacaacccggt

SEQ ID NO: 27339 - DNA, 21 bp, synthetic construct
  source 1..21: mol_type = other DNA
cgtgatgaatttcatgcttgg

SEQ ID NO: 27340 - DNA, 21 bp, synthetic construct
  source 1..21: mol_type = other DNA
gatatgagctcagtacagtgg

SEQ ID NO: 27341 - DNA, 21 bp, synthetic construct
  source 1..21: mol_type = other DNA
tacagtcggttgtcgccggca

SEQ ID NO: 27342 - DNA, 21 bp, synthetic construct
  source 1..21: mol_type = other DNA
tattatacaggtgttatagct

SEQ ID NO: 27343 - DNA, 21 bp, synthetic construct
  source 1..21: mol_type = other DNA
atgcaccggttaaccatggat

SEQ ID NO: 27344 - DNA, 21 bp, synthetic construct
  source 1..21: mol_type = other DNA
gcacccggggacattcgctgg

SEQ ID NO: 27345 - DNA, 21 bp, synthetic construct
  source 1..21: mol_type = other DNA
tattggagcggaactgtggca

SEQ ID NO: 27346 - DNA, 21 bp, synthetic construct
  source 1..21: mol_type = other DNA
tactttgaaggcagggttgat

SEQ ID NO: 27347 - DNA, 21 bp, synthetic construct
  source 1..21: mol_type = other DNA
tatttcactgggcggcaagac

SEQ ID NO: 27348 - DNA, 21 bp, synthetic construct
  source 1..21: mol_type = other DNA
cgcgaagaatgggtcgcttac

SEQ ID NO: 27349 - DNA, 21 bp, synthetic construct
  source 1..21: mol_type = other DNA
tacttcactggggtcagaaat

SEQ ID NO: 27350 - DNA, 21 bp, synthetic construct
  source 1..21: mol_type = other DNA
gcaagaagtaccaacggtgtt

SEQ ID NO: 27351 - DNA, 21 bp, synthetic construct
  source 1..21: mol_type = other DNA
tattggtcaggcgttcctgag

SEQ ID NO: 27352 - DNA, 21 bp, synthetic construct
  source 1..21: mol_type = other DNA
tactggagtaaggttcaagcc

SEQ ID NO: 27353 - DNA, 21 bp, synthetic construct
  source 1..21: mol_type = other DNA
tacgtgaagagtggaccacca

SEQ ID NO: 27354 - DNA, 21 bp, synthetic construct
  source 1..21: mol_type = other DNA
gtaatgcaatcaaggacttgg

SEQ ID NO: 27355 - DNA, 21 bp, synthetic construct
  source 1..21: mol_type = other DNA
tatcaccgattgggagacaac

SEQ ID NO: 27356 - DNA, 21 bp, synthetic construct
  source 1..21: mol_type = other DNA
aggggcggtacttcggcgtgg

SEQ ID NO: 27357 - DNA, 21 bp, synthetic construct
  source 1..21: mol_type = other DNA
tactgggctgggatacgtgag

SEQ ID NO: 27358 - DNA, 21 bp, synthetic construct
  source 1..21: mol_type = other DNA
tttgcccgtacaggtgctaat

SEQ ID NO: 27359 - DNA, 21 bp, synthetic construct
  source 1..21: mol_type = other DNA
tatagccgcgctggcgaaaat

SEQ ID NO: 27360 - DNA, 21 bp, synthetic construct
  source 1..21: mol_type = other DNA
tatctacacagtcaaagttat

SEQ ID NO: 27361 - DNA, 21 bp, synthetic construct
  source 1..21: mol_type = other DNA
ggtagccctggtgttagctgg

SEQ ID NO: 27362 - DNA, 21 bp, synthetic construct
  source 1..21: mol_type = other DNA
tggtggacaggtatagcggac

SEQ ID NO: 27363 - DNA, 21 bp, synthetic construct
  source 1..21: mol_type = other DNA
gatatggggtcagctgcatgg

SEQ ID NO: 27364 - DNA, 21 bp, synthetic construct
  source 1..21: mol_type = other DNA
atggagagtaccaatggagtg

SEQ ID NO: 27365 - DNA, 21 bp, synthetic construct
  source 1..21: mol_type = other DNA
ccatcgagactggagaataga

SEQ ID NO: 27366 - DNA, 21 bp, synthetic construct
  source 1..21: mol_type = other DNA
cacagcagctcaaacggcgtc

SEQ ID NO: 27367 - DNA, 21 bp, synthetic construct
  source 1..21: mol_type = other DNA
agggacggtcagtcgtcgtgg

SEQ ID NO: 27368 - DNA, 21 bp, synthetic construct
  source 1..21: mol_type = other DNA
tgcaaagctactgaggtaagc

SEQ ID NO: 27369 - DNA, 21 bp, synthetic construct
  source 1..21: mol_type = other DNA
gatatggagtcacataaatgg

SEQ ID NO: 27370 - DNA, 21 bp, synthetic construct
  source 1..21: mol_type = other DNA
caaaacgaatacgttatctat

SEQ ID NO: 27371 - DNA, 21 bp, synthetic construct
  source 1..21: mol_type = other DNA
tattcacggcttagtccaaat

SEQ ID NO: 27372 - DNA, 21 bp, synthetic construct
  source 1..21: mol_type = other DNA
tatttttctggcgttcataag

SEQ ID NO: 27373 - DNA, 21 bp, synthetic construct
  source 1..21: mol_type = other DNA
tatttcaccggcgaggtttcg

SEQ ID NO: 27374 - DNA, 21 bp, synthetic construct
  source 1..21: mol_type = other DNA
tactggtccggagttaagctt

SEQ ID NO: 27375 - DNA, 21 bp, synthetic construct
  source 1..21: mol_type = other DNA
tatgttcgctcagatcgaaac

SEQ ID NO: 27376 - DNA, 21 bp, synthetic construct
  source 1..21: mol_type = other DNA
ttcgcacgtatgaactgtaac

SEQ ID NO: 27377 - DNA, 21 bp, synthetic construct
  source 1..21: mol_type = other DNA
aaggatggctattcgggctgg

SEQ ID NO: 27378 - DNA, 21 bp, synthetic construct
  source 1..21: mol_type = other DNA
cgagaagatagtagtcgttgg

SEQ ID NO: 27379 - DNA, 21 bp, synthetic construct
  source 1..21: mol_type = other DNA
gacttggaaagttcgtactgg

SEQ ID NO: 27380 - DNA, 21 bp, synthetic construct
  source 1..21: mol_type = other DNA
tatgtacggtcgggttgcggt

SEQ ID NO: 27381 - DNA, 21 bp, synthetic construct
  source 1..21: mol_type = other DNA
tctctggagagtagggcttgg

SEQ ID NO: 27382 - DNA, 21 bp, synthetic construct
  source 1..21: mol_type = other DNA
tatgcacgttcaggcgacaat

SEQ ID NO: 27383 - DNA, 21 bp, synthetic construct
  source 1..21: mol_type = other DNA
tgtaaaggcgataaacacggg

SEQ ID NO: 27384 - DNA, 21 bp, synthetic construct
  source 1..21: mol_type = other DNA
attgcagaccatctcaggtgg

SEQ ID NO: 27385 - DNA, 21 bp, synthetic construct
  source 1..21: mol_type = other DNA
tatgcaagaggaggtcttaat

SEQ ID NO: 27386 - DNA, 21 bp, synthetic construct
  source 1..21: mol_type = other DNA
tacttctcaggaatcttgccg

SEQ ID NO: 27387 - DNA, 21 bp, synthetic construct
  source 1..21: mol_type = other DNA
caagacgggaattctcgttgg

SEQ ID NO: 27388 - DNA, 21 bp, synthetic construct
  source 1..21: mol_type = other DNA
tacgttagaagtcagccgata

SEQ ID NO: 27389 - DNA, 21 bp, synthetic construct
  source 1..21: mol_type = other DNA
tgttacaagaagctacctgat

SEQ ID NO: 27390 - DNA, 21 bp, synthetic construct
  source 1..21: mol_type = other DNA
agagacgggtatagtgcctgg

SEQ ID NO: 27391 - DNA, 21 bp, synthetic construct
  source 1..21: mol_type = other DNA
gttttaagcagtcagggctgg

SEQ ID NO: 27392 - DNA, 21 bp, synthetic construct
  source 1..21: mol_type = other DNA
ctgatggggggaggaacatgg

SEQ ID NO: 27393 - DNA, 21 bp, synthetic construct
  source 1..21: mol_type = other DNA
aaagacgattaccacagttac

SEQ ID NO: 27394 - DNA, 21 bp, synthetic construct
  source 1..21: mol_type = other DNA
ttttttgacggcacctctgcc

SEQ ID NO: 27395 - DNA, 21 bp, synthetic construct
  source 1..21: mol_type = other DNA
cctttcgctagatcagttgaa

SEQ ID NO: 27396 - DNA, 21 bp, synthetic construct
  source 1..21: mol_type = other DNA
cgcgaagattgggttcagttt

SEQ ID NO: 27397 - DNA, 21 bp, synthetic construct
  source 1..21: mol_type = other DNA
ataattagcacaaatggtgta

SEQ ID NO: 27398 - DNA, 21 bp, synthetic construct
  source 1..21: mol_type = other DNA
cgcgaaaataccgtctactgg

SEQ ID NO: 27399 - DNA, 21 bp, synthetic construct
  source 1..21: mol_type = other DNA
gtcgctcatgctggcgccggg

SEQ ID NO: 27400 - DNA, 21 bp, synthetic construct
  source 1..21: mol_type = other DNA
tatcaccgcctcagcgataac

SEQ ID NO: 27401 - DNA, 21 bp, synthetic construct
  source 1..21: mol_type = other DNA
tattttcatggtagactggaa

SEQ ID NO: 27402 - DNA, 21 bp, synthetic construct
  source 1..21: mol_type = other DNA
tattataccggaataacagaa

SEQ ID NO: 27403 - DNA, 21 bp, synthetic construct
  source 1..21: mol_type = other DNA
cgcgatctcgacgtgtacccc

SEQ ID NO: 27404 - DNA, 21 bp, synthetic construct
  source 1..21: mol_type = other DNA
aaggaggacagtagaacatgg

SEQ ID NO: 27405 - DNA, 21 bp, synthetic construct
  source 1..21: mol_type = other DNA
tatttctccggacaaagcgaa

SEQ ID NO: 27406 - DNA, 21 bp, synthetic construct
  source 1..21: mol_type = other DNA
ggtgtaacggcagttaagtgg

SEQ ID NO: 27407 - DNA, 21 bp, synthetic construct
  source 1..21: mol_type = other DNA
agggatgtgagtgttttcccc

SEQ ID NO: 27408 - DNA, 21 bp, synthetic construct
  source 1..21: mol_type = other DNA
agagacgggatgagctcgtgg

SEQ ID NO: 27409 - DNA, 21 bp, synthetic construct
  source 1..21: mol_type = other DNA
tatttctccgggatacctcag

SEQ ID NO: 27410 - DNA, 21 bp, synthetic construct
  source 1..21: mol_type = other DNA
gatatggggtcatcccaatgg

SEQ ID NO: 27411 - DNA, 21 bp, synthetic construct
  source 1..21: mol_type = other DNA
tacttcacgggtgttaccaac

SEQ ID NO: 27412 - DNA, 21 bp, synthetic construct
  source 1..21: mol_type = other DNA
ctttccaaagttggtgagaat

SEQ ID NO: 27413 - DNA, 21 bp, synthetic construct
  source 1..21: mol_type = other DNA
tatttctctggcagacaagaa

SEQ ID NO: 27414 - DNA, 21 bp, synthetic construct
  source 1..21: mol_type = other DNA
tattttcatgggaagaaagac

SEQ ID NO: 27415 - DNA, 21 bp, synthetic construct
  source 1..21: mol_type = other DNA
tattcaagagctggtgacaac

SEQ ID NO: 27416 - DNA, 21 bp, synthetic construct
  source 1..21: mol_type = other DNA
ctgatgagaccatgcagtgag

SEQ ID NO: 27417 - DNA, 21 bp, synthetic construct
  source 1..21: mol_type = other DNA
cgcgacggaatgagcgcctgg

SEQ ID NO: 27418 - DNA, 21 bp, synthetic construct
  source 1..21: mol_type = other DNA
tttagtagactgagtataaac

SEQ ID NO: 27419 - DNA, 21 bp, synthetic construct
  source 1..21: mol_type = other DNA
tgtacctcaaaaactgggacc

SEQ ID NO: 27420 - DNA, 21 bp, synthetic construct
  source 1..21: mol_type = other DNA
ctatcgcgagcgcagtttaac

SEQ ID NO: 27421 - DNA, 21 bp, synthetic construct
  source 1..21: mol_type = other DNA
agaagcgaatacaccacattt

SEQ ID NO: 27422 - DNA, 21 bp, synthetic construct
  source 1..21: mol_type = other DNA
tacagcaggctcagtgaccct

SEQ ID NO: 27423 - DNA, 21 bp, synthetic construct
  source 1..21: mol_type = other DNA
atgtgggatggcacagccgcc

SEQ ID NO: 27424 - DNA, 21 bp, synthetic construct
  source 1..21: mol_type = other DNA
ccgttcgcacgcagtgtagag

SEQ ID NO: 27425 - DNA, 21 bp, synthetic construct
  source 1..21: mol_type = other DNA
tacgtcagatcagacacgaca

SEQ ID NO: 27426 - DNA, 21 bp, synthetic construct
  source 1..21: mol_type = other DNA
tattggtcgggaaccgttgcc

SEQ ID NO: 27427 - DNA, 21 bp, synthetic construct
  source 1..21: mol_type = other DNA
tacgccagagtcggagcaaat

SEQ ID NO: 27428 - DNA, 21 bp, synthetic construct
  source 1..21: mol_type = other DNA
tcgggagggggtttgtttccc

SEQ ID NO: 27429 - DNA, 21 bp, synthetic construct
  source 1..21: mol_type = other DNA
tactggacaggcaaggtggat

SEQ ID NO: 27430 - DNA, 21 bp, synthetic construct
  source 1..21: mol_type = other DNA
ttcgagagcaccaacggtcgc

SEQ ID NO: 27431 - DNA, 21 bp, synthetic construct
  source 1..21: mol_type = other DNA
tacagcaagggtaactttaac

SEQ ID NO: 27432 - DNA, 21 bp, synthetic construct
  source 1..21: mol_type = other DNA
ttctttagcggccgcgtggag

SEQ ID NO: 27433 - DNA, 21 bp, synthetic construct
  source 1..21: mol_type = other DNA
atggacggtaatagccgctgg

SEQ ID NO: 27434 - DNA, 21 bp, synthetic construct
  source 1..21: mol_type = other DNA
atctgcaggggatataccagt

SEQ ID NO: 27435 - DNA, 21 bp, synthetic construct
  source 1..21: mol_type = other DNA
agagatgcaatgagctcgtgg

SEQ ID NO: 27436 - DNA, 21 bp, synthetic construct
  source 1..21: mol_type = other DNA
tattcccgtttatctcctatc

SEQ ID NO: 27437 - DNA, 21 bp, synthetic construct
  source 1..21: mol_type = other DNA
tacgtgaagtcatgtccgctc

SEQ ID NO: 27438 - DNA, 21 bp, synthetic construct
  source 1..21: mol_type = other DNA
tattttacaggtgtcacacat

SEQ ID NO: 27439 - DNA, 21 bp, synthetic construct
  source 1..21: mol_type = other DNA
tttagcaaagtggggcacaat

SEQ ID NO: 27440 - DNA, 21 bp, synthetic construct
  source 1..21: mol_type = other DNA
tactggcagggcgtcaaagag

SEQ ID NO: 27441 - DNA, 21 bp, synthetic construct
  source 1..21: mol_type = other DNA
tactccaaacatgggaacaac

SEQ ID NO: 27442 - DNA, 21 bp, synthetic construct
  source 1..21: mol_type = other DNA
tggtggtcgggaacgcgcgag

SEQ ID NO: 27443 - DNA, 21 bp, synthetic construct
  source 1..21: mol_type = other DNA
agactggatcacgtctatcct

SEQ ID NO: 27444 - DNA, 21 bp, synthetic construct
  source 1..21: mol_type = other DNA
tattcaaagttgaattccaac

SEQ ID NO: 27445 - DNA, 21 bp, synthetic construct
  source 1..21: mol_type = other DNA
taccatcgtttatcagaaaac

SEQ ID NO: 27446 - DNA, 21 bp, synthetic construct
  source 1..21: mol_type = other DNA
ccgatggagagccttaagtgg

SEQ ID NO: 27447 - DNA, 21 bp, synthetic construct
  source 1..21: mol_type = other DNA
gacttgagaagcaaaacctgg

SEQ ID NO: 27448 - DNA, 21 bp, synthetic construct
  source 1..21: mol_type = other DNA
tacgcccgtagtggggctaac

SEQ ID NO: 27449 - DNA, 21 bp, synthetic construct
  source 1..21: mol_type = other DNA
tacgctaagggcaaccataac

SEQ ID NO: 27450 - DNA, 21 bp, synthetic construct
  source 1..21: mol_type = other DNA
tattttgcgggcgtgcgcagt

SEQ ID NO: 27451 - DNA, 21 bp, synthetic construct
  source 1..21: mol_type = other DNA
ctccaccgcttgcaagatgat

SEQ ID NO: 27452 - DNA, 21 bp, synthetic construct
  source 1..21: mol_type = other DNA
cgggaagattatgttcattgg

SEQ ID NO: 27453 - DNA, 21 bp, synthetic construct
  source 1..21: mol_type = other DNA
tatgcgaggtcgggtgcaaat

SEQ ID NO: 27454 - DNA, 21 bp, synthetic construct
  source 1..21: mol_type = other DNA
agagaaagcactaacggaatt

SEQ ID NO: 27455 - DNA, 21 bp, synthetic construct
  source 1..21: mol_type = other DNA
agaatggacgcagtgacgtgg

SEQ ID NO: 27456 - DNA, 21 bp, synthetic construct
  source 1..21: mol_type = other DNA
tgcaaaccgtatagtagggaa

SEQ ID NO: 27457 - DNA, 21 bp, synthetic construct
  source 1..21: mol_type = other DNA
ctagccaaaagcgggatgaac

SEQ ID NO: 27458 - DNA, 21 bp, synthetic construct
  source 1..21: mol_type = other DNA
ttaaggtctgaatgctgtgtc

SEQ ID NO: 27459 - DNA, 21 bp, synthetic construct
  source 1..21: mol_type = other DNA
tggactcccggttgtaaggct

SEQ ID NO: 27460 - DNA, 21 bp, synthetic construct
  source 1..21: mol_type = other DNA
aaagacgaatggaaaacctat

SEQ ID NO: 27461 - DNA, 21 bp, synthetic construct
  source 1..21: mol_type = other DNA
tacgctcggatgggtccgaat

SEQ ID NO: 27462 - DNA, 21 bp, synthetic construct
  source 1..21: mol_type = other DNA
tacgtcaaatcgcaaaagatc

SEQ ID NO: 27463 - DNA, 21 bp, synthetic construct
  source 1..21: mol_type = other DNA
tatgtcagaagccaaatgggt

SEQ ID NO: 27464 - DNA, 21 bp, synthetic construct
  source 1..21: mol_type = other DNA
tatgtcaggtccgacaaggcg

SEQ ID NO: 27465 - DNA, 21 bp, synthetic construct
  source 1..21: mol_type = other DNA
tatccgtccggtggcccggga

SEQ ID NO: 27466 - DNA, 21 bp, synthetic construct
  source 1..21: mol_type = other DNA
agaaccaataatgtctatccg

SEQ ID NO: 27467 - DNA, 21 bp, synthetic construct
  source 1..21: mol_type = other DNA
tattcaaagggtaaccctaac

SEQ ID NO: 27468 - DNA, 21 bp, synthetic construct
  source 1..21: mol_type = other DNA
tttttctcgggaaaaatcgag

SEQ ID NO: 27469 - DNA, 21 bp, synthetic construct
  source 1..21: mol_type = other DNA
tgtaaaccagctcctggagaa

SEQ ID NO: 27470 - DNA, 21 bp, synthetic construct
  source 1..21: mol_type = other DNA
gcccccgaaactattaggtgg

SEQ ID NO: 27471 - DNA, 21 bp, synthetic construct
  source 1..21: mol_type = other DNA
tatgtccgcagcgatgtaagg

SEQ ID NO: 27472 - DNA, 21 bp, synthetic construct
  source 1..21: mol_type = other DNA
tatttcatggggaagcaggac

SEQ ID NO: 27473 - DNA, 21 bp, synthetic construct
  source 1..21: mol_type = other DNA
ttttcgcgcgtgggcgtcaat

SEQ ID NO: 27474 - DNA, 21 bp, synthetic construct
  source 1..21: mol_type = other DNA
ttcttcactggaaaagtagct

SEQ ID NO: 27475 - DNA, 21 bp, synthetic construct
  source 1..21: mol_type = other DNA
tactggagcggcgtccccgaa

SEQ ID NO: 27476 - DNA, 21 bp, synthetic construct
  source 1..21: mol_type = other DNA
tctctgagcagtcgcgattgg

SEQ ID NO: 27477 - DNA, 21 bp, synthetic construct
  source 1..21: mol_type = other DNA
ttgagcagggcacaattcaat

SEQ ID NO: 27478 - DNA, 21 bp, synthetic construct
  source 1..21: mol_type = other DNA
tttatgactgggaagtgcccg

SEQ ID NO: 27479 - DNA, 21 bp, synthetic construct
  source 1..21: mol_type = other DNA
tttgtcaaaagccaaccgggt

SEQ ID NO: 27480 - DNA, 21 bp, synthetic construct
  source 1..21: mol_type = other DNA
tttagtcgtgtgggaagcaat

SEQ ID NO: 27481 - DNA, 21 bp, synthetic construct
  source 1..21: mol_type = other DNA
cgggaagaggctgttagttgg

SEQ ID NO: 27482 - DNA, 21 bp, synthetic construct
  source 1..21: mol_type = other DNA
tactcacgcgtgcaacttaac

SEQ ID NO: 27483 - DNA, 21 bp, synthetic construct
  source 1..21: mol_type = other DNA
gcgccacctcatattaaatgg

SEQ ID NO: 27484 - DNA, 21 bp, synthetic construct
  source 1..21: mol_type = other DNA
gacttgagggataggaagtgg

SEQ ID NO: 27485 - DNA, 21 bp, synthetic construct
  source 1..21: mol_type = other DNA
agagaggactgggtccaattc

SEQ ID NO: 27486 - DNA, 21 bp, synthetic construct
  source 1..21: mol_type = other DNA
tactttagtggccaattagat

SEQ ID NO: 27487 - DNA, 21 bp, synthetic construct
  source 1..21: mol_type = other DNA
tacagcagggccggtttcgat

SEQ ID NO: 27488 - DNA, 21 bp, synthetic construct
  source 1..21: mol_type = other DNA
ccctggtccacaaacggtgtc

SEQ ID NO: 27489 - DNA, 21 bp, synthetic construct
  source 1..21: mol_type = other DNA
tacgtgaaatcacagggctct

SEQ ID NO: 27490 - DNA, 21 bp, synthetic construct
  source 1..21: mol_type = other DNA
cgtcttgagtcctacgactgg

SEQ ID NO: 27491 - DNA, 21 bp, synthetic construct
  source 1..21: mol_type = other DNA
tacagtcgattacacgcggtc

SEQ ID NO: 27492 - DNA, 21 bp, synthetic construct
  source 1..21: mol_type = other DNA
cttcatcgattgagtgagtac

SEQ ID NO: 27493 - DNA, 21 bp, synthetic construct
  source 1..21: mol_type = other DNA
tactggaccggagttacggat

SEQ ID NO: 27494 - DNA, 21 bp, synthetic construct
  source 1..21: mol_type = other DNA
gtaatggctgatagggcgtgg

SEQ ID NO: 27495 - DNA, 21 bp, synthetic construct
  source 1..21: mol_type = other DNA
tacagtcgcttgagtgatgta

SEQ ID NO: 27496 - DNA, 21 bp, synthetic construct
  source 1..21: mol_type = other DNA
cgggagtctagcgttaggtgg

SEQ ID NO: 27497 - DNA, 21 bp, synthetic construct
  source 1..21: mol_type = other DNA
tattacacgggtaaaatatcg

SEQ ID NO: 27498 - DNA, 21 bp, synthetic construct
  source 1..21: mol_type = other DNA
tactggacaggcacaacggcg

SEQ ID NO: 27499 - DNA, 21 bp, synthetic construct
  source 1..21: mol_type = other DNA
tactttagtgggcggttggac

SEQ ID NO: 27500 - DNA, 21 bp, synthetic construct
  source 1..21: mol_type = other DNA
ttcagcaagatcgggtacaac

SEQ ID NO: 27501 - DNA, 21 bp, synthetic construct
  source 1..21: mol_type = other DNA
ttcagtagattgaacgcgaat

SEQ ID NO: 27502 - DNA, 21 bp, synthetic construct
  source 1..21: mol_type = other DNA
cgagaggaagaggtggcctgg

SEQ ID NO: 27503 - DNA, 21 bp, synthetic construct
  source 1..21: mol_type = other DNA
cgagaaagctcagtgcgttgg

SEQ ID NO: 27504 - DNA, 21 bp, synthetic construct
  source 1..21: mol_type = other DNA
aggggagatcttgtctatcca

SEQ ID NO: 27505 - DNA, 21 bp, synthetic construct
  source 1..21: mol_type = other DNA
gacctctcgtcgagtgactgg

SEQ ID NO: 27506 - DNA, 21 bp, synthetic construct
  source 1..21: mol_type = other DNA
tatagtaggatcggactaaac

SEQ ID NO: 27507 - DNA, 21 bp, synthetic construct
  source 1..21: mol_type = other DNA
tgtaaggaggggagcgcatgg

SEQ ID NO: 27508 - DNA, 21 bp, synthetic construct
  source 1..21: mol_type = other DNA
aggagcgagttttcaacctat

SEQ ID NO: 27509 - DNA, 21 bp, synthetic construct
  source 1..21: mol_type = other DNA
cgggaagagttggtgaggtgg

SEQ ID NO: 27510 - DNA, 21 bp, synthetic construct
  source 1..21: mol_type = other DNA
gttgccaggttggggtgggat

SEQ ID NO: 27511 - DNA, 21 bp, synthetic construct
  source 1..21: mol_type = other DNA
atggatggaaactcgaggtgg

SEQ ID NO: 27512 - DNA, 21 bp, synthetic construct
  source 1..21: mol_type = other DNA
tctatggctgacaggagttgg

SEQ ID NO: 27513 - DNA, 21 bp, synthetic construct
  source 1..21: mol_type = other DNA
agggatgaattccgatcgtgg

SEQ ID NO: 27514 - DNA, 21 bp, synthetic construct
  source 1..21: mol_type = other DNA
cgcgatgagtttaaggtctgg

SEQ ID NO: 27515 - DNA, 21 bp, synthetic construct
  source 1..21: mol_type = other DNA
tactcacgacttggtgacgat

SEQ ID NO: 27516 - DNA, 21 bp, synthetic construct
  source 1..21: mol_type = other DNA
tattttgcgggaaagcatgaa

SEQ ID NO: 27517 - DNA, 21 bp, synthetic construct
  source 1..21: mol_type = other DNA
taccaccgcctgagtatcaac

SEQ ID NO: 27518 - DNA, 21 bp, synthetic construct
  source 1..21: mol_type = other DNA
tactcaaaacataatcacaac

SEQ ID NO: 27519 - DNA, 21 bp, synthetic construct
  source 1..21: mol_type = other DNA
gggtctgatttcgtcaggtgg

SEQ ID NO: 27520 - DNA, 21 bp, synthetic construct
  source 1..21: mol_type = other DNA
caacttagtgaccgcacctgg

SEQ ID NO: 27521 - DNA, 21 bp, synthetic construct
  source 1..21: mol_type = other DNA
tattggacagggatgatatcg

SEQ ID NO: 27522 - DNA, 21 bp, synthetic construct
  source 1..21: mol_type = other DNA
ttgtgccggccgtgcaatgag

SEQ ID NO: 27523 - DNA, 21 bp, synthetic construct
  source 1..21: mol_type = other DNA
cgagaaagtgaggtgcgctgg

SEQ ID NO: 27524 - DNA, 21 bp, synthetic construct
  source 1..21: mol_type = other DNA
tgccgcccccagaccccttta

SEQ ID NO: 27525 - DNA, 21 bp, synthetic construct
  source 1..21: mol_type = other DNA
aacgccctcgtgggtcgggac

SEQ ID NO: 27526 - DNA, 21 bp, synthetic construct
  source 1..21: mol_type = other DNA
agagatgtcacagtttttccc

SEQ ID NO: 27527 - DNA, 21 bp, synthetic construct
  source 1..21: mol_type = other DNA
catatgccagatagaaaatgg

SEQ ID NO: 27528 - DNA, 21 bp, synthetic construct
  source 1..21: mol_type = other DNA
tatagtcggatccagctagac

SEQ ID NO: 27529 - DNA, 21 bp, synthetic construct
  source 1..21: mol_type = other DNA
tacagtagactcggtcagaac

SEQ ID NO: 27530 - DNA, 21 bp, synthetic construct
  source 1..21: mol_type = other DNA
tacttcagtgggagggtggca

SEQ ID NO: 27531 - DNA, 21 bp, synthetic construct
  source 1..21: mol_type = other DNA
agtgatggaaccagcaaatgg

SEQ ID NO: 27532 - DNA, 21 bp, synthetic construct
  source 1..21: mol_type = other DNA
tattctcgtctgagtccaact

SEQ ID NO: 27533 - DNA, 21 bp, synthetic construct
  source 1..21: mol_type = other DNA
aaagacgacttcaccggtttt

SEQ ID NO: 27534 - DNA, 21 bp, synthetic construct
  source 1..21: mol_type = other DNA
aggcccgagtcggtcaggtgg

SEQ ID NO: 27535 - DNA, 21 bp, synthetic construct
  source 1..21: mol_type = other DNA
agagatgaatacatgtcatgg

SEQ ID NO: 27536 - DNA, 21 bp, synthetic construct
  source 1..21: mol_type = other DNA
tacgccagggctgggcctaac

SEQ ID NO: 27537 - DNA, 21 bp, synthetic construct
  source 1..21: mol_type = other DNA
tatagtaagcaaaacaacaac

SEQ ID NO: 27538 - DNA, 21 bp, synthetic construct
  source 1..21: mol_type = other DNA
tggtggtcgggtttgaaggaa

SEQ ID NO: 27539 - DNA, 21 bp, synthetic construct
  source 1..21: mol_type = other DNA
cgtgatgattactcgacatac

SEQ ID NO: 27540 - DNA, 21 bp, synthetic construct
  source 1..21: mol_type = other DNA
tatttccacggcaaattagat

SEQ ID NO: 27541 - DNA, 21 bp, synthetic construct
  source 1..21: mol_type = other DNA
tatcatagactaagcgaaaac

SEQ ID NO: 27542 - DNA, 21 bp, synthetic construct
  source 1..21: mol_type = other DNA
tattttagtggccggattgat

SEQ ID NO: 27543 - DNA, 21 bp, synthetic construct
  source 1..21: mol_type = other DNA
tacgttcggtcgcagatgggc

SEQ ID NO: 27544 - DNA, 21 bp, synthetic construct
  source 1..21: mol_type = other DNA
cgtgacgagttcaggtcatac

SEQ ID NO: 27545 - DNA, 21 bp, synthetic construct
  source 1..21: mol_type = other DNA
attggcggaaggtgcccgcct

SEQ ID NO: 27546 - DNA, 21 bp, synthetic construct
  source 1..21: mol_type = other DNA
ggatccataaccagcacatgg

SEQ ID NO: 27547 - DNA, 21 bp, synthetic construct
  source 1..21: mol_type = other DNA
ttcgcaagaattggaccgaat

SEQ ID NO: 27548 - DNA, 21 bp, synthetic construct
  source 1..21: mol_type = other DNA
ttctcacggctaaatgagaac

SEQ ID NO: 27549 - DNA, 21 bp, synthetic construct
  source 1..21: mol_type = other DNA
tatgctaaatctggtggtaac

SEQ ID NO: 27550 - DNA, 21 bp, synthetic construct
  source 1..21: mol_type = other DNA
aggaacgagttcagtactttt

SEQ ID NO: 27551 - DNA, 21 bp, synthetic construct
  source 1..21: mol_type = other DNA
ttctcgcgtcttaacataaac

SEQ ID NO: 27552 - DNA, 21 bp, synthetic construct
  source 1..21: mol_type = other DNA
tattttacaggtcgatcggat

SEQ ID NO: 27553 - DNA, 21 bp, synthetic construct
  source 1..21: mol_type = other DNA
tattcccgcttgaactacgat

SEQ ID NO: 27554 - DNA, 21 bp, synthetic construct
  source 1..21: mol_type = other DNA
gaccctagctcagttaggtgg

SEQ ID NO: 27555 - DNA, 21 bp, synthetic construct
  source 1..21: mol_type = other DNA
ttaagtaaaagtgcctataat

SEQ ID NO: 27556 - DNA, 21 bp, synthetic construct
  source 1..21: mol_type = other DNA
tggtggtcggcggttcctgag

SEQ ID NO: 27557 - DNA, 21 bp, synthetic construct
  source 1..21: mol_type = other DNA
gagaacgcgagtagggcatgg

SEQ ID NO: 27558 - DNA, 21 bp, synthetic construct
  source 1..21: mol_type = other DNA
tatttcaccggccgccatgat

SEQ ID NO: 27559 - DNA, 21 bp, synthetic construct
  source 1..21: mol_type = other DNA
gtcagtacccactgtactgcg

SEQ ID NO: 27560 - DNA, 21 bp, synthetic construct
  source 1..21: mol_type = other DNA
tgcaaaccaccttcaggcgac

SEQ ID NO: 27561 - DNA, 21 bp, synthetic construct
  source 1..21: mol_type = other DNA
agagatggtacatcgcattgg

SEQ ID NO: 27562 - DNA, 21 bp, synthetic construct
  source 1..21: mol_type = other DNA
tttagccgcgtaggcaataac

SEQ ID NO: 27563 - DNA, 21 bp, synthetic construct
  source 1..21: mol_type = other DNA
ttcgcgaggaccggcgttaac

SEQ ID NO: 27564 - DNA, 21 bp, synthetic construct
  source 1..21: mol_type = other DNA
tatcacaggttatccgccaac

SEQ ID NO: 27565 - DNA, 21 bp, synthetic construct
  source 1..21: mol_type = other DNA
tgccctcagaaagggcaggag

SEQ ID NO: 27566 - DNA, 21 bp, synthetic construct
  source 1..21: mol_type = other DNA
cgtgatgattattcaacctat

SEQ ID NO: 27567 - DNA, 21 bp, synthetic construct
  source 1..21: mol_type = other DNA
cctctcagcgatcgtacctgg

SEQ ID NO: 27568 - DNA, 21 bp, synthetic construct
  source 1..21: mol_type = other DNA
tgggttaagtcgagcccaggg

SEQ ID NO: 27569 - DNA, 21 bp, synthetic construct
  source 1..21: mol_type = other DNA
ggtgttgagacagttagatgg

SEQ ID NO: 27570 - DNA, 21 bp, synthetic construct
  source 1..21: mol_type = other DNA
gacttaacagccaggaattgg

SEQ ID NO: 27571 - DNA, 21 bp, synthetic construct
  source 1..21: mol_type = other DNA
tacgccagaaccggtattaac

SEQ ID NO: 27572 - DNA, 21 bp, synthetic construct
  source 1..21: mol_type = other DNA
caccatagcacaaacggggtg

SEQ ID NO: 27573 - DNA, 21 bp, synthetic construct
  source 1..21: mol_type = other DNA
gacctccaaagttcaaaatgg

SEQ ID NO: 27574 - DNA, 21 bp, synthetic construct
  source 1..21: mol_type = other DNA
agggacgcaacatcagggtgg

SEQ ID NO: 27575 - DNA, 21 bp, synthetic construct
  source 1..21: mol_type = other DNA
tactttacaaagcagatcaac

SEQ ID NO: 27576 - DNA, 21 bp, synthetic construct
  source 1..21: mol_type = other DNA
cacactcccatgtgcaaagcg

SEQ ID NO: 27577 - DNA, 21 bp, synthetic construct
  source 1..21: mol_type = other DNA
tacttcacaggaagagagaac

SEQ ID NO: 27578 - DNA, 21 bp, synthetic construct
  source 1..21: mol_type = other DNA
attatgtcgtcagctatgtgg

SEQ ID NO: 27579 - DNA, 21 bp, synthetic construct
  source 1..21: mol_type = other DNA
tatttccatggacaggtggcg

SEQ ID NO: 27580 - DNA, 21 bp, synthetic construct
  source 1..21: mol_type = other DNA
gtagatagtgataatggtcgc

SEQ ID NO: 27581 - DNA, 21 bp, synthetic construct
  source 1..21: mol_type = other DNA
tatcacaagagccagaacttc

SEQ ID NO: 27582 - DNA, 21 bp, synthetic construct
  source 1..21: mol_type = other DNA
tgcggcagaccccaaatggaa

SEQ ID NO: 27583 - DNA, 21 bp, synthetic construct
  source 1..21: mol_type = other DNA
tttcaccgtttgtccccgaac

SEQ ID NO: 27584 - DNA, 21 bp, synthetic construct
  source 1..21: mol_type = other DNA
tatagcaggttacaggagaat

SEQ ID NO: 27585 - DNA, 21 bp, synthetic construct
  source 1..21: mol_type = other DNA
cgcgatggagtgagtgcgtgg

SEQ ID NO: 27586 - DNA, 21 bp, synthetic construct
  source 1..21: mol_type = other DNA
tatgcaaggtcaggaattaac

SEQ ID NO: 27587 - DNA, 21 bp, synthetic construct
  source 1..21: mol_type = other DNA
ctatctaaactcggaatcaac

SEQ ID NO: 27588 - DNA, 21 bp, synthetic construct
  source 1..21: mol_type = other DNA
tgcaaactaccgaaggaatta

SEQ ID NO: 27589 - DNA, 21 bp, synthetic construct
  source 1..21: mol_type = other DNA
gtaagtacgcattgcgccgct

SEQ ID NO: 27590 - DNA, 21 bp, synthetic construct
  source 1..21: mol_type = other DNA
tatttcagtggccgcatggaa

SEQ ID NO: 27591 - DNA, 21 bp, synthetic construct
  source 1..21: mol_type = other DNA
tactttgccggccgaacagag

SEQ ID NO: 27592 - DNA, 21 bp, synthetic construct
  source 1..21: mol_type = other DNA
agaatgccagatcgggggtgg

SEQ ID NO: 27593 - DNA, 21 bp, synthetic construct
  source 1..21: mol_type = other DNA
ctggctaagagcgggcttaac

SEQ ID NO: 27594 - DNA, 21 bp, synthetic construct
  source 1..21: mol_type = other DNA
ccttacgcacgcagtcccttg

SEQ ID NO: 27595 - DNA, 21 bp, synthetic construct
  source 1..21: mol_type = other DNA
accaggcaaggcgatccggcc

SEQ ID NO: 27596 - DNA, 21 bp, synthetic construct
  source 1..21: mol_type = other DNA
taccatagaatgagtccggat

SEQ ID NO: 27597 - DNA, 21 bp, synthetic construct
  source 1..21: mol_type = other DNA
tactcgcgcttggacgttctc

SEQ ID NO: 27598 - DNA, 21 bp, synthetic construct
  source 1..21: mol_type = other DNA
gacttgggtagcagtgtttgg

SEQ ID NO: 27599 - DNA, 21 bp, synthetic construct
  source 1..21: mol_type = other DNA
tatttcacaaacattagggaa

SEQ ID NO: 27600 - DNA, 21 bp, synthetic construct
  source 1..21: mol_type = other DNA
ggtgatgaatggcagcatttc

SEQ ID NO: 27601 - DNA, 21 bp, synthetic construct
  source 1..21: mol_type = other DNA
ggaggaccaacaatgtgctat

SEQ ID NO: 27602 - DNA, 21 bp, synthetic construct
  source 1..21: mol_type = other DNA
tacgtacgcagtgacaaagcc

SEQ ID NO: 27603 - DNA, 21 bp, synthetic construct
  source 1..21: mol_type = other DNA
gtcggccatagaggatgggat

SEQ ID NO: 27604 - DNA, 21 bp, synthetic construct
  source 1..21: mol_type = other DNA
tatagtaagcacaataccaat

SEQ ID NO: 27605 - DNA, 21 bp, synthetic construct
  source 1..21: mol_type = other DNA
tttttctcgggcaaaattgag

SEQ ID NO: 27606 - DNA, 21 bp, synthetic construct
  source 1..21: mol_type = other DNA
tattcgaggattcaacccgat

SEQ ID NO: 27607 - DNA, 21 bp, synthetic construct
  source 1..21: mol_type = other DNA
tatttcagtggtatcggtgca

SEQ ID NO: 27608 - DNA, 21 bp, synthetic construct
  source 1..21: mol_type = other DNA
tattctcgtctccaaaatgat

SEQ ID NO: 27609 - DNA, 21 bp, synthetic construct
  source 1..21: mol_type = other DNA
atcatatcgacgaacggtgtc

SEQ ID NO: 27610 - DNA, 21 bp, synthetic construct
  source 1..21: mol_type = other DNA
gttcctggacattgtttggtt

SEQ ID NO: 27611 - DNA, 21 bp, synthetic construct
  source 1..21: mol_type = other DNA
tatttcacgaaacaaataaat

SEQ ID NO: 27612 - DNA, 21 bp, synthetic construct
  source 1..21: mol_type = other DNA
ccgtacgcccgtagcatcgag

SEQ ID NO: 27613 - DNA, 21 bp, synthetic construct
  source 1..21: mol_type = other DNA
tattggaccggaaccactgcc

SEQ ID NO: 27614 - DNA, 21 bp, synthetic construct
  source 1..21: mol_type = other DNA
taccacagactaggggaccca

SEQ ID NO: 27615 - DNA, 21 bp, synthetic construct
  source 1..21: mol_type = other DNA
tactggtcaggcacagttgcg

SEQ ID NO: 27616 - DNA, 21 bp, synthetic construct
  source 1..21: mol_type = other DNA
cgtaacgagttcagcacgtac

SEQ ID NO: 27617 - DNA, 21 bp, synthetic construct
  source 1..21: mol_type = other DNA
agagattttgatgcatatcct

SEQ ID NO: 27618 - DNA, 21 bp, synthetic construct
  source 1..21: mol_type = other DNA
tacagtaaaatgggccaaaac

SEQ ID NO: 27619 - DNA, 21 bp, synthetic construct
  source 1..21: mol_type = other DNA
ttaagcaaattaggtattaat

SEQ ID NO: 27620 - DNA, 21 bp, synthetic construct
  source 1..21: mol_type = other DNA
cgcgaatcgacaaatgggata

SEQ ID NO: 27621 - DNA, 21 bp, synthetic construct
  source 1..21: mol_type = other DNA
cgggacgagttcacagtttat

SEQ ID NO: 27622 - DNA, 21 bp, synthetic construct
  source 1..21: mol_type = other DNA
tactccagattgcaatcgaac

SEQ ID NO: 27623 - DNA, 21 bp, synthetic construct
  source 1..21: mol_type = other DNA
cgtttagacgacaggggctgg

SEQ ID NO: 27624 - DNA, 21 bp, synthetic construct
  source 1..21: mol_type = other DNA
tacttcacggggcgagaagat

SEQ ID NO: 27625 - DNA, 21 bp, synthetic construct
  source 1..21: mol_type = other DNA
aggtcggaatttgcaacgtac

SEQ ID NO: 27626 - DNA, 21 bp, synthetic construct
  source 1..21: mol_type = other DNA
tattggcaaggaatcaaggat

SEQ ID NO: 27627 - DNA, 21 bp, synthetic construct
  source 1..21: mol_type = other DNA
tttttcaccgggcaggtagac

SEQ ID NO: 27628 - DNA, 21 bp, synthetic construct
  source 1..21: mol_type = other DNA
tacagccgtctgcatgctaac

SEQ ID NO: 27629 - DNA, 21 bp, synthetic construct
  source 1..21: mol_type = other DNA
tattttacgggagtcgcagtg

SEQ ID NO: 27630 - DNA, 21 bp, synthetic construct
  source 1..21: mol_type = other DNA
tactcccgagtaggactcaat

SEQ ID NO: 27631 - DNA, 21 bp, synthetic construct
  source 1..21: mol_type = other DNA
ggagttgaagctgtccgttgg

SEQ ID NO: 27632 - DNA, 21 bp, synthetic construct
  source 1..21: mol_type = other DNA
agtatgagcgatcggacgtgg

SEQ ID NO: 27633 - DNA, 21 bp, synthetic construct
  source 1..21: mol_type = other DNA
tactggacgggtaccgttgcc

SEQ ID NO: 27634 - DNA, 21 bp, synthetic construct
  source 1..21: mol_type = other DNA
atcgatgaatggcatcatttt

SEQ ID NO: 27635 - DNA, 21 bp, synthetic construct
  source 1..21: mol_type = other DNA
tatagccggatacaaactgat

SEQ ID NO: 27636 - DNA, 21 bp, synthetic construct
  source 1..21: mol_type = other DNA
ttcctcgcgagtcgagactgg

SEQ ID NO: 27637 - DNA, 21 bp, synthetic construct
  source 1..21: mol_type = other DNA
tactgggccggcgtacgtgaa

SEQ ID NO: 27638 - DNA, 21 bp, synthetic construct
  source 1..21: mol_type = other DNA
ataccccccttatttaatgtg

SEQ ID NO: 27639 - DNA, 21 bp, synthetic construct
  source 1..21: mol_type = other DNA
ggttccgaattctcgacgtat

SEQ ID NO: 27640 - DNA, 21 bp, synthetic construct
  source 1..21: mol_type = other DNA
aacatggggtcgagagactgg

SEQ ID NO: 27641 - DNA, 21 bp, synthetic construct
  source 1..21: mol_type = other DNA
tatgcgcgatcgggagttaac

SEQ ID NO: 27642 - DNA, 21 bp, synthetic construct
  source 1..21: mol_type = other DNA
tacttctcaaaaatagcagcc

SEQ ID NO: 27643 - DNA, 21 bp, synthetic construct
  source 1..21: mol_type = other DNA
agggacgattacgtttcttgg

SEQ ID NO: 27644 - DNA, 21 bp, synthetic construct
  source 1..21: mol_type = other DNA
tatagtcgattgtccccgatg

SEQ ID NO: 27645 - DNA, 21 bp, synthetic construct
  source 1..21: mol_type = other DNA
tattcaaaacaaaatatgaat

SEQ ID NO: 27646 - DNA, 21 bp, synthetic construct
  source 1..21: mol_type = other DNA
cagatgaaagaccgtacatgg

SEQ ID NO: 27647 - DNA, 21 bp, synthetic construct
  source 1..21: mol_type = other DNA
tattcccgcctacagccagtc

SEQ ID NO: 27648 - DNA, 21 bp, synthetic construct
  source 1..21: mol_type = other DNA
gcacctggaaacatttcatgg

SEQ ID NO: 27649 - DNA, 21 bp, synthetic construct
  source 1..21: mol_type = other DNA
tatcaccgtatgtcgccagac

SEQ ID NO: 27650 - DNA, 21 bp, synthetic construct
  source 1..21: mol_type = other DNA
cgcttagaaagcactcattgg

SEQ ID NO: 27651 - DNA, 21 bp, synthetic construct
  source 1..21: mol_type = other DNA
ttctctcgcgtttctgacaat

SEQ ID NO: 27652 - DNA, 21 bp, synthetic construct
  source 1..21: mol_type = other DNA
tatagtaaaacaggcgtaaac

SEQ ID NO: 27653 - DNA, 21 bp, synthetic construct
  source 1..21: mol_type = other DNA
atgatggacggtactaacgcc

SEQ ID NO: 27654 - DNA, 21 bp, synthetic construct
  source 1..21: mol_type = other DNA
gcgatggccgatcgcgaatgg

SEQ ID NO: 27655 - DNA, 21 bp, synthetic construct
  source 1..21: mol_type = other DNA
tatttcacaggcagggtcagc

SEQ ID NO: 27656 - DNA, 21 bp, synthetic construct
  source 1..21: mol_type = other DNA
ataatgagcgatcgactgtgg

SEQ ID NO: 27657 - DNA, 21 bp, synthetic construct
  source 1..21: mol_type = other DNA
gtcaccagtaccatggggagg

SEQ ID NO: 27658 - DNA, 21 bp, synthetic construct
  source 1..21: mol_type = other DNA
tgtaagcagccaaagacggag

SEQ ID NO: 27659 - DNA, 21 bp, synthetic construct
  source 1..21: mol_type = other DNA
tactcgagaatacagacggac

SEQ ID NO: 27660 - DNA, 21 bp, synthetic construct
  source 1..21: mol_type = other DNA
tatgcacgtacgggtatgaac

SEQ ID NO: 27661 - DNA, 21 bp, synthetic construct
  source 1..21: mol_type = other DNA
tattcccgtctaagtccagcg

SEQ ID NO: 27662 - DNA, 21 bp, synthetic construct
  source 1..21: mol_type = other DNA
gtaccactaaaaggctgggac

SEQ ID NO: 27663 - DNA, 21 bp, synthetic construct
  source 1..21: mol_type = other DNA
ttgcagagcactaacggagtg

SEQ ID NO: 27664 - DNA, 21 bp, synthetic construct
  source 1..21: mol_type = other DNA
cgtagaactgatgtttatcct

SEQ ID NO: 27665 - DNA, 21 bp, synthetic construct
  source 1..21: mol_type = other DNA
ttcttcacagggtacaaggag

SEQ ID NO: 27666 - DNA, 21 bp, synthetic construct
  source 1..21: mol_type = other DNA
agaatggaagaccgtcaatgg

SEQ ID NO: 27667 - DNA, 21 bp, synthetic construct
  source 1..21: mol_type = other DNA
ttctcgagggttggacagaac

SEQ ID NO: 27668 - DNA, 21 bp, synthetic construct
  source 1..21: mol_type = other DNA
cttcatcgccttggagagggc

SEQ ID NO: 27669 - DNA, 21 bp, synthetic construct
  source 1..21: mol_type = other DNA
tatagccgaattggattcaat

SEQ ID NO: 27670 - DNA, 21 bp, synthetic construct
  source 1..21: mol_type = other DNA
agaaatgaatttacagggttc

SEQ ID NO: 27671 - DNA, 21 bp, synthetic construct
  source 1..21: mol_type = other DNA
tacagccgtcttagctacgat

SEQ ID NO: 27672 - DNA, 21 bp, synthetic construct
  source 1..21: mol_type = other DNA
aggacttttgatgcgtaccct

SEQ ID NO: 27673 - DNA, 21 bp, synthetic construct
  source 1..21: mol_type = other DNA
gttatgcaagatagaacctgg

SEQ ID NO: 27674 - DNA, 21 bp, synthetic construct
  source 1..21: mol_type = other DNA
cttagcagagcgggtgaaaac

SEQ ID NO: 27675 - DNA, 21 bp, synthetic construct
  source 1..21: mol_type = other DNA
tttagccgtctgagcgcgaat

SEQ ID NO: 27676 - DNA, 21 bp, synthetic construct
  source 1..21: mol_type = other DNA
aaaaatgactatacggttttc

SEQ ID NO: 27677 - DNA, 21 bp, synthetic construct
  source 1..21: mol_type = other DNA
tactggaccggtgtccacgac

SEQ ID NO: 27678 - DNA, 21 bp, synthetic construct
  source 1..21: mol_type = other DNA
atgccaaatgaggggtggttc

SEQ ID NO: 27679 - DNA, 21 bp, synthetic construct
  source 1..21: mol_type = other DNA
ctgtgcgcaccttgtttaact

SEQ ID NO: 27680 - DNA, 21 bp, synthetic construct
  source 1..21: mol_type = other DNA
tatttttctgggcggagtgag

SEQ ID NO: 27681 - DNA, 21 bp, synthetic construct
  source 1..21: mol_type = other DNA
gtgagtgagttcgcgtcttat

SEQ ID NO: 27682 - DNA, 21 bp, synthetic construct
  source 1..21: mol_type = other DNA
tatcataggttgagcgaccac

SEQ ID NO: 27683 - DNA, 21 bp, synthetic construct
  source 1..21: mol_type = other DNA
aagtatgaccatgtggcgtgg

SEQ ID NO: 27684 - DNA, 21 bp, synthetic construct
  source 1..21: mol_type = other DNA
tacttctcaggacaacacgaa

SEQ ID NO: 27685 - DNA, 21 bp, synthetic construct
  source 1..21: mol_type = other DNA
gatatgacttccagtgtatgg

SEQ ID NO: 27686 - DNA, 21 bp, synthetic construct
  source 1..21: mol_type = other DNA
tatagtaagcacggaaataat

SEQ ID NO: 27687 - DNA, 21 bp, synthetic construct
  source 1..21: mol_type = other DNA
atgcacaggttgagcatggac

SEQ ID NO: 27688 - DNA, 21 bp, synthetic construct
  source 1..21: mol_type = other DNA
tggaccccaatgtgcaaaaac

SEQ ID NO: 27689 - DNA, 21 bp, synthetic construct
  source 1..21: mol_type = other DNA
tatttcagtgggaggattcag

SEQ ID NO: 27690 - DNA, 21 bp, synthetic construct
  source 1..21: mol_type = other DNA
tactttagcggtattcacaac

SEQ ID NO: 27691 - DNA, 21 bp, synthetic construct
  source 1..21: mol_type = other DNA
ctaactcgcatttcgagagat

SEQ ID NO: 27692 - DNA, 21 bp, synthetic construct
  source 1..21: mol_type = other DNA
tactcaaagagtggtcagaat

SEQ ID NO: 27693 - DNA, 21 bp, synthetic construct
  source 1..21: mol_type = other DNA
gatgacggtacaagtaagtgg

SEQ ID NO: 27694 - DNA, 21 bp, synthetic construct
  source 1..21: mol_type = other DNA
tatatcaaaggcgatctgttt

SEQ ID NO: 27695 - DNA, 21 bp, synthetic construct
  source 1..21: mol_type = other DNA
ggaggggccacatcccattgg

SEQ ID NO: 27696 - DNA, 21 bp, synthetic construct
  source 1..21: mol_type = other DNA
tatagcaggctgaatgtcaac

SEQ ID NO: 27697 - DNA, 21 bp, synthetic construct
  source 1..21: mol_type = other DNA
tattctcggataggtgataat

SEQ ID NO: 27698 - DNA, 21 bp, synthetic construct
  source 1..21: mol_type = other DNA
cgttccatggattcgtaccca

SEQ ID NO: 27699 - DNA, 21 bp, synthetic construct
  source 1..21: mol_type = other DNA
tacttttccggaatacatctc

SEQ ID NO: 27700 - DNA, 21 bp, synthetic construct
  source 1..21: mol_type = other DNA
tattctcgaataggcgtaaat

SEQ ID NO: 27701 - DNA, 21 bp, synthetic construct
  source 1..21: mol_type = other DNA
agaactcgcgaggtgtatcct

SEQ ID NO: 27702 - DNA, 21 bp, synthetic construct
  source 1..21: mol_type = other DNA
tactggaccgggatgttggaa

SEQ ID NO: 27703 - DNA, 21 bp, synthetic construct
  source 1..21: mol_type = other DNA
cgtgatgaatttaaaagtttt

SEQ ID NO: 27704 - DNA, 21 bp, synthetic construct
  source 1..21: mol_type = other DNA
tattttagcgggcaccatgag

SEQ ID NO: 27705 - DNA, 21 bp, synthetic construct
  source 1..21: mol_type = other DNA
ttgcaccgcatgacaccaaac

SEQ ID NO: 27706 - DNA, 21 bp, synthetic construct
  source 1..21: mol_type = other DNA
tacacacgacttgacagccac

SEQ ID NO: 27707 - DNA, 21 bp, synthetic construct
  source 1..21: mol_type = other DNA
tattttacaggttttctcgaa

SEQ ID NO: 27708 - DNA, 21 bp, synthetic construct
  source 1..21: mol_type = other DNA
ataatgccctctagaaattgg

SEQ ID NO: 27709 - DNA, 21 bp, synthetic construct
  source 1..21: mol_type = other DNA
ggagtggaggctgtaaggtgg

SEQ ID NO: 27710 - DNA, 21 bp, synthetic construct
  source 1..21: mol_type = other DNA
tgcaaaccagacgaagtaaga

SEQ ID NO: 27711 - DNA, 21 bp, synthetic construct
  source 1..21: mol_type = other DNA
gtgctctcccatgctacgtgg

SEQ ID NO: 27712 - DNA, 21 bp, synthetic construct
  source 1..21: mol_type = other DNA
ctcgcgcgtacaggttgcgac

SEQ ID NO: 27713 - DNA, 21 bp, synthetic construct
  source 1..21: mol_type = other DNA
tgcgctggatacttgcacgaa

SEQ ID NO: 27714 - DNA, 21 bp, synthetic construct
  source 1..21: mol_type = other DNA
accgaccttactgtatatagg

SEQ ID NO: 27715 - DNA, 21 bp, synthetic construct
  source 1..21: mol_type = other DNA
tgtggaggaggaagattacct

SEQ ID NO: 27716 - DNA, 21 bp, synthetic construct
  source 1..21: mol_type = other DNA
tacgcgcgttcaggtatgaac

SEQ ID NO: 27717 - DNA, 21 bp, synthetic construct
  source 1..21: mol_type = other DNA
tattatagtggtataacagca

SEQ ID NO: 27718 - DNA, 21 bp, synthetic construct
  source 1..21: mol_type = other DNA
ctcgcgaagacggggatgaac

SEQ ID NO: 27719 - DNA, 21 bp, synthetic construct
  source 1..21: mol_type = other DNA
tactcaaagcacaatgcaaat

SEQ ID NO: 27720 - DNA, 21 bp, synthetic construct
  source 1..21: mol_type = other DNA
ctgtgtaggccttgcagtgaa

SEQ ID NO: 27721 - DNA, 21 bp, synthetic construct
  source 1..21: mol_type = other DNA
agggcgtatgatgcgttccca

SEQ ID NO: 27722 - DNA, 21 bp, synthetic construct
  source 1..21: mol_type = other DNA
cggtctgaattcatgagtttc

SEQ ID NO: 27723 - DNA, 21 bp, synthetic construct
  source 1..21: mol_type = other DNA
cgtggtgagttttcaacctgg

SEQ ID NO: 27724 - DNA, 21 bp, synthetic construct
  source 1..21: mol_type = other DNA
tatttctcacaaattaaggaa

SEQ ID NO: 27725 - DNA, 21 bp, synthetic construct
  source 1..21: mol_type = other DNA
tactttacgggaactctgcag

SEQ ID NO: 27726 - DNA, 21 bp, synthetic construct
  source 1..21: mol_type = other DNA
gtgagtgactgggccccattc

SEQ ID NO: 27727 - DNA, 21 bp, synthetic construct
  source 1..21: mol_type = other DNA
tacgcacgcacaggtagcaac

SEQ ID NO: 27728 - DNA, 21 bp, synthetic construct
  source 1..21: mol_type = other DNA
cttgatggaaccagtcgttgg

SEQ ID NO: 27729 - DNA, 21 bp, synthetic construct
  source 1..21: mol_type = other DNA
tatgaatctaccaatggtcga

SEQ ID NO: 27730 - DNA, 21 bp, synthetic construct
  source 1..21: mol_type = other DNA
aaggatgagtggaagacatac

SEQ ID NO: 27731 - DNA, 21 bp, synthetic construct
  source 1..21: mol_type = other DNA
tacttgaagagccagggttat

SEQ ID NO: 27732 - DNA, 21 bp, synthetic construct
  source 1..21: mol_type = other DNA
tacttcaccggaaggagtgac

SEQ ID NO: 27733 - DNA, 21 bp, synthetic construct
  source 1..21: mol_type = other DNA
agcgacgggactagcaaatgg

SEQ ID NO: 27734 - DNA, 21 bp, synthetic construct
  source 1..21: mol_type = other DNA
ttttcccgaattggcgtgaat

SEQ ID NO: 27735 - DNA, 21 bp, synthetic construct
  source 1..21: mol_type = other DNA
tacttcgcaggtattctggct

SEQ ID NO: 27736 - DNA, 21 bp, synthetic construct
  source 1..21: mol_type = other DNA
tacttttcggggaagcgagag

SEQ ID NO: 27737 - DNA, 21 bp, synthetic construct
  source 1..21: mol_type = other DNA
tactttcacggccaaatagat

SEQ ID NO: 27738 - DNA, 21 bp, synthetic construct
  source 1..21: mol_type = other DNA
aaattgacggatcggacgtgg

SEQ ID NO: 27739 - DNA, 21 bp, synthetic construct
  source 1..21: mol_type = other DNA
ttagaaagcaccaacggtatc

SEQ ID NO: 27740 - DNA, 21 bp, synthetic construct
  source 1..21: mol_type = other DNA
tacgctaagaacggtcataat

SEQ ID NO: 27741 - DNA, 21 bp, synthetic construct
  source 1..21: mol_type = other DNA
tttttcacaggcaagatagaa

SEQ ID NO: 27742 - DNA, 21 bp, synthetic construct
  source 1..21: mol_type = other DNA
tgtaaacctccaagtcctatg

SEQ ID NO: 27743 - DNA, 21 bp, synthetic construct
  source 1..21: mol_type = other DNA
cttgccaaaatgggaccaaac

SEQ ID NO: 27744 - DNA, 21 bp, synthetic construct
  source 1..21: mol_type = other DNA
tactttacgggagttctcccg

SEQ ID NO: 27745 - DNA, 21 bp, synthetic construct
  source 1..21: mol_type = other DNA
ggaggggagtacagtacatgg

SEQ ID NO: 27746 - DNA, 21 bp, synthetic construct
  source 1..21: mol_type = other DNA
tatagtagaattcaaatggat

SEQ ID NO: 27747 - DNA, 21 bp, synthetic construct
  source 1..21: mol_type = other DNA
acctgggagggggacgcggca

SEQ ID NO: 27748 - DNA, 21 bp, synthetic construct
  source 1..21: mol_type = other DNA
caaaccgattgtgttaatcag

SEQ ID NO: 27749 - DNA, 21 bp, synthetic construct
  source 1..21: mol_type = other DNA
taccatcgcctgagtgcaaat

SEQ ID NO: 27750 - DNA, 21 bp, synthetic construct
  source 1..21: mol_type = other DNA
ccactctcgagtcagagctgg

SEQ ID NO: 27751 - DNA, 21 bp, synthetic construct
  source 1..21: mol_type = other DNA
tattcaaggctcggtcccgta

SEQ ID NO: 27752 - DNA, 21 bp, synthetic construct
  source 1..21: mol_type = other DNA
tatgtacattctcaaaactac

SEQ ID NO: 27753 - DNA, 21 bp, synthetic construct
  source 1..21: mol_type = other DNA
cttcacagaagttctaataac

SEQ ID NO: 27754 - DNA, 21 bp, synthetic construct
  source 1..21: mol_type = other DNA
tattttagcggtatgagagaa

SEQ ID NO: 27755 - DNA, 21 bp, synthetic construct
  source 1..21: mol_type = other DNA
tacagcagactgtcacctacc

SEQ ID NO: 27756 - DNA, 21 bp, synthetic construct
  source 1..21: mol_type = other DNA
tacttctcaggcacgactgat

SEQ ID NO: 27757 - DNA, 21 bp, synthetic construct
  source 1..21: mol_type = other DNA
gatccatcaagtgtgcgatgg

SEQ ID NO: 27758 - DNA, 21 bp, synthetic construct
  source 1..21: mol_type = other DNA
acatcagattatatgtcattt

SEQ ID NO: 27759 - DNA, 21 bp, synthetic construct
  source 1..21: mol_type = other DNA
ttgcatagatctggcgacaat

SEQ ID NO: 27760 - DNA, 21 bp, synthetic construct
  source 1..21: mol_type = other DNA
actgatggatactcttcatgg

SEQ ID NO: 27761 - DNA, 21 bp, synthetic construct
  source 1..21: mol_type = other DNA
tatagccggctgcaggagcgt

SEQ ID NO: 27762 - DNA, 21 bp, synthetic construct
  source 1..21: mol_type = other DNA
cgattagaatcgcaagtttgg

SEQ ID NO: 27763 - DNA, 21 bp, synthetic construct
  source 1..21: mol_type = other DNA
tgcaagccagagatgttaaga

SEQ ID NO: 27764 - DNA, 21 bp, synthetic construct
  source 1..21: mol_type = other DNA
tatagtaagtggaacgttaac

SEQ ID NO: 27765 - DNA, 21 bp, synthetic construct
  source 1..21: mol_type = other DNA
tacttcagcggcgtacctagt

SEQ ID NO: 27766 - DNA, 21 bp, synthetic construct
  source 1..21: mol_type = other DNA
tatttcaccggcgttagaagt

SEQ ID NO: 27767 - DNA, 21 bp, synthetic construct
  source 1..21: mol_type = other DNA
tgcaaacccgcgcagggatcg

SEQ ID NO: 27768 - DNA, 21 bp, synthetic construct
  source 1..21: mol_type = other DNA
tacggcgccaccaagtgcgac

SEQ ID NO: 27769 - DNA, 21 bp, synthetic construct
  source 1..21: mol_type = other DNA
tacttttcgggacaacaagat

SEQ ID NO: 27770 - DNA, 21 bp, synthetic construct
  source 1..21: mol_type = other DNA
tttagtcgtttgaacgagaat

SEQ ID NO: 27771 - DNA, 21 bp, synthetic construct
  source 1..21: mol_type = other DNA
ttttcgcgcatcggggaaaac

SEQ ID NO: 27772 - DNA, 21 bp, synthetic construct
  source 1..21: mol_type = other DNA
tggtgcaggtcccaggcgggg

SEQ ID NO: 27773 - DNA, 21 bp, synthetic construct
  source 1..21: mol_type = other DNA
ggctgccgtcatggagatatg

SEQ ID NO: 27774 - DNA, 21 bp, synthetic construct
  source 1..21: mol_type = other DNA
tactcgaagagtaattgtaac

SEQ ID NO: 27775 - DNA, 21 bp, synthetic construct
  source 1..21: mol_type = other DNA
tgtatgcccccttcgaaagaa

SEQ ID NO: 27776 - DNA, 21 bp, synthetic construct
  source 1..21: mol_type = other DNA
aagggtctcgaaggcatggat

SEQ ID NO: 27777 - DNA, 21 bp, synthetic construct
  source 1..21: mol_type = other DNA
tacttccacggagtcgtagag

SEQ ID NO: 27778 - DNA, 21 bp, synthetic construct
  source 1..21: mol_type = other DNA
acatgcatagccccagacaga

SEQ ID NO: 27779 - DNA, 21 bp, synthetic construct
  source 1..21: mol_type = other DNA
taccatcggcttagtgctaac

SEQ ID NO: 27780 - DNA, 21 bp, synthetic construct
  source 1..21: mol_type = other DNA
tacagtaggatccaggtagac

SEQ ID NO: 27781 - DNA, 21 bp, synthetic construct
  source 1..21: mol_type = other DNA
ttttctcgaattggactaaat

SEQ ID NO: 27782 - DNA, 21 bp, synthetic construct
  source 1..21: mol_type = other DNA
cgctccgacttcaaaatatac

SEQ ID NO: 27783 - DNA, 21 bp, synthetic construct
  source 1..21: mol_type = other DNA
agagacttagatgtctatcct

SEQ ID NO: 27784 - DNA, 21 bp, synthetic construct
  source 1..21: mol_type = other DNA
ttctcgagggttgggatgaac

SEQ ID NO: 27785 - DNA, 21 bp, synthetic construct
  source 1..21: mol_type = other DNA
tattttaccggcgcatgggat

SEQ ID NO: 27786 - DNA, 21 bp, synthetic construct
  source 1..21: mol_type = other DNA
acctcttcaaccaacggtatt

SEQ ID NO: 27787 - DNA, 21 bp, synthetic construct
  source 1..21: mol_type = other DNA
agaagtgatacaacttacccc

SEQ ID NO: 27788 - DNA, 21 bp, synthetic construct
  source 1..21: mol_type = other DNA
gacatgacggaccgaaaatgg

SEQ ID NO: 27789 - DNA, 21 bp, synthetic construct
  source 1..21: mol_type = other DNA
tacagtcgattaagtgccgat

SEQ ID NO: 27790 - DNA, 21 bp, synthetic construct
  source 1..21: mol_type = other DNA
tactggtcaaaagtgatggaa

SEQ ID NO: 27791 - DNA, 21 bp, synthetic construct
  source 1..21: mol_type = other DNA
tactttatgggaaagatcgcc

SEQ ID NO: 27792 - DNA, 21 bp, synthetic construct
  source 1..21: mol_type = other DNA
ggagatgagtggattcatttc

SEQ ID NO: 27793 - DNA, 21 bp, synthetic construct
  source 1..21: mol_type = other DNA
tactcaaaacggggggagaac

SEQ ID NO: 27794 - DNA, 21 bp, synthetic construct
  source 1..21: mol_type = other DNA
tacagccgaattaatgataac

SEQ ID NO: 27795 - DNA, 21 bp, synthetic construct
  source 1..21: mol_type = other DNA
ggaagtgaatacttgacctgg

SEQ ID NO: 27796 - DNA, 21 bp, synthetic construct
  source 1..21: mol_type = other DNA
tatttcactggggttgcggat

SEQ ID NO: 27797 - DNA, 21 bp, synthetic construct
  source 1..21: mol_type = other DNA
tatttcacaggcgtgtcgtca

SEQ ID NO: 27798 - DNA, 21 bp, synthetic construct
  source 1..21: mol_type = other DNA
tcggattttacatgcagggag

SEQ ID NO: 27799 - DNA, 21 bp, synthetic construct
  source 1..21: mol_type = other DNA
ggttctgatcatgttagatgg

SEQ ID NO: 27800 - DNA, 21 bp, synthetic construct
  source 1..21: mol_type = other DNA
tgcaaagatgagtatagagtc

SEQ ID NO: 27801 - DNA, 21 bp, synthetic construct
  source 1..21: mol_type = other DNA
tactttagtgggataacaggc

SEQ ID NO: 27802 - DNA, 21 bp, synthetic construct
  source 1..21: mol_type = other DNA
cccatggaatcaaagaagtgg

SEQ ID NO: 27803 - DNA, 21 bp, synthetic construct
  source 1..21: mol_type = other DNA
tacttcgctggtaaacacgag

SEQ ID NO: 27804 - DNA, 21 bp, synthetic construct
  source 1..21: mol_type = other DNA
caccagtcaacgaacggtatc

SEQ ID NO: 27805 - DNA, 21 bp, synthetic construct
  source 1..21: mol_type = other DNA
ttgagggatgggagcccagct

SEQ ID NO: 27806 - DNA, 21 bp, synthetic construct
  source 1..21: mol_type = other DNA
tatgcccgacttgggcacaat

SEQ ID NO: 27807 - DNA, 21 bp, synthetic construct
  source 1..21: mol_type = other DNA
tgcacttctcgtacgggccac

SEQ ID NO: 27808 - DNA, 21 bp, synthetic construct
  source 1..21: mol_type = other DNA
tttagtcgaatcggtggaggc

SEQ ID NO: 27809 - DNA, 21 bp, synthetic construct
  source 1..21: mol_type = other DNA
tacagccgcatccaaatcgat

SEQ ID NO: 27810 - DNA, 21 bp, synthetic construct
  source 1..21: mol_type = other DNA
gcacgttcgaccaatgggatc

SEQ ID NO: 27811 - DNA, 21 bp, synthetic construct
  source 1..21: mol_type = other DNA
gttatgtccgaccgcaggtgg

SEQ ID NO: 27812 - DNA, 21 bp, synthetic construct
  source 1..21: mol_type = other DNA
cgaggcgaatttgtgatgttc

SEQ ID NO: 27813 - DNA, 21 bp, synthetic construct
  source 1..21: mol_type = other DNA
tattttagcggtgttcagagc

SEQ ID NO: 27814 - DNA, 21 bp, synthetic construct
  source 1..21: mol_type = other DNA
tactggtcgggcgtcagagag

SEQ ID NO: 27815 - DNA, 21 bp, synthetic construct
  source 1..21: mol_type = other DNA
taccataagttgaatataacg

SEQ ID NO: 27816 - DNA, 21 bp, synthetic construct
  source 1..21: mol_type = other DNA
tacgtgcgatccgatactgcc

SEQ ID NO: 27817 - DNA, 21 bp, synthetic construct
  source 1..21: mol_type = other DNA
tattcacgctcggggcctaac

SEQ ID NO: 27818 - DNA, 21 bp, synthetic construct
  source 1..21: mol_type = other DNA
tattttagcggtcagacagac

SEQ ID NO: 27819 - DNA, 21 bp, synthetic construct
  source 1..21: mol_type = other DNA
taccacaagcaccaaacgaat

SEQ ID NO: 27820 - DNA, 21 bp, synthetic construct
  source 1..21: mol_type = other DNA
tacagtaagagtaacctcaat

SEQ ID NO: 27821 - DNA, 21 bp, synthetic construct
  source 1..21: mol_type = other DNA
ttggacggtacatcgaggtgg

SEQ ID NO: 27822 - DNA, 21 bp, synthetic construct
  source 1..21: mol_type = other DNA
ttttggagtgggataaaggag

SEQ ID NO: 27823 - DNA, 21 bp, synthetic construct
  source 1..21: mol_type = other DNA
tattttgccggaatattagca

SEQ ID NO: 27824 - DNA, 21 bp, synthetic construct
  source 1..21: mol_type = other DNA
acgattgcagatgcatatcca

SEQ ID NO: 27825 - DNA, 21 bp, synthetic construct
  source 1..21: mol_type = other DNA
tacagtcgtgttggccaaaac

SEQ ID NO: 27826 - DNA, 21 bp, synthetic construct
  source 1..21: mol_type = other DNA
tacttcagtggacgaacggcg

SEQ ID NO: 27827 - DNA, 21 bp, synthetic construct
  source 1..21: mol_type = other DNA
ttaagtaaagtaggggagaac

SEQ ID NO: 27828 - DNA, 21 bp, synthetic construct
  source 1..21: mol_type = other DNA
agacagtcaacgaatggcatc

SEQ ID NO: 27829 - DNA, 21 bp, synthetic construct
  source 1..21: mol_type = other DNA
tattacacagggattctagag

SEQ ID NO: 27830 - DNA, 21 bp, synthetic construct
  source 1..21: mol_type = other DNA
tacttcaccgggcgtttggtt

SEQ ID NO: 27831 - DNA, 21 bp, synthetic construct
  source 1..21: mol_type = other DNA
ttctcacgtgtgggttataat

SEQ ID NO: 27832 - DNA, 21 bp, synthetic construct
  source 1..21: mol_type = other DNA
tacacgaggataggtatgaac

SEQ ID NO: 27833 - DNA, 21 bp, synthetic construct
  source 1..21: mol_type = other DNA
cagaatgaattcagcacgtac

SEQ ID NO: 27834 - DNA, 21 bp, synthetic construct
  source 1..21: mol_type = other DNA
tactatacaggcaagctcgac

SEQ ID NO: 27835 - DNA, 21 bp, synthetic construct
  source 1..21: mol_type = other DNA
cgggatgggtactcagcgtgg

SEQ ID NO: 27836 - DNA, 21 bp, synthetic construct
  source 1..21: mol_type = other DNA
taccataggctcggcgataat

SEQ ID NO: 27837 - DNA, 21 bp, synthetic construct
  source 1..21: mol_type = other DNA
cactcctcgacaaacggtgcc

SEQ ID NO: 27838 - DNA, 21 bp, synthetic construct
  source 1..21: mol_type = other DNA
tattatacaggaaaggtcagt

SEQ ID NO: 27839 - DNA, 21 bp, synthetic construct
  source 1..21: mol_type = other DNA
cacgattcaacaaacggaaga

SEQ ID NO: 27840 - DNA, 21 bp, synthetic construct
  source 1..21: mol_type = other DNA
tatgccaaaggaaatcacaat

SEQ ID NO: 27841 - DNA, 21 bp, synthetic construct
  source 1..21: mol_type = other DNA
tacttctccggagttaccaat

SEQ ID NO: 27842 - DNA, 21 bp, synthetic construct
  source 1..21: mol_type = other DNA
gacatgtcttcggtggcgtgg

SEQ ID NO: 27843 - DNA, 21 bp, synthetic construct
  source 1..21: mol_type = other DNA
gtgatgagtgatagacgctgg

SEQ ID NO: 27844 - DNA, 21 bp, synthetic construct
  source 1..21: mol_type = other DNA
ttcagtagattatcacccctc

SEQ ID NO: 27845 - DNA, 21 bp, synthetic construct
  source 1..21: mol_type = other DNA
tactttacaggcagaaccgac

SEQ ID NO: 27846 - DNA, 21 bp, synthetic construct
  source 1..21: mol_type = other DNA
tgtaaacctcaatcaggttgg

SEQ ID NO: 27847 - DNA, 21 bp, synthetic construct
  source 1..21: mol_type = other DNA
tacagccggattcaagccgac

SEQ ID NO: 27848 - DNA, 21 bp, synthetic construct
  source 1..21: mol_type = other DNA
tatgtccggtccgattcgcgt

SEQ ID NO: 27849 - DNA, 21 bp, synthetic construct
  source 1..21: mol_type = other DNA
agagaggagtgggttgcatat

SEQ ID NO: 27850 - DNA, 21 bp, synthetic construct
  source 1..21: mol_type = other DNA
tacgcacgtaatggccctaac

SEQ ID NO: 27851 - DNA, 21 bp, synthetic construct
  source 1..21: mol_type = other DNA
gggggtgatggtaatcactat

SEQ ID NO: 27852 - DNA, 21 bp, synthetic construct
  source 1..21: mol_type = other DNA
taccaccgcctctcaccggag

SEQ ID NO: 27853 - DNA, 21 bp, synthetic construct
  source 1..21: mol_type = other DNA
caggatggctattcaaagtac

SEQ ID NO: 27854 - DNA, 21 bp, synthetic construct
  source 1..21: mol_type = other DNA
ctctcacgcacctcaatagat

SEQ ID NO: 27855 - DNA, 21 bp, synthetic construct
  source 1..21: mol_type = other DNA
ttgcaccgagcatcgtccaac

SEQ ID NO: 27856 - DNA, 21 bp, synthetic construct
  source 1..21: mol_type = other DNA
tacagcaagttatctgatttg

SEQ ID NO: 27857 - DNA, 21 bp, synthetic construct
  source 1..21: mol_type = other DNA
tacttttcaggtattcatgta

SEQ ID NO: 27858 - DNA, 21 bp, synthetic construct
  source 1..21: mol_type = other DNA
tattacactgggcgtgtggat

SEQ ID NO: 27859 - DNA, 21 bp, synthetic construct
  source 1..21: mol_type = other DNA
tactctaggatcggctttgac

SEQ ID NO: 27860 - DNA, 21 bp, synthetic construct
  source 1..21: mol_type = other DNA
tactttagtggccgacatgaa

SEQ ID NO: 27861 - DNA, 21 bp, synthetic construct
  source 1..21: mol_type = other DNA
atgcatcgactttcaatggat

SEQ ID NO: 27862 - DNA, 21 bp, synthetic construct
  source 1..21: mol_type = other DNA
cgtgaggagttcacaacatgg

SEQ ID NO: 27863 - DNA, 21 bp, synthetic construct
  source 1..21: mol_type = other DNA
tattacagtggggtccttgct

SEQ ID NO: 27864 - DNA, 21 bp, synthetic construct
  source 1..21: mol_type = other DNA
tacgcgcgcggaggttcaaac

SEQ ID NO: 27865 - DNA, 21 bp, synthetic construct
  source 1..21: mol_type = other DNA
tctaaaagtacgaatggcgtc

SEQ ID NO: 27866 - DNA, 21 bp, synthetic construct
  source 1..21: mol_type = other DNA
cttacgcgtctccagagcaac

SEQ ID NO: 27867 - DNA, 21 bp, synthetic construct
  source 1..21: mol_type = other DNA
ccatacgcacgaagtcccgcc

SEQ ID NO: 27868 - DNA, 21 bp, synthetic construct
  source 1..21: mol_type = other DNA
tattttagcaagatcgccgca

SEQ ID NO: 27869 - DNA, 21 bp, synthetic construct
  source 1..21: mol_type = other DNA
tacttctccggccagatacta

SEQ ID NO: 27870 - DNA, 21 bp, synthetic construct
  source 1..21: mol_type = other DNA
tactttacgggccgccaggat

SEQ ID NO: 27871 - DNA, 21 bp, synthetic construct
  source 1..21: mol_type = other DNA
tgtaagcgacagtcggaatgg

SEQ ID NO: 27872 - DNA, 21 bp, synthetic construct
  source 1..21: mol_type = other DNA
atacggtcaacgaatggcata

SEQ ID NO: 27873 - DNA, 21 bp, synthetic construct
  source 1..21: mol_type = other DNA
ttggcgaaatcaggctgtaat

SEQ ID NO: 27874 - DNA, 21 bp, synthetic construct
  source 1..21: mol_type = other DNA
gggtgcggtactaaaccgggc

SEQ ID NO: 27875 - DNA, 21 bp, synthetic construct
  source 1..21: mol_type = other DNA
atagtgagcaccaatgggatt

SEQ ID NO: 27876 - DNA, 21 bp, synthetic construct
  source 1..21: mol_type = other DNA
tattacactggtgttaaaaat

SEQ ID NO: 27877 - DNA, 21 bp, synthetic construct
  source 1..21: mol_type = other DNA
tatagcagagttgggagtgga

SEQ ID NO: 27878 - DNA, 21 bp, synthetic construct
  source 1..21: mol_type = other DNA
gtaccagactttgttaaatgg

SEQ ID NO: 27879 - DNA, 21 bp, synthetic construct
  source 1..21: mol_type = other DNA
tactatacaggggtcatggca

SEQ ID NO: 27880 - DNA, 21 bp, synthetic construct
  source 1..21: mol_type = other DNA
caccactcgacgaatggtgta

SEQ ID NO: 27881 - DNA, 21 bp, synthetic construct
  source 1..21: mol_type = other DNA
catagcaaaatgaattataac

SEQ ID NO: 27882 - DNA, 21 bp, synthetic construct
  source 1..21: mol_type = other DNA
tatagccgtttaggcaaggac

SEQ ID NO: 27883 - DNA, 21 bp, synthetic construct
  source 1..21: mol_type = other DNA
tactggaccggcaagatcgca

SEQ ID NO: 27884 - DNA, 21 bp, synthetic construct
  source 1..21: mol_type = other DNA
tacgcgcgtattggaatgaat

SEQ ID NO: 27885 - DNA, 21 bp, synthetic construct
  source 1..21: mol_type = other DNA
tacagcactaattgcaaatcc

SEQ ID NO: 27886 - DNA, 21 bp, synthetic construct
  source 1..21: mol_type = other DNA
tacacgcggctacaaactggg

SEQ ID NO: 27887 - DNA, 21 bp, synthetic construct
  source 1..21: mol_type = other DNA
agagagagcactaacggtatc

SEQ ID NO: 27888 - DNA, 21 bp, synthetic construct
  source 1..21: mol_type = other DNA
tattttagcggagtaactcgt

SEQ ID NO: 27889 - DNA, 21 bp, synthetic construct
  source 1..21: mol_type = other DNA
cgagacgagtccagctattgg

SEQ ID NO: 27890 - DNA, 21 bp, synthetic construct
  source 1..21: mol_type = other DNA
ggttccgagtttagtcggtgg

SEQ ID NO: 27891 - DNA, 21 bp, synthetic construct
  source 1..21: mol_type = other DNA
agggatggaaactcctcctgg

SEQ ID NO: 27892 - DNA, 21 bp, synthetic construct
  source 1..21: mol_type = other DNA
tatttttcaggagttgtcagg

SEQ ID NO: 27893 - DNA, 21 bp, synthetic construct
  source 1..21: mol_type = other DNA
ttcagccgagttggagaaaac

SEQ ID NO: 27894 - DNA, 21 bp, synthetic construct
  source 1..21: mol_type = other DNA
tattctaagcataatacaaat

SEQ ID NO: 27895 - DNA, 21 bp, synthetic construct
  source 1..21: mol_type = other DNA
atcgattcaaccaacggaatc

SEQ ID NO: 27896 - DNA, 21 bp, synthetic construct
  source 1..21: mol_type = other DNA
ttcgacagcacaaacgggaga

SEQ ID NO: 27897 - DNA, 21 bp, synthetic construct
  source 1..21: mol_type = other DNA
tatgctaggactggccaaaat

SEQ ID NO: 27898 - DNA, 21 bp, synthetic construct
  source 1..21: mol_type = other DNA
ggtagcgaccacgtgagatgg

SEQ ID NO: 27899 - DNA, 21 bp, synthetic construct
  source 1..21: mol_type = other DNA
agggggtcagacgttttcccc

SEQ ID NO: 27900 - DNA, 21 bp, synthetic construct
  source 1..21: mol_type = other DNA
aaagacgggtacagtggatgg

SEQ ID NO: 27901 - DNA, 21 bp, synthetic construct
  source 1..21: mol_type = other DNA
ctacaccgtagcggtgataac

SEQ ID NO: 27902 - DNA, 21 bp, synthetic construct
  source 1..21: mol_type = other DNA
tacagtcgcttaaatggactc

SEQ ID NO: 27903 - DNA, 21 bp, synthetic construct
  source 1..21: mol_type = other DNA
cgtaatgagttctgcacgttc

SEQ ID NO: 27904 - DNA, 21 bp, synthetic construct
  source 1..21: mol_type = other DNA
tactccaagcttaacgttgtc

SEQ ID NO: 27905 - DNA, 21 bp, synthetic construct
  source 1..21: mol_type = other DNA
gaactgagcagtataaagtgg

SEQ ID NO: 27906 - DNA, 21 bp, synthetic construct
  source 1..21: mol_type = other DNA
ccaatgagtgtgtctaaatgg

SEQ ID NO: 27907 - DNA, 21 bp, synthetic construct
  source 1..21: mol_type = other DNA
tatcaccgccttggaggcgat

SEQ ID NO: 27908 - DNA, 21 bp, synthetic construct
  source 1..21: mol_type = other DNA
tatttctctgggaaaagtagt

SEQ ID NO: 27909 - DNA, 21 bp, synthetic construct
  source 1..21: mol_type = other DNA
tatcacaggcttagtgacaat

SEQ ID NO: 27910 - DNA, 21 bp, synthetic construct
  source 1..21: mol_type = other DNA
tattccagacatggcccgaat

SEQ ID NO: 27911 - DNA, 21 bp, synthetic construct
  source 1..21: mol_type = other DNA
tgtgcgccagactatagacaa

SEQ ID NO: 27912 - DNA, 21 bp, synthetic construct
  source 1..21: mol_type = other DNA
cgcacagattgtgtttatcct

SEQ ID NO: 27913 - DNA, 21 bp, synthetic construct
  source 1..21: mol_type = other DNA
ttaagccgtatgaattacaat

SEQ ID NO: 27914 - DNA, 21 bp, synthetic construct
  source 1..21: mol_type = other DNA
cgggcattggatggttgggat

SEQ ID NO: 27915 - DNA, 21 bp, synthetic construct
  source 1..21: mol_type = other DNA
agagacgaatttgaacattgg

SEQ ID NO: 27916 - DNA, 21 bp, synthetic construct
  source 1..21: mol_type = other DNA
aaagacggttattctttgtat

SEQ ID NO: 27917 - DNA, 21 bp, synthetic construct
  source 1..21: mol_type = other DNA
cgtagcgagtttcactcattt

SEQ ID NO: 27918 - DNA, 21 bp, synthetic construct
  source 1..21: mol_type = other DNA
tatttcagcggtaaacgtgaa

SEQ ID NO: 27919 - DNA, 21 bp, synthetic construct
  source 1..21: mol_type = other DNA
atcgcgtatgacgcgtaccca

SEQ ID NO: 27920 - DNA, 21 bp, synthetic construct
  source 1..21: mol_type = other DNA
gatatgggggcttcctcatgg

SEQ ID NO: 27921 - DNA, 21 bp, synthetic construct
  source 1..21: mol_type = other DNA
atccttgagagtcgagactgg

SEQ ID NO: 27922 - DNA, 21 bp, synthetic construct
  source 1..21: mol_type = other DNA
tatgcccgttccggtacaaac

SEQ ID NO: 27923 - DNA, 21 bp, synthetic construct
  source 1..21: mol_type = other DNA
ttttcgagagtaggattcaac

SEQ ID NO: 27924 - DNA, 21 bp, synthetic construct
  source 1..21: mol_type = other DNA
agtatgcaggatcgtttttgg

SEQ ID NO: 27925 - DNA, 21 bp, synthetic construct
  source 1..21: mol_type = other DNA
tattggagcgggacgattgac

SEQ ID NO: 27926 - DNA, 21 bp, synthetic construct
  source 1..21: mol_type = other DNA
caagacggtacgagtgcatgg

SEQ ID NO: 27927 - DNA, 21 bp, synthetic construct
  source 1..21: mol_type = other DNA
atcgaaggtcgtgggtgggat

SEQ ID NO: 27928 - DNA, 21 bp, synthetic construct
  source 1..21: mol_type = other DNA
tatagtcgtctacagagcaat

SEQ ID NO: 27929 - DNA, 21 bp, synthetic construct
  source 1..21: mol_type = other DNA
tattttacagggcgtacttca

SEQ ID NO: 27930 - DNA, 21 bp, synthetic construct
  source 1..21: mol_type = other DNA
gttagcgagttcgagattttc

SEQ ID NO: 27931 - DNA, 21 bp, synthetic construct
  source 1..21: mol_type = other DNA
cgggacgaattcagaacttat

SEQ ID NO: 27932 - DNA, 21 bp, synthetic construct
  source 1..21: mol_type = other DNA
tatagccggataggtccccat

SEQ ID NO: 27933 - DNA, 21 bp, synthetic construct
  source 1..21: mol_type = other DNA
tacgcacggtctggcgagaat

SEQ ID NO: 27934 - DNA, 21 bp, synthetic construct
  source 1..21: mol_type = other DNA
cgcatgcctgacagaggatgg

SEQ ID NO: 27935 - DNA, 21 bp, synthetic construct
  source 1..21: mol_type = other DNA
tatcataagctgcaagttttc

SEQ ID NO: 27936 - DNA, 21 bp, synthetic construct
  source 1..21: mol_type = other DNA
tactttacggggtttgcagaa

SEQ ID NO: 27937 - DNA, 21 bp, synthetic construct
  source 1..21: mol_type = other DNA
ataatgagtgagcgcgtatgg

SEQ ID NO: 27938 - DNA, 21 bp, synthetic construct
  source 1..21: mol_type = other DNA
gatttactcagcgcgaaatgg

SEQ ID NO: 27939 - DNA, 21 bp, synthetic construct
  source 1..21: mol_type = other DNA
tacgccaaacagtctcgaaac

SEQ ID NO: 27940 - DNA, 21 bp, synthetic construct
  source 1..21: mol_type = other DNA
tgcaaacccgatgcattaagg

SEQ ID NO: 27941 - DNA, 21 bp, synthetic construct
  source 1..21: mol_type = other DNA
tactttgctggaaaatacgat

SEQ ID NO: 27942 - DNA, 21 bp, synthetic construct
  source 1..21: mol_type = other DNA
tatgttagaagtgattccagt

SEQ ID NO: 27943 - DNA, 21 bp, synthetic construct
  source 1..21: mol_type = other DNA
gatctcagggaccgtacgtgg

SEQ ID NO: 27944 - DNA, 21 bp, synthetic construct
  source 1..21: mol_type = other DNA
tactcacgattgcaatctgac

SEQ ID NO: 27945 - DNA, 21 bp, synthetic construct
  source 1..21: mol_type = other DNA
tactggaccggggtacaggat

SEQ ID NO: 27946 - DNA, 21 bp, synthetic construct
  source 1..21: mol_type = other DNA
tacagcagaattggctgcaat

SEQ ID NO: 27947 - DNA, 21 bp, synthetic construct
  source 1..21: mol_type = other DNA
gtaatgggctcctcaaactgg

SEQ ID NO: 27948 - DNA, 21 bp, synthetic construct
  source 1..21: mol_type = other DNA
ggggtcaccgcggtaaaatgg

SEQ ID NO: 27949 - DNA, 21 bp, synthetic construct
  source 1..21: mol_type = other DNA
gtttcggaattccagagctat

SEQ ID NO: 27950 - DNA, 21 bp, synthetic construct
  source 1..21: mol_type = other DNA
tatgccaagacaggatgtaac

SEQ ID NO: 27951 - DNA, 21 bp, synthetic construct
  source 1..21: mol_type = other DNA
gttatggaggatcgtaattgg

SEQ ID NO: 27952 - DNA, 21 bp, synthetic construct
  source 1..21: mol_type = other DNA
tacttcactggcaaattggtg

SEQ ID NO: 27953 - DNA, 21 bp, synthetic construct
  source 1..21: mol_type = other DNA
tgtaagaaagacgaggcagtt

SEQ ID NO: 27954 - DNA, 21 bp, synthetic construct
  source 1..21: mol_type = other DNA
tactggagtaccatcaaagag

SEQ ID NO: 27955 - DNA, 21 bp, synthetic construct
  source 1..21: mol_type = other DNA
agttgtatgaacgtagctcct

SEQ ID NO: 27956 - DNA, 21 bp, synthetic construct
  source 1..21: mol_type = other DNA
tactggacgggcacccatgaa

SEQ ID NO: 27957 - DNA, 21 bp, synthetic construct
  source 1..21: mol_type = other DNA
agggatggatctagcgcctgg

SEQ ID NO: 27958 - DNA, 21 bp, synthetic construct
  source 1..21: mol_type = other DNA
tgtaaggaggggaccagaggc

SEQ ID NO: 27959 - DNA, 21 bp, synthetic construct
  source 1..21: mol_type = other DNA
ggatgcggtacaaaggtgggg

SEQ ID NO: 27960 - DNA, 21 bp, synthetic construct
  source 1..21: mol_type = other DNA
cggatgagtgacgcatacgca

SEQ ID NO: 27961 - DNA, 21 bp, synthetic construct
  source 1..21: mol_type = other DNA
gggagtgacttctcacgttgg

SEQ ID NO: 27962 - DNA, 21 bp, synthetic construct
  source 1..21: mol_type = other DNA
tgtaagccgctcatgagtcct

SEQ ID NO: 27963 - DNA, 21 bp, synthetic construct
  source 1..21: mol_type = other DNA
tctactgattatgtctcttgg

SEQ ID NO: 27964 - DNA, 21 bp, synthetic construct
  source 1..21: mol_type = other DNA
tctacctatgacagttacccc

SEQ ID NO: 27965 - DNA, 21 bp, synthetic construct
  source 1..21: mol_type = other DNA
tattggagcgggataccagaa

SEQ ID NO: 27966 - DNA, 21 bp, synthetic construct
  source 1..21: mol_type = other DNA
tactccaggattcaaccaatg

SEQ ID NO: 27967 - DNA, 21 bp, synthetic construct
  source 1..21: mol_type = other DNA
taccataggcttggacagaac

SEQ ID NO: 27968 - DNA, 21 bp, synthetic construct
  source 1..21: mol_type = other DNA
tattcaaggatccaagccaat

SEQ ID NO: 27969 - DNA, 21 bp, synthetic construct
  source 1..21: mol_type = other DNA
aatggtattaatgggcgctgg

SEQ ID NO: 27970 - DNA, 21 bp, synthetic construct
  source 1..21: mol_type = other DNA
tttttcacgggacggttggaa

SEQ ID NO: 27971 - DNA, 21 bp, synthetic construct
  source 1..21: mol_type = other DNA
aggtacgaaccgaagtgtccg

SEQ ID NO: 27972 - DNA, 21 bp, synthetic construct
  source 1..21: mol_type = other DNA
tactttaccggcagaacggat

SEQ ID NO: 27973 - DNA, 21 bp, synthetic construct
  source 1..21: mol_type = other DNA
tattatagcggtgtgattgcg

SEQ ID NO: 27974 - DNA, 21 bp, synthetic construct
  source 1..21: mol_type = other DNA
tttatctcgacaaatggtgta

SEQ ID NO: 27975 - DNA, 21 bp, synthetic construct
  source 1..21: mol_type = other DNA
tactggacggggaaagttgag

SEQ ID NO: 27976 - DNA, 21 bp, synthetic construct
  source 1..21: mol_type = other DNA
tatgctagaagcggccagaat

SEQ ID NO: 27977 - DNA, 21 bp, synthetic construct
  source 1..21: mol_type = other DNA
tactttacaggcatggcaaat

SEQ ID NO: 27978 - DNA, 21 bp, synthetic construct
  source 1..21: mol_type = other DNA
aagtccgagttcaggagtttt

SEQ ID NO: 27979 - DNA, 21 bp, synthetic construct
  source 1..21: mol_type = other DNA
tattcaaggctaaataatctc

SEQ ID NO: 27980 - DNA, 21 bp, synthetic construct
  source 1..21: mol_type = other DNA
tgtagaccgggggagccatac

SEQ ID NO: 27981 - DNA, 21 bp, synthetic construct
  source 1..21: mol_type = other DNA
acgtggagcacgaacggagtt

SEQ ID NO: 27982 - DNA, 21 bp, synthetic construct
  source 1..21: mol_type = other DNA
taccttaagtcaccatgcgca

SEQ ID NO: 27983 - DNA, 21 bp, synthetic construct
  source 1..21: mol_type = other DNA
ggaccggaaaccgttaggtgg

SEQ ID NO: 27984 - DNA, 21 bp, synthetic construct
  source 1..21: mol_type = other DNA
actgactcaacgaacggaatt

SEQ ID NO: 27985 - DNA, 21 bp, synthetic construct
  source 1..21: mol_type = other DNA
tattgggcgggaatagtggat

SEQ ID NO: 27986 - DNA, 21 bp, synthetic construct
  source 1..21: mol_type = other DNA
ttcgcacggacagggctcaat

SEQ ID NO: 27987 - DNA, 21 bp, synthetic construct
  source 1..21: mol_type = other DNA
cgcatggatagtgccgcgtgg

SEQ ID NO: 27988 - DNA, 21 bp, synthetic construct
  source 1..21: mol_type = other DNA
tatttttcaggagttcgcgcg

SEQ ID NO: 27989 - DNA, 21 bp, synthetic construct
  source 1..21: mol_type = other DNA
aggtcggagtttatgacttac

SEQ ID NO: 27990 - DNA, 21 bp, synthetic construct
  source 1..21: mol_type = other DNA
tactctcgagttggggacgga

SEQ ID NO: 27991 - DNA, 21 bp, synthetic construct
  source 1..21: mol_type = other DNA
tttagtcggcttaacaataat

SEQ ID NO: 27992 - DNA, 21 bp, synthetic construct
  source 1..21: mol_type = other DNA
taccataggttaggcggggac

SEQ ID NO: 27993 - DNA, 21 bp, synthetic construct
  source 1..21: mol_type = other DNA
ttgtgtaagggatcattggac

SEQ ID NO: 27994 - DNA, 21 bp, synthetic construct
  source 1..21: mol_type = other DNA
tattgggctggtgtcagggag

SEQ ID NO: 27995 - DNA, 21 bp, synthetic construct
  source 1..21: mol_type = other DNA
cgctctgatttcacgacatac

SEQ ID NO: 27996 - DNA, 21 bp, synthetic construct
  source 1..21: mol_type = other DNA
tactcgagaataggtggtaac

SEQ ID NO: 27997 - DNA, 21 bp, synthetic construct
  source 1..21: mol_type = other DNA
tacttctcaggtatacattct

SEQ ID NO: 27998 - DNA, 21 bp, synthetic construct
  source 1..21: mol_type = other DNA
tacttttcaaggattcaggaa

SEQ ID NO: 27999 - DNA, 21 bp, synthetic construct
  source 1..21: mol_type = other DNA
tacttcagcggacgtcaggag

SEQ ID NO: 28000 - DNA, 21 bp, synthetic construct
  source 1..21: mol_type = other DNA
tatagcaaggccggatatgac

SEQ ID NO: 28001 - DNA, 21 bp, synthetic construct
  source 1..21: mol_type = other DNA
cgcactcccactactttccct

SEQ ID NO: 28002 - DNA, 21 bp, synthetic construct
  source 1..21: mol_type = other DNA
tactggagtggcgtccgtgaa

SEQ ID NO: 28003 - DNA, 21 bp, synthetic construct
  source 1..21: mol_type = other DNA
gggtgtcggcaccctgatatc

SEQ ID NO: 28004 - DNA, 21 bp, synthetic construct
  source 1..21: mol_type = other DNA
tactggagcggcacgatcgct

SEQ ID NO: 28005 - DNA, 21 bp, synthetic construct
  source 1..21: mol_type = other DNA
atagattccactaacggcata

SEQ ID NO: 28006 - DNA, 21 bp, synthetic construct
  source 1..21: mol_type = other DNA
tatagcaggataggtgctggg

SEQ ID NO: 28007 - DNA, 21 bp, synthetic construct
  source 1..21: mol_type = other DNA
tatgctcgcgccggagcgaat

SEQ ID NO: 28008 - DNA, 21 bp, synthetic construct
  source 1..21: mol_type = other DNA
tgtaggcctgacgttaaaact

SEQ ID NO: 28009 - DNA, 21 bp, synthetic construct
  source 1..21: mol_type = other DNA
gggtgcaggacaggagacata

SEQ ID NO: 28010 - DNA, 21 bp, synthetic construct
  source 1..21: mol_type = other DNA
tatgtcaaaagtcaattggtt

SEQ ID NO: 28011 - DNA, 21 bp, synthetic construct
  source 1..21: mol_type = other DNA
tggttcactggtagggtagac

SEQ ID NO: 28012 - DNA, 21 bp, synthetic construct
  source 1..21: mol_type = other DNA
gctatggcagacagggagtgg

SEQ ID NO: 28013 - DNA, 21 bp, synthetic construct
  source 1..21: mol_type = other DNA
tacgtaaagtcagatcgagtt

SEQ ID NO: 28014 - DNA, 21 bp, synthetic construct
  source 1..21: mol_type = other DNA
tattggtctggaaccattgcc

SEQ ID NO: 28015 - DNA, 21 bp, synthetic construct
  source 1..21: mol_type = other DNA
ttctcgcggctgaaccagaat

SEQ ID NO: 28016 - DNA, 21 bp, synthetic construct
  source 1..21: mol_type = other DNA
tattctaggctccacgcgaat

SEQ ID NO: 28017 - DNA, 21 bp, synthetic construct
  source 1..21: mol_type = other DNA
ctcagccgcacggcattcgat

SEQ ID NO: 28018 - DNA, 21 bp, synthetic construct
  source 1..21: mol_type = other DNA
tatagccgcatccttccgaat

SEQ ID NO: 28019 - DNA, 21 bp, synthetic construct
  source 1..21: mol_type = other DNA
aaggaagagtactgtaagccc

SEQ ID NO: 28020 - DNA, 21 bp, synthetic construct
  source 1..21: mol_type = other DNA
tatttcagcggcaaacacgac

SEQ ID NO: 28021 - DNA, 21 bp, synthetic construct
  source 1..21: mol_type = other DNA
tatttcgccggcattatcgaa

SEQ ID NO: 28022 - DNA, 21 bp, synthetic construct
  source 1..21: mol_type = other DNA
tttttcagtggcaagatcgat

SEQ ID NO: 28023 - DNA, 21 bp, synthetic construct
  source 1..21: mol_type = other DNA
cgtctcgagagcgtctcatgg

SEQ ID NO: 28024 - DNA, 21 bp, synthetic construct
  source 1..21: mol_type = other DNA
tactcgaaaattggatttgat

SEQ ID NO: 28025 - DNA, 21 bp, synthetic construct
  source 1..21: mol_type = other DNA
ttttttagcgggcaagtagat

SEQ ID NO: 28026 - DNA, 21 bp, synthetic construct
  source 1..21: mol_type = other DNA
tatgcacgtacctcgccaatg

SEQ ID NO: 28027 - DNA, 21 bp, synthetic construct
  source 1..21: mol_type = other DNA
cgagatgactatgtgagctgg

SEQ ID NO: 28028 - DNA, 21 bp, synthetic construct
  source 1..21: mol_type = other DNA
atgtgggacggaaccgcggcg

SEQ ID NO: 28029 - DNA, 21 bp, synthetic construct
  source 1..21: mol_type = other DNA
ttcacctcgacgaacgggata

SEQ ID NO: 28030 - DNA, 21 bp, synthetic construct
  source 1..21: mol_type = other DNA
gttaattccagtaacgggaga

SEQ ID NO: 28031 - DNA, 21 bp, synthetic construct
  source 1..21: mol_type = other DNA
tactatacaggaaagcaagac

SEQ ID NO: 28032 - DNA, 21 bp, synthetic construct
  source 1..21: mol_type = other DNA
atgtgggacgggactgatgcg

SEQ ID NO: 28033 - DNA, 21 bp, synthetic construct
  source 1..21: mol_type = other DNA
ctcctttcttcggctgattgg

SEQ ID NO: 28034 - DNA, 21 bp, synthetic construct
  source 1..21: mol_type = other DNA
tattttacgggcaagcccgaa

SEQ ID NO: 28035 - DNA, 21 bp, synthetic construct
  source 1..21: mol_type = other DNA
aaggacgattggacaccatat

SEQ ID NO: 28036 - DNA, 21 bp, synthetic construct
  source 1..21: mol_type = other DNA
tactttcacggggtcacagaa

SEQ ID NO: 28037 - DNA, 21 bp, synthetic construct
  source 1..21: mol_type = other DNA
gcccatagcacaaacggtgta

SEQ ID NO: 28038 - DNA, 21 bp, synthetic construct
  source 1..21: mol_type = other DNA
gtggcgtcgaagggagctggc

SEQ ID NO: 28039 - DNA, 21 bp, synthetic construct
  source 1..21: mol_type = other DNA
ctatgtagaccctgtatggaa

SEQ ID NO: 28040 - DNA, 21 bp, synthetic construct
  source 1..21: mol_type = other DNA
agggacggacagagttcgtgg

SEQ ID NO: 28041 - DNA, 21 bp, synthetic construct
  source 1..21: mol_type = other DNA
cgcatggaggataggcagtgg

SEQ ID NO: 28042 - DNA, 21 bp, synthetic construct
  source 1..21: mol_type = other DNA
ttctttagtgggaagatagaa

SEQ ID NO: 28043 - DNA, 21 bp, synthetic construct
  source 1..21: mol_type = other DNA
tactccaaaaagaacgtcaac

SEQ ID NO: 28044 - DNA, 21 bp, synthetic construct
  source 1..21: mol_type = other DNA
cttagcagaatagcgaacaat

SEQ ID NO: 28045 - DNA, 21 bp, synthetic construct
  source 1..21: mol_type = other DNA
cgcgaggagatggtctcctgg

SEQ ID NO: 28046 - DNA, 21 bp, synthetic construct
  source 1..21: mol_type = other DNA
atcccctatgaaggtataggg

SEQ ID NO: 28047 - DNA, 21 bp, synthetic construct
  source 1..21: mol_type = other DNA
tattccaaaaataactacaat

SEQ ID NO: 28048 - DNA, 21 bp, synthetic construct
  source 1..21: mol_type = other DNA
accggctctaccaacgggata

SEQ ID NO: 28049 - DNA, 21 bp, synthetic construct
  source 1..21: mol_type = other DNA
ctggctagaactggttgggac

SEQ ID NO: 28050 - DNA, 21 bp, synthetic construct
  source 1..21: mol_type = other DNA
tattttagtgggaagaacgat

SEQ ID NO: 28051 - DNA, 21 bp, synthetic construct
  source 1..21: mol_type = other DNA
tttgcgaggaccggcttcaac

SEQ ID NO: 28052 - DNA, 21 bp, synthetic construct
  source 1..21: mol_type = other DNA
tattacacggggattcaggct

SEQ ID NO: 28053 - DNA, 21 bp, synthetic construct
  source 1..21: mol_type = other DNA
ctccataaactcggagacgat

SEQ ID NO: 28054 - DNA, 21 bp, synthetic construct
  source 1..21: mol_type = other DNA
tatcataagttgcagtatgga

SEQ ID NO: 28055 - DNA, 21 bp, synthetic construct
  source 1..21: mol_type = other DNA
tattggcaaggtatcaaggaa

SEQ ID NO: 28056 - DNA, 21 bp, synthetic construct
  source 1..21: mol_type = other DNA
ttttttacgggttataaagaa

SEQ ID NO: 28057 - DNA, 21 bp, synthetic construct
  source 1..21: mol_type = other DNA
cgctctgactttgttacgtat

SEQ ID NO: 28058 - DNA, 21 bp, synthetic construct
  source 1..21: mol_type = other DNA
aatttagaatcgagagggtgg

SEQ ID NO: 28059 - DNA, 21 bp, synthetic construct
  source 1..21: mol_type = other DNA
tacagcaaatcaggtcaaaac

SEQ ID NO: 28060 - DNA, 21 bp, synthetic construct
  source 1..21: mol_type = other DNA
ctttcacgctcaggcaataac

SEQ ID NO: 28061 - DNA, 21 bp, synthetic construct
  source 1..21: mol_type = other DNA
tatttcactggaatggccaac

SEQ ID NO: 28062 - DNA, 21 bp, synthetic construct
  source 1..21: mol_type = other DNA
gggagtgcgacttcaacatgg

SEQ ID NO: 28063 - DNA, 21 bp, synthetic construct
  source 1..21: mol_type = other DNA
aagctaactgacagaacttgg

SEQ ID NO: 28064 - DNA, 21 bp, synthetic construct
  source 1..21: mol_type = other DNA
tactgggaaggagtgcgggct

SEQ ID NO: 28065 - DNA, 21 bp, synthetic construct
  source 1..21: mol_type = other DNA
tgtaaacccgtctgttgcgat

SEQ ID NO: 28066 - DNA, 21 bp, synthetic construct
  source 1..21: mol_type = other DNA
agatcggagtttttagcgttc

SEQ ID NO: 28067 - DNA, 21 bp, synthetic construct
  source 1..21: mol_type = other DNA
tattttcatgggaaaatggat

SEQ ID NO: 28068 - DNA, 21 bp, synthetic construct
  source 1..21: mol_type = other DNA
tactcgcgtctagggacgaac

SEQ ID NO: 28069 - DNA, 21 bp, synthetic construct
  source 1..21: mol_type = other DNA
tatttcagcggtgttatgccg

SEQ ID NO: 28070 - DNA, 21 bp, synthetic construct
  source 1..21: mol_type = other DNA
tacgctcgtcttaacttcaat

SEQ ID NO: 28071 - DNA, 21 bp, synthetic construct
  source 1..21: mol_type = other DNA
agaactggaacatcctgttta

SEQ ID NO: 28072 - DNA, 21 bp, synthetic construct
  source 1..21: mol_type = other DNA
ctctctcgtttgcaaatgaat

SEQ ID NO: 28073 - DNA, 21 bp, synthetic construct
  source 1..21: mol_type = other DNA
catagccgattaaatctccag

SEQ ID NO: 28074 - DNA, 21 bp, synthetic construct
  source 1..21: mol_type = other DNA
ttctggagcggcgtagtggaa

SEQ ID NO: 28075 - DNA, 21 bp, synthetic construct
  source 1..21: mol_type = other DNA
agggagagcacaaatggggtc

SEQ ID NO: 28076 - DNA, 21 bp, synthetic construct
  source 1..21: mol_type = other DNA
agcttttcaaccaatggtata

SEQ ID NO: 28077 - DNA, 21 bp, synthetic construct
  source 1..21: mol_type = other DNA
tttagccgcctaggagtaaat

SEQ ID NO: 28078 - DNA, 21 bp, synthetic construct
  source 1..21: mol_type = other DNA
acatgggaaggagatgctgct

SEQ ID NO: 28079 - DNA, 21 bp, synthetic construct
  source 1..21: mol_type = other DNA
tatcatagattatcagatttt

SEQ ID NO: 28080 - DNA, 21 bp, synthetic construct
  source 1..21: mol_type = other DNA
tattttgccggtagatacgat

SEQ ID NO: 28081 - DNA, 21 bp, synthetic construct
  source 1..21: mol_type = other DNA
ccttacgcgaggtcattagac

SEQ ID NO: 28082 - DNA, 21 bp, synthetic construct
  source 1..21: mol_type = other DNA
ctaggagggacaagcaggtat

SEQ ID NO: 28083 - DNA, 21 bp, synthetic construct
  source 1..21: mol_type = other DNA
tatagtcggctccagatgaac

SEQ ID NO: 28084 - DNA, 21 bp, synthetic construct
  source 1..21: mol_type = other DNA
tacgctagaactggcctaaac

SEQ ID NO: 28085 - DNA, 21 bp, synthetic construct
  source 1..21: mol_type = other DNA
tattttaccggagtacacaag

SEQ ID NO: 28086 - DNA, 21 bp, synthetic construct
  source 1..21: mol_type = other DNA
tatgtaaggtctgacgccaca

SEQ ID NO: 28087 - DNA, 21 bp, synthetic construct
  source 1..21: mol_type = other DNA
tactttactggggaagtcagc

SEQ ID NO: 28088 - DNA, 21 bp, synthetic construct
  source 1..21: mol_type = other DNA
tattggacgggaatgacggac

SEQ ID NO: 28089 - DNA, 21 bp, synthetic construct
  source 1..21: mol_type = other DNA
atgttcgacggcacagtcgca

SEQ ID NO: 28090 - DNA, 21 bp, synthetic construct
  source 1..21: mol_type = other DNA
ttaaaggatggcactggccca

SEQ ID NO: 28091 - DNA, 21 bp, synthetic construct
  source 1..21: mol_type = other DNA
ttgtgggatggtactccatcg

SEQ ID NO: 28092 - DNA, 21 bp, synthetic construct
  source 1..21: mol_type = other DNA
tatgctaaggctgggcacaac

SEQ ID NO: 28093 - DNA, 21 bp, synthetic construct
  source 1..21: mol_type = other DNA
cgtggagaatacacgtttcct

SEQ ID NO: 28094 - DNA, 21 bp, synthetic construct
  source 1..21: mol_type = other DNA
tacgccaaagcagggcataat

SEQ ID NO: 28095 - DNA, 21 bp, synthetic construct
  source 1..21: mol_type = other DNA
ttcagcaagatgaattacaac

SEQ ID NO: 28096 - DNA, 21 bp, synthetic construct
  source 1..21: mol_type = other DNA
tactcgagaatcagcccgaac

SEQ ID NO: 28097 - DNA, 21 bp, synthetic construct
  source 1..21: mol_type = other DNA
tgcaaactcagttctcccagt

SEQ ID NO: 28098 - DNA, 21 bp, synthetic construct
  source 1..21: mol_type = other DNA
tgcaaagcgaatacaaaagac

SEQ ID NO: 28099 - DNA, 21 bp, synthetic construct
  source 1..21: mol_type = other DNA
tactggtcaggcaaattagag

SEQ ID NO: 28100 - DNA, 21 bp, synthetic construct
  source 1..21: mol_type = other DNA
aggggtgaatcgcggggctgg

SEQ ID NO: 28101 - DNA, 21 bp, synthetic construct
  source 1..21: mol_type = other DNA
gatttacgtctcgctgactgg

SEQ ID NO: 28102 - DNA, 21 bp, synthetic construct
  source 1..21: mol_type = other DNA
tactattccggcattgttaaa

SEQ ID NO: 28103 - DNA, 21 bp, synthetic construct
  source 1..21: mol_type = other DNA
tacagcaaacacaatcccaac

SEQ ID NO: 28104 - DNA, 21 bp, synthetic construct
  source 1..21: mol_type = other DNA
tattctcggattgggactaat

SEQ ID NO: 28105 - DNA, 21 bp, synthetic construct
  source 1..21: mol_type = other DNA
tacgctcgtgtgggattcaac

SEQ ID NO: 28106 - DNA, 21 bp, synthetic construct
  source 1..21: mol_type = other DNA
tacgtgcgttcggacagtagc

SEQ ID NO: 28107 - DNA, 21 bp, synthetic construct
  source 1..21: mol_type = other DNA
gtagagagtgatcacgggaga

SEQ ID NO: 28108 - DNA, 21 bp, synthetic construct
  source 1..21: mol_type = other DNA
tattcgaagcaagggtctaat

SEQ ID NO: 28109 - DNA, 21 bp, synthetic construct
  source 1..21: mol_type = other DNA
aggctgccgtcagtatatcct

SEQ ID NO: 28110 - DNA, 21 bp, synthetic construct
  source 1..21: mol_type = other DNA
aaatgcaggccttgttcagag

SEQ ID NO: 28111 - DNA, 21 bp, synthetic construct
  source 1..21: mol_type = other DNA
tactctcgtcttggaatgaac

SEQ ID NO: 28112 - DNA, 21 bp, synthetic construct
  source 1..21: mol_type = other DNA
gggatcgagactgttaggtgg

SEQ ID NO: 28113 - DNA, 21 bp, synthetic construct
  source 1..21: mol_type = other DNA
tgcaaaccaccacccaagatc

SEQ ID NO: 28114 - DNA, 21 bp, synthetic construct
  source 1..21: mol_type = other DNA
tactttagcgggatacaaggt

SEQ ID NO: 28115 - DNA, 21 bp, synthetic construct
  source 1..21: mol_type = other DNA
tataggcccggatgtatagga

SEQ ID NO: 28116 - DNA, 21 bp, synthetic construct
  source 1..21: mol_type = other DNA
tactcaagagtcggtatgaac

SEQ ID NO: 28117 - DNA, 21 bp, synthetic construct
  source 1..21: mol_type = other DNA
tattttaccggagttcggaac

SEQ ID NO: 28118 - DNA, 21 bp, synthetic construct
  source 1..21: mol_type = other DNA
tacacgcgtctgagcgataat

SEQ ID NO: 28119 - DNA, 21 bp, synthetic construct
  source 1..21: mol_type = other DNA
cgtaacgagttcgttacatac

SEQ ID NO: 28120 - DNA, 21 bp, synthetic construct
  source 1..21: mol_type = other DNA
agagaagactttagcacgtgg

SEQ ID NO: 28121 - DNA, 21 bp, synthetic construct
  source 1..21: mol_type = other DNA
gacatgtcatctcggatttgg

SEQ ID NO: 28122 - DNA, 21 bp, synthetic construct
  source 1..21: mol_type = other DNA
tatgcaaaaggcaactgcaat

SEQ ID NO: 28123 - DNA, 21 bp, synthetic construct
  source 1..21: mol_type = other DNA
acgagcgagtttaaagtctac

SEQ ID NO: 28124 - DNA, 21 bp, synthetic construct
  source 1..21: mol_type = other DNA
gacctgaggttagcagattgg

SEQ ID NO: 28125 - DNA, 21 bp, synthetic construct
  source 1..21: mol_type = other DNA
gtgcctgagagcgtaaggtgg

SEQ ID NO: 28126 - DNA, 21 bp, synthetic construct
  source 1..21: mol_type = other DNA
tattttagcggcagaccagaa

SEQ ID NO: 28127 - DNA, 21 bp, synthetic construct
  source 1..21: mol_type = other DNA
tactggcagggcataaaagag

SEQ ID NO: 28128 - DNA, 21 bp, synthetic construct
  source 1..21: mol_type = other DNA
ttcattagcaccaacggggta

SEQ ID NO: 28129 - DNA, 21 bp, synthetic construct
  source 1..21: mol_type = other DNA
gtcgcgcatgcgggcattgga

SEQ ID NO: 28130 - DNA, 21 bp, synthetic construct
  source 1..21: mol_type = other DNA
tattggacgggtgtgactgac

SEQ ID NO: 28131 - DNA, 21 bp, synthetic construct
  source 1..21: mol_type = other DNA
gtaatgcaggcctctaattgg

SEQ ID NO: 28132 - DNA, 21 bp, synthetic construct
  source 1..21: mol_type = other DNA
tacttctcggggacactctca

SEQ ID NO: 28133 - DNA, 21 bp, synthetic construct
  source 1..21: mol_type = other DNA
cgtttggaggatcgtgcctgg

SEQ ID NO: 28134 - DNA, 21 bp, synthetic construct
  source 1..21: mol_type = other DNA
tacttcagcggtcaggttatg

SEQ ID NO: 28135 - DNA, 21 bp, synthetic construct
  source 1..21: mol_type = other DNA
tatagcagggtgaatgataac

SEQ ID NO: 28136 - DNA, 21 bp, synthetic construct
  source 1..21: mol_type = other DNA
gggagcgaccacgtacgctgg

SEQ ID NO: 28137 - DNA, 21 bp, synthetic construct
  source 1..21: mol_type = other DNA
agcaagtcaaccaacggagtg

SEQ ID NO: 28138 - DNA, 21 bp, synthetic construct
  source 1..21: mol_type = other DNA
tatgttgcgggatgcaaagaa

SEQ ID NO: 28139 - DNA, 21 bp, synthetic construct
  source 1..21: mol_type = other DNA
tacagccggataggcgctaat

SEQ ID NO: 28140 - DNA, 21 bp, synthetic construct
  source 1..21: mol_type = other DNA
tactcgcgtctacatgcgaat

SEQ ID NO: 28141 - DNA, 21 bp, synthetic construct
  source 1..21: mol_type = other DNA
ttcttcagcgggaggattgaa

SEQ ID NO: 28142 - DNA, 21 bp, synthetic construct
  source 1..21: mol_type = other DNA
tattggagtgggctcgtagag

SEQ ID NO: 28143 - DNA, 21 bp, synthetic construct
  source 1..21: mol_type = other DNA
gaactggattccagagaatgg

SEQ ID NO: 28144 - DNA, 21 bp, synthetic construct
  source 1..21: mol_type = other DNA
tattttactagggtgttagag

SEQ ID NO: 28145 - DNA, 21 bp, synthetic construct
  source 1..21: mol_type = other DNA
tactggagtggtgtcagtgcc

SEQ ID NO: 28146 - DNA, 21 bp, synthetic construct
  source 1..21: mol_type = other DNA
aaagatgactggacttcatat

SEQ ID NO: 28147 - DNA, 21 bp, synthetic construct
  source 1..21: mol_type = other DNA
ggtggtgagttcaaatgtttc

SEQ ID NO: 28148 - DNA, 21 bp, synthetic construct
  source 1..21: mol_type = other DNA
cgcgatgactggaccgtgttt

SEQ ID NO: 28149 - DNA, 21 bp, synthetic construct
  source 1..21: mol_type = other DNA
tattttacaggccagactatg

SEQ ID NO: 28150 - DNA, 21 bp, synthetic construct
  source 1..21: mol_type = other DNA
gtctggagcaccaatggaata

SEQ ID NO: 28151 - DNA, 21 bp, synthetic construct
  source 1..21: mol_type = other DNA
agagacggcgtatcggcatgg

SEQ ID NO: 28152 - DNA, 21 bp, synthetic construct
  source 1..21: mol_type = other DNA
ttttttactgggtatatagac

SEQ ID NO: 28153 - DNA, 21 bp, synthetic construct
  source 1..21: mol_type = other DNA
tactcgcgtaccgggggtaac

SEQ ID NO: 28154 - DNA, 21 bp, synthetic construct
  source 1..21: mol_type = other DNA
tattcaagaaccggagcgaat

SEQ ID NO: 28155 - DNA, 21 bp, synthetic construct
  source 1..21: mol_type = other DNA
tacagtcgcctcagtatcgat

SEQ ID NO: 28156 - DNA, 21 bp, synthetic construct
  source 1..21: mol_type = other DNA
tacttcactggggtgcagggg

SEQ ID NO: 28157 - DNA, 21 bp, synthetic construct
  source 1..21: mol_type = other DNA
tacttttccggtgtccaggac

SEQ ID NO: 28158 - DNA, 21 bp, synthetic construct
  source 1..21: mol_type = other DNA
aaattgggcggtagctgcgga

SEQ ID NO: 28159 - DNA, 21 bp, synthetic construct
  source 1..21: mol_type = other DNA
gatgatggattcagcaagtgg

SEQ ID NO: 28160 - DNA, 21 bp, synthetic construct
  source 1..21: mol_type = other DNA
tacgcccggggaggcgcgaac

SEQ ID NO: 28161 - DNA, 21 bp, synthetic construct
  source 1..21: mol_type = other DNA
tacgttagatccgacaaccgg

SEQ ID NO: 28162 - DNA, 21 bp, synthetic construct
  source 1..21: mol_type = other DNA
ttcttttccggaaaggtagaa

SEQ ID NO: 28163 - DNA, 21 bp, synthetic construct
  source 1..21: mol_type = other DNA
tacttccacggtaagatggac

SEQ ID NO: 28164 - DNA, 21 bp, synthetic construct
  source 1..21: mol_type = other DNA
tactttacaggcgcttttgac

SEQ ID NO: 28165 - DNA, 21 bp, synthetic construct
  source 1..21: mol_type = other DNA
tactttgctggcacccacgat

SEQ ID NO: 28166 - DNA, 21 bp, synthetic construct
  source 1..21: mol_type = other DNA
tggaccccgatgtgtaagcaa

SEQ ID NO: 28167 - DNA, 21 bp, synthetic construct
  source 1..21: mol_type = other DNA
tgcgccccttaccaccatgag

SEQ ID NO: 28168 - DNA, 21 bp, synthetic construct
  source 1..21: mol_type = other DNA
tacttcactggattcttagag

SEQ ID NO: 28169 - DNA, 21 bp, synthetic construct
  source 1..21: mol_type = other DNA
ttgcacagattagcctcaagc

SEQ ID NO: 28170 - DNA, 21 bp, synthetic construct
  source 1..21: mol_type = other DNA
tatcacgcagccgggccggat

SEQ ID NO: 28171 - DNA, 21 bp, synthetic construct
  source 1..21: mol_type = other DNA
tacagcaagagcaatcctaat

SEQ ID NO: 28172 - DNA, 21 bp, synthetic construct
  source 1..21: mol_type = other DNA
ttaagtaaactcggtgttaat

SEQ ID NO: 28173 - DNA, 21 bp, synthetic construct
  source 1..21: mol_type = other DNA
tctagcgaataccttgtctac

SEQ ID NO: 28174 - DNA, 21 bp, synthetic construct
  source 1..21: mol_type = other DNA
tggtggagcggcgtacaggag

SEQ ID NO: 28175 - DNA, 21 bp, synthetic construct
  source 1..21: mol_type = other DNA
tacttccacgggcgtttagag

SEQ ID NO: 28176 - DNA, 21 bp, synthetic construct
  source 1..21: mol_type = other DNA
agtatggagagtcgcctatgg

SEQ ID NO: 28177 - DNA, 21 bp, synthetic construct
  source 1..21: mol_type = other DNA
tatttctccggtgtccgagtc

SEQ ID NO: 28178 - DNA, 21 bp, synthetic construct
  source 1..21: mol_type = other DNA
tggcctaatggcgtagctgga

SEQ ID NO: 28179 - DNA, 21 bp, synthetic construct
  source 1..21: mol_type = other DNA
ttctcgagaatcggtcataat

SEQ ID NO: 28180 - DNA, 21 bp, synthetic construct
  source 1..21: mol_type = other DNA
tgcaagccgcccacagcaccc

SEQ ID NO: 28181 - DNA, 21 bp, synthetic construct
  source 1..21: mol_type = other DNA
tacgctaaaggtggatataat

SEQ ID NO: 28182 - DNA, 21 bp, synthetic construct
  source 1..21: mol_type = other DNA
tattttaccggtcgggaaaat

SEQ ID NO: 28183 - DNA, 21 bp, synthetic construct
  source 1..21: mol_type = other DNA
tcagacagcactaacggcgtc

SEQ ID NO: 28184 - DNA, 21 bp, synthetic construct
  source 1..21: mol_type = other DNA
cgtgatgaattcacaagctgg

SEQ ID NO: 28185 - DNA, 21 bp, synthetic construct
  source 1..21: mol_type = other DNA
aagttggattaccttggcata

SEQ ID NO: 28186 - DNA, 21 bp, synthetic construct
  source 1..21: mol_type = other DNA
cattcgagcactaatggaatt

SEQ ID NO: 28187 - DNA, 21 bp, synthetic construct
  source 1..21: mol_type = other DNA
ccgtacgcgcgatctccgatg

SEQ ID NO: 28188 - DNA, 21 bp, synthetic construct
  source 1..21: mol_type = other DNA
ggtagcgggttgtcccactgg

SEQ ID NO: 28189 - DNA, 21 bp, synthetic construct
  source 1..21: mol_type = other DNA
tattttagtggaacccataat

SEQ ID NO: 28190 - DNA, 21 bp, synthetic construct
  source 1..21: mol_type = other DNA
tttgctagaggggggccgaat

SEQ ID NO: 28191 - DNA, 21 bp, synthetic construct
  source 1..21: mol_type = other DNA
gtaatgagcagcgctggatgg

SEQ ID NO: 28192 - DNA, 21 bp, synthetic construct
  source 1..21: mol_type = other DNA
ctgagccgtgtatcagccgac

SEQ ID NO: 28193 - DNA, 21 bp, synthetic construct
  source 1..21: mol_type = other DNA
ctctccaagatcggcatgaat

SEQ ID NO: 28194 - DNA, 21 bp, synthetic construct
  source 1..21: mol_type = other DNA
tatgtgaaatatgaggataaa

SEQ ID NO: 28195 - DNA, 21 bp, synthetic construct
  source 1..21: mol_type = other DNA
agaaaagatgatgtatttcct

SEQ ID NO: 28196 - DNA, 21 bp, synthetic construct
  source 1..21: mol_type = other DNA
taccatcggttgggtgatccg

SEQ ID NO: 28197 - DNA, 21 bp, synthetic construct
  source 1..21: mol_type = other DNA
gatatggggagcgctaactgg

SEQ ID NO: 28198 - DNA, 21 bp, synthetic construct
  source 1..21: mol_type = other DNA
cgtgacggaaccagtatttgg

SEQ ID NO: 28199 - DNA, 21 bp, synthetic construct
  source 1..21: mol_type = other DNA
caaagtcctggatgcaaagat

SEQ ID NO: 28200 - DNA, 21 bp, synthetic construct
  source 1..21: mol_type = other DNA
tatttcagcagggtcatcgag

SEQ ID NO: 28201 - DNA, 21 bp, synthetic construct
  source 1..21: mol_type = other DNA
aaagacgactggacccccttt

SEQ ID NO: 28202 - DNA, 21 bp, synthetic construct
  source 1..21: mol_type = other DNA
aaagatgattggtctagttgg

SEQ ID NO: 28203 - DNA, 21 bp, synthetic construct
  source 1..21: mol_type = other DNA
tatgcaaggttggggtttaat

SEQ ID NO: 28204 - DNA, 21 bp, synthetic construct
  source 1..21: mol_type = other DNA
tattattcgggaatacatgcg

SEQ ID NO: 28205 - DNA, 21 bp, synthetic construct
  source 1..21: mol_type = other DNA
tattggacaggagtacatgat

SEQ ID NO: 28206 - DNA, 21 bp, synthetic construct
  source 1..21: mol_type = other DNA
ttgagcaaagctggggctaac

SEQ ID NO: 28207 - DNA, 21 bp, synthetic construct
  source 1..21: mol_type = other DNA
cgcaacgaattttgtcagccc

SEQ ID NO: 28208 - DNA, 21 bp, synthetic construct
  source 1..21: mol_type = other DNA
tatagtgcgcgaggcccgaat

SEQ ID NO: 28209 - DNA, 21 bp, synthetic construct
  source 1..21: mol_type = other DNA
tggttttctggcaaaattgag

SEQ ID NO: 28210 - DNA, 21 bp, synthetic construct
  source 1..21: mol_type = other DNA
tactcacgcgtttcggacaat

SEQ ID NO: 28211 - DNA, 21 bp, synthetic construct
  source 1..21: mol_type = other DNA
tattatactggtcgtatggag

SEQ ID NO: 28212 - DNA, 21 bp, synthetic construct
  source 1..21: mol_type = other DNA
aggatgagtgaccataattgg

SEQ ID NO: 28213 - DNA, 21 bp, synthetic construct
  source 1..21: mol_type = other DNA
tttagtagactcaaccaaaac

SEQ ID NO: 28214 - DNA, 21 bp, synthetic construct
  source 1..21: mol_type = other DNA
tactacacgggaaaatgtgac

SEQ ID NO: 28215 - DNA, 21 bp, synthetic construct
  source 1..21: mol_type = other DNA
ggggacgaatggatccacttt

SEQ ID NO: 28216 - DNA, 21 bp, synthetic construct
  source 1..21: mol_type = other DNA
tatagcagaatcaacgaaaat

SEQ ID NO: 28217 - DNA, 21 bp, synthetic construct
  source 1..21: mol_type = other DNA
ttttggagtggagtaaaagat

SEQ ID NO: 28218 - DNA, 21 bp, synthetic construct
  source 1..21: mol_type = other DNA
cgagacggtgcaagtacttgg

SEQ ID NO: 28219 - DNA, 21 bp, synthetic construct
  source 1..21: mol_type = other DNA
tatagcaggactggggtgaat

SEQ ID NO: 28220 - DNA, 21 bp, synthetic construct
  source 1..21: mol_type = other DNA
catataagtactaacggcgtg

SEQ ID NO: 28221 - DNA, 21 bp, synthetic construct
  source 1..21: mol_type = other DNA
tattccaaaggaaatgtaaat

SEQ ID NO: 28222 - DNA, 21 bp, synthetic construct
  source 1..21: mol_type = other DNA
agtgatagcacgaacggaatc

SEQ ID NO: 28223 - DNA, 21 bp, synthetic construct
  source 1..21: mol_type = other DNA
tactttacaggaaagcccgag

SEQ ID NO: 28224 - DNA, 21 bp, synthetic construct
  source 1..21: mol_type = other DNA
cacacgtcaagcaatggagtg

SEQ ID NO: 28225 - DNA, 21 bp, synthetic construct
  source 1..21: mol_type = other DNA
gattacgcaaagtctttactg

SEQ ID NO: 28226 - DNA, 21 bp, synthetic construct
  source 1..21: mol_type = other DNA
tacttcagcgggcagctagcg

SEQ ID NO: 28227 - DNA, 21 bp, synthetic construct
  source 1..21: mol_type = other DNA
tatgcacggactggatttaac

SEQ ID NO: 28228 - DNA, 21 bp, synthetic construct
  source 1..21: mol_type = other DNA
tacgcgcgccttaatccgaat

SEQ ID NO: 28229 - DNA, 21 bp, synthetic construct
  source 1..21: mol_type = other DNA
tattattcaggaataaccgcg

SEQ ID NO: 28230 - DNA, 21 bp, synthetic construct
  source 1..21: mol_type = other DNA
tacaccagattatccgacaac

SEQ ID NO: 28231 - DNA, 21 bp, synthetic construct
  source 1..21: mol_type = other DNA
tatgttcgttcacagatgttg

SEQ ID NO: 28232 - DNA, 21 bp, synthetic construct
  source 1..21: mol_type = other DNA
tactcgaggacaggcatgaat

SEQ ID NO: 28233 - DNA, 21 bp, synthetic construct
  source 1..21: mol_type = other DNA
tatagtaggatacaattgaac

SEQ ID NO: 28234 - DNA, 21 bp, synthetic construct
  source 1..21: mol_type = other DNA
tattttaccggcagggaggac

SEQ ID NO: 28235 - DNA, 21 bp, synthetic construct
  source 1..21: mol_type = other DNA
tatgctaggacaggtaataat

SEQ ID NO: 28236 - DNA, 21 bp, synthetic construct
  source 1..21: mol_type = other DNA
tactacacagggaggatggaa

SEQ ID NO: 28237 - DNA, 21 bp, synthetic construct
  source 1..21: mol_type = other DNA
tattcccgcgtgggagaaaat

SEQ ID NO: 28238 - DNA, 21 bp, synthetic construct
  source 1..21: mol_type = other DNA
tattcgaaatcgaatattaac

SEQ ID NO: 28239 - DNA, 21 bp, synthetic construct
  source 1..21: mol_type = other DNA
tacttctcgggacatcacgaa

SEQ ID NO: 28240 - DNA, 21 bp, synthetic construct
  source 1..21: mol_type = other DNA
tgcgggagagcaggtcgtgac

SEQ ID NO: 28241 - DNA, 21 bp, synthetic construct
  source 1..21: mol_type = other DNA
gtcatggaagctcggggctgg

SEQ ID NO: 28242 - DNA, 21 bp, synthetic construct
  source 1..21: mol_type = other DNA
tactggcagggcataaaagac

SEQ ID NO: 28243 - DNA, 21 bp, synthetic construct
  source 1..21: mol_type = other DNA
ttacatcgactccacacggat

SEQ ID NO: 28244 - DNA, 21 bp, synthetic construct
  source 1..21: mol_type = other DNA
taccaccggttgtcggagaac

SEQ ID NO: 28245 - DNA, 21 bp, synthetic construct
  source 1..21: mol_type = other DNA
gaccttcgcgaccggatttgg

SEQ ID NO: 28246 - DNA, 21 bp, synthetic construct
  source 1..21: mol_type = other DNA
tattttagcggggtacaggtt

SEQ ID NO: 28247 - DNA, 21 bp, synthetic construct
  source 1..21: mol_type = other DNA
tacagcaaaagaggcgataat

SEQ ID NO: 28248 - DNA, 21 bp, synthetic construct
  source 1..21: mol_type = other DNA
ctctcaagaaccgcatacgac

SEQ ID NO: 28249 - DNA, 21 bp, synthetic construct
  source 1..21: mol_type = other DNA
tatagcaaaagcaatcacaat

SEQ ID NO: 28250 - DNA, 21 bp, synthetic construct
  source 1..21: mol_type = other DNA
tatagtcggaggtcagacaat

SEQ ID NO: 28251 - DNA, 21 bp, synthetic construct
  source 1..21: mol_type = other DNA
ataatggaagatagggtttgg

SEQ ID NO: 28252 - DNA, 21 bp, synthetic construct
  source 1..21: mol_type = other DNA
ctctgggatggcacgaatccc

SEQ ID NO: 28253 - DNA, 21 bp, synthetic construct
  source 1..21: mol_type = other DNA
tacactaaattggactacaac

SEQ ID NO: 28254 - DNA, 21 bp, synthetic construct
  source 1..21: mol_type = other DNA
tgcgtgaggccccaaacacct

SEQ ID NO: 28255 - DNA, 21 bp, synthetic construct
  source 1..21: mol_type = other DNA
tgtatgtcgggtccgaggccg

SEQ ID NO: 28256 - DNA, 21 bp, synthetic construct
  source 1..21: mol_type = other DNA
ggagacggccagtcaaggtgg

SEQ ID NO: 28257 - DNA, 21 bp, synthetic construct
  source 1..21: mol_type = other DNA
tattcaaagtcaaacgcgaac

SEQ ID NO: 28258 - DNA, 21 bp, synthetic construct
  source 1..21: mol_type = other DNA
gtgctgtcatcgcaaggatgg

SEQ ID NO: 28259 - DNA, 21 bp, synthetic construct
  source 1..21: mol_type = other DNA
ttcagcagactaggactgaac

SEQ ID NO: 28260 - DNA, 21 bp, synthetic construct
  source 1..21: mol_type = other DNA
tactttaccggtacgtatagt

SEQ ID NO: 28261 - DNA, 21 bp, synthetic construct
  source 1..21: mol_type = other DNA
ggatgtaatcgctcaactgca

SEQ ID NO: 28262 - DNA, 21 bp, synthetic construct
  source 1..21: mol_type = other DNA
tatgctcgatccggtagtaat

SEQ ID NO: 28263 - DNA, 21 bp, synthetic construct
  source 1..21: mol_type = other DNA
agagatgatttcaccggttac

SEQ ID NO: 28264 - DNA, 21 bp, synthetic construct
  source 1..21: mol_type = other DNA
tatgctcgtaacgggattaac

SEQ ID NO: 28265 - DNA, 21 bp, synthetic construct
  source 1..21: mol_type = other DNA
tatcatgcaagggggctgaat

SEQ ID NO: 28266 - DNA, 21 bp, synthetic construct
  source 1..21: mol_type = other DNA
tattttgcaggtgtcaaagac

SEQ ID NO: 28267 - DNA, 21 bp, synthetic construct
  source 1..21: mol_type = other DNA
tattggactggaaaagtcgac

SEQ ID NO: 28268 - DNA, 21 bp, synthetic construct
  source 1..21: mol_type = other DNA
ttatgcaggccgtgctctaat

SEQ ID NO: 28269 - DNA, 21 bp, synthetic construct
  source 1..21: mol_type = other DNA
tatgcaaggataggagccaac

SEQ ID NO: 28270 - DNA, 21 bp, synthetic construct
  source 1..21: mol_type = other DNA
ggaagcatgacttccacttgg

SEQ ID NO: 28271 - DNA, 21 bp, synthetic construct
  source 1..21: mol_type = other DNA
tactataccggccatgtgaac

SEQ ID NO: 28272 - DNA, 21 bp, synthetic construct
  source 1..21: mol_type = other DNA
ccgtggagcacgaatggggtg

SEQ ID NO: 28273 - DNA, 21 bp, synthetic construct
  source 1..21: mol_type = other DNA
tactttgccggtacaattaat

SEQ ID NO: 28274 - DNA, 21 bp, synthetic construct
  source 1..21: mol_type = other DNA
catttttccactaacggggtt

SEQ ID NO: 28275 - DNA, 21 bp, synthetic construct
  source 1..21: mol_type = other DNA
tattccaggctgtccgccgac

SEQ ID NO: 28276 - DNA, 21 bp, synthetic construct
  source 1..21: mol_type = other DNA
tattattcgggcgttaagtcg

SEQ ID NO: 28277 - DNA, 21 bp, synthetic construct
  source 1..21: mol_type = other DNA
cgggacgattatagtacgttc

SEQ ID NO: 28278 - DNA, 21 bp, synthetic construct
  source 1..21: mol_type = other DNA
acattcagtactaacggagta

SEQ ID NO: 28279 - DNA, 21 bp, synthetic construct
  source 1..21: mol_type = other DNA
agggatggcaactccgcttgg

SEQ ID NO: 28280 - DNA, 21 bp, synthetic construct
  source 1..21: mol_type = other DNA
ttggccagatctgcgcccgat

SEQ ID NO: 28281 - DNA, 21 bp, synthetic construct
  source 1..21: mol_type = other DNA
tggctcaaaagtcagccgggc

SEQ ID NO: 28282 - DNA, 21 bp, synthetic construct
  source 1..21: mol_type = other DNA
tatgttaaaagtgacagggtg

SEQ ID NO: 28283 - DNA, 21 bp, synthetic construct
  source 1..21: mol_type = other DNA
tacttcaccggtattcctgct

SEQ ID NO: 28284 - DNA, 21 bp, synthetic construct
  source 1..21: mol_type = other DNA
taccatgctagagcgccaaat

SEQ ID NO: 28285 - DNA, 21 bp, synthetic construct
  source 1..21: mol_type = other DNA
tactggcacggcgtcgtcgat

SEQ ID NO: 28286 - DNA, 21 bp, synthetic construct
  source 1..21: mol_type = other DNA
tactttacgggagttcacccg

SEQ ID NO: 28287 - DNA, 21 bp, synthetic construct
  source 1..21: mol_type = other DNA
aacaccagtacaaatggtatt

SEQ ID NO: 28288 - DNA, 21 bp, synthetic construct
  source 1..21: mol_type = other DNA
cagaacgagttcacaatgtac

SEQ ID NO: 28289 - DNA, 21 bp, synthetic construct
  source 1..21: mol_type = other DNA
tattttagtggcataccgatg

SEQ ID NO: 28290 - DNA, 21 bp, synthetic construct
  source 1..21: mol_type = other DNA
atcatggcagacagggcatgg

SEQ ID NO: 28291 - DNA, 21 bp, synthetic construct
  source 1..21: mol_type = other DNA
tactcaagggccgggagcaat

SEQ ID NO: 28292 - DNA, 21 bp, synthetic construct
  source 1..21: mol_type = other DNA
cagcatccaatatgtaagcct

SEQ ID NO: 28293 - DNA, 21 bp, synthetic construct
  source 1..21: mol_type = other DNA
tgcacgccaaagactggacac

SEQ ID NO: 28294 - DNA, 21 bp, synthetic construct
  source 1..21: mol_type = other DNA
tactttagcgggcagttggcg

SEQ ID NO: 28295 - DNA, 21 bp, synthetic construct
  source 1..21: mol_type = other DNA
atgtgggacggtacgccaagt

SEQ ID NO: 28296 - DNA, 21 bp, synthetic construct
  source 1..21: mol_type = other DNA
tacagtagggtcaattttaat

SEQ ID NO: 28297 - DNA, 21 bp, synthetic construct
  source 1..21: mol_type = other DNA
tactcgagggtcggctcaggc

SEQ ID NO: 28298 - DNA, 21 bp, synthetic construct
  source 1..21: mol_type = other DNA
tatgcccgcgccggccctgat

SEQ ID NO: 28299 - DNA, 21 bp, synthetic construct
  source 1..21: mol_type = other DNA
ttctcgcgtacagggctaaac

SEQ ID NO: 28300 - DNA, 21 bp, synthetic construct
  source 1..21: mol_type = other DNA
cgcgacgaatttatgcactat

SEQ ID NO: 28301 - DNA, 21 bp, synthetic construct
  source 1..21: mol_type = other DNA
ctgatgagcgacagagaatgg

SEQ ID NO: 28302 - DNA, 21 bp, synthetic construct
  source 1..21: mol_type = other DNA
tacagtcgcgcaggcgataat

SEQ ID NO: 28303 - DNA, 21 bp, synthetic construct
  source 1..21: mol_type = other DNA
tattataccggagtcaagatg

SEQ ID NO: 28304 - DNA, 21 bp, synthetic construct
  source 1..21: mol_type = other DNA
ttctcacgcctaaatgtaaac

SEQ ID NO: 28305 - DNA, 21 bp, synthetic construct
  source 1..21: mol_type = other DNA
aggagcgagttcacgggctac

SEQ ID NO: 28306 - DNA, 21 bp, synthetic construct
  source 1..21: mol_type = other DNA
ttcttttcaggcatattggaa

SEQ ID NO: 28307 - DNA, 21 bp, synthetic construct
  source 1..21: mol_type = other DNA
cggtcagacacgacttatcct

SEQ ID NO: 28308 - DNA, 21 bp, synthetic construct
  source 1..21: mol_type = other DNA
ttacacagattgggggaaggt

SEQ ID NO: 28309 - DNA, 21 bp, synthetic construct
  source 1..21: mol_type = other DNA
gtgtccacacactgtatagcc

SEQ ID NO: 28310 - DNA, 21 bp, synthetic construct
  source 1..21: mol_type = other DNA
tattggcatggagtaccagag

SEQ ID NO: 28311 - DNA, 21 bp, synthetic construct
  source 1..21: mol_type = other DNA
aacatggagtctagagactgg

SEQ ID NO: 28312 - DNA, 21 bp, synthetic construct
  source 1..21: mol_type = other DNA
aggggagaccgcgtataccct

SEQ ID NO: 28313 - DNA, 21 bp, synthetic construct
  source 1..21: mol_type = other DNA
tattggagtggggttcgcgaa

SEQ ID NO: 28314 - DNA, 21 bp, synthetic construct
  source 1..21: mol_type = other DNA
tacagcaggcctgggccaaat

SEQ ID NO: 28315 - DNA, 21 bp, synthetic construct
  source 1..21: mol_type = other DNA
ggctctatgacaagtacgtgg

SEQ ID NO: 28316 - DNA, 21 bp, synthetic construct
  source 1..21: mol_type = other DNA
ataatctctacgaacggcatc

SEQ ID NO: 28317 - DNA, 21 bp, synthetic construct
  source 1..21: mol_type = other DNA
taccataagaacgggtacaat

SEQ ID NO: 28318 - DNA, 21 bp, synthetic construct
  source 1..21: mol_type = other DNA
ttttcgagattaaaccctaat

SEQ ID NO: 28319 - DNA, 21 bp, synthetic construct
  source 1..21: mol_type = other DNA
tgcatgtcgacgtcccgctcg

SEQ ID NO: 28320 - DNA, 21 bp, synthetic construct
  source 1..21: mol_type = other DNA
tacgtcaagtcacagatgatt

SEQ ID NO: 28321 - DNA, 21 bp, synthetic construct
  source 1..21: mol_type = other DNA
agaactagcacaaatggcgtt

SEQ ID NO: 28322 - DNA, 21 bp, synthetic construct
  source 1..21: mol_type = other DNA
tacttctcggggcgtatagat

SEQ ID NO: 28323 - DNA, 21 bp, synthetic construct
  source 1..21: mol_type = other DNA
caacgcccatgccagccagga

SEQ ID NO: 28324 - DNA, 21 bp, synthetic construct
  source 1..21: mol_type = other DNA
tatgaaccggggtgcggcgaa

SEQ ID NO: 28325 - DNA, 21 bp, synthetic construct
  source 1..21: mol_type = other DNA
tatgccaaacagaactataat

SEQ ID NO: 28326 - DNA, 21 bp, synthetic construct
  source 1..21: mol_type = other DNA
tgcaagccagatagtttccgc

SEQ ID NO: 28327 - DNA, 21 bp, synthetic construct
  source 1..21: mol_type = other DNA
tacttttccggaacacgagcg

SEQ ID NO: 28328 - DNA, 21 bp, synthetic construct
  source 1..21: mol_type = other DNA
cggatggaagaacgttcatgg

SEQ ID NO: 28329 - DNA, 21 bp, synthetic construct
  source 1..21: mol_type = other DNA
tacagcagggcaggagacgac

SEQ ID NO: 28330 - DNA, 21 bp, synthetic construct
  source 1..21: mol_type = other DNA
ttctcccggataggacagaat

SEQ ID NO: 28331 - DNA, 21 bp, synthetic construct
  source 1..21: mol_type = other DNA
aaggatgagtttacgatatac

SEQ ID NO: 28332 - DNA, 21 bp, synthetic construct
  source 1..21: mol_type = other DNA
ttcgccaaaagtggttgtggg

SEQ ID NO: 28333 - DNA, 21 bp, synthetic construct
  source 1..21: mol_type = other DNA
cgtaaatcagatgtttatcca

SEQ ID NO: 28334 - DNA, 21 bp, synthetic construct
  source 1..21: mol_type = other DNA
tactattccggaatccaggct

SEQ ID NO: 28335 - DNA, 21 bp, synthetic construct
  source 1..21: mol_type = other DNA
ttctcgagagtcgggcataac

SEQ ID NO: 28336 - DNA, 21 bp, synthetic construct
  source 1..21: mol_type = other DNA
tatcacagattgtccgcaaat

SEQ ID NO: 28337 - DNA, 21 bp, synthetic construct
  source 1..21: mol_type = other DNA
tattcgagactaaataaagac

SEQ ID NO: 28338 - DNA, 21 bp, synthetic construct
  source 1..21: mol_type = other DNA
tgtaacatacccatgactgca

SEQ ID NO: 28339 - DNA, 21 bp, synthetic construct
  source 1..21: mol_type = other DNA
agagaggaagcggtgagttgg

SEQ ID NO: 28340 - DNA, 21 bp, synthetic construct
  source 1..21: mol_type = other DNA
tactttacgggagtcttgcca

SEQ ID NO: 28341 - DNA, 21 bp, synthetic construct
  source 1..21: mol_type = other DNA
tatagtaaactagattggaat

SEQ ID NO: 28342 - DNA, 21 bp, synthetic construct
  source 1..21: mol_type = other DNA
tatagtagactgaatatgaat

SEQ ID NO: 28343 - DNA, 21 bp, synthetic construct
  source 1..21: mol_type = other DNA
ccctacgcaaaatctgagttg

SEQ ID NO: 28344 - DNA, 21 bp, synthetic construct
  source 1..21: mol_type = other DNA
tactgggacggtacgccagcg

SEQ ID NO: 28345 - DNA, 21 bp, synthetic construct
  source 1..21: mol_type = other DNA
gtgatggaagatcgtatatgg

SEQ ID NO: 28346 - DNA, 21 bp, synthetic construct
  source 1..21: mol_type = other DNA
ttagcacggatgggttataac

SEQ ID NO: 28347 - DNA, 21 bp, synthetic construct
  source 1..21: mol_type = other DNA
attctttcacatgctacttgg

SEQ ID NO: 28348 - DNA, 21 bp, synthetic construct
  source 1..21: mol_type = other DNA
attgtcagtactaatggagtt

SEQ ID NO: 28349 - DNA, 21 bp, synthetic construct
  source 1..21: mol_type = other DNA
cttcacagattatcgatgggt

SEQ ID NO: 28350 - DNA, 21 bp, synthetic construct
  source 1..21: mol_type = other DNA
tattggagtggcgtgactgac

SEQ ID NO: 28351 - DNA, 21 bp, synthetic construct
  source 1..21: mol_type = other DNA
tttagccgtttgaatgtcaat

SEQ ID NO: 28352 - DNA, 21 bp, synthetic construct
  source 1..21: mol_type = other DNA
tactcaaggttaaatgagttt

SEQ ID NO: 28353 - DNA, 21 bp, synthetic construct
  source 1..21: mol_type = other DNA
cggcaaagcaccaacggtata

SEQ ID NO: 28354 - DNA, 21 bp, synthetic construct
  source 1..21: mol_type = other DNA
tgcaagggcgagagtgctatc

SEQ ID NO: 28355 - DNA, 21 bp, synthetic construct
  source 1..21: mol_type = other DNA
tacttccacggacgcgtagac

SEQ ID NO: 28356 - DNA, 21 bp, synthetic construct
  source 1..21: mol_type = other DNA
tattggtccggaaaggtagcg

SEQ ID NO: 28357 - DNA, 21 bp, synthetic construct
  source 1..21: mol_type = other DNA
tactggacaggtacgattgac

SEQ ID NO: 28358 - DNA, 21 bp, synthetic construct
  source 1..21: mol_type = other DNA
gaccttcgagaccgtaaatgg

SEQ ID NO: 28359 - DNA, 21 bp, synthetic construct
  source 1..21: mol_type = other DNA
tgcaaaccggactgttgccca

SEQ ID NO: 28360 - DNA, 21 bp, synthetic construct
  source 1..21: mol_type = other DNA
tattttgcaggcaaacaagat

SEQ ID NO: 28361 - DNA, 21 bp, synthetic construct
  source 1..21: mol_type = other DNA
tattatagtggcataatttcg

SEQ ID NO: 28362 - DNA, 21 bp, synthetic construct
  source 1..21: mol_type = other DNA
tattccagagtcgggcagaac

SEQ ID NO: 28363 - DNA, 21 bp, synthetic construct
  source 1..21: mol_type = other DNA
cgctccttagatagctatcca

SEQ ID NO: 28364 - DNA, 21 bp, synthetic construct
  source 1..21: mol_type = other DNA
agggacgaatttcgaacatat

SEQ ID NO: 28365 - DNA, 21 bp, synthetic construct
  source 1..21: mol_type = other DNA
cttcatagagccacctatgat

SEQ ID NO: 28366 - DNA, 21 bp, synthetic construct
  source 1..21: mol_type = other DNA
tattttacaggacgtcaagac

SEQ ID NO: 28367 - DNA, 21 bp, synthetic construct
  source 1..21: mol_type = other DNA
tattataccggtatcgtaagc

SEQ ID NO: 28368 - DNA, 21 bp, synthetic construct
  source 1..21: mol_type = other DNA
tactccagattaggggacaat

SEQ ID NO: 28369 - DNA, 21 bp, synthetic construct
  source 1..21: mol_type = other DNA
tatcatcgcctttccgaatca

SEQ ID NO: 28370 - DNA, 21 bp, synthetic construct
  source 1..21: mol_type = other DNA
aggggggagttctgcggtgga

SEQ ID NO: 28371 - DNA, 21 bp, synthetic construct
  source 1..21: mol_type = other DNA
tatagcaaatcaaacgataat

SEQ ID NO: 28372 - DNA, 21 bp, synthetic construct
  source 1..21: mol_type = other DNA
tacagtgcgctgcaaaggaac

SEQ ID NO: 28373 - DNA, 21 bp, synthetic construct
  source 1..21: mol_type = other DNA
tatgttaggaatgatccaaac

SEQ ID NO: 28374 - DNA, 21 bp, synthetic construct
  source 1..21: mol_type = other DNA
tacgctagaacaaacatcaac

SEQ ID NO: 28375 - DNA, 21 bp, synthetic construct
  source 1..21: mol_type = other DNA
tttagccgtgttggacacaat

SEQ ID NO: 28376 - DNA, 21 bp, synthetic construct
  source 1..21: mol_type = other DNA
gttggcgaagcgaggtcgtgg

SEQ ID NO: 28377 - DNA, 21 bp, synthetic construct
  source 1..21: mol_type = other DNA
tattgggcgggtgttagagag

SEQ ID NO: 28378 - DNA, 21 bp, synthetic construct
  source 1..21: mol_type = other DNA
ttagccagaaccggctgtgat

SEQ ID NO: 28379 - DNA, 21 bp, synthetic construct
  source 1..21: mol_type = other DNA
tggccaaatggggtaaatggc

SEQ ID NO: 28380 - DNA, 21 bp, synthetic construct
  source 1..21: mol_type = other DNA
tatttttcaggcgtaccttcc

SEQ ID NO: 28381 - DNA, 21 bp, synthetic construct
  source 1..21: mol_type = other DNA
gtaagcgaattcagaacgtac

SEQ ID NO: 28382 - DNA, 21 bp, synthetic construct
  source 1..21: mol_type = other DNA
tgggagcctatgtgtaaggcc

SEQ ID NO: 28383 - DNA, 21 bp, synthetic construct
  source 1..21: mol_type = other DNA
ctgtctaaactcagttgcaat

SEQ ID NO: 28384 - DNA, 21 bp, synthetic construct
  source 1..21: mol_type = other DNA
tattcaaggcttaacgataac

SEQ ID NO: 28385 - DNA, 21 bp, synthetic construct
  source 1..21: mol_type = other DNA
agagatgacttctctgtatat

SEQ ID NO: 28386 - DNA, 21 bp, synthetic construct
  source 1..21: mol_type = other DNA
tacgttaaaagcaaccacggc

SEQ ID NO: 28387 - DNA, 21 bp, synthetic construct
  source 1..21: mol_type = other DNA
tgtaaacccccatctccgatc

SEQ ID NO: 28388 - DNA, 21 bp, synthetic construct
  source 1..21: mol_type = other DNA
aactatgcaagccattcctgg

SEQ ID NO: 28389 - DNA, 21 bp, synthetic construct
  source 1..21: mol_type = other DNA
tactcacgtgtgcaaccgaac

SEQ ID NO: 28390 - DNA, 21 bp, synthetic construct
  source 1..21: mol_type = other DNA
cttcacaggttacatacagac

SEQ ID NO: 28391 - DNA, 21 bp, synthetic construct
  source 1..21: mol_type = other DNA
cgtgaggactcgtccagatgg

SEQ ID NO: 28392 - DNA, 21 bp, synthetic construct
  source 1..21: mol_type = other DNA
gcctgtaagccccaaatggga

SEQ ID NO: 28393 - DNA, 21 bp, synthetic construct
  source 1..21: mol_type = other DNA
tattttgctgggcgaattgat

SEQ ID NO: 28394 - DNA, 21 bp, synthetic construct
  source 1..21: mol_type = other DNA
ggaaatggtactaaatgcggt

SEQ ID NO: 28395 - DNA, 21 bp, synthetic construct
  source 1..21: mol_type = other DNA
tacagccgcattaacataaat

SEQ ID NO: 28396 - DNA, 21 bp, synthetic construct
  source 1..21: mol_type = other DNA
tcgggctcaactaacggcatt

SEQ ID NO: 28397 - DNA, 21 bp, synthetic construct
  source 1..21: mol_type = other DNA
gggggcgatggatcgtcatgg

SEQ ID NO: 28398 - DNA, 21 bp, synthetic construct
  source 1..21: mol_type = other DNA
tgtttaggtaagtgcaaaccc

SEQ ID NO: 28399 - DNA, 21 bp, synthetic construct
  source 1..21: mol_type = other DNA
ctttgtcgggcttgctcggaa

SEQ ID NO: 28400 - DNA, 21 bp, synthetic construct
  source 1..21: mol_type = other DNA
tacgcacgatccggtcttaat

SEQ ID NO: 28401 - DNA, 21 bp, synthetic construct
  source 1..21: mol_type = other DNA
tacttctcaggcacaattcaa

SEQ ID NO: 28402 - DNA, 21 bp, synthetic construct
  source 1..21: mol_type = other DNA
cgggatgagttcgagcactgg

SEQ ID NO: 28403 - DNA, 21 bp, synthetic construct
  source 1..21: mol_type = other DNA
gggatcgctaacactatgtgg

SEQ ID NO: 28404 - DNA, 21 bp, synthetic construct
  source 1..21: mol_type = other DNA
aggggagatagagtgttcccc

SEQ ID NO: 28405 - DNA, 21 bp, synthetic construct
  source 1..21: mol_type = other DNA
tttttcacaggtcaaagggac

SEQ ID NO: 28406 - DNA, 21 bp, synthetic construct
  source 1..21: mol_type = other DNA
tactcgcgacttggtcaaaac

SEQ ID NO: 28407 - DNA, 21 bp, synthetic construct
  source 1..21: mol_type = other DNA
tatttttcgggccgtacagat

SEQ ID NO: 28408 - DNA, 21 bp, synthetic construct
  source 1..21: mol_type = other DNA
tatcataagagccagcaatac

SEQ ID NO: 28409 - DNA, 21 bp, synthetic construct
  source 1..21: mol_type = other DNA
ttggcacggtctggttatgac

SEQ ID NO: 28410 - DNA, 21 bp, synthetic construct
  source 1..21: mol_type = other DNA
ttagcgaagatgggtcccaat

SEQ ID NO: 28411 - DNA, 21 bp, synthetic construct
  source 1..21: mol_type = other DNA
atccctggacataaatgcgcc

SEQ ID NO: 28412 - DNA, 21 bp, synthetic construct
  source 1..21: mol_type = other DNA
tggtctagaattgggccaaac

SEQ ID NO: 28413 - DNA, 21 bp, synthetic construct
  source 1..21: mol_type = other DNA
tgggacggaagctgcaaagcc

SEQ ID NO: 28414 - DNA, 21 bp, synthetic construct
  source 1..21: mol_type = other DNA
tatgccaaatatggccctaat

SEQ ID NO: 28415 - DNA, 21 bp, synthetic construct
  source 1..21: mol_type = other DNA
cgtgaatctgacaacggcatt

SEQ ID NO: 28416 - DNA, 21 bp, synthetic construct
  source 1..21: mol_type = other DNA
tactcacgcgtaggtattaac

SEQ ID NO: 28417 - DNA, 21 bp, synthetic construct
  source 1..21: mol_type = other DNA
tactacacgggcagggtagac

SEQ ID NO: 28418 - DNA, 21 bp, synthetic construct
  source 1..21: mol_type = other DNA
tgtaaaccattcacaagagaa

SEQ ID NO: 28419 - DNA, 21 bp, synthetic construct
  source 1..21: mol_type = other DNA
tatactagactgaatcaaaac

SEQ ID NO: 28420 - DNA, 21 bp, synthetic construct
  source 1..21: mol_type = other DNA
aaggatggctactccgtgtat

SEQ ID NO: 28421 - DNA, 21 bp, synthetic construct
  source 1..21: mol_type = other DNA
gattatgcatatagcagggaa

SEQ ID NO: 28422 - DNA, 21 bp, synthetic construct
  source 1..21: mol_type = other DNA
tatgctagagggggggctaat

SEQ ID NO: 28423 - DNA, 21 bp, synthetic construct
  source 1..21: mol_type = other DNA
ctacgcgacggaaccccgtcc

SEQ ID NO: 28424 - DNA, 21 bp, synthetic construct
  source 1..21: mol_type = other DNA
tattcgaggttatcaattgac

SEQ ID NO: 28425 - DNA, 21 bp, synthetic construct
  source 1..21: mol_type = other DNA
aagtacgaccatgtagcgtgg

SEQ ID NO: 28426 - DNA, 21 bp, synthetic construct
  source 1..21: mol_type = other DNA
tactctaagtctaaccacaac

SEQ ID NO: 28427 - DNA, 21 bp, synthetic construct
  source 1..21: mol_type = other DNA
attatgggtgataggacatgg

SEQ ID NO: 28428 - DNA, 21 bp, synthetic construct
  source 1..21: mol_type = other DNA
agagatgaatttgtgggctat

SEQ ID NO: 28429 - DNA, 21 bp, synthetic construct
  source 1..21: mol_type = other DNA
tatgctagaactaatgataat

SEQ ID NO: 28430 - DNA, 21 bp, synthetic construct
  source 1..21: mol_type = other DNA
tacagtagagcaggtgacaac

SEQ ID NO: 28431 - DNA, 21 bp, synthetic construct
  source 1..21: mol_type = other DNA
agcctagcagacagaaaatgg

SEQ ID NO: 28432 - DNA, 21 bp, synthetic construct
  source 1..21: mol_type = other DNA
tacgctaagtacgggcccaat

SEQ ID NO: 28433 - DNA, 21 bp, synthetic construct
  source 1..21: mol_type = other DNA
tacagcaaacaaggttggaat

SEQ ID NO: 28434 - DNA, 21 bp, synthetic construct
  source 1..21: mol_type = other DNA
aacgggatcaacggtagatgg

SEQ ID NO: 28435 - DNA, 21 bp, synthetic construct
  source 1..21: mol_type = other DNA
ttcttcagtggacgcgtagaa

SEQ ID NO: 28436 - DNA, 21 bp, synthetic construct
  source 1..21: mol_type = other DNA
ctacacaggctctcagaatat

SEQ ID NO: 28437 - DNA, 21 bp, synthetic construct
  source 1..21: mol_type = other DNA
ttttgtagtaccaacggagtc

SEQ ID NO: 28438 - DNA, 21 bp, synthetic construct
  source 1..21: mol_type = other DNA
ttccacaggctcagtacgaat

SEQ ID NO: 28439 - DNA, 21 bp, synthetic construct
  source 1..21: mol_type = other DNA
tacttcactgggcaaacaatg

SEQ ID NO: 28440 - DNA, 21 bp, synthetic construct
  source 1..21: mol_type = other DNA
tatcacgcgttaaatctcgac

SEQ ID NO: 28441 - DNA, 21 bp, synthetic construct
  source 1..21: mol_type = other DNA
tatagccgcattggagggaat

SEQ ID NO: 28442 - DNA, 21 bp, synthetic construct
  source 1..21: mol_type = other DNA
tactttacaggtacagtcaaa

SEQ ID NO: 28443 - DNA, 21 bp, synthetic construct
  source 1..21: mol_type = other DNA
attatgcaggaccgtgcatgg

SEQ ID NO: 28444 - DNA, 21 bp, synthetic construct
  source 1..21: mol_type = other DNA
tatgccaggaacggtacgaat

SEQ ID NO: 28445 - DNA, 21 bp, synthetic construct
  source 1..21: mol_type = other DNA
tattggaccggaatggtagac

SEQ ID NO: 28446 - DNA, 21 bp, synthetic construct
  source 1..21: mol_type = other DNA
gatatggcgtccagaatgtgg

SEQ ID NO: 28447 - DNA, 21 bp, synthetic construct
  source 1..21: mol_type = other DNA
cgcactgaattcgaggggtac

SEQ ID NO: 28448 - DNA, 21 bp, synthetic construct
  source 1..21: mol_type = other DNA
tttttcagtggtgtaaaagac

SEQ ID NO: 28449 - DNA, 21 bp, synthetic construct
  source 1..21: mol_type = other DNA
tgtgatgcagagatgcgagag

SEQ ID NO: 28450 - DNA, 21 bp, synthetic construct
  source 1..21: mol_type = other DNA
tactggtcagggttattggat

SEQ ID NO: 28451 - DNA, 21 bp, synthetic construct
  source 1..21: mol_type = other DNA
tactttcatggtaaacaggag

SEQ ID NO: 28452 - DNA, 21 bp, synthetic construct
  source 1..21: mol_type = other DNA
tacttcgcgggccggttcgac

SEQ ID NO: 28453 - DNA, 21 bp, synthetic construct
  source 1..21: mol_type = other DNA
aaggacggctattcgctatat

SEQ ID NO: 28454 - DNA, 21 bp, synthetic construct
  source 1..21: mol_type = other DNA
cgagactacgacgcatttcct

SEQ ID NO: 28455 - DNA, 21 bp, synthetic construct
  source 1..21: mol_type = other DNA
tatgcaagaagtgggatgaat

SEQ ID NO: 28456 - DNA, 21 bp, synthetic construct
  source 1..21: mol_type = other DNA
ttgagtaaagtggggcccgat

SEQ ID NO: 28457 - DNA, 21 bp, synthetic construct
  source 1..21: mol_type = other DNA
tacgctaaaacgggaggcaat

SEQ ID NO: 28458 - DNA, 21 bp, synthetic construct
  source 1..21: mol_type = other DNA
tatgctcgtgggggcctgaat

SEQ ID NO: 28459 - DNA, 21 bp, synthetic construct
  source 1..21: mol_type = other DNA
tacttcagcggcatgaggtct

SEQ ID NO: 28460 - DNA, 21 bp, synthetic construct
  source 1..21: mol_type = other DNA
cgaggcgagtcacacggatgg

SEQ ID NO: 28461 - DNA, 21 bp, synthetic construct
  source 1..21: mol_type = other DNA
tggtacagcggcataaaggag

SEQ ID NO: 28462 - DNA, 21 bp, synthetic construct
  source 1..21: mol_type = other DNA
accgacgactggtcaagttat

SEQ ID NO: 28463 - DNA, 21 bp, synthetic construct
  source 1..21: mol_type = other DNA
tgcatgccgtgtactccgtgt

SEQ ID NO: 28464 - DNA, 21 bp, synthetic construct
  source 1..21: mol_type = other DNA
tgcggtccaggctgctgtgaa

SEQ ID NO: 28465 - DNA, 21 bp, synthetic construct
  source 1..21: mol_type = other DNA
gcagacggtgtcagtaaatgg

SEQ ID NO: 28466 - DNA, 21 bp, synthetic construct
  source 1..21: mol_type = other DNA
tatttttcgggcataccaatg

SEQ ID NO: 28467 - DNA, 21 bp, synthetic construct
  source 1..21: mol_type = other DNA
tattggagtggaatacccgag

SEQ ID NO: 28468 - DNA, 21 bp, synthetic construct
  source 1..21: mol_type = other DNA
aaggacgggtatagtgtgtgg

SEQ ID NO: 28469 - DNA, 21 bp, synthetic construct
  source 1..21: mol_type = other DNA
tggtggagcggtattacagac

SEQ ID NO: 28470 - DNA, 21 bp, synthetic construct
  source 1..21: mol_type = other DNA
tatttcaccggacggactgat

SEQ ID NO: 28471 - DNA, 21 bp, synthetic construct
  source 1..21: mol_type = other DNA
tactccagattgaacgcgaat

SEQ ID NO: 28472 - DNA, 21 bp, synthetic construct
  source 1..21: mol_type = other DNA
ctgtccaagtcagcgtataac

SEQ ID NO: 28473 - DNA, 21 bp, synthetic construct
  source 1..21: mol_type = other DNA
tacgctagaacaggtggcaac

SEQ ID NO: 28474 - DNA, 21 bp, synthetic construct
  source 1..21: mol_type = other DNA
cgaacctacgacgcttttgca

SEQ ID NO: 28475 - DNA, 21 bp, synthetic construct
  source 1..21: mol_type = other DNA
tattcgcgggccaatgagaat

SEQ ID NO: 28476 - DNA, 21 bp, synthetic construct
  source 1..21: mol_type = other DNA
tactcgaaaggaaacttcaac

SEQ ID NO: 28477 - DNA, 21 bp, synthetic construct
  source 1..21: mol_type = other DNA
tactttagtggagtaagcatg

SEQ ID NO: 28478 - DNA, 21 bp, synthetic construct
  source 1..21: mol_type = other DNA
catcagagcacgaatgggatt

SEQ ID NO: 28479 - DNA, 21 bp, synthetic construct
  source 1..21: mol_type = other DNA
tactcgcgggtgggcttaaat

SEQ ID NO: 28480 - DNA, 21 bp, synthetic construct
  source 1..21: mol_type = other DNA
ggctgtcggccgcaagctggc

SEQ ID NO: 28481 - DNA, 21 bp, synthetic construct
  source 1..21: mol_type = other DNA
tatttcagcgggactgtgatg

SEQ ID NO: 28482 - DNA, 21 bp, synthetic construct
  source 1..21: mol_type = other DNA
cgggatgagtttaaaagctat

SEQ ID NO: 28483 - DNA, 21 bp, synthetic construct
  source 1..21: mol_type = other DNA
ttttggtcgggaatcgtggaa

SEQ ID NO: 28484 - DNA, 21 bp, synthetic construct
  source 1..21: mol_type = other DNA
taccatcgattgagccaggat

SEQ ID NO: 28485 - DNA, 21 bp, synthetic construct
  source 1..21: mol_type = other DNA
ccatatgctaggtctgtcgat

SEQ ID NO: 28486 - DNA, 21 bp, synthetic construct
  source 1..21: mol_type = other DNA
tactcgaaaaatgggtacaac

SEQ ID NO: 28487 - DNA, 21 bp, synthetic construct
  source 1..21: mol_type = other DNA
ttttttagtggggtaaaagac

SEQ ID NO: 28488 - DNA, 21 bp, synthetic construct
  source 1..21: mol_type = other DNA
tattttagtggagtgcatcag

SEQ ID NO: 28489 - DNA, 21 bp, synthetic construct
  source 1..21: mol_type = other DNA
tatcaccgactcagcgaaatg

SEQ ID NO: 28490 - DNA, 21 bp, synthetic construct
  source 1..21: mol_type = other DNA
tactggagtggtttaaaggag

SEQ ID NO: 28491 - DNA, 21 bp, synthetic construct
  source 1..21: mol_type = other DNA
agaacatttgactcatacgca

SEQ ID NO: 28492 - DNA, 21 bp, synthetic construct
  source 1..21: mol_type = other DNA
tactcacgagtcggaactaac

SEQ ID NO: 28493 - DNA, 21 bp, synthetic construct
  source 1..21: mol_type = other DNA
tgcaagccgcgcatgctcgag

SEQ ID NO: 28494 - DNA, 21 bp, synthetic construct
  source 1..21: mol_type = other DNA
ttggctcggaacgcaagcaac

SEQ ID NO: 28495 - DNA, 21 bp, synthetic construct
  source 1..21: mol_type = other DNA
tatttcaccggctatactgag

SEQ ID NO: 28496 - DNA, 21 bp, synthetic construct
  source 1..21: mol_type = other DNA
atgtgggatggaacctcgcct

SEQ ID NO: 28497 - DNA, 21 bp, synthetic construct
  source 1..21: mol_type = other DNA
tactttagccagattaaagag

SEQ ID NO: 28498 - DNA, 21 bp, synthetic construct
  source 1..21: mol_type = other DNA
ctttgggacggcacgatgtct

SEQ ID NO: 28499 - DNA, 21 bp, synthetic construct
  source 1..21: mol_type = other DNA
tactactcgggaatcataagt

SEQ ID NO: 28500 - DNA, 21 bp, synthetic construct
  source 1..21: mol_type = other DNA
tgcaagcctcctagtgacatg

SEQ ID NO: 28501 - DNA, 21 bp, synthetic construct
  source 1..21: mol_type = other DNA
tttagccgcgtggggcaaaat

SEQ ID NO: 28502 - DNA, 21 bp, synthetic construct
  source 1..21: mol_type = other DNA
ttatgtaatccatgcttgacg

SEQ ID NO: 28503 - DNA, 21 bp, synthetic construct
  source 1..21: mol_type = other DNA
tacttcactggcaaaatagga

SEQ ID NO: 28504 - DNA, 21 bp, synthetic construct
  source 1..21: mol_type = other DNA
tggtattccggaatacgtgag

SEQ ID NO: 28505 - DNA, 21 bp, synthetic construct
  source 1..21: mol_type = other DNA
atgcatagacttactatggac

SEQ ID NO: 28506 - DNA, 21 bp, synthetic construct
  source 1..21: mol_type = other DNA
ttgtacgatggcgatggtccc

SEQ ID NO: 28507 - DNA, 21 bp, synthetic construct
  source 1..21: mol_type = other DNA
ctgctccaaagtacaacgtgg

SEQ ID NO: 28508 - DNA, 21 bp, synthetic construct
  source 1..21: mol_type = other DNA
tactgcaaggataataggccc

SEQ ID NO: 28509 - DNA, 21 bp, synthetic construct
  source 1..21: mol_type = other DNA
tattttactggcgtcaccggg

SEQ ID NO: 28510 - DNA, 21 bp, synthetic construct
  source 1..21: mol_type = other DNA
ggttcggatcacgttagatgg

SEQ ID NO: 28511 - DNA, 21 bp, synthetic construct
  source 1..21: mol_type = other DNA
tatgttaaaagccaaatgatc

SEQ ID NO: 28512 - DNA, 21 bp, synthetic construct
  source 1..21: mol_type = other DNA
gatttgagggccgctaattgg

SEQ ID NO: 28513 - DNA, 21 bp, synthetic construct
  source 1..21: mol_type = other DNA
tactccaagatgggtagcaac

SEQ ID NO: 28514 - DNA, 21 bp, synthetic construct
  source 1..21: mol_type = other DNA
ttgcaccggttacatacatcg

SEQ ID NO: 28515 - DNA, 21 bp, synthetic construct
  source 1..21: mol_type = other DNA
ttaaatgactatgtgacgtac

SEQ ID NO: 28516 - DNA, 21 bp, synthetic construct
  source 1..21: mol_type = other DNA
tatgcgcggaccggctgggat

SEQ ID NO: 28517 - DNA, 21 bp, synthetic construct
  source 1..21: mol_type = other DNA
tattcccgaattcaggtggat

SEQ ID NO: 28518 - DNA, 21 bp, synthetic construct
  source 1..21: mol_type = other DNA
tactatacgggaagggttgac

SEQ ID NO: 28519 - DNA, 21 bp, synthetic construct
  source 1..21: mol_type = other DNA
ctccatcggttaaacccctcc

SEQ ID NO: 28520 - DNA, 21 bp, synthetic construct
  source 1..21: mol_type = other DNA
caggatgagtacctctcgtgg

SEQ ID NO: 28521 - DNA, 21 bp, synthetic construct
  source 1..21: mol_type = other DNA
aggacattcgacgcatatcca

SEQ ID NO: 28522 - DNA, 21 bp, synthetic construct
  source 1..21: mol_type = other DNA
ttcgtaaagtcacagccaggc

SEQ ID NO: 28523 - DNA, 21 bp, synthetic construct
  source 1..21: mol_type = other DNA
tatttcactggtagggctgac

SEQ ID NO: 28524 - DNA, 21 bp, synthetic construct
  source 1..21: mol_type = other DNA
gatatgcgggatcgcatgtgg

SEQ ID NO: 28525 - DNA, 21 bp, synthetic construct
  source 1..21: mol_type = other DNA
ggctcaggcaccagtcactgg

SEQ ID NO: 28526 - DNA, 21 bp, synthetic construct
  source 1..21: mol_type = other DNA
ggcagcgggacttcgagctgg

SEQ ID NO: 28527 - DNA, 21 bp, synthetic construct
  source 1..21: mol_type = other DNA
tatattaagggggacttattc

SEQ ID NO: 28528 - DNA, 21 bp, synthetic construct
  source 1..21: mol_type = other DNA
tatttcactggtgtattaccc

SEQ ID NO: 28529 - DNA, 21 bp, synthetic construct
  source 1..21: mol_type = other DNA
tacttctcaggaagaatcgac

SEQ ID NO: 28530 - DNA, 21 bp, synthetic construct
  source 1..21: mol_type = other DNA
tactataccggcgtgaagaac

SEQ ID NO: 28531 - DNA, 21 bp, synthetic construct
  source 1..21: mol_type = other DNA
tacttcaccggcaaagtaggg

SEQ ID NO: 28532 - DNA, 21 bp, synthetic construct
  source 1..21: mol_type = other DNA
tacagtcgtctaaatataaac

SEQ ID NO: 28533 - DNA, 21 bp, synthetic construct
  source 1..21: mol_type = other DNA
atcatggagagtcaatcttgg

SEQ ID NO: 28534 - DNA, 21 bp, synthetic construct
  source 1..21: mol_type = other DNA
gggtcagagtacagtaagtgg

SEQ ID NO: 28535 - DNA, 21 bp, synthetic construct
  source 1..21: mol_type = other DNA
tacagccgcatcggcgggaat

SEQ ID NO: 28536 - DNA, 21 bp, synthetic construct
  source 1..21: mol_type = other DNA
tattgggcgggtaagatagaa

SEQ ID NO: 28537 - DNA, 21 bp, synthetic construct
  source 1..21: mol_type = other DNA
acgatatcgactaatggcatc

SEQ ID NO: 28538 - DNA, 21 bp, synthetic construct
  source 1..21: mol_type = other DNA
ttcgcgaagagcgggtataac

SEQ ID NO: 28539 - DNA, 21 bp, synthetic construct
  source 1..21: mol_type = other DNA
gggtgcataattccaggtgtt

SEQ ID NO: 28540 - DNA, 21 bp, synthetic construct
  source 1..21: mol_type = other DNA
cccatgggtcaggctacttgg

SEQ ID NO: 28541 - DNA, 21 bp, synthetic construct
  source 1..21: mol_type = other DNA
tattggagtggcacagttgac

SEQ ID NO: 28542 - DNA, 21 bp, synthetic construct
  source 1..21: mol_type = other DNA
ttcttttcaggaaaaattgac

SEQ ID NO: 28543 - DNA, 21 bp, synthetic construct
  source 1..21: mol_type = other DNA
tactggagtaagatagctgaa

SEQ ID NO: 28544 - DNA, 21 bp, synthetic construct
  source 1..21: mol_type = other DNA
cgcgacagcacgcatgggata

SEQ ID NO: 28545 - DNA, 21 bp, synthetic construct
  source 1..21: mol_type = other DNA
gctggcggaggcttgtatata

SEQ ID NO: 28546 - DNA, 21 bp, synthetic construct
  source 1..21: mol_type = other DNA
tactacacagggcaagtgtca

SEQ ID NO: 28547 - DNA, 21 bp, synthetic construct
  source 1..21: mol_type = other DNA
tttcaccgactgtccgacgat

SEQ ID NO: 28548 - DNA, 21 bp, synthetic construct
  source 1..21: mol_type = other DNA
tacagtagaacgaacataaac

SEQ ID NO: 28549 - DNA, 21 bp, synthetic construct
  source 1..21: mol_type = other DNA
tatatgaaggatgcgttcccg

SEQ ID NO: 28550 - DNA, 21 bp, synthetic construct
  source 1..21: mol_type = other DNA
aaagatgactggaactcatgg

SEQ ID NO: 28551 - DNA, 21 bp, synthetic construct
  source 1..21: mol_type = other DNA
tttagcaggctgggaaacaac

SEQ ID NO: 28552 - DNA, 21 bp, synthetic construct
  source 1..21: mol_type = other DNA
tggttcaccggaaaagtggac

SEQ ID NO: 28553 - DNA, 21 bp, synthetic construct
  source 1..21: mol_type = other DNA
ttgagtagaacgtcgatcgac

SEQ ID NO: 28554 - DNA, 21 bp, synthetic construct
  source 1..21: mol_type = other DNA
tatagtagaattggacctatg

SEQ ID NO: 28555 - DNA, 21 bp, synthetic construct
  source 1..21: mol_type = other DNA
tactcaaaagggaattacaac

SEQ ID NO: 28556 - DNA, 21 bp, synthetic construct
  source 1..21: mol_type = other DNA
taccataggttatctgaaatg

SEQ ID NO: 28557 - DNA, 21 bp, synthetic construct
  source 1..21: mol_type = other DNA
ttctttagtggcatcatggaa

SEQ ID NO: 28558 - DNA, 21 bp, synthetic construct
  source 1..21: mol_type = other DNA
ggggatgaatgggtcggctat

SEQ ID NO: 28559 - DNA, 21 bp, synthetic construct
  source 1..21: mol_type = other DNA
aggctcgagagccaggtatgg

SEQ ID NO: 28560 - DNA, 21 bp, synthetic construct
  source 1..21: mol_type = other DNA
tgcaagccgccaatggctcca

SEQ ID NO: 28561 - DNA, 21 bp, synthetic construct
  source 1..21: mol_type = other DNA
agggacgcagacgttttcccg

SEQ ID NO: 28562 - DNA, 21 bp, synthetic construct
  source 1..21: mol_type = other DNA
gtatccgattatgcgtcgtat

SEQ ID NO: 28563 - DNA, 21 bp, synthetic construct
  source 1..21: mol_type = other DNA
tgggttaaatcgcaacagcat

SEQ ID NO: 28564 - DNA, 21 bp, synthetic construct
  source 1..21: mol_type = other DNA
tacgcacggatcgggtataac

SEQ ID NO: 28565 - DNA, 21 bp, synthetic construct
  source 1..21: mol_type = other DNA
cgaacattcgacgcatatccg

SEQ ID NO: 28566 - DNA, 21 bp, synthetic construct
  source 1..21: mol_type = other DNA
tacttcacgggcaggacaagc

SEQ ID NO: 28567 - DNA, 21 bp, synthetic construct
  source 1..21: mol_type = other DNA
tactggacaggagtcggtgcg

SEQ ID NO: 28568 - DNA, 21 bp, synthetic construct
  source 1..21: mol_type = other DNA
agggatggcacatcgatctgg

SEQ ID NO: 28569 - DNA, 21 bp, synthetic construct
  source 1..21: mol_type = other DNA
tatcacgcaaggcaaattaat

SEQ ID NO: 28570 - DNA, 21 bp, synthetic construct
  source 1..21: mol_type = other DNA
cttagtcgtttggggcctatt

SEQ ID NO: 28571 - DNA, 21 bp, synthetic construct
  source 1..21: mol_type = other DNA
tattggtctgggaaagcagcg

SEQ ID NO: 28572 - DNA, 21 bp, synthetic construct
  source 1..21: mol_type = other DNA
tactcacgattaaatgagaat

SEQ ID NO: 28573 - DNA, 21 bp, synthetic construct
  source 1..21: mol_type = other DNA
cacagcaggctcaatgtctca

SEQ ID NO: 28574 - DNA, 21 bp, synthetic construct
  source 1..21: mol_type = other DNA
atgtgggatggtaccagcccc

SEQ ID NO: 28575 - DNA, 21 bp, synthetic construct
  source 1..21: mol_type = other DNA
cgtcagtcaaccaatggcgtc

SEQ ID NO: 28576 - DNA, 21 bp, synthetic construct
  source 1..21: mol_type = other DNA
tactggtctgctgtggttgcg

SEQ ID NO: 28577 - DNA, 21 bp, synthetic construct
  source 1..21: mol_type = other DNA
tattttagcggacagttggct

SEQ ID NO: 28578 - DNA, 21 bp, synthetic construct
  source 1..21: mol_type = other DNA
gctatgcaggaccgcagttgg

SEQ ID NO: 28579 - DNA, 21 bp, synthetic construct
  source 1..21: mol_type = other DNA
ttttcacgcctcggaaataat

SEQ ID NO: 28580 - DNA, 21 bp, synthetic construct
  source 1..21: mol_type = other DNA
tgtgctccatatttacgtgaa

SEQ ID NO: 28581 - DNA, 21 bp, synthetic construct
  source 1..21: mol_type = other DNA
aggtcagacttcacgagctat

SEQ ID NO: 28582 - DNA, 21 bp, synthetic construct
  source 1..21: mol_type = other DNA
tttttcaccggcattcaagct

SEQ ID NO: 28583 - DNA, 21 bp, synthetic construct
  source 1..21: mol_type = other DNA
agggacgattatgtgtattac

SEQ ID NO: 28584 - DNA, 21 bp, synthetic construct
  source 1..21: mol_type = other DNA
tgccataaaaaggaggaaggc

SEQ ID NO: 28585 - DNA, 21 bp, synthetic construct
  source 1..21: mol_type = other DNA
tcaatggcttcagttaagtgg

SEQ ID NO: 28586 - DNA, 21 bp, synthetic construct
  source 1..21: mol_type = other DNA
tatccgggtaaaacctgctcc

SEQ ID NO: 28587 - DNA, 21 bp, synthetic construct
  source 1..21: mol_type = other DNA
tattctagaatcggtgccaat

SEQ ID NO: 28588 - DNA, 21 bp, synthetic construct
  source 1..21: mol_type = other DNA
tactcaaaaaacggccttaac

SEQ ID NO: 28589 - DNA, 21 bp, synthetic construct
  source 1..21: mol_type = other DNA
tgtactcgagtggtcgtcgat

SEQ ID NO: 28590 - DNA, 21 bp, synthetic construct
  source 1..21: mol_type = other DNA
tactctaaagctggctacgac

SEQ ID NO: 28591 - DNA, 21 bp, synthetic construct
  source 1..21: mol_type = other DNA
agagatgaatacgttcattgg

SEQ ID NO: 28592 - DNA, 21 bp, synthetic construct
  source 1..21: mol_type = other DNA
ttttcctctacaaatggaatc

SEQ ID NO: 28593 - DNA, 21 bp, synthetic construct
  source 1..21: mol_type = other DNA
tattctaaggccaattgtaac

SEQ ID NO: 28594 - DNA, 21 bp, synthetic construct
  source 1..21: mol_type = other DNA
tacagcagagctggattcgac

SEQ ID NO: 28595 - DNA, 21 bp, synthetic construct
  source 1..21: mol_type = other DNA
tactacaccggtagaatggaa

SEQ ID NO: 28596 - DNA, 21 bp, synthetic construct
  source 1..21: mol_type = other DNA
agccttgagtcacgtgactgg

SEQ ID NO: 28597 - DNA, 21 bp, synthetic construct
  source 1..21: mol_type = other DNA
ctcttcgacgctacgccatcc

SEQ ID NO: 28598 - DNA, 21 bp, synthetic construct
  source 1..21: mol_type = other DNA
tattctagaataggtggaaac

SEQ ID NO: 28599 - DNA, 21 bp, synthetic construct
  source 1..21: mol_type = other DNA
ttctctaaaatagggtataat

SEQ ID NO: 28600 - DNA, 21 bp, synthetic construct
  source 1..21: mol_type = other DNA
attaaaagtacaaacggcata

SEQ ID NO: 28601 - DNA, 21 bp, synthetic construct
  source 1..21: mol_type = other DNA
gtcccgtcgagcgttaaatgg

SEQ ID NO: 28602 - DNA, 21 bp, synthetic construct
  source 1..21: mol_type = other DNA
tggcccaacggggtggcaggt

SEQ ID NO: 28603 - DNA, 21 bp, synthetic construct
  source 1..21: mol_type = other DNA
tatttttccggacaacacagt

SEQ ID NO: 28604 - DNA, 21 bp, synthetic construct
  source 1..21: mol_type = other DNA
tatgagagtacgaatggcatc

SEQ ID NO: 28605 - DNA, 21 bp, synthetic construct
  source 1..21: mol_type = other DNA
gtagccatgaagggtgctggc

SEQ ID NO: 28606 - DNA, 21 bp, synthetic construct
  source 1..21: mol_type = other DNA
tgttcagtagtgacaggcagc

SEQ ID NO: 28607 - DNA, 21 bp, synthetic construct
  source 1..21: mol_type = other DNA
tactttagcggtcaaattaaa

SEQ ID NO: 28608 - DNA, 21 bp, synthetic construct
  source 1..21: mol_type = other DNA
tattcaaggctgcatgctgta

SEQ ID NO: 28609 - DNA, 21 bp, synthetic construct
  source 1..21: mol_type = other DNA
tatgcccgcgtcggcaataac

SEQ ID NO: 28610 - DNA, 21 bp, synthetic construct
  source 1..21: mol_type = other DNA
tactacagtggcgtaaaatca

SEQ ID NO: 28611 - DNA, 21 bp, synthetic construct
  source 1..21: mol_type = other DNA
acctggatgggcgataacgcg

SEQ ID NO: 28612 - DNA, 21 bp, synthetic construct
  source 1..21: mol_type = other DNA
tactggcaaggtattgtagat

SEQ ID NO: 28613 - DNA, 21 bp, synthetic construct
  source 1..21: mol_type = other DNA
tatttcacagggaggccaatg

SEQ ID NO: 28614 - DNA, 21 bp, synthetic construct
  source 1..21: mol_type = other DNA
tattatactgggaagtgtgac

SEQ ID NO: 28615 - DNA, 21 bp, synthetic construct
  source 1..21: mol_type = other DNA
ttctggtcgggtattaaagaa

SEQ ID NO: 28616 - DNA, 21 bp, synthetic construct
  source 1..21: mol_type = other DNA
ttgtcgcgtcttagtcccgtc

SEQ ID NO: 28617 - DNA, 21 bp, synthetic construct
  source 1..21: mol_type = other DNA
cgggacggtacctcacagtgg

SEQ ID NO: 28618 - DNA, 21 bp, synthetic construct
  source 1..21: mol_type = other DNA
gtaggggaggcacgtagttgg

SEQ ID NO: 28619 - DNA, 21 bp, synthetic construct
  source 1..21: mol_type = other DNA
gcaatgcaagataggtcttgg

SEQ ID NO: 28620 - DNA, 21 bp, synthetic construct
  source 1..21: mol_type = other DNA
gagccggagtcacgcgcatgg

SEQ ID NO: 28621 - DNA, 21 bp, synthetic construct
  source 1..21: mol_type = other DNA
ttacacagattacacctagac

SEQ ID NO: 28622 - DNA, 21 bp, synthetic construct
  source 1..21: mol_type = other DNA
tactactcaggaagaattgaa

SEQ ID NO: 28623 - DNA, 21 bp, synthetic construct
  source 1..21: mol_type = other DNA
ctgacccgattggtgaataac

SEQ ID NO: 28624 - DNA, 21 bp, synthetic construct
  source 1..21: mol_type = other DNA
gggtcgggaaccagctcatgg

SEQ ID NO: 28625 - DNA, 21 bp, synthetic construct
  source 1..21: mol_type = other DNA
aaagacgattatacagttttt

SEQ ID NO: 28626 - DNA, 21 bp, synthetic construct
  source 1..21: mol_type = other DNA
tatagtcgtatacagcctatg

SEQ ID NO: 28627 - DNA, 21 bp, synthetic construct
  source 1..21: mol_type = other DNA
ggttgccgccatggacccata

SEQ ID NO: 28628 - DNA, 21 bp, synthetic construct
  source 1..21: mol_type = other DNA
tacgtgaaaagccagggaatg

SEQ ID NO: 28629 - DNA, 21 bp, synthetic construct
  source 1..21: mol_type = other DNA
tattttagtggaacgagggcg

SEQ ID NO: 28630 - DNA, 21 bp, synthetic construct
  source 1..21: mol_type = other DNA
tacttcagcggagtgccgagc

SEQ ID NO: 28631 - DNA, 21 bp, synthetic construct
  source 1..21: mol_type = other DNA
cctcatagtacgaatggagtc

SEQ ID NO: 28632 - DNA, 21 bp, synthetic construct
  source 1..21: mol_type = other DNA
atgtccaagttaaatgcgaat

SEQ ID NO: 28633 - DNA, 21 bp, synthetic construct
  source 1..21: mol_type = other DNA
tacgcaaaaatagggtacaat

SEQ ID NO: 28634 - DNA, 21 bp, synthetic construct
  source 1..21: mol_type = other DNA
ttcttcagtgggaagattgaa

SEQ ID NO: 28635 - DNA, 21 bp, synthetic construct
  source 1..21: mol_type = other DNA
aggagccccgacgtttacccc

SEQ ID NO: 28636 - DNA, 21 bp, synthetic construct
  source 1..21: mol_type = other DNA
tacagtagggctgggatggac

SEQ ID NO: 28637 - DNA, 21 bp, synthetic construct
  source 1..21: mol_type = other DNA
tatagtcgtcttaacgatgcg

SEQ ID NO: 28638 - DNA, 21 bp, synthetic construct
  source 1..21: mol_type = other DNA
gatcttagggccggcaattgg

SEQ ID NO: 28639 - DNA, 21 bp, synthetic construct
  source 1..21: mol_type = other DNA
ttttcgcgaatcggaatcaac

SEQ ID NO: 28640 - DNA, 21 bp, synthetic construct
  source 1..21: mol_type = other DNA
tacttcgctggaaagcaggac

SEQ ID NO: 28641 - DNA, 21 bp, synthetic construct
  source 1..21: mol_type = other DNA
tatttcgcgggtgttaaaggc

SEQ ID NO: 28642 - DNA, 21 bp, synthetic construct
  source 1..21: mol_type = other DNA
tatctaaagagccagagttgg

SEQ ID NO: 28643 - DNA, 21 bp, synthetic construct
  source 1..21: mol_type = other DNA
tactcaaagcagggaataaat

SEQ ID NO: 28644 - DNA, 21 bp, synthetic construct
  source 1..21: mol_type = other DNA
attgcggagcgtggatgcgcg

SEQ ID NO: 28645 - DNA, 21 bp, synthetic construct
  source 1..21: mol_type = other DNA
tacttctcggcgatcaaggag

SEQ ID NO: 28646 - DNA, 21 bp, synthetic construct
  source 1..21: mol_type = other DNA
tattcgaaaggcaatttgaac

SEQ ID NO: 28647 - DNA, 21 bp, synthetic construct
  source 1..21: mol_type = other DNA
gacggcgcaatataccttcgg

SEQ ID NO: 28648 - DNA, 21 bp, synthetic construct
  source 1..21: mol_type = other DNA
tttgcgcggatcggtcccaac

SEQ ID NO: 28649 - DNA, 21 bp, synthetic construct
  source 1..21: mol_type = other DNA
tacagtagacttaatggcaac

SEQ ID NO: 28650 - DNA, 21 bp, synthetic construct
  source 1..21: mol_type = other DNA
tgcaaaccaaaacaggtggat

SEQ ID NO: 28651 - DNA, 21 bp, synthetic construct
  source 1..21: mol_type = other DNA
tattttcagggtaggatagat

SEQ ID NO: 28652 - DNA, 21 bp, synthetic construct
  source 1..21: mol_type = other DNA
tacgcgaggagtggcactaac

SEQ ID NO: 28653 - DNA, 21 bp, synthetic construct
  source 1..21: mol_type = other DNA
tattcgagaatccaggcggat

SEQ ID NO: 28654 - DNA, 21 bp, synthetic construct
  source 1..21: mol_type = other DNA
tatttctcaggccaacttgca

SEQ ID NO: 28655 - DNA, 21 bp, synthetic construct
  source 1..21: mol_type = other DNA
ttgtctaaaatgaatgtaaat

SEQ ID NO: 28656 - DNA, 21 bp, synthetic construct
  source 1..21: mol_type = other DNA
atgggagggacttcctgtctc

SEQ ID NO: 28657 - DNA, 21 bp, synthetic construct
  source 1..21: mol_type = other DNA
tatcaccgcttgggtcaaaat

SEQ ID NO: 28658 - DNA, 21 bp, synthetic construct
  source 1..21: mol_type = other DNA
gtcagtgactacgccagttac

SEQ ID NO: 28659 - DNA, 21 bp, synthetic construct
  source 1..21: mol_type = other DNA
tattggtcaggtcttcacgcc

SEQ ID NO: 28660 - DNA, 21 bp, synthetic construct
  source 1..21: mol_type = other DNA
aagtgtgacataaagccggca

SEQ ID NO: 28661 - DNA, 21 bp, synthetic construct
  source 1..21: mol_type = other DNA
gtcatggatggtttgcgttgg

SEQ ID NO: 28662 - DNA, 21 bp, synthetic construct
  source 1..21: mol_type = other DNA
ggatcggaatttcttgggtgg

SEQ ID NO: 28663 - DNA, 21 bp, synthetic construct
  source 1..21: mol_type = other DNA
tacttcaccaagcaagtagat

SEQ ID NO: 28664 - DNA, 21 bp, synthetic construct
  source 1..21: mol_type = other DNA
tatgcacgaaatggattaaat

SEQ ID NO: 28665 - DNA, 21 bp, synthetic construct
  source 1..21: mol_type = other DNA
tacttcgcaggaagaatagat

SEQ ID NO: 28666 - DNA, 21 bp, synthetic construct
  source 1..21: mol_type = other DNA
tacagccgtattggcattaac

SEQ ID NO: 28667 - DNA, 21 bp, synthetic construct
  source 1..21: mol_type = other DNA
caaggggaagctaggtcgtgg

SEQ ID NO: 28668 - DNA, 21 bp, synthetic construct
  source 1..21: mol_type = other DNA
tattttagtggggtaacaggc

SEQ ID NO: 28669 - DNA, 21 bp, synthetic construct
  source 1..21: mol_type = other DNA
tcatcgggtacatcgcgatgg

SEQ ID NO: 28670 - DNA, 21 bp, synthetic construct
  source 1..21: mol_type = other DNA
tgtaaatcacagagtagccaa

SEQ ID NO: 28671 - DNA, 21 bp, synthetic construct
  source 1..21: mol_type = other DNA
tacgagagcactaacggaagg

SEQ ID NO: 28672 - DNA, 21 bp, synthetic construct
  source 1..21: mol_type = other DNA
ttctcgcgcgcaggttacaac

SEQ ID NO: 28673 - DNA, 21 bp, synthetic construct
  source 1..21: mol_type = other DNA
aggtctgaatttacctcgtat

SEQ ID NO: 28674 - DNA, 21 bp, synthetic construct
  source 1..21: mol_type = other DNA
tactactccggaagggtagaa

SEQ ID NO: 28675 - DNA, 21 bp, synthetic construct
  source 1..21: mol_type = other DNA
ggatcgggcacgagccattgg

SEQ ID NO: 28676 - DNA, 21 bp, synthetic construct
  source 1..21: mol_type = other DNA
tgcaagccaatatgttgtgag

SEQ ID NO: 28677 - DNA, 21 bp, synthetic construct
  source 1..21: mol_type = other DNA
gacatgagagacagaatgtgg

SEQ ID NO: 28678 - DNA, 21 bp, synthetic construct
  source 1..21: mol_type = other DNA
gttctgagctcaaaaacttgg

SEQ ID NO: 28679 - DNA, 21 bp, synthetic construct
  source 1..21: mol_type = other DNA
cgcctttacgacgcgtatgaa

SEQ ID NO: 28680 - DNA, 21 bp, synthetic construct
  source 1..21: mol_type = other DNA
tgcagggacgacaagaggtgg

SEQ ID NO: 28681 - DNA, 21 bp, synthetic construct
  source 1..21: mol_type = other DNA
tatgccaaagctaactataac

SEQ ID NO: 28682 - DNA, 21 bp, synthetic construct
  source 1..21: mol_type = other DNA
tatagtaggttaggtcagaat

SEQ ID NO: 28683 - DNA, 21 bp, synthetic construct
  source 1..21: mol_type = other DNA
ttatgtaagccttgttcggaa

SEQ ID NO: 28684 - DNA, 21 bp, synthetic construct
  source 1..21: mol_type = other DNA
ctatcgaggatgaatttcaac

SEQ ID NO: 28685 - DNA, 21 bp, synthetic construct
  source 1..21: mol_type = other DNA
tgtaaagggcaaggtccaagc

SEQ ID NO: 28686 - DNA, 21 bp, synthetic construct
  source 1..21: mol_type = other DNA
ataatgagtgacagggaatgg

SEQ ID NO: 28687 - DNA, 21 bp, synthetic construct
  source 1..21: mol_type = other DNA
tactccaaacagaacgaaaac

SEQ ID NO: 28688 - DNA, 21 bp, synthetic construct
  source 1..21: mol_type = other DNA
tattttagtggaacccactcc

SEQ ID NO: 28689 - DNA, 21 bp, synthetic construct
  source 1..21: mol_type = other DNA
tattttacagggttccgcgaa

SEQ ID NO: 28690 - DNA, 21 bp, synthetic construct
  source 1..21: mol_type = other DNA
tatgtacgtagcgatactact

SEQ ID NO: 28691 - DNA, 21 bp, synthetic construct
  source 1..21: mol_type = other DNA
tacttcacaggggtagcggtc

SEQ ID NO: 28692 - DNA, 21 bp, synthetic construct
  source 1..21: mol_type = other DNA
tgcaggatggatagtgtacct

SEQ ID NO: 28693 - DNA, 21 bp, synthetic construct
  source 1..21: mol_type = other DNA
tatgttcgcagtgacactttc

SEQ ID NO: 28694 - DNA, 21 bp, synthetic construct
  source 1..21: mol_type = other DNA
taccaccgcctaggagattcg

SEQ ID NO: 28695 - DNA, 21 bp, synthetic construct
  source 1..21: mol_type = other DNA
tgcaagccgagcccgggtatg

SEQ ID NO: 28696 - DNA, 21 bp, synthetic construct
  source 1..21: mol_type = other DNA
tattctaagatgggcgtgaat

SEQ ID NO: 28697 - DNA, 21 bp, synthetic construct
  source 1..21: mol_type = other DNA
tatttcagcggtcagcaggac

SEQ ID NO: 28698 - DNA, 21 bp, synthetic construct
  source 1..21: mol_type = other DNA
aacgaagattgggtcaagtgg

SEQ ID NO: 28699 - DNA, 21 bp, synthetic construct
  source 1..21: mol_type = other DNA
tacgtcaagggagacacgcgt

SEQ ID NO: 28700 - DNA, 21 bp, synthetic construct
  source 1..21: mol_type = other DNA
tactcgcgcgcgaacgacaat

SEQ ID NO: 28701 - DNA, 21 bp, synthetic construct
  source 1..21: mol_type = other DNA
tatagcagaataggggaggga

SEQ ID NO: 28702 - DNA, 21 bp, synthetic construct
  source 1..21: mol_type = other DNA
tactatagcggaatcgttgcg

SEQ ID NO: 28703 - DNA, 21 bp, synthetic construct
  source 1..21: mol_type = other DNA
agtatggcggatcgttcgtgg

SEQ ID NO: 28704 - DNA, 21 bp, synthetic construct
  source 1..21: mol_type = other DNA
tatttccatggacagattgac

SEQ ID NO: 28705 - DNA, 21 bp, synthetic construct
  source 1..21: mol_type = other DNA
tgtaagccccagacaatcggg

SEQ ID NO: 28706 - DNA, 21 bp, synthetic construct
  source 1..21: mol_type = other DNA
tatttctctgggaccaacgcg

SEQ ID NO: 28707 - DNA, 21 bp, synthetic construct
  source 1..21: mol_type = other DNA
tgctgtaaagacgagtgcccc

SEQ ID NO: 28708 - DNA, 21 bp, synthetic construct
  source 1..21: mol_type = other DNA
gagctcgattctcgagattgg

SEQ ID NO: 28709 - DNA, 21 bp, synthetic construct
  source 1..21: mol_type = other DNA
tattctagaatgggacccaat

SEQ ID NO: 28710 - DNA, 21 bp, synthetic construct
  source 1..21: mol_type = other DNA
ctctgcaggccgtgtagcgcg

SEQ ID NO: 28711 - DNA, 21 bp, synthetic construct
  source 1..21: mol_type = other DNA
tacagtagacttcaaccggtt

SEQ ID NO: 28712 - DNA, 21 bp, synthetic construct
  source 1..21: mol_type = other DNA
gtgatcagttcgaatggcgtc

SEQ ID NO: 28713 - DNA, 21 bp, synthetic construct
  source 1..21: mol_type = other DNA
cgtgacggcgagtcgtactgg

SEQ ID NO: 28714 - DNA, 21 bp, synthetic construct
  source 1..21: mol_type = other DNA
tatagcagagctggcgatgga

SEQ ID NO: 28715 - DNA, 21 bp, synthetic construct
  source 1..21: mol_type = other DNA
tactcaaggatatcggataac

SEQ ID NO: 28716 - DNA, 21 bp, synthetic construct
  source 1..21: mol_type = other DNA
acctggtcgacaaatggtatc

SEQ ID NO: 28717 - DNA, 21 bp, synthetic construct
  source 1..21: mol_type = other DNA
tacttttcgggtgtcaaaata

SEQ ID NO: 28718 - DNA, 21 bp, synthetic construct
  source 1..21: mol_type = other DNA
tttagccggattggccacaac

SEQ ID NO: 28719 - DNA, 21 bp, synthetic construct
  source 1..21: mol_type = other DNA
aggcccgagtgcgtcaccggg

SEQ ID NO: 28720 - DNA, 21 bp, synthetic construct
  source 1..21: mol_type = other DNA
tactttagcggtaaatcgtcg

SEQ ID NO: 28721 - DNA, 21 bp, synthetic construct
  source 1..21: mol_type = other DNA
tattacagtgggatcgtaaag

SEQ ID NO: 28722 - DNA, 21 bp, synthetic construct
  source 1..21: mol_type = other DNA
cgtgacgaatttacgtcatgg

SEQ ID NO: 28723 - DNA, 21 bp, synthetic construct
  source 1..21: mol_type = other DNA
ataaggtcgacgaacggagtt

SEQ ID NO: 28724 - DNA, 21 bp, synthetic construct
  source 1..21: mol_type = other DNA
aacgacggcagatcgttgtgg

SEQ ID NO: 28725 - DNA, 21 bp, synthetic construct
  source 1..21: mol_type = other DNA
caggagtccacgaatgggcgc

SEQ ID NO: 28726 - DNA, 21 bp, synthetic construct
  source 1..21: mol_type = other DNA
agccatagtaccaacggtatc

SEQ ID NO: 28727 - DNA, 21 bp, synthetic construct
  source 1..21: mol_type = other DNA
tacagcaaaagtggggacaat

SEQ ID NO: 28728 - DNA, 21 bp, synthetic construct
  source 1..21: mol_type = other DNA
tactttacaggtgcgtgggac

SEQ ID NO: 28729 - DNA, 21 bp, synthetic construct
  source 1..21: mol_type = other DNA
tacacgaaaagcgggccatca

SEQ ID NO: 28730 - DNA, 21 bp, synthetic construct
  source 1..21: mol_type = other DNA
tgtaagaaagcttgcggtgct

SEQ ID NO: 28731 - DNA, 21 bp, synthetic construct
  source 1..21: mol_type = other DNA
tacgcgcggcagggtccaaat

SEQ ID NO: 28732 - DNA, 21 bp, synthetic construct
  source 1..21: mol_type = other DNA
tgcaagccatacctccatgaa

SEQ ID NO: 28733 - DNA, 21 bp, synthetic construct
  source 1..21: mol_type = other DNA
tacttcaccggagtgacgcac

SEQ ID NO: 28734 - DNA, 21 bp, synthetic construct
  source 1..21: mol_type = other DNA
tactcaaagatgggtcagaat

SEQ ID NO: 28735 - DNA, 21 bp, synthetic construct
  source 1..21: mol_type = other DNA
gttgccggggccggctgtgga

SEQ ID NO: 28736 - DNA, 21 bp, synthetic construct
  source 1..21: mol_type = other DNA
ttctttactgggcagcgagat

SEQ ID NO: 28737 - DNA, 21 bp, synthetic construct
  source 1..21: mol_type = other DNA
gtaccggaaagatgcccgaag

SEQ ID NO: 28738 - DNA, 21 bp, synthetic construct
  source 1..21: mol_type = other DNA
ttgtcaaaagcaaactttaac

SEQ ID NO: 28739 - DNA, 21 bp, synthetic construct
  source 1..21: mol_type = other DNA
tcgggggctacttcaaattgg

SEQ ID NO: 28740 - DNA, 21 bp, synthetic construct
  source 1..21: mol_type = other DNA
tattggtccggattgaaggac

SEQ ID NO: 28741 - DNA, 21 bp, synthetic construct
  source 1..21: mol_type = other DNA
tactctcgactgggagcaaat

SEQ ID NO: 28742 - DNA, 21 bp, synthetic construct
  source 1..21: mol_type = other DNA
ttggaagatcatctgagatgg

SEQ ID NO: 28743 - DNA, 21 bp, synthetic construct
  source 1..21: mol_type = other DNA
ccatatgccaagagcgagctc

SEQ ID NO: 28744 - DNA, 21 bp, synthetic construct
  source 1..21: mol_type = other DNA
gacatgcgagacagaatttgg

SEQ ID NO: 28745 - DNA, 21 bp, synthetic construct
  source 1..21: mol_type = other DNA
tacttctcgggaaaaaatgac

SEQ ID NO: 28746 - DNA, 21 bp, synthetic construct
  source 1..21: mol_type = other DNA
agagacatcactgtttttcct

SEQ ID NO: 28747 - DNA, 21 bp, synthetic construct
  source 1..21: mol_type = other DNA
tatttcagcggtcaaatagtg

SEQ ID NO: 28748 - DNA, 21 bp, synthetic construct
  source 1..21: mol_type = other DNA
tacttcagcggcgtagtgcga

SEQ ID NO: 28749 - DNA, 21 bp, synthetic construct
  source 1..21: mol_type = other DNA
ggcgtgaatggctgtaaacct

SEQ ID NO: 28750 - DNA, 21 bp, synthetic construct
  source 1..21: mol_type = other DNA
gtttctgagtttcgcacttat

SEQ ID NO: 28751 - DNA, 21 bp, synthetic construct
  source 1..21: mol_type = other DNA
gcaggagcggatcgtgggtgg

SEQ ID NO: 28752 - DNA, 21 bp, synthetic construct
  source 1..21: mol_type = other DNA
ggaggcatcggttcagcatgg

SEQ ID NO: 28753 - DNA, 21 bp, synthetic construct
  source 1..21: mol_type = other DNA
tactcacggctaaacatgaac

SEQ ID NO: 28754 - DNA, 21 bp, synthetic construct
  source 1..21: mol_type = other DNA
gttgattcgtcaaatggtgtt

SEQ ID NO: 28755 - DNA, 21 bp, synthetic construct
  source 1..21: mol_type = other DNA
tactggacaggcatgccagat

SEQ ID NO: 28756 - DNA, 21 bp, synthetic construct
  source 1..21: mol_type = other DNA
cgcgcctacgacgcttttccc

SEQ ID NO: 28757 - DNA, 21 bp, synthetic construct
  source 1..21: mol_type = other DNA
tacgcgaggattgggtttaac

SEQ ID NO: 28758 - DNA, 21 bp, synthetic construct
  source 1..21: mol_type = other DNA
tgcaagtctaacacttacgat

SEQ ID NO: 28759 - DNA, 21 bp, synthetic construct
  source 1..21: mol_type = other DNA
tattcgcgggcgggggttaat

SEQ ID NO: 28760 - DNA, 21 bp, synthetic construct
  source 1..21: mol_type = other DNA
tattggaccggaaaggtagaa

SEQ ID NO: 28761 - DNA, 21 bp, synthetic construct
  source 1..21: mol_type = other DNA
tatttctcaggcattcagggg

SEQ ID NO: 28762 - DNA, 21 bp, synthetic construct
  source 1..21: mol_type = other DNA
tactacacaggcatccgtgat

SEQ ID NO: 28763 - DNA, 21 bp, synthetic construct
  source 1..21: mol_type = other DNA
tatttcagtgggattcttcca

SEQ ID NO: 28764 - DNA, 21 bp, synthetic construct
  source 1..21: mol_type = other DNA
ttccatcgcctcttgttggat

SEQ ID NO: 28765 - DNA, 21 bp, synthetic construct
  source 1..21: mol_type = other DNA
tattggacaggaaagcatgag

SEQ ID NO: 28766 - DNA, 21 bp, synthetic construct
  source 1..21: mol_type = other DNA
tgtaaaccaatttgttgcgaa

SEQ ID NO: 28767 - DNA, 21 bp, synthetic construct
  source 1..21: mol_type = other DNA
ttgccaggggtgaaatgtccc

SEQ ID NO: 28768 - DNA, 21 bp, synthetic construct
  source 1..21: mol_type = other DNA
tattttacaggagcgtatgac

SEQ ID NO: 28769 - DNA, 21 bp, synthetic construct
  source 1..21: mol_type = other DNA
tatagtaaatgcaatgtgaat

SEQ ID NO: 28770 - DNA, 21 bp, synthetic construct
  source 1..21: mol_type = other DNA
gcaatgcctgatcggggctgg

SEQ ID NO: 28771 - DNA, 21 bp, synthetic construct
  source 1..21: mol_type = other DNA
ttcgtcaggtccgacataaag

SEQ ID NO: 28772 - DNA, 21 bp, synthetic construct
  source 1..21: mol_type = other DNA
gcctggtcgaccaacggcgtt

SEQ ID NO: 28773 - DNA, 21 bp, synthetic construct
  source 1..21: mol_type = other DNA
tattccgccctacagcgcaat

SEQ ID NO: 28774 - DNA, 21 bp, synthetic construct
  source 1..21: mol_type = other DNA
cacttcagtacaaatggtgtg

SEQ ID NO: 28775 - DNA, 21 bp, synthetic construct
  source 1..21: mol_type = other DNA
ttttctagggcaggtatgaat

SEQ ID NO: 28776 - DNA, 21 bp, synthetic construct
  source 1..21: mol_type = other DNA
tttgcgcgacagggaccaaat

SEQ ID NO: 28777 - DNA, 21 bp, synthetic construct
  source 1..21: mol_type = other DNA
gccatggttgccagggactgg

SEQ ID NO: 28778 - DNA, 21 bp, synthetic construct
  source 1..21: mol_type = other DNA
cgcgacgaatttactcattat

SEQ ID NO: 28779 - DNA, 21 bp, synthetic construct
  source 1..21: mol_type = other DNA
ttcagcagagtgggattaaac

SEQ ID NO: 28780 - DNA, 21 bp, synthetic construct
  source 1..21: mol_type = other DNA
tattttagcggggtgcggtca

SEQ ID NO: 28781 - DNA, 21 bp, synthetic construct
  source 1..21: mol_type = other DNA
tatgcaaaaaccagccttaat

SEQ ID NO: 28782 - DNA, 21 bp, synthetic construct
  source 1..21: mol_type = other DNA
tattcgaagctggacaccaac

SEQ ID NO: 28783 - DNA, 21 bp, synthetic construct
  source 1..21: mol_type = other DNA
tactcacggacgggtaacaac

SEQ ID NO: 28784 - DNA, 21 bp, synthetic construct
  source 1..21: mol_type = other DNA
tattcgaaacaggggactaac

SEQ ID NO: 28785 - DNA, 21 bp, synthetic construct
  source 1..21: mol_type = other DNA
aaggacggcgtatcgaaatgg

SEQ ID NO: 28786 - DNA, 21 bp, synthetic construct
  source 1..21: mol_type = other DNA
ctgcacaagaccactcacaac

SEQ ID NO: 28787 - DNA, 21 bp, synthetic construct
  source 1..21: mol_type = other DNA
tatgcaaaaggtaattggaat

SEQ ID NO: 28788 - DNA, 21 bp, synthetic construct
  source 1..21: mol_type = other DNA
aaggatgatttcacgagatat

SEQ ID NO: 28789 - DNA, 21 bp, synthetic construct
  source 1..21: mol_type = other DNA
agaacctacgacacttttccg

SEQ ID NO: 28790 - DNA, 21 bp, synthetic construct
  source 1..21: mol_type = other DNA
aaggatggtcatagtttgtgg

SEQ ID NO: 28791 - DNA, 21 bp, synthetic construct
  source 1..21: mol_type = other DNA
tacgtcagaagcgacccgcgc

SEQ ID NO: 28792 - DNA, 21 bp, synthetic construct
  source 1..21: mol_type = other DNA
tattttagcaaagttcaagcg

SEQ ID NO: 28793 - DNA, 21 bp, synthetic construct
  source 1..21: mol_type = other DNA
tacagtcgactctcggataat

SEQ ID NO: 28794 - DNA, 21 bp, synthetic construct
  source 1..21: mol_type = other DNA
tatagcagagtaggtctaaac

SEQ ID NO: 28795 - DNA, 21 bp, synthetic construct
  source 1..21: mol_type = other DNA
ttacactctacaaatggggtt

SEQ ID NO: 28796 - DNA, 21 bp, synthetic construct
  source 1..21: mol_type = other DNA
gtgatgtcgtctaacggtgta

SEQ ID NO: 28797 - DNA, 21 bp, synthetic construct
  source 1..21: mol_type = other DNA
tacttctcaggggtcacccgc

SEQ ID NO: 28798 - DNA, 21 bp, synthetic construct
  source 1..21: mol_type = other DNA
agagaggaaggcgtcggttgg

SEQ ID NO: 28799 - DNA, 21 bp, synthetic construct
  source 1..21: mol_type = other DNA
cgcgatgactattcttcatat

SEQ ID NO: 28800 - DNA, 21 bp, synthetic construct
  source 1..21: mol_type = other DNA
tacgtgtcaacaaacggggtg

SEQ ID NO: 28801 - DNA, 21 bp, synthetic construct
  source 1..21: mol_type = other DNA
tattttaccggaatgcaagac

SEQ ID NO: 28802 - DNA, 21 bp, synthetic construct
  source 1..21: mol_type = other DNA
gcttgcaaaccgcagatgggt

SEQ ID NO: 28803 - DNA, 21 bp, synthetic construct
  source 1..21: mol_type = other DNA
tgtaggccacgtacaattgag

SEQ ID NO: 28804 - DNA, 21 bp, synthetic construct
  source 1..21: mol_type = other DNA
ataccccataaaggcatcgga

SEQ ID NO: 28805 - DNA, 21 bp, synthetic construct
  source 1..21: mol_type = other DNA
aaggatgactggacgacttat

SEQ ID NO: 28806 - DNA, 21 bp, synthetic construct
  source 1..21: mol_type = other DNA
tattggcaaggggttaaggaa

SEQ ID NO: 28807 - DNA, 21 bp, synthetic construct
  source 1..21: mol_type = other DNA
cactggagtaccaacggtgta

SEQ ID NO: 28808 - DNA, 21 bp, synthetic construct
  source 1..21: mol_type = other DNA
gacccatcttctagagcctgg

SEQ ID NO: 28809 - DNA, 21 bp, synthetic construct
  source 1..21: mol_type = other DNA
gacctacagagttctgtttgg

SEQ ID NO: 28810 - DNA, 21 bp, synthetic construct
  source 1..21: mol_type = other DNA
taccatgccgcaggtcctgac

SEQ ID NO: 28811 - DNA, 21 bp, synthetic construct
  source 1..21: mol_type = other DNA
tacgtgaggcacgaccctatg

SEQ ID NO: 28812 - DNA, 21 bp, synthetic construct
  source 1..21: mol_type = other DNA
ttcagctcaacaaatggggtc

SEQ ID NO: 28813 - DNA, 21 bp, synthetic construct
  source 1..21: mol_type = other DNA
tatttccaaggcgttaaaagt

SEQ ID NO: 28814 - DNA, 21 bp, synthetic construct
  source 1..21: mol_type = other DNA
gtaatggaagacaggaactgg

SEQ ID NO: 28815 - DNA, 21 bp, synthetic construct
  source 1..21: mol_type = other DNA
tgggtgcggagcgatattaag

SEQ ID NO: 28816 - DNA, 21 bp, synthetic construct
  source 1..21: mol_type = other DNA
ctttgggacgggacaggggct

SEQ ID NO: 28817 - DNA, 21 bp, synthetic construct
  source 1..21: mol_type = other DNA
tatttctcgggggtgtcgcac

SEQ ID NO: 28818 - DNA, 21 bp, synthetic construct
  source 1..21: mol_type = other DNA
ttttggagtggcgtaaaggaa

SEQ ID NO: 28819 - DNA, 21 bp, synthetic construct
  source 1..21: mol_type = other DNA
tgtcggattgaatcgcgcgcg

SEQ ID NO: 28820 - DNA, 21 bp, synthetic construct
  source 1..21: mol_type = other DNA
tacagtcggttgggagataac

SEQ ID NO: 28821 - DNA, 21 bp, synthetic construct
  source 1..21: mol_type = other DNA
tacagtcgggtaggacaaaac

SEQ ID NO: 28822 - DNA, 21 bp, synthetic construct
  source 1..21: mol_type = other DNA
tattggacaggaactcacgag

SEQ ID NO: 28823 - DNA, 21 bp, synthetic construct
  source 1..21: mol_type = other DNA
tattatacgggccgtgtttcg

SEQ ID NO: 28824 - DNA, 21 bp, synthetic construct
  source 1..21: mol_type = other DNA
tactacagcggcatccacgca

SEQ ID NO: 28825 - DNA, 21 bp, synthetic construct
  source 1..21: mol_type = other DNA
tacgcacgagtcggtctcaac

SEQ ID NO: 28826 - DNA, 21 bp, synthetic construct
  source 1..21: mol_type = other DNA
gaagggcctagcagaggttgg

SEQ ID NO: 28827 - DNA, 21 bp, synthetic construct
  source 1..21: mol_type = other DNA
gttctcgcttcggttagctgg

SEQ ID NO: 28828 - DNA, 21 bp, synthetic construct
  source 1..21: mol_type = other DNA
tgtcaggctaagcttgaggta

SEQ ID NO: 28829 - DNA, 21 bp, synthetic construct
  source 1..21: mol_type = other DNA
cgggaagactttacgatgtgg

SEQ ID NO: 28830 - DNA, 21 bp, synthetic construct
  source 1..21: mol_type = other DNA
tattcaaagcacggctataac

SEQ ID NO: 28831 - DNA, 21 bp, synthetic construct
  source 1..21: mol_type = other DNA
ctacatcgaagtgggatagac

SEQ ID NO: 28832 - DNA, 21 bp, synthetic construct
  source 1..21: mol_type = other DNA
tatttctcgggccggctcgac

SEQ ID NO: 28833 - DNA, 21 bp, synthetic construct
  source 1..21: mol_type = other DNA
tacagcagagtaggtgtaaat

SEQ ID NO: 28834 - DNA, 21 bp, synthetic construct
  source 1..21: mol_type = other DNA
tacagcaggctacacgtggac

SEQ ID NO: 28835 - DNA, 21 bp, synthetic construct
  source 1..21: mol_type = other DNA
tttagcagggcggggttcaac

SEQ ID NO: 28836 - DNA, 21 bp, synthetic construct
  source 1..21: mol_type = other DNA
tgcatgaagcgccctgaagtc

SEQ ID NO: 28837 - DNA, 21 bp, synthetic construct
  source 1..21: mol_type = other DNA
tactttacgggtatgactgat

SEQ ID NO: 28838 - DNA, 21 bp, synthetic construct
  source 1..21: mol_type = other DNA
tactcgagagttaacgagaat

SEQ ID NO: 28839 - DNA, 21 bp, synthetic construct
  source 1..21: mol_type = other DNA
tacgcccgcacgggtgcgaac

SEQ ID NO: 28840 - DNA, 21 bp, synthetic construct
  source 1..21: mol_type = other DNA
tattggcagggcatcgtcgac

SEQ ID NO: 28841 - DNA, 21 bp, synthetic construct
  source 1..21: mol_type = other DNA
caaatgaaggataggacctgg

SEQ ID NO: 28842 - DNA, 21 bp, synthetic construct
  source 1..21: mol_type = other DNA
tacttcagcggtatccctatg

SEQ ID NO: 28843 - DNA, 21 bp, synthetic construct
  source 1..21: mol_type = other DNA
tacgcacgaacaggtcagaac

SEQ ID NO: 28844 - DNA, 21 bp, synthetic construct
  source 1..21: mol_type = other DNA
tattttagcggggagcacgat

SEQ ID NO: 28845 - DNA, 21 bp, synthetic construct
  source 1..21: mol_type = other DNA
ttgtgtaagccatgcctaatc

SEQ ID NO: 28846 - DNA, 21 bp, synthetic construct
  source 1..21: mol_type = other DNA
tatgcacggatcggcatgaac

SEQ ID NO: 28847 - DNA, 21 bp, synthetic construct
  source 1..21: mol_type = other DNA
tactggacaggattaaaagac

SEQ ID NO: 28848 - DNA, 21 bp, synthetic construct
  source 1..21: mol_type = other DNA
ttttcgcgtcttaacgccaac

SEQ ID NO: 28849 - DNA, 21 bp, synthetic construct
  source 1..21: mol_type = other DNA
cacaattccacgaatggtatc

SEQ ID NO: 28850 - DNA, 21 bp, synthetic construct
  source 1..21: mol_type = other DNA
agggtcggcggagattgtccg

SEQ ID NO: 28851 - DNA, 21 bp, synthetic construct
  source 1..21: mol_type = other DNA
caggatggctacagctcgtgg

SEQ ID NO: 28852 - DNA, 21 bp, synthetic construct
  source 1..21: mol_type = other DNA
ttggctaaaaccggaatgaat

SEQ ID NO: 28853 - DNA, 21 bp, synthetic construct
  source 1..21: mol_type = other DNA
gaacccgagtcgagagattgg

SEQ ID NO: 28854 - DNA, 21 bp, synthetic construct
  source 1..21: mol_type = other DNA
tatttctccggccgcctagat

SEQ ID NO: 28855 - DNA, 21 bp, synthetic construct
  source 1..21: mol_type = other DNA
tttgaagggagggggtggaat

SEQ ID NO: 28856 - DNA, 21 bp, synthetic construct
  source 1..21: mol_type = other DNA
cgtgaagagggagttggatgg

SEQ ID NO: 28857 - DNA, 21 bp, synthetic construct
  source 1..21: mol_type = other DNA
atgacaggtacaagttgtgga

SEQ ID NO: 28858 - DNA, 21 bp, synthetic construct
  source 1..21: mol_type = other DNA
tatcatcgtctcggagacacg

SEQ ID NO: 28859 - DNA, 21 bp, synthetic construct
  source 1..21: mol_type = other DNA
tactggacagggatgcaggcg

SEQ ID NO: 28860 - DNA, 21 bp, synthetic construct
  source 1..21: mol_type = other DNA
ggcagtgaaaacgtgagatgg

SEQ ID NO: 28861 - DNA, 21 bp, synthetic construct
  source 1..21: mol_type = other DNA
tactttacagggcagcataac

SEQ ID NO: 28862 - DNA, 21 bp, synthetic construct
  source 1..21: mol_type = other DNA
tgcgatggttcattcaaagcg

SEQ ID NO: 28863 - DNA, 21 bp, synthetic construct
  source 1..21: mol_type = other DNA
gactcctttagaggctacgac

SEQ ID NO: 28864 - DNA, 21 bp, synthetic construct
  source 1..21: mol_type = other DNA
tgtaaaccattgccaagtggg

SEQ ID NO: 28865 - DNA, 21 bp, synthetic construct
  source 1..21: mol_type = other DNA
ttggcccggagtggtgagaac

SEQ ID NO: 28866 - DNA, 21 bp, synthetic construct
  source 1..21: mol_type = other DNA
gttgagagtgtaaacgggatt

SEQ ID NO: 28867 - DNA, 21 bp, synthetic construct
  source 1..21: mol_type = other DNA
tatgcccgcctcaatgttaac

SEQ ID NO: 28868 - DNA, 21 bp, synthetic construct
  source 1..21: mol_type = other DNA
tattttactgggatccatgga

SEQ ID NO: 28869 - DNA, 21 bp, synthetic construct
  source 1..21: mol_type = other DNA
cgtgatgggcaaagcagttgg

SEQ ID NO: 28870 - DNA, 21 bp, synthetic construct
  source 1..21: mol_type = other DNA
tatacaagggtatcagataat

SEQ ID NO: 28871 - DNA, 21 bp, synthetic construct
  source 1..21: mol_type = other DNA
agagatgagttcaaccactgg

SEQ ID NO: 28872 - DNA, 21 bp, synthetic construct
  source 1..21: mol_type = other DNA
agggaagagtatacagcatat

SEQ ID NO: 28873 - DNA, 21 bp, synthetic construct
  source 1..21: mol_type = other DNA
tttttctcgggtatcagggac

SEQ ID NO: 28874 - DNA, 21 bp, synthetic construct
  source 1..21: mol_type = other DNA
tactcaaaaaacggaatgaac

SEQ ID NO: 28875 - DNA, 21 bp, synthetic construct
  source 1..21: mol_type = other DNA
tccatgtctgacagaacctgg

SEQ ID NO: 28876 - DNA, 21 bp, synthetic construct
  source 1..21: mol_type = other DNA
tatgctaggaacggtccgaac

SEQ ID NO: 28877 - DNA, 21 bp, synthetic construct
  source 1..21: mol_type = other DNA
tacgctagatccgggaacaac

SEQ ID NO: 28878 - DNA, 21 bp, synthetic construct
  source 1..21: mol_type = other DNA
ggtagtgggacgtcgcattgg

SEQ ID NO: 28879 - DNA, 21 bp, synthetic construct
  source 1..21: mol_type = other DNA
tacttctccggtaagataaca

SEQ ID NO: 28880 - DNA, 21 bp, synthetic construct
  source 1..21: mol_type = other DNA
tatagccgtataggtggtaac

SEQ ID NO: 28881 - DNA, 21 bp, synthetic construct
  source 1..21: mol_type = other DNA
agtccagagacacgttgccca

SEQ ID NO: 28882 - DNA, 21 bp, synthetic construct
  source 1..21: mol_type = other DNA
tactcacggggaggtccgaac

SEQ ID NO: 28883 - DNA, 21 bp, synthetic construct
  source 1..21: mol_type = other DNA
aaggacgactttacgggatac

SEQ ID NO: 28884 - DNA, 21 bp, synthetic construct
  source 1..21: mol_type = other DNA
attgccagagagggttgggat

SEQ ID NO: 28885 - DNA, 21 bp, synthetic construct
  source 1..21: mol_type = other DNA
ggatgcggcactaagtttggt

SEQ ID NO: 28886 - DNA, 21 bp, synthetic construct
  source 1..21: mol_type = other DNA
agggacggcactagcacgtgg

SEQ ID NO: 28887 - DNA, 21 bp, synthetic construct
  source 1..21: mol_type = other DNA
tattttacaggcgttcaaggc

SEQ ID NO: 28888 - DNA, 21 bp, synthetic construct
  source 1..21: mol_type = other DNA
tttagtagacttaatagcaac

SEQ ID NO: 28889 - DNA, 21 bp, synthetic construct
  source 1..21: mol_type = other DNA
tattctagagccgggcttaat

SEQ ID NO: 28890 - DNA, 21 bp, synthetic construct
  source 1..21: mol_type = other DNA
ataaactctaccaacggtatt

SEQ ID NO: 28891 - DNA, 21 bp, synthetic construct
  source 1..21: mol_type = other DNA
tattggagtaaggttatggag

SEQ ID NO: 28892 - DNA, 21 bp, synthetic construct
  source 1..21: mol_type = other DNA
gtcgaggcgaccaatggagtt

SEQ ID NO: 28893 - DNA, 21 bp, synthetic construct
  source 1..21: mol_type = other DNA
tatagtaggattggtcaaaac

SEQ ID NO: 28894 - DNA, 21 bp, synthetic construct
  source 1..21: mol_type = other DNA
ctcccgggcgtaaagtgcccg

SEQ ID NO: 28895 - DNA, 21 bp, synthetic construct
  source 1..21: mol_type = other DNA
tgcgcagtataccttcacgaa

SEQ ID NO: 28896 - DNA, 21 bp, synthetic construct
  source 1..21: mol_type = other DNA
tacgctaagacatcgctcaac

SEQ ID NO: 28897 - DNA, 21 bp, synthetic construct
  source 1..21: mol_type = other DNA
gacatggaatcatacgactgg

SEQ ID NO: 28898 - DNA, 21 bp, synthetic construct
  source 1..21: mol_type = other DNA
atgtgggatggaacagacgca

SEQ ID NO: 28899 - DNA, 21 bp, synthetic construct
  source 1..21: mol_type = other DNA
cgggactatgaggtttatccg

SEQ ID NO: 28900 - DNA, 21 bp, synthetic construct
  source 1..21: mol_type = other DNA
taccacaaatctcagcagtat

SEQ ID NO: 28901 - DNA, 21 bp, synthetic construct
  source 1..21: mol_type = other DNA
cgtaatttcgatgcgtatcca

SEQ ID NO: 28902 - DNA, 21 bp, synthetic construct
  source 1..21: mol_type = other DNA
ttatcacgagtcgcaatgaat

SEQ ID NO: 28903 - DNA, 21 bp, synthetic construct
  source 1..21: mol_type = other DNA
taccataaagcgatgcaaaac

SEQ ID NO: 28904 - DNA, 21 bp, synthetic construct
  source 1..21: mol_type = other DNA
cgcagtgagttccactcattt

SEQ ID NO: 28905 - DNA, 21 bp, synthetic construct
  source 1..21: mol_type = other DNA
atcgattcgactaatggtgtt

SEQ ID NO: 28906 - DNA, 21 bp, synthetic construct
  source 1..21: mol_type = other DNA
ataatgggagatcgcaaatgg

SEQ ID NO: 28907 - DNA, 21 bp, synthetic construct
  source 1..21: mol_type = other DNA
tacttcgcaggtaaacgcgaa

SEQ ID NO: 28908 - DNA, 21 bp, synthetic construct
  source 1..21: mol_type = other DNA
tacagtaaaagtaatgccaat

SEQ ID NO: 28909 - DNA, 21 bp, synthetic construct
  source 1..21: mol_type = other DNA
agagatgagtttcgcacatat

SEQ ID NO: 28910 - DNA, 21 bp, synthetic construct
  source 1..21: mol_type = other DNA
tacgtgagatcgcaaaacctt

SEQ ID NO: 28911 - DNA, 21 bp, synthetic construct
  source 1..21: mol_type = other DNA
tactacacaggtagggtgagt

SEQ ID NO: 28912 - DNA, 21 bp, synthetic construct
  source 1..21: mol_type = other DNA
ttttctaggacaggcttcaat

SEQ ID NO: 28913 - DNA, 21 bp, synthetic construct
  source 1..21: mol_type = other DNA
agaagcagcgacgcatacccg

SEQ ID NO: 28914 - DNA, 21 bp, synthetic construct
  source 1..21: mol_type = other DNA
tttttcacaggtagaattgac

SEQ ID NO: 28915 - DNA, 21 bp, synthetic construct
  source 1..21: mol_type = other DNA
tattctaggaaaaatgataat

SEQ ID NO: 28916 - DNA, 21 bp, synthetic construct
  source 1..21: mol_type = other DNA
ttcttttcaggacggatagaa

SEQ ID NO: 28917 - DNA, 21 bp, synthetic construct
  source 1..21: mol_type = other DNA
attgcgagtacaaacgggatc

SEQ ID NO: 28918 - DNA, 21 bp, synthetic construct
  source 1..21: mol_type = other DNA
tatagtcgcattaacgtgaac

SEQ ID NO: 28919 - DNA, 21 bp, synthetic construct
  source 1..21: mol_type = other DNA
tactggacagggaaaccggat

SEQ ID NO: 28920 - DNA, 21 bp, synthetic construct
  source 1..21: mol_type = other DNA
tacagtagattagggttcaac

SEQ ID NO: 28921 - DNA, 21 bp, synthetic construct
  source 1..21: mol_type = other DNA
tatgcacggactggagggaat

SEQ ID NO: 28922 - DNA, 21 bp, synthetic construct
  source 1..21: mol_type = other DNA
tatagtaaattacacactcat

SEQ ID NO: 28923 - DNA, 21 bp, synthetic construct
  source 1..21: mol_type = other DNA
ttctcaaaggttggagctaat

SEQ ID NO: 28924 - DNA, 21 bp, synthetic construct
  source 1..21: mol_type = other DNA
ttctccaggctgggaacaaac

SEQ ID NO: 28925 - DNA, 21 bp, synthetic construct
  source 1..21: mol_type = other DNA
cgcgatgagttccgtacgtac

SEQ ID NO: 28926 - DNA, 21 bp, synthetic construct
  source 1..21: mol_type = other DNA
ttagccaaaggtgggcacaac

SEQ ID NO: 28927 - DNA, 21 bp, synthetic construct
  source 1..21: mol_type = other DNA
ttcagtcggttgtcccctgta

SEQ ID NO: 28928 - DNA, 21 bp, synthetic construct
  source 1..21: mol_type = other DNA
tatttctcaggccgtccggac

SEQ ID NO: 28929 - DNA, 21 bp, synthetic construct
  source 1..21: mol_type = other DNA
tatcacgccagacagattaat

SEQ ID NO: 28930 - DNA, 21 bp, synthetic construct
  source 1..21: mol_type = other DNA
tatttcacaggccggacgcaa

SEQ ID NO: 28931 - DNA, 21 bp, synthetic construct
  source 1..21: mol_type = other DNA
ttctggtcaggtgtgaaggac

SEQ ID NO: 28932 - DNA, 21 bp, synthetic construct
  source 1..21: mol_type = other DNA
cgaggcaatgagtgctggtcc

SEQ ID NO: 28933 - DNA, 21 bp, synthetic construct
  source 1..21: mol_type = other DNA
ttacacagggatggaataaac

SEQ ID NO: 28934 - DNA, 21 bp, synthetic construct
  source 1..21: mol_type = other DNA
tgcaagccacgaacgtcggaa

SEQ ID NO: 28935 - DNA, 21 bp, synthetic construct
  source 1..21: mol_type = other DNA
ttcttctcaggcgttaaggat

SEQ ID NO: 28936 - DNA, 21 bp, synthetic construct
  source 1..21: mol_type = other DNA
atatggtccacaaatggtgtt

SEQ ID NO: 28937 - DNA, 21 bp, synthetic construct
  source 1..21: mol_type = other DNA
ttaagtaagatgaatttcaac

SEQ ID NO: 28938 - DNA, 21 bp, synthetic construct
  source 1..21: mol_type = other DNA
tatgtgaagagtcaaggaagc

SEQ ID NO: 28939 - DNA, 21 bp, synthetic construct
  source 1..21: mol_type = other DNA
tgcaagatgcccatgagggat

SEQ ID NO: 28940 - DNA, 21 bp, synthetic construct
  source 1..21: mol_type = other DNA
tattccaggcaaggagtaaac

SEQ ID NO: 28941 - DNA, 21 bp, synthetic construct
  source 1..21: mol_type = other DNA
agcgatggttttagcaagtgg

SEQ ID NO: 28942 - DNA, 21 bp, synthetic construct
  source 1..21: mol_type = other DNA
ggcgctgagggcgtacgatgg

SEQ ID NO: 28943 - DNA, 21 bp, synthetic construct
  source 1..21: mol_type = other DNA
tgtggaggtctctcacgcgga

SEQ ID NO: 28944 - DNA, 21 bp, synthetic construct
  source 1..21: mol_type = other DNA
tacagtaagggcaaccccaat

SEQ ID NO: 28945 - DNA, 21 bp, synthetic construct
  source 1..21: mol_type = other DNA
ttatcgaaactaggaaataac

SEQ ID NO: 28946 - DNA, 21 bp, synthetic construct
  source 1..21: mol_type = other DNA
ttgcaccggttaggagagcac

SEQ ID NO: 28947 - DNA, 21 bp, synthetic construct
  source 1..21: mol_type = other DNA
ccttatgcccggagcccggaa

SEQ ID NO: 28948 - DNA, 21 bp, synthetic construct
  source 1..21: mol_type = other DNA
tggtacagtggtattagagaa

SEQ ID NO: 28949 - DNA, 21 bp, synthetic construct
  source 1..21: mol_type = other DNA
tacagccgaatacaggctaac

SEQ ID NO: 28950 - DNA, 21 bp, synthetic construct
  source 1..21: mol_type = other DNA
ttcagtcggctaaacttaaat

SEQ ID NO: 28951 - DNA, 21 bp, synthetic construct
  source 1..21: mol_type = other DNA
tgcaaaccgcaaggtgggacc

SEQ ID NO: 28952 - DNA, 21 bp, synthetic construct
  source 1..21: mol_type = other DNA
gtgagcacccacacttgtgcg

SEQ ID NO: 28953 - DNA, 21 bp, synthetic construct
  source 1..21: mol_type = other DNA
ggagaggagcatgtaagatgg

SEQ ID NO: 28954 - DNA, 21 bp, synthetic construct
  source 1..21: mol_type = other DNA
aggggagaaagtcatgggtgg

SEQ ID NO: 28955 - DNA, 21 bp, synthetic construct
  source 1..21: mol_type = other DNA
tacgagagcactaatggagtc

SEQ ID NO: 28956 - DNA, 21 bp, synthetic construct
  source 1..21: mol_type = other DNA
tacttctccggggttcaccaa

SEQ ID NO: 28957 - DNA, 21 bp, synthetic construct
  source 1..21: mol_type = other DNA
ctctcaaagagctcagtgaat

SEQ ID NO: 28958 - DNA, 21 bp, synthetic construct
  source 1..21: mol_type = other DNA
gtaatgcaggaccggacgtgg

SEQ ID NO: 28959 - DNA, 21 bp, synthetic construct
  source 1..21: mol_type = other DNA
ccttatgctagatcaattgaa

SEQ ID NO: 28960 - DNA, 21 bp, synthetic construct
  source 1..21: mol_type = other DNA
tacgtgaggtccgatacgttt

SEQ ID NO: 28961 - DNA, 21 bp, synthetic construct
  source 1..21: mol_type = other DNA
accatgagagatgcatatcca

SEQ ID NO: 28962 - DNA, 21 bp, synthetic construct
  source 1..21: mol_type = other DNA
cgtacttatgacagctttgct

SEQ ID NO: 28963 - DNA, 21 bp, synthetic construct
  source 1..21: mol_type = other DNA
ttatgggatgggactaatgcg

SEQ ID NO: 28964 - DNA, 21 bp, synthetic construct
  source 1..21: mol_type = other DNA
tgtggcggaggtaagccgcct

SEQ ID NO: 28965 - DNA, 21 bp, synthetic construct
  source 1..21: mol_type = other DNA
aggggtgactttcatatgtat

SEQ ID NO: 28966 - DNA, 21 bp, synthetic construct
  source 1..21: mol_type = other DNA
ataatgtcgacaaatgggata

SEQ ID NO: 28967 - DNA, 21 bp, synthetic construct
  source 1..21: mol_type = other DNA
tacagccgtatcggacacaac

SEQ ID NO: 28968 - DNA, 21 bp, synthetic construct
  source 1..21: mol_type = other DNA
gtgtgccgtccatgtgctggc

SEQ ID NO: 28969 - DNA, 21 bp, synthetic construct
  source 1..21: mol_type = other DNA
aaagatgagttcacagtttat

SEQ ID NO: 28970 - DNA, 21 bp, synthetic construct
  source 1..21: mol_type = other DNA
tatagcaggatcgcccccaat

SEQ ID NO: 28971 - DNA, 21 bp, synthetic construct
  source 1..21: mol_type = other DNA
tactggtcgggcttagtggaa

SEQ ID NO: 28972 - DNA, 21 bp, synthetic construct
  source 1..21: mol_type = other DNA
aaatacgcattctcaacggag

SEQ ID NO: 28973 - DNA, 21 bp, synthetic construct
  source 1..21: mol_type = other DNA
tactcgcggataaatgaaaac

SEQ ID NO: 28974 - DNA, 21 bp, synthetic construct
  source 1..21: mol_type = other DNA
ttacccaggaccggaaattgg

SEQ ID NO: 28975 - DNA, 21 bp, synthetic construct
  source 1..21: mol_type = other DNA
tactatactggaatccaagcg

SEQ ID NO: 28976 - DNA, 21 bp, synthetic construct
  source 1..21: mol_type = other DNA
cgcgaggagttcgtgagctat

SEQ ID NO: 28977 - DNA, 21 bp, synthetic construct
  source 1..21: mol_type = other DNA
tattttacgaaacaggtcgac

SEQ ID NO: 28978 - DNA, 21 bp, synthetic construct
  source 1..21: mol_type = other DNA
tccgctagcacaaatggtatt

SEQ ID NO: 28979 - DNA, 21 bp, synthetic construct
  source 1..21: mol_type = other DNA
tacttttcagggactaagtta

SEQ ID NO: 28980 - DNA, 21 bp, synthetic construct
  source 1..21: mol_type = other DNA
tactggtcaggcttgttagaa

SEQ ID NO: 28981 - DNA, 21 bp, synthetic construct
  source 1..21: mol_type = other DNA
agagaaggcacgtcatattgg

SEQ ID NO: 28982 - DNA, 21 bp, synthetic construct
  source 1..21: mol_type = other DNA
tacgtacgtagtgattttagg

SEQ ID NO: 28983 - DNA, 21 bp, synthetic construct
  source 1..21: mol_type = other DNA
tactcgcgtataggccctggt

SEQ ID NO: 28984 - DNA, 21 bp, synthetic construct
  source 1..21: mol_type = other DNA
tgccgggaaggaacccgttta

SEQ ID NO: 28985 - DNA, 21 bp, synthetic construct
  source 1..21: mol_type = other DNA
tactggagccaggttaaggag

SEQ ID NO: 28986 - DNA, 21 bp, synthetic construct
  source 1..21: mol_type = other DNA
tatagtcgtatatctcccaat

SEQ ID NO: 28987 - DNA, 21 bp, synthetic construct
  source 1..21: mol_type = other DNA
tacagcagggttcaggacgac

SEQ ID NO: 28988 - DNA, 21 bp, synthetic construct
  source 1..21: mol_type = other DNA
gtgtctacacatgagtgcgct

SEQ ID NO: 28989 - DNA, 21 bp, synthetic construct
  source 1..21: mol_type = other DNA
tttgcccgaacgggtgttaat

SEQ ID NO: 28990 - DNA, 21 bp, synthetic construct
  source 1..21: mol_type = other DNA
tatgcaaggatgggtcctgac

SEQ ID NO: 28991 - DNA, 21 bp, synthetic construct
  source 1..21: mol_type = other DNA
tatagccgtatgaacgaaaat

SEQ ID NO: 28992 - DNA, 21 bp, synthetic construct
  source 1..21: mol_type = other DNA
tatagcaaggctaacccaaac

SEQ ID NO: 28993 - DNA, 21 bp, synthetic construct
  source 1..21: mol_type = other DNA
cacttttccactaatggtata

SEQ ID NO: 28994 - DNA, 21 bp, synthetic construct
  source 1..21: mol_type = other DNA
tatgcccgcattggtgttaat

SEQ ID NO: 28995 - DNA, 21 bp, synthetic construct
  source 1..21: mol_type = other DNA
tattcaaggctcttaccaatg

SEQ ID NO: 28996 - DNA, 21 bp, synthetic construct
  source 1..21: mol_type = other DNA
tatagtcggattgcgccggat

SEQ ID NO: 28997 - DNA, 21 bp, synthetic construct
  source 1..21: mol_type = other DNA
taccacaagtcacagtcttat

SEQ ID NO: 28998 - DNA, 21 bp, synthetic construct
  source 1..21: mol_type = other DNA
tacttcagtggccagcattcg

SEQ ID NO: 28999 - DNA, 21 bp, synthetic construct
  source 1..21: mol_type = other DNA
aggagcgactttaccacgtat

SEQ ID NO: 29000 - DNA, 21 bp, synthetic construct
  source 1..21: mol_type = other DNA
aaggacgactacacagttttt

SEQ ID NO: 29001 - DNA, 21 bp, synthetic construct
  source 1..21: mol_type = other DNA
ttattacagtcgacgacctgg

SEQ ID NO: 29002 - DNA, 21 bp, synthetic construct
  source 1..21: mol_type = other DNA
tatttccatggtcttatagcg

SEQ ID NO: 29003 - DNA, 21 bp, synthetic construct
  source 1..21: mol_type = other DNA
tattatagtggccgcatagag

SEQ ID NO: 29004 - DNA, 21 bp, synthetic construct
  source 1..21: mol_type = other DNA
tactttactaagcaaattgac

SEQ ID NO: 29005 - DNA, 21 bp, synthetic construct
  source 1..21: mol_type = other DNA
ccatatgcggtgtcaccacta

SEQ ID NO: 29006 - DNA, 21 bp, synthetic construct
  source 1..21: mol_type = other DNA
gtgctgtccagtcagggttgg

SEQ ID NO: 29007 - DNA, 21 bp, synthetic construct
  source 1..21: mol_type = other DNA
ttcaactcgacaaatggcgtt

SEQ ID NO: 29008 - DNA, 21 bp, synthetic construct
  source 1..21: mol_type = other DNA
tacgcaaaaggagagccatgc

SEQ ID NO: 29009 - DNA, 21 bp, synthetic construct
  source 1..21: mol_type = other DNA
tatcacgcgcgtgcacccaac

SEQ ID NO: 29010 - DNA, 21 bp, synthetic construct
  source 1..21: mol_type = other DNA
ggagatggcagctcaaggtgg

SEQ ID NO: 29011 - DNA, 21 bp, synthetic construct
  source 1..21: mol_type = other DNA
ggtgaagaaggtgtgagatgg

SEQ ID NO: 29012 - DNA, 21 bp, synthetic construct
  source 1..21: mol_type = other DNA
cgagatgaagttacaagctgg

SEQ ID NO: 29013 - DNA, 21 bp, synthetic construct
  source 1..21: mol_type = other DNA
tacttcgcaggaattatcgcc

SEQ ID NO: 29014 - DNA, 21 bp, synthetic construct
  source 1..21: mol_type = other DNA
agaggcgactataccccctgg

SEQ ID NO: 29015 - DNA, 21 bp, synthetic construct
  source 1..21: mol_type = other DNA
ttgcatcgcaatacccagaac

SEQ ID NO: 29016 - DNA, 21 bp, synthetic construct
  source 1..21: mol_type = other DNA
ctctcaagggcgagtcgtgat

SEQ ID NO: 29017 - DNA, 21 bp, synthetic construct
  source 1..21: mol_type = other DNA
agagccctagagtgctgctac

SEQ ID NO: 29018 - DNA, 21 bp, synthetic construct
  source 1..21: mol_type = other DNA
tattcgcgcatcggcccacag

SEQ ID NO: 29019 - DNA, 21 bp, synthetic construct
  source 1..21: mol_type = other DNA
tttttcagtggcagaattgag

SEQ ID NO: 29020 - DNA, 21 bp, synthetic construct
  source 1..21: mol_type = other DNA
actatgcgggacgcgtaccct

SEQ ID NO: 29021 - DNA, 21 bp, synthetic construct
  source 1..21: mol_type = other DNA
tactcaagagtaggggcaaat

SEQ ID NO: 29022 - DNA, 21 bp, synthetic construct
  source 1..21: mol_type = other DNA
tactacacaggccggctcgac

SEQ ID NO: 29023 - DNA, 21 bp, synthetic construct
  source 1..21: mol_type = other DNA
cgtgatgatttttctctctgg

SEQ ID NO: 29024 - DNA, 21 bp, synthetic construct
  source 1..21: mol_type = other DNA
tattactccggcgttaagcaa

SEQ ID NO: 29025 - DNA, 21 bp, synthetic construct
  source 1..21: mol_type = other DNA
ctgcaaaagccctgcttgacg

SEQ ID NO: 29026 - DNA, 21 bp, synthetic construct
  source 1..21: mol_type = other DNA
ataaagagcactaatggtgtc

SEQ ID NO: 29027 - DNA, 21 bp, synthetic construct
  source 1..21: mol_type = other DNA
cgagacggaatgagcagttgg

SEQ ID NO: 29028 - DNA, 21 bp, synthetic construct
  source 1..21: mol_type = other DNA
tacttcagtcttaaggtggaa

SEQ ID NO: 29029 - DNA, 21 bp, synthetic construct
  source 1..21: mol_type = other DNA
tacttcagtggacagtcggag

SEQ ID NO: 29030 - DNA, 21 bp, synthetic construct
  source 1..21: mol_type = other DNA
tgggcgaagtctggacctaat

SEQ ID NO: 29031 - DNA, 21 bp, synthetic construct
  source 1..21: mol_type = other DNA
cgcgcagccgaggtttatcca

SEQ ID NO: 29032 - DNA, 21 bp, synthetic construct
  source 1..21: mol_type = other DNA
gatatgatgtcgcgtgattgg

SEQ ID NO: 29033 - DNA, 21 bp, synthetic construct
  source 1..21: mol_type = other DNA
ttcatgacgggaaaatgtccc

SEQ ID NO: 29034 - DNA, 21 bp, synthetic construct
  source 1..21: mol_type = other DNA
tatttcagcggccaaacttcg

SEQ ID NO: 29035 - DNA, 21 bp, synthetic construct
  source 1..21: mol_type = other DNA
agggatggtatgtcgtcatgg

SEQ ID NO: 29036 - DNA, 21 bp, synthetic construct
  source 1..21: mol_type = other DNA
tacacgcgagttagtgacaac

SEQ ID NO: 29037 - DNA, 21 bp, synthetic construct
  source 1..21: mol_type = other DNA
tacgcacgtaacggccttaac

SEQ ID NO: 29038 - DNA, 21 bp, synthetic construct
  source 1..21: mol_type = other DNA
tactgggcgggcgtcagagat

SEQ ID NO: 29039 - DNA, 21 bp, synthetic construct
  source 1..21: mol_type = other DNA
atcatggaggaccgcgtatgg

SEQ ID NO: 29040 - DNA, 21 bp, synthetic construct
  source 1..21: mol_type = other DNA
tatattaaaagtcaatcttgt

SEQ ID NO: 29041 - DNA, 21 bp, synthetic construct
  source 1..21: mol_type = other DNA
tattggtcggggatgcatgag

SEQ ID NO: 29042 - DNA, 21 bp, synthetic construct
  source 1..21: mol_type = other DNA
tacgcgcgcttaggtaataat

SEQ ID NO: 29043 - DNA, 21 bp, synthetic construct
  source 1..21: mol_type = other DNA
cgagacgatttttcaatatat

SEQ ID NO: 29044 - DNA, 21 bp, synthetic construct
  source 1..21: mol_type = other DNA
tacgcaagagctggcccagac

SEQ ID NO: 29045 - DNA, 21 bp, synthetic construct
  source 1..21: mol_type = other DNA
taccacagattgcatcccctt

SEQ ID NO: 29046 - DNA, 21 bp, synthetic construct
  source 1..21: mol_type = other DNA
tactctcgcacaggagtaaac

SEQ ID NO: 29047 - DNA, 21 bp, synthetic construct
  source 1..21: mol_type = other DNA
tatgctaaaaacgggaccaat

SEQ ID NO: 29048 - DNA, 21 bp, synthetic construct
  source 1..21: mol_type = other DNA
tatgtccggtcgcaacccatc

SEQ ID NO: 29049 - DNA, 21 bp, synthetic construct
  source 1..21: mol_type = other DNA
tatgcgaagactggcgggaac

SEQ ID NO: 29050 - DNA, 21 bp, synthetic construct
  source 1..21: mol_type = other DNA
tgtaataagccaggtacagcc

SEQ ID NO: 29051 - DNA, 21 bp, synthetic construct
  source 1..21: mol_type = other DNA
tactttagtggaaaaacattg

SEQ ID NO: 29052 - DNA, 21 bp, synthetic construct
  source 1..21: mol_type = other DNA
tacgcgaagggaaactggaac

SEQ ID NO: 29053 - DNA, 21 bp, synthetic construct
  source 1..21: mol_type = other DNA
cactctaggcttaacttgcag

SEQ ID NO: 29054 - DNA, 21 bp, synthetic construct
  source 1..21: mol_type = other DNA
tacttttcaggaaggcaggat

SEQ ID NO: 29055 - DNA, 21 bp, synthetic construct
  source 1..21: mol_type = other DNA
aggagctcggatgcttatcct

SEQ ID NO: 29056 - DNA, 21 bp, synthetic construct
  source 1..21: mol_type = other DNA
attgcaagaacaggatgggat

SEQ ID NO: 29057 - DNA, 21 bp, synthetic construct
  source 1..21: mol_type = other DNA
ggatgtatgacaaaatgtggg

SEQ ID NO: 29058 - DNA, 21 bp, synthetic construct
  source 1..21: mol_type = other DNA
tactttactggtatgactgct

SEQ ID NO: 29059 - DNA, 21 bp, synthetic construct
  source 1..21: mol_type = other DNA
tattctaggatccaaccaaac

SEQ ID NO: 29060 - DNA, 21 bp, synthetic construct
  source 1..21: mol_type = other DNA
tattggtcaaaggtacccgat

SEQ ID NO: 29061 - DNA, 21 bp, synthetic construct
  source 1..21: mol_type = other DNA
tgccggcctatgtgtaaaccg

SEQ ID NO: 29062 - DNA, 21 bp, synthetic construct
  source 1..21: mol_type = other DNA
ggctgcaggcccggtgacatt

SEQ ID NO: 29063 - DNA, 21 bp, synthetic construct
  source 1..21: mol_type = other DNA
agggatggaagctccagatgg

SEQ ID NO: 29064 - DNA, 21 bp, synthetic construct
  source 1..21: mol_type = other DNA
tacagcagaaccggctataac

SEQ ID NO: 29065 - DNA, 21 bp, synthetic construct
  source 1..21: mol_type = other DNA
tactcgagaattggaggcaat

SEQ ID NO: 29066 - DNA, 21 bp, synthetic construct
  source 1..21: mol_type = other DNA
tgtaaaccgatctgctgcgaa

SEQ ID NO: 29067 - DNA, 21 bp, synthetic construct
  source 1..21: mol_type = other DNA
tatagccgccttggggcgaac

SEQ ID NO: 29068 - DNA, 21 bp, synthetic construct
  source 1..21: mol_type = other DNA
tatttttcgggtagaacatcg

SEQ ID NO: 29069 - DNA, 21 bp, synthetic construct
  source 1..21: mol_type = other DNA
aaggatgattatacaagattc

SEQ ID NO: 29070 - DNA, 21 bp, synthetic construct
  source 1..21: mol_type = other DNA
tatagcaaaacaggagataac

SEQ ID NO: 29071 - DNA, 21 bp, synthetic construct
  source 1..21: mol_type = other DNA
ttcgccagaaccggtcataac

SEQ ID NO: 29072 - DNA, 21 bp, synthetic construct
  source 1..21: mol_type = other DNA
agggatgacttcagtatctat

SEQ ID NO: 29073 - DNA, 21 bp, synthetic construct
  source 1..21: mol_type = other DNA
cctcgttcaactaacggagta

SEQ ID NO: 29074 - DNA, 21 bp, synthetic construct
  source 1..21: mol_type = other DNA
tacgcacggagtggttcaaat

SEQ ID NO: 29075 - DNA, 21 bp, synthetic construct
  source 1..21: mol_type = other DNA
gtagacgattggagcccgttc

SEQ ID NO: 29076 - DNA, 21 bp, synthetic construct
  source 1..21: mol_type = other DNA
tatagtaagcagaatccaaat

SEQ ID NO: 29077 - DNA, 21 bp, synthetic construct
  source 1..21: mol_type = other DNA
tatagcaaaaacggttgcaat

SEQ ID NO: 29078 - DNA, 21 bp, synthetic construct
  source 1..21: mol_type = other DNA
gcaccaaatacggtcaaatgg

SEQ ID NO: 29079 - DNA, 21 bp, synthetic construct
  source 1..21: mol_type = other DNA
tattcaagaataggcataaat

SEQ ID NO: 29080 - DNA, 21 bp, synthetic construct
  source 1..21: mol_type = other DNA
tatttccacggaatggtagag

SEQ ID NO: 29081 - DNA, 21 bp, synthetic construct
  source 1..21: mol_type = other DNA
tacttcgctggtgtcagatca

SEQ ID NO: 29082 - DNA, 21 bp, synthetic construct
  source 1..21: mol_type = other DNA
tatagccggttgggagttaat

SEQ ID NO: 29083 - DNA, 21 bp, synthetic construct
  source 1..21: mol_type = other DNA
ttatcgagagctggtgataac

SEQ ID NO: 29084 - DNA, 21 bp, synthetic construct
  source 1..21: mol_type = other DNA
ctcttttctggacctaaatgt

SEQ ID NO: 29085 - DNA, 21 bp, synthetic construct
  source 1..21: mol_type = other DNA
atcatgtccgatcgcgagtgg

SEQ ID NO: 29086 - DNA, 21 bp, synthetic construct
  source 1..21: mol_type = other DNA
atgaccggcaagagctgctta

SEQ ID NO: 29087 - DNA, 21 bp, synthetic construct
  source 1..21: mol_type = other DNA
attatgagttcaaagttatgg

SEQ ID NO: 29088 - DNA, 21 bp, synthetic construct
  source 1..21: mol_type = other DNA
atctcaggaagaggctgggat

SEQ ID NO: 29089 - DNA, 21 bp, synthetic construct
  source 1..21: mol_type = other DNA
tatacccgcctgcaaaatacc

SEQ ID NO: 29090 - DNA, 21 bp, synthetic construct
  source 1..21: mol_type = other DNA
tacccttacggtacaaatgcg

SEQ ID NO: 29091 - DNA, 21 bp, synthetic construct
  source 1..21: mol_type = other DNA
tgcggacagaaatgtcgtccc

SEQ ID NO: 29092 - DNA, 21 bp, synthetic construct
  source 1..21: mol_type = other DNA
tgccgtacgaggtcgcctgag

SEQ ID NO: 29093 - DNA, 21 bp, synthetic construct
  source 1..21: mol_type = other DNA
accgaaagttctaacggggtt

SEQ ID NO: 29094 - DNA, 21 bp, synthetic construct
  source 1..21: mol_type = other DNA
tactacacaggcgtgaaaatg

SEQ ID NO: 29095 - DNA, 21 bp, synthetic construct
  source 1..21: mol_type = other DNA
tattcaagggttgggagtaac

SEQ ID NO: 29096 - DNA, 21 bp, synthetic construct
  source 1..21: mol_type = other DNA
tattcaagacttaacccaaac

SEQ ID NO: 29097 - DNA, 21 bp, synthetic construct
  source 1..21: mol_type = other DNA
tacgcccgcttaggcctcaac

SEQ ID NO: 29098 - DNA, 21 bp, synthetic construct
  source 1..21: mol_type = other DNA
agtctcgagagtagggattgg

SEQ ID NO: 29099 - DNA, 21 bp, synthetic construct
  source 1..21: mol_type = other DNA
ttcgcacgtggtggacctaac

SEQ ID NO: 29100 - DNA, 21 bp, synthetic construct
  source 1..21: mol_type = other DNA
cgagattcaaccaatgggatc

SEQ ID NO: 29101 - DNA, 21 bp, synthetic construct
  source 1..21: mol_type = other DNA
atgtcagagtttgtgagcttc

SEQ ID NO: 29102 - DNA, 21 bp, synthetic construct
  source 1..21: mol_type = other DNA
agacctgacagtgtacgctgg

SEQ ID NO: 29103 - DNA, 21 bp, synthetic construct
  source 1..21: mol_type = other DNA
tatgcaagacaaggacctaac

SEQ ID NO: 29104 - DNA, 21 bp, synthetic construct
  source 1..21: mol_type = other DNA
cccagtcgtctagaaaaccga

SEQ ID NO: 29105 - DNA, 21 bp, synthetic construct
  source 1..21: mol_type = other DNA
tactttgcgggcgtaaaggat

SEQ ID NO: 29106 - DNA, 21 bp, synthetic construct
  source 1..21: mol_type = other DNA
tattggacaggacagttagca

SEQ ID NO: 29107 - DNA, 21 bp, synthetic construct
  source 1..21: mol_type = other DNA
tacgcacgcactaatataaat

SEQ ID NO: 29108 - DNA, 21 bp, synthetic construct
  source 1..21: mol_type = other DNA
atcgcagaccacttgaggtgg

SEQ ID NO: 29109 - DNA, 21 bp, synthetic construct
  source 1..21: mol_type = other DNA
tacgctcgaaacggggagaat

SEQ ID NO: 29110 - DNA, 21 bp, synthetic construct
  source 1..21: mol_type = other DNA
agagacgagttcacgaaattc

SEQ ID NO: 29111 - DNA, 21 bp, synthetic construct
  source 1..21: mol_type = other DNA
tatgcaagaagtggcggcaac

SEQ ID NO: 29112 - DNA, 21 bp, synthetic construct
  source 1..21: mol_type = other DNA
atactggccgaccgtaattgg

SEQ ID NO: 29113 - DNA, 21 bp, synthetic construct
  source 1..21: mol_type = other DNA
tttagtaggattggacaaaac

SEQ ID NO: 29114 - DNA, 21 bp, synthetic construct
  source 1..21: mol_type = other DNA
tactcccgcatccagcccaat

SEQ ID NO: 29115 - DNA, 21 bp, synthetic construct
  source 1..21: mol_type = other DNA
ttagcaaagtcgggcacaaat

SEQ ID NO: 29116 - DNA, 21 bp, synthetic construct
  source 1..21: mol_type = other DNA
agttgtaaatcagggaacgcg

SEQ ID NO: 29117 - DNA, 21 bp, synthetic construct
  source 1..21: mol_type = other DNA
tacttcacgggcatgaccgag

SEQ ID NO: 29118 - DNA, 21 bp, synthetic construct
  source 1..21: mol_type = other DNA
tatagtcgggtagggaccaac

SEQ ID NO: 29119 - DNA, 21 bp, synthetic construct
  source 1..21: mol_type = other DNA
gagcatgctacatctaactgg

SEQ ID NO: 29120 - DNA, 21 bp, synthetic construct
  source 1..21: mol_type = other DNA
agagaatctacacacggagtt

SEQ ID NO: 29121 - DNA, 21 bp, synthetic construct
  source 1..21: mol_type = other DNA
tactccaggataggagggaat

SEQ ID NO: 29122 - DNA, 21 bp, synthetic construct
  source 1..21: mol_type = other DNA
cgatcgagtgacgcctacccc

SEQ ID NO: 29123 - DNA, 21 bp, synthetic construct
  source 1..21: mol_type = other DNA
aatgggaacgcatgccgccct

SEQ ID NO: 29124 - DNA, 21 bp, synthetic construct
  source 1..21: mol_type = other DNA
tgtacgtacaaaacaggccat

SEQ ID NO: 29125 - DNA, 21 bp, synthetic construct
  source 1..21: mol_type = other DNA
tgtacttcaaaaaccgatcat

SEQ ID NO: 29126 - DNA, 21 bp, synthetic construct
  source 1..21: mol_type = other DNA
tattctcgggcccaacttgac

SEQ ID NO: 29127 - DNA, 21 bp, synthetic construct
  source 1..21: mol_type = other DNA
tactactcaggcatcacggcc

SEQ ID NO: 29128 - DNA, 21 bp, synthetic construct
  source 1..21: mol_type = other DNA
gtgaataaggtatgtgctgat

SEQ ID NO: 29129 - DNA, 21 bp, synthetic construct
  source 1..21: mol_type = other DNA
attattagcacaaatggtata

SEQ ID NO: 29130 - DNA, 21 bp, synthetic construct
  source 1..21: mol_type = other DNA
ttgcataggctccatactagc

SEQ ID NO: 29131 - DNA, 21 bp, synthetic construct
  source 1..21: mol_type = other DNA
aggccagataccgtcaggtgg

SEQ ID NO: 29132 - DNA, 21 bp, synthetic construct
  source 1..21: mol_type = other DNA
tactacacgggtaagttggat

SEQ ID NO: 29133 - DNA, 21 bp, synthetic construct
  source 1..21: mol_type = other DNA
cgtacgtatgatagttatgcg

SEQ ID NO: 29134 - DNA, 21 bp, synthetic construct
  source 1..21: mol_type = other DNA
tactcacggattggtgaaggt

SEQ ID NO: 29135 - DNA, 21 bp, synthetic construct
  source 1..21: mol_type = other DNA
tgcaaggcacttagtcaggac

SEQ ID NO: 29136 - DNA, 21 bp, synthetic construct
  source 1..21: mol_type = other DNA
tatggaaaagtcggcatgtgc

SEQ ID NO: 29137 - DNA, 21 bp, synthetic construct
  source 1..21: mol_type = other DNA
tacagccgcgctaacgaaaac

SEQ ID NO: 29138 - DNA, 21 bp, synthetic construct
  source 1..21: mol_type = other DNA
tattggcatggggtgaaggat

SEQ ID NO: 29139 - DNA, 21 bp, synthetic construct
  source 1..21: mol_type = other DNA
tatagtcgagttggtttcaat

SEQ ID NO: 29140 - DNA, 21 bp, synthetic construct
  source 1..21: mol_type = other DNA
gcgtggagtactaatggggtg

SEQ ID NO: 29141 - DNA, 21 bp, synthetic construct
  source 1..21: mol_type = other DNA
tatcatgctcgatccccgctt

SEQ ID NO: 29142 - DNA, 21 bp, synthetic construct
  source 1..21: mol_type = other DNA
tactcacgcctccaggcaatc

SEQ ID NO: 29143 - DNA, 21 bp, synthetic construct
  source 1..21: mol_type = other DNA
tattttactggttatgttgag

SEQ ID NO: 29144 - DNA, 21 bp, synthetic construct
  source 1..21: mol_type = other DNA
tatagtagaaacgggccaaat

SEQ ID NO: 29145 - DNA, 21 bp, synthetic construct
  source 1..21: mol_type = other DNA
tatttttcaggtttacatgct

SEQ ID NO: 29146 - DNA, 21 bp, synthetic construct
  source 1..21: mol_type = other DNA
cagaatgagtatgtgatttac

SEQ ID NO: 29147 - DNA, 21 bp, synthetic construct
  source 1..21: mol_type = other DNA
tgtaaggggttgccgccgcca

SEQ ID NO: 29148 - DNA, 21 bp, synthetic construct
  source 1..21: mol_type = other DNA
tgtgacggctccgttaaggca

SEQ ID NO: 29149 - DNA, 21 bp, synthetic construct
  source 1..21: mol_type = other DNA
ggagctggcggggtctgtcca

SEQ ID NO: 29150 - DNA, 21 bp, synthetic construct
  source 1..21: mol_type = other DNA
tacttcactggtatgcaggat

SEQ ID NO: 29151 - DNA, 21 bp, synthetic construct
  source 1..21: mol_type = other DNA
tactcgaaatggaataacaac

SEQ ID NO: 29152 - DNA, 21 bp, synthetic construct
  source 1..21: mol_type = other DNA
tactatactggtaaattagag

SEQ ID NO: 29153 - DNA, 21 bp, synthetic construct
  source 1..21: mol_type = other DNA
tgtaggtctggagacgctgcg

SEQ ID NO: 29154 - DNA, 21 bp, synthetic construct
  source 1..21: mol_type = other DNA
acgtgggatgggctaattcca

SEQ ID NO: 29155 - DNA, 21 bp, synthetic construct
  source 1..21: mol_type = other DNA
ttcttttccggcgtcaaggat

SEQ ID NO: 29156 - DNA, 21 bp, synthetic construct
  source 1..21: mol_type = other DNA
tgtctggaacgctcgacactt

SEQ ID NO: 29157 - DNA, 21 bp, synthetic construct
  source 1..21: mol_type = other DNA
ttccaccggctttccccgggt

SEQ ID NO: 29158 - DNA, 21 bp, synthetic construct
  source 1..21: mol_type = other DNA
cgcaatgattttgtatcctgg

SEQ ID NO: 29159 - DNA, 21 bp, synthetic construct
  source 1..21: mol_type = other DNA
tggtggagtggtactagggaa

SEQ ID NO: 29160 - DNA, 21 bp, synthetic construct
  source 1..21: mol_type = other DNA
atgtgggacggcacaaacgct

SEQ ID NO: 29161 - DNA, 21 bp, synthetic construct
  source 1..21: mol_type = other DNA
tattggaccggcaccatagat

SEQ ID NO: 29162 - DNA, 21 bp, synthetic construct
  source 1..21: mol_type = other DNA
ttagcgaaatcgggtttaaat

SEQ ID NO: 29163 - DNA, 21 bp, synthetic construct
  source 1..21: mol_type = other DNA
tgctttaagcctatgaccgca

SEQ ID NO: 29164 - DNA, 21 bp, synthetic construct
  source 1..21: mol_type = other DNA
tggactaacatgtgcaaagcg

SEQ ID NO: 29165 - DNA, 21 bp, synthetic construct
  source 1..21: mol_type = other DNA
atcacgtcgagtaatggggtt

SEQ ID NO: 29166 - DNA, 21 bp, synthetic construct
  source 1..21: mol_type = other DNA
tattttacagggatgacggaa

SEQ ID NO: 29167 - DNA, 21 bp, synthetic construct
  source 1..21: mol_type = other DNA
tgcaaagggcgagatatagat

SEQ ID NO: 29168 - DNA, 21 bp, synthetic construct
  source 1..21: mol_type = other DNA
tattctaaacgcggggacaac

SEQ ID NO: 29169 - DNA, 21 bp, synthetic construct
  source 1..21: mol_type = other DNA
ttttctaaaatgaactataat

SEQ ID NO: 29170 - DNA, 21 bp, synthetic construct
  source 1..21: mol_type = other DNA
ttagcccgcacggggtgggat

SEQ ID NO: 29171 - DNA, 21 bp, synthetic construct
  source 1..21: mol_type = other DNA
ggttccggagagagtagatgg

SEQ ID NO: 29172 - DNA, 21 bp, synthetic construct
  source 1..21: mol_type = other DNA
cgctcttcagatgcgtatcca

SEQ ID NO: 29173 - DNA, 21 bp, synthetic construct
  source 1..21: mol_type = other DNA
tattcgagattgtcttacgac

SEQ ID NO: 29174 - DNA, 21 bp, synthetic construct
  source 1..21: mol_type = other DNA
tacttttcagggacgagagcc

SEQ ID NO: 29175 - DNA, 21 bp, synthetic construct
  source 1..21: mol_type = other DNA
tattatactggccaggtaagc

SEQ ID NO: 29176 - DNA, 21 bp, synthetic construct
  source 1..21: mol_type = other DNA
cggaccttcgatagttatgct

SEQ ID NO: 29177 - DNA, 21 bp, synthetic construct
  source 1..21: mol_type = other DNA
tattggaccggtaagcccgac

SEQ ID NO: 29178 - DNA, 21 bp, synthetic construct
  source 1..21: mol_type = other DNA
tacttcagtgggagaaccgac

SEQ ID NO: 29179 - DNA, 21 bp, synthetic construct
  source 1..21: mol_type = other DNA
tatagccgtctgggggagaat

SEQ ID NO: 29180 - DNA, 21 bp, synthetic construct
  source 1..21: mol_type = other DNA
ctgaacgattacgttacatat

SEQ ID NO: 29181 - DNA, 21 bp, synthetic construct
  source 1..21: mol_type = other DNA
aatgatgggcgcagcctctgg

SEQ ID NO: 29182 - DNA, 21 bp, synthetic construct
  source 1..21: mol_type = other DNA
tattcgaaactaagcgatcta

SEQ ID NO: 29183 - DNA, 21 bp, synthetic construct
  source 1..21: mol_type = other DNA
aaatccgaattcaagattttt

SEQ ID NO: 29184 - DNA, 21 bp, synthetic construct
  source 1..21: mol_type = other DNA
tatttctcggggaagacgtta

SEQ ID NO: 29185 - DNA, 21 bp, synthetic construct
  source 1..21: mol_type = other DNA
cgcgatgattacacgagctgg

SEQ ID NO: 29186 - DNA, 21 bp, synthetic construct
  source 1..21: mol_type = other DNA
tatagcagggcgggcacaaat

SEQ ID NO: 29187 - DNA, 21 bp, synthetic construct
  source 1..21: mol_type = other DNA
tactcacgcattgggcctacc

SEQ ID NO: 29188 - DNA, 21 bp, synthetic construct
  source 1..21: mol_type = other DNA
cgcggggagtcgcacagttgg

SEQ ID NO: 29189 - DNA, 21 bp, synthetic construct
  source 1..21: mol_type = other DNA
tacagtaaaaacaattacaac

SEQ ID NO: 29190 - DNA, 21 bp, synthetic construct
  source 1..21: mol_type = other DNA
tactccagagcaggagagaac

SEQ ID NO: 29191 - DNA, 21 bp, synthetic construct
  source 1..21: mol_type = other DNA
ttttttagtggtcaggtcgaa

SEQ ID NO: 29192 - DNA, 21 bp, synthetic construct
  source 1..21: mol_type = other DNA
ctcgctaaaatgggcccgaac

SEQ ID NO: 29193 - DNA, 21 bp, synthetic construct
  source 1..21: mol_type = other DNA
tactcaaagaatgggtgtaac

SEQ ID NO: 29194 - DNA, 21 bp, synthetic construct
  source 1..21: mol_type = other DNA
ctgagtagagcaaatttcaac

SEQ ID NO: 29195 - DNA, 21 bp, synthetic construct
  source 1..21: mol_type = other DNA
catagtagtacgaatggagcg

SEQ ID NO: 29196 - DNA, 21 bp, synthetic construct
  source 1..21: mol_type = other DNA
tattggaccggcacaattgaa

SEQ ID NO: 29197 - DNA, 21 bp, synthetic construct
  source 1..21: mol_type = other DNA
ttctcgaggcttaacatgaat

SEQ ID NO: 29198 - DNA, 21 bp, synthetic construct
  source 1..21: mol_type = other DNA
tactggtcggctgtgcaagag

SEQ ID NO: 29199 - DNA, 21 bp, synthetic construct
  source 1..21: mol_type = other DNA
cgagacgagtttcggagctgg

SEQ ID NO: 29200 - DNA, 21 bp, synthetic construct
  source 1..21: mol_type = other DNA
tactggcacggtgtcaaagac

SEQ ID NO: 29201 - DNA, 21 bp, synthetic construct
  source 1..21: mol_type = other DNA
tattgggaaggcgtcaaggag

SEQ ID NO: 29202 - DNA, 21 bp, synthetic construct
  source 1..21: mol_type = other DNA
tacgaagaaggatgcaaagaa

SEQ ID NO: 29203 - DNA, 21 bp, synthetic construct
  source 1..21: mol_type = other DNA
tctatggagtcacaccaatgg

SEQ ID NO: 29204 - DNA, 21 bp, synthetic construct
  source 1..21: mol_type = other DNA
tatttcaccggggtcactgat

SEQ ID NO: 29205 - DNA, 21 bp, synthetic construct
  source 1..21: mol_type = other DNA
agaggcggtgacgtcttccct

SEQ ID NO: 29206 - DNA, 21 bp, synthetic construct
  source 1..21: mol_type = other DNA
tatagtaggttgggtatgggg

SEQ ID NO: 29207 - DNA, 21 bp, synthetic construct
  source 1..21: mol_type = other DNA
tattcccgtgtaggcatgaat

SEQ ID NO: 29208 - DNA, 21 bp, synthetic construct
  source 1..21: mol_type = other DNA
tatgttaagtcgcagccccag

SEQ ID NO: 29209 - DNA, 21 bp, synthetic construct
  source 1..21: mol_type = other DNA
tacttccaaggacgaattgac

SEQ ID NO: 29210 - DNA, 21 bp, synthetic construct
  source 1..21: mol_type = other DNA
ctgcacaagttacaagtatac

SEQ ID NO: 29211 - DNA, 21 bp, synthetic construct
  source 1..21: mol_type = other DNA
tattgggccggggtgcgcgac

SEQ ID NO: 29212 - DNA, 21 bp, synthetic construct
  source 1..21: mol_type = other DNA
ctcagtcgaatgaactttaat

SEQ ID NO: 29213 - DNA, 21 bp, synthetic construct
  source 1..21: mol_type = other DNA
tatgagtcgactaatggaata

SEQ ID NO: 29214 - DNA, 21 bp, synthetic construct
  source 1..21: mol_type = other DNA
cgtctggagtcggtgaactgg

SEQ ID NO: 29215 - DNA, 21 bp, synthetic construct
  source 1..21: mol_type = other DNA
tactggaccggtaagatggaa

SEQ ID NO: 29216 - DNA, 21 bp, synthetic construct
  source 1..21: mol_type = other DNA
tacgccagattgggaatgaat

SEQ ID NO: 29217 - DNA, 21 bp, synthetic construct
  source 1..21: mol_type = other DNA
agagatgattttaccggttgg

SEQ ID NO: 29218 - DNA, 21 bp, synthetic construct
  source 1..21: mol_type = other DNA
gattcattccgcggttatgac

SEQ ID NO: 29219 - DNA, 21 bp, synthetic construct
  source 1..21: mol_type = other DNA
atcgtttcaacaaacggcatc

SEQ ID NO: 29220 - DNA, 21 bp, synthetic construct
  source 1..21: mol_type = other DNA
tatcatagattatcgattaat

SEQ ID NO: 29221 - DNA, 21 bp, synthetic construct
  source 1..21: mol_type = other DNA
tggtggtctggtcaaaaggat

SEQ ID NO: 29222 - DNA, 21 bp, synthetic construct
  source 1..21: mol_type = other DNA
tacagccgcgcaggtatcaat

SEQ ID NO: 29223 - DNA, 21 bp, synthetic construct
  source 1..21: mol_type = other DNA
cgtgatggctcgtcgacatgg

SEQ ID NO: 29224 - DNA, 21 bp, synthetic construct
  source 1..21: mol_type = other DNA
tactggacaggcacccatgag

SEQ ID NO: 29225 - DNA, 21 bp, synthetic construct
  source 1..21: mol_type = other DNA
ccgtatgcgagatccccgctt

SEQ ID NO: 29226 - DNA, 21 bp, synthetic construct
  source 1..21: mol_type = other DNA
tacgctaggggaggcatgaac

SEQ ID NO: 29227 - DNA, 21 bp, synthetic construct
  source 1..21: mol_type = other DNA
cttcaccgtcagctccctctt

SEQ ID NO: 29228 - DNA, 21 bp, synthetic construct
  source 1..21: mol_type = other DNA
tactttactggacggacgagc

SEQ ID NO: 29229 - DNA, 21 bp, synthetic construct
  source 1..21: mol_type = other DNA
tggcctttcggggttgatgca

SEQ ID NO: 29230 - DNA, 21 bp, synthetic construct
  source 1..21: mol_type = other DNA
acgtattctacgaatggtgta

SEQ ID NO: 29231 - DNA, 21 bp, synthetic construct
  source 1..21: mol_type = other DNA
tactttcatggcaggagcgag

SEQ ID NO: 29232 - DNA, 21 bp, synthetic construct
  source 1..21: mol_type = other DNA
tgtggtggggaccgcaagtcg

SEQ ID NO: 29233 - DNA, 21 bp, synthetic construct
  source 1..21: mol_type = other DNA
tgtgcccccgattatcgtgaa

SEQ ID NO: 29234 - DNA, 21 bp, synthetic construct
  source 1..21: mol_type = other DNA
tacgctaagatgggctggaac

SEQ ID NO: 29235 - DNA, 21 bp, synthetic construct
  source 1..21: mol_type = other DNA
ataataagcacaaacggtcgg

SEQ ID NO: 29236 - DNA, 21 bp, synthetic construct
  source 1..21: mol_type = other DNA
taccacaggttaggtgatacc

SEQ ID NO: 29237 - DNA, 21 bp, synthetic construct
  source 1..21: mol_type = other DNA
tactcgaggctctccgacgtc

SEQ ID NO: 29238 - DNA, 21 bp, synthetic construct
  source 1..21: mol_type = other DNA
aaagatgacttcgtcgcatac

SEQ ID NO: 29239 - DNA, 21 bp, synthetic construct
  source 1..21: mol_type = other DNA
tattcacgtgttggagtgaac

SEQ ID NO: 29240 - DNA, 21 bp, synthetic construct
  source 1..21: mol_type = other DNA
gacgccctggaatggcgcgac

SEQ ID NO: 29241 - DNA, 21 bp, synthetic construct
  source 1..21: mol_type = other DNA
ctagccaagaccggtacaaac

SEQ ID NO: 29242 - DNA, 21 bp, synthetic construct
  source 1..21: mol_type = other DNA
gtgccggagagatcgtgcgtc

SEQ ID NO: 29243 - DNA, 21 bp, synthetic construct
  source 1..21: mol_type = other DNA
tgcaaagaggtaaaacgagat

SEQ ID NO: 29244 - DNA, 21 bp, synthetic construct
  source 1..21: mol_type = other DNA
tatagtaggatacagcagaac

SEQ ID NO: 29245 - DNA, 21 bp, synthetic construct
  source 1..21: mol_type = other DNA
tattctaagagcaatgtcaac

SEQ ID NO: 29246 - DNA, 21 bp, synthetic construct
  source 1..21: mol_type = other DNA
cctatggaggctcgcagttgg

SEQ ID NO: 29247 - DNA, 21 bp, synthetic construct
  source 1..21: mol_type = other DNA
attcaactggactgcaaaggc

SEQ ID NO: 29248 - DNA, 21 bp, synthetic construct
  source 1..21: mol_type = other DNA
tatttcagcggcacccgtgcg

SEQ ID NO: 29249 - DNA, 21 bp, synthetic construct
  source 1..21: mol_type = other DNA
tatagtcgtctatcggggaat

SEQ ID NO: 29250 - DNA, 21 bp, synthetic construct
  source 1..21: mol_type = other DNA
tattttactcataaactcgac

SEQ ID NO: 29251 - DNA, 21 bp, synthetic construct
  source 1..21: mol_type = other DNA
aggggagagttcgtaatgttt

SEQ ID NO: 29252 - DNA, 21 bp, synthetic construct
  source 1..21: mol_type = other DNA
tattgggccggtaaggtagac

SEQ ID NO: 29253 - DNA, 21 bp, synthetic construct
  source 1..21: mol_type = other DNA
tatagcaaacaggggattaac

SEQ ID NO: 29254 - DNA, 21 bp, synthetic construct
  source 1..21: mol_type = other DNA
tatgctaggaatggagaaaac

SEQ ID NO: 29255 - DNA, 21 bp, synthetic construct
  source 1..21: mol_type = other DNA
cgagaggaatcactatactgg

SEQ ID NO: 29256 - DNA, 21 bp, synthetic construct
  source 1..21: mol_type = other DNA
tacttctcgggcgttcaagta

SEQ ID NO: 29257 - DNA, 21 bp, synthetic construct
  source 1..21: mol_type = other DNA
tacttcacaggcgtatgcccg

SEQ ID NO: 29258 - DNA, 21 bp, synthetic construct
  source 1..21: mol_type = other DNA
ggaggtgagtacgtaaggtgg

SEQ ID NO: 29259 - DNA, 21 bp, synthetic construct
  source 1..21: mol_type = other DNA
tacttcagcggcacgaatgct

SEQ ID NO: 29260 - DNA, 21 bp, synthetic construct
  source 1..21: mol_type = other DNA
tatttttcaggagtgatgcac

SEQ ID NO: 29261 - DNA, 21 bp, synthetic construct
  source 1..21: mol_type = other DNA
aattccccctacagacctttt

SEQ ID NO: 29262 - DNA, 21 bp, synthetic construct
  source 1..21: mol_type = other DNA
tacagtaaacaaaacatgaac

SEQ ID NO: 29263 - DNA, 21 bp, synthetic construct
  source 1..21: mol_type = other DNA
tacagcaggagtgggccaaat

SEQ ID NO: 29264 - DNA, 21 bp, synthetic construct
  source 1..21: mol_type = other DNA
tatgtacgcagcgatccgagg

SEQ ID NO: 29265 - DNA, 21 bp, synthetic construct
  source 1..21: mol_type = other DNA
atggaaccgggttgcaaggaa

SEQ ID NO: 29266 - DNA, 21 bp, synthetic construct
  source 1..21: mol_type = other DNA
aagatggaggcaatgacatgg

SEQ ID NO: 29267 - DNA, 21 bp, synthetic construct
  source 1..21: mol_type = other DNA
tgctataaaaaattgccggat

SEQ ID NO: 29268 - DNA, 21 bp, synthetic construct
  source 1..21: mol_type = other DNA
tatgattccacgaacgggagg

SEQ ID NO: 29269 - DNA, 21 bp, synthetic construct
  source 1..21: mol_type = other DNA
tactcaagattaaattataat

SEQ ID NO: 29270 - DNA, 21 bp, synthetic construct
  source 1..21: mol_type = other DNA
tgcaaaccacaggcaggcgga

SEQ ID NO: 29271 - DNA, 21 bp, synthetic construct
  source 1..21: mol_type = other DNA
gtattgcaatcggcaacatgg

SEQ ID NO: 29272 - DNA, 21 bp, synthetic construct
  source 1..21: mol_type = other DNA
tacttcgcagggattcaagcc

SEQ ID NO: 29273 - DNA, 21 bp, synthetic construct
  source 1..21: mol_type = other DNA
tactttagcgggaggcctgat

SEQ ID NO: 29274 - DNA, 21 bp, synthetic construct
  source 1..21: mol_type = other DNA
tggtggtccgggacacaggcc

SEQ ID NO: 29275 - DNA, 21 bp, synthetic construct
  source 1..21: mol_type = other DNA
ttcgactctacaaatggcata

SEQ ID NO: 29276 - DNA, 21 bp, synthetic construct
  source 1..21: mol_type = other DNA
tacgagtcgaccaacggaatt

SEQ ID NO: 29277 - DNA, 21 bp, synthetic construct
  source 1..21: mol_type = other DNA
tatttcagtggaatgagggac

SEQ ID NO: 29278 - DNA, 21 bp, synthetic construct
  source 1..21: mol_type = other DNA
tacgtacgatatgatagcgga

SEQ ID NO: 29279 - DNA, 21 bp, synthetic construct
  source 1..21: mol_type = other DNA
cagttgtcagataggacttgg

SEQ ID NO: 29280 - DNA, 21 bp, synthetic construct
  source 1..21: mol_type = other DNA
gtcgtcggttgctcgcccgat

SEQ ID NO: 29281 - DNA, 21 bp, synthetic construct
  source 1..21: mol_type = other DNA
ggatgtccgttcaagccacaa

SEQ ID NO: 29282 - DNA, 21 bp, synthetic construct
  source 1..21: mol_type = other DNA
tatttcacaggaaaagaagat

SEQ ID NO: 29283 - DNA, 21 bp, synthetic construct
  source 1..21: mol_type = other DNA
agacaaagcacaaacggtgtg

SEQ ID NO: 29284 - DNA, 21 bp, synthetic construct
  source 1..21: mol_type = other DNA
aggtcggagtttatggtatac

SEQ ID NO: 29285 - DNA, 21 bp, synthetic construct
  source 1..21: mol_type = other DNA
tatagtaaattggattacaac

SEQ ID NO: 29286 - DNA, 21 bp, synthetic construct
  source 1..21: mol_type = other DNA
tacagccgtgctcagttagat

SEQ ID NO: 29287 - DNA, 21 bp, synthetic construct
  source 1..21: mol_type = other DNA
acgtggagcacaaatgggata

SEQ ID NO: 29288 - DNA, 21 bp, synthetic construct
  source 1..21: mol_type = other DNA
gccttatatgatcggggatgg

SEQ ID NO: 29289 - DNA, 21 bp, synthetic construct
  source 1..21: mol_type = other DNA
ttctggactggtgttaaagac

SEQ ID NO: 29290 - DNA, 21 bp, synthetic construct
  source 1..21: mol_type = other DNA
agagatgggcagtcagcctac

SEQ ID NO: 29291 - DNA, 21 bp, synthetic construct
  source 1..21: mol_type = other DNA
tatagtaagggcaattgtaat

SEQ ID NO: 29292 - DNA, 21 bp, synthetic construct
  source 1..21: mol_type = other DNA
ggaagtggggaatcacgttgg

SEQ ID NO: 29293 - DNA, 21 bp, synthetic construct
  source 1..21: mol_type = other DNA
tttgctcggacaggccacaat

SEQ ID NO: 29294 - DNA, 21 bp, synthetic construct
  source 1..21: mol_type = other DNA
cgggagagcactaacgggatt

SEQ ID NO: 29295 - DNA, 21 bp, synthetic construct
  source 1..21: mol_type = other DNA
gtcccggagcactgtaaagac

SEQ ID NO: 29296 - DNA, 21 bp, synthetic construct
  source 1..21: mol_type = other DNA
tatcacagactacagagtgta

SEQ ID NO: 29297 - DNA, 21 bp, synthetic construct
  source 1..21: mol_type = other DNA
tactttaccggcaaggaggac

SEQ ID NO: 29298 - DNA, 21 bp, synthetic construct
  source 1..21: mol_type = other DNA
cccttgagctccggtgtttgg

SEQ ID NO: 29299 - DNA, 21 bp, synthetic construct
  source 1..21: mol_type = other DNA
tattcaaggatacaattggat

SEQ ID NO: 29300 - DNA, 21 bp, synthetic construct
  source 1..21: mol_type = other DNA
tattgcaaaggtcctgagttg

SEQ ID NO: 29301 - DNA, 21 bp, synthetic construct
  source 1..21: mol_type = other DNA
tactcaaaagtaggtaaaaat

SEQ ID NO: 29302 - DNA, 21 bp, synthetic construct
  source 1..21: mol_type = other DNA
atgtttgatgggaccgttgcc

SEQ ID NO: 29303 - DNA, 21 bp, synthetic construct
  source 1..21: mol_type = other DNA
tattcaagagtgggcaataac

SEQ ID NO: 29304 - DNA, 21 bp, synthetic construct
  source 1..21: mol_type = other DNA
tacgtgaaatcccagccacag

SEQ ID NO: 29305 - DNA, 21 bp, synthetic construct
  source 1..21: mol_type = other DNA
tatgctcgtcaaaatttcaat

SEQ ID NO: 29306 - DNA, 21 bp, synthetic construct
  source 1..21: mol_type = other DNA
ttttcacgcacggggtacaac

SEQ ID NO: 29307 - DNA, 21 bp, synthetic construct
  source 1..21: mol_type = other DNA
tacctaaagtcacaatccaag

SEQ ID NO: 29308 - DNA, 21 bp, synthetic construct
  source 1..21: mol_type = other DNA
tatagtcgtacaggggagaat

SEQ ID NO: 29309 - DNA, 21 bp, synthetic construct
  source 1..21: mol_type = other DNA
tactgggcgggcaagttggaa

SEQ ID NO: 29310 - DNA, 21 bp, synthetic construct
  source 1..21: mol_type = other DNA
ggcgatgagtggatcccctac

SEQ ID NO: 29311 - DNA, 21 bp, synthetic construct
  source 1..21: mol_type = other DNA
tgtacactaaagaccggacac

SEQ ID NO: 29312 - DNA, 21 bp, synthetic construct
  source 1..21: mol_type = other DNA
tacgccagacaaggtgtgaac

SEQ ID NO: 29313 - DNA, 21 bp, synthetic construct
  source 1..21: mol_type = other DNA
agggaaggatatagtcattgg

SEQ ID NO: 29314 - DNA, 21 bp, synthetic construct
  source 1..21: mol_type = other DNA
ctctcaagaatgaatgacaat

SEQ ID NO: 29315 - DNA, 21 bp, synthetic construct
  source 1..21: mol_type = other DNA
cgcgatggaacgtctacatgg

SEQ ID NO: 29316 - DNA, 21 bp, synthetic construct
  source 1..21: mol_type = other DNA
ctctggaccggcgaaaatgcg

SEQ ID NO: 29317 - DNA, 21 bp, synthetic construct
  source 1..21: mol_type = other DNA
tgcaaggacgaataccgggtt

SEQ ID NO: 29318 - DNA, 21 bp, synthetic construct
  source 1..21: mol_type = other DNA
aagctatgtcccaatttaatt

SEQ ID NO: 29319 - DNA, 21 bp, synthetic construct
  source 1..21: mol_type = other DNA
tgcactaataacgggaatcgc

SEQ ID NO: 29320 - DNA, 21 bp, synthetic construct
  source 1..21: mol_type = other DNA
ttgcatcgccttaacccagac

SEQ ID NO: 29321 - DNA, 21 bp, synthetic construct
  source 1..21: mol_type = other DNA
tactcacgcattcaacaaaat

SEQ ID NO: 29322 - DNA, 21 bp, synthetic construct
  source 1..21: mol_type = other DNA
tattcagccaatggtcctaac

SEQ ID NO: 29323 - DNA, 21 bp, synthetic construct
  source 1..21: mol_type = other DNA
tatgctaggtcaggtttcaat

SEQ ID NO: 29324 - DNA, 21 bp, synthetic construct
  source 1..21: mol_type = other DNA
acgcgacagggtgaccccgca

SEQ ID NO: 29325 - DNA, 21 bp, synthetic construct
  source 1..21: mol_type = other DNA
tacttcacgggggttccgagc

SEQ ID NO: 29326 - DNA, 21 bp, synthetic construct
  source 1..21: mol_type = other DNA
tgcaagccgcaggtggtaggt

SEQ ID NO: 29327 - DNA, 21 bp, synthetic construct
  source 1..21: mol_type = other DNA
ctgagtagattatcacctgtg

SEQ ID NO: 29328 - DNA, 21 bp, synthetic construct
  source 1..21: mol_type = other DNA
tttttcagtgggatacatgcc

SEQ ID NO: 29329 - DNA, 21 bp, synthetic construct
  source 1..21: mol_type = other DNA
tattttgcaggaataattagc

SEQ ID NO: 29330 - DNA, 21 bp, synthetic construct
  source 1..21: mol_type = other DNA
agagcattcgacgcctacgag

SEQ ID NO: 29331 - DNA, 21 bp, synthetic construct
  source 1..21: mol_type = other DNA
cgaggggagtatatgtacccg

SEQ ID NO: 29332 - DNA, 21 bp, synthetic construct
  source 1..21: mol_type = other DNA
ttctggtcagggatacactca

SEQ ID NO: 29333 - DNA, 21 bp, synthetic construct
  source 1..21: mol_type = other DNA
tatcacaaggccatgcagaat

SEQ ID NO: 29334 - DNA, 21 bp, synthetic construct
  source 1..21: mol_type = other DNA
tatagtagactctcaaccaac

SEQ ID NO: 29335 - DNA, 21 bp, synthetic construct
  source 1..21: mol_type = other DNA
cattcacggatgaatgaaaac

SEQ ID NO: 29336 - DNA, 21 bp, synthetic construct
  source 1..21: mol_type = other DNA
atgtgggatggtactaatgcg

SEQ ID NO: 29337 - DNA, 21 bp, synthetic construct
  source 1..21: mol_type = other DNA
tattttacaaagaattgcgaa

SEQ ID NO: 29338 - DNA, 21 bp, synthetic construct
  source 1..21: mol_type = other DNA
tgtaccccttacctacatgaa

SEQ ID NO: 29339 - DNA, 21 bp, synthetic construct
  source 1..21: mol_type = other DNA
tattcacgcgccggttttgat

SEQ ID NO: 29340 - DNA, 21 bp, synthetic construct
  source 1..21: mol_type = other DNA
tattgggcgggtatcccagat

SEQ ID NO: 29341 - DNA, 21 bp, synthetic construct
  source 1..21: mol_type = other DNA
tactcccggctgggctcgaac

SEQ ID NO: 29342 - DNA, 21 bp, synthetic construct
  source 1..21: mol_type = other DNA
accgagtcaagcaatggtgtg

SEQ ID NO: 29343 - DNA, 21 bp, synthetic construct
  source 1..21: mol_type = other DNA
ctctcgaagttaggcgtcaac

SEQ ID NO: 29344 - DNA, 21 bp, synthetic construct
  source 1..21: mol_type = other DNA
gatggagccatctatctccgt

SEQ ID NO: 29345 - DNA, 21 bp, synthetic construct
  source 1..21: mol_type = other DNA
tatcatcgattgggggatcat

SEQ ID NO: 29346 - DNA, 21 bp, synthetic construct
  source 1..21: mol_type = other DNA
tatgcaagactcggcaacaac

SEQ ID NO: 29347 - DNA, 21 bp, synthetic construct
  source 1..21: mol_type = other DNA
ttctcaaggattggcagtaat

SEQ ID NO: 29348 - DNA, 21 bp, synthetic construct
  source 1..21: mol_type = other DNA
tacgcacgaacagggcataac

SEQ ID NO: 29349 - DNA, 21 bp, synthetic construct
  source 1..21: mol_type = other DNA
agagatttcgatgtctaccca

SEQ ID NO: 29350 - DNA, 21 bp, synthetic construct
  source 1..21: mol_type = other DNA
tattatacggggaagcttgaa

SEQ ID NO: 29351 - DNA, 21 bp, synthetic construct
  source 1..21: mol_type = other DNA
tatttaattagtcaatcttac

SEQ ID NO: 29352 - DNA, 21 bp, synthetic construct
  source 1..21: mol_type = other DNA
tttgatagtactaacggtgta

SEQ ID NO: 29353 - DNA, 21 bp, synthetic construct
  source 1..21: mol_type = other DNA
tatagtcgcgtcaacgaaaac

SEQ ID NO: 29354 - DNA, 21 bp, synthetic construct
  source 1..21: mol_type = other DNA
acatggtctactaatggcgta

SEQ ID NO: 29355 - DNA, 21 bp, synthetic construct
  source 1..21: mol_type = other DNA
tacttctctaatatcaaggaa

SEQ ID NO: 29356 - DNA, 21 bp, synthetic construct
  source 1..21: mol_type = other DNA
tactactcgggcattcgtgat

SEQ ID NO: 29357 - DNA, 21 bp, synthetic construct
  source 1..21: mol_type = other DNA
tatgtaaagtcacagacaata

SEQ ID NO: 29358 - DNA, 21 bp, synthetic construct
  source 1..21: mol_type = other DNA
agcatggcaagtgtgaaatgg

SEQ ID NO: 29359 - DNA, 21 bp, synthetic construct
  source 1..21: mol_type = other DNA
cgtgacagtactcatggggtt

SEQ ID NO: 29360 - DNA, 21 bp, synthetic construct
  source 1..21: mol_type = other DNA
tacgcccgcaccggcaacaat

SEQ ID NO: 29361 - DNA, 21 bp, synthetic construct
  source 1..21: mol_type = other DNA
tatccaaattgtcccggggtt

SEQ ID NO: 29362 - DNA, 21 bp, synthetic construct
  source 1..21: mol_type = other DNA
attccgatcaagtgcccttct

SEQ ID NO: 29363 - DNA, 21 bp, synthetic construct
  source 1..21: mol_type = other DNA
tgcccaagaaacacccctccg

SEQ ID NO: 29364 - DNA, 21 bp, synthetic construct
  source 1..21: mol_type = other DNA
aatctaatggggtgtacaggc

SEQ ID NO: 29365 - DNA, 21 bp, synthetic construct
  source 1..21: mol_type = other DNA
tactcgagaactggcgaaaat

SEQ ID NO: 29366 - DNA, 21 bp, synthetic construct
  source 1..21: mol_type = other DNA
tactcccgtttgagcacgaat

SEQ ID NO: 29367 - DNA, 21 bp, synthetic construct
  source 1..21: mol_type = other DNA
acaatgagtacaaacggcata

SEQ ID NO: 29368 - DNA, 21 bp, synthetic construct
  source 1..21: mol_type = other DNA
tggcaccgtctctccgtaaat

SEQ ID NO: 29369 - DNA, 21 bp, synthetic construct
  source 1..21: mol_type = other DNA
tattttagcggcatggtggcc

SEQ ID NO: 29370 - DNA, 21 bp, synthetic construct
  source 1..21: mol_type = other DNA
tactggagcgggatacactcc

SEQ ID NO: 29371 - DNA, 21 bp, synthetic construct
  source 1..21: mol_type = other DNA
tattggtcgaaggtattagac

SEQ ID NO: 29372 - DNA, 21 bp, synthetic construct
  source 1..21: mol_type = other DNA
ttctttaccggctacgtcgat

SEQ ID NO: 29373 - DNA, 21 bp, synthetic construct
  source 1..21: mol_type = other DNA
ttgtctcgtgccagtcacgac

SEQ ID NO: 29374 - DNA, 21 bp, synthetic construct
  source 1..21: mol_type = other DNA
tattggacagggaaaatggag

SEQ ID NO: 29375 - DNA, 21 bp, synthetic construct
  source 1..21: mol_type = other DNA
cacactggcacatcttgccta

SEQ ID NO: 29376 - DNA, 21 bp, synthetic construct
  source 1..21: mol_type = other DNA
tacgccaagggtggctggaat

SEQ ID NO: 29377 - DNA, 21 bp, synthetic construct
  source 1..21: mol_type = other DNA
tactggagtggaactcatgag

SEQ ID NO: 29378 - DNA, 21 bp, synthetic construct
  source 1..21: mol_type = other DNA
ccgttatctgacaggacatgg

SEQ ID NO: 29379 - DNA, 21 bp, synthetic construct
  source 1..21: mol_type = other DNA
ggatcggagtttttaccttgg

SEQ ID NO: 29380 - DNA, 21 bp, synthetic construct
  source 1..21: mol_type = other DNA
tactttaccgggcgctctgac

SEQ ID NO: 29381 - DNA, 21 bp, synthetic construct
  source 1..21: mol_type = other DNA
tacgcaaaaggtggctgcaac

SEQ ID NO: 29382 - DNA, 21 bp, synthetic construct
  source 1..21: mol_type = other DNA
tattttagtggcgttgccatg

SEQ ID NO: 29383 - DNA, 21 bp, synthetic construct
  source 1..21: mol_type = other DNA
ttctggagcggcgtacgagaa

SEQ ID NO: 29384 - DNA, 21 bp, synthetic construct
  source 1..21: mol_type = other DNA
tatgcccgaactgggtcgaat

SEQ ID NO: 29385 - DNA, 21 bp, synthetic construct
  source 1..21: mol_type = other DNA
agggaaatgagcgtgtacccg

SEQ ID NO: 29386 - DNA, 21 bp, synthetic construct
  source 1..21: mol_type = other DNA
tactcacgactaggtgttaac

SEQ ID NO: 29387 - DNA, 21 bp, synthetic construct
  source 1..21: mol_type = other DNA
tattcaagaatacaaatggac

SEQ ID NO: 29388 - DNA, 21 bp, synthetic construct
  source 1..21: mol_type = other DNA
gtctccagtcaaaacggggtg

SEQ ID NO: 29389 - DNA, 21 bp, synthetic construct
  source 1..21: mol_type = other DNA
cgcgaccagtacgtatatccc

SEQ ID NO: 29390 - DNA, 21 bp, synthetic construct
  source 1..21: mol_type = other DNA
tacgcaaaggcgaattacaat

SEQ ID NO: 29391 - DNA, 21 bp, synthetic construct
  source 1..21: mol_type = other DNA
tactttagtgggactcaggac

SEQ ID NO: 29392 - DNA, 21 bp, synthetic construct
  source 1..21: mol_type = other DNA
cgcttagacagcagagaatgg

SEQ ID NO: 29393 - DNA, 21 bp, synthetic construct
  source 1..21: mol_type = other DNA
cgcgaggaaagcgtcttccct

SEQ ID NO: 29394 - DNA, 21 bp, synthetic construct
  source 1..21: mol_type = other DNA
tacgctaaaggcggtgcgaat

SEQ ID NO: 29395 - DNA, 21 bp, synthetic construct
  source 1..21: mol_type = other DNA
tatccatatggaacgaacgct

SEQ ID NO: 29396 - DNA, 21 bp, synthetic construct
  source 1..21: mol_type = other DNA
aaaagcgatttcacgagctac

SEQ ID NO: 29397 - DNA, 21 bp, synthetic construct
  source 1..21: mol_type = other DNA
ggcgtcgaggccgtaaggtgg

SEQ ID NO: 29398 - DNA, 21 bp, synthetic construct
  source 1..21: mol_type = other DNA
tatgcgcgtactaacttcaac

SEQ ID NO: 29399 - DNA, 21 bp, synthetic construct
  source 1..21: mol_type = other DNA
cacaacagttctaacggcgta

SEQ ID NO: 29400 - DNA, 21 bp, synthetic construct
  source 1..21: mol_type = other DNA
gtccattcctttaacggcgtt

SEQ ID NO: 29401 - DNA, 21 bp, synthetic construct
  source 1..21: mol_type = other DNA
gatatgagtagtacgaaatgg

SEQ ID NO: 29402 - DNA, 21 bp, synthetic construct
  source 1..21: mol_type = other DNA
tattcccggagcggggtcaat

SEQ ID NO: 29403 - DNA, 21 bp, synthetic construct
  source 1..21: mol_type = other DNA
tgcaaacctggatcgccgggc

SEQ ID NO: 29404 - DNA, 21 bp, synthetic construct
  source 1..21: mol_type = other DNA
tggtttacaggtaaggtagat

SEQ ID NO: 29405 - DNA, 21 bp, synthetic construct
  source 1..21: mol_type = other DNA
tattggacggggacgcacgaa

SEQ ID NO: 29406 - DNA, 21 bp, synthetic construct
  source 1..21: mol_type = other DNA
tacttttcaggggtgagaagc

SEQ ID NO: 29407 - DNA, 21 bp, synthetic construct
  source 1..21: mol_type = other DNA
gagacagattcggggtactgg

SEQ ID NO: 29408 - DNA, 21 bp, synthetic construct
  source 1..21: mol_type = other DNA
tattctaggctaggtagtaat

SEQ ID NO: 29409 - DNA, 21 bp, synthetic construct
  source 1..21: mol_type = other DNA
tatagtcgcgcaaatgtcaat

SEQ ID NO: 29410 - DNA, 21 bp, synthetic construct
  source 1..21: mol_type = other DNA
tgcaaaaggcaatcaccagaa

SEQ ID NO: 29411 - DNA, 21 bp, synthetic construct
  source 1..21: mol_type = other DNA
tactggagtggaaagatcgag

SEQ ID NO: 29412 - DNA, 21 bp, synthetic construct
  source 1..21: mol_type = other DNA
ggctcaccgggagtgtcttgg

SEQ ID NO: 29413 - DNA, 21 bp, synthetic construct
  source 1..21: mol_type = other DNA
tacagccgcacaggggcaaat

SEQ ID NO: 29414 - DNA, 21 bp, synthetic construct
  source 1..21: mol_type = other DNA
acggcgaactgcctaaagccc

SEQ ID NO: 29415 - DNA, 21 bp, synthetic construct
  source 1..21: mol_type = other DNA
gggtgttttagtgaaggaagg

SEQ ID NO: 29416 - DNA, 21 bp, synthetic construct
  source 1..21: mol_type = other DNA
tactcaaggatgggtattaat

SEQ ID NO: 29417 - DNA, 21 bp, synthetic construct
  source 1..21: mol_type = other DNA
ggctgtggtacgaagttgggg

SEQ ID NO: 29418 - DNA, 21 bp, synthetic construct
  source 1..21: mol_type = other DNA
tattggagtggaatgcaggaa

SEQ ID NO: 29419 - DNA, 21 bp, synthetic construct
  source 1..21: mol_type = other DNA
tgtaaacccggtgcggcatcg

SEQ ID NO: 29420 - DNA, 21 bp, synthetic construct
  source 1..21: mol_type = other DNA
gttgcaagaactggctgggat

SEQ ID NO: 29421 - DNA, 21 bp, synthetic construct
  source 1..21: mol_type = other DNA
aggggtgacttctcgagctgg

SEQ ID NO: 29422 - DNA, 21 bp, synthetic construct
  source 1..21: mol_type = other DNA
ggtgacggtttcagcacgtgg

SEQ ID NO: 29423 - DNA, 21 bp, synthetic construct
  source 1..21: mol_type = other DNA
tattcaagggcaggcataaac

SEQ ID NO: 29424 - DNA, 21 bp, synthetic construct
  source 1..21: mol_type = other DNA
tacgtgagaagcgatagggcc

SEQ ID NO: 29425 - DNA, 21 bp, synthetic construct
  source 1..21: mol_type = other DNA
tatagcaagattgggaaagac

SEQ ID NO: 29426 - DNA, 21 bp, synthetic construct
  source 1..21: mol_type = other DNA
tgtcgagacaacaagctcgag

SEQ ID NO: 29427 - DNA, 21 bp, synthetic construct
  source 1..21: mol_type = other DNA
tacgctcgaattggacataac

SEQ ID NO: 29428 - DNA, 21 bp, synthetic construct
  source 1..21: mol_type = other DNA
tacttcagtgggaaacaaagc

SEQ ID NO: 29429 - DNA, 21 bp, synthetic construct
  source 1..21: mol_type = other DNA
tacgccaaagccggatggaac

SEQ ID NO: 29430 - DNA, 21 bp, synthetic construct
  source 1..21: mol_type = other DNA
ctacatagcacgaatggagtg

SEQ ID NO: 29431 - DNA, 21 bp, synthetic construct
  source 1..21: mol_type = other DNA
tatagtaagagtaactggaat

SEQ ID NO: 29432 - DNA, 21 bp, synthetic construct
  source 1..21: mol_type = other DNA
tattacagtggtcgagttgag

SEQ ID NO: 29433 - DNA, 21 bp, synthetic construct
  source 1..21: mol_type = other DNA
taccataaatcccaaaatttt

SEQ ID NO: 29434 - DNA, 21 bp, synthetic construct
  source 1..21: mol_type = other DNA
gttttatccgaaaggtcgtgg

SEQ ID NO: 29435 - DNA, 21 bp, synthetic construct
  source 1..21: mol_type = other DNA
aaagatggttacagcttgtat

SEQ ID NO: 29436 - DNA, 21 bp, synthetic construct
  source 1..21: mol_type = other DNA
ttcgtgaagtcgcagccctgc

SEQ ID NO: 29437 - DNA, 21 bp, synthetic construct
  source 1..21: mol_type = other DNA
tactctagactgcaattcgat

SEQ ID NO: 29438 - DNA, 21 bp, synthetic construct
  source 1..21: mol_type = other DNA
ggcgaacctacttgccgaccg

SEQ ID NO: 29439 - DNA, 21 bp, synthetic construct
  source 1..21: mol_type = other DNA
agggacgagtatgtatatttc

SEQ ID NO: 29440 - DNA, 21 bp, synthetic construct
  source 1..21: mol_type = other DNA
ggctgccgaccgtgttcagag

SEQ ID NO: 29441 - DNA, 21 bp, synthetic construct
  source 1..21: mol_type = other DNA
aagtcggattttacaacctat

SEQ ID NO: 29442 - DNA, 21 bp, synthetic construct
  source 1..21: mol_type = other DNA
ctacatagactgcacaccagc

SEQ ID NO: 29443 - DNA, 21 bp, synthetic construct
  source 1..21: mol_type = other DNA
ccaatggagagcaaaaaatgg

SEQ ID NO: 29444 - DNA, 21 bp, synthetic construct
  source 1..21: mol_type = other DNA
tatttctcgggtgtcccgcac

SEQ ID NO: 29445 - DNA, 21 bp, synthetic construct
  source 1..21: mol_type = other DNA
ctcgccagaaaccttcccaac

SEQ ID NO: 29446 - DNA, 21 bp, synthetic construct
  source 1..21: mol_type = other DNA
tacgccaggaatggtataaat

SEQ ID NO: 29447 - DNA, 21 bp, synthetic construct
  source 1..21: mol_type = other DNA
taccataaaggcaacaacaac

SEQ ID NO: 29448 - DNA, 21 bp, synthetic construct
  source 1..21: mol_type = other DNA
cttcccagagcgggcgattgg

SEQ ID NO: 29449 - DNA, 21 bp, synthetic construct
  source 1..21: mol_type = other DNA
tactccaagtcaaattggaac

SEQ ID NO: 29450 - DNA, 21 bp, synthetic construct
  source 1..21: mol_type = other DNA
cggactaacaacgtttaccct

SEQ ID NO: 29451 - DNA, 21 bp, synthetic construct
  source 1..21: mol_type = other DNA
acatcggaattcaaggtatat

SEQ ID NO: 29452 - DNA, 21 bp, synthetic construct
  source 1..21: mol_type = other DNA
tatagtaagcacaaccacaat

SEQ ID NO: 29453 - DNA, 21 bp, synthetic construct
  source 1..21: mol_type = other DNA
tatttccaaggtcgtatcgac

SEQ ID NO: 29454 - DNA, 21 bp, synthetic construct
  source 1..21: mol_type = other DNA
tttttcgcgggaattatcgcc

SEQ ID NO: 29455 - DNA, 21 bp, synthetic construct
  source 1..21: mol_type = other DNA
tatgttcgtcatgatcccatg

SEQ ID NO: 29456 - DNA, 21 bp, synthetic construct
  source 1..21: mol_type = other DNA
tactactcaggagtgatagag

SEQ ID NO: 29457 - DNA, 21 bp, synthetic construct
  source 1..21: mol_type = other DNA
ttaagtcgagcttcccgcgac

SEQ ID NO: 29458 - DNA, 21 bp, synthetic construct
  source 1..21: mol_type = other DNA
ctacacagactcggcgaacat

SEQ ID NO: 29459 - DNA, 21 bp, synthetic construct
  source 1..21: mol_type = other DNA
tgtagaaatgggactactccc

SEQ ID NO: 29460 - DNA, 21 bp, synthetic construct
  source 1..21: mol_type = other DNA
ccggactcgacaaatggccgc

SEQ ID NO: 29461 - DNA, 21 bp, synthetic construct
  source 1..21: mol_type = other DNA
tacagtaggataggtgtcaat

SEQ ID NO: 29462 - DNA, 21 bp, synthetic construct
  source 1..21: mol_type = other DNA
ttcagcaggacgggttttaac

SEQ ID NO: 29463 - DNA, 21 bp, synthetic construct
  source 1..21: mol_type = other DNA
tttgtcaaaagtcaaccatgt

SEQ ID NO: 29464 - DNA, 21 bp, synthetic construct
  source 1..21: mol_type = other DNA
tgtctaaaatcgcagtcgtac

SEQ ID NO: 29465 - DNA, 21 bp, synthetic construct
  source 1..21: mol_type = other DNA
gttatggaggcgagagggtgg

SEQ ID NO: 29466 - DNA, 21 bp, synthetic construct
  source 1..21: mol_type = other DNA
aaatacgatcacgtagcctgg

SEQ ID NO: 29467 - DNA, 21 bp, synthetic construct
  source 1..21: mol_type = other DNA
tacgccaggactaatgtgaac

SEQ ID NO: 29468 - DNA, 21 bp, synthetic construct
  source 1..21: mol_type = other DNA
gactacaccggaaagagcgct

SEQ ID NO: 29469 - DNA, 21 bp, synthetic construct
  source 1..21: mol_type = other DNA
ttaggcggtacctcacgttac

SEQ ID NO: 29470 - DNA, 21 bp, synthetic construct
  source 1..21: mol_type = other DNA
tacagcaagaacggcttcaac

SEQ ID NO: 29471 - DNA, 21 bp, synthetic construct
  source 1..21: mol_type = other DNA
tttagcagagctggttataat

SEQ ID NO: 29472 - DNA, 21 bp, synthetic construct
  source 1..21: mol_type = other DNA
cgtgatgattatgtccattgg

SEQ ID NO: 29473 - DNA, 21 bp, synthetic construct
  source 1..21: mol_type = other DNA
tattcgcgcgccggtgctaac

SEQ ID NO: 29474 - DNA, 21 bp, synthetic construct
  source 1..21: mol_type = other DNA
tactttacaggccagcagagc

SEQ ID NO: 29475 - DNA, 21 bp, synthetic construct
  source 1..21: mol_type = other DNA
tatagtcgtatcggtccagtc

SEQ ID NO: 29476 - DNA, 21 bp, synthetic construct
  source 1..21: mol_type = other DNA
tattcaagggccggcatgaat

SEQ ID NO: 29477 - DNA, 21 bp, synthetic construct
  source 1..21: mol_type = other DNA
cccagggacgtatgtcccaag

SEQ ID NO: 29478 - DNA, 21 bp, synthetic construct
  source 1..21: mol_type = other DNA
tactttcatggtatcccggac

SEQ ID NO: 29479 - DNA, 21 bp, synthetic construct
  source 1..21: mol_type = other DNA
ttctcacgtctatccatcaat

SEQ ID NO: 29480 - DNA, 21 bp, synthetic construct
  source 1..21: mol_type = other DNA
tacttcacgaatgttcgtgag

SEQ ID NO: 29481 - DNA, 21 bp, synthetic construct
  source 1..21: mol_type = other DNA
ggagggggcagctcgcattgg

SEQ ID NO: 29482 - DNA, 21 bp, synthetic construct
  source 1..21: mol_type = other DNA
tactggagtggtaccgtgagt

SEQ ID NO: 29483 - DNA, 21 bp, synthetic construct
  source 1..21: mol_type = other DNA
tattggtccgggctcaaagaa

SEQ ID NO: 29484 - DNA, 21 bp, synthetic construct
  source 1..21: mol_type = other DNA
tgtaagccaatgaagcttgat

SEQ ID NO: 29485 - DNA, 21 bp, synthetic construct
  source 1..21: mol_type = other DNA
tattggtcaggcaaaattgaa

SEQ ID NO: 29486 - DNA, 21 bp, synthetic construct
  source 1..21: mol_type = other DNA
ttgtcccgcgcaaattttaat

SEQ ID NO: 29487 - DNA, 21 bp, synthetic construct
  source 1..21: mol_type = other DNA
tatgcaaggggtggaaacaat

SEQ ID NO: 29488 - DNA, 21 bp, synthetic construct
  source 1..21: mol_type = other DNA
ttctcgcgattgggacacaat

SEQ ID NO: 29489 - DNA, 21 bp, synthetic construct
  source 1..21: mol_type = other DNA
ccttatgctcggagtgtagat

SEQ ID NO: 29490 - DNA, 21 bp, synthetic construct
  source 1..21: mol_type = other DNA
ttctttactggcagacttgag

SEQ ID NO: 29491 - DNA, 21 bp, synthetic construct
  source 1..21: mol_type = other DNA
cgcgacgccacatcaagctgg

SEQ ID NO: 29492 - DNA, 21 bp, synthetic construct
  source 1..21: mol_type = other DNA
ccatatgcacgaagccttgat

SEQ ID NO: 29493 - DNA, 21 bp, synthetic construct
  source 1..21: mol_type = other DNA
tgtaagataccgtccgccgga

SEQ ID NO: 29494 - DNA, 21 bp, synthetic construct
  source 1..21: mol_type = other DNA
tactacagcggggtaaaaagc

SEQ ID NO: 29495 - DNA, 21 bp, synthetic construct
  source 1..21: mol_type = other DNA
tgtaagggattacccgtacct

SEQ ID NO: 29496 - DNA, 21 bp, synthetic construct
  source 1..21: mol_type = other DNA
tatttctctggtcgtcacgag

SEQ ID NO: 29497 - DNA, 21 bp, synthetic construct
  source 1..21: mol_type = other DNA
ctaagagacggcacaatggcg

SEQ ID NO: 29498 - DNA, 21 bp, synthetic construct
  source 1..21: mol_type = other DNA
ctacatcgaatgacgccaaat

SEQ ID NO: 29499 - DNA, 21 bp, synthetic construct
  source 1..21: mol_type = other DNA
cgtgacggctcctcatcctgg

SEQ ID NO: 29500 - DNA, 21 bp, synthetic construct
  source 1..21: mol_type = other DNA
ggtagtgggacgaaatgcgga

SEQ ID NO: 29501 - DNA, 21 bp, synthetic construct
  source 1..21: mol_type = other DNA
tgcaagaccccggacagggcc

SEQ ID NO: 29502 - DNA, 21 bp, synthetic construct
  source 1..21: mol_type = other DNA
tgtaagcctcaaaactcgagt

SEQ ID NO: 29503 - DNA, 21 bp, synthetic construct
  source 1..21: mol_type = other DNA
atcatggaggatcgcggttgg

SEQ ID NO: 29504 - DNA, 21 bp, synthetic construct
  source 1..21: mol_type = other DNA
tcttggagtacgaacgggata

SEQ ID NO: 29505 - DNA, 21 bp, synthetic construct
  source 1..21: mol_type = other DNA
tatcacaaacttaacattacc

SEQ ID NO: 29506 - DNA, 21 bp, synthetic construct
  source 1..21: mol_type = other DNA
ctccaccgcgcgggaatagac

SEQ ID NO: 29507 - DNA, 21 bp, synthetic construct
  source 1..21: mol_type = other DNA
tactggagtggcgttggagct

SEQ ID NO: 29508 - DNA, 21 bp, synthetic construct
  source 1..21: mol_type = other DNA
tatagccgaacgggaatgaac

SEQ ID NO: 29509 - DNA, 21 bp, synthetic construct
  source 1..21: mol_type = other DNA
tcggcatcaactaatgggagg

SEQ ID NO: 29510 - DNA, 21 bp, synthetic construct
  source 1..21: mol_type = other DNA
ctggccaagactggcatgaac

SEQ ID NO: 29511 - DNA, 21 bp, synthetic construct
  source 1..21: mol_type = other DNA
tatagtaggataatgcccaat

SEQ ID NO: 29512 - DNA, 21 bp, synthetic construct
  source 1..21: mol_type = other DNA
aggctatatgatgcttacgag

SEQ ID NO: 29513 - DNA, 21 bp, synthetic construct
  source 1..21: mol_type = other DNA
tatgcccgcgctggaaacaat

SEQ ID NO: 29514 - DNA, 21 bp, synthetic construct
  source 1..21: mol_type = other DNA
catcacaaactccaaactctt

SEQ ID NO: 29515 - DNA, 21 bp, synthetic construct
  source 1..21: mol_type = other DNA
tgtccacccaaggggccttcg

SEQ ID NO: 29516 - DNA, 21 bp, synthetic construct
  source 1..21: mol_type = other DNA
tgcaatagtcagaagttgggg

SEQ ID NO: 29517 - DNA, 21 bp, synthetic construct
  source 1..21: mol_type = other DNA
tacttcagtggccaagtcatg

SEQ ID NO: 29518 - DNA, 21 bp, synthetic construct
  source 1..21: mol_type = other DNA
acgcgggatggctacaacgct

SEQ ID NO: 29519 - DNA, 21 bp, synthetic construct
  source 1..21: mol_type = other DNA
tactctagcactcatggggtt

SEQ ID NO: 29520 - DNA, 21 bp, synthetic construct
  source 1..21: mol_type = other DNA
ggcagtgaccatgtgcgctgg

SEQ ID NO: 29521 - DNA, 21 bp, synthetic construct
  source 1..21: mol_type = other DNA
tgggcacccatgtgtaaggcg

SEQ ID NO: 29522 - DNA, 21 bp, synthetic construct
  source 1..21: mol_type = other DNA
tatgaatcaacgaacggcgta

SEQ ID NO: 29523 - DNA, 21 bp, synthetic construct
  source 1..21: mol_type = other DNA
aaaagtgatttcacgacgtac

SEQ ID NO: 29524 - DNA, 21 bp, synthetic construct
  source 1..21: mol_type = other DNA
tactcgaggattaacgataac

SEQ ID NO: 29525 - DNA, 21 bp, synthetic construct
  source 1..21: mol_type = other DNA
tgtaaccaagagacaaccagg

SEQ ID NO: 29526 - DNA, 21 bp, synthetic construct
  source 1..21: mol_type = other DNA
tacagccgagtcggttccaac

SEQ ID NO: 29527 - DNA, 21 bp, synthetic construct
  source 1..21: mol_type = other DNA
gaaaccggaatgtgcaagccg

SEQ ID NO: 29528 - DNA, 21 bp, synthetic construct
  source 1..21: mol_type = other DNA
agggagtcgaccaatggcata

SEQ ID NO: 29529 - DNA, 21 bp, synthetic construct
  source 1..21: mol_type = other DNA
tattctaggatgggagataac

SEQ ID NO: 29530 - DNA, 21 bp, synthetic construct
  source 1..21: mol_type = other DNA
tacgcaaggacgaacgacaat

SEQ ID NO: 29531 - DNA, 21 bp, synthetic construct
  source 1..21: mol_type = other DNA
tactttgccggtgtgcgagat

SEQ ID NO: 29532 - DNA, 21 bp, synthetic construct
  source 1..21: mol_type = other DNA
tttagtcgtgcggggcttaac

SEQ ID NO: 29533 - DNA, 21 bp, synthetic construct
  source 1..21: mol_type = other DNA
tactttcacggcaaacatgac

SEQ ID NO: 29534 - DNA, 21 bp, synthetic construct
  source 1..21: mol_type = other DNA
ttttggtctggcgttactgaa

SEQ ID NO: 29535 - DNA, 21 bp, synthetic construct
  source 1..21: mol_type = other DNA
gtacccgactttgtccgttac

SEQ ID NO: 29536 - DNA, 21 bp, synthetic construct
  source 1..21: mol_type = other DNA
ctgagcagggcttcacatgat

SEQ ID NO: 29537 - DNA, 21 bp, synthetic construct
  source 1..21: mol_type = other DNA
tattggagtggcacacatgag

SEQ ID NO: 29538 - DNA, 21 bp, synthetic construct
  source 1..21: mol_type = other DNA
ataaatggcgggaaatgcgat

SEQ ID NO: 29539 - DNA, 21 bp, synthetic construct
  source 1..21: mol_type = other DNA
tacgcgcgtttaggttacaat

SEQ ID NO: 29540 - DNA, 21 bp, synthetic construct
  source 1..21: mol_type = other DNA
tatttcagcggtaggcccgac

SEQ ID NO: 29541 - DNA, 21 bp, synthetic construct
  source 1..21: mol_type = other DNA
tactgggcagggaaagttgat

SEQ ID NO: 29542 - DNA, 21 bp, synthetic construct
  source 1..21: mol_type = other DNA
cgcacgcccacgacatttcca

SEQ ID NO: 29543 - DNA, 21 bp, synthetic construct
  source 1..21: mol_type = other DNA
tgcggtgccttgaggattagt

SEQ ID NO: 29544 - DNA, 21 bp, synthetic construct
  source 1..21: mol_type = other DNA
cacgagacatgtgttcgcgga

SEQ ID NO: 29545 - DNA, 21 bp, synthetic construct
  source 1..21: mol_type = other DNA
caaaatgaatttacgatgtat

SEQ ID NO: 29546 - DNA, 21 bp, synthetic construct
  source 1..21: mol_type = other DNA
tattggcatggagtctcggag

SEQ ID NO: 29547 - DNA, 21 bp, synthetic construct
  source 1..21: mol_type = other DNA
tactggagtggcgtaggtgag

SEQ ID NO: 29548 - DNA, 21 bp, synthetic construct
  source 1..21: mol_type = other DNA
cgttcagagttcgcagtctac

SEQ ID NO: 29549 - DNA, 21 bp, synthetic construct
  source 1..21: mol_type = other DNA
ggcggcgaggggattaggtgg

SEQ ID NO: 29550 - DNA, 21 bp, synthetic construct
  source 1..21: mol_type = other DNA
tattttgccggtcgcgcggac

SEQ ID NO: 29551 - DNA, 21 bp, synthetic construct
  source 1..21: mol_type = other DNA
tattcacgtgcgggcgatgat

SEQ ID NO: 29552 - DNA, 21 bp, synthetic construct
  source 1..21: mol_type = other DNA
tgtaaattcccagtaatggaa

SEQ ID NO: 29553 - DNA, 21 bp, synthetic construct
  source 1..21: mol_type = other DNA
caaggtgaagcccgcagttgg

SEQ ID NO: 29554 - DNA, 21 bp, synthetic construct
  source 1..21: mol_type = other DNA
ttcttttcgggccaaatcgag

SEQ ID NO: 29555 - DNA, 21 bp, synthetic construct
  source 1..21: mol_type = other DNA
tactacagtgggattacagcc

SEQ ID NO: 29556 - DNA, 21 bp, synthetic construct
  source 1..21: mol_type = other DNA
agggattatgatgccttccca

SEQ ID NO: 29557 - DNA, 21 bp, synthetic construct
  source 1..21: mol_type = other DNA
ccatacgcgagatctgctgat

SEQ ID NO: 29558 - DNA, 21 bp, synthetic construct
  source 1..21: mol_type = other DNA
aaagacgattttgtagcgtat

SEQ ID NO: 29559 - DNA, 21 bp, synthetic construct
  source 1..21: mol_type = other DNA
tattttacaggggtgactaat

SEQ ID NO: 29560 - DNA, 21 bp, synthetic construct
  source 1..21: mol_type = other DNA
gcaatggtcgctcgtgattgg

SEQ ID NO: 29561 - DNA, 21 bp, synthetic construct
  source 1..21: mol_type = other DNA
ctagcacggtccggggaaaat

SEQ ID NO: 29562 - DNA, 21 bp, synthetic construct
  source 1..21: mol_type = other DNA
cattggtcgacaaatggagtg

SEQ ID NO: 29563 - DNA, 21 bp, synthetic construct
  source 1..21: mol_type = other DNA
acatacagcacaaatggggtc

SEQ ID NO: 29564 - DNA, 21 bp, synthetic construct
  source 1..21: mol_type = other DNA
tatttcgctggggtcagggac

SEQ ID NO: 29565 - DNA, 21 bp, synthetic construct
  source 1..21: mol_type = other DNA
tattcacggataggtagtaat

SEQ ID NO: 29566 - DNA, 21 bp, synthetic construct
  source 1..21: mol_type = other DNA
tatagtagaggtggacctaat

SEQ ID NO: 29567 - DNA, 21 bp, synthetic construct
  source 1..21: mol_type = other DNA
aaagatgatttcacagggtat

SEQ ID NO: 29568 - DNA, 21 bp, synthetic construct
  source 1..21: mol_type = other DNA
tattttcatggcctacgtgag

SEQ ID NO: 29569 - DNA, 21 bp, synthetic construct
  source 1..21: mol_type = other DNA
tggtggggtggggtaaaagaa

SEQ ID NO: 29570 - DNA, 21 bp, synthetic construct
  source 1..21: mol_type = other DNA
tatcatcgattgggggacagc

SEQ ID NO: 29571 - DNA, 21 bp, synthetic construct
  source 1..21: mol_type = other DNA
agaggcgaattcgtgccgttt

SEQ ID NO: 29572 - DNA, 21 bp, synthetic construct
  source 1..21: mol_type = other DNA
tatgcgagaagcaatcctaat

SEQ ID NO: 29573 - DNA, 21 bp, synthetic construct
  source 1..21: mol_type = other DNA
aaggacgattggacaagctac

SEQ ID NO: 29574 - DNA, 21 bp, synthetic construct
  source 1..21: mol_type = other DNA
tacgtaagaagccaaatgctt

SEQ ID NO: 29575 - DNA, 21 bp, synthetic construct
  source 1..21: mol_type = other DNA
tatacacgtgtccaagaaaat

SEQ ID NO: 29576 - DNA, 21 bp, synthetic construct
  source 1..21: mol_type = other DNA
ggcggagagggatcgaagtgg

SEQ ID NO: 29577 - DNA, 21 bp, synthetic construct
  source 1..21: mol_type = other DNA
tatgctagaacaggctataac

SEQ ID NO: 29578 - DNA, 21 bp, synthetic construct
  source 1..21: mol_type = other DNA
tgtaagaccaagagccaagat

SEQ ID NO: 29579 - DNA, 21 bp, synthetic construct
  source 1..21: mol_type = other DNA
ccatacgctaagagtagcgag

SEQ ID NO: 29580 - DNA, 21 bp, synthetic construct
  source 1..21: mol_type = other DNA
tattcaaagcacgggatgaat

SEQ ID NO: 29581 - DNA, 21 bp, synthetic construct
  source 1..21: mol_type = other DNA
tatgctcgtttgggtaccaac

SEQ ID NO: 29582 - DNA, 21 bp, synthetic construct
  source 1..21: mol_type = other DNA
ttatctaaggtgggctttgat

SEQ ID NO: 29583 - DNA, 21 bp, synthetic construct
  source 1..21: mol_type = other DNA
gctcccccccacatcaagtgg

SEQ ID NO: 29584 - DNA, 21 bp, synthetic construct
  source 1..21: mol_type = other DNA
ccgatggggagtaatacgtgg

SEQ ID NO: 29585 - DNA, 21 bp, synthetic construct
  source 1..21: mol_type = other DNA
tttaatagcaccaacggtgtc

SEQ ID NO: 29586 - DNA, 21 bp, synthetic construct
  source 1..21: mol_type = other DNA
ctaacaaaattgagtaacaat

SEQ ID NO: 29587 - DNA, 21 bp, synthetic construct
  source 1..21: mol_type = other DNA
tatagtcgaatttccgacaat

SEQ ID NO: 29588 - DNA, 21 bp, synthetic construct
  source 1..21: mol_type = other DNA
tatcaccgattggatcccaat

SEQ ID NO: 29589 - DNA, 21 bp, synthetic construct
  source 1..21: mol_type = other DNA
tactatactggtatcttggaa

SEQ ID NO: 29590 - DNA, 21 bp, synthetic construct
  source 1..21: mol_type = other DNA
cacttggcttcccatgattgg

SEQ ID NO: 29591 - DNA, 21 bp, synthetic construct
  source 1..21: mol_type = other DNA
catccctccaggtgcccggaa

SEQ ID NO: 29592 - DNA, 21 bp, synthetic construct
  source 1..21: mol_type = other DNA
tattggacgggcactacagcc

SEQ ID NO: 29593 - DNA, 21 bp, synthetic construct
  source 1..21: mol_type = other DNA
tactacactggcattacggag

SEQ ID NO: 29594 - DNA, 21 bp, synthetic construct
  source 1..21: mol_type = other DNA
tacgcgcgtatagggcaaaat

SEQ ID NO: 29595 - DNA, 21 bp, synthetic construct
  source 1..21: mol_type = other DNA
acctggacaggtgaaaatgct

SEQ ID NO: 29596 - DNA, 21 bp, synthetic construct
  source 1..21: mol_type = other DNA
gatatgcaatctaacttgtgg

SEQ ID NO: 29597 - DNA, 21 bp, synthetic construct
  source 1..21: mol_type = other DNA
cggagtaactttgttttccca

SEQ ID NO: 29598 - DNA, 21 bp, synthetic construct
  source 1..21: mol_type = other DNA
tactcacgtatgggtgttaac

SEQ ID NO: 29599 - DNA, 21 bp, synthetic construct
  source 1..21: mol_type = other DNA
ttcttcagtgggatacgagat

SEQ ID NO: 29600 - DNA, 21 bp, synthetic construct
  source 1..21: mol_type = other DNA
ggttcagagcacgtaagatgg

SEQ ID NO: 29601 - DNA, 21 bp, synthetic construct
  source 1..21: mol_type = other DNA
cggggtccagacacttttcct

SEQ ID NO: 29602 - DNA, 21 bp, synthetic construct
  source 1..21: mol_type = other DNA
gatcctagcagtagcaagtgg

SEQ ID NO: 29603 - DNA, 21 bp, synthetic construct
  source 1..21: mol_type = other DNA
tatagccgcgcaggatccaat

SEQ ID NO: 29604 - DNA, 21 bp, synthetic construct
  source 1..21: mol_type = other DNA
ttctggagtgggattgtcgag

SEQ ID NO: 29605 - DNA, 21 bp, synthetic construct
  source 1..21: mol_type = other DNA
tatgcacgaattggtaacaac

SEQ ID NO: 29606 - DNA, 21 bp, synthetic construct
  source 1..21: mol_type = other DNA
tgcgcgcctatgttacatgaa

SEQ ID NO: 29607 - DNA, 21 bp, synthetic construct
  source 1..21: mol_type = other DNA
tacttttctggtcgtccggat

SEQ ID NO: 29608 - DNA, 21 bp, synthetic construct
  source 1..21: mol_type = other DNA
tattttcacgggcagttggat

SEQ ID NO: 29609 - DNA, 21 bp, synthetic construct
  source 1..21: mol_type = other DNA
tgcaaaccagggaccccagct

SEQ ID NO: 29610 - DNA, 21 bp, synthetic construct
  source 1..21: mol_type = other DNA
atgtttgacgggaccagagct

SEQ ID NO: 29611 - DNA, 21 bp, synthetic construct
  source 1..21: mol_type = other DNA
tatgtccggtcaaatccttta

SEQ ID NO: 29612 - DNA, 21 bp, synthetic construct
  source 1..21: mol_type = other DNA
ctgagccgcgtcagtcccgac

SEQ ID NO: 29613 - DNA, 21 bp, synthetic construct
  source 1..21: mol_type = other DNA
tatgcaagactcggactgaat

SEQ ID NO: 29614 - DNA, 21 bp, synthetic construct
  source 1..21: mol_type = other DNA
catgatggggttagcaaatgg

SEQ ID NO: 29615 - DNA, 21 bp, synthetic construct
  source 1..21: mol_type = other DNA
taccacgcgaagcaagacaat

SEQ ID NO: 29616 - DNA, 21 bp, synthetic construct
  source 1..21: mol_type = other DNA
tactttcacggtaagagcgac

SEQ ID NO: 29617 - DNA, 21 bp, synthetic construct
  source 1..21: mol_type = other DNA
ttttcgcgtttaaataccaat

SEQ ID NO: 29618 - DNA, 21 bp, synthetic construct
  source 1..21: mol_type = other DNA
ctagcgaaaactggaacaaac

SEQ ID NO: 29619 - DNA, 21 bp, synthetic construct
  source 1..21: mol_type = other DNA
tacagtaggcacaacgagaac

SEQ ID NO: 29620 - DNA, 21 bp, synthetic construct
  source 1..21: mol_type = other DNA
agtatgcaggcccggtcttgg

SEQ ID NO: 29621 - DNA, 21 bp, synthetic construct
  source 1..21: mol_type = other DNA
aggggggatagtagaagctgg

SEQ ID NO: 29622 - DNA, 21 bp, synthetic construct
  source 1..21: mol_type = other DNA
ttttcgcgcttaaatcataat

SEQ ID NO: 29623 - DNA, 21 bp, synthetic construct
  source 1..21: mol_type = other DNA
tacttttcgggcgtaatgccc

SEQ ID NO: 29624 - DNA, 21 bp, synthetic construct
  source 1..21: mol_type = other DNA
tttttttccgggagggtcgag

SEQ ID NO: 29625 - DNA, 21 bp, synthetic construct
  source 1..21: mol_type = other DNA
taccatgctcgccagatcaac

SEQ ID NO: 29626 - DNA, 21 bp, synthetic construct
  source 1..21: mol_type = other DNA
agagacgagttcgtttcgttc

SEQ ID NO: 29627 - DNA, 21 bp, synthetic construct
  source 1..21: mol_type = other DNA
cagttagactcaagagattgg

SEQ ID NO: 29628 - DNA, 21 bp, synthetic construct
  source 1..21: mol_type = other DNA
tattggacgggcatgcaagcc

SEQ ID NO: 29629 - DNA, 21 bp, synthetic construct
  source 1..21: mol_type = other DNA
cgatatgagcccaaatgcccc

SEQ ID NO: 29630 - DNA, 21 bp, synthetic construct
  source 1..21: mol_type = other DNA
gaaaatgcctcacgtgcttgg

SEQ ID NO: 29631 - DNA, 21 bp, synthetic construct
  source 1..21: mol_type = other DNA
tattcacgtttacacgtcgat

SEQ ID NO: 29632 - DNA, 21 bp, synthetic construct
  source 1..21: mol_type = other DNA
ctccatcgccttcacccggac

SEQ ID NO: 29633 - DNA, 21 bp, synthetic construct
  source 1..21: mol_type = other DNA
aatatggaagaccgcaagtgg

SEQ ID NO: 29634 - DNA, 21 bp, synthetic construct
  source 1..21: mol_type = other DNA
gacctttccagcggaaattgg

SEQ ID NO: 29635 - DNA, 21 bp, synthetic construct
  source 1..21: mol_type = other DNA
agtatgcaagatcgtacctgg

SEQ ID NO: 29636 - DNA, 21 bp, synthetic construct
  source 1..21: mol_type = other DNA
tattttagtggtgtgacaaac

SEQ ID NO: 29637 - DNA, 21 bp, synthetic construct
  source 1..21: mol_type = other DNA
ttcttttcaggaatcatggag

SEQ ID NO: 29638 - DNA, 21 bp, synthetic construct
  source 1..21: mol_type = other DNA
ttctttacaggtaaattggac

SEQ ID NO: 29639 - DNA, 21 bp, synthetic construct
  source 1..21: mol_type = other DNA
tactcacggcttaatctgaat

SEQ ID NO: 29640 - DNA, 21 bp, synthetic construct
  source 1..21: mol_type = other DNA
tatgctaaaggaaacgtaaac

SEQ ID NO: 29641 - DNA, 21 bp, synthetic construct
  source 1..21: mol_type = other DNA
gatctatcttctaactcatgg

SEQ ID NO: 29642 - DNA, 21 bp, synthetic construct
  source 1..21: mol_type = other DNA
tacagtaggttgcagtcaaca

SEQ ID NO: 29643 - DNA, 21 bp, synthetic construct
  source 1..21: mol_type = other DNA
tttagtcgcatcggctcaaac

SEQ ID NO: 29644 - DNA, 21 bp, synthetic construct
  source 1..21: mol_type = other DNA
tacgtcaaaagccaaccgcaa

SEQ ID NO: 29645 - DNA, 21 bp, synthetic construct
  source 1..21: mol_type = other DNA
tatagcaaacttgatccactc

SEQ ID NO: 29646 - DNA, 21 bp, synthetic construct
  source 1..21: mol_type = other DNA
tatcatgctaaacaagataac

SEQ ID NO: 29647 - DNA, 21 bp, synthetic construct
  source 1..21: mol_type = other DNA
aaaagtgaattccgttcattc

SEQ ID NO: 29648 - DNA, 21 bp, synthetic construct
  source 1..21: mol_type = other DNA
gaaaatgagtttaaaatcttt

SEQ ID NO: 29649 - DNA, 21 bp, synthetic construct
  source 1..21: mol_type = other DNA
gccaggagtactaacggtata

SEQ ID NO: 29650 - DNA, 21 bp, synthetic construct
  source 1..21: mol_type = other DNA
gtgatgagggatcgaggatgg

SEQ ID NO: 29651 - DNA, 21 bp, synthetic construct
  source 1..21: mol_type = other DNA
tatttcaccggcagcagggag

SEQ ID NO: 29652 - DNA, 21 bp, synthetic construct
  source 1..21: mol_type = other DNA
cgaacccgcgatagctatccg

SEQ ID NO: 29653 - DNA, 21 bp, synthetic construct
  source 1..21: mol_type = other DNA
atgatggatggcacacccgca

SEQ ID NO: 29654 - DNA, 21 bp, synthetic construct
  source 1..21: mol_type = other DNA
tactcacgaattggcccgcac

SEQ ID NO: 29655 - DNA, 21 bp, synthetic construct
  source 1..21: mol_type = other DNA
cgctctgaatttaccggttac

SEQ ID NO: 29656 - DNA, 21 bp, synthetic construct
  source 1..21: mol_type = other DNA
ctcagcaaagctggtataaac

SEQ ID NO: 29657 - DNA, 21 bp, synthetic construct
  source 1..21: mol_type = other DNA
aaggatggttttagtggatgg

SEQ ID NO: 29658 - DNA, 21 bp, synthetic construct
  source 1..21: mol_type = other DNA
tgtaaacctccatcgggtcct

SEQ ID NO: 29659 - DNA, 21 bp, synthetic construct
  source 1..21: mol_type = other DNA
ttctcgcggatcggaatgaat

SEQ ID NO: 29660 - DNA, 21 bp, synthetic construct
  source 1..21: mol_type = other DNA
gtaatggattcacgcgactgg

SEQ ID NO: 29661 - DNA, 21 bp, synthetic construct
  source 1..21: mol_type = other DNA
aaatatgatcacgtcgcctgg

SEQ ID NO: 29662 - DNA, 21 bp, synthetic construct
  source 1..21: mol_type = other DNA
ctatcgaaagcaggagcgaat

SEQ ID NO: 29663 - DNA, 21 bp, synthetic construct
  source 1..21: mol_type = other DNA
acatggaccggagagaacgca

SEQ ID NO: 29664 - DNA, 21 bp, synthetic construct
  source 1..21: mol_type = other DNA
catagatcgaccaatggtgta

SEQ ID NO: 29665 - DNA, 21 bp, synthetic construct
  source 1..21: mol_type = other DNA
tttgcaagaaccgggatgaat

SEQ ID NO: 29666 - DNA, 21 bp, synthetic construct
  source 1..21: mol_type = other DNA
gatccgagcagccgtgcatgg

SEQ ID NO: 29667 - DNA, 21 bp, synthetic construct
  source 1..21: mol_type = other DNA
ttcagcagagttggctctaac

SEQ ID NO: 29668 - DNA, 21 bp, synthetic construct
  source 1..21: mol_type = other DNA
aaagacgaataccttaccttc

SEQ ID NO: 29669 - DNA, 21 bp, synthetic construct
  source 1..21: mol_type = other DNA
agagatggaagcagcacgtgg

SEQ ID NO: 29670 - DNA, 21 bp, synthetic construct
  source 1..21: mol_type = other DNA
tatagccgtagcggcgcaaat

SEQ ID NO: 29671 - DNA, 21 bp, synthetic construct
  source 1..21: mol_type = other DNA
tattttgccggtatccaggct

SEQ ID NO: 29672 - DNA, 21 bp, synthetic construct
  source 1..21: mol_type = other DNA
aaaccagctaattatgattgt

SEQ ID NO: 29673 - DNA, 21 bp, synthetic construct
  source 1..21: mol_type = other DNA
tgtagtaataagcaaacacca

SEQ ID NO: 29674 - DNA, 21 bp, synthetic construct
  source 1..21: mol_type = other DNA
tacgcaagggctggcgctaac

SEQ ID NO: 29675 - DNA, 21 bp, synthetic construct
  source 1..21: mol_type = other DNA
ggaagtcctagcagcagttgg

SEQ ID NO: 29676 - DNA, 21 bp, synthetic construct
  source 1..21: mol_type = other DNA
tactacagtcgaatcatagaa

SEQ ID NO: 29677 - DNA, 21 bp, synthetic construct
  source 1..21: mol_type = other DNA
tattttgagggccgcatcgac

SEQ ID NO: 29678 - DNA, 21 bp, synthetic construct
  source 1..21: mol_type = other DNA
tttcagtctaccaatggagtg

SEQ ID NO: 29679 - DNA, 21 bp, synthetic construct
  source 1..21: mol_type = other DNA
tatgcgagattaagtccacta

SEQ ID NO: 29680 - DNA, 21 bp, synthetic construct
  source 1..21: mol_type = other DNA
tactgggctggcattgtagac

SEQ ID NO: 29681 - DNA, 21 bp, synthetic construct
  source 1..21: mol_type = other DNA
tttgcgaggactggcctaaac

SEQ ID NO: 29682 - DNA, 21 bp, synthetic construct
  source 1..21: mol_type = other DNA
ttcagtaaagtgggcgcaaac

SEQ ID NO: 29683 - DNA, 21 bp, synthetic construct
  source 1..21: mol_type = other DNA
tattcaaggactaatgataat

SEQ ID NO: 29684 - DNA, 21 bp, synthetic construct
  source 1..21: mol_type = other DNA
tacagtaagagtaacaataac

SEQ ID NO: 29685 - DNA, 21 bp, synthetic construct
  source 1..21: mol_type = other DNA
ttctttagtggcagggtagaa

SEQ ID NO: 29686 - DNA, 21 bp, synthetic construct
  source 1..21: mol_type = other DNA
tggtattctggaattaaagaa

SEQ ID NO: 29687 - DNA, 21 bp, synthetic construct
  source 1..21: mol_type = other DNA
tatagtaagcaaaatgagaac

SEQ ID NO: 29688 - DNA, 21 bp, synthetic construct
  source 1..21: mol_type = other DNA
tgcactagtgactctttcccg

SEQ ID NO: 29689 - DNA, 21 bp, synthetic construct
  source 1..21: mol_type = other DNA
tattccaggtctaacgacaat

SEQ ID NO: 29690 - DNA, 21 bp, synthetic construct
  source 1..21: mol_type = other DNA
tacatgtcgactaatggggta

SEQ ID NO: 29691 - DNA, 21 bp, synthetic construct
  source 1..21: mol_type = other DNA
cgaacactggattgcgacaga

SEQ ID NO: 29692 - DNA, 21 bp, synthetic construct
  source 1..21: mol_type = other DNA
tatagccgcatgggaacgaat

SEQ ID NO: 29693 - DNA, 21 bp, synthetic construct
  source 1..21: mol_type = other DNA
tggtggcatggagtttcagca

SEQ ID NO: 29694 - DNA, 21 bp, synthetic construct
  source 1..21: mol_type = other DNA
tgcaagccgggagccggcaca

SEQ ID NO: 29695 - DNA, 21 bp, synthetic construct
  source 1..21: mol_type = other DNA
gtagctcgcgagggttgggac

SEQ ID NO: 29696 - DNA, 21 bp, synthetic construct
  source 1..21: mol_type = other DNA
tgcggaaaacgcgaccccgat

SEQ ID NO: 29697 - DNA, 21 bp, synthetic construct
  source 1..21: mol_type = other DNA
tgcaagcccggtccaggcatg

SEQ ID NO: 29698 - DNA, 21 bp, synthetic construct
  source 1..21: mol_type = other DNA
tacagtcgcctcggtactaat

SEQ ID NO: 29699 - DNA, 21 bp, synthetic construct
  source 1..21: mol_type = other DNA
tatatcaagtcgcaaacatgt

SEQ ID NO: 29700 - DNA, 21 bp, synthetic construct
  source 1..21: mol_type = other DNA
cagaatgaccatgttaggtgg

SEQ ID NO: 29701 - DNA, 21 bp, synthetic construct
  source 1..21: mol_type = other DNA
cgcgatggcatgtctagctgg

SEQ ID NO: 29702 - DNA, 21 bp, synthetic construct
  source 1..21: mol_type = other DNA
ggcagtataagtagcacttgg

SEQ ID NO: 29703 - DNA, 21 bp, synthetic construct
  source 1..21: mol_type = other DNA
tttagcagggtaagcgataac

SEQ ID NO: 29704 - DNA, 21 bp, synthetic construct
  source 1..21: mol_type = other DNA
ttggcaaagttgggtccgaac

SEQ ID NO: 29705 - DNA, 21 bp, synthetic construct
  source 1..21: mol_type = other DNA
tattcccgagtgaacttcaat

SEQ ID NO: 29706 - DNA, 21 bp, synthetic construct
  source 1..21: mol_type = other DNA
tgtcgtagtggagcagcattg

SEQ ID NO: 29707 - DNA, 21 bp, synthetic construct
  source 1..21: mol_type = other DNA
ttttcgagactgaatcttaac

SEQ ID NO: 29708 - DNA, 21 bp, synthetic construct
  source 1..21: mol_type = other DNA
tgtatgagtacaagtagaagc

SEQ ID NO: 29709 - DNA, 21 bp, synthetic construct
  source 1..21: mol_type = other DNA
tacgcacgttctggacagaat

SEQ ID NO: 29710 - DNA, 21 bp, synthetic construct
  source 1..21: mol_type = other DNA
tacagccgactcaacttcaac

SEQ ID NO: 29711 - DNA, 21 bp, synthetic construct
  source 1..21: mol_type = other DNA
gtaatgggggatcgcaaatgg

SEQ ID NO: 29712 - DNA, 21 bp, synthetic construct
  source 1..21: mol_type = other DNA
tgtaagaggggactccccgaa

SEQ ID NO: 29713 - DNA, 21 bp, synthetic construct
  source 1..21: mol_type = other DNA
tgcaaaccttcgcctttggag

SEQ ID NO: 29714 - DNA, 21 bp, synthetic construct
  source 1..21: mol_type = other DNA
tattatagcggaatcagggac

SEQ ID NO: 29715 - DNA, 21 bp, synthetic construct
  source 1..21: mol_type = other DNA
cccttgagttcccaatcctgg

SEQ ID NO: 29716 - DNA, 21 bp, synthetic construct
  source 1..21: mol_type = other DNA
tggtggtcgcaagtaaaggaa

SEQ ID NO: 29717 - DNA, 21 bp, synthetic construct
  source 1..21: mol_type = other DNA
tactcaagaaccgggatcaat

SEQ ID NO: 29718 - DNA, 21 bp, synthetic construct
  source 1..21: mol_type = other DNA
tcaatgcaagatcgcttgtgg

SEQ ID NO: 29719 - DNA, 21 bp, synthetic construct
  source 1..21: mol_type = other DNA
tactttactggcgagatggag

SEQ ID NO: 29720 - DNA, 21 bp, synthetic construct
  source 1..21: mol_type = other DNA
tacgctaggggaaacccaaac

SEQ ID NO: 29721 - DNA, 21 bp, synthetic construct
  source 1..21: mol_type = other DNA
tggtttagcggcaaaatcgat

SEQ ID NO: 29722 - DNA, 21 bp, synthetic construct
  source 1..21: mol_type = other DNA
gtgccggacagcgtcaggtgg

SEQ ID NO: 29723 - DNA, 21 bp, synthetic construct
  source 1..21: mol_type = other DNA
tacagtaagtcaggctggaat

SEQ ID NO: 29724 - DNA, 21 bp, synthetic construct
  source 1..21: mol_type = other DNA
tattcgaagcacggtgctaac

SEQ ID NO: 29725 - DNA, 21 bp, synthetic construct
  source 1..21: mol_type = other DNA
ggaagcgggcaaagctcgtgg

SEQ ID NO: 29726 - DNA, 21 bp, synthetic construct
  source 1..21: mol_type = other DNA
aagaaatacgaaatcaataac

SEQ ID NO: 29727 - DNA, 21 bp, synthetic construct
  source 1..21: mol_type = other DNA
tgccgtgataaaaatgtcgag

SEQ ID NO: 29728 - DNA, 21 bp, synthetic construct
  source 1..21: mol_type = other DNA
ttgcctgacggcgatggtcct

SEQ ID NO: 29729 - DNA, 21 bp, synthetic construct
  source 1..21: mol_type = other DNA
gggggtgaaggcagtaaatgg

SEQ ID NO: 29730 - DNA, 21 bp, synthetic construct
  source 1..21: mol_type = other DNA
cagggtgtctcaagggagtgg

SEQ ID NO: 29731 - DNA, 21 bp, synthetic construct
  source 1..21: mol_type = other DNA
ggttcgggaaccagctcatgg

SEQ ID NO: 29732 - DNA, 21 bp, synthetic construct
  source 1..21: mol_type = other DNA
ttttcaaggttaaataataac

SEQ ID NO: 29733 - DNA, 21 bp, synthetic construct
  source 1..21: mol_type = other DNA
tgcaagtcggagatgaaaatg

SEQ ID NO: 29734 - DNA, 21 bp, synthetic construct
  source 1..21: mol_type = other DNA
cggagcgaattcactagttat

SEQ ID NO: 29735 - DNA, 21 bp, synthetic construct
  source 1..21: mol_type = other DNA
attctggaatcgagggattgg

SEQ ID NO: 29736 - DNA, 21 bp, synthetic construct
  source 1..21: mol_type = other DNA
tacagcaaatctaacgtaaat

SEQ ID NO: 29737 - DNA, 21 bp, synthetic construct
  source 1..21: mol_type = other DNA
ggcagtgagtttagtacctac

SEQ ID NO: 29738 - DNA, 21 bp, synthetic construct
  source 1..21: mol_type = other DNA
tatgttaggttcgatcaaggg

SEQ ID NO: 29739 - DNA, 21 bp, synthetic construct
  source 1..21: mol_type = other DNA
tgggtaaagagccagcaacac

SEQ ID NO: 29740 - DNA, 21 bp, synthetic construct
  source 1..21: mol_type = other DNA
gaattacaaagcagcaaatgg

SEQ ID NO: 29741 - DNA, 21 bp, synthetic construct
  source 1..21: mol_type = other DNA
tactcaaaatcaaataacaat

SEQ ID NO: 29742 - DNA, 21 bp, synthetic construct
  source 1..21: mol_type = other DNA
atcgcttcaactaatggaatt

SEQ ID NO: 29743 - DNA, 21 bp, synthetic construct
  source 1..21: mol_type = other DNA
gggagcaatacatcaagatgg

SEQ ID NO: 29744 - DNA, 21 bp, synthetic construct
  source 1..21: mol_type = other DNA
ccctgcgggccgtgcacatac

SEQ ID NO: 29745 - DNA, 21 bp, synthetic construct
  source 1..21: mol_type = other DNA
gctcccaacactgtaaagtgg

SEQ ID NO: 29746 - DNA, 21 bp, synthetic construct
  source 1..21: mol_type = other DNA
cgccttgaccatgtatacccg

SEQ ID NO: 29747 - DNA, 21 bp, synthetic construct
  source 1..21: mol_type = other DNA
ttggcaaagtctggtatgaat

SEQ ID NO: 29748 - DNA, 21 bp, synthetic construct
  source 1..21: mol_type = other DNA
ataagcggtcgtggatgggac

SEQ ID NO: 29749 - DNA, 21 bp, synthetic construct
  source 1..21: mol_type = other DNA
agaggggtagacatgtatcca

SEQ ID NO: 29750 - DNA, 21 bp, synthetic construct
  source 1..21: mol_type = other DNA
tatagccgcttggatagggac

SEQ ID NO: 29751 - DNA, 21 bp, synthetic construct
  source 1..21: mol_type = other DNA
atggacgacttcacagtgtat

SEQ ID NO: 29752 - DNA, 21 bp, synthetic construct
  source 1..21: mol_type = other DNA
tacgctcggtccggaggcaat

SEQ ID NO: 29753 - DNA, 21 bp, synthetic construct
  source 1..21: mol_type = other DNA
tattccagggtcaatgtgaat

SEQ ID NO: 29754 - DNA, 21 bp, synthetic construct
  source 1..21: mol_type = other DNA
ggttccggcacgtcgagttgg

SEQ ID NO: 29755 - DNA, 21 bp, synthetic construct
  source 1..21: mol_type = other DNA
ttcagtaggttagggtcaaat

SEQ ID NO: 29756 - DNA, 21 bp, synthetic construct
  source 1..21: mol_type = other DNA
tatcatgctcgccaggccaac

SEQ ID NO: 29757 - DNA, 21 bp, synthetic construct
  source 1..21: mol_type = other DNA
ttaaaaaagccttgtttaacc

SEQ ID NO: 29758 - DNA, 21 bp, synthetic construct
  source 1..21: mol_type = other DNA
tgtaaaccgcccccaatagaa

SEQ ID NO: 29759 - DNA, 21 bp, synthetic construct
  source 1..21: mol_type = other DNA
atagtcagcacgaatgggata

SEQ ID NO: 29760 - DNA, 21 bp, synthetic construct
  source 1..21: mol_type = other DNA
taccacaaactacaatacggg

SEQ ID NO: 29761 - DNA, 21 bp, synthetic construct
  source 1..21: mol_type = other DNA
tattcacgtagcggcgataat

SEQ ID NO: 29762 - DNA, 21 bp, synthetic construct
  source 1..21: mol_type = other DNA
tatgttcgttcagaccgggcg

SEQ ID NO: 29763 - DNA, 21 bp, synthetic construct
  source 1..21: mol_type = other DNA
cgcgaagagatggtcagctgg

SEQ ID NO: 29764 - DNA, 21 bp, synthetic construct
  source 1..21: mol_type = other DNA
tatgccaggataggacacaat

SEQ ID NO: 29765 - DNA, 21 bp, synthetic construct
  source 1..21: mol_type = other DNA
tacttcagtggccagataatg

SEQ ID NO: 29766 - DNA, 21 bp, synthetic construct
  source 1..21: mol_type = other DNA
aaagacgactatagttactat

SEQ ID NO: 29767 - DNA, 21 bp, synthetic construct
  source 1..21: mol_type = other DNA
agtgcaagcacaaacggacga

SEQ ID NO: 29768 - DNA, 21 bp, synthetic construct
  source 1..21: mol_type = other DNA
cttcatcgcttaggggaaggg

SEQ ID NO: 29769 - DNA, 21 bp, synthetic construct
  source 1..21: mol_type = other DNA
cgggacggtagtagcacctgg

SEQ ID NO: 29770 - DNA, 21 bp, synthetic construct
  source 1..21: mol_type = other DNA
tacgccagggggagccctaac

SEQ ID NO: 29771 - DNA, 21 bp, synthetic construct
  source 1..21: mol_type = other DNA
tatacaaagtcgggacccagc

SEQ ID NO: 29772 - DNA, 21 bp, synthetic construct
  source 1..21: mol_type = other DNA
gacatggcaagtcgtatgtgg

SEQ ID NO: 29773 - DNA, 21 bp, synthetic construct
  source 1..21: mol_type = other DNA
cgactcccggatgtgtacccc

SEQ ID NO: 29774 - DNA, 21 bp, synthetic construct
  source 1..21: mol_type = other DNA
ggtgatggacaaagccgttgg

SEQ ID NO: 29775 - DNA, 21 bp, synthetic construct
  source 1..21: mol_type = other DNA
tatagcaggacaggttccaac

SEQ ID NO: 29776 - DNA, 21 bp, synthetic construct
  source 1..21: mol_type = other DNA
caccacaagctgcagacgttg

SEQ ID NO: 29777 - DNA, 21 bp, synthetic construct
  source 1..21: mol_type = other DNA
tacagtaagtactgtgtcaac

SEQ ID NO: 29778 - DNA, 21 bp, synthetic construct
  source 1..21: mol_type = other DNA
agcatgcaggatcgaaaatgg

SEQ ID NO: 29779 - DNA, 21 bp, synthetic construct
  source 1..21: mol_type = other DNA
cgaacctatgacgtctacccg

SEQ ID NO: 29780 - DNA, 21 bp, synthetic construct
  source 1..21: mol_type = other DNA
agggagggtacatcgtattgg

SEQ ID NO: 29781 - DNA, 21 bp, synthetic construct
  source 1..21: mol_type = other DNA
ttttgggcgggcgtgaaggac

SEQ ID NO: 29782 - DNA, 21 bp, synthetic construct
  source 1..21: mol_type = other DNA
tacgctaaggggaacgcgaac

SEQ ID NO: 29783 - DNA, 21 bp, synthetic construct
  source 1..21: mol_type = other DNA
tatgtaagatttgacgctaat

SEQ ID NO: 29784 - DNA, 21 bp, synthetic construct
  source 1..21: mol_type = other DNA
tattcacgcttaaacggaaat

SEQ ID NO: 29785 - DNA, 21 bp, synthetic construct
  source 1..21: mol_type = other DNA
ttttctcgactcggatcgaac

SEQ ID NO: 29786 - DNA, 21 bp, synthetic construct
  source 1..21: mol_type = other DNA
tgcatgagcggccctcgtccc

SEQ ID NO: 29787 - DNA, 21 bp, synthetic construct
  source 1..21: mol_type = other DNA
tatgcgcgaagcggttacaat

SEQ ID NO: 29788 - DNA, 21 bp, synthetic construct
  source 1..21: mol_type = other DNA
tattcgcgcattgcgccaaac

SEQ ID NO: 29789 - DNA, 21 bp, synthetic construct
  source 1..21: mol_type = other DNA
atgctttcagacagattatgg

SEQ ID NO: 29790 - DNA, 21 bp, synthetic construct
  source 1..21: mol_type = other DNA
tacttcagcggacgcacaagc

SEQ ID NO: 29791 - DNA, 21 bp, synthetic construct
  source 1..21: mol_type = other DNA
agagaagacatggtaagttgg

SEQ ID NO: 29792 - DNA, 21 bp, synthetic construct
  source 1..21: mol_type = other DNA
tacttttctggacagacaagt

SEQ ID NO: 29793 - DNA, 21 bp, synthetic construct
  source 1..21: mol_type = other DNA
cgcaccagggaagtataccca

SEQ ID NO: 29794 - DNA, 21 bp, synthetic construct
  source 1..21: mol_type = other DNA
ttctggagcggggtaacggag

SEQ ID NO: 29795 - DNA, 21 bp, synthetic construct
  source 1..21: mol_type = other DNA
tacgctaggaacggccacaac

SEQ ID NO: 29796 - DNA, 21 bp, synthetic construct
  source 1..21: mol_type = other DNA
ttagcgagatcggggtgggac

SEQ ID NO: 29797 - DNA, 21 bp, synthetic construct
  source 1..21: mol_type = other DNA
tactccgcaaggggacctaac

SEQ ID NO: 29798 - DNA, 21 bp, synthetic construct
  source 1..21: mol_type = other DNA
tacgctaggcaaggcatgaat

SEQ ID NO: 29799 - DNA, 21 bp, synthetic construct
  source 1..21: mol_type = other DNA
tacgtacgttcagatgttcgt

SEQ ID NO: 29800 - DNA, 21 bp, synthetic construct
  source 1..21: mol_type = other DNA
tatttctctggtcggagcgat

SEQ ID NO: 29801 - DNA, 21 bp, synthetic construct
  source 1..21: mol_type = other DNA
ccagtccctgactgtctggcg

SEQ ID NO: 29802 - DNA, 21 bp, synthetic construct
  source 1..21: mol_type = other DNA
tacagtcgtattggtaataat

SEQ ID NO: 29803 - DNA, 21 bp, synthetic construct
  source 1..21: mol_type = other DNA
tatgctaagggcgggtgcaac

SEQ ID NO: 29804 - DNA, 21 bp, synthetic construct
  source 1..21: mol_type = other DNA
actggtagcacaaatggaata

SEQ ID NO: 29805 - DNA, 21 bp, synthetic construct
  source 1..21: mol_type = other DNA
ccctacgctagatcgcctgag

SEQ ID NO: 29806 - DNA, 21 bp, synthetic construct
  source 1..21: mol_type = other DNA
tgtcggccccccaccagagat

SEQ ID NO: 29807 - DNA, 21 bp, synthetic construct
  source 1..21: mol_type = other DNA
ccgtatgccaagagtgcaaac

SEQ ID NO: 29808 - DNA, 21 bp, synthetic construct
  source 1..21: mol_type = other DNA
atgacgtatgacagttacgac

SEQ ID NO: 29809 - DNA, 21 bp, synthetic construct
  source 1..21: mol_type = other DNA
tgccaaagcaagacggggcat

SEQ ID NO: 29810 - DNA, 21 bp, synthetic construct
  source 1..21: mol_type = other DNA
tatagccgaatcgggtccaac

SEQ ID NO: 29811 - DNA, 21 bp, synthetic construct
  source 1..21: mol_type = other DNA
tatagcaaacataacgctaac

SEQ ID NO: 29812 - DNA, 21 bp, synthetic construct
  source 1..21: mol_type = other DNA
ttctcccgtcaagggcccaat

SEQ ID NO: 29813 - DNA, 21 bp, synthetic construct
  source 1..21: mol_type = other DNA
tactcacgcacaggcagtaat

SEQ ID NO: 29814 - DNA, 21 bp, synthetic construct
  source 1..21: mol_type = other DNA
tacgccagaacaggatgggac

SEQ ID NO: 29815 - DNA, 21 bp, synthetic construct
  source 1..21: mol_type = other DNA
atacctcgtacctgcccagct

SEQ ID NO: 29816 - DNA, 21 bp, synthetic construct
  source 1..21: mol_type = other DNA
tattggagtggaactatggca

SEQ ID NO: 29817 - DNA, 21 bp, synthetic construct
  source 1..21: mol_type = other DNA
tatcatcgcctgtcggataac

SEQ ID NO: 29818 - DNA, 21 bp, synthetic construct
  source 1..21: mol_type = other DNA
gtttgtagaccgtgcgcagga

SEQ ID NO: 29819 - DNA, 21 bp, synthetic construct
  source 1..21: mol_type = other DNA
tacgtgagaagctgcccgatg

SEQ ID NO: 29820 - DNA, 21 bp, synthetic construct
  source 1..21: mol_type = other DNA
attgacgaatggaagacttgg

SEQ ID NO: 29821 - DNA, 21 bp, synthetic construct
  source 1..21: mol_type = other DNA
ggagacgaatccagcgtctgg

SEQ ID NO: 29822 - DNA, 21 bp, synthetic construct
  source 1..21: mol_type = other DNA
tattggactgggaagccggac

SEQ ID NO: 29823 - DNA, 21 bp, synthetic construct
  source 1..21: mol_type = other DNA
tatttctcgggcactcgtgca

SEQ ID NO: 29824 - DNA, 21 bp, synthetic construct
  source 1..21: mol_type = other DNA
tacagtaaacatggttacaat

SEQ ID NO: 29825 - DNA, 21 bp, synthetic construct
  source 1..21: mol_type = other DNA
ttggcaaagaatgggcataac

SEQ ID NO: 29826 - DNA, 21 bp, synthetic construct
  source 1..21: mol_type = other DNA
caccatagcacgaatggcatt

SEQ ID NO: 29827 - DNA, 21 bp, synthetic construct
  source 1..21: mol_type = other DNA
tactcgagaatcgggatgaat

SEQ ID NO: 29828 - DNA, 21 bp, synthetic construct
  source 1..21: mol_type = other DNA
tatttcgcaggtaagtatgac

SEQ ID NO: 29829 - DNA, 21 bp, synthetic construct
  source 1..21: mol_type = other DNA
actcctgatagcgtacgatgg

SEQ ID NO: 29830 - DNA, 21 bp, synthetic construct
  source 1..21: mol_type = other DNA
tggtggtcaggaatggtcgag

SEQ ID NO: 29831 - DNA, 21 bp, synthetic construct
  source 1..21: mol_type = other DNA
gtagtggactacatgagtcat

SEQ ID NO: 29832 - DNA, 21 bp, synthetic construct
  source 1..21: mol_type = other DNA
tactacactgggaaagtttcc

SEQ ID NO: 29833 - DNA, 21 bp, synthetic construct
  source 1..21: mol_type = other DNA
ggcggggacgggagcagttgg

SEQ ID NO: 29834 - DNA, 21 bp, synthetic construct
  source 1..21: mol_type = other DNA
atgacgggtataagctgctta

SEQ ID NO: 29835 - DNA, 21 bp, synthetic construct
  source 1..21: mol_type = other DNA
ataatgtccactaatggtgtt

SEQ ID NO: 29836 - DNA, 21 bp, synthetic construct
  source 1..21: mol_type = other DNA
ttttcacgaacaggtgcaaat

SEQ ID NO: 29837 - DNA, 21 bp, synthetic construct
  source 1..21: mol_type = other DNA
agtatgatggaccggagttgg

SEQ ID NO: 29838 - DNA, 21 bp, synthetic construct
  source 1..21: mol_type = other DNA
gatttgaagagcgcgaattgg

SEQ ID NO: 29839 - DNA, 21 bp, synthetic construct
  source 1..21: mol_type = other DNA
tacttcgctgggaagcacgaa

SEQ ID NO: 29840 - DNA, 21 bp, synthetic construct
  source 1..21: mol_type = other DNA
gggaaattgggttcttgtgat

SEQ ID NO: 29841 - DNA, 21 bp, synthetic construct
  source 1..21: mol_type = other DNA
agagatggcgcttccggctgg

SEQ ID NO: 29842 - DNA, 21 bp, synthetic construct
  source 1..21: mol_type = other DNA
atagcatccaggtgccctcac

SEQ ID NO: 29843 - DNA, 21 bp, synthetic construct
  source 1..21: mol_type = other DNA
tatttcactggaacgaataat

SEQ ID NO: 29844 - DNA, 21 bp, synthetic construct
  source 1..21: mol_type = other DNA
tattacaccggtgtcgtggca

SEQ ID NO: 29845 - DNA, 21 bp, synthetic construct
  source 1..21: mol_type = other DNA
ggagtagagcatgtccgctgg

SEQ ID NO: 29846 - DNA, 21 bp, synthetic construct
  source 1..21: mol_type = other DNA
tattttcatggtagagtggat

SEQ ID NO: 29847 - DNA, 21 bp, synthetic construct
  source 1..21: mol_type = other DNA
tattggacaggcatgactagt

SEQ ID NO: 29848 - DNA, 21 bp, synthetic construct
  source 1..21: mol_type = other DNA
ctattggctgaccggacttgg

SEQ ID NO: 29849 - DNA, 21 bp, synthetic construct
  source 1..21: mol_type = other DNA
tatttctctggagtgcgcaac

SEQ ID NO: 29850 - DNA, 21 bp, synthetic construct
  source 1..21: mol_type = other DNA
tacttcacaggacgagaagac

SEQ ID NO: 29851 - DNA, 21 bp, synthetic construct
  source 1..21: mol_type = other DNA
ttatcccggagctcaatgaac

SEQ ID NO: 29852 - DNA, 21 bp, synthetic construct
  source 1..21: mol_type = other DNA
tatagctcaacccatggcgta

SEQ ID NO: 29853 - DNA, 21 bp, synthetic construct
  source 1..21: mol_type = other DNA
ggcggagcttcctccaggtgg

SEQ ID NO: 29854 - DNA, 21 bp, synthetic construct
  source 1..21: mol_type = other DNA
attatgtcggaaagagtttgg

SEQ ID NO: 29855 - DNA, 21 bp, synthetic construct
  source 1..21: mol_type = other DNA
tactttagtggaacccatcaa

SEQ ID NO: 29856 - DNA, 21 bp, synthetic construct
  source 1..21: mol_type = other DNA
tactggaccggtatgcaggac

SEQ ID NO: 29857 - DNA, 21 bp, synthetic construct
  source 1..21: mol_type = other DNA
ttttctaggaccggtcacaat

SEQ ID NO: 29858 - DNA, 21 bp, synthetic construct
  source 1..21: mol_type = other DNA
attatgagcagccgaagctgg

SEQ ID NO: 29859 - DNA, 21 bp, synthetic construct
  source 1..21: mol_type = other DNA
tttagcagagtccagcctaac

SEQ ID NO: 29860 - DNA, 21 bp, synthetic construct
  source 1..21: mol_type = other DNA
aataaatcatgctcatcaatg

SEQ ID NO: 29861 - DNA, 21 bp, synthetic construct
  source 1..21: mol_type = other DNA
aggtctattgacgcatttccc

SEQ ID NO: 29862 - DNA, 21 bp, synthetic construct
  source 1..21: mol_type = other DNA
taccataggctcgatcctaac

SEQ ID NO: 29863 - DNA, 21 bp, synthetic construct
  source 1..21: mol_type = other DNA
ctctctgccttgagtgttaat

SEQ ID NO: 29864 - DNA, 21 bp, synthetic construct
  source 1..21: mol_type = other DNA
tatttccatggtaaacaagat

SEQ ID NO: 29865 - DNA, 21 bp, synthetic construct
  source 1..21: mol_type = other DNA
taccatcgcttgcaatcggtc

SEQ ID NO: 29866 - DNA, 21 bp, synthetic construct
  source 1..21: mol_type = other DNA
tattacaccggtcgcgtcgat

SEQ ID NO: 29867 - DNA, 21 bp, synthetic construct
  source 1..21: mol_type = other DNA
ggcgatggaaatagcagatgg

SEQ ID NO: 29868 - DNA, 21 bp, synthetic construct
  source 1..21: mol_type = other DNA
ggagaggttaatgtcagatgg

SEQ ID NO: 29869 - DNA, 21 bp, synthetic construct
  source 1..21: mol_type = other DNA
tactatactggagttctagag

SEQ ID NO: 29870 - DNA, 21 bp, synthetic construct
  source 1..21: mol_type = other DNA
agtatgcaggacaggctctgg

SEQ ID NO: 29871 - DNA, 21 bp, synthetic construct
  source 1..21: mol_type = other DNA
tatagtcgggtcggcaataat

SEQ ID NO: 29872 - DNA, 21 bp, synthetic construct
  source 1..21: mol_type = other DNA
attgacagcactaatggcata

SEQ ID NO: 29873 - DNA, 21 bp, synthetic construct
  source 1..21: mol_type = other DNA
cgcaatggcacttcagcatgg

SEQ ID NO: 29874 - DNA, 21 bp, synthetic construct
  source 1..21: mol_type = other DNA
tacagtgcgaatggtcccaat

SEQ ID NO: 29875 - DNA, 21 bp, synthetic construct
  source 1..21: mol_type = other DNA
tatgctcggaccgggcacaac

SEQ ID NO: 29876 - DNA, 21 bp, synthetic construct
  source 1..21: mol_type = other DNA
atttcaaagacgtgtgggagc

SEQ ID NO: 29877 - DNA, 21 bp, synthetic construct
  source 1..21: mol_type = other DNA
tacgctcgaagcggacataat

SEQ ID NO: 29878 - DNA, 21 bp, synthetic construct
  source 1..21: mol_type = other DNA
tattttactggggtggccaca

SEQ ID NO: 29879 - DNA, 21 bp, synthetic construct
  source 1..21: mol_type = other DNA
tgcaaaccactccagcctgcc

SEQ ID NO: 29880 - DNA, 21 bp, synthetic construct
  source 1..21: mol_type = other DNA
gttcacagttttaatggagta

SEQ ID NO: 29881 - DNA, 21 bp, synthetic construct
  source 1..21: mol_type = other DNA
tgtaagccgcccccaaaaata

SEQ ID NO: 29882 - DNA, 21 bp, synthetic construct
  source 1..21: mol_type = other DNA
tattacacgggtgttatggcc

SEQ ID NO: 29883 - DNA, 21 bp, synthetic construct
  source 1..21: mol_type = other DNA
tacagtagagttgggattaat

SEQ ID NO: 29884 - DNA, 21 bp, synthetic construct
  source 1..21: mol_type = other DNA
agctcgtcttccaacggtgtc

SEQ ID NO: 29885 - DNA, 21 bp, synthetic construct
  source 1..21: mol_type = other DNA
ttcagcaggcttaacacaaac

SEQ ID NO: 29886 - DNA, 21 bp, synthetic construct
  source 1..21: mol_type = other DNA
tacatgaaagacgcatttccc

SEQ ID NO: 29887 - DNA, 21 bp, synthetic construct
  source 1..21: mol_type = other DNA
tttttctccgggcgtgtcgag

SEQ ID NO: 29888 - DNA, 21 bp, synthetic construct
  source 1..21: mol_type = other DNA
catgggtcaacgaatggcaag

SEQ ID NO: 29889 - DNA, 21 bp, synthetic construct
  source 1..21: mol_type = other DNA
atatgcaagccctgtttgact

SEQ ID NO: 29890 - DNA, 21 bp, synthetic construct
  source 1..21: mol_type = other DNA
ttggccaagaccgggacgaat

SEQ ID NO: 29891 - DNA, 21 bp, synthetic construct
  source 1..21: mol_type = other DNA
gggcctgagacggtccgctgg

SEQ ID NO: 29892 - DNA, 21 bp, synthetic construct
  source 1..21: mol_type = other DNA
cgtgcctttgactcttaccca

SEQ ID NO: 29893 - DNA, 21 bp, synthetic construct
  source 1..21: mol_type = other DNA
agggattccacacacggtgtc

SEQ ID NO: 29894 - DNA, 21 bp, synthetic construct
  source 1..21: mol_type = other DNA
tatttcaccggaacgtcatct

SEQ ID NO: 29895 - DNA, 21 bp, synthetic construct
  source 1..21: mol_type = other DNA
tgtgttcaaaccaagaaagaa

SEQ ID NO: 29896 - DNA, 21 bp, synthetic construct
  source 1..21: mol_type = other DNA
tttttcagcggggtaaccgca

SEQ ID NO: 29897 - DNA, 21 bp, synthetic construct
  source 1..21: mol_type = other DNA
tatagcaaaatcaacttcaat

SEQ ID NO: 29898 - DNA, 21 bp, synthetic construct
  source 1..21: mol_type = other DNA
tactcccggattggtcataat

SEQ ID NO: 29899 - DNA, 21 bp, synthetic construct
  source 1..21: mol_type = other DNA
tactggagtgggaaagtggct

SEQ ID NO: 29900 - DNA, 21 bp, synthetic construct
  source 1..21: mol_type = other DNA
tacttctcaaaggtgcaggcc

SEQ ID NO: 29901 - DNA, 21 bp, synthetic construct
  source 1..21: mol_type = other DNA
tatgcacggaccaacacgaac

SEQ ID NO: 29902 - DNA, 21 bp, synthetic construct
  source 1..21: mol_type = other DNA
tatttttccggcagaccgaac

SEQ ID NO: 29903 - DNA, 21 bp, synthetic construct
  source 1..21: mol_type = other DNA
cccatgcaggatagatcttgg

SEQ ID NO: 29904 - DNA, 21 bp, synthetic construct
  source 1..21: mol_type = other DNA
tatgagaccggttgtaaggaa

SEQ ID NO: 29905 - DNA, 21 bp, synthetic construct
  source 1..21: mol_type = other DNA
tatagtaaacatgggtttaac

SEQ ID NO: 29906 - DNA, 21 bp, synthetic construct
  source 1..21: mol_type = other DNA
ggagacgaatggaagacgtgg

SEQ ID NO: 29907 - DNA, 21 bp, synthetic construct
  source 1..21: mol_type = other DNA
tactcgagggtcagtgacaca

SEQ ID NO: 29908 - DNA, 21 bp, synthetic construct
  source 1..21: mol_type = other DNA
ctagcgcgcaatgcttctaat

SEQ ID NO: 29909 - DNA, 21 bp, synthetic construct
  source 1..21: mol_type = other DNA
gactatactggtaaatctgcc

SEQ ID NO: 29910 - DNA, 21 bp, synthetic construct
  source 1..21: mol_type = other DNA
atcttggatagtagaaagtgg

SEQ ID NO: 29911 - DNA, 21 bp, synthetic construct
  source 1..21: mol_type = other DNA
cttgatgattggactacttac

SEQ ID NO: 29912 - DNA, 21 bp, synthetic construct
  source 1..21: mol_type = other DNA
tactgtaaatcacagtcatat

SEQ ID NO: 29913 - DNA, 21 bp, synthetic construct
  source 1..21: mol_type = other DNA
tattttcacggtactgttgag

SEQ ID NO: 29914 - DNA, 21 bp, synthetic construct
  source 1..21: mol_type = other DNA
taccacgccaggagtccttta

SEQ ID NO: 29915 - DNA, 21 bp, synthetic construct
  source 1..21: mol_type = other DNA
gtcagtgactttatggccttc

SEQ ID NO: 29916 - DNA, 21 bp, synthetic construct
  source 1..21: mol_type = other DNA
tatcatataaagtcatgcgac

SEQ ID NO: 29917 - DNA, 21 bp, synthetic construct
  source 1..21: mol_type = other DNA
catcgtagtacaaacggcgta

SEQ ID NO: 29918 - DNA, 21 bp, synthetic construct
  source 1..21: mol_type = other DNA
tatgccaaaaatggtgtgaat

SEQ ID NO: 29919 - DNA, 21 bp, synthetic construct
  source 1..21: mol_type = other DNA
attatgagcacaaatggtgtt

SEQ ID NO: 29920 - DNA, 21 bp, synthetic construct
  source 1..21: mol_type = other DNA
attatggaatcacagagctgg

SEQ ID NO: 29921 - DNA, 21 bp, synthetic construct
  source 1..21: mol_type = other DNA
tattggagtggcgtccaagtt

SEQ ID NO: 29922 - DNA, 21 bp, synthetic construct
  source 1..21: mol_type = other DNA
tactggtcgggcatccagttg

SEQ ID NO: 29923 - DNA, 21 bp, synthetic construct
  source 1..21: mol_type = other DNA
atgtgggacgggactagccca

SEQ ID NO: 29924 - DNA, 21 bp, synthetic construct
  source 1..21: mol_type = other DNA
caaactagtactaatggcagg

SEQ ID NO: 29925 - DNA, 21 bp, synthetic construct
  source 1..21: mol_type = other DNA
ttttttagtggagtccgcgat

SEQ ID NO: 29926 - DNA, 21 bp, synthetic construct
  source 1..21: mol_type = other DNA
tacagccgtatgaaccctaac

SEQ ID NO: 29927 - DNA, 21 bp, synthetic construct
  source 1..21: mol_type = other DNA
atgctgtctgatcgaacttgg

SEQ ID NO: 29928 - DNA, 21 bp, synthetic construct
  source 1..21: mol_type = other DNA
tatagtcgtatgggtatcaac

SEQ ID NO: 29929 - DNA, 21 bp, synthetic construct
  source 1..21: mol_type = other DNA
tggactcaggcgtgtccgaaa

SEQ ID NO: 29930 - DNA, 21 bp, synthetic construct
  source 1..21: mol_type = other DNA
tactttagtgggcagtcggag

SEQ ID NO: 29931 - DNA, 21 bp, synthetic construct
  source 1..21: mol_type = other DNA
ttgtcacgcgtagcttttgat

SEQ ID NO: 29932 - DNA, 21 bp, synthetic construct
  source 1..21: mol_type = other DNA
ttccaaagcacgaatggggta

SEQ ID NO: 29933 - DNA, 21 bp, synthetic construct
  source 1..21: mol_type = other DNA
tattttacaggaagaaacgat

SEQ ID NO: 29934 - DNA, 21 bp, synthetic construct
  source 1..21: mol_type = other DNA
gaacgaaaagtgcatccacaa

SEQ ID NO: 29935 - DNA, 21 bp, synthetic construct
  source 1..21: mol_type = other DNA
ttacacaggctcggagagggc

SEQ ID NO: 29936 - DNA, 21 bp, synthetic construct
  source 1..21: mol_type = other DNA
tacgtacgctcacaaccccac

SEQ ID NO: 29937 - DNA, 21 bp, synthetic construct
  source 1..21: mol_type = other DNA
tactcgaaatggaatgtcaat

SEQ ID NO: 29938 - DNA, 21 bp, synthetic construct
  source 1..21: mol_type = other DNA
tacagcaaagcaaattgcaat

SEQ ID NO: 29939 - DNA, 21 bp, synthetic construct
  source 1..21: mol_type = other DNA
aatggaccgcatgggtggaat

SEQ ID NO: 29940 - DNA, 21 bp, synthetic construct
  source 1..21: mol_type = other DNA
tactttacggggacgcacact

SEQ ID NO: 29941 - DNA, 21 bp, synthetic construct
  source 1..21: mol_type = other DNA
tcagctcaaacctgcaagccc

SEQ ID NO: 29942 - DNA, 21 bp, synthetic construct
  source 1..21: mol_type = other DNA
cgggacggttcgtctacttgg

SEQ ID NO: 29943 - DNA, 21 bp, synthetic construct
  source 1..21: mol_type = other DNA
tattgggcaggtataaccgaa

SEQ ID NO: 29944 - DNA, 21 bp, synthetic construct
  source 1..21: mol_type = other DNA
tacagcagactaaatcaaaat

SEQ ID NO: 29945 - DNA, 21 bp, synthetic construct
  source 1..21: mol_type = other DNA
tgtaaggaggaaaagaaggag

SEQ ID NO: 29946 - DNA, 21 bp, synthetic construct
  source 1..21: mol_type = other DNA
tactactcgggagtcatggct

SEQ ID NO: 29947 - DNA, 21 bp, synthetic construct
  source 1..21: mol_type = other DNA
atcccgtgtaagccatgtggt

SEQ ID NO: 29948 - DNA, 21 bp, synthetic construct
  source 1..21: mol_type = other DNA
actcaaattgctccagactgt

SEQ ID NO: 29949 - DNA, 21 bp, synthetic construct
  source 1..21: mol_type = other DNA
gtcctctcaagcaatatttgg

SEQ ID NO: 29950 - DNA, 21 bp, synthetic construct
  source 1..21: mol_type = other DNA
tacattaagtcggattatcag

SEQ ID NO: 29951 - DNA, 21 bp, synthetic construct
  source 1..21: mol_type = other DNA
tacttcactggcgtaacacat

SEQ ID NO: 29952 - DNA, 21 bp, synthetic construct
  source 1..21: mol_type = other DNA
aaatacgcgtttagtagcgag

SEQ ID NO: 29953 - DNA, 21 bp, synthetic construct
  source 1..21: mol_type = other DNA
attatgggcgacagaaagtgg

SEQ ID NO: 29954 - DNA, 21 bp, synthetic construct
  source 1..21: mol_type = other DNA
tactggtccgggacgatggct

SEQ ID NO: 29955 - DNA, 21 bp, synthetic construct
  source 1..21: mol_type = other DNA
gcatgtaagccgcagatggga

SEQ ID NO: 29956 - DNA, 21 bp, synthetic construct
  source 1..21: mol_type = other DNA
tacgcaagagatgggcctaat

SEQ ID NO: 29957 - DNA, 21 bp, synthetic construct
  source 1..21: mol_type = other DNA
tatagccgtataggaatgaac

SEQ ID NO: 29958 - DNA, 21 bp, synthetic construct
  source 1..21: mol_type = other DNA
tggtggcacggcataccggaa

SEQ ID NO: 29959 - DNA, 21 bp, synthetic construct
  source 1..21: mol_type = other DNA
cgaggacatgagggctacttc

SEQ ID NO: 29960 - DNA, 21 bp, synthetic construct
  source 1..21: mol_type = other DNA
cgcgacaacactgtttacccg

SEQ ID NO: 29961 - DNA, 21 bp, synthetic construct
  source 1..21: mol_type = other DNA
tactacagcggtgtcaaattg

SEQ ID NO: 29962 - DNA, 21 bp, synthetic construct
  source 1..21: mol_type = other DNA
tcggatgagtacagtacgtat

SEQ ID NO: 29963 - DNA, 21 bp, synthetic construct
  source 1..21: mol_type = other DNA
taccacaaaggcgggtgcgaa

SEQ ID NO: 29964 - DNA, 21 bp, synthetic construct
  source 1..21: mol_type = other DNA
ggtatggcggatagagcgtgg

SEQ ID NO: 29965 - DNA, 21 bp, synthetic construct
  source 1..21: mol_type = other DNA
cgggatagtacacatggcatt

SEQ ID NO: 29966 - DNA, 21 bp, synthetic construct
  source 1..21: mol_type = other DNA
tcactggaatcacgcgactgg

SEQ ID NO: 29967 - DNA, 21 bp, synthetic construct
  source 1..21: mol_type = other DNA
ggtggttctaccagtacatgg

SEQ ID NO: 29968 - DNA, 21 bp, synthetic construct
  source 1..21: mol_type = other DNA
tgcggcggggggaagcccccc

SEQ ID NO: 29969 - DNA, 21 bp, synthetic construct
  source 1..21: mol_type = other DNA
tatgttaagagtcaaccgcaa

SEQ ID NO: 29970 - DNA, 21 bp, synthetic construct
  source 1..21: mol_type = other DNA
tacagtcgtacaggtttaaat

SEQ ID NO: 29971 - DNA, 21 bp, synthetic construct
  source 1..21: mol_type = other DNA
cagtcaccgggctgtaaggac

SEQ ID NO: 29972 - DNA, 21 bp, synthetic construct
  source 1..21: mol_type = other DNA
ttcttttccggcgtaagggat

SEQ ID NO: 29973 - DNA, 21 bp, synthetic construct
  source 1..21: mol_type = other DNA
tatagcaaaaacggtaataac

SEQ ID NO: 29974 - DNA, 21 bp, synthetic construct
  source 1..21: mol_type = other DNA
agtgaatcgacaaatggcatc

SEQ ID NO: 29975 - DNA, 21 bp, synthetic construct
  source 1..21: mol_type = other DNA
tatttcagtggtcgtcaagac

SEQ ID NO: 29976 - DNA, 21 bp, synthetic construct
  source 1..21: mol_type = other DNA
tgtatgaagacccctgaacgt

SEQ ID NO: 29977 - DNA, 21 bp, synthetic construct
  source 1..21: mol_type = other DNA
tattcgcgcattggacagaat

SEQ ID NO: 29978 - DNA, 21 bp, synthetic construct
  source 1..21: mol_type = other DNA
tttgattcgacgaatggacgc

SEQ ID NO: 29979 - DNA, 21 bp, synthetic construct
  source 1..21: mol_type = other DNA
ggcggcgccgggtctcattgg

SEQ ID NO: 29980 - DNA, 21 bp, synthetic construct
  source 1..21: mol_type = other DNA
tacagccgcatcggtaccaac

SEQ ID NO: 29981 - DNA, 21 bp, synthetic construct
  source 1..21: mol_type = other DNA
tattcaagactgcaagagaat

SEQ ID NO: 29982 - DNA, 21 bp, synthetic construct
  source 1..21: mol_type = other DNA
tgcggaaaattaaagccggag

SEQ ID NO: 29983 - DNA, 21 bp, synthetic construct
  source 1..21: mol_type = other DNA
tattacactgggcgcctagat

SEQ ID NO: 29984 - DNA, 21 bp, synthetic construct
  source 1..21: mol_type = other DNA
tgtaagcccgtccggggcgac

SEQ ID NO: 29985 - DNA, 21 bp, synthetic construct
  source 1..21: mol_type = other DNA
aacatgagctctcgaggctgg

SEQ ID NO: 29986 - DNA, 21 bp, synthetic construct
  source 1..21: mol_type = other DNA
tactcgagagctgggaataat

SEQ ID NO: 29987 - DNA, 21 bp, synthetic construct
  source 1..21: mol_type = other DNA
cacagccgtatgaacgagaat

SEQ ID NO: 29988 - DNA, 21 bp, synthetic construct
  source 1..21: mol_type = other DNA
tatgcgaggtctggccacaac

SEQ ID NO: 29989 - DNA, 21 bp, synthetic construct
  source 1..21: mol_type = other DNA
tggacccaagcatgccccaag

SEQ ID NO: 29990 - DNA, 21 bp, synthetic construct
  source 1..21: mol_type = other DNA
tgcaagccccagactccacag

SEQ ID NO: 29991 - DNA, 21 bp, synthetic construct
  source 1..21: mol_type = other DNA
tatagtaggctccatcaactg

SEQ ID NO: 29992 - DNA, 21 bp, synthetic construct
  source 1..21: mol_type = other DNA
tatgcgagagttggccataac

SEQ ID NO: 29993 - DNA, 21 bp, synthetic construct
  source 1..21: mol_type = other DNA
tgcacgaggatggactacggt

SEQ ID NO: 29994 - DNA, 21 bp, synthetic construct
  source 1..21: mol_type = other DNA
tacgctagacttggaatcaat

SEQ ID NO: 29995 - DNA, 21 bp, synthetic construct
  source 1..21: mol_type = other DNA
tatgccagaaatggggcgaat

SEQ ID NO: 29996 - DNA, 21 bp, synthetic construct
  source 1..21: mol_type = other DNA
tactccaggttgaacattaat

SEQ ID NO: 29997 - DNA, 21 bp, synthetic construct
  source 1..21: mol_type = other DNA
tggtggagcggcgttcaactt

SEQ ID NO: 29998 - DNA, 21 bp, synthetic construct
  source 1..21: mol_type = other DNA
tattcacgccttcagagcacg

SEQ ID NO: 29999 - DNA, 21 bp, synthetic construct
  source 1..21: mol_type = other DNA
tactggagcggaacgagagag

SEQ ID NO: 30000 - DNA, 21 bp, synthetic construct
  source 1..21: mol_type = other DNA
cgtacgtatgatacattccct

SEQ ID NO: 30001 - DNA, 21 bp, synthetic construct
  source 1..21: mol_type = other DNA
gatatggctacttcaacatgg

SEQ ID NO: 30002 - DNA, 21 bp, synthetic construct
  source 1..21: mol_type = other DNA
tactcgcggctcgggcacaac

SEQ ID NO: 30003 - DNA, 21 bp, synthetic construct
  source 1..21: mol_type = other DNA
tatcacaagttaaacctagtt

SEQ ID NO: 30004 - DNA, 21 bp, synthetic construct
  source 1..21: mol_type = other DNA
tactccaggaccggcctgaac

SEQ ID NO: 30005 - DNA, 21 bp, synthetic construct
  source 1..21: mol_type = other DNA
ggtggtggcgttgtcaggtgg

SEQ ID NO: 30006 - DNA, 21 bp, synthetic construct
  source 1..21: mol_type = other DNA
tattattcaggcatcgtcagc

SEQ ID NO: 30007 - DNA, 21 bp, synthetic construct
  source 1..21: mol_type = other DNA
tatcatgcgaaaagcccttgt

SEQ ID NO: 30008 - DNA, 21 bp, synthetic construct
  source 1..21: mol_type = other DNA
tactctcgcgccaactttaac

SEQ ID NO: 30009 - DNA, 21 bp, synthetic construct
  source 1..21: mol_type = other DNA
ttcagccgtcttaatccaaat

SEQ ID NO: 30010 - DNA, 21 bp, synthetic construct
  source 1..21: mol_type = other DNA
tggtggtctggagtacagttg

SEQ ID NO: 30011 - DNA, 21 bp, synthetic construct
  source 1..21: mol_type = other DNA
tgcaagtccgatcataagccg

SEQ ID NO: 30012 - DNA, 21 bp, synthetic construct
  source 1..21: mol_type = other DNA
tacagccgagctaatatcaac

SEQ ID NO: 30013 - DNA, 21 bp, synthetic construct
  source 1..21: mol_type = other DNA
ggtaacggcacaaagtgtggg

SEQ ID NO: 30014 - DNA, 21 bp, synthetic construct
  source 1..21: mol_type = other DNA
tatttcactggaacccataca

SEQ ID NO: 30015 - DNA, 21 bp, synthetic construct
  source 1..21: mol_type = other DNA
ttatgggatgggacaatgagc

SEQ ID NO: 30016 - DNA, 21 bp, synthetic construct
  source 1..21: mol_type = other DNA
tatagtagagtaaatgctaac

SEQ ID NO: 30017 - DNA, 21 bp, synthetic construct
  source 1..21: mol_type = other DNA
ggcgacgagtgggaaacctat

SEQ ID NO: 30018 - DNA, 21 bp, synthetic construct
  source 1..21: mol_type = other DNA
tacgcacgcacgaatcctaac

SEQ ID NO: 30019 - DNA, 21 bp, synthetic construct
  source 1..21: mol_type = other DNA
tatttcgccggtgttaaagac

SEQ ID NO: 30020 - DNA, 21 bp, synthetic construct
  source 1..21: mol_type = other DNA
tatttcagtggtactagggct

SEQ ID NO: 30021 - DNA, 21 bp, synthetic construct
  source 1..21: mol_type = other DNA
tacagtcgcatcggcggaaac

SEQ ID NO: 30022 - DNA, 21 bp, synthetic construct
  source 1..21: mol_type = other DNA
cgggaccagtttactagttac

SEQ ID NO: 30023 - DNA, 21 bp, synthetic construct
  source 1..21: mol_type = other DNA
tgtgttaagcccatgactgct

SEQ ID NO: 30024 - DNA, 21 bp, synthetic construct
  source 1..21: mol_type = other DNA
tattcaaaaatgggtacaaat

SEQ ID NO: 30025 - DNA, 21 bp, synthetic construct
  source 1..21: mol_type = other DNA
tgcaaacccgacgagtttggg

SEQ ID NO: 30026 - DNA, 21 bp, synthetic construct
  source 1..21: mol_type = other DNA
ggcagtcctggggcgcattgg

SEQ ID NO: 30027 - DNA, 21 bp, synthetic construct
  source 1..21: mol_type = other DNA
cggatgagtgcaagcaattgg

SEQ ID NO: 30028 - DNA, 21 bp, synthetic construct
  source 1..21: mol_type = other DNA
tgcagcccgtatctacatgag

SEQ ID NO: 30029 - DNA, 21 bp, synthetic construct
  source 1..21: mol_type = other DNA
tacagccgcattgggtacaat

SEQ ID NO: 30030 - DNA, 21 bp, synthetic construct
  source 1..21: mol_type = other DNA
tacagtcgactgggacctgtg

SEQ ID NO: 30031 - DNA, 21 bp, synthetic construct
  source 1..21: mol_type = other DNA
tatttcactggtacctggtca

SEQ ID NO: 30032 - DNA, 21 bp, synthetic construct
  source 1..21: mol_type = other DNA
tatcatcgcctgaacgattgg

SEQ ID NO: 30033 - DNA, 21 bp, synthetic construct
  source 1..21: mol_type = other DNA
tgcaaggagggaactcgcggt

SEQ ID NO: 30034 - DNA, 21 bp, synthetic construct
  source 1..21: mol_type = other DNA
tatgcccgttcaaacattaat

SEQ ID NO: 30035 - DNA, 21 bp, synthetic construct
  source 1..21: mol_type = other DNA
tacactcggctcagtatgaat

SEQ ID NO: 30036 - DNA, 21 bp, synthetic construct
  source 1..21: mol_type = other DNA
taccacgccaggcaagcaaat

SEQ ID NO: 30037 - DNA, 21 bp, synthetic construct
  source 1..21: mol_type = other DNA
gttgacgggtcgtgtaaagcc

SEQ ID NO: 30038 - DNA, 21 bp, synthetic construct
  source 1..21: mol_type = other DNA
agcggaagtacaaatgggatc

SEQ ID NO: 30039 - DNA, 21 bp, synthetic construct
  source 1..21: mol_type = other DNA
agagacgaattcaaagtatgg

SEQ ID NO: 30040 - DNA, 21 bp, synthetic construct
  source 1..21: mol_type = other DNA
tgcaaaaagtacggaggcgat

SEQ ID NO: 30041 - DNA, 21 bp, synthetic construct
  source 1..21: mol_type = other DNA
ggtggccccggggttcggtgg

SEQ ID NO: 30042 - DNA, 21 bp, synthetic construct
  source 1..21: mol_type = other DNA
attatgcttgatcgtggttgg

SEQ ID NO: 30043 - DNA, 21 bp, synthetic construct
  source 1..21: mol_type = other DNA
tattttactggccgatttgac

SEQ ID NO: 30044 - DNA, 21 bp, synthetic construct
  source 1..21: mol_type = other DNA
tacgtccgaagtggccctgat

SEQ ID NO: 30045 - DNA, 21 bp, synthetic construct
  source 1..21: mol_type = other DNA
gaccttgatagctataagtgg

SEQ ID NO: 30046 - DNA, 21 bp, synthetic construct
  source 1..21: mol_type = other DNA
tattcgcgtttgagtgacaat

SEQ ID NO: 30047 - DNA, 21 bp, synthetic construct
  source 1..21: mol_type = other DNA
tatcataggttgcaaagcaca

SEQ ID NO: 30048 - DNA, 21 bp, synthetic construct
  source 1..21: mol_type = other DNA
tatttcacgggctcagtcgac

SEQ ID NO: 30049 - DNA, 21 bp, synthetic construct
  source 1..21: mol_type = other DNA
cgcaatggtacgtccgcatgg

SEQ ID NO: 30050 - DNA, 21 bp, synthetic construct
  source 1..21: mol_type = other DNA
cgcgacggcaacagccgctgg

SEQ ID NO: 30051 - DNA, 21 bp, synthetic construct
  source 1..21: mol_type = other DNA
tggttctctggtaaagtggag

SEQ ID NO: 30052 - DNA, 21 bp, synthetic construct
  source 1..21: mol_type = other DNA
tactggacgggtaccatggaa

SEQ ID NO: 30053 - DNA, 21 bp, synthetic construct
  source 1..21: mol_type = other DNA
cattcgtccagtaacggtgtt

SEQ ID NO: 30054 - DNA, 21 bp, synthetic construct
  source 1..21: mol_type = other DNA
ggagggtcgggttcaacttgg

SEQ ID NO: 30055 - DNA, 21 bp, synthetic construct
  source 1..21: mol_type = other DNA
tggtgggggggagttaaggag

SEQ ID NO: 30056 - DNA, 21 bp, synthetic construct
  source 1..21: mol_type = other DNA
tatttctccggggtctcaatg

SEQ ID NO: 30057 - DNA, 21 bp, synthetic construct
  source 1..21: mol_type = other DNA
tactggcacggtatacctgag

SEQ ID NO: 30058 - DNA, 21 bp, synthetic construct
  source 1..21: mol_type = other DNA
tgtaaagacagcgcgaggcta

SEQ ID NO: 30059 - DNA, 21 bp, synthetic construct
  source 1..21: mol_type = other DNA
tactataccggccggttggac

SEQ ID NO: 30060 - DNA, 21 bp, synthetic construct
  source 1..21: mol_type = other DNA
cgtggcgatggtcattacaat

SEQ ID NO: 30061 - DNA, 21 bp, synthetic construct
  source 1..21: mol_type = other DNA
atcatcagcacaaacggaaga

SEQ ID NO: 30062 - DNA, 21 bp, synthetic construct
  source 1..21: mol_type = other DNA
tgtacatctaaactcggacat

SEQ ID NO: 30063 - DNA, 21 bp, synthetic construct
  source 1..21: mol_type = other DNA
gctatgccggacagaggttgg

SEQ ID NO: 30064 - DNA, 21 bp, synthetic construct
  source 1..21: mol_type = other DNA
tgggtgcgcagtgatgtcaaa

SEQ ID NO: 30065 - DNA, 21 bp, synthetic construct
  source 1..21: mol_type = other DNA
ttttcaaggctcagtccagtg

SEQ ID NO: 30066 - DNA, 21 bp, synthetic construct
  source 1..21: mol_type = other DNA
tgcaaacctttgatgtcgcca

SEQ ID NO: 30067 - DNA, 21 bp, synthetic construct
  source 1..21: mol_type = other DNA
tttagccgcacggggcataat

SEQ ID NO: 30068 - DNA, 21 bp, synthetic construct
  source 1..21: mol_type = other DNA
tacgtgagaagtcaacctctg

SEQ ID NO: 30069 - DNA, 21 bp, synthetic construct
  source 1..21: mol_type = other DNA
tacgctcgcctcggctataac

SEQ ID NO: 30070 - DNA, 21 bp, synthetic construct
  source 1..21: mol_type = other DNA
ggcgccgggaccagccgttgg

SEQ ID NO: 30071 - DNA, 21 bp, synthetic construct
  source 1..21: mol_type = other DNA
tattggaccgggatgacagaa

SEQ ID NO: 30072 - DNA, 21 bp, synthetic construct
  source 1..21: mol_type = other DNA
tatttctcgggtatgcatagt

SEQ ID NO: 30073 - DNA, 21 bp, synthetic construct
  source 1..21: mol_type = other DNA
ctacacaggaacacacaaaat

SEQ ID NO: 30074 - DNA, 21 bp, synthetic construct
  source 1..21: mol_type = other DNA
tactttcatgggaccgtcgat

SEQ ID NO: 30075 - DNA, 21 bp, synthetic construct
  source 1..21: mol_type = other DNA
atgtgggatggtacgatggcg

SEQ ID NO: 30076 - DNA, 21 bp, synthetic construct
  source 1..21: mol_type = other DNA
tattttcagggagtgcgcgaa

SEQ ID NO: 30077 - DNA, 21 bp, synthetic construct
  source 1..21: mol_type = other DNA
agatcaggtccatgccccttc

SEQ ID NO: 30078 - DNA, 21 bp, synthetic construct
  source 1..21: mol_type = other DNA
tggcatcctatgtgcaaagcc

SEQ ID NO: 30079 - DNA, 21 bp, synthetic construct
  source 1..21: mol_type = other DNA
tattacaccgggaaacaggat

SEQ ID NO: 30080 - DNA, 21 bp, synthetic construct
  source 1..21: mol_type = other DNA
cgcccagagacatgctcgccg

SEQ ID NO: 30081 - DNA, 21 bp, synthetic construct
  source 1..21: mol_type = other DNA
ggcgacgagtggcaaccttat

SEQ ID NO: 30082 - DNA, 21 bp, synthetic construct
  source 1..21: mol_type = other DNA
tggtggtcgggggttcaagaa

SEQ ID NO: 30083 - DNA, 21 bp, synthetic construct
  source 1..21: mol_type = other DNA
gttatgtacgatagttatccc

SEQ ID NO: 30084 - DNA, 21 bp, synthetic construct
  source 1..21: mol_type = other DNA
ctgcaccgtgcgacgtacgac

SEQ ID NO: 30085 - DNA, 21 bp, synthetic construct
  source 1..21: mol_type = other DNA
tatagcagactaaacctcaac

SEQ ID NO: 30086 - DNA, 21 bp, synthetic construct
  source 1..21: mol_type = other DNA
tactcacgcatggggcctaac

SEQ ID NO: 30087 - DNA, 21 bp, synthetic construct
  source 1..21: mol_type = other DNA
ttttcccggttaaactcaaat

SEQ ID NO: 30088 - DNA, 21 bp, synthetic construct
  source 1..21: mol_type = other DNA
tattcgaaatggaatcccaat

SEQ ID NO: 30089 - DNA, 21 bp, synthetic construct
  source 1..21: mol_type = other DNA
ttttttacaggcacttatgat

SEQ ID NO: 30090 - DNA, 21 bp, synthetic construct
  source 1..21: mol_type = other DNA
tactggactggcatgactgag

SEQ ID NO: 30091 - DNA, 21 bp, synthetic construct
  source 1..21: mol_type = other DNA
ggttgcaaaccatgcccaagc

SEQ ID NO: 30092 - DNA, 21 bp, synthetic construct
  source 1..21: mol_type = other DNA
tgtaagccagggatgggcgag

SEQ ID NO: 30093 - DNA, 21 bp, synthetic construct
  source 1..21: mol_type = other DNA
tacgccagaacgaatacgaat

SEQ ID NO: 30094 - DNA, 21 bp, synthetic construct
  source 1..21: mol_type = other DNA
tgcacaagtaagactgaccat

SEQ ID NO: 30095 - DNA, 21 bp, synthetic construct
  source 1..21: mol_type = other DNA
ggctgccggcatggtgactgc

SEQ ID NO: 30096 - DNA, 21 bp, synthetic construct
  source 1..21: mol_type = other DNA
tattgggcaggagtctcggcg

SEQ ID NO: 30097 - DNA, 21 bp, synthetic construct
  source 1..21: mol_type = other DNA
tatgacagcaccaatggccgt

SEQ ID NO: 30098 - DNA, 21 bp, synthetic construct
  source 1..21: mol_type = other DNA
tattggtccggcaagatcgac

SEQ ID NO: 30099 - DNA, 21 bp, synthetic construct
  source 1..21: mol_type = other DNA
tatagtcggttacaccaacta

SEQ ID NO: 30100 - DNA, 21 bp, synthetic construct
  source 1..21: mol_type = other DNA
tattttcagggaaagagagat

SEQ ID NO: 30101 - DNA, 21 bp, synthetic construct
  source 1..21: mol_type = other DNA
cggggccccgatacgtttccc

SEQ ID NO: 30102 - DNA, 21 bp, synthetic construct
  source 1..21: mol_type = other DNA
tcgagcatggtctcgtgtgcg

SEQ ID NO: 30103 - DNA, 21 bp, synthetic construct
  source 1..21: mol_type = other DNA
gacctccgagatgtgaagtgg

SEQ ID NO: 30104 - DNA, 21 bp, synthetic construct
  source 1..21: mol_type = other DNA
agagatggaaccagtcaatgg

SEQ ID NO: 30105 - DNA, 21 bp, synthetic construct
  source 1..21: mol_type = other DNA
tacttccatggacaacttgac

SEQ ID NO: 30106 - DNA, 21 bp, synthetic construct
  source 1..21: mol_type = other DNA
tacagcaggctaaacgaaaac

SEQ ID NO: 30107 - DNA, 21 bp, synthetic construct
  source 1..21: mol_type = other DNA
tatgctcgcaatgggaccaac

SEQ ID NO: 30108 - DNA, 21 bp, synthetic construct
  source 1..21: mol_type = other DNA
tatgcaaggatcggaataaac

SEQ ID NO: 30109 - DNA, 21 bp, synthetic construct
  source 1..21: mol_type = other DNA
tttagtagagccggaataaat

SEQ ID NO: 30110 - DNA, 21 bp, synthetic construct
  source 1..21: mol_type = other DNA
tacagtaggacgggacacaat

SEQ ID NO: 30111 - DNA, 21 bp, synthetic construct
  source 1..21: mol_type = other DNA
gacgcttttagaggtttcgac

SEQ ID NO: 30112 - DNA, 21 bp, synthetic construct
  source 1..21: mol_type = other DNA
tgcaaagacggaaccacgagt

SEQ ID NO: 30113 - DNA, 21 bp, synthetic construct
  source 1..21: mol_type = other DNA
aaggacggatattctatgtac

SEQ ID NO: 30114 - DNA, 21 bp, synthetic construct
  source 1..21: mol_type = other DNA
aaagatgaatataaatactat

SEQ ID NO: 30115 - DNA, 21 bp, synthetic construct
  source 1..21: mol_type = other DNA
tatgctaagcatggatataat

SEQ ID NO: 30116 - DNA, 21 bp, synthetic construct
  source 1..21: mol_type = other DNA
acgtgggacggtatgatagca

SEQ ID NO: 30117 - DNA, 21 bp, synthetic construct
  source 1..21: mol_type = other DNA
agaggaggtgggttgtacgtc

SEQ ID NO: 30118 - DNA, 21 bp, synthetic construct
  source 1..21: mol_type = other DNA
tacagccgaaagaatgaaaac

SEQ ID NO: 30119 - DNA, 21 bp, synthetic construct
  source 1..21: mol_type = other DNA
ctctccaaggtaggcccagac

SEQ ID NO: 30120 - DNA, 21 bp, synthetic construct
  source 1..21: mol_type = other DNA
tatgcaaaaggaaacacgaat

SEQ ID NO: 30121 - DNA, 21 bp, synthetic construct
  source 1..21: mol_type = other DNA
ggcggcgaattcagtaggtgg

SEQ ID NO: 30122 - DNA, 21 bp, synthetic construct
  source 1..21: mol_type = other DNA
ttttggtcgggggtcagggag

SEQ ID NO: 30123 - DNA, 21 bp, synthetic construct
  source 1..21: mol_type = other DNA
ttagcgaaggccggttacaat

SEQ ID NO: 30124 - DNA, 21 bp, synthetic construct
  source 1..21: mol_type = other DNA
aaacacgactttactggttgc

SEQ ID NO: 30125 - DNA, 21 bp, synthetic construct
  source 1..21: mol_type = other DNA
atcgggagaaccggttgggat

SEQ ID NO: 30126 - DNA, 21 bp, synthetic construct
  source 1..21: mol_type = other DNA
tacttccaaggtaaacgtgac

SEQ ID NO: 30127 - DNA, 21 bp, synthetic construct
  source 1..21: mol_type = other DNA
tactgggccggaaaaatcgag

SEQ ID NO: 30128 - DNA, 21 bp, synthetic construct
  source 1..21: mol_type = other DNA
tatacacgactatcgatgaac

SEQ ID NO: 30129 - DNA, 21 bp, synthetic construct
  source 1..21: mol_type = other DNA
tacttcacgggacgcaatgac

SEQ ID NO: 30130 - DNA, 21 bp, synthetic construct
  source 1..21: mol_type = other DNA
tacacacactcaaacaaattt

SEQ ID NO: 30131 - DNA, 21 bp, synthetic construct
  source 1..21: mol_type = other DNA
acttggtctgataatggggta

SEQ ID NO: 30132 - DNA, 21 bp, synthetic construct
  source 1..21: mol_type = other DNA
tactctcgagctggcacgaac

SEQ ID NO: 30133 - DNA, 21 bp, synthetic construct
  source 1..21: mol_type = other DNA
cgtgctgaagactacttcccc

SEQ ID NO: 30134 - DNA, 21 bp, synthetic construct
  source 1..21: mol_type = other DNA
tacagtaggactggaactaat

SEQ ID NO: 30135 - DNA, 21 bp, synthetic construct
  source 1..21: mol_type = other DNA
acgttgagcagtcgtgattgg

SEQ ID NO: 30136 - DNA, 21 bp, synthetic construct
  source 1..21: mol_type = other DNA
tgtaaggataatagggcgcta

SEQ ID NO: 30137 - DNA, 21 bp, synthetic construct
  source 1..21: mol_type = other DNA
tactggtccggacagaaggat

SEQ ID NO: 30138 - DNA, 21 bp, synthetic construct
  source 1..21: mol_type = other DNA
tttgagtcaactaatggaata

SEQ ID NO: 30139 - DNA, 21 bp, synthetic construct
  source 1..21: mol_type = other DNA
ttggctaaaactgcctgtaac

SEQ ID NO: 30140 - DNA, 21 bp, synthetic construct
  source 1..21: mol_type = other DNA
tattggtccaaagtacaggct

SEQ ID NO: 30141 - DNA, 21 bp, synthetic construct
  source 1..21: mol_type = other DNA
ttctcaagacagggtccgaac

SEQ ID NO: 30142 - DNA, 21 bp, synthetic construct
  source 1..21: mol_type = other DNA
tacttctccggtacacacaac

SEQ ID NO: 30143 - DNA, 21 bp, synthetic construct
  source 1..21: mol_type = other DNA
agggatgagtttgtcaagtgg

SEQ ID NO: 30144 - DNA, 21 bp, synthetic construct
  source 1..21: mol_type = other DNA
agcagtggaacgagtcgttgg

SEQ ID NO: 30145 - DNA, 21 bp, synthetic construct
  source 1..21: mol_type = other DNA
atattgagcgataggatgtgg

SEQ ID NO: 30146 - DNA, 21 bp, synthetic construct
  source 1..21: mol_type = other DNA
tatttctcgggtattcccgtt

SEQ ID NO: 30147 - DNA, 21 bp, synthetic construct
  source 1..21: mol_type = other DNA
cgcacttacgactcgattgcc

SEQ ID NO: 30148 - DNA, 21 bp, synthetic construct
  source 1..21: mol_type = other DNA
aaagacgattggactccttac

SEQ ID NO: 30149 - DNA, 21 bp, synthetic construct
  source 1..21: mol_type = other DNA
gtgagcacacactcttgcgcc

SEQ ID NO: 30150 - DNA, 21 bp, synthetic construct
  source 1..21: mol_type = other DNA
tactacagcggccagaaggaa

SEQ ID NO: 30151 - DNA, 21 bp, synthetic construct
  source 1..21: mol_type = other DNA
tacgcccgactaggcacaaat

SEQ ID NO: 30152 - DNA, 21 bp, synthetic construct
  source 1..21: mol_type = other DNA
tgcaagaagccgtctcctgag

SEQ ID NO: 30153 - DNA, 21 bp, synthetic construct
  source 1..21: mol_type = other DNA
tactttaccagggtaatggag

SEQ ID NO: 30154 - DNA, 21 bp, synthetic construct
  source 1..21: mol_type = other DNA
tactacaccggtgtatcattg

SEQ ID NO: 30155 - DNA, 21 bp, synthetic construct
  source 1..21: mol_type = other DNA
tatttttctggactaagggag

SEQ ID NO: 30156 - DNA, 21 bp, synthetic construct
  source 1..21: mol_type = other DNA
tatgcacgcggttcaccgaat

SEQ ID NO: 30157 - DNA, 21 bp, synthetic construct
  source 1..21: mol_type = other DNA
tacttcagcggagtgcacaaa

SEQ ID NO: 30158 - DNA, 21 bp, synthetic construct
  source 1..21: mol_type = other DNA
tgtgccccgtatttaccagag

SEQ ID NO: 30159 - DNA, 21 bp, synthetic construct
  source 1..21: mol_type = other DNA
tgcggccctagaaacccggaa

SEQ ID NO: 30160 - DNA, 21 bp, synthetic construct
  source 1..21: mol_type = other DNA
ggtgatggtagctgcaaagca

SEQ ID NO: 30161 - DNA, 21 bp, synthetic construct
  source 1..21: mol_type = other DNA
tatttccacggaattcctgat

SEQ ID NO: 30162 - DNA, 21 bp, synthetic construct
  source 1..21: mol_type = other DNA
atccagttagattgtaagggt

SEQ ID NO: 30163 - DNA, 21 bp, synthetic construct
  source 1..21: mol_type = other DNA
cttagcaaggcagggaataat

SEQ ID NO: 30164 - DNA, 21 bp, synthetic construct
  source 1..21: mol_type = other DNA
aacatgacatctcactcctgg

SEQ ID NO: 30165 - DNA, 21 bp, synthetic construct
  source 1..21: mol_type = other DNA
tatagtaggtcaaacataaac

SEQ ID NO: 30166 - DNA, 21 bp, synthetic construct
  source 1..21: mol_type = other DNA
tacgcacgtaatggtgataac

SEQ ID NO: 30167 - DNA, 21 bp, synthetic construct
  source 1..21: mol_type = other DNA
tattggacggggatgcatgag

SEQ ID NO: 30168 - DNA, 21 bp, synthetic construct
  source 1..21: mol_type = other DNA
aggttagaatcgatatcgtgg

SEQ ID NO: 30169 - DNA, 21 bp, synthetic construct
  source 1..21: mol_type = other DNA
tactttaccgggatgcaagag

SEQ ID NO: 30170 - DNA, 21 bp, synthetic construct
  source 1..21: mol_type = other DNA
tactggcagggtgttagggaa

SEQ ID NO: 30171 - DNA, 21 bp, synthetic construct
  source 1..21: mol_type = other DNA
cgtgcctttgacgcatatgag

SEQ ID NO: 30172 - DNA, 21 bp, synthetic construct
  source 1..21: mol_type = other DNA
cttagcaaagctggccataac

SEQ ID NO: 30173 - DNA, 21 bp, synthetic construct
  source 1..21: mol_type = other DNA
tatgctagggtgggtttaaat

SEQ ID NO: 30174 - DNA, 21 bp, synthetic construct
  source 1..21: mol_type = other DNA
tactttacggcggttaaggaa

SEQ ID NO: 30175 - DNA, 21 bp, synthetic construct
  source 1..21: mol_type = other DNA
agagatggcaactccatgtgg

SEQ ID NO: 30176 - DNA, 21 bp, synthetic construct
  source 1..21: mol_type = other DNA
tgtaaaactaagtcgaccgaa

SEQ ID NO: 30177 - DNA, 21 bp, synthetic construct
  source 1..21: mol_type = other DNA
ttctcacgtgttcaaccaaat

SEQ ID NO: 30178 - DNA, 21 bp, synthetic construct
  source 1..21: mol_type = other DNA
aggaacgatttttcaacatac

SEQ ID NO: 30179 - DNA, 21 bp, synthetic construct
  source 1..21: mol_type = other DNA
tgcaagcgagatgccgaaagc

SEQ ID NO: 30180 - DNA, 21 bp, synthetic construct
  source 1..21: mol_type = other DNA
tgcacttctaaaacgacacat

SEQ ID NO: 30181 - DNA, 21 bp, synthetic construct
  source 1..21: mol_type = other DNA
ttcagtcgggtcggagacaat

SEQ ID NO: 30182 - DNA, 21 bp, synthetic construct
  source 1..21: mol_type = other DNA
tatgtcaagtcggatggttca

SEQ ID NO: 30183 - DNA, 21 bp, synthetic construct
  source 1..21: mol_type = other DNA
catacaagttctaacggcgta

SEQ ID NO: 30184 - DNA, 21 bp, synthetic construct
  source 1..21: mol_type = other DNA
ttaaggtctgggtgtggacca

SEQ ID NO: 30185 - DNA, 21 bp, synthetic construct
  source 1..21: mol_type = other DNA
gtcccgtcctctgccatttgg

SEQ ID NO: 30186 - DNA, 21 bp, synthetic construct
  source 1..21: mol_type = other DNA
tactccaggagcggcttaaac

SEQ ID NO: 30187 - DNA, 21 bp, synthetic construct
  source 1..21: mol_type = other DNA
tctttggcggatcgtaagtgg

SEQ ID NO: 30188 - DNA, 21 bp, synthetic construct
  source 1..21: mol_type = other DNA
gctccaggcaatatcagctgg

SEQ ID NO: 30189 - DNA, 21 bp, synthetic construct
  source 1..21: mol_type = other DNA
tttcatcgattgtcaactaac

SEQ ID NO: 30190 - DNA, 21 bp, synthetic construct
  source 1..21: mol_type = other DNA
ttcagtcgggccggcaataac

SEQ ID NO: 30191 - DNA, 21 bp, synthetic construct
  source 1..21: mol_type = other DNA
tcaatgtccgatcggagttgg

SEQ ID NO: 30192 - DNA, 21 bp, synthetic construct
  source 1..21: mol_type = other DNA
ttttggacaggaaaaatagaa

SEQ ID NO: 30193 - DNA, 21 bp, synthetic construct
  source 1..21: mol_type = other DNA
tatttccatggtaagcacgat

SEQ ID NO: 30194 - DNA, 21 bp, synthetic construct
  source 1..21: mol_type = other DNA
tatttccatgggcaactggag

SEQ ID NO: 30195 - DNA, 21 bp, synthetic construct
  source 1..21: mol_type = other DNA
tacagtaagaccggcgacaac

SEQ ID NO: 30196 - DNA, 21 bp, synthetic construct
  source 1..21: mol_type = other DNA
ggtgctccggcctgcaaagaa

SEQ ID NO: 30197 - DNA, 21 bp, synthetic construct
  source 1..21: mol_type = other DNA
gtgatgggtgacagaaagtgg

SEQ ID NO: 30198 - DNA, 21 bp, synthetic construct
  source 1..21: mol_type = other DNA
agggataatacagtgtatccc

SEQ ID NO: 30199 - DNA, 21 bp, synthetic construct
  source 1..21: mol_type = other DNA
gggtccgaatttttaccgtgg

SEQ ID NO: 30200 - DNA, 21 bp, synthetic construct
  source 1..21: mol_type = other DNA
agagaagattacagtacgtat

SEQ ID NO: 30201 - DNA, 21 bp, synthetic construct
  source 1..21: mol_type = other DNA
agggagacatacgtctacccc

SEQ ID NO: 30202 - DNA, 21 bp, synthetic construct
  source 1..21: mol_type = other DNA
aggtcggactttaaaatcttc

SEQ ID NO: 30203 - DNA, 21 bp, synthetic construct
  source 1..21: mol_type = other DNA
tacgtccacagccagaattat

SEQ ID NO: 30204 - DNA, 21 bp, synthetic construct
  source 1..21: mol_type = other DNA
tgcacaaacaatggaaataga

SEQ ID NO: 30205 - DNA, 21 bp, synthetic construct
  source 1..21: mol_type = other DNA
aaggacgattggaatagctgg

SEQ ID NO: 30206 - DNA, 21 bp, synthetic construct
  source 1..21: mol_type = other DNA
gtgggcaatcgcggatgggat

SEQ ID NO: 30207 - DNA, 21 bp, synthetic construct
  source 1..21: mol_type = other DNA
catgaaacctgcgtcaggggc

SEQ ID NO: 30208 - DNA, 21 bp, synthetic construct
  source 1..21: mol_type = other DNA
tattctcgtgttgacgaccgc

SEQ ID NO: 30209 - DNA, 21 bp, synthetic construct
  source 1..21: mol_type = other DNA
agggaggaaatggtttcttgg

SEQ ID NO: 30210 - DNA, 21 bp, synthetic construct
  source 1..21: mol_type = other DNA
tgcaaaagtaaatgccttccc

SEQ ID NO: 30211 - DNA, 21 bp, synthetic construct
  source 1..21: mol_type = other DNA
tatatttcaaccaatggtgta

SEQ ID NO: 30212 - DNA, 21 bp, synthetic construct
  source 1..21: mol_type = other DNA
tatttccacggaaaatcggat

SEQ ID NO: 30213 - DNA, 21 bp, synthetic construct
  source 1..21: mol_type = other DNA
aggggtcacgaaggttatttt

SEQ ID NO: 30214 - DNA, 21 bp, synthetic construct
  source 1..21: mol_type = other DNA
tgtaagccagacgccattcgt

SEQ ID NO: 30215 - DNA, 21 bp, synthetic construct
  source 1..21: mol_type = other DNA
gggttagctgataggagctgg

SEQ ID NO: 30216 - DNA, 21 bp, synthetic construct
  source 1..21: mol_type = other DNA
aaggtatgttcggcaactgac

SEQ ID NO: 30217 - DNA, 21 bp, synthetic construct
  source 1..21: mol_type = other DNA
gattacgccagccgagattgg

SEQ ID NO: 30218 - DNA, 21 bp, synthetic construct
  source 1..21: mol_type = other DNA
tattttactggtgttaccgtt

SEQ ID NO: 30219 - DNA, 21 bp, synthetic construct
  source 1..21: mol_type = other DNA
tattcaaggacgggtttcaat

SEQ ID NO: 30220 - DNA, 21 bp, synthetic construct
  source 1..21: mol_type = other DNA
tactatagtggggtgaaacag

SEQ ID NO: 30221 - DNA, 21 bp, synthetic construct
  source 1..21: mol_type = other DNA
cgtgatgccactagcggttgg

SEQ ID NO: 30222 - DNA, 21 bp, synthetic construct
  source 1..21: mol_type = other DNA
tacttctctggtcaactagcc

SEQ ID NO: 30223 - DNA, 21 bp, synthetic construct
  source 1..21: mol_type = other DNA
tattggtcaggcacgcacgaa

SEQ ID NO: 30224 - DNA, 21 bp, synthetic construct
  source 1..21: mol_type = other DNA
tatagtagggcgaacttgaat

SEQ ID NO: 30225 - DNA, 21 bp, synthetic construct
  source 1..21: mol_type = other DNA
aaggatgattacaacgtatat

SEQ ID NO: 30226 - DNA, 21 bp, synthetic construct
  source 1..21: mol_type = other DNA
tacttcgcggggcggtatgac

SEQ ID NO: 30227 - DNA, 21 bp, synthetic construct
  source 1..21: mol_type = other DNA
agcttagaatcacgcgcgtgg

SEQ ID NO: 30228 - DNA, 21 bp, synthetic construct
  source 1..21: mol_type = other DNA
gggtgcggtggtggtggggga

SEQ ID NO: 30229 - DNA, 21 bp, synthetic construct
  source 1..21: mol_type = other DNA
ccagatagtaccaacggacgc

SEQ ID NO: 30230 - DNA, 21 bp, synthetic construct
  source 1..21: mol_type = other DNA
tatgtacgttcggacgactcg

SEQ ID NO: 30231 - DNA, 21 bp, synthetic construct
  source 1..21: mol_type = other DNA
tattttaccgggcgggaggat

SEQ ID NO: 30232 - DNA, 21 bp, synthetic construct
  source 1..21: mol_type = other DNA
tacgcacgcagtggcaataac

SEQ ID NO: 30233 - DNA, 21 bp, synthetic construct
  source 1..21: mol_type = other DNA
tatagcaagaatgggttaaat

SEQ ID NO: 30234 - DNA, 21 bp, synthetic construct
  source 1..21: mol_type = other DNA
tatagccgtatcggtgaaaat

SEQ ID NO: 30235 - DNA, 21 bp, synthetic construct
  source 1..21: mol_type = other DNA
ttctctaagcacaattacaac

SEQ ID NO: 30236 - DNA, 21 bp, synthetic construct
  source 1..21: mol_type = other DNA
gagagcagcagcaggacctgg

SEQ ID NO: 30237 - DNA, 21 bp, synthetic construct
  source 1..21: mol_type = other DNA
tatttcacgggcatgtacgat

SEQ ID NO: 30238 - DNA, 21 bp, synthetic construct
  source 1..21: mol_type = other DNA
tgtagcaagctcaagcctggg

SEQ ID NO: 30239 - DNA, 21 bp, synthetic construct
  source 1..21: mol_type = other DNA
gggaacggtacaagtaggtgg

SEQ ID NO: 30240 - DNA, 21 bp, synthetic construct
  source 1..21: mol_type = other DNA
attgacagcacaaacggggtc

SEQ ID NO: 30241 - DNA, 21 bp, synthetic construct
  source 1..21: mol_type = other DNA
tgtaaagctccagataaaggg

SEQ ID NO: 30242 - DNA, 21 bp, synthetic construct
  source 1..21: mol_type = other DNA
tacgctcgcaccgggtacaat

SEQ ID NO: 30243 - DNA, 21 bp, synthetic construct
  source 1..21: mol_type = other DNA
tatcaccggttgtcgagagac

SEQ ID NO: 30244 - DNA, 21 bp, synthetic construct
  source 1..21: mol_type = other DNA
tatttcagtgggatccactta

SEQ ID NO: 30245 - DNA, 21 bp, synthetic construct
  source 1..21: mol_type = other DNA
tactttagtggaatgatggaa

SEQ ID NO: 30246 - DNA, 21 bp, synthetic construct
  source 1..21: mol_type = other DNA
tactggacggggacatcggca

SEQ ID NO: 30247 - DNA, 21 bp, synthetic construct
  source 1..21: mol_type = other DNA
tatgcgcgcataggtattaat

SEQ ID NO: 30248 - DNA, 21 bp, synthetic construct
  source 1..21: mol_type = other DNA
tactttacggggtgtagggat

SEQ ID NO: 30249 - DNA, 21 bp, synthetic construct
  source 1..21: mol_type = other DNA
tacgtaaagtcgcaggttatc

SEQ ID NO: 30250 - DNA, 21 bp, synthetic construct
  source 1..21: mol_type = other DNA
tacgctcgaatcggggcaaat

SEQ ID NO: 30251 - DNA, 21 bp, synthetic construct
  source 1..21: mol_type = other DNA
tatagcaaaatgggagtaaac

SEQ ID NO: 30252 - DNA, 21 bp, synthetic construct
  source 1..21: mol_type = other DNA
ccctacgcgagatccgtcgac

SEQ ID NO: 30253 - DNA, 21 bp, synthetic construct
  source 1..21: mol_type = other DNA
tacagtagacacaatgcgaat

SEQ ID NO: 30254 - DNA, 21 bp, synthetic construct
  source 1..21: mol_type = other DNA
agaagtgggccatgcgcaata

SEQ ID NO: 30255 - DNA, 21 bp, synthetic construct
  source 1..21: mol_type = other DNA
cacttggcttctcatacttgg

SEQ ID NO: 30256 - DNA, 21 bp, synthetic construct
  source 1..21: mol_type = other DNA
gtatggagctccaacggagtg

SEQ ID NO: 30257 - DNA, 21 bp, synthetic construct
  source 1..21: mol_type = other DNA
cccgaggcagggtgtaaggat

SEQ ID NO: 30258 - DNA, 21 bp, synthetic construct
  source 1..21: mol_type = other DNA
gtattagcgagtgtcacttgg

SEQ ID NO: 30259 - DNA, 21 bp, synthetic construct
  source 1..21: mol_type = other DNA
caaggagtaagtagagaatgg

SEQ ID NO: 30260 - DNA, 21 bp, synthetic construct
  source 1..21: mol_type = other DNA
tacgattcgactaacgggagg

SEQ ID NO: 30261 - DNA, 21 bp, synthetic construct
  source 1..21: mol_type = other DNA
tactcgaggtctggagcgaac

SEQ ID NO: 30262 - DNA, 21 bp, synthetic construct
  source 1..21: mol_type = other DNA
aaggatgacttttcgatgtac

SEQ ID NO: 30263 - DNA, 21 bp, synthetic construct
  source 1..21: mol_type = other DNA
tattacagcggaaaaattgat

SEQ ID NO: 30264 - DNA, 21 bp, synthetic construct
  source 1..21: mol_type = other DNA
aaacgtgatattacctgtgcc

SEQ ID NO: 30265 - DNA, 21 bp, synthetic construct
  source 1..21: mol_type = other DNA
tattctagacttaatacaaat

SEQ ID NO: 30266 - DNA, 21 bp, synthetic construct
  source 1..21: mol_type = other DNA
tttttctctaccaacgggatt

SEQ ID NO: 30267 - DNA, 21 bp, synthetic construct
  source 1..21: mol_type = other DNA
tgcaagcccagaactggagag

SEQ ID NO: 30268 - DNA, 21 bp, synthetic construct
  source 1..21: mol_type = other DNA
atgtttgacggtaccgaggca

SEQ ID NO: 30269 - DNA, 21 bp, synthetic construct
  source 1..21: mol_type = other DNA
actctatcatcaagggactgg

SEQ ID NO: 30270 - DNA, 21 bp, synthetic construct
  source 1..21: mol_type = other DNA
aggacccgggatagctaccct

SEQ ID NO: 30271 - DNA, 21 bp, synthetic construct
  source 1..21: mol_type = other DNA
tactcccgaattgggttgaat

SEQ ID NO: 30272 - DNA, 21 bp, synthetic construct
  source 1..21: mol_type = other DNA
acctggacaggtgaaaatgca

SEQ ID NO: 30273 - DNA, 21 bp, synthetic construct
  source 1..21: mol_type = other DNA
tatttcagtggagtcccgaca

SEQ ID NO: 30274 - DNA, 21 bp, synthetic construct
  source 1..21: mol_type = other DNA
agggatgaattcaattccttc

SEQ ID NO: 30275 - DNA, 21 bp, synthetic construct
  source 1..21: mol_type = other DNA
tacacaaggctcgacgtgttg

SEQ ID NO: 30276 - DNA, 21 bp, synthetic construct
  source 1..21: mol_type = other DNA
tacgctaaacagggaatgaac

SEQ ID NO: 30277 - DNA, 21 bp, synthetic construct
  source 1..21: mol_type = other DNA
tacttcgcaggcgttgttggg

SEQ ID NO: 30278 - DNA, 21 bp, synthetic construct
  source 1..21: mol_type = other DNA
tacttcgcgggcgttaaggat

SEQ ID NO: 30279 - DNA, 21 bp, synthetic construct
  source 1..21: mol_type = other DNA
ttcgcgaagcacggatgtggg

SEQ ID NO: 30280 - DNA, 21 bp, synthetic construct
  source 1..21: mol_type = other DNA
caggacggttcgagtagttgg

SEQ ID NO: 30281 - DNA, 21 bp, synthetic construct
  source 1..21: mol_type = other DNA
tactcgaggttaggtgaaaat

SEQ ID NO: 30282 - DNA, 21 bp, synthetic construct
  source 1..21: mol_type = other DNA
caagacggttacagtaaatat

SEQ ID NO: 30283 - DNA, 21 bp, synthetic construct
  source 1..21: mol_type = other DNA
tgtaaacctcaaaccccgcaa

SEQ ID NO: 30284 - DNA, 21 bp, synthetic construct
  source 1..21: mol_type = other DNA
ggatcagagaatgttcgttgg

SEQ ID NO: 30285 - DNA, 21 bp, synthetic construct
  source 1..21: mol_type = other DNA
cgtgaagagagtttgtattgg

SEQ ID NO: 30286 - DNA, 21 bp, synthetic construct
  source 1..21: mol_type = other DNA
tgtaaaccagattacagggaa

SEQ ID NO: 30287 - DNA, 21 bp, synthetic construct
  source 1..21: mol_type = other DNA
ttattgagtagtgccgactgg

SEQ ID NO: 30288 - DNA, 21 bp, synthetic construct
  source 1..21: mol_type = other DNA
tacagccgcgcgggaatgaac

SEQ ID NO: 30289 - DNA, 21 bp, synthetic construct
  source 1..21: mol_type = other DNA
tactggacagggactatcgag

SEQ ID NO: 30290 - DNA, 21 bp, synthetic construct
  source 1..21: mol_type = other DNA
tactttaccggaagaacccag

SEQ ID NO: 30291 - DNA, 21 bp, synthetic construct
  source 1..21: mol_type = other DNA
cgtaatgacttcagcacgtat

SEQ ID NO: 30292 - DNA, 21 bp, synthetic construct
  source 1..21: mol_type = other DNA
attggagaaagagggtgggat

SEQ ID NO: 30293 - DNA, 21 bp, synthetic construct
  source 1..21: mol_type = other DNA
tactacactggtgtcactagg

SEQ ID NO: 30294 - DNA, 21 bp, synthetic construct
  source 1..21: mol_type = other DNA
atgactggtaccagctgcaat

SEQ ID NO: 30295 - DNA, 21 bp, synthetic construct
  source 1..21: mol_type = other DNA
agctatgcgaaatctttattg

SEQ ID NO: 30296 - DNA, 21 bp, synthetic construct
  source 1..21: mol_type = other DNA
gtaccagatttcgtcaagtgg

SEQ ID NO: 30297 - DNA, 21 bp, synthetic construct
  source 1..21: mol_type = other DNA
ccgaacagtaccaatggtgtt

SEQ ID NO: 30298 - DNA, 21 bp, synthetic construct
  source 1..21: mol_type = other DNA
tattttgccggagtcgtagga

SEQ ID NO: 30299 - DNA, 21 bp, synthetic construct
  source 1..21: mol_type = other DNA
tatgcgaaagccgggaataac

SEQ ID NO: 30300 - DNA, 21 bp, synthetic construct
  source 1..21: mol_type = other DNA
ctctcgcgccaaaattttaat

SEQ ID NO: 30301 - DNA, 21 bp, synthetic construct
  source 1..21: mol_type = other DNA
tactggcagggcaaaatagca

SEQ ID NO: 30302 - DNA, 21 bp, synthetic construct
  source 1..21: mol_type = other DNA
tacgctagaattggttccaac

SEQ ID NO: 30303 - DNA, 21 bp, synthetic construct
  source 1..21: mol_type = other DNA
tgtaaaggtacggatggaccc

SEQ ID NO: 30304 - DNA, 21 bp, synthetic construct
  source 1..21: mol_type = other DNA
tatgctaggcttgggatgaac

SEQ ID NO: 30305 - DNA, 21 bp, synthetic construct
  source 1..21: mol_type = other DNA
tttttgaagagccaaagttac

SEQ ID NO: 30306 - DNA, 21 bp, synthetic construct
  source 1..21: mol_type = other DNA
tgtaaatcggggcagggtgcc

SEQ ID NO: 30307 - DNA, 21 bp, synthetic construct
  source 1..21: mol_type = other DNA
agagacagcaccaacggggtc

SEQ ID NO: 30308 - DNA, 21 bp, synthetic construct
  source 1..21: mol_type = other DNA
tactcaaaacataacaacaac

SEQ ID NO: 30309 - DNA, 21 bp, synthetic construct
  source 1..21: mol_type = other DNA
ttgtatgatggaactaacgcg

SEQ ID NO: 30310 - DNA, 21 bp, synthetic construct
  source 1..21: mol_type = other DNA
cgtgccgcggaagtataccct

SEQ ID NO: 30311 - DNA, 21 bp, synthetic construct
  source 1..21: mol_type = other DNA
cgcgggggcaccagcgcctgg

SEQ ID NO: 30312 - DNA, 21 bp, synthetic construct
  source 1..21: mol_type = other DNA
tgtaagcccggtagtccagga

SEQ ID NO: 30313 - DNA, 21 bp, synthetic construct
  source 1..21: mol_type = other DNA
tacgcgcgggacgggcctaat

SEQ ID NO: 30314 - DNA, 21 bp, synthetic construct
  source 1..21: mol_type = other DNA
tattcaaaaaacaatttcaac

SEQ ID NO: 30315 - DNA, 21 bp, synthetic construct
  source 1..21: mol_type = other DNA
agctgcgattcaggaaaggct

SEQ ID NO: 30316 - DNA, 21 bp, synthetic construct
  source 1..21: mol_type = other DNA
tactggtcaggtatgcaagag

SEQ ID NO: 30317 - DNA, 21 bp, synthetic construct
  source 1..21: mol_type = other DNA
aggggccatgatgtctttcca

SEQ ID NO: 30318 - DNA, 21 bp, synthetic construct
  source 1..21: mol_type = other DNA
tatgtgcgtagccaaaattta

SEQ ID NO: 30319 - DNA, 21 bp, synthetic construct
  source 1..21: mol_type = other DNA
ttcagtagaaccggatacaac

SEQ ID NO: 30320 - DNA, 21 bp, synthetic construct
  source 1..21: mol_type = other DNA
ctgatcaaaccgtgccttact

SEQ ID NO: 30321 - DNA, 21 bp, synthetic construct
  source 1..21: mol_type = other DNA
atgagagatggcacttctagc

SEQ ID NO: 30322 - DNA, 21 bp, synthetic construct
  source 1..21: mol_type = other DNA
tatgcacgacagggggttaat

SEQ ID NO: 30323 - DNA, 21 bp, synthetic construct
  source 1..21: mol_type = other DNA
ttttttacaggtacgttcgat

SEQ ID NO: 30324 - DNA, 21 bp, synthetic construct
  source 1..21: mol_type = other DNA
gtgatgtatgactcctaccca

SEQ ID NO: 30325 - DNA, 21 bp, synthetic construct
  source 1..21: mol_type = other DNA
tactttaccggcttacataat

SEQ ID NO: 30326 - DNA, 21 bp, synthetic construct
  source 1..21: mol_type = other DNA
aaagacgactacactcgtttt

SEQ ID NO: 30327 - DNA, 21 bp, synthetic construct
  source 1..21: mol_type = other DNA
ccgatgccagaccgttcgtgg

SEQ ID NO: 30328 - DNA, 21 bp, synthetic construct
  source 1..21: mol_type = other DNA
tatcatcgagcgggcctcgat

SEQ ID NO: 30329 - DNA, 21 bp, synthetic construct
  source 1..21: mol_type = other DNA
cgggacgatagttctagctgg

SEQ ID NO: 30330 - DNA, 21 bp, synthetic construct
  source 1..21: mol_type = other DNA
gatctccgggaccgcgcatgg

SEQ ID NO: 30331 - DNA, 21 bp, synthetic construct
  source 1..21: mol_type = other DNA
tatttttcaggcatgactgag

SEQ ID NO: 30332 - DNA, 21 bp, synthetic construct
  source 1..21: mol_type = other DNA
tacacgtctagtaatggcgta

SEQ ID NO: 30333 - DNA, 21 bp, synthetic construct
  source 1..21: mol_type = other DNA
tattggggaggcgtactggag

SEQ ID NO: 30334 - DNA, 21 bp, synthetic construct
  source 1..21: mol_type = other DNA
ggcgttgaacacgtgaggtgg

SEQ ID NO: 30335 - DNA, 21 bp, synthetic construct
  source 1..21: mol_type = other DNA
ggggacggttatagtaaatgg

SEQ ID NO: 30336 - DNA, 21 bp, synthetic construct
  source 1..21: mol_type = other DNA
atcatgagcacgaacggtatt

SEQ ID NO: 30337 - DNA, 21 bp, synthetic construct
  source 1..21: mol_type = other DNA
ggaccaggcgcgggttgcaat

SEQ ID NO: 30338 - DNA, 21 bp, synthetic construct
  source 1..21: mol_type = other DNA
tactttacgggttctcgagaa

SEQ ID NO: 30339 - DNA, 21 bp, synthetic construct
  source 1..21: mol_type = other DNA
ctggcgagaagtggttacgat

SEQ ID NO: 30340 - DNA, 21 bp, synthetic construct
  source 1..21: mol_type = other DNA
gtctggtcaagtaacggtgta

SEQ ID NO: 30341 - DNA, 21 bp, synthetic construct
  source 1..21: mol_type = other DNA
tatagtaagataggaaaggat

SEQ ID NO: 30342 - DNA, 21 bp, synthetic construct
  source 1..21: mol_type = other DNA
gatttgaattcagctaaatgg

SEQ ID NO: 30343 - DNA, 21 bp, synthetic construct
  source 1..21: mol_type = other DNA
gttagcactcatatgtgcgct

SEQ ID NO: 30344 - DNA, 21 bp, synthetic construct
  source 1..21: mol_type = other DNA
agagatggagaaagtgcatgg

SEQ ID NO: 30345 - DNA, 21 bp, synthetic construct
  source 1..21: mol_type = other DNA
gcacaaagtaccaatggtgtt

SEQ ID NO: 30346 - DNA, 21 bp, synthetic construct
  source 1..21: mol_type = other DNA
agggaaggcacctctctgtgg

SEQ ID NO: 30347 - DNA, 21 bp, synthetic construct
  source 1..21: mol_type = other DNA
tgtaagagcgactcaaaagtg

SEQ ID NO: 30348 - DNA, 21 bp, synthetic construct
  source 1..21: mol_type = other DNA
tatagtaagatcggctgggat

SEQ ID NO: 30349 - DNA, 21 bp, synthetic construct
  source 1..21: mol_type = other DNA
tatacaaggttgaacccaatg

SEQ ID NO: 30350 - DNA, 21 bp, synthetic construct
  source 1..21: mol_type = other DNA
atggccggaacttcatgtctc

SEQ ID NO: 30351 - DNA, 21 bp, synthetic construct
  source 1..21: mol_type = other DNA
agagaagaatttacgacctgg

SEQ ID NO: 30352 - DNA, 21 bp, synthetic construct
  source 1..21: mol_type = other DNA
tgtaagcctggctcaccgatg

SEQ ID NO: 30353 - DNA, 21 bp, synthetic construct
  source 1..21: mol_type = other DNA
aaggacgactatgtcttcttc

SEQ ID NO: 30354 - DNA, 21 bp, synthetic construct
  source 1..21: mol_type = other DNA
ttcagcaggataggtgataac

SEQ ID NO: 30355 - DNA, 21 bp, synthetic construct
  source 1..21: mol_type = other DNA
aaggatgactggaatacatgg

SEQ ID NO: 30356 - DNA, 21 bp, synthetic construct
  source 1..21: mol_type = other DNA
ttgcacaggatgtcccctgat

SEQ ID NO: 30357 - DNA, 21 bp, synthetic construct
  source 1..21: mol_type = other DNA
tataccaagctagattataat

SEQ ID NO: 30358 - DNA, 21 bp, synthetic construct
  source 1..21: mol_type = other DNA
tatgtcaagttgcaaccgaat

SEQ ID NO: 30359 - DNA, 21 bp, synthetic construct
  source 1..21: mol_type = other DNA
tattacactggtcgattggaa

SEQ ID NO: 30360 - DNA, 21 bp, synthetic construct
  source 1..21: mol_type = other DNA
cattggagtacgaatggtatt

SEQ ID NO: 30361 - DNA, 21 bp, synthetic construct
  source 1..21: mol_type = other DNA
tacagtaagaatggatataat

SEQ ID NO: 30362 - DNA, 21 bp, synthetic construct
  source 1..21: mol_type = other DNA
tacgcccgcctaggggtcaat

SEQ ID NO: 30363 - DNA, 21 bp, synthetic construct
  source 1..21: mol_type = other DNA
gggattagaaatgtaatgtac

SEQ ID NO: 30364 - DNA, 21 bp, synthetic construct
  source 1..21: mol_type = other DNA
cgagacgaatttaacagtttt

SEQ ID NO: 30365 - DNA, 21 bp, synthetic construct
  source 1..21: mol_type = other DNA
agaggagactcccggtcatgg

SEQ ID NO: 30366 - DNA, 21 bp, synthetic construct
  source 1..21: mol_type = other DNA
tatagtagacaaaacgtaaac

SEQ ID NO: 30367 - DNA, 21 bp, synthetic construct
  source 1..21: mol_type = other DNA
ttgtcgcgaattgcaaataac

SEQ ID NO: 30368 - DNA, 21 bp, synthetic construct
  source 1..21: mol_type = other DNA
tatagccgggctaacacaaac

SEQ ID NO: 30369 - DNA, 21 bp, synthetic construct
  source 1..21: mol_type = other DNA
tgccctcgcgaaaatgacggg

SEQ ID NO: 30370 - DNA, 21 bp, synthetic construct
  source 1..21: mol_type = other DNA
tactcgaagtggaataccaat

SEQ ID NO: 30371 - DNA, 21 bp, synthetic construct
  source 1..21: mol_type = other DNA
tgggtccgaagtcagccagga

SEQ ID NO: 30372 - DNA, 21 bp, synthetic construct
  source 1..21: mol_type = other DNA
tactttagcggggtaactgta

SEQ ID NO: 30373 - DNA, 21 bp, synthetic construct
  source 1..21: mol_type = other DNA
tatttttcgggtaaaccggag

SEQ ID NO: 30374 - DNA, 21 bp, synthetic construct
  source 1..21: mol_type = other DNA
tacataaaaagccagacctgc

SEQ ID NO: 30375 - DNA, 21 bp, synthetic construct
  source 1..21: mol_type = other DNA
atcacatcatctaatggaata

SEQ ID NO: 30376 - DNA, 21 bp, synthetic construct
  source 1..21: mol_type = other DNA
tatgtaaggagtgacagcact

SEQ ID NO: 30377 - DNA, 21 bp, synthetic construct
  source 1..21: mol_type = other DNA
tatgctagagcgggccttaac

SEQ ID NO: 30378 - DNA, 21 bp, synthetic construct
  source 1..21: mol_type = other DNA
tggtggagcggcgtcacggaa

SEQ ID NO: 30379 - DNA, 21 bp, synthetic construct
  source 1..21: mol_type = other DNA
gacgggtcgagtcgctcctgg

SEQ ID NO: 30380 - DNA, 21 bp, synthetic construct
  source 1..21: mol_type = other DNA
cgcgaggataccatctattgg

SEQ ID NO: 30381 - DNA, 21 bp, synthetic construct
  source 1..21: mol_type = other DNA
tacgcgcggaacggagccaac

SEQ ID NO: 30382 - DNA, 21 bp, synthetic construct
  source 1..21: mol_type = other DNA
tacttcagcggcgtgacccca

SEQ ID NO: 30383 - DNA, 21 bp, synthetic construct
  source 1..21: mol_type = other DNA
agtgatggggtctccaagtgg

SEQ ID NO: 30384 - DNA, 21 bp, synthetic construct
  source 1..21: mol_type = other DNA
atacaatcaagtaatggcgtt

SEQ ID NO: 30385 - DNA, 21 bp, synthetic construct
  source 1..21: mol_type = other DNA
tactggagcggcaccatagaa

SEQ ID NO: 30386 - DNA, 21 bp, synthetic construct
  source 1..21: mol_type = other DNA
cgcgaatacaacgtgtatccc

SEQ ID NO: 30387 - DNA, 21 bp, synthetic construct
  source 1..21: mol_type = other DNA
ataggtagtaaaggttgggac

SEQ ID NO: 30388 - DNA, 21 bp, synthetic construct
  source 1..21: mol_type = other DNA
tatagtcgttcgggactaaat

SEQ ID NO: 30389 - DNA, 21 bp, synthetic construct
  source 1..21: mol_type = other DNA
tgcaagcggacctcgggcgag

SEQ ID NO: 30390 - DNA, 21 bp, synthetic construct
  source 1..21: mol_type = other DNA
aggacaagagactcttaccca

SEQ ID NO: 30391 - DNA, 21 bp, synthetic construct
  source 1..21: mol_type = other DNA
ctaagcagagttgcgttcgac

SEQ ID NO: 30392 - DNA, 21 bp, synthetic construct
  source 1..21: mol_type = other DNA
ggctccattggtgctctatgg

SEQ ID NO: 30393 - DNA, 21 bp, synthetic construct
  source 1..21: mol_type = other DNA
tactcaaaatcgaatcccaac

SEQ ID NO: 30394 - DNA, 21 bp, synthetic construct
  source 1..21: mol_type = other DNA
tattggacagggatgatggag

SEQ ID NO: 30395 - DNA, 21 bp, synthetic construct
  source 1..21: mol_type = other DNA
gtagcgctaatgggaattggc

SEQ ID NO: 30396 - DNA, 21 bp, synthetic construct
  source 1..21: mol_type = other DNA
tatagtcgattaaacatgaat

SEQ ID NO: 30397 - DNA, 21 bp, synthetic construct
  source 1..21: mol_type = other DNA
taccaccgacagagtgataac

SEQ ID NO: 30398 - DNA, 21 bp, synthetic construct
  source 1..21: mol_type = other DNA
tattggagtggtacgactgac

SEQ ID NO: 30399 - DNA, 21 bp, synthetic construct
  source 1..21: mol_type = other DNA
tacgaacccggctgcgctgag

SEQ ID NO: 30400 - DNA, 21 bp, synthetic construct
  source 1..21: mol_type = other DNA
tgcaagttactcgggaaggac

SEQ ID NO: 30401 - DNA, 21 bp, synthetic construct
  source 1..21: mol_type = other DNA
ctccaccgtctggcgtcctct

SEQ ID NO: 30402 - DNA, 21 bp, synthetic construct
  source 1..21: mol_type = other DNA
tacctaaaaagccaaacagtg

SEQ ID NO: 30403 - DNA, 21 bp, synthetic construct
  source 1..21: mol_type = other DNA
tatttaaaatcggatgcctat

SEQ ID NO: 30404 - DNA, 21 bp, synthetic construct
  source 1..21: mol_type = other DNA
tacgctaaggcgggtgctaac

SEQ ID NO: 30405 - DNA, 21 bp, synthetic construct
  source 1..21: mol_type = other DNA
cacgagtccacgaatggcata

SEQ ID NO: 30406 - DNA, 21 bp, synthetic construct
  source 1..21: mol_type = other DNA
tatgtccgaagcgaccaaact

SEQ ID NO: 30407 - DNA, 21 bp, synthetic construct
  source 1..21: mol_type = other DNA
tgcaagagtaacaacgagccc

SEQ ID NO: 30408 - DNA, 21 bp, synthetic construct
  source 1..21: mol_type = other DNA
tattcgaagcataatccaaat

SEQ ID NO: 30409 - DNA, 21 bp, synthetic construct
  source 1..21: mol_type = other DNA
ttcgccagcaccaacggggtc

SEQ ID NO: 30410 - DNA, 21 bp, synthetic construct
  source 1..21: mol_type = other DNA
ttaaaagacggtacccctgcg

SEQ ID NO: 30411 - DNA, 21 bp, synthetic construct
  source 1..21: mol_type = other DNA
tgtcgtcccccggaggtagag

SEQ ID NO: 30412 - DNA, 21 bp, synthetic construct
  source 1..21: mol_type = other DNA
tgtaagcctgaatgtggaggt

SEQ ID NO: 30413 - DNA, 21 bp, synthetic construct
  source 1..21: mol_type = other DNA
accccttccacaatctatttc

SEQ ID NO: 30414 - DNA, 21 bp, synthetic construct
  source 1..21: mol_type = other DNA
tattggagcggaaagctcgaa

SEQ ID NO: 30415 - DNA, 21 bp, synthetic construct
  source 1..21: mol_type = other DNA
tatgcccgtatcggattcaat

SEQ ID NO: 30416 - DNA, 21 bp, synthetic construct
  source 1..21: mol_type = other DNA
aaactgccgaactacgggtat

SEQ ID NO: 30417 - DNA, 21 bp, synthetic construct
  source 1..21: mol_type = other DNA
ctggctagcgcctgtctctct

SEQ ID NO: 30418 - DNA, 21 bp, synthetic construct
  source 1..21: mol_type = other DNA
tacttctcaggtactagaaca

SEQ ID NO: 30419 - DNA, 21 bp, synthetic construct
  source 1..21: mol_type = other DNA
ttttgggcaggaattcgtgaa

SEQ ID NO: 30420 - DNA, 21 bp, synthetic construct
  source 1..21: mol_type = other DNA
agaaatgaatatagcacatat

SEQ ID NO: 30421 - DNA, 21 bp, synthetic construct
  source 1..21: mol_type = other DNA
tatagtaagtggaatgacaac

SEQ ID NO: 30422 - DNA, 21 bp, synthetic construct
  source 1..21: mol_type = other DNA
tatagcaaacatggggccaat

SEQ ID NO: 30423 - DNA, 21 bp, synthetic construct
  source 1..21: mol_type = other DNA
tacttcagtggtatccaaccc

SEQ ID NO: 30424 - DNA, 21 bp, synthetic construct
  source 1..21: mol_type = other DNA
tattttaccggtagaacctct

SEQ ID NO: 30425 - DNA, 21 bp, synthetic construct
  source 1..21: mol_type = other DNA
aggatggaatcggtaatctgg

SEQ ID NO: 30426 - DNA, 21 bp, synthetic construct
  source 1..21: mol_type = other DNA
acggtgtacgattctttcgct

SEQ ID NO: 30427 - DNA, 21 bp, synthetic construct
  source 1..21: mol_type = other DNA
atgaccaccacttcatgtttg

SEQ ID NO: 30428 - DNA, 21 bp, synthetic construct
  source 1..21: mol_type = other DNA
tataccagactcgataatatg

SEQ ID NO: 30429 - DNA, 21 bp, synthetic construct
  source 1..21: mol_type = other DNA
tactggcagggaaaaattgat

SEQ ID NO: 30430 - DNA, 21 bp, synthetic construct
  source 1..21: mol_type = other DNA
tttttttcaggacgcatcgag

SEQ ID NO: 30431 - DNA, 21 bp, synthetic construct
  source 1..21: mol_type = other DNA
tttgcacgcactggcatgaac

SEQ ID NO: 30432 - DNA, 21 bp, synthetic construct
  source 1..21: mol_type = other DNA
tacgcgcgacagggtgctaac

SEQ ID NO: 30433 - DNA, 21 bp, synthetic construct
  source 1..21: mol_type = other DNA
ggacgcccagggtgtccattt

SEQ ID NO: 30434 - DNA, 21 bp, synthetic construct
  source 1..21: mol_type = other DNA
attggttttgtctgctcagaa

SEQ ID NO: 30435 - DNA, 21 bp, synthetic construct
  source 1..21: mol_type = other DNA
cgtgatgaatttaccaagttt

SEQ ID NO: 30436 - DNA, 21 bp, synthetic construct
  source 1..21: mol_type = other DNA
tgcaagccgaatccagcgcca

SEQ ID NO: 30437 - DNA, 21 bp, synthetic construct
  source 1..21: mol_type = other DNA
tacagccgtgctagcgataac

SEQ ID NO: 30438 - DNA, 21 bp, synthetic construct
  source 1..21: mol_type = other DNA
tacgccaggggcggttacaac

SEQ ID NO: 30439 - DNA, 21 bp, synthetic construct
  source 1..21: mol_type = other DNA
tacttttcgggccagcatcat

SEQ ID NO: 30440 - DNA, 21 bp, synthetic construct
  source 1..21: mol_type = other DNA
tactccaagtggaacgccaat

SEQ ID NO: 30441 - DNA, 21 bp, synthetic construct
  source 1..21: mol_type = other DNA
tactcccggataaatcccaac

SEQ ID NO: 30442 - DNA, 21 bp, synthetic construct
  source 1..21: mol_type = other DNA
tatagtcgcctgaatccgaat

SEQ ID NO: 30443 - DNA, 21 bp, synthetic construct
  source 1..21: mol_type = other DNA
tgtaaatcatccaagcaggat

SEQ ID NO: 30444 - DNA, 21 bp, synthetic construct
  source 1..21: mol_type = other DNA
aaagacgagtatctcactttc

SEQ ID NO: 30445 - DNA, 21 bp, synthetic construct
  source 1..21: mol_type = other DNA
tatttcagcggaatcattcaa

SEQ ID NO: 30446 - DNA, 21 bp, synthetic construct
  source 1..21: mol_type = other DNA
taccacaaataccaggaaaat

SEQ ID NO: 30447 - DNA, 21 bp, synthetic construct
  source 1..21: mol_type = other DNA
gaacgttacggtttatgtgct

SEQ ID NO: 30448 - DNA, 21 bp, synthetic construct
  source 1..21: mol_type = other DNA
actacttcaacgaacgggatt

SEQ ID NO: 30449 - DNA, 21 bp, synthetic construct
  source 1..21: mol_type = other DNA
tactcgcgggcgggtgataac

SEQ ID NO: 30450 - DNA, 21 bp, synthetic construct
  source 1..21: mol_type = other DNA
gtaatgcgagacagggggtgg

SEQ ID NO: 30451 - DNA, 21 bp, synthetic construct
  source 1..21: mol_type = other DNA
tacagccgcgtaggtcacaat

SEQ ID NO: 30452 - DNA, 21 bp, synthetic construct
  source 1..21: mol_type = other DNA
ttcagtagaacgggagccaac

SEQ ID NO: 30453 - DNA, 21 bp, synthetic construct
  source 1..21: mol_type = other DNA
tattacagcggcatacatagt

SEQ ID NO: 30454 - DNA, 21 bp, synthetic construct
  source 1..21: mol_type = other DNA
tacagtcgcgtcggaggtaat

SEQ ID NO: 30455 - DNA, 21 bp, synthetic construct
  source 1..21: mol_type = other DNA
tactgggagggggttaaaagt

SEQ ID NO: 30456 - DNA, 21 bp, synthetic construct
  source 1..21: mol_type = other DNA
tattcacgactgggtaacaat

SEQ ID NO: 30457 - DNA, 21 bp, synthetic construct
  source 1..21: mol_type = other DNA
acactcagcaccaatggtgtg

SEQ ID NO: 30458 - DNA, 21 bp, synthetic construct
  source 1..21: mol_type = other DNA
tttagtcgtatgggcccaaac

SEQ ID NO: 30459 - DNA, 21 bp, synthetic construct
  source 1..21: mol_type = other DNA
tatgcgcgcttgagcccgatt

SEQ ID NO: 30460 - DNA, 21 bp, synthetic construct
  source 1..21: mol_type = other DNA
gcccatcgactattgcccagt

SEQ ID NO: 30461 - DNA, 21 bp, synthetic construct
  source 1..21: mol_type = other DNA
tacagtcggactaatgttaat

SEQ ID NO: 30462 - DNA, 21 bp, synthetic construct
  source 1..21: mol_type = other DNA
ttttttacaggtaccgtatcg

SEQ ID NO: 30463 - DNA, 21 bp, synthetic construct
  source 1..21: mol_type = other DNA
tacgccaaggcaggaaacaat

SEQ ID NO: 30464 - DNA, 21 bp, synthetic construct
  source 1..21: mol_type = other DNA
tatagtaggttacaagcgata

SEQ ID NO: 30465 - DNA, 21 bp, synthetic construct
  source 1..21: mol_type = other DNA
tactccagacttcaaatgaat

SEQ ID NO: 30466 - DNA, 21 bp, synthetic construct
  source 1..21: mol_type = other DNA
cgcgaggaaaatgtttactgg

SEQ ID NO: 30467 - DNA, 21 bp, synthetic construct
  source 1..21: mol_type = other DNA
gctaacgactacatgagctac

SEQ ID NO: 30468 - DNA, 21 bp, synthetic construct
  source 1..21: mol_type = other DNA
tgggcaaaaagcggcccgaac

SEQ ID NO: 30469 - DNA, 21 bp, synthetic construct
  source 1..21: mol_type = other DNA
tactcgaagtggaacgagaac

SEQ ID NO: 30470 - DNA, 21 bp, synthetic construct
  source 1..21: mol_type = other DNA
tgtaagccaggatctagtggc

SEQ ID NO: 30471 - DNA, 21 bp, synthetic construct
  source 1..21: mol_type = other DNA
tgtcggccccaaatggcctcg

SEQ ID NO: 30472 - DNA, 21 bp, synthetic construct
  source 1..21: mol_type = other DNA
tactggtcaggggtacaggtg

SEQ ID NO: 30473 - DNA, 21 bp, synthetic construct
  source 1..21: mol_type = other DNA
acggatggaacctccctgtgg

SEQ ID NO: 30474 - DNA, 21 bp, synthetic construct
  source 1..21: mol_type = other DNA
tgtcagagcgagggcaggact

SEQ ID NO: 30475 - DNA, 21 bp, synthetic construct
  source 1..21: mol_type = other DNA
tattggtccggagtcggagaa

SEQ ID NO: 30476 - DNA, 21 bp, synthetic construct
  source 1..21: mol_type = other DNA
acaagggagggggacgctccc

SEQ ID NO: 30477 - DNA, 21 bp, synthetic construct
  source 1..21: mol_type = other DNA
cgcgatgggatctcagcatgg

SEQ ID NO: 30478 - DNA, 21 bp, synthetic construct
  source 1..21: mol_type = other DNA
tattggtcgggggtgggtgca

SEQ ID NO: 30479 - DNA, 21 bp, synthetic construct
  source 1..21: mol_type = other DNA
cctatgccggataggagctgg

SEQ ID NO: 30480 - DNA, 21 bp, synthetic construct
  source 1..21: mol_type = other DNA
tatttcagtggccagatcatg

SEQ ID NO: 30481 - DNA, 21 bp, synthetic construct
  source 1..21: mol_type = other DNA
ctgcactcaaccaacggaata

SEQ ID NO: 30482 - DNA, 21 bp, synthetic construct
  source 1..21: mol_type = other DNA
agagatggaaattctcggtgg

SEQ ID NO: 30483 - DNA, 21 bp, synthetic construct
  source 1..21: mol_type = other DNA
tggtttagcgggagagtagag

SEQ ID NO: 30484 - DNA, 21 bp, synthetic construct
  source 1..21: mol_type = other DNA
tgcaaagcaaacccgcccgaa

SEQ ID NO: 30485 - DNA, 21 bp, synthetic construct
  source 1..21: mol_type = other DNA
cattggagcacaaacggagta

SEQ ID NO: 30486 - DNA, 21 bp, synthetic construct
  source 1..21: mol_type = other DNA
tggttgcctatgtgtaaagcc

SEQ ID NO: 30487 - DNA, 21 bp, synthetic construct
  source 1..21: mol_type = other DNA
tatagccgtcaaggaatcaac

SEQ ID NO: 30488 - DNA, 21 bp, synthetic construct
  source 1..21: mol_type = other DNA
ttcagccgattaggtgcaaac

SEQ ID NO: 30489 - DNA, 21 bp, synthetic construct
  source 1..21: mol_type = other DNA
tattggtcggctgtgcctgaa

SEQ ID NO: 30490 - DNA, 21 bp, synthetic construct
  source 1..21: mol_type = other DNA
ggaggtccgggttcgttttgg

SEQ ID NO: 30491 - DNA, 21 bp, synthetic construct
  source 1..21: mol_type = other DNA
tattccaaagggaactgcaac

SEQ ID NO: 30492 - DNA, 21 bp, synthetic construct
  source 1..21: mol_type = other DNA
tgtaaggacccatgctgtaca

SEQ ID NO: 30493 - DNA, 21 bp, synthetic construct
  source 1..21: mol_type = other DNA
tacagtcggatcaatttcaat

SEQ ID NO: 30494 - DNA, 21 bp, synthetic construct
  source 1..21: mol_type = other DNA
tggtggagccaggtcaaagag

SEQ ID NO: 30495 - DNA, 21 bp, synthetic construct
  source 1..21: mol_type = other DNA
accttcagcactaacggtatt

SEQ ID NO: 30496 - DNA, 21 bp, synthetic construct
  source 1..21: mol_type = other DNA
gaactagatagcagggactgg

SEQ ID NO: 30497 - DNA, 21 bp, synthetic construct
  source 1..21: mol_type = other DNA
atagcatacgatgcatatccc

SEQ ID NO: 30498 - DNA, 21 bp, synthetic construct
  source 1..21: mol_type = other DNA
agtgcgtctacaaatggcatc

SEQ ID NO: 30499 - DNA, 21 bp, synthetic construct
  source 1..21: mol_type = other DNA
tatagtaggatgggcgtgaat

SEQ ID NO: 30500 - DNA, 21 bp, synthetic construct
  source 1..21: mol_type = other DNA
tatgccaaaatggggtggaat

SEQ ID NO: 30501 - DNA, 21 bp, synthetic construct
  source 1..21: mol_type = other DNA
tgtatggagcgaaaacccgag

SEQ ID NO: 30502 - DNA, 21 bp, synthetic construct
  source 1..21: mol_type = other DNA
tggttcagtggcaaaatagat

SEQ ID NO: 30503 - DNA, 21 bp, synthetic construct
  source 1..21: mol_type = other DNA
tacgccaggggaaaccataac

SEQ ID NO: 30504 - DNA, 21 bp, synthetic construct
  source 1..21: mol_type = other DNA
tactggtcaggtactgtcgat

SEQ ID NO: 30505 - DNA, 21 bp, synthetic construct
  source 1..21: mol_type = other DNA
tcaggagaaagtcgcacttgg

SEQ ID NO: 30506 - DNA, 21 bp, synthetic construct
  source 1..21: mol_type = other DNA
tgggtccggagcgacgtgaaa

SEQ ID NO: 30507 - DNA, 21 bp, synthetic construct
  source 1..21: mol_type = other DNA
tactttcaggggaggattgat

SEQ ID NO: 30508 - DNA, 21 bp, synthetic construct
  source 1..21: mol_type = other DNA
tattgggcgggtgtgcaagaa

SEQ ID NO: 30509 - DNA, 21 bp, synthetic construct
  source 1..21: mol_type = other DNA
gtgccatatgagggcatagga

SEQ ID NO: 30510 - DNA, 21 bp, synthetic construct
  source 1..21: mol_type = other DNA
tatgttaaaagccaagtgatt

SEQ ID NO: 30511 - DNA, 21 bp, synthetic construct
  source 1..21: mol_type = other DNA
ctaacctacgacgcttacgag

SEQ ID NO: 30512 - DNA, 21 bp, synthetic construct
  source 1..21: mol_type = other DNA
tatttcaccaaacagatcgat

SEQ ID NO: 30513 - DNA, 21 bp, synthetic construct
  source 1..21: mol_type = other DNA
tacttcagtgggcgcccaaac

SEQ ID NO: 30514 - DNA, 21 bp, synthetic construct
  source 1..21: mol_type = other DNA
agggattctacccacggaatt

SEQ ID NO: 30515 - DNA, 21 bp, synthetic construct
  source 1..21: mol_type = other DNA
tacagccggttaaacactaac

SEQ ID NO: 30516 - DNA, 21 bp, synthetic construct
  source 1..21: mol_type = other DNA
tattcgaggttaaattttaat

SEQ ID NO: 30517 - DNA, 21 bp, synthetic construct
  source 1..21: mol_type = other DNA
tacttcagcgggcaggcggaa

SEQ ID NO: 30518 - DNA, 21 bp, synthetic construct
  source 1..21: mol_type = other DNA
aaagacgactttactcggtac

SEQ ID NO: 30519 - DNA, 21 bp, synthetic construct
  source 1..21: mol_type = other DNA
tatttcgccggcgaaagagat

SEQ ID NO: 30520 - DNA, 21 bp, synthetic construct
  source 1..21: mol_type = other DNA
tacgttaaatctgacaaggta

SEQ ID NO: 30521 - DNA, 21 bp, synthetic construct
  source 1..21: mol_type = other DNA
ctgagccgagtagcttttgac

SEQ ID NO: 30522 - DNA, 21 bp, synthetic construct
  source 1..21: mol_type = other DNA
ttctcaagacttggtcaaaat

SEQ ID NO: 30523 - DNA, 21 bp, synthetic construct
  source 1..21: mol_type = other DNA
tattggcaaggggtacgcgag

SEQ ID NO: 30524 - DNA, 21 bp, synthetic construct
  source 1..21: mol_type = other DNA
tactcacgggcaggccaaaac

SEQ ID NO: 30525 - DNA, 21 bp, synthetic construct
  source 1..21: mol_type = other DNA
tattacacgggagtgatcgaa

SEQ ID NO: 30526 - DNA, 21 bp, synthetic construct
  source 1..21: mol_type = other DNA
tcctgcaaagagcgtatgcca

SEQ ID NO: 30527 - DNA, 21 bp, synthetic construct
  source 1..21: mol_type = other DNA
tacgcccgacaaggtagcaat

SEQ ID NO: 30528 - DNA, 21 bp, synthetic construct
  source 1..21: mol_type = other DNA
tactggcaaggggttgtagag

SEQ ID NO: 30529 - DNA, 21 bp, synthetic construct
  source 1..21: mol_type = other DNA
tactgggggggtgtcttagaa

SEQ ID NO: 30530 - DNA, 21 bp, synthetic construct
  source 1..21: mol_type = other DNA
tattccaggtcgggagagaat

SEQ ID NO: 30531 - DNA, 21 bp, synthetic construct
  source 1..21: mol_type = other DNA
aggaacgagttctctggctat

SEQ ID NO: 30532 - DNA, 21 bp, synthetic construct
  source 1..21: mol_type = other DNA
tactcccgcagcggaataaac

SEQ ID NO: 30533 - DNA, 21 bp, synthetic construct
  source 1..21: mol_type = other DNA
tatttttcaggaatacagcca

SEQ ID NO: 30534 - DNA, 21 bp, synthetic construct
  source 1..21: mol_type = other DNA
ccttatgcccgtagcgcggac

SEQ ID NO: 30535 - DNA, 21 bp, synthetic construct
  source 1..21: mol_type = other DNA
tactcgagggcggggttcaat

SEQ ID NO: 30536 - DNA, 21 bp, synthetic construct
  source 1..21: mol_type = other DNA
tacagcaggataggtccgcaa

SEQ ID NO: 30537 - DNA, 21 bp, synthetic construct
  source 1..21: mol_type = other DNA
tatagtagagtcaacttaaat

SEQ ID NO: 30538 - DNA, 21 bp, synthetic construct
  source 1..21: mol_type = other DNA
tcgtactccactaacggcgtc

SEQ ID NO: 30539 - DNA, 21 bp, synthetic construct
  source 1..21: mol_type = other DNA
agaatgtcagcttcgaactgg

SEQ ID NO: 30540 - DNA, 21 bp, synthetic construct
  source 1..21: mol_type = other DNA
tgtaaaccgaaacagatcgag

SEQ ID NO: 30541 - DNA, 21 bp, synthetic construct
  source 1..21: mol_type = other DNA
tgcgctcccgactggagggag

SEQ ID NO: 30542 - DNA, 21 bp, synthetic construct
  source 1..21: mol_type = other DNA
tatcttaaatcgcaaggctat

SEQ ID NO: 30543 - DNA, 21 bp, synthetic construct
  source 1..21: mol_type = other DNA
tgcgctccgtatcaccacgaa

SEQ ID NO: 30544 - DNA, 21 bp, synthetic construct
  source 1..21: mol_type = other DNA
tacttcgccggtatcatatca

SEQ ID NO: 30545 - DNA, 21 bp, synthetic construct
  source 1..21: mol_type = other DNA
tatgcgagggctggaatgaac

SEQ ID NO: 30546 - DNA, 21 bp, synthetic construct
  source 1..21: mol_type = other DNA
gtgtgtaaaccttgtccaatt

SEQ ID NO: 30547 - DNA, 21 bp, synthetic construct
  source 1..21: mol_type = other DNA
gtgcctagctctgtcaagtgg

SEQ ID NO: 30548 - DNA, 21 bp, synthetic construct
  source 1..21: mol_type = other DNA
cggatggagagtagtgactgg

SEQ ID NO: 30549 - DNA, 21 bp, synthetic construct
  source 1..21: mol_type = other DNA
tacttctcgggcgaacatgac

SEQ ID NO: 30550 - DNA, 21 bp, synthetic construct
  source 1..21: mol_type = other DNA
cgtggggacttggtttacccc

SEQ ID NO: 30551 - DNA, 21 bp, synthetic construct
  source 1..21: mol_type = other DNA
tatgcacgtgggggaatgaat

SEQ ID NO: 30552 - DNA, 21 bp, synthetic construct
  source 1..21: mol_type = other DNA
tttttccatggaaagatagac

SEQ ID NO: 30553 - DNA, 21 bp, synthetic construct
  source 1..21: mol_type = other DNA
tacgcacgggtgggacacaat

SEQ ID NO: 30554 - DNA, 21 bp, synthetic construct
  source 1..21: mol_type = other DNA
gtcatgagttcacaaggatgg

SEQ ID NO: 30555 - DNA, 21 bp, synthetic construct
  source 1..21: mol_type = other DNA
tacattagtactaacggagtt

SEQ ID NO: 30556 - DNA, 21 bp, synthetic construct
  source 1..21: mol_type = other DNA
tattggactggaacgagcgct

SEQ ID NO: 30557 - DNA, 21 bp, synthetic construct
  source 1..21: mol_type = other DNA
gccgcctctactaacggggta

SEQ ID NO: 30558 - DNA, 21 bp, synthetic construct
  source 1..21: mol_type = other DNA
gggggcgagtcttctatctgg

SEQ ID NO: 30559 - DNA, 21 bp, synthetic construct
  source 1..21: mol_type = other DNA
tattattcaggagttaagagt

SEQ ID NO: 30560 - DNA, 21 bp, synthetic construct
  source 1..21: mol_type = other DNA
tatagcagactgggccataat

SEQ ID NO: 30561 - DNA, 21 bp, synthetic construct
  source 1..21: mol_type = other DNA
gtcatggacagcagggattgg

SEQ ID NO: 30562 - DNA, 21 bp, synthetic construct
  source 1..21: mol_type = other DNA
aattcgtccgcctgtaggact

SEQ ID NO: 30563 - DNA, 21 bp, synthetic construct
  source 1..21: mol_type = other DNA
tatttcacgggacaagcaagc

SEQ ID NO: 30564 - DNA, 21 bp, synthetic construct
  source 1..21: mol_type = other DNA
tatcataagtatcaggagaac

SEQ ID NO: 30565 - DNA, 21 bp, synthetic construct
  source 1..21: mol_type = other DNA
cgagatagcacaaatggtata

SEQ ID NO: 30566 - DNA, 21 bp, synthetic construct
  source 1..21: mol_type = other DNA
agggagggaacaagcgcttgg

SEQ ID NO: 30567 - DNA, 21 bp, synthetic construct
  source 1..21: mol_type = other DNA
tactggactggcatgatggaa

SEQ ID NO: 30568 - DNA, 21 bp, synthetic construct
  source 1..21: mol_type = other DNA
tgcaataaacccatgcacgca

SEQ ID NO: 30569 - DNA, 21 bp, synthetic construct
  source 1..21: mol_type = other DNA
gggggtcccggttcagcatgg

SEQ ID NO: 30570 - DNA, 21 bp, synthetic construct
  source 1..21: mol_type = other DNA
tgtaaggccgatagcaaggag

SEQ ID NO: 30571 - DNA, 21 bp, synthetic construct
  source 1..21: mol_type = other DNA
aatgccttagtagggcgagat

SEQ ID NO: 30572 - DNA, 21 bp, synthetic construct
  source 1..21: mol_type = other DNA
cttcacaggttgcatcctgat

SEQ ID NO: 30573 - DNA, 21 bp, synthetic construct
  source 1..21: mol_type = other DNA
ttagaaccaaaatgcaagggc

SEQ ID NO: 30574 - DNA, 21 bp, synthetic construct
  source 1..21: mol_type = other DNA
gtcgagggggttttatgtaga

SEQ ID NO: 30575 - DNA, 21 bp, synthetic construct
  source 1..21: mol_type = other DNA
tatttttcaggagtaactccc

SEQ ID NO: 30576 - DNA, 21 bp, synthetic construct
  source 1..21: mol_type = other DNA
tatttccatggtcaaatggac

SEQ ID NO: 30577 - DNA, 21 bp, synthetic construct
  source 1..21: mol_type = other DNA
cgggatagcactcatggggtt

SEQ ID NO: 30578 - DNA, 21 bp, synthetic construct
  source 1..21: mol_type = other DNA
agagaggaatcgtcccgttgg

SEQ ID NO: 30579 - DNA, 21 bp, synthetic construct
  source 1..21: mol_type = other DNA
ttttggtcgggtataccagcg

SEQ ID NO: 30580 - DNA, 21 bp, synthetic construct
  source 1..21: mol_type = other DNA
tattcgcgggtgggcccagtg

SEQ ID NO: 30581 - DNA, 21 bp, synthetic construct
  source 1..21: mol_type = other DNA
tacagccgcacaggttttaat

SEQ ID NO: 30582 - DNA, 21 bp, synthetic construct
  source 1..21: mol_type = other DNA
tgtaacttcaagggacccccc

SEQ ID NO: 30583 - DNA, 21 bp, synthetic construct
  source 1..21: mol_type = other DNA
gacccgtcatcttctaaatgg

SEQ ID NO: 30584 - DNA, 21 bp, synthetic construct
  source 1..21: mol_type = other DNA
agagaggatgccatccgttgg

SEQ ID NO: 30585 - DNA, 21 bp, synthetic construct
  source 1..21: mol_type = other DNA
tattcccgtaccaacatcaac

SEQ ID NO: 30586 - DNA, 21 bp, synthetic construct
  source 1..21: mol_type = other DNA
tatttcacagctgtaaaagag

SEQ ID NO: 30587 - DNA, 21 bp, synthetic construct
  source 1..21: mol_type = other DNA
tacagccgcctaaacagcaat

SEQ ID NO: 30588 - DNA, 21 bp, synthetic construct
  source 1..21: mol_type = other DNA
ggtggaattggaagtgcctgg

SEQ ID NO: 30589 - DNA, 21 bp, synthetic construct
  source 1..21: mol_type = other DNA
aaatacgaaagtagcgtctgg

SEQ ID NO: 30590 - DNA, 21 bp, synthetic construct
  source 1..21: mol_type = other DNA
tactggtcaggtactacggac

SEQ ID NO: 30591 - DNA, 21 bp, synthetic construct
  source 1..21: mol_type = other DNA
tacactggcacctcatgcctg

SEQ ID NO: 30592 - DNA, 21 bp, synthetic construct
  source 1..21: mol_type = other DNA
ccttacgcgcggagtcctagc

SEQ ID NO: 30593 - DNA, 21 bp, synthetic construct
  source 1..21: mol_type = other DNA
tactcgaggtcgaatgaaaac

SEQ ID NO: 30594 - DNA, 21 bp, synthetic construct
  source 1..21: mol_type = other DNA
tgtgcagcggagcgtctgggt

SEQ ID NO: 30595 - DNA, 21 bp, synthetic construct
  source 1..21: mol_type = other DNA
atagagagctacaatggaaga

SEQ ID NO: 30596 - DNA, 21 bp, synthetic construct
  source 1..21: mol_type = other DNA
taccaccgtctatcagatcac

SEQ ID NO: 30597 - DNA, 21 bp, synthetic construct
  source 1..21: mol_type = other DNA
tactgggcgggcgttagtgcc

SEQ ID NO: 30598 - DNA, 21 bp, synthetic construct
  source 1..21: mol_type = other DNA
tactggagcgccgtaccggag

SEQ ID NO: 30599 - DNA, 21 bp, synthetic construct
  source 1..21: mol_type = other DNA
tatgcgcgcggctcatgcgat

SEQ ID NO: 30600 - DNA, 21 bp, synthetic construct
  source 1..21: mol_type = other DNA
tacgcgcgaagcgggttcaat

SEQ ID NO: 30601 - DNA, 21 bp, synthetic construct
  source 1..21: mol_type = other DNA
atgtgggacggaaccatggcg

SEQ ID NO: 30602 - DNA, 21 bp, synthetic construct
  source 1..21: mol_type = other DNA
tacagcaaagtaggatgcaac

SEQ ID NO: 30603 - DNA, 21 bp, synthetic construct
  source 1..21: mol_type = other DNA
tattggtcacagattaaagat

SEQ ID NO: 30604 - DNA, 21 bp, synthetic construct
  source 1..21: mol_type = other DNA
tgcaaaccctacttacacgag

SEQ ID NO: 30605 - DNA, 21 bp, synthetic construct
  source 1..21: mol_type = other DNA
tacagccgatctggtgtcaat

SEQ ID NO: 30606 - DNA, 21 bp, synthetic construct
  source 1..21: mol_type = other DNA
tggttcagcggaaagatcgaa

SEQ ID NO: 30607 - DNA, 21 bp, synthetic construct
  source 1..21: mol_type = other DNA
tgcggcggtattggaaggagc

SEQ ID NO: 30608 - DNA, 21 bp, synthetic construct
  source 1..21: mol_type = other DNA
tactttcagggagtcaaatcc

SEQ ID NO: 30609 - DNA, 21 bp, synthetic construct
  source 1..21: mol_type = other DNA
tactctagactcgatcgcgac

SEQ ID NO: 30610 - DNA, 21 bp, synthetic construct
  source 1..21: mol_type = other DNA
tacagccgcaccggccaaaac

SEQ ID NO: 30611 - DNA, 21 bp, synthetic construct
  source 1..21: mol_type = other DNA
tattatcatgggatccaggcg

SEQ ID NO: 30612 - DNA, 21 bp, synthetic construct
  source 1..21: mol_type = other DNA
aaggacggctttagcacatac

SEQ ID NO: 30613 - DNA, 21 bp, synthetic construct
  source 1..21: mol_type = other DNA
aagtatgctttcagcactgaa

SEQ ID NO: 30614 - DNA, 21 bp, synthetic construct
  source 1..21: mol_type = other DNA
cactggtcgacaaacggcatc

SEQ ID NO: 30615 - DNA, 21 bp, synthetic construct
  source 1..21: mol_type = other DNA
aaggatggatacagcctatat

SEQ ID NO: 30616 - DNA, 21 bp, synthetic construct
  source 1..21: mol_type = other DNA
aggaacgagttcacagtgtac

SEQ ID NO: 30617 - DNA, 21 bp, synthetic construct
  source 1..21: mol_type = other DNA
ggtaatgggacgtcgcggtgg

SEQ ID NO: 30618 - DNA, 21 bp, synthetic construct
  source 1..21: mol_type = other DNA
tattcttcgcttaatataaat

SEQ ID NO: 30619 - DNA, 21 bp, synthetic construct
  source 1..21: mol_type = other DNA
caacataagctccagcctttg

SEQ ID NO: 30620 - DNA, 21 bp, synthetic construct
  source 1..21: mol_type = other DNA
cgtgatgactaccaatattac

SEQ ID NO: 30621 - DNA, 21 bp, synthetic construct
  source 1..21: mol_type = other DNA
tattttacgggtactaactca

SEQ ID NO: 30622 - DNA, 21 bp, synthetic construct
  source 1..21: mol_type = other DNA
tgcaagccaccaaaactggag

SEQ ID NO: 30623 - DNA, 21 bp, synthetic construct
  source 1..21: mol_type = other DNA
tacgctcgaaccggtttcaat

SEQ ID NO: 30624 - DNA, 21 bp, synthetic construct
  source 1..21: mol_type = other DNA
cgagaagatacctcatactgg

SEQ ID NO: 30625 - DNA, 21 bp, synthetic construct
  source 1..21: mol_type = other DNA
cgcaacgagttcacatccttc

SEQ ID NO: 30626 - DNA, 21 bp, synthetic construct
  source 1..21: mol_type = other DNA
tgtaaaagtacgaacggtata

SEQ ID NO: 30627 - DNA, 21 bp, synthetic construct
  source 1..21: mol_type = other DNA
ttttgcaagagtaacgcaaat

SEQ ID NO: 30628 - DNA, 21 bp, synthetic construct
  source 1..21: mol_type = other DNA
agctatgctttcagtcgcgaa

SEQ ID NO: 30629 - DNA, 21 bp, synthetic construct
  source 1..21: mol_type = other DNA
gattacgccgatcgcaagtgg

SEQ ID NO: 30630 - DNA, 21 bp, synthetic construct
  source 1..21: mol_type = other DNA
ggagacggtcgcagtcattgg

SEQ ID NO: 30631 - DNA, 21 bp, synthetic construct
  source 1..21: mol_type = other DNA
ttcttttccggacaaagagag

SEQ ID NO: 30632 - DNA, 21 bp, synthetic construct
  source 1..21: mol_type = other DNA
aaggatgactggaccccgtat

SEQ ID NO: 30633 - DNA, 21 bp, synthetic construct
  source 1..21: mol_type = other DNA
agtatgagtgatagatcttgg

SEQ ID NO: 30634 - DNA, 21 bp, synthetic construct
  source 1..21: mol_type = other DNA
tatgccaaaagcaatttcaat

SEQ ID NO: 30635 - DNA, 21 bp, synthetic construct
  source 1..21: mol_type = other DNA
taccatgctcgccaaataaac

SEQ ID NO: 30636 - DNA, 21 bp, synthetic construct
  source 1..21: mol_type = other DNA
tatagtagaaacggtattaat

SEQ ID NO: 30637 - DNA, 21 bp, synthetic construct
  source 1..21: mol_type = other DNA
ataggacgcactgggtgggac

SEQ ID NO: 30638 - DNA, 21 bp, synthetic construct
  source 1..21: mol_type = other DNA
gagttgagctcccgcgagtgg

SEQ ID NO: 30639 - DNA, 21 bp, synthetic construct
  source 1..21: mol_type = other DNA
ttgactcgtttacacgcagtc

SEQ ID NO: 30640 - DNA, 21 bp, synthetic construct
  source 1..21: mol_type = other DNA
tatagccgtgccgggtttaac

SEQ ID NO: 30641 - DNA, 21 bp, synthetic construct
  source 1..21: mol_type = other DNA
tattggagcgggacaaacgcg

SEQ ID NO: 30642 - DNA, 21 bp, synthetic construct
  source 1..21: mol_type = other DNA
aatgacgctacttcaaaatgg

SEQ ID NO: 30643 - DNA, 21 bp, synthetic construct
  source 1..21: mol_type = other DNA
tttttcacaggttatgtagac

SEQ ID NO: 30644 - DNA, 21 bp, synthetic construct
  source 1..21: mol_type = other DNA
agggaagacgtggtatactgg

SEQ ID NO: 30645 - DNA, 21 bp, synthetic construct
  source 1..21: mol_type = other DNA
cttcaccggcttcatttggat

SEQ ID NO: 30646 - DNA, 21 bp, synthetic construct
  source 1..21: mol_type = other DNA
taccataaatacaacgtaaat

SEQ ID NO: 30647 - DNA, 21 bp, synthetic construct
  source 1..21: mol_type = other DNA
tttgagggccgaggttggaat

SEQ ID NO: 30648 - DNA, 21 bp, synthetic construct
  source 1..21: mol_type = other DNA
tatagtagaatcaatcccaat

SEQ ID NO: 30649 - DNA, 21 bp, synthetic construct
  source 1..21: mol_type = other DNA
tacgccagagtaggctttaac

SEQ ID NO: 30650 - DNA, 21 bp, synthetic construct
  source 1..21: mol_type = other DNA
ctgagagagggggaatgtaaa

SEQ ID NO: 30651 - DNA, 21 bp, synthetic construct
  source 1..21: mol_type = other DNA
tgtaagccgcaagccgggggg

SEQ ID NO: 30652 - DNA, 21 bp, synthetic construct
  source 1..21: mol_type = other DNA
tgccgaagtcgtgtagacgag

SEQ ID NO: 30653 - DNA, 21 bp, synthetic construct
  source 1..21: mol_type = other DNA
tacttcaccggcgcttacgat

SEQ ID NO: 30654 - DNA, 21 bp, synthetic construct
  source 1..21: mol_type = other DNA
ggaggtgaaggaatccgttgg

SEQ ID NO: 30655 - DNA, 21 bp, synthetic construct
  source 1..21: mol_type = other DNA
tatagcaagagtaacactaac

SEQ ID NO: 30656 - DNA, 21 bp, synthetic construct
  source 1..21: mol_type = other DNA
gatttacagtctatcaaatgg

SEQ ID NO: 30657 - DNA, 21 bp, synthetic construct
  source 1..21: mol_type = other DNA
tactctagaatgaatcccaat

SEQ ID NO: 30658 - DNA, 21 bp, synthetic construct
  source 1..21: mol_type = other DNA
ttttttcacggcaagatagaa

SEQ ID NO: 30659 - DNA, 21 bp, synthetic construct
  source 1..21: mol_type = other DNA
ttaccgcgcgccggtgactgg

SEQ ID NO: 30660 - DNA, 21 bp, synthetic construct
  source 1..21: mol_type = other DNA
taccaccggcttagtgacttc

SEQ ID NO: 30661 - DNA, 21 bp, synthetic construct
  source 1..21: mol_type = other DNA
tgtaaaccacacagattagaa

SEQ ID NO: 30662 - DNA, 21 bp, synthetic construct
  source 1..21: mol_type = other DNA
agatcggaataccatacatat

SEQ ID NO: 30663 - DNA, 21 bp, synthetic construct
  source 1..21: mol_type = other DNA
tatgcgcgcatgggtatgaat

SEQ ID NO: 30664 - DNA, 21 bp, synthetic construct
  source 1..21: mol_type = other DNA
gacatgggctctgcgaattgg

SEQ ID NO: 30665 - DNA, 21 bp, synthetic construct
  source 1..21: mol_type = other DNA
tacttcagcgcagtccgagct

SEQ ID NO: 30666 - DNA, 21 bp, synthetic construct
  source 1..21: mol_type = other DNA
agggacagtacaaacggcatc

SEQ ID NO: 30667 - DNA, 21 bp, synthetic construct
  source 1..21: mol_type = other DNA
tgtaagcatcagcaagtagag

SEQ ID NO: 30668 - DNA, 21 bp, synthetic construct
  source 1..21: mol_type = other DNA
tactcgcgactcgggggtaat

SEQ ID NO: 30669 - DNA, 21 bp, synthetic construct
  source 1..21: mol_type = other DNA
tactataccggaatggtgaat

SEQ ID NO: 30670 - DNA, 21 bp, synthetic construct
  source 1..21: mol_type = other DNA
tacttctcaggtgtacgtagc

SEQ ID NO: 30671 - DNA, 21 bp, synthetic construct
  source 1..21: mol_type = other DNA
tactcaaggatcgggttcaac

SEQ ID NO: 30672 - DNA, 21 bp, synthetic construct
  source 1..21: mol_type = other DNA
tttagtaaaattggcttcaac

SEQ ID NO: 30673 - DNA, 21 bp, synthetic construct
  source 1..21: mol_type = other DNA
tactggacgggaatgacatcg

SEQ ID NO: 30674 - DNA, 21 bp, synthetic construct
  source 1..21: mol_type = other DNA
tatagtaggatgggtatgaat

SEQ ID NO: 30675 - DNA, 21 bp, synthetic construct
  source 1..21: mol_type = other DNA
tacttcacaggaattcatggg

SEQ ID NO: 30676 - DNA, 21 bp, synthetic construct
  source 1..21: mol_type = other DNA
tataaagccgatgccccatgc

SEQ ID NO: 30677 - DNA, 21 bp, synthetic construct
  source 1..21: mol_type = other DNA
attcagttcagtccgcttgat

SEQ ID NO: 30678 - DNA, 21 bp, synthetic construct
  source 1..21: mol_type = other DNA
ctaagccgtttaggtatcgat

SEQ ID NO: 30679 - DNA, 21 bp, synthetic construct
  source 1..21: mol_type = other DNA
ttacacagcactaatggtatc

SEQ ID NO: 30680 - DNA, 21 bp, synthetic construct
  source 1..21: mol_type = other DNA
tgtaaaccgaggactagtgag

SEQ ID NO: 30681 - DNA, 21 bp, synthetic construct
  source 1..21: mol_type = other DNA
accagtagtggagggtgtcag

SEQ ID NO: 30682 - DNA, 21 bp, synthetic construct
  source 1..21: mol_type = other DNA
aaggacgaatttaccgtatac

SEQ ID NO: 30683 - DNA, 21 bp, synthetic construct
  source 1..21: mol_type = other DNA
cgtgatgactttacgggctat

SEQ ID NO: 30684 - DNA, 21 bp, synthetic construct
  source 1..21: mol_type = other DNA
tacgcaaaggccggtttgaat

SEQ ID NO: 30685 - DNA, 21 bp, synthetic construct
  source 1..21: mol_type = other DNA
tgtaagcctcgccaacccgag

SEQ ID NO: 30686 - DNA, 21 bp, synthetic construct
  source 1..21: mol_type = other DNA
tactttacgggtacctctagt

SEQ ID NO: 30687 - DNA, 21 bp, synthetic construct
  source 1..21: mol_type = other DNA
tgtggcggaggtaaggcgcct

SEQ ID NO: 30688 - DNA, 21 bp, synthetic construct
  source 1..21: mol_type = other DNA
cgctcggaatttgctgtttac

SEQ ID NO: 30689 - DNA, 21 bp, synthetic construct
  source 1..21: mol_type = other DNA
tgcaagccccctagtggtatt

SEQ ID NO: 30690 - DNA, 21 bp, synthetic construct
  source 1..21: mol_type = other DNA
aggggggggggactttacgta

SEQ ID NO: 30691 - DNA, 21 bp, synthetic construct
  source 1..21: mol_type = other DNA
tgtaaagaagggaccagaatg

SEQ ID NO: 30692 - DNA, 21 bp, synthetic construct
  source 1..21: mol_type = other DNA
aaagacgattggactacatac

SEQ ID NO: 30693 - DNA, 21 bp, synthetic construct
  source 1..21: mol_type = other DNA
tacagcagaggaaatattaat

SEQ ID NO: 30694 - DNA, 21 bp, synthetic construct
  source 1..21: mol_type = other DNA
tgtcgtccagtaaaggacggt

SEQ ID NO: 30695 - DNA, 21 bp, synthetic construct
  source 1..21: mol_type = other DNA
tactggactgggatgacagat

SEQ ID NO: 30696 - DNA, 21 bp, synthetic construct
  source 1..21: mol_type = other DNA
gactatgcagacaggaaatgg

SEQ ID NO: 30697 - DNA, 21 bp, synthetic construct
  source 1..21: mol_type = other DNA
tggtggcacggggtcagcgcc

SEQ ID NO: 30698 - DNA, 21 bp, synthetic construct
  source 1..21: mol_type = other DNA
ctgtgtaaaccctgcctcctg

SEQ ID NO: 30699 - DNA, 21 bp, synthetic construct
  source 1..21: mol_type = other DNA
tacgacagtactaatggtcgc

SEQ ID NO: 30700 - DNA, 21 bp, synthetic construct
  source 1..21: mol_type = other DNA
ttgcgcgatgggactatggcc

SEQ ID NO: 30701 - DNA, 21 bp, synthetic construct
  source 1..21: mol_type = other DNA
tacttcactgggcaatgtgaa

SEQ ID NO: 30702 - DNA, 21 bp, synthetic construct
  source 1..21: mol_type = other DNA
tgtagaccgggcagcccagga

SEQ ID NO: 30703 - DNA, 21 bp, synthetic construct
  source 1..21: mol_type = other DNA
tgtaagcctgctcaagggagc

SEQ ID NO: 30704 - DNA, 21 bp, synthetic construct
  source 1..21: mol_type = other DNA
tgcaaaccagaaatgcgtcct

SEQ ID NO: 30705 - DNA, 21 bp, synthetic construct
  source 1..21: mol_type = other DNA
cgcgatggatcatctacatgg

SEQ ID NO: 30706 - DNA, 21 bp, synthetic construct
  source 1..21: mol_type = other DNA
ggatctgaaacaagtatgtgg

SEQ ID NO: 30707 - DNA, 21 bp, synthetic construct
  source 1..21: mol_type = other DNA
aaagacgattggaacacctgg

SEQ ID NO: 30708 - DNA, 21 bp, synthetic construct
  source 1..21: mol_type = other DNA
gttgggatgcgctgccctccc

SEQ ID NO: 30709 - DNA, 21 bp, synthetic construct
  source 1..21: mol_type = other DNA
tatgtaaagagtcaatgttca

SEQ ID NO: 30710 - DNA, 21 bp, synthetic construct
  source 1..21: mol_type = other DNA
agggggggggatcgaagctgg

SEQ ID NO: 30711 - DNA, 21 bp, synthetic construct
  source 1..21: mol_type = other DNA
agagacggcagcagcacgtgg

SEQ ID NO: 30712 - DNA, 21 bp, synthetic construct
  source 1..21: mol_type = other DNA
cggacttacaccgaattccca

SEQ ID NO: 30713 - DNA, 21 bp, synthetic construct
  source 1..21: mol_type = other DNA
tatttccagggtatacatgca

SEQ ID NO: 30714 - DNA, 21 bp, synthetic construct
  source 1..21: mol_type = other DNA
tattcacgactcaatgctaac

SEQ ID NO: 30715 - DNA, 21 bp, synthetic construct
  source 1..21: mol_type = other DNA
tttttctctacgaacggggta

SEQ ID NO: 30716 - DNA, 21 bp, synthetic construct
  source 1..21: mol_type = other DNA
atgtgccgtccttgcagcgag

SEQ ID NO: 30717 - DNA, 21 bp, synthetic construct
  source 1..21: mol_type = other DNA
taccacaggatgagtcccgac

SEQ ID NO: 30718 - DNA, 21 bp, synthetic construct
  source 1..21: mol_type = other DNA
tatgcacgaacatctcacaat

SEQ ID NO: 30719 - DNA, 21 bp, synthetic construct
  source 1..21: mol_type = other DNA
tcgactcccatgtgtaaggca

SEQ ID NO: 30720 - DNA, 21 bp, synthetic construct
  source 1..21: mol_type = other DNA
tactcgcgtatcatgccaaac

SEQ ID NO: 30721 - DNA, 21 bp, synthetic construct
  source 1..21: mol_type = other DNA
ttcttcagtggtgtccaggca

SEQ ID NO: 30722 - DNA, 21 bp, synthetic construct
  source 1..21: mol_type = other DNA
cgcaatgcaaccagcgcatgg

SEQ ID NO: 30723 - DNA, 21 bp, synthetic construct
  source 1..21: mol_type = other DNA
tattcgcggcaagggccaaat

SEQ ID NO: 30724 - DNA, 21 bp, synthetic construct
  source 1..21: mol_type = other DNA
tatgctcgtgacggtccaaac

SEQ ID NO: 30725 - DNA, 21 bp, synthetic construct
  source 1..21: mol_type = other DNA
aaggacgctctcaaatgcacg

SEQ ID NO: 30726 - DNA, 21 bp, synthetic construct
  source 1..21: mol_type = other DNA
tacttttcaggacggccggag

SEQ ID NO: 30727 - DNA, 21 bp, synthetic construct
  source 1..21: mol_type = other DNA
tatttcaccgggatgattcag

SEQ ID NO: 30728 - DNA, 21 bp, synthetic construct
  source 1..21: mol_type = other DNA
gggaagggtagttgtgagcag

SEQ ID NO: 30729 - DNA, 21 bp, synthetic construct
  source 1..21: mol_type = other DNA
tacagtagggcgggcggtaat

SEQ ID NO: 30730 - DNA, 21 bp, synthetic construct
  source 1..21: mol_type = other DNA
atgagccgcgcctcgtacaac

SEQ ID NO: 30731 - DNA, 21 bp, synthetic construct
  source 1..21: mol_type = other DNA
gttgaagctactaacggggtc

SEQ ID NO: 30732 - DNA, 21 bp, synthetic construct
  source 1..21: mol_type = other DNA
gtgaatgactatctgagctat

SEQ ID NO: 30733 - DNA, 21 bp, synthetic construct
  source 1..21: mol_type = other DNA
tattttagcggaacccggacg

SEQ ID NO: 30734 - DNA, 21 bp, synthetic construct
  source 1..21: mol_type = other DNA
tactggaccaaaattccggag

SEQ ID NO: 30735 - DNA, 21 bp, synthetic construct
  source 1..21: mol_type = other DNA
tgtgcccctgactatgtggag

SEQ ID NO: 30736 - DNA, 21 bp, synthetic construct
  source 1..21: mol_type = other DNA
gtgaagacagacagatgtgca

SEQ ID NO: 30737 - DNA, 21 bp, synthetic construct
  source 1..21: mol_type = other DNA
tgcaggcccaacacccaccct

SEQ ID NO: 30738 - DNA, 21 bp, synthetic construct
  source 1..21: mol_type = other DNA
tattcaagaattagcggtaac

SEQ ID NO: 30739 - DNA, 21 bp, synthetic construct
  source 1..21: mol_type = other DNA
tacgctcggtctaatttcaat

SEQ ID NO: 30740 - DNA, 21 bp, synthetic construct
  source 1..21: mol_type = other DNA
ttctttcacgggaaaattgac

SEQ ID NO: 30741 - DNA, 21 bp, synthetic construct
  source 1..21: mol_type = other DNA
tacttcgaaggtaggattgat

SEQ ID NO: 30742 - DNA, 21 bp, synthetic construct
  source 1..21: mol_type = other DNA
tactttagtggcatccatacg

SEQ ID NO: 30743 - DNA, 21 bp, synthetic construct
  source 1..21: mol_type = other DNA
tattggtcgaaaattgcggag

SEQ ID NO: 30744 - DNA, 21 bp, synthetic construct
  source 1..21: mol_type = other DNA
tgtaaggacgattccagggcg

SEQ ID NO: 30745 - DNA, 21 bp, synthetic construct
  source 1..21: mol_type = other DNA
aggacttatgatgcattcgcg

SEQ ID NO: 30746 - DNA, 21 bp, synthetic construct
  source 1..21: mol_type = other DNA
agggacgattatcagtactat

SEQ ID NO: 30747 - DNA, 21 bp, synthetic construct
  source 1..21: mol_type = other DNA
tacttaaagtcaaccaacaac

SEQ ID NO: 30748 - DNA, 21 bp, synthetic construct
  source 1..21: mol_type = other DNA
tatgctaggcagggcttcaat

SEQ ID NO: 30749 - DNA, 21 bp, synthetic construct
  source 1..21: mol_type = other DNA
tacttccaaggcgtaagagag

SEQ ID NO: 30750 - DNA, 21 bp, synthetic construct
  source 1..21: mol_type = other DNA
cgcactcccacttgcgcggga

SEQ ID NO: 30751 - DNA, 21 bp, synthetic construct
  source 1..21: mol_type = other DNA
ttgtcaagggtgagcgccgat

SEQ ID NO: 30752 - DNA, 21 bp, synthetic construct
  source 1..21: mol_type = other DNA
tgcgccccgtacctcgtggag

SEQ ID NO: 30753 - DNA, 21 bp, synthetic construct
  source 1..21: mol_type = other DNA
tatttcaccggcatgacggca

SEQ ID NO: 30754 - DNA, 21 bp, synthetic construct
  source 1..21: mol_type = other DNA
aagtacgcgttctcgacggaa

SEQ ID NO: 30755 - DNA, 21 bp, synthetic construct
  source 1..21: mol_type = other DNA
tacgcgcgcgggggtttcaat

SEQ ID NO: 30756 - DNA, 21 bp, synthetic construct
  source 1..21: mol_type = other DNA
tatactcgactcgactttgac

SEQ ID NO: 30757 - DNA, 21 bp, synthetic construct
  source 1..21: mol_type = other DNA
gacatgcagagcaatctctgg

SEQ ID NO: 30758 - DNA, 21 bp, synthetic construct
  source 1..21: mol_type = other DNA
ctcagcaaagtcggattcgac

SEQ ID NO: 30759 - DNA, 21 bp, synthetic construct
  source 1..21: mol_type = other DNA
atcaagtcgacgaacggagtt

SEQ ID NO: 30760 - DNA, 21 bp, synthetic construct
  source 1..21: mol_type = other DNA
tactggcaagggataccggcg

SEQ ID NO: 30761 - DNA, 21 bp, synthetic construct
  source 1..21: mol_type = other DNA
tactcgcgaactgggtacaat

SEQ ID NO: 30762 - DNA, 21 bp, synthetic construct
  source 1..21: mol_type = other DNA
tacagcaagcacggacacaac

SEQ ID NO: 30763 - DNA, 21 bp, synthetic construct
  source 1..21: mol_type = other DNA
tattttcatggaaaaattgta

SEQ ID NO: 30764 - DNA, 21 bp, synthetic construct
  source 1..21: mol_type = other DNA
tgggctcggggctgcgacaac

SEQ ID NO: 30765 - DNA, 21 bp, synthetic construct
  source 1..21: mol_type = other DNA
ctggctcgaagcggatgggat

SEQ ID NO: 30766 - DNA, 21 bp, synthetic construct
  source 1..21: mol_type = other DNA
tattggacgggtagacaggaa

SEQ ID NO: 30767 - DNA, 21 bp, synthetic construct
  source 1..21: mol_type = other DNA
tattggactggtaagccagag

SEQ ID NO: 30768 - DNA, 21 bp, synthetic construct
  source 1..21: mol_type = other DNA
atcggcagcactaacggcgtc

SEQ ID NO: 30769 - DNA, 21 bp, synthetic construct
  source 1..21: mol_type = other DNA
tactggaccgggaaagccgat

SEQ ID NO: 30770 - DNA, 21 bp, synthetic construct
  source 1..21: mol_type = other DNA
tattttcaaggtaggttggag

SEQ ID NO: 30771 - DNA, 21 bp, synthetic construct
  source 1..21: mol_type = other DNA
tacgcgaggcagggcattaac

SEQ ID NO: 30772 - DNA, 21 bp, synthetic construct
  source 1..21: mol_type = other DNA
tgctcgaaggaacacattcca

SEQ ID NO: 30773 - DNA, 21 bp, synthetic construct
  source 1..21: mol_type = other DNA
tacttttccaaacaaatcgca

SEQ ID NO: 30774 - DNA, 21 bp, synthetic construct
  source 1..21: mol_type = other DNA
ggtggagacgggaaccattac

SEQ ID NO: 30775 - DNA, 21 bp, synthetic construct
  source 1..21: mol_type = other DNA
gtgtcggagtttcagacgtat

SEQ ID NO: 30776 - DNA, 21 bp, synthetic construct
  source 1..21: mol_type = other DNA
ttagcgcgccttgggtgggac

SEQ ID NO: 30777 - DNA, 21 bp, synthetic construct
  source 1..21: mol_type = other DNA
tatcacaagcatgggccgcag

SEQ ID NO: 30778 - DNA, 21 bp, synthetic construct
  source 1..21: mol_type = other DNA
tggtcgcctatgtgtaaagca

SEQ ID NO: 30779 - DNA, 21 bp, synthetic construct
  source 1..21: mol_type = other DNA
tatgctcgtaccaacttgaat

SEQ ID NO: 30780 - DNA, 21 bp, synthetic construct
  source 1..21: mol_type = other DNA
agattacctgatgtgtacccc

SEQ ID NO: 30781 - DNA, 21 bp, synthetic construct
  source 1..21: mol_type = other DNA
tattacactggtatcccacac

SEQ ID NO: 30782 - DNA, 21 bp, synthetic construct
  source 1..21: mol_type = other DNA
cttgctaagagtggttgcaac

SEQ ID NO: 30783 - DNA, 21 bp, synthetic construct
  source 1..21: mol_type = other DNA
ttatcgcgggcaggcgaaaat

SEQ ID NO: 30784 - DNA, 21 bp, synthetic construct
  source 1..21: mol_type = other DNA
cgcacctacgatgccttcgca

SEQ ID NO: 30785 - DNA, 21 bp, synthetic construct
  source 1..21: mol_type = other DNA
tacttttccggacgcgcgcag

SEQ ID NO: 30786 - DNA, 21 bp, synthetic construct
  source 1..21: mol_type = other DNA
ggaggtgagttttcgcgctgg

SEQ ID NO: 30787 - DNA, 21 bp, synthetic construct
  source 1..21: mol_type = other DNA
tgtgtcagcgtggggagagct

SEQ ID NO: 30788 - DNA, 21 bp, synthetic construct
  source 1..21: mol_type = other DNA
caaaacacaaagtgggcatgt

SEQ ID NO: 30789 - DNA, 21 bp, synthetic construct
  source 1..21: mol_type = other DNA
aagttcgacaactgtggcagt

SEQ ID NO: 30790 - DNA, 21 bp, synthetic construct
  source 1..21: mol_type = other DNA
atggacgggacgagcctttgg

SEQ ID NO: 30791 - DNA, 21 bp, synthetic construct
  source 1..21: mol_type = other DNA
tattgggagggtgtcagagca

SEQ ID NO: 30792 - DNA, 21 bp, synthetic construct
  source 1..21: mol_type = other DNA
tattggacggggatgcaagat

SEQ ID NO: 30793 - DNA, 21 bp, synthetic construct
  source 1..21: mol_type = other DNA
tacgcacgtacaaatgcaaat

SEQ ID NO: 30794 - DNA, 21 bp, synthetic construct
  source 1..21: mol_type = other DNA
attaatagcacaaacgggata

SEQ ID NO: 30795 - DNA, 21 bp, synthetic construct
  source 1..21: mol_type = other DNA
gttggtagttgcgcacgagcc

SEQ ID NO: 30796 - DNA, 21 bp, synthetic construct
  source 1..21: mol_type = other DNA
aaggacgactggagctcatgg

SEQ ID NO: 30797 - DNA, 21 bp, synthetic construct
  source 1..21: mol_type = other DNA
tgtgaaagcgtctgcttgtat

SEQ ID NO: 30798 - DNA, 21 bp, synthetic construct
  source 1..21: mol_type = other DNA
tattctcggatagggtgtaac

SEQ ID NO: 30799 - DNA, 21 bp, synthetic construct
  source 1..21: mol_type = other DNA
tattacaccggaagattagat

SEQ ID NO: 30800 - DNA, 21 bp, synthetic construct
  source 1..21: mol_type = other DNA
tacttctctggccagaataat

SEQ ID NO: 30801 - DNA, 21 bp, synthetic construct
  source 1..21: mol_type = other DNA
tacgccaaggggggggcaaac

SEQ ID NO: 30802 - DNA, 21 bp, synthetic construct
  source 1..21: mol_type = other DNA
tactttgccggtcaaatagca

SEQ ID NO: 30803 - DNA, 21 bp, synthetic construct
  source 1..21: mol_type = other DNA
aggacttacgactcatacgcc

SEQ ID NO: 30804 - DNA, 21 bp, synthetic construct
  source 1..21: mol_type = other DNA
ttcttcactggcaccgtcgac

SEQ ID NO: 30805 - DNA, 21 bp, synthetic construct
  source 1..21: mol_type = other DNA
gacttagaatcgtataagtgg

SEQ ID NO: 30806 - DNA, 21 bp, synthetic construct
  source 1..21: mol_type = other DNA
aacatggaggatagaaaatgg

SEQ ID NO: 30807 - DNA, 21 bp, synthetic construct
  source 1..21: mol_type = other DNA
catctagcaagtcacgactgg

SEQ ID NO: 30808 - DNA, 21 bp, synthetic construct
  source 1..21: mol_type = other DNA
tatagcagacagaacgacaat

SEQ ID NO: 30809 - DNA, 21 bp, synthetic construct
  source 1..21: mol_type = other DNA
ggaggaagcacttcaacctgg

SEQ ID NO: 30810 - DNA, 21 bp, synthetic construct
  source 1..21: mol_type = other DNA
tttttcactggaagactggac

SEQ ID NO: 30811 - DNA, 21 bp, synthetic construct
  source 1..21: mol_type = other DNA
agaatggaggtgggggattgg

SEQ ID NO: 30812 - DNA, 21 bp, synthetic construct
  source 1..21: mol_type = other DNA
cgcacctacacagagttccct

SEQ ID NO: 30813 - DNA, 21 bp, synthetic construct
  source 1..21: mol_type = other DNA
tactcacggactggtcagaat

SEQ ID NO: 30814 - DNA, 21 bp, synthetic construct
  source 1..21: mol_type = other DNA
tgtaagccgcgctcaatagag

SEQ ID NO: 30815 - DNA, 21 bp, synthetic construct
  source 1..21: mol_type = other DNA
tactcaaggatcaacgtaaat

SEQ ID NO: 30816 - DNA, 21 bp, synthetic construct
  source 1..21: mol_type = other DNA
ataatgcaggaccgttcctgg

SEQ ID NO: 30817 - DNA, 21 bp, synthetic construct
  source 1..21: mol_type = other DNA
aggctggattcgcgcgagtgg

SEQ ID NO: 30818 - DNA, 21 bp, synthetic construct
  source 1..21: mol_type = other DNA
tgtactagtaagacgggaaat

SEQ ID NO: 30819 - DNA, 21 bp, synthetic construct
  source 1..21: mol_type = other DNA
tatgcgcgtcaaggaacgaat

SEQ ID NO: 30820 - DNA, 21 bp, synthetic construct
  source 1..21: mol_type = other DNA
tatattaaaagtgactaccaa

SEQ ID NO: 30821 - DNA, 21 bp, synthetic construct
  source 1..21: mol_type = other DNA
atgctcactggcaagtgcgaa

SEQ ID NO: 30822 - DNA, 21 bp, synthetic construct
  source 1..21: mol_type = other DNA
ctcgccaaaaacggagtaaac

SEQ ID NO: 30823 - DNA, 21 bp, synthetic construct
  source 1..21: mol_type = other DNA
tactggcatggcgttactgaa

SEQ ID NO: 30824 - DNA, 21 bp, synthetic construct
  source 1..21: mol_type = other DNA
gtgatgagcagcaatggcgta

SEQ ID NO: 30825 - DNA, 21 bp, synthetic construct
  source 1..21: mol_type = other DNA
tacgcgaagaacggaataaac

SEQ ID NO: 30826 - DNA, 21 bp, synthetic construct
  source 1..21: mol_type = other DNA
ctgatttcaggagatggccca

SEQ ID NO: 30827 - DNA, 21 bp, synthetic construct
  source 1..21: mol_type = other DNA
ttcagcagggcgggtcacaac

SEQ ID NO: 30828 - DNA, 21 bp, synthetic construct
  source 1..21: mol_type = other DNA
tgcgaacgtaaaactgatgcc

SEQ ID NO: 30829 - DNA, 21 bp, synthetic construct
  source 1..21: mol_type = other DNA
tactctcggaatggtccgaac

SEQ ID NO: 30830 - DNA, 21 bp, synthetic construct
  source 1..21: mol_type = other DNA
aacggaaatgcgtgtagacca

SEQ ID NO: 30831 - DNA, 21 bp, synthetic construct
  source 1..21: mol_type = other DNA
tgtgttgcgactaaagaccgc

SEQ ID NO: 30832 - DNA, 21 bp, synthetic construct
  source 1..21: mol_type = other DNA
tgcgctccgacttacagggag

SEQ ID NO: 30833 - DNA, 21 bp, synthetic construct
  source 1..21: mol_type = other DNA
tgtaaaagcgaacatgtgcgc

SEQ ID NO: 30834 - DNA, 21 bp, synthetic construct
  source 1..21: mol_type = other DNA
cggccggtgtgtccaacggga

SEQ ID NO: 30835 - DNA, 21 bp, synthetic construct
  source 1..21: mol_type = other DNA
aaggacgggtataccgtgtat

SEQ ID NO: 30836 - DNA, 21 bp, synthetic construct
  source 1..21: mol_type = other DNA
aactgcaaaccgtgctttgat

SEQ ID NO: 30837 - DNA, 21 bp, synthetic construct
  source 1..21: mol_type = other DNA
tactcccgactaaacgtaaac

SEQ ID NO: 30838 - DNA, 21 bp, synthetic construct
  source 1..21: mol_type = other DNA
gtgacagacacaaacggcgtg

SEQ ID NO: 30839 - DNA, 21 bp, synthetic construct
  source 1..21: mol_type = other DNA
tgtagagacgtaaaacagggc

SEQ ID NO: 30840 - DNA, 21 bp, synthetic construct
  source 1..21: mol_type = other DNA
tatgttaggtccgggccagac

SEQ ID NO: 30841 - DNA, 21 bp, synthetic construct
  source 1..21: mol_type = other DNA
tttagccgcttagggcagaac

SEQ ID NO: 30842 - DNA, 21 bp, synthetic construct
  source 1..21: mol_type = other DNA
ttctttacaggctttatagac

SEQ ID NO: 30843 - DNA, 21 bp, synthetic construct
  source 1..21: mol_type = other DNA
cgcgaggatatggtttcgtgg

SEQ ID NO: 30844 - DNA, 21 bp, synthetic construct
  source 1..21: mol_type = other DNA
tatgcgagactagggtcaaat

SEQ ID NO: 30845 - DNA, 21 bp, synthetic construct
  source 1..21: mol_type = other DNA
tgtggtcgggctggcagagat

SEQ ID NO: 30846 - DNA, 21 bp, synthetic construct
  source 1..21: mol_type = other DNA
ggctcgaacacgagtcgttgg

SEQ ID NO: 30847 - DNA, 21 bp, synthetic construct
  source 1..21: mol_type = other DNA
ctccatcgcgacggcattaac

SEQ ID NO: 30848 - DNA, 21 bp, synthetic construct
  source 1..21: mol_type = other DNA
tacagtcgagtgaatataaac

SEQ ID NO: 30849 - DNA, 21 bp, synthetic construct
  source 1..21: mol_type = other DNA
ctcatgaatgacgcttacgtt

SEQ ID NO: 30850 - DNA, 21 bp, synthetic construct
  source 1..21: mol_type = other DNA
cgtaccttagaaacgttcccg

SEQ ID NO: 30851 - DNA, 21 bp, synthetic construct
  source 1..21: mol_type = other DNA
ttcttcagtggagtccgtgac

SEQ ID NO: 30852 - DNA, 21 bp, synthetic construct
  source 1..21: mol_type = other DNA
tacttctctggcaaagctttg

SEQ ID NO: 30853 - DNA, 21 bp, synthetic construct
  source 1..21: mol_type = other DNA
tattattctggacaaaaagag

SEQ ID NO: 30854 - DNA, 21 bp, synthetic construct
  source 1..21: mol_type = other DNA
tacagtaggcaaaacgagaac

SEQ ID NO: 30855 - DNA, 21 bp, synthetic construct
  source 1..21: mol_type = other DNA
tactggagtggcaccaacgcg

SEQ ID NO: 30856 - DNA, 21 bp, synthetic construct
  source 1..21: mol_type = other DNA
tattctcgcattggtccatcg

SEQ ID NO: 30857 - DNA, 21 bp, synthetic construct
  source 1..21: mol_type = other DNA
gcgggtgcctgtgatgccagc

SEQ ID NO: 30858 - DNA, 21 bp, synthetic construct
  source 1..21: mol_type = other DNA
aaagacgattatacctctttc

SEQ ID NO: 30859 - DNA, 21 bp, synthetic construct
  source 1..21: mol_type = other DNA
ttttgtcgaccctgtcctgta

SEQ ID NO: 30860 - DNA, 21 bp, synthetic construct
  source 1..21: mol_type = other DNA
tactatacgggtgtgcgtgat

SEQ ID NO: 30861 - DNA, 21 bp, synthetic construct
  source 1..21: mol_type = other DNA
tgtaagcgccagagtcctgag

SEQ ID NO: 30862 - DNA, 21 bp, synthetic construct
  source 1..21: mol_type = other DNA
tatcacaagggaaataataat

SEQ ID NO: 30863 - DNA, 21 bp, synthetic construct
  source 1..21: mol_type = other DNA
tacagccgtatgggacagaac

SEQ ID NO: 30864 - DNA, 21 bp, synthetic construct
  source 1..21: mol_type = other DNA
ccctatgctcgatccccctct

SEQ ID NO: 30865 - DNA, 21 bp, synthetic construct
  source 1..21: mol_type = other DNA
tactggagtaaagttccggac

SEQ ID NO: 30866 - DNA, 21 bp, synthetic construct
  source 1..21: mol_type = other DNA
tgcgccccgtacttacatgca

SEQ ID NO: 30867 - DNA, 21 bp, synthetic construct
  source 1..21: mol_type = other DNA
ctgtgccgcccctgttttgag

SEQ ID NO: 30868 - DNA, 21 bp, synthetic construct
  source 1..21: mol_type = other DNA
ggtgatgagtggaaaacttgg

SEQ ID NO: 30869 - DNA, 21 bp, synthetic construct
  source 1..21: mol_type = other DNA
tgtaagaaacttggaccagac

SEQ ID NO: 30870 - DNA, 21 bp, synthetic construct
  source 1..21: mol_type = other DNA
tacgtccgtaacgacccgaat

SEQ ID NO: 30871 - DNA, 21 bp, synthetic construct
  source 1..21: mol_type = other DNA
tactggcaaggaaaaatcgcg

SEQ ID NO: 30872 - DNA, 21 bp, synthetic construct
  source 1..21: mol_type = other DNA
atgttcgatggaacacgcgcg

SEQ ID NO: 30873 - DNA, 21 bp, synthetic construct
  source 1..21: mol_type = other DNA
tggttctctgggaagattgac

SEQ ID NO: 30874 - DNA, 21 bp, synthetic construct
  source 1..21: mol_type = other DNA
ttatgtaagcccccattaact

SEQ ID NO: 30875 - DNA, 21 bp, synthetic construct
  source 1..21: mol_type = other DNA
accccagactcggtcaggtgg

SEQ ID NO: 30876 - DNA, 21 bp, synthetic construct
  source 1..21: mol_type = other DNA
ttcttctcaggaattacggaa

SEQ ID NO: 30877 - DNA, 21 bp, synthetic construct
  source 1..21: mol_type = other DNA
tggactcccatgtgccaggct

SEQ ID NO: 30878 - DNA, 21 bp, synthetic construct
  source 1..21: mol_type = other DNA
tgcagaccagatgtcgttggg

SEQ ID NO: 30879 - DNA, 21 bp, synthetic construct
  source 1..21: mol_type = other DNA
catgaaagtactaacggaatt

SEQ ID NO: 30880 - DNA, 21 bp, synthetic construct
  source 1..21: mol_type = other DNA
tgcaaaccctttactcgtgag

SEQ ID NO: 30881 - DNA, 21 bp, synthetic construct
  source 1..21: mol_type = other DNA
tactttacaggaagcgttgat

SEQ ID NO: 30882 - DNA, 21 bp, synthetic construct
  source 1..21: mol_type = other DNA
acttcggagtgtgtcaaatac

SEQ ID NO: 30883 - DNA, 21 bp, synthetic construct
  source 1..21: mol_type = other DNA
gctccggagtcggtcagatgg

SEQ ID NO: 30884 - DNA, 21 bp, synthetic construct
  source 1..21: mol_type = other DNA
ggcagcgaaacgagtaagtgg

SEQ ID NO: 30885 - DNA, 21 bp, synthetic construct
  source 1..21: mol_type = other DNA
tattggacgggcaagcaagac

SEQ ID NO: 30886 - DNA, 21 bp, synthetic construct
  source 1..21: mol_type = other DNA
aggacatacgatgtatatcct

SEQ ID NO: 30887 - DNA, 21 bp, synthetic construct
  source 1..21: mol_type = other DNA
tacagccgggtaaatatgaat

SEQ ID NO: 30888 - DNA, 21 bp, synthetic construct
  source 1..21: mol_type = other DNA
tgggttagatccgacgttaag

SEQ ID NO: 30889 - DNA, 21 bp, synthetic construct
  source 1..21: mol_type = other DNA
aggtcagagttcacgtcgtac

SEQ ID NO: 30890 - DNA, 21 bp, synthetic construct
  source 1..21: mol_type = other DNA
tgtgagtcagtttgcctctac

SEQ ID NO: 30891 - DNA, 21 bp, synthetic construct
  source 1..21: mol_type = other DNA
cgtgacggaagcagcgggtgg

SEQ ID NO: 30892 - DNA, 21 bp, synthetic construct
  source 1..21: mol_type = other DNA
tactggtcgggccagagggaa

SEQ ID NO: 30893 - DNA, 21 bp, synthetic construct
  source 1..21: mol_type = other DNA
tactcgaaacataacatgaat

SEQ ID NO: 30894 - DNA, 21 bp, synthetic construct
  source 1..21: mol_type = other DNA
attcctagttccgttaggtgg

SEQ ID NO: 30895 - DNA, 21 bp, synthetic construct
  source 1..21: mol_type = other DNA
tactttagcggtgttagccat

SEQ ID NO: 30896 - DNA, 21 bp, synthetic construct
  source 1..21: mol_type = other DNA
gcgcctgataccgtccgatgg

SEQ ID NO: 30897 - DNA, 21 bp, synthetic construct
  source 1..21: mol_type = other DNA
tggtggagcggacagaaagac

SEQ ID NO: 30898 - DNA, 21 bp, synthetic construct
  source 1..21: mol_type = other DNA
tatgcgcgcaatggaatgaac

SEQ ID NO: 30899 - DNA, 21 bp, synthetic construct
  source 1..21: mol_type = other DNA
agaaacggcactagtgcgtgg

SEQ ID NO: 30900 - DNA, 21 bp, synthetic construct
  source 1..21: mol_type = other DNA
gtgggctacgaccggggctgg

SEQ ID NO: 30901 - DNA, 21 bp, synthetic construct
  source 1..21: mol_type = other DNA
tacgcaaagcaaaattataac

SEQ ID NO: 30902 - DNA, 21 bp, synthetic construct
  source 1..21: mol_type = other DNA
ttcccgggcagcatttgcgtc

SEQ ID NO: 30903 - DNA, 21 bp, synthetic construct
  source 1..21: mol_type = other DNA
tacgtcagaagcgatgatagt

SEQ ID NO: 30904 - DNA, 21 bp, synthetic construct
  source 1..21: mol_type = other DNA
agcggcgccaccagtaactgg

SEQ ID NO: 30905 - DNA, 21 bp, synthetic construct
  source 1..21: mol_type = other DNA
tgtaaaccaggcagcccgcac

SEQ ID NO: 30906 - DNA, 21 bp, synthetic construct
  source 1..21: mol_type = other DNA
gaagccttgaatggctgggat

SEQ ID NO: 30907 - DNA, 21 bp, synthetic construct
  source 1..21: mol_type = other DNA
tatagtaaatggaacgcgaat

SEQ ID NO: 30908 - DNA, 21 bp, synthetic construct
  source 1..21: mol_type = other DNA
tacagtaggcagaacgccaat

SEQ ID NO: 30909 - DNA, 21 bp, synthetic construct
  source 1..21: mol_type = other DNA
gagaatggtggtggaagatgg

SEQ ID NO: 30910 - DNA, 21 bp, synthetic construct
  source 1..21: mol_type = other DNA
tattggtcaggaaccacgtct

SEQ ID NO: 30911 - DNA, 21 bp, synthetic construct
  source 1..21: mol_type = other DNA
gggtccaccgtctgtaaggac

SEQ ID NO: 30912 - DNA, 21 bp, synthetic construct
  source 1..21: mol_type = other DNA
tactttactggtatgaccgcg

SEQ ID NO: 30913 - DNA, 21 bp, synthetic construct
  source 1..21: mol_type = other DNA
ttacaccgattgcatcctctt

SEQ ID NO: 30914 - DNA, 21 bp, synthetic construct
  source 1..21: mol_type = other DNA
tgcgctccaagctaccgggaa

SEQ ID NO: 30915 - DNA, 21 bp, synthetic construct
  source 1..21: mol_type = other DNA
agagagtatgactcatttccc

SEQ ID NO: 30916 - DNA, 21 bp, synthetic construct
  source 1..21: mol_type = other DNA
aaggacgatttcatgacgtac

SEQ ID NO: 30917 - DNA, 21 bp, synthetic construct
  source 1..21: mol_type = other DNA
tatgcacgtttgaatataaac

SEQ ID NO: 30918 - DNA, 21 bp, synthetic construct
  source 1..21: mol_type = other DNA
tatttttctggtgtgatgcag

SEQ ID NO: 30919 - DNA, 21 bp, synthetic construct
  source 1..21: mol_type = other DNA
atgacaggcgggtcatgtctc

SEQ ID NO: 30920 - DNA, 21 bp, synthetic construct
  source 1..21: mol_type = other DNA
cgaaatgaattccaaagctac

SEQ ID NO: 30921 - DNA, 21 bp, synthetic construct
  source 1..21: mol_type = other DNA
ttcgactcgaccaatggtaga

SEQ ID NO: 30922 - DNA, 21 bp, synthetic construct
  source 1..21: mol_type = other DNA
tttttctcagggagagttgaa

SEQ ID NO: 30923 - DNA, 21 bp, synthetic construct
  source 1..21: mol_type = other DNA
agggagcagacggttcactgg

SEQ ID NO: 30924 - DNA, 21 bp, synthetic construct
  source 1..21: mol_type = other DNA
tacagccgaatcggaccgagt

SEQ ID NO: 30925 - DNA, 21 bp, synthetic construct
  source 1..21: mol_type = other DNA
tggctcaaacgacaggattgt

SEQ ID NO: 30926 - DNA, 21 bp, synthetic construct
  source 1..21: mol_type = other DNA
gatttaagggacgtcaaatgg

SEQ ID NO: 30927 - DNA, 21 bp, synthetic construct
  source 1..21: mol_type = other DNA
ggctgtcgcatgggagatata

SEQ ID NO: 30928 - DNA, 21 bp, synthetic construct
  source 1..21: mol_type = other DNA
tggtgggcaggcgtaaaaggt

SEQ ID NO: 30929 - DNA, 21 bp, synthetic construct
  source 1..21: mol_type = other DNA
tattataccgggatgcgggac

SEQ ID NO: 30930 - DNA, 21 bp, synthetic construct
  source 1..21: mol_type = other DNA
tactcgaagtataacttcaac

SEQ ID NO: 30931 - DNA, 21 bp, synthetic construct
  source 1..21: mol_type = other DNA
tattggtcgcaagtaaaagaa

SEQ ID NO: 30932 - DNA, 21 bp, synthetic construct
  source 1..21: mol_type = other DNA
ttttttagtggagttcaagct

SEQ ID NO: 30933 - DNA, 21 bp, synthetic construct
  source 1..21: mol_type = other DNA
tactttgcaggtcaggtcgcc

SEQ ID NO: 30934 - DNA, 21 bp, synthetic construct
  source 1..21: mol_type = other DNA
ggtttacccactcgttgtcct

SEQ ID NO: 30935 - DNA, 21 bp, synthetic construct
  source 1..21: mol_type = other DNA
tttgaagcccctaatagctgg

SEQ ID NO: 30936 - DNA, 21 bp, synthetic construct
  source 1..21: mol_type = other DNA
ctgtcgcgcacaggtgataac

SEQ ID NO: 30937 - DNA, 21 bp, synthetic construct
  source 1..21: mol_type = other DNA
gctacggaaacagggcctaaa

SEQ ID NO: 30938 - DNA, 21 bp, synthetic construct
  source 1..21: mol_type = other DNA
tattcatctacgaatggcgtg

SEQ ID NO: 30939 - DNA, 21 bp, synthetic construct
  source 1..21: mol_type = other DNA
tacttctcgggaatccctatg

SEQ ID NO: 30940 - DNA, 21 bp, synthetic construct
  source 1..21: mol_type = other DNA
gcgccgggcgacataagatgg

SEQ ID NO: 30941 - DNA, 21 bp, synthetic construct
  source 1..21: mol_type = other DNA
tatttctcggcagttcgtgaa

SEQ ID NO: 30942 - DNA, 21 bp, synthetic construct
  source 1..21: mol_type = other DNA
cgtagtgctgacgcctttccg

SEQ ID NO: 30943 - DNA, 21 bp, synthetic construct
  source 1..21: mol_type = other DNA
ggacttgccgaccgctcatgg

SEQ ID NO: 30944 - DNA, 21 bp, synthetic construct
  source 1..21: mol_type = other DNA
caagacgaatatttgagttgg

SEQ ID NO: 30945 - DNA, 21 bp, synthetic construct
  source 1..21: mol_type = other DNA
tacgcgaagaacggggtcaac

SEQ ID NO: 30946 - DNA, 21 bp, synthetic construct
  source 1..21: mol_type = other DNA
ccgtacgcccgcagcgtggac

SEQ ID NO: 30947 - DNA, 21 bp, synthetic construct
  source 1..21: mol_type = other DNA
atgttaagcgatcgtctgtgg

SEQ ID NO: 30948 - DNA, 21 bp, synthetic construct
  source 1..21: mol_type = other DNA
aaagacgactatacacgtttc

SEQ ID NO: 30949 - DNA, 21 bp, synthetic construct
  source 1..21: mol_type = other DNA
agagactcaacacacggtgtg

SEQ ID NO: 30950 - DNA, 21 bp, synthetic construct
  source 1..21: mol_type = other DNA
tatttcactggtcaacacaat

SEQ ID NO: 30951 - DNA, 21 bp, synthetic construct
  source 1..21: mol_type = other DNA
tactcacggatcgggccaatg

SEQ ID NO: 30952 - DNA, 21 bp, synthetic construct
  source 1..21: mol_type = other DNA
cgcgacgaggggacctattgg

SEQ ID NO: 30953 - DNA, 21 bp, synthetic construct
  source 1..21: mol_type = other DNA
tatagtcgcatgggtaacaat

SEQ ID NO: 30954 - DNA, 21 bp, synthetic construct
  source 1..21: mol_type = other DNA
gctttttgtaccaacaagact

SEQ ID NO: 30955 - DNA, 21 bp, synthetic construct
  source 1..21: mol_type = other DNA
tattcgcgattaaataacaat

SEQ ID NO: 30956 - DNA, 21 bp, synthetic construct
  source 1..21: mol_type = other DNA
tgcgctaaggactacagagag

SEQ ID NO: 30957 - DNA, 21 bp, synthetic construct
  source 1..21: mol_type = other DNA
ggcgttcctggtgtaatgtgg

SEQ ID NO: 30958 - DNA, 21 bp, synthetic construct
  source 1..21: mol_type = other DNA
tattggtcagggaaaaccgaa

SEQ ID NO: 30959 - DNA, 21 bp, synthetic construct
  source 1..21: mol_type = other DNA
tgcaaactaccgaagagtgag

SEQ ID NO: 30960 - DNA, 21 bp, synthetic construct
  source 1..21: mol_type = other DNA
tgtggtaaaggggggcctgta

SEQ ID NO: 30961 - DNA, 21 bp, synthetic construct
  source 1..21: mol_type = other DNA
caaatgcaagaccgttcatgg

SEQ ID NO: 30962 - DNA, 21 bp, synthetic construct
  source 1..21: mol_type = other DNA
atgtgggatggaacggaagcc

SEQ ID NO: 30963 - DNA, 21 bp, synthetic construct
  source 1..21: mol_type = other DNA
gtgcctgagcgctgtcctaaa

SEQ ID NO: 30964 - DNA, 21 bp, synthetic construct
  source 1..21: mol_type = other DNA
tattggaccggaaaacatgag

SEQ ID NO: 30965 - DNA, 21 bp, synthetic construct
  source 1..21: mol_type = other DNA
tattcaaagatgggaaagaac

SEQ ID NO: 30966 - DNA, 21 bp, synthetic construct
  source 1..21: mol_type = other DNA
tactatacggggaggctcgag

SEQ ID NO: 30967 - DNA, 21 bp, synthetic construct
  source 1..21: mol_type = other DNA
attgacagtacgaatggaatc

SEQ ID NO: 30968 - DNA, 21 bp, synthetic construct
  source 1..21: mol_type = other DNA
tatttcgaggggcgtaaagag

SEQ ID NO: 30969 - DNA, 21 bp, synthetic construct
  source 1..21: mol_type = other DNA
tgcaaatcggatagtaaggta

SEQ ID NO: 30970 - DNA, 21 bp, synthetic construct
  source 1..21: mol_type = other DNA
cgagagatgtcggtatatcct

SEQ ID NO: 30971 - DNA, 21 bp, synthetic construct
  source 1..21: mol_type = other DNA
tactctcggagcaacctgaat

SEQ ID NO: 30972 - DNA, 21 bp, synthetic construct
  source 1..21: mol_type = other DNA
taccataaaaataatgcaaac

SEQ ID NO: 30973 - DNA, 21 bp, synthetic construct
  source 1..21: mol_type = other DNA
aagttggatgttggaaattgg

SEQ ID NO: 30974 - DNA, 21 bp, synthetic construct
  source 1..21: mol_type = other DNA
tattcacgaaccggcactaac

SEQ ID NO: 30975 - DNA, 21 bp, synthetic construct
  source 1..21: mol_type = other DNA
ggggggccggggagtgtatgg

SEQ ID NO: 30976 - DNA, 21 bp, synthetic construct
  source 1..21: mol_type = other DNA
ttatcgagagccagcatcgat

SEQ ID NO: 30977 - DNA, 21 bp, synthetic construct
  source 1..21: mol_type = other DNA
tatagccggtcgggtgacaat

SEQ ID NO: 30978 - DNA, 21 bp, synthetic construct
  source 1..21: mol_type = other DNA
tactggtcggggaaacatgag

SEQ ID NO: 30979 - DNA, 21 bp, synthetic construct
  source 1..21: mol_type = other DNA
tacttccatggacaattagaa

SEQ ID NO: 30980 - DNA, 21 bp, synthetic construct
  source 1..21: mol_type = other DNA
tacgtccgaagcggccccgac

SEQ ID NO: 30981 - DNA, 21 bp, synthetic construct
  source 1..21: mol_type = other DNA
tattatagtggagtcatcatg

SEQ ID NO: 30982 - DNA, 21 bp, synthetic construct
  source 1..21: mol_type = other DNA
tttttcactggccgattggac

SEQ ID NO: 30983 - DNA, 21 bp, synthetic construct
  source 1..21: mol_type = other DNA
agggatgagtttcaaacctac

SEQ ID NO: 30984 - DNA, 21 bp, synthetic construct
  source 1..21: mol_type = other DNA
gcggggtatgatagacattgg

SEQ ID NO: 30985 - DNA, 21 bp, synthetic construct
  source 1..21: mol_type = other DNA
gatctgcgaagttcagattgg

SEQ ID NO: 30986 - DNA, 21 bp, synthetic construct
  source 1..21: mol_type = other DNA
cgcaatgagtttaccagctat

SEQ ID NO: 30987 - DNA, 21 bp, synthetic construct
  source 1..21: mol_type = other DNA
aacggaacgaacggacgctgg

SEQ ID NO: 30988 - DNA, 21 bp, synthetic construct
  source 1..21: mol_type = other DNA
atagctcggaccgggtgggac

SEQ ID NO: 30989 - DNA, 21 bp, synthetic construct
  source 1..21: mol_type = other DNA
atcgacggcaaagctgggtgt

SEQ ID NO: 30990 - DNA, 21 bp, synthetic construct
  source 1..21: mol_type = other DNA
tgtaagggcgaatcaagaagt

SEQ ID NO: 30991 - DNA, 21 bp, synthetic construct
  source 1..21: mol_type = other DNA
tatttcacaggcatgactgca

SEQ ID NO: 30992 - DNA, 21 bp, synthetic construct
  source 1..21: mol_type = other DNA
agcttcagtaccaatggagtc

SEQ ID NO: 30993 - DNA, 21 bp, synthetic construct
  source 1..21: mol_type = other DNA
tactggagtcaaataaaggac

SEQ ID NO: 30994 - DNA, 21 bp, synthetic construct
  source 1..21: mol_type = other DNA
ggcattgcgaatacaatgtgg

SEQ ID NO: 30995 - DNA, 21 bp, synthetic construct
  source 1..21: mol_type = other DNA
tgcaaatcccttaagtcacca

SEQ ID NO: 30996 - DNA, 21 bp, synthetic construct
  source 1..21: mol_type = other DNA
gggtgccgccatggagacata

SEQ ID NO: 30997 - DNA, 21 bp, synthetic construct
  source 1..21: mol_type = other DNA
agagatcaattcacgtcgtat

SEQ ID NO: 30998 - DNA, 21 bp, synthetic construct
  source 1..21: mol_type = other DNA
gtactttcatctgtttcctgg

SEQ ID NO: 30999 - DNA, 21 bp, synthetic construct
  source 1..21: mol_type = other DNA
tgcgctccagattaccaggag

SEQ ID NO: 31000 - DNA, 21 bp, synthetic construct
  source 1..21: mol_type = other DNA
tgtaagccgccgccattgccc

SEQ ID NO: 31001 - DNA, 21 bp, synthetic construct
  source 1..21: mol_type = other DNA
tattatacggggatacaggaa

SEQ ID NO: 31002 - DNA, 21 bp, synthetic construct
  source 1..21: mol_type = other DNA
tattggagtggacaaaaagac

SEQ ID NO: 31003 - DNA, 21 bp, synthetic construct
  source 1..21: mol_type = other DNA
cctggaagcaccagaacatgg

SEQ ID NO: 31004 - DNA, 21 bp, synthetic construct
  source 1..21: mol_type = other DNA
tctatgcaatcaaggtcgtgg

SEQ ID NO: 31005 - DNA, 21 bp, synthetic construct
  source 1..21: mol_type = other DNA
tactcacgattgcaccagttg

SEQ ID NO: 31006 - DNA, 21 bp, synthetic construct
  source 1..21: mol_type = other DNA
atgacggggacttcttgtcag

SEQ ID NO: 31007 - DNA, 21 bp, synthetic construct
  source 1..21: mol_type = other DNA
tgcaataagaccagcgtgact

SEQ ID NO: 31008 - DNA, 21 bp, synthetic construct
  source 1..21: mol_type = other DNA
tgtgcaccataccgacatgag

SEQ ID NO: 31009 - DNA, 21 bp, synthetic construct
  source 1..21: mol_type = other DNA
tttttcagtggtaaagtggag

SEQ ID NO: 31010 - DNA, 21 bp, synthetic construct
  source 1..21: mol_type = other DNA
cacggcagtggtaatttcgtc

SEQ ID NO: 31011 - DNA, 21 bp, synthetic construct
  source 1..21: mol_type = other DNA
tgcaagagtgacaaaatcatg

SEQ ID NO: 31012 - DNA, 21 bp, synthetic construct
  source 1..21: mol_type = other DNA
gcgggtgggggactatacatc

SEQ ID NO: 31013 - DNA, 21 bp, synthetic construct
  source 1..21: mol_type = other DNA
cgagatgaatttacggtatac

SEQ ID NO: 31014 - DNA, 21 bp, synthetic construct
  source 1..21: mol_type = other DNA
tatttcagcggtactactgat

SEQ ID NO: 31015 - DNA, 21 bp, synthetic construct
  source 1..21: mol_type = other DNA
tacgcgcgtcaaggattcaac

SEQ ID NO: 31016 - DNA, 21 bp, synthetic construct
  source 1..21: mol_type = other DNA
tgccgcgccgaagataagggg

SEQ ID NO: 31017 - DNA, 21 bp, synthetic construct
  source 1..21: mol_type = other DNA
tgtgtaaaagatgaaggggcg

SEQ ID NO: 31018 - DNA, 21 bp, synthetic construct
  source 1..21: mol_type = other DNA
agggaaggtgcgtcttattgg

SEQ ID NO: 31019 - DNA, 21 bp, synthetic construct
  source 1..21: mol_type = other DNA
tattggtctgggaaacaggca

SEQ ID NO: 31020 - DNA, 21 bp, synthetic construct
  source 1..21: mol_type = other DNA
acttgcaaagctcaaatgggg

SEQ ID NO: 31021 - DNA, 21 bp, synthetic construct
  source 1..21: mol_type = other DNA
ccttacgccgtaagtcccttg

SEQ ID NO: 31022 - DNA, 21 bp, synthetic construct
  source 1..21: mol_type = other DNA
cttaagtactcgggaatgtgt

SEQ ID NO: 31023 - DNA, 21 bp, synthetic construct
  source 1..21: mol_type = other DNA
tactcacgcctcaatatgaac

SEQ ID NO: 31024 - DNA, 21 bp, synthetic construct
  source 1..21: mol_type = other DNA
atgtgggacggcacgtcacct

SEQ ID NO: 31025 - DNA, 21 bp, synthetic construct
  source 1..21: mol_type = other DNA
ctacacaggttatcgaacggc

SEQ ID NO: 31026 - DNA, 21 bp, synthetic construct
  source 1..21: mol_type = other DNA
gcgccgggaagcatcaagtgg

SEQ ID NO: 31027 - DNA, 21 bp, synthetic construct
  source 1..21: mol_type = other DNA
cgtgcctttgatgcatatgaa

SEQ ID NO: 31028 - DNA, 21 bp, synthetic construct
  source 1..21: mol_type = other DNA
ggggatggattttctacttgg

SEQ ID NO: 31029 - DNA, 21 bp, synthetic construct
  source 1..21: mol_type = other DNA
agagacgaatttcatgtgtgg

SEQ ID NO: 31030 - DNA, 21 bp, synthetic construct
  source 1..21: mol_type = other DNA
tattggactgggaccacagag

SEQ ID NO: 31031 - DNA, 21 bp, synthetic construct
  source 1..21: mol_type = other DNA
tacagccgtatgggcttgaac

SEQ ID NO: 31032 - DNA, 21 bp, synthetic construct
  source 1..21: mol_type = other DNA
tatagcaagcacaacatgaac

SEQ ID NO: 31033 - DNA, 21 bp, synthetic construct
  source 1..21: mol_type = other DNA
tattggcatggagttgttgac

SEQ ID NO: 31034 - DNA, 21 bp, synthetic construct
  source 1..21: mol_type = other DNA
tttagccgcgctaatcataac

SEQ ID NO: 31035 - DNA, 21 bp, synthetic construct
  source 1..21: mol_type = other DNA
tttagcaaagctaactacaat

SEQ ID NO: 31036 - DNA, 21 bp, synthetic construct
  source 1..21: mol_type = other DNA
tgtagaaatggacaacccgcc

SEQ ID NO: 31037 - DNA, 21 bp, synthetic construct
  source 1..21: mol_type = other DNA
atgctagcgtctagtacgtgg

SEQ ID NO: 31038 - DNA, 21 bp, synthetic construct
  source 1..21: mol_type = other DNA
gtaggtaacaggggttgggac

SEQ ID NO: 31039 - DNA, 21 bp, synthetic construct
  source 1..21: mol_type = other DNA
tgccgtgatgagaacaagccc

SEQ ID NO: 31040 - DNA, 21 bp, synthetic construct
  source 1..21: mol_type = other DNA
tattttacgggcttaagggat

SEQ ID NO: 31041 - DNA, 21 bp, synthetic construct
  source 1..21: mol_type = other DNA
gtaccgtacgaaggtattggt

SEQ ID NO: 31042 - DNA, 21 bp, synthetic construct
  source 1..21: mol_type = other DNA
tatttcgcgggacgcacatcc

SEQ ID NO: 31043 - DNA, 21 bp, synthetic construct
  source 1..21: mol_type = other DNA
tttttcaccgggaaggtctca

SEQ ID NO: 31044 - DNA, 21 bp, synthetic construct
  source 1..21: mol_type = other DNA
tgcaaacccccaccccttcca

SEQ ID NO: 31045 - DNA, 21 bp, synthetic construct
  source 1..21: mol_type = other DNA
ccttatgccaaatcatctgag

SEQ ID NO: 31046 - DNA, 21 bp, synthetic construct
  source 1..21: mol_type = other DNA
tacagcaggcagggcccgaac

SEQ ID NO: 31047 - DNA, 21 bp, synthetic construct
  source 1..21: mol_type = other DNA
tatgtgcgttccgacgcaggg

SEQ ID NO: 31048 - DNA, 21 bp, synthetic construct
  source 1..21: mol_type = other DNA
tattctagagtccaagatgat

SEQ ID NO: 31049 - DNA, 21 bp, synthetic construct
  source 1..21: mol_type = other DNA
tgtaagccaggagaaggtgcg

SEQ ID NO: 31050 - DNA, 21 bp, synthetic construct
  source 1..21: mol_type = other DNA
acagtaagcacgaacggaata

SEQ ID NO: 31051 - DNA, 21 bp, synthetic construct
  source 1..21: mol_type = other DNA
taccatcgccttggagatacc

SEQ ID NO: 31052 - DNA, 21 bp, synthetic construct
  source 1..21: mol_type = other DNA
cagggggaatcgagggtatgg

SEQ ID NO: 31053 - DNA, 21 bp, synthetic construct
  source 1..21: mol_type = other DNA
tactttagcggcatgcactcg

SEQ ID NO: 31054 - DNA, 21 bp, synthetic construct
  source 1..21: mol_type = other DNA
cgcctcgaatccgccgggtgg

SEQ ID NO: 31055 - DNA, 21 bp, synthetic construct
  source 1..21: mol_type = other DNA
ttgcatcgtctcagcaatggt

SEQ ID NO: 31056 - DNA, 21 bp, synthetic construct
  source 1..21: mol_type = other DNA
tgtaagccccccatgggtgca

SEQ ID NO: 31057 - DNA, 21 bp, synthetic construct
  source 1..21: mol_type = other DNA
cgggacggagaatcaaagtgg

SEQ ID NO: 31058 - DNA, 21 bp, synthetic construct
  source 1..21: mol_type = other DNA
tacttcaccggtaggttcgat

SEQ ID NO: 31059 - DNA, 21 bp, synthetic construct
  source 1..21: mol_type = other DNA
tacgcaaaaggggggtttaat

SEQ ID NO: 31060 - DNA, 21 bp, synthetic construct
  source 1..21: mol_type = other DNA
tgcaaaacaaagtcccaagaa

SEQ ID NO: 31061 - DNA, 21 bp, synthetic construct
  source 1..21: mol_type = other DNA
tattggtccggcacagtttcc

SEQ ID NO: 31062 - DNA, 21 bp, synthetic construct
  source 1..21: mol_type = other DNA
cacgcgcgacagagtcccaat

SEQ ID NO: 31063 - DNA, 21 bp, synthetic construct
  source 1..21: mol_type = other DNA
tgtatgtctagggcagtagca

SEQ ID NO: 31064 - DNA, 21 bp, synthetic construct
  source 1..21: mol_type = other DNA
tactggtcagccgtgactgct

SEQ ID NO: 31065 - DNA, 21 bp, synthetic construct
  source 1..21: mol_type = other DNA
tacttccacggaaagcaggac

SEQ ID NO: 31066 - DNA, 21 bp, synthetic construct
  source 1..21: mol_type = other DNA
tactttcaaggcaaaattgcc

SEQ ID NO: 31067 - DNA, 21 bp, synthetic construct
  source 1..21: mol_type = other DNA
tattccagaggcaataataat

SEQ ID NO: 31068 - DNA, 21 bp, synthetic construct
  source 1..21: mol_type = other DNA
tactctaagatcggtagggat

SEQ ID NO: 31069 - DNA, 21 bp, synthetic construct
  source 1..21: mol_type = other DNA
tgccgagaaggcacgagtagc

SEQ ID NO: 31070 - DNA, 21 bp, synthetic construct
  source 1..21: mol_type = other DNA
tatttcagtgggcaacaccac

SEQ ID NO: 31071 - DNA, 21 bp, synthetic construct
  source 1..21: mol_type = other DNA
tactcaagaatgaatgagaac

SEQ ID NO: 31072 - DNA, 21 bp, synthetic construct
  source 1..21: mol_type = other DNA
tattgggaaggcgtcaaggct

SEQ ID NO: 31073 - DNA, 21 bp, synthetic construct
  source 1..21: mol_type = other DNA
tgccggaacggccagcctgct

SEQ ID NO: 31074 - DNA, 21 bp, synthetic construct
  source 1..21: mol_type = other DNA
gttatgcccagcgcggtttgg

SEQ ID NO: 31075 - DNA, 21 bp, synthetic construct
  source 1..21: mol_type = other DNA
tttaagtcgaccaacggggtt

SEQ ID NO: 31076 - DNA, 21 bp, synthetic construct
  source 1..21: mol_type = other DNA
tacgcacgcctcggcagcaat

SEQ ID NO: 31077 - DNA, 21 bp, synthetic construct
  source 1..21: mol_type = other DNA
tacgattctactaacggtatt

SEQ ID NO: 31078 - DNA, 21 bp, synthetic construct
  source 1..21: mol_type = other DNA
ctcgcgaaatccggtactaac

SEQ ID NO: 31079 - DNA, 21 bp, synthetic construct
  source 1..21: mol_type = other DNA
ttagcaaaaaccggtactaac

SEQ ID NO: 31080 - DNA, 21 bp, synthetic construct
  source 1..21: mol_type = other DNA
tattatagcggaattcagtcg

SEQ ID NO: 31081 - DNA, 21 bp, synthetic construct
  source 1..21: mol_type = other DNA
tgtaagggaagggatattgac

SEQ ID NO: 31082 - DNA, 21 bp, synthetic construct
  source 1..21: mol_type = other DNA
tggtctgccattacagactgt

SEQ ID NO: 31083 - DNA, 21 bp, synthetic construct
  source 1..21: mol_type = other DNA
ctacacaaattgtcgactcac

SEQ ID NO: 31084 - DNA, 21 bp, synthetic construct
  source 1..21: mol_type = other DNA
agaacttttgattctttcgag

SEQ ID NO: 31085 - DNA, 21 bp, synthetic construct
  source 1..21: mol_type = other DNA
aaacccgatcacgttaggtgg

SEQ ID NO: 31086 - DNA, 21 bp, synthetic construct
  source 1..21: mol_type = other DNA
tattctaaattaggcgcagat

SEQ ID NO: 31087 - DNA, 21 bp, synthetic construct
  source 1..21: mol_type = other DNA
tggtggcatggaattcctgag

SEQ ID NO: 31088 - DNA, 21 bp, synthetic construct
  source 1..21: mol_type = other DNA
cgtacttacgacacgtaccca

SEQ ID NO: 31089 - DNA, 21 bp, synthetic construct
  source 1..21: mol_type = other DNA
agtctaagcgataggacatgg

SEQ ID NO: 31090 - DNA, 21 bp, synthetic construct
  source 1..21: mol_type = other DNA
tatttttcaggtgtgagaacc

SEQ ID NO: 31091 - DNA, 21 bp, synthetic construct
  source 1..21: mol_type = other DNA
atgacaacgtgtgaaaacgta

SEQ ID NO: 31092 - DNA, 21 bp, synthetic construct
  source 1..21: mol_type = other DNA
gatatgctgtcgagtagctgg

SEQ ID NO: 31093 - DNA, 21 bp, synthetic construct
  source 1..21: mol_type = other DNA
agaaacatgtcggtgtaccca

SEQ ID NO: 31094 - DNA, 21 bp, synthetic construct
  source 1..21: mol_type = other DNA
cgtggcgatttccacatgtac

SEQ ID NO: 31095 - DNA, 21 bp, synthetic construct
  source 1..21: mol_type = other DNA
tactcaaaaatcggcaaagac

SEQ ID NO: 31096 - DNA, 21 bp, synthetic construct
  source 1..21: mol_type = other DNA
gatttgcaggcacacgactgg

SEQ ID NO: 31097 - DNA, 21 bp, synthetic construct
  source 1..21: mol_type = other DNA
tattggcaaggaaagattgcg

SEQ ID NO: 31098 - DNA, 21 bp, synthetic construct
  source 1..21: mol_type = other DNA
tgcaaacctcaatggccttca

SEQ ID NO: 31099 - DNA, 21 bp, synthetic construct
  source 1..21: mol_type = other DNA
tattcgcggcttaattcgaac

SEQ ID NO: 31100 - DNA, 21 bp, synthetic construct
  source 1..21: mol_type = other DNA
gcgcaatcgactaacggggtg

SEQ ID NO: 31101 - DNA, 21 bp, synthetic construct
  source 1..21: mol_type = other DNA
caggggaatggactatatcga

SEQ ID NO: 31102 - DNA, 21 bp, synthetic construct
  source 1..21: mol_type = other DNA
tgcaaacctcctatgggcgct

SEQ ID NO: 31103 - DNA, 21 bp, synthetic construct
  source 1..21: mol_type = other DNA
tgggttaggtcccaacccggt

SEQ ID NO: 31104 - DNA, 21 bp, synthetic construct
  source 1..21: mol_type = other DNA
tgtaagccagatagcatagga

SEQ ID NO: 31105 - DNA, 21 bp, synthetic construct
  source 1..21: mol_type = other DNA
cgcggagtcgatatgtaccct

SEQ ID NO: 31106 - DNA, 21 bp, synthetic construct
  source 1..21: mol_type = other DNA
tacgcgcgacatggaccgaat

SEQ ID NO: 31107 - DNA, 21 bp, synthetic construct
  source 1..21: mol_type = other DNA
aaatatgatcatgtcacgtgg

SEQ ID NO: 31108 - DNA, 21 bp, synthetic construct
  source 1..21: mol_type = other DNA
atgactggtacctcttgcctg

SEQ ID NO: 31109 - DNA, 21 bp, synthetic construct
  source 1..21: mol_type = other DNA
tactgggagggagtgaaagcc

SEQ ID NO: 31110 - DNA, 21 bp, synthetic construct
  source 1..21: mol_type = other DNA
tgcaagtccactaatggaatc

SEQ ID NO: 31111 - DNA, 21 bp, synthetic construct
  source 1..21: mol_type = other DNA
tacttaaagtctcagtcgatt

SEQ ID NO: 31112 - DNA, 21 bp, synthetic construct
  source 1..21: mol_type = other DNA
cgtacttatgatagtatcgca

SEQ ID NO: 31113 - DNA, 21 bp, synthetic construct
  source 1..21: mol_type = other DNA
tattttagcggtcaaaacaac

SEQ ID NO: 31114 - DNA, 21 bp, synthetic construct
  source 1..21: mol_type = other DNA
tgcaccgagaaaacgggtcat

SEQ ID NO: 31115 - DNA, 21 bp, synthetic construct
  source 1..21: mol_type = other DNA
tgcaaaccgaggcagccagaa

SEQ ID NO: 31116 - DNA, 21 bp, synthetic construct
  source 1..21: mol_type = other DNA
ggcagtgaattctcagccttc

SEQ ID NO: 31117 - DNA, 21 bp, synthetic construct
  source 1..21: mol_type = other DNA
aaaatggactattcggtgttt

SEQ ID NO: 31118 - DNA, 21 bp, synthetic construct
  source 1..21: mol_type = other DNA
acggacgaaacagtctatagc

SEQ ID NO: 31119 - DNA, 21 bp, synthetic construct
  source 1..21: mol_type = other DNA
tacttccatggaaccgtggaa

SEQ ID NO: 31120 - DNA, 21 bp, synthetic construct
  source 1..21: mol_type = other DNA
tactttactggtacacagttg

SEQ ID NO: 31121 - DNA, 21 bp, synthetic construct
  source 1..21: mol_type = other DNA
tatgccaggggaaacatcaac

SEQ ID NO: 31122 - DNA, 21 bp, synthetic construct
  source 1..21: mol_type = other DNA
tactactcagggatacaaagt

SEQ ID NO: 31123 - DNA, 21 bp, synthetic construct
  source 1..21: mol_type = other DNA
agggaatataatgtttatcct

SEQ ID NO: 31124 - DNA, 21 bp, synthetic construct
  source 1..21: mol_type = other DNA
tacgcgaggaatggacaaaac

SEQ ID NO: 31125 - DNA, 21 bp, synthetic construct
  source 1..21: mol_type = other DNA
aaagaagactatgttacttac

SEQ ID NO: 31126 - DNA, 21 bp, synthetic construct
  source 1..21: mol_type = other DNA
tactccagaatttgccctaac

SEQ ID NO: 31127 - DNA, 21 bp, synthetic construct
  source 1..21: mol_type = other DNA
tattttagcggaaaggcgctc

SEQ ID NO: 31128 - DNA, 21 bp, synthetic construct
  source 1..21: mol_type = other DNA
acggtttctacaaatgggatc

SEQ ID NO: 31129 - DNA, 21 bp, synthetic construct
  source 1..21: mol_type = other DNA
tactggtccggccaaatcgct

SEQ ID NO: 31130 - DNA, 21 bp, synthetic construct
  source 1..21: mol_type = other DNA
aagctcggtggatcatgtggc

SEQ ID NO: 31131 - DNA, 21 bp, synthetic construct
  source 1..21: mol_type = other DNA
tattcgcgcgcaggtgggaat

SEQ ID NO: 31132 - DNA, 21 bp, synthetic construct
  source 1..21: mol_type = other DNA
atcaagtcgaccaatggcatt

SEQ ID NO: 31133 - DNA, 21 bp, synthetic construct
  source 1..21: mol_type = other DNA
tatcaaagtactaatggcatt

SEQ ID NO: 31134 - DNA, 21 bp, synthetic construct
  source 1..21: mol_type = other DNA
tgcagcgtcgttacgggctcg

SEQ ID NO: 31135 - DNA, 21 bp, synthetic construct
  source 1..21: mol_type = other DNA
agaacttatgaaacgtttcct

SEQ ID NO: 31136 - DNA, 21 bp, synthetic construct
  source 1..21: mol_type = other DNA
ttccatcgcttaagtgatgac

SEQ ID NO: 31137 - DNA, 21 bp, synthetic construct
  source 1..21: mol_type = other DNA
cgagactacgattcgtaccct

SEQ ID NO: 31138 - DNA, 21 bp, synthetic construct
  source 1..21: mol_type = other DNA
tactttactgggcaggcctcg

SEQ ID NO: 31139 - DNA, 21 bp, synthetic construct
  source 1..21: mol_type = other DNA
tattcaagggtcgggggaaac

SEQ ID NO: 31140 - DNA, 21 bp, synthetic construct
  source 1..21: mol_type = other DNA
tattccagggtcaatccgaat

SEQ ID NO: 31141 - DNA, 21 bp, synthetic construct
  source 1..21: mol_type = other DNA
tatgctaggaccaattacaat

SEQ ID NO: 31142 - DNA, 21 bp, synthetic construct
  source 1..21: mol_type = other DNA
ttgcacaaattgcagccatgt

SEQ ID NO: 31143 - DNA, 21 bp, synthetic construct
  source 1..21: mol_type = other DNA
tattacacgggattcgtagat

SEQ ID NO: 31144 - DNA, 21 bp, synthetic construct
  source 1..21: mol_type = other DNA
cgtaacgagtttacgggattt

SEQ ID NO: 31145 - DNA, 21 bp, synthetic construct
  source 1..21: mol_type = other DNA
ttctggcatggagtgcctgat

SEQ ID NO: 31146 - DNA, 21 bp, synthetic construct
  source 1..21: mol_type = other DNA
tatagtagatccaatgtaaat

SEQ ID NO: 31147 - DNA, 21 bp, synthetic construct
  source 1..21: mol_type = other DNA
tattattcagggcagaaggag

SEQ ID NO: 31148 - DNA, 21 bp, synthetic construct
  source 1..21: mol_type = other DNA
aggggggaatcgagctcatgg

SEQ ID NO: 31149 - DNA, 21 bp, synthetic construct
  source 1..21: mol_type = other DNA
tatttcgcaggtactcatgac

SEQ ID NO: 31150 - DNA, 21 bp, synthetic construct
  source 1..21: mol_type = other DNA
agatcggaattccgtacatac

SEQ ID NO: 31151 - DNA, 21 bp, synthetic construct
  source 1..21: mol_type = other DNA
atgaccggcatctcatgtcta

SEQ ID NO: 31152 - DNA, 21 bp, synthetic construct
  source 1..21: mol_type = other DNA
tattggacgggctgcatggag

SEQ ID NO: 31153 - DNA, 21 bp, synthetic construct
  source 1..21: mol_type = other DNA
tggcctagtggtagcgccggg

SEQ ID NO: 31154 - DNA, 21 bp, synthetic construct
  source 1..21: mol_type = other DNA
tatttcacaggctgtcaagct

SEQ ID NO: 31155 - DNA, 21 bp, synthetic construct
  source 1..21: mol_type = other DNA
ggagaacctacctgtaaggcc

SEQ ID NO: 31156 - DNA, 21 bp, synthetic construct
  source 1..21: mol_type = other DNA
attcagagttccaacggggtg

SEQ ID NO: 31157 - DNA, 21 bp, synthetic construct
  source 1..21: mol_type = other DNA
taccaccgactcaatgagcat

SEQ ID NO: 31158 - DNA, 21 bp, synthetic construct
  source 1..21: mol_type = other DNA
tacgcaaaacaaggcgctaat

SEQ ID NO: 31159 - DNA, 21 bp, synthetic construct
  source 1..21: mol_type = other DNA
ggcggtgaaggaacacgctgg

SEQ ID NO: 31160 - DNA, 21 bp, synthetic construct
  source 1..21: mol_type = other DNA
tgtactagcaaatacggtcat

SEQ ID NO: 31161 - DNA, 21 bp, synthetic construct
  source 1..21: mol_type = other DNA
ttggacgactggaccacctat

SEQ ID NO: 31162 - DNA, 21 bp, synthetic construct
  source 1..21: mol_type = other DNA
tactttacaggggtaactgtc

SEQ ID NO: 31163 - DNA, 21 bp, synthetic construct
  source 1..21: mol_type = other DNA
tgtaaggcccctagcgctggg

SEQ ID NO: 31164 - DNA, 21 bp, synthetic construct
  source 1..21: mol_type = other DNA
gatatggagtcaagtaagtgg

SEQ ID NO: 31165 - DNA, 21 bp, synthetic construct
  source 1..21: mol_type = other DNA
tatcatcggttgaacgaacac

SEQ ID NO: 31166 - DNA, 21 bp, synthetic construct
  source 1..21: mol_type = other DNA
tatagtagagccaacatgaat

SEQ ID NO: 31167 - DNA, 21 bp, synthetic construct
  source 1..21: mol_type = other DNA
gctaactcaacgaacggagtc

SEQ ID NO: 31168 - DNA, 21 bp, synthetic construct
  source 1..21: mol_type = other DNA
tacttttcagggcagattgta

SEQ ID NO: 31169 - DNA, 21 bp, synthetic construct
  source 1..21: mol_type = other DNA
tgtaagcctgatgcggtaaga

SEQ ID NO: 31170 - DNA, 21 bp, synthetic construct
  source 1..21: mol_type = other DNA
atgactggcaccagttgccga

SEQ ID NO: 31171 - DNA, 21 bp, synthetic construct
  source 1..21: mol_type = other DNA
acagacggtactagtttatgg

SEQ ID NO: 31172 - DNA, 21 bp, synthetic construct
  source 1..21: mol_type = other DNA
tatttttcaggaacgaccgac

SEQ ID NO: 31173 - DNA, 21 bp, synthetic construct
  source 1..21: mol_type = other DNA
tactggactggcaagcacgaa

SEQ ID NO: 31174 - DNA, 21 bp, synthetic construct
  source 1..21: mol_type = other DNA
ctccacaagctatgccaagat

SEQ ID NO: 31175 - DNA, 21 bp, synthetic construct
  source 1..21: mol_type = other DNA
ggaggagagggtactagatgg

SEQ ID NO: 31176 - DNA, 21 bp, synthetic construct
  source 1..21: mol_type = other DNA
atcgctgcactgggttgggat

SEQ ID NO: 31177 - DNA, 21 bp, synthetic construct
  source 1..21: mol_type = other DNA
ctggcaagattgggatgggat

SEQ ID NO: 31178 - DNA, 21 bp, synthetic construct
  source 1..21: mol_type = other DNA
tactctaagcagggctggaac

SEQ ID NO: 31179 - DNA, 21 bp, synthetic construct
  source 1..21: mol_type = other DNA
aggggaagcgagaggatctgt

SEQ ID NO: 31180 - DNA, 21 bp, synthetic construct
  source 1..21: mol_type = other DNA
tactcgagacaagggatgaac

SEQ ID NO: 31181 - DNA, 21 bp, synthetic construct
  source 1..21: mol_type = other DNA
tatgcccgcaatggacataat

SEQ ID NO: 31182 - DNA, 21 bp, synthetic construct
  source 1..21: mol_type = other DNA
tactttagcggccttattgac

SEQ ID NO: 31183 - DNA, 21 bp, synthetic construct
  source 1..21: mol_type = other DNA
cgtgacggacaaagcgcatat

SEQ ID NO: 31184 - DNA, 21 bp, synthetic construct
  source 1..21: mol_type = other DNA
agagatcaatatgtctaccca

SEQ ID NO: 31185 - DNA, 21 bp, synthetic construct
  source 1..21: mol_type = other DNA
tatcatcgactggggagtact

SEQ ID NO: 31186 - DNA, 21 bp, synthetic construct
  source 1..21: mol_type = other DNA
cactggagcacaaacggaatt

SEQ ID NO: 31187 - DNA, 21 bp, synthetic construct
  source 1..21: mol_type = other DNA
tattcaaggttaggaggaaac

SEQ ID NO: 31188 - DNA, 21 bp, synthetic construct
  source 1..21: mol_type = other DNA
aaggatggatacacctcgtgg

SEQ ID NO: 31189 - DNA, 21 bp, synthetic construct
  source 1..21: mol_type = other DNA
tgcaaggcaaatcgtgttgaa

SEQ ID NO: 31190 - DNA, 21 bp, synthetic construct
  source 1..21: mol_type = other DNA
gtgatggaggcccgccaatgg

SEQ ID NO: 31191 - DNA, 21 bp, synthetic construct
  source 1..21: mol_type = other DNA
tattggggagggatacccgat

SEQ ID NO: 31192 - DNA, 21 bp, synthetic construct
  source 1..21: mol_type = other DNA
tactggtccgggactcacgaa

SEQ ID NO: 31193 - DNA, 21 bp, synthetic construct
  source 1..21: mol_type = other DNA
tactcaaaaattggttgggac

SEQ ID NO: 31194 - DNA, 21 bp, synthetic construct
  source 1..21: mol_type = other DNA
cttgcgcgtacaggcaacgat

SEQ ID NO: 31195 - DNA, 21 bp, synthetic construct
  source 1..21: mol_type = other DNA
tattccagatcgggtacaaat

SEQ ID NO: 31196 - DNA, 21 bp, synthetic construct
  source 1..21: mol_type = other DNA
agaggggatgaggtctacccc

SEQ ID NO: 31197 - DNA, 21 bp, synthetic construct
  source 1..21: mol_type = other DNA
gggttagccagttcaacctgg

SEQ ID NO: 31198 - DNA, 21 bp, synthetic construct
  source 1..21: mol_type = other DNA
tgcaaatcatcgtgtaaacct

SEQ ID NO: 31199 - DNA, 21 bp, synthetic construct
  source 1..21: mol_type = other DNA
catgttactacccactgcagt

SEQ ID NO: 31200 - DNA, 21 bp, synthetic construct
  source 1..21: mol_type = other DNA
tgcaaattgtccagtaaagca

SEQ ID NO: 31201 - DNA, 21 bp, synthetic construct
  source 1..21: mol_type = other DNA
tactttagcggcgttagaaat

SEQ ID NO: 31202 - DNA, 21 bp, synthetic construct
  source 1..21: mol_type = other DNA
ctcaccaggcttaatccggac

SEQ ID NO: 31203 - DNA, 21 bp, synthetic construct
  source 1..21: mol_type = other DNA
tggacgcctatctgcaaagcc

SEQ ID NO: 31204 - DNA, 21 bp, synthetic construct
  source 1..21: mol_type = other DNA
ctagccaggagcggggacaac

SEQ ID NO: 31205 - DNA, 21 bp, synthetic construct
  source 1..21: mol_type = other DNA
ttaacacgcttaaaccctgat

SEQ ID NO: 31206 - DNA, 21 bp, synthetic construct
  source 1..21: mol_type = other DNA
tgtttagcgatgtcgaagccc

SEQ ID NO: 31207 - DNA, 21 bp, synthetic construct
  source 1..21: mol_type = other DNA
tattcgagacaagggttaaat

SEQ ID NO: 31208 - DNA, 21 bp, synthetic construct
  source 1..21: mol_type = other DNA
tatagtagagttaataataat

SEQ ID NO: 31209 - DNA, 21 bp, synthetic construct
  source 1..21: mol_type = other DNA
acacacggtacaagcacgtgt

SEQ ID NO: 31210 - DNA, 21 bp, synthetic construct
  source 1..21: mol_type = other DNA
tacgctaaaatgggatacaat

SEQ ID NO: 31211 - DNA, 21 bp, synthetic construct
  source 1..21: mol_type = other DNA
cgggaagacgcgataagatgg

SEQ ID NO: 31212 - DNA, 21 bp, synthetic construct
  source 1..21: mol_type = other DNA
aaaactgagttctgtgctgct

SEQ ID NO: 31213 - DNA, 21 bp, synthetic construct
  source 1..21: mol_type = other DNA
tatagccgagcaaatttcaat

SEQ ID NO: 31214 - DNA, 21 bp, synthetic construct
  source 1..21: mol_type = other DNA
tgcaagggagacaagcatgga

SEQ ID NO: 31215 - DNA, 21 bp, synthetic construct
  source 1..21: mol_type = other DNA
tctttcagtacgaacggaatc

SEQ ID NO: 31216 - DNA, 21 bp, synthetic construct
  source 1..21: mol_type = other DNA
tactatagcggcgttatctct

SEQ ID NO: 31217 - DNA, 21 bp, synthetic construct
  source 1..21: mol_type = other DNA
agggaagagtctgtgtttcca

SEQ ID NO: 31218 - DNA, 21 bp, synthetic construct
  source 1..21: mol_type = other DNA
aaggatgactttcttacgtgg

SEQ ID NO: 31219 - DNA, 21 bp, synthetic construct
  source 1..21: mol_type = other DNA
tactggagtggaaagactgag

SEQ ID NO: 31220 - DNA, 21 bp, synthetic construct
  source 1..21: mol_type = other DNA
tatagccgcttaggtatgaat

SEQ ID NO: 31221 - DNA, 21 bp, synthetic construct
  source 1..21: mol_type = other DNA
gacatgggctcgagtgtttgg

SEQ ID NO: 31222 - DNA, 21 bp, synthetic construct
  source 1..21: mol_type = other DNA
tatagcagatcaaatttaaac

SEQ ID NO: 31223 - DNA, 21 bp, synthetic construct
  source 1..21: mol_type = other DNA
tacgctagggctggtaataac

SEQ ID NO: 31224 - DNA, 21 bp, synthetic construct
  source 1..21: mol_type = other DNA
tgcaaggccgttgcccctcca

SEQ ID NO: 31225 - DNA, 21 bp, synthetic construct
  source 1..21: mol_type = other DNA
ttttggagtggagtgtcggaa

SEQ ID NO: 31226 - DNA, 21 bp, synthetic construct
  source 1..21: mol_type = other DNA
tttcgcggtaattgtggtcct

SEQ ID NO: 31227 - DNA, 21 bp, synthetic construct
  source 1..21: mol_type = other DNA
cgggacggagccagtggttgg

SEQ ID NO: 31228 - DNA, 21 bp, synthetic construct
  source 1..21: mol_type = other DNA
tatagcaagataggcttcgac

SEQ ID NO: 31229 - DNA, 21 bp, synthetic construct
  source 1..21: mol_type = other DNA
aaggatgactactcctattac

SEQ ID NO: 31230 - DNA, 21 bp, synthetic construct
  source 1..21: mol_type = other DNA
ccagggtcaaccaatggagtt

SEQ ID NO: 31231 - DNA, 21 bp, synthetic construct
  source 1..21: mol_type = other DNA
tacagtcgtagtggcaccaac

SEQ ID NO: 31232 - DNA, 21 bp, synthetic construct
  source 1..21: mol_type = other DNA
ttcttttccggtattcacgca

SEQ ID NO: 31233 - DNA, 21 bp, synthetic construct
  source 1..21: mol_type = other DNA
tatcacaagaacaacgcgaat

SEQ ID NO: 31234 - DNA, 21 bp, synthetic construct
  source 1..21: mol_type = other DNA
ttcaatagcaccaatggcaga

SEQ ID NO: 31235 - DNA, 21 bp, synthetic construct
  source 1..21: mol_type = other DNA
tgtaaacctcaaatgggaaca

SEQ ID NO: 31236 - DNA, 21 bp, synthetic construct
  source 1..21: mol_type = other DNA
tattggaccggaaccttggaa

SEQ ID NO: 31237 - DNA, 21 bp, synthetic construct
  source 1..21: mol_type = other DNA
tactggacgggtcaggtggcg

SEQ ID NO: 31238 - DNA, 21 bp, synthetic construct
  source 1..21: mol_type = other DNA
tatcctttcccgacagaagcc

SEQ ID NO: 31239 - DNA, 21 bp, synthetic construct
  source 1..21: mol_type = other DNA
atgtcaagggccagctataat

SEQ ID NO: 31240 - DNA, 21 bp, synthetic construct
  source 1..21: mol_type = other DNA
gcaatggaaagctccaattgg

SEQ ID NO: 31241 - DNA, 21 bp, synthetic construct
  source 1..21: mol_type = other DNA
agaacatacgatacatacatc

SEQ ID NO: 31242 - DNA, 21 bp, synthetic construct
  source 1..21: mol_type = other DNA
ctggccaaggctggatataac

SEQ ID NO: 31243 - DNA, 21 bp, synthetic construct
  source 1..21: mol_type = other DNA
tggcaacccatgtgtaaggct

SEQ ID NO: 31244 - DNA, 21 bp, synthetic construct
  source 1..21: mol_type = other DNA
tttgcaagaactgggattaac

SEQ ID NO: 31245 - DNA, 21 bp, synthetic construct
  source 1..21: mol_type = other DNA
gtggggagcgataggggttgg

SEQ ID NO: 31246 - DNA, 21 bp, synthetic construct
  source 1..21: mol_type = other DNA
tatttcaccggaactcaactt

SEQ ID NO: 31247 - DNA, 21 bp, synthetic construct
  source 1..21: mol_type = other DNA
tattttagcgccgtcaaggag

SEQ ID NO: 31248 - DNA, 21 bp, synthetic construct
  source 1..21: mol_type = other DNA
tacacccgagtgcaggagaac

SEQ ID NO: 31249 - DNA, 21 bp, synthetic construct
  source 1..21: mol_type = other DNA
tgtccgaagacaaagttggag

SEQ ID NO: 31250 - DNA, 21 bp, synthetic construct
  source 1..21: mol_type = other DNA
aaaaatgattatttaatttac

SEQ ID NO: 31251 - DNA, 21 bp, synthetic construct
  source 1..21: mol_type = other DNA
tactggcagggcgttagggag

SEQ ID NO: 31252 - DNA, 21 bp, synthetic construct
  source 1..21: mol_type = other DNA
agaagggacggaacacctgcc

SEQ ID NO: 31253 - DNA, 21 bp, synthetic construct
  source 1..21: mol_type = other DNA
aacacgtcaaccaacggcata

SEQ ID NO: 31254 - DNA, 21 bp, synthetic construct
  source 1..21: mol_type = other DNA
tgcaagccaagcccgctcacc

SEQ ID NO: 31255 - DNA, 21 bp, synthetic construct
  source 1..21: mol_type = other DNA
tgtgttaaaacggacaggaat

SEQ ID NO: 31256 - DNA, 21 bp, synthetic construct
  source 1..21: mol_type = other DNA
tattggacgggtatgcctgac

SEQ ID NO: 31257 - DNA, 21 bp, synthetic construct
  source 1..21: mol_type = other DNA
gctactgagactggcccgaag

SEQ ID NO: 31258 - DNA, 21 bp, synthetic construct
  source 1..21: mol_type = other DNA
tatgccagaattggccagaac

SEQ ID NO: 31259 - DNA, 21 bp, synthetic construct
  source 1..21: mol_type = other DNA
cccatgggttcgaacacctgg

SEQ ID NO: 31260 - DNA, 21 bp, synthetic construct
  source 1..21: mol_type = other DNA
cgtaacgagtactctacgtac

SEQ ID NO: 31261 - DNA, 21 bp, synthetic construct
  source 1..21: mol_type = other DNA
tttagcaaaatctgtaaagag

SEQ ID NO: 31262 - DNA, 21 bp, synthetic construct
  source 1..21: mol_type = other DNA
tatcatcgtatgtcgccggat

SEQ ID NO: 31263 - DNA, 21 bp, synthetic construct
  source 1..21: mol_type = other DNA
tattcacgggcaaacattaat

SEQ ID NO: 31264 - DNA, 21 bp, synthetic construct
  source 1..21: mol_type = other DNA
cacaacagtacaaatggcatt

SEQ ID NO: 31265 - DNA, 21 bp, synthetic construct
  source 1..21: mol_type = other DNA
tgcaagccacagatgcccagt

SEQ ID NO: 31266 - DNA, 21 bp, synthetic construct
  source 1..21: mol_type = other DNA
tactcaaggatgaacttgaac

SEQ ID NO: 31267 - DNA, 21 bp, synthetic construct
  source 1..21: mol_type = other DNA
ttagcgaaaaatggggtaaat

SEQ ID NO: 31268 - DNA, 21 bp, synthetic construct
  source 1..21: mol_type = other DNA
tattttagtggcactataaga

SEQ ID NO: 31269 - DNA, 21 bp, synthetic construct
  source 1..21: mol_type = other DNA
tatcataggcaatctgacaat

SEQ ID NO: 31270 - DNA, 21 bp, synthetic construct
  source 1..21: mol_type = other DNA
tattctaggcaaggtcacaat

SEQ ID NO: 31271 - DNA, 21 bp, synthetic construct
  source 1..21: mol_type = other DNA
tgtaacaagccgatggcggcg

SEQ ID NO: 31272 - DNA, 21 bp, synthetic construct
  source 1..21: mol_type = other DNA
tacgctcgtcttggccaaaac

SEQ ID NO: 31273 - DNA, 21 bp, synthetic construct
  source 1..21: mol_type = other DNA
tgggtgcgtagcgatacgaag

SEQ ID NO: 31274 - DNA, 21 bp, synthetic construct
  source 1..21: mol_type = other DNA
tttgatagcacgaacggacgc

SEQ ID NO: 31275 - DNA, 21 bp, synthetic construct
  source 1..21: mol_type = other DNA
tacgcgaagggaaatgttaac

SEQ ID NO: 31276 - DNA, 21 bp, synthetic construct
  source 1..21: mol_type = other DNA
tttacaaggctcagcataaac

SEQ ID NO: 31277 - DNA, 21 bp, synthetic construct
  source 1..21: mol_type = other DNA
tattcacgagtcaacgacaat

SEQ ID NO: 31278 - DNA, 21 bp, synthetic construct
  source 1..21: mol_type = other DNA
tactgggctggcattccggac

SEQ ID NO: 31279 - DNA, 21 bp, synthetic construct
  source 1..21: mol_type = other DNA
tacgctcgtctcaaccacaac

SEQ ID NO: 31280 - DNA, 21 bp, synthetic construct
  source 1..21: mol_type = other DNA
tattggagcgccgttcaggaa

SEQ ID NO: 31281 - DNA, 21 bp, synthetic construct
  source 1..21: mol_type = other DNA
tattggcagggagtagtcgaa

SEQ ID NO: 31282 - DNA, 21 bp, synthetic construct
  source 1..21: mol_type = other DNA
tacagccgcacaaatgacaac

SEQ ID NO: 31283 - DNA, 21 bp, synthetic construct
  source 1..21: mol_type = other DNA
ggtagttcgactagccattgg

SEQ ID NO: 31284 - DNA, 21 bp, synthetic construct
  source 1..21: mol_type = other DNA
tggctcaaggagaagatgtgt

SEQ ID NO: 31285 - DNA, 21 bp, synthetic construct
  source 1..21: mol_type = other DNA
tattgtaaagacaaccgaccg

SEQ ID NO: 31286 - DNA, 21 bp, synthetic construct
  source 1..21: mol_type = other DNA
tattcgagaattaatgcaaac

SEQ ID NO: 31287 - DNA, 21 bp, synthetic construct
  source 1..21: mol_type = other DNA
aggacatatgatagcatcgcg

SEQ ID NO: 31288 - DNA, 21 bp, synthetic construct
  source 1..21: mol_type = other DNA
ggatgcggcacaatgtgtgga

SEQ ID NO: 31289 - DNA, 21 bp, synthetic construct
  source 1..21: mol_type = other DNA
atcaagtccactaatggtatc

SEQ ID NO: 31290 - DNA, 21 bp, synthetic construct
  source 1..21: mol_type = other DNA
tgcaggtcaggaccaacaccc

SEQ ID NO: 31291 - DNA, 21 bp, synthetic construct
  source 1..21: mol_type = other DNA
tgttctagaaacagtgataac

SEQ ID NO: 31292 - DNA, 21 bp, synthetic construct
  source 1..21: mol_type = other DNA
tattctcggatgaacactaat

SEQ ID NO: 31293 - DNA, 21 bp, synthetic construct
  source 1..21: mol_type = other DNA
tacagccgtgttaatttcaac

SEQ ID NO: 31294 - DNA, 21 bp, synthetic construct
  source 1..21: mol_type = other DNA
tacagccgtatgggcagtaac

SEQ ID NO: 31295 - DNA, 21 bp, synthetic construct
  source 1..21: mol_type = other DNA
cgtggagattacacaccgtgg

SEQ ID NO: 31296 - DNA, 21 bp, synthetic construct
  source 1..21: mol_type = other DNA
atcgataaattgtgtaagcct

SEQ ID NO: 31297 - DNA, 21 bp, synthetic construct
  source 1..21: mol_type = other DNA
tactttagcgcggtcagagag

SEQ ID NO: 31298 - DNA, 21 bp, synthetic construct
  source 1..21: mol_type = other DNA
ttttccagagccggaaacaat

SEQ ID NO: 31299 - DNA, 21 bp, synthetic construct
  source 1..21: mol_type = other DNA
tgccgagcccaaaccttagac

SEQ ID NO: 31300 - DNA, 21 bp, synthetic construct
  source 1..21: mol_type = other DNA
tacgaatcgacaaacggaatt

SEQ ID NO: 31301 - DNA, 21 bp, synthetic construct
  source 1..21: mol_type = other DNA
tgcaaaccagggcagcagtca

SEQ ID NO: 31302 - DNA, 21 bp, synthetic construct
  source 1..21: mol_type = other DNA
attttaagtagccaggcctgg

SEQ ID NO: 31303 - DNA, 21 bp, synthetic construct
  source 1..21: mol_type = other DNA
tactcctgcaatagtgacaac

SEQ ID NO: 31304 - DNA, 21 bp, synthetic construct
  source 1..21: mol_type = other DNA
ggcaagtcaggctgttgtagc

SEQ ID NO: 31305 - DNA, 21 bp, synthetic construct
  source 1..21: mol_type = other DNA
ggtggcatagggagtgcttgg

SEQ ID NO: 31306 - DNA, 21 bp, synthetic construct
  source 1..21: mol_type = other DNA
gatcaagagatcaagagacgc

SEQ ID NO: 31307 - DNA, 21 bp, synthetic construct
  source 1..21: mol_type = other DNA
ttatcaaaagcgggcaacaac

SEQ ID NO: 31308 - DNA, 21 bp, synthetic construct
  source 1..21: mol_type = other DNA
gtgtcgacgcacgactgtgct

SEQ ID NO: 31309 - DNA, 21 bp, synthetic construct
  source 1..21: mol_type = other DNA
atcatgcaagatagaagttgg

SEQ ID NO: 31310 - DNA, 21 bp, synthetic construct
  source 1..21: mol_type = other DNA
tattcgagggcgtcagacaat

SEQ ID NO: 31311 - DNA, 21 bp, synthetic construct
  source 1..21: mol_type = other DNA
tatagtagggccaatgccaac

SEQ ID NO: 31312 - DNA, 21 bp, synthetic construct
  source 1..21: mol_type = other DNA
tgccgcatggactcggtgccg

SEQ ID NO: 31313 - DNA, 21 bp, synthetic construct
  source 1..21: mol_type = other DNA
attatgagttcgcgttcctgg

SEQ ID NO: 31314 - DNA, 21 bp, synthetic construct
  source 1..21: mol_type = other DNA
tgcgccaaatcagcgcgggag

SEQ ID NO: 31315 - DNA, 21 bp, synthetic construct
  source 1..21: mol_type = other DNA
tatttccacggaacagttgac

SEQ ID NO: 31316 - DNA, 21 bp, synthetic construct
  source 1..21: mol_type = other DNA
tacctaaagagtaatccctac

SEQ ID NO: 31317 - DNA, 21 bp, synthetic construct
  source 1..21: mol_type = other DNA
atgactggcactagttgcatg

SEQ ID NO: 31318 - DNA, 21 bp, synthetic construct
  source 1..21: mol_type = other DNA
tgcaaaccacagcacggtgga

SEQ ID NO: 31319 - DNA, 21 bp, synthetic construct
  source 1..21: mol_type = other DNA
tacgagcggggatgcaaagag

SEQ ID NO: 31320 - DNA, 21 bp, synthetic construct
  source 1..21: mol_type = other DNA
agcattagcacgaatggagtg

SEQ ID NO: 31321 - DNA, 21 bp, synthetic construct
  source 1..21: mol_type = other DNA
ggaggagaatacgtctcgtat

SEQ ID NO: 31322 - DNA, 21 bp, synthetic construct
  source 1..21: mol_type = other DNA
tatgctcggaacgggcagaat

SEQ ID NO: 31323 - DNA, 21 bp, synthetic construct
  source 1..21: mol_type = other DNA
tatttctcgggtacacaccaa

SEQ ID NO: 31324 - DNA, 21 bp, synthetic construct
  source 1..21: mol_type = other DNA
tactatacaggttttgtcgac

SEQ ID NO: 31325 - DNA, 21 bp, synthetic construct
  source 1..21: mol_type = other DNA
tacgctcgtggcggtaataac

SEQ ID NO: 31326 - DNA, 21 bp, synthetic construct
  source 1..21: mol_type = other DNA
aaagatgagtggagaccgttc

SEQ ID NO: 31327 - DNA, 21 bp, synthetic construct
  source 1..21: mol_type = other DNA
tgtaagccgttgcaaccggcg

SEQ ID NO: 31328 - DNA, 21 bp, synthetic construct
  source 1..21: mol_type = other DNA
tggtttactggacgcatcgac

SEQ ID NO: 31329 - DNA, 21 bp, synthetic construct
  source 1..21: mol_type = other DNA
tacagcaggatgaatgacaac

SEQ ID NO: 31330 - DNA, 21 bp, synthetic construct
  source 1..21: mol_type = other DNA
aaggatgatttcgtcgtctgg

SEQ ID NO: 31331 - DNA, 21 bp, synthetic construct
  source 1..21: mol_type = other DNA
tatgccaaattaggttataat

SEQ ID NO: 31332 - DNA, 21 bp, synthetic construct
  source 1..21: mol_type = other DNA
tactcaagagctaatgctaat

SEQ ID NO: 31333 - DNA, 21 bp, synthetic construct
  source 1..21: mol_type = other DNA
ttttggacgggcgtcaaggat

SEQ ID NO: 31334 - DNA, 21 bp, synthetic construct
  source 1..21: mol_type = other DNA
ggctgcaaacctttgtgtgtt

SEQ ID NO: 31335 - DNA, 21 bp, synthetic construct
  source 1..21: mol_type = other DNA
aagtacgaccacgttacttgg

SEQ ID NO: 31336 - DNA, 21 bp, synthetic construct
  source 1..21: mol_type = other DNA
ttcttctccggggtacaggcc

SEQ ID NO: 31337 - DNA, 21 bp, synthetic construct
  source 1..21: mol_type = other DNA
tacagccgtctatctgattat

SEQ ID NO: 31338 - DNA, 21 bp, synthetic construct
  source 1..21: mol_type = other DNA
ttctccaagattggtttcaat

SEQ ID NO: 31339 - DNA, 21 bp, synthetic construct
  source 1..21: mol_type = other DNA
tatttcacaggcatgcaggaa

SEQ ID NO: 31340 - DNA, 21 bp, synthetic construct
  source 1..21: mol_type = other DNA
ttgagcgactttaagatctat

SEQ ID NO: 31341 - DNA, 21 bp, synthetic construct
  source 1..21: mol_type = other DNA
tgcgccccatatttacacgag

SEQ ID NO: 31342 - DNA, 21 bp, synthetic construct
  source 1..21: mol_type = other DNA
ttggccaggacgggtaatgac

SEQ ID NO: 31343 - DNA, 21 bp, synthetic construct
  source 1..21: mol_type = other DNA
tattcgaaacagaactggaac

SEQ ID NO: 31344 - DNA, 21 bp, synthetic construct
  source 1..21: mol_type = other DNA
tacttttccggtgttccaacg

SEQ ID NO: 31345 - DNA, 21 bp, synthetic construct
  source 1..21: mol_type = other DNA
tactttgctggcagaacgagt

SEQ ID NO: 31346 - DNA, 21 bp, synthetic construct
  source 1..21: mol_type = other DNA
tattacactggcgtccaggca

SEQ ID NO: 31347 - DNA, 21 bp, synthetic construct
  source 1..21: mol_type = other DNA
tgcaataaagatatgactgcg

SEQ ID NO: 31348 - DNA, 21 bp, synthetic construct
  source 1..21: mol_type = other DNA
tgcatgaaacctaggctcgaa

SEQ ID NO: 31349 - DNA, 21 bp, synthetic construct
  source 1..21: mol_type = other DNA
gggtgccgtcatggcgatgtt

SEQ ID NO: 31350 - DNA, 21 bp, synthetic construct
  source 1..21: mol_type = other DNA
tatgcccgtggtaatgttaac

SEQ ID NO: 31351 - DNA, 21 bp, synthetic construct
  source 1..21: mol_type = other DNA
tatgttcgttcacagccatta

SEQ ID NO: 31352 - DNA, 21 bp, synthetic construct
  source 1..21: mol_type = other DNA
tatagccgtacgggtggaaat

SEQ ID NO: 31353 - DNA, 21 bp, synthetic construct
  source 1..21: mol_type = other DNA
tggtggagtggaacggcggct

SEQ ID NO: 31354 - DNA, 21 bp, synthetic construct
  source 1..21: mol_type = other DNA
gagatgggaagcgcaacctgg

SEQ ID NO: 31355 - DNA, 21 bp, synthetic construct
  source 1..21: mol_type = other DNA
tggactccggcatgtaaagcc

SEQ ID NO: 31356 - DNA, 21 bp, synthetic construct
  source 1..21: mol_type = other DNA
atggaatcaacgaacggtgta

SEQ ID NO: 31357 - DNA, 21 bp, synthetic construct
  source 1..21: mol_type = other DNA
tacgccaggcaaggggctaat

SEQ ID NO: 31358 - DNA, 21 bp, synthetic construct
  source 1..21: mol_type = other DNA
tatgtcagaagccagccgcat

SEQ ID NO: 31359 - DNA, 21 bp, synthetic construct
  source 1..21: mol_type = other DNA
cgcacatacgaggtataccca

SEQ ID NO: 31360 - DNA, 21 bp, synthetic construct
  source 1..21: mol_type = other DNA
cgcgatcagtatagtacttac

SEQ ID NO: 31361 - DNA, 21 bp, synthetic construct
  source 1..21: mol_type = other DNA
tttttcagtggtcagcgggaa

SEQ ID NO: 31362 - DNA, 21 bp, synthetic construct
  source 1..21: mol_type = other DNA
ggtgatgattttgtgaggtgg

SEQ ID NO: 31363 - DNA, 21 bp, synthetic construct
  source 1..21: mol_type = other DNA
tatttcaccggcacgttacaa

SEQ ID NO: 31364 - DNA, 21 bp, synthetic construct
  source 1..21: mol_type = other DNA
tatagtcggctgaacaataac

SEQ ID NO: 31365 - DNA, 21 bp, synthetic construct
  source 1..21: mol_type = other DNA
tactatagcggtcggattgac

SEQ ID NO: 31366 - DNA, 21 bp, synthetic construct
  source 1..21: mol_type = other DNA
tactactcgggcgtaatagcc

SEQ ID NO: 31367 - DNA, 21 bp, synthetic construct
  source 1..21: mol_type = other DNA
tgtgcaccttttttacacgaa

SEQ ID NO: 31368 - DNA, 21 bp, synthetic construct
  source 1..21: mol_type = other DNA
tacagtcgaagcaatgataac

SEQ ID NO: 31369 - DNA, 21 bp, synthetic construct
  source 1..21: mol_type = other DNA
gtgcatgattacatgtcctat

SEQ ID NO: 31370 - DNA, 21 bp, synthetic construct
  source 1..21: mol_type = other DNA
aacgccctgggctgtgcgggt

SEQ ID NO: 31371 - DNA, 21 bp, synthetic construct
  source 1..21: mol_type = other DNA
tacgtcagaagcggatgtggg

SEQ ID NO: 31372 - DNA, 21 bp, synthetic construct
  source 1..21: mol_type = other DNA
taccatagactcagtcgcgat

SEQ ID NO: 31373 - DNA, 21 bp, synthetic construct
  source 1..21: mol_type = other DNA
tatgtaagatatgacactggg

SEQ ID NO: 31374 - DNA, 21 bp, synthetic construct
  source 1..21: mol_type = other DNA
ctcaggggcgacgattgcgca

SEQ ID NO: 31375 - DNA, 21 bp, synthetic construct
  source 1..21: mol_type = other DNA
ttagccaggtcagggtgggac

SEQ ID NO: 31376 - DNA, 21 bp, synthetic construct
  source 1..21: mol_type = other DNA
tttagcagcaccaacggtatt

SEQ ID NO: 31377 - DNA, 21 bp, synthetic construct
  source 1..21: mol_type = other DNA
tatgctcgtgggaatcccaat

SEQ ID NO: 31378 - DNA, 21 bp, synthetic construct
  source 1..21: mol_type = other DNA
gaaccccaaagccgtcattgg

SEQ ID NO: 31379 - DNA, 21 bp, synthetic construct
  source 1..21: mol_type = other DNA
ggttgcggtacgaaagctgga

SEQ ID NO: 31380 - DNA, 21 bp, synthetic construct
  source 1..21: mol_type = other DNA
cgcatggagagcgcggactgg

SEQ ID NO: 31381 - DNA, 21 bp, synthetic construct
  source 1..21: mol_type = other DNA
tattggtctcaaatcaaagac

SEQ ID NO: 31382 - DNA, 21 bp, synthetic construct
  source 1..21: mol_type = other DNA
ctgcagtcaaccaatggtgta

SEQ ID NO: 31383 - DNA, 21 bp, synthetic construct
  source 1..21: mol_type = other DNA
cttagtagacagaacttcaac

SEQ ID NO: 31384 - DNA, 21 bp, synthetic construct
  source 1..21: mol_type = other DNA
ttctacgaaggcaaaccgtgt

SEQ ID NO: 31385 - DNA, 21 bp, synthetic construct
  source 1..21: mol_type = other DNA
tgcaataaacctatgaccgta

SEQ ID NO: 31386 - DNA, 21 bp, synthetic construct
  source 1..21: mol_type = other DNA
tacagtcgcgctggaaacaac

SEQ ID NO: 31387 - DNA, 21 bp, synthetic construct
  source 1..21: mol_type = other DNA
tatagcaaatggaatacaaac

SEQ ID NO: 31388 - DNA, 21 bp, synthetic construct
  source 1..21: mol_type = other DNA
ttctcccgggcgggtattaac

SEQ ID NO: 31389 - DNA, 21 bp, synthetic construct
  source 1..21: mol_type = other DNA
tatgctcggatgggttataat

SEQ ID NO: 31390 - DNA, 21 bp, synthetic construct
  source 1..21: mol_type = other DNA
cgggaacaagaagtaagatgg

SEQ ID NO: 31391 - DNA, 21 bp, synthetic construct
  source 1..21: mol_type = other DNA
ggtgtagaagcggttcgatgg

SEQ ID NO: 31392 - DNA, 21 bp, synthetic construct
  source 1..21: mol_type = other DNA
tacacccgtttagatgtctta

SEQ ID NO: 31393 - DNA, 21 bp, synthetic construct
  source 1..21: mol_type = other DNA
tattttacaggttcggtcgac

SEQ ID NO: 31394 - DNA, 21 bp, synthetic construct
  source 1..21: mol_type = other DNA
tgcaagggatctaaagagcaa

SEQ ID NO: 31395 - DNA, 21 bp, synthetic construct
  source 1..21: mol_type = other DNA
cggctccccgacgtatatcct

SEQ ID NO: 31396 - DNA, 21 bp, synthetic construct
  source 1..21: mol_type = other DNA
tattacaccggagtaaagggt

SEQ ID NO: 31397 - DNA, 21 bp, synthetic construct
  source 1..21: mol_type = other DNA
cacatgcctgaccgcaagtgg

SEQ ID NO: 31398 - DNA, 21 bp, synthetic construct
  source 1..21: mol_type = other DNA
attaacggaggcaagtgtgac

SEQ ID NO: 31399 - DNA, 21 bp, synthetic construct
  source 1..21: mol_type = other DNA
tattatactggtaagtgcgat

SEQ ID NO: 31400 - DNA, 21 bp, synthetic construct
  source 1..21: mol_type = other DNA
tatttcagtgggaccgtgtat

SEQ ID NO: 31401 - DNA, 21 bp, synthetic construct
  source 1..21: mol_type = other DNA
cgccgtgatggtacccccgca

SEQ ID NO: 31402 - DNA, 21 bp, synthetic construct
  source 1..21: mol_type = other DNA
gttatggcggacagggcctgg

SEQ ID NO: 31403 - DNA, 21 bp, synthetic construct
  source 1..21: mol_type = other DNA
tatagtcgttcaggaatcaat

SEQ ID NO: 31404 - DNA, 21 bp, synthetic construct
  source 1..21: mol_type = other DNA
ctctggagaaccgagcccgat

SEQ ID NO: 31405 - DNA, 21 bp, synthetic construct
  source 1..21: mol_type = other DNA
cgcgagggggcaagctactgg

SEQ ID NO: 31406 - DNA, 21 bp, synthetic construct
  source 1..21: mol_type = other DNA
tatagccgcgcgggacagaat

SEQ ID NO: 31407 - DNA, 21 bp, synthetic construct
  source 1..21: mol_type = other DNA
cgggaagagagtagtagatgg

SEQ ID NO: 31408 - DNA, 21 bp, synthetic construct
  source 1..21: mol_type = other DNA
tatgcgcggctaaacattaat

SEQ ID NO: 31409 - DNA, 21 bp, synthetic construct
  source 1..21: mol_type = other DNA
tgcggctcatggcagagggaa

SEQ ID NO: 31410 - DNA, 21 bp, synthetic construct
  source 1..21: mol_type = other DNA
tatttttcaggcctccatgcc

SEQ ID NO: 31411 - DNA, 21 bp, synthetic construct
  source 1..21: mol_type = other DNA
aaggacggatacagtgcatat

SEQ ID NO: 31412 - DNA, 21 bp, synthetic construct
  source 1..21: mol_type = other DNA
tgccgcggcgataacggggtg

SEQ ID NO: 31413 - DNA, 21 bp, synthetic construct
  source 1..21: mol_type = other DNA
tatagccgaatgaatataaat

SEQ ID NO: 31414 - DNA, 21 bp, synthetic construct
  source 1..21: mol_type = other DNA
cgcaccccgacttgtccacca

SEQ ID NO: 31415 - DNA, 21 bp, synthetic construct
  source 1..21: mol_type = other DNA
tatgcacgtcagaacattaac

SEQ ID NO: 31416 - DNA, 21 bp, synthetic construct
  source 1..21: mol_type = other DNA
tacagccgtataaactacaac

SEQ ID NO: 31417 - DNA, 21 bp, synthetic construct
  source 1..21: mol_type = other DNA
cgcgactcctattctacatac

SEQ ID NO: 31418 - DNA, 21 bp, synthetic construct
  source 1..21: mol_type = other DNA
atgaccggaactagctgctgg

SEQ ID NO: 31419 - DNA, 21 bp, synthetic construct
  source 1..21: mol_type = other DNA
gatgcattccgtggatttgat

SEQ ID NO: 31420 - DNA, 21 bp, synthetic construct
  source 1..21: mol_type = other DNA
tcggctaatacgggaaggtgc

SEQ ID NO: 31421 - DNA, 21 bp, synthetic construct
  source 1..21: mol_type = other DNA
tattcacgcatgggcgccaat

SEQ ID NO: 31422 - DNA, 21 bp, synthetic construct
  source 1..21: mol_type = other DNA
ggatgcgtggttaagcctgag

SEQ ID NO: 31423 - DNA, 21 bp, synthetic construct
  source 1..21: mol_type = other DNA
ttaaaggacggcactaacgct

SEQ ID NO: 31424 - DNA, 21 bp, synthetic construct
  source 1..21: mol_type = other DNA
tactacaccggccatcttgat

SEQ ID NO: 31425 - DNA, 21 bp, synthetic construct
  source 1..21: mol_type = other DNA
tatttcagcgggcaaagcgcg

SEQ ID NO: 31426 - DNA, 21 bp, synthetic construct
  source 1..21: mol_type = other DNA
tacttcgccggcgtgatgaat

SEQ ID NO: 31427 - DNA, 21 bp, synthetic construct
  source 1..21: mol_type = other DNA
tgtagagaaggtactcgggcc

SEQ ID NO: 31428 - DNA, 21 bp, synthetic construct
  source 1..21: mol_type = other DNA
agggaaccgggctgcaaggaa

SEQ ID NO: 31429 - DNA, 21 bp, synthetic construct
  source 1..21: mol_type = other DNA
gcgcctgagacgatccgttgg

SEQ ID NO: 31430 - DNA, 21 bp, synthetic construct
  source 1..21: mol_type = other DNA
ctttcatccacgaacggtatc

SEQ ID NO: 31431 - DNA, 21 bp, synthetic construct
  source 1..21: mol_type = other DNA
tactcccgcagtaatatcaac

SEQ ID NO: 31432 - DNA, 21 bp, synthetic construct
  source 1..21: mol_type = other DNA
tttatgtctactaatggagtc

SEQ ID NO: 31433 - DNA, 21 bp, synthetic construct
  source 1..21: mol_type = other DNA
ggaagtataggggtagcgtgg

SEQ ID NO: 31434 - DNA, 21 bp, synthetic construct
  source 1..21: mol_type = other DNA
tttttcagtgggcagatagaa

SEQ ID NO: 31435 - DNA, 21 bp, synthetic construct
  source 1..21: mol_type = other DNA
agggaggatcatacttactgg

SEQ ID NO: 31436 - DNA, 21 bp, synthetic construct
  source 1..21: mol_type = other DNA
tatagccggatgaatatgaat

SEQ ID NO: 31437 - DNA, 21 bp, synthetic construct
  source 1..21: mol_type = other DNA
tactttcccggctgcaaggag

SEQ ID NO: 31438 - DNA, 21 bp, synthetic construct
  source 1..21: mol_type = other DNA
tgtgggggtggcaaaccaccg

SEQ ID NO: 31439 - DNA, 21 bp, synthetic construct
  source 1..21: mol_type = other DNA
aacgctcttgaaggcaaagat

SEQ ID NO: 31440 - DNA, 21 bp, synthetic construct
  source 1..21: mol_type = other DNA
aggacgtatgatacatatccg

SEQ ID NO: 31441 - DNA, 21 bp, synthetic construct
  source 1..21: mol_type = other DNA
tatttttccggtaggcatgac

SEQ ID NO: 31442 - DNA, 21 bp, synthetic construct
  source 1..21: mol_type = other DNA
tattctcgagcgaactataac

SEQ ID NO: 31443 - DNA, 21 bp, synthetic construct
  source 1..21: mol_type = other DNA
atgtttgatggtacggaagcg

SEQ ID NO: 31444 - DNA, 21 bp, synthetic construct
  source 1..21: mol_type = other DNA
tacccctttccaacggaggct

SEQ ID NO: 31445 - DNA, 21 bp, synthetic construct
  source 1..21: mol_type = other DNA
gcgatgttgtcctcgacctgg

SEQ ID NO: 31446 - DNA, 21 bp, synthetic construct
  source 1..21: mol_type = other DNA
actgatgagacggtgtactca

SEQ ID NO: 31447 - DNA, 21 bp, synthetic construct
  source 1..21: mol_type = other DNA
tactcaaaaatgggtgacaac

SEQ ID NO: 31448 - DNA, 21 bp, synthetic construct
  source 1..21: mol_type = other DNA
ggctgtagacatggtggtatc

SEQ ID NO: 31449 - DNA, 21 bp, synthetic construct
  source 1..21: mol_type = other DNA
tattggactaagatacccgaa

SEQ ID NO: 31450 - DNA, 21 bp, synthetic construct
  source 1..21: mol_type = other DNA
cgggatgaatttgtaatgttt

SEQ ID NO: 31451 - DNA, 21 bp, synthetic construct
  source 1..21: mol_type = other DNA
tacagccgtgttaatgttaac

SEQ ID NO: 31452 - DNA, 21 bp, synthetic construct
  source 1..21: mol_type = other DNA
tacagcgctcgaaatgataac

SEQ ID NO: 31453 - DNA, 21 bp, synthetic construct
  source 1..21: mol_type = other DNA
tttgaaagcacgaacggcatt

SEQ ID NO: 31454 - DNA, 21 bp, synthetic construct
  source 1..21: mol_type = other DNA
tattggagtggtctcctcgac

SEQ ID NO: 31455 - DNA, 21 bp, synthetic construct
  source 1..21: mol_type = other DNA
agaaacgagtatacgacgtat

SEQ ID NO: 31456 - DNA, 21 bp, synthetic construct
  source 1..21: mol_type = other DNA
tggttttcggggaagattgac

SEQ ID NO: 31457 - DNA, 21 bp, synthetic construct
  source 1..21: mol_type = other DNA
aaatgggatagtgccacctgg

SEQ ID NO: 31458 - DNA, 21 bp, synthetic construct
  source 1..21: mol_type = other DNA
atgttcgacgggactgaggct

SEQ ID NO: 31459 - DNA, 21 bp, synthetic construct
  source 1..21: mol_type = other DNA
aaacttgagtcagtggtgtgg

SEQ ID NO: 31460 - DNA, 21 bp, synthetic construct
  source 1..21: mol_type = other DNA
tattcgaggaaaggtgagaat

SEQ ID NO: 31461 - DNA, 21 bp, synthetic construct
  source 1..21: mol_type = other DNA
tacttcacgaaaaactgtgag

SEQ ID NO: 31462 - DNA, 21 bp, synthetic construct
  source 1..21: mol_type = other DNA
tactggacaggcacgcttgag

SEQ ID NO: 31463 - DNA, 21 bp, synthetic construct
  source 1..21: mol_type = other DNA
tgcaaaccaccaatgcctcct

SEQ ID NO: 31464 - DNA, 21 bp, synthetic construct
  source 1..21: mol_type = other DNA
tgtagaccgggaactcctggc

SEQ ID NO: 31465 - DNA, 21 bp, synthetic construct
  source 1..21: mol_type = other DNA
gtaatgcttgatagggggtgg

SEQ ID NO: 31466 - DNA, 21 bp, synthetic construct
  source 1..21: mol_type = other DNA
tttagtcgaactggtttgaat

SEQ ID NO: 31467 - DNA, 21 bp, synthetic construct
  source 1..21: mol_type = other DNA
atgtgggatggaacgattgca

SEQ ID NO: 31468 - DNA, 21 bp, synthetic construct
  source 1..21: mol_type = other DNA
tgcaccagtgatacagggcat

SEQ ID NO: 31469 - DNA, 21 bp, synthetic construct
  source 1..21: mol_type = other DNA
cccttagccgataggatgtgg

SEQ ID NO: 31470 - DNA, 21 bp, synthetic construct
  source 1..21: mol_type = other DNA
tatttcgcggggcaagtagct

SEQ ID NO: 31471 - DNA, 21 bp, synthetic construct
  source 1..21: mol_type = other DNA
tacgttcgctcaaatgcgaat

SEQ ID NO: 31472 - DNA, 21 bp, synthetic construct
  source 1..21: mol_type = other DNA
ggggccgacggtgtccggtgg

SEQ ID NO: 31473 - DNA, 21 bp, synthetic construct
  source 1..21: mol_type = other DNA
tactttaaaggtaaatgcgaa

SEQ ID NO: 31474 - DNA, 21 bp, synthetic construct
  source 1..21: mol_type = other DNA
tacttttcgggaatgaccgaa

SEQ ID NO: 31475 - DNA, 21 bp, synthetic construct
  source 1..21: mol_type = other DNA
tatttgaaatcaaacccatat

SEQ ID NO: 31476 - DNA, 21 bp, synthetic construct
  source 1..21: mol_type = other DNA
gaccgggggggatgcccgagg

SEQ ID NO: 31477 - DNA, 21 bp, synthetic construct
  source 1..21: mol_type = other DNA
tacgcccgtgggggccacaat

SEQ ID NO: 31478 - DNA, 21 bp, synthetic construct
  source 1..21: mol_type = other DNA
aagtatgagtcctcggtatgg

SEQ ID NO: 31479 - DNA, 21 bp, synthetic construct
  source 1..21: mol_type = other DNA
atcatgcaagatagggcctgg

SEQ ID NO: 31480 - DNA, 21 bp, synthetic construct
  source 1..21: mol_type = other DNA
tacgcgagacagtctaataac

SEQ ID NO: 31481 - DNA, 21 bp, synthetic construct
  source 1..21: mol_type = other DNA
ataccatcgtccagcctttgg

SEQ ID NO: 31482 - DNA, 21 bp, synthetic construct
  source 1..21: mol_type = other DNA
gggggctcaacatctacgtgg

SEQ ID NO: 31483 - DNA, 21 bp, synthetic construct
  source 1..21: mol_type = other DNA
tgtaagccacagggcggaaca

SEQ ID NO: 31484 - DNA, 21 bp, synthetic construct
  source 1..21: mol_type = other DNA
tattggtccggtatgcctgaa

SEQ ID NO: 31485 - DNA, 21 bp, synthetic construct
  source 1..21: mol_type = other DNA
gatttgagttccggcaactgg

SEQ ID NO: 31486 - DNA, 21 bp, synthetic construct
  source 1..21: mol_type = other DNA
cgggagggtaccagttactgg

SEQ ID NO: 31487 - DNA, 21 bp, synthetic construct
  source 1..21: mol_type = other DNA
tgcaaaccacccatgggggct

SEQ ID NO: 31488 - DNA, 21 bp, synthetic construct
  source 1..21: mol_type = other DNA
tgcggggggggtaagacacca

SEQ ID NO: 31489 - DNA, 21 bp, synthetic construct
  source 1..21: mol_type = other DNA
tcggacggcgtaagtaaatgg

SEQ ID NO: 31490 - DNA, 21 bp, synthetic construct
  source 1..21: mol_type = other DNA
tgcaaacctcagacaataggg

SEQ ID NO: 31491 - DNA, 21 bp, synthetic construct
  source 1..21: mol_type = other DNA
ttcatcaaacatgacacgaag

SEQ ID NO: 31492 - DNA, 21 bp, synthetic construct
  source 1..21: mol_type = other DNA
tgcaataaaccatatacggcg

SEQ ID NO: 31493 - DNA, 21 bp, synthetic construct
  source 1..21: mol_type = other DNA
tgcaaaggactaccacccccg

SEQ ID NO: 31494 - DNA, 21 bp, synthetic construct
  source 1..21: mol_type = other DNA
tatagccgcagcaacgagaat

SEQ ID NO: 31495 - DNA, 21 bp, synthetic construct
  source 1..21: mol_type = other DNA
tactcaagattgagtggaaac

SEQ ID NO: 31496 - DNA, 21 bp, synthetic construct
  source 1..21: mol_type = other DNA
tgcatggaaaggaagccagaa

SEQ ID NO: 31497 - DNA, 21 bp, synthetic construct
  source 1..21: mol_type = other DNA
tggatgaaaggcgcctgcgcc

SEQ ID NO: 31498 - DNA, 21 bp, synthetic construct
  source 1..21: mol_type = other DNA
tattggagtggtatgaatgcc

SEQ ID NO: 31499 - DNA, 21 bp, synthetic construct
  source 1..21: mol_type = other DNA
actgacggcacatcgttgtgg

SEQ ID NO: 31500 - DNA, 21 bp, synthetic construct
  source 1..21: mol_type = other DNA
tatgtccgctcgcaacagagt

SEQ ID NO: 31501 - DNA, 21 bp, synthetic construct
  source 1..21: mol_type = other DNA
gtcgacgaattcctgtcatgg

SEQ ID NO: 31502 - DNA, 21 bp, synthetic construct
  source 1..21: mol_type = other DNA
tatagcagaatgggtgcaaac

SEQ ID NO: 31503 - DNA, 21 bp, synthetic construct
  source 1..21: mol_type = other DNA
tactcacggatgaatgctaat

SEQ ID NO: 31504 - DNA, 21 bp, synthetic construct
  source 1..21: mol_type = other DNA
cgcgacgcctttaccgtatat

SEQ ID NO: 31505 - DNA, 21 bp, synthetic construct
  source 1..21: mol_type = other DNA
ttttccagagcgggttctaac

SEQ ID NO: 31506 - DNA, 21 bp, synthetic construct
  source 1..21: mol_type = other DNA
tatgagatggggtgtaaagaa

SEQ ID NO: 31507 - DNA, 21 bp, synthetic construct
  source 1..21: mol_type = other DNA
tcgatgcaggaccgtggctgg

SEQ ID NO: 31508 - DNA, 21 bp, synthetic construct
  source 1..21: mol_type = other DNA
tatgatagtaccaacgggatc

SEQ ID NO: 31509 - DNA, 21 bp, synthetic construct
  source 1..21: mol_type = other DNA
aagaacgatagtgccacttgt

SEQ ID NO: 31510 - DNA, 21 bp, synthetic construct
  source 1..21: mol_type = other DNA
tgtgcaaaggttggcgtacca

SEQ ID NO: 31511 - DNA, 21 bp, synthetic construct
  source 1..21: mol_type = other DNA
atgactgggacatcatgtatt

SEQ ID NO: 31512 - DNA, 21 bp, synthetic construct
  source 1..21: mol_type = other DNA
cgtagtcccgatgcctaccca

SEQ ID NO: 31513 - DNA, 21 bp, synthetic construct
  source 1..21: mol_type = other DNA
gtaggaatgagatgtccccca

SEQ ID NO: 31514 - DNA, 21 bp, synthetic construct
  source 1..21: mol_type = other DNA
agaagcgaattcctaccatat

SEQ ID NO: 31515 - DNA, 21 bp, synthetic construct
  source 1..21: mol_type = other DNA
tgcatgaagaagagtgagaca

SEQ ID NO: 31516 - DNA, 21 bp, synthetic construct
  source 1..21: mol_type = other DNA
tactcgaagcacggcttcaac

SEQ ID NO: 31517 - DNA, 21 bp, synthetic construct
  source 1..21: mol_type = other DNA
tatgctaagggcggccttaat

SEQ ID NO: 31518 - DNA, 21 bp, synthetic construct
  source 1..21: mol_type = other DNA
atgtttgatgggacacgggca

SEQ ID NO: 31519 - DNA, 21 bp, synthetic construct
  source 1..21: mol_type = other DNA
attcctcatcgaagctgcgct

SEQ ID NO: 31520 - DNA, 21 bp, synthetic construct
  source 1..21: mol_type = other DNA
tatagtcggcagggtatgaat

SEQ ID NO: 31521 - DNA, 21 bp, synthetic construct
  source 1..21: mol_type = other DNA
tactcccgcctaaacggtaat

SEQ ID NO: 31522 - DNA, 21 bp, synthetic construct
  source 1..21: mol_type = other DNA
taccaccgcctaagtaacaac

SEQ ID NO: 31523 - DNA, 21 bp, synthetic construct
  source 1..21: mol_type = other DNA
ttccaaagcaccaacgggatc

SEQ ID NO: 31524 - DNA, 21 bp, synthetic construct
  source 1..21: mol_type = other DNA
tattggtcaggaacaatcgag

SEQ ID NO: 31525 - DNA, 21 bp, synthetic construct
  source 1..21: mol_type = other DNA
cgcgtgagctgcccgccgcca

SEQ ID NO: 31526 - DNA, 21 bp, synthetic construct
  source 1..21: mol_type = other DNA
ttaatgaacgacgcgtatgta

SEQ ID NO: 31527 - DNA, 21 bp, synthetic construct
  source 1..21: mol_type = other DNA
tactattctggaaagatcgac

SEQ ID NO: 31528 - DNA, 21 bp, synthetic construct
  source 1..21: mol_type = other DNA
aagtatgccttttcctcagaa

SEQ ID NO: 31529 - DNA, 21 bp, synthetic construct
  source 1..21: mol_type = other DNA
tactcccgcgttaacgctaac

SEQ ID NO: 31530 - DNA, 21 bp, synthetic construct
  source 1..21: mol_type = other DNA
tgcatgcccggagccgttgag

SEQ ID NO: 31531 - DNA, 21 bp, synthetic construct
  source 1..21: mol_type = other DNA
tgtagatctacgcccgggatg

SEQ ID NO: 31532 - DNA, 21 bp, synthetic construct
  source 1..21: mol_type = other DNA
tatgctaggcatgggcccaac

SEQ ID NO: 31533 - DNA, 21 bp, synthetic construct
  source 1..21: mol_type = other DNA
cgcatgtccgatcacaattgg

SEQ ID NO: 31534 - DNA, 21 bp, synthetic construct
  source 1..21: mol_type = other DNA
tacctacccgggtgcaaagag

SEQ ID NO: 31535 - DNA, 21 bp, synthetic construct
  source 1..21: mol_type = other DNA
aaagacgggagttgtaaagcg

SEQ ID NO: 31536 - DNA, 21 bp, synthetic construct
  source 1..21: mol_type = other DNA
tatgtgaaatcccaagttatc

SEQ ID NO: 31537 - DNA, 21 bp, synthetic construct
  source 1..21: mol_type = other DNA
tatttccaaggaaggttagag

SEQ ID NO: 31538 - DNA, 21 bp, synthetic construct
  source 1..21: mol_type = other DNA
cacgcaaggcaatcccctaac

SEQ ID NO: 31539 - DNA, 21 bp, synthetic construct
  source 1..21: mol_type = other DNA
tgcagagaagggacaccacca

SEQ ID NO: 31540 - DNA, 21 bp, synthetic construct
  source 1..21: mol_type = other DNA
acaaagtcaaccaatggaatc

SEQ ID NO: 31541 - DNA, 21 bp, synthetic construct
  source 1..21: mol_type = other DNA
tactggggaggagtggccgca

SEQ ID NO: 31542 - DNA, 21 bp, synthetic construct
  source 1..21: mol_type = other DNA
tacttgaagaacgacccaacg

SEQ ID NO: 31543 - DNA, 21 bp, synthetic construct
  source 1..21: mol_type = other DNA
tgtgctaatcacacaaagcct

SEQ ID NO: 31544 - DNA, 21 bp, synthetic construct
  source 1..21: mol_type = other DNA
gcgagcagtacaaatggaatt

SEQ ID NO: 31545 - DNA, 21 bp, synthetic construct
  source 1..21: mol_type = other DNA
tattcccggatacatccgaat

SEQ ID NO: 31546 - DNA, 21 bp, synthetic construct
  source 1..21: mol_type = other DNA
tacgtcaggagtgatgccgga

SEQ ID NO: 31547 - DNA, 21 bp, synthetic construct
  source 1..21: mol_type = other DNA
tacagcaggcttggaaataac

SEQ ID NO: 31548 - DNA, 21 bp, synthetic construct
  source 1..21: mol_type = other DNA
tgcaaagaattaaagatggat

SEQ ID NO: 31549 - DNA, 21 bp, synthetic construct
  source 1..21: mol_type = other DNA
tacttccacggtttgcgggaa

SEQ ID NO: 31550 - DNA, 21 bp, synthetic construct
  source 1..21: mol_type = other DNA
tggtggagtcaggtccgcgaa

SEQ ID NO: 31551 - DNA, 21 bp, synthetic construct
  source 1..21: mol_type = other DNA
gatttgagggatagaatttgg

SEQ ID NO: 31552 - DNA, 21 bp, synthetic construct
  source 1..21: mol_type = other DNA
tatgggagaggatgttgtgga

SEQ ID NO: 31553 - DNA, 21 bp, synthetic construct
  source 1..21: mol_type = other DNA
atcccacacaaggggataggt

SEQ ID NO: 31554 - DNA, 21 bp, synthetic construct
  source 1..21: mol_type = other DNA
tacttcagcggcgaaattgca

SEQ ID NO: 31555 - DNA, 21 bp, synthetic construct
  source 1..21: mol_type = other DNA
ggggtagacgtggtccgctgg

SEQ ID NO: 31556 - DNA, 21 bp, synthetic construct
  source 1..21: mol_type = other DNA
tggagtagagtcggcgtgaat

SEQ ID NO: 31557 - DNA, 21 bp, synthetic construct
  source 1..21: mol_type = other DNA
aggttagagagtgcaggatgg

SEQ ID NO: 31558 - DNA, 21 bp, synthetic construct
  source 1..21: mol_type = other DNA
tgcaagccaccctccgattat

SEQ ID NO: 31559 - DNA, 21 bp, synthetic construct
  source 1..21: mol_type = other DNA
acttgggacggtcaaaatgct

SEQ ID NO: 31560 - DNA, 21 bp, synthetic construct
  source 1..21: mol_type = other DNA
tgtaagggttctggcgaacaa

SEQ ID NO: 31561 - DNA, 21 bp, synthetic construct
  source 1..21: mol_type = other DNA
tatgccaggacaaacgcgaac

SEQ ID NO: 31562 - DNA, 21 bp, synthetic construct
  source 1..21: mol_type = other DNA
tatgctcgtatagggagtaat

SEQ ID NO: 31563 - DNA, 21 bp, synthetic construct
  source 1..21: mol_type = other DNA
taccaccgtctccaatcgaca

SEQ ID NO: 31564 - DNA, 21 bp, synthetic construct
  source 1..21: mol_type = other DNA
tattcaagacagggtataaat

SEQ ID NO: 31565 - DNA, 21 bp, synthetic construct
  source 1..21: mol_type = other DNA
aaagatgactggacgccctac

SEQ ID NO: 31566 - DNA, 21 bp, synthetic construct
  source 1..21: mol_type = other DNA
tactcaagaatcagccccaac

SEQ ID NO: 31567 - DNA, 21 bp, synthetic construct
  source 1..21: mol_type = other DNA
tgtaagcctaggtgctgcgaa

SEQ ID NO: 31568 - DNA, 21 bp, synthetic construct
  source 1..21: mol_type = other DNA
tgcaagcccgaagcatttcct

SEQ ID NO: 31569 - DNA, 21 bp, synthetic construct
  source 1..21: mol_type = other DNA
ttttttagtggtaggattgac

SEQ ID NO: 31570 - DNA, 21 bp, synthetic construct
  source 1..21: mol_type = other DNA
cactggtcgacgaacggagtc

SEQ ID NO: 31571 - DNA, 21 bp, synthetic construct
  source 1..21: mol_type = other DNA
tattacacaggtagacacgat

SEQ ID NO: 31572 - DNA, 21 bp, synthetic construct
  source 1..21: mol_type = other DNA
tacgccagaactagccataac

SEQ ID NO: 31573 - DNA, 21 bp, synthetic construct
  source 1..21: mol_type = other DNA
tattttacggggaacagagat

SEQ ID NO: 31574 - DNA, 21 bp, synthetic construct
  source 1..21: mol_type = other DNA
tgtaacaaacctatgactatg

SEQ ID NO: 31575 - DNA, 21 bp, synthetic construct
  source 1..21: mol_type = other DNA
agggatggctcgtctggatgg

SEQ ID NO: 31576 - DNA, 21 bp, synthetic construct
  source 1..21: mol_type = other DNA
tttagtcggatgaatgcaaat

SEQ ID NO: 31577 - DNA, 21 bp, synthetic construct
  source 1..21: mol_type = other DNA
cattggagtactaatggcgtg

SEQ ID NO: 31578 - DNA, 21 bp, synthetic construct
  source 1..21: mol_type = other DNA
cgcgaggatttctctacttgg

SEQ ID NO: 31579 - DNA, 21 bp, synthetic construct
  source 1..21: mol_type = other DNA
tattatagcggggtaatggca

SEQ ID NO: 31580 - DNA, 21 bp, synthetic construct
  source 1..21: mol_type = other DNA
ttttttagcggacgaattgac

SEQ ID NO: 31581 - DNA, 21 bp, synthetic construct
  source 1..21: mol_type = other DNA
tgtagagaggggactcgcctc

SEQ ID NO: 31582 - DNA, 21 bp, synthetic construct
  source 1..21: mol_type = other DNA
tactttcacggcgtgcaagac

SEQ ID NO: 31583 - DNA, 21 bp, synthetic construct
  source 1..21: mol_type = other DNA
agagactccacccacggcatc

SEQ ID NO: 31584 - DNA, 21 bp, synthetic construct
  source 1..21: mol_type = other DNA
tatgctaggatcggcaccaat

SEQ ID NO: 31585 - DNA, 21 bp, synthetic construct
  source 1..21: mol_type = other DNA
tccatgcaagctcgatcgtgg

SEQ ID NO: 31586 - DNA, 21 bp, synthetic construct
  source 1..21: mol_type = other DNA
tactcacggataggtcccttc

SEQ ID NO: 31587 - DNA, 21 bp, synthetic construct
  source 1..21: mol_type = other DNA
tgtaaaagtgacacacgatgg

SEQ ID NO: 31588 - DNA, 21 bp, synthetic construct
  source 1..21: mol_type = other DNA
tattctagagcaggacacaac

SEQ ID NO: 31589 - DNA, 21 bp, synthetic construct
  source 1..21: mol_type = other DNA
cgggaggaaatcgtaaggtgg

SEQ ID NO: 31590 - DNA, 21 bp, synthetic construct
  source 1..21: mol_type = other DNA
tggtggagtgagatcagagag

SEQ ID NO: 31591 - DNA, 21 bp, synthetic construct
  source 1..21: mol_type = other DNA
catccatcgaaatgtcctccc

SEQ ID NO: 31592 - DNA, 21 bp, synthetic construct
  source 1..21: mol_type = other DNA
atgcagggaacgagttgcttg

SEQ ID NO: 31593 - DNA, 21 bp, synthetic construct
  source 1..21: mol_type = other DNA
cgggacaaaacagaaggttgc

SEQ ID NO: 31594 - DNA, 21 bp, synthetic construct
  source 1..21: mol_type = other DNA
tgtaaactcgacaaagatgac

SEQ ID NO: 31595 - DNA, 21 bp, synthetic construct
  source 1..21: mol_type = other DNA
atgttaagcgataggacgtgg

SEQ ID NO: 31596 - DNA, 21 bp, synthetic construct
  source 1..21: mol_type = other DNA
tggaccagcacccacggcgtg

SEQ ID NO: 31597 - DNA, 21 bp, synthetic construct
  source 1..21: mol_type = other DNA
tactggtcagggacccgcgaa

SEQ ID NO: 31598 - DNA, 21 bp, synthetic construct
  source 1..21: mol_type = other DNA
ttctggagcggaattcccgct

SEQ ID NO: 31599 - DNA, 21 bp, synthetic construct
  source 1..21: mol_type = other DNA
gtcgccgatggcctccggtgg

SEQ ID NO: 31600 - DNA, 21 bp, synthetic construct
  source 1..21: mol_type = other DNA
tgcgcggaccgtaagcaaggg

SEQ ID NO: 31601 - DNA, 21 bp, synthetic construct
  source 1..21: mol_type = other DNA
tttagcaggttaaatattaat

SEQ ID NO: 31602 - DNA, 21 bp, synthetic construct
  source 1..21: mol_type = other DNA
tgtagaccacagacgccatcg

SEQ ID NO: 31603 - DNA, 21 bp, synthetic construct
  source 1..21: mol_type = other DNA
ttcagtcgcgtaggtataaat

SEQ ID NO: 31604 - DNA, 21 bp, synthetic construct
  source 1..21: mol_type = other DNA
tatgccaggaatggattcaac

SEQ ID NO: 31605 - DNA, 21 bp, synthetic construct
  source 1..21: mol_type = other DNA
aggaccgagtttgaaggttat

SEQ ID NO: 31606 - DNA, 21 bp, synthetic construct
  source 1..21: mol_type = other DNA
aaggacgatttcgtttacttc

SEQ ID NO: 31607 - DNA, 21 bp, synthetic construct
  source 1..21: mol_type = other DNA
tacgctcgaggaaacttcaat

SEQ ID NO: 31608 - DNA, 21 bp, synthetic construct
  source 1..21: mol_type = other DNA
gcggggtacgatcggctgtgg

SEQ ID NO: 31609 - DNA, 21 bp, synthetic construct
  source 1..21: mol_type = other DNA
tgtaacaagccgatgcatgcg

SEQ ID NO: 31610 - DNA, 21 bp, synthetic construct
  source 1..21: mol_type = other DNA
tactcgaagcttggtgcggac

SEQ ID NO: 31611 - DNA, 21 bp, synthetic construct
  source 1..21: mol_type = other DNA
cacggaaaagcgcagtgtgtc

SEQ ID NO: 31612 - DNA, 21 bp, synthetic construct
  source 1..21: mol_type = other DNA
gagatgggctcgagtaattgg

SEQ ID NO: 31613 - DNA, 21 bp, synthetic construct
  source 1..21: mol_type = other DNA
acaacggactacgtgatgtat

SEQ ID NO: 31614 - DNA, 21 bp, synthetic construct
  source 1..21: mol_type = other DNA
cgtacgtacgagacattccca

SEQ ID NO: 31615 - DNA, 21 bp, synthetic construct
  source 1..21: mol_type = other DNA
gtcaacgattacttatcatac

SEQ ID NO: 31616 - DNA, 21 bp, synthetic construct
  source 1..21: mol_type = other DNA
tattcccgtacaggtcataat

SEQ ID NO: 31617 - DNA, 21 bp, synthetic construct
  source 1..21: mol_type = other DNA
tactggagcggcatgcacgaa

SEQ ID NO: 31618 - DNA, 21 bp, synthetic construct
  source 1..21: mol_type = other DNA
tactacactggacaaaccgaa

SEQ ID NO: 31619 - DNA, 21 bp, synthetic construct
  source 1..21: mol_type = other DNA
ggagacgagtgggttggatac

SEQ ID NO: 31620 - DNA, 21 bp, synthetic construct
  source 1..21: mol_type = other DNA
tattcgaagaatgggaacaat

SEQ ID NO: 31621 - DNA, 21 bp, synthetic construct
  source 1..21: mol_type = other DNA
tatagtagggcaaatgataac

SEQ ID NO: 31622 - DNA, 21 bp, synthetic construct
  source 1..21: mol_type = other DNA
tgcataacgagagagcacgtt

SEQ ID NO: 31623 - DNA, 21 bp, synthetic construct
  source 1..21: mol_type = other DNA
attgctgacggtcttaggtgg

SEQ ID NO: 31624 - DNA, 21 bp, synthetic construct
  source 1..21: mol_type = other DNA
tactggacaggtacgaccgaa

SEQ ID NO: 31625 - DNA, 21 bp, synthetic construct
  source 1..21: mol_type = other DNA
tgtagggagatgggtgttggt

SEQ ID NO: 31626 - DNA, 21 bp, synthetic construct
  source 1..21: mol_type = other DNA
tactccagagcaggcgcgaat

SEQ ID NO: 31627 - DNA, 21 bp, synthetic construct
  source 1..21: mol_type = other DNA
tatgtccgaagcgggacgaac

SEQ ID NO: 31628 - DNA, 21 bp, synthetic construct
  source 1..21: mol_type = other DNA
cgtatggataacgtgtttccg

SEQ ID NO: 31629 - DNA, 21 bp, synthetic construct
  source 1..21: mol_type = other DNA
gataagtatctaaacacatgt

SEQ ID NO: 31630 - DNA, 21 bp, synthetic construct
  source 1..21: mol_type = other DNA
tgcacctcgaagacgggggat

SEQ ID NO: 31631 - DNA, 21 bp, synthetic construct
  source 1..21: mol_type = other DNA
tattctaggatgggatcgaat

SEQ ID NO: 31632 - DNA, 21 bp, synthetic construct
  source 1..21: mol_type = other DNA
tgcaaaccacgaccagaagca

SEQ ID NO: 31633 - DNA, 21 bp, synthetic construct
  source 1..21: mol_type = other DNA
gggtcagagtttacaagtttc

SEQ ID NO: 31634 - DNA, 21 bp, synthetic construct
  source 1..21: mol_type = other DNA
ttgcacagattacatgctgat

SEQ ID NO: 31635 - DNA, 21 bp, synthetic construct
  source 1..21: mol_type = other DNA
atcggctcaaaggggtgggat

SEQ ID NO: 31636 - DNA, 21 bp, synthetic construct
  source 1..21: mol_type = other DNA
tgtaggccccccatgccgccg

SEQ ID NO: 31637 - DNA, 21 bp, synthetic construct
  source 1..21: mol_type = other DNA
tattcaagatcgggatcgaat

SEQ ID NO: 31638 - DNA, 21 bp, synthetic construct
  source 1..21: mol_type = other DNA
tacgttcgcttcgatgccaac

SEQ ID NO: 31639 - DNA, 21 bp, synthetic construct
  source 1..21: mol_type = other DNA
tatgcgcgaaccaatcacaac

SEQ ID NO: 31640 - DNA, 21 bp, synthetic construct
  source 1..21: mol_type = other DNA
tattataccggaaaacttagt

SEQ ID NO: 31641 - DNA, 21 bp, synthetic construct
  source 1..21: mol_type = other DNA
tggtttagcggtattcaagag

SEQ ID NO: 31642 - DNA, 21 bp, synthetic construct
  source 1..21: mol_type = other DNA
aggacctacgattccttcgca

SEQ ID NO: 31643 - DNA, 21 bp, synthetic construct
  source 1..21: mol_type = other DNA
tattggagtggcatgcgggag

SEQ ID NO: 31644 - DNA, 21 bp, synthetic construct
  source 1..21: mol_type = other DNA
agggagccacactgctgcggt

SEQ ID NO: 31645 - DNA, 21 bp, synthetic construct
  source 1..21: mol_type = other DNA
caaatggaagatagagcttgg

SEQ ID NO: 31646 - DNA, 21 bp, synthetic construct
  source 1..21: mol_type = other DNA
tgccacaagccaatgaccgct

SEQ ID NO: 31647 - DNA, 21 bp, synthetic construct
  source 1..21: mol_type = other DNA
tatcaccgaatcggcactaat

SEQ ID NO: 31648 - DNA, 21 bp, synthetic construct
  source 1..21: mol_type = other DNA
tgcgtggttcgttccgcaggg

SEQ ID NO: 31649 - DNA, 21 bp, synthetic construct
  source 1..21: mol_type = other DNA
tacgcctcgaccaatggtgtg

SEQ ID NO: 31650 - DNA, 21 bp, synthetic construct
  source 1..21: mol_type = other DNA
ccatgcaaaccccagccgatg

SEQ ID NO: 31651 - DNA, 21 bp, synthetic construct
  source 1..21: mol_type = other DNA
ctgcaatccacaaatggcatc

SEQ ID NO: 31652 - DNA, 21 bp, synthetic construct
  source 1..21: mol_type = other DNA
tacagccgccaaaacattaac

SEQ ID NO: 31653 - DNA, 21 bp, synthetic construct
  source 1..21: mol_type = other DNA
tactacactggtatgagagat

SEQ ID NO: 31654 - DNA, 21 bp, synthetic construct
  source 1..21: mol_type = other DNA
tttcattcaaccaacggtgtt

SEQ ID NO: 31655 - DNA, 21 bp, synthetic construct
  source 1..21: mol_type = other DNA
tatgcaaggctcggggttaac

SEQ ID NO: 31656 - DNA, 21 bp, synthetic construct
  source 1..21: mol_type = other DNA
agggacgattggacggtcttc

SEQ ID NO: 31657 - DNA, 21 bp, synthetic construct
  source 1..21: mol_type = other DNA
tattctcgacagaatatcaac

SEQ ID NO: 31658 - DNA, 21 bp, synthetic construct
  source 1..21: mol_type = other DNA
tactcacgtatggggatgaac

SEQ ID NO: 31659 - DNA, 21 bp, synthetic construct
  source 1..21: mol_type = other DNA
tatgctagattaggtcaaaat

SEQ ID NO: 31660 - DNA, 21 bp, synthetic construct
  source 1..21: mol_type = other DNA
ttacacaagttatgcgaagac

SEQ ID NO: 31661 - DNA, 21 bp, synthetic construct
  source 1..21: mol_type = other DNA
ttttttacaggtatgagagaa

SEQ ID NO: 31662 - DNA, 21 bp, synthetic construct
  source 1..21: mol_type = other DNA
agagacgactacagtagttac

SEQ ID NO: 31663 - DNA, 21 bp, synthetic construct
  source 1..21: mol_type = other DNA
tgcaaagacgccacgcgtatg

SEQ ID NO: 31664 - DNA, 21 bp, synthetic construct
  source 1..21: mol_type = other DNA
tactggacagggtgtatggaa

SEQ ID NO: 31665 - DNA, 21 bp, synthetic construct
  source 1..21: mol_type = other DNA
tgtggaggaggaaggcaaacg

SEQ ID NO: 31666 - DNA, 21 bp, synthetic construct
  source 1..21: mol_type = other DNA
tacgcaagaagcaatatcaac

SEQ ID NO: 31667 - DNA, 21 bp, synthetic construct
  source 1..21: mol_type = other DNA
cgcgaggattattcgacctac

SEQ ID NO: 31668 - DNA, 21 bp, synthetic construct
  source 1..21: mol_type = other DNA
tacagccgcatctcgggcaac

SEQ ID NO: 31669 - DNA, 21 bp, synthetic construct
  source 1..21: mol_type = other DNA
ttaagtaagatgaacgtgaac

SEQ ID NO: 31670 - DNA, 21 bp, synthetic construct
  source 1..21: mol_type = other DNA
tattcgaggcacggtataaat

SEQ ID NO: 31671 - DNA, 21 bp, synthetic construct
  source 1..21: mol_type = other DNA
tgcttgccaacgcactgcgga

SEQ ID NO: 31672 - DNA, 21 bp, synthetic construct
  source 1..21: mol_type = other DNA
tattttagtggcgtaaatcgc

SEQ ID NO: 31673 - DNA, 21 bp, synthetic construct
  source 1..21: mol_type = other DNA
tgcaacatgccgatgaccgca

SEQ ID NO: 31674 - DNA, 21 bp, synthetic construct
  source 1..21: mol_type = other DNA
aggatggaatcggccgattgg

SEQ ID NO: 31675 - DNA, 21 bp, synthetic construct
  source 1..21: mol_type = other DNA
tctgatgaatattcaacctac

SEQ ID NO: 31676 - DNA, 21 bp, synthetic construct
  source 1..21: mol_type = other DNA
tggtggtcagaaatacgggaa

SEQ ID NO: 31677 - DNA, 21 bp, synthetic construct
  source 1..21: mol_type = other DNA
tactccagaataggacccgta

SEQ ID NO: 31678 - DNA, 21 bp, synthetic construct
  source 1..21: mol_type = other DNA
ggggggcctggcgtaaggtgg

SEQ ID NO: 31679 - DNA, 21 bp, synthetic construct
  source 1..21: mol_type = other DNA
tatcacagacttggggaacca

SEQ ID NO: 31680 - DNA, 21 bp, synthetic construct
  source 1..21: mol_type = other DNA
gccgggtttgatagaggatgg

SEQ ID NO: 31681 - DNA, 21 bp, synthetic construct
  source 1..21: mol_type = other DNA
agagagtacgaagtattccct

SEQ ID NO: 31682 - DNA, 21 bp, synthetic construct
  source 1..21: mol_type = other DNA
tactcgaggatgaacatcaac

SEQ ID NO: 31683 - DNA, 21 bp, synthetic construct
  source 1..21: mol_type = other DNA
gttatggaagctaggcagtgg

SEQ ID NO: 31684 - DNA, 21 bp, synthetic construct
  source 1..21: mol_type = other DNA
tacttcagtggagtccgtacg

SEQ ID NO: 31685 - DNA, 21 bp, synthetic construct
  source 1..21: mol_type = other DNA
atgcaatcaacgaacggggta

SEQ ID NO: 31686 - DNA, 21 bp, synthetic construct
  source 1..21: mol_type = other DNA
tactctcgccagggggttaat

SEQ ID NO: 31687 - DNA, 21 bp, synthetic construct
  source 1..21: mol_type = other DNA
tattcacgcgtaaacaacaac

SEQ ID NO: 31688 - DNA, 21 bp, synthetic construct
  source 1..21: mol_type = other DNA
tactcaagaataggtaacaac

SEQ ID NO: 31689 - DNA, 21 bp, synthetic construct
  source 1..21: mol_type = other DNA
ttgtcaaaggctgcaactaac

SEQ ID NO: 31690 - DNA, 21 bp, synthetic construct
  source 1..21: mol_type = other DNA
tgtgataaagcaccaaaagag

SEQ ID NO: 31691 - DNA, 21 bp, synthetic construct
  source 1..21: mol_type = other DNA
tcaagcagcagtaacggggtc

SEQ ID NO: 31692 - DNA, 21 bp, synthetic construct
  source 1..21: mol_type = other DNA
tattcgaggttgaatggaaac

SEQ ID NO: 31693 - DNA, 21 bp, synthetic construct
  source 1..21: mol_type = other DNA
tatgcgcgtcaaggaatgaac

SEQ ID NO: 31694 - DNA, 21 bp, synthetic construct
  source 1..21: mol_type = other DNA
ttctctaggatgaatgtgaat

SEQ ID NO: 31695 - DNA, 21 bp, synthetic construct
  source 1..21: mol_type = other DNA
tatagccgaagcaatgctaat

SEQ ID NO: 31696 - DNA, 21 bp, synthetic construct
  source 1..21: mol_type = other DNA
tatagccgaatgggcgaaaat

SEQ ID NO: 31697 - DNA, 21 bp, synthetic construct
  source 1..21: mol_type = other DNA
aagcatgactactgtgcaccg

SEQ ID NO: 31698 - DNA, 21 bp, synthetic construct
  source 1..21: mol_type = other DNA
tgccgccccacctgcaagcct

SEQ ID NO: 31699 - DNA, 21 bp, synthetic construct
  source 1..21: mol_type = other DNA
tatgcgaaagcgggacttaac

SEQ ID NO: 31700 - DNA, 21 bp, synthetic construct
  source 1..21: mol_type = other DNA
tactctagggtcaataccaat

SEQ ID NO: 31701 - DNA, 21 bp, synthetic construct
  source 1..21: mol_type = other DNA
taccacaggctcggtgaccac

SEQ ID NO: 31702 - DNA, 21 bp, synthetic construct
  source 1..21: mol_type = other DNA
tactcgcgaatgaacgtaaat

SEQ ID NO: 31703 - DNA, 21 bp, synthetic construct
  source 1..21: mol_type = other DNA
tactcacgtaaaggcgataac

SEQ ID NO: 31704 - DNA, 21 bp, synthetic construct
  source 1..21: mol_type = other DNA
tgtacgataaagactggtcac

SEQ ID NO: 31705 - DNA, 21 bp, synthetic construct
  source 1..21: mol_type = other DNA
agaacatacgactcgattgcc

SEQ ID NO: 31706 - DNA, 21 bp, synthetic construct
  source 1..21: mol_type = other DNA
tacgctagagtaggctacaac

SEQ ID NO: 31707 - DNA, 21 bp, synthetic construct
  source 1..21: mol_type = other DNA
aggaatagggatgtgtatccg

SEQ ID NO: 31708 - DNA, 21 bp, synthetic construct
  source 1..21: mol_type = other DNA
catcactccacaaacggaatc

SEQ ID NO: 31709 - DNA, 21 bp, synthetic construct
  source 1..21: mol_type = other DNA
tattcgaggatgggccaaaat

SEQ ID NO: 31710 - DNA, 21 bp, synthetic construct
  source 1..21: mol_type = other DNA
tgcaagccagaggcaacgtgg

SEQ ID NO: 31711 - DNA, 21 bp, synthetic construct
  source 1..21: mol_type = other DNA
tactggcacggggtgagcgaa

SEQ ID NO: 31712 - DNA, 21 bp, synthetic construct
  source 1..21: mol_type = other DNA
tattctcggatcggctataac

SEQ ID NO: 31713 - DNA, 21 bp, synthetic construct
  source 1..21: mol_type = other DNA
tatagtagaatgtcagataac

SEQ ID NO: 31714 - DNA, 21 bp, synthetic construct
  source 1..21: mol_type = other DNA
tgcgagagagtgggtccgacc

SEQ ID NO: 31715 - DNA, 21 bp, synthetic construct
  source 1..21: mol_type = other DNA
acgtgggatgggcagaacgcc

SEQ ID NO: 31716 - DNA, 21 bp, synthetic construct
  source 1..21: mol_type = other DNA
tgcaagtcacgaagccttgat

SEQ ID NO: 31717 - DNA, 21 bp, synthetic construct
  source 1..21: mol_type = other DNA
ataccggagcgttgttgcaaa

SEQ ID NO: 31718 - DNA, 21 bp, synthetic construct
  source 1..21: mol_type = other DNA
tattcccgtcacaatgtaaac

SEQ ID NO: 31719 - DNA, 21 bp, synthetic construct
  source 1..21: mol_type = other DNA
tatgtgaggagcaacgctaac

SEQ ID NO: 31720 - DNA, 21 bp, synthetic construct
  source 1..21: mol_type = other DNA
aagtatgctaggagttctgag

SEQ ID NO: 31721 - DNA, 21 bp, synthetic construct
  source 1..21: mol_type = other DNA
tattggagtaacgtaaaggat

SEQ ID NO: 31722 - DNA, 21 bp, synthetic construct
  source 1..21: mol_type = other DNA
tgtatgaagccgcgtttggag

SEQ ID NO: 31723 - DNA, 21 bp, synthetic construct
  source 1..21: mol_type = other DNA
tttgatagtactaacggaatt

SEQ ID NO: 31724 - DNA, 21 bp, synthetic construct
  source 1..21: mol_type = other DNA
cgggaagaaaatgtctattgg

SEQ ID NO: 31725 - DNA, 21 bp, synthetic construct
  source 1..21: mol_type = other DNA
ccctacgccaagagtgtagac

SEQ ID NO: 31726 - DNA, 21 bp, synthetic construct
  source 1..21: mol_type = other DNA
tatgcgaaaagcaatcctaat

SEQ ID NO: 31727 - DNA, 21 bp, synthetic construct
  source 1..21: mol_type = other DNA
tactctaggttacaagaaaga

SEQ ID NO: 31728 - DNA, 21 bp, synthetic construct
  source 1..21: mol_type = other DNA
tctcagtccactaatggcatt

SEQ ID NO: 31729 - DNA, 21 bp, synthetic construct
  source 1..21: mol_type = other DNA
tactttagcggcttgagagca

SEQ ID NO: 31730 - DNA, 21 bp, synthetic construct
  source 1..21: mol_type = other DNA
tggttttcaggcattaccgaa

SEQ ID NO: 31731 - DNA, 21 bp, synthetic construct
  source 1..21: mol_type = other DNA
tacagtaggaacgggatgaat

SEQ ID NO: 31732 - DNA, 21 bp, synthetic construct
  source 1..21: mol_type = other DNA
tgtggtaagatcccgccgccc

SEQ ID NO: 31733 - DNA, 21 bp, synthetic construct
  source 1..21: mol_type = other DNA
atttcggtttgtaaacagcaa

SEQ ID NO: 31734 - DNA, 21 bp, synthetic construct
  source 1..21: mol_type = other DNA
cgcggagattttagttcgtgg

SEQ ID NO: 31735 - DNA, 21 bp, synthetic construct
  source 1..21: mol_type = other DNA
tattttcacggtttgacagcc

SEQ ID NO: 31736 - DNA, 21 bp, synthetic construct
  source 1..21: mol_type = other DNA
cgaatggaatcatcggattgg

SEQ ID NO: 31737 - DNA, 21 bp, synthetic construct
  source 1..21: mol_type = other DNA
tactctcgtaagagcgataat

SEQ ID NO: 31738 - DNA, 21 bp, synthetic construct
  source 1..21: mol_type = other DNA
gggggaccgtcatgcaagcca

SEQ ID NO: 31739 - DNA, 21 bp, synthetic construct
  source 1..21: mol_type = other DNA
tattggagcggcaagcacgaa

SEQ ID NO: 31740 - DNA, 21 bp, synthetic construct
  source 1..21: mol_type = other DNA
tgcaatcaaaataataaacct

SEQ ID NO: 31741 - DNA, 21 bp, synthetic construct
  source 1..21: mol_type = other DNA
attcagagcagtaacggcgtg

SEQ ID NO: 31742 - DNA, 21 bp, synthetic construct
  source 1..21: mol_type = other DNA
cgcagcgagttcacgagctac

SEQ ID NO: 31743 - DNA, 21 bp, synthetic construct
  source 1..21: mol_type = other DNA
ttgtgtaggccgtgtctcact

SEQ ID NO: 31744 - DNA, 21 bp, synthetic construct
  source 1..21: mol_type = other DNA
tgtaaggtaaagatgcctccg

SEQ ID NO: 31745 - DNA, 21 bp, synthetic construct
  source 1..21: mol_type = other DNA
ggagacgagtggcaacacttt

SEQ ID NO: 31746 - DNA, 21 bp, synthetic construct
  source 1..21: mol_type = other DNA
tgggtcagatcggatgtgagg

SEQ ID NO: 31747 - DNA, 21 bp, synthetic construct
  source 1..21: mol_type = other DNA
agcaattcgagcttaaactgc

SEQ ID NO: 31748 - DNA, 21 bp, synthetic construct
  source 1..21: mol_type = other DNA
tacttccacgggagacacgac

SEQ ID NO: 31749 - DNA, 21 bp, synthetic construct
  source 1..21: mol_type = other DNA
atgtgggatggcacaatggcc

SEQ ID NO: 31750 - DNA, 21 bp, synthetic construct
  source 1..21: mol_type = other DNA
tactggtctggccgcgctgac

SEQ ID NO: 31751 - DNA, 21 bp, synthetic construct
  source 1..21: mol_type = other DNA
tctatgcaggataggaattgg

SEQ ID NO: 31752 - DNA, 21 bp, synthetic construct
  source 1..21: mol_type = other DNA
cgagaacaaactgtccattgg

SEQ ID NO: 31753 - DNA, 21 bp, synthetic construct
  source 1..21: mol_type = other DNA
tatgctagactaaactttaac

SEQ ID NO: 31754 - DNA, 21 bp, synthetic construct
  source 1..21: mol_type = other DNA
ttctctagagcagggatcaat

SEQ ID NO: 31755 - DNA, 21 bp, synthetic construct
  source 1..21: mol_type = other DNA
agttgtaaggagaggatgcct

SEQ ID NO: 31756 - DNA, 21 bp, synthetic construct
  source 1..21: mol_type = other DNA
tgcaagctagggaatgtcagt

SEQ ID NO: 31757 - DNA, 21 bp, synthetic construct
  source 1..21: mol_type = other DNA
cagacgtcgactaacggaaga

SEQ ID NO: 31758 - DNA, 21 bp, synthetic construct
  source 1..21: mol_type = other DNA
tactggtcggggcggaatgat

SEQ ID NO: 31759 - DNA, 21 bp, synthetic construct
  source 1..21: mol_type = other DNA
tacgaaagtaccaacggcatc

SEQ ID NO: 31760 - DNA, 21 bp, synthetic construct
  source 1..21: mol_type = other DNA
tactggagtggaaaaatagat

SEQ ID NO: 31761 - DNA, 21 bp, synthetic construct
  source 1..21: mol_type = other DNA
tactccaggagtggtaacaat

SEQ ID NO: 31762 - DNA, 21 bp, synthetic construct
  source 1..21: mol_type = other DNA
atagacgagtggcaccacttc

SEQ ID NO: 31763 - DNA, 21 bp, synthetic construct
  source 1..21: mol_type = other DNA
tattacacaggtcagattgac

SEQ ID NO: 31764 - DNA, 21 bp, synthetic construct
  source 1..21: mol_type = other DNA
gagctagagtcttggtcatgg

SEQ ID NO: 31765 - DNA, 21 bp, synthetic construct
  source 1..21: mol_type = other DNA
tgcaaaggccttccagtgcca

SEQ ID NO: 31766 - DNA, 21 bp, synthetic construct
  source 1..21: mol_type = other DNA
acagatgattggagttcatac

SEQ ID NO: 31767 - DNA, 21 bp, synthetic construct
  source 1..21: mol_type = other DNA
cattgcagaccctgttcggag

SEQ ID NO: 31768 - DNA, 21 bp, synthetic construct
  source 1..21: mol_type = other DNA
cgtagcgactttacttcatac

SEQ ID NO: 31769 - DNA, 21 bp, synthetic construct
  source 1..21: mol_type = other DNA
cgtggaggagacaggtcatgg

SEQ ID NO: 31770 - DNA, 21 bp, synthetic construct
  source 1..21: mol_type = other DNA
tgtaaacctaactcaggcggg

SEQ ID NO: 31771 - DNA, 21 bp, synthetic construct
  source 1..21: mol_type = other DNA
tgtaagggtggaggagccgga

SEQ ID NO: 31772 - DNA, 21 bp, synthetic construct
  source 1..21: mol_type = other DNA
tacgcaagaaatgggatgaat

SEQ ID NO: 31773 - DNA, 21 bp, synthetic construct
  source 1..21: mol_type = other DNA
tacttcagcggattgcgggag

SEQ ID NO: 31774 - DNA, 21 bp, synthetic construct
  source 1..21: mol_type = other DNA
tactttcacggcttgattgca

SEQ ID NO: 31775 - DNA, 21 bp, synthetic construct
  source 1..21: mol_type = other DNA
tggtgtcgcagtcaagcaggt

SEQ ID NO: 31776 - DNA, 21 bp, synthetic construct
  source 1..21: mol_type = other DNA
tactatactggtcgcactaat

SEQ ID NO: 31777 - DNA, 21 bp, synthetic construct
  source 1..21: mol_type = other DNA
tcgtggagttcaaacggcgta

SEQ ID NO: 31778 - DNA, 21 bp, synthetic construct
  source 1..21: mol_type = other DNA
tactcccgtgtaaatctcaac

SEQ ID NO: 31779 - DNA, 21 bp, synthetic construct
  source 1..21: mol_type = other DNA
ttcttcacaggacgtatggac

SEQ ID NO: 31780 - DNA, 21 bp, synthetic construct
  source 1..21: mol_type = other DNA
ttcacctcttcaaatggagta

SEQ ID NO: 31781 - DNA, 21 bp, synthetic construct
  source 1..21: mol_type = other DNA
tatagtcgacaaggagcgaac

SEQ ID NO: 31782 - DNA, 21 bp, synthetic construct
  source 1..21: mol_type = other DNA
tactcacgggcaaacccaaac

SEQ ID NO: 31783 - DNA, 21 bp, synthetic construct
  source 1..21: mol_type = other DNA
tgtaagttatcaagtccgtcg

SEQ ID NO: 31784 - DNA, 21 bp, synthetic construct
  source 1..21: mol_type = other DNA
tacgctagagccgggtacaat

SEQ ID NO: 31785 - DNA, 21 bp, synthetic construct
  source 1..21: mol_type = other DNA
tacgcgaggttaaatcataac

SEQ ID NO: 31786 - DNA, 21 bp, synthetic construct
  source 1..21: mol_type = other DNA
ctgcatcggttacaccccgac

SEQ ID NO: 31787 - DNA, 21 bp, synthetic construct
  source 1..21: mol_type = other DNA
tttagtcgagcaaacattaac

SEQ ID NO: 31788 - DNA, 21 bp, synthetic construct
  source 1..21: mol_type = other DNA
gatttatcaagtctggactgg

SEQ ID NO: 31789 - DNA, 21 bp, synthetic construct
  source 1..21: mol_type = other DNA
gtagatgcttcatgtagtgct

SEQ ID NO: 31790 - DNA, 21 bp, synthetic construct
  source 1..21: mol_type = other DNA
tacagtcgcatgggtgacaat

SEQ ID NO: 31791 - DNA, 21 bp, synthetic construct
  source 1..21: mol_type = other DNA
gacctcaacagtgccaagtgg

SEQ ID NO: 31792 - DNA, 21 bp, synthetic construct
  source 1..21: mol_type = other DNA
ggcggcggcacgaagtgtggt

SEQ ID NO: 31793 - DNA, 21 bp, synthetic construct
  source 1..21: mol_type = other DNA
tccatgcaggacaggacatgg

SEQ ID NO: 31794 - DNA, 21 bp, synthetic construct
  source 1..21: mol_type = other DNA
ttcgccagaacgggttgggac

SEQ ID NO: 31795 - DNA, 21 bp, synthetic construct
  source 1..21: mol_type = other DNA
ttcttctccggtgttagagac

SEQ ID NO: 31796 - DNA, 21 bp, synthetic construct
  source 1..21: mol_type = other DNA
tattatacaggccgcacagat

SEQ ID NO: 31797 - DNA, 21 bp, synthetic construct
  source 1..21: mol_type = other DNA
tatgtaagatcagatccaatg

SEQ ID NO: 31798 - DNA, 21 bp, synthetic construct
  source 1..21: mol_type = other DNA
ggatctgagggcagcacctgg

SEQ ID NO: 31799 - DNA, 21 bp, synthetic construct
  source 1..21: mol_type = other DNA
ggcgggctgggctcgcagtgg

SEQ ID NO: 31800 - DNA, 21 bp, synthetic construct
  source 1..21: mol_type = other DNA
tgcaagccacctatggatggt

SEQ ID NO: 31801 - DNA, 21 bp, synthetic construct
  source 1..21: mol_type = other DNA
cccggctctactcggacctgg

SEQ ID NO: 31802 - DNA, 21 bp, synthetic construct
  source 1..21: mol_type = other DNA
caaggtgagagtcgagtgtgg

SEQ ID NO: 31803 - DNA, 21 bp, synthetic construct
  source 1..21: mol_type = other DNA
tcgctcgccgacaggggctgg

SEQ ID NO: 31804 - DNA, 21 bp, synthetic construct
  source 1..21: mol_type = other DNA
tacgttagaagtggaggtgga

SEQ ID NO: 31805 - DNA, 21 bp, synthetic construct
  source 1..21: mol_type = other DNA
tgtaagccctcatcaccttat

SEQ ID NO: 31806 - DNA, 21 bp, synthetic construct
  source 1..21: mol_type = other DNA
tactcaaagttaaataaaaac

SEQ ID NO: 31807 - DNA, 21 bp, synthetic construct
  source 1..21: mol_type = other DNA
tacgctagacaaaactttaac

SEQ ID NO: 31808 - DNA, 21 bp, synthetic construct
  source 1..21: mol_type = other DNA
tgtcgttcgcgcatggcggaa

SEQ ID NO: 31809 - DNA, 21 bp, synthetic construct
  source 1..21: mol_type = other DNA
tactttgccggtaaaatggcc

SEQ ID NO: 31810 - DNA, 21 bp, synthetic construct
  source 1..21: mol_type = other DNA
tatagcaagaataattttaat

SEQ ID NO: 31811 - DNA, 21 bp, synthetic construct
  source 1..21: mol_type = other DNA
tggttttcaggtaaagtagat

SEQ ID NO: 31812 - DNA, 21 bp, synthetic construct
  source 1..21: mol_type = other DNA
tatgccagaggcggctttaat

SEQ ID NO: 31813 - DNA, 21 bp, synthetic construct
  source 1..21: mol_type = other DNA
gcgccccctgaggtacggtgg

SEQ ID NO: 31814 - DNA, 21 bp, synthetic construct
  source 1..21: mol_type = other DNA
gttgatgactggtcgcccttt

SEQ ID NO: 31815 - DNA, 21 bp, synthetic construct
  source 1..21: mol_type = other DNA
tatttcagtggcatgacggag

SEQ ID NO: 31816 - DNA, 21 bp, synthetic construct
  source 1..21: mol_type = other DNA
ggcttcgaaaccgtccgttgg

SEQ ID NO: 31817 - DNA, 21 bp, synthetic construct
  source 1..21: mol_type = other DNA
cactggtcgactaacggggtc

SEQ ID NO: 31818 - DNA, 21 bp, synthetic construct
  source 1..21: mol_type = other DNA
tacgtaaggtcccaaccccaa

SEQ ID NO: 31819 - DNA, 21 bp, synthetic construct
  source 1..21: mol_type = other DNA
ctggacgactggactggattt

SEQ ID NO: 31820 - DNA, 21 bp, synthetic construct
  source 1..21: mol_type = other DNA
aagaccccgatgtgtaaagca

SEQ ID NO: 31821 - DNA, 21 bp, synthetic construct
  source 1..21: mol_type = other DNA
tttggaggggttagtgcttac

SEQ ID NO: 31822 - DNA, 21 bp, synthetic construct
  source 1..21: mol_type = other DNA
tattcaagaataaattataac

SEQ ID NO: 31823 - DNA, 21 bp, synthetic construct
  source 1..21: mol_type = other DNA
tgggtgaaaagtcaacaatgt

SEQ ID NO: 31824 - DNA, 21 bp, synthetic construct
  source 1..21: mol_type = other DNA
ttcagccggatgaacatcaat

SEQ ID NO: 31825 - DNA, 21 bp, synthetic construct
  source 1..21: mol_type = other DNA
tgcaaaccaccacctttagca

SEQ ID NO: 31826 - DNA, 21 bp, synthetic construct
  source 1..21: mol_type = other DNA
tacacaagctcgaacggtgtc

SEQ ID NO: 31827 - DNA, 21 bp, synthetic construct
  source 1..21: mol_type = other DNA
cgcagcgaatttactagttat

SEQ ID NO: 31828 - DNA, 21 bp, synthetic construct
  source 1..21: mol_type = other DNA
tattcaaggcataacattaac

SEQ ID NO: 31829 - DNA, 21 bp, synthetic construct
  source 1..21: mol_type = other DNA
tttttcagcggcacccgagcc

SEQ ID NO: 31830 - DNA, 21 bp, synthetic construct
  source 1..21: mol_type = other DNA
tattcgcgctcgaatgccaac

SEQ ID NO: 31831 - DNA, 21 bp, synthetic construct
  source 1..21: mol_type = other DNA
tacagcaggcacaaccataat

SEQ ID NO: 31832 - DNA, 21 bp, synthetic construct
  source 1..21: mol_type = other DNA
tgtaaaccagttcagcccgaa

SEQ ID NO: 31833 - DNA, 21 bp, synthetic construct
  source 1..21: mol_type = other DNA
ccgtgcaggccgtgctcggag

SEQ ID NO: 31834 - DNA, 21 bp, synthetic construct
  source 1..21: mol_type = other DNA
tacttccaaggaagacacgag

SEQ ID NO: 31835 - DNA, 21 bp, synthetic construct
  source 1..21: mol_type = other DNA
tgtaagccgcgcccggaggcc

SEQ ID NO: 31836 - DNA, 21 bp, synthetic construct
  source 1..21: mol_type = other DNA
tattactctggcagaatagat

SEQ ID NO: 31837 - DNA, 21 bp, synthetic construct
  source 1..21: mol_type = other DNA
gggattgacgttgtcaggtgg

SEQ ID NO: 31838 - DNA, 21 bp, synthetic construct
  source 1..21: mol_type = other DNA
ggggaagtaaacgttcggtgg

SEQ ID NO: 31839 - DNA, 21 bp, synthetic construct
  source 1..21: mol_type = other DNA
tatgttcgcagtgggcccccg

SEQ ID NO: 31840 - DNA, 21 bp, synthetic construct
  source 1..21: mol_type = other DNA
tacagcagggcaggtttgaac

SEQ ID NO: 31841 - DNA, 21 bp, synthetic construct
  source 1..21: mol_type = other DNA
aatttaaacgggaaagcatgc

SEQ ID NO: 31842 - DNA, 21 bp, synthetic construct
  source 1..21: mol_type = other DNA
tatgccaagaatggatcgaac

SEQ ID NO: 31843 - DNA, 21 bp, synthetic construct
  source 1..21: mol_type = other DNA
tattggtccgcgattaacgag

SEQ ID NO: 31844 - DNA, 21 bp, synthetic construct
  source 1..21: mol_type = other DNA
ggatcaaacggtgtgaggtgg

SEQ ID NO: 31845 - DNA, 21 bp, synthetic construct
  source 1..21: mol_type = other DNA
tgcaaaattccaagtgcaggt

SEQ ID NO: 31846 - DNA, 21 bp, synthetic construct
  source 1..21: mol_type = other DNA
acacgctggggagatcccgca

SEQ ID NO: 31847 - DNA, 21 bp, synthetic construct
  source 1..21: mol_type = other DNA
tgtcgtagcgaagtcgttaag

SEQ ID NO: 31848 - DNA, 21 bp, synthetic construct
  source 1..21: mol_type = other DNA
tgcaaaccgagggagggaact

SEQ ID NO: 31849 - DNA, 21 bp, synthetic construct
  source 1..21: mol_type = other DNA
tattggtcgggtacacgcgaa

SEQ ID NO: 31850 - DNA, 21 bp, synthetic construct
  source 1..21: mol_type = other DNA
tgtaagccctcaccactgagc

SEQ ID NO: 31851 - DNA, 21 bp, synthetic construct
  source 1..21: mol_type = other DNA
tactggcatggtaaaatagac

SEQ ID NO: 31852 - DNA, 21 bp, synthetic construct
  source 1..21: mol_type = other DNA
ttttttacgggtacggtggat

SEQ ID NO: 31853 - DNA, 21 bp, synthetic construct
  source 1..21: mol_type = other DNA
tacagcagagcgggcgttaac

SEQ ID NO: 31854 - DNA, 21 bp, synthetic construct
  source 1..21: mol_type = other DNA
agtggatcgacgaatggggta

SEQ ID NO: 31855 - DNA, 21 bp, synthetic construct
  source 1..21: mol_type = other DNA
atgtgggatgggacttatgct

SEQ ID NO: 31856 - DNA, 21 bp, synthetic construct
  source 1..21: mol_type = other DNA
tacttcagtggattgcacgca

SEQ ID NO: 31857 - DNA, 21 bp, synthetic construct
  source 1..21: mol_type = other DNA
tattttagcggtcaacaatca

SEQ ID NO: 31858 - DNA, 21 bp, synthetic construct
  source 1..21: mol_type = other DNA
tactcgcgtcttgatagttat

SEQ ID NO: 31859 - DNA, 21 bp, synthetic construct
  source 1..21: mol_type = other DNA
tattggtcgggaaccgccgcc

SEQ ID NO: 31860 - DNA, 21 bp, synthetic construct
  source 1..21: mol_type = other DNA
tattttcagggtcgccatgaa

SEQ ID NO: 31861 - DNA, 21 bp, synthetic construct
  source 1..21: mol_type = other DNA
tattggcacgggaagattgat

SEQ ID NO: 31862 - DNA, 21 bp, synthetic construct
  source 1..21: mol_type = other DNA
tatgcacgcataggaacaaat

SEQ ID NO: 31863 - DNA, 21 bp, synthetic construct
  source 1..21: mol_type = other DNA
tatttcagtcgcattcaagag

SEQ ID NO: 31864 - DNA, 21 bp, synthetic construct
  source 1..21: mol_type = other DNA
tattcgaagacgggggagaat

SEQ ID NO: 31865 - DNA, 21 bp, synthetic construct
  source 1..21: mol_type = other DNA
tactggagtggtctaaaagat

SEQ ID NO: 31866 - DNA, 21 bp, synthetic construct
  source 1..21: mol_type = other DNA
tactcgcggatgaactttaac

SEQ ID NO: 31867 - DNA, 21 bp, synthetic construct
  source 1..21: mol_type = other DNA
tactggaccggacggcaagag

SEQ ID NO: 31868 - DNA, 21 bp, synthetic construct
  source 1..21: mol_type = other DNA
tatgcgagggccggtttcaat

SEQ ID NO: 31869 - DNA, 21 bp, synthetic construct
  source 1..21: mol_type = other DNA
acgacagattatgtgatgtac

SEQ ID NO: 31870 - DNA, 21 bp, synthetic construct
  source 1..21: mol_type = other DNA
tatcacaggctaggtgacact

SEQ ID NO: 31871 - DNA, 21 bp, synthetic construct
  source 1..21: mol_type = other DNA
tacagtcgcctgaattacaat

SEQ ID NO: 31872 - DNA, 21 bp, synthetic construct
  source 1..21: mol_type = other DNA
gggatggaacatgtcaggtgg

SEQ ID NO: 31873 - DNA, 21 bp, synthetic construct
  source 1..21: mol_type = other DNA
tattttcaaggcaaaatatcc

SEQ ID NO: 31874 - DNA, 21 bp, synthetic construct
  source 1..21: mol_type = other DNA
tacagtgggcagggctgtgtc

SEQ ID NO: 31875 - DNA, 21 bp, synthetic construct
  source 1..21: mol_type = other DNA
tgtcaaaaggaaaagatggag

SEQ ID NO: 31876 - DNA, 21 bp, synthetic construct
  source 1..21: mol_type = other DNA
tacagtcgcttgagccaggat

SEQ ID NO: 31877 - DNA, 21 bp, synthetic construct
  source 1..21: mol_type = other DNA
tacgcccgcacgaacgaaaac

SEQ ID NO: 31878 - DNA, 21 bp, synthetic construct
  source 1..21: mol_type = other DNA
aaggatgattacatgtattat

SEQ ID NO: 31879 - DNA, 21 bp, synthetic construct
  source 1..21: mol_type = other DNA
tattcacggcacaatgaaaat

SEQ ID NO: 31880 - DNA, 21 bp, synthetic construct
  source 1..21: mol_type = other DNA
tacgcgaggaacggctttaat

SEQ ID NO: 31881 - DNA, 21 bp, synthetic construct
  source 1..21: mol_type = other DNA
tattggactggggtaggagcc

SEQ ID NO: 31882 - DNA, 21 bp, synthetic construct
  source 1..21: mol_type = other DNA
tattacagtggggtaacagct

SEQ ID NO: 31883 - DNA, 21 bp, synthetic construct
  source 1..21: mol_type = other DNA
tgcggccgtggggcgggaata

SEQ ID NO: 31884 - DNA, 21 bp, synthetic construct
  source 1..21: mol_type = other DNA
agggacgaatttaacatatac

SEQ ID NO: 31885 - DNA, 21 bp, synthetic construct
  source 1..21: mol_type = other DNA
cataatagcagcaatggtgtt

SEQ ID NO: 31886 - DNA, 21 bp, synthetic construct
  source 1..21: mol_type = other DNA
tatgcaaaggctggttggaat

SEQ ID NO: 31887 - DNA, 21 bp, synthetic construct
  source 1..21: mol_type = other DNA
tattctagactagaccccgtc

SEQ ID NO: 31888 - DNA, 21 bp, synthetic construct
  source 1..21: mol_type = other DNA
tatgcccgtgctggttataat

SEQ ID NO: 31889 - DNA, 21 bp, synthetic construct
  source 1..21: mol_type = other DNA
tgcaattatcccatgacagcg

SEQ ID NO: 31890 - DNA, 21 bp, synthetic construct
  source 1..21: mol_type = other DNA
tattggggcggtgttgcggcc

SEQ ID NO: 31891 - DNA, 21 bp, synthetic construct
  source 1..21: mol_type = other DNA
ggtttcgagacagtgagatgg

SEQ ID NO: 31892 - DNA, 21 bp, synthetic construct
  source 1..21: mol_type = other DNA
atatcgagctccaatggagtc

SEQ ID NO: 31893 - DNA, 21 bp, synthetic construct
  source 1..21: mol_type = other DNA
gtggaagagggctggtcttgg

SEQ ID NO: 31894 - DNA, 21 bp, synthetic construct
  source 1..21: mol_type = other DNA
tactctcgttataatgacaac

SEQ ID NO: 31895 - DNA, 21 bp, synthetic construct
  source 1..21: mol_type = other DNA
ttaatgggcggcggtacttgg

SEQ ID NO: 31896 - DNA, 21 bp, synthetic construct
  source 1..21: mol_type = other DNA
tacagtaaacaaggtagcaac

SEQ ID NO: 31897 - DNA, 21 bp, synthetic construct
  source 1..21: mol_type = other DNA
tggaccgatggtacgcgttat

SEQ ID NO: 31898 - DNA, 21 bp, synthetic construct
  source 1..21: mol_type = other DNA
actagagacggatataatgcg

SEQ ID NO: 31899 - DNA, 21 bp, synthetic construct
  source 1..21: mol_type = other DNA
agagaactcacttgcccacga

SEQ ID NO: 31900 - DNA, 21 bp, synthetic construct
  source 1..21: mol_type = other DNA
ccaatgcaagatcgcagctgg

SEQ ID NO: 31901 - DNA, 21 bp, synthetic construct
  source 1..21: mol_type = other DNA
tgtaaaccacgtagcgcggaa

SEQ ID NO: 31902 - DNA, 21 bp, synthetic construct
  source 1..21: mol_type = other DNA
tgtaagcccaggtctacggag

SEQ ID NO: 31903 - DNA, 21 bp, synthetic construct
  source 1..21: mol_type = other DNA
tactggcacggggtgcccgaa

SEQ ID NO: 31904 - DNA, 21 bp, synthetic construct
  source 1..21: mol_type = other DNA
tattttagtggctatacaagt

SEQ ID NO: 31905 - DNA, 21 bp, synthetic construct
  source 1..21: mol_type = other DNA
acatggagcgacaacggagtt

SEQ ID NO: 31906 - DNA, 21 bp, synthetic construct
  source 1..21: mol_type = other DNA
tattacactggcatggtcaac

SEQ ID NO: 31907 - DNA, 21 bp, synthetic construct
  source 1..21: mol_type = other DNA
tacttcaccgggagcgtagat

SEQ ID NO: 31908 - DNA, 21 bp, synthetic construct
  source 1..21: mol_type = other DNA
ccacattcgactaacggggtt

SEQ ID NO: 31909 - DNA, 21 bp, synthetic construct
  source 1..21: mol_type = other DNA
ttcttcagtgggatacaggaa

SEQ ID NO: 31910 - DNA, 21 bp, synthetic construct
  source 1..21: mol_type = other DNA
tattctagagtgggccataac

SEQ ID NO: 31911 - DNA, 21 bp, synthetic construct
  source 1..21: mol_type = other DNA
tacgtgaagtcgtccaacatt

SEQ ID NO: 31912 - DNA, 21 bp, synthetic construct
  source 1..21: mol_type = other DNA
aagtgtggcaagcaggaaggt

SEQ ID NO: 31913 - DNA, 21 bp, synthetic construct
  source 1..21: mol_type = other DNA
tttttttcaggccagcgtgac

SEQ ID NO: 31914 - DNA, 21 bp, synthetic construct
  source 1..21: mol_type = other DNA
taccacagggctggactagac

SEQ ID NO: 31915 - DNA, 21 bp, synthetic construct
  source 1..21: mol_type = other DNA
ttctcgaagatttgcaaggaa

SEQ ID NO: 31916 - DNA, 21 bp, synthetic construct
  source 1..21: mol_type = other DNA
gacatgcggtccccgatgtgg

SEQ ID NO: 31917 - DNA, 21 bp, synthetic construct
  source 1..21: mol_type = other DNA
aatatgggtgatcggaagtgg

SEQ ID NO: 31918 - DNA, 21 bp, synthetic construct
  source 1..21: mol_type = other DNA
tgtgcaaacgattacagggag

SEQ ID NO: 31919 - DNA, 21 bp, synthetic construct
  source 1..21: mol_type = other DNA
cttgcgcgcggcggctttgat

SEQ ID NO: 31920 - DNA, 21 bp, synthetic construct
  source 1..21: mol_type = other DNA
tgcggcgagaaatgttgtcct

SEQ ID NO: 31921 - DNA, 21 bp, synthetic construct
  source 1..21: mol_type = other DNA
agggagtataatgtttaccct

SEQ ID NO: 31922 - DNA, 21 bp, synthetic construct
  source 1..21: mol_type = other DNA
tgccgcgaaggaacctcagcc

SEQ ID NO: 31923 - DNA, 21 bp, synthetic construct
  source 1..21: mol_type = other DNA
aggggtgaatacatgtatccc

SEQ ID NO: 31924 - DNA, 21 bp, synthetic construct
  source 1..21: mol_type = other DNA
tattctagggcaaacaataac

SEQ ID NO: 31925 - DNA, 21 bp, synthetic construct
  source 1..21: mol_type = other DNA
ttacataaaacaacccataat

SEQ ID NO: 31926 - DNA, 21 bp, synthetic construct
  source 1..21: mol_type = other DNA
atacttaaatgcacgaacaat

SEQ ID NO: 31927 - DNA, 21 bp, synthetic construct
  source 1..21: mol_type = other DNA
gttatgtcttctagaacatgg

SEQ ID NO: 31928 - DNA, 21 bp, synthetic construct
  source 1..21: mol_type = other DNA
tgttccacaaattggaaatcc

SEQ ID NO: 31929 - DNA, 21 bp, synthetic construct
  source 1..21: mol_type = other DNA
ggggggggtgtagtacggtac

SEQ ID NO: 31930 - DNA, 21 bp, synthetic construct
  source 1..21: mol_type = other DNA
atgccttgcagtaaaactcca

SEQ ID NO: 31931 - DNA, 21 bp, synthetic construct
  source 1..21: mol_type = other DNA
tttaaggagtgcagtacaggg

SEQ ID NO: 31932 - DNA, 21 bp, synthetic construct
  source 1..21: mol_type = other DNA
taccacaaaaatatgccaaat

SEQ ID NO: 31933 - DNA, 21 bp, synthetic construct
  source 1..21: mol_type = other DNA
tgcaagcctggaacttgggaa

SEQ ID NO: 31934 - DNA, 21 bp, synthetic construct
  source 1..21: mol_type = other DNA
attccaaaaggtccctgtgcg

SEQ ID NO: 31935 - DNA, 21 bp, synthetic construct
  source 1..21: mol_type = other DNA
gagcctcagtcgaggcactgg

SEQ ID NO: 31936 - DNA, 21 bp, synthetic construct
  source 1..21: mol_type = other DNA
tattcccgcagtgggcagaac

SEQ ID NO: 31937 - DNA, 21 bp, synthetic construct
  source 1..21: mol_type = other DNA
tacgcgcgtgtgggcatgaac

SEQ ID NO: 31938 - DNA, 21 bp, synthetic construct
  source 1..21: mol_type = other DNA
cgagaaggcacgagttactgg

SEQ ID NO: 31939 - DNA, 21 bp, synthetic construct
  source 1..21: mol_type = other DNA
tggttctcaggtcgcgtcgaa

SEQ ID NO: 31940 - DNA, 21 bp, synthetic construct
  source 1..21: mol_type = other DNA
tgtaaaccacctgtagatgct

SEQ ID NO: 31941 - DNA, 21 bp, synthetic construct
  source 1..21: mol_type = other DNA
agaacacctacaaccttccct

SEQ ID NO: 31942 - DNA, 21 bp, synthetic construct
  source 1..21: mol_type = other DNA
tatgccagagtcggtatgaat

SEQ ID NO: 31943 - DNA, 21 bp, synthetic construct
  source 1..21: mol_type = other DNA
tatgccaagggaggtaacaat

SEQ ID NO: 31944 - DNA, 21 bp, synthetic construct
  source 1..21: mol_type = other DNA
tacagcaagcaaaattggaat

SEQ ID NO: 31945 - DNA, 21 bp, synthetic construct
  source 1..21: mol_type = other DNA
caaagcggaatgttacgttgt

SEQ ID NO: 31946 - DNA, 21 bp, synthetic construct
  source 1..21: mol_type = other DNA
tgcatcaaacctatgactgcg

SEQ ID NO: 31947 - DNA, 21 bp, synthetic construct
  source 1..21: mol_type = other DNA
gttagtactcactgcgtagcg

SEQ ID NO: 31948 - DNA, 21 bp, synthetic construct
  source 1..21: mol_type = other DNA
ttctgggcaggtgtaaaagat

SEQ ID NO: 31949 - DNA, 21 bp, synthetic construct
  source 1..21: mol_type = other DNA
tgtaaaccggggacgtgggag

SEQ ID NO: 31950 - DNA, 21 bp, synthetic construct
  source 1..21: mol_type = other DNA
ataatgagtagcaggggatgg

SEQ ID NO: 31951 - DNA, 21 bp, synthetic construct
  source 1..21: mol_type = other DNA
taccatcgtcaaaatccgctc

SEQ ID NO: 31952 - DNA, 21 bp, synthetic construct
  source 1..21: mol_type = other DNA
gtgacttccacgatgggccga

SEQ ID NO: 31953 - DNA, 21 bp, synthetic construct
  source 1..21: mol_type = other DNA
tacgctaaaaacggtcagaac

SEQ ID NO: 31954 - DNA, 21 bp, synthetic construct
  source 1..21: mol_type = other DNA
tacgctagacaaggtactaac

SEQ ID NO: 31955 - DNA, 21 bp, synthetic construct
  source 1..21: mol_type = other DNA
tacgttaggtcaggtccaatg

SEQ ID NO: 31956 - DNA, 21 bp, synthetic construct
  source 1..21: mol_type = other DNA
tattacaccggccgtactgat

SEQ ID NO: 31957 - DNA, 21 bp, synthetic construct
  source 1..21: mol_type = other DNA
tatttctccgggatgatggag

SEQ ID NO: 31958 - DNA, 21 bp, synthetic construct
  source 1..21: mol_type = other DNA
ttctttacgggtaggctcgat

SEQ ID NO: 31959 - DNA, 21 bp, synthetic construct
  source 1..21: mol_type = other DNA
ccggttgatacatgcagaccc

SEQ ID NO: 31960 - DNA, 21 bp, synthetic construct
  source 1..21: mol_type = other DNA
tgcgatgggtcacgaaaagca

SEQ ID NO: 31961 - DNA, 21 bp, synthetic construct
  source 1..21: mol_type = other DNA
tctttgtcggaccgaacctgg

SEQ ID NO: 31962 - DNA, 21 bp, synthetic construct
  source 1..21: mol_type = other DNA
ctacaccggctgtgcccggac

SEQ ID NO: 31963 - DNA, 21 bp, synthetic construct
  source 1..21: mol_type = other DNA
ctcaaggatggcacaccagct

SEQ ID NO: 31964 - DNA, 21 bp, synthetic construct
  source 1..21: mol_type = other DNA
agacgggatggtacgcctgcc

SEQ ID NO: 31965 - DNA, 21 bp, synthetic construct
  source 1..21: mol_type = other DNA
tacttccaggggcgcctagaa

SEQ ID NO: 31966 - DNA, 21 bp, synthetic construct
  source 1..21: mol_type = other DNA
tgtattatgaagaagctagaa

SEQ ID NO: 31967 - DNA, 21 bp, synthetic construct
  source 1..21: mol_type = other DNA
ggatcagggacaagtgcttgg

SEQ ID NO: 31968 - DNA, 21 bp, synthetic construct
  source 1..21: mol_type = other DNA
cttaagggctcatgtgaacag

SEQ ID NO: 31969 - DNA, 21 bp, synthetic construct
  source 1..21: mol_type = other DNA
tgtaaagcgttgtcacaagac

SEQ ID NO: 31970 - DNA, 21 bp, synthetic construct
  source 1..21: mol_type = other DNA
tgtacggtgaagaccggccat

SEQ ID NO: 31971 - DNA, 21 bp, synthetic construct
  source 1..21: mol_type = other DNA
tgcaagctcaatggcccggat

SEQ ID NO: 31972 - DNA, 21 bp, synthetic construct
  source 1..21: mol_type = other DNA
tgcaaagctgttagtcgcgat

SEQ ID NO: 31973 - DNA, 21 bp, synthetic construct
  source 1..21: mol_type = other DNA
tatgcaaggatgggtatgaac

SEQ ID NO: 31974 - DNA, 21 bp, synthetic construct
  source 1..21: mol_type = other DNA
tactggagtggaatgcccgag

SEQ ID NO: 31975 - DNA, 21 bp, synthetic construct
  source 1..21: mol_type = other DNA
tacgccagaatgggatacaac

SEQ ID NO: 31976 - DNA, 21 bp, synthetic construct
  source 1..21: mol_type = other DNA
tactcgaaaataaattttaac

SEQ ID NO: 31977 - DNA, 21 bp, synthetic construct
  source 1..21: mol_type = other DNA
ttatcaagggttgccttcgat

SEQ ID NO: 31978 - DNA, 21 bp, synthetic construct
  source 1..21: mol_type = other DNA
actcgcgatggctgcatggca

SEQ ID NO: 31979 - DNA, 21 bp, synthetic construct
  source 1..21: mol_type = other DNA
tatagtcgggcaggctacaac

SEQ ID NO: 31980 - DNA, 21 bp, synthetic construct
  source 1..21: mol_type = other DNA
cattacagtacgaatggagtg

SEQ ID NO: 31981 - DNA, 21 bp, synthetic construct
  source 1..21: mol_type = other DNA
tactacacaggaatccaagag

SEQ ID NO: 31982 - DNA, 21 bp, synthetic construct
  source 1..21: mol_type = other DNA
tgtaagccaaccatggtgcaa

SEQ ID NO: 31983 - DNA, 21 bp, synthetic construct
  source 1..21: mol_type = other DNA
tatttcagcggcacgatagta

SEQ ID NO: 31984 - DNA, 21 bp, synthetic construct
  source 1..21: mol_type = other DNA
tatttttcgggcaaaacggtt

SEQ ID NO: 31985 - DNA, 21 bp, synthetic construct
  source 1..21: mol_type = other DNA
tactatacaggggttcaagcg

SEQ ID NO: 31986 - DNA, 21 bp, synthetic construct
  source 1..21: mol_type = other DNA
tactttagtggagtacgcggg

SEQ ID NO: 31987 - DNA, 21 bp, synthetic construct
  source 1..21: mol_type = other DNA
tgtaataagcccatgaccgag

SEQ ID NO: 31988 - DNA, 21 bp, synthetic construct
  source 1..21: mol_type = other DNA
tactcgcgtcacaatgataat

SEQ ID NO: 31989 - DNA, 21 bp, synthetic construct
  source 1..21: mol_type = other DNA
tattggcagggagtggtggac

SEQ ID NO: 31990 - DNA, 21 bp, synthetic construct
  source 1..21: mol_type = other DNA
tacagcagggtaaatagtaat

SEQ ID NO: 31991 - DNA, 21 bp, synthetic construct
  source 1..21: mol_type = other DNA
ttcgtacgatcagatattaag

SEQ ID NO: 31992 - DNA, 21 bp, synthetic construct
  source 1..21: mol_type = other DNA
tgctataaacctatgaccgcg

SEQ ID NO: 31993 - DNA, 21 bp, synthetic construct
  source 1..21: mol_type = other DNA
acgcaaatctgcccggatagg

SEQ ID NO: 31994 - DNA, 21 bp, synthetic construct
  source 1..21: mol_type = other DNA
tttaatagcacaaatgggatc

SEQ ID NO: 31995 - DNA, 21 bp, synthetic construct
  source 1..21: mol_type = other DNA
tatttcaagactcaatgtgat

SEQ ID NO: 31996 - DNA, 21 bp, synthetic construct
  source 1..21: mol_type = other DNA
tacttcagtggccgacacgac

SEQ ID NO: 31997 - DNA, 21 bp, synthetic construct
  source 1..21: mol_type = other DNA
tactcgaaaatcggaaaggat

SEQ ID NO: 31998 - DNA, 21 bp, synthetic construct
  source 1..21: mol_type = other DNA
ttcagccgagccaacgtcaac

SEQ ID NO: 31999 - DNA, 21 bp, synthetic construct
  source 1..21: mol_type = other DNA
tactggactggaaaacaggat

SEQ ID NO: 32000 - DNA, 21 bp, synthetic construct
  source 1..21: mol_type = other DNA
ttttctagagttaacttcaat

SEQ ID NO: 32001 - DNA, 21 bp, synthetic construct
  source 1..21: mol_type = other DNA
tgtaaccagccaatgactgcg

SEQ ID NO: 32002 - DNA, 21 bp, synthetic construct
  source 1..21: mol_type = other DNA
aggttagaatctgtacaatgg

SEQ ID NO: 32003 - DNA, 21 bp, synthetic construct
  source 1..21: mol_type = other DNA
tgtaataaaccgatgacaacg

SEQ ID NO: 32004 - DNA, 21 bp, synthetic construct
  source 1..21: mol_type = other DNA
gctcctcccgaagtcagatgg

SEQ ID NO: 32005 - DNA, 21 bp, synthetic construct
  source 1..21: mol_type = other DNA
tatttcaccaatgtgaaagaa

SEQ ID NO: 32006 - DNA, 21 bp, synthetic construct
  source 1..21: mol_type = other DNA
tatacccgtttgaatcccatg

SEQ ID NO: 32007 - DNA, 21 bp, synthetic construct
  source 1..21: mol_type = other DNA
tacttccagggtaagattagt

SEQ ID NO: 32008 - DNA, 21 bp, synthetic construct
  source 1..21: mol_type = other DNA
gatatgcaagataggtcttgg

SEQ ID NO: 32009 - DNA, 21 bp, synthetic construct
  source 1..21: mol_type = other DNA
ccacttaaaagcagtctatgg

SEQ ID NO: 32010 - DNA, 21 bp, synthetic construct
  source 1..21: mol_type = other DNA
ttcgcaaggagcggttataac

SEQ ID NO: 32011 - DNA, 21 bp, synthetic construct
  source 1..21: mol_type = other DNA
gcgggcatggatcggggttgg

SEQ ID NO: 32012 - DNA, 21 bp, synthetic construct
  source 1..21: mol_type = other DNA
tacgcggatagtaagacttgc

SEQ ID NO: 32013 - DNA, 21 bp, synthetic construct
  source 1..21: mol_type = other DNA
gacatgggcgcaagtagctgg

SEQ ID NO: 32014 - DNA, 21 bp, synthetic construct
  source 1..21: mol_type = other DNA
tgtggtaagcgagacgcggac

SEQ ID NO: 32015 - DNA, 21 bp, synthetic construct
  source 1..21: mol_type = other DNA
gacctcaaatctgcatcatgg

SEQ ID NO: 32016 - DNA, 21 bp, synthetic construct
  source 1..21: mol_type = other DNA
tgccccaagaatcaacgtgag

SEQ ID NO: 32017 - DNA, 21 bp, synthetic construct
  source 1..21: mol_type = other DNA
ggtgacgggaactcacgctgg

SEQ ID NO: 32018 - DNA, 21 bp, synthetic construct
  source 1..21: mol_type = other DNA
tcattagaaagcagggattgg

SEQ ID NO: 32019 - DNA, 21 bp, synthetic construct
  source 1..21: mol_type = other DNA
cgagacgagtttatgtctttt

SEQ ID NO: 32020 - DNA, 21 bp, synthetic construct
  source 1..21: mol_type = other DNA
tatcatcgcacgggcaacaat

SEQ ID NO: 32021 - DNA, 21 bp, synthetic construct
  source 1..21: mol_type = other DNA
tgccctccgaaaggtcccagt

SEQ ID NO: 32022 - DNA, 21 bp, synthetic construct
  source 1..21: mol_type = other DNA
ttcttctcaggacaagtagag

SEQ ID NO: 32023 - DNA, 21 bp, synthetic construct
  source 1..21: mol_type = other DNA
atgactggtacggattgctta

SEQ ID NO: 32024 - DNA, 21 bp, synthetic construct
  source 1..21: mol_type = other DNA
tactttcagggacaacatgaa

SEQ ID NO: 32025 - DNA, 21 bp, synthetic construct
  source 1..21: mol_type = other DNA
ggtatcttgacccggggaagc

SEQ ID NO: 32026 - DNA, 21 bp, synthetic construct
  source 1..21: mol_type = other DNA
tgcgcaccataccttcccgaa

SEQ ID NO: 32027 - DNA, 21 bp, synthetic construct
  source 1..21: mol_type = other DNA
tgtggattaggatcggaagct

SEQ ID NO: 32028 - DNA, 21 bp, synthetic construct
  source 1..21: mol_type = other DNA
tgcaggcaccccgttacagcc

SEQ ID NO: 32029 - DNA, 21 bp, synthetic construct
  source 1..21: mol_type = other DNA
tactggactggcacgctggag

SEQ ID NO: 32030 - DNA, 21 bp, synthetic construct
  source 1..21: mol_type = other DNA
tgcaagatggatggtactgga

SEQ ID NO: 32031 - DNA, 21 bp, synthetic construct
  source 1..21: mol_type = other DNA
tttcatagattaagtcccggc

SEQ ID NO: 32032 - DNA, 21 bp, synthetic construct
  source 1..21: mol_type = other DNA
gaagagcctgggtgtaaggag

SEQ ID NO: 32033 - DNA, 21 bp, synthetic construct
  source 1..21: mol_type = other DNA
tacgactcaacaaatggagtg

SEQ ID NO: 32034 - DNA, 21 bp, synthetic construct
  source 1..21: mol_type = other DNA
tatttcactggggcaatggat

SEQ ID NO: 32035 - DNA, 21 bp, synthetic construct
  source 1..21: mol_type = other DNA
agagccctggatggctttgat

SEQ ID NO: 32036 - DNA, 21 bp, synthetic construct
  source 1..21: mol_type = other DNA
tggtttagcggaaaggtagaa

SEQ ID NO: 32037 - DNA, 21 bp, synthetic construct
  source 1..21: mol_type = other DNA
tattcaaagggcaactggaac

SEQ ID NO: 32038 - DNA, 21 bp, synthetic construct
  source 1..21: mol_type = other DNA
ggacgcgagcatgttaagtgg

SEQ ID NO: 32039 - DNA, 21 bp, synthetic construct
  source 1..21: mol_type = other DNA
tattataccggtcatcctaat

SEQ ID NO: 32040 - DNA, 21 bp, synthetic construct
  source 1..21: mol_type = other DNA
tattggagtggaacaagggag

SEQ ID NO: 32041 - DNA, 21 bp, synthetic construct
  source 1..21: mol_type = other DNA
agggagaatgaagtacgctgg

SEQ ID NO: 32042 - DNA, 21 bp, synthetic construct
  source 1..21: mol_type = other DNA
cgggatgctgaggtgtaccct

SEQ ID NO: 32043 - DNA, 21 bp, synthetic construct
  source 1..21: mol_type = other DNA
tactccagggccaacgtgaac

SEQ ID NO: 32044 - DNA, 21 bp, synthetic construct
  source 1..21: mol_type = other DNA
actccagattccgtaagatgg

SEQ ID NO: 32045 - DNA, 21 bp, synthetic construct
  source 1..21: mol_type = other DNA
aggggggggggcttgttcgtt

SEQ ID NO: 32046 - DNA, 21 bp, synthetic construct
  source 1..21: mol_type = other DNA
cactattcaaccaacggtgtt

SEQ ID NO: 32047 - DNA, 21 bp, synthetic construct
  source 1..21: mol_type = other DNA
tgccgcccgaggaccatcgaa

SEQ ID NO: 32048 - DNA, 21 bp, synthetic construct
  source 1..21: mol_type = other DNA
tgtacatctgcgacagggcat

SEQ ID NO: 32049 - DNA, 21 bp, synthetic construct
  source 1..21: mol_type = other DNA
tactggacgggacaagtagag

SEQ ID NO: 32050 - DNA, 21 bp, synthetic construct
  source 1..21: mol_type = other DNA
tattcaagaatgaacgataat

SEQ ID NO: 32051 - DNA, 21 bp, synthetic construct
  source 1..21: mol_type = other DNA
accatgtcagataggacgtgg

SEQ ID NO: 32052 - DNA, 21 bp, synthetic construct
  source 1..21: mol_type = other DNA
tactggacgggcaaacacgaa

SEQ ID NO: 32053 - DNA, 21 bp, synthetic construct
  source 1..21: mol_type = other DNA
aatatggcttcaagtgggtgg

SEQ ID NO: 32054 - DNA, 21 bp, synthetic construct
  source 1..21: mol_type = other DNA
tactcccgaatgggctttaat

SEQ ID NO: 32055 - DNA, 21 bp, synthetic construct
  source 1..21: mol_type = other DNA
tatttccatggggttcaggat

SEQ ID NO: 32056 - DNA, 21 bp, synthetic construct
  source 1..21: mol_type = other DNA
tactttcaggggcgactggaa

SEQ ID NO: 32057 - DNA, 21 bp, synthetic construct
  source 1..21: mol_type = other DNA
atgagtgagtttaagtcatgg

SEQ ID NO: 32058 - DNA, 21 bp, synthetic construct
  source 1..21: mol_type = other DNA
cccccggtgattcaatgtagc

SEQ ID NO: 32059 - DNA, 21 bp, synthetic construct
  source 1..21: mol_type = other DNA
tatacatcaaccaatggaatc

SEQ ID NO: 32060 - DNA, 21 bp, synthetic construct
  source 1..21: mol_type = other DNA
aacgatgccacaagcaagtgg

SEQ ID NO: 32061 - DNA, 21 bp, synthetic construct
  source 1..21: mol_type = other DNA
atgccagacggcactgggcca

SEQ ID NO: 32062 - DNA, 21 bp, synthetic construct
  source 1..21: mol_type = other DNA
tatgttagatttgataataat

SEQ ID NO: 32063 - DNA, 21 bp, synthetic construct
  source 1..21: mol_type = other DNA
tcagtatccactaacggagtg

SEQ ID NO: 32064 - DNA, 21 bp, synthetic construct
  source 1..21: mol_type = other DNA
taccataggcagaacccgctg

SEQ ID NO: 32065 - DNA, 21 bp, synthetic construct
  source 1..21: mol_type = other DNA
tgtaagcctcccagcggggat

SEQ ID NO: 32066 - DNA, 21 bp, synthetic construct
  source 1..21: mol_type = other DNA
tacttcagcgggaagccagaa

SEQ ID NO: 32067 - DNA, 21 bp, synthetic construct
  source 1..21: mol_type = other DNA
gtggcctctagtaacggcgta

SEQ ID NO: 32068 - DNA, 21 bp, synthetic construct
  source 1..21: mol_type = other DNA
tattttcacgggagacacgac

SEQ ID NO: 32069 - DNA, 21 bp, synthetic construct
  source 1..21: mol_type = other DNA
tactcacgtattaatatgaac

SEQ ID NO: 32070 - DNA, 21 bp, synthetic construct
  source 1..21: mol_type = other DNA
tacagttccactaatggggtc

SEQ ID NO: 32071 - DNA, 21 bp, synthetic construct
  source 1..21: mol_type = other DNA
agcatggaaagccacggctgg

SEQ ID NO: 32072 - DNA, 21 bp, synthetic construct
  source 1..21: mol_type = other DNA
agggactctactaacgggatt

SEQ ID NO: 32073 - DNA, 21 bp, synthetic construct
  source 1..21: mol_type = other DNA
gtgccggactatgtgaaatat

SEQ ID NO: 32074 - DNA, 21 bp, synthetic construct
  source 1..21: mol_type = other DNA
tatgctcggcaaggacaaaac

SEQ ID NO: 32075 - DNA, 21 bp, synthetic construct
  source 1..21: mol_type = other DNA
tgcggtcttaatccgtgcggg

SEQ ID NO: 32076 - DNA, 21 bp, synthetic construct
  source 1..21: mol_type = other DNA
ttcttaaaatcacagtcctat

SEQ ID NO: 32077 - DNA, 21 bp, synthetic construct
  source 1..21: mol_type = other DNA
agtaaatcgacaaatggtatc

SEQ ID NO: 32078 - DNA, 21 bp, synthetic construct
  source 1..21: mol_type = other DNA
tgcaagcctatggctcccgat

SEQ ID NO: 32079 - DNA, 21 bp, synthetic construct
  source 1..21: mol_type = other DNA
ctcgccaaaactagttgcaac

SEQ ID NO: 32080 - DNA, 21 bp, synthetic construct
  source 1..21: mol_type = other DNA
tgcactagtaaaacggaacac

SEQ ID NO: 32081 - DNA, 21 bp, synthetic construct
  source 1..21: mol_type = other DNA
tatgcccggaatgggtataac

SEQ ID NO: 32082 - DNA, 21 bp, synthetic construct
  source 1..21: mol_type = other DNA
tcggcccccacgtgcaaggga

SEQ ID NO: 32083 - DNA, 21 bp, synthetic construct
  source 1..21: mol_type = other DNA
tgtagagaaggaacttcatcg

SEQ ID NO: 32084 - DNA, 21 bp, synthetic construct
  source 1..21: mol_type = other DNA
ttttcaaaggcaggatacaat

SEQ ID NO: 32085 - DNA, 21 bp, synthetic construct
  source 1..21: mol_type = other DNA
tacgatccgggctgtaaggag

SEQ ID NO: 32086 - DNA, 21 bp, synthetic construct
  source 1..21: mol_type = other DNA
tgcaagcccccatttgtggct

SEQ ID NO: 32087 - DNA, 21 bp, synthetic construct
  source 1..21: mol_type = other DNA
ggaagtgagttcaagtcatgg

SEQ ID NO: 32088 - DNA, 21 bp, synthetic construct
  source 1..21: mol_type = other DNA
tattcaagaaacgggctgaac

SEQ ID NO: 32089 - DNA, 21 bp, synthetic construct
  source 1..21: mol_type = other DNA
ctccgaagcggctgcggcccg

SEQ ID NO: 32090 - DNA, 21 bp, synthetic construct
  source 1..21: mol_type = other DNA
tgcaaagaggatagtcgcatt

SEQ ID NO: 32091 - DNA, 21 bp, synthetic construct
  source 1..21: mol_type = other DNA
tactggacaggaaaacccgat

SEQ ID NO: 32092 - DNA, 21 bp, synthetic construct
  source 1..21: mol_type = other DNA
tgccgtgaaggaaccccacca

SEQ ID NO: 32093 - DNA, 21 bp, synthetic construct
  source 1..21: mol_type = other DNA
tgcaagcccggtatgggatct

SEQ ID NO: 32094 - DNA, 21 bp, synthetic construct
  source 1..21: mol_type = other DNA
tactcccgcatgagcgataat

SEQ ID NO: 32095 - DNA, 21 bp, synthetic construct
  source 1..21: mol_type = other DNA
tactcgaggcataatgcaaac

SEQ ID NO: 32096 - DNA, 21 bp, synthetic construct
  source 1..21: mol_type = other DNA
cgtacgtttgatagctttgaa

SEQ ID NO: 32097 - DNA, 21 bp, synthetic construct
  source 1..21: mol_type = other DNA
cgcgaaaacgaggtcaggtgg

SEQ ID NO: 32098 - DNA, 21 bp, synthetic construct
  source 1..21: mol_type = other DNA
tacttttctggtactgtgacc

SEQ ID NO: 32099 - DNA, 21 bp, synthetic construct
  source 1..21: mol_type = other DNA
aaagaagaacatgtccgttgg

SEQ ID NO: 32100 - DNA, 21 bp, synthetic construct
  source 1..21: mol_type = other DNA
tatgctaagggcggctttaac

SEQ ID NO: 32101 - DNA, 21 bp, synthetic construct
  source 1..21: mol_type = other DNA
tatagccgagttaacacgaac

SEQ ID NO: 32102 - DNA, 21 bp, synthetic construct
  source 1..21: mol_type = other DNA
aattcgtcgacgaatggggtt

SEQ ID NO: 32103 - DNA, 21 bp, synthetic construct
  source 1..21: mol_type = other DNA
tatagccgacagaaccccaac

SEQ ID NO: 32104 - DNA, 21 bp, synthetic construct
  source 1..21: mol_type = other DNA
tattccagaaacggtaataat

SEQ ID NO: 32105 - DNA, 21 bp, synthetic construct
  source 1..21: mol_type = other DNA
tgtaagcctcctcccacgcct

SEQ ID NO: 32106 - DNA, 21 bp, synthetic construct
  source 1..21: mol_type = other DNA
tacagtcgtggcaacgccaat

SEQ ID NO: 32107 - DNA, 21 bp, synthetic construct
  source 1..21: mol_type = other DNA
tatgttaggtctgggccagat

SEQ ID NO: 32108 - DNA, 21 bp, synthetic construct
  source 1..21: mol_type = other DNA
tatttcacaggggaaatggaa

SEQ ID NO: 32109 - DNA, 21 bp, synthetic construct
  source 1..21: mol_type = other DNA
tatgccagaaacggatataat

SEQ ID NO: 32110 - DNA, 21 bp, synthetic construct
  source 1..21: mol_type = other DNA
gttttgcagagtgccagctgg

SEQ ID NO: 32111 - DNA, 21 bp, synthetic construct
  source 1..21: mol_type = other DNA
tatagtcgcatgaatctcaat

SEQ ID NO: 32112 - DNA, 21 bp, synthetic construct
  source 1..21: mol_type = other DNA
ttatcaaaaatgaatcacaac

SEQ ID NO: 32113 - DNA, 21 bp, synthetic construct
  source 1..21: mol_type = other DNA
tatgcacgcgtaggatataat

SEQ ID NO: 32114 - DNA, 21 bp, synthetic construct
  source 1..21: mol_type = other DNA
tattattcagggcagcgagag

SEQ ID NO: 32115 - DNA, 21 bp, synthetic construct
  source 1..21: mol_type = other DNA
ggagataataataaggtgtgc

SEQ ID NO: 32116 - DNA, 21 bp, synthetic construct
  source 1..21: mol_type = other DNA
gtgaacgacgcgggcaaatgt

SEQ ID NO: 32117 - DNA, 21 bp, synthetic construct
  source 1..21: mol_type = other DNA
gatttagggagcgcttcttgg

SEQ ID NO: 32118 - DNA, 21 bp, synthetic construct
  source 1..21: mol_type = other DNA
ttttggacggggaaagtcgag

SEQ ID NO: 32119 - DNA, 21 bp, synthetic construct
  source 1..21: mol_type = other DNA
tatgcaagaagtaactacaat

SEQ ID NO: 32120 - DNA, 21 bp, synthetic construct
  source 1..21: mol_type = other DNA
tactatagcggtgtgcaagct

SEQ ID NO: 32121 - DNA, 21 bp, synthetic construct
  source 1..21: mol_type = other DNA
tacgtgcgaagccagcaatcg

SEQ ID NO: 32122 - DNA, 21 bp, synthetic construct
  source 1..21: mol_type = other DNA
tactacacaggccagaccgaa

SEQ ID NO: 32123 - DNA, 21 bp, synthetic construct
  source 1..21: mol_type = other DNA
aaaaacgactatgccacatgg

SEQ ID NO: 32124 - DNA, 21 bp, synthetic construct
  source 1..21: mol_type = other DNA
ggggatggacgatcacactgg

SEQ ID NO: 32125 - DNA, 21 bp, synthetic construct
  source 1..21: mol_type = other DNA
tacttcagcgggaagactgta

SEQ ID NO: 32126 - DNA, 21 bp, synthetic construct
  source 1..21: mol_type = other DNA
tgtaaacctgtgaagggggaa

SEQ ID NO: 32127 - DNA, 21 bp, synthetic construct
  source 1..21: mol_type = other DNA
tgtacaagcaagacctaccac

SEQ ID NO: 32128 - DNA, 21 bp, synthetic construct
  source 1..21: mol_type = other DNA
ccgatgtcagttagcaagtgg

SEQ ID NO: 32129 - DNA, 21 bp, synthetic construct
  source 1..21: mol_type = other DNA
ttggcgaaaacagcatggaat

SEQ ID NO: 32130 - DNA, 21 bp, synthetic construct
  source 1..21: mol_type = other DNA
atcatgttggacagaggatgg

SEQ ID NO: 32131 - DNA, 21 bp, synthetic construct
  source 1..21: mol_type = other DNA
tattacagtggtgtcagcgcg

SEQ ID NO: 32132 - DNA, 21 bp, synthetic construct
  source 1..21: mol_type = other DNA
tttacgagcagtaatggcgtt

SEQ ID NO: 32133 - DNA, 21 bp, synthetic construct
  source 1..21: mol_type = other DNA
atcccagggtgcatgtcgttc

SEQ ID NO: 32134 - DNA, 21 bp, synthetic construct
  source 1..21: mol_type = other DNA
ttttctcgagcaggacataat

SEQ ID NO: 32135 - DNA, 21 bp, synthetic construct
  source 1..21: mol_type = other DNA
tgcaataaacctctcaccgcg

SEQ ID NO: 32136 - DNA, 21 bp, synthetic construct
  source 1..21: mol_type = other DNA
tacgtccggaacgacgataag

SEQ ID NO: 32137 - DNA, 21 bp, synthetic construct
  source 1..21: mol_type = other DNA
aaggatggcctttcgaggtgg

SEQ ID NO: 32138 - DNA, 21 bp, synthetic construct
  source 1..21: mol_type = other DNA
ttccatagcaccaatggcgta

SEQ ID NO: 32139 - DNA, 21 bp, synthetic construct
  source 1..21: mol_type = other DNA
tacgttaaacttcagccaaac

SEQ ID NO: 32140 - DNA, 21 bp, synthetic construct
  source 1..21: mol_type = other DNA
tattatacaggaatgcgggac

SEQ ID NO: 32141 - DNA, 21 bp, synthetic construct
  source 1..21: mol_type = other DNA
ttgtctaaggcaggaattaat

SEQ ID NO: 32142 - DNA, 21 bp, synthetic construct
  source 1..21: mol_type = other DNA
aagcctgccaactacgactgc

SEQ ID NO: 32143 - DNA, 21 bp, synthetic construct
  source 1..21: mol_type = other DNA
tactcacgaagcaattcgaat

SEQ ID NO: 32144 - DNA, 21 bp, synthetic construct
  source 1..21: mol_type = other DNA
tatgctaaaggggggtggaac

SEQ ID NO: 32145 - DNA, 21 bp, synthetic construct
  source 1..21: mol_type = other DNA
tattctagaatcaatataaac

SEQ ID NO: 32146 - DNA, 21 bp, synthetic construct
  source 1..21: mol_type = other DNA
tacttcagtgggcagaatgaa

SEQ ID NO: 32147 - DNA, 21 bp, synthetic construct
  source 1..21: mol_type = other DNA
tcgatgcaagatcgcaagtgg

SEQ ID NO: 32148 - DNA, 21 bp, synthetic construct
  source 1..21: mol_type = other DNA
tttcctggttcgatatgtgtt

SEQ ID NO: 32149 - DNA, 21 bp, synthetic construct
  source 1..21: mol_type = other DNA
tgtaagcctggatcacccctc

SEQ ID NO: 32150 - DNA, 21 bp, synthetic construct
  source 1..21: mol_type = other DNA
tgtaggggggacaatggagta

SEQ ID NO: 32151 - DNA, 21 bp, synthetic construct
  source 1..21: mol_type = other DNA
ttggaaaagccatgccttacc

SEQ ID NO: 32152 - DNA, 21 bp, synthetic construct
  source 1..21: mol_type = other DNA
ttcttccatggaaaaatcgag

SEQ ID NO: 32153 - DNA, 21 bp, synthetic construct
  source 1..21: mol_type = other DNA
tttgcgcggaatgggtataac

SEQ ID NO: 32154 - DNA, 21 bp, synthetic construct
  source 1..21: mol_type = other DNA
ttcgctaggagcggccacaac

SEQ ID NO: 32155 - DNA, 21 bp, synthetic construct
  source 1..21: mol_type = other DNA
tgcaaaccgggtcaacctatg

SEQ ID NO: 32156 - DNA, 21 bp, synthetic construct
  source 1..21: mol_type = other DNA
ttctggagtggggttccagct

SEQ ID NO: 32157 - DNA, 21 bp, synthetic construct
  source 1..21: mol_type = other DNA
tacagtaggattaactctaat

SEQ ID NO: 32158 - DNA, 21 bp, synthetic construct
  source 1..21: mol_type = other DNA
ggcgggagtacaagttcgtgg

SEQ ID NO: 32159 - DNA, 21 bp, synthetic construct
  source 1..21: mol_type = other DNA
tatgccaggcagggtcataat

SEQ ID NO: 32160 - DNA, 21 bp, synthetic construct
  source 1..21: mol_type = other DNA
tggttcaccggcatacgagat

SEQ ID NO: 32161 - DNA, 21 bp, synthetic construct
  source 1..21: mol_type = other DNA
tactttaccggggtacaaacc

SEQ ID NO: 32162 - DNA, 21 bp, synthetic construct
  source 1..21: mol_type = other DNA
tattttcacgggcagctggag

SEQ ID NO: 32163 - DNA, 21 bp, synthetic construct
  source 1..21: mol_type = other DNA
tattactcaggcaagcacgaa

SEQ ID NO: 32164 - DNA, 21 bp, synthetic construct
  source 1..21: mol_type = other DNA
tgcaaacccggcagctcgggg

SEQ ID NO: 32165 - DNA, 21 bp, synthetic construct
  source 1..21: mol_type = other DNA
tgggtaagatcggacaccaaa

SEQ ID NO: 32166 - DNA, 21 bp, synthetic construct
  source 1..21: mol_type = other DNA
tactacagcggtcaaaaagaa

SEQ ID NO: 32167 - DNA, 21 bp, synthetic construct
  source 1..21: mol_type = other DNA
gttgacgactataacatatat

SEQ ID NO: 32168 - DNA, 21 bp, synthetic construct
  source 1..21: mol_type = other DNA
aggttgtacgatgcaattgct

SEQ ID NO: 32169 - DNA, 21 bp, synthetic construct
  source 1..21: mol_type = other DNA
ttctcgaaactaggttacaac

SEQ ID NO: 32170 - DNA, 21 bp, synthetic construct
  source 1..21: mol_type = other DNA
tacgcgcgtggaaatattaac

SEQ ID NO: 32171 - DNA, 21 bp, synthetic construct
  source 1..21: mol_type = other DNA
tattcacgccacggagctaac

SEQ ID NO: 32172 - DNA, 21 bp, synthetic construct
  source 1..21: mol_type = other DNA
tacgctaaagggggattaaat

SEQ ID NO: 32173 - DNA, 21 bp, synthetic construct
  source 1..21: mol_type = other DNA
tactctcgcataaacgcgaat

SEQ ID NO: 32174 - DNA, 21 bp, synthetic construct
  source 1..21: mol_type = other DNA
tactttactggcactgccaaa

SEQ ID NO: 32175 - DNA, 21 bp, synthetic construct
  source 1..21: mol_type = other DNA
tggtggagttctattaaagaa

SEQ ID NO: 32176 - DNA, 21 bp, synthetic construct
  source 1..21: mol_type = other DNA
ctcgcaaagacaggttgtatg

SEQ ID NO: 32177 - DNA, 21 bp, synthetic construct
  source 1..21: mol_type = other DNA
tattcaaggcttaacggcttg

SEQ ID NO: 32178 - DNA, 21 bp, synthetic construct
  source 1..21: mol_type = other DNA
tattggcagggcaaagttgct

SEQ ID NO: 32179 - DNA, 21 bp, synthetic construct
  source 1..21: mol_type = other DNA
tacgtgcgcagcgaccccatg

SEQ ID NO: 32180 - DNA, 21 bp, synthetic construct
  source 1..21: mol_type = other DNA
cgtaacggtactagcagttgg

SEQ ID NO: 32181 - DNA, 21 bp, synthetic construct
  source 1..21: mol_type = other DNA
gatactaaccataagtggtcg

SEQ ID NO: 32182 - DNA, 21 bp, synthetic construct
  source 1..21: mol_type = other DNA
tattcccgtgtcaatattaat

SEQ ID NO: 32183 - DNA, 21 bp, synthetic construct
  source 1..21: mol_type = other DNA
tatagccggacaaattttaat

SEQ ID NO: 32184 - DNA, 21 bp, synthetic construct
  source 1..21: mol_type = other DNA
tcggacggccaatcaaagtgg

SEQ ID NO: 32185 - DNA, 21 bp, synthetic construct
  source 1..21: mol_type = other DNA
catatgtccacgaatggcgtt

SEQ ID NO: 32186 - DNA, 21 bp, synthetic construct
  source 1..21: mol_type = other DNA
tacttcgctggaagagcagat

SEQ ID NO: 32187 - DNA, 21 bp, synthetic construct
  source 1..21: mol_type = other DNA
tacagccgcattagttcgaat

SEQ ID NO: 32188 - DNA, 21 bp, synthetic construct
  source 1..21: mol_type = other DNA
tattcacgtcttaatgtgggg

SEQ ID NO: 32189 - DNA, 21 bp, synthetic construct
  source 1..21: mol_type = other DNA
gtatctactcactgtttcgcg

SEQ ID NO: 32190 - DNA, 21 bp, synthetic construct
  source 1..21: mol_type = other DNA
ttatctaggagcgggtggaac

SEQ ID NO: 32191 - DNA, 21 bp, synthetic construct
  source 1..21: mol_type = other DNA
tggtggagtggaactcaagcg

SEQ ID NO: 32192 - DNA, 21 bp, synthetic construct
  source 1..21: mol_type = other DNA
tacttcacaggtgtagcgact

SEQ ID NO: 32193 - DNA, 21 bp, synthetic construct
  source 1..21: mol_type = other DNA
tattatacgggtcaagtcctt

SEQ ID NO: 32194 - DNA, 21 bp, synthetic construct
  source 1..21: mol_type = other DNA
tactatcacggaatagcagct

SEQ ID NO: 32195 - DNA, 21 bp, synthetic construct
  source 1..21: mol_type = other DNA
ccggggtcaacgaatggccgg

SEQ ID NO: 32196 - DNA, 21 bp, synthetic construct
  source 1..21: mol_type = other DNA
tactacagcggacaaagggaa

SEQ ID NO: 32197 - DNA, 21 bp, synthetic construct
  source 1..21: mol_type = other DNA
aacgcgagggagggccggaac

SEQ ID NO: 32198 - DNA, 21 bp, synthetic construct
  source 1..21: mol_type = other DNA
tacttcagcggtatgcaggcg

SEQ ID NO: 32199 - DNA, 21 bp, synthetic construct
  source 1..21: mol_type = other DNA
tacagtaaacaaggagtgaat

SEQ ID NO: 32200 - DNA, 21 bp, synthetic construct
  source 1..21: mol_type = other DNA
ggagatgaatgggagacttac

SEQ ID NO: 32201 - DNA, 21 bp, synthetic construct
  source 1..21: mol_type = other DNA
tattggacaggcaaggctgac

SEQ ID NO: 32202 - DNA, 21 bp, synthetic construct
  source 1..21: mol_type = other DNA
gatctgagagcagttagctgg

SEQ ID NO: 32203 - DNA, 21 bp, synthetic construct
  source 1..21: mol_type = other DNA
agcatgcaaagccgatcttgg

SEQ ID NO: 32204 - DNA, 21 bp, synthetic construct
  source 1..21: mol_type = other DNA
aaacaaggcgaggggagttgt

SEQ ID NO: 32205 - DNA, 21 bp, synthetic construct
  source 1..21: mol_type = other DNA
ttcagtcggctagggcataac

SEQ ID NO: 32206 - DNA, 21 bp, synthetic construct
  source 1..21: mol_type = other DNA
ttttggagtgggaaacttgat

SEQ ID NO: 32207 - DNA, 21 bp, synthetic construct
  source 1..21: mol_type = other DNA
tgcgcgcctgccctccacgaa

SEQ ID NO: 32208 - DNA, 21 bp, synthetic construct
  source 1..21: mol_type = other DNA
agtgatggacagagtaaatgg

SEQ ID NO: 32209 - DNA, 21 bp, synthetic construct
  source 1..21: mol_type = other DNA
tacgcacgccagaatatcaat

SEQ ID NO: 32210 - DNA, 21 bp, synthetic construct
  source 1..21: mol_type = other DNA
agagatgagtatgtgatgtat

SEQ ID NO: 32211 - DNA, 21 bp, synthetic construct
  source 1..21: mol_type = other DNA
agaaaccgggacgtataccct

SEQ ID NO: 32212 - DNA, 21 bp, synthetic construct
  source 1..21: mol_type = other DNA
tattcaaaaagtggagaaaac

SEQ ID NO: 32213 - DNA, 21 bp, synthetic construct
  source 1..21: mol_type = other DNA
tattggcagggaactgtcgca

SEQ ID NO: 32214 - DNA, 21 bp, synthetic construct
  source 1..21: mol_type = other DNA
taccataggattgggacgaac

SEQ ID NO: 32215 - DNA, 21 bp, synthetic construct
  source 1..21: mol_type = other DNA
tgtgacggcgttcctcgaggt

SEQ ID NO: 32216 - DNA, 21 bp, synthetic construct
  source 1..21: mol_type = other DNA
tgtgccccggcatacagagag

SEQ ID NO: 32217 - DNA, 21 bp, synthetic construct
  source 1..21: mol_type = other DNA
tacagtcggcaaggagataac

SEQ ID NO: 32218 - DNA, 21 bp, synthetic construct
  source 1..21: mol_type = other DNA
tgggtcagatcagacataaaa

SEQ ID NO: 32219 - DNA, 21 bp, synthetic construct
  source 1..21: mol_type = other DNA
tgcggaaagaagcaactagat

SEQ ID NO: 32220 - DNA, 21 bp, synthetic construct
  source 1..21: mol_type = other DNA
cttctagcaagctcgtcgtgg

SEQ ID NO: 32221 - DNA, 21 bp, synthetic construct
  source 1..21: mol_type = other DNA
tactacagcggttacaaagac

SEQ ID NO: 32222 - DNA, 21 bp, synthetic construct
  source 1..21: mol_type = other DNA
tacacacggttaaaccagaat

SEQ ID NO: 32223 - DNA, 21 bp, synthetic construct
  source 1..21: mol_type = other DNA
ttctcaagggctggggtcaac

SEQ ID NO: 32224 - DNA, 21 bp, synthetic construct
  source 1..21: mol_type = other DNA
ttctggagcgggatgaaagat

SEQ ID NO: 32225 - DNA, 21 bp, synthetic construct
  source 1..21: mol_type = other DNA
tatttctctggcctaagggat

SEQ ID NO: 32226 - DNA, 21 bp, synthetic construct
  source 1..21: mol_type = other DNA
aactatgcgcgaagtgctgaa

SEQ ID NO: 32227 - DNA, 21 bp, synthetic construct
  source 1..21: mol_type = other DNA
tactcgagaagtggaatgaac

SEQ ID NO: 32228 - DNA, 21 bp, synthetic construct
  source 1..21: mol_type = other DNA
ttcttcagtgggacaagggcg

SEQ ID NO: 32229 - DNA, 21 bp, synthetic construct
  source 1..21: mol_type = other DNA
acatggatgggtgacaatgca

SEQ ID NO: 32230 - DNA, 21 bp, synthetic construct
  source 1..21: mol_type = other DNA
ggggccggaacttccaaatgg

SEQ ID NO: 32231 - DNA, 21 bp, synthetic construct
  source 1..21: mol_type = other DNA
ggaagcggtacatcacgctgg

SEQ ID NO: 32232 - DNA, 21 bp, synthetic construct
  source 1..21: mol_type = other DNA
tttttcagcggcattatggaa

SEQ ID NO: 32233 - DNA, 21 bp, synthetic construct
  source 1..21: mol_type = other DNA
tatgcacgcggtgggtataat

SEQ ID NO: 32234 - DNA, 21 bp, synthetic construct
  source 1..21: mol_type = other DNA
tacagccgatccaatttcaat

SEQ ID NO: 32235 - DNA, 21 bp, synthetic construct
  source 1..21: mol_type = other DNA
cagatggaggaccgtgcatgg

SEQ ID NO: 32236 - DNA, 21 bp, synthetic construct
  source 1..21: mol_type = other DNA
tgcaatgagcctatgaccgcc

SEQ ID NO: 32237 - DNA, 21 bp, synthetic construct
  source 1..21: mol_type = other DNA
ggcagtgagttccttccttgg

SEQ ID NO: 32238 - DNA, 21 bp, synthetic construct
  source 1..21: mol_type = other DNA
tatttccacgggcgttcggaa

SEQ ID NO: 32239 - DNA, 21 bp, synthetic construct
  source 1..21: mol_type = other DNA
atggatgggtcgtcgaagtgg

SEQ ID NO: 32240 - DNA, 21 bp, synthetic construct
  source 1..21: mol_type = other DNA
tgggaaagtacaaatggcgtg

SEQ ID NO: 32241 - DNA, 21 bp, synthetic construct
  source 1..21: mol_type = other DNA
ccaacgagcacgaacggggtt

SEQ ID NO: 32242 - DNA, 21 bp, synthetic construct
  source 1..21: mol_type = other DNA
tacgcccgagctgggctcaat

SEQ ID NO: 32243 - DNA, 21 bp, synthetic construct
  source 1..21: mol_type = other DNA
ccttgcaaaactggaggagaa

SEQ ID NO: 32244 - DNA, 21 bp, synthetic construct
  source 1..21: mol_type = other DNA
tattttaccggagaaatactg

SEQ ID NO: 32245 - DNA, 21 bp, synthetic construct
  source 1..21: mol_type = other DNA
tattggaaaccagaagttaac

SEQ ID NO: 32246 - DNA, 21 bp, synthetic construct
  source 1..21: mol_type = other DNA
gggggtgggtcaagccactgg

SEQ ID NO: 32247 - DNA, 21 bp, synthetic construct
  source 1..21: mol_type = other DNA
tacgcaaagtctaactttaac

SEQ ID NO: 32248 - DNA, 21 bp, synthetic construct
  source 1..21: mol_type = other DNA
tatgccagaggaggacacaac

SEQ ID NO: 32249 - DNA, 21 bp, synthetic construct
  source 1..21: mol_type = other DNA
ggcatcgtgtctgttagttgg

SEQ ID NO: 32250 - DNA, 21 bp, synthetic construct
  source 1..21: mol_type = other DNA
ttagctaagacgggtgccaat

SEQ ID NO: 32251 - DNA, 21 bp, synthetic construct
  source 1..21: mol_type = other DNA
cgggtcatagacgctttccct

SEQ ID NO: 32252 - DNA, 21 bp, synthetic construct
  source 1..21: mol_type = other DNA
tacgctcgtgggggtatcaac

SEQ ID NO: 32253 - DNA, 21 bp, synthetic construct
  source 1..21: mol_type = other DNA
tattctcgtcatggattcaat

SEQ ID NO: 32254 - DNA, 21 bp, synthetic construct
  source 1..21: mol_type = other DNA
tatttcagcggtatgccggat

SEQ ID NO: 32255 - DNA, 21 bp, synthetic construct
  source 1..21: mol_type = other DNA
ccagttgagagtaggacttgg

SEQ ID NO: 32256 - DNA, 21 bp, synthetic construct
  source 1..21: mol_type = other DNA
tactcccgtgtgagcgttaac

SEQ ID NO: 32257 - DNA, 21 bp, synthetic construct
  source 1..21: mol_type = other DNA
acatataccggtgatccagcg

SEQ ID NO: 32258 - DNA, 21 bp, synthetic construct
  source 1..21: mol_type = other DNA
tacgctaagaatggaacaaac

SEQ ID NO: 32259 - DNA, 21 bp, synthetic construct
  source 1..21: mol_type = other DNA
tggacggacggcacaaggtac

SEQ ID NO: 32260 - DNA, 21 bp, synthetic construct
  source 1..21: mol_type = other DNA
tattacacaggtgtaacgaaa

SEQ ID NO: 32261 - DNA, 21 bp, synthetic construct
  source 1..21: mol_type = other DNA
tgcaaaggcgtgccgtgttgt

SEQ ID NO: 32262 - DNA, 21 bp, synthetic construct
  source 1..21: mol_type = other DNA
tgtgacaggtcctgcaaagcg

SEQ ID NO: 32263 - DNA, 21 bp, synthetic construct
  source 1..21: mol_type = other DNA
acgcgatgcgtcggggaaatt

SEQ ID NO: 32264 - DNA, 21 bp, synthetic construct
  source 1..21: mol_type = other DNA
gtgatggaagccagagcgtgg

SEQ ID NO: 32265 - DNA, 21 bp, synthetic construct
  source 1..21: mol_type = other DNA
atcgtatcgaccaacggggtc

SEQ ID NO: 32266 - DNA, 21 bp, synthetic construct
  source 1..21: mol_type = other DNA
tgtaaaccggaggcgttcccc

SEQ ID NO: 32267 - DNA, 21 bp, synthetic construct
  source 1..21: mol_type = other DNA
acggatgattggagtacatgg

SEQ ID NO: 32268 - DNA, 21 bp, synthetic construct
  source 1..21: mol_type = other DNA
gatatgagagaccacagatgg

SEQ ID NO: 32269 - DNA, 21 bp, synthetic construct
  source 1..21: mol_type = other DNA
tggacggatggtaccaggtac

SEQ ID NO: 32270 - DNA, 21 bp, synthetic construct
  source 1..21: mol_type = other DNA
tatgtaagtaccaatggagtg

SEQ ID NO: 32271 - DNA, 21 bp, synthetic construct
  source 1..21: mol_type = other DNA
tactgggctggcaaaatggaa

SEQ ID NO: 32272 - DNA, 21 bp, synthetic construct
  source 1..21: mol_type = other DNA
agagagccaacagtgaggtgg

SEQ ID NO: 32273 - DNA, 21 bp, synthetic construct
  source 1..21: mol_type = other DNA
tatgctcgggggaaccacaat

SEQ ID NO: 32274 - DNA, 21 bp, synthetic construct
  source 1..21: mol_type = other DNA
aaagagaaaccagacaagagg

SEQ ID NO: 32275 - DNA, 21 bp, synthetic construct
  source 1..21: mol_type = other DNA
gacatgaggtcgaccaaatgg

SEQ ID NO: 32276 - DNA, 21 bp, synthetic construct
  source 1..21: mol_type = other DNA
tatcacgccaagagtacgaat

SEQ ID NO: 32277 - DNA, 21 bp, synthetic construct
  source 1..21: mol_type = other DNA
tacgcgaagggaaacttgaat

SEQ ID NO: 32278 - DNA, 21 bp, synthetic construct
  source 1..21: mol_type = other DNA
tactcgaggcaaaacccaaat

SEQ ID NO: 32279 - DNA, 21 bp, synthetic construct
  source 1..21: mol_type = other DNA
tattcgagaatggggctaaac

SEQ ID NO: 32280 - DNA, 21 bp, synthetic construct
  source 1..21: mol_type = other DNA
tacttcagcggcacagtattt

SEQ ID NO: 32281 - DNA, 21 bp, synthetic construct
  source 1..21: mol_type = other DNA
tatgctgctagcggacgaaac

SEQ ID NO: 32282 - DNA, 21 bp, synthetic construct
  source 1..21: mol_type = other DNA
tactggtcaaatgtcaaagac

SEQ ID NO: 32283 - DNA, 21 bp, synthetic construct
  source 1..21: mol_type = other DNA
actaggtggggggacccggcc

SEQ ID NO: 32284 - DNA, 21 bp, synthetic construct
  source 1..21: mol_type = other DNA
tacgttaggtcacaaccacag

SEQ ID NO: 32285 - DNA, 21 bp, synthetic construct
  source 1..21: mol_type = other DNA
gttgctacacatggggcaggc

SEQ ID NO: 32286 - DNA, 21 bp, synthetic construct
  source 1..21: mol_type = other DNA
tgcaagccccctcccatcgag

SEQ ID NO: 32287 - DNA, 21 bp, synthetic construct
  source 1..21: mol_type = other DNA
cgagacgattatctaagttgg

SEQ ID NO: 32288 - DNA, 21 bp, synthetic construct
  source 1..21: mol_type = other DNA
cccctcagactggatcccagg

SEQ ID NO: 32289 - DNA, 21 bp, synthetic construct
  source 1..21: mol_type = other DNA
tgccgtcccgattaccgcgag

SEQ ID NO: 32290 - DNA, 21 bp, synthetic construct
  source 1..21: mol_type = other DNA
gagaggaactcctgcatgcac

SEQ ID NO: 32291 - DNA, 21 bp, synthetic construct
  source 1..21: mol_type = other DNA
tacgcgagagcaggaataaac

SEQ ID NO: 32292 - DNA, 21 bp, synthetic construct
  source 1..21: mol_type = other DNA
attatgggggatagaatttgg

SEQ ID NO: 32293 - DNA, 21 bp, synthetic construct
  source 1..21: mol_type = other DNA
ttctggagtggaacggtcgct

SEQ ID NO: 32294 - DNA, 21 bp, synthetic construct
  source 1..21: mol_type = other DNA
tgtaacctgagtcctacatcg

SEQ ID NO: 32295 - DNA, 21 bp, synthetic construct
  source 1..21: mol_type = other DNA
tactacagtgggaaacatgag

SEQ ID NO: 32296 - DNA, 21 bp, synthetic construct
  source 1..21: mol_type = other DNA
ttctggtcaggcaaggtagac

SEQ ID NO: 32297 - DNA, 21 bp, synthetic construct
  source 1..21: mol_type = other DNA
tacttttcaggaactgtctac

SEQ ID NO: 32298 - DNA, 21 bp, synthetic construct
  source 1..21: mol_type = other DNA
acaaaaaactcgaccacgtgt

SEQ ID NO: 32299 - DNA, 21 bp, synthetic construct
  source 1..21: mol_type = other DNA
tgtaagcctggaatgggtgca

SEQ ID NO: 32300 - DNA, 21 bp, synthetic construct
  source 1..21: mol_type = other DNA
tgtacgagcaagacgggaagt

SEQ ID NO: 32301 - DNA, 21 bp, synthetic construct
  source 1..21: mol_type = other DNA
ttaagtaggactggggacaat

SEQ ID NO: 32302 - DNA, 21 bp, synthetic construct
  source 1..21: mol_type = other DNA
ttgtctagaatgaatgagaac

SEQ ID NO: 32303 - DNA, 21 bp, synthetic construct
  source 1..21: mol_type = other DNA
tacagcagagtaggaccggta

SEQ ID NO: 32304 - DNA, 21 bp, synthetic construct
  source 1..21: mol_type = other DNA
tgtaaacccagccccatgccc

SEQ ID NO: 32305 - DNA, 21 bp, synthetic construct
  source 1..21: mol_type = other DNA
tacagccgtacaaactacaat

SEQ ID NO: 32306 - DNA, 21 bp, synthetic construct
  source 1..21: mol_type = other DNA
aaggcgacacaacaagaatgt

SEQ ID NO: 32307 - DNA, 21 bp, synthetic construct
  source 1..21: mol_type = other DNA
tactataccggaattccgcat

SEQ ID NO: 32308 - DNA, 21 bp, synthetic construct
  source 1..21: mol_type = other DNA
tactggaccggcacggcaagt

SEQ ID NO: 32309 - DNA, 21 bp, synthetic construct
  source 1..21: mol_type = other DNA
attcaccgccttctgcccagt

SEQ ID NO: 32310 - DNA, 21 bp, synthetic construct
  source 1..21: mol_type = other DNA
tacagccgttccggtagcaac

SEQ ID NO: 32311 - DNA, 21 bp, synthetic construct
  source 1..21: mol_type = other DNA
aggatggacaatgtcttcccc

SEQ ID NO: 32312 - DNA, 21 bp, synthetic construct
  source 1..21: mol_type = other DNA
tactggagtgggacggtcaaa

SEQ ID NO: 32313 - DNA, 21 bp, synthetic construct
  source 1..21: mol_type = other DNA
tttttttcaggaacgcgagca

SEQ ID NO: 32314 - DNA, 21 bp, synthetic construct
  source 1..21: mol_type = other DNA
tgtagagataagatgccaggg

SEQ ID NO: 32315 - DNA, 21 bp, synthetic construct
  source 1..21: mol_type = other DNA
aacagcagcaccaacggcgta

SEQ ID NO: 32316 - DNA, 21 bp, synthetic construct
  source 1..21: mol_type = other DNA
tacttcacaggagtgactgtc

SEQ ID NO: 32317 - DNA, 21 bp, synthetic construct
  source 1..21: mol_type = other DNA
ttctttacaggcgtcgttagt

SEQ ID NO: 32318 - DNA, 21 bp, synthetic construct
  source 1..21: mol_type = other DNA
tacctccattcacagtcgtac

SEQ ID NO: 32319 - DNA, 21 bp, synthetic construct
  source 1..21: mol_type = other DNA
ttgctggcttcgcaaacgtgg

SEQ ID NO: 32320 - DNA, 21 bp, synthetic construct
  source 1..21: mol_type = other DNA
tattcgcgcttgaaccaaaac

SEQ ID NO: 32321 - DNA, 21 bp, synthetic construct
  source 1..21: mol_type = other DNA
tactccagaatgggaaataac

SEQ ID NO: 32322 - DNA, 21 bp, synthetic construct
  source 1..21: mol_type = other DNA
tattggtcaggtcagatcgat

SEQ ID NO: 32323 - DNA, 21 bp, synthetic construct
  source 1..21: mol_type = other DNA
atactgagttcttcaggttgg

SEQ ID NO: 32324 - DNA, 21 bp, synthetic construct
  source 1..21: mol_type = other DNA
ctcagcagggcgtcttttgac

SEQ ID NO: 32325 - DNA, 21 bp, synthetic construct
  source 1..21: mol_type = other DNA
gcgctctccgacaggtcctgg

SEQ ID NO: 32326 - DNA, 21 bp, synthetic construct
  source 1..21: mol_type = other DNA
tgtgtcgacaagagacatccg

SEQ ID NO: 32327 - DNA, 21 bp, synthetic construct
  source 1..21: mol_type = other DNA
tggtggagtgcagtaccggaa

SEQ ID NO: 32328 - DNA, 21 bp, synthetic construct
  source 1..21: mol_type = other DNA
cgcgacgcagttagtcgttgg

SEQ ID NO: 32329 - DNA, 21 bp, synthetic construct
  source 1..21: mol_type = other DNA
agcatgcccgaccggagttgg

SEQ ID NO: 32330 - DNA, 21 bp, synthetic construct
  source 1..21: mol_type = other DNA
tatttcacgggagtgcagact

SEQ ID NO: 32331 - DNA, 21 bp, synthetic construct
  source 1..21: mol_type = other DNA
tattccagaacgaacgtaaac

SEQ ID NO: 32332 - DNA, 21 bp, synthetic construct
  source 1..21: mol_type = other DNA
aaagacgaattcactatctat

SEQ ID NO: 32333 - DNA, 21 bp, synthetic construct
  source 1..21: mol_type = other DNA
tgcgccaccaaatgcaaaccc

SEQ ID NO: 32334 - DNA, 21 bp, synthetic construct
  source 1..21: mol_type = other DNA
ggaaataagcattgtatggat

SEQ ID NO: 32335 - DNA, 21 bp, synthetic construct
  source 1..21: mol_type = other DNA
tacttttcagccgtacgcgag

SEQ ID NO: 32336 - DNA, 21 bp, synthetic construct
  source 1..21: mol_type = other DNA
tacagcaggcagaacaataac

SEQ ID NO: 32337 - DNA, 21 bp, synthetic construct
  source 1..21: mol_type = other DNA
tatagtaggcagggaaccaac

SEQ ID NO: 32338 - DNA, 21 bp, synthetic construct
  source 1..21: mol_type = other DNA
tggcccaacggcgtcgatggt

SEQ ID NO: 32339 - DNA, 21 bp, synthetic construct
  source 1..21: mol_type = other DNA
tgcaagcctgtgcacccagag

SEQ ID NO: 32340 - DNA, 21 bp, synthetic construct
  source 1..21: mol_type = other DNA
tggttttctgggatacaagaa

SEQ ID NO: 32341 - DNA, 21 bp, synthetic construct
  source 1..21: mol_type = other DNA
tacgcgaggatgggcttcaac

SEQ ID NO: 32342 - DNA, 21 bp, synthetic construct
  source 1..21: mol_type = other DNA
tatttcaccggaacggcaaag

SEQ ID NO: 32343 - DNA, 21 bp, synthetic construct
  source 1..21: mol_type = other DNA
tattctagggcgaactttaat

SEQ ID NO: 32344 - DNA, 21 bp, synthetic construct
  source 1..21: mol_type = other DNA
ttttggacgggcaaagttgaa

SEQ ID NO: 32345 - DNA, 21 bp, synthetic construct
  source 1..21: mol_type = other DNA
ttgagaaatggaactccggca

SEQ ID NO: 32346 - DNA, 21 bp, synthetic construct
  source 1..21: mol_type = other DNA
tacagtcgtatccatcccaac

SEQ ID NO: 32347 - DNA, 21 bp, synthetic construct
  source 1..21: mol_type = other DNA
tatttcaccgcgaagattgaa

SEQ ID NO: 32348 - DNA, 21 bp, synthetic construct
  source 1..21: mol_type = other DNA
ggacccccgagatgccctgct

SEQ ID NO: 32349 - DNA, 21 bp, synthetic construct
  source 1..21: mol_type = other DNA
cgtctccctacaacgccatgc

SEQ ID NO: 32350 - DNA, 21 bp, synthetic construct
  source 1..21: mol_type = other DNA
tactctcgagcgggggacggc

SEQ ID NO: 32351 - DNA, 21 bp, synthetic construct
  source 1..21: mol_type = other DNA
ggcatggctgaccgcgcatgg

SEQ ID NO: 32352 - DNA, 21 bp, synthetic construct
  source 1..21: mol_type = other DNA
tgcatgtcagacagtaaggca

SEQ ID NO: 32353 - DNA, 21 bp, synthetic construct
  source 1..21: mol_type = other DNA
ttatcacgcgcaagcttcgat

SEQ ID NO: 32354 - DNA, 21 bp, synthetic construct
  source 1..21: mol_type = other DNA
tatgccaaagccaactgcaac

SEQ ID NO: 32355 - DNA, 21 bp, synthetic construct
  source 1..21: mol_type = other DNA
tatcatcgacagaatccaatg

SEQ ID NO: 32356 - DNA, 21 bp, synthetic construct
  source 1..21: mol_type = other DNA
tacgcaagagctgggcataac

SEQ ID NO: 32357 - DNA, 21 bp, synthetic construct
  source 1..21: mol_type = other DNA
tgtaaaccaatgacgcacgag

SEQ ID NO: 32358 - DNA, 21 bp, synthetic construct
  source 1..21: mol_type = other DNA
agtctctcttccagggattgg

SEQ ID NO: 32359 - DNA, 21 bp, synthetic construct
  source 1..21: mol_type = other DNA
tgtgccccttatttgcaggaa

SEQ ID NO: 32360 - DNA, 21 bp, synthetic construct
  source 1..21: mol_type = other DNA
tgtacttctaagacgggctac

SEQ ID NO: 32361 - DNA, 21 bp, synthetic construct
  source 1..21: mol_type = other DNA
taccaccgtttaggttccacg

SEQ ID NO: 32362 - DNA, 21 bp, synthetic construct
  source 1..21: mol_type = other DNA
tgcatgccaaaaaaagaagcg

SEQ ID NO: 32363 - DNA, 21 bp, synthetic construct
  source 1..21: mol_type = other DNA
aaagacgactataatgtttac

SEQ ID NO: 32364 - DNA, 21 bp, synthetic construct
  source 1..21: mol_type = other DNA
ttctggtccggcgtcagcgag

SEQ ID NO: 32365 - DNA, 21 bp, synthetic construct
  source 1..21: mol_type = other DNA
tattgggatggcacccctgcc

SEQ ID NO: 32366 - DNA, 21 bp, synthetic construct
  source 1..21: mol_type = other DNA
tgcaagccttctccgatgccg

SEQ ID NO: 32367 - DNA, 21 bp, synthetic construct
  source 1..21: mol_type = other DNA
tgcaaacccgacgctgtgcgg

SEQ ID NO: 32368 - DNA, 21 bp, synthetic construct
  source 1..21: mol_type = other DNA
tacgttagaagcaaccccctt

SEQ ID NO: 32369 - DNA, 21 bp, synthetic construct
  source 1..21: mol_type = other DNA
cgtgacgatcatgtttactgg

SEQ ID NO: 32370 - DNA, 21 bp, synthetic construct
  source 1..21: mol_type = other DNA
tgctcatcgaaaaccggacat

SEQ ID NO: 32371 - DNA, 21 bp, synthetic construct
  source 1..21: mol_type = other DNA
tacttcgagggccaaagggag

SEQ ID NO: 32372 - DNA, 21 bp, synthetic construct
  source 1..21: mol_type = other DNA
tatgcgcggatgggagcaaac

SEQ ID NO: 32373 - DNA, 21 bp, synthetic construct
  source 1..21: mol_type = other DNA
tgtagagaagggagaagctcg

SEQ ID NO: 32374 - DNA, 21 bp, synthetic construct
  source 1..21: mol_type = other DNA
tattttgctggtgtgactgca

SEQ ID NO: 32375 - DNA, 21 bp, synthetic construct
  source 1..21: mol_type = other DNA
tacagtaggatgaatagcaat

SEQ ID NO: 32376 - DNA, 21 bp, synthetic construct
  source 1..21: mol_type = other DNA
tgcacgagcaaagcagggcac

SEQ ID NO: 32377 - DNA, 21 bp, synthetic construct
  source 1..21: mol_type = other DNA
gtggaggcctcgcggtcctgg

SEQ ID NO: 32378 - DNA, 21 bp, synthetic construct
  source 1..21: mol_type = other DNA
tgtccaaagccgatgaccgcg

SEQ ID NO: 32379 - DNA, 21 bp, synthetic construct
  source 1..21: mol_type = other DNA
cgtaacgaatttagcggatac

SEQ ID NO: 32380 - DNA, 21 bp, synthetic construct
  source 1..21: mol_type = other DNA
gacatggaatccgctgtatgg

SEQ ID NO: 32381 - DNA, 21 bp, synthetic construct
  source 1..21: mol_type = other DNA
tactatacaggacgcacgaat

SEQ ID NO: 32382 - DNA, 21 bp, synthetic construct
  source 1..21: mol_type = other DNA
tattggacgggcctcaaggat

SEQ ID NO: 32383 - DNA, 21 bp, synthetic construct
  source 1..21: mol_type = other DNA
cttcacaggtcaggcattgat

SEQ ID NO: 32384 - DNA, 21 bp, synthetic construct
  source 1..21: mol_type = other DNA
tactcgaaaaacggcgcaaac

SEQ ID NO: 32385 - DNA, 21 bp, synthetic construct
  source 1..21: mol_type = other DNA
atgaccggcacaagttgcgtg

SEQ ID NO: 32386 - DNA, 21 bp, synthetic construct
  source 1..21: mol_type = other DNA
tactttagcgggagatctgat

SEQ ID NO: 32387 - DNA, 21 bp, synthetic construct
  source 1..21: mol_type = other DNA
gtcgcaaagtgcggagctggc

SEQ ID NO: 32388 - DNA, 21 bp, synthetic construct
  source 1..21: mol_type = other DNA
cgggacgagcggtcttgtggc

SEQ ID NO: 32389 - DNA, 21 bp, synthetic construct
  source 1..21: mol_type = other DNA
tatgcacgtcaagggcacaac

SEQ ID NO: 32390 - DNA, 21 bp, synthetic construct
  source 1..21: mol_type = other DNA
cttgcgcgcagttgccctgat

SEQ ID NO: 32391 - DNA, 21 bp, synthetic construct
  source 1..21: mol_type = other DNA
gaggataagtgtaggcaattt

SEQ ID NO: 32392 - DNA, 21 bp, synthetic construct
  source 1..21: mol_type = other DNA
ggatcagaatttaaagtattt

SEQ ID NO: 32393 - DNA, 21 bp, synthetic construct
  source 1..21: mol_type = other DNA
tgcgcgcctttttatagagaa

SEQ ID NO: 32394 - DNA, 21 bp, synthetic construct
  source 1..21: mol_type = other DNA
tggccctccggatctgcgggt

SEQ ID NO: 32395 - DNA, 21 bp, synthetic construct
  source 1..21: mol_type = other DNA
tactggtccggaatgagagaa

SEQ ID NO: 32396 - DNA, 21 bp, synthetic construct
  source 1..21: mol_type = other DNA
aggtcggagttcgcgaccttt

SEQ ID NO: 32397 - DNA, 21 bp, synthetic construct
  source 1..21: mol_type = other DNA
tgtaaacccagcccttatcca

SEQ ID NO: 32398 - DNA, 21 bp, synthetic construct
  source 1..21: mol_type = other DNA
gggctcccgacaaggtgcccg

SEQ ID NO: 32399 - DNA, 21 bp, synthetic construct
  source 1..21: mol_type = other DNA
ggagggggtacgagctcatgg

SEQ ID NO: 32400 - DNA, 21 bp, synthetic construct
  source 1..21: mol_type = other DNA
tggtcccgcgttggtgtaaac

SEQ ID NO: 32401 - DNA, 21 bp, synthetic construct
  source 1..21: mol_type = other DNA
gacccgggtgatcgcaaatgg

SEQ ID NO: 32402 - DNA, 21 bp, synthetic construct
  source 1..21: mol_type = other DNA
atcatgggcgaccgcatatgg

SEQ ID NO: 32403 - DNA, 21 bp, synthetic construct
  source 1..21: mol_type = other DNA
aatgatgggagctgtaaggct

SEQ ID NO: 32404 - DNA, 21 bp, synthetic construct
  source 1..21: mol_type = other DNA
cgtacgtacgaaacatatcct

SEQ ID NO: 32405 - DNA, 21 bp, synthetic construct
  source 1..21: mol_type = other DNA
agggacgggaacagcatctgg

SEQ ID NO: 32406 - DNA, 21 bp, synthetic construct
  source 1..21: mol_type = other DNA
aaatccgatcatgtcaggtgg

SEQ ID NO: 32407 - DNA, 21 bp, synthetic construct
  source 1..21: mol_type = other DNA
aaggacgggtcgtgcaaggcc

SEQ ID NO: 32408 - DNA, 21 bp, synthetic construct
  source 1..21: mol_type = other DNA
tgtaataagccaatgacaaat

SEQ ID NO: 32409 - DNA, 21 bp, synthetic construct
  source 1..21: mol_type = other DNA
tattcccggataggcccgata

SEQ ID NO: 32410 - DNA, 21 bp, synthetic construct
  source 1..21: mol_type = other DNA
aaagatgactttgtgtatttt

SEQ ID NO: 32411 - DNA, 21 bp, synthetic construct
  source 1..21: mol_type = other DNA
aggtctgagtttacaggattc

SEQ ID NO: 32412 - DNA, 21 bp, synthetic construct
  source 1..21: mol_type = other DNA
tacagccgtaacggattaaat

SEQ ID NO: 32413 - DNA, 21 bp, synthetic construct
  source 1..21: mol_type = other DNA
tactggacaggcatgcacgaa

SEQ ID NO: 32414 - DNA, 21 bp, synthetic construct
  source 1..21: mol_type = other DNA
atagtgagcaccaatggagtt

SEQ ID NO: 32415 - DNA, 21 bp, synthetic construct
  source 1..21: mol_type = other DNA
aggacttatgagacctacccc

SEQ ID NO: 32416 - DNA, 21 bp, synthetic construct
  source 1..21: mol_type = other DNA
tatgtcaagagcgataaagtg

SEQ ID NO: 32417 - DNA, 21 bp, synthetic construct
  source 1..21: mol_type = other DNA
ttaagcgctctctccgtgaat

SEQ ID NO: 32418 - DNA, 21 bp, synthetic construct
  source 1..21: mol_type = other DNA
tttgcgagatcgggttttaac

SEQ ID NO: 32419 - DNA, 21 bp, synthetic construct
  source 1..21: mol_type = other DNA
tgtacatcgaaaactcagcat

SEQ ID NO: 32420 - DNA, 21 bp, synthetic construct
  source 1..21: mol_type = other DNA
tactggagtggcagaactgaa

SEQ ID NO: 32421 - DNA, 21 bp, synthetic construct
  source 1..21: mol_type = other DNA
tctatgcctgaccgctcgtgg

SEQ ID NO: 32422 - DNA, 21 bp, synthetic construct
  source 1..21: mol_type = other DNA
tattggcacggagtcacagag

SEQ ID NO: 32423 - DNA, 21 bp, synthetic construct
  source 1..21: mol_type = other DNA
tgtaagattgcgtcagtgccg

SEQ ID NO: 32424 - DNA, 21 bp, synthetic construct
  source 1..21: mol_type = other DNA
aggaatggaacctcttcgtgg

SEQ ID NO: 32425 - DNA, 21 bp, synthetic construct
  source 1..21: mol_type = other DNA
tacctcaagtcgcagttctac

SEQ ID NO: 32426 - DNA, 21 bp, synthetic construct
  source 1..21: mol_type = other DNA
tgcaaacctggaaatgcggct

SEQ ID NO: 32427 - DNA, 21 bp, synthetic construct
  source 1..21: mol_type = other DNA
agtttagcagatcgcggatgg

SEQ ID NO: 32428 - DNA, 21 bp, synthetic construct
  source 1..21: mol_type = other DNA
caagacggaacctcttattgg

SEQ ID NO: 32429 - DNA, 21 bp, synthetic construct
  source 1..21: mol_type = other DNA
tttagtcgagccggcatgaac

SEQ ID NO: 32430 - DNA, 21 bp, synthetic construct
  source 1..21: mol_type = other DNA
cacacgatcgactctttccct

SEQ ID NO: 32431 - DNA, 21 bp, synthetic construct
  source 1..21: mol_type = other DNA
attaagagcggagagggttgt

SEQ ID NO: 32432 - DNA, 21 bp, synthetic construct
  source 1..21: mol_type = other DNA
agaaacgactataactatccc

SEQ ID NO: 32433 - DNA, 21 bp, synthetic construct
  source 1..21: mol_type = other DNA
agagagcaggaggtgcgctgg

SEQ ID NO: 32434 - DNA, 21 bp, synthetic construct
  source 1..21: mol_type = other DNA
ttcgctcgcacaggaatcaat

SEQ ID NO: 32435 - DNA, 21 bp, synthetic construct
  source 1..21: mol_type = other DNA
tacgaaccgggctgcaaatca

SEQ ID NO: 32436 - DNA, 21 bp, synthetic construct
  source 1..21: mol_type = other DNA
gattacgcctatagcaaagaa

SEQ ID NO: 32437 - DNA, 21 bp, synthetic construct
  source 1..21: mol_type = other DNA
tattcgcgagtcaaccataac

SEQ ID NO: 32438 - DNA, 21 bp, synthetic construct
  source 1..21: mol_type = other DNA
tgcaacaagccaatgatggcg

SEQ ID NO: 32439 - DNA, 21 bp, synthetic construct
  source 1..21: mol_type = other DNA
tacgtcagatcaggtccgccc

SEQ ID NO: 32440 - DNA, 21 bp, synthetic construct
  source 1..21: mol_type = other DNA
ctcgccaaggcaggttttaat

SEQ ID NO: 32441 - DNA, 21 bp, synthetic construct
  source 1..21: mol_type = other DNA
tatttccagggaaagatagcc

SEQ ID NO: 32442 - DNA, 21 bp, synthetic construct
  source 1..21: mol_type = other DNA
tgcaataatagcggctatagc

SEQ ID NO: 32443 - DNA, 21 bp, synthetic construct
  source 1..21: mol_type = other DNA
tactggagtgggacggcggct

SEQ ID NO: 32444 - DNA, 21 bp, synthetic construct
  source 1..21: mol_type = other DNA
tatagccgagcgaacaacaat

SEQ ID NO: 32445 - DNA, 21 bp, synthetic construct
  source 1..21: mol_type = other DNA
aacagcccggcatgcaaggcc

SEQ ID NO: 32446 - DNA, 21 bp, synthetic construct
  source 1..21: mol_type = other DNA
tatactagtactaacgggata

SEQ ID NO: 32447 - DNA, 21 bp, synthetic construct
  source 1..21: mol_type = other DNA
tacggggtgggcacctggtca

SEQ ID NO: 32448 - DNA, 21 bp, synthetic construct
  source 1..21: mol_type = other DNA
caagacgggtattcgagttgg

SEQ ID NO: 32449 - DNA, 21 bp, synthetic construct
  source 1..21: mol_type = other DNA
tatagtaaggtgaattttaac

SEQ ID NO: 32450 - DNA, 21 bp, synthetic construct
  source 1..21: mol_type = other DNA
tataccaaattggatccacat

SEQ ID NO: 32451 - DNA, 21 bp, synthetic construct
  source 1..21: mol_type = other DNA
ggtgcagatggagtgagatgg

SEQ ID NO: 32452 - DNA, 21 bp, synthetic construct
  source 1..21: mol_type = other DNA
acatactccactaatggcatc

SEQ ID NO: 32453 - DNA, 21 bp, synthetic construct
  source 1..21: mol_type = other DNA
tattttagtaagcaaatagca

SEQ ID NO: 32454 - DNA, 21 bp, synthetic construct
  source 1..21: mol_type = other DNA
ctccggaacgggaccccagcg

SEQ ID NO: 32455 - DNA, 21 bp, synthetic construct
  source 1..21: mol_type = other DNA
tatacgagactggacgtactc

SEQ ID NO: 32456 - DNA, 21 bp, synthetic construct
  source 1..21: mol_type = other DNA
tactcaaggcaaggtgcaaac

SEQ ID NO: 32457 - DNA, 21 bp, synthetic construct
  source 1..21: mol_type = other DNA
tatagcaagcagggacaaaat

SEQ ID NO: 32458 - DNA, 21 bp, synthetic construct
  source 1..21: mol_type = other DNA
tacgctcgcctgtccccgttg

SEQ ID NO: 32459 - DNA, 21 bp, synthetic construct
  source 1..21: mol_type = other DNA
aggaacggcaccagcagctgg

SEQ ID NO: 32460 - DNA, 21 bp, synthetic construct
  source 1..21: mol_type = other DNA
tatctgaagagccaaagtatc

SEQ ID NO: 32461 - DNA, 21 bp, synthetic construct
  source 1..21: mol_type = other DNA
ggtagtgagtttaaatcatgg

SEQ ID NO: 32462 - DNA, 21 bp, synthetic construct
  source 1..21: mol_type = other DNA
tactactctggacgcttggaa

SEQ ID NO: 32463 - DNA, 21 bp, synthetic construct
  source 1..21: mol_type = other DNA
ggatgtggaacaaaagatggg

SEQ ID NO: 32464 - DNA, 21 bp, synthetic construct
  source 1..21: mol_type = other DNA
ggcaaaacaggacctgattgt

SEQ ID NO: 32465 - DNA, 21 bp, synthetic construct
  source 1..21: mol_type = other DNA
aaggacggggtatcgtcatgg

SEQ ID NO: 32466 - DNA, 21 bp, synthetic construct
  source 1..21: mol_type = other DNA
tacagccgaaccggaaataat

SEQ ID NO: 32467 - DNA, 21 bp, synthetic construct
  source 1..21: mol_type = other DNA
tattacacgggtgtgttggaa

SEQ ID NO: 32468 - DNA, 21 bp, synthetic construct
  source 1..21: mol_type = other DNA
aagtcggaccacgtgcgatgg

SEQ ID NO: 32469 - DNA, 21 bp, synthetic construct
  source 1..21: mol_type = other DNA
cgcacgccagacagctattgt

SEQ ID NO: 32470 - DNA, 21 bp, synthetic construct
  source 1..21: mol_type = other DNA
tacttctctaggcagatcgat

SEQ ID NO: 32471 - DNA, 21 bp, synthetic construct
  source 1..21: mol_type = other DNA
ccggtagaatcacgaacctgg

SEQ ID NO: 32472 - DNA, 21 bp, synthetic construct
  source 1..21: mol_type = other DNA
tatgaaagtacaaatgggatc

SEQ ID NO: 32473 - DNA, 21 bp, synthetic construct
  source 1..21: mol_type = other DNA
aaagatggattaagtcgctgg

SEQ ID NO: 32474 - DNA, 21 bp, synthetic construct
  source 1..21: mol_type = other DNA
aagtctgatgagtgtaagcct

SEQ ID NO: 32475 - DNA, 21 bp, synthetic construct
  source 1..21: mol_type = other DNA
atgacaaagacgtcatgcctt

SEQ ID NO: 32476 - DNA, 21 bp, synthetic construct
  source 1..21: mol_type = other DNA
tgtaaggcagatagtaggatt

SEQ ID NO: 32477 - DNA, 21 bp, synthetic construct
  source 1..21: mol_type = other DNA
tatttctctggtctacgtgct

SEQ ID NO: 32478 - DNA, 21 bp, synthetic construct
  source 1..21: mol_type = other DNA
tattctaggataaatacgaac

SEQ ID NO: 32479 - DNA, 21 bp, synthetic construct
  source 1..21: mol_type = other DNA
ttaagtaagatgggaccgaat

SEQ ID NO: 32480 - DNA, 21 bp, synthetic construct
  source 1..21: mol_type = other DNA
tgctggaaaccaatgacggct

SEQ ID NO: 32481 - DNA, 21 bp, synthetic construct
  source 1..21: mol_type = other DNA
tatagcaaatttaactacaat

SEQ ID NO: 32482 - DNA, 21 bp, synthetic construct
  source 1..21: mol_type = other DNA
gccatgggtgaccgtggatgg

SEQ ID NO: 32483 - DNA, 21 bp, synthetic construct
  source 1..21: mol_type = other DNA
atagagtcatataatggtaga

SEQ ID NO: 32484 - DNA, 21 bp, synthetic construct
  source 1..21: mol_type = other DNA
tattacacgggaaggacgaac

SEQ ID NO: 32485 - DNA, 21 bp, synthetic construct
  source 1..21: mol_type = other DNA
tacgtgaaaacagacatgtac

SEQ ID NO: 32486 - DNA, 21 bp, synthetic construct
  source 1..21: mol_type = other DNA
tacaaagccactgaaccttgt

SEQ ID NO: 32487 - DNA, 21 bp, synthetic construct
  source 1..21: mol_type = other DNA
tcgatgcaggaccgaagttgg

SEQ ID NO: 32488 - DNA, 21 bp, synthetic construct
  source 1..21: mol_type = other DNA
gacagtgcttctcgggcttgg

SEQ ID NO: 32489 - DNA, 21 bp, synthetic construct
  source 1..21: mol_type = other DNA
tacgccagaacaaattttaat

SEQ ID NO: 32490 - DNA, 21 bp, synthetic construct
  source 1..21: mol_type = other DNA
ggtggagagtttcggcactgg

SEQ ID NO: 32491 - DNA, 21 bp, synthetic construct
  source 1..21: mol_type = other DNA
attaaggggagttgcgagcag

SEQ ID NO: 32492 - DNA, 21 bp, synthetic construct
  source 1..21: mol_type = other DNA
tacttcacccacaagctagat

SEQ ID NO: 32493 - DNA, 21 bp, synthetic construct
  source 1..21: mol_type = other DNA
ttacaccgactccatcctgat

SEQ ID NO: 32494 - DNA, 21 bp, synthetic construct
  source 1..21: mol_type = other DNA
agggagggtaattcattatgg

SEQ ID NO: 32495 - DNA, 21 bp, synthetic construct
  source 1..21: mol_type = other DNA
tgcaagagtcaatcctcgcag

SEQ ID NO: 32496 - DNA, 21 bp, synthetic construct
  source 1..21: mol_type = other DNA
tgtaaagtaaagagcggagaa

SEQ ID NO: 32497 - DNA, 21 bp, synthetic construct
  source 1..21: mol_type = other DNA
tacgtaaagtcccagctagta

SEQ ID NO: 32498 - DNA, 21 bp, synthetic construct
  source 1..21: mol_type = other DNA
tggcagtccacaaatggtatg

SEQ ID NO: 32499 - DNA, 21 bp, synthetic construct
  source 1..21: mol_type = other DNA
tttggagagttcaagtgtgag

SEQ ID NO: 32500 - DNA, 21 bp, synthetic construct
  source 1..21: mol_type = other DNA
tattccagagccggatacaat

SEQ ID NO: 32501 - DNA, 21 bp, synthetic construct
  source 1..21: mol_type = other DNA
ttctctcgtacggggatgaat

SEQ ID NO: 32502 - DNA, 21 bp, synthetic construct
  source 1..21: mol_type = other DNA
tacacacgtttggacaacatg

SEQ ID NO: 32503 - DNA, 21 bp, synthetic construct
  source 1..21: mol_type = other DNA
atggacggtgtctgcaaagga

SEQ ID NO: 32504 - DNA, 21 bp, synthetic construct
  source 1..21: mol_type = other DNA
cttttgagctccgccgattgg

SEQ ID NO: 32505 - DNA, 21 bp, synthetic construct
  source 1..21: mol_type = other DNA
tgcaaagctgtgtcgcacgat

SEQ ID NO: 32506 - DNA, 21 bp, synthetic construct
  source 1..21: mol_type = other DNA
ctctcgaggctgggtccaatc

SEQ ID NO: 32507 - DNA, 21 bp, synthetic construct
  source 1..21: mol_type = other DNA
tttattaagcacgatacaaaa

SEQ ID NO: 32508 - DNA, 21 bp, synthetic construct
  source 1..21: mol_type = other DNA
taccacgcgaagtctacaaat

SEQ ID NO: 32509 - DNA, 21 bp, synthetic construct
  source 1..21: mol_type = other DNA
tgcgactctaagacaggacat

SEQ ID NO: 32510 - DNA, 21 bp, synthetic construct
  source 1..21: mol_type = other DNA
tattatagcggcgttattgaa

SEQ ID NO: 32511 - DNA, 21 bp, synthetic construct
  source 1..21: mol_type = other DNA
tacgctagaggcggtacgaac

SEQ ID NO: 32512 - DNA, 21 bp, synthetic construct
  source 1..21: mol_type = other DNA
tgcgggaaaagggatgcagat

SEQ ID NO: 32513 - DNA, 21 bp, synthetic construct
  source 1..21: mol_type = other DNA
tattttagccgacaaattgac

SEQ ID NO: 32514 - DNA, 21 bp, synthetic construct
  source 1..21: mol_type = other DNA
tgcaaaccccccatggcaccg

SEQ ID NO: 32515 - DNA, 21 bp, synthetic construct
  source 1..21: mol_type = other DNA
ttggcgcgcggagggtatgat

SEQ ID NO: 32516 - DNA, 21 bp, synthetic construct
  source 1..21: mol_type = other DNA
ggaagtcccggtagtgcgtgg

SEQ ID NO: 32517 - DNA, 21 bp, synthetic construct
  source 1..21: mol_type = other DNA
tgcaagcctgcgccaggtgag

SEQ ID NO: 32518 - DNA, 21 bp, synthetic construct
  source 1..21: mol_type = other DNA
tcgtacgccttttccagggag

SEQ ID NO: 32519 - DNA, 21 bp, synthetic construct
  source 1..21: mol_type = other DNA
tggtggtcgggagttggggcg

SEQ ID NO: 32520 - DNA, 21 bp, synthetic construct
  source 1..21: mol_type = other DNA
tttgcacgttcagggtacaat

SEQ ID NO: 32521 - DNA, 21 bp, synthetic construct
  source 1..21: mol_type = other DNA
tattcgcgccaaggtcagaat

SEQ ID NO: 32522 - DNA, 21 bp, synthetic construct
  source 1..21: mol_type = other DNA
tgcaaatttcccacaaaggag

SEQ ID NO: 32523 - DNA, 21 bp, synthetic construct
  source 1..21: mol_type = other DNA
tggacgccagcctgcaaagcg

SEQ ID NO: 32524 - DNA, 21 bp, synthetic construct
  source 1..21: mol_type = other DNA
aaagatggcgtcagcagctgg

SEQ ID NO: 32525 - DNA, 21 bp, synthetic construct
  source 1..21: mol_type = other DNA
ctcccgcgaacaggtaactgg

SEQ ID NO: 32526 - DNA, 21 bp, synthetic construct
  source 1..21: mol_type = other DNA
tatcaaaaggagcaacagtgt

SEQ ID NO: 32527 - DNA, 21 bp, synthetic construct
  source 1..21: mol_type = other DNA
cgaagcatagatgccttccct

SEQ ID NO: 32528 - DNA, 21 bp, synthetic construct
  source 1..21: mol_type = other DNA
tatgccaggggtggcagcaat

SEQ ID NO: 32529 - DNA, 21 bp, synthetic construct
  source 1..21: mol_type = other DNA
tgtaagccgccgatgccgccc

SEQ ID NO: 32530 - DNA, 21 bp, synthetic construct
  source 1..21: mol_type = other DNA
acctggaaggggccgccttgt

SEQ ID NO: 32531 - DNA, 21 bp, synthetic construct
  source 1..21: mol_type = other DNA
ggctgcaggaagggggacata

SEQ ID NO: 32532 - DNA, 21 bp, synthetic construct
  source 1..21: mol_type = other DNA
tattttagcgggttacgtgac

SEQ ID NO: 32533 - DNA, 21 bp, synthetic construct
  source 1..21: mol_type = other DNA
tatttccacggacaattggcc

SEQ ID NO: 32534 - DNA, 21 bp, synthetic construct
  source 1..21: mol_type = other DNA
tatcataggctttcaaataac

SEQ ID NO: 32535 - DNA, 21 bp, synthetic construct
  source 1..21: mol_type = other DNA
ctcagccggccgtgctcagag

SEQ ID NO: 32536 - DNA, 21 bp, synthetic construct
  source 1..21: mol_type = other DNA
gtcctgcagtcgtccagctgg

SEQ ID NO: 32537 - DNA, 21 bp, synthetic construct
  source 1..21: mol_type = other DNA
tgttcaaaggagacgatgagt

SEQ ID NO: 32538 - DNA, 21 bp, synthetic construct
  source 1..21: mol_type = other DNA
tatagtcggggcaatccaaat

SEQ ID NO: 32539 - DNA, 21 bp, synthetic construct
  source 1..21: mol_type = other DNA
tactggagccagattaaggat

SEQ ID NO: 32540 - DNA, 21 bp, synthetic construct
  source 1..21: mol_type = other DNA
ttatgtaagccatgtgggact

SEQ ID NO: 32541 - DNA, 21 bp, synthetic construct
  source 1..21: mol_type = other DNA
tatttcacagctattatcgag

SEQ ID NO: 32542 - DNA, 21 bp, synthetic construct
  source 1..21: mol_type = other DNA
tatgcaaggttgaatccaaac

SEQ ID NO: 32543 - DNA, 21 bp, synthetic construct
  source 1..21: mol_type = other DNA
tacgtaaggtcaggtaccaat

SEQ ID NO: 32544 - DNA, 21 bp, synthetic construct
  source 1..21: mol_type = other DNA
tactctaggatcaatcacaat

SEQ ID NO: 32545 - DNA, 21 bp, synthetic construct
  source 1..21: mol_type = other DNA
tacttcagcgggcttcacgca

SEQ ID NO: 32546 - DNA, 21 bp, synthetic construct
  source 1..21: mol_type = other DNA
ttcaaaagtacgaatggggtt

SEQ ID NO: 32547 - DNA, 21 bp, synthetic construct
  source 1..21: mol_type = other DNA
tatgcgaagctcggatataat

SEQ ID NO: 32548 - DNA, 21 bp, synthetic construct
  source 1..21: mol_type = other DNA
tacttctcaggtgtcaccgga

SEQ ID NO: 32549 - DNA, 21 bp, synthetic construct
  source 1..21: mol_type = other DNA
tatttcacaggcgtgcatcca

SEQ ID NO: 32550 - DNA, 21 bp, synthetic construct
  source 1..21: mol_type = other DNA
tattgggcaggaaagatggag

SEQ ID NO: 32551 - DNA, 21 bp, synthetic construct
  source 1..21: mol_type = other DNA
tattcgaggatctcgagtaat

SEQ ID NO: 32552 - DNA, 21 bp, synthetic construct
  source 1..21: mol_type = other DNA
tactaccacggaatacaagca

SEQ ID NO: 32553 - DNA, 21 bp, synthetic construct
  source 1..21: mol_type = other DNA
tgcttaggtaagtgtcaggga

SEQ ID NO: 32554 - DNA, 21 bp, synthetic construct
  source 1..21: mol_type = other DNA
acttacactggcgacccggcc

SEQ ID NO: 32555 - DNA, 21 bp, synthetic construct
  source 1..21: mol_type = other DNA
tacagtcgtcagggactgaac

SEQ ID NO: 32556 - DNA, 21 bp, synthetic construct
  source 1..21: mol_type = other DNA
ctcagtaaagcagccacaaat

SEQ ID NO: 32557 - DNA, 21 bp, synthetic construct
  source 1..21: mol_type = other DNA
ctcgcgaaaaacgggcacaat

SEQ ID NO: 32558 - DNA, 21 bp, synthetic construct
  source 1..21: mol_type = other DNA
ctcaccagactgcacgccgta

SEQ ID NO: 32559 - DNA, 21 bp, synthetic construct
  source 1..21: mol_type = other DNA
tactcaaggatggggaccaat

SEQ ID NO: 32560 - DNA, 21 bp, synthetic construct
  source 1..21: mol_type = other DNA
ctcagtcgcgcaggacgtgac

SEQ ID NO: 32561 - DNA, 21 bp, synthetic construct
  source 1..21: mol_type = other DNA
ggcggaccggggtcggcttgg

SEQ ID NO: 32562 - DNA, 21 bp, synthetic construct
  source 1..21: mol_type = other DNA
caactggatagccgtgactgg

SEQ ID NO: 32563 - DNA, 21 bp, synthetic construct
  source 1..21: mol_type = other DNA
tattggcagggcattcctgct

SEQ ID NO: 32564 - DNA, 21 bp, synthetic construct
  source 1..21: mol_type = other DNA
ttcccaccactcttcgcggcc

SEQ ID NO: 32565 - DNA, 21 bp, synthetic construct
  source 1..21: mol_type = other DNA
tacgtccgtagcgattgtgca

SEQ ID NO: 32566 - DNA, 21 bp, synthetic construct
  source 1..21: mol_type = other DNA
tggactgaagggaccaaatac

SEQ ID NO: 32567 - DNA, 21 bp, synthetic construct
  source 1..21: mol_type = other DNA
tatttcgccggtaaacaagag

SEQ ID NO: 32568 - DNA, 21 bp, synthetic construct
  source 1..21: mol_type = other DNA
ggaggggaattcagacattgg

SEQ ID NO: 32569 - DNA, 21 bp, synthetic construct
  source 1..21: mol_type = other DNA
tacagccgtaatggagcgaac

SEQ ID NO: 32570 - DNA, 21 bp, synthetic construct
  source 1..21: mol_type = other DNA
cgcttgtatgatagctacgct

SEQ ID NO: 32571 - DNA, 21 bp, synthetic construct
  source 1..21: mol_type = other DNA
tatagcaggttaaaccataac

SEQ ID NO: 32572 - DNA, 21 bp, synthetic construct
  source 1..21: mol_type = other DNA
tattttactaacgtcagagaa

SEQ ID NO: 32573 - DNA, 21 bp, synthetic construct
  source 1..21: mol_type = other DNA
tattttagcggggaacgggcc

SEQ ID NO: 32574 - DNA, 21 bp, synthetic construct
  source 1..21: mol_type = other DNA
tatacccgtctggatgttctt

SEQ ID NO: 32575 - DNA, 21 bp, synthetic construct
  source 1..21: mol_type = other DNA
tatgtgcgttcaggtggcggc

SEQ ID NO: 32576 - DNA, 21 bp, synthetic construct
  source 1..21: mol_type = other DNA
ttttcgagggcaaatgtaaac

SEQ ID NO: 32577 - DNA, 21 bp, synthetic construct
  source 1..21: mol_type = other DNA
tactcgcgactgcatcagttg

SEQ ID NO: 32578 - DNA, 21 bp, synthetic construct
  source 1..21: mol_type = other DNA
tgtaataagccaatggaagcc

SEQ ID NO: 32579 - DNA, 21 bp, synthetic construct
  source 1..21: mol_type = other DNA
gttggttctgaccgaggatgg

SEQ ID NO: 32580 - DNA, 21 bp, synthetic construct
  source 1..21: mol_type = other DNA
agaaacgctacttctgcctgg

SEQ ID NO: 32581 - DNA, 21 bp, synthetic construct
  source 1..21: mol_type = other DNA
aaaacaaagagtgaatgtgat

SEQ ID NO: 32582 - DNA, 21 bp, synthetic construct
  source 1..21: mol_type = other DNA
ctaagtcgtcttacggtaaac

SEQ ID NO: 32583 - DNA, 21 bp, synthetic construct
  source 1..21: mol_type = other DNA
tattctcgggggaacatcaac

SEQ ID NO: 32584 - DNA, 21 bp, synthetic construct
  source 1..21: mol_type = other DNA
ggcgaggagggtgttcgctgg

SEQ ID NO: 32585 - DNA, 21 bp, synthetic construct
  source 1..21: mol_type = other DNA
tgcaaaccaggcgctacgagt

SEQ ID NO: 32586 - DNA, 21 bp, synthetic construct
  source 1..21: mol_type = other DNA
tgttcaccctatttgcatgaa

SEQ ID NO: 32587 - DNA, 21 bp, synthetic construct
  source 1..21: mol_type = other DNA
cgggatataacggtcttcccc

SEQ ID NO: 32588 - DNA, 21 bp, synthetic construct
  source 1..21: mol_type = other DNA
tttgacggttattccgcgtac

SEQ ID NO: 32589 - DNA, 21 bp, synthetic construct
  source 1..21: mol_type = other DNA
tattggcaagggatgctagac

SEQ ID NO: 32590 - DNA, 21 bp, synthetic construct
  source 1..21: mol_type = other DNA
tacttctccggggtggctatg

SEQ ID NO: 32591 - DNA, 21 bp, synthetic construct
  source 1..21: mol_type = other DNA
cacgatagtacaaatggtatc

SEQ ID NO: 32592 - DNA, 21 bp, synthetic construct
  source 1..21: mol_type = other DNA
aggctctacgactcttatgcg

SEQ ID NO: 32593 - DNA, 21 bp, synthetic construct
  source 1..21: mol_type = other DNA
tactgggagggtgttagggag

SEQ ID NO: 32594 - DNA, 21 bp, synthetic construct
  source 1..21: mol_type = other DNA
tactttactggacatccagaa

SEQ ID NO: 32595 - DNA, 21 bp, synthetic construct
  source 1..21: mol_type = other DNA
gacatgtcgactcgcacttgg

SEQ ID NO: 32596 - DNA, 21 bp, synthetic construct
  source 1..21: mol_type = other DNA
caaggtgaggcgcgaatttgg

SEQ ID NO: 32597 - DNA, 21 bp, synthetic construct
  source 1..21: mol_type = other DNA
ggaggcgcgggtgttcgttgg

SEQ ID NO: 32598 - DNA, 21 bp, synthetic construct
  source 1..21: mol_type = other DNA
tgtaacaagccgatgacagta

SEQ ID NO: 32599 - DNA, 21 bp, synthetic construct
  source 1..21: mol_type = other DNA
tattcccgcatcaattcgaac

SEQ ID NO: 32600 - DNA, 21 bp, synthetic construct
  source 1..21: mol_type = other DNA
tactcgagacacggccagaac

SEQ ID NO: 32601 - DNA, 21 bp, synthetic construct
  source 1..21: mol_type = other DNA
tatgccaagcaaggtatgaat

SEQ ID NO: 32602 - DNA, 21 bp, synthetic construct
  source 1..21: mol_type = other DNA
ggatgtaagccagattttggg

SEQ ID NO: 32603 - DNA, 21 bp, synthetic construct
  source 1..21: mol_type = other DNA
aggagctacgacacatacccc

SEQ ID NO: 32604 - DNA, 21 bp, synthetic construct
  source 1..21: mol_type = other DNA
tattacacaggacacgtaaat

SEQ ID NO: 32605 - DNA, 21 bp, synthetic construct
  source 1..21: mol_type = other DNA
tatgcccggcaaagtaacaat

SEQ ID NO: 32606 - DNA, 21 bp, synthetic construct
  source 1..21: mol_type = other DNA
cgcggggatgatcggggatgg

SEQ ID NO: 32607 - DNA, 21 bp, synthetic construct
  source 1..21: mol_type = other DNA
tattcccgtcaaaataccaat

SEQ ID NO: 32608 - DNA, 21 bp, synthetic construct
  source 1..21: mol_type = other DNA
tattgggaaggagtaaagtca

SEQ ID NO: 32609 - DNA, 21 bp, synthetic construct
  source 1..21: mol_type = other DNA
cgtccggaaacttgcccacga

SEQ ID NO: 32610 - DNA, 21 bp, synthetic construct
  source 1..21: mol_type = other DNA
tgcaaacctaagtgtacgccc

SEQ ID NO: 32611 - DNA, 21 bp, synthetic construct
  source 1..21: mol_type = other DNA
tacgcaaagcttggatacaac

SEQ ID NO: 32612 - DNA, 21 bp, synthetic construct
  source 1..21: mol_type = other DNA
ctgaaagatgggacaaatgca

SEQ ID NO: 32613 - DNA, 21 bp, synthetic construct
  source 1..21: mol_type = other DNA
tactggaccggtatgcccgag

SEQ ID NO: 32614 - DNA, 21 bp, synthetic construct
  source 1..21: mol_type = other DNA
atgaccggtacaagttgtttc

SEQ ID NO: 32615 - DNA, 21 bp, synthetic construct
  source 1..21: mol_type = other DNA
tgcaaagacactaaaacggtt

SEQ ID NO: 32616 - DNA, 21 bp, synthetic construct
  source 1..21: mol_type = other DNA
ttcagccgcgctaacttcaac

SEQ ID NO: 32617 - DNA, 21 bp, synthetic construct
  source 1..21: mol_type = other DNA
tactcgaggaatagtcctaat

SEQ ID NO: 32618 - DNA, 21 bp, synthetic construct
  source 1..21: mol_type = other DNA
gtacggggcgaggataggtgt

SEQ ID NO: 32619 - DNA, 21 bp, synthetic construct
  source 1..21: mol_type = other DNA
cgtgacgagttctcttcatgg

SEQ ID NO: 32620 - DNA, 21 bp, synthetic construct
  source 1..21: mol_type = other DNA
tggccaaatggggtggacgga

SEQ ID NO: 32621 - DNA, 21 bp, synthetic construct
  source 1..21: mol_type = other DNA
cgtagtgaatttgcaacattc

SEQ ID NO: 32622 - DNA, 21 bp, synthetic construct
  source 1..21: mol_type = other DNA
tattcccgtaacgggatgaac

SEQ ID NO: 32623 - DNA, 21 bp, synthetic construct
  source 1..21: mol_type = other DNA
tatgtgcgacacgatgtacac

SEQ ID NO: 32624 - DNA, 21 bp, synthetic construct
  source 1..21: mol_type = other DNA
tgcaaaccctcaaagctccca

SEQ ID NO: 32625 - DNA, 21 bp, synthetic construct
  source 1..21: mol_type = other DNA
tttttttcgggaatccaagag

SEQ ID NO: 32626 - DNA, 21 bp, synthetic construct
  source 1..21: mol_type = other DNA
tacagtagatccgggcaaaac

SEQ ID NO: 32627 - DNA, 21 bp, synthetic construct
  source 1..21: mol_type = other DNA
ttatgtaggccttgctcaatt

SEQ ID NO: 32628 - DNA, 21 bp, synthetic construct
  source 1..21: mol_type = other DNA
ccaggctctactaacggtcgc

SEQ ID NO: 32629 - DNA, 21 bp, synthetic construct
  source 1..21: mol_type = other DNA
taccacaggataggggttaat

SEQ ID NO: 32630 - DNA, 21 bp, synthetic construct
  source 1..21: mol_type = other DNA
tatagtcgctccggcaataac

SEQ ID NO: 32631 - DNA, 21 bp, synthetic construct
  source 1..21: mol_type = other DNA
tatagcaaatggaatgaaaat

SEQ ID NO: 32632 - DNA, 21 bp, synthetic construct
  source 1..21: mol_type = other DNA
tattatactggacaaactgag

SEQ ID NO: 32633 - DNA, 21 bp, synthetic construct
  source 1..21: mol_type = other DNA
tacttcgagggtagaatagca

SEQ ID NO: 32634 - DNA, 21 bp, synthetic construct
  source 1..21: mol_type = other DNA
tggtattcgggagttaaggct

SEQ ID NO: 32635 - DNA, 21 bp, synthetic construct
  source 1..21: mol_type = other DNA
tgtcgctcggagaccaaactc

SEQ ID NO: 32636 - DNA, 21 bp, synthetic construct
  source 1..21: mol_type = other DNA
aggatggaggatcacggctgg

SEQ ID NO: 32637 - DNA, 21 bp, synthetic construct
  source 1..21: mol_type = other DNA
atgcagagtacaaacggagta

SEQ ID NO: 32638 - DNA, 21 bp, synthetic construct
  source 1..21: mol_type = other DNA
ctttctaagatgaatcataat

SEQ ID NO: 32639 - DNA, 21 bp, synthetic construct
  source 1..21: mol_type = other DNA
ttgaatcggccatgcagtgaa

SEQ ID NO: 32640 - DNA, 21 bp, synthetic construct
  source 1..21: mol_type = other DNA
tacttttcgggtacttatcag

SEQ ID NO: 32641 - DNA, 21 bp, synthetic construct
  source 1..21: mol_type = other DNA
tatagcaggcataatgacaac

SEQ ID NO: 32642 - DNA, 21 bp, synthetic construct
  source 1..21: mol_type = other DNA
tattcgagacagggggataat

SEQ ID NO: 32643 - DNA, 21 bp, synthetic construct
  source 1..21: mol_type = other DNA
tggatgcctatgtgcaaggct

SEQ ID NO: 32644 - DNA, 21 bp, synthetic construct
  source 1..21: mol_type = other DNA
tatgccaggcagggcgagaat

SEQ ID NO: 32645 - DNA, 21 bp, synthetic construct
  source 1..21: mol_type = other DNA
atgtcagaattcaaaagctgg

SEQ ID NO: 32646 - DNA, 21 bp, synthetic construct
  source 1..21: mol_type = other DNA
atgcatagattaagcgaacgg

SEQ ID NO: 32647 - DNA, 21 bp, synthetic construct
  source 1..21: mol_type = other DNA
cggggggaattcgttatgttc

SEQ ID NO: 32648 - DNA, 21 bp, synthetic construct
  source 1..21: mol_type = other DNA
agaccggagacatgtcctatt

SEQ ID NO: 32649 - DNA, 21 bp, synthetic construct
  source 1..21: mol_type = other DNA
tacttcgctggcgtaatcgaa

SEQ ID NO: 32650 - DNA, 21 bp, synthetic construct
  source 1..21: mol_type = other DNA
ataccaattaaatgtcccagc

SEQ ID NO: 32651 - DNA, 21 bp, synthetic construct
  source 1..21: mol_type = other DNA
tttcagtcgactaatggcatt

SEQ ID NO: 32652 - DNA, 21 bp, synthetic construct
  source 1..21: mol_type = other DNA
gtcgccggcaagggatgcgga

SEQ ID NO: 32653 - DNA, 21 bp, synthetic construct
  source 1..21: mol_type = other DNA
tatgacagcaccaatggcatc

SEQ ID NO: 32654 - DNA, 21 bp, synthetic construct
  source 1..21: mol_type = other DNA
tgcaaagagggctctgcgtgg

SEQ ID NO: 32655 - DNA, 21 bp, synthetic construct
  source 1..21: mol_type = other DNA
tgtacgcgtctttcggccccg

SEQ ID NO: 32656 - DNA, 21 bp, synthetic construct
  source 1..21: mol_type = other DNA
tatttcagtggtgtcagcgat

SEQ ID NO: 32657 - DNA, 21 bp, synthetic construct
  source 1..21: mol_type = other DNA
accgatgattatagtaagtgg

SEQ ID NO: 32658 - DNA, 21 bp, synthetic construct
  source 1..21: mol_type = other DNA
cctttcgcgaagagcccgatg

SEQ ID NO: 32659 - DNA, 21 bp, synthetic construct
  source 1..21: mol_type = other DNA
tatgctaaattggggtacaac

SEQ ID NO: 32660 - DNA, 21 bp, synthetic construct
  source 1..21: mol_type = other DNA
atattgcaagatcgcggctgg

SEQ ID NO: 32661 - DNA, 21 bp, synthetic construct
  source 1..21: mol_type = other DNA
tactggaccgggagagcagac

SEQ ID NO: 32662 - DNA, 21 bp, synthetic construct
  source 1..21: mol_type = other DNA
tgtaagccgtcgcccttagaa

SEQ ID NO: 32663 - DNA, 21 bp, synthetic construct
  source 1..21: mol_type = other DNA
tacgcacgttcgaaccctaac

SEQ ID NO: 32664 - DNA, 21 bp, synthetic construct
  source 1..21: mol_type = other DNA
ttctggtccggaaaattggac

SEQ ID NO: 32665 - DNA, 21 bp, synthetic construct
  source 1..21: mol_type = other DNA
ttttttacaggaatgcgcgat

SEQ ID NO: 32666 - DNA, 21 bp, synthetic construct
  source 1..21: mol_type = other DNA
gcacactctaccaacggtgtg

SEQ ID NO: 32667 - DNA, 21 bp, synthetic construct
  source 1..21: mol_type = other DNA
cctaattccactaacggagta

SEQ ID NO: 32668 - DNA, 21 bp, synthetic construct
  source 1..21: mol_type = other DNA
ttggccgcctcctgttgcgta

SEQ ID NO: 32669 - DNA, 21 bp, synthetic construct
  source 1..21: mol_type = other DNA
tacagtagggttgatgataga

SEQ ID NO: 32670 - DNA, 21 bp, synthetic construct
  source 1..21: mol_type = other DNA
gtgccccttagaggaatagga

SEQ ID NO: 32671 - DNA, 21 bp, synthetic construct
  source 1..21: mol_type = other DNA
agacttggccaaacctgtgct

SEQ ID NO: 32672 - DNA, 21 bp, synthetic construct
  source 1..21: mol_type = other DNA
tacgcccgccatggctttaat

SEQ ID NO: 32673 - DNA, 21 bp, synthetic construct
  source 1..21: mol_type = other DNA
gtcccagaaagggtgtgcggt

SEQ ID NO: 32674 - DNA, 21 bp, synthetic construct
  source 1..21: mol_type = other DNA
tactcaaaacacaacgagaac

SEQ ID NO: 32675 - DNA, 21 bp, synthetic construct
  source 1..21: mol_type = other DNA
ttctggtctggaacaaaggaa

SEQ ID NO: 32676 - DNA, 21 bp, synthetic construct
  source 1..21: mol_type = other DNA
taccatcgcatcggccctaac

SEQ ID NO: 32677 - DNA, 21 bp, synthetic construct
  source 1..21: mol_type = other DNA
gtagctcgcacgggatgggac

SEQ ID NO: 32678 - DNA, 21 bp, synthetic construct
  source 1..21: mol_type = other DNA
tatgtgcgaagtcagccgcaa

SEQ ID NO: 32679 - DNA, 21 bp, synthetic construct
  source 1..21: mol_type = other DNA
tgcaaacctcccaagttggag

SEQ ID NO: 32680 - DNA, 21 bp, synthetic construct
  source 1..21: mol_type = other DNA
tacttctccggccagcagagc

SEQ ID NO: 32681 - DNA, 21 bp, synthetic construct
  source 1..21: mol_type = other DNA
tgtaaattgagtagtacaccg

SEQ ID NO: 32682 - DNA, 21 bp, synthetic construct
  source 1..21: mol_type = other DNA
cgcgacgggaatagtatgtgg

SEQ ID NO: 32683 - DNA, 21 bp, synthetic construct
  source 1..21: mol_type = other DNA
tgcaagcctgataaggtggga

SEQ ID NO: 32684 - DNA, 21 bp, synthetic construct
  source 1..21: mol_type = other DNA
ttatccaaggttggcgataat

SEQ ID NO: 32685 - DNA, 21 bp, synthetic construct
  source 1..21: mol_type = other DNA
ttttcgcgaatcggcgacaat

SEQ ID NO: 32686 - DNA, 21 bp, synthetic construct
  source 1..21: mol_type = other DNA
tacagtcgaaccaatacaaac

SEQ ID NO: 32687 - DNA, 21 bp, synthetic construct
  source 1..21: mol_type = other DNA
tatacaaagttaaacgataat

SEQ ID NO: 32688 - DNA, 21 bp, synthetic construct
  source 1..21: mol_type = other DNA
tgtaagccttactcacgcgag

SEQ ID NO: 32689 - DNA, 21 bp, synthetic construct
  source 1..21: mol_type = other DNA
cggagtgagacagtttacgtg

SEQ ID NO: 32690 - DNA, 21 bp, synthetic construct
  source 1..21: mol_type = other DNA
cgaacccccacgtgtcccggt

SEQ ID NO: 32691 - DNA, 21 bp, synthetic construct
  source 1..21: mol_type = other DNA
tacgcgagaatcggcgtcaac

SEQ ID NO: 32692 - DNA, 21 bp, synthetic construct
  source 1..21: mol_type = other DNA
ctaagccgtagcggaaataac

SEQ ID NO: 32693 - DNA, 21 bp, synthetic construct
  source 1..21: mol_type = other DNA
aagttcgataacacatgctcg

SEQ ID NO: 32694 - DNA, 21 bp, synthetic construct
  source 1..21: mol_type = other DNA
tactggagcggtaaggcggcc

SEQ ID NO: 32695 - DNA, 21 bp, synthetic construct
  source 1..21: mol_type = other DNA
taccatcgcttagacgctatg

SEQ ID NO: 32696 - DNA, 21 bp, synthetic construct
  source 1..21: mol_type = other DNA
tactcaaagctccatacacac

SEQ ID NO: 32697 - DNA, 21 bp, synthetic construct
  source 1..21: mol_type = other DNA
tattcaaaaaatgggtttaat

SEQ ID NO: 32698 - DNA, 21 bp, synthetic construct
  source 1..21: mol_type = other DNA
ttccacaggagcacgcctaac

SEQ ID NO: 32699 - DNA, 21 bp, synthetic construct
  source 1..21: mol_type = other DNA
gtcatggaggaccgtaggtgg

SEQ ID NO: 32700 - DNA, 21 bp, synthetic construct
  source 1..21: mol_type = other DNA
tattggagcggcaagcaatcg

SEQ ID NO: 32701 - DNA, 21 bp, synthetic construct
  source 1..21: mol_type = other DNA
tgcaaggtatcagcttcagca

SEQ ID NO: 32702 - DNA, 21 bp, synthetic construct
  source 1..21: mol_type = other DNA
ggaggagatggttctacctgg

SEQ ID NO: 32703 - DNA, 21 bp, synthetic construct
  source 1..21: mol_type = other DNA
cggggaggcgatgtttttccc

SEQ ID NO: 32704 - DNA, 21 bp, synthetic construct
  source 1..21: mol_type = other DNA
taccgacctggttgcatcggt

SEQ ID NO: 32705 - DNA, 21 bp, synthetic construct
  source 1..21: mol_type = other DNA
ggagcggggacgagtaagtgg

SEQ ID NO: 32706 - DNA, 21 bp, synthetic construct
  source 1..21: mol_type = other DNA
tactggagcggaaagcaagct

SEQ ID NO: 32707 - DNA, 21 bp, synthetic construct
  source 1..21: mol_type = other DNA
gggtcgatttcgtctacgtgg

SEQ ID NO: 32708 - DNA, 21 bp, synthetic construct
  source 1..21: mol_type = other DNA
aggatgcttgacgtattccca

SEQ ID NO: 32709 - DNA, 21 bp, synthetic construct
  source 1..21: mol_type = other DNA
ccctggcgagactgtacgaag

SEQ ID NO: 32710 - DNA, 21 bp, synthetic construct
  source 1..21: mol_type = other DNA
tatagcaggcataatactaac

SEQ ID NO: 32711 - DNA, 21 bp, synthetic construct
  source 1..21: mol_type = other DNA
tatgcgcgcaccaacgtaaac

SEQ ID NO: 32712 - DNA, 21 bp, synthetic construct
  source 1..21: mol_type = other DNA
tggttttcaggcaaattagat

SEQ ID NO: 32713 - DNA, 21 bp, synthetic construct
  source 1..21: mol_type = other DNA
ctccataggcttcacgccgac

SEQ ID NO: 32714 - DNA, 21 bp, synthetic construct
  source 1..21: mol_type = other DNA
attaaagctatgataaaacag

SEQ ID NO: 32715 - DNA, 21 bp, synthetic construct
  source 1..21: mol_type = other DNA
ttcagtagactcgggactaat

SEQ ID NO: 32716 - DNA, 21 bp, synthetic construct
  source 1..21: mol_type = other DNA
ttctggaccggtaaggtagaa

SEQ ID NO: 32717 - DNA, 21 bp, synthetic construct
  source 1..21: mol_type = other DNA
cgcgaagaagaggtgtttccc

SEQ ID NO: 32718 - DNA, 21 bp, synthetic construct
  source 1..21: mol_type = other DNA
ttagcaaggatgggtgtgaac

SEQ ID NO: 32719 - DNA, 21 bp, synthetic construct
  source 1..21: mol_type = other DNA
cgagaacccggcgtggcatgg

SEQ ID NO: 32720 - DNA, 21 bp, synthetic construct
  source 1..21: mol_type = other DNA
tactcacgagtgggtagtcat

SEQ ID NO: 32721 - DNA, 21 bp, synthetic construct
  source 1..21: mol_type = other DNA
tactgggcaggggtccaggag

SEQ ID NO: 32722 - DNA, 21 bp, synthetic construct
  source 1..21: mol_type = other DNA
agtgcaccgacttgtaaaggg

SEQ ID NO: 32723 - DNA, 21 bp, synthetic construct
  source 1..21: mol_type = other DNA
tacagtaagtataacattaat

SEQ ID NO: 32724 - DNA, 21 bp, synthetic construct
  source 1..21: mol_type = other DNA
ggaggaatcggctcagcatgg

SEQ ID NO: 32725 - DNA, 21 bp, synthetic construct
  source 1..21: mol_type = other DNA
tgtcgagaggggacgactgct

SEQ ID NO: 32726 - DNA, 21 bp, synthetic construct
  source 1..21: mol_type = other DNA
tattttactggtgtccagcca

SEQ ID NO: 32727 - DNA, 21 bp, synthetic construct
  source 1..21: mol_type = other DNA
ttttttaccggaaagttggat

SEQ ID NO: 32728 - DNA, 21 bp, synthetic construct
  source 1..21: mol_type = other DNA
acggatggtaccagtctctgg

SEQ ID NO: 32729 - DNA, 21 bp, synthetic construct
  source 1..21: mol_type = other DNA
gggggagcgactagcaattgg

SEQ ID NO: 32730 - DNA, 21 bp, synthetic construct
  source 1..21: mol_type = other DNA
tactggtcaggaaccaccgat

SEQ ID NO: 32731 - DNA, 21 bp, synthetic construct
  source 1..21: mol_type = other DNA
cggtccatggtagggtgtgat

SEQ ID NO: 32732 - DNA, 21 bp, synthetic construct
  source 1..21: mol_type = other DNA
tacagcagggcgaacagcaac

SEQ ID NO: 32733 - DNA, 21 bp, synthetic construct
  source 1..21: mol_type = other DNA
ttacatcgagatagcccaaat

SEQ ID NO: 32734 - DNA, 21 bp, synthetic construct
  source 1..21: mol_type = other DNA
cactggagctcaaacggggtt

SEQ ID NO: 32735 - DNA, 21 bp, synthetic construct
  source 1..21: mol_type = other DNA
tacagtagacataatgtgaat

SEQ ID NO: 32736 - DNA, 21 bp, synthetic construct
  source 1..21: mol_type = other DNA
ttttggtcgggaaaaatcgac

SEQ ID NO: 32737 - DNA, 21 bp, synthetic construct
  source 1..21: mol_type = other DNA
tatagtcgctcgggaatgaat

SEQ ID NO: 32738 - DNA, 21 bp, synthetic construct
  source 1..21: mol_type = other DNA
tactataccggacgtcatgac

SEQ ID NO: 32739 - DNA, 21 bp, synthetic construct
  source 1..21: mol_type = other DNA
gtggacagcagcaacggggtc

SEQ ID NO: 32740 - DNA, 21 bp, synthetic construct
  source 1..21: mol_type = other DNA
atgttcgatggaacagaagct

SEQ ID NO: 32741 - DNA, 21 bp, synthetic construct
  source 1..21: mol_type = other DNA
atggacggtcaatcgttgtgg

SEQ ID NO: 32742 - DNA, 21 bp, synthetic construct
  source 1..21: mol_type = other DNA
tattattccggggtaaaatat

SEQ ID NO: 32743 - DNA, 21 bp, synthetic construct
  source 1..21: mol_type = other DNA
tattggcatggaattccggaa

SEQ ID NO: 32744 - DNA, 21 bp, synthetic construct
  source 1..21: mol_type = other DNA
tactttcacggacagatggat

SEQ ID NO: 32745 - DNA, 21 bp, synthetic construct
  source 1..21: mol_type = other DNA
tactatacgggtgtcaaaggc

SEQ ID NO: 32746 - DNA, 21 bp, synthetic construct
  source 1..21: mol_type = other DNA
tcaggggactccaacaaatgt

SEQ ID NO: 32747 - DNA, 21 bp, synthetic construct
  source 1..21: mol_type = other DNA
ggttcatcaacgagtgtctgg

SEQ ID NO: 32748 - DNA, 21 bp, synthetic construct
  source 1..21: mol_type = other DNA
tacgcaaaagttggatggaat

SEQ ID NO: 32749 - DNA, 21 bp, synthetic construct
  source 1..21: mol_type = other DNA
aaaggattagagggtatggac

SEQ ID NO: 32750 - DNA, 21 bp, synthetic construct
  source 1..21: mol_type = other DNA
caaaacgatcacgtgcgatgg

SEQ ID NO: 32751 - DNA, 21 bp, synthetic construct
  source 1..21: mol_type = other DNA
ctttcgagattaaccgtgaat

SEQ ID NO: 32752 - DNA, 21 bp, synthetic construct
  source 1..21: mol_type = other DNA
ttacataagaagatgccagac

SEQ ID NO: 32753 - DNA, 21 bp, synthetic construct
  source 1..21: mol_type = other DNA
tacgcgagagtgggtaacaac

SEQ ID NO: 32754 - DNA, 21 bp, synthetic construct
  source 1..21: mol_type = other DNA
aaagacgattggaatagcttc

SEQ ID NO: 32755 - DNA, 21 bp, synthetic construct
  source 1..21: mol_type = other DNA
cccctccgtgactgcgtaaaa

SEQ ID NO: 32756 - DNA, 21 bp, synthetic construct
  source 1..21: mol_type = other DNA
tttggtggaaggtgcccagag

SEQ ID NO: 32757 - DNA, 21 bp, synthetic construct
  source 1..21: mol_type = other DNA
tattggcaaggagtacgcgaa

SEQ ID NO: 32758 - DNA, 21 bp, synthetic construct
  source 1..21: mol_type = other DNA
gggagtggcacgagtaattgg

SEQ ID NO: 32759 - DNA, 21 bp, synthetic construct
  source 1..21: mol_type = other DNA
tactggtcaggaacgaatgat

SEQ ID NO: 32760 - DNA, 21 bp, synthetic construct
  source 1..21: mol_type = other DNA
tactcccgagattgtgagaac

SEQ ID NO: 32761 - DNA, 21 bp, synthetic construct
  source 1..21: mol_type = other DNA
aacgctcgagaaggaagaaat

SEQ ID NO: 32762 - DNA, 21 bp, synthetic construct
  source 1..21: mol_type = other DNA
tatttctcaggggtgagagga

SEQ ID NO: 32763 - DNA, 21 bp, synthetic construct
  source 1..21: mol_type = other DNA
tactggtccggaatgaacgcg

SEQ ID NO: 32764 - DNA, 21 bp, synthetic construct
  source 1..21: mol_type = other DNA
tgcaagccacagagcggctgg

SEQ ID NO: 32765 - DNA, 21 bp, synthetic construct
  source 1..21: mol_type = other DNA
tacgttaggcatgacgtgcat

SEQ ID NO: 32766 - DNA, 21 bp, synthetic construct
  source 1..21: mol_type = other DNA
tgcaagcccttatgcaagccg

SEQ ID NO: 32767 - DNA, 21 bp, synthetic construct
  source 1..21: mol_type = other DNA
acccaaaggcctggagagtgt

SEQ ID NO: 32768 - DNA, 21 bp, synthetic construct
  source 1..21: mol_type = other DNA
cgcgatgcgtttacaagtttt

SEQ ID NO: 32769 - DNA, 21 bp, synthetic construct
  source 1..21: mol_type = other DNA
cgtgacgaatacgttatgtac

SEQ ID NO: 32770 - DNA, 21 bp, synthetic construct
  source 1..21: mol_type = other DNA
tgcaataaaaggagtggggag

SEQ ID NO: 32771 - DNA, 21 bp, synthetic construct
  source 1..21: mol_type = other DNA
tgtaagacgcagcgaccagac

SEQ ID NO: 32772 - DNA, 21 bp, synthetic construct
  source 1..21: mol_type = other DNA
tacttcagcggcttgcgagag

SEQ ID NO: 32773 - DNA, 21 bp, synthetic construct
  source 1..21: mol_type = other DNA
ggtgggtcggggtcaagttgg

SEQ ID NO: 32774 - DNA, 21 bp, synthetic construct
  source 1..21: mol_type = other DNA
tactccagacaggggcaaaac

SEQ ID NO: 32775 - DNA, 21 bp, synthetic construct
  source 1..21: mol_type = other DNA
tatagtaaaatgggtgataat

SEQ ID NO: 32776 - DNA, 21 bp, synthetic construct
  source 1..21: mol_type = other DNA
tactggcaagggaaggtagca

SEQ ID NO: 32777 - DNA, 21 bp, synthetic construct
  source 1..21: mol_type = other DNA
tgcacgtcgaataccgggcat

SEQ ID NO: 32778 - DNA, 21 bp, synthetic construct
  source 1..21: mol_type = other DNA
gccgatggcagctgtaaagct

SEQ ID NO: 32779 - DNA, 21 bp, synthetic construct
  source 1..21: mol_type = other DNA
aattacgcaaggtccgcagag

SEQ ID NO: 32780 - DNA, 21 bp, synthetic construct
  source 1..21: mol_type = other DNA
ttttccagggctaacataaat

SEQ ID NO: 32781 - DNA, 21 bp, synthetic construct
  source 1..21: mol_type = other DNA
tgcactagtaaaacagggatt

SEQ ID NO: 32782 - DNA, 21 bp, synthetic construct
  source 1..21: mol_type = other DNA
tactttcacggacagttagaa

SEQ ID NO: 32783 - DNA, 21 bp, synthetic construct
  source 1..21: mol_type = other DNA
tatgcgagaggaggcatcaac

SEQ ID NO: 32784 - DNA, 21 bp, synthetic construct
  source 1..21: mol_type = other DNA
tactggagcggacatcaagct

SEQ ID NO: 32785 - DNA, 21 bp, synthetic construct
  source 1..21: mol_type = other DNA
tatacaaaggcccagatgaac

SEQ ID NO: 32786 - DNA, 21 bp, synthetic construct
  source 1..21: mol_type = other DNA
tacagccgcaagggtgaaaac

SEQ ID NO: 32787 - DNA, 21 bp, synthetic construct
  source 1..21: mol_type = other DNA
ctagcgaaacttggccctaat

SEQ ID NO: 32788 - DNA, 21 bp, synthetic construct
  source 1..21: mol_type = other DNA
atcaagaataatgccgactgt

SEQ ID NO: 32789 - DNA, 21 bp, synthetic construct
  source 1..21: mol_type = other DNA
tatgctagaggcaacacgaat

SEQ ID NO: 32790 - DNA, 21 bp, synthetic construct
  source 1..21: mol_type = other DNA
tgtagggagggcacaccgccg

SEQ ID NO: 32791 - DNA, 21 bp, synthetic construct
  source 1..21: mol_type = other DNA
ggtgacgaatgtgtcaaagct

SEQ ID NO: 32792 - DNA, 21 bp, synthetic construct
  source 1..21: mol_type = other DNA
tgtaacaaacctgacacggca

SEQ ID NO: 32793 - DNA, 21 bp, synthetic construct
  source 1..21: mol_type = other DNA
tacgccaggcaaggctataac

SEQ ID NO: 32794 - DNA, 21 bp, synthetic construct
  source 1..21: mol_type = other DNA
ctgtccaaaatggggccaaac

SEQ ID NO: 32795 - DNA, 21 bp, synthetic construct
  source 1..21: mol_type = other DNA
tgtatgccccaagccgggaga

SEQ ID NO: 32796 - DNA, 21 bp, synthetic construct
  source 1..21: mol_type = other DNA
tattggacaggacaagtagct

SEQ ID NO: 32797 - DNA, 21 bp, synthetic construct
  source 1..21: mol_type = other DNA
tgtaggtccgggccaacacca

SEQ ID NO: 32798 - DNA, 21 bp, synthetic construct
  source 1..21: mol_type = other DNA
tttttcactggattcattgat

SEQ ID NO: 32799 - DNA, 21 bp, synthetic construct
  source 1..21: mol_type = other DNA
tatttctcgggcgtcacggtc

SEQ ID NO: 32800 - DNA, 21 bp, synthetic construct
  source 1..21: mol_type = other DNA
tacgtacggagcgaccttgcc

SEQ ID NO: 32801 - DNA, 21 bp, synthetic construct
  source 1..21: mol_type = other DNA
tataccaggcttagttatgat

SEQ ID NO: 32802 - DNA, 21 bp, synthetic construct
  source 1..21: mol_type = other DNA
tattcgcgatggaatgaaaat

SEQ ID NO: 32803 - DNA, 21 bp, synthetic construct
  source 1..21: mol_type = other DNA
atcaagggctcgtgtgaacag

SEQ ID NO: 32804 - DNA, 21 bp, synthetic construct
  source 1..21: mol_type = other DNA
tactacactggaaagtgcgag

SEQ ID NO: 32805 - DNA, 21 bp, synthetic construct
  source 1..21: mol_type = other DNA
tacttcagtggtatgacagaa

SEQ ID NO: 32806 - DNA, 21 bp, synthetic construct
  source 1..21: mol_type = other DNA
ttcttcacaggctacattgat

SEQ ID NO: 32807 - DNA, 21 bp, synthetic construct
  source 1..21: mol_type = other DNA
tgtaagccaggccagccgatg

SEQ ID NO: 32808 - DNA, 21 bp, synthetic construct
  source 1..21: mol_type = other DNA
tattcaaggaacggtacgaat

SEQ ID NO: 32809 - DNA, 21 bp, synthetic construct
  source 1..21: mol_type = other DNA
tattggagcgggcagcgagag

SEQ ID NO: 32810 - DNA, 21 bp, synthetic construct
  source 1..21: mol_type = other DNA
tgcgcaccattgtacagggag

SEQ ID NO: 32811 - DNA, 21 bp, synthetic construct
  source 1..21: mol_type = other DNA
aggtctgagtttcaggtattt

SEQ ID NO: 32812 - DNA, 21 bp, synthetic construct
  source 1..21: mol_type = other DNA
tgtgctccatacatccacgag

SEQ ID NO: 32813 - DNA, 21 bp, synthetic construct
  source 1..21: mol_type = other DNA
tgtgcgccttataagcatgaa

SEQ ID NO: 32814 - DNA, 21 bp, synthetic construct
  source 1..21: mol_type = other DNA
agagaagacgaagtctactgg

SEQ ID NO: 32815 - DNA, 21 bp, synthetic construct
  source 1..21: mol_type = other DNA
tacagtcgagaaggaccgaac

SEQ ID NO: 32816 - DNA, 21 bp, synthetic construct
  source 1..21: mol_type = other DNA
tactcaagatcaggctacaac

SEQ ID NO: 32817 - DNA, 21 bp, synthetic construct
  source 1..21: mol_type = other DNA
tatgcgaagggagggaataac

SEQ ID NO: 32818 - DNA, 21 bp, synthetic construct
  source 1..21: mol_type = other DNA
tgcacagcgaaaacgggacac

SEQ ID NO: 32819 - DNA, 21 bp, synthetic construct
  source 1..21: mol_type = other DNA
atcgaaagcagtagaagttgg

SEQ ID NO: 32820 - DNA, 21 bp, synthetic construct
  source 1..21: mol_type = other DNA
gtcccggattcagtacgctgg

SEQ ID NO: 32821 - DNA, 21 bp, synthetic construct
  source 1..21: mol_type = other DNA
tgtaagccaaggaccatggag

SEQ ID NO: 32822 - DNA, 21 bp, synthetic construct
  source 1..21: mol_type = other DNA
tacgcaagaatgggcatgaac

SEQ ID NO: 32823 - DNA, 21 bp, synthetic construct
  source 1..21: mol_type = other DNA
tttcacagacttcttctagac

SEQ ID NO: 32824 - DNA, 21 bp, synthetic construct
  source 1..21: mol_type = other DNA
gttaaatcgtcaaatggagtg

SEQ ID NO: 32825 - DNA, 21 bp, synthetic construct
  source 1..21: mol_type = other DNA
ttttggtcgggcgtccctgcc

SEQ ID NO: 32826 - DNA, 21 bp, synthetic construct
  source 1..21: mol_type = other DNA
tacagccgccagggctttaac

SEQ ID NO: 32827 - DNA, 21 bp, synthetic construct
  source 1..21: mol_type = other DNA
ggcggtgctacgtccaactgg

SEQ ID NO: 32828 - DNA, 21 bp, synthetic construct
  source 1..21: mol_type = other DNA
tgcaaggagggatcgtcgtgg

SEQ ID NO: 32829 - DNA, 21 bp, synthetic construct
  source 1..21: mol_type = other DNA
aggggtgacggaaactattgg

SEQ ID NO: 32830 - DNA, 21 bp, synthetic construct
  source 1..21: mol_type = other DNA
atctgcagtaagcttcaaccg

SEQ ID NO: 32831 - DNA, 21 bp, synthetic construct
  source 1..21: mol_type = other DNA
cggggtggaaacgtctacccg

SEQ ID NO: 32832 - DNA, 21 bp, synthetic construct
  source 1..21: mol_type = other DNA
agggaagagaacgtctattgg

SEQ ID NO: 32833 - DNA, 21 bp, synthetic construct
  source 1..21: mol_type = other DNA
aggtctgaattccacggttat

SEQ ID NO: 32834 - DNA, 21 bp, synthetic construct
  source 1..21: mol_type = other DNA
tgtaagccacctagcagagaa

SEQ ID NO: 32835 - DNA, 21 bp, synthetic construct
  source 1..21: mol_type = other DNA
ctttccaggctcggcatcgac

SEQ ID NO: 32836 - DNA, 21 bp, synthetic construct
  source 1..21: mol_type = other DNA
tattcgcggctatcacaggac

SEQ ID NO: 32837 - DNA, 21 bp, synthetic construct
  source 1..21: mol_type = other DNA
gatatgagcaccaggacgtgg

SEQ ID NO: 32838 - DNA, 21 bp, synthetic construct
  source 1..21: mol_type = other DNA
attggagtaaaggggtgggac

SEQ ID NO: 32839 - DNA, 21 bp, synthetic construct
  source 1..21: mol_type = other DNA
tatgagccggggtgtaaaaat

SEQ ID NO: 32840 - DNA, 21 bp, synthetic construct
  source 1..21: mol_type = other DNA
tattcccggtcgaataataat

SEQ ID NO: 32841 - DNA, 21 bp, synthetic construct
  source 1..21: mol_type = other DNA
tacttctcaaatgtaagagag

SEQ ID NO: 32842 - DNA, 21 bp, synthetic construct
  source 1..21: mol_type = other DNA
aattacgcaaagagctacgcc

SEQ ID NO: 32843 - DNA, 21 bp, synthetic construct
  source 1..21: mol_type = other DNA
tgcaaacctggatggggagag

SEQ ID NO: 32844 - DNA, 21 bp, synthetic construct
  source 1..21: mol_type = other DNA
tatcataaacttaatcccggg

SEQ ID NO: 32845 - DNA, 21 bp, synthetic construct
  source 1..21: mol_type = other DNA
agagagggcactcctcactgt

SEQ ID NO: 32846 - DNA, 21 bp, synthetic construct
  source 1..21: mol_type = other DNA
ttctttactggccggatggac

SEQ ID NO: 32847 - DNA, 21 bp, synthetic construct
  source 1..21: mol_type = other DNA
tacctcaagagtgacgcatac

SEQ ID NO: 32848 - DNA, 21 bp, synthetic construct
  source 1..21: mol_type = other DNA
tacagtcgtacaaatgaaaat

SEQ ID NO: 32849 - DNA, 21 bp, synthetic construct
  source 1..21: mol_type = other DNA
tgcaagcctgagagaatgggc

SEQ ID NO: 32850 - DNA, 21 bp, synthetic construct
  source 1..21: mol_type = other DNA
ggagatactgtagtgagatgg

SEQ ID NO: 32851 - DNA, 21 bp, synthetic construct
  source 1..21: mol_type = other DNA
tgtatgaaaccaatgactgct

SEQ ID NO: 32852 - DNA, 21 bp, synthetic construct
  source 1..21: mol_type = other DNA
tattactcgggagtaataagc

SEQ ID NO: 32853 - DNA, 21 bp, synthetic construct
  source 1..21: mol_type = other DNA
cgtggggagttctcgtatcca

SEQ ID NO: 32854 - DNA, 21 bp, synthetic construct
  source 1..21: mol_type = other DNA
tattccaaatatcatgtgaat

SEQ ID NO: 32855 - DNA, 21 bp, synthetic construct
  source 1..21: mol_type = other DNA
atagccgctcatgggtgcggg

SEQ ID NO: 32856 - DNA, 21 bp, synthetic construct
  source 1..21: mol_type = other DNA
tacagtagagctaacggtaat

SEQ ID NO: 32857 - DNA, 21 bp, synthetic construct
  source 1..21: mol_type = other DNA
tatagccgattggactcgtac

SEQ ID NO: 32858 - DNA, 21 bp, synthetic construct
  source 1..21: mol_type = other DNA
ttccccggatcgtgtaaggag

SEQ ID NO: 32859 - DNA, 21 bp, synthetic construct
  source 1..21: mol_type = other DNA
ttcttttcgggcagattagat

SEQ ID NO: 32860 - DNA, 21 bp, synthetic construct
  source 1..21: mol_type = other DNA
gtgggcggggcgtgcccgtat

SEQ ID NO: 32861 - DNA, 21 bp, synthetic construct
  source 1..21: mol_type = other DNA
tactcgcgcaatggagtcaat

SEQ ID NO: 32862 - DNA, 21 bp, synthetic construct
  source 1..21: mol_type = other DNA
tttgcgtcgactaatggcgtt

SEQ ID NO: 32863 - DNA, 21 bp, synthetic construct
  source 1..21: mol_type = other DNA
attcccggtcacaagtgtgct

SEQ ID NO: 32864 - DNA, 21 bp, synthetic construct
  source 1..21: mol_type = other DNA
tactgggccggacgggtcgag

SEQ ID NO: 32865 - DNA, 21 bp, synthetic construct
  source 1..21: mol_type = other DNA
cagatgggctcgtcgacctgg

SEQ ID NO: 32866 - DNA, 21 bp, synthetic construct
  source 1..21: mol_type = other DNA
ttcttcaccggcatgcgggag

SEQ ID NO: 32867 - DNA, 21 bp, synthetic construct
  source 1..21: mol_type = other DNA
tacgacaaacgagaaaattgc

SEQ ID NO: 32868 - DNA, 21 bp, synthetic construct
  source 1..21: mol_type = other DNA
tatcttaagagcactaataat

SEQ ID NO: 32869 - DNA, 21 bp, synthetic construct
  source 1..21: mol_type = other DNA
tacgccagacaaaaccacaat

SEQ ID NO: 32870 - DNA, 21 bp, synthetic construct
  source 1..21: mol_type = other DNA
tatgcgaagcaggggcacaat

SEQ ID NO: 32871 - DNA, 21 bp, synthetic construct
  source 1..21: mol_type = other DNA
tatagcaagggaaatgcaaac

SEQ ID NO: 32872 - DNA, 21 bp, synthetic construct
  source 1..21: mol_type = other DNA
tattttaaggagaagtgcagc

SEQ ID NO: 32873 - DNA, 21 bp, synthetic construct
  source 1..21: mol_type = other DNA
ttttcgagagcgggaacaaat

SEQ ID NO: 32874 - DNA, 21 bp, synthetic construct
  source 1..21: mol_type = other DNA
tgccaactcaagtctacggac

SEQ ID NO: 32875 - DNA, 21 bp, synthetic construct
  source 1..21: mol_type = other DNA
tatgctaagcaaagcagaaat

SEQ ID NO: 32876 - DNA, 21 bp, synthetic construct
  source 1..21: mol_type = other DNA
tattatacgggaaagacttcg

SEQ ID NO: 32877 - DNA, 21 bp, synthetic construct
  source 1..21: mol_type = other DNA
tatagccgggttaatcacaat

SEQ ID NO: 32878 - DNA, 21 bp, synthetic construct
  source 1..21: mol_type = other DNA
gtgccaagtagcgctatatgg

SEQ ID NO: 32879 - DNA, 21 bp, synthetic construct
  source 1..21: mol_type = other DNA
tactcgaaacaagggcagaac

SEQ ID NO: 32880 - DNA, 21 bp, synthetic construct
  source 1..21: mol_type = other DNA
tacagtcggactaacgcaaat

SEQ ID NO: 32881 - DNA, 21 bp, synthetic construct
  source 1..21: mol_type = other DNA
tatttcgcgggccagattgcg

SEQ ID NO: 32882 - DNA, 21 bp, synthetic construct
  source 1..21: mol_type = other DNA
cttagtaaggtaggcgacaat

SEQ ID NO: 32883 - DNA, 21 bp, synthetic construct
  source 1..21: mol_type = other DNA
agggaagaagtttcatcttgg

SEQ ID NO: 32884 - DNA, 21 bp, synthetic construct
  source 1..21: mol_type = other DNA
ttgcaccgtgcagcaggtaat

SEQ ID NO: 32885 - DNA, 21 bp, synthetic construct
  source 1..21: mol_type = other DNA
tacgcacgtcaaggggaaaac

SEQ ID NO: 32886 - DNA, 21 bp, synthetic construct
  source 1..21: mol_type = other DNA
gtcttaggtcaagggaactgg

SEQ ID NO: 32887 - DNA, 21 bp, synthetic construct
  source 1..21: mol_type = other DNA
cgcagcgagttcacgggtttt

SEQ ID NO: 32888 - DNA, 21 bp, synthetic construct
  source 1..21: mol_type = other DNA
tacgccaggggcaacgcgaat

SEQ ID NO: 32889 - DNA, 21 bp, synthetic construct
  source 1..21: mol_type = other DNA
tatagtagattaaatgttggt

SEQ ID NO: 32890 - DNA, 21 bp, synthetic construct
  source 1..21: mol_type = other DNA
ctccataagctaagtacgcat

SEQ ID NO: 32891 - DNA, 21 bp, synthetic construct
  source 1..21: mol_type = other DNA
agaagcgaatttgcggtttat

SEQ ID NO: 32892 - DNA, 21 bp, synthetic construct
  source 1..21: mol_type = other DNA
tattctagactcggattgaac

SEQ ID NO: 32893 - DNA, 21 bp, synthetic construct
  source 1..21: mol_type = other DNA
agagatggggagagtaaatgg

SEQ ID NO: 32894 - DNA, 21 bp, synthetic construct
  source 1..21: mol_type = other DNA
taccatcggttaggcgagcct

SEQ ID NO: 32895 - DNA, 21 bp, synthetic construct
  source 1..21: mol_type = other DNA
atggaagggacaagttgctta

SEQ ID NO: 32896 - DNA, 21 bp, synthetic construct
  source 1..21: mol_type = other DNA
tgtaagcctcccccttttgcg

SEQ ID NO: 32897 - DNA, 21 bp, synthetic construct
  source 1..21: mol_type = other DNA
atgcaaggtacatcctgcctc

SEQ ID NO: 32898 - DNA, 21 bp, synthetic construct
  source 1..21: mol_type = other DNA
aaatctgattacgcgacttat

SEQ ID NO: 32899 - DNA, 21 bp, synthetic construct
  source 1..21: mol_type = other DNA
tactttaccgccatcattgaa

SEQ ID NO: 32900 - DNA, 21 bp, synthetic construct
  source 1..21: mol_type = other DNA
ttggccaaggcgggctgtaat

SEQ ID NO: 32901 - DNA, 21 bp, synthetic construct
  source 1..21: mol_type = other DNA
cttatgcaggaccgcagctgg

SEQ ID NO: 32902 - DNA, 21 bp, synthetic construct
  source 1..21: mol_type = other DNA
tactacgcgggaaaatgtgcc

SEQ ID NO: 32903 - DNA, 21 bp, synthetic construct
  source 1..21: mol_type = other DNA
gagccagaaagccgcgactgg

SEQ ID NO: 32904 - DNA, 21 bp, synthetic construct
  source 1..21: mol_type = other DNA
tggtttacaggacgagttgat

SEQ ID NO: 32905 - DNA, 21 bp, synthetic construct
  source 1..21: mol_type = other DNA
tactcgaaggggaacacgaac

SEQ ID NO: 32906 - DNA, 21 bp, synthetic construct
  source 1..21: mol_type = other DNA
tgtcgtccttatttacatgag

SEQ ID NO: 32907 - DNA, 21 bp, synthetic construct
  source 1..21: mol_type = other DNA
tatagtcgcaaaggggacaat

SEQ ID NO: 32908 - DNA, 21 bp, synthetic construct
  source 1..21: mol_type = other DNA
tgcctcagggctagacccgag

SEQ ID NO: 32909 - DNA, 21 bp, synthetic construct
  source 1..21: mol_type = other DNA
ggtcagggtacctcaaagtgg

SEQ ID NO: 32910 - DNA, 21 bp, synthetic construct
  source 1..21: mol_type = other DNA
ctcagtcgttcgagcatgaat

SEQ ID NO: 32911 - DNA, 21 bp, synthetic construct
  source 1..21: mol_type = other DNA
tgtttgaaacgctgtacgccc

SEQ ID NO: 32912 - DNA, 21 bp, synthetic construct
  source 1..21: mol_type = other DNA
tacagcaggacaaatttaaac

SEQ ID NO: 32913 - DNA, 21 bp, synthetic construct
  source 1..21: mol_type = other DNA
cagaaccagacaagtcgctgg

SEQ ID NO: 32914 - DNA, 21 bp, synthetic construct
  source 1..21: mol_type = other DNA
tacgcgcgaacaaatctcaac

SEQ ID NO: 32915 - DNA, 21 bp, synthetic construct
  source 1..21: mol_type = other DNA
tatttccctggatgtaaagag

SEQ ID NO: 32916 - DNA, 21 bp, synthetic construct
  source 1..21: mol_type = other DNA
tgtcaagacggtagcggggcg

SEQ ID NO: 32917 - DNA, 21 bp, synthetic construct
  source 1..21: mol_type = other DNA
agaaacggaacgagtgcttgg

SEQ ID NO: 32918 - DNA, 21 bp, synthetic construct
  source 1..21: mol_type = other DNA
tgtaaatacttgaagagtgac

SEQ ID NO: 32919 - DNA, 21 bp, synthetic construct
  source 1..21: mol_type = other DNA
gatcccggagacaggaagtgg

SEQ ID NO: 32920 - DNA, 21 bp, synthetic construct
  source 1..21: mol_type = other DNA
tattggagtggaacaacagat

SEQ ID NO: 32921 - DNA, 21 bp, synthetic construct
  source 1..21: mol_type = other DNA
tattggtctgcggtggtagat

SEQ ID NO: 32922 - DNA, 21 bp, synthetic construct
  source 1..21: mol_type = other DNA
atcgcgagcaagggcgccggg

SEQ ID NO: 32923 - DNA, 21 bp, synthetic construct
  source 1..21: mol_type = other DNA
acgtatagtacgaacggaatt

SEQ ID NO: 32924 - DNA, 21 bp, synthetic construct
  source 1..21: mol_type = other DNA
tacgctcggtccaactataac

SEQ ID NO: 32925 - DNA, 21 bp, synthetic construct
  source 1..21: mol_type = other DNA
tgcacttctaaaacaatacac

SEQ ID NO: 32926 - DNA, 21 bp, synthetic construct
  source 1..21: mol_type = other DNA
gccggcccagaccgcggttgg

SEQ ID NO: 32927 - DNA, 21 bp, synthetic construct
  source 1..21: mol_type = other DNA
taccttaaaaatgacccgctg

SEQ ID NO: 32928 - DNA, 21 bp, synthetic construct
  source 1..21: mol_type = other DNA
tacttcaccggcaatcgtgac

SEQ ID NO: 32929 - DNA, 21 bp, synthetic construct
  source 1..21: mol_type = other DNA
ttcttcagcggacagatagca

SEQ ID NO: 32930 - DNA, 21 bp, synthetic construct
  source 1..21: mol_type = other DNA
cttagtaagttgggtaacaat

SEQ ID NO: 32931 - DNA, 21 bp, synthetic construct
  source 1..21: mol_type = other DNA
tatacgcgtctgaatgatggt

SEQ ID NO: 32932 - DNA, 21 bp, synthetic construct
  source 1..21: mol_type = other DNA
ttagcaaaaccgtgtctcacc

SEQ ID NO: 32933 - DNA, 21 bp, synthetic construct
  source 1..21: mol_type = other DNA
tggttttcggggcgcgtggag

SEQ ID NO: 32934 - DNA, 21 bp, synthetic construct
  source 1..21: mol_type = other DNA
gtcaccgacaccaatggggtt

SEQ ID NO: 32935 - DNA, 21 bp, synthetic construct
  source 1..21: mol_type = other DNA
tgtgtggactggggtttagat

SEQ ID NO: 32936 - DNA, 21 bp, synthetic construct
  source 1..21: mol_type = other DNA
ttttttagcggtaaaataagt

SEQ ID NO: 32937 - DNA, 21 bp, synthetic construct
  source 1..21: mol_type = other DNA
ttatctaggctggcttttgat

SEQ ID NO: 32938 - DNA, 21 bp, synthetic construct
  source 1..21: mol_type = other DNA
aagggagatataaaatgcgcg

SEQ ID NO: 32939 - DNA, 21 bp, synthetic construct
  source 1..21: mol_type = other DNA
tactggagtggacaaatagac

SEQ ID NO: 32940 - DNA, 21 bp, synthetic construct
  source 1..21: mol_type = other DNA
tatatatctacaaatggacgg

SEQ ID NO: 32941 - DNA, 21 bp, synthetic construct
  source 1..21: mol_type = other DNA
ttcaactctaccaacggaata

SEQ ID NO: 32942 - DNA, 21 bp, synthetic construct
  source 1..21: mol_type = other DNA
tgtcttgccggaaaagatgcg

SEQ ID NO: 32943 - DNA, 21 bp, synthetic construct
  source 1..21: mol_type = other DNA
ttctttaccggggagagggcg

SEQ ID NO: 32944 - DNA, 21 bp, synthetic construct
  source 1..21: mol_type = other DNA
tacagcaggataaatcagaac

SEQ ID NO: 32945 - DNA, 21 bp, synthetic construct
  source 1..21: mol_type = other DNA
tattatcatggggtgagagac

SEQ ID NO: 32946 - DNA, 21 bp, synthetic construct
  source 1..21: mol_type = other DNA
cgaaatgaatttactgtatat

SEQ ID NO: 32947 - DNA, 21 bp, synthetic construct
  source 1..21: mol_type = other DNA
taccatggcaaagagtcatgt

SEQ ID NO: 32948 - DNA, 21 bp, synthetic construct
  source 1..21: mol_type = other DNA
tatgatagtactaacggggta

SEQ ID NO: 32949 - DNA, 21 bp, synthetic construct
  source 1..21: mol_type = other DNA
tattgggaaggagttaaggag

SEQ ID NO: 32950 - DNA, 21 bp, synthetic construct
  source 1..21: mol_type = other DNA
tgtggtaaaaaacagttagac

SEQ ID NO: 32951 - DNA, 21 bp, synthetic construct
  source 1..21: mol_type = other DNA
tgtggcgcgattaagccccct

SEQ ID NO: 32952 - DNA, 21 bp, synthetic construct
  source 1..21: mol_type = other DNA
tgtcctaaaaaccagagggaa

SEQ ID NO: 32953 - DNA, 21 bp, synthetic construct
  source 1..21: mol_type = other DNA
ttcttctcagggcgcatcgat

SEQ ID NO: 32954 - DNA, 21 bp, synthetic construct
  source 1..21: mol_type = other DNA
aaaactgaattcacaacatac

SEQ ID NO: 32955 - DNA, 21 bp, synthetic construct
  source 1..21: mol_type = other DNA
tttagcagaacagggatgaac

SEQ ID NO: 32956 - DNA, 21 bp, synthetic construct
  source 1..21: mol_type = other DNA
tattgggaaggggtcaaagac

SEQ ID NO: 32957 - DNA, 21 bp, synthetic construct
  source 1..21: mol_type = other DNA
gctctcggagatcggacgtgg

SEQ ID NO: 32958 - DNA, 21 bp, synthetic construct
  source 1..21: mol_type = other DNA
ggttcagaatttaaaagttgg

SEQ ID NO: 32959 - DNA, 21 bp, synthetic construct
  source 1..21: mol_type = other DNA
tattttagcaacgtgcgtgaa

SEQ ID NO: 32960 - DNA, 21 bp, synthetic construct
  source 1..21: mol_type = other DNA
tacgttaagagtcaagtaatt

SEQ ID NO: 32961 - DNA, 21 bp, synthetic construct
  source 1..21: mol_type = other DNA
ttctggagcggaatgaaagat

SEQ ID NO: 32962 - DNA, 21 bp, synthetic construct
  source 1..21: mol_type = other DNA
tttgagccgggttgtaaggag

SEQ ID NO: 32963 - DNA, 21 bp, synthetic construct
  source 1..21: mol_type = other DNA
tacagccgggccaaccagaac

SEQ ID NO: 32964 - DNA, 21 bp, synthetic construct
  source 1..21: mol_type = other DNA
tatgttagatcagatctggct

SEQ ID NO: 32965 - DNA, 21 bp, synthetic construct
  source 1..21: mol_type = other DNA
tatagtcggcaaaattataat

SEQ ID NO: 32966 - DNA, 21 bp, synthetic construct
  source 1..21: mol_type = other DNA
tgtggagagtcagttaaacct

SEQ ID NO: 32967 - DNA, 21 bp, synthetic construct
  source 1..21: mol_type = other DNA
accaatggaactaaatgtgag

SEQ ID NO: 32968 - DNA, 21 bp, synthetic construct
  source 1..21: mol_type = other DNA
tacgcgcgtatggggatgaat

SEQ ID NO: 32969 - DNA, 21 bp, synthetic construct
  source 1..21: mol_type = other DNA
aaagacggattctcaggctgg

SEQ ID NO: 32970 - DNA, 21 bp, synthetic construct
  source 1..21: mol_type = other DNA
tacgagcctatatgcaaagag

SEQ ID NO: 32971 - DNA, 21 bp, synthetic construct
  source 1..21: mol_type = other DNA
tatgcgaagcacgggtggaat

SEQ ID NO: 32972 - DNA, 21 bp, synthetic construct
  source 1..21: mol_type = other DNA
tactacaccgggaggactgac

SEQ ID NO: 32973 - DNA, 21 bp, synthetic construct
  source 1..21: mol_type = other DNA
agctatagcacgaatggtgtc

SEQ ID NO: 32974 - DNA, 21 bp, synthetic construct
  source 1..21: mol_type = other DNA
agggattatgacagttatcca

SEQ ID NO: 32975 - DNA, 21 bp, synthetic construct
  source 1..21: mol_type = other DNA
tattctaggaacggcgcgaac

SEQ ID NO: 32976 - DNA, 21 bp, synthetic construct
  source 1..21: mol_type = other DNA
gacttaagggatcgggcctgg

SEQ ID NO: 32977 - DNA, 21 bp, synthetic construct
  source 1..21: mol_type = other DNA
tgtttgcgcgcgcgtccggaa

SEQ ID NO: 32978 - DNA, 21 bp, synthetic construct
  source 1..21: mol_type = other DNA
tatgctcgtatggggctaaac

SEQ ID NO: 32979 - DNA, 21 bp, synthetic construct
  source 1..21: mol_type = other DNA
tactcacgcggaaaccacaat

SEQ ID NO: 32980 - DNA, 21 bp, synthetic construct
  source 1..21: mol_type = other DNA
ctcagccgcatgaatgaaaat

SEQ ID NO: 32981 - DNA, 21 bp, synthetic construct
  source 1..21: mol_type = other DNA
tataacagtactaacggcgta

SEQ ID NO: 32982 - DNA, 21 bp, synthetic construct
  source 1..21: mol_type = other DNA
tattcgcgccttgatccagtg

SEQ ID NO: 32983 - DNA, 21 bp, synthetic construct
  source 1..21: mol_type = other DNA
attagttcaagtaacggcgta

SEQ ID NO: 32984 - DNA, 21 bp, synthetic construct
  source 1..21: mol_type = other DNA
tgggtaaagggggctgaatgc

SEQ ID NO: 32985 - DNA, 21 bp, synthetic construct
  source 1..21: mol_type = other DNA
aggtcgcctgacgcttatccc

SEQ ID NO: 32986 - DNA, 21 bp, synthetic construct
  source 1..21: mol_type = other DNA
tgtaaacccttcgtggttgag

SEQ ID NO: 32987 - DNA, 21 bp, synthetic construct
  source 1..21: mol_type = other DNA
tgtaactaccctatgactgcc

SEQ ID NO: 32988 - DNA, 21 bp, synthetic construct
  source 1..21: mol_type = other DNA
tatagtaggatgaacgttaac

SEQ ID NO: 32989 - DNA, 21 bp, synthetic construct
  source 1..21: mol_type = other DNA
tggaccgacggaacacgttat

SEQ ID NO: 32990 - DNA, 21 bp, synthetic construct
  source 1..21: mol_type = other DNA
tattacaccggtcggacgaac

SEQ ID NO: 32991 - DNA, 21 bp, synthetic construct
  source 1..21: mol_type = other DNA
gggtgtgggaccaaggagggt

SEQ ID NO: 32992 - DNA, 21 bp, synthetic construct
  source 1..21: mol_type = other DNA
acaccagacaccgttcgatgg

SEQ ID NO: 32993 - DNA, 21 bp, synthetic construct
  source 1..21: mol_type = other DNA
tatttcagtggccagcagaga

SEQ ID NO: 32994 - DNA, 21 bp, synthetic construct
  source 1..21: mol_type = other DNA
tatttttctggttacccagat

SEQ ID NO: 32995 - DNA, 21 bp, synthetic construct
  source 1..21: mol_type = other DNA
actttctcaacgaatggcatc

SEQ ID NO: 32996 - DNA, 21 bp, synthetic construct
  source 1..21: mol_type = other DNA
tgtgtcccagattaccgcgaa

SEQ ID NO: 32997 - DNA, 21 bp, synthetic construct
  source 1..21: mol_type = other DNA
tacttccatgggcgtcatgat

SEQ ID NO: 32998 - DNA, 21 bp, synthetic construct
  source 1..21: mol_type = other DNA
tactactcgggggtgactgct

SEQ ID NO: 32999 - DNA, 21 bp, synthetic construct
  source 1..21: mol_type = other DNA
actcaatcatcgaacggtgtt

SEQ ID NO: 33000 - DNA, 21 bp, synthetic construct
  source 1..21: mol_type = other DNA
tatgatagcactaacggcatt

SEQ ID NO: 33001 - DNA, 21 bp, synthetic construct
  source 1..21: mol_type = other DNA
cctacatctacaaatggagtt

SEQ ID NO: 33002 - DNA, 21 bp, synthetic construct
  source 1..21: mol_type = other DNA
cgcgcattagacggattcgac

SEQ ID NO: 33003 - DNA, 21 bp, synthetic construct
  source 1..21: mol_type = other DNA
tgtaaaccaggccaattgcct

SEQ ID NO: 33004 - DNA, 21 bp, synthetic construct
  source 1..21: mol_type = other DNA
ctaagtcgcatgaatatgaac

SEQ ID NO: 33005 - DNA, 21 bp, synthetic construct
  source 1..21: mol_type = other DNA
aatatggcttcggccggatgg

SEQ ID NO: 33006 - DNA, 21 bp, synthetic construct
  source 1..21: mol_type = other DNA
tattcccgtagcaacacaaat

SEQ ID NO: 33007 - DNA, 21 bp, synthetic construct
  source 1..21: mol_type = other DNA
tgtttaaaacagttgcctccg

SEQ ID NO: 33008 - DNA, 21 bp, synthetic construct
  source 1..21: mol_type = other DNA
tgtaagcccggtgccacctcg

SEQ ID NO: 33009 - DNA, 21 bp, synthetic construct
  source 1..21: mol_type = other DNA
ggtgtgggcacaaagtgtggg

SEQ ID NO: 33010 - DNA, 21 bp, synthetic construct
  source 1..21: mol_type = other DNA
tatgtccgccatgacgtcaga

SEQ ID NO: 33011 - DNA, 21 bp, synthetic construct
  source 1..21: mol_type = other DNA
atgttcgacggaactagagcg

SEQ ID NO: 33012 - DNA, 21 bp, synthetic construct
  source 1..21: mol_type = other DNA
ttcgctaaaacgggctataat

SEQ ID NO: 33013 - DNA, 21 bp, synthetic construct
  source 1..21: mol_type = other DNA
tgcagtaggttgcctacacct

SEQ ID NO: 33014 - DNA, 21 bp, synthetic construct
  source 1..21: mol_type = other DNA
agaacttatgatacctttgct

SEQ ID NO: 33015 - DNA, 21 bp, synthetic construct
  source 1..21: mol_type = other DNA
tactcacgcctccaatttaat

SEQ ID NO: 33016 - DNA, 21 bp, synthetic construct
  source 1..21: mol_type = other DNA
tttcatcgatctacaccaaat

SEQ ID NO: 33017 - DNA, 21 bp, synthetic construct
  source 1..21: mol_type = other DNA
tactctaggcaaggattcaat

SEQ ID NO: 33018 - DNA, 21 bp, synthetic construct
  source 1..21: mol_type = other DNA
tacttctcaggggttaacaga

SEQ ID NO: 33019 - DNA, 21 bp, synthetic construct
  source 1..21: mol_type = other DNA
attgcgcataagtgccctggt

SEQ ID NO: 33020 - DNA, 21 bp, synthetic construct
  source 1..21: mol_type = other DNA
tattttgcgggagttattgag

SEQ ID NO: 33021 - DNA, 21 bp, synthetic construct
  source 1..21: mol_type = other DNA
tattcgaaatggaacgacaat

SEQ ID NO: 33022 - DNA, 21 bp, synthetic construct
  source 1..21: mol_type = other DNA
tgtaaacctggggctgggact

SEQ ID NO: 33023 - DNA, 21 bp, synthetic construct
  source 1..21: mol_type = other DNA
tactccaagaataactgtaac

SEQ ID NO: 33024 - DNA, 21 bp, synthetic construct
  source 1..21: mol_type = other DNA
tgtaagagtttgaaaagcccc

SEQ ID NO: 33025 - DNA, 21 bp, synthetic construct
  source 1..21: mol_type = other DNA
tttttcactgggaagatggac

SEQ ID NO: 33026 - DNA, 21 bp, synthetic construct
  source 1..21: mol_type = other DNA
cagtgtaaaccttgtctaaca

SEQ ID NO: 33027 - DNA, 21 bp, synthetic construct
  source 1..21: mol_type = other DNA
tattttagcggcagaccaagc

SEQ ID NO: 33028 - DNA, 21 bp, synthetic construct
  source 1..21: mol_type = other DNA
agacacgaggacgtttacccg

SEQ ID NO: 33029 - DNA, 21 bp, synthetic construct
  source 1..21: mol_type = other DNA
tactctagagggaatgcaaat

SEQ ID NO: 33030 - DNA, 21 bp, synthetic construct
  source 1..21: mol_type = other DNA
aaagacgatttcagcatgtat

SEQ ID NO: 33031 - DNA, 21 bp, synthetic construct
  source 1..21: mol_type = other DNA
ttatgtcggccagaaagcgaa

SEQ ID NO: 33032 - DNA, 21 bp, synthetic construct
  source 1..21: mol_type = other DNA
gtaccggagttctgcaggcct

SEQ ID NO: 33033 - DNA, 21 bp, synthetic construct
  source 1..21: mol_type = other DNA
tttagtcgacagaattataac

SEQ ID NO: 33034 - DNA, 21 bp, synthetic construct
  source 1..21: mol_type = other DNA
tgtaagaacaataattcagag

SEQ ID NO: 33035 - DNA, 21 bp, synthetic construct
  source 1..21: mol_type = other DNA
tgcaaaccaagtcctctggag

SEQ ID NO: 33036 - DNA, 21 bp, synthetic construct
  source 1..21: mol_type = other DNA
tatgcgcgaatgggtcacaac

SEQ ID NO: 33037 - DNA, 21 bp, synthetic construct
  source 1..21: mol_type = other DNA
tggtggactggcatggtcgcg

SEQ ID NO: 33038 - DNA, 21 bp, synthetic construct
  source 1..21: mol_type = other DNA
tgtgacgggagcccaaaagcc

SEQ ID NO: 33039 - DNA, 21 bp, synthetic construct
  source 1..21: mol_type = other DNA
tacgtacgtagcggggactgt

SEQ ID NO: 33040 - DNA, 21 bp, synthetic construct
  source 1..21: mol_type = other DNA
tatagtcgtttacttcccatg

SEQ ID NO: 33041 - DNA, 21 bp, synthetic construct
  source 1..21: mol_type = other DNA
gtcactgcctcgggctgtgcc

SEQ ID NO: 33042 - DNA, 21 bp, synthetic construct
  source 1..21: mol_type = other DNA
gacctcaaaagcgtgaaatgg

SEQ ID NO: 33043 - DNA, 21 bp, synthetic construct
  source 1..21: mol_type = other DNA
tggaccgagatgtgcaaagcg

SEQ ID NO: 33044 - DNA, 21 bp, synthetic construct
  source 1..21: mol_type = other DNA
tattatacgggccagactgag

SEQ ID NO: 33045 - DNA, 21 bp, synthetic construct
  source 1..21: mol_type = other DNA
caaatgggtagcagtacgtgg

SEQ ID NO: 33046 - DNA, 21 bp, synthetic construct
  source 1..21: mol_type = other DNA
tattttcatggtcgccatgat

SEQ ID NO: 33047 - DNA, 21 bp, synthetic construct
  source 1..21: mol_type = other DNA
ggtcccgagggagttaggtgg

SEQ ID NO: 33048 - DNA, 21 bp, synthetic construct
  source 1..21: mol_type = other DNA
tacagccgcatgggacataac

SEQ ID NO: 33049 - DNA, 21 bp, synthetic construct
  source 1..21: mol_type = other DNA
atgttgaccgggaaatgtgag

SEQ ID NO: 33050 - DNA, 21 bp, synthetic construct
  source 1..21: mol_type = other DNA
tacgcgaagacaaactataat

SEQ ID NO: 33051 - DNA, 21 bp, synthetic construct
  source 1..21: mol_type = other DNA
tacgcgcgacaaaatccaaac

SEQ ID NO: 33052 - DNA, 21 bp, synthetic construct
  source 1..21: mol_type = other DNA
tacacccgactccagttcgac

SEQ ID NO: 33053 - DNA, 21 bp, synthetic construct
  source 1..21: mol_type = other DNA
tgtaagctagacaagatggtc

SEQ ID NO: 33054 - DNA, 21 bp, synthetic construct
  source 1..21: mol_type = other DNA
tatagtagaaacgggagcaat

SEQ ID NO: 33055 - DNA, 21 bp, synthetic construct
  source 1..21: mol_type = other DNA
tattctcgagccaattcgaac

SEQ ID NO: 33056 - DNA, 21 bp, synthetic construct
  source 1..21: mol_type = other DNA
aaggtagaccatgtgcgctgg

SEQ ID NO: 33057 - DNA, 21 bp, synthetic construct
  source 1..21: mol_type = other DNA
tactttgcgggcaagcaggaa

SEQ ID NO: 33058 - DNA, 21 bp, synthetic construct
  source 1..21: mol_type = other DNA
tgtaacagacccatgacggcc

SEQ ID NO: 33059 - DNA, 21 bp, synthetic construct
  source 1..21: mol_type = other DNA
tacagccgttcagggtttaat

SEQ ID NO: 33060 - DNA, 21 bp, synthetic construct
  source 1..21: mol_type = other DNA
tactcacgtcagaatgtcaat

SEQ ID NO: 33061 - DNA, 21 bp, synthetic construct
  source 1..21: mol_type = other DNA
ctacagagtactaacggtatt

SEQ ID NO: 33062 - DNA, 21 bp, synthetic construct
  source 1..21: mol_type = other DNA
ggccccggaaccaaatgcggg

SEQ ID NO: 33063 - DNA, 21 bp, synthetic construct
  source 1..21: mol_type = other DNA
ctcttagcaagtcagacctgg

SEQ ID NO: 33064 - DNA, 21 bp, synthetic construct
  source 1..21: mol_type = other DNA
tttagtcgagctggaattaac

SEQ ID NO: 33065 - DNA, 21 bp, synthetic construct
  source 1..21: mol_type = other DNA
tgcgctcgaatgaacagtaat

SEQ ID NO: 33066 - DNA, 21 bp, synthetic construct
  source 1..21: mol_type = other DNA
ggactggcgtcgagtacatgg

SEQ ID NO: 33067 - DNA, 21 bp, synthetic construct
  source 1..21: mol_type = other DNA
gagatggaatccagtgtttgg

SEQ ID NO: 33068 - DNA, 21 bp, synthetic construct
  source 1..21: mol_type = other DNA
tgcaagccaccaaaaggggac

SEQ ID NO: 33069 - DNA, 21 bp, synthetic construct
  source 1..21: mol_type = other DNA
tactcgaaacagaacagtaat

SEQ ID NO: 33070 - DNA, 21 bp, synthetic construct
  source 1..21: mol_type = other DNA
tatgcacgtgcaggctttaac

SEQ ID NO: 33071 - DNA, 21 bp, synthetic construct
  source 1..21: mol_type = other DNA
aggagtgacacggtgtatttt

SEQ ID NO: 33072 - DNA, 21 bp, synthetic construct
  source 1..21: mol_type = other DNA
tattgggaaggagtccgagaa

SEQ ID NO: 33073 - DNA, 21 bp, synthetic construct
  source 1..21: mol_type = other DNA
ataccatacgagggaattggt

SEQ ID NO: 33074 - DNA, 21 bp, synthetic construct
  source 1..21: mol_type = other DNA
tataattccaccaatggcgtt

SEQ ID NO: 33075 - DNA, 21 bp, synthetic construct
  source 1..21: mol_type = other DNA
ctccacaagcttaatccatgt

SEQ ID NO: 33076 - DNA, 21 bp, synthetic construct
  source 1..21: mol_type = other DNA
tacagccgggctggccataat

SEQ ID NO: 33077 - DNA, 21 bp, synthetic construct
  source 1..21: mol_type = other DNA
tacagccgccaggggaataac

SEQ ID NO: 33078 - DNA, 21 bp, synthetic construct
  source 1..21: mol_type = other DNA
tgtgcgccatacctagcagaa

SEQ ID NO: 33079 - DNA, 21 bp, synthetic construct
  source 1..21: mol_type = other DNA
tatgctcgtgcaggccacaat

SEQ ID NO: 33080 - DNA, 21 bp, synthetic construct
  source 1..21: mol_type = other DNA
tacgcgaaacacggctacaac

SEQ ID NO: 33081 - DNA, 21 bp, synthetic construct
  source 1..21: mol_type = other DNA
tgttccccaatgcgtactccg

SEQ ID NO: 33082 - DNA, 21 bp, synthetic construct
  source 1..21: mol_type = other DNA
tacttttcaggacagatatgt

SEQ ID NO: 33083 - DNA, 21 bp, synthetic construct
  source 1..21: mol_type = other DNA
tacgccaaagggggcctcaac

SEQ ID NO: 33084 - DNA, 21 bp, synthetic construct
  source 1..21: mol_type = other DNA
tgtaagccgcagatgcccact

SEQ ID NO: 33085 - DNA, 21 bp, synthetic construct
  source 1..21: mol_type = other DNA
tacagccgcggcaattataac

SEQ ID NO: 33086 - DNA, 21 bp, synthetic construct
  source 1..21: mol_type = other DNA
ggcagcaatggcgtacgatgg

SEQ ID NO: 33087 - DNA, 21 bp, synthetic construct
  source 1..21: mol_type = other DNA
tatagccgtgggaacgataac

SEQ ID NO: 33088 - DNA, 21 bp, synthetic construct
  source 1..21: mol_type = other DNA
ttcttcacaggaacacacgaa

SEQ ID NO: 33089 - DNA, 21 bp, synthetic construct
  source 1..21: mol_type = other DNA
acatgggacggtgacaatgca

SEQ ID NO: 33090 - DNA, 21 bp, synthetic construct
  source 1..21: mol_type = other DNA
cgaagcgagtatcacacctac

SEQ ID NO: 33091 - DNA, 21 bp, synthetic construct
  source 1..21: mol_type = other DNA
tattctcgcaatggctacaat

SEQ ID NO: 33092 - DNA, 21 bp, synthetic construct
  source 1..21: mol_type = other DNA
tattcacgccaaaacgcaaac

SEQ ID NO: 33093 - DNA, 21 bp, synthetic construct
  source 1..21: mol_type = other DNA
atgtgcgagaaagccaaggac

SEQ ID NO: 33094 - DNA, 21 bp, synthetic construct
  source 1..21: mol_type = other DNA
ctcgcacggagtggttgggat

SEQ ID NO: 33095 - DNA, 21 bp, synthetic construct
  source 1..21: mol_type = other DNA
tgcgggaagggaggaccggtt

SEQ ID NO: 33096 - DNA, 21 bp, synthetic construct
  source 1..21: mol_type = other DNA
ggtatagcaccctgcggtagc

SEQ ID NO: 33097 - DNA, 21 bp, synthetic construct
  source 1..21: mol_type = other DNA
tactttcagggtgtcgtagct

SEQ ID NO: 33098 - DNA, 21 bp, synthetic construct
  source 1..21: mol_type = other DNA
aagggcgatcatgtacgctgg

SEQ ID NO: 33099 - DNA, 21 bp, synthetic construct
  source 1..21: mol_type = other DNA
tgtggcgagggaagcaaagcc

SEQ ID NO: 33100 - DNA, 21 bp, synthetic construct
  source 1..21: mol_type = other DNA
tatcatagagctgggcttgac

SEQ ID NO: 33101 - DNA, 21 bp, synthetic construct
  source 1..21: mol_type = other DNA
tatagccgcatgaataacaat

SEQ ID NO: 33102 - DNA, 21 bp, synthetic construct
  source 1..21: mol_type = other DNA
ctcagcaagttgggcgctaat

SEQ ID NO: 33103 - DNA, 21 bp, synthetic construct
  source 1..21: mol_type = other DNA
agagaaccgacatgtccatac

SEQ ID NO: 33104 - DNA, 21 bp, synthetic construct
  source 1..21: mol_type = other DNA
tacgccaggggctcccttaac

SEQ ID NO: 33105 - DNA, 21 bp, synthetic construct
  source 1..21: mol_type = other DNA
tttttcagcggagagagagaa

SEQ ID NO: 33106 - DNA, 21 bp, synthetic construct
  source 1..21: mol_type = other DNA
tacttcacgggcgtgcaaccc

SEQ ID NO: 33107 - DNA, 21 bp, synthetic construct
  source 1..21: mol_type = other DNA
tatgccagagcgaattacaat

SEQ ID NO: 33108 - DNA, 21 bp, synthetic construct
  source 1..21: mol_type = other DNA
tgcaacaagaagatgggtgac

SEQ ID NO: 33109 - DNA, 21 bp, synthetic construct
  source 1..21: mol_type = other DNA
taccacaagctagataacatg

SEQ ID NO: 33110 - DNA, 21 bp, synthetic construct
  source 1..21: mol_type = other DNA
gtaatggaagaccggtcgtgg

SEQ ID NO: 33111 - DNA, 21 bp, synthetic construct
  source 1..21: mol_type = other DNA
ttcgccaagactggatggaat

SEQ ID NO: 33112 - DNA, 21 bp, synthetic construct
  source 1..21: mol_type = other DNA
ggtagtgagtattccagctat

SEQ ID NO: 33113 - DNA, 21 bp, synthetic construct
  source 1..21: mol_type = other DNA
tgcgcaccaacattgcacgaa

SEQ ID NO: 33114 - DNA, 21 bp, synthetic construct
  source 1..21: mol_type = other DNA
tttagcaaacataactataat

SEQ ID NO: 33115 - DNA, 21 bp, synthetic construct
  source 1..21: mol_type = other DNA
attagagactacaagacatgc

SEQ ID NO: 33116 - DNA, 21 bp, synthetic construct
  source 1..21: mol_type = other DNA
tactggagccaggtccaagct

SEQ ID NO: 33117 - DNA, 21 bp, synthetic construct
  source 1..21: mol_type = other DNA
ttgtcgaagagcggattcaac

SEQ ID NO: 33118 - DNA, 21 bp, synthetic construct
  source 1..21: mol_type = other DNA
cagcgtggtgtcggcatgtgt

SEQ ID NO: 33119 - DNA, 21 bp, synthetic construct
  source 1..21: mol_type = other DNA
tactctaagttcaattacaac

SEQ ID NO: 33120 - DNA, 21 bp, synthetic construct
  source 1..21: mol_type = other DNA
taccatagggcacaaatgaac

SEQ ID NO: 33121 - DNA, 21 bp, synthetic construct
  source 1..21: mol_type = other DNA
atggatgggaacagcctctgg

SEQ ID NO: 33122 - DNA, 21 bp, synthetic construct
  source 1..21: mol_type = other DNA
tacgcccgtcaggggcagaat

SEQ ID NO: 33123 - DNA, 21 bp, synthetic construct
  source 1..21: mol_type = other DNA
tatttcgcgggaaagacatcc

SEQ ID NO: 33124 - DNA, 21 bp, synthetic construct
  source 1..21: mol_type = other DNA
gtcaagagtagtaacggggta

SEQ ID NO: 33125 - DNA, 21 bp, synthetic construct
  source 1..21: mol_type = other DNA
tattcgcggactaattacaac

SEQ ID NO: 33126 - DNA, 21 bp, synthetic construct
  source 1..21: mol_type = other DNA
tgtaggagtactaatggggtt

SEQ ID NO: 33127 - DNA, 21 bp, synthetic construct
  source 1..21: mol_type = other DNA
tacttcacacggcaagtgaat

SEQ ID NO: 33128 - DNA, 21 bp, synthetic construct
  source 1..21: mol_type = other DNA
tatgactcaacaaatggaata

SEQ ID NO: 33129 - DNA, 21 bp, synthetic construct
  source 1..21: mol_type = other DNA
taccaccgtgcaggattagac

SEQ ID NO: 33130 - DNA, 21 bp, synthetic construct
  source 1..21: mol_type = other DNA
tctgatggttatagcaagtgg

SEQ ID NO: 33131 - DNA, 21 bp, synthetic construct
  source 1..21: mol_type = other DNA
ttttggagcgggatggtggcg

SEQ ID NO: 33132 - DNA, 21 bp, synthetic construct
  source 1..21: mol_type = other DNA
ctttcacggtccgggaccaat

SEQ ID NO: 33133 - DNA, 21 bp, synthetic construct
  source 1..21: mol_type = other DNA
tattccagagtgaacccaaac

SEQ ID NO: 33134 - DNA, 21 bp, synthetic construct
  source 1..21: mol_type = other DNA
ggggggggcagttcgtcatgg

SEQ ID NO: 33135 - DNA, 21 bp, synthetic construct
  source 1..21: mol_type = other DNA
ttctggtcgggaattcccgaa

SEQ ID NO: 33136 - DNA, 21 bp, synthetic construct
  source 1..21: mol_type = other DNA
ctttgggacggcacagtagct

SEQ ID NO: 33137 - DNA, 21 bp, synthetic construct
  source 1..21: mol_type = other DNA
gcatcatcgaccaacggcata

SEQ ID NO: 33138 - DNA, 21 bp, synthetic construct
  source 1..21: mol_type = other DNA
tatagccgcttagataattta

SEQ ID NO: 33139 - DNA, 21 bp, synthetic construct
  source 1..21: mol_type = other DNA
tactcccggcaaggtgagaac

SEQ ID NO: 33140 - DNA, 21 bp, synthetic construct
  source 1..21: mol_type = other DNA
tattggtcaggacaattagag

SEQ ID NO: 33141 - DNA, 21 bp, synthetic construct
  source 1..21: mol_type = other DNA
tgtaagtcagaccgcaaggaa

SEQ ID NO: 33142 - DNA, 21 bp, synthetic construct
  source 1..21: mol_type = other DNA
acgacggaaggtgtcagatgg

SEQ ID NO: 33143 - DNA, 21 bp, synthetic construct
  source 1..21: mol_type = other DNA
tcgttatgcaagacaactagt

SEQ ID NO: 33144 - DNA, 21 bp, synthetic construct
  source 1..21: mol_type = other DNA
tatttttcgggcatgcaagcc

SEQ ID NO: 33145 - DNA, 21 bp, synthetic construct
  source 1..21: mol_type = other DNA
aattcacccgcctgcaaagcg

SEQ ID NO: 33146 - DNA, 21 bp, synthetic construct
  source 1..21: mol_type = other DNA
gatttatcgagtactcagtgg

SEQ ID NO: 33147 - DNA, 21 bp, synthetic construct
  source 1..21: mol_type = other DNA
tgcaaacccgcgatgcatgaa

SEQ ID NO: 33148 - DNA, 21 bp, synthetic construct
  source 1..21: mol_type = other DNA
tggactgaaatgtgtaaggca

SEQ ID NO: 33149 - DNA, 21 bp, synthetic construct
  source 1..21: mol_type = other DNA
tgcaggcccccgatgctggaa

SEQ ID NO: 33150 - DNA, 21 bp, synthetic construct
  source 1..21: mol_type = other DNA
cgcgatggtaattcgatatgg

SEQ ID NO: 33151 - DNA, 21 bp, synthetic construct
  source 1..21: mol_type = other DNA
tgtatgagcaagacgggacac

SEQ ID NO: 33152 - DNA, 21 bp, synthetic construct
  source 1..21: mol_type = other DNA
ttttggagcggtaaagtcgat

SEQ ID NO: 33153 - DNA, 21 bp, synthetic construct
  source 1..21: mol_type = other DNA
tacgcgcgtcttagtccaatg

SEQ ID NO: 33154 - DNA, 21 bp, synthetic construct
  source 1..21: mol_type = other DNA
aggacttatgatacttacgct

SEQ ID NO: 33155 - DNA, 21 bp, synthetic construct
  source 1..21: mol_type = other DNA
tattgggaaggaactaggcat

SEQ ID NO: 33156 - DNA, 21 bp, synthetic construct
  source 1..21: mol_type = other DNA
tatagcaagaatggggccaat

SEQ ID NO: 33157 - DNA, 21 bp, synthetic construct
  source 1..21: mol_type = other DNA
acggatgggtcatgcaaagcc

SEQ ID NO: 33158 - DNA, 21 bp, synthetic construct
  source 1..21: mol_type = other DNA
tgtgctccggacgcgagagaa

SEQ ID NO: 33159 - DNA, 21 bp, synthetic construct
  source 1..21: mol_type = other DNA
tgtaagccaggtgcaggtgag

SEQ ID NO: 33160 - DNA, 21 bp, synthetic construct
  source 1..21: mol_type = other DNA
acccccgatacagtgaggtgg

SEQ ID NO: 33161 - DNA, 21 bp, synthetic construct
  source 1..21: mol_type = other DNA
agagatgctgcctcgagctgg

SEQ ID NO: 33162 - DNA, 21 bp, synthetic construct
  source 1..21: mol_type = other DNA
gccgagagttcccgactctgg

SEQ ID NO: 33163 - DNA, 21 bp, synthetic construct
  source 1..21: mol_type = other DNA
attccgaacaggtgtgaggcg

SEQ ID NO: 33164 - DNA, 21 bp, synthetic construct
  source 1..21: mol_type = other DNA
gacatggcaagcatgaaatgg

SEQ ID NO: 33165 - DNA, 21 bp, synthetic construct
  source 1..21: mol_type = other DNA
tactacaccggaaaatgcgat

SEQ ID NO: 33166 - DNA, 21 bp, synthetic construct
  source 1..21: mol_type = other DNA
tgtggaccgcggaatcccgag

SEQ ID NO: 33167 - DNA, 21 bp, synthetic construct
  source 1..21: mol_type = other DNA
agagacaatggatgtaaggaa

SEQ ID NO: 33168 - DNA, 21 bp, synthetic construct
  source 1..21: mol_type = other DNA
tacagtagaatcaacaacaat

SEQ ID NO: 33169 - DNA, 21 bp, synthetic construct
  source 1..21: mol_type = other DNA
ggaagtactgtatgtaaagat

SEQ ID NO: 33170 - DNA, 21 bp, synthetic construct
  source 1..21: mol_type = other DNA
tactggagtgaaatacgcgaa

SEQ ID NO: 33171 - DNA, 21 bp, synthetic construct
  source 1..21: mol_type = other DNA
tatgctcgccacggcgcgaat

SEQ ID NO: 33172 - DNA, 21 bp, synthetic construct
  source 1..21: mol_type = other DNA
ttctcgaaaatgaactttaac

SEQ ID NO: 33173 - DNA, 21 bp, synthetic construct
  source 1..21: mol_type = other DNA
ccgtacgctgcgtcaagagac

SEQ ID NO: 33174 - DNA, 21 bp, synthetic construct
  source 1..21: mol_type = other DNA
aacgccgctgttggaaattgc

SEQ ID NO: 33175 - DNA, 21 bp, synthetic construct
  source 1..21: mol_type = other DNA
tggttcacgggcaggatagat

SEQ ID NO: 33176 - DNA, 21 bp, synthetic construct
  source 1..21: mol_type = other DNA
tattatacaggcgtaacccga

SEQ ID NO: 33177 - DNA, 21 bp, synthetic construct
  source 1..21: mol_type = other DNA
ttctctcggatgaacctgaat

SEQ ID NO: 33178 - DNA, 21 bp, synthetic construct
  source 1..21: mol_type = other DNA
ggtggggaatcatctgtatgg

SEQ ID NO: 33179 - DNA, 21 bp, synthetic construct
  source 1..21: mol_type = other DNA
gggagcccgggcgtacagtgg

SEQ ID NO: 33180 - DNA, 21 bp, synthetic construct
  source 1..21: mol_type = other DNA
tgggacagcaccaatggcatt

SEQ ID NO: 33181 - DNA, 21 bp, synthetic construct
  source 1..21: mol_type = other DNA
aacttagaatcacgtgaatgg

SEQ ID NO: 33182 - DNA, 21 bp, synthetic construct
  source 1..21: mol_type = other DNA
atgacgggaacatcgtgtaat

SEQ ID NO: 33183 - DNA, 21 bp, synthetic construct
  source 1..21: mol_type = other DNA
atgaagggtagttgtgaacaa

SEQ ID NO: 33184 - DNA, 21 bp, synthetic construct
  source 1..21: mol_type = other DNA
aaggatgattttgtggtattc

SEQ ID NO: 33185 - DNA, 21 bp, synthetic construct
  source 1..21: mol_type = other DNA
acatgggatgggatgattgct

SEQ ID NO: 33186 - DNA, 21 bp, synthetic construct
  source 1..21: mol_type = other DNA
tattgggcagggaaatacgat

SEQ ID NO: 33187 - DNA, 21 bp, synthetic construct
  source 1..21: mol_type = other DNA
gtggaatttgagtggagcgac

SEQ ID NO: 33188 - DNA, 21 bp, synthetic construct
  source 1..21: mol_type = other DNA
aagacagaattttgcgcagca

SEQ ID NO: 33189 - DNA, 21 bp, synthetic construct
  source 1..21: mol_type = other DNA
tgccgccccagcggtttggaa

SEQ ID NO: 33190 - DNA, 21 bp, synthetic construct
  source 1..21: mol_type = other DNA
gactatgcatctagggactgg

SEQ ID NO: 33191 - DNA, 21 bp, synthetic construct
  source 1..21: mol_type = other DNA
tatgcgcgcgggaatgctaac

SEQ ID NO: 33192 - DNA, 21 bp, synthetic construct
  source 1..21: mol_type = other DNA
tttaactctactaacggacgc

SEQ ID NO: 33193 - DNA, 21 bp, synthetic construct
  source 1..21: mol_type = other DNA
ggtgctggaacaaagtgcggg

SEQ ID NO: 33194 - DNA, 21 bp, synthetic construct
  source 1..21: mol_type = other DNA
tgtaagggaccgtacagcgag

SEQ ID NO: 33195 - DNA, 21 bp, synthetic construct
  source 1..21: mol_type = other DNA
cgggacccaggagttagatgg

SEQ ID NO: 33196 - DNA, 21 bp, synthetic construct
  source 1..21: mol_type = other DNA
tacaataacaagacgacatgt

SEQ ID NO: 33197 - DNA, 21 bp, synthetic construct
  source 1..21: mol_type = other DNA
tattacagtgggcagagggat

SEQ ID NO: 33198 - DNA, 21 bp, synthetic construct
  source 1..21: mol_type = other DNA
tgcaaaccgggctcccccatt

SEQ ID NO: 33199 - DNA, 21 bp, synthetic construct
  source 1..21: mol_type = other DNA
tgtaagccaggtaacgcagcc

SEQ ID NO: 33200 - DNA, 21 bp, synthetic construct
  source 1..21: mol_type = other DNA
tatcacaggctggacgccatg

SEQ ID NO: 33201 - DNA, 21 bp, synthetic construct
  source 1..21: mol_type = other DNA
tacttcagcggaatgccattg

SEQ ID NO: 33202 - DNA, 21 bp, synthetic construct
  source 1..21: mol_type = other DNA
tgtaagttgccaaaatcggaa

SEQ ID NO: 33203 - DNA, 21 bp, synthetic construct
  source 1..21: mol_type = other DNA
tatttcagcggcacctaccaa

SEQ ID NO: 33204 - DNA, 21 bp, synthetic construct
  source 1..21: mol_type = other DNA
ggcgggggcgtctctcgctgg

SEQ ID NO: 33205 - DNA, 21 bp, synthetic construct
  source 1..21: mol_type = other DNA
acggagccggggtgtaaagaa

SEQ ID NO: 33206 - DNA, 21 bp, synthetic construct
  source 1..21: mol_type = other DNA
cgtgacgcagacgtgtaccct

SEQ ID NO: 33207 - DNA, 21 bp, synthetic construct
  source 1..21: mol_type = other DNA
tattggagtggtcagattgca

SEQ ID NO: 33208 - DNA, 21 bp, synthetic construct
  source 1..21: mol_type = other DNA
ggttcttggataccacatggt

SEQ ID NO: 33209 - DNA, 21 bp, synthetic construct
  source 1..21: mol_type = other DNA
tataccagaactcaggcctac

SEQ ID NO: 33210 - DNA, 21 bp, synthetic construct
  source 1..21: mol_type = other DNA
tatagtcgaggcaatctcaat

SEQ ID NO: 33211 - DNA, 21 bp, synthetic construct
  source 1..21: mol_type = other DNA
agggcgttcgatgcttacgaa

SEQ ID NO: 33212 - DNA, 21 bp, synthetic construct
  source 1..21: mol_type = other DNA
tttttttccggggtacaagcc

SEQ ID NO: 33213 - DNA, 21 bp, synthetic construct
  source 1..21: mol_type = other DNA
tacttccatggcatgactgac

SEQ ID NO: 33214 - DNA, 21 bp, synthetic construct
  source 1..21: mol_type = other DNA
tatagcagaagtaatccaaat

SEQ ID NO: 33215 - DNA, 21 bp, synthetic construct
  source 1..21: mol_type = other DNA
tactccagagggaaccccaac

SEQ ID NO: 33216 - DNA, 21 bp, synthetic construct
  source 1..21: mol_type = other DNA
tatagcagaaatggcttcaat

SEQ ID NO: 33217 - DNA, 21 bp, synthetic construct
  source 1..21: mol_type = other DNA
tttttttcgggacgcctggag

SEQ ID NO: 33218 - DNA, 21 bp, synthetic construct
  source 1..21: mol_type = other DNA
tacgcacgctcaggatataac

SEQ ID NO: 33219 - DNA, 21 bp, synthetic construct
  source 1..21: mol_type = other DNA
tactttcaaggaattcacgcg

SEQ ID NO: 33220 - DNA, 21 bp, synthetic construct
  source 1..21: mol_type = other DNA
agggatgaattcatgagcttc

SEQ ID NO: 33221 - DNA, 21 bp, synthetic construct
  source 1..21: mol_type = other DNA
catctcgccagccacacgtgg

SEQ ID NO: 33222 - DNA, 21 bp, synthetic construct
  source 1..21: mol_type = other DNA
ggaggcatgggcagtcaatgg

SEQ ID NO: 33223 - DNA, 21 bp, synthetic construct
  source 1..21: mol_type = other DNA
tgtatgagcagagccgttgct

SEQ ID NO: 33224 - DNA, 21 bp, synthetic construct
  source 1..21: mol_type = other DNA
tgtaagccgcaggcgggacct

SEQ ID NO: 33225 - DNA, 21 bp, synthetic construct
  source 1..21: mol_type = other DNA
ttctttaccggggcgtgcgac

SEQ ID NO: 33226 - DNA, 21 bp, synthetic construct
  source 1..21: mol_type = other DNA
tgtaaagaaggtagcagttgg

SEQ ID NO: 33227 - DNA, 21 bp, synthetic construct
  source 1..21: mol_type = other DNA
gggggcagtggcacccaatgc

SEQ ID NO: 33228 - DNA, 21 bp, synthetic construct
  source 1..21: mol_type = other DNA
tacaccagactcaacgacggg

SEQ ID NO: 33229 - DNA, 21 bp, synthetic construct
  source 1..21: mol_type = other DNA
agagggccggatacgttcccg

SEQ ID NO: 33230 - DNA, 21 bp, synthetic construct
  source 1..21: mol_type = other DNA
tattatagcgggagacttgag

SEQ ID NO: 33231 - DNA, 21 bp, synthetic construct
  source 1..21: mol_type = other DNA
tccgggggtgggctcttcccg

SEQ ID NO: 33232 - DNA, 21 bp, synthetic construct
  source 1..21: mol_type = other DNA
tgccgcccgcctatgccacca

SEQ ID NO: 33233 - DNA, 21 bp, synthetic construct
  source 1..21: mol_type = other DNA
atgacgtcgacgaatggcgtg

SEQ ID NO: 33234 - DNA, 21 bp, synthetic construct
  source 1..21: mol_type = other DNA
tggtcagccgccgtacaatgc

SEQ ID NO: 33235 - DNA, 21 bp, synthetic construct
  source 1..21: mol_type = other DNA
tacgccagacagaaccccaat

SEQ ID NO: 33236 - DNA, 21 bp, synthetic construct
  source 1..21: mol_type = other DNA
tgcaataagccgatgattgca

SEQ ID NO: 33237 - DNA, 21 bp, synthetic construct
  source 1..21: mol_type = other DNA
gtcgatagcactcatggagtc

SEQ ID NO: 33238 - DNA, 21 bp, synthetic construct
  source 1..21: mol_type = other DNA
ggttccattggcgttgcttgg

SEQ ID NO: 33239 - DNA, 21 bp, synthetic construct
  source 1..21: mol_type = other DNA
tgcaaaccccaggcggggacg

SEQ ID NO: 33240 - DNA, 21 bp, synthetic construct
  source 1..21: mol_type = other DNA
aagggtgacagccgggattgg

SEQ ID NO: 33241 - DNA, 21 bp, synthetic construct
  source 1..21: mol_type = other DNA
gagcttgggtcgcatacgtgg

SEQ ID NO: 33242 - DNA, 21 bp, synthetic construct
  source 1..21: mol_type = other DNA
tatttcagtggcagggcccaa

SEQ ID NO: 33243 - DNA, 21 bp, synthetic construct
  source 1..21: mol_type = other DNA
tattcacgacaaggcacaaac

SEQ ID NO: 33244 - DNA, 21 bp, synthetic construct
  source 1..21: mol_type = other DNA
tatagtagacagggagaaaat

SEQ ID NO: 33245 - DNA, 21 bp, synthetic construct
  source 1..21: mol_type = other DNA
gtaccggaacgctgtcctctc

SEQ ID NO: 33246 - DNA, 21 bp, synthetic construct
  source 1..21: mol_type = other DNA
taccacgctaaatcaacaaac

SEQ ID NO: 33247 - DNA, 21 bp, synthetic construct
  source 1..21: mol_type = other DNA
cgaatggaagaccatggatgg

SEQ ID NO: 33248 - DNA, 21 bp, synthetic construct
  source 1..21: mol_type = other DNA
tgcaaacctaatagcggcgga

SEQ ID NO: 33249 - DNA, 21 bp, synthetic construct
  source 1..21: mol_type = other DNA
aggttggaaagtgtcaattgg

SEQ ID NO: 33250 - DNA, 21 bp, synthetic construct
  source 1..21: mol_type = other DNA
ggttgccggcatggcgacagt

SEQ ID NO: 33251 - DNA, 21 bp, synthetic construct
  source 1..21: mol_type = other DNA
tgggtgagatcagatgtaaag

SEQ ID NO: 33252 - DNA, 21 bp, synthetic construct
  source 1..21: mol_type = other DNA
tacttttcgggccaagcagag

SEQ ID NO: 33253 - DNA, 21 bp, synthetic construct
  source 1..21: mol_type = other DNA
tactattcgggggtatcagca

SEQ ID NO: 33254 - DNA, 21 bp, synthetic construct
  source 1..21: mol_type = other DNA
ttggccagaaatggctggaat

SEQ ID NO: 33255 - DNA, 21 bp, synthetic construct
  source 1..21: mol_type = other DNA
tattggaccggaatgccagaa

SEQ ID NO: 33256 - DNA, 21 bp, synthetic construct
  source 1..21: mol_type = other DNA
tcaatgcaagacaggatgtgg

SEQ ID NO: 33257 - DNA, 21 bp, synthetic construct
  source 1..21: mol_type = other DNA
tacttccagggtatacaggct

SEQ ID NO: 33258 - DNA, 21 bp, synthetic construct
  source 1..21: mol_type = other DNA
gccagtgacgagtggcgcgat

SEQ ID NO: 33259 - DNA, 21 bp, synthetic construct
  source 1..21: mol_type = other DNA
tggtggtcggcgatacgtgaa

SEQ ID NO: 33260 - DNA, 21 bp, synthetic construct
  source 1..21: mol_type = other DNA
atcggtagtactaatggtata

SEQ ID NO: 33261 - DNA, 21 bp, synthetic construct
  source 1..21: mol_type = other DNA
tacagtaggttgtcggagttt

SEQ ID NO: 33262 - DNA, 21 bp, synthetic construct
  source 1..21: mol_type = other DNA
tggacacacatgtgcaaagca

SEQ ID NO: 33263 - DNA, 21 bp, synthetic construct
  source 1..21: mol_type = other DNA
agggccgaggcagtccggtgg

SEQ ID NO: 33264 - DNA, 21 bp, synthetic construct
  source 1..21: mol_type = other DNA
tattggagtggacaagtagaa

SEQ ID NO: 33265 - DNA, 21 bp, synthetic construct
  source 1..21: mol_type = other DNA
ttgacgaggccatgctcagag

SEQ ID NO: 33266 - DNA, 21 bp, synthetic construct
  source 1..21: mol_type = other DNA
tccatgcaggacaggcattgg

SEQ ID NO: 33267 - DNA, 21 bp, synthetic construct
  source 1..21: mol_type = other DNA
cggaacgaatacaccacttac

SEQ ID NO: 33268 - DNA, 21 bp, synthetic construct
  source 1..21: mol_type = other DNA
tacgttgcacaatgccaagtc

SEQ ID NO: 33269 - DNA, 21 bp, synthetic construct
  source 1..21: mol_type = other DNA
tattggagtgctgtaacagcc

SEQ ID NO: 33270 - DNA, 21 bp, synthetic construct
  source 1..21: mol_type = other DNA
acatggagtggagataacgct

SEQ ID NO: 33271 - DNA, 21 bp, synthetic construct
  source 1..21: mol_type = other DNA
attgcgcacgagggcgctgga

SEQ ID NO: 33272 - DNA, 21 bp, synthetic construct
  source 1..21: mol_type = other DNA
tattcacgcgtcaattctaac

SEQ ID NO: 33273 - DNA, 21 bp, synthetic construct
  source 1..21: mol_type = other DNA
tgcaaaatcgctagtgttcca

SEQ ID NO: 33274 - DNA, 21 bp, synthetic construct
  source 1..21: mol_type = other DNA
tacttctctggagagagagca

SEQ ID NO: 33275 - DNA, 21 bp, synthetic construct
  source 1..21: mol_type = other DNA
gatctcggtgacagaaaatgg

SEQ ID NO: 33276 - DNA, 21 bp, synthetic construct
  source 1..21: mol_type = other DNA
tgtaaattgaacggtcccgac

SEQ ID NO: 33277 - DNA, 21 bp, synthetic construct
  source 1..21: mol_type = other DNA
ggaatagatgtcgtacgatgg

SEQ ID NO: 33278 - DNA, 21 bp, synthetic construct
  source 1..21: mol_type = other DNA
tattggtccgagattagggag

SEQ ID NO: 33279 - DNA, 21 bp, synthetic construct
  source 1..21: mol_type = other DNA
tattcacgtatgaattctaac

SEQ ID NO: 33280 - DNA, 21 bp, synthetic construct
  source 1..21: mol_type = other DNA
gtcgactcgagggaaggcagg

SEQ ID NO: 33281 - DNA, 21 bp, synthetic construct
  source 1..21: mol_type = other DNA
aaatttgattttacaggcgtt

SEQ ID NO: 33282 - DNA, 21 bp, synthetic construct
  source 1..21: mol_type = other DNA
tatgaatacgggtgtaaggaa

SEQ ID NO: 33283 - DNA, 21 bp, synthetic construct
  source 1..21: mol_type = other DNA
tgtaaaccggaaatgcttcgt

SEQ ID NO: 33284 - DNA, 21 bp, synthetic construct
  source 1..21: mol_type = other DNA
ctctccaggatgaacatgaat

SEQ ID NO: 33285 - DNA, 21 bp, synthetic construct
  source 1..21: mol_type = other DNA
ttaagtcgatcaggcacaaat

SEQ ID NO: 33286 - DNA, 21 bp, synthetic construct
  source 1..21: mol_type = other DNA
agggacgatgggtcctattgg

SEQ ID NO: 33287 - DNA, 21 bp, synthetic construct
  source 1..21: mol_type = other DNA
aatgcattggaggggaaggac

SEQ ID NO: 33288 - DNA, 21 bp, synthetic construct
  source 1..21: mol_type = other DNA
tatgagaacggttgtaaggag

SEQ ID NO: 33289 - DNA, 21 bp, synthetic construct
  source 1..21: mol_type = other DNA
tattactcaggcgtacaagca

SEQ ID NO: 33290 - DNA, 21 bp, synthetic construct
  source 1..21: mol_type = other DNA
cgtgagtccactaatggtgtg

SEQ ID NO: 33291 - DNA, 21 bp, synthetic construct
  source 1..21: mol_type = other DNA
ttttttactggcactcatgag

SEQ ID NO: 33292 - DNA, 21 bp, synthetic construct
  source 1..21: mol_type = other DNA
atcgtgtctaccaatggacgt

SEQ ID NO: 33293 - DNA, 21 bp, synthetic construct
  source 1..21: mol_type = other DNA
gatatgcgcatgggaacgtgg

SEQ ID NO: 33294 - DNA, 21 bp, synthetic construct
  source 1..21: mol_type = other DNA
tgtattaagccaatgaccgca

SEQ ID NO: 33295 - DNA, 21 bp, synthetic construct
  source 1..21: mol_type = other DNA
acatgggatggttacgacgcg

SEQ ID NO: 33296 - DNA, 21 bp, synthetic construct
  source 1..21: mol_type = other DNA
tactcaagggggaacgacaat

SEQ ID NO: 33297 - DNA, 21 bp, synthetic construct
  source 1..21: mol_type = other DNA
agagacgatttcagtccatat

SEQ ID NO: 33298 - DNA, 21 bp, synthetic construct
  source 1..21: mol_type = other DNA
agggaagagatagttcgctgg

SEQ ID NO: 33299 - DNA, 21 bp, synthetic construct
  source 1..21: mol_type = other DNA
gagtcttcttcacgtacatgg

SEQ ID NO: 33300 - DNA, 21 bp, synthetic construct
  source 1..21: mol_type = other DNA
tgggacgtcggtacttggaat

SEQ ID NO: 33301 - DNA, 21 bp, synthetic construct
  source 1..21: mol_type = other DNA
tatgttcgtagtcagcctcag

SEQ ID NO: 33302 - DNA, 21 bp, synthetic construct
  source 1..21: mol_type = other DNA
cgtaatgagtttagtgggttt

SEQ ID NO: 33303 - DNA, 21 bp, synthetic construct
  source 1..21: mol_type = other DNA
tgcaaacctcaagctcttact

SEQ ID NO: 33304 - DNA, 21 bp, synthetic construct
  source 1..21: mol_type = other DNA
tacttttccggccaacaatca

SEQ ID NO: 33305 - DNA, 21 bp, synthetic construct
  source 1..21: mol_type = other DNA
ttaagtcgcatgaacgataac

SEQ ID NO: 33306 - DNA, 21 bp, synthetic construct
  source 1..21: mol_type = other DNA
tattggcagggcaagatagct

SEQ ID NO: 33307 - DNA, 21 bp, synthetic construct
  source 1..21: mol_type = other DNA
tacagtagaatgaatactaac

SEQ ID NO: 33308 - DNA, 21 bp, synthetic construct
  source 1..21: mol_type = other DNA
tattctagaagtggatttaac

SEQ ID NO: 33309 - DNA, 21 bp, synthetic construct
  source 1..21: mol_type = other DNA
tataagagtaacaccacgtgt

SEQ ID NO: 33310 - DNA, 21 bp, synthetic construct
  source 1..21: mol_type = other DNA
aatgcgcttgactggcgtgac

SEQ ID NO: 33311 - DNA, 21 bp, synthetic construct
  source 1..21: mol_type = other DNA
tgccggccccaaacaccgagt

SEQ ID NO: 33312 - DNA, 21 bp, synthetic construct
  source 1..21: mol_type = other DNA
aggcctgagacctgtccgagg

SEQ ID NO: 33313 - DNA, 21 bp, synthetic construct
  source 1..21: mol_type = other DNA
tttttcacggggaagctcgat

SEQ ID NO: 33314 - DNA, 21 bp, synthetic construct
  source 1..21: mol_type = other DNA
ttctcgaaagctggctataac

SEQ ID NO: 33315 - DNA, 21 bp, synthetic construct
  source 1..21: mol_type = other DNA
agagatgaattcctatcgtat

SEQ ID NO: 33316 - DNA, 21 bp, synthetic construct
  source 1..21: mol_type = other DNA
tattccagaactaacgagaac

SEQ ID NO: 33317 - DNA, 21 bp, synthetic construct
  source 1..21: mol_type = other DNA
cattttagtaccaacgggatc

SEQ ID NO: 33318 - DNA, 21 bp, synthetic construct
  source 1..21: mol_type = other DNA
tactacacaggtgttaaagga

SEQ ID NO: 33319 - DNA, 21 bp, synthetic construct
  source 1..21: mol_type = other DNA
cgcgggcacgacgttttcccg

SEQ ID NO: 33320 - DNA, 21 bp, synthetic construct
  source 1..21: mol_type = other DNA
cgcagtgaattccgcacatat

SEQ ID NO: 33321 - DNA, 21 bp, synthetic construct
  source 1..21: mol_type = other DNA
cgagagggtactagcttatgg

SEQ ID NO: 33322 - DNA, 21 bp, synthetic construct
  source 1..21: mol_type = other DNA
tgcactagcaaggtagggcac

SEQ ID NO: 33323 - DNA, 21 bp, synthetic construct
  source 1..21: mol_type = other DNA
tgtaggcctcaggcgggcgct

SEQ ID NO: 33324 - DNA, 21 bp, synthetic construct
  source 1..21: mol_type = other DNA
tattattcaggctataaggat

SEQ ID NO: 33325 - DNA, 21 bp, synthetic construct
  source 1..21: mol_type = other DNA
cagcagtcaaccaatggtcgg

SEQ ID NO: 33326 - DNA, 21 bp, synthetic construct
  source 1..21: mol_type = other DNA
tttagccgtatgaacgtaaat

SEQ ID NO: 33327 - DNA, 21 bp, synthetic construct
  source 1..21: mol_type = other DNA
tgcaagatgcccggaatggat

SEQ ID NO: 33328 - DNA, 21 bp, synthetic construct
  source 1..21: mol_type = other DNA
tatttcactggcgttacggta

SEQ ID NO: 33329 - DNA, 21 bp, synthetic construct
  source 1..21: mol_type = other DNA
tatcataaattagacaatatg

SEQ ID NO: 33330 - DNA, 21 bp, synthetic construct
  source 1..21: mol_type = other DNA
cgcacgtacgacacgtatgca

SEQ ID NO: 33331 - DNA, 21 bp, synthetic construct
  source 1..21: mol_type = other DNA
tggttcagcggaaaggtcgac

SEQ ID NO: 33332 - DNA, 21 bp, synthetic construct
  source 1..21: mol_type = other DNA
tatgcgcgccagggctcgaac

SEQ ID NO: 33333 - DNA, 21 bp, synthetic construct
  source 1..21: mol_type = other DNA
gtattgcatagttccaattgg

SEQ ID NO: 33334 - DNA, 21 bp, synthetic construct
  source 1..21: mol_type = other DNA
tacagccgatttcatttgaat

SEQ ID NO: 33335 - DNA, 21 bp, synthetic construct
  source 1..21: mol_type = other DNA
ttcaccaaatcgtgtccagtg

SEQ ID NO: 33336 - DNA, 21 bp, synthetic construct
  source 1..21: mol_type = other DNA
atcggggttaaaggctgggat

SEQ ID NO: 33337 - DNA, 21 bp, synthetic construct
  source 1..21: mol_type = other DNA
tacgccagaagcaatgacaac

SEQ ID NO: 33338 - DNA, 21 bp, synthetic construct
  source 1..21: mol_type = other DNA
tactcccgcaataatatcaat

SEQ ID NO: 33339 - DNA, 21 bp, synthetic construct
  source 1..21: mol_type = other DNA
tattctcgtgtcaacatgaac

SEQ ID NO: 33340 - DNA, 21 bp, synthetic construct
  source 1..21: mol_type = other DNA
cagtacgcgcgttctatgatg

SEQ ID NO: 33341 - DNA, 21 bp, synthetic construct
  source 1..21: mol_type = other DNA
cgcgagggaacgtccagctgg

SEQ ID NO: 33342 - DNA, 21 bp, synthetic construct
  source 1..21: mol_type = other DNA
tacttcgcgggtaaacaggaa

SEQ ID NO: 33343 - DNA, 21 bp, synthetic construct
  source 1..21: mol_type = other DNA
ttctctcggttgggggtgaat

SEQ ID NO: 33344 - DNA, 21 bp, synthetic construct
  source 1..21: mol_type = other DNA
ggaaacgctaccagccactgg

SEQ ID NO: 33345 - DNA, 21 bp, synthetic construct
  source 1..21: mol_type = other DNA
tactgggccgggattactgag

SEQ ID NO: 33346 - DNA, 21 bp, synthetic construct
  source 1..21: mol_type = other DNA
cgcgatgacggaagttactgg

SEQ ID NO: 33347 - DNA, 21 bp, synthetic construct
  source 1..21: mol_type = other DNA
tatgctaagatcggatttaat

SEQ ID NO: 33348 - DNA, 21 bp, synthetic construct
  source 1..21: mol_type = other DNA
tgtaaacctcccatgttcgaa

SEQ ID NO: 33349 - DNA, 21 bp, synthetic construct
  source 1..21: mol_type = other DNA
tattggagtgcggtgacggaa

SEQ ID NO: 33350 - DNA, 21 bp, synthetic construct
  source 1..21: mol_type = other DNA
tacgcgaagtcgaaccccaac

SEQ ID NO: 33351 - DNA, 21 bp, synthetic construct
  source 1..21: mol_type = other DNA
tgcgccaaacaatgcaaacct

SEQ ID NO: 33352 - DNA, 21 bp, synthetic construct
  source 1..21: mol_type = other DNA
tgtaataaaccgagtacagct

SEQ ID NO: 33353 - DNA, 21 bp, synthetic construct
  source 1..21: mol_type = other DNA
tgcaagcccgtaaaaggcgag

SEQ ID NO: 33354 - DNA, 21 bp, synthetic construct
  source 1..21: mol_type = other DNA
tatgcgaaaggaaatgcaaat

SEQ ID NO: 33355 - DNA, 21 bp, synthetic construct
  source 1..21: mol_type = other DNA
tacttctcaggtactcatagt

SEQ ID NO: 33356 - DNA, 21 bp, synthetic construct
  source 1..21: mol_type = other DNA
tgcaagttgccaaagatggaa

SEQ ID NO: 33357 - DNA, 21 bp, synthetic construct
  source 1..21: mol_type = other DNA
tattggcacggcaagccagac

SEQ ID NO: 33358 - DNA, 21 bp, synthetic construct
  source 1..21: mol_type = other DNA
ggtgatgagtacgttgcattc

SEQ ID NO: 33359 - DNA, 21 bp, synthetic construct
  source 1..21: mol_type = other DNA
ccttatgcagccagccgcgat

SEQ ID NO: 33360 - DNA, 21 bp, synthetic construct
  source 1..21: mol_type = other DNA
gctggccatgaccgtgggtgg

SEQ ID NO: 33361 - DNA, 21 bp, synthetic construct
  source 1..21: mol_type = other DNA
tgggttcgttccgatactaaa

SEQ ID NO: 33362 - DNA, 21 bp, synthetic construct
  source 1..21: mol_type = other DNA
tattcgaggatgggtgagaac

SEQ ID NO: 33363 - DNA, 21 bp, synthetic construct
  source 1..21: mol_type = other DNA
cgcatggaagaagtatttccc

SEQ ID NO: 33364 - DNA, 21 bp, synthetic construct
  source 1..21: mol_type = other DNA
atgacaggaacttcgtgtcca

SEQ ID NO: 33365 - DNA, 21 bp, synthetic construct
  source 1..21: mol_type = other DNA
aatatgcaagaccgctcctgg

SEQ ID NO: 33366 - DNA, 21 bp, synthetic construct
  source 1..21: mol_type = other DNA
atgacagtagattgcagccgt

SEQ ID NO: 33367 - DNA, 21 bp, synthetic construct
  source 1..21: mol_type = other DNA
ccttatgcgaaatcagttgat

SEQ ID NO: 33368 - DNA, 21 bp, synthetic construct
  source 1..21: mol_type = other DNA
tatttcagtggtcagcaaagc

SEQ ID NO: 33369 - DNA, 21 bp, synthetic construct
  source 1..21: mol_type = other DNA
ttttggtccgggaagttagag

SEQ ID NO: 33370 - DNA, 21 bp, synthetic construct
  source 1..21: mol_type = other DNA
gacggatcaaacaagtcttgt

SEQ ID NO: 33371 - DNA, 21 bp, synthetic construct
  source 1..21: mol_type = other DNA
tgtaaacctatgcaaatgccg

SEQ ID NO: 33372 - DNA, 21 bp, synthetic construct
  source 1..21: mol_type = other DNA
tgcaagcccgggtcgccccat

SEQ ID NO: 33373 - DNA, 21 bp, synthetic construct
  source 1..21: mol_type = other DNA
gggggtgaagcgagccgttgg

SEQ ID NO: 33374 - DNA, 21 bp, synthetic construct
  source 1..21: mol_type = other DNA
tacgcccgagcaggtatgaat

SEQ ID NO: 33375 - DNA, 21 bp, synthetic construct
  source 1..21: mol_type = other DNA
atggaagactatgttagctat

SEQ ID NO: 33376 - DNA, 21 bp, synthetic construct
  source 1..21: mol_type = other DNA
gtcttaacaagccagatttgg

SEQ ID NO: 33377 - DNA, 21 bp, synthetic construct
  source 1..21: mol_type = other DNA
gtaggaagctcgaatggtgtt

SEQ ID NO: 33378 - DNA, 21 bp, synthetic construct
  source 1..21: mol_type = other DNA
tatagccggcaaaacatgaac

SEQ ID NO: 33379 - DNA, 21 bp, synthetic construct
  source 1..21: mol_type = other DNA
tgcaagcctggggccgccagc

SEQ ID NO: 33380 - DNA, 21 bp, synthetic construct
  source 1..21: mol_type = other DNA
aagtacgatcatgtaacatgg

SEQ ID NO: 33381 - DNA, 21 bp, synthetic construct
  source 1..21: mol_type = other DNA
tatgaacctgggtgcaaaatt

SEQ ID NO: 33382 - DNA, 21 bp, synthetic construct
  source 1..21: mol_type = other DNA
tacagtaggataaatatgaat

SEQ ID NO: 33383 - DNA, 21 bp, synthetic construct
  source 1..21: mol_type = other DNA
ttttggagtggtataccggag

SEQ ID NO: 33384 - DNA, 21 bp, synthetic construct
  source 1..21: mol_type = other DNA
tacacgaggtcacagacggag

SEQ ID NO: 33385 - DNA, 21 bp, synthetic construct
  source 1..21: mol_type = other DNA
ctcgctcgaatgggggtaaat

SEQ ID NO: 33386 - DNA, 21 bp, synthetic construct
  source 1..21: mol_type = other DNA
cattgtccaacaataccaatg

SEQ ID NO: 33387 - DNA, 21 bp, synthetic construct
  source 1..21: mol_type = other DNA
agagctttcgatagctatccc

SEQ ID NO: 33388 - DNA, 21 bp, synthetic construct
  source 1..21: mol_type = other DNA
tgtaaagctactatacccgga

SEQ ID NO: 33389 - DNA, 21 bp, synthetic construct
  source 1..21: mol_type = other DNA
tactactcggggatccactcg

SEQ ID NO: 33390 - DNA, 21 bp, synthetic construct
  source 1..21: mol_type = other DNA
tattggtccgggacgaatgca

SEQ ID NO: 33391 - DNA, 21 bp, synthetic construct
  source 1..21: mol_type = other DNA
aaagacgacttcaatatattc

SEQ ID NO: 33392 - DNA, 21 bp, synthetic construct
  source 1..21: mol_type = other DNA
agaaacgagttcacatcatac

SEQ ID NO: 33393 - DNA, 21 bp, synthetic construct
  source 1..21: mol_type = other DNA
cgagatgattttgtttcattt

SEQ ID NO: 33394 - DNA, 21 bp, synthetic construct
  source 1..21: mol_type = other DNA
tgcaaagacaaccgagctttg

SEQ ID NO: 33395 - DNA, 21 bp, synthetic construct
  source 1..21: mol_type = other DNA
tattaccatgggattgccgca

SEQ ID NO: 33396 - DNA, 21 bp, synthetic construct
  source 1..21: mol_type = other DNA
tactttcatgggcgacccgat

SEQ ID NO: 33397 - DNA, 21 bp, synthetic construct
  source 1..21: mol_type = other DNA
gcccccgacacagtgaggtgg

SEQ ID NO: 33398 - DNA, 21 bp, synthetic construct
  source 1..21: mol_type = other DNA
tggtacagcggcgtgaaagcc

SEQ ID NO: 33399 - DNA, 21 bp, synthetic construct
  source 1..21: mol_type = other DNA
gtagactcaacgcatggggtc

SEQ ID NO: 33400 - DNA, 21 bp, synthetic construct
  source 1..21: mol_type = other DNA
tactctaaatataattataac

SEQ ID NO: 33401 - DNA, 21 bp, synthetic construct
  source 1..21: mol_type = other DNA
tttgtctccactaatggagta

SEQ ID NO: 33402 - DNA, 21 bp, synthetic construct
  source 1..21: mol_type = other DNA
ttacccaaaatggggtgtgcg

SEQ ID NO: 33403 - DNA, 21 bp, synthetic construct
  source 1..21: mol_type = other DNA
tgcaaggctcccaagtacgat

SEQ ID NO: 33404 - DNA, 21 bp, synthetic construct
  source 1..21: mol_type = other DNA
tgcatgagtgacaaacgcgca

SEQ ID NO: 33405 - DNA, 21 bp, synthetic construct
  source 1..21: mol_type = other DNA
tattcaagacaaaatgaaaac

SEQ ID NO: 33406 - DNA, 21 bp, synthetic construct
  source 1..21: mol_type = other DNA
taccatgccaaatcaccatgc

SEQ ID NO: 33407 - DNA, 21 bp, synthetic construct
  source 1..21: mol_type = other DNA
tatgcacgtggcggcactaat

SEQ ID NO: 33408 - DNA, 21 bp, synthetic construct
  source 1..21: mol_type = other DNA
tgcaagcccccctcaagggat

SEQ ID NO: 33409 - DNA, 21 bp, synthetic construct
  source 1..21: mol_type = other DNA
tgcaagccctcaggtgtcatg

SEQ ID NO: 33410 - DNA, 21 bp, synthetic construct
  source 1..21: mol_type = other DNA
tatagtagggtctcagtcaat

SEQ ID NO: 33411 - DNA, 21 bp, synthetic construct
  source 1..21: mol_type = other DNA
aagttcgacggaacagaatgc

SEQ ID NO: 33412 - DNA, 21 bp, synthetic construct
  source 1..21: mol_type = other DNA
cgtacttatgacacctatatc

SEQ ID NO: 33413 - DNA, 21 bp, synthetic construct
  source 1..21: mol_type = other DNA
aaggatgattacaccagattt

SEQ ID NO: 33414 - DNA, 21 bp, synthetic construct
  source 1..21: mol_type = other DNA
ttcttcagtggtcagattgcg

SEQ ID NO: 33415 - DNA, 21 bp, synthetic construct
  source 1..21: mol_type = other DNA
tactcacggaacaatccgaat

SEQ ID NO: 33416 - DNA, 21 bp, synthetic construct
  source 1..21: mol_type = other DNA
acgcagtcgagcaatggagtg

SEQ ID NO: 33417 - DNA, 21 bp, synthetic construct
  source 1..21: mol_type = other DNA
tacactcgacttaatccgatg

SEQ ID NO: 33418 - DNA, 21 bp, synthetic construct
  source 1..21: mol_type = other DNA
tatgctaaaaacggtagcaat

SEQ ID NO: 33419 - DNA, 21 bp, synthetic construct
  source 1..21: mol_type = other DNA
tgtaaaagtgacagtaaagtt

SEQ ID NO: 33420 - DNA, 21 bp, synthetic construct
  source 1..21: mol_type = other DNA
aaaagcgattatatggtatac

SEQ ID NO: 33421 - DNA, 21 bp, synthetic construct
  source 1..21: mol_type = other DNA
tgcaaacctgagaggatgagt

SEQ ID NO: 33422 - DNA, 21 bp, synthetic construct
  source 1..21: mol_type = other DNA
acctgggatggggataacgct

SEQ ID NO: 33423 - DNA, 21 bp, synthetic construct
  source 1..21: mol_type = other DNA
ggcggcccaggctccgtgtgg

SEQ ID NO: 33424 - DNA, 21 bp, synthetic construct
  source 1..21: mol_type = other DNA
tgggtaaagtcacagcagtgc

SEQ ID NO: 33425 - DNA, 21 bp, synthetic construct
  source 1..21: mol_type = other DNA
tatgcaaggcagaatcataac

SEQ ID NO: 33426 - DNA, 21 bp, synthetic construct
  source 1..21: mol_type = other DNA
ctcagcaaaaataattacaac

SEQ ID NO: 33427 - DNA, 21 bp, synthetic construct
  source 1..21: mol_type = other DNA
ccatgcccggtaaagcctgac

SEQ ID NO: 33428 - DNA, 21 bp, synthetic construct
  source 1..21: mol_type = other DNA
tattcgcggagtaacgttaac

SEQ ID NO: 33429 - DNA, 21 bp, synthetic construct
  source 1..21: mol_type = other DNA
tatgcgcgcggaaacctgaac

SEQ ID NO: 33430 - DNA, 21 bp, synthetic construct
  source 1..21: mol_type = other DNA
gtcgctactctagggtgggac

SEQ ID NO: 33431 - DNA, 21 bp, synthetic construct
  source 1..21: mol_type = other DNA
tgcaggagtgaaacaaagttg

SEQ ID NO: 33432 - DNA, 21 bp, synthetic construct
  source 1..21: mol_type = other DNA
tacttcacaggcgcacatgaa

SEQ ID NO: 33433 - DNA, 21 bp, synthetic construct
  source 1..21: mol_type = other DNA
tttttcacggggagaatggat

SEQ ID NO: 33434 - DNA, 21 bp, synthetic construct
  source 1..21: mol_type = other DNA
tgcataatgaaaaaactcgag

SEQ ID NO: 33435 - DNA, 21 bp, synthetic construct
  source 1..21: mol_type = other DNA
tacgcccgagggaacatgaat

SEQ ID NO: 33436 - DNA, 21 bp, synthetic construct
  source 1..21: mol_type = other DNA
tgtaataaacctatgatggca

SEQ ID NO: 33437 - DNA, 21 bp, synthetic construct
  source 1..21: mol_type = other DNA
cgcgggggcgatagggcttgg

SEQ ID NO: 33438 - DNA, 21 bp, synthetic construct
  source 1..21: mol_type = other DNA
aacatgggagaccgcaaatgg

SEQ ID NO: 33439 - DNA, 21 bp, synthetic construct
  source 1..21: mol_type = other DNA
ggttggggcactaaatgcggg

SEQ ID NO: 33440 - DNA, 21 bp, synthetic construct
  source 1..21: mol_type = other DNA
tattttatgggtaggtcggac

SEQ ID NO: 33441 - DNA, 21 bp, synthetic construct
  source 1..21: mol_type = other DNA
tgcaaagttaaatcgggcgag

SEQ ID NO: 33442 - DNA, 21 bp, synthetic construct
  source 1..21: mol_type = other DNA
tacagcaaaatgggggagaac

SEQ ID NO: 33443 - DNA, 21 bp, synthetic construct
  source 1..21: mol_type = other DNA
gctacaagcacaaacggagta

SEQ ID NO: 33444 - DNA, 21 bp, synthetic construct
  source 1..21: mol_type = other DNA
accacttctcagaatgggaga

SEQ ID NO: 33445 - DNA, 21 bp, synthetic construct
  source 1..21: mol_type = other DNA
atgaataattcaaccaaatgt

SEQ ID NO: 33446 - DNA, 21 bp, synthetic construct
  source 1..21: mol_type = other DNA
gggatagagcatgtcaggtgg

SEQ ID NO: 33447 - DNA, 21 bp, synthetic construct
  source 1..21: mol_type = other DNA
tctgatggggcttccaaatgg

SEQ ID NO: 33448 - DNA, 21 bp, synthetic construct
  source 1..21: mol_type = other DNA
tgccaaaaaccaatgacggca

SEQ ID NO: 33449 - DNA, 21 bp, synthetic construct
  source 1..21: mol_type = other DNA
tattttaccggcaacatagat

SEQ ID NO: 33450 - DNA, 21 bp, synthetic construct
  source 1..21: mol_type = other DNA
tattacactggaagagcggag

SEQ ID NO: 33451 - DNA, 21 bp, synthetic construct
  source 1..21: mol_type = other DNA
tgtaatacccctatgaccgct

SEQ ID NO: 33452 - DNA, 21 bp, synthetic construct
  source 1..21: mol_type = other DNA
aaaaaggaccattcctgtgat

SEQ ID NO: 33453 - DNA, 21 bp, synthetic construct
  source 1..21: mol_type = other DNA
atggacgactgggtcgtctac

SEQ ID NO: 33454 - DNA, 21 bp, synthetic construct
  source 1..21: mol_type = other DNA
atcggcgaaagggggtgggac

SEQ ID NO: 33455 - DNA, 21 bp, synthetic construct
  source 1..21: mol_type = other DNA
ggcatccggaacgtgatgtat

SEQ ID NO: 33456 - DNA, 21 bp, synthetic construct
  source 1..21: mol_type = other DNA
tgcaagagcgtatgcaagccc

SEQ ID NO: 33457 - DNA, 21 bp, synthetic construct
  source 1..21: mol_type = other DNA
aaaaatgattataactcgtgg

SEQ ID NO: 33458 - DNA, 21 bp, synthetic construct
  source 1..21: mol_type = other DNA
cgctcggacactgtatattgg

SEQ ID NO: 33459 - DNA, 21 bp, synthetic construct
  source 1..21: mol_type = other DNA
gatctacagtcatcatcttgg

SEQ ID NO: 33460 - DNA, 21 bp, synthetic construct
  source 1..21: mol_type = other DNA
gagacgccaatgtgtaaggcg

SEQ ID NO: 33461 - DNA, 21 bp, synthetic construct
  source 1..21: mol_type = other DNA
agagaccctggagtcaggtgg

SEQ ID NO: 33462 - DNA, 21 bp, synthetic construct
  source 1..21: mol_type = other DNA
tactctagagcgggagggtca

SEQ ID NO: 33463 - DNA, 21 bp, synthetic construct
  source 1..21: mol_type = other DNA
tgtcgcccagggacgcccggc

SEQ ID NO: 33464 - DNA, 21 bp, synthetic construct
  source 1..21: mol_type = other DNA
tttaaaggctcgtgtgaacag

SEQ ID NO: 33465 - DNA, 21 bp, synthetic construct
  source 1..21: mol_type = other DNA
gattcagcatccagagcatgg

SEQ ID NO: 33466 - DNA, 21 bp, synthetic construct
  source 1..21: mol_type = other DNA
tgcatgcccgattacagggag

SEQ ID NO: 33467 - DNA, 21 bp, synthetic construct
  source 1..21: mol_type = other DNA
cgcgacgattttgtatcattt

SEQ ID NO: 33468 - DNA, 21 bp, synthetic construct
  source 1..21: mol_type = other DNA
ttcttcacgggaaagatggac

SEQ ID NO: 33469 - DNA, 21 bp, synthetic construct
  source 1..21: mol_type = other DNA
atgagtagagttagcaacaac

SEQ ID NO: 33470 - DNA, 21 bp, synthetic construct
  source 1..21: mol_type = other DNA
tgggcgagaggttgtgataac

SEQ ID NO: 33471 - DNA, 21 bp, synthetic construct
  source 1..21: mol_type = other DNA
aactgcaagccgtgtctcacc

SEQ ID NO: 33472 - DNA, 21 bp, synthetic construct
  source 1..21: mol_type = other DNA
ttggtccgctacgaaaatgtt

SEQ ID NO: 33473 - DNA, 21 bp, synthetic construct
  source 1..21: mol_type = other DNA
acatatagtggggatcccgct

SEQ ID NO: 33474 - DNA, 21 bp, synthetic construct
  source 1..21: mol_type = other DNA
ggatcagagtttgaaaaatgg

SEQ ID NO: 33475 - DNA, 21 bp, synthetic construct
  source 1..21: mol_type = other DNA
tacgcaagacagaattataat

SEQ ID NO: 33476 - DNA, 21 bp, synthetic construct
  source 1..21: mol_type = other DNA
tgtcgcagtggtcctactcca

SEQ ID NO: 33477 - DNA, 21 bp, synthetic construct
  source 1..21: mol_type = other DNA
tattcaaggatggggcacaac

SEQ ID NO: 33478 - DNA, 21 bp, synthetic construct
  source 1..21: mol_type = other DNA
tatagccgcgttaattacaac

SEQ ID NO: 33479 - DNA, 21 bp, synthetic construct
  source 1..21: mol_type = other DNA
tacgctaaacaaggccacaac

SEQ ID NO: 33480 - DNA, 21 bp, synthetic construct
  source 1..21: mol_type = other DNA
tgtaacaagcgatcgggagaa

SEQ ID NO: 33481 - DNA, 21 bp, synthetic construct
  source 1..21: mol_type = other DNA
tatggcaagagcacggaatgc

SEQ ID NO: 33482 - DNA, 21 bp, synthetic construct
  source 1..21: mol_type = other DNA
tgcaaaccgacaagcatagaa

SEQ ID NO: 33483 - DNA, 21 bp, synthetic construct
  source 1..21: mol_type = other DNA
tattggaccggcactatggag

SEQ ID NO: 33484 - DNA, 21 bp, synthetic construct
  source 1..21: mol_type = other DNA
gatctacaaagtagcaattgg

SEQ ID NO: 33485 - DNA, 21 bp, synthetic construct
  source 1..21: mol_type = other DNA
tttttttcaggacaaatagca

SEQ ID NO: 33486 - DNA, 21 bp, synthetic construct
  source 1..21: mol_type = other DNA
gtcctgagcgaacgaagttgg

SEQ ID NO: 33487 - DNA, 21 bp, synthetic construct
  source 1..21: mol_type = other DNA
tacgccaggggaaatgtgaat

SEQ ID NO: 33488 - DNA, 21 bp, synthetic construct
  source 1..21: mol_type = other DNA
tattggtcaggacaacacgcg

SEQ ID NO: 33489 - DNA, 21 bp, synthetic construct
  source 1..21: mol_type = other DNA
ttttttagtggggtcgtcaag

SEQ ID NO: 33490 - DNA, 21 bp, synthetic construct
  source 1..21: mol_type = other DNA
atttgccgtccgtgctcagag

SEQ ID NO: 33491 - DNA, 21 bp, synthetic construct
  source 1..21: mol_type = other DNA
tggccatttggcgtagacgcc

SEQ ID NO: 33492 - DNA, 21 bp, synthetic construct
  source 1..21: mol_type = other DNA
tgtaaagaagggacaaggggg

SEQ ID NO: 33493 - DNA, 21 bp, synthetic construct
  source 1..21: mol_type = other DNA
cccgatggttcctgtaaagcg

SEQ ID NO: 33494 - DNA, 21 bp, synthetic construct
  source 1..21: mol_type = other DNA
tgtgccccagattataggatc

SEQ ID NO: 33495 - DNA, 21 bp, synthetic construct
  source 1..21: mol_type = other DNA
tatttcacaggaatggtccag

SEQ ID NO: 33496 - DNA, 21 bp, synthetic construct
  source 1..21: mol_type = other DNA
agaatgcaggaccggtcgtgg

SEQ ID NO: 33497 - DNA, 21 bp, synthetic construct
  source 1..21: mol_type = other DNA
tggtttactggcgtgaaagag

SEQ ID NO: 33498 - DNA, 21 bp, synthetic construct
  source 1..21: mol_type = other DNA
tattccaaatataatatcaac

SEQ ID NO: 33499 - DNA, 21 bp, synthetic construct
  source 1..21: mol_type = other DNA
tgcagtaaagaaaccatgtcg

SEQ ID NO: 33500 - DNA, 21 bp, synthetic construct
  source 1..21: mol_type = other DNA
atgatgcaggaccgtagttgg

SEQ ID NO: 33501 - DNA, 21 bp, synthetic construct
  source 1..21: mol_type = other DNA
tacgcaaaggccgggatgaat

SEQ ID NO: 33502 - DNA, 21 bp, synthetic construct
  source 1..21: mol_type = other DNA
tgcaaaccagtcccgccagag

SEQ ID NO: 33503 - DNA, 21 bp, synthetic construct
  source 1..21: mol_type = other DNA
ggcggaaatggcagtacgtgg

SEQ ID NO: 33504 - DNA, 21 bp, synthetic construct
  source 1..21: mol_type = other DNA
ttcgctcgtcatggccacaat

SEQ ID NO: 33505 - DNA, 21 bp, synthetic construct
  source 1..21: mol_type = other DNA
gggtgtggcacgaagaacggc

SEQ ID NO: 33506 - DNA, 21 bp, synthetic construct
  source 1..21: mol_type = other DNA
tactggtcgggtagggttgac

SEQ ID NO: 33507 - DNA, 21 bp, synthetic construct
  source 1..21: mol_type = other DNA
tatgcgaggagcaattttaat

SEQ ID NO: 33508 - DNA, 21 bp, synthetic construct
  source 1..21: mol_type = other DNA
agggaagaggaagtagcgtgg

SEQ ID NO: 33509 - DNA, 21 bp, synthetic construct
  source 1..21: mol_type = other DNA
tatgcgaaacaaggtaacaat

SEQ ID NO: 33510 - DNA, 21 bp, synthetic construct
  source 1..21: mol_type = other DNA
tgtaagatgcccggtagagat

SEQ ID NO: 33511 - DNA, 21 bp, synthetic construct
  source 1..21: mol_type = other DNA
cgagagtacaacgtgtaccca

SEQ ID NO: 33512 - DNA, 21 bp, synthetic construct
  source 1..21: mol_type = other DNA
tatttcacgggccacccggag

SEQ ID NO: 33513 - DNA, 21 bp, synthetic construct
  source 1..21: mol_type = other DNA
ctaagccgtatcaatttcaac

SEQ ID NO: 33514 - DNA, 21 bp, synthetic construct
  source 1..21: mol_type = other DNA
ggtggaagtggcagtacatgg

SEQ ID NO: 33515 - DNA, 21 bp, synthetic construct
  source 1..21: mol_type = other DNA
agggaggagactgtagggtgg

SEQ ID NO: 33516 - DNA, 21 bp, synthetic construct
  source 1..21: mol_type = other DNA
tgtaaaccaccgagccgcgac

SEQ ID NO: 33517 - DNA, 21 bp, synthetic construct
  source 1..21: mol_type = other DNA
tgtaaaccccaagtcgttggc

SEQ ID NO: 33518 - DNA, 21 bp, synthetic construct
  source 1..21: mol_type = other DNA
actagaaatggccaggagtgt

SEQ ID NO: 33519 - DNA, 21 bp, synthetic construct
  source 1..21: mol_type = other DNA
tatgcacgacagggctacaat

SEQ ID NO: 33520 - DNA, 21 bp, synthetic construct
  source 1..21: mol_type = other DNA
tactcccgtgcaaatatgaac

SEQ ID NO: 33521 - DNA, 21 bp, synthetic construct
  source 1..21: mol_type = other DNA
tacgcccgattaaacgataat

SEQ ID NO: 33522 - DNA, 21 bp, synthetic construct
  source 1..21: mol_type = other DNA
gggcacggcactaaatgcggt

SEQ ID NO: 33523 - DNA, 21 bp, synthetic construct
  source 1..21: mol_type = other DNA
agggaagatttccagacctgg

SEQ ID NO: 33524 - DNA, 21 bp, synthetic construct
  source 1..21: mol_type = other DNA
ataaaggattacaaaggttgt

SEQ ID NO: 33525 - DNA, 21 bp, synthetic construct
  source 1..21: mol_type = other DNA
tgcaagccgaatagcggaggt

SEQ ID NO: 33526 - DNA, 21 bp, synthetic construct
  source 1..21: mol_type = other DNA
gggggaggcacatcgagctgg

SEQ ID NO: 33527 - DNA, 21 bp, synthetic construct
  source 1..21: mol_type = other DNA
ttcaggtcgacgaatggcgta

SEQ ID NO: 33528 - DNA, 21 bp, synthetic construct
  source 1..21: mol_type = other DNA
tgcaggccagaaggagcttgt

SEQ ID NO: 33529 - DNA, 21 bp, synthetic construct
  source 1..21: mol_type = other DNA
tgccgtcctgggtcacctggc

SEQ ID NO: 33530 - DNA, 21 bp, synthetic construct
  source 1..21: mol_type = other DNA
ttttccaaacttaaccccgac

SEQ ID NO: 33531 - DNA, 21 bp, synthetic construct
  source 1..21: mol_type = other DNA
tgcgtacagacgaaaaaggag

SEQ ID NO: 33532 - DNA, 21 bp, synthetic construct
  source 1..21: mol_type = other DNA
ttctctaggatgaatattaac

SEQ ID NO: 33533 - DNA, 21 bp, synthetic construct
  source 1..21: mol_type = other DNA
atgcaccgcctttctgagaga

SEQ ID NO: 33534 - DNA, 21 bp, synthetic construct
  source 1..21: mol_type = other DNA
tattttgctgggaagcaagag

SEQ ID NO: 33535 - DNA, 21 bp, synthetic construct
  source 1..21: mol_type = other DNA
ttttggtcaggcatgaaggac

SEQ ID NO: 33536 - DNA, 21 bp, synthetic construct
  source 1..21: mol_type = other DNA
gagagtgaatttaaaacgtat

SEQ ID NO: 33537 - DNA, 21 bp, synthetic construct
  source 1..21: mol_type = other DNA
tgcaagatggggagggatgaa

SEQ ID NO: 33538 - DNA, 21 bp, synthetic construct
  source 1..21: mol_type = other DNA
agaggtccggacactttccca

SEQ ID NO: 33539 - DNA, 21 bp, synthetic construct
  source 1..21: mol_type = other DNA
ggaggtgagagctgtaagtct

SEQ ID NO: 33540 - DNA, 21 bp, synthetic construct
  source 1..21: mol_type = other DNA
tatgccaagcagggagcaaat

SEQ ID NO: 33541 - DNA, 21 bp, synthetic construct
  source 1..21: mol_type = other DNA
tatttccacggaaggccggac

SEQ ID NO: 33542 - DNA, 21 bp, synthetic construct
  source 1..21: mol_type = other DNA
aaagatggtaattcgtcatgg

SEQ ID NO: 33543 - DNA, 21 bp, synthetic construct
  source 1..21: mol_type = other DNA
tatttcactcgtgtcatggaa

SEQ ID NO: 33544 - DNA, 21 bp, synthetic construct
  source 1..21: mol_type = other DNA
ttcagcagggcaggcttaaat

SEQ ID NO: 33545 - DNA, 21 bp, synthetic construct
  source 1..21: mol_type = other DNA
tactcaagaggaaatacaaac

SEQ ID NO: 33546 - DNA, 21 bp, synthetic construct
  source 1..21: mol_type = other DNA
tgtgggtctgtacaagtcaac

SEQ ID NO: 33547 - DNA, 21 bp, synthetic construct
  source 1..21: mol_type = other DNA
gaactttcatcgccaaagtgg

SEQ ID NO: 33548 - DNA, 21 bp, synthetic construct
  source 1..21: mol_type = other DNA
gtctctgagtataagacattt

SEQ ID NO: 33549 - DNA, 21 bp, synthetic construct
  source 1..21: mol_type = other DNA
tactttacgaacgttaaggag

SEQ ID NO: 33550 - DNA, 21 bp, synthetic construct
  source 1..21: mol_type = other DNA
tgcaagccgatgatgggtgag

SEQ ID NO: 33551 - DNA, 21 bp, synthetic construct
  source 1..21: mol_type = other DNA
tactggcatggaaaacccgaa

SEQ ID NO: 33552 - DNA, 21 bp, synthetic construct
  source 1..21: mol_type = other DNA
ggcgggccggggagcgcttgg

SEQ ID NO: 33553 - DNA, 21 bp, synthetic construct
  source 1..21: mol_type = other DNA
tgtaccagcatcacaggacac

SEQ ID NO: 33554 - DNA, 21 bp, synthetic construct
  source 1..21: mol_type = other DNA
tacacacgattgtcatacgac

SEQ ID NO: 33555 - DNA, 21 bp, synthetic construct
  source 1..21: mol_type = other DNA
aaagatggctacacagtatac

SEQ ID NO: 33556 - DNA, 21 bp, synthetic construct
  source 1..21: mol_type = other DNA
tactggtcgggtcgaaatgaa

SEQ ID NO: 33557 - DNA, 21 bp, synthetic construct
  source 1..21: mol_type = other DNA
tacagtcgtcataacttgaat

SEQ ID NO: 33558 - DNA, 21 bp, synthetic construct
  source 1..21: mol_type = other DNA
tactggactgggcagatggac

SEQ ID NO: 33559 - DNA, 21 bp, synthetic construct
  source 1..21: mol_type = other DNA
tattccaaagtcaatttcaac

SEQ ID NO: 33560 - DNA, 21 bp, synthetic construct
  source 1..21: mol_type = other DNA
agtgatggatcatcaaagtgg

SEQ ID NO: 33561 - DNA, 21 bp, synthetic construct
  source 1..21: mol_type = other DNA
attacaagtgataacggtaga

SEQ ID NO: 33562 - DNA, 21 bp, synthetic construct
  source 1..21: mol_type = other DNA
tatttcacggccatagtcgag

SEQ ID NO: 33563 - DNA, 21 bp, synthetic construct
  source 1..21: mol_type = other DNA
atcacaggtgggaaaacatgc

SEQ ID NO: 33564 - DNA, 21 bp, synthetic construct
  source 1..21: mol_type = other DNA
tatttccaggggaagctggaa

SEQ ID NO: 33565 - DNA, 21 bp, synthetic construct
  source 1..21: mol_type = other DNA
gactatgcatactcaaaagag

SEQ ID NO: 33566 - DNA, 21 bp, synthetic construct
  source 1..21: mol_type = other DNA
tacagtcgccagaacacaaac

SEQ ID NO: 33567 - DNA, 21 bp, synthetic construct
  source 1..21: mol_type = other DNA
tacgcaagagggaacaataat

SEQ ID NO: 33568 - DNA, 21 bp, synthetic construct
  source 1..21: mol_type = other DNA
tattcacgcctttctgagttc

SEQ ID NO: 33569 - DNA, 21 bp, synthetic construct
  source 1..21: mol_type = other DNA
tacaatagtacaaacggcata

SEQ ID NO: 33570 - DNA, 21 bp, synthetic construct
  source 1..21: mol_type = other DNA
tgcaataaaccgcatacagca

SEQ ID NO: 33571 - DNA, 21 bp, synthetic construct
  source 1..21: mol_type = other DNA
agagaagaatttgtatcgtac

SEQ ID NO: 33572 - DNA, 21 bp, synthetic construct
  source 1..21: mol_type = other DNA
tattcacggatgaatcagaac

SEQ ID NO: 33573 - DNA, 21 bp, synthetic construct
  source 1..21: mol_type = other DNA
cgtgaatatgacagcttcccg

SEQ ID NO: 33574 - DNA, 21 bp, synthetic construct
  source 1..21: mol_type = other DNA
tttagtagacttaaccataac

SEQ ID NO: 33575 - DNA, 21 bp, synthetic construct
  source 1..21: mol_type = other DNA
agaaaccacgagacatttccg

SEQ ID NO: 33576 - DNA, 21 bp, synthetic construct
  source 1..21: mol_type = other DNA
tacgaagggggatgcaaggaa

SEQ ID NO: 33577 - DNA, 21 bp, synthetic construct
  source 1..21: mol_type = other DNA
ggggggccaggtagcgcctgg

SEQ ID NO: 33578 - DNA, 21 bp, synthetic construct
  source 1..21: mol_type = other DNA
tacagccgaattaataccaat

SEQ ID NO: 33579 - DNA, 21 bp, synthetic construct
  source 1..21: mol_type = other DNA
gtaccgcaggatcgggcatgg

SEQ ID NO: 33580 - DNA, 21 bp, synthetic construct
  source 1..21: mol_type = other DNA
tactgggagggtgtaaaagaa

SEQ ID NO: 33581 - DNA, 21 bp, synthetic construct
  source 1..21: mol_type = other DNA
agtatgcaagataggggctgg

SEQ ID NO: 33582 - DNA, 21 bp, synthetic construct
  source 1..21: mol_type = other DNA
tatagccgtataacacctaac

SEQ ID NO: 33583 - DNA, 21 bp, synthetic construct
  source 1..21: mol_type = other DNA
tatagcaagtacaattttaat

SEQ ID NO: 33584 - DNA, 21 bp, synthetic construct
  source 1..21: mol_type = other DNA
ggacaagactcggtcaagtgc

SEQ ID NO: 33585 - DNA, 21 bp, synthetic construct
  source 1..21: mol_type = other DNA
tactggaccggcaaacccgaa

SEQ ID NO: 33586 - DNA, 21 bp, synthetic construct
  source 1..21: mol_type = other DNA
tactggaagccggaggtcaat

SEQ ID NO: 33587 - DNA, 21 bp, synthetic construct
  source 1..21: mol_type = other DNA
aagcctgactgggtcgagttc

SEQ ID NO: 33588 - DNA, 21 bp, synthetic construct
  source 1..21: mol_type = other DNA
gcacttcccccgaagtgttcc

SEQ ID NO: 33589 - DNA, 21 bp, synthetic construct
  source 1..21: mol_type = other DNA
tatgcccgtctgaatgctaac

SEQ ID NO: 33590 - DNA, 21 bp, synthetic construct
  source 1..21: mol_type = other DNA
tacgccaagcatggctggaac

SEQ ID NO: 33591 - DNA, 21 bp, synthetic construct
  source 1..21: mol_type = other DNA
cgagaaggaaacagtctctgg

SEQ ID NO: 33592 - DNA, 21 bp, synthetic construct
  source 1..21: mol_type = other DNA
tgtgggcgctccggaacccac

SEQ ID NO: 33593 - DNA, 21 bp, synthetic construct
  source 1..21: mol_type = other DNA
tgcacaggaaagacaggacat

SEQ ID NO: 33594 - DNA, 21 bp, synthetic construct
  source 1..21: mol_type = other DNA
tttttcactggcatcgtaagc

SEQ ID NO: 33595 - DNA, 21 bp, synthetic construct
  source 1..21: mol_type = other DNA
atgaccggaacatcgtgtatg

SEQ ID NO: 33596 - DNA, 21 bp, synthetic construct
  source 1..21: mol_type = other DNA
ttgtcaagggccgggagagat

SEQ ID NO: 33597 - DNA, 21 bp, synthetic construct
  source 1..21: mol_type = other DNA
tatgctcgcgccggtatcaat

SEQ ID NO: 33598 - DNA, 21 bp, synthetic construct
  source 1..21: mol_type = other DNA
tacacgcatacccagcgcaac

SEQ ID NO: 33599 - DNA, 21 bp, synthetic construct
  source 1..21: mol_type = other DNA
tatttcagtgcagtgagggaa

SEQ ID NO: 33600 - DNA, 21 bp, synthetic construct
  source 1..21: mol_type = other DNA
tacgcaaaaggcggccataac

SEQ ID NO: 33601 - DNA, 21 bp, synthetic construct
  source 1..21: mol_type = other DNA
tattcaagaaaatctgacaac

SEQ ID NO: 33602 - DNA, 21 bp, synthetic construct
  source 1..21: mol_type = other DNA
tacctcatatcgcagtcgtat

SEQ ID NO: 33603 - DNA, 21 bp, synthetic construct
  source 1..21: mol_type = other DNA
tataattctacccacggcagg

SEQ ID NO: 33604 - DNA, 21 bp, synthetic construct
  source 1..21: mol_type = other DNA
ctcagcagaaccggagagaat

SEQ ID NO: 33605 - DNA, 21 bp, synthetic construct
  source 1..21: mol_type = other DNA
accccctatgacgctattgcc

SEQ ID NO: 33606 - DNA, 21 bp, synthetic construct
  source 1..21: mol_type = other DNA
atgatggatggcacaaatgca

SEQ ID NO: 33607 - DNA, 21 bp, synthetic construct
  source 1..21: mol_type = other DNA
ggctgcggtacaaaacagggg

SEQ ID NO: 33608 - DNA, 21 bp, synthetic construct
  source 1..21: mol_type = other DNA
tatgcgaggggcaatatgaac

SEQ ID NO: 33609 - DNA, 21 bp, synthetic construct
  source 1..21: mol_type = other DNA
ttttttaccggaaccgtggaa

SEQ ID NO: 33610 - DNA, 21 bp, synthetic construct
  source 1..21: mol_type = other DNA
aggaatgagttcacggcttat

SEQ ID NO: 33611 - DNA, 21 bp, synthetic construct
  source 1..21: mol_type = other DNA
tactttcatggccagctagct

SEQ ID NO: 33612 - DNA, 21 bp, synthetic construct
  source 1..21: mol_type = other DNA
tatttctccgggattcacact

SEQ ID NO: 33613 - DNA, 21 bp, synthetic construct
  source 1..21: mol_type = other DNA
cgcgatccctgcaccgtagac

SEQ ID NO: 33614 - DNA, 21 bp, synthetic construct
  source 1..21: mol_type = other DNA
aggacatatgacgcttttgcg

SEQ ID NO: 33615 - DNA, 21 bp, synthetic construct
  source 1..21: mol_type = other DNA
ggatcaggcacgagtacatgg

SEQ ID NO: 33616 - DNA, 21 bp, synthetic construct
  source 1..21: mol_type = other DNA
caaccgtccccctgcaaaccc

SEQ ID NO: 33617 - DNA, 21 bp, synthetic construct
  source 1..21: mol_type = other DNA
tacagcaggttagatgtattc

SEQ ID NO: 33618 - DNA, 21 bp, synthetic construct
  source 1..21: mol_type = other DNA
ggcgccgcaacgtctaagtgg

SEQ ID NO: 33619 - DNA, 21 bp, synthetic construct
  source 1..21: mol_type = other DNA
tattcacgtttagatagtttt

SEQ ID NO: 33620 - DNA, 21 bp, synthetic construct
  source 1..21: mol_type = other DNA
aacgctctggattggagagat

SEQ ID NO: 33621 - DNA, 21 bp, synthetic construct
  source 1..21: mol_type = other DNA
tactggtcaggcgttattgac

SEQ ID NO: 33622 - DNA, 21 bp, synthetic construct
  source 1..21: mol_type = other DNA
tatgcgcgagggaattacaat

SEQ ID NO: 33623 - DNA, 21 bp, synthetic construct
  source 1..21: mol_type = other DNA
cgcgaagaagcgattagatgg

SEQ ID NO: 33624 - DNA, 21 bp, synthetic construct
  source 1..21: mol_type = other DNA
tttttcacaggtgaacgcgct

SEQ ID NO: 33625 - DNA, 21 bp, synthetic construct
  source 1..21: mol_type = other DNA
gtgatgcaggaccgcagttgg

SEQ ID NO: 33626 - DNA, 21 bp, synthetic construct
  source 1..21: mol_type = other DNA
tttgcgcgcactggatgggat

SEQ ID NO: 33627 - DNA, 21 bp, synthetic construct
  source 1..21: mol_type = other DNA
tattcccggaatgggatcaac

SEQ ID NO: 33628 - DNA, 21 bp, synthetic construct
  source 1..21: mol_type = other DNA
attgcacggactggatgcgac

SEQ ID NO: 33629 - DNA, 21 bp, synthetic construct
  source 1..21: mol_type = other DNA
gtgcacaagctatgtccggtt

SEQ ID NO: 33630 - DNA, 21 bp, synthetic construct
  source 1..21: mol_type = other DNA
tactttcaagggacgtacaat

SEQ ID NO: 33631 - DNA, 21 bp, synthetic construct
  source 1..21: mol_type = other DNA
tacagtcgtagcggagaaaac

SEQ ID NO: 33632 - DNA, 21 bp, synthetic construct
  source 1..21: mol_type = other DNA
tacgctcgtggtgggcaaaac

SEQ ID NO: 33633 - DNA, 21 bp, synthetic construct
  source 1..21: mol_type = other DNA
tggtttactggcaggcacgac

SEQ ID NO: 33634 - DNA, 21 bp, synthetic construct
  source 1..21: mol_type = other DNA
atcttttcgacaaatggggtg

SEQ ID NO: 33635 - DNA, 21 bp, synthetic construct
  source 1..21: mol_type = other DNA
tgtggaaagtctggtcccagc

SEQ ID NO: 33636 - DNA, 21 bp, synthetic construct
  source 1..21: mol_type = other DNA
gaagggggcagctgcaaacct

SEQ ID NO: 33637 - DNA, 21 bp, synthetic construct
  source 1..21: mol_type = other DNA
gataatcggggtatgatagca

SEQ ID NO: 33638 - DNA, 21 bp, synthetic construct
  source 1..21: mol_type = other DNA
ttagggattggttgctgcaag

SEQ ID NO: 33639 - DNA, 21 bp, synthetic construct
  source 1..21: mol_type = other DNA
tggacaccaaactgtaaggcc

SEQ ID NO: 33640 - DNA, 21 bp, synthetic construct
  source 1..21: mol_type = other DNA
tgcggcccatacctacacgag

SEQ ID NO: 33641 - DNA, 21 bp, synthetic construct
  source 1..21: mol_type = other DNA
tggtggtcgggggtaactgag

SEQ ID NO: 33642 - DNA, 21 bp, synthetic construct
  source 1..21: mol_type = other DNA
tactgggaaggcgtacgagaa

SEQ ID NO: 33643 - DNA, 21 bp, synthetic construct
  source 1..21: mol_type = other DNA
tgtatgaaaagacccgaggta

SEQ ID NO: 33644 - DNA, 21 bp, synthetic construct
  source 1..21: mol_type = other DNA
ttcgcacgaaacggctacaat

SEQ ID NO: 33645 - DNA, 21 bp, synthetic construct
  source 1..21: mol_type = other DNA
agcgcgaacacagggcgatgt

SEQ ID NO: 33646 - DNA, 21 bp, synthetic construct
  source 1..21: mol_type = other DNA
tggtattcaggcgtaaaagag

SEQ ID NO: 33647 - DNA, 21 bp, synthetic construct
  source 1..21: mol_type = other DNA
ggttcacctgggtctcattgg

SEQ ID NO: 33648 - DNA, 21 bp, synthetic construct
  source 1..21: mol_type = other DNA
tacagcagatctaacatgaat

SEQ ID NO: 33649 - DNA, 21 bp, synthetic construct
  source 1..21: mol_type = other DNA
tgtaagaatactaaggttgat

SEQ ID NO: 33650 - DNA, 21 bp, synthetic construct
  source 1..21: mol_type = other DNA
tgcatgaagcctatgacggca

SEQ ID NO: 33651 - DNA, 21 bp, synthetic construct
  source 1..21: mol_type = other DNA
tggcagagcaccaacggaatt

SEQ ID NO: 33652 - DNA, 21 bp, synthetic construct
  source 1..21: mol_type = other DNA
aagtttgattaccaaggtaca

SEQ ID NO: 33653 - DNA, 21 bp, synthetic construct
  source 1..21: mol_type = other DNA
ggtagcggtaatcaacgatgg

SEQ ID NO: 33654 - DNA, 21 bp, synthetic construct
  source 1..21: mol_type = other DNA
tggtacagtggcgtaagggag

SEQ ID NO: 33655 - DNA, 21 bp, synthetic construct
  source 1..21: mol_type = other DNA
atgcatagattgcaggaagac

SEQ ID NO: 33656 - DNA, 21 bp, synthetic construct
  source 1..21: mol_type = other DNA
tactttaccgcgagagttgag

SEQ ID NO: 33657 - DNA, 21 bp, synthetic construct
  source 1..21: mol_type = other DNA
accatcgcggacgcgtacccg

SEQ ID NO: 33658 - DNA, 21 bp, synthetic construct
  source 1..21: mol_type = other DNA
ttcttcgcaggtgtgaaagaa

SEQ ID NO: 33659 - DNA, 21 bp, synthetic construct
  source 1..21: mol_type = other DNA
tgtacatctaaacagggccat

SEQ ID NO: 33660 - DNA, 21 bp, synthetic construct
  source 1..21: mol_type = other DNA
ccatgtaaaacgggaggcgag

SEQ ID NO: 33661 - DNA, 21 bp, synthetic construct
  source 1..21: mol_type = other DNA
tgtccaagggagaacgatggc

SEQ ID NO: 33662 - DNA, 21 bp, synthetic construct
  source 1..21: mol_type = other DNA
tattcgcgagcgaatcataat

SEQ ID NO: 33663 - DNA, 21 bp, synthetic construct
  source 1..21: mol_type = other DNA
atgtgggatggcacctacgcc

SEQ ID NO: 33664 - DNA, 21 bp, synthetic construct
  source 1..21: mol_type = other DNA
gagacagggatgtgtaaaccc

SEQ ID NO: 33665 - DNA, 21 bp, synthetic construct
  source 1..21: mol_type = other DNA
attgtaagtacgaacggtcga

SEQ ID NO: 33666 - DNA, 21 bp, synthetic construct
  source 1..21: mol_type = other DNA
atgaaggacggcaccgcgagc

SEQ ID NO: 33667 - DNA, 21 bp, synthetic construct
  source 1..21: mol_type = other DNA
agcggcgagtcgcggacctgg

SEQ ID NO: 33668 - DNA, 21 bp, synthetic construct
  source 1..21: mol_type = other DNA
ataggggagcgcggctgggat

SEQ ID NO: 33669 - DNA, 21 bp, synthetic construct
  source 1..21: mol_type = other DNA
tatactcgtctcgatggtaat

SEQ ID NO: 33670 - DNA, 21 bp, synthetic construct
  source 1..21: mol_type = other DNA
ttttttaccggcatggtggat

SEQ ID NO: 33671 - DNA, 21 bp, synthetic construct
  source 1..21: mol_type = other DNA
cgaatgcaagatagaagctgg

SEQ ID NO: 33672 - DNA, 21 bp, synthetic construct
  source 1..21: mol_type = other DNA
ttaagccgggccgggtacgat

SEQ ID NO: 33673 - DNA, 21 bp, synthetic construct
  source 1..21: mol_type = other DNA
aacaaagaggggtgcaaaccg

SEQ ID NO: 33674 - DNA, 21 bp, synthetic construct
  source 1..21: mol_type = other DNA
tttgcaaaaacaggatataac

SEQ ID NO: 33675 - DNA, 21 bp, synthetic construct
  source 1..21: mol_type = other DNA
cgggatgagttccacgtatgg

SEQ ID NO: 33676 - DNA, 21 bp, synthetic construct
  source 1..21: mol_type = other DNA
tatacaagactccagaattta

SEQ ID NO: 33677 - DNA, 21 bp, synthetic construct
  source 1..21: mol_type = other DNA
aaggacgaatggcgtcctttt

SEQ ID NO: 33678 - DNA, 21 bp, synthetic construct
  source 1..21: mol_type = other DNA
tacttttcgggacaatctgct

SEQ ID NO: 33679 - DNA, 21 bp, synthetic construct
  source 1..21: mol_type = other DNA
tactggagtgaagtgagagca

SEQ ID NO: 33680 - DNA, 21 bp, synthetic construct
  source 1..21: mol_type = other DNA
atggtccgtaatcagccaaat

SEQ ID NO: 33681 - DNA, 21 bp, synthetic construct
  source 1..21: mol_type = other DNA
tgtaaaacgaagcttttagaa

SEQ ID NO: 33682 - DNA, 21 bp, synthetic construct
  source 1..21: mol_type = other DNA
tacagtagatacaacattaat

SEQ ID NO: 33683 - DNA, 21 bp, synthetic construct
  source 1..21: mol_type = other DNA
cgcgattcaactaatggcgtt

SEQ ID NO: 33684 - DNA, 21 bp, synthetic construct
  source 1..21: mol_type = other DNA
gttccgtgtccagtcccgcct

SEQ ID NO: 33685 - DNA, 21 bp, synthetic construct
  source 1..21: mol_type = other DNA
atttatagtacaaatggagtc

SEQ ID NO: 33686 - DNA, 21 bp, synthetic construct
  source 1..21: mol_type = other DNA
ggtggcggcgttgtcagatat

SEQ ID NO: 33687 - DNA, 21 bp, synthetic construct
  source 1..21: mol_type = other DNA
tgcgcgcccgcgtatcgggaa

SEQ ID NO: 33688 - DNA, 21 bp, synthetic construct
  source 1..21: mol_type = other DNA
taccctccgggttgcaaagag

SEQ ID NO: 33689 - DNA, 21 bp, synthetic construct
  source 1..21: mol_type = other DNA
tactcgagattgagcgactac

SEQ ID NO: 33690 - DNA, 21 bp, synthetic construct
  source 1..21: mol_type = other DNA
actaggtggggagataatgcc

SEQ ID NO: 33691 - DNA, 21 bp, synthetic construct
  source 1..21: mol_type = other DNA
ttttttactggtaaaatggat

SEQ ID NO: 33692 - DNA, 21 bp, synthetic construct
  source 1..21: mol_type = other DNA
tacagtcgaaatggaacgaac

SEQ ID NO: 33693 - DNA, 21 bp, synthetic construct
  source 1..21: mol_type = other DNA
tgcaagatgagctgtccgatg

SEQ ID NO: 33694 - DNA, 21 bp, synthetic construct
  source 1..21: mol_type = other DNA
cggaacgagtttaccgtttat

SEQ ID NO: 33695 - DNA, 21 bp, synthetic construct
  source 1..21: mol_type = other DNA
gggtcaggacaatcgagttgg

SEQ ID NO: 33696 - DNA, 21 bp, synthetic construct
  source 1..21: mol_type = other DNA
acccatagattgatcgtagcc

SEQ ID NO: 33697 - DNA, 21 bp, synthetic construct
  source 1..21: mol_type = other DNA
catcagagttccaacggtgtc

SEQ ID NO: 33698 - DNA, 21 bp, synthetic construct
  source 1..21: mol_type = other DNA
caaaatcaaacttccaggtgg

SEQ ID NO: 33699 - DNA, 21 bp, synthetic construct
  source 1..21: mol_type = other DNA
tggcatcgcttaagcgtcaac

SEQ ID NO: 33700 - DNA, 21 bp, synthetic construct
  source 1..21: mol_type = other DNA
gtcgaggaaggttggagctgg

SEQ ID NO: 33701 - DNA, 21 bp, synthetic construct
  source 1..21: mol_type = other DNA
ggtgtggagagcgtacgttgg

SEQ ID NO: 33702 - DNA, 21 bp, synthetic construct
  source 1..21: mol_type = other DNA
tacagtcgacaaaattccaat

SEQ ID NO: 33703 - DNA, 21 bp, synthetic construct
  source 1..21: mol_type = other DNA
tattggtccggtcaactagat

SEQ ID NO: 33704 - DNA, 21 bp, synthetic construct
  source 1..21: mol_type = other DNA
tacaccaaatcccaagtggac

SEQ ID NO: 33705 - DNA, 21 bp, synthetic construct
  source 1..21: mol_type = other DNA
ttcttcaccgggatgagggac

SEQ ID NO: 33706 - DNA, 21 bp, synthetic construct
  source 1..21: mol_type = other DNA
tgcaataagccggataccgct

SEQ ID NO: 33707 - DNA, 21 bp, synthetic construct
  source 1..21: mol_type = other DNA
tatgcaaagggcaacatgaat

SEQ ID NO: 33708 - DNA, 21 bp, synthetic construct
  source 1..21: mol_type = other DNA
caccactcgagcaacggcgta

SEQ ID NO: 33709 - DNA, 21 bp, synthetic construct
  source 1..21: mol_type = other DNA
tgcaagccgccgagcccaatt

SEQ ID NO: 33710 - DNA, 21 bp, synthetic construct
  source 1..21: mol_type = other DNA
tactcgaagggtaacgcgaac

SEQ ID NO: 33711 - DNA, 21 bp, synthetic construct
  source 1..21: mol_type = other DNA
tcagacggaaactcaaaatgg

SEQ ID NO: 33712 - DNA, 21 bp, synthetic construct
  source 1..21: mol_type = other DNA
tgtaagccccaacatgggggc

SEQ ID NO: 33713 - DNA, 21 bp, synthetic construct
  source 1..21: mol_type = other DNA
cgcgatggcgaaagcagctgg

SEQ ID NO: 33714 - DNA, 21 bp, synthetic construct
  source 1..21: mol_type = other DNA
tgcgaagcgcgaccgatcgag

SEQ ID NO: 33715 - DNA, 21 bp, synthetic construct
  source 1..21: mol_type = other DNA
tggttcagcaaagtcatcgaa

SEQ ID NO: 33716 - DNA, 21 bp, synthetic construct
  source 1..21: mol_type = other DNA
ttttattcgggtgtcaaagag

SEQ ID NO: 33717 - DNA, 21 bp, synthetic construct
  source 1..21: mol_type = other DNA
acagatggctactcaaggtac

SEQ ID NO: 33718 - DNA, 21 bp, synthetic construct
  source 1..21: mol_type = other DNA
ttccggggaaactgcggcccc

SEQ ID NO: 33719 - DNA, 21 bp, synthetic construct
  source 1..21: mol_type = other DNA
tatagtcgaaacaacataaac

SEQ ID NO: 33720 - DNA, 21 bp, synthetic construct
  source 1..21: mol_type = other DNA
tgcggtaagattaagtgcgct

SEQ ID NO: 33721 - DNA, 21 bp, synthetic construct
  source 1..21: mol_type = other DNA
ggatccggaacatccaactgg

SEQ ID NO: 33722 - DNA, 21 bp, synthetic construct
  source 1..21: mol_type = other DNA
atagcacacaaatgtcccgga

SEQ ID NO: 33723 - DNA, 21 bp, synthetic construct
  source 1..21: mol_type = other DNA
tattggtcacgggtcagcgaa

SEQ ID NO: 33724 - DNA, 21 bp, synthetic construct
  source 1..21: mol_type = other DNA
gggtctgagtttacaagttac

SEQ ID NO: 33725 - DNA, 21 bp, synthetic construct
  source 1..21: mol_type = other DNA
aagaacgatcacgtgcgttgg

SEQ ID NO: 33726 - DNA, 21 bp, synthetic construct
  source 1..21: mol_type = other DNA
tacgaccgtttgagttgtaat

SEQ ID NO: 33727 - DNA, 21 bp, synthetic construct
  source 1..21: mol_type = other DNA
acacccgacagtgtccgttgg

SEQ ID NO: 33728 - DNA, 21 bp, synthetic construct
  source 1..21: mol_type = other DNA
aagagtgaccacgttcgctgg

SEQ ID NO: 33729 - DNA, 21 bp, synthetic construct
  source 1..21: mol_type = other DNA
aataagttaaaagactgtaac

SEQ ID NO: 33730 - DNA, 21 bp, synthetic construct
  source 1..21: mol_type = other DNA
tactacaccgggcaggtttta

SEQ ID NO: 33731 - DNA, 21 bp, synthetic construct
  source 1..21: mol_type = other DNA
cgaggagagagttctagctgg

SEQ ID NO: 33732 - DNA, 21 bp, synthetic construct
  source 1..21: mol_type = other DNA
tatgctaaaagtggctgcaac

SEQ ID NO: 33733 - DNA, 21 bp, synthetic construct
  source 1..21: mol_type = other DNA
tgtagcaagcccactcctagc

SEQ ID NO: 33734 - DNA, 21 bp, synthetic construct
  source 1..21: mol_type = other DNA
tatagtagacagaatctgaac

SEQ ID NO: 33735 - DNA, 21 bp, synthetic construct
  source 1..21: mol_type = other DNA
tacagtaaaaatgggcataat

SEQ ID NO: 33736 - DNA, 21 bp, synthetic construct
  source 1..21: mol_type = other DNA
cttatggacggtacatcggcc

SEQ ID NO: 33737 - DNA, 21 bp, synthetic construct
  source 1..21: mol_type = other DNA
ggctccgagttcaagagttgg

SEQ ID NO: 33738 - DNA, 21 bp, synthetic construct
  source 1..21: mol_type = other DNA
tactctcggcaaaacctaaat

SEQ ID NO: 33739 - DNA, 21 bp, synthetic construct
  source 1..21: mol_type = other DNA
ttcttcagtggtcaacgggat

SEQ ID NO: 33740 - DNA, 21 bp, synthetic construct
  source 1..21: mol_type = other DNA
tacgctcggcagaacgttaat

SEQ ID NO: 33741 - DNA, 21 bp, synthetic construct
  source 1..21: mol_type = other DNA
tactttgctggtgagcgggac

SEQ ID NO: 33742 - DNA, 21 bp, synthetic construct
  source 1..21: mol_type = other DNA
tactcaagaacgaacttcaac

SEQ ID NO: 33743 - DNA, 21 bp, synthetic construct
  source 1..21: mol_type = other DNA
tgcaaaccgttagccagggac

SEQ ID NO: 33744 - DNA, 21 bp, synthetic construct
  source 1..21: mol_type = other DNA
tattttgctgggcaattttca

SEQ ID NO: 33745 - DNA, 21 bp, synthetic construct
  source 1..21: mol_type = other DNA
ttaaaggacggaacatgcagt

SEQ ID NO: 33746 - DNA, 21 bp, synthetic construct
  source 1..21: mol_type = other DNA
attgacgagttcctgtcatgg

SEQ ID NO: 33747 - DNA, 21 bp, synthetic construct
  source 1..21: mol_type = other DNA
gacctaaagtcggccaactgg

SEQ ID NO: 33748 - DNA, 21 bp, synthetic construct
  source 1..21: mol_type = other DNA
ttctcgaaagtagggcttaac

SEQ ID NO: 33749 - DNA, 21 bp, synthetic construct
  source 1..21: mol_type = other DNA
atgcgctcgactaatggagtg

SEQ ID NO: 33750 - DNA, 21 bp, synthetic construct
  source 1..21: mol_type = other DNA
tgtaagacgaagagtcaggag

SEQ ID NO: 33751 - DNA, 21 bp, synthetic construct
  source 1..21: mol_type = other DNA
tactctcgtactaaccttaat

SEQ ID NO: 33752 - DNA, 21 bp, synthetic construct
  source 1..21: mol_type = other DNA
tggccgcctatgtgtaaagct

SEQ ID NO: 33753 - DNA, 21 bp, synthetic construct
  source 1..21: mol_type = other DNA
tgcaaaattcctggtgttcca

SEQ ID NO: 33754 - DNA, 21 bp, synthetic construct
  source 1..21: mol_type = other DNA
gccggtcacgatagaggatgg

SEQ ID NO: 33755 - DNA, 21 bp, synthetic construct
  source 1..21: mol_type = other DNA
tgtaagcctgataagcccctt

SEQ ID NO: 33756 - DNA, 21 bp, synthetic construct
  source 1..21: mol_type = other DNA
cgcaacgacggcgttcgctgg

SEQ ID NO: 33757 - DNA, 21 bp, synthetic construct
  source 1..21: mol_type = other DNA
tattggtcggggcggacggag

SEQ ID NO: 33758 - DNA, 21 bp, synthetic construct
  source 1..21: mol_type = other DNA
aggatgtcctcgggggtatgg

SEQ ID NO: 33759 - DNA, 21 bp, synthetic construct
  source 1..21: mol_type = other DNA
tatcaccgacaaaatcccctt

SEQ ID NO: 33760 - DNA, 21 bp, synthetic construct
  source 1..21: mol_type = other DNA
tgtaagccacaaacgccaacg

SEQ ID NO: 33761 - DNA, 21 bp, synthetic construct
  source 1..21: mol_type = other DNA
ttcttttctggggaacgggag

SEQ ID NO: 33762 - DNA, 21 bp, synthetic construct
  source 1..21: mol_type = other DNA
cagcaaagtactaacggacgc

SEQ ID NO: 33763 - DNA, 21 bp, synthetic construct
  source 1..21: mol_type = other DNA
catgactcaaccaacggcata

SEQ ID NO: 33764 - DNA, 21 bp, synthetic construct
  source 1..21: mol_type = other DNA
gatatgagttcaatgtcctgg

SEQ ID NO: 33765 - DNA, 21 bp, synthetic construct
  source 1..21: mol_type = other DNA
agggatagttacagcacgtat

SEQ ID NO: 33766 - DNA, 21 bp, synthetic construct
  source 1..21: mol_type = other DNA
gggggcggaacgtcgaaatgg

SEQ ID NO: 33767 - DNA, 21 bp, synthetic construct
  source 1..21: mol_type = other DNA
tacgcccgtggatctaataac

SEQ ID NO: 33768 - DNA, 21 bp, synthetic construct
  source 1..21: mol_type = other DNA
tgcacctccaagacaggttca

SEQ ID NO: 33769 - DNA, 21 bp, synthetic construct
  source 1..21: mol_type = other DNA
tggtttacgggaattcgcgac

SEQ ID NO: 33770 - DNA, 21 bp, synthetic construct
  source 1..21: mol_type = other DNA
tattggactggtaagcctgaa

SEQ ID NO: 33771 - DNA, 21 bp, synthetic construct
  source 1..21: mol_type = other DNA
tacgccaaaggcaatacaaac

SEQ ID NO: 33772 - DNA, 21 bp, synthetic construct
  source 1..21: mol_type = other DNA
tacttcagcaatgtaaaatcg

SEQ ID NO: 33773 - DNA, 21 bp, synthetic construct
  source 1..21: mol_type = other DNA
tacgcgcggagcaaccacaac

SEQ ID NO: 33774 - DNA, 21 bp, synthetic construct
  source 1..21: mol_type = other DNA
tattggaccgggcgtcccgat

SEQ ID NO: 33775 - DNA, 21 bp, synthetic construct
  source 1..21: mol_type = other DNA
gatatgcgaagtacgaagtgg

SEQ ID NO: 33776 - DNA, 21 bp, synthetic construct
  source 1..21: mol_type = other DNA
acaaaagagggaatgtgcatt

SEQ ID NO: 33777 - DNA, 21 bp, synthetic construct
  source 1..21: mol_type = other DNA
tgtagcaaaaagccatgtgga

SEQ ID NO: 33778 - DNA, 21 bp, synthetic construct
  source 1..21: mol_type = other DNA
actagaaacgaaagtttttgt

SEQ ID NO: 33779 - DNA, 21 bp, synthetic construct
  source 1..21: mol_type = other DNA
gacaacagagggatgatcgct

SEQ ID NO: 33780 - DNA, 21 bp, synthetic construct
  source 1..21: mol_type = other DNA
tatagtcgtcgaaacgaaaat

SEQ ID NO: 33781 - DNA, 21 bp, synthetic construct
  source 1..21: mol_type = other DNA
tggttcagtggacaaagagat

SEQ ID NO: 33782 - DNA, 21 bp, synthetic construct
  source 1..21: mol_type = other DNA
aggttgcccgacgtataccct

SEQ ID NO: 33783 - DNA, 21 bp, synthetic construct
  source 1..21: mol_type = other DNA
tgtcagaggaagtgtgttcct

SEQ ID NO: 33784 - DNA, 21 bp, synthetic construct
  source 1..21: mol_type = other DNA
tgtaataacccaatgactgcg

SEQ ID NO: 33785 - DNA, 21 bp, synthetic construct
  source 1..21: mol_type = other DNA
aatggcactaatggcagatgg

SEQ ID NO: 33786 - DNA, 21 bp, synthetic construct
  source 1..21: mol_type = other DNA
tgcgggaaaagcgggccatcg

SEQ ID NO: 33787 - DNA, 21 bp, synthetic construct
  source 1..21: mol_type = other DNA
tactggagctcagtcaaagat

SEQ ID NO: 33788 - DNA, 21 bp, synthetic construct
  source 1..21: mol_type = other DNA
gtctgtcgaccatgtagtgag

SEQ ID NO: 33789 - DNA, 21 bp, synthetic construct
  source 1..21: mol_type = other DNA
ggctgtagagtaggcgacatc

SEQ ID NO: 33790 - DNA, 21 bp, synthetic construct
  source 1..21: mol_type = other DNA
ttttggacaggtatgagggaa

SEQ ID NO: 33791 - DNA, 21 bp, synthetic construct
  source 1..21: mol_type = other DNA
tacgtgaaaagtcagccggta

SEQ ID NO: 33792 - DNA, 21 bp, synthetic construct
  source 1..21: mol_type = other DNA
ttctggagtgggaccgtagag

SEQ ID NO: 33793 - DNA, 21 bp, synthetic construct
  source 1..21: mol_type = other DNA
tactacactgggaagctctca

SEQ ID NO: 33794 - DNA, 21 bp, synthetic construct
  source 1..21: mol_type = other DNA
tattgggagggggtcagggag

SEQ ID NO: 33795 - DNA, 21 bp, synthetic construct
  source 1..21: mol_type = other DNA
tatgctaaaaccaattataac

SEQ ID NO: 33796 - DNA, 21 bp, synthetic construct
  source 1..21: mol_type = other DNA
tatcatcgtatcggcgtgaac

SEQ ID NO: 33797 - DNA, 21 bp, synthetic construct
  source 1..21: mol_type = other DNA
tgtgctccggataaacgggag

SEQ ID NO: 33798 - DNA, 21 bp, synthetic construct
  source 1..21: mol_type = other DNA
tacgcaagggccaactataac

SEQ ID NO: 33799 - DNA, 21 bp, synthetic construct
  source 1..21: mol_type = other DNA
tgcaaaccgggggagggggcc

SEQ ID NO: 33800 - DNA, 21 bp, synthetic construct
  source 1..21: mol_type = other DNA
tattattcaggagtgaaagtt

SEQ ID NO: 33801 - DNA, 21 bp, synthetic construct
  source 1..21: mol_type = other DNA
tgtaaagcaaatgctcccgat

SEQ ID NO: 33802 - DNA, 21 bp, synthetic construct
  source 1..21: mol_type = other DNA
tattcacgtgtaaatcaaaac

SEQ ID NO: 33803 - DNA, 21 bp, synthetic construct
  source 1..21: mol_type = other DNA
tatgctagaataggcgaaaac

SEQ ID NO: 33804 - DNA, 21 bp, synthetic construct
  source 1..21: mol_type = other DNA
tgcaaacgaggcttacctgag

SEQ ID NO: 33805 - DNA, 21 bp, synthetic construct
  source 1..21: mol_type = other DNA
tttgccagggcgtgtcagaat

SEQ ID NO: 33806 - DNA, 21 bp, synthetic construct
  source 1..21: mol_type = other DNA
tactatactggagtaatgagc

SEQ ID NO: 33807 - DNA, 21 bp, synthetic construct
  source 1..21: mol_type = other DNA
ttctttacaggtatacaggcg

SEQ ID NO: 33808 - DNA, 21 bp, synthetic construct
  source 1..21: mol_type = other DNA
acattttatggtgcgaatgcc

SEQ ID NO: 33809 - DNA, 21 bp, synthetic construct
  source 1..21: mol_type = other DNA
tttacgcgattaagcataaac

SEQ ID NO: 33810 - DNA, 21 bp, synthetic construct
  source 1..21: mol_type = other DNA
gggtgtggcaccaagtgtcaa

SEQ ID NO: 33811 - DNA, 21 bp, synthetic construct
  source 1..21: mol_type = other DNA
tgcaatggtaccggccccagc

SEQ ID NO: 33812 - DNA, 21 bp, synthetic construct
  source 1..21: mol_type = other DNA
ggaggaggcactagtgcgtgg

SEQ ID NO: 33813 - DNA, 21 bp, synthetic construct
  source 1..21: mol_type = other DNA
tcgaagagtacgaacggaata

SEQ ID NO: 33814 - DNA, 21 bp, synthetic construct
  source 1..21: mol_type = other DNA
atgatgcaagatcggtcgtgg

SEQ ID NO: 33815 - DNA, 21 bp, synthetic construct
  source 1..21: mol_type = other DNA
tattttacagcccgaatcgat

SEQ ID NO: 33816 - DNA, 21 bp, synthetic construct
  source 1..21: mol_type = other DNA
tgtcgacccggcgcaattgcc

SEQ ID NO: 33817 - DNA, 21 bp, synthetic construct
  source 1..21: mol_type = other DNA
caaaaagctggccaagaatgc

SEQ ID NO: 33818 - DNA, 21 bp, synthetic construct
  source 1..21: mol_type = other DNA
tataaaggaggcgaaccttgc

SEQ ID NO: 33819 - DNA, 21 bp, synthetic construct
  source 1..21: mol_type = other DNA
tgtaagaagtttaaagaggat

SEQ ID NO: 33820 - DNA, 21 bp, synthetic construct
  source 1..21: mol_type = other DNA
ggcggccacacttcgacctgg

SEQ ID NO: 33821 - DNA, 21 bp, synthetic construct
  source 1..21: mol_type = other DNA
gaggagagcacgaatggaaga

SEQ ID NO: 33822 - DNA, 21 bp, synthetic construct
  source 1..21: mol_type = other DNA
tactggcatgggaaacctgac

SEQ ID NO: 33823 - DNA, 21 bp, synthetic construct
  source 1..21: mol_type = other DNA
cttggggacgtcatgaagtgc

SEQ ID NO: 33824 - DNA, 21 bp, synthetic construct
  source 1..21: mol_type = other DNA
ggcatcggaacaaaatgcggc

SEQ ID NO: 33825 - DNA, 21 bp, synthetic construct
  source 1..21: mol_type = other DNA
aaaaatgactacattacttac

SEQ ID NO: 33826 - DNA, 21 bp, synthetic construct
  source 1..21: mol_type = other DNA
tgtaagggtgacagtaagtta

SEQ ID NO: 33827 - DNA, 21 bp, synthetic construct
  source 1..21: mol_type = other DNA
gtctcgactcacaattgcgca

SEQ ID NO: 33828 - DNA, 21 bp, synthetic construct
  source 1..21: mol_type = other DNA
gctttaagtgatagaagttgg

SEQ ID NO: 33829 - DNA, 21 bp, synthetic construct
  source 1..21: mol_type = other DNA
atcgcacatgaaggtgcgggt

SEQ ID NO: 33830 - DNA, 21 bp, synthetic construct
  source 1..21: mol_type = other DNA
ttctttagtacgaatggtatc

SEQ ID NO: 33831 - DNA, 21 bp, synthetic construct
  source 1..21: mol_type = other DNA
aataagggagaaggcgggtgt

SEQ ID NO: 33832 - DNA, 21 bp, synthetic construct
  source 1..21: mol_type = other DNA
ttagagtcttcaaacggcgta

SEQ ID NO: 33833 - DNA, 21 bp, synthetic construct
  source 1..21: mol_type = other DNA
ctgcacaaaaaaatgccggat

SEQ ID NO: 33834 - DNA, 21 bp, synthetic construct
  source 1..21: mol_type = other DNA
tatagtcggatgaacgccaac

SEQ ID NO: 33835 - DNA, 21 bp, synthetic construct
  source 1..21: mol_type = other DNA
cgcagagacgggactccagct

SEQ ID NO: 33836 - DNA, 21 bp, synthetic construct
  source 1..21: mol_type = other DNA
tatttcagtggtattactacc

SEQ ID NO: 33837 - DNA, 21 bp, synthetic construct
  source 1..21: mol_type = other DNA
cgcgaacctactgtccgctgg

SEQ ID NO: 33838 - DNA, 21 bp, synthetic construct
  source 1..21: mol_type = other DNA
ataccacacaggtcgtgtgca

SEQ ID NO: 33839 - DNA, 21 bp, synthetic construct
  source 1..21: mol_type = other DNA
tatgcacgaggaaacgataat

SEQ ID NO: 33840 - DNA, 21 bp, synthetic construct
  source 1..21: mol_type = other DNA
tacttcaccggggccatggat

SEQ ID NO: 33841 - DNA, 21 bp, synthetic construct
  source 1..21: mol_type = other DNA
gacctcagttcgacccaatgg

SEQ ID NO: 33842 - DNA, 21 bp, synthetic construct
  source 1..21: mol_type = other DNA
tgtaagccaaaatgcacccca

SEQ ID NO: 33843 - DNA, 21 bp, synthetic construct
  source 1..21: mol_type = other DNA
tggacacccatgtgcaatgcc

SEQ ID NO: 33844 - DNA, 21 bp, synthetic construct
  source 1..21: mol_type = other DNA
tggtattcaggagtccgtgaa

SEQ ID NO: 33845 - DNA, 21 bp, synthetic construct
  source 1..21: mol_type = other DNA
tattgggctgggagagtagaa

SEQ ID NO: 33846 - DNA, 21 bp, synthetic construct
  source 1..21: mol_type = other DNA
tatgccaagggtgggcttaac

SEQ ID NO: 33847 - DNA, 21 bp, synthetic construct
  source 1..21: mol_type = other DNA
agtaggcccacctgtcctgca

SEQ ID NO: 33848 - DNA, 21 bp, synthetic construct
  source 1..21: mol_type = other DNA
tatgtcaggtacgactcaggt

SEQ ID NO: 33849 - DNA, 21 bp, synthetic construct
  source 1..21: mol_type = other DNA
tctcagtgtacatcatcaccg

SEQ ID NO: 33850 - DNA, 21 bp, synthetic construct
  source 1..21: mol_type = other DNA
tggacatcgacacacggagtt

SEQ ID NO: 33851 - DNA, 21 bp, synthetic construct
  source 1..21: mol_type = other DNA
ccgtgcggtgggaaaccaatc

SEQ ID NO: 33852 - DNA, 21 bp, synthetic construct
  source 1..21: mol_type = other DNA
tacatgaaatatgacacccag

SEQ ID NO: 33853 - DNA, 21 bp, synthetic construct
  source 1..21: mol_type = other DNA
ggggaagaaggcgtaagatgg

SEQ ID NO: 33854 - DNA, 21 bp, synthetic construct
  source 1..21: mol_type = other DNA
ttttggggtggagtaaaggag

SEQ ID NO: 33855 - DNA, 21 bp, synthetic construct
  source 1..21: mol_type = other DNA
attgtttcgactaacggtatt

SEQ ID NO: 33856 - DNA, 21 bp, synthetic construct
  source 1..21: mol_type = other DNA
tgggcgcgcggccacgattgt

SEQ ID NO: 33857 - DNA, 21 bp, synthetic construct
  source 1..21: mol_type = other DNA
ctacaccggcttagtgattgg

SEQ ID NO: 33858 - DNA, 21 bp, synthetic construct
  source 1..21: mol_type = other DNA
cgcgaatatgaggtctttccg

SEQ ID NO: 33859 - DNA, 21 bp, synthetic construct
  source 1..21: mol_type = other DNA
aaagacgagtatatgtatttc

SEQ ID NO: 33860 - DNA, 21 bp, synthetic construct
  source 1..21: mol_type = other DNA
tatagtagagggaacatgaat

SEQ ID NO: 33861 - DNA, 21 bp, synthetic construct
  source 1..21: mol_type = other DNA
tgtaaaggggacgcaaaagct

SEQ ID NO: 33862 - DNA, 21 bp, synthetic construct
  source 1..21: mol_type = other DNA
tatgcgcgccaaaactataat

SEQ ID NO: 33863 - DNA, 21 bp, synthetic construct
  source 1..21: mol_type = other DNA
atctccgagttttccgggtat

SEQ ID NO: 33864 - DNA, 21 bp, synthetic construct
  source 1..21: mol_type = other DNA
ggcggtagcacgagcacatgg

SEQ ID NO: 33865 - DNA, 21 bp, synthetic construct
  source 1..21: mol_type = other DNA
gtcgcagagaggggttgcggg

SEQ ID NO: 33866 - DNA, 21 bp, synthetic construct
  source 1..21: mol_type = other DNA
ttcgcgaggtctgggaataat

SEQ ID NO: 33867 - DNA, 21 bp, synthetic construct
  source 1..21: mol_type = other DNA
gttgtaggggtatgcccggcc

SEQ ID NO: 33868 - DNA, 21 bp, synthetic construct
  source 1..21: mol_type = other DNA
tacacaaggttggacggcaac

SEQ ID NO: 33869 - DNA, 21 bp, synthetic construct
  source 1..21: mol_type = other DNA
gggggggaatcttgcaaaagc

SEQ ID NO: 33870 - DNA, 21 bp, synthetic construct
  source 1..21: mol_type = other DNA
tgtaagccccacaaattggac

SEQ ID NO: 33871 - DNA, 21 bp, synthetic construct
  source 1..21: mol_type = other DNA
tattcccgcgctaatctcaac

SEQ ID NO: 33872 - DNA, 21 bp, synthetic construct
  source 1..21: mol_type = other DNA
tactgggcaggtgtaatcgac

SEQ ID NO: 33873 - DNA, 21 bp, synthetic construct
  source 1..21: mol_type = other DNA
tgcaatccgtcaagtgagaag

SEQ ID NO: 33874 - DNA, 21 bp, synthetic construct
  source 1..21: mol_type = other DNA
tacagccggatcgacaacaac

SEQ ID NO: 33875 - DNA, 21 bp, synthetic construct
  source 1..21: mol_type = other DNA
tactggagtcacgtaaaagat

SEQ ID NO: 33876 - DNA, 21 bp, synthetic construct
  source 1..21: mol_type = other DNA
ggtgcaccaacgtgctgtgct

SEQ ID NO: 33877 - DNA, 21 bp, synthetic construct
  source 1..21: mol_type = other DNA
tgcaatggacctatgacagca

SEQ ID NO: 33878 - DNA, 21 bp, synthetic construct
  source 1..21: mol_type = other DNA
tacagtcggcacggcgtcaat

SEQ ID NO: 33879 - DNA, 21 bp, synthetic construct
  source 1..21: mol_type = other DNA
gagggaccgataggccagtgt

SEQ ID NO: 33880 - DNA, 21 bp, synthetic construct
  source 1..21: mol_type = other DNA
tattacacagggcgcgcggac

SEQ ID NO: 33881 - DNA, 21 bp, synthetic construct
  source 1..21: mol_type = other DNA
ttcttcacaggcacagttgag

SEQ ID NO: 33882 - DNA, 21 bp, synthetic construct
  source 1..21: mol_type = other DNA
atctcgggtggaacagccgga

SEQ ID NO: 33883 - DNA, 21 bp, synthetic construct
  source 1..21: mol_type = other DNA
agcatgcaagacagaaactgg

SEQ ID NO: 33884 - DNA, 21 bp, synthetic construct
  source 1..21: mol_type = other DNA
ttttggtcgggtatgaaggac

SEQ ID NO: 33885 - DNA, 21 bp, synthetic construct
  source 1..21: mol_type = other DNA
atcgaaagttataacgggcgt

SEQ ID NO: 33886 - DNA, 21 bp, synthetic construct
  source 1..21: mol_type = other DNA
ggcagcgatacgtctcggtgg

SEQ ID NO: 33887 - DNA, 21 bp, synthetic construct
  source 1..21: mol_type = other DNA
tactattcgggccaacgcgac

SEQ ID NO: 33888 - DNA, 21 bp, synthetic construct
  source 1..21: mol_type = other DNA
aggtcgccagatgtttttcct

SEQ ID NO: 33889 - DNA, 21 bp, synthetic construct
  source 1..21: mol_type = other DNA
ggagccgaaggggtccggtgg

SEQ ID NO: 33890 - DNA, 21 bp, synthetic construct
  source 1..21: mol_type = other DNA
gaaatgcaggacaggagctgg

SEQ ID NO: 33891 - DNA, 21 bp, synthetic construct
  source 1..21: mol_type = other DNA
actaactgtgctataaatgca

SEQ ID NO: 33892 - DNA, 21 bp, synthetic construct
  source 1..21: mol_type = other DNA
ctagctaagcaaggttttaat

SEQ ID NO: 33893 - DNA, 21 bp, synthetic construct
  source 1..21: mol_type = other DNA
cggggcgacgaagtatttcct

SEQ ID NO: 33894 - DNA, 21 bp, synthetic construct
  source 1..21: mol_type = other DNA
tacttctccggtacgattcgt

SEQ ID NO: 33895 - DNA, 21 bp, synthetic construct
  source 1..21: mol_type = other DNA
tgcaaacccggaatgggagaa

SEQ ID NO: 33896 - DNA, 21 bp, synthetic construct
  source 1..21: mol_type = other DNA
agaggcgggaatgtatatcct

SEQ ID NO: 33897 - DNA, 21 bp, synthetic construct
  source 1..21: mol_type = other DNA
gtgggacagcgttgcgctgag

SEQ ID NO: 33898 - DNA, 21 bp, synthetic construct
  source 1..21: mol_type = other DNA
gggtcaataggagtctcttgg

SEQ ID NO: 33899 - DNA, 21 bp, synthetic construct
  source 1..21: mol_type = other DNA
tacagccgccaagggcataac

SEQ ID NO: 33900 - DNA, 21 bp, synthetic construct
  source 1..21: mol_type = other DNA
tgcaaaggcccctattcagaa

SEQ ID NO: 33901 - DNA, 21 bp, synthetic construct
  source 1..21: mol_type = other DNA
tgtaggcctgatgtgaaaggt

SEQ ID NO: 33902 - DNA, 21 bp, synthetic construct
  source 1..21: mol_type = other DNA
tattttagccagatcgtagcg

SEQ ID NO: 33903 - DNA, 21 bp, synthetic construct
  source 1..21: mol_type = other DNA
ttcttctccggggttcaagaa

SEQ ID NO: 33904 - DNA, 21 bp, synthetic construct
  source 1..21: mol_type = other DNA
tactacagcggacaaagggcg

SEQ ID NO: 33905 - DNA, 21 bp, synthetic construct
  source 1..21: mol_type = other DNA
gggtcggagacatcaaaatgg

SEQ ID NO: 33906 - DNA, 21 bp, synthetic construct
  source 1..21: mol_type = other DNA
tgcaaacggggtgacgctgcg

SEQ ID NO: 33907 - DNA, 21 bp, synthetic construct
  source 1..21: mol_type = other DNA
tggcaaagtaccaacggcatg

SEQ ID NO: 33908 - DNA, 21 bp, synthetic construct
  source 1..21: mol_type = other DNA
acgtggtctggagttgttgcc

SEQ ID NO: 33909 - DNA, 21 bp, synthetic construct
  source 1..21: mol_type = other DNA
ttcgccagaaacgggttcaat

SEQ ID NO: 33910 - DNA, 21 bp, synthetic construct
  source 1..21: mol_type = other DNA
tgcgcgccgtacttgctggaa

SEQ ID NO: 33911 - DNA, 21 bp, synthetic construct
  source 1..21: mol_type = other DNA
gggggtcatacaagcacgtgg

SEQ ID NO: 33912 - DNA, 21 bp, synthetic construct
  source 1..21: mol_type = other DNA
tacgcgcgtttgaacgtaaat

SEQ ID NO: 33913 - DNA, 21 bp, synthetic construct
  source 1..21: mol_type = other DNA
tatgcaaaaggcaatctaaac

SEQ ID NO: 33914 - DNA, 21 bp, synthetic construct
  source 1..21: mol_type = other DNA
cggggggagttcatgtcatat

SEQ ID NO: 33915 - DNA, 21 bp, synthetic construct
  source 1..21: mol_type = other DNA
tttttcgcgggaatcagagag

SEQ ID NO: 33916 - DNA, 21 bp, synthetic construct
  source 1..21: mol_type = other DNA
tatgcacggtcaaacgataac

SEQ ID NO: 33917 - DNA, 21 bp, synthetic construct
  source 1..21: mol_type = other DNA
tatgctagtacaaacggggtt

SEQ ID NO: 33918 - DNA, 21 bp, synthetic construct
  source 1..21: mol_type = other DNA
tactcgagggtaaattttaat

SEQ ID NO: 33919 - DNA, 21 bp, synthetic construct
  source 1..21: mol_type = other DNA
agtgatggaagcagtctttgg

SEQ ID NO: 33920 - DNA, 21 bp, synthetic construct
  source 1..21: mol_type = other DNA
agaggtgagcgttgtccagac

SEQ ID NO: 33921 - DNA, 21 bp, synthetic construct
  source 1..21: mol_type = other DNA
tacttctcggggcaacaacgc

SEQ ID NO: 33922 - DNA, 21 bp, synthetic construct
  source 1..21: mol_type = other DNA
tggtattctggtgttaaagaa

SEQ ID NO: 33923 - DNA, 21 bp, synthetic construct
  source 1..21: mol_type = other DNA
ttctgtaggccgtgtagtgag

SEQ ID NO: 33924 - DNA, 21 bp, synthetic construct
  source 1..21: mol_type = other DNA
tatttttcgggtgtttctgac

SEQ ID NO: 33925 - DNA, 21 bp, synthetic construct
  source 1..21: mol_type = other DNA
tacgctaggggtgataacggg

SEQ ID NO: 33926 - DNA, 21 bp, synthetic construct
  source 1..21: mol_type = other DNA
aggatggactccgtcgtatgg

SEQ ID NO: 33927 - DNA, 21 bp, synthetic construct
  source 1..21: mol_type = other DNA
tgcaggccgggtgctatcgct

SEQ ID NO: 33928 - DNA, 21 bp, synthetic construct
  source 1..21: mol_type = other DNA
tatactcgaagtcaaactgag

SEQ ID NO: 33929 - DNA, 21 bp, synthetic construct
  source 1..21: mol_type = other DNA
tactttacggggaaggaagaa

SEQ ID NO: 33930 - DNA, 21 bp, synthetic construct
  source 1..21: mol_type = other DNA
tgtcgtccgagcccgggtata

SEQ ID NO: 33931 - DNA, 21 bp, synthetic construct
  source 1..21: mol_type = other DNA
ttcttctcaggtaggctggaa

SEQ ID NO: 33932 - DNA, 21 bp, synthetic construct
  source 1..21: mol_type = other DNA
tacagcaaatacaactacaat

SEQ ID NO: 33933 - DNA, 21 bp, synthetic construct
  source 1..21: mol_type = other DNA
tggagtccgatgtgcaaggcc

SEQ ID NO: 33934 - DNA, 21 bp, synthetic construct
  source 1..21: mol_type = other DNA
ggcccaatgagctgtaaggaa

SEQ ID NO: 33935 - DNA, 21 bp, synthetic construct
  source 1..21: mol_type = other DNA
tggtggacaggcatgcccgac

SEQ ID NO: 33936 - DNA, 21 bp, synthetic construct
  source 1..21: mol_type = other DNA
ttggcccgctcgggtgataat

SEQ ID NO: 33937 - DNA, 21 bp, synthetic construct
  source 1..21: mol_type = other DNA
gtaagtagtacgtgtacggca

SEQ ID NO: 33938 - DNA, 21 bp, synthetic construct
  source 1..21: mol_type = other DNA
tactgggagggtgtgaaggat

SEQ ID NO: 33939 - DNA, 21 bp, synthetic construct
  source 1..21: mol_type = other DNA
gtagacgactggtcaatgtat

SEQ ID NO: 33940 - DNA, 21 bp, synthetic construct
  source 1..21: mol_type = other DNA
tgggataatggagtcacgggg

SEQ ID NO: 33941 - DNA, 21 bp, synthetic construct
  source 1..21: mol_type = other DNA
aatacccccatgtgtaaagca

SEQ ID NO: 33942 - DNA, 21 bp, synthetic construct
  source 1..21: mol_type = other DNA
gttagttcgcaaaatggagta

SEQ ID NO: 33943 - DNA, 21 bp, synthetic construct
  source 1..21: mol_type = other DNA
aaagacgacttcgtagttttt

SEQ ID NO: 33944 - DNA, 21 bp, synthetic construct
  source 1..21: mol_type = other DNA
tactcgaagttagacccgtta

SEQ ID NO: 33945 - DNA, 21 bp, synthetic construct
  source 1..21: mol_type = other DNA
gtaagcggaggaacagcgggc

SEQ ID NO: 33946 - DNA, 21 bp, synthetic construct
  source 1..21: mol_type = other DNA
agaagtgataccgtgtactgg

SEQ ID NO: 33947 - DNA, 21 bp, synthetic construct
  source 1..21: mol_type = other DNA
tacagcagaatgaaccaaaac

SEQ ID NO: 33948 - DNA, 21 bp, synthetic construct
  source 1..21: mol_type = other DNA
tattttgtaggccgcacggac

SEQ ID NO: 33949 - DNA, 21 bp, synthetic construct
  source 1..21: mol_type = other DNA
ggatcggaattctcgacgtac

SEQ ID NO: 33950 - DNA, 21 bp, synthetic construct
  source 1..21: mol_type = other DNA
tactcgcggcaaaacttcaat

SEQ ID NO: 33951 - DNA, 21 bp, synthetic construct
  source 1..21: mol_type = other DNA
tattcgagcactaacggcata

SEQ ID NO: 33952 - DNA, 21 bp, synthetic construct
  source 1..21: mol_type = other DNA
tgcaaaaaggatgaagcggtc

SEQ ID NO: 33953 - DNA, 21 bp, synthetic construct
  source 1..21: mol_type = other DNA
agggatagtgacaatgggatt

SEQ ID NO: 33954 - DNA, 21 bp, synthetic construct
  source 1..21: mol_type = other DNA
tactctcggagcgggcacaac

SEQ ID NO: 33955 - DNA, 21 bp, synthetic construct
  source 1..21: mol_type = other DNA
tactcacggggaaatatgaat

SEQ ID NO: 33956 - DNA, 21 bp, synthetic construct
  source 1..21: mol_type = other DNA
atcgatgaatttttaagttgg

SEQ ID NO: 33957 - DNA, 21 bp, synthetic construct
  source 1..21: mol_type = other DNA
tactggtccggaaggccggag

SEQ ID NO: 33958 - DNA, 21 bp, synthetic construct
  source 1..21: mol_type = other DNA
tatagtcgcaataaccctaac

SEQ ID NO: 33959 - DNA, 21 bp, synthetic construct
  source 1..21: mol_type = other DNA
tgtaacaagccgtacactgcc

SEQ ID NO: 33960 - DNA, 21 bp, synthetic construct
  source 1..21: mol_type = other DNA
tatgcgaggggcaatgacaac

SEQ ID NO: 33961 - DNA, 21 bp, synthetic construct
  source 1..21: mol_type = other DNA
tgtaaggcagggtgcaaagat

SEQ ID NO: 33962 - DNA, 21 bp, synthetic construct
  source 1..21: mol_type = other DNA
gtcgactctgataacggcagg

SEQ ID NO: 33963 - DNA, 21 bp, synthetic construct
  source 1..21: mol_type = other DNA
tgcacctcgcaaacagggcat

SEQ ID NO: 33964 - DNA, 21 bp, synthetic construct
  source 1..21: mol_type = other DNA
tgcaaaatgccaggtatggac

SEQ ID NO: 33965 - DNA, 21 bp, synthetic construct
  source 1..21: mol_type = other DNA
tgtaaagttagcgcgagcgcg

SEQ ID NO: 33966 - DNA, 21 bp, synthetic construct
  source 1..21: mol_type = other DNA
gtagagccgacgtgtaaagac

SEQ ID NO: 33967 - DNA, 21 bp, synthetic construct
  source 1..21: mol_type = other DNA
tatttttctaacgtacgtagt

SEQ ID NO: 33968 - DNA, 21 bp, synthetic construct
  source 1..21: mol_type = other DNA
tgggagtctacgaacggggtc

SEQ ID NO: 33969 - DNA, 21 bp, synthetic construct
  source 1..21: mol_type = other DNA
ttatggaatggaaccgcacca

SEQ ID NO: 33970 - DNA, 21 bp, synthetic construct
  source 1..21: mol_type = other DNA
ctgtggcgaacgggcataaat

SEQ ID NO: 33971 - DNA, 21 bp, synthetic construct
  source 1..21: mol_type = other DNA
tgtagagagtcaactgaaaga

SEQ ID NO: 33972 - DNA, 21 bp, synthetic construct
  source 1..21: mol_type = other DNA
tacttcagcaacgttaggtcc

SEQ ID NO: 33973 - DNA, 21 bp, synthetic construct
  source 1..21: mol_type = other DNA
agatcagagtttagaacttat

SEQ ID NO: 33974 - DNA, 21 bp, synthetic construct
  source 1..21: mol_type = other DNA
atcctccaggacagggggtgg

SEQ ID NO: 33975 - DNA, 21 bp, synthetic construct
  source 1..21: mol_type = other DNA
aatgaggactgggtaaaatgg

SEQ ID NO: 33976 - DNA, 21 bp, synthetic construct
  source 1..21: mol_type = other DNA
tatcatgccaaaagcaccaac

SEQ ID NO: 33977 - DNA, 21 bp, synthetic construct
  source 1..21: mol_type = other DNA
ttagggttaggctgttgcggt

SEQ ID NO: 33978 - DNA, 21 bp, synthetic construct
  source 1..21: mol_type = other DNA
tgttctaggatcggtccaaat

SEQ ID NO: 33979 - DNA, 21 bp, synthetic construct
  source 1..21: mol_type = other DNA
agagaggatttcactatgtgg

SEQ ID NO: 33980 - DNA, 21 bp, synthetic construct
  source 1..21: mol_type = other DNA
tgccccaaaaccaaattagaa

SEQ ID NO: 33981 - DNA, 21 bp, synthetic construct
  source 1..21: mol_type = other DNA
cgtgaagaaacggttggttgg

SEQ ID NO: 33982 - DNA, 21 bp, synthetic construct
  source 1..21: mol_type = other DNA
gtccctcagcgctgcgctccc

SEQ ID NO: 33983 - DNA, 21 bp, synthetic construct
  source 1..21: mol_type = other DNA
tacgacgggagttgcaaggca

SEQ ID NO: 33984 - DNA, 21 bp, synthetic construct
  source 1..21: mol_type = other DNA
tgcaagaaagacaaagaagta

SEQ ID NO: 33985 - DNA, 21 bp, synthetic construct
  source 1..21: mol_type = other DNA
aggggagacgacagagggtgg

SEQ ID NO: 33986 - DNA, 21 bp, synthetic construct
  source 1..21: mol_type = other DNA
tgcgcgccttacacccatgaa

SEQ ID NO: 33987 - DNA, 21 bp, synthetic construct
  source 1..21: mol_type = other DNA
tattttgctggacgggcggag

SEQ ID NO: 33988 - DNA, 21 bp, synthetic construct
  source 1..21: mol_type = other DNA
catcatagttctaatggtgtc

SEQ ID NO: 33989 - DNA, 21 bp, synthetic construct
  source 1..21: mol_type = other DNA
atctactcaaccaacggtgta

SEQ ID NO: 33990 - DNA, 21 bp, synthetic construct
  source 1..21: mol_type = other DNA
tattctcgtataaataataat

SEQ ID NO: 33991 - DNA, 21 bp, synthetic construct
  source 1..21: mol_type = other DNA
tacttctctggcttaatggct

SEQ ID NO: 33992 - DNA, 21 bp, synthetic construct
  source 1..21: mol_type = other DNA
tttgatggtagctgtaaggcg

SEQ ID NO: 33993 - DNA, 21 bp, synthetic construct
  source 1..21: mol_type = other DNA
tatcacagacagaaccctctt

SEQ ID NO: 33994 - DNA, 21 bp, synthetic construct
  source 1..21: mol_type = other DNA
aggggggaaacgagcagctgg

SEQ ID NO: 33995 - DNA, 21 bp, synthetic construct
  source 1..21: mol_type = other DNA
tactactccggcgtagcgtta

SEQ ID NO: 33996 - DNA, 21 bp, synthetic construct
  source 1..21: mol_type = other DNA
tatgcaagatcgaatcacaat

SEQ ID NO: 33997 - DNA, 21 bp, synthetic construct
  source 1..21: mol_type = other DNA
tatagcagaactaataacaat

SEQ ID NO: 33998 - DNA, 21 bp, synthetic construct
  source 1..21: mol_type = other DNA
agcgacggggtttcggcgtgg

SEQ ID NO: 33999 - DNA, 21 bp, synthetic construct
  source 1..21: mol_type = other DNA
ttttggagcgggaccaaagag

SEQ ID NO: 34000 - DNA, 21 bp, synthetic construct
  source 1..21: mol_type = other DNA
gggagcgaattcaaatcatat

SEQ ID NO: 34001 - DNA, 21 bp, synthetic construct
  source 1..21: mol_type = other DNA
actggagattggacaccgttt

SEQ ID NO: 34002 - DNA, 21 bp, synthetic construct
  source 1..21: mol_type = other DNA
ttttggtccggaacgtttgag

SEQ ID NO: 34003 - DNA, 21 bp, synthetic construct
  source 1..21: mol_type = other DNA
tttcattcgacaaacggtatt

SEQ ID NO: 34004 - DNA, 21 bp, synthetic construct
  source 1..21: mol_type = other DNA
ttttcgcgcatgaatcataat

SEQ ID NO: 34005 - DNA, 21 bp, synthetic construct
  source 1..21: mol_type = other DNA
tactcccgggctaattacaat

SEQ ID NO: 34006 - DNA, 21 bp, synthetic construct
  source 1..21: mol_type = other DNA
tatcaccgtgctcagatgaat

SEQ ID NO: 34007 - DNA, 21 bp, synthetic construct
  source 1..21: mol_type = other DNA
tgtactagcaaaataggacat

SEQ ID NO: 34008 - DNA, 21 bp, synthetic construct
  source 1..21: mol_type = other DNA
tccatgagagatcgatcctgg

SEQ ID NO: 34009 - DNA, 21 bp, synthetic construct
  source 1..21: mol_type = other DNA
gacatgggaagtgcggcttgg

SEQ ID NO: 34010 - DNA, 21 bp, synthetic construct
  source 1..21: mol_type = other DNA
tattcaaggtctaatacgaac

SEQ ID NO: 34011 - DNA, 21 bp, synthetic construct
  source 1..21: mol_type = other DNA
tgcaggtcggaggtagtgaaa

SEQ ID NO: 34012 - DNA, 21 bp, synthetic construct
  source 1..21: mol_type = other DNA
tacgcaagagcaggtgtcaat

SEQ ID NO: 34013 - DNA, 21 bp, synthetic construct
  source 1..21: mol_type = other DNA
ggggacgaatatataatgtat

SEQ ID NO: 34014 - DNA, 21 bp, synthetic construct
  source 1..21: mol_type = other DNA
tatagtaagggcaacactaat

SEQ ID NO: 34015 - DNA, 21 bp, synthetic construct
  source 1..21: mol_type = other DNA
gttcccactacaccttgtatg

SEQ ID NO: 34016 - DNA, 21 bp, synthetic construct
  source 1..21: mol_type = other DNA
tacttcatgggggagcgagag

SEQ ID NO: 34017 - DNA, 21 bp, synthetic construct
  source 1..21: mol_type = other DNA
tactcccgaatattacctaac

SEQ ID NO: 34018 - DNA, 21 bp, synthetic construct
  source 1..21: mol_type = other DNA
ccgatggggtcggctgagtgg

SEQ ID NO: 34019 - DNA, 21 bp, synthetic construct
  source 1..21: mol_type = other DNA
tactcgagactagactatgat

SEQ ID NO: 34020 - DNA, 21 bp, synthetic construct
  source 1..21: mol_type = other DNA
gatgacggtgtgtccaagtgg

SEQ ID NO: 34021 - DNA, 21 bp, synthetic construct
  source 1..21: mol_type = other DNA
tattttacgggtgcaatggac

SEQ ID NO: 34022 - DNA, 21 bp, synthetic construct
  source 1..21: mol_type = other DNA
tactccaggttggggggggac

SEQ ID NO: 34023 - DNA, 21 bp, synthetic construct
  source 1..21: mol_type = other DNA
tacgggacggggacgtggagt

SEQ ID NO: 34024 - DNA, 21 bp, synthetic construct
  source 1..21: mol_type = other DNA
ccactctcttctggggtatgg

SEQ ID NO: 34025 - DNA, 21 bp, synthetic construct
  source 1..21: mol_type = other DNA
tgtaaaggtgatgcgaaagca

SEQ ID NO: 34026 - DNA, 21 bp, synthetic construct
  source 1..21: mol_type = other DNA
atgacgggcacgagctgtagt

SEQ ID NO: 34027 - DNA, 21 bp, synthetic construct
  source 1..21: mol_type = other DNA
tattttactggtcacaccatg

SEQ ID NO: 34028 - DNA, 21 bp, synthetic construct
  source 1..21: mol_type = other DNA
caatgcaagccgtgcttgacc

SEQ ID NO: 34029 - DNA, 21 bp, synthetic construct
  source 1..21: mol_type = other DNA
tattggcacggcaagcccgat

SEQ ID NO: 34030 - DNA, 21 bp, synthetic construct
  source 1..21: mol_type = other DNA
gtgttctcgagcaacggagtg

SEQ ID NO: 34031 - DNA, 21 bp, synthetic construct
  source 1..21: mol_type = other DNA
tacattagtacaaacggtagg

SEQ ID NO: 34032 - DNA, 21 bp, synthetic construct
  source 1..21: mol_type = other DNA
tacgccgcatcgggcagaaat

SEQ ID NO: 34033 - DNA, 21 bp, synthetic construct
  source 1..21: mol_type = other DNA
tattataccgggcaagtcacg

SEQ ID NO: 34034 - DNA, 21 bp, synthetic construct
  source 1..21: mol_type = other DNA
ttggcaagaagtggcggggga

SEQ ID NO: 34035 - DNA, 21 bp, synthetic construct
  source 1..21: mol_type = other DNA
attgatgggtcctgcaaggca

SEQ ID NO: 34036 - DNA, 21 bp, synthetic construct
  source 1..21: mol_type = other DNA
cagtgtagaccatgctctgaa

SEQ ID NO: 34037 - DNA, 21 bp, synthetic construct
  source 1..21: mol_type = other DNA
cgcagcgagtaccatttccca

SEQ ID NO: 34038 - DNA, 21 bp, synthetic construct
  source 1..21: mol_type = other DNA
tatttcagtggtgtcagtcaa

SEQ ID NO: 34039 - DNA, 21 bp, synthetic construct
  source 1..21: mol_type = other DNA
tattcgaagtacggcatgaat

SEQ ID NO: 34040 - DNA, 21 bp, synthetic construct
  source 1..21: mol_type = other DNA
tattcggggcaaggatgcgta

SEQ ID NO: 34041 - DNA, 21 bp, synthetic construct
  source 1..21: mol_type = other DNA
gtgaaaccggataatacgtgc

SEQ ID NO: 34042 - DNA, 21 bp, synthetic construct
  source 1..21: mol_type = other DNA
tactcacggcacaaccaaaat

SEQ ID NO: 34043 - DNA, 21 bp, synthetic construct
  source 1..21: mol_type = other DNA
tgcaagccgggccccatcgga

SEQ ID NO: 34044 - DNA, 21 bp, synthetic construct
  source 1..21: mol_type = other DNA
tatagtagaatgaattacaat

SEQ ID NO: 34045 - DNA, 21 bp, synthetic construct
  source 1..21: mol_type = other DNA
caaactggtgggggaagctgc

SEQ ID NO: 34046 - DNA, 21 bp, synthetic construct
  source 1..21: mol_type = other DNA
tatagtagaatgggattcaat

SEQ ID NO: 34047 - DNA, 21 bp, synthetic construct
  source 1..21: mol_type = other DNA
tacgcacgcatcggagagaat

SEQ ID NO: 34048 - DNA, 21 bp, synthetic construct
  source 1..21: mol_type = other DNA
tatgcccgcgatgggccaaac

SEQ ID NO: 34049 - DNA, 21 bp, synthetic construct
  source 1..21: mol_type = other DNA
tattgggctggtataccagaa

SEQ ID NO: 34050 - DNA, 21 bp, synthetic construct
  source 1..21: mol_type = other DNA
tactatacaggaagaaccgac

SEQ ID NO: 34051 - DNA, 21 bp, synthetic construct
  source 1..21: mol_type = other DNA
tgcaataaagcaatgaccgct

SEQ ID NO: 34052 - DNA, 21 bp, synthetic construct
  source 1..21: mol_type = other DNA
ttttggtcaggtaccgtggcc

SEQ ID NO: 34053 - DNA, 21 bp, synthetic construct
  source 1..21: mol_type = other DNA
aacatgcaggaccgtagttgg

SEQ ID NO: 34054 - DNA, 21 bp, synthetic construct
  source 1..21: mol_type = other DNA
ccatttgccaaatcacctatg

SEQ ID NO: 34055 - DNA, 21 bp, synthetic construct
  source 1..21: mol_type = other DNA
tactggtcgggaaaacagagc

SEQ ID NO: 34056 - DNA, 21 bp, synthetic construct
  source 1..21: mol_type = other DNA
agagaaggtactagttcatgg

SEQ ID NO: 34057 - DNA, 21 bp, synthetic construct
  source 1..21: mol_type = other DNA
cgggacggtgagtccgcttgg

SEQ ID NO: 34058 - DNA, 21 bp, synthetic construct
  source 1..21: mol_type = other DNA
atgcgcgacgggactagctca

SEQ ID NO: 34059 - DNA, 21 bp, synthetic construct
  source 1..21: mol_type = other DNA
tgcaaaatgtcttgccctctt

SEQ ID NO: 34060 - DNA, 21 bp, synthetic construct
  source 1..21: mol_type = other DNA
tacagccgcggtaatttcaat

SEQ ID NO: 34061 - DNA, 21 bp, synthetic construct
  source 1..21: mol_type = other DNA
tacagcagaagtaacaacaac

SEQ ID NO: 34062 - DNA, 21 bp, synthetic construct
  source 1..21: mol_type = other DNA
tgcaaaggcctaaaagtcgag

SEQ ID NO: 34063 - DNA, 21 bp, synthetic construct
  source 1..21: mol_type = other DNA
cggttatacgatacatttgcc

SEQ ID NO: 34064 - DNA, 21 bp, synthetic construct
  source 1..21: mol_type = other DNA
tactcgaggaatgggcagaat

SEQ ID NO: 34065 - DNA, 21 bp, synthetic construct
  source 1..21: mol_type = other DNA
tttgcccgttctggacataat

SEQ ID NO: 34066 - DNA, 21 bp, synthetic construct
  source 1..21: mol_type = other DNA
aggcagacggcttgtccagct

SEQ ID NO: 34067 - DNA, 21 bp, synthetic construct
  source 1..21: mol_type = other DNA
tgtaagcctgggagtcctatc

SEQ ID NO: 34068 - DNA, 21 bp, synthetic construct
  source 1..21: mol_type = other DNA
tactggacagggaaaccagag

SEQ ID NO: 34069 - DNA, 21 bp, synthetic construct
  source 1..21: mol_type = other DNA
acgttttacggcgatgctgcc

SEQ ID NO: 34070 - DNA, 21 bp, synthetic construct
  source 1..21: mol_type = other DNA
gaggaggaaaagtgccgtgag

SEQ ID NO: 34071 - DNA, 21 bp, synthetic construct
  source 1..21: mol_type = other DNA
cacaccatagatagctttcct

SEQ ID NO: 34072 - DNA, 21 bp, synthetic construct
  source 1..21: mol_type = other DNA
tgcaattttaaaggccctccg

SEQ ID NO: 34073 - DNA, 21 bp, synthetic construct
  source 1..21: mol_type = other DNA
gggagcgagacctccatgtgg

SEQ ID NO: 34074 - DNA, 21 bp, synthetic construct
  source 1..21: mol_type = other DNA
ccatacgctaaatcagcgaat

SEQ ID NO: 34075 - DNA, 21 bp, synthetic construct
  source 1..21: mol_type = other DNA
ttctttcatggcaaagtggag

SEQ ID NO: 34076 - DNA, 21 bp, synthetic construct
  source 1..21: mol_type = other DNA
aataaggaaggctgtaagccc

SEQ ID NO: 34077 - DNA, 21 bp, synthetic construct
  source 1..21: mol_type = other DNA
tattggacggcaaaacctgat

SEQ ID NO: 34078 - DNA, 21 bp, synthetic construct
  source 1..21: mol_type = other DNA
agagatgacttcgttagcttc

SEQ ID NO: 34079 - DNA, 21 bp, synthetic construct
  source 1..21: mol_type = other DNA
tggacgtcgtctaatggtgtt

SEQ ID NO: 34080 - DNA, 21 bp, synthetic construct
  source 1..21: mol_type = other DNA
tgtttctcaaagactggtcac

SEQ ID NO: 34081 - DNA, 21 bp, synthetic construct
  source 1..21: mol_type = other DNA
attgactcagggaaagcctgt

SEQ ID NO: 34082 - DNA, 21 bp, synthetic construct
  source 1..21: mol_type = other DNA
atggagagaacgcagatgtgc

SEQ ID NO: 34083 - DNA, 21 bp, synthetic construct
  source 1..21: mol_type = other DNA
tattcaaaaaataatatcaac

SEQ ID NO: 34084 - DNA, 21 bp, synthetic construct
  source 1..21: mol_type = other DNA
gtgatggacgggcttaggtgg

SEQ ID NO: 34085 - DNA, 21 bp, synthetic construct
  source 1..21: mol_type = other DNA
tattcccggaatggtagtaac

SEQ ID NO: 34086 - DNA, 21 bp, synthetic construct
  source 1..21: mol_type = other DNA
tatagtcgcaactcaccaaac

SEQ ID NO: 34087 - DNA, 21 bp, synthetic construct
  source 1..21: mol_type = other DNA
gacgatggccgaagcaggtat

SEQ ID NO: 34088 - DNA, 21 bp, synthetic construct
  source 1..21: mol_type = other DNA
tattggagtcacgttaaagag

SEQ ID NO: 34089 - DNA, 21 bp, synthetic construct
  source 1..21: mol_type = other DNA
tacgcgcgcggttcgattaat

SEQ ID NO: 34090 - DNA, 21 bp, synthetic construct
  source 1..21: mol_type = other DNA
tacttttcaggacgaatacag

SEQ ID NO: 34091 - DNA, 21 bp, synthetic construct
  source 1..21: mol_type = other DNA
tatcaccgtcttggtgaacct

SEQ ID NO: 34092 - DNA, 21 bp, synthetic construct
  source 1..21: mol_type = other DNA
ttacataggttgcatcaagac

SEQ ID NO: 34093 - DNA, 21 bp, synthetic construct
  source 1..21: mol_type = other DNA
aggacttgggacgctattgtt

SEQ ID NO: 34094 - DNA, 21 bp, synthetic construct
  source 1..21: mol_type = other DNA
gtgaaaagtagcgaagcttgc

SEQ ID NO: 34095 - DNA, 21 bp, synthetic construct
  source 1..21: mol_type = other DNA
ttcttcactggcaaacttgac

SEQ ID NO: 34096 - DNA, 21 bp, synthetic construct
  source 1..21: mol_type = other DNA
tatgctaaaatgggctataac

SEQ ID NO: 34097 - DNA, 21 bp, synthetic construct
  source 1..21: mol_type = other DNA
tatagcaagtatggcttaaat

SEQ ID NO: 34098 - DNA, 21 bp, synthetic construct
  source 1..21: mol_type = other DNA
tattatagtggagtaagggac

SEQ ID NO: 34099 - DNA, 21 bp, synthetic construct
  source 1..21: mol_type = other DNA
cctggtccgatgaagccctgc

SEQ ID NO: 34100 - DNA, 21 bp, synthetic construct
  source 1..21: mol_type = other DNA
tgcagtggaagaccacaggag

SEQ ID NO: 34101 - DNA, 21 bp, synthetic construct
  source 1..21: mol_type = other DNA
tgcaatcatcctatgacagcg

SEQ ID NO: 34102 - DNA, 21 bp, synthetic construct
  source 1..21: mol_type = other DNA
agaagcgagacctcatcatgg

SEQ ID NO: 34103 - DNA, 21 bp, synthetic construct
  source 1..21: mol_type = other DNA
tactggacgggcatgcccgag

SEQ ID NO: 34104 - DNA, 21 bp, synthetic construct
  source 1..21: mol_type = other DNA
ttctggtctggaatggttgct

SEQ ID NO: 34105 - DNA, 21 bp, synthetic construct
  source 1..21: mol_type = other DNA
ctacctcggacaggcgattgc

SEQ ID NO: 34106 - DNA, 21 bp, synthetic construct
  source 1..21: mol_type = other DNA
tattggcaaggtaagatagac

SEQ ID NO: 34107 - DNA, 21 bp, synthetic construct
  source 1..21: mol_type = other DNA
ttagatgattggacgggcttc

SEQ ID NO: 34108 - DNA, 21 bp, synthetic construct
  source 1..21: mol_type = other DNA
tacagcagaatcggtcctatc

SEQ ID NO: 34109 - DNA, 21 bp, synthetic construct
  source 1..21: mol_type = other DNA
aaggaagggacctctaggtgg

SEQ ID NO: 34110 - DNA, 21 bp, synthetic construct
  source 1..21: mol_type = other DNA
ttcagtcgggccggctcaaat

SEQ ID NO: 34111 - DNA, 21 bp, synthetic construct
  source 1..21: mol_type = other DNA
tgtttgagagcgaggccggag

SEQ ID NO: 34112 - DNA, 21 bp, synthetic construct
  source 1..21: mol_type = other DNA
aaggcggatcacctaaagtgg

SEQ ID NO: 34113 - DNA, 21 bp, synthetic construct
  source 1..21: mol_type = other DNA
ggcggtcccggttcgatttgg

SEQ ID NO: 34114 - DNA, 21 bp, synthetic construct
  source 1..21: mol_type = other DNA
gacaggaaaccgtgccccgca

SEQ ID NO: 34115 - DNA, 21 bp, synthetic construct
  source 1..21: mol_type = other DNA
tattttacacatcgatacgac

SEQ ID NO: 34116 - DNA, 21 bp, synthetic construct
  source 1..21: mol_type = other DNA
tatcatcgtttagataacgac

SEQ ID NO: 34117 - DNA, 21 bp, synthetic construct
  source 1..21: mol_type = other DNA
ttctcccgccttggggagaac

SEQ ID NO: 34118 - DNA, 21 bp, synthetic construct
  source 1..21: mol_type = other DNA
agaaacgaattctcaggcttc

SEQ ID NO: 34119 - DNA, 21 bp, synthetic construct
  source 1..21: mol_type = other DNA
atctgtaggccatgtagcgag

SEQ ID NO: 34120 - DNA, 21 bp, synthetic construct
  source 1..21: mol_type = other DNA
ggtggtggatccagcagctgg

SEQ ID NO: 34121 - DNA, 21 bp, synthetic construct
  source 1..21: mol_type = other DNA
tactggtccgctgttacagag

SEQ ID NO: 34122 - DNA, 21 bp, synthetic construct
  source 1..21: mol_type = other DNA
gcaggagctacgtccacttgg

SEQ ID NO: 34123 - DNA, 21 bp, synthetic construct
  source 1..21: mol_type = other DNA
tgcaaagctagaccctgtggt

SEQ ID NO: 34124 - DNA, 21 bp, synthetic construct
  source 1..21: mol_type = other DNA
cgctctgagtttacggtgttt

SEQ ID NO: 34125 - DNA, 21 bp, synthetic construct
  source 1..21: mol_type = other DNA
tgtaaggcatcaaagtgcgca

SEQ ID NO: 34126 - DNA, 21 bp, synthetic construct
  source 1..21: mol_type = other DNA
tgtaaaacgataacgaatgac

SEQ ID NO: 34127 - DNA, 21 bp, synthetic construct
  source 1..21: mol_type = other DNA
gggggtgggactagcaaatgg

SEQ ID NO: 34128 - DNA, 21 bp, synthetic construct
  source 1..21: mol_type = other DNA
tattcgagaataaattttaac

SEQ ID NO: 34129 - DNA, 21 bp, synthetic construct
  source 1..21: mol_type = other DNA
tgtaataaaccgcaaacggca

SEQ ID NO: 34130 - DNA, 21 bp, synthetic construct
  source 1..21: mol_type = other DNA
aatgtatccgaatggcggaat

SEQ ID NO: 34131 - DNA, 21 bp, synthetic construct
  source 1..21: mol_type = other DNA
catgacgatttcaccgtcatg

SEQ ID NO: 34132 - DNA, 21 bp, synthetic construct
  source 1..21: mol_type = other DNA
cgttcgtatgatacctatccg

SEQ ID NO: 34133 - DNA, 21 bp, synthetic construct
  source 1..21: mol_type = other DNA
gactggcatggtttgatagct

SEQ ID NO: 34134 - DNA, 21 bp, synthetic construct
  source 1..21: mol_type = other DNA
gtgcctgacgctgttcgctgg

SEQ ID NO: 34135 - DNA, 21 bp, synthetic construct
  source 1..21: mol_type = other DNA
ggcgacgcgttatcgcactgg

SEQ ID NO: 34136 - DNA, 21 bp, synthetic construct
  source 1..21: mol_type = other DNA
gatatggcgtcaatgaagtgg

SEQ ID NO: 34137 - DNA, 21 bp, synthetic construct
  source 1..21: mol_type = other DNA
aacaaatcggagggcgcttgt

SEQ ID NO: 34138 - DNA, 21 bp, synthetic construct
  source 1..21: mol_type = other DNA
tggttcagcggtatcacggag

SEQ ID NO: 34139 - DNA, 21 bp, synthetic construct
  source 1..21: mol_type = other DNA
ccctttgccaggtcagctgaa

SEQ ID NO: 34140 - DNA, 21 bp, synthetic construct
  source 1..21: mol_type = other DNA
agtgggaaatgcgcggcaacc

SEQ ID NO: 34141 - DNA, 21 bp, synthetic construct
  source 1..21: mol_type = other DNA
tttttttcaggacgccatgaa

SEQ ID NO: 34142 - DNA, 21 bp, synthetic construct
  source 1..21: mol_type = other DNA
tacagccgccatggaatcaac

SEQ ID NO: 34143 - DNA, 21 bp, synthetic construct
  source 1..21: mol_type = other DNA
tattggtctgcaaaattagac

SEQ ID NO: 34144 - DNA, 21 bp, synthetic construct
  source 1..21: mol_type = other DNA
tacgcccggatgggcaacaat

SEQ ID NO: 34145 - DNA, 21 bp, synthetic construct
  source 1..21: mol_type = other DNA
atgacggtcgattgctctagg

SEQ ID NO: 34146 - DNA, 21 bp, synthetic construct
  source 1..21: mol_type = other DNA
tgtaaaccgccgttcgttgcc

SEQ ID NO: 34147 - DNA, 21 bp, synthetic construct
  source 1..21: mol_type = other DNA
ttctacagtggtgttaaggag

SEQ ID NO: 34148 - DNA, 21 bp, synthetic construct
  source 1..21: mol_type = other DNA
tattggtcagggactagggcc

SEQ ID NO: 34149 - DNA, 21 bp, synthetic construct
  source 1..21: mol_type = other DNA
tattcaaagtcgaacgagaac

SEQ ID NO: 34150 - DNA, 21 bp, synthetic construct
  source 1..21: mol_type = other DNA
gacgggtatagcggtagagac

SEQ ID NO: 34151 - DNA, 21 bp, synthetic construct
  source 1..21: mol_type = other DNA
accgacggatatagtcgatat

SEQ ID NO: 34152 - DNA, 21 bp, synthetic construct
  source 1..21: mol_type = other DNA
gcgatgggagatagagggtgg

SEQ ID NO: 34153 - DNA, 21 bp, synthetic construct
  source 1..21: mol_type = other DNA
gttgggataaactgcaaggag

SEQ ID NO: 34154 - DNA, 21 bp, synthetic construct
  source 1..21: mol_type = other DNA
tgtaataaaatgatgaccgcg

SEQ ID NO: 34155 - DNA, 21 bp, synthetic construct
  source 1..21: mol_type = other DNA
tggaacagcacaaacggggtt

SEQ ID NO: 34156 - DNA, 21 bp, synthetic construct
  source 1..21: mol_type = other DNA
ggaggtggtactgtacgctgg

SEQ ID NO: 34157 - DNA, 21 bp, synthetic construct
  source 1..21: mol_type = other DNA
tactttaccggacgacccatg

SEQ ID NO: 34158 - DNA, 21 bp, synthetic construct
  source 1..21: mol_type = other DNA
tgtaagccaaactcaggtggc

SEQ ID NO: 34159 - DNA, 21 bp, synthetic construct
  source 1..21: mol_type = other DNA
ggatcagacactagcagatgg

SEQ ID NO: 34160 - DNA, 21 bp, synthetic construct
  source 1..21: mol_type = other DNA
ttgtcaaaaattggaacgaac

SEQ ID NO: 34161 - DNA, 21 bp, synthetic construct
  source 1..21: mol_type = other DNA
tggacagggatgtgcaaggct

SEQ ID NO: 34162 - DNA, 21 bp, synthetic construct
  source 1..21: mol_type = other DNA
tgtgcaccttacttacatagc

SEQ ID NO: 34163 - DNA, 21 bp, synthetic construct
  source 1..21: mol_type = other DNA
ggggtcgaaagcgtcaggtgg

SEQ ID NO: 34164 - DNA, 21 bp, synthetic construct
  source 1..21: mol_type = other DNA
tatagcaagcaaaattcgaat

SEQ ID NO: 34165 - DNA, 21 bp, synthetic construct
  source 1..21: mol_type = other DNA
cggaacgagtttcagtcatat

SEQ ID NO: 34166 - DNA, 21 bp, synthetic construct
  source 1..21: mol_type = other DNA
accaataacgcgaaggattgt

SEQ ID NO: 34167 - DNA, 21 bp, synthetic construct
  source 1..21: mol_type = other DNA
agagatgactttgtatcgttc

SEQ ID NO: 34168 - DNA, 21 bp, synthetic construct
  source 1..21: mol_type = other DNA
tattggtcagagattcgtgca

SEQ ID NO: 34169 - DNA, 21 bp, synthetic construct
  source 1..21: mol_type = other DNA
tgtaacaagccacagactgcc

SEQ ID NO: 34170 - DNA, 21 bp, synthetic construct
  source 1..21: mol_type = other DNA
actaatcgagaaggagagtgt

SEQ ID NO: 34171 - DNA, 21 bp, synthetic construct
  source 1..21: mol_type = other DNA
ttgagtaaggctaacataaat

SEQ ID NO: 34172 - DNA, 21 bp, synthetic construct
  source 1..21: mol_type = other DNA
ctagcgaaaactgcatgcaac

SEQ ID NO: 34173 - DNA, 21 bp, synthetic construct
  source 1..21: mol_type = other DNA
tgtaaacccgtgcctccagaa

SEQ ID NO: 34174 - DNA, 21 bp, synthetic construct
  source 1..21: mol_type = other DNA
tgccaaagcaaaaatggagtg

SEQ ID NO: 34175 - DNA, 21 bp, synthetic construct
  source 1..21: mol_type = other DNA
aggaattacgatacgtatccc

SEQ ID NO: 34176 - DNA, 21 bp, synthetic construct
  source 1..21: mol_type = other DNA
tttgcgcgctcaggtgcaaat

SEQ ID NO: 34177 - DNA, 21 bp, synthetic construct
  source 1..21: mol_type = other DNA
tattggtccggcaccgtaaaa

SEQ ID NO: 34178 - DNA, 21 bp, synthetic construct
  source 1..21: mol_type = other DNA
gcggatggagtgtcgaagtgg

SEQ ID NO: 34179 - DNA, 21 bp, synthetic construct
  source 1..21: mol_type = other DNA
tacgctcgactcagcataaac

SEQ ID NO: 34180 - DNA, 21 bp, synthetic construct
  source 1..21: mol_type = other DNA
tattacacggggatcagcgaa

SEQ ID NO: 34181 - DNA, 21 bp, synthetic construct
  source 1..21: mol_type = other DNA
ttctcaacgcactgctgtgca

SEQ ID NO: 34182 - DNA, 21 bp, synthetic construct
  source 1..21: mol_type = other DNA
ttttccaggttgaatggaaac

SEQ ID NO: 34183 - DNA, 21 bp, synthetic construct
  source 1..21: mol_type = other DNA
gacatgcgcgatcatcgctgg

SEQ ID NO: 34184 - DNA, 21 bp, synthetic construct
  source 1..21: mol_type = other DNA
aaggatgactggaactcgttt

SEQ ID NO: 34185 - DNA, 21 bp, synthetic construct
  source 1..21: mol_type = other DNA
atcttgaagtcttgcccgata

SEQ ID NO: 34186 - DNA, 21 bp, synthetic construct
  source 1..21: mol_type = other DNA
ttctggacgggcatgcgtgag

SEQ ID NO: 34187 - DNA, 21 bp, synthetic construct
  source 1..21: mol_type = other DNA
tatgattacgatgcatatccc

SEQ ID NO: 34188 - DNA, 21 bp, synthetic construct
  source 1..21: mol_type = other DNA
cgatctgaatttaggagttac

SEQ ID NO: 34189 - DNA, 21 bp, synthetic construct
  source 1..21: mol_type = other DNA
tggcttaagtctcaagggaac

SEQ ID NO: 34190 - DNA, 21 bp, synthetic construct
  source 1..21: mol_type = other DNA
tactgggggggtattccagac

SEQ ID NO: 34191 - DNA, 21 bp, synthetic construct
  source 1..21: mol_type = other DNA
tatagtcggatgaatcacaac

SEQ ID NO: 34192 - DNA, 21 bp, synthetic construct
  source 1..21: mol_type = other DNA
agaactccaacgtgtaaggaa

SEQ ID NO: 34193 - DNA, 21 bp, synthetic construct
  source 1..21: mol_type = other DNA
tatgcccgcttatcccctatg

SEQ ID NO: 34194 - DNA, 21 bp, synthetic construct
  source 1..21: mol_type = other DNA
tactgggggggggtaaccgcc

SEQ ID NO: 34195 - DNA, 21 bp, synthetic construct
  source 1..21: mol_type = other DNA
tgcaaaccgggggctggcatc

SEQ ID NO: 34196 - DNA, 21 bp, synthetic construct
  source 1..21: mol_type = other DNA
atgacttacgactcatatgat

SEQ ID NO: 34197 - DNA, 21 bp, synthetic construct
  source 1..21: mol_type = other DNA
atgtcacgcgtatcaaataac

SEQ ID NO: 34198 - DNA, 21 bp, synthetic construct
  source 1..21: mol_type = other DNA
cacggtagcactaatggcaaa

SEQ ID NO: 34199 - DNA, 21 bp, synthetic construct
  source 1..21: mol_type = other DNA
gtgttaagcagcgtaagttgg

SEQ ID NO: 34200 - DNA, 21 bp, synthetic construct
  source 1..21: mol_type = other DNA
tatagccgcgtctcggacacc

SEQ ID NO: 34201 - DNA, 21 bp, synthetic construct
  source 1..21: mol_type = other DNA
tacacgagacttaacccgatg

SEQ ID NO: 34202 - DNA, 21 bp, synthetic construct
  source 1..21: mol_type = other DNA
ggtaatgaggccggtaagtgc

SEQ ID NO: 34203 - DNA, 21 bp, synthetic construct
  source 1..21: mol_type = other DNA
tgcaagcctccagtcgacgcc

SEQ ID NO: 34204 - DNA, 21 bp, synthetic construct
  source 1..21: mol_type = other DNA
tatatgaagtacgatacgcag

SEQ ID NO: 34205 - DNA, 21 bp, synthetic construct
  source 1..21: mol_type = other DNA
tattggagcgggagagcggat

SEQ ID NO: 34206 - DNA, 21 bp, synthetic construct
  source 1..21: mol_type = other DNA
tactcgcgttcaaacccgaac

SEQ ID NO: 34207 - DNA, 21 bp, synthetic construct
  source 1..21: mol_type = other DNA
tacttctccggcatgacgtca

SEQ ID NO: 34208 - DNA, 21 bp, synthetic construct
  source 1..21: mol_type = other DNA
cgcctggagagtatcagctgg

SEQ ID NO: 34209 - DNA, 21 bp, synthetic construct
  source 1..21: mol_type = other DNA
ggctctggcaaccagaggtgg

SEQ ID NO: 34210 - DNA, 21 bp, synthetic construct
  source 1..21: mol_type = other DNA
tactcgcgccacaactcgaat

SEQ ID NO: 34211 - DNA, 21 bp, synthetic construct
  source 1..21: mol_type = other DNA
tgtaaacttttaggtaaagat

SEQ ID NO: 34212 - DNA, 21 bp, synthetic construct
  source 1..21: mol_type = other DNA
tgcaagaccagccccctgggc

SEQ ID NO: 34213 - DNA, 21 bp, synthetic construct
  source 1..21: mol_type = other DNA
atgcaccgcctacaagaggat

SEQ ID NO: 34214 - DNA, 21 bp, synthetic construct
  source 1..21: mol_type = other DNA
tacgctagaatgggcgctaat

SEQ ID NO: 34215 - DNA, 21 bp, synthetic construct
  source 1..21: mol_type = other DNA
tattctagacatggggttaac

SEQ ID NO: 34216 - DNA, 21 bp, synthetic construct
  source 1..21: mol_type = other DNA
ggtagtgaattccgctcgtgg

SEQ ID NO: 34217 - DNA, 21 bp, synthetic construct
  source 1..21: mol_type = other DNA
tacgtgcgattcgacaataac

SEQ ID NO: 34218 - DNA, 21 bp, synthetic construct
  source 1..21: mol_type = other DNA
gggtgtggcacgaagattggg

SEQ ID NO: 34219 - DNA, 21 bp, synthetic construct
  source 1..21: mol_type = other DNA
tggtggcatgggaaaccagac

SEQ ID NO: 34220 - DNA, 21 bp, synthetic construct
  source 1..21: mol_type = other DNA
caatatgccagaagcatgatg

SEQ ID NO: 34221 - DNA, 21 bp, synthetic construct
  source 1..21: mol_type = other DNA
tgcaagattccagaaaaagtc

SEQ ID NO: 34222 - DNA, 21 bp, synthetic construct
  source 1..21: mol_type = other DNA
ttctcccggcaaaactacaac

SEQ ID NO: 34223 - DNA, 21 bp, synthetic construct
  source 1..21: mol_type = other DNA
ctctggaacggtacaccttca

SEQ ID NO: 34224 - DNA, 21 bp, synthetic construct
  source 1..21: mol_type = other DNA
cgcggagggagcagtgggtgg

SEQ ID NO: 34225 - DNA, 21 bp, synthetic construct
  source 1..21: mol_type = other DNA
atgactggcacacagtgcttg

SEQ ID NO: 34226 - DNA, 21 bp, synthetic construct
  source 1..21: mol_type = other DNA
tactggagcggtatcccacca

SEQ ID NO: 34227 - DNA, 21 bp, synthetic construct
  source 1..21: mol_type = other DNA
ttatcgaggattaattttaac

SEQ ID NO: 34228 - DNA, 21 bp, synthetic construct
  source 1..21: mol_type = other DNA
cgcgaccagttcagcacgtat

SEQ ID NO: 34229 - DNA, 21 bp, synthetic construct
  source 1..21: mol_type = other DNA
tatgtcaagacggatatgtat

SEQ ID NO: 34230 - DNA, 21 bp, synthetic construct
  source 1..21: mol_type = other DNA
tgtaagggtttgaaggtagaa

SEQ ID NO: 34231 - DNA, 21 bp, synthetic construct
  source 1..21: mol_type = other DNA
tattccagggagggtcctaat

SEQ ID NO: 34232 - DNA, 21 bp, synthetic construct
  source 1..21: mol_type = other DNA
tattcaaggactaacacaaat

SEQ ID NO: 34233 - DNA, 21 bp, synthetic construct
  source 1..21: mol_type = other DNA
tactctagaatgaacaataat

SEQ ID NO: 34234 - DNA, 21 bp, synthetic construct
  source 1..21: mol_type = other DNA
cgtaatggtacgtcatcttgg

SEQ ID NO: 34235 - DNA, 21 bp, synthetic construct
  source 1..21: mol_type = other DNA
cagagtaaagctagtgaatgt

SEQ ID NO: 34236 - DNA, 21 bp, synthetic construct
  source 1..21: mol_type = other DNA
tacgctagagggagttgtgac

SEQ ID NO: 34237 - DNA, 21 bp, synthetic construct
  source 1..21: mol_type = other DNA
tattcccggcatggaatgaat

SEQ ID NO: 34238 - DNA, 21 bp, synthetic construct
  source 1..21: mol_type = other DNA
tttagtagagccggacaaaac

SEQ ID NO: 34239 - DNA, 21 bp, synthetic construct
  source 1..21: mol_type = other DNA
ccgttcgctcgcagtgccgag

SEQ ID NO: 34240 - DNA, 21 bp, synthetic construct
  source 1..21: mol_type = other DNA
tatagccgtattaaccttaac

SEQ ID NO: 34241 - DNA, 21 bp, synthetic construct
  source 1..21: mol_type = other DNA
cacatgagtacaaacggggtc

SEQ ID NO: 34242 - DNA, 21 bp, synthetic construct
  source 1..21: mol_type = other DNA
ggaggcgagagtgtgaggtgg

SEQ ID NO: 34243 - DNA, 21 bp, synthetic construct
  source 1..21: mol_type = other DNA
tggttcagtggaagagtagaa

SEQ ID NO: 34244 - DNA, 21 bp, synthetic construct
  source 1..21: mol_type = other DNA
tgtcagtcgaaaacaggacac

SEQ ID NO: 34245 - DNA, 21 bp, synthetic construct
  source 1..21: mol_type = other DNA
ttttcaagacaaaacttcaac

SEQ ID NO: 34246 - DNA, 21 bp, synthetic construct
  source 1..21: mol_type = other DNA
ttttttactggtgtcctagcc

SEQ ID NO: 34247 - DNA, 21 bp, synthetic construct
  source 1..21: mol_type = other DNA
gtaatgggtgctagggactgg

SEQ ID NO: 34248 - DNA, 21 bp, synthetic construct
  source 1..21: mol_type = other DNA
tggaatccgatgtgtaaagct

SEQ ID NO: 34249 - DNA, 21 bp, synthetic construct
  source 1..21: mol_type = other DNA
gtgttatcatccgtcagttgg

SEQ ID NO: 34250 - DNA, 21 bp, synthetic construct
  source 1..21: mol_type = other DNA
gtagagtttgagtggtcggat

SEQ ID NO: 34251 - DNA, 21 bp, synthetic construct
  source 1..21: mol_type = other DNA
tactggtcgcatgtcaaggaa

SEQ ID NO: 34252 - DNA, 21 bp, synthetic construct
  source 1..21: mol_type = other DNA
caccctagtcgttgtcctgag

SEQ ID NO: 34253 - DNA, 21 bp, synthetic construct
  source 1..21: mol_type = other DNA
tatttcagtgggactaacaat

SEQ ID NO: 34254 - DNA, 21 bp, synthetic construct
  source 1..21: mol_type = other DNA
accaaagagcaaggagactgc

SEQ ID NO: 34255 - DNA, 21 bp, synthetic construct
  source 1..21: mol_type = other DNA
tattggtctcaagtcattgag

SEQ ID NO: 34256 - DNA, 21 bp, synthetic construct
  source 1..21: mol_type = other DNA
taccaaagcagcaatggggta

SEQ ID NO: 34257 - DNA, 21 bp, synthetic construct
  source 1..21: mol_type = other DNA
ttgccaaaggacaagtgtcct

SEQ ID NO: 34258 - DNA, 21 bp, synthetic construct
  source 1..21: mol_type = other DNA
tactggacgggccaacttgcg

SEQ ID NO: 34259 - DNA, 21 bp, synthetic construct
  source 1..21: mol_type = other DNA
ggcggaggcagctcaaagtgg

SEQ ID NO: 34260 - DNA, 21 bp, synthetic construct
  source 1..21: mol_type = other DNA
tatgccaggcacgggaataac

SEQ ID NO: 34261 - DNA, 21 bp, synthetic construct
  source 1..21: mol_type = other DNA
tattacactggggttagagac

SEQ ID NO: 34262 - DNA, 21 bp, synthetic construct
  source 1..21: mol_type = other DNA
ttcttcagcgggcggctggac

SEQ ID NO: 34263 - DNA, 21 bp, synthetic construct
  source 1..21: mol_type = other DNA
aaagatgattacgtaccgtgg

SEQ ID NO: 34264 - DNA, 21 bp, synthetic construct
  source 1..21: mol_type = other DNA
tatgctcggggcagcaacaat

SEQ ID NO: 34265 - DNA, 21 bp, synthetic construct
  source 1..21: mol_type = other DNA
aaagatgattacgtttttttt

SEQ ID NO: 34266 - DNA, 21 bp, synthetic construct
  source 1..21: mol_type = other DNA
tgcaagccgggacagctcccg

SEQ ID NO: 34267 - DNA, 21 bp, synthetic construct
  source 1..21: mol_type = other DNA
agggaggaggaagtattcccg

SEQ ID NO: 34268 - DNA, 21 bp, synthetic construct
  source 1..21: mol_type = other DNA
tatgcgaagggtggtcataac

SEQ ID NO: 34269 - DNA, 21 bp, synthetic construct
  source 1..21: mol_type = other DNA
gtccccatgctcggggcaggg

SEQ ID NO: 34270 - DNA, 21 bp, synthetic construct
  source 1..21: mol_type = other DNA
tatgccaggatgggcttaaat

SEQ ID NO: 34271 - DNA, 21 bp, synthetic construct
  source 1..21: mol_type = other DNA
tactttagtggccgtgaggat

SEQ ID NO: 34272 - DNA, 21 bp, synthetic construct
  source 1..21: mol_type = other DNA
tacctaaaaaatgatcctacc

SEQ ID NO: 34273 - DNA, 21 bp, synthetic construct
  source 1..21: mol_type = other DNA
tatcatgcattgaacaagcct

SEQ ID NO: 34274 - DNA, 21 bp, synthetic construct
  source 1..21: mol_type = other DNA
ggagatgagtacctgatgttc

SEQ ID NO: 34275 - DNA, 21 bp, synthetic construct
  source 1..21: mol_type = other DNA
tacgccaagcaggggttcaac

SEQ ID NO: 34276 - DNA, 21 bp, synthetic construct
  source 1..21: mol_type = other DNA
tgtaactcccagaaactcggc

SEQ ID NO: 34277 - DNA, 21 bp, synthetic construct
  source 1..21: mol_type = other DNA
tatgcaaggggcagcatcaac

SEQ ID NO: 34278 - DNA, 21 bp, synthetic construct
  source 1..21: mol_type = other DNA
gatttaaggaccgccgcttgg

SEQ ID NO: 34279 - DNA, 21 bp, synthetic construct
  source 1..21: mol_type = other DNA
ggcggtacaggaagttcctgg

SEQ ID NO: 34280 - DNA, 21 bp, synthetic construct
  source 1..21: mol_type = other DNA
tgtaacgggccaatgacggcc

SEQ ID NO: 34281 - DNA, 21 bp, synthetic construct
  source 1..21: mol_type = other DNA
gaatcagagttcaagacctac

SEQ ID NO: 34282 - DNA, 21 bp, synthetic construct
  source 1..21: mol_type = other DNA
tatgctagaaattcagataac

SEQ ID NO: 34283 - DNA, 21 bp, synthetic construct
  source 1..21: mol_type = other DNA
tatggcgtcggtacgtggagt

SEQ ID NO: 34284 - DNA, 21 bp, synthetic construct
  source 1..21: mol_type = other DNA
ggatttgaaactgtacgctgg

SEQ ID NO: 34285 - DNA, 21 bp, synthetic construct
  source 1..21: mol_type = other DNA
tattttagtggcagagaggag

SEQ ID NO: 34286 - DNA, 21 bp, synthetic construct
  source 1..21: mol_type = other DNA
aggggtgatagcagtcgctgg

SEQ ID NO: 34287 - DNA, 21 bp, synthetic construct
  source 1..21: mol_type = other DNA
tgcaaaaagggcagtttggaa

SEQ ID NO: 34288 - DNA, 21 bp, synthetic construct
  source 1..21: mol_type = other DNA
tggaccgagggaacgaagtat

SEQ ID NO: 34289 - DNA, 21 bp, synthetic construct
  source 1..21: mol_type = other DNA
tgtacaagtaaaagcggtcac

SEQ ID NO: 34290 - DNA, 21 bp, synthetic construct
  source 1..21: mol_type = other DNA
tacttccagggaacctacaac

SEQ ID NO: 34291 - DNA, 21 bp, synthetic construct
  source 1..21: mol_type = other DNA
agggaaggcaccagtttatgg

SEQ ID NO: 34292 - DNA, 21 bp, synthetic construct
  source 1..21: mol_type = other DNA
ccttggagcagtaatggcgta

SEQ ID NO: 34293 - DNA, 21 bp, synthetic construct
  source 1..21: mol_type = other DNA
cttgctaagaacggaatcaat

SEQ ID NO: 34294 - DNA, 21 bp, synthetic construct
  source 1..21: mol_type = other DNA
taccacaggcaaaaccccatg

SEQ ID NO: 34295 - DNA, 21 bp, synthetic construct
  source 1..21: mol_type = other DNA
tgtgggaaagcccatagctct

SEQ ID NO: 34296 - DNA, 21 bp, synthetic construct
  source 1..21: mol_type = other DNA
ttcttctcgggtaggatcgat

SEQ ID NO: 34297 - DNA, 21 bp, synthetic construct
  source 1..21: mol_type = other DNA
agttgtaagccttgcccgggg

SEQ ID NO: 34298 - DNA, 21 bp, synthetic construct
  source 1..21: mol_type = other DNA
tggttctcggggatccaggaa

SEQ ID NO: 34299 - DNA, 21 bp, synthetic construct
  source 1..21: mol_type = other DNA
tacagtcgactcgattatgat

SEQ ID NO: 34300 - DNA, 21 bp, synthetic construct
  source 1..21: mol_type = other DNA
tattaccatggggtcagagac

SEQ ID NO: 34301 - DNA, 21 bp, synthetic construct
  source 1..21: mol_type = other DNA
attgatgcggcgaataagtgc

SEQ ID NO: 34302 - DNA, 21 bp, synthetic construct
  source 1..21: mol_type = other DNA
tattggaacgggatacaggcc

SEQ ID NO: 34303 - DNA, 21 bp, synthetic construct
  source 1..21: mol_type = other DNA
tatagtaggttaagccctgag

SEQ ID NO: 34304 - DNA, 21 bp, synthetic construct
  source 1..21: mol_type = other DNA
agggaggatcacacctcgtgg

SEQ ID NO: 34305 - DNA, 21 bp, synthetic construct
  source 1..21: mol_type = other DNA
tgcaaaacgaaatctcaggat

SEQ ID NO: 34306 - DNA, 21 bp, synthetic construct
  source 1..21: mol_type = other DNA
gtcatgagcagccaaggatgg

SEQ ID NO: 34307 - DNA, 21 bp, synthetic construct
  source 1..21: mol_type = other DNA
tacagccgctcaggcggtaac

SEQ ID NO: 34308 - DNA, 21 bp, synthetic construct
  source 1..21: mol_type = other DNA
tacagtcgtgctaacttcaac

SEQ ID NO: 34309 - DNA, 21 bp, synthetic construct
  source 1..21: mol_type = other DNA
cagaagacgaacacagggtgc

SEQ ID NO: 34310 - DNA, 21 bp, synthetic construct
  source 1..21: mol_type = other DNA
tgtacgagcaagacgggtgag

SEQ ID NO: 34311 - DNA, 21 bp, synthetic construct
  source 1..21: mol_type = other DNA
gacatgacaagttccgtctgg

SEQ ID NO: 34312 - DNA, 21 bp, synthetic construct
  source 1..21: mol_type = other DNA
tattggagcgcggtcgtggct

SEQ ID NO: 34313 - DNA, 21 bp, synthetic construct
  source 1..21: mol_type = other DNA
gtaaaacgcagtgatgagtgt

SEQ ID NO: 34314 - DNA, 21 bp, synthetic construct
  source 1..21: mol_type = other DNA
agattaatggatagctacccc

SEQ ID NO: 34315 - DNA, 21 bp, synthetic construct
  source 1..21: mol_type = other DNA
aactggagcactaacggtgtt

SEQ ID NO: 34316 - DNA, 21 bp, synthetic construct
  source 1..21: mol_type = other DNA
tgtaaaagcagctgcaagccc

SEQ ID NO: 34317 - DNA, 21 bp, synthetic construct
  source 1..21: mol_type = other DNA
tactactcaggtgtaataatg

SEQ ID NO: 34318 - DNA, 21 bp, synthetic construct
  source 1..21: mol_type = other DNA
tactgggctggaaagtatgac

SEQ ID NO: 34319 - DNA, 21 bp, synthetic construct
  source 1..21: mol_type = other DNA
tgtcttaagatgtgcccaccc

SEQ ID NO: 34320 - DNA, 21 bp, synthetic construct
  source 1..21: mol_type = other DNA
ttcttcaccggggttttggca

SEQ ID NO: 34321 - DNA, 21 bp, synthetic construct
  source 1..21: mol_type = other DNA
tgtaaggcgcagacgccgggg

SEQ ID NO: 34322 - DNA, 21 bp, synthetic construct
  source 1..21: mol_type = other DNA
tgcaaacccgactccagatgg

SEQ ID NO: 34323 - DNA, 21 bp, synthetic construct
  source 1..21: mol_type = other DNA
tcacgacctacttgcccggcc

SEQ ID NO: 34324 - DNA, 21 bp, synthetic construct
  source 1..21: mol_type = other DNA
tgccgaccacaagctggagcc

SEQ ID NO: 34325 - DNA, 21 bp, synthetic construct
  source 1..21: mol_type = other DNA
tactcaagacaaggtgggaat

SEQ ID NO: 34326 - DNA, 21 bp, synthetic construct
  source 1..21: mol_type = other DNA
tgcactagcaaacaagggcac

SEQ ID NO: 34327 - DNA, 21 bp, synthetic construct
  source 1..21: mol_type = other DNA
tgtaaaccgatgactatagat

SEQ ID NO: 34328 - DNA, 21 bp, synthetic construct
  source 1..21: mol_type = other DNA
cgtgatcaattttcgacgtac

SEQ ID NO: 34329 - DNA, 21 bp, synthetic construct
  source 1..21: mol_type = other DNA
tacggtaaccagagggagtgt

SEQ ID NO: 34330 - DNA, 21 bp, synthetic construct
  source 1..21: mol_type = other DNA
cgtgacggatcatgtaaagca

SEQ ID NO: 34331 - DNA, 21 bp, synthetic construct
  source 1..21: mol_type = other DNA
aaagacgactaccaaacttgg

SEQ ID NO: 34332 - DNA, 21 bp, synthetic construct
  source 1..21: mol_type = other DNA
tgcatgtctaagactggtcat

SEQ ID NO: 34333 - DNA, 21 bp, synthetic construct
  source 1..21: mol_type = other DNA
gtggatagcacgtgtcacgcc

SEQ ID NO: 34334 - DNA, 21 bp, synthetic construct
  source 1..21: mol_type = other DNA
tactttcaggggattcatgaa

SEQ ID NO: 34335 - DNA, 21 bp, synthetic construct
  source 1..21: mol_type = other DNA
ggcaaagataaagcggattgt

SEQ ID NO: 34336 - DNA, 21 bp, synthetic construct
  source 1..21: mol_type = other DNA
tattttgcaggagtaatgaac

SEQ ID NO: 34337 - DNA, 21 bp, synthetic construct
  source 1..21: mol_type = other DNA
tttttccacggaaaggttgaa

SEQ ID NO: 34338 - DNA, 21 bp, synthetic construct
  source 1..21: mol_type = other DNA
caatcaggaaagaatgagtgc

SEQ ID NO: 34339 - DNA, 21 bp, synthetic construct
  source 1..21: mol_type = other DNA
ggtggctcgacctcgagttgg

SEQ ID NO: 34340 - DNA, 21 bp, synthetic construct
  source 1..21: mol_type = other DNA
aatgccaaaaacgaagggtgc

SEQ ID NO: 34341 - DNA, 21 bp, synthetic construct
  source 1..21: mol_type = other DNA
tgtaaacccatctgtgccggc

SEQ ID NO: 34342 - DNA, 21 bp, synthetic construct
  source 1..21: mol_type = other DNA
atacagtcgtcaaatggagtg

SEQ ID NO: 34343 - DNA, 21 bp, synthetic construct
  source 1..21: mol_type = other DNA
gtaccagattacgtcgcgtat

SEQ ID NO: 34344 - DNA, 21 bp, synthetic construct
  source 1..21: mol_type = other DNA
ataccagaagtgtgttgcggc

SEQ ID NO: 34345 - DNA, 21 bp, synthetic construct
  source 1..21: mol_type = other DNA
ctagctaaagctggttgcaac

SEQ ID NO: 34346 - DNA, 21 bp, synthetic construct
  source 1..21: mol_type = other DNA
cgaggcgaattttgtggaggg

SEQ ID NO: 34347 - DNA, 21 bp, synthetic construct
  source 1..21: mol_type = other DNA
tgtacaggtaatagctccaaa

SEQ ID NO: 34348 - DNA, 21 bp, synthetic construct
  source 1..21: mol_type = other DNA
tacagtaagtcgggcgaaaat

SEQ ID NO: 34349 - DNA, 21 bp, synthetic construct
  source 1..21: mol_type = other DNA
acatgggacggtttgatacct

SEQ ID NO: 34350 - DNA, 21 bp, synthetic construct
  source 1..21: mol_type = other DNA
agcatggattctcgatcatgg

SEQ ID NO: 34351 - DNA, 21 bp, synthetic construct
  source 1..21: mol_type = other DNA
caagatggaagttcatcctgg

SEQ ID NO: 34352 - DNA, 21 bp, synthetic construct
  source 1..21: mol_type = other DNA
tatagtcggcttggaggcgat

SEQ ID NO: 34353 - DNA, 21 bp, synthetic construct
  source 1..21: mol_type = other DNA
tattcgcgacaaggtaacaat

(The sequence listing continues in the following parts.)